(19) United States
(12) Patent Application Publication
(10) Pub. No.: US 2012/0159664 A1
(43) Pub. Date: Jun. 21, 2012

(54) Transgenic Plants With Enhanced Agronomic Traits

(76) Inventors: Mark S. Abad, Webster Groves, MO (US); Mary Fernandes, St. Louis, MO (US); Barry Goldman, St. Louis, MO (US)

(21) Appl. No.: 13/289,012

(22) Filed: Nov. 4, 2011

Related U.S. Application Data
(63) Continuation of application No. 12/074,197, filed on Feb. 29, 2008, now abandoned.

(30) Foreign Application Priority Data
Aug. 30, 2005 (US) PCT/US2006/033989

(51) Int. Cl. A01H 5/00; A01H 5/10; A01C 7/00; A01H 1/02; G01N 33/53; A01G 1/00; C12N 5/10; C12N 15/82

(52) U.S. Cl. 800/260; 435/419; 800/298; 800/320.1; 800/312; 800/314; 800/320.3; 800/320.2; 800/278; 435/7.2; 47/58.1 FV

(57) ABSTRACT

This invention provides recombinant DNA for expression of proteins that are useful for imparting enhanced agronomic trait(s) to transgenic crop plants. Also provided by this invention is transgenic seed for growing a transgenic plant having recombinant DNA in its genome and exhibiting an enhance agronomic trait, i.e. enhanced nitrogen use efficiency, increased yield, enhanced water use efficiency, enhanced tolerance to cold stress and/or improved seed compositions. Also disclosed are methods for identifying such transgenic plants by screening for nitrogen use efficiency, yield, water use efficiency, growth under cold stress, and seed composition changes. This invention also discloses a method of identifying the target genes of a transcription factor.

### CROSS REFERENCE TO RELATED APPLICATIONS

[0001] This application claims benefit under 35 U.S.C. 119(e) of U.S. provisional application Ser. No. 60/713,150, filed Aug. 30, 2005, and International application PCT/US2006/033989, both incorporated herein by reference.

### INCORPORATION OF SEQUENCE LISTING

[0002] Two copies of the sequence listing (Copy 1 and Copy 2) and a computer readable form (CRF) of the sequence listing, all on CD-Rs, each containing the text file named “38-21(53948)A-_seqListing_amended_{—}02182008.txt”, which is 31.6 MB (measured in MS-WINDOWS) and was created on Feb. 28, 2008 are incorporated herein by reference.

### FIELD OF THE INVENTION

[0003] Disclosed herein are inventions in the field of plant genetics and developmental biology. More specifically, the present inventions provide transgenic seeds for crops, wherein the genome of said seed comprises recombinant DNA, the expression of which results in the production of transgenic plants with enhanced agronomic traits.

### SUMMARY OF THE INVENTION

[0004] This invention employs recombinant DNA for expression of proteins that are useful for imparting enhanced agronomic traits to the transgenic plants. Recombinant DNA in this invention is provided in a construct comprising a promoter that is functional in plant cells and that is operably linked to DNA that encodes a protein having at least one amino acid domain in a sequence that exceeds the Pfam gathering cutoff for amino acid sequence alignment with a protein domain family identified by a Pfam name in the group of Pfam domain names as identified in Table 11. In more specific embodiments of the invention the protein expressed in plant cells has an amino acid sequence with at least 90% identity to a consensus amino acid sequence in the group of consensus amino acid sequences consisting of the consensus amino acid sequence constructed for SEQ ID NO: 194 and homologs thereof listed in Table 7 through the consensus amino acid sequence constructed for SEQ ID NO: 386 and homologs thereof listed in Table 7. In even more specific embodiments of the invention the protein expressed in plant cells is a protein selected from the group of proteins identified in Table 1.

[0005] Other aspects of the invention are specifically directed to transgenic plant cells comprising the recombinant DNA of the invention, transgenic plants comprising a plurality of such plant cells, progeny transgenic seed, embryo and transgenic pollen from such plants. Such plant cells are selected from a population of transgenic plants regenerated from plant cells transformed with recombinant DNA and that express the protein by screening transgenic plants in the population for an enhanced trait as compared to control plants that do not have said recombinant DNA, where the enhanced trait is selected from group of enhanced traits consisting of enhanced water use efficiency, enhanced cold tolerance, increased yield, enhanced nitrogen use efficiency, enhanced seed protein and enhanced seed oil.

[0006] In yet another aspect of the invention the plant cells, plants, seeds, embryo and pollen further comprise DNA expressing a protein that provides tolerance from exposure to an herbicide applied at levels that are lethal to a wild type of said plant cell. Such tolerance is especially useful not only as an advantageous trait in such plants but is also useful in a selection step in the methods of the invention. In aspects of the invention the agent of such herbicide is a glyphosate, dicamba, or glufosinate compound.

[0007] Yet other aspects of the invention provide transgenic plants which are homozygous for the recombinant DNA and transgenic seed of the invention from corn, soybean, cotton, canola, alfalfa, wheat or rice plants.

[0008] In other important embodiments for practice of various aspects of the invention, the plants of this invention can be further enhanced with stacked traits, e.g., a crop having an enhanced agronomic trait resulting from expression of DNA disclosed herein, in combination with herbicide, disease, and/or pest resistance traits.

[0009] This invention also provides methods for manufacturing non-natural, transgenic seed that can be used to produce a crop of transgenic plants with an enhanced trait resulting from expression of stably-integrated, recombinant DNA for expressing a protein having at least one domain of amino acids in a sequence that exceeds the Pfam gathering cutoff for amino acid sequence alignment with a protein domain family identified by a Pfam name in the group of Pfam names identified in Table 11. More specifically the method comprises (a) screening a population of plants for an enhanced trait and a recombinant DNA, where individual plants in the population can exhibit the trait at a level less than, essentially the same as or greater than the level that the trait is exhibited in control plants which do not express the recombinant DNA, (b) selecting from the population one or more plants that exhibit the trait at a level greater than the level that said trait is exhibited in control plants, (c) verifying that the recombinant DNA is stably integrated in said selected plants, (d) analyzing tissue of a selected plant to determine the production of a protein having the function of a protein encoded by nucleotides in a sequence of one of SEQ ID NO:1-193; and (e) collecting seed from a selected plant. In one aspect of the invention the plants in the population further comprise DNA expressing a protein that provides tolerance to exposure to an herbicide applied at levels that are lethal to wild type plant cells and the selecting is effected by treating the population with the herbicide, e.g. a glyphosate, dicamba, or glufosinate compound. In another aspect of the invention the plants are selected by identifying plants with the enhanced trait. The methods are especially useful for manufacturing corn, soybean, cotton, alfalfa, wheat or rice seed.

[0010] Another aspect of the invention provides a method of producing hybrid corn seed comprising acquiring hybrid corn seed from a herbicide tolerant corn plant which also has stably-integrated, recombinant DNA comprising a promoter that is (a) functional in plant cells and (b) is operably linked to DNA that encodes a protein having at least one domain of amino acids in a sequence that exceeds the Pfam gathering cutoff for amino acid sequence alignment with a protein domain family identified by a Pfam name in the group of Pfam names identified in Table 11. The methods further comprise producing corn plants from said hybrid corn seed, wherein a fraction of the plants produced from said hybrid corn seed is homozygous for said recombinant DNA, a fraction of the plants produced from said hybrid corn seed is hemizygous for said recombinant DNA, and a fraction of the plants produced from said hybrid corn seed has none of said recombinant DNA; selecting corn plants which are homozygous and hemizygous for said recombinant DNA by treating with an herbicide; collecting seed from herbicide-treated-surviving corn plants and planting said seed to produce further progeny corn plants; repeating the selecting and collecting steps at least once to produce an inbred corn line; and crossing the inbred corn line with a second corn line to produce hybrid seed.

[0011] Another aspect of the invention provides a method of selecting a plant comprising plant cells of the invention by using an immunoreactive antibody to detect the presence of protein expressed by recombinant DNA in seed or plant tissue. Yet another aspect of the invention provides anti-counterfeit milled seed having, as an indication of origin, a plant cell of this invention.

[0012] Still other aspects of this invention relate to transgenic plants with enhanced water use efficiency or enhanced nitrogen use efficiency. For instance, this invention provides methods of growing a corn, cotton or soybean crop without irrigation water comprising planting seed having plant cells of the invention which are selected for enhanced water use efficiency. Alternatively methods comprise applying reduced irrigation water, e.g. providing up to 300 millimeters of ground water during the production of a corn crop. This invention also provides methods of growing a corn, cotton or soybean crop without added nitrogen fertilizer comprising planting seed having plant cells of the invention which are selected for enhanced nitrogen use efficiency.

### BRIEF DESCRIPTION OF FIGURES

[0013] FIG. 1-4 illustrate plasmid maps.

### DETAILED DESCRIPTION OF THE INVENTION

[0014] In the attached sequence listing:

[0015] SEQ ID NO:1-193 are nucleotide sequences of the coding strand of DNA for “genes” used in the recombinant DNA imparting an enhanced trait in plant cells, i.e. each represents a coding sequence for a protein;

[0016] SEQ ID NO:194-386 are amino acid sequences of the cognate protein of the “genes” with nucleotide coding sequence 1-193;

[0017] SEQ ID NO: 387-12580 are amino acid sequences of homologous proteins;

[0018] SEQ ID NO: 12581-12601 are nucleotide sequences of the elements in base plasmid vectors

[0019] SEQ ID NO: 12602 is a consensus amino acid sequence.

[0020] SEQ ID NO: 12603 is a nucleotide sequence of a base plasmid vector useful for corn transformation; and

[0021] SEQ ID NO: 12604 is a nucleotide sequence of a base plasmid vector useful for soybean transformation.

[0022] SEQ ID NO: 12605 is a nucleotide sequence of a base plasmid vector useful for cotton transformation.

[0023] SEQ ID NO: 12606 is the nucleotide sequence of plasmid PMON17730.

[0024] SEQ ID NO: 12607 is the nucleotide sequence of PHE0010424_PMON17730.

[0025] SEQ ID NO: 12608 is the consensus sequence of SEQ ID NO: 371 and 11 homologs

[0026] As used herein, a “transgenic plant” means a plant whose genome has been altered by the incorporation of exogenous DNA, e.g., by transformation as described herein. The term “transgenic plant” is used to refer to the plant produced from an original transformation event, or progeny from later generations or crosses of a plant so transformed, so long as the progeny contains the exogenous genetic material in its genome. “Exogenous DNA” means DNA, e.g., recombinant DNA, originating from or constructed outside of the plant including natural or artificial DNA derived from the host “transformed” organism of a different organism.

[0027] As used herein, “recombinant DNA” means DNA which has been a genetically engineered or constructed outside of a cell, including DNA containing naturally occurring DNA or cDNA, or synthetic DNA.

[0028] As used herein, a “functional portion” of DNA is that part which comprises an encoding region for a protein segment that is sufficient to provide the desired enhanced agronomic trait in plants transformed with the DNA activity. Where expression of protein is desired, a functional portion will generally comprise the entire coding region for the protein, although certain deletions, truncations, rearrangements and the like of the protein may also maintain, or in some cases improve, the desired activity. One skilled in the art is aware of methods to screen for such desired modifications and such functional portion of the protein is considered within the scope of the present invention.

[0029] As used herein, “consensus sequence” means an artificial, amino acid sequence of conserved parts of the proteins encoded by homologous genes, e.g., as determined by a CLUSTALW alignment of amino acid sequence of homolog proteins.

[0030] As used herein, “homolog” means a protein in a group of proteins that perform the same biological function, e.g., provide an enhanced agronomic trait in transgenic plants of this invention. Homologs are expressed by homologous genes which are genes that encode proteins with the same or similar biological function. Homologous genes may be generated by the event of speciation (see ortholog) or by the event of genetic duplication (see paralog). Orthologs refer to a set of homologous genes in different species that evolved from a common ancestral gene by specification. Normally, orthologs retain the same function in the course of evolution; and paralogs refer to a set of homologous genes in the same species that have diverged from each other as a consequence of genetic duplication. Thus, homologous genes can be from the same or a different organism. Homologous DNA includes naturally occurring and synthetic variants. For instance, degeneracy of the genetic code provides the possibility to substitute at least one base of the protein encoding sequence of a gene with a different base without causing the amino acid sequence of the polypeptide produced from the gene to be changed. Hence, a polynucleotide useful in the present invention may have any base sequence that has been changed from SEQ ID NO:1 through SEQ ID NO: 193 by substitution in accordance with degeneracy of the genetic code. Homologs are proteins which, when optimally aligned, has at least 60% identity (say at least 70% or 80% or 90% identity) over the full length of a protein identified herein, or a higher percent identity especially over a shorter functional part of the protein, e.g., 70% to 80 or 90% amino acid identity over a window of comparison comprising a functional part of the protein imparting the enhanced agronomic trait. Homologs include proteins with an amino acid sequence that has at least 90% identity to a consensus amino acid sequence of proteins and homologs disclosed herein.

[0031] Homologs can be identified by comparison of amino acid sequence, e.g., manually or by using known homology-based search algorithms such as those commonly known and referred to as BLAST, FASTA, and Smith-Waterman. A local sequence alignment program, e.g., BLAST, can be used to search a database of sequences to find similar sequences, and the summary Expectation value (E-value) used to measure the sequence base similarity. As a protein hit with the best E-value for a particular organism may not necessarily be an ortholog or the only ortholog, a reciprocal query is used in the present invention to filter hit sequences with significant E-values for ortholog identification. The reciprocal query entails search of the significant hits against a database of amino acid sequences from the base organism that are similar to the sequence of the query protein. A hit is a likely ortholog, when the reciprocal query's best hit is the query protein itself or a protein encoded by a duplicated gene after speciation. A further aspect of the invention comprises functional homolog proteins which differ in one or more amino acids from those of disclosed protein as the result of conservative amino acid substitutions, e.g., substitutions are among: acidic (negatively charged) amino acids such as aspartic acid and glutamic acid; basic (positively charged) amino acids such as arginine, histidine, and lysine; neutral polar amino acids such as glycine, serine, threonine, cysteine, tyrosine, asparagine, and glutamine; neutral nonpolar (hydrophobic) amino acids such as alanine, leucine, isoleucine, valine, proline, phenylalanine, tryptophan, and methionine; amino acids having aliphatic side chains such as glycine, alanine, valine, leucine, and isoleucine; amino acids having aliphatic-hydroxyl side chains such as serine and threonine; amino acids having amide-containing side chains such as asparagine and glutamine; amino acids having aromatic side chains such as phenylalanine, tyrosine, and tryptophan; amino acids having basic side chains such as lysine, arginine, and histidine; amino acids having sulfur-containing side chains such as cysteine and methionine; naturally conservative amino acids such as valine-leucine, valine-isoleucine, phenylalanine-tyrosine, lysine-arginine, alanine-valine, aspartic acid-glutamic acid, and asparagine-glutamine. A further aspect of the homologs encoded by DNA useful in the transgenic plants of the invention are those proteins which differ from a disclosed protein as the result of deletion or insertion of one or more amino acids in a native sequence.

[0032] As used herein, “transcription factor gene” refers to a gene that encodes a protein that binds to regulatory regions and is involved in control gene expression. Therefore, as used herein, a target gene refers to a gene whose expression is controlled by a transcription factor gene.

[0033] As used herein, “percent identity” means the extent to which two optimally aligned DNA or protein segments are invariant throughout a window of alignment of components, e.g., nucleotide sequence or amino acid sequence. An “identity fraction” for aligned segments of a test sequence and a reference sequence is the number of identical components which are shared by sequences of the two aligned segments divided by the total number of sequence components in the reference segment over a window of alignment which is the smaller of the full test sequence or the full reference sequence. “Percent identity” (“% identity”) is the identity fraction times 100.

[0034] As used herein “Pfam” refers to a large collection of multiple sequence alignments and hidden Markov models covering many common protein families, e.g. Pfam version 19.0 (December 2005) contains alignments and models for 8183 protein families and is based on the Swissprot 47.0 and SP-TrEMBL 30.0 protein sequence databases. See S. R. Eddy, “Profile Hidden Markov Models”, Bioinformatics 14:755-763, 1998. Pfam is currently maintained and updated by a Pfam Consortium. The alignments represent some evolutionary conserved structure that has implications for the protein's function. Profile hidden Markov models (profile HMMs) built from the Pfam alignments are useful for automatically recognizing that a new protein belongs to an existing protein family even if the homology by alignment appears to be low. Once one DNA is identified as encoding a protein which imparts an enhanced trait when expressed in transgenic plants, other DNA encoding proteins in the same protein family are identified by querying the amino acid sequence of protein encoded by candidate DNA against the Hidden Markov Model which characterizes the Pfam domain using HMMER software, a current version of which is provided in the appended computer listing. Candidate proteins meeting the gathering cutoff for the alignment of a particular Pfam are in the protein family and have cognate DNA that is useful in constructing recombinant DNA for the use in the plant cells of this invention. Hidden Markov Model databases for use with HMMER software in identifying DNA expressing protein in a common Pfam for recombinant DNA in the plant cells of this invention are also included in the appended computer listing. The HMMER software and Pfam databases are version 19.0 and were used to identify known domains in the proteins corresponding to amino acid sequence of SEQ ID NO: 194 through SEQ ID NO: 386. All DNA encoding proteins that have scores higher than the gathering cutoff disclosed in Table 11 by Pfam analysis disclosed herein can be used in recombinant DNA of the plant cells of this invention, e.g. for selecting transgenic plants having enhanced agronomic traits. The relevant Pfams for use in this invention, as more specifically disclosed below, are FAD_binding_{—}4, MtN3_slv, Homeobox, FAD_binding_{—}6, RWP-RK, PMEI, FAD_binding_{—}7, RRM_{—}1, Transaldolase, RNA_pol_L, WD40, U-box, Cyclin_N, Skp1, Redoxin, DZC, PBP, TPP_enzyme_M, CBFD_NFYB_HMF, TPP_enzyme_N, PFK, Caleosin, Iso_dh, Ribosomal_L18p, Metallophos, zf-A20, Ras, BBE, NAF, PLDc, DUF1242, Pkinase, C2, p450, Pyridoxal_deC, FBD, UPF0005, HEAT_PBS, GST_N, PEP-utilizers, Alpha-amylase, Amino_oxidase, SRF-TF, Phi_{—}1, Malic_M, Tryp_alpha_amyl, GSHPx, Miro, HSF-DNA-bind, DNA_photolyase, Sina, CTP_transf 2, Abhydrolase_{—}3, Chal_sti_synt_C, ACP_syn_III_C, ADH_zinc_N, CSD, Globin, GATase_{—}2, Amidohydro_{—}1, HLH, HALZ, Amidohydro_{—}3, Lactamase_B, HSP20, DAO, DUF296, AT_hook, AWPM-19, Dimerisation, Suc_Fer-like, Methyltransf_{—}2, Aminotran_{—}3, PHD, MMR_HSR₁, Aldo_ket_red, zf-AN1, malic, Fasciclin, UPF0057, DUF221, Pkinase_Tyr, DnaJ, Cofilin_ADF, Orn_Arg_deC_N, Skp1_POZ, Asn_synthase, K-box, LRR_{—}2, Ribosomal_L12, Ammonium_transp, Ribosomal_L14, KOW, DUF1336, DS, Aa_trans, CcmH, peroxidase, eIF-5a, Aldedh, PEP-utilizers_C, ADH_N, UIM, NAD_binding_{—}1, zf-C3HC4, Spermine_synth, AUX_IAA, LIM, Anti-silence, X8, Citrate_synt, 14-3-3, RMMBL, efhand, NPH3, CAF1, ICL, FAE1_CUT1_RppA, Orn_DAP_Arg_deC, PPDK_N, Myb_DNA-binding, AP2, F-box, and APS_kinase

[0035] As used herein, “promoter” means regulatory DNA for initializing transcription. A “plant promoter” is a promoter capable of initiating transcription in plant cells whether or not its origin is a plant cell, e.g., is it well known that viral promoters are functional in plants. Thus, plant promoters include promoter DNA obtained from plants, plant viruses, and bacteria such as Agrobacterium and Rhizobium bacteria. Examples of promoters under developmental control include promoters that preferentially initiate transcription in certain tissues, such as leaves, roots, or seeds. Such promoters are referred to as “tissue preferred”. Promoters which initiate transcription only in certain tissues are referred to as “tissue specific”. A “cell type” specific promoter primarily drives expression in certain cell types in one or more organs, for example, vascular cells in roots or leaves. An “inducible” or “repressible” promoter is a promoter which is under environmental control. Examples of environmental conditions that may effect transcription by inducible promoters include anaerobic conditions, or certain chemicals, or the presence of light. Tissue specific, tissue preferred, cell type specific, and inducible promoters constitute the class of “non-constitutive” promoters. A “constitutive” promoter is a promoter which is active under most conditions.

[0036] As used herein, “operably linked” means the association of two or more DNA fragments in a DNA construct so that the function of one, e.g., protein-encoding DNA, is affected by the other, e.g., a promoter.

[0037] As used herein, “expression” means the process that includes transcription of DNA to produce RNA and translation of the cognate protein encoded by the DNA and RNA.

[0038] As used herein, a “control plant” means a plant that does not contain the recombinant DNA that confers an enhanced agronomic trait. A control plant is used to compare against a transgenic plant, to identify an enhanced agronomic trait in the transgenic plant. A suitable control plant may be a non-transgenic plant of the parental line used to generate a transgenic plant. A control plant may in some cases be a transgenic plant line that comprises an empty vector or marker gene, but does not contain the recombinant DNA.

[0039] As used herein, an “agronomic trait” means a characteristic of a plant, which includes, but are not limited to, plant morphology, physiology, growth and development, yield, nutritional enhancement, disease or pest resistance, or environmental or chemical tolerance. In the plants of this invention the expression of identified recombinant DNA confers an agronomically important trait, e.g., increased yield. An “enhanced agronomic trait” refers to a measurable improvement in an agronomic trait including, but not limited to, yield increase, including increased yield under non-stress conditions and increased yield under environmental stress conditions. Stress conditions may include, for example, drought, shade, fungal disease, viral disease, bacterial disease, insect infestation, nematode infestation, cold temperature exposure, heat exposure, osmotic stress, reduced nitrogen nutrient availability, reduced phosphorus nutrient availability and high plant density. “Yield” can be affected by many properties including without limitation, plant height, pod number, pod position on the plant, number of internodes, incidence of pod shatter, grain size, efficiency of nodulation and nitrogen fixation, efficiency of nutrient assimilation, resistance to biotic and abiotic stress, carbon assimilation, plant architecture, resistance to lodging, percent seed germination, seedling vigor, and juvenile traits. Yield can also affected by efficiency of germination (including germination in stressed conditions), growth rate (including growth rate in stressed conditions), ear number, seed number per ear, seed size, composition of seed (starch, oil, protein) and characteristics of seed fill.

[0040] Increased yield of a transgenic plant of the present invention can be measured in a number of ways, including test weight, seed number per plant, seed weight, seed number per unit area (i.e. seeds, or weight of seeds, per acre), bushels per acre, tones per acre, tons per acre, kilo per hectare. For example, maize yield may be measured as production of shelled corn kernels per unit of production area, e.g., in bushels per acre or metric tons per hectare, often reported on a moisture adjusted basis, e.g., at 15.5% moisture. Increased yield may result from enhanced utilization of key biochemical compounds, such as nitrogen, phosphorous and carbohydrate, or from improved responses to environmental stresses, such as cold, heat, drought, salt, and attack by pests or pathogens. Recombinant DNA used in this invention can also be used to provide plants having enhanced growth and development, and ultimately increased yield, as the result of modified expression of plant growth regulators or modification of cell cycle or photosynthesis pathways.

[0041] Also of interest is the generation of transgenic plants that demonstrate enhanced yield with respect to a seed component that may or may not correspond to an increase in overall plant yield. Such properties include enhancements in seed oil, seed molecules such as tocopherol, protein and starch, or oil particular oil components as may be manifest by an alteration in the ratios of seed components.

[0042] A subset of the nucleic molecules of this invention includes fragments of the disclosed recombinant DNA consisting of oligonucleotides of at least 15, preferably at least 16 or 17, more preferably at least 18 or 19, and even more preferably at least 20 or more, consecutive nucleotides. Such oligonucleotides are fragments of the larger molecules having a sequence selected from the group consisting of SEQ ID NO:1 through SEQ ID NO:193, and find use, for example as probes and primers for detection of the polynucleotides of the present invention.

[0043] In some embodiments of the invention a constitutively active mutant is constructed to achieve the desired effect. SEQ ID NO: 3-6 encodes only the kinase domain of a calcium dependent protein kinase (CDPK). CDPK1 has a domain structure similar to other calcium-dependant protein kinase in which the protein kinase domain is separated from four efhand domains by 42 amino acid “spacer” region. Calcium-dependent protein kinases are thought to be activated by a calcium-induced conformational change that results in movement of an autoinhibitory domain away form the protein kinase active site (Yokokura et al., 1995). Thus, consitutively active proteins can be made by over expressing the protein kinase domain alone.

[0044] In other embodiments of the invention a chimeric gene is constructed between homologous genes from different species to obtain a protein with certain characteristics superior to either native protein, e.g., enhanced stability and favorable enzymatic kinetics. Exemplary chimeric DNA molecules provided by the present invention are set forth as SEQ ID NO: 1 and 2 that encode a Arabidopsis-Corn chimeric pyruvate orthophosphate dikinase (PPDK).

[0045] In yet other embodiments of the invention, a codon optimized gene is synthesized to achieve a desirable expression level. Synthetic DNA molecules can be designed by a variety of methods, such as, methods known in the art that are based upon substituting the codon(s) of a first polynucleotide to create an equivalent, or even an improved, second-generation artificial polynucleotide, where this new artificial polynucleotide is useful for enhanced expression in transgenic plants. The design aspect often employs a codon usage table. The table is produced by compiling the frequency of occurrence of codons in a collection of coding sequences isolated from a plant, plant type, family or genus. Other design aspects include reducing the occurrence of polyadenylation signals, intron splice sites, or long AT or GC stretches of sequence (U.S. Pat. No. 5,500,365). Full length coding sequences or fragments thereof can be made of artificial DNA using methods known to those skilled in the art. Such exemplary synthetic DNA molecules provided by the present invention are set forth as SEQ ID NO: 38.

[0046] DNA constructs are assembled using methods well known to persons of ordinary skill in the art and typically comprise a promoter operably linked to DNA, the expression of which provides the enhanced agronomic trait. Other construct components may include additional regulatory elements, such as 5′ introns for enhancing transcription, 3′ untranslated regions (such as polyadenylation signals and sites), DNA for transit or signal peptides.

[0047] In accordance with the current invention, constitutive promoters are active under most environmental conditions and states of development or cell differentiation. These promoters are likely to provide expression of the polynucleotide sequence at many stages of plant development and in a majority of tissues. A variety of constitutive promoters are known in the art. Examples of constitutive promoters that are active in plant cells include but are not limited to the nopaline synthase (NOS) promoters; the cauliflower mosaic virus (CaMV) 19S and 35S promoters (U.S. Pat. No. 5,858,642); the figwort mosaic virus promoter (P-FMV, U.S. Pat. No. 6,051,753); actin promoters, such as the rice actin promoter (P-Os.Act1, U.S. Pat. No. 5,641,876).

[0048] Furthermore, the promoters may be altered to contain one or more “enhancer sequences” to assist in elevating gene expression. Such enhancers are known in the art. By including an enhancer sequence with such constructs, the expression of the selected protein may be enhanced. These enhancers often are found 5′ to the start of transcription in a promoter that functions in eukaryotic cells, but can often be inserted in the forward or reverse orientation 5′ or 3′ to the coding sequence. In some instances, these 5′ enhancing elements are introns. Deemed to be particularly useful as enhancers are the 5′ introns of the rice actin 1 (see U.S. Pat. No. 5,641,876), rice actin 2 genes and the maize heat shock protein 70 gene intron (U.S. Pat. No. 5,593,874). Examples of other enhancers that can be used in accordance with the invention include elements from the CaMV 35S promoter, octopine synthase genes, the maize alcohol dehydrogenase gene, the maize shrunken 1 gene and promoters from non-plant eukaryotes.

[0049] Tissue-specific promoters cause transcription or enhanced transcription of a polynucleotide sequence in specific cells or tissues at specific times during plant development, such as in vegetative or reproductive tissues. Examples of tissue-specific promoters under developmental control include promoters that initiate transcription primarily in certain tissues, such as vegetative tissues, e.g., roots, leaves or stems, or reproductive tissues, such as fruit, ovules, seeds, pollen, pistils, flowers, or any embryonic tissue, or any combination thereof. Reproductive tissue specific promoters may be, e.g., ovule-specific, embryo-specific, endosperm-specific, integument-specific, pollen-specific, petal-specific, sepal-specific, or some combination thereof. Tissue specific promoter(s) will also include promoters that can cause transcription, or enhanced transcription in a desired plant tissue at a desired plant developmental stage. An example of such a promoter includes, but is not limited to, a seedling or an early seedling specific promoter. One skilled in the art will recognize that a tissue-specific promoter may drive expression of operably linked polynucleotide molecules in tissues other than the target tissue. Thus, as used herein, a tissue-specific promoter is one that drives expression preferentially not only in the target tissue, but may also lead to some expression in other tissues as well.

[0050] In one embodiment of this invention, preferential expression in plant green tissues is desired. Promoters of interest for such uses include those from genes such as maize aldolase gene FDA (U.S. patent application publication No. 20040216189), aldolase and pyruvate orthophosphate dikinase (PPDK) (Taniguchi et al. (2000) Plant Cell Physiol. 41(1):42-48).

[0051] In another embodiment of this invention, preferential expression in plant root tissue is desired. An exemplary promoter of interest for such uses is derived from Corn Nicotianamine Synthase gene (U.S. patent application publication No. 20030131377).

[0052] In yet another embodiment of this invention, preferential expression in plant phloem tissue is desired. An exemplary promoter of interest for such use is the rice tungro bacilliform virus (RTBV) promoter (U.S. Pat. No. 5,824,857).

[0053] In practicing this invention, an inducible promoter may also be used to ectopically express the structural gene in the recombinant DNA construct. The inducible promoter may cause conditional expression of a polynucleotide sequence under the influence of changing environmental conditions or developmental conditions. For example, such promoters may cause expression of the polynucleotide sequence at certain temperatures or temperature ranges, or in specific stage(s) of plant development such as in early germination or late maturation stage(s) of a plant. Examples of inducible promoters include, but are not limited to, the light-inducible promoter from the small subunit of ribulose-1,5-bis-phosphate carboxylase (ssRUBISCO) (Fischhoff et al. (1992) Plant Mol. Biol. 20:81-93); the drought-inducible promoter of maize (Busk et al., Plant J. 11:1285-1295, 1997), the cold, drought, and high salt inducible promoter from potato (Kirch, Plant Mol. Biol. 33:897-909, 1997), and many cold inducible promoters known in the art; for example rd29a and cor15a promoters from Arabidopsis (Genbank ID: D13044 and U01377), blt101 and blt4.8 from barley (Genbank ID: AJ310994 and U63993), wcs 120 from wheat (Genbank ID:AF031235), mlip15 from corn (Genbank ID: D26563) and bn115 from Brassica (Genbank ID: U01377).

[0054] In some aspects of the invention, sufficient expression in plant seed tissues is desired to effect improvements in seed composition. Exemplary promoters for use for seed composition modification include promoters from seed genes such as napin (U.S. Pat. No. 5,420,034), maize L3 oleosin (U.S. Pat. No. 6,433,252), zein Z27 (Russell et al. (1997) Transgenic Res. 6(2):157-166), glutelin1 (Russell (1997) supra), peroxiredoxin antioxidant (Per1) (Stacy et al. (1996) Plant Mol. Biol. 31(6):1205-1216), and globulin 1 (Belanger et al (1991) Genetics 129:863-872).

[0055] Recombinant DNA constructs prepared in accordance with the invention will also generally include a 3′ element that typically contains a polyadenylation signal and site. Well-known 3′ elements include those from Agrobacterium tumefaciens genes such as nos 3′, tml 3′, tmr 3′, tms 3′, ocs 3′, tr7 3′, e.g., disclosed in U.S. Pat. No. 6,090,627, incorporated herein by reference; 3′ elements from plant genes such as wheat (Triticum aesevitum) heat shock protein 17 (Hsp17 3′), a wheat ubiquitin gene, a wheat fructose-1,6-biphosphatase gene, a rice glutelin gene a rice lactate dehydrogenase gene and a rice beta-tubulin gene, all of which are disclosed in U.S. published patent application 2002/0192813 A1, incorporated herein by reference; and the pea (Pisum sativum) ribulose biphosphate carboxylase gene (rbs 3′), and 3′ elements from the genes within the host plant.

[0056] Constructs and vectors may also include a transit peptide for targeting of a gene target to a plant organelle, particularly to a chloroplast, leucoplast or other plastid organelle. For descriptions of the use of chloroplast transit peptides see U.S. Pat. No. 5,188,642 and U.S. Pat. No. 5,728,925, incorporated herein by reference. For description of the transit peptide region of an Arabidopsis EPSPS gene useful in the present invention, see Klee, H. J. et al., (MGG (1987) 210:437-442).

[0057] The recombinant DNA construct may include other elements. For example, the construct may contain DNA segments that provide replication function and antibiotic selection in bacterial cells. For example, the construct may contain an E. coli origin of replication such as ori322 or a broad host range origin of replication such as oriV, oriRi or oriColE.

[0058] The construct may also comprise a selectable marker such as an Ec-ntpII-Tn5 that encodes a neomycin phosphotransferase II gene obtained from Tn5 conferring resistance to a neomycin and kanamysin, Spc/Str that encodes for Tn7 aminoglycoside adenyltransferase (aadA) conferring resistance to spectinomycin or streptomycin, or a gentamicin (Gm, Gent) or one of many known selectable marker gene.

[0059] The vector or construct may also include a screenable marker and other elements as appropriate for selection of plant or bacterial cells having DNA constructs of the invention. DNA constructs are designed with suitable selectable markers that can confer antibiotic or herbicide tolerance to the cell. The antibiotic tolerance polynucleotide sequences include, but are not limited to, polynucleotide sequences encoding for proteins involved in tolerance to kanamycin, neomycin, hygromycin, and other antibiotics known in the art. An antibiotic tolerance gene in such a vector may be replaced by herbicide tolerance gene encoding for 5-enolpyruvylshikimate-3-phosphate synthase (EPSPS, described in U.S. Pat. Nos. 5,627,061, and 5,633,435; Padgette et al., Herbicide Resistant Crops, Lewis Publishers, 53-85, 1996; and in Penaloza-Vazquez, et al., Plant Cell Reports 14:482-487, 1995) and aroA (U.S. Pat. No. 5,094,945) for glyphosate tolerance, bromoxynil nitrilase (Bxn) for Bromoxynil tolerance (U.S. Pat. No. 4,810,648), phytoene desaturase (crtI (Misawa et al., Plant J. 4:833-840, 1993; and Misawa et al., Plant J. 6:481-489, 1994) for tolerance to norflurazon, acetohydroxyacid synthase (AHAS, Sathasiivan et al., Nucl. Acids Res. 18:2188-2193, 1990). Herbicides for which transgenic plant tolerance has been demonstrated and for which the method of the present invention can be applied include, but are not limited to: glyphosate, sulfonylureas, imidazolinones, bromoxynil, delapon, cyclohezanedione, protoporphyrionogen oxidase inhibitors, and isoxaslutole herbicides.

[0060] Other examples of selectable markers, screenable markers and other elements are well known in the art and may be readily used in the present invention. Those skilled in the art should refer to the following for details (for selectable markers, see Potrykus et al., Mol. Gen. Genet. 199:183-188, 1985; Hinchee et al., Bio. Techno. 6:915-922, 1988; Stalker et al., J. Biol. Chem. 263:6310-6314, 1988; European Patent Application 154,204; Thillet et al., J. Biol. Chem. 263:12500-12508, 1988; for screenable markers see, Jefferson, Plant Mol. Biol, Rep. 5: 387-405, 1987; Jefferson et al., EMBO J. 6: 3901-3907, 1987; Sutcliffe et al., Proc. Natl. Acad. Sci. U.S.A. 75: 3737-3741, 1978; Ow et al., Science 234: 856-859, 1986; Ikatu et al., Bio. Technol. 8: 241-242, 1990; and for other elements see, European Patent Application Publication Number 0218571; Koziel et al., Plant Mol. Biol. 32: 393-405; 1996).

[0061] The plants of this invention can be further enhanced with stacked traits, e.g., a crop having an enhanced agronomic trait resulting from expression of DNA disclosed herein, in combination with herbicide, disease, and/or pest resistance traits. The recombinant DNA is provided in plant cells derived from corn lines that maintain resistance to a virus such as the Mal de Rio Cuarto virus or a fungus such as the Puccina sorghi fungus or both, which are common plant diseases in Argentina. For example, genes of the current invention can be stacked with other traits of agronomic interest, such as a trait providing herbicide resistance, or insect resistance, such as using a gene from Bacillus thuringiensis to provide resistance against lepidopteran, coliopteran, homopteran, hemiopteran, and other insects. Herbicides for which transgenic plant tolerance has been demonstrated and the method of the present invention can be applied include, but are not limited to, glyphosate, dicamba, glufosinate, sulfonylurea, bromoxynil and norflurazon herbicides. Polynucleotide molecules encoding proteins involved in herbicide tolerance are well-known in the art and include, but are not limited to, a polynucleotide molecule encoding 5-enolpyruvylshikimate-3-phosphate synthase (EPSPS) disclosed in U.S. Pat. Nos. 5,094,945; 5,627,061; 5,633,435 and 6,040,497 for imparting glyphosate tolerance; polynucleotide molecules encoding a glyphosate oxidoreductase (GOX) disclosed in U.S. Pat. No. 5,463,175 and a glyphosate-N-acetyl transferase (GAT) disclosed in U.S. Patent Application publication 2003/0083480 A1 also for imparting glyphosate tolerance; dicamba monooxygenase disclosed in U.S. Patent Application publication 2003/0135879 A1 for imparting dicamba tolerance; a polynucleotide molecule encoding bromoxynil nitrilase (Bxn) disclosed in U.S. Pat. No. 4,810,648 for imparting bromoxynil tolerance; a polynucleotide molecule encoding phytoene desaturase (crtI) described in Misawa et al, (1993) Plant J. 4:833-840 and Misawa et al, (1994) Plant J. 6:481-489 for norflurazon tolerance; a polynucleotide molecule encoding acetohydroxyacid synthase (AHAS, aka ALS) described in Sathasiivan et al. (1990) Nucl. Acids Res. 18:2188-2193 for imparting tolerance to sulfonylurea herbicides; polynucleotide molecules known as bar genes disclosed in DeBlock, et al. (1987) EMBO J. 6:2513-2519 for imparting glufosinate and bialaphos tolerance; polynucleotide molecules disclosed in U.S. Patent Application Publication 2003/010609 A1 for imparting N-amino methyl phosphonic acid tolerance; polynucleotide molecules disclosed in U.S. Pat. No. 6,107,549 for impartinig pyridine herbicide resistance; molecules and methods for imparting tolerance to multiple herbicides such as glyphosate, atrazine, ALS inhibitors, isoxoflutole and glufosinate herbicides are disclosed in U.S. Pat. No. 6,376,754 and U.S. Patent Application Publication 2002/0112260, all of said U.S. patents and Patent Application Publications are incorporated herein by reference. Molecules and methods for imparting insect/nematode/virus resistance is disclosed in U.S. Pat. Nos. 5,250,515; 5,880,275; 6,506,599; 5,986,175 and U.S. Patent Application Publication 2003/0150017 A1, all of which are incorporated herein by reference.

[0062] In particular embodiments, the inventors contemplate the use of antibodies, either monoclonal or polyclonal which bind to the proteins disclosed herein. Means for preparing and characterizing antibodies are well known in the art (See, e.g., Antibodies: A Laboratory Manual, Cold Spring Harbor Laboratory, 1988; incorporated herein by reference). The methods for generating monoclonal antibodies (mAbs) generally begin along the same lines as those for preparing polyclonal antibodies. Briefly, a polyclonal antibody is prepared by immunizing an animal with an immunogenic composition in accordance with the present invention and collecting antisera from that immunized animal A wide range of animal species can be used for the production of antisera. Typically the animal used for production of anti-antisera is a rabbit, a mouse, a rat, a hamster, a guinea pig or a goat. Because of the relatively large blood volume of rabbits, a rabbit is a preferred choice for production of polyclonal antibodies.

[0063] As is well known in the art, a given composition may vary in its immunogenicity. It is often necessary therefore to boost the host immune system, as may be achieved by coupling a peptide or polypeptide immunogen to a carrier. Exemplary and preferred carriers are keyhole limpet hemocyanin (KLH) and bovine serum albumin (BSA). Other albumins such as ovalbumin, mouse serum albumin or rabbit serum albumin can also be used as carriers. Means for conjugating a polypeptide to a carrier protein are well known in the art and include using glutaraldehyde, m-maleimidobencoyl-N-hydroxysuccinimide ester, carbodiimide and bis-biazotized benzidine.

[0064] As is also well known in the art, the immunogenicity of a particular immunogen composition can be enhanced by the use of non-specific stimulators of the immune response, known as adjuvants. Exemplary and preferred adjuvants include complete Freund's adjuvant (a non-specific stimulator of the immune response containing killed Mycobacterium tuberculosis), incomplete Freund's adjuvants and aluminum hydroxide adjuvant.

[0065] The amount of immunogen composition used in the production of polyclonal antibodies varies upon the nature of the immunogen as well as the animal used for immunization. A variety of routes can be used to administer the immunogen (subcutaneous, intramuscular, intradermal, intravenous and intraperitoneal). The production of polyclonal antibodies may be monitored by sampling blood of the immunized animal at various points following immunization. A second, booster, injection may also be given. The process of boosting and titering is repeated until a suitable titer is achieved. When a desired level of immunogenicity is obtained, the immunized animal can be bled and the serum isolated and stored, and/or the animal can be used to generate mAbs.

[0066] mAbs may be readily prepared through use of well-known techniques, such as those exemplified in U.S. Pat. No. 4,196,265, incorporated herein by reference. Typically, this technique involves immunizing a suitable animal with a selected immunogen composition, e.g., a purified or partially purified antifungal protein, polypeptide or peptide. The immunizing composition is administered in a manner effective to stimulate antibody producing cells. Rodents such as mice and rats are preferred animals, however, the use of rabbit, sheep, or frog cells is also possible. The use of rats may provide certain advantages (Goding, 1986, pp. 60-61), but mice are preferred, with the BALB/c mouse being most preferred as this is most routinely used and generally gives a higher percentage of stable fusions.

[0067] Following immunization, somatic cells with the potential for producing antibodies, specifically B lymphocytes (B cells), are selected for use in the mAb generating protocol. These cells may be obtained from biopsied spleens, tonsils or lymph nodes, or from a peripheral blood sample. Spleen cells and peripheral blood cells are preferred, the former because they are a rich source of antibody-producing cells that are in the dividing plasmablast stage, and the latter because peripheral blood is easily accessible. Often, a panel of animals will have been immunized and the spleen of animal with the highest antibody titer will be removed and the spleen lymphocytes obtained by homogenizing the spleen with a syringe. Typically, a spleen from an immunized mouse contains approximately 5×10⁷ to 2×10⁸ lymphocytes.

[0068] The antibody-producing B lymphocytes from the immunized animal are then fused with cells of an immortal myeloma cell, generally one of the same species as the animal that was immunized. Myeloma cell lines suited for use in hybridoma-producing fusion procedures preferably are non-antibody-producing, have high fusion efficiency, and enzyme deficiencies that render them incapable of growing in certain selective media which support the growth of only the desired fused cells (hybridomas).

[0069] Any one of a number of myeloma cells may be used, as are known to those of skill in the art (Goding, 1986, pp. 65-66; Campbell, 1984, pp. 75-83). For example, where the immunized animal is a mouse, one may use P3-X63/Ag8, X63-Ag8.653, NS1/1.Ag 41, Sp210-Ag14, FO, NSO/U, MPC-11, MPC11-X45-GTG 1.7 and S194/5XX0 Bul; for rats, one may use R210.RCY3, Y3-Ag 1.2.3, IR983F and 4B210; and U-266, GM1500-GRG2, LICR-LON-HMy2 and UC729-6 are all useful in connection with human cell fusions.

[0070] One preferred murine myeloma cell is the NS-1 myeloma cell line (also termed P3-NS-1-Ag-4-1), which is readily available from the NIGMS Human Genetic Mutant Cell Repository by requesting cell line repository number GM3573. Another mouse myeloma cell line that may be used is the 8-azaguanine-resistant mouse murine myeloma SP2/0 non-producer cell line.

[0071] Methods for generating hybrids of antibody-producing spleen or lymph node cells and myeloma cells usually comprise mixing somatic cells with myeloma cells in a 2:1 ratio, though the ratio may vary from about 20:1 to about 1:1, respectively, in the presence of an agent or agents (chemical or electrical) that promote the fusion of cell membranes. Fusion methods using Spend virus have been described (Kohler and Milstein, 1975; 1976), and those using polyethylene glycol (PEG), such as 37% (v/v) PEG, (Gefter et al., 1977). The use of electrically induced fusion methods is also appropriate (Goding, 1986, pp. 71-74).

[0072] Fusion procedures usually produce viable hybrids at low frequencies, about 1×10⁻⁶ to 1×10⁻⁸. However, this does not pose a problem, as the viable, fused hybrids are differentiated from the parental, unfused cells (particularly the unfused myeloma cells that would normally continue to divide indefinitely) by culturing in a selective medium. The selective medium is generally one that contains an agent that blocks the de novo synthesis of nucleotides in the tissue culture media. Exemplary and preferred agents are aminopterin, methotrexate, and azaserine Aminopterin and methotrexate block de novo synthesis of both purines and pyrimidines, whereas azasenne blocks only purine synthesis. Where aminopterin or methotrexate is used, the media is supplemented with hypoxanthine and thymidine as a source of nucleotides (HAT medium). Where azaserine is used, the media is supplemented with hypoxanthine.

[0073] The preferred selection medium is HAT. Only cells capable of operating nucleotide salvage pathways are able to survive in HAT medium. The myeloma cells are defective in key enzymes of the salvage pathway, e.g., hypoxanthine phosphoribosyl transferase (HPRT), and they cannot survive. The B-cells can operate this pathway, but they have a limited life span in culture and generally die within about two weeks. Therefore, the only cells that can survive in the selective media are those hybrids formed from myeloma and B-cells.

[0074] This culturing provides a population of hybridomas from which specific hybridomas are selected. Typically, selection of hybridomas is performed by culturing the cells by single-clone dilution in microtiter plates, followed by testing the individual clonal supernatants (after about two to three weeks) for the desired reactivity. The assay should be sensitive, simple and rapid, such as radioimmunoassays, enzyme immunoassays, cytotoxicity assays, plaque assays, dot immunobinding assays, and the like.

[0075] The selected hybridomas would then be serially diluted and cloned into individual antibody-producing cell lines, which clones can then be propagated indefinitely to provide mAbs. The cell lines may be exploited for mAb production in two basic ways. A sample of the hybridoma can be injected (often into the peritoneal cavity) into a histocompatible animal of the type that was used to provide the somatic and myeloma cells for the original fusion. The injected animal develops tumors secreting the specific monoclonal antibody produced by the fused cell hybrid. The body fluids of the animal, such as serum or ascites fluid, can then be tapped to provide mAbs in high concentration. The individual cell lines could also be cultured in vitro, where the mAbs are naturally secreted into the culture medium from which they can be readily obtained in high concentrations. mAbs produced by either means may be further purified, if desired, using filtration, centrifugation and various chromatographic methods such as HPLC or affinity chromatography.

[0076] Numerous methods for transforming plant cells with recombinant DNA are known in the art and may be used in the present invention. Two commonly used methods for plant transformation are Agrobacterium-mediated transformation and microprojectile bombardment. Microprojectile bombardment methods are illustrated in U.S. Pat. Nos. 5,015,580 (soybean); 5,550,318 (corn); 5,538,880 (corn); 5,914,451 (soybean); 6,160,208 (corn); 6,399,861 (corn) and 6,153,812 (wheat) and Agrobacterium-mediated transformation is described in U.S. Pat. Nos. 5,159,135 (cotton); 5,824,877 (soybean); 5,591,616 (corn); and 6,384,301 (soybean), and in US Patent Application Publication 2004/0244075, all of which are incorporated herein by reference. For Agrobacterium tumefaciens based plant transformation system, additional elements present on transformation constructs will include T-DNA left and right border sequences to facilitate incorporation of the recombinant polynucleotide into the plant genome.

[0077] In general it is useful to introduce recombinant DNA randomly, i.e. at a non-specific location, in the genome of a target plant line. In special cases it may be useful to target recombinant DNA insertion in order to achieve site-specific integration, e.g., to replace an existing gene in the genome, to use an existing promoter in the plant genome, or to insert a recombinant polynucleotide at a predetermined site known to be active for gene expression. Several site specific recombination systems exist which are known to function implants include cre-lox as disclosed in U.S. Pat. No. 4,959,317 and FLP-FRT as disclosed in U.S. Pat. No. 5,527,695, both incorporated herein by reference.

[0078] Transformation methods of this invention are preferably practiced in tissue culture on media and in a controlled environment. “Media” refers to the numerous nutrient mixtures that are used to grow cells in vitro, that is, outside of the intact living organism. Recipient cell targets include, but are not limited to, meristem cells, callus, immature embryos and gametic cells such as microspores, pollen, sperm and egg cells. It is contemplated that any cell from which a fertile plant may be regenerated is useful as a recipient cell. Callus may be initiated from tissue sources including, but not limited to, immature embryos, seedling apical meristems, microspores and the like. Cells capable of proliferating as callus are also recipient cells for genetic transformation. Practical transformation methods and materials for making transgenic plants of this invention, e.g., various media and recipient target cells, transformation of immature embryos and subsequent regeneration of fertile transgenic plants are disclosed in U.S. Pat. Nos. 6,194,636 and 6,232,526, which are incorporated herein by reference.

[0079] The seeds of transgenic plants can be harvested from fertile transgenic plants and be used to grow progeny generations of transformed plants of this invention including hybrid plants line for screening of plants having an enhanced agronomic trait. In addition to direct transformation of a plant with a recombinant DNA, transgenic plants can be prepared by crossing a first plant having a recombinant DNA with a second plant lacking the DNA. For example, recombinant DNA can be introduced into first plant line that is amenable to transformation to produce a transgenic plant which can be crossed with a second plant line to introgress the recombinant DNA into the second plant line. A transgenic plant with recombinant DNA providing an enhanced agronomic trait, e.g., enhanced yield, can be crossed with transgenic plant line having other recombinant DNA that confers another trait, e.g., herbicide resistance or pest resistance, to produce progeny plants having recombinant DNA that confers both traits. Typically, in such breeding for combining traits the transgenic plant donating the additional trait is a male line and the transgenic plant carrying the base traits is the female line. The progeny of this cross will segregate such that some of the plants will carry the DNA for both parental traits and some will carry DNA for one parental trait; such plants can be identified by markers associated with parental recombinant DNA Progeny plants carrying DNA for both parental traits can be crossed back into the female parent line multiple times, e.g., usually 6 to 8 generations, to produce a progeny plant with substantially the same genotype as one original transgenic parental line but for the recombinant DNA of the other transgenic parental line.

[0080] In the practice of transformation DNA is typically introduced into only a small percentage of target cells in any one transformation experiment. Marker genes are used to provide an efficient system for identification of those cells that are stably transformed by receiving and integrating a transgenic DNA construct into their genomes. Preferred marker genes provide selective markers which confer resistance to a selective agent, such as an antibiotic or herbicide. Any of the herbicides to which plants of this invention may be resistant are useful agents for selective markers. Potentially transformed cells are exposed to the selective agent. In the population of surviving cells will be those cells where, generally, the resistance-conferring gene is integrated and expressed at sufficient levels to permit cell survival. Cells may be tested further to confirm stable integration of the exogenous DNA. Commonly used selective marker genes include those conferring resistance to antibiotics such as kanamycin and paromomycin (nptII), hygromycin B (aph IV) and gentamycin (aac3 and aacC4) or resistance to herbicides such as glufosinate (bar or pat) and glyphosate (aroA or EPSPS). Examples of such selectable are illustrated in U.S. Pat. Nos. 5,550,318; 5,633,435; 5,780,708 and 6,118,047, all of which are incorporated herein by reference. Screenable markers which provide an ability to visually identify transformants can also be employed, e.g., a gene expressing a colored or fluorescent protein such as a luciferase or green fluorescent protein (GFP) or a gene expressing a beta-glucuronidase or uidA gene (GUS) for which various chromogenic substrates are known.

[0081] Cells that survive exposure to the selective agent, or cells that have been scored positive in a screening assay, may be cultured in regeneration media and allowed to mature into plants. Developing plantlets can be transferred to plant growth mix, and hardened off, e.g., in an environmentally controlled chamber at about 85% relative humidity, 600 ppm CO₂, and 25-250 microeinsteins m⁻² s⁻¹ of light, prior to transfer to a greenhouse or growth chamber for maturation. Plants are regenerated from about 6 weeks to 10 months after a transformant is identified, depending on the initial tissue. Plants may be pollinated using conventional plant breeding methods known to those of skill in the art and seed produced, e.g., self-pollination is commonly used with transgenic corn. The regenerated transformed plant or its progeny seed or plants can be tested for expression of the recombinant DNA and screened for the presence of enhanced agronomic trait.

[0082] Transgenic plant seed provided by this invention are grown to generate transgenic plants having an enhanced trait as compared to a control plant. Such seed for plants with enhanced agronomic trait is identified by screening transformed plants or progeny seed for enhanced trait. For efficiency a screening program is designed to evaluate multiple transgenic plants (events) comprising the recombinant DNA, e.g., multiple plants from 2 to 20 or more transgenic events.

[0083] Transgenic plants grown from transgenic seed provided herein demonstrate enhanced agronomic traits that contribute to increased yield or other trait that provides increased plant value, including, for example, enhanced seed quality. Of particular interest are plants having enhanced yield resulting from enhanced plant growth and development, stress tolerance, enhanced seed development, higher light response, enhanced flower development, or enhanced carbon and/or nitrogen metabolism.

[0084] Table 1 provides a list of protein encoding DNA (“genes”) that are useful as recombinant DNA for production of transgenic plants with enhanced agronomic trait, the elements of Table 1 are described by reference to:

“NUC SEQ ID NO” which is a SEQ ID NO for a DNA sequence in the Sequence Listing.
“PEP SEQ ID NO” which is a SEQ ID NO for an amino acid sequence in the Sequence Listing.
GENE ID″ which is an arbitrary name for the recombinant DNA.
“Base Vector” which is a reference to the identifying number in Table 5 of base vectors used for transformation of the recombinant DNA. Construction of plant transformation constructs is illustrated in Example 1.
“annotation” refers to a description of the top hit protein obtained from an amino acid sequence query of each PEP SEQ ID NO to GenBank database of the National Center for Biotechnology Information (NCBI). Identifier is the GenBank ID number for the informative BLAST hit with —F T.

TABLE 1

| NUC | PEP | | | annotation | | | |
|---|---|---|---|---|---|---|---|
| SEQ | SEQ | Base | | e- | % | | |
| ID NO | ID NO | vector | GENE ID | value | identity | identifier | description |
| 1 | 194 | 1 | PHE0003351_PMON81242 | 0 | 98 | 168586 | gb\|AAA33498.1\|pyruvate, orthophosphate |
| | | | | | | | dikinase |
| 2 | 195 | 7 | PHE0003351_PMON83625 | 0 | 98 | 168586 | gb\|AAA33498.1\|pyruvate, orthophosphate |
| | | | | | | | dikinase |
| 3 | 196 | 1 | PHE0000207_PMON77878 | 1.00E−144 | 96 | 34907990 | ref\|NP_915342.1\|putative |
| | | | | | | | calcium-dependent protein |
| | | | | | | | kinase [Oryza sativa |
| | | | | | | | (japonica cultivar-group)] |
| 4 | 197 | 1 | PHE0000208_PMON77879 | 1.00E−143 | 94 | 50919297 | ref\|XP_470045.1\|putative |
| | | | | | | | calmodulin-domain protein |
| | | | | | | | kinase [Oryza sativa |
| | | | | | | | (japonica cultivar-group)] |
| 5 | 198 | 1 | PHE0000209_PMON77891 | 1.00E−135 | 89 | 53850561 | gb\|AAU95457.1\|At5g12180 |
| | | | | | | | [Arabidopsis thaliana] |
| | | | | | | | dbj\|BAB10036.1\|calcium- |
| | | | | | | | dependent protein kinase |
| 6 | 199 | 1 | PHE0000210_PMON77880 | 1.00E−137 | 89 | 26452430 | dbj\|BAC43300.1\|putative |
| | | | | | | | calcium-dependent protein |
| | | | | | | | kinase [Arabidopsis |
| | | | | | | | thaliana] |
| 7 | 200 | 8 | PHE0001329_PMON92878 | 0 | 100 | 34903780 | dbj\|BAB92151.1\|putative |
| | | | | | | | CBL-interacting protein |
| | | | | | | | kinase 2 [Oryza sativa |
| | | | | | | | (japonica |
| 8 | 201 | 1 | PHE0001425_PMON79162 | 1.00E−154 | 100 | 51979679 | ref\|XP_507586.1\|PREDICTED |
| | | | | | | | P0524F03.33 gene |
| | | | | | | | product [Oryza sativa |
| | | | | | | | (japonica cultivar-group)] |
| | | | | | | | ref\|XP_482612.1\|putative |
| | | | | | | | CCR4-NOT transcription |
| | | | | | | | complex, subunit 7 |
| 9 | 202 | 8 | PHE0001573_PMON92870 | 0 | 78 | 984262 | emb\|CAA58052.1\|asparragine |
| | | | | | | | synthetase [Zea mays] |
| 10 | 203 | 12 | PHE0001664_PMON99280 | 0 | 100 | 34906358 | sp\|Q9LDE6\|CKX1_ORYSA |
| | | | | | | | Probable cytokinin |
| | | | | | | | dehydrogenase precursor |
| | | | | | | | (Cytokinin oxidase) (CKO) |
| 11 | 204 | 1 | PHE0001674_PMON79194 | 5.00E−12 | 50 | 15223390 | ref\|NP_171645.1\|myb |
| | | | | | | | family transcription factor |
| | | | | | | | [Arabidopsis thaliana] |
| 12 | 205 | 10 | PHE0002026_PMON96489 | 0 | 87 | 32488298 | emb\|CAE03364.1\|OSJNBb0065L13.7 |
| | | | | | | | [Oryza sativa |
| | | | | | | | (japonica cultivar-group)] |
| 13 | 206 | 8 | PHE0002108_PMON92821 | 2.00E−31 | 100 | 10176234 | dbj\|BAB07329.1\|cold-shock |
| | | | | | | | protein [Bacillus halodurans |
| | | | | | | | C-125] |
| 14 | 207 | 8 | PHE0002109_PMON93856 | 6.00E−33 | 100 | 41324401 | emb\|CAF18741.1\|COLD- |
| | | | | | | | SHOCK PROTEIN CSPA |
| | | | | | | | [Corynebacterium |
| | | | | | | | glutamicum ATCC 13032] |
| 15 | 208 | 8 | PHE0002508_PMON92607 | 2.00E−79 | 72 | 50509850 | dbj\|BAD32022.1\|putative |
| | | | | | | | transcription factor [Oryza |
| | | | | | | | sativa |
| 16 | 209 | 1 | PHE0002650_PMON81832 | 1.00E−132 | 100 | 9964296 | gb\|AAG09919.1\|MADS |
| | | | | | | | box protein 2 [Zea mays] |
| 17 | 210 | 2 | PHE0002989_PMON95630 | 1.00E−117 | 100 | 7271044 | emb\|CAB80652.1\|small |
| | | | | | | | GTP-binding protein-like |
| | | | | | | | [Arabidopsis thaliana] |
| 18 | 211 | 6 | PHE0003290_PMON95107 | 4.00E−29 | 34 | 7269078 | emb\|CAB79187.1\|hypothetical |
| | | | | | | | protein [Arabidopsis |
| | | | | | | | thaliana] |
| 19 | 212 | 6 | PHE0003300_PMON95106 | 7.00E−81 | 54 | 50908933 | ref\|XP_465955.1\|putative |
| | | | | | | | nodulin 3 [Oryza sativa |
| | | | | | | | (japonica cultivar-group)] |
| 20 | 213 | 6 | PHE0003303_PMON95080 | 2.00E−96 | 69 | 38347194 | emb\|CAD37109.2\|OSJNBa0024J22.22 |
| | | | | | | | [Oryza sativa |
| | | | | | | | (japonica cultivar-group)] |
| 21 | 214 | 8 | PHE0003389_PMON94682 | 0 | 65 | 52076827 | dbj\|BAD45770.1\|putative |
| | | | | | | | Cyt-P450 monooxygenase |
| | | | | | | | [Oryza sativa (japonica |
| | | | | | | | cultivar-group)] |
| 22 | 215 | 8 | PHE0003614_PMON95111 | 0 | 94 | 32309578 | gb\|AAP79441.1\|glutamate |
| | | | | | | | decarboxylase [Oryza sativa |
| | | | | | | | (japonica cultivar-group)] |
| 23 | 216 | 8 | PHE0003684_PMON92807 | 1.00E−72 | 68 | 34906004 | dbj\|BAB63676.1\|induced |
| | | | | | | | protein MgI1 [Oryza sativa |
| | | | | | | | (japonica cultivar-group)] |
| 24 | 217 | 9 | PHE0003684_PMON93378 | 1.00E−72 | 68 | 34906004 | dbj\|BAB63676.1\|induced |
| | | | | | | | protein MgI1 [Oryza sativa |
| | | | | | | | (japonica cultivar-group)] |
| 25 | 218 | 8 | PHE0003853_PMON92602 | 1.00E−179 | 98 | 62320210 | ref\|NP_195478.2\|cyclin |
| | | | | | | | family protein [Arabidopsis |
| | | | | | | | thaliana] gb\|AAS49095.1\| |
| | | | | | | | At4g37630 [Arabidopsis |
| | | | | | | | thaliana] |
| 26 | 219 | 11 | PHE0003903_PMON98271 | 0 | 99 | 19851522 | gb\|AAL99744.1\|pyruvate |
| | | | | | | | decarboxylase [Zea mays] |
| 27 | 220 | 11 | PHE0003905_PMON99283 | 0 | 92 | 11995457 | gb\|AAG43027.1\|aldehyde |
| | | | | | | | dehydrogenase [Oryza |
| | | | | | | | sativa] |
| 28 | 221 | 11 | PHE0003907_PMON98066 | 5.00E−87 | 86 | 50906015 | ref\|XP_464496.1\|ribosomal |
| | | | | | | | protein L12-like protein |
| | | | | | | | [Oryza sativa (japonica |
| | | | | | | | cultivar-group)] |
| 29 | 222 | 11 | PHE0003908_PMON98064 | 0 | 84 | 51535811 | dbj\|BAD37896.1\|ARG1- |
| | | | | | | | like protein [Oryza sativa |
| | | | | | | | (japonica cultivar-group)] |
| 30 | 223 | 6 | PHE0003960_PMON95079 | 1.00E−156 | 87 | 50905641 | ref\|XP_464309.1\|putative |
| | | | | | | | choline-phosphate |
| | | | | | | | cytidylyltransferase [Oryza |
| | | | | | | | sativa (japonica cultivar- |
| | | | | | | | group)] |
| 31 | 224 | 5 | PHE0003967_PMON95088 | 1.00E−102 | 83 | 55168334 | gb\|AAV44199.1\|dehydroascorbate |
| | | | | | | | reductase [Oryza |
| | | | | | | | sativa (japonica cultivar- |
| | | | | | | | group)] |
| 32 | 225 | 10 | PHE0003985_PMON96457 | 1.00E−30 | 58 | 55770043 | ref\|XP_550011.1\|hypothetical |
| | | | | | | | protein [Oryza sativa |
| | | | | | | | (japonica cultivar-group)] |
| 33 | 226 | 10 | PHE0003987_PMON96134 | 5.00E−41 | 74 | 50919885 | ref\|XP_470303.1\|hypothetical |
| | | | | | | | protein [Oryza sativa |
| | | | | | | | (japonica cultivar-group)] |
| 34 | 227 | 10 | PHE0004001_PMON96453 | 4.00E−22 | 66 | 51978970 | ref\|XP_507362.1\|PREDICTED |
| | | | | | | | OSJNBa0077F02.127 |
| | | | | | | | gene product [Oryza sativa |
| | | | | | | | (japonica cultivar-group)] |
| 35 | 228 | 8 | PHE0004023_PMON92446 | 1.00E−132 | 88 | 12651665 | gb\|AAA20093.2\|Alfin-1 |
| | | | | | | | [Medicago sativa] |
| | | | | | | | pir\|\|T09646 probable zinc |
| | | | | | | | finger protein - alfalfa |
| | | | | | | | (fragment) |
| 36 | 229 | 4 | PHE0004026_PMON93885 | 0 | 100 | 21592703 | gb\|AAM64652.1\|LAX1/ |
| | | | | | | | AUX1-like permease |
| | | | | | | | [Arabidopsis thaliana] |
| 37 | 230 | 4 | PHE0004027_PMON93860 | 0 | 100 | 7269873 | emb\|CAB79732.1\|cytokinin |
| | | | | | | | oxidase-like protein |
| | | | | | | | [Arabidopsis thaliana] |
| 38 | 231 | 15 | PHE0004028_PMON94697 | 0 | 100 | 216765 | dbj\|BAA14344.1\|sucrose |
| | | | | | | | phosphorylase |
| | | | | | | | [Leuconostoc |
| | | | | | | | mesenteroides] |
| 12607 | 231 | n/a | PHE0010424_PMON17730 | 0 | 100 | 216765 | dbj\|BAA14344.1\|sucrose |
| | | | | | | | phosphorylase |
| | | | | | | | [Leuconostoc |
| | | | | | | | mesenteroides] |
| 39 | 232 | 8 | PHE0004034_PMON92631 | 0 | 100 | 6520233 | dbj\|BAA87958.1\|CW14 |
| | | | | | | | [Arabidopsis thaliana] |
| 40 | 233 | 8 | PHE0004039_PMON92634 | 1.00E−178 | 65 | 26452061 | ref\|NP_191207.2\|myosin |
| | | | | | | | heavy chain-related |
| | | | | | | | [Arabidopsis thaliana] |
| 41 | 234 | 8 | PHE0004047_PMON92619 | 4.00E−79 | 74 | 62087121 | dbj\|BAD91881.1\|transcription |
| | | | | | | | factor lim1 [Eucalyptus |
| | | | | | | | camaldulensis] |
| 42 | 235 | 14 | PHE0004047_PMON93388 | 4.00E−79 | 74 | 62087121 | dbj\|BAD91881.1\|transcription |
| | | | | | | | factor lim1 [Eucalyptus |
| | | | | | | | camaldulensis] |
| 43 | 236 | 8 | PHE0004068_PMON93663 | 3.00E−94 | 100 | 15293293 | ref\|NP_563710.1\|AWPM- |
| | | | | | | | 19-like membrane family |
| | | | | | | | protein [Arabidopsis |
| | | | | | | | thaliana] |
| 44 | 237 | 8 | PHE0004071_PMON93311 | 1.00E−130 | 100 | 21358850 | ref\|NP_568751.1\| |
| | | | | | | | polyadenylate-binding |
| | | | | | | | protein, putative/PABP, |
| | | | | | | | putative [Arabidopsis |
| | | | | | | | thaliana] |
| 45 | 238 | 8 | PHE0004072_PMON93654 | 0 | 100 | 23297397 | ref\|NP_192188.2\|GTP- |
| | | | | | | | binding family protein |
| | | | | | | | [Arabidopsis thaliana] |
| 46 | 239 | 14 | PHE0004072_PMON93669 | 0 | 100 | 23297397 | ref\|NP_192188.2\|GTP- |
| | | | | | | | binding family protein |
| | | | | | | | [Arabidopsis thaliana] |
| 47 | 240 | 8 | PHE0004074_PMON94164 | 0 | 100 | 9759255 | ref\|NP_196133.3\| |
| | | | | | | | transcription elongation |
| | | | | | | | factor-related [Arabidopsis |
| | | | | | | | thaliana] |
| 48 | 241 | 8 | PHE0004075_PMON92851 | 1.00E−132 | 100 | 11994587 | ref\|NP_566493.1\|nodulin |
| | | | | | | | MtN3 family protein |
| | | | | | | | [Arabidopsis thaliana] |
| 49 | 242 | 8 | PHE0004080_PMON93321 | 1.00E−143 | 99 | 16173 | emb\|CAA42168.1\|L- |
| | | | | | | | ascorbate peroxidase |
| | | | | | | | [Arabidopsis thaliana] |
| 50 | 243 | 14 | PHE0004084_PMON95141 | 0 | 100 | 7267537 | emb\|CAB78019.1\|putative |
| | | | | | | | phi-1-like phosphate- |
| | | | | | | | induced protein |
| | | | | | | | [Arabidopsis thaliana] |
| | | | | | | | gb\|AAM18526.1\|cell cycle- |
| | | | | | | | related protein [Arabidopsis |
| | | | | | | | thaliana] |
| 51 | 244 | 8 | PHE0004093_PMON93332 | 0 | 100 | 12744973 | gb\|AAK06866.1\|putative |
| | | | | | | | ATPase [Arabidopsis |
| | | | | | | | thaliana] ref\|NP_173536.1\| |
| | | | | | | | O-methyltransferase, |
| | | | | | | | putative [Arabidopsis |
| | | | | | | | thaliana] |
| 52 | 245 | 14 | PHE0004093_PMON94155 | 0 | 100 | 12744973 | gb\|AAK06866.1\|putative |
| | | | | | | | ATPase [Arabidopsis |
| | | | | | | | thaliana] ref\|NP_173536.1\| |
| | | | | | | | O-methyltransferase, |
| | | | | | | | putative [Arabidopsis |
| | | | | | | | thaliana] |
| 53 | 246 | 8 | PHE0004139_PMON92898 | 2.00E−88 | 100 | 21554099 | ref\|NP_568761.1\|expressed |
| | | | | | | | protein [Arabidopsis |
| | | | | | | | thaliana] |
| 54 | 247 | 8 | PHE0004144_PMON93842 | 1.00E−78 | 100 | 21555039 | ref\|NP_565390.1\|actin- |
| | | | | | | | depolymerizing factor 5 |
| | | | | | | | (ADF5) [Arabidopsis |
| | | | | | | | thaliana] |
| 55 | 248 | 8 | PHE0004148_PMON92574 | 0 | 100 | 48768596 | ref\|ZP_00272945.1\|COG0538: |
| | | | | | | | Isocitrate |
| | | | | | | | dehydrogenases [Ralstonia |
| | | | | | | | metallidurans CH34] |
| 56 | 249 | 8 | PHE0004149_PMON92471 | 1.00E−148 | 99 | 31096331 | ref\|NP_441003.1\| |
| | | | | | | | phycocyanin alpha |
| | | | | | | | phycocyanobilin lyase; |
| | | | | | | | CpcE [Synechocystis sp. |
| | | | | | | | PCC 6803] |
| 57 | 250 | 14 | PHE0004149_PMON93899 | 1.00E−148 | 99 | 31096331 | ref\|NP_441003.1\| |
| | | | | | | | phycocyanin alpha |
| | | | | | | | phycocyanobilin lyase; |
| | | | | | | | CpcE [Synechocystis sp. |
| | | | | | | | PCC 6803] |
| 58 | 251 | 15 | PHE0004152_PMON93672 | 3.00E−85 | 60 | 8978267 | ref\|NP_199781.1\|DNA- |
| | | | | | | | binding protein-related |
| | | | | | | | [Arabidopsis thaliana] |
| 59 | 252 | 8 | PHE0004155_PMON92626 | 0 | 100 | 22136876 | ref\|NP_200010.1\|sorbitol |
| | | | | | | | dehydrogenase, putative/ |
| | | | | | | | L-iditol 2-dehydrogenase, |
| | | | | | | | putative [Arabidopsis |
| | | | | | | | thaliana] |
| 60 | 253 | 8 | PHE0004156_PMON92623 | 0 | 98 | 12322729 | ref\|NP_187478.1\| |
| | | | | | | | phototropic-responsive |
| | | | | | | | protein, putative |
| | | | | | | | [Arabidopsis thaliana] |
| 61 | 254 | 8 | PHE0004162_PMON92481 | 3.00E−77 | 57 | 7269806 | emb\|CAB79666.1\|phytochrome- |
| | | | | | | | associated protein |
| | | | | | | | PAP2 [Arabidopsis |
| | | | | | | | thaliana] |
| 62 | 255 | 8 | PHE0004164_PMON92465 | 4.00E−67 | 100 | 21537028 | ref\|NP_198423.1\|glycosyl |
| | | | | | | | hydrolase family protein 17 |
| | | | | | | | [Arabidopsis thaliana] |
| 63 | 256 | 8 | PHE0004166_PMON93801 | 6.00E−09 | 100 | 13374861 | emb\|CAC34495.1\|putative |
| | | | | | | | strictosidine synthase-like |
| | | | | | | | [Arabidopsis thaliana] |
| 64 | 257 | 8 | PHE0004167_PMON93333 | 1.00E−176 | 100 | 28827764 | ref\|NP_569050.1\| |
| | | | | | | | adenylylsulfate kinase, |
| | | | | | | | putative [Arabidopsis |
| | | | | | | | thaliana] |
| 65 | 258 | 8 | PHE0004168_PMON93855 | 0 | 100 | 18176302 | ref\|NP_199253.1\|FAD- |
| | | | | | | | binding domain-containing |
| | | | | | | | protein [Arabidopsis |
| | | | | | | | thaliana] |
| 66 | 259 | 8 | PHE0004169_PMON92568 | 0 | 100 | 5080826 | gb\|AAD39335.1\|Putative |
| | | | | | | | Aldo/keto reductase |
| | | | | | | | [Arabidopsis thaliana] |
| 67 | 260 | 8 | PHE0004184_PMON92565 | 0 | 100 | 7270846 | emb\|CAB80527.1\|multiubiquitin |
| | | | | | | | chain binding protein |
| | | | | | | | (MBP1) [Arabidopsis |
| | | | | | | | thaliana] |
| 68 | 261 | 8 | PHE0004185_PMON92802 | 0 | 100 | 28460683 | ref\|NP_182075.1\| |
| | | | | | | | cytochrome P450, putative |
| | | | | | | | [Arabidopsis thaliana] |
| 69 | 262 | 8 | PHE0004188_PMON92803 | 0 | 100 | 20465485 | ref\|NP_200218.1\|heat |
| | | | | | | | shock transcription factor |
| | | | | | | | family protein [Arabidopsis |
| | | | | | | | thaliana] |
| 70 | 263 | 8 | PHE0004190_PMON92801 | 1.00E−167 | 98 | 7267277 | ref\|NP_192426.1\|basic |
| | | | | | | | helix-loop-helix (bHLH) |
| | | | | | | | family protein [Arabidopsis |
| | | | | | | | thaliana] |
| 71 | 264 | 8 | PHE0004208_PMON92834 | 1.00E−83 | 55 | 21555865 | gb\|AAS09998.1\|MYB |
| | | | | | | | transcription factor |
| | | | | | | | [Arabidopsis thaliana] |
| 72 | 265 | 8 | PHE0004215_PMON92827 | 2.00E−55 | 65 | 7320708 | ref\|NP_195750.1\| |
| | | | | | | | phosphatidylethanolamine- |
| | | | | | | | binding family protein |
| | | | | | | | [Arabidopsis thaliana] |
| 73 | 266 | 8 | PHE0004223_PMON92840 | 0 | 100 | 6523058 | ref\|NP_190239.1\|fasciclin- |
| | | | | | | | like arabinogalactan family |
| | | | | | | | protein [Arabidopsis |
| | | | | | | | thaliana] |
| 74 | 267 | 8 | PHE0004225_PMON94167 | 0 | 99 | 1421730 | gb\|AAC49371.1\|RF2 |
| | | | | | | | gb\|AAG43988.1\|T |
| | | | | | | | cytoplasm male sterility |
| | | | | | | | restorer factor 2 [Zea mays] |
| 75 | 268 | 10 | PHE0004226_PMON95114 | 0 | 100 | 53793208 | dbj\|BAD54414.1\|aldehyde |
| | | | | | | | dehydrogenase ALDH2b |
| | | | | | | | [Oryza sativa (japonica |
| | | | | | | | cultivar-group)] |
| 76 | 269 | 8 | PHE0004227_PMON92605 | 5.00E−26 | 100 | 21314334 | gb\|AAM46894.1\|early |
| | | | | | | | drought induced protein |
| | | | | | | | [Oryza sativa (indica |
| | | | | | | | cultivar-group)] |
| 77 | 270 | 8 | PHE0004229_PMON92867 | 1.00E−24 | 100 | 6320482 | ref\|NP_010562.1\|Small |
| | | | | | | | plasma membrane protein |
| | | | | | | | related to a family of plant |
| | | | | | | | polypeptides that are |
| | | | | | | | overexpressed under high |
| | | | | | | | salt concentration or low |
| | | | | | | | temperature, not essential |
| | | | | | | | for viability, deletion causes |
| | | | | | | | hyperpolarization of the |
| | | | | | | | plasma membrane potential; |
| | | | | | | | Pmp3p [Saccharomyces |
| | | | | | | | cerevisiae] |
| 78 | 271 | 8 | PHE0004233_PMON92843 | 0 | 100 | 19310749 | ref\|NP_188922.1\|heat |
| | | | | | | | shock transcription factor |
| | | | | | | | family protein [Arabidopsis |
| | | | | | | | thaliana] |
| 79 | 272 | 13 | PHE0004237_PMON93673 | 9.00E−85 | 100 | 16338 | emb\|CAA45039.1\|heat |
| | | | | | | | shock protein 17.6-II |
| | | | | | | | [Arabidopsis thaliana] |
| 80 | 273 | 8 | PHE0004243_PMON92621 | 3.00E−72 | 82 | 30409461 | dbj\|BAC76332.1\|HAP3 |
| | | | | | | | [Oryza sativa (japonica |
| | | | | | | | cultivar-group)] |
| 81 | 274 | 8 | PHE0004244_PMON92858 | 1.00E−159 | 96 | 15321716 | gb\|AAK95562.1\|leafy |
| | | | | | | | cotyledon1 [Zea mays] |
| 82 | 275 | 8 | PHE0004245_PMON93813 | 1.00E−131 | 100 | 50509850 | dbj\|BAD32022.1\|putative |
| | | | | | | | transcription factor [Oryza |
| | | | | | | | sativa (japonica cultivar- |
| | | | | | | | group)] |
| 83 | 276 | 8 | PHE0004248_PMON94672 | 1.00E−98 | 100 | 34907184 | ref\|NP_914939.1\|putative |
| | | | | | | | CCAAT-binding |
| | | | | | | | transcription factor subunit |
| | | | | | | | A(CBF-A) [Oryza sativa |
| 84 | 277 | 8 | PHE0004249_PMON95137 | 1.00E−48 | 100 | 12642910 | ref\|NP_850005.1\|expressed |
| | | | | | | | protein [Arabidopsis |
| | | | | | | | thaliana] |
| 85 | 278 | 8 | PHE0004250_PMON92881 | 5.00E−78 | 100 | 30409463 | dbj\|BAC76333.1\|HAP3 |
| | | | | | | | [Oryza sativa (japonica |
| | | | | | | | cultivar-group)] |
| 86 | 279 | 8 | PHE0004252_PMON92606 | 1.00E−173 | 100 | 18481620 | gb\|AAL73485.1\|repressor |
| | | | | | | | protein [Oryza sativa] |
| 87 | 280 | 8 | PHE0004253_PMON92874 | 1.00E−143 | 100 | 18481626 | gb\|AAL73488.1\|repressor |
| | | | | | | | protein [Zea mays] |
| 88 | 281 | 14 | PHE0004258_PMON93385 | 0 | 100 | 1871189 | gb\|AAB63549.1\|putative |
| | | | | | | | protein kinase [Arabidopsis |
| | | | | | | | thaliana] |
| 89 | 282 | 8 | PHE0004258_PMON93806 | 0 | 100 | 1871189 | gb\|AAB63549.1\|putative |
| | | | | | | | protein kinase [Arabidopsis |
| | | | | | | | thaliana] |
| 90 | 283 | 14 | PHE0004259_PMON93384 | 0 | 100 | 9755654 | ref\|NP_197112.1\|expressed |
| | | | | | | | protein [Arabidopsis |
| | | | | | | | thaliana] |
| 91 | 284 | 8 | PHE0004260_PMON92854 | 1.00E−48 | 100 | 12642910 | ref\|NP_850005.1\|expressed |
| | | | | | | | protein [Arabidopsis |
| | | | | | | | thaliana] |
| 92 | 285 | 14 | PHE0004261_PMON93389 | 1.00E−170 | 100 | 7270230 | ref\|NP_195009.1\|protein |
| | | | | | | | kinase, putative |
| | | | | | | | [Arabidopsis thaliana] |
| 93 | 286 | 8 | PHE0004261_PMON93655 | 1.00E−170 | 100 | 7270230 | ref\|NP_195009.1\|protein |
| | | | | | | | kinase, putative |
| | | | | | | | [Arabidopsis thaliana] |
| 94 | 287 | 8 | PHE0004262_PMON92862 | 0 | 100 | 42570809 | ref\|NP_973478.1\|protein |
| | | | | | | | kinase, putative |
| | | | | | | | [Arabidopsis thaliana] |
| 95 | 288 | 14 | PHE0004262_PMON93360 | 0 | 100 | 42570809 | ref\|NP_973478.1\|protein |
| | | | | | | | kinase, putative |
| | | | | | | | [Arabidopsis thaliana] |
| 96 | 289 | 8 | PHE0004264_PMON92845 | 3.00E−95 | 100 | 21554624 | ref\|NP_201267.1\| |
| | | | | | | | invertase/pectin |
| | | | | | | | methylesterase inhibitor |
| | | | | | | | family protein [Arabidopsis |
| | | | | | | | thaliana] |
| 97 | 290 | 14 | PHE0004264_PMON93354 | 3.00E−95 | 100 | 21554624 | ref\|NP_201267.1\| |
| | | | | | | | invertase/pectin |
| | | | | | | | methylesterase inhibitor |
| | | | | | | | family protein [Arabidopsis |
| | | | | | | | thaliana] |
| 98 | 291 | 8 | PHE0004265_PMON92873 | 0 | 100 | 642305 | ref\|NP_013662.1\| |
| | | | | | | | Hypothetical ORF; |
| | | | | | | | Yml050wp [Saccharomyces |
| | | | | | | | cerevisiae] |
| 99 | 292 | 14 | PHE0004265_PMON93807 | 0 | 100 | 642305 | ref\|NP_013662.1\| |
| | | | | | | | Hypothetical ORF; |
| | | | | | | | Yml050wp [Saccharomyces |
| | | | | | | | cerevisiae] |
| 100 | 293 | 8 | PHE0004266_PMON92877 | 0 | 99 | 23506085 | ref\|NP_567548.1\|pseudo- |
| | | | | | | | response regulator 2 |
| | | | | | | | (APRR2) (TOC2) |
| | | | | | | | [Arabidopsis thaliana] |
| 101 | 294 | 8 | PHE0004284_PMON93857 | 0 | 99 | 18399375 | ref\|NP_566402.1\|U-box |
| | | | | | | | domain-containing protein |
| | | | | | | | [Arabidopsis thaliana] |
| 102 | 295 | 10 | PHE0004285_PMON95136 | 1.00E−161 | 96 | 37542675 | gb\|AAL47207.1\|HAP3-like |
| | | | | | | | transcriptional-activator |
| | | | | | | | [Oryza sativa (indica |
| | | | | | | | cultivar-group)] |
| 103 | 296 | 8 | PHE0004286_PMON93666 | 0 | 99 | 255220 | gb\|AAB23208.1\|isocitrate |
| | | | | | | | lyase, threo-D S-isocitrate |
| | | | | | | | glyoxylate-lyase, IL {EC |
| | | | | | | | 4.1.3.1} [Brassica napus, |
| | | | | | | | seedlings, Peptide, 576 aa] |
| 104 | 297 | 8 | PHE0004287_PMON93344 | 0 | 88 | 50937953 | ref\|XP_478504.1\|putative |
| | | | | | | | isocitrate lyase [Oryza |
| | | | | | | | sativa (japonica cultivar- |
| | | | | | | | group)] |
| 105 | 298 | 2 | PHE0004307_PMON94102 | 1.00E−105 | 62 | 38345397 | emb\|CAE03088.2\|OSJNBa0017B10.3 |
| | | | | | | | [Oryza sativa |
| | | | | | | | (japonica cultivar-group)] |
| 106 | 299 | 14 | PHE0004314_PMON93397 | 9.00E−52 | 54 | 55740645 | gb\|AAV63915.1\|hypothetical |
| | | | | | | | protein At4g03965 |
| | | | | | | | [Arabidopsis thaliana] |
| 107 | 300 | 8 | PHE0004321_PMON93811 | 1.00E−128 | 100 | 18655355 | sp\|O48646\|GPX4_ARATH |
| | | | | | | | Probable phospholipid |
| | | | | | | | hydroperoxide glutathione |
| | | | | | | | peroxidase, mitochondrial |
| | | | | | | | precursor (PHGPx) |
| | | | | | | | (AtGPX1) |
| 108 | 301 | 14 | PHE0004321_PMON93834 | 1.00E−128 | 100 | 18655355 | ref\|NP_192897.2\| |
| | | | | | | | glutathione peroxidase, |
| | | | | | | | putative [Arabidopsis |
| | | | | | | | thaliana] |
| 109 | 302 | 8 | PHE0004325_PMON93818 | 5.00E−78 | 89 | 50906887 | ref\|XP_464932.1\|cytochrome |
| | | | | | | | c biogenesis protein-like |
| | | | | | | | [Oryza sativa (japonica |
| | | | | | | | cultivar-group)] |
| 110 | 303 | 8 | PHE0004335_PMON93850 | 0 | 100 | 28393953 | gb\|AAO42384.1\|putative |
| | | | | | | | major intrinsic protein |
| | | | | | | | [Arabidopsis thaliana] |
| 111 | 304 | 8 | PHE0004336_PMON93858 | 1.00E−146 | 69 | 51964952 | ref\|XP_482812.1\|major |
| | | | | | | | intrinsic protein-like [Oryza |
| | | | | | | | sativa (japonica cultivar- |
| | | | | | | | group)] |
| 112 | 305 | 4 | PHE0004337_PMON93886 | 0 | 62 | 50943587 | ref\|XP_481321.1\|unknown |
| | | | | | | | protein [Oryza sativa |
| | | | | | | | (japonica cultivar-group)] |
| 113 | 306 | 8 | PHE0004348_PMON93810 | 1.00E−32 | 100 | 15644431 | ref\|NP_229483.1\|cold shock |
| | | | | | | | protein [Thermotoga |
| | | | | | | | maritima MSB8] |
| 114 | 307 | 8 | PHE0004349_PMON93812 | 8.00E−33 | 100 | 15644617 | ref\|NP_229670.1\|cold shock |
| | | | | | | | protein [Thermotoga |
| | | | | | | | maritima MSB8] |
| 115 | 308 | 8 | PHE0004350_PMON93826 | 3.00E−31 | 100 | 20808157 | ref\|NP_623328.1\|Cold |
| | | | | | | | shock proteins |
| | | | | | | | [Thermoanaerobacter |
| | | | | | | | tengcongensis MB4] |
| 116 | 309 | 8 | PHE0004351_PMON93821 | 7.00E−32 | 100 | 56419891 | ref\|YP_147209.1\|cold shock |
| | | | | | | | protein [Geobacillus |
| | | | | | | | kaustophilus HTA426] |
| 117 | 310 | 8 | PHE0004352_PMON93824 | 1.00E−27 | 88 | 49611845 | ref\|YP_050486.1\|cold |
| | | | | | | | shock protein [Erwinia |
| | | | | | | | carotovora subsp. |
| | | | | | | | atroseptica SCRI1043] |
| 118 | 311 | 8 | PHE0004383_PMON93816 | 1.00E−34 | 98 | 50899510 | ref\|XP_450543.1\|unknown |
| | | | | | | | protein [Oryza sativa |
| | | | | | | | (japonica cultivar-group)] |
| 119 | 312 | 8 | PHE0004393_PMON94192 | 8.00E−95 | 100 | 42572939 | ref\|NP_974566.1\|calcineurin |
| | | | | | | | B-like protein 1 (CBL1) |
| | | | | | | | [Arabidopsis thaliana] |
| 120 | 313 | 8 | PHE0004395_PMON94145 | 0 | 100 | 30690488 | ref\|NP_849501.1\|phospholipase |
| | | | | | | | D delta/PLD delta |
| | | | | | | | (PLDDELTA) [Arabidopsis |
| | | | | | | | thaliana] |
| 121 | 314 | 8 | PHE0004396_PMON94137 | 0 | 100 | 7270422 | emb\|CAB80188.1\|arginine |
| | | | | | | | decarboxylase SPE2 |
| | | | | | | | [Arabidopsis thaliana] |
| 122 | 315 | 8 | PHE0004417_PMON94190 | 1.00E−170 | 100 | 1230677 | gb\|AAC17191.1\| |
| | | | | | | | spermidine synthase |
| | | | | | | | [Saccharomyces cerevisiae] |
| 123 | 316 | 8 | PHE0004418_PMON94368 | 0 | 100 | 798930 | sp\|P50264\|FMS1_YEAST |
| | | | | | | | Polyamine oxidase FMS1 |
| | | | | | | | (Fenpropimorph resistance |
| | | | | | | | multicopy suppressor 1) |
| 124 | 317 | 8 | PHE0004419_PMON95100 | 0 | 66 | 21281139 | ref\|NP_567276.1\| |
| | | | | | | | amidohydrolase family |
| | | | | | | | protein [Arabidopsis |
| | | | | | | | thaliana] |
| 125 | 318 | 10 | PHE0004421_PMON95120 | 2.00E−53 | 78 | 33321848 | gb\|AAQ06658.1\|apetala2 |
| | | | | | | | domain-containing CBF1- |
| | | | | | | | like protein [Oryza sativa] |
| 126 | 319 | 10 | PHE0004422_PMON95123 | 3.00E−51 | 80 | 25991254 | gb\|AAN76804.1\|DREB-like |
| | | | | | | | protein [Zea mays] |
| 127 | 320 | 8 | PHE0004425_PMON94428 | 7.00E−37 | 98 | 11762134 | gb\|AAG40345.1\|AT5g17460 |
| | | | | | | | [Arabidopsis thaliana] |
| 128 | 321 | 8 | PHE0004431_PMON94398 | 1.00E−159 | 99 | 557818 | ref\|NP_012214.1\|Pho85p |
| | | | | | | | cyclin of the Pho80p |
| | | | | | | | subfamily, forms a |
| | | | | | | | functional kinase complex |
| | | | | | | | with Pho85p which |
| | | | | | | | phosphorylates Mmr1p and |
| | | | | | | | is regulated by Pho81p; |
| | | | | | | | involved in glycogen |
| | | | | | | | metabolism, expression is |
| | | | | | | | cell-cycle regulated; Pcl7p |
| | | | | | | | [Saccharomyces cerevisiae] |
| 129 | 322 | 8 | PHE0004432_PMON94112 | 0 | 100 | 15156338 | ref\|NP_354295.1\| |
| | | | | | | | hypothetical protein |
| | | | | | | | AGR_C_2368 |
| | | | | | | | [Agrobacterium |
| | | | | | | | tumefaciens str. C58] |
| 130 | 323 | 8 | PHE0004472_PMON94115 | 1.00E−128 | 100 | 16323494 | ref\|NP_187978.1\|seven in |
| | | | | | | | absentia (SINA) family |
| | | | | | | | protein [Arabidopsis |
| | | | | | | | thaliana] |
| 131 | 324 | 14 | PHE0004472_PMON94126 | 1.00E−128 | 100 | 16323494 | ref\|NP_187978.1\|seven in |
| | | | | | | | absentia (SINA) family |
| | | | | | | | protein [Arabidopsis |
| | | | | | | | thaliana] |
| 132 | 325 | 14 | PHE0004488_PMON95609 | 1.00E−123 | 100 | 21554344 | ref\|NP_198627.1\|ASF1- |
| | | | | | | | like anti-silencing family |
| | | | | | | | protein [Arabidopsis |
| | | | | | | | thaliana] |
| 133 | 326 | 14 | PHE0004491_PMON95628 | 3.00E−12 | 45 | 14916641 | dbj\|BAB19648.1\| |
| | | | | | | | preprophytosulfokine |
| | | | | | | | [Oryza sativa] |
| 134 | 327 | 14 | PHE0004492_PMON95614 | 0 | 100 | 22331730 | ref\|NP_190653.2\|phototropic- |
| | | | | | | | responsive NPH3 family |
| | | | | | | | protein [Arabidopsis |
| | | | | | | | thaliana] |
| 135 | 328 | 10 | PHE0004545_PMON95117 | 1.00E−106 | 100 | 28973235 | ref\|NP_173200.1\| |
| | | | | | | | ribosomal protein L14 |
| | | | | | | | family protein [Arabidopsis |
| | | | | | | | thaliana] |
| 136 | 329 | 8 | PHE0004574_PMON94433 | 0 | 100 | 16329404 | ref\|NP_440132.1\|transaldolase |
| | | | | | | | [Synechocystis sp. PCC |
| | | | | | | | 6803] |
| 137 | 330 | 14 | PHE0004606_PMON95627 | 0 | 100 | 130709 | pir\|\|S29317 phosphoprotein |
| | | | | | | | phosphatase (EC 3.1.3.16) 1 - |
| | | | | | | | maize gb\|AAA33545.1\| |
| | | | | | | | protein phosphatase-1 |
| 138 | 331 | 8 | PHE0004620_PMON94189 | 1.00E−101 | 57 | 56421275 | ref\|YP_148593.1\|6- |
| | | | | | | | phosphofructokinase |
| | | | | | | | (phosphofructokinase) |
| | | | | | | | (phosphohexokinase) |
| | | | | | | | [Geobacillus kaustophilus |
| | | | | | | | HTA426] |
| 139 | 332 | 14 | PHE0004620_PMON94442 | 1.00E−101 | 57 | 56421275 | ref\|YP_148593.1\|6- |
| | | | | | | | phosphofructokinase |
| | | | | | | | (phosphofructokinase) |
| | | | | | | | (phosphohexokinase) |
| | | | | | | | [Geobacillus kaustophilus |
| | | | | | | | HTA426] |
| 140 | 333 | 14 | PHE0004622_PMON95621 | 0 | 100 | 10177836 | ref\|NP_974942.1\|F-box |
| | | | | | | | family protein [Arabidopsis |
| | | | | | | | thaliana] |
| 141 | 334 | 8 | PHE0004626_PMON95101 | 0 | 88 | 50942161 | ref\|XP_480608.1\|putative |
| | | | | | | | gamma-aminobutyrate |
| | | | | | | | transaminase subunit |
| | | | | | | | precursor isozyme 3 [Oryza |
| | | | | | | | sativa (japonica cultivar- |
| | | | | | | | group)] |
| 142 | 335 | 8 | PHE0004630_PMON94367 | 0 | 100 | 7270516 | emb\|CAB80281.1\|NAD+ |
| | | | | | | | dependent isocitrate |
| | | | | | | | dehydrogenase-like protein |
| | | | | | | | [Arabidopsis thaliana] |
| 143 | 336 | 3 | PHE0004634_PMON94385 | 1.00E−102 | 100 | 61656127 | ref\|NP_176491.1\|AP2 |
| | | | | | | | domain-containing |
| | | | | | | | transcription factor, putative |
| | | | | | | | [Arabidopsis thaliana] |
| 144 | 337 | 2 | PHE0004640_PMON95066 | 0 | 73 | 34913436 | ref\|NP_918065.1\|putative |
| | | | | | | | fatty acid condensing |
| | | | | | | | enzyme CUT1 [Oryza |
| | | | | | | | sativa (japonica cultivar- |
| | | | | | | | group)] |
| 145 | 338 | 8 | PHE0004645_PMON94655 | 1.00E−136 | 100 | 18411867 | ref\|NP_565174.1\|14-3-3 |
| | | | | | | | protein GF14 pi (GRF13) |
| | | | | | | | [Arabidopsis thaliana] |
| 146 | 339 | 14 | PHE0004645_PMON94685 | 1.00E−136 | 100 | 18411867 | ref\|NP_565174.1\|14-3-3 |
| | | | | | | | protein GF14 pi (GRF13) |
| | | | | | | | [Arabidopsis thaliana] |
| 147 | 340 | 8 | PHE0004647_PMON94651 | 1.00E−117 | 100 | 21554066 | pir\|\|T02447 hypothetical |
| | | | | | | | protein At2g46000 |
| | | | | | | | Arabidopsis thaliana |
| 148 | 341 | 14 | PHE0004647_PMON94688 | 1.00E−117 | 100 | 21554066 | gb\|AAM63147.1\|unknown |
| | | | | | | | [Arabidopsis thaliana] |
| 149 | 342 | 14 | PHE0004650_PMON94686 | 1.00E−112 | 100 | 67633514 | gb\|AAY78681.1\|putative E3 |
| | | | | | | | ubiquitin ligase SCF |
| | | | | | | | complex subunit |
| | | | | | | | SKP1/ASK1 [Arabidopsis |
| | | | | | | | thaliana] |
| 150 | 343 | 8 | PHE0004652_PMON94657 | 1.00E−138 | 100 | 38603872 | dbj\|BAD43212.1\|putative |
| | | | | | | | glutamate/aspartate-binding |
| | | | | | | | peptide [Arabidopsis |
| | | | | | | | thaliana] |
| 151 | 344 | 14 | PHE0004652_PMON94687 | 1.00E−138 | 100 | 38603872 | dbj\|BAD43212.1\|putative |
| | | | | | | | glutamate/aspartate-binding |
| | | | | | | | peptide [Arabidopsis |
| | | | | | | | thaliana] |
| 152 | 345 | 8 | PHE0004687_PMON94669 | 7.00E−61 | 91 | 21592528 | ref\|NP_568396.1\|ring-box |
| | | | | | | | protein-related [Arabidopsis |
| | | | | | | | thaliana] |
| 153 | 346 | 10 | PHE0004689_PMON95131 | 0 | 100 | 7268004 | emb\|CAB78344.1\|serine/threonine- |
| | | | | | | | specific protein |
| | | | | | | | kinase MHK [Arabidopsis |
| | | | | | | | thaliana] |
| 154 | 347 | 10 | PHE0004691_PMON95129 | 0 | 100 | 51978966 | emb\|CAB61629.1\| |
| | | | | | | | spermidine synthase 1 |
| | | | | | | | [Oryza sativa] |
| 155 | 348 | 14 | PHE0004719_PMON94698 | 1.00E−147 | 100 | 28416631 | ref\|NP_564556.1\|zinc |
| | | | | | | | finger (C3HC4-type RING |
| | | | | | | | finger) family protein |
| | | | | | | | [Arabidopsis thaliana] |
| 156 | 349 | 8 | PHE0004719_PMON95089 | 1.00E−147 | 100 | 28416631 | ref\|NP_564556.1\|zinc |
| | | | | | | | finger (C3HC4-type RING |
| | | | | | | | finger) family protein |
| | | | | | | | [Arabidopsis thaliana] |
| 157 | 350 | 8 | PHE0004734_PMON94667 | 1.00E−87 | 100 | 5080771 | ref\|NP_172848.1\| |
| | | | | | | | eukaryotic translation |
| | | | | | | | initiation factor 5A-1/eIF- |
| | | | | | | | 5A 1 [Arabidopsis thaliana] |
| 158 | 351 | 10 | PHE0004735_PMON95116 | 9.00E−88 | 100 | 21592652 | ref\|NP_177100.1\| |
| | | | | | | | eukaryotic translation |
| | | | | | | | initiation factor 5A, putative/ |
| | | | | | | | eIF-5A, putative |
| | | | | | | | [Arabidopsis thaliana] |
| 159 | 352 | 8 | PHE0004739_PMON95110 | 1.00E−109 | 100 | 6562282 | emb\|CAB62652.1\|rac-like |
| | | | | | | | GTP binding protein |
| | | | | | | | Arac11 [Arabidopsis |
| | | | | | | | thaliana] |
| 160 | 353 | 8 | PHE0004753_PMON95105 | 0 | 100 | 6684442 | ref\|NP_178062.1\| |
| | | | | | | | succinate-semialdehyde |
| | | | | | | | dehydrogenase (SSADH1) |
| | | | | | | | [Arabidopsis thaliana] |
| 161 | 354 | 8 | PHE0004759_PMON95109 | 0 | 100 | 29824301 | ref\|NP_849582.1\|expressed |
| | | | | | | | protein [Arabidopsis |
| | | | | | | | thaliana] |
| 162 | 355 | 10 | PHE0004770_PMON95122 | 1.00E−32 | 92 | 51038072 | gb\|AAT93875.1\|unknown |
| | | | | | | | protein [Oryza sativa |
| | | | | | | | (japonica cultivar-group)] |
| 163 | 356 | 10 | PHE0004772_PMON95132 | 6.00E−36 | 33 | 9758946 | ref\|NP_200265.1\| |
| | | | | | | | expressed protein |
| | | | | | | | [Arabidopsis thaliana] |
| 164 | 357 | 10 | PHE0004774_PMON95147 | 6.00E−52 | 66 | 50909195 | ref\|XP_466086.1\|putative |
| | | | | | | | multiple stress-responsive |
| | | | | | | | zinc-finger protein [Oryza |
| | | | | | | | sativa (japonica cultivar- |
| | | | | | | | group)] |
| 165 | 358 | 10 | PHE0004777_PMON95118 | 2.00E−64 | 100 | 26452894 | ref\|NP_180514.1\|DNA- |
| | | | | | | | directed RNA polymerase |
| | | | | | | | I(A) and III(C) 14 kDa |
| | | | | | | | subunit (RPAC14) |
| | | | | | | | [Arabidopsis thaliana] |
| 166 | 359 | 14 | PHE0004785_PMON95057 | 1.00E−145 | 84 | 34484312 | sp\|Q6UNT2\|RL5_CUCSA |
| | | | | | | | 60S ribosomal protein L5 |
| 167 | 360 | 10 | PHE0004786_PMON95604 | 0 | 100 | 7267537 | ref\|NP_192634.1\| |
| | | | | | | | phosphate-responsive |
| | | | | | | | protein, putative (EXO) |
| | | | | | | | [Arabidopsis thaliana] |
| 168 | 361 | 8 | PHE0004788_PMON95092 | 0 | 84 | 31126776 | ref\|XP_506910.1\| |
| | | | | | | | PREDICTED |
| | | | | | | | OSJNBa0057G07.4 gene |
| | | | | | | | product [Oryza sativa |
| | | | | | | | (japonica cultivar-group)] |
| 169 | 362 | 10 | PHE0004799_PMON95602 | 0 | 99 | 9843858 | emb\|CAC03739.1\|flavin |
| | | | | | | | containing polyamine |
| | | | | | | | oxidase [Zea mays] |
| 170 | 363 | 10 | PHE0004841_PMON95636 | 0 | 100 | 50909767 | ref\|XP_466372.1\|cryptochrome |
| | | | | | | | 1a [Oryza sativa |
| | | | | | | | (japonica cultivar-group)] |
| 171 | 364 | 10 | PHE0004844_PMON95637 | 3.00E−53 | 100 | 62734659 | gb\|AAX96768.1\|expressed |
| | | | | | | | protein [Oryza sativa |
| | | | | | | | (japonica cultivar-group)] |
| 172 | 365 | 14 | PHE0004854_PMON95611 | 1.00E−163 | 100 | 21592743 | ref\|NP_199265.1\|ribose 5- |
| | | | | | | | phosphate isomerase-related |
| | | | | | | | [Arabidopsis thaliana] |
| 173 | 366 | 10 | PHE0004862_PMON95601 | 5.00E−56 | 100 | 34902924 | dbj\|BAB07982.1\|FPF1 |
| | | | | | | | protein-like [Oryza sativa |
| | | | | | | | (japonica cultivar-group)] |
| 174 | 367 | 10 | PHE0004888_PMON95603 | 0 | 100 | 32405610 | ref\|XP_323418.1\|hypothetical |
| | | | | | | | protein [Neurospora |
| | | | | | | | crassa] |
| 175 | 368 | n/a | At1g21790.1 | 1.00E−168 | 100 | 21593249 | ref\|NP_564152.1\|expressed |
| | | | | | | | protein [Arabidopsis |
| | | | | | | | thaliana] |
| 176 | 369 | n/a | ERD4 | 0 | 100 | 17104683 | ref\|NP_564354.1\|early- |
| | | | | | | | responsive to dehydration |
| | | | | | | | stress protein (ERD4) |
| | | | | | | | [Arabidopsis thaliana] |
| 177 | 370 | n/a | At1g78070.2 | 0 | 100 | 42572153 | ref\|NP_974167.1\|WD-40 |
| | | | | | | | repeat family protein |
| | | | | | | | [Arabidopsis thaliana] |
| 178 | 371 | n/a | At1g78070.1 | 1.00E−128 | 100 | 18411805 | ref\|NP_565168.1\|WD-40 |
| | | | | | | | repeat family protein |
| | | | | | | | [Arabidopsis thaliana] |
| 179 | 372 | n/a | At3g47340.1 | 0 | 100 | 5541701 | ref\|NP_190318.1\| |
| | | | | | | | asparagine synthetase 1 |
| | | | | | | | [glutamine-hydrolyzing]/ |
| | | | | | | | glutamine-dependent |
| | | | | | | | asparagine synthetase 1 |
| | | | | | | | (ASN1) [Arabidopsis |
| | | | | | | | thaliana] |
| 180 | 373 | n/a | At3g47340.3 | 0 | 100 | 30692853 | ref\|NP_850664.1\|asparagine |
| | | | | | | | synthetase 1 [glutamine- |
| | | | | | | | hydrolyzing]/glutamine- |
| | | | | | | | dependent asparagine |
| | | | | | | | synthetase 1 (ASN1) |
| | | | | | | | [Arabidopsis thaliana] |
| 181 | 374 | n/a | At3g47340.2 | 0 | 100 | 30692849 | ref\|NP_850663.1\|asparagine |
| | | | | | | | synthetase 1 [glutamine- |
| | | | | | | | hydrolyzing]/glutamine- |
| | | | | | | | dependent asparagine |
| | | | | | | | synthetase 1 (ASN1) |
| | | | | | | | [Arabidopsis thaliana] |
| 182 | 375 | n/a | At5g13170.1 | 1.00E−163 | 100 | 9955561 | ref\|NP_196821.1\|nodulin |
| | | | | | | | MtN3 family protein |
| | | | | | | | [Arabidopsis thaliana] |
| 183 | 376 | n/a | At2g19900.1 | 0 | 100 | 28059162 | ref\|NP_179580.1\|malate |
| | | | | | | | oxidoreductase, putative |
| | | | | | | | [Arabidopsis thaliana] |
| 184 | 377 | n/a | At5g09480.1 | 8.00E−80 | 100 | 9955535 | ref\|NP_196510.1\| |
| | | | | | | | hydroxyproline-rich |
| | | | | | | | glycoprotein family protein |
| | | | | | | | [Arabidopsis thaliana] |
| 185 | 378 | n/a | At5g09530.1 | 0 | 100 | 7671436 | ref\|NP_196515.1\| |
| | | | | | | | hydroxyproline-rich |
| | | | | | | | glycoprotein family protein |
| | | | | | | | [Arabidopsis thaliana] |
| 186 | 379 | n/a | At2g42790.1 | 0 | 100 | 21700853 | ref\|NP_181807.1\|citrate |
| | | | | | | | synthase, glyoxysomal, |
| | | | | | | | putative [Arabidopsis |
| | | | | | | | thaliana] |
| 187 | 380 | n/a | At3g56200.1 | 0 | 100 | 7572918 | ref\|NP_191179.1\|amino |
| | | | | | | | acid transporter family |
| | | | | | | | protein [Arabidopsis |
| | | | | | | | thaliana] |
| 188 | 381 | n/a | At5g01520.1 | 1.00E−141 | 100 | 7327811 | ref\|NP_195772.1\|zinc |
| | | | | | | | finger (C3HC4-type RING |
| | | | | | | | finger) family protein |
| | | | | | | | [Arabidopsis thaliana] |
| 189 | 382 | n/a | At5g01520.2 | 2.00E−97 | 100 | 7327811 | ref\|NP_195772.1\|zinc |
| | | | | | | | finger (C3HC4-type RING |
| | | | | | | | finger) family protein |
| | | | | | | | [Arabidopsis thaliana] |
| 190 | 383 | n/a | At5g66780.1 | 2.00E−66 | 100 | 9758128 | d ref\|NP_201479.1\| |
| | | | | | | | expressed protein |
| | | | | | | | [Arabidopsis thaliana] |
| 191 | 384 | n/a | At5g59320.1 | 1.00E−61 | 100 | 24417292 | ref\|NP_568905.1\|lipid |
| | | | | | | | transfer protein 3 (LTP3) |
| | | | | | | | [Arabidopsis thaliana] |
| 192 | 385 | n/a | AtHB7 | 1.00E−151 | 100 | 20259175 | gb\|AAM14303.1\|putative |
| | | | | | | | homeodomain transcription |
| | | | | | | | factor protein ATHB-7 |
| | | | | | | | [Arabidopsis thaliana] |
| 193 | 386 | n/a | RD20 | 1.00E−136 | 100 | 20465881 | ref\|NP_180896.1\|calcium- |
| | | | | | | | binding RD20 protein |
| | | | | | | | (RD20) [Arabidopsis |
| | | | | | | | thaliana] |

### Screening Methods for Transgenic Plants with Enhanced Agronomic Trait

[0085] Many transgenic events which survive to fertile transgenic plants that produce seeds and progeny plants will not exhibit an enhanced agronomic trait. Screening is necessary to identify the transgenic plant of this invention. Transgenic plants having enhanced agronomic traits are identified from populations of plants transformed as described herein by evaluating the trait in a variety of assays to detect an enhanced agronomic trait. These assays also may take many forms, including but not limited to, analyses to detect changes in the chemical composition, biomass, physiological properties, morphology of the plant. Changes in chemical compositions such as nutritional composition of grain can be detected by analysis of the seed composition and content of protein, free amino acids, oil, free fatty acids, starch or tocopherols. Changes in biomass characteristics can be made on greenhouse or field grown plants and can include plant height, stem diameter, root and shoot dry weights; and, for corn plants, ear length and diameter. Changes in physiological properties can be identified by evaluating responses to stress conditions, e.g., assays using imposed stress conditions such as water deficit, nitrogen deficiency, cold growing conditions, pathogen or insect attack or light deficiency, or increased plant density. Changes in morphology can be measured by visual observation of tendency of a transformed plant with an enhanced agronomic trait to also appear to be a normal plant as compared to changes toward bushy, taller, thicker, narrower leaves, striped leaves, knotted trait, chlorosis, albino, anthocyanin production, or altered tassels, ears or roots. Other screening properties include days to pollen shed, days to silking, leaf extension rate, chlorophyll content, leaf temperature, stand, seedling vigor, internode length, plant height, leaf number, leaf area, tittering, brace roots, stay green, stalk lodging, root lodging, plant health, barreness/prolificacy, green snap, and pest resistance. In addition, phenotypic characteristics of harvested grain may be evaluated, including number of kernels per row on the ear, number of rows of kernels on the ear, kernel abortion, kernel weight, kernel size, kernel density and physical grain quality.

[0086] Although preferred seeds for transgenic plants with enhanced agronomic traits of this invention are corn and soybean plants, other seeds are for cotton, canola, wheat, sunflower, sorghum, alfalfa, barley, millet, rice, tobacco, fruit and vegetable crops, and turfgrass

### Example 1

### Plant Expression Constructs

[0087] This example illustrates the construction of plasmids for transferring recombinant DNA into plant cells which can be regenerated into transgenic plants of this invention.

[0088] Primers for PCR amplification of protein coding nucleotides of recombinant DNA are designed at or near the start and stop codons of the coding sequence, in order to eliminate most of the 5′ and 3′ untranslated regions. Each recombinant DNA coding for a protein identified in Table 1 is amplified by PCR prior to insertion into the insertion site of one of the base vectors as referenced in Table 5.

[0089] A. Corn Transformation Constructs

[0090] With reference to Table 2 and FIG. 1, pMON82060 illustrates the elements of base vector 1 for corn transformation. Other base vectors for corn transformation were also constructed by replacing the gene of interest plant expression cassette elements of base vector 1, i.e. the promoter, leader, intron and terminator elements, with the elements listed in Table 5 to provide base vectors 2-12 for corn transformation. Each of the protein encoding DNA as identified in Table 1 is placed in the gene of interest plant expression cassette before the termination sequence in each of the base vector 1-12.

TABLE 2
pMON82060

| | | | Coordinates |
|---|---|---|---|
| | | | of SEQ ID |
| function | name | annotation | NO: 12603 |
| Agro | B-AGRtu.right | Agro right border sequence, essential for | 5235-5591 |
| transformation | border | transfer of T-DNA. | |
| Gene of | P-Os.Ac1 | Promoter from the rice actin gene act1. | 5609-7009 |
| interest plant | L-Os.Act1 | Leader (first exon) from the rice actin 1 | |
| expression | | gene. | |
| cassette | I-Os.Act1 | First intron and flanking UTR exon | |
| | | sequences from the rice actin 1 gene | |
| | T-St.Pis4 | The 3′ non-translated region of the | 7084-8026 |
| | | potato proteinase inhibitor II gene which | |
| | | functions to direct polyadenylation | |
| | | of the mRNA | |
| Plant | P-CaMV.35S | CaMV 35S promoter | 8075-8398 |
| selectable | L-CaMV.35S | 5′ UTR from the 35S RNA of CaMV | |
| marker | CR-Ec.nptII-Tn5 | nptII selectable marker that confers | 8432-9226 |
| expression | | resistance to neomycin and kanamycin | |
| cassette | T-AGRtu.nos | A 3′ non-translated region of the | 9255-9507 |
| | | nopaline synthase gene of | |
| | | Agrobacterium tumefaciens Ti plasmid | |
| | | which functions to direct | |
| | | polyadenylation of the mRNA . . . | |
| Agro | B-AGRtu.left | Agro left border sequence, essential for | 39-480 |
| transformation | border | transfer of T-DNA. | |
| Maintenance | OR-Ec.oriV-RK2 | The vegetative origin of replication from | 567-963 |
| in E. coli | | plasmid RK2. | |
| | CR-Ec.rop | Coding region for repressor of primer | 2472-2663 |
| | | from the ColE1 plasmid. Expression of | |
| | | this gene product interferes with primer | |
| | | binding at the origin of replication, | |
| | | keeping plasmid copy number low. | |
| | OR-Ec.ori-ColE1 | The minimal origin of replication from | 3091-3679 |
| | | The E. coli plasmid ColE1. | |
| | P-Ec.aadA-SPC/ | promoter for Tn7 adenylyltransferase | 4210-4251 |
| | STR | (AAD(3″)) | |
| | CR-Ec.aadA- | Coding region for Tn7 | 4252-5040 |
| | SPC/STR | adenylyltransferase (AAD(3″)) | |
| | | conferring spectinomycin and | |
| | | streptomycin resistance. | |
| | T-Ec.aadA- | 3′ UTR from the Tn7 adenylyltransferase | 5041-5098 |
| | SPC/STR | (AAD(3″)) gene of E. coli. | |

[0091] Elements of a corn transformation plasmid, pMON17730, for expressing a Leuconostoc mesenteroides sucrose phosphorylase are illustrated in Table 3. This construct was assembled using the technology known in the art.

TABLE 3
pMON17730

| | | | Coordinates of |
|---|---|---|---|
| function | name | annotation | SEQ ID NO: 12606 |
| Agro | B-AGRtu.right | Agro right border sequence, essential | 4862-5218 |
| transformation | border | for transfer of T-DNA. | |
| Gene of | P-Zm.Brittle2 | Promoter from thecorn brittle 2 gene | 5276-6375 |
| interest plant | L-Zm Brittle2 | 5′ untranslated region from the corn | 6385-7857 |
| expression | | brittel 2 gene. | 7870-8079 |
| cassette | L-Ta.Lhcb1 | wheat CAB leader | |
| | I-Os.Act1 | First intron and flanking UTR exon | |
| | | sequences from the rice actin 1 gene | |
| | CR-Lm.spl1 | PHE0004028_PMON17730 SPL | |
| | | coding region | |
| | T-Ta.Hsp17 | The 3′ non-translated region of the | |
| | | wheat low molecular weight heat | |
| | | shock protein gene | |
| Plant | P-CaMV.35S | CaMV 35S promoter | 8226-8518 |
| selectable | CR-Ec.nptII- | nptII selectable marker that confers | 8583-9377 |
| marker | Tn5 | resistance to neomycin and | |
| expression | | kanamycin | |
| cassette | T-AGRtu.nos | A 3′ non-translated region of the | 9409-9661 |
| | | nopaline synthase gene of | |
| | | Agrobacterium tumefaciens Ti | |
| | | plasmid which functions to direct | |
| | | polyadenylation of the mRNA . . . | |
| Agro | B-AGRtu.left | Agro left border sequence, essential | 10003-10026 |
| transformation | border | for transfer of T-DNA. | |
| Maintenance | OR-Ec.oriV- | The vegetative origin of replication | 194-590 |
| in E. coli | RK2 | from plasmid RK2. | |
| | CR-Ec.rop | Coding region for repressor of | 2099-2290 |
| | | primer from the ColE1 plasmid. | |
| | | Expression of this gene product | |
| | | interferes with primer binding at the | |
| | | origin of replication, keeping | |
| | | plasmid copy number low. | |
| | OR-Ec.ori- | The minimal origin of replication | 2718-3306 |
| | ColE1 | from the E. coli plasmid ColE1. | |
| | P-Ec.aadA- | promoter for Tn7 | 3837-3878 |
| | SPC/STR | adenylyltransferase (AAD(3″)) | |
| | CR-Ec.aadA- | Coding region for Tn7 | 3879-4667 |
| | SPC/STR | adenylyltransferase (AAD(3″)) | |
| | | conferring spectinomycin and | |
| | | streptomycin resistance. | |
| | T-Ec.aadA- | 3′ UTR from the Tn7 | 4668-4725 |
| | SPC/STR | adenylyltransferase (AAD(3″)) gene | |
| | | of E. coli. | |

[0092] B. Soybean Transformation Constructs

[0093] Plasmids for use in transformation of soybean are also prepared. Elements of an exemplary common expression vector plasmid pMON82053 are shown in Table 4 and FIG. 2. Other base vectors for soybean transformation were also constructed by replacing the gene of interest plant expression cassette elements of base vector 13, i.e. the promoter, leader, intron and terminator elements, with the elements listed in Table 5 to provide base vectors 13-15 for soybean transformation. Each of the protein encoding DNA as identified in Table 1 is placed in the gene of interest plant expression cassette before the termination sequence in each of the base vector 13-15.

TABLE 4
pMON82053

| | | | Coordinates |
|---|---|---|---|
| | | | of SEQ ID |
| function | name | annotation | NO: 12604 |
| Agro | B-AGRtu.left | Agro left border | 6144-6585 |
| transforamtion | border | sequence, essential for | |
| | | transfer of T-DNA. | |
| Plant | P-At.Act7 | Promoter from the | |
| selectable | | arabidopsis actin 7 gene | |
| marker | L-At.Act7 | 5′UTR of Arabidopsis | 6624-7861 |
| expression | | Act7 gene | |
| cassette | I-At.Act7 | Intron from the | |
| | | Arabidopsis actin7 gene | |
| | TS-At.ShkG-CTP2 | Transit peptide region of | 7864-8091 |
| | | Arabidopsis EPSPS | |
| | CR-AGRtu.aroA- | Synthetic CP4 coding | 8092-9459 |
| | CP4.nno_At | region with dicot | |
| | | preferred codon usage. | |
| Gene of | T-AGRtu.nos | A 3′ non-translated region | 9466-9718 |
| interest | | of the nopaline synthase | |
| expression | | gene of Agrobacterium | |
| cassette | | tumefaciens Ti plasmid | |
| | | which functions to direct | |
| | | polyadenylation of the | |
| | | mRNA. | |
| | P-CaMV.35S-enh | Promoter for 35S RNA | 1-613 |
| | | from CaMV containing a | |
| | | duplication of the −90 to | |
| | | −350 region. | |
| | T-Gb.E6-3b | 3′ untranslated region | 688-1002 |
| | | from the fiber protein E6 | |
| | | gene of sea-island cotton; | |
| Agro | B-AGRtu.right | Agro right border | 1033-1389 |
| transformation | border | sequence, essential for | |
| | | transfer of T-DNA. | |
| Maintenance | OR-Ec.oriV-RK2 | The vegetative origin of | 5661-6057 |
| in E. coli | | replication from plasmid | |
| | | RK2. | |
| | CR-Ec.rop | Coding region for | 3961-4152 |
| | | repressor of primer from | |
| | | the ColE1 plasmid. | |
| | | Expression of this gene | |
| | | product interferes with | |
| | | primer binding at the | |
| | | origin of replication, | |
| | | keeping plasmid copy | |
| | | number low. | |
| | OR-Ec.ori-ColE1 | The minimal origin of | |
| | | replication from the E. | 2945-3533 |
| | | coli plasmid ColEl. | |
| | P-Ec.aadA- | romoter for Tn7 | 2373-2414 |
| | SPC/STR | adenylyltransferase | |
| | | (AAD(3″)) | |
| | CR-Ec.aadA- | Coding region for Tn7 | 1584-2372 |
| | SPC/STR | adenylyltransferase | |
| | | (AAD(3″)) conferring | |
| | | spectinomycin and | |
| | | streptomycin resistance. | |
| | T-Ec.aadA- | 3′ UTR from the Tn7 | 1526-1583 |
| | SPC/STR | adenylyltransferase | |
| | | (AAD(3″)) gene of E. | |
| | | coli. | |

TABLE 5
Compositions of expression cassettes for gene of
interest in plant transformation base vectors

| | | SEQ | | SEQ | | SEQ | | SEQ |
|---|---|---|---|---|---|---|---|---|
| | | ID | | ID | | ID | | ID |
| | promoter | NO | leader | NO | intron | NO | terminator | NO |
| Base vector | | | | | | | | |
| for corn | | | | | | | | |
| 1 | P-Os.Act1 | 12581 | L-Os.Act1 | 12592 | I-Os.Act1 | 12596 | T-St.Pis4 | 12598 |
| 2 | P-Hv.Per1 | 12582 | L-Hv.Per1 | 12593 | I-Zm.DnaK | 12597 | T-St.Pis4 | 12598 |
| 3 | P-Zm.RAB17 | 12591 | NONE | / | I-Zm.DnaK | 12597 | T-St.Pis4 | 12598 |
| 4 | P-Zm.NAS2 | 12584 | L-Zm.NAS2 | 12595 | I-Zm.DnaK | 12597 | T-St.Pis4 | 12598 |
| 5 | P-Zm.PPDK | 12585 | L-Zm.PPDK | 12588 | I-Zm.DnaK | 12597 | T-St.Pis4 | 12598 |
| 6 | P-Os.GT1 | 12586 | NONE | / | I-Zm.DnaK | 12597 | T-St.Pis4 | 12598 |
| 7 | P-Zm.PPDK | 12587 | L-Zm.PPDK | 12588 | I-Zm.DnaK | 12597 | T-St.Pis4 | 12600 |
| 8 | P-Os.Act1 | 12581 | L-Os.Act1 | 12592 | I-Os.Act1 | 12597 | T-St.Pis4 | 12598 |
| 9 | P-Zm.PPDK | 12587 | L-Zm.PPDK | 12588 | I-Zm.DnaK | 12597 | T-St.Pis4 | 12600 |
| 10 | P-Os.Act1 | 12581 | L-Os.Act1 | 12592 | I-Os.Act1 | 12596 | T-St.Pis4 | 12598 |
| 11 | P-Zm.SzeinC1 | 12589 | L- | 12601 | I-Zm.DnaK | 12597 | T-St.Pis4 | 12598 |
| | | | Zm.SzeinC1 | | | | | |
| 12 | P-Zm.NAS2 | 12584 | L-Zm.NAS2 | 12595 | I-Zm.DnaK | 12597 | T-St.Pis4 | 12598 |
| Base vector | | | | | | | | |
| for Soybean | | | | | | | | |
| 13 | P-CaMV.35S- | 12590 | NONE | / | NONE | / | T-Gb.E6 | 12599 |
| | enh | | | | | | | |
| 14 | P-CaMV.35S- | 12590 | NONE | / | NONE | / | T-Gb.E6 | 12599 |
| | enh | | | | | | | |
| 15 | P-Gm.Sphas 1 | 12583 | L- | 12594 | NONE | / | T-Gb.E6 | 12599 |
| | | | Gm.Sphas1 | | | | | |

DNA constructs with some recombinant DNA of interest, e.g., SEQ ID NO: 72, also contain a chloroplast transit peptide adjacent to the recombinant DNA.

[0094] C. Cotton Transformation Vector

[0095] Plasmids for use in transformation of cotton are also prepared. Elements of an exemplary common expression vector plasmid pMON99053 are shown in Table 6 below and FIG. 3. Primers for PCR amplification of protein coding nucleotides of recombinant DNA are designed at or near the start and stop codons of the coding sequence, in order to eliminate most of the 5′ and 3′ untranslated regions. Each recombinant DNA coding for a protein identified in Table 1 is amplified by PCR prior to insertion into the insertion site within the gene of interest expression cassette of pMON99053

TABLE 6

| | | | Coordinates of |
|---|---|---|---|
| function | name | annotation | SEQ ID NO: 12606 |
| Agro | B-AGRtu.right | Agro right border sequence, | 11364-11720 |
| transforamtion | border | essential for transfer of T-DNA. | |
| Gene of interest | Exp-CaMV.35S- | Enhanced version of the 35S RNA | 7794-8497 |
| expression | enh + ph.DnaK | promoter from CaMV plus the | |
| cassette | | petunia hsp70 5′ untranslated | |
| | | region | |
| | T-Ps.RbcS2-E9 | The 3′ non-translated region of the | 67-699 |
| | | pea RbcS2 gene which functions | |
| | | to direct polyadenylation of the | |
| | | mRNA. | |
| Plant selectable | Exp-CaMV.35S | Promoter from the rice actin 1 | 730-1053 |
| marker | | gene | |
| expression | CR-Ec.nptII-Tn5 | first exon of the rice actin 1 gene | 1087-1881 |
| cassette | T-AGRtu.nos | A 3′ non-translated region of the | 1913-2165 |
| | | nopaline synthase gene of | |
| | | Agrobacterium tumefaciens Ti | |
| | | plasmid which functions to direct | |
| | | polyadenylation of the mRNA. | |
| Agro | B-AGRtu.left | Agro left border sequence, | 2211-2652 |
| transformation | border | essential for transfer of T-DNA. | |
| Maintenance in | OR-Ec.oriV-RK2 | The vegetative origin of | 2739-3135 |
| E. coli | | replication from plasmid RK2. | |
| | CR-Ec.rop | Coding region for repressor of | 4644-4835 |
| | | primer from the ColE1 plasmid. | |
| | | Expression of this gene product | |
| | | interferes with primer binding at | |
| | | the origin of replication, keeping | |
| | | plasmid copy number low. | |
| | OR-Ec.ori-ColE1 | The minimal origin of replication | 5263-5851 |
| | | from the E. coli plasmid ColEl. | |
| | P-Ec.aadA-SPC/ | romoter for Tn7 | 6382-6423 |
| | STR | adenylyltransferase (AAD(3″)) | |
| | CR-Ec.aadA-SPC/ | Coding region for Tn7 | 6424-7212 |
| | STR | adenylyltransferase (AAD(3″)) | |
| | | conferring spectinomycin and | |
| | | streptomycin resistance. | |
| | T-Ec.aadA-SPC/ | 3′ UTR from the Tn7 | 7213-7270 |
| | STR | adenylyltransferase (AAD(3″)) | |
| | | gene of E. coli. | |

### Example 2

### Corn Plant Transformation

[0096] This example illustrates the production and identification of transgenic corn cells in seed of transgenic corn plants having an enhanced agronomic trait, i.e. enhanced nitrogen use efficiency, increased yield, enhanced water use efficiency, enhanced tolerance to cold and/or improved seed compositions as compared to control plants. Transgenic corn cells are prepared with recombinant DNA expressing each of the protein encoding DNAs listed in Table 1 by Agrobacterium-mediated transformation using the corn transformation vectors 1-12 prepared as disclosed in Example 1. Corn transformation is effected using methods disclosed in U.S. Patent Application Publication 2004/0344075 A1 where corn embryos are inoculated and co-cultured with the Agrobacterium tumefaciens strain ABI and the corn transformation vector. To regenerate transgenic corn plants the transgenic callus resulting from transformation is placed on media to initiate shoot development in plantlets which are transferred to potting soil for initial growth in a growth chamber followed by a mist bench before transplanting to pots where plants are grown to maturity. The plants are self fertilized and seed is harvested for screening as seed, seedlings or progeny R2 plants or hybrids, e.g., for yield trials in the screens indicated above.

[0097] Many transgenic events which survive to fertile transgenic plants that produce seeds and progeny plants do not exhibit an enhanced agronomic trait. The transgenic plants and seeds having the transgenic cells of this invention which have recombinant DNA imparting the enhanced agronomic traits are identified by screening for nitrogen use efficiency, yield, water use efficiency, cold tolerance and improved seed composition.

### Example 3

### Soybean Plant Transformation

[0098] This example illustrates the production and identification of transgenic soybean cells in seed of transgenic soybean plants having an enhanced agronomic trait, i.e. enhanced nitrogen use efficiency, increased yield, enhanced water use efficiency, enhanced tolerance to cold and/or improved seed compositions as compared to control plants. Transgenic soybean cells are prepared with recombinant DNA expressing each of the protein encoding DNAs listed in Table 1 by Agrobacterium-mediated transformation using the soybean transformation vectors 13-15 prepared as disclosed in Example 1. Soybean transformation is effected using methods disclosed in U.S. Pat. No. 6,384,301 where soybean meristem explants are wounded then inoculated and co-cultured with the soybean transformation vector, then transferred to selection media for 6-8 weeks to allow selection and growth of transgenic shoots.

[0099] The transformation is repeated for each of the protein encoding DNAs identified in Table 1 in one of the base vectors 13-15.

[0100] Transgenic shoots producing roots are transferred to the greenhouse and potted in soil. Many transgenic events which survive to fertile transgenic plants that produce seeds and progeny plants do not exhibit an enhanced agronomic trait. The transgenic plants and seeds having the transgenic cells of this invention which have recombinant DNA imparting the enhanced agronomic traits are identified by screening for nitrogen use efficiency, yield, water use efficiency, cold tolerance and improved seed composition.

### Example 4

### Cotton Transgenic Plants with Enhanced Agronomic Traits

[0101] Cotton transformation is performed as generally described in WO0036911 and in U.S. Pat. No. 5,846,797. Transgenic cotton plants containing the recombinant DNA having a sequence of SEQ ID NO: 1 through SEQ ID NO: 193 are obtained by transforming with the cotton transformation vector identified in Example 1.

[0102] Progeny transgenic plants are selected from a population of transgenic cotton events under specified growing conditions and are compared with control cotton plants. Control cotton plants are substantially the same cotton genotype but without the recombinant DNA, for example, either a parental cotton plant of the same genotype that was not transformed with the identical recombinant DNA or a negative isoline of the transformed plant. Additionally, a commercial cotton cultivar adapted to the geographical region and cultivation conditions, i.e. cotton variety ST474, cotton variety FM 958, and cotton variety Siokra L-23, are used to compare the relative performance of the transgenic cotton plants containing the recombinant DNA. The specified culture conditions are growing a first set of transgenic and control plants under “wet” conditions, i.e. irrigated in the range of 85 to 100 percent of evapotranspiration to provide leaf water potential of −14 to −18 bars, and growing a second set of transgenic and control plants under “dry” conditions, i.e. irrigated in the range of 40 to 60 percent of evapotranspiration to provide a leaf water potential of −21 to −25 bars. Pest control, such as weed and insect control is applied equally to both wet and dry treatments as needed. Data gathered during the trial includes weather records throughout the growing season including detailed records of rainfall; soil characterization information; any herbicide or insecticide applications; any gross agronomic differences observed such as leaf morphology, branching habit, leaf color, time to flowering, and fruiting pattern; plant height at various points during the trial; stand density; node and fruit number including node above white flower and node above crack boll measurements; and visual wilt scoring. Cotton boll samples are taken and analyzed for lint fraction and fiber quality. The cotton is harvested at the normal harvest timeframe for the trial area. Enhanced water use efficiency is indicated by increased yield, improved relative water content, enhanced leaf water potential, increased biomass, enhanced leaf extension rates, and improved fiber parameters.

[0103] Cotton plants with the transgenic cells by this invention are identified from among the transgenic cotton plants by agronomic trait screening as having increased yield and enhanced water use efficiency.

### Example 5

### Homolog Identification

[0104] This example illustrates the identification of homologs of proteins encoded by the DNA identified in Table 1 which is used to provide transgenic seed and plants having enhanced agronomic traits. From the sequence of the homologs, homologous DNA sequence can be identified for preparing additional transgenic seeds and plants of this invention with enhanced agronomic traits.

[0105] An “All Protein Database” was constructed of known protein sequences using a proprietary sequence database and the National Center for Biotechnology Information (NCBI) non-redundant amino acid database (nr.aa). For each organism from which a polynucleotide sequence provided herein was obtained, an “Organism Protein Database” was constructed of known protein sequences of the organism; it is a subset of the All Protein Database based on the NCBI taxonomy ID for the organism.

[0106] The All Protein Database was queried using amino acid sequences provided herein as SEQ ID NO: 194 through SEQ ID NO: 386 using NCBI “blastp” program with E-value cutoff of 1e-8. Up to 1000 top hits were kept, and separated by organism names. For each organism other than that of the query sequence, a list was kept for hits from the query organism itself with a more significant E-value than the best hit of the organism. The list contains likely duplicated genes of the polynucleotides provided herein, and is referred to as the Core List. Another list was kept for all the hits from each organism, sorted by E-value, and referred to as the Hit List.

[0107] The Organism Protein Database was queried using polypeptide sequences provided herein as SEQ ID NO: 194 through SEQ ID NO: 386 using NCBI “blastp” program with E-value cutoff of 1e-4. Up to 1000 top hits were kept. A BLAST searchable database was constructed based on these hits, and is referred to as “SubDB”. SubDB was queried with each sequence in the Hit List using NCBI “blastp” program with E-value cutoff of 1e-8. The hit with the best E-value was compared with the Core List from the corresponding organism. The hit is deemed a likely ortholog if it belongs to the Core List, otherwise it is deemed not a likely ortholog and there is no further search of sequences in the Hit List for the same organism. Homologs from a large number of distinct organisms were identified and are reported by amino acid sequences of SEQ ID NO: 387 through SEQ ID NO: 12580. These relationships of proteins of SEQ ID NO: 194 through 386 and homologs of SEQ ID NO: 387 through 12580 is identified in Table 7. The source organism for each homolog is found in the Sequence Listing.

TABLE 7

| SEQ ID NO: | homolog SEQ ID NOs | | | | | | | | | | | |
|---|---|---|---|---|---|---|---|---|---|---|---|---|
| 196: | 3549 | 1976 | 8970 | 12287 | 11799 | 758 | 6083 | 9821 | 8256 | 7610 | 7869 | 4091 |
| | 1111 | 1113 | 8630 | 7054 | 10917 | 3094 | 6712 | 9080 | 2702 | 2718 | 1130 | 1131 |
| | 5382 | 6582 | 559 | 2169 | 1134 | 1132 | 1139 | 2295 | 11615 | 8090 | 2133 | 5063 |
| | 5000 | 10336 | 12279 | 3828 | 7214 | 1485 | 2156 | 2232 | 2229 | 2242 | 2209 | 2203 |
| | 2177 | 2207 | 2160 | 2151 | 11166 | 3220 | | | | | | |
| 197: | 3549 | 1976 | 4850 | 8970 | 12287 | 11799 | 758 | 6083 | 9821 | 4946 | 11935 | 8256 |
| | 7610 | 7869 | 1841 | 9456 | 4091 | 1113 | 1111 | 8630 | 7054 | 7880 | 6876 | 6237 |
| | 6712 | 9080 | 2702 | 2718 | 1130 | 1131 | 5382 | 6582 | 559 | 2169 | 1134 | 1132 |
| | 1139 | 2295 | 11615 | 8090 | 5063 | 5000 | 10336 | 12279 | 3828 | 7214 | 1485 | 2156 |
| | 2232 | 2229 | 2242 | 2209 | 2203 | 2207 | 2177 | 2160 | 2151 | 7622 | 1377 | 6970 |
| | 6143 | | | | | | | | | | | |
| 198: | 3549 | 1976 | 2210 | 6154 | 1028 | 1769 | 758 | 12325 | 9821 | 2973 | 4946 | 11935 |
| | 8256 | 7610 | 5387 | 5384 | 5361 | 10434 | 8983 | 5051 | 4091 | 2766 | 6248 | 1113 |
| | 1111 | 8630 | 9080 | 2702 | 2718 | 1131 | 1130 | 5382 | 7052 | 6582 | 1134 | 1132 |
| | 1139 | 11615 | 2295 | 8090 | 6572 | 4803 | 1970 | 8113 | 3883 | 9565 | 1707 | 517 |
| | 12372 | 11514 | 5441 | 5421 | 3828 | 7214 | 1485 | 1097 | | | | |
| 199: | 3549 | 4850 | 2210 | 8970 | 12287 | 2360 | 11500 | 11799 | 6912 | 1028 | 6154 | 758 |
| | 5783 | 6083 | 9552 | 12325 | 9821 | 2973 | 4946 | 8256 | 7610 | 5387 | 5361 | 5384 |
| | 5300 | 10434 | 8983 | 5051 | 1111 | 1113 | 8630 | 9080 | 2702 | 2718 | 1130 | 1131 |
| | 5382 | 7052 | 6582 | 559 | 2169 | 1134 | 1132 | 1139 | 8090 | 6572 | 11350 | 7138 |
| | 1730 | 10762 | 11345 | 527 | 8679 | 5063 | 5000 | 2879 | 517 | 7986 | 12372 | 11514 |
| | 10336 | 6955 | 12279 | 5441 | 5421 | 3828 | 7214 | 1485 | 2229 | 2207 | 2242 | 2232 |
| | 2209 | 2203 | 2156 | 2160 | 2151 | 5328 | 8248 | | | | | |
| 200: | 11500 | 5617 | 8150 | 3321 | 2181 | 4364 | 1769 | 1028 | 5122 | 11328 | 6042 | 2711 |
| | 1760 | 4874 | 4098 | 1914 | 11853 | 7334 | 6504 | 10624 | 2638 | 11705 | 7913 | 12171 |
| | 12198 | 10430 | 12189 | 12219 | 10404 | 10432 | 10408 | 6957 | 8282 | 6184 | 11935 | 580 |
| | 10470 | 1940 | 11039 | 8629 | 1096 | 742 | 12505 | 5801 | 11671 | 4006 | 12473 | 6778 |
| | 2607 | 10849 | 6279 | 7500 | 2657 | 5584 | 8059 | 2622 | 2043 | 3269 | 10363 | 6186 |
| | 9631 | 9243 | 11098 | 1168 | 6690 | 8584 | 10577 | 687 | 2977 | 9804 | 9337 | 6306 |
| | 9118 | 4356 | 10225 | 9740 | 6652 | 5251 | 12514 | 7463 | 706 | 3048 | 3780 | 1925 |
| | 11765 | 9803 | 10824 | 3004 | 5275 | 8642 | 1664 | 12173 | 4049 | 2031 | 11681 | 8980 |
| | 2339 | 9172 | 11955 | 10576 | 9333 | 10482 | 813 | 5656 | 4628 | 10843 | 2352 | 5484 |
| | 2856 | 4313 | 2877 | 1633 | 11143 | 6066 | 7722 | 7746 | 10941 | 11741 | 2941 | 2745 |
| | 11364 | 7638 | 7884 | 1328 | 5606 | 6580 | 11262 | 7483 | 8156 | 412 | 453 | 7288 |
| | 6842 | 1286 | 7896 | 9734 | 6570 | 10595 | 8863 | 1246 | 7112 | 12464 | 1373 | 3779 |
| | 2705 | 5044 | 4017 | 5712 | 4619 | 3539 | 1029 | 1610 | 5976 | 4964 | 11724 | 9037 |
| | 8989 | 1126 | 4073 | 395 | 10344 | 5428 | 4845 | 1611 | 10484 | 4496 | 3517 | 3418 |
| | 10294 | 2427 | 3442 | 9747 | 5534 | 9571 | 1125 | 9720 | 9319 | 12346 | 3417 | 1588 |
| | 2779 | 4611 | 5312 | 10179 | 6867 | 3049 | 3051 | 9900 | 1265 | 9463 | 4576 | 764 |
| | 6024 | 432 | 8921 | 11379 | 2141 | 1755 | 9498 | 7395 | 8179 | 7462 | 7279 | 8729 |
| | 9676 | 11351 | 1758 | 10907 | 4995 | 1205 | 608 | 12100 | 8331 | 8341 | 10326 | 6852 |
| | 11947 | 6597 | 2475 | 6407 | 8077 | 10788 | 11815 | 5269 | 489 | 9317 | 5574 | 11240 |
| | 11821 | 11485 | 2868 | 9753 | 676 | 11223 | 1924 | 8045 | 1689 | 12035 | 11980 | 5906 |
| | 7805 | 6728 | 5177 | 1711 | 1715 | 5050 | 1601 | 11242 | 1010 | 11286 | 7814 | 7152 |
| | 3730 | 5888 | 615 | 11078 | 9681 | 2883 | 8522 | 8210 | 4450 | 11632 | 7573 | 6031 |
| | 2713 | 3861 | 9480 | 5307 | 7874 | 2048 | 5136 | 8625 | 2168 | 4580 | 10634 | 5772 |
| | 5082 | 8731 | 2678 | 9311 | 10561 | 7803 | 4408 | 6227 | 12026 | 11234 | 7247 | 5578 |
| | 9683 | 3999 | 2953 | 2193 | 3370 | 11542 | 10711 | 6403 | 4207 | 11251 | 8447 | 6805 |
| | 727 | 951 | 737 | 9090 | 1828 | 1928 | 2277 | 986 | 739 | 7044 | 10025 | 7409 |
| | 9449 | 944 | 8427 | 10911 | 3965 | 1299 | 5294 | 6332 | 5145 | 9418 | 6150 | 9008 |
| | 1004 | 3831 | 5157 | 6968 | 11922 | 7392 | 9855 | 5061 | 5448 | 6857 | 2354 | 2879 |
| | 620 | 7986 | 10208 | 4520 | 9003 | 8015 | 525 | 8013 | 11884 | 10726 | 12493 | 9260 |
| | 8508 | 5693 | 1450 | 4258 | | | | | | | | |
| 201: | 7470 | 10842 | 5790 | 6772 | 1530 | 9966 | 9973 | 10368 | 655 | 4677 | 4157 | 1015 |
| | 9967 | 9732 | 1621 | 1702 | 2553 | 11599 | 9342 | 3724 | 6613 | 4462 | 2681 | 4577 |
| | 3827 | 8039 | 2557 | 8538 | 9605 | 12321 | 3228 | 2139 | 9255 | 11428 | 3022 | 5404 |
| | 9564 | 12166 | 8047 | 11255 | 11888 | 1492 | 5870 | 4250 | 554 | 12481 | 8585 | 5674 |
| | 2062 | 2021 | 6718 | 2810 | 4015 | 12306 | 8941 | 3135 | 7850 | 7009 | 4247 | 5760 |
| | 643 | 2512 | 2422 | 8709 | 5661 | 2437 | 11487 | 8706 | 3703 | 6811 | 5006 | 6000 |
| | 2290 | 11973 | 8426 | 2912 | 6498 | 10642 | 8257 | 5362 | 1189 | 996 | 1740 | 10904 |
| | 5778 | 4372 | 12095 | 1616 | 9708 | 1598 | 4525 | 7513 | 1934 | 10939 | 9044 | 7273 |
| | 6105 | 6950 | 12122 | 5936 | 2802 | 3711 | 8640 | 6644 | 9842 | 6994 | 2587 | 7510 |
| | 8609 | 1877 | 5408 | 8009 | 9943 | 8475 | 4333 | 8476 | 2651 | 5379 | 11144 | |
| 202: | 7477 | 1676 | 4448 | 2400 | 6045 | 6940 | 8526 | 9923 | 11995 | 8913 | 10513 | 634 |
| | 7969 | 11746 | 6446 | 4371 | 1018 | 4026 | 10874 | 11604 | 5505 | 9219 | 4140 | 11205 |
| | 12025 | 3605 | 1669 | 1987 | 2822 | 2279 | 10124 | 11930 | 4546 | 3504 | 1950 | 7696 |
| | 1604 | 4492 | 710 | 11737 | 3171 | 8574 | 11646 | 9030 | 765 | | | |
| 203: | 9581 | 1789 | 9205 | 10127 | 507 | 7859 | 5085 | 10794 | 2201 | 5072 | 1384 | 7541 |
| | 12225 | 5253 | 4000 | 8561 | 1469 | 3834 | 12504 | 9837 | 7137 | 4670 | 9143 | 1972 |
| | 230 | 11807 | 7457 | 3867 | 12503 | 9644 | 10286 | 686 | 3416 | 8708 | 913 | 9391 |
| | 9343 | 1949 | 971 | 11938 | 12315 | 7511 | 9076 | 8346 | 3455 | 1790 | 6685 | 11054 |
| | 10989 | 4775 | 9544 | 2197 | 3225 | 1198 | 7996 | 9715 | 6751 | 11217 | 3189 | 10361 |
| | 3589 | 2768 | 4753 | 393 | 7426 | 9423 | 2744 | 1339 | 10139 | 2332 | 8771 | 3079 |
| | 4312 | 7098 | 11256 | 1681 | 642 | 411 | 5179 | 11964 | 5793 | 8376 | 2386 | 9500 |
| | 2401 | 5669 | 10501 | 1939 | 11311 | 4977 | 7401 | 8266 | 12472 | 480 | 10947 | 12116 |
| | 539 | 7591 | 1020 | 1493 | 9017 | 2513 | 3100 | 4405 | 5679 | 3373 | 3795 | 10805 |
| | 11445 | 10653 | 5898 | 5556 | 12139 | 12448 | 8448 | 5245 | 12533 | 10039 | 1324 | 2498 |
| | 9955 | 6104 | 5516 | | | | | | | | | |
| 204: | 3474 | 7088 | 4085 | 10331 | 6972 | 7065 | 2023 | 10909 | 5915 | 5913 | 6491 | 5970 |
| | 6936 | 5920 | 5919 | 5966 | 5944 | 5738 | 5968 | 6663 | 1233 | 5947 | 2258 | 10694 |
| | 9592 | 4692 | 12344 | 11227 | 6753 | 8618 | | | | | | |
| 205: | 9144 | 6127 | 6445 | 4401 | 3645 | 9756 | 5274 | 8302 | 1548 | 9875 | 9979 | 1922 |
| | 1941 | 9100 | 7274 | 12121 | 11051 | 11528 | 9523 | 7830 | 3543 | 6760 | 1979 | 3997 |
| | 9779 | 9635 | 4955 | 1818 | 946 | 5201 | 12580 | 8270 | 10531 | 415 | 4910 | 1802 |
| | 2256 | 2979 | 7899 | 3139 | 3777 | 10332 | 10536 | 4842 | 8280 | 9000 | 1327 | 10950 |
| | 8576 | 513 | 4263 | 6884 | 8684 | 3877 | 7243 | 7262 | 6420 | 1424 | 2680 | 10546 |
| | 9965 | 11711 | 6656 | 1164 | 1160 | 5248 | 4812 | 11605 | 3598 | 8386 | 12446 | 3922 |
| | 10305 | 467 | 5963 | 948 | 11998 | 4655 | 4064 | 446 | 6112 | 6111 | 4689 | 3743 |
| | 449 | 1123 | 11231 | 11434 | 2456 | 471 | 11629 | 6249 | 2152 | 2171 | 6494 | 8636 |
| | 11953 | 5487 | 7844 | 6164 | 11566 | 1495 | 4623 | 6920 | 3447 | 3181 | 3153 | 1081 |
| | 11890 | 3476 | 1127 | 1195 | 1192 | 12349 | 3600 | 11090 | 5377 | 8022 | 7160 | 11091 |
| | 10643 | 7586 | 12247 | 6202 | 6217 | 4617 | 2237 | 2380 | 6219 | 1756 | 7456 | 925 |
| | 3237 | | | | | | | | | | | |
| 206: | 5804 | 12016 | 10678 | 10712 | 10735 | 7448 | 9024 | 10738 | 10708 | 12014 | 10638 | 7423 |
| | 7421 | 7417 | 309 | 10586 | 10603 | 10589 | 10584 | 7444 | 10644 | 7446 | 5047 | 10645 |
| | 10646 | 12280 | 207 | 9710 | 2096 | 11839 | 9709 | 1612 | 8993 | 10037 | 6780 | 11613 |
| | 9034 | 306 | 307 | 2004 | 11103 | 8166 | 6931 | 7311 | 6922 | 8933 | 10494 | 3783 |
| | 308 | 11857 | 12034 | 3781 | 916 | 6666 | 9745 | 9140 | 6285 | 12449 | 10356 | 9452 |
| | 4275 | 12246 | 9728 | 9405 | 2987 | 7223 | 2067 | 3934 | 8138 | 11430 | 9052 | 12318 |
| | 6252 | 410 | 2407 | 6792 | 3564 | 2073 | 4786 | 11326 | 9877 | 3397 | 310 | 11058 |
| | 9105 | 8474 | 12047 | 6860 | 7715 | 860 | 8446 | 4050 | 6973 | 6725 | 9408 | 4088 |
| | 3842 | 1902 | 4332 | 2342 | 1701 | 10402 | 11870 | 4672 | 3986 | 10725 | 12181 | 1973 |
| | 3950 | 9992 | 4578 | 10224 | 862 | 7045 | 11785 | 4789 | 5465 | 8088 | 3553 | 10189 |
| | 9964 | 2793 | 6677 | 10001 | 3375 | 4200 | 10391 | 1361 | 1234 | 10741 | 10641 | 10683 |
| | 11712 | 10743 | 10575 | 10581 | 4747 | | | | | | | |
| 207: | 12016 | 7448 | 12014 | 7423 | 309 | 5047 | 9710 | 2096 | 11839 | 1612 | 8993 | 10037 |
| | 6780 | 9034 | 307 | 306 | 2004 | 6931 | 6922 | 8933 | 10494 | 308 | 11857 | 3781 |
| | 916 | 9745 | 6666 | 9140 | 6285 | 12449 | 9452 | 8035 | 10356 | 11492 | 12021 | 4443 |
| | 10064 | 8344 | 2067 | 3934 | 4275 | 8138 | 12246 | 9405 | 2987 | 9728 | 11430 | 9052 |
| | 12318 | 6252 | 7223 | 410 | 6792 | 3564 | 2073 | 4786 | 9877 | 3397 | 310 | 11058 |
| | 8474 | 9105 | 11870 | 12047 | 4672 | 3986 | 6860 | 7715 | 860 | 2342 | 8446 | 1701 |
| | 4050 | 10402 | 6973 | 9408 | 4088 | 3842 | 4332 | 6725 | 1902 | 10725 | 12181 | 6779 |
| | 1973 | 2823 | 9849 | 10154 | 862 | 7045 | 11785 | 4789 | 5465 | 10224 | 8088 | 4578 |
| | 10189 | 3553 | 2793 | 6677 | 10001 | 3375 | 4200 | 10391 | 3950 | 9992 | 1361 | 1468 |
| | 9964 | 7410 | 2176 | 10741 | 11712 | 10743 | 10575 | 10581 | 206 | | | |
| 208: | 8564 | 10720 | 7580 | 12251 | 9922 | 5975 | 8617 | 4257 | 645 | 3210 | 4615 | 8228 |
| | 747 | 1408 | 10412 | 3357 | 4397 | 7547 | 10137 | 3018 | 7289 | 11413 | 1687 | 2058 |
| | 4738 | 1274 | 12252 | 8769 | 6626 | 4708 | 275 | 11442 | 2843 | 10230 | 6198 | 10814 |
| | 2304 | 9207 | | | | | | | | | | |
| 209: | 9386 | 8213 | 8184 | 6094 | 8240 | 8242 | 8209 | 8211 | 5327 | 9254 | 10652 | 9428 |
| | 11965 | 11812 | 11814 | 9275 | 9274 | 6208 | 8173 | 7971 | 9276 | 9278 | 9280 | 9297 |
| | 9253 | 8100 | 9330 | 9303 | 9305 | 4986 | 4730 | 10770 | 11755 | 3994 | 5070 | 7569 |
| | 5734 | 3989 | 3985 | 9531 | 9214 | 9429 | 9365 | 11108 | 6372 | 5373 | 2117 | 3351 |
| | 12521 | 4075 | 1896 | 3535 | 10982 | 4340 | 2371 | 858 | 3813 | 10602 | 5493 | 5548 |
| | 10627 | 5552 | 2460 | 4278 | 1787 | 3297 | 2964 | 2965 | 2962 | 3630 | 9434 | 3625 |
| | 4592 | 10087 | 8272 | 3870 | 4415 | 8484 | 5940 | 10629 | 10623 | 10636 | 10174 | 10667 |
| | 5553 | 10670 | 10671 | 2562 | 2568 | 8456 | 5226 | 5200 | 11493 | 7169 | 9374 | 7962 |
| | 11722 | 5462 | 2866 | 10150 | 10170 | 10153 | 4425 | 1856 | 4727 | 9772 | 6514 | 2550 |
| | 9367 | 4482 | 9458 | 9455 | 2869 | 2162 | 9300 | 9302 | 10632 | 3616 | | |
| 210: | 2857 | 3612 | 6601 | 1183 | 1181 | 1182 | 6604 | 1159 | 10118 | 10806 | 11819 | 11745 |
| | 6639 | 11715 | 7049 | 10888 | 10024 | 7122 | 8076 | 8876 | 8903 | 1266 | 10535 | 624 |
| | 7532 | 4011 | 5266 | 6168 | 6326 | 11178 | 2641 | 2461 | 6646 | 8758 | 7990 | 9318 |
| | 8505 | 7393 | 2727 | 6008 | 3940 | 9115 | 5137 | 9096 | 1148 | 1363 | 10193 | 9377 |
| | 9250 | 5445 | 11200 | 11273 | 11276 | | | | | | | |
| 211: | 11176 | 8570 | 11245 | 10274 | 6081 | 7181 | 6450 | 4624 | 9320 | 6129 | 984 | 7196 |
| | 7388 | 2804 | 542 | 11805 | | | | | | | | |
| 212: | 2393 | 3407 | 11789 | 8124 | 2340 | 3714 | 1395 | 1433 | 12303 | 375 | 2814 | 6364 |
| | 9438 | 3292 | 12390 | 2984 | 6746 | 9695 | 675 | 2101 | 3618 | 12081 | 6128 | 1892 |
| | 3448 | 9864 | 6152 | 2844 | 7381 | 4291 | 4973 | 5447 | 10140 | 11877 | 8566 | 7624 |
| | 6472 | 10665 | 2089 | 9925 | 938 | 8536 | 6156 | 10608 | 11433 | 5967 | 1511 | 11974 |
| | 12573 | 4734 | 11501 | 5076 | 12428 | 8275 | 2769 | 4402 | 11854 | | | |
| 213: | 4784 | 5997 | 2399 | 6338 | 3933 | 4092 | 10151 | 2740 | 10610 | | | |
| 214: | 10855 | 2954 | 6766 | 2958 | 8910 | 12101 | 6783 | 3620 | 7658 | 7785 | 3180 | 9266 |
| | 9246 | 9247 | 1792 | 8649 | 5777 | 10173 | 10178 | 3461 | 9046 | 5810 | 5806 | 1226 |
| | 3287 | 12557 | 8375 | 12235 | 8403 | 8384 | 7414 | 5429 | 4396 | 6501 | 8433 | 7094 |
| | 8413 | 7920 | 5588 | 9853 | 6890 | 6483 | 9273 | 9841 | 683 | 9313 | 6871 | 6899 |
| | 6877 | 2491 | 4890 | 9129 | 5744 | 9572 | 11085 | 12037 | 11048 | 12113 | 613 | 9424 |
| | 6574 | 12066 | 7504 | 5863 | 8409 | 4273 | 10572 | 5923 | 1895 | 1893 | 9040 | 3665 |
| | 5481 | 7755 | 8408 | 924 | 1454 | 12140 | 8378 | 5510 | 5509 | 5513 | 3124 | 3103 |
| | 11911 | 4141 | 2082 | 2247 | 4630 | 8299 | 6667 | 702 | 8975 | 6801 | 745 | 741 |
| | 779 | 770 | 772 | 744 | 771 | 11549 | 719 | 7117 | 5565 | 11875 | | |
| 215: | 11919 | 9154 | 5594 | 10308 | 2827 | 2830 | 3408 | 3403 | 2471 | 5367 | 1120 | 5371 |
| | 5081 | 4880 | 10931 | 7367 | 6883 | 11808 | 6136 | 2549 | 11638 | 6868 | 8315 | 3118 |
| | 10508 | 10877 | 650 | 5616 | 4115 | 3026 | 3028 | 9516 | 785 | 9083 | 7596 | 8108 |
| | 4176 | 6525 | 5765 | 3802 | 1806 | 8081 | 7208 | 8893 | 12007 | 8654 | 9048 | 9072 |
| | 8575 | 8423 | 6300 | 6409 | 4165 | 6095 | 9477 | 2485 | 10112 | 5117 | 2278 | 2281 |
| | 2264 | 2284 | 6055 | 2348 | 4251 | 8187 | 10826 | 9660 | 9216 | 2777 | 4403 | 7239 |
| | 2643 | 782 | 2262 | 8111 | 1799 | 781 | 2696 | 8265 | 821 | 6575 | 9029 | 6259 |
| | 5907 | 2153 | 9132 | 1008 | 9697 | 11658 | 5996 | 6135 | 3512 | | | |
| 216: | 1063 | 9995 | 9748 | 8083 | 4921 | 10081 | 2976 | 7153 | 8380 | 1072 | 2845 | 2124 |
| | 5604 | 2742 | | | | | | | | | | |
| 217: | 1063 | 9995 | 9748 | 8083 | 4921 | 10081 | 2976 | 7153 | 8380 | 1072 | 2845 | 2124 |
| | 5604 | 2742 | | | | | | | | | | |
| 218: | 10265 | 3604 | 11692 | 2087 | 2100 | 2084 | 4972 | 8627 | 4940 | 10555 | 4941 | 652 |
| | 1430 | 11778 | 7581 | 915 | 1478 | 8934 | 1244 | 9538 | 6106 | 9540 | 6923 | 5854 |
| | 6892 | 9462 | 3486 | 10996 | 12018 | 9346 | 3284 | 6742 | 8247 | | | |
| 219: | 5171 | 3451 | 10952 | 6452 | 5333 | 11383 | 12420 | 9816 | 9099 | 11249 | 528 | 11871 |
| | 11060 | 8935 | 3521 | 3063 | 10253 | 9510 | 10954 | 6303 | 6941 | 523 | 904 | 5364 |
| | 4534 | 1993 | 9623 | 3245 | 12506 | 8843 | 10612 | 7200 | 2319 | 7201 | 1746 | 9164 |
| | 1043 | | | | | | | | | | | |
| 220: | 6376 | 1316 | 5391 | 12526 | 7194 | 2996 | 3154 | 10569 | 11756 | 11824 | 3924 | 9004 |
| | 5150 | 5993 | 10023 | 5309 | 10233 | 5582 | 9183 | 5649 | 2780 | 11917 | 6719 | 11145 |
| | 10056 | 2516 | 1372 | 5622 | 7269 | 2665 | 1402 | 5885 | 7636 | 6193 | 3223 | 2719 |
| | 6657 | 1867 | 7660 | 12334 | 9360 | 5492 | 2710 | 2076 | 8465 | 7571 | 11887 | 2033 |
| | 8847 | 3260 | 10323 | 11018 | 7553 | 6905 | 5747 | 10773 | 5018 | 9023 | 9420 | 9484 |
| | 9512 | 8291 | 2650 | 4553 | 2233 | 4983 | 7834 | 11916 | 8565 | 4123 | 1090 | 3981 |
| | 610 | 2885 | 5427 | 3349 | 649 | 9974 | 10523 | 10337 | 5840 | 8815 | 6996 | 11041 |
| | 1321 | 11532 | 11331 | 9757 | 6755 | 2327 | 2730 | 5199 | 5280 | 11943 | 3656 | 6297 |
| | 4570 | 2983 | 6557 | 12145 | 2376 | 7618 | 6924 | 9049 | 10975 | 8678 | 12452 | 7263 |
| | 2204 | 3741 | 7210 | 7502 | 4325 | 11408 | 1350 | 6089 | 2892 | 8054 | 8643 | 2501 |
| | 1647 | 11693 | 6378 | 1729 | 6966 | 8734 | 9027 | 8827 | 5647 | 9075 | 7286 | 659 |
| | 4113 | 6496 | 4454 | 11650 | 4378 | 2224 | 2687 | 1763 | 830 | 3255 | 5001 | 3830 |
| | 6495 | 3121 | 1757 | 7740 | 8530 | 2770 | 1866 | 459 | 2049 | 4814 | 12517 | 2408 |
| | 8583 | 6850 | 7550 | 5545 | 2042 | 3709 | 5474 | 11062 | 4761 | 10345 | 7778 | 1449 |
| | 1562 | 8901 | 4943 | 10916 | 11403 | 6820 | 3167 | 1997 | 7484 | 9833 | 12022 | 8573 |
| | 5100 | 5639 | 7158 | 8791 | 9723 | 4484 | 10282 | 1334 | 11312 | 11317 | 4294 | 9400 |
| | 4982 | 7125 | 2655 | 10854 | 9131 | 992 | 5153 | 2528 | 12519 | 12187 | 6818 | 799 |
| | 861 | 11120 | 11361 | 6634 | 12230 | 10852 | 8817 | 3105 | 9513 | 8235 | | |
| 221: | 6205 | 11358 | 3072 | 2888 | 2907 | 6203 | 2800 | 7221 | 4750 | 3627 | 12485 | 2816 |
| | 10896 | 4463 | 3774 | 8273 | 5002 | 4122 | 8581 | 8364 | 3273 | 6044 | 6503 | 6451 |
| | 6887 | 4226 | 5120 | 9987 | 679 | 12019 | 1695 | 939 | 9726 | 8964 | 2326 | 6178 |
| | 6080 | 8551 | 12220 | 926 | 10271 | 3458 | 983 | 6773 | 5354 | 551 | 12326 | 1673 |
| | 10474 | 7111 | 503 | 3261 | 7427 | 7498 | 5710 | 9522 | 12089 | 8842 | 8147 | 8799 |
| | 9369 | 2355 | 6063 | 3582 | 3537 | 3557 | 1618 | 2519 | 10121 | 9781 | 10031 | 1438 |
| | 4529 | 11657 | 7069 | 3979 | 1260 | 8752 | 9515 | 1762 | 10093 | 875 | 12460 | 12052 |
| | 9166 | 7493 | 12523 | 10742 | 10451 | 8622 | 8931 | 10210 | 7668 | 3177 | 3657 | 6276 |
| | 625 | 6423 | | | | | | | | | | |
| 222: | 9766 | 2574 | 8653 | 12518 | 6881 | 10011 | 1281 | 4435 | 3555 | 696 | 5489 | 10478 |
| | 6961 | 6001 | 1591 | 1453 | 10635 | 2267 | 6727 | 12366 | 4551 | 1889 | 1367 | 1388 |
| | 9264 | 8099 | 5016 | 1033 | 4094 | 12546 | 7145 | 6511 | 1331 | 1524 | 3894 | 1943 |
| | 8569 | 11313 | 5235 | | | | | | | | | |
| 223: | 12210 | 2632 | 5689 | 5995 | 9108 | 6848 | 3162 | 5357 | 9825 | 6099 | 9769 | 11406 |
| | 12011 | 4089 | 11037 | 2154 | 7634 | 2930 | 6937 | | | | | |
| 224: | 11851 | 9599 | 392 | 3514 | 5363 | 9918 | 7949 | 12550 | 981 | 8255 | 3499 | 2997 |
| | 9043 | 6076 | 2056 | 2922 | 11064 | 11131 | 9209 | 5316 | 10222 | 11118 | 1947 | 4743 |
| 225: | 12336 | 2351 | 3767 | 1826 | | | | | | | | |
| 226: | 9174 | 12242 | 516 | 9436 | 5692 | 6101 | 8462 | 9960 | 3910 | | | |
| 227: | 882 | 7014 | 8781 | 8246 | 10705 | 2703 | 8520 | 6497 | 7900 | 6599 | 3575 | 3216 |
| 228: | 2359 | 5356 | 6318 | 6123 | 588 | 7908 | 6312 | 4748 | 9929 | 6824 | 6509 | |
| 229: | 9744 | 8168 | 1420 | 6853 | 7687 | 2503 | 7653 | 5252 | 787 | 6057 | 2759 | 8114 |
| | 9054 | 8122 | 8127 | 4410 | 5238 | 4675 | 7892 | 11484 | 12365 | 11744 | 3437 | 6705 |
| | 3241 | 11187 | | | | | | | | | | |
| 230: | 9581 | 9205 | 10794 | 5085 | 2201 | 1384 | 4000 | 8605 | 4670 | 1972 | 10286 | 11576 |
| | 686 | 913 | 2768 | 203 | 393 | 4753 | 1339 | 2332 | 8771 | 9423 | 7426 | 2744 |
| | 3079 | 10139 | 4312 | 11256 | 7098 | 642 | 1681 | 411 | 11964 | 5179 | 1324 | 9955 |
| | 6104 | 5516 | 9644 | 11807 | 7457 | | | | | | | |
| 231: | 12356 | 4958 | 6943 | 8532 | 8516 | 9081 | 4754 | 8450 | 8451 | 10677 | 4939 | 12575 |
| | 11787 | 7205 | 4213 | 972 | 3291 | 9604 | 11517 | 7192 | 10860 | 5598 | 12538 | 4035 |
| | 11116 | 695 | 7007 | 479 | 4154 | 10733 | | | | | | |
| 232: | 641 | 10835 | 7416 | 7705 | 8597 | 5506 | 5365 | 2998 | 4911 | 1710 | 4507 | 7519 |
| | 1965 | | | | | | | | | | | |
| 233: | 7211 | 12486 | 7508 | 11321 | 5086 | 11818 | 8707 | 9321 | 1682 | 4612 | 3885 | 10374 |
| | 3698 | 2956 | 2709 | 2789 | 9060 | 3654 | 4690 | 9089 | 7726 | 3369 | 8385 | 2927 |
| | 2192 | 5052 | 11202 | 11758 | 10190 | 5874 | 8038 | 8631 | 537 | 10655 | 4768 | 2120 |
| | 3687 | 4281 | 11320 | 6521 | 4769 | 7545 | 7786 | 7407 | 12108 | 9206 | 12454 | 2147 |
| | 7282 | 12432 | 3610 | 8128 | 5956 | 3069 | | | | | | |
| 234: | 9373 | 9421 | 11561 | 11557 | 12294 | 10301 | 9284 | 6616 | 1308 | 6809 | 3915 | 11093 |
| | 3919 | 11088 | 11597 | 11298 | 11592 | 6281 | 3917 | 11137 | 1726 | 11130 | 1230 | 3689 |
| | 4740 | 3725 | 11047 | 2975 | 6172 | 1216 | 3544 | 4142 | 7375 | 746 | 11962 | 6474 |
| | 12427 | | | | | | | | | | | |
| 235: | 9373 | 9421 | 11561 | 11557 | 12294 | 10301 | 9284 | 6616 | 1308 | 6809 | 3915 | 11093 |
| | 3919 | 11088 | 11597 | 11298 | 11592 | 6281 | 3917 | 11137 | 1726 | 11130 | 1230 | 3689 |
| | 4740 | 3725 | 11047 | 2975 | 6172 | 1216 | 3544 | 4142 | 7375 | 746 | 11962 | 6474 |
| | 12427 | | | | | | | | | | | |
| 236: | 444 | 10758 | 1559 | 12502 | 889 | 9874 | 9788 | 7310 | 12020 | 6831 | 7980 | 10109 |
| | 5949 | 6731 | 11689 | 7825 | 3697 | 1264 | 4393 | 548 | 2268 | 1773 | 3208 | 1147 |
| | 4029 | 9056 | 1141 | 7469 | 5188 | 10443 | 7314 | 1452 | 1744 | 5383 | | |
| 237: | 5650 | 5881 | 10697 | 3343 | 2506 | 6706 | 9195 | 3119 | 609 | 11113 | 12263 | 12264 |
| | 9501 | 8410 | 8925 | 3221 | 7983 | 7956 | 933 | 2361 | 8269 | 9921 | 6336 | 10563 |
| | 632 | 12541 | 10155 | 10751 | 9511 | 7976 | 6351 | 5482 | 10797 | 4571 | 1776 | 12112 |
| | 7190 | 1900 | 9324 | 6339 | 7001 | 2317 | 9820 | 7015 | 6384 | 4917 | 11822 | 4227 |
| | 11377 | 6229 | 10949 | 11498 | 1448 | 8172 | 10908 | 7776 | 6183 | | | |
| 238: | 3651 | 11823 | 2950 | 1915 | 5176 | 4381 | 8742 | 6316 | 9780 | 3427 | 8319 | 899 |
| | 4829 | 11372 | 12232 | 6415 | 3788 | 1658 | 9838 | 11020 | 8918 | 7485 | 10102 | 8428 |
| | 1054 | 2552 | 11363 | 12489 | 9487 | 10566 | 9535 | 11344 | 4210 | 1739 | 5067 | 8368 |
| | 9789 | 7897 | 2937 | 10388 | 8859 | 10675 | 3146 | 1783 | 2989 | 3471 | 4847 | 919 |
| | 918 | 5832 | 1172 | 2121 | 5023 | 806 | 11459 | 12478 | 12285 | 11359 | 2683 | 11412 |
| | 12180 | 11214 | 5716 | 7022 | 8289 | 6594 | 7858 | 11270 | 1848 | 12273 | 9776 | 6464 |
| | 1578 | 4239 | 7235 | 5329 | 9074 | 3608 | 6048 | 1812 | 3310 | 7872 | 5540 | 8662 |
| | 4796 | 790 | 2336 | 6532 | 8866 | 6741 | 7383 | 5683 | 4201 | 1638 | 1583 | 6819 |
| | 11937 | 2788 | 11593 | 12298 | 6125 | 6977 | 1956 | 8141 | 7002 | 1569 | 11618 | 3937 |
| | 5648 | 10925 | 10480 | 9137 | 6221 | 2366 | 6277 | 10503 | 5161 | 12302 | 5628 | 4791 |
| 239: | 3651 | 11823 | 2950 | 1915 | 5176 | 4381 | 8742 | 6316 | 9780 | 3427 | 8319 | 899 |
| | 4829 | 11372 | 12232 | 6415 | 3788 | 1658 | 9838 | 11020 | 8918 | 7485 | 10102 | 8428 |
| | 1054 | 2552 | 11363 | 12489 | 9487 | 10566 | 9535 | 11344 | 4210 | 1739 | 5067 | 8368 |
| | 9789 | 7897 | 2937 | 10388 | 8859 | 10675 | 3146 | 1783 | 2989 | 3471 | 4847 | 919 |
| | 918 | 5832 | 1172 | 2121 | 5023 | 806 | 11459 | 12478 | 12285 | 11359 | 2683 | 11412 |
| | 12180 | 11214 | 5716 | 7022 | 8289 | 6594 | 7858 | 11270 | 1848 | 12273 | 9776 | 6464 |
| | 1578 | 4239 | 7235 | 5329 | 9074 | 3608 | 6048 | 1812 | 3310 | 7872 | 5540 | 8662 |
| | 4796 | 790 | 2336 | 6532 | 8866 | 6741 | 7383 | 5683 | 4201 | 1638 | 1583 | 6819 |
| | 11937 | 2788 | 11593 | 12298 | 6125 | 6977 | 1956 | 8141 | 7002 | 1569 | 11618 | 3937 |
| | 5648 | 10925 | 10480 | 9137 | 6221 | 2366 | 6277 | 10503 | 5161 | 12302 | 5628 | 4791 |
| 240: | 5298 | 3673 | 6171 | 5229 | 8230 | 6271 | 9427 | 1356 | 10882 | 11852 | 10687 | 6088 |
| | 10076 | 9830 | 10597 | 6373 | 3987 | 10322 | | | | | | |
| 241: | 2393 | 3407 | 11789 | 11391 | 11346 | 5568 | 689 | 9121 | 3768 | 6558 | 5447 | 1870 |
| | 7849 | 2504 | 8733 | 10066 | 994 | 11743 | 980 | 4909 | 7933 | 8486 | 8369 | 5152 |
| | 1705 | 6156 | 10608 | | | | | | | | | |
| 242: | 3431 | 5395 | 4346 | 8330 | 8327 | 8702 | 7787 | 5265 | 8943 | 12561 | 4536 | 11625 |
| | 4411 | 1035 | 11796 | 6078 | 2720 | 4449 | 10010 | 3057 | 9876 | 3536 | 5603 | 11727 |
| | 5025 | 698 | 9899 | 6457 | 10804 | 3454 | 2741 | 11343 | 11668 | 12537 | 9198 | 9194 |
| | 6906 | 11749 | 2886 | 4118 | 11050 | 3125 | 3104 | 8238 | 7647 | 11157 | 11552 | 5735 |
| | 3190 | 1224 | 2010 | 10669 | 3186 | 12278 | 10534 | 9546 | 10088 | 3888 | 1521 | 10626 |
| | 10413 | 11620 | 12324 | 1406 | 12498 | 3067 | 7386 | 6359 | 10120 | 6004 | 2803 | 9290 |
| | 11141 | 854 | 2391 | 6032 | 10433 | 12371 | 11636 | 11795 | 6713 | 8567 | 10754 | 717 |
| | 2465 | 9545 | 9886 | 6990 | 4012 | 8324 | 3742 | 1053 | 8586 | 8683 | 10073 | 12149 |
| | 7481 | 2755 | 2646 | 6082 | 8956 | 4440 | 4579 | 4447 | 6886 | 4268 | 561 | 11512 |
| | 3439 | 1568 | 8328 | 1091 | 7948 | 5861 | 726 | 582 | 11893 | 2118 | 12271 | 6845 |
| | 6843 | 6847 | 2068 | 9119 | 2022 | 8587 | 12175 | 8754 | 6777 | 497 | 9325 | 6872 |
| | 7531 | 11335 | 2928 | 9885 | 5358 | 1963 | 6109 | 7533 | 11337 | 11444 | 9889 | 6179 |
| | 1632 | 6874 | 3342 | 12072 | 12199 | 11476 | 9892 | 6224 | 6254 | 5355 | 11338 | 7625 |
| | 10426 | 10428 | 11395 | 1315 | 11066 | 11063 | 11076 | 5351 | 1440 | 11336 | 11316 | 3538 |
| | 8749 | 9778 | 5154 | 9356 | 835 | 831 | 2589 | 8503 | 10727 | 2891 | 8958 | 11046 |
| | 6790 | 9818 | 9094 | 9828 | 5374 | 8610 | 7368 | | | | | |
| 244: | 9283 | 4282 | 1754 | 571 | 9388 | 10252 | 4060 | 4063 | 10254 | 9392 | 10256 | 10251 |
| | 8049 | 10250 | 10237 | 10240 | 8942 | 10188 | 9163 | 9457 | 9412 | 4148 | 2795 | 2440 |
| | 10370 | 3577 | 434 | 12383 | 7841 | 4935 | 4928 | 4931 | 4933 | 4908 | 701 | 7640 |
| | 2602 | 8966 | 4824 | 5455 | 4822 | 4823 | 5454 | 9020 | 8692 | 9551 | 6293 | 8301 |
| | 3456 | 1197 | 12421 | 3247 | 6475 | 7319 | 9389 | 569 | 6169 | 1497 | 1499 | 9460 |
| | 2309 | 600 | 2172 | 2178 | 6997 | 2668 | 8309 | 2821 | 4458 | 2940 | 9832 | 5380 |
| | 6918 | 732 | 9375 | 9376 | 9294 | 2109 | 12129 | 8117 | 12379 | 4965 | 10550 | 7218 |
| | 12182 | 11653 | 9067 | 4197 | 9956 | 4905 | 3379 | 8543 | 5663 | 10834 | 8946 | 3814 |
| | 4643 | 1788 | 6732 | 9857 | 4189 | 10740 | 6347 | 1240 | 5417 | 6399 | 1781 | 1782 |
| | 3068 | 3398 | 10951 | 3402 | 4557 | 3406 | 1307 | 4161 | 11960 | 8337 | 8307 | 7812 |
| | 2486 | 2510 | 1431 | 6430 | 894 | 5282 | 12422 | 6029 | 10938 | 10935 | 10936 | 2671 |
| | 4260 | 10891 | 7914 | 5646 | 9237 | 11207 | 11111 | 4869 | 10685 | 6067 | 4596 | 12455 |
| | 4572 | 7777 | 2072 | 1364 | 3840 | 4879 | 1193 | 7010 | 1667 | 2748 | 4809 | 1850 |
| | 8067 | 8922 | 9994 | 5724 | 12160 | 6849 | 3432 | 11503 | 11999 | 2619 | 11453 | 5074 |
| | 12050 | 3193 | 3298 | 5344 | 3303 | 3301 | 3300 | 3362 | 3283 | 3251 | 3211 | 9607 |
| | 3277 | 4512 | 10924 | 8703 | 8838 | 4726 | 6467 | 2527 | 962 | 5203 | 4589 | 9809 |
| | 9806 | 9805 | 9812 | 12423 | 12314 | 3674 | 3728 | 3676 | 4145 | 7690 | 4132 | 3000 |
| | 3002 | 2009 | 2415 | 3348 | 2543 | 1825 | 3368 | 1753 | 11838 | 6270 | 11163 | 4736 |
| | 11353 | 3911 | 10235 | 10232 | 9385 | 10283 | 10275 | 10280 | 10279 | 1285 | 1293 | 1279 |
| | 1312 | 1291 | 1089 | 2708 | 1407 | 10065 | 9873 | 12041 | 9138 | 11097 | 4104 | 405 |
| | 10732 | 3843 | 10734 | 9232 | 1527 | 5586 | 4841 | | | | | |
| 245: | 9283 | 4282 | 1754 | 571 | 9388 | 10252 | 4060 | 4063 | 10254 | 9392 | 10256 | 10251 |
| | 8049 | 10250 | 10237 | 10240 | 8942 | 10188 | 9163 | 9457 | 9412 | 4148 | 2795 | 2440 |
| | 10370 | 3577 | 434 | 12383 | 7841 | 4935 | 4928 | 4931 | 4933 | 4908 | 701 | 7640 |
| | 2602 | 8966 | 4824 | 5455 | 4822 | 4823 | 5454 | 9020 | 8692 | 9551 | 6293 | 8301 |
| | 3456 | 1197 | 12421 | 3247 | 6475 | 7319 | 9389 | 569 | 6169 | 1497 | 1499 | 9460 |
| | 2309 | 600 | 2172 | 2178 | 6997 | 2668 | 8309 | 2821 | 4458 | 2940 | 9832 | 5380 |
| | 6918 | 732 | 9375 | 9376 | 9294 | 2109 | 12129 | 8117 | 12379 | 4965 | 10550 | 7218 |
| | 12182 | 11653 | 9067 | 4197 | 9956 | 4905 | 3379 | 8543 | 5663 | 10834 | 8946 | 3814 |
| | 4643 | 1788 | 6732 | 9857 | 4189 | 10740 | 6347 | 1240 | 5417 | 6399 | 1781 | 1782 |
| | 3068 | 3398 | 10951 | 3402 | 4557 | 3406 | 1307 | 4161 | 11960 | 8337 | 8307 | 7812 |
| | 2486 | 2510 | 1431 | 6430 | 894 | 5282 | 12422 | 6029 | 10938 | 10935 | 10936 | 2671 |
| | 4260 | 10891 | 7914 | 5646 | 9237 | 11207 | 11111 | 4869 | 10685 | 6067 | 4596 | 12455 |
| | 4572 | 7777 | 2072 | 1364 | 3840 | 4879 | 1193 | 7010 | 1667 | 2748 | 4809 | 1850 |
| | 8067 | 8922 | 9994 | 5724 | 12160 | 6849 | 3432 | 11503 | 11999 | 2619 | 11453 | 5074 |
| | 12050 | 3193 | 3298 | 5344 | 3303 | 3301 | 3300 | 3362 | 3283 | 3251 | 3211 | 9607 |
| | 3277 | 4512 | 10924 | 8703 | 8838 | 4726 | 6467 | 2527 | 962 | 5203 | 4589 | 9809 |
| | 9806 | 9805 | 9812 | 12423 | 12314 | 3674 | 3728 | 3676 | 4145 | 7690 | 4132 | 3000 |
| | 3002 | 2009 | 2415 | 3348 | 2543 | 1825 | 3368 | 1753 | 11838 | 6270 | 11163 | 4736 |
| | 11353 | 3911 | 10235 | 10232 | 9385 | 10283 | 10275 | 10280 | 10279 | 1285 | 1293 | 1279 |
| | 1312 | 1291 | 1089 | 2708 | 1407 | 10065 | 9873 | 12041 | 9138 | 11097 | 4104 | 405 |
| | 10732 | 3843 | 10734 | 9232 | 1527 | 5586 | 4841 | | | | | |
| 246: | 6942 | 11388 | 3778 | 2672 | 12375 | 7074 | 1179 | 12458 | 1855 | 12015 | 9980 | 10716 |
| | 10918 | 11770 | 10255 | 581 | 10006 | 4467 | 10169 | 7675 | 1250 | 5319 | 9827 | 496 |
| | 1732 | 8778 | | | | | | | | | | |
| 247: | 9530 | 12217 | 826 | 5267 | 2006 | 547 | 7365 | 1816 | 10509 | 6784 | 2509 | 7339 |
| | 3841 | 5471 | 11850 | 11519 | 2806 | 7443 | 8018 | 11751 | 1529 | 4077 | 12088 | 6149 |
| | 1489 | 868 | 7473 | 2466 | 614 | 1176 | 6038 | 2195 | 1557 | 8182 | 3984 | |
| 248: | 2809 | 1347 | 5519 | 6353 | 8932 | 7422 | 7557 | 4683 | 11147 | 10637 | 9404 | 11768 |
| | 910 | 8870 | 6324 | 5045 | 4945 | 9453 | 7164 | 4152 | 3322 | 10499 | 7328 | 8994 |
| | 11460 | 9634 | 9064 | 9047 | 10906 | 11904 | 749 | 5014 | 9906 | 9939 | 9963 | 2364 |
| | 6617 | 1635 | 4234 | 3462 | 12043 | 10075 | 3459 | 10489 | 8606 | 1999 | 4508 | 10028 |
| | 5341 | 6180 | 9971 | 7215 | 3422 | 5091 | 9652 | 10601 | 8028 | 11427 | 6678 | 4365 |
| | 7082 | 1022 | 3209 | 4357 | 9159 | 7321 | 12077 | 11967 | 680 | 7943 | 661 | 11246 |
| | 10622 | 7676 | 818 | 3364 | 9160 | 6187 | 8531 | 4604 | 6381 | 4859 | 2298 | 10753 |
| | 12368 | 9200 | 5155 | 2175 | 8058 | 11106 | 1639 | 5299 | 1905 | 10681 | 10937 | 1738 |
| | 3580 | 7344 | 8320 | 8466 | 5687 | 5293 | 8844 | 5030 | 1572 | 1735 | 543 | 1105 |
| | 562 | 3483 | 9147 | 12109 | 11282 | 7291 | 10666 | 11009 | 2523 | 12408 | 12128 | 12406 |
| | 2535 | 10560 | 12212 | 10101 | 11610 | 5148 | 8687 | 5945 | 11651 | 12286 | 5942 | 12291 |
| | 11624 | 11675 | 12078 | 4588 | 1480 | 1513 | 4665 | 759 | 5868 | 705 | 4662 | 1458 |
| | 4585 | 4555 | 5193 | 754 | 756 | 5855 | 4641 | 4563 | 1455 | 761 | 5867 | 5859 |
| | 5756 | 1520 | 4608 | 1437 | 5787 | 1459 | 671 | 1515 | 5784 | 5824 | 5864 | 5902 |
| | 5791 | 678 | 5169 | 5797 | 5166 | 807 | 808 | 5897 | 5173 | 793 | 5839 | 5899 |
| | 5761 | 700 | 5752 | 5748 | 848 | 845 | 792 | 786 | 815 | 673 | 853 | 1429 |
| | 812 | 850 | 849 | 817 | 1432 | 5172 | 5009 | 5062 | 5040 | 4868 | 5060 | 5066 |
| | 5032 | 5034 | 5008 | 5092 | 9098 | 5069 | 5717 | 7327 | 3898 | 5904 | 8185 | 10968 |
| | 12327 | 12382 | 12376 | 12380 | 12358 | 12355 | 4920 | 5826 | 4918 | 9879 | 6009 | 6638 |
| | 4899 | 6614 | 6005 | 9882 | 9880 | 9915 | 6609 | 6007 | 9959 | 4923 | 9936 | 9912 |
| | 5794 | 9935 | 9908 | 6637 | 9941 | 9962 | 9957 | 9970 | 6610 | 9996 | 9993 | 9991 |
| | 9998 | 4974 | 5857 | 5931 | 5830 | 5865 | 5007 | 5903 | 5852 | 5833 | 5862 | 5202 |
| | 5093 | 4978 | 5098 | 5096 | 4892 | 6002 | 5934 | 5788 | 5751 | 5785 | 5981 | 5985 |
| | 5822 | 5958 | 5227 | 6671 | 6643 | 6645 | 6640 | 1393 | 12542 | 1691 | 10538 | 9575 |
| | 2875 | 1909 | 6944 | 2273 | 7752 | 7749 | 7747 | 7774 | 7150 | 7754 | 7753 | 7720 |
| | 7717 | 7154 | 7723 | 6454 | 9178 | 1910 | 9184 | 12431 | 11386 | 11005 | 3701 | 2612 |
| | 991 | 4598 | 6761 | 458 | 1261 | 11303 | 11387 | 5560 | | | | |
| 249: | 11466 | 10817 | 8971 | 4262 | 10839 | 329 | 8600 | 5335 | 896 | 791 | 1352 | 7322 |
| | 10270 | 7741 | 9035 | 6714 | 10000 | 8201 | 3746 | 5174 | 4398 | 7207 | 587 | 4853 |
| | 4851 | 2261 | 11405 | 10793 | 3440 | 3463 | 7505 | 1693 | 2532 | 2862 | 2859 | 5792 |
| | 2825 | 11560 | 7637 | 7633 | 7614 | 2464 | 11222 | 1778 | 11268 | 11462 | 2158 | 10647 |
| | 1146 | 7316 | 6100 | 12545 | 1698 | 4358 | 879 | 1727 | 12205 | 7170 | 6117 | 10722 |
| | 12516 | 7294 | 12005 | 11165 | 1857 | 12042 | 6879 | 3473 | 4353 | 2798 | 10096 | 2424 |
| | 7595 | 9288 | 3396 | 4644 | 7051 | 6749 | 4932 | 1417 | 11847 | 8676 | 2675 | 3149 |
| | 4493 | 8041 | 2231 | 10890 | 2301 | 3232 | 3614 | 9139 | 3530 | 7139 | 7836 | 3718 |
| | 12250 | 881 | 2373 | 4126 | 9707 | 5779 | 9630 | 2905 | 11956 | 10260 | 8176 | 8370 |
| | 1834 | 1301 | 5330 | 2572 | 10162 | 3878 | 8872 | 7166 | 12030 | 9648 | 2689 | 10149 |
| | 10973 | 9109 | 4471 | 11920 | 685 | 6584 | 10680 | 5472 | 5665 | 3253 | 2889 | 12470 |
| | 8726 | 6034 | 6623 | 4199 | 4362 | 12405 | 6411 | 10429 | 12497 | 9570 | 1214 | 1030 |
| | 617 | 829 | 10859 | 11229 | 1603 | 3932 | 5522 | 1255 | 12084 | 10987 | 900 | 11188 |
| | 2018 | 616 | 10866 | 6138 | 1003 | 7084 | 10459 | 1656 | 9217 | 4190 | 10206 | 4395 |
| | 2310 | 3027 | 3199 | 8196 | 12409 | 1333 | 1930 | 7140 | 8939 | 3081 | 5939 | 1360 |
| | 6958 | 10063 | 5908 | 2324 | 5587 | 735 | 10365 | 8940 | 1173 | 7035 | 8162 | 10945 |
| | 7665 | 8546 | 4249 | 8439 | 4095 | 10156 | 10177 | 10176 | 931 | 2377 | 8634 | 420 |
| | 2894 | 3098 | 4069 | 5285 | 1311 | 9272 | 6242 | 7611 | 3944 | 3947 | 5722 | 5719 |
| | 5695 | 5720 | 5753 | 5727 | 5731 | 12515 | 9999 | 6710 | 9394 | 9395 | 4022 | 4024 |
| | 10165 | 3990 | 10801 | 3995 | 10163 | 1553 | 3993 | 11441 | 10846 | 11136 | 7843 | 10491 |
| | 4725 | 11489 | 4723 | 10823 | 10498 | 10615 | 626 | 11339 | 10409 | 11480 | 1805 | 7639 |
| | 10281 | 10034 | 8405 | 11038 | 3492 | 8645 | 5037 | 12001 | 5800 | 7175 | 4668 | 9467 |
| | 3156 | 11075 | 2995 | 9347 | 7905 | 1423 | 7870 | 7748 | 2283 | 9865 | 11865 | 5561 |
| | 8231 | 8097 | 6110 | 8686 | 7829 | 8871 | 5715 | 1804 | 5644 | 4423 | 2259 | 11914 |
| | 11250 | 8485 | 9933 | 716 | 6323 | 6799 | 3509 | 12565 | 7764 | 5263 | 9011 | 6246 |
| | 4504 | 2358 | 8877 | 2182 | 11148 | 10158 | 5262 | 5258 | 4660 | 3899 | 6021 | 10821 |
| | 10978 | 1801 | 8831 | 1936 | 6826 | 9977 | 3546 | 5982 | 3472 | 8460 | 3460 | 12528 |
| | 5242 | 8527 | 8657 | 8552 | 7744 | 6286 | 2066 | 9201 | 506 | 6016 | 5456 | 399 |
| | 481 | 11107 | 9066 | 4390 | 6748 | 11573 | 5819 | 5182 | 9176 | 11244 | 8029 | 3399 |
| | 7013 | 10161 | 10468 | 11469 | 5983 | 9301 | 5544 | 7268 | 5412 | 8121 | 3720 | 9353 |
| | 2299 | 6358 | 3224 | 11486 | 2423 | 1330 | 12174 | 3550 | 4953 | 2783 | 11429 | 8828 |
| | 8602 | 1300 | 9104 | 7287 | 8658 | 1986 | 5677 | 8336 | 12262 | 3449 | 4980 | 9514 |
| | 7606 | 2388 | 11771 | 10820 | 1780 | 11551 | 2392 | 10995 | 9489 | 2737 | 8454 | 10493 |
| | 975 | 1824 | 7713 | 12036 | 7172 | 8395 | 6062 | 4409 | 8222 | 5608 | 5031 | 12363 |
| | 11455 | 2661 | 2189 | 5632 | 6561 | 3215 | 11858 | 2652 | 9866 | 8620 | 11816 | 2701 |
| | 10674 | 568 | 11663 | 11649 | 9706 | 12317 | 12525 | 2916 | 8590 | 7129 | 9310 | 11073 |
| | 7694 | 1472 | 5767 | 7178 | 8963 | 4159 | 3109 | 8186 | 2200 | 5114 | 9659 | 6461 |
| | 8688 | 6519 | 5873 | 668 | 11777 | 10392 | 4625 | 10853 | 6210 | 3001 | 4310 | 1966 |
| | 1885 | 7538 | 5702 | 8513 | 9937 | 10901 | 11642 | 2005 | 4671 | 9435 | 3667 | 4480 |
| | 5740 | 6785 | 4971 | 10956 | 5657 | 2890 | 7670 | 8813 | 6102 | 8483 | 8452 | 11464 |
| | 10848 | 11438 | 10851 | 10769 | 10766 | 10764 | 10763 | 6869 | 8373 | 1564 | 5524 | 10079 |
| | 11491 | 11440 | 10713 | 7635 | 7631 | 5372 | 5348 | 9233 | 9231 | 9221 | 9240 | 9235 |
| | 9220 | 3029 | 10761 | 9983 | 814 | 7040 | 12560 | 7016 | 8158 | 8759 | 8762 | 8163 |
| | 7037 | 7822 | 8767 | 7066 | 7061 | 10679 | 11467 | | | | | |
| 250: | 11466 | 10817 | 8971 | 4262 | 10839 | 329 | 8600 | 5335 | 896 | 791 | 1352 | 7322 |
| | 10270 | 7741 | 9035 | 6714 | 10000 | 8201 | 3746 | 5174 | 4398 | 7207 | 587 | 4853 |
| | 4851 | 2261 | 11405 | 10793 | 3440 | 3463 | 7505 | 1693 | 2532 | 2862 | 2859 | 5792 |
| | 2825 | 11560 | 7637 | 7633 | 7614 | 2464 | 11222 | 1778 | 11268 | 11462 | 2158 | 10647 |
| | 1146 | 7316 | 6100 | 12545 | 1698 | 4358 | 879 | 1727 | 12205 | 7170 | 6117 | 10722 |
| | 12516 | 7294 | 12005 | 11165 | 1857 | 12042 | 6879 | 3473 | 4353 | 2798 | 10096 | 2424 |
| | 7595 | 9288 | 3396 | 4644 | 7051 | 6749 | 4932 | 1417 | 11847 | 8676 | 2675 | 3149 |
| | 4493 | 8041 | 2231 | 10890 | 2301 | 3232 | 3614 | 9139 | 3530 | 7139 | 7836 | 3718 |
| | 12250 | 881 | 2373 | 4126 | 9707 | 5779 | 9630 | 2905 | 11956 | 10260 | 8176 | 8370 |
| | 1834 | 1301 | 5330 | 2572 | 10162 | 3878 | 8872 | 7166 | 12030 | 9648 | 2689 | 10149 |
| | 10973 | 9109 | 4471 | 11920 | 685 | 6584 | 10680 | 5472 | 5665 | 3253 | 2889 | 12470 |
| | 8726 | 6034 | 6623 | 4199 | 4362 | 12405 | 6411 | 10429 | 12497 | 9570 | 1214 | 1030 |
| | 617 | 829 | 10859 | 11229 | 1603 | 3932 | 5522 | 1255 | 12084 | 10987 | 900 | 11188 |
| | 2018 | 616 | 10866 | 6138 | 1003 | 7084 | 10459 | 1656 | 9217 | 4190 | 10206 | 4395 |
| | 2310 | 3027 | 3199 | 8196 | 12409 | 1333 | 1930 | 7140 | 8939 | 3081 | 5939 | 1360 |
| | 6958 | 10063 | 5908 | 2324 | 5587 | 735 | 10365 | 8940 | 1173 | 7035 | 8162 | 10945 |
| | 7665 | 8546 | 4249 | 8439 | 4095 | 10156 | 10177 | 10176 | 931 | 2377 | 8634 | 420 |
| | 2894 | 3098 | 4069 | 5285 | 1311 | 9272 | 6242 | 7611 | 3944 | 3947 | 5722 | 5719 |
| | 5695 | 5720 | 5753 | 5727 | 5731 | 12515 | 9999 | 6710 | 9394 | 9395 | 4022 | 4024 |
| | 10165 | 3990 | 10801 | 3995 | 10163 | 1553 | 3993 | 11441 | 10846 | 11136 | 7843 | 10491 |
| | 4725 | 11489 | 4723 | 10823 | 10498 | 10615 | 626 | 11339 | 10409 | 11480 | 1805 | 7639 |
| | 10281 | 10034 | 8405 | 11038 | 3492 | 8645 | 5037 | 12001 | 5800 | 7175 | 4668 | 9467 |
| | 3156 | 11075 | 2995 | 9347 | 7905 | 1423 | 7870 | 7748 | 2283 | 9865 | 11865 | 5561 |
| | 8231 | 8097 | 6110 | 8686 | 7829 | 8871 | 5715 | 1804 | 5644 | 4423 | 2259 | 11914 |
| | 11250 | 8485 | 9933 | 716 | 6323 | 6799 | 3509 | 12565 | 7764 | 5263 | 9011 | 6246 |
| | 4504 | 2358 | 8877 | 2182 | 11148 | 10158 | 5262 | 5258 | 4660 | 3899 | 6021 | 10821 |
| | 10978 | 1801 | 8831 | 1936 | 6826 | 9977 | 3546 | 5982 | 3472 | 8460 | 3460 | 12528 |
| | 5242 | 8527 | 8657 | 8552 | 7744 | 6286 | 2066 | 9201 | 506 | 6016 | 5456 | 399 |
| | 481 | 11107 | 9066 | 4390 | 6748 | 11573 | 5819 | 5182 | 9176 | 11244 | 8029 | 3399 |
| | 7013 | 10161 | 10468 | 11469 | 5983 | 9301 | 5544 | 7268 | 5412 | 8121 | 3720 | 9353 |
| | 2299 | 6358 | 3224 | 11486 | 2423 | 1330 | 12174 | 3550 | 4953 | 2783 | 11429 | 8828 |
| | 8602 | 1300 | 9104 | 7287 | 8658 | 1986 | 5677 | 8336 | 12262 | 3449 | 4980 | 9514 |
| | 7606 | 2388 | 11771 | 10820 | 1780 | 11551 | 2392 | 10995 | 9489 | 2737 | 8454 | 10493 |
| | 975 | 1824 | 7713 | 12036 | 7172 | 8395 | 6062 | 4409 | 8222 | 5608 | 5031 | 12363 |
| | 11455 | 2661 | 2189 | 5632 | 6561 | 3215 | 11858 | 2652 | 9866 | 8620 | 11816 | 2701 |
| | 10674 | 568 | 11663 | 11649 | 9706 | 12317 | 12525 | 2916 | 8590 | 7129 | 9310 | 11073 |
| | 7694 | 1472 | 5767 | 7178 | 8963 | 4159 | 3109 | 8186 | 2200 | 5114 | 9659 | 6461 |
| | 8688 | 6519 | 5873 | 668 | 11777 | 10392 | 4625 | 10853 | 6210 | 3001 | 4310 | 1966 |
| | 1885 | 7538 | 5702 | 8513 | 9937 | 10901 | 11642 | 2005 | 4671 | 9435 | 3667 | 4480 |
| | 5740 | 6785 | 4971 | 10956 | 5657 | 2890 | 7670 | 8813 | 6102 | 8483 | 8452 | 11464 |
| | 10848 | 11438 | 10851 | 10769 | 10766 | 10764 | 10763 | 6869 | 8373 | 1564 | 5524 | 10079 |
| | 11491 | 11440 | 10713 | 7635 | 7631 | 5372 | 5348 | 9233 | 9231 | 9221 | 9240 | 9235 |
| | 9220 | 3029 | 10761 | 9983 | 814 | 7040 | 12560 | 7016 | 8158 | 8759 | 8762 | 8163 |
| | 7037 | 7822 | 8767 | 7066 | 7061 | 10679 | 11467 | | | | | |
| 251: | 7566 | 9095 | 9909 | 985 | 3712 | 4673 | 10400 | 6894 | 5106 | 4420 | 10664 | |
| 252: | 1273 | 6354 | 10628 | 10067 | 5950 | 6721 | 684 | 10319 | 709 | 8095 | 11478 | 8177 |
| | 9858 | 2059 | 488 | 468 | 466 | 443 | 6770 | 8271 | 8157 | 9002 | 4162 | 7370 |
| | 1098 | 10796 | 8991 | 10090 | 3419 | 1137 | 3784 | 4900 | 1074 | 6158 | 9679 | 1086 |
| | 7420 | 7419 | 11662 | 4061 | 7548 | 11926 | 460 | 10362 | 8812 | 6107 | 10946 | 6408 |
| | 8006 | 2847 | 1989 | 3661 | 2787 | 1619 | 1169 | 7204 | 7238 | 10070 | 8193 | 12501 |
| | 5485 | 1845 | 2794 | 7224 | 9406 | 3749 | 12378 | 7011 | 3438 | 11084 | 5896 | 11474 |
| | 11425 | 546 | 7789 | 4010 | 6448 | 7795 | 7357 | 11260 | 11210 | 8046 | 7430 | 5071 |
| | 10524 | 9742 | 3252 | 9006 | 10057 | 646 | 7991 | 5217 | 3450 | 5973 | 6730 | 3980 |
| | 4722 | 10407 | 12354 | 911 | 10043 | 9379 | 9461 | 9509 | 6855 | 11475 | 4699 | 4707 |
| | 3903 | 7938 | 9028 | 10396 | 7951 | 1494 | 6633 | 5811 | 1535 | 1538 | 1708 | 5130 |
| | 11886 | 5347 | 10359 | 6327 | 7431 | 11504 | 7564 | 4929 | 6272 | 10295 | 1505 | 3845 |
| | 4840 | 5433 | 8232 | 12488 | 4783 | 9665 | 667 | 1675 | 7251 | 12058 | 1860 | 10394 |
| | 8850 | 8383 | 714 | 6900 | 2682 | 4992 | 12142 | 10423 | 878 | 6382 | 4981 | 6573 |
| | 9261 | 426 | 2584 | 2775 | 2459 | 8550 | 6512 | 3410 | 10959 | 3484 | 8923 | 9711 |
| | 619 | 9357 | 3314 | 7516 | 5046 | 10986 | 11915 | 4893 | 6348 | 6418 | 3650 | 5909 |
| | 6647 | 12436 | 7700 | 1565 | 10495 | 10526 | 10511 | 10870 | 9093 | 4720 | 2493 | 9031 |
| | 11617 | 9494 | 11310 | 11940 | 4618 | 11774 | 692 | 1411 | 9722 | 4468 | 12568 | 11407 |
| | 7852 | 5755 | 8339 | 8261 | 1024 | 8260 | 11252 | 8668 | 12554 | 11172 | 2126 | 3350 |
| | 8274 | 2633 | 2347 | 867 | 9039 | 11029 | 518 | 11209 | 8727 | 10724 | 3847 | 2316 |
| | 1653 | 909 | 1651 | 2630 | 6035 | 567 | 11952 | 6533 | 2167 | 6980 | 2903 | 5645 |
| | 2985 | 1419 | 2272 | 8096 | 2028 | 6291 | 11208 | 11025 | 11024 | 5181 | 7856 | 8183 |
| | 7234 | 7750 | 3519 | 10320 | 10862 | 1964 | 3457 | 3453 | 5882 | 5849 | 8580 | 4942 |
| | 3849 | 5260 | 6222 | 9848 | 5523 | 8905 | 11374 | 436 | 465 | 464 | 1140 | 11443 |
| | 10042 | 3806 | 9553 | 10185 | 7826 | 10304 | 8012 | 5024 | 2583 | 2439 | 8659 | 11296 |
| | 4457 | 3826 | 3825 | 2123 | 6153 | 2580 | 3823 | 11235 | 5180 | 1488 | 1490 | 5211 |
| | 2474 | 1881 | 12311 | 1354 | 9614 | 7907 | 6374 | 3347 | 10926 | 1920 | 6334 | 5431 |
| | 8595 | 7641 | 5799 | 11247 | 7348 | 12051 | 5914 | 3330 | 8845 | 6621 | 4241 | 11797 |
| | 2199 | 12467 | 478 | 1427 | 11654 | 1136 | 8093 | 577 | 6132 | 2150 | 5407 | 11992 |
| | 8519 | 5378 | 6745 | 2449 | 11259 | 1376 | 10055 | 7661 | 4076 | 8854 | 8603 | 10662 |
| | 6195 | 12075 | 11323 | 11304 | 7916 | 8839 | 1138 | 7326 | 8295 | 12332 | 9482 | 11477 |
| | 484 | 7028 | 7408 | 7379 | 5325 | 4461 | 9084 | 5254 | 12236 | 5518 | 9609 | 442 |
| | 8120 | 4033 | 10357 | 514 | 6417 | 3763 | 2952 | 10085 | 1346 | 11907 | 10086 | 11849 |
| | 11941 | 2826 | 10100 | 5164 | 4319 | 7506 | 2567 | 5959 | 2764 | 12070 | 2700 | 7978 |
| | 3044 | 3064 | 1422 | 715 | 3359 | 9532 | 441 | 440 | 1862 | 740 | 718 | 8115 |
| | 3061 | 534 | 3160 | 10696 | 10298 | | | | | | | |
| 253: | 5927 | 3822 | 5709 | 5332 | 11543 | 10238 | 4587 | 4298 | | | | |
| 254: | 3005 | 4566 | 3638 | 3636 | 4949 | 5593 | 4950 | 4952 | 6386 | 6624 | 4307 | 3140 |
| | 6319 | 7213 | 7928 | 8481 | 10333 | 12107 | 5205 | 4749 | 1984 | 5730 | 3405 | 11861 |
| | 3819 | 11697 | 3214 | 6534 | 9110 | 11404 | 7447 | 7451 | 2747 | | | |
| 255: | 6851 | 10963 | 4533 | 8701 | 12352 | 4018 | | | | | | |
| 256: | 1398 | | | | | | | | | | | |
| 257: | 4311 | 9437 | 6301 | 9698 | 8305 | 4430 | 1916 | 3966 | 2446 | 8223 | 12071 | 7173 |
| | 11279 | 2994 | 12463 | 6181 | 12347 | 6140 | 9285 | 6201 | 11237 | 4813 | 11876 | 1006 |
| | 7131 | 9122 | 9924 | 9082 | 6064 | 8234 | 4545 | 11494 | 6466 | 1475 | 6806 | 9092 |
| | 6515 | 10540 | 856 | 2077 | 6207 | 8044 | 6949 | 8542 | 10988 | 7589 | 12288 | 4280 |
| | 9331 | 1713 | 1349 | 9061 | 4855 | 4694 | 10186 | 10818 | 12322 | 777 | 803 | 4460 |
| | 8010 | 8775 | 12388 | 6586 | 9554 | 5768 | 4599 | 10157 | 570 | 5597 | 4451 | 607 |
| | 1039 | 7554 | 2538 | 11891 | 3123 | 5515 | 536 | 4495 | 5739 | 3594 | 9870 | 4947 |
| | 9673 | 4798 | 1280 | 4136 | 2322 | 11007 | 6288 | 4646 | 6933 | 1844 | | |
| 258: | 9859 | 12104 | 8809 | 8807 | 6357 | 6356 | 1789 | 10837 | 2642 | 3264 | 9441 | 8984 |
| | 8089 | 4196 | 9932 | 3047 | 6863 | 7859 | 9791 | 10592 | 12563 | 993 | 9958 | 7654 |
| | 4937 | 4540 | 8667 | 1650 | 1296 | 7541 | 6815 | 1649 | 1469 | 8561 | 3834 | 11908 |
| | 12504 | 8493 | 9837 | 7137 | 7837 | 9143 | 3913 | 8926 | 669 | 602 | 397 | 11747 |
| | 10928 | 3857 | 2947 | 3905 | 7688 | 6370 | 7161 | 1745 | 7945 | 2746 | 10541 | 4925 |
| | 5430 | 5845 | 1383 | 1484 | 11461 | 7123 | 11294 | 2690 | 9638 | 7340 | 1898 | 10844 |
| | 4970 | 7629 | 12350 | 6619 | 7029 | 654 | 4815 | 12384 | 9127 | 11340 | 2498 | 1184 |
| | 3150 | 11558 | 12295 | | | | | | | | | |
| 259: | 8388 | 3722 | 7698 | 3015 | 10098 | 10548 | 508 | 4289 | 7734 | 7728 | 8287 | 7796 |
| | 7582 | 8616 | 10704 | 7030 | 4169 | 7702 | 7706 | 7760 | 5133 | 7788 | 7765 | 7767 |
| | 9315 | 6998 | 6984 | 7008 | 7005 | 7058 | 7114 | 7092 | 7063 | 7091 | 7096 | 7067 |
| | 7000 | 7012 | 10040 | 1961 | 1397 | 9439 | 8663 | 4664 | 8071 | 7086 | 6419 | 7987 |
| | 12490 | 1679 | 1657 | 4331 | 1983 | 6707 | 3391 | 7497 | 7380 | 7845 | 7666 | 9658 |
| | 7955 | 1477 | 11341 | 8188 | 12012 | 775 | 12065 | 8672 | 1245 | 4446 | 3055 | 11555 |
| | 8112 | 886 | 8711 | 8285 | 8283 | 7104 | 1258 | 3726 | 5057 | 9344 | 1937 | 12566 |
| | 8716 | 11643 | 5989 | 6696 | 2375 | 2637 | 11384 | 8563 | 3794 | 3791 | 3013 | 2235 |
| | 893 | 12177 | 1467 | 895 | 8779 | 4771 | 6545 | 757 | 2136 | 2135 | 2138 | 10125 |
| | 10542 | 4351 | 10760 | 8345 | 6952 | 3663 | 2436 | 10787 | 2205 | 4770 | 5789 | 1191 |
| | 7588 | 4737 | 1645 | 3194 | 1643 | 5301 | 9568 | 4597 | 606 | 8738 | 8740 | 688 |
| | 1447 | 11990 | 725 | 11030 | 7724 | 11012 | 7085 | 1201 | 4153 | 2707 | 1236 | 10243 |
| | 3571 | 4602 | 2754 | 10867 | 4661 | 5479 | 11835 | 7842 | 6726 | 2808 | 5829 | 8796 |
| | 4175 | 4871 | 6440 | 8878 | 2385 | 11553 | 3306 | 4444 | 1014 | 7794 | 8496 | 6687 |
| | 4238 | 425 | 8393 | 5926 | 6037 | 11564 | 937 | 6397 | 11272 | 11274 | 6981 | 597 |
| | 4128 | 8492 | 4235 | 4252 | 3066 | 1793 | 10958 | 11713 | 9976 | 10957 | 4236 | 8721 |
| | 5036 | 6827 | 1967 | 3424 | 2431 | 10983 | 9952 | 5142 | 2900 | 8262 | 12459 | 2776 |
| | 2253 | 12260 | 3016 | 5741 | 11451 | 1820 | 2515 | 3609 | 11133 | 2251 | 7893 | 12254 |
| | 5141 | 12377 | 5004 | 12351 | 5115 | 1696 | 5979 | 3793 | 3263 | 11081 | 6921 | 2030 |
| | 11957 | 4960 | 10571 | 7486 | 5011 | 8357 | 6335 | 10863 | 7264 | 10012 | 2344 | 7350 |
| | 5370 | 1724 | 5528 | 8203 | 2297 | 10903 | 8202 | 6704 | 3288 | 3690 | 8804 | 5418 |
| | 2130 | 1392 | 522 | 9793 | 1466 | 7038 | 12237 | 4120 | 8407 | 12161 | 3787 | 8131 |
| | 6605 | 5883 | 1830 | 8928 | 10864 | 6480 | 7542 | 11726 | 3185 | 6635 | 3525 | 5209 |
| | 5234 | 2592 | 5776 | 10562 | 11330 | 9613 | 11397 | 8358 | 9161 | 3218 | 9729 | 6444 |
| | 7598 | 7957 | 4667 | 4732 | 3764 | 11232 | 7992 | 7758 | 7742 | 7792 | 8316 | 8321 |
| | 8313 | 8318 | 8898 | 8314 | 8896 | 7036 | 7708 | 2838 | 2837 | 9204 | 9196 | 9165 |
| | 9169 | 9167 | 3629 | 7679 | 12494 | 7034 | 7730 | 7736 | 7901 | 2749 | 5013 | 9348 |
| | 10267 | 9407 | 4173 | 7059 | 7060 | 8764 | 5946 | 3386 | 3233 | 4464 | 7886 | 9574 |
| | 5105 | 5163 | 3187 | 3949 | 10398 | 3963 | 6241 | 6243 | 5232 | 5231 | 723 | 4071 |
| | 9692 | 10318 | 1592 | 1640 | 1593 | 6043 | 6028 | 2626 | 6027 | 8571 | 6486 | 6490 |
| | 8490 | 9869 | 6434 | 3326 | 7917 | 4490 | 10856 | 2497 | 8664 | 3138 | 6108 | 12215 |
| | 12152 | 5483 | 1775 | 5517 | 2378 | 8613 | 4639 | 6675 | 9175 | 3415 | 4345 | 7783 |
| | 4417 | 11725 | 2331 | 636 | 5449 | 2434 | 6189 | 4360 | 4452 | 3601 | 1706 | 2313 |
| | 5292 | 3390 | 5676 | 5698 | 6810 | 1021 | 1242 | 844 | 4121 | 6897 | 9485 | 11171 |
| | 5444 | 6735 | 1209 | 10132 | 10389 | 3113 | 10103 | 11622 | 11619 | 5681 | 5315 | 8607 |
| | 1700 | 11450 | 1379 | 6862 | 6993 | 9444 | 4352 | 6954 | 9727 | 10997 | 9454 | 9474 |
| | 9450 | 9445 | 2470 | 8722 | 7620 | 12274 | 9335 | 7283 | 920 | 6069 | 9134 | 7032 |
| | 8458 | 8960 | 7699 | 7097 | 4729 | 2280 | 4472 | 6660 | | | | |
| 260: | 4214 | 10052 | 2812 | 5162 | 6750 | 9903 | 2712 | 3501 | 7527 | 5168 | 5346 | 10564 |
| | 1609 | 10272 | 4848 | 8554 | 7685 | 7584 | 7875 | 4883 | 12569 | 2098 | 9005 | 8016 |
| | 1217 | 4832 | 4511 | 10354 | 4039 | 4267 | 11757 | 666 | 4526 | 4827 | 12579 | 2173 |
| | 8776 | 3900 | 2116 | 6377 | 3983 | 9759 | 955 | 5583 | 4721 | 3576 | 1498 | 8723 |
| | 6768 | 8718 | 3644 | 2075 | 5987 | 7882 | 5225 | 3196 | 7716 | 495 | 6935 | 9761 |
| | 3085 | 5953 | 9503 | 8755 | 5029 | 10373 | 10700 | 9192 | 7081 | 3865 | 7894 | |
| 261: | 485 | 7151 | 1320 | 1290 | 451 | 4232 | 7155 | 450 | 2079 | 447 | 12101 | 9224 |
| | 6447 | 8360 | 4519 | 6844 | 8050 | 1655 | 8361 | 5543 | 2398 | 10378 | 6673 | 9961 |
| | 998 | 3436 | 9533 | 8649 | 10960 | 11580 | 9946 | 3430 | 6890 | 6483 | 7347 | 3268 |
| | 5572 | 3753 | 7695 | 5744 | 8043 | 8832 | 7891 | 6441 | 3622 | 9579 | 3776 | 3752 |
| | 3773 | 6487 | 10375 | 8408 | 7209 | 1630 | 9190 | 3033 | 7177 | 1534 | 5860 | 2083 |
| | 8378 | 2654 | 5222 | 6744 | 2982 | 505 | 690 | 7195 | 6667 | 702 | 4348 | 5933 |
| | 4349 | 12102 | 12119 | 10347 | 8591 | 12096 | 4828 | 10352 | 10351 | 6392 | 771 | 770 |
| | 744 | 772 | 779 | 741 | 745 | 6274 | 719 | 4243 | 7117 | 5591 | 12243 | |
| 262: | 8290 | 9642 | 1843 | 11732 | 12475 | 1766 | 8069 | 520 | 6505 | 2170 | 9021 | 10836 |
| | 7854 | 11836 | 4028 | 3732 | | | | | | | | |
| 263: | 11809 | 8254 | 6051 | 11522 | 760 | 6489 | 10701 | | | | | |
| 264: | 8907 | 8133 | 10594 | 3921 | 5803 | 9945 | 10922 | 7645 | | | | |
| 265: | 4066 | 1661 | 3518 | 11779 | 11827 | 2479 | 11987 | 1102 | 9997 | 4456 | 4994 | 1897 |
| | 6649 | 6269 | 2684 | 3489 | 6608 | 10414 | 7293 | 502 | 967 | 6655 | 9887 | 2074 |
| | 4887 | 2305 | 7607 | 1852 | 1582 | 11458 | 4253 | 11609 | 11608 | 7459 | 6103 | 1624 |
| | 1305 | 10639 | 10069 | 4293 | 10871 | 3496 | 10261 | 7784 | 10568 | 6526 | 10840 | 3542 |
| | 7396 | 12120 | 5547 | 7108 | 1586 | 6694 | 4687 | 8748 | 2430 | 2105 | 541 | 1325 |
| | 2500 | 4205 | 9610 | 10752 | 2166 | 6371 | 10316 | 10321 | 4329 | 12333 | 5381 | 2921 |
| | 811 | 12135 | 10383 | 1428 | 3930 | 10207 | 6670 | | | | | |
| 266: | 2090 | 9566 | 9464 | 2088 | 2091 | 2106 | 10582 | 5288 | 7559 | 7950 | 2246 | 2729 |
| | 2621 | 12256 | 11470 | 6622 | 780 | 7206 | 11763 | 3939 | 2108 | 9703 | 9655 | 9674 |
| | 3145 | 9678 | | | | | | | | | | |
| 267: | 2306 | 2969 | 1292 | 5197 | 12526 | 12222 | 2996 | 3154 | 11518 | 9179 | 3130 | 11756 |
| | 11824 | 3924 | 9004 | 5150 | 1597 | 4858 | 5733 | 8995 | 10095 | 6969 | 5582 | 2383 |
| | 9888 | 6686 | 5932 | 3811 | 12143 | 5699 | 9088 | 9087 | 8207 | 1596 | 9901 | 6137 |
| | 1254 | 2780 | 4194 | 9091 | 8401 | 9488 | 1969 | 658 | 11948 | 4979 | 8425 | 9465 |
| | 789 | 7551 | 7265 | 10056 | 2516 | 11201 | 5622 | 7269 | 10981 | 10587 | 2719 | 6657 |
| | 10054 | 9953 | 8025 | 2252 | 4474 | 5694 | 9696 | 10809 | 10346 | 3591 | 12540 | 2472 |
| | 8500 | 7526 | 6542 | 8794 | 6428 | 3260 | 3853 | 834 | 11437 | 7553 | 2104 | 1174 |
| | 4070 | 10284 | 11846 | 6905 | 3318 | 3112 | 7937 | 11417 | 1512 | 7587 | 8381 | 8471 |
| | 6595 | 1879 | 5084 | 3895 | 4878 | 7737 | 7879 | 4626 | 4820 | 3745 | 8954 | 4765 |
| | 734 | 7376 | 2762 | 4983 | 4164 | 11186 | 7226 | 9505 | 6206 | 2370 | 7873 | 7227 |
| | 1335 | 2656 | 12316 | 9150 | 10736 | 5160 | 12224 | 3384 | 4212 | 1038 | 1090 | 7813 |
| | 2000 | 11019 | 8633 | 9202 | 12547 | 610 | 1151 | 477 | 11842 | 4459 | 10523 | 846 |
| | 6976 | 6177 | 3478 | 7601 | 7819 | 12396 | 3429 | 9472 | 1952 | 9073 | 6996 | 9361 |
| | 9298 | 8548 | 3686 | 3959 | 8332 | 8435 | 11759 | 6603 | 3632 | 9256 | 7646 | 4433 |
| | 10471 | 8992 | 2187 | 1321 | 8167 | 1369 | 12178 | 6756 | 431 | 11621 | 3129 | 9398 |
| | 7887 | 6330 | 1777 | 4570 | 7576 | 5170 | 3648 | 2127 | 1482 | 4993 | 4083 | 1890 |
| | 9636 | 10445 | 10415 | 2376 | 3523 | 6676 | 8678 | 6924 | 7263 | 9813 | 1641 | 8070 |
| | 4031 | 1716 | 9502 | 8473 | 3741 | 4330 | 11966 | 7877 | 10022 | 12534 | 9351 | 5643 |
| | 9443 | 9022 | 4325 | 11408 | 1742 | 9580 | 2032 | 2312 | 12130 | 6053 | 12465 | 5399 |
| | 9807 | 2943 | 5566 | 5880 | 4392 | 1847 | 2346 | 4013 | 4682 | 6974 | 5503 | 1470 |
| | 2501 | 1647 | 5895 | 11762 | 11022 | 7003 | 3169 | 11760 | 7954 | 3040 | 4710 | 3312 |
| | 3856 | 11269 | 10512 | 8997 | 10381 | 1594 | 11874 | 3858 | 5763 | 2945 | 2389 | 1287 |
| | 3666 | 12296 | 11449 | 6966 | 8724 | 3091 | 1104 | 1526 | 4106 | 2426 | 7312 | 5089 |
| | 4558 | 1362 | 784 | 7286 | 6804 | 2692 | 9155 | 638 | 4087 | 7165 | 4778 | 6496 |
| | 6596 | 11650 | 4378 | 2529 | 10338 | 3020 | 2704 | 2613 | 10136 | 2968 | 1289 | 2913 |
| | 12208 | 12213 | 2687 | 1763 | 1605 | 3255 | 5001 | 10446 | 3830 | 622 | 4919 | 7514 |
| | 6495 | 8862 | 3508 | 1757 | 6913 | 2770 | 456 | 682 | 12248 | 6264 | 10756 | 7128 |
| | 2597 | 11198 | 8880 | 1229 | 11102 | 2417 | 665 | 9103 | 6909 | 2972 | 4374 | 8782 |
| | 12517 | 10310 | 9656 | 8637 | 959 | 10314 | 2408 | 8583 | 12484 | 5284 | 8004 | 7865 |
| | 11095 | 5879 | 10104 | 8003 | 8292 | 6166 | 5477 | 12443 | 8881 | 7245 | 6369 | 4831 |
| | 5113 | 2644 | 1519 | 7906 | 7797 | 6820 | 3167 | 8998 | 1997 | 268 | 10780 | 11194 |
| | 2311 | 6443 | 12293 | 9910 | 9913 | 11253 | 2438 | 3383 | 11083 | 1199 | 5020 | 8646 |
| | 5389 | 5140 | 825 | 4294 | 9400 | 9402 | 9536 | 4982 | 4149 | 8342 | 524 | 10019 |
| | 6757 | 1894 | 7267 | 7062 | 6209 | 2655 | 10289 | 6225 | 423 | 6999 | 2829 | 4645 |
| | 408 | 9131 | 10854 | 7186 | 9600 | 3389 | 3166 | 4041 | 9764 | 8477 | 11226 | 2528 |
| | 12519 | 987 | 1542 | 11389 | 1514 | 6818 | 6026 | 4183 | 3426 | 9065 | 8073 | 7662 |
| | 521 | 1525 | 6163 | 8690 | 2566 | 11120 | 6634 | 12230 | 3498 | 10852 | 11230 | 8317 |
| | 9286 | 4782 | 2861 | 5592 | | | | | | | | |
| 268: | 2306 | 2969 | 631 | 4857 | 1313 | 7109 | 1316 | 1358 | 6436 | 6376 | 1292 | 5197 |
| | 12526 | 12222 | 2996 | 3154 | 7194 | 11518 | 9179 | 4127 | 11305 | 10569 | 10567 | 3130 |
| | 11756 | 11824 | 3924 | 9004 | 5636 | 5150 | 1597 | 4858 | 3748 | 898 | 7330 | 7336 |
| | 5733 | 1840 | 8995 | 10095 | 6969 | 10023 | 5215 | 5309 | 5582 | 10233 | 2383 | 9888 |
| | 6686 | 5932 | 9183 | 3811 | 12143 | 5699 | 9088 | 9087 | 8207 | 1596 | 6137 | 9901 |
| | 2799 | 8411 | 9354 | 6560 | 3176 | 10832 | 2488 | 9926 | 11193 | 11195 | 5123 | 1254 |
| | 2780 | 4194 | 12044 | 1537 | 4188 | 9091 | 1969 | 8401 | 9488 | 658 | 11948 | 4979 |
| | 8425 | 9465 | 4172 | 1215 | 5187 | 11001 | 6054 | 396 | 6093 | 5210 | 11954 | 789 |
| | 7551 | 7265 | 10056 | 2516 | 11201 | 1372 | 5622 | 7269 | 10981 | 1402 | 10587 | 10020 |
| | 6657 | 11034 | 11032 | 10054 | 9953 | 8025 | 2252 | 4474 | 5694 | 9696 | 5691 | 10809 |
| | 8977 | 10346 | 3591 | 9180 | 7391 | 7394 | 5492 | 12540 | 2472 | 2710 | 2686 | 2076 |
| | 2660 | 8500 | 8465 | 7571 | 11887 | 416 | 7526 | 6542 | 8794 | 8847 | 6428 | 3260 |
| | 3853 | 11018 | 10379 | 10323 | 834 | 11437 | 7553 | 4070 | 2104 | 1174 | 10284 | 11846 |
| | 388 | 1135 | 9188 | 4081 | 504 | 11872 | 1116 | 6905 | 3318 | 3112 | 11306 | 7937 |
| | 11417 | 7202 | 929 | 9811 | 7587 | 1512 | 8381 | 8471 | 6595 | 1879 | 5084 | 8348 |
| | 9653 | 4878 | 3895 | 7737 | 7879 | 4820 | 4626 | 3745 | 8954 | 4765 | 5018 | 734 |
| | 9023 | 11647 | 10134 | 7376 | 2762 | 4553 | 4983 | 4164 | 2233 | 11186 | 7226 | 9505 |
| | 1463 | 8789 | 7834 | 2370 | 6206 | 4286 | 11883 | 2350 | 1779 | 7873 | 7227 | 1335 |
| | 8565 | 2293 | 12316 | 2656 | 10736 | 9150 | 5160 | 4096 | 1749 | 1878 | 1023 | 10744 |
| | 12224 | 3384 | 4212 | 4181 | 1038 | 968 | 5850 | 4844 | 1090 | 7813 | 2000 | 11019 |
| | 8633 | 1077 | 11086 | 5295 | 3092 | 9202 | 12547 | 5178 | 1585 | 5771 | 2349 | 2911 |
| | 610 | 1151 | 477 | 2885 | 651 | 9730 | 4897 | 9257 | 1434 | 10783 | 3065 | 3735 |
| | 8911 | 3349 | 847 | 4678 | 4283 | 11842 | 2667 | 11788 | 10003 | 7487 | 5930 | 5684 |
| | 11740 | 7691 | 6817 | 5962 | 1052 | 10745 | 439 | 4459 | 10523 | 846 | 6976 | 6177 |
| | 3478 | 7601 | 7819 | 1952 | 12396 | 3429 | 9472 | 4315 | 10929 | 10731 | 1117 | 7823 |
| | 12261 | 8415 | 9073 | 6996 | 9361 | 8548 | 9298 | 3686 | 10143 | 8957 | 3959 | 8332 |
| | 8435 | 10657 | 2315 | 11759 | 6603 | 3632 | 9256 | 7646 | 4433 | 1683 | 10471 | 8992 |
| | 2187 | 1321 | 8167 | 9757 | 1369 | 12178 | 6756 | 431 | 6755 | 7219 | 11621 | 3129 |
| | 2327 | 9398 | 7887 | 6330 | 2730 | 1777 | 4570 | 11848 | 7576 | 5170 | 3715 | 5103 |
| | 5411 | 11655 | 2924 | 10812 | 3648 | 2127 | 1482 | 4922 | 8103 | 12323 | 9555 | 9526 |
| | 12027 | 4993 | 4083 | 1890 | 3046 | 4303 | 9846 | 12410 | 1069 | 9636 | 10445 | 10415 |
| | 2376 | 3523 | 7618 | 6676 | 11793 | 8678 | 6924 | 9049 | 10975 | 7263 | 9813 | 1641 |
| | 8070 | 4031 | 1716 | 3030 | 6543 | 10257 | 12281 | 9502 | 8473 | 5890 | 6492 | 3741 |
| | 4330 | 11966 | 7877 | 10022 | 12534 | 5643 | 9351 | 6220 | 9022 | 9443 | 8593 | 9086 |
| | 8252 | 3053 | 637 | 11399 | 3927 | 3956 | 6740 | 12074 | 3207 | 6653 | 4325 | 11408 |
| | 1742 | 2842 | 4629 | 8906 | 5476 | 6247 | 2037 | 7968 | 12118 | 9580 | 2032 | 12130 |
| | 2312 | 6053 | 12465 | 5399 | 9807 | 3325 | 9881 | 11280 | 8190 | 3467 | 8160 | 8985 |
| | 6516 | 7967 | 3272 | 2943 | 5566 | 1284 | 389 | 5614 | 9307 | 5191 | 10111 | 6835 |
| | 3477 | 1982 | 5273 | 12440 | 2901 | 5880 | 1847 | 4392 | 2346 | 4013 | 11723 | 1891 |
| | 4191 | 7522 | 4412 | 9130 | 4218 | 4682 | 5503 | 6974 | 1470 | 4766 | 8026 | 1555 |
| | 3869 | 2323 | 8023 | 630 | 7300 | 3951 | 8763 | 8948 | 2501 | 1647 | 5895 | 11762 |
| | 5216 | 7003 | 11022 | 3169 | 11760 | 7954 | 3040 | 10199 | 4710 | 11126 | 10147 | 8857 |
| | 5621 | 5668 | 11780 | 11939 | 5425 | 3312 | 3856 | 11269 | 8997 | 10512 | 1594 | 11874 |
| | 10381 | 3858 | 5763 | 2945 | 2389 | 1287 | 3666 | 11449 | 12296 | 2318 | 10463 | 1558 |
| | 448 | 3760 | 11055 | 1343 | 7993 | 2443 | 10324 | 3916 | 5526 | 9528 | 10453 | 2276 |
| | 7298 | 12136 | 11969 | 2482 | 6966 | 8724 | 3091 | 8734 | 8951 | 1104 | 1526 | 2426 |
| | 4106 | 5647 | 2321 | 7312 | 5089 | 1362 | 4558 | 784 | 10556 | 7286 | 2692 | 6804 |
| | 9155 | 10921 | 10659 | 638 | 659 | 4087 | 7165 | 4778 | 7233 | 6020 | 7284 | 10698 |
| | 6496 | 6596 | 11650 | 4378 | 2529 | 10338 | 3020 | 2704 | 2613 | 10136 | 1375 | 1948 |
| | 1712 | 2968 | 1289 | 2913 | 2224 | 11190 | 3021 | 12208 | 12213 | 2687 | 12495 | 1763 |
| | 1605 | 3255 | 830 | 8955 | 5001 | 10446 | 3830 | 622 | 4919 | 6716 | 9314 | 7514 |
| | 6495 | 8862 | 3508 | 8463 | 1757 | 6913 | 2770 | 456 | 459 | 4180 | 682 | 6264 |
| | 10756 | 12248 | 2597 | 11198 | 7128 | 8880 | 1229 | 11102 | 2417 | 665 | 3855 | 10502 |
| | 9103 | 6909 | 2972 | 4374 | 8782 | 12517 | 6215 | 10310 | 9656 | 8637 | 959 | 10314 |
| | 6073 | 550 | 6945 | 9390 | 11644 | 3958 | 9252 | 2408 | 8583 | 12484 | 5284 | 9146 |
| | 353 | 4888 | 8004 | 7865 | 6919 | 3790 | 3191 | 5474 | 11095 | 5879 | 8003 | 10104 |
| | 9560 | 7254 | 3313 | 6166 | 8292 | 5477 | 12443 | 8881 | 7245 | 4818 | 6523 | 601 |
| | 7467 | 5655 | 7904 | 2616 | 7385 | 11356 | 10441 | 4896 | 10757 | 5707 | 2099 | 10943 |
| | 3339 | 10559 | 10300 | 6401 | 2699 | 12163 | 6765 | 7800 | 6015 | 796 | 9475 | 5508 |
| | 1048 | 6449 | 4831 | 6369 | 5113 | 2644 | 1519 | 1551 | 1516 | 7906 | 3948 | 3970 |
| | 1241 | 8048 | 7797 | 6820 | 3167 | 8998 | 1997 | 10780 | 11194 | 2311 | 6443 | 7250 |
| | 5239 | 4290 | 8558 | 2604 | 1457 | 9596 | 9792 | 7405 | 4277 | 12381 | 5426 | 10573 |
| | 11978 | 7424 | 2328 | 2813 | 8478 | 10887 | 10427 | 2478 | 267 | 4782 | 8317 | 9286 |
| | 2861 | 5592 | 4717 | 1627 | 11355 | 4384 | 1626 | 12203 | 1628 | 1634 | 3012 | 5310 |
| | 10932 | 1938 | 1631 | 9170 | 11150 | 9904 | 12196 | 5943 | 7142 | 474 | 9062 | 10827 |
| | 2811 | 11127 | 11368 | 5339 | 9304 | 6956 | 10334 | 4001 | 6413 | 5342 | 7798 | 3896 |
| | 11894 | 7780 | 6114 | 3142 | 5535 | 11149 | 6833 | 3647 | 4112 | 12293 | 9910 | 9913 |
| | 11253 | 11312 | 2438 | 3383 | 11537 | 12138 | 2772 | 11083 | 1199 | 5020 | 10690 | 8646 |
| | 5389 | 5140 | 825 | 8086 | 4294 | 9402 | 9400 | 9536 | 4982 | 4149 | 8342 | 524 |
| | 10019 | 6757 | 1894 | 7267 | 7062 | 6209 | 2655 | 10289 | 6225 | 423 | 6999 | 2829 |
| | 4645 | 408 | 6995 | 8495 | 12394 | 9131 | 10854 | 7186 | 9600 | 3389 | 3166 | 5667 |
| | 7275 | 4542 | 6618 | 519 | 12086 | 1366 | 4041 | 9764 | 8477 | 7372 | 1002 | 9763 |
| | 11446 | 11226 | 2528 | 12519 | 987 | 1542 | 11389 | 1514 | 6818 | 6026 | 4183 | 9065 |
| | 3426 | 8073 | 7662 | 521 | 1525 | 6163 | 8690 | 2566 | 11120 | 6634 | 11361 | 9685 |
| | 12230 | 3498 | 10852 | 11230 | 8817 | 11471 | 3901 | | | | | |
| 269: | 10246 | 7020 | 10686 | 1680 | 2796 | 1248 | 4594 | 2505 | 2649 | 8814 | 4168 | 8374 |
| | 6389 | 751 | 11074 | 5159 | 11572 | 9199 | 8170 | 11830 | 3320 | 1694 | 6988 | 4377 |
| | 1158 | 2140 | 6808 | 1540 | 816 | 2611 | 2241 | 4706 | 12106 | 2495 | 7793 | 6342 |
| | 12477 | 3412 | 7006 | 12049 | 10544 | 4477 | 12125 | 7475 | 4354 | 2846 | 7156 | 6363 |
| | 2055 | 7558 | 5296 | 12398 | 1019 | 2781 | 7458 | 6926 | 7121 | 11829 | 3754 | 9602 |
| | 3038 | 2174 | 11439 | 11516 | 8441 | 3201 | 538 | 4055 | 8783 | 11982 | 11239 | 4860 |
| | 6050 | 7851 | 6664 | 4339 | 8596 | 1835 | 4062 | 8288 | 1678 | 5580 | 3810 | 8594 |
| | 7041 | 6577 | 1960 | | | | | | | | | |
| 270: | 4062 | 1835 | 12226 | | | | | | | | | |
| 271: | 8290 | 9642 | 1843 | 11732 | 12475 | 1766 | 8069 | 520 | 1037 | 6505 | 5910 | 11968 |
| | 2170 | 9735 | 9733 | 3296 | 9919 | 9736 | 6388 | 4211 | 10836 | 7854 | 6903 | 4895 |
| | 4891 | 2824 | 11297 | 6396 | 5660 | 3159 | 4028 | 3732 | | | | |
| 272: | 8063 | 5732 | 3188 | 12369 | 8106 | 5080 | 8559 | 5286 | 9212 | 6803 | 750 | 4584 |
| | 1070 | 6395 | 12048 | 6368 | 4780 | 6720 | 3285 | 7270 | 5175 | 10059 | 3031 | 9890 |
| | 4441 | 8785 | 8432 | 7543 | 8947 | 2382 | 9338 | 9916 | 2726 | 5706 | 4904 | 1112 |
| | 8534 | 12046 | 5615 | 4488 | 804 | 3480 | 1954 | 12218 | 6267 | 11927 | 6258 | 8125 |
| | 8126 | 5527 | 6214 | 11902 | 1822 | 1837 | 6240 | 7878 | 12091 | 8556 | 9969 | 9381 |
| | 11837 | 7476 | 8665 | 452 | 3702 | 12328 | 10209 | 2368 | 7672 | 6087 | 4676 | 4229 |
| | 7434 | 3076 | 10466 | 6404 | 841 | 4861 | 4575 | 2872 | 9917 | 8967 | 9749 | 12115 |
| | 10692 | 5473 | 7256 | 1873 | 2198 | 1336 | 3931 | 5798 | 5808 | 8673 | 3377 | 510 |
| | 3158 | 3925 | 8389 | 12141 | 9014 | 11932 | 3569 | 10651 | 2208 | 8990 | 3345 | 906 |
| | 12209 | 1050 | 7346 | 9893 | 1587 | 3161 | 10825 | 3649 | 1918 | 6767 | 501 | 4795 |
| | 10221 | 5149 | 6439 | 2784 | 10214 | 1584 | 3120 | 12202 | 5678 | 428 | 10578 | 7612 |
| | 4274 | 6191 | 4074 | 6190 | 7590 | 10144 | 3043 | 5323 | 3640 | 5250 | 1128 | 8414 |
| | 9490 | 9112 | 9758 | | | | | | | | | |
| 273: | 8564 | 10720 | 7580 | 12251 | 9922 | 5975 | 9534 | 9393 | 11158 | 3613 | 2357 | 8444 |
| | 2119 | 7602 | 3108 | 2579 | 8365 | 9547 | 11895 | 2245 | 12158 | 11802 | 1274 | 6626 |
| | 8769 | 278 | 2843 | 10230 | 6198 | 10814 | 2304 | 9207 | 9542 | 6236 | 10051 | 10027 |
| 274: | 8564 | 10720 | 7580 | 12251 | 9922 | 9576 | 4259 | 7808 | 6453 | 6362 | 10533 | 12131 |
| | 4838 | 10436 | 9019 | 7182 | 4738 | 7025 | 1326 | 7147 | 8769 | 6626 | 4708 | 11348 |
| | 8116 | 2843 | 10230 | 6198 | 10814 | 2304 | 9207 | 9975 | | | | |
| 275: | 8564 | 10720 | 7580 | 12251 | 9922 | 5975 | 8617 | 4257 | 645 | 295 | 9393 | 9534 |
| | 11158 | 3613 | 6982 | 2357 | 9576 | 4259 | 7808 | 8296 | 3210 | 4615 | 747 | 8228 |
| | 8444 | 6520 | 1408 | 1212 | 2119 | 12131 | 4397 | 10412 | 3357 | 10137 | 7547 | 3018 |
| | 7602 | 1687 | 7289 | 2579 | 11413 | 4889 | 3108 | 2245 | 2058 | 1274 | 1304 | 1326 |
| | 12252 | 9409 | 6626 | 8769 | 4708 | 11442 | 5397 | 12002 | 8139 | 5642 | 11431 | 8792 |
| | 387 | 7509 | 208 | 2269 | 11533 | 6769 | 2676 | 1510 | 921 | 3668 | 8728 | 2843 |
| | 10230 | 6198 | 10814 | 2304 | 9207 | | | | | | | |
| 276: | 8564 | 10720 | 7580 | 12251 | 9922 | 5975 | 6953 | 3210 | 8228 | 4615 | 1408 | 747 |
| | 8444 | 2119 | 6520 | 12131 | 1212 | 8085 | 4738 | 11349 | 8769 | 6626 | 4708 | 2149 |
| | 6060 | 1642 | 2843 | 10230 | 6198 | 10814 | 2304 | 9207 | | | | |
| 278: | 8564 | 10720 | 7580 | 12251 | 9922 | 5975 | 8365 | 9547 | 11895 | 12158 | 4163 | 4240 |
| | 4160 | 5925 | 3184 | 8350 | 7490 | 11199 | 6290 | 9672 | 12433 | 3775 | 6965 | 6236 |
| | 2843 | 10230 | 6198 | 10814 | 2304 | 9207 | | | | | | |
| 279: | 11873 | 12447 | 2706 | 9271 | 8545 | 8588 | 8589 | 1577 | 1575 | 1576 | 1556 | 1574 |
| | 1554 | 12551 | 2725 | 3886 | 4500 | 6611 | 2287 | 8846 | 8469 | 10838 | 672 | 10223 |
| | 7975 | 8434 | 3868 | 4882 | 10126 | 11563 | 3642 | 9352 | 11652 | 8174 | 11905 | 9191 |
| | 8406 | 4808 | 4695 | 731 | 743 | 11308 | 557 | 8768 | 8766 | 7331 | 8826 | 8798 |
| | 8805 | 8823 | 8802 | 8770 | 8810 | 7337 | 10227 | 12576 | 6424 | 8751 | 2625 | 2329 |
| | 11117 | 5782 | 5613 | 12126 | 3234 | 11981 | 7912 | 4328 | 8756 | 10460 | 11394 | 11912 |
| | 11140 | 11794 | 5736 | 7997 | 8001 | 8833 | 8858 | 8229 | 11559 | 4865 | 2620 | 4139 |
| | 10306 | 12509 | 7191 | 6463 | 3414 | 7888 | 9622 | 2636 | 10442 | 1509 | 8263 | 5935 |
| | 4620 | 8920 | 7281 | 978 | 12244 | 8303 | 4679 | 10588 | 12456 | 8675 | 1462 | 10865 |
| | 2027 | 9686 | 1337 | 7315 | 2477 | 4322 | 2786 | 12487 | 3434 | 8685 | 1110 | 10015 |
| | 12292 | 1614 | 10953 | 5654 | 1401 | 5132 | 4731 | 4059 | 10385 | 8101 | 1092 | 2544 |
| | 3727 | 8068 | 9657 | 11690 | 9843 | 902 | 11114 | 11508 | 9248 | 5844 | 4093 | 4193 |
| | 7973 | 7272 | 9752 | 3395 | 7480 | 12062 | 7735 | 7260 | 5272 | 5194 | 2631 | 1302 |
| | 11584 | 6056 | 11710 | 6971 | 11324 | 10325 | 2534 | 3684 | 9590 | 5816 | 1644 | 7616 |
| | 5600 | 5596 | 8889 | 8884 | 7853 | 7024 | 1648 | 8367 | 5246 | 4913 | 12176 | 704 |
| | 10123 | 9378 | 1836 | 11691 | 1654 | 9950 | 2628 | 11218 | 5390 | 4684 | 8860 | 5562 |
| | 4654 | 5424 | 4056 | 4054 | 4649 | 5575 | 5573 | 4685 | 4681 | 794 | 1741 | 10798 |
| | 10795 | 10815 | 3025 | | | | | | | | | |
| 280: | 8944 | 10309 | 11523 | 5409 | 9218 | 5496 | 3060 | 12127 | 10717 | 1563 | 11079 | 5075 |
| | 5446 | 7162 | 6394 | 475 | 2895 | 11855 | | | | | | |
| 281: | 8713 | 1390 | 12290 | 11594 | 6366 | 5219 | 9822 | 472 | 990 | 1864 | 5322 | 3734 |
| | 5671 | 8402 | 1798 | 5624 | 8175 | 8143 | 2112 | 2007 | 9228 | 8075 | 8074 | 9689 |
| | 1977 | 6691 | 4246 | 11342 | 9339 | 12570 | 3946 | 1709 | 3643 | 7404 | 4008 | 822 |
| | 2906 | 9396 | 6308 | 7762 | 8245 | 5247 | 8501 | 5398 | 9724 | 10792 | 9537 | 8154 |
| | 1704 | 3799 | 12444 | 7567 | 4631 | 10236 | 4053 | 10234 | 12524 | 11204 | 12520 | |
| 282: | 8713 | 1390 | 12290 | 11594 | 6366 | 5219 | 9822 | 472 | 990 | 1864 | 5322 | 3734 |
| | 5671 | 8402 | 1798 | 5624 | 8175 | 8143 | 2112 | 2007 | 9228 | 8075 | 8074 | 9689 |
| | 1977 | 6691 | 4246 | 11342 | 9339 | 12570 | 3946 | 1709 | 3643 | 7404 | 4008 | 822 |
| | 2906 | 9396 | 6308 | 7762 | 8245 | 5247 | 8501 | 5398 | 9724 | 10792 | 9537 | 8154 |
| | 1704 | 3799 | 12444 | 7567 | 4631 | 10236 | 4053 | 10234 | 12524 | 11204 | 12520 | |
| 283: | 5129 | 579 | 7910 | 6041 | 4924 | 9938 | 8648 | 1959 | 5116 | 11840 | 10410 | 6723 |
| | 2627 | 2374 | 8349 | 5198 | 4261 | 7308 | 12451 | 4744 | 8824 | 5423 | 9208 | 7703 |
| | 8379 | 7382 | 4873 | 7258 | 887 | 12265 | 9643 | 1685 | 7499 | 8488 | 3329 | 7902 |
| | 9795 | 3563 | 11706 | 486 | 9611 | 5352 | 8424 | 2190 | 6175 | 6882 | 6684 | 10772 |
| | 7323 | 5838 | 5796 | 12157 | 5042 | 12530 | 8929 | 2774 | 7524 | 3019 | 6134 | 9705 |
| | 11596 | 12028 | 5028 | 8919 | 6435 | 10672 | 5108 | 3737 | 6630 | 1204 | 10355 | 3914 |
| | 934 | 8102 | 11080 | 3227 | 5595 | 4999 | 11933 | 10068 | 493 | 10775 | 6715 | 4025 |
| | 748 | 3338 | 2537 | 4002 | 9897 | 12249 | 4601 | 2307 | 2406 | 12399 | 3839 | 11641 |
| | 7811 | 855 | 11881 | 4418 | 874 | 11400 | 3526 | 2517 | 5240 | 7534 | 9327 | 9479 |
| | 6916 | 4651 | 2448 | 4764 | 7115 | 7359 | 4745 | 2218 | 2445 | 5550 | 11288 | 4565 |
| | 10376 | 10600 | 10339 | 6052 | 5107 | 10317 | 2243 | 9128 | 4595 | 3864 | 2303 | 9770 |
| | 9539 | 9743 | 11803 | 7677 | 11096 | 8297 | 1154 | 3485 | 10991 | 876 | 4100 | 7296 |
| | 4016 | 2065 | 7236 | 12548 | 10273 | 12097 | 2595 | 7217 | 1666 | 8670 | 10349 | 1774 |
| | 2476 | 7363 | 4741 | 6796 | 6565 | 11292 | 1849 | 4373 | 3435 | 7230 | 3341 | 2541 |
| | 1821 | 8498 | 5396 | 3198 | 11538 | 3685 | 8651 | 10348 | 7686 | 3494 | 2601 | 3152 |
| | 2923 | 7678 | 10044 | 12272 | 8979 | 8978 | 9671 | 457 | 3653 | 1629 | 4117 | 4614 |
| 284: | 6668 | 3235 | 3818 | 3280 | 4758 | 4297 | 9603 | 12233 | 6255 | 277 | 11983 | 5049 |
| | 1677 | 10510 | 5376 | 4876 | 7709 | 2606 | 7855 | 5817 | 5502 | 2752 | 8873 | 7831 |
| | 12155 | 4505 | 3421 | 8647 | 2936 | 8837 | 1861 | 10226 | 3621 | | | |
| 285: | 1976 | 5617 | 4364 | 10244 | 11750 | 7026 | 10598 | 10444 | 12198 | 6957 | 11935 | 1931 |
| | 721 | 957 | 10530 | 5964 | 3926 | 2863 | 5386 | 3808 | 8614 | 2702 | 6345 | 10476 |
| | 5312 | 4110 | 6414 | 9914 | 11598 | 7824 | 5318 | 417 | 12305 | 7779 | 5448 | 12493 |
| | 4038 | | | | | | | | | | | |
| 286: | 1976 | 5617 | 4364 | 10244 | 11750 | 7026 | 10598 | 10444 | 12198 | 6957 | 11935 | 1931 |
| | 721 | 957 | 10530 | 5964 | 3926 | 2863 | 5386 | 3808 | 8614 | 2702 | 6345 | 10476 |
| | 5312 | 4110 | 6414 | 9914 | 11598 | 7824 | 5318 | 417 | 12305 | 7779 | 5448 | 12493 |
| | 4038 | | | | | | | | | | | |
| 287: | 4532 | 4537 | 4535 | 4321 | 5690 | 3863 | 4040 | 5167 | 9368 | 6992 | 1071 | 1871 |
| | 3307 | 1504 | 9777 | 11731 | 3677 | 930 | 7604 | 4057 | 11684 | 4610 | 4616 | 4007 |
| | 2093 | 1382 | 8118 | 1103 | 4486 | 5467 | 5393 | 4515 | 4521 | 4523 | 4494 | 4498 |
| | 4491 | 4501 | 4517 | 2428 | 10002 | 7721 | | | | | | |
| 288: | 4532 | 4537 | 4535 | 4321 | 5690 | 3863 | 4040 | 5167 | 9368 | 6992 | 1071 | 1871 |
| | 3307 | 1504 | 9777 | 11731 | 3677 | 930 | 7604 | 4057 | 11684 | 4610 | 4616 | 4007 |
| | 2093 | 1382 | 8118 | 1103 | 4486 | 5467 | 5393 | 4515 | 4521 | 4523 | 4494 | 4498 |
| | 4491 | 4501 | 4517 | 2428 | 10002 | 7721 | | | | | | |
| 289: | 5602 | 4469 | 5419 | 5432 | 4637 | 10619 | 12255 | 11347 | 1232 | 1294 | 10091 | 12571 |
| | 3340 | 7341 | 10614 | 3641 | 10384 | 2591 | 10195 | 6615 | 3382 | | | |
| 290: | 5602 | 4469 | 5419 | 5432 | 4637 | 10619 | 12255 | 11347 | 1232 | 1294 | 10091 | 12571 |
| | 3340 | 7341 | 10614 | 3641 | 10384 | 2591 | 10195 | 6615 | 3382 | | | |
| 291: | 956 | 4465 | 4807 | 7960 | 12053 | | | | | | | |
| 292: | 956 | 4465 | 4807 | 7960 | 12053 | | | | | | | |
| 293: | 9995 | 10229 | 5629 | 4497 | 5478 | 1295 | 6535 | 7277 | 5314 | 5311 | 2845 | 2893 |
| | 1590 | 3892 | 5403 | 9930 | 12093 | | | | | | | |
| 294: | 5961 | 4836 | 7630 | 4296 | 5666 | 7068 | 3635 | 8611 | 3090 | 1533 | 3559 | 10613 |
| | 6581 | 2421 | 6383 | 11801 | | | | | | | | |
| 295: | 8564 | 10036 | 10720 | 7580 | 12251 | 9922 | 5975 | 3210 | 4615 | 747 | 8228 | 10137 |
| | 4889 | 11413 | 1687 | 7547 | 3357 | 10412 | 4397 | 4738 | 1304 | 8769 | 6626 | 4708 |
| | 921 | 2843 | 10230 | 6198 | 10814 | 2304 | 9207 | | | | | |
| 296: | 10164 | 12268 | 7193 | 12156 | 12154 | 9486 | 8455 | 12552 | 5871 | 11173 | 2548 | 2542 |
| | 5633 | 3141 | 3766 | 590 | 1082 | 3992 | 8267 | 6299 | 778 | 2533 | 1059 | 4146 |
| | 7163 | 5256 | 11156 | 11648 | 11529 | 5921 | 8825 | 6682 | 6157 | 8241 | 1259 | 10579 |
| | 11293 | 3172 | 3890 | 3244 | 1660 | 5461 | 9077 | 10417 | 11782 | 9241 | 4647 | 6085 |
| | 5533 | 10786 | 11283 | 8864 | 7613 | 10145 | 3023 | 2254 | 11899 | 9693 | 4998 | 2249 |
| | 6410 | 5641 | 7093 | 4052 | 4549 | 1355 | 3042 | 7495 | 9483 | 1005 | 6235 | 11042 |
| | 9349 | 7772 | 11454 | 7077 | 2216 | 6433 | 7119 | 629 | 6578 | 12361 | 12367 | 12339 |
| | 12304 | 1095 | 5688 | 9382 | 10369 | 3991 | 7244 | 3978 | 8632 | 6688 | 297 | 4237 |
| | 8212 | 10490 | 8019 | 10723 | 6507 | 7628 | 10789 | 3579 | 7364 | 8000 | 1445 | 663 |
| | 12144 | 9990 | 11984 | 1945 | 8030 | 3293 | 8031 | 2228 | 3137 | 5015 | 11472 | |
| 297: | 10164 | 12268 | 7193 | 9486 | 8455 | 12552 | 5871 | 11173 | 2548 | 2542 | 5633 | 3141 |
| | 3766 | 590 | 1082 | 3992 | 8267 | 6299 | 778 | 2533 | 1059 | 4146 | 7163 | 5256 |
| | 11156 | 11648 | 11529 | 5921 | 8825 | 6157 | 8241 | 1259 | 10579 | 11293 | 3172 | 3890 |
| | 3244 | 1660 | 5461 | 9077 | 10417 | 11782 | 9241 | 4647 | 6085 | 5533 | 10786 | 11283 |
| | 8864 | 7613 | 10145 | 3023 | 2254 | 11899 | 9693 | 4998 | 2249 | 6410 | 296 | 5015 |
| | 11472 | 9171 | 5641 | 7093 | 4052 | 1355 | 4549 | 3042 | 7495 | 9483 | 6433 | 7119 |
| | 6578 | 12361 | 12367 | 12339 | 12304 | 1095 | 5688 | 9382 | 10369 | 3991 | 7244 | 3978 |
| | 8632 | 6688 | 8000 | 663 | 12144 | 9990 | 11984 | 1945 | 8030 | 8031 | 3293 | 2228 |
| | 3137 | | | | | | | | | | | |
| 298: | 6538 | 1032 | 1988 | 11733 | 10816 | 4334 | 10053 | 7132 | 8765 | | | |
| 299: | 9629 | 10933 | 11170 | 4429 | 11119 | 10276 | 2041 | 7360 | 11044 | 10557 | | |
| 300: | 8084 | 5326 | 12114 | 2801 | 859 | 5498 | 5501 | 5500 | 4097 | 2853 | 11026 | 1093 |
| | 6864 | 7572 | 1322 | 1998 | 9312 | 3195 | 3212 | 9141 | 6500 | 7593 | 2695 | 5994 |
| | 11381 | 2046 | 12450 | 1175 | 11496 | 10580 | 3308 | 10507 | 1359 | 766 | 482 | 7144 |
| | 3680 | 12207 | 5610 | 4785 | 5099 | 837 | 3691 | 11589 | 4538 | 9550 | 8239 | 10350 |
| | 4306 | 6253 | 8310 | 6929 | 7570 | 10029 | 6839 | 11665 | 12183 | 8699 | 10366 | 1752 |
| | 4109 | 9684 | 10416 | 12239 | 2071 | 10593 | 11167 | 4792 | 8276 | 4032 | 1858 | 10979 |
| | 11380 | 1446 | 7503 | 10114 | 1439 | 8461 | 3367 | 8284 | 8579 | 10447 | 5422 | 6013 |
| | 11212 | 11985 | 10505 | 10684 | 1958 | 5243 | 5224 | 3420 | 5244 | 2666 | 3503 | 10830 |
| | 7361 | 11291 | 3084 | 4658 | 1222 | 7043 | 833 | 2929 | 9358 | 7216 | 3236 | 4806 |
| | 1737 | 1662 | 2206 | 10693 | 4204 | 2008 | 12168 | 9731 | 3859 | 8398 | 6959 | 5618 |
| | 6121 | 10749 | 3974 | 1725 | 3083 | 9145 | 10401 | 3583 | 3584 | 3534 | 5237 | 11267 |
| | 5317 | 1076 | 5918 | 5308 | 8214 | 7478 | 11067 | 7070 | 703 | 1013 | 6708 | 857 |
| | 3213 | 6390 | 10358 | 1129 | 3328 | 11224 | 1067 | 2452 | 12064 | 7929 | 2677 | 12496 |
| | 2669 | 11302 | 5579 | 9844 | 11950 | 6986 | 5851 | 9106 | 12319 | 3231 | 10187 | 11369 |
| | 3962 | 2664 | 708 | 10537 | 8869 | 11611 | 10873 | 7664 | 9942 | 2756 | 11666 | 605 |
| | 2372 | 2185 | 4657 | 12151 | 917 | 8091 | 1353 | 2942 | 12000 | 401 | 10695 | 9397 |
| | 3623 | 4907 | 4103 | 2739 | 3833 | 8806 | 9107 | 5443 | 3374 | 578 | 2520 | 6380 |
| | 9491 | 10688 | 783 | 3548 | 403 | 5055 | 8515 | 11236 | 7936 | 2002 | 8293 | 5277 |
| | 1426 | 11734 | 9896 | 12360 | 3552 | 11263 | 4613 | 2881 | 873 | 969 | 7729 | 11390 |
| | 10130 | | | | | | | | | | | |
| 301: | 8084 | 5326 | 12114 | 2801 | 859 | 5498 | 5501 | 5500 | 4097 | 2853 | 11026 | 1093 |
| | 6864 | 7572 | 1322 | 1998 | 9312 | 3195 | 3212 | 9141 | 6500 | 7593 | 2695 | 5994 |
| | 11381 | 2046 | 12450 | 1175 | 11496 | 10580 | 3308 | 10507 | 1359 | 766 | 482 | 7144 |
| | 3680 | 12207 | 5610 | 4785 | 5099 | 837 | 3691 | 11589 | 4538 | 9550 | 8239 | 10350 |
| | 4306 | 6253 | 8310 | 6929 | 7570 | 10029 | 6839 | 11665 | 12183 | 8699 | 10366 | 1752 |
| | 4109 | 9684 | 10416 | 12239 | 2071 | 10593 | 11167 | 4792 | 8276 | 4032 | 1858 | 10979 |
| | 11380 | 1446 | 7503 | 10114 | 1439 | 8461 | 3367 | 8284 | 8579 | 10447 | 5422 | 6013 |
| | 11212 | 11985 | 10505 | 10684 | 1958 | 5243 | 5224 | 3420 | 5244 | 2666 | 3503 | 10830 |
| | 7361 | 11291 | 3084 | 4658 | 1222 | 7043 | 833 | 2929 | 9358 | 7216 | 3236 | 4806 |
| | 1737 | 1662 | 2206 | 10693 | 4204 | 2008 | 12168 | 9731 | 3859 | 8398 | 6959 | 5618 |
| | 6121 | 10749 | 3974 | 1725 | 3083 | 9145 | 10401 | 3583 | 3584 | 3534 | 5237 | 11267 |
| | 5317 | 1076 | 5918 | 5308 | 8214 | 7478 | 11067 | 7070 | 703 | 1013 | 6708 | 857 |
| | 3213 | 6390 | 10358 | 1129 | 3328 | 11224 | 1067 | 2452 | 12064 | 7929 | 2677 | 12496 |
| | 2669 | 11302 | 5579 | 9844 | 11950 | 6986 | 5851 | 9106 | 12319 | 3231 | 10187 | 11369 |
| | 3962 | 2664 | 708 | 10537 | 8869 | 11611 | 10873 | 7664 | 9942 | 2756 | 11666 | 605 |
| | 2372 | 2185 | 4657 | 12151 | 917 | 8091 | 1353 | 2942 | 12000 | 401 | 10695 | 9397 |
| | 3623 | 4907 | 4103 | 2739 | 3833 | 8806 | 9107 | 5443 | 3374 | 578 | 2520 | 6380 |
| | 9491 | 10688 | 783 | 3548 | 403 | 5055 | 8515 | 11236 | 7936 | 2002 | 8293 | 5277 |
| | 1426 | 11734 | 9896 | 12360 | 3552 | 11263 | 4613 | 2881 | 873 | 969 | 7729 | 11390 |
| | 10130 | | | | | | | | | | | |
| 302: | 7930 | 8544 | 10850 | 11315 | 1622 | 713 | 7552 | 12402 | 12054 | 2832 | 1378 | 7648 |
| | 5146 | 2634 | 9070 | 7958 | 4361 | 8568 | 5530 | 3222 | 7766 | 9447 | 7141 | 3358 |
| | 2648 | 3815 | 12564 | 7471 | 949 | 6651 | 11701 | 3772 | 8852 | 4184 | 7621 | 7652 |
| | 9840 | 9038 | | | | | | | | | | |
| 303: | 1087 | 3127 | 12531 | 11944 | 8119 | 5400 | 10714 | 2653 | 9713 | 6738 | 7171 | 7017 |
| | 3271 | 304 | 3126 | 11365 | 6566 | 6841 | 4270 | 4954 | 5831 | 3493 | 3736 | |
| 304: | 9927 | 8180 | 9829 | 3960 | 3127 | 2849 | 1133 | 11944 | 7171 | 4954 | 3126 | |
| 305: | 4622 | 10899 | 8164 | 3782 | 5729 | 798 | | | | | | |
| 306: | 5804 | 12016 | 7448 | 10738 | 10708 | 12014 | 10638 | 7423 | 7421 | 7417 | 309 | 10586 |
| | 7444 | 7446 | 5047 | 10645 | 10646 | 12280 | 207 | 2096 | 11839 | 7072 | 9709 | 1612 |
| | 8993 | 10037 | 6780 | 11613 | 9034 | 2004 | 8166 | 6931 | 7311 | 6922 | 8933 | 10494 |
| | 3783 | 308 | 12034 | 3781 | 9745 | 916 | 6666 | 9140 | 6285 | 9452 | 8035 | 12449 |
| | 10356 | 10064 | 4275 | 2067 | 3934 | 11430 | 12246 | 9405 | 2987 | 9052 | 12318 | 6252 |
| | 11326 | 8138 | 3397 | 9877 | 310 | 11058 | 8474 | 9105 | 11870 | 12047 | 3986 | 6725 |
| | 1902 | 4332 | 4672 | 9408 | 4088 | 3842 | 2342 | 1701 | 10402 | 12181 | 8446 | 4050 |
| | 6973 | 6860 | 7715 | 860 | 10725 | 4578 | 862 | 7045 | 11785 | 4789 | 5465 | 10224 |
| | 8088 | 10189 | 3553 | 9992 | 9964 | 3950 | 2793 | 6677 | 10001 | 3375 | 4200 | 10391 |
| | 10676 | 11712 | 10682 | 4747 | 206 | 307 | | | | | | |
| 307: | 12016 | 7448 | 9024 | 10738 | 10708 | 12014 | 7423 | 7421 | 7417 | 309 | 10586 | 7444 |
| | 7446 | 5047 | 10646 | 12280 | 207 | 2096 | 11839 | 9709 | 1612 | 8993 | 9034 | 2004 |
| | 8166 | 6931 | 7311 | 6922 | 3783 | 308 | 12034 | 3781 | 916 | 9745 | 9140 | 6285 |
| | 12449 | 9452 | 8035 | 10356 | 4443 | 10064 | 8138 | 2067 | 3934 | 4275 | 11430 | 9052 |
| | 12318 | 6252 | 12246 | 9405 | 2987 | 9728 | 11326 | 3397 | 9877 | 8474 | 310 | 11058 |
| | 9105 | 6860 | 7715 | 860 | 2342 | 1701 | 10402 | 8446 | 4050 | 6973 | 3986 | 11870 |
| | 12047 | 4332 | 6725 | 1902 | 9408 | 4088 | 3842 | 4672 | 10725 | 12181 | 1973 | 10224 |
| | 3950 | 4578 | 862 | 7045 | 11785 | 4789 | 5465 | 8088 | 9992 | 3553 | 10189 | 9964 |
| | 2793 | 6677 | 10001 | 3375 | 4200 | 10391 | 4747 | 206 | 306 | | | |
| 308: | 5804 | 12016 | 10678 | 10712 | 10735 | 7448 | 10738 | 10708 | 12014 | 10638 | 7423 | 7421 |
| | 7417 | 309 | 10586 | 10589 | 10603 | 10584 | 7444 | 10644 | 7446 | 5047 | 10645 | 10646 |
| | 12280 | 207 | 9710 | 2096 | 11839 | 9709 | 1612 | 8993 | 10037 | 8354 | 6780 | 11613 |
| | 9034 | 306 | 307 | 2004 | 11103 | 8166 | 6931 | 7311 | 6922 | 8933 | 3783 | 11857 |
| | 12034 | 3781 | 6666 | 9745 | 12449 | 10356 | 4275 | 12246 | 9405 | 2987 | 2067 | 3934 |
| | 8138 | 11430 | 9052 | 12318 | 6252 | 7223 | 9728 | 410 | 6792 | 9877 | 3397 | 310 |
| | 11058 | 9105 | 8474 | 8446 | 4050 | 6973 | 6860 | 7715 | 860 | 4332 | 6725 | 1902 |
| | 2342 | 1701 | 10402 | 12181 | 9408 | 4088 | 3842 | 10725 | 11870 | 12047 | 3986 | 4672 |
| | 6779 | 3950 | 862 | 7045 | 11785 | 4789 | 5465 | 10224 | 8088 | 3553 | 9992 | 10189 |
| | 9964 | 4578 | 2793 | 6677 | 10001 | 3375 | 4200 | 10391 | 11712 | 4747 | 206 | |
| 309: | 5804 | 12016 | 10678 | 10712 | 10735 | 7448 | 10738 | 10708 | 12014 | 10638 | 7423 | 7421 |
| | 7417 | 10586 | 10603 | 10589 | 10584 | 7444 | 10644 | 7446 | 5047 | 10645 | 10646 | 12280 |
| | 207 | 9710 | 2096 | 11839 | 1612 | 8993 | 10037 | 6780 | 11613 | 9034 | 306 | 307 |
| | 2004 | 8166 | 6931 | 7311 | 6922 | 8933 | 10494 | 3783 | 308 | 12034 | 3781 | 9745 |
| | 12449 | 10356 | 4275 | 2067 | 3934 | 9728 | 12246 | 9405 | 2987 | 8138 | 3564 | 2073 |
| | 4786 | 9877 | 310 | 11058 | 8474 | 9105 | 6779 | 9408 | 4088 | 3842 | 4672 | 6725 |
| | 1902 | 6860 | 7715 | 860 | 2342 | 8446 | 1701 | 4050 | 10402 | 6973 | 4332 | 11870 |
| | 12047 | 3986 | 10725 | 10224 | 862 | 7045 | 11785 | 4789 | 5465 | 8088 | 3553 | 10189 |
| | 9992 | 3950 | 4578 | 1468 | 10676 | 11712 | 10682 | 4747 | 206 | | | |
| 310: | 5804 | 2397 | 12016 | 7448 | 10738 | 10708 | 12014 | 10638 | 7423 | 7421 | 7417 | 309 |
| | 7444 | 7446 | 10645 | 12280 | 207 | 9710 | 3151 | 3170 | 2096 | 11839 | 9709 | 1612 |
| | 8993 | 10037 | 8354 | 6780 | 8499 | 11613 | 1088 | 9034 | 306 | 307 | 2004 | 8166 |
| | 888 | 7311 | 3783 | 308 | 12034 | 7362 | 6666 | 8344 | 7302 | 1234 | 10676 | 10741 |
| | 10660 | 10641 | 10683 | 11712 | 10743 | 10575 | 10581 | 10682 | 4747 | 206 | 8474 | 9105 |
| 311: | 10915 | 10878 | 1068 | 12529 | 8032 | 413 | 5270 | 2499 | 8936 | 5781 | 4938 | 5276 |
| | 1252 | 892 | 4567 | | | | | | | | | |
| 312: | 8987 | 9785 | 7079 | 7212 | 7143 | 1975 | 6697 | 2771 | 8204 | 12195 | 8537 | 585 |
| | 2367 | 8528 | 2778 | 10971 | 5848 | 3923 | 2481 | 10194 | 10765 | 6901 | | |
| 313: | 9794 | 11709 | 6934 | 6911 | 3465 | 11447 | 8784 | 2016 | 8641 | 5611 | 8517 | 8671 |
| | 3003 | 7544 | 6479 | 6231 | 563 | 8829 | 10089 | 2790 | 628 | 627 | 9649 | 1297 |
| | 11694 | 5577 | 8598 | 9675 | 10148 | 4363 | 3836 | 4733 | 1188 | 3242 | 5221 | 11035 |
| | 2914 | 8480 | 11016 | 4957 | 7466 | 6072 | 7775 | 10813 | 3443 | 7004 | 1031 | 12329 |
| | 2384 | 8400 | 3441 | 6113 | 1400 | 10790 | 3796 | 7441 | 1736 | 6771 | 5928 | 2870 |
| | 5451 | 8104 | 10128 | 10965 | 2791 | 9293 | 11843 | 11570 | 8042 | 1481 | 6529 | 11667 |
| | 866 | 7292 | 6602 | | | | | | | | | |
| 314: | 12162 | 11631 | 3039 | 3335 | 1817 | 6144 | 11507 | 11509 | 10668 | 9931 | 7389 | 11289 |
| | 3607 | 1332 | 7818 | 7488 | 11660 | 11565 | 11685 | 11567 | 11688 | 10617 | 5147 | 2492 |
| | 1968 | 10962 | 3770 | 7759 | 8253 | 7833 | 2978 | 10138 | 9767 | 3688 | 11601 | 11695 |
| | 4434 | 10033 | 407 | 4317 | 10372 | 540 | 8736 | 5135 | 6797 | 470 | 12257 | 7890 |
| | 2547 | 9902 | 8793 | 1833 | 11410 | 5625 | 3866 | 10200 | 2909 | 10621 | 5905 | 11153 |
| | 769 | 6607 | 7608 | 11014 | 10403 | 1714 | 1985 | 8277 | 11535 | 11659 | 11637 | 12345 |
| | 12301 | 11505 | 11530 | 11656 | 11525 | 11606 | 12307 | 11634 | 12340 | | | |
| 315: | 712 | 11134 | 11581 | 8135 | 891 | 5866 | 7918 | 1721 | 10277 | 4963 | 7671 | 9567 |
| | 512 | 10630 | 6458 | 3683 | 4951 | 8419 | 4724 | 5955 | 3114 | 1441 | 4439 | 8965 |
| | 11628 | 9774 | 5184 | 10737 | 9308 | 6612 | 10159 | 5721 | 6759 | 12507 | 2586 | 7299 |
| | 10335 | 9387 | 5504 | 6758 | 9577 | 5043 | 9868 | 6733 | 9951 | 5843 | 11373 | 4090 |
| | 3481 | 2186 | 10450 | 10709 | 11672 | 6568 | 11882 | 5745 | 9469 | 9268 | 11804 | 10475 |
| | 11196 | 6964 | 2129 | 10514 | 7931 | 8436 | 1370 | 7659 | 6865 | 1238 | 3006 | 635 |
| | 7240 | 5350 | 6661 | 12111 | 9988 | 1853 | 1109 | 2594 | 12193 | 12188 | 1329 | 10264 |
| | 11716 | 4872 | 347 | 4739 | 7259 | 3909 | 3596 | 6541 | 2688 | 2146 | 5708 | 10807 |
| | 10781 | 10784 | 10777 | 9045 | 8986 | 8786 | 9839 | 11901 | 1929 | 1933 | 1935 | 10650 |
| | 10654 | 7773 | 7801 | 7804 | 1143 | 2054 | 6917 | 1476 | 10477 | 4712 | 1561 | 10094 |
| | 1078 | 1684 | 10485 | 2080 | 10545 | 2225 | 11028 | 8886 | 9355 | 2815 | 2957 | 3147 |
| | 7080 | 5087 | 2577 | 11228 | 10228 | 4716 | 4719 | 8219 | 1623 | 5563 | 11698 | 4688 |
| | 6802 | 7656 | 7655 | 11357 | 11544 | 11574 | 12191 | 9823 | 707 | 4304 | 11582 | 11993 |
| | 11988 | 11991 | 12562 | 11182 | 11164 | 11162 | 10876 | 11184 | 2858 | 1541 | 9124 | 7770 |
| | 11817 | 2155 | 12468 | 8830 | 10980 | 5410 | 8443 | 6061 | 2736 | 11463 | 8780 | 9125 |
| | 11997 | 935 | 8250 | 9251 | 4203 | 9291 | 6598 | 4948 | 6065 | 2047 | 10171 | 7719 |
| | 6540 | 3804 | 2670 | 3982 | 11540 | 11059 | 3392 | 10297 | 6763 | 9898 | 2286 | 6482 |
| | 1045 | 7087 | 8619 | 7714 | 3117 | 7324 | 7301 | 7454 | 9151 | 10810 | 2165 | 1994 |
| | 11179 | 11370 | 8371 | 7116 | 7222 | 9215 | | | | | | |
| 316: | 10181 | 5990 | 406 | 6910 | 5922 | 9771 | 8885 | 1859 | 574 | 2867 | 532 | 1868 |
| | 6925 | 10421 | 3134 | 12068 | 5705 | 2337 | 12241 | 9985 | 3554 | 11752 | 5564 | 2432 |
| | 2463 | 1750 | 7099 | 9628 | 6813 | 6873 | 1600 | 1443 | 7309 | 12216 | 6438 | 10892 |
| 317: | 2001 | 9411 | 1075 | 7903 | 8973 | 6228 | 11216 | 3706 | 9101 | 10886 | 2855 | 12572 |
| | 10961 | 7464 | 2904 | 10516 | 4510 | 8333 | 8057 | 11958 | 4305 | 6046 | 1672 | 5230 |
| | 11536 | 3762 | 2038 | 11435 | 2899 | 6559 | 5359 | 494 | 6709 | 9645 | 9316 | 8626 |
| | 4344 | 943 | 5569 | 2274 | 12370 | 3372 | 2986 | 9817 | 2723 | 8355 | 5821 | 6502 |
| | 9481 | 6030 | 1829 | 7862 | 8577 | 2818 | 10521 | 2507 | 1904 | 11531 | 2831 | 9309 |
| | 8347 | 3705 | 6837 | 1942 | 529 | 3692 | 884 | 6075 | 11053 | 5261 | 1823 | 5521 |
| | 5620 | 9741 | 5458 | 4209 | 10496 | 3133 | 10883 | 10748 | 11524 | 8416 | 6456 | 9739 |
| | 10729 | 3716 | 1869 | 3943 | 10259 | 989 | 1566 | 9414 | 5570 | 3969 | 2061 | 12023 |
| | 4834 | 7329 | 1599 | 12133 | 1298 | 997 | 3452 | 3409 | 7876 | 500 | 6317 | 10340 |
| | 9615 | 5619 | 2025 | 11396 | 5304 | 1410 | 5125 | 11354 | 7934 | 11109 | 10205 | 11465 |
| | 10315 | 7718 | 3708 | 12353 | 7369 | 4198 | 11754 | 9213 | 720 | 2565 | 4404 | 8816 |
| | 2763 | 9750 | 3487 | 2107 | 2416 | 5876 | 1811 | 10553 | 2898 | 1699 | 11813 | 9078 |
| | 839 | 6693 | 3694 | 2275 | 8945 | 6825 | 429 | 10377 | 3278 | 10269 | 9851 | 4308 |
| | 3366 | 5469 | 4158 | 11942 | 10539 | 11281 | 4989 | 10437 | 11448 | 11023 | 4266 | 1399 |
| | 5475 | 1474 | 3089 | 8937 | 752 | 8129 | 9624 | 603 | 6938 | 4302 | 6071 | 5887 |
| | 8953 | 9754 | 11068 | 6539 | 11602 | 11856 | 11773 | | | | | |
| 318: | 1808 | 1810 | 1809 | 1815 | 8197 | 7925 | 3733 | 9562 | 9559 | 8735 | 9493 | 11825 |
| | 7039 | 2571 | 4406 | 1717 | 4426 | 11479 | 5470 | 5490 | 5468 | 12179 | 12073 | 9263 |
| | 1882 | 6962 | 8737 | 5554 | 454 | 6331 | 9197 | 7474 | | | | |
| 319: | 1608 | 435 | 1810 | 1809 | 1808 | 8197 | 9562 | 9559 | 8735 | 9493 | 4045 | 7039 |
| | 2571 | 4406 | 1717 | 4426 | 11479 | 5470 | 5490 | 5468 | 6962 | 8737 | 5554 | 10895 |
| | 10799 | 10893 | 10845 | 10872 | 10869 | 10868 | 1277 | 1036 | 7857 | | | |
| 320: | 11284 | 3835 | 1257 | 7050 | 4894 | 995 | 10631 | 1387 | 3315 | 5206 | 2848 | 2458 |
| | 5893 | | | | | | | | | | | |
| 321: | 1992 | 7276 | 11661 | 3904 | 3713 | 8363 | 12462 | 7790 | 8181 | 11322 | 1115 | 2876 |
| | 4777 | 11426 | 5331 | 3812 | 11811 | 10448 | 730 | 1688 | 10292 | 8788 | 10266 | 7189 |
| | 7105 | 5338 | 7555 | 6641 | 12172 | 10702 | 3961 | 2554 | 10739 | 3771 | 10525 | 11295 |
| | 10175 | 3346 | 9422 | 3617 | 1340 | 3652 | 8834 | 1785 | 10107 | 6885 | 9797 | 2092 |
| | 7460 | 8036 | 1518 | 4343 | 9541 | 10966 | 8739 | 7343 | 7970 | 1357 | 7692 | |
| 322: | 7998 | 11945 | 3324 | 2518 | 2605 | 12395 | 12415 | 6120 | 4228 | 1728 | 6481 | 9287 |
| | 8237 | 7203 | 4544 | 11071 | 6485 | 7597 | 3710 | 4975 | 7397 | 5640 | 5151 | 10017 |
| | 11392 | 8033 | 6793 | 5938 | 12275 | 2260 | 11004 | 9055 | 4389 | 391 | 2053 | 9786 |
| | 5557 | 7782 | 1275 | | | | | | | | | |
| 323: | 2163 | 12492 | 12513 | 2433 | 12362 | 5815 | 6948 | 1690 | 4436 | 11925 | 10565 | 3671 |
| | 12009 | 5590 | 2338 | | | | | | | | | |
| 324: | 2163 | 12492 | 12513 | 2433 | 12362 | 5815 | 6948 | 1690 | 4436 | 11925 | 10565 | 3671 |
| | 12009 | 5590 | 2338 | | | | | | | | | |
| 325: | 5223 | 7733 | 3595 | 6743 | 8171 | 1884 | 4936 | 7342 | 544 | 11333 | 4021 | 10203 |
| | 1099 | 788 | 10465 | 1185 | 6579 | 12206 | 11278 | 12277 | 7727 | 3862 | 11362 | 6398 |
| | 11319 | 5259 | 1270 | 11110 | 3045 | 511 | 3792 | 5551 | | | | |
| 326: | 4483 | 7102 | 12574 | 11511 | 5281 | | | | | | | |
| 327: | 5332 | 5927 | 4548 | 5709 | 11543 | 8482 | 3822 | 5041 | 9863 | 838 | 4020 | 11868 |
| | 5102 | 9911 | 4642 | 10599 | 1012 | 6488 | 4691 | 9525 | 1062 | 7489 | 6816 | 2714 |
| | 8445 | | | | | | | | | | | |
| 328: | 11721 | 5605 | 2086 | 4366 | 1269 | 3758 | 7461 | 3682 | 4125 | 10030 | 11534 | 7537 |
| | 8615 | 11301 | 4300 | 9716 | 7707 | 7358 | 12567 | 10049 | 7574 | 2467 | 8459 | 7101 |
| | 2732 | 4569 | 7261 | 7972 | 12098 | 982 | 5952 | 3290 | 953 | 12385 | 11696 | 9296 |
| | 5713 | 11495 | 9981 | 6322 | 6795 | 8719 | 8387 | 6978 | 9584 | 7285 | 810 | 8024 |
| | 596 | 10008 | 7197 | 4265 | 3603 | 4391 | 9425 | 12253 | 390 | 9350 | 6547 | 3679 |
| | 7413 | 11860 | 8874 | 476 | 4966 | 11483 | 10611 | 5073 | 8720 | 6724 | 8818 | 4326 |
| | 8743 | | | | | | | | | | | |
| 329: | 2805 | 11466 | 10817 | 12063 | 4835 | 12061 | 4262 | 10839 | 12227 | 4562 | 4636 | 4607 |
| | 4586 | 4609 | 3893 | 791 | 12164 | 1352 | 7322 | 5134 | 2955 | 2878 | 5825 | 10270 |
| | 10747 | 6822 | 6782 | 10822 | 7599 | 8525 | 8453 | 2918 | 1122 | 11630 | 4524 | 9768 |
| | 6459 | 5336 | 11488 | 10000 | 1807 | 9627 | 2250 | 5726 | 2230 | 3561 | 10425 | 1547 |
| | 3423 | 6893 | 7821 | 7482 | 4962 | 1100 | 1663 | 10881 | 6320 | 8875 | 1487 | 3299 |
| | 6493 | 7820 | 973 | 4224 | 6789 | 7146 | 11806 | 10590 | 8431 | 11300 | 1913 | 9775 |
| | 7743 | 2113 | 3428 | 5019 | 11401 | 5529 | 1903 | 7592 | 3655 | 8165 | 11845 | 5638 |
| | 6858 | 11376 | 7403 | 824 | 7304 | 8472 | 3295 | 8136 | 7078 | 2556 | 2691 | 4804 |
| | 4179 | 11583 | 11575 | 9102 | 11213 | 3074 | 11867 | 3761 | 9059 | 4156 | 6311 | 10457 |
| | 12201 | 3400 | 662 | 7056 | 8999 | 9787 | 1318 | 7425 | 1235 | 9162 | 462 | 11826 |
| | 2887 | 1846 | 8604 | 871 | 9612 | 9641 | 8005 | 6947 | 8418 | 6650 | 8835 | 2217 |
| | 1607 | 587 | 4853 | 4851 | 2261 | 11405 | 5131 | 3440 | 3463 | 8753 | 7505 | 1693 |
| | 2532 | 7018 | 7816 | 2862 | 2859 | 5792 | 2825 | 11560 | 2464 | 7947 | 11222 | 8549 |
| | 250 | 249 | 1118 | 1532 | 12578 | 6821 | 1665 | 5514 | 5491 | 5464 | 5495 | 5457 |
| | 5437 | 5435 | 4797 | 3327 | 2871 | 1883 | 1886 | 8888 | 3837 | 11290 | 3378 | 9236 |
| | 3257 | 8982 | 7124 | 9026 | 11772 | 12359 | 12060 | 9068 | 9120 | 5737 | 9856 | 6932 |
| | 5948 | 7673 | 4368 | 9281 | 2134 | 3824 | 10371 | 2540 | 4223 | 2694 | 10633 | 2639 |
| | 11261 | 9978 | 5068 | 7848 | 774 | 7835 | 5894 | 6079 | 11670 | 8244 | 10750 | 10141 |
| | 2381 | 9058 | 6257 | 6588 | 3394 | 6012 | 1778 | 11268 | 11462 | 8660 | 2158 | 12387 |
| | 10746 | 9187 | 4432 | 7406 | 10647 | 1146 | 7316 | 6100 | 1698 | 4358 | 879 | 1727 |
| | 12205 | 7170 | 12545 | 6117 | 10722 | 12516 | 7294 | 12005 | 11165 | 1857 | 12042 | 6879 |
| | 3473 | 4353 | 2798 | 10096 | 2424 | 7595 | 9288 | 3396 | 4644 | 7051 | 6749 | 4932 |
| | 1417 | 11847 | 8676 | 2675 | 3149 | 4493 | 8041 | 2231 | 10890 | 2301 | 3232 | 9139 |
| | 3530 | 7139 | 7836 | 3718 | 12250 | 881 | 2373 | 3614 | 4126 | 9707 | 5779 | 9630 |
| | 2905 | 11956 | 10260 | 8176 | 8370 | 1834 | 1301 | 5330 | 2572 | 10162 | 3878 | 8872 |
| | 7166 | 12030 | 9648 | 2689 | 10149 | 10973 | 9109 | 4471 | 11920 | 685 | 6584 | 2239 |
| | 10680 | 5472 | 5665 | 3253 | 2889 | 12470 | 8726 | 4199 | 6034 | 6623 | 4362 | 12405 |
| | 6411 | 10429 | 12497 | 9570 | 1214 | 1030 | 617 | 829 | 10859 | 11229 | 1603 | 3932 |
| | 1255 | 12084 | 10987 | 900 | 11188 | 2018 | 616 | 10866 | 6138 | 5522 | 1003 | 7084 |
| | 10459 | 1656 | 9217 | 4190 | 10206 | 4395 | 11017 | 2310 | 3027 | 3199 | 8196 | 12409 |
| | 1333 | 1930 | 7140 | 8939 | 3081 | 5939 | 1360 | 6958 | 10063 | 5908 | 2324 | 5587 |
| | 735 | 1173 | 7035 | 8162 | 10945 | 7665 | 8546 | 4249 | 8439 | 4095 | 10156 | 10177 |
| | 10176 | 931 | 2302 | 2377 | 8634 | 420 | 11000 | 2894 | 3098 | 4069 | 5285 | 1311 |
| | 9272 | 6242 | 7611 | 3944 | 3947 | 5722 | 5719 | 5695 | 5720 | 5753 | 5727 | 5731 |
| | 12515 | 9999 | 6710 | 9394 | 9395 | 4022 | 4024 | 10165 | 3990 | 10801 | 3995 | 10163 |
| | 1553 | 3993 | 11441 | 10846 | 11136 | 7843 | 10491 | 4725 | 11489 | 4723 | 10823 | 5021 |
| | 10914 | 3017 | 7338 | 10498 | 7898 | 10615 | 3506 | 626 | 4799 | 10409 | 11339 | 1805 |
| | 7639 | 10281 | 10034 | 8405 | 11038 | 3492 | 8645 | 12001 | 5800 | 7175 | 4668 | 11480 |
| | 9467 | 3156 | 11075 | 2995 | 7905 | 1423 | 5037 | 7870 | 7748 | 2283 | 9865 | 11865 |
| | 5561 | 8231 | 8097 | 6110 | 8686 | 7829 | 8871 | 5715 | 1804 | 5644 | 4423 | 2259 |
| | 11914 | 11250 | 8485 | 9933 | 716 | 6323 | 6799 | 3509 | 12565 | 7764 | 5263 | 9011 |
| | 6246 | 4504 | 2358 | 8877 | 2182 | 11148 | 10158 | 5262 | 5258 | 4660 | 3899 | 6021 |
| | 10821 | 10978 | 1801 | 8831 | 1936 | 6826 | 9977 | 3546 | 5982 | 3472 | 8460 | 3460 |
| | 12528 | 5242 | 9347 | 8527 | 8657 | 8552 | 7744 | 6286 | 2066 | 9201 | 506 | 6016 |
| | 5456 | 399 | 481 | 11107 | 9066 | 4390 | 6748 | 11573 | 5819 | 5182 | 9176 | 11244 |
| | 8029 | 3399 | 7013 | 10161 | 10468 | 11469 | 5983 | 9301 | 5544 | 7268 | 5412 | 8121 |
| | 3720 | 9353 | 2299 | 6358 | 3224 | 11486 | 2423 | 1330 | 12174 | 3550 | 4953 | 2783 |
| | 11429 | 8828 | 8602 | 1300 | 9104 | 7287 | 8658 | 1986 | 5677 | 8336 | 12262 | 3449 |
| | 4980 | 9514 | 7606 | 2388 | 11771 | 10820 | 1780 | 11551 | 2392 | 10995 | 9489 | 2737 |
| | 8454 | 10493 | 975 | 1824 | 7713 | 12036 | 7172 | 8395 | 6062 | 4409 | 8222 | 5608 |
| | 5031 | 12363 | 11455 | 2661 | 2189 | 5632 | 6561 | 3215 | 11858 | 2652 | 9866 | 8620 |
| | 11816 | 2701 | 10674 | 568 | 11663 | 11649 | 9706 | 12317 | 12525 | 2916 | 8590 | 7129 |
| | 9310 | 11073 | 7694 | 1472 | 5767 | 7178 | 8963 | 4159 | 3109 | 8186 | 2200 | 8688 |
| | 5114 | 9659 | 6461 | 6519 | 5873 | 668 | 11777 | 10392 | 4625 | 10853 | 6210 | 3001 |
| | 4310 | 1966 | 1885 | 7538 | 5702 | 8513 | 9937 | 10901 | 11642 | 2005 | 4671 | 9435 |
| | 3667 | 4480 | 5740 | 6785 | 4971 | 10956 | 8452 | 11464 | 10848 | 11438 | 10851 | 10769 |
| | 10766 | 10764 | 10763 | 3757 | 4574 | 11739 | 6869 | 8373 | 8666 | 10481 | 9606 | 12245 |
| | 3756 | 3197 | 10861 | 6465 | 3593 | 6775 | 5984 | 599 | 7355 | 6537 | 7494 | 10728 |
| | 12397 | 9341 | 2226 | 6185 | 10343 | 1288 | 4414 | 6983 | 8412 | 11161 | 11579 | 7999 |
| | 8479 | 4489 | 1371 | 4138 | 5186 | 5969 | 6473 | 8915 | 8236 | 2240 | 2531 | 11898 |
| | 4870 | 5512 | 1564 | 12165 | 5524 | 8233 | 5143 | 5631 | 5607 | 4034 | 2935 | 2934 |
| | 12500 | 5110 | 8078 | 5324 | 762 | 823 | 10079 | 11491 | 8938 | 11159 | 11132 | 6131 |
| | 11124 | 11129 | 11122 | 11440 | 6280 | 2750 | 8169 | 7635 | 7631 | 5372 | 5348 | 9233 |
| | 9231 | 9221 | 9240 | 9235 | 9220 | 2122 | 3029 | 7040 | 12560 | 7016 | 8158 | 8759 |
| | 8762 | 8163 | 7037 | 7822 | 8767 | 7066 | 7061 | 11467 | 942 | 6314 | 7384 | |
| 330: | 12032 | 12416 | 9702 | 8311 | 9871 | 9085 | 3041 | 8757 | 2659 | 10930 | 4428 | 11833 |
| | 11792 | 681 | 10543 | 7911 | 9410 | 8467 | 8008 | 9867 | 1772 | 8996 | 7033 | 11906 |
| | 10828 | 7889 | 12234 | 1084 | 3276 | 8149 | 11266 | 8572 | 1344 | 7106 | 7107 | 4195 |
| | 4547 | 11422 | 9561 | 4650 | 4648 | 2144 | 2142 | 2148 | 4680 | 4656 | 4653 | 633 |
| | 5402 | 409 | 6305 | 10014 | 6859 | 12364 | 7575 | 5289 | 3907 | 7452 | 3669 | 11548 |
| | 2333 | 4742 | 6830 | 2981 | | | | | | | | |
| 331: | 10160 | 10640 | 8343 | 4802 | 1528 | 8856 | 515 | 677 | 952 | 7450 | 6251 | 4755 |
| | 8449 | 10473 | 7390 | 6576 | 11718 | 2615 | 7103 | 10211 | 10977 | 4800 | 4314 | 7867 |
| | 9639 | 7932 | 11248 | 3355 | 7617 | 2525 | 10518 | 5743 | 1589 | 8208 | 9668 | 5774 |
| | 5974 | 5814 | 2961 | 9399 | 11092 | 5321 | 5264 | 1080 | 6145 | 7689 | 3942 | 7442 |
| | 2483 | 11748 | 12331 | 12214 | 5980 | 5480 | 7320 | 5440 | 10776 | 4781 | 9666 | 3971 |
| | 7979 | 3468 | 8146 | 4220 | 4413 | 3920 | 5416 | 8390 | 1957 | 5313 | 2735 | 11318 |
| | 4437 | 9259 | 8429 | 11015 | 7585 | 7435 | 4475 | 12123 | 4830 | 7053 | 7352 | 3938 |
| | 7110 | 6593 | 10656 | 966 | 3928 | 10099 | 12555 | 8109 | 11578 | 870 | 5664 | 6989 |
| | 1416 | 12103 | 11181 | 5195 | 3488 | 8294 | 9944 | 970 | 7199 | 2188 | 8851 | 11185 |
| | 6333 | 10583 | 8715 | 828 | 11105 | 2300 | 1272 | 4605 | 6204 | 7241 | 4961 | 932 |
| | 1479 | 3941 | 6155 | 6654 | 2411 | 10311 | 3132 | 10779 | 6695 | 9113 | 4382 | 4370 |
| | 3238 | 9765 | 5394 | 7378 | 8693 | 4023 | 3953 | 8976 | 2263 | 7064 | 10047 | 461 |
| | 9468 | 1101 | 4079 | 4728 | 5158 | 8968 | 12479 | 5828 | 4916 | 9417 | 3032 | 2685 |
| | 9018 | 10135 | 7048 | 897 | 10841 | 6006 | 3968 | 7120 | 6124 | 3102 | 7921 | 2064 |
| | 9239 | 11783 | 2698 | 7415 | 5823 | 5635 | 11864 | 4640 | 593 | 4046 | 5343 | 6406 |
| | 2792 | 8092 | 11513 | 1919 | 11764 | 10026 | 8691 | 2679 | 7600 | 10399 | 2289 | 5567 |
| | 9801 | 2125 | 6284 | 9433 | 2993 | 427 | 11366 | 3581 | 3097 | 4014 | 12532 | 10913 |
| | 8020 | 4751 | 4316 | 6734 | 1442 | 674 | 6025 | 5541 | 2179 | 7168 | 12170 | 805 |
| | 3080 | 12469 | 11468 | 11287 | 5842 | 3282 | 9440 | 4309 | 12511 | 12508 | 2063 | 10517 |
| | 6891 | 9594 | 11087 | 4606 | 8366 | 12400 | 7712 | 4288 | 6764 | | | |
| 332: | 10160 | 10640 | 8343 | 4802 | 1528 | 8856 | 515 | 677 | 952 | 7450 | 6251 | 4755 |
| | 8449 | 10473 | 7390 | 6576 | 11718 | 2615 | 7103 | 10211 | 10977 | 4800 | 4314 | 7867 |
| | 9639 | 7932 | 11248 | 3355 | 7617 | 2525 | 10518 | 5743 | 1589 | 8208 | 9668 | 5774 |
| | 5974 | 5814 | 2961 | 9399 | 11092 | 5321 | 5264 | 1080 | 6145 | 7689 | 3942 | 7442 |
| | 2483 | 11748 | 12331 | 12214 | 5980 | 5480 | 7320 | 5440 | 10776 | 4781 | 9666 | 3971 |
| | 7979 | 3468 | 8146 | 4220 | 4413 | 3920 | 5416 | 8390 | 1957 | 5313 | 2735 | 11318 |
| | 4437 | 9259 | 8429 | 11015 | 7585 | 7435 | 4475 | 12123 | 4830 | 7053 | 7352 | 3938 |
| | 7110 | 6593 | 10656 | 966 | 3928 | 10099 | 12555 | 8109 | 11578 | 870 | 5664 | 6989 |
| | 1416 | 12103 | 11181 | 5195 | 3488 | 8294 | 9944 | 970 | 7199 | 2188 | 8851 | 11185 |
| | 6333 | 10583 | 8715 | 828 | 11105 | 2300 | 1272 | 4605 | 6204 | 7241 | 4961 | 932 |
| | 1479 | 3941 | 6155 | 6654 | 2411 | 10311 | 3132 | 10779 | 6695 | 9113 | 4382 | 4370 |
| | 3238 | 9765 | 5394 | 7378 | 8693 | 4023 | 3953 | 8976 | 2263 | 7064 | 10047 | 461 |
| | 9468 | 1101 | 4079 | 4728 | 5158 | 8968 | 12479 | 5828 | 4916 | 9417 | 3032 | 2685 |
| | 9018 | 10135 | 7048 | 897 | 10841 | 6006 | 3968 | 7120 | 6124 | 3102 | 7921 | 2064 |
| | 9239 | 11783 | 2698 | 7415 | 5823 | 5635 | 11864 | 4640 | 593 | 4046 | 5343 | 6406 |
| | 2792 | 8092 | 11513 | 1919 | 11764 | 10026 | 8691 | 2679 | 7600 | 10399 | 2289 | 5567 |
| | 9801 | 2125 | 6284 | 9433 | 2993 | 427 | 11366 | 3581 | 3097 | 4014 | 12532 | 10913 |
| | 8020 | 4751 | 4316 | 6734 | 1442 | 674 | 6025 | 5541 | 2179 | 7168 | 12170 | 805 |
| | 3080 | 12469 | 11468 | 11287 | 5842 | 3282 | 9440 | 4309 | 12511 | 12508 | 2063 | 10517 |
| | 6891 | 9594 | 11087 | 4606 | 8366 | 12400 | 7712 | 4288 | 6764 | | | |
| 333: | 1001 | 4906 | 8800 | 3344 | 2015 | 2020 | 4318 | 7710 | 10721 | 2563 | 3717 | 1228 |
| | 4603 | 9718 | 1317 | 2819 | 8797 | 6896 | 9688 | 6275 | 6022 | 6023 | 6010 | 1908 |
| | 12491 | 3275 | 4299 | 8601 | 4383 | 7942 | 5268 | 10515 | 3747 | 558 | 7924 | 8917 |
| | 7861 | 7946 | 3744 | 1396 | 12348 | 7923 | 10606 | 2285 | 5758 | 7667 | 5463 | 5546 |
| | 7922 | 5549 | 12374 | 2282 | 4005 | 11378 | 11112 | 7984 | 8811 | 12299 | 4713 | 3333 |
| | 5889 | 7864 | 7940 | 1761 | 11398 | 3821 | 2238 | 4004 | 12159 | 9680 | 8705 | 9007 |
| | 3972 | 10492 | 1765 | 8840 | 7860 | 1405 | 6159 | 11243 | 3817 | 1502 | 4711 | 9800 |
| | 3945 | 8082 | 664 | 4003 | 6437 | 7684 | 4102 | 3973 | | | | |
| 334: | 1523 | 2933 | 4956 | 6234 | 6928 | 5998 | 10172 | 7536 | 3631 | 3520 | 11142 | 5900 |
| | 1996 | 8969 | 9226 | 7768 | 10920 | 10831 | 3174 | 10390 | 6829 | 6832 | 8422 | 3388 |
| | 1617 | 5714 | 4375 | 10999 | 8464 | 2255 | 5214 | 4427 | 1955 | 4279 | 11633 | 594 |
| | 3168 | 10884 | 6049 | 6631 | 6194 | 6223 | 5917 | 1368 | 1418 | 1351 | 5670 | 5697 |
| | 1491 | 7354 | 7180 | 7371 | 6553 | 6011 | 928 | 10117 | 12297 | 3664 | 5929 | 4043 |
| | 10992 | 1144 | 3217 | 7021 | 5189 | 4788 | 7603 | 5872 | 1107 | 10072 | 6527 | 5109 |
| | 4881 | 9852 | 4108 | 7739 | 6628 | 8123 | 1613 | 4323 | 7377 | 1697 | 9620 | 11880 |
| | 7781 | 3078 | 12259 | 3551 | 12426 | 10058 | 8744 | 1061 | 5971 | 584 | 4219 | 12527 |
| | 954 | 11627 | 2114 | 1581 | 4135 | 3267 | 8356 | 9499 | 5531 | 7817 | 653 | 5065 |
| | 6344 | 8377 | 12512 | 10041 | 10082 | 9401 | 6854 | 3502 | 5742 | 5954 | 4072 | 6097 |
| | 3479 | 7398 | 11510 | 2184 | 11738 | 9872 | 6915 | 6429 | 1743 | 9416 | 9586 | 5241 |
| | 9345 | 2234 | 6173 | 3646 | 4997 | 10420 | 10452 | 10367 | 5827 | 8145 | 11490 | 8669 |
| | 4217 | 10730 | 2926 | 9796 | 6632 | 5532 | 4988 | 10910 | 8890 | 9229 | 10771 | 12439 |
| | 6960 | 5406 | 1309 | 7523 | 7626 | 4222 | 6737 | 8760 | 1394 | 2420 | 1149 | 7297 |
| | 8017 | 7952 | 5653 | 1150 | 738 | 4811 | 6665 | 8704 | 6846 | 5297 | 11123 | 11135 |
| | 11027 | 11963 | 4709 | 11761 | 3739 | 2835 | 10287 | 6587 | 9001 | 1595 | 1283 | 9529 |
| | 8087 | 10291 | 8801 | 8105 | 7255 | 2212 | 8972 | 5764 | 10625 | 3266 | 1263 | 4582 |
| | 1874 | 10424 | 10061 | 6256 | 2767 | 6798 | 11099 | 7366 | 6400 | 2490 | 890 | 1425 |
| | 9601 | 2202 | 4027 | 2609 | 8582 | 2990 | 3014 | 11219 | 545 | 1065 | 2693 | 3848 |
| | 11452 | 768 | 7539 | 6889 | 5039 | 3505 | 11776 | 4037 | 10554 | 2960 | 5723 | 8927 |
| | 2765 | 6091 | 11885 | 2884 | 8635 | 1971 | 800 | 7345 | 6787 | 9790 | 8855 | 2143 |
| | 10288 | 4846 | 12471 | 3707 | 4833 | 11065 | 8698 | 10819 | 2897 | 1946 | 1486 | 3365 |
| | 4763 | 2908 | 8774 | 3723 | 9111 | 8259 | 8421 | 8420 | 1073 | 1243 | 1671 | 2441 |
| | 5303 | 941 | 11089 | 1314 | 10431 | 4320 | 598 | 6379 | 7019 | 10113 | 10060 | 4886 |
| | 8623 | 840 | 8916 | 8438 | | | | | | | | |
| 335: | 2809 | 1347 | 3070 | 5519 | 6353 | 4683 | 10278 | 7995 | 11147 | 4915 | 4817 | 7113 |
| | 11420 | 1517 | 6416 | 864 | 2738 | 9453 | 8524 | 6360 | 1213 | 5208 | 9694 | 8994 |
| | 10342 | 4151 | 9222 | 923 | 12313 | 3570 | 12419 | 12544 | 5536 | 8592 | 12258 | 1951 |
| | 2817 | 1282 | 3183 | 945 | 10906 | 11904 | 5014 | 9906 | 9939 | 9963 | 1814 | 12017 |
| | 11152 | 11151 | 10075 | 10440 | 8950 | 4508 | 1999 | 4019 | 10028 | 5341 | 5555 | 6544 |
| | 4470 | 5111 | 2582 | 5095 | 8529 | 9270 | 10532 | 2603 | 6266 | 5183 | 10616 | 12434 |
| | 8392 | 9934 | 8028 | 11427 | 6678 | 10220 | 9984 | 10875 | 11154 | 2840 | 1899 | 1022 |
| | 10969 | 3615 | 6536 | 4357 | 11961 | 3073 | 9159 | 4192 | 8746 | 6211 | 7321 | 6531 |
| | 7520 | 7943 | 11246 | 661 | 8912 | 7676 | 3024 | 8161 | 6508 | 3996 | 5054 | 10071 |
| | 12039 | 2298 | 9149 | 9126 | 9123 | 9751 | 9200 | 7546 | 2175 | 9419 | 9670 | 3977 |
| | 8562 | 7711 | 4388 | 11106 | 10681 | 1738 | 3580 | 7344 | 5299 | 8466 | 1572 | 1735 |
| | 543 | 562 | 9152 | 9147 | 2211 | 2353 | 11077 | 8007 | 12109 | 11282 | 8761 | 1917 |
| | 10666 | 2558 | 2560 | 9258 | 6729 | 10691 | 10570 | 8130 | 10658 | 11009 | 1060 | 2523 |
| | 12128 | 11669 | 1851 | 3077 | 10021 | 8747 | 3062 | 7751 | 8521 | 8185 | 10968 | 7149 |
| | 4920 | 5826 | 9879 | 6009 | 4918 | 6638 | 6614 | 4899 | 6609 | 9959 | 9996 | 6005 |
| | 9882 | 6007 | 9936 | 9970 | 9880 | 9915 | 9993 | 4923 | 5794 | 9941 | 6610 | 9912 |
| | 9935 | 9962 | 9991 | 6637 | 9908 | 9957 | 9998 | 4974 | 5931 | 5857 | 5830 | 5852 |
| | 5865 | 5903 | 5833 | 5862 | 5007 | 11889 | 5093 | 5096 | 5098 | 4978 | 4892 | 6002 |
| | 5934 | 5788 | 5751 | 5785 | 5958 | 5985 | 5981 | 5822 | 6640 | 6671 | 6643 | 6645 |
| | 5227 | 12542 | 2875 | 1909 | 2273 | 10016 | 12407 | 9117 | 9178 | 9210 | 9182 | 9211 |
| | 1910 | 9186 | 9184 | 9148 | 12431 | 8650 | 2612 | 6985 | 991 | 8849 | 3562 | 3545 |
| | 10129 | 11329 | 3522 | 3568 | 3590 | 422 | 3516 | 8470 | 3541 | 3587 | 3515 | 3566 |
| | 1261 | 11303 | 11387 | | | | | | | | | |
| 336: | 1608 | 435 | 1809 | 1808 | 1819 | 1810 | 1815 | 9824 | 7252 | 398 | 2455 | 9562 |
| | 9559 | 9493 | 5003 | 10119 | 12283 | 9948 | 9836 | 733 | 7039 | 4426 | 11479 | 5470 |
| | 5490 | 5468 | 8773 | 3533 | 7619 | 7474 | 9197 | 6331 | 8737 | 6962 | 6914 | 5554 |
| | 10872 | 10869 | 10868 | 10799 | 10895 | 10845 | 10893 | 3095 | 11702 | 12076 | | |
| 337: | 6292 | 6296 | 2925 | 9234 | 4245 | 4030 | 8504 | 3729 | 1278 | 1276 | 2356 | 11921 |
| | 6564 | 9267 | 7681 | 6571 | 6315 | 4473 | 7249 | 6569 | 1545 | 1549 | 8359 | 8695 |
| | 6567 | 8697 | 1550 | 6294 | 5078 | 11515 | 1009 | 9626 | 6313 | 8442 | | |
| 338: | 9269 | 4225 | 5257 | 2039 | 4327 | 4244 | 3256 | 9569 | 11115 | 2874 | 10078 | 11414 |
| | 2797 | 1571 | 3740 | 5525 | 4757 | 2614 | 4167 | 2496 | 7866 | 1249 | 5672 | 2395 |
| | 4801 | 11979 | 7313 | 3495 | 4528 | 7535 | 5017 | 5728 | 2539 | 3381 | 9306 | 1978 |
| | 4272 | 8853 | 5847 | 7159 | 9691 | 3906 | 6563 | 1506 | | | | |
| 339: | 9269 | 4225 | 5257 | 2039 | 4327 | 4244 | 3256 | 9569 | 11115 | 2874 | 10078 | 11414 |
| | 2797 | 1571 | 3740 | 5525 | 4757 | 2614 | 4167 | 2496 | 7866 | 1249 | 5672 | 2395 |
| | 4801 | 11979 | 7313 | 3495 | 4528 | 7535 | 5017 | 5728 | 2539 | 3381 | 9306 | 1978 |
| | 4272 | 8853 | 5847 | 7159 | 9691 | 3906 | 6563 | 1506 | | | | |
| 340: | 9784 | 5190 | 4849 | 6165 | 8502 | 4479 | 10406 | 10268 | 5977 | | | |
| 341: | 9784 | 5190 | 4849 | 6165 | 8502 | 4479 | 10406 | 10268 | 5977 | | | |
| 342: | 647 | 2051 | 8014 | 3393 | 10620 | 7556 | 1770 | 6506 | 9947 | 5875 | 5960 | 5682 |
| | 2115 | 7965 | 1026 | 4342 | 9448 | 12338 | 2530 | 2052 | 2057 | 9802 | 4635 | 6263 |
| | 6250 | 6265 | 648 | 7349 | 7090 | 4593 | 1421 | 11800 | 7799 | 10710 | 6823 | 12510 |
| | 6930 | 3206 | 10032 | | | | | | | | | |
| 343: | 6115 | 8689 | 3274 | 2618 | 8107 | 4944 | 6200 | 8541 | 802 | 2608 | 8397 | 6422 |
| | 7563 | 3305 | 10923 | 2865 | 2164 | 4187 | 4295 | 4903 | 10152 | 6888 | 2980 | 11640 |
| | 4652 | 592 | 4424 | 7353 | 9920 | 9891 | 11011 | 11040 | 1231 | 8681 | 10778 | 1227 |
| | 8900 | 4843 | 9156 | 2011 | 1415 | 8510 | 869 | 3034 | 3801 | 11645 | 10469 | 10547 |
| | 455 | 693 | 2502 | 3309 | 12029 | 12320 | 1471 | 7941 | 1465 | 11436 | 4387 | 1876 |
| | 7757 | 4591 | 2992 | 12535 | 5012 | 1066 | 5511 | 7220 | 6287 | 9982 | 639 | 5884 |
| 344: | 6115 | 8689 | 3274 | 2618 | 8107 | 4944 | 6200 | 8541 | 802 | 2608 | 8397 | 6422 |
| | 7563 | 3305 | 10923 | 2865 | 2164 | 4187 | 4295 | 4903 | 10152 | 6888 | 2980 | 11640 |
| | 4652 | 592 | 4424 | 7353 | 9920 | 9891 | 11011 | 11040 | 1231 | 8681 | 10778 | 1227 |
| | 8900 | 4843 | 9156 | 2011 | 1415 | 8510 | 869 | 3034 | 3801 | 11645 | 10469 | 10547 |
| | 455 | 693 | 2502 | 3309 | 12029 | 12320 | 1471 | 7941 | 1465 | 11436 | 4387 | 1876 |
| | 7757 | 4591 | 2992 | 12535 | 5012 | 1066 | 5511 | 7220 | 6287 | 9982 | 639 | 5884 |
| 345: | 6421 | 3565 | 10219 | 3371 | 7840 | 1723 | 6161 | 8243 | 1865 | 1827 | 11869 | 623 |
| | 11423 | | | | | | | | | | | |
| 346: | 4514 | 1219 | 10858 | 6672 | 3259 | 7266 | 4215 | 8062 | 4171 | 9227 | 9633 | 8002 |
| | 12033 | 8080 | 11367 | 8440 | 6700 | 1911 | 6590 | 9230 | 12194 | 6068 | 7562 | 11521 |
| | 11587 | 4044 | 9133 | 6736 | 1178 | 4773 | 9782 | 5388 | 3122 | 8821 | 6226 | 3789 |
| | 3527 | 8952 | 6047 | 7411 | 5290 | 6426 | 6216 | 10419 | 4816 | 7615 | 2761 | 9079 |
| | 11600 | 4502 | 9850 | 8065 | 6902 | 1436 | 5686 | 10898 | 8152 | 8155 | 4230 | 5104 |
| | 1659 | 7568 | 8560 | 5585 | 5128 | 6679 | 9332 | 9329 | 2095 | 6346 | 6659 | 5701 |
| | 4884 | 9654 | 8034 | 10115 | 8557 | 9587 | 3182 | 7231 | 9717 | 11375 | 6070 | 2404 |
| | 1767 | 7075 | 7455 | 2457 | 5255 | 7959 | 6350 | 5750 | 1414 | 903 | 2341 | 7578 |
| | 10703 | 927 | 2248 | 12132 | 863 | 9883 | 618 | 3678 | 12480 | 8396 | 7847 | 9558 |
| | 11682 | 2469 | 7373 | 10386 | | | | | | | | |
| 347: | 712 | 11134 | 11581 | 8135 | 891 | 5866 | 7918 | 1721 | 10277 | 4963 | 7671 | 9567 |
| | 512 | 10630 | 6458 | 3683 | 8419 | 4724 | 5955 | 3114 | 1441 | 4439 | 11628 | 5184 |
| | 10737 | 9308 | 6612 | 10159 | 5721 | 6759 | 12507 | 7299 | 10335 | 5504 | 6758 | 9577 |
| | 5043 | 4852 | 9868 | 1887 | 6733 | 9951 | 5843 | 11373 | 4090 | 3481 | 10450 | 10709 |
| | 11672 | 6568 | 11882 | 3797 | 5745 | 9469 | 9268 | 11804 | 10475 | 11196 | 6964 | 2129 |
| | 10514 | 1370 | 7659 | 6865 | 3006 | 7240 | 6661 | 9988 | 1853 | 1109 | 2594 | 12193 |
| | 12188 | 1329 | 10264 | 9045 | 8986 | 1929 | 1933 | 1935 | 10650 | 10654 | 7773 | 7801 |
| | 7804 | 10477 | 8219 | 11698 | 7655 | 11574 | 11544 | 11582 | 12562 | 11164 | 10876 | 11182 |
| | 11162 | 11184 | 2858 | 7770 | 11817 | 2155 | 8830 | 5410 | 2736 | 6061 | 6540 | 2047 |
| | 6065 | 10171 | 3804 | 3392 | 10297 | 3117 | 315 | 8052 | 9815 | 7301 | 7324 | 7454 |
| | 9151 | 2165 | 1994 | 11179 | 11370 | 7116 | 7222 | 9215 | | | | |
| 348: | 2559 | 10307 | 12499 | 8094 | 9328 | 612 | 11307 | 6139 | 3619 | 3556 | 2873 | 5711 |
| | 1391 | 1177 | 10048 | 10133 | | | | | | | | |
| 349: | 2559 | 10307 | 12499 | 8094 | 9328 | 612 | 11307 | 6139 | 3619 | 3556 | 2873 | 5711 |
| | 1391 | 1177 | 10048 | 10133 | | | | | | | | |
| 350: | 6170 | 10387 | 820 | 4182 | 9177 | 11720 | 535 | 1444 | 1262 | 10488 | 10083 | 6092 |
| | 11526 | 11371 | 6812 | 8205 | 9677 | 11325 | 10718 | 2183 | 531 | 3846 | 7492 | 6927 |
| | 3466 | 4554 | 2717 | 6059 | 7927 | 9446 | 9471 | 9470 | 9476 | 9478 | 9497 | 9473 |
| | 4854 | 7761 | 2526 | 10504 | 7846 | 1389 | 4350 | 1888 | 4581 | 4583 | 4560 | 4564 |
| | 1751 | 8487 | 8489 | 11499 | 9701 | 5856 | 8745 | 2880 | 1803 | 1156 | 3107 | 8710 |
| | 3704 | 3010 | 2932 | 6861 | 2743 | 4442 | 4774 | 3639 | 1620 | | | |
| 351: | 6170 | 10387 | 820 | 4182 | 9177 | 11720 | 535 | 1444 | 1262 | 10488 | 10083 | 6092 |
| | 11526 | 11371 | 6812 | 8205 | 9677 | 11325 | 10718 | 2183 | 531 | 3846 | 7492 | 6927 |
| | 3466 | 4554 | 2717 | 7927 | 9446 | 9471 | 9470 | 9476 | 9497 | 9478 | 9473 | 4854 |
| | 7761 | 2526 | 7846 | 10504 | 1389 | 4350 | 1888 | 4560 | 4583 | 4581 | 4564 | 1751 |
| | 8489 | 8491 | 8487 | 11499 | 9701 | 5497 | 1579 | 5856 | 8745 | 6856 | 6470 | 11959 |
| | 10131 | 827 | 11101 | 1374 | 5291 | 940 | 6870 | 10411 | 4058 | 11708 | 1247 | 2414 |
| | 4133 | 2045 | 6039 | 6478 | 9442 | 3602 | 2111 | 438 | 1381 | 10648 | 6711 | 3008 |
| | 11169 | 8555 | 7810 | 1872 | 10183 | 6946 | 2555 | 12266 | 6834 | 5375 | 7465 | 11021 |
| | 2915 | 644 | 9326 | 3230 | 9185 | 11781 | 6084 | 7725 | 8511 | 12308 | 7518 | 6096 |
| | 8053 | 10529 | 4914 | 11994 | 2145 | 11924 | 1386 | 1880 | 7453 | 1927 | 8819 | 1341 |
| | 2473 | 11742 | 8710 | 3107 | 3704 | 10948 | 9928 | 3010 | 2932 | 6861 | 2743 | 4442 |
| | 4774 | 3639 | 3165 | | | | | | | | | |
| 352: | 2857 | 10800 | 6701 | 7881 | 9041 | 3658 | 3547 | 9249 | 12438 | 6098 | 7560 | 8334 |
| | 2860 | 10885 | 3337 | 6907 | 11049 | 8959 | 5754 | 5088 | 12031 | 10458 | 6468 | 3887 |
| | 3163 | 9860 | 9548 | 487 | 8326 | 1271 | 5539 | 9371 | 9340 | 11769 | 1153 | 11238 |
| | 11180 | 10497 | 10116 | 1083 | 7915 | 11006 | 5436 | 5438 | 5434 | 1342 | 3075 | 9664 |
| | 9905 | 8539 | 2635 | 2390 | 1771 | 7095 | 11918 | 3829 | 6122 | 9096 | 11562 | 7609 |
| | 773 | 12429 | 11502 | 1670 | 1652 | 9013 | 9009 | 9012 | 5992 | 1460 | 3254 | 5360 |
| | 3832 | 8714 | 4271 | 11931 | 11928 | 10964 | 8362 | 12312 | 7680 | 8286 | 9295 | 4400 |
| | 11687 | 9265 | 8142 | 8140 | | | | | | | | |
| 353: | 1313 | 5197 | 12526 | 7194 | 4127 | 10569 | 10567 | 3130 | 11756 | 3924 | 11824 | 5150 |
| | 1597 | 7330 | 7336 | 5733 | 1840 | 8995 | 10023 | 5309 | 9183 | 3811 | 2799 | 3176 |
| | 1007 | 2780 | 10768 | 11917 | 12044 | 4188 | 1537 | 9091 | 4172 | 1215 | 11954 | 5210 |
| | 11001 | 6054 | 396 | 6093 | 789 | 7265 | 10056 | 5622 | 7269 | 2665 | 1409 | 1402 |
| | 5885 | 10020 | 10587 | 2719 | 6657 | 10054 | 6174 | 9953 | 8025 | 2252 | 4474 | 1348 |
| | 5691 | 2034 | 9180 | 3591 | 10519 | 5492 | 4422 | 2710 | 2076 | 8465 | 12482 | 7571 |
| | 11887 | 6428 | 3260 | 11018 | 10323 | 834 | 11437 | 5486 | 604 | 7553 | 388 | 11872 |
| | 9188 | 4081 | 6905 | 11306 | 7202 | 8348 | 5018 | 9023 | 9484 | 9512 | 4553 | 11385 |
| | 2233 | 1463 | 8789 | 7834 | 11916 | 4286 | 2350 | 11883 | 8565 | 1749 | 1023 | 10744 |
| | 4181 | 6476 | 5850 | 1090 | 11086 | 5178 | 2911 | 2349 | 5771 | 610 | 2885 | 5427 |
| | 3735 | 3349 | 649 | 847 | 11740 | 439 | 4459 | 10523 | 846 | 4315 | 7823 | 8415 |
| | 6975 | 9073 | 10143 | 8957 | 2315 | 2292 | 6603 | 1321 | 8167 | 11331 | 9757 | 6755 |
| | 2327 | 2730 | 11943 | 11848 | 5411 | 5103 | 10812 | 8103 | 4922 | 9555 | 12323 | 9526 |
| | 3046 | 4303 | 9846 | 9636 | 10415 | 2376 | 7618 | 9049 | 11863 | 12452 | 9813 | 8070 |
| | 10257 | 3030 | 4031 | 4065 | 1716 | 12281 | 6543 | 5890 | 6492 | 3741 | 8608 | 6220 |
| | 3053 | 9086 | 637 | 6653 | 8593 | 11408 | 12357 | 6247 | 4629 | 2842 | 5476 | 10303 |
| | 2032 | 8190 | 1284 | 12440 | 9307 | 3477 | 2901 | 4407 | 5191 | 10111 | 4218 | 4412 |
| | 11723 | 7627 | 1891 | 7522 | 2323 | 8023 | 4766 | 8763 | 3951 | 8643 | 2501 | 5759 |
| | 1647 | 1794 | 11762 | 5216 | 5233 | 8857 | 11939 | 11126 | 5668 | 5621 | 11780 | 2443 |
| | 5526 | 448 | 7298 | 6966 | 8734 | 1104 | 5647 | 2321 | 12229 | 10556 | 1362 | 7312 |
| | 5089 | 4558 | 784 | 7286 | 2999 | 10921 | 10659 | 6804 | 659 | 6020 | 7233 | 6496 |
| | 4454 | 10299 | 11650 | 6596 | 4378 | 2529 | 10338 | 1375 | 573 | 2224 | 12213 | 1763 |
| | 1605 | 830 | 5001 | 10446 | 3830 | 4701 | 776 | 9314 | 6716 | 7514 | 3121 | 8862 |
| | 3508 | 8463 | 1757 | 6913 | 8530 | 5097 | 7740 | 2770 | 459 | 4180 | 2049 | 3855 |
| | 9103 | 6909 | 2972 | 4374 | 2939 | 12517 | 6215 | 6073 | 6945 | 11644 | 2408 | 8583 |
| | 12484 | 6919 | 5474 | 3709 | 3313 | 12163 | 3116 | 9475 | 8417 | 10673 | 6369 | 4831 |
| | 1516 | 1241 | 7797 | 6820 | 8998 | 1997 | 1768 | 2328 | 7424 | 11978 | 8750 | 7780 |
| | 11894 | 3142 | 12577 | 12293 | 11312 | 2772 | 11537 | 10690 | 1718 | 8646 | 8086 | 4294 |
| | 9402 | 9400 | 4982 | 4149 | 8342 | 12024 | 2655 | 10289 | 6995 | 8495 | 7186 | 9136 |
| | 9600 | 4718 | 3389 | 4542 | 519 | 4041 | 992 | 7372 | 1002 | 11226 | 2528 | 12519 |
| | 1542 | 11389 | 1514 | 6818 | 3426 | 4183 | 9065 | 7662 | 8073 | 521 | 1525 | 6163 |
| | 861 | 8690 | 2566 | 11361 | 9685 | 12230 | 8817 | 4888 | | | | |
| 354: | 5626 | 2966 | 4663 | 4805 | 5637 | 8787 | 12445 | 11680 | | | | |
| 355: | 9746 | 2454 | 2820 | 6126 | 9527 | 11327 | 4206 | 1124 | | | | |
| 356: | 3803 | 2159 | 11265 | 10262 | 1208 | 2265 | 6548 | 4559 | 9949 | 8892 | 1253 | 5869 |
| | 6212 | 6017 | 11175 | 3155 | 5749 | 2919 | 12006 | 2161 | 7594 | 10558 | 12270 | |
| 357: | 11897 | 12310 | 11976 | 5165 | 7935 | 565 | 11277 | 908 | 12483 | 7089 | 11639 | |
| 358: | 7374 | 4134 | 5499 | 4481 | 11052 | 4793 | 5466 | 6747 | 3954 | 6213 | 640 | 4867 |
| | 12055 | 11571 | 3592 | 1079 | 5345 | 10097 | 11174 | 7895 | | | | |
| 359: | 10455 | 9279 | 2524 | 4394 | 10985 | 4178 | 3240 | 6391 | 10552 | 3567 | 2029 | 1042 |
| | 1797 | 11402 | 7449 | 8268 | 2462 | 865 | 5988 | 3908 | 1404 | 11416 | 5916 | 7278 |
| | 7325 | 12549 | 7885 | 7883 | 6455 | 11569 | 6302 | 12413 | 9181 | 1962 | 2013 | 3143 |
| | 8399 | 10462 | 7807 | 7806 | 3136 | 3131 | 11003 | 1251 | 7387 | 2412 | 10649 | 10077 |
| | 4839 | 7683 | 6752 | 8353 | 3902 | 11971 | 9700 | 7909 | 1974 | 1145 | 11946 | 8178 |
| | 8457 | | | | | | | | | | | |
| 360: | 243 | 8836 | 3558 | 6739 | 5558 | 11923 | 11784 | 11730 | 10397 | 3528 | 7134 | 8772 |
| | 7228 | 2453 | 8340 | 7839 | 1256 | 10038 | 12184 | | | | | |
| 361: | 10213 | 10215 | 12148 | 10197 | 1692 | 10198 | 10202 | 12341 | 3385 | 2836 | 6484 | 11717 |
| | 10618 | 3411 | 10927 | 6460 | 1921 | 10241 | 1907 | 12389 | 7827 | 9025 | 5807 | 6681 |
| | 12391 | 12411 | 6550 | 974 | 5415 | 9578 | 5213 | 4987 | 4080 | 12522 | 2369 | 12124 |
| | 4767 | 6352 | 7944 | 10217 | 10216 | 3413 | 9071 | 3511 | 11013 | 10218 | 7981 | 8298 |
| | 9862 | 2132 | 530 | 3844 | 6662 | 6625 | 4550 | 6341 | 1722 | 7027 | 9323 | 5094 |
| | 3611 | 2266 | 4530 | 7763 | 7290 | 11753 | 2081 | 4242 | 11360 | 1239 | 2673 | 4531 |
| | 8677 | 4930 | 2570 | 7994 | 6309 | 4476 | 9282 | 6794 | 3851 | 3634 | 3637 | 10242 |
| | 10245 | | | | | | | | | | | |
| 362: | 922 | 10181 | 10184 | 6562 | 3258 | 6528 | 6629 | 1180 | 9451 | 406 | 6910 | 5922 |
| | 8885 | 9557 | 3599 | 7579 | 7047 | 2882 | 10405 | 3975 | 532 | 1868 | 2867 | 574 |
| | 1859 | 6925 | 6880 | 950 | 10421 | 6722 | 1464 | 1500 | 5038 | 12068 | 3134 | 12241 |
| | 9985 | 5705 | 3554 | 11752 | 2337 | 1748 | 4287 | 7838 | 8011 | 5651 | 5941 | 9051 |
| | 5564 | 4621 | 7863 | 2536 | 5059 | 5773 | 5837 | 12335 | 6680 | 7099 | 7118 | 10998 |
| | 2432 | 2463 | 1750 | 9628 | 6813 | 3628 | 9033 | 5836 | 10449 | 5420 | 5207 | 3387 |
| | 7412 | 3524 | 394 | 11949 | 8547 | 4036 | 6873 | 1600 | 1443 | 5349 | 4233 | 9783 |
| | 7318 | 2864 | 11057 | 1323 | 3052 | 10007 | 2599 | 6329 | 9359 | 7436 | 7657 | 11879 |
| | 1025 | 12197 | 9682 | 10707 | 9968 | 4445 | 801 | 8656 | 6142 | 2948 | 7184 | 4255 |
| | 10302 | 10364 | 12386 | 7309 | 12216 | 6438 | 2050 | 3050 | 2920 | 5965 | 11072 | 9831 |
| | 3854 | 5662 | 12003 | 3011 | 2728 | 9738 | 1017 | 8134 | 526 | | | |
| 363: | 6176 | 8639 | 1152 | 1522 | 8352 | 6375 | 10201 | 5139 | 8072 | 2308 | 4150 | 3445 |
| | 7428 | 2024 | 4633 | 4866 | 2581 | 12337 | 12476 | 10035 | 8153 | 11036 | 3036 | 7174 |
| | 5414 | 3759 | 9595 | 1795 | 7561 | 5236 | 11547 | 1813 | 1163 | 4779 | 3695 | 4760 |
| | 6556 | 8661 | 11299 | 11986 | 8914 | 10050 | 11070 | 4068 | 809 | 4568 | 3229 | 10263 |
| | 4659 | 10993 | 8382 | 1047 | 2931 | 9895 | 4478 | 1570 | 7237 | 4269 | 3838 | 1016 |
| | 4137 | 11183 | 12276 | 11482 | 9854 | 11264 | 3433 | 7046 | 8216 | 3513 | 9383 | 8148 |
| | 1602 | 6058 | 2215 | 1842 | 5999 | 10212 | 8258 | 6591 | 4686 | 9520 | 8497 | 6648 |
| | 3088 | 6786 | 5986 | 4715 | 7335 | 6510 | 1839 | 5658 | 2103 | 11352 | 7577 | 4634 |
| | 7828 | 9426 | 11791 | 11970 | 560 | 12269 | 10454 | 3529 | 7253 | 5891 | 880 | 4009 |
| | 2760 | 7540 | 9015 | 8638 | 3356 | 5775 | 10574 | 1338 | 12117 | 3249 | 7644 | 9762 |
| | 3751 | 7042 | 3672 | 4202 | 5589 | 6019 | 9835 | 7229 | 7693 | 3086 | 10296 | 9608 |
| | 11707 | 2588 | 6425 | 9954 | 7071 | 10204 | 7525 | 6469 | 3192 | 5805 | 6230 | 4385 |
| | 2180 | 6991 | 11841 | 9662 | 5353 | 2773 | 10791 | 3059 | 6304 | 7745 | 5886 | 6518 |
| | 1536 | 1863 | 1385 | 5022 | 6003 | 8904 | 7257 | 9755 | 11607 | 11221 | 6807 | 4696 |
| | 8329 | 9798 | 1221 | | | | | | | | | |
| 364: | 4714 | 6552 | 6036 | 9637 | 11177 | 7157 | 2425 | 8841 | 4455 | 8468 | 3444 | 8404 |
| | 3936 | 763 | 10942 | 1668 | 885 | 1786 | 10802 | 7271 | 8055 | 4969 | 11623 | 3054 |
| | 11828 | 2575 | 5685 | 5924 | 5460 | 4819 | 9989 | 11834 | 10380 | 5520 | 9589 | 3334 |
| | 4912 | 9894 | 7974 | 8700 | 12342 | | | | | | | |
| 365: | 4543 | 9647 | 3507 | 1211 | 3246 | 10549 | 2019 | 2094 | 4177 | 4338 | 9238 | 5770 |
| | 4772 | 6343 | 4048 | 12231 | 10905 | 12008 | 4926 | 12442 | 2270 | 5780 | 11506 | 7565 |
| | 1094 | 12147 | 1451 | 473 | 3294 | 11314 | 9173 | 2035 | 2593 | 12094 | 5494 | 5488 |
| | 3087 | 2026 | 8206 | 9878 | 4705 | 10472 | 4746 | 6642 | 5937 | 8790 | 11896 | 2244 |
| | 5026 | 5835 | 7953 | 11936 | 10110 | 7133 | 3785 | | | | | |
| 366: | 10341 | 5696 | 6298 | 2325 | 2938 | 8027 | 1580 | 7429 | 589 | 12057 | 10353 | 3976 |
| | 3860 | 1646 | 9225 | 842 | 5818 | 4573 | 1901 | 8803 | | | | |
| 367: | 4208 | 3058 | 2394 | 8507 | 2917 | 6904 | 1345 | 10919 | 4336 | 1202 | 7187 | 1114 |
| | 3353 | 3660 | 2387 | 8437 | 9496 | 9413 | 11082 | 8079 | 12040 | 2841 | 4934 | 12221 |
| | 8040 | 4875 | 7674 | 11844 | 10774 | 6033 | 11664 | 5283 | 5192 | 1085 | 3967 | 2564 |
| | 3007 | 11334 | 11393 | 9940 | 872 | 2508 | 12169 | 3721 | 6130 | 1306 | 5401 | 10879 |
| | 883 | 9814 | 5802 | 10180 | 6895 | 7491 | 3952 | 4386 | 8159 | 1106 | 5271 | 6278 |
| | 4124 | 11612 | 6546 | 556 | 9556 | 5366 | 11798 | 6295 | 10902 | 3531 | 3572 | 3574 |
| | 7418 | 3765 | 2343 | 7356 | 6349 | 9808 | 3624 | 9583 | 6431 | 3128 | 8098 | 3871 |
| | 2494 | 1319 | 2271 | 4787 | 1838 | 1456 | 5064 | 6878 | 9972 | 8908 | 6774 | 3809 |
| | 8730 | 11094 | 670 | 1496 | 5212 | 3588 | 9459 | 8518 | 6963 | 10018 | 7791 | 8264 |
| | 2418 | 6442 | 11211 | 1636 | 6014 | 5278 | 4155 | 11100 | 10528 | 11481 | 10313 | 7126 |
| | 8887 | 2600 | 11160 | 3425 | 5846 | 4898 | 4527 | 6393 | 12267 | 1747 | 10239 | 10330 |
| | 3670 | 10329 | 10327 | 11203 | 10715 | 8883 | 10249 | 1046 | 11155 | 5228 | 2070 | 2128 |
| | 7076 | 6412 | 6875 | 5853 | 8795 | 564 | 9262 | 2640 | 5083 | 1875 | 6898 | 6951 |
| | 12373 | 7127 | | | | | | | | | | |
| 368: | 6754 | 10585 | 6689 | 9826 | 964 | 4693 | 8822 | 6462 | 691 | 2410 | 9712 | 9884 |
| | 3219 | 7232 | 12539 | 1991 | 11008 | 9322 | 8725 | | | | | |
| 369: | 1461 | 7305 | 10596 | 7966 | 8323 | 9036 | 4856 | 433 | 2663 | 8335 | 8509 | 11775 |
| | 10231 | 5820 | 8056 | 12556 | 5630 | 11866 | 9292 | 2220 | 509 | 12153 | 7303 | 12393 |
| | 7926 | | | | | | | | | | | |
| 370: | 1200 | 12300 | 576 | 5306 | 8372 | 2320 | 7732 | 6788 | 3633 | 10013 | 657 | 1403 |
| | 10074 | 7663 | 6585 | 8051 | 2569 | 2722 | 8325 | 1121 | 11616 | 4248 | 6146 | 4276 |
| | 2647 | 5766 | 9625 | 10767 | 6273 | 4186 | 6188 | 3988 | 4877 | 3998 | 8151 | 6018 |
| | 2040 | 595 | | | | | | | | | | |
| 371: | 1200 | 12300 | 6283 | 5306 | 1573 | 8372 | 9432 | 1142 | 533 | 2320 | 7732 | 370 |
| | 1267 | 595 | 3852 | | | | | | | | | |
| 372: | 7477 | 1676 | 4448 | 2400 | 6045 | 6940 | 9923 | 11995 | 8913 | 10513 | 634 | 7969 |
| | 11746 | 6446 | 4371 | 1018 | 4026 | 10874 | 11604 | 5505 | 9219 | 4140 | 6427 | 12025 |
| | 1669 | 3605 | 5027 | 10847 | 11128 | 1483 | 9362 | 2044 | 12343 | 3560 | 430 | 11220 |
| | 12146 | 10479 | 7769 | 4704 | 5385 | 12424 | 3286 | 1435 | 12461 | 10990 | 7985 | 5652 |
| | 6086 | 12067 | 2785 | 6367 | 3470 | 2598 | 10591 | 4756 | 2959 | 10900 | 11878 | 12536 |
| | 5795 | 12559 | 5450 | 8391 | 10046 | 7073 | 3157 | 2834 | 8144 | 2236 | 2782 | 1926 |
| | 9617 | 1987 | 2822 | 2279 | 2196 | 10312 | 5369 | 10124 | 11903 | 12289 | 4170 | 12092 |
| | 8540 | 2362 | 12010 | 5204 | 9431 | 6620 | 3500 | 9585 | 7989 | 1508 | 4885 | 877 |
| | 6119 | 3807 | 2585 | 12330 | 4380 | 3820 | 5302 | 3056 | 6337 | 2060 | 3096 | 202 |
| | 4492 | 1604 | 11737 | 710 | 8574 | 11646 | 3171 | 9030 | 765 | 5680 | 10955 | 6592 |
| | 2624 | 9114 | 5576 | 5196 | 5912 | 1980 | 11275 | 1119 | 3929 | 9810 | 12099 | 11930 |
| | 4546 | 3504 | 1950 | 7696 | 374 | 1703 | | | | | | |
| 373: | 7477 | 1676 | 4448 | 2400 | 6045 | 6940 | 9923 | 8913 | 10513 | 634 | 11746 | 6446 |
| | 4371 | 1018 | 4026 | 11604 | 5505 | 9219 | 4140 | 6427 | 12025 | 3605 | 11128 | 9362 |
| | 1483 | 5027 | 10847 | 2044 | 12343 | 3560 | 430 | 11220 | 12146 | 12424 | 3286 | 12461 |
| | 10479 | 10990 | 5652 | 5385 | 6086 | 4704 | 7769 | 7985 | 2785 | 6367 | 10591 | 10900 |
| | 11878 | 12536 | 12559 | 12067 | 10046 | 3157 | 5450 | 8144 | 9617 | 1987 | 2822 | 10312 |
| | 2196 | 5369 | 10124 | 11903 | 12289 | 2362 | 12010 | 6620 | 5204 | 7989 | 4885 | 877 |
| | 4170 | 2585 | 8540 | 4380 | 12092 | 3820 | 1508 | 3056 | 6337 | 5302 | 3096 | 2060 |
| | 202 | 4492 | 1604 | 11737 | 710 | 8574 | 11646 | 3171 | 9030 | 765 | 5680 | 2624 |
| | 9114 | 6592 | 10955 | 5196 | 5912 | 1980 | 11275 | 9810 | 12099 | 4821 | 10994 | 8060 |
| | 1531 | 6262 | 4632 | 1058 | 2716 | 7317 | 4825 | 3731 | 5786 | 414 | 5576 | 1000 |
| | 9714 | 1854 | 2489 | 4638 | 4485 | 11930 | 3504 | 1950 | 7696 | 374 | 372 | 1703 |
| 374: | 7477 | 1676 | 4448 | 2400 | 6045 | 6940 | 9923 | 11995 | 8913 | 10513 | 634 | 7969 |
| | 11746 | 6446 | 4371 | 1018 | 4026 | 10874 | 11604 | 5505 | 9219 | 4140 | 6427 | 12025 |
| | 3605 | 1669 | 10847 | 5027 | 11128 | 9362 | 1483 | 2044 | 12343 | 3560 | 430 | 11220 |
| | 12146 | 10479 | 4704 | 7769 | 5385 | 12424 | 3286 | 12461 | 10990 | 7985 | 5652 | 6086 |
| | 1435 | 12067 | 2785 | 6367 | 3470 | 10591 | 2959 | 10900 | 2598 | 11878 | 12536 | 12559 |
| | 5450 | 10046 | 7073 | 3157 | 2834 | 5795 | 8144 | 9617 | 10146 | 1987 | 2822 | 2279 |
| | 2196 | 10312 | 5369 | 10124 | 11903 | 12289 | 4170 | 2362 | 12010 | 5204 | 6620 | 12092 |
| | 8540 | 9585 | 9431 | 3500 | 7989 | 1508 | 4885 | 877 | 2585 | 4380 | 3820 | 3056 |
| | 6337 | 5302 | 2060 | 3096 | 202 | 4492 | 1604 | 11737 | 710 | 8574 | 11646 | 3171 |
| | 9030 | 765 | 5680 | 6592 | 10955 | 2624 | 9114 | 5196 | 5912 | 1980 | 11275 | 5576 |
| | 9810 | 12099 | 11930 | 4546 | 3504 | 1950 | 7696 | 372 | | | | |
| 375: | 2393 | 3407 | 11789 | 2984 | 10140 | 7809 | 9834 | 6717 | 6156 | 10608 | 6364 | |
| 376: | 6589 | 11497 | 6836 | 11332 | 11382 | 5877 | 2213 | 2951 | 8215 | 1064 | 1057 | 8227 |
| | 8249 | 10551 | 3319 | 8195 | 8218 | 8221 | 9142 | 9661 | 8198 | 6116 | 10889 | 10520 |
| | 7399 | 3659 | 1734 | 5077 | 3510 | 5010 | 8351 | 9403 | 9244 | 483 | 4466 | 12167 |
| | 7031 | 4216 | 6477 | 4107 | 12150 | 6828 | 5305 | 12404 | 1567 | 7248 | 11614 | 7445 |
| | 3482 | 5079 | 2734 | 11033 | 3311 | 7402 | 4221 | 2223 | 1040 | 9289 | 2902 | 4438 |
| | 4600 | 4324 | 9168 | 2576 | 10382 | 7057 | 4976 | 1719 | 10894 | 10483 | 3361 | 9016 |
| | 5634 | 7496 | 1784 | 9760 | 12134 | 7188 | 8533 | 10833 | 1303 | 9336 | 4810 | 10290 |
| | 3800 | 11192 | 6040 | 852 | 586 | 9907 | 11699 | 8192 | 7242 | 2963 | 10418 | 12069 |
| | 9588 | 10604 | 2330 | 9242 | 6800 | 10782 | 7530 | 6261 | 8220 | 8962 | 7198 | 7306 |
| | 7697 | 2102 | 2085 | 9372 | 5757 | 3700 | 11432 | 3755 | 11635 | 3376 | 11831 | 9573 |
| | 10934 | 12553 | 9010 | 12441 | 2757 | 3093 | 11913 | 9725 | 3144 | 5892 | 10167 | 7130 |
| | 5337 | 3872 | 1625 | 4143 | 7507 | 3179 | 7982 | 2590 | 1203 | 1932 | 1225 | 6260 |
| | 1044 | 9032 | 498 | 499 | 9053 | 7023 | 8322 | 4927 | 3331 | 10393 | 8132 | 11728 |
| | 8655 | 7771 | 988 | 8909 | 1791 | 5413 | 2157 | 10976 | 1365 | 2511 | 3200 | 7167 |
| | 9986 | 11603 | 1041 | 6238 | 10166 | 11045 | 9704 | 9621 | 7669 | 2014 | 3281 | 11206 |
| | 2697 | 4067 | 5118 | 12401 | 5368 | 12284 | 9430 | 7136 | 12412 | 6387 | 9543 | 2522 |
| | 572 | 5119 | 1606 | 8394 | 10248 | 11146 | 10285 | 11719 | 6776 | 11309 | 11139 | 10439 |
| | 9245 | 11197 | 11729 | 2036 | 4759 | 9773 | 6077 | 5571 | 11810 | 10084 | 10857 | 8191 |
| | 9597 | 8037 | 3279 | 8225 | 797 | 976 | 977 | 979 | 999 | 5185 | 4166 | 9598 |
| | 4901 | 7135 | 2944 | 10328 | 8189 | 6781 | | | | | | |
| 377: | 10527 | 6513 | 5978 | 2596 | 1034 | 5101 | 1637 | 6141 | 6160 | 5334 | 12110 | |
| 378: | 11873 | 5442 | 7939 | 7815 | 10258 | 11591 | 11595 | 4116 | 4129 | 9663 | 4114 | 11588 |
| | 11586 | 11585 | 9690 | 11556 | 4111 | 11550 | 9687 | 4264 | 11554 | 5405 | 4130 | 3884 |
| | 9667 | 3491 | 11545 | 3879 | 11546 | 3875 | 9646 | 3873 | 4105 | 3881 | 4101 | 4086 |
| | 4084 | 3850 | 4082 | 4078 | 8588 | 8545 | 8589 | 9271 | 8300 | 5033 | 5035 | 5058 |
| | 1832 | 5005 | 9380 | 5056 | 2097 | 1720 | 7704 | 10811 | 2733 | 5138 | 3490 | 8251 |
| | 3805 | 2314 | 3573 | 5858 | 2753 | 2629 | 7295 | 557 | 3786 | 8599 | 9153 | 2012 |
| | 5249 | 12190 | 6141 | 5334 | 6162 | 7529 | 1731 | 10108 | 463 | 12105 | 5048 | 660 |
| | 7731 | 10191 | 9632 | 11189 | 6866 | 10706 | 4292 | 7977 | 437 | 10106 | 5124 | 1552 |
| | 2131 | 7651 | 11225 | 8644 | 1923 | 3585 | 6432 | 3532 | | | | |
| 379: | 8061 | 8064 | 7961 | 7964 | 404 | 3270 | 11215 | 3265 | 10192 | 11241 | 2078 | 11168 |
| | 7871 | 12087 | 4499 | 1544 | 1412 | 6268 | 8820 | 11677 | 914 | 5507 | 4996 | 4991 |
| | 4416 | 4419 | 1981 | 4347 | 3401 | 10092 | 11767 | 11031 | 12403 | 9799 | 8861 | 3101 |
| | 12558 | 10974 | 1155 | 1157 | 1162 | 1171 | 1167 | 10984 | 5609 | 5612 | 5156 | 5809 |
| | 5813 | 2069 | 10182 | 4042 | 3226 | 7512 | 6791 | 5053 | 6674 | 11820 | 11674 | 10970 |
| | 9466 | 11069 | 10506 | 2468 | 2442 | 2444 | 2291 | 2435 | 2288 | 2294 | 2296 | 1196 |
| | 12392 | 12414 | 12417 | 12418 | 12430 | 12435 | 12437 | 12453 | 8217 | 3323 | 4516 | 10500 |
| | 12038 | 2221 | 5834 | 3035 | 7400 | 2413 | 1207 | 2833 | 2850 | 4552 | 4556 | 3578 |
| | 5581 | 555 | 7183 | 552 | 7176 | 553 | 7179 | 549 | 7185 | 4518 | 4522 | 4539 |
| | 4541 | 3889 | 12474 | 5841 | 9042 | 5812 | 8199 | 8200 | 8494 | 469 | 4590 | 6355 |
| | 711 | 9845 | 9847 | 4984 | 7919 | 7432 | 7433 | 4285 | 11121 | 4503 | 7100 | 5439 |
| | 2561 | 5559 | 1944 | 1237 | 10062 | 2402 | 4735 | 6583 | 3891 | 5718 | 5725 | 5746 |
| | 9737 | 2946 | 2949 | 7280 | 5538 | 2658 | 2674 | 9057 | 8712 | 9135 | 5144 | 6967 |
| | 11626 | 10759 | 9277 | 11254 | 11258 | 10005 | 400 | 1615 | 4506 | 2137 | 6636 | 12186 |
| | 843 | 8021 | 3464 | 4335 | 12045 | 3009 | 6698 | 7468 | 1733 | 3239 | 4185 | 12228 |
| | 1011 | 4131 | 5279 | 11790 | 5453 | 5452 | 9366 | 10461 | 6840 | 5340 | 4790 | 9069 |
| | 4421 | 767 | 6182 | 2807 | 11421 | 6683 | 6090 | 4254 | 11473 | 4256 | 7225 | 11457 |
| | 6361 | 5623 | 1560 | 2751 | 6147 | 6148 | 6151 | 11409 | 11411 | 11415 | 9097 | 1310 |
| | 3111 | 4301 | 9508 | 7650 | 1796 | 11061 | 11104 | 11934 | 6530 | 9063 | 10105 | 4959 |
| | 7479 | 8137 | 11271 | 4864 | 11951 | 8624 | 8110 | 5704 | 4119 | 6365 | 9492 | 7963 |
| | 10912 | 2447 | 3204 | 3317 | 2521 | 2451 | 2450 | 2546 | 2514 | 3202 | 2487 | 2365 |
| | 3205 | 2363 | 3148 | 2396 | 3354 | 2480 | 4047 | 3352 | 3203 | 3175 | 3243 | 2484 |
| | 3262 | 3173 | 2419 | 2335 | 3380 | 3316 | 4051 | 3164 | 9189 | 11975 | 11977 | 12013 |
| | 7351 | 6499 | 6517 | 11125 | 10880 | 9640 | 9651 | 5762 | 5769 | 11996 | 11736 | 6987 |
| | 8226 | 3336 | 8224 | 1210 | 722 | 7083 | 11418 | 5972 | 9384 | 11424 | 6600 | 7623 |
| | 7528 | 10940 | 10803 | 8430 | 3662 | 3099 | 4359 | 5542 | 1686 | 11972 | 8902 | 2017 |
| | 2110 | 6669 | 6692 | 11541 | 4284 | 1473 | 4147 | 8879 | 8882 | 4376 | 8535 | 9364 |
| | 10522 | 7701 | 8652 | 11989 | 10456 | 4561 | 12185 | 1501 | 3769 | 9669 | 5220 | 5218 |
| | 9616 | 2405 | 12056 | 491 | 492 | 8338 | 819 | 2222 | 6325 | 1906 | 9158 | 6199 |
| | 421 | 5392 | 2403 | 3750 | 694 | 697 | 699 | 724 | 728 | 6340 | 3693 | 3696 |
| | 3955 | 7148 | 1166 | 2645 | 2409 | 8777 | 4990 | 8278 | 8279 | 8281 | 8304 | 8306 |
| | 8308 | 8312 | 947 | 4453 | 1206 | 10609 | 10755 | 11735 | 11539 | 11786 | 1546 | 10196 |
| | 7632 | 3082 | 3037 | 3110 | 3106 | 6524 | 3289 | 12083 | 12085 | 12082 | 490 | 6197 |
| | 12080 | 12079 | 2219 | 8066 | 6405 | 8894 | 7333 | 6385 | 10897 | 8930 | 1223 | 3912 |
| | 11910 | 1912 | 8891 | 3475 | 4698 | 2662 | 901 | 1194 | 1503 | 1507 | 8696 | 9203 |
| | 6471 | 566 | 6133 | 3248 | 11892 | 5459 | 3302 | 8553 | 4703 | 8621 | 851 | 4337 |
| | 4341 | 3675 | 2970 | 5601 | 10607 | 9524 | 12425 | 7307 | 9223 | 3918 | 736 | 729 |
| | 961 | 10464 | 6196 | 1543 | 2758 | 2971 | 5700 | 12211 | 2578 | 10438 | 3880 | 1539 |
| | 8865 | 8981 | 3738 | 12457 | 445 | 3540 | 11456 | 5703 | 4762 | 8680 | 2839 | 583 |
| | 4627 | 8732 | 5599 | 2623 | 6321 | 5659 | 10004 | 10168 | 8741 | 6218 | 2194 | 2214 |
| | 6554 | 6244 | 6555 | 2191 | 7472 | 8949 | 2896 | 6699 | 6703 | 3469 | 4902 | 9719 |
| | 1995 | 5537 | 3957 | 3964 | 11679 | 3719 | 424 | 8848 | 3586 | 11832 | 7055 | 10785 |
| | 9507 | 7643 | 10467 | 7642 | 10395 | 8808 | 9495 | 8628 | 9050 | 12192 | 9591 | 3681 |
| | 7246 | 11257 | 10605 | 9721 | 2379 | 1187 | 1674 | 10009 | 1108 | 6522 | 3363 | 3360 |
| | 1049 | 1051 | 1056 | 7756 | 7738 | 8897 | 2974 | 8924 | 2988 | 7438 | 832 | 4666 |
| | 11859 | 4702 | 2991 | 4355 | 8867 | 4968 | 8868 | 3897 | 8895 | 2967 | 4669 | 4697 |
| | 4674 | 4700 | 9415 | 6838 | 6549 | 2617 | 621 | 1831 | 10829 | 10808 | 4794 | 6627 |
| | 4776 | 7605 | 8694 | 12200 | 11056 | 11002 | 7868 | 3699 | 2610 | 419 | 418 | 10435 |
| | 936 | 2345 | 6762 | 12543 | 9549 | 10661 | 10689 | 10699 | 10719 | 1190 | 1165 | 1161 |
| | 1170 | 11929 | 11419 | 7988 | 3798 | 1218 | 1220 | 2721 | 1800 | 6167 | 1268 | 3178 |
| 380: | 7583 | 12223 | 3882 | 6192 | 10967 | 5287 | 11700 | 9299 | 12204 | 3071 | 9116 | 6233 |
| | 3626 | 6939 | 5957 | 2854 | 2852 | 10080 | 6245 | 9582 | 11285 | 9334 | 2429 | |
| 381: | 611 | 12004 | 6814 | 5320 | 1380 | 5991 | 7802 | 5112 | 6551 | 402 | 7832 | 382 |
| | 11138 | | | | | | | | | | | |
| 382: | 611 | 12004 | 5991 | 6551 | 7832 | | | | | | | |
| 383: | 4837 | 10247 | 4513 | 8974 | 9193 | 3250 | 11577 | 10663 | 2910 | 9363 | 1186 | |
| 384: | 11191 | 6118 | 591 | 9506 | 9370 | 8717 | 1055 | 9504 | 10360 | 6606 | 575 | 5878 |
| | 5911 | 3404 | 1764 | 7501 | 4369 | 4367 | 12240 | 12238 | 2227 | 7439 | 2003 | 7437 |
| | 7440 | 7521 | 11862 | 2334 | 12466 | 12137 | 5673 | 11590 | 12090 | 11766 | 7515 | 5121 |
| | 3935 | 6239 | 6232 | 836 | 6307 | 6289 | 6328 | 6310 | 9157 | 8674 | 2257 | 2828 |
| | 2851 | 6282 | 1990 | 10944 | 5126 | 5127 | 905 | 3876 | 907 | 8578 | 912 | 8514 |
| | 8899 | 12309 | 12059 | 10972 | 11683 | 4862 | 4099 | 11900 | 9518 | 9521 | 4985 | 9517 |
| | 6702 | 960 | 9819 | 958 | 965 | 963 | 2731 | 11043 | 10487 | 10486 | 11010 | 7682 |
| | 1759 | 9618 | 9619 | 5901 | 10142 | 7649 | 753 | 755 | 4752 | 6402 | 11686 | 1413 |
| | 656 | 5951 | 9563 | 795 | 8523 | 4826 | 11233 | 3115 | | | | |
| 385: | 12282 | 3816 | 6979 | 4487 | 8194 | 4174 | 1027 | 3606 | 9593 | 8612 | 10293 | 4967 |
| | 3304 | 6074 | 6908 | 8506 | 6658 | 7332 | 8682 | 9519 | 4399 | 4231 | 3446 | 3597 |
| | 11520 | 11676 | 11673 | 11704 | 11678 | 11714 | 11703 | 5090 | 10122 | 4379 | | |
| 386: | 3874 | 2573 | 7549 | 7517 | 9650 | 3332 | 1953 | 4431 | 11909 | 3497 | 10045 | 2551 |
| | 2545 | 9861 | 8988 | 4509 | 11527 | 10422 | 4863 | 8961 | 11568 | 5627 | 2724 | 9699 |
| | 5675 | 8512 | 2715 | 4144 | | | | | | | | |

### Example 6

[0108] This example illustrates the preparation and identification by screening of transgenic seeds and plants having enhanced agronomic traits using DNA encoding homologs identified in Example 7. Transgenic corn, soybean or cotton seed and plants with recombinant DNA encoding each of the homologs identified in Example 5 are prepared by transformation. The transgenic seed, plantlets and progeny plants are screened for nitrogen use efficiency, yield, water use efficiency, growth under cold stress and seed composition change. Transgenic plants and seed having at least one enhanced agronomic trait of this invention are identified.

### Example 7

[0109] This example illustrates the identification of consensus amino acid sequence for the proteins and homologs encoded by DNA that is used to prepare the transgenic seed and plants of this invention having enhanced agronomic traits.

[0110] ClustalW program was selected for multiple sequence alignments of the amino acid sequence of SEQ ID NO: 371 and 11 homologs. Three major factors affecting the sequence alignments dramatically are (1) protein weight matrices; (2) gap open penalty; (3) gap extension penalty. Protein weight matrices available for ClustalW program include Blosum, Pam and Gonnet series. Those parameters with gap open penalty and gap extension penalty were extensively tested. On the basis of the test results, Blosum weight matrix, gap open penalty of 10 and gap extension penalty of 1 were chosen for multiple sequence alignment. Attached are the sequences of SEQ ID NO: 371, its homologs and the consensus sequence, SEQ ID NO: 12608 at the end. The symbols for consensus sequence are (1) uppercase letters for 100% identity in all positions of multiple sequence alignment output; (2) lowercase letters for >=70% identity; symbol; (3) “X” indicated <70% identity; (4) dashes “-” meaning that gaps were in >=70% sequences.

| SEQ ID NO: | |
|---|---|
| 371 | MDIFDNSDLEYLVDEFH--ADFDDDEPFGEVDVTSESDSDFMDSDFDFELSESKTNNETS |
| 12300 | MDIFDNSDLEYLVDDFHGFSDSEDDEPFGEFDHKSEADSDFEDDLDPTQESD------TS |
| 6283 | MEHFNNDDLEYVVDEYYDVPDFAVEDTS---SDIVPELTSDVDSDFEDEFPTSNAKTDTT |
| 1573 | MEHFNNDDLEYVVDEYYDVPDFAVEDTS---SDIVPELTSDVDSDFEDEFPTSNAKTDTT |
| 8372 | MEHFNNDDLEYVVDEYYDVPDFAVEDTS---SDIVPELTSDVDSDFEDEFPTSNAKTDTT |
| 5306 | MEHFNNDDLEYVVDEYYDVPDFAVEDTS---SDIVPELTSDVDSDFEDEFPTSNAKTDTT |
| 9432 | ------------------------------------------------------------ |
| 533 | ------------------------------------------------------------ |
| 2320 | ------------------------------------------------------------ |
| 1142 | -------------------------------------------------MTISNTSSTSK |
| 1200 | ------------------------------------------------------------ |
| 7732 | -----------------MAHDLHDDLEFVSGDDDDYYLEFDHDPGHGFHTSAATSASQTL |
| 12608 | xxxxxxxxxxxxxxxxxxxxxxxxxxxx---xxxxxxxxxxxxxxxxxxxxxxxxxxxxx |

ALEARNGKDIQGIPWESLNYTRDRYRENRLLHYKNFESLFRSREELDKECLQVEKGKNFY
ALEARNGKDIQGIPWERLNYSRDQYRYKRLQQYKNFEILFRSRQDLDKECLQVEKGKHFY
ASEARNGKDIQGIPWERLNYSRDKYRETRLKQYKNYQNFSRSRHDLRKECLEVQKGETFY
ASEARNGKDIQGIPWERLNYSRDKYRETRLKQYKNYQNFSRSRHDLRKECLEVQKGETFY
ASEARNGKDIQGIPWERLNYSRDKYRETRLKQYKNYQNFSRSRHDLRKECLEVQKGETFY
ASEARNGKDIQGIPWERLNYSRDKYRETRLKQYKNYQNFSRSRHDLRKECLEVQKGETFY
-----------GIPWERLNYSRDKYRETRLKQYKNYQNFSRSRHDLRKECFEVQKGETFY
-----------GIPWERLNYSRDKYRETRLKQYKNYQNFSLSPHHLHKECFQVQKGQTFY
-----------GIPWERLNYSRDKYRETRLKQYKNYQNFSRSPHHLRKECFQVQKGQTFY
TIFRRNGKDIQGIPWERLNYSRDKYRETRLKQYKNYQNFSLSPHHLHKECFQVQKGQTFY
------------IPWERLQITRKDYRKARLEQYKNYENFPQSGELMDKLCKQVESSSKYY
IGALYFRTSRWTIPWERLNYSRNQYREMRLRQYKNYENLTMPRDGLEKECKQVERKDTFY
xxxxxxxxxxxgIPWErLnysRdxYRexRLxqYKNyxnfxxsxxxlxKeCxxVxkgxtfY
DFQFNTRLVKSTIAHFQLR----------------NLVWATSKHDVYFMNNYSLMHWSSL
DFQFNTRLVKSTIAHFQLR----------------NLLWATTKHDVYFMKNYSLMHWSSL
DFFFNTRLVKSTIVHFQLR----------------NLLWATSKHDVYFMQNYSVMHWSAL
DFFFNTRLVKSTIVHFQLLRQVXVSSLAGPNIMLRNLLWATSKHDVYFMQNYSVMHWSAL
DFFFNTRLVRXTLAGPNIMLR--------------NLLWATSKHDVYFMQNYSVMHWSAL
DFFFNTRLVKSTIVHFQLRPN----------IMLRNLLWATSKHDVYFMQNYSVMHWSAL
DFFFNTRLVKSTIVHFQLR----------------NLLWATSKHDVYFMQNYSVMHWSAL
DFFFNTRLVKSTIVHFQLRN----------------LLWATSKHDVYLMQNYSVMHWSAL
DFFFNTRLVKSTIVHFQLQLGRTX-------IMLRNLLWATSKHDVYLMQNYSVMHWSAL
DFFFNTRLVKSTIVHFQLLXRWNMSSLAGPYIMLRNLLWATSKHDVYLMQDYSVMHWSAL
EFQYNTRIVKPSILHFQLR----------------NLLWATSKHDVYFMSNSTVGHWSSL
DFHLNTRLVKSTIVHFQLR----------------NLLWATSKHDVYLMQNYSVMHWSSL
dFxfNTRlVkstixhfqlxxx----------xxxxnLlWATsKHDVYxMqnysvmHWSxL
LQRGKEVLNVAKPIVPSMKQHGSLSQSVSRVQISTMAVKDDLKLREGSKESLSVRKSTNL
LQRSKEVLNVAKPIVPTMKQPGLLSQSISRVQISTMAVKDDLIVAGGFQGELICKRINEP
LRRGKEVLNVAKPIIPTLKRPGFLAQPVSRVQISTMTVKENLMVAGGFQGELICKNLKHP
LRRGKEVLNVAKPIIPTLKRPGFLAQPVSRVQISTMTVKENLMVAGGX-SRVSLYNLKHP
LRRGKEVLNVAKPIIPTLKRPGFLAQPVSRVQISTMTVKENLMVAGGFQGELICKNLKHP
LRRGKEVLNVAKPIIPTLKRPGFLAQPVSRVQISTMTVKENLMVAGGFQGELICKNLKHP
LRRGKEVLNVAKPIIPTLKRPGFLAQPVSRVQISTMTVKENLMVAGGFQGELICKNLKHP
LQRSKEVLNVAKPIIPTLTHPGFLAQPVSRVQISTMTVKENLMVAGGFQGELICKNLKQP
LRRGKEVLNVAKPIIPTLKRPGFLAQPVSRVQISTMTVKENLMVAGGFQGELICKNLKHP
LQRSKEVLNVAKPIIPTLTHPGFLAQPVSRVQISTMTVKENLMVAGGFQGELICKVGLII
SHKMTDVLDFSGHVAPAKKHPGCALEGFTGVQVSTLAVNEGLLVAGGFQGELVCKSLGER
LQRGKEVLNVAGQLAPSQNVR--GAMPLSRVQISTMAVKGNLMVAGGFQGELICKYVDKP
lxrxkeVLnvakpixPtxkxpgxlagpvsrVQiSTmxVkenLmvagGfqgelickxxxxp
RLLSALN-----------------------------------------------------
GVAFCTVLHRFX-NDITNSVDIYNAPSGSLRVITANNDCTVRVLDAXNFAFLNSFTL---
GVLFCGKITTDDNAITHAV-DVYSNPAGSLRVITANNDFQGRVFD---------------
GVLFCGKITTDDNAITNAV-DVYSNPAGSLRVITANNDFQVRVFDAENFASLGWFKYDWS
GVLFCGKITTDDNAITNAV-DVYSNPAGSLRVITANNDFQVRVFDAENFASLGCFKYDWS
GVLFCGKITTDDNAITNAV-DVYSNPAGSLRVITANNDFQVRVFDAENFASLGCFKYDWS
GVLFCGKITTDDNAITNAV-DVYRNPAGSEGNPA--------------------------
GVLFCGKITTDGNAITNAVXDVYRNPAGSLRVITAXNDSQASGFDAENFAS---------
GVLFCGKITTDDNAITNAV-DVYSNPAGSLRVITANNDFQVRVFDAENFASLGCFKYDWS
ISYFHSI-----------------------------------------------------
DVKFCTRTTLSDNAITNAM-DIHRSTSGSLRITVSNNDSGVREFDMERFQLLNHFRFNWP
GVAFCTNLTGNNNSITNAV-DIYQAPNGGTRITTANNDCVVRTFDTERFSLISHFAFPWS
gvxfcxxxtxxxnxitxax-dxyxxpxgsxrxxxxxndxxxxxxdxxxxxxxxxxxxxxx
------------------------------------------------------------
------------------------------------------------------------
------------------------------------------------------------
VNNTSVSPDG--------------------------------------------------
VNNTSVSPDGKLLAVLGDSTECLIADANTGKITGSLKGHLDYSFSSAWHPDGQILATGNQ
VNNTSVSPDGKLLAVLGDSTECLIADANTGKITGSLKGHLDYSFSSAWHPDGQILATGNQ
------------------------------------------------------------
------------------------------------------------------------
VNNTSVSPDGKLLAVLGDSTECLIADANTGKITGSLKGHLDYSFSSAWHPDGQILATGNQ
------------------------------------------------------------
VNHTSVSPDKKLLAVVGDDRDALLVDSRNGKVTSTLVGHLDYSFASAWHLDGVTFATGNQ
VNNTSVSPDGKLLAVLGDSSDCLIADSQSGKEMARLKGHLDYSFSSAWHPDGRVVATGNQ
xxxxxxxxxxxxxxxxxxxxxxxxxxxxxxxxxxxxxxxxxxxxxxxxxxxxxxxxxxxx
------------------------------------------------------------
------------------------------------------------------------
------------------------------------------------------------
------------------------------------------------------------
DKTCRLWDIRNLSQSMAVLKGRMGAIRALRFTSDGRFLAMAEPADFVHIFDSHSGYEQGQ
DKTCRLWDIRNLSQSMAVLKGRMGAIRALRFTSDGRFLAMAEPADFVHIFDSHSGYEQGQ
------------------------------------------------------------
------------------------------------------------------------
DKTCRLWDIRNLSQSMAVLKGRMGAIRALRFTSDGRFLAMAEPADFVHIFDSHSGYEQGQ
------------------------------------------------------------
DKTCRVWDIRNPSTSLAVLRGNIGAIRCIRYSSDGRFLLFSEPADFVHVYSTAECYRKRQ
DRTCRVWDVRNMSRSVAVLEGRIGAVRGLRYSPDGRFLAASEPADFVHVYDAAAGYADAQ
xxxxxxxxxxxxxxxxxxxxxxxxxxxxxxxxxxxxxxxxxxxxxxxxxxxxxxxxxxxx
------------------------------------------------------*
------------------------------------------------------*
------------------------------------------------------*
------------------------------------------------------*
EIDLFGEIAGISFSPDTEALFVGIADRTYGSLLEFNRKRHYNYLDSF-------*
EIDLFGEIAGISFSPDTEALFVGIADRTYGSLLEFNRKRHYNYLDSF-------*
------------------------------------------------------*
------------------------------------------------------*
EIDLFGEIAGISFSPDTEALFVGIADRTYGSLLEFNRKRHYNYLDSF-------*
------------------------------------------------------*
EIDFFGEISGISLSPDD------ESLFVGVCDRVYASLLNYRLVHANGYLDSYM*
EIDLFGEIAGVAFSPAGNNGGGGEALFVSIADRTYGSLLEFHRRRRHGYLDCYV*
xxxxxxxxxxxxxxxxxxxxxxxxxxxxxxxxxxxxxxxxxxxxxxx-------*

[0111] The consensus amino acid sequence can be used to identify DNA corresponding to the full scope of this invention that is useful in providing transgenic plants, e.g., corn, soybean and cotton plants with transgenic cells expressing protein encoding DNA that impart an enhanced agronomic traits. For example, enhanced nitrogen use efficiency, enhanced yield, enhanced water use efficiency, enhanced growth under cold stress and/or improved seed compositions are imparted by the expression in the plants of DNA encoding a protein with amino acid sequence identical to the consensus amino acid sequence.

### Example 8

### Identification of Target Genes of Transcription Factors ABF3 and CBF3 Chemical Kinetics Models to Identify Regulator-Target Relationships

[0112] It has been shown both in mRNA blotting and microarray experiments that activation of regulators under stress conditions usually occurs earlier than that of its targets (Haake, 2002, Seki, 2002a). In eukaryotic cells, the effect of a regulator is usually achieved in multiple steps, including transcription of the regulator genes, transportation of the regulator mRNA(s) out of the nucleus, translation of the transcript(s), transportation of the regulator protein back to the nucleus, and the binding of the regulator protein to the promoter regions of its target genes to achieve transcriptional regulation. Noticeable timing difference exists among changes in concentrations of the regulator mRNA, the regulator protein, and the mRNAs of its targets. A chemical kinetics model naturally fits this context by taking into account of the time lags among these events.

[0113] Because the active level of the regulator protein is not measured directly in microarray experiments, the regulator protein concentration is treated as a hidden variable in our model to serve as the link between the measurable mRNA concentrations of a regulator and its target(s). More specifically, the regulator protein concentration can be modeled by the following chemical kinetic equation without considering post-translational regulation:

$$\frac{d {R}_{p}}{d t} = {K}_{tran} {R}_{m} - {K}_{p} {R}_{p} \qquad equation ( 1 )$$

where Rₚ is the regulator protein concentration; Rₘ is the regulator mRNA concentration; Kₜᵣₐₙ is the apparent rate of mRNA translation, and Kₚ is the turnover rate of the regulator protein. Accordingly, the time course of the target mRNA concentration can be modeled with the following equation

$$\frac{d {T}_{m}}{d t} = {B}_{t} + f ( {R}_{p} ) - {K}_{t } {T}_{m} \qquad equation ( 2 )$$

where Tₘ is the concentration of the target mRNA; Bₜ is the basal transcription rate of the target gene; and Kₜ is the turnover rate of the target mRNA; f (Rₚ) measures the regulated transcription rate, which is different for activators and repressors. For activators, it has the following Taylor first order approximation when Rₚ is small (Chen et al., 1999).

$$f ( {R}_{p} ) = f ( {R}_{p} = 0 ) + \frac{d ( f ( {R}_{p} )}{d {R}_{p}} {\vert}_{Rp = 0} {R}_{p} \qquad equation ( 3 )$$

f(Rₚ=0) is equal to zero, assuming target gene transcription should not be activated when there is no regulator protein.

$$\frac{d ( f ( {R}_{p} )}{d {R}_{p}} {\vert}_{Rp = 0}$$

is the activation rate of regulator protein on the target gene. If it is replaced by parameter K_{act} for simplicity, f (Rₚ) takes the following form:

f(Rₚ)=K_{act}Rₚ equation (4)

[0114] The basal level target transcription rate should satisfy the following condition:

Bₜ+f(R_{pbasal})−KₜT_{m basal}=0 equation (5)

Where R_{pbasal} and T_{mbasal} are the basal concentrations of the regulator protein and target mRNA, respectively.

[0115] Usually, what is reported in transcription profiling experiment is not the absolute concentration of mRNA, but rather a fold change compared to basal transcription level of that gene. Thus, we define relative changes of Rₘ and Tₘ as Rₘ′ and Tₘ′

Rₘ′=Rₘ/R_{mbasal}−1 equation (6)

Tₘ′=Tₘ/T_{mbasal}−1 equation (7)

Combining equation (1), (2), (4), (5), (6) and (7), and considering the fact that KₜᵣₐₙR_{mbasel}−KₚR_{pbaseal}=0, leads to the following second order ordinary differential equation:

$$\frac{{d}^{2} ( {T}_{m}^{′} )}{d {t}^{2}} + ( {K}_{t} + {K}_{p} ) \frac{d ( {T}_{m}^{′} )}{d t} + {K}_{t} {K}_{p} {T}_{m}^{′} = γ {R}_{m}^{′} \qquad equation ( 8 )$$

### Where γ=K_{act}KₜᵣₐₙR_{mbasal}/T_{mbasel}

[0116] Given all the model parameters, the relationship between the relative mRNA levels of regulator and its target, Rₘ′ and Tₘ′, is defined by Equation (8). In other words, for the target gene of a regulator, its relative mRNA level Tₘ′ has to satisfy equation (8), given the model parameters and the relative regulator mRNA level Rₘ′. It is interesting to note that the regulator protein concentration, a key variable in the original model equations, is not involved explicitly in the final equation relating the relative mRNA levels of regulator and target. To predict the target of a specific regulator, we can solve equation (8) to obtain the theoretical target behavior curve, and then find the genes with mRNA levels similar to the theoretical curve, which will be identified as the potential targets of that regulator.

[0117] In the case of transcript expression profiling experiments under stress conditions, the initial conditions should be the following:

$$\begin{matrix}{T}_{m}^{′} {\vert}_{t = 0} = 0 & equation ( 9 ) \\ \frac{d ( {T}_{m}^{′} )}{d t} {\vert}_{t = 0} = 0 & equation ( 10 )\end{matrix}$$

[0118] Because the target gene mRNA and the regulator protein should be at their basal levels at the onset of stress condition (t=0). It is apparent from equations (2) and (5) that initial condition (10) should be true.

[0119] To approximate Rₘ, a stepwise linear model can be fit as follows:

Rₘ′ᵢ(t)=αᵢ+βᵢttᵢ≦t≦tᵢ₊₁i=0, . . . , n−1 equation (11)

Where tᵢ is i^{th} time point; and αᵢ and βᵢ are the parameters of stepwise linear function in each time interval, which are determined by the measured regulator mRNA levels at the two adjacent time points. Equation (8) has analytic solution:

Tmᵢ(t)′=Aᵢe^{-K}^{ₜ}^{t}+Bᵢe^{K}^{ₚ}^{t}+Dᵢttᵢ≦t≦tᵢ₊₁,i=0, . . . , n−1 equation (12)

Where Dᵢ=βᵢγ/KₚKₜ and Cᵢ=[αᵢγ−(Kₚ+Kₜ)Dᵢ]/KₚKₜ
The contiguous restrictions on Tₘ′ are stated in the following equations:

$$\begin{matrix}{Tm}_{i}^{′} ( t ) = {Tm}_{i + 1}^{′} ( t ) , when t = {t}_{i} i = 1 , … , n - 1. & equation ( 13 ) \\ \frac{d ( {Tm}_{i}^{′} ( t ) )}{d t} = \frac{d ( {Tm}_{i + 1}^{′} ( t ) )}{d t} , \\ when t = {t}_{i} i = 1 , … , n - 1. & equation ( 14 )\end{matrix}$$

After substituting equation (12) into equations (9), (10), (13) and (14), Aᵢ and Bᵢ can be obtained by solving sets of linear algebra equations, and are functions of αᵢ, βᵢ, γ, Kₜ and Kₚ.

[0120] Learning model parameters. For each regulator and target pair, there are three parameters involved in equation (8), the target mRNA turnover rate Kₜ, the active regulator turnover rate Kₚ, and γ, which is equal to K_{act}KₜᵣₐₙR_{mbasal}/T_{mbasel}. K_{act} represents the strength of regulator protein effect on the target gene; Kₜᵣₐₙ is the translation rate of regulator mRNA. They lump together with the ratio of basal mRNA concentrations of regulator and target to form parameter γ, which determines the magnitude of the relative target mRNA level but not its shape. It is the parameters Kₜ and Kₚ that determine the shape of the relative target mRNA level, such as how fast the target gene responds to the regulator.

[0121] For gene expression experiments under stress conditions in plants, the kinetics model can be trained with known regulator-target pair reported in the literature (e.g., CBF and RD17 in Arabidopsis under cold stress) with a non-linear regression model. When the normalized expression profile of a target gene with its maximal response is considered, there is no need to keep γ as a free model parameter (γ1=nγ2 leads to Tₘ₁′=nTₘ₂′ when other parameters are kept the same in equations (8), (9) and (10)). Therefore, only two parameters Kₜ and Kₚ are estimated from the non-linear regression model, and are used to predict other regulators and their targets in plant stress response. The theoretical target mRNA expression profiles are calculated for all the genes annotated as transcription factors, and Pearson correlation coefficient is computed for each theoretical target profile and each observed expression profile in each stress condition. When high correlation in one or several stress conditions is found, the transcription factor could be one of the putative regulators of the corresponding gene.

[0122] Target gene prediction using promoter motif analysis. As an additional line of evidence for regulator-target pair prediction, we used promoter motif analysis to correlate regulators and their potential targets. Differentially expressed genes under stress conditions measured in microarray experiments can be partitioned into certain number of clusters based on the similarity in their expression profiles. All known promoter motifs within 1500 base-pairs distance to the starting codon were extracted from AGRIS database (Davuluri, 2003) for each gene. The frequency of each promoter motif in each cluster is computed, and Fisher's Exact Test is conducted to test the over-representation of certain promoter motifs. Enriched promoter motifs for a given cluster are selected as putative regulator motifs when statistical significance meets certain cutoff value (e.g., p-value 0.05). When a transcription factor (or a family of transcription factors) is known to bind to the putative regulator motif, the transcription factor(s) should be the putative regulators of target genes with the regulator motif in that cluster.

[0123] Combining evidences from kinetics models and promoter analysis. Kinetics models and promoter analysis independently predict putative regulator-target pairs, we attempted to combine their results to enhance our ability to detect true regulator-target pairs. In our kinetics models, for each target gene only the transcription factors with a Pearson correlation coefficient higher than certain cutoff in at least one stress condition are considered as its potential regulators. It is possible that the same regulator regulates its target genes in different stress conditions. Therefore, it is reasonable to give a higher ranking for a regulator if its theoretical target profiles are correlated to those of certain gene in multiple conditions. Based on these ideas, a ranking score for each possible regulator-target pair is derived as follows:

$$score ( {r}_{i} , {t}_{j} ) = {\prod }_{k}^{ } {R}_{k} ( {r}_{i} , {t}_{j} ) / N \qquad equation ( 15 )$$

Where Rₖ(rᵢ,tⱼ) is the rank of Pearson correlation coefficient of the theoretical target profile of transcription factor rᵢ to that of gene tⱼ in stress condition k; N is the total number of transcription factors on DNA chip.

[0124] The rank of the scores for putative transcription factors should represent the likelihood of them being the true regulator for a specific gene. Similarly, the rank of p-value of motif enrichment is the indicator of the likelihood of a transcription factor(s) being the true regulator for a specific target. Lastly, we combine both rankings from kinetics model prediction and promoter analysis by defining a score for a given regulator-target pair as following:

$$L ( {r}_{i} , {t}_{j} ) = {\prod }_{m}^{ } {rank}_{m} ( {r}_{i} , {t}_{j} ) / N m = 1 , 2 \qquad equation ( 17 )$$

Where L(rᵢ,tⱼ) can be viewed as the strength of transcription factor rᵢ to be the regulator of gene tⱼ; rank₁(rᵢ,tⱼ) and rank₂(rᵢ,tⱼ) are the rank of score(rᵢ,tⱼ) from kinetics model prediction, and the rank of p-value of regulator rᵢ binding motifs enrichment for the cluster with gene tⱼ, respectively.

[0125] This method was applied to an Arabidopsis gene expression dataset measuring responses to various stress conditions (Seki et al., 2002a; Seki, et al., 2002b). In this experiment, wild-type Arabidopsis plants were subject to stress treatments for various periods (1, 2, 5, 10 and 24 hours), and extracted mRNA samples were hybridized to a cDNA microarray with ˜7000 full-length cDNAs. 493 genes were chosen for the analysis, as each of these genes was differentially regulated in at least one of the stress conditions. Table 8 shows the evidence of the predicted target genes of CBF3 in terms of evidence strength, whether evidence from kinetics model or enriched promoter analysis exists for each predicted target.

TABLE 8

| | | Evidence | | |
|---|---|---|---|---|
| SEQ ID | | strength | Kinetics | Promoter |
| NO | Target | (10⁻⁵) | model | Analysis |
| / | At1g01470 | 2.13333 | yes | yes |
| / | AtGolS3 | 2.13333 | yes | yes |
| / | RD17 | 2.13333 | yes | yes |
| / | ERD10 | 2.13333 | yes | yes |
| 175 | At1g21790 | 2.13333 | yes | yes |
| / | ERD7 | 2.13333 | yes | yes |
| / | cor15A | 2.13333 | yes | yes |
| / | FL3-5A3 | 4.26667 | yes | yes |
| / | kin2 | 4.26667 | yes | yes |
| / | cor15B | 6.4 | yes | yes |
| 176 | ERD4 | 26.66667 | yes | no |
| / | RD29A | 26.66667 | yes | no |
| / | At1g16850 | 53.33333 | yes | no |
| 177 and 178 | At1g78070 | 800 | no | yes |
| / | kin1 | 800 | no | yes |

Table 9 shows the evidence of the predicted target genes of ABF3 in terms of the evidence strength, whether evidence from kinetics model or enriched promoter analysis exists for each predicted target.

TABLE 9

| | | Evidence | | |
|---|---|---|---|---|
| | | strength | Kinetics | Promoter |
| SEQ ID NO | Target | (10⁻⁵) | model | Analysis |
| 179, 180 and 181 | At3g47340 | 1.26222 | yes | yes |
| 182 | At5g13170 | 1.26222 | yes | yes |
| 183 | At2g19900 | 1.26222 | yes | yes |
| 184 and 185 | At5g09530 | 2.52444 | yes | yes |
| 186 | At2g42790 | 2.52444 | yes | yes |
| 187 | At3g56200 | 2.52444 | yes | yes |
| 188 and 189 | At5g01520 | 2.52444 | yes | yes |
| 190 | At5g66780 | 3.78667 | yes | yes |
| 191 | At5g59320 | 3.78667 | yes | yes |
| 192 | AtHB7 | 5.04889 | yes | yes |
| / | RD29B | 7.57333 | yes | yes |
| 193 | RD20 | 7.57333 | yes | yes |

[0126] It has been shown that ABF3 and CBF3 confer stress tolerance to transgenic plants. Thus, the target genes of ABF3 and CBF3, identified by this invention, including SEQ ID NO: 368 through SEQ ID NO: 386, and their homologs, are particularly useful for producing transgenic plant cells in crop plants with enhanced stress tolerance.

### Example 9

### Identification of Amino Acid Domain by Pfam Analysis

[0127] The amino acid sequence of the expressed proteins that were shown to be associated with an enhanced trait were analyzed for Pfam protein family against the current Pfam collection of multiple sequence alignments and hidden Markov models using the HMMER software in the appended computer listing. The Pfam protein families for the proteins of SEQ ID NO: 194 through 386 are shown in Table 10. The Hidden Markov model databases for the identified patent families are also in the appended computer listing allowing identification of other homologous proteins and their cognate encoding DNA to enable the full breadth of the invention for a person of ordinary skill in the art. Certain proteins are identified by a single Pfam domain and others by multiple Pfam domains. For instance, the protein with amino acids of SEQ ID NO: 194 is characterized by three Pfam domains, i.e. PPDK_N, PEP-utilizer and PEP-utilizer_C.

TABLE 10

| PEP SEQ | | Pfam domain | | | | |
|---|---|---|---|---|---|---|
| ID NO | GENE ID | name | begin | stop | score | E-value |
| 194 | PHE0003351_PMON81242.pep | PPDK_N | 99 | 464 | 710.9 | 7.90E−211 |
| 194 | PHE0003351_PMON81242.pep | PEP-utilizers | 500 | 601 | 182.3 | 1.10E−51 |
| 194 | PHE0003351_PMON81242.pep | PEP-utilizers_C | 613 | 969 | 723.9 | 1.00E−214 |
| 195 | PHE0003351_PMON83625.pep | PPDK_N | 99 | 464 | 710.9 | 7.90E−211 |
| 195 | PHE0003351_PMON83625.pep | PEP-utilizers | 500 | 601 | 182.3 | 1.10E−51 |
| 195 | PHE0003351_PMON83625.pep | PEP-utilizers_C | 613 | 969 | 723.9 | 1.00E−214 |
| 196 | PHE0000207_PMON77878.pep | Pkinase | 1 | 259 | 343.1 | 4.40E−100 |
| 197 | PHE0000208_PMON77879.pep | Pkinase | 1 | 259 | 353.4 | 3.30E−103 |
| 198 | PHE0000209_PMON77891.pep | Pkinase | 1 | 259 | 354.9 | 1.20E−103 |
| 199 | PHE0000210_PMON77880.pep | Pkinase | 1 | 259 | 359.4 | 5.40E−105 |
| 200 | PHE0001329_PMON92878.pep | Pkinase | 12 | 266 | 354.3 | 1.80E−103 |
| 200 | PHE0001329_PMON92878.pep | NAF | 311 | 371 | 123.6 | 5.10E−34 |
| 201 | PHE0001425_PMON79162.pep | CAF1 | 19 | 252 | 368.1 | 1.30E−107 |
| 202 | PHE0001573_PMON92870.pep | GATase_2 | 2 | 162 | 55.5 | 3.10E−15 |
| 202 | PHE0001573_PMON92870.pep | Asn_synthase | 210 | 451 | 329.6 | 5.00E−96 |
| 203 | PHE0001664_PMON99280.pep | FAD_binding_4 | 69 | 213 | 83.4 | 6.30E−22 |
| 204 | PHE0001674_PMON79194.pep | Myb_DNA-binding | 25 | 70 | 36.3 | 9.90E−08 |
| 205 | PHE0002026_PMON96489.pep | Ammonium_transp | 36 | 459 | 628.5 | 5.10E−186 |
| 206 | PHE0002108_PMON92821.pep | CSD | 1 | 65 | 155.1 | 1.60E−43 |
| 207 | PHE0002109_PMON93856.pep | CSD | 1 | 67 | 144.8 | 2.10E−40 |
| 208 | PHE0002508_PMON92607.pep | CBFD_NFYB_HMF | 24 | 89 | 130.9 | 3.20E−36 |
| 209 | PHE0002650_PMON81832.pep | SRF-TF | 9 | 59 | 106.9 | 5.50E−29 |
| 209 | PHE0002650_PMON81832.pep | K-box | 73 | 172 | 118.4 | 1.90E−32 |
| 210 | PHE0002989_PMON95630.pep | Miro | 10 | 126 | 74.3 | 3.40E−19 |
| 210 | PHE0002989_PMON95630.pep | Ras | 11 | 173 | 288.8 | 9.30E−84 |
| 212 | PHE0003300_PMON95106.pep | MtN3_slv | 12 | 99 | 131.1 | 2.80E−36 |
| 212 | PHE0003300_PMON95106.pep | MtN3_slv | 133 | 219 | 134.9 | 2.00E−37 |
| 214 | PHE0003389_PMON94682.pep | p450 | 48 | 527 | 286.5 | 4.60E−83 |
| 215 | PHE0003614_PMON95111.pep | Pyridoxal_deC | 33 | 381 | 531.8 | 6.80E−157 |
| 216 | PHE0003684_PMON92807.pep | Myb_DNA-binding | 118 | 168 | 47.9 | 3.00E−11 |
| 217 | PHE0003684_PMON93378.pep | Myb_DNA-binding | 118 | 168 | 47.9 | 3.00E−11 |
| 218 | PHE0003853_PMON92602.pep | Cyclin_N | 46 | 171 | 72.6 | 1.10E−18 |
| 219 | PHE0003903_PMON98271.pep | TPP_enzyme_N | 44 | 220 | 302.9 | 5.50E−88 |
| 219 | PHE0003903_PMON98271.pep | TPP_enzyme_M | 241 | 390 | 157.3 | 3.70E−44 |
| 220 | PHE0003905_PMON99283.pep | Aldedh | 30 | 492 | 514.4 | 1.10E−151 |
| 221 | PHE0003907_PMON98066.pep | Ribosomal_L12 | 124 | 191 | 62.6 | 1.20E−15 |
| 222 | PHE0003908_PMON98064.pep | DnaJ | 31 | 93 | 128.9 | 1.30E−35 |
| 223 | PHE0003960_PMON95079.pep | CTP_transf_2 | 56 | 186 | 142.9 | 7.70E−40 |
| 224 | PHE0003967_PMON95088.pep | GST_N | 11 | 84 | 43.3 | 7.40E−10 |
| 228 | PHE0004023_PMON92446.pep | PHD | 198 | 248 | 54.9 | 2.40E−13 |
| 229 | PHE0004026_PMON93885.pep | Aa_trans | 44 | 438 | 409.4 | 4.80E−120 |
| 230 | PHE0004027_PMON93860.pep | FAD_binding_4 | 64 | 218 | 83.9 | 4.60E−22 |
| 231 | PHE0004028_PMON94697.pep | Alpha-amylase | 10 | 426 | −62.1 | 4.30E−06 |
| 232 | PHE0004034_PMON92631.pep | DUF1336 | 236 | 478 | 491.8 | 7.30E−145 |
| 234 | PHE0004047_PMON92619.pep | LIM | 11 | 68 | 53.4 | 7.00E−13 |
| 234 | PHE0004047_PMON92619.pep | LIM | 110 | 167 | 63.9 | 4.70E−16 |
| 235 | PHE0004047_PMON93388.pep | LIM | 11 | 68 | 53.4 | 7.00E−13 |
| 235 | PHE0004047_PMON93388.pep | LIM | 110 | 167 | 63.9 | 4.70E−16 |
| 236 | PHE0004068_PMON93663.pep | AWPM-19 | 1 | 125 | 287.6 | 2.20E−83 |
| 237 | PHE0004071_PMON93311.pep | RRM_1 | 105 | 174 | 77.3 | 4.40E−20 |
| 238 | PHE0004072_PMON93654.pep | MMR_HSR1 | 214 | 324 | 65.7 | 1.40E−16 |
| 239 | PHE0004072_PMON93669.pep | MMR_HSR1 | 214 | 324 | 65.7 | 1.40E−16 |
| 241 | PHE0004075_PMON92851.pep | MtN3_slv | 15 | 104 | 75.5 | 1.50E−19 |
| 241 | PHE0004075_PMON92851.pep | MtN3_slv | 137 | 223 | 97.2 | 4.50E−26 |
| 242 | PHE0004080_PMON93321.pep | peroxidase | 19 | 227 | 241 | 2.40E−69 |
| 243 | PHE0004084_PMON95141.pep | Phi_1 | 35 | 314 | 691.3 | 6.40E−205 |
| 244 | PHE0004093_PMON93332.pep | Dimerisation | 40 | 100 | 105.7 | 1.20E−28 |
| 244 | PHE0004093_PMON93332.pep | Methyltransf_2 | 104 | 350 | 317.5 | 2.20E−92 |
| 245 | PHE0004093_PMON94155.pep | Dimerisation | 40 | 100 | 105.7 | 1.20E−28 |
| 245 | PHE0004093_PMON94155.pep | Methyltransf_2 | 104 | 350 | 317.5 | 2.20E−92 |
| 247 | PHE0004144_PMON93842.pep | Cofilin_ADF | 16 | 143 | 152.4 | 1.10E−42 |
| 248 | PHE0004148_PMON92574.pep | Iso_dh | 28 | 412 | 521.5 | 8.40E−154 |
| 249 | PHE0004149_PMON92471.pep | HEAT_PBS | 115 | 143 | 23.8 | 0.00057 |
| 249 | PHE0004149_PMON92471.pep | HEAT_PBS | 155 | 181 | 37.8 | 3.50E−08 |
| 249 | PHE0004149_PMON92471.pep | HEAT_PBS | 186 | 212 | 22.4 | 0.0015 |
| 249 | PHE0004149_PMON92471.pep | HEAT_PBS | 260 | 287 | 16.8 | 0.074 |
| 250 | PHE0004149_PMON93899.pep | HEAT_PBS | 115 | 143 | 23.8 | 0.00057 |
| 250 | PHE0004149_PMON93899.pep | HEAT_PBS | 155 | 181 | 37.8 | 3.50E−08 |
| 250 | PHE0004149_PMON93899.pep | HEAT_PBS | 186 | 212 | 22.4 | 0.0015 |
| 250 | PHE0004149_PMON93899.pep | HEAT_PBS | 260 | 287 | 16.8 | 0.074 |
| 251 | PHE0004152_PMON93672.pep | AT_hook | 69 | 81 | 7.4 | 1.1 |
| 251 | PHE0004152_PMON93672.pep | DUF296 | 96 | 217 | 175.1 | 1.60E−49 |
| 252 | PHE0004155_PMON92626.pep | ADH_N | 41 | 152 | 176.1 | 8.20E−50 |
| 252 | PHE0004155_PMON92626.pep | ADH_zinc_N | 181 | 324 | 127.8 | 2.70E−35 |
| 253 | PHE0004156_PMON92623.pep | NPH3 | 135 | 364 | 219.3 | 7.80E−63 |
| 254 | PHE0004162_PMON92481.pep | AUX_IAA | 22 | 279 | 395.9 | 5.30E−116 |
| 255 | PHE0004164_PMON92465.pep | X8 | 29 | 115 | 168.4 | 1.70E−47 |
| 257 | PHE0004167_PMON93333.pep | APS_kinase | 108 | 264 | 363.4 | 3.20E−106 |
| 258 | PHE0004168_PMON93855.pep | FAD_binding_4 | 84 | 225 | 93 | 8.10E−25 |
| 258 | PHE0004168_PMON93855.pep | BBE | 476 | 534 | 120.1 | 5.70E−33 |
| 259 | PHE0004169_PMON92568.pep | Aldo_ket_red | 14 | 298 | 389.4 | 4.80E−114 |
| 260 | PHE0004184_PMON92565.pep | UIM | 214 | 231 | 14.4 | 0.29 |
| 260 | PHE0004184_PMON92565.pep | UIM | 298 | 315 | 24 | 0.00049 |
| 261 | PHE0004185_PMON92802.pep | p450 | 39 | 504 | 157.8 | 2.70E−44 |
| 262 | PHE0004188_PMON92803.pep | HSF_DNA-bind | 70 | 233 | 177.8 | 2.50E−50 |
| 263 | PHE0004190_PMON92801.pep | HLH | 175 | 213 | 9.2 | 0.014 |
| 264 | PHE0004208_PMON92834.pep | Myb_DNA-binding | 5 | 56 | 39.1 | 1.30E−08 |
| 264 | PHE0004208_PMON92834.pep | Myb_DNA-binding | 134 | 181 | 44.6 | 3.10E−10 |
| 265 | PHE0004215_PMON92827.pep | PBP | 14 | 170 | 30 | 1.50E−07 |
| 266 | PHE0004223_PMON92840.pep | Fasciclin | 40 | 179 | 11.7 | 0.00032 |
| 266 | PHE0004223_PMON92840.pep | Fasciclin | 217 | 353 | 104.9 | 2.20E−28 |
| 267 | PHE0004225_PMON94167.pep | Aldedh | 77 | 539 | 880.7 | 6.30E−262 |
| 268 | PHE0004226_PMON95114.pep | Aldedh | 77 | 539 | 873 | 1.30E−259 |
| 269 | PHE0004227_PMON92605.pep | UPF0057 | 5 | 55 | 76.3 | 8.50E−20 |
| 270 | PHE0004229_PMON92867.pep | UPF0057 | 4 | 54 | 96.4 | 8.00E−26 |
| 271 | PHE0004233_PMON92843.pep | HSF_DNA-bind | 60 | 236 | 255.5 | 1.00E−73 |
| 272 | PHE0004237_PMON93673.pep | HSP20 | 48 | 153 | 184.3 | 2.80E−52 |
| 273 | PHE0004243_PMON92621.pep | CBFD_NFYB_HMF | 22 | 87 | 122.5 | 1.10E−33 |
| 274 | PHE0004244_PMON92858.pep | CBFD_NFYB_HMF | 39 | 104 | 121 | 3.00E−33 |
| 275 | PHE0004245_PMON93813.pep | CBFD_NFYB_HMF | 25 | 90 | 129.2 | 1.00E−35 |
| 276 | PHE0004248_PMON94672.pep | CBFD_NFYB_HMF | 37 | 102 | 125.3 | 1.60E−34 |
| 278 | PHE0004250_PMON92881.pep | CBFD_NFYB_HMF | 25 | 90 | 119.7 | 7.80E−33 |
| 279 | PHE0004252_PMON92606.pep | CBFD_NFYB_HMF | 14 | 79 | 94.1 | 3.80E−25 |
| 280 | PHE0004253_PMON92874.pep | CBFD_NFYB_HMF | 7 | 71 | 83.8 | 5.00E−22 |
| 281 | PHE0004258_PMON93385.pep | Pkinase | 5 | 276 | 144.7 | 2.30E−40 |
| 282 | PHE0004258_PMON93806.pep | Pkinase | 5 | 276 | 144.7 | 2.30E−40 |
| 283 | PHE0004259_PMON93384.pep | Abhydrolase_3 | 95 | 319 | 302.4 | 7.70E−88 |
| 285 | PHE0004261_PMON93389.pep | Pkinase | 31 | 282 | 289.6 | 5.30E−84 |
| 285 | PHE0004261_PMON93389.pep | Pkinase_Tyr | 31 | 280 | 69.3 | 6.10E−20 |
| 286 | PHE0004261_PMON93655.pep | Pkinase | 31 | 282 | 289.6 | 5.30E−84 |
| 286 | PHE0004261_PMON93655.pep | Pkinase_Tyr | 31 | 280 | 69.3 | 6.10E−20 |
| 287 | PHE0004262_PMON92862.pep | Pkinase | 86 | 366 | 153.9 | 3.70E−43 |
| 287 | PHE0004262_PMON92862.pep | Pkinase_Tyr | 86 | 366 | 132.2 | 1.30E−36 |
| 288 | PHE0004262_PMON93360.pep | Pkinase | 86 | 366 | 153.9 | 3.70E−43 |
| 288 | PHE0004262_PMON93360.pep | Pkinase_Tyr | 86 | 366 | 132.2 | 1.30E−36 |
| 289 | PHE0004264_PMON92845.pep | PMEI | 25 | 174 | 138.8 | 1.40E−38 |
| 290 | PHE0004264_PMON93354.pep | PMEI | 25 | 174 | 138.8 | 1.40E−38 |
| 291 | PHE0004265_PMON92873.pep | Suc_Fer-like | 59 | 308 | 60.7 | 4.30E−15 |
| 292 | PHE0004265_PMON93807.pep | Suc_Fer-like | 59 | 308 | 60.7 | 4.30E−15 |
| 293 | PHE0004266_PMON92877.pep | Myb_DNA-binding | 298 | 348 | 46.6 | 7.80E−11 |
| 294 | PHE0004284_PMON93857.pep | U-box | 23 | 97 | 98.2 | 2.30E−26 |
| 295 | PHE0004285_PMON95136.pep | CBFD_NFYB_HMF | 61 | 126 | 123 | 7.70E−34 |
| 296 | PHE0004286_PMON93666.pep | ICL | 21 | 551 | 1239.3 | 0 |
| 297 | PHE0004287_PMON93344.pep | ICL | 21 | 552 | 1169.2 | 0 |
| 298 | PHE0004307_PMON94102.pep | RWP-RK | 196 | 247 | 90.7 | 4.00E−24 |
| 299 | PHE0004314_PMON93397.pep | zf-C3HC4 | 148 | 185 | 34.1 | 4.50E−07 |
| 300 | PHE0004321_PMON93811.pep | Redoxin | 64 | 228 | 4.9 | 0.0016 |
| 300 | PHE0004321_PMON93811.pep | GSHPx | 73 | 181 | 246.5 | 5.10E−71 |
| 301 | PHE0004321_PMON93834.pep | Redoxin | 64 | 228 | 4.9 | 0.0016 |
| 301 | PHE0004321_PMON93834.pep | GSHPx | 73 | 181 | 246.5 | 5.10E−71 |
| 302 | PHE0004325_PMON93818.pep | CcmH | 1 | 139 | 16.6 | 6.50E−09 |
| 303 | PHE0004335_PMON93850.pep | DZC | 158 | 193 | 81.9 | 1.80E−21 |
| 303 | PHE0004335_PMON93850.pep | DZC | 308 | 343 | 80.9 | 3.70E−21 |
| 304 | PHE0004336_PMON93858.pep | DZC | 179 | 214 | 78.3 | 2.20E−20 |
| 304 | PHE0004336_PMON93858.pep | DZC | 369 | 404 | 71.4 | 2.60E−18 |
| 306 | PHE0004348_PMON93810.pep | CSD | 1 | 65 | 136.8 | 5.50E−38 |
| 307 | PHE0004349_PMON93812.pep | CSD | 1 | 65 | 141.9 | 1.50E−39 |
| 308 | PHE0004350_PMON93826.pep | CSD | 1 | 66 | 148.4 | 1.70E−41 |
| 309 | PHE0004351_PMON93821.pep | CSD | 1 | 66 | 149.5 | 8.10E−42 |
| 310 | PHE0004352_PMON93824.pep | CSD | 2 | 68 | 151.2 | 2.50E−42 |
| 312 | PHE0004393_PMON94192.pep | efhand | 29 | 57 | 18 | 0.031 |
| 312 | PHE0004393_PMON94192.pep | efhand | 66 | 94 | 25.3 | 0.0002 |
| 312 | PHE0004393_PMON94192.pep | efhand | 110 | 138 | 24.2 | 0.00042 |
| 313 | PHE0004395_PMON94145.pep | C2 | 16 | 138 | 72.1 | 1.60E−18 |
| 313 | PHE0004395_PMON94145.pep | PLDc | 357 | 392 | 30.1 | 7.20E−06 |
| 313 | PHE0004395_PMON94145.pep | PLDc | 702 | 729 | 37.1 | 5.70E−08 |
| 314 | PHE0004396_PMON94137.pep | Orn_Arg_deC_N | 118 | 393 | 282.3 | 8.80E−82 |
| 314 | PHE0004396_PMON94137.pep | Orn_DAP_Arg_deC | 396 | 596 | 161.7 | 1.70E−45 |
| 315 | PHE0004417_PMON94190.pep | Spermine_synth | 13 | 256 | 516.1 | 3.40E−152 |
| 316 | PHE0004418_PMON94368.pep | Amino_oxidase | 18 | 504 | 275.8 | 7.90E−80 |
| 317 | PHE0004419_PMON95100.pep | Amidohydro_1 | 95 | 446 | 56.2 | 1.00E−13 |
| 317 | PHE0004419_PMON95100.pep | Amidohydro_3 | 95 | 444 | −49.9 | 0.00024 |
| 318 | PHE0004421_PMON95120.pep | AP2 | 52 | 118 | 92.2 | 1.40E−24 |
| 319 | PHE0004422_PMON95123.pep | AP2 | 58 | 123 | 78.5 | 1.90E−20 |
| 322 | PHE0004432_PMON94112.pep | Lactamase_B | 63 | 262 | 81.6 | 2.20E−21 |
| 322 | PHE0004432_PMON94112.pep | RMMBL | 400 | 440 | 33.6 | 6.10E−07 |
| 323 | PHE0004472_PMON94115.pep | Sina | 5 | 205 | 188 | 2.00E−53 |
| 324 | PHE0004472_PMON94126.pep | Sina | 5 | 205 | 188 | 2.00E−53 |
| 325 | PHE0004488_PMON95609.pep | Anti-silence | 1 | 155 | 392.9 | 4.40E−115 |
| 327 | PHE0004492_PMON95614.pep | NPH3 | 193 | 435 | 469.9 | 2.90E−138 |
| 328 | PHE0004545_PMON95117.pep | Ribosomal_L14 | 49 | 196 | 105.5 | 1.50E−28 |
| 329 | PHE0004574_PMON94433.pep | Transaldolase | 102 | 405 | 620.7 | 1.20E−183 |
| 329 | PHE0004574_PMON94433.pep | efhand | 444 | 472 | 21.3 | 0.0031 |
| 330 | PHE0004606_PMON95627.pep | Metallophos | 54 | 249 | 154 | 3.60E−43 |
| 331 | PHE0004620_PMON94189.pep | PFK | 6 | 281 | 515.1 | 7.30E−152 |
| 332 | PHE0004620_PMON94442.pep | PFK | 6 | 281 | 515.1 | 7.30E−152 |
| 333 | PHE0004622_PMON95621.pep | F-box | 2 | 49 | 43.2 | 8.10E−10 |
| 333 | PHE0004622_PMON95621.pep | LRR_2 | 150 | 175 | 41.5 | 2.60E−09 |
| 333 | PHE0004622_PMON95621.pep | FBD | 332 | 382 | 74.8 | 2.50E−19 |
| 334 | PHE0004626_PMON95101.pep | Aminotran_3 | 79 | 434 | 323.4 | 3.50E−94 |
| 335 | PHE0004630_PMON94367.pep | Iso_dh | 40 | 363 | 326.9 | 3.20E−95 |
| 336 | PHE0004634_PMON94385.pep | AP2 | 28 | 91 | 114.2 | 3.40E−31 |
| 337 | PHE0004640_PMON95066.pep | FAE1_CUT1_RppA | 75 | 365 | 539.9 | 2.40E−159 |
| 337 | PHE0004640_PMON95066.pep | Chal_sti_synt_C | 322 | 466 | 8.7 | 0.0003 |
| 337 | PHE0004640_PMON95066.pep | ACP_syn_III_C | 382 | 464 | 26.7 | 2.30E−08 |
| 338 | PHE0004645_PMON94655.pep | 14-3-3 | 5 | 241 | 304.8 | 1.50E−88 |
| 339 | PHE0004645_PMON94685.pep | 14-3-3 | 5 | 241 | 304.8 | 1.50E−88 |
| 342 | PHE0004650_PMON94686.pep | Skp1_POZ | 4 | 64 | 105.3 | 1.70E−28 |
| 342 | PHE0004650_PMON94686.pep | Skp1 | 112 | 190 | 173 | 6.90E−49 |
| 343 | PHE0004652_PMON94657.pep | UPF0005 | 31 | 247 | 55.1 | 2.20E−13 |
| 344 | PHE0004652_PMON94687.pep | UPF0005 | 31 | 247 | 55.1 | 2.20E−13 |
| 346 | PHE0004689_PMON95131.pep | Pkinase | 12 | 291 | 357 | 2.70E−104 |
| 347 | PHE0004691_PMON95129.pep | Spermine_synth | 33 | 278 | 501.4 | 9.60E−148 |
| 348 | PHE0004719_PMON94698.pep | zf-C3HC4 | 203 | 243 | 26.6 | 8.00E−05 |
| 349 | PHE0004719_PMON95089.pep | zf-C3HC4 | 203 | 243 | 26.6 | 8.00E−05 |
| 350 | PHE0004734_PMON94667.pep | KOW | 26 | 62 | 30.7 | 4.80E−06 |
| 350 | PHE0004734_PMON94667.pep | eIF-5a | 84 | 153 | 125.8 | 1.10E−34 |
| 351 | PHE0004735_PMON95116.pep | KOW | 26 | 62 | 32.2 | 1.70E−06 |
| 351 | PHE0004735_PMON95116.pep | eIF-5a | 84 | 153 | 120.3 | 5.10E−33 |
| 352 | PHE0004739_PMON95110.pep | Miro | 7 | 121 | 68.7 | 1.70E−17 |
| 352 | PHE0004739_PMON95110.pep | Ras | 8 | 179 | 270.9 | 2.30E−78 |
| 353 | PHE0004753_PMON95105.pep | Aldedh | 61 | 520 | 791.8 | 3.50E−235 |
| 355 | PHE0004770_PMON95122.pep | DUF1242 | 2 | 70 | 118.4 | 1.80E−32 |
| 357 | PHE0004774_PMON95147.pep | zf-A20 | 14 | 38 | 33.1 | 9.10E−07 |
| 357 | PHE0004774_PMON95147.pep | zf-AN1 | 92 | 132 | 68.2 | 2.50E−17 |
| 358 | PHE0004777_PMON95118.pep | RNA_pol_L | 6 | 83 | 75.9 | 1.20E−19 |
| 359 | PHE0004785_PMON95057.pep | Ribosomal_L18p | 26 | 172 | 251.4 | 1.70E−72 |
| 360 | PHE0004786_PMON95604.pep | Phi_1 | 35 | 314 | 691.3 | 6.40E−205 |
| 361 | PHE0004788_PMON95092.pep | DS | 53 | 369 | 587.4 | 1.30E−173 |
| 362 | PHE0004799_PMON95602.pep | DAO | 34 | 481 | −14.1 | 7.30E−05 |
| 362 | PHE0004799_PMON95602.pep | Amino_oxidase | 42 | 483 | 342.7 | 5.60E−100 |
| 363 | PHE0004841_PMON95636.pep | DNA_photolyase | 18 | 190 | 254.3 | 2.30E−73 |
| 363 | PHE0004841_PMON95636.pep | FAD_binding_7 | 223 | 501 | 503 | 3.20E−148 |
| 367 | PHE0004888_PMON95603.pep | Globin | 7 | 134 | 73 | 8.40E−19 |
| 367 | PHE0004888_PMON95603.pep | FAD_binding_6 | 156 | 263 | 29 | 4.80E−07 |
| 367 | PHE0004888_PMON95603.pep | NAD_binding_1 | 276 | 393 | 13.4 | 9.80E−05 |
| 369 | ERD4.pep | DUF221 | 295 | 710 | 245.3 | 1.20E−70 |
| 370 | At1g78070.2.pep | WD40 | 310 | 347 | 34.1 | 4.40E−07 |
| 372 | At3g47340.1.pep | GATase_2 | 2 | 161 | 99.6 | 8.60E−27 |
| 372 | At3g47340.1.pep | Asn_synthase | 209 | 450 | 344.3 | 1.80E−100 |
| 373 | At3g47340.3.pep | GATase_2 | 2 | 161 | 99.6 | 8.60E−27 |
| 373 | At3g47340.3.pep | Asn_synthase | 209 | 430 | 286.1 | 6.20E−83 |
| 374 | At3g47340.2.pep | GATase_2 | 2 | 161 | 99.6 | 8.60E−27 |
| 374 | At3g47340.2.pep | Asn_synthase | 209 | 450 | 344.3 | 1.80E−100 |
| 375 | At5g13170.1.pep | MtN3_slv | 12 | 99 | 135.1 | 1.80E−37 |
| 375 | At5g13170.1.pep | MtN3_slv | 134 | 220 | 135.4 | 1.40E−37 |
| 376 | At2g19900.1.pep | malic | 107 | 295 | 407.1 | 2.20E−119 |
| 376 | At2g19900.1.pep | Malic_M | 297 | 550 | 466.9 | 2.30E−137 |
| 379 | At2g42790.1.pep | Citrate_synt | 93 | 461 | 506.2 | 3.40E−149 |
| 380 | At3g56200.1.pep | Aa_trans | 21 | 426 | 106.3 | 8.10E−29 |
| 381 | At5g01520.1.pep | zf-C3HC4 | 146 | 183 | 26.1 | 0.00011 |
| 384 | At5g59320.1.pep | Tryp_alpha_amyl | 27 | 111 | 114.7 | 2.30E−31 |
| 385 | AtHB7.pep | Homeobox | 30 | 86 | 66.6 | 7.10E−17 |
| 385 | AtHB7.pep | HALZ | 87 | 131 | 39.2 | 1.30E−08 |
| 386 | RD20.pep | Caleosin | 54 | 227 | 469 | 5.30E−138 |

TABLE 11

| Pfam domain | accession | gathering | |
|---|---|---|---|
| name | number | cutoff | domain description |
| 14-3-3 | PF00244.9 | 25 | 14-3-3 protein |
| ACP_syn_III_C | PF08541.1 | −24.4 | 3-Oxoacyl-[acyl-carrier-protein (ACP)] synthase III C |
| | | | terminal |
| ADH_N | PF08240.2 | −14.5 | Alcohol dehydrogenase GroES-like domain |
| ADH_zinc_N | PF00107.16 | 23.8 | Zinc-binding dehydrogenase |
| AP2 | PF00847.9 | 0 | AP2 domain |
| APS_kinase | PF01583.9 | 25 | Adenylylsulphate kinase |
| AT_hook | PF02178.8 | 3.6 | AT hook motif |
| AUX_IAA | PF02309.6 | −83 | AUX/IAA family |
| AWPM-19 | PF05512.1 | 25 | AWPM-19-like family |
| Aa_trans | PF01490.7 | −128.4 | Transmembrane amino acid transporter protein |
| Abhydrolase_3 | PF07859.2 | 25.8 | alpha/beta hydrolase fold |
| Aldedh | PF00171.11 | −209.3 | Aldehyde dehydrogenase family |
| Aldo_ket_red | PF00248.10 | −97 | Aldo/keto reductase family |
| Alpha-amylase | PF00128.12 | −93 | Alpha amylase, catalytic domain |
| Amidohydro_1 | PF01979.8 | −37.4 | Amidohydrolase family |
| Amidohydro_3 | PF07969.1 | −65.5 | Amidohydrolase family |
| Amino_oxidase | PF01593.12 | −11.4 | Flavin containing amine oxidoreductase |
| Aminotran_3 | PF00202.10 | −207.6 | Aminotransferase class-III |
| Ammonium_transp | PF00909.10 | −144 | Ammonium Transporter Family |
| Anti-silence | PF04729.4 | 25 | Anti-silencing protein, ASF1-like |
| Asn_synthase | PF00733.10 | −52.8 | Asparagine synthase |
| BBE | PF08031.1 | 25 | Berberine and berberine like |
| C2 | PF00168.18 | 3.7 | C2 domain |
| CAF1 | PF04857.8 | −100.5 | CAF1 family ribonuclease |
| CBFD_NFYB_HMF | PF00808.12 | 18.4 | Histone-like transcription factor (CBF/NF-Y) and |
| | | | archaeal histone |
| CSD | PF00313.12 | −0.3 | ‘Cold-shock’ DNA-binding domain |
| CTP_transf_2 | PF01467.16 | −11.8 | Cytidylyltransferase |
| Caleosin | PF05042.3 | 25 | Caleosin related protein |
| CcmH | PF03918.4 | −30.8 | Cytochrome C biogenesis protein |
| Chal_sti_synt_C | PF02797.5 | −6.1 | Chalcone and stilbene synthases, C-terminal |
| | | | domain |
| Citrate_synt | PF00285.10 | −101.5 | Citrate synthase |
| Cofilin_ADF | PF00241.10 | −4.7 | Cofilin/tropomyosin-type actin-binding protein |
| Cyclin_N | PF00134.13 | −14.7 | Cyclin, N-terminal domain |
| DAO | PF01266.12 | −35.9 | FAD dependent oxidoreductase |
| DNA_photolyase | PF00875.8 | 26.1 | DNA photolyase |
| DS | PF01916.7 | −95.2 | Deoxyhypusine synthase |
| DUF1242 | PF06842.1 | 25 | Protein of unknown function (DUF1242) |
| DUF1336 | PF07059.2 | −78.2 | Protein of unknown function (DUF1336) |
| DUF221 | PF02714.5 | 25 | Domain of unknown function DUF221 |
| DUF296 | PF03479.4 | −11 | Domain of unknown function (DUF296) |
| DZC | PF08381.1 | 15.3 | Disease resistance/zinc finger/chromosome |
| | | | condensation-like region |
| Dimerisation | PF08100.1 | 18.1 | Dimerisation domain |
| DnaJ | PF00226.19 | −8 | DnaJ domain |
| F-box | PF00646.21 | 13.6 | F-box domain |
| FAD_binding_4 | PF01565.12 | −8.1 | FAD binding domain |
| FAD_binding_6 | PF00970.13 | −11.4 | Oxidoreductase FAD-binding domain |
| FAD_binding_7 | PF03441.4 | 25 | FAD binding domain of DNA photolyase |
| FAE1_CUT1_RppA | PF08392.1 | −192.7 | FAE1/Type III polyketide synthase-like protein |
| FBD | PF08387.1 | 25 | FBD |
| Fasciclin | PF02469.10 | 4 | Fasciclin domain |
| GATase_2 | PF00310.10 | −106.2 | Glutamine amidotransferases class-II |
| GSHPx | PF00255.10 | −16 | Glutathione peroxidase |
| GST_N | PF02798.9 | 14.6 | Glutathione S-transferase, N-terminal domain |
| Globin | PF00042.11 | −8.8 | Globin |
| HALZ | PF02183.7 | 17 | Homeobox associated leucine zipper |
| HEAT_PBS | PF03130.5 | 15 | PBS lyase HEAT-like repeat |
| HLH | PF00010.15 | 8.2 | Helix-loop-helix DNA-binding domain |
| HSF_DNA-bind | PF00447.7 | −70 | HSF-type DNA-binding |
| HSP20 | PF00011.10 | 13 | Hsp20/alpha crystallin family |
| Homeobox | PF00046.18 | −4.1 | Homeobox domain |
| ICL | PF00463.10 | −234 | Isocitrate lyase family |
| Iso_dh | PF00180.10 | −97 | Isocitrate/isopropylmalate dehydrogenase |
| K-box | PF01486.7 | 0 | K-box region |
| KOW | PF00467.18 | 29.1 | KOW motif |
| LIM | PF00412.11 | 0 | LIM domain |
| LRR_2 | PF07723.2 | 6 | Leucine Rich Repeat |
| Lactamase_B | PF00753.16 | 24.6 | Metallo-beta-lactamase superfamily |
| MMR_HSR1 | PF01926.11 | 31.2 | GTPase of unknown function |
| Malic_M | PF03949.4 | −143.9 | Malic enzyme, NAD binding domain |
| Metallophos | PF00149.17 | 22 | Calcineurin-like phosphoesterase |
| Methyltransf_2 | PF00891.7 | −103.8 | O-methyltransferase |
| Miro | PF08477.1 | 28 | Miro-like protein |
| MtN3_slv | PF03083.5 | −0.8 | MtN3/saliva family |
| Myb_DNA-binding | PF00249.19 | 2.8 | Myb-like DNA-binding domain |
| NAD_binding_1 | PF00175.10 | −3.9 | Oxidoreductase NAD-binding domain |
| NAF | PF03822.4 | 4.5 | NAF domain |
| NPH3 | PF03000.4 | 25 | NPH3 family |
| Orn_Arg_deC_N | PF02784.7 | −76 | Pyridoxal-dependent decarboxylase, pyridoxal |
| | | | binding domain |
| Orn_DAP_Arg_deC | PF00278.12 | 6.7 | Pyridoxal-dependent decarboxylase, C-terminal |
| | | | sheet domain |
| PBP | PF01161.9 | −20.6 | Phosphatidylethanolamine-binding protein |
| PEP-utilizers | PF00391.12 | 10 | PEP-utilising enzyme, mobile domain |
| PEP-utilizers_C | PF02896.7 | −173 | PEP-utilising enzyme, TIM barrel domain |
| PFK | PF00365.10 | −132 | Phosphofructokinase |
| PHD | PF00628.17 | 25.9 | PHD-finger |
| PLDc | PF00614.11 | 0 | Phospholipase D Active site motif |
| PMEI | PF04043.5 | 25 | Plant invertase/pectin methylesterase inhibitor |
| PPDK_N | PF01326.8 | −87 | Pyruvate phosphate dikinase, PEP/pyruvate binding |
| | | | domain |
| Phi_1 | PF04674.2 | 25 | Phosphate-induced protein 1 conserved region |
| Pkinase | PF00069.14 | −70.8 | Protein kinase domain |
| Pkinase_Tyr | PF07714.5 | 65 | Protein tyrosine kinase |
| Pyridoxal_deC | PF00282.9 | −158.6 | Pyridoxal-dependent decarboxylase conserved |
| | | | domain |
| RMMBL | PF07521.1 | 18.5 | RNA-metabolising metallo-beta-lactamase |
| RNA_pol_L | PF01193.12 | 16.9 | RNA polymerase Rpb3/Rpb11 dimerisation domain |
| RRM_1 | PF00076.11 | 20.7 | RNA recognition motif. (a.k.a. RRM, RBD, or RNP |
| | | | domain) |
| RWP-RK | PF02042.5 | 25 | RWP-RK domain |
| Ras | PF00071.11 | −69.9 | Ras family |
| Redoxin | PF08534.1 | −1 | Redoxin |
| Ribosomal_L12 | PF00542.8 | 25 | Ribosomal protein L7/L12 C-terminal domain |
| Ribosomal_L14 | PF00238.9 | −8 | Ribosomal protein L14p/L23e |
| Ribosomal_L18p | PF00861.12 | 25 | Ribosomal L18p/L5e family |
| SRF-TF | PF00319.8 | 11 | SRF-type transcription factor (DNA-binding and |
| | | | dimerisation domain) |
| Sina | PF03145.6 | −48.4 | Seven in absentia protein family |
| Skp1 | PF01466.8 | −2 | Skp1 family, dimerisation domain |
| Skp1_POZ | PF03931.5 | 14.9 | Skp1 family, tetramerisation domain |
| Spermine_synth | PF01564.6 | −93.8 | Spermine/spermidine synthase |
| Suc_Fer-like | PF06999.2 | −42.4 | Sucrase/ferredoxin-like |
| TPP_enzyme_M | PF00205.11 | −23.9 | Thiamine pyrophosphate enzyme, central domain |
| TPP_enzyme_N | PF02776.7 | −70 | Thiamine pyrophosphate enzyme, N-terminal TPP |
| | | | binding domain |
| Transaldolase | PF00923.9 | −49 | Transaldolase |
| Tryp_alpha_amyl | PF00234.10 | −4 | Protease inhibitor/seed storage/LTP family |
| U-box | PF04564.5 | 10.5 | U-box domain |
| UIM | PF02809.10 | 4.1 | Ubiquitin interaction motif |
| UPF0005 | PF01027.11 | −6.7 | Uncharacterised protein family UPF0005 |
| UPF0057 | PF01679.7 | 25 | Uncharacterized protein family UPF0057 |
| WD40 | PF00400.20 | 21.5 | WD domain, G-beta repeat |
| X8 | PF07983.3 | −28.8 | X8 domain |
| eIF-5a | PF01287.9 | 9.6 | Eukaryotic initiation factor 5A hypusine, DNA- |
| | | | binding OB fold |
| efhand | PF00036.20 | 17.5 | EF hand |
| malic | PF00390.8 | 25 | Malic enzyme, N-terminal domain |
| p450 | PF00067.11 | −105 | Cytochrome P450 |
| peroxidase | PF00141.12 | −10 | Peroxidase |
| zf-A20 | PF01754.6 | 25 | A20-like zinc finger |
| zf-AN1 | PF01428.6 | 0 | AN1-like Zinc finger |
| zf-C3HC4 | PF00097.13 | 16.9 | Zinc finger, C3HC4 type (RING finger) |

### Example 10

### Selection of Transgenic Plants with Enhanced Agronomic Traits

[0128] This example illustrates identification of plant cells of the invention by screening transgenic plants and seeds for an enhanced trait. Transgenic seed and plants, e.g., with transgenic corn cells in the plants prepared in Example 2, transgenic soybean cells in the plants prepared in Example 3, transgenic cotton cells in the plants prepared in Example 4, and transgenic cells in the plants prepared in Example 6, are screened for enhanced water use efficiency, enhanced cold tolerance, increased yield, enhanced nitrogen use efficiency, enhanced seed protein and enhanced seed oil as compared to control plants.

### A. Selection for Enhanced Nitrogen Use Efficiency

[0129] The physiological efficacy of transgenic corn plants (tested as hybrids) can be tested for nitrogen use efficiency (NUE) traits in a high-throughput nitrogen (N) selection method. The collected data are compared to the measurements from wildtype controls using a statistical model to determine if the changes are due to the transgene. Raw data were analyzed by SAS software. Results shown herein are the comparison of transgenic plants relative to the wildtype controls.

### (1) Media Preparation for Planting a NUE Protocol

[0130] Planting materials used: Metro Mix 200 (vendor: Hummert) Cat. #10-0325, Scotts Micro Max Nutrients (vendor: Hummert) Cat. #07-6330, OS 4⅓″×3⅞″ pots (vendor: Hummert) Cat. #16-1415, OS trays (vendor: Hummert) Cat. #16-1515, Hoagland's macronutrients solution, Plastic 5″ stakes (vendor: Hummert) yellow Cat. #49-1569, white Cat. #49-1505, Labels with numbers indicating material contained in pots. Fill 500 pots to rim with Metro Mix 200 to a weight of ˜140 g/pot. Pots are filled uniformly by using a balancer. Add 0.4 g of Micro Max nutrients to each pot. Stir ingredients with spatula to a depth of 3 inches while preventing material loss.

### (2) Planting a NUE Selection in the Greenhouse

[0131] (a) Seed Germination—Each pot is lightly atered twice using reverse osmosis purified water. The first watering is scheduled to occur just before planting; and the second watering, after the seed has been planted in the pot. Ten Seeds of each entry (1 seed per pot) are planted to select eight healthy uniform seedlings. Additional wild type controls are planted for use as border rows. Alternatively, 15 seeds of each entry (1 seed per pot) are planted to select 12 healthy uniform seedlings (this larger number of plantings is used for the second, or confirmation, planting). Place pots on each of the 12 shelves in the Conviron growth chamber for seven days. This is done to allow more uniform germination and early seedling growth. The following growth chamber settings are 25° C./day and 22° C./night, 14 hours light and ten hours dark, humidity ˜80%, and light intensity ˜350 μmol/m²/s (at pot level). Watering is done via capillary matting similar to greenhouse benches with duration of ten minutes three times a day.

[0132] (b) Seedling transfer—After seven days, the best eight or 12 seedlings for the first or confirmation pass runs, respectively, are chosen and transferred to greenhouse benches. The pots are spaced eight inches apart (center to center) and are positioned on the benches using the spacing patterns printed on the capillary matting. The Vattex matting creates a 384-position grid, randomizing all range, row combinations. Additional pots of controls are placed along the outside of the experimental block to reduce border effects.

[0133] Plants are allowed to grow for 28 days under the low N run or for 23 days under the high N run. The macronutrients are dispensed in the form of a macronutrient solution (see composition below) containing precise amounts of N added (2 mM NH₄NO₃ for limiting N selection and 20 mM NH₄NO₃ for high N selection runs). Each pot is manually dispensed 100 ml of nutrient solution three times a week on alternate days starting at eight and ten days after planting for high N and low N runs, respectively. On the day of nutrient application, two 20 min waterings at 05:00 and 13:00 are skipped. The vattex matting should be changed every third run to avoid N accumulation and buildup of root matter. Table 12 shows the amount of nutrients in the nutrient solution for either the low or high nitrogen selection.

TABLE 12

| | 2 mM NH₄NO₃ | 20 mM NH₄NO₃ |
|---|---|---|
| | (Low Nitrogen | (high Nitrogen |
| | Growth Condition) | Growth Condition) |
| Nutrient Stock | mL/L | mL/L |
| 1 M NH₄N0₃ | 2 | 20 |
| 1 M KH₂PO₄ | 0.5 | 0.5 |
| 1 M MgSO₄ · 7H₂O | 2 | 2 |
| 1 M CaCl₂ | 2.5 | 2.5 |
| 1 M K₂SO₄ | 1 | 1 |

Note:
Adjust pH to 5.6 with HCl or KOH

[0134] (c) Harvest Measurements and Data Collection—After 28 days of plant growth for low N runs and 23 days of plant growth for high N runs, the following measurements are taken (phenocodes in parentheses): total shoot fresh mass (g) (SFM) measured by Sartorius electronic balance, V6 leaf chlorophyll measured by Minolta SPAD meter (relative units) (LC), V6 leaf area (cm²) (LA) measured by a Li-Cor leaf area meter, V6 leaf fresh mass (g) (LFM) measured by Sartorius electronic balance, and V6 leaf dry mass (g) (LDM) measured by Sartorius electronic balance. Raw data were analyzed by SAS software. Results shown are the comparison of transgenic plants relative to the wildtype controls.

[0135] To take a leaf reading, samples were excised from the V6 leaf. Since chlorophyll meter readings of corn leaves are affected by the part of the leaf and the position of the leaf on the plant that is sampled, SPAD meter readings were done on leaf six of the plants. Three measurements per leaf were taken, of which the first reading was taken from a point one-half the distance between the leaf tip and the collar and halfway from the leaf margin to the midrib while two were taken toward the leaf tip. The measurements were restricted in the area from ½ to ¾ of the total length of the leaf (from the base) with approximately equal spacing between them. The average of the three measurements was taken from the SPAD machine.

[0136] Leaf fresh mass is recorded for an excised V6 leaf, the leaf is placed into a paper bag. The paper bags containing the leaves are then placed into a forced air oven at 80° C. for 3 days. After 3 days, the paper bags are removed from the oven and the leaf dry mass measurements are taken.

[0137] From the collected data, two derived measurements are made: (1) Leaf chlorophyll area (LCA), which is a product of V6 relative chlorophyll content and its leaf area (relative units). Leaf chlorophyll area=leaf chlorophyll X leaf area. This parameter gives an indication of the spread of chlorophyll over the entire leaf area; (2) specific leaf area (LSA) is calculated as the ratio of V6 leaf area to its dry mass (cm²/g dry mass), a parameter also recognized as a measure of NUE.

### Nitrogen Use Field Efficacy Assay

[0138] Level I. Transgenic plants provided by the present invention are planted in field without any nitrogen source being applied. Transgenic plants and control plants are grouped by genotype and construct with controls arranged randomly within genotype blocks. Each type of transgenic plants are tested by 3 replications and across 5 locations. Nitrogen levels in the fields are analyzed in early April pre-planting by collecting 30 sample soil cores from 0-24″ and 24 to 48″ soil layer. Soil samples are analyzed for nitrate-nitrogen, phosphorus(P), Potassium(K), organic matter and pH to provide baseline values. P, K and micronutrients are applied based upon soil test recommendations.

[0139] Level II. Transgenic plants provided by the present invention are planted in field with three levels of nitrogen (N) fertilizer being applied, i.e. low level (0 N), medium level (80 lb/ac) and high level (180 lb/ac). Liquid 28% or 32% UAN (Urea, Ammonium Nitrogen) are used as the N source and apply by broadcast boom and incorporate with a field cultivator with rear rolling basket in the same direction as intended crop rows. Although there is no N applied to the 0 N treatment the soil should still be disturbed in the same fashion as the treated area. Transgenic plants and control plants are grouped by genotype and construct with controls arranged randomly within genotype blocks. Each type of transgenic plants is tested by 3 replications and across 4 locations. Nitrogen levels in the fields are analyzed in early April pre-planting by collecting 30 sample soil cores from 0-24″ and 24 to 48″ soil layer. Soil samples are analyzed for nitrate-nitrogen, phosphorus(P), Potassium(K), organic matter and pH to provide baseline values. P, K and micronutrients are applied based upon soil test recommendations.

### B. Selection for Increased Yield

[0140] Many transgenic plants of this invention exhibit improved yield as compared to a control plant. Improved yield can result from enhanced seed sink potential, i.e. the number and size of endosperm cells or kernels and/or enhanced sink strength, i.e. the rate of starch biosynthesis. Sink potential can be established very early during kernel development, as endosperm cell number and size are determined within the first few days after pollination.

[0141] Effective yield selection of enhanced yielding transgenic corn events uses hybrid progeny of the transgenic event over multiple locations with plants grown under optimal production management practices, and maximum pest control. A useful target for improved yield is a 5% to 10% increase in yield as compared to yield produced by plants grown from seed for a control plant. Selection methods may be applied in multiple and diverse geographic locations, for example up to 16 or more locations, over one or more plating seasons, for example at least two planting seasons to statistically distinguish yield improvement from natural environmental effects. It is to plant multiple transgenic plants, positive and negative control plants, and pollinator plants in standard plots, for example 2 row plots, 20 feet long by 5 feet wide with 30 inches distance between rows and a 3 foot alley between ranges. Transgenic events can be grouped by recombinant DNA constructs with groups randomly placed in the field. A pollinator plot of a high quality corn line is planted for every two plots to allow open pollination when using male sterile transgenic events. A useful planting density is about 30,000 plants/acre. High planting density is greater than 30,000 plants/acre, preferably about 40,000 plants/acre, more preferably about 42,000 plants/acre, most preferably about 45,000 plants/acre. Surrogate indicators for yield improvement include source capacity (biomass), source output (sucrose and photosynthesis), sink components (kernel size, ear size, starch in the seed), development (light response, height, density tolerance), maturity, early flowering trait and physiological responses to high density planting, for example at 45,000 plants per acre, for example as illustrated in Table 13 and 14.

TABLE 13

| Timing | Evaluation | Description | comments |
|---|---|---|---|
| V2-3 | Early stand | Can be taken any time after | |
| | | germination and prior to | |
| | | removal of any plants. | |
| Pollen | GDU to 50% | GDU to 50% plants shedding | |
| shed | shed | 50% tassel. | |
| Silking | GDU to 50% | GDU to 50% plants showing | |
| | silk | silks. | |
| Maturity | Plant height | Height from soil surface to | 10 plants per plot- |
| | | flag leaf attachment (inches). | Yield team assistance |
| Maturity | Ear height | Height from soil surface to | 10 plants per plot- |
| | | primary ear attachment node. | Yield team assistance |
| Maturity | Leaves above | visual scores: erect, size, | |
| | ear | rolling | |
| Maturity | Tassel size | Visual scores +/− vs. WT | |
| Pre- | Final Stand | Final stand count prior to | |
| Harvest | | harvest, exclude tillers | |
| Pre- | Stalk lodging | No. of stalks broken below | |
| Harvest | | the primary ear attachment. | |
| | | Exclude leaning tillers | |
| Pre- | Root lodging | No. of stalks leaning >45° | |
| Harvest | | angle from perpendicular. | |
| Pre- | Stay green | After physiological maturity | |
| Harvest | | and when differences among | |
| | | genotypes are evident: Scale | |
| | | 1 (90-100% tissue green)-9 | |
| | | (0-19% tissue green). | |
| Harvest | Grain Yield | Grain yield/plot (Shell | |
| | | weight) | |

TABLE 14

| Timing | Evaluation | Description |
|---|---|---|
| V8-V12 | Chlorophyll | |
| V12-VT | Ear leaf area | |
| V15-15DAP | Chl fluorescence | |
| V15-15DAP | CER | |
| 15-25 DAP | Carbohydrates | sucrose, starch |
| Pre-Harvest | 1st internode diameter | |
| Pre-Harvest | Base 3 internode diameter | |
| Pre-Harvest | Ear internode diameter | |
| Maturity | Ear traits | diameter, length, |
| | | kernel number, |
| | | kernel weight |

[0142] Electron transport rates (ETR) and CO2 exchange rates (CER): ETR and CER are measured with Li6400LCF (Licor, Lincoln, Nebr.) around V9-R1 stages. Leaf chlorophyll fluorescence is a quick way to monitor the source activity and is reported to be highly correlated with CO₂ assimilation under varies conditions (Photosyn Research, 37: 89-102). The youngest fully expanded leaf or 2 leaves above the ear leaf is measured with actinic light 1500 (with 10% blue light) micromol m⁻² s⁻¹, 28° C., CO2 levels 450 ppm. Ten plants are measured in each event. There are 2 readings for each plant.

[0143] A hand-held chlorophyll meter SPAD-502 (Minolta-Japan) is used to measure the total chlorophyll level on live transgenic plants and the wild type counterparts a. Three trifoliates from each plant are analyzed, and each trifoliate were analyzed three times. Then 9 data points are averaged to obtain the chlorophyll level. The number of analyzed plants of each genotype ranges from 5 to 8.

[0144] When selecting for yield improvement a useful statistical measurement approach comprises three components, i.e. modeling spatial autocorrelation of the test field separately for each location, adjusting traits of recombinant DNA events for spatial dependence for each location, and conducting an across location analysis. The first step in modeling spatial autocorrelation is estimating the covariance parameters of the semivariogram. A spherical covariance model is assumed to model the spatial autocorrelation. Because of the size and nature of the trial, it is likely that the spatial autocorrelation may change. Therefore, anisotropy is also assumed along with spherical covariance structure. The following set of equations describes the statistical form of the anisotropic spherical covariance model.

$$C ( h ; θ ) = vI ( h = 0 ) + {σ}^{2} ( 1 - \frac{3}{2} h + \frac{1}{2} {h}^{3} ) I ( h < 1 ) ,$$

where I(•) is the indicator function, h=\sqrt{\dot{x}²+\dot{y}²}, and

\dot{x}=[cos(ρπ/180)(x₁−x₂)−sin(ρπ/180)(y₁−y₂)]ωₓ

\dot{y}=[cos(ρπ/180)(x₁−x₂)−sin(ρπ/180)(y₁−y₂)]ω_{y}

where s₁=(x₁, y₁) are the spatial coordinates of one location and s₂=(x₂, y₂) are the spatial coordinates of the second location. There are 5 covariance parameters, θ=(ν, σ², ρ, ωₙ, ωⱼ), where ν is the nugget effect, σ² is the partial sill, ρ is a rotation in degrees clockwise from north, ωₙ is a scaling parameter for the minor axis and ωⱼ is a scaling parameter for the major axis of an anisotropical ellipse of equal covariance. The five covariance parameters that defines the spatial trend will then be estimated by using data from heavily replicated pollinator plots via restricted maximum likelihood approach. In a multi-location field trial, spatial trend are modeled separately for each location.

[0145] After obtaining the variance parameters of the model, a variance-covariance structure is generated for the data set to be analyzed. This variance-covariance structure contains spatial information required to adjust yield data for spatial dependence. In this case, a nested model that best represents the treatment and experimental design of the study is used along with the variance-covariance structure to adjust the yield data. During this process the nursery or the seed batch effects can also be modeled and estimated to adjust the yields for any yield parity caused by seed batch differences. After spatially adjusted data from different locations are generated, all adjusted data is combined and analyzed assuming locations as replications. In this analysis, intra and inter-location variances are combined to estimate the standard error of yield from transgenic plants and control plants. Relative mean comparisons are used to indicate statistically significant yield improvements.

### C. Selection for Enhanced Water Use Efficiency (WUE)

[0146] Described in this example is a high-throughput method for greenhouse selection of transgenic corn plants to wild type corn plants (tested as inbreds or hybrids) for water use efficiency and method for selection transgenic cotton plants for water use efficiency. This selection process imposes 3 drought/re-water cycles on plants over a total period of 15 days after an initial stress free growth period of 11 days. Each cycle consists of 5 days, with no water being applied for the first four days and a water quenching on the 5th day of the cycle. The primary phenotypes analyzed by the selection method are the changes in plant growth rate as determined by height and biomass during a vegetative drought treatment. The hydration status of the shoot tissues following the drought is also measured. The plant height is measured at three time points. The first is taken just prior to the onset drought when the plant is 11 days old, which is the shoot initial height (SIH). The plant height is also measured halfway throughout the drought/re-water regimen, on day 18 after planting, to give rise to the shoot mid-drought height (SMH). Upon the completion of the final drought cycle on day 26 after planting, the shoot portion of the plant is harvested and measured for a final height, which is the shoot wilt height (SWH) and also measured for shoot wilted biomass (SWM). The shoot is placed in water at 40 degree Celsius in the dark. Three days later, the shoot is weighted to give rise to the shoot turgid weight (STM). After drying in an oven for four days, the shoots are weighted for shoot dry biomass (SDM). The shoot average height (SAH) is the mean plant height across the 3 height measurements. The procedure described above may be adjusted for +/−˜one day for each step given the situation.

[0147] To correct for slight differences between plants, a size corrected growth value is derived from SIH and SWH. This is the Relative Growth Rate (RGR). Relative Growth Rate (RGR) is calculated for each shoot using the formula [RGR %=(SWH−SIH)/((SWH+SIH)/2)*100]. Relative water content (RWC) is a measurement of how much (%) of the plant was water at harvest. Water Content (RWC) is calculated for each shoot using the formula [RWC %=(SWM−SDM)/(STM−SDM)*100]. Fully watered corn plants of this age run around 98% RWC.

[0148] Progeny transgenic plants are selected from a population of transgenic cotton events under specified growing conditions and are compared with control cotton plants. Control cotton plants are substantially the same cotton genotype but without the recombinant DNA, for example, either a parental cotton plant of the same genotype that was not transformed with the identical recombinant DNA or a negative isoline of the transformed plant. Additionally, a commercial cotton cultivar adapted to the geographical region and cultivation conditions, i.e. cotton variety ST474, cotton variety FM 958, and cotton variety Siokra L-23, are used to compare the relative performance of the transgenic cotton plants containing the recombinant DNA. The specified culture conditions are growing a first set of transgenic and control plants under “wet” conditions, i.e. irrigated in the range of 85 to 100 percent of evapotranspiration to provide leaf water potential of −14 to −18 bars, and growing a second set of transgenic and control plants under “dry” conditions, i.e. irrigated in the range of 40 to 60 percent of evapotranspiration to provide a leaf water potential of −21 to −25 bars. Pest control, such as weed and insect control is applied equally to both wet and dry treatments as needed. Data gathered during the trial includes weather records throughout the growing season including detailed records of rainfall; soil characterization information; any herbicide or insecticide applications; any gross agronomic differences observed such as leaf morphology, branching habit, leaf color, time to flowering, and fruiting pattern; plant height at various points during the trial; stand density; node and fruit number including node above white flower and node above crack boll measurements; and visual wilt scoring. Cotton boll samples are taken and analyzed for lint fraction and fiber quality. The cotton is harvested at the normal harvest timeframe for the trial area. Enhanced water use efficiency is indicated by increased yield, improved relative water content, enhanced leaf water potential, increased biomass, enhanced leaf extension rates, and improved fiber parameters.

### D. Selection for Growth Under Cold Stress

[0149] (1) Cold germination assay—Three sets of seeds are used for the assay. The first set consists of positive transgenic events (F1 hybrid) where the genes of the present invention are expressed in the seed. The second seed set is nontransgenic, wild-type negative control made from the same genotype as the transgenic events. The third set consisted of two cold tolerant and one cold sensitive commercial check lines of corn. All seeds are treated with a fungicide “Captan” (MAESTRO® 80DF Fungicide, Arvesta Corporation, San Francisco, Calif., USA). 0.43 mL Captan is applied per 45 g of corn seeds by mixing it well and drying the fungicide prior to the experiment.

[0150] Corn kernels are placed embryo side down on blotter paper within an individual cell (8.9×8.9 cm) of a germination tray (54×36 cm). Ten seeds from an event are placed into one cell of the germination tray. Each tray can hold 21 transgenic events and 3 replicates of wildtype (LH244SDms+LH59), which is randomized in a complete block design. For every event there are five replications (five trays). The trays are placed at 9.7 C for 24 days (no light) in a Convrion growth chamber (Conviron Model PGV36, Controlled Environments, Winnipeg, Canada). Two hundred and fifty millilters of deionized water are added to each germination tray. Germination counts are taken 10th, 11th, 12th, 13th, 14th, 17th, 19th, 21st, and 24th day after start date of the experiment. Seeds are considered germinated if the emerged radicle size is 1 cm. From the germination counts germination index is calculated.

[0151] The germination index is calculated as per:

Germination index=(Σ([T+1−nᵢ]*[Pᵢ−Pᵢ₋₁]))/T

[0152] Where T is the total number of days for which the germination assay is performed. The number of days after planting is defined by n. “i” indicated the number of times the germination had been counted, including the current day. P is the percentage of seeds germinated during any given rating. Statistical differences are calculated between transgenic events and wild type control. After statistical analysis, the events that show a statistical significance at the p level of less than 0.1 relative to wild-type controls will advance to a secondary cold selection. The secondary cold screen is conducted in the same manner of the primary selection only increasing the number of repetitions to ten. Statistical analysis of the data from the secondary selection is conducted to identify the events that show a statistical significance at the p level of less than 0.05 relative to wild-type controls.

TABLE 15

| | | | Germination Index | | | |
|---|---|---|---|---|---|---|
| | | | 1st Run | | 2nd Run | |
| PEP SEQ | | | % | P | % | P |
| ID | CONSTRUCT | Event | Change | value | Change | value |
| 266 | PMON92840 | MON810, ZM_M106115 | 28 | 0.079 | 15 | 0.233 |
| | PMON92840 | MON810, ZM_M107208 | 58 | 0.000 | 24 | 0.049 |
| | PMON92840 | MON810, ZM_M107212 | 36 | 0.026 | 34 | 0.006 |
| | PMON92840 | MON810, ZM_M107214 | 53 | 0.001 | 26 | 0.035 |
| | PMON92840 | MON810, ZM_M107221 | 29 | 0.072 | −5 | 0.663 |
| | PMON92840 | MON810, ZM_M107224 | 60 | 0.000 | 35 | 0.004 |
| | PMON92840 | MON810, ZM_M107228 | 39 | 0.017 | 30 | 0.016 |
| 284 | PMON92854 | MON810, ZM_M103991 | 28 | 0.070 | 9 | 0.364 |
| | PMON92854 | MON810, ZM_M104002 | 35 | 0.025 | 8 | 0.412 |
| | PMON92854 | MON810, ZM_M105195 | 27 | 0.082 | 10 | 0.321 |
| | PMON92854 | MON810, ZM_M105213 | 30 | 0.060 | 21 | 0.033 |
| | PMON92854 | MON810, ZM_M105218 | 74 | 0.000 | 49 | 0.000 |
| | PMON92854 | MON810, ZM_M105267 | 43 | 0.006 | 28 | 0.004 |
| | PMON92854 | MON810, ZM_M106123 | −1 | 0.965 | 30 | 0.002 |

[0153] (2) Cold Shock assay—The experimental set-up for the cold shock assay is the same as described in the above cold germination assay except seeds were grown in potted media for the cold shock assay.

[0154] The desired numbers of 2.5″ square plastic pots are placed on flats (n=32, 4×8). Pots were filled with Metro Mix 200 soil-less media containing 19:6:12 fertilizer (6 lbs/cubic yard) (Metro Mix, Pots and Flat are obtained from Hummert International, Earth City, Mo.). After planting seeds, pots are placed in a growth chamber set at 23° C., relative humidity of 65% with 12 hour day and night photoperiod (300 uE/m2-min) Planted seeds are watered for 20 minute every other day by sub-irrigation and flats were rotated every third day in a growth chamber for growing corn seedlings.

[0155] On the 10^{th} day after planting the transgenic positive and wild-type negative (WT) plants are positioned in flats in an alternating pattern. Chlorophyll fluorescence of plants is measured on the 10^{th} day during the dark period of growth by using a PAM-2000 portable fluorometer as per the manufacturer's instructions (Walz, Germany). After chlorophyll measurements, leaf samples from each event are collected for confirming the expression of genes of the present invention. For expression analysis six V1 leaf tips from each selection are randomly harvested. The flats are moved to a growth chamber set at 5° C. All other conditions such as humidity, day/night cycle and light intensity are held constant in the growth chamber. The flats are sub-irrigated every day after transfer to the cold temperature. On the 4^{th} day chlorophyll fluorescence is measured. Plants are transferred to normal growth conditions after six days of cold shock treatment and allowed to recover for the next three days. During this recovery period the length of the V3 leaf is measured on the 1^{st} and 3^{th} days. After two days of recovery V2 leaf damage is determined visually by estimating percent of green V2 leaf.

[0156] Statistical differences in V3 leaf growth, V2 leaf necrosis and fluorescence during pre-shock and cold shock can be used for estimation of cold shock damage on corn plants.

[0157] (3) Early seedling growth assay—Three sets of seeds are used for the experiment. The first set consists of positive transgenic events (F1 hybrid) where the genes of the present invention are expressed in the seed. The second seed set is nontransgenic, wild-type negative control made from the same genotype as the transgenic events. The third seed set consists of two cold tolerant and two cold sensitive commercial check lines of corn. All seeds are treated with a fungicide “Captan”, (3a,4,7,a-tetrahydro-2-Rtrichloromethly)thiol-1H-isoindole-1,3(2H)-dione, Drex Chemical Co. Memphis, Tenn.). Captan (0.43 mL) was applied per 45 g of corn seeds by mixing it well and drying the fungicide prior to the experiment.

[0158] Seeds are grown in germination paper for the early seedling growth assay. Three 12″−18″ pieces of germination paper (Anchor Paper #SD7606) are used for each entry in the test (three repetitions per transgenic event). The papers are wetted in a solution of 0.5% KNO₃ and 0.1% Thyram.

[0159] For each paper fifteen seeds are placed on the line evenly spaced down the length of the paper. The fifteen seeds are positioned on the paper such that the radical would grow downward, for example longer distance to the paper's edge. The wet paper is rolled up starting from one of the short ends. The paper is rolled evenly and tight enough to hold the seeds in place. The roll is secured into place with two large paper clips, one at the top and one at the bottom. The rolls are incubated in a growth chamber at 23° C. for three days in a randomized complete block design within an appropriate container. The chamber is set for 65% humidity with no light cycle. For the cold stress treatment the rolls are then incubated in a growth chamber at 12° C. for twelve days. The chamber is set for 65% humidity with no light cycle.

[0160] After the cold treatment the germination papers are unrolled and the seeds that did not germinate are discarded. The lengths of the radicle and coleoptile for each seed are measured through an automated imaging program that automatically collects and processes the images. The imaging program automatically measures the shoot length, root length, and whole seedling length of every individual seedling and then calculates the average of each roll.

[0161] After statistical analysis, the events that show a statistical significance at the p level of less than 0.1 relative to wild-type controls will advance to a secondary cold selection. The secondary cold selection is conducted in the same manner of the primary selection only increasing the number of repetitions to five. Statistical analysis of the data from the secondary selection is conducted to identify the events that show a statistical significance at the p level of less than 0.05 relative to wild-type controls.

### (4). Cold Field Efficacy Trial

[0162] This example sets forth a cold field efficacy trial to identify gene constructs that confer enhanced cold vigor at germination and early seedling growth under early spring planting field conditions in conventional-till and simulated no-till environments. Seeds are planted into the ground around two weeks before local farmers are beginning to plant corn so that a significant cold stress is exerted onto the crop, named as cold treatment. Seeds also are planted under local optimal planting conditions such that the crop has little or no exposure to cold condition, named as normal treatment. The cold field efficacy trials are carried out in five locations, including Glyndon Minn., Mason Mich., Monmouth Ill., Dayton Iowa, Mystic Conn. At each location, seeds are planted under both cold and normal conditions with 3 repetitions per treatment, 20 kernels per row and single row per plot. Seeds are planted 1.5 to 2 inch deep into soil to avoid muddy conditions. Two temperature monitors are set up at each location to monitor both air and soil temperature daily.

[0163] Seed emergence is defined as the point when the growing shoot breaks the soil surface. The number of emerged seedling in each plot is counted everyday from the day the earliest plot begins to emerge until no significant changes in emergence occur. In addition, for each planting date, the latest date when emergence is 0 in all plots is also recorded. Seedling vigor is also rated at V3-V4 stage before the average of corn plant height reaches 10 inches, with 1=excellent early growth, 5=Average growth and 9=poor growth. Days to 50% emergence, maximum percent emergence and seedling vigor are calculated using SAS software for the data within each location or across all locations.

E. Screens for Transgenic Plant Seeds with Increased Protein and/or Oil Levels

[0164] This example sets forth a high-throughput selection for identifying plant seeds with improvement in seed composition using the Infratec 1200 series Grain Analyzer, which is a near-infrared transmittance spectrometer used to determine the composition of a bulk seed sample. Near infrared analysis is a non-destructive, high-throughput method that can analyze multiple traits in a single sample scan. An NIR calibration for the analytes of interest is used to predict the values of an unknown sample. The NIR spectrum is obtained for the sample and compared to the calibration using a complex chemometric software package that provides a predicted values as well as information on how well the sample fits in the calibration.

[0165] Infratec Model 1221, 1225, or 1227 with transport module by Foss North America is used with cuvette, item #1000-4033, Foss North America or for small samples with small cell cuvette, Foss standard cuvette modified by Leon Girard Co. Corn and soy check samples of varying composition maintained in check cell cuvettes are supplied by Leon Girard Co. NIT collection software is provided by Maximum Consulting Inc. Software. Calculations are performed automatically by the software. Seed samples are received in packets or containers with barcode labels from the customer. The seed is poured into the cuvettes and analyzed as received.

TABLE 16

| | |
|---|---|
| Typical sample(s): | Whole grain corn and soybean seeds |
| Analytical time to run method: | Less than 0.75 min per sample |
| Total elapsed time per run: | 1.5 minute per sample |
| Typical and minimum sample size: | Corn typical: 50 cc; minimum 30 cc |
| | Soybean typical: 50 cc; minimum 5 cc |
| Typical analytical range: | Determined in part by the specific |
| | calibration. |
| | Corn-moisture 5-15%, oil 5-20%, |
| | protein 5-30%, starch 50-75%, and |
| | density 1.0-1.3%. |
| | Soybean-moisture 5-15%, oil 15- |
| | 25%, and protein 35-50%. |

TABLE 17
Transgenic corn plants have an increased oil level in seeds

| | | | 2004 Data | | 2005 Data | |
|---|---|---|---|---|---|---|
| PEP SEQ | | | Oil | P | Oil | P |
| ID NO | Event | Construct | Delta | value | delta | value |
| 231 | ZM_S90572 | PMON17730 | 0.18 | 0.22 | 0.25 | 0.04 |
| | ZM_S90588 | PMON17730 | N/A | N/A | 0.10 | 0.33 |
| | ZM_S90610 | PMON17730 | N/A | N/A | −0.03 | 0.78 |
| | ZM_S90614 | PMON17730 | 0.26 | 0.08 | 0.47 | 0.00 |
| | ZM_S90622 | PMON17730 | −0.03 | 0.82 | 0.31 | 0.00 |

TABLE 18
Transgenic corn plants have an increased protein level in seeds

| | | | 1st Inbred protein trial | | | | 2nd Inbred protein trial | | | |
|---|---|---|---|---|---|---|---|---|---|---|
| PEP SEQ | | | Mean | Mean | | | Mean | Mean | | |
| ID NO | Construct | Event | transgenic | control | Delta | Pvalue | transgenic | control | Delta | Pvalue |
| 208 | PMON92607 | ZM_M106133 | 14.06 | 10.39 | 3.67 | 0 | 11.91 | 10.06 | 1.84 | 0.0023 |
| | | ZM_M106129 | 16.46 | 10.39 | 6.07 | 0 | 16.00 | 10.06 | 5.94 | 0 |
| | | ZM_M105269 | 15.80 | 10.39 | 5.41 | 0 | 14.89 | 10.06 | 4.83 | 0 |
| | | ZM_M105268 | 14.07 | 10.39 | 3.67 | 0 | 12.81 | 10.06 | 2.74 | 0 |
| | | ZM_M104742 | 12.57 | 10.39 | 2.18 | 0.0064 | 12.52 | 10.06 | 2.46 | 0 |
| | | ZM_M104740 | 14.45 | 10.39 | 4.06 | 0 | 12.93 | 10.06 | 2.86 | 0 |
| | | ZM_M104403 | 12.90 | 10.39 | 2.51 | 0.0017 | 12.60 | 10.06 | 2.53 | 0 |
| | | ZM_M104399 | 13.21 | 10.39 | 2.82 | 0.0004 | 14.04 | 10.06 | 3.98 | 0 |
| | | ZM_M104398 | 14.91 | 10.39 | 4.51 | 0 | 12.79 | 10.06 | 2.73 | 0 |
| | | ZM_M104396 | 12.13 | 10.39 | 1.74 | 0.0289 | 12.90 | 10.06 | 2.83 | 0 |
| | | ZM_M104385 | 13.12 | 10.39 | 2.72 | 0.0007 | 12.89 | 10.06 | 2.82 | 0 |
| | | ZM_M104371 | 12.23 | 10.39 | 1.83 | 0.0213 | 12.18 | 10.06 | 2.12 | 0.0004 |
| | | ZM_M104369 | 13.41 | 10.39 | 3.01 | 0.0002 | 11.35 | 10.06 | 1.29 | 0.0309 |
| | | ZM_M103621 | 12.26 | 10.39 | 1.86 | 0.0191 | 10.76 | 10.06 | 0.69 | 0.2425 |
| | | ZM_M106138 | 13.74 | 10.39 | 3.35 | 0 | 13.34 | 10.06 | 3.28 | 0 |

TABLE 19
Transgenic soybean plants have an increased seed oil level

| | | | | seed oil content | | | seed protein content | | |
|---|---|---|---|---|---|---|---|---|---|
| PEP SEQ | | | | control | transgenic | | control | transgenic | |
| ID NO | construct | event | run | mean | mean | delta | mean | mean | delta |
| 231 | PMON94697 | construct | 1 | 20.0 | 19.7 | −0.3 | 42.0 | 42.9 | 0.9 |
| | | analysis | | | | | | | |
| | | | 2 | 19.6 | 20.2 | 0.6* | 43.3 | 43.6 | 0.3 |
| | | | 3 | 19.9 | 20.6 | 0.7* | 42.5 | 43.1 | 0.6 |
| | | GM_A79833 | 1 | 20.2 | 19.7 | −0.3 | 42.0 | 42.9 | 0.9 |
| | | | 2 | 19.6 | 19.9 | 0.3 | 43.3 | 43.5 | 0.2 |
| | | GM_A79838 | 2 | 19.6 | 19.8 | 0.2 | 43.3 | 45.2 | 1.9* |
| | | GM_A79839 | 2 | 19.6 | 20.4 | 0.8* | 43.3 | 43.7 | 0.4 |
| | | GM_A79857 | 2 | 19.6 | 19.9 | 0.3 | 43.3 | 43.7 | 0.4 |
| | | GM_A79859 | 2 | 19.6 | 20.6 | 1.0* | 43.3 | 43.7 | −0.6 |
| | | GM_A79894 | 2 | 19.6 | 20.4 | 0.8* | 43.3 | 43.1 | −0.2 |
| | | GM_A79896 | 2 | 19.6 | 19.8 | 0.2 | 43.3 | 44.4 | 1.1* |
| | | GM_A79914 | 2 | 19.6 | 20.9 | 1.3* | 43.3 | 42.7 | −0.6 |
| | | | 3 | 19.9 | 20.6 | 0.7 | 42.5 | 43.4 | 0.9 |
| | | GM_A79934 | 3 | 19.9 | 20.3 | 0.4* | 42.5 | 43.3 | 0.8* |
| | | GM_A79936 | 3 | 19.9 | 21.0 | 1.1* | 42.5 | 42.5 | 0.0 |

Data point with “*”indicate a statistically significant delta (the difference between transgenic and control plants).
Seed protein or oil is measured as a percentage of total seed composition.

1. (canceled)

2. A plant cell with stably integrated, recombinant DNA comprising a promoter that is functional in plant cells and that is operably linked to DNA from a plant, bacteria or yeast that encodes a protein having at least one domain of amino acids in a sequence that exceeds the Pfam gathering cutoff for amino acid sequence alignment with a protein domain family identified by a Pfam name wherein the Pfam gathering cutoff for said protein domain families is 15; wherein said plant cell is selected from a population of plant cells with said recombinant DNA by screening plants that are regenerated from plant cells in said population and that express said protein for an enhanced trait as compared to control plants that do not have said recombinant DNA; and wherein said enhanced trait is enhanced water use efficiency, or increased yield.

3. A plant cell of claim 2 wherein said protein has an amino acid sequence with at least 90% identity to SEQ ID NO: 249.

4. A plant cell of claim 2 wherein said protein is phycocyanin alpha phycocyanobilin lyase.

5. A plant cell of claim 2 further comprising DNA expressing a protein that provides tolerance from exposure to an herbicide applied at levels that are lethal to a wild type of said plant cell.

6. A plant cell of claim 5 wherein the agent of said herbicide is a glyphosate, dicamba, or glufosinate compound.

7. A transgenic plant comprising a plurality of the plant cell of claim 2

8. A transgenic plant of claim 7 which is homozygous for said recombinant DNA.

9. A transgenic seed comprising a plurality of the plant cell of claim 2.

10. A transgenic seed of claim 9 from a corn, soybean, cotton, canola, alfalfa, wheat or rice plant.

11. A transgenic pollen grain comprising a haploid derivative of a plant cell of claim 2.

12. A method for manufacturing non-natural, transgenic seed that can be used to produce a crop of transgenic plants with an enhanced trait resulting from expression of stably-integrated, recombinant DNA comprising a promoter that is (a) functional in plant cells and (b) is operably linked to DNA from a plant, bacteria or yeast that encodes a protein having at least one domain of amino acids in a sequence that exceeds the Pfam gathering cutoff for amino acid sequence alignment with a protein domain family identified by a Pfam name;
wherein the gathering cutoff for said protein domain families is 15; and wherein said enhanced trait is enhanced water use efficiency or increased yield, said method for manufacturing said seed comprising:
(a) screening a population of plants for said enhanced trait and said recombinant DNA, wherein individual plants in said population can exhibit said trait at a level less than, essentially the same as or greater than the level that said trait is exhibited in control plants which do not express the recombinant DNA,
(b) selecting from said population one or more plants that exhibit the trait at a level greater than the level that said trait is exhibited in control plants,
(c) verifying that said recombinant DNA is stably integrated in said selected plants,
(d) analyzing tissue of a selected plant to determine the production of a protein having the function of a protein encoded by nucleotides in a sequence of SEQ ID NO: 56; and
(e) collecting seed from a selected plant.

13. A method of claim 12 wherein plants in said population further comprise DNA expressing a protein that provides tolerance to exposure to an herbicide applied at levels that are lethal to wild type plant cells, and wherein said selecting is effected by treating said population with said herbicide.

14. A method of claim 13 wherein said herbicide comprises a glyphosate, dicamba, or glufosinate compound.

15. A method of claim 12 wherein said selecting is effected by identifying plants with said enhanced trait.

16. A method of claim 12 wherein said seed is corn, soybean, cotton, alfalfa, wheat or rice seed.

17. A method of producing hybrid corn seed comprising:
acquiring hybrid corn seed from a herbicide tolerant corn plant which also has stably-integrated, recombinant DNA comprising a promoter that is (a) functional in plant cells and (b) is operably linked to DNA that encodes a protein having at least one domain of amino acids in a sequence that exceeds the Pfam gathering cutoff for amino acid sequence alignment with a protein domain family identified by a Pfam name;
(a) wherein the gathering cutoff for said protein domain families is 15;
(b) producing corn plants from said hybrid corn seed, wherein a fraction of the plants produced from said hybrid corn seed is homozygous for said recombinant DNA, a fraction of the plants produced from said hybrid corn seed is hemizygous for said recombinant DNA, and a fraction of the plants produced from said hybrid corn seed has none of said recombinant DNA;
(c) selecting corn plants which are homozygous and hemizygous for said recombinant DNA by treating with an herbicide;
(d) collecting seed from herbicide-treated-surviving corn plants and planting said seed to produce further progeny corn plants;
(e) repeating steps (c) and (d) at least once to produce an inbred corn line;
(f) crossing said inbred corn line with a second corn line to produce hybrid seed.

18. A method of selecting a plant comprising cells of claim 2 wherein an immunoreactive antibody is used to detect the presence of said protein in seed or plant tissue.

19. Anti-counterfeit milled seed having, as an indication of origin, a plant cell of claim 2.

20. A method of growing a corn, cotton or soybean crop without irrigation water comprising planting seed having plant cells of claim 2 which are selected for enhanced water use efficiency.

The application's sequence listing, which the Patent Office published only in electronic form, follows.

SEQUENCE LISTING (12604 sequences)

SEQ ID NO: 1 - DNA, 2908 bp, Artificial Sequence
  synthetic Sequence
atgatcgtgcaacccatcgagctacgcgcgtggactgccttccctgggtcggcgcaggaggggatcggaaggatggcggcgtcggtttccagggccatctgcgttcagaagccgggctcaaaatgcaccagggacagggaagcgacctccttcgcccgccgatcggtcgcagcgccgaggcccccgcacgccaaagccgccggcgtcatccgctccgactccggcgcgggacggggccagcattgctcgccgctgagggccgtcgttgacgccgcgccgatacagacgaccaaaaagagggtgttccacttcggcaagggcaagagcgagggcaacaagaccatgaaggaactgctgggcggcaagggcgcgaacctggcggagatggcgagcatcgggctgtcggtgccgccggggttcacggtgtcgacggaggcgtgccagcagtaccaggacgccgggtgcgccctccccgcggggctctgggccgagatcgtcgacggcctgcagtgggtggaggagtacatgggcgccaccctgggcgatccgcagcgcccgctcctgctctccgtccgctccggcgccgccgtgtccatgcccggcatgatggacacggtgctcaacctggggctcaacgacgaagtggccgccgggctggcggccaagagcggggagcgcttcgcctacgactccttccgccgcttcctcgacatgttcggcaacgtcgtcatggacatcccccgctcactgttcgaagagaagcttgagcacatgaaggaatccaaggggctgaagaacgacaccgacctcacggcctctgacctcaaagagctcgtgggtcagtacaaggaggtctacctctcagccaagggagagccattcccctcagaccccaagaagcagctggagctagcagtgctggctgtgttcaactcgtgggagagccccagggccaagaagtacaggagcatcaaccagatcactggcctcaggggcaccgccgtgaacgtgcagtgcatggtgttcggcaacatggggaacacttctggcaccggcgtgctcttcactaggaaccccaacaccggagagaagaagctgtatggcgagttcctggtgaacgctcagggtgaggatgtggttgccggaataagaaccccagaggaccttgacgccatgaagaacctcatgccacaggcctacgacgagcttgttgagaactgcaacatcctggagagccactataaggaaatgcaggatatcgagttcactgtccaggaaaacaggctgtggatgttgcagtgcaggacagggaaacgtacgggcaaaagtgccgtgaagatcgccgtggacatggttaacgagggccttgttgagccccgctcagcgatcaagatggtagagccaggccacctggaccagcttctccatcctcagtttgagaacccgtcggcgtacaaggatcaagtcattgccactggtctgccagcctcacctggggctgctgtgggccaggttgtgttcactgctgaggatgctgaagcatggcattcccaagggaaagctgctattctggtaagggcggagaccagccctgaggacgttggtggcatgcacgctgctgtggggattcttacagagaggggtggcatgacttcccacgctgctgtggtcgcacgtgggtgggggaaatgctgcgtctcgggatgctcaggcattcgcgtaaacgatgcggagaagctcgtgacgatcggaggccatgtgctgcgcgaaggtgagtggctgtcgctgaatgggtcgactggtgaggtgatccttggaaagcagccgctttccccaccagcccttagtggcgatctgggaactttcatggcctgggtggatgatgttagaaagctcaaggtcctggctaacgccgatacccctgatgatgcattgactgcgcgaaacaatggggcacaaggaattggattatgccggacagagcacatgttctttgcttcagacgagaggattaaggctgtcaggcagatgattatggctcccacgcttgagctgaggcagcaggcgctcgaccgtctcttgccgtatcagaggtctgacttcgaaggcattttccgtgctatggatggactcccggtgaccatccgactcctggaccctcccctccacgagttccttccagaagggaacatcgaggacattgtaagtgaattatgtgctgagacgggagccaaccaggaggatgccctcgcgcgaattgaaaagctttcagaagtaaacccgatgcttggcttccgtgggtgcaggcttggtatatcgtaccctgaattgacagagatgcaagcccgggccatttttgaagctgctatagcaatgaccaaccagggtgttcaagtgttcccagagataatggttcctcttgttggaacaccacaggaactggggcatcaagtgactcttatccgccaagttgctgagaaagtgttcgccaatgtgggcaagactatcgggtacaaagttggaacaatgattgagatccccagggccgcgctcattgcagatgagattgcgaaagaggcggagtttttctcgttcgggacaaacgacttgacgcagatgacgtttggatacagtagagacgatgtcggcaagtttctaccgatttacctcgccaaaggaatcttacagcacgacccttttgaggttcttgatcagcaaggtgtagggcaattgatcaagatggcgacagaaaaaggacgagcagctaggcctagcctcaaggttgggatatgtggagaacatggaggagatccatcttctgtgggattctttgctgaagcaggacttgactatgtctcttgttctcctttcagggttccaattgcaaggcttgcagctgctcaagtag

SEQ ID NO: 2 - DNA, 2908 bp, Artificial Sequence; identical to SEQ ID NO: 1
  synthetic Sequence

SEQ ID NO: 3 - DNA, 777 bp, Zea mays
tacgtcctggacagggagctcggccgcggggagttcggggtcacgtacctgtgtatggatcgggacaccaaggagctgctcgcctgcaagtccatctccaagcgcaagctgcggacggccgtcgacgtggaggacgtgcgccgggaggtggccatcatgcgccacctgcccaagagccccagcgtcgtgtccctgcgggaggcgtgcgaggacgacggcgccgtccacctcgtcatggagctctgcgagggcggcgagctcttcgaccgcatcgtcgcgcggggccactacaccgagcgcgccgccgccagtgtcacccgcaccatcctcgaggtcgtccagctctgccaccgccacggcgtcatccaccgcgacctcaagccggagaacttcctcttcgccaataagaaggagaactcgccgctcaaggccatcgacttcggtctctccatcttcttcaagcctggtgaaaagttttcagaaattgtgggaagcccctattacatggctcctgaagtattgaagagaaactatgggccagaaatagacatatggagtgcgggagttatcctgtatattttattatgtggagtccctccattttgggctgagactgaacaaggggtggcgcaggctattcttcgtggaaatatcgattttaagcgggaaccctggcctaatgtttcggaaaatgcaaaagatttagttcgacacatgttggagcctgatccaaagctcaggctaactgcaaagcaggttcttgaacatcattggctt

SEQ ID NO: 4 - DNA, 777 bp, Zea mays
tacgagctgggcggcgagctgggccgcggcgagttcggcgtcacgtacctgtgcacggagtccgccacgggggcgcgctacgcgtgcaagtccatctccaagcgcaagctgcgcacgcccgtggacgtggaggacgtgcgccgggaggtggacatcatgcgccacatgccgccgcaccccaacatcgtcagcctccgcgccgcctacgaggacgaggacgccgtgcacctcgtcatggagctctgcgagggaggcgagctcttcgacaggatcgtcgcccggggccactacaccgagcgcgccgccgccgccgtcacgcgcaccatcgtcgaggtcgtccagatgtgccacaggcatggcgtcatgcaccgggatcttaaaccagagaactttttatatgcaaacaagaaggagagttcccctctgaaagcaatcgattttgggctgtcagtgttcttcaggcctggtgagcgatttactgaaatcgtaggcagtccatactacatggctccagaggttctaaagcgaaactatggccctgaagttgatgtttggagtgctggagtgatactttacatacttctctgtggtgtaccaccattttgggcagaaactgaacagggagtagcacaggcaattatacgatctgtggtagatttcaaaagagaaccatggcccagagtatctgagcctgctaaagatcttgtcaggcggatgctggacccaaatccattgacacggtttactgcagcacaagtacttgagcatccatggtta

SEQ ID NO: 5 - DNA, 777 bp, Glycine max
tatacaataggtaaagagctagggagaggccaatttggtgtcacacatttgtgcacaaacaaagccacggggcaacaatttgcatgcaaaacaattgcaaagaggaagcttgtgaacaaggaggacatagaggacgtgagaagagaggttcaaatcatgcaccatctctcgggtcaacctaacattgtggaacttaagggtgcatatgaggacaaacaatcggtgcatttggtcatggaactttgtgcgggtggtgagctttttgatcgtataattgctaagggacattacactgaacgtgccgcggcttcgttgttaagaaccataatgcaaattattcacactttccactccatgggtgtcattcatagagatcttaagcccgaaaatttcctcatgttgaataaggatgaaaattcacccgtcaaggctacggattttggtctatcagtttttttcaaagaaggagagacgttcaaagacattgttggaagtgcatattacattgctcctgaagtcttgaagaggaaatatgggccagaagttgacatatggagtgttggtgtcatgctatacattcttctaagtggtgtccctccgttttgggcagaatccgaacatggtatattcaatgccatcctaagaggccacgttgattttacaagcgatccatggccttcattgtccagtgcagcaaaggatcttgtaaggaaaatgttgaccacagaccccaaacaaagactgacagcacaagaagttttaaatcatccttggatc

SEQ ID NO: 6 - DNA, 778 bp, Glycine max
ttcactcttgggagaaaacttggacagggtcagttcgggacaacgttcttgtgcgtggaaaaggcaacagggctggagtgcgcctgcaaatctattgcaaagaggaagctcgtcaccgatgatgatgtcgaggatgtgagaagagaaattcagataatgcaccacttggccgggcatcctaatgttatatccatcaaaggtgcatatgaggatgccgtggctgttcatgttgtgatggaattatgtgcaggtggagagcttttcgataggattattcagcgtggccattataccgagagacaggcagccaagcttactaagactatagttggcgttgtggaagcttgccattctcttggtgtgatgcacagagaccttaaacctgagaattttctctttgtcaatcagcacgaggattcccttctcaaaaccattgactttggattatctgtcttctttaagccaggtgatatatttaatgatgtggtgggcagcccatactatgttgccccggatgttttgcgaaagcgttatggtcctgaggcagatgtttggagtgctggtgttatcctttacattcttttgagtggagtacctccattttgggctgaaaacgaacaaggaatatttgaacaagttctgcgtggtgatcttgacttttcttctgatccctggccttcaatttctgaaagtgcaaaagatttagtaagaaaaatgcttgttcgcgaccctagaaggcggttgactgcacatcaagtattatgtcatccttggattc

SEQ ID NO: 7 - DNA, 1383 bp, Oryza sativa
atggagaagaaggcgtccatcctcatgaaccggtatgagctcggccgcatgctcgggcaaggcaccttcgccaaggtgtaccatgcacggaaccttgcatccaaccagagcgtcgccatcaaggtcattgacaaggaaaaggtattgcgtgtcggcatgattgaccagatcaagcgagagatctccatcatgcgcctcgttcgccaccccaacatcgtccagctgcacgaggtcatggccagcaagagcaagatatactttgcaatggagtatgtccggggtggtgagctcttcagcagggtagccagggggcgactcaaggaggatgctgcgaggaagtacttccagcagttgataggggctgtggacttctgtcacagccgcggtgtctaccaccgagacctcaagccagagaacctcctcgtcgacgagaatggcaacctcaaagtgtcggactttgggctgagcgccttcaaggagtgtcagaagcaggacgggctgctccacacgacgtgtggcacacctgcatatgttgcaccagagataatcaataagaggggctatgatggagcaaaagcagacatatggtcttgcggtgtcatactctttgttctgcttgctggctacctcccattccatgactcaaatctaatggagatgtaccggaagataagcaaaggtgatgtcaagttcccacagtggttcactactgatgtccgaaggcttctgtccaggctgcttgatccaaatccaaacattaggatcaccgttgagaagctagttgagcatccatggttcaagaaggggtacaaaccagcagtgatgctatcacagccaaatgaatcaaacaacctcaaggatgtccatactgctttcagtgctgatcacaaggacaatgaaggcaaggcaaaagaaccagcaagctctttgaagccagtgagcttgaatgcatttgacatcatctccctctccaaaggatttgatctgtcaggcctgtttgagaacgacaaagagcagaaggcagactcacggttcatgacacaaaaaccagcatcagcaatagtgtcaaagctagagcagattgctgagacagagagcttcaaggtgaagaagcaggatggactggtgaagctccagggatccaaagaagggaggaaagggcagctcgcgatcgatgcagagatctttgaagtgacaccatccttctttgttgttgaggtgaagaagtctgcaggggacacgttggagtacgaaaaattctgcaacaagggcctaagaccttctctcagggacatctgctgggatggtcagtcagagcatccatcactggcacagtcatcaactctgactcagtcctctaagtcaatctcgagacatgccatt

SEQ ID NO: 8 - DNA, 816 bp, Oryza sativa
atgcttctcggtcgatcctttgaagtacacctccttgatcttgttgtagcacccgagggtcaacagcgagtcagagccggcctggtggcaggtccccacacgcttgacatcaagaagctcaccgagcctgctcaggccgccgtggaggttgctgcagaacctcatgaggtgcttgatgtcgtagagcaccgggaagtagattctgatgaggtcaaagaaggcgggcatgttgtccggcaggttccggccggtgagcagcctgagcaggtaaccgaagtcgtacccgctgtggaaggtgatccactgcacgtcggcgttgagcacgacgcccgacgacatgagcagctcggcgaagcggatcgggtcggccccctcagcggcgaaccgatcgaagtcgatgccgcaggtgcggagcatctggatggagtcggcgttggacgggtcggtccgggggtcgaacccgcggaagttgaactgccagatgcagcgcctgccccccgtcccccgccgcgggaggtcgccgccctcgtcggagagggtgaggccgagctggatgagcttgagcatgttgacgttggcctcgaggttggcgtagttgaactcgtcggtggtgcggaagttgccgacggggcggcacacgatgcccgggaactccgtgtccatggcgacgtacgggtaccggtcgacctcgtcgcggatcgccgcgatctccgcctccaggttccccgcccatacctcccggatctccacgccctcgtcggggctctctacgcaggctgcggcggcggcggccatcggcgcatccagccgacctag

SEQ ID NO: 9 - DNA, 1785 bp, Zea mays
cggcatcatgtgtggcatcttagccgtgctcggttgctccgactggtctcaggcaaagagggctcgcatcctcgcctgctccagaaggttgaagcacaggggccccgactggtcgggcctttaccagcacgagggcaacttcctggcgcagcagcggctcgccgtcgtctccccgctgtccggcgaccagccgctgttcaacgaggaccgcaccgtcgtggtggtggccaatggagagatctacaaccacaagaacgtccggaagcagttcaccggcacacacaacttcagcacgggcagtgactgcgaggtcatcatgcccctgtacgagaagtacggcgagaacttcgtggacatgctggacggggtgttcgcgttcgtgctctacgacacccgcgacaggacctacgtggcggcgcgcgacgccatcggcgtcaacccgctctacatcggctggggcagtgacggttccgtctggatcgcgtccgagatgaaggcgctgaacgaggactgcgtgcgcttcgagatcttcccgccgggccacctctactccagcgccggcggcgggttccggcggtggtacaccccgcactggttccaggagcaggtgccccggacgccgtaccagccgctcgtcctcagagaggccttcgagaaggcggtcatcaagaggctcatgactgacgtcccgttcggggtcctcctctccggcggcctcgactcctcgctagtcgcctccgtcaccaagcgccacctcgtcgagaccgaggccgccgagaagttcggcaccgagctccactcctttgtcgtcggcctcgagggctcccctgacctgaaggccgcacgagaggtcgctgactacctcggaaccatccatcacgagttccacttcaccgtacaggacggcatcgacgcgatcgaggaggtgatctaccacgacgagacgtacgacgtgacgacgatccgggccagcacgcccatgttcctgatggctcgcaagatcaagtcgctgggcgtgaagatggtgctgtccggggagggctccgacgagctcctgggcggctacctctacttccacttcgcccccaacaaggaggagttccacagggagacctgccgcaaggtgaaagccctgcaccagtacgactgcctgcgcgccaacaaggccacgtcggcgtggggcctggaggtccgcgtgccgttcctcgacaaggagttcatcaacgtcgccatgggcatggaccccgaatggaaaatgtacgacaagaacctgggccgcatcgagaagtgggtcatgaggaaggcgttcgacgacgacgagcacccttacctgcccaagcatattctctaccggcagaaagaacagttcagtgacggcgttggctacaactggatcgatggccttaaatccttcactgaacagcaggtgacggatgagatgatgaacaacgccgcccagatgttcccctacaacacgcccgtcaacaaggaggcctactactaccggatgatattcgagaggctcttccctcaggactcggcgagggagacggtgccgtggggcccgagcatcgcctgcagcacgcccgcggccatcgagtgggtggagcagtggaaggcctccaacgacccctccggccgcttcatctcctcccacgactccgccgccaccgaccacaccggcggtaagccggcggtggccaacggcggcggccacggcgcggcgaacggcacggtcaacggcaaggacgtcgcagtcgcgatcgcggtctgacgagagtacgt

SEQ ID NO: 10 - DNA, 1599 bp, Oryza sativa
atggcggcgatttacctgctgatcgccgcgctgatcgcctcctcccatgcactcgccgcgcatggcgccggcggcggcgttccgttggcggcggcggcgcctctcccgttccccggcgacctcgccgcgtccggcaagctccggaccgacccgaacgccaccgtgccggcgtcgatggacttcggcaacatcacggcggcgctgccggcggccgtgctgttcccgggctcccccggcgacgtggcggagctcctgcgcgccgcctacgccgccccggggcggccgttcaccgtctcgttccgcggccgcggccactccaccatgggccaggccctcgccgccggcggcgtcgtcgtccacatgcagtccatgggcggcggcggcgcgccgcggatcaacgtgtcggcggacggcgcgtacgtggacgccggcggcgagcagctgtgggtcgacgtgctccgcgccgcgctggcgcgcggcgtggcgccgcggtcgtggacggactacctccacctcaccgtcggcggcaccctctccaacgccggcgtcagcgggcagacttaccggcacgggccacagatctccaacgtgctcgagctcgacgtcatcaccgggcatggcgagacggtgacgtgctccaaggcggtcaactcggacctgttcgacgccgtcctgggcgggctgggccagttcggcgtgatcacgcgcgcgcgcgtcgccgtcgagccggcgccggcgcgggcgcggtgggtgcgcctcgtgtacgccgacttcgccgccttctccgccgaccaggagcgcctcgtcgcggcgcggcccgacgggtcgcacgggccatggagctacgtggagggcgcggtgtaccttgccggccgcggcctcgccgtggcgctcaagagctccggcgggttcttctccgacgccgacgccgcgcgcgtcgtcgcgctcgccgcggcgaggaacgccaccgccgtgtacagcatcgaggcgacgctcaactacgccgcgaacgcgacgccgtcgtccgtggacgcggcggtggcggcggcgctcggcgatctccacttcgaggaggggttctccttctcccgcgacgtcacctacgaggagttcctcgaccgggtgtacggcgaggaggaggccctcgagaaggccgggctatggcgcgtcccgcacccgtggctcaacctgttcgtcccgggctcccgcatcgccgacttcgaccgcggcgtcttcaagggcatcctccagacggccaccgacatcgccggacctctcatcatctaccccgtcaacaaatccaagtgggatgcggcgatgtcggcggtgacgccggagggggaggaggaggtgttctacgtggtgtcgctgctgttctcggcggtggcgaacgacgtggcggcgctggaggcgcagaacaggaggatactgaggttctgcgacctcgccgggatcgggtacaaggcgtacctggcgcactacgacagccgcggcgactgggtgaggcattttggcgccaaatgggatcgcttcgtgcagaggaaggacaagtacgaccccaagaagctgctctcccctggccaggacatcttcaactag

SEQ ID NO: 11 - DNA, 221 bp, Glycine max
atggctgactcggatcgctcttctagtgaaatttctacacattctactgattcagggaagcgagggtcttccaaagttgaattttctgaagatgaggaaactcttatcatcaggatgtataaactggtaggggagaggtggtctttaattgctggaaggattcctggaagaacagcagaggaaatagagaagtattggacttcaagattctcaggttctag

SEQ ID NO: 12 - DNA, 1539 bp, Zea mays
atggcgacgtgcgcgacggacctggcgccgctgctgggcccggcggcggcgaacgccacaggctacctctgcagccagttcgcggacacggcctccgcggtggacgccacgtacctgctcttctcggcctacctcgtcttcgccatgcagctgggcttcgccatgctgtgcgccggctccgtccgcgccaagaacaccatgaacatcatgctgaccaacgtgctggacgccgccgccggggcgctcttctactacctcttcggcttcgccttcgccttcggcacgccgtccaacggcttcatcggcaggcacttcttcgggctccagcgcctgcccaggaccggcttcgactacgacttcttcctctaccagtgggccttcgccatcgccgccgccggcatcacgtcgggctccatcgccgagaggacccagttcgtcgcctacctcatctactccgcgttcctgacggggttcgtgtaccccgtggcgtcccactggttctggtccgccgacgggtgggccgccgccggccgcacgtccggcccgctgctcttcgggtccggcgccatcgacttcgccggctccggcgtggtccacatggtcggcggcatcgcggggttctggggcgcgctcgtcgagggcccccgtatcgggcgcttcgaccacgccggccgctccgtagcgctcaggggccacagcgcgtcgctcgtggtgctcggcaccttcctgctgtggttcggctggtacgggttcaaccccgggtcgttcaccaccatcctcaagtcgtacggccccgccgggaccgtccacgggcagtggtcggccgtgggccgcaccgccgtcaccaccaccctcgccggcagcgtcgccgcgctgaccacgctattcgggaagcggctccaggcggggcactggaacgtggtggacgtctgcaacgggctcctcggcgggttcgcggccatcacggccgggtgcagcgtggtggagccgtgggcggccgtcgtgtgcgggttcgtgtccgcgtgggtgctcatcggcgccaacgccctcgccgcgcgcctcaggttcgacgacccgctggaggcggcgcagctgcacggcgggtgcggcgcgtggggcgtcctcttcacggggctcttcgcgaggcaagagtacgtggaggagatctacggcgccgggaggccctacgggctgttgatgggcggcggcgggaagctcctggccgcgcagatcgtccagatcgtggtgatcgccgggtgggtgagctgcaccatgggcccgctcttctacgcgctcaagaggctggatctgctgcgcatctcggcggacgacgagatgtccggcatggacctgacgcggcacggtgggttcgcttacgaggaccctggcgacaatgcaggggttggtgagttcacgctcaagtcggcgcagaaccgtgtcgagccgccggcgagcagcaaccgggtgtaaaattcaggaacgaatttaaaaaccgagatgaagttacgtgcttgtagaacccagcggtactcgctgagg

SEQ ID NO: 13 - DNA, 195 bp, Bacillus halodurans
atgcaaggaaaagtaaaatggtttaacgcagaaaaaggtttcggttttatcgagcgcgaagatggtgacgatgtatttgttcatttctctgccattaacacagacggtttcaaaacattagacgaaggtcaatctgttgagtttgatatcgttgaaggagctcgcggacctcaagctgcgaacgtcactaagctt

SEQ ID NO: 14 - DNA, 201 bp, Corynebacterium glutamicum
atggcacagggtactgtgaaatggttcaacggcgaaaagggatttggtttcatcgctcccaacgatggctccgcagatctcttcgtccactactctgagattcagggctccggtttccgtaatcttgaggaaaaccagccagttgaatttgaggtcggcgagggcgccaagggcccacaggctcagcaggttcgtgctctc

SEQ ID NO: 15 - DNA, 636 bp, Zea mays
atgccggactccgacaacgagtccggcgggccgagcaacgcggagttctcgtcgccgcgggagcaggaccggttcctgccgatcgcgaacgtgagccggatcatgaagaaggcgctcccggccaacgccaagatctccaaggacgccaaggagacggtgcaggagtgcgtgtccgagttcatctccttcatcaccggcgaggcctccgacaagtgccagcgcgagaagcgcaagaccatcaacggcgacgacctgctctgggccatgaccacgctcggcttcgaggactacgtcgagccgctcaagctctacctgcacaagttccgcgagctcgagggcgagaaggcggccacgacgagcgcctcctccggcccgcagccgccgctgcacagggagacgacgccgtcgtcgtcaacgcacaatggcgcgggcgggcccgtcgggggatacggcatgtacggcggcgcgggcgggggaagcggtatgatcatgatgatggggcagcccatgtacggcggctccccgccggccgcgtcgtccgggtcgtacccgcaccaccagatggccatgggcggaaaaggtggcgcctatggctacggcggaggctcgtcgtcgtcgccgtcagggctcggcagg

SEQ ID NO: 16 - DNA, 723 bp, Zea mays
atggggaggggaaagatcgtgatccgcaggatcgataactccacgagccggcaggtgaccttctccaagcgccggaacgggatcttcaagaaggccaaggagctcgccatcctctgcgatgcggaggtcggcctcgtcatcttctccagcaccggccgcctctacgagtactctagcaccagcatgaaatcagttatagatcggtacggcaaggccaaggaagagcagcaagtcgtcgcaaatcccaactcggagcttaagttttggcaaagggaggcagcaagcttgagacaacaactgcacaacttgcaagaaaattatcggcagttgacgggagatgatctttctgggctgaatgtcaaagaactgcagtccctggagaatcaattggaaacaagcctgcgtggtgtccgcgcaaagaaggaccatctcttgatagatgagattcacgatttgaatcgaaaggcaagtttatttcaccaagaaaatacagacttgtacaataagatcaacctgattcgccaagaaaatgatgagttacataaaaagatatatgagactgaaggaccaagtggagttaatcgggagtcaccgactccattcaactttgcagtagtagaaaccagagatgttcctgtgcaacttgaactcagcacactgccacagcaaaataacattgagccatctactgctcctaagctaggattgcaattaattccatag

SEQ ID NO: 17 - DNA, 642 bp, Zea mays
atggcttcggtttcacctttggcaaagtttaaactggtgttcttaggagaccaatctgtcggaaaaaccagcatcatcactcgtttcatgtatgacaaattcgacaccacgtaccagcctaccattggaatcgattttctatcgaaaacaatgtacctcgaagatcgaacagttcgtttgcagctatgggatactgctggacaagaaagattcaggagtctaatcccaagttacatcagagattcttctgttgccattgttgtatacgatgtatccaataggcaaacgtttctgaatacctcgaaatggattgaggatgttcacagagaaagaggtcaaagcaatgttatcatcgttcttgttggaaacaaaactgatcttgttgaaaaacggcaagtatcaatcagtgaaggagaagacaagggtaaagagtatggagtgatgttcattgagaccagtgccaaagaaaacttcaacattaaggctttgttccggaagattgctgcagctttacccggggtagactcatattcattggcaacaaaatcagatgacatggttgatgtgaatctaaagaccacttcaaattcatcacaaggtgagcaacaaggaggagcaggtggtggtggaggctgttcttgt

SEQ ID NO: 18 - DNA, 657 bp, Zea mays
atggagggtgtgggcgcgcggctagggcgcacttcggcgcgctacgggccggcgacgacgttcacgggccatgtcaggaagtggcgcaaggagtgggtaccagtggtcgccgccgccgccgccgccgccgccaacgccaacaccagcgccaacggtggcacgacgtcctccacggggatgggatctggcggaggatcccgcgggaataatcttctcctgtttaagtggaccccggtgaacggggctaacgggggaggaggggatggggagcagcagcagcaggctgagacggccacgagacgccggcggtatgtgccggtttctttaatggaagagcaaaggcaagaatctaccaaatctgatgatgagaacaaggctaatgatggagatccatcttcgaatgaaactgagccatcaaatggaaagactgatatcaatgatacacctatggatgaatctcaggcaacagatgaggatggtcgagattctggtaaaaacggcggtggaacagacctaaatttgaatttaggtttgaaagacccggatggtgataatgaagttgagacatcagagaaacatgtagcggcaaacaatccgcagacagagaatagatccaagaggaaatccgtaacccctgaccttgagatgacaatgtag

SEQ ID NO: 19 - DNA, 906 bp, Zea mays
atggctggcctatctttggaacatccttgggcgttcgccttcggtctcctaggcaacgtcatctccttcatgaccttcctggccccgataccgacgttctaccgcatctacaagagcaagtcgacggaaggtttccagtcggttccctacgtggttgcgctgttcagcgccatgctgtggatcttctacgcactgatcaagtccaacgagaccttcctcatcaccatcaacgccgccggctgcgtcatcgagaccatctacatcgtcatgtacttcgtctacgcgcccaagaaagccaagctgttcacggccaagatcatggccctcctcaatggcggcgtctttggggtcatcctcctgctcacccttctcctcttcaagggtagtaagcgcgttgtgctgcttggctggatctgcgtcggcttctccgtcagtgtcttcgtcgcgccactaagcatcatgaggcgcgtgatccagacgaagagcgtagagtacatgcccttctccctctccctctcgctcaccctcagcgccgtcgtctggttcctctacggcctcctcatcaaggacaaatacgtcgcgctaccaaacgtccttgggttcatcttcggcgtggtccagatggtgctctacgtgttctacatgaacaagacgccggtggcggctgccgtgggcaaggatgccggcaagcttccctcagctgcagacgagcacgtcctcgtcaacattgccaagctcaaccccgccctcccggagaggacctccgggatgcacccagtcacccagatggcggccgttcctgccaggagctgcgctgctgaagcaaccgcgccggcgatgctgcccaatagggacgtggtcgacgtcttcgtcagccgacacagccccgctgtccacgtggtctag

SEQ ID NO: 20 - DNA, 825 bp, Zea mays
atggcgcatgcggcggcggccgccgccgtgccgttacgtcgtccgctcctcttcctcaaggaggctcgactcctgtccacactcgcgacccccttacctgggctccgccacccgcgcgccctccgacccacaggccccttgccctccgatgccgaggacaccgacgatccagacgccggcgacggcgccgccgtgtccttcaagaagagccgcaacgaactgaagcgggaggcccgccgcgccgtgaagtggggaatggacctcgccaagttctccccacctcagatcaagcgcatcctcagtgccgcgtcgctggagcgcgaggtgttcgacgcgctaatgctcgtgaagaagtttgggccggatgtgcgggaaggaaggaggagacagttcaattacatcggaagtcttttgcgtgatgcacaaccagaattgatggatactctaatacaagcttctaaggatggagatgagaggaagttatataccttacttagtgaaggtaaactgttggtggaagaagaggaagaggaggaagaggacctacctgatggagaagaggagaatcaagagtatatgaaaattgcagatagatggtttgacggcctcctctgcaaagacatttcagttactaatgaagtttactctgtccatagtgttgaatttgatcgtcaggagctgcggaagcttgtgaagagagcccacatgttccaagaaagcacacaaaataaagatggggaagaatctaatgcgaagctttctggagcaaagaaaccacttatgaggttccttcgttcccttgcaaaggaggcttatgctccatag

SEQ ID NO: 21 - DNA, 1584 bp, Zea mays
atggcgacgccggagctttggtggtactggtggctatgggtgacgacgatgctggccgtcgtcgtctcgaccgtcgtctgctacctgaccaaccagcaccgccgctgggggggctggggctcctcctcagggcgtcgtcggccgccgggcccgcgtcctctcccgctcatcggcaacctgctggacctgcggcgcgcgcccggcagcctccaccacacgctggcgcgcctggcccgcgcgcacggcgcccccgtcatgcgcctcgacctgggcctggtcccggccgtggtcgtctcctcccgcgacgctgcacgggaggcgttcgcggcgcacgaccgccgcatcgcggcacgccccgtcccggacagcaagcgcgcgctcggcttctgcgaccgctccatgctctcgctgcccagctcggccccgctctggcggaccctgcgcggcgtcatggccgcgcacgtcctgtcgccgcgcagcctcgcggcgtcgcgcgccgcgcgggagcgcaaggtcgccgacctgatcgggtacctccgcgcgcgggccgggaccgtggtggatcttaaagaggccgtctatggcggcgtcgccaacctcgtctcgactgccatgttctccatcgacgtcgtcgacgtgggcgccgccgagtcgtcgtcatcgtcgtcggtggcggcccacgggttgcaggagctcctggaggagctcatgcagtgcatggcccagcctaacgtctccgacttcttcccgttcctcagcgcactcgacctccaggggtgtcgtcgccgggtggccgtgcaactgggccaggtcctacaggtcttggacgacatcactgaccgccgtttggcctcctcctcctcctcctccacgtccagcaagggcggggacaggcgcggcgacttcctcgacatcctcctagacctccagtccacgggcaagatcacgcgcgacaacgtgacgctgacgctcttcgacatcttcgcggccgggagcgacaccatggcgctgaccgtggtgtgggcgatggccgagctgctccgcaacccgggcgtgatggccaggctgcgcgcggaggtcagggacgcgctgggcggcagggacgccgtcgaggaggccgacgcggcgggcctgccgttcctgcaggccgtcgtgagggaggccatgcggctgcacccggcggcgcccgtgctgctgccgcacaaggccgtggaggacggggtacagataggcggctacgcggtgcccaggggttgcaccgtgatcttcaactcgtgggcgatcatgcgcgacccggcggcgtgggagaggcccgacgagttcctgccggagcggttcctggccagggacctggacttccgcgggaagcagctggagttcgtcccgttcggctccggccgtaggctgtgcccaggcgtgcccatggcggagcgggtggtgccgctggttctagcgtcgctggtgcacgcgttccagtggcagctgccggccggcatgtcggcggaccaggtcgacgtcagcgacaagttcaccaccaccagtgttttagccttccctcctatcaaagctgtgcctctgctctag

SEQ ID NO: 22 - DNA, 1470 bp, Zea mays
atggtgctctccaaggccgtctccgagagtgacatgtccgtgcactccacgttcgcgtcgcgctacgtccgctcgtctctcccaaggtaccgcatgccggagaactccatccccaaggaggcggcgtaccagatcatcaacgacgagctcatgctcgacgggaacccgcgcctcaacctggcgtccttcgtcaccacctggatggagcccgagtgcgacaagctcatcatggccgccatcaacaagaactacgtcgacatggacgagtaccccgtcaccaccgagctccagaaccggtgcgtgaacatgatcgcgcatctcttcaacgcgccgttgggcgagtccgagacggcggtgggcgtcggcacggtgggctcgtcggaggccatcatgcttgccgggctggccttcaagcgcaggtggcagaacaagcgcagggccgagggcaagccgttcgacaagcccaacattgtcaccggcgccaacgtccaggtttgctgggagaagttcgcgaggtacttcgaggtggagctcagggaggtgaagctgcgcgacggctactacgtgatggaccccgagaaggcggtggagatggtggacgagaacaccatctgcgtcgccgcgatcctgggctccacgctcaacggcgagttcgaggacgtgaagctgctcaacgacctgctccaagccaagaacagggagacccggtgggagacgcccatccacgtggacgcggcgagcggcggcttcatcgcgcccttcctgtacccggacctggagtgggacttccgcctgccgctggtcaagagcatcaacgtcagcggccacaagtacggcctcgtctacgccggcatcggctggtgcatctggcgcagcaaggaggacctgccggaggaactcatcttccacatcaactacctcggcgccgaccagcccacgttcacgctcaacttctccaagggctccagccaagtcatcgcgcagtactaccagctcatccgccacggcttcgaggggtacaggaacatcatggagaactgccacgagaacgccatggtgctcaaggagggcctggagaagacgggccgcttcgacatcgtgtccaaggacgaaggcgtcccgctggtggccttctccctcaaggaccgcagccggcacgacgagttcgagatctcggacatgctgcgccgcttcggctggatcgtgccggcatacaccatgccccccgacgcgcagcacgtcacggtgctccgcgtcgtcatccgggaggagttcagccgcaccctcgccgagcgcctcgttctcgacatcgagaaggtgatgtaccagctggacgcgctcccgtccaggctcccgccccctcccccggcggcgccgctgctcaggaaaaagacggagctggagacgcagaggtcggtcacggaggcgtggaagaagtttgtgctcgccaagaagaccaacggcgtctgc

SEQ ID NO: 23 - DNA, 660 bp, Zea mays
atgggcgaggaggcggtggacgactacgagctccacatggtgtgctacggcagcgacgaggacgagcgcgtgatggagtgggagtcggggctccctggcgccgacgagctgaccccgctctcgcagccgctggtgccgccggggctggccgcggcgttccgcatcccgccggagcccgggcgcaccctgctggacctgcaccgagcgtccgaagccacggtggcgcggctgcggcgcgcgccgccgtcgtcgccgggcacctcctcctccccccacggccaccaggaggcgagggggggcgaaggggcggactcggcggcggcgactaccacgaacagcaacagacggccccggctggtttggacgccgcagctgcacaagcggttcgtggacgtggtggcgcacctggggatcaagaaggcggtgcccaagaccatcatggagctgatgaacgtggaaggtctgacgcgggagaacgtggccagccacctgcagaagtaccggttgtacgtgaagcggatgcgggggcagggtccgtccccgtccgaccacatcttcgcacccacaccggtgcacggcgtcgccgtcggcatggtgcccatggtcagcggccaggcgtaccactacctgtacaacggaggagggggaggagacagatag

SEQ ID NO: 24 - DNA, 660 bp, Zea mays; identical to SEQ ID NO: 23

SEQ ID NO: 25 - DNA, 963 bp, Arabidopsis thaliana
atgggtgagcctaaagacagtctcgctctcttcctctgccacgaatcggagtcttctctaaacgaagacgacgacgagacgattgagagatctgataagcaagaacctcactttactactacgatcgatgatgaagattatgtggcagaccttgttcttaaagagaatctccggttcgaaaccctaccctctaaaacgacgtcgtcttccgatagattgattgccatcgattggattctcactacaagaacaagatttgggttccaacatcaaacagcttacattgcaatctcatacttcgatctgtttctccacaaaagattcatcggtaaagatgaaacatgggcgatgcgattgttatcagtagcttgtttatcattagctgctaaaatggaggaacgtattgttcctggtttatcacaataccctcaagatcatgacttcgttttcaaacccgatgtcattcgtaaaactgaactgttgattctatccacattggactggaagatgaacttgatcactccttttcattacctcaactacttccttgctaaaatctctcaggacaaccattctgtttctaaagacttggtgttgttaagatcctctgattctcttcctgctttaactaaagagataagttttacggagtatcgacagtttgttgttgctgctgtcactacattgctagcttcttcttctacctcatcggatattagattgactagagaagagatagctaacaagtttggttcgatctcttggtggacttctaatgagaatgaaaatgtatatttgtgttatcagagaacgctagagattgaggagaggaaacatatgacacctccaccggaaatagcggtttctcgcgaaccgccggcttcaggaagtggcgctaaacgccgattgtcttttgatgattctgatcaaagttctccaccagccaagagaatgcgtaggcta

SEQ ID NO: 26 - DNA, 1818 bp, Zea mays
atggacacccacatcggatccgtgaacggggcggcgtcgaaccagacggttggctgcccggcgtcggcgccggggtgcccgatggcgtccacgccggcgcagcccgcggcgaccctgtcggcgggggaggcgtcgctggggcgccacctcgcgcgtcgcctcgtgcaggtcggcgtcaacgacgtcttcgcggttccgggggacttcaacctcacgctgctcgaccacctgatcgccgagcccggcctgcgcctcgtcggctgctgcaacgagctcaacgccgggtacgccgccgacgggtacgcgcgcgcgcgcggcgtcggggcctgcgccgtcacgttcacagtcggggggctcagcgtgctcaacgccatcgcgggcgcctacagcgagaacctgcccgtcatctgcatcgccggcgggcccaactccaacgactacgggaccaaccgcatcctccaccacaccatcggcctccccgacttctcgcaggagctccgctgcttccagaccgtcacctgccatcaggcggtggtgaacaatctggatgacgcgcacgagcagatcgacacggccattgccacggcactgagggagagcaagcccgtgtacctcagcatcagctgcaacctccctgggctgcctcatcctaccttcagccgcgacccagtgcccttcttcctcacccccaggacgagcaacaagatggggctagaggctgcagtggaggcaactgtcgaattcctgaacaaggcggtgaagccagtccttgtcgccggccccaaactgcgtgtggcaaaggcaggaaaggcatttgtcgatatggtagatgccagtggctatgcctatgccgtgatgccatcggccaagggtcttgtgccagagactcacccccacttcatcggcacctactggggcgccgtcagcaccgccttctgtgcggagattgttgagtccgcagatgcctacctctttgcaggccccattttcaatgactacagctctgttggctactcattcctcctcaagaaggaaaaggccatcatcgtccagcctgagcgtgtgatagtggggaatgggccggcattcggatgtgtgatgatgaaagagttcttgtctgaattggctaagagggttaataagaacaccactgcctatgagaattacaagaggatctttgtacctgagggccagccgctggaaagcgagccaaatgagccactgcgagtgaatgtgctcttcaagcacgtccagaagatgttgactggtgatagtgcggtgattgctgagactggtgactcctggttcaactgccagaagcttaagctgccagaaggctgtgggtatgaattccaaatgcagtatggttcgattggatggtcagtgggtgcattgctcggatatgctcagggtgcgaaccacaagcgtgtgattgccttcattggtgatgggagcttccaggttacagcacaggatgtgtcaactatgctgcgatgtgagcagaacagcataatcttcctgatcaacaacggtgggtacacgattgaggtggaaatccatgacgggccatacaacgtcatcaagaactggaactacactggctttgtggacgccatccacaatggcttgggcaagtgctggacctccaaggtgaagagcgaggaggagctgacggctgccattgagacagcgctaggggagaaggactgcctgtgcttcatcgaggtgatcgcgcacaaggacgacaccagcaaagagctgctggaatggggctctagggtttctgccgccaactcccgaccaccaaatcctcagtag

SEQ ID NO: 27 - DNA, 1530 bp, Zea mays
atgggggccttcgcgaaggaggagcaccagttcctagccgagctcggcctcgcgcagcgcaacccaggcgcgttcgcatgcggtgcgtggggcggctcaggtcccaccgtcacctccacgagcccgaccaacaatcaggtcatcgcagaggtcgtggaggcgtccgtgcacgactacgaggagggcatgcgcgcctgcttcgatgccgccaagacatggatggcgattcctgctccaaagcgaggagagatcgttaggcaaatcggtgatgcactgagagcaaagctccatcaccttggcaggcttgtgtcacttgagatggggaaaattcttcctgaagggatcggtgaggttcaggaaatcatcgacatgtgtgattatgctgtggggctaagtcgccaactaaatggatccattataccatctgaacgaccaaaccatatgatgatggaggtgtggaatccccttggagttgtgggtgttataacggcatttaatttcccttgtgctgtgcttggttggaatgcttgcattgctttggtctgtggaaattgtgtcgtctggaaaggtgctccaacaactccactgatcactattgcaatgacaaaaatagtggctagtgtattggagaagaacaacttgccaggcgcaatttttacatctttttgtgggggcactgaaattggtcaagcaattgcccttgacattaggatacctttggtttcattcactggaagtacaagggctggtctaatggttcagcaacaagttagtgcaagatttggtaaatgccttcttgaacttagcggaaacaatgccatcattgttatggatgatgcagatatccagctagctgtgcgatctgtcttgttcgctgctgttggtacagcaggacaacgctgcactacatgtcgtaggctgattcttcatgagaacatatatcaaaccttccttgatcagcttgttgaggtatacaaacaagtccgaattggggatccgttggagaaaggcaccttactgggaccactgcacactcctgcttcaaaagagaactttttgaaaggcattcagactatcaaatctcagggagggaaaatcctttttggaggatctgccattgaatcagaaggaaactttgtgcaaccaacaattgtggaaattacaccttctgcaccagttgtgaaagaagaactctttggtcctgtcctttatgttatgaaatttcagtccttgaaggaagcaattgaaatcaataactctgttcctcaaggattgagcagttctatatttacaaagaggccagatattatttttaagtggctcgggccccatggtagtgattgtggtatagtgaatgtgaacatacctactaatggtgctgaaattggtggagcatttggtggagaaaaagcaactggtggtggacgagaagcagggagtgattcctggaagcagtacatgaggagggcgacttgtacaatcaactatgggagcgagctacctctagcccagggaatcaattttggttag

SEQ ID NO: 28 - DNA, 576 bp, Zea mays
atgagtctctgtacaatagcacgacggctatgtctttcaaaaccatcctctggcagtcgtctttcagcaatttgggctcatctatacagcactgaggctgcaaaggacatgggtgctaagaagtacaagtaccccgatgtatacgacccctacgggcctatgccgccgccttcggagaaagtcgtggaactagctgatcgcatcgctgctctccctcccgaggagatcaaacagattgctccagcccttctcctcagactgaaccaggagccgccacaggcggtatctggccagggtttcggtttcggtgcccaggtcggctctggggcaggttctggaaaggctgagaagaaagccgagaagacagtcttcgacgtcaggttggagaagttcgacgctgctgcgaagatcaagatcatcaaggagatcaggacgtttacggatctggggctgaaggaggccaaggagctggtggagaaggccccagtcgttctgaagcaatcgctcacaaaggaggaagcggaagcgatcatagcaaagataaaggcagctggcggtgttgctgtgatggagtag

SEQ ID NO: 29 - DNA, 1326 bp, Zea mays
atggcggggtcgaggttcgggtcgttcaagtcggagaagggcgactccgcctccgcagcggcggcagcgggtggagcggcgcagaggagggacccgtacgaggtgctcggggtgggccgcaccgccaccgaccaggagatcaagagtgcgttccgacgcatggcgctcaagtaccatccggacaagaatggcgatgaccctgttgcatcagacaggttccaggaagtcacattctcctataacatcctgtcagatcccgataagaggcggcagtacgatacatcaggatttgatgcaatcgaatctgatagtcaggaactggagctggacttgtcgagtctcaacactgtaaacacggtgtttgcagctctttttagtaagcttggtgtgccaattaaaacaactgtttcagctacagttttagaggaggcattgaatggttcggttatggtttctcaactccagctaggaaactcagtgcagagaaaggtggaaaagcaatcggcccatttctattctgtggatataactgaaaaacaagctaaaatggggctagtttgtcgtgttcactcaaacgataaaagcaaattcaagttgctatattttgagcttgaagaaaatggcgggcttagtcttgcactacaggaagacagtgtgaaggttgggaaagttactgctgcagggatgtatttccttggttttcctgtgtaccgttttgaacaaaataacctggcagctgctgcaaaagattctgatggtgcattctttaaaagattggatagctttcagccatgtgacatacatgaactgaaacctggaacacacttctttgctgtctacggtgacaacttcttcaagagcgctagttatactatagaggttgtatgtggtgaatcttttcctgccgaaaaggagatgctacgaaatgtggaggccaagatactcacaaaacgagctgaactttccaaatttgagtcagagtatagggaggttttggcgaagttcactgaaatgaccagcaaatacacacaagaaatgcaagcgattgatggtcttttgaaggaaaggaatgagatccatgcttcctataccaacaatccacctctaaaacggagttccagcaggaataaagccaagtcgccttcgaaagtggccaaaactggtacagaaaaacatcatcagaaggaaaagaaggtgaaggatcactgcatggagggatgtggaagtgacagcgataactcaagtgaaaagaaatcaaaagagcggttcccaaggaagaaatggctgaaccttccattcaaacttgacaggagaaagacgtgctag

SEQ ID NO: 30 - DNA, 981 bp, Zea mays
atggccgacaacgcgaaggccgcggcggcgcatgcgaggccggagtcgtcgcaggaggaggaggaggactggaaggaggccgagggggacgtcgccgaagtcgaccgcgccgccaccaatggcgccggcgaggggggcgtgcccacagacaggccgatccgggtctacgccgacggcatctacgacctcttccacttcggccacgccaagtcgctggagcaggccaagaagtcgtttccaaacacatatcttcttgttggatgctgcaatgatgagttgacacataaattcaaaggaagaactgttatgactgaggatgagcgatatgagtcacttcgtcattgcaagtgggttgatgaagtcattccagatgctccatgggtggtgacagaagagttcttggataagcataacattgattttgttgctcatgattctctgccgtatgctgatgctagtggagctggtaacgatgtttatgaacatgtaaaaaagcttggtaagtttaaggagactcagcgcactgatgggatatcaacatcggacattataatgcggattgttaaagattataatgagtatgttatgcggaatctggccaggggctacactagaaaggatcttggtgttagttatgtcaaggaaaaacgactgcgagtgaacatgggacttaaaaacctgcgtgacagagtgaaacagcaccaagaaaaagtaggggagaagtggagcacggttgcaaaactccaggaagagtgggtggaaaatgcagaccgctgggtggctggtttcttagagaagtttgaggaagggtgccactcaatggggacagccatcaaggagaggatccaggagaggctcatcaaggcacaatccagcgactttggcagcctcctacagtacgacagctacgattctgatgaagccaaagaaaacgacgaggacgaagacgaagatgaactctttgaagacgtcaaggaatag

SEQ ID NO: 31 - DNA, 645 bp, Zea mays
atggccgccgtggaggtgtgcgtgaaggccgccgcggggaaccccgacacgctcggcgattgcccgttctcgcagagggtgctgctcacgctggaggagaagaaggtcccgtacgaggtgaagctcgtcgacctcggcaacaagcccgaatggtttctgaacatcagcccagagggtaaggtgcctgtgttcaacggtggagatggcaaatgcattgctgattctgatgtaatcatccaagtcattgaggagaagttcccgactccttctctggtcacccctccagaatatgcatcagtgggatcaaagattttcccagcctttgtcaagttcttgaagagcaaggatggtagtgatgggtcagagaaggcgcttctggatgagctgcaggcactggatgatcatctcaaagctcatggcccctacataaatggggagaacgtgtcagcgactgatcttagcctggggccaaagcttttccacctacagatcgcactggagcatttcaaaggctggaagatcccagaaaacctaaccaatgtccatgcctacaccaaggctcttttcagccgtgaatcttttgtcaagactaagccatccgaggagcacgtgattgcgggatgggcgcccaaggtgaatgcatag

SEQ ID NO: 32 - DNA, 432 bp, Zea mays
atggacgcgagcgcggccaccgccaggcgcaagcgcaagcgccccgacgccgacatcaccgccgccgccgccgccgccgccccggtcgccgtcgacgaggcctcggacgccgaggtcgaggagttctacgccatcctgcggcgcatccgcgacgcctcccgccggctgtgcggcgccggcgcccggcccgccccgcgcgcgccggcgtggcggcccagcttctcctgggaggacttcgcgacgccggcccctggcgcgccggcgcctgagaccccgacccccgcgcagcaggagccagcgcagccgcggcccgacgagcctgtagccgtcgtccgcgctaccgccccgtcgccgcgtgccgggctggacctgaacgcggagccggagccggaggcgccggccacccctcgctcggcgcgcgtccaggcgtag

SEQ ID NO: 33 - DNA, 366 bp, Zea mays
atggccggctgctgcgtgttcctccggtggccgtcggcctcgccgtcgcgcatcggctaccgctccctcgtcgacgcggcggccgacgacgccgccccgccgtcgacggtgacggtcgtggtcgggaaggagcggcgggcgttcgcggtggaccgcctcgtgctcgactcctacccgctccggctgctcctggagacggcggcgcgcagggaggagcgcagggccgggggcggcgccatcttcgtggacgtcgacgccatcctcttcgagcacatcctctggctcgcctgcgacgcccgctccgtctcccagatcctgcacctcgacctcaaggagatcatcgacttctacgcccaggacgcgtag

SEQ ID NO: 34 - DNA, 606 bp, Zea mays
atgtcgtactacggcgaccggcgcgcggagtcgtcgatcgtggaggcgttcacgctgtcgccgctgccgtacccggtgatcctggtgctgctgatggtgacgctgctgctgggcgcctcgtggttcttcacgtacgacgacttcatcgaggaggcgtcgcagcagctgagctgggcgctgctgggcgtgcccatcgcgctcgtcctcctcatccgctggatctcctccgtcgactccttcgagggctacctgggcttctacccgagggagagccgctggaagggccgctacgagcggggccccgccgagggcagctcgccctggggcgtcgccttgctcgtcctcctcctcctcgtgctcgccagggctggctgcgggaaggtcgtgtatgggaaccctgggaggctggggaggaagaggaggggaggggataaggtgaaggagcaagctggggacgaggcggccaagttcccgtggtccgggatgcgcctggctaccgagaaacggaggagggtgagacgctctccatcgaagaagggaatagtcctgaagcaaaaatcacggaaggtatccctgcagcaccgctcaaagaagttgaaagcttag

SEQ ID NO: 35 - DNA, 756 bp, Glycine max
atggaaggagtaccgcacccaatacccagaacagtcgaagaggttttcaccgattttaagggcagacgcgccggtttgatcaaggctctcactaccgatgttgaaaagttttaccagcagtgcgatcctgagaaggagaatttgtgtctatatgggtttccaaatgaaacatgggaagtgaatttgcctgttgaggaagtgcctcctgaacttcctgagccagcattaggtataaactttgccagggacggcatgcaagagaaggactggctatcactggttgcagttcacagtgactcatggctgcttgctgttgctttctattttggtgcccgctttggatttggtaagaatgaaaggaaaaggctttttcagatgataaatgatctgccaacaatcttcgaacttgtgactggaagtgctaggcaatcaaaggatcaaccagctgcccacaacaatggtagcaaatgcaaatcaagtggaaagtcccgtcagtctgagtctcaggccaaggggatgaagatgtctgcaccacccaaagaagaggatgagagtggagaagaagaagaagaagatgatgaacaaggtgcgacatgtggtgcttgcggtgataattatggcactgatgaattctggatctgttgtgatatgtgtgaaagatggttccatggtaaatgtgttaaaattactcctgctaaggctgagcacatcaagcaatacaagtgccctagctgcagtaacaagagggttagagtt

SEQ ID NO: 36 - DNA, 1455 bp, Arabidopsis thaliana
atgtcggaaggagtagaagcgatagtagcaaatgacaacggaacagatcaggtaaacggaaaccgtaccgggaaagataacgaagaacacgacggctccaccggttctaacctaagcaatttcctatggcacggtggctctgtctgggacgcttggttcagctgcgcatctaaccaagtggctcaagtgttattgacattaccgtactcgtttagtcaactaggaatgttatcaggaatagtacttcagatcttctatggtttactaggaagctggactgcttatctcatctctgttctctacgtcgaatacagagctcgtaaagaaaaagaaggcaaaagcttcaaaaaccacgtcattcagtggtttgaagtacttgatggattacttggttcatactggaaagcactaggactcgcatttaattgcactttcctcttgtttggatctgttatccaactcattgcttgtgccagtaacatttattacataaacgatcatctggacaagagaacatggacttacatatttggcgcgtgttgtgcaaccactgtctttataccgtcgtttcacaattaccgaatttggtcattccttggccttggaatgaccacttacaccgcttggtacttagccattgcctccatcatccacggccaggcggaaggtgtgaaacattcaggtccaacaaagctagtgctttattttacgggagccacaaatattttgtacacctttggaggtcacgcggttactgttgagattatgcatgctatgtggaaaccacagaagtttaagtacatttacttgatggcgacgttatacgtgttcacgctaacgattccgtcagctgccgccgtttactgggctttcggagacgcacttctcgaccactccaacgctttctctcttatgcccaagaacgcgtggcgtgacgccgctgttatcctcatgctcattcatcagtttataacgttcgggttcgcttgtacacctttgtactttgtgtgggagaaagtgattgggatgcatgacacaaagagcatttgcttaagggctttggctagattgcctgtggtcatacctatttggttcttagctattatcttcccctttttcggtccaatcaattccgctgtcggtgctcttcttgttagcttcaccgtctatatcatcccatctctcgctcacatgctcacttaccgatctgcctccgctcgtcagaatgcggcggagaagccaccgttctttatgccgagctggacggcgatgtacgtgttgaatgctttcgtggtggtttgggttcttatagtcggatttgggttcggtggatgggctagtgtaaccaactttgttcgtcaagtcgacacttttggtctctttgccaagtgttaccaatgtaaaccagctgcagccgccgcacatgccccggtctccgctttacaccaccgtctt

SEQ ID NO: 37 - DNA, 1572 bp, Arabidopsis thaliana
atgactaatactctctgtttaagcctcatcaccctaataacgctttttataagtttaaccccaaccttaatcaaatcagatgagggcattgatgttttcttacccatatcactcaaccttacggtcctaaccgatcccttctccatctctgccgcttctcacgacttcggtaacataaccgacgaaaatcccggcgccgtcctctgcccttcctccaccacggaggtggctcgtctcctccgtttcgctaacggaggattctcttacaataaaggctcaaccagccccgcgtctactttcaaagtggctgctcgaggccaaggccactccctccgtggccaagcctctgcacccggaggtgtcgtcgtgaacatgacgtgtctcgccatggcggctaaaccagcggcggttgttatctcggcagacgggacttacgctgacgtggctgccgggacgatgtgggtggatgttctgaaggcggcggtggatagaggcgtctcgccggttacatggacggattatttgtatctcagcgtcggcgggacgttgtcgaacgctggaatcggtggtcagacgtttagacacggccctcagattagtaacgttcatgagcttgacgttattaccggaaaaggtgaaatgatgacttgctctccaaagttaaaccctgaattgttctatggagttttaggaggtttgggtcaattcggtattataacgagggccaggattgcgttggatcatgcacccacaagggtgaaatggtctcgcatactctacagtgacttctcggcttttaaaagagaccaagagcgtttaatatcaatgaccaatgatctcggagttgactttttggaaggtcaacttatgatgtcaaatggcttcgtagacacctctttcttcccactctccgatcaaacaagagtcgcatctcttgtgaatgaccaccggatcatctatgttctcgaagtagccaagtattatgacagaaccacccttcccattattgaccaggtgattgacacgttaagtagaactctaggtttcgctccagggtttatgttcgtacaagatgttccgtatttcgatttcttgaaccgtgtccgaaacgaagaagataaactcagatctttaggactatgggaagttcctcatccatggcttaacatctttgtcccggggtctcgaatccaagattttcatgatggtgttattaatggccttcttctaaaccaaacctcaacttctggtgttactctcttctatcccacaaaccgaaacaaatggaacaaccgcatgtcaacgatgacaccggacgaagatgttttttatgtgatcggattactacaatcagctggtggatctcaaaattggcaagaacttgaaaatctcaacgacaaggttattcagttttgtgaaaactcgggaattaagattaaggaatatttgatgcactatacaagaaaagaagattgggttaaacattttggaccaaaatgggatgattttttaagaaagaaaattatgtttgatcccaaaagactattgtctccaggacaagacatatttaat

SEQ ID NO: 38 - DNA, 1474 bp, Leuconostoc mesenteroides
accatggagattcaaaacaaggctatgcttattacttacgctgattctcttggaaagaaccttaaggatgttcatcaagttcttaaggaggatattggagatgctattggaggagttcatcttcttcctttcttcccttctactggagatagaggattcgctcctgctgattacactagagttgatgctgctttcggagattgggctgatgttgaggctcttggagaggagtactaccttatgttcgatttcatgattaaccatatttctagagagtctgttatgtaccaagatttcaagaagaaccatgatgattctaagtacaaggatttcttcattagatgggagaagttctgggctaaggctggagagaacagacctactcaagctgatgttgatcttatttacaagagaaaggataaggctcctactcaagagattactttcgatgatggaactactgagaacctttggaacactttcggagaggagcaaattgatattgatgttaactctgctattgctaaggagttcattaagactactcttgaggatatggttaagcatggagctaaccttattagacttgatgctttcgcttacgctgttaagaaggttgatactaacgatttcttcgttgagcctgagatttgggatactcttaacgaggttagagagattcttactcctcttaaggctgagattcttcctgagattcatgagcattactctattcctaagaagattaacgatcatggatacttcacttacgatttcgctcttcctatgactactctttacactctttactctggaaagactaaccaacttgctaagtggcttaagatgtctcctatgaagcaattcactactcttgatactcatgatggaattggagttgttgatgctagagatattcttactgatgatgagattgattacgcttctgagcaactttacaaggttggagctaacgttaagaagacttactcttctgcttcttacaacaaccttgatatttaccaaattaactctacttactactctgctcttggaaacgatgatgctgcttaccttctttctagagttttccaagttttcgctcctggaattcctcaaatttactacgttggacttcttgctggagagaacgatattgctcttcttgagtctactaaggagggaagaaacattaacagacattactacactagagaggaggttaagtctgaggttaagagacctgttgttgctaaccttcttaagcttctttcttggagaaacgagtctcctgctttcgatcttgctggatctattactgttgatactcctactgatactactattgttgttactagacaagatgagaacggacaaaacaaggctgttcttactgctgatgctgctaacaagactttcgagattgttgagaacggacaaactgttatgtcttctgataaccttactcaaaact

SEQ ID NO: 39 - DNA, 1476 bp, Arabidopsis thaliana
atgggaggttgcgtgtcaacgcctaagagctgtgtaggaggtaaaataaggtcaagcaaaaggagaaagactcggacaagacgaaagattcagaagaagagagttgtttcttcttctcgcttatctgacggatctttcgataataatcccactttcagagcaagtgttgatgaagcatggtttgattccaatctcgcctttgaaaccgattgtgatgatgactttcatagtgttcaggaagatacgttgtcagtgaacggatgtgagcgtatctcagtatcgagtatgtcatctgttaaagactctaaccttggtggttccgctcggaattctctaagcgatgtcatctcacaatcaaaatcagagagtgctttgattgacactaagcaggctgttttcatcgacgagatatcttcaaatgctgatggtagctctaataaagatgaagggttgttggaaaactgcgggattcttccgagtaattgtttgccttgtcttaattcaactgttccttctattgaaaagagaaggtctttaagctctagccctccaagtacgaggaaaaaagctgcggttaaactatctttcaagtggagagaagggcaccctactggtcctttattttctacaacaatgcagttgcagagaccgatggcaggttctcaggttccgttttgtccactcgaaaagaaaatgtttgattcttggtcaattattgagcctggtagtttccgggttcgtagcaaaacttatttcagagataagaagaaagagcttgcaccaaactatgctgcatataatccatttggtgtcgatgtatttttatctcaacgtaaagtaaaccatatagcgcaatacgtggagcttcctgttgttactaccaccccgactaagctcccatcaatccttgttgtaaatgttcagattccattgtatccagctgcaatttttcatggtgaaactgatggagaaggaatgaatttcgttttatactttaaactttcggataactatttaaaggagcttccaccacattttcaagaaagcattcagagattactagatgatgaggttgagaaagttagaggctacactactgacacgaatgtaccctttagagaacggttaaagatattgggtcgtgttgcgaatgtagacgatcttcagttgaatggtgcagagaaaaaactcatgaatgcttataacgaaaaacctgtgctttcacgtccacagcacgagttctactcgggtgaaaattactttgagattgatattgatatgcatagattcagttatatatcgcggaaaggatttgaagcatttttagacaggctaaagaactgtgttcttgatgttggactcacaattcaggggaataaaccggaggagttaccggagcagattttgtgttgcatccggttaaatgggattgattacatgaattatcatcagttagctcttagtcaagaagtccta

SEQ ID NO: 40 - DNA, 1470 bp, Arabidopsis thaliana
atgacaaagataagtcctgaagttgaaatcaggatgccaatggaggcatttccgccagtttcagctgatgtgagctttatttctaatagttttccgaagtacaaactggatgctgataatcaagttctggaagagccagttgaggataaccagggtccttctttgaaggacgttattgaacaagaagcttccaatttgtcagaccaacacaagcgtatctcagttcgtgaccttgccagtaaatttgacaagaacctggctgcagctgctaagttgtctaatgaggcaaagctaagagacgtggcatctttggagggacatgttcttttgaaaaagctaagagatgccttagaatctttaagaggccgttttgcaggaagaaacaaagaggatgtggagaaagctatctctatggtggaagctttagcagttaagttaacccaaaatgaaggagaattgattcaagagaagtttgaagtgaagaagcttgtaaactttctcaaacaggcttctgaagatgctaaaaatttggttaatcaagagaagtcttttgcttgtgccgaaattgaaagtgctagagctgtggtgctgagaattggggaggctcttgaagaacaagaaaaagcttcccaagcttctaaaccacaggatgtggatggactagtcgaagaggttcaagagtctagaagaatcaaattgttgcatcacccaagcaaggtgatggccatggaatatgaactacgtgctcttagggatcaaattcgagagaaatctatattttcaattaagcttcagaaagagctaatcatgagcaagaggaacgaggaaaataaatcttgtttatacatgttagatggttctgaagctttgggttcatatctgcgagtccagccttgctcagatgaagtgccacaggtttcgaaatgttcatttcagtggtaccgcttgtcttctgaaggcagctggagggaagttatttcaggtgccaacaagtcaatatatgctcctgacccctctgatgttgggagaatcttacaagtagatattgtctcaaatgggaaaaagctcaccctaacaactaatcccattcaaactgtttcaggacttggaagccatgtggagacacttctacgaaaatctaatactgattttaatgtagttatttctcaaatgaatggaaaagatcactcatcccattctactcattcatttaatgtggggagaatgaggataaagctatgcagaggttggattacaaaagctagagagatttactccccatcaatgcagctatgtggcgttagaagtgatgtcgtgaatgcagcgaaggtgttgttttggcaagcaagaaagggcctctcatttgtattaacctttgaatcagagagagaccgaaattcagccattatggttgccaggaaatatgctcttgattgcaatgtcgtgcttgccgggccagatgatctagtg

SEQ ID NO: 41 - DNA, 537 bp, Glycine max
atggccagttttggaggaaccacacaaaagtgcatggcttgtgccaaaactgtgtatcttgttgataagttaactgcagatagccgtgtctatcataaggcttgcttccgatgccaccattgccgtaatacccttaagcttagcaactactgttcttttgagggggtgctctactgcagacctcactatgatcaactctacaagcgaactggtagcctggacaaaagttttgaaggaatacccaaaattcagaaaccagagaaaccggtcactggtaatgagaatactaaggtcctcgcaaacgtgttcttgggcaccagagacaaatgtgtgtgttgcaacaagacagtgtatcccactgagagggttacggttaatgggacaccctaccacaagggctgcttcaagtgtacctatggaggttgtactgtaagctcatcaaactttatcacacacgagggaaagccctactgcaaacaccatcacattcaacttttcaaagagaaagggaattacagtcagctcgagaatgaatgc

SEQ ID NO: 42 - DNA, 537 bp, Glycine max; identical to SEQ ID NO: 41

SEQ ID NO: 43 - DNA, 501 bp, Arabidopsis thaliana
atgtacctgattgtgcttggttttgcaagttggtgtctcaataaatacatcaacggccaaactaaccacccaagttttggaggcaatggagcaacaccgttcttcttgacgttttcgatattggcggctgtggtaggagtagcgtcgaagttggccggagcaaatcatattaggttttggaggaatgatagtttagccgctgctggagcttcttccatcgttgcatgggctatcacagctcttgccatggggttggcatgcaaacaaataaacataggaggatggagaggatggagactgaagatgattgaagccttcattatcattttgacgttcacgcagcttctctacctcatgttgatccatgccggttcactcagcagcaaatatggtcctggatacagagaccaagactatgctacaggccaagctcatggtcatggtcatgtaccacacactgtgggagagcacaaggctggtgttggatctaccatggcagtc

SEQ ID NO: 44 - DNA, 681 bp, Arabidopsis thaliana
atgccggtgcacgatgagcaagagcatgaggtgtacggtggagagatcccagaagaggaagaaggtgagatggatacggaagagtacgaagaacacggcggagaagaaggtgccgccgccggagatgaggagcttgaacctggctctagctctagggacttggaggatatgaagaaacgaattaaggagattgaggaagaagctggagctttgcgtgaaatgcaagccaaggctgagaaagatatgggtgctagtcaagacccttcaggtggtgttagtgcggctgagaaggaagaagtggattcgcgttcaatatatgttggcaatgtggactatgcatgtactccagaggaagtccagcagcattttcaatcatgtgggacagtgaatagggttacaattctgacagataagtttggtcaacctaaaggttttgcgtatgtcgaatttgtggaagtagaagctgttcagaattcgcttattttgaacgagtcagaactacatggtcgtcagataaaggtatctgcaaagaggactaatgtacctggaatgaggcaatttcgaggaagagggcgtccctttagaccgatgaggggattcatgccaggagttccattttatcctccatatgcttatgggagagttcccaggttcagacggcctatgcgctacagaccgtac

SEQ ID NO: 45 - DNA, 1116 bp, Arabidopsis thaliana
atgtttgctcagttagcaccatcgccgtctccttctccggcgaacgttagccacttcgttcaccgtcgcaccttccgtcaatgtacatacgccgtctccgcttctcttcccactgcaaattcctctcgtccaccaccaattcagattgttggaggaaaggatttgaatttggatgttacacggaaagatgattcaattgggttcaaattagaggcaaatgaagatgaaattgattggatgaatctagaatctgatattcgtctatggactagagcattacgtcctgttcagtggtatccagggcacataatgaaaactgaaaaggaacttagggaacagcttaagttgatggatgttgtgattgaagtccgtgatgctaggattcctttatcgaccactcatccaaagatggatgcgtggcttgggaataggaaacggatattggtattaaatagagaagatatgatctcgaacgatgatcgaaatgattgggcgagatactttgcaaagcaaggaataaaggtcattttcactaatggcaaacttgggatgggagctatgaagctaggtcggttagccaaaagtttagcaggtgacgtaaatgggaaacggcgagaaaaaggacttctccctagatcagttagagctggaataattggataccctaatgttgggaaatcatctctgatcaatcgtctattgaaacgaaaaatttgcgcagcagctccaagaccaggtgtaactagagaaatgaaatgggtcaagcttgggaaagatcttgatctcttagattcacctggaatgcttcctatgcgtatcgatgatcaagcagctgctataaagctggcaatttgtgatgacattggagagaaagcttatgacttcactgatgttgctggaatccttgtgcagatgttagcacggattccagaagtaggcgcaaaggctctttacaaccgatacaagatccagctagaaggcaactgcgggaaaaaatttgtgaagacgcttggtcttaatttgtttggtggagatagtcatcaagctgcatttagaatactaacggattttcgcaaaggcaaattcgggtatgtctcgttggagagacctccactg

SEQ ID NO: 46 - DNA, 1116 bp, Arabidopsis thaliana; identical to SEQ ID NO: 45

SEQ ID NO: 47 - DNA, 1308 bp, Arabidopsis thaliana
atgaaagcatcgggttcattagatagctggagagaatatttccgacggcgaggagattccgatatattcgggatcatcgatcatgcgatcatggtggctgctactgattgtcctaacaaattcaaatccagaagagacaaaatcgccgagcttttattctcctgtagagtgaatcgttgcgtcggatgcgaccatcttgaattgtctgttcccggagacgacgaggctaaccgtggaaccaccggaaatggtggtggtggtacggcggttgatgaagattatgaggttgctggtggtagtaaagagagcaaagctaatagtagcagaggggataataatcagattgttagcaattatacatttgatgaagctgaggctttgagtgatgagattgaagagttttctgtggtttctaaggaggttgctaggatcaaagagatcttgctcaacaaagaagatgagccaaactcggtgttactcgattctttaagacatcttaagttgatgtctttgaatgtggatattcttaagagtactgagattggaaaggctgttaatggcctcaggaaacattcttctgataagattcgacaactcgctaagactcttatcgcagaatggaaggagttggtggatcaatgggtgaataccacaaaggaaatcactggtgctgaaggtacaccagagtctgcaaacccgtctgtccttgatgaagaagaggcgtttccatcgcttccatatgatgttgatatctttacacctgaaccaaacggatttgaaatctcacacttctttgattccttggactttgatggaaatcctcgtaactctgaagaacacaacacaagccgagagcatgaaagaaggccacaaaatatcgccaagagaaaacctgagggaacacaaatgaggatacaagatgctccttttagatctattaagccatcatcagctactgattttgatgggactagaagacctgtaaagcaaagtacagagcaaaggatgaagaacgaaacggtatctgttcacaagtctgaaaaacccatgatccaaaggaaaccggttgttacagaacagaagcggaaagctcctggacctcaacaagaaaaacttaaaggtcttgatgcagacgcaaagtttgagtttgcaaagaggaaacttcaagaaagctaccagcatcacgagaatgccaagaagcagcgaacgatacaagtacttgagatgatcccaaagcaaggtagtgctcagaaaccgcaactcaagagacctggaatgagcaacaggaattgggctaatgggagaaaa

SEQ ID NO: 48 - DNA, 708 bp, Arabidopsis thaliana
atggatgtttttgctttcaatgcttctttatccatgtgtaaagatgttgccggaatcgcaggcaacatatttgcatttggactcttcgtttcaccaatgccaacgtttaggaggatcatgaggaacaaatcgacggagcaattctccggtttaccatacatttacgctctcttaaactgcttgatctgcctttggtatggcacacctttcatatcacacagcaatgccatgcttatgactgtgaattccgttggagctacgtttcagctttgctacattatcctcttcatcatgcatacagacaagaagaacaagatgaagatgcttggtttgctttttgtggtgtttgctgtggttggagtgattgtagctggaagtttgcagatacctgaccagctcacacggtggtactttgtcgggttcttgagctgcggttctcttgtttcaatgtttgcctcgccgttgtttgttattaacctagtgattcggactaagagcgttgagtttatgccgttttatctctcgctatcgactttcttgatgagtgcttccttccttctttacgggttattcaacagcgatgcctttgtttatacaccaaatggaataggaacgattcttggcattgtgcagctggctttgtactgttactaccacaggaattctatagaagaagaaacaaaagagcctttgattgtttcttacgtg

SEQ ID NO: 49 - DNA, 747 bp, Arabidopsis thaliana
atgacgaagaactacccaaccgtgagcgaagattacaagaaggctgttgagaagtgcaggaggaagctcagaggtttgatcgctgagaagaactgtgcacccatcatggtccgactcgcatggcactctgctggaactttcgattgtcaatcaaggactggaggtccattcggaacaatgaggtttgacgctgagcaagctcatggagccaacagtggtatccacattgctcttaggttgttggaccccatcagggagcaattccctaccatctcttttgctgatttccatcagcttgctggtgttgtggccgttgaagttactggtggccctgacattcctttccaccctggaagagaggacaagccccaaccacctccagagggtcgtcttcctgatgctaccaagggttgtgaccatttgagagatgtctttgctaagcagatgggcttatctgacaaagacattgtcgctttatctggtgcccacactctgggacgatgccacaaggataggtctggcttcgaaggtgcatggacatcaaaccctctaatcttcgacaactcttacttcaaggaactcttgagcggagagaaggaaggccttcttcagcttgtctctgacaaagcactattggacgaccctgttttccgtcctttggtcgagaaatacgctgctgatgaagatgcctttttcgctgattacgctgaggcccacatgaagctttctgagcttgggtacttatcc

SEQ ID NO: 50 - DNA, 942 bp, Arabidopsis thaliana
atgtatttgttagtgtttaaactctttctatttttgtctcttcttcaaatctctgtctctgctagaaacctagcttcacaagaaccaaaccagtttcaactactcaagtaccacaaaggagctcttctctccggcaaaatctccgttaacctaatctggtacggcaaattcaaaccatctcaaagagcaatcatctccgacttcattacctcactcacacacacttctcctacgtccaaaactctccaccaaccatctgttgccacgtggtggaaaaccacagaaaaatactacaaactcgcaacacccagcaaaaactcatcacctctgtctctaactctcgggaaacaaatcatcgacgagtcttgctctctaggaaaatctttaaccgataaaaagattcaaaccctagcttcgaaaggagaccaacgcaacgccatcaacgtcgttttgacttcagctgacgttacggttacaggatttggtatgagtcgttgcgggactcacggacacgctcgtggtttaggtaaacgtggctccaagtttgcttacatttgggttggaaactctgagacacaatgtcctggtcaatgcgcgtggcctttccacgcgccggtgtacggtccacagagtccaccactagtggcaccaaacaatgacgtgggactcgatgggatggttattaacttagctagtcttttagctggaaccgcaacgaacccttttggtaatggttactatcaaggtccacaaaacgcaccgcttgaagctgcttctgcttgtcctggcgtttatggtaaaggagcttatcctggttacgctggagatttgcttgtggatactacaacgggaggtagttttaatgcgtatggtgcaaacggcaggaagtttttgcttcctgctttgtatgatcctacgacgtcggcttgctctactatggtc

SEQ ID NO: 51 - DNA, 1119 bp, Arabidopsis thaliana
atgggataccttttcgaagaaaccttaagctctaaccctaaaaccccaattgttgttgatgatgataacgagttgggtttgatggccgtgagacttgccaatgccgccgcctttccaatggttcttaaagcttccctcgagctcggtgtctttgacactctctacgcggaagcctctcgcactgactcgttcctttcaccctctgagatagcaagtaagctaccaactacaccccgtaaccctggggctccggtcttgttggaccgcatgcttcgtttactcgctagctattccatggtcaagtgtgagaaggtctccgtaggaaagggggagagggtctatcgagctgagccaatttgcaggtttttcttgaagaataacattcaggatattggatcccttgcctctcaagtcattgtcaatttcgacagtgtcttccttaatacctgggcacaactgaaagacgtggtgctagaaggaggagatgcgtttgggcgtgcacatggtggcatgaaactctttgactatatgggtacagatgagagattcagcaagctttttaaccagactggattcacaatcgcggtggtgaagaaggctcttgaagtttaccaaggcttcaaaggtgtgaatgtgttggttgatgtgggaggtggagttggtaacactcttggtgttgttacttctaaatatcccaatattaagggtatcaactttgatctaacttgcgccttggcacaagcaccctcgtatcccggtgtggagcatgttgccggagatatgtttgtggatgtcccaaccggagatgctatgatcttgaaacgtatacttcatgattggaccgacgaagactgtgtgaagattcttaagaattgttggaaatcactaccagagaacggtaaagtggtagtcatagaattagttactcctgatgaggcagagaacggagatatcaacgcaaacattgcctttgacatggacatgttaatgttcactcaatgttctggtggaaaagagagatcaagagctgagtttgaagctttggctgcagcttcttgcttcacccattgcaagtttgtttgccaagcttatcactgctggattattgagttctgtaaa

SEQ ID NO: 52 - DNA, 1119 bp, Arabidopsis thaliana; identical to SEQ ID NO: 51

SEQ ID NO: 53 - DNA, 510 bp, Arabidopsis thaliana
atgcagcagaggaagccgacggcgggtagacccagtggtaccgatggatccgatttctcataccgcatggtcgttgactctcgttacacgaaggtcactaaagaaaaagctcgtctccgtcctttgatctttgttcaggctgcgatttatgtaatcggattatcgtgtgcgtttctaacaacaactaaaaaggatgagaagaacacccttgctattgcagctgctgttgctggcttagtgtgttcattgataggagaattaggttgcagacgtagcagagtaaaccttttgaggctctacacggctgcatcaaccattgttatggttctttctgtgttttgtgctgttaggagcagattaaccatggaggaacgcaatagctctggaacaaccgcgaagcttgagctcgcaggtttcatttgtgctcaattaggagcggtggtgcagatattagcgatcatcgttacagggtcccttgtcaataatatgtctccacctacgaaagcagca

SEQ ID NO: 54 - DNA, 429 bp, Arabidopsis thaliana
atggcgatggctttcaagatggcgacgacggggatgcgtgtgacggatgagtgtacgagttcattcatggacatgaaatggaagaaagttcatagatacatcgttttcaagatcgaagagaagtcacgtaaagtcaccgtcgataaagtcggcggcgccggtgaaagctaccacgatctcgaagattctttaccggtggatgattgtcgctacgctgtctttgatttcgactttgtcaccgtcgataactgccgcaagagcaagatcttcttcattgcatggtcaccggaggcatcaaagataagggcaaagatattgtacgcaacgtcgaaagatgggctgaggagagtgttggaagggattcactatgaacttcaagctactgatccgacggagatgggtttcgatattatccaagaccgtgccaaa

SEQ ID NO: 55 - DNA, 1248 bp, Arabidopsis thaliana
atgtatcagcacatcaaggtgccggcaggcgagaagatcaaggtcaacgccgatctttcgctgaacgtgccggataatccgatcattccctacatcgaaggtgacggcacgggtgtcgatatcaccccggtgatgctgaaagtggtggatgccgccgtggccaaggcgtatggcggcaagcgcaagatctcgtggatggagatctacgcgggcgagaagtcgaccaaggtctatggcccggatgtgtggctgccggaagagaccatggaagtggtcaaggaatacgtggtgtcgatcaagggcccgctgaccacgccggtcggtggtggcatccgctcgctgaacgtggcactgcgtcagcagctcgatctctatgtctgcttgcgcccggtgcgttatttcaaaggcgtgccgtccccggtgcgcgagcccgagaagaccgacatggtgatcttccgcgagaactcggaagacatctatgccggcatcgagtgggaagccgaaagcgaaggcgcgaagaagctgatcgccttcctgcagaacgaaatgggcgtgaagaagatccgcttcccggaaacgtccggcatcggcatcaagcccgtctcgaaggaaggcacgcagcgcctggtgcgcaaggcgctccagtacgcgatcgacaacgacaagccgtcggtgacgctcgtgcacaagggcaacatcatgaagttcaccgaaggcggcttccgcgactggggctatgaactcgcgcagcaggaatttggcgcggaactggtcgatggcggcccgtggtgcaagttcaagaatccgaagactggccgcgatatcgtcgtcaaggacgctatcgccgacgcattcctgcagcagattctgctgcgtccagctgaatattcggtgatcgccacgctgaacctgaacggtgactacatctccgacgccctggccgcccaggtgggtggcatcggcatcgcaccgggcgcgaacatgtccgattcggtcgccatgttcgaagccacgcacggcaccgcgccgaagtatgcaggcaaggactacgtgaatccaggttcggaaatcctctccgcggaaatgatgctgcgccacatgggctggaccgaagcggccgacctgatcatccgctcgatggagaagtcgatccagtcgaagaaggtcacgtacgacttcgcccggctgctagaaggtgcgacgcaggtgtcgtgctcggggtttggtcaggtgatgatcgacaatatg

SEQ ID NO: 56 - DNA, 1080 bp, Arabidopsis thaliana
atggcttcctctatgctctcttccgctactatggttgcctctccggctcaggccactatggtcgctcctttcaacggacttaagtcctccgctgccttcccagccacccgcaaggctaacaacgacattacttccatcacaagcaacggcggaagagttaactgcatgcaggtgtggcctccgattggaaagaagaagtttgagactctctcttaccttcctgaccttaccgattccggtggtcgcgtcaactgcatgcaggccatgggtgaacctaacctcaaccccgcctataccctcgaccaggcgatcgccaatttgcaacaaacagaagatgccagtgcccgttactatgcggcctggtggattggtcgttttcgcgctgctcaaccggaaaccattgctgctttgttggtcgccttggaagatgaaactgatcgctccccggacggtggttatcccctgcggcgtaatgcggctaaagcgttgggaaaattaggcgatcgccaagtggtgccggccctaatcaaagccttggaatgtgaagattactatgtgcgagagtcagcggcccaggcgctggaaggtttgggggatgctagagcgatggcacctctaatggccaagttaacggggggattagcagcggcccagcttgtggagggtaaaccccatttagcccaaccctacgaagcgattattgaagccctgggtactctccaagctgtggagtccattggtttaattgaaccgtttctagagcatttttccccgaaagtccaatacgccgccgccagggccctatttcagttaactggggataaccgttacggcgaccttctcattactgctctgggggggacagacttacaattacgccgttccgccatgatggatttgggagccactggctacttgcccggcgcccaggcgatcgccaaagcctttgcagaaaatagcctcaagttgatcgccctgcgagatttgtgggccacccatcgccaaaggcaagcaagttctgaatcgaaggcgctcagtccagctagccgacaaatattggaattaatggatagtttactc

SEQ ID NO: 57 - DNA, 1080 bp, Arabidopsis thaliana; identical to SEQ ID NO: 56

SEQ ID NO: 58 - DNA, 880 bp, Glycine max
accatgaaaggagaatacgtagagcaacagcaacaacatcctaagagtgaaacaccacctagtatgttctcaaagcttcagcctcagcaccatcctttcccgcaccaccctttccaactctccgccgaggatgccaccaccatcaccccgagcaccgctcagaaggccaactcctccggcggcgacggcgcgaccatcgaggttgttcggcgtcccaggggacgtccgcccgggtccaaaaacaagcccaagccaccggttatcataacccgtgacccggaacccgctatgagtccctacattttagaagtgtctggcggaaacgacgtcgtcgaggccatcgcgcagttcagtcaccgcaagaacatgggaatctgcgtcctcacgggttctggaaccgtcgctaacgtcacgctccgtcaaccttccaccacgcccggcaccaccgttacttttcacggccgtttcgacatcctttctgtttccgccaccttccttccgcagcagtccggcgcttctccggcggttcccaacggattcgccatctcgctcgccggaccgcaggggcagatcgtcggaggacttgttgccggcgggctgatggctgccgggactgtttttgtgatcgctgcctcgttcaacaacccggcataccacaggcttccgccggaggaagagggcgcctccgccggagatggacattcgccgccagtctccggcggcggagacagcgggcatggacaggcggagtcgtgtggaatgtccatgtacagctgtcacttgccctctgatgtgatttgggctccaacggctagaccaccgccgccgccttactaggcgccaggcctggtagtctgattaattaagcgatcgcgggccc

SEQ ID NO: 59 - DNA, 1092 bp, Arabidopsis thaliana
atggggaaaggagggatgtctcaaggagaaggctcaaaggttgaagaagaaaacatggctgcttggttggttggtatcaataccctcaagatccaaccttttcttcttccttccgttggtcctcatgatgtgagagttaggatgaaagctgttggtatttgtggaagtgatgttcattaccttaagaccatgagatgtgcggattttgtggtgaaagagccgatggtgattggacatgaatgtgctgggatcattgaagaagtaggtgaagaagtgaaacatttagtggttggtgaccgtgtagctcttgaacctgggattagttgttggagatgcaatctctgcagggaaggacgatacaacctttgtccagaaatgaagttctttgcaactccaccggttcatggctctttagctaaccaagtggtacaccctgcggacctatgcttcaaattgcctgagaatgtgagtttggaggaaggagcaatgtgtgaaccacttagtgttggtgtccatgcttgtcgccgagctgaggttggtcctgaaacaaacgttttggtaatgggagctggacctattggccttgttacaatgttggctgctcgggctttcagtgtgcctagaattgttattgtggatgttgatgagaaccgtttagccgtagcaaaacagctcggcgcagatgagattgtacaagtgacaacaaacttagaggatgttggttctgaggttgaacagattcagaaagctatggggtcaaacatcgatgtaacattcgactgtgcgggttttaacaaaaccatgtcgacagcattagcagccactcgttgtggcggtaaagtctgtcttgtcggaatgggtcacggtataatgactgtccctctcactcctgcagctgcaagggaggtagatgtggtgggtgtgttcaggtacaagaacacatggccattgtgtcttgagttcctgacaagtggtaagattgatgtaaagccactcataacccacagattcggtttctctcaaaaggaagtggaagatgcctttgaaaccagtgctcgtgggagcaatgccatcaaagttatgttcaatctc

SEQ ID NO: 60 - DNA, 1104 bp, Arabidopsis thaliana
atgaggaagatggtgagagatctcaaggactcttcttctatgattgagcttagagatttccctggtggaccttcgacgtttgaactcaccatgaaattttgctacggcattaatttcgatatcactgcctttaacgtggtctctctccgttgcgctgctggttatcttgagatgactgaggactacaaagaacagaacttgatctttcgagccgagaattacctcgaccagatcgtttttcgcagttttcatgaatctgtcctagtactttgctcctgcgagacgcaagagattgctgaaacatatgaaattcctgaccggtgcgtggaggccatcgccatgaatgcttgcagaaagcagttagtatcaggtttatcagaggagctcaaggggagagattgtctcgagatgtggactgaagaactctctgctctcgggattgattactacgtccaagttgtatctgcgatggcgaggttaagcgtgcggtcagagagtatcgtcgcttctctggtgcattacgctaaaacatcattaaagggtatcatcgatcgaaactgccaggaacagaggaaaatcgttgaagccatggttaaccttttgccgaatgacgaaaaaggatcttactctttatcaattattcctctcggtttcctctttggaatgctcaaggtcggaactataatagatatagagatctcttgcaggctcgagcttgaacgtagaatcgggcatcagttagagaccgcgtctctcgatgatctgcttataccttctgtccaaaacgaagattcaatgtacgatgtggataccgtccacaggatactcacattctttcttgagaggattgaagaggaagatgatgaatgtggttacgattcggattccactggacaacacagttcgttgctgaaagtgggacggatcatggatgcttacttggttgagatcgcaccggatccatacctgagtctacacaagtttacggctattatagagacactacccgaacactcacgtatcgttgacgatgggatctacagagccattgatatgtatctcaaggtaaacaaaaacacaattgaacaaagtctttttatgttt

SEQ ID NO: 61 - DNA, 861 bp, Arabidopsis thaliana
atgtctgaggcattggaagatgttccttcaatgaaaggagggtgtgaagaagaagaagaagggttgaacctgaaggctactgagctgaggcttgggttaccagggtgtgagtcaccagagagggagggtgcgtttaggagtgtggtggtgtctggggccaagaggggtttctctgatgccattgatgaaaactggaatggtggatctgaaaaagatgctgccttgttttctccaaggggtgctgttagtgttagtgctgccaagtctctcactctcactgcaacagactgcaccaaccaaccaactgctttgggtgcttctgttctcaaggaaactgttccacgctctccaaaaccattgcatgagaaaaagccccagatttctgctccagctgctaaggcgcaggttgtgggatggccaccaatccgttcattcaggaagaactcaatggcttctcagcctcaaaagaatgatactgatgcagaagccaagtctggatgcctttatgttaaagtcagcatggaaggcgccccatacttgaggaaagtggatctgaatagttttaccacttacaaggacctctctttggcacttgaaaagatgtttagttgttttacactcagtcaatgtggctcttatggggtttctagtcgagaaaatttaagtgaaagtagattgatggatctccttcatggttcagaatatgttcttacctatgaagacaaggacggagattggatgctagttggtgatgttccgtgggagatgttcactgagtcttgcaagaggctgaggataatgaagagttttgaagcaattgggctagcacctagagccatggaaaagtgcaaaagtcgtaac

SEQ ID NO: 62 - DNA, 357 bp, Arabidopsis thaliana
atgtcaactttcttgataaggatacttcttcctttgcttatcatagcaatgactcttcctcgacgttcagaggcagagtcggaacaatggtgcatagcggatgaacaaacgccagacgatgagttgcaagcagccttagactgggcttgcggaaaaggtggagcagactgcagcaaaatgcagcaggaaaaccagccttgcttcttgcctaacacaatcagagatcatgcctcctttgctttcaacagttactaccaaacttataaaaacaaaggtggttcttgttacttcaaaggagctgccatgatcactgagcttgaccccagccatggttcttgccagtatgagtataacccc

SEQ ID NO: 63 - DNA, 276 bp, Arabidopsis thaliana
atggctttgttcttatctcctaaaaccatcactcttctcttcttctccctctccctcgcactctactgcagcatcgatcctttccacactgcgccatttccgatttccccaatttcgtctctcacgaagttatctctccacgtcccgacgaagttccatgggagagagattcacaaaattcacttcagaaatcaaagattctgttttttaaccaaatccaaggtccagagagcgtcgcctttgattctctcggacgtggtccgtacacggcgttgc

SEQ ID NO: 64 - DNA, 947 bp, Arabidopsis thaliana
ttttttatatggatgttgccgcgatggcgagatgtgtgggaaggtgctacgtttcgccggcgttcggtgagtctgaatcgcaccggttatcggagcggcggtttctgaaattgtctagctccacgaattcggatcccgccggtagtaaaagtttgaagcttcgcgggaaaattcatcggagaatgagctacttccgtccgatcatggcaaaagatgaatccatttcatcgcggtccggtgaaacgaagcaaatcaatggaaagcaaaagaacattgtctggcatgattgtcccgttactaaatccgacaggcaagaattaattaagcaaaagggatgtgtgatttggattactggcttaagtggttcaggtaaaagtagtctggcatgtgctcttagtcgagctttgcacaatcgtggaaagctttcgtatatacttgatggtgacaatgttcgacatggtttaaacagcgatcttagtttcgaagcagatgatcgagctgaaaacattcgaagagttggtgaagtggctaaactgtttgcagattctggtattatctgtattgcaagtttaatatctccttaccggatagaacgagctgcctgccgtgcattattaccacaaggagatttcattgaggtatttatggatgtgccactccatgtttgtgaagctagagatccaaagggcttatacaaacgtgcacgcgctggtaaaatcaaaggttttacaggagtagatgatccatatgaagcgcctttggattgcgagattgtaatacaaaacagtagagacaaggggctttcttcttcatcttcatcttcatcttcaccttcatcttcgtcttcttctctgtgtgaaatggcagatattgttgtgtcgtacttggaccaaaatggatacctgaagaaacactccacaaaatcacgtaattgtatgtaaatgtaa

SEQ ID NO: 65 - DNA, 1611 bp, Arabidopsis thaliana
atgggaatttcaaaaccactccctctattttcgattttagtcctctatttttcactctacaccattacaccaacttcttcattagcctccctccaagatcaattcatcaactgtgtccaaagaaacacacatgtttacttcccacttgagaaaacgttctttgctcctacaaaaaatgtctctatgttcagccaagttcttgaatcgacggctcaaaatctccggttcttgaaaaaatccatgcctaaaccgggattcatattcagccctattcacgagtctcacgtacaagcttccatcatttgttccaagaaactccgaatgcatctccgtgtcagaagcggcggtcacgactacgaaggcttgtcttatgtctctcagatcgataaaccgtttatattgatggatctgtcaaagatgagacaggtcaacattaatattcaagacaacagtgcttgggttcaatctggtgccactgttggtgaactttattacaggattgcggagaagagcaaagtccatgggttcccggcgggtttgtgctcgagcttaggcataggaggacacataacaggcggtgcgtacggttccatgatgcggaaatatggtctaggtgcagacaatgttctagacgcaaagattgttgatgccaacggtaaattactcgatagagccgcgatgggtgaggatacattttgggctattagaggaggcgctggagggagttttgggataattctagcatggaagatcaagcttgttcctgttcctaagaccgtgaccgtctttaccgtcaccaaaacgttacaacaagacgtgggtaacaagattatctcaaagtggcaaagagttgcggacaagcttgttgaagagctattcatcagagtgctcttcaacgtagctggaaccggtgggaacaagactgtgacgacgtcgtacaatgctctgtttcttggcgggaaaggaacgctgatgaacgttatgaagaagagtttccccgagctagggctaacatttaaagattgtatcgaaatgagctggcttgaatccattgcttacatttctggattcccgacccacacgcctactaatgttttgcttcaagggaagtctccgttcccaaaggtcagcttcaaagccaaatcggatttcgtgaaaaccccgattcccgaatccgggcttcaagggatcttcaagaagctacttaaagaagatattccattgatgatatggaatccttacggaggaatgatggcgaaaatccccgaatcccaaatcccttttccgcatcgaaaaggagtcctcttcaaggttcagtacgtaacaagttggctagacagtgacaagagaccgagcagacacatcaactggatcagagatctctatagttacatgacgccttatgtctcaagtaacccacgagaagcttacgtgaactaccgtgatttagacctgggaaggaacacgaaagacgtgaaaacatgcatcaaacaagctcaagtctggggagctaactacttcaaaaacaatttcaacagattgatgatgattaaagcaaaggttgatccagagaacttctttagacacgagcagagcattccacctatgatg

SEQ ID NO: 66 - DNA, 978 bp, Arabidopsis thaliana
atgtctttaaccacagtccctacgctcgccatcagatccggaccatccggtcatcactcgatgccggttcttggttttggaaccgccgcttctccgctaccggaaccaacgatgctgaaagagacggtgattgaggctattaagcttggttatcgccatttcgacacctctccaaggtaccaaacggaggagccgatcggcgaagctttagcggaggcggtttcactcggcttagttcgatctcgatctgaattctttgtcactaccaaactttggtgtgctgatgctcatggtggtctcgtcgtaccggcgatcaaacggagtttgaaaaaccttaaactggactatcttgatctttatataattcattggccggttagctcgaaacctggtaaatacaagtttcctattgatgaagatgattttatgccaatggatttcgaagtagtgtggtctgaaatggaggagtgtcagagacttgggctcgcaaaatgcataggagtaagcaatttttcatgtaagaagcttcaacacatactctctatcgcgacaatcccgcctagcgtcaatcaagttgagatgagtccaatatggcaacaaagaaagctaagggagctttgtagatcgaacgacattgttgtcacagcgtactcggtgttgggatctagaggagctttttggggaactcccaaaattatggaatctgatgttctcaaagaaatagcagaagcaaaggaaaaaacagtggcccaggtgagtatgagatgggcttatgaacaaggagtgagcatggtagtgaagagctttaccaaagagagattagaagagaatctaaagatatttgattggtctttgacagaggatgagacacagagaatttcaactgagattcctcagttcagaaacgtccacggagaggtttatacctctaagaaaggtcccatcaaatctgtcgccgagatgtgggacggggagatc

SEQ ID NO: 67 - DNA, 1140 bp, Arabidopsis thaliana
atgatatgtatcgacaactccgagtggatgcgaaacggagattactctccgtctaggttacaggcgcaaacggaagctgttaatcttctttgcggagccaaaacccagtcgaatccggagaatacggtggggattttgacaatggctggcaaaggagttagagtattgactactcctacctctgatcttggcaaaattctggcctgtatgcacggccttgatgtgggaggagagatcaacttaaccgcagctatccagatcgcccagctagctcttaagcatcgccaaaacaagaatcaacgccaaaggattattgtttttgctggaagtccaatcaagtacgagaagaaggccctagagatagttggaaaaaggctgaagaagaatagtgtctctcttgatattgtcaatttcggggaggatgatgatgaggaaaagcctcagaaactcgaggcgctccttacagctgtgaataacaatgacggtagccacattgttcatgttccttctggagccaatgctctctcagatgtgcttctcagcacacctgtattcacgggtgatgagggtgcaagtggctatgtttctgcggcagctgctgcagcggccgcaggtggggacttcgactttggtgtggacccaaatatcgatccagaacttgctcttgcccttcgggtctccatggaggaggagagagcaagacaagaagctgctgccaagaaggcggccgatgaggcaggtcagaaagacaaagatggggacacagcttccgcctcacaggagacagttgctaggacaactgacaagaacgctgaaccaatggatgaggacagtgcgttgctagatcaggcaattgctatgtctgttggtgatgtgaatatgtcagaagcggctgatgaggaccaggatctggctttagctctgcaaatgtcaatgagtggggaagagtcaagtgaagctacaggtgctggaaacaacctcttgggaaatcaagccttcatatcgtctgttctctcatcgcttcctggggtggatcccaatgatccggcagttaaagaactactagcgtctctgccagacgagtcaaagcgtaccgaggaggaagagagtagtagcaaaaaaggcgaggatgagaagaag

SEQ ID NO: 68 - DNA, 1533 bp, Arabidopsis thaliana
atggagattttgacgagcatagctattacagtagcaacaacgatcttcatcgttttgtgtttcactatctatcttatgatcagaatctttaccgggaaatcaagaaacgacaagagatatgctccagtgcatgccacggtctttgatcttctcttccacagcgacgagttatacgattacgagacagagatcgcgagagagaagccgacttacaggtttttgagtccaggacagagcgagatattaactgcagatcctcgtaacgtggagcatattctcaagacaagattcgataactatagtaaaggacacagtagtagagagaatatggcggatcttctaggacatgggatctttgctgttgatggagagaaatggagacaacagaggaagctttcgagctttgagttctctactagagttttaagagattttagctgctctgtttttaggagaaatgcatctaagcttgttggttttgtctcggagtttgctctctctggaaaagcttttgatgctcaagatttgttgatgagatgtacactggactccatctttaaagttgggtttggtgtggagttaaaatgtttggatgggtttagcaaagaagggcaagagtttatggaagcttttgatgaaggtaacgttgcaactagttccagattcatcgatcctctttggaagctgaaatggtttttcaacattggatcacaatctaagctcaagaagagcattgctactatagataaatttgtctatagtctcattaccactaaaaggaaagagcttgctaaggaacagaacactgttgttagagaggacatactatcgagattcctagtggagagtgagaaagatccggagaacatgaatgataagtacctgagggatataattctgaacttcatgattgctggtaaggacacaaccgctgcactactctcttggttcttgtacatgctctgcaaaaacccacttgttcaggagaaaatcgtacaagaaatcagagatgtgacatttagtcacgagaaaacgaccgatgtaaatggtttcgttgaaagtattaacgaagaggctcttgatgagatgcactacctccatgcagccttgtctgagaccttgaggctctaccctcctgtgcctgtggacatgaggtgtgcagaaaatgatgacgttcttccagatggacatagagtgagcaaaggggataatatctactacatagcctatgcaatgggtaggatgacttacatttggggtcaagatgctgaagaattcaagccagagagatggctcaaggacggcttattccaacccgaatcaccattcaaattcataagctttcatgctggtccaagaatctgtcttggcaaggatttcgcataccggcagatgaagatagtatcaatggcacttcttcacttctttcgcttcaaaatggctgatgagaacagcaaggtgtattacaagagaatgcttactcttcatgtcgatggaggactccatctctgtgcaatcccgaggacaagcact

SEQ ID NO: 69 - DNA, 993 bp, Arabidopsis thaliana
atgacggcaattccaaacgtcgtcgatattgaatcttcttcctcttcgctttgtcaagagacggcaacggagaccgtcaccgttgaaagaggctcgtctgattcatcttcaaagccagacgacgtcgttttactaatcaaggaagaggaggatgacgccgttaacttgtcacttggtttttggaaattgcacgagataggtttaataacaccgttcttgagaaagacgtttgagatcgtcgatgacaaagtaacagacccggttgtatcatggagcccgacccgtaaaagctttatcatttgggattcttacgagttctcagagaatctacttcccaaatacttcaagcacaagaacttctccagttttattcgtcagcttaactcttacggttttaaaaaggtcgattcagataggtgggaatttgctaacgaagggtttcaaggagggaagaaacatttgcttaagaacatcaagaggagaagcaaaaacactaaatgttgtaacaaggaagcgagtaccaccacgacagagactgaggttgagtcattgaaggaggaacagagtccaatgagattggagatgttgaagctgaaacaacaacaagaagaatctcaacatcagatggtcactgtgcaggagaagatccacggagttgataccgaacaacagcatatgcttagtttctttgcaaagttggctaaagatcaaagatttgtagagagactggtgaagaagagaaagatgaaaatacagagagagctagaagcagctgaattcgtgaagaagctcaagttgcttcaggatcaagaaactcaaaagaacttgttagatgtagaaagagaatttatggccatggctgcaacagaacacaatcccgagcctgacattttggtgaacaatcaaagcgggaatacgagatgtcagcttaactcagaggacctacttgttgacggtggctcaatggatgtaaatgggaggatagagatagag

SEQ ID NO: 70 - DNA, 894 bp, Arabidopsis thaliana
atgacggaagagtttgagatcgcaggaatctccaccggagcttggtggagctcgccaacaaacaccgccgcagtattctctggctactcgctgccatgttccactgagattagccctgatgtcacaaatttcggatggcaaaacttcgataacaagattaacgatcataatgatggttgtatgaacatgcataatagtttcttcgaaggactattaatcgatcctaacgatcaattactaccggatccatggtccaaaagtacaattcctaacgctaaatctgagctccttgaaaacttcccattcttagataacatgttcttggtcgattcagaagctgaatctttgttggatcatgaaatcagaaaccataagtcgtctaaggagcaaattacacaagactacaggaatcttacttcaaagaggagtgaagaattagaagagaacagcgatgagtattcaccgcgattactaaaaagaccgagactcgagacactatctccattgccaagcttcaaagttcgtaaagaaaaactcggagatagaatcactgcgcttcagcaactggtttctccatttggcaagacagatacagcttctgttctcaacgaagctgtagagtacataaagtttcttcaagaacaagtcactgtattgagtaatccagaacagaacaccataggatctgttcaacaacagcagtgttcaaacaagaaatctatcaatactcaaggagaagtagaagaagacgaatgtagtccaagaagatatgtagatctttcgagccgtggactatgtctaatgccgatctcagcttcatatcccgtggctgcagctgcggcttcggctgcagagatgaacgtacatctggtttctggcatcttccattctttg

SEQ ID NO: 71 - DNA, 906 bp, Arabidopsis thaliana
atgtcatcaagtggaaccatttggagctatgaggaagaaaaagcatttgagaatgccatagctatgcattggattgaggaatcctcaaaagagcaatgggagaaaattgcttcagcagttcccagcaaaagcatggaagatgtgaagcaacattaccaggttctagtagaggatgtaagtgcaatagaggcaggtcacatatcattcccaaactatgctgcttctgaggaaatcacatcttcaaataaggactttcatggctcttccaaggccacaagctcagataaaagatcaaattgtaattatggacgtggtttttctgggttaggacatgactccaccactcatagtagtggtaaaggaggcttgtcaaggtcatcagaacaagaaagaagaaaaggaatcccatggactgaagaggaacacaggttatttttacttggtctagagaagtttggaaaaggagattggagaagcatttcaaggaactttgtgatatctaggactcccactcaagtggcaagccatgcacaaaagtacttcataaggttgaattcaatgaatagagacaggaggaggtctagtatccatgatatcactagtgtgaacaatggagatgtggctaataaccaagcacctattacagggcagcatagtagcacaattccttcaaacacaatgggtgtaggacaatcccttaagcatagagttcagggtcacataccacctggtttaggcatgtatggaacaccagttggacatcctgtggctgctcctccagggcacatggcatctgcagttggcactcctgtcatgcttcctcctggaccccacccccatgctcatcctcatccaccttatgttcttcctcttgcttacccaatggcacctccaacaatgcatcaa

SEQ ID NO: 72 - DNA, 510 bp, Glycine max
atggctagcgatggcagcgaagagttcaggctagtgtcaccggcgttcaaaaacggggggaagttaccgaggcactacaccgacgatggtcagggtacgaagaagaacatatcccctccattggagtggtataacctcccggaggggacgaagactcttgccctcgtggtggaggatattgatgcgaccgattctggtgggcccatggtgccatggactcactgggtcgtcgcaaacatcttggccacggtgaagggcttgccggagggattttccggcaagtcggccgagatggggggcgactacgcggcgatcaaggaggggaacaatgacctgaaggtgcctgggtggaatgggcccaggctgcccacgcctggacacaggattcagtttaggctctatgctttggatgatgagctcaagcttggtaacaagttgacgaaggagaagttgttggaagataccattgaaggacatgtgttaggagaagcgaccttgatggctatattc

SEQ ID NO: 73 - DNA, 1260 bp, Arabidopsis thaliana
atggcgaacgtaatctcaatttcccattttacccttctcgcattaccttatttacttctcctcctatcttccaccgccgccgcaattaacgtcaccgccgtcctctcctctttccctaatctctcatctttctcaaacctcctcgtctcttccggcatcgctgccgaactctccggtagaaactcattaaccctcctcgccgttcccaattctcaattctcctccgcctccttggacctcacgcgccgcctacctccttccgccctagcagatctcctccgcttccatgtcctcctccagttcctttcagattccgatctccgacgtattccaccgtcaggctccgccgtcactactctctacgaagcttccggtcgtacattctttggatctggatccgttaacgtaacccgtgacccggcttcaggatccgtcacgatcggatctccagccaccaaaaacgtcactgtgttaaagcttctcgagaccaaacctcccaacataaccgtcctcaccgtggactccctcatcgtccccaccggaatcgatatcaccgcatcggagactctcactccaccgccgacgtcaacatctctctcccctccaccggcgggaatcaatctcactcagatactaatcaacggacacaacttcaacgtcgctctatccctcctcgtcgcttccggtgtcataacagaattcgaaaacgacgaacgtggcgccggcatcacagtcttcgtccccaccgactccgccttctccgatctcccttccaacgttaacctccagtcattaccggcggagcaaaaagcattcgtgttaaaattccacgtgctacattcatactacactctcggttcactagaatcaataaccaacccggttcaaccgacattagccactgaagaaatgggagccggttcatacactctcaacatctcccgggttaacgggtcaatcgtaacgatcaattcgggtgtggttttagctgttgtgactcaaacggcttttgatcaaaacccggtttctgttttcggagtatccaaagttcttttgcctaaagaactatttccaaaatcgggtcaacccgttgccacagctcctccacaggagatttctttgtcgccggagagttctagtgaacagccgtcacgactagtatcaccaccgcgtgagatagtttcttccggcgcggttaaaagaccacttggtttcttggtcttgtggtgttggtgtatagcattttgttatgttttggta

SEQ ID NO: 74 - DNA, 1647 bp, Zea mays
atggctcggagggccgcgtcctcgctcgtctcccgctgcctcctggcgagggcccctgccggcgcgccgcccgctgccccctctgcgctgcgcaggacagtgcctgcagatgggatgcacaggctgttgccaggtgtccttcagaggttcagcactgcagcagcagtagaggagcccatcacgccgtcagtccatgtgaactacacaaagctcctcattaatggcaactttgttgattccgcatccggcaagaccttcccaactctggaccctcgtacaggggaggtgattgctcatgtggctgagggtgacgcagaggacattaaccgtgcagtagctgcggctcgcaaggcttttgatgaagggccatggccgaagatgactgcctatgagaggtcccgtatcctactgcggtttgctgatttgatagagaagcacaatgacgagcttgctgctttggagacatgggacaacgggaagccatatgagcaagcagcccagattgaagtacccatggtggcccgtcttatgcgttactatgctggttgggctgataagatccatgggctcattgtgccggctgatggcccacaccatgtacagatcttgcatgagcccattggagttgcaggtcagatcatcccatggaactttcctcttctgatgtttgcctggaaagttggccctgctttggcatgtggaaatactctcgtgctcaagactgctgaacaaacccctctatcggctttgtatatctccaaattgttgcatgaggctggactgcctgagggtgttgtgaacgtcgtttctggttttggccctactgctggtgctgctcttgctagtcacatggatgttgataagatcgcatttactggatctaccgatactggaaaaattattctcgagttggctgcaaagagcaaccttaagacagtgacactggagttaggaggcaagtcccctttcatcataatggacgatgctgatgttgaccatgctgttgagcttgcgcactttgccctgttctttaaccagggacaatgctgctgcgctggatctcgcacgtttgtacatgagcgtgtttatgatgagtttgtggagaaggccaaggctcgtgcattgaagcgcgtcgttggtgatccgttcaggaaaggtgttgaacagggcccgcagattgacgacgagcaattcaacaagatcttgcgctacattaggtatggtgttgacggtggagctacccttgtgacgggtggtgataggttgggtgacaagggtttctacatccagccaacgattttctcagatgtccaggacggcatgaagattgctcaggaggagatatttgggcctgtgcagtcgatcctcaagttcaaagacctcaatgaggttatcaagagggcaaacgcgagccagtatggattggccgccggcgtgttcaccaacagcctggacacggccaacaccctgacgcgcgcgctcagggccgggaccgtctgggtgaactgcttcgacgtcttcgatgctgcgattccgtttggtgggtacaagatgagcggcatcgggagggagaagggcgttgacagcctgaagaactacctgcaggtgaaggcggtcgtcaccccaatcaagaacgccgcgtggttg

SEQ ID NO: 75 - DNA, 1647 bp, Oryza sativa
atggctgccgctgctgcaaggaggggctcatcgctgctctctcgctgcctgctgtccaggcccgccgccgccgcctcgcctgctgtcccctctgcgctccgcagggcagatgggacacaaggattgttgccgggaatccttcagaggttcagcactgcagcagtagcagaggagcccatatcacccccagtccaagtgaactacactcagctcctcattgatggaaaattcgttgattcagcatctggcaaaactttcccaactctggaccctcgtaccggggagctgattgcccatgtggctgaaggcgatgcggaggatattaaccgtgcggttcatgcggcccgcaaggctttcgatgaagggccatggccaaagatgactgcctatgagagatcccggattctgttgcggtttgctgacttgattgagaagcacaacgatgaaattgctgcattggagacatgggacaacggcaagccgtatgcgcaagctgccaacattgaagtgccaatggtggcacggctgatgcggtactatgctggttgggctgacaagatccatgggcttgtcgtgccggctgacggcccacaccatgtacaggtgctgcacgagcccattggtgtcgcaggtcagatcatcccatggaactttccgcttctgatgtttgcgtggaaagttggccctgctttggcttgtggaaacactgttgtgctcaagacggctgagcaaactcctctgtctgctctatttgcttctaagctgttgcatgaggctggactcccagacggtgttgttaacgtggtatctggttttggacctactgctggtgctgctcttgctagtcacatggatgtcgataagattgcattcactggatcgaccgatactggaaaagtcgtccttgagttggctgcaaggagcaaccttaagtcagtgacactggagctaggaggcaagtctcctttcatcatcatggatgatgctgatgttgaccatgctgttgagcttgcgcattttgcactgttctttaaccagggacaatgttgctgtgctgggtctcgtacatttgtgcatgagcgtatctatgatgagttcgtggagaaggccaaggctcgtgctctcaagcgtgtggttggtgatccattcaagaatggtgttgaacagggccctcagattgatgacgagcaattcaacaagatcttgcgctacatcaagtatggtgttgacagtggagccaaccttgtgactggtggcgacagattaggtgacaaaggttactacatccagccaacaattttctcggatgtacaggataacatgaggattgctcaagaagagatatttggccctgtgcagtccattctgaagttcaatgatctgaacgaggtcatcaagagggcaaatgcaagccagtacgggctggctgctggggtcttcaccaacaacctgaacacggccaacaccctgacccgcgcgctcagggtcgggaccgtgtgggtgaactgcttcgacgtcttcgacgccgcgatcccgttcggcggatacaagcagagcggcatcgggagggagaagggcatcgacagcctgaagaactacctgcaggtcaaggccgtcgtcacgccgatcaagaacgccgcgtggttg

SEQ ID NO: 76 - DNA, 165 bp, Oryza sativa
atggcgggaacggcgaactgcatcgacatcctcatcgccatcatcctcccgcccctcggcgtcttcctcaagttcggatgcgggcatgagttctggatctgcctgttgctcaccttcctcggctacatccccggcatcatctacgccatctacgccatcaccaag

SEQ ID NO: 77 - DNA, 165 bp, Saccharomyces cerevisiae
atggattctgccaagatcattaacattatattatcccttttcttaccaccagtcgccgtttttctagcccgtgggtggggtactgactgtatagtggatatcattttgaccattttggcttggttcccaggtatgctatatgccttgtacattgtcctacaagat

SEQ ID NO: 78 - DNA, 1218 bp, Arabidopsis thaliana
atggatccttcatttaggttcattaaagaggagtttcctgctggattcagtgattctccatcaccaccatcttcttcttcatacctttattcatcttccatggctgaagcagccataaatgatccaacaacattgagctatccacaaccattagaaggtctccatgaatcagggccacctccatttttgacaaagacatatgacttggtggaagattcaagaaccaatcatgtcgtgtcttggagcaaatccaataacagcttcattgtctgggatccacaggccttttctgtaactctccttcccagattcttcaagcacaataacttctccagttttgtccgccagctcaacacatatggtttcagaaaggtgaatccggatcggtgggagtttgcaaacgaagggtttcttagagggcaaaagcatctcctcaagaacataaggagaagaaaaacaagtaataatagtaatcaaatgcaacaacctcaaagttctgaacaacaatctctagacaatttttgcatagaagtgggtaggtacggtctagatggagagatggacagcctaaggcgagacaagcaagtgttgatgatggagctagtgagactaagacagcaacaacaaagcaccaaaatgtatctcacattgattgaagagaagctcaagaagaccgagtcaaaacaaaaacaaatgatgagcttccttgcccgcgcaatgcagaatccagattttattcagcagctagtagagcagaaggaaaagaggaaagagatcgaagaggcgatcagcaagaagagacaaagaccgatcgatcaaggaaaaagaaatgtggaagattatggtgatgaaagtggttatgggaatgatgttgcagcctcatcctcagcattgattggtatgagtcaggaatatacatatggaaacatgtctgaattcgagatgtcggagttggacaaacttgctatgcacattcaaggacttggagataattccagtgctagggaagaagtcttgaatgtggaaaaaggaaatgatgaggaagaagtagaagatcaacaacaagggtaccataaggagaacaatgagatttatggtgaaggtttttgggaagatttgttaaatgaaggtcaaaattttgattttgaaggagatcaagaaaatgttgatgtgttaattcagcaacttggttatttgggttctagttcacacactaat

SEQ ID NO: 79 - DNA, 530 bp, Arabidopsis thaliana
ggcgtgcgggcgcgccaccatggatttaggaaggtttccaataatctcaatcctcgaagacatgcttgaagtccccgaagaccacaacaacgagaagacccgcaacaacccttcacgagtttacatgcgagacgctaaggcaatggctgctacacctgctgacgtcatcgagcaccctaacgcatatgcattcgtcgtggacatgcctggaatcaaaggagatgagatcaaggttcaggtcgagaacgacaatgtgcttgtggtgagtggagagaggcagagagagaacaaagaaaacgaaggtgtgaagtatgtgaggatggagagaagaatgggtaagttcatgaggaagtttcagttgcctgaaaatgcagatttggacaagatctctgctgtttgtcatgacggtgtgttgaaggttactgttcagaaacttcctcctccggaaccaaagaaaccaaagacaattcaagttcaagttgcttaggcgccaggcctggtagtctgattaattaagcgatcgcgggccc

SEQ ID NO: 80 - DNA, 492 bp, Zea mays
atggccgacgacggcgggagccacgagggcagcggcggcggcggaggcgtccgggagcaggaccggttcccgcccatcgccaacatcagccggatcatgaagaaggccgtcccggccaacggcaagatcgccaaggacgctaaggagaccctgcaggagtgcgtctccgagttcatatcattcgtgaccagcgaggccagcgacaaatgccagaaggagaaacgaaagacaatcaacggggacgatttgctctgggcgatggccactttaggattcgaggagtacgtcgagcctctcaagatttacctacaaaagtacaaagagatggagggtgatagcaagctgtctacaaaggctggcgagggctctgtaaagaaggatgcaattagtccccatggtggcaccagtagctcaagtaatcagttggttcagcatggagtctacaaccaagggatgggctatatgcagccacagtaccacaatggggaaacc

SEQ ID NO: 81 - DNA, 840 bp, Zea mays
atggactccagcagcttcgtccctgccgccggcgcggagaatggctcggcggcgggcggcgccaacaatggccgcgttgctcagcagcaggcgccggcgatccgcgagcaggaccggctgatgccgatcgcgaacgtgatccgcatcatgcggcgcgtgctgccggcgcacgccaagatctcggacgacgccaaggagacgatccaggagtgcgtgtcggagtacatcagcttcatcacgggggaggccaacgagcggtgccagcgggagcagcgcaagaccatcaccgccgaggacgtgctgtgggccatgagccgcctcggcttcgacgactacgtcgagccgctcggcgcctacctccaccgctaccgcgagttcgagggcgacgcgcgcggcgtcgggctcgtcccgggggccgccccatcgcgcggcggcgaccaccacccgcacccccactccatgtcgccagcggcgatgctcaagtcccgcgggcccgtctccggagccgccatgctaccgcaccaccaccaacaccaccacgacatgcagatgcacggcgccatgtacgggggaacggccgtgcccccgccggccgggcctcctcaccacggcgggttcctcatgccacacccacagggtagtagccactacctgccttacgcgtacgagcccacgtacggcggtgagcacgccatggctgcatactatggaggcgccgcgtacgcgcccggcaacggcgggagcggcgacggcagtggcagtggcggtggtggcgggagcgcgtcgcacacaccgcagggcagcggcggcttggagcacccgcacccgttcgcgtacaag

SEQ ID NO: 82 - DNA, 672 bp, Oryza sativa
atgccggattcggacaacgagtcaggggggccgagcaacgcgggggagtacgcgtcggcgagggagcaggacaggttcctgccgatcgcgaacgtgagcaggatcatgaagagggcgctcccggcgaacgccaagatcagcaaggacgccaaggagacggtgcaggagtgcgtctcggagttcatctccttcatcaccggcgaggcctccgacaagtgccagcgggagaagcgcaagaccatcaacggcgacgacctcctctgggcgatgaccacgctcggcttcgaggactacatcgacccgctcaagctctacctccacaagttccgcgagctcgagggcgagaaggccatcggcgccgccggcagcggcggcggtggcgccgcctcctccggcggctccggctccggctccggctcgcaccaccaccaggatgcttcccggaacaatggcggatacggcatgtacggcggcggcggcggcatgatcatgatgatgggacagcctatgtacggctcgccgccggcgtcgtcagctgggtacgcgcagccgccgccgccccaccaccaccaccaccagatggtgatgggagggaaaggtgcgtatggccatggcggcggcggcggcggcgggccctccccgtcgtcgggatacggccggcaagacaggcta

SEQ ID NO: 83 - DNA, 531 bp, Oryza sativa
atggccgaccaccatggcggccaccacgccgacgggcatcgccggcagcagcagctgcagggggaggcggcggatcaggcggcggcggagatcatcaaggagcaggacaggttgctgccaatcgcgaacgtggggcgaatcatgaagcagatcctcccccccaacgccaagatctccaaggaggccaaggagacgatgcaggagtgcgtctcggagttcatcagcttcgtcaccggcgaggcctccgacaagtgccacaaggagaagcgcaagacggtcaacggcgacgacgtctgctgggccttcggcgccctcggcttcgacgactacgtcgaccccatgcgcaggtacctcaacaagtaccgcgagctcgagggcgaccgcgctgccgccgccgccacctcccgctccggcgccggcgccgccgcgggccccgaccacccttcctcctcctcctccgccgccgccgccaccgccggtcatttcatgttcaacgccatggacaggtcgacggatagctccaggcagttc

SEQ ID NO: 84 - DNA, 279 bp, Oryza sativa
atggcgtccttcgctcgccgtgccatgagcttagctcagatcccatctgctcgtatttcctctggagccgcttctattggtcagcgtcgttgcctcgccggcgccgctgatcaccatggatctaccaaggttgacttctggaaacagcccacgaacccaggaaactggaaagaggagcattttgtgcttatttctctgtctggctggggcttacttttctacagtggatacaagctcgccactgggggaaaaaaagagacgcctgtggagagtacacaa

SEQ ID NO: 85 - DNA, 429 bp, Oryza sativa
atgtcggaggggttcgacgggacggagaacggcggcggcggcggcggaggcggagtagggaaggagcaggaccggttcctgccgatcgccaacatcggccgcatcatgcgccgggccgtgccggagaacggcaagatcgccaaggactccaaggagtccgtccaggagtgcgtctccgagttcatcagcttcatcaccagcgaagcaagcgacaagtgcctcaaggagaagcgcaagaccatcaatggggacgacctgatctggtcaatgggcacgctcggattcgaggactatgtcgagcctctcaagctctacctcaggctctaccgggagacggagggtgacacaaagggttcaagagcttctgaactgccagtaaagaaagatgttgtacttaatggagatcctggatcatcgtttgaaggcatg

SEQ ID NO: 86 - DNA, 888 bp, Oryza sativa
atggatccgatggatatcgtggggaagtccaaggaggacgtctccctccccaaatcaacaatgtttaagattataaaggagatgttgccccctgatgttcgagtggcaagagatgcacaagatcttcttgtggaatgctgtgtagagttcatcaacctcctatcttctgaatccaatgaagtttgcagccgagaggacaagaaaactattgctcctgagcatgttcttagagctctgcaggatcttggctttagggagtacattgaagaggttcaagcggcctacgaacaccataagcatgataccctggattctccaaaagcaagcaaattcactggtgtggagatgacagaggaacaagctgtagctgagcaacagaggatgtttgctgaggcccgagcaaggatgaacaatggtgccgccaaaccgaaggagccagaacctgaagcgcagcaacaaacacaacagccaccacagcctcagctgcaccctcaaccacagcaacccctgcagcctcaacttcagctccatcctcaaccacaacaacagccctcacagctacatcctcaacagctgctgcatcctcaatcgcagcaaactccgcagcctcaacctcaggtccaccctcaaccacagcagcctccacagctgcaaccgcaacctcagcttctccagcaaccgcagctgccccaacagctgcagccgcaatctcagctccccccacaaccgcagcagcccccacagctgcagctgcaatctcagctccacccacaaccgcagcagcccccacagctgcagccgcaacctcagctccatcagcaaccgcagccgcaggcagagctgcaatcacagtcacaaccacaaacagaacatggcttggacagttca

SEQ ID NO: 87 - DNA, 762 bp, Zea mays
atgaggaagaagctcggcacccggttccccgcggctcgaatcaaaaagataatgcaagcagatgaggatgttggaaagattgcactagcagttcctgttttagtttcgaggtctcttgaattgtttttacaagatttaattgaccgtacttatgaaattactcttcaaagtggagcaaagacactgaattccttccacctgaagcaatgtgtgaagaggtacagttcttttgatttcctaactgaagttgtcagcaaggtaccagatcttggtggcgctgattcctgtggagatgaaagaggattacctagaagaagaaagtcaaatggcagtgacccagagaatgatgaatcaagatctagtaaaatggccataagaaatgcaaacatcagccccagaggacgtgggaggggtcgaggcagaggacgaggtcggccaccaaccaagagaaaggaggttggttatgtacaatttgaagatgagagcagcatgtttgctgaacaaggtgagcccttgccaggagaggaaacagttcaagagatcaatggcaacgagaccatgcctcaaagcacgcaacctccagtagaggctccgccaacagcccttgcacaagctacaacaagttctaaggcggaagaagcgaacagtgatcatcagtcagattggcctatgccagatgccattggaagcatcggtgtcgtgccatctggttttggacatctgacagtgcaggttgaagatgaggactacgacaatgaggat

SEQ ID NO: 88 - DNA, 1053 bp, Arabidopsis thaliana
atgtcgccggagatggaattcgtgaaggttttgggaaagggtacttacggctccgtcgagctcttcagccacaaacaaaacgacggatcgttgctctacaacgcagtgaagatcatggactctgagaactacggttctatagaccaagagtttcgaattctgtcggaactcagaggatgtccttgtatcgtgcaattgtgtgggaactctcttgttcaaggaattgattgcaatggaaaaaaagtttacatgatgtcaatggagtatgcagctgctggtactctaactaatttcatcaaaagaaaccgaacgaagttgtcggattctgttattaaagacttcactcgtatgattctacaaggattggtctcgattcataatcatggttatgttcattgtgatcttaaaccggacaatatccttctttttcctctttacgataaagatacgtggaattgttcttacgagttgaagatttcggatttcggaatatcgacaagggccggagacaaatctggttgttggagagtcgatgaaccgtgggtgggaacgtctatctacatgtctcctgagtcagtcagcgacggcaccaccgttgagaaaaccctagatttgtggtcacttggttgcattgtgttgaagatgtataccggtaagcggccatggttagggtttgagaaagatgttaagtctcttcttttgaatcaaaaggcaccagagattccagagactctgccgtgtgatgcaaggctgtttttggagaagtgtttctcaagaaaacctgaggagagaggatcagcttcggagttgctgttgcatccgtttttgaccggagatgagaagaagggttcttccgtcgccggtggagagaggacggggatggtgttgaggctcagaaaacctccgccgatatcgaaagatattccaacgaagccacggaaattgaaggttatttcacaaaagccccaacagttaaagaaagtctcgaataaacccctaaaggtgaagattgttcctccgagacccccaagatccgattttgtccccgttcta

SEQ ID NO: 89 - DNA, 1053 bp, Arabidopsis thaliana; identical to SEQ ID NO: 88

SEQ ID NO: 90 - DNA, 1032 bp, Arabidopsis thaliana
atggcaaccatttccttctctcacaaccaccaatcctccgacaaccgccgtggtggatcccatcaccaccgtcacggccccgtcgtggaagagatcgaaggactcatcaaagttttcaacgacggctgcgtcgaaagacctcccatagttcccatcgtctcaccaaccattcacccatcttctaaagccacagcctttgacatcaaactatccaacgacacatggacacgtgtctacatccccgatgccgcagcagcctcgccgtccgttactctccctctcctcgtttacttccacggcggtggtttctgcgttggctccgccgcttggagttgctaccatgacttcttgaccagccttgccgttaaagcccgttgcgtcatcgtttccgtaaactaccgtttagcccctgaacaccgtctcccggcggcgtacgacgacggcgttaatgtcgtctcgtggctagtcaagcaacaaatatctaccggtggtggatatccttcttggttgagtaaatgtaacctctcaaacgttttcttggccggagatagcgccggagccaacatagcttaccaagtcgccgtaagaatcatggccagtggcaaatacgcaaacactctacacctcaagggcattattctcatccaccctttcttcggcggcgaatcaagaacgtcttcggagaaacaacaacatcacaccaagtcatcggcgcttactctttcagcttccgacgcatattggcgtctagctctgccacgtggagcgagtagagaccatccatggtgtaaccctctgatgagctcggcgggagcgaagttaccgacgacgatggtgttcatggcggagtttgatatactaaaagaacgaaacttggagatgtgtaaagtgatgagaagccatgggaagagagttgaaggtatagttcatggaggtgttggtcacgcttttcatattctcgacaactcgtcggtgtcacgtgatcgaatccacgacatgatgtgtcgtcttcacaacttcatacatccatca

SEQ ID NO: 91 - DNA, 279 bp, Arabidopsis thaliana; identical to SEQ ID NO: 84

SEQ ID NO: 92 - DNA, 882 bp, Arabidopsis thaliana
atggcgatccctacggagacacaacaccaggagaaggaggcttcagatgcttctgcagcagctgcacaaaagagatggactttaagcgatttcgacatcggtaagcctcttggcagaggcaaattcggtcacgtctatctcgccagagaaaaacggagcaatcacgttgtcgctctaaaggttcttttcaagagccagcttcaacaatcccaagttgaacatcagctcagaagagaagttgagattcagtctcatcttcgtcaccccaacatactccggctttatggctatttctatgatcaaaaaagagtttatttgatacttgagtatgctgctagaggcgaactttacaaggatcttcagaaatgcaaatacttcagcgaaagacgagctgctacttatgttgcctcattggcgagggctctcatctattgccatggcaagcatgtgatacacagagatattaaaccagagaatctgctaattggtgctcagggtgagctcaagattgcagactttggttggtcggtacacacatttaaccgaagaaggaccatgtgtggcacactagattaccttcctcctgagatggtcgaaagcgtagaacatgatgctagtgtagatatctggagccttgggattctctgttacgagtttctttatggtgtacctccttttgaagccatggagcactcagacacatacagaaggattgtgcaagtggatctcaagttccctcccaaaccaataatctctgcatctgcaaaggatcttattagccagatgcttgtcaaggagtcttcgcaacgtctgccattgcacaagcttctggagcatccgtggatcgtgcaaaacgctgatccttctggaatctacagagtt

SEQ ID NO: 93 - DNA, 882 bp, Arabidopsis thaliana; identical to SEQ ID NO: 92

SEQ ID NO: 94 - DNA, 1239 bp, Arabidopsis thaliana
atgggtctttgttggggatctccatctgattctcctccaacaacaacaccttcctctactggtaacatcagttcagggacttttaagtcatcaaacaacacgacgactacaggaacatcaaggggaagtaacatatctagcaatagtgggttctctgtggcaagtggtgaagatgcttaccccgatggtcagatacttcccattccgaatttgaggatattcagcttagcagaacttagagcttcaacaaggaatttcaggtctgagaatgttcttggagagggaggatttgggaaagtctttaaaggctggcttgaagacaagactccagggaaacaaagcaacggaactgtgattgctgttaagaaactgaatgcagaaagcttccaaggattcgaagaatggcaatgtgaagtgaattttcttgggagggtttctcatccaaacctcgtgaagctgttgggatactgcttggaaggtgaagagttgcttcttgtgtatgagtatatgcaaaaagggagcttagagaatcatctcttccgaaaggggtctgccgttcagccactctcatgggagataaggcttaagattgcaataggagcagctaaaggcttagcattcttacacgcttcagagaagcaagtaatttatcgagacttcaaagcgtcaaacattctacttgatgggtcatataacgcaaagatatcagattttggattggcgaaattaggaccttccgctagtcaatctcacatcacaacacgggttatgggtacacacggttacgcagctccagagtatgttgctacaggtcacttgtatgtaaagagcgatgtttacgggtttggcgttgttttggctgagatcttaactggtttacatgcgcttgatcctactcgtcctaccgggcaacacaatctaaccgaatggatcaaacctcatctatccgaaagaagaaagctaagaagcataatggaccctcgtctagaaggaaaataccctttcaaatctgctttccgagtagctcaactggctctgaaatgccttggacccgaacccaaaaaccgtccatcgatgaaagaagtggtggaatcgctcgaactcatcgaagctgccaatgagaaaccgttagaacgaaggaccactagagcttccccatccatccgtcaacaacaaggccattatcgcccgcaacaactctcttcgtttcgtcctagacaaaacgtgtctcgagctcac

SEQ ID NO: 95 - DNA, 1239 bp, Arabidopsis thaliana; identical to SEQ ID NO: 94

SEQ ID NO: 96 - DNA, 540 bp, Arabidopsis thaliana
atggcttcttctctcatcttcctcctcctcgttaccctaaccttttcagcatcaaccctaatctcagccaaatccaacacaacaacaataatcgaatcaacttgcaaaaccacaaactactacaaattctgcgtctcagctctcaaatccgacccaagaagtcccacagccgacacaaaaggtctcgcctccattatggtcggcgttggtatgacaaacgccacctccaccgcaaattacatcgctggaaacctatccgccaccgtaaaagacaccgttctcaaaaaggtcttacaagattgctccgagaagtatgctctcgccgctgattctctccggctgacgattcaagatcttgatgatgaagcttatgactatgcctccatgcatgtgttggcggcgcaggattatcctaatgtttgccggaatatttttaggcgggttaaagggttggcttatccggtggagattcgccggcgtgaagctagtctgagacgtatttgtggtgttgtctccgggattcttgatcgccttgttgaa

SEQ ID NO: 97 - DNA, 540 bp, Arabidopsis thaliana; identical to SEQ ID NO: 96

SEQ ID NO: 98 - DNA, 933 bp, Saccharomyces cerevisiae
atgctacgtataactgtcaaaactttgcagcagcgggcatccttccatcatagcttcaaacatattagcgttcctgatcttcatacccgtgctcaaaatgatcaaacaaactgttattgccaagaaataaacgcaaggctgccttcaaaaactgatccattagatcctcatatcaagcttcctcatagaacgcccaattacaataagcatgttttgctgttatcaccgggtgataggtttgctcaaccatggaaggtagcatggaatcataatttggatactaatacaaatcggccatataatgccattagtaaattgcgctcccatttaggtggttctccaggaatactaataaatgcggtgcatttgcaaaatgaatttattccaaggccaaaacaacacgatgaatggctttatttttttgttattcctgacatgaagctttatgtaattaaggaaacggacatcgaggaatttgcatcttttttagatgaaggagctattcaagcaccaaagctatccttccaggattatttaagcggtaaggccaaggcttcccaacaggttcatgaagtgcatcatagaaagcttacaaggtttcagggtgaaacttttctaagagattggaacttagtctgtgggcattataagagggatgctaagtgtggagaaatgggacccgacataattgcagcatttcaagatgaaaagctttttcctgagaataatctagccttaatttctcatattgggggtcatatttttgctggtaatgtcattttctataaactattcggcagagaaaagatgcaaaacaagctggattcattatggtttggtaaagtttacccacacaacttgaagctgttatgtgaaaacttggaaaacggtaaaatcatcgacgaaatgtacagaggtggcatatcgatgaat

SEQ ID NO: 99 - DNA, 933 bp, Saccharomyces cerevisiae
atgctacgtataactgtcaaaactttgcagcagcgggcatccttccatcatagcttcaaacatattagcgttcctgatcttcatacccgtgctcaaaatgatcaaacaaactgttattgccaagaaataaacgcaaggctgccttcaaaaactgatccattagatcctcatatcaagcttcctcatagaacgcccaattacaataagcatgttttgctgttatcaccgggtgataggtttgctcaaccatggaaggtagcatggaatcataatttggatactaatacaaatcggccatataatgccattagtaaattgcgctcccatttaggtggttctccaggaatactaataaatgcggtgcatttgcaaaatgaatttattccaaggccaaaacaacacgatgaatggctttatttttttgttattcctgacatgaagctttatgtaattaaggaaacggacatcgaggaatttgcatcttttttagatgaaggagctattcaagcaccaaagctatccttccaggattatttaagcggtaaggccaaggcttcccaacaggttcatgaagtgcatcatagaaagcttacaaggtttcagggtgaaacttttctaagagattggaacttagtctgtgggcattataagagagatgctaagtgtggagaaatgggacccgacataattgcagcatttcaagatgaaaagctttttcctgagaataatctagccttaatttctcatattgggggtcatatttttgctggtaatgtcattttctataaactattcggcagagaaaagatgcaaaacaagctggattcattatggtttggtaaagtttacccacacaacttgaagctgttatgtgaaaacttggaaaacggtaaaatcatcgacgaaatgtacagaggtggcatatcgatgaat

SEQ ID NO: 100 - DNA, 1605 bp, Arabidopsis thaliana
atggtcattaccgctaacgatttatcaaaatgggaaaattttcctaaaggacttaaggttcttcttctcctcaacggctgtgacagcgacggagatggctcctcagccgccgagactcgatcagagctcgaatcaatggactatatcgttactacattcaccgatgaaactgaagcactctctgcggttgtcaagaacccggagagcttctacattgccatcgtcgaggtgaatatgagcgctgagagtgagagtttcaagtttcttgaggctgccaaagacgttcttcctactataatgatttcaaccgatcattgcatcactactacaatgaaatgcatagcgcttggtgcagttgagttcctacaaaaaccgctctcaccggagaaattaaagaacatttggcagcatgttgttcataaggcattcaatgatggtggaagtaatgtttcgatatcacttaagccagtgaaagaatccgttgtctcgatgcttcatcttgagaccgacatgacaatcgaggagaaagatccagcgccatcaacaccgcaattgaaacaagattcacggttactagacggtgattgccaagagaacataaatttctcgatggaaaatgtaaattcctcgaccgagaaagataacatggaagatcatcaagacatcggtgaatctaaatcagtcgacactacaaaccgcaaattagatgacgacaaagtggttgtcaaagaagagagaggagacagtgaaaaagaagaagaaggtgaaaccggagatctcataagcgagaagacagattcagttgatattcataagaaagaagatgagactaaaccgattaataaatcatccgggatcaagaacgtgtctggtaacaaaactagtcgaaagaaggtggattggacaccagagctgcacaagaagtttgtgcaagcagttgagcaactcggcgttgatcaagcgataccctcgcggattcttgagttgatgaaagtaggcaccttaacaagacacaatgtagctagtcaccttcagaaatttcggcagcataggaagaatattcttccaaaggatgatcataaccatagatggatacaatctagagagaaccatagaccaaatcaacgtaattataacgtttttcaacagcaacaccgtcccgtgatggcttatcccgtttggggtcttcccggtgtttatccgccaggagcgattccacctttgtggccaccgccgctgcagtccattggtcaaccacctccgtggcattggaaaccaccttatccaacggtgagcggtaatgcatggggttgtccggttggaccgcctgtgaccggatcatatattactccttcgaatactaccgccggcggatttcaatatcccaacggagctgaaaccggcttcaaaataatgccggcgagtcagccggacgaggaaatgttagatcaagtggttaaagaagcgataagcaaaccgtggctgccgctaccgctcgggctaaaaccgccgtccgcggagagcgttttggctgagctaacgcgtcaaggcatctcagccgtcccttcttcttcttgtctaatcaacggctctcatcgtctccgc

SEQ ID NO: 101 - DNA, 1423 bp, Arabidopsis thaliana
aattatatgtatatatatacgtacacaaaatcatacgtttttccacaaatggatcaagaagaggaagagatcgagattcctaattactttatctgcccaatctcactagagatcatgaaagatccagtcacgaccgtttctggcatcacttacgaccgtcaaaacatcgttaaatggctcgaaaaggtcccttcttgtcccgtcacgaagcaacctcttcccttagactccgatcttacacctaaccacatgcttcgccgtcttatccaacactggtgcgtcgagaacgagacacgtggcgttgtcagaatctctacacctcgagttcctcctggaaaacttaacgtcgtcgaagagatcaagaatctcaaaaagttcggccaagaagccttaggaagagaagaaacgttgcagaagcttgaagttttggcaatggacggaaataacagaagattgatgtgtgaatgtggcgtacataagtctttgatcttgttcgtagtcaagtgtactagtgaagacgaagacggacgacgtcgtatcaaaggactagatgagtctcttcgtcttcttcacttgatcggtattccatcaaacgacgcaaaaacaatcttgatggaaaacgatcgagttatggaatcgttgacttgggttttacaccaagaagactttctcagtaaggcttatacaattgtgctattgaggaatctaacggaatacacttcctctcatatcgtagagagattgaatcccgagatttttaaagggatcatagggtttctcaaggatgttgtaaatagtgttaatcggacgagccctaccgtgagagaaacggtacagtcatcatcaaggcctagcttgggaaaaacggaaccatcaaaacttgatcatagtttggtcatcaaacaagcggtgactgccgcgctgatgattcttttagagacttcttcgtggagccgaaaccgatcactccttgtggatctcggtgcggtttctgaactcatcgaactcgaaataagctacactggcgagaaaagaatcacagaacttatgttaggagttttatctcgtttatgttgctgtgcgaacggtagagccgagattcttgctcataggggcggaatcgcggttgtgacaaagcggctattgagggtttcacctgcggcagacgatagagctatctctatcctaactacagtgtcaaaattctcgccggaaaacatggtggtggaagagatggttaatgttgggacggtagagaagctctgttccgttctaggaatggattgtggtttgaacttgaaggagaaagcaaaagagatactaaaagatcattttgatgagtggaagaagtttccatgtattgacataactcttctcactaagctgctaagcatctcacccaaagggccaaagatctaagtaa

SEQ ID NO: 102 - DNA, 891 bp, Arabidopsis thaliana
atgaagagtaggaagagctatgggcacttgctgagcccggtgggcagcccgccgttggacaacgagtccggcgaggcggcggcggcggctgcggctggcggcggcggctgcgggagcagcgccgggtatgtcgtctacggcggcggcggcggtggggactcgccggcgaaggagcaggacaggttcctgccgatcgcgaacgtgagccgcatcatgaagcggtcgctgccggcgaacgccaagatctccaaggagtcgaaggagacggtgcaggagtgcgtgtcggagttcatcagcttcgttacaggcgaggcctccgacaagtgccagcgcgagaagcggaagaccatcaacggcgacgacctcctctgggccatgaccacgctggggttcgaggcctacgtcggcccgctcaagtcctacctcaaccgctaccgcgaggccgagggcgagaaggccgacgtgctcggcggcgccggcggcgccgccgcggcgcgccacggcgagggcggttgctgcggcggcggcggcggcggcgccgatggcgtcgtcatcgacgggcattacccgctcgccggcggcctgtcacactcacaccatggtcatcagcagcaggacggcggcggcgacgtcgggctcatgatgggcggcggcgacgccggcgtcgggtacaacgccggggccgggtcgacgacgacggcgttctacgcgccggcggcgacggcggcgtcagggaacaaggcgtactgcggcggcgacgggtcgagggtgatggagttcgagggcatcggcggtgaggaggagagcggaggcggcggcggcggcggcgagagggggttcgccggccacctccatggcgtgcaatggtttagactaaagaggaatactaat

SEQ ID NO: 103 - DNA, 1728 bp, Brassica napus
atggctgcatctttctctgtcccctctatgataatggaagaagaagggagattcgaggcggaagttgcggaagtgcagacttggtggaactcagagaggttcaagctaacaaggcgtccttacacagcccgtgacgtggtggctctacgtggccatctcaagcaaggttatgcttcgaacgagatggctaagaaactgtggagaacactcaagagtcaccaagccaacggcacggcgtctcgcacgtttggtgccttggaccctgttcaggtgacaatgatggctaaacatttggacaccatttatgtctctggttggcagtgctcgtctactcacacctccactaacgagcctggtccggatcttgctgactatccatacgataccgttcctaacaaagtcgaacatctcttcttcgctcagcagtaccatgacagaaaacagagggaggcgagaatgagcatgagcagagaagaaagagcaaaaactccgtttgtggactacttgaagcccatcatcgccgacggagacaccggtttcggtggcactaccgccaccgtcaaactctgtaagctcttcgtcgagagaggcgcagctggggtccacatcgaggaccagtcctccgtcaccaagaagtgtggccacatggccggaaaagtcctcgtggcggtaagtgagcacattaaccgccttgtcgcggctcggctccagttcgatgtgatgggcacagagaccgttctggtcgctagaacggatgcggtggcggctactttgatccagtcgaacattgactcgagggaccatcagttcatcctcggtgtcactaacccgagccttagaggcaagagtttgtcctcgcttctggccgagggaatggctgtaggcaagaacggtccagcgttgcaagcgattgaggatcaatggcttagctccgctcgtctcatgactttctcggacgctgtcgtggaggctctcaagcgcatgaacctaagtgagaatgagaagagccggagagtgaacgagtggctaaaccatgcaaggtacgagaactgcctgtcaaacgagcaaggccgagaattagcagcaaaactcggtgtgactgatcttttctgggactgggacctgcccagaaccagagaaggattctaccggttccaaggctcggtcacagcagccgtggtccgtggctgggcctttgcacagatagctgatctcatctggatggaaaccgcaagccctgacctcaacgaatgcacccaattcgcagaaggagtcaagtccaagacaccagaggtaatgctcgcctacaacctctccccgtccttcaactgggacgcctctggcatgacggatcagcagatgatggagttcattccgcggatcgctaggctcggttattgctggcagttcataacccttgcgggtttccatgcggatgctcttgtggtcgatacgttcgcaaaggattacgcgaggagagggatgctggcttatgtcgagaggatacagagagaagagaggagcaatggggttgacacattggctcatcagaaatggtcaggtgctaattactatgatcgttatcttaagaccgtccaaggtggaatctcctccactgcagcaatgggcaaaggtgttactgaggaacaattcaaagagacctggacgaggccgggagctgctggaatgggcgaagggactagccttgtggtagccaagtccagaatg

SEQ ID NO: 104 - DNA, 1716 bp, Zea mays
atggcgtcgccgttctccgtgccttcgctgatcatggaggaggaagggcggttcgaggcggaggtggcggaggtggagtcgtggtggggcacggagcggttccggctcaccaagcgcccctacaccgcccgcgacgtggtcctcctccggggcacgctccggcagagctacgcgtcgggggagatggccaagaagctgtggcgcacgctcaaggcgcaccaggccggcggcaccgcctcccgcaccttcggcgcgctcgaccccgtccaggtcaccatgatggccaagcacctggacaccatctacgtctccgggtggcagtgctcgtccacgcacacctccaccaacgagcccggcccggacctcgccgactacccctacgacaccgtgcccaacaaggtggagcacctcttcttcgcgcagatctaccacgaccgcaagcagcgggaggcgcgcatgtcgctgccccgcgccgagcgcgcgcgggcgccgtacgtcgacttcctcaagcccatcatcgccgacggcgacacgggcttcggcggcgccacggccaccgtcaagctctgcaagctcttcgtggagcgcggggcggccggggtccacctcgaggaccagtcctccgtcaccaagaagtgcggccacatggcgggcaaggtgctcgtcgccgtctccgagcacgtgaaccgcctcgtcgccgcgcggctccagttcgacgtcatgggcgtcgagaccgtcctcgtcgcgcgcaccgacgccgtcgccgccacgctcatccagaccaacgtcgacgcgcgcgaccaccagttcatagtcggcgccaccaacccgggcctcaggggccagagcctcgcggccgtgctgtcggccggcatgtcggcgggcaagagcggcagggagctccaggccatcgaggacgagtggctggccgcggcgcggctcaagaccttctccgagtgcgtcagggacgccatcgcgggcctcggcgtcgcgggccaggagaagcagcgcaggctccaggagtgggaccgcgccaccggcggctacgacaggtgcgtgtccaacgaccaggcgcgcgacatcgccgccagcctcggcgtcacgtccgtgttctgggactgggacctgccgcggaccagggaagggttctaccgcttcagggggtccgtggcggcggccgtggtccggggccgcgccttcgcgccgcacgccgacgtgctgtggatggagacgtccagccccaacgtggccgagtgcaccgccttcgccgagggcgtcaaggcggcgtgccccgaggcgatgctcgcctacaacctctcgccgtccttcaactgggacgcgtctgggatgacggacgccgagatggccgccttcatcccgagcgtcgcgcgcctcggctacgtctggcagttcatcacgctcgccgggttccacgccgacgcgctcgtcaccgacacgttcgcgcgggacttcgcacgccgcggcatgctggcctacgtggagaggatccagagggaggagaggatcaacggcgtggagacgctggagcatcagaagtggtcgggcgccaatttctacgacagggtgctcaaggctgtgcagggtggcatctcctcgactgcagccatgggcaaaggagttactgaagagcagttcaaggatccacggcccgcaactgggagcagtggcctgcaagttatggccaaatccaggatt

SEQ ID NO: 105 - DNA, 993 bp, Zea mays
atggacgccgccgtctccaccctcaccgctctcgccatcttcgcgagcaccgtcgagcacgccgcctacaggagcgtgcaggggtatagggtggtcgggaggaaaggcggcgggtgggtccgttgggagaggtgggtggagcggcagttcgtcctctccctctccttcccacggtgcgtcgaggttgccctgcccgccgccgcgccgcggatactgccagcggggtggcgcagccggccggtgttccgcgagggacagaccgtcgacacttggcgttgcattgtggcattcgactccgtcgccgccgtcgctccgtcctccccgccgccgcccgtgctctcccccttcgtgaacccacagctgcagtatctgtctaatctgtacaatgacctgctgatggtgtttcggtttcgagaagagaaaacggtcccacaactcgttaattcaaagcaacccatccgttgtggtgaacaggggaaaacttctgatttgggtgatgcatcggagtccgattcggatggggattgtcaatctggcaaagaacttgcaccaccagttcagaagcatacaagagccaaccggaagcatatagatagcattactttagttgatatagctcagtacttccatcttccaatccgagatgcatcaaagacactcaagattggggtcagcatattgaagaggaaatgccgacagtatgggatacctcgttggcctcaccggaagatcaagtcacttgactctctcattcatgaccttgagttcgtgctagcaagagaggatgaggatgaggaggaggagaagcagctgcagaaggacaggctggctgctgcgataaacgccctcacaaaacggaagagcatgctggagagcgagaaggaaaccatacagcagaaaccggccatggacctgatggctgaaaccaagctattcagggaagatgttttcaagaggagatatagggccaaaagttcagtcatggatatggat

SEQ ID NO: 106 - DNA, 623 bp, Glycine max
tgtcctactcctcttcgatatgagtcaactcggcgccgtgttgcggactcagagggagcccaggaggagtaccattctgggtttgttgacggagcaaatggacggcgttgatagtgggacccgcaggaggcgcagcttcaaggaacgcttcggattcatcggcatggggtgctgtggggccacctggggcttccgttccgacgcgctaagtgtcacccaaggagaacagcaacagcaggaaacggatccagagtgcgtgggtccagcaggtttgggttcgggtatgaatctcgcggcggcgttagcggcggagaggcagctccgggggccgcaggaggaggcagtgagagcgccggggacgccgtggagggtgtcgctgatgaggctgctggaggagaccgaggcggagaaggagaaggagaaagagaaagaggagaatgttgtggggaatgattcggtgtgctgcgtgtgcatgggaaggaagaaaggcgcagcgttcatcccatgtggacacactttttgcagggtgtgttccagggaactgtggcttaatcgaggctcttgtcccctttgcaatcgctccatcctcgagattctcgacattttctagaatttcttctaac

SEQ ID NO: 107 - DNA, 696 bp, Arabidopsis thaliana
atgcttcgctcctcaattcgacttctctatataagaagaaccagtcctctgcttcgaagtttatcatcatcatcatcatcatcatcatcaaaacgattcgattctgcgaaaccacttttcaattctcatcggattatttctcttccaatttctacaacgggagctaaactatctagatcggagcattcaatggctgcttcttccgaacccaaatctctttacgatttcaccgtcaaggatgctaagggaaacgatgttgatctaagcatctacaaagggaaggttcttttgattgtgaacgttgcttctcaatgtggcttgactaattcgaattatactgagcttgcgcagctgtatgagaagtacaaaggccatggtttcgagattcttgcgtttccgtgtaaccagtttgggaatcaagagcctggtactaatgaagagattgttcagtttgcttgtactcgtttcaaggctgagtacccgattttcgacaaggttgatgttaacggtgacaaagctgccccagtctacaagtttctgaaatcaagcaaaggcgggctctttggagacggcattaagtggaacttcgcaaagttcttggttgacaaagatggaaatgttgtcgatcgtttcgcaccaactacctcacctctcagcattgagaaggatgtgaagaagttgttgggagttactgct

SEQ ID NO: 108 - DNA, 696 bp, Arabidopsis thaliana; identical to SEQ ID NO: 107

SEQ ID NO: 109 - DNA, 456 bp, Zea mays
atggcagctgaggaagatgtcaagcagaggcagatcattgaaaatcgtgccagaaatataagccacaatgttaggtgcactgagtgtggtagccaatcgattgaagattcacaggctgatgttgctattctcctaaggaagctcattcgtgatgaaataaaagcaggaaagagtgataaagagatctacaagaaactagaggatgattatggggagacagtactatatgcccctaaatttgatcttcagactgctgggatttggctttcgcctgtcattgttggtggtatagcagctggaatctgggcttaccaaaggcataggcaaaggacaaatgttcacattatggctctgaacctggtccgaggggtaccactgactccaagggagaaggagaccatgctagacatccttacacctccaccggctccaaggaaatggtggtggccaggcaaa

SEQ ID NO: 110 - DNA, 1032 bp, Arabidopsis thaliana
atgttttcttgcatagcttgtaccaaagcagacggaggtgaagaagtcgaacatggagcgcgtggaggcaccactcccaatactaaagaagccgtcaaaagcctaaccattcagattaaagatatggctttgaaattctctggtgcttataaacaatgcaagccatgcactggttcctctagtagtcccttgaagaaaggacatagatcatttccggattatgacaatgcctctgaaggtgttccataccctttcatgggtggaagtgctggttcaactcctgcttgggacttcacaaactcctctcatcatccagctggacggttagaatcaaagttcacttcaatatatggaaatgatcgagaatctatctctgcacagtcttgtgatgttgtactggatgatgatggaccaaaagagtggatggctcaagtagaacctggtgttcatatcacatttgcttctcttcccactggaggaaatgatctcaaacggatccgtttcagccgagagatgtttgataagtggcaagctcaacggtggtggggtgagaactatgacaagatcgttgagctttacaatgtacagagatttaaccgccaagctctccaaacgcctgcaagatccgacgatcagtcacagagagattcaacgtactcaaagatggattcagcaagagaaagcaaagactggactccaagacacaatttcagacctccaggatctgtcccgcatcacttttatggcggctctagcaactatggaccaggaagttatcatggaggaccaccgatggatgcagcaagaaccacaacttcttccagagatgatccaccttccatgagcaatgctagtgaaatgcaagctgagtggattgaagaggacgagcctggtgtttacattaccatcagacaattatcagatgggactagagagctacgtcgagtcagattcagccgggaacggtttggggaagtgcatgcaaagacatggtgggagcagaacagagagagaatacaaacacagtacctc

SEQ ID NO: 111 - DNA, 1215 bp, Zea mays
atgctcacgtgcatcgcgtgctccaagcagctcccgggcgacgcgccgccgctgcgcgagccgtcggacgacgatgaccgcgccaacgccggaggcgggggcgaatcggcggcaacgcccggcacgaggcaggccatcagggtgctcaccgcccagatcaaggacatggcgctgaaggcatcgggcgcgtaccggcactgcaagccctgcgccggttcgtcctccccggcggcgtcgcggcggcagcaaccgtactaccacggcgcgtacgcggagtccgggtccgaccgcttccactgcgcgtaccagcgcgccggcagctccgcagcatccacgccggggctgcgcacggggggcgcgatgtccagcggtgacatcacgccatcggtcagcgcgcgcaccgacttcctcgccgacgacgaggaaggggacgatgaagagggaacggcgactggcagcagcgaggaggatgaggagaaggagtgggtcgcccaggtggagcccggggtgctcatcaccttcctctcgctgccgcggggcggcaatggtctgaagcgcatccgattcagccgtgaaatgttcaacaaatggcaagcacaaagatggtggactgaaaattacgagaaggtcatggagctttacaacgttcagaagtctaacagtcaagttgatcctctgccaagcattccaaggtctgacagtgagatctccaaagacgataccccagctacagcaccgcttaacaaggggcaattgctacgtacttcacccagaccactaaaaggcagtgaagccataggctattcatcttcggattgtcctcagcaccaatccagtcattttcgcaacgtttaccgcaaagaccgctaccttgggcaccagttctgtgatccagttgaactggcatcgacgcctgagttatcaagcatcagtggtgcgaagacagagacgtctattggtgcatcagtgaggacaagctcatctcctgaagaggtcgatggatcgggcgaactttcagcctctgtcagcaacgcaagtgacgaagagagggaatgggtagaagaggacgagcctggcgtgtatattactattcgagctttgcctggtagcatcagagaactacgccgcgtcagattcagccgggagagattcagtgagatgcatgccaggttatggtgggaagaaaaccaagcgagaatatatgagcagtatctc

SEQ ID NO: 112 - DNA, 1872 bp, Zea mays
atgaacgccgtcgaaccctccgccgccgccatcgccgaagaccccattactccggccgcctccgcagccccgtaccctggccgcctccgcgaagcacttaccgccctttccgaggcttgcgagtccggcaacttcaatgcttccgaaaccgcctccttcaccatctccgacattcttgacaccgcagccggcgtaagtggcgagctcgatgacgggagcgacgacagccaagacgcgtcgaggtcaggggcctccgaagtgctgcttcgcgaggtgctcgagttcctctctcgcccgtcatcgatctcgaaccagatggcccttgacgcgctctcgcttgtgcttcccaaacccgtggcgaagctaggggctcgaatggggagatgccgggatgttgccgcagctatcctaaagttcttcgtgacgaattgcaatccgagggacatgctctccatcctctgtgaggcattagatgcaccaatggagctaccaaatggcttatccagttttgttcttctactcgatgcacttgctaaagtgtttactttaattcagaggcgacatatcgagcaagtaaaggtggcactgcccgttgtacttaaagttatgcatgctactgtatcagaatgtgttgaggaacatggaagtgctgctgttgatcttttcaatgcagcacatggtgttggcaaggccattcaagaaatgtgcatatcaatgttcaacaaaaacaaagatctctgtgcaattcttggtttatactcccttcagaatatagctcttgtatcacgaagcagacagcaggatattctctctgcttgtggttcagttgtttttcagagtttcagatttcttaaaactagtggattcacctatcgtggcctactaactggcagtgatgtcacagctgcaacggttgaactttccaaagaggaagatgctgattttatggagcatttttcctttgctatggatggtgcagcactttcagttgtgtggacacttatgcatgatgataaagatatgtcaaagtatgctggagaagagttggaattagcagtaaaggaagttcagggcaaccatatggaaaaatgggaagcaattaacatgcttaaatatgtcctatcctcaattcattacccatggataatcaaatcccacagtttaaacttaatgctgattctatccggtgaagatcatgttgaagagatcaataatcatgtagatttcacatgctttgctcatcgcatttttgaaacactcaaggccattgaaagcgttatgattgctgcccctatggcattggtgcggaaaaaagcatttgctgctttgaaaaaggttatttcaatggtgccatcatcccagagatttgacatcttacatggtcttgtaaacaatagtacatctccagctttgactgcaattctccttgatctagtgaggcaggaagtttcgagagagagtcgccaagctgacaatgattgtattgaagacgaaggatttcgaggtaatgggttaccgcgctgggcatctcatgcacttgagttagttgagctgattttgaggcctccagaaggtggtcctccttgccttcctgatcacagtgaacaggtaatatcagctctaaacttgctaagatttattctgataatagattcaagaggacaaagatctgcaaaattgtttcggaaagagacattgcacaaggtgcactcggagtggctgaccccattaagaccaatcgcggagcaaattcagttggaaaatgaaaaggatgctgatgagattacaaaacaaatagtgtgcatgttaaatcttgttcaactggtgctataccgctgcatcgagttggtggaggaaaagatgaaaggctgc

SEQ ID NO: 113 - DNA, 198 bp, Thermotoga maritima MSB8
atgcgcggcaaggtgaagtggttcgactccaagaagggctacggcttcatcacgaaggacgagggcggcgatgtcttcgtgcactggagcgccatcgagatggagggcttcaagacgctcaaggagggtcaagtggtcgagttcgagattcaagagggaaagaaaggtccgcaggccgcgcacgtcaaggtcgtcgaa

SEQ ID NO: 114 - DNA, 198 bp, Thermotoga maritima MSB8
atgaggggcaccgtgaagtggttcgactccaagaagggctacggcttcatcacgatggagaacggcgaggacatcttcgtgcactggagcgccatccagatggacgggttcaagaccctccgcgagaacgagaccgtggagttcgaagtgcaaaagggaacgaagggtccacaggcggtcaacgtcaggcccgtccgg

SEQ ID NO: 115 - DNA, 198 bp, Thermoanaerobacter tengcongensis MB4
atggtgaggggcaaggtgaagtggttcaacgctgagaagggctacggcttcatcgagcgcgaggacggcaccgacgtcttcgtgcactactccgccatcgagggcgagggtttcaagacgctggaggagggacaggccgtcgagttcgaagtcgtccaagccgcgaagggtccacaggcgagcaaggtccggaaactg

SEQ ID NO: 116 - DNA, 198 bp, Bacillus caldolyticus
atgcaacgcggcaaggtgaagtggttcaacaacgagaagggctacggcttcatcgaggtggagggcgggtccgacgtcttcgtgcacttcaccgccattcagggcgagggcttcaagacgctggaggagggtcaagaggtcagcttcgaaatcgtgcaaggaaacaggggtccgcaggccgcgaacgtcgtcaagctg

SEQ ID NO: 117 - DNA, 240 bp, Triticum aestivum
atgcagattactggtaaggtgaagtggttcaacgaatccaaggggttcggcttcatcacccccgacgacggcagcaaggacgtcttcgtccacttcaccgcaatcgctggcaacggcttcaagaccctcgccgagggccagcgtgtcgaattcgaaattcaagacggccaaaaaggcccgtccgccgtcaatgtcaaggccctagagctagaggaggataagagcatttcgagcaaatta

SEQ ID NO: 118 - DNA, 234 bp, Zea mays
atgggcctgtggacattgctggagggttttttgcttcttgcaaatgcgttagcgatattgaacgaagaccgcttccttggtccaaggggatggagcatgtctgaagtatcaggaaacgggcaaaccaagtcgttcaagggccagatcgtggggcttatctacgctacacagtttctgcggatgcccttaattgctctcaacgttctcatcatcgttgtcaaattggtgtctggc

SEQ ID NO: 119 - DNA, 513 bp, Arabidopsis thaliana
atgttgttttttaatcctggcttcacatgtatgcaggaggagtttcaacttgctttgttcaaaagccggaagagggagaatatatttgctaataggatatttgatatgtttgatgttaaacgaaaaggagtcatcgatttcggggactttgtaagatcactcaatgttttccaccccaatgcttctctagaagacaaaatagattttacgtttaggctttacgacatggactgcacgggttacattgaacgacaagaggtcaagcaaatgttgatcgcgcttctctgcgaatctgaaatgaaactggctgatgaaaccatagagataatactcgataagacatttgaagatgcagacgtgaatcaagatggaaaaattgataaattagagtggagtgatttcgtaaacaaaaatccatcattgcttaagatcatgactcttccatatctcagggatattacgacaacgtttccgagttttgtcttccattcggaggtcgatgagattgccaca

SEQ ID NO: 120 - DNA, 2571 bp, Arabidopsis thaliana
atggcggagaaagtatcggaggacgttatgcttctacacggtgacctcgatttgaaaattgttaaggctaggaggttacctaacatggatatgttctcagaacatttgcgccgtctcttcaccgcctgtaacgcctgtgctagacccaccgataccgatgatgtcgatcccagagataaaggcgaattcggtgataaaaacatccgtagccaccgtaaggttatcaccagcgatccttacgtcaccgtcgtcgttcctcaagcgactctagctcgaacacgtgttttgaaaaactcacaagagcctctttgggacgagaaattcaacatttctatagcgcatccgtttgcttatctcgagttccaggtcaaagacgacgatgttttcggtgctcaaatcattggcacggctaagatcccggttcgagacatcgcatcgggagaacgcatttctggttggtttcctgtactcggtgcttcgggaaaaccgcctaaggcagaaactgctattttcatcgatatgaaatttactccgtttgaccagatccatagctaccgatgtggaatcgccggagatccggagcgtaggggtgttagacggacttatttccctgtgaggaaaggaagtcaggtgaggctttaccaggacgctcatgttatggacggaacgttgccggcgattgggttagataacgggaaagtttatgagcatgggaagtgttgggaagatatatgttatgctatatctgaggctcaccatatgatttacattgttggttggtctatcttccataagattaagcttgttagggaaacaaaagttccaagagataaggatatgacgcttggggaattgctcaaatacaaatcccaggaaggtgttcgagttttgctacttgtatgggatgataagacttctcatgataagtttgggataaaaacgcctggagttatggggacacatgatgaggagactaggaagttcttcaagcattcttctgtgatatgcgttttgtcaccccggtatgccagcagtaagcttgggttgttcaaacaacaggttgttggaactctcttcacgcaccatcaaaagtgtgttcttgtagacactcaggctgttggtaataatcgcaaggtcaccgcttttattggaggtctagatctttgtgatggccgttatgacacacctgagcataggatactccacgatcttgacactgtatttaaggatgatttccacaatcctacatttccagctggtaccaaggccccaagacaaccttggcacgatttgcactgtaggatagatgggcctgcggcatatgatgttctcataaactttgagcagcgatggagaaaggcaacacgatggaaggagtttagcttacgtttaaaggggaaaactcactggcaagatgatgctttgatccggatagggcgtatatcatggattctgagtccagtgtttaaatttctgaaggatggtacttcgataattccagaggacgatccatgtgtttgggtttctaaagaagatgatccagagaactggcatgttcagatattccgttctatcgactcaggatccgtgaaaggatttccaaaatatgaagatgaggctgaggcccagcatctggaatgtgccaagcgtcttgttgtagataaaagcatccagactgcatacatccagacaatcagatctgctcagcatttcatatatatcgagaatcagtatttcctgggttcttcttatgcttggccttcttatagagacgcaggagctgacaatcttattcctatggagttggcactaaagattgttagcaaaatcagagctaaggaaagatttgccgtatatgttgtcataccattgtggcctgaaggcgacccaaagtctggccctgtgcaagaaattctatattggcagagccaaactatgcagatgatgtatgatgttatagcaaaagaactgaaagcggtgcaatcagatgctcatcctctcgattaccttaacttttactgccttggtaaacgagagcagcttccagatgatatgccagccaccaatggcagtgtggtatcagattcttataatttccagcgtttcatgatttacgtgcacgcaaaagggatgatagtagatgatgagtatgtactcatgggatctgctaatatcaaccaaagatctatggcaggcaccaaagatactgaaatcgccatgggcgcataccaacctaatcatacatgggctcacaagggaagacacccacgtggccaggtgtatggatacagaatgtcactatgggcagagcatttaggcaaaactggagatgagtttgtggagccatcagatctggaatgtctgaagaaggtgaacacaatctctgaagaaaactggaaaagattcatagacccgaaattctcagagctacaaggtcacttaataaagtatcctctacaagtagacgttgatggtaaagtaagccctcttcctgattacgagaccttcccagatgttggtggtaagatcattggagctcattccatggctcttcctgacactttaaccacg

SEQ ID NO: 121 - DNA, 2133 bp, Arabidopsis thaliana
atgcctgctttagcttgcgttgatacgtcctttgtacctcctgcctacgccttctccgacaccgccggtgatgtttttatcccggcgtcatcaccaacttccgccgccgttgttgttgaccgttggtctccgtcgctctcatcgtctctctatcgaatcgatggatggggagccccttatttcatagccaattcgtctggtaacatctctgttcgtcctcatggctctgaaactttgcctcaccaagacatcgatttgctcaaaatcgttaagaaggtgacgggtccgaaatcttccggtggtttaggattgcagcttccgttgatcgttcgtttccctgatgtgttgaagaaccgtctcgagtgtcttcaatctgcgtttgattacgcgattaaaagtcaaggatatgattctcattaccaaggtgtttatccggtgaaatgtaaccaagatcgattcgttgttgaagatattgtcaagtttggatcttcgtttcgatttggattagaagctggttctaaacctgagatccttcttgctatgagctgcttgtgtaaaggtagccctgatgcctttcttgtgtgcaatggattcaaagatgctgagtatatatcattggctctgcttgggagaaaactggcgttgaatactgtgattgtgcttgagcaagaagaagagcttgatctggttattgagctgagccagaagatgaatgtgaggcctgtcattgggttaagggctaagctgaggactaagcattcgggtcatttcggatcaacttctggtgaaaagggtaaatttggattgactactactcagattgttcgtgtggtgaggaagctgcgtcaatctggtatgcttgattgtctccagcttctgcattttcatattggttcacagattccgtcgacttcgttgctctctgatggtgtcgccgaggctgctcagctttactgtgaacttgtgcgtcttggtgcacatatgaaagttattgatatcggtggtggtttggggattgactacgacgggtctaaatctggagaatcggatctctctgttgcttatagtctcgaggagtatgctgaagctgttgtagcttctgttcgggttgtgtgtgaccggagctcagtgaaacatccggtgatatgcagcgaaagcggtagagcgatagtctctcatcattctgtgctgatctttgaagctgtttcagcagataaaccaatggttcatcaagcaactcccggcgatattcagttcctgcttgaaggtaatgaggaagctcgagccaattatgaggatctttatgctgctgtgatgcgtggagaccacgaaagctgccttctttatgtcgatcagctgaagcagaggtgtgttgaaggtttcaaagaaggtgttttgagcatcgagcagttagcttctgttgatggtttatgcgagtgggtgttgaaggctataggcgcatcggatccggttcatacttacaatatcaatctatcagttttcacttcgattcctgatctctgggggattgatcagctgttccctatagttcctatccataagctcgatcaaaggcccggggctcgcggaatcctttcagatttaacgtgtgatagtgacgggaagatcaacaagttcataggcggtgaatccagcttgccgttgcacgagctggacaagaatggcagtggaggaaggtactttttgggtatgttccttggaggggcttacgaggaggctctcggtggagtccacaatctgtttggtggaccaagcgttgtccgggtctcccagagcgatggaccacacagctttgcagtgacccgagcggtgcctggtcagtcctcagcggatgttctccgagcaatgcagcatgagccggagctaatgtttcagaccctaaagcaccgagcagaggaaatgatgcataccaaaggtggtagcgaaggtgaaaatgaagaggaagaagaagatgatgagttcaacaatgtggcggcttctctcgaccgttcgttccacaacatgccgtatcttgcaactgagcaggcatcgccaagtaactctctttcagctgcgatcagtaaccttgggttttactactgcgacgaagacgtctacgattacatctctgcg

SEQ ID NO: 122 - DNA, 879 bp, Saccharomyces cerevisiae
atggcacaagaaatcactcacccaactattgtagacggctggttcagagaaatttctgataccatgtggccaggccaggccatgactttaaaagtggagaaagttttacaccatgagaagtcaaaatatcaagacgttttgatcttcaaatccactacatatggtaatgttctagttttagataatgtaattcaagccaccgaaagggatgaatttgcctaccaagaaatgattgcccatcttgccttgaattcccatccaaatcctaagaaggttcttgttattggtgggggtgatggtggtgttttgagagaggttgtcaagcatgattccgttgaggaagcctggttatgtgacattgatgaagctgttattagactatcaaaggagtacctaccagaaatggctgcctcttattctcacccaaaggttaagacccacattggtgatggtttccaatttttaagagattaccaaaacacatttgacgtaatcattactgactcttctgacccagaaggtccagctgaaacccttttccaaaaggaatatttccaattgttgaacagtgcgttgacagaaaagggtgtaatcactacacaagcagaaagtatgtggattcacttgccaatcattaaggacttaaagaaagcctgttctgaagttttcccagttgcagaatactctttcgttactattccaacttacccaactggtacgattggttttatggtttgctccaaagataaaacttgcaatgtcaagaagccactacgtgaaatctctgatgagaaggaggctgaattatacagatactataacaagaaaattcacgaagcttcctttgttctaccaacctgggcagccaaggaattaaat

SEQ ID NO: 123 - DNA, 1524 bp, Saccharomyces cerevisiae
atgaatacagtttcaccagccaaaaaaaaggttattataattggtgccggtattgctgggcttaaagctgcatctacgctacaccaaaacggtattcaagattgtcttgttcttgaggccagagatcgggtcggtggtaggttgcaaactgtcacaggctatcaaggtcggaaatatgatataggtgctagctggcaccatgatacgttgacaaaccctttatttttggaagaggctcaactgagtttgaatgatgggagaacgaggtttgtttttgatgacgataattttatttatatcgacgaagaacgtggaagggtagaccatgacaaggaactgcttcttgaaattgtggacaatgaaatgagcaaattcgcagagttagaattccatcaacacttaggagtttcagattgctccttttttcaattagtaatgaaatacttactacaaagacgccaatttctcacaaatgaccaaataagatatttgccacaactctgtcgatatctggaattgtggcacggcttagattggaagcttttgagtgccaaggatacatacttcggtcaccaaggaaggaacgcctttgctttgaactatgattctgtggttcaaagaattgctcaaagctttcctcaaaattggttaaagctaagttgtgaagtgaaatcaattacacgagaaccttcaaaaaatgtgacagtgaactgtgaagatggtactgtgtacaatgctgattatgttattattacagtacctcaaagtgtattgaatttgtctgtacaacctgaaaaaaatttacggggaagaatagaatttcaaccacccttgaaaccagtgattcaagatgcttttgacaagatccattttggagcgctaggtaaagtaatttttgagtttgaagaatgttgttggtcgaacgaaagttcaaaaattgtaactttggctaactctaccaatgaatttgtcgaaatagtacgtaatgcggaaaatttagatgaattagactctatgctagaaagggaagattctcaaaagcatacgagtgttacttgttggagccagcctttatttttcgtaaatttgtcaaaaagcacaggagtagcaagctttatgatgttgatgcaggcaccgcttacaaatcacatagaatccattagagaagataaagagcgtctttttagttttttccaacctgtgctgaacaagattatgaagtgtctagattctgaggatgtcatcgacggaatgaggccgatagaaaacattgcaaacgctaataaaccagtcttaagaaacatcatcgttagcaactggacacgcgatccttactcacgcggtgcttattcggcctgttttccaggagatgatccagttgatatggttgttgcaatgtctaatggtcaagactcccgcataagatttgcaggcgaacatactatcatggacggcgccggctgtgcctatggtgcttgggaaagcggaagacgggaggcgactcgaatctctgacttactgaaa

SEQ ID NO: 124 - DNA, 1518 bp, Zea mays
atggcggcatcggccaagggacggctcgtgcccgtgctcgcggtggcggcggcgctcgcggccgtgctcctctaccgcgcgcccttctccaagagcttgggcggcgaagggtgcagcctcctcccgcacgaccacttctggatcgccagcgaccgcgtcgtcacgctcggacgcgtcggccccgccgcagtagaggtcaaaggagggctcatcaacgccatcgccgtcggggactaccggagcttcgtgctccgccgaccgctccttgactacggggacgccgtcatcatgcccggcctcatcgacgtgcatgcccatctggatgagcctggacgtgccgagtgggaaggcttctccaatggcacaagagcagctgcggcaggtgggataacgacgctggtggatatgccactcaacagcttcccgtcaacagtctctgaagaaactctcaaactgaagctggaagcagctcgggataagctatatgttgatgtggggttttggggaggccttgtgccagagaatgccttcaacccaagtgctttggagggcctcctaaaggcaggcgttttaggactcaagtcttttatgtgcccctcaggcatcaacgactttcccatgacaaattcaactcatatcgaagaaggattggttacactggcaaaatacaagagatctttacttatccatgcagaacgtatacctgaggctgaggatcatgatttgcaagaagatgaattagatcctcggtcctatatgacgtatctgaagtctaggccaccatcatgggaggaagcggctatcagagatctgcaacgtgcaatgaaggatacggagttggggggtcggtccgaaggagctcatattcacattgttcatctatcagatgcaaaaactagcttggaacttatgaaggatgctaaacgcagtggtgcaagtctgtctatagaaacatgccctcattacctggcattttcgtctgaagaagttccagatggagatactcgctttaaatgttctcctcccatacgtgatgacacaaacagagaaaatctttggaaagctctgcttgatggacacatagacatgctaagttcagaccactcaccatccactcctgacctcaaactaatggaggaaggcgactttttaagggcatggggaggcatatcatcattgcagtttgtcctcccggtgacatggtcatatgggcgaaagtatggcgttactctgaatcagctagcctcatggtggagcgaaaggccagccaagcttgcaggccaaaagaataagggagctattctaccaggataccatgctgacattgtagtatggaaacccgaaacagagtttcaacttgacaacaaccatgctatatatcataaacatcagaatatttcagcgtatttaggaaagcaactttctggtaaggtcctgtcgacttttgtgagaggaaatcttgtgtttgctgaagacaagcatgcaaatgctgcttgtggtgttcctatcctcgctaag

SEQ ID NO: 125 - DNA, 387 bp, Zea mays
atggcttgcccaaccaagaaggggatgaccggagagccgagctcgccatgcagctcggcatcagcctcgaccttaccggagcaccaccagacggtgtggacgtcgccgccgaagcggccagcggggcggaccaagttccgggagacgcggcacccggtgttccgcggcgtccggcgccggggcagcgccgggcggtgggtgtgcgaggtgcgcgtgccggggaggcgcggctgcaggctctggctcggcaccttcgacacggccgaggcggcggcccgcgcgcacgacgccgccatgctcgccctcgccggcgcgggcgcctgctgcctcaacttcgccgactcggcctggctcctcgcggtcccggcctcgtgcgccagcctcgcc

SEQ ID NO: 126 - DNA, 411 bp, Zea mays
atggacatgggccggctccagctccagctccagcacgcggcctcctcgtcctccacctcggcgtcgtcctcgtcctcgtccgagcagaacaagctggcctggtccccgtcctccccgcagccgcccaagaagcgccccgcggggcgcaccaagttccgggagacgcggcacccggtgttccgcggcgtgcggcggcggggcgccgcgggccggtgggtgtgcgaggtgcgcgtccccgggcggcgcggcgcgcggctgtggctcggcacctacctcggcgccgaggcggcggcgcgcgcgcacgacgccgcgatgctcgccctgggccgcggcgcggcctgcctcaacttccccgactccgcgtggctgctcgccgtgccgcccccgcccgcgctctcgggcggcctggac

SEQ ID NO: 127 - DNA, 219 bp, Arabidopsis thaliana
atggtgtttccggcgtgtgtacagtgcggaacaagacaaaacccctgtcggtgcaaagtggttggaccaactttagggttcgtggcttttctgataaccggaatcatcgagtggccagttggtgcggtggtgtatatctttaaacacgccaagggtcgtcgtataatgggtcatccggccagaaaagtttatcccaaagtctctcgatctattcccatt

SEQ ID NO: 128 - DNA, 855 bp, Saccharomyces cerevisiae
atggagctaagttcaccatcaaaaaaaaccacaacatcgccaataaatataccaggggggaatagagataacctaataatcggaccacattctcacagcttcaagaccgatccattttcaagtaacaatagtagtttgctgtccaaaatatctactaaccccagtttggaaagccctttctcttcgaaatctttactagattgttctcctgtacaagctgtaaagaagtctttagagtcggaagcaaaaacgcatagcctggacgaggagacaaatgaacagactgatgtaaagatcttaaacatagcagactttcccacagatgaactcatactaatgataagtgcgctacttaacagaattataacagcaaacgatgaaactacagatgtctcacaacaagtgtcggaagagaccgaagacgaactcttaactccaatccttgctttctatggaaagaatgttccagagatagctgttgttcagtacttagagagaattcaaaagtactgtcccaccacaaatgatatttttctttctctccttgtatatttcgatagaatctccaaaaattatgggcattcttctgagcgtaatggttgcgcaaagcaattattcgtcatggactccgggaacattcatagattgctcataacaggtgtcacaatttgcacgaagttcttgagtgattttttttacagtaactctcgatacgccaaggttggaggtatttctttgcaagagttaaaccatttagaattacaattcctgatactatgtgatttcaagttattggtttcagtcgaagaaatgcagaaatatgcaaacttgttatataaattctggaacgaccag

SEQ ID NO: 129 - DNA, 1797 bp, Agrobacterium tumefaciens
atgcagggtgacaaaccggttccgcatcggcccggtcgatcagatggttcaacaggtccgatgctggataaaggtggcgggcgcggcaaattgtcgtcgcctgagcgctttcgtgaatggacaagaaaaacaatggctaaacaggacgaactggtctttgtgccgcttggcggcgttggtgaaatcggcatgaatctggcgctttacggttatgggccggagagcaagcgccaatggatcatggtggattgcggcgtgactttcgccggcccggacctgccgggcgtcgatcttgtgctgcctgacatcagctacatcgccgagcagaaaaagaacctcaagggcatcatcatcacccacgcccatgaggaccattatggtgcaatgaacgatctctggccgggtctcaatgtgccggtctatgcctcgcctttcaccgccggcatgctggaagccaagcgcgcctatgagggtacccgtgccgaaatcccggtgacgattttcaaggccggcgaccgcatcaatgtcgggccgttcgaaatcgaggctgttggcgtcaaccactccattccggagccgatgtcgctgatcattcgcacgccgcttggcaatgtcatccacaccggcgactggaagatcgacgaggccccgtcgcttgggccgttgacggatgaagcccgtttccgcgcgatcggtgaagagggcgtgctggcgctgatgtgcgacagcaccaacgcgctgcgcgacggcgtgtcgccctccgagcatgaggtttccgaaggcctgcgccagatcatcgaaagtgccgaaggccgcgtggccgtcaccactttctcctccaatgtcgggcgcatccgctcgattgcgcaagcggcggaggcggccggccgcgaggtattgctgctcggctcttcgctgaagcgtgtcgtgaatgtctcgcaggatcttggcatcatggaaggcatcaagccgttcctcgccgaagacgaatatggttatattccgcgcgaccgtgtggtggtgatcctgaccggttcgcagggcgaaccgcgcgcagcgctcgccaagctttcccgcgacgagatgcgcaatgtggcgctcgcttcgggagataccgtcgtcttttcctcacgcgccattcccggcaacgaaaaggcgatcatcgagatcaagaacggcctgatcgaacagggcgttcacatcgtgaccgacaatgaagctctggtgcatgtctcgggccatccgcgccgcaacgagcttttgcggatgtatgagtggacgaagccgcagatcctggtgcctgtccacggcgaggcggcgcatctggtggcgcagaaggaactggccgagcaggccggcatctcgcaggtgccgaaggtgcgcaacggcaatgttctgcgcctggcacccggcccggcggaagtcatcaacgatgtgccgcatggacgcgtcttcaaggacggtaatctcgtcggcgatatggacgagatgggcatcagcaatcgccgcaaactgtccttcgccggccatgtcgctgtcaacgtcgtgctggacagccgttacgacttcctcggcgatcccgatgtcgtgccgttcggcctgccggaatttgatgacgaggacgaggcgatggaggacacgctttatgacgccgtactcggcgccgtcgagagcattccgcgcgcccgccgcaaggacctggcactgctgcgcgaatcggtgcgccgcgccgtgcgcgccgctgccaaccagagctggggcaagaagccgatcgtcacggttttcgtaacgaaggtc

SEQ ID NO: 130 - DNA, 648 bp, Arabidopsis thaliana
atggaacctcgaatcaatgaccttcaggtggaatctcgggttcatgagttgctcgattttccggttcatacaaaccagatatcctctgcaatctacgagtgtcccaacgaccacatcgaaaaccctaagaagaaaccgtacaattgtccacactcaggagccaagtgtgatgtcacaggagatattcaaaggctactactgcatctaaggaatgatcacaatgttgaaatgagtgatgggcgtagtttcagtcacagatatgttcatcatgatcctaaacatcttcatcatgctacttggatgttaacacttctcgattgttgtggtcgaaaattctgcttgtacttcgaagcgtttcacctgaggaaaacaccaatgtacatggccttcatgcagtttatgggagatgaagaagaggcaatgagcttcagctatagtttgcaggtcggagggaatggcagaaagctgacatggcaaggcgtgccgaggagcattcgtgacagtcacaagacggttcgtgatagtcaagatggcttaatcatcactcgcaaattggctttgttcttctctaccgacaacaacaccaccgacaaggagctgaagttgaaggtttcaggtcgtgtatggagagaacagcctgtttcgata

SEQ ID NO: 131 - DNA, 648 bp, Arabidopsis thaliana; identical to SEQ ID NO: 130

SEQ ID NO: 132 - DNA, 654 bp, Arabidopsis thaliana
atgagctctatcaatatcactaacgtcaccgtcttggacaatcctgctccgtttgtgaatccattccagttcgagatttcttacgaatgcttgacctctctcaaagacgatttggaatggaagcttatatacgtagggtcagctgaagacgaaacgtatgatcaagttttggaaagtgttcttgttggtcctgttaacgttgggaactatcgatttgtgttgcaggctgactctccagatccgttaaagattcgtgaggaagatattattggtgttactgtgttattgttgacttgctcatacatggatcaagagtttataagagttggctattatgtgaacaatgactatgatgatgaacagctcagggaagagcctcctaccaaggttttgattgataaggtccaaaggaacatactcacagacaaacctagagtaactaagttccctatcaactttcatcctgagaatgagcagactcttggtgatgggcctgcacctactgaaccatttgctgattctgttgtaaatggagaagctccggtgtttcttgagcagccacaaaagcttcaggagatagaacaatttgatgattctgatgtaaatggagaagctatagcgttgcttgatcagccacaaaatctccaggagaca

SEQ ID NO: 133 - DNA, 306 bp, Arabidopsis thaliana
atgcacgggagaaccgccatggcagtggcctgccttctgtgcatgacggctctgctgctagtccaggatgtccagtccaggaggctactgtggacggagcaggagaagaaacaatcccatggtggccttggcaaccatggcgccgctgaccggcgaagcacctccctggaaccgtgcagtggcgctatgggaggaggcggcacaggaagtgcagacaagcagggcgaattcccgtgtgatgatgatacgtcaaaatggacagaactgcacacggattacatatacacccaagacttcaagcaccca

SEQ ID NO: 134 - DNA, 1707 bp, Arabidopsis thaliana
atggctaactccaagaagcaagcatggtttttttataccacaggcttaccaagtgacatagaaatcgaagttgatgatataacatttcatcttcataagtttcctctaatgtcaaaaagcaaaaaacttcaccaactaataacagagcaagaacagagtaaagtttattctcacatcaagctcgagaattttccaggaggttcagagattttcgagatggtgataaagataagctacggtttcaaagtcgacatctctgtttccacagctgttccactccgttgcgccgccgagtatctagaaatgacggaagagtactcaccggagaatctcatttcaaaaacagagaagtttctttcagagttcgtcttcactaacgtacaagaatccatcaaagcgttgaaagcttgtgaatcagtctcgtctttagctgaatcactctgtataacggaacagtgtatagactccatcgtcttccaagcttcctcaaccgatccgtcgtcgttttacggttggccaataaacaacggaggtatattcaccgttgaccggaagaaacagagcaaagattcgaaaacagagctttggttcgaagatctaacggagttgagttttccaatcttcagacgtgtgatcttatccatgaagtcgagtgtcctgagtcctgagattgtagagagatctctacttacttacgcgaagaaacacattccaggaatctcgcgttcatcgtcagcatcttcatcttcttcttcttcttccaccaccatagcttccgagaatcaacaaagagaattattagagacgataacttcagatcttccattaactgcgacgactacgagatctctcttcggtttgttacgagccgcgatcattctcaacgcctccgagaattgcaggaagtttctagagaaaaaaatcggatcgaatcttgagaaagctacgcttgatgatcttctcattccaagttactcgtatctcaacgaaacgttatacgatattgatttggtggagagactcttacgtcgttttctcgaaaacgtcgccgtgtcgtcgtcgtcattgacggtggttgggagattgatcgacggagttctcggtgaaattgcatcggacgctaatcttaaaccggaacagttttataatctggcggttttgcttccggttcaagcacgggtttacgatgatggactatacagagccgtcgatatatatttcaagactcattcatggatattggaggaagagaaggagaagatttgtagcgtgatggattgtagaaaactgactgttgaaggatgcacacacgcggcacaaaacgagcgtttaccactacgagccgtcgtacaagttctgtttttggagcagctacagctccggcaagtaatcactgggactttactgacggaggaagacggtgataaaacggtggtggacttgggtagatggaaggaagcggtgaaggagaatcaggtgcttcgtttggatatggatacgatgaggacacgagtgaaccagctagagaaagaatgcttgtacttgaagaaagtgatcgcgaagatcgacaaagaaagtttgttgaaggcgaagcatggggcggggaaatggtcaatcgggaagaagttcggatgcaaattttcggctcaagtttgtgattcacaggaggcaacgatggtcgatagaagatcacgacgttttcttagt

SEQ ID NO: 135 - DNA, 588 bp, Arabidopsis thaliana
atggcgacagctttagcttccaagctctccaaaggacgttcattgcttggaggtctttgcaatgctttctctggtttgatgaattcctcctccaatggaatgatgaatggaagcatcctctctcagcaacaacataggacattcattcaaatggggacgattctcaaatgcgtggataactcgtgtgctaaagaggtgatgtgcattcaatccctgagaggtaagaaaggagcaagacttggcgatatcattgttggttcagtgaaagaagctaacccaattgttcaaaaaaaagtaaagaaagacgctatcccaaaaggtaaagtgaagaaagggatggtcgtgtacggtgtggttgtgcgtgctgcgatgcctaaaggacgtgctgatggaagccaagtcaagtttgatgacaatgccattgtagttgttggcattaaggaaaagaaagggcagaataattcacatggttccaagaggaaaatggagtacaaccaaccgactggtacccgagtgtttggtcctgtcccgcacgagatgcgcctcaggaaacagctcaagatcctttctttggctcagcacattgtt

SEQ ID NO: 136 - DNA, 1437 bp, Synechocystis sp. PCC 6803
atggcttcctctatgctctcttccgctactatggttgcctctccggctcaggccactatggtcgctcctttcaacggacttaagtcctccgctgccttcccagccacccgcaaggctaacaacgacattacttccatcacaagcaacggcggaagagttaactgcatgcaggtgtggcctccgattggaaagaagaagtttgagactctctcttaccttcctgaccttaccgattccggtggtcgcgtcaactgcatgcaggccatgggtaagaatctcctcgaacaactgcgccaatttacagtggtggtggccgacaccggcgacatccaagccattgaaacctttacccccagggattccaccactaatccttctttgattacggcggcggcccagatgccccagtaccaggaaattgtggacagcaccctgctcaaagctaaggacgaagctggggaaaatgcatctattaaagacattgtccgattggcctttgaccgtttggcggtggcttttggcctcaaaattctgcaaattatccccggccgggtttctacggaagttgatgcccgcctttcctacgacacggaagccaccattgccaaagctcgctacctaattggggaatatgccaaagctggcattgataaaaaacgcattctgatcaaaattgcttccacttgggagggtattaaggctgcagaagtattggaacaagaaggtattcactgtaaccttactctactattcggtctccaccaggcgatcgcctgtgccgaagccaaagtcaccctaatttccccctttgtgggacgcattttggattggtacaaaaaaagtactggcaaggaatatgacagccacgaagacccaggggtacagtctgttacaaccatttacaactactacaaacgctttggttacaaaactgaagtgatgggagccagcttccgtaacattggcgaaatcatcgaactggccggctgtgacctgttgaccatttccccccaactgttggatcaactgcggaacaccgaaggggatttacctcgcaaactcgaccccgccacggtgccccaggacattgaaaaaattgttatggacaaggccaccttcgacaaaatgcatgccgaagatccgatggcctcggaaaaactggccgaaggcattgccggtttcaccaaggctctggaggtgttggaacatttattggaagaaaggttaaaagttctcgatggccaagagcacatcaaacatggggcagaggaaattttccatgcctatgatctagatggggacggttttattaccagggaggaatgggccggcaccgatgtggtttttgatgccctagaccgggaccatgatggcaaaatcaccgccgctgaaatgtccgctgggttgggagccgctttccgtttagcctctgttggt

SEQ ID NO: 137 - DNA, 951 bp, Arabidopsis thaliana
atggatccggcgttgctggacgacgtcatacgccggcttctggaggtgaagaatctcaagcctgggaagaacgcgcagctgtcagagtcggagattaagcagctctgcgctgccgccaaggagatcttcctgcagcagcccaacctgctggagctcgaggcccccatcaaaatctgcggtgatgtccatggccagtactctgatctcctgaggctatttgattatggtggctatccgcctcaggccaactaccttttcttgggtgattatgtggatcgtggaaagcaaagcctagaaacaatatgtcttcttttggcttacaaggtcaagtacccggagaacttctttcttctaaggggcaaccatgaatgcgcatcagtaaatcgcatctatggtttttatgacgagtgcaaacgcagattcagtgtaaagctgtggaaaacattcacagactgttttaactgcttgccagtgtcagcattgatagatgaaaagattctctgtatgcatggtggtctatctccggagttgaacaagcttgagcaaatactcaacctgaatcgccccacagacgtgcctgatactggattgctctgtgatcttctttggtctgatccttccaatgaagcaacaggctgggccatcaatgatcgtggtgtttcattcacatttggtcctgataaagtttctgaatttcttgagaagcatgatttggaccttatctgccgagcacatcaggttgtcgaagatggatacgagtttttcgctagccgtcaactcgtaacaatattttcagcccctaactactgtggagaattcgacaacgctggtgccatgatgagtgtagatgatacattgatgtgctcgttccaaatattgaagcctgcaaggaagatgatgggtggttcaactaataacaaatctggcttcaagtcattcaggggatggtag

SEQ ID NO: 138 - DNA, 998 bp, Desulfitobacterium hafniense
gcaggaccatgaccaataccgtcaggaagatcgctgttcttaccagcgggggggatgctccgggaatgaatgcggccattcgggcagtggttcgcaagggaatttatcatggacttgaggtttttgggattcgcaaggggtatgaaggcctgattcatggggaattcataaccatgcatctgggagcagtagcggatatcattcataggggcggtaccatgctcatgaccgcacgttcccaggagatgctcaccccggagggacaaaaaaacgccgcggctcaattgcgttatcgcggtatcgatgcgctgattgtgatcgggggggatggttcttttcggggagcacagaccttgtctgctcaaggaatagccatcgtcggtataccgggtaccattgataacgatattaccggcacggatttaactatcggatttgatactgccgtcaataatgtggttcaagcggttagtaaaatccgggatacggcaacatcccatgatcgaacctttttagtggaagtcatgggacgggattgcggcaacatcgccttgcaatccggcgtagcctgcggtgcagaatccatccttgtgccggaaatcgaaccggatctggatgatattgtcgcgaaattggaacgcggccaccaacggggcaaacatcacagtatcattatggtggcagaaggggctatgagtgcttggaatctgggggaagaactccgtcagagaaccggctttgaaacccgggtcaccatcttaggccatatccaaaggggcggcaatccaagtgccctcgatgtggtcctggcctcgcaaatgggcgggaaagcagtggagatactctgcgccggggaaaccgatcggatgacagcctgtgtcaaccaggaaatccaatccctgcctttggaggtggcttatggtgagcgcaaacccttcaacaaagttctctatgatctggccaatcaattggctatctgagcaaaagaaatcagcggt

SEQ ID NO: 139 - DNA, 998 bp, Desulfitobacterium hafniense; identical to SEQ ID NO: 138

SEQ ID NO: 140 - DNA, 1263 bp, Arabidopsis thaliana
atggacagtataagtttgttgcccgatgatttcctcttgcgcatactgtcattgcttcctacaaaagacgtgttgaacactagtgttttgtctaaacgatggcggtatctttggaagttggtgccaaaacttcagtacagccttatcgataagaatgctgatcatgggacatttgtgcggtttgtggacagatcgttgctacttagcatggctccggttttagagagtttacatttaaagttaggtcgacaatgcagcgaagtagatatcgggttttgggttagaattgcagtggaaaaaggtttgtgtgagctagatttcgattatgagcattataagactgagccttgcagattgcctcagagcttgttcacatgcggaacactcacggtgctaaaactaaaaaacgtatcgctcaaggatgtacaattcccggtatgttttaagttgctcaaaacgctgcacctggagtatgtgattttcctagacaaggaaactcctcagaagcttttatcaagctgccctattcttgaagtctttgatttgactcgagatgacgacgacgttgataatgttatgagtttctctgttatggtgccttcgttacaaagatttatctattgtggaggatctggtgctgagcttgtgatgaatacgccttctttgaagtacttaaagctttcaggttgtggttacgagtgtatgattgggaatttgcctgagattgtggaagcacatgttgaggttgcatgttccactgatgatatccttacatctcttgcatcagtcaaacgcctcttgctatgtttacccacagagcctgagttacctactggtaccatcttccaccagcttgaacacttggagttttgttcttgttgcacagaatgggatatacttatgtttatgctcaaacattccccgaaacttcgatctctcaagcttaacgagacccacggctacactattgtttctcaaagtgatcctatgtttcattgggaggaaccaagctcggttcctgaaactttgatgtttgttcttgagactttggagtggagaaactacagagggttgaagatggaaaacgaactcgcaagttttctcttgaaacattcaagacgtctgaagattgcaaccttttcgccagcagactgcaaacaagtgagaatcgaattacgtacgacagttggaatgaaatatcgtatactcatggaattggcgcgtttgccaaggggttcagcagagtgtgagcttgtgtttggt

SEQ ID NO: 141 - DNA, 1527 bp, Zea mays
atgatcgcaaacggcctccgcaaatccagtgctgcctcctcccaggttagcaagctggtgaaatacattgctagtgctggaagcttgcaaggggggcacagtttatcagagccgtctgccagacattacagctctgaaccttcacttcaggcgacagaagaaaatgggtttaaggggcacagcatgctggctccattcacagcgggatggcagagcactgatgtacacccattggttatagagagatcagagggttcttatgtctatgacagcaatgggaagaagtatattgatgctcttgcaggactgtggtgcacagctttaggtggtaatgagcctcgactagtcaaagcggcaactgagcaattaaacaaattaccgttctaccattccttttggaaccgtacaaccaaaccctcattggatttcgcaaatgatattctcagcatgttcaccgcaagggagatgggaaaggtgttcttcacaaatagtggttcagaagcaaatgactcccaggttaaactagtgtggtattataataatgcactgggaaggccagacaagaagaaatttattgctcgctcaaaatcgtaccatggatcaaccttgattgcagctagtctatcaggtctgccagcgcttcatcagaagtttgatctaccagcaccttttgtcctgcacacagactgccctcactactggcgattccgtcttcctgatgagacagaagaagagttttcaactagacttgccaataatttggagaatcttgtcctcaaagaaggacctgaaacaattgctgctttcattgctgaacctgtgatgggcgctggtggtgttatccttcctccaaagacctattttgagaagattcaggcagttctgaagaagtatgacatcttgttaattgcggatgaggtcattactgcatttggaagactagggacaatgtttggatgtgatatgtataatattaaaccagatcttgtttccatagccaaggctctttcttctgcatatatgccaattggagcaattctcgttagcccagaaataacggatgtaatctattctcagagcaataaacttggttcttttgctcatggctttacatactcgggacatcctgtttcttgtgccgttgctgtagaaaccttgaagatatataaggaaaggaatattgtagaacacgtcaacaaaattgctccaaggttccaggagggaatcaaggccttctcaggcagcccaattgttggggagatacgcggtctgggactgatacttggaactgaatttgtcgacaacaaatctccaaatgatccatttccagctgaatggggtgttggttcgatatttggcgcggagtgcgagaagcgtgggatgctcatcagggtggctggggacagcatcatgctgtcacccccgctgatcatgactcccaatgaagtcgaagaaatcataagcaaattcggcgatgctctgaaggctacagaggaacggattggagaactgaaatccaggaagaat

SEQ ID NO: 142 - DNA, 1104 bp, Arabidopsis thaliana
atggcgagaagatccgtttcgatatttaatcgccttctggcgaatcctccttctccattcacatcactgtcccgatccatcacctacatgcctagacccggagatggagctccacgaaccgtaaccctaattcccggcgacggaatcggacctttggtgaccggtgcggtggaacaggtcatggaagcgatgcacgcgccagtgcatttcgagagatacgaggttctaggaaacatgagaaaagtccctgaagaagtgatcgagtctgtgaagagaaacaaggtttgtctcaaaggtggattagcgactcctgttggtgggggtgtcagttctttgaatatgcaattgaggaaagaactcgatatcttcgcttctcttgtcaattgcatcaatgtccctggattagtgacgcgacacgaaaatgttgatatcgttgtgataagagagaacactgaaggagagtactcaggtctcgagcatgaggttgttcctggtgttgtcgagagccttaaggtgataacaaagttttgttctgagagaatagcgagatatgcatttgagtatgcgtatctaaacaataggaagaaagtgactgctgttcataaagctaacattatgaagcttgcggatgggctcttccttgaatcttgtagagaggttgctaaacattattcggggattacttacaatgaaataatcgtagacaattgctgtatgcagcttgtcgccaagcctgagcaatttgatgtcatggtgacacctaatttgtatggtaaccttatagcaaacacggcggctggaatagccggtggcactggagtgatgccaggagggaatgttggtgcagaacatgcgatattcgagcaaggtgcatcagcagggaatgtggggaatgataagatggtggaacagaagaaagcgaatccggtggctctacttctctcgtcggctatgatgctaagacatctccggtttcctacttttgctgatcggcttgaaacagcagtgaaacaagtgattaaagaaggaaaatatagaacaaaagatcttggaggagattgtaccacgcaggaagttgttgatgctgtcatagcagctcttgag

SEQ ID NO: 143 - DNA, 543 bp, Arabidopsis thaliana
atggaaaacgacgatatcaccgtggcggagatgaagccaaagaagcgtgctggacggaggattttcaaggagacacgtcacccaatctacagaggcgtgcggcgtagggacggcgacaaatgggtatgcgaagtccgtgaaccgattcatcagcgtcgagtctggctcggaacttatccgacggcagatatggccgcacgtgctcacgacgtggcggttcttgctctgcgcgggagatccgcgtgtttgaatttctccgattctgcttggaggttgccggtgccggcatccactgatccggacacgatcaggcgcacggcggccgaagcagcggagatgttcaggccgccggagtttagtacaggaattacggttttaccctcagccagtgagtttgacacgtcggatgaaggagtcgctggaatgatgatgaggctcgcggaggagccgttgatgtcgccgccaagatcgtacattgatatgaatacgagtgtgtacgtggacgaagaaatgtgttacgaagatttgtcactttggagttac

SEQ ID NO: 144 - DNA, 1482 bp, Zea mays
atggcgccgggatcgtcgtcgtctcgtaaggccaaggccctcaaggcatcgtaccggctcgtcgccgacaacttcctcgccgtcctcgccatggtttctgtcgtcgccgtgctcttcgctgcatggccgatcagcatcgaggaccttgcctgccggctgcacgcggtgcggccactccacgtcctcacggcggcgatcctgacggcggccctcgcgaagctgaggcgcatgagccggccgagcgacgtgtatctcgtggagtacggctgcttctggcccaagccgtgcttccgggcgccgttcgcgacgtgcctggagcacgtgcggctcttgccgtacctggtcaacgaggacgacatcagctggggctggcggctcctccagcggtccgggatcggcgaggagacctgcgtgccgtacgcctaccactacctgcccccggaccgcagctttagggcctccctggacgagaccgagctggtcatcttctccgccgtcgacgatgtgttcgcccggacgacggccgtgacgcccgcggacatcggcgtggtgatcgtgaactgcagcatcttcacgcccacgccggtgttcacggacatgatcgtgaacaggtacaagctgcgcgccgacgtgcggagcgtgaacctgtccgggatggggtgcagcgcggcgctcatctcgatcggtctcgccaggaacatgctgcaggtggcgccgccgggcacgcacgcgctgatcgtgtccacggagatcctctcgtcgcagtactacgtcggcatggaccgctccatgctcctgcccaactgcctcttccgcatgggcgccgccgccatgatcatgtccaacaccgcggcccgaggcgcgcggttccggctcgcccgcgtcgtgcgcacggtggcctccgcgcgggacgccgcctaccggtgcgtgttccaggtggaggacgaggagagcaacacggggatccggctctccaaggacctcgtgcccactgccgcccagaccctgaaaagcaacatcgtcgccttcgggcccctggtcctgcctgcctcggagaagctcctcgtcgctctgtccatcctgaggcggaggctagtacagagcagccgggggagggtgtaccgcccggacttccgcaccgcgttcgagcacttctgcatccacgccggcgggcgcggggtcatcgacgaggtgcagcgcggcctcggcctctccgacgaggacgtggaggcgtcgcggatgacgctgcaccggttcgggaacacgtccagcagttcggtggtgtacgagctggcgtacatcgaggccaagggcagcatgaggaagggagaccgcgtgtggatgatctccttcggcgccggcttcgactgcagcagcgtggcgtgggagtgcatcgagcccgccgccgacgctgctgggccgtgggccgactgtatccaccgctacccagtgcagctccctaaattgatggaggcccttgat

SEQ ID NO: 145 - DNA, 735 bp, Arabidopsis thaliana
atggagaatgagagagaaaagctgatttacttggctaagctcggttgccaagctggaagatatgatgatgtgatgaaatcgatgagaaaagtatgtgagcttgatatagagctaagtgaagaggaaagagacctactaacaactggatacaagaatgtcatggaggctaagagagtttcattgagagtaatatcatccattgaaaaaatggaagactcgaaaggaaacgaccaaaatgtgaaactgataaaaggacaacaagaaatggttaaatatgagtttttcaatgtttgtaatgacattttgtctctcattgattctcatctcataccatcaactactactaatgtcgaatcaattgtcctttttaacagagtgaaaggagattattttcgatatatggcagagtttggttctgatgctgaacgtaaagaaaatgcagataattctctagatgcatataaggttgcaatggaaatggcagagaatagtttagcacccaccaatatggttagacttggattggctttaaatttctcgatattcaattatgagatccataaatctattgaaagcgcatgtaaattggttaagaaagcttacgatgaagcaatcactgaactcgatggccttgacaagaatatatgcgaagagagcatgtatatcatagagatgcttaaatacaatctttctacgtggacttcaggcgatggtaatggtaataagacagacggt

SEQ ID NO: 146 - DNA, 735 bp, Arabidopsis thaliana; identical to SEQ ID NO: 145

SEQ ID NO: 147 - DNA, 624 bp, Arabidopsis thaliana
atggagaagatcgttcgttcttcttcgctgattctacttgttggcctccttctttttatgaattttcacggatttgtccggatcgccgaagcaacgaagcgacggatcgagatctccgatgacctagacgacgttgaagacaatgaagaagacgagtcatggaaagagtgggggaagaaagcaacgaccccggaatttgatccgcctccggatttcaccaatatgggattcgatcagatccaagaggaaatggctaaacggacttttggaaccgtcgtcggtttcgtcaagctccggttaggcgtcccccgtaccaaggatgtggtgattgatattgctatgaaatggacaaaagttttaagaacaggagggataggagtaagattcatggctgtagatcgaagcacagtgatgttcaatatgcaaaatgggaagcttgtgactgagctaagggaattcgtgctgagccaagaagaagcttacgaggtcaagatagggaagcaagagtttagaagacctggagatcctccatttgaagatgtctttgacaaatttcaagctgagcaaaggaaagatcacgaagatggtgatggtaacaagaatgatcttactaaggatgaatta

SEQ ID NO: 148 - DNA, 624 bp, Arabidopsis thaliana; identical to SEQ ID NO: 147

SEQ ID NO: 149 - DNA, 600 bp, Arabidopsis thaliana
atgtcttcgaaaaagattgtgttgacaagctccgatggtgaatctttcaaggttgaagaagtggtggcaagaaaactgcagatcgtaggacacattatcgaagacgactgtgctacaaacaaaatccctattccaaacgttaccggagagattctcgccaaggttatcgagtactgcaagaaacacgttgaagacgatgatgacgtggtggagacgcatgaatcatcgacgaaaggagataaaacagttgaggaggcgaagaagaagcctgatgatgtggccgtacctgaatcaactgaaggagatgatgaagctgaggataagaaggagaagcttaatgagtgggatgcaaagttcatgaaggatttcgatattaagacgatcttcgacattattctggctgctaactatctcaacgtccaaggtctttttgatctctgtagcaagaccattgcagattacataaaagatatgacgccagaggaagttcgagaactctttaacatcgagaatgatttcacacctgaagaagaagaagcaattcgcaatgaaaacgcttggacttttgagcaagatggaaaacaacaagttccaaaaccc

SEQ ID NO: 150 - DNA, 741 bp, Arabidopsis thaliana
atgtataagtggaatcttccttaccgaaaagatgacgtggagaccggccgtgaaggcggtgagagatctctgtatccgactatgcttgagagccccgaactccgatggggtttcatcagaaaggtatattccataatcgcattccagcttttagcaaccatcgccgtcgcctccacggtggtttttgtccgtccgatcgccgtgttcttcgccactactagtgccggtctcgctctctggattgtcttaatcatcacgcctcttatagtaatgtgtcctttgtactattaccaccagaaacatccagtgaattatttgcttctagggattttcacggtagctttggctttcgccgtcggattaacatgtgctttcaccagcgggaaagtgattcttgaggcagcgattttgacaacagtagtggtgctttccttaaccgtctacaccttttgggcagcaaagaaaggatatgactttaacttcctcggtccattcttgtttggtgctctcatcgttctcatggtctttgcccttattcagattttcttcccgttgggacggatctcagtgatgatctatggatgtttggctgcgataatattctgcgggtacatagtttacgatacagacaatctcatcaaacgttacagctacgatgagtatatttgggcagcagtttcgctctacttagatattatcaacctcttcttggctctccttaccattttcagagctgccgag

SEQ ID NO: 151 - DNA, 741 bp, Arabidopsis thaliana; identical to SEQ ID NO: 150

SEQ ID NO: 152 - DNA, 348 bp, Glycine max
atggcgactcttgattccgacgtgcctatggttcccgccggcgagccctcgagcagcgccggtccttcttccaagaagcccaagcgcttcgagatcaagaagtggaacgccgtcgctctctgggcttgggacatcgttgtcgataactgtgctatctgccggaaccacatcatggatctctgcatcgagtgccaagccaaccaggctagcgccactagcgaggaatgcactgtggcttggggagtttgtaaccatgcttttcacttccattgcatcagtcgatggctcaagactcgtcaagtttgtcctctagataacagtgagtgggagtttcagaaatatggccac

SEQ ID NO: 153 - DNA, 1329 bp, Arabidopsis thaliana
atgatggtgtttgtggtttttgttatgtgtaggtataagattttggaagagcttggtgatggtacttgtggtagtgtatataaagcagtaaatttggaaacatatgaagttgttgctgttaagaagatgaagagaaagttttattattgggaagagtgtgtgaatctgcgagaagttaaggctcttcgtaagctaaatcatcctcatatcataaagttgaaggagattgtgagagaacataatgagctttttttcatctttgagtgcatggatcacaatctgtaccatataatgaaagaaagggaacgacctttttctgaaggagaaataagaagttttatgtctcagatgctgcaagggctcgcacacatgcataaaaacggttatttccatcgagacctgaaacctgagaatttgctggtgaccaacaatatcctgaaaattgctgactttgggttggctagagaagttgcatctatgcctccttacactgaatatgtgtccacacgttggtatcgagctccagaagttttgctacagtcttcattatacactcctgcagttgacatgtgggcagttggagcgatactagctgagctttacgctttaactccgttatttcctggtgaaagtgagatagatcaattatacaaaatctgctgtgttcttggcaagccggactggaccacgttccctgaagcgaaaagcatatctcgaattatgagtattagtcacacagagtttccgcagacacgaattgctgatttacttcccaatgctgctcctgaagctattgatttgatcaatcgactttgctcatgggatccattgaaacgaccaactgctgatgaggcactaaatcatccatttttcagtatggctacgcaggcttcatatcctatccatgaccttgagctgaggcttgataatatggcggcgttgcctaatcttgagctaaatctctgggactttaacagagaacctgaagaatgttttcttggcttgacactagctgtgaaaccaagtgctcccaaactagaaatgctccgcaatgtatctcaggacatgagcgagaattttctcttttgccccggggtcaacaatgatcgagaaccatcagttttctggtctctgctctctcctgatgaaaacggcctccacgcgccagttgaatcatctcctttatctttgtctttcagtccaatgcagcaacacacagttggacctccacagtcgagtggcttcacaatgacatcatcaatgcaaccgaatatgttggaccgcccgtggatggccgtgtctgcgccgtttcaacaaagtcattacctc

SEQ ID NO: 154 - DNA, 1013 bp, Arabidopsis thaliana
gcctcgccgtgctctaggttctcggatggaggccgaggcggcggcgaagagggcgcgggagagcggtgacgcggcggcggccggtgccggcgagcaggcgggtatctctgccgtcatccctggatggttctccgagattagccccatgtggcctggtgaggcacactcattgaaggtcgaaaaggtactattccaaggaaagtcggactaccaaaatgtgatggtgtttcagtcctccacgtacggcaaggtgcttgtgctggatggagtgattcaggtcactgagagggatgagtgtgcttaccaagagatgattacccacctccccctttgctctatcaaagatcccaagaaggtgttagttattggaggtggagatggtggtgttttgcgtgaagtttcacgacattcctcggtggagcaaattgacatatgtgaaattgataagatggtggtagatgtctccaaacaattttttcctcatctggctgttggatttgaagacccccgtgtgtcattacacattggagatggcgtggcctttttgaaaaatgctccagagggtacttatgatgcagttattgtggattcctctgatccaataggaccggctcaagagcttttcgagaagcctttcttccagtcagttgccagagctttgcgtcctggtggtgttgtatgtacccaggcagagagcatatggttgcatatgcatattattgaagatattgtagctaattgtcgccaagtttttaaaggctcagtgaattatgcttggacaacagtaccaacataccctagtggtgttattggttttatgctttgctccaccgaggggcctactgttgatttccagcatcctatttttaacattgaggataatgagttctcaacaaaatcgaaaggaccacttaagttctacaattccgagatccactcagcatcattttgtttgccgtcttttgcgaagagagtcattggatccaaggccaactagatcaaagatcactgag

SEQ ID NO: 155 - DNA, 750 bp, Arabidopsis thaliana
atgacgagcgcatcggaactcttctctacacgaagatcacgtccgggtcgatccgacccggctttagaatccgacacttcttcctatcgacaccactcacaccatcatcatcgccgtcacggcgtccatcatcataatcagcgtcatgattccgacggctgtgatcctctccggcgacccactccccgtctccgacgcttctttcaccatccgattcaggaacgtagtagacctattcgtgatgttcaaggcactagtcagtatttaaatacggatagtactgatactgaaactcagagtagcagctttgttaacctaaatggatccgagaggcttcctggagctgttctgcttgcaagggatagacttttcgaaagattgagaggtgtttctttgtctagtaacagtcgaagcaacagagtttcattggatgatcaaagggagtcttcatttcattctatagatggagatccaatttttcaactagcagggcttcaagtgacctatgaatgcaacaagaaaccacaaggtcttactcaagatgctattaactgtttacaccggcaaacttttagctcagccgaggttaaatccgagatgagagattgtagcatatgtttagagagtttcactaaaggtgacatgctaatatccttaccctgtacccatagtttccattcttcttgcttaaacccttggcttagagcttgtggagattgtccttgttgccgtagagccatagcaaaggaa

SEQ ID NO: 156 - DNA, 750 bp, Arabidopsis thaliana; identical to SEQ ID NO: 155

SEQ ID NO: 157 - DNA, 474 bp, Arabidopsis thaliana
atgtccgacgaggagcatcactttgagtccagtgacgccggagcgtccaaaacctaccctcaacaagctggaaccatccgtaagaatggttacatcgtcatcaaaaatcgtccctgcaaggttgttgaggtttcaacctcgaagactggcaagcatggtcatgctaaatgtcattttgtagctattgatatcttcaccagcaagaaactcgaagatattgttccttcttcccacaattgtgatgttcctcatgtcaaccgtactgattatcagctgattgacatttctgaagatggatatgtcagtttgttgactgataacggtagtaccaaggatgaccttaagctccctaatgatgacactctgctccaacagatcaagagtgggtttgatgatggaaaagatctagtggtgagtgtgatgtcagctatgggagaggaacagatcaatgctcttaaggacatcggtcccaag

SEQ ID NO: 158 - DNA, 474 bp, Arabidopsis thaliana
atgtcagacgacgagcatcacttcgaatccagcgacgccggagcttctaagacttatcctcaacaagccggtaacattcgtaaaggtggtcacatcgtcatcaagggacgtccctgcaaggtggttgaggtatcgacttcgaagactgggaagcatggtcacgccaagtgtcactttgttgccattgatatctttacttctaagaagcttgaagatatcgttccttcttcccacaattgtgatgttccacatgtgaatcgtgttgattatcagttgattgatatctctgaagatggctttgttagtcttcttactgataatggtagcactaaggatgatctgaagctgccaacagatgaagctttactcacacagctcaagaatggatttgaggagggtaaggatattgttgtgtctgtcatgtctgcaatgggagaggagcagatgtgtgctctcaaggaagttggtcccaag

SEQ ID NO: 159 - DNA, 591 bp, Arabidopsis thaliana
atgagcgcttcgaggttcgtaaagtgcgtgacggttggtgatggagctgtcggaaaaacttgtttgttgatttcttacacaagcaacactttccctacggattatgtgcctaccgttttcgataatttcagtgccaatgttgtggttaatggaagcactgtgaatcttggattgtgggacactgcagggcaagaggattacaatagattaagaccactgagttaccgtggagcagatgttttcattttggccttctctcttatcagtaaagccagttatgaaaacgtctccaaaaagtggatcccggagttgaaacattacgcgcctggtgtccccatcgtccttgttggaacaaagcttgatcttcgagatgataaacagttctttatcgaccatcctggtgctgttccgattactactgctcagggagaggagctgaggaagcaaataggagcacctacttacatcgaatgcagttccaaaactcaagagaatgtgaaggcggtgtttgacgcagccatccgagtggtgttgcaaccgccaaagcagaagaagaagaagagcaaagcgcagaaggcatgctccattcta

SEQ ID NO: 160 - DNA, 1584 bp, Arabidopsis thaliana
atggtaataggagcagcagcgcgtgtagccatcggcggttgtcgaaagctcatctcgtcacatacctccctcctcctcgtctcttctcagtgtcgccagatgagtatggacgcacaaagcgtttctgaaaagcttaggagttctggtctattacgaactcaaggtctaattggaggcaagtggcttgactcgtatgacaataagacaatcaaggttaacaatccagcaaccggtgaaattatagctgatgttgcatgtatgggaacaaaagagacaaatgatgctattgcttcttcttatgaagcatttacttcttggagcagattgactgctggagagaggagtaaagttttacggagatggtatgacctcctgattgcacacaaggaagaacttggacaacttataactttggagcaaggaaaaccactcaaggaagccatcggagaggtagcatatggggcaagttttattgagtactatgcggaggaggcaaaacgtgtatatggtgatataattcctccgaatctgtctgatcgccgactgttggttctaaaacagcctgtcggtgttgttggtgcaattaccccttggaacttccccttagccatgattactcggaaggtcggccctgctcttgcttctggatgcacggtggttgttaaaccatctgaacttacgcccctaacagcacttgctgcggctgaacttgcacttcaagctggagttcctccgggggcacttaatgtggtcatgggaaatgctcctgaaattggggatgctttgcttacgagtccacaggtgagaaaaatcacgttcacgggatcaacagcagttgggaagaagttgatggcagctgctgcacctaccgtcaagaaggtttctctagaacttggcggcaacgcaccctctatagtatttgatgatgcagacctggatgtagctgtaaaaggaacgcttgcagcgaaatttaggaatagtggtcagacatgtgtttgtgcgaacagagtacttgtgcaagatggtatctatgataaatttgctgaggccttttctgaagcggttcaaaaattagaagtaggagatgggtttagggatgggacaacccagggtccacttataaatgatgcagcagtgcaaaaggtagagacatttgtacaagatgctgtttctaagggagcaaaaatcatcattggtggcaaaaggcacagtctagggatgactttctatgagcctactgttatccgcgatgtttcggataacatgatcatgtctaaggaggagatttttggacctgtagctccccttattcggttcaaaaccgaggaggacgctatcagaattgctaatgacacaattgcaggacttgctgcttatatattcacaaacagtgtccaaagatcttggcgtgtatttgaagcacttgaatatggacttgtaggggtgaacgaaggactcatatcaacagaggtggctccattcgggggagtgaagcagtctggtcttggaagggaaggatccaagtatggtatggacgaataccttgagatcaaatacgtatgcttgggagatatgaatagacac

SEQ ID NO: 161 - DNA, 1413 bp, Arabidopsis thaliana
atgtggcggcgaagtaacttaccggggaatccagattccgatcagagcatatctgaggaagaagaagaaaatgatatttcgccgaaggagaatgcgaaggaacaagagagaggattactacttcaaacaaagctcgaaaaactcataggttgtggtgagctaaattatgctagggaaaccggtgatgtaactctggaagcaactctacggaagatatcatcctctcttgaagatgtggtcgaagttcctgactcccccgaggagagttatatttcttcttccagaagaactggattagcatgcatatctgctcaggaaaatgggtcagatgatgagattacacatgatgaacaagtggcaacttggtctgctataagtaaagaaaccaagtcactaatccatttgaatggtgttgcttcagtcgcatcatcccatctatctggcttcagagccaagaaaagtagtaatggtctcaaagatcatgggaggccaaaattttcatttaactcacatactcatggagaaacgtcatccaagataagtgacatggctgaaatctttgagcctgatgtggaggatcaggctatagaagaggatccaattattgaatgccccaacagttttgatgaaagatcagaaaacaggcagggtgtttctgttgctgagtcgagagaagttttgcacgagtgcactaaagatgcggtacccaagcttcaagaaattcctctagataaaattagactgataaaaagaagctctgaactggacagcagacatgaagcaaaaagtcggaaatttactcataagggaaattcatctaacttccaagatagtgatactgatgatgaacttcctggacctatggatagtggatcatcaagcgatgatgagcctagttatcaaagctcagtgccaaacatttccaaccagaagaaacaatttgttggggaccggtttgatgaagcaataaaagcttcctctttgagcaaagaaggtctcttgttcggttcacctaaattatctggtggctctagcctgtatggcaagctgcaacagatcatgaaacaagaaaaagagacggaaatggaaatcatgaggaaattgcaaagcggaatcggagaagcagattcatcgggctatgttgatgttaaagtcatgtcaagacacttggagggaaagcttgtcgtctgcaaatgctctgtcattgacctctctggggactccctattactcaagaacacacaagctcttgcggcaaaagaaacagaaacaacaattatttttagtccgaaagtttgtgcggatgttgatatcgaaatagggaactttatccgagtatatgcgccatggaaggagttggaagtgcagaaaaccaatgatgtgattattttgtcttcatatttctcaagtttg

SEQ ID NO: 162 - DNA, 210 bp, Zea mays
atgtcggcgctgttcaacttcaactccttcctgaccgtggtgttgctggtgatctgcacctgctcctacatcaagatgcagttcccggcaatcctcaacgaccgcaccggattccgtggtttcttttggaaagctgccaggataggtgagcgattgagcccttgggtatcagtcgggtgcttggctatgggaatatccactattttcttc

SEQ ID NO: 163 - DNA, 948 bp, Arabidopsis thaliana
atgggtgggggaggagctatgaggtcggcggcgaagatagccggaattggcgtgtccaaggcggcgctccggccttcggcgctccctacggagcagacggtccgcaacgcgtcgcgaccaacggcggtctccggagtgtcgtcgcagtcggcgaaatccgcggaggtggcgccgctgcacacggcagctgcctgggacgattgggacttcgccgaggatggcgaattggtcgtgccgaggatggtgttcggttctgtccccactctcgatgaagctaaggaagccaccgcagagttgaaggacgctattgatcaagtatatctttgtcctgagacttctcaatattcatctcccggtggtcaagtctctgctttgtctcccactctctatgggccagtgaacagatcttgtgtcattgatgctatttcagatcctacggccccaaagcatgccattcaggcttttcatttgcttagcactagtcgtgaggcccaggctgttgtggcttcacttgcttgtgacccaaatgtatggaatgcagtcatggaaaattctgctgtcagtagtttcttccaatcacaacagtcagtggctggttttggagcagcagaaaattctgaggaagtggataagttatcaagctgtgcttctgaaacagtcgaatcccctgagaaattggaagggtcggctgagtctcacccggggaacatgtttgacgatttcatgggtcttctgcagaatgtgaagcttacagttattgaattggtaagtaggttgtctggtttccttcagaacatattcccaacacctgatgctatgagagagaaaatgtctttcgatgctgatgggaacactaaagcaagtttcatggatagtaaaattagcatgggaggaaccttcataggtttggcagtgctggtgataatggtgatcgtgacaaagagagct

SEQ ID NO: 164 - DNA, 456 bp, Arabidopsis thaliana
atggcggaggagcagcagcatcagagatggcaggagggccaccgcctgtgcgccaacaattgcggcttcttcggcagccccgcgacgctggacctctgctccaagtgctaccgcgacctataccagcagcagccagcaggcgcggcggcgggcccctccgctcccaccgcgtcggccttccagcattcctcctcggcagtctccggcgcggcggcggtctctcccgatctcgaacctcccgcgacggcccctgctggcgccaaggcgggcaggtgctccagctgccggaagcgcgtgggcctgacggggttcgcgtgccgctgcggagctaccttctgcggcgtgcaccgctacccggagcggcacgcgtgcgccttcgatttccgggccgccggccgcgacgccatcgcgcgcgccaaccccgtcgtcaagggcgataagctcaaggacaagatc

SEQ ID NO: 165 - DNA, 366 bp, Arabidopsis thaliana
atggagcacggttcgttcacgaatgttagtcatgcttcgtttactttatcggaagaagatcacacacttgctaatgctgttagattcgtcttaaaccaagatcccagagtaaccgtggctgcatacaccatcccacatccttcccttgaacaggtcaatatccgggtccagacaacaggtgatccagcaagagaggtttttaaagatgcatgtcaagagctcatgcaaatgaacagacatgtgagaagcgtttttgataaggctgttgctgagtataaggatgaacaaaagcgtaaggaggaggctgaagaagaagagcttaagaggcagagggatctatttgggtccatggacattgaaaacaac

SEQ ID NO: 166 - DNA, 894 bp, Glycine max
atggtgtacgtcaaggctcagaaatcaaaagcctacttcaagagatatcaagtcaagttcaagagaagaagagagggaaaaaccgattaccgtgccaggattcggttgattaatcaggacaagaacaaatataacactccgaaataccgatttgtggttcgctttagcaacaaggacattgttgcacaaataatatctgctagcattgccggcgatttagttcttgctacagcatattcacatgagctgccacgatatggtcttgaagtaggacttacaaattatgcagcagcttattgcactggtctcctgttggcccgaagagtcctcaaaacacttgaaatggatgaggagtatgaaggaaatgttgaggctactggagaggattattcagtggaacctgccgagagcaggaggccattccgtgcactccttgatgttggtcttgttaggactacaacaggaaatcgcgtctttggtgcccttaagggagctctggatgggggtttggatattcctcacagcgacaagaggtttgctgggtttgataaggagaagaaggagcttgatgctgaggttcatcgcaaatatgtttttggtggacatgttgctgcctatatgaagatcttggcagaagatgaaccagagaaataccagtcacacttcagcgaatacatcaaacgtgggatagaggctgatggtattgaggcactttacaagaaggttcatgctgccatccgtgctgatcctactctcaggaaatctgataaggagcccccgaaggagcacaagaggtacaacatgaagaagctgacttatgaggaaaggaaggctaagttgattgcacgcgtggcggctatcaactctgctgctgatagtgatgaagatgatgag

SEQ ID NO: 167 - DNA, 942 bp, Zea mays; identical to SEQ ID NO: 50

SEQ ID NO: 168 - DNA, 1137 bp, Zea mays
atgggtgccgagttgggagaagcgggtgtccctgcccgggacatggtggacgcgctggaaggcgtgcgctccatcctgctgaaaccgtcggagcgcctcgacgacaagcgcttcacgaggatcgccggcgccgacttcgacgacgccggcctcggcctcgccgggttgctcggctcgctcgcgtccacggggttccaggcctccaacctcggcgacgccatcgacgtcgtcaaccagatgttggactggaggttgtcccacgagaagccaagcgacgactgcgctgaagctgaactcgatcctgcgtacagagaatccgtcaagtgcaagatattcctggggttcacttcgaaccttgtgtcttccggtgttcgggagatcatccggtttcttgttcagcatcgcatggtggacgttattgttacgactgctgggggtatagaggaggacctcatcaaatgccttgcgccaacctacagaggcgacttcactctgcccggagcgctgctgcggtccagaggacttaaccggataggaaacctgctggtgcccaatgacaactactgcaagttcgagcactggatcatgccgatcctcgacaagatgctgctggaacagtccacccaaaatgtttggacgccgtccaaggtgattgctcgccttggcaaggaaataaatgacgaaagctcctacctttattgggcgtacaagaacaacatccctgtgttctgcccagcattgactgacggatcaattggggacatgctgttctgtcactcggttcacagtccaggtcttgttgtcgacattgtacaagatgtacggctgatgaacgcggaaaccatccacgcaagcccaaggaagacagggattatactccttggcggaggccttccgaagcatcatatatgcaacgccaatatgctgcgcgacggagctgactatgcggtgtatgtcaacacagctcaggagttcgatggcagtgattccggggcgcggcctgacgaagcggtttcatggggaaagatcaagagctcagcgagaactgtgaaggtgcattgtgatgcgacgattgcctttccacttcttgtggctgcaacatttgcacgcaaggttcacggcactaaatcaacaaac

SEQ ID NO: 169 - DNA, 1500 bp, Oryza sativa
atgagttcctccccgtcctttggtctcctggccttagcagcagtactcctagcactgaacttagcacaacatggctccctcgccgcaaccgtcggccccagggtcatcgtcgtcggcgccggcatgtctgggatctcggcggcgaagaggctgtcggaggccgggataaccgacctgcttattctggaagcgacggaccacatcggcgggcggatgcacaagacgaacttcgccggcatcaacgtcgagttaggcgccaactgggtggagggcgtgaacggcggcaagatgaaccccatctggcccatcgtcaactccaccctcaagctccgcaacttccgctccgacttcgactacctcgctcagaacgtctacaaggaggacggtggcgtctacgatgaagattacgtccagaagagaattgaactggcggacagcgtggaagagatgggggagaagctctctgccactttgcacgccagtggcagagacgacatgtctatccttgccatgcagcgcctcaacgaacaccagccgaacgggccggcgacgccggtggacatggtggtggactactacaagttcgactacgagttcgcggagccgccgcgcgtgaccagcctgcagaacaccgtgcctctcgcgaccttcagcgacttcggcgacgacgtctacttcgtcgccgaccagcggggctacgaggccgtcgtctactacctcgccggccagtacctcaagaccgacgataagtctggaaagatcgtcgacccgcgcctgcagctcaacaaggtggtgcgagagatcaagtattccccgggtggcgtcaccgtcaagacagaggacaactcggtgtacagcgcagattacgtcatggtttctgcgagcctgggtgtcctgcaatccgatctcattcagttcaagcccaagctacctacatggaaggttagggcgatctaccaattcgacatggccgtgtacaccaagatcttcctcaagttccccaggaagttctggcctgaagggaaaggaagggagttcttcctctacgccagcagcaggagaggttactacggagtgtggcaggagttcgagaagcagtaccctgacgccaatgtcctcctggtcaccgtgaccgacgaggagtcgaggcgcatcgagcagcagtcggacgagcagaccaaggcggagatcatgcaggtgctgcggaagatgttccccggcaaggacgtcccggacgccaccgacatccttgtcccgaggtggtggtccgacaggttctacaagggcaccttctccaactggccagttggcgtcaaccgctacgaatacgaccagcttagggcaccggttgggagggtatacttcaccggcgagcacaccagcgagcactacaatggctatgtccatggagcctatctttcaggtatcgactccgctgaaattctcatcaactgcgcccagaaaaagatgtgcaagtaccatgtccagggaaagtatgac

SEQ ID NO: 170 - DNA, 2130 bp, Arabidopsis thaliana
atgtcagcgtcgccgtcgtcgatgagcggcgccggcgccggcgaggcgggggtgcggacggtggtgtggttcaggcgggacctgcgcgtggaggacaacccggcgctggcggcggcggcgcgggcggccggggaggtggtgccggtgtacgtgtgggcgccggaggaggacgggccgtactacccggggcgggtgtcccggtggtggctcagccagagcctcaagcacctggacgcctcgctccggcggctcggcgccagcaggctcgtcacccgccgctccgccgacgccgtcgtcgcgctcatcgagctcgtccgcagcatcggcgccacgcatctcttcttcaaccacctctacgacccgctgtcgctggtgagggaccaccgggtgaaggcgctgctgacggccgagggcatcgccgtgcagtcgttcaacgccgacctgctgtacgagccatgggaggtggtcgacgacgacggctgcccgttcaccatgttcgcgccgttctgggacaggtgcctgtgcatgcccgacccggcggcgccgctgctgccgcccaagaggatcgcgcccggcgagctgccggcgaggaggtgcccctccgacgagctggtgttcgaggacgagtccgagcgggggagcaacgcgctgctggcgagggcgtggtcgcccgggtggcagaacgccgacaaggcgctggccgcgttcctcaacgggccactcatggactactcggtgaaccggaagaaggccgacagcgccagcacgtcactgctgtcgccgtacctgcacttcggcgagctcagcgtacgcaaggtgttccaccaggtgaggatgaagcagctcatgtggagcaacgaggggaaccacgccggcgacgagagctgcgtcctcttcctccggtccatcggcctcagggagtactcgaggtacctcacgttcaaccacccgtgcagcctggagaagccactcctggcgcacctcaggttcttcccctgggtggtcgacgaggtgtacttcaaggtgtggaggcaggggaggacagggtaccctctcgtcgacgccgggatgcgcgagctctgggccaccggctggctgcacgaccggatacgcgtcgtcgtctccagcttcttcgtcaaggtgctccagcttccatggcgctgggggatgaagtacttctgggacaccctgctcgacgccgacctcgagagcgacgcgctcggctggcagtacatctccggctctctccccgatggccgtgagctcgaccgcatcgacaaccctcagcttgaaggatacaagtttgatccgcacggggagtatgtccggcgatggctgccggagctggcaaggctgccgacggagtggatacaccacccatgggacgcaccggagtcggtgctccaggctgcagggattgagctaggctccaactatcctctccccatcgtggagctggacgcggcgaagaccaggctgcaggatgcactgtcagagatgtgggagctcgaggccgcgtcacgcgcagcgatggagaacggaatggaggagggcctcggcgactcctccgacgtgccgccgatcgccttcccaccggagctgcagatggaagttgaccgagcaccggcccagcctactgttcacggaccgacaacggctggccggcgacgagaggatcagatggttcccagcatgacctcctcgctggtcagagctgaaacagaactttcagcggattttgacaacagcatggacagtaggccggaggtgccgtcgcaggtgctcttccagcctcggatggaaagggaagaaacagtggacggcggcggtggcggcggaatggtcggcaggagcaacggcggcggccaccaaggccaacaccagcagcaacagcacaactttcagactacaattcaccgggcacggggcgttgcgccgtctacgtcagaggcatcaagcaactggactgggagagaaggcggcgtggtgcccgtctggtcgcctccggcagcgtcaggcccctcagatcactacgctgccgatgaagctgacattaccagtagaagttatttggacaggcatccacagtcgcatacgttgatgaactggagtcagctctcgcagtcattg

SEQ ID NO: 171 - DNA, 315 bp, Synechocystis sp. PCC 6803
atggaaggtgtaggtgctaggcagaggaggaaccctctgatacccagaccaaacggttcaaagaggcatctgcagcatcagcatcagccaaatgctgccgagaagaagaccgccgcgacatcgaattacttcagtatcgaggcgttcctcgtgctcgtcttcctcaccatgtcattgctcatacttccattggtgcttcccccattgcctccgccgccatcgctgctgctgctgctgccagtctgcctgctcatcctgctggttgtgctggccttcatgccaacggatgtgcggagcatggcttcctcttacttg

SEQ ID NO: 172 - DNA, 888 bp, Arabidopsis thaliana
atggttactgcgacagcatcaactccattttcactctcgtcgtccgtggttttcacgcgccgtcgtaatttcaaacgttttccagtttgcgccagtctttctccggaggtttctcctcttctcagagcagctcatcacactgtggataattatgtaaagagtgggatgattattggtttaggatctggagaagcttcagattttgctatacgttatttgggtcaacaacttggttctggttctttacataatgttgttggtgtaccaatgtctgctcgaagtgcgagtgaagcagcaaagtatggaatccccttggaatattaccgggatggtgttcagattgattttgcatttcatgatgctgatgctgtagaagagaatacgcttattgcagttattggacggcggagaagttcacaggaagatgactatattctgaaacaaaagtctattgtaaaagtagctgatgaggcagtcttcatgataaaggaagaacaatacaaagccggtcttgaaggttctatccctgttttagttcaatctcttaattggttggccatagctgaggagatagatgacttgtatctaggcgatgcagaggtgtggagaagagcttctgttgaaaatgaaggccctcttggaggagactttcctatagttaccagtgatggtcacaacattcttgatgttatatttacaactccgattcgaagcctcgctgacttggctacaagccttgataagattgatggggttgtggaccatggactaattatcaaaactcgatgcacggtggtgattgcagaagaaactgttgtaagaagtgttaccttgcagaccagtgcattggagggtggtgtacgaacctatggacagactttgcaaaag

SEQ ID NO: 173 - DNA, 327 bp, Zea mays
atgtcaggggtttgggtgttcaagaacggggtggtgagattggtggagaagcagcaggcgacggcggggacggcggtggcgggagggaggaggaaggcgctggtgcacacgccgagcgggcaggtggtgtcgtcgtacgcggcgctggaggcgcggctgacggcgctcgggtgggagcgctactacgaggacccctccctcttccagttccacaagcgtggctccctcgacctcatctccctccccgccgacttctccgccttctcctccgtccacatgtacgacatcgtcgtcaagaaccgcgactccttccgcgtcgtcgacgcc

SEQ ID NO: 174 - DNA, 1254 bp, Oryza sativa
atgaccctcaccgacgcccaaatatccatcgtcaaatccaccgcccctgtcctcaagcaacacggcgaagccatcaccaccgtcttctacaacgacctcatcacggagaacccctccctcaaaaacatcttcagccttacctcgcaagccaccggcgcccaaccgcgcgccctcgcccacgccgtcctcgcctatgccacctacatcgacaacctttccgcgctctcggaggcggtcgcgcgcattgcgcacaagcacgtgtctctccaagtcgagccggcgcagtacgctattgtcggccaatacctgatccaagccatcggcaaggttctgggcgatgcggcgactcccgagattgtagacgcttggacggcggcatatggagttttggcgaacgtttttattggcgtcgagggaggcatgtacgaggagaatgaaaagaaagaccactggaaggggtggaggaagttcaggattgcgaggaaggtggaggagagcagttccatttcgagcttttacctgaggcccgtggatggggccactctgcccaagtatctgcctggccagtatgtgtctgtgcaggtgctggtctcgcagttggggtatttgcagagtaggcagtacagcttgagcgaggcgccgaaggagggcgggatggaggaatatcgtattagtgtcaagagggaggaaggggaaaccggtgcgccgggactggtttccaacttgctccatggtatgcaagagggcgcggaggtggaggttagtcatccccagggcgagttcttccttgaccccgcggatgcaagcaaggagggggtgccggctgtgttgatctcggtgggcgtgggcgctactccgatgatggctatcctcaagagcttgcttcaggagaatgtcaagaggagaccggtgtcgtggatccatgcgagcaagtcgagctcgacgcagccgtttggcgaggaggtgaggcgcatcgtcaaggagaaccctgagcaggtgtcggcacatgtgtttctgaagacggtggctggtacggatcaggccggtgtgcattacgattttgcggatacgaggatggacttgaccaagttggatggggagcgggatctgcatttggcggataagaggaccgagtactacatctgcggaccggagacgtttatggtggaaaccaggaaagtgttggttggtcttggagtagataagagcaaggtgcacttggagctttttgctacgggtttcgttgctgatgag

SEQ ID NO: 175 - DNA, 867 bp, Arabidopsis thaliana
atggcgaggaacgggattgggagttcaggagggaagaagaatggggctgggcagtttttcttagcgacgctgcttctttggcttgtctccgtcgtgtttgagattgctttcaatctccggacggagcttctctgggtgatttgcggtggatgcttctttcaattgatgaattgggttgttcgttcatggatttctcgtgaccctatatttgttaatacctctgtctcgcttttgcactcaatcatcacctccgcatcagtggttttcatacttctcaatcaatgcttagccaaaggtttagacgagatgtttgatcattctgagttggttggtgggacttggaaatgggcatatccagctttgtgtttctcatgcggctactttgcatatgaccagtgggatatgcttcagtaccggttatacagcggcttaataccttctattcttgttcaccatctagtcctccttgtttgcttcacattggcactataccgaaatgtaaccatcaactaccttattcttactctcatctgtgagatgcattcgatctttctacacgtgaggaagctaaggagaatggcaggaatccgagacagcaacacagcattggtgaaactggagtgggtattaaactggacagcctttgtgtttgcgagatgcattcctcacattctcatcactatcaagctgatcaaagacgcacacaagtttgggaaaggcgtggagttaccactcgctctgtctggtatggcaggaatgaacattcttaatgttggcctcgggttggatctgtttcatgctttcagaagagagagaagccacagaagaaaccaagagaacggcaaccttcacgaccatggagaataa

SEQ ID NO: 176 - DNA, 2175 bp, Arabidopsis thaliana
atggagtttggatcttttcttgtgtccttagggacatcttttgttatcttcgtcattctcatgcttctcttcacctggctttctcgcaaatctggaaatgctcccatttattacccgaatcggatccttaaagggctggagccatgggaaggcacctccttgactcgaaacccttttgcttggatgcgtgaagctttgacttcctctgaacaagatgtcgttaacttatccggcgtcgatactgctgtccactttgtcttcttgagcactgttctggggatatttgcttgttccagtcttcttctcctaccaactctactgcctctagccgctacagacaacaacataaagaacacaaagaatgcgacagataccacaagcaaaggaacttttagccaacttgataatctatcaatggctaacatcacaaaaaaaagttcgaggctgtgggcgttcctaggagctgtttactggatatctttggtcacatatttcttcttgtggaaagcttataagcatgtctcttcattgagagctcaagctctgatgtctgctgatgtaaaacccgagcaattcgctattcttgttagggatatgcctgcaccacctgacgggcagacacagaaagagtttattgattcttatttcagagaaatataccctgagacattctacagatcgcttgtcgcaacagaaaacagcaaggttaataaaatatgggaaaaattggaaggttacaagaagaagcttgcgcgagcagaagcaatattagcagcaactaataaccgtcccacgaacaaaaccggcttctgtgggctagtcggtaaacaagtagacagcattgagtattacactgagctaatcaacgagtctgtagccaaactggaaacagagcagaaagcggttcttgctgagaagcagcaaaccgcagcagtggttttcttcacaaccagggttgctgctgcatcagcagctcagtctctgcactgccagatggttgataaatggactgtgaccgaagctcctgagccacggcagctcctatggcagaatctcaacatcaagctcttcagcagaataatccggcaatacttcatctacttctttgttgcagtgaccattctgttttacatgataccaatcgcgttcgtctctgccatcaccactcttaagaatcttcagaggattattccgttcataaagccggttgtggagataaccgccataagaaccgttttggagtctttccttcctcagattgcgctcattgttttcttggccatgttgccgaagcttctcttgtttctctccaaagccgaggggattccttcacagagccatgccattagggctgcttcagggaagtacttttacttctcggtctttaatgtcttcattggtgttacccttgctgggactttgttcaacacagtgaaggatatcgcgaaaaatcccaaactcgacatgattattaaccttttggctactagcctccctaagagcgcaactttcttcctgacctacgttgctctcaagttctttatcggttatggccttgagctgtctcggatcatacctttgataatcttccacctgaaaaagaagtatctctgcaaaaccgaagcggaggtcaaagaagcttggtacccgggagacttaagctatgcgactagggttcccggagacatgctcatcctcacaatcacgttctgctattcagtcattgctcctcttatcctcatattcggcatcacctactttggtttaggctggctagtcctcaggaatcaggcgttgaaagtgtacgttccatcatacgagagctatggaagaatgtggccgcatattcaccagcgcatactagcagcgttgtttctattccaagtggtaatgtttggctacttaggagccaagacattcttctacacggcccttgtgatccctctcattatcacctctctcatcttcggatatgtgtgccgccagaaattctacggagggttcgaacacacagctctcgaggtagcttgccgtgagctgaagcagagtccagacctagaggagattttcagagcatacattccgcatagcttgagctctcacaaaccagaagaacacgagttcaaaggcgcaatgtctcgttatcaagatttcaacgcaatagcaggcgtttaa

SEQ ID NO: 177 - DNA, 1344 bp, Arabidopsis thaliana
atggatattttcgacaactctgatcttgaataccttgttgatgaatttcacgctgatttcgatgatgatgagccctttggagaggttgatgtcaccagtgagtctgattccgatttcatggactccgattttgatttcgagctgagtgagagtaagacgaacaatgaaacatcagcgttagaagctaggaatggaaaagatattcaagggattccatgggagagcttgaattacacgagggatagataccgtgagaatagattgctgcactataaaaactttgagagtctgtttcgatccagagaagagcttgataaggaatgcttgcaagtagagaaaggaaagaacttttatgactttcagttcaatacaaggcttgtcaagtccacaatagcgcattttcagctgaggaacttggtatgggcaacatcaaagcacgatgtgtatttcatgaacaactactctctcatgcactggtcatctttgttgcaaaggggcaaagaagtacttaatgtggcaaagcccattgttccttcaatgaagcagcatggatcgttgtcacagtctgtatcaagagtccagataagcaccatggcagttaaagacgatttgaagttgcgggagggttccaaggagagcttatctaaaatcaacgaacctgaggttgctttctgcactaaactaacatcagctgataacgacatcaccaattcggttgacatctacaacgcacctagtggctcgttaagggttatgaccgcgaacaatgactgtactgtccggctatttgatgccacaaactttgccttgctcaacagatttgcctttcactggtctgtaaataacatctccaccagtccagatggtaagctagtggctgttctaggagacagtcctgagtgcttactagcagataccggatctggaaaagtgatccacggactcgaaggccatctcgactactcgttttcatcagcatggcacccaaacggtcaaatcttagccacgggtaaccaagacacaacctgtagactatgggacgtaaggaacctgtctcaatcactcaaagtcttgaaaggaaacatgggagctatcagagccttgaggttcacgtctgatggacggttcttagccatggctgagccagcggactttgtacacttgtttgacacggaagctggttacagtcagtgtcaagagattgatctgtttggagaaatagcgggaatctcgtttagccccgacacggaggcactgttcgtgggagtagctgatcgtacgtacggcagcttgttggagtttaacaggaagcgaaaccactcgtatgttgattccatattctga

SEQ ID NO: 178 - DNA, 690 bp, Arabidopsis thaliana
atggatattttcgacaactctgatcttgaataccttgttgatgaatttcacgctgatttcgatgatgatgagccctttggagaggttgatgtcaccagtgagtctgattccgatttcatggactccgattttgatttcgagctgagtgagagtaagacgaacaatgaaacatcagcgttagaagctaggaatggaaaagatattcaagggattccatgggagagcttgaattacacgagggatagataccgtgagaatagattgctgcactataaaaactttgagagtctgtttcgatccagagaagagcttgataaggaatgcttgcaagtagagaaaggaaagaacttttatgactttcagttcaatacaaggcttgtcaagtccacaatagcgcattttcagctgaggaacttggtatgggcaacatcaaagcacgatgtgtatttcatgaacaactactctctcatgcactggtcatctttgttgcaaaggggcaaagaagtacttaatgtggcaaagcccattgttccttcaatgaagcagcatggatcgttgtcacagtctgtatcaagagtccagataagcaccatggcagttaaagacgatttgaagttgcgggagggttccaaggagagcttatctgtaagaaaatcaacgaacctgaggttgctttctgcactaaactaa

SEQ ID NO: 179 - DNA, 1755 bp, Arabidopsis thaliana
atgtgtggaatacttgccgtgttaggatgttccgatgattctcaggccaagagagttcgtgttcttgagctttctcgcagattgaggcacagaggacctgactggagtggcttatatcagaacggagataattacttggcccatcaacgtcttgccgtcatcgatcctgcttccggtgatcaacctcttttcaacgaggacaagaccattgttgtcacggtgaacggagagatttataaccatgaggagctgagaaaacgtctgaagaatcacaagttccgtactggtagtgattgtgaagtcattgctcacttgtacgaggagtatggtgtggattttgttgatatgttggatggaatattctcctttgtgttgctcgacacacgagataactctttcatggtggctcgtgatgcgattggtgtcacttcgctctacattggttggggactagacggatctgtgtggatatcttcagagatgaaaggcctaaacgatgactgtgagcatttcgaaacgtttcctccaggtcatttttattcaagcaaattaggagggtttaagcaatggtataatcctccttggttcaatgaatctgttccttcaacgccttatgagcctcttgcgataagacgcgcctttgaaaacgctgtgattaagcggttgatgactgatgttccatttggagttttgctctctggtggtcttgattcttcccttgttgcctccatcactgcacgtcacttggccggtactaaggcggctaagcaatggggtcctcagctccattccttttgcgttggtcttgagggctcaccggacttgaaggcagggaaagaggtggcggaatatttggggacggtgcaccacgagttccacttctcggtgcaggacgggattgatgcgatagaggatgtgatttaccatgttgagacctatgatgtgacgactatcagagcgagcacaccgatgttcttgatgtcccggaaaatcaagtctctaggggtcaagatggttctctccggcgaaggtgcggacgagatctttggagggtacctctatttccacaaggcacctaacaagaaagagtttcaccaagaaacttgtcgcaagatcaaggctcttcacaagtatgactgtctaagagccaacaaatctacctctgcctttggactagaggcacgtgttcctttccttgacaaagacttcatcaacacagctatgtctctcgaccctgaatccaagatgatcaagccagaggaaggaaggatcgagaaatgggttctaaggagagcctttgacgacgaagaacgtccttatctaccaaaacacattctctacagacagaaagaacagttcagtgatggtgttggctacagttggatcgatggcctgaaagatcacgctgctcaaaatgtcaatgacaagatgatgtcgaacgcggggcatatcttccctcacaacactccaaacactaaagaagcttactactacagaatgatctttgaaaggttcttcccgcagaactctgcgagactaacggttcctggaggtgccaccgtggcttgttcgactgcaaaggcagtggagtgggatgcaagctggtccaacaatatggatccatcaggaagagccgctatcggagttcacctttcggcctacgatggcaagaacgtggcattgaccataccaccacttaaggcaattgacaacatgccgatgatgatgggtcaaggagttgtgattcagtcataa

SEQ ID NO: 180 - DNA, 1371 bp, Arabidopsis thaliana
atgtgtggaatacttgccgtgttaggatgttccgatgattctcaggccaagagagttcgtgttcttgagctttctcgcagattgaggcacagaggacctgactggagtggcttatatcagaacggagataattacttggcccatcaacgtcttgccgtcatcgatcctgcttccggtgatcaacctcttttcaacgaggacaagaccattgttgtcacggtgaacggagagatttataaccatgaggagctgagaaaacgtctgaagaatcacaagttccgtactggtagtgattgtgaagtcattgctcacttgtacgaggagtatggtgtggattttgttgatatgttggatggaatattctcctttgtgttgctcgacacacgagataactctttcatggtggctcgtgatgcgattggtgtcacttcgctctacattggttggggactagacggatctgtgtggatatcttcagagatgaaaggcctaaacgatgactgtgagcatttcgaaacgtttcctccaggtcatttttattcaagcaaattaggagggtttaagcaatggtataatcctccttggttcaatgaatctgttccttcaacgccttatgagcctcttgcgataagacgcgcctttgaaaacgctgtgattaagcggttgatgactgatgttccatttggagttttgctctctggtggtcttgattcttcccttgttgcctccatcactgcacgtcacttggccggtactaaggcggctaagcaatggggtcctcagctccattccttttgcgttggtcttgagggctcaccggacttgaaggcagggaaagaggtggcggaatatttggggacggtgcaccacgagttccacttctcggtgcaggacgggattgatgcgatagaggatgtgatttaccatgttgagacctatgatgtgacgactatcagagcgagcacaccgatgttcttgatgtcccggaaaatcaagtctctaggggtcaagatggttctctccggcgaaggtgcggacgagatctttggagggtacctctatttccacaaggcacctaacaagaaagagtttcaccaagaaacttgtcgcaagatcaaggctcttcacaagtatgactgtctaagagccaacaaatctacctctgcctttggactagaggcacgtgttcctttccttgacaaagacttcatcaacacagctatgtctctcgaccctgaatccaagatggtaactacaaaactcacatcacaaactcaataccttccttcacaagttaacgttgaacaaattttctatatgggtttttctagatcaagccagaggaaggaaggatcgagaaatgggttctaa

SEQ ID NO: 181 - DNA, 1539 bp, Arabidopsis thaliana
atgtgtggaatacttgccgtgttaggatgttccgatgattctcaggccaagagagttcgtgttcttgagctttctcgcagattgaggcacagaggacctgactggagtggcttatatcagaacggagataattacttggcccatcaacgtcttgccgtcatcgatcctgcttccggtgatcaacctcttttcaacgaggacaagaccattgttgtcacggtgaacggagagatttataaccatgaggagctgagaaaacgtctgaagaatcacaagttccgtactggtagtgattgtgaagtcattgctcacttgtacgaggagtatggtgtggattttgttgatatgttggatggaatattctcctttgtgttgctcgacacacgagataactctttcatggtggctcgtgatgcgattggtgtcacttcgctctacattggttggggactagacggatctgtgtggatatcttcagagatgaaaggcctaaacgatgactgtgagcatttcgaaacgtttcctccaggtcatttttattcaagcaaattaggagggtttaagcaatggtataatcctccttggttcaatgaatctgttccttcaacgccttatgagcctcttgcgataagacgcgcctttgaaaacgctgtgattaagcggttgatgactgatgttccatttggagttttgctctctggtggtcttgattcttcccttgttgcctccatcactgcacgtcacttggccggtactaaggcggctaagcaatggggtcctcagctccattccttttgcgttggtcttgagggctcaccggacttgaaggcagggaaagaggtggcggaatatttggggacggtgcaccacgagttccacttctcggtgcaggacgggattgatgcgatagaggatgtgatttaccatgttgagacctatgatgtgacgactatcagagcgagcacaccgatgttcttgatgtcccggaaaatcaagtctctaggggtcaagatggttctctccggcgaaggtgcggacgagatctttggagggtacctctatttccacaaggcacctaacaagaaagagtttcaccaagaaacttgtcgcaagatcaaggctcttcacaagtatgactgtctaagagccaacaaatctacctctgcctttggactagaggcacgtgttcctttccttgacaaagacttcatcaacacagctatgtctctcgaccctgaatccaagatgatcaagccagaggaaggaaggatcgagaaatgggttctaaggagagcctttgacgacgaagaacgtccttatctaccaaaacacattctctacagacagaaagaacagttcagtgatggtgttggctacagttggatcgatggcctgaaagatcacgctgctcaaaatgtcaatgacaagatgatgtcgaacgcggggcatatcttccctcacaacactccaaacactaaagaagcttactactacagaatgatctttgaaaggttcttcccgcaggtgagagtcttataa

SEQ ID NO: 182 - DNA, 879 bp, Arabidopsis thaliana
atgggagtcatgatcaatcaccatttcctcgcttttatcttcggcatcttaggaaacgtgatatccttccttgtattcctcgctccagtgccaactttttatagaatatacaagagaaaatcgacggaaagtttccagtcgctaccgtaccaagtgtcgctatttagctgcatgctatggctctactacgcattgattaagaaagacgcttttctcctaattaccatcaactcctttggctgcgtcgtggagactctctacatagccatgttcttcgcttacgccaccagggagaaaaggatatcggctatgaagttgttcatagcaatgaacgttgccttcttctcgttgattctaatggtaacacatttcgtggttaaaactcctcccctccaagtctctgtactcggctggatttgtgttgccatttctgtttctgttttcgctgcccctctaatgatcgtggctcgtgtgataaagacaaagagtgtggagtacatgcccttcacgctttctttcttcctcactataagcgccgttatgtggttcgcttatggtttattcctcaatgacatatgcatagcgattccaaacgtggtgggattcgtactagggctgttgcaaatggttttgtacttggtttacaggaactcaaatgagaaaccagagaagattaattcgtcagaacaacaacttaagagtattgtcgtgatgagtccgttaggtgtgtcggaagtgcacccagttgtgacggaatcggtggacccactctctgaagccgttcatcatgaggatctgtccaaagttactaaagtggaggagccgtcaattgaaaacggcaagtgctacgtggaggctactcgtcctgaaaccgtttga

SEQ ID NO: 183 - DNA, 1746 bp, Arabidopsis thaliana
atggagaaagtgaccaactcagacttgaaatcctctgttgatggtggcgttgttgatgtgtatggagaagattcagccaccattgagcacaacataactccttggtctctctctgtttctagtggatattcattgctgagagatcctcgctacaacaaaggacttgctttcactgagaaagagagagacactcattacttgcgtggtcttctccctccagttgttcttgatcaaaagcttcaggagaagaggctgttgaacaatatccgacaatatcaattcccattacaaaagtacatggctctgacagaacttcaggaaagaaacgagagactgttttacaagctattgatagataatgttgaggagctacttcctattgtttatactccaactgttggtgaagcttgtcagaaatttggaagtattttcaggcgacctcagggtttattcatcagtttaaaagacaagggaaagattctagatgtgttaaagaactggcctgaaaggaacatacaggttattgttgttactgacggtgaaaggattttaggattaggagatcttggatgtcaggggatgggtataccggttggtaagttggcgttatattcagcacttggaggtgttcgtccttcagcgtgtttacctgtcaccattgatgtgggaacaaacaatgagaaactgttgaatgatgagttctacataggactcaggcaaaagagagcaacgggacaggaatatagtgaactcttgaatgaattcatgagtgctgtgaaacagaactatggtgaaaaagttcttattcagtttgaagattttgctaatcataatgcctttgagttgcttgcaaaatacagcgatactcatctcgtcttcaacgatgatatacaggggacagcatcagttgttttagcaggattagtttccgcacagaagttaacgaatagcccacttgcagagcataccttcctctttcttggtgctggtgaagctggaactggaatagcagaactcatagctctctatatgtcaaaacagatgaatgcttcggtagaggaaagccgcaagaaaatctggcttgttgattccaagggattgattgttaactcccgcaaagattcacttcaagactttaagaaaccatgggctcatgaacatgaaccagtcaaagacctcttaggtgctatcaaggcaataaaaccgactgttctgattggatcttctggcgttggacggtcttttacaaaagaagtgatagaagccatgtcctccattaatgagagaccactgataatggctctctctaaccccacaacacaatctgaatgtacagccgaagaagcttatacttggagtaagggccgtgccatttttgctagtggaagcccttttgatccagttgagtatgaaggaaaggtgtttgtatctacacaggcgaacaatgcgtacatattcccgggctttggacttggtttggttatctctggagcaatacgggtacatgacgatatgcttctagctgctgctgaggcattagctggacaagtaagcaaagagaactatgagaaaggaatgatatatccttcattctcttccatccggaaaatatcagctcagattgcagccaatgtagcaactaaggcgtatgaactaggattggcagggcggcttccacggccgaaagatattgtcaaatgtgcagagagtagcatgtacagccccacataccgtctctaccgttga

SEQ ID NO: 184 - DNA, 435 bp, Arabidopsis thaliana
atgactaatgttcgccttcctattctcgtctcctcggtcttgttccttgtctttatttcatcgtccctcttgttccctacacctagttttgctgctagagtaagtcattctctggtgcaagaagaggtcaaaaaggttccagaatacacagaacctgaggagccggaagttccagaagagccggagctgccctcaccggaggagcctgagattccagaagagcctgagattccagaagagcctgaggttcctggagaacccgaagttcctgaagagcccgaagaaccagaagagccagaagggtcaacatttgaatttccatcatggtttccgagctttcctattcccggtgttaatggcggtttgccaaagactgaaaagacaaaacctacatcaacagttgaagaggttaacgtttctaacaagaagccatag

SEQ ID NO: 185 - DNA, 1113 bp, Arabidopsis thaliana
atggcactaatgaagaagagtctctctgctgctcttctctcatcaccacttctgatcatatgtcttatcgcattgctcgctgatccgttttcagtcggtgctcgccggttattggaggatcctaaaccggagataccaaaattgcctgagctacctaaattcgaagttcccaagttgccggagttccctaaaccagagttgcccaagttacccgaatttccaaagcctgagttgccaaagatcccggagattccaaagccagagttaccaaaggtaccggagattccaaagcctgaggaaactaaactgccagatattcccaagcttgaattgcccaagtttccggaaattccaaaacctgagctcccaaagatgccagagattccaaaacctgagttaccaaaggtaccggagattcagaagcccgagttaccaaaaatgccggagattccaaagcctgaattaccaaagtttccagagattccaaagcctgatttgccaaagtttccagagaattcaaagcctgaggtgcctaagctaatggagactgaaaagcctgaggctcctaaggtgccagagattccaaagcctgagttgccaaagttgccagaagttcccaagcttgaggctcctaaggtaccagagatccagaagccggagttgcccaaaatgccggagttacctaagatgccggagattcagaaacctgagttgccaaagttgccagaagttcccaagcttgaggctcctaaggtaccggagatccagaagccggagttgcccaaaatgccggagttacctaagatgccggagattcagaaacccgagttgcccaagatgccggagattcagaagcctgagttgccgaaggtgccagaggttccaaagcccgaattgccaacggttccagaggttccaaagtctgaggctcctaagtttccagagattccaaagcctgaactgccgaagattccagaagttccaaaacctgaactgcccaaggttccagaaattacaaaacctgcagttccagagattccaaagccagagctaccgacgatgcctcaacttcccaagttgccggaattcccaaaagttcccggaactccttaa

SEQ ID NO: 186 - DNA, 1530 bp, Arabidopsis thaliana
atggagatatcagagagagttcgagctcgattagctgttctctcaggtcatttatcggaaggaaaacaggattctccagcgatcgagcgatggtgcacgtcggcggatacgagtgtcgcaccgcttggatctttgaagggaacactgacgatcgtcgacgaacgcaccggaaaaaattataaagttccggtctcagatgatggtaccgttaaagccgttgatttcaaaaagatagtgacggggaaggaagacaaggggcttaagttatacgatccaggttacttgaacacggctcctgttcgatcttcgatttcttacatcgatggagatgaagggatccttcgttaccgtggctacccaattgaggaaatggctgagaacagtacttttctggaggtggcttatcttctcatgtatgggaatctgccctctgaaagtcagctatctgattgggagtttgcagtttctcagcattcagctgtgccacaaggtgtattagatattatacagtctatgcctcatgatgcacacccaatgggagttcttgtgagtgcaatgagtgcgctttccatctttcatcctgatgctaatcctgctcttaggggccaggatatttacgattcaaaacaagttagagataaacaaattatccgcattattggaaaggcaccaacaattgcagcagctgcttatctgaggatggcaggaaggcctcctgttcttccttcaggaaaccttccttatgcagataatttcctctatatgcttgattccctgggaaatagatcctacaaacctaatcctcggctggctcgggtgttggacatcctcttcatactgcatgcagagcatgaaatgaactgctccaccgctgctgctcggcatcttgcctctagcggtgttgatgtctacactgctgttgctggagctgtgggagcgctttatggtccacttcatggtggtgcaaacgaggctgtgcttaagatgttgtcagagattgggactgttgaaaatattccagagttcattgagggtgtgaagaacaggaagaggaagatgtctggttttggacaccgtgtgtacaaaaactatgaccctcgagctaaagtcatcaagaacctggctgatgaagtattttccattgttggaaaggatcctctaattgaggttgctgttgcacttgagaaggcagctctctctgacgattactttgttaagagaaagctgtatccaaatgttgacttctactctggattaatatacagggcaatgggatttccaccggagttcttcacggtcttattcgcgattcctcgcatggctggatacttgtcacattggaaagagtcactggatgatcctgacaccaagatcatgagaccacaacaggtgtacacaggcgtgtggctgaggcattacacaccagtgagagagagaatagtgacggatgactcgaaagagtcagacaaattgggtcaagtcgcgacttcaaatgcatcaagaagacgtttggctggatcttcagtttag

SEQ ID NO: 187 - DNA, 1308 bp, Arabidopsis thaliana
atgacaccacagatcaaaactcatctcttgccgaagcaagaaccttcttcgtctgagaaccatggatcatcaacctccggcatcgttttcaacgtgtcaacgagtataatcggagccggaataatgtcgatgccggcggcgtttaaagttcttggaatagttccagcgtttttgattatcacgatcatagcttggctttccacaatttccgttggatttctgatgaaatcaactctcgccggagaatcaactacttacgccggagttatgaaagagtcgtttggtaaaacaggatccatcgctgtacagattgctacgatggttgctacttttggttgtatgattatattttcgattattataggagatgtgctttctggtaatgaaaatggtggtcctgaacatattggagttttgcaagaatggtttggttcttactggtggaacacgagaatcttcgctttgttatttgtctacggctttgtcttgcttccattggtcctgcgtagacgagtcgaaagactggcaattagttccgctgtatcgtttcttcttgcggttctatttgttgtcataagctcggtgctggcgatttccgcgctggtgaatggacaaacgaagaatccaagactgtttccggagttgagcaatggaggatcgttctggcaactcttcacagcttcccctgttatagttacagccttcacgtttcacttcaatgttcatccaattggattcgagctcaaagatccattacaagtgatcccagcaactaagatctctgtcatcttgtgtgctgctatctacttcgcaactggactctttggttaccttctctttggagatgcaactatgtcggatattctagtgaactttgaccagagctctggttcttccattggttctcttctcaacgacattgtcagactcagctacgtgcttcacctcatgctggtctttcctctcctgaacttctcattgagagcaaatctcgacgaactcttgtaccccaagaagccgtccttggaaaaagacacaaaaagattcatcggactcactctggctctactgatttgctgtttcttgtctgcaatcgctgtaccagacatttggtacttctttcagttcatgggatcaaccatcacagtctccatagcattcatatttccagccgccattgttctaaggaatatccatggtgtatcaacctcaagagagaagatcgtagctgcaataatgcttgttcttgctgttgccactagcattattgctatctcgacaaatttatacagcctcgcagcaaactag

SEQ ID NO: 188 - DNA, 729 bp, Arabidopsis thaliana
atgcgaaaatcgttcaaggattcactcaaggctcttgaagctgatatccagttcgccaacactctggcgtcagagtacccagaggagtatgatggtggctacgttcagatgagattatcttacagcccggcggctcatctctttctcttccttcttcagtggactgattgtcatttcgctggcgctttgggcttgcttaggatccttatttataaggcatatgttgatgggaagaccacaatgtcgctacatgaacgcaaaactagtatcagagaattctatgatgtgttgtttccttcgctattgcaacttcatggagggatcaccgatgtagaagaaaggaaacagaaggagatatgcgacaaaagataccgtaaaaaggacagaacagataaaggaaagatgtcggagatcgatttggagagggaagaagagtgtggaatctgcttggagattcgaaacaaagttgttcttcctacgtgcaatcactccatgtgtataaactgctacagaaactggcgtgcacggtcacagtcgtgcccgttctgtcgaggcagcttgaaaagagtgaattctggtgatctatggatatacacttgtagcgccgagattgcagatttaccagcgatttacaaggagaatctgaagaggttgttgatatacattgacaagttgcctctcgttacttctgatccaaatcttgtcccttatgctcctcttcctcggtga

SEQ ID NO: 189 - DNA, 519 bp, Arabidopsis thaliana
atgcgaaaatcgttcaaggattcactcaaggctcttgaagctgatatccagttcgccaacactctggcgtcagagtacccagaggagtatgatggtggctacgttcagatgagattatcttacagcccggcggctcatctctttctcttccttcttcagtggactgattgtcatttcgctggcgctttgggcttgcttaggatccttatttataaggcatatgttgatgggaagaccacaatgtcgctacatgaacgcaaaactagtatcagagaattctatgatgtgttgtttccttcgctattgcaacttcatggagggatcaccgatgtagaagaaaggaaacagaaggagatatgcgacaaaagataccgtaaaaaggacagaacagataaaggaaagatgtcggagatcgatttggagagggaagaagagtgtggaatctgcttggagattcgaaacaaagttgttcttcctacgtgcaatcactccatgtgtataaactgctacagaaactga

SEQ ID NO: 190 - DNA, 366 bp, Arabidopsis thaliana
atgatcaacgcttttaagactatccgatcactgccctcgaataccaccgtctcgttctgctcaacaccatctcgattaggccggaaagtcactggagttagttttgccaccacttctgatcagcaaaagatggataaaaagcctgaaaatccaaacgagaaaaccggtgacgtgatgtcgcattcttatggagaagggtacgcaacaaggtctgacgaagaagggtttggaggaatctatggaggaaatcaaacacttcagaaggaaaacgagatccatgagaatcaccctgattacgacaaaacgcaaggtagcgaatcgaaggagaaggagaaagcaaggaaccagacacaatcccactgctaa

SEQ ID NO: 191 - DNA, 348 bp, Arabidopsis thaliana
atggctttcgctttgaggttcttcacatgccttgttttaacggtgtgcatagttgcatcagtcgatgctgcaatctcatgtggcacagtggcaggtagcttggctccatgtgcaacctatctatcaaaaggtgggttggtgccaccttcatgttgtgcaggagtcaaaactttgaacagtatggctaaaaccacaccagaccgccaacaagcttgcagatgcatccagtccactgcgaagagcatttctggtctcaacccaagtctagcctctggccttcctggaaagtgcggtgttagcattccatatccaatctccatgagcactaactgcaacaacatcaagtga

SEQ ID NO: 192 - DNA, 777 bp, Arabidopsis thaliana
atgacagaaggtggagaatattctccggcgatgatgtcagcagagccattcttgaccatgaagaagatgaagaagagcaaccacaacaagaacaatcagagaaggtttagcgacgagcagatcaagtcactggagatgatgtttgagtctgagacaaggcttgagccaaggaagaaggttcaattagctagagagctagggttgcagccgaggcaagtggctatatggtttcagaacaagagggctcgttggaaatccaagcagctcgagactgagtacaacattctcagacaaaactacgacaacttggcttctcagttcgagtccttaaagaaagaaaaacaagctttagtctctgagttgcagaggctaaaagaggcgacgcaaaagaagacacaggaggaggaaaggcagtgtagtggagatcaagcggtggttgctctaagcagcacacatcatgaatcagaaaacgaagagaaccggaggcgtaaaccggaagaggttagaccggagatggagatgaaagatgataagggtcatcatggggttatgtgtgatcatcatgattatgaagatgatgataatggttatagtaacaacatcaagagagagtattttggtgggtttgaggaagaaccagatcacttaatgaacattgttgaaccagctgatagttgtttgacatcatctgatgattggagaggtttcaaatcagatactactactctcttggaccaatccagcaacaattacccttggcgggatttttggtcatga

SEQ ID NO: 193 - DNA, 711 bp, Arabidopsis thaliana
atggcaggagaggcagaggctttggccacgacggcaccgttagctccggtcaccagtcagcgaaaagtacggaacgatttggaggaaacattaccaaaaccatacatggcaagagcattagcagctccagatacagagcatccgaatggaacagaaggtcacgatagcaaaggaatgagtgttatgcaacaacatgttgctttcttcgaccaaaacgacgatggaatcgtctatccttgggagacttataagggatttcgtgaccttggtttcaacccaatttcctctatcttttggaccttactcataaacttagcgttcagctacgttacacttccgagttgggtgccatcaccattattgccggtttatatcgacaacatacacaaagccaagcatgggagtgattcgagcacctatgacaccgaaggaaggtatgtcccagttaacctcgagaacatatttagcaaatacgcgctaacggttaaagataagttatcatttaaagaggtttggaatgtaaccgagggaaatcgaatggcaatcgatccttttggatggctttcaaacaaagttgaatggatactactctatattcttgctaaggacgaagatggtttcctatctaaagaagctgtgagaggttgctttgatggaagtttatttgaacaaattgccaaagagagggccaattctcgcaaacaagactaa

SEQ ID NO: 194 - protein, 969 aa, Artificial Sequence
  synthetic Sequence
MIVQPIELRAWTAFPGSAQEGIGRMAASVSRAICVQKPGSKCTRDREATSFARRSVAAPRPPHAKAAGVIRSDSGAGRGQHCSPLRAVVDAAPIQTTKKRVFHFGKGKSEGNKTMKELLGGKGANLAEMASIGLSVPPGFTVSTEACQQYQDAGCALPAGLWAEIVDGLQWVEEYMGATLGDPQRPLLLSVRSGAAVSMPGMMDTVLNLGLNDEVAAGLAAKSGERFAYDSFRRFLDMFGNVVMDIPRSLFEEKLEHMKESKGLKNDTDLTASDLKELVGQYKEVYLSAKGEPFPSDPKKQLELAVLAVFNSWESPRAKKYRSINQITGLRGTAVNVQCMVFGNMGNTSGTGVLFTRNPNTGEKKLYGEFLVNAQGEDVVAGIRTPEDLDAMKNLMPQAYDELVENCNILESHYKEMQDIEFTVQENRLWMLQCRTGKRTGKSAVKIAVDMVNEGLVEPRSAIKMVEPGHLDQLLHPQFENPSAYKDQVIATGLPASPGAAVGQVVFTAEDAEAWHSQGKAAILVRAETSPEDVGGMHAAVGILTERGGMTSHAAVVARGWGKCCVSGCSGIRVNDAEKLVTIGGHVLREGEWLSLNGSTGEVILGKQPLSPPALSGDLGTFMAWVDDVRKLKVLANADTPDDALTARNNGAQGIGLCRTEHMFFASDERIKAVRQMIMAPTLELRQQALDRLLPYQRSDFEGIFRAMDGLPVTIRLLDPPLHEFLPEGNIEDIVSELCAETGANQEDALARIEKLSEVNPMLGFRGCRLGISYPELTEMQARAIFEAAIAMTNQGVQVFPEIMVPLVGTPQELGHQVTLIRQVAEKVFANVGKTIGYKVGTMIEIPRAALIADEIAKEAEFFSFGTNDLTQMTFGYSRDDVGKFLPIYLAKGILQHDPFEVLDQQGVGQLIKMATEKGRAARPSLKVGICGEHGGDPSSVGFFAEAGLDYVSCSPFRVPIARLAAAQV

SEQ ID NO: 195 - protein, 969 aa, Artificial Sequence; identical to SEQ ID NO: 194
  synthetic Sequence

SEQ ID NO: 196 - protein, 259 aa, Zea mays
YVLDRELGRGEFGVTYLCMDRDTKELLACKSISKRKLRTAVDVEDVRREVAIMRHLPKSPSVVSLREACEDDGAVHLVMELCEGGELFDRIVARGHYTERAAASVTRTILEVVQLCHRHGVIHRDLKPENFLFANKKENSPLKAIDFGLSIFFKPGEKFSEIVGSPYYMAPEVLKRNYGPEIDIWSAGVILYILLCGVPPFWAETEQGVAQAILRGNIDFKREPWPNVSENAKDLVRHMLEPDPKLRLTAKQVLEHHWL

SEQ ID NO: 197 - protein, 259 aa, Zea mays
YELGGELGRGEFGVTYLCTESATGARYACKSISKRKLRTPVDVEDVRREVDIMRHMPPHPNIVSLRAAYEDEDAVHLVMELCEGGELFDRIVARGHYTERAAAAVTRTIVEVVQMCHRHGVMHRDLKPENFLYANKKESSPLKAIDFGLSVFFRPGERFTEIVGSPYYMAPEVLKRNYGPEVDVWSAGVILYILLCGVPPFWAETEQGVAQAIIRSVVDFKREPWPRVSEPAKDLVRRMLDPNPLTRFTAAQVLEHPWL

SEQ ID NO: 198 - protein, 259 aa, Glycine max
YTIGKELGRGQFGVTHLCTNKATGQQFACKTIAKRKLVNKEDIEDVRREVQIMHHLSGQPNIVELKGAYEDKQSVHLVMELCAGGELFDRIIAKGHYTERAAASLLRTIMQIIHTFHSMGVIHRDLKPENFLMLNKDENSPVKATDFGLSVFFKEGETFKDIVGSAYYIAPEVLKRKYGPEVDIWSVGVMLYILLSGVPPFWAESEHGIFNAILRGHVDFTSDPWPSLSSAAKDLVRKMLTTDPKQRLTAQEVLNHPWI

SEQ ID NO: 199 - protein, 259 aa, Glycine max
FTLGRKLGQGQFGTTFLCVEKATGLECACKSIAKRKLVTDDDVEDVRREIQIMHHLAGHPNVISIKGAYEDAVAVHVVMELCAGGELFDRIIQRGHYTERQAAKLTKTIVGVVEACHSLGVMHRDLKPENFLFVNQHEDSLLKTIDFGLSVFFKPGDIFNDVVGSPYYVAPDVLRKRYGPEADVWSAGVILYILLSGVPPFWAENEQGIFEQVLRGDLDFSSDPWPSISESAKDLVRKMLVRDPRRRLTAHQVLCHPWI

SEQ ID NO: 200 - protein, 461 aa, Oryza sativa
MEKKASILMNRYELGRMLGQGTFAKVYHARNLASNQSVAIKVIDKEKVLRVGMIDQIKREISIMRLVRHPNIVQLHEVMASKSKIYFAMEYVRGGELFSRVARGRLKEDAARKYFQQLIGAVDFCHSRGVYHRDLKPENLLVDENGNLKVSDFGLSAFKECQKQDGLLHTTCGTPAYVAPEIINKRGYDGAKADIWSCGVILFVLLAGYLPFHDSNLMEMYRKISKGDVKFPQWFTTDVRRLLSRLLDPNPNIRITVEKLVEHPWFKKGYKPAVMLSQPNESNNLKDVHTAFSADHKDNEGKAKEPASSLKPVSLNAFDIISLSKGFDLSGLFENDKEQKADSRFMTQKPASAIVSKLEQIAETESFKVKKQDGLVKLQGSKEGRKGQLAIDAEIFEVTPSFFVVEVKKSAGDTLEYEKFCNKGLRPSLRDICWDGQSEHPSLAQSSTLTQSSKSISRHAI

SEQ ID NO: 201 - protein, 265 aa, Oryza sativa
MAAAAAACVESPDEGVEIREVWAGNLEAEIAAIRDEVDRYPYVAMDTEFPGIVCRPVGNFRTTDEFNYANLEANVNMLKLIQLGLTLSDEGGDLPRRGTGGRRCIWQFNFRGFDPRTDPSNADSIQMLRTCGIDFDRFAAEGADPIRFAELLMSSGVVLNADVQWITFHSGYDFGYLLRLLTGRNLPDNMPAFFDLIRIYFPVLYDIKHLMRFCSNLHGGLSRLGELLDVKRVGTCHQAGSDSLLTLGCYNKIKEVYFKGSTEKH

SEQ ID NO: 202 - protein, 588 aa, Zea mays
MCGILAVLGCSDWSQAKRARILACSRRLKHRGPDWSGLYQHEGNFLAQQRLAVVSPLSGDQPLFNEDRTVVVVANGEIYNHKNVRKQFTGTHNFSTGSDCEVIMPLYEKYGENFVDMLDGVFAFVLYDTRDRTYVAARDAIGVNPLYIGWGSDGSVWIASEMKALNEDCVRFEIFPPGHLYSSAGGGFRRWYTPHWFQEQVPRTPYQPLVLREAFEKAVIKRLMTDVPFGVLLSGGLDSSLVASVTKRHLVETEAAEKFGTELHSFVVGLEGSPDLKAAREVADYLGTIHHEFHFTVQDGIDAIEEVIYHDETYDVTTIRASTPMFLMARKIKSLGVKMVLSGEGSDELLGGYLYFHFAPNKEEFHRETCRKVKALHQYDCLRANKATSAWGLEVRVPFLDKEFINVAMGMDPEWKMYDKNLGRIEKWVMRKAFDDDEHPYLPKHILYRQKEQFSDGVGYNWIDGLKSFTEQQVTDEMMNNAAQMFPYNTPVNKEAYYYRMIFERLFPQDSARETVPWGPSIACSTPAAIEWVEQWKASNDPSGRFISSHDSAATDHTGGKPAVANGGGHGAANGTVNGKDVAVAIAV

SEQ ID NO: 203 - protein, 532 aa, Oryza sativa
MAAIYLLIAALIASSHALAAHGAGGGVPLAAAAPLPFPGDLAASGKLRTDPNATVPASMDFGNITAALPAAVLFPGSPGDVAELLRAAYAAPGRPFTVSFRGRGHSTMGQALAAGGVVVHMQSMGGGGAPRINVSADGAYVDAGGEQLWVDVLRAALARGVAPRSWTDYLHLTVGGTLSNAGVSGQTYRHGPQISNVLELDVITGHGETVTCSKAVNSDLFDAVLGGLGQFGVITRARVAVEPAPARARWVRLVYADFAAFSADQERLVAARPDGSHGPWSYVEGAVYLAGRGLAVALKSSGGFFSDADAARVVALAAARNATAVYSIEATLNYAANATPSSVDAAVAAALGDLHFEEGFSFSRDVTYEEFLDRVYGEEEALEKAGLWRVPHPWLNLFVPGSRIADFDRGVFKGILQTATDIAGPLIIYPVNKSKWDAAMSAVTPEGEEEVFYVVSLLFSAVANDVAALEAQNRRILRFCDLAGIGYKAYLAHYDSRGDWVRHFGAKWDRFVQRKDKYDPKKLLSPGQDIFN

SEQ ID NO: 204 - protein, 73 aa, Glycine max
MADSDRSSSEISTHSTDSGKRGSSKVEFSEDEETLIIRMYKLVGERWSLIAGRIPGRTAEEIEKYWTSRFSGS

SEQ ID NO: 205 - protein, 489 aa, Zea mays
MATCATDLAPLLGPAAANATGYLCSQFADTASAVDATYLLFSAYLVFAMQLGFAMLCAGSVRAKNTMNIMLTNVLDAAAGALFYYLFGFAFAFGTPSNGFIGRHFFGLQRLPRTGFDYDFFLYQWAFAIAAAGITSGSIAERTQFVAYLIYSAFLTGFVYPVASHWFWSADGWAAAGRTSGPLLFGSGAIDFAGSGVVHMVGGIAGFWGALVEGPRIGRFDHAGRSVALRGHSASLVVLGTFLLWFGWYGFNPGSFTTILKSYGPAGTVHGQWSAVGRTAVTTTLAGSVAALTTLFGKRLQAGHWNVVDVCNGLLGGFAAITAGCSVVEPWAAVVCGFVSAWVLIGANALAARLRFDDPLEAAQLHGGCGAWGVLFTGLFARQEYVEEIYGAGRPYGLLMGGGGKLLAAQIVQIVVIAGWVSCTMGPLFYALKRLDLLRISADDEMSGMDLTRHGGFAYEDPGDNAGVGEFTLKSAQNRVEPPASSNRV

SEQ ID NO: 206 - protein, 65 aa, Bacillus halodurans
MQGKVKWFNAEKGFGFIEREDGDDVFVHFSAINTDGFKTLDEGQSVEFDIVEGARGPQAANVTKL

SEQ ID NO: 207 - protein, 67 aa, Corynebacterium glutamicum
MAQGTVKWFNGEKGFGFIAPNDGSADLFVHYSEIQGSGFRNLEENQPVEFEVGEGAKGPQAQQVRAL

SEQ ID NO: 208 - protein, 212 aa, Zea mays
MPDSDNESGGPSNAEFSSPREQDRFLPIANVSRIMKKALPANAKISKDAKETVQECVSEFISFITGEASDKCQREKRKTINGDDLLWAMTTLGFEDYVEPLKLYLHKFRELEGEKAATTSASSGPQPPLHRETTPSSSTHNGAGGPVGGYGMYGGAGGGSGMIMMMGQPMYGGSPPAASSGSYPHHQMAMGGKGGAYGYGGGSSSSPSGLGR

SEQ ID NO: 209 - protein, 240 aa, Zea mays
MGRGKIVIRRIDNSTSRQVTFSKRRNGIFKKAKELAILCDAEVGLVIFSSTGRLYEYSSTSMKSVIDRYGKAKEEQQVVANPNSELKFWQREAASLRQQLHNLQENYRQLTGDDLSGLNVKELQSLENQLETSLRGVRAKKDHLLIDEIHDLNRKASLFHQENTDLYNKINLIRQENDELHKKIYETEGPSGVNRESPTPFNFAVVETRDVPVQLELSTLPQQNNIEPSTAPKLGLQLIP

SEQ ID NO: 210 - protein, 214 aa, Zea mays
MASVSPLAKFKLVFLGDQSVGKTSIITRFMYDKFDTTYQPTIGIDFLSKTMYLEDRTVRLQLWDTAGQERFRSLIPSYIRDSSVAIVVYDVSNRQTFLNTSKWIEDVHRERGQSNVIIVLVGNKTDLVEKRQVSISEGEDKGKEYGVMFIETSAKENFNIKALFRKIAAALPGVDSYSLATKSDDMVDVNLKTTSNSSQGEQQGGAGGGGGCSC

SEQ ID NO: 211 - protein, 218 aa, Zea mays
MEGVGARLGRTSARYGPATTFTGHVRKWRKEWVPVVAAAAAAAANANTSANGGTTSSTGMGSGGGSRGNNLLLFKWTPVNGANGGGGDGEQQQQAETATRRRRYVPVSLMEEQRQESTKSDDENKANDGDPSSNETEPSNGKTDINDTPMDESQATDEDGRDSGKNGGGTDLNLNLGLKDPDGDNEVETSEKHVAANNPQTENRSKRKSVTPDLEMTM

SEQ ID NO: 212 - protein, 301 aa, Zea mays
MAGLSLEHPWAFAFGLLGNVISFMTFLAPIPTFYRIYKSKSTEGFQSVPYVVALFSAMLWIFYALIKSNETFLITINAAGCVIETIYIVMYFVYAPKKAKLFTAKIMALLNGGVFGVILLLTLLLFKGSKRVVLLGWICVGFSVSVFVAPLSIMRRVIQTKSVEYMPFSLSLSLTLSAVVWFLYGLLIKDKYVALPNVLGFIFGVVQMVLYVFYMNKTPVAAAVGKDAGKLPSAADEHVLVNIAKLNPALPERTSGMHPVTQMAAVPARSCAAEATAPAMLPNRDVVDVFVSRHSPAVHVV

SEQ ID NO: 213 - protein, 274 aa, Zea mays
MAHAAAAAAVPLRRPLLFLKEARLLSTLATPLPGLRHPRALRPTGPLPSDAEDTDDPDAGDGAAVSFKKSRNELKREARRAVKWGMDLAKFSPPQIKRILSAASLEREVFDALMLVKKFGPDVREGRRRQFNYIGSLLRDAQPELMDTLIQASKDGDERKLYTLLSEGKLLVEEEEEEEEDLPDGEEENQEYMKIADRWFDGLLCKDISVTNEVYSVHSVEFDRQELRKLVKRAHMFQESTQNKDGEESNAKLSGAKKPLMRFLRSLAKEAYAP

SEQ ID NO: 214 - protein, 527 aa, Zea mays
MATPELWWYWWLWVTTMLAVVVSTVVCYLTNQHRRWGGWGSSSGRRRPPGPRPLPLIGNLLDLRRAPGSLHHTLARLARAHGAPVMRLDLGLVPAVVVSSRDAAREAFAAHDRRIAARPVPDSKRALGFCDRSMLSLPSSAPLWRTLRGVMAAHVLSPRSLAASRAARERKVADLIGYLRARAGTVVDLKEAVYGGVANLVSTAMFSIDVVDVGAAESSSSSSVAAHGLQELLEELMQCMAQPNVSDFFPFLSALDLQGCRRRVAVQLGQVLQVLDDITDRRLASSSSSSTSSKGGDRRGDFLDILLDLQSTGKITRDNVTLTLFDIFAAGSDTMALTVVWAMAELLRNPGVMARLRAEVRDALGGRDAVEEADAAGLPFLQAVVREAMRLHPAAPVLLPHKAVEDGVQIGGYAVPRGCTVIFNSWAIMRDPAAWERPDEFLPERFLARDLDFRGKQLEFVPFGSGRRLCPGVPMAERVVPLVLASLVHAFQWQLPAGMSADQVDVSDKFTTTSVLAFPPIKAVPLL

SEQ ID NO: 215 - protein, 490 aa, Zea mays
MVLSKAVSESDMSVHSTFASRYVRSSLPRYRMPENSIPKEAAYQIINDELMLDGNPRLNLASFVTTWMEPECDKLIMAAINKNYVDMDEYPVTTELQNRCVNMIAHLFNAPLGESETAVGVGTVGSSEAIMLAGLAFKRRWQNKRRAEGKPFDKPNIVTGANVQVCWEKFARYFEVELREVKLRDGYYVMDPEKAVEMVDENTICVAAILGSTLNGEFEDVKLLNDLLQAKNRETRWETPIHVDAASGGFIAPFLYPDLEWDFRLPLVKSINVSGHKYGLVYAGIGWCIWRSKEDLPEELIFHINYLGADQPTFTLNFSKGSSQVIAQYYQLIRHGFEGYRNIMENCHENAMVLKEGLEKTGRFDIVSKDEGVPLVAFSLKDRSRHDEFEISDMLRRFGWIVPAYTMPPDAQHVTVLRVVIREEFSRTLAERLVLDIEKVMYQLDALPSRLPPPPPAAPLLRKKTELETQRSVTEAWKKFVLAKKTNGVC

SEQ ID NO: 216 - protein, 219 aa, Zea mays
MGEEAVDDYELHMVCYGSDEDERVMEWESGLPGADELTPLSQPLVPPGLAAAFRIPPEPGRTLLDLHRASEATVARLRRAPPSSPGTSSSPHGHQEARGGEGADSAAATTTNSNRRPRLVWTPQLHKRFVDVVAHLGIKKAVPKTIMELMNVEGLTRENVASHLQKYRLYVKRMRGQGPSPSDHIFAPTPVHGVAVGMVPMVSGQAYHYLYNGGGGGDR

SEQ ID NO: 217 - protein, 219 aa, Zea mays; identical to SEQ ID NO: 216

SEQ ID NO: 218 - protein, 321 aa, Arabidopsis thaliana
MGEPKDSLALFLCHESESSLNEDDDETIERSDKQEPHFTTTIDDEDYVADLVLKENLRFETLPSKTTSSSDRLIAIDWILTTRTRFGFQHQTAYIAISYFDLFLHKRFIGKDETWAMRLLSVACLSLAAKMEERIVPGLSQYPQDHDFVFKPDVIRKTELLILSTLDWKMNLITPFHYLNYFLAKISQDNHSVSKDLVLLRSSDSLPALTKEISFTEYRQFVVAAVTTLLASSSTSSDIRLTREEIANKFGSISWWTSNENENVYLCYQRTLEIEERKHMTPPPEIAVSREPPASGSGAKRRLSFDDSDQSSPPAKRMRRL

SEQ ID NO: 219 - protein, 605 aa, Zea mays
MDTHIGSVNGAASNQTVGCPASAPGCPMASTPAQPAATLSAGEASLGRHLARRLVQVGVNDVFAVPGDFNLTLLDHLIAEPGLRLVGCCNELNAGYAADGYARARGVGACAVTFTVGGLSVLNAIAGAYSENLPVICIAGGPNSNDYGTNRILHHTIGLPDFSQELRCFQTVTCHQAVVNNLDDAHEQIDTAIATALRESKPVYLSISCNLPGLPHPTFSRDPVPFFLTPRTSNKMGLEAAVEATVEFLNKAVKPVLVAGPKLRVAKAGKAFVDMVDASGYAYAVMPSAKGLVPETHPHFIGTYWGAVSTAFCAEIVESADAYLFAGPIFNDYSSVGYSFLLKKEKAIIVQPERVIVGNGPAFGCVMMKEFLSELAKRVNKNTTAYENYKRIFVPEGQPLESEPNEPLRVNVLFKHVQKMLTGDSAVIAETGDSWFNCQKLKLPEGCGYEFQMQYGSIGWSVGALLGYAQGANHKRVIAFIGDGSFQVTAQDVSTMLRCEQNSIIFLINNGGYTIEVEIHDGPYNVIKNWNYTGFVDAIHNGLGKCWTSKVKSEEELTAAIETALGEKDCLCFIEVIAHKDDTSKELLEWGSRVSAANSRPPNPQ

SEQ ID NO: 220 - protein, 509 aa, Zea mays
MGAFAKEEHQFLAELGLAQRNPGAFACGAWGGSGPTVTSTSPTNNQVIAEVVEASVHDYEEGMRACFDAAKTWMAIPAPKRGEIVRQIGDALRAKLHHLGRLVSLEMGKILPEGIGEVQEIIDMCDYAVGLSRQLNGSIIPSERPNHMMMEVWNPLGVVGVITAFNFPCAVLGWNACIALVCGNCVVWKGAPTTPLITIAMTKIVASVLEKNNLPGAIFTSFCGGTEIGQAIALDIRIPLVSFTGSTRAGLMVQQQVSARFGKCLLELSGNNAIIVMDDADIQLAVRSVLFAAVGTAGQRCTTCRRLILHENIYQTFLDQLVEVYKQVRIGDPLEKGTLLGPLHTPASKENFLKGIQTIKSQGGKILFGGSAIESEGNFVQPTIVEITPSAPVVKEELFGPVLYVMKFQSLKEAIEINNSVPQGLSSSIFTKRPDIIFKWLGPHGSDCGIVNVNIPTNGAEIGGAFGGEKATGGGREAGSDSWKQYMRRATCTINYGSELPLAQGINFG

SEQ ID NO: 221 - protein, 191 aa, Zea mays
MSLCTIARRLCLSKPSSGSRLSAIWAHLYSTEAAKDMGAKKYKYPDVYDPYGPMPPPSEKVVELADRIAALPPEEIKQIAPALLLRLNQEPPQAVSGQGFGFGAQVGSGAGSGKAEKKAEKTVFDVRLEKFDAAAKIKIIKEIRTFTDLGLKEAKELVEKAPVVLKQSLTKEEAEAIIAKIKAAGGVAVME

SEQ ID NO: 222 - protein, 441 aa, Zea mays
MAGSRFGSFKSEKGDSASAAAAAGGAAQRRDPYEVLGVGRTATDQEIKSAFRRMALKYHPDKNGDDPVASDRFQEVTFSYNILSDPDKRRQYDTSGFDAIESDSQELELDLSSLNTVNTVFAALFSKLGVPIKTTVSATVLEEALNGSVMVSQLQLGNSVQRKVEKQSAHFYSVDITEKQAKMGLVCRVHSNDKSKFKLLYFELEENGGLSLALQEDSVKVGKVTAAGMYFLGFPVYRFEQNNLAAAAKDSDGAFFKRLDSFQPCDIHELKPGTHFFAVYGDNFFKSASYTIEVVCGESFPAEKEMLRNVEAKILTKRAELSKFESEYREVLAKFTEMTSKYTQEMQAIDGLLKERNEIHASYTNNPPLKRSSSRNKAKSPSKVAKTGTEKHHQKEKKVKDHCMEGCGSDSDNSSEKKSKERFPRKKWLNLPFKLDRRKTC

SEQ ID NO: 223 - protein, 326 aa, Zea mays
MADNAKAAAAHARPESSQEEEEDWKEAEGDVAEVDRAATNGAGEGGVPTDRPIRVYADGIYDLFHFGHAKSLEQAKKSFPNTYLLVGCCNDELTHKFKGRTVMTEDERYESLRHCKWVDEVIPDAPWVVTEEFLDKHNIDFVAHDSLPYADASGAGNDVYEHVKKLGKFKETQRTDGISTSDIIMRIVKDYNEYVMRNLARGYTRKDLGVSYVKEKRLRVNMGLKNLRDRVKQHQEKVGEKWSTVAKLQEEWVENADRWVAGFLEKFEEGCHSMGTAIKERIQERLIKAQSSDFGSLLQYDSYDSDEAKENDEDEDEDELFEDVKE

SEQ ID NO: 224 - protein, 214 aa, Zea mays
MAAVEVCVKAAAGNPDTLGDCPFSQRVLLTLEEKKVPYEVKLVDLGNKPEWFLNISPEGKVPVFNGGDGKCIADSDVIIQVIEEKFPTPSLVTPPEYASVGSKIFPAFVKFLKSKDGSDGSEKALLDELQALDDHLKAHGPYINGENVSATDLSLGPKLFHLQIALEHFKGWKIPENLTNVHAYTKALFSRESFVKTKPSEEHVIAGWAPKVNA

SEQ ID NO: 225 - protein, 143 aa, Zea mays
MDASAATARRKRKRPDADITAAAAAAAPVAVDEASDAEVEEFYAILRRIRDASRRLCGAGARPAPRAPAWRPSFSWEDFATPAPGAPAPETPTPAQQEPAQPRPDEPVAVVRATAPSPRAGLDLNAEPEPEAPATPRSARVQA

SEQ ID NO: 226 - protein, 121 aa, Zea mays
MAGCCVFLRWPSASPSRIGYRSLVDAAADDAAPPSTVTVVVGKERRAFAVDRLVLDSYPLRLLLETAARREERRAGGGAIFVDVDAILFEHILWLACDARSVSQILHLDLKEIIDFYAQDA

SEQ ID NO: 227 - protein, 201 aa, Zea mays
MSYYGDRRAESSIVEAFTLSPLPYPVILVLLMVTLLLGASWFFTYDDFIEEASQQLSWALLGVPIALVLLIRWISSVDSFEGYLGFYPRESRWKGRYERGPAEGSSPWGVALLVLLLLVLARAGCGKVVYGNPGRLGRKRRGGDKVKEQAGDEAAKFPWSGMRLATEKRRRVRRSPSKKGIVLKQKSRKVSLQHRSKKLKA

SEQ ID NO: 228 - protein, 252 aa, Glycine max
MEGVPHPIPRTVEEVFTDFKGRRAGLIKALTTDVEKFYQQCDPEKENLCLYGFPNETWEVNLPVEEVPPELPEPALGINFARDGMQEKDWLSLVAVHSDSWLLAVAFYFGARFGFGKNERKRLFQMINDLPTIFELVTGSARQSKDQPAAHNNGSKCKSSGKSRQSESQAKGMKMSAPPKEEDESGEEEEEDDEQGATCGACGDNYGTDEFWICCDMCERWFHGKCVKITPAKAEHIKQYKCPSCSNKRVRV

SEQ ID NO: 229 - protein, 485 aa, Arabidopsis thaliana
MSEGVEAIVANDNGTDQVNGNRTGKDNEEHDGSTGSNLSNFLWHGGSVWDAWFSCASNQVAQVLLTLPYSFSQLGMLSGIVLQIFYGLLGSWTAYLISVLYVEYRARKEKEGKSFKNHVIQWFEVLDGLLGSYWKALGLAFNCTFLLFGSVIQLIACASNIYYINDHLDKRTWTYIFGACCATTVFIPSFHNYRIWSFLGLGMTTYTAWYLAIASIIHGQAEGVKHSGPTKLVLYFTGATNILYTFGGHAVTVEIMHAMWKPQKFKYIYLMATLYVFTLTIPSAAAVYWAFGDALLDHSNAFSLMPKNAWRDAAVILMLIHQFITFGFACTPLYFVWEKVIGMHDTKSICLRALARLPVVIPIWFLAIIFPFFGPINSAVGALLVSFTVYIIPSLAHMLTYRSASARQNAAEKPPFFMPSWTAMYVLNAFVVVWVLIVGFGFGGWASVTNFVRQVDTFGLFAKCYQCKPAAAAAHAPVSALHHRL

SEQ ID NO: 230 - protein, 524 aa, Arabidopsis thaliana
MTNTLCLSLITLITLFISLTPTLIKSDEGIDVFLPISLNLTVLTDPFSISAASHDFGNITDENPGAVLCPSSTTEVARLLRFANGGFSYNKGSTSPASTFKVAARGQGHSLRGQASAPGGVVVNMTCLAMAAKPAAVVISADGTYADVAAGTMWVDVLKAAVDRGVSPVTWTDYLYLSVGGTLSNAGIGGQTFRHGPQISNVHELDVITGKGEMMTCSPKLNPELFYGVLGGLGQFGIITRARIALDHAPTRVKWSRILYSDFSAFKRDQERLISMTNDLGVDFLEGQLMMSNGFVDTSFFPLSDQTRVASLVNDHRIIYVLEVAKYYDRTTLPIIDQVIDTLSRTLGFAPGFMFVQDVPYFDFLNRVRNEEDKLRSLGLWEVPHPWLNIFVPGSRIQDFHDGVINGLLLNQTSTSGVTLFYPTNRNKWNNRMSTMTPDEDVFYVIGLLQSAGGSQNWQELENLNDKVIQFCENSGIKIKEYLMHYTRKEDWVKHFGPKWDDFLRKKIMFDPKRLLSPGQDIFN

SEQ ID NO: 231 - protein, 490 aa, Leuconostoc mesenteroides
MEIQNKAMLITYADSLGKNLKDVHQVLKEDIGDAIGGVHLLPFFPSTGDRGFAPADYTRVDAAFGDWADVEALGEEYYLMFDFMINHISRESVMYQDFKKNHDDSKYKDFFIRWEKFWAKAGENRPTQADVDLIYKRKDKAPTQEITFDDGTTENLWNTFGEEQIDIDVNSAIAKEFIKTTLEDMVKHGANLIRLDAFAYAVKKVDTNDFFVEPEIWDTLNEVREILTPLKAEILPEIHEHYSIPKKINDHGYFTYDFALPMTTLYTLYSGKTNQLAKWLKMSPMKQFTTLDTHDGIGVVDARDILTDDEIDYASEQLYKVGANVKKTYSSASYNNLDIYQINSTYYSALGNDDAAYLLSRVFQVFAPGIPQIYYVGLLAGENDIALLESTKEGRNINRHYYTREEVKSEVKRPVVANLLKLLSWRNESPAFDLAGSITVDTPTDTTIVVTRQDENGQNKAVLTADAANKTFEIVENGQTVMSSDNLTQN

SEQ ID NO: 232 - protein, 492 aa, Arabidopsis thaliana
MGGCVSTPKSCVGGKIRSSKRRKTRTRRKIQKKRVVSSSRLSDGSFDNNPTFRASVDEAWFDSNLAFETDCDDDFHSVQEDTLSVNGCERISVSSMSSVKDSNLGGSARNSLSDVISQSKSESALIDTKQAVFIDEISSNADGSSNKDEGLLENCGILPSNCLPCLNSTVPSIEKRRSLSSSPPSTRKKAAVKLSFKWREGHPTGPLFSTTMQLQRPMAGSQVPFCPLEKKMFDSWSIIEPGSFRVRSKTYFRDKKKELAPNYAAYNPFGVDVFLSQRKVNHIAQYVELPVVTTTPTKLPSILVVNVQIPLYPAAIFHGETDGEGMNFVLYFKLSDNYLKELPPHFQESIQRLLDDEVEKVRGYTTDTNVPFRERLKILGRVANVDDLQLNGAEKKLMNAYNEKPVLSRPQHEFYSGENYFEIDIDMHRFSYISRKGFEAFLDRLKNCVLDVGLTIQGNKPEELPEQILCCIRLNGIDYMNYHQLALSQEVL

SEQ ID NO: 233 - protein, 490 aa, Arabidopsis thaliana
MTKISPEVEIRMPMEAFPPVSADVSFISNSFPKYKLDADNQVLEEPVEDNQGPSLKDVIEQEASNLSDQHKRISVRDLASKFDKNLAAAAKLSNEAKLRDVASLEGHVLLKKLRDALESLRGRFAGRNKEDVEKAISMVEALAVKLTQNEGELIQEKFEVKKLVNFLKQASEDAKNLVNQEKSFACAEIESARAVVLRIGEALEEQEKASQASKPQDVDGLVEEVQESRRIKLLHHPSKVMAMEYELRALRDQIREKSIFSIKLQKELIMSKRNEENKSCLYMLDGSEALGSYLRVQPCSDEVPQVSKCSFQWYRLSSEGSWREVISGANKSIYAPDPSDVGRILQVDIVSNGKKLTLTTNPIQTVSGLGSHVETLLRKSNTDFNVVISQMNGKDHSSHSTHSFNVGRMRIKLCRGWITKAREIYSPSMQLCGVRSDVVNAAKVLFWQARKGLSFVLTFESERDRNSAIMVARKYALDCNVVLAGPDDLV

SEQ ID NO: 234 - protein, 179 aa, Glycine max
MASFGGTTQKCMACAKTVYLVDKLTADSRVYHKACFRCHHCRNTLKLSNYCSFEGVLYCRPHYDQLYKRTGSLDKSFEGIPKIQKPEKPVTGNENTKVLANVFLGTRDKCVCCNKTVYPTERVTVNGTPYHKGCFKCTYGGCTVSSSNFITHEGKPYCKHHHIQLFKEKGNYSQLENEC

SEQ ID NO: 235 - protein, 179 aa, Glycine max; identical to SEQ ID NO: 234

SEQ ID NO: 236 - protein, 167 aa, Arabidopsis thaliana
MYLIVLGFASWCLNKYINGQTNHPSFGGNGATPFFLTFSILAAVVGVASKLAGANHIRFWRNDSLAAAGASSIVAWAITALAMGLACKQINIGGWRGWRLKMIEAFIIILTFTQLLYLMLIHAGSLSSKYGPGYRDQDYATGQAHGHGHVPHTVGEHKAGVGSTMAV

SEQ ID NO: 237 - protein, 227 aa, Arabidopsis thaliana
MPVHDEQEHEVYGGEIPEEEEGEMDTEEYEEHGGEEGAAAGDEELEPGSSSRDLEDMKKRIKEIEEEAGALREMQAKAEKDMGASQDPSGGVSAAEKEEVDSRSIYVGNVDYACTPEEVQQHFQSCGTVNRVTILTDKFGQPKGFAYVEFVEVEAVQNSLILNESELHGRQIKVSAKRTNVPGMRQFRGRGRPFRPMRGFMPGVPFYPPYAYGRVPRFRRPMRYRPY

SEQ ID NO: 238 - protein, 372 aa, Arabidopsis thaliana
MFAQLAPSPSPSPANVSHFVHRRTFRQCTYAVSASLPTANSSRPPPIQIVGGKDLNLDVTRKDDSIGFKLEANEDEIDWMNLESDIRLWTRALRPVQWYPGHIMKTEKELREQLKLMDVVIEVRDARIPLSTTHPKMDAWLGNRKRILVLNREDMISNDDRNDWARYFAKQGIKVIFTNGKLGMGAMKLGRLAKSLAGDVNGKRREKGLLPRSVRAGIIGYPNVGKSSLINRLLKRKICAAAPRPGVTREMKWVKLGKDLDLLDSPGMLPMRIDDQAAAIKLAICDDIGEKAYDFTDVAGILVQMLARIPEVGAKALYNRYKIQLEGNCGKKFVKTLGLNLFGGDSHQAAFRILTDFRKGKFGYVSLERPPL

SEQ ID NO: 239 - protein, 372 aa, Arabidopsis thaliana; identical to SEQ ID NO: 238

SEQ ID NO: 240 - protein, 436 aa, Arabidopsis thaliana
MKASGSLDSWREYFRRRGDSDIFGIIDHAIMVAATDCPNKFKSRRDKIAELLFSCRVNRCVGCDHLELSVPGDDEANRGTTGNGGGGTAVDEDYEVAGGSKESKANSSRGDNNQIVSNYTFDEAEALSDEIEEFSVVSKEVARIKEILLNKEDEPNSVLLDSLRHLKLMSLNVDILKSTEIGKAVNGLRKHSSDKIRQLAKTLIAEWKELVDQWVNTTKEITGAEGTPESANPSVLDEEEAFPSLPYDVDIFTPEPNGFEISHFFDSLDFDGNPRNSEEHNTSREHERRPQNIAKRKPEGTQMRIQDAPFRSIKPSSATDFDGTRRPVKQSTEQRMKNETVSVHKSEKPMIQRKPVVTEQKRKAPGPQQEKLKGLDADAKFEFAKRKLQESYQHHENAKKQRTIQVLEMIPKQGSAQKPQLKRPGMSNRNWANGRK

SEQ ID NO: 241 - protein, 236 aa, Arabidopsis thaliana
MDVFAFNASLSMCKDVAGIAGNIFAFGLFVSPMPTFRRIMRNKSTEQFSGLPYIYALLNCLICLWYGTPFISHSNAMLMTVNSVGATFQLCYIILFIMHTDKKNKMKMLGLLFVVFAVVGVIVAGSLQIPDQLTRWYFVGFLSCGSLVSMFASPLFVINLVIRTKSVEFMPFYLSLSTFLMSASFLLYGLFNSDAFVYTPNGIGTILGIVQLALYCYYHRNSIEEETKEPLIVSYV

SEQ ID NO: 242 - protein, 249 aa, Arabidopsis thaliana
MTKNYPTVSEDYKKAVEKCRRKLRGLIAEKNCAPIMVRLAWHSAGTFDCQSRTGGPFGTMRFDAEQAHGANSGIHIALRLLDPIREQFPTISFADFHQLAGVVAVEVTGGPDIPFHPGREDKPQPPPEGRLPDATKGCDHLRDVFAKQMGLSDKDIVALSGAHTLGRCHKDRSGFEGAWTSNPLIFDNSYFKELLSGEKEGLLQLVSDKALLDDPVFRPLVEKYAADEDAFFADYAEAHMKLSELGYLS

SEQ ID NO: 243 - protein, 314 aa, Arabidopsis thaliana
MYLLVFKLFLFLSLLQISVSARNLASQEPNQFQLLKYHKGALLSGKISVNLIWYGKFKPSQRAIISDFITSLTHTSPTSKTLHQPSVATWWKTTEKYYKLATPSKNSSPLSLTLGKQIIDESCSLGKSLTDKKIQTLASKGDQRNAINVVLTSADVTVTGFGMSRCGTHGHARGLGKRGSKFAYIWVGNSETQCPGQCAWPFHAPVYGPQSPPLVAPNNDVGLDGMVINLASLLAGTATNPFGNGYYQGPQNAPLEAASACPGVYGKGAYPGYAGDLLVDTTTGGSFNAYGANGRKFLLPALYDPTTSACSTMV

SEQ ID NO: 244 - protein, 373 aa, Arabidopsis thaliana
MGYLFEETLSSNPKTPIVVDDDNELGLMAVRLANAAAFPMVLKASLELGVFDTLYAEASRTDSFLSPSEIASKLPTTPRNPGAPVLLDRMLRLLASYSMVKCEKVSVGKGERVYRAEPICRFFLKNNIQDIGSLASQVIVNFDSVFLNTWAQLKDVVLEGGDAFGRAHGGMKLFDYMGTDERFSKLFNQTGFTIAVVKKALEVYQGFKGVNVLVDVGGGVGNTLGVVTSKYPNIKGINFDLTCALAQAPSYPGVEHVAGDMFVDVPTGDAMILKRILHDWTDEDCVKILKNCWKSLPENGKVVVIELVTPDEAENGDINANIAFDMDMLMFTQCSGGKERSRAEFEALAAASCFTHCKFVCQAYHCWIIEFCK

SEQ ID NO: 245 - protein, 373 aa, Arabidopsis thaliana; identical to SEQ ID NO: 244

SEQ ID NO: 246 - protein, 170 aa, Arabidopsis thaliana
MQQRKPTAGRPSGTDGSDFSYRMVVDSRYTKVTKEKARLRPLIFVQAAIYVIGLSCAFLTTTKKDEKNTLAIAAAVAGLVCSLIGELGCRRSRVNLLRLYTAASTIVMVLSVFCAVRSRLTMEERNSSGTTAKLELAGFICAQLGAVVQILAIIVTGSLVNNMSPPTKAA

SEQ ID NO: 247 - protein, 143 aa, Arabidopsis thaliana
MAMAFKMATTGMRVTDECTSSFMDMKWKKVHRYIVFKIEEKSRKVTVDKVGGAGESYHDLEDSLPVDDCRYAVFDFDFVTVDNCRKSKIFFIAWSPEASKIRAKILYATSKDGLRRVLEGIHYELQATDPTEMGFDIIQDRAK

SEQ ID NO: 248 - protein, 416 aa, Arabidopsis thaliana
MYQHIKVPAGEKIKVNADLSLNVPDNPIIPYIEGDGTGVDITPVMLKVVDAAVAKAYGGKRKISWMEIYAGEKSTKVYGPDVWLPEETMEVVKEYVVSIKGPLTTPVGGGIRSLNVALRQQLDLYVCLRPVRYFKGVPSPVREPEKTDMVIFRENSEDIYAGIEWEAESEGAKKLIAFLQNEMGVKKIRFPETSGIGIKPVSKEGTQRLVRKALQYAIDNDKPSVTLVHKGNIMKFTEGGFRDWGYELAQQEFGAELVDGGPWCKFKNPKTGRDIVVKDAIADAFLQQILLRPAEYSVIATLNLNGDYISDALAAQVGGIGIAPGANMSDSVAMFEATHGTAPKYAGKDYVNPGSEILSAEMMLRHMGWTEAADLIIRSMEKSIQSKKVTYDFARLLEGATQVSCSGFGQVMIDNM

SEQ ID NO: 249 - protein, 360 aa, Arabidopsis thaliana
MASSMLSSATMVASPAQATMVAPFNGLKSSAAFPATRKANNDITSITSNGGRVNCMQVWPPIGKKKFETLSYLPDLTDSGGRVNCMQAMGEPNLNPAYTLDQAIANLQQTEDASARYYAAWWIGRFRAAQPETIAALLVALEDETDRSPDGGYPLRRNAAKALGKLGDRQVVPALIKALECEDYYVRESAAQALEGLGDARAMAPLMAKLTGGLAAAQLVEGKPHLAQPYEAIIEALGTLQAVESIGLIEPFLEHFSPKVQYAAARALFQLTGDNRYGDLLITALGGTDLQLRRSAMMDLGATGYLPGAQAIAKAFAENSLKLIALRDLWATHRQRQASSESKALSPASRQILELMDSLL

SEQ ID NO: 250 - protein, 360 aa, Arabidopsis thaliana; identical to SEQ ID NO: 249

SEQ ID NO: 251 - protein, 277 aa, Glycine max
MKGEYVEQQQQHPKSETPPSMFSKLQPQHHPFPHHPFQLSAEDATTITPSTAQKANSSGGDGATIEVVRRPRGRPPGSKNKPKPPVIITRDPEPAMSPYILEVSGGNDVVEAIAQFSHRKNMGICVLTGSGTVANVTLRQPSTTPGTTVTFHGRFDILSVSATFLPQQSGASPAVPNGFAISLAGPQGQIVGGLVAGGLMAAGTVFVIAASFNNPAYHRLPPEEEGASAGDGHSPPVSGGGDSGHGQAESCGMSMYSCHLPSDVIWAPTARPPPPPY

SEQ ID NO: 252 - protein, 364 aa, Arabidopsis thaliana
MGKGGMSQGEGSKVEEENMAAWLVGINTLKIQPFLLPSVGPHDVRVRMKAVGICGSDVHYLKTMRCADFVVKEPMVIGHECAGIIEEVGEEVKHLVVGDRVALEPGISCWRCNLCREGRYNLCPEMKFFATPPVHGSLANQVVHPADLCFKLPENVSLEEGAMCEPLSVGVHACRRAEVGPETNVLVMGAGPIGLVTMLAARAFSVPRIVIVDVDENRLAVAKQLGADEIVQVTTNLEDVGSEVEQIQKAMGSNIDVTFDCAGFNKTMSTALAATRCGGKVCLVGMGHGIMTVPLTPAAAREVDVVGVFRYKNTWPLCLEFLTSGKIDVKPLITHRFGFSQKEVEDAFETSARGSNAIKVMFNL

SEQ ID NO: 253 - protein, 368 aa, Arabidopsis thaliana
MRKMVRDLKDSSSMIELRDFPGGPSTFELTMKFCYGINFDITAFNVVSLRCAAGYLEMTEDYKEQNLIFRAENYLDQIVFRSFHESVLVLCSCETQEIAETYEIPDRCVEAIAMNACRKQLVSGLSEELKGRDCLEMWTEELSALGIDYYVQVVSAMARLSVRSESIVASLVHYAKTSLKGIIDRNCQEQRKIVEAMVNLLPNDEKGSYSLSIIPLGFLFGMLKVGTIIDIEISCRLELERRIGHQLETASLDDLLIPSVQNEDSMYDVDTVHRILTFFLERIEEEDDECGYDSDSTGQHSSLLKVGRIMDAYLVEIAPDPYLSLHKFTAIIETLPEHSRIVDDGIYRAIDMYLKVNKNTIEQSLFMF

SEQ ID NO: 254 - protein, 287 aa, Arabidopsis thaliana
MSEALEDVPSMKGGCEEEEEGLNLKATELRLGLPGCESPEREGAFRSVVVSGAKRGFSDAIDENWNGGSEKDAALFSPRGAVSVSAAKSLTLTATDCTNQPTALGASVLKETVPRSPKPLHEKKPQISAPAAKAQVVGWPPIRSFRKNSMASQPQKNDTDAEAKSGCLYVKVSMEGAPYLRKVDLNSFTTYKDLSLALEKMFSCFTLSQCGSYGVSSRENLSESRLMDLLHGSEYVLTYEDKDGDWMLVGDVPWEMFTESCKRLRIMKSFEAIGLAPRAMEKCKSRN

SEQ ID NO: 255 - protein, 119 aa, Arabidopsis thaliana
MSTFLIRILLPLLIIAMTLPRRSEAESEQWCIADEQTPDDELQAALDWACGKGGADCSKMQQENQPCFLPNTIRDHASFAFNSYYQTYKNKGGSCYFKGAAMITELDPSHGSCQYEYNP

SEQ ID NO: 256 - protein, 92 aa, Arabidopsis thaliana
MALFLSPKTITLLFFSLSLALYCSIDPFHTAPFPISPISSLTKLSLHVPTKFHGREIHKIHFRNQRFCFLTKSKVQRASPLILSDVVRTRRC

SEQ ID NO: 257 - protein, 310 aa, Arabidopsis thaliana
MDVAAMARCVGRCYVSPAFGESESHRLSERRFLKLSSSTNSDPAGSKSLKLRGKIHRRMSYFRPIMAKDESISSRSGETKQINGKQKNIVWHDCPVTKSDRQELIKQKGCVIWITGLSGSGKSSLACALSRALHNRGKLSYILDGDNVRHGLNSDLSFEADDRAENIRRVGEVAKLFADSGIICIASLISPYRIERAACRALLPQGDFIEVFMDVPLHVCEARDPKGLYKRARAGKIKGFTGVDDPYEAPLDCEIVIQNSRDKGLSSSSSSSSSPSSSSSSLCEMADIVVSYLDQNGYLKKHSTKSRNCM

SEQ ID NO: 258 - protein, 537 aa, Arabidopsis thaliana
MGISKPLPLFSILVLYFSLYTITPTSSLASLQDQFINCVQRNTHVYFPLEKTFFAPTKNVSMFSQVLESTAQNLRFLKKSMPKPGFIFSPIHESHVQASIICSKKLRMHLRVRSGGHDYEGLSYVSQIDKPFILMDLSKMRQVNINIQDNSAWVQSGATVGELYYRIAEKSKVHGFPAGLCSSLGIGGHITGGAYGSMMRKYGLGADNVLDAKIVDANGKLLDRAAMGEDTFWAIRGGAGGSFGIILAWKIKLVPVPKTVTVFTVTKTLQQDVGNKIISKWQRVADKLVEELFIRVLFNVAGTGGNKTVTTSYNALFLGGKGTLMNVMKKSFPELGLTFKDCIEMSWLESIAYISGFPTHTPTNVLLQGKSPFPKVSFKAKSDFVKTPIPESGLQGIFKKLLKEDIPLMIWNPYGGMMAKIPESQIPFPHRKGVLFKVQYVTSWLDSDKRPSRHINWIRDLYSYMTPYVSSNPREAYVNYRDLDLGRNTKDVKTCIKQAQVWGANYFKNNFNRLMMIKAKVDPENFFRHEQSIPPMM

SEQ ID NO: 259 - protein, 326 aa, Arabidopsis thaliana
MSLTTVPTLAIRSGPSGHHSMPVLGFGTAASPLPEPTMLKETVIEAIKLGYRHFDTSPRYQTEEPIGEALAEAVSLGLVRSRSEFFVTTKLWCADAHGGLVVPAIKRSLKNLKLDYLDLYIIHWPVSSKPGKYKFPIDEDDFMPMDFEVVWSEMEECQRLGLAKCIGVSNFSCKKLQHILSIATIPPSVNQVEMSPIWQQRKLRELCRSNDIVVTAYSVLGSRGAFWGTPKIMESDVLKEIAEAKEKTVAQVSMRWAYEQGVSMVVKSFTKERLEENLKIFDWSLTEDETQRISTEIPQFRNVHGEVYTSKKGPIKSVAEMWDGEI

SEQ ID NO: 260 - protein, 380 aa, Arabidopsis thaliana
MICIDNSEWMRNGDYSPSRLQAQTEAVNLLCGAKTQSNPENTVGILTMAGKGVRVLTTPTSDLGKILACMHGLDVGGEINLTAAIQIAQLALKHRQNKNQRQRIIVFAGSPIKYEKKALEIVGKRLKKNSVSLDIVNFGEDDDEEKPQKLEALLTAVNNNDGSHIVHVPSGANALSDVLLSTPVFTGDEGASGYVSAAAAAAAAGGDFDFGVDPNIDPELALALRVSMEEERARQEAAAKKAADEAGQKDKDGDTASASQETVARTTDKNAEPMDEDSALLDQAIAMSVGDVNMSEAADEDQDLALALQMSMSGEESSEATGAGNNLLGNQAFISSVLSSLPGVDPNDPAVKELLASLPDESKRTEEEESSSKKGEDEKK

SEQ ID NO: 261 - protein, 511 aa, Arabidopsis thaliana
MEILTSIAITVATTIFIVLCFTIYLMIRIFTGKSRNDKRYAPVHATVFDLLFHSDELYDYETEIAREKPTYRFLSPGQSEILTADPRNVEHILKTRFDNYSKGHSSRENMADLLGHGIFAVDGEKWRQQRKLSSFEFSTRVLRDFSCSVFRRNASKLVGFVSEFALSGKAFDAQDLLMRCTLDSIFKVGFGVELKCLDGFSKEGQEFMEAFDEGNVATSSRFIDPLWKLKWFFNIGSQSKLKKSIATIDKFVYSLITTKRKELAKEQNTVVREDILSRFLVESEKDPENMNDKYLRDIILNFMIAGKDTTAALLSWFLYMLCKNPLVQEKIVQEIRDVTFSHEKTTDVNGFVESINEEALDEMHYLHAALSETLRLYPPVPVDMRCAENDDVLPDGHRVSKGDNIYYIAYAMGRMTYIWGQDAEEFKPERWLKDGLFQPESPFKFISFHAGPRICLGKDFAYRQMKIVSMALLHFFRFKMADENSKVYYKRMLTLHVDGGLHLCAIPRTST

SEQ ID NO: 262 - protein, 331 aa, Arabidopsis thaliana
MTAIPNVVDIESSSSSLCQETATETVTVERGSSDSSSKPDDVVLLIKEEEDDAVNLSLGFWKLHEIGLITPFLRKTFEIVDDKVTDPVVSWSPTRKSFIIWDSYEFSENLLPKYFKHKNFSSFIRQLNSYGFKKVDSDRWEFANEGFQGGKKHLLKNIKRRSKNTKCCNKEASTTTTETEVESLKEEQSPMRLEMLKLKQQQEESQHQMVTVQEKIHGVDTEQQHMLSFFAKLAKDQRFVERLVKKRKMKIQRELEAAEFVKKLKLLQDQETQKNLLDVEREFMAMAATEHNPEPDILVNNQSGNTRCQLNSEDLLVDGGSMDVNGRIEIE

SEQ ID NO: 263 - protein, 298 aa, Arabidopsis thaliana
MTEEFEIAGISTGAWWSSPTNTAAVFSGYSLPCSTEISPDVTNFGWQNFDNKINDHNDGCMNMHNSFFEGLLIDPNDQLLPDPWSKSTIPNAKSELLENFPFLDNMFLVDSEAESLLDHEIRNHKSSKEQITQDYRNLTSKRSEELEENSDEYSPRLLKRPRLETLSPLPSFKVRKEKLGDRITALQQLVSPFGKTDTASVLNEAVEYIKFLQEQVTVLSNPEQNTIGSVQQQQCSNKKSINTQGEVEEDECSPRRYVDLSSRGLCLMPISASYPVAAAAASAAEMNVHLVSGIFHSL

SEQ ID NO: 264 - protein, 302 aa, Arabidopsis thaliana
MSSSGTIWSYEEEKAFENAIAMHWIEESSKEQWEKIASAVPSKSMEDVKQHYQVLVEDVSAIEAGHISFPNYAASEEITSSNKDFHGSSKATSSDKRSNCNYGRGFSGLGHDSTTHSSGKGGLSRSSEQERRKGIPWTEEEHRLFLLGLEKFGKGDWRSISRNFVISRTPTQVASHAQKYFIRLNSMNRDRRRSSIHDITSVNNGDVANNQAPITGQHSSTIPSNTMGVGQSLKHRVQGHIPPGLGMYGTPVGHPVAAPPGHMASAVGTPVMLPPGPHPHAHPHPPYVLPLAYPMAPPTMHQ

SEQ ID NO: 265 - protein, 170 aa, Glycine max
MASDGSEEFRLVSPAFKNGGKLPRHYTDDGQGTKKNISPPLEWYNLPEGTKTLALVVEDIDATDSGGPMVPWTHWVVANILATVKGLPEGFSGKSAEMGGDYAAIKEGNNDLKVPGWNGPRLPTPGHRIQFRLYALDDELKLGNKLTKEKLLEDTIEGHVLGEATLMAIF

SEQ ID NO: 266 - protein, 420 aa, Arabidopsis thaliana
MANVISISHFTLLALPYLLLLLSSTAAAINVTAVLSSFPNLSSFSNLLVSSGIAAELSGRNSLTLLAVPNSQFSSASLDLTRRLPPSALADLLRFHVLLQFLSDSDLRRIPPSGSAVTTLYEASGRTFFGSGSVNVTRDPASGSVTIGSPATKNVTVLKLLETKPPNITVLTVDSLIVPTGIDITASETLTPPPTSTSLSPPPAGINLTQILINGHNFNVALSLLVASGVITEFENDERGAGITVFVPTDSAFSDLPSNVNLQSLPAEQKAFVLKFHVLHSYYTLGSLESITNPVQPTLATEEMGAGSYTLNISRVNGSIVTINSGVVLAVVTQTAFDQNPVSVFGVSKVLLPKELFPKSGQPVATAPPQEISLSPESSSEQPSRLVSPPREIVSSGAVKRPLGFLVLWCWCIAFCYVLV

SEQ ID NO: 267 - protein, 549 aa, Zea mays
MARRAASSLVSRCLLARAPAGAPPAAPSALRRTVPADGMHRLLPGVLQRFSTAAAVEEPITPSVHVNYTKLLINGNFVDSASGKTFPTLDPRTGEVIAHVAEGDAEDINRAVAAARKAFDEGPWPKMTAYERSRILLRFADLIEKHNDELAALETWDNGKPYEQAAQIEVPMVARLMRYYAGWADKIHGLIVPADGPHHVQILHEPIGVAGQIIPWNFPLLMFAWKVGPALACGNTLVLKTAEQTPLSALYISKLLHEAGLPEGVVNVVSGFGPTAGAALASHMDVDKIAFTGSTDTGKIILELAAKSNLKTVTLELGGKSPFIIMDDADVDHAVELAHFALFFNQGQCCCAGSRTFVHERVYDEFVEKAKARALKRVVGDPFRKGVEQGPQIDDEQFNKILRYIRYGVDGGATLVTGGDRLGDKGFYIQPTIFSDVQDGMKIAQEEIFGPVQSILKFKDLNEVIKRANASQYGLAAGVFTNSLDTANTLTRALRAGTVWVNCFDVFDAAIPFGGYKMSGIGREKGVDSLKNYLQVKAVVTPIKNAAWL

SEQ ID NO: 268 - protein, 549 aa, Oryza sativa
MAAAAARRGSSLLSRCLLSRPAAAASPAVPSALRRADGTQGLLPGILQRFSTAAVAEEPISPPVQVNYTQLLIDGKFVDSASGKTFPTLDPRTGELIAHVAEGDAEDINRAVHAARKAFDEGPWPKMTAYERSRILLRFADLIEKHNDEIAALETWDNGKPYAQAANIEVPMVARLMRYYAGWADKIHGLVVPADGPHHVQVLHEPIGVAGQIIPWNFPLLMFAWKVGPALACGNTVVLKTAEQTPLSALFASKLLHEAGLPDGVVNVVSGFGPTAGAALASHMDVDKIAFTGSTDTGKVVLELAARSNLKSVTLELGGKSPFIIMDDADVDHAVELAHFALFFNQGQCCCAGSRTFVHERIYDEFVEKAKARALKRVVGDPFKNGVEQGPQIDDEQFNKILRYIKYGVDSGANLVTGGDRLGDKGYYIQPTIFSDVQDNMRIAQEEIFGPVQSILKFNDLNEVIKRANASQYGLAAGVFTNNLNTANTLTRALRVGTVWVNCFDVFDAAIPFGGYKQSGIGREKGIDSLKNYLQVKAVVTPIKNAAWL

SEQ ID NO: 269 - protein, 55 aa, Oryza sativa
MAGTANCIDILIAIILPPLGVFLKFGCGHEFWICLLLTFLGYIPGIIYAIYAITK

SEQ ID NO: 270 - protein, 55 aa, Saccharomyces cerevisiae
MDSAKIINIILSLFLPPVAVFLARGWGTDCIVDIILTILAWFPGMLYALYIVLQD

SEQ ID NO: 271 - protein, 406 aa, Arabidopsis thaliana
MDPSFRFIKEEFPAGFSDSPSPPSSSSYLYSSSMAEAAINDPTTLSYPQPLEGLHESGPPPFLTKTYDLVEDSRTNHVVSWSKSNNSFIVWDPQAFSVTLLPRFFKHNNFSSFVRQLNTYGFRKVNPDRWEFANEGFLRGQKHLLKNIRRRKTSNNSNQMQQPQSSEQQSLDNFCIEVGRYGLDGEMDSLRRDKQVLMMELVRLRQQQQSTKMYLTLIEEKLKKTESKQKQMMSFLARAMQNPDFIQQLVEQKEKRKEIEEAISKKRQRPIDQGKRNVEDYGDESGYGNDVAASSSALIGMSQEYTYGNMSEFEMSELDKLAMHIQGLGDNSSAREEVLNVEKGNDEEEVEDQQQGYHKENNEIYGEGFWEDLLNEGQNFDFEGDQENVDVLIQQLGYLGSSSHTN

SEQ ID NO: 272 - protein, 155 aa, Arabidopsis thaliana
MDLGRFPIISILEDMLEVPEDHNNEKTRNNPSRVYMRDAKAMAATPADVIEHPNAYAFVVDMPGIKGDEIKVQVENDNVLVVSGERQRENKENEGVKYVRMERRMGKFMRKFQLPENADLDKISAVCHDGVLKVTVQKLPPPEPKKPKTIQVQVA

SEQ ID NO: 273 - protein, 164 aa, Zea mays
MADDGGSHEGSGGGGGVREQDRFPPIANISRIMKKAVPANGKIAKDAKETLQECVSEFISFVTSEASDKCQKEKRKTINGDDLLWAMATLGFEEYVEPLKIYLQKYKEMEGDSKLSTKAGEGSVKKDAISPHGGTSSSSNQLVQHGVYNQGMGYMQPQYHNGET

SEQ ID NO: 274 - protein, 280 aa, Zea mays
MDSSSFVPAAGAENGSAAGGANNGRVAQQQAPAIREQDRLMPIANVIRIMRRVLPAHAKISDDAKETIQECVSEYISFITGEANERCQREQRKTITAEDVLWAMSRLGFDDYVEPLGAYLHRYREFEGDARGVGLVPGAAPSRGGDHHPHPHSMSPAAMLKSRGPVSGAAMLPHHHQHHHDMQMHGAMYGGTAVPPPAGPPHHGGFLMPHPQGSSHYLPYAYEPTYGGEHAMAAYYGGAAYAPGNGGSGDGSGSGGGGGSASHTPQGSGGLEHPHPFAYK

SEQ ID NO: 275 - protein, 224 aa, Oryza sativa
MPDSDNESGGPSNAGEYASAREQDRFLPIANVSRIMKRALPANAKISKDAKETVQECVSEFISFITGEASDKCQREKRKTINGDDLLWAMTTLGFEDYIDPLKLYLHKFRELEGEKAIGAAGSGGGGAASSGGSGSGSGSHHHQDASRNNGGYGMYGGGGGMIMMMGQPMYGSPPASSAGYAQPPPPHHHHHQMVMGGKGAYGHGGGGGGGPSPSSGYGRQDRL

SEQ ID NO: 276 - protein, 177 aa, Oryza sativa
MADHHGGHHADGHRRQQQLQGEAADQAAAEIIKEQDRLLPIANVGRIMKQILPPNAKISKEAKETMQECVSEFISFVTGEASDKCHKEKRKTVNGDDVCWAFGALGFDDYVDPMRRYLNKYRELEGDRAAAAATSRSGAGAAAGPDHPSSSSSAAAATAGHFMFNAMDRSTDSSRQF

SEQ ID NO: 277 - protein, 93 aa, Oryza sativa
MASFARRAMSLAQIPSARISSGAASIGQRRCLAGAADHHGSTKVDFWKQPTNPGNWKEEHFVLISLSGWGLLFYSGYKLATGGKKETPVESTQ

SEQ ID NO: 278 - protein, 143 aa, Oryza sativa
MSEGFDGTENGGGGGGGGVGKEQDRFLPIANIGRIMRRAVPENGKIAKDSKESVQECVSEFISFITSEASDKCLKEKRKTINGDDLIWSMGTLGFEDYVEPLKLYLRLYRETEGDTKGSRASELPVKKDVVLNGDPGSSFEGM

SEQ ID NO: 279 - protein, 296 aa, Oryza sativa
MDPMDIVGKSKEDVSLPKSTMFKIIKEMLPPDVRVARDAQDLLVECCVEFINLLSSESNEVCSREDKKTIAPEHVLRALQDLGFREYIEEVQAAYEHHKHDTLDSPKASKFTGVEMTEEQAVAEQQRMFAEARARMNNGAAKPKEPEPEAQQQTQQPPQPQLHPQPQQPLQPQLQLHPQPQQQPSQLHPQQLLHPQSQQTPQPQPQVHPQPQQPPQLQPQPQLLQQPQLPQQLQPQSQLPPQPQQPPQLQLQSQLHPQPQQPPQLQPQPQLHQQPQPQAELQSQSQPQTEHGLDSS

SEQ ID NO: 280 - protein, 254 aa, Zea mays
MRKKLGTRFPAARIKKIMQADEDVGKIALAVPVLVSRSLELFLQDLIDRTYEITLQSGAKTLNSFHLKQCVKRYSSFDFLTEVVSKVPDLGGADSCGDERGLPRRRKSNGSDPENDESRSSKMAIRNANISPRGRGRGRGRGRGRPPTKRKEVGYVQFEDESSMFAEQGEPLPGEETVQEINGNETMPQSTQPPVEAPPTALAQATTSSKAEEANSDHQSDWPMPDAIGSIGVVPSGFGHLTVQVEDEDYDNED

SEQ ID NO: 281 - protein, 351 aa, Arabidopsis thaliana
MSPEMEFVKVLGKGTYGSVELFSHKQNDGSLLYNAVKIMDSENYGSIDQEFRILSELRGCPCIVQLCGNSLVQGIDCNGKKVYMMSMEYAAAGTLTNFIKRNRTKLSDSVIKDFTRMILQGLVSIHNHGYVHCDLKPDNILLFPLYDKDTWNCSYELKISDFGISTRAGDKSGCWRVDEPWVGTSIYMSPESVSDGTTVEKTLDLWSLGCIVLKMYTGKRPWLGFEKDVKSLLLNQKAPEIPETLPCDARLFLEKCFSRKPEERGSASELLLHPFLTGDEKKGSSVAGGERTGMVLRLRKPPPISKDIPTKPRKLKVISQKPQQLKKVSNKPLKVKIVPPRPPRSDFVPVL

SEQ ID NO: 282 - protein, 351 aa, Arabidopsis thaliana; identical to SEQ ID NO: 281

SEQ ID NO: 283 - protein, 344 aa, Arabidopsis thaliana
MATISFSHNHQSSDNRRGGSHHHRHGPVVEEIEGLIKVFNDGCVERPPIVPIVSPTIHPSSKATAFDIKLSNDTWTRVYIPDAAAASPSVTLPLLVYFHGGGFCVGSAAWSCYHDFLTSLAVKARCVIVSVNYRLAPEHRLPAAYDDGVNVVSWLVKQQISTGGGYPSWLSKCNLSNVFLAGDSAGANIAYQVAVRIMASGKYANTLHLKGIILIHPFFGGESRTSSEKQQHHTKSSALTLSASDAYWRLALPRGASRDHPWCNPLMSSAGAKLPTTMVFMAEFDILKERNLEMCKVMRSHGKRVEGIVHGGVGHAFHILDNSSVSRDRIHDMMCRLHNFIHPS

SEQ ID NO: 284 - protein, 93 aa, Arabidopsis thaliana; identical to SEQ ID NO: 277

SEQ ID NO: 285 - protein, 294 aa, Arabidopsis thaliana
MAIPTETQHQEKEASDASAAAAQKRWTLSDFDIGKPLGRGKFGHVYLAREKRSNHVVALKVLFKSQLQQSQVEHQLRREVEIQSHLRHPNILRLYGYFYDQKRVYLILEYAARGELYKDLQKCKYFSERRAATYVASLARALIYCHGKHVIHRDIKPENLLIGAQGELKIADFGWSVHTFNRRRTMCGTLDYLPPEMVESVEHDASVDIWSLGILCYEFLYGVPPFEAMEHSDTYRRIVQVDLKFPPKPIISASAKDLISQMLVKESSQRLPLHKLLEHPWIVQNADPSGIYRV

SEQ ID NO: 286 - protein, 294 aa, Arabidopsis thaliana; identical to SEQ ID NO: 285

SEQ ID NO: 287 - protein, 413 aa, Arabidopsis thaliana
MGLCWGSPSDSPPTTTPSSTGNISSGTFKSSNNTTTTGTSRGSNISSNSGFSVASGEDAYPDGQILPIPNLRIFSLAELRASTRNFRSENVLGEGGFGKVFKGWLEDKTPGKQSNGTVIAVKKLNAESFQGFEEWQCEVNFLGRVSHPNLVKLLGYCLEGEELLLVYEYMQKGSLENHLFRKGSAVQPLSWEIRLKIAIGAAKGLAFLHASEKQVIYRDFKASNILLDGSYNAKISDFGLAKLGPSASQSHITTRVMGTHGYAAPEYVATGHLYVKSDVYGFGVVLAEILTGLHALDPTRPTGQHNLTEWIKPHLSERRKLRSIMDPRLEGKYPFKSAFRVAQLALKCLGPEPKNRPSMKEVVESLELIEAANEKPLERRTTRASPSIRQQQGHYRPQQLSSFRPRQNVSRAH

SEQ ID NO: 288 - protein, 413 aa, Arabidopsis thaliana; identical to SEQ ID NO: 287

SEQ ID NO: 289 - protein, 180 aa, Arabidopsis thaliana
MASSLIFLLLVTLTFSASTLISAKSNTTTIIESTCKTTNYYKFCVSALKSDPRSPTADTKGLASIMVGVGMTNATSTANYIAGNLSATVKDTVLKKVLQDCSEKYALAADSLRLTIQDLDDEAYDYASMHVLAAQDYPNVCRNIFRRVKGLAYPVEIRRREASLRRICGVVSGILDRLVE

SEQ ID NO: 290 - protein, 180 aa, Arabidopsis thaliana; identical to SEQ ID NO: 289

SEQ ID NO: 291 - protein, 311 aa, Saccharomyces cerevisiae
MLRITVKTLQQRASFHHSFKHISVPDLHTRAQNDQTNCYCQEINARLPSKTDPLDPHIKLPHRTPNYNKHVLLLSPGDRFAQPWKVAWNHNLDTNTNRPYNAISKLRSHLGGSPGILINAVHLQNEFIPRPKQHDEWLYFFVIPDMKLYVIKETDIEEFASFLDEGAIQAPKLSFQDYLSGKAKASQQVHEVHHRKLTRFQGETFLRDWNLVCGHYKRDAKCGEMGPDIIAAFQDEKLFPENNLALISHIGGHIFAGNVIFYKLFGREKMQNKLDSLWFGKVYPHNLKLLCENLENGKIIDEMYRGGISMN

SEQ ID NO: 292 - protein, 311 aa, Saccharomyces cerevisiae; identical to SEQ ID NO: 291

SEQ ID NO: 293 - protein, 535 aa, Arabidopsis thaliana
MVITANDLSKWENFPKGLKVLLLLNGCDSDGDGSSAAETRSELESMDYIVTTFTDETEALSAVVKNPESFYIAIVEVNMSAESESFKFLEAAKDVLPTIMISTDHCITTTMKCIALGAVEFLQKPLSPEKLKNIWQHVVHKAFNDGGSNVSISLKPVKESVVSMLHLETDMTIEEKDPAPSTPQLKQDSRLLDGDCQENINFSMENVNSSTEKDNMEDHQDIGESKSVDTTNRKLDDDKVVVKEERGDSEKEEEGETGDLISEKTDSVDIHKKEDETKPINKSSGIKNVSGNKTSRKKVDWTPELHKKFVQAVEQLGVDQAIPSRILELMKVGTLTRHNVASHLQKFRQHRKNILPKDDHNHRWIQSRENHRPNQRNYNVFQQQHRPVMAYPVWGLPGVYPPGAIPPLWPPPLQSIGQPPPWHWKPPYPTVSGNAWGCPVGPPVTGSYITPSNTTAGGFQYPNGAETGFKIMPASQPDEEMLDQVVKEAISKPWLPLPLGLKPPSAESVLAELTRQGISAVPSSSCLINGSHRLR

SEQ ID NO: 294 - protein, 470 aa, Arabidopsis thaliana
MYIYTYTKSYVFPQMDQEEEEIEIPNYFICPISLEIMKDPVTTVSGITYDRQNIVKWLEKVPSCPVTKQPLPLDSDLTPNHMLRRLIQHWCVENETRGVVRISTPRVPPGKLNVVEEIKNLKKFGQEALGREETLQKLEVLAMDGNNRRLMCECGVHKSLILFVVKCTSEDEDGRRRIKGLDESLRLLHLIGIPSNDAKTILMENDRVMESLTWVLHQEDFLSKAYTIVLLRNLTEYTSSHIVERLNPEIFKGIIGFLKDVVNSVNRTSPTVRETVQSSSRPSLGKTEPSKLDHSLVIKQAVTAALMILLETSSWSRNRSLLVDLGAVSELIELEISYTGEKRITELMLGVLSRLCCCANGRAEILAHRGGIAVVTKRLLRVSPAADDRAISILTTVSKFSPENMVVEEMVNVGTVEKLCSVLGMDCGLNLKEKAKEILKDHFDEWKKFPCIDITLLTKLLSISPKGPKI

SEQ ID NO: 295 - protein, 297 aa, Arabidopsis thaliana
MKSRKSYGHLLSPVGSPPLDNESGEAAAAAAAGGGGCGSSAGYVVYGGGGGGDSPAKEQDRFLPIANVSRIMKRSLPANAKISKESKETVQECVSEFISFVTGEASDKCQREKRKTINGDDLLWAMTTLGFEAYVGPLKSYLNRYREAEGEKADVLGGAGGAAAARHGEGGCCGGGGGGADGVVIDGHYPLAGGLSHSHHGHQQQDGGGDVGLMMGGGDAGVGYNAGAGSTTTAFYAPAATAASGNKAYCGGDGSRVMEFEGIGGEEESGGGGGGGERGFAGHLHGVQWFRLKRNTN

SEQ ID NO: 296 - protein, 576 aa, Brassica napus
MAASFSVPSMIMEEEGRFEAEVAEVQTWWNSERFKLTRRPYTARDVVALRGHLKQGYASNEMAKKLWRTLKSHQANGTASRTFGALDPVQVTMMAKHLDTIYVSGWQCSSTHTSTNEPGPDLADYPYDTVPNKVEHLFFAQQYHDRKQREARMSMSREERAKTPFVDYLKPIIADGDTGFGGTTATVKLCKLFVERGAAGVHIEDQSSVTKKCGHMAGKVLVAVSEHINRLVAARLQFDVMGTETVLVARTDAVAATLIQSNIDSRDHQFILGVTNPSLRGKSLSSLLAEGMAVGKNGPALQAIEDQWLSSARLMTFSDAVVEALKRMNLSENEKSRRVNEWLNHARYENCLSNEQGRELAAKLGVTDLFWDWDLPRTREGFYRFQGSVTAAVVRGWAFAQIADLIWMETASPDLNECTQFAEGVKSKTPEVMLAYNLSPSFNWDASGMTDQQMMEFIPRIARLGYCWQFITLAGFHADALVVDTFAKDYARRGMLAYVERIQREERSNGVDTLAHQKWSGANYYDRYLKTVQGGISSTAAMGKGVTEEQFKETWTRPGAAGMGEGTSLVVAKSRM

SEQ ID NO: 297 - protein, 572 aa, Zea mays
MASPFSVPSLIMEEEGRFEAEVAEVESWWGTERFRLTKRPYTARDVVLLRGTLRQSYASGEMAKKLWRTLKAHQAGGTASRTFGALDPVQVTMMAKHLDTIYVSGWQCSSTHTSTNEPGPDLADYPYDTVPNKVEHLFFAQIYHDRKQREARMSLPRAERARAPYVDFLKPIIADGDTGFGGATATVKLCKLFVERGAAGVHLEDQSSVTKKCGHMAGKVLVAVSEHVNRLVAARLQFDVMGVETVLVARTDAVAATLIQTNVDARDHQFIVGATNPGLRGQSLAAVLSAGMSAGKSGRELQAIEDEWLAAARLKTFSECVRDAIAGLGVAGQEKQRRLQEWDRATGGYDRCVSNDQARDIAASLGVTSVFWDWDLPRTREGFYRFRGSVAAAVVRGRAFAPHADVLWMETSSPNVAECTAFAEGVKAACPEAMLAYNLSPSFNWDASGMTDAEMAAFIPSVARLGYVWQFITLAGFHADALVTDTFARDFARRGMLAYVERIQREERINGVETLEHQKWSGANFYDRVLKAVQGGISSTAAMGKGVTEEQFKDPRPATGSSGLQVMAKSRI

SEQ ID NO: 298 - protein, 331 aa, Zea mays
MDAAVSTLTALAIFASTVEHAAYRSVQGYRVVGRKGGGWVRWERWVERQFVLSLSFPRCVEVALPAAAPRILPAGWRSRPVFREGQTVDTWRCIVAFDSVAAVAPSSPPPPVLSPFVNPQLQYLSNLYNDLLMVFRFREEKTVPQLVNSKQPIRCGEQGKTSDLGDASESDSDGDCQSGKELAPPVQKHTRANRKHIDSITLVDIAQYFHLPIRDASKTLKIGVSILKRKCRQYGIPRWPHRKIKSLDSLIHDLEFVLAREDEDEEEEKQLQKDRLAAAINALTKRKSMLESEKETIQQKPAMDLMAETKLFREDVFKRRYRAKSSVMDMD

SEQ ID NO: 299 - protein, 196 aa, Glycine max
MSQLGAVLRTQREPRRSTILGLLTEQMDGVDSGTRRRRSFKERFGFIGMGCCGATWGFRSDALSVTQGEQQQQETDPECVGPAGLGSGMNLAAALAAERQLRGPQEEAVRAPGTPWRVSLMRLLEETEAEKEKEKEKEENVVGNDSVCCVCMGRKKGAAFIPCGHTFCRVCSRELWLNRGSCPLCNRSILEILDIF

SEQ ID NO: 300 - protein, 232 aa, Arabidopsis thaliana
MLRSSIRLLYIRRTSPLLRSLSSSSSSSSSKRFDSAKPLFNSHRIISLPISTTGAKLSRSEHSMAASSEPKSLYDFTVKDAKGNDVDLSIYKGKVLLIVNVASQCGLTNSNYTELAQLYEKYKGHGFEILAFPCNQFGNQEPGTNEEIVQFACTRFKAEYPIFDKVDVNGDKAAPVYKFLKSSKGGLFGDGIKWNFAKFLVDKDGNVVDRFAPTTSPLSIEKDVKKLLGVTA

SEQ ID NO: 301 - protein, 232 aa, Arabidopsis thaliana; identical to SEQ ID NO: 300

SEQ ID NO: 302 - protein, 152 aa, Zea mays
MAAEEDVKQRQIIENRARNISHNVRCTECGSQSIEDSQADVAILLRKLIRDEIKAGKSDKEIYKKLEDDYGETVLYAPKFDLQTAGIWLSPVIVGGIAAGIWAYQRHRQRTNVHIMALNLVRGVPLTPREKETMLDILTPPPAPRKWWWPGK

SEQ ID NO: 303 - protein, 344 aa, Arabidopsis thaliana
MFSCIACTKADGGEEVEHGARGGTTPNTKEAVKSLTIQIKDMALKFSGAYKQCKPCTGSSSSPLKKGHRSFPDYDNASEGVPYPFMGGSAGSTPAWDFTNSSHHPAGRLESKFTSIYGNDRESISAQSCDVVLDDDGPKEWMAQVEPGVHITFASLPTGGNDLKRIRFSREMFDKWQAQRWWGENYDKIVELYNVQRFNRQALQTPARSDDQSQRDSTYSKMDSARESKDWTPRHNFRPPGSVPHHFYGGSSNYGPGSYHGGPPMDAARTTTSSRDDPPSMSNASEMQAEWIEEDEPGVYITIRQLSDGTRELRRVRFSRERFGEVHAKTWWEQNRERIQTQYL

SEQ ID NO: 304 - protein, 405 aa, Zea mays
MLTCIACSKQLPGDAPPLREPSDDDDRANAGGGGESAATPGTRQAIRVLTAQIKDMALKASGAYRHCKPCAGSSSPAASRRQQPYYHGAYAESGSDRFHCAYQRAGSSAASTPGLRTGGAMSSGDITPSVSARTDFLADDEEGDDEEGTATGSSEEDEEKEWVAQVEPGVLITFLSLPRGGNGLKRIRFSREMFNKWQAQRWWTENYEKVMELYNVQKSNSQVDPLPSIPRSDSEISKDDTPATAPLNKGQLLRTSPRPLKGSEAIGYSSSDCPQHQSSHFRNVYRKDRYLGHQFCDPVELASTPELSSISGAKTETSIGASVRTSSSPEEVDGSGELSASVSNASDEEREWVEEDEPGVYITIRALPGSIRELRRVRFSRERFSEMHARLWWEENQARIYEQYL

SEQ ID NO: 305 - protein, 624 aa, Zea mays
MNAVEPSAAAIAEDPITPAASAAPYPGRLREALTALSEACESGNFNASETASFTISDILDTAAGVSGELDDGSDDSQDASRSGASEVLLREVLEFLSRPSSISNQMALDALSLVLPKPVAKLGARMGRCRDVAAAILKFFVTNCNPRDMLSILCEALDAPMELPNGLSSFVLLLDALAKVFTLIQRRHIEQVKVALPVVLKVMHATVSECVEEHGSAAVDLFNAAHGVGKAIQEMCISMFNKNKDLCAILGLYSLQNIALVSRSRQQDILSACGSVVFQSFRFLKTSGFTYRGLLTGSDVTAATVELSKEEDADFMEHFSFAMDGAALSVVWTLMHDDKDMSKYAGEELELAVKEVQGNHMEKWEAINMLKYVLSSIHYPWIIKSHSLNLMLILSGEDHVEEINNHVDFTCFAHRIFETLKAIESVMIAAPMALVRKKAFAALKKVISMVPSSQRFDILHGLVNNSTSPALTAILLDLVRQEVSRESRQADNDCIEDEGFRGNGLPRWASHALELVELILRPPEGGPPCLPDHSEQVISALNLLRFILIIDSRGQRSAKLFRKETLHKVHSEWLTPLRPIAEQIQLENEKDADEITKQIVCMLNLVQLVLYRCIELVEEKMKGC

SEQ ID NO: 306 - protein, 66 aa, Thermotoga maritima MSB8
MRGKVKWFDSKKGYGFITKDEGGDVFVHWSAIEMEGFKTLKEGQVVEFEIQEGKKGPQAAHVKVVE

SEQ ID NO: 307 - protein, 66 aa, Thermotoga maritima MSB8
MRGTVKWFDSKKGYGFITMENGEDIFVHWSAIQMDGFKTLRENETVEFEVQKGTKGPQAVNVRPVR

SEQ ID NO: 308 - protein, 66 aa, Thermoanaerobacter tengcongensis MB4
MVRGKVKWFNAEKGYGFIEREDGTDVFVHYSAIEGEGFKTLEEGQAVEFEVVQAAKGPQASKVRKL

SEQ ID NO: 309 - protein, 66 aa, Bacillus caldolyticus
MQRGKVKWFNNEKGYGFIEVEGGSDVFVHFTAIQGEGFKTLEEGQEVSFEIVQGNRGPQAANVVKL

SEQ ID NO: 310 - protein, 80 aa, Triticum aestivum
MQITGKVKWFNESKGFGFITPDDGSKDVFVHFTAIAGNGFKTLAEGQRVEFEIQDGQKGPSAVNVKALELEEDKSISSKL

SEQ ID NO: 311 - protein, 78 aa, Zea mays
MGLWTLLEGFLLLANALAILNEDRFLGPRGWSMSEVSGNGQTKSFKGQIVGLIYATQFLRMPLIALNVLIIVVKLVSG

SEQ ID NO: 312 - protein, 171 aa, Arabidopsis thaliana
MLFFNPGFTCMQEEFQLALFKSRKRENIFANRIFDMFDVKRKGVIDFGDFVRSLNVFHPNASLEDKIDFTFRLYDMDCTGYIERQEVKQMLIALLCESEMKLADETIEIILDKTFEDADVNQDGKIDKLEWSDFVNKNPSLLKIMTLPYLRDITTTFPSFVFHSEVDEIAT

SEQ ID NO: 313 - protein, 857 aa, Arabidopsis thaliana
MAEKVSEDVMLLHGDLDLKIVKARRLPNMDMFSEHLRRLFTACNACARPTDTDDVDPRDKGEFGDKNIRSHRKVITSDPYVTVVVPQATLARTRVLKNSQEPLWDEKFNISIAHPFAYLEFQVKDDDVFGAQIIGTAKIPVRDIASGERISGWFPVLGASGKPPKAETAIFIDMKFTPFDQIHSYRCGIAGDPERRGVRRTYFPVRKGSQVRLYQDAHVMDGTLPAIGLDNGKVYEHGKCWEDICYAISEAHHMIYIVGWSIFHKIKLVRETKVPRDKDMTLGELLKYKSQEGVRVLLLVWDDKTSHDKFGIKTPGVMGTHDEETRKFFKHSSVICVLSPRYASSKLGLFKQQVVGTLFTHHQKCVLVDTQAVGNNRKVTAFIGGLDLCDGRYDTPEHRILHDLDTVFKDDFHNPTFPAGTKAPRQPWHDLHCRIDGPAAYDVLINFEQRWRKATRWKEFSLRLKGKTHWQDDALIRIGRISWILSPVFKFLKDGTSIIPEDDPCVWVSKEDDPENWHVQIFRSIDSGSVKGFPKYEDEAEAQHLECAKRLVVDKSIQTAYIQTIRSAQHFIYIENQYFLGSSYAWPSYRDAGADNLIPMELALKIVSKIRAKERFAVYVVIPLWPEGDPKSGPVQEILYWQSQTMQMMYDVIAKELKAVQSDAHPLDYLNFYCLGKREQLPDDMPATNGSVVSDSYNFQRFMIYVHAKGMIVDDEYVLMGSANINQRSMAGTKDTEIAMGAYQPNHTWAHKGRHPRGQVYGYRMSLWAEHLGKTGDEFVEPSDLECLKKVNTISEENWKRFIDPKFSELQGHLIKYPLQVDVDGKVSPLPDYETFPDVGGKIIGAHSMALPDTLTT

SEQ ID NO: 314 - protein, 711 aa, Arabidopsis thaliana
MPALACVDTSFVPPAYAFSDTAGDVFIPASSPTSAAVVVDRWSPSLSSSLYRIDGWGAPYFIANSSGNISVRPHGSETLPHQDIDLLKIVKKVTGPKSSGGLGLQLPLIVRFPDVLKNRLECLQSAFDYAIKSQGYDSHYQGVYPVKCNQDRFVVEDIVKFGSSFRFGLEAGSKPEILLAMSCLCKGSPDAFLVCNGFKDAEYISLALLGRKLALNTVIVLEQEEELDLVIELSQKMNVRPVIGLRAKLRTKHSGHFGSTSGEKGKFGLTTTQIVRVVRKLRQSGMLDCLQLLHFHIGSQIPSTSLLSDGVAEAAQLYCELVRLGAHMKVIDIGGGLGIDYDGSKSGESDLSVAYSLEEYAEAVVASVRVVCDRSSVKHPVICSESGRAIVSHHSVLIFEAVSADKPMVHQATPGDIQFLLEGNEEARANYEDLYAAVMRGDHESCLLYVDQLKQRCVEGFKEGVLSIEQLASVDGLCEWVLKAIGASDPVHTYNINLSVFTSIPDLWGIDQLFPIVPIHKLDQRPGARGILSDLTCDSDGKINKFIGGESSLPLHELDKNGSGGRYFLGMFLGGAYEEALGGVHNLFGGPSVVRVSQSDGPHSFAVTRAVPGQSSADVLRAMQHEPELMFQTLKHRAEEMMHTKGGSEGENEEEEEDDEFNNVAASLDRSFHNMPYLATEQASPSNSLSAAISNLGFYYCDEDVYDYISA

SEQ ID NO: 315 - protein, 293 aa, Saccharomyces cerevisiae
MAQEITHPTIVDGWFREISDTMWPGQAMTLKVEKVLHHEKSKYQDVLIFKSTTYGNVLVLDNVIQATERDEFAYQEMIAHLALNSHPNPKKVLVIGGGDGGVLREVVKHDSVEEAWLCDIDEAVIRLSKEYLPEMAASYSHPKVKTHIGDGFQFLRDYQNTFDVIITDSSDPEGPAETLFQKEYFQLLNSALTEKGVITTQAESMWIHLPIIKDLKKACSEVFPVAEYSFVTIPTYPTGTIGFMVCSKDKTCNVKKPLREISDEKEAELYRYYNKKIHEASFVLPTWAAKELN

SEQ ID NO: 316 - protein, 508 aa, Saccharomyces cerevisiae
MNTVSPAKKKVIIIGAGIAGLKAASTLHQNGIQDCLVLEARDRVGGRLQTVTGYQGRKYDIGASWHHDTLTNPLFLEEAQLSLNDGRTRFVFDDDNFIYIDEERGRVDHDKELLLEIVDNEMSKFAELEFHQHLGVSDCSFFQLVMKYLLQRRQFLTNDQIRYLPQLCRYLELWHGLDWKLLSAKDTYFGHQGRNAFALNYDSVVQRIAQSFPQNWLKLSCEVKSITREPSKNVTVNCEDGTVYNADYVIITVPQSVLNLSVQPEKNLRGRIEFQPPLKPVIQDAFDKIHFGALGKVIFEFEECCWSNESSKIVTLANSTNEFVEIVRNAENLDELDSMLEREDSQKHTSVTCWSQPLFFVNLSKSTGVASFMMLMQAPLTNHIESIREDKERLFSFFQPVLNKIMKCLDSEDVIDGMRPIENIANANKPVLRNIIVSNWTRDPYSRGAYSACFPGDDPVDMVVAMSNGQDSRIRFAGEHTIMDGAGCAYGAWESGRREATRISDLLK

SEQ ID NO: 317 - protein, 506 aa, Zea mays
MAASAKGRLVPVLAVAAALAAVLLYRAPFSKSLGGEGCSLLPHDHFWIASDRVVTLGRVGPAAVEVKGGLINAIAVGDYRSFVLRRPLLDYGDAVIMPGLIDVHAHLDEPGRAEWEGFSNGTRAAAAGGITTLVDMPLNSFPSTVSEETLKLKLEAARDKLYVDVGFWGGLVPENAFNPSALEGLLKAGVLGLKSFMCPSGINDFPMTNSTHIEEGLVTLAKYKRSLLIHAERIPEAEDHDLQEDELDPRSYMTYLKSRPPSWEEAAIRDLQRAMKDTELGGRSEGAHIHIVHLSDAKTSLELMKDAKRSGASLSIETCPHYLAFSSEEVPDGDTRFKCSPPIRDDTNRENLWKALLDGHIDMLSSDHSPSTPDLKLMEEGDFLRAWGGISSLQFVLPVTWSYGRKYGVTLNQLASWWSERPAKLAGQKNKGAILPGYHADIVVWKPETEFQLDNNHAIYHKHQNISAYLGKQLSGKVLSTFVRGNLVFAEDKHANAACGVPILAK

SEQ ID NO: 318 - protein, 129 aa, Zea mays
MACPTKKGMTGEPSSPCSSASASTLPEHHQTVWTSPPKRPAGRTKFRETRHPVFRGVRRRGSAGRWVCEVRVPGRRGCRLWLGTFDTAEAAARAHDAAMLALAGAGACCLNFADSAWLLAVPASCASLA

SEQ ID NO: 319 - protein, 137 aa, Zea mays
MDMGRLQLQLQHAASSSSTSASSSSSSEQNKLAWSPSSPQPPKKRPAGRTKFRETRHPVFRGVRRRGAAGRWVCEVRVPGRRGARLWLGTYLGAEAAARAHDAAMLALGRGAACLNFPDSAWLLAVPPPPALSGGLD

SEQ ID NO: 320 - protein, 73 aa, Arabidopsis thaliana
MVFPACVQCGTRQNPCRCKVVGPTLGFVAFLITGIIEWPVGAVVYIFKHAKGRRIMGHPARKVYPKVSRSIPI

SEQ ID NO: 321 - protein, 285 aa, Saccharomyces cerevisiae
MELSSPSKKTTTSPINIPGGNRDNLIIGPHSHSFKTDPFSSNNSSLLSKISTNPSLESPFSSKSLLDCSPVQAVKKSLESEAKTHSLDEETNEQTDVKILNIADFPTDELILMISALLNRIITANDETTDVSQQVSEETEDELLTPILAFYGKNVPEIAVVQYLERIQKYCPTTNDIFLSLLVYFDRISKNYGHSSERNGCAKQLFVMDSGNIHRLLITGVTICTKFLSDFFYSNSRYAKVGGISLQELNHLELQFLILCDFKLLVSVEEMQKYANLLYKFWNDQ

SEQ ID NO: 322 - protein, 599 aa, Agrobacterium tumefaciens
MQGDKPVPHRPGRSDGSTGPMLDKGGGRGKLSSPERFREWTRKTMAKQDELVFVPLGGVGEIGMNLALYGYGPESKRQWIMVDCGVTFAGPDLPGVDLVLPDISYIAEQKKNLKGIIITHAHEDHYGAMNDLWPGLNVPVYASPFTAGMLEAKRAYEGTRAEIPVTIFKAGDRINVGPFEIEAVGVNHSIPEPMSLIIRTPLGNVIHTGDWKIDEAPSLGPLTDEARFRAIGEEGVLALMCDSTNALRDGVSPSEHEVSEGLRQIIESAEGRVAVTTFSSNVGRIRSIAQAAEAAGREVLLLGSSLKRVVNVSQDLGIMEGIKPFLAEDEYGYIPRDRVVVILTGSQGEPRAALAKLSRDEMRNVALASGDTVVFSSRAIPGNEKAIIEIKNGLIEQGVHIVTDNEALVHVSGHPRRNELLRMYEWTKPQILVPVHGEAAHLVAQKELAEQAGISQVPKVRNGNVLRLAPGPAEVINDVPHGRVFKDGNLVGDMDEMGISNRRKLSFAGHVAVNVVLDSRYDFLGDPDVVPFGLPEFDDEDEAMEDTLYDAVLGAVESIPRARRKDLALLRESVRRAVRAAANQSWGKKPIVTVFVTKV

SEQ ID NO: 323 - protein, 216 aa, Arabidopsis thaliana
MEPRINDLQVESRVHELLDFPVHTNQISSAIYECPNDHIENPKKKPYNCPHSGAKCDVTGDIQRLLLHLRNDHNVEMSDGRSFSHRYVHHDPKHLHHATWMLTLLDCCGRKFCLYFEAFHLRKTPMYMAFMQFMGDEEEAMSFSYSLQVGGNGRKLTWQGVPRSIRDSHKTVRDSQDGLIITRKLALFFSTDNNTTDKELKLKVSGRVWREQPVSI

SEQ ID NO: 324 - protein, 216 aa, Arabidopsis thaliana; identical to SEQ ID NO: 323

SEQ ID NO: 325 - protein, 218 aa, Arabidopsis thaliana
MSSINITNVTVLDNPAPFVNPFQFEISYECLTSLKDDLEWKLIYVGSAEDETYDQVLESVLVGPVNVGNYRFVLQADSPDPLKIREEDIIGVTVLLLTCSYMDQEFIRVGYYVNNDYDDEQLREEPPTKVLIDKVQRNILTDKPRVTKFPINFHPENEQTLGDGPAPTEPFADSVVNGEAPVFLEQPQKLQEIEQFDDSDVNGEAIALLDQPQNLQET

SEQ ID NO: 326 - protein, 102 aa, Arabidopsis thaliana
MHGRTAMAVACLLCMTALLLVQDVQSRRLLWTEQEKKQSHGGLGNHGAADRRSTSLEPCSGAMGGGGTGSADKQGEFPCDDDTSKWTELHTDYIYTQDFKHP

SEQ ID NO: 327 - protein, 569 aa, Arabidopsis thaliana
MANSKKQAWFFYTTGLPSDIEIEVDDITFHLHKFPLMSKSKKLHQLITEQEQSKVYSHIKLENFPGGSEIFEMVIKISYGFKVDISVSTAVPLRCAAEYLEMTEEYSPENLISKTEKFLSEFVFTNVQESIKALKACESVSSLAESLCITEQCIDSIVFQASSTDPSSFYGWPINNGGIFTVDRKKQSKDSKTELWFEDLTELSFPIFRRVILSMKSSVLSPEIVERSLLTYAKKHIPGISRSSSASSSSSSSSTTIASENQQRELLETITSDLPLTATTTRSLFGLLRAAIILNASENCRKFLEKKIGSNLEKATLDDLLIPSYSYLNETLYDIDLVERLLRRFLENVAVSSSSLTVVGRLIDGVLGEIASDANLKPEQFYNLAVLLPVQARVYDDGLYRAVDIYFKTHSWILEEEKEKICSVMDCRKLTVEGCTHAAQNERLPLRAVVQVLFLEQLQLRQVITGTLLTEEDGDKTVVDLGRWKEAVKENQVLRLDMDTMRTRVNQLEKECLYLKKVIAKIDKESLLKAKHGAGKWSIGKKFGCKFSAQVCDSQEATMVDRRSRRFLS

SEQ ID NO: 328 - protein, 196 aa, Arabidopsis thaliana
MATALASKLSKGRSLLGGLCNAFSGLMNSSSNGMMNGSILSQQQHRTFIQMGTILKCVDNSCAKEVMCIQSLRGKKGARLGDIIVGSVKEANPIVQKKVKKDAIPKGKVKKGMVVYGVVVRAAMPKGRADGSQVKFDDNAIVVVGIKEKKGQNNSHGSKRKMEYNQPTGTRVFGPVPHEMRLRKQLKILSLAQHIV

SEQ ID NO: 329 - protein, 479 aa, Synechocystis sp. PCC 6803
MASSMLSSATMVASPAQATMVAPFNGLKSSAAFPATRKANNDITSITSNGGRVNCMQVWPPIGKKKFETLSYLPDLTDSGGRVNCMQAMGKNLLEQLRQFTVVVADTGDIQAIETFTPRDSTTNPSLITAAAQMPQYQEIVDSTLLKAKDEAGENASIKDIVRLAFDRLAVAFGLKILQIIPGRVSTEVDARLSYDTEATIAKARYLIGEYAKAGIDKKRILIKIASTWEGIKAAEVLEQEGIHCNLTLLFGLHQAIACAEAKVTLISPFVGRILDWYKKSTGKEYDSHEDPGVQSVTTIYNYYKRFGYKTEVMGASFRNIGEIIELAGCDLLTISPQLLDQLRNTEGDLPRKLDPATVPQDIEKIVMDKATFDKMHAEDPMASEKLAEGIAGFTKALEVLEHLLEERLKVLDGQEHIKHGAEEIFHAYDLDGDGFITREEWAGTDVVFDALDRDHDGKITAAEMSAGLGAAFRLASVG

SEQ ID NO: 330 - protein, 316 aa, Arabidopsis thaliana
MDPALLDDVIRRLLEVKNLKPGKNAQLSESEIKQLCAAAKEIFLQQPNLLELEAPIKICGDVHGQYSDLLRLFDYGGYPPQANYLFLGDYVDRGKQSLETICLLLAYKVKYPENFFLLRGNHECASVNRIYGFYDECKRRFSVKLWKTFTDCFNCLPVSALIDEKILCMHGGLSPELNKLEQILNLNRPTDVPDTGLLCDLLWSDPSNEATGWAINDRGVSFTFGPDKVSEFLEKHDLDLICRAHQVVEDGYEFFASRQLVTIFSAPNYCGEFDNAGAMMSVDDTLMCSFQILKPARKMMGGSTNNKSGFKSFRGW

SEQ ID NO: 331 - protein, 323 aa, Desulfitobacterium hafniense
MTNTVRKIAVLTSGGDAPGMNAAIRAVVRKGIYHGLEVFGIRKGYEGLIHGEFITMHLGAVADIIHRGGTMLMTARSQEMLTPEGQKNAAAQLRYRGIDALIVIGGDGSFRGAQTLSAQGIAIVGIPGTIDNDITGTDLTIGFDTAVNNVVQAVSKIRDTATSHDRTFLVEVMGRDCGNIALQSGVACGAESILVPEIEPDLDDIVAKLERGHQRGKHHSIIMVAEGAMSAWNLGEELRQRTGFETRVTILGHIQRGGNPSALDVVLASQMGGKAVEILCAGETDRMTACVNQEIQSLPLEVAYGERKPFNKVLYDLANQLAI

SEQ ID NO: 332 - protein, 323 aa, Desulfitobacterium hafniense; identical to SEQ ID NO: 331

SEQ ID NO: 333 - protein, 421 aa, Arabidopsis thaliana
MDSISLLPDDFLLRILSLLPTKDVLNTSVLSKRWRYLWKLVPKLQYSLIDKNADHGTFVRFVDRSLLLSMAPVLESLHLKLGRQCSEVDIGFWVRIAVEKGLCELDFDYEHYKTEPCRLPQSLFTCGTLTVLKLKNVSLKDVQFPVCFKLLKTLHLEYVIFLDKETPQKLLSSCPILEVFDLTRDDDDVDNVMSFSVMVPSLQRFIYCGGSGAELVMNTPSLKYLKLSGCGYECMIGNLPEIVEAHVEVACSTDDILTSLASVKRLLLCLPTEPELPTGTIFHQLEHLEFCSCCTEWDILMFMLKHSPKLRSLKLNETHGYTIVSQSDPMFHWEEPSSVPETLMFVLETLEWRNYRGLKMENELASFLLKHSRRLKIATFSPADCKQVRIELRTTVGMKYRILMELARLPRGSAECELVFG

SEQ ID NO: 334 - protein, 509 aa, Zea mays
MIANGLRKSSAASSQVSKLVKYIASAGSLQGGHSLSEPSARHYSSEPSLQATEENGFKGHSMLAPFTAGWQSTDVHPLVIERSEGSYVYDSNGKKYIDALAGLWCTALGGNEPRLVKAATEQLNKLPFYHSFWNRTTKPSLDFANDILSMFTAREMGKVFFTNSGSEANDSQVKLVWYYNNALGRPDKKKFIARSKSYHGSTLIAASLSGLPALHQKFDLPAPFVLHTDCPHYWRFRLPDETEEEFSTRLANNLENLVLKEGPETIAAFIAEPVMGAGGVILPPKTYFEKIQAVLKKYDILLIADEVITAFGRLGTMFGCDMYNIKPDLVSIAKALSSAYMPIGAILVSPEITDVIYSQSNKLGSFAHGFTYSGHPVSCAVAVETLKIYKERNIVEHVNKIAPRFQEGIKAFSGSPIVGEIRGLGLILGTEFVDNKSPNDPFPAEWGVGSIFGAECEKRGMLIRVAGDSIMLSPPLIMTPNEVEEIISKFGDALKATEERIGELKSRKN

SEQ ID NO: 335 - protein, 368 aa, Arabidopsis thaliana
MARRSVSIFNRLLANPPSPFTSLSRSITYMPRPGDGAPRTVTLIPGDGIGPLVTGAVEQVMEAMHAPVHFERYEVLGNMRKVPEEVIESVKRNKVCLKGGLATPVGGGVSSLNMQLRKELDIFASLVNCINVPGLVTRHENVDIVVIRENTEGEYSGLEHEVVPGVVESLKVITKFCSERIARYAFEYAYLNNRKKVTAVHKANIMKLADGLFLESCREVAKHYSGITYNEIIVDNCCMQLVAKPEQFDVMVTPNLYGNLIANTAAGIAGGTGVMPGGNVGAEHAIFEQGASAGNVGNDKMVEQKKANPVALLLSSAMMLRHLRFPTFADRLETAVKQVIKEGKYRTKDLGGDCTTQEVVDAVIAALE

SEQ ID NO: 336 - protein, 181 aa, Arabidopsis thaliana
MENDDITVAEMKPKKRAGRRIFKETRHPIYRGVRRRDGDKWVCEVREPIHQRRVWLGTYPTADMAARAHDVAVLALRGRSACLNFSDSAWRLPVPASTDPDTIRRTAAEAAEMFRPPEFSTGITVLPSASEFDTSDEGVAGMMMRLAEEPLMSPPRSYIDMNTSVYVDEEMCYEDLSLWSY

SEQ ID NO: 337 - protein, 494 aa, Zea mays
MAPGSSSSRKAKALKASYRLVADNFLAVLAMVSVVAVLFAAWPISIEDLACRLHAVRPLHVLTAAILTAALAKLRRMSRPSDVYLVEYGCFWPKPCFRAPFATCLEHVRLLPYLVNEDDISWGWRLLQRSGIGEETCVPYAYHYLPPDRSFRASLDETELVIFSAVDDVFARTTAVTPADIGVVIVNCSIFTPTPVFTDMIVNRYKLRADVRSVNLSGMGCSAALISIGLARNMLQVAPPGTHALIVSTEILSSQYYVGMDRSMLLPNCLFRMGAAAMIMSNTAARGARFRLARVVRTVASARDAAYRCVFQVEDEESNTGIRLSKDLVPTAAQTLKSNIVAFGPLVLPASEKLLVALSILRRRLVQSSRGRVYRPDFRTAFEHFCIHAGGRGVIDEVQRGLGLSDEDVEASRMTLHRFGNTSSSSVVYELAYIEAKGSMRKGDRVWMISFGAGFDCSSVAWECIEPAADAAGPWADCIHRYPVQLPKLMEALD

SEQ ID NO: 338 - protein, 245 aa, Arabidopsis thaliana
MENEREKLIYLAKLGCQAGRYDDVMKSMRKVCELDIELSEEERDLLTTGYKNVMEAKRVSLRVISSIEKMEDSKGNDQNVKLIKGQQEMVKYEFFNVCNDILSLIDSHLIPSTTTNVESIVLFNRVKGDYFRYMAEFGSDAERKENADNSLDAYKVAMEMAENSLAPTNMVRLGLALNFSIFNYEIHKSIESACKLVKKAYDEAITELDGLDKNICEESMYIIEMLKYNLSTWTSGDGNGNKTDG

SEQ ID NO: 339 - protein, 245 aa, Arabidopsis thaliana; identical to SEQ ID NO: 338

SEQ ID NO: 340 - protein, 208 aa, Arabidopsis thaliana
MEKIVRSSSLILLVGLLLFMNFHGFVRIAEATKRRIEISDDLDDVEDNEEDESWKEWGKKATTPEFDPPPDFTNMGFDQIQEEMAKRTFGTVVGFVKLRLGVPRTKDVVIDIAMKWTKVLRTGGIGVRFMAVDRSTVMFNMQNGKLVTELREFVLSQEEAYEVKIGKQEFRRPGDPPFEDVFDKFQAEQRKDHEDGDGNKNDLTKDEL

SEQ ID NO: 341 - protein, 208 aa, Arabidopsis thaliana; identical to SEQ ID NO: 340

SEQ ID NO: 342 - protein, 200 aa, Arabidopsis thaliana
MSSKKIVLTSSDGESFKVEEVVARKLQIVGHIIEDDCATNKIPIPNVTGEILAKVIEYCKKHVEDDDDVVETHESSTKGDKTVEEAKKKPDDVAVPESTEGDDEAEDKKEKLNEWDAKFMKDFDIKTIFDIILAANYLNVQGLFDLCSKTIADYIKDMTPEEVRELFNIENDFTPEEEEAIRNENAWTFEQDGKQQVPKP

SEQ ID NO: 343 - protein, 247 aa, Arabidopsis thaliana
MYKWNLPYRKDDVETGREGGERSLYPTMLESPELRWGFIRKVYSIIAFQLLATIAVASTVVFVRPIAVFFATTSAGLALWIVLIITPLIVMCPLYYYHQKHPVNYLLLGIFTVALAFAVGLTCAFTSGKVILEAAILTTVVVLSLTVYTFWAAKKGYDFNFLGPFLFGALIVLMVFALIQIFFPLGRISVMIYGCLAAIIFCGYIVYDTDNLIKRYSYDEYIWAAVSLYLDIINLFLALLTIFRAAE

SEQ ID NO: 344 - protein, 247 aa, Arabidopsis thaliana; identical to SEQ ID NO: 343

SEQ ID NO: 345 - protein, 116 aa, Glycine max
MATLDSDVPMVPAGEPSSSAGPSSKKPKRFEIKKWNAVALWAWDIVVDNCAICRNHIMDLCIECQANQASATSEECTVAWGVCNHAFHFHCISRWLKTRQVCPLDNSEWEFQKYGH

SEQ ID NO: 346 - protein, 443 aa, Arabidopsis thaliana
MMVFVVFVMCRYKILEELGDGTCGSVYKAVNLETYEVVAVKKMKRKFYYWEECVNLREVKALRKLNHPHIIKLKEIVREHNELFFIFECMDHNLYHIMKERERPFSEGEIRSFMSQMLQGLAHMHKNGYFHRDLKPENLLVTNNILKIADFGLAREVASMPPYTEYVSTRWYRAPEVLLQSSLYTPAVDMWAVGAILAELYALTPLFPGESEIDQLYKICCVLGKPDWTTFPEAKSISRIMSISHTEFPQTRIADLLPNAAPEAIDLINRLCSWDPLKRPTADEALNHPFFSMATQASYPIHDLELRLDNMAALPNLELNLWDFNREPEECFLGLTLAVKPSAPKLEMLRNVSQDMSENFLFCPGVNNDREPSVFWSLLSPDENGLHAPVESSPLSLSFSPMQQHTVGPPQSSGFTMTSSMQPNMLDRPWMAVSAPFQQSHYL

SEQ ID NO: 347 - protein, 323 aa, Arabidopsis thaliana
MEAEAAAKRARESGDAAAAGAGEQAGISAVIPGWFSEISPMWPGEAHSLKVEKVLFQGKSDYQNVMVFQSSTYGKVLVLDGVIQVTERDECAYQEMITHLPLCSIKDPKKVLVIGGGDGGVLREVSRHSSVEQIDICEIDKMVVDVSKQFFPHLAVGFEDPRVSLHIGDGVAFLKNAPEGTYDAVIVDSSDPIGPAQELFEKPFFQSVARALRPGGVVCTQAESIWLHMHIIEDIVANCRQVFKGSVNYAWTTVPTYPSGVIGFMLCSTEGPTVDFQHPIFNIEDNEFSTKSKGPLKFYNSEIHSASFCLPSFAKRVIGSKAN

SEQ ID NO: 348 - protein, 250 aa, Arabidopsis thaliana
MTSASELFSTRRSRPGRSDPALESDTSSYRHHSHHHHRRHGVHHHNQRHDSDGCDPLRRPTPRLRRFFHHPIQERSRPIRDVQGTSQYLNTDSTDTETQSSSFVNLNGSERLPGAVLLARDRLFERLRGVSLSSNSRSNRVSLDDQRESSFHSIDGDPIFQLAGLQVTYECNKKPQGLTQDAINCLHRQTFSSAEVKSEMRDCSICLESFTKGDMLISLPCTHSFHSSCLNPWLRACGDCPCCRRAIAKE

SEQ ID NO: 349 - protein, 250 aa, Arabidopsis thaliana; identical to SEQ ID NO: 348

SEQ ID NO: 350 - protein, 158 aa, Arabidopsis thaliana
MSDEEHHFESSDAGASKTYPQQAGTIRKNGYIVIKNRPCKVVEVSTSKTGKHGHAKCHFVAIDIFTSKKLEDIVPSSHNCDVPHVNRTDYQLIDISEDGYVSLLTDNGSTKDDLKLPNDDTLLQQIKSGFDDGKDLVVSVMSAMGEEQINALKDIGPK

SEQ ID NO: 351 - protein, 158 aa, Arabidopsis thaliana
MSDDEHHFESSDAGASKTYPQQAGNIRKGGHIVIKGRPCKVVEVSTSKTGKHGHAKCHFVAIDIFTSKKLEDIVPSSHNCDVPHVNRVDYQLIDISEDGFVSLLTDNGSTKDDLKLPTDEALLTQLKNGFEEGKDIVVSVMSAMGEEQMCALKEVGPK

SEQ ID NO: 352 - protein, 197 aa, Arabidopsis thaliana
MSASRFVKCVTVGDGAVGKTCLLISYTSNTFPTDYVPTVFDNFSANVVVNGSTVNLGLWDTAGQEDYNRLRPLSYRGADVFILAFSLISKASYENVSKKWIPELKHYAPGVPIVLVGTKLDLRDDKQFFIDHPGAVPITTAQGEELRKQIGAPTYIECSSKTQENVKAVFDAAIRVVLQPPKQKKKKSKAQKACSIL

SEQ ID NO: 353 - protein, 528 aa, Arabidopsis thaliana
MVIGAAARVAIGGCRKLISSHTSLLLVSSQCRQMSMDAQSVSEKLRSSGLLRTQGLIGGKWLDSYDNKTIKVNNPATGEIIADVACMGTKETNDAIASSYEAFTSWSRLTAGERSKVLRRWYDLLIAHKEELGQLITLEQGKPLKEAIGEVAYGASFIEYYAEEAKRVYGDIIPPNLSDRRLLVLKQPVGVVGAITPWNFPLAMITRKVGPALASGCTVVVKPSELTPLTALAAAELALQAGVPPGALNVVMGNAPEIGDALLTSPQVRKITFTGSTAVGKKLMAAAAPTVKKVSLELGGNAPSIVFDDADLDVAVKGTLAAKFRNSGQTCVCANRVLVQDGIYDKFAEAFSEAVQKLEVGDGFRDGTTQGPLINDAAVQKVETFVQDAVSKGAKIIIGGKRHSLGMTFYEPTVIRDVSDNMIMSKEEIFGPVAPLIRFKTEEDAIRIANDTIAGLAAYIFTNSVQRSWRVFEALEYGLVGVNEGLISTEVAPFGGVKQSGLGREGSKYGMDEYLEIKYVCLGDMNRH

SEQ ID NO: 354 - protein, 471 aa, Arabidopsis thaliana
MWRRSNLPGNPDSDQSISEEEEENDISPKENAKEQERGLLLQTKLEKLIGCGELNYARETGDVTLEATLRKISSSLEDVVEVPDSPEESYISSSRRTGLACISAQENGSDDEITHDEQVATWSAISKETKSLIHLNGVASVASSHLSGFRAKKSSNGLKDHGRPKFSFNSHTHGETSSKISDMAEIFEPDVEDQAIEEDPIIECPNSFDERSENRQGVSVAESREVLHECTKDAVPKLQEIPLDKIRLIKRSSELDSRHEAKSRKFTHKGNSSNFQDSDTDDELPGPMDSGSSSDDEPSYQSSVPNISNQKKQFVGDRFDEAIKASSLSKEGLLFGSPKLSGGSSLYGKLQQIMKQEKETEMEIMRKLQSGIGEADSSGYVDVKVMSRHLEGKLVVCKCSVIDLSGDSLLLKNTQALAAKETETTIIFSPKVCADVDIEIGNFIRVYAPWKELEVQKTNDVIILSSYFSSL

SEQ ID NO: 355 - protein, 70 aa, Zea mays
MSALFNFNSFLTVVLLVICTCSYIKMQFPAILNDRTGFRGFFWKAARIGERLSPWVSVGCLAMGISTIFF

SEQ ID NO: 356 - protein, 316 aa, Arabidopsis thaliana
MGGGGAMRSAAKIAGIGVSKAALRPSALPTEQTVRNASRPTAVSGVSSQSAKSAEVAPLHTAAAWDDWDFAEDGELVVPRMVFGSVPTLDEAKEATAELKDAIDQVYLCPETSQYSSPGGQVSALSPTLYGPVNRSCVIDAISDPTAPKHAIQAFHLLSTSREAQAVVASLACDPNVWNAVMENSAVSSFFQSQQSVAGFGAAENSEEVDKLSSCASETVESPEKLEGSAESHPGNMFDDFMGLLQNVKLTVIELVSRLSGFLQNIFPTPDAMREKMSFDADGNTKASFMDSKISMGGTFIGLAVLVIMVIVTKRA

SEQ ID NO: 357 - protein, 152 aa, Arabidopsis thaliana
MAEEQQHQRWQEGHRLCANNCGFFGSPATLDLCSKCYRDLYQQQPAGAAAGPSAPTASAFQHSSSAVSGAAAVSPDLEPPATAPAGAKAGRCSSCRKRVGLTGFACRCGATFCGVHRYPERHACAFDFRAAGRDAIARANPVVKGDKLKDKI

SEQ ID NO: 358 - protein, 122 aa, Arabidopsis thaliana
MEHGSFTNVSHASFTLSEEDHTLANAVRFVLNQDPRVTVAAYTIPHPSLEQVNIRVQTTGDPAREVFKDACQELMQMNRHVRSVFDKAVAEYKDEQKRKEEAEEEELKRQRDLFGSMDIENN

SEQ ID NO: 359 - protein, 298 aa, Glycine max
MVYVKAQKSKAYFKRYQVKFKRRREGKTDYRARIRLINQDKNKYNTPKYRFVVRFSNKDIVAQIISASIAGDLVLATAYSHELPRYGLEVGLTNYAAAYCTGLLLARRVLKTLEMDEEYEGNVEATGEDYSVEPAESRRPFRALLDVGLVRTTTGNRVFGALKGALDGGLDIPHSDKRFAGFDKEKKELDAEVHRKYVFGGHVAAYMKILAEDEPEKYQSHFSEYIKRGIEADGIEALYKKVHAAIRADPTLRKSDKEPPKEHKRYNMKKLTYEERKAKLIARVAAINSAADSDEDDE

SEQ ID NO: 360 - protein, 314 aa, Zea mays; identical to SEQ ID NO: 243

SEQ ID NO: 361 - protein, 379 aa, Zea mays
MGAELGEAGVPARDMVDALEGVRSILLKPSERLDDKRFTRIAGADFDDAGLGLAGLLGSLASTGFQASNLGDAIDVVNQMLDWRLSHEKPSDDCAEAELDPAYRESVKCKIFLGFTSNLVSSGVREIIRFLVQHRMVDVIVTTAGGIEEDLIKCLAPTYRGDFTLPGALLRSRGLNRIGNLLVPNDNYCKFEHWIMPILDKMLLEQSTQNVWTPSKVIARLGKEINDESSYLYWAYKNNIPVFCPALTDGSIGDMLFCHSVHSPGLVVDIVQDVRLMNAETIHASPRKTGIILLGGGLPKHHICNANMLRDGADYAVYVNTAQEFDGSDSGARPDEAVSWGKIKSSARTVKVHCDATIAFPLLVAATFARKVHGTKSTN

SEQ ID NO: 362 - protein, 500 aa, Oryza sativa
MSSSPSFGLLALAAVLLALNLAQHGSLAATVGPRVIVVGAGMSGISAAKRLSEAGITDLLILEATDHIGGRMHKTNFAGINVELGANWVEGVNGGKMNPIWPIVNSTLKLRNFRSDFDYLAQNVYKEDGGVYDEDYVQKRIELADSVEEMGEKLSATLHASGRDDMSILAMQRLNEHQPNGPATPVDMVVDYYKFDYEFAEPPRVTSLQNTVPLATFSDFGDDVYFVADQRGYEAVVYYLAGQYLKTDDKSGKIVDPRLQLNKVVREIKYSPGGVTVKTEDNSVYSADYVMVSASLGVLQSDLIQFKPKLPTWKVRAIYQFDMAVYTKIFLKFPRKFWPEGKGREFFLYASSRRGYYGVWQEFEKQYPDANVLLVTVTDEESRRIEQQSDEQTKAEIMQVLRKMFPGKDVPDATDILVPRWWSDRFYKGTFSNWPVGVNRYEYDQLRAPVGRVYFTGEHTSEHYNGYVHGAYLSGIDSAEILINCAQKKMCKYHVQGKYD

SEQ ID NO: 363 - protein, 710 aa, Arabidopsis thaliana
MSASPSSMSGAGAGEAGVRTVVWFRRDLRVEDNPALAAAARAAGEVVPVYVWAPEEDGPYYPGRVSRWWLSQSLKHLDASLRRLGASRLVTRRSADAVVALIELVRSIGATHLFFNHLYDPLSLVRDHRVKALLTAEGIAVQSFNADLLYEPWEVVDDDGCPFTMFAPFWDRCLCMPDPAAPLLPPKRIAPGELPARRCPSDELVFEDESERGSNALLARAWSPGWQNADKALAAFLNGPLMDYSVNRKKADSASTSLLSPYLHFGELSVRKVFHQVRMKQLMWSNEGNHAGDESCVLFLRSIGLREYSRYLTFNHPCSLEKPLLAHLRFFPWVVDEVYFKVWRQGRTGYPLVDAGMRELWATGWLHDRIRVVVSSFFVKVLQLPWRWGMKYFWDTLLDADLESDALGWQYISGSLPDGRELDRIDNPQLEGYKFDPHGEYVRRWLPELARLPTEWIHHPWDAPESVLQAAGIELGSNYPLPIVELDAAKTRLQDALSEMWELEAASRAAMENGMEEGLGDSSDVPPIAFPPELQMEVDRAPAQPTVHGPTTAGRRREDQMVPSMTSSLVRAETELSADFDNSMDSRPEVPSQVLFQPRMEREETVDGGGGGGMVGRSNGGGHQGQHQQQQHNFQTTIHRARGVAPSTSEASSNWTGREGGVVPVWSPPAASGPSDHYAADEADITSRSYLDRHPQSHTLMNWSQLSQSL

SEQ ID NO: 364 - protein, 105 aa, Synechocystis sp. PCC 6803
MEGVGARQRRNPLIPRPNGSKRHLQHQHQPNAAEKKTAATSNYFSIEAFLVLVFLTMSLLILPLVLPPLPPPPSLLLLLPVCLLILLVVLAFMPTDVRSMASSYL

SEQ ID NO: 365 - protein, 296 aa, Arabidopsis thaliana
MVTATASTPFSLSSSVVFTRRRNFKRFPVCASLSPEVSPLLRAAHHTVDNYVKSGMIIGLGSGEASDFAIRYLGQQLGSGSLHNVVGVPMSARSASEAAKYGIPLEYYRDGVQIDFAFHDADAVEENTLIAVIGRRRSSQEDDYILKQKSIVKVADEAVFMIKEEQYKAGLEGSIPVLVQSLNWLAIAEEIDDLYLGDAEVWRRASVENEGPLGGDFPIVTSDGHNILDVIFTTPIRSLADLATSLDKIDGVVDHGLIIKTRCTVVIAEETVVRSVTLQTSALEGGVRTYGQTLQK

SEQ ID NO: 366 - protein, 109 aa, Zea mays
MSGVWVFKNGVVRLVEKQQATAGTAVAGGRRKALVHTPSGQVVSSYAALEARLTALGWERYYEDPSLFQFHKRGSLDLISLPADFSAFSSVHMYDIVVKNRDSFRVVDA

SEQ ID NO: 367 - protein, 418 aa, Oryza sativa
MTLTDAQISIVKSTAPVLKQHGEAITTVFYNDLITENPSLKNIFSLTSQATGAQPRALAHAVLAYATYIDNLSALSEAVARIAHKHVSLQVEPAQYAIVGQYLIQAIGKVLGDAATPEIVDAWTAAYGVLANVFIGVEGGMYEENEKKDHWKGWRKFRIARKVEESSSISSFYLRPVDGATLPKYLPGQYVSVQVLVSQLGYLQSRQYSLSEAPKEGGMEEYRISVKREEGETGAPGLVSNLLHGMQEGAEVEVSHPQGEFFLDPADASKEGVPAVLISVGVGATPMMAILKSLLQENVKRRPVSWIHASKSSSTQPFGEEVRRIVKENPEQVSAHVFLKTVAGTDQAGVHYDFADTRMDLTKLDGERDLHLADKRTEYYICGPETFMVETRKVLVGLGVDKSKVHLELFATGFVADE

SEQ ID NO: 368 - protein, 288 aa, Arabidopsis thaliana
MARNGIGSSGGKKNGAGQFFLATLLLWLVSVVFEIAFNLRTELLWVICGGCFFQLMNWVVRSWISRDPIFVNTSVSLLHSIITSASVVFILLNQCLAKGLDEMFDHSELVGGTWKWAYPALCFSCGYFAYDQWDMLQYRLYSGLIPSILVHHLVLLVCFTLALYRNVTINYLILTLICEMHSIFLHVRKLRRMAGIRDSNTALVKLEWVLNWTAFVFARCIPHILITIKLIKDAHKFGKGVELPLALSGMAGMNILNVGLGLDLFHAFRRERSHRRNQENGNLHDHGE

SEQ ID NO: 369 - protein, 724 aa, Arabidopsis thaliana
MEFGSFLVSLGTSFVIFVILMLLFTWLSRKSGNAPIYYPNRILKGLEPWEGTSLTRNPFAWMREALTSSEQDVVNLSGVDTAVHFVFLSTVLGIFACSSLLLLPTLLPLAATDNNIKNTKNATDTTSKGTFSQLDNLSMANITKKSSRLWAFLGAVYWISLVTYFFLWKAYKHVSSLRAQALMSADVKPEQFAILVRDMPAPPDGQTQKEFIDSYFREIYPETFYRSLVATENSKVNKIWEKLEGYKKKLARAEAILAATNNRPTNKTGFCGLVGKQVDSIEYYTELINESVAKLETEQKAVLAEKQQTAAVVFFTTRVAAASAAQSLHCQMVDKWTVTEAPEPRQLLWQNLNIKLFSRIIRQYFIYFFVAVTILFYMIPIAFVSAITTLKNLQRIIPFIKPVVEITAIRTVLESFLPQIALIVFLAMLPKLLLFLSKAEGIPSQSHAIRAASGKYFYFSVFNVFIGVTLAGTLFNTVKDIAKNPKLDMIINLLATSLPKSATFFLTYVALKFFIGYGLELSRIIPLIIFHLKKKYLCKTEAEVKEAWYPGDLSYATRVPGDMLILTITFCYSVIAPLILIFGITYFGLGWLVLRNQALKVYVPSYESYGRMWPHIHQRILAALFLFQVVMFGYLGAKTFFYTALVIPLIITSLIFGYVCRQKFYGGFEHTALEVACRELKQSPDLEEIFRAYIPHSLSSHKPEEHEFKGAMSRYQDFNAIAGV

SEQ ID NO: 370 - protein, 447 aa, Arabidopsis thaliana
MDIFDNSDLEYLVDEFHADFDDDEPFGEVDVTSESDSDFMDSDFDFELSESKTNNETSALEARNGKDIQGIPWESLNYTRDRYRENRLLHYKNFESLFRSREELDKECLQVEKGKNFYDFQFNTRLVKSTIAHFQLRNLVWATSKHDVYFMNNYSLMHWSSLLQRGKEVLNVAKPIVPSMKQHGSLSQSVSRVQISTMAVKDDLKLREGSKESLSKINEPEVAFCTKLTSADNDITNSVDIYNAPSGSLRVMTANNDCTVRLFDATNFALLNRFAFHWSVNNISTSPDGKLVAVLGDSPECLLADTGSGKVIHGLEGHLDYSFSSAWHPNGQILATGNQDTTCRLWDVRNLSQSLKVLKGNMGAIRALRFTSDGRFLAMAEPADFVHLFDTEAGYSQCQEIDLFGEIAGISFSPDTEALFVGVADRTYGSLLEFNRKRNHSYVDSIF

SEQ ID NO: 371 - protein, 229 aa, Arabidopsis thaliana
MDIFDNSDLEYLVDEFHADFDDDEPFGEVDVTSESDSDFMDSDFDFELSESKTNNETSALEARNGKDIQGIPWESLNYTRDRYRENRLLHYKNFESLFRSREELDKECLQVEKGKNFYDFQFNTRLVKSTIAHFQLRNLVWATSKHDVYFMNNYSLMHWSSLLQRGKEVLNVAKPIVPSMKQHGSLSQSVSRVQISTMAVKDDLKLREGSKESLSVRKSTNLRLLSALN

SEQ ID NO: 372 - protein, 584 aa, Arabidopsis thaliana
MCGILAVLGCSDDSQAKRVRVLELSRRLRHRGPDWSGLYQNGDNYLAHQRLAVIDPASGDQPLFNEDKTIVVTVNGEIYNHEELRKRLKNHKFRTGSDCEVIAHLYEEYGVDFVDMLDGIFSFVLLDTRDNSFMVARDAIGVTSLYIGWGLDGSVWISSEMKGLNDDCEHFETFPPGHFYSSKLGGFKQWYNPPWFNESVPSTPYEPLAIRRAFENAVIKRLMTDVPFGVLLSGGLDSSLVASITARHLAGTKAAKQWGPQLHSFCVGLEGSPDLKAGKEVAEYLGTVHHEFHFSVQDGIDAIEDVIYHVETYDVTTIRASTPMFLMSRKIKSLGVKMVLSGEGADEIFGGYLYFHKAPNKKEFHQETCRKIKALHKYDCLRANKSTSAFGLEARVPFLDKDFINTAMSLDPESKMIKPEEGRIEKWVLRRAFDDEERPYLPKHILYRQKEQFSDGVGYSWIDGLKDHAAQNVNDKMMSNAGHIFPHNTPNTKEAYYYRMIFERFFPQNSARLTVPGGATVACSTAKAVEWDASWSNNMDPSGRAAIGVHLSAYDGKNVALTIPPLKAIDNMPMMMGQGVVIQS

SEQ ID NO: 373 - protein, 456 aa, Arabidopsis thaliana
MCGILAVLGCSDDSQAKRVRVLELSRRLRHRGPDWSGLYQNGDNYLAHQRLAVIDPASGDQPLFNEDKTIVVTVNGEIYNHEELRKRLKNHKFRTGSDCEVIAHLYEEYGVDFVDMLDGIFSFVLLDTRDNSFMVARDAIGVTSLYIGWGLDGSVWISSEMKGLNDDCEHFETFPPGHFYSSKLGGFKQWYNPPWFNESVPSTPYEPLAIRRAFENAVIKRLMTDVPFGVLLSGGLDSSLVASITARHLAGTKAAKQWGPQLHSFCVGLEGSPDLKAGKEVAEYLGTVHHEFHFSVQDGIDAIEDVIYHVETYDVTTIRASTPMFLMSRKIKSLGVKMVLSGEGADEIFGGYLYFHKAPNKKEFHQETCRKIKALHKYDCLRANKSTSAFGLEARVPFLDKDFINTAMSLDPESKMVTTKLTSQTQYLPSQVNVEQIFYMGFSRSSQRKEGSRNGF

SEQ ID NO: 374 - protein, 512 aa, Arabidopsis thaliana
MCGILAVLGCSDDSQAKRVRVLELSRRLRHRGPDWSGLYQNGDNYLAHQRLAVIDPASGDQPLFNEDKTIVVTVNGEIYNHEELRKRLKNHKFRTGSDCEVIAHLYEEYGVDFVDMLDGIFSFVLLDTRDNSFMVARDAIGVTSLYIGWGLDGSVWISSEMKGLNDDCEHFETFPPGHFYSSKLGGFKQWYNPPWFNESVPSTPYEPLAIRRAFENAVIKRLMTDVPFGVLLSGGLDSSLVASITARHLAGTKAAKQWGPQLHSFCVGLEGSPDLKAGKEVAEYLGTVHHEFHFSVQDGIDAIEDVIYHVETYDVTTIRASTPMFLMSRKIKSLGVKMVLSGEGADEIFGGYLYFHKAPNKKEFHQETCRKIKALHKYDCLRANKSTSAFGLEARVPFLDKDFINTAMSLDPESKMIKPEEGRIEKWVLRRAFDDEERPYLPKHILYRQKEQFSDGVGYSWIDGLKDHAAQNVNDKMMSNAGHIFPHNTPNTKEAYYYRMIFERFFPQVRVL

SEQ ID NO: 375 - protein, 292 aa, Arabidopsis thaliana
MGVMINHHFLAFIFGILGNVISFLVFLAPVPTFYRIYKRKSTESFQSLPYQVSLFSCMLWLYYALIKKDAFLLITINSFGCVVETLYIAMFFAYATREKRISAMKLFIAMNVAFFSLILMVTHFVVKTPPLQVSVLGWICVAISVSVFAAPLMIVARVIKTKSVEYMPFTLSFFLTISAVMWFAYGLFLNDICIAIPNVVGFVLGLLQMVLYLVYRNSNEKPEKINSSEQQLKSIVVMSPLGVSEVHPVVTESVDPLSEAVHHEDLSKVTKVEEPSIENGKCYVEATRPETV

SEQ ID NO: 376 - protein, 581 aa, Arabidopsis thaliana
MEKVTNSDLKSSVDGGVVDVYGEDSATIEHNITPWSLSVSSGYSLLRDPRYNKGLAFTEKERDTHYLRGLLPPVVLDQKLQEKRLLNNIRQYQFPLQKYMALTELQERNERLFYKLLIDNVEELLPIVYTPTVGEACQKFGSIFRRPQGLFISLKDKGKILDVLKNWPERNIQVIVVTDGERILGLGDLGCQGMGIPVGKLALYSALGGVRPSACLPVTIDVGTNNEKLLNDEFYIGLRQKRATGQEYSELLNEFMSAVKQNYGEKVLIQFEDFANHNAFELLAKYSDTHLVFNDDIQGTASVVLAGLVSAQKLTNSPLAEHTFLFLGAGEAGTGIAELIALYMSKQMNASVEESRKKIWLVDSKGLIVNSRKDSLQDFKKPWAHEHEPVKDLLGAIKAIKPTVLIGSSGVGRSFTKEVIEAMSSINERPLIMALSNPTTQSECTAEEAYTWSKGRAIFASGSPFDPVEYEGKVFVSTQANNAYIFPGFGLGLVISGAIRVHDDMLLAAAEALAGQVSKENYEKGMIYPSFSSIRKISAQIAANVATKAYELGLAGRLPRPKDIVKCAESSMYSPTYRLYR

SEQ ID NO: 377 - protein, 144 aa, Arabidopsis thaliana
MTNVRLPILVSSVLFLVFISSSLLFPTPSFAARVSHSLVQEEVKKVPEYTEPEEPEVPEEPELPSPEEPEIPEEPEIPEEPEVPGEPEVPEEPEEPEEPEGSTFEFPSWFPSFPIPGVNGGLPKTEKTKPTSTVEEVNVSNKKP

SEQ ID NO: 378 - protein, 370 aa, Arabidopsis thaliana
MALMKKSLSAALLSSPLLIICLIALLADPFSVGARRLLEDPKPEIPKLPELPKFEVPKLPEFPKPELPKLPEFPKPELPKIPEIPKPELPKVPEIPKPEETKLPDIPKLELPKFPEIPKPELPKMPEIPKPELPKVPEIQKPELPKMPEIPKPELPKFPEIPKPDLPKFPENSKPEVPKLMETEKPEAPKVPEIPKPELPKLPEVPKLEAPKVPEIQKPELPKMPELPKMPEIQKPELPKLPEVPKLEAPKVPEIQKPELPKMPELPKMPEIQKPELPKMPEIQKPELPKVPEVPKPELPTVPEVPKSEAPKFPEIPKPELPKIPEVPKPELPKVPEITKPAVPEIPKPELPTMPQLPKLPEFPKVPGTP

SEQ ID NO: 379 - protein, 509 aa, Arabidopsis thaliana
MEISERVRARLAVLSGHLSEGKQDSPAIERWCTSADTSVAPLGSLKGTLTIVDERTGKNYKVPVSDDGTVKAVDFKKIVTGKEDKGLKLYDPGYLNTAPVRSSISYIDGDEGILRYRGYPIEEMAENSTFLEVAYLLMYGNLPSESQLSDWEFAVSQHSAVPQGVLDIIQSMPHDAHPMGVLVSAMSALSIFHPDANPALRGQDIYDSKQVRDKQIIRIIGKAPTIAAAAYLRMAGRPPVLPSGNLPYADNFLYMLDSLGNRSYKPNPRLARVLDILFILHAEHEMNCSTAAARHLASSGVDVYTAVAGAVGALYGPLHGGANEAVLKMLSEIGTVENIPEFIEGVKNRKRKMSGFGHRVYKNYDPRAKVIKNLADEVFSIVGKDPLIEVAVALEKAALSDDYFVKRKLYPNVDFYSGLIYRAMGFPPEFFTVLFAIPRMAGYLSHWKESLDDPDTKIMRPQQVYTGVWLRHYTPVRERIVTDDSKESDKLGQVATSNASRRRLAGSSV

SEQ ID NO: 380 - protein, 435 aa, Arabidopsis thaliana
MTPQIKTHLLPKQEPSSSENHGSSTSGIVFNVSTSIIGAGIMSMPAAFKVLGIVPAFLIITIIAWLSTISVGFLMKSTLAGESTTYAGVMKESFGKTGSIAVQIATMVATFGCMIIFSIIIGDVLSGNENGGPEHIGVLQEWFGSYWWNTRIFALLFVYGFVLLPLVLRRRVERLAISSAVSFLLAVLFVVISSVLAISALVNGQTKNPRLFPELSNGGSFWQLFTASPVIVTAFTFHFNVHPIGFELKDPLQVIPATKISVILCAAIYFATGLFGYLLFGDATMSDILVNFDQSSGSSIGSLLNDIVRLSYVLHLMLVFPLLNFSLRANLDELLYPKKPSLEKDTKRFIGLTLALLICCFLSAIAVPDIWYFFQFMGSTITVSIAFIFPAAIVLRNIHGVSTSREKIVAAIMLVLAVATSIIAISTNLYSLAAN

SEQ ID NO: 381 - protein, 242 aa, Arabidopsis thaliana
MRKSFKDSLKALEADIQFANTLASEYPEEYDGGYVQMRLSYSPAAHLFLFLLQWTDCHFAGALGLLRILIYKAYVDGKTTMSLHERKTSIREFYDVLFPSLLQLHGGITDVEERKQKEICDKRYRKKDRTDKGKMSEIDLEREEECGICLEIRNKVVLPTCNHSMCINCYRNWRARSQSCPFCRGSLKRVNSGDLWIYTCSAEIADLPAIYKENLKRLLIYIDKLPLVTSDPNLVPYAPLPR

SEQ ID NO: 382 - protein, 172 aa, Arabidopsis thaliana
MRKSFKDSLKALEADIQFANTLASEYPEEYDGGYVQMRLSYSPAAHLFLFLLQWTDCHFAGALGLLRILIYKAYVDGKTTMSLHERKTSIREFYDVLFPSLLQLHGGITDVEERKQKEICDKRYRKKDRTDKGKMSEIDLEREEECGICLEIRNKVVLPTCNHSMCINCYRN

SEQ ID NO: 383 - protein, 121 aa, Arabidopsis thaliana
MINAFKTIRSLPSNTTVSFCSTPSRLGRKVTGVSFATTSDQQKMDKKPENPNEKTGDVMSHSYGEGYATRSDEEGFGGIYGGNQTLQKENEIHENHPDYDKTQGSESKEKEKARNQTQSHC

SEQ ID NO: 384 - protein, 115 aa, Arabidopsis thaliana
MAFALRFFTCLVLTVCIVASVDAAISCGTVAGSLAPCATYLSKGGLVPPSCCAGVKTLNSMAKTTPDRQQACRCIQSTAKSISGLNPSLASGLPGKCGVSIPYPISMSTNCNNIK

SEQ ID NO: 385 - protein, 258 aa, Arabidopsis thaliana
MTEGGEYSPAMMSAEPFLTMKKMKKSNHNKNNQRRFSDEQIKSLEMMFESETRLEPRKKVQLARELGLQPRQVAIWFQNKRARWKSKQLETEYNILRQNYDNLASQFESLKKEKQALVSELQRLKEATQKKTQEEERQCSGDQAVVALSSTHHESENEENRRRKPEEVRPEMEMKDDKGHHGVMCDHHDYEDDDNGYSNNIKREYFGGFEEEPDHLMNIVEPADSCLTSSDDWRGFKSDTTTLLDQSSNNYPWRDFWS

SEQ ID NO: 386 - protein, 236 aa, Arabidopsis thaliana
MAGEAEALATTAPLAPVTSQRKVRNDLEETLPKPYMARALAAPDTEHPNGTEGHDSKGMSVMQQHVAFFDQNDDGIVYPWETYKGFRDLGFNPISSIFWTLLINLAFSYVTLPSWVPSPLLPVYIDNIHKAKHGSDSSTYDTEGRYVPVNLENIFSKYALTVKDKLSFKEVWNVTEGNRMAIDPFGWLSNKVEWILLYILAKDEDGFLSKEAVRGCFDGSLFEQIAKERANSRKQD

SEQ ID NO: 387 - protein, 263 aa, Triticum aestivum
  unsure (1)..(263): unsure at all Xaa locations
MPESDNDSGGPSNTGGEGELSSPREQDRFLPIANVSRIMKKALPANAKISKDAKETVQECVSEFISFITGEASDKCHPRRPPTXRPRVRLWAMTTLGFEDYVDPLKHYLHKFREIEGERAAATSTSTSTTPDMPRNNNNNARRLPRRPGRHDDDGAAHVPARRRRHHKQQQHQHQNCNGEGRSGLSLSRRRRRVVVILGSDRKKWTPFPFSFLFFLEDKGRGFSTFCSFSLGEDPPCSLIIPFSPRGGEYFVLSPRCWKTFFF

SEQ ID NO: 388 - protein, 480 aa, Brucella suis 1330
MQTRYPDVKLFIDGTWRDGSRGETIEIFNPATDEVIGHIARATTADLDDALAAVDRGFEAWSKVSAFDRYKIMRRAADIFRSRGEEVARLLTMEQGKPLAEARIEAAAACDLIDWFAEEARRSYGRIVPPRQAYVMQAEVKEPVGPVAAFTPWNFPINQAVRKISAALAAGCSILLKAAEDTPAAPAELVRAFAEAGLPDGAINLVYGDPAEISAYLIPHPVIRKVSFTGSTQVGKQLAALAGLHMKRVTMELGGHAPVIIAADADVEQAIKVVSGSKFRNAGQVCISPTRFLIENSVYDQVVEGMAAYATSLKVGDGLEAGTTMGPLVNAKRVNAMERLVQDAREHKARVVTGGERIGNRGNFFEPTILADVPRDATIMNEEPFGPVALLNRFDALDEALSEANRLNYGLAAYAFTGSSAKAARISSTVRSGMITINHYGLALPEVPFGGINDSGYGTEGGADALEAYQNTKFVSFLQA

SEQ ID NO: 389 - protein, 503 aa, Mesorhizobium sp. BNC1
MSVLNENIARAVEYLKPFREGGVLNHVGGAQVPAASGETFETVSPVDMSTLAKVARGGAADTDKAVAAASEAFKTWSKTSGAERRKILIKVAEGIEARAEEIAFIECMDTGQALRFMSKAAIRGAENFRFFADQAPGSEDGRALRTPAQMNVTSRRPIGPVGVITPWNTPFMLSTWKIAPALAAGCTVVHKPAEFSPLTANLLVQIAEEAGLPKGVLNVVNGYGEEAGRALTEHKGIKAIAFVGESRTGSMIMKQGADTLKRVHFELGGKNPVIVFDDADLDRAVDAAAFMIYSLNGERCTSSSRLLVQESIYEEFTRRVAEVARGIKIRHPLDPETVIGPLIHPSHEKKVLSYFEKAKEEGAIIATGGEKYGEAGCFVRPTLFTNARNDMAIAQEEIFGPVLTAIPFKDEDEALAIANDVNYGLAAYLWTRDLGRAMRMTDNLEAGMIWVNSENVRHLPTPFGGVKASGIGRDGGDWSFDFYMETVNVSFPRREHKVSKLGG

SEQ ID NO: 390 - protein, 131 aa, Zea mays
  unsure (1)..(131): unsure at all Xaa locations
MLLSHFQQIRTFIQMRTNLKVVDNSGAKXVMCIQSLRGKKGARLGDMIIGSVKEAQPRGKVKKEDVVYGVVVRAAMKKGRSDGSEVQFDDNEVVLVNKKGELIGTRVFGPVPHELRKKKHLKILALAEHIV

SEQ ID NO: 391 - protein, 147 aa, Zea mays
LQVKGEDMDAYAPKDLLVVTTGSQGEPRAALNLASYGGSHTLKLSKEDVLLYSAKVIPGNETRVMKMMNRLTDLGPKIIMGKDSGLHTSGHAYREELVLRIVKPQHFLPVHGELLFLKEHESLGRSTGIRHTTVSNLSNLVLWICMP

SEQ ID NO: 392 - protein, 217 aa, Methylococcus capsulatus str. Bath
MATAASRKSVMTLFCSPTCVYSHRTRIVLHEKGISADVEYVDMGDPPEDLVELNPYGTMPTLVDRDLVLYDSRIIMEYLDERFPHPPLHPMDPVSRARARLLVHRVEQDWYGLVEEIENASDGGAQKARKQLRESLLAATPVFAAKPYFLSDEFCLVDCSLAPLLWRLPMLGIELPRQAEPVKAYAARLFERHSFQASLSDEEREFGAAARLTPENA

SEQ ID NO: 393 - protein, 294 aa, Triticum aestivum
  unsure (1)..(294): unsure at all Xaa locations
GGAAFADVPGGALWEEVLHWAVSNHGLAPASWTDYLRLTVGGTLSNGGVSGQSFRYGPQVSNVAELEVVTGEGECRVCSPSAHADLFFAVLGGLGQFGVITRARIPLSPAPQTVKWARVVYASFAEYAADAEWLVTRPAESAFDYVEGFAFVRSDDPVNGWPSVPIPAGARFDPSLLPAGEPGPLLYCLEVALYQHQHKQPDDVDARMGEMMRRLKYVRGLEYAADVRYVEFLSRVNRVEEXARRSGSWAAPHPWLNLFVSARDIADFDRAVLKGMLADGVDGPMLIYPMLKSK

SEQ ID NO: 394 - protein, 184 aa, Triticum aestivum
  unsure (1)..(184): unsure at all Xaa locations
ISXFPSGVTVKTEDDKVYRADYXXVSASLGVLQTDLIRFKXXLPSXKIVSIXQFDMAVYXKVFLKFPKXFWPEGECNEFFLYXXGRXGYFPVWQQFEHQYPGSNVLLVTVTDDXSXRIEQQSDNQTMXDXVAVLXKISQGXLLTQRXLCQWWSTGXGLNHRVNATIYSSGGGYSRAQHIKVFTG

SEQ ID NO: 395 - protein, 476 aa, Oryza sativa (japonica cultivar-group)
MAMETTSQDSQVIMGRYKLGRLLGRGTFAKVYKAYKLATGEAVAIKVFDKEAVQRSGTVEQVKREVDVMRRVHHRHVIRLHEVMATRSRIYFVMEYASGGELFTRLSRSPRFPEPVARRYFQQLITAVEFCHSRGVYHRDLKPENLLLDARGDLKVTDFGLSALDGGLRGDGLLHTTCGTPAYVAPEVLLKRGYDGAKADIWSCGVILFVLLAGYLPFNETNLVILYRNITESNYRCPPWFSVEARKLLARLLDPNPKTRITISKIMDRPWFQQATCPLGDMSLVASAPSVLLARKEASQQHDDEEDDGFAREKKKRSNVIMSSPVIDVRPSSMNAFDIISRSRGLDLSKMFDAEERRSEARFSTRETTTAIVSKLEEIAEAGRFSFKLKEKGRVELEGSQDGRKGALAIEAEIFKVAPEVHVVEVRKTGGDSPDFRDFYKQELKPSLGDMVWAWQGGDSPPLVPAAGRRPITKRS

SEQ ID NO: 396 - protein, 483 aa, Agrobacterium tumefaciens str. C58
MKVVPMHTYPDIKLLIDGEWRDAVSGKTIAVSDPATDEIIGAIAHAEKEDLDLALAAAERGFKLWRDTSPYERSKIMRKAADILRERKDKIAYIMTREQGKPLAQSATEIMGAADTIDWFAEEARRTYGQVIPARATGVSQLAIKVPVGPVAAFTPWNFPLNQIVRKLSAALATGCSIIVKAPEETPASPAELIRAFVDAGVPAGVIGLVYGVPSEISEYLIPHPVIRKISFTGSTPIGKHLAALAGKHMKRATMELGGHAPVMIFDDADIEKAIEVTSLAKFRNAGQVCVAPTRFLVQDGVADRFLEGFVEATKAIKVGNGLEEGVIMGPLANERRIPALEGLINDAVSHGAELKTGGRRIGNKGNFFEPTVLANVPVTAKIMNDEPFGPVAIINRFSSFDDAITEANRLPFGLASYAFTGSVKTAHALGQQVEAGMLTINHNGLALPEVPFGGIKDSGYGTEGGSEAVQAYLETKFVSQMS

SEQ ID NO: 397 - protein, 535 aa, Brassica napus
  unsure (1)..(535): unsure at all Xaa locations
MAFAISTRNAVAFLVTLLLVSVTPSSSTLQQDFIHCLVDNTDMSFPIRASFFSPDQNATLFKEELESTAQNLRYLTPSNPKPVFIFEPLYETHVQAAVVCAKMLKLHMRLRSGGHDYEGLSFVAENVTPFVVVDLSKLRQIDVDLDSNSAWAHAGATVGEVYYRIQEKSQTHGFPAGLCSSLGIGGHLVGGAYGSMMRKFGLGADNVLDARIIDANGKILDRAAMGEDVFWAIRGAGGGSFGVILAWKIKLVPVPATVTVFTVTKTLEQDGTRVLYKWXQVADKLDEDLFIRVIIQPAGKTSKTGNRTVSTAYQGQFLGDSNRLMQVMQTSFPELGLTKKDCIEMSWIKSVMYIAWISQNXCPTQKPLLAGKXSLFKNHFKAKSDFVEEPFPVEGLEGLWKKLLNEDSPLTIWNPYGGMMSRISESETPFPHRKGTLFKIQWLSTWSDGKASEARHIEWMRDMYSYMEQYVSKKPRRAYVNYRDLDLGVNEGESDAREWGAKYFKGNFEKLVKIKGEFDPENFFRHEQSIPTKIG

SEQ ID NO: 398 - protein, 229 aa, Cucumis melo
MSSSKEQSPSPETESSSSSSSDSNKKPKRINSNSSSNSKHAVYRGVRMRNWGKWVSEIREPRKKSRIWLGTFPSPEMAARAHDVAALSIKGNSAILNFPDLVHLLPRPVSLAPRDVQAAAAKAAHMHNLSSNANTNNHNTNSNSSSAFSDELSEIVELPALGTSYDGGVGVGGEFVFVESELESAAWLYQPPWVQSLQEDYDDIDGDGDCGKLGMGFVSNGFKGFLFDY

SEQ ID NO: 399 - protein, 175 aa, Triticum aestivum
  unsure (1)..(175): unsure at all Xaa locations
MAPAVMASSATTVAPFQGLKSTAGLPVSRRSSGSLGSVSNGGRIRCMQVWPIEGIKKFETLSYLPPLSTEXALLKQVDYLIRSKWVPCLEFSKVGFVFREHNSSPGYYDGRYWTMWKLPMFGCTDATQVLNEVEEVKKEYPDAYVRVIGFDNLRQVQCVSFIAFRPPGCEESGKA

SEQ ID NO: 400 - protein, 389 aa, Salmonella enterica subsp. enterica serovar Typhi Ty2
MTDTTILQNNTHVIKPKKSVALSGVPAGNTALCTVGKSGNDLHYRGYDILDLAEHCEFEEVAHLLIHGKLPTRDELNAYKSKLKALRGLPANVRTVLEALPAASHPMDVMRTGVSALGCTLPEKEGHTVSGARDIADKLLASLSSILLYWYHYSHNGERIQPETDDDSIGGHFLHLLHGEKPTQSWEKAMHISLVLYAEHEFNASTFTSRVIAGTGSDVYSAIIGAIGALRGPKHGGANEVSLEIQQRYETPDEAEADIRKRVENKEVVIGFGHPVYTIADPRHQVIKRVAKQLSEEGGSLKMYHIADRLETVMWETKKMFPNLDWFSAVSYNMMGVPTEMFTPLFVIARVTGWAAHIIEQRQDNKIIRPSANYTGPEDRVFVPIEKRC

SEQ ID NO: 401 - protein, 220 aa, Triticum aestivum
  unsure (1)..(220): unsure at all Xaa locations
DAWATLPPPPPPPPPPKLPTTRSAPEFRARPISRRSHPADAAPLGRTGNLAMAAGSFATSVHDFTVKDSSGKDVDLSVYKGKVLLIVNVASQCGLTNSNYTGLSQLYPKYKXTKGFEILAFPCNQFGGQEPGTNDEIVQFACTRFKAEYPIFDKVDVNGNNVSPLYKFLKSSKGGLFGDSIKWNFSKFLVDKEGHVVDRYAPTTSPLSIEKDIKKLLGSS

SEQ ID NO: 402 - protein, 253 aa, Oryza sativa (indica cultivar-group)
MPERSELGRQLPLRGPLKALEADIHHANTMANAIQRNYGGACVQMRLSCSSLAPFFLYLIQWLDCGCCYALPSYLGLFHILICKVYADGDSSVSTYERRASLREFMRSSYPILQQLEGSLIERDLKGKGRCKDIVSRKRLEDWRKLCNKDVEREDECGICMETCTKMVLPNCSHAMCIKCYRDWYRRSESCPFCRGSLKRIRSRDLWVLTNYNDVVDPVTLERENVRHFYSYIDSLPLILPDNIFFFYYDYLL

SEQ ID NO: 403 - protein, 170 aa, Zea mays
  unsure (1)..(170): unsure at all Xaa locations
MAAASSATSVHDFTVKDSSGKDVDLSVYRGKVLLIVNVASQCGLTNSNYTQQAQLYEKYKNQGLXFEILAFPCNQFGGQEPGTNEEIAQFACTRFKADYPIFDKVDVNGNNAAPIYKFLKSSKGGLFGDSIKWNFSKFLVDKEGRVVDRYAPTTSPLSIEKDIKKLLGSS

SEQ ID NO: 404 - protein, 429 aa, Streptomyces coelicolor A3(2)
MSDNSVVLRYGDGEYTYPVIDSTVGDKGFDIGKLRAQTGLVTLDSGYGNTAAYKSAITYLDGEAGILRYRGYPIEQLAERSSFVEVAYLLINGELPTVDELSAFKGEITQHTLLHEDVKNFYKGFPRDAHPMAMLSSVVSALSTFYQDSHNPFDERQRNLSTIRLLAKLPTIAAYAYKKSIGHPFVYPANNLGYVENFLRMTFSVPAQEYELDPTVVAALDKLLILHADHEQNCSTSTVRLVGSSQANMFASISAGINALWGPLHGGANQSVLEMLEGIRDAGGDVDSFIRKVKNKEDGVRLMGFGHRVYKNFDPRAKIIKAAAHDVLSALGKSDELLDIALKLEEHALSDDYFVSRSLYPNVDFYTGLIYRAMGFPTEMFTVLFALGRLPGWIAQWHEMIKEPGSRIGRPRQIYTGVVERDFVPVEER

SEQ ID NO: 405 - protein, 338 aa, Arabidopsis thaliana
  unsure (1)..(338): unsure at all Xaa locations
MVFKAAIELGVIDTLYLAARDDVTGSSSFLTPSDIAIRLPTKPSNPEAPALLDRILRLLASYSMVKCQIIDGNRVYKAEPICRYFLKDNVDEELGTLASQLIVTLDTVFLNTWGELKNVVLEGGVAFGRANGGLKLFDYISKDERLSKLFNRTGFSVAVLKKILQVYSGFEGVNVLVDVGGGVGDTLGFVTSKYPNIKGINFDLTCALTQAPSYPNVEHVAGDMFVDVPKGDAILLKRILHDWTDEDCEKILKNCXKALPENGKVIVMEVVTPDEADNRDVISNIAFDMDLLMLTQLSGGKERSRAEYVAMAANSGFPRCNFVCSAYHLWVIELTKQA

SEQ ID NO: 406 - protein, 1274 aa, ASPERGILLUS NIDULANS FGSC A4
MTEVPFVAMRAPGSYSSQTETIRQYIPSSVVVNSSCPPAKQLQQPDRVQPQQCTTNSWSVHNDGFGPRPQVSNAKSYGVDAGNQGINYMSYDLVKETNGSTPNDSTSTPVLSASSNGKSTTPSSVNLASSSTSVSSTKADDTPGPVFFRPRSSIPTRLPTAVYAQQCVAAAYASRLNPYALHPKEQEALQDHLCHLHVTVYLNIRNGILRLWTRNPMVSVSKEEALGCAKDYRWMNLASFAYEWLIRNGYINFGCLEIPEGLVPSKKGRRKEGPVIVIIGAGMAGLGCARQLEGFFKHFRDNLNSPRVVVLEGRRRIGGRIYSHPLQSRQSSTLPPGLTPKVEMGAQIVVGFDRGNPLDQIIRGQLALSYHLLRDISTIYDIDGTPVDEVRDATAERLYNDVLDRSGDYRYKSVVAPTAEGERDLIDLGRDITTSDGVTVRQYEEARQAGTVGLLFPAKRIRRGVGHKTAELKPATGPVVDTDEAEENPAVVACEAMGWKLNPGISVSQRINLDPIAKASKFQTLGKTMDEGVRQYQRMLPLTPKDLRLLNWHFANLEYANATNINNLSLSGWDQDMGNEFEGEHSQIIGGYQRVPYGLWSYPTKLDVRTNKTVSRITYDASGSNRHRTVVHCEDGESITADMVVYTGSLGTLQHRTVQFSPPLPDWKVGAIDRLGFGVMNKVILAFDQPFWDTERDMFGLLREPTNRDSMAQEDYASNRGRFYLFWNCMKTTGLPVLIALMAGDAAHQAERTPDAEIVAEVMSQLRNVFKQVAVPDPLETIITRWASDKFTRGTYSYVAAEALPGDYDLMAKSVGNLYFAGEATCGTHPATVHGAYISGLRAASEIIDSILGPIPIPTPLVPEKGKNTNSGNTNGMPSNTPHIPLDTDTNTPEVPPQQPQLPTSTSTVTSSFEPLSRAAYDQAMNAAVYTEIGPPIPRPGRPGINPFILYQKDFMAKARADCDAEYQAITKDPNAKAPRDTVRAALGLMWRQAPEEVKRPYLEQAEVNRQTGAEIAAKWKRDNVEWERRKEAAKKRWQQDNPFEWWVATEFGEPPRKKLDSTNKELGAAYSPAAAPTPPFGPSTSSGLAGISTPSAASPYPSGTSAGLAGSSTLFTNGYDANASTPAATPSHPPPSVPPPGLSEATAGNTESCSSSASYSAPAGPSTVPLFGPLPGSAKMSKPNVNGYSANESTPAAAAVASQSLQPPQPPGSPSGLYGGSTQDTNGSTNLNANPNPGQTQNPNVANGPRPGMGWSWFNNNSATAYSFLLNQR

SEQ ID NO: 407 - protein, 107 aa, Nicotiana tabacum
LGVDYDGTKSCDSDCSVGYGLQEYASTVVQAVRFVCDRKNVKNPVICSESGRAIVSHHSVLIFEAVSSTTTRSQELSSVDLQSFVEKLNDDARADYRNLSAAAIRGE

SEQ ID NO: 408 - protein, 488 aa, Acinetobacter sp. ADP1
MVKELYIAGEWRLGRGKVIQSTFPADNSVNAEISTASFEDIEEAIVKADQAWRAPEWRNRLPHERAKILYKVADIIEARVDALAALQTRDNGKPLAETRGLVFSAAATARYVAAACETMNDELTSQRAPDFMTFSVHEPVGVVAAITPWNSPIASEVQKLAPALAGGNAVILKPAEATSLIALELAKIFEEAGLPKGLLSVLVGKGSVVGDAIVKHPLVRKISFTGGTTTGRHLAHIAADKLITTSLELGGKSPTIVLPDADIELAAKGIAYGIFSSAGQACIAGSRLFIHSSIYDQFLARLVEITKSLRVGHPEQKDVHMGSLINAAHLASVDRYVQLAKQEGGEILTGGQAMTEGEFAKGSFYLPTIITGLKNQAQVCQEEIFGPVLVVMKYEHEDDLIEQANDSCFGLAAGIWTESYRKAWRIARVLEVGTVWINTYKKFSISAPFGGFKDSGIGREKGRQGILSYMQQKSIYMGLNEQPNPWAD

SEQ ID NO: 409 - protein, 316 aa, Triticum aestivum
MDPALLDNIIARLLEVKSLKPGKNAQLSESEIKQLCAASKEIFLAQPNLLELEAPIKICGDVHGQYSDLLRLFEYGGYPPQSNYLFLGDYVDRGKQSLETICLLLAYKVKYPENFFLLRGNHECASVNRIYGFYDECKRRFSVKLWKTFTDCFNCLPVSALIDEKILCMHGGLSPELNKLDQILNLNRPTDVPDTGLLCDLLWSDPSNEAQGWAMNDRGVSYTFGPDKVAEFLEKHDLDLICRAHQVVEDGYEFFADRQLVTIFSAPNYCGEFDNAGAMMSVDETLMCSFQILKPARKMLPGSTNNKSGFKSMRGW

SEQ ID NO: 410 - protein, 149 aa, Glycine max
  unsure (1)..(149): unsure at all Xaa locations
MSGRVSGKVKWFNDQKGFGFISPDDGSDDLFVHQSQIKSDGFRSXLAEGESVEFAIESESDGRAKAVDVTGPDGASVQGTRRGGDGGRSYGGGRGGGGGGYGGGGGYGGGGGYGGGGGYGGGGRGGGGGSCYSCGESGHFARDCPSSAR

SEQ ID NO: 411 - protein, 169 aa, Triticum aestivum
  unsure (1)..(169): unsure at all Xaa locations
MPNSPLEKTHETQRDPSFTQARTQMVVMNKAREMTLIAALFVLSCLLKTTTSPATSAYSGAWRPASSLLHELCHLGVRPLIRDDAEATALASADFGNVSDAQPAAAAVLYPSCPEDIASLLRASCMHPSPFPVSARGCGHSTRGQASAPRGVVVDMLSLGCQVXGSATR

SEQ ID NO: 412 - protein, 444 aa, Glycine max
  unsure (1)..(444): unsure at all Xaa locations
MVILNLGRKEEQGVRLGKYELGKTLGEGNFGKVKLARDTHSGKLFAVKILDKSKIIDLNNIDQIKREISTLKLLKHPNVVRLYEVLASKTKIYMVLEYVNGGELFDKIASKGKLKEAEGRKIFQQLIDCVSFCPIKXCLHRDLKLENVLVDNKGNIKITDFGLSALPQHLREDGLLHTTCGSPNYVAPEVLANKGYDGATSDTWSCGVILYVILTGHLPFDDRNLVVLYQKIFKGDVQIPKWLTPGARNMIRRILDPNPETRITMAGIKEDPWFKKGYIPVNPEDEDVYVDQEAFSIHEQPNEAEQRNSGSPSLINAFQLIGMSSCLDLSGFFEKEDVSERKIRFASNLSVKDLIERIEDTATEMEFRVEKKNGKLKVIRENKVHKTLGCLSVVVEVFGISSSLYVVELRKSYGDGSVYKQLCNKLLNDLGIPPKQPLVRSAAN

SEQ ID NO: 413 - protein, 77 aa, Glycine max
MGLWTLLEGFLLLANALAILNEDRFLAPRGWGFQDFSGGRTKSFKGQLIGLIYATQYLRVPLILLNSICIFLKLVSG

SEQ ID NO: 414 - protein, 161 aa, Zea mays
  unsure (1)..(161): unsure at all Xaa locations
QKIYYLTGAKGTXDRXAAGEKAENATTAQXEGHXTXQEGXDAGEEANNQNETKDATTNRARTPTXEKTRKTKARGGKRRXPGEGPQEKTGGXPQXHKAPNKKEXQEETXRKKKAQXPQDGTRANKATXAWGGEAGDPIHDKRCNSGTTDMDPERNMRKRGR

SEQ ID NO: 415 - protein, 456 aa, Oceanobacillus iheyensis HTE831
MLKKSFLIFTALLLLATPVYAATPTPESLELSVNLIWVMLGAFLVFFMHAGFAMVESGFTRSKNTLNILMKNFLTISVASILFFLVGYGIMFGSSAGSIIGSDGFLLSEISEIDFFVFQAMFVATCATIISGAVAERIKLGSYILIVAAMTTIIYPVVGHWVWQGDGWLTSLGFSDFAGSTVVHLTGAVGAFVVVLILGPRIGKYKGKKVNVIQGHNLPLGALGVFILWLGWFGFNGGSTLAADPSLVPYVIGTTLLSTSAALVSSSLYTKLRFKKVDASLSMNGVLGGLVGITAGAAEISLGGSIIVGLISGVVLVEGIRFLDTKLRIDDPVGAIAVHGICGIWGTLAIGLFSVNTGLFYGNGISQLGIQAIGVLAVVAWVAITAGGFTYVINKISQIRVSEEEEISGLDFAEHGSSAYNFKESLLEGTDNNSSSGLAERLNNNIPIGKTSNQSS

SEQ ID NO: 416 - protein, 497 aa, Corynebacterium glutamicum ATCC 13032
MNAATRRASLQLPYTHVDDFYINGSWVKAEGTQRNPVVDPAVGQEWGSVPEATASELDSAVGAARTALKSWSALTGAERTGYLLKIATEIESRSEALALTNTRENGSPISETRGAASNAAGIFRYFATLAPWLDGEDIRPFPAGSAESIVDKDPIGVCALIAPWNFPINLVVIKLAPALLAGCTVIIKPASPTPLSIRFIIEAIEAAGVPAGVVNLLTGSGRFGDALVRHPGVDKVAFTGSTPVGKKIAAACGELLRPVTLELGGKSSAIILPDADMSVLSTRLIRSCMRNTGQTCYISTRIIAPSSRYAEVVQTVASTIAAGRQGDPYDEETVFGPVASASQYSTVMSYIDSAREEGARVVAGGTRSISLSEGLESGEFIQPTVFADVTPDMRISREEIFGPVISILKYDDTNGVSEAIALANNTKFGLGGLVFGADEEQALEVARQVDSGSVGINFFGSNHSAPFGGRHESGMGVEYGIEGLSAYLTYKSIHRTI

SEQ ID NO: 417 - protein, 305 aa, Zea mays
MRFGMNLGGETSKRKQNRTNEPASAHANQEKRWVLSDFEVGKPLGRGKFGHVYLAREKRSSEIVALKVLFKSQLKQSQVEHQLRREVEIQSHLRHPNILRLYGYFYDQTRVYLILEYAAKGELYKELTRCKHFSERRTATYVASLARALIYLHGKHVIHRDIKPENLLVGVQGEIKIADFGWSVHTFNRRRTMCGTLDYLPPEMVEKAEHDYHVDIWSLGVLCYEFLYGVPPFEAKEHSETYRRIVKVDLKFPLKPFVSPAAKDLISQMLVKSSAQRLPLHKVLEHPWIVQNADPSGVYREGRSI

SEQ ID NO: 418 - protein, 112 aa, Bartonella sp. sh8784ga
ANEACLKMLQEIGSVKRIPEFIARAKDKNDPFRLMGFGHRVYKNYDPRAKIMQKTCHEVLKELNIQDDPLLDIAIELEKIALNDEYFAEKKLYPNVDFYSGITLKALGFPTE

SEQ ID NO: 419 - protein, 112 aa, Bartonella sp. pn15646ga
ANEACLKMLQEIGSIKKIPEFIARAKDKNDPFRLMGFGHRVYKNYDPRAKIMQKTCHEVLKELNIQDDPLLDIAIELEKIALSDEYFIEKKLYPNVDFYSGITLKALGFPTE

SEQ ID NO: 420 - protein, 180 aa, Capsicum annuum
MASSVMSTATVATGANAAQASMIASFNGLKSAASFPVTRKQDLDITSIASNGGRVQCMLVWPPINKKKYETLSYLPDLSDEQLLKEIEYLLQKGWVPCLEFETEHGFVYREHHRSPGYYDGRYWTMWKLPMFGCTDATQVLNEVQEAKKAYPQAWIRIIGFDNVRQVQCISFIAYKPEGY

SEQ ID NO: 421 - protein, 438 aa, Magnetospirillum magnetotacticum MS-1
MTNENKTPKESVTLINNSTGKTTEFPLLAGSIGPKVADIRSLYASQDIFTYDPGYMSTGSCKSAITYIDGDAGVLLHRGFAIADLAENCSFLEVAYLILKGELPNAEQKTKFEFDIAHHSMVHEQINFFFRGFRRDSHPMAVLCGVVGAMAAFYHDSIDINDPHHRMVASYRLVAKMPTIVAWAYKYAQGQPFMFPQNKLSYSENFLHMMYATPCEEYKVSPVLARAMDRILILHADHEQNASTSTVRLAGSSGANPFACIAAGIASLWGPAHGGANEAVLQMLHEIGSVERIPEFIKKAKDKDDPFRLMGFGHRVYKNYDPRAKIMQKTCHEVLSELGVHDEPLLKLAMELERIALEDPYFVERKLFPNVDFYSGIIFRAMGIPTQVFTCLFALARTVGWIAQWNEMLTDPDQKIGRPRQLYVGPAQRDFVPLHKRG

SEQ ID NO: 422 - protein, 363 aa, Buchnera aphidicola
MKKKYRIAVLPGDGIGPEVMREAYKILNILKNHFSLPLETREFNIGGSAIDQEGTALPKKTLLGCENSDAILFGSVGGKKWDDLPINQRPERASLLPLRKHFNLFANLRPAKLYSELKYLSPLRSDIIKNGFDILCIRELTGGLYFGKPTGRLKKNNIEYAFDTEIYYNYEITRIAHLAFQLAQTRNFKICSIDKSNVLNSSVLWREIVKKVSKNYPDVHLSHLYIDNATMQIIKDPNQFDILLCSNLFGDIISDECAIITGSIGMLPSASLNEKKFGLYEPAGGSAPDIEGKNIANPIAQILSVSMLVRYGMNLKTIADKIDQSVISVLKKGYRTADISNNNNYLKTNEMGDVIANTLISGE

SEQ ID NO: 423 - protein, 490 aa, Acinetobacter sp. ADP1
MSDVKLHRLYIHGQYTDATSGKTFDSINPATGEVIATIQQASQTDIEAAVKSAAEGQKVWAAKTAVERSRILRRAVDILRERNDELAQLETLDTGKAFSETSTVDIVTGADVLEYYAGLATAIQGEQVPLRESSFFYTRREPLGVVAGIGAWNYPIQIALWKSAPALAAGNAMIFKPSEVTPLTAFKLAEIYSEAGLPAGVFNVVQGAGREIGQWLTEHAVIEKISFTGGVETGKKVMASAAGSTLKEVTMELGGKSPLIICEDANLDRAADIAVMANFFSSGQVCTNGTRVFIPQRLKAAFEQAVVERVKRIRMGDPQHTDTNFGPLVSFPHMEKVLSYIESGKQQGAKVLIGGERATTGLLAQGAYVQPTVFTDCHDDMKIVQEEIFGPVMSILTYDTIEEAIERANNTNFGLAAGVVTQNISQAHQIIHQLEAGICWINTWGESPAEMPVGGYKESGVGRENGISTLNHYTRTKSIQVELGDYQSVF

SEQ ID NO: 424 - protein, 467 aa, Candida tropicalis
MSALRSFQRSSNVAKSTLKNSVRTYATAEPTLKQRLEEILPAKAEEVKQLKKDYGKTVIGEVLLEQAYGGMRGIKGLVWEGSVLDPIEGIRFRGRTIPDIQKELPKAPGGEEPLPEALFWLLLTGEVPTEAQTRALSEEFAARSALPKHVEELIDRSPSHLHPMAQFSIAVTALESESQFAKAYAKGVHKSEYWKYTYEDSIELLAKLPTIAAKIYRNVFHDGKLPAQIDSKLDYGANLASLLGFGENKEFLELMRLYLTIHSDHEGGNVSAHTTHLVGSALSSPFLSLAAGLNGLAGPLHGRANQEVLEWLFKLREELNGDYSKEAIEKYLWDTLNAGRVGPGYGHAVLRKTDPRYTAQREFALKHMPDYELFKLVSNIYEVAPGVFDQHGMTKNPWPNVGSHSGVLLQYYGLTEESFYTVLFGVSRAFGVLPQLILDRGLGMPIERPKSFSTEKYIELVKSIGKN

SEQ ID NO: 425 - protein, 306 aa, GIBBERELLA ZEAE PH-1
MAPSTFKLNTGQEIPAVGLGTWQSPAGEVEKAVTYALKDGYKLIDCAYCYGNEEEVGAGLKAAFKAGVKREDIFVVTKAWATYNTRVELALDKSLKALGLDYVDLFLVHWPLLLNPDGNDDKFPKKPDGSRDVIRDYNHVDGWKLMEKLPATGKTRAVGVCNYSKKYLEELLPHATIVPAVNQIENHPELPQQEIVDFCKEKGIHIEAYSPLGSTGGPVMSAEPVVKIADKKGVSASTVLLSYHGNTVLAKSVNPERITANKTIVDLDDEDMKALNDYSAELQKNNQVKRYVYPPFGIDFGFPDKS

SEQ ID NO: 426 - protein, 380 aa, GIBBERELLA ZEAE PH-1
MATDRVKASVLHGEKDLRLEERELPKPSSNEVQVAVQSTGLCGSDLHYYNHFRNGDIIVREPLTLGHESAGTVVAVGSEVTHLKPGDHVALEVGLPCETCELCDEGRYNICRGMKFRSSAKANPHAQGTLQERINHPAKWCHKMPEHVTLDLGALVEPLSVAMHARDRASLPKGSTVLVLGAGAVGLLAAAVAKADQAKTVIIADILKDRLDFATSNGFADASVVVPMERPQTIEDKLAFAQKVAAMVKETQIDGEAIGEVTAVYECTGVETCVQTAIYATKPGGKVMIIGMGTPVLTIPMSAAALREVDIVGVFRYANTYKEIIELLSNPPANMPDVSRLVTQRYSGMDKIEEAFKMAGKVRDEQGNLVIKVVVDFSEK

SEQ ID NO: 427 - protein, 473 aa, Zea mays
SLYQRGESASERKTYPNPLQDNPAYSVVKQYFVNPDDTVTQKIVVHKTSARGTHFRRAGPRQRVYFQSDEVNAAIVTCGGLCPGLNTVIRELVCGLYDMYGVSSVVGIEGGYKGFYSKNTVALTPKSVNDIHKRGGTVLGTSRGGHDTAKIVDCLQDRGINQVYIIGGDGTQKGASVIYEEVRRRGLKCSVVGVPKTIDNDIAVIDKSFGFDTAVEEAQRAINAAHVEAESAENGIGVVKLMGRNSGFIAMYATLASRDVDCCLIPESPFYLEGKGGLLEFVERRLKDNGHMVIVVAEGAGQDLIARSMNFVDTQDASGNKLLLDVGLWLSQKIKDHFKKKPSFPITLKYIDPTYMIRAVRSNASDNVYCTLLAHSALHGAMAGYTGFTVAPVNGRHAYIPFYRITEKQNKVVITDRMWARVLCSTNQPCFLSHEDVENMKHDDDEHHHMHNTQLLEGGSSPVSKCNGSAAAV

SEQ ID NO: 428 - protein, 170 aa, Zea mays
  unsure (1)..(170): unsure at all Xaa locations
MDGRMFGLETPLMVALQHLLDVPDGDAGAGGDKASGAAAGGGPTRTYVRDARAMAATPADVKGAPGRVXAFVVDMPGLGTGDIKVQVEDERVLVISGERRREEREDAKYLRMERRMGKFMRKFVLPDNADMDKISAVCRDGVLTVTVEKLPPPEPKKPKTIEVKVRLRWD

SEQ ID NO: 429 - protein, 516 aa, Glycine max
EWEMDQLLWRVLPLLTILVSFGVFFYLQDSYTAQFYALIKLPRDKCSLLPHRHFWISSKRIVTPQGIISGSVEINDGKIISVVEGHAIQGKPKQEEVIDYGDAVIMPGLIDVHVHLNEPGRTEWEGFDTGTRAAAAGGVTTVVDMPLNCYPTTVSKEKLKLKLDAAEDKIYVDVGFWGGLIPENALNTSILDGLLSAGVLGVKSFMCPSGIDDFPMATIDHIKAGLSVLAKYRRPIVVHAEIQQDFENHLELNEDNLDPRAYLTYLNTRPPSWEEAAIKQLVSVTKDTRKGGPLEGAHVHIVHLSDSSASLDLIKEAKSHGDSISVETCPHYLAFTSEEIPNGDTRFKCSPPIRDAYNKDKLWEAVLEGHIDLLSTDHSPTVPELKLMEEGDFLKAWGGISSLQFNLPVTWSYGKKYGLTLEQLSLLWSKKPATLAGLESKGTIAVGNHADIVVWQPELEFDLDDDYPVFIKHSELSAYMGRRLSGKVLETFVRGNLVFKDGKHAPAPCGVQILAK

SEQ ID NO: 430 - protein, 552 aa, Glycine max
MALAPPSVFALYIVIDLKIEIYMTISAMCGILAVLGCVDNSQTKRARIIELSRRLRHRGPDWSGIHCYEDCYLAHQRLAIVDPTSGDQPLYNEDKTVIVTYEEHGEEFVNMLDGMFAFILLDTRDKSFIAARDAIGITPLYLGWGHDGSTWFASEMKALSDDCERFISFPPGHIYSSKQGGLRRWYNPPWFSEDIPSTPYDPTLLRETFERAVVKRMMTDVPFGVLLSGGLDSSLVAAVVNRYLAESESARQWGSQLHTFCIGLKGSPDLKAAKEVADYLGTRHHELYFTVQEGIDALEEVIYHIETYDVTTIRASTAMFLMSRKIKALGVKMVLSGEGSDEIFGVFMALMIWQIKALHLYDCLRANKSTAAWGVEARVPFLDKEFINVAMSIDPEWKMIRPDLGRIEKWVLRNAFDDDKNPYLPKHILYRQKEQFSDGVGYSWIDGLKDHANKQVTDATMMAANFIYPENTPTTKEGYLYRTIFEKFFPKNAAKATVPGGPSVACSTAKAVEWDAAWSKNLDPSGRAALGIHDAAYDAVDTKIDEPKNGTL

SEQ ID NO: 431 - protein, 497 aa, Photorhabdus luminescens subsp. laumondii TTO1
MSDINLLQPVMAFLQHNHGHYINGQPVSGQGSETFSVINPATDEIIATVNQGGKAEVNAAMQAAQAAFHGVWAQTSPMERGHCLNRLADLLLAHREELAQLETLCSGKTIQLSRMLEIDSSAQFLRYFAGWSSKISGETLNVSLPSFKGEQYTAFTRREPIGVVVGIIPWNFSIMIAIWKMAAALTCGCTIVLKPSEYTPLTMLRVAELAKQAGIPDGVINVINGSGSVLGPALIGHPLCAKVTFTGSVPTGIAVGKSAMEQGLTRATLELGGKNGAAFLADMSVEKIVDGILEAGYLNQGQICAAAERFYIPASHMDDVLKLLSERLAAMKIGSPLDDSTEMGPLANKAHYDKILSLFEQARQEGSEIVYGGHALAGPGFFVAPTVIRANSPEDSLMKEETFGPVGTFLSYNDEEELIGLMNSTPFGLAASLWTNDLSKAMRMIPRIEAGTVWVNMHTFLDPALPFGGTKSSGIGREFGSAFIEHYTELKSVMVRY

SEQ ID NO: 432 - protein, 521 aa, Triticum aestivum
  unsure (1)..(521): unsure at all Xaa locations
MAATPPSSRDPSPQPRRPAAAAGRPAASGTGTIGNGKRGGLLLGRYELGRVLGHGTFAKVYHARHADTGETVAIKVLDKEKALRAGLVPHIKREITILRRVRHPNIVRLFEVMATKSKIYFVMEFVRGGELFARVAKGRLKEDTARRYFQQLISAVGFCHARGVFHRDLKPENLLVDERGDLKVSDFGLSAVADQFHPDGLLHTFCGTPSYVAPEMLARRGYDGAKADIWSCGVILFVLMAGYLPFHDQNLMAMYRKIYRGEFRCPRWFSRDLTSLLNRLLDTNPETRITMAEVMQSRWFQKXGFRPVRFYVEDDQLHSLGDSESEELGLVEPTEPPLPPPXFPPPLPPPPQQEDDDSGWESDSSVASCPATLSCEERQRPAGRLTRPASLNAFDIISFSKGFDLSGLFEERGSEVRFISAQPMETIVTKLEEIAKMKSFSIRRKDWRVSIEGTREGEKGPLTIGAEIFELTPSLLVLEVKKKAGDKAEYDDFCNKELKPGMEPLVHHQSGSARNVPSDTE

SEQ ID NO: 433 - protein, 1291 aa, Ustilago maydis 521
MALDGKDASELQFGLTAYNIHGSIRDSRSMIDCGARAHSHSGHTSRFAIDCGVRVHSHSGRTSRSNEFVQAEKLTSYAVMYGFVLGCVRVEVRVSAPESTVQRYPSAKMIDVEQMPFDLYTYTRSAVAAAATATSTAAAAVINDTIDWNHGNPHAGGGNNGSDDNPAIPLPNQRAFEGPWFSQQLSLSIFIGLASFFIFVFVRRRNAALFAPRTKLKGFSPLDDGHDVGYFGWIMPTLKTEEMRILQTVGMDAAILLSFLKMGFWLFFSLSCWSILVLMPVNYWQNGVLDGVSPAEDRDNATDPFSARDTVTGVWTQLIFNSLKNKHEAPEEPLPQLPLPAKPAQAQLYHATHLLSTYLFTILAMRAIWINYQRFVRSRQLYILEIVESIPARTVEIRDLPAHLRDEKALAEYFENMDMPVESTAVVRNTEGLSRLLKLRSNALQQLEKIWVRWLGNPTDADGYDPEKIMLLAAGANHDDLLSSHDSDDLVRISVDDGDRSQARPRDDHEHSHLLGGNASNTVFTGADTIRTHHPRPTMRKQWWNPFSEKVDAIDELTRQFHAVDRAVRRRRKTGRFPGGNVGFVTFQSAASAQIASQTVHYPMPAYCATSMAQEPRDIIWSNIDLSNNDRRVRQVLVSIFMVAVLVFYIPPLVFLASFVSPGAIKKYAPWLDRLLDTDQRLRALVQNNLPSLVVIGFNALLPLVLEYSSYLQGLKARSLVEYSLLKKYYLFLMVSVVFIFLIATTAWGVLQELAENPMRVIDKLAASLPKARFFSLSYVILQGIALQPLQLLQLPTLILRAFYRVFLTRTPREFAELNAPPTLAMGNVYPQALLIFTLCILYSIVSPLIVIFGTVYFGIAYVVNKYKLLYVFYKPYESQGQAWPISASRCIWALVLFHIFQFSLFSVRKELWMSTGLLPLIVFTFWFNGHLETTFGPLTEHVNLSSVVEVLKEREVDPRLAELAQNGPPGVVRAEVGVGQGVVSTDTSAANAVGGNGGRSGTVTPSSSRSKQLLSLDPSHKIDPAFTKLALARYSPDEEDETLFVAQRDTKTDYREPPGAGYYPGVLNTGRRRYGHPAITGILPELWLPIPKQRMEQGGPDVTEADDLESATGVASATTSALGAPRLGLSNDAASATRLIRTRALSKAEPLILSLRKRKSSLMTRATSRTTCSAQRPPTADSRNDGTSIDRDRDRDAPSDDRDPDLGVWSDGVSGPQGSSSSAALGEALSGAYAVAPARQHIRNGIDTHDADDGEDEGVYIHRSATRKGAPPTGTRSGVRSAAHTAAYHD

SEQ ID NO: 434 - protein, 360 aa, Streptomyces peucetius
GSPNSTAEPTVAARPQQIDALRTLIRLGSLHTPMVVRTAATLRLVDHILAGARTVKALAARTDTRPEALLRLIRHLVAIGLLEEDAPGEFVPTEVGELLADDHPAAQRAWHDLTQAVARADISFTRLPDAIRTGRPTYESIYGKPFYEDLAGRPDLRASFDSLLACDQDVAFDAPAAAYDWTNVRHVLDVGGGKGGFAAAIARRAPHVSATVLEMAGTVDTARSYLKDEGLSDRVDVVEGDFFEPLPRKADAIILSFVLLNWPDHDAVRILTRCAEALEPGGRILIHERDDLHENSFNEQFTELDLRMLVFLGGALRTREKWDGLAASAGLVVEEVRQLPSPTIPYDLSLLVLAPAATGA

SEQ ID NO: 435 - protein, 249 aa, Hordeum vulgare subsp. vulgare
MDMGLEVSSSSPSSSSVSSSPEHAARRASPAKRPAGRTKFRETRHPVYRGVRRRGNTERWVCEVRVPGKRGARLWLGTYATAEVAARANDAAMLALGGRSATCLNFADSAWLLAVPSALSDLADVRRAAVEAVADFQRREAADGSLAIAVPKEASSGAPSLSPSSGSDSAGSTGTSEPSANGVFEGPVVMDSEMFRLDLFPEMDLGSYYMSLAEALLMDPPPTATIIHAYEDNGDGGADVRLWSYSVDM

SEQ ID NO: 436 - protein, 246 aa, Pinus banksiana
YTYNLRKKGPEDVIVKVIYCGICHSDLVQMRNEMGMSHYPMVPGHEVVGIVTEIGSEVKKFKVGEHVGVGCIVGSCRSCGNCNQSMEQYCSKRIWTYNDVNHDGTPTQGGFASSMVVDQMFVVRIPENLLLEQAAPLLCAGVTVFSPMKHFGMTEPGKKCGILGLGGVGHMGVKIAKAFGLHVTVISSSDKKKEEAMEVLGADAYLVSKDTEKMMEAAESLDYIMDTIPVAHPLEPYLALLKTNGK

SEQ ID NO: 437 - protein, 251 aa, Zea mays
  unsure (1)..(251): unsure at all Xaa locations
MASKSTMRSLVLIMGLLLLSCSGISSAARLLEEVAPKEEYPHPEVPELPKPELPPHPTVPELPKPDELPPHPVVPELPKPEVPVHPAVPELPKPELPPHPTVPELPKPEVPAHPAVPELPKPELPPHPTVPELPKPEVPELPKPEVPEHPAVPELPKPELPPHPTVPELPKPEVPELPKPEVPEHPAVPELPHPDVPEHPASVPELPKPEVPEHPTVPELPKHELPPLPEPEXHCPPKAESHYPEPGMAKP

SEQ ID NO: 438 - protein, 163 aa, Triticum aestivum
  unsure (1)..(163): unsure at all Xaa locations
MSDTDEHHFESKADSGASKTYPQQAGAIRKGGHIVIKARPCKVVEVSTSKTGKHGHAKCHFVAIDIFNGKKLEDIVPSSHNCDVPHVDRQXYQLIDITDDGYVXLLTESGNTKDDLNSTDDFCLGSQDGLLMEGLICRDSAWVKKCACEGIGGGITLSGATHT

SEQ ID NO: 439 - protein, 500 aa, Atriplex triangularis
MAFPMPVRQLFIDGERREPLLKNRIPIINPSTEEIIGDIPAATAEDVEVAVVAARKAFKRNKGRDWAATSGAHRAKHLRAIAAKITERKDHFVKLETLDSGKPFDEAVLDIDDVASCFEYFAGQAEALDAKQKAPVTLPMDRFKSHVLRQPIGVVGLISPWNYPLLMATWKIAPALAAGCTAVLKPSELASVTCLEFGEVCNEVGLPPGVLNILTGLGPDAGAPIVSHPDIDKIAFTGSSATGSKIMASAAQLVKPVTLELGGKSPVIMFEDIDIETAVEWTLFGVFWTNGQICSATSRLLLHESIAAEFVDRMVKWTKNIKISDPFEEGCRLGPVISKGQYDKIMKFISTAKSEGATILCGGSRPEHLKKGYYIEPTIITDITTSMQIWKEEVFGPVICVKTFKTEDEAIELANDTEYGLAGAVFSKDLERCERVTKALEVGAVWVNCSQPCFVHAPWGGVKRSGFGRELGEWGIENYLNIKQVTSDISDEPWGWYKSP

SEQ ID NO: 440 - protein, 245 aa, Pinus armandii
YTYSLRKKGPEDVIVKVIYCGICHSDLVQMRNEMGMSNYPMVPGHEVVGMVTELGSEVKKFKVGDHVGVGCIVGSCRSCGNCNQSMEQYCSKRIWTYNDVNHDGTPTQGGFASSMVVDQMFVVRIPENLPLEQAAPLLCAGVTVFSPMKHFGMTEPGKRCGILGLGGVGHMGVKIAKAFGLHVTVISSSDKKKEEAMEVLGADAYLVSKDAEKMMEAAESLDYIMDTIPVAHPLEPYLALLKTNG

SEQ ID NO: 441 - protein, 246 aa, Pinus armandii
YTYSLRKKGPEDVIVKVIYCGICHSDLVQMRNEMGMSNYPMVPGHEVVGMVTELGSEVKKFKVGDHVGVGCIVGSCRSCGNCNQSMEQYCSKRIWTYNDVNHDGTPTQGGFASSMVVDQMFVVRIPENLPLEQAAPLLCAGVTVFSPMKHFGMTEPGKRCGILGLGGVGHMGVKIAKAFGLHVTVISSSDKKKEEAMEVLGADAYLVSKDAEKMMEAAESLDYIMDTIPVAHPLEPYLALLKTNGK

SEQ ID NO: 442 - protein, 371 aa, Acinetobacter sp. ADP1
MCKVIQFKGFQQSFKRKITMKAARFYDRGDIRIEDIPEPEVTAGTVGIQVAWCGICGTDLHEFMEGPIFIPPCGHPHPISGESAPITMGHEFSGVVYAVGEGVDDIQVGQHVVVEPYIVADDVPTGPGENYHLSKNMNFIGLGGRGGGLSEKIAVQRRWVHPISENIPLDQAALIEPLSVGHHAYVRSGAKAGDVALVGGAGPIGLLLSAILKAKGLTVIITELSSKRKEKAKESGVADYILDPTQVDVIAEVMKITQDKGADIAFECSSVNKVLDTLVASTKPTGVIVIVSIWSHPATVNVHSVVMKELDIRGTIAYVNDHQETIKLVEQGKINLAPFITQRIKLDDLISQGFETLIHNNESAVKIIVHP

SEQ ID NO: 443 - protein, 246 aa, Picea smithiana
YTYTLRNKGPEDVIVRVIYCGICHSDLVQMHNEMGMSNYPMVPGHEVVGVVTEIGSEVKKFKVGEHVGVGCIVGSCRSCSNCNGSMEQYCSKRIWTYNDVNHDGTPTQGGFASSMVVDQMFVVRIPENLPLEQAALLLCAGVTVYSPMKHFGMTEPGKKCGILGLGGVGHMGVKIAKAFGLHVTVISSSDKKKEEALEVLGADAYLVSKDAEKMQEAAESLDYIMDTIPVAHPLEPYLALLKTNGK

SEQ ID NO: 444 - protein, 147 aa, Brassica napus
MATVGRNIAAPLLFLNLIMYLIVLGFASWCLNRYINGQTNHPSFGGNGATPFFLTFSILAAVIGIASKLAGANHIRFWRNDSLAAAGSSSIVAWAVTALAMGLACKQINIGGWRGWRLRIIEAFIIILTFTQLLYVLLIHAGVFSSK

SEQ ID NO: 445 - protein, 480 aa, Triticum aestivum
  unsure (1)..(480): unsure at all Xaa locations
MDRADPARGRLAVLSSHLLAGVLAVVDSRTGKRYEVKVSEDGTVRATDFKKITTGKDDKGLKTYDPGYLNTAPVRSSICYIDGDEGILRYRGYPIEEVAESSSFVEVAYLLMYGNLPTQSQLAGWESAISQHSAVPXGLLDIIQSMPXDAHPXGVLASAMSTLSVFHPDANPALRGQDLYKSKQVRDKQIVRVLGKAPAIAAAAYLRLAGRPAVLPSNNLSYSENFLYMLDSLGDKEYKPNPRLARVLDILFILHAEHEMNCSTAAVRHLASSGVDVFTALSGAVGALYGPLHGGANEAVLKMLNEIGAVENIPDFIEGVKNRKRKMSGFGHRVYKNYDPRAKVIRKLAEEVFSIVGRDPLIEVAVALEKAALSDDYFIKRKLYPNVDFYSGLIYRAMGFPTEFFPVLFAIPRMAGWLAHWKESLDDPDNKIMRPQQVYTGVWLRHYTPVRERVASNQGEELGQIATSNATRRRRAGSSL

SEQ ID NO: 446 - protein, 168 aa, Cucumis sativus
GSVRAKNTMNIMLTNVLDAAAGGLFYYLFGFAFAFGTPSNPFIGRHFFGLKSIPSTAADYSFFLYQWAFAIAAAGITSGSIAERTQFVAYLIYSSVLTGFVYPVVSHWFWSPDGWASPSRTDGDLLFGTGVIDFAGSGVVHMVGGIAGLWGALIEGPRIGRFDKTGRS

SEQ ID NO: 447 - protein, 455 aa, Bacillus megaterium
TIKEMPQPKTFGELKNLPLLNTDKPVQALMKIADELGEIFKFEAPGRVTRYLSSQRLIKEACDESRFDKNLSQALKFVRDFAGDGLFTSWTHEKNWKKAHNILLPSFSQQAMKGYHAMMVDIAVQLVQKWERLNADEHIEVPEDMTRLTLDTIGLCGFNYRFNSFYRDQPHPFITSMVRALDEAMNKLQRANPDDPAYDENKRQFQEDIKVMNDLVDKIIADRKASGEQSDDLLTHMLNGKDPETGEPLDDENIRYQIITFLIAGHETTSGLLSFALYFLVKNPHVLQKAAEEAARVLVDPVPSYKQVKQLKYVGMVLNEALRLWPTAPAFSLYAKEDTVLGGEYPLEKGDELMVLIPQLHRDKTIWGDDVEEFRPERFENPSAIPQHAFKPAGNGQRACIGQQFALHEATLVLGMMLKHFDFEDHTNYELDIKETLTLKPEGFVVKAKSKKIPL

SEQ ID NO: 448 - protein, 483 aa, Burkholderia cepacia R18194
MNEFLRTGHYIGGEWHESHGASDATYPVLNPATGETIAKVAKGGADDTQRAIDAAAHAFPAWRALTAKERGARVKRWGELMLENRDALAELLTREQGKPLAEARGEVVYAASFLEWFAEEAKRMYGDVIPSPKPNSQIVVTREPVGVVAAITPWNFPLAMITRKAGPALAAGCTMVLKPSEETPLSAFALAVLAERAGVPAGVFNVVSGDAVAIGETLTSSSVVRKLSFTGSTRVGKLLAKQSADTLKKLSLELGGNAPFIVFDDADLDAAVEGAIASKFRNTGQTCVCVNRFLVQDGVYDAFTRKLADAVRKLRVGNALAGEVDQGPLINEAALGKVERHVADATAKGAHALTGGKRHALGGTFYEPTVLTGMTADMLIAEEETFGPVAGCFRFATEEEAVAAANDTPFGLSAYFYTRDLGRAWRVSGALESGMVGVNDGIISTEVAPFGGVKQSGLGREGSKYGLDEYVELKYTLMAGLGR

SEQ ID NO: 449 - protein, 119 aa, Armoracia rusticana
PGSFNKILVTYETGTYNGQWSAVGRTAVTTTLAGCTAALTTLFGKRLLSGHWNVTDVCNGLLGGFAAITGGCSVVEPWAAIICGFVAALVLLGCNKLAEKLRYDDPLEAAQLHGGCGAW

SEQ ID NO: 450 - protein, 455 aa, Bacillus megaterium
TIKEMPQPKTFGELKNLPLLNTDKPVQALMKIADELGEIFKFEAPGRVTRYLSSQRLIKEACDESRFDKNLSQALKFVRDFAGDGLFTSWTHEKNWKKAHNILLPSFSQQAMKGYHAMMVDIAVQLVQKWERLNADEHIEVPEDMTRLTLDTIGLCGFNYRFNSFYRDQPHPFITSMVRALDEAMNKLQRANPDDPAYDENKRQFQEDIKVMNDLVDKIIADRKASGEQSDDLLTHMLNGKDPETGEPLDDENIRYQIITFLIAGHETTSGLLSFALYFLVKNPHVLQKAAEEAARVLVDPVPSYKQVKQLKYVGMVLNEALRLWPTAPAFSLYAKEDTVLGGEYPLEKGDELMVLIPQLHRDKTIWGDDVEEFRPERFENPSAIPQHAFKPWGNGQRACIGQQFALHEATLVLGMMLKHFDFEDHTNYELDIKETLTLKPEGFVVKAKSKKIPL

SEQ ID NO: 451 - protein, 455 aa, Bacillus megaterium
TIKEMPQPKTFGELKNLPLLNTDKPVQALMKIADELGEIFKFEAPGRVTRYLSSQRLIKEACDESRFDKNLSQALKFVRDFAGDGLFTSWTHEKNWKKAHNILLPSFSQQAMKGYHAMMVDIAVQLVQKWERLNADEHIEVPEDMTRLTLDTIGLCGFNYRFNSFYRDQPHPFITSMVRALDEAMNKLQRANPDDPAYDENKRQFQEDIKVMNDLVDKIIADRKASGEQSDDLLTHMLNGKDPETGEPLDDENIRYQIITFLIAGHETTSGLLSFALYFLVKNPHVLQKAAEEAARVLVDPVPSYKQVKQLKYVGMVLNEALRLWPTAPAFSLYAKEDTVLGGEYPLEKGDELMVLIPQLHRDKTIWGDDVEEFRPERFENPSAIPQHAFKPYGNGQRACIGQQFALHEATLVLGMMLKHFDFEDHTNYELDIKETLTLKPEGFVVKAKSKKIPL

SEQ ID NO: 452 - protein, 150 aa, Brassica napus
  unsure (1)..(150): unsure at all Xaa locations
MAIRLMDLDSPFFNTLHRIMDLTEDAEKNLNAPTRTYVRDAXAMAATPADVKEYPNSYVFVIDMPGLKSGDIKVQVEDDNVLLISGERKREEEKEKEGGKYLRMERRLGKLMRKFTLPENANTDAISAVCLDGVLTVTVNKLPPPQPKKP

SEQ ID NO: 453 - protein, 431 aa, Glycine max
  unsure (1)..(431): unsure at all Xaa locations
MRLGKYYLGRTLGEGNFGKVKXARNTDSGQAFAVKIIDKNTIVDINITNQIIREIATLKLLRHPNVVRLYEVLASKTKIYMVLEYVNGGELFDIIASKGKHIEGEGRKLFQQLIDGVSYCHTKGVFHRDLKLENVLVDNKGNIKITDFGLSALPQHLREDGLLHTTCGSPNYVAPEVLANKGYDGATSDTWSCGVILYVILTGHLPFDDRNLVVLYQKIFKGDVQIPKWLTPGARNMIRRILDPNPETRITMAGIKEDPWFKKGYIPVNPEDEDVYVDQEAFSIHEQPNEAEQRNSGSPSLINAFQLIGMSSCLDLSGFFEKEDVSERKIRFASNLSVKDLIERIEDTATEMEFRVEKKNGKLKVIRENKVHKTLGCLSVVVEVFGISSSLYVVELRKSYGDGSVYKQLCNKLLNDLGIPPKQPLVRSAAN

SEQ ID NO: 454 - protein, 257 aa, Brassica rapa subsp. pekinensis
MNSVSTLSEVLGSQNESPVGGDYCPMLAASCPKKPAGRKKFRETRHPIYRGVRLRKSGKWVCEVREPNKKSRIWLGTFKTAEIAARAHDVAALALRGRGACLNFADSAWRLRIPETTCAKDIQKAAAEAALAFEAEKSDTTTNDRGMNMEETSAVASPAELNDTTADHGLDMEETMVEAVFRDEQREGFYMAEETTVEGVVPEEQMSKGFYMDEEWTFEMPRLLADMAEGMLLPPPSVQWGHNDDFEGDVDMNLWSY

SEQ ID NO: 455 - protein, 249 aa, Zea mays
MFGYQKGLDVEAGTSGAAATGGARQLYPGMQESPELRWALIRKIYVILSLQLLLTAVVAAVVVKVRAIPHFFTTTSAGLGLYIFLIILPFIVLCPLYFYHEKHPVNLILLGLFTVAISFAVGMTCAFTSGKVILESAILTTVVVLSLTAYTFWAVNRGKDFSFLGPFLFAALIVLLVFALIQILFPLGKLSQMIYGGLASLIFSGYIVYDTNNIIRRYTYDQYVWAAVSLYLDVINLFLSLMTLFRAAD

SEQ ID NO: 456 - protein, 488 aa, Photorhabdus luminescens
MTIINHWINGKNVSSKTYFETTNPATGEVLAEVAAGGQEEIDQAVAAAKEAFPKWADLPMKERARLMRRLGELIDENVPEIAAMETKDTGLPIHQTQNVLIPRASHNFNFFAEICQQMNGHTYPVDDKMLNYTLVQPVGVCALISPWNVPFMTATWKVAPCLALGNTAVLKMSELSPLTANRLGELALEAGIPAGVLNVVQGYGATAGDALVKHHDVRAVSFTGGTVTGRQIMKNAGLKKYSMELGGKSPVLIFEDADIERALDASLFTIFSINGERCTAGSRIFIQQSIYPEFIKRFAERANRLRVGDPQDPNTQIGALISKPHWEKVSGYIRLGIEEGATLLAGGPDKPIDLPAHLKEGNFLRPTVLADVDNRMRVAQEEIFGPVACLLPFKDEAEGLRLANDVEYGLASYIWTQDVSKVLRLARNIEAGMVFVNTQNVRDLRQPFGGVKASGTGREGGEYSFEVFAEMKNVCISMGDHHIPRWGI

SEQ ID NO: 457 - protein, 317 aa, Oleomonas sagaranensis
MTLDAQAKAILDQIARSPMPKLHQVPASVARQMFEISCKLTEIKNLPIGRVEDRVIPGPDDTELPIRIYTPVAAPPGPLPVLVFFHGGGFVIGSLDSHDAPCRLIANEARCLVVSVDYRLAPENRFPAAVDDCLAAVTWVARNAAEINADPTRIAVGGDSAGGNLSAVVSQQLRDAGGPKIVFQLLIYPATDALHEGLSRTSNAEGYMLDKDLMSWFFAQYLGDGGGVDLADPRFSPLRHANLGNLGTIHVVVAGFDPLRDEGIAYAEALKAAGNKVTLSEFKGQIHGFCSMAGVIEAGRTALVEGAALLKEAFAQA

SEQ ID NO: 458 - protein, 421 aa, Hydrogenobacter thermophilus
MLKVESVYRWEGSLKVPQEGKFIKLKEDKSIEVPNFPIIPFIEGDGIGAEIMPAMIHIVNTAVEKAYGGSRNIFWVELLAGDKAEEKTGKRMPEETIEFLKEAVVGIKGPLGTPVGKGGKSLNAILRQSMDFYSAIRPVYWLGQPAPIPNPERVNVAVFRENSDDVYMSIEYMPKEERTQKVRKFFIEEMGVSEYALPEDCGITVKPMSEFKTKRHVRKALRWALQNNKKVVAVVGKGNIMKATEGAFMNWAFEVAKEPEFEGKVITEGEPKDGQVLMVKVITDQMLMQLVLKPEAYHVIITQNLNGDYISDLASALVGGPGFVPSGNIGDGYALFESTHGTAYDIAGKGIANPLSLTLSGAMMLEYLGWKEASELIYSAVKRTIAERLGTPDIANGFRKQGLEAKELTTLEFAKAIADRI

SEQ ID NO: 459 - protein, 490 aa, Photorhabdus luminescens
MTNDVNTELLRQQAYINGQWVDADNQATFKVTNPANGQVIAHVSNMGAAETERAIAAAQQALPAWRAMTAKQRSQILQRWFQLMMANQQALAELLSREQGKSQAEAMGEIAYGASFIEWFAEEGKRTYGETIPSPMPGRRIVTIKQPIGVVAAITPWNFPNAMITRKVGPALAAGCTVILKPASETPLSALALAALAEQAGIPAGVFNVVTGVDAKTIGGVLTQSPIVRKLSFTGSTRIGKLLMAQSADTVKKLSLELGGNAPFIVFDDANIDAAVQGALIAKFRNSGQTCVCANRILVQETIYDAFAERLAQAVNKLQVGPASDAKSQQGPLINQAAVDKVEEHINDAVSRGARILAGGKPHALGGLFFEPTVLADVNESMLISQEETFGPVAPLFKFRDEAEAIHLANDTEFGLAAYFYSRDIGRIYRVAEALESGMVGINEGLISNEVAPFGGIKQSGLGREGSRYGIEDYLEVKYLCFGGIEDTGV

SEQ ID NO: 460 - protein, 347 aa, Agrobacterium tumefaciens str. C58
MRGVVIHAAKDLRVEDVAGQPLAADEVRVAVAVGGICGSDLHYYNHGGFGTVRVREPMALGHEFAGTVVEVGSSVSHLVPGMRVAVNPSLPCGTCRYCAQGRQNQCLDMRFMGSAMRSPHVQGGFREVVTVHSTQPVQIADGLSMGEAAMAEPLAVCLHAARQAGSLLGKTVLITGAGPIGMLSLLVARLAGAAHIVVTDVADAPLDLARRIGADEAVNILRDADMLEKYRFEKGVFDVLFEASGNQAALLPALDLLRPGGIIVQLGLGGDFTIPMNLIVAKELQLRGTFRFHEEFAQAVNMMGRGLIDVKPLISATLPFDQAREAFDLAGDRAKSMKVQLAFSGAA

SEQ ID NO: 461 - protein, 539 aa, Glycine max
MDSSSSSPNNNNNHHASTTKTNGFLIHPKLGFEPARSRSRLAMASPANTSEPKIVTGTAGYILEDVPHFTDYIPNLPTYPNPLQDNPAYSVVKQYFVHVDDSVPQKVVVHKDGARGVHFRRAGPRQKVYFEADEVQAAIVTCGGLCPGLNTVIRELVCGLHHMYGVKKVLGINGGYRGFYARNTITLTPKSVNDIHKRGGTVLGTSRGGHDTKKIVDSIQDRGINQVYIIGGDGTQKGASAIFEEVRKRGLKVSVVGIPKTIDNDIPVIDKSFGFDTAVEEAQRAINAAHVEAESVENGIGVVKLMGRNSGFIAMYATLASRDVDCCLIPESPFYLEGPGGLYEYIEKRLKENGHMVIVIAEGAGQELVSESVQSMSKQDASGNKLFQDVGLWISQKIRDHFAAQKTLPITLKYIDPTYMIRAIPSNASDNVYCTLLAQSAVHGAMAGYTGYTSGLVNGRQTYIPFYRITERQNHVVITDRMWARLLSSTNQPSFLDAKGDNEEKEEEEALNQLPDGHCAKDTSLASKEINSSIYPTAC

SEQ ID NO: 462 - protein, 213 aa, Desulfitobacterium hafniense DCB-2
MEFLLDSANPEEIRQAWAMGVIGGITTNPSLVAKEGRDFHQLLQELVQIVNGPISAEVIALDTEGMLGEARELAAMHPNIVVKIPMTEEGLKAVKVLKAEGIKTNVTLVFSAVQALLAARAGATYVSPFLGRLDDIGENGLLLLADICEVFGVHGLETKVIAASIRNPVHVTEAAKIGADYATVPFNVLCQLFKHPLTEAGIKKFLADWQKLK

SEQ ID NO: 463 - protein, 282 aa, Triticum aestivum
MPHKNTMASLVFLMALLLSCSSMTSAARHLEEALPKEYPPHPIVPELPKPQLPPHPAVPELPEPEPPHPLVPELPHPMVPEVPKHELPPHPLVPEVPHPMVPEVPKHELPPHPAVPELPKPKVPHPAVPEVAKEPEVPHPIVPEVPNKHEQPHPMVPEVPKHELPPHPVMPELPKPELPHPVAEVPKEHELPHPIVPEVPKEHELPHPAIPELPKTEMPHHAVPEVPKEPHVPHPEVPEVLKEPELPHPAVPEVPKHEMPPFPKAELPPKPELHFLEPEAKP

SEQ ID NO: 464 - protein, 246 aa, Pseudotsuga menziesii
YTYILRNIGPEGVLLRVIYCGICHSDLVQMRNEMGMSNYPMVPGHEVVGIVTEIGSEVKKFKVGEHVGVGCIVGSCRSCGNCNQSMEQYCSKRIWTYNDVNHDGTTTQGGFASTMVVDQMFVVRIPENLPLEQAAPLLCAGVTVFSPMKHFGMTEPGKKCGILGLGGVGHMGVKIAKAFGLHVTVISSSDKKKEEALEVLHADAYLVSRDAEKMMEAAESLDYILDTIPVSHPLEPYLALLKTNGK

SEQ ID NO: 465 - protein, 246 aa, Pseudotsuga menziesii
YTYILRNIGPEGVLLRVIYCGICHSDLVQMRNEMGMSNYPMVPGHEVVGIVTEIGSEVKKFKVGERVGVGCIVGSCRSCGNCNQSMEQYCSKRIWTYNDVNHDGTTTQGGFASTMVVDQMFVVRIPENLPREQAAPLLCAGVTVFSPMKHFGMTEPGKKCGILGLGGVGHMGVKIAKAFGLHVTVISSSDKKKEEALEALHADAYLVSRDAEKMMEAAESLDYILDTIPVSHPLEPYLALLKTNGK

SEQ ID NO: 466 - protein, 246 aa, Larix gmelinii
YTYTLRNKGPEDVIVRVIYCGICHSDLVQMRNEMGMSHYPMVPGHEVVGIVTEVGSEVKKFKVGEHVGVGCIVGSCRSCGNCNQSMEQYCSKRIWTYNDVNHDGTPTQGGFASTMVVDQMFVVRIPENLPLEQAAPLLCAGATVFSPMKHFGMTEPGKKCGILGLGGVGHMGVKIAKAFGLHVTVISSSDRKKEEALEVLHADAYLVSKDAEKMMEAAESLDYILDTIPVSHPLEPYLALLKTNGK

SEQ ID NO: 467 - protein, 119 aa, Lepidium sativum
PGSFNKILITYETGTYNGQWSAVGRTAVTTTLAGCTAALTTLFGKRLLSGHWNVTDVCNGLLGGFAAITGGCSVVEPWAAIICGFVGALVLLGCNKLAEKLKYDDPLEAAQLHGGCGAW

SEQ ID NO: 468 - protein, 246 aa, Larix gmelinii
YTYTLRNKGPEDVIVRVIYCGICHSDLVQMRNEMGMSHYPMVPGHEVVGIVTEVGSEVKKFKVGEHVGVGCIVGSCRSCGNCNQSMEQYCSKRIWTYNDVNHDGTPTQGGFASTMVVDQLFVVRIPENLPLEQAAPLLCAGVTVFSPMKHFGMTEPGKKCGILGLGGVGHMGVKIAKAFGLHVTVISSSDRKKEEALEVLHADAYLVSKDAEKMMEAAESLDYILDTIPVSHPLEPYLALLKTNGK

SEQ ID NO: 469 - protein, 384 aa, Xanthomonas campestris pv. campestris str. ATCC 33913
MNDTVIPGFKPKKSVALSGTAAGNTALCTVGRSGNDLHYRGYDILDLATSSEFEEIAYLLVHGKLPNSGELRGYKAKLRSLRGVPAAVKTALEQLPPSAHPMDVMRTGVSVLGCLQPEKDDHNHPGARDIADKLMASLGSMLLYWYHYSHNGKRIEVETDDDSIGGHFLHLLHGFAPKESWVRAMHTSLILYAEHEFNASTFASRVIAGTGSDMYSAIAGGIGALRGPKHGGANEVAFEVQKRYDTPDEAEADIKARVERKEVVIGFGHPVYTVSDPRNKVIKDVARELSDEQGSRKMYDIAERLETVMWDIKKMFPNLDWFSAVSYHMMGVPTAMFTPLFVLARTAGWSAHIIEQRVDGKIIRPSANYTGPEDQAFVPLDQRA

SEQ ID NO: 470 - protein, 287 aa, Triticum aestivum
MDGSIMGMGGNKVNYGGLYNIQGWGAPYFTVNMEGNLCVKADGQETKAGQEMDVLHVIQAAKQKRKDIQFPMILRFPNVLKHRLDALHAAFHTAISRARYTNTYQGVFPVKVNQNRAIVHDLVCFGHAYSYGLEAGSKPELLIAMSCLTKEANSRAFLVCNGYKDAEYVRLALSARAIGLNAIMVLDMEEELDIIIHQSSKLGVEPVIGVRAKLLTKIPGHYGSTAGKHGKFGLPADRIYEVAKKLKGLNKLHWLKLLHFHVGSMIPTTELVAKAATEAADIYCTLV

SEQ ID NO: 471 - protein, 119 aa, Capsella bursa-pastoris
PGSFNKILVPYETGTYNGQWSAVGRTAVTTTLAGCTAALTTLFGKRLLSGHWNVTDVCNGLLGGFAAITGGCSVVEPWAAIICGFVAALVLLGCNKLAEKLRYDDPLEAAQLHGGCGAW

SEQ ID NO: 472 - protein, 1341 aa, GIBBERELLA ZEAE PH-1
MTESSPRAVRFQGSEDDGRPDKVRGHRLETPIESNGDPHATERHDELGNLIGYGATGHTGSLTSLAPGTVINGVSKAQRGPNTGDDGTAYTPNGSWPQRPLGPARTPSNTYNPATSRKPAHPPATPSFTESIRSSSKTRPRNESRFRAQERAYVQKLRQDYSGGYFTSYSNLNGNDSDSEGETPSSEGPYDDRFDQETIMFYGNDTLQPTDEDLKDPENRERLEWHGMLEAVLTGDVVRQEKKRLIGSADQQAGKSAHKTELWLGIRSKVCGRHIPVQRRMLEESRSTLDRTLDEIINFQIKGESEAGKPPYEQVKDMVAKIQMCENLYPSWAALATEHKAADSATFKESHDAIISWYNTNEMINTELNILKKWVGNEELDFTRTKQRSPAVNGINNDETSFLDRLMKEDGLQSLYNDDNGNLEKGMLAPISTVISKAKDTLIRNSEAFRKRHLPPYLEELLTLISFPSRLIEEITRLRLAYARRVKESAQQNPLMQDQMISQFQLLLKFAIRIKIECTSIANPEPGWDLPPCIDESFDQVVLEALKYYFKMLNWKLSGNKNTFKEAELLFQEWDFANEIGSHLQRGHIEVAEQFSSLTFKALHRLSQTFEKELQAKPKETATEMSKRYKACLDSVRVRQRMLQRFTRMLNDNYEHASDYSISFPPETMQKFYDQLVASGHFQVDTRLLEQDNIYVIASPELRERLEDIQAMMAITSKDQFPDELGEQYLLILRPEDPLNWFGETIEVPLRDLNIDLKRGHIRLCASSPQTLHNARRAFIENVDMHVDLVQEARSNIQKVNSRLTEIRRVAYKLSNNFMDSVEIIRKQARGKDCQELIQTCFVFATEFGQRSLLYMDSNRRQMNNLKLTKLALDWVSFICDDCVASDRKTFRWAVLALELAMGMTRGRHILALGEGEYAKLRSKVAGCMSLLISHFDVMGARSNLAAQAEKERIEALVGQFRKLDKNRMMNDEEASRCVTEQRMSELERVDEYRCEKIAERQGVGRVLEGNNEVDRSLAYLSSSATNVTMRWQQGQFVGGGTFGNVYAAMNLDTGHLMAVKEIRLQDPKLIPQVAEQIREEMGVLEVLDHPNVVSYYGIEVHRDRVYIFMEFCSGGSLANLLEHGRIEDEQVIMVYALQLLEGLVYLHESGIAHRDIKPENILLDHNGIIKYVDFGAAKWIARQGRTLAGDVQPSLPNRSMTGTPMYMSPEVIKGENPGKPGAVDIWSLGCVILEMATGRRPWAQLDNEWAIMYNIAQGNPPQLPPSDQLSPQGLDFLKRCFTRDPRNRSSAVELLQHDWITSIRSQVVEPATPSDTSSSAQSTPTVGSISSKLGGSDGFY

SEQ ID NO: 473 - protein, 235 aa, Mesorhizobium sp. BNC1
MTDAKTLKIEAARVALGYVEDGMKLGIGTGSTAEEFVRLLATRVSSGMKIVGVPTSERTAALCRELSVPLSTLDETPELDLTVDGADEVGPDLTLIKGGGGALLREKIVAAASRRMIVIADESKVVDVLGTFPLPIEVNPFGLRATRIAIEAAAARLGLAGEMRTRMAGQEPFVTDGGHFIIDASFGRIQAPRALAEALNAIPGVVEHGLFIGLAGAAIIAGRNGVRTLDAGSRI

SEQ ID NO: 474 - protein, 325 aa, Zea mays
GRAEIPKAQTKSKRKRGQSRKGGGTRHRQPLLTGPHSHTNQPTSSACRFSCCGRSQLQVLEEDIRFHYCACGGSEEPVAEASIFGGRNKFPAWLGGPRRTDGMHRLLPGVLQRFSTAAAVEEPITPSVHVNYTKLLINGNFVDSASGKTFPTLDPRTGEVIAHVAEGDAEDINRAVAAARKAFDEGPWPKMTAYEKSRILLRFADLIEKHNDELAALETWDNGKPYEQAAQIEVPMVARLMRYYAGWADKIHGLIVPADGPHHVQILHEPIGVAGQIIPWNFPLLMFAWKVGPALACGNTLVLKTAEQTPLSALYISKLLHEAGL

SEQ ID NO: 475 - protein, 255 aa, Zea mays
  unsure (1)..(255): unsure at all Xaa locations
GRARHPVPAARIXRXWKHMWILXKIALAVPVLVFRSFDLVLQDLIDRTFEITLHSGAKTLNSFHLKQLKQCVKRYSSFDFLTEVVSKVPDLGGADSCGDERGLPRRRKSNGSDPENDESRSSKMAIRNANISPRGRGRGRGRGRGRPPTKRKEVGYVQFEDESSMFAEQGEPLPGEETVQEINGNETMPQSTQPPVEAPPTALAQATTSSKAEEANSDHQSDWPMPDAIGSIGVVPSGFGHLTVQVEDEDYDNED

SEQ ID NO: 476 - protein, 127 aa, Neurospora crassa
MIQLKTMLNCIDNSGAALVECAMVVGQKRHASIVVVVQKQRGADSAGMAASSAATKVKRGDIRHAVVVRTKQKVQRRDGSVVRFDDNACVLINKAGDPIGSRINGVVGQELRKKKWSKILSMAPMQA

SEQ ID NO: 477 - protein, 494 aa, Bacillus cereus ATCC 14579
MLKTNIELKPKVEAFLNEEIKMFINGEFVAAIGGKTFETYNPATEDVLAVVCEAQEEDIDAAVKAARSAFESGPWAEMTTAERAHLIYKLADLIEEHREELAQLEALDNGKPYQVALDDDISATVENYRYYAGWATKIIGQTIPISKDYLNYTRHEPVGVVGQIIPWNFPLVMSSWKMGAALATGCTIVLKPAEQTPLSLLYTAKLFKEAGFPNGVVNFVPGFGPEAGAAIVNHHDIDKVAFTGSTVTGKYIMRQSAEMIKHVTLELGGKSPNIILEDADLEEAINGAFQGIMYNHGQNCSAGSRVFVHRKHYETVVDALVKMANNVKLGAGMEKGTEMGPLVSKKQQERVLHYIEQGKKEGATVAAGGERALEKGYFVKPTVFTDVTDDMTIVKEEIFGPVVVVLPFDSTEEVIERANNSSYGLAAGVWTQNIKTGHQVANKLKAGTVWINDYNLENAAAPFGGYKQSGIGRELGSYALDNYTEVKSVWVNIK

SEQ ID NO: 478 - protein, 201 aa, Triticum aestivum
MSIAPESEFVIPNQSTINLGVQLKEKDDLQLVEIPVPKPEKDHVQVQLKCVGICGSDIHLWKYGEIGIFPVTQPQLLGHEGAGIVTAVGENVTSLRVGDRVAIEAGIPCSFCDQCMSGRYHLCPDVIFKSTPPYDGILAKYITHPARWLHKIPASISFEEGALLEPLSVAIAAVDRVRAKFGKSLLITGCGPVGLLILAGA

SEQ ID NO: 479 - protein, 488 aa, Agrobacterium tumefaciens
MKNSVQLITYVDRLSGGGFPELRALLDGRLQGLFGGVHALPFFNPIDGADAGFDPTDHTIVDPRLGSWDDVRTLAGSVEIMADLIVNHVSAQSSWFQDFIAKGPDSEFADMFMTFGKVFPRGASEQDLLNIYRPRPGLPFSKATLGDGSQRMLWTTFTPQQIDIDVHSAHGALYLETILDRFAEANVTAIRLDAAGYAIKKAGTSCFMIDETYAFLAKLAEKARDRGMEVLVEIHSYYRDQIEIARKVDRVYDFALPPLILHSLFTGDATALARWLEISPRNAITVLDTHDGIGVIDVGAHGHGRAGLLEPQAIDHLVEEIHRRSEGQSRLATGAAASNLDLYQVNCTYYDALGRSDNDYLIARAIQFFAPGIPQVYYVGLLGGLNDMELLRKTGVGRDINRRFFEDREIDLALESPLVKRLSDLIRFRNTHPAFNGSFEVATDDTGSLVLSWNFDAEFARLVVSFSQGKATITASGCYDFTFSGDVA

SEQ ID NO: 480 - protein, 300 aa, Zea mays
  unsure (1)..(300): unsure at all Xaa locations
SARVSLDDGSLYVDVSGGALWEDVLKRCVSEFRLAPRSWTDYLGLTVGGTLSNAGVSGQAFRYGPQTANVTELEVVSGKGETLVCSESQNSELFFATLGGLGQFGIITRARVPVQQAPDMVRWIRVVYTEFGDFTRDXEWLVTLREGDGFDYVEGFVFVNSDDPCNGWTTVPVGPNQYFDPVRIPSTAGPVLYCLELALHYRNQDHPSAVDMEVDRLLGRLRFVEGLKFSVDVTYMEFLLRVKRVEEDAKANGIWDAPHPWLNMFVSKSNIAEFDREVFKKILKHGVGGPILVYPLLRSK

SEQ ID NO: 481 - protein, 175 aa, Triticum aestivum
MAPAVMASSATTVAPFQGLKSTAGLPVSRRSGSAGLSSVSNGGRIRCMQVWPIEGIKKFETLSYLPPLSTEALLKQVDYLIRSKWVPCLEFSKVGFVFREHNSSPGYYDGRYWTMWKLPMFGCTDATQVLNEVEEVKKEYPDAYVRVIGFDNMRQVQCVSFIAFRPPGCEESGKA

SEQ ID NO: 482 - protein, 158 aa, Staphylococcus epidermidis ATCC 12228
MSIYDIAVENYDGSTYLLKRYKGKVLIIVNTATNCTLNDQFNKLEMLYKKYHKYGLEILSFPCNDFNNQEPELIKDIYRVYKYKFGITFPIHAKINVNGEHEHPLYTLLKCKQPGLFGSQIKWNFTKFVVDQQGNIVKRFLPCDNPNQMEKLIRQLLK

SEQ ID NO: 483 - protein, 395 aa, Corynebacterium efficiens YS-314
MNPMTPSTPGNPLQLNREEIFAAHEGGKLSITSARPLADMHDLSLAYTPGVATVCEAIAADPAVARTHTGRGRTVAIISDGTAVLGLGDIGPEAALPVMEGKAQLFSSFAGLNAIPIVLDVHGVDELVDTIAAMAPSFGAINLEDISAPRCFEVERQLIERLDIPVMHDDQHGTAVVILAALRNALRLLDRQIGEARIVVSGAGAAGVAAVEMLRGAGARDVVVLDSRGIIHAGREDLNPVKQALAATTNPRGVTGGMAEALTGADVYIGVSGGHVAEEALQLMADQPILFSLANPSPEIDPELAGRYGAIVATGRSDLPNQINNVLAFPGIFHGALAARARSITPGMKLAASQAIADIAAETLDVGHVVPSPLDPRVAPAVSAAVQAAAEAEGA

SEQ ID NO: 484 - protein, 363 aa, Hypocrea jecorina
MATQTINKDAISNLSFVLNKPGDVTFEERPKPTITDPNDVLVAVNYTGICGSDVHYWVHGAIGHFVVKDPMVLGHESAGTVVEVGPAVKSLKPGDRVALEPGYPCRRCSFCRAGKYNLCPDMVFAATPPYHGTLTGLWAAPADFCYKLPDGVSLQEGALIEPLAVAVHIVKQARVQPGQSVVVMGAGPVGLLCAAVAKAYGASTIVSVDIVQSKLDFARGFCSTHTYVSQRISAEDNAKAIKELAGLPGGADVVIDASGAEPSIQTSIHVVRMGGTYVQGGMGKSDITFPIMAMCLKEVTVRGSFRYGAGDYELAVELVRTGRVDVKKLITGTVSFKQAEEAFQKVKSGEAIKILIAGPNEKV

SEQ ID NO: 485 - protein, 473 aa, Bacillus megaterium
GAMTIKEMPQPKTFGELKNLPLLNTDKPVQALMKIADELGEIFKFEAPGRVTRYLSSQRLIKEACDESRFDKNLSQALKFVRDFAGDGLFTSWTHEKNWKKAHNILLPSFSQQAMKGYHAMMVDIAVQLVQKWERLNADEHIEVPEDMTRLTLDTIGLCGFNYRFNSFYRDQPHPFITSMVRALDEAMNKLQRANPDDPAYDENKRQFQEDIKVMNDLVDKIIADRKASGEQSDDLLTHMLNGKDPETGEPLDDENIRYQIITFLIAGHETTSGLLSFALYFLVKNPHVLQKAAEEAARVLVDPVPSYKQVKQLKYVGMVLNEALRLWPTAPAFSLYAKEDTVLGGEYPLEKGDELMVLIPQLHRDKTIWGDDVEEFRPERFENPSAIPQHAFKPFGNGQRACIGQQFALHEATLVLGMMLKHFDFEDHTNYELDIKETLTLKPEGFVVKAKSKKIPLGGIPSPSTEQSAKKV

SEQ ID NO: 486 - protein, 304 aa, Shewanella oneidensis MR-1
MSERYLENGIRQLVSEFIAAGCPSVREQSLEERRQGYIASTVLAGEPEAVFEVKSVSLEGIELTLFKPSADNNLPVVIYYHGGCFVSGGIATHNQQLRKIANDSGALVVAVSYRLAPEHVYPAAHDDAFNAANLVQQHCHQWGGDNTNITLMGDSAGGHLALVTCLRLKAKGEWLPKKQVLIYPMLDATAKSQSYIDNGDKYIITRDTLLTGFDMYLDWHPRTDVEASPLRSHDLAGLPETHIITAEFDPLLDEGEQLFRHLLAAGVDAHCRRYLGVIHGFFQLAGVSQSARDAMAQVTHIIRA

SEQ ID NO: 487 - protein, 192 aa, Blumeria graminis
MAEIRRKLVIVGDGACGKTCLLIVFSKGTFPEVYVPTVFENYVADVEVDGKHVELALWDTAGQEDYDRLRPLSYPDSHVILICFAVDSPDSLDNVQEKWISEVLHFCCGLPIILVGCKKDLRHEQKTLEELHKTSQKPVTPEQGEEVRKKIGAYKYLECSAKTNEGVREVFEHATRAALLTKKKKEKRCIIL

SEQ ID NO: 488 - protein, 246 aa, Larix gmelinii
YTYTLRNKGPEDVIVRVIYCGICHSDLVQMRNEMGMSHYPMVPGHEVVGIVTEVGSEVKKFKVGEHVGVGCIVGSCRSCGNCNQSMEQYCSKRIWTYNDVNHDGTPTQGGFASTMVVDQMFVVRIPENLPLEQAAPLLCAGVTVFSPMKHFGMTEPGKKCGILGLGGVGHMGVKIAKAFGLHVTVISSSDRKKEEALEVLHADAYLVSKDAEKMMEAAESLDYILDTIPVSHPLEPYLALLKTNGK

SEQ ID NO: 489 - protein, 207 aa, Triticum aestivum
  unsure (1)..(207): unsure at all Xaa locations
LKLFEVMASKSKIYFVLEYAKXXAKLFNKITKGKLSEDAARKYFHQLISAVDYCHSRGVYHRDLKPENLLLDENENLKVSDFGLSALAESTRQDGLLHTTCGTPAYVAPEVLSRRGYDGAKADIWSCGVILFVLVAGFLPFHDTNLIEMYRKISRAEYRCPRPFSVELRDLLYKILDPDPSTRASVSRIKRSAWYRKPGRCKWTGDL

SEQ ID NO: 490 - protein, 321 aa, Bartonella grahamii
TYIDGDKGILLYRGYPIDQLAEKGDFLESCYLLLYGELPTQQEKNEFDRCIMQHTMVHEQFARFFHGFRRDSHPMAVMVACLGAMSAFYHDSIDITDPHQRMIASVRLISKVPTLAAMAYKYSIGQAFVYPRNDLSYAANFLRMCFAVPCEEYKTNPVLARAMDQIFILHADHEQNASTSTVRLAGSSGANPFACIAAGVACLWGPAHGGANEACLKMLQEIGSIERIPEFIARAKDKNDPFRLMGFGHRVYKNYDPRAKIMQKTCHEVLKELNIQDDPLLDIAIELEKIALSDEYFIEKKLYPNVDFYSGITLKALGFPT

SEQ ID NO: 491 - protein, 194 aa, Bartonella sp. Mf49
DGNEGILLYRGYPIDQLAEKGDFLESCYLLLYGELPTKQEKNDFDRCIMQHTMVHEQFARFFHGFRRDSHPMAVMVACLGAMSAFYHDSIDITDPQQRMIASVRLISKVPTLAAMAYKYSIGQAFVYPRNDLSYAANFLRMCFSVPCEEYKNNPVLTRAMDRIFILHADHEQNASTSTVRLAGSSGANPFACIA

SEQ ID NO: 492 - protein, 307 aa, Bartonella sp. 16/40
YIDGDKGILLYRGYPIDQLAKKGDFLESCYLLLYGELPTKQEKNDFDRCIMQHTMVHEQFARFFHGFRRDSHPMAVMVACLGAMSAFYHDSIDITDPQQRMIASVRLISKVPTLAAMAYKYSIGQAFVYPHNDLSYTENFLRMCFCVPCEEYKINPVLARAMDRIFILHADHEQNASTSTVRLAGSSGANPFACIAAGVACLWGPAHGGANEACLKMLQEIGSVEQIPKFIARAKDKNDPFRLMGFGHRVYKNYDPRAKIMQQTCHEVLKELNIQDDPLLDIAIELEKIALNDEYFVEKKLYPNVDF

SEQ ID NO: 493 - protein, 318 aa, Ralstonia eutropha JMP134
MPLDPQARAMLDAMAAMPSPDFTTLRAADYRAAVAAMPAFAPGDSVAAQQDLTIDGAAGPLPARLYRPDDSAGPPLIVYFHGGGFVLCGLDSHDNICRSLARRSGALVLSVDYRLAPEARFPAAADDAVAAVRWAAGHAAELGVDPARLAVAGDSAGGNLAAVVCQQLRGSGIALKHQLLLYPYLDCTDAAADSASYRACAEGYFLSARELDWCRAQYLANPDAAADVRASPLHQRDLQGLPAATIITAEFDPLRDQGEAYGEALRGAGGAATVRRWPGQFHGFMSMQGVLDAASHALDAAAASLRQAFAASGTQEAA

SEQ ID NO: 494 - protein, 449 aa, Xanthomonas axonopodis pv. citri str. 306
MSRTVIVNARLVNEGKEFDADLLIEGGRIAKIDSKIVPAPGDTVVDAAGRWVLPGMIDDQVHFREPGLTHKGDIATESGAAVAGGLTSFMDMPNTNPPTLDAAALQAKYDAAAGRAWANYGFYMGASNDNLAHIQSLDPKTAPGIKVFMGASTGNMLVDNPETLDAIFRDAPTPIITHCEDTPTIDATMAQYKEKYGDALTPEMHPDIRSRQACLKSSQLAVSLARKHNTRLHVLHISTADELSLFEAGPLVDADGKLRKRITAETCIHFLRFDRSDYARLGNLIKCNPAIKDAEDRLALIDALAEDVIDVLATDHAPHTWEEKQKPYAQAPSGLPLVQYALVAALELVHEGKLPITRIVQKFAHAPAQLFDVEERGFLREGYFADLVMIDNTPFTVKREQVLSKCGWSPFEGTTFRSRIAATWVNGQQVWDGEQLVGSAAGQRLTFDR

SEQ ID NO: 495 - protein, 173 aa, Zea mays
PNVDPELALALRLSMEEERARQEAIAKKAAEDTSNTENINASSSNSDSVMAEAELASNAAAGDKQEQPKDDDDLLQQALAMSMEGGASGSAAVTDSAMAEAALQMSVQDANMSSDTDMSKVFEDRTFVSSILNSLPGVDPNDPSVKDLLASLHSQGEQEKKEDKSDKTEDEKN

SEQ ID NO: 496 - protein, 187 aa, Zea mays
  unsure (1)..(187): unsure at all Xaa locations
MIEFSVVLLFGYWEICLVAVVYCRPAVGHXRVXXDFFRMVVESRYQRVAEGRSRLARLILVQALHLVAGGLLLLLSLSKGAAVNKFAVLSMAAGFLAIVVGELGRMRTMSVLLRLYTSLSSIAVAFSVTCIIRSELFLKVMKQNTEAITSYEMLDAVRVALGILLQMVVIATTTRLLQNMSPPKRAS

SEQ ID NO: 497 - protein, 294 aa, Saccharomyces cerevisiae
TTPLVHVASVEKGRSYEDFQKVYNAIALKLREDDEYDNYIGYGPVLVRLAWHTSGTWDKHDNTGGSYGGTYRFKKEFNDPSNAGLQNGFKFLEPIHKEFPWISSGDLFSLGGVTAVQEMQGPKIPWRAGRVDTPEDTTPDNGRLPDADKDADYVRTFFQRLNMNDREVVALMGAHALGKTHLKNSGYEGPWGAANNCFTNEFYLNLLNEDWKLEKNDANNEQWDSKSGYMMLPTDYSLIQDPKYLSIVKEYANDQDKFFKDFSKAFEKLLENGITFPKDAPSPFIFKTLEEQGL

SEQ ID NO: 498 - protein, 496 aa, Oryza sativa (japonica cultivar-group)
MHNIRQYQLPLQKYMAMMDLQEGNERLFYKLLIDNVEELLPVVYTPTVGEACQKYGSIFSRPQGLYISLKEKGKILEVLKNWPERSIQVIVVTDGERILGLGDLGCQGMGIPVGKLALYTALGGVRPSACLPITLDVGTNNEALLNDEFYIGLRQKRATAQEYADFLHEFMTAVKQNYGEKVLIQFEDFANHNAFELLAKYGTTHLVFNDDIQGTASVVLSGLVAALKLVGGSLSEHSYLFLGAGEAGTGIAELIALEISRQTKAPIEECRKKIWLVDSKGLIVSSRKETLQHFKKPWAHEHEPVGNLLDAVKTIKPTVLIGTSGKGQTFTQEVVEAISSFNERPVIFALSNPTSQSECTAEQAYTWSKGRAVFASGSPFDPVEYDGKIYVPGQANNAYIFPGFGLGVVMSGAIRVHDDMLLAASEALAQQVTQENFDKGLTYPPFSNIRKISAHIAANVAAKAYELGLASRRPRPKDLVKYAESCMYSPLYRNYR

SEQ ID NO: 499 - protein, 388 aa, Oryza sativa (japonica cultivar-group)
MGIPVGKLALYTALGGVRPSACLPITLDVGTNNEALLNDEFYIGLRQKRATAQEYADFLHEFMTAVKQNYGEKVLIQFEDFANHNAFELLAKYGTTHLVFNDDIQGTASVVLSGLVAALKLVGGSLSEHSYLFLGAGEAGTGIAELIALEISRQTKAPIEECRKKIWLVDSKGLIVSSRKETLQHFKKPWAHEHEPVGNLLDAVKTIKPTVLIGTSGKGQTFTQEVVEAISSFNERPVIFALSNPTSQSECTAEQAYTWSKGRAVFASGSPFDPVEYDGKIYVPGQANNAYIFPGFGLGVVMSGAIRVHDDMLLAASEALAQQVTQENFDKGLTYPPFSNIRKISAHIAANVAAKAYELGLASRRPRPKDLVKYAESCMYSPLYRNYR

SEQ ID NO: 500 - protein, 424 aa, Leptospira interrogans serovar Copenhageni str. Fiocruz L1-130
MIKKISGRIVTHEKDFLGTVEWDSKTGLILTVLEQKESIPILNSQHQENEIQFNSLETVIFPGFGDIHIHAREDESGKHTYKEDFVSASAAAVNGGVIHVADMPNNPIPPIDENSYSKKRKLADRSNIHITLYAGIGPDTKPLKKSVPYKVFMGPSIGELFFHNNQTLEDTISSYVGENVSFHCEDPEILEKHQNETFHEDRRPAEAETTATDFALYLIEKYNLRGKLCHYSTGEGLNKIKFAKQKGVKVTCEVTPTHLFFDRSMLTPENRHWFQMNPPLRSKEDRERMLEGVKQGWIDYLATDHAPHSIEEKRKGTSGISQLDTYSLFVTWLVLKAGVELKTVARICAKNPGDFVNEYLPEKFGKGFGRIEPGYSANFTVLNLKKPKKFLKEEIKSKSGWSPFENFEFPGSIEAVFFLGKQMK

SEQ ID NO: 501 - protein, 165 aa, Zea mays
MDGRMFGLETPLMVALQHLLDVPDGDAGAGGDKASGAAAGGGPTRTYVRDARAMAATPADVKELPGAYAFVVDMPGLGTGDIRVQVEDERVLVISGERRREEREDAKYLRMERRMGKFMRKFVLPDNADMDKISAVCRDGVLTVTVEKLPPPEPKKPKTIEVKVA

SEQ ID NO: 502 - protein, 185 aa, Thermobifida fusca
MFSLARHRRSTAGTAAAVLLALTATGCGVLIGPSNGEVSDDITVTSPMLREGEKIPDRYTCAGEGMSPPLRWSGLPAETESLALVVDTVYESGGAAVHWVVYGLDPDNPELPEGTVPIPAQQGMNSFDTASYQPLCPEKGNEHEFRFTVYALSERVELGEAAPLDVALGAIATRTLARGRLTSVP

SEQ ID NO: 503 - protein, 123 aa, Halophilic eubacterium NRCC 41227
MALTQEDIINAVAEMSVMEVAELVSAMEEKFGVSAAAAVVAGPGGGEAEEAEEQTEFDLVLTSAGEKKVNVIKVVREITGLGLKEAKAAVDGAPATLKEGMSKEDGDEAKTKLEEAGASVELK

SEQ ID NO: 504 - protein, 481 aa, Brucella suis 1330
MPAIGFIIDGKESGGASGKTFERKDPITGKVATVAAAASLADVDTVAEAAAKAFESWSETGPNARRALLNKAADLMDSRTAEFTRLMLEETGATAPWAGFNVHLGANILREAAALTTQITGEIIPSDKPGIMSMAVRQPVGVVLGMAPWNAPVILGVRAVAAALACGNTVILRSSETCPGVHHLIIKILNDAGFPAGVANVISNAPDDAPEIVAALIAHPAIRRINFTGSTQVGRIIARRAAGHLKPVLLELGGKAPFIVLEDADLDQAVDAAAFGAFMNQGQICMSTERFIVHEKVADAFAEKLAAKARSLPAGDPRGNVVLGSLVDLKSAQRMDALIADAVAKGGRVLAGGKRDGAVVEATIIDGVTPQMDIYTQESFGPVKPIIRVKSAEEAIRVANDTEYGLSSAIFSQNVKRALALSRKLETGICHINGPTVADEAQVPFGGVKSSDYGRFGGKAAINEFTELRWITIEGPQHYPF

SEQ ID NO: 505 - protein, 485 aa, Neurospora crassa
MGLRPPKIRDSGLFGIKFIKTNVKMAAEHKNLQFWQQMFRSIGGYTGEVRLVGHRIIFTSEPENMKAILATQFEDYGKGEGFHQEWKDFLGDSIFTTDGDLWHASRQLIRPQFIKNRVSDLQCFENHMQMLFRTIANGGALNGEDQMVDMEAGNGKPVDISDLFFRYTLDAATDFLLGKDIKSLSTPVQPFADAFQEVQRVQIVIARAGPLNRFVPKKTFWEGLKVIDETINFYIDRALRLDEEELASKSKGDEGYTFLHALAGFTKNRQVLHDQLMAVLLAGRDTTACTLSWAIYELARHPEAVAKLRAEILSVVGPDRAPTYDDLKSMKYLQNVMNETLRLVRMALKDTTLPRGGGPDGSQPIVILKDTPVGYSPLAMQRRPDLYPPVSEKFPDVEMFSPDRWFHWQPKPWQYIPFNGGPRICIGQQFALTEMGYVLTRLFQRYDRVVSYMDEIDGGKPRMKTDIVLMPGDGVKVAFFEAKRE

SEQ ID NO: 506 - protein, 190 aa, Triticum aestivum
  unsure (1)..(190): unsure at all Xaa locations
MAPTVMASSATSVAPFQGLKSTAGLPVSRRSSSAGLSSVSNGGRIRCMQVWPIEGIKKFETLSYLPPLSTEXLLKQVDYLIRSKWVPCLEFSKVGFVFREHNSSPGYYDGRYWTMWKLPMFGCTDATQVLNEVEEVKKEYPDAYVRVIGFDNLRQVQCVSFIAFRPPGCEESGQGLNYELKQWPMYEGLL

SEQ ID NO: 507 - protein, 433 aa, Thermobifida fusca
MTRTLWHNWADTCRITPTRIATPTSTAEVVAEVRAAAAAGSRIRMVGSGHSFTDIAATDGTLLSPAALASVRSVDLAAGRATVEAGMRLCDLNETLAAHGAALTNMGDIAVQTLAGATQTGTHGTGRASASLAAQIQQLELVLADGSVVTCSRDEDPDLFDAARAGLGAFGVVTAITMAVEPAFLLHARETPMPLGEVLERLEELRTTNDHFEFFWFPHTERTITKRNNRVPGPARPLSAFRAWLDDEFLSNSVFEVVNRMARRLPRLIPAINQISARALTAREYVDVSYRVFTSPRRVKFVEMEYAIPVEHLPDVLHDMRAVFASSRHRISFPVEVRFAPADDVWLSPGYGRESAYVAVHVYQGCPWQEYFADLEAIFTAAAGRPHWGKMHTRTLSYLDKVYPRLRDALEVRERVDPHRRFTNAYLDRVWGE

SEQ ID NO: 508 - protein, 228 aa, Weissella paramesenteroides
MLKATGISRENLFVTTKIQVEFKDYQTAKKSIDESLQRLNLNYLDLLLIHSPEPWVEFHNKENHYFEENIEVWRAMEEAVNNGKVRSIGVSNFKKADLNNILEHSTIKPVVNQLLIHIGNTDFGLLEQAQQNNVLVEAYSPVAHGEILQNPEIKQMADKYQISIPQLAIRYCLELGTLPLPKSQTLSHVANNADVDFEISKQDLEELKKLPQINSYGDSSSFPVFSGK

SEQ ID NO: 509 - protein, 732 aa, Zea mays
MDLASFITSVLTSFLIFVALVLLFTWLSRRPGNAPVYYPNLLLRGLDPWAGRGRGTRSPVGWLRDAISASEPDVVAAGGVDAAVYLVFLSSVLSILVYSGIVLLPVLLPVAATGGALSTIPIPTNKSAQSAQNFSSIERLGMGNVAEKSMRLWAFLLSVYWVSFVTYFVLWKSYKHVSNLRATARSAPDVKPEEFAVLVRDIPRPSPDETIKDSVDSYFRALHPNTFYRSMVVTDHTKADKIYQEIEGHKQKIARAEVVYANSKTESNTEGTRPTHRTGFLGLIGTKVDTIEYCSEQIKELLPKLEAEQKTTLHEKQQRAAIVVFNSRSAAAFASQTLHAQVYDKWTVMEAPEPRQIIWSNLPRKLYDRQIRQCVVYCIVFLIVVFYIVPLTAIAAVTTLENLEAKLPFLKPVVEQPAIKTVLEAYLPQIALIVFLALLPTLLMFLSKQEGIPSQGHAVRAASGKYFYFIVFNVFLCYTLGSTLFKSLTTIINHPAEIVNMLAKSLPGSATFFLTFVALKFLVGYGLELSRLVPLIIFHLKRKYLCKTEEEVRAAWAPVDLGYNTRVPNDMLIATVVLCYSVIAPLIIPFGVAYFALGWLIARNQILRVYVPSYESYGRMWPHMHTRIIAALMVYQTTMIGFISLKKFAYASVLVPLLPASIIFAYVCHMRFYPAFAKTPLEVVVRHDLKETPNMEAIYTAYIPPCLKPDKLEDLDAFEDAQSRATSRVPSI

SEQ ID NO: 510 - protein, 152 aa, Pennisetum glaucum
MSLVSRSSVFDPFSMDLWDPFDSMFRSIVQSAGSPDSDTAAFAAARIDWKETPEAHVFKADLPGVKKEEVKVEVEDGNVLVISGQRSKEKEDKNDRWHRVERSSGQFMRRFRLPGNAKVDQVKAGLENGVLTVTVPKAEEKKPEVKAIEISG

SEQ ID NO: 511 - protein, 279 aa, Saccharomyces cerevisiae
MSIVSLLGIKVLNNPAKFTDPYEFEITFECLESLKHDLEWKLTYVGSSRSLDHDQELDSILVGPVPVGVNKFVFSADPPSAELIPASELVSVTVILLSCSYDGREFVRVGYYVNNEYDEEELRENPPAKVQVDHIVRNILAEKPRVTRFNIVWDNENEGDLYPPEQPGVDDEEEEDDEEEDDDEDDEDDEDDDQEDGEGEAEEAAEEEEEEEEKTEDNETNLEEEEEDIENSDGDEEEGEEEVGSVDKNEDGNDKKRRKIEGGSTDIESTPKDAARSTN

SEQ ID NO: 512 - protein, 285 aa, Xylella fastidiosa Temecula1
MTTNDTWFTEHFQTTGSAIGFRVTGKLDEVQSPFQKIEIYNSTDWGKLMVIDGALMLTSRDNFLYHEMISHPALFTHTAPKCVVIIGGGDCGTLREVLKHPDIEQVTQCDIDEQVTRMAEKHFPELCTSNNDPRATLLFSDGVAYMADCPTNSVDVIIVDSTDPVGPAKGLFNRTFYESCFRALKNDGLLIQQSESPLALLELIKEMRHEMSKAGFKAFKTLPFPQPCYPTGWWSVTLSSKQPNANFAFRQTDAQTKPFDTLYYNAHLHHGVLVPPPFIAHALGE

SEQ ID NO: 513 - protein, 432 aa, Picrophilus torridus DSM 9790
MSFDVSWLNTGNNAWMLTAATLVGLQSIPGLALYYAGMTKRKYMVNAMMMALYAFSAVLVVWVIAGYSFGFGTVPLLKIDGYYIFSMPVPVGSASFIAGQAIVGPERIALSIPNSTVIFFQFVFAAITPVLLMGGILERMNFKAWMVFVPVWSFLVYSPVAYWLFAGGWLNQLGAVDFSGGYVIHLDAGVGALAAALAIGPRIKEDMNLKANNLGLVMLGLGLIWLGWDGFNGGDPYGSGIDAAIAIINTNVATAVSMITWMLMDMKFFKKASLIGASVGAIAGLVGITPAAGYVNIYGAMVIGIATGIIPWIALYKIEPHFKIDDALGVFSSHAVAGIVGGILTGVLADPFITQYIDPGLRGAIYGDFYQLGIQALAAAVVFAYTFAMTIAILKIIGLFIPLREKEENLKLGDLAIHGEIGFEDSYQAVRK

SEQ ID NO: 514 - protein, 246 aa, Tsuga canadensis
YTYNLRNKGPEDVIVRVIYCGICHSDLIQMRNEMGMSHYPMVPGHEVVGIVTELGSEVKKFKVGEHVGVGCIVGSCRKCGNCNESMEQYCSKRIWTYNDVNHDGTPTQGGFASSMVVDQMFVVRIPENLPLEQAAPLLCAGVTVYSPMKHFGMTEAGKRCGILGLGGVGHMGVKIAKAFGLHVTVISSSDKKKEEALEVLHADAYLVSKDAEKMQEAAESLDYILDTIPVAHPLEPYLSLLKTNGK

SEQ ID NO: 515 - protein, 307 aa, Chloroflexus aurantiacus
MASKKQRIGVLTSGGDAPGLNAVIRAVVKSASGLGWEVIGIHDGFEGLLGTKSYRVLTNADVQVLLPRGGTILRTTNKGHFGPRRSDELSEADPYVRAVKAIEEMGLRALITIGGEGTQRIALELHKLGAPVIGVPKTIDNDLAGTDRTFGFDTALQVATDAIDRLHTTAASHNRVMVLEVMGRHTGWIALHAGLAGGADVILIPEIPFSIERVAEKVMARDQQGSSFSIIVVAEGARPRGGSEMYIAEGRLGGIGHWVGEQLEKLTAKEVRVVVLGHLQRGGSPSPYDRLLSTRYGAAQCRGSSGI

SEQ ID NO: 516 - protein, 121 aa, Glycine max
MDCLVMPVSLIRRRSTGSRMGYMALPKEEPVKVVVGKEKRVFLVEPFILQENPFQILMDISMKKDPAGHFTSNHSQSERRVIFVDVDDILFEHMLWLMHNDASSLFQLNLKEIIDFYTHDI

SEQ ID NO: 517 - protein, 445 aa, Saccharomyces cerevisiae
MDDKVSEKESSPKQTEEDSEGKMAHVQPASYVNKKKYVFGKTLGAGTFGVVRVRKNTETGEDVAVKIVIKKALKGNKVQLEALYDELDILQRLHHPNIVAFKDWFESKDKFYIITQLAKGGELFDRILKKGKFTEEDAVRILVEILSAVKYMHSQNIVHRDLKPENLLYIDKSDESPLVVADFGIAKTLKSDEELLYKAGTALGYVAPEVLTQDGHGKPCDIWSIGVITYTLLCGYATIDRKVQDFLDECTTGEYPVKFHRPYWDSVSNQAKQFILKALNLDPSKRPTAAELLEDPWIICTELKTHNLLPGLKEGLDARQKFRNSVERVRLNMKIQKLRDLYLEQTESDSDFDEGSQANGSVPPLKATDTSQLSKKLSEEEQSKLKSELTSKAFAQLVNTVLAEKEKFLNINRVCSSDSDLPGSDIKSLDEAKEKPEGKDTKTEE

SEQ ID NO: 518 - protein, 289 aa, Mesorhizobium loti MAFF303099
MTPGHEFSGIVEAIGKAVSGFAVGDRVTGDPNIACGRCPHCHAGRVNLCRNLNAIGIHRDGGFAEYVVLPQKQAFILPADLPPTHGAFCEPLGCCLHGVDLAQIKPGSSVVVLGGGVIGLLTVQLAKLAGATTIILSTRQASRRVLAEELGATATVDPTAGDVIDAIAGSEGLMPGGADVVFECAGVRDTVEQSMRLARAGGTVVIVGVTPQGMKAEFEPFDLLFRELKVVGSFLNPYTHRRAAELIASGAIEIDRLISRQVPLEEAADVIANPPAPGEVKVLVVPRQG

SEQ ID NO: 519 - protein, 472 aa, Bacillus sp. KSM-K16
MNHALFINNECVATDDMIEVENPATKEVIGTVANGGKQEALAAVDAAAAALPEWRAKTAAERGAYLQKWYELIQREEEEIAKLMTLEQGKPFAEALGEVRYANSFLSWYAEEGKRVYGETVPAAATNKRIFVQKQAIGVIAAITPWNFPAAMLTRKLGPALAAGCTAVMKPSELTPFTAYRIVELAKVAGIPKGVVNMITGDAQQIGETWMADERVRKVSFTGSTRVGKLLMRQAADTVKKLSLELGGHAPFIVTAQADIQKAVDGLIASKYRNGGQTCVCANRIYVHESIKAPFVEAFAAEMKKLKVGNGMEPDSHIGPLINEAAVAKVQKHIEDAQAKGGEVIFGQEADATNGYFQTPALIANATDDMLCMKEETFGPLAPIATYTSTEDVIERANHSPYGLAAYVYSNDLSEAVTIAERLEYGIVGLNDGLPSVAQAPFGGMKESGLGREGGHWGIEEYVEVKYISLQL

SEQ ID NO: 520 - protein, 152 aa, Brassica napus
MGSIRESAPTANSSTTVVMSSIPPFLSKTYDMVDDPSTDEVVSWSSGSNSFVVWNVPEFSKQFLPKYFKHNNFSSFVRQLNTYGFRKVDPDRWEFANEGFLKGQKQLLKSIIRRKPTQVQPPQQPQVQHSSVGACVEVGKFGLEEEVERLQR

SEQ ID NO: 521 - protein, 474 aa, Escherichia coli K12
MQHKLLINGELVSGEGEKQPVYNPATGDVLLEIAEASAEQVDAAVRAADAAFAEWGQTTPKVRAECLLKLADVIEENGQVFAELESRNCGKPLHSAFNDEIPAIVDVFRFFAGAARCLNGLAAGEYLEGHTSMIRRDPLGVVASIAPWNYPLMMAAWKLAPALAAGNCVVLKPSEITPLTALKLAELAKDIFPAGVINILFGRGKTVGDPLTGHPKVRMVSLTGSIATGEHIISHTASSIKRTHMELGGKAPVIVFDDADIEAVVEGVRTFGYYNAGQDCTAACRIYAQKGIYDTLVEKLGAAVATLKSGAPDDESTELGPLSSLAHLERVGKAVEEAKATGHIKVITGGEKRKGNGYYYAPTLLAGALQDDAIVQKEVFGPVVSVTPFDNEEQVVNWANDSQYGLASSVWTKDVGRAHRVSARLQYGCTWVNTHFMLVSEMPHGGQKLSGYGKDMSLYGLEDYTVVRHVMVKH

SEQ ID NO: 522 - protein, 279 aa, Bacillus cereus G9241
MKNLQSTTTLHNGVEMPWFGLGVFKVEDGPELVEAVKSAIKAGYRSIDTAAIYGNEKAVGEGIRAGIKEAGISREDLFITSKVWNSDQGYETTLAAYEESLKKLELDYLDLYLVHWPVEGKYKDTWRALETLYKEKRVRAIGVSNFQIHHLQDVLADAEMKPMINQVEYHPRLTQKELQAFCKEQGIQMEAWSPLMQGQLLDNETLQEIAHKYGKTTAQIILRWDLQNEVVTIPKSTKEHRIIANADVFNFELTKEDMEKIDALNQNHRVGPDPDNFDF

SEQ ID NO: 523 - protein, 417 aa, Nicotiana tabacum
AADGYARARGVGACVVTFTVGGLSVLNAIAGAYSENLPLICIVGGPNSNDYGTNRILHHTIGLQDFSQEPRCFQTVTCYRAVVNNLEDAHELIDTAVSTALKESKPVYISIGCNLPGIPHPTFSREPVPFALSPRLSNMMGLEAAVEAAAEFLNKAVKPVLVGGPKMRVAKASDAFVELSDACGYAVAVMPSAKGLFPEHHSHFIGTYWGAVSTAFCAEIVESADAYLFAGPIFNDYSSVGYSLLLKKEKAIIVQPDRVTIGNGPAFGCVLMRDFLAALAKRLKHNPTAFENYHRIYVPEGHPLKCEPKEALRVNVLFQHIQNMLSGDSVVIAETGDSWFNCQKLKLPKGCGYEFQMQYGSIGWSVGATLGYAQAAPEKRVIACIGDGSFQVTAQDISTMLRCGQRTIIFLINNGGY

SEQ ID NO: 524 - protein, 484 aa, Sphingomonas chungbukensis
MTILNFIDGSYREGSEGKSFSNVNPATGAEIGVVHEASQAEVEDAVEAAKAALTGPWGKMTTARTGQADHRVATEIERRADDFLAAEVADTVKPRHVVSHIDIPRGAANFRMFADVVSTMPGESFNTPTPDGGQAFIYTVSKPKGVDAAVCPRNFPLLLMIWKVGPELACGNTAVVKPSEEIARTAALLGDVIDAGVNHHGVFNVAQRFGPASAGEFLTSNPDVDAITFTGETGTGQAIMQKAATGVRDISFELGGKNPAIVFADADLDKAVEGLSRSVFLNTGQVCLGTERVYVERPIFDAFVARMAAAAQDFKPGVTGDRAYLGPLISAEHREKVLAYYPRAVEDGPTVFTGGGVPEISGAETGGFFVEPTLWIDVAHGDTVMREEIFGPCCDILPFDSEDEVIALANDTVYGLCASVWTENLSRGHRVAAAMEVGVCWVNSWFLRDLRTAFGGSGHSGIGREGGVHSLEFYTEITNICVKL

SEQ ID NO: 525 - protein, 1064 aa, Saccharomyces cerevisiae [sequence omitted]

SEQ ID NO: 526 - protein, 1374 aa, Neurospora crassa
MGSSSRTRPGQTSNSGIAKGQTKDVKEVNLSRSNRSKPSNSARHPPMKRARTPVGGHSADTSSSTSSEDIAPEIVVWTGDMDVMDSEESPFPESPLPTDDSSQLPSLSRAPEGPSVLDGDASSQFSSPLSEPPESSPIISPQDDIAVEQENPIPQSASSLSDQHSNSSSHAPSVTSKATTPVDADRLKEPPTRQELSEPQPSPPVSPSPEPPVEEQQPKPTVEEPPQPDEQPQTELQEEPTAQPERVARLLPLPVIDEPPLAAIESAAPPQGPKSPMNERKIKQESPEEVVLESARQASLPQDAGTLDVLMEEAPGTDAVVQEAPMQDVSMLEAPPQDTPDREAPPLDIVMDEPPAYESLTHEAPAGNPAAQSLSTLDAPAQEKTAQEASIYATPVHEVPAQPTPVQGFLPQNAGTNTVSTDTPRRRYNVRPKVTIPPDLPLPDYAMQCITAAEASRLNPYALHQEEYLMLRDHISHAQVTTYLNIRNGILRLWVRNPQIAVTREEAVGCAKDTRWFDAASLCFDWLVRRGYINFGCVDYRHSKRHTSKDPPATTLKRRTVAVLGAGMAGLGCARQLEGLFAQYAKKFRDMGEEPPRVIVIEGRNRIGGRVYSRPFASKPARTPDNFHGKRFTAEMGGMIITGFERGNPINILLRAQLGIPYRPLRPDTTLYDSNGKPVDLHRDQLVENLYNDCLDRVSEYKFKQPTSKLIEGNRELIDEGKDSSAEAYKTIRQVEESTAAQPHAPPVSEQSIAPQVNLVPISSDRATGRVHTEPGTPGALKAAYKAKLLGWALKQGVSEDADLDLETPAKEPGANLGSVVDNMFAQYRDIVDLTAQDYRLLNWHVANLEYSNAINYNKLSLQGWDIDAGNEWEGSHTMVIGGYQSVPKGLMLLPTPLDVRRRSPVNKITYTTESTAGPAVIECEDGFKVEADFVVNTIPLGVLKHGNIKFEPPLPEWKSSAIERIGFGVLNKVILVYKEAFWDEDRDIFGVLRNPSNRHSLDQKDYASQRGRFFQWFNVTQTSGLPVLLALMAGDAGYDTEQTCNDDLVKEATDVLRRVYGSKVQQPIEAIVTRWASDKFARGSYSSAGPDMKADDYDTMAKPVGNLFFAGEHTCGTHPATVHGAYLSGLRAASEVLETMLGPIEIPTLLITPKESSSLSLKRKAAALSSEFTTTTVTNSYGTMSSTRNPEQARLEAYDISLWDSITSQIGLRPQKPSKPVVSGYIFFSKAHYDDARKRCEAGRRPGKGKASGNEVRMMSAKMWKDASPEEKRPFEELAEESKRAYAVAMKEWTEKAQEWDRKATELKEIYERENPYVPLSALVVKSEEGVAAAASVSSGSNGRNGRRARWAGEKVGSYAEDGGSDVDVAMTG

SEQ ID NO: 527 - protein, 640 aa, Zea mays
  unsure (1)..(640): unsure at all Xaa locations
MGNTCVGPSITMNGFFQSVSTALWKTPQEGDALPAAANGPGGXPAGAGSQSALPKPASDVHHVAVQSEAPEPVKIAAYHSEPAPAVRSEAPEPVKIAASHSEPAPMAAKPGGAAANASPSPSPRPRPQVKRVSSAGLLLGSVLRRKTENLKDKYSLGRRLGQGQFGTTHLCVERATGKELACKSILKRKLGSDDDVEDVRREIQIMHHLAGHPSVVGIRGAYEDAVAVHLVMELCGGGELFDRIVRRGHYTERKAAELARVIVGVVEACHSMGVMHRDLKPENFLFADHSEEAALKTIDFGLSIFFRPGQIFTDVVGSPYYVAPEVLKKRYGPEADVWSAGVIIYILLCGVPPFWAENEQGIFEEVLHGRLDFESEPWPSISDGAKDLVRRMLVRDPRKRLTAHEVLRHPWVQVGGVAPDRPLDSAVLSRMKQFSAMNKLKKMALRVIAENLSEDEIAGLREMFKMIDADNSGQITFEELKVGLEKVGANLQESEIYALMQAADVDNNGTIDYGEFIAATLHLNKVEREDHLFAAFQYFDKDGSGYITADELQVACEEFGLGDVQLEDLIGEVDQDNDGRIDYNEFVAMMQKPTVGGSRRRPICRTASASGSASGSGRRSGWPRPLCLWLPCCLRVGVDD

SEQ ID NO: 528 - protein, 115 aa, Arabidopsis thaliana
DVSTMIRCGQKTIIFLINNGGYTIEVEIHDGPYNVIKNWNYTAFVEAIHNGEGKCWTAKVRCEEELVKAINTATNEEKESFCFIEVIVHKDDTSKELLEWGSRVSAANSRPPNPQ

SEQ ID NO: 529 - protein, 445 aa, Bacteroides thetaiotaomicron VPI-5482
MKRILIKNAVIVNEGRKVPGSVVIEGEKIAEILVDGQEAAMPCDETIDASGCYLLPGAIDEHVHFRDPGLTHKADITTESHAAAAGGVTSIMDMPNTNPQTTTLEALNDKLALLAEKSSVNFSCYFGATNNNYPLFSQLDKNRVCGVKLFMGSSTGNMLVDRMASLRNIFGGTDLLIAAHCEDQGIIKENTDKYKKEYGDDVPLALHPVIRSEEACYRSSALAVQLARETNARLHIMHISTAKELSLFSKAPLAEKRITAEACVSHLIFTEEDYQTLGARIKCNPAIKTAEDRKALQEAVNSGLIDAIATDHAPHSLSEKEGGALKVMSGMPTIQFSLVSMLELADKGAFSIEKVVEKMSHAPAQMYEIRNRGFIRKGYQADLVLVRPDSEWTVTTDCILSKCKWSPLEGHTFHWKVEKTFVNGHLLYNNGTIDENYRGQELRFR

SEQ ID NO: 530 - protein, 312 aa, Sulfolobus solfataricus P2
MINREDLLKNPVEDITLSDLKKYNDIVSVFDKIYGFSSEGIVNGSKILKEMIKNADLRFLSFTANLVSTGLRGLFADLIKKGYFNIVVTTGGTIDHDLARSFGGVYYKGSFDIDDTMLKDLEIHRLGNVLVPFESYGKVIEDVVRKFLPEITKDRKEISAYELLWEFGKRITDSNSILRAAYDKNVPIIVPGILDGSFGTNLFIQSQFLNFRINLFEDMRLIKDLIFSSKKSGALIIGGGISKHHTIWWNQFKDGLNYAIYITTAQEYDGSLSGAKPREAISWNKIRPDAKHVTIYGDATIIVPILAASLLS

SEQ ID NO: 531 - protein, 131 aa, Sulfolobus solfataricus P2
MSITYTTVGELKVGSYVVIDGEPCRVVEVTKAKTGKHGSAKANVVAIGVFSGAKKTLMAPVDQQVEVPIIEKHIGQIIADMGNKIQVMDLESYETFEIEKPTEDELASKIKPNAELEYWEIMGRRKIVRVK

SEQ ID NO: 532 - protein, 497 aa, Arabidopsis thaliana
MDKKKNSFPDNLPEGTISELMQKQNNVQPSVIVIGSGISGLAAARNLSEASFKVTVLESRDRIGGRIHTDYSFGCPVDMGASWLHGVSDENPLAPIIRRLGLTLYRTSGDDSILYDHDLESYGLFDMHGNKIPPQLVTKVGDAFKRILEETEKIRDETANDMSVLQGISIVLDRNPELRQEGMAYEVLQWYLCRMEAWFAVDANLISLKCWDQDECLSGGHGLMVQGYEPVIRTIAKDLDIRLNHRVTKVVRTSNNKVIVAVEGGTNFVADAVIITVPIGVLKANLIQFEPELPQWKTSAISGLGVGNENKIALRFDRAFWPNVEFLGMVAPTSYACGYFLNLHKATGHPVLVYMAAGNLAQDLEKLSDEATANFVMLQLKKMFPDAPDPAQYLVTRWGTDPNTLGCYAYDVVGMPEDLYPRLGEPVDNIFFGGEAVNVEHQGSAHGAFLAGVSASQNCQRYIFERLGAWEKLKLVSLMGNSDILETATVPLQISRM

SEQ ID NO: 533 - protein, 204 aa, Glycine max
  unsure (1)..(204): unsure at all Xaa locations
GIPWERLNYSRDKYRETRLKQYKNYQNFSLSPHHLHKECFQVQKGQTFYDFFFNTRLVKSTIVHFQLRNLLWATSKHDVYLMQNYSVMHWSALLQRSKEVLNVAKPIIPTLTHPGFLAQPVSRVQISTMTVKENLMVAGGFQGELICKNLKQPGVLFCGKITTDGNAITNAVXDVYRNPAGSLRVITAXNDSQASGFDAENFAS

SEQ ID NO: 534 - protein, 343 aa, Salmonella typhimurium LT2
MEVKTQSCVVAGKRAVAVTEQNIEWNNKGTLVQITRGGICGSDLHYYQEGKVGNFTVKAPMILGHEVIGKIVHSDSDLLREGQPVAINPSEPCGHCKYCLQHEENHCTEMRFFGSAMYFPHVDGGFTRFKAVDTAQCIPWPEQADEKAMAFAEPLAVAIHAAHEAGDLQGKRIFISGVGPIGCLIVSAVKTLGAAEVVCADISTRSLSLARQMGADTLVNPQHDSLDDWKAEKGYFDISFEVSGHPSSISTCLEVTRAKGVMVQVGMGGAVPNFPMMMVISKEISLKGSFRFTTEFNTAVSWLANRVINPLPLLSAEYPFTDLEAALIFAGDKTQAAKVQLVF

SEQ ID NO: 535 - protein, 136 aa, Methanocaldococcus jannaschii
MVIIMPGTKQVNVGSLKVGQYVMIDGVPCEIVDISVSKPGKHGGAKARVVGIGIFEKVKKEFVAPTSSKVEVPIIDRRKGQVLAIMGDMVQIMDLQTYETLELPIPEGIEGLEPGGEVEYIEAVGQYKITRVIGGK

SEQ ID NO: 536 - protein, 211 aa, Agrobacterium tumefaciens
MIHSFDLGPQSSETHNEKLDRSISRKGADPGAVIWLTGLSGSGKSTVAVSVDRILHERGRSSVVLDGDIIRRGLSKDLGFEHRDRYENVRRIAEVAKLLAEAGFTVLVSCISPLEKDRQSARRIIAPVRFLEVFVETPIEECIRRDPKGLYRKALSGEIKNFTGISSPYEAPLKPDLCIRTADADSETLAALVVRTVCERGDAAFAFHQSG

SEQ ID NO: 537 - protein, 229 aa, Zea mays
  unsure (1)..(229): unsure at all Xaa locations
LAIELSKREDELLRQKTEVTKIADTLKLAFTESKRIIDEKRANARLEIESAKASVQKIQSALKEQEIFSQRTGEQDVDELKEEVQEARRVKMLHCPSKAMDIENEIQVLRDQLAEKSSDSLRLLKELELHRSYGENDMPLYELKGLETLGSTLHIVVHDCASVDFWNSSIQWFRIQPEGSKKEIIXGTTKPAYAPEPHDVGRYTQAEVKSGGQTSITKIAGSVDPGMVS

SEQ ID NO: 538 - protein, 101 aa, Zea mays
  unsure (1)..(101): unsure at all Xaa locations
MSDGTATCIDIILAIILPPLGVXFRFGCGVGFWICLILSLLGYLPGFLYAARAITKEPAGALACIAPAGGSGGGGLGAPGSGDVVPSLLGRWRLGLAAEVW

SEQ ID NO: 539 - protein, 259 aa, Zea mays
  unsure (1)..(259): unsure at all Xaa locations
MEIAMVCTRVNLLILILSLCSPYKFIQSPMDFGPLNLLPTTIAASSDFGRILFHSPSAVLKPQSPRDISLLLSFLSASSLGKVTVAARGAGHSIHGQAQAXDGIVVEMRCLPXEIELHRGGEGDVSYADVSGGAMWIELLEQSLKAGLAPRSWTDYLYITIGGTLSNAGISGQTFKHGPQISNVLQLEVVTGRGETVTCSPTKNAELFSAVLGGLGQFGIITRARILLQEAPQKVKWXVRAFYDDFGTFTKDQELLVSM

SEQ ID NO: 540 - protein, 410 aa, Triticum aestivum
  unsure (1)..(410): unsure at all Xaa locations
MAAQNYGELYNILGWGEPYFTVNRDGHLCVKTHGHETKPGQEIDVVSVAEAAKEKGVQFPMILRFPDVLKHRLDSLHVAFEKAIKHTGYTAPYQGVYPVKVNQNRAIINDFVSFGHRHSYGLEAGSKPELLIAMSYLTKAKPGAFLVCNGYKDADYVALALSARAMGLNVIIVLEMEEELDIIIEHSSKLGVEPVLGVRAKLLTKIPGHFGSTAGKHGKFGLLADKIYEVAKKLKDLNKLHWLKLLHFHIGSMIPTTDIVSSAAREASGIYCTLVKQYGAXWTTLDCGGGLGVDYDGTRSGSDMSVAYGLEEYASSIVQAVRVKCEDNGVDHPVLCTESGRAMVSHHSMIILEALSAIPEPKDDEETTPEELQAMIDDLSSKKWLKGDDDAAVAKPMSSHAAEIKEHGIE

SEQ ID NO: 541 - protein, 166 aa, Triticum aestivum
  unsure (1)..(166): unsure at all Xaa locations
MAQESLRLVCPPVSAHEGRLPRQYTLEGQGAKKDISPPLEWYGVPDGTRSLXAVVVQDVDADERVPWTHWVVVNISPEEKGLPEGFSGAGGNANAGGGDGGVQEGVNDWKQPGWRGPVPDSHGHRIQFRLYALDDVLSLGNKVTVDKVMEAIEGHVLGEAEITAVF

SEQ ID NO: 542 - protein, 131 aa, Triticum aestivum
  unsure (1)..(131): unsure at all Xaa locations
MEGVGARLGRSSARYGPAMTFTGPVRKWRKEWVTISAATATATSAAASSTGTGSRGNNLILFKWTXLNGANERDEEQTAPAKTATRRRLYVPVSVVQDQRQESAKSDDENKANDGEPSSTETEQSIGKTNM

SEQ ID NO: 543 - protein, 371 aa, Nicotiana tabacum
MAKRTLPLLRHLLSSPSHGFSHSLTSTRSVTYMPRPGDGTPRAVTLIPGDGIGPLVTGAVEQVMDAMHAPVYFERYDVHGDMKSVPPEVMESIRKNKVCLKGGLKTPVGGGVSSLNVQLRKELDLYASLVHCFNLQGLPTRHENVDIVVIRENTEGEYSGLEHEVVPGVVESLKVMTKFCSERIAKYAFEYAYLNNRKVLTAVHKANIMKLADGLFLESCPEVATKYPGIKYNEIIVDNCCMQLVSRPEQFDVMVTPNLYGNLVANTAAGIAGGTGVMPGGNVGADHAVFEQGASAGNVGNEKILEQKKANPVALFLSSAMMLRHLQFPSFADRLKTSVKRVIAEGKYMTKDLGGNCTTQEITDAVIANLD

SEQ ID NO: 544 - protein, 204 aa, Glycine max
MALELVIKLDWVDLIMMDWLVQIEMSAVNITNVTVLDNPASFLTPFQFEISYECLTALKDDLEWKLIYVGSAEDETYDQLLESVLVGPADPPDPSKIREEDIIGVTVLLLTCSYLGQEFIRVGYYVNNDYDDEQLREEPPPKVLIDRVQRNILSDKPRVTKFPINFHPENNENEEQLPPSEHPSETGEDPLAVVDRDPPDEKDS

SEQ ID NO: 545 - protein, 443 aa, Rubrivivax gelatinosus PM1
MTRGPDTLAERSRRAVWHPCTQMKRHEREPLLAIARAQGPWLFDPDGHRYLDAVSSWWVNLFGHGHPQLRDALAEQLATLDHVMLAGLTHEPVVELSERLAALTGLGHAFYASDGASATEIALKMSAHSWRNRGRPQKCEFVGLAGGYHGETVGALSVTDIALFREAYAPLVRLSAALPSPDTRHAAPGEDAAAHARRCAASLEAYLDQHHERTAALIVEPLVQCAAGFGMHDPEYLRLARALCDRYQVHLICDEIAVGFGRTGTLFAHQQAGIRPDFICLSKGLTGGTLPLSAVLTTDAVYESFYDDLASRGFLHSHSYTGNPLACRAALTVLDLFEQPIDGEPVLAHNRRTAARLTALCEPLNAHPRVRAVRQLGMLWAWDIDDDGVVGFSSAYHLAAREQGLLLRPIGNTLYFMPPYVLDDGALEQLAGGALRALEVALA

SEQ ID NO: 546 - protein, 338 aa, Streptococcus pyogenes MGAS315
MKAVVVNQASTGVEVVEHDLPNVGHGEALVKVEYCGVCHTDLHVAHGDFGQVPGRILGHEGIGIVEEIGEGVTSLKVGDRVSIAWFFEGCGHCEYCTTGRETLCRSVKNAGYSVDGGMSEYAVVTADYAVKVPEGLDPAQASSITCAGVTTYKAIKEAGAAPGQWIVIFGAGGLGNLAVQYAKKVFNAHVVAVDINNDKLELAKEVGADIVVNGKEIEDVPGYIQEKTGGAHGVVVTAVSKVAFNQAIDSVRAGGTVVAVGLPSEYMELSIVKTVLDGIKVVGSLVGTRKDLEEAFAFGAEGLVVPVVEKVPVDTAPEVFDEMERGLIQGRKVLDFIS

SEQ ID NO: 547 - protein, 129 aa, Malus x domestica
MMTCKLKFLELKAKRTYRFIVFKIDEKKNEVIVEKLGEPAESYEDFTANLPDNECRYAVYDFDFVTVENCHKSRIFFVGWSPDTARVRNKMIYASSKDRFKRELDGIQVELQATDPSEIGLDVIKSRAN

SEQ ID NO: 548 - protein, 178 aa, Triticum aestivum
  unsure (1)..(178): unsure at all Xaa locations
MAGVSRSMVAPLLVLXNLVMYIVVIGLASWNLNHFINGXTNYAGVAGNGATFYFLLFAILAGVVGAASKLAGVHHVRTWRGDSLSTSASSALVAWAITALAFGLACKEIHVGGHRGWRLRVLEAFIIILAFTQLLYVMALHAGLFGNQFGDGYGGAEHQYGDHHHHKGMGTAAATARV

SEQ ID NO: 549 - protein, 300 aa, Bartonella sp. sa192up
PIDQLAEKGDFLEICYLLLYGELPTKQEKNDFDNCIMQHTMVHEQLARFFHGFRRDSHPMAVMVACLGAMSAFYHDSIDITDSQQRMIASVRLISKVPTLAAMAYKYSIGQAFVYPRNDLSYAANFLRMCFCVPCEEYKINPVLTRAMDRIFILHADHEQNASTSTVRLAGSSGANPFACIAAGVACLWGPAHGGANEACLKMLQEIGSVERIPEFIARAKDKNDPFRLMGFGHRVYKNYDPRAKIMQKTCHEVLKELNIQDDPLLDIAIELEKIALSDEYFVEKKLYPNVDFYSGITLK

SEQ ID NO: 550 - protein, 486 aa, Azotobacter vinelandii
MRKIENFIAGEYVAAASGRRFDKRSPLDNRVIASIAEAGRAEVDAAVGAARGALAGDWGRLSTEQRVELLYGVANEITRRFDDFVEAEMADTGQPAHVMKQVFIPRGAANFKVFADVVKNVASESFQTATPDGRGALNYALRVPKGVIGVICPWNAPFMLMTWKVGPALACGNAVVVKPSEESPQTAALLGEVMNAVGIPKGVYNVVQGFGPDSAGEFVTQHPGVDAITFTGETRTGAAIMKAASEGMRDVSFELGGKNAGIVFADCDFEAAVEGIFRSAFLNSGQVCLGTERVYVERPIFERFVQALKVKAESVRFGRPDDHDANYGPLISQEHRQKVLSYYRKALEEGATLVTGGGVPEMPGELAEGAWVQPTIWTGLPESAAVVREEIFGPCCHIRPFDAEDEVVQLANATDYGLSTTLWTNDLARAHRLAARVEVGITWINSWFLRDLRTAFGGAKQSGIGREGGVHSLEFYTETRNVCVKL

SEQ ID NO: 551 - protein, 128 aa, Rubrobacter xylanophilus DSM 9941
MALSKEELIEAIENMTVLELSELVKALEERFGVSATAVAAAPAAAGAAGAEAAAAEEEKTEFDVILQDAGAKKIQVIKEVRAATGLGLKEAKALVDEAPNPVKEGLPKEEAEALKAKLEEAGATVELK

SEQ ID NO: 552 - protein, 300 aa, Bartonella sp. af82up
SIDQLAEKGDFLESCYLLLYGELPTKQEKIDFDQRIMQHTMVHEQFARFFHGFRRDSHPMAVMVACLGAMSAFYHDSIDITDSQQRMIASIRLISKVPTLAAMAYKYSIGQPFVYPRNDLSYAANFLHMCFSVPCEEYKINPVLARAMDRIFTLHADHEQNASTSTVRLAGSSGANPFACIAAGVACLWGPAHGGANETCLKMLQEIGAVQKIPEFIARAKNKNDRFRLMGFGHRVYKNYDPRAKIMQQTCHEVLKELNIQDDPLLDIAMELEKIALNDEYFIEKKLYPNVDFYSGITLK

SEQ ID NO: 553 - protein, 300 aa, Bartonella sp. ma106up
PIEQLAEKGDFLESCYLLLYGELPTQQEKNDFDRRIMQHTMVHEQFSRFFQGFRRDSHPMAVMVACLGAMSAFYHDSIDITDPQQRMIASIRLISKVPTLAAMAYKYSIGQAFVYPHNSLSYAANFLRMCFAVPCEEYQVNPVLTRAMDRIFILHADHEQNASTSTVRLAGSSGANPFACIAAGVACLWGPAHGGANEACLKMLKEIGSVKKIPEFIARAKDKNDPFRLMGFGHRVYKNYDPRAKIMQKTCHEVLKELNRQDDPLLDIAIELEHIALNDEYFIEKKLYPNVDFYSGITLK

SEQ ID NO: 554 - protein, 226 aa, Glycine max
VTARQDLHHRNRPSDHYRLLKSNVDALNLIQVGLTLTDAAGNLPDLAGNRSIWEFNFRDFDVARDAYAPDSIDLLRRQGIDFARNTADGVDSTCFAELMMSSGLVCNDAVSWVTFHSAFDFGYLVKILTRRNLPTRLEEFLKTVKVFFGDNVYDVKHMMRFCDTLYGGLDRVARSLNVDRAVGKCHQAGSDSLLTWHAFQKIVDIYFVKDEHRKHAGVLFGLEAFC

SEQ ID NO: 555 - protein, 300 aa, Bartonella sp. af170up
PIDQLAEKGDFLESCYLLLYGELPTKQEKHDFDRCIMQHTMVHEQFARFFHGFRRDSHPMAVMVACLGAMSAFYHDSIDITDPQQRMIASVRLISKVPTLAAMAYKYSIGQAFVYPRNDLSYAANFLRMCFCVPCEEYKVNPVLTRAMDRIFILHADHEQNASTSTVRLAGSSGANPFACIAAGVACLWGPAHGGANEACLKMLQEIGSVERIPEFIARAKDKNDPFRLMGFGHRVYKNYDPRAKIMQKTCHEVLKELNIQDDPLLDIAIELETIALNDEYFVEKKLYPNVDFYSGITLK

SEQ ID NO: 556 - protein, 366 aa, Streptomyces avermitilis MA-4680
MDTSTPLTRPPDLYGRPRSDSFMQKLAALSDHAVTRLARRSTPPRHPQAAETPAIRELVVATKHQEAEDVVSLRLAAPDGGILPPWQPGAHIELHLPSGRKRQYSLCGDPADRHRYRIAVRRIANGQGGSAEVHDALSDGMRVAITGPRNAFPFAAEASILLIAGGIGITPILPMAREAARRGLDWRLVHTGRSRGSMPFAAELAELTAAAPGRVTIRPDDESGAPEAADLLSLSPATGAVYCCGPAPMIDGVRRAFGDSRASALHFERFAPAPITDGRPFELQLGETGRVLPVPYDRSALDVLHDALPDLPFSCRQGFCGTCRVQVAHGHVDHRDRRLTATERAAGAMLPCVSRAPEGERLVLEL

SEQ ID NO: 557 - protein, 392 aa, Aegilops tauschii
MKTFLIFVLLAMAMKIATAARELNPSNKELQSPQQSFSHQQQPFPQQPYPQQPYPSQQPYPSQQPFPTPQQQFPQQSQQPFTQPQQPTPLQPQQPFPQQPQQPQQPFPQPQQPFPWQPQQPFPQTQQSFPLQPQQPFPQQPQQPFPQPQLPFPQQSEQVIPQQPQQPFPLQPQQPFPQQPQQPFPQPQQPIPVQPQQSFPQQSQQSQQPFAQPQQLFPELQQPIPQQPQQPFPLQPQQPFPQQPQQPFPQQPQQSFPQQPQQPYPQQQQSFPQQPQQPFPPTTTKPFPQQPQQPFPLRPQQPFPQQPQQSQQSFLQPQPQQPQQPSILQPQQPLPQQPQQPFQQPQQQLSQQPEQTISQQPQQPFPQQPHQPQQPYPQQQPYGSSLTSIGGQ

SEQ ID NO: 558 - protein, 427 aa, Arabidopsis thaliana
MDRISNLSDDLLLKIVSSLPTKDVVVTMLLSKRWKFLWMMVPKLRFDDEFELEPSYYGRFLKYVDKSMVLNRAQVLETVKFNVGPCCSSEDIATWIRIGMVRNMRELEISHCEGYFREHRSIKLPKSLYTYEKLEVLKLASTVVLNVPIDVCFPSLKSLHLVCVEYKTKKSHRRLLSGCPVLEELVLDKSYNSFHVRSFYVEIPTLQSLSILDTSGELYGDFTFVVNAPALKYFNFVDFYGDLCLRDNMPEVVDVNIKVIYRNPKKLLGPLKSVKRLSLCLSPSTTLHNHMEFYQLVHLELCGDALMWWDLLTWMLQSSPKLQVLKIYECKCEEHDYLDDPIEEHWEEPSSVPQCLLFHLNIFEWKYYNAGDEEKKVVAYILKNARQLKTATFSAASYLYPKEERSRELNELVYMARASSSCQLLLD

SEQ ID NO: 559 - protein, 1415 aa, Nicotiana tabacum
MSLQSHLENSVVCADTDQTLIPDDEQHVKKSPENFLDLPPESFWIPKDSEQDWFDENATIQRMTSMMKLGFFGKANHHSKSFSHRSFTSTLFNHHQKPKSTSLFALPQSKKTSSTEGNLKQKKVPKSLFRSRSEPGRKGIRHVREPGSPKVSCIGRVDYALQKAISQLAPTQQRKVELLIKAFETVVPPQGDNSQVAFPKLFVSRRGKEGRASSEEHLQKTNKENEEEWMLAGDTGIKAEKVISRSKKDRGIRTGFWKKLRNILKIRPRAKSVANVETVKSAGSVDVKRLETSGRSESMGLCTSKPGIDSKCEEKDIQPSIPRQKLDEVCSKYKDDDSASKDEVLVEAKAQKEDKQFNKETSSVVSAKQEDSSNDEKAPKAVRGFSLLLAMQKQKSNDEDSDAASQNKQVRNYISMWHMKSQKKDEDNSHVLSQEDSNVASSVGNELLDGDKTDDEVSNSDSPVARNSPLPASEFYSPSVKPSSSSVNNSTPGEDQCVTTTNNEGKKSPFFPSPAHYFFSKVKPKTPARSPATNPTKRFFGFSFKSKSTAKRPFPPPSPAKHIRAVLARRLGSNSSAIPEGAKAEGGGVGKLDKKGRKGEVGRGHFGHTCWAKFKKGELKNPQVAVKIISKAKMTTAIAIEDVRREVKILKALSGHQNLVRFYDAYEDVNNVYIVMELCEGGVLLDRILSRGGKYTEEDAKSIVVIQILNVVAFCHLQGVVHRDLKPENFLFTRKEEDAPQKVIDFGLSDFIRPDQRLNDIVGSAYYVAPEVLHKSYSVPIEADMWSIGVIAYILLSGSRPFWARTESGIFRADNNLLNNKEDHPKWWPSVSAEARDFVKRLNKDHPRKRMTASQALSHPWLRTSNDAKVPLDILIFKLMRAYLRSSSLRKAALKALSKTLTVDELFYLKEQAKALKKWRMMARKKKAVSHKSTVVSCMHLKEQFALLEESSDTNSSIDETKVKQDIKAGAYEFPSPTATRAQFLEPKSLNNFLTKQMTDAMIDELASELPLSPSLHDHARHHDWLGPSDGKLNFLGFVKFLHGVTSRSIKTHSHHAPTGTRTCNSRQDFTDTKDEPDTSREDHNPKSHNGRNFCRDDAVEAKNSSNSTEESLTNHDMSEDGKMFDQTKPNTIITEEERALPLEAAKNKPEPKPQKSKNWSKLKKLQLLPPTPDLLPEPETVDLRHQMTDERKKAEKWMLDYAMQHIVTTLTPARKNLLKRSIKALEKARKFNPRAPKLIREAVNEILTTPIQDDSSDTDITMDQEFSEMERVAMLVEAFEAVVPLPEIMTAPCCLYEASCPGSPLLRVKPKSMAEFACYEVFGTERPQTSNNRTLEQMLQLMRALGQFGLKLGGYLRERGSKAQVRKLFSKKITSFEKIQSIRPRAKSVANVETVKSAGSVDVKRLETSGRSES

SEQ ID NO: 560 - protein, 80 aa, Brassica napus
MATNRKTIVWFRRDLRIEDNPALAAAAREGSVFPVFIWCPEEEGQFHPGRASRWWMKQSLAHLNQSLKSLGSHLTFIKYT

SEQ ID NO: 561 - protein, 251 aa, Zea mays
  unsure (1)..(251): unsure at all Xaa locations
MAAKCYPTVSDEYLAAVAKAKRKLRGFIAEKNCAPLMLRLAWHSAGTFDVATKTGGPFGTMKCPAELAHGANAGLDIAVRLLEPIKEQFPILSYADFYQLAGVVAVEVTGGPEVPFHPGRQDKPEPPPEGRLPDATQGSDHLRQVFSTQMGLSDQDIVALSGGHTLGRCHKERSGFEGAWTANPLIFDNSYFTELLSGEKEGPSSLPSAKALLSDPSFRPLVDKYAADEDAFFADYAEXHLKLSELGFAEA

SEQ ID NO: 562 - protein, 357 aa, Nicotiana tabacum
MARKSFPILKQLIQQSTNRFFTTNASPRAVTLIPGDGVGPLVTDSVEQVMQAMKAPVYFERYEVRGDMKCIPEEVIDSIKKNKVCLKGGLKTPVGGGVSSLNVLMRKELDLSASIVHCFTFPGLPTRHEDVDIVVIRENTEGEYAGLEHEVVPGVVESLKVITKYCSERIAKFAFEYADVNKRKKVTAVHKANIMKLADGLFLKSCREVASKYPEIQYEEIIVDNCCMQLVSRPEQFDVMVTPNLYGNLIANTAAGLAGGTGVLPGGNVGLIKPVFEQGASPGNVGHEKILKLKKANPVALLLSSAMMLRHLEFPSFADRLETAVKRVIAEGKVRTKDLGGDSTTQEVVDAIIAALD

SEQ ID NO: 563 - protein, 604 aa, Glycine max
  unsure (1)..(604): unsure at all Xaa locations
LKYKSEEGVRVLLLVWDDKTSHDKVFLKTAGVMGTHDEETRKFFKHSSVMCVLSPRYASSKMSFLKQQEIGFFVSXFSVESNVKCPVFCGLSSKQWVVGTVFTHHQKCVIVDTQAAGNNRKITAFIGGLDLCDGRYDTPEHRLFRNLDDVFDGDFHNPTFPAGTRVPRQPWHDLHCRIDGPAAYDVLINFEQRWRKATKWKEFAILFKKTSQWHDDALIRIERISWILSPSGAATLKDKSDYYTVPEDDPLVWVSSEDDPENWHVQIFRSIDSGSLKGFPKRVDIALSQNLICAKNLVIDKSIQTAYIQAIRSAQHFIYIENQYFIGSSYAWPAYKDAGADNLIPMELALKIASKIRAKERFAVYIILPMWPEGDPKTGAMQEILFWQGQTMQMMYDVVARELKSMQLTDVHPQEYLNFYCLGNREHFNEDSSSTNGAQVSTAYKYRRFMIYVHAKGMIVDDEYVIIGSANINQRSMAGTKDTEIAMGAYQPHYTWSAKKRHPHGQIYGYRMSLWGEHLGMLDETFEEPGRLECVEKVNEIAENNWKLFASEDFSLLQGHLLKYPVQVDSDGKIRSLPDCENFPDAGGKILGAHSTTIPDILTT

SEQ ID NO: 564 - protein, 411 aa, Bacillus sp. KSM-K16
MSTVMLKEESKRLVKATVPILAAHGETITKHFYKRMFHHHPELLNVFNRTNQKIGRQPQALANSIYAAAQHIDNLEAILPVVKRIAHKHRSLNIKPEQYPIVGENLLAAMKEVLGEAASDDVIEAWREAYEIIAGVFIEVEKQMYDQAGKAPGGWSGFRSFVVEKKKQESKAITSFYLKPKDGNEIASYQPGQYMTVKVNIPGDTYTHMRQYSLSDAPGKGYYRISVKREEGNTECPPGVVSNYLHQHIREGDVLEMTAPAGDFTLKQGEERPIVLISGGVGITPLMSMFNTLMQQGTKQKVTFIHAAIDGTYHAMHDHVAQTASQKENVHYAVCYERPTSEDQMNPYMKKEGYIDEQFLRSMIEDHHADFYFCGPIPFMKTVYHILNNWGVPEEQIHYEFFGPAGTLASS

SEQ ID NO: 565 - protein, 344 aa, Oryza sativa (japonica cultivar-group)
MPMLSSSPICAGRDSPAAPPPDPCLPPREEAGRGEEAAVRQMGSFTRCGRSLGHAAASSPPGLTRRDGGVELGAATTPPMLKRLPPPPLDRPAPLRSPPRFLCHCLATFGWWGIDRGEMKSPIKPRPPRPIDAIVFASIETRNRLRGFDRSFCCSAPPETYVFLPRARETIVLRANIIKMSSEQQASAGQPVLCASGCGFYGNPATLDMCSVCYRQHCLLNGATMATGPSSSVAAASAATVATGAVTSDSCSVPSAEVNGAAFSSKNNPEPATVVEKKAPANRCASCKKKVGLLGFACRCGATYCGTHRYPEKHACGFDFKGASRDAIARANPLIKGEKLTNKI

SEQ ID NO: 566 - protein, 151 aa, Brassica napus
FGHRVYKNYDPRAKVIKKLADEVFSIVGRDPLIEVAVALEKAALSDEYFVKRKLYPNVDFYSGLIYRAMGFPPEFFTVLFAVPRMAGYLSHWRESLDDPDTKIMRPQQAYTGVWLRHYEPVRERTLSSDSDKLGQVSISNASRRRLSGSAL

SEQ ID NO: 567 - protein, 354 aa, Burkholderia cepacia R1808
MKAAVWHGRNDIRVEEVPVPGHPPAGWVQIRVHWCGICGSDLHEYVAGPVFIPVDAPHPLTGLKGQCILGHEFSGEIAALGAGVTGFALGERVTADACQHCGTCWYCRHGMYNICENLAFTGLMNNGAFAEYVNVPAELLYKLPDNFPTEAGALIEPLAVGMYAVKKAGNIVGQTVVVVGAGTIGLCTIMCAKAAGAGRVIALEMSAARKQKALEVGATVVIDPKASDAIAEVKALTGGYGADVSFECIGHTATAKLAIDVIRKAGKSVMVGIFEEPTSFNFFDIVSTEKEVIGSLAYNGEFADVIRFIADGRIDVQPLITGRIALGDIVARGFEELVNHKDRNVKIIVQPVAA

SEQ ID NO: 568 - protein, 175 aa, Triticum aestivum
MAPTVMASSDTSVAPFQGLKSTAGLPVRRRSNGSSLGSVSNGGRIRCMQVWPIEGIKKCETLSYLPPISTEALLKQVDYLIRSKWVPCLKFSKVGFIFREHNASPGYYDGRYWTMWKLPMFGCTDATQVINEVEEVKKEYPDAYVRIIGFDNMRQVQCVRFIAFKPPGCEESGKA

SEQ ID NO: 569 - protein, 364 aa, Mentha x piperita
MEASFENGRKRSSSSSSEEESAFSFAMELAAGSVLPMVIKSAIDLNLLELIKRGGEEGASAYELAAQINAENPKAAAEMIDRILQLLAAHSVLTCRVETPPSRRRRYSLAAVCKFLTRDEDGASLAPLSLLVQDRVFMEPWYHLKDVIVEGGVAFERAYGVHAFEYHAKDPKFNKIFNQAMHNQSIIFMKRILEIYKGFEGVKSLVDVGGGTGASSKMIVSKYPLIKAINFDLPHVIQDASPHPEVEHVGGDMFVSVPKADAIFLKWICHDWSDEHCRKLLKNCYDAILGNGKVIIAESTLPEDPNSGPDTIHAIRGDVIMLTVNPGGKERTEKEFRTLALQAGFKRLVKVCAAFHTCIMECHK

SEQ ID NO: 570 - protein, 200 aa, Clostridium acetobutylicum ATCC 824
MNNKKSTNVVWQETKIKRQNREKMLKQKGAVLWFTGLSGSGKSTVASALEKKLYEMGYLTYLLDGDNLRYGLNSDLGFKSEDRTENIRRVSEVAKLFADAGIITITTFISPFIEDRNNARKLLGKDFVEVYIDCPIEVCEKRDPKGIYKKARNGEIKNFTGIDSPYEKPEKPEITVETYKDTEEKCVDNIIEYLKQHKIL

SEQ ID NO: 571 - protein, 360 aa, Populus tomentosa
MGSTGETQMTPTQVSDEEAHLFAMQLASASVLPMILKTAIELDLLEIMAKAGPGAFLSTSEIASHLPTKNPDAPVMLDRILRLLASYSILTCSLKDLPDGKVERLYGLAPVCKFLTKNEDGVSVSPLCLMNQDKVLMESWYYLKDAILEGGIPFNKAYGMTAFEYHGTDPRFNKVFNKGMSDHSTITMKKILETYKGFEGLTSLVDVGGGTGAVVNTIVSKYPSIKGINFDLPHVIEDAPSYPGVEHVGGDMFVSVPKADAVFMKWICHDWSDAHCLKFLKNCYDALPENGKVILVECILPVAPDTSLATKGVVHVDVIMLAHNPGGKERTEKEFEGLANGAGFQGFEVMCCAFNTHVIE

SEQ ID NO: 572 - protein, 636 aa, Zea mays
MLSTRTAAVAASASPASPWKLGGRSEGGASCDGCRTYRNTLRRRAAPAKVRALPPRRVDAVAMVSNAETETEKEQEEAAAASEELPVMPWATSVASGYTLLRDPHHNKGLAFTEEERDGHYLRGLLPPAVLSQELQIKKFMNTLRQYQTPLQRYIAMMNLQETDERLFYKLLIDNVVELLPFVYTPTVGEACQKYGSIFGRPQGLYVSLKDKGKVLEVLRNWPHRNIQVICVTDGERILGLGDLGCQGMGIPVGKLALYTALGGVDPSVCLPITIDVGTNNEKLLNDEFYIGLRQKRATGEEYDELIEEFMSAVKQFYGEKVLIQFEDFANHNAFDLLEKYSKSHLVFNDDIQGTASVVLAGLLAALKMVGGTLAEQTYLFLGAGEAGTGIAELIALEISKQTNAPIEECRKKVWLVDSKGLIVDSRKGSLQPFKKPWAHEHEPLKTLYDAVQSIKPTVLIGTSGVGRTFTKEIIEAMSSFNERPIIFSLSNPTSHSECTAEQAYTWSQGRSIFASGSPFAPVEYEGKTFVPGQSNNAYIFPGLGLGLVISGAVRVHEDMLLAASKALADQATQDNFEKGSIFPPFTSIRKISAHIAAAVAAKAYELGLATRLPPPSDLVKYAENCMYTPVYRNYR

SEQ ID NO: 573 - protein, 468 aa, Novosphingobium aromaticivorans DSM 12444
MIIDGARVSGGGRRTHAVVNPATGETIGELPLAEVADLDRALEVAAKGFRIWRDSTPQQRAAVLQGAARLMLERQEDLARIATMEEGKTLPEARIEVLMNVGLFNFYAGEVFRLYGRTLVRPAGQRSTITHEPVGPVAAFAPWNFPLGNPGRKLGAPIAAGCSVILKAAEETPASALGVLQCLLDAGLPKEVAQAVFGVPDEVSRHLLGSSVIRKLSFTGSTVIGKHLMRLAADNMLRTTMELGGHGPVLVFGDADIDKALDTMAASKYRNAGQVCVSPTRFIVEESVFERFRDGFAERVGRIKVGNGLDQDAQMGPMANARRPEAMDRLIGDAVTRGARLHTGGERVGNAGYFYAPTVLSEVPLDAAIMNEEPFGPVALINPFGGEEAMIAEANRLPYGLAAYAWTDSAARAKRLAREIETGMLGLNSTMIGGADSPFGGVKWSGHGSEDGPEGVMACLVTKAVHEG

SEQ ID NO: 574 - protein, 488 aa, Arabidopsis thaliana
MESGGKTNRQLRKAICVSTDEKMKKKRSPSVIVIGGGMAGISAARTLQDASFQVVVLESRDRIGGRVHTDYSFGFPVDLGASWLHGVCKENPLAAVIGRLGLPLYRTSGDNSVLYDHDLESYALFDKAGNQVSQELVTKVGENFEHILEEICKVRDEQDEDMSIAQAFSIVFKRNPELRLEGLAHNVLQWYLCRMEGWFAADAETISAKCWDQEELLPGGHGLMVRGYRPVINTLSKGLDIRLSHRITKISRRYSGVKVTTEKGDTFVADAAVIALPLGVLKSGMITFEPKLPQWKQEAINDLGVGIENKIILNFDNVFWPNVEFLGVVAETSYGCSYFLNLHKATSHPVLVYMPAGQLARDIEKKSDEAAANFAFSQLQKILPDASSPINYLVSRWGSDINSLGSYSYDIVNKPHDLYERLRVPLDNLFFAGEATSSSYPGSVHGAYSTGVLAAEDCRMRVLERYGELEHEMEEEAPASVPLLISRM

SEQ ID NO: 575 - protein, 124 aa, Bromus inermis
MAARRAHAAATLALLAAVLVLSAAPAPAEGAVSNCGQVVSYLAPCITYATGRAPGPNGGCCSGVRSLNAAASTTADRQATCSCLKQQTSGMGGIKPDLVAGIPSKCGVNIPYAIKPSTDCTKVR

SEQ ID NO: 576 - protein, 169 aa, Brassica napus
SVNNVTASPDGKLVAVLGDSPECLLADAGSGKVIHALEGHLDYSFSSAWHPNGQILATGNQDTTCRLWDVRNLSKSLKVLKGNMGAIRALRFTFDGRFLAMAEPADFVHVFDTEAGYSQCQEIDMFGEVAGISFSPDTEALFVGVADRTYGSLLEFSRKRNHLYLDSIF

SEQ ID NO: 577 - protein, 380 aa, Zea mays
  unsure (1)..(380): unsure at all Xaa locations
SESESEAASRRQGEMGKGAQGSDAAAAGGEVEENMAAWLVAKNTLKIMPFKLPPVGPYDVRVRMKAVGICGSDVHYLREMRIAHFVVKEPMVIGHECAGVVEEVGAGVTHLSVGDRVALEPGXSCWRCRHCKGGRYNLCEDMKFFATPPVHGSLANQVVHPADLCFKLPDGVSLEEGAMCEPLSVGVHACRRAGVGPETGVLVVGAGPIGLVSLLAARAFGAPRVVVVDVDDHRLAVARSLGADAAVRVSPRAEDLADEVERIRAAMGSDIDVSLDCAGFSKTMSTALEATRPGGKVCLVGMGHNEMTLPLTAAAAREVDVVGVFRYKDTWPLCIDFLRSGKVDVKPLITHRFGFSQRDVEEAFEVSARGRDAIKVMFNL

SEQ ID NO: 578 - protein, 256 aa, Zea mays
RTRGRTRGRTRGRTRGRTRGRTRGRLPSCAAVSISTPPSSAAPLHYGHRTPLASPFPLSPPCPRILRAAVAVSSLDLRPITGGFALFSMAAASSATSVHDFTVKDASGKDVDLSTYKGKVLLIVNVASQCGLTNSNYTELSQLYEKYKDQGFEILAFPCNQFGGQEPGTNEEIVQFACTRFKAEYPIFDKVDVNGDNTAPIYKFLKSSKGSLFGDNIKWNFSKFLVDNEGRVVERYAPTTSPLSIEKDIKKLLGSS

SEQ ID NO: 579 - protein, 364 aa, Cupriavidus necator
MSRCGRRAELLHAAGTGSGSASFPMSAAPSSSPDAPATPGLPSSPLDPQVAALLELIARAKRPPIHAMEPEDAKIAYEKSAPILDINPPPVYMAEDLLAPARDGHAIPLRLYTPREASWTEPLPLLVYFHGGGFTVGSVDSHDPLCRLLCGQADCMVLSVDYRLGPQWRFPTAANDAFDVLHWVFAEAGRLGADPARIAVGGDSAGGTLAAACAVEARNAGLAPVLQLLIYPGTCARQDTPSHRALADGYLLTADMIRWFFAQYLDQEASRDDWRFAPLDGGGAGAEVRGTCPAWIAVAGYDPLHDEGVAYAEKLRAAGVAATLADYPGMIHDFFKLGRFVPAVAQAHAEAVAALRAAFGTPHN

SEQ ID NO: 580 - protein, 439 aa, Arabidopsis thaliana
MDKNGIVLMRKYELGRLLGQGTFAKVYHARNIKTGESVAIKVIDKQKVAKVGLIDQIKREISVMRLVRHPHVVFLHEVMASKTKIYFAMEYVKGGELFDKVSKGKLKENIARKYFQQLIGAIDYCHSRGVYHRDLKPENLLLDENGDLKISDFGLSALRESKQQDGLLHTTCGTPAYVAPEVIGKKGYDGAKADVWSCGVVLYVLLAGFLPFHEQNLVEMYRKITKGEFKCPNWFPPEVKKLLSRILDPNPNSRIKIEKIMENSWFQKGFKKIETPKSPESHQIDSLISDVHAAFSVKPMSYNAFDLISSLSQGFDLSGLFEKEERSESKFTTKKDAKEIVSKFEEIATSSERFNLTKSDVGVKMEDKREGRKGHLAIDVEIFEVTNSFHMVEFKKSGGDTMEYKQFCDRELRPSLKDIVWKWQGNNNNSNNEKIEVIH

SEQ ID NO: 581 - protein, 202 aa, Zea mays
LSVFALTRAPAFCELSLPLTKEKAAFSPSDPAMQRHVASGRPSGTDGSDFSYRMVVESRYQRVAEGRSRLARLILVQALHLVAGGLLLLLSLSKGAAVNKFAVLSMAAGFLAIVVGELGRMRTMAVLLRLYTSLSSIAVAFSVTCIIRSELFLKVMKQNTEAITSYEMLDAVRVALGILLQMVVIATTTRLLQNMSPPKRAS

SEQ ID NO: 582 - protein, 211 aa, Zea mays
GRVGGRVGGRVGGRVGCAPLMLRLAWHSAGTFDVATKTGGPFGTMKNPAEQAHGANAGLEIAIRLLEPIKEQFPILSYADFYQLAGVVAVEVTGGPDVPFHPGRQDKPEPPPEGRLPDATQGSDHLRQVFSTQMGLSDQDIVALSGGHTLGRCHKDRSGFEGAWTSNPLIFDNSYFKELLSGEKEGLLQLPSDKALLSDPSFRPLVDKSQF

SEQ ID NO: 583 - protein, 79 aa, Triticum aestivum
  unsure (1)..(79): unsure at all Xaa locations
EVKVSEDGTVRATDFKKITTGKDDKGLKTYDPGYXLNTAPVRSSICYIDGDEGILRHRGYPIEEVAEXSSFVEVAYLLM

SEQ ID NO: 584 - protein, 463 aa, Bradyrhizobium japonicum USDA 110
MTPTMLPSSQQARDVAYQLHAYTNARSHQRAGPLIIERGEGPYVFDTAGKRYLDAMAGLWSAGLGFSEKRLIEAAHRQMQILPFYHTFASRSNGPSIALAEKLVKMSPVPMSKVFFTNSGSEANDTVLKLIAYRSNAAGQPQRKKVISRLRGYHGVTIGAASLTGFPDNHRSFDLPLPNIMHTGSPHFYKDSRAGESEETFATRRAEELESLIQREGADTIAAFFGEPVMGAGGVIVPPPTYWDKIQSVLKKHSILLVADEVICGFGRTGKMFGCETYNIAPDVIVVSKQLTSSYFPLSAIIMNDYMFEPIADESNKVGLLAHGFTGGGHPVGAAVALENLKLIEERGLIANVGRIGAYMQERLRTLVDHPLVGEVRGVGLIAAIELVLDKKRKVAATTPGDVGSIASRLLHERGIIVRNVDDALSICPPLIVNKDQIDELIDGITGMLHDLKATVVNCREPH

SEQ ID NO: 585 - protein, 205 aa, Triticum aestivum
ARRRYPGYDDPMQLAAQTAFSVSEVEALFELFKTISGSVIDDGFINKEEFQLALFKSKMDNIFANRIFDLFDVKKRGVIDFADFVQALNVFHPSIPMEEKIDFSFKLYDMDNTGFIERKEVKQMLIALLSESGMRLSDETIESIIDKTFSDADVNQDGKIDRAEWENFVSRNPSLMKIMTLPYLKDITTTFPSFVFNSKVDDIVT

SEQ ID NO: 586 - protein, 397 aa, Bacillus halodurans C-125
MANPNLKEEAIALHQKHSGKLEIVGKMEITDEKDLSLVYTPGVADVCKQIAEQPDKVNSLTSRGNMVAIVTDGTAVLGLGNIGPKAAMPVMEGKALLFKKFANIDGFPVCLNTQDTDEIVQIIKALSPTFAGINLEDIAAPRCFEIEERLKEELDIPVFHDDQHGTAIVVLAALTNALKVVNKLNQPIKMVINGAGAAGTAIANLLLHAGFKDITLVSLEGVVAKGEAWLNPMQAKMAEVTNLAGVKGTLKDAITDADVFIGVSGPGAMKKEHIQAMAKDPIVLALANPIPEIYPEEAIEAGAAVVGTGRSDYPNQVNNLLAFPGIFRGALDAGAKTITMEMKIAAAYAIADVLSDKEVNANMIIPDALDARVAQRVAEAVATTALQRERVAALSAN

SEQ ID NO: 587 - protein, 183 aa, Amaranthus hypochondriacus
MASSMLSNAAMATTAATAGAQASMVAPFNGLKSFATFPITKKSSNDFSSLPSNGGRVQCMQVWPPVGKKKFETLSYLPPLSDAQLLAQVQYLLNKGWIPCIEFELEHPFVYRENHRSPGYQDGRYWTMWKLPMYGCTDPAQVLNEVEEAKKAYPSAFIRIIGFDNKRQVQCVSFIAYKPAGGL

SEQ ID NO: 588 - protein, 244 aa, Brassica napus
MEVITHPTPRTVDEVFTDFRGRRAGLIKALTTDMVKFYQTCDPEKENLCLYGLPNETWEVNLPVEEVPPELPEPALGINFARDGMQEKDWVSLVAVHSDSWLLSVAFYFGARFGFGKNERKKLFQMINELPTIFEIVTGNAKQSKDLSGNNNTSSKSKSNGLKVPKMSSPPPKEEDESEAEDEDDEQGAVCGACGDSDGTDEFWICCDACEKWFHGKCVKITPAKAEHIKPYKCPSCSNKRARP

SEQ ID NO: 589 - protein, 109 aa, Glycine max
MSGVWVFKNGVVRLVENPGGEAVEGSRGGRRKVLVHRASNEVITSYAVLERKLYSLGWERYYDDPDLLQFHKRSTVHLISLPRDFNKFKPMHMYDIVVKNKNAFEVRDM

SEQ ID NO: 590 - protein, 431 aa, Corynebacterium efficiens YS-314
MSNVGTPRTAQEIQQDWDTNPRWNGITRDYTAEQVAELQGSVVEEHTLAKRGAEILWDAVSAEGDDYINALGALTGNQAVQQVRAGLKAVYLSGWQVAGDANLAGHTYPDQSLYPANSVPNVVRRINNALLRADEIARVEGDTSVDNWLVPIVADGEAGFGGALNVYELQKGMITAGAAGTHWEDQLASEKKCGHLGGKVLIPTQQHIRTLNSARLAADVANTPTVVIARTDAEAATLITSDVDERDRPFITGERTAEGYYHVKPGLEPCIARAKSYAPYADMIWMETGTPDLELAKKFAEGVRSEFPDQLLSYNCSPSFNWSAHLEADEIAKFQKELGAMGFKFQFITLAGFHSLNYGMFDLAYGYAREGMPAFVDLQNREFKAAEERGFTAVKHQREVGAGYFDTIATTVDPNSSTTALKGSTEEGQFH

SEQ ID NO: 591 - protein, 122 aa, Hordeum vulgare subsp. vulgare
MARLNSKAVAAAVVLAAVVLMMAGREASAALSCGQVDSKLAPCVAYVTGRASAISKECCSGVQGLNGLARSSPDRQTACRCLKSLATSIKAINMGKVSGVPGKCGVSVPFPISMSTDCNKVH

SEQ ID NO: 592 - protein, 248 aa, Chlamydomonas reinhardtii
MASAFERPRHAAGLDFDVEKGAALNAFAERTVRQGFVRKVFGLLAVQLALTTVIAGTFVTSTAVKTFVAAHPWVLMLGMLAGFGILLTLTLSSSARQSHPTNLILLFVFTAAEGVLVGAASSASRTDVVLLAFGLTAGITAAMTVYALTTKNDLTMSGAALYSCLWGLLLAGLVGMFVRTSAFNILLSAVGAVVFSVYIAYDVQCLLGGEHKYAVSPDEYVLGAIAIYLDIINLFMHILRLLNEANRN

SEQ ID NO: 593 - protein, 215 aa, Triticum aestivum
  unsure (1)..(215): unsure at all Xaa locations
RGRGRGVNACIGSCGGLCXGVNTVMRELECGLAHMYNVNNIFGIQNGYKGFYSSNYVAITPKTVTDIHKRGGTVLGTSRGGHDTKKIADNIQDRGINXVYIIGGDGSQKGAYEIYKEIRKRGLIVAVAGVPKTIDNDIAIIDKSFGFDSAVEEAQRAINSAHVEACSAENGIGLVKLMGRYSGFIAMYATLASRDVDCCLIPESPFYMDGEGGLL

SEQ ID NO: 594 - protein, 486 aa, Xylella fastidiosa Temecula1
MMHHNVHQSEILADPCDLQRAERWRQRDLRVLWHPCTQMREHPDTLPLVPIVRGEGVWLVGHDGRRYLDAVSSWWTNLFGHADPRISAAIAAQARTLEHVMLAGFSHEPAVRLAEALLRLAPRQDGREPLSKVFYADNGSAGVEVALKMAFHYFRNRGEEQRTRFIALHNGYHGETIGALAVGDIPLYRRVYAPLLTEVLFAPSPDAYLAEPGQSAAEYALQAAEALEALFKRYSGQICALILEPLLQCAGGMRMHHPVYLHRVRELCDAHGALLICDEIATGFGRTGTLFACEQACSAISTDTDDKDLGIMPDLLCLSKGLTGGFLPLAAVLTTQQLYEEFLDDSRERAFLHSHSYTGNPLACIAALTTLDIFENDCIIERNQVTAARMTQLAASLSGHPHVADVRQTGMVVAFELTRDGNKRTPFPPQARLGLHVYRAALARGVILRPLGDVVYWMPPYCVDEQQLHLLAETTRVAIDEAIACV

SEQ ID NO: 595 - protein, 449 aa, Arabidopsis thaliana
MDIFDNSDLEYLVDEFHADFDDDEPFGEVDVTSESDSDFMDSDFDFELSESKTNNETSALEARNGKDIQGIPWESLNYTRDRYRENRLLHYKNFESLFRSREELDKECLQVEKGKNFYDFQFNTRLVKSTIAHFQLRNLVWATSKHDVYFMNNYSLMHWSSLLQRGKEVLNVAKPIVPSMKQHGSLSQSVSRVQISTMAVKDDLIVAGGFQGELICKKINEPEVAFCTKLTSADNDITNSVDIYNAPSGSLRVMTANNDCTVRLFDATNFALLNRFAFHWSVNNISTSPDGKLVAVLGDSPECLLADTGSGKVIHGLEGHLDYSFSSAWHPNGQILATGNQDTTCRLWDVRNLSQSLKVLKGNMGAIRALRFTSDGRFLAMAEPADFVHLFDTEAGYSQCQEIDLFGEIAGISFSPDTEALFVGVADRTYGSLLEFNRKRNHSYVDSIF

SEQ ID NO: 596 - protein, 155 aa, Triticum aestivum
MAAFLRSKCSSVGRAMMGSLGNNLYGGATSSIETVARPSRSDAVCQQIRTFIQMRTNLKVVDNSGAKRVMCIQSLRGKKGARLGDMIIGSVKEAQPRGKVKKGDVVYGVVVRAAMKKGRSDGSEVQFDDNAIVIVNNKGELIGTRVFGPVPHELR

SEQ ID NO: 597 - protein, 123 aa, Pyrus communis
LVEACKNSLEKLQLDYLDLYLVHYPMPTRHNAIGKTASLLGEDKVLDIDVTISLQQTWEGMEKTVSLGLVRSIGLSNYDLFLTRDCLAYSKIKPAVSQFETHPYFQRDSLVKFCIKHGVLPTA

SEQ ID NO: 598 - protein, 459 aa, Capsicum chinense
MANITNEFMGHDMLAPFTAGWQSDMEPLVIEKSEGSYVYDINGKKYLDTLSGLWCATLGGSETRLVEAANKQLNTLPFYHSFWNRTTKPSLDLAKELLNMFTANKMAKVFFTNSGSEANDTQVKMVWYYNNALGRPQKKKIIARAKAYHGSTYISAGLSGLPPMHQKFDLPPPFVLHTECPHYWAYHLPGETEEEFSTRLANNLESLILKEGPETVAAFIAEPVLGAAGVILPPATYFDKVQAILRKHDILFIADEVVCGFGRLGTMFGSDKYNIKPDLVSVGKALSSGYMPIAAVLVSQKISSVILSESNKIGAFCHGFTYSGHPVACAVALEALKIYKERNITEVVNKISQKFQEGLKAFADSPIIGEIRGTGLALSTEFVDNKSPNDPFPYEWAVGTYFGAQCAKYGMLVSSTGDHVNMAPPFILSLEELDELIRIYGKALKDTEKRVEELKSQKQ

SEQ ID NO: 599 - protein, 199 aa, Zea mays
  unsure (1)..(199): unsure at all Xaa locations
MAYSMLSSAAVVTSPAQATMVAPFTGLKSSSAFPVTRKANNDITSIVSNGGRVSCMKVWPPXGKRKFETLSYLXPDLTEXXNWVRKVDYLSPATGGFLGGESRVGATGFGYRGSTGKHPPETTKGRYWEKGETFPLGRKGPHLWLKGVKEAPKGEKGEPPNRLSTGILGFQNTPGEAGGSCFFPPKKTTNFSGGLKLPL

SEQ ID NO: 600 - protein, 357 aa, Streptomyces griseoflavus
MTITASGSLPPSAPVAVQILDLLMGGWRAGVVSTFAELGVADGLAAGGLTPAQLAVRLGLEHDTAERFFRAGASVGLLRRGEHDTLELTELGRALASDDGSMRNFARWTGSTAERATWAHLATAVRTGRSPFAAMHGSGVWEFMESDPDTAAVFNSAMTELSKRVIQPVIEAFDFSRFSSVTDVGGGRGALLAAVLRKHPEMTGVLFDQPDVVSRSLPELSDAAVAHRVTVKSGSFFDGVPSGSDLFMISNVLHDWDDGRSRLILRNIAEAMHEGAHIAVVEAVAGLDDTADKAISLMDMDMLLLCEGKQRTVEEFRLLMAEVGIELVGVSRAGLQSVVEGRKVSGETGTPGSPRSR

SEQ ID NO: 601 - protein, 338 aa, Glycine max
QIIPWNFPLVMFAWKVGPALACGNTIVLKTAEQTPLTALFVAKLFHEAGLPDGVLNVVSGYGPTAGAALASHMDVDKLAFTGSTDTGKVVLELAARSNLKPVTLELGGKSPFIICEDADVDKAVELAHFALFFNQGQCCCAGSRTFVHERVYDEFLEKSKKRALRRVVGDPFKKGVEQGPQIDVEQFEKVLRYIRSGIESHATLECGGDRLGSKGFFVQPTVFSNVQDDMLIAQDEIFGPVQSILKFKDIDEVIRRANKTRYGLAAGVFTKNVSTANTLMRALRAGTVWINCFDVFDAAIPFGGYKMSGIGREKGIYSLHNYLQVKAVVSPVKNPAWL

SEQ ID NO: 602 - protein, 498 aa, Streptomyces griseoflavus
MTASVPPFTVGREDPRYIELSHSDNHRFVVEPEEFFLPATPDDVVASLQKAVTEGRGVACRSGGHCGQDFVGTPRRDLVLDLHNLHAIGPAADGAGVRVGSGATVDQVQKALFRRWNAALPLGACSAVGMGGLVAGGGYGPLSRQLGLVVDHLHAVEVAVVDESRTVRLVTARADDTGDLGELFWAHTGGGGGNFGVVTAYEFRSPEHLATEPVGLPRAAGRLHVQKVVFPWAMIDETSFVTVMRRFFEWHERHSEPGSPESSLFATFFVNHVSSGVLQLMVQQDADVDPEGEILARFVASLTEGTGVVGIPRGGVMSWLTGTRYMSQADCGDVMGARSASKSAYHRAAPTDEQLSVLHRHLHADHPGQASYVMFNSYGGEINRRGPSDAAVPQRDSVVKSSWFSAWQDAELDELHLGWLRGLYEEFFAGTGGVPVTGGRTDGCYINYPDADLLDPARNRSGEPWHHLYYKDNYARLRSAKRAWDPLNTFHHSMSIGL

SEQ ID NO: 603 - protein, 448 aa, Bacillus sp. KSM-K16
MLDLCITGGRVVLPSGVEETDVGIQAGKIARIGPINKKEARCIMNANGQYVFPGAVDTHVHFSEPGRTEWEGFFTGSRSLAAGGTTTYVEMPLNALPATTNRANLQRKLEAAKGQNYVDYSFYGGLVPTNLHELADLSASGVVAFKCFLSPCGSDIPGDFRNVDLNGLRAGMRLLAEKGQLLCVHAEDPSMISQLEAKLLSPVGADAYVASRPVEAEVKAVCDTLAAARETGCRIHFVHISSAAAIEAIERAKEEGVDVTVESCPHYFLLSAEELAELGPLAKCQPPLRPKQEQAKLWACLLDGQIDWLASDHSPCTPDLKDGDFLTAWGGISGCQNNIDIMFDAAVKRRGMPPEQLARLIATNPAKRMNLREKGEIAIGKDADFAFVDDRQSYTLTKEQLYYKNKHSPYVGRTIGCKVRRVLLRGQTIYTEEKGIIGKPSGELLHIH

SEQ ID NO: 604 - protein, 473 aa, Thermobifida fusca
MSQRPFWLAGSATTGDNELTVTNPYTGQTVATVAVPSPEQVDQAVAAAHGALDATAALPAHVRATALAHVARRLQERSEEIAQLITAESGKPILWARAEVGRAVSVFTWAAEEVRRDSGRVQRLDTDSAGEGRIALIRRVPKGAVLAISPFNFPLNLVAHKVAPAIAVGAPIVVKPAPATPLSALVLGEILAETDLPAGAFSVLPMPNELAQPLITDERLPVISFTGGQFGWELRKMAPNKHVTLELGGNAAAVVLADADLDWAARRIALFGNNQAGQVCIGVQRVIVEDAVYDEFAAKLVQRVEELVTGDPADEATQVGPLINEAAAARVEQWVNEAVAGGATVLTGGTRDGVTMAPTVLADVPDDAKVVCEEVFGPVMVLRRVSGVDEAFAEVNNSKYGLQAGVFTRDLATAFRAHRELKVGGVIIGDVPTYRADQMPYGGVKKSGVGKEGVRSAMDDLTDERVMVLTGVL

SEQ ID NO: 605 - protein, 116 aa, Avena fatua
SQVYQKYKDQGLEILAFPCNQFGGQEPGTNEEIVEFACTRFKAEYPIFDKVDVNGKEVSPLYKFLKSSKGGLFGDSIKWNFSKFLVDKEGRVVDRYAPTTSPLSIEKDIKKLLGTS

SEQ ID NO: 606 - protein, 286 aa, Lactobacillus plantarum WCFS1
MTALTKLTDTYTLNNGTKIPIVGFGTWQTPDGQVAYDSVLAALKAGYRHIDTAAAYGNEESVGKAIADSGVAREDLFVTTKLWNADHGYDAAKKALDTSLAKLGLDYVDLYLIHWPNPAAMRDNWEQLNADTWRAMEEAYTARKARAIGVSNFRPKHLDALLKTAKVVPAVNQIFLNPSDMEDEVVAYNRKHDILSEAYSPLGTGKIFSIPELKTLADKYDKSVAQVVLRWSLQHGFLPLPKSVHADRIEQNTELFDFELSDDDMKVIDGFHGVAGLANDPDQVNF

SEQ ID NO: 607 - protein, 233 aa, Porphyra purpurea
MSTNVVWHEGLITREARAKLLGQKGATVWLSGLSGSGKSTVSVELEQQLFAKKVLSYRLDGDNIRQGLNKNLSFSPADRKENIRRISEVAKLMCDIGVVVTTAFISPYTEDRDMAREIHKAASIPFIEVFVDCPLEVAESRDPKGLYKKARSGEIKNFTGIDAPYEKPPSPEITLDTSKQTIAECAAVILTYLTEKGLISSEPKEEAKPAKELEVAPAAPAAEAEAEKVPAAV

SEQ ID NO: 608 - protein, 266 aa, Triticum aestivum
MQLEVMANRGKILMERYELGRLLGKGTFGKVHYARSLESNRSVAIKMLDKEKVLKVGLSEQIRREVTTMRLVAHKNIVQLHEVMATRNKIYFVMEYVKGGELFDKVAKSGKLTEGAAHKYFQQLISAVDYCHSQGVYHRDLKLENLLLDENENLKVSDFGLSALSESKRQDGLLHTTCGTPAYVAPEVISKTGYDGAKSDIWSCGVILFVLVAGYLPFHGSNLMDMYRKIEQGDFRCPNWFSHKLQKLLFKILDPNPSTRASIQKI

SEQ ID NO: 609 - protein, 214 aa, Glycine max
MEQEEHEVYGADIPDEEIDMDADAEQQDEQLAPNHTNKELEDMKKRLKEIEEEASALREMQAKVEKEMGAVQDSSGTSATQAEKEEVDARSIYVGNVDYACTPEEVQQHFQSCGTVNRVTILTDKFGQPKGFAYVEFVEIDAVQNALLLNESELHGRQLKVSAKRTNVPGMKQYFGRRPAGFRSRRPFMPAPFFPPYGYGRVPRYRRPTRYRPY

SEQ ID NO: 610 - protein, 496 aa, Enterococcus faecalis V583
MSKKEINQVVASSYQLYINGEWTTGSGNKMIASYNPSNGEKLAEFVDATNADVDRAVEAAQEAFQTWKDVDVVTRSNLLLKIADLIEENQEHLAMVETLDNGKPLRETQSIDVPASADHFRYFASVIRGEEGSVKEFDKDTLSIVVKEPIGVVGQIIPWNFPLLMGAWKLAPALAAGNTVVIHPSSSTSLSLLELFKIFDQVLPKGVVNLITGRGSDSGNYMLAHPGFDKLAFTGSTEVGYTVAKAAADRLIPATLELGGKSANIIFEDANWERALEGVQLGILFNQGQVCCAGSRVFVQSGIYDQFVEALKEKFEQVNVGFPWEKDVEMGAQINEHQLEEILKYVEIGVKEGATLITGGQRLTENGLDKGAFLAPTLLANGTNAMCVAQEEIFGPVATVIKFETEEEVIRLANDSEYGLGGAVFSQDINVALRVARGVRTGRMWVNTYNQLPAGAPFGGYKKSGIGRETHKSMLDAYTQMKNIYIVTKEEADGLY

SEQ ID NO: 611 - protein, 99 aa, Brassica napus
MAAAAKLSFKDSLKALEADIQHANTLALDYPREKDGARVQMRLSYSPAAQFFLFLVQWTDCHLAGSLGLLRVLIYMTYADGKTTMSVYERKASIREFYA

SEQ ID NO: 612 - protein, 246 aa, Glycine max
MTSASELFHSRRHRLGRSALDLGLDTELNAADSLRRHYHLRRLRHHPERASDRIDGRYRRSFASESVDSEENVRSSLRGSDSERLPVGVVLARARLLQRLRGEPLSTNSATQYDRDSFGEDPESESSNEDPSGASLVTELTSQMARSQFLQELSTKPPGLTQEALDCLHQEVFSSNASEIGLDSRVLQDCSICLESFTDGDELIRLPCGHKFHSVCLDPWIRCCGDCPYCRRCIVVNTHSSLNEDE

SEQ ID NO: 613 - protein, 512 aa, Oryza sativa (japonica cultivar-group)
MEKLKSELWMTAVATCMSLLLYLTILRRRHASGGRSLALPPGPTPLPLIGNLLCLGGIFHQTLAKLARVHGPVMTLKLGLTTAVVVSSAEAAREAYTKHDQRLAARPVPDAFRANGFSERSIVFSPSSDPQWKNLRGIHATHIFSPRALAALRGIRERKVRDIVGYIRTVAGEEMCVREVVHNGVLNLISTSFFSMDMADVRSESARGLRGLIEDIIATVAGPNVSDFFPFLRQLDLQGLRRQTGSHLGIVFGLLDDIIDRRMAETRDHPDKQRHGDFLDALISLASAGKIPRYHITYLLFDVFAAGADTMTTTVEWAMAELLRNPRVMAKVRAEVTDALGGRESFDEGDAASLTYLQCVFKEAMRLHPVGSILVPHLAVQDGVEIGGYAVPKGTTVIFNAWAIMRDPAAWESPDQFLPERFLHKEESSSPPLELRGKDYEYIPFGSGRRLCPGLPLAERAVPFILASLLHAFEWRLPDGMSPDDMDMTEKFATANVLATPLKAVPVASHTS

SEQ ID NO: 614 - protein, 143 aa, Pichia angusta
MSRSGVAVSDEALKAFNDLKLGKKFKSIIYKLNDAKTEIVVDSTSTEDAYDAFVEDLPENDCRYAVYDFEYEVGQGDGKRNKIVFYQWSPDTASVRAKMVYASSKDALRRALNGIGTEIQGTDFSEVAYESVLEKISRTTGLH

SEQ ID NO: 615 - protein, 441 aa, Zea mays
MSQPKIKRRVGKYEVGRTIGEGTFAKVKFARNSETGEPVALKILDKEKVLKHKMAEQIRREVATMKLIKHPNVVRLYEVMGSKTKIYIVLEFVTGGELFDKIVNHGRMSENEARRYFQQLINAVDYCHSRGVYHRDLKPENLLLDTYGNLKVSDFGLSALSQQVRDDGLLHTTCGTPNYVAPEVLNDRGYDGATADLWSCGVILFVLVAGYLPFDDPNLMNLYKKISAAEFTCPPWLSFTARKLITRILDPDPTTRITIPEILDDEWFKKEYKPPIFEENGEINLDDVEAVFKDSEEHHVTEKKEEQPTAMNAFELISMSKGLNLENLFDTEQGFKRETRFTSKSPADEIINKIEEAAKPLGFDVQKKNYKMRLANVKAGRKGNLNVATEIFQVAPSLHMVEVRKAKGDTLEFHKFYKKLSTSLDDVVWKTEDDMQMRETK

SEQ ID NO: 616 - protein, 128 aa, Glycine max
  unsure (1)..(128): unsure at all Xaa locations
VCSMISSPAVTTVNRAGACMVAPFTALKSMVGFPWRKTTIDITFVAINGGXVQCMLVSPPIANKKFETLSYSPYLNDAQLLYEVKYHLKTGWIPCSQFDTDHGLGYHDHNRAPGYYYGLYWTMWKLPM

SEQ ID NO: 617 - protein, 95 aa, Glycine max
  unsure (1)..(95): unsure at all Xaa locations
ASSKISFPVVTTDNRAGAGMVAPFTGLIFMAGFPTIKTNIDITSIASNGGRVQXFQVWPPAGNKKFETLTFLTDLDNAQLSNEVKYLLKKGWIPC

SEQ ID NO: 618 - protein, 399 aa, Candida tropicalis
MMNIDQHHQQLQQQSQAQAQAQAQAQAQAQAQAQAQAQAQAAAAAVAASSQRQVSFNVSDHYQILEIVGEGAYGIVCSAIHKPSNQKVAIKKIEPFERSMLCLRTLRELKLLKHFNHENIISILAIQRPLNFESFNEIYLIQELMETDLHRVIRTQNLTDDHIQYFIYQTLRALKAMHSANVLHRDLKPSNLLLNSNCDLKVCDFGLARSIASQEDNYGFMTEYVATRWYRAPEIMLTFQEYTTAIDVWSVGCILAEMLSGRPLFPGRDYHNQLWLIMEVLGTPNMEDYYNIKSKRAREYIRSLPFCKKIPFQELFSNKPGINPLALDLLEKLLIFNPAKRITVEDALKHPYLQLYHDPNDEPISDKIPEDFFDFDKKKDSLTIEDLKKMLYEEIMKPL

SEQ ID NO: 619 - protein, 147 aa, Pyrus communis
VVGAGPIGLVTLLAARAFGAPRIVIADVNDERLSIAKSLGADEVVRVSTNIEDVAEEVAKIQKVLENGVDISFDCAGFNKTITTALSATRPGGTVCLVGMGQREMTLPLATREVDIIGIFRYQNTWPLCLEFLRSGKIDVKPLITHR

SEQ ID NO: 620 - protein, 397 aa, Saccharomyces cerevisiae
MSTEEQNGGGQKSLDDRQGEESQKGETSERETTATESGNESKSVEKEGGETQEKPKQPHVTYYNEEQYKQFIAQARVTVGSIVYKNFQILRTLGTGSFGRVHLIRSRHNGRYYAMKVLKKEIVVRLKQVEHTNDERLMLSIVTHPFIIRMWGTFQDAQQIFMIMDYIEGGELFSLLRKSQRFPNPVAKFYAAEVCLALEYLHSKDIIYRDLKPENILLDKNGHIKITDFGFAKYVPDVTYTLCGTPDYIAPEVVSTKPYNKSIDWWSFGILIYEMLAGYTPFYDSNTMKTYEKILNAELRFPPFFNEDVKDLLSRLITRDLSQRLGNLQNGTEDVKNHPWFKEVVWEKLLSRNIETPYEPPIQQGQGDTSQFDKYPEEDINYGVQGEDPYADLFRDF

SEQ ID NO: 621 - protein, 160 aa, Bartonella quintana
SIDQLAEKGDFLESCYLLLYGELPTKQEKIDFDRCIMQHMMVHEQFTRFFHGFRRDSHPMAVMVACLGAMSAFYHDSIDIKDAQQRMIAAIRLISKVPTLAAMAYKYSIGQAFVYPRNDLSYAANFLHMCFSVPCEEYKINPVLSRAMDRIFTLHADHEQ

SEQ ID NO: 622 - protein, 484 aa, Comamonas testosteroni
MKDIQNFINGAYVSTGRSFDKHSPLTGKVIAKVHEAGRNEVDAAVTAARTALNGPWGRMSVAERVEKLYAVADGINRRFEEFLAAECADTGKPRSVASHIDIPRGAANFKIFADVVKNVPTEFFEMATPDGRGAINYGHRGPVGVVGVICPWNLPLLLMTWKVGPALACGNTVVVKPSEESPQTAALLGEVMNEAGIPPGVYNVVHGFGPDSAGEFVTSHPGVDAITFTGETRTGEAIMKAAAKGARPVSLEMGGKNAAIVFADCDFDAAIDGTLRSAFVNSGQVCLGTERVYVERPIYERFVAALKQQIEGWKIGVPEDDDTKLGPLISKEHQAKVLSYYQLAVQEGATVVTGGGMPDLGAQYADGAWVQPTIWTGLPETARVIKEEIFGPCCHIAPFDTEEEVLTKANDNVYGLASAIWTQDLARAHRVAQRMHVGISWVNSWFLRDLRTPFGGAKQSGIGREGGVHSLEFYTELKNVCIKL

SEQ ID NO: 623 - protein, 118 aa, Glycine max
MATLDSDVTMVPAGEPSTSAGPSSSTKKPKRFEIKKWNAVSLWAWDIVVDNCAICRNHIMDLCIECQANQASATSEECTVAWGVCNHAFHFHCISRWLKTRQVCPLDNSEWEFQKYGH

SEQ ID NO: 624 - protein, 214 aa, Arabidopsis thaliana; identical to SEQ ID NO: 210

SEQ ID NO: 625 - protein, 191 aa, Zea mays
MSLCTIARRLCLSKPSSVNRLSVIWAHLYSTEAAKDTGAKKYKYPDVYDPYGPMSLPSEKVVDLADRIAALPPEEIKQIAPALLFRLNQEPPQAISGQGFSFVAQGGAGVGAGKAEKKAEKTVFDVRLEKFDAAAKIKIIKEIRTFTDLGLKEAKELVEKAPVVLKQSLTKEEAEAIIAKIKAAGGVAVME

SEQ ID NO: 626 - protein, 92 aa, Triticum aestivum
  unsure (1)..(92): unsure at all Xaa locations
MAFSMLSFGTMAAXSAAQATMVAHFNGLMSSAVFPATATANNDTTCMTSNGGRGNCMQVWPTIVKKKIETLSXLSDPTDSAWAYEVDYLIRN

SEQ ID NO: 627 - protein, 206 aa, Oryza sativa
VYHPVKLVRESTKPVPNGSPPTLGGLLKTKVQEGVRVIVFLWDDKTSHDKFLLKTDGLMHTHDEEARKFFRHSGVHCVWAPRYASNKLSIFKQQVVGTLFTHHQKCVIVDTQVIGNNRKITAFIGGLDLCDGRYDTPEHRLFKDLDTVFKDDFHNPTFQVNKSGPRQPWHDLHCKIEGPAAYDILTNFEQRWRKSAKWKVSVRRAV

SEQ ID NO: 628 - protein, 332 aa, Oryza sativa
SVKGFPKLVQEAESQNLVCAKNLQIDKSIHNAYVKAIRSAQHYIYIENQYFIGSSYYWSSNRSAGAENLIPIELAIKIARKIKARERFAAYIVIPMWPEGNPTTAAMQEILFWQGQTMSMMYKIVAEALQKEGLDDTHPQDYLNFYCLGKREVSNDVSTTSQSNENSPQRLVQKFKRFMIYVHSKGMIVDDEYVLIGSANINQRSMDGSRDTEIAMGAYQPHYSWAGRKKAPRGQVYGYRMSLWAEHLGTVEECFRWPHSVECVRQVNEMAEENWARYVSPEMVNMRGHLMRYPINVERDGRVGPVHGYECFPDVGGKVLGTHSSLPNALTT

SEQ ID NO: 629 - protein, 320 aa, Botryotinia fuckeliana
MPAYSDKVMLTFNNTVKQTTGFESGATKLKNMLRDSNELIVCPGVYDGISARVALQVGFPALYMTGAGTTASRLGMADLGIAQLSDMKDHAEMIANLDPYGPPLIADMDTGYGGPLIIDKAVKSYIRAGVAGFHIEDQIQNKRCGHLQGKKVVPAEEYYMRIRAAKAAKEAMNSDIVLIARTDALQQLGYDECIKRLKVAREMGADVGLLEGYTSKEMAAKTVKEFAPWPILLNMVENGSTPIITTKEAQEMGFRIMIFSFAALAPAYLAIQETFLRLKRDGVVGTPKNLTPKALFDVCGLKDSIVVDTTAGGGAFADGV

SEQ ID NO: 630 - protein, 479 aa, Mesorhizobium loti MAFF303099
MAQFRKNLIDGEWVGDAGSHNINPSDTGDVVGEYASAGVEQAKQAIAAAKAAFPSWSRSGPLARHAVLKKASDEIMARKDEIGRNLAREEGKTLAEGIGETIRAAQIFDFFAGETLRLTGEMVPSVRPGVGVEITREAVGVVGIITPWNFPIAIPAWKIAPALAHGNTIVFKPAELVPESAWSIVDILHRAGLPKGVLNLVMGKGSVVGQAMLDSPDINAITFTGSVGTGKRVAAASVEHMRKFQLEMGGKNPLVVLDDADLAVAVDCALNGAFFSTGQRCTASSRLIVTEDIHDRFVEALKERMGKLVIGDALDAQTQIGPVVDATQLKQDEDYIAIGVREGATLAFGGERLDRKTPGFYLSPALLTEATNAMRSSREEIFGPVASVIRVKNYDEALSVANDTPFGLTSGICTTSLKHATHFKRNSEAGMVMVNLPTAGVDFHVPFGGRKGSSYGPREQGRYATEFYTTVKTAYTFAG

SEQ ID NO: 631 - protein, 511 aa, Streptomyces coelicolor A3(2)
MHNPGNATPDRFPAQDRFADGAQYIAGRLTKGTSGRTHTVVDPATGEDVLTYDLAGPDDVDAAVAAARAAFPGWAGATPGERSDALHRFAAVLAERAEDFARAESLQCGKPLKLTREFDVPGTVDNAAFFAGAARHLQGQSAGEYSGDHTSYVRREPIGVVGSIAPWNYPLQMAAWKILPAIAAGNTIVLKPAEITPLTSLMFAQAATEAGIPDGVINVVSGTGREAGEHLVAHPDVAMTSFTGSTAVGKRVAEVATATVKRLHLELGGKAPFLVFDDADLDAAVHGAVAGSLINTGQDCTAATRAYVQRPLYEAFVEKTAALMDTVRVGDPFAPGTDLGPLVSHVQRDRVAAFVDRARSYARVVTGGEVPQGDLKDGAYYRPTLVADAAQDSEVVQSEIFGPVLVVLPFDTDDEGIRLANDTPYGLAASAWSRDVYRANRATREIKAGCVWINDHIPIISEMPHGGYKASGFGKDMSAYSFEEYTQVKHVMFDNTAVAAKDWHRTVFGDR

SEQ ID NO: 632 - protein, 208 aa, Zea mays
MDEEEHEVYGQEIPVDGDMEAADVDMTAAGDDAAKELDEMKRRLKEMEEEAAALRDMQAKVAKEMQGGDANASTAEAKEQVDARSVYVGNVDYACTPEEVQQHFQACGTVNRVTILTDKFGQPKGFAYVEFLEQEAVQEALNLNESELHGRQIKVSPKRTNVPGMKQRPPRGFNPYHAYPYRSYGAPYFPLYGYGRVPRFRRPTRYRP

SEQ ID NO: 633 - protein, 305 aa, Helianthus annuus
MPSQSDLDRQIEHLMDCKPLPEEVRTLCDQARTILVEEWNVQPVKCPVTVCGDIHGQFHDLLELFRIGGSAPDTNYLFMGDYVDRGYYSVETVTLLVALKVRYRDRITILRGNHESRQITQVYGFFDECLRKYGNANVWKHFTDLFDYLPLTALIESQIFCLHGGLSPSLDTLDNIRALDRIQEVPHEGPMCDLLWSDPDDRCGWGISPRGAGYTFGQDIAAQFNHTNGLSLISRAHQLVMEGYNWSQENNVVTIFSAPNYCYRCGNMAAILEVGENMDQNFLQFDPAPRQVEPDVARRTPDYFL

SEQ ID NO: 634 - protein, 501 aa, Photorhabdus luminescens subsp. laumondii TTO1
MSSEFCFVKYGFDKNLNKLINEFQFDELSTGTILFRSTTKVSKFKSERYTAFLIGNIYNISTIRSILGKIEGRSSVLSDVEILLLSRDKFGNSIISIAEGDYCLFIEDKKGNIEVITESRGLNLVNLVQTDLIWITNSLKIVGKVEGDKAFDFKPESEVIKNSLKPDNFSPIRNVSRLKPGTINKLTFDEQRYLHLEVEYVISPVEENSFDIKESVLLEIIDSDLRNSISRLSKNNETIGVPLSGGLDSSLVTALASKYFDKVKTWSIGTELSNEFEFSKIVSDYLGTEHEVKILSEDEVISGVVKAIYYNEIFDGLSSEIQSGLFNVYELAKGKVNSLITGYGSDLLFGGILDPEKSYIEPNKILSEQVYRTKWTGEFSTHGAGNYGLNVYHPFWTNNLISLCHNLDPYFKIRDNEVKNILREYANSINILPKEIVWRKKIGIHEGSSVNKSFATMIGTEVNNYQDKTRFSYSIYKEFLTGRLSIEEANSTKLCEIIRRN

SEQ ID NO: 635 - protein, 300 aa, Sulfolobus tokodaii str. 7
MYEWHWHIEWQTPYEFHGHAITKVIAEEKTPYQRALLVELARFGKALILDGKIQSTITDEFIYHEALVHPLLLSINNPEKILILGGGEGATLREVLKHKTIKNVTMVDIDPVVIDFAKKYLQEWHQGAFDNPKSKLVIEDGYKFIKETKEKFDAVVIDLTDPIKDSPSQMLYTKEFYEEVKRISKWGIVTQATSPSFSLETFSIIYNTIKHVFKKVSAGITYVPAFDGLWGFVYASDEVNPAEFSKEEINNRIKERIDGSLRFYDGETHITMFSIPKHIREVLEKENKISTRENPVAVPA

SEQ ID NO: 636 - protein, 276 aa, Schizosaccharomyces pombe
MKPFSPSQTNFEKEQLCFGVYQLKDCYQQVIEALSLGIRVIDSAITYRNEKECEQAIQDFCHQNVNIKREDITLITKIPDSLQGFERTWKAVEQSLRRTGRPKLDVVLIHSPKWPVRRIESWRALLQHQKEGRINKIGVSNYNIHHLEEIISLGLPLPAINQVEFSAFNNRPTFLSYCFNHGILVQAFSPLTRGYRLSDIRLLDLSLKYNKTPANILLRYCLQKGVSPIFKASSFVHIHENVKAEQFMLDPSDMDVMDTWDEEFVSKPTWNPIILP

SEQ ID NO: 637 - protein, 491 aa, Ralstonia eutropha JMP134
MSLTLANAALLRSQNFINQQWRDAGLGRRLAVANPATGEVFAHVPDSDDDDAGRAADAAAEAFPAWSARPARERAQLIKRWHALILANQEDLARIISTEQGKPLKEARGEVLYGASYVEWFAEEATRICGDIVAEAVPGRKLLVLKEPVGVVAAITPWNFPLAMIARKIAPALAAGCTVVAKPAEDTPLTALALVWLAEQAGLPAGVLNIVTASRESTPNVVDAWLADSRVRKITFTGSTPVGKHLARESAGTLKKLSLELGGNAPFIVFEDADLDAAVDGLMASKFRNGGQTCVCPNRVYVHESVHDDFVERLARRVGALHVAPATDENAQIGPMINARAVDKIARHVEDAVAKGARVVTGGRRVRTADGPHYYAPTVLIDATPAMELACEETFGPVAPVFRFRDESEVIRDANDTPFGLAAYFYSNDVRRIWRVAQALETGMVGINEGAIAAEAAPFGGVKESGYGREGSRHGLDDYMHTKYLCQGQLG

SEQ ID NO: 638 - protein, 486 aa, Pasteurella multocida subsp. multocida str. Pm70
MIKHWINGKEVASEETFDNFNPATGEVICQVASGGEKEINAAVQAAKDAFPKWSKTPAKERARLMRKLGELIDQNVAKLAELETLDTGLPIHQTKNVLIPRASHNFDFFAEVCTRMNGHSYPVDDKMLNYTLYQPVGVCGLVSPWNVPFMTATWKTAPCLALGNTAVLKMSELSPLTANELGRLALEAGIPEGVFNVVQGLGSTAGHALVTHDDVRAISFTGGTATGKHILKHAGLKKYSMELGGKSPVLIFDDADLDRALDAALFTIFSLNGERCTAGSRIFIQETVYDEFVKQFAARAKRLIVGDPQDFNTQVGSMITRQHYDKVTGYIRIGLEEGATLLAGGLERPQNLPAHLQKGHFIQPTVFADVDNRMRIAQEEIFGPVVCLMKFKDEAEALRLANDVEYGLASYIWTKDIAKALRLSNGIEAGMVFVNSQNVRDLRQPFGGIKASGIGREGGEYSFEVFAELKNVCISMHDHPIPRWGL

SEQ ID NO: 639 - protein, 232 aa, Salmonella typhimurium LT2
MSFQPSFAGPQPDSRIDRTTFIRRAYLHLAVAIVGFIVLSAAWSFIGVGEYALDVLLAGGRYSWLVVLGAFMLVGMLATRLADNAGNNQTQLIGLGIYVLAESLIFAPLLTVAAYINPSSIGAAAITTLLLVGGLTFTAFSIKKDFSFLRSFLTMAGFIAFGAIIASVICGFSLGVWFSALMVLLCAGFILYDTSNIIHHYPTDRPAGAALHLFASIATMFWYILRIFMSRN

SEQ ID NO: 640 - protein, 108 aa, Triticum aestivum
MEHGSLDDSSSSTFSIMEEDHTLANSVRFVLNQDPRVAFCGYSIPHPAENKVNIRVQTTGDPAKDVLKDALQDLMVMCQHIRGTLDTAVADFRGNKTAEAMDIDLNKK

SEQ ID NO: 641 - protein, 106 aa, Brassica napus
  unsure (1)..(106): unsure at all Xaa locations
MGGCVSTPKSCVGSKLKSSKPRKSRKRRRKRAAAAAASSSSRLSDGSFDNLDHPRNNLPTPTFRASGEEAWFESNAAFETDCDDDFHSVNEGGGERVSVSSTMTXS

SEQ ID NO: 642 - protein, 132 aa, Triticum aestivum
  unsure (1)..(132): unsure at all Xaa locations
ISPDNFEGLILIYPLLRDKWGTNTSVVLPDSGSTEQVMYVVGILRSANPDEGCSHHCLQELLRRHRHXADTAGVRIGAKQYLAHHPTPAGWHQHFGPRWERFAERKNRFDPLSILGPGQGIFPKGSTGVYAS

SEQ ID NO: 643 - protein, 375 aa, Oryza sativa (japonica cultivar-group)
MMPRTPPPTSPPLDDDDANETRRRVAIAGAASSPPPPRPAMPMFPGDVGPVMLAPPPPLPFFPIAAVQSGLGFMHMSAPPEIVTARSKLNSDAPSFSPRSPAASAAADEVEVRDVWAANLEEELRSIGALLPTYPVVSMDTEFPGTVHDVATPRHLRTPRESYAVVKRNVDELHLLQLGLALSGPAGRCPVAWQFNFAGFDARRDPHSGSSVAMLAAHGVDFTALRRHGIDHGDFARAFGRSKLACGRLTWAAFSGSYDFAYLVKVLTGGRPLPSTLEGFMAKVSKIFGPAVLDVKHLAKFCGGGGGIRGGLEHVAAALGVHRAAGRAHNAGSDSLLTSDVLHAMVDRFFPNSGVLNHAGAIDGLVKCSNLYYKY

SEQ ID NO: 644 - protein, 129 aa, Triticum aestivum
  unsure (1)..(129): unsure at all Xaa locations
MSDTDEHHFESKGDSGASKTYPQQAXAIRKGGHIVIKGRPCKGVEXSTSKTGXKHGHXXCXFXAXXXFXGXKLEEIVPXSXNWDGPPXVXXQNXKLIEIXDDGXXXXSXXKGGXLXEDXXSXXXEEFAT

SEQ ID NO: 645 - protein, 187 aa, Arabidopsis thaliana
RDRDSGGGQNGNNQNGQSSLSPREQDRFLPIANVSRIMKKALPANAKISKDAKETMQECVSEFISFVTGEASDKCQKEKRKTINGDDLLWAMTTLGFEDYVEPLKVYLQRFREIEGERTGLGRPQTGGEVGEHQRDAVGDGGGFYGGGGGMQYHQHHQFLHQQNHMYGATGGGSDSGGGAASGRTRT

SEQ ID NO: 646 - protein, 371 aa, Pseudomonas syringae pv. syringae B728a
MSTVTERTAEQLSPVIPKTMQAVVCHGPEDYRLETVDVPTPGPDEILTKVELCGICMGDIKTYRGAPSFWGDAEQPRYVKPPMIPGHEFVCRVVALGPGAEKRGVQIGDRVISEQIVPCWGCRFCNHGQYWMCQKHDLYGFQNNVQGAMAQYMIFTREGIIHKVPDSIAPDEAILIEPLACSLHAAERADVDFDDIVVVAGAGTLGLGIIGAVRMRNPKKLIVLDMKPERAALALRMGADEVWNPAEVDVLAKIREITDGYGCDIYIEATGHHKAVNQGLAMLRKLGRFVEFSVFNDEATVDWSIIGDRKELDVLGSHLGPYMYPRAIDFIGNRKIDMRDVVTHKFPLAQFKEAFAVMERGDKSLKVVLEP

SEQ ID NO: 647 - protein, 175 aa, Hordeum vulgare subsp. vulgare
  unsure (1)..(175): unsure at all Xaa locations
MAAAGDAGEKKMITLKSSDGEEFEVEEAVAMESQTIRHMIEDDCADNGIPLPNVNSKILSKVIEYCNKHVQAKPADAGASSDTASAAXGAPAAPAEDLKNWDAEFVKVDQATLFDLILAANYLNIKGLLDLTCQTVADMIKGKTPEEIRKTFNIKNDFTPEEEEEIRRENQWAFE

SEQ ID NO: 648 - protein, 160 aa, Zea mays
MSTKKIVLKSSDGESFEVDEAVALESQTIAHMVEDDCVDNGVPLPNVTSKILAKVIEYCKKHVDAAASKSEAVDGGGSSDDDLKAWDAEFMKIDQATLFELILAANYLNIKNLLDLTCQTVADMIKGKTPEEIRTTFNIKNDFSPEEEEEVRRENQWAFE

SEQ ID NO: 649 - protein, 502 aa, ASPERGILLUS NIDULANS FGSC A4
MKPPYYMETGCKRNPGSDSTLKVRWTLYTRLLQSANQGLGIDPGSGQVFASCPTNTVADVDAYVSSAHRSFLSYRETNPRARAKMLLNWHNLIAQSKNDIAKLVVYETGKPMAEAVGEVDYALGFAWWFAGEAERVRGSIAQPSISERRTFVIKQPIGVCIALVPWNFPVAMIIRKAAAALAAGCTVVIKPSPETPLSVLALADLALQAGFGPGVINVLTTDNLNTPDVSEALCKHPLVRKVTFTGSTAVGQLIARHCSEGLKKVTLELGGNCPFIIFDDGDLEQALAALMILKWRTAGQACTHANRVYVQSGVYDTFLRMIVNATKQLKVGHGASPGTTMGPLTTSRGIEKLERHVADALAKGARLELGGHRLQLEGNYFQPTIISGMSAYMLTTQEEIFGPLLGLYRFETEEEAVRMANDTSMGLASYFFTRDVSRTWRLLENLEAGMIGMNTGNSSAAESPFGGIKASGYGKEAGKDVAIEEYLIAKTGTLTVGAVSKL

SEQ ID NO: 650 - protein, 469 aa, Lactobacillus plantarum WCFS1
MAMLYGKHNHEAEEYLEPVFGAPSEQHDLPKYRLPKHSLSPREADRLVRDELLDEGNSRLNLATFCQTYMEPEAVELMKDTLAKNAIDKSEYPRTAEIENRCVNIIANLWHAPDDEHFTGTSTIGSSEACMLGGLAMKFAWRKRAQAAGLDLNAHRPNLVISAGYQVCWEKFCVYWDVDMHVVPMDEQHMALDVNHVLDYVDEYTIGIVGIMGITYTGQYDDLAALDKVVTHYNHQHPKLPVYIHVDAASGGFYTPFIEPQLIWDFRLANVVSINASGHKYGLVYPGVGWVVWRDRQFLPPELVFKVSYLGGELPTMAINFSHSAAQLIGQYYNFIRFGMDGYREIQTKTHDVARYLAAALDKVGEFKMINNGHQLPLICYQLASREDREWTLYDLSDRLLMNGWQVPTYPLPANLEQQVIQRIVVRADFGMNMAHDFMDDLTKAVHDLNHAHIVYHHDAAPKKYGFTH

SEQ ID NO: 651 - protein, 474 aa, Bacillus cereus ATCC 14579
MKKHLYINGSWKSVNTYKPLYAPYSEETLAEIAQGTEEDVKEAVTAAKNAMTKMNKLSAYDRATILEKVAQKMDERREEFAEIIAKEAAKPIRAARGEVDRTVQTYKFAAEEAKRIYGETLPLDAAPGADGRIAYTIRKPIGVIGAITPFNFPLNLVAHKVGPAIAAGNTVVLKPADQTPLSSYALVELFEEAGLPNGALNIISGPGPTVGEAIVKNDYVASITFTGSPKVGIGIKQKAGLKRVTLELGSNAAVIIDEDVELTDEIIERVKWGAFVNNGQVCISVQRVFVHETKIHEFLSKLKKAMESVVVGDPSLEETDVSALISKKDVERIDMWVQEAIKEGATVLCGGKKQDARIFEPTVLTNVPDHVSVQCQEVFGPLMTVNTFKEFDEAIEQVNNSRYGLQAGVFTNNLFKAMRAIDELEVGGVMINDIPTFRVDHMPYGGVKESGTGREGIKYAIEEMTEMKLVCIKK

SEQ ID NO: 652 - protein, 384 aa, Pisum sativum
MAIHHHHHHHQQLHHNSLLDALYCDEEKLEEEQEDVSSQQSDVTTNNDNNILDSTSLFPLLLLEQNLFSQDEELTTLFSKEKTQQETYYEDLKNVVDFVSLSQPRREAVQWMLKVNAHYAFSPLTATLAVTYFDRFLLTFHFQKDKPWMIQLVAVTCISLAAKVEETQVPLLLDLQVQDTKYVFEAKTIQRMELLILSTLKWKMHPVTPHSFLDHIITRLGLKTNLHWEFLRRCENLLLSVLLDSRFVGCVPSVLATATMLHVIDQIEESDDNGVDYKNQLLSILKINKEKVDECYNAIVEVTNENNYGHKRKYEQIPGSPSGVIDAVFSSDGSNDSWKVGSSSYSTSEPVFKKTKTQGQNRNLSPLNRVIVGILATASATTSP

SEQ ID NO: 653 - protein, 436 aa, Bacillus cereus ATCC 14579
MRDYLIKPLVGQPYPMISHGKGVYLYDQNGNKYFDGSSGAITAGIGHGVKEIADVIKKQAEEIAFVYRSQFTSEPAEKLAKKLSDLSVGDLNWSFFVNSGTEANETAMKIAIQHFQERGIQGKHKILSRWMSYHGIPMGALSMSGHPLRRQRFVSILEDYPTIPAPYCFRCPVQKVYPTCQLACATELERSIERIGAEHIAAFIAEPIIGAAGGAVVPPKDYYKVIKEICDHYDILFIADEVMTGLGRTGAWFAMEHWGVEPDIMTLGKGLGAGYTPMAATVVSDRVMEPILRGSRSVMSGHTLSANPLSAATALAVIEYMEKHNLPEKTAEKGEYLIKGLQKVQQQSTIIADVRGKGLLIGVELQPFTKASELISVAAKNGLLLYQAVSGQAGKEDSALLVAPPMTTTYSELDELLSIFSKSVEEMMQKGGHSIA

SEQ ID NO: 654 - protein, 499 aa, Acremonium strictum
MVRIQELTAALSLASVVQASWIQKRNSINACLAAADVEFHEEDSEGWDMDGTAFNLRVDYDPAAIAIPRSTEDIAAAVQCGLDAGVQISAKGGGHSYGSYGFGGEDGHLMLELDRMYRVSVDDNNVATIQGGARLGYTALELLDQGNRALSHGTCPAVGVGGHVLGGGYGFATHTHGLTLDWLIGATVVLADASIVHVSETENADLFWALRGGGGGFAIVSEFEFNTFEAPEIITTYQVTTTWNRKQHVAGLKALQDWAQNTMPRELSMRLEINANALNWEGNFFGNAKDLKKILQPIMKKAGGKSTISKLVETDWYGQINTYLYGADLNITYNYDVHEYFYANSLTAPRLSDEAIQAFVDYKFDNSSVRPGRGWWIQWDFHGGKNSALAAVSNDETAYAHRDQLWLWQFYDSIYDYENNTSPYPESGFEFMQGFVATIEDTLPEDRKGKYFNYADTTLTKEEAQKLYWRGNLEKLQAIKAKYDPEDVFGNVVSVEPIA

SEQ ID NO: 655 - protein, 277 aa, Arabidopsis thaliana
MAETLKEDSIMIREVWDYNLVEEFALIREIVDKFSYIAMDTEFPGVVLKPVATFKYNNDLNYRTLKENVDLLKLIQVGLTFSDENGNLPTCGTDKFCIWQFNFREFNIGEDIYASESIELLRQCGIDFKKNIEKGIDVVRFGELMMSSGIVLNDAISWVTFHGGYDFGYLVKLLTCKELPLKQADFFKLLYVYFPTVYDIKHLMTFCNGLFGGLNRLAELMGVERVGICHQAGSDSLLTLGSFRKPKERYFPGSTEKYTGVLYGLGVEDGTTTTVAN

SEQ ID NO: 656 - protein, 113 aa, Lilium longiflorum
MARSSAVCFLLLLAFLIGTASAITCGQVDSDLTSCLGYARKGGVIPPGCCAGVRTLNNLAKTTPDRQTACNCLKSLVNPSLGLNAAIVAGIPGKCGVNIPYPIRMQTDCNKVR

SEQ ID NO: 657 - protein, 446 aa, Triticum aestivum
  unsure (1)..(446): unsure at all Xaa locations
MDEFELEDNLEFILQSIQELIEDQGENNPFGEVNQNELLANLVNYDQDNLMPDVSVEDVVNGKDVQGIPWEKMLFPRDQYREMKMKGYKNYQNLSYAREDALQDCKQVERDGPYYDFQYNTRRARPSIVHFQLRNLVWATTKHDVYTVHNQSMTHWSSLNQISTELINGDDCIIPKQRGHGSQSVSMVQFTTMAVDNDFLXVVGGFHGELICKRLEDDGIVFSTRVTDDENAITNSLEIYQDPNGSRRLVVANNDCSVRIFDTKYFDLLNHYVFPWXSVNSVSXNPDATLFAVLGDHEDGLVVDPKCGKPIGKVRGHLDYSFSSAWHPDGNILATGSQDTTCRLWDIRNLSQSLAVLGGRLGSIRCIKFSSDGRFLATAEPIDFVHIYDCFADYGKSHEIDFFGEIAGLSFSPDTEAFYIGVADQTYGGLMEFKRRHQHHYLNCLW

SEQ ID NO: 658 - protein, 493 aa, Agrobacterium tumefaciens str. C58
MTIATPLKAQPKASHFIDGDYVEDNTGTPFESIFPATGEMIAKLHAATPAIVERAIASAKRAQKEWAAMSPMARGRILKRAADIMRERNDALSTLETLDTGKPIQETIVADPTSGADAFEFFGGIAPSALNGDYIPLGGDFAYTKRVPLGVCVGIGAWNYPQQIACWKAAPALVAGNAMVFKPSENTPLGALKIAEILIEAGLPKGLFNVIQGDRDTGPLLVNHPDVAKVSLTGSVPTGRKVAAAAAGHLKHVTMELGGKSPMIVFDDADIESAVGGAMLGNFYSSGQVCSNGTRVFVQKKAKARFLENLKRRTEAMILGDPLDYATHLGPLVSKAQQEKVLSYIEKGKAEGATLITGGGIPNNVAGEGAYVQPTVFADVTDDMTIAREEIFGPVMCVLDFDDEDEVLARANATEFGLAGGVFTADLARAHRVVDGLEAGTLWINTYNLCPVEIPFGGSKQSGFGRENSAAALEHYSELKTVYVSTGKVDAPY

SEQ ID NO: 659 - protein, 486 aa, Pasteurella multocida subsp. multocida str. Pm70
MGGISMQQFSLLKTKAYINGEYVQAKEHKTFAVTNPANQQIICELPDLSAEETEYAIACAAQAQKKWQKVTPKERANLLRRWYNLVIENQEELAQLLSLEQGKPINESRGEILYGASFIEWFAEEAKRIYGDVLPQDKENHRLLVIKQGIGVVAAITPWNFPNAMITRKAAPAFAAGCAMVLKPAQETPLSALALAELAHQAGLPAGLFNVITSTRSVEIGKVLTEHPTVRKVTFTGSTRVGKILMAQSASTVKKLSLELGGNAPSIVFDDADLENAIEGIIASKFRNSGQTCVCTNRIYVQAGIYDRFVELFSAKVAAFKVGSANEAGVNIGPLISQSAVNKIQEHIDDATAKGANLVIGGKLHTRGGTFFEPTVLRDVTQAMLVAKDETFAPLAPVFKFDTEAQVIEMANDTEFGLASYVYTQDISRIWRVSEALEYGIVGINEGLISNEMAPFGGVKESGLGREGSRYGIDEFLEIKYLCLKV

SEQ ID NO: 660 - protein, 252 aa, Triticum aestivum
  unsure (1)..(252): unsure at all Xaa locations
ITPRTRSTHVRPQPCCARTPSLVFLVALLLSCSSMSSAARHLEEAVPKKENPPHPIVTELPKPQLPLHPAMPELPKPEPPHPLVPEVPHPVVPETPKEPEVPHPVVPEMPKHELPPHPAMPELPKPELPHPAVPEVPKETQXPHPIVPEVPKELDLPRPVMPEVSHPVVSEVPKEPELPHXAMPELPKPEVPHHGVPEVPSEPHVPHPEVPKEPELPHPAVPEVPKHEMPLPPKAELPPKPEFHFPEPKTKP

SEQ ID NO: 661 - protein, 342 aa, Methanosarcina barkeri str. fusaro
MSKTAAVIKGDGVGPELVDAMLKVTEAAGTDVEFVMCEAGAGWWEKHGGNSLIPNETWDVLDSSDACFKGPTTTPGGIGSPRSVAVSIRSKYNLYANVRPIKTFPNSSAPLGDVEMICVREGTEGLYIGEEIQLTDDVSIAIRKITRTASHKIASYAFEEAKRRGYDAVVPIHKSNILKLTCGSFLEEVEKVGQNYPDIEIWPYHIDNIAQQLIKNPQIFNKKVLLSTNLFMDVISEECSALVGSIGLIYSANIGDSFAMFEPAHGSAPKYAGQDKVNPVATVLAGAWMLDYLDEKEKSEAIFKATKRVISEGKYVTYDLGGNAKLSQMAGEIAKYTAEILK

SEQ ID NO: 662 - protein, 397 aa, Synechococcus elongatus PCC 6301
MAANLLEQLRGMTVVVADTGGIQSIATFTPRDATTNPSLITAAAQMPQYQSIIDDTLRQVRTELGAEAPVEAIVAEAIDELFVAFGLRILEIVPGRVSTEVDARLSYDTEATIAKARKLIGLYERAGIRRDRVLIKIASTWEGIRAAEVLEKEGIHCNLTLLFGFHQAVACAEAGVTLISPFVGRILDWYKKESGRDAFPGAEDPGVQSVTQIYNYYKKFGYATEVMGASFRNISEIIELAGCDLLTISPGLLEELRQTEALLERKLDPAIAESLELEQIHLDRDRFAELHQADRMANEKLDEGIRGFCKAIDTLEGLLKQRLAVLEGKAVFHHAAHEVFSVCDLDGDGFITREEWLGSDAVFDALDLNKDGKLNEEDLLAGLGATLQMAGRAVATV

SEQ ID NO: 663 - protein, 434 aa, Escherichia coli
MKTRTQQIEELQKEWTQPRWEGITRPYSAEDVVKLRGSVNPECTLAQLGAAKMWRLLHGESKKGYINSLGALTGGQALQQAKAGIEAVYLSGWQVAADANLAASMYPDQSLYPANSVPAVVERINNTFRRADQIQWSAGIEPGDPRYVDYFLPIVADAEAGFGGVLNAFELMKAMIEAGAAAVHFEDQLASVKKCGHMGGKVLVPTQEAIQKLVAARLCADVTGVPTLLVARTDADAADLITSDCDPYDSEFITGERTSEGFFRTHAGIEQAISRGLAYAPYADLVWCETSTPDLELARRFAQAIHAKYPGKLLAYNCSPSFNWQKNLDDKTIASFQQQLSDMGYKFQFITLAGIHSMWFNMFDLANAYAQGEGMKHYVEKVQQPEFAAAKDGYTFVSHQQEVGTGYFDKVTTIIQGGTSSVTALTGSTEESQF

SEQ ID NO: 664 - protein, 316 aa, Arabidopsis thaliana
MDRIIGLPDEVLVKILSFVPTKVAVSTSILSKRWEFLWMWLTKLKFGSKRYSESEFKRLQCFLDRNLPLHRAPVIESFRLVLSDSHFKPEDIRMWVVVAVSRYIRELKIYSSHYGEKQNILPSSLYTCKSLVILKLDGGVLLDVPRMVCLPSLKTLELKGVRYFKQGSLQRLLCNCPVLEDLFVLLLRCDDIGMFIVIVPSLQRLSLYLSPRCNLEGFVIVLDTPLEYFKLVDRNYDRHPYMIENMPKLTSAYVEVISADLKSLVESITSVKYLTIFSENYDDFVFPWNQPSTVPKCFCPVYKSSPVYKSSPGQNT

SEQ ID NO: 665 - protein, 478 aa, Ralstonia solanacearum
MHAQHFIANRLMAADSGLRIKVFDPSDGQPFAEIARGNATDISVAVHAARRAFDGIWGRLAPAERGRLLMRVALRLADHEEELARLEARDTGKPMRQARADARAIARYFEFYAGAADKLHGQTIPYQPDTTVLTVREPHGVTAHIIPWNYPMQIFGRSVGAALAVGNACVVKPAEDACLSILRVAELAAEAGLPDGALNVVTGYGHEAGAALAAHPGINHVSFTGSPETGKLIVRAAAENHVPVTLELGGKSPQILFADADLDAAIPAVVSGIVQNAGQTCSAGSRVLIERGLYETVLDRLASVFEAIKVGPSTLDLDCGPLINPRQQQRVWDFVSDAQHANIPVMAQGLVVPEAPETGYYQAPMLLRDVPPTHRLAQQEVFGPLLAAMPFDGEAEALALANGTPYGLVAAVWTRDGARQLRLARALKAGQVFINNYGAGGGVELPFGGTGQSGHGREKGFEALYGFTTVKTIAIRHG

SEQ ID NO: 666 - protein, 204 aa, Glycine max
  unsure (1)..(204): unsure at all Xaa locations
ERERERERERETERERERERERERKTKREAAAKKAAEDAANLEKGDEHQASSQHATVTERAAAATSEADNKTSDFMDDDSALLQQALAMPMDDSAISHDVKDTHMSEASAIDPDLALALXLSITDSAKDXSSQXDXEQIVXPDQSFGXXILXSLXGVDPXDLXXXDFLXSCDSLATISFSFLSPFPFFSFFYGLAMCGFLRCFA

SEQ ID NO: 667 - protein, 363 aa, ASPERGILLUS NIDULANS FGSC A4
MPYLANPSLQVTADHQIKLVEAPVHEPGKGEVLVHIKATGVCGSDIHFWKTGRIGELIFHGDCIIGHEAAGVVLKCGEGVTDLQPGDRVAIEPGVPCENCFLCDEGRYNLCEDVAFAGVYPYAGTIQRYKVHPAKWLHKLPPSLSYLDGALLEPLSVVMRGIQVAQLELGRGVVICGAGPIGLIAAAAARASGAHPVVITDIDPSRLSFARRFLPTIQTYQNNPTLDAQGNAKAIRALFGDNEYNAPDRVLECTGVESSICTAAYTARRGGLVVVVGVGKEIINNVPFMHLSLAEIDLKFINRYRDTWPRAISCMAAGIITDLKPLISHTFPLERADEALELCADMGRPSIKVTIVDEGDATV

SEQ ID NO: 668 - protein, 189 aa, Triticum aestivum
  unsure (1)..(189): unsure at all Xaa locations
WASSAPSVSPFPGVKSTAGLPSSRRXNGASLGSVSNGGRIRCMQVWPIEGIKXFESLSYLPPLSTEALLNQVDYLIRSKWVPCLEFSKVGFIFREHNASPGYYDGRYWTMWKLPMFGCTDSTQVINEVEEVKKEYPDAYVRIIGFDNMRQVQCVSFIAFEPPGCEESPPPPPAHLRQAIYEVPLQVCQV

SEQ ID NO: 669 - protein, 409 aa, Cannabis sativa
NNSHIQATILCSKKVGLQIRTRSGGHDAEGMSYISQVPFVVVDLRNMHSIKIDVHSQTAWVEAGATLGEVYYWINEKNENLSFPGGYCPTVGVGGHFSGGGYGALMRNYGLAADNIIDAHLVNVDGKVLDRKSMGEDLFWAIRGGGGENFGIIAAWKIKLVAVPSKSTIFSVKKNMEIHGLVKLFNKWQNIAYKYDKDLVLMTHFITKNITDNHGKNKTTVHGYFSSIFHGGVDSLVDLMNKSFPELGIKKTDCKEFSWIDTTIFYSGVVNFNTANFKKEILLDRSAGKKTAFSIKLDYVKKPIPETAMVKILEKLYEEDVGAGMYVLYPYGGIMEEISESAIPFPHRAGIMYELWYTASWEKQEDNEKHINWVRSVYNFTTPYVSQNPRLAYLNYRDLDLGKTNHASP

SEQ ID NO: 670 - protein, 393 aa, Burkholderia fungorum LB400
MLSAEHRAIVKATVPLLESGGEALTTHFYRILIGEHPEVRPMFNLANQASGAQPRALANSVLMYARHIDQLEQLGGLVSQIINKHVALNILPEHYPIVGQCLLRAIREVLGAEIATDAVIAAWAAAYRQLADLLIGLEEKIYAEREAAPGGWRGTRLFRVARKVRESDEITSFYLRPDDNGELLAFHPGQYIGVRLYIDGEEVRRNYSLSAMSNGCEYRISVKREANGKVSSHLHTHLNENDTIELFAPAGDFTLEPGDKPLVLISGGVGITPTLAMLQAALHTNRVVHFIHSARHGGVHAFRDTIEQLAARHPQLKRFYCYEQRRADDADADGIGYLDETRLDAWLPETRDVDVYFLGPIAFMKAVKKHLKAIGVPESQSRYEFFGPAAALE

SEQ ID NO: 671 - protein, 389 aa, Escherichia coli
TLQNGKLNVPENPIIPYIEGDGIGVDVTPAMLKVVDAAVEKAYKGERKISWMEIYTGEKSTQVYGQDVWLPAETLDLIREYRVAIKGPLTTPVGGGIRSLNVALRQELDLYICLRPVRYYQGTPSPVKHPELTDMVIFRENSEDIYAGIEWKADSADAEKVIKFLREEMGVKKIRFPEHCGIGIKPCSEEGTKRLVRAAIEYAIANDRDSVTLVHKGNIMKFTEGAFKDWGYQLAREEFGGELIDGGPWLKVKNPNTGKEIVIKDVIADAFLQQILLRPAEYDVIACMNLNGDYISDALAAQVGGIGIAPGANIGDECALFEATHGTAPKYAGQDKVNPGSIILSAEMMLRHMGWIEAADLIVKGMEGAINAKTVTYDFERLMEGAKLL

SEQ ID NO: 672 - protein, 1266 aa, Bacillus cereus ATCC 10987
MLDWMKKLFNKEEEQTAMNKEVQKQVESQPKIPRVNHYTEAREAQMASRNAGKCRFPLVPDNGFDEEDVIETGRFEEQPVQAVTYENQPIQRGIKVERSRRQHVEKVVSTYEEPEIQYEPEREPVVKKASTPAQESNRRPFRPTEMISPIYGYNRPSVEKKEEKQEEVKEREDLEISVEGKSVVDAWLEKKGYTLSHFSEGQAPTSSSHERVDEQDQQSKKEEKSVVDQWLEKNGYEIERQEPIVEEKEVAQEMSAPQEVPAAELLHETIAERMEDAKQEKDVVVENVLQTESLASKVEHEDTILSEEMKRNTEIEQPTIEVEKQAPEESVIVKAEEKLEETIIVEIPEEFEEVDVITETEESEEVEVIAEAEESEEVEVIAETEESEEMEVIAETEESEEVEVIAETEESEEVEVIAEAEESEEVEVIAEAEESEEVEVIAETEESEEVEVIAEAEESEEVEVIAETEESEEVEVIAETEESEEVEVIAETKAPEEAEPVVLEETQQEMVLNEAIEQKNEFIHVAEADEQTKKDVQSFADVLIAEEAAIEEEQSVAEETPVAEEPPVVQKEEPKREKKRHVPFNVVMLKQDRARLVERHAARTNAMQPSMKERVENKPVHQVEEQPMQQVAVEPQVEEQPMQQVAVEPQVEEQPMQQVVVEPQVEEQPMQQVAVEPQVEEQPMQQVAVEPQVEEQPMQQVVVEPQVEEKLVQQVVEPQAEEKPMQQVVEPQAEEKPMQQVVVEPQVEERPVQQVVVESQQVQKPISSTEVEEKAYVVNQRENDVRNVLQTPPTYTIPSLTLLSIPQQAALDNTEWLEEQKELLDTTFNNFHVGAHVINVSQGPAVTRFEVQPDPGVKVNKITNLSDDIKLSLAAKDIRIEAPIPGKSAIGIEVPNKESKPVFLREILRSPVFTKSESPLTVALGLDISGDPIVTDIRKMPHGLIAGATGSGKSVCINAILTSILYKAKPHEVKLMLIDPKMVELAPYNSVPHLVAPVITDVKAATAALKWAVEEMERRYELFAHAGARDLTRYNTIVSEREIPGETLPYIVIVIDELADLMMVAPGDVEEAICRIAQKARACGIHLLVATQRPSVDVITGLIKSNIPTRIAFTVSSQVDSRTIIDIGGAEKLLGRGDMLFLGNGTSKPVRVQGVYVSDDEIEKTVDHVKKQMKPNYLFKQEDLLAKTEQAESEDELFLDACQFVVEQGGASTSSVQRKFRIGYNRAARLIEEMESQGIISEGRGTKPRDVLISEDEFAAMQETNV

SEQ ID NO: 673 - protein, 385 aa, Escherichia coli
  unsure (1)..(385): unsure at all Xaa locations
TLQNGKLNVPENPIIPYIEGDGIGVDVTPAMLKVVDAAVEKAYKGERKISWMEIYTGEKSTQVYGQDVWLPAETLDLIREYRVAIKGPLTTPVGGGIRSLNVALRQELDLYICLRPVRYYQGTPSPVKHPELTDMVIFRENSEDIYAGIEWKADSADAEKVIKFLREEMGVKKIRFPEHCGIGINPCSEEXXXXXVRAAIEYAIATDRDSVTLVXKGNIMKFTEGAFKDWGYQLAREEFGGELIDGGPWLKVKNPNTGKEIVIKDVIADAFLQQILLRPAEYDVIACMNLNGDYISDALAAQVGGIGIAPGANIGDECALFEATHGTAPKYAGQDKVNPGSIILSAEMMLRHMGWTEAADLIVKGMEGAINAKTVTYDFERLMEG

SEQ ID NO: 674 - protein, 319 aa, Zea mays
  unsure (1)..(319): unsure at all Xaa locations
METVTVVVAPAPVAVNQQPPQHKLAELKPSSFAGVAKSSPATKAKPAKTKKLAGGCGGYVLEDVPHLTDYLPELKSYPNPLQDHPAYSVVKQYFVNPDDTVAKKIVVHKSGARGTHFRRAGPRQRVYFQPDEVTAAIVTCGGLCPGLNTVIRELVCGLHDMYGVATVYGIEGGYKGFYARNTVELTPRSVNDIHKRGGTVLGTSRGGQDTAKIVDSIQDRGVNQVYIIGGDGTQKGAASIHEEVQRRGLKCAVVGVPKTIDNXDIAVIDKSFGFTPPWXEXAQRAINAAHVEAESAENGXGFVKLMGRNSGFIXMYATL

SEQ ID NO: 675 - protein, 257 aa, Glycine max
MTMHRESWAFVFGVMGNIISFGVFLAPLPTFYQIYKKKSTEGFQSLPYVVALFSAMLWIYYAFVKREAALLLITINTFGIVVESIYLAIFLLYAPRKPRLTTIKLLLLLNVFGFGAMLLSTLYLSKGAKRLAIIGWICLVFNISVFAAPLFIIRRVIKTRSVEYMPFTLSMFLTINAVMWFFYGLLLRDYYVALPNTLGFVFGIIQMGMYLMYRNATPVALEEPVKAQELNGHIIDVGKMGTMEPNHAATAGAVGKV

SEQ ID NO: 676 - protein, 451 aa, Zea mays
MAEHKGNVLLHKYEMGKLLGQGTFAKVYHARNTATSESVAIKVIDKEKVMKVGLIDQIQREISVMKLVRHPNIVQLYEVMATKTKIYFVLEHVKGGELFNKIQRGRLKEDAARKYFQQLICAVDFCHSRGVYHRDLKPENLLLDENSNLKVSDFGLSALAECHRQDGLLHTTCGTPAYVAPEVINRKGYDGAKADIWSCGVILFVLLAGYLPFHDKNLMDMYKKIEKADFKCPSWFSTDVRRLLQRILDPNPSRRISVEKIMENPWFRKGLGAKLLRYDLQNKNAPHVDKKADFDSLSTNVTTESKQHEEKKPTNMNAFDIISLSTGLDLSGLFEESNKKRESKFTSTNTSSTIISKIEDIAKNLRLNLTKKDGGLLKMEASKPGRKGVMGIDAEVFEVSPNFHLVEIKKTNGDTLEYQKVLNQEMRPALKEIVWAWQGEQSKQKQEQQSC

SEQ ID NO: 677 - protein, 322 aa, Chloroflexus aurantiacus
MLGVRNGFQGLIDGDIHEMDWMSVSGWATMGGAELGTNRKVPQGSELYQIARNIERFGIDGILMIGGWTGYQAIYKLYSERHIFPAFNIPMICLPATIDNNLPGSELSLGADTALNSIVSAIDRIKQSAVASRRCFIVEVMGRDCGYLALMSGLATGAERVYLPEEGISLRKLQADLDEMMRWFRAGKRLSLIIRNEKANPIYTTSFICSLFEEEGGKLFEVRQAILGHLQQGGDPSPFDRIQATRLAVRCIEFLVEHADRREPIGAFIGYRGGKVQIHQLDDMPRLMDPVHARPREQWWMSLRQMTDLLTTPPSPTVESGK

SEQ ID NO: 678 - protein, 388 aa, Escherichia coli
  unsure (1)..(388): unsure at all Xaa locations
TLQNGKLNVPENPIIPYIEGDGIGVDVTPAMLKVVDAAVEKAYKGERKISWMEIYTGEKSTQVYGQDVWLPAETLDLIREYRVAIKGPLTTPVGGGIRSLNVALRQELDLYICLRPVRYYQGTPSPVKHPELTDMVIFRENSEDIYAGIEWKADSADAEKVIKFLREEMGVKKIRFPEHCGIGIKPCSEEGTKRLVRAAIEYAIAXDRDSVTLVHKGNIMKFTEGAFKDWGYXLAREEFGGELIDGGPWLKVKNPNTGKEIVIKDVIADAFLQQILLRPAEYDVIACMNLNGDYISDALAAQVGGIGIAPGANIGDECALFEATHGTAPKYAGQDKVNPGSIILSAEMMLRHMGWTEAADLIVKGMEGAINAKTVTYDFERLMEGAKL

SEQ ID NO: 679 - protein, 125 aa, Porphyromonas gingivalis W83
MADIKAIAEQLVNLTVKEVSELATILKEEYGIEPAAAAVAVAAAPGAAGAAAEEEKTSFDVVLKSAGAAKLQVVKAVKEQCGLGLKEAKDLVDAAPSTVKEGVDKATAEALKKALEEAGAEVELK

SEQ ID NO: 680 - protein, 418 aa, Burkholderia cepacia R18194
MPYQHIKVPEGGDKITVNKDFSLNVSDQPIIPYIEGDGTGFDITPVMIKVVDAAVAHAYKGKRKIHWMEIFAGEKATKVYGPDVWLPDETLQVLKEYVVSIKGPLTTPVGGGIRSLNVALRQELDLYVCLRPVQYFKGVPSPVREPQKIDMVIFRENSEDIYAGIEWAAGSEQAKKVIKFLQDEMGVKKIRFPETSGIGVKPVSTEGTERLVRKAIQYAIDNDRKSVTLVHKGNIMKFTEGLFRDAGYALAQKEFGGELIDGGPWMRVKNPKTGNEIVIKDSIADAFLQQILLRPAEYDVIATLNLNGDYISDALAAQVGGIGIAPGANLSDSVAMFEATHGTAPKYAGKDYVNPGSEILSAEMMLRHLGWTEAADTIIAAMEKSILQKRVTYDFARLMEGATQVSCSGFGEVLIENM

SEQ ID NO: 681 - protein, 497 aa, Ustilago maydis 521
MFKSFGKIMGGSSRKGKSKLQDGDDSVDASNGLPGSDSSNLLRAKSKDSLAVTENGSGNFANNGSSAPAKIEKRGGVSRHESPLPSPSPSARNVLEGQEESSEVGSSAVARSAPASDVGGPRPANDAASQSTSVPTANTILSNPLAQSGSTGFPSSVGKNAQAAAGGDQVRTFDIDDMISRLLEAGYSGKIPKPALKNAEITAVCQAAREIFLSQPTLIELSPPVKIVGDTHGQYHDLLRLFEMCGFPPSANYLFLGDYVDRGKQSLETILLLLCYKIKYPENFFLLRGNHECANVTRVYGFYDECKRRVNIKIWKTFIDVFNTLPIAAVVASKIFCVHGGLSPSLSNMDDIRRIERPTDVPDYGLLNDLLWSDPSDTALDWEDNERGVSYCFGKAVIQQFLAQYDFDLICRAHMVVEDGYEFWNERTLVTIFSAPNYCGEFDNFGAVMSVSEDLLCAFELLKPLDGAALKKEMAKNKRRSLLQHQSPPARGSQQSY

SEQ ID NO: 682 - protein, 494 aa, Pseudomonas putida
MSASSKFNVDPAGFRNRNLIGGQWKGSISGETITVENPATEEIIAHIPQGRHEDIDEAVRVARATFESPAWRKIRPIDRGRILENVARKIEEHADELAYLESLDTGKALTFAKAIDLPSTIDVFRYMGGWCSKLGGTTPPISFDGREYHTYTRREPIGVVGAITPWNYPLALGSWKIASALAAGCTMVLKPTELTPLSTLRLAELCLEAGLPEGALNIVNGHGHEAGEALARHPGVDKITFTGSTVVGKKIVEYALGNMKRVTLELGGKSPSIVFADADLDQVGLGAALAVFFNSGQICFAASRLFVQDSVYDQVVEAVAAAAAQFKVGNGLDPDTLLGPLVSRKQQERVMGYVQSGIEQGARLVCGGKSVGEKGYFLQPTVFADAAPSMRIAQEEIFGPVVSVIRFKDEAEAIRMANDTAYGLAANIWTRDIKKAHRVAHRLQAGSVWINCHGVIDPAAPFGGFKQSGWGREVSEEGLSAYTETKTVCALLDD

SEQ ID NO: 683 - protein, 498 aa, Glycine max
MDYLLLLPLITIVWISIHVLISSFKPLKSSKNPPGPHPFPIIGNILELGNQPHQALAKLSQIYGPIMSLKLGKTTTIVISSPQVAKEVLQKNDQILANRMVPDSVRALDHHILSVAWMPPLPQWRALRRACATKVFSSQQLNFTQVLRQRKMQDLMDYVKERCERGEAMDIGEASFTTVLNSISNTFFSMDLAYYTSDKSQEFKDIIWGIMEEAGRPNVVDFFPIFRLLDPQGARRRMSGYFRKLIAFFDGLVEERLRLRALENGSRECNDVLDSLLELMLEDNSQVTRPHVLHLFLDLFVAGIDTTSSTIEWVMAELLRNPEKLEKVRQELQQVLAKGEQLEESHISNLPYLQAVVKETFRLHPPTPMLLPHKSEVDIELCGFMVPKSAQILVNLWATGRDSSIWTNPDEFTPERFLESDIDFKGHDFELIPFGAGRRICPGLPLASRTLHVVLASLLYNYDWKLTDGQKPEDMDVSEKYGITLHKAQPLLVIPIQA

SEQ ID NO: 684 - protein, 323 aa, Rhodospirillum rubrum
MAPGANEVRIAIKSVGICGSDVHYFKHGRIGDFIVTEPMILGHEASGVVEEIGSAVTHLRVGDRVCMEPGVPDFSSIETLRGMYNLDPSVRFWATPPYHGCLTAEVVHPASLTYRLPDSVSFAEGAMVEPLAIGVYAAAKAQIRPGDIAVVTGAGTIGMMVVFAALAAGCAEVIVSDVAAEKLALLASHPEVTTVDLTRESLADAVAARTDGRGVDVFFEASGSTRPYETMIDLIGRGGRIVLVGMPQEKPQLDVVALQVKEISLTGTFRYANVWDRTLKLLGSGKIDLKPLISATFPFSDSVRAFDRAAQHLPSDVKIQISL

SEQ ID NO: 685 - protein, 163 aa, Glycine max
  unsure (1)..(163): unsure at all Xaa locations
HAGAGMGAPFTGLKSMVGFLTRKTNNDITFIDSNGGRMQCMQVWTRVGMKKLDTLSYLPDLDDAQWAKEVQYLLRKGWIPCLECKLXHGFVYREHNRSPGYYDGRYWIMWKLPMIGCTDASQVTKELQDAKTAYTNGLIPIFGFDNVRXVQSIIFVVYKPPSF

SEQ ID NO: 686 - protein, 91 aa, Brassica napus
  unsure (1)..(91): unsure at all Xaa locations
VDQEVXILMXKLNFXPXSVFPTDLQYVDFLDRVXKAELKLRSXNLWEVXHPWXNXFXPKSXISDFDKXVFKGXLXNXTSGPILXXPMNKDK

SEQ ID NO: 687 - protein, 480 aa, Arabidopsis thaliana
MVRRQEEEKKAEKGMRLGKYELGRTLGEGNFGKVKFAKDTVSGHSFAVKIIDKSRIADLNFSLQIKREIRTLKMLKHPHIVRLHEVLASKTKINMVMELVTGGELFDRIVSNGKLTETDGRKMFQQLIDGISYCHSKGVFHRDLKLENVLLDAKGHIKITDFGLSALPQHFRDDGLLHTTCGSPNYVAPEVLANRGYDGAASDIWSCGVILYVILTGCLPFDDRNLAVLYQKICKGDPPIPRWLSPGARTMIKRMLDPNPVTRITVVGIKASEWFKLEYIPSIPDDDDEEEVDTDDDAFSIQELGSEEGKGSDSPTIINAFQLIGMSSFLDLSGFFEQENVSERRIRFTSNSSAKDLLEKIETAVTEMGFSVQKKHAKLRVKQEERNQKGQVGLSVTAEVFEIKPSLNVVELRKSYGDSCLYRQVCHYCHFLIRLKKHISKIKMFMFDIGVGAVVRETIKRRGHILAGARDSNLGVGVFG

SEQ ID NO: 688 - protein, 282 aa, Lactobacillus plantarum WCFS1
MTVLTTMYQLANGVNIPKVAFGTWQIPGGEATYQAVRAALAAGYRHIDTALAYQNEASVGQAIRDSGIPREQIFVTTKLPAETKSYQGALNDFDRSLKNLGLDYVDLYLVHAPWPWGQVGRVYDEANLDVWQAMEAIYQSGRAKAIGVSNFAVRDLKNILNQATIPPMVNQIQYYLGFTEPKITKFSEEHAMLVEAYSPLATGGVLDNPQVQAYADKYGVSVAQLALRFVLQNGVLPLPKAVNPAHIEANTQLDFAISVADMQALNDLPDAAGSYMHNPTQG

SEQ ID NO: 689 - protein, 235 aa, Glycine max
MALFAAFSICKVAKDAAGVAGNVFAFGLFVSPIPTFRRIIRNGSTEMFSGLPYIYSLLNCLICMWYGTPLISADNLLVTTVNSIGAVFQFVYIIIFLMYAEKAKKVRMIGLSLAVLGIFAIILVGSLQIDDIIMRRFFVGFLSCASLISMFASPLFIIKLVIQTKSVEFMPFYLSLSTFLMSTSFLLYGLFNDDAFIYVPNGIGTILGMIQLILYFYFESKSRESSREPLIVSYA

SEQ ID NO: 690 - protein, 208 aa, Phanerochaete chrysosporium
GAGGETTAGTLTFVVYFLTQHPNVLQRLRQEILDVVGPSNLPTYDDIKQMKYLRAVLNETLRLYPPVPWNMRYAVKDGILPNSEPDGKPWFIPAGASVSYSVHCMHRRKDYWGPDAEEFDPDRFLDERLHKYLTPNPFIFLPFNAGPRICLGQQFAYNEMSFFLVKLLQTFEDISFERDAFEPNALPPAEWAKFPGRKGKEKFWPRHI

SEQ ID NO: 691 - protein, 318 aa, Triticum aestivum
  unsure (1)..(318): unsure at all Xaa locations
VRKATSGRSNPSGRRRGEGGTSRLACGRVRLSARHAETARAPMPPPRRAGAGDTSAFFAATLVLWAVSVGFEIGARGRRELAAVAAGFAFFQAANTAVRAAVSRDPLFVNTAVSLLHSSLTSASVIFVLLCQWRTKGLENMFQHEELVGSSWIGAYSALCFSCGYFAYEQLDMLRYRXLYSGWIPGILMHHLILLICFTLALYRNVTINYLILTLLCEMHSIFLHVRKLRRMAGFRDFNRKLVKLEWVLNWTTFVTARVICHILITYRLITDAHKFDKGIELPLALSGMAGMNVLNVSLGLDLFKAFARERNQQTHQD

SEQ ID NO: 692 - protein, 364 aa, Psychrobacter sp. 273-4
MSMMKSLIFIEPGKIEVAEKKIPDVGPNDALIKITTTTICGTDIHIFKGEYPVAKGLTIGHEPVGIIEKLGSAVMGYQEGQRVIAGAICPSFTSYASQDGFPSQDGGYIQPDGTCACHGYKATGGWRFGNIIDGTQAEYVLVPDAQANLAPVPDGLTDEQVLMCPDIMSTGFKGAENANIKIGDIVAIFAQGPIGLCATAGAKLRGASTIIAIDGNNERLAMSKKLGADITLNFKEVDVVDEIMKITGGRGVDSSIEALGLQSTFEQGIKVLKPGGTLSSLGVYSADLKIPMAYFASGLGDHTIRTALCPGGKERMRRLLNVVESGRVDFSEMVTHTYALDDIVEAYDLFMHQRDGVLKIAIKP

SEQ ID NO: 693 - protein, 243 aa, Zea mays
MFGYRKADPDLEAGGSSLLYPGMTESPELRWAFVRKIYAILTVQLAMTAAVSAFVVKVPAVSNFFVSSNAGIALYIFLIVLPFIVLCPLHYYHQKHPVNLLLLGLFTVAISFAVGMTCAFTSGKIILEAAILTAVVVNSLTAYTFWAAKRGHDFNFLGPFLIAAIMVLMVFSLIQIFFPLGKISVMIYGGLASLIFCGYIIYDTDNIIKRHTYDQYIWAAVSLYLDVINLFLSLLQLLRAADS

SEQ ID NO: 694 - protein, 117 aa, Bartonella sp. Cg2sk
WGPAHGGANEACLKMLQEIGSIERIPEFIARAKDKNDPFRLMGFGHRVYKNYDPRAKIMQKTCHEVLKELNIQDDPLLDIAIELEKIALSDEYFIEKKLYPNVDFYSGITLKALGFP

SEQ ID NO: 695 - protein, 502 aa, Agrobacterium tumefaciens
MKENQLVLVRRHILEIEMQNKVQFITYVDRLTRGGFRQLKELVDGKFAGLFGGVHVLPFFNPIDGADAGFDPTDHTIVDPRLGDWEDVRALSGSVEIMADLIVNHVSSQSGAFTDFIAKGSASEFADMFMTFEKVFPDGATEEDLLRIYRPRPGLPFSKVTLADGTQRMLWTTFTPEQIDIDVHSAKGTTYLETILDRFSEANVTAIRLDAAGYAIKKAGSSCFMIDDTYAFLEEVAGKARNRGMEVLVEIHSYHRDQIEIAKKVDRVYDFALPPLILHALFTGDATPLAKWLAISPRNAITVLDTHDGIGVIDVGARSDGRAGLLEPQAIDNLVEEIHRRSDGQSRQATGAAASNLDLYQVNCTYYDALGRNDNDYLIARAIQFFAPGIPQVYYVGLLGGVNDMDLLAKTGVGRDINRHYYGNDEIGTALETPLFHRLSNLIRFRNTHPAFGGALKATIADAGALVLSWQHGDAFAELKISFADRKASIAASGQSEMQIVE

SEQ ID NO: 696 - protein, 315 aa, Burkholderia fungorum LB400
MKYKDYYEILGLERSASQDDIKRSYRKLARKYHPDVSKHADAEERFKELGEAYEVLKDPEKRAAYDRMGSDWRNGQDFQPPPNWDEGFEFSGAGSGPGEQADFHDIFEKMFGGARGAHPHARQRSFDARGEDHHAKVLIDLEDAYRGAQRAISLQMPVVDAQGHVSLETRTLNVTIPKGIRAGQHLRLSGQGAAGATPETAGDLYLEIAFRDHPRFQVDGRDVSLELPVAPWEAALGAKVTVPTPDGSVEMTVPAGSASGRRLRLKGKGIPANPPGDLYVILNIVLPPADTESAKAAYDAMRQAFNFDPRAHFYR

SEQ ID NO: 697 - protein, 113 aa, Bartonella sp. Cg3sk
AHGGANEACLKMLQEIGSVKRIPEFIARAKDKNDPFRLMGFGHRVYKNYDPRAKIMQKTCHEVLKELNIQDDPLLDIAIELEKIALNDEYFVEKKLYPNVDFYSGITLKALGF

SEQ ID NO: 698 - protein, 250 aa, Physcomitrella patens
MAKSYPNVSEKYAALIEKARRKIRGMVAEKNCAPIILRLAWHGSGTYDQESKTGGPLGTIRFGQELAHGANAGLDIAVNLLQPIKEQFPELSYADFYTLAGVVAVEVTGGPTIPFHPGRKDHETCPVEGRLPDATKGLDHLRCVFTKQMGLTDKDIVVLSGAHTLGRCHKDRSGFEGAWTPNPLRFDNSYFQVLLEGEKDGLIMLPSDKALLDEPKTRELVELYAKDEDKFFEDYAESHMKLSELGFAEA

SEQ ID NO: 699 - protein, 120 aa, Bartonella sp. Sf2sk
HGGANEACLKMLQEIGSVKRIPEFIARAKDKNDPFRLMGFGHRVYKNYDPRAKIMQQTCHEVLKELNIQDDPLLDIAIELENIALNDEYFVEKRLYPNVDFYSGITLKALGFPTEMFTVP

SEQ ID NO: 700 - protein, 389 aa, Escherichia coli
TLQNGKLNVPENPIIPYIEGDGIGVDVTPAMLKVVDAAVEKAYKGERKISWMEIYTGEKSTQVYGQDVWLPAETLDLIREYRVAIKGPLTTPVGGGIRSLNVALRQELDLYICLRPVRYYQGTPSPVKHPELTDMVIFRENSEDIYAGIEWKADSADAEKVIKFLREEMGVKKIRFPEHCGIGIKPCSEEGTKRLVRAAIEYAIANDRDSVTLVHKGNIMKFTEGAFKDWGYQLAREEFGGELIDGGPWLKVKNPNTGKEIVIKDVIADAFLPQILLRPAEYDVIACMNLNGDYIYDALAAQVGGIGIGPGANIGEECSLFEATHGAAPKYAGQDKVNPGSIILSAEMMMRHMGWTEAADLIVKGMEGAINAKTVTYDFERLMEGAKLL

SEQ ID NO: 701 - protein, 226 aa, ASPERGILLUS NIDULANS FGSC A4
MNREEMIWEWFSADPERLRLSSSFMEADRGSRPSWVEWCSLPGQLAKVFDGGVEDDFMVDVAGGRGHDLKSFTDKFPDVKGQFILEDLGHVLEQSVDGLRAKKIAFDLFKEQPFKGAYVYYLKFILHDWSDGQCHRILTHIREAMRPESKLIIEEFILPEKDCPMLSAMWDWEMMVFCNSFERSESHWRKVLSKAGFQAKFYYPPGDGQVRFLQSKGTFSVLTILE

SEQ ID NO: 702 - protein, 500 aa, Euphorbia lagascae
MEQKNLSFPSILISFLLVLILVVVMRLWKKQNPPPGPWKFPIIGNLPHLLLTSDLGHERFRALAQIYGPVMSLQIGQVSAVVISSAEAAKEVMKTQADAFAQRPIVLDAQIVFYNRKDVLFASYGDHWRQMKKIWILEFLSAKKVQSSRLIREEEMEDAITFLRSKAGSPVNITKIIYGIIISIMIRTSVGNCKQKERLLSVADAVNEAATSFGTADAFPTWKLLHYIIGAESKPRRLHQEIDDILEEILNEHKANKPFEADNLMDVLLNLQKNGNVPVPVTNESIKASVLQMFTAGSETTSKATEWVMAELMKNPTELRKAQEEVRQVFGEMGKVDESRFHDLKFFKLVVKETLRLHPPVVLIPRECRETTRIDGYEIHPNTRIVVNAWAIGRDPNTWSEPGKFNPERFKDCAIDYKGTTFELVPFGAGKRICPGITSAITNLEYVIINLLYHFNWELADGITPQTLDMTEAIGGALRKKIDLKLIPIPYQVSLGSNIS

SEQ ID NO: 703 - protein, 180 aa, Rubrivivax gelatinosus PM1
MRRLAIAALLCIVGSGAQAACPPLLDRSFPRLQDEKPQNLCQYAGKVVVVVNTASYCGFTSQYKGLEALHARYQSRGLVVLGFPSNDFGSQEPGSNQDIAAFCENTFGVRFPMFAKSSVKGSARNPLYADLAQRTGKTPAWNFHKYLIGRDGQVVLSFSSQTDPQDPVFVQEIEKLVDSQ

SEQ ID NO: 704 - protein, 493 aa, Pneumocystis carinii
  unsure (1)..(493): unsure at all Xaa locations
CTTKHTGTSASTPIAAGIIALILSKRSDLTWRDVQALIVYTAVPFNLNYHEWDQLPSGRYYNNFFGFGKLDAYAMVQQAKTFQKLNPQTIFSTQLIQVNKKFSENNGHITSTFYIHRDYPTHYKFKNLEYICVSFCYKHQYRGHLEFSITSPANVTSQLAHRRPRDKHSGIVYWTFMSVKHWGEKIVGNWTIDVEDKKDQNLDGEVFDWQLHFFGESSESEGVPPPSYPFLSRYPTTTPPPDPDATSPPDPDANLPPDSNADPQPPSEPAPPSEPESQPSSEPGSQPPSKPGPQPPSDPQPPSDLKPPSKPDARPRPPSDPSSQQDPDTSLSSNPTSTSSSEPPPPSPPPPPPPPPAPAPAPAPPRPELEPEPEPGPEPVPQPPQPQPPQPQPEPPAXPPKPQPPPPSPPEQKPTSITSSTSTTSSSKTKISTTRKASSTKASSTTKTSTRPSPTEGTFTGSSASHLSFFEKRHLLLQMILLLFFFLFLGYSF

SEQ ID NO: 705 - protein, 388 aa, Escherichia coli
TLQNGKLNVPENPIIPYIEGDGIGVDVTPAMLKVVDAAVEKAYKGERKISWMEIYTGEKSTQVYGQDVWLPAETLDLIREYRVAIKGPLTTPVGGGIRSLNVALRQELDLYICLRPVRYYQGTPSPVKHPELTDMVIFRENSEDIYAGIEWKADSADAEKVIKFLREEMGVKKIRFPEHCGIGIKPCSEEGTKRLVRAAIEYAIANDRDSVTLVHKGNIMKFTEGAFKDWGYQLAREEFGGELIDGGPWLKVKNPNTGKEIVIKDVIADAFLQQILLRPAEYDVIACMNLNGDYISDALAAQVGGIGIAPGANIGDECALFEATHGTAPKYAGQDKVNPGSIILSAEMMLRHMGWTEAADLIVKGMEGAINAKTVTYDFERLMEGAKL

SEQ ID NO: 706 - protein, 412 aa, Arabidopsis thaliana
MGLFGTKKIGKYEIGRTIGEGNFAKVKLGYDTTNGTYVAVKIIDKALVIQKGLESQVKREIRTMKLLNHPNIVQIHEVIGTKTKICIVMEYVSGGQLSDRLGRQKMKESDARKLFQQLIDAVDYCHNRGVYHRDLKPQNLLLDSKGNLKVSDFGLSAVPKSGDMLSTACGSPCYIAPELIMNKGYSGAAVDVWSCGVILFELLAGYPPFDDHTLPVLYKKILRADYTFPPGFTGEQKRLIFNILDPNPLSRITLAEIIIKDSWFKIGYTPVYHQLSDSIKDNVAEINAATASSNFINAFQIIAMSSDLDLSGLFEENDDKRYKTRIGSKNTAQETIKKIEAAATYVSLSVERIKHFKPKEIRSRSSYDLLSAEVIEVTPTNCVIEISKSAGELRLYMEFCQSLSSLLTAEVS

SEQ ID NO: 707 - protein, 356 aa, Lycopersicon esculentum
MDGKENNGVNGSNKVGIPKCCLKARVFDPELEANCHSTVVSGWFSQPPTSFDGKEKVLYFNNPMWPGEAHSLKVEKVLFKGKSEFQEVLVFESASYGKVLVLDGIVQLTEKDECAYQEMIAHLPLCSIKSPKKVLVVGGGDGGVLREISRHSSVELIDICEIDKMVIDVSKKYFPDLAIGFEDPRVNLHVGDAVEFLKNTPEGKYDAIIVDSSDPVGPAIELVEGPFFAKIARALRPGGVLCNMAESMWLHTHLIQDMISICRETFSSVHYAWASVPTYPSGVIGFLLCSTEGPFVDFKHPVNPIEKLEGALQHQRELKFYNSEMHEAAFALPCFLRREVSGLRDSPRSAGSGVKI

SEQ ID NO: 708 - protein, 221 aa, Glycine max
  unsure (1)..(221): unsure at all Xaa locations
MLSISATRIFFLRSTTIRLSSSSSSLQFFSNPNRTLFRPFLHTSFKPLPSSFSFRTDHTMATSNAKSVHDFTVKDAKGNDINLGDYKGKVLIIVNVASQCGLTNSNYTELSQLYEKYKQKGLEILAFPCKQFGAQAPGSNEQIQEFVCTRFKAEFPXFDKVDVNGDKAAXLYKYLKSSKGGLFGEGIKWNFSKFLVDKEGNVVDRYAPTTSPLSIEVRQLV

SEQ ID NO: 709 - protein, 341 aa, Chloroflexus aurantiacus
MRGTALYGPYDVRSEYVPDPTIIEPTDAIIRLSATCICGSDLWPYRGVDPITRPVPMGHEYVGIVEEVGSAVKIIKPGQFVVGSFFASDNTCPICQAGYQTSCVNRQPGAPTGAQAEYARIPLADGTLVPTPDLPPADLIPDLLAASDVLGTGWFAAVAAEVGPGKTVAVVGDGAVGLLAVLSARQMGAERIILIGSRHPQRQALAQEFGATDVIEARGDEAIEMLKELTDGLGVHSTIEAVGTQESMMQAIRATRPGGHVGVVGVLHDVAIPGREFFFSHVHLHGGPAPVRRFLPELINLIWQRVIKPGKVFDLTLPLEQVAEGYRAMDERRAIKVLLKP

SEQ ID NO: 710 - protein, 589 aa, Zea mays
  unsure (1)..(589): unsure at all Xaa locations
MCGILAVLGCSDWSQAKRARILACSRRLKHRGPDWSGLYQHEGNFLAQQRLAVVSPLSGDQPLFNEDRTVVVVANGEIYNHKNVRKQFTGTHNFSTGSGCEVIMPLYEKYGENFVDMLDGVFAFVLYDTRDRTYVAARDAIGVNPLYIGWGSDGSVWIASEMKALNEDCVRFXSSPPGHLYSSAGGGFRRWYTPHWFQEQVPRTPYQPLVLREAFEKAVIKRLMTDVPFGVLLSGGLDSSLVASVTKRHLVETEAAEKFGTELHSFVVGLEGSPDLKAAREVADYLGTIHHEFHFTVQDGIDAIEEVIYHDETYDVTTIRASTPMFLMARKIKSLGVKMVLSGEGSDELLGGYLYFHFAPNKEEFHRETCRKVKALHQYDCLRANKATSAWGLEVRVPFLDKEFINVAMGMDPEWKMYDKNLGRIEKWVMRKAFDDDEHPYLPKHILYRQKEQFSDGVGYNWIDGLKSFTEQQVTDEMMNNAAQMFPYNTPVNKEAYYYRMIFERLFPQDSARETVPWGPSIACSTPAAIEWVEQWKASNDPSGRFISSHDSAATDHTXAVSRRWPTAAATXAANGTVNGKDVAVAIAV

SEQ ID NO: 711 - protein, 426 aa, Caulobacter crescentus CB15
MTDKATLTIGDKSYELPILKGSTGPDVIDVRKIYGESDHFTFDPGFTSTASCESKITYIDGDAGILLHRGYPIDQLAEKSSFLEVCYLLLNGELPKADEFAKFEHNITYHTMLHAQFDRFFEGFRRDAHPMAVMTGAVGALSAFYSDSINVDDAREREISAHRLIAKMPTIAARAYKYTVGQPFVSPRNDLSYSENFLRMCFAVPAEDWKPNPVLTRAMDRIFILHADHEQNASTSTVRLAGSSGAHPFACIAAGIACLWGPSHGGANQEALEMLETIGSVDNIKDYVQGVKDRKYKLMGFGHRVYKNFDPRAKVMQKTAHEVLAELGHNNDPLLQVAQELEKVALNDPYFVDRKLYPNIDFYSGITLRAMGFPTNMFTVLFALARTVGWISQWKEMFEDPTRKIGRPRQLYTGATHRDYVTLDKR

SEQ ID NO: 712 - protein, 286 aa, Buchnera aphidicola str. APS (Acyrthosiphon pisum)
MDHKKTWHEKLYCHLGQYFLIEKMLYKKKTPHHQVMIFKNSVFGKIMVIDDIVQTTERDEFIYHEMLTHVPIIAHGSIKSVLIIGGGDGGILREVCRYKMIENITMVEIDVNIIDLCKKYFPNHSNQAYQDSRLNLIIDDGLNFIKRTKEKFDLIISDSTDPIGCGKNLFRSEFYFNCKNHLEENGIFVAQNGVFFLQKNETILTYKNLKKYFYDTRFYQANVPTYYGGVMVFAWGTNNIEYRKNSLEKIQIRIKNTKLDFNYYNAKIHISSFYLPQYILNELNES

SEQ ID NO: 713 - protein, 187 aa, Agrobacterium tumefaciens str. C58
MSQESSRRASARRESPSSPRTWAGWIPVTGTGMRECVVALCLLLTLIFAAASPALAFNPDEVLKDPVLEQRARNLTSQLRCMVCQNQSIDDSNAELARDLRVLVRERLVQGDSDKAVIDYVVSRYGEFVLLKPRLSLRTLLLWGAPIGLTLAGIFAVFVFSRRRATQERPQKLSADEEERIRNLIEK

SEQ ID NO: 714 - protein, 342 aa, Coxiella burnetii RSA 493
MKVLSKLKPAPGLWLHKAPTPKPGRDEVLIKIKKTAICGTDLHIYKWDEWAQKTIPVPMHVGHEFVGEIVEVGEAASALAVGDRVSGEGHITCGDCRNCRAGKRHLCRYTVGVGVNRPGAFAEYLVIPAKNAYKIPAKISDDIAAILDPFGNAAHSALEFDLVGEDVLITGAGPVGLMSAAIARHVGARHVVITDVNDYRLALAEKVGVTAAVNSTKTPLTETMKNLGMTEGFDVGLEMSGNAEAFRSMLTVMNNGGKIAFLGIPPEPFAIDWNQVVFKSLLIKGIYGRRMFETWYKMTNLLLSGLDISPIITHEFPMKDFQQAFDVMLSGKTGKVILNWEQ

SEQ ID NO: 715 - protein, 346 aa, Escherichia coli K12
MKSVVNDTDGIVRVAESVIPEIKHQDEVRVKIASSGLCGSDLPRIFKNGAHYYPITLGHEFSGYIDAVGSGVDDLHPGDAVACVPLLPCFTCPECLKGFYSQCAKYDFIGSRRDGGFAEYIVVKRKNVFALPTDMPIEDGAFIEPITVGLHAFHLAQGCENKNVIIIGAGTIGLLAIQCAVALGAKSVTAIDISSEKLALAKSFGAMQTFNSSEMSAPQMQSVLRELRFNQLILETAGVPQTVELAVEIAGPHAQLALVGTLHQDLHLTSATFGKILRKELTVIGSWMNYSSPWPGQEWETASRLLTERKLSLEPLIAHRGSFESFAQAVRDIARNAMPGKVLLIP

SEQ ID NO: 716 - protein, 209 aa, Triticum aestivum
  unsure (1)..(209): unsure at all Xaa locations
MAPTVMASSATSVAPFQGLKSTAGLPVSRRSNGASLGSVSNGGRIRCMQVWPIEGIKKFETLSYLPPLSTEALLKQVDYLIRSKWVPCLEFXSKVGFIFREHNASPGXYYDGRYWXTMWKLPMFGCTDATQVINEVEEVKKEYLTRIPHIGFDNMXQVQCVSSSPNGLQGSGRLNSNHTGILSAMRLEPMLWFPPLPLVSRKVHVSHMK

SEQ ID NO: 717 - protein, 254 aa, Triticum aestivum
  unsure (1)..(254): unsure at all Xaa locations
MAKTYPVVSAEYQEAVEKARQKLRALIAEKNCSPLMLRLAWHSAGTFDVSSKTGGPFGTMKKPAEQAHAANAGLDIAVRMLEPIKEEIPTISYADLYQLXAGVVAVEVSGGPVIPFHPGREDKPQPPPEGRLPDATRGXLDHLRAVFXASRWGLSDQDIVALSGGHTLXGRCHKERSGFEGPWTRNPLKFDNSYFTELLSGDKEGLLQLPSDKTLLTDPVFRPLVEKYAADEKAFFEDYKEAHLRLSELGYAEA

SEQ ID NO: 718 - protein, 351 aa, Staphylococcus aureus subsp. aureus COL
MKALVKTREGHGNLELLDKEVATPLDDKVKIKVHYAGICGTDIHTYEGHYKVNFPVTLGHEFSGEIVEVGADVKDFKVGDRVTSETTFYVCNECEYCKSKDYNLCNHRKGIGTQVDGAFTNYVIAREESLHHIPDEVSYQSAAMTEPLACAHHGVSKIQVNSGDVAVVMGPGPIGLLVAQVLKSKGATVVVTGLDNDKVRLDKAEALHMDYVVNLQQTDLKTYINGITDGYGADVVVECSGAVPAARQGLDILRKKGFYSQIGIFKDAEIPFDMEKVIQKEITVVGSRSQKPADWEPSLQLMADGLVNAEALVTKIYDISKWDEAYQHLKSGEGIKVLLKPLDLDENEGEN

SEQ ID NO: 719 - protein, 355 aa, Arabidopsis halleri subsp. halleri
ISYLTYDRADMAFAHYGPFWRQMRKVCVMKVFSRKRAESWASVRDEVDKMVRSVSCNVGKPINVGEQIFALTRNITYRAAFGSACEKGQDEFIRILQEFSKLFGAFNVADFIPYFGWIDPQGINKRLVKARNDLDGFIDDIIDEHMKKKENQNAVDDGDVVDTDMVDDLLGFYSEEAKLVSEAADLQNSIKLTRDNIKAIIMDVMFGGTETVASAIEWALTELLRSPEDLKRVQQELAEVVGLDRRVEESDIEKLTYLKCTLKETLRMHPPIPLLLHETAEDTSIDGFFIPKKSRVMINAFAIGRDPTSWADPDTFRPSRFLEPGVPDFKGSNFEFIPFGSGRRSCPGMQLGLYA

SEQ ID NO: 720 - protein, 430 aa, Mycobacterium leprae TN
MSVLLRGVRLYGEGEQVDVLVEGEQIANIGAGIDIPDTADVIDAIDQVLLPGLVDLHTHLREPGREYAEDIETGSAAAALGGYTAVFAMPNTTPVADSPVVTDHVWRRGQQVGLVDVHPVGAVTVGLAGAELTEMGMMAAGAAQVRIFSDDGNCVHNPLVMRRALEYATGLGVLIAQHAEEPRLTVGAVAHEGPTAARLGLSGWPRAAEESIVARDALLARDAGARVHICHASTAGTVEILKWAKEQGISITAEVTPHHLLLDDSRLASYDGVNRVNPPLRETADAVALRQALADGIIDCVTTDHAPHADHEKCVEFSAARPGMLGLQTALSVVVHTMVVPGLLSWRDVAQVMSENPARIAGLPDHGRPLEVGEPANLTVVDPDVTWTVTGDGLASRSANTPYEAMTLPATVTATLLRGKVTARGQKSPV

SEQ ID NO: 721 - protein, 127 aa, Brassica napus
  unsure (1)..(127): unsure at all Xaa locations
LKIADFGWSXHTFNXXRTMCGTLDXLPPEMVESVEHDASVDIWSLGIXCYEFLYGVPPFEAMEHXDTYRRIVQVDLKFPPKPIVSASAKDXISQMLVKEXAQRLPLHKLXEHPWIVQNADPXGIYRG

SEQ ID NO: 722 - protein, 373 aa, Picrophilus torridus DSM 9790
MSISLGLEDVFIKYTSLTSIDGEKGELRYRGYDIKDLVEHCSFEEVAYLMFYGELPKRDELEHFKSNVMKNYKIPENVKNIIKNMPRDGDALAIMEAAFAALSTEEYTWEKERDREKAAEIMGRALGIVSAVFRYRDGREIKDPENKGYAEAFLNACFDSGIDEDKIKAMNAALILYIDHEVPASTTAALVASSTLSDMYSCVTAAIAALKGPLHGGAAEAAYKQFLAIKSPENVDSWFNENILNNKKRLMGFGHRVYKTYDPRMLIFKELARKNAKTDEQKKILELAERLEALGVKNFGQKKIFPNTDYYSGIVFNEIGFPLYMFTTLFALSRVVGWVAHISEYVESEERLIRPRAIYIGPEKRDVVPIDKR

SEQ ID NO: 723 - protein, 314 aa, Pueraria montana var. lobata
MAAIEIPTIVFPNSFAQHRVPVVEMGSAPDFTCKKDTKEAIIEAVKQGYRHFDTAAAYGSEQALGEALKEAVDLGLVSRQDLFVTSKLWVTDNHPHLVVSALRKSLKTLQLEYLDLYLIHWPLSSQPGKFSFPIEVEDLLPFDVKGVWEAMQECQKLGLTKAIGVSNFSVKKLQNLLSVATIRPVVNQVEMNLAWQQKKLREFCKENGIVITAFSPLRKGASRGPNEVMENDVLKEIADAHGKSIAQVSLRWLYEQGVTFVPKSYDKERMNQNLQIFDWALTQEDHHKISQISQSRLISGPTKPQLSDLWDDEI

SEQ ID NO: 724 - protein, 113 aa, Bartonella sp. Sf3sk
HGGANEACLKMLQEIGSVKRIPEFIARAKDKNDPFRLMGFGHRVYKNYDPRAKIMQQTCHEVLKELNIQDDPLLDIAIELENIALNDEYFVEKRLYPNVDFYSGITLKALGFP

SEQ ID NO: 725 - protein, 275 aa, Oceanobacillus iheyensis HTE831
MIKGLQDTFTLNNGVEMPGFGLGVYKVEDGSVAEESVRIALENGYRSIDTASFYDNEKGVGEGIKNSGVPREDIFLTSKVWNDEQGYTSTKQAFQRSLDKLGTDYLDLYLIHWPVKDTFVETWRAMEELYRDGKVKAIGVSNFHVQHLEKLFVNAEVIPAVNQVEFHPHLTQEGLRAFCRQHNIQLEAWSPLKRGQLLEEDIIQTIAKKYGKSAAQVILRWDVQHEVITIPKSITKERIIANADIFDFSLTEEEMNQIDAMNQNDRSGSNPDSFD

SEQ ID NO: 726 - protein, 497 aa, Zea mays
  unsure (1)..(497): unsure at all Xaa locations
CAETWREAAAQLGWPCCCSCSRPSQCSSHPPWPTTCSPWTSTPRRARSWTASCAPPCRPPSGGRSRSPRASSASSSTTASRRAATRPCSSRATPRSRPWGPTPRCSRGRCSSSTTSAPRCTPPAGPPCPAPTSRRSPPAPPSSRRGDPPTPCPWASATASPRRPRTTSTRSRRPPPPASRSSWRRSGAGASATWPQPLVSRLATTEFIPLPPPSPPIGRTHRASSGADRVSSTAVKAYPTVNEDYLKAVDKAKRKLRGLIAEKNCAPXSWLRLAWHSAGTFDVATKTGGPFGXTMKNPAEQAHGANAGLQIAIRRPXKEQFPILSSAECXHLPGFAAVAATRWTGRSWPVEVTRRAPDVPFHPGQXRTKPEPPPEGRLPDATQGSDHLRQVFSTQMGLSDQDIVALSGGHTLGRCHKDRSGFEGAWTSNPLIFDNSYFKELLSGEKEGLLQLPSDKALLSDPSFRPLVDKYAADEDAFFADYAEAHLKLSELGFAEA

SEQ ID NO: 727 - protein, 415 aa, Zea mays
MVSDGARGLLGAYELGRTLGEGNFGKVKQARHRGSGGQFAVKIMERARVLSQRADEQICREIATLKLLAHPNVVRLHEVAASKTKIYMVLELVNGGELLDRIQAASEGKLPEQEARRLFQQLVDGVSYCHEKGVCHRDLKLENVLVDRKGNIKISDFGLSALPQHLGNDGLLHTTCGSPNYIAPEVLQNRGYDGSLSDIWSCGVILYVMLVGHLPFDDRNIVVLYQKIFKGDAQIPEWLSPGARNLLRRILEPYPAERIAMAEIKAHPWFQEHYVPVLPPYDDDDDSVKQIGAGSKTTHHINAFQLIGMASSLDLSGFFEEEDVSQRKIRFTSAQPPEDLFAEIERSATDMGFHVHRGHSKLRLTRNCDRSKNQKNPMSSSSSSFLVCTEVFELSPSLYVVELNKSHGDPALYRQ

SEQ ID NO: 728 - protein, 112 aa, Bartonella sp. Cg1sk
AHGGANEACLKMLQEIGSVKRIPEFIARAKDKNDPFRLMGFGHRVYKNYDPRAKIMQKTCHEVLKELNIQDDPLLDIAIELEKIALNDEYFVEKKLYPNVDFYSGITLKALG

SEQ ID NO: 729 - protein, 132 aa, Glycine max
  unsure (1)..(132): unsure at all Xaa locations
EEVFSIVGRDPLIEVAVXALEKVALSDEYFIKRKLYPNVDFYSGLIYRAMGFPPEYFTVLFAIPRMAGYLAHWRESLDDPDTKILRPQQVYVGEWLRHYTQVNVRTTSSDADKLGEVAISNASKRRLAGSGV

SEQ ID NO: 730 - protein, 225 aa, Glycine max
MIISKLLLLLHQTFCKMSIAEEESPSVMPKVITFLCSLLERVAESNDHNQHLQQHQKISVFHGLTRPNISIQCYLERIFKYANCSPSCFVVAYVYLDRFTQRQPSLPINTFNVHRLLITSVMVAAKFMDDMYYNNAYYAKVGGITKVEMNFLELDFLFGLGFHLNVTPGTFQAYCVHLQREMLLIQPLNFSDSTLNLGQSLKAHLCFNEDECSHQKQKQQQQLAV

SEQ ID NO: 731 - protein, 146 aa, Arabidopsis thaliana
MDPMDIVGKSKEDASLPKDVRVARDAQDLLIECCVEFINLVSSESNDVCNKEDKRTIAPEHVLKALQVLGFGEYIEEVYAAYEQHKYETMQDTQRSVKWNPGAQMTEEEAAAEQQRMFAEARARMNGGVSVPQPEHPETDQRSPQS

SEQ ID NO: 732 - protein, 364 aa, Populus balsamifera subsp. trichocarpa X Populus deltoides
MGSTGETQMTPTQVSDEEAHLFAMQLASASVLPMILKTAIELDLLEIMAKAGPGAFLSTSEIASHLPTKNPDAPVMLDRILRLLASYSILICSLKDHPDGKVERLYGLAPVCKFLTKNEDGVSVSPLCLMNQDKVLMESWYYLKDAILDGGIPFNKAYGMTAFEYHGTDPRFNKVFNKGMSDHSTITMKKILETYKGFEGLTSLVDVGGGTGAVVNTIVSKYPSIKGINFDLPHVIEDAPSYPGVEHVGGDMFVSVPKADAVFMKWICHDWSDAHCLKFLKNCYDALPENGKVILVECILPVAPDTSLATKGVVHIDVIMLAHNPGGKERTEKEFEGLAKGAGFQGFEVMCCAFNTHVIELRKN

SEQ ID NO: 733 - protein, 314 aa, Helianthus annuus
MALGFSDRNTEMSPYSQQSNTSAVPMDSSKKRKTRSRKEAPEKVAATLAKWIEYNKANEDGKAKTRKAPAKGSKKGCMKGKGGPENSRTNFRGVRQRTWGKWVAEIREPNRGRRLWLGTFGSAVEAALAYDEAARAMYGTSARLNLPNCRSKNDILPLLVTNPASSCDSTTTCSYSEVDATHDSKPGPAVFPSVKHEESVQVKHEPEIVAKEEHCVDNNDLGFDIGDEMFDLEELLGAVEDSNPEAGSGDGYDGRFVNGADANENMQMYMQPDPCVSGQDYSFDFLQPGRPEDCSFTLEELGLGLDAELDLYSN

SEQ ID NO: 734 - protein, 512 aa, Salmonella enterica subsp. enterica serovar Typhi Ty2
MTNNPPSTRIQPSEYGYPLKLKARYDNFIGGDWVAPADGEYYQNLTPVTGQPLCEVASSGKKDIDLALDAAHKAKDKWAHTSVQDRAAILFKIADRMEQNLELLATAETWDNGKPIRETSAADIPLAIDHFRYFASCIRAQEGGISEVDSETVAYHFHEPLGVVGQIIPWNFPLLMASWKMAPALAAGNCVVLKPARLTPLSVLLLMEVIGDLLPPGVVNVVNGAGGEIGEYLATSKRIAKVAFTGSTEVGQQIMQYATQNIIPVTLELGGKSPNIFFADVMDEEDAFFDKALEGFALFAFNQGEVCTCPSRALVQESIYERFMERAIRRVESIRSGNPLDSGTQMGAQVSHGQLETILNYIDIGKKEGADILTGGRRKELDGELKEGYYLEPTILFGKNNMRVFQEEIFGPVLAVTTFKTMEKALEIANDTQYGLGAGVWSRNGNLAYKMGRGIQAGRVWTNCYHAYPAHAAFGGYKQSGIGRETHKMMLEHYQQTKCLLVSYSDKPLGLF

SEQ ID NO: 735 - protein, 150 aa, Glycine max
  unsure (1)..(150): unsure at all Xaa locations
KSKASFPTRRHNNDIHSIASNVERVQSMQAWPPDGRQKCETLSYLPDIDHAQLATEVEYLFRKGCIPCMEFELEHGFVHREHDRSAGSFDGGSWTTCKMPTFGCTEASQVFKEXLYRVRXACPYGFIRIIGIVNVRRVQGIGFFADKPTG

SEQ ID NO: 736 - protein, 200 aa, Glycine max
  unsure (1)..(200): unsure at all Xaa locations
MSKTTTSSSEQTARNRLATLAAHLLPSDAASATAILRPHRLSAPAGSSPPVNLKGTVTVVDERTGKKYQIEVTPDGTVRASDFKKISTGKNDKGLKLYDPGYLNTAPVISRISYIDGDAGILRYRGYPIEDLAEKSSFMEVSYLXDMIQSMPHDAHPXGMLVNAMSALSVYHPEANPALKGLDIYNSKQVRNKQVARGIG

SEQ ID NO: 737 - protein, 416 aa, Zea mays
  unsure (1)..(416): unsure at all Xaa locations
VCLRLKILDRQRILAMKIHERIKREIATQGLGQYXDLALLVQVSASKTKIYMVLEYVNGGELFDKIALKGKLTEKEGRKLFQQLIDAVGYCHEKGVYHRDLKPENVLVDAKGNIKVSDFGLSALPQNQQKDGLLHTTCGSPNYIAPEVLLNKGYDGSISDVWSCGVILYVMLTGNLPFDDQNVVVLYQKILKGNAHIPKWLSQGAQDILRKILDPNPVTRIDVDGIRAHDWFKQGYAPAMPFSDDEEDISMDEDSLNITEHNDIQDKIAINQINAFQLIGMSSCLDLSGFFEKEDVSERKIRFASNYSPAYLFEKIESIVRKMGFQVHKSNGKLKVIQDCKGLANSRGQESLLISAEVFEINESLYVVELKKSSGDCSLYRKLCETLSEDLGTCKSQQFLKQDSIRQDIGRYNSSF

SEQ ID NO: 738 - protein, 461 aa, Mesorhizobium loti MAFF303099
MSKTQTADQITEARRESHLFYLSSLRRPLIDRAEGIYMWTQDGRRFIDGSSGPMVANIGHSNRNVLDAMKRQMDRATFAYRLHFENEPAEELARELAKKLPEGMDRIFFVSGGSEATESCIKLARQWAVATGQASRWKVITRFPSYHGGTLGSLSITGDDALAETFEPMMRVMPTVPAPTAWRDRDNLSMEQRGVRYADMLEEKILAEGPESVVAFIMEPIGGAATAALVAPDSYYARTREICDHYGILLIHDEVMCGAGRTGKFLGGDHWNCKPDIVALSKGLGSGYAPLGALAAPMRLVQPLLASGGFQHGHTYAGNPLACAAGLAVLGEMDRLDLIANAAAMGDVLMDGLKGLAKRFPFIADVRGKGLLTGAEMVADPETLRPIEQGKKATQRLLDLAYERGLIIYGRRVKGGVDGDNFMVAPPMIVTSEQVGEIISIIGDSLEVLASELDLPVEGRG

SEQ ID NO: 739 - protein, 670 aa, Zea mays
MDGRRTILMGRYEIGKQLGQGTFAKVFYARNLTTGLAVAIKMINKDKVMKVGLMEQIKREISIMRLVKHPNILQLYEVMASKSKIYFVLEYAKGGELFNKIAKGGKLSEDAARKYFQQLVSAVDFCHSRGVYHRDLKPENLLLDENENLKVSDFGLSALAESKRQDGLLHTTCGTPAYVAPEVLSRKGYDGAKSDELAKRLKLRVKKKENGTLKLAAPKEGKKGALSPLPLVAGVEAELHPVSVGHKSMDAEMKQPLEGSMSLNIDSEGEPHIGNGSIVVENPASDLVKSESDRIKTFYQTVLSAIMVFVTAALSSYKDMKPLYSTTSHGKAHLSNLLVDEGLFIFMTFLCAMVLMMSEFVVHQHGRRGHVWCWVRTILVAVTGVMLIVADTILLIVTNRSNMLLSVLLVPEVLLFGVAVSVGAWMQESLPSSELGSRYDSAMKGTFDIATVGTIVSFTLQGGIVFGYLKTPDSNQVKHDPPLDLAACYATSTLSLTGMTMCAMPLAYLPNGMLEVLVRVVERLRSAVLAALAMMALVVSVEFLDGFVVVSFFPDAVTIALYYVVKLFSACQPREEISQLDFTFRIVAAAGFTLMTGLYAAFTGTDHYGFNLKTAMFILLLAVVSSLSRLAIPLHMPEAGVGGVIEFGIVSIALSFPLLALLAAIPLVFK

SEQ ID NO: 740 - protein, 347 aa, Staphylococcus aureus subsp. aureus COL
MKALKLYGVEDLRYEDNEKPVIESANDVIIKVRATGICGSDTSRYKKMGPYIKGMPFGHEFSGVVDAIGSDVTHVNVGDKVTGCPAIPCYQCEYCLKGEYARCEKLFVIGSYEPGSFAEYVKLPAQNVLKVPDNVDYIEAAMVEPSAVVAHGFYKSNIQPGMTVAVMGCGSIGLLAIQWARIFGAAHIIAIDIDAHKLDIATSLGAHQTINSKEENLEKFIENHYANQIDLAIESSGAKVTIGQILTLPKKGGEVVLLGIPYDDIEIDRVHFEKILRNELTVCGSWNCLSSNFPGKEWTATLHYMKTKDINVKPIISHFLPLEKGPETFDKLVNKKERFDKVMFTIY

SEQ ID NO: 741 - protein, 355 aa, Arabidopsis lyrata subsp. petraea
ISYLTYDRADMAFAHYGPFWRQMRKVCVMKVFSRKRAESWASVRDEVDKMVRSVSCNVGKPINVGEHIFALTRNITYRAAFGSACEKGQDEFIRILQEFSKLFGAFNVADFIPYFGWIDPQGINKRLVKARNDLDGFIDDIIDEHIKKKENQNAVDDGDVVDTDMVDDLLAFYSEEAKLVSEAADLQNSIKLTRDNIKAIIMDVMFGGTETVASAIEWALTELLRSPDDLKRVQQELAEVVGLDRRVEEADIEKLTYLKCTLKETLRMHPPIPLLLHETAEDTSIDGFFIPKKSRVMINAFAIGRDPTSWADPDTFRPSRFLEPGVPDFKGSNFEFIPFGSGRRSCPGMQLGLYA

SEQ ID NO: 742 - protein, 489 aa, Arabidopsis thaliana
MAEKITRETSLPKERSSPQALILGRYEMGKLLGHGTFAKVYLARNVKTNESVAIKVIDKEKVLKGGLIAHIKREISILRRVRHPNIVQLFEVMATKAKIYFVMEYVRGGELFNKVAKGRLKEEVARKYFQQLISAVTFCHARGVYHRDLKPENLLLDENGNLKVSDFGLSAVSDQIRQDGLFHTFCGTPAYVAPEVLARKGYDAAKVDIWSCGVILFVLMAGYLPFHDRNVMAMYKKIYRGEFRCPRWFSTELTRLLSKLLETNPEKRFTFPEIMENSWFKKGFKHIKFYVEDDKLCNVVDDDELESDSVESDRDSAASESEIEYLEPRRRVGGLPRPASLNAFDIISFSQGFDLSGLFDDDGEGSRFVSGAPVSKIISKLEEIAKVVSFTVRKKDCRVSLEGSRQGVKGPLTIAAEIFELTPSLVVVEVKKKGGDKTEYEDFCNNELKPKLQNLTADDVVAEPVAVSAVDETAIPNSPTISFLPSDTE

SEQ ID NO: 743 - protein, 166 aa, Brassica napus
MDPMDIVGKSKEDASLPKATMTKIIKEMLPADVRVARDAQDLLIECCVEFINLISSESNEVCNKEDKRTIAPEHVLKALQVLGFGEYVEEVYAAYEQHRYETMQDSQRSVKMNSGAEMTEEEAAAEQQRMFAEARARMNGGGGGVSVPQPDPEQQVDTQQQSNLQS

SEQ ID NO: 744 - protein, 355 aa, Arabidopsis lyrata subsp. petraea
ISYLTYDRADMAFAHYGPFWRQMRKVCVMKVFSRKRAESWASVRDEVDKMVRSVSCNIGKPINVGEHIFALTRNITYRAAFGSACEKGQDEFIRILQEFSKLFGAFNVADFIPYFGWIDPQGINKRLVKARNDLDGFIDDIIDEHMKKKENQNAVDDGDVVDTDMVDDLLAFYSEEAKLVSEAADLQNSIKLTRDNIKAIIMDVMFGGTETVASAIEWALTELLRSPEDLKRVQQELAEVVGLDRRVEEADIEKLTYLKCTLKETLRMHPPIPLLLHETAEDTSIDGFFIPKKSRVMINAFAIGRDPTSWADPDTFRPSRFLEPGVPDFKGSNFEFIPFGSGRRSCPGMQLGLYA

SEQ ID NO: 745 - protein, 355 aa, Arabidopsis lyrata subsp. petraea
ISYLTYDRADMAFAHYGPFWRQMRKVCVMKVFSRKRAESWASVRDEVDQMVRSVSCNVGKPINVGEHIFALTRNITYRAAFGSACEKGQDEFIRILQEFSKLFGAFNVADFIPYFGWIDPQGINKRLVKARNDLDGFIDDIIDEHMKKKENQNAVDDGDVVDTDMVDDLLAFYSEEAKLVSEAADLQNSIKLTRDNIKAIIMDVMFGGTETVASAIEWALTELLRSPEDLKRVQQELAEVVGLDRRVEEADIEKLTYLKCTLKETLRMHPPIPLLLHETAEDTSIDGFFIPKKSRVMINAFAIGRDPTSWADPDTFRPSRFLEPGVPDFKGSNFEFIPFGSGRRSCPGMQLGLYA

SEQ ID NO: 746 - protein, 219 aa, Zea mays
GSRVCRWKRDDGGHGDLLQGTTTKCTACDKTVYLVDKLTADNRIYHKACFRCHHCKGTLKLANYNSFEGVLYCRPHFDQLFKRTGSLDKSFEGTPKVVKPERNVGNENATKVSSAFAGTREKCVGCSKTVYPTERVTVNNTMYHKSCFKCCHGGCTISPSNYIAHEGKLYCKHHHGITDHRGSALLQASLRPALQEDRELGQELPRNPKGWQARKKRWE

SEQ ID NO: 747 - protein, 209 aa, Brassica napus
MGDSDRDSGGGQTGNNQNGQSSLSPREQERFLPIANVSRIMKKALPANAKISKDAKETMQECVSEFISFVTGEASDKCQKEKRKTINGDDLLWAMTTLGFEDYVEPLKVYLQRFREIEGERTGLGRPQTGGEAGEHQRDGGVGDGGGGYYGGGMGMQYQQHHQFLHQQNHMYGSTGGWWRRPQWRKELKRFGEVDLLYIEIHIYSSKVF

SEQ ID NO: 748 - protein, 324 aa, Ralstonia eutropha JMP134
MIGVAAHFRTPAKVPMSQSPSHRPPAAPPATGNEQARVAEFSVASGEREISVCVCYPPGYPAPATESGALLPWLVYLHAGGFVDGGLERAKEVVQMLAASVPAVVVTPAYSLAPDHPFPAAPEDAYNTVEWVLRYARRLKVDKARFALVGEEAGGNLAIALSQMLRDRCAPQPSGQWLIRPVTDPCLQHASCTGAGRGAVPLETLQRLACNYRDYLPTPAASVHPYAAPALASRLAGLPPTLVQVAEVDALRAEGEAFAGRLAKAGVPAEAMIMPGACGDGVEDTHDDCQSWVDEGARFLRRCLAGADDTSSRRESRSGMKPAG

SEQ ID NO: 749 - protein, 422 aa, Pseudomonas fluorescens PfO-1
MEFSMGYKKIQVPAVGDKITVNADHSLNVPDNPIIPFIEGDGIGVDVSPVMIKVVDAAVEKAYGGKRKISWMEVYAGEKATQVYDQDTWLPQETLDAVKDYVVSIKGPLTTPVGGGIRSLNVALRQQLDLYVCLRPVVWFEGVPSPVKKPGDVDMVIFRENSEDIYAGIEWKAGSPEATKVIKFLKEEMGVTKIRFDQDCGIGIKPVSKEGTKRLVRKALQYVVDNDRKSLTIVHKGNIMKFTEGAFKDWGYEVAKEEFGAELLDGGPWMKFKNPKTGREVVVKDAIADAMLQQILLRPAEYDVIATLNLNGDYLSDALAAEVGGIGIAPGANLSDTVAMFEATHGTAPKYAGKDQVNPGSVILSAEMMLRHLGWTEAADLIIKGTNGAIKAKTVTYDFERLMEGATLVSSSGFGEALIKHM

SEQ ID NO: 750 - protein, 138 aa, Mycobacterium avium
MVLMRTDPFRDLDRWTQQVLGTRRPAVMPMDAWRDGDQFVVEFDLPGVNADSLDLDVERNVLTVRAERPDLDQNREMVSAERPRGVFSRQLFLGDNLDTDKIEANYHDGVLRLTIPVAEKAKPRRIEINHNHRTAINA

SEQ ID NO: 751 - protein, 57 aa, Glycine max
MAGDGAATCIDILLAIILPPLGVFLKYGCQVEFWICLVLTLFGYIPGIIYAVYSITK

SEQ ID NO: 752 - protein, 499 aa, Nostoc punctiforme PCC 73102
MSETPLLDQIIKNVRVVRPHEDVIELLDLGIKDGKFAQIASNISPDTGKQVFDGKNLLGFPGVVDAHMHVGIYRPLDKDALTESKAAATGGVTTSLNYIRTGQYYLNKGGSYRDFLPEVLALSAGNFFVDYAYHIAPIASQHIDEIPLLFEEHGISSFKIFMFYGGYGLHGLSDQQNLFLMINKEERYDFAHFEFIMRGLTRLMEKHPEARDSISLSLHCEVAEILNAYTKIVENDSSLSGLHAYSAARPPHSEGLAICIASYLANETNCANINLLHLSSRKAMEAALTMQTAFPHINFRREVTVGHLLLDVDTPNGIWAKVNPPIRPRADVEYLWQAVLNNQVDWIVSDHACCSAEQKRSAKDPNNIWLAKSGFGGTEYLLSGVFSEGSKRGMSYNQMAKLLSWNPSRRFGLLKKGDIAIGYDADLVLVDPNETFVVCAAKSESQQGYTPFEGVELSGRVKNTFLRGNLIYNNGQVLGSPIGRYLKRHSSNPHGNLTA

SEQ ID NO: 753 - protein, 118 aa, Sorghum bicolor
MARLAVAIAVVAAVVVVLAATTSEAAISCGQVSSAIALCLSYARGQGFAPSAGCCSGVRSLNSAARTTADRRAACNCLKNAARGISGLNAGNAASIPSKCGVSVPYTISTSTDCSRVS

SEQ ID NO: 754 - protein, 389 aa, Escherichia coli
TLQNGKLNVPENPIIPYIEGDGIGVDVTPAMLKVVDAAVEKAYKGERKISWMEIYTGEKSTQVYGQDVWLPAETLDLIREYRVAIKGPLTTPVGGGIRSLNVALRQELDLYICLRPVRYYQGTPSPVKHPELTDMVIFRENSEDIYAGIEWKADSADAEKVIKFLREEMGVKKIRFPEHCGIGIKPCSEEGTKRLVRAAIEYAIANDRDSVTLVHKGNIMKFTEGAFKDWGYHLAREEFGGELIDGGPWLKVKNPNTGKEIVIKDVIADAFLQQILLRPAEYDVIACMNLNGDYISDALAAQVGGIGIAPGANIGDECALFEATHGTAPKYAGQDKVNPGSIILSAEMMLRHMGWTEAADLIVKGMEGAINAKTVTYDFERLMEGAKLL

SEQ ID NO: 755 - protein, 122 aa, Sorghum bicolor
MARSMKLAVAIAVVAAAAAVVLAATTSEAAVTCGQVSSAIGPCLSYARGQGSGPSAGCCSGVRSLNSAARTTADRRAACNCLKNAARGIRGLNVGKAASIPSKCGVSIPYTISTSTDCSRVS

SEQ ID NO: 756 - protein, 389 aa, Escherichia coli
TLQNGKLNVPENPIIPYIEGDGIGVDVTPAMLKVVDAAVEKAYKGERKISWMEIYTGEKSTQVYGQDVWLPAETLDLIREYRVAIKGPLTTPVGGGIRSLNVALRQELDLYICLRPVRYYQGTPSPVKHPELTDMVIFRENSEDIYAGIEWKADSADAEKVIKFLREEMGVKKIRFPEHCGIGIKPCSEEGTKRLVRAAIEYAIANDRDSVTLVHKGNIMKFTEGAFKDWGYQLAREEFGGELIDGGPWMKVKNPNTGKEIVIKDVIADAFLQQILLRPAEYDVIACMNLNGDYISDALAAQVGGIGIAPGANIGDECALFEATHGTAPKYAGQDKVNPGSIILSAEMMLRHMGWTEAADLIVKGMEGAINAKTVTYDFERLMDGAKLL

SEQ ID NO: 757 - protein, 283 aa, Tropheryma whipplei str. Twist
MVVFVLTYVPSVLLGDGVSIPQFGLGTYELPPNEASSVVQSAIELGYRHIDTASLYANEREVGRAIASSGIKREEFFVTTKLWNSDQPKPREAFERSLDLLSLDYVDLYLIHWPCPPSELYINVWEVLLELKESGRAKSVGVSNFLSEHIDKIKEAGFPLPSVNQIELHPWLQQRELVLSCRNDGIQIESWGPFARFSKDLDAFPELTRPAKQYGKTPAQVILRWHIQKGYVVFPKTVHAERLRQNIDIFDFDLTPDEISGIDSLDAGFRTGPDPSSFRAGLD

SEQ ID NO: 758 - protein, 364 aa, Ustilago maydis 521
MASSNPQTVPCAYKTGRTLGQGTYAVVKEAVHIKTGQYYACKVISKKLMEGREHMVRNEIQALKRVSQGHRSIVTLVDYFETMNNLYLVTDLCVGGELFDRICERGNYYEKDAAHIVRTIVDAVVYLHDQGIVHRDLKPENLLFRDKTEESDLLIADFGLSRVVDDEKITVLSTTCGTPGYMAPEIFKKTGHGKPVDMWAIGVITYFLLCGYTPFDRDTTMEEMQAIINADYRFEPTQYWEDVSEDAKDFINKLLTIDPAKRLSAKEALQHRWLQEAAPTEGGAQPVASAEQKDLLPDIKSAFNAKRTFRKAVNGIRLINRLRTNEQQPNKEEIEKLRQTIREAEDESSNLDQVLLAQETRAAN

SEQ ID NO: 759 - protein, 389 aa, Escherichia coli
TLQNGKLNVPENPIIPYIEGDGIGVDVTPAMLKVVDAAVEKAYKGERKISWMEIYTGEKSTQVYGQDVWLPAETLDLIREYRVAIKGPLTTPVGGGIRSLNVALRQELDLYICLRPVRYYQGTPSPVKHPELTDMVIFRENSEDIYAGIEWKADSADAEKVIKFLREEMGVKKIRFPEHCGIGIKPCSEEGTKRLVRAAIEYAIANDRDSVTLVHKGNIMKFTEGAFKDWGYQLAREEFGGELIDGGPWMKVKNPNTGKEIVIKDVIADAFLQQILLRPAEYDVIACMNLNGDYISDALAAQVGGIGIAPGANIGDECALFEATHGTAPKYAGQDKVNPGSIILSAEMMLRHMGWTEAADLIVKGMEGAINAKTVTYDFERLMEGAKLL

SEQ ID NO: 760 - protein, 437 aa, Oryza sativa (japonica cultivar-group)
MGDHQMMHAAPAAMYNGGGGTTSSHGVWWSNAVGVPAAATCSTTTELAGYTAWSSALAAGYDGMVADNGGKQAKSTTTASSESPGNNSSVTFQEPASIPDPAAVAAVPQPGLAGFTDWTQPFMNNGAGLHEFLQDGHHDMSASSLMNHSSNNLALQQAGHHHELLSSFGSDLLLSPTSPYGGFQSSLLRSLMEPTAKQQQQQPALAGLQQYHQYQQQMGHAPAAAAKFAQAVGARDSLQFTNDAPFWNPSAGFGMPAAVAVAAAAAQDQASVRSAKRSSPAPPRAAATLALKTAMEGVGDSSSVITKKETAFKKPRLETPSPLPTFKVRKEKLGDRITALQQLVSPFGKTDTASVLHETIEYIKFLHDQVGALSAPYLKNGAHQVPHLKNSSPDKSKHGEISLKGRGLCLVPISSTFAVASEVPVELWTPFGANFIR

SEQ ID NO: 761 - protein, 389 aa, Escherichia coli
TLQNGKLNVPENPIIPYFEGDGIGVDVTPAMLKVVDAAVEKAYKGERKISWMEIYTGEKSTQVYGQDVWLPAETLDLIREYRVAIKGPLTTPVGGGIRSLNVALRQELDLYICLRPVRYYQGTPSPVKHPELTDMVIFRENSEDIYAGIEWKADSADAEKVIKFLREEMGVKKIRFPEHCGIGIKPCSEEGTKRLVRAAIEYAIANDRDSVTLVHKGNIMKFTEGAFKDWGYQLAREEFGGELIDGGPWLKVKNPNTGKEIVIKDVIADAFLQQILLRPAEYDVIACMNLNGDYISDALAAQVGGIGIAPGANIGDECALFEATHGTAPKYAGQDKVNPGSIILSAEMMLRHMGWTEAADLIVKGMEGTINAKTVTYDFERLMEGAKVL

SEQ ID NO: 762 - protein, 324 aa, Neurospora crassa
MSNSLEQLKATGTVVVCDSGDFATMAKYKPQDATTNPSLILAASKKPEYGALLDAAIADAKKGPGSPEEKVDAALDYLLVQFGKKILEIVPGKVSTEVDAALSFDTKASVDKALHIIKLYEAEGISKDRILIKIASTWEGIKAAEILQRDHGINCNLTLMFSLTQAIAAAEAGAFLISPFVGRILDWFKAHTGKNYSKEEDPGVASVKTIFNYYKKFGYKTIVMGASFRNIGEITELAGCDYLTISPNLLEELLNSDAPVPQKLNAADAASLSIEKKTYINSEPTFRFDFNEDQMAVEKLREGISKFAADAVTLKEIIKQKLAE

SEQ ID NO: 763 - protein, 105 aa, Oryza sativa (japonica cultivar-group); identical to SEQ ID NO: 364

SEQ ID NO: 764 - protein, 452 aa, Triticum aestivum
  unsure (1)..(452): unsure at all Xaa locations
MQLEVMANRGKILMERYELGRLLGKGTFGKVHYARSLESNRSVAIKMLDKEKVLKVGLSEQIRREVTTMRLVAHKNIVQLHEVMATRNKIYFVMEYVKGGELFDMVAKSGKLTEGAAHKYFQQLISAVDYCHSRGVYHRDLKLENLLLDENENLKVSDFGLSALSESKRQDGLLHTTCGSPAYVAPEVISKGGYDGAKSDIWSCGVILFVLVAGYLPFQGQNLIEMYRKIEKGDFKCPGWVSQKLQKLLYKIMDPDPNKRISIQKIKESTWFRKGPGENLTAKERLPSENATTDAVPTLGVRRRKNSHEDGKPLAVTNLNAFEIISFSTGFDLSGLFVEKESKKEARFTSEQPASAIVSKLEAVAKTLNLRVRKKDNGVVKMQVRKEGRNGVLQFDSEIFEISPSYHLIEMKQTSGDSLEYQKLLEESIRPALKDICLXAWHGADGQQEPQG

SEQ ID NO: 765 - protein, 597 aa, Zea mays
  unsure (1)..(597): unsure at all Xaa locations
MCGILAVLGCSDWSQAKRARILACSRRLKHRGPDWXSGLYQHEGNFLAQQRLAVVSPLSGDQPLFNEDRTVVVVANGEIYNHKNVRKQFTGTHNFSTGSDCEVIIPLYEKYGENFVDMLDGVFAFVLYDTRDRTYVAARDAIGVNPLYIGLGAVDGSVWIASEMKALNEDCVRFEIFPAGATSTPAAGGGFRXRWYTPXWFQEQVPXTPYQAXLVLREAFEKAVIKRLMTDVXPFGVLXLSGGLDSSLVASVTKRHLVETEAAEKFGTELHSFVVGLEGSPDLKAAREVADYLGTIHHEFHFTVQDGIDAIEEVIYHDETYDVTTIRASTPMFLMARKIKSLGVKMVLSGEGSDELLGGYLYFHFAPNKEEFHRETCRKVKALHQYDCLRANKATSAWGLEVRVPFLDKEFINVAMGMDPEWKMYDKNLGRIEKWVMRKAFDDDEHPYLPKHILYRQKEQFSDGVGYNWIDGLKSFTEQQVTDEMMNNAAQMFPYNTPVNKEAYYYRMIFERLFPQDSARADGCRGRPSIACSTPAAIEWVEQWKASNDPSGRFISSHDSAATDHTXRVSRRWPTAAATAPXNGTVNGKDVAVAIAV

SEQ ID NO: 766 - protein, 158 aa, Staphylococcus epidermidis ATCC 12228
MESIYDFVVQKNNGESYKLEQYKGDVMLIVNTASECGFTPQFEGLQKLYDEYKDQRFIILGFPCNQFGGQEPGSGEEAAQNCKINYGVTFPIHEKVDVKGDNQHPLFHFLTNAAKGMINEKIKWNFTKFLIDREGNVIKRFSPQKKPEQIKTEIEKLL

SEQ ID NO: 767 - protein, 373 aa, Bacillus cereus ATCC 14579
MMKAEEKFSPGLDGIVAAETKISFLDTVKGEIVIQGYDLIELSKTKEYLDIVHLLLEEHLPNEDEKVTLEKKLKEEYAVPEGVFNVLKALPKETHPMDGLRTGVSALAGYDNDIENRSLEVNKSRGYKLLSKVPNIVANSYHILNNEEPIEPLKELSYSANFFYMLTGKKPTELEEKIFDRSLVLYSEHEMPNSTFTARVIASTQSDLYGALTGAVASLKGSLHGGANEAVMYMLLEAGNVEKFEELLQKKLYNKEKIMGFGHRVYMKKMDPRALMMKEALKQLCDVKGDYTLYEMCEAGEKIMEKEKGIYPNLDYYAAPVYWMLGIPIQLYTPIFFSSRTVGLCAHVIEQHANNRLFRPRVNYIGERHVLSK

SEQ ID NO: 768 - protein, 452 aa, Staphylococcus aureus subsp. aureus MSSA476
MNYTQQLKQKDSEYVWHPFTQMGVYSKEETIIIEKGKGSYLYDTNGNKYLDGYASLWVNVHGHNNKYLNKVIKKQLNKIAHSTLLGSSNIPSIELAEKLIEITPSNLRKVFYSDTGSASVEIAIKMAYQYWKNIDREKYAKKNKFITLNHGYHGDTIGAVSVGGIKTFHKIFKDLIFENIQVESPSFYRSNYDTENEMMTAILTNIEQILIERNDEIAGFILEPLIQGATGLFVHPKGFLKEVEKLCKKYDVLLICDEVAVGFGRTGKMFACNHEDVQPDIMCLGKAITGGYLPLAATLTSQKIYNAFLSDSHGVNTFFHGHTYTGNQIVCTVALENIRLYEKRKLLSHIETTSSTLEKQLHALKRHRNVGDVRGRGLMFGVELVTDKDSKTPLEIEKVERIVRKCKENGLMIRNLENVITFVPVLSMSNKEVKTMVRIFKKAVHNILDRKC

SEQ ID NO: 769 - protein, 114 aa, Zea mays
  unsure (1)..(114): unsure at all Xaa locations
MPALAVDAATPVAHAFASCDAARFPAPPVVGPAAAAEAAPWSADLSAALYNVDGWGAPYFFVNDDGDVAVRPHGAATLPGQEIDLAKVVAKAAGPRAGGGLGLPLPLLVRFXDV

SEQ ID NO: 770 - protein, 355 aa, Arabidopsis lyrata subsp. petraea
ISYLTYDRADMAFAHYGPFWRQMRKVCVMKVFSRKRAESWASVRDEVDKMVRSVSCNVGKPINVGEHIFALTRNITYRAAFGSACEKGQDEFIRILQEFSKLFGAFNVADFIPYFGWIDPQGINKRLVKARNDLDGFIDDIIDEHMKKKENQNAVDDGDVVDTDMVDDLLAFYSEEAKLVSEAADLQNSIKLTRDNIKAIIMDVMFGGTETVASAIEWALTELLRSPEDLKRVQQELAEVVGLDRRVEEADIEKLTYLKCTLKETLRMHPPIPLLLHETAEDTSIDGFFIPKKSRVMINAFAIGRDPTSWADPDTFRPSRFLEPGVPDFKGSNFEFIPFGSGRRSCPGMQLGLYA

SEQ ID NO: 771 - protein, 351 aa, Arabidopsis lyrata subsp. petraea
ISYLTYDRADMAFAHYGPFWRQMRKVCVMKVFSRKRAESWASVRDEVDKMVRSVSCNVGKPINVGEHIFALTRNITYRAAFGSACEKGQDEFIRILQEFSKLFGAFNVADLIPYFGWIDPQGINKRLVKARNDLDGFIDDIIDEHMKKKENQNAVDDGDVVDTDMVDDLLAFYSEEAKLVSEAADLQNSIKLTRDNIKAIIMDVMFGGTETVASAIEWALTELLRSPEDLKRVQQELAEVVGLDRRVEEADIEKLTYLKCTLKETLRMHPPIPLLLHETAEDTSIDGFFIPKKSRVMINAFAIGRDPTSWADPDTFRPSRFLEPGVPDFKGSNFEFIPFGSGRRSCPGMQL

SEQ ID NO: 772 - protein, 351 aa, Arabidopsis lyrata subsp. petraea
ISYLTYDRADMAFAHYGPFWRQMRKVCVMKVFSRKRAESWASVRDEVDKMVRSVSCNVGKPINVGEHIFALTRNITYRAAFGSACEKGQDEFIRILQEFSKLFGAFNVADFIPYFGWIDPQGINKRLVKARNDLDGFIDDIIDEHMKKKENQNAVDDGDVVDTDMVDDLLAFYSEEAKLVSEAADLQNSIKLTRDNIKAIIMDVMFGGTETVASAIEWALTELLRSPEDLKRVQQELAEVVGLDRRVEEADIEKLTYLKCTLKETLRMHPPIPLLLHETAEDTSIDGFFIPKKSRVMINAFAIGRDPTSWADPDTFRPSRFLEPGVPDFKGSNFEFIPFGSGRRSCPGMQL

SEQ ID NO: 773 - protein, 329 aa, Saccharomyces cerevisiae
MRSIKCVIIGDGAVGKTSLLISYTTNSFPTDYVPTVFDNYSTTIAIPNGTASSPLELDNGNDKRGSLSSASSSPSTDRKLYKINLWDTAGQEDYDRLRPLCYPQTDIFLICFSVSEHASFANVTEKWLPELKQTSNIEGTSLYTKLGKYPILLVGTKSDLRDDPATQKKLQEANSDYVSQEEIDELVQRCGFMGYTECSAATQAGVREVFEQAVRYAIYEPESPNQKSANHTLTDELTTATTNTNGDKNIREQKQQPHHNNSTDSTLPKGSLQQEKEALNIKPTKKGQKDKIHEQSKSKGSKIASNNIITTSKLNQRRETTRRKRSQSV

SEQ ID NO: 774 - protein, 142 aa, Brassica napus
RGGPRRPEKEEKLLLVNFFFSSAVVVTARVKATMGVPLTAWKSSFAFPVTRRATTAIPSIVGTGGGVNCLQVWPPIGKKKFGTFFYFPDLTEVEWGKEVDYFFRTRWIPGVEFKLEHGFVARGHGSTPGYYDGRYWPMWKLP

SEQ ID NO: 775 - protein, 275 aa, Agrobacterium tumefaciens str. C58
MYDVSANGANIPALGFGTFRIPEDDVRRILPEALKLGFRHVDTAQIYKNEGAVGEVIAQSGISRHDIFLTTKVWVDRYRHDDFLASVDESLAKLKTDYFDLLLLHWPKSDVPLAERMGALNAVRKAGKARNIGISNFNVALTEEAVKLSDTPLATNQIEYHPYLDQTKVISAARKHGMSVTAYYLMADGKVPNDPVLKDIGAKHGKTAAQVTLRWAVQQPDIVALSKTATESRLKENFDIFDFALSEEEMQAIHALAKPNGRIVSPGHLAPDWDD

SEQ ID NO: 776 - protein, 476 aa, Comamonas testosteroni
MSTVLYRCPELLIGGEWRPGRHEQRLVVRNPATGEPLDELRLASADDLQLALQTTQQAFEHWRQVPAHERCARLERGVARLRENTERIAHLLTLEQGKTLAEARMECAMAADLIKWYAEEARRVYGRVIPARLPNSRMEVFKFPVGPVAAFSPWNFPLVLSARKLGGAIAAGCSIVLKAAEETPASVAAMVDCLNQELPPGVVQLLYGVPAEVSQALIASPVVRKVTFTGSVPVGRHLAELSARHLKRITLELGGHAPVIVCGDADIARTVNLMVQHKFRNAGQACLAPTRFFVDRRIYGDFVDAFGATQALRVGAGMAAETQMGPVASARRQAAVQDLIARSVAAGARPVASAVPEAGYFVAPTLLADVPLDAPVMSEEPFGPVACAVPFDSLDQAIAQANHNPYGLAGYLFTDSAKAILAVSERLEVGSLAVNGMGVSVPEAPFGGVKDSGYGSESGTEGMEAFLDTKFMHYVA

SEQ ID NO: 777 - protein, 192 aa, Rubrobacter xylanophilus DSM 9941
MRFNQRERGFTLWFTGLSGAGKTTIAEIVEKELRERGRRVEVLDGDIVRTNLSKGLGFSREDRITNVLRIGFVANLLTRNGVAVIVSAISPYKEARDQVRRRIIDFIEVYVDAPLEVCAERDVKGLYKKAFEGEIQNFTGVSDPYEPPVAPELHIRTDQETPQESARRVIERLEYLGYLWDPEEAEDYHWSR

SEQ ID NO: 778 - protein, 392 aa, Pseudomonas fluorescens PfO-1
MGAEKLWNLVTQGAKPSFRPEKDFVNCMGALTGGQAVQQVKAGIQAIYLSGWQVAADNNSAESMYPDQSLYPVDSVPTVVKRINNSFRRADQIQWKAGKNPGDEGYIDYFAPIVADAEAGFGGVLNAYELMKSMIEAGAAGVHFEDQLASVKKCGHMGGKVLVPTQEAVQKLTAARLAADVAGVPTIILARTDANAADLLTSDCDPYDQPFVTGTRTQEGFYKVRAGLDQAIARGLAYAPYADLIWCETAKPDLDEARRFAEAIKKEYPDQILSYNCSPSFNWKKNLDDATIAKFQRELSAMGYKHQFITLAGIHNMWHSMFNLAHDYARNDMTAYVKLQEQEFADAAKGYTFVAHQQEVGTGYFDDMTTVIQGGTSSVTALTGSTEEEQFH

SEQ ID NO: 779 - protein, 351 aa, Arabidopsis lyrata subsp. petraea
ISYLTYDRADMAFAHYGPFWRQMRKVCVMKVFSRKRAESWASVRDEVDKMVRSVSCNVGKPINVGEHIFALTRNITYRAAFGSACEKGQDEFIRILQEFSKLFGAFNVADFIPYFGWIDPQGINKRLVKARNDLDGFIDDIIDEHMKKKENQNAVDDGDVVDTDMVDDLLAFYSEEAKLVSEAADLQNSIKLTRDNIKAIIMDVMFGGTETVASAIEWALTELLRSPDDLKRVQQELAEVVGLDRRVEEADIEKLTYLKCTLKETLRMHPPIPLLLHETAEDTSIDGFFIPKKSRVMINAFAIGRDPTSWADPDTFRPSRFLEPGVPDFKGSNFEFIPFGSGRRSCPGMQL

SEQ ID NO: 780 - protein, 455 aa, Zea mays
  unsure (1)..(455): unsure at all Xaa locations
MTVEAPHSLSLIHIHPRVLAHSNSGGEMRRQIPPVSCLVPIAVAFALLAAASAASPAPVNVTGVLSAFPDLNDFTRLLASSPVLAELXAGRSSLTLLAVPNGNLPQSPSXAFAAASGADLADVLRYHVLLEYLSHADLRRLPASGKLVTTLFQTTGRATADLGAVNVTTAGASRLTVIRSPAPFPGSNATVLGAITAVPYNLSVLAVSGLIAPSGFDLAASESQPPAAVNITRVLADARAFNVAASMLEASGVAAEFEDDERGAGITVFAPTDDAFAGLPAGDRLQSLPADRKAVVLRFHVLHSYYPLGSLESIVNPVQPTLATEFSNAGRFTLNITRANGSVAIDTGVVQATITRTVFDQNPVAVFAVSKVLLPKEMFTRTAAASIVATTASASSPPPAATAPEASESARTPPTKLSSPPALRGGGQDYATAPAPARGIEWWCIALVYLLPHLV

SEQ ID NO: 781 - protein, 496 aa, Nicotiana tabacum
MVLSKTASESDVSVHSTFASRYVRTSLPRFKMPENSIPKEAAYQIINDELMLDGNPRLNLASFVTTWMEPECNTLMMDSINKNYVDMDEYPVTTELQNRCVNMIAHLFNAPLGDGETAVGVGTVGSSEAIMLAGLAFKRKWQNKMKAQGKPFDKPNIVTGANVQVCWEKFARYFEVELKEVKLSDGYYVMDPEKAVEMVDENTICVAAILGSTLNGEFEDVKRLNDLLIEKNKETGWDTPIHVDAASGGFIAPFLYPELEWDFRLPLEKSINVSGHKYGLVYAGIGWAIWRNKEDLPDELIFHINYLGADQPTFTLNFSKGSSQVIAQYYQLIRLGFEGYKNVMENCQENARVLREGIEKSGRFNIISKEIGVPLVAFSLKDNSQHNEFEISETLRRFGWIVLAYTMPPNAQHVTVLRVVIREDFSRTLAERLVIDIEKVFHGVDTLPARVNAKLAVAEANGSGVHKKTDREVQLEITTAWLKFVADKKKKTNGVC

SEQ ID NO: 782 - protein, 496 aa, Nicotiana tabacum
MVLSKTASESDVSIHSTFASRYVRTSLPRFKMPENSIPKEAAYQIINDELMLDGNPRLNLASFVTTWMEPECNKLMMDSINKNYVDMDEYPVTTELQNRCVNMIAHLFNAPLGDGETAVGVGTVGSSEAIMLAGLAFKRKWQNKMKAQGKPCDKPNIVTGANVQVCWEKFARYFEVELKEVKLSDGYYVMDPEKAVEMVDENTICVAAILGSTLNGEFEDVKRLNDLLIEKNKETGWDTPIHVDAASGGFIAPFLYPELEWDFRLPLVKSINVSGHKYGLVYAGIGWAIWRNKEDLPDELIFHINYLGADQPTFTLNFSKGSSQVIAQYYQLIRLGFEGYKNVMENCQENARVLREGLEKSGRFNIISKEIGVPLVAFSLKDNSQHNEFEISETLRRFGWIIPAYTMPPNAQHVTVLRVVIREDFSRTLAERLVIDIEKVLHELDTLPARVNAKLAVAEANGSGVHKKTDREVQLEITTAWKKFVADKKKKTNGVC

SEQ ID NO: 783 - protein, 247 aa, Zea mays
  unsure (1)..(247): unsure at all Xaa locations
MPPRPVPLFSRLRFRLPSCAAVSISTPPSSAAPLHYGHRTPLASPFPLSPPCPRILRAAVAVSSLDLRPITGGFAAXSAWLLASSATSVHDFTVKDASGKDVDLSTYKGKVLLIVNVASQCGLTNSNYTELSQLYEKYKDQGFEILAFPCNQFGGQEPGTNEEIVQFACTRFKAEYPIFDKVDVNGDNTAPIYKFLKSSKGSLFGDNIKWNFSKFLVDKEGHVVERYAPTTSPLSIEKDIKKLLGSS

SEQ ID NO: 784 - protein, 481 aa, Haloarcula marismortui ATCC 43049
MTQTYENYIDGEWTGSGETQEVTNPADETDVVSTVPVASAADADEAVAAAAAATDEWGEMPGPERGAILRETGEILKSRKDELAETLTREEGKPLGEAEGEVQRAIDIFYYYAEKARDFGGTVKQPSGGRAGLQTKKEPMGVAALITPWNYPIAIPAWKIAPALAVGNTVVIKPAMQAPTVGAMIVEALDEAGIPDGAINLVCGPGSEVGEQLTTHDDVDVVSFTGSASVGEHVYEQATSNGKRAQAEMGGKNPTVVMPSADVDKAADIVGAGAFGGTGQACTATSRAIVHEDVYDEFLDAIVDYAESLEIGDGLDRAGMGPHVSEDELAGSLEYIDVAQSEGATLETGGEELTSGEYDGGNFISPAVFSDVEPDMRIAQEEVFGPVLAVMSVSDFDEGVEVANDIDYGLSASIVTDRIKEENEFIERSESGVVKVNEKTTGLELHVPFGGLKRSSTNTYREQGDAGLEFFSYIKTVYRNS

SEQ ID NO: 785 - protein, 470 aa, Streptomyces avermitilis MA-4680
MPLHKGPVKSDERPMSFNPFFGEANPVSGMTEAPPKHRLADGPLPPSTAYQLVHDELMLDGNARLNLATFVTTWMEPQAGVLMAECQDKNMIDKDEYPRTAELEKRCVAMLADLWNAPDAGAAVGCSTTGSSEACMLAGLALKRRWARRNADRYPARDVRPNLVMGINVQVCWEKFCNFWEVEMRQVPLEGERYHLDPGAAAELCDENTIGVVGILGSTFDGSYEPIAELCAALDALQERTGLDIPVHVDGASGAMIAPFLDEDLVWDFRLPRVASINTSGHKYGLVSPGVGWALWRDSEALPEELVFRVNYLGGNMPTFALNFSRPGAQVVAQYYTFLRLGREGFRAVQQTTRNVARSLAERVAALGDFHLLTRGDELPVFAFTTAPEVASYDVFDVSRRMREHGWLVPAYTFPPNREDLSVLRVVCRNGFSTDLAELFVEDLSRLLPDLRRQARPQTHDKDAATGFHH

SEQ ID NO: 786 - protein, 389 aa, Escherichia coli
  unsure (1)..(389): unsure at all Xaa locations
TLQNGKLNVPENPIIPYIEGDGIGVDVTPAMLKVVDAAVEKAYKGERKISWMEIYTGEKSTQVYGQDVWLPAETLDLIREYRVAIKGPLTTPVGGGIRSLNVALRQELDLYICLRPVRYYQGAPSPVKHPELTDMVIFRENSEDIYAGIEWKADSADAEKVIKFLREEMGVKKIRFQEHCGIGIKPCSEEGTXXXVREAIEYAIATDGDSVTLVPKGNIMKFTEGAFKDWGYQLAREEFGGELIDGGPWLKVKNPNTGKEIVIKDVIADAFLQQILLRPAEYDVIACMNLNGDYISDALAAQVGGIGIAPGANIGDECALFEATHGTAPKYAGQDKVNPGSIILSAEMMLRHMGWTESADLIVKGMEGAINAKTVTYDFERLMEGAKLL

SEQ ID NO: 787 - protein, 91 aa, Brassica napus
  unsure (1)..(91): unsure at all Xaa locations
MSAGEEAIVASGNDNEGDQTNGNHTGKTDEYDPSTGSALSNFLWHGGSVWDAWFSCASNQVAQVLLTLPYSFSXLGMLSGIILQIFYGLLG

SEQ ID NO: 788 - protein, 286 aa, Oryza sativa (japonica cultivar-group)
MSVIDILTRVDAICQKYGRYDAEKLHGSGVAGEDPFARLYASVDADLNECLEKAEAAKQEKNRATVVALNAEIRGTKAKLLEEDLPKLQRLALKKVIDASLVLSPLLLCIASRYVDMQGGWCEELVPACTVLQRYLEWKLIYVGSAEDENYDQLLESVLVGPVNVGTYRFVLQADPPDPSKIRKEDIIGVIVLLLTCSYMGQEFIRVGYYVNNDNDDEQLREEPPAKLLIDRVQRNILADKPSVTKFPINFHPETSAGAGQEQQQQQQSGSPENHPNQGSKPNPDQ

SEQ ID NO: 789 - protein, 478 aa, Pyrobaculum aerophilum str. IM2
MIIVKNYINGEFIEVEERRPKHSPIDGSVIAETPVSKREDAKAAIDAAYDALKAWSQLPAIKRAEYLYKLYEIIKSREEELINILMVEGGGIYKKAWGEVVFTERLVRNAAELARHYGGKTLQSDAEGVVSMVFKRPKGVVGVITPWNYPLSISMKKIAHALATGNTIVYKPASETPVTGFKIAEMIHQAGFPKGVFNLVVGPGSTVGDEIVVNKKVSHVTFTGESATGREIASKAGGALKTVTLELGGSDPLIILDDADLNLAVRIAVFGAFFHQGQICTSSKRIIVHERVYDVFVKKFVERVSQLKVGDPRDRTVEQGPLISPRQADEMERFYQDAVSRGGRALTGGKRAGAYFWPTVFVDVDRNFRIMREEVFGPIRPVVPVKNDDEAVEVANDTEYGLSAAVVTTNINRAFKIAEAIESGMVHINDVTMLEESHVPFGGIKASGFGREGGEWSFHETTYDRWLTITLRERKYPI

SEQ ID NO: 790 - protein, 287 aa, Pediococcus pentosaceus ATCC 25745
MAIIQWYPGHMAKAIRQVEEKLKLVDIVFELVDARIPVSSRNPMIEDVIKSKPHLLILTKADLADPKETKKWLDYYKSRNEYAIALNSKEPSTENIILKKTQEILADKLANKADRGIKNAEIRSMCIGIPNVGKSTLLNHLVNKKVAITGDRPGVTKKQQWLRSRRGLYLLDTPGILWPKFEDQNVGNKLAFTGAIKDNLFANDDVVIYGLNIFINHYREGLMGRYHLTEDDLEMELPELLLLITQKLGMRDDYDRASQRILLDARKGKLGRFTLDFVEEFEDLGDD

SEQ ID NO: 791 - protein, 174 aa, Ammopiptanthus mongolicus
MISSPAVTTVKASMGAPFTGLKSMASFPVPRKVNSDITTIANNGGRVQCMLVWPPLGRKKFETLSYLPPLSIESLTKEVEYLLRKGWVPCLEFELEHGFVYRENNRSPGYYDGRYWTMWKLPMFGCSDASQVMKELEECKKEYPTAFVRIIGFDNKRQVQCISFIAYKPPGFEN

SEQ ID NO: 792 - protein, 389 aa, Escherichia coli
  unsure (1)..(389): unsure at all Xaa locations
TLQNGKLNVPENPIIPYIEGDGIGVDVTPAMLKVVDAAVEKAYKGERKISWMEIYTGEKSTQVYGQDVWLPAETLDLIREYRVAIKGPLTTPVGGGIRSLNVALRQELDLYICLRPVRYYQGTPSPVKHPELTDMVIFRENSEDIYAGIEWKADSADAEKVIKFLREEMGVKKIRFPEHAGFGIKPCSEKXXXXXXRAAIEYAIATDRDSVTLVHKGNIMKFTEGAFKDWGYQLAREEFGGELIDGGPWLKVKNPNTGKEIVIKDVIADAFLQQILLRPAEYDVIACMNLNGDYISDALAAQVGGIGIAPGANIGDECALFEATHGTAPKYAGQDKVNPGSIILSAEMMLRHMGWTEAADLIVKGMEGAINAKTVTYDFERLMEGAKLL

SEQ ID NO: 793 - protein, 389 aa, Escherichia coli
  unsure (1)..(389): unsure at all Xaa locations
TLQNGKLNVPENPIIPYIEGDGIGVDVTPAMLKVVDAAVEKAYKGERKISWMEIYTGEKSTQVYGQDVWLPAETLDLIREYRVAIKGPLTTPVGGGIRSLNVALRQELDLYICLRPVRYYQGTPSPVKHPELTDMVIFRENSEDIYAGIEWKADSADAEKVIKFLREEMGVKKIRFPEHXGIGIKPCSEKGTXXXVRAAIEYAIATDRDSVTLVHKGNIMKFTEGAFKDWGYQLAREEFGGELIDGGPWLKVKNPNTGKEIVIKDVIADAFLQQILLRPAEYDVIACMNLNGDYISDALAAQVGGIGIAPGANIGDECALFEATHGTAPKYAGQDKVNPGSIILSAEMMLRHMGWTEAADLIVKGMEGAINAKTVTYDFERLMEGAKLL

SEQ ID NO: 794 - protein, 1329 aa, Escherichia coli K12
MSQEYIEDKEVTLTKLSSGRRLLEALLILIVLFAVWLMAALLSFNPSDPSWSQTAWHEPIHNLGGMPGAWLADTLFFIFGVMAYTIPVIIVGGCWFAWRHQSSDEYIDYFAVSLRIIGVLALILTSCGLAAINADDIWYFASGGVIGSLLSTTLQPLLHSSGGTIALLCVWAAGLTLFTGWSWVTIAEKLGGWILNILTFASNRTRRDDTWVDEDEYEDDEEYEDENHGKQHESRRARILRGALARRKRLAEKFINPMGRQTDAALFSGKRMDDDEEITYTARGVAADPDDVLFSGNRATQPEYDEYDPLLNGAPITEPVAVAAAATTATQSWAAPVEPVTQTPPVASVDVPPAQPTVAWQPVPGPQTGEPVIAPAPEGYPQQSQYAQPAVQYNEPLQQPVQPQQPYYAPAAEQPAQQPYYAPAPEQPVAGNAWQAEEQQSTFAPQSTYQTEQTYQQPAAQEPLYQQPQPVEQQPVVEPEPVVEETKPARPPLYYFEEVEEKRAREREQLAAWYQPIPEPVKEPEPIKSSLKAPSVAAVPPVEAAAAVSPLASGVKKATLATGAAATVAAPVFSLANSGGPRPQVKEGIGPQLPRPKRIRVPTRRELASYGIKLPSQRAAEEKAREAQRNQYDSGDQYNDDEIDAMQQDELARQFAQTQQQRYGEQYQHDVPVNAEDADAAAEAELARQFAQTQQQRYSGEQPAGANPFSLDDFEFSPMKALLDDGPHEPLFTPIVEPVQQPQQPVAPQQQYQQPQQPVPPQPQYQQPQQPVAPQPQYQQPQQPVAPQQQYQQPQQPVAPQQQYQQPQQPVAPQPQDTLLHPLLMRNGDSRPLHKPTTPLPSLDLLTPPPSEVEPVDTFALEQMARLVEARLADFRIKADVVNYSPGPVITRFELNLAPGVKAARISNLSRDLARSLSTVAVRVVEVIPGKPYVGLELPNKKRQTVYLREVLDNAKFRDNPSPLTVVLGKDIAGEPVVADLAKMPHLLVAGTTGSGKSVGVNAMILSMLYKAQPEDVRFIMIDPKMLELSVYEGIPHLLTEVVTDMKDAANALRWCVNEMERRYKLMSALGVRNLAGYNEKIAEADRMMRPIPDPYWKPGDSMDAQHPVLKKEPYIVVLVDEFADLMMTVGKKVEELIARLAQKARAAGIHLVLATQRPSVDVITGLIKANIPTRIAFTVSSKIDSRTILDQAGAESLLGMGDMLYSGPNSTLPVRVHGAFVRDQEVHAVVQDWKARGRPQYVDGITSDSESEGGAGGFDGAEELDPLFDQAVQFVTEKRKASISGVQRQFRIGYNRAARIIEQMEAQGIVSEQGHNGNREVLAPPPFD

SEQ ID NO: 795 - protein, 134 aa, Euphorbia lagascae
MKLKTHIHQSHITRNIIYNMAGIKVAVLVVALMVVASGMYANAITCGQVSSSLAPCVNFLKSGGAPSPQCCNGLGGMVNQAKSTADKQAACNCLKTAAKNMPGLNPANAESLPSKCKVNIPYKISFSTNCNSIK

SEQ ID NO: 796 - protein, 515 aa, Glycine max
  unsure (1)..(515): unsure at all Xaa locations
RQDVHPNSPSCLLFIDGDWKVPVLKNRIPIINPSTQHIIXGDIPAATKEDVDLAVAAAKAALSRNKGADWASASGSVXRARYLRAIAAKITEKKPELAKLEAIDCGKPLDEAAWDIDDVAGCFEFYADLAEKLDAQQKAHVSLPMDTFKSYVLKEPIGXVVALITPWNYXLLMATWXKVAPALAAGCACNIXKPSELASVTXLELAEICKEVGLPPGVLNILTGLGPEAGXAPLAAHXNVDKISFTGSSATGSRIMTAAAQLTKPVSLELGGKSPIIVFEDVDLDKTAEWTIFGCFFTNGQICSATSRLIVHESIATEFVNRLVQWAKNIKXISDPFEEGCRLGPIVSEGQYKKVLNCISTAKSEGATILIGGSRPXEHLKKGYFVEPTIITDVTTSMQIWREEVFGPVLCVKTFSTEEEAIELANDTHYGLGSAVMSKDLERCEXRISKAIQAGIVWINCAQPSFIQAPWGGVKRSGFGRELGEWGLENYLSVKQVTKYISDEPWGWYQSPSKL

SEQ ID NO: 797 - protein, 490 aa, Escherichia coli
MDIQKRVSDMEPKTKKQRSLYIPYAGPVLLEFPLLNKGSAFSMEERRNFNLLGLLPEVVETIEEQAERAWIQYQGFKTEIDKHIYLRNIQDTNETLFYRLVNNHLDEMMPVIYTPTVGAACERFSEIYRRSRGVFISYQNRHNMDDILQNVPNHNIKVIVVTDGERILGLGDQGIGGMGIPIGKLSLYTACGGISPAYTLPVVLDVGTNNQQLLNDPLYMGWRNPRITDDEYYEFVDEFIQAVKQRWPDVLLQFEDFAQKNAMPLLNRYRNEICSFNDDIQGTAAVTVGTLIAASRAAGGQLSEKKIVFLGAGSAGCGIAEMIISQTQREGLSEEAARQKVFMVDRFGLLTDKMPNLLPFQTKLVQKRENLSDWDTDSDVLSLLDVVRNVKPDILIGVSGQTGLFTEEIIREMHKHCPRPIVMPLSNPTSRVEATPQDIIAENKPPFSVFRDKFITMPGGLDYSRAIVVASVKEAPIGIEVIPAHVTEYL

SEQ ID NO: 798 - protein, 645 aa, Zea mays
  unsure (1)..(645): unsure at all Xaa locations
MLNFPPYIIGNSAGLRHRSSAMNAVEPSAAAIAEDPITPAASAAPYPGRLREALTALSEACESGNFNASETASFTISDILDTAAGVSGELDDGSDDSQDASRSGASEVLLREVLEFLSRPSSISNQMALDALSLVLPKPVAKLGARMGRCRDVAAAILKFFVTNCNPRDMLSILCEALDAPMELPNGLSSFVLLLDALAKVFTLIQRRHIEQVKVAXPVVLKVMHATVSECVEEHGSAAVDLFNAAHGVGXAIQEMCISMFNKNKDLCAILGLYSLQNIALVSRSRQQDILSACGSVVFQSFRFLKTSGFTYRGLLTGSDVTAATVELSKEEDADFMEHFSFAMDGAALSVVWTLMHDDKDMSKYAGEELELAVKEVQGNHMEKWEAINMLKYVLSSIHYPWIIKSHSLNLMLILSGEDHVEEINNHVDFTCFAHRIFETLKAIESVMIAAPMALVRKKAFAALKKVISMVPSSQRFDILHGLVNNSTSPALTAILLDLVRQEVSRESRQADNDCIEDEGFRGNGLPRWASHALELVELILRPPEGGPPCLPDHSEQVISALNLLRFILIIDSRGQRSAKLFRKETLHKVHSEWLTPLRPIAEQIQLENEKDADEITKQIVCMLNLVQLVLYRCIELVEEKMKGC

SEQ ID NO: 799 - protein, 494 aa, Mycobacterium tuberculosis H37Rv
MLEACQAIGVTAALGEPGEHSLPASTPITGDVLFSIAPTTPEQADHAIAAAAATFTAWRSTPAPVRGALVARLGELLTAHQQDLATLVTVEVGKITAEARGEVQEMIDVCQFSVGLSRQLYGRTIASERAGHRLLETWHPLGVVGVITAFNFPVAVWAWNTAVALVCGDTVVWKPSELTPLTALACQALLSRAAADVGAPAAVGGLLLGGAERGAQLVDDPRVALLSATGSVRMGQQVGPRVARRFGRVLLELGGNNAAIVAPSADLELAVRGIVFAAAGTAGQRCTSLRRLIVHRSVADDVVARVVGAYRQLAIGDPSAPDTLVGPLIHEAAYRDMVAALERARTDGGEVIGGDRREVGSPGAYYVAPAVVRMPSQTAIVATETFAPILYVLTYDDLDEAIALNNAVPQGLSSSIFTTDLREAEHFLDQSDCGIANVNIGTSGAEIGGAFGGEKQTGGGRESGSDAWKAYMRRATNTVNYSSELPLAQGVKFG

SEQ ID NO: 800 - protein, 504 aa, Arabidopsis thaliana
MVVINSLRRLARTTQVHLHSKYATCMSGNSTSRRIFTTEAAPEKKNTVGSKGHDMLAPFTAGWQSADLDPLVIAKSEGSYVYDDTGKKYLDSLAGLWCTALGGNEPRLVSAAVEQLNTLPFYHSFWNRTTKPSLDLAKVLLEMFTANKMAKAFFTSGGSDANDTQVKLVWYYNNALGRPEKKKFIARKKSYHGSTLISASLSGLPPLHQNFDLPAPFVLHTDCPHYWRFHLPGETEEEFSTRLAKNLEDLIIKEGPETIGAFIAEPVMGAGGVIPPPATYFEKVQAVVKKYDILFIADEVICAFGRLGTMFGCDKYNIKPDLVTLAKALSSAYMPIGAILMSQEVADVINSHSSKLGVFSHGFTYSGHPVSCAVAIEALKIYKERNIPEYVAKVAPRFQDGVKAFASGSPIIGETRGTGLILGTEFVDNKSPNEPFPPEWGVGAFFGAECQKHGMLVRVAGDGILMSPPLIISPEEIDELISIYGKALKATEEKVKELKAQHKK

SEQ ID NO: 801 - protein, 508 aa, Zea mays
  unsure (1)..(508): unsure at all Xaa locations
MKTSVVVAALAAVLFAAQSYASLAGASGPRVIIVGAGMSGISAGKTLWEAGVRDLLILEATGRVGGRMHKHNFGGINVEIGANWVEGLGGDQLNPIWPLVNSTLKLRNFYSDFDSVVGNVYKENGGGLYDEEYVQKRMDRAYEVEELGANLTKKMHPSGRDDISVLAMQRLFNHQPNGPXTTPVDMALDYFIYDYEFAEPPRVTSLQNTQATPTNADFGEDNYFVADQRGYESIIHSIGSSYLSTDGNGKLKDRRILLNKVVRQITYNKQGVVVKTEDGSSYRADXYVVVSTSLGVLQTDLIQFKPQLPFWKIAAIYSFDMGVYTKIFLKFPERFWPVGEGKQFFMYASSRRGYYALWQSFEREYPGANVLLATVTDDESRRIERQSDDQTKAEVAEVLRDMFPAADVPGPDQIDVYVPRWWSDRFFKGSYSNWPVGVSRYEYDQLRAPVGRVYFTGEHTSERYNGYVHGAYLAGIDSANILINYIFKNEEYKVRGKYDVDDLIAQAR

SEQ ID NO: 802 - protein, 209 aa, Oceanobacillus iheyensis HTE831
MNKQEIIQRILIVFTTTLAVACIGIYMGQYIPKQWMLPLMIIEIIMLIAAALLRRRSRVGYIFLFSFVVISGITMFPAIYFYVSEIGAVVVLFVFLLTLMIFTILGMVGWVLQKDLSFMGSTLFIILIVLIAFSIFTWFIPQSDTVLVIVACVSAGLFSVYIVYDFNQIKHRALTAKDVPSAVLSLYLDVVNLFLHLLRIISYVFKNRG

SEQ ID NO: 803 - protein, 189 aa, Rubrobacter xylanophilus DSM 9941
MTDSRYGRGFTLWFTGLSGAGKTTIAEIVEKELRERRGAVEVLDGDIVRTNLSKGLGFSREDRDTNVLRIGFVANLLTRNGVAVIVSAISPYREARDKVRQMIGEDFIEVYVDAPLEVCAERDVKGLYKKALAGEIPQFTGVSDPYEPPVAPELHIRTNEERPHQSARRVIEKLEELGYLQPVREYNRA

SEQ ID NO: 804 - protein, 175 aa, Sinorhizobium meliloti 1021
MAEPATKLPIKSEEKGVERRAESWLPFESLRSEIDRLFDDFAPSLWHRPLASALMRRVPRLSELDVAPAVDLAETEKTYEITCELPGMEEKDIEVAISNGTLTIRGEKQEEKKENKKEYVLSERRYGSFQRTFRMPDGVDTEKIAAKFSKSVLSITLPKTPEAQQNERKIQIKVT

SEQ ID NO: 805 - protein, 476 aa, Zea mays
  unsure (1)..(476): unsure at all Xaa locations
MAAAAVTSNGGAVAANGPAPGRLASVYSEVQTSRLLHTLPLPSVLRSNFSVVDGPASSAAGNPDEIAKLFPNLFGQPSASLVPSAEPAATRPLKVGVVLSGGQAPGGHNVICGIFDYLQERAKGSTLLGFKGGPAGIMKCKYVELTSDFVYPYRNQGGFDMICSGRDKIETPEQFKQAEDTANKLDLDGLVVIGGDDSNTNACLLGEYFRSRNLKTRVIGCPKTIDGDLKCKEVPTSFGFDTACKIYSEMIGNVMTDARSTGKYYHFVRLMGRAASHITLECALQTHPNAALIGEEVAAKKETLKNVTNYITDIICKXADLGYNYGVILIPEGLIDFIPEVQKLIAELNEILAHDVVDEAGAWKSKLQAESRELFEFLPKTIQEQLMLERDPHGNVQVAKIETEKMLISMVETELEKRKAEGRYSAHFRGQAHFFGYEGRCGLPTNFDSNYCYALGYGAGALLQSWEDRRRFQRGL

SEQ ID NO: 806 - protein, 326 aa, Pirellula sp. 1
MSIQWFPGHMHKARLEIQAALPKVDVVMEIIDARIPYSSENPMLADIRGDKACLKVLTKSDLADPHRTEEWLDALNSSSSTRARSVTTDDVPTIRRLKSALIGMCPHRKGRSINAMVMGIPNVGKSTIINFLAGRKVAKTGNTPAVTQHQQRVDIGDGVILWDTPGMLWPKVHNVSSGYRLALIGSIKDTAMDYTDVGFFAARYFMEQYPDRLASRFDLESVADTEMAVIEDIGRRRGCLGRNNRVDLERASRILIQEYRTGGLGRLTLETPATMQRERILTQKAMVEAEEAARLKDEKRKKRFKNKQKAQRKSREMDASRRDRRQ

SEQ ID NO: 807 - protein, 389 aa, Escherichia coli
  unsure (1)..(389): unsure at all Xaa locations
TLQNGKLNVPENPIIPYIEGDGIGVDVTPAMLKVVDAAVEKAYKGERKISWMEIYTGEKSTQVYGQDVWLPAETLDLIREYRVAIKGPLTTPVGGGIRSLNVALRQELDLYICLRPVRYYQGTPSPVKHPELTDMVIFRENSEDIYAGIEWKADSADAEKVIKFLREEMGVKKIRFPEHXGIGIKPCSEEGXXXXVRAAIEYAIANDRDSVTLVHKGNIMKFTEGAFKDWGYQLAREEFGGELIDGGPWLKVKNPNTGKEIVIKDVIADAFLQQILLRPAEYDVIACMNLNGDYISDALAAQVGGIGIAPGANIGDECALFEATHGTAPKYAGQDKVNPGSIILSAEMMLRHMGWTEAADLIVKGMEGAINAKTVTYDFERLMEGAKLL

SEQ ID NO: 808 - protein, 389 aa, Escherichia coli
  unsure (1)..(389): unsure at all Xaa locations
TLQNGKLNVPENPIIPYIEGDGIGVDVTPAMLKVVDAAVEKAYKGERKISWMEIYTGEKSTQVYGQDVWLPAETLDLIREYRVAIKGPLTTPVGGGIRSLNVALRQELDLYICLRPVRYYQGTPSPVKHPELTDMVIFRENSEDIYAGIEWKADSADAEKVIKFLREEMGVKKIRFPEHCGIGIKPCSEEGXXXXXRQAIEYAIANDRDSVTLVHKGNIMKFTEGAFKDWGYELARKEFGGELIDGGPWLKVKNPNTGKEIVIKDVIADAFLQQILLRPAEYDVIACMNLNGDYISDALAAQVGGIGIAPGANIGDECALFEATHGTAPKYAGQDKVNPGSIILSAEMMLRHMGWTEAADLIVKGMEGAINAKTVTYDFERLMEGAKLL

SEQ ID NO: 809 - protein, 497 aa, Erwinia carotovora subsp. atroseptica SCRI1043
MTTHVVTHHAVTHVVWLRNDLRITDNLALYAACQDPSATVLAVFIATPAQWEKHDMAPRQAAFLLENLTLVQHVLAEKGIPLHYHECADFAASVDWLMQFCAEQQATDLFYNHQYEINERLRDKQVKDRLADSVVCHGYHDSLLLPPGSVLTGNGEMYKVFTPFRQAFIKRLLEADTTCVPAPDARGEPINNTAELVPFSYPQCEVDSEDFPCGERAALQQLRRFCREQVQDYDQQRDFPALPGTSKLSPYLALGIVSPRQCFNRLRAECPDMLERREGGAFTWFNELVWREFYRHLIVSWPQLCKHRPFTAWTQWVKWRESPEDLTAWQQGKTGYPIVDAAMHQLNETGWMHNRLRMICASFLVKDLLIDWREGERYFMSQLLDGDLAANNGGWQWAASTGTDAAPYFRIFNPTTQGERFDPDGRFIRHWLPELAAVPDKDIHQPHRWADKQHVKLNYPLPIVDHKTARLDTLAAFEAAKNIGMANNDREEKSKYA

SEQ ID NO: 810 - protein, 188 aa, Triticum aestivum
MSGCLSPFAESVGREQGEMAAFLRSKCSSVGRAMMGSLGNNLYGGATSSIETVARPSRSDAVCQQIRTFIQMRTNLKVVDNSGAKRVMCIQSLRGKKGARLGDMIIGSVKEAQPRGKVKKGDVVYGVVVRAAMKKGRSDGSEVQFDDNAIVIVNNKGELIGTRVFGPVPHELRKKKHLKILALAEHIV

SEQ ID NO: 811 - protein, 157 aa, Azoarcus sp. EbN1
MSLTLSSTAFAHGGAVPATYTCDGRDVSPPLGWSGIPENTRSLALIVDDPDAPDPAAPQRTWVHWVLYNIPPTTAALPEAVAMADLPLGTREGTNDWKRTGYGGPCPPIGRHRYFHKLYALDVVLAPLGAPTKAELEHAMQGHILAEAELVGTYQRP

SEQ ID NO: 812 - protein, 389 aa, Escherichia coli
  unsure (1)..(389): unsure at all Xaa locations
TLQNGKLNVPENPIIPYIEGDGIGVDVTPAMLKVVDAAVEKAYKGERKISWMEIYTGEKSTQVYGQDVWLPAETLDLIREYRVAIKGPLTTPVGGGIRSLNVALRQELDLYICLRPVRYYQGTPSPVKHPELTDMVIFRENSEDIYAGIEWKADSADAEKVIKFLREEMGVKKIRFPEHXGIGIXXXXXXXXXXXVRAAIEYAIATDRDSVTLVHKGNIMKFTEGAFKDWGYQLAREEFGGELIDGGPWLKVKNPNTGKEIVIKDVIADAFLQQILLRPAEYDVIACMNLNGDYISDALAAQVGGIGIAPGANIGDECALFEATHGTAPKYAGQDKVNPGSIILSAEMMLRHMGWTEAADLIVKGMEGAINAKTVTYDFERLMEGAKLL

SEQ ID NO: 813 - protein, 426 aa, Glycine max
MSEKEKGNNSEGQSTLLHGKYELGRVLGHGTFAKVYHARNLNTGQHVAMKVVGKEKVIKVGMMEQVKREISVMKMVKHQNIVELHEVMASKSKIYIAMELVRGGELFNKVSKGRLKEDVARLYFQQLISAVDFCHSRGVYHRDLKPENLLLDEHGNLKVSDFGLTAFSDHLKEDGLLHTTCGTPAYVSPEVIAKKGYDGAKADIWSCGVILYVLLAGFLPFQDDNLVAMYKKIHRGDFKCPPWFSLDARKLVTKLLDPNPNTRISISKVMESSWFKKQVPRKVEEVVEKVDLEEKIENQETMNAFHIISFGSRFNLSPLFEEKRKEEMRFATAGTPSSVISRLEEVAKAGKFDVKSSETKVRLQGQERGRKGKLAIAADIYAVTPSFMVVEVKKDNGDTLEYNQFCSKQLRPALKDIFWNSAPASA

SEQ ID NO: 814 - protein, 109 aa, Synechocystis sp. PCC 9413
MADLLEDSGIPNKTLTIEEAIADLKGEDKGSRYYAAWWLGRFRVREPEAISALMTALADESDRTPDGGYPLRRNAARALGKLGDLQAVPKLIECLQCDDFYVRETAAEA

SEQ ID NO: 815 - protein, 389 aa, Escherichia coli
  unsure (1)..(389): unsure at all Xaa locations
TLQNGKLNVPENPIIPYIEGDGIGVDVTPAMLKVVDAAVEKAYKGERKISWMEIYTGEKSTQVYGQDVWLPAETLDLIREYRVAIKGPLTTPVGGGIRSLNVALRQELDLYICLRPVRYYQGTPSPVKHPELTDMVIFRENSEDIYAGIEWKADSADAEKVIKFLREEMGVKKIRFPEHCGIGIKPCSEEAXXXXXXXXIEYAIANDRDSVTLVXKGNIMKFTEGAFKDWGYQLAREEFGGELIDGGPWLKVKNPNTGKEIVIKDVIADAFLQQILLRPAEYDVIACMNLNGDYISDALAAQVGGIGIAPGANIGDECALFEATHGTAPKYAGQDKVNPGSIILSAEMMLRHMGWTEAADLIVKGMEGAINAKTVTYDFERLMEGAKLL

SEQ ID NO: 816 - protein, 81 aa, Triticum aestivum
  unsure (1)..(81): unsure at all Xaa locations
MSDGTATCIDIILAIILPPLGVFFKFGCGVEFWICLILTFFGYLXPGIIYAVWAITKVAGRCVSMQCARKVISWRGTRVCP

SEQ ID NO: 817 - protein, 386 aa, Escherichia coli
  unsure (1)..(386): unsure at all Xaa locations
TLHNGKLNVPENPIIPYIEGDGIGVDVTPAMLKVVDAAVEKAYKGERKISWMEIYTGEKSTQVYGQDVWLPAETLDLMREYRVAIKGPLTTPVGGGIRSLNVALRQELDLYICLRPVRYYQGTPSPVKHPELTDMVIFRENSEDIYAGIEWKADSADAEKVIKFLREEMGVKKIRFPEHCGIGIKPCSEEAXXXXXXXAIEYAIANARDSVTLVHKGNIIKFPEGAFKDWGYQLAREEFGGELIDGGPWLKVKNPNTGKEIVIKDVIADAFLQQILLRPAEYDVIACMNLNGDYISDALAAQVGGIGIAPGANIGDECALFEATHGTAPKYAGQDKVNPGSIILSAEMMLRHMGWTEAADLIVKGMEGAIXAKTVTYNFERLIKGD

SEQ ID NO: 818 - protein, 422 aa, Bacillus halodurans C-125
MANGEKIKVSAGVLEVPNNPIIPFIEGDGTGPDIWAAAHRVIDAAVEKAYNGEKKIVWKEILAGEKAFNQTGQWLPDETLETIREYTIAIKGPLTTPVGGGIRSLNVALRQELDLYVCLRPVRYFNGVPSPVKRPEDTNMVIFRENSEDIYAGIEYQAGTDEVKKVINFLREEMGVKKIRFPETSGIGIKPVSQEGTDRLVRAAIQYAITEGRKSVTLVHKGNIMKFTEGAFKNWGYEVAEREFGDKVFTWAQYDKIVEEQGKEAADKAQAEAEAAGKIIVKDSIADIFLQQILTRPKEFDVVATMNLNGDYISDALAAQVGGIGIAPGANINYDTGHAIFEATHGTAPKYAGLDKVNPSSVLLSGELMLRHLGWNEAADLIMASMDKTIESKVVTYDFARLMDGATEVKCSEFANELIKNL

SEQ ID NO: 819 - protein, 372 aa, Bacillus halodurans C-125
MSVTRGLEGVVATTSSVSSIIESVLTYQGYDIDELAEHASFEEVIYLLWNGKLPNKVELKELADELANNAEIPQEVIEQMKAYPLDRVHPMGALRTAISSLGLYDEEADLMDEAANKRKALKLQAQVSTVVTAFSRIREGKEPVAPRTDLSFAANFLYMLTGEEPDEIAVDAFNKALVLHADHELNASTFTARVCVATLSDVYSGITAAIGALKGPLHGGANEQVMAMLTEIGDVENVEPYIRKALDNKQKIMGFGHRVYKNGDPRAKHLREMSKKLTSITGESKWYEMSVKIEEIVTNEKGLLPNVDFYSASVYHSLGIKHDLFTPIFAVSRMSGWLAHILEQYSNNRLIRPRAEYVGPNKRQYVRLEERN

SEQ ID NO: 820 - protein, 132 aa, Pyrobaculum aerophilum str. IM2
MSTKYVEAGELKEGSYVVIDGEPCRVVEIEKSKTGKHGSAKARIVAVGVFDGGKRTLSLPVDAQVEVPIIEKFTAQILSVSGDVIQLMDMRDYKTIEVPMKYVEEEAKGRLAPGAEVEVWQILDRYKIIRVK

SEQ ID NO: 821 - protein, 505 aa, Oryza sativa
MVLSHASSGRDDAVRCTFATRYACETLPRFRMPEQSIPREAAYQIINDELMLDGNPRLNLASFVTTWMEPECDKLIMDSVNKNYVDMDEYPVTTELQNRCVNMIAHLFNAPIKEDETAIGVGTVGSSEAIMLAGLAFKRKWQNKRKEQGKPCDKPNIVTGANVQVCWEKFARYFEVELKEVKLSEGYYVMDPVKAVEMVDENTICVAAILGSTLTGEFEDVKLLNNLLTEKNKETGWDVPIHVDAASGGFIAPFLYPELEWDFRLPLVKSINVSGHKYGLVYPGVGWVIWRSKEDLPEELIFHINYLGTDQPTFTLNFSKGIQEHHAELHGEHSNTKGRHRGDWSIRNPLQGGRCALGGVLAQGQRQVHRVRHLRAPEEVRLDRAGVHHAGQRRARRRPPRRHQGGLQPEPRRAARLGHRQDPARAGRPFGPGAEDLQRHREAAIGRRWRGHQEERPGDREGDLRVLEGPGEEEADRNLLVWLCEKCLNNVACSICAWDGRIGWD

SEQ ID NO: 822 - protein, 436 aa, Zea mays
MHPKLFPENHVSRPDGNGSASFHPLPLPPASVSPKQTNASHQLVPKAEMPSVAGQWQKGKLLGSGTFGCVYEATNRHTGALCAMKEVNIIPDDAKSVESLKQLEQEIKFLSQFKHENIVQYYGSETIEDRFYIYLEYVHPGSIHKYVHQHCGSLTEAVIRNFTRHILKGLAFLHSQKIMHRDIKGANLLVDINGVVKLADFGMAKHLSTAAPNLSLKGTPYWMAPEVVRATLDKSAGYDLAVDIWSLGCTIIEMFTGKPPWSGLEGPAAMFKVLRTDPPIPDNLSPEGKDFLRCCFKRNPTERPTANKLLEHPFIQTLNHYSPHSVVHSFSGIKSPDTVHSSARDKVPWKSDSYMRGKHANGETSSARSSESLAYRLMTPLPNLGTNSLSPPPLSSASSSGSAAHTPNSMHFSVPYHQPSPLPKPNGKEAINLVSH

SEQ ID NO: 823 - protein, 364 aa, Neurospora crassa
MASLLNQLRGLTTVDCDTLDAHGEQHNTAISAENKAIVLAEITKLDANGKLIYQTLIDEIIPIAHWMFGNQTDATVEELASELLAVGLALRFIPHLNGFIHIQTNPKWCYSTEKTVKNAERIVAHLKHLAPDFDTSRICIKIPATWEGLQACRELERRHSIATLATIVFSMEQVALAVDAGCRYVAPYVNELRVHFDATYTDANKDRAALFCGAAQRYCDEVASSASAAEAAHGSLNLQMQTQVMAASLTSVEEVMRLAGAVKHITVSPPLLMELEATPAAGWPGASTVGAAAAITGSRVNGDAVRLRELVRDQSQWRLAFTRAEAGESERKLGQAIGIFCDMQDQLERLVRRWDLTGKKYARG

SEQ ID NO: 824 - protein, 214 aa, Geobacter sulfurreducens PCA
MKFFIDTADVKEIRQAHDLGLVDGVTTNPSLIAKSGRKFEDVIKEITEIVDGPISAEVVSLEAAGMIREAGELAKIHKNIVIKLPMTPEGLKACAALTREGIKTNVTLIFTPMQALLAAKAGATYVSPFVGRLDDISQDGMGIIDDIKTIFDNYGYQSEIIVASVRNPVHVLNAALIGADIATIPYSVMLQLAKHPLTDSGIERFLKDWESVPK

SEQ ID NO: 825 - protein, 496 aa, Neurospora crassa
MSTSVNINGVEFQPRLLINGEFVEASDKGTFNVVNPATGEMSCKVPEATEDDTNRAVAAAKAAQPGWAALDPAKRGAYLKKLAALIREHKSTLHHLEAISMGVPVNHFFHADFGADELDYFAEAWPHIQGQSSVNTPGYVTMTFRQPFGVAACIIPWNAPLYFFATKAAAALITGNTVVLKSSEKAPLAVAYAAELVAKAGFPPGVFNILSGHGLPSGRCLARHMDVRAISFTGSSRTGKLIQEEAAKTNLKSVTLELGGKSPAIIFDDANIEQALTDTMSSIVLNAGQVCIANSRVYVQKSVAPKFIEAFTKRMATIRGGNPLDPQTQMGPQADEIQYKNILSYIEEGKKSGKLAVGGKGQLDERKGYFVEPTVFLDTPEDAKIMKEEIFGPVLNINTFETEEEVVAKANDTEYGLWAAVFTNDLSRAMRMAKALESGYVSINCSSPSIGRDLPFGGYKGSGQGREGRLHSMNHFLEIKSVIIKLDEKASLQWNM

SEQ ID NO: 826 - protein, 152 aa, Magnaporthe grisea 70-15
MSQSGATVSQECVTTYNELKLGKNIKYIIFKLSDNNKEIVVEEASGDSDWENFRNKLVNATVKSPSGAVGKAPRYAVYDFQYTLASGEGERNKITFIAWSPDDAGVKPKMIYAASKDALKRALNGIAHELQANDADDIEYDSVLKTVSKGLA

SEQ ID NO: 827 - protein, 161 aa, Triticum aestivum
  unsure (1)..(161): unsure at all Xaa locations
MSDSEEHHFESKADAGASKTYPQQAGTVRKNGFLVIKGRPCKXVVEVSTSKTGKHGHAKCHFVAIDIFNGKKLEDIVPSSHNCDIPHVNRTEYQLIDISEDGFVSLLTSDGNTKDDLRLPTDETLVAQIKEGFESGKDLVVTVQSAMGEEQICALKDIGPK

SEQ ID NO: 828 - protein, 319 aa, Bacillus halodurans C-125
MKRIGVLTSGGDSPGMNAAIRAVVRKAIYHGVEVYGIYQGYAGLISGDIRKMELGSVGDIIHRGGTILYTARCEEFKTLEGQKKGIEQLKKFGIEGLVVIGGDGSFAGAQKLTEHGFPTVGVPGTIDNDIPGTDFTIGFDTALNTVIDAIDKIRDTATSHDRTYVIEVMGRNAGDLALWSGLADGAETIVIPEADHDIDQIISRLQRGQERGKKHSIIVVAEGVGSGMDFGREISERTGAETRVTVLGHIQRGGSPTGFDRVLASRLGAKAVDLLLEGQAGVTVGIENNKLVHHDITEVLQRKHSIDLDMYRLSQELSI

SEQ ID NO: 829 - protein, 148 aa, Glycine max
  unsure (1)..(148): unsure at all Xaa locations
MACSMISYAAVTTVNRACAGMVAPFTGLKTMAGWLPRMRAFDITSIASNGGRAQCVQVWPPXWIKKFETLIYLPDXLEDAQLRKEVEYLLRKGWMPSLQFELDHGFVYREHNRSPGYYNGRYWTMVKLPMFGCTEATQVVNELQEAKT

SEQ ID NO: 830 - protein, 496 aa, Staphylococcus aureus subsp. aureus MRSA252
MELLKHLSQRQYIDGEWVESANKNTRDIINPYNQEVIFTVSEGTKEDAERAILAARRAFESGEWSQETAETRGKKVRAIADKIKEHREALARLETLDTGKTLEESYADMDDIHNVFMYFAGLADKDGGEMIDSPIPDTESKIVKEPVGVVTQITPWNYPLLQASWKIAPALATGCSLVMKPSEITPLTTIRVFELMEEVGFPKGTINLILGAGSEVGDVMSGHKEIDLVSFTGGIETGKHIMKNAANNVTNIALELGGKNPNIIFDDADFELAVDQALNGGYFHAGQVCSAGSRILVQNSIKDKFEQALIDRVKKIKLGNGFDADTEMGPVISTEHRNKIESYMDVAKAEGATIAVGGKRPDRDDLKDGLFFEPTVITNCDTSMRIVQEEVFGPVVTVEGFETEQEAIQLANDSIYGLAGAVFSKDIGKAQRVANKLKLGTVWINDFHPYFAQAPWGGYKQSGIGRELGKEGLEEYLVSKHILTNTNPQLVNWFSK

SEQ ID NO: 831 - protein, 357 aa, Phanerochaete chrysosporium
AVCPDGTRVSHAACCAFIPLAQDLQETIFQNECGEDAHEVIRLTFHDAIAISRSQGPKAGGGADGSMLLFPTVEPNFSANNGIDDSVNNLIPFMQKHNTISAADLVQFAGAVALSNCPGAPRLEFLAGRPNKTIAAVDGLIPEPQDSVTKILQRFEDAGGFTPFEVVSLLASHSVARANKVDQTIDAAPFDSTPFTFDTQVFLEVLLKGVGFPGSANNTGEVASPLPLGSGSDTGEMRLQSDFALAHDPRTACIWQGFVNEQAFMAASFRAAMSKLAVLGHNRNSLIDCSDVVPVPKPATGQPAMFPASTGPQDLELSCPSERFPTLTTQPGASQSLIAHCPDGSMSCPGVQFNGPA

SEQ ID NO: 832 - protein, 434 aa, Rickettsia rickettsii
MTNENNNDSEFAELKIRGKIFKLPILKASIGEDVIDISRVSAEADCFTYDPGFMSTASCQSTITYIDGDKGILRHRGYDIKDLAEKSDFLEVAYLLIYGELPSGEQYNNFTKQVAHHSLVNERLHYLFQTFCSSSHPMAIMLAAVGSLAAFYPDLLNFKEADYELTAIRMIAKIPTIAAMSYKYSIGQPFIYPDNSLDFTENFLHMMFATPCTKYTVNPIIKNALNKIFILHADHEQNASTSTVRIAGSSGANPFACISTGIASLWGPAHGGANEAVINMLKEIGSSEYIPKYIAKAKDKNDPFRLMGFGHRVYKNYDPRAVVLKETCKEVLKELGQLDNNLLQIAIELEAIALKDEYFIERKLYPNVDFYSGIIYKAMGIPSQMFTVLFAIARTVGWMAQWKEMHEDPEQKISRPRQLYTGYVHREYKGIRER

SEQ ID NO: 833 - protein, 160 aa, Gloeobacter violaceus PCC 7421
MATVSDITVQTVDGQARSLGRYKGQVLLIVNVASYCGYTPQYAGLEKLYRRYKDAGLRVLAFPCNDFGGQEPGSNAEIAEFCSRYDVSFELFDKVGARGYYKHPLYVRLSEAAEPAGEVSWNFEKFLIAKSGEIVGRYRSGIGPEDPQLVADIERELAKS

SEQ ID NO: 834 - protein, 483 aa, Thermobifida fusca
MSLTERPQLFIGGRWVDSKGGRKVDVHNPATGAYVGSTVLASTADIDAAVASARASFNSGVWANTPPEERAAVLHRAADLLEERAPELAKLITSELGCPIWFSERAHVPNPIRHLRYYGTLAKDFAYDERRSDGTNTSLVTQVPVGVVAAITPWNGPLSTPSLKVAPALAAGCSVILKPPPETPLTAYNLADALSQAGLPDGVLNIVPADREEGAYLVSHPDVDKVAFTGSSAAGKKIMAACAERIARVTLELGGKSAAIILDDADVDTVVPALLPMAFMVNGQACIAQTRLLVPRSRKDEFIDAFAQAVAAQRVGDPIDPATQIGPMVSRRQQERVEGYIATGRQEGARVVVGGERPSLPSELAGGWFVAPTLLAEVHNSMRVAQEEIFGPVLAVIEYDGDDEAVAIANDSVYGLSGSVWSSDEERALAIARRMRTGMVSINGRPQAANSPFGGFKQSGIGREMGPEGFHAYLETMSIAVGS

SEQ ID NO: 835 - protein, 357 aa, Phanerochaete chrysosporium
AVCPDGTRVSHAACCAFIPLAQDLQETIFQNECGQDAHEVIRLTFHDAIAISRSQGPKAGGGADGSMLLFPTVEPNFSANNGIDDSVNNLIPFMQKHNTISAADLVQFAGAVALSNCPGAPRLEFLAGRPNKTIAAVDGLIPEPQDSVTKILQRFEDAGGFTPFEVVSLLASHSVARANKVDQTIDAAPFDSTPFTFDTQVFLEVLLKGVGFPGSANNTGEVASPLPLGSGSDTGEMRLQSDFALAHDPRTACIWQGFVNEQAFMAASFRAAMSKLAVLGHNRNSLIDCSDVVPVPKPATGQPAMFPASTGPQDLELSCPSERFPTLTTQPGASQSLIAHCPDGSMSCPGVQFNGPA

SEQ ID NO: 836 - protein, 115 aa, Malus x domestica
MACSAVIKLALVVALCMAVSVAHAITCGQVTSSLAPCIGYVRSGGAVPPACCNGIRTINGLARTTADRQTACNCLKNLAGSISGVNPNNAAGLPGKCGVNVPYKISTSTNCATVK

SEQ ID NO: 837 - protein, 199 aa, Fusobacterium nucleatum subsp. nucleatum ATCC 25586
MGNLKNHLMKYERRPIMKIYDFKVKNRKGEDISLENYKGKVLLIVNTATRCGFTPQYDELEALYSKYNKDGFEVLDFPCNQFGNQAPESNEEIHTFCQLNYKVKFDQFAKVEVNGENAIPLFKYLKEEKGFAGFDSKHKLTSVLTEMLSKNDPDFAKKSDIKWNFTKFLVDKSGNVVARFEPTTSAEVIEQEIKKLLEV

SEQ ID NO: 838 - protein, 649 aa, Glycine max
  unsure (1)..(649): unsure at all Xaa locations
MSSAEKPSSKGQAWFCTTGLPSDIVVEVDDMTFHLHKFPLMSKSRKLHLLITQQEAASNSTVPQQQQQQQETEDEDEIVEEQCHVTFTGFPGGSEAFEMAAKFCYGVKIDLTPSNVAALRCAGEFLEMTEDYSEDNLVSKTEGFLSQHVLKNLKDSVKTLKSCDSLMPMAENLGAAQRCVDSVVSRASSADPALFGWPVSDATSVSKQVLWGXSTATADPALAPGPVSLGFEDLALLRLPLFKRLILAMRSAGLSPEIIETCLMYYAKKYIPGVSRSNRKPLPSSSSSSSSVATEAEQKELLETLVSNLPLEKTSKAATATRFLFGLLRTTNILNASEACRDALEKKIGLQLEEATLDDLLVPSYSYLNETLYDVDCVERILSHFLEGFEARNVAQSTADVLRXSPALMLVGKLIDGYLSEIASDANLKPEKFYNFAISLPDEARLFDDGLYRAVDVYLKAHPWVLEEEREKICGLLDCQKLTLEACTHAAQNERLPLRAVVQVLFFEQLQLRQAIAGTLMAAEAAAEPGRQSAALEREAEDGRGEGLGLEHVQERNGTWRVAVRENQVLRLDMDSMRTRVHQLERECSSMKRVISKFDKFAASGGGWRASLGRKFGCKFKTQVCDSHESTAVDTRKGRHHQQHHPHHD

SEQ ID NO: 839 - protein, 423 aa, Azotobacter vinelandii
MRTRILGARLIDPTSGLDRVADLYLADGRIAAVDQAPAAFEADETLDARGLIAAPGLVDLSAALREPGYGRKGSIASETRAAAAGGVTSLCCPPLTRPVLDTPAVAELILDRAREAGHAKVFPIGALTRELAGEQLAELVALRDTGCVAFGNGLASFASNRHLRRALEYAATFDLTVVFHSQDAALAEDGLAHEGPMAGFLGLAGIPETAETVALARDLLLVEQTGVRAHFSQLSSARGARMIAEAQARGLPVSADVALYQLILTDEALADFSSLYHVQPPLRSRADRDGLRDAVRQGTIQAIASHHQPHEADAKLAPFGATEPGISSVELLLPLALSLVQENVLDLPTLLARLTSGPARALRLPVGRLAAGAPADLVLFDPEAATLAGERWLSKGRNCPFIGHVLPGAVRYTLLDGRISYQA

SEQ ID NO: 840 - protein, 509 aa, Zea mays
MIANGLRKSSAASSQVSKLVKYIASAGSLQGGHSLSEPSARHYSSEPSLQATEENGFKGHSMLAPFTAGWQSTDVHPLVIERSEGSYVYDSNGKKYIDALAGLWCTALGGNEPRLVKAATEQLNKLPFYHSFWNRTTKPSLDLANDILSMFTAREMGKVFFTNSGSEANDSQVKLVWYYNNALGRPDKKKFIARSKSYHGSTLIAASLSGLPALHQKFDLPAPFVLHTDCPHYWRFRLPDETEEEFSTRLANNLENLVLKEGPETIAAFIAEPVMGAGGVILPPKTYFEKIQAVLKKYDILLIADEVITAFGRLGTMFGCDMYNIKPDLVSIAKALSSAYMPIGAILVSPEITDVIYSQSNKLGSFAHGFTYSGHPVSCAVAVETLKIYKERNIVEHVNKIAPRFQEGIKAFSGSPIVGEIRGLGLILGTEFVDNKSPNDPFPAEWGVGSIFGAECEKRGMLIRVAGDSIMLSPPLIMTPNEVEEIISKFGDALKATEERIGELKSRKN

SEQ ID NO: 841 - protein, 189 aa, Glycine max
  unsure (1)..(189): unsure at all Xaa locations
MDIRLMDLDSPLFNTLHRIMDLTEDAEKNLNAPTRTYVRDAKAMAATPADVKEYPNYYVFVIDMPGLKSGDIKVQVEDDNVLLISGERKREEDKEKEGAKYLRMERRVGKFMRKFTLPENANTDAISAXCQDXVLTCTXNKLPPXSPKAQXXXVXSINFFLPVSFFPFGGQGFFRFLGIFLKKKKPGPF

SEQ ID NO: 842 - protein, 110 aa, Glycine max
  unsure (1)..(110): unsure at all Xaa locations
MSGVWVFKNGVVRLVENPGGEAVEGSRGGRRKVLVHRASNEVITSYAGLXVFKNGVVRLVENHGSEPKVLVHTARTEIIIPYARDFNKFKPMHMYDIVVKNKNAFEVRDM

SEQ ID NO: 843 - protein, 428 aa, Erwinia carotovora subsp. atroseptica SCRI1043
MADKKATLTLEGKDPIELNVLSGTLGYDEIDIRPLGSKGYFTFDPGFTSTASCESKITYIDGDEGILLHRGFPIAQLAEKSNYLEVCYILLFGEPPTAEQYETFKTTVTRHTMIHEQITRLFHGFRRDSHPMAVLCGVTGALAAFYHDSLDISIERHREIAAYRLLSKMPTVAAMCYKYSLGQPFVYPKNNLSYAGNFLHMMFSTPCEEYVVNPVLERAMDRILILHADHEQNASTSTVRTAGSSGANPFACIAAGIASLWGPAHGGANEACLRMLEEISSVEHIPAFIERAKDKNDSFRLMGFGHRVYKNHDPRATVMRETCHEVLKELGRKDDLLEVAMELEHIALNDPYFIEKKLYPNVDFYSGIILKAMGIPSSMFTVIFAMARTVGWIAHWSEMHADGIKIARPRQLYTGYDKRDFASNLKHD

SEQ ID NO: 844 - protein, 299 aa, Neurospora crassa
MAPLSKTHKLNTGDEIPAVGLGTWQSKPGQVEKAVEAALRAGYTHIDTAYAYGNEKEVGQGIKASGVPREKIWLTTKLDNDWHKHVAEAIDTSLKNLDTPYVDLYLMHWPASLVKGNTKEVYNDWDFVDTWREMQKLVDTGKVKNIGVSNFGVKNLEKLLSAESTKIVPAVNQIELHPGNPSPHLVEYLRSKGIHASAYSPLGSSDSPLYKLNSLTKLAESKGKTVQQVLLRWGVQKGWSVLPKSVTEERIKANIDLEGWSLTDEEIAQIDEVHKENSFKVCGDDWLPVKIFFGAGDSD

SEQ ID NO: 845 - protein, 389 aa, Escherichia coli
  unsure (1)..(389): unsure at all Xaa locations
TLQNGKLNVPENPIIPYIEGDGIGVDVTPAMLKVVDAAVEKAYKGERKISWMEIYTGEKSTQVYGQDVWLPAETLDLIREYRVAIKGPLTTPVGGGIRSLNVALRQELDLYICLRPVRYYQGTPSPVKHPELTDMVIFRENSEDIYAGIEWKADSADAEKVIKFLREEMGVKKIRFPEHCGIGIKPCSEKGXXXXVGAAIEYAIANDRDSVTLVHKGNIMKFTEGAFKDWGYQLAREEFGGELIDGGPWLKVKNPNTGKEIVIKDVIADAFLQQILLRPAEYDVIACMNLNGDYISDALAAQVGGIGIAPGANIGDECALFEATHGTAPKYAGQDKVNPGSIILSAEMMLRHMGWTEAADLIVKGMEGAINAKTVTYDFERLMEGDKLL

SEQ ID NO: 846 - protein, 490 aa, Yersinia pestis biovar Medievalis str. 91001
MSRYGLQKLYINGAYTDSTSGDTFDAVNPANGECIAQLQAANAQDVDKAVAAAKQGQPVWAAMTAMERSRILRRAVDILRDRNDELAAIETADTGKPLSETRSVDIVTGADVLEYYAGLIPALEGQQIPLRGSAFVYTRREPLGVVAGIGAWNYPLQIALWKSAPALAAGNAMIFKPSEVTSLTALKLAGIYTEAGLPAGVFNVLTGSGDQVGQMLTEHPGIAKVSFTGGIASGKKVMANAAGSTLKDVTMELGGKSPLIIFADADLDKAADIAMMANFYSSGQVCTNGTRVFVPQALQAAFEQKIVERVKRIHIGDPSDERTNFGPLVSFQHRDSVMRYIDSGKREGATLLIGGYSLTEGALAHGAYVAPTVFTHCRDDMQIVREEIFGPVMSILSYQSEEEVIRRANDTEYGLAAGVVTQDLNRAHRVIHQLQAGICWINTWGESAPEMPVGGYKHSGVGRENGISTLEHYTQIKSIQVELGSFNSVF

SEQ ID NO: 847 - protein, 499 aa, ASPERGILLUS NIDULANS FGSC A4
MAQQYKLPFELDNPDLLHFDSYVGNAWVTAKSGARFEVVDPGTDLPWASCPTNSAEDVDSAVQIAHDAFEKFKKVNPRQRAQWLLKWDSLIREARSDLAKILTHETGKPIAESYGEIDYATGFTWWFAGEAERIQGSIAVPAAPNRRVFTVKQPIGVAAALVPWNFPIAMVLRKAGAALAAGCTMIVKPSPETPLTALVLAHLAEKAGFPAGVFNVLTTDLENTPPLSEALCKHPLVKKVTFTGSTRVGKLIASHCAHGLKKVTLELGGNCPFLVFDDADLDQALDQLMALKWRHAGQACITANRIYVQAGIYDKFAQLLKERTAKLVIGHGAKEGTTLGPLTTPRSIDKAISQVEDARRLGADVILGGSRVQGTQGYFFEPTILKNMTKDMLVSREESFAPIAALYRFETEEEAVKLANDTSMGLASYAFSKNIDRMWRLLENLEAGMIGMNTGNSSAAESPFGGIKESGYGKESGKEVAVNEYLITKTGTLTIDGQY

SEQ ID NO: 848 - protein, 389 aa, Escherichia coli
  unsure (1)..(389): unsure at all Xaa locations
TLQNGKLNVPENPIIPYIEGDGIGVDVTPAMLKVVDAAVEKAYKGERKISWMEIYTGEKSTQVYGQDVWLPAETLDLIREYRVAIKGPLTTPVGGGIRSLNVALRQELDLYICLRPVRYYQGTPSPVKHPELTDMVIFRENSEDIYAGIEWKADSADAEKVIKFLREEMGVKKIRFPEHCGIGIKPCSEKAXXXXXRAAIEYAIANDRDSVTLVHKGNIMKFTEGAFKDWGYQLAREEFGGELIDGGPWLKVKNPNTGKEIVIKDVIADAFLQQILLRPAEYDVIACMNLNGDYISDALAAQVGGIGIAPGANIGDECALFEATHGTAPKYAGQDKVNPGSIILSAEMMLRHMGWTEAADLIVKGMEGAINAKTVTYDFERLMEGAKLL

SEQ ID NO: 849 - protein, 389 aa, Escherichia coli
  unsure (1)..(389): unsure at all Xaa locations
TLQNGKLNVPENPIIPYIEGDGIGVDVTPAMLKVVDAAVEKAYKGERKISWMEIYTGEKSTQVYGQDVWLPAETLDLIREYRVAIKGPLTTPVGGGIRSLNVALRQELDLYICLRPVRYYQGTPSPVKHPELTDMVIFRENSEDIYAGIEWKADSADAEKVIKFLREEMGVKKIRFPEHCGIGIXXXXXXXXXXXVRAAIEYAFANDRDSVIXVHKGNIMKFTEGAFKDWGYQLAREEFGGELIDGGPWLKVKNPNTGKEIVIKDVIADAFLQQILLRPAEYDVIACMNLNGDYISDALAAQVGGIGIAPGANIGDECALFEATHGTAPKYAGQDKVNPGSIILSAEMMLRHMGWTEAADLIVKGMEGAINAKTVTYDFERLMEGAKLL

SEQ ID NO: 850 - protein, 389 aa, Escherichia coli
  unsure (1)..(389): unsure at all Xaa locations
TLQNGKLNVPENPIIPYIEGDGIGVDVTPAMLKVVDAAVEKAYKGERKISWMEIYTGEKSTQVYGQDVWLPAETLDLIREYRVAIKGPLTTPVGGGIRSLNVALRQELDLYICLRPVRYYQGTPSPVKHPELTDMVIFRENSEDIYAGIEWKADSADAEKVIKFLREEMGVKKIRFPEHXGIGIXXXXXXXXXXXXXXAIEYAIANDRDSVTLVHKGNIMKFTEGAFKDWGYQLAREEFGGELIDGGPWLKVKNPNTGKEIVIKDVIADAFLQQILLRPAEYDVIACMNLNGDYISDALAAQVGGIGIAPGANIGDECALFEATHGTAPKYAGQDKVNPGSIILSAEMMLRHMGWTEAADLIVKGMEGAINAKTVTYDFERLMEGAKLL

SEQ ID NO: 851 - protein, 429 aa, Sinorhizobium fredii
MSGTNATISIDGKTADLPVRSGSIGPDVVDIWSLYKQTKMFTYDPGFTSTASCESKITYIDGDEGVLLHRGYPIEQLADHGDFLEVCYLLLYGELPTKAQKDDFDYRVTHHTMIHEQMSRFFTGFRRDAHPMAVMCGCVGALSAFYHDSTDITDPHQRMVASLRMIAKMPTIAAMAYKYHIGQPFIYPKNDLDYASNFLRMCFAVPCEDYVVNPVLSRAMDRIFILHADHEQNASTSTVRLAGSSGANPFACIAAGIACLWGPAHGGANEAALNMLAEIGSVDRIPEFITRAKDKNDPFRLMGFGHRVYKNYDPRAKIMQKTTHEVLAELGHKDDPLLEVAMELERIALTDEYFIEKKLYPNIDFYSGITLKALGFPTTMFTVLFALARTVGWIAQWNEMIEDPEQRIGRPRQLYVGAPLRDYVPLSKR

SEQ ID NO: 852 - protein, 410 aa, Bacillus halodurans C-125
MATTREEALHIHRENQGKLESKSKVPVRNARDLSLAYSPGVAEPCKEIFEDVETVYEYTMKGNMVAVVSNGTAVLGLGNIGPEASLPVMEGKAVLFKSFAGVDAFPICLRTTDVDQIVETVKLLEPTFGGVNLEDIAAPSCFEIEERLKKETNIPVFHDDQHGTAIVTLAGLINALKLTGKRMSEIKVVANGAGAAGIAIIKLMQRMGVRDIIMCDSKGAIYDGRPYGMNDMKAEVAKWTNRDKIDGGLGDVLKGADVFIGVSVAGALTKEMIENMNDDPIIFAMANPVPEIMPEEAKAAGAKVIGTGRSDFPNQVNNVLAFPGIFRGALDARATHINEEMKVAAVHAIADLVAEEDLDPDYVIPAPFDPRVAPAVAAAVAKTAMETGVARRKVDPAEVEAKTKKLAIIE

SEQ ID NO: 853 - protein, 389 aa, Escherichia coli
  unsure (1)..(389): unsure at all Xaa locations
TLQNGKLNVPENPIIPYIEGDGIGVDVTPAMLKVVDAAVEKAYKGERKISWMEIYTGEKSTQVYGQDVWLPAETLDLIREYRVAIKGPLTTPVGGGIRSLNVALRQELDLYICLRPVRYYQGTPSPVKHPELTDMVIFRENSEDIYAGIEWKADSADAEKVIKFLREEMGVKKIRFPEHCGIGIXXXXXXXXXXXVRAAIEYAIANDRDSVTLVHKGNIMKFTEGAFKDWGYQLAREEFGGELIDGGPWLKVKNPNTGKEIVIKDVIADAFLQQILLRPAEYDVIACMNLNGDYISDALAAQVGGIGIAPGANIGDECALFEATHGTAPKYAGQDKVNPGSIILSAEMMLRHMGWTEAADLIVKGMEGAINAKTVTYDFERLMEGAKLL

SEQ ID NO: 854 - protein, 387 aa, Ceriporiopsis subvermispora
MAFTSLLALVALAAITRAAPTTICPDGTRVSNHVCCDFIPLAQALQSTLYMGDCGEDAHETIRLTFHDAIAISQSQGPSAGGGADGSMFIFPTVEPFFHANAGIDDSVNNLIPFLSKFPTITAGDLIQFAGTVALSNCPGAPQLEFLAGRPNATAPAVDGLIPEPQDNVTHILERFADAGGFTPFEVVSLLASHTVARADKVDLTIDAAPFDSTPFTFDTQIFLEVLLKGVGFPGTDNNTGEVESPLPLGNNKQGGNDTGEMRLQSDFALARDDRTACFWQGFVNEQEYMMSSFKAAMSKLAILGHNRNDLIDCSEVVPTPKPPVGKPATFPATTGPQDLQLTCKSERFPSLTIDHGARETLIPHCSNGGQDCPTVQFTGPAGEDDS

SEQ ID NO: 855 - protein, 319 aa, Mesorhizobium loti MAFF303099
MTADRHHGKYETRLDPALWAYIDRVDAWYPPEVIGLPIDKQRAVYDRMCRAFHQGRPPGVKASDGLVAAPGHGIPIRHYRPAGKAARAMVLYFHGGGFILGNLDSHDDICAEICAGTGFDVLSVDYRLAPEHVHPAAFDDAMAAFAWAAETSRLPLVLCGESAGGNLAAAVAQATRKHARTAVGQVLIYPGLGGDEGAGSYVEHAEAPLLSVGDIAFYRDVRSAKRQSPDDPTFSPLRDRHFSGLPPTVIITAECDPLSSDGETYRDRIAAAGGKAWWHEEKRLVHSFLRARTTVPAAAEAFSRIIAAIAALGRGEWPY

SEQ ID NO: 856 - protein, 155 aa, Archaeoglobus fulgidus DSM 4304
MSFVIWITGPSGAGKTTLANALYKKLESMGYRVELLDGDGVRRKLYPNLGFSEEERWMHNRVVVEMARRLSRNGIITIVSVVSPYRAWREYARKEIEKFVEVYPRCPLEVRMKRDPKGLYSKALRGEIKGLTGLDGEYEEPENPEVVVDTDKNDR

SEQ ID NO: 857 - protein, 165 aa, Staphylococcus aureus subsp. aureus MRSA252
MNNRNVYDIEVSDYKGLTYKLEAFRGKVILVVNTATECIYSEQLKKLETLFQKYKDRGFVVLSFPNNNFDNRQPGSNEEILKISREKFGVTFPVLAKISVNGNDEHPLFTHLKNEQPGIFGSPIKWNFTKFIIDRQGNVVNRFLPMEDPLDISANIEILLQESSS

SEQ ID NO: 858 - protein, 282 aa, Glycine max
  unsure (1)..(282): unsure at all Xaa locations
MGRGKIVIRRIDNSTSRQVTFSKRRNGLLKKAKELAILCDAEVGVMIFSSTGKLYDFASSSMKSVMDRYSKSKEEPCQLGSSASEIKFWQREAAMLRQQLHNLQESHRRKMMGEELSGLTVKELQNLENQLEISLHGVRMKKDQLLMGEIQELNRKGNLIHQENVELYKKVYGTQDDNETNRDSVLTNGLGIGEDLQXACESPAKPATATTLQGTFRNYKIGIAIALIHLQDVCFTIAIKKNGLRFKPQCLRINVAYRPQTNWLKDFNLKLLEKVKATLACM

SEQ ID NO: 859 - protein, 166 aa, Chloroflexus aurantiacus
MTIYQFSAQRIDGSTQSLADFRGQVLLIVNVASMCGLAPQYAGLEQLYRRYRDQGFTVLGFPSNQFMQEPRNNEAIAEFCERTYQVTFPLFAKIDVNGPNEHPLFTYLKTQLPGLFGSTAIKWNFTKFLVDRNGKPYRRYAPTDLPSQIEDDIVLLLRQQPKSLSA

SEQ ID NO: 860 - protein, 127 aa, Triticum aestivum
MGERVKGTVKWFNVTKGFGFISPEDGSEDLFVHQSAIKSDGYRSLNENDTVEFEVITGDDGRTKASDVTAPGGGALSGGSRPGDGGGDRGGRGGYGGGGYGGGGGGGGCFSCGESGHFSRECPNKAH

SEQ ID NO: 861 - protein, 483 aa, Burkholderia sp. RP007
MDTQLIIDNADVPATAAATFERRSPTTGELVTRAAAASVADAIAAADSAAAAYRSWSTTGPTERRRILLKAADLLEARTPEFSRVMALEVGASDLWAGVNVMLAANLFREAAALTTQIQGETIPTDKAGVLSMTVRQPVGVILSIAPWNGPVVLAARAIAYPLVCGNTVVFRASELSPKTHMLIVDVLRDAGLPPGVLNAVTNAPQDAPEVVDALIAHPAVRRINFTGSTRVGRVIAEKAARHLKRCLLELGGKAPLVVLDDADIDEAVKAAVFGAFLYQGQICMSTERIVVDEKIADTFVARFAARARELPVGDPATCGGCVVGPMIVRESGDRINAMINDAVNQGANVVAGGFADGAVMPATIVDRVTPAMRIYDEETFGPITTVVRAKDADDAVRIANDTAYGLSSAVFGRDVTRALSVAMRIEAGSCHINGSTVQNEAQAPYGGTKASGYGRFDGRAVIDEFTELKWITIEPTPQSYPF

SEQ ID NO: 862 - protein, 249 aa, Zea mays
MAAAARQRGTVKWFNDTKGFGFISPEDGSEDLFVHQSSIKSEGFRSLAEGEEVEFSVSEGDDGRTKAVDVTGPDGSFVRGGGGGGGGGGGYGSRGGGGSGGGGRSYGGSWGGGRRSGGGGGPGACYKCGEPGHMARDCPSADGGGGYGGGGYGGGGYGGGGGGGGCFKCGEPGHMARDCSSGGGGYGGGGGGGGGGGGCYNCGQAGHMARDCPSGGGGGGGRFGGGGGGGDRSCYNCGEAGHIARDCPT

SEQ ID NO: 863 - protein, 501 aa, Candida albicans
MDQQEAPIYYGRSVNKVYNQEFIIDSRFKIVKELGHGAYGIVCSAKYDNGSKKVPDSNNGNASSSANASFVAIKKITNIFSKNILCKRALRELKLLQFFRGHKNITCLYDLDIIPNPMTGEFNEIYLYEELMECDMHQIIRSGQPLSDQHYQSFIYQVLCGLNFIHSADVLHRDLKPGNLLVNADCELKICDFGLARGFSENPDENAGFMTEYVATRWYRAPEIMLSFTNYTKAIDIWSVGCILAELLGGKPLFRGKDYVDQLNQILMILGTPPESTLQRIGSHRAQNYVRSLPITRKASYEELFPDANPLALDLLERMLTLDPRERITVRDALNHKYLELWHDPKEEIECQVKFDFKSFETVDGLDEMKQLIMDEVQKFREFVRKPIEEQQRIQMQLHMQKREEQRQEEEEKELLEQQRQFPAQESMDISQTPYNNLETNIGTPQVEDDYPRPQELDEFTFSNLESSSSMNLFQDMAKPSGEEYIKLEEELGFGLDWCYV

SEQ ID NO: 864 - protein, 359 aa, Magnetococcus sp. MC-1
MAKKVLVLPGDGIGQEITAEAVKVLNWAIQNGADITLEEGLIGGTAYDATGTPLPAETITQAKAAQAVLLGAVGGTKWEPLDISVRPEKGLLGIRKALDLYCNLRPAAVYPQLADASTLKKEVVAGIDIMVVRELSSGIYFGQPRGVEDLGDGRKKGFNTLVYTTDEIERIARKAFEAARKRSNRVCSVDKANVLESTELWREVVSDLHKREYADVELSHMYVDNAAMQLIRNPRQFDVIVTTNMFGDILSDAASMLTGSIGMLPSASLGDQFALYEPIHGSAPDIAGKGIANPLATILSVAMMLRYSLELPQLADGVEAAVVTVLDQGLRTADIMQPGMTQVGTAQMGDAVLAALNNA

SEQ ID NO: 865 - protein, 193 aa, Methanococcus maripaludis S2
MAMNAKFRVPFRRRREGKTDFRQRLGLLLSGKPRLVARKSLNNVTAQLMAYDEKGDVVLVSAHSKELVKMGYKGHCGNLPAAYLTGLLLGAKAVKEDVKEAVLDKGLHRATKGAAIFAVLKGALDAGMDIPHGDKIIADEERLNGTHVKNYAESLKEDADAYKKQFSKYLEKGLNPEDLPEHVEELKEKILNL

SEQ ID NO: 866 - protein, 75 aa, Zea mays
FKLFLQNLVCRKNLVIDKSIHTAYVRAIRSAQHFIYIENQYFLGSSYAWPSYVNSGADNLIPIELALKIASEFLY

SEQ ID NO: 867 - protein, 357 aa, Sinorhizobium meliloti 1021
MPKMKAAIFVAPGRIVLDEKQIPDVGPLDALMRITTTTICGTDVHILRGEYPVARGLTIGHEPVGVIEKLGSAVRGYSEGQRVIAGAICTSGHSNAALCGCHAQDGPGTKHGWKGMGGWKFGNTIDGSQAEYVLVPDAMANLAPVPDGLADEQVLMCPDIMSTGFSGAESGAVRVGDAVAVFAQGPIGLCATAGARLIGATTIIAVESVPARMEMARRMGADDVVDFTVSDPTAEIMRLTDGRGVDVAIEALGRQETFEGALRVLRPGGTLSSLGVYSGDLRIPLDGFLAGLGDHTIRTTLCPGGKERMRRLMEVIASGRVDTRPLVTHRFKLDQIEEAYDLFANQRDGVLKVAINP

SEQ ID NO: 868 - protein, 115 aa, Zea mays
MAMAYKMATEGMDVKEECQRWFMEMKWKKVHRFVVYRIDDCRYAVFDFDFVSVDNCQKSKIFFIAWSPAASRIRAKILYATSKQGLRRLLDGVHYEVQATDPSEMGFDVIRGRAQ

SEQ ID NO: 869 - protein, 237 aa, Triticum aestivum
MKGGGDIEAGTAAPKGTTESPELRWALIRKIYVVLCLQLLLTAAVAVVFVKVSSIPRFFVSSYAGLGLYVFILVFPFVVLCPLHIYRQKHPINLLLLGVFTVAISFSVGLTCAFTSGKVILQAGILTIVVVLSLTAYTFWAARRGKDFSFLGPFLFASLMILLVFAFIQIFFPLGKLSHMIYGTLAALIFSGYIVYDTGSIIKRYKYDEYVWAAVTLYLDIINLFLGLLTLFRACDN

SEQ ID NO: 870 - protein, 461 aa, Treponema pallidum subsp. pallidum str. Nichols
MAHLPKEYDFSIESLGESKIPSPIYLSHTLGDFIPNYVSDNEYISHELSARLGETVGPFTHKNLMERAGPRQKIFFNPHHVHAGIVTCGGLCPGLNDVIRAIVRCLWGRYGVKRISGIRFGYKGLLPDYNFDILPLTPEVIDNCHKTGGSLLGTSRGGGNRVVDIVDGIERLNLHILFIIGGDGSQKGAKEIADEIKHRNLKISIIGIPKTVDNDISFVQKSFGFDTAIVKATEAVAAAHMEARSQINGIGLVKLMGRESGFIATYTAIASHETNFVLIPEVSFDLDGPNGLLAHLEKRIALRKHAVLVVAEGAGQDLMVNADGVPSGDSQGGSLRVSSGTDASGNKRLADIGLFLKEKIGVYFKEKRIHINLKYIDPSYLIRSAVAAPIDSIYCERLGNNAVHAAMCGKTKMIIGLVHNKFVHLPIDVVVCQRKHVNPEGSLWRDALDATGQPIVMKNII

SEQ ID NO: 871 - protein, 317 aa, Pasteurella multocida subsp. multocida str. Pm70
MTTQLDSLRNMTVVVADTGDIEAIKKYQPEDATTNPSLILSASALPQYASLIDEAIAYAKSKSNCSKQQLIDAEDKLAVNIGLEILKIVPGRISTEVDARLSYDTQATIEKAKKLIALYNEAGISNDRILIKIASTWQGIRAAEELEKQGINCNLTLLFSEAQARACAEAGVYLISPFVGRILDWYKANSDKKDYAPAEDPGVISVTKIYNYYKQHGYNTIVMGASFRNVGEITELAGCDRLTIAPALLKELQENNAPLERKLSYTGEVKAKPQPLTEAEFYWQHNSDAMAVEKLADGIRKFAADQEKLEAMLLTKF

SEQ ID NO: 872 - protein, 407 aa, Pseudomonas aeruginosa UCBPP-PA14
MIGFEIFLAIGMFTAIVLGLVAIILVARAKLVSSGDVTIQINGEHSLTVPAGGKLLQTLATNNVFLSSACGGGGTCAQCKCVVVEGGGEMLPTEESHFTRRQAKEGWRLSCQTPVKQDMQIRVPEEVFGVKKWECTVESNPNVATFIKELTLRLPDGESVDFRAGGYVQLECPPHVVEYKDFDIQPEYRGDWDKFNMWRYVSKVDETVIRAYSMANYPEEQGVVKFNIRIASPPPGSDLPPGQMSSWVFNLKPGDKVTVYGPFGEFFAKDTEAEMVFIGGGAGMAPMRSHIFDQLRRLKSNRKISFWYGARSLREAFYTEEYDQLQAENPNFQWHLALSDPQPEDNWTGLTGFIHNVLFENYLKDHPAPEDCEFYMCGPPMMNAAVIKMLTDLGVERENILLDDFGG

SEQ ID NO: 873 - protein, 162 aa, Azoarcus sp. EbN1
MSVPANVFDFETRRLNGAPMPLAEFRGKVLLLVNTASECGFTPQYEALQELHDRFAPRGFSVIGFPCNQFGGQEPGGAEEIAAFCAKNYGVSFPLSEKIDVNGDNAHPLYRHLTSVAPGILGTEAIKWNFTKFLVDRDGQVVARFAPATKPESIARDIEALL

SEQ ID NO: 874 - protein, 333 aa, Kineococcus radiotolerans SRS30216
MTWIDAPAHRPRTPAPVPRHLAGISVARARARALVERPGPFDDDAVLVRDTTVRGAAGPLPARTYRPRAGGRGVVLFLHGGGWALGDLDTDDAVCRRIAADAGTAVLGLGYRLAPEHPHPAALEDASAVLRALADRGAGGVGGPGEPLAVAGAEAGAQLAAVLALRSRAGSVPPLAHQVLLCPVLDSDLTRPSHREHGHGPELTVEDLAWFWRMHVPDRAARRRPDVSPLRVPDPTGLAPATLVVAGADPLRDEGLAHAGRLTAAGVDAHRVLAGDARHGFATRPGSPDADAALRAVTDRLRPALAPAARTAAGARVIDLRAPVRVAGARSAP

SEQ ID NO: 875 - protein, 192 aa, Triticum aestivum
MSLSSIARRLCCSRQSSTSRLSVVLARLHSTEAAKDTGAKRYKYPEVYDPYGPMPPASEKVVGLADRIAALPPEEIKQIAPALLLRLNQPAPQAISGQGFSMGSQGGAGAGAAKSEEKKAEKLVFDVKLEKFEAAAKIKIIKEIRTFTDLGLKDAKELVEKAPVILKQSLTKEEAEAIIAKIKAAGGVAVME

SEQ ID NO: 876 - protein, 344 aa, Ralstonia solanacearum
MRTWFNGYSDDSQIRTIVQLRPMPSLDPHVAQLLDLVARAKRPPLHHLAPADAKIAYEKSSPIVDIPPIPLDHVHDLTVPARDGYAIPVRTYAAREASWADPLPLLVYFHGGGFTVGSIRTHDALCRSLAAKSGAMVLSVDYRLGPDWKFPTAADDAFDVLQWVFDEAATIGADPARIAFGGDSAGGTLAAITAIEARNRGLAPVLQLLIYPGTTARETTPSHHAFAEGYLLTQAMIAWFFAQYLRSDADRDDWRFAPLDGGGQGADVRGVCPAWISVAGFDPIRDAGIGYADKLRAAGVPVTLKMYEGMIHDFFKLGRFVPAVEDAHYEAADALRRAFGTQAG

SEQ ID NO: 877 - protein, 181 aa, Triticum aestivum
  unsure (1)..(181): unsure at all Xaa locations
LDGVFAFVLYDTRDRTYVAARDAIGVNPLYIGWGSDGSVWMSSEMKALNEDCVRFEIFPPGHLYSSAAGGFRRWYTPHWVPRSRCPGTPXYQAAPSLREASEKAGYQRGHDRLPFRGLLSRRLDPPFVASVNKAPLRPRPTPPESGQTPSFVVRSRGPLTEGRTRVPDTRDTTRFLTKTDH

SEQ ID NO: 878 - protein, 347 aa, Haemophilus somnus 2336
MKAIVLESNRNMAICDIPKPLVEDPDDVLVKVHYSGLCGSDIPRIFHHGTHFYPIVLGHEFSATVEEVGSDVTELDKGDLVSCAPLQPCFKCDECNRGFYSLCKNYNFIGSRRFGANSEYLCVKKSNLVKLPQGSDTLQASFIEPITVGLHAIHLAGGCKGKNVVIVGAGTIGLLAAQSTKALGANSVSVIDINQEKLVLAKTLGADYVFNSMDLKADEILACLDGNRFDQLILETAGVPKTVELSIQIAGPRAQVVLVGTLHHDLNLDQKEFGLILRKELIIFGSWMNYSKPWPGVEWREAVNLIAENKICFEPLISSINTIEDYVEEVKSLDGKPMNGKLVLKFD

SEQ ID NO: 879 - protein, 177 aa, Glycine max
MASSMISSPAVTTVNRAGAGMVAPFTGLKSMAGFPTRKTNNDITSIASNGGRVQCMQVWPPVGKKKFETLSYLPDLDDAQLAKEVEYLLRKGWIPCLEFELEHGFVYREHNRSPGYYDGRYWTMWKLPMFGCTDASQVLKELQEAKTAYPNGFIRIIGFDNVRQVQCISFIAYKPPG

SEQ ID NO: 880 - protein, 474 aa, Glycine max
  unsure (1)..(474): unsure at all Xaa locations
WSPGWSNADKALTAFVNGALIEYWKNRRKADGGTTSFLSPHLHFGEVSVKKVFHLVRIKQVFWANEGNKAGEESVNLFLKSIGLREYSIDTSSPXDHEKPLLGHLTLYPWVENEGDFNAWRHGRTGYLLVDAGMRELWATGWLHDRIRVVVSSFFVKVLQLPWRWGMKYFWDTLLDADLESDALGWQYISGSLPDGREIDRIDNPQFEGYKFDPNGEYVRRWLPELSRLPTEWIHHPWNAPESVLQAAGIELGSNYPLPIVGIDAAKNRLLEALSKMWQQEAASRAAMENGTEEGLGDSSESVPAAFPQDTRMEETHEPVRNNPLPIARRYQDQMVPSITSSLLRVEEEETSSDLRNSAEESSRAEVPVTANAQQNAGVALNERMLQTTNRNTQTQYNTTMDLRNVADDSAVESSSGTRRERDGGLVPVWSPPASSYSEQFVGDENGITSSSSYLQRHPQSHQMLNWKQLPQTG

SEQ ID NO: 881 - protein, 111 aa, Glycine max
  unsure (1)..(111): unsure at all Xaa locations
MASSMISSPTVTTANRPGAGLVVQLIGLNSLVXFPTLKTHHDITFIASNGGRVQCMPVWPPVGKKKFETLSYLPDLDDAQLAKEVEYLLMKGWIPCLEFELEHSFLYREHN

SEQ ID NO: 882 - protein, 131 aa, Arabidopsis thaliana
MAYEERRSSILDSFSLSPLPYPVLLILAVASVFLLSSWYFSLEEAAESAEEQINFALLLIPLFLIVLVRWLSSMENPDALLGMFSSSRRTTYVSPGAGGDGGSSPWGVAALIVLLLVLLQYQSSFLEMWSG

SEQ ID NO: 883 - protein, 347 aa, Vibrio vulnificus CMCP6
MFFEWQGNEPATLQCVDKFFETDDTVSIRLADLTESLLFQFKPGQFVNLGVEIDGKMEFRAYSISSLAGEEYLQFTIKRVEGGKVSNFIIDSLLIGDTVQALAPAGEFNCVDHPPRELDGQGKALLISAGCGVTPVFAMAKHWLNNEMNVDIEFLHIARSAQETIYFDHLSTCQSAYAHFHLKLLLKDAQGTTHPQGRFNAQWLQDLVPDFATRTIYLCGPNQFMQDTQDYLQALGFDMNHFYHESFTPEKVEAMEASDEEVCISVPDFAQTINAKKGQLLADVLENAGLPLIVACRSGICGSCKCKVANGQVRSISQETLTTEEIAQGYVLACSSHIESDLEVCLH

SEQ ID NO: 884 - protein, 506 aa, ASPERGILLUS NIDULANS FGSC A4
MNGEIPSIAVFTSSRAVIGGRLTSATIVVSRTTGKVTAVFDSVIPASDFPDGTPYTDFSPYVLLPGLVDAHVHLNEPGRTEWEGFYTGTQAAAFGGVTTVIDMPLNAIPPTTTVENFKLKLKAAEGKCWVDVGFYGGIIPGNAGELKALVREGVRGFKGFLIDSGVDEFPAVSSEDVRKAMAELADEPTTLMFHAEMVPPKTPSELPEVMPEGAPEAYSTFLASRPSEYELCAVEEILSLSHLAPKLPLHIVHLSAMEAIPLLRKARAEGVPITAETCYHYLSLAAEEIRDGDTRHKCCPPIRSKSNQDALWAELDRHAEDGVIKTIVSDHSPCTPDLKLLPSHIPGNCSHGSSKHANTTPVVNEGSFLSAWGGISSVGLGLPILWTELSRRKGLTSSPDDTTTKQALQDIVHLCCANTAAQVGLHKSKGDLVPGYDADFCVFDDTAEWEVEPSTMLFRNKCSPYQGRTMRGMVRETWLRGEKIFNRDDGFTVKAPSGSLLLEKRV

SEQ ID NO: 885 - protein, 127 aa, Oryza sativa (japonica cultivar-group)
MRGVILLRYEEDAMAGHRSTAAATGGRLYGQVGVKRRVVEETAAAVEVGGGGGGYLGVEAAVLLGVVTATLLVLPLLLPPLPPPPPMLLLVPVAIFAVLLLLVLLPSDAKSIAAAGRPSSSSSSSYL

SEQ ID NO: 886 - protein, 297 aa, Bacillus anthracis str. A2012
MVESCSNKVVAYKKCNDERETTVHIPTTTLHNGVKMPMIGLGVYKAKEGDEVKQAVKTALEVGYRSIDTATVYENESGVGEAVRESGIPREDIFITTKVWNDDQGYEETLEAFEKSLKKLQMDYVDLYLIHWPIRGKYVDTYRALEKLYEEGKVRAIGVSNFHKHHLELLLPNCKIKPMVNQVELHPMLTQFELRNFCQGEQIQMEAWSPLMRGGEVFQHPIIQAIATKYEKTPAQVILRWDIQSGIVTIPKSVTPSRIQENFSIFDFSLTEEEMTEINTLNRNLHVGTNPDKYDTL

SEQ ID NO: 887 - protein, 305 aa, Thermobifida fusca
MTTPVDPAIAAVAAAAAAAPPLTSLTPEQARARVAAGNSSCANGPDLRSVRDIRLPVADGQIGARVYTPHAAPRATFVYLHGGGWVTGDLDYSDELCRFLADRLAWTVVSVDYRLAPEHPFPTPVNDAYAAVQHVAATIAANGPLGVGGDSAGGNLAAACTLRARDEHGPRLDFQVLLYPVTDHDFTRASYQTHATAFPIGVAEMRWFWDHYLPDPERRDLPLASPLRAELAGLPPAHIVVAGHDPLRDEGVAYAERLRAAGVKASLAEYPSLTHGFFRLTGVVPAARAAVDDLIDALQLLTEDH

SEQ ID NO: 888 - protein, 181 aa, Mesorhizobium loti MAFF303099
MKRDEGGDAADLTEIAGAIKWFDVAKGYGFILPDDGVSGDILLHVTCLRRDGFQTALEGARVVCLVKQGDRGLQAFRVLSMDVTTAVHPAEMQEQRTHVAVTPESGLERALVKWFNRTKGFGFLTRGEGTEDIFVHMETLRRYGITELRPGQVVLVRFGRGDKGLMAAEIHPDMGTLPVSH

SEQ ID NO: 889 - protein, 181 aa, Glycine max
MATVGRNVAAPLLFLNLIMYFIVLGFASWCLNRFINGQTYHPSFGGNGATMFFLTFSILAAVLGIVSKLLGGNHMRTWRSDSLASAGATSMVAWAVTALAFGLACKQIHLGGHRGWRLRVVEAFIIILTFTQLLYLILIHAGLYSSRYGPGYHDTDYGHGHGVGGTTGDPMHKPATAGTRV

SEQ ID NO: 890 - protein, 442 aa, Rhodobacter sphaeroides 2.4.1
MPGHIFGRSTRGSLPVAAEGEGCYILDTEGRRYLDGSGGAAVSCLGHSNAAVRAALHDQLDRLAFAHTGFFTSEPAERLADRLAAAAPEGIERVYLVSGGSEAVEAALKLARQYFMEVGQPGRHRVIARRQSYHGNTLGALAAGGNEWRRAQFAPLLVETSHVSPCYEYRGRAEDESLEAYGLRVADELEAEIQRLGPETVMAFVAEPVVGATAGAVPAVPGYLKRVREICDRHGVLLILDEVMCGMGRTGHLFACAEDGVAPDMITIAKGLGAGYQPIGALLVQGRIYDAIAAGSGFFQHGHTYMGHAMAAAAANAVLDEIEGRDLLQAVRRQGARLEALLQERLGQHPHVGDIRGRGLFRGIELVADRETKEPFDPARKLHARIKAEAFAGGLICYPMGGTLDGVRGDHILLAPPFIISDAELDELVDKLSGALDRALAA

SEQ ID NO: 891 - protein, 283 aa, Clostridium perfringens
MELWYTEEHTDKVRFSIKVDEQLYSGKSDFQRIDVFKSQEFGTFFTLDGLMMVTEKDEFIYHDMIVHVPMATNPNIKNVLVIGAGDGGTVRELTRYETIEKIDMVEIDKLVVDVCREYLPQTANKLDDPRVSLFFEDGLKFVRSVENKYDLIIVDSTDPFGPGEGLFTREFYGNCFKALKEDGILVNQHESPYYEEYARGMKRAHKRIKECFPVCRVYQAHIPTYPSGHWLFGFASKKYDPLNADIEKWNDLGLKTKYYNTDLHKGCFALPNYVKEMLENVDE

SEQ ID NO: 892 - protein, 78 aa, Triticum aestivum
  unsure (1)..(78): unsure at all Xaa locations
MGLWSFLEGVLLIANALAILNEDRFLXPRGWSFADARGVQGANTFKGQMIGLIYAAQYMRFPLILLNGITILVKFVSF

SEQ ID NO: 893 - protein, 292 aa, Leuconostoc mesenteroides subsp. mesenteroides ATCC 8293
MEYKTLASDIKMPVLGFGVFQVQEKGAAKQAVIDAIKTGYRLIDTAASYGNEREVGEGIAEAIETGLVTREELFVTSKMWVQDVSADKAAAAIQASLDRLKLDYLDLYLLHQPYNDVFGAWRAMEAAYKAGQLKAIGVSNFDIAQLTNLAEFSEIKPMLNQIEANPFQQNKKDAAYFAEYGVQVEAWAPFAEGKNGLFSNELLQGIADKYNKSIAQVVLRWLTQRDIIVVAKSVKPERMAQNLDVLDFKLTDEEMQEIATLDTNISQFFDHADPDMIKWMAGREISYDVTAD

SEQ ID NO: 894 - protein, 367 aa, Liquidambar styraciflua
MGSTSETKMSPSEAAAAEEEAFVFAMQLTSASVLPMVLKSAIELDVLEIMAKAGPGAHISTSDIASKLPTKNPDAAVMLDRMLRLLASYSVLTCSLRTLPDGKIERLYGLAPVCKFLTRNDDGVSIAALSLMNQDKVLMESWYHLTEAVLEGGIPFNKAYGMTAFEYHGTDPRFNTVFNNGMSNHSTITMKKILETYKGFEGLGSVVDVGGGTGAHLNMIIAKYPMIKGINFDLPHVIEEAPSYPGVEHVGGDMFVSVPKGDAIFMKWICHDWSDEHCLKFLKKCYEALPTNGKVILAECILPVAPDASLPTKAVVHIDVIMLAHNPGGKERTEKEFEALAKGAGFEGFRVALCAYNTWIIEFLKKI

SEQ ID NO: 895 - protein, 288 aa, Leuconostoc mesenteroides subsp. mesenteroides ATCC 8293
MNFKTLNNGAQMPQLGFGVFQIPAEETKQAVVDAINAGYRSIDTARVYGNEAETGQGVNEAIANAVVAREELFLTTKLWLSEFSYEAAKGAIDDSLKKLGTDYADLILLHQPYGDVYGAYKALAEAQADGKVKSIGISNFYPAKFVEFIKVIKTMNLPVPQIDQIEFHPYYQEKVARQLHDKYGVQIEAWGPLGRTANKYDTFHQPELVEIAAKHDKSVGQVVLRWIMQSNIITVAKSVNPSRMAENIDIFNFELDDDDMKKIETLDKNEPIFNHLDISTVERMYGWV

SEQ ID NO: 896 - protein, 275 aa, Fremyella diplosiphon
MENAANIQDDNQLTVEQAIANLQGEDLGLRVYAAWWLGRFRVDAPEANDLLIQALEDEDDRTIVGGYPLRRNAARALGKLGEKRAVPALIKALECSDFYVREAAAQSLEMLGDSSSIPRLIELLNDQVPGTLPAPEPPQLTQPFDAIIEALGTLGASDAIPIIQEFLEHTVPRIQYAAARAMYQLTQNHCRLQSVWRSLVQALAQDDLQLRRAVLSDLGAIGYLPAAEAIADTLAENSLKLISLKGLLEKQFQPTKPEDLSPGAIKVMQLMDALL

SEQ ID NO: 897 - protein, 568 aa, Glycine max
MAPSFAINGGFPGARVTPPSVTGRFAAVYSEVQNSRIDHELPLPSVLKNPFIIVDGPQSSAAGNPEEIAKLFPKLFGQPSAALVPSDSHAPHANRKLKIGVVLSGGQAPGGHNVISGIFDYLQDLAEGSTLYGFRGGPAGIMKCKYVELTSDYIYPYRNQGGFDMIRSGRDKIETPEQFKQAEETVQKLNLDGLVVIGGDDSNTNACLLAEHFRSKNMKTRVIGCPKTIDGDLKCKEVPTSFGFDTACKIYAEMIGNVMIDARSTGKYYHFVRLMGRAASHITLECALQTHPNITIIGEEVAAKKMTLKDVTDYIVNIISKRAEDNYNYGVILIPEGLIDFIPEVQHLIAELNEILANDAVDEGGLWKKKLTDQSLKLFEFLPKAIQEQLMLERDPHGNVQVAKIETEKMLIQMVETELEKRKQQGTYKGGFRGQSHFFGYEGRCGLPTNFDSTYCYALGYGAAALLQSGKTGLISSVGNLCAPVEEWTVGGTALTSLMDVERRHGKFKPVIKKAMVELEGAPFKKFASLRDEWALKNCYISPGPIQFTGPGSDAINHTLLLELGAQA

SEQ ID NO: 898 - protein, 488 aa, Geobacillus stearothermophilus
MKVQTEIKTYFNYINGNWVSSVSNNVEPSINPANRHDIVGYVQRSTLEDVNEAVTAANEAQTSWWKRSGVERGEYLYKAAHILEQCLQDIAETMTREMGKTLAEAKAETMRGVHILRYYAGEGARKIGDVIPSSDSEGLLFTTRVPLGVVGVISPWNFPVAIPIWKMAPALVYGNTVVLKPASETAVTAAKVIECFHEAGFPKGVVNMVCGSGSVVGQGIANHPDIDGVTFTGSNTVGKQVGRAAFERGAKYQLEMGGKNPVIVAKDADLDLAVEGTISGGLRSTGQKCTATSRVFIEREVYEPFKAKLLERVKQLKIGNGLDAETWMGPCASESQFHTVLSYIEKGKSEGAKLIYGGNRCLEGELANGFFVEPTIFEDVDLQMTIAREEIFGPVLALIQVDSIEEAIKLANDTEYGLSASIYTKNIGNALEFIKDIEAGLIKVNAETAGVEFQAPFGGMKQSSSHSREQGQAAIEFFTSIKTVFVKA

SEQ ID NO: 899 - protein, 287 aa, Listeria monocytogenes EGD-e
MTIQWFPGHMAKARREVTEKLKLVDVIFELVDARIPLSSSNPMLEEIIHQKRRVIILNKADTADEKTTKEWIDYFAEKGLPAVAVNAQEGKGLFKIEQAAEKLMAEKFDRLRSKGMKPRAIRAMILGIPNVGKSTLINRLAKKNIARTGNKPGVTKAQQWIKVGKTLELLDTPGILWPKFEDQEIGYKLALTGAIKDDLLQMEEIAGYGLRFLENHYPDRLQTWLKVETVSEDPIETLAFIAEKRGLLDRYNDPDYSRAAETVVREIRQQKLGRMSFDFPNWEDEVE

SEQ ID NO: 900 - protein, 72 aa, Glycine max
  unsure (1)..(72): unsure at all Xaa locations
PWYETTVXGXXXXXPFXGLKSMAXXPTRKTNNDITSIASNGGKSXNAWQVWPPVGQEEIEILSYLPDLMMHG

SEQ ID NO: 901 - protein, 101 aa, Rickettsia slovaca
GSSEYIPKYIAKAKDKNDPFRLMGFGHRVYKNYDPRAAVLKETCKEVLKELGQLDNNPLLQIAIELEAIALKDEYFIERKLYPNVDFYSGIIYKAMGIPSQ

SEQ ID NO: 902 - protein, 156 aa, Triticum aestivum
  unsure (1)..(156): unsure at all Xaa locations
MKTLLILTIIAVALTTTTANIQVDPSGQVQWPQQQQPFPQPQQPFSQQPQQIFPQPQQTFPHQPQQAFPQPQQTXFPHQPQQQFPQPQQPQQPFPQQPQQQFPQPQQPQQPCAQQPQQQFPQPQQPQQHVPRPQQPXLPFAKHQHHHFPQPQHPKH

SEQ ID NO: 903 - protein, 355 aa, Glomerella cingulata
MSRANPPNASGSRKISFNVSEQYDIQDVVGEGAYGVVCSAIHKPSGQKVAIKKITPFDHSMFCLRTLREMKLLRYFNHENIISILDIQKPRSYETFNEVYLIQELMETDMHRVIRTQDLSDDHCQYFIYQTLRALKAMHSANVLHRDLKPSNLLLNANCDLKVCDFGLARSAASQEDNSGFMTEYVATRWYRAPEIMLTFKEYTKAIDVWSVGCILAEMLSGKPLFPGKDYHHQLTLILDVLGTPTMEDYYGIKSRRAREYIRSLPFKKKVPFRTLFPKTSDLALDLLEKLLAFNPVKRITVEDALKHPYLEPYHDPDDEPTAPPIPEEFFDFDKHKDNLSKEQLKQLIYQEIMR

SEQ ID NO: 904 - protein, 507 aa, Petunia x hybrida
MDAKIGSIDTCKPTTNNVATLPTNNTVTISTHTPSTTIIPCNSTTDSTLGRHLARRLVQVGITDVFGVPGDFNLTLLDHLISEPNLEFIGCCNELNAGYAADGYARPRGVGACVVTFTVGGLSVLNAIAGAYSENLPLICIVGGPNSNDYGTSGVLHHTIGLPDFSQELRCFQTVTCYQAVVNNLEDAHEMIDTAISTALKESKPVYISISCNLPAIPHPTFSREPVPFSLSPRLSNQMGLEAAVEAAAEFLNKAVKPVVVGGPKLRVAKASDAFVELMDASGYAVAVMPSAKGMVPEHHPHFIGTYWGAVSTAFCAEIVESADAYLFAGPIFNDYSSVGYSLLLKKDKAIIVQPDRVTIGNGPAFGCVLMKDFLAALAKRLKHNPTAHENYRRIYVPEGHPLKCEPNEALRVNVLFEHIQRMVSADTAVIAETGDSWFNCQKLKLPEGCGYEFQMQYGSIGWSVGATLGYAQAARDKRVLAFIGDGSFQVTAQDISTMLRCGQRTI

SEQ ID NO: 905 - protein, 115 aa, Oryza sativa (indica cultivar-group)
MARAQLLLVALVAALLLAAQAMAAISCGQVNSAVSPCLSYARGGSGPSAACCSGVRNLNSAATTTADRRTACNCLKNVAGSISGLNAGNAASIPSKCGVSIPYTISPSVYCSSVN

SEQ ID NO: 906 - protein, 143 aa, Triticum aestivum
LDVPDGESGGAGATGGEKQGPTRAYVRDARAMAATPADVKELPGAYAFVVDVPGLGSGDIKVQVEDERVLVISGERRREEKEDARYLRMERRMGKLMRKFVLPENADTEKISAVCRDGVLTVSVQKLPPPEPKKPKTIQVQVA

SEQ ID NO: 907 - protein, 118 aa, Oryza sativa (indica cultivar-group)
MARAQLVLVALVAAALLLAGPHTTMAAISCGQVNSAVSPCLSYPRGGSGPSAACCSGVRNLNSAASTTADRRTACNCLKNVAGSISGLNAGNAASIPSKCGVSIPYTISPSIDCSSVN

SEQ ID NO: 908 - protein, 148 aa, Oryza sativa (japonica cultivar-group)
MEQGSERQDERPPLPCANGCGFFGSADTRGLCSKCYRQTVMSQASAPSAAAQSAEHDQVVLPAPEGVPVDEGAMPPPPPRHGAKTKSRCAACGRSVGLMGFECRCGAVFCGAHRYSDRHDCGYDYRGAGRDAIARANPVVRPDKVEKL

SEQ ID NO: 909 - protein, 348 aa, Listeria monocytogenes str. 1/2a F6854
MKALKLYGKRDLRYEEADMPTIEEPDDVILKVKTVGICGSDISRYSKLGPYVPGMVWGHEFSGEVIEVGSEVTDIEIGDRAAGCPALYCGECEYCKKGEFARCRKLTVIGARHPGAYAEYIKLPAENVVKIPDELDYEAAALVEPSAVVVHGFYHTKLQAGDDVVVVGSGNIGLLAIQWAKVFGARRVIAIDVDDKKLALAKEVGADVVINSLKEDPLEVVAAHTDGLNADLVVEAAGSPITSAQVFAYAKKGGGVVFLGIPYADVTIERFYFEKIVRSELTVWGSWNAISAPFPGKEWQTTIHFLANKQINIEPMITHRLSLAEGPEVFERIYERNEFFGKVLFFPE

SEQ ID NO: 910 - protein, 159 aa, Streptococcus mutans
YNETGNWLPNETLEIIKTHLLAIKGPLETPVGGGIRSLNVALRQELDLFACVRPVRYFKGVPSPLKHPEKTAITIFRENTEDIYAGIEWNAGTAEVQKVINFLQDDMQVKKIRFPKSSSIGIKPISIEGSQRLIRAAIEYALANNLTKVTLVHKGNIQK

SEQ ID NO: 911 - protein, 347 aa, Salmonella enterica subsp. enterica serovar Typhi Ty2
MKSVVIHAEGDVRVEERPLPQLQAEDDVLVKVVSSGLCGSDIPRIFAQGAHYYPITLGHEFSGYVESYGTGVTDMQPGDAVACVPLLPCFHCPQCERGYFSLCKQYQFVGSRSEGGNAEYVVVKRANLFRLPSDMPIEDGAFIEPITVGLHAFHLAQGCEGKNVIIVGAGTIGLLALQCARELGARSVTAIDINPQKLELAKALGATHTCNSREMTADDIQTALSDIQFDQLVLETAGTPQTVSLAIDITGPRAQLALVGTLHHDLTLTTRTFGLILRKELTLLGSWMNYSAPWPGEEWETAARLLAEKRLQLTPLIAHRGDAESFAEAVKALNGAPMQGKILLQLS

SEQ ID NO: 912 - protein, 116 aa, Oryza sativa (indica cultivar-group)
MARAQLVLVAVVAALLLAAPHAAVAITCGQVNSAVGPCLTYARGGAGPSAACCSGVRSLKAAASNTADRRTACNCLKNAARGIKGLNAGNAASIPSKCGVSVPYTISASIHCSRVS

SEQ ID NO: 913 - protein, 407 aa, Glycine max
MALNYPFLTYFILLLVTITRLIFTVGKTEQWKAPILPELDIDNISHKLHDDPETIQMASRDYGHLTHEFPLAVFRPSSIDDIVTLIKSSYNSFAPFDIAARGQGHSTHGQAMARDGIVVDMASLRKQRNGVAISVSKDPLMGHYADVGGEQLWIDVLHATLEYGLAPVSWTDYLYLTVGGTLSNAGISGQSFRYGPQISNVHEMDVITGKGEFVTCSSQKNLELFHAVLGGLGQFGVIARARIALEPAPKRVKWVRLLYSDFSAFTKDQERLISINGRKQKNALDFLEGMLLMNQGPINNWRSSFFPLSDHPRIASLITEHSILYCLEVAKYYDEQTELNVDKEIQVLLQGLAYIPGFYYEKNVSYVEFLNRVRSGELKLQSQGLWDVPHPWLNLFIPKSQILDFNS

SEQ ID NO: 914 - protein, 386 aa, Synechococcus elongatus PCC 7942
MTAVSEFRPGLEGVPATLSSISFVDGQRGVLEYRGISIEQLAQQSSFLETAYLLIWGHLPTQQELTEFEHEIRYHRRIKFRIRDMMKCFPDSGHPMDALQASAAALGLFYSRRALDDPEYIRAAVVRLLAKIPTMVAAFQLIRKGNDPIQPRDELDYAANFLYMLTEREPDPVAARIFDICLTLHAEHTINASTFSAMVTASTLTDPYAVVASAVGTLAGPLHGGANEEVLDMLEAIGSVENVEPYLDHCIATKTRIMGFGHRVYKVKDPRAVILQNLAEQLFDIFGHDPYYEIAVAVEKAAAERLSHKGIYPNVDFYSGLVYRKLGIPSDLFTPVFAIARVAGWLAHWKEQLNENRIFRPTQIYTGSHNLDYTPIADRDLAIESD

SEQ ID NO: 915 - protein, 364 aa, Lycopersicon esculentum
MAIENNDQSFFLDVLYCEEEEEKWGDLLEDEEGVIINPLLLSSEGTTKTNSLLLLPLLLLEQDLFWEDEELLSLFVKEKETRCCFESFGSDPFLCSARVDVVEWILKVNAHYDFSALTAILAINYLDRFLSSLQFQKDKPWMTQLAAVTCLSLAAKVEETQVPLLLDFQVEDAKYVFEAKTIQRMELLVLSSLKWRMNPVTPLSFLDHIIRRLGLKNNVHWEFLRRCESLLLSVMIDCRFVRYMPSVLATAIMLHVIHQIEPCNAIDYQNQLLGVLKISKENVNNCYELISEVSSKPITSHKRKYDENPSSPSGVIDPIYTSESSNDSWDLDLPSFKKSKVQEQQMKMSSSLSRVFVEAVGSPH

SEQ ID NO: 916 - protein, 201 aa, Arabidopsis thaliana
MSGGGDVNMSGGDRRKGTVKWFDTQKGFGFITPSDGGDDLFVHQSSIRSEGFRSLAAEESVEFDVEVDNSGRPKAIEVSGPDGAPVQGNSGGGGSSGGRGGFGGGGGRGGGRGGGSYGGGYGGRGSGGRGGGGGDNSCFKCGEPGHMARECSQGGGGYSGGGGGGRYGSGGGGGGGGGGLSCYSCGESGHFARDCTSGGAR

SEQ ID NO: 917 - protein, 249 aa, Triticum aestivum
GHYRKSFNKKTLVPVRNSREIFDPTFRVWGQTGLKGLETPRNLQGSASSPPKLPTTRSAPEFRARSISADAAPSTRTGNLAMAAASSATSVHDFTVKDASGKDVDLSVYKGKVLLIVNVASQCGLTNSNYTELSQLYPKYKDQGFEILAFPCNQFGGQEPGTNDEIVQFACTRFKAEYPIFDKVDVNGNNVSPLYKFLKSSKGGLFGDSIKWNFSKFLVDKEGRVVDRYAPTTSPLSIEKDIKKLLGSS

SEQ ID NO: 918 - protein, 327 aa, GIBBERELLA ZEAE PH-1
MAQFIPRQAFALPNSIPKTYYLGHHATAQSDMIKRLNTIHLILECRDLRLPLTTNNPILEHSLAGRERIVVFTKCDLTINKPEYVNALRKLYGDRFVLWNKESPDTTKALLRKVKEVARAIDPIAGMRAMIVGMPNVGKSSLLNTLRRSGLPQKLAKAAKTGGQPGITRKIGTSVRILETEGKDSRRGVGEGVFVLDTPGVFVPYVDNAETMIKIALVQGIKIGLVPAEVLVDYLLYRLNKLNPAFYKQYSKPTNSVEELLTSVAVKTAASVFLKDWRTGKLGKFMLEDLTDEAIEEHQQRMLNPPLSMNQAKKQQKEARAQERAGA

SEQ ID NO: 919 - protein, 228 aa, Nanoarchaeum equitans Kin4-M
MFDDCDIILEVMDARIPFPNKKIEKLNKIIIKVLNKADLVEAEELLSLYGDVYVSSRTRKGLRVLRNKIKEVAKNINKDKIIVCVAGFPNTGKSSLINALRGRHVAGTAPIPGKTKGIQLIKLSNKIYLKDTPGIFTLKDKELLTLIGSYSPEKLDNPIRVALKLIKLIFEDLQERFNIEAKDENEFLEKLSKKWRMPLRDTAVRLLSLWVNGKIKVKYPISITSSHH

SEQ ID NO: 920 - protein, 289 aa, Escherichia coli O157:H7
MEFSVLSNNLKMPMMGFGVFQVTDKNVCKQSVLNAIRTGYRLIDTAAVYGNEDAVGEAVREAISEGLCTREELFITSKLWVQDMLNQDTAAAGIEASLKKSGLEYFDLYLLHQAMRDYFSAWRALEDAYEEGKLKAIGVSNFYPHVLANFCETVRVKPMVNQVELHPYFAQPEALATMKYYNVQPEAWAPLGGGRHKPFENNLLQSIADAHQKSISQVILRWNIQRGVVVIPKSTHQQRIEENFAIWDFSLTEKEMAQISSLDLGYVGESVKHFNPEFVRGCLAVKIHD

SEQ ID NO: 921 - protein, 249 aa, Zea mays
RTPADPVGSPLSDNESGAAAAGGGGGCGSSVGYCGGGGGESPAKEQDRFLPIANVSRIMKRSLPANAKISKEAKETVQECVSEFISFVTGEASDKCQREKRKTINGDDLLWAMTTLGFEAYVAPLKSYLNRYREAEGEKAAVLGGGARHGEGGGAADDAGPLAAGGGAGDGVDRAGHDDDAHVGLMMGASSVGFGSGGGAAPSYYAAASRKAYGAGEGSKVMEFEGEEENVCVQSGRGSASLLHGAVQW

SEQ ID NO: 922 - protein, 426 aa, Nostoc sp. PCC 7120
MQHREFTGCIHTSCRLPISFIFMFNLNRRQFLLRSTLAIAATVSYDHVQAQKPKSPGTLPKGLPRRKVIVVGAGISGLVAAYELTAVGHDVTLLEASKRIGGRVLTLRGAFQGEDLLELGAARIPSNHHLTFGYIKHFGLKLSQFAPADGKYLTIKDGKRLLIPAKVLFQNQPQIRPQEIQKLTDGFDLLPKAFAQALTKEIKLDEPVARIVQTSNGVEVSCLSGQRYLGDYVLCTVPLTVLNQITFSPELSEEKKQAAAGGYNYRAATRGFVKFPNRFWERENLNGWGFFDDEELWHTTWDRPEKTGILHAYLKGEKGLEIDGFEGKTQQQKLLQHWEKILPGVSNYSVRSYFHSWTKDIWSKGGWAYPTDEQEKKLFPELGKSEGKIYFAGEHTSKTRGWLQGALESGLKAAQEIHFAGSTAPR

SEQ ID NO: 923 - protein, 331 aa, Methanosarcina acetivorans C2A
MKLAVIEGDGIGREVIPAAVEVLDAFGLELEKVSLELGYARWERTGSAISEEDIATIKGCDAVLFGAVTTVPDPSYKSVLLTIRKELDLYANVRPVKPLPGITGVTGRNDFDFIIVRENTEGLYSGIEEIGPDLSWTKRVVTRKGSERVAEYACKLAKQRKNKLTIVHKSNVLKSDKLFLDVCRQVASSHGVEYGDMLVDSMAYSLMMRPDKYDVVVTTNIFGDILSDMCAALVGSLGLVPSANIGEKYAFFEPVHGSAPDIAGKGIANPLAAILCVKMLLEWSGRGKEAALIDRAISYILEKKLITPDLGGVSTTAEVGQTVAKYVMQNL

SEQ ID NO: 924 - protein, 508 aa, Triticum aestivum
  unsure (1)..(508): unsure at all Xaa locations
MQSEIWLLWATLAAALLFYLTSAARRGGTGARQPRGPTPLPVLGNVLDLGGNLHHTLARLARVHGPVMKLKLGLVTIVVVSSRDAAREAYTRYDRHLAARAVPDAANAVGNSGRSMIWLPSSDPLWKTXLRGIVASHIFSPRGLAAARGVRERKVRDMVGYFRCHAGEELDVGQAVYGGVLNLXVSSAFFSVDVXVDVGSESASGLREXVEDIIAALTNPTLRIFPFLXRPLDLQGWRRWAXARYQKVFGIFXGIVDRRLANPXTSKGEHAHGDFLDSLLELVSAGKIGRDKVTVILFDVFAAGTDTMAITVEWAMAELLRHPHAMAKVRAEMADILGGKGTDTLEEPDAANLPYLQAVVKEVMRLHPVAPLMLPHQAAEDGVEIGGYAVPRGATVIFNVWAIMRDPAAWERPDEFVPERFLLDKAVDRAVEFRGKDYEFIPFGSGRRLCPGLPMAERVVPFVLASLLHAFEWRLPDGVSADEMDVTEKFTTVNTLAVPIRAVPVVVT

SEQ ID NO: 925 - protein, 513 aa, Zea mays
  unsure (1)..(513): unsure at all Xaa locations
MATCATDLAPLLGPAAANATGYLCSQFADTASAVDATYLLFSAYLVFAMQLGFAMLCAGSVRAKNTMNIMLTNVLDAAAGALFYYLFGFAFAFGTPSNGFIGRHFFGLQRLPRTGFDYDFFLYQWAFAIAAAGITSGSIAERTQFVAYLIYSAFLTGFVYPVVSHWFWSADGWAGASRTSGPLLFGSGVIDFAGSGVVHMVGGIAGFWGALVEGPRIGRFDHAGRSVALRGHSASLVVLGTFLLWFGWYGFNPGSFTTILKSYGPAGTVHGQWSAVGRTAVTTTLAGSVAALTTLFGKRLQAGHWNVVDVCNGLLGGFAAITAGCSVVEPWAAVVCGFVSAWVLIGANALAARLRFDDPLEAAQLHGGCGAWGVLFTGLFARQEYVEEIYGAGRPYGLLMGGGXGKLLAAQIVQIVVIAGWXVSCTMGPLFYALKRLDLLRISADDEMSGMDLTRHGGFAYEDPGDNAGVGEFTLKSAQNRVEPPAEQQPGVKFRNEFKNRDEVTCLPKKKKK

SEQ ID NO: 926 - protein, 120 aa, Lactobacillus johnsonii NCC 533
MALDTEKIIEDLKGASILELNDLVKAIEDEFGVSAAAPVAAAGAAGAGAEKTEFDVELTDVGQEKVKVIKVVRDITGLGLKDSKDLVDGAPKNVKEGVSEDEANDIKAKLEEVGATVTVK

SEQ ID NO: 927 - protein, 417 aa, Candida albicans
MMNIDQHHQLQQQHQQQMLQQQAQAQAQAQAQAQQQQQAAAAAAAANAAATTSSSSPRQVSFNVSDHYQILEIVGEGAYGIVCSAIHKPSQQKVAIKKIEPFERSMLCLRTLRELKLLKHFNHENIISILAIQRPINYESFNEIYLIQELMETDLHRVIRTQNLSDDHIQYFIYQTLRALKAMHSANVLHRDLKPSNLLLNSNCDLKICDFGLARSIASQEDNYGFMTEYVATRWYRAPEIMLTFQEYTTAIDVWSVGCILAEMLSGRPLFPGRDYHNQLWLIMEVLGTPNMEDYYNIKSKRAREYIRSLPFCKKIPFSELFANTNNNTSTSNTGGRTNINPLALDLLEKLLIFNPAKRITVEDALKHPYLQLYHDPNDEPISDKIPEDFFDFDKMKDQLTIEDLKKLLYEEIMKPL

SEQ ID NO: 928 - protein, 429 aa, Vibrio vulnificus YJ016
MDFIMDLAFDRQHIWHPYTSTLTPLTCYPVNSASGVYIKLEDGTTLIDGMSSWWSTIHGYNHPHLNQAAHRQIDQVSHVMFGGITHQPAINLCKKLLSLAPNNLEHVFLADSGSVAVEVSLKMALQYWHAKGDRRPKFLTLQHGYHGDTFAAMSVTDPDNSMHSLYKGFLPEHIFAKSPTGGFWDEWKPEDLTDFAQKIEQHHQELAAVILEPIVQGAGGMRIYHPEFLKGVRALCDQYGLLLIADEIATGFGRTGKLFACEHANIQPDILCVGKALTGGYMTLSATLTSKHVADTVCGGEAGCFMHGPTFMGNPLACAVATASLELIEQGQWQQQTKQIESLFSELLPKLDKYDLVKNTRWLGAIGVVETHRPVNMETIQALFVEQGVWIRPFGKLIYMMPPFIGEPAHIEQLVNAIETALQRAECFV

SEQ ID NO: 929 - protein, 482 aa, Pseudomonas fluorescens PfO-1
MNFPTTLDGLYINGQWSAGREHLRVINPATEALLTTVNGGDESAVHQAVTAATEAFKAWSKTTGAERASILRNIANGVRNGREHLMNLQSSNNGKPQFEAGIDVDDVIATFEYYAELAEGLDAKLDSNVPLPSDDFSARLRREPCGVVGLIVPWNFPMVTTAWKLAPALAAGCCVVLKPSEVTPLPELELATIIAESGLPKGVFNLVCGTGLAVGAPLSADPRIAKVSFTGSNAVGVQVMQRAAETVKGVSLELGGKSSLLILEDADLDLAVELACGGGFFNAGQMCSATSRVLVADELADEFLIRLKAHAEKIRVADPFDPEVEMGALVNQAQYQRVLGHIDRGLSAGAKLICGGNRPADLPRGYFLQPTIFTEVPLDSALWCEEIFGPVICVRSFATEAEAIALANDSQFGLVASVVTRNAETADRVANALQAGLVWLNAPQVIFPQTAWGGYKQSSIGRELGPWGLAAFQEIKHVIRAL

SEQ ID NO: 930 - protein, 454 aa, Oryza sativa (japonica cultivar-group)
MGNCFGSDDGEVEAVKVMARHALPQAAMARPVMVAIAQPNARVAMSPGRPPTGKLPSQATATSTGGGRSVAGGGGRTNAGGDASAEGRILEAPNLRIFTFAELRAATRNFKADTVLGEGGFGRVHKGWVDERTMSPARSGSGMAVAVKKLDPESLQGVQEWQSEVNFLGRLSHPNLVRLLGYCWEDKELLLVYEYMAQGSLENHLFRKGGSASPQQPLSWSLRLRIAIGAARGLAFLHSSEKHVIYRDFKASNILLDTQFHAKLSDFGLAKDGPAGGSSHVTTRVMGTYGYAAPEYVATGHLYVKSDVYGFGVVLLELLTGLRALDAGRPSGQHHLVDWAKPFLSDRRKLARLMDPRLEGQYSSRGAQRAAQLTLRCLAADHKNRPSMREVVAVLEEIESMSRGGSGGGAPGSASPRPAARGGGGGGAHGYGQSPRPGSDWAGPAAGHPSPRVR

SEQ ID NO: 931 - protein, 175 aa, Oryza sativa (indica cultivar-group)
MGPTVMASSATSVAPFQGLKSTAGLPVSRRSTNSGFGNVSNGGRIKCMQVWPIEGIKKFETLSYLPPLTVEDLLKQIEYLLRSKWVPCLEFSKVGFVYRENHRSPGYYDGRYWTMWKLPMFGCTDATQVLKELEDAKKAYPDAFVRIIGFDNVRQVQLISLIANKPPGRAEFGGN

SEQ ID NO: 932 - protein, 322 aa, Mycoplasma penetrans HF-2
MKKIAILTSGGDASTMNKCLSTFITYASKYNCEVVFVKNGYKGIYDNEFVKPDYTETKSWWSLPGTKIYSSRFPEILDEQVRKQMVDNLHKNSIDTLVVIGGDGSYKGARLLSKSGIKVIGLPGTIDNDIASTSYSIGFDTSLNAIVNSIKEIKSCMDSHANVAMIEIMGRHCIDLTVFAGIATEADIIITPESFYTPQQLLAKINEKRKTNSRGIIILYVELLLGTENIPTVEEYIKYIQANSKESVKKNILGYLQRGGNPTAMDMIRASLMTEHALKMISENQYNKIIGVDEFKVVSYDLETAINMKNPSRKDLIDKFFN

SEQ ID NO: 933 - protein, 122 aa, Triticum aestivum
HVDYACTPEEVQQHFNSCGTVNRVTILTDKFGQPKGFAYVEFVEAEAIQEAVKLSESELHGRQIKVAPKRTNVPGLKQPRGGRGFNPYGGHPYMRPYPPPFYNPYGGYGRAPRFRRPRRPFY

SEQ ID NO: 934 - protein, 334 aa, Bordetella pertussis Tohama I
MTTAALPYPLDPQIQRFVERMQADSAAHPRRDLVPVEQAHAISEAVRRPWAEGGPQMARTREIHVPTPHGPVRLRVYTPRAARPGPALLYVHGGGWVLFSLDTHDRLMREYAERAGLTVIGVDYTRAPEARYPRAIEEIVGVIDWLDAHGAELEVDRARLCIGGDSAGANLSVAACLTLRERGAAPLAGMVLNYGVYDANLFRDSTVKYGGGEYLLSTQQMVWFYWNYLRAGDDPRDPRISPVHADLRGLPPAFMAITELDLLHDTNQDMAARLREAGVDVQAKVYPGTVHSFLEAVSLAQVSVAAFDDTAAWLRAVLRPDAAAAAIHTGEHQP

SEQ ID NO: 935 - protein, 168 aa, Triticum aestivum
  unsure (1)..(168): unsure at all Xaa locations
DATAPVAGAEAVVAGAGEQAGISAVIPGWFSEISPMWPGEAHSLKVEKVLFQGKSDYQNVMVFQSSTYGKVLVLRRIIQVTERDDCAYQEMITTCPFAPSKDPKEVWLLGGGXGVLLXVQRHTPWDQIDICEMINGGNSQTIFPQPTVGLXPRVSLHIGDGFLKNLRR

SEQ ID NO: 936 - protein, 386 aa, Acidithiobacillus ferrooxidans
MAEPNFAPGLEGVAATQSSISNIDGAAGLLSYRGFAIADLAAHSSFEEVALLLLDGVLPGAADLERFDHGLRAHRQVKYNVREIMKFMPVTGHPMDMLHCAVASLGMFYPQQELSDAERGNTLHLDAMAMRIIARMPTIVAMWEQMRFGNDPISPRPDLSHAANFLYMLSGREPDPAHTKILDSCLILHAEHTINASTFSVLVTGSTLTNPYHVIGGAIGTLAGPLHGGANQKVVEMLEEISSVQQVGAYLDRKMANKEKIWGFGHRIYKTRDPRAVILKGMMEDMASHGNLRHSSLFEIAIEVERQATERLGAQGIHANVDFYSGVLYHEMGIKADLFTPIFAMARSAGWLAHWREQLADNRIFRPTQVYTGEQDRRYVPVAQRT

SEQ ID NO: 937 - protein, 288 aa, GIBBERELLA ZEAE PH-1
MASQPSLLAATAKLNNGLIIPRIQLGLYMMSTREATDSVRQGLLTGYRAFDCAQMYHNERQAGKAINDFLAGSENTSGLKREDIWYTSKLASCDTSYDIVRRSVKKSVEASGLGYIDLFLLHSPYGGKEARLTSWKALEDAVDAGEIRAAGVSNYGSAHIEELMASNPRIAPVINQIEVHPFNTQEDIRATCAKHNIAIEAYAPLARAERMDHPAILDMAKKYSVTPAQIFVKWGLQHDFITLPKSTKQKRMIENASVDGFEISESDMKTLDGLDEHLVTDWDPTDAP

SEQ ID NO: 938 - protein, 291 aa, Triticum aestivum
  unsure (1)..(291): unsure at all Xaa locations
MGGLSMEHPWAFAFGLLGNVISFSSLLAPIPTFYRIFKSKSTEGFQSVPYVVALFSAMLWIFYALVKTGEGLLISINAAGCVIETVYIVMYLVYADRKAKIFTAKIVVLLNIAGFGLIFLLTLFAFHGETRVVSLGWICVGFSVCVFVAPLSIIGRVIKTKSVEYMPFTLSLTLTLSAIVWFLYGLLIKDKYVALPNIXGFTFGVIQMVLYVFYMNKTPVASQVKEGKEAWKAPAEDHVVRDQRPARPTRARAPEVRPVTEMAAAVDVPRRCAAEAAATPGVDFARSVDVV

SEQ ID NO: 939 - protein, 125 aa, Methylococcus capsulatus str. Bath
MAVSKEDILETISNMTVMEIVDLISAMEEKFGVSAAAAVAVAPVAAGAAAPAVEEKTEFDVVMTSFGANKVNVIKAIREITGLGLKEAKDLVEGVPSTVKEGISKAEADDIKKKLEEAGAAVDVK

SEQ ID NO: 940 - protein, 162 aa, Triticum aestivum
  unsure (1)..(162): unsure at all Xaa locations
MSDSEEHHFESKADAGASKTYPQQAGTVRKNGFIVIKNRPCKVVEVSTSKTGXKHGHAKCHFVAIDIFNGKKLEDIVPSSHNCDIPHVNRTEYQLIDISXEDGFVSLLTSDGNTKDDLRLPTDETLWXQIKEGFESGKDLVVTVQSAMGEEQICALKDVGPK

SEQ ID NO: 941 - protein, 422 aa, Xenorhabdus nematophila
MRPSDIEFDLRHIWHPYTSMIRPFPAYPVVSATGVELVLSDGRKLIDGMSSWWAAIHGYNHPVLNEAAKSQIDKMSHVMFGGITHPPAVELCKQLVALTPDSLECVFLADSGSVAVEVALKMALQYWQARGEKRQRFLTLRHGYHGDTFGAMSVCDPDNSMHSLYNGYLPNHLFADAPTCQFDDEWQPEDIDSFKRLLRQYHAEITAVVLEPIVQGAGGMRIYHPEYLRQVRQLCDEHQILLIADEIATGFGRTGKLFACEHAQIEPDILCLGKALTGGYMTLSATLTTRHVAEIISQGEAGCFMHGPTFMGNPLACAVASASLKLLSESSWQQHIQSIETQLKTELLPLKIHHSVKDVRVLGAIGVVEMKQPVDVASLQRHFVQQGVWIRPFGRLIYLMPPYIIQSEQLSQLTTAIVDAIN

SEQ ID NO: 942 - protein, 215 aa, Desulfovibrio vulgaris subsp. vulgaris str. Hildenborough
MQFFIDTANLDEIREAARLGLVDGVTTNPTLMSREGHDWRDVAAAICREVDGPVSLEAVGNTADELVAMGLELVRFGPNVVVKVPMTTEGLKAVRILSGQGVDCNVTLVFSPMQALLAAKAGAAFVSPFVGRLDALSEDGMQLVAETLTIFRNYAMPTRVIVASIRHPMHVSRAALLGAHIATIPFGVLGQLAAHPLTDAGLAAFDRDWARLNGK

SEQ ID NO: 943 - protein, 437 aa, Thermosynechococcus elongatus BP-1
MAIAIQNAVICTPEGELRQQQVRLEGDRIAEVAETVTVNPSDTVIDATGLTLLPGVIDPQVHFREPGLEHKEDLFTASCACAKGGVTSFLEMPNTRPLTIDQASLENKLARAAAKCVVNYGFFIGATKDNLAVLNTVHPVCGIKIFMGSMHGPLLVDEEPILDRIFSEGKRLIAVHAEDQGRIRARREQFAGITDVAIHSQIQDEIAALNATQLAVTLSRKYERRLHILHLSTGIEVDFLREHKRPWITVEVTPQHLLLTTEAYAKIGSLAQMNPPLRTAVDNKKLWQGLLDGVIDFIATDHAPHTLEEKAQPYPQSPSGMPGVETSLPLMLTQAMAGRCTVPQVVRWMSTAVAAAYEIPNKGKIAPGYDADLVLVDLHTYRPVRREELLTKCGWSPFEGWSLTGWPVYTFVNGEVVFSQGRVNTSVRGRALKFGLG

SEQ ID NO: 944 - protein, 248 aa, Zea mays
  unsure (1)..(248): unsure at all Xaa locations
MARSRREGDAGGEERKLVLGKYELGRLLGQGTFAKVYYARDLSAAAGTGSTSVAIKVIDKARLRRMEGMMEQLRREISIMRMVRHPNVVGIXEVLASRSRVFVVMEYAXGGELFAKVARGRLTEDHARRYFQQLVAAVGFCHRRGVXAHRDLKPENLLLDEDGRLKVXDFGLAALPEQLRHDGLLHTQCGXPPAYVAPEVLRKRGYDGARADLWSXAAVVLYVLLCGFLPFQHDNCXKMYPEIFKAEY

SEQ ID NO: 945 - protein, 364 aa, Candidatus Blochmannia floridanus
MNNNTYHIAILPGDGIGPEIMQQAYKILNTVKNKFKINIITTEYKVGGNALDLEGSPLPKDTIKNCEKSNAILFGAVGGPKWNNINETSRPEFGALLTLRKHFNLFINLRPIYLPIELINLSPLKPEIISQGLDMICIRELIGGIYFGKPQGKSGIRSQEHAFDTAIYHRFEIERIAHFAFKLAQKRRKHVTSIDKANVLHTSMLWRKVVSEVASNYPNVHLQHLYVDNASMQLIRNPSAFDVILCPNLFGDILSDECAEINGSIGILPSASLNEHNFGLYEPAGGSAPDIAGKNIANPIAQILSTALLFRYSLKLNHVAITIEKAVYKALTLGYRTQDIAYNKQKSVNTDDMGDIIASLIYKL

SEQ ID NO: 946 - protein, 402 aa, Pseudomonas aeruginosa UCBPP-PA14
MDNLNSAVQVLIHGSNTLFILLGAVMVLAMHAGFAFLEVGTVRLKNQVNALSKILSDFAISALAYFFVGYWIAYGVTFFHPAAALTVDSGYALVKFFFLLTFAAAIPAIISGGIAERARFGPQLCATALIVAFVYPFFEGLVWNGNFGLQEWLKLEFGAPFHDFAGSVVVHALGGWLALAAVLLLGSRNGRYRDGKLVAMAPSSIPFLALGSWILIIGWFGFNVMSAQTLAGVSGLVAVNSLLAMVGGTMASLLIGRNDPGFLHNGPLAGLVAVCAGSDLMHPIGALATGLVAGALFVWAFTATQVRWKIDDVLGVWPLHGLCGVWGGIACGIFGQQALGGLGGVSLASQALGSLLGVTVAFAGGLLVYGLMKALLGIRLSQEEEYYGADLSIHKIGAISHE

SEQ ID NO: 947 - protein, 377 aa, Thermus thermophilus
MEVARGLEGVLFTESRMCYIDGQQGKLYYYGIPIQELAEKSSFEETTFLLLHGRLPRRQELEEFSAALARRRAMPAHLLESFKRYPVSAHPMSFLRTAVSEFGMLDPTEGDISREALYEKGLDLIAKFATIVAANKRLKEGKEPIPPREDLSHAANFLYMANGVEPSPEQARLMDAALILHAEHGFNASTFTAIAAFSTETDLYSAITAAVASLKGPRHGGANEAVMRMIQEIGTPERAREWVREKLAKKERIMGMGHRVYKAFDPRAGVLEKLARLVAEKHGHSKEYQILKIVEEEAGKVLNPRGIYPNVDFYSGVVYSDLGFSLEFFTPIFAVARISGWVGHILEYQELDNRLLRPGAKYVGELDVPYVPLEARE

SEQ ID NO: 948 - protein, 501 aa, Lotus corniculatus var. japonicus
MALPECSAANLAQLIGPNATDAAAVAGFICDQFTAVGQRFSDTAFAVDSTYLLFSAYLVFSMQLGFAMLCAGSVRAKNTMNIMLTNVLDAAAGGLFYYLFGFAFAFGAPSNGFIGRHFFGLKDVPTVAFDYSYFLYQWAFAIAAAGITSGSIAERTQFVAYLIYSSFLTGFVYPVVSHWFWSGDGWASATNTGNLLFGTGVIDFAGSGVVHMVGGVAGLWGALIEGPRIGRFDHAGRAVSLRGHSASLVVLGTFMLWFGWYGFNPGSFTKILSAYDSGNYYGQWSAIGRTAVTTTLAGCTAALTTLFGKRIISGHWNVTDVCNGLLGGFAAITAGCSVVEPWAAIVCGFVAAVVLIACNMLAEKVRYDDPLEAAQLHGGCGAWGIIFTALFAKEEYVNQVYPGKPGRPYGLFMGGGGKLLGAHVIQILVIIGWVSATMGPLFFILNKMKLLRISTEDELAGMDLTRHGGFAYAYEDDESHKPGIQLRKIEPNSSSTPSAES

SEQ ID NO: 949 - protein, 159 aa, Arabidopsis thaliana
MEKTDEERKKAQMLDARARNISHNVRCTECGSQSIEDSQADIAILLRQLIRNEIGAGKTDKEIYSKLEDEFGETVLYAPKFDLQTAALWLTPVIIAGGTAAGIVYQKHRLRKNVDIMALNLIRGVPLTPKERVTILDVLIPPSPPPQGVVSRLRRWLNR

SEQ ID NO: 950 - protein, 142 aa, Brassica napus
  unsure (1)..(142): unsure at all Xaa locations
MTTASVIIIGAGISGITAAKELAEKGVEDVLILEATDRIGGRIQKQSFGDVSVELGAGWIAGVGGKESNPVWELASRLNLRTCFSHYTNARYNIYDRSGEIFPTGFAADSYKKAVDSAIQKLKSLEAECDGKXAEEAPSSXK

SEQ ID NO: 951 - protein, 354 aa, Zea mays
HASAHASAHASAHASDSGRLGEDEARIYFHQLINAVDYCHSRGVYHRDLKPENLLLDSHGTLKVSDFGLSAFAPQTKEDGLLHTACGTPNYVAPEVLADKGYNGMAADVWSCGIILFVLMAGYLPFDDANLMRLYKLICHATFSCPPWFSSGARKFIKRILDPNPDTRIKIAEILEDEWFKKGYKPPHFEQGEDVNLDDVDAAFNDSEDRLVAEKREKPESMNAFALISRSQGFNLGNLFEKEMMGVVKRETSFTSQCTAQEIMSKIEDACGPLGFNVRKQNYKMKLKGDKSGRKGHLSVATEVFEVAPSLHMVELRKTGGDTLEFHNFYKNFSSELKDIVWKAESDASMKQTK

SEQ ID NO: 952 - protein, 360 aa, Synechococcus elongatus PCC 7942
MAVRKLGVLTSGGDCPGLNAVIRAIARHAVGNYGWELWGIAYATQGLLKRQAIALSPHHFDRQSLDPLLCSGGTILGSINRGDTLAHQAEILAGYQELGLDALIGIGGDGSLAILRQLAEAGRWQFIGIPKTIDNDVALTERAIGFDTAIHTVAEALLSLGSTAASHDRIMIAEVMGRQSGHLALQGGIAGGADVILLPEIPYRLLELCHYLQQLRDRWQRRYAVIAIAEGTHHPPEVTQGPGSLGEQLVQAITAQDPTLDARVTVLGHVQRGGNPVASDRLLATQMGYAAVERLAAGASGEMMAWQGGRVVSVPLEAVCLQSPTLVDPHSPLVDTAAGLGIFLGDRSLTPWRGSACPTH

SEQ ID NO: 953 - protein, 155 aa, Glycine max
VGRSLFGGLSNSSPGLFTTLHEMTCKNMFSQQQRTFIQMRTVLKVVDNSGAKKVMCIQALKGKKGARLGDTIIASVKEAHPNGKVKKGKVVYGVVVRAAMQKGRCDGSEVKFDDNAVVLVDKQGQPIGTRVFGPVPHELRQKKHVKILTLAGHNA

SEQ ID NO: 954 - protein, 449 aa, Bradyrhizobium japonicum USDA 110
MSTRTSRVLHRSLRETPPKAIGGEGIYLFAEDGRRVIDASGGAAVSCLGHQHPRVIAAMAKQASTLAYAHTAFFSSEPAEALAETLVGHEPGGLAYAYFVSGGSEAIEASIKLARQYFIERGEPQRQHFIARRQSYHGNTLGALAAGGNAWRRAPYAPLLSAAFSHVTPAFAYHEKHDGESDAQFVARLAAELEAEFQRLGPNSVAAFLAEPVVGATAGAVTAPDGYFRAVREICDRHGALLILDEVMCGMGRTGTTHAWEQEGVAPDIQAIAKGLGGGYQPIGAMLASGRIIDTIRSGSGAFQHGHTYLAHPLACAAALAVQDVIREDGLLDRVKERGKQLEQRLTERFGNHRHVGDIRGRGLFWAIELVADRASRTSFDPALKLNQKIKAEAFANGLGCYPGGGTVDGVRGDHVLLAPPYIASVAEIDLIVDKLGTAVDNVLRSVNH

SEQ ID NO: 955 - protein, 131 aa, Triticum aestivum
  unsure (1)..(131): unsure at all Xaa locations
MVLEAVMVVVDNSESSRNGDYTPTRFEAQSDAVSMIFTVITEANPESSVGLMSMXGKGPEVLVTLTTDYGKILEGLHRTKSKIRGEGHLATXIQVAGLTLKHRQNNXQRQLSSFYCNSIPEDEKTLQXGKK

SEQ ID NO: 956 - protein, 311 aa, Saccharomyces kudriavzevii IFO 1802
MLRTTVRTLRQRAFFHRSFVHVNLPELHSAIQDAQTTCYCQSINARLPSTTDPLDPQIKLPHRTPNYNKHVLLVSPGDKLAQPWKIAWNHNLDTNLNRPYNAIGKLRSYLRNSPGILINAVHLQNEFVPRPKEGDKWLFFFVIPDMKLYKIRETDLEEFASFLDEGVVQAPRLSFQDYLIGKAKVPQETQQVHHKNLTKFQGDIFLRDWSLVCGHYKRDAKCGEMGPDIIAAFQDEKLLTDNNLGLISHVGGHVFAGNVIFYKLFKAENALNKLDSLWFGKVYPHNLKLLCENLENGKIIDEMYRGGISMN

SEQ ID NO: 957 - protein, 128 aa, Brassica napus
  unsure (1)..(128): unsure at all Xaa locations
MAIATETQHXXREKEASSAAAQKRWNLSDFDIGKALGRGKFGHVYLAREKRSNHIVALKVLFKTQLQESQVEHQLRREVEIQSHLRHPNILRLYGYFYDQKRVYLILEYAARGELYKELQKCKYFSER

SEQ ID NO: 958 - protein, 117 aa, Nicotiana glauca
MAKVALLVVVCMAAVSVMLTPHADAAISCGQVVSSLTPCISYVTKGGAIPAPCCNGIESLNNQATSTPDRQTACNCIKSAAASIKGINFSLAGSLPGKCGVNLPYKISPSIDCSTVQ

SEQ ID NO: 959 - protein, 506 aa, Azotobacter vinelandii
MRYAHPGSEGAIVSYKVRYGNYIAGQFVPPVKGQYFTNSSPVTGEEFTEFPRSTAEDIEKALDAAHAAAGAWGRTSVQERAAVLLKIADRIEQNLEVLAVTETWDNGKPVRETLNADVPLSADHFRYYAGCIRAQEGSAGEINENTVAYHFHEPLGVVGQIIPWNFPLLMAAWKLAPALAAGNCIVLKPAEQTPLSITVLVELIGDLLPPGVLNIVQGFGREAGEALATSKRIAKIAFTGSTPVGAHILKCAAENIIPSTVELGGKSPNIFFEDIMQAEPAFIEKAAEGLVLAFFNQGEVCTCPSRALIQESIYDDFMKVVMKKVGQIKRGHPLDTDTMVGAQASSQQFEKILSYLEIARGEGAEVLTGGAAERLEGSLASGYYIQPTLLKGHNKMRVFQEEIFGPVVGVTTFKDEAEALAIANDTEFGLGAGLWTRDINRAYRMGRGIQAGRVWTNCYHLYPAHAAFGGYKKSGVGRETHKMMLDHYQQTKNLLVSYDINPLGFF

SEQ ID NO: 960 - protein, 117 aa, Nicotiana glauca
MAKVALLVVVCMVAVAVMLTPHADAAISCGQVVTSLTPCINYVRQGGAIPAACCSGIKTLNSQATSTPDRQTACNCIKSAARSISGINFGLASSLPGKCGVNLPYKISPSIDCSTVQ

SEQ ID NO: 961 - protein, 79 aa, Glycine max
NFLYMLDSFGNRSYKPNPRLTRVLDIIFILHAEHEMNCSTSAVRHLASSGVDVYTAIAGAVGALYGPLHGGANEVAISS

SEQ ID NO: 962 - protein, 236 aa, Zea mays
  unsure (1)..(236): unsure at all Xaa locations
SDSDHCHSARYYLKDAVLDGGIPFNKAYGMTAFEYHGTDPRFNRVFNEGMKNHSVIITKKLLDFYTGFEGVSTLVDVGGGXVGATLHAITSRHPHISGVNFDLPHVISEAPPFPGVRHVGGDMFASVPAGDAILMKWILHDWSDAHCATLLKNCYDALPEKGGKVIVVEXCVLPVSTEAVPKAQGVFHVDMIMLAHNPGGRERYEREFRDLAKAAGFSGFKATYIYANAWAIEFIK

SEQ ID NO: 963 - protein, 117 aa, Nicotiana glauca
MAKVALFVVVCMAAVAVMLTPHADAAIFCGRVVSSLIPCINYVIKGGAIPAPCCNGIKSLNNQATSTPDRQTACNCIKSAAASIKGINFSHAGSLPGKCGVNLPYKISPSIDCSTVQ

SEQ ID NO: 964 - protein, 102 aa, Glycine max
  unsure (1)..(102): unsure at all Xaa locations
EFGTRQLHSIFLHVRKVRRMAGVRDAKSILVRLEWFLNWVTFFVARSAPHILITAKLVKDAHKFXKGMELPLALCGQGGDDFAYTGLGIGLLKTLRERENPR

SEQ ID NO: 965 - protein, 112 aa, Nicotiana glauca
MAKVALLVVVCMVAVAVMLTPHADAAISCGQVVTSLTPCINYVRQGGDIPTACCSGIKTLNSQATSTPDRQTACNCIKSAAGSISGINFGLASSLPGKCGVNLPYKISPSID

SEQ ID NO: 966 - protein, 363 aa, Geobacter sulfurreducens PCA
MARKVGILTGGGDCPGLNAVIRGVVKSSIIRRGWEVVGIRDGFDGLLYNNRIVPLGLNEVRGILPRGGTILGTSNRGNPFSYPVEADGKTVLTDVSDEVVANIKKQGIDALVAVGGDGSLKIALELMNKGIPVVGVPKTIDNDLMETDVTFGYNTALETATDALDKLHSTAESHHRVMIMEVMGRYAGWIALESGISGGADVILIPEIPYDISAVCRAVDERRRRGSSFSIIVVAEGAFPRGGNRVVQKRADETNTIERLGGIGQYVARQLGDCLDMDVRVMVLGHLQRGGSPSTFDRCLGSRFGVAAIDLIEQEQYGRMVCLRGRDIKSVSIERAVRKLKLVNPGGQMVTAAEELGIVVGRR

SEQ ID NO: 967 - protein, 190 aa, Microbulbifer degradans 2-40
MKKSFIRAFANTAITAVAFSVSCAVYAGSLVLTSSDIGDGKHMAKTQEYTGFGCAGGNLSPQLSWRGAPEGTKAFALLVHDPDAPTGSGWWHWQVVNIPAGTTSLPAGAGAVNSKLLPKGASQNTNDYGEKAFGGACPPVGHGVHRYRFTLHALSKPLELPENASAALTGYMVKAHTIEEATIEALYKRD

SEQ ID NO: 968 - protein, 490 aa, Bacillus subtilis subsp. subtilis str. 168
MSQTLFIDGEWISAEKEQIRSIINPFNQEEIATVSEGGREDAIKAIAAARRAFDKGEWSSLSGLERGKIVLKIAELIRRDLEELAELESLDTGKTLEESKADMDDIANVFQYYAGLADKDGGEIISSPIPDSESKIIREPIGVCGQITPWNYPLLQASWKIAPALAAGNTIVMKPSEITPLTTIKVFKLMEEAGVPKGVANLVLGPGATVGDELAVNKDVDLISFTGGIETGKKIMRAASGNVKKIALELGGKNPNIVFKDADLEVAVDQALNAVFFHAGQVCSAGSRLLVEDAIHDQFLAELVKRAKRIKLGNGFHAETESGPLISAEHRAKVEKYVEIGIEEGAKLETGGKRPEDPELQNGFFYEPTIFSNCNSDMRIVQEEVFGPVLTVETFSSEEEVIELANDTIYGLAGAVWSKDIEKCERVAARLRMGTVWINDFHPYFAQAPWGGYKQSGFGRELGKIGLEEYTEVKHVYRNTKPAAVNWFNS

SEQ ID NO: 969 - protein, 157 aa, Griffithsia japonica
MSATKLSDLQGLKDIEGGAIDPSRFAGKVVFAMNVASACGYTKPGYELLKRLTDKFAPADFVAVAIPCNSFLWQESGSAEDVKTFALARADKLLVTEKAAVNGNHPHPIVALAKQAFPGRVMWNFDGRFVFDRNGVPVARFGNSAKPEEIEAAIANA

SEQ ID NO: 970 - protein, 323 aa, Mesoplasma florum L1
MKRIGVLTSGGDAPGMNNAIAGVVKAAEAQGIEVYGVRDGYKGLINGWFEKLDSKFALEIISKGGTVLGSARLPEFKEESVRQKAVDQLKAHDIEALVVIGGDGSYMGAQRLTEMGINCIGLPGTIDNDIVSSDYTIGFDTALNTVIESVEKVRDTMQSHNRAAVIEVMGNGCGDLVTYAAIATQAEIFSPSESKLTVEQICEQAKKFAEANHRSLIILISEKQLDANELAKKVEEASGYVTRATILGHVQRGGRPSGMDRYLAFTAAIYAVEKLIEGKGGLYIGLSENKLVARDIESTLNMPKPDKTEFIEKIRLLNAKISK

SEQ ID NO: 971 - protein, 278 aa, Glycine max
  unsure (1)..(278): unsure at all Xaa locations
MVSSKPSGFYEQRSFPSIKILILILLNSILHKANSGCSNSVSNSLVPFLSHEILSSLQTLPLDGHFSLRDNEDAAKDFGNIHHFPPLAVLYPKTVSDISLTIKHVFEMGFAAQLKIAARGHGHSLQGQAQVHGGLVINMESLQGPEMKVHNGELPYVDVSGGELWINILHETLKLGLAPKSWTDYLHLTVGGTLSNAGISGQAFKHGPQINNIFQLEVITGKGXVVTCSGNRNADLFXGVLGGLGQFGIITRARISLEPAPKMVKWIRVLYFRXLYIT

SEQ ID NO: 972 - protein, 508 aa, Bifidobacterium longum NCC2705
MKNKVQLITYADRLGDGTLSSMTDILRTRFDGVYDGVHILPFFTPFDGADAGFDPIDHTKVDERLGSWDDVAELSKTHNIMVDAIVNHMSWESKQFQDVLEKGEESEYYPMFLTMSSVFPNGATEEDLAGIYRPRPGLPFTHYKFAGKTRLVWVSFTPQQVDIDTDSDEGWEYLMSIFDQMAASHVSYIRLDAVGYGAKEASTSCFMTPKTFKLISRLREEGVKRGLEILIEVHSYYKKQVEIASKVDRVYDFALPPLLLHSLFTGHVEPVAHWTEIRPNNAVTVLDTHDGIGVIDIGSDQLDRSLKGLVPDEDVDNLVNTIHANTHGESQAATGAAASNLDLYQVNSTYYSALGCNDQHYLAARAVQFFLPGVPQVYYVGALAGRNDMELLRRTNNGRDINRHYYSTAEIDENLERPVVKALNALAKFRNELSAFDGEFSYEVDGDTSITFRWTAADGASTAALTFEPGRGLGTDNATPVASLAWSDAAGDHETHDLLANPPIADID

SEQ ID NO: 973 - protein, 217 aa, Aquifex aeolicus VF5
MKFFLDTANVEEIKKAMEWGILDGVTTNPTLISKTGRPFKEVVKEILELVDGPVSLETVSLDAEGMIREGRMLAELGENVVVKIPMTPEGLKAVIALESEGIPTNVTLVFSPTQALLAAKAGASYVSPFVGRLDDISGEGMKLIEEIKTIFSNYEFDTEIIVASVRHPMHVLESALIGADICTMPFKVMEQLFKHPLTDIGLERFLKDWEKVPEKPF

SEQ ID NO: 974 - protein, 307 aa, Nanoarchaeum equitans Kin4-M
MKPVRDLNVNKNTTIEELIKQFSSIGGFQAQELYRGYEILKEMFDNAEYKILSFPADIIATGIRGIIKELIKRKMFDLVITTCGTLDHDLARLEKDYYLGYFEADDIELREKNIFRLGNIFIPEENYGLAIENILKKALPYIYNKKKELSTYEFVWLLGEYLENHPKKEESIIYWAYKNRIPIIIPGITDGAVGTQILLFRQEHRDFNVNVWLDEEFLLNQFFGDKNIGALMLGGGISKHHTIWWAQFSNGLKYAVYVTSAVELDGSLSGARTREAISWGKIDKKAKHVTIWGDVTIILPLLVGPFL

SEQ ID NO: 975 - protein, 142 aa, Triticum aestivum
  unsure (1)..(142): unsure at all Xaa locations
MAPAVMASSATTVAPFQGLKSTAGLPVGRRSSGSLSSVSNGGRIRCMQVWPIEGIKNSETLSYLPPLSTGGLPGNRSDYLDSAQKWXPCLRXNKFGFLFPLXNXPPGYYDGXRYWDMLXLPXFRXTGPTQVLNXVEESKKXT

SEQ ID NO: 976 - protein, 484 aa, Escherichia coli
MSDMEPKTKKQRSLYIPYAGPVLLEFPLLNKGSAFSMEERRNFNLLGLLPEVVETIEEQAERAWIQYQGFKTEIDKHIYLRNIQDTNETLFYRLVNNHLDEMMPVIYTPTVGAACERFSEIYRRSRGVFISYQNRHNMDDILQNVPNHNIKVIVVTDGERILGLGDQGIGGMGIPIGKLSLYTACGGISPAYTLPVVLDVGTNNQQLLNDPLYMGWRNPRITDDEYYEFVDEFIQAVKQRWPDVLLQFEDFAQKNAMPLLNRYRNEICSFNDDIQGTAAVTVGTLIAASRAAGGQLSEKKIVFLGAGSAGCGIAEMIISQTQREGLSEEAARQKVFMVDRFGLLTDKMPNLLPFQTKLVQKRENLSDWDTDSDVLSLLDVVRNVKPDILIGVSGQTGLFTEEIIREMHKHCPRPIVMPLSNPTSRVEATPQDIIAENKPPFSVFRDKFITMPGGLDYSRAIVVASVKEAPIGIEVIPAHVTEYL

SEQ ID NO: 977 - protein, 481 aa, Escherichia coli
MEPKTKKQRSLYIPYAGPVLLEFPLLNKGSAFSMEERRNFNLLGLLPEVVETIEEQAERAWIQYQGFKTEIDKHIYLRNIQDTNETLFYRLVNNHLDEMMPVIYTPTVGAACERFSEIYRRSRGVFISYQNRHNMDDILQNVPNHNIKVIVVTDGERILGLGDQGIGGMGIPIGKLSLYTACGGISPAYTLPVVLDVGTNNQQLLNDPLYMGWRNPRITDDEYYEFVDEFIQAVKQRWPDVLLQFEDFAQKNAMPLLNRYRNEICSFNDDIQGTAAVTVGTLIAASRAAGGQLSEKKIVFLGAGSAGCGIAEMIISQTQREGLSEEAARQKVFMVDRFGLLTDKMPNLLPFQTKLVQKRENLSDWDTDSDVLSLLDVVRNVKPDILIGVSGQTGLFTEEIIREMHKHCPRPIVMPLSNPTSRVEATPQDIIAENKPPFSVFRDKFITMPGGLDYSRAIVVASVKEAPIGIEVIPAHVTEYL

SEQ ID NO: 978 - protein, 324 aa, Triticum aestivum
  unsure (1)..(324): unsure at all Xaa locations
MKTLFILTILAMATTIATGNMQVDPSGQVQWPQQQPFRQPQQPFYQQPQQPFLQPQQAFPQQPQQPFPQTQQPQQPFPQQPQQPFPQTQQPQQPFPQQPQQPFPQQPQQPFPQTQQPQQPFPQQPQQPFPQTQQPQQPFPQFQQPHQPFPQPQQQFPQPQQPQQSFPQQQRPFIQPSLQQRLNPCKNILLQQCKPASLVSSLWSIIWXPQSDCQVMQQQCCQELAQIPQQLQCAAIHXVVAFYHRASSKQQQQQQQQQQQQQRDCISCCQLSQQQQLGQGTXVQGQXIIQXPQQLSXQLGGIRSMGGCXLLPTMXNXVXPTXXS

SEQ ID NO: 979 - protein, 448 aa, Escherichia coli
MEERRNFNLLGLLPEVVETIEEQAERAWIQYQGFKTEIDKHIYLRNIQDTNETLFYRLVNNHLDEMMPVIYTPTVGAACERFSEIYRRSRGVFISYQNRHNMDDILQNVPNHNIKVIVVTDGERILGLGDQGIGGMGIPIGKLSLYTACGGISPAYTLPVVLDVGTNNQQLLNDPLYMGWRNPRITDDEYYEFVDEFIQAVKQRWPDVLLQFEDFAQKNAMPLLNRYRNEICSFNDDIQGTAAVTVGTLIAASRAAGGQLSEKKIVFLGAGSAGCGIAEMIISQTQREGLSEEAARQKVFMVDRFGLLTDKMPNLLPFQTKLVQKRENLSDWDTDSDVLSLLDVVRNVKPDILIGVSGQTGLFTEEIIREMHKHCPRPIVMPLSNPTSRVEATPQDIIAENKPPFSVFRDKFITMPGGLDYSRAIVVASVKEAPIGIEVIPAHVTEYL

SEQ ID NO: 980 - protein, 243 aa, Zea mays
MDWDAPALTSFVADLSFRHLCCYGAGIAGNAFAFVLFVSPLPTFKRIVRNGSTEQFSCTPYIYSLLNCLICMWYGLPFVSYGVVLVATVNSIGAVFQLAYTAVFIAFADAKQRLKVSALLAAVFLVFGLIVFVSLALLDHKARQVFVGYLSVASLVCMFASPMSIVNLVIRTKSVEYMPFYLSLSMFLMSASFVIYGVLLGDGFIYIPNGIGTILGIVQLLLYAYIRKGSSEEAKLPLLITHT

SEQ ID NO: 981 - protein, 213 aa, Glycine max
MALEVAVKAAVGAPNVLGDCPFSQRVLLTLEEKKIPYKLHLIDLSNKPEWFLGVNPEGKVPVVLFDGKWVADSDVIVGILEEKYPEPSLITPPEFASVGSKIFGSFVSFLKSKDTNDGTEQALVAELSALDEHLKTHGPYIAGEKVTAVDLSLAPKLYHLVVALGHFKNWNIPESLVHVHNYTKLLFSRESFEKTKPPKEEYVIAGWAPKVNA

SEQ ID NO: 982 - protein, 122 aa, Huperzia lucidula
MIQPQTYLNVADNSGAKKPMCIRILKASNRKYANTGNVIVAVVKEAVPNMPLRKSEIVRAVVVRTCKELKRNNGMIIQFDDNAAVIINQEGNPRGTRVFGPVARESREFNFTKIVSLAPEVL

SEQ ID NO: 983 - protein, 125 aa, Thermus thermophilus HB27
MALDIERIKEELSQATVLELKQLIDALKEAWGVTAAAPVAVAAAPAAGAAAAPAEEKTEFDVILKEAGAKKLEVIKELRAITGLGLKEAKDLAEKGGPVKEGVSKQEAEEIKKKLEAVGAVVELK

SEQ ID NO: 984 - protein, 175 aa, Glycine max
MEAVGSRLSRASSRYGAPTVFSGPVRKWKKKWVHVTPSSLPNNSSHSHTNNSTTTSSASSRLLLRRWTPATVDDAAGAVSDEPPRRKFRYTPVVVLEEQKKMNVVKAEHEPTIETDQLAARKTNVTHEMQGKLNMNEMLEETKDSNIGNLDLGSDFQSNTGGNSQNSDAQLENSM

SEQ ID NO: 985 - protein, 148 aa, Brassica napus
MAGGTALTPTSVGSKSLLPLRNHEAAERVNNNNNNNSLKALPKAVQPVSSIDGGMVKRPRGRPAGSKNKPKPPIIVTHDSPNSLRAHAVEISSGNDICEALSDYARRKQRGLCILSANGCVTNVTLRQPASSGAIVTLHGRFEILSLL

SEQ ID NO: 986 - protein, 247 aa, Zea mays
  unsure (1)..(247): unsure at all Xaa locations
MYRAKRAALSPKVKRRVGKYELGRXIGEGTFAKVRFAKNTENGEPVAIKILDKEKVKRHRLVEQIKREICIMKLVRHPNVVRLFEVMGSKARIFIVLEYVTGGELFEIIATNGRLKEDEARKYFQQLINAVDYCXXRGVYHRDLKLENLLLDAAGNLKVSDFXGLSALTEQVKXDGLLHTTCGTPNYVAPEVIEDGGYDGATADIWSCGVILFVLLAGYLPFEDDNIIALYKKISEAQFSCPSWFSR

SEQ ID NO: 987 - protein, 506 aa, Crocus sativus
MVSTGCSGNGAKGTNGGIVVPEIKFTKLFINGEFVDSVSGSTFETRDPRNGDVIANIAEGDKEDVDLAVKAAREAFDHGKWPRMSGYERGRIMMKFADLIEAFIEELAALDTLDAGKLLSMGKAVDIPAAVHIIRYYAGAADKIHGYTLKLSSELQGYTLKEPIGVVGVIIPWNFPTTMFFLKVSPALAAGCTMVVKPAEQTPLSALYYAHLAKLAGVPDGVINVVPGFGPTAGAALSSHMDVDSVAFTGSAEIGRAIMESAAKSNLKNVSPELGGKSPMIVFDDADVDMAVSLNSLAVFFNKGEVCVAGSRVYVQEGIYDEFVKRAVEAARSWKVGDPFDQSRNMGPQVDKDQFESVLKYIEHGKSEGATLLTGGKPAADKGYYIEPTIFVDVTEDMKIAQEEIFGPVMSLMKFKTVEEGIDCANNTKYGLAAGILSQDLDLINTVSRSIKAGIIWVNCYFGFDLDCPYGGYKMSGNCRESGMDALDNYLQTKSVVMPLHNSPWL

SEQ ID NO: 988 - protein, 576 aa, Triticum aestivum
LLPGGPAAGGGVEDKYGEDRATEELPVTPWAFSVASGYTLLRDPHHNKGLAFTERERDAHYLRGLLPPGVVSQDLQVKKIMHNLRQYKVPLQRYVAMMDLQERNERLFYKLLIDNVEELLPVVYTPTVGEACQKYGSIFRRPQGLYVSLRDKGKVIDVLRNWPERNIQVIVVTDGERILGLGDLGCQGMGIPVGKLSLYTALGGVRPSACLPITIDVGTNNEQLLNDEFYIGLRQRRATGEEYHELMEEFMDAVKQIYGEKVLIQFEDFANHNAFDLLAKYSKSHLVFNDDIQGTASVVLAGLLSSLKVVGGTLAEHTYLFLGAGEAGTGIAELIALEISKQTNAPIEECRKKVFLVDSKGLIVSSRKNSLQPFKTSWAHEREPVTTLLDAIKSIRPTVLIGTSGVGRAFTKEVIEAMASFNERPVIFSLSNPTSHSECTAEEAYKWTQGRAVFASGSPFDPVEYDGKIRVPGQANNAYIFPGFGLGVVISGAIRVHEDMLLAASETLAAQATQENFDKGSIFPPFTNIRKISALIAASVAAKAYELGLATRLPRPRDLEKYAESCMYTPVYRSYR

SEQ ID NO: 989 - protein, 391 aa, Bordetella pertussis Tohama I
MTVRTVRIAGGRLIDPASGADARADLYLADGRIAAIGQAPAGFQAQQHIDARGLAVLPGLVDLSARVHGAGLAPLACEMQAALAGGVTRLVVPPDTDPPLDEPGRVEMLRHRAHQAGQAQLHPLGALTEGLRGERLSEMAALAEAGCVAFSQAGLPVADTRVLWRAMQYARTFGLALWLRPLDPWMGRDGVAAAGAYASRLGLAEVPVQAETLALHTIFELQRATGARVHLMRLSSAAGVALVRAARREGLPLTCDVAAHQIHLTDVDIGFFDSRFRLDPPLRGQRDRDAIVAGLADDTIDAICSDHRPVGDTGKLLPFAEAEAGASGLELLLSLTLKWAQRERVPLARALALVTSAPAAILRAATAAPPPCGELAAGAPADLCLVDLDAD

SEQ ID NO: 990 - protein, 1320 aa, Candida albicans SC5314
MKSQSTDTLQPRISSDSLVYSSSSSSSNVYSQPKLPFARSYSSIPEQVHDPGSRQSSKNSNTNFSFSEHDDSIQEFLISPIQSDIFPYSKKPVISPVLESPEAGGDSTIVETSSPSPTKSGTVSLNSNAIGSIIGSYDYSKSSLELEKPKPVEEPVFQKDHARDHARQGSDASTISNGSEQVSKDKRFVRYAMNTQSPLVNASNKWQISNVIKWLDKNQFNNSWKETFRRNEISGNRFLELENFDKESMIWKQFSKFLQLDDDLNSVDRFIELLRKESSHELQTRKSLGGGEISPINVKHENRKSTPIYTKHMSTSSVSSSNSSSSISRPLSYVDSKPKEQLSSPSHHSFFRKHSRSTSNESKDAKKRYSSFDDNRVKSVPKNDKKSNGILSTLRKYGGDKIAKNTKQRSSTYFPSLDLPPPLESDPPAYNERKISVDSELSPKSIKSFSDDLSIDPKYLPTQHQELDLRKFHDCEPITILASKDNISFVPIVITELSNAKSHIIKALGLIDIGSITLHLTDFFHKEGEAIPDFLIPKVLKLDGLLKFYVRQELKSPEGTTTTFSTTSSDSKSYIADGNKTYPETPQYLLQAQHDSRVDYWNFKDLTSISEDPSKSLAGAKQNIDSKRNDTKQKPKEFPLKFPFANAPKKGNTVPQLQIDTSGVNNISKPPTSTGSTFQVLRKKGHEIDFDKRRKSPYESKTPKIIANIYSSSVANTKKSPISASTVMALKDDVVVQRPETISRSNSIIAKRTAPPPPGDRRVQIQRQNSILRRKPGLKSTNNVTSGSSEGSKKNISDSTDDNDSEDAFFVKPLKKKENELGNNSDNNSENDEDNDSDDDFFVKPIKKEVADVSAGKVELDDSEEDFFVKPIHKKPSHMNVRPPVEEVYNNLEKYFPYTNLDKPIIDDSPASPSPQRRPTISRTFSSANKSPVAPTSADSKNTNDEQPSLRVRRMKTIRGVANEARRKVLQMKQASPPNTFANITRENSAKLTRSNTKMWGQRVVEVTSQEIEKGFVSKLRNKNGLYQEYAWIKGELIGRGSFGDVYLGLNVTTGEMLAVKQVVCGRNNKEGIEALHKEVETMKDLNHMNIVQYLGYDQQKNIYSLFLEYVAGGSIALCLKSYGKFDETLIRFITKQILLGLEYLHSNNIIHRDLKADNLLLEVDGTCKISDFGISKRSNDIYANNANMSMQGTIFWMAPEVIDSMVEGYSAKIDIWSLGCVVLEMFAGKRPWSNEAAISVIYKTGKEKLAPPIPDDIAHLVSPVAESFINRCFTIDPKDRPTAGELLNDPFVNTLDHDFNFANTKLAEMIRYNSKRLFT

SEQ ID NO: 991 - protein, 380 aa, Desulfovibrio vulgaris subsp. vulgaris str. Hildenborough
MRKTVYWIEGDGIGPEVWKAARPVIDAAVEKSYGDSRSIEWKELLAGEKAHRETGEYLPQSTLDTLATAELAIKGPLGTPVGKGFRSLNVTMRQTLDLYACIRPIRYFDGIMSPVKRPDLVDMVVFRENTEDVYAGIEYRAGTPEAKRLIAFLRDELGAKVDIEAAVGIKPMTEKGSKRLVRRALRFAIDQKRPNLTLVHKGNIMKFTEGGFREWGYEVARDEFADLTTTETEGTAGRLVVKDRIADAMFQEVLIRPQQYSVIATSNLNGDYISDALAAQVGGLGLAPGVNMSDSLAFFEATHGTAPTIAGQDKANPGSLILCGALMLEHMGWNEAAERIYKAVNEAIASRRVTVDLATQMENATTVGTVAFGDIVTAGL

SEQ ID NO: 992 - protein, 483 aa, Ralstonia sp. U2
MKTKLFINNTWSASSDKKSFDRKHPVSGEVVTQCANATVDDAVNAARAAQEAFKSWKAVGPSERRRLLLKVADVMESKTPEFIEVMAKEVGASALWAGFNVHLSANVFREAASLATQIQGETIPTDKPDTLSMTLRHAVGPILSIVPWNGTAVLAARAIAYPLVCGNTVVFKGSEFSPGTHALITKCLQEADLPAGVLNYLNSSPDRSPDIADALISSKEIRRINFTGSTRVGRIIAQKSAQHLKRCLLELGGKSPLIVLDDADIDAAVKAAVFGSFLFQGQICMSTERLVVDEKIADEFVAKFVEKTKQLSAGDPCVTGDCIIGPMVSPNSGDRINGLFKDAISKGAKVVCGGIAEGAVMPATILDHVTADMQIYDEETFGPITVVIRCKSEADAIRIANDSAYGLSSGVFGRDVNRALRVGMAIEYGSVHINGSTVQNEAQAPYGGTKATGYGRFDGRAVIDEFTELKWLTIEPFEQQYPF

SEQ ID NO: 993 - protein, 477 aa, GIBBERELLA ZEAE PH-1
MEFIAAGTAWALNRAPSPQKILSRLGLASLVVTNTWSELSSKLSPNASIVFPDDPEFSGLVSRWRDWHAPQVGAVVTAFTENDVQEAVIYANRNGIPFLARSGGHGATEALQLAKDALVVDIRGMNDIKVAPDGNYATISGGASVKKVVNELWTSKKQTVTGICECVGISAPVLGGGHGWLQGQYGLASDQVISARVVLPNGEAVTASEESNPDLFWALRGAGHNFGIVTEWEYRIYDVKNPNWSYEIFIFLGDKLEEVLELTNKMMKTQPPEIIHWIPVNEAREYAKPLHEMGPLNVNAGAVPMPELAHITLMSEDTVGCTKGFTGLRYPIGLKKYDPPAVRQVYDSIAEISHRIPELAGSFFLLEGYSTHGVKAVDASESAFPHRDDEILVTSYVLYKPNATLDSLAQEHGEKLRGLLQEASDEPERLRAYVNYAHGVESLESMYGYEPWRINKLKALKKKWDPENRMRFYAPIV

SEQ ID NO: 994 - protein, 301 aa, Triticum aestivum
  unsure (1)..(301): unsure at all Xaa locations
MDSLSLYEISCFAAGFAGNLFAFALFLSPVPTFKRILKAKSTEQFDGLPYLLSLLNCFICLWXYGLPWVSDGRLLVATVNGTGAAFQLAYISLFFIYADSRKTRLRMVGLLVLLVCAFALVAHASIAFFDQPTRQQFVGAVSMASLISMFASPLAVMGVVIRTECVEFMPFYLSLSTLLMSASFAVYGLLLRDLFIYLPXGLELSWEQRSWHSTLTTAGNGDARIHLRRCLPDQTSSDQFSVLAWLERAGVGFCRRELYAPALFSPVDAESVCTDLLAYASVYMLLKYHSFPEECRGGYFV

SEQ ID NO: 995 - protein, 76 aa, Glycine max
MVGIGVPICVQCGNTSNPCRCKVVGPTLGFLAFAAAAVVEWPVGALVYCFRHTKGRKIMGHPATVIYPSVTNAIPI

SEQ ID NO: 996 - protein, 326 aa, Triticum aestivum
  unsure (1)..(326): unsure at all Xaa locations
MKLQTEAAAAAGGEGKLMIRQVWANNVESEFQAIRQVAERFPYVSMDTEFPGVIHCPSKHHATLTPSERYAALKANVDALHLIQVGLAFAASPDAAPAVAFEINLREFDPRVHRHXPASVALLAGHGLDFAKQRRGGRGRARVPRRCSCRRGWCRSGASAPTCVTFHSAYDFGYLVKLLMGRKLPRTLTEFLGLVRVFFGDEVYDARHVMDSCAGLYGGLDALAAQLGVKRAAGMSHQAGSDAALTWDVFRRIREVYFAGNSRQGQGQGVGNFAGVLYGLDLELHLAAPADNGNGNGNRNNNKNKCGSGNGAGGRGNNRRAVAALR

SEQ ID NO: 997 - protein, 459 aa, Mesorhizobium sp. BNC1
MSDFDVVVTGRVVTTDRVYEDGYVAIRGGLVERVGSGTPPAAREKYDFDGDYILPGAIDAQVHSRSQLDQEDFLWSTRSAAAGGVTTIVDMPYDEGFLVCTGERLQRKAEEAAQQSRVDFALYGTVRAQDGAREIAGMVEAGAIGFKFSTFETDPERFPRIGPAILHECFSEIGRYGLIAGIHNENDEMVRHALAQVAASGITDYRAHAMSRPAAAETLAMAEAYELGAQAGCSTHVVHCSVGRGYELCAGYRAQGFDTTVEACIHYLTLDEEDHVRRFGGMAKINPPIRPRREVEALWRHLAAGNVTVVSTDHVSWSIDHKRNPEMLKNKSGVPGLEVLYALLMKGLAERGLPMTWAARLLAANPARLFRIGHRKGALEPGRDADIVVMRHDPRRYDPAASGNNFVDWSPYEGMELPFRPVATFLRGRVVFDGSAVVAPSGTGTFIRPRGANAIQIGA

SEQ ID NO: 998 - protein, 1082 aa, Magnaporthe grisea 70-15
MIQKYGGHAVKFSFSNSPLDNIFGLRFAWEFYRHGRRDEYLKFTHRSFAQSGAGRANPYTYEVNLGGVRTIWTADPENIKAMLGSQFEDYGRGKAFQSRWHDLLGTGIFNADGREWHDSRHRLRPLFNRQRVSNLDSFERQIQIMINRHLGGGRTVDLKDVISRFALDAIGDYAMGFQVNALADRKNDFLDALERIKTIQNIKECAGPLSWLVPTPGFKRDLKVLDDFMEPLIEHAASLPQSVLDEMEKTDHGWTYVKACASVSRDRHFLKYELMSVILAGRDTVSGTLVWTFLELVKRPDLMADLRREIENTVGIGRDAPRPTHDDLRSMRLVKNTLNETLRLYPTVSLNLRTALRDTSLPRGNDHDGNKPVGLAEGTPVIFSSHILQLSPETYEQSPPGTSPPHVFDPYRWEEWKPKPWTYIPFGGGPRICIGQEFALAEMAFLLVRLLQNYSRLEMRCEMRGNSDEGWERPNGSASIVEQFMMEKGRVRISGDVTLSPRDKDSQLVKIISTKPTMIVTIPVLLATYILYWTVRLVKNILRANATGLPVRWTPVAPTNPFWIVLGKPTSRVLRAILPSFLSNWTYFSTFDWHWLDRLYLDFEVHEKNGDTFLHATPSGLMLHTRDPQVAQQILHTCPKPDDVAKSLELCGPNLVSSSEVDWPRHRKVTVSTLSDRNNRLVWSETVRQTLNVLQSYQPGHGEIIDPEGDIRRIYLNMFSAVCFGRPLDAEKEPGETTDGKLPGGHKRSYRYCLETSLRDIFILHTVPSWIKYLPPALVPHKISEFFAASREMMQYLDEMIRRCQDEAQEGGEESKSGDNLLRITVRSGLQSNTKEPQGRSYLSKEEVRGNLLIYSLAGHESNAHTLTYALYLLAACPDVQDWLAEELAAITLLDGQLSAEETYFGIMAKLPRTLAVMYETLRLYPSIIFLPKTTASRSVSIDLGHVEGQSKAIIPPNTNIWVNMCGMQVLPEVWGDDARTFRPSRWINSSGQLAAPSLVAGSAYVAWGGGKRVCPGQRFSQAAFAASVVALLTGGKRVHVVPREGEEEGMARRRVLEVLDDSFVGTTIHMRRAGDVKLVVA

SEQ ID NO: 999 - protein, 433 aa, Escherichia coli
MVETIEEQAERAWIQYQGFKTEIDKHIYLRNIQDTNETLFYRLVNNHLDEMMPVIYTPTVGAACERFSEIYRRSRGVFISYQNRHNMDDILQNVPNHNIKVIVVTDGERILGLGDQGIGGMGIPIGKLSLYTACGGISPAYTLPVVLDVGTNNQQLLNDPLYMGWRNPRITDDEYYEFVDEFIQAVKQRWPDVLLQFEDFAQKNAMPLLNRYRNEICSFNDDIQGTAAVTVGTLIAASRAAGGQLSEKKIVFLGAGSAGCGIAEMIISQTQREGLSEEAARQKVFMVDRFGLLTDKMPNLLPFQTKLVQKRENLSDWDTDSDVLSLLDVVRNVKPDILIGVSGQTGLFTEEIIREMHKHCPRPIVMPLSNPTSRVEATPQDIIAENKPPFSVFRDKFITMPGGLDYSRAIVVASVKEAPIGIEVIPAHVTEYL

SEQ ID NO: 1000 - protein, 81 aa, Zea mays
  unsure (1)..(81): unsure at all Xaa locations
YRRLKHTGPDWTDLYHHEDNFLAHXRLADGSPLYVDQPVFNKDSTDVVVANGEIXNHRNGLRQLTGPHIIKTGSHCEVIIP

SEQ ID NO: 1001 - protein, 144 aa, Brassica napus
  unsure (1)..(144): unsure at all Xaa locations
MDDYRDRISRLPDDFLLQILSRLPTKDVVAMSLLSKRWRFLWTLVPKLNFDLRLHDNTCPKFTKFVDRSLLLHKAPTLESLRVKIGSICHNADVDVGVWVRIAVDRGVRELDISYCPAEEPIRLPKCLFPCXTLVVLKLENMEP

SEQ ID NO: 1002 - protein, 480 aa, Azoarcus sp. EbN1
MKEYKLFIDGEWVGSSTETILDDLNPATSEVWGRVHQASAADLERAIAAAYRARESWGNTLANEREAILLRAADALQKRIPDVAAVLIDEAGSTYGKAMFEASFVVNLLRSAAGECRRITGETMPSDSPGVFSMSVRRPLGVIAGIAPFNFPFLLATKKVALALAAGNTFILKPASYTPVTGLKIAEIFEAAGLPKGVLNVVPVQGSVLGNTFVADPRVRMITFTGSTEVGRELSAEAGRHFKRITLELGGKSPMIVLKDADVDYAVNAAAFGIFLHQGQVCMANSRLIVEAPIFDVFCDKLATKIAGFKVGDPRDPQTVIGPLIDRKQCAVLDRHVADAVAKGAKLLHGGKSDGAFYQPTILAGVTPDMVVFREESFGPAVSVIRAADSEDALRLANDSCYGLSSGLITNDLQKAFDLSLRLEAGMVHINDSSIMDEPHVPFGGVKDSGFGREGGHHSMDEMTELKWITVQMGQRQFPF

SEQ ID NO: 1003 - protein, 79 aa, Glycine max
  unsure (1)..(79): unsure at all Xaa locations
LKSMAGFCTMQNMNDIISIASNGGRVQCLXVWPPVGKKKFETLSYLLDLDDAQFANXVEYLLRNGWILVRYHWSTFVYV

SEQ ID NO: 1004 - protein, 273 aa, Zea mays
  unsure (1)..(273): unsure at all Xaa locations
MAAPPMAAAPARHEDICGAVLGAARASATCHLHPTPSTRRDSSIGDSRAIKGVDRNHVLRHXMAEQIKLQISTMKLIKHPNVAQLHDVMASRTKIYMLLEFVDGGELFDKIVNSGRLGEDEARIYFHQLINAVDYCHSRGVYHRDLKPENLLLDSNGALKVSDFGLSAFAPQTNEDGLLHTTCGTPNYVAPEVLADKGYDGMAADVWSCGIILFVLMAGYLPFDDASLSYPSLVSTPICSAVCGQAEPGETIETICAGEQSLPNSSQHGCTGR

SEQ ID NO: 1005 - protein, 167 aa, Glycine max
  unsure (1)..(167): unsure at all Xaa locations
ATIQVQYPSDIMAKKLWKILEAKARGEGGGCSITYGALDPVQITQMAKHLETVYVSGWQCSSTASSSLEPGPDLADYPANTVPNKVAQLFTAQLVHDRKQRWTRSQALAKGEDLPPPIDYLRPLIADADTXGHGGLTAAMRLTKMMIQALAAVIHIEDQAPATKKCG

SEQ ID NO: 1006 - protein, 210 aa, Candidatus Blochmannia floridanus
MLFHYYMIKHINKYNDKNVMWHFYRINREDRERLHQHRSMILWFTGLSGSGKSTLASILEEKLYCRGVSTYSLDGDNIRHGLCKDLSFNSNDRSENIRRVGEVARLMVDAGLVVLVALISPYRIDRQIIRDMCIKDSFLEIFVDTPMLICKQRDPKGLYHQVDCKKIKNFTGIDSIYERPKQPDIYLDGRKTISELMNQLLDLVLVKIFK

SEQ ID NO: 1007 - protein, 253 aa, Fusarium solani
ILMNQSSDTLKKLSLELGGNAPFIVFDDADLDLAVAGAIASKFKCSGQTCVCSNRIFVQKGIYNEFVQKLKAVVSKFQVGHGFDSKTTHGPLVTAAAAERVDGLVKEAVKAGAKVEVGGKRRTDLGPNFFEPTILTNVTTDMRLVRDEIFGPLAPIFSFDNEDEVVDIANKCDVGLASYIFTQDVNRVARVTELLHFGMVAVNTGIMSDAAAPFGGVKHSGMGREGSKYGIEDYLHVKTIVTGNVNVVHRALL

SEQ ID NO: 1008 - protein, 361 aa, Escherichia coli
DLWHAPAPKNGQAVGTNTIGSSEACMLGGMAMKWRWRKRMEAAGKPTDKPNLVCGPVQICWHKFARYWDVELREIPMRPGQLFMDPKRMIEACDENTIGVVPTFGVTYTGNYEFPQPLHDALDKFQADTGIDIDMHIDAASGGFLAPFVAPDIVWDFRLPRVKSISASGHKFGLAPLGCGWVIWRDEEALPQELVFNVDYLGGQIGTFAINFSRPAGQVIAQYYEFLRLGREGYTKVQNASYQVAAYLADEIAKLGPYEFICTGRPDEGIPAVCFKLKDGEDPGYTLYDLSERLRLRGWQVPAFTLGGEATDIVVMRIMCRRGFEMDFAELLLEDYKASLKYLSDHPKLQGIAQQNSFKHT

SEQ ID NO: 1009 - protein, 487 aa, Lesquerella fendleri
MANVKLLYHYLITHFFKLCLLPLIALVASKASSLDQEDLQNLWFHLQHNILTLTILFAVLTFVSAIYFLTRPRPVYLVDYSCHLPPPHQKITVKKIVENVNKNRELDASHNSKIPESSLDFVLRLLERSGLGEETYIPDSLLNVPPIQTMAAAREETEQVIFNAIDNLLANTKVNTRDIGIIIVNSSMFNPTPSLSAMVVNKYKLRSTIKSFNIGGMGCSAGIIAIDLAKDLLQVHKNTYALVISTENLTRNMYVGNNRSMLVANCLFRLGGAAILLSNKSGERRRSKYKLLHTVRTHTGADDKSFRCVQQEDDDMGKTGVSLTKDITSVASRTITKNIATLGPLVLPISEKILFFITYIHKKFVNDKVKHYIPDFKRAIDHFCIHAGGRALIDELEKNLGLLPIDVEPSRSTLHRFGNTSSSSIWYELAYTEAKGRMKKGNKAWQIALGSGFKCNSAVWVALCDVKPSVNSPWEHCLDKYPVKLDL

SEQ ID NO: 1010 - protein, 449 aa, Zea mays
MYRAKRAALSPKVKRRVGKYELGRTIGEGTFAKVRFAKNTENGEPVAIKILDKEKVKRHRLVEQIKREICIMKLVRHPNVVRLFEVMGSKARIFIVLEYVTGGELFEIIATNGRLKEDEARKYFQQLINAVDYCHSRGVYHRDLKLENLLLDAAGNLKVSDFGLSALTEQVKADGLLHTTCGTPNYVAPEVIEDGGYDGATADIWSCGVILFVLLAGYLPFEDDNIIALYKKISEAQFSCPSWFSAGAKNMITRILDPNPTTRITISQILEHPWFKKGYKPPVFDEKYQTSLDDVDAAFGDSEDRHVKEETEDQPTSMNAFELISLNQALNLENLFEAKEEYKRETRFTSQCPPKEIITKIEEAAKPLGFDVQKKKYKMRMENPKAGRKGNLNVATEVFQIAPSLHVVELKKAKGDTLEFQKFYRSLSTQLKDVVWKCDGEVDGNSAAA

SEQ ID NO: 1011 - protein, 259 aa, Aquifex aeolicus VF5
MADKKWKTAISTHVNHEPYVRGYRLLDLVGNLTFSEAIYLLLKGELPSEAEAKMMDAIFVSVIEHSIAPPSVIATRAVISGGNSLNVGVGAGVLAFGSAHGGALEDAMKFMQEGVKSNRPVEEIVKEYLSQKKPIPGYGHRYYKEFDPRTKRLFELAEKYGFCKEHCEFAKKVEEEIYKQKGKRIVLNVDGAIAAITSDMGFDWRLGKGFFIIGRVPGLVAHAYEELTQEKPFSKRLSEEEYEYTGVEPRELPPERKKV

SEQ ID NO: 1012 - protein, 580 aa, Glycine max
MATPNPTRFSLAMERTGQWVFSPEIPTDVIVAVGQTNFSLHKFILAAKSNYVRKVIMESEESDLTRIEISDIPGGSEAFEKAAKFCYGVNFEITVHNVAALHCAAVFLQMTDEYCDGNLAGRTEDFLSQVGLSTLHSAVAVLKSCQKILPFAAEVNVVDRCVEVISCKACNEANFPSQSPPNWWTEELAVLDVDSFAKVITAMKQRGAKYLTVAGALITYTERALRELVRDQTGGGKGIRSPESGDSDSESKRSEQRELLQAIVPLFPTEKAAFPVNFLCCLLRCAIYLRASSVCKRELEKRVTEILEHVTVDDLLVLTFSYDGERLLDLDSVRRIISGFVEREKGTTVFNAGVNFNEDFSAAMQRVVKTVDTYLAEIAAYGELSISKFNGIAILIPKGSRKSDDDLYRAVDIYLKVHPNLDEIEKEKVCSVLDPLKLSYEARVHASKNKRLPLQIVLHALYYDQLHIRSGTAADKQAVVAAAEKKQLQADVSLVRENEELRSELMKMKMFISDLQKNVHGTSSSGRENIGPTKKPTFFSSMSKKLSKLNPFKNGSKDTSHIDDAPVDLTKPRKRRFSIS

SEQ ID NO: 1013 - protein, 160 aa, Bacillus thuringiensis serovar konkukian str. 97-27
MTVYDFSAKTIIGEEKSLKDYEGKVLLIVNVASKCGFTPQYKGLQEVYDKYKEQGLEILGFPCNQFGGQEPGTEVDITSFCELNYGVNFPMFAKIDVKGDKAHPLYTYMTEQAPGLLGMKAVKWNFTKFLIGKDGKVVGRFAPQTKPVDLEVEIEKVLGE

SEQ ID NO: 1014 - protein, 324 aa, GIBBERELLA ZEAE PH-1
MVNVPNIKLNSGFDMPQIGFGLWKVDDNCAEVVYNAIKAGYRLLDGACDYGNEKACGEGVARAIKEGIVKREDLFIVSKLWQTYHDKKNVEPITRRQLADWQIDYFDLFLIHFPVALEYVDPEVRYPPGWHYDDAGTEIRWSKATNQETWEGMEDLVEKGLAKSIGISNFQAQGIYDMLKYAKIRPATLQVELHPYHQQSELVSLAKAEGIALTAYSSFGPTGFIELDMDIAKSASPLMQHEVFTTLASKYNKTSAQVLLRWATQQGLAVIPKSTTPQYMAQNFDCFEWSIDEEDMKRISKMNLNLKFNKPTNYFPTEKLWIFG

SEQ ID NO: 1015 - protein, 280 aa, Arabidopsis thaliana
MAIIKPNRDLKPDGVTVVTREVWAENLESEFELISEIIDDYPFISMDTEFPGVIFKSDLRFTNPDDLYTLLKANVDALSLIQVGLTLSDVNGNLPDLGDDLHRGFIWEFNFRDFDVARDAHAPDSIELLRRQGIDFERNCRDGVESERFAELMMSSGLVCNEEVSWVTFHSAYDFGYLMKILTRRELPGALGEFKRVMRVLFGERVYDVKHMMKFCERRLFGGLDRVARTLEVNRAVGKCHQAGSDSLLTWHAFQRMRDLYFVQDGPEKHAGVLYGLEVF

SEQ ID NO: 1016 - protein, 479 aa, Gloeobacter violaceus PCC 7421
MSSIAIVWHRRDLRVHDNPALWQASRTGGQVLAVFIVDPTIVERDDTAPARIYFLRESVLELQKAYRTIGGRLAVRVGEPVQQLVALAQAVGAGAVYFNDDIEPYARERDARAAEALRAAGITVHACAEILLHPAGEVLTAAGGKPYTVYTPFWRQWSAKPKPKPFPTPERLEAPTVEEQSFPELAQLGRPFAGELLVSPGEQSGLEQLEAFAREGLYRYGERRDLPGCDGTSRLSAHLKFGTVGIRAVWARTMDAWKQAEHDRDRAGLAVWQQELGWREFYKYELFHLPQLAGRPFRREFENFQWDEDQERFERWCQGETGYPIVDAAMRQLNTVSWMHNRLRMIVASFLTKDLLLPYGWGERYFMQKLVDGDLSANNGGWQWAASVGTDPKPLRIFNPSTQAGRYDPKAVFIRRWLPELEGVDTALLVTSERLPPLMRAQHRYAQPIVEHKRQQQVFKERYRAVRAQQADPGARDSE

SEQ ID NO: 1017 - protein, 52 aa, Zea mays
PVGRVYFPGGAPSGPFNGFVPGAFFSGFGSPEIFFNCAPKKMCQFPVPGKFF

SEQ ID NO: 1018 - protein, 222 aa, Desulfitobacterium hafniense DCB-2
MCGLAGLLRPRNDLDQEHLQALAASMGEALHHRGPDDDGVWADPQAGIALAHRRLSILDLSPLGHQPMASADGRFVVAYNGEVYNFAELREQLRGLGHGFRGHSDTEVLLAAVSQWGVEAAIARCNGMFAIALWDRERGELWLARDRVGKKPLYYGWAGDTLVFGSELKALWRHPQFDNGVDRDALALLLRYDYVPSPYCIHTDTWKLAPGAIARFTPRRDP

SEQ ID NO: 1019 - protein, 78 aa, Triticum aestivum
  unsure (1)..(78): unsure at all Xaa locations
MGLCSCCCRCLEIMCAILLPPLGVCLRHGCCSMEFWISVLLTILGYLPGVLYAAYVICSVDPDRVRRXRTDDDYIYVA

SEQ ID NO: 1020 - protein, 351 aa, Zea mays
SVAFVPLPVVYVLFVPSVAGTGEVVTCSPTQSPELFFAVLGGLGQFGIITRARIPLQVAPPKVRWVRAFYDSFETFTKDQELLVSMPELVDYVEGFMVLNEQSLRSSSVAFPAQVNFRPDFGSDDGTNKKVCYYYCIEFAVHDFQRQDSAADHVVDLVSGKLSYLRPHAYSVEVAYWDFLNRVRMEEESLRRRGLWDVPHPWLNLFVPRHGVARFMDLLMATIAQGDFEGPVLVYPLLTHRWDGNMSAVVPAAPDGVMYVFSVLRSTDPARCGRACMERILEQHRRVADEACRRLGAKQYLARQPSLAHWRDHFGASWDRFVARKARFDPMNVLGPGQGIFPWTDSSSSPM

SEQ ID NO: 1021 - protein, 319 aa, Aspergillus niger
MASPTVKLNSGYDMPLVGFGLWKVNNDTCADQIYHAIKEGYRLFDGACDYGNEVEAGQGIARAIKDGLVKREELFIVSKLWNSFHDGDRVEPICRKQLADWGIDYFDLYIVHFPISLKYVDPAVRYPPGWKSEKDELEFGNATIQETWTAMESLVDKKLARSIGISNFSAQLVMDLLRYARIRPATLQIEHHPYLTQTRLVEYAQKEGLTVTAYSSFGPLSFLELSVQNAVDSPPLFEHQLVKSIAEKHGRTPAQVLLRWATQRGIAVIPKSNNPQRLKQNLDVTGWNLEEEEIKAISGLDRGLRFNDPLGYGLYAPIF

SEQ ID NO: 1022 - protein, 416 aa, Ralstonia eutropha JMP134
MYQHIKVPAGEKITVNQDFSLNVPDTPIIPYIEGDGTGLDITPVMIKVVDAAVEKAYAGKRKISWMEIYAGEKSTKVYGPDVWLPDETLDVLKEYVVSIKGPLTTPVGGGIRSLNVALRQQLDLYVCLRPVRYFKGVPSPVREPEKTDMVIFRENSEDIYAGIEWEAESPQAQKLIAFLQNEMGVKKIRFPETSGIGVKPVSKQGTQRLVRKAIQYAIDNDKPSVTLVHKGNIMKFTEGGFRDWGYELAQKEFGAELVDGGPWCKFKNSKTGRDIVIKDAIADAFLQQILLRPAEYSVIATLNLNGDYISDALAAQVGGIGIAPGANLSDSVAMFEATHGTAPKYAGKDYVNPGSEILSAEMMLRHMGWTEAADLIIASMEKSILSKKVTYDFARLLEGATQVSCSGFGQVMIENM

SEQ ID NO: 1023 - protein, 485 aa, Pseudomonas syringae pv. tomato str. DC3000
MLKNQLKDPSLLVDRAYVDGQWISADDGATLAISDPATGEVIAQVPALQGAETRRAIEAADRAWPAWRARPAAERAALLERWHQAMLDNVEDLALIMTLEQGKPLNESRGEIRYGASFVKWFAEEARRSYGETIPTPSADRRLMTLKQPVGVCAAITPWNFPNAMITRKCAPALAAGCTIIVKPSDLTPLSALALAVLAERAGIPVGVFSVVTGMPTAIGEELTGNPVVRKISFTGSTPIGRLLMRQSAEHIKRLSLELGGNAPFIVFDDADLEQAVAGIMLSKFRNAGQTCVCANRILVQSGIYDRFAARLVEEVAKLKVGNGLEEGVTIGPLINPAAVSKIARHIDDALSQGAKLLYGGLPNGDGQFVQPTVLGDTHAGMLLANEETFGPVAPLMRFTDEAEALALANATPYGLAAYYFTQDLRRSWRFGEALEFGMVGLNTGIISMEIAPFGGIKQSGLGREGSSYGLDEYLEVKAFHVGGL

SEQ ID NO: 1024 - protein, 348 aa, Listeria monocytogenes str. 4b F2365
MKALKLYGKRDLRYEEADMPTIEQPDDVILKVKTVGICGSDISRYSKLGPYVPGMVWGHEFSGEVIEVGSEVTDIEIGDRAAGCPALYCGECEYCKKGEFARCRKLTVIGARHPGAYAEYIKLPAENVVKIPDELDYEAAALVEPSAVVVHGFYHTKLQAGDDVVVVGSGNIGLLAIQWAKVFGAKRVIAIDVDDKKLALAKEVGADVVINSLKEDPLEVVAAHTDGLNADLVVEAAGSPITSAQVFAYAKKGGGVVFLGIPYADVTIERFYFEKIVRSELTVWGSWNAISAPFPGKEWQTTIHFLANKQINIEPMITHRLSLAEGPEVFERIYERNEFFGKVLFFPE

SEQ ID NO: 1025 - protein, 500 aa, Zea mays
MSSSPSFGLLAVAALLLALSLAQHGSLAATVGPRVIVVGAGMSGISAAKRLSEAGITDLLILEATDHIGGRMHKTNFAGINVELGANWVEGVNGGKMNPIWPIVNSTLKLRNFRSDFDYLAQNVYKEDGGVYDEDYVQKRIELADSVEEMGEKLSATLHASGRDDMSILAMQRLNEHQPNGPATPVDMVVDYYKFDYEFAEPPRVTSLQNTVPLATFSDFGDDVYFVADQRGYEAVVYYLAGQYLKTDDRSGKIVDPRLQLNKVVREIKYSPGGVTVKTEDNSVYSADYVMVSASLGVLQSDLIQFKPKLPTWKVRAIYQFDMAVYTKIFLKFPRKFWPEGKGREFFLYASSRRGYYGVWQEFEKQYPDANVLLVTVTDEESRRIEQQSDEQTKAEIMQVLRKMFPGKDVPDATDILVPRWWSDRFYKGTFSNWPVGVNRYEYDQLRAPVGRVYFTGEHTSEHYNGYVHGAYLSGIDSAEILINCAQKKMCKYHVQGKYD

SEQ ID NO: 1026 - protein, 157 aa, Glycine max
MASTKKITLKSSDGEAFEVEEAVAVAVESQTIKHMIEDNCADSGIPLPNVTSKILAKVIEYCKKHVEANCADEKPSEDELKAWDADFVKVDQATLFDLILAANYLNIKSLLDLTCQTVADMIKGKTPEEIRKTFNIKNDFTPEEEEEVRRENQWAFE

SEQ ID NO: 1027 - protein, 251 aa, Glycine max
  unsure (1)..(251): unsure at all Xaa locations
MCMMEGDENIQASTKGKNVESFTSLEAPRKKSKKIENKRRFSDEQIRSLECIFESESKLEPRKKMQLARXLGLQPRQVAIWFQNRRARWKSKRIEQEYRKLKDEYDNLASRFESLKKEKDSLQLELQKLSDLVVTSQDGGREDKDGKENSIEDGGSGSGYSSWKPEAKKPRFSNDEGLEERIGVYSDDQNENSIIRGVEKSEDKGHQLLRMDDHDHADMPLASLEKWYSGVDPSGILDQSCSSSQWLDFWT

SEQ ID NO: 1028 - protein, 1349 aa, Candida albicans SC5314
MPHSRQPSISSSIMSQSNHNHPQKIGPWKLGKTLGRGATGRVLLATHQTTGQKAAVKVVSKSELQDEETEKNGDGLPYGIEREIIIMKLLTHPNVLRLYDVWETSKALYLVLEYVEGGELFDLLVERGPLPEVEAIKYFRQIILGTAYCHALGICHRDLKPENLLLDSQLNVKLADFGMAALESNGKLLETSCGSPHYAAPEIVSGLKYHGAASDVWSCGVILFALLTGRLPFDDENIRNLLLKVQAGNFEMPVDEVSREARDLIARMLEVDPMRRISTEKILRHPLLTKYPMSNEDLISEKSLPHPQTGYKSLGSVRNIDKQILSNLTILWNDRPEEEIVDCLLKDGSNPEKTFYALLMRYKHNQEDNTNNNSPKKSTSFNNKVVRSGSKYSLNGTPRRKRASHISVSRPTSFQYKSNPGAGATANRNSVARHSVASSANNSPRKSPYKSPYRSPYRSPYKSPSKRYSYNQSPTKSPYGRRSNSQRQFENEPLKAKPRNIYNEIVDAQSNFSLPPSLPPSLPSKDSRYMIDEPNQPQLQQPALSQVPENPIVDESPDLMQSAKISSGKRNSIIGKNNNNSNSNKRMSKRKSIRASMTTGLKRNSITMKLLSTYAKLSGDDDWEYMDKQTKRTSATFAALCDKIFNQEDYDEEDEQLVDPEEKEAKEYERLMELERKKHEAELKARRELEKKKRRQKRRSILSSKKLSIIVKNDADPNNSEQELVDEGIKQPKRQSKNLTALRALSEGNHASEELTLEDVENLKRRSASQPVPKRRQTPVLTRRPVSRLDPLWQAHENEQLDRAKDALEQEWRDSQKRSSTVSRKKVNRESMISVMDDIVEEDQGRVNRRSTRNTYYERERDYELPEPTVEDSNLTDDYMTEIRKSRLLNSQLNVRDPLNEKRKSEPKTLISNVQIPSVTRKSRNFTTSNKRLSVLSMYSTKESYRDLNSIINSPDENPEQHQNMNKPALRTSIADRLDKAGLAEPEYETETDGEDKVSVIDLDDHLADRRTSYYDGSGKRASRASTTKRYNVHSSSGQRPKSKVPDLPKNDYDDTFVSNSDEVHKRQYKSMVSDESSASDDVFDKIKLPDGKSTKSSIDELANGTSTSGHRKPKIRHSQPGPEMLIPHLNGGIESSQPMSKVRGNNSSGHDDSVPPPPPAHKVNKKPLDDKTNFPPPEVDPKRKGSFFRKLSWGSKKTIENNTNAATNTTTQQQLPSPAESKEEKPKSSFFRWFSSSNTPSAAEIRKFNTILPKHEMSTALFALLNSWSNFGLKDLRNDQVGYYITGAISKHNSFNLKSCKFRIKINQRDFNQKSEIVCVRVKGSKVTTDTLFSEIEKVLLKEGVLDK

SEQ ID NO: 1029 - protein, 457 aa, Oryza sativa (japonica cultivar-group)
MMELEKNGNILLRRYEIGKLLGQGTFAKVYHGRNIVTSQSVAIKVIDKDKIFKVGLMDQIKREISVMKLVRHPNIVQLYEVMATKSKIYFVLEYVKGGELFNKVAKGRLKEDAARKYFQQLVSAVDFCHSRGVYHRDLKPENLLVDENGNLKITDFGLSALAESRRQDGLLHTTCGTPAYVAPEVISRKGYDGVKVDTWSCGVILFVLMAGYLPFQDSNLMEMYRKIGKAEFKCPAWFSSDVRKLVSRILDPNPRSRMPITKIMETYWFKKGLDSKLILKNVETNEPVTALADVNVVFSSMGSSSSKKTEEKQDAGKLTNLNAFDIISLSEGFDLSGLFEETDKKKEARFTSSQSASAIISKLEDVASCSKLTVKKKEGGVLKMEGASEGRKGVLAIDAEIFEVTPSFHLVEIKKNNGDTLEYQHLWKEDMKPALKDIVWAWQGERQDQQPEDHGQP

SEQ ID NO: 1030 - protein, 77 aa, Glycine max
ISSPAVATVNRAGACMVAPFTGLKSMDGFPTINTNDDVASIAIYGVTVQCIQVWTPVGRRKFDTLSYLPDLDDAAIG

SEQ ID NO: 1031 - protein, 216 aa, Zea mays
  unsure (1)..(216): unsure at all Xaa locations
EMMYTIIADELKSMDNKDMRPEDYLSFFCLGNREEPPSNGSPESEKSTDXSAVGLATKYRRFMIYVHAKGMIVDDEYVILGSANINQRSLAGSRDTEIAMGAYQPHYAWSTKNGHPDGQVYGYRTSLWAEHLGTIDDRFKDPSSLECVRFVNQIAVENWRRYTAEEMSTLQGHLLKYPVKVEADGKISPLPDQECFPDVGGKILGASTSLPDSLTM

SEQ ID NO: 1032 - protein, 329 aa, Glycine max
  unsure (1)..(329): unsure at all Xaa locations
MESTLLTNLLVFNNTLQPELMRSVHVYRRGDGEKREVEREFVFSESGSYGEMQATPIPGLVKSRVSEVCEGHRNGVWLCVFAFHADHTPQFCRIPPVLLVTRNPKLKMIPNLLDDLHVIYKLDRKEEDSDIAQDYTGEERQGNSNNCQPSWKVFPVLDQDLNCLPYEDDESESLDNETDVESSPGFAGFLVKKKRAPSDLVAKISLSDLVKYFGMPIVEASRNLNVGLTVLKRKRRXSGIPRWPHRKIKSLDSLIHDLQEEVKSQELEDREAALAVAKRQRMLESEKENIEKKPFMDIQSETKRFRQDVFKRRHRARAVGKHNSTVSST

SEQ ID NO: 1033 - protein, 79 aa, Brassica napus
  unsure (1)..(79): unsure at all Xaa locations
MSSKKVEGSSAPANRRDPYEVLCVARDASDQEIKSAYRKLALKYHPDKNANNPEASDLFKEVAFSYSILSDPEKRXQYD

SEQ ID NO: 1034 - protein, 418 aa, Listeria monocytogenes str. 4b H7858
MNKYFKNLATVLFTVSLLTTSITALPAMASAYEETHNASTIYISPLDAPHVGDTKITGKTTALSSFAIAIYTPEGRLTGTFFGTTNAAGTYAVDLSDFTYYDPLGYEASGNVILEKGAMVRSMTETNSDLIKTVTINYNYIQTAINELFLNNDPTGTILAATDQNAINAVQEQINTVTSSEKETFQEQLNNAQQQLDARIAQEQAAIQAVNQLFLEDNPANSIKAETTQDLIDQAQTLVDVLPASELKDTLQANIVKAQTELDERSKPVTPPKNDPETDNPEEPVTPVDPATPTPDEPSTPTDPATPTPDEPSTPTDPATPEKPEITTPENPESTVVESDSSENEPEKSADSKIVNNPIQITSQATKTATKQATKQAKSSVTKTTTLPIPKTGDTETTSSILFGTLMLASLALFRRKK

SEQ ID NO: 1035 - protein, 366 aa, Candida albicans SC5314
MATFAPHISKITKSSTKFNYGRIAKTFLGVAGSAAIATYFYNNGNPFNNNNNNNNNNGGSKNAAKALFGASAGANVKIAKVPEGKSASDYQKVYNDIATKISENLEFDENAGYYGQLLRLAWHTSGTYDKSDNSGGSYGGTMIFAPEEFDPENAGLQVGREFLMEFLVKYPWISRGDLWTLGGVAAVQESGGPKIEWRPGRVDDNTASKVPPNGRLPDASKDGKYVKDLFARMGFNERETVALLGAHVLGRCHKHNSGYDGPWGPSFNQFTNVFYTTLLGDWHVKKWDGKKQYEDDETGEFMMLPTDMALKEESYFLKYVKMYADDQDLFFKDFAKAFSKLISNGIKYPADSKPILFKTLDEQDEE

SEQ ID NO: 1036 - protein, 267 aa, Zea mays
MDTAGLVQHATSSSSTSTSASSSSSEQQSRKAAWPPSTASSPQQPPKKRPAGRTKFRETRHPVFRGVRRRGAAGRWVCEVRVPGRRGARLWLGTYLAAEAAARAHDAAILALQGRGAGRLNFPDSARLLAVPPPSALPGLDDARRAALEAVAEFQRRSGSGSGAADEATSGASPPSSSPSLPDVSAAGSPAAALEHVPVKADEAVALDLDGDVFGPDWFGDMGLELDAYYASLAEGLLVEPPPPPAAWDHGDCCDSGAADVALWSYY

SEQ ID NO: 1037 - protein, 106 aa, Brassica napus
  unsure (1)..(106): unsure at all Xaa locations
MDPSYTCIKEEFPTGINDSPSPPSSSTSSYLHSTSMAPNDPATLNSPQPIEGFHESGPPPFLTKTYDLVEDSRTNDVVSWSQDKNSFIVWDPQAFSMTXLPRSFKH

SEQ ID NO: 1038 - protein, 495 aa, Bacillus subtilis subsp. subtilis str. 168
MSSLTMQVTKRLETFLQGTKKLYIDGKFVPSASGATFDTPNPATGETLMTLYEAQAADVDKAVKAARKAFDQGEWRTMSPASRSRLMYKLADLMEEHKTELAQLETLDNGKPINETTNGDIPLAIEHMRYYAGWCTKITGQTIPVSGAYFNYTRHEPVGVVGQIIPWNFPLLMAMWKMGAALATGCTIVLKPAEQTPLSALYLAELIDQAGFPAGVINIIPGFGEDAGEALTNHEAVDKIAFTGSTEIGKKIMSTAAKSIKRVTLELGGKSPNILLPDANLKKAIPGALNGVMFNQGQVCCAGSRVFIHKDQYDEVVDEMASYAESLRQGAGLHKDTQIGPLVSKEQHERVLSYIQKGKDEGAKAVTGGSCPFEAGYFVAPTVFANVEDEMTIAKEEIFGPVLTAIPYETVDEVIERANHSEYGLAAGLWTENVKQAHYIADRLQAGTVWVNCYNVFDAASPFGGYKQSGLGREMGSYALDNYTEVKSVWVNLED

SEQ ID NO: 1039 - protein, 197 aa, Bacillus thuringiensis serovar konkukian str. 97-27
MDTNITWHTASVSKDERRVKNGHHSFVIWFTGLSASGKSTVANAVARKLFEKNIGNYVLDGDNIRHGLNKDLGFSESDRMENIRRIGEVAKLFVDQGAVVLTAFISPFRVDRKQVRDLLAVDEFIEVFVKCPIEECEKRDPKGLYKKARKGDIKDFTGIDSPYEEPEKAELIVETNKYSIEECAEQIVKYLQERSFI

SEQ ID NO: 1040 - protein, 466 aa, Brucella melitensis 16M
MPASTPKGNISERAPTASEKEALDFHAQGRPGKLEINPTKPMTTQRDLSLAYSPGVAVPVKAIAEDAARAYDYTAKGNLVAVISNGTAILGLGNLGALASKPVMEGKAVLFKRFADVDSIDLEIDTTDIDAFINAVRYLGPSFGGINLEDIKAPDCFIIESRLRELMDIPVFHDDQHGTAIIAAAGLINALHLTGRDMKTTKLVCNGAGSAGIACIELIKAMGFAPENVILCDTKGVVYQGREEGMNQWKSAHAVKTDRRSLANAMKDADVFFGVSAKGALTQDMVRSMAPNPIIFAMANPDPEITPEEVERIRDDAIVATGRSDYPNQVNNVLGFPYIFRGALDVRATTINDAMKIAAVNALAELAREDVPDDVVAAIRAAARALGRTISFRCRSIRACLPPFPPPSPRLRWKPAWPGAPLPILKATSANCWRAATRSPRRCAAFTSVCAASQSASYLPKARKNR

SEQ ID NO: 1041 - protein, 274 aa, Triticum aestivum
  unsure (1)..(274): unsure at all Xaa locations
AGLKLAGGTLXADHTFLFFGAGEAGTGIAELVALEISMQSKTSQEEAHKNIWLVDSKGXLIVSSRKDSIQPFKKLYAHEHEPVKDLLSAIKDIKPTALIGSAGVGQSFTKEVIEAMSSINKRPIILALSNPTSKSECTAEQAYSWSQGRAIFGSGSPFDPVKYNEKLFVPAQANNAYIFPGFGLGVVISGAIRVKDDMVLAAAEALAEQVMAEHFDKGLIYPPFSSIRKISTNIAARVAAKAYDLGLASHLPRPKDLVKYAESCMYSPIYRSYR

SEQ ID NO: 1042 - protein, 163 aa, Thermoplasma acidophilum
MISMVFKRKEAGITDYSKRLKLLKSREKRFIVRITGKGVIAQVAEYSDIGDRILFTVTDKTLAKYGVDLRGNNIQVCYLVGYIAGIESEKNGVESAVLDTGRRKFRKGGRIAACLKGFTDAGIEVPHGEDVFPDKKRIDGKHLKSPVKISEIVKNFKKMEEKA

SEQ ID NO: 1043 - protein, 606 aa, Zea mays
MDTHIGSVNGAASNQTVGCPASAPGCPMASTPAQPAATLSAGEASLGRHLARRLVQVGVNDVFAVPGDFNLTLLDHLIAEPGLRLVGCCNELNAGYAADGYARARGVGACAVTFTVGGLSVLNAIAGAYSENLPVICIAGGPNSNDYGTNRILHHTIGLPDFSQELRCFQTVTCHQAVVNNLDDAHEQIDTAIATALRESKPVYLSISCNLPGLPHPTFSRDPVPFFLTPRTSNKMGLEAAVEATVEFLNKAVKPVLVAGPKLRVAKAGKAFVDMVDASGYAYAVMPSAKGLVPETHPHFIGTYWGAVSTAFCAEIVESADAYLFTGPIFNDYSSVGYSFLLKKEKAIIVQPERVIVGNGPAFGCVMMKEFLSELAKRVNKNTTAYENYKRIFVPEGQPLESEPNEPLRVNVLFKHVQKMLTGDSAVIAETGDSWFNCQKLKLPEGCGYEFQMQYGSIGWSVGALLGYAQGANHKRVIAFIGDGSFQVTAQDVSTMLRCEQNSIIFLINNGGYTIEVEIHDGPYNVIKNWNYTGFVDAIHNGEGKCWTSKVKSEEELTAAIETALGEKKDCLCFIEVIAHKDDTSKELLEWGSRVSAANSRPPNPQ

SEQ ID NO: 1044 - protein, 158 aa, Glycine max
MSSTSLKEMRNGGEDYSNGHGGGVRDLYGEDCATEDQLITPWTFSVASGCSLLRDPRYNKGLAFTEGERDAHYLRGLLPPAVFNQELQEKRLMHNLRQYEVPLHRYMAMMDLQERNERLFYKLLIDNVEELLPVCYTPTVGEACQKYGSIFRRPQGLY

SEQ ID NO: 1045 - protein, 176 aa, Zea mays
MEAGGAGSGLNGAVQAKGTGADDGSAKRLPPCCVKARAAAPESEARCHATVVSGWFTEPRSRCGKASKVQYYNNPMWPGEANSLKVEKILYQGKSLYQEVLVFESSTYGKVLVLDGIVQLTDKDECAYQEMITHLPLCSIPSPKKVLVIGGGDGGVLREVSRHSSVESIDICEIDQ

SEQ ID NO: 1046 - protein, 315 aa, Pseudomonas resinovorans
MHAQPVLAYRTNRPAHPAHSPPDPGGGCQQPLPGFTPGAHIEIQIAGSKPQWRAYSLVNLPGHAHYEIAVQLEEQSSGGSRWIHQLQVGQPLQVRAPKNHFPLVTQASDYLLIAGGIGITPMLGMARALAAGQQPFTLHYAGREAQGMAYLEEVRALGSAHCWISGGDPARRLPLASLLATPHNGRQLYVCGPKALIASVLHSARELGWDDSHVHSELFTGSLDAAGDASFEVELRSSGITLQVPAGKSVLEAMLDADLDPLFDCRRGDCGVCVAQVLEGSAEHRDICLSARERSDGRFCTCVSRASSARLVLDL

SEQ ID NO: 1047 - protein, 477 aa, Enterococcus faecalis V583
MKRVIWFRRDLRLQDNKALAHALQNSAADELILLFQMNPQQFIQESANHNAFFASLASFKERIDQEAHLQIMVGEPLDLFSRLKRKLPDWQAIYFNEDTCGFGAKRDQQAMRFFEENNIQSFSFQDAYLHGSEEIKKNDGSKYQVFTPYYNKWKEAPKETPIPVSYTAEKIFSACLFPEEEAAYREQIARIPLTHYSVGEETARRRLNTFIDQKLQSYENKRDFPYQDQTSHLSTFLRTGELSIRTIWQELASVPSSLSKETFKKELAWRDFYNMIYSAFPQQKEEAIQEKFRYIQWTNDPEMFVKWQKGETGYPIIDAAMRQLNQTGWMHNRLRMITASFLVKNLHIDWRWGEKYFQKMLIDYDAANNIGGWQWAASTGTDAVPYFRIFNPIIQSKKFDNDGQFIKKYVPELKQVPQKYIHQPNLMNEALQTQYHVHLGENYPKPIVDYASSKKQTLFLYEASKEIHQEMNNPRFQ

SEQ ID NO: 1048 - protein, 177 aa, Glycine max
RALKRAVGDPFKGGIEQGPQIDSEQFQKILKYIRSGVESGATLETGGDRFGNSGFYIQPTVFSNVKDDMLIAKEEIFGPVQSILKFKDLDDVIQRANNTHYGLAAGVFTKNINTANTLTRALRAGTVWVNCFDTFDAAIPFGGYKMSGQGREKGEYSLKNYLQVKAVVTSLKNPAWL

SEQ ID NO: 1049 - protein, 110 aa, Bartonella bacilliformis
EACLKMLQEIGSVKKIPQFIARAKDKNDPFRLMGFGHRVYKNYDPRAKIMQKTCHEVLKELNIQDNPLFDIAMELEHIALNDEYFINKKLYPNVDFYSGITLKALGFPTE

SEQ ID NO: 1050 - protein, 162 aa, Triticum aestivum
MAGMVFGLENPMMTALQHLLDIPDGEAGGAGAPRGEKQGPTRAYVRDARAVAAAPADVKELPGAYAFVVDMPGLGSGDIKVQVEDERVLVISGERTREEEEDPKYLRMEPRMGKLMRKFVLPENADMEKISPACRDGVLPVPVEKLPPPEPKKPKPIQVQVA

SEQ ID NO: 1051 - protein, 109 aa, Bartonella bacilliformis
TCLKMLQEIGSVKKIPQFIARAKDKNDPFRLMGFGHRVYKNYDPRAKIMQKTCHEVLKELNIQDNPLFDIAMELEHIALNDEYFINKKLYPNVDFYSGITLKALGFPTE

SEQ ID NO: 1052 - protein, 479 aa, Streptomyces avermitilis MA-4680
MSSTFRNYIDGAFADASDGRTLDVVDPTTGDVYATSPLSGAADVDAAMAAAAAAFPVWRDATPSVRQRTLLKIADAMEARADELVAAESRDTGKPLHLTRSEELAPAIDQVRFFAGAARMLEGRSAGEYMEGMTSIIRREPVGVCAQVAPWNYPLLMAVWKFAPALAAGNAVVLKPSDTTPASTVLIAEIIGGVLEELGLPRGIFNVVCGDRETGRLMVEHPTPAMASITGSVRAGIQVAQSAAKDVKRVHLELGGKAPAVVFEDADLAKAVEDLVVGGFFNAGQDCTAATRVLVHESVHDEFVAALAKAAADTKTGQPDDEDVLYGPLNNAGQLAQVSGFIERLPEHATIEAGGHRVGEKGYFYAPTVVSGLRQDDEIVQNEVFGPVMTVQSFTDEAQAVQYANGVDYALASSVWTKDHARAMRMSKNLDFGCVWINTHMALVAEMPHGGFKKSGYGKDLSAYGFEDYTRIKHVMTSL

SEQ ID NO: 1053 - protein, 250 aa, Zea mays
MVKAYPTVNEDYLKAVDKAKRKLRGLIAEKNCAPLMLRLAWHSVGTFDVVTKTGGPFGTMKNPVEQAHGANAGLEIAIRLLEPIKEQFPILSYADFYQLAGVVAVEVTGGPDVPFHPGRQDKPEPPPEGRLPDATQGSDHLRQVFSTQMGLSDQDIVALSGGHTLGRCHKDRSGFEGAWTSNPLIFDNSYFKELLSGEKEGLLQLPSDKALLSDPSFRPLVDKYAADEDAFFADYAEAHLKLSELGFAEA

SEQ ID NO: 1054 - protein, 339 aa, Vibrio vulnificus YJ016
MLSQLFRQIRYVFRQTKKQKGQFIQMVNNSIQWFPGHMHKAQKEIAEAIPQIDVIIEVLDARIPFSSENPLISKIRGEKPVVKVLNKRDLADPELTELWIEHLEKEQNVKAMAITTSQTQEVHKILELCRKLAPHREEVGKNIRTMIMGIPNVGKSTIINTLAGRAIAQTGNQPAVTRRQQRINLQNGIVLSDTPGILWPKVENPHSGFRLAATGAVKDTAMEYDEVAFYTVEYLAKHYPEKLKERYQIEELPETDVELMEEIGQRRGALRSGGRVDLHKASEILLHELRSGTLGQITLERPEMITEELVEVELEAARRAEEKAKNKEERRKRYLRNKR

SEQ ID NO: 1055 - protein, 115 aa, Hordeum vulgare subsp. vulgare
MARAAASQLVLVALVAAMLLVAADAAISCGQVSSALSPCISYARGNGAKPPAACCSGVKRLAGAAQSTADKQAACKCIKSAAGGLNAGKAAGIPSMCGVSVPYAISASVDCSKIR

SEQ ID NO: 1056 - protein, 109 aa, Bartonella bacilliformis
TCLKLLQEIGSVKKIPQFIARAKDKNDPFRLMGFGHRVYKNYDPRAKIMQKTCHEVLKELNIQDNPLFDIAMELEHIALNDEYFINKKLYPNVDFYSGITLKALGFPTE

SEQ ID NO: 1057 - protein, 113 aa, Oenococcus oeni
DIKLLVVSDAEGILGIGDWGVQGVDIAVGKLMVYTVAAGIDPSTVLAVVIDAGTNNEKLLKDPMYLGNKFNRVRGDKYYDFIDKFVNHAESLFPNLYLHWEDFGRSNASNILN

SEQ ID NO: 1058 - protein, 159 aa, Zea mays
  unsure (1)..(159): unsure at all Xaa locations
MGGILAVVGCSECSQAKRARILACSIRLKHRVPDWPGLYQXTRPTSLRQQRFYSSSPLSGEQPLLNEDRIGEVETHVQIYNHIKVRKQLTGTHKFSTSSDXEVIMPLYXKHCHNFVHMLDRLLTFELYDTRDRTYVTTRDTIEGNPLYIGCGNDGSDCI

SEQ ID NO: 1059 - protein, 440 aa, Shewanella oneidensis MR-1
MTKATQTSRQAQIDAIKKDWAENPRWKNVRRPYTAEEVVALRGSIVPENTIAKRGAAKLWDLVNGGSKKGYVNSLGALTGGQAVQQAKAGIEAIYLSGWQVAADANLAGTMYPDQSLYPANSVPAVVSRINNSFRRADQIQWSNGVNPEDENFVDYFLPIIADAEAGFGGVLNAFELMKSMIDAGAAGVHFEDQLASVKKCGHMGGKVLVPTQEAVQKLVAARLAADVSGVETLVIARTDANAADLLTSDCDPYDRDFVTGERTNEGFYRVNAGLDQAISRGLAYAPYADLIWCETAKPDLEEARRFAEAIHAQYPDQLLAYNCSPSFNWKKNLDDATIARFQQALSDMGYKYQFITLAGIHNMWYNMFDLAYDYARGEGMKHYVEKVQEVEFAAAKKGYTFVAHQQEVGTGYFDQVTTVIQGGHSSVTALTGSTEEEQF

SEQ ID NO: 1060 - protein, 380 aa, Phanerochaete chrysosporium
MSKRTFKIVILPGDGIGPEVVAEATRVLEVVSASSSDVEIKLETHDFGGCSIDKHGEPLTAATLEACKLADAILLGAIGGPKWGVNSKVRPEQALLALRKALGLYANIRPANFASDSLLAYSPLKPSVARGVDIIVIRELIGGAYFGERKELGARAQEDAAWDTMIYSVPEVQRITRSRRQVASPDPPLPVHSIDKANVLASSRLWRKVATETIQNEFPQLKLDHHLVDSASMLIVANPKKLNGVILTENLFGDILSDESSVIPGSLGLLPSASLAARPLWPNTAHRRSSPRRVYEPIHGSAPDIAGQGIANPIGTILSAAMLCGTRSVWRSPAKAIEAAVEGARRQGDRREGLRTADLGGSSKTKDIGHKVVEILKATL

SEQ ID NO: 1061 - protein, 453 aa, Aquifex aeolicus VF5
MWELDPKTLEKWDKEYFWHPFTQMKVYREEENLIFERGEGVYLWDIYGRKYIDAISSLWCNVHGHNHPKLNNAVMKQLCKVAHTTTLGSSNVPAILLAKKLVEISPEGLNKVFYSEDGAEAVEIAIKMAYHYWKNKGVKGKNVFITLSEAYHGDTVGAVSVGGIELFHGTYKDLLFKTIKLPSPYLYCKEKYGELCPECTADLLKQLEDILKSREDIVAVIMEAGIQAAAGMLPFPPGFLKGVRELTKKYDTLMIVDEVATGFGRTGTMFYCEQEGVSPDFMCLGKGITGGYLPLAATLTTDEVFNAFLGEFGEAKHFYHGHTYTGNNLACSVALANLEVFEEERTLEKLQPKIKLLKERLQEFWELKHVGDVRQLGFMAGIELVKDKEKGEPFPYGERTGFKVAYKCREKGVFLRPLGDVMVLMMPLVIEEDEMNYVIDTLKWAIKELEKEV

SEQ ID NO: 1062 - protein, 719 aa, Zea mays
ASLRAGKSFPVGRVSCRVRSVQARRVRFGGKLGRCWCSLGAAFGLIGAAVWRCAVCRLAVCASLVADVFRKQGQEWYCTSGLPSDISVVVGEQSFHLHKFPLLSKSGLLEKRIREKIDNRDDSCAIDLSDIPGGAKAFELAAKFCYGVKFEMTASNVVHLRCAADYLEMTEEISEGNLIAETESFLTQTVLRSWKDSVKALQTCDNVLDVAERLQIVKRCVDSIATKSCSDPDLFGWPVARYGGPMQSPGGSLLWNGISTGARPRNSSPDWWYDDVSCLSLPLYKKLISAMEYRGISQGVIVGSLNHYAKRRLPGLNRRKSIGDASNCLSMTSLTSIPSEDDQKYLLEEIDRLLPFQRGVTSCKLLFGLLRTAIFLKASPSCVSNLERRIGMQLDKASLEDLLIPNVSDSVETLYDVECVQRIVDHFLSMDQETGGASPGIGEDGQMLASPSLMPITMVAKLIDGYLAEVAPDMNLKLPKFRSLAAAIPDYARPIDDGLYRAIDIYLKAHPYLPESDKEELCRVMDCQKLSLEACTHAAQNERLPLRVILQVLFFEQLQLRSSIAECLMISEPLDGGGGFSRQLGGLPVSGEHLRGAGWPLAARENQTLREGMDSMKQRVSELEKECFAMKEDIERLGRSRSAGKSRFPFALAAKPHVCGTKDKEAAPESSKSETSKSKAAAATRSDDKLAVVKGGAAAAGDGGPQLKHRKHKTSLSAC

SEQ ID NO: 1063 - protein, 282 aa, Solanum bulbocastanum
MDRMYSGGGDMGYGYENGVVMTRDPKPRLRWTADLHDRFVDAVTKLGGPDKATPKSVLRLMGLKGLTLYHLKSHLQKYRLGQQTKKQNAAEQNRENIGESFRQFSLHSSGPSITSSSMDGMQGEAPISEALRCQIEVQKRLHEQLEVQQKLQMRIEAQGKYLQAILDKAQKSLSTDMNSPSAVDETRAQLTDFNIALSNLMDYMHGHNGDETSAGERTQDDTNKDLQRSTYLTEGEQKKIMNIKLEETSVSFDLNSRSSYDFIGMSSAALEAKHFSNGRLEI

SEQ ID NO: 1064 - protein, 113 aa, Oenococcus oeni
DIKLLVVSDGEGILGIGDWGVQGVDIAVGKLMVYTVAAGIDPSTVLAVVIDAGTNNEKLLKDPMYLGNKFNRVRGDKYYDFIDKFVNHAESLFPNLYLHWEDFGRSNASNILN

SEQ ID NO: 1065 - protein, 462 aa, Bacillus thuringiensis serovar konkukian str. 97-27
MTFSKSTTDKPSYTYEELSEKNKAYVWHPFTQMKDYLEEDPVIIERGEGRKLYDVNGNEYWDGVSSIWLNVHGHQVPELDEAIREQLNKIAHSTMLGLANVPSILLAEKIIEVVPEGLKKVFYSDSGSSAVEIAIKMAFQYWQHKGKPKKQRFVTLKEAYHGDTIGAVSVGAIDLFHQVYSSLLFEAIKMPYPYTYRSPYGNDKAEIVKKHLEEMEELLKDKHEEIAAIIVEPLMQGAGGMITMPKGYLRGLRNLCTKYNVLFITDEVATGFGRTGKMFACEHENVTPDILTAGKGLTGGYLPVAITVTTDEIYNAFLGSYEEQKTFFHGHSYTGNPLGCAVAIANLELYEKTNLIEEVARKTEYVATQLEELFACKHVGDIRQCGLMVGIELVKNKETKEAFEWTERVGVQVCKRSRELGMILRPLGNTIVFMPPLASTIDEIDEMLRILYKAISDITEGE

SEQ ID NO: 1066 - protein, 236 aa, Rickettsia rickettsii
MIDYTKTLTAASKNKTFDEGLRQYMLKVYNYMALALLLTGVAAVTTISVEPIYNLMFQTGFGTIIMFAPLGIALYFFMGFGQMNLQTAQILFWVYAGLTGMSLAYLALIYTGASIARTFFICSSVFGAMSLYGYSTSRDLTSMGSFFAMGLIGLIIASLVNLFLKSSALSFATSLIGIVIFMGLIAWDTQKIKSMYYMAGNDEVGQKLSIMAAFTLYLDFINLFLYLMRFLGNRRD

SEQ ID NO: 1067 - protein, 167 aa, Blumeria graminis
MGPTTTLYDFMPKDKNGEPVPLEKYKGQVVLIVNTASKCGFTPQFEGLEKLYKSVSSTHPGKFTILGFPCNQFGGHDPGSNDEIQNFCRINYGVTFPMLGKVNVNGDTADPLFEWLKVEKPGIMGMKRVKWNFEKWLVSKDGKPIKRYSSTAGPEGFQSLIIEEIEK

SEQ ID NO: 1068 - protein, 78 aa, Glycine max
MGLWMLLEGFLLLANSLAILNEDRFLGPRGWSMSEVSGNGQTKSLKGQIVGLIYATQFLRMPLIALNVLIIVVKMVSG

SEQ ID NO: 1069 - protein, 486 aa, Bordetella pertussis Tohama I
MEDLRNHEFKNYIGGQWVACAAGKTYPNVNPADTDDIVGRFQASQAEDAAAAVAAAQAAFDGWRNLAVSKRAALMQRAADYLEAHAEQFGRELTREEGKALNLAKDEVLRSAQTIRFYAAEGQSFSGETFVNDDPDMVVYSQREPLGVVTVISPWNFPVSIPARKIAPALITGNTVVFKPSSDAPLSGLRLVEAFEQAGLPPGVLNLVTGSASAIGAAITQASQVRAVSFTGSTAAGEQIHRSVDMTTRTQMELGGKNPLIVMADADLDRAVDLVVKGGFSLSGQACTGTSRVLVDAPVKAAFTEKLLAKVKALKVGNSLEGSFDLGPLATARQLESVMRYIEVGKQEARLLCGGERLEGPGYERGYYLTPAVFADVTQQMRIAREEIFGPVIALIEVNGYEDAIAKANDTEYGLAAAIATTNAQYAHRFARDIQAGTVKINRTTTGNLINAPFGGLKRSSTSTFRESGRIGLEFYTQIKTVYRAG

SEQ ID NO: 1070 - protein, 158 aa, Xanthomonas campestris pv. campestris str. ATCC 33913
MNIVRYPQWPTHALQNEIKQVFDRFFEQSGDTDESAVVTAQWVPRVDIKEEANQFVLYADLPGIDPSQIEVQMDKGILSIKGERKSESSSETERFSRIERRYGSFHRRFALPDSADADGITADGRNGVLEIRIPKRPAATPRRIQVGGGQDGGGTTVQ

SEQ ID NO: 1071 - protein, 415 aa, Glycine max
  unsure (1)..(415): unsure at all Xaa locations
MGNCWGPPPHNPTPTTTGNLSSSTGTTGTSQAISSISYTTTTTTTTTSSGSGSSSINSKFSVSSGGQPYPNGQILPTSNLRIFTFAELKAATRNFKADTVLGEGGFGKVFKGWLEEKATSKTGSGTVIAVKKLNSESLQGLEEWQSEVNFLGRLSHPNLVKLLGYCLEESELLLVYEFMQKGSLENHLFGRGSAVQPLPWDIRLKIAIGAARGLAFLHTSEKVIYRDFKASNILLDGSYNAKISDFGLAKLGPSASQSHVTTRVMGTYGYAAPEYVATXGHLYVKSDVYGFGVVLVEILTGQRALDTNRPSGLHSLTEWVKPYLHDRRKLKGIMDPRLEGKFPSKAAFRIAQLSLKCLASEPKQRPSMKEVLENLERIQAANEKPVEPKFRSTHAASRQGHQAVHHRSPRQDGSY

SEQ ID NO: 1072 - protein, 331 aa, Oryza sativa (japonica cultivar-group)
MREEEEPSWFARWEEQLPAPDELMPLSQSLITPDLAVAFDIPTHGGGGGGGVGGGVVGGDGVGGGGGGGGGGGGGVGAGEMNGGASSAAGSSGGGGGGGGGDEPARTLKRPRLVWTPQLHKRFVDAVAHLGIKNAVPKTIMQLMSVDGLTRENVASHLQKYRLYLKRMQGVGNGGGGGGGGGAGAGGSHSSGSGTDAATEHLFATGPVPFLPPGRAPAGGDPYPPFAPMGGHHHHPPQIGHFHHHPAARPLGHYGSGPGAGFDHGFLSRAVAGGGPPVGPPGMHHRMVGPAAGMAMMAPSPFAEELELGSRGGGGGGGRRELTLFPTTGDH

SEQ ID NO: 1073 - protein, 474 aa, Aspergillus niger
MAFARLAARRLPVARRLVPSIDSLPQQRFFSMSQHVKSQNKASVPNPDPAADSVSVAFVNDQSPYMLPTYVRPAPVMVKGQGCYLWDMENRKYLDLTAGIAVNSLGHCDPEVAQIIAEQAEVLVHASNLYYNAWTGALSKLLIDVTQKSGAMRDASQVFICNSGTEANEAAIKFARKVGRSLDPSGAKHEVVSFHNSFHGRTMGALSATPNPKYQTPFSPMLPGFKYGNYNDVAQLESLVTEKTCGVIVEPIQGEGGINVATPEFLVALRKRCDEVGAVLIFDEIQCGLSRTGSFWAHAHPSLAPASGEAAHPDILTSAKALGNGIPIGATIVSEKTVAKHIKPGDHGTTYGGNPLVCRVAHHIVNRLADPELQKSVEIKGDLLVSGFKDLQKKFPNVISEIRGRGLIRGLQLSPEFVSKAGDLVGAARERGMLIITAGEGCIRFVPPLTITEEQIKSGLKILEQALEAVVAQA

SEQ ID NO: 1074 - protein, 336 aa, Lactobacillus reuteri
MEALVLTGKKQLEIEDIKEPEIKPDEVLIHTAYAGICGTDKALYAGLPGSASAVPPIVLGHENSGVVTKVGSEVTNVKPGDRVTVDPNIYCGQCKYCRTQRPELCEHLDAVGVTRNGGFEEYFTAPAKVVYPIPDDVSLKAAAVVEPISCAMHGVDLLETHPYQKALVLGDGFEGQLFAQILKARGIHEVTLAGRSDEKLENNRKHFGVKTIDTTKEEIPADAYDIVVEAVGLPATQEQALAAAARGAQVLMFGVGNPDDKFSVNTYDVFQKQLTIQGAFVNPYTFEDSIALLSSGVVDPLPLFSHELDLDGVEDFVSGKLGKVSKAVVKVGGEEA

SEQ ID NO: 1075 - protein, 435 aa, Nostoc sp. PCC 7120
MTTELLQQVRVIDPVSGIDNITDVLIADGVIQAIAPNIPNTRPDTQIRDCRGLVLGPGLVDLYSHSGEPGFEERETLASFLQAAAAGGFTKVSILPDTSPAIDNPALVAQLQKRGQGAGGRGQGEKSPIPNPQYLAPLLYIWGAMTLDVAGKQMTELADLAAAGVVGFTDGLPLDNLSLVRRLLEYVQPLGKPVAFCPCDRQLSANGVMREGADALRFGLPPIPPSAETSAIAALLELVAASGNTQVHIMRVSTARSVELIAAAKAQGLPITASTTWLHLLLDTKAVKSYNTSLHLDPPLGNASDVKALREGVRTGVIDAIAIDHAPYTYEEKVQAFAEAPPGAIGFELALPLLWQNLVETGEFTALELWQALSTRPAQCIQQKVSAFAPHHQAELTLFDPQKIWKVEKKNLYTLSSNTSWLGQELQGRVIQTWV

SEQ ID NO: 1076 - protein, 158 aa, Listeria innocua Clip11262
MNVHDFSEKAMNGKEIALSDYKGKVLLIVNTASKCGLTPQLEGLEKMYKKLGGDNFEILGFPCNQFLRQDPGSDEEILEFCQMNYGVTFQMFSKIKVKGKDAAPLYKYLTEQTGGKKVEWNFAKFLIDENGEVVERFPSKMKPEDFEDKVEALVAAVK

SEQ ID NO: 1077 - protein, 512 aa, Bradyrhizobium japonicum USDA 110
MDKPTPKADVFQANRDRVAPLLKTLRADGIGHMIDGKIVPSISGETFETKSPVDGAVLASVARGNAEDIDRAATAAALAFKSWREMGPAMRKKLLHRVADAIEDNADDIAVLECIDTGQAYRFMAKAAIRAAENFRFFADKCAEARDGQNTPSDEHWNVSTRVPIGPVGVITPWNTPFMLSTWKIAPALAAGCTVVHKPAEWSPATAAILARLVKEAGVPDGVLNTVHGFGEEAGKALTEHPAIKAIGFVGESATGSAIMVQGAPTLKRVHFELGGKNPVIVFDDADLDRALDAVVFMIYSLNGERCTSSSRLLIQQSIAEKFVEKLTARVKALKVGHPLDPSTEIGPLIHERHLAKVCSYFDVARKDGATIAVGGKAYDGPGGGHYVEPTLVTGAHGKMRVAQEEVFGPFLTVLPFKDEADAIEVANDIRYGLTGYVWTNDVGRALRVADALEAGMIWLNSENVRHLPTPFGGMKASGIGRDGGDYSFDFYMETKHVSLARGTHKIQKLGI

SEQ ID NO: 1078 - protein, 297 aa, Glycine max
  unsure (1)..(297): unsure at all Xaa locations
SYVGPPPRYADVSWPGEAHTYKIEKILFHGKSEFQELLVFESSRQGKVAILDGHIQLTENDEFAYQEMLTHLALCSIPDPKKVLLIGGGDGGILREISRHSSVEHIDICELDQMVIDVYSEFFPDIAXGYEDPRVHVHISDGVAFINSVPEGTYDVIISDAFPAMGHSADVLADECFLESVAKALRPGGVFSAPADSLWHKNFVVADTIANCKKIFKGSVNYAWTTVPTYARHFLSNYIGVIGFMLCSTEGPPVNFKHPINKLNPEKNGVAKGPTKFYNPEIHAAAFCLPSFVDKVD

SEQ ID NO: 1079 - protein, 120 aa, Zea mays
MNAPDRYERFVVPEGTKKVSYERDTKIVNAASFTVEREDHTVGNILRMQLHRDPNVLFAGYKLPHPLQYKIIVRIHTTSQSSPTQAYTQAINDLDKELEYLKQAFEDEKNRYEDRMKQGF

SEQ ID NO: 1080 - protein, 343 aa, Corynebacterium glutamicum ATCC 13032
MRIATLTSGGDCPGLNAVIRGIVRTASNEFGSTVVGYQDGWEGLLGDRRVQLYDDEDIDRILLRGGTILGTGRLHPDKFKAGIDQIKANLEDAGIDALIPIGGEGTLKGAKWLSDNGIPVVGVPKTIDNDVNGTDFTFGFDTAVAVATDAVDRLHTTAESHNRVMIVEVMGRHVGWIALHAGMAGGAHYTVIPEVPFDIAEICKAMERRFQMGEKYGIIVVAEGALPREGTMELREGHIDQFGHKTFTGIGQQIADEIHVRLGHDVRTTVLGHIQRGGTPTAFDRVLATRYGVRAARACHEGSFDKVVALKGESIEMITFEEAVGTLKEVPFERWVTAQAMFG

SEQ ID NO: 1081 - protein, 488 aa, Lycopersicon esculentum
MACSVDTLAPFLGPNTTNAVAAASYICNQFSGVSDRFVDTGYAIDSTYLLFSAYLVFSMQLGFAMLLAGSVRNTMNIMLTNVLDAAAGGLFYYLFGFAFALGGPSNGFIGRHFFGLKEIPSNSFDYMNFLYQWAFAIAAAGITSGSIAERTQFVAYLIYSSFLTGFVYPVVSHWFWTPDGWASPTNSNLLFGSGVIDFAGSGVVHMVGGIAGFYGALIEGPRIGRYDHTGRSVALRGHSASLVVLGTFLLWFGWYGFNPGSFNKILVTYGASGGYYGQWSAVGRTAVTTTLAGCTAALTTLFGKRILSGHWNVTDVCNGLLGGFAAITAGCSVVEPWAAIICGFVAALVLIGFNMLAEKFKYDDPLEAAQLHGGCGAWGIIFTGLFAKGEFVDQVYPGKPGRPHGLFMGGGGKLLGAHIIQILVIIGWVSATMGPLFYILHKFKLLRISSEDEMAGMDLTRHGGFAYYHEEDPKLGMQMRRIEPTTST

SEQ ID NO: 1082 - protein, 457 aa, Vibrio vulnificus YJ016
MEYIAHSILIISAHQKKDRPMTNLTRRQQIEALEKDWATNPRWKNVKRTYTAEEVVALRGSMVPANTIAQRGADKLWSLVNGSSKKGYVNCLGALTGGQAVQQAKAGIEAIYLSGWQVAADNNTASTMYPDQSLYPVDSVPSVVKRINNSFRRADQIQWSNGKSPEEGGIDYFLPIVADAEAGFGGVLNAYELMKSMIEAGAAGVHFEDQLASVKKCGHMGGKVLVPTQEAVQKLVAARLAADVAGTTTLVIARTDANAADLLTSDCDPYDADFIVGERTQEGFYRVRAGIDQAISRGLAYAPYADLIWCETATPCLEEARKFAEAIHAEYPDQLLAYNCSPSFNWEKNLDAETIAKFQQELADMGYKYQFITLAGIHNMWFNMFELAHAYAQGEGMRHYVEKVQRPEFEAAEKGYTFVAHQQEVGTGYFDKMTNTIQGGNSSVTALTGSTEEDQFH

SEQ ID NO: 1083 - protein, 197 aa, Glycine max
MSASRFIKCVTVGDGAVGKTCMLISYTSNTFPTDYVPTVFDNFSANVVVDGSTVNLGLWDTAGQEDYNRLRPLSYRGADVFLLAFSLISRASYENVAKKWIPELRHYAPGVPIILVGTKLDLRDDKQFFQDHPGAVPITTAQGEELRKLIGAPIYIECSSKTQQNVKAVFDAAIKVVLQPPKQKKKKRKGQKACSIL

SEQ ID NO: 1084 - protein, 253 aa, Brassica napus
  unsure (1)..(253): unsure at all Xaa locations
NHREYQDLQRLYSEIGHPPSDAFLFLRSYPNRRKQNPPTRFLRLTHKLRXTSTDFILXGNHHHSTIIRIFGYYDECKRRFNVRLWKIFTDCFNCLPVAALIDDKILCMHGGLSPELDNLNQIREIQRPTEIPDSGLLCDLLWSDPDQKIEGWADSDRGISCTFGADKVAEFLDKNDLDLICRGHQVVEDGYEFFAKRRLVTIFSAPNYGGEFDNAGALLSVDESLVCSFEIMKPALASSSGHPLKKVPKMGKS

SEQ ID NO: 1085 - protein, 371 aa, Vibrio vulnificus YJ016
MPLNHSCPPLWGHLSSFYPNKECSMFFEWQGNEPATLQCVDKFFETDDTVSIRLADLTESLLFQFKPGQFVNLGVEIDGKMEFRAYSISSLAGEEYLQFTIKRVEGGKVSNFIIDSLLIGDTVQALAPAGEFNCVDHPPRELDGQGKALLISAGCGVTPVFAMAKHWLSNEMNVDIEFLHIARSAQETIYFDHLSTCQSAYAHFHLKLLLKDAQGTTHPQGRFNAQWLQDLVPDFATRTIYLCGPNQFMQDTQDYLQALGFDMNHFYHESFTPEKVEAMEASDEEVCISVPDFAQTINAKKGQLLADVLENAGLPLIVACRSGICGSCKCKVANGQVRSISQETLTADEIAQGYVLACSSHIESDLDVSLH

SEQ ID NO: 1086 - protein, 353 aa, Xylella fastidiosa 9a5c
MRGYVLEAKGTAKWKDVPMPVLGPNDALVRPTAVATCTTDVHMIATAALPKTVGKVIGHEAVGVVEKVGENVKAFRPGDRVVLPCGNSDWRHPRAQRGEAKYYQTNSPYYSDDPSIGGVFSEYVRTLDADLNLARIPDKVSDLQAVMLPDMAATGFTGVERLGIQFGETVLVMGLGPVGLMAVAGAALRGAGRIIGVDSRPNTVELARAYGVTDIVDFTGGQTLEKVMALTAGQPVDSVLIASGGTASEVFTTALKAVKFGGRVACVSGFLHDESVTIPLEVWNYGFMEKFLTGVHVQDGRDWIERLLAMLECGRFDTRPLVSHVLHGWDSLEQGIELMRSRDPAVIKPVIVI

SEQ ID NO: 1087 - protein, 215 aa, Solanum bulbocastanum
MLTCITCKQKIEDDGGEEGPRGRAPTPHTKDSIKSLTAQIKDIALKVSGAYKCKSSTPAGTYRKGHRPYPDFDTISEGVPYPFQPASSSSTPAWDFTSAGNLRTPRPDSRFARGFSGGGGGAESISQSGDVVVEDDGQKDWTAHVEPGVQITFVSLPNGGNDLKRIRFSRDMFNKWQAQRWWGENYDRIMELYNVQRFNKQALNTPGRSEDGAWI

SEQ ID NO: 1088 - protein, 121 aa, Brucella melitensis biovar Abortus
MADKSVFDTCSTASTPRKNWASSLKVSGHIKWFDVAKGYGFIVPDQPGLTDILLHVTSLRRDGFQTALEGARIVCEVRHGDRGLQCFRVLSMDASTAIHPAQMPPQCTHVTVTPSSGLERV

SEQ ID NO: 1089 - protein, 359 aa, Capsicum chinense
MGSINQSLTQTEDEAFVFAMQLASASVLPMVLKATVELDLLEIMAKSGPGAFISPSELAAQLPTKNPEAPVMLDRMFRLLATYSVLNCTLRTLPDGRVERLYSLAPVCKFLTKNGDGVSIAPILLMNQDKVLMESWYHLTDAVLDGGVPFNKAYGMTTFEYHGTDPRFNKVFNCGMSDHTTLSMKKILEDYTGFEGLNSIVDVGGGTGATVNMIVSKYPSIKGINFDLPHVIRDAPSYPGVEQVGGDMFVSVPKADAIFMKWICHDWSDDHCIKLLKNCYEALPANGKVIIVECILPEAPDTSAATKSKVHGDIIMLAHNPGGKERTEKDFEALANWGWFSRFRKVCCAYHTWVMEFNK

SEQ ID NO: 1090 - protein, 476 aa, Aquifex aeolicus VF5
MIEKKMLIGGEWVDKEEKIEVIYPYTRKPIGRVPKGDEKDVEKAIERAKEGFKEIFSLTAYERYEILMRAAQLLKERAEEFAKTLVLEVGKTIREARTEVQRAIQTLIFSAEEAKRVNGETFPIDAHPNGKGKLGFYIRVPVGIVSAITPFNFPLNLSMHKVAPALAAGNAVILKPSERTPLTPLMLGEILLEAGVPPKALSVIPGYGDVGKAMTTHPDVRVVSFTGSRKVGDIIARQVGIKKLVLELGSNSAIILHKDGNLEKAVEKTVQGGYAIAGQVCISVQRVFVHEDLYDEFIKRLKERVSKLKVGDPMNEDTDLGPMIAPSELERIQEWISEAVQKGAKIEAGGLRCAEDETIFSPTIVSLVPEDSKLFKEEAFAPVVAVNPYKDIEEAIRWVNSSDYGLQVGVFTNDVKLAWKCIKEIEAGGVLINEGPTFRADHMPYGGVKYSGIGREGPKFAIEDYTEIKTVIFDLT

SEQ ID NO: 1091 - protein, 258 aa, Zea mays
  unsure (1)..(258): unsure at all Xaa locations
MAKNYPTVSAEYSEAVXEKARRKLRALIAEKSCAPLMLRLAWHSAGTFDVXRRGTGGPFGTMKHQSELAHGANAGLDIAVRLLEPIKEEFPILSYADFYQLAGVVAVEVXGGPEIPFHPGRRDKPQPPPEXGRLPDATKGSDHLRQVFGKQMGLSDQDIVALSGGHTLXGRCHKERSXGFEGAWTTNPLXFDNSYFXELLSGDKXRALLQLPSDKALLSDPVFXRPLVEKYAADEKAFFDDYKEAHLKLSRTGGLLML

SEQ ID NO: 1092 - protein, 251 aa, Triticum aestivum
  unsure (1)..(251): unsure at all Xaa locations
MKTFLIFVLLAMAMNIATAARQLNPSNKELQSPQQSFSHQQQPFPQQPYPQQPYPSQQPYPSQQPFPTPQPQFPQQSQQPFPQPQQPIPLQPQQPFPQQPQQPQQPFPQPQQPFPWQPQQPFPQXTQQSFPLQPQQPFPQQPQQPFSQPQLQFPHQPEQISPQQPQQPFLLESQQPFPQQPQQPFSQPQQLIPMQPQQXXSPRXXQQSQQTFSRGPNNYFLXLXQPIPQATNKQTXSPLQTGXQPFPPSWQ

SEQ ID NO: 1093 - protein, 158 aa, Streptococcus intermedius
MTKIYDFSIFDQNNRSISLEIYKGNVLLIVNTATGCGLTPQYKGLQHLYTRYQNQGFEILDFPCNQFMGQAPGTAEEINRFCSLHYQTTFPRFAKVKVNGKEADPLYIWLKEQQAGPLGKRIEWNFTKFLINREGQVVKRFSSKAEPKEIEESLQKLL

SEQ ID NO: 1094 - protein, 227 aa, Thermus thermophilus HB27
MERPLESYKKEAAHAAIAYVQDGMVVGLGTGSTARYAVLELARRLREGELKGVVGVPTSRATEELAKREGIPLVDLPPEGVDLAIDGADEIAPGLALIKGMGGALLREKIVERAAKEFIVIADHTKKVPVLGRGPVPVEIVPFGYRATLKAIADLGGEPELRMDGDEFYFTDGGHLIADCRFGPIGDPLGLHRALLEIPGVVETGLFVGMATRALVAGPFGVEELLP

SEQ ID NO: 1095 - protein, 429 aa, Rhodococcus equi
MSTTGTPRTAEEIQKDWDTNPRWKGVTRNYTAEQVVKLQGTVVEEATLARRGSEILWDLVNNEDYINSLGALTGNQAVQQVRAGLKAIYLSGWQVAGDANLSGHTYPDQSLYPANSVPQVVRRINNALLRADEIAKVEGDTSVDNWLAPIVADGEAGFGGALNVYELQKAMIAAGVAGSHWEDQLASEKKCGHLGGKVLIPTQQHIRTLTSARLAADVADVPTVVIARTDAEAATLLTSDVDERDREFLDGTRTAEGFYGVKNGIEPCIARAKAYAPYSDLIWMETGVPDLEVAKKFAEAVRSEFPDQLLAYNCSPSFNWKAHLDDATIAKFQKELGAMGFKFQFITLAGFHSLNYGMFDLAHGYAREGMTAFVDLQEREFKAAEERGFTAIKHQREVGAGYFDSIATTVDPNTSTAALKGSTEEGQFH

SEQ ID NO: 1096 - protein, 456 aa, Arabidopsis thaliana
MENKPSVLTERYEVGRLLGQGTFAKVYFGRSNHTNESVAIKMIDKDKVMRVGLSQQIKREISVMRIAKHPNVVELYEVMATKSRIYFVIEYCKGGELFNKVAKGKLKEDVAWKYFYQLISAVDFCHSRGVYHRDIKPENLLLDDNDNLKVSDFGLSALADCKRQDGLLHTTCGTPAYVAPEVINRKGYEGTKADIWSCGVVLFVLLAGYLPFHDTNLMEMYRKIGKADFKCPSWFAPEVKRLLCKMLDPNHETRITIAKIKESSWFRKGLHLKQKKMEKMEKQQVREATNPMEAGGSGQNENGENHEPPRLATLNAFDIIALSTGFGLAGLFGDVYDKRESRFASQKPASEIISKLVEVAKCLKLKIRKQGAGLFKLERVKEGKNGILTMDAEIFQVTPTFHLVEVKKCNGDTMEYQKLVEEDLRPALADIVWVWQGEKEKEEQLLQDEQGEQEPS

SEQ ID NO: 1097 - protein, 546 aa, Glycine max
MGNCCSQGNVADGPADDSAAANDKGEANQQGSNNHANDNNDNSTNPTTAPTTTSKPPPTVTPPTSKPSKPAAMGPVLGRPMEDVRATYTIGKELGRGQFGVTHLCTNKATGQQFACKTIAKRKLVNKEDIEDVRREVQIMHHLSGQPNIVELKGAYEDKQSVHLVMELCAGGELFDRIIAKGHYTERAAASLLRTIMQIIHTFHSMGVIHRDLKPENFLMLNKDENSPVKATDFGLSVFFKEGETFKDIVGSAYYIAPEVLKRKYGPEVDIWSVGVMLYILLSGVPPFWAESEHGIFNAILRGHIDFTSDPWPSISNAAKDLVRKMLTTDPKQRLTSQEVLNHPWIKEDGEAPDKPLDNAVLNRLKQFRAMNQFKKVALRVIAGCLSEEEIMGLKEMFKGMDTDNSGTITIEELKQGLAKQGTKLTEQEVKQLMEAADADGNGTIDYDEFITATMHMNRMNREEHLYTAFQYFDKDNSGFITTEELEQALREYNMHDGRDIKEILQEVDGDNDGRINYDEFAAMMRKGNPEVMTKKRRDSLPLPLP

SEQ ID NO: 1098 - protein, 351 aa, Clostridium beijerinckii
MKGFAMLGINKLGWIEKERPVAGSYDAIVRPLAVSPCTSDIHTVFEGALGDRKNMILGHEAVGEVVEVGSEVKDFKPGDRVIVPCTTPDWRSLEVQAGFQQHSNGMLAGWKFSNFKDGVFGEYFHVNDADMNLAILPKDMPLENAVMITDMMTSGFHGAELADIQMGSSVVVIGIGAVGLMGIAGAKLRGAGRIIGVGSRPICVEAAKFYGATDILNYKNGHIVDQVMKLTNGEGVDRVIMAGGGSETLSQAVSMVKPGGIISNINYHGSGDALLIPRVEWGCGMAHKTIKGGLCPGGRLRAEMLRDMVVYNRVDLSKLVTHVYHGFDHIEEALLLMKDKPKDLIKAVVIL

SEQ ID NO: 1099 - protein, 188 aa, Oryza sativa (japonica cultivar-group)
MSAVNITNVAVLDNPTAFLNPFQFEISYECLIPLDDDLEWKLIYVGSAEDENYDQQLESVLVGPVNVGTYRFVLQADPPDPSKIREEDIIGVTVLLLTCSYMGQEFMRVGYYVNNDYDDEQLREEPPAKLLIDRVQRNILADKPRVTKFPINFHPEPSTSAGQQQQEPQTASPENHTGGEGSKPAADQ

SEQ ID NO: 1100 - protein, 317 aa, Yersinia pestis CO92
MTDKLTSLRQITTVVADTGDIAAMKLYQPQDATTNPSIILNAAQIPEYRKLIDEAIAWAREQSSDHAQQIVDATDKLAVNIGLEILKLIPGRISTEVDARLSYDTVASVAKAKRLIKLYNEAGISNDRILIKLASTWQGIRAAEQLEKEGINCNLTLLFSFAQARACAEAGVFLISPFVGRILDWYKANGDQKEFAPSEDPGVVSVTEIYQYYKKHGYKTVVMGASFRNLGEIIELAGCDRLTIAPSLLKELAESEGPVERKLAYTGEIQAKPAPLTEAEFYWQHNQDPMAVDKLADGIRKFAIDQGKLEKMISDLL

SEQ ID NO: 1101 - protein, 536 aa, Glycine max
MDSNSSSPSPNNHASTTKINGFFHPKLGSQPATSSRSRLAMASPVNSDPKVVTGTAGYILEDVPHFTDYIPNLPTYPNPLQDNPAYSVVKQYFVHVDDSVPQKVVVHKDGARGVHFRRAGPRQKVYFEADEVQAAIVTCGGLCPGLNTVIRELVCGLHHMYGVKRVLGINGGYRGFYARNTITLTPKSVNDIHKRGGTVLGTSRGGHDTKKIVDSIQDRGINQVYIIGGDGTQKGASAIFEEVRRRGLKVSVVGIPKTIDNDIPVIDKSFGFDTAVEEAQRAINAAHVEAESVENGIGVVKLMGRNSGFIAMYATLASRDVDCCLIPESPFYLEGPGGLYEYIEKRLKENGHMVIVIAEGAGQELVSESVQSMSKQDASGNKLFQDVGLWISQKIRDHFAAQKTLPITLKYIDPTYMIRAIPSNASDNVYCTLLAQSAVHGAMAGYTGYTSGLVNGRQTYIPFYRITERQNHVVITDRMWARPLSSTNQPSFLDSKGDNEEKKEEEAALNQLPDGHCSKDTSLANKEINSIYPTTC

SEQ ID NO: 1102 - protein, 158 aa, Pseudomonas putida KT2440
MSVSSSSFTDGGVIALQQVGQDPACGAGEERTPQLSWDNLPAGTRSLALIMFDPDGGKGVGVVHWVAYNIDPEHDGLKEGMAGVSGPYVTVGRNSRGTQSYRGPCPPAGDNPHHYALTLIATDLPLGTLPEGLDRSGLLQLLQGHALGAQSLVGRYGH

SEQ ID NO: 1103 - protein, 413 aa, Zea mays
  unsure (1)..(413): unsure at all Xaa locations
MGNCASAIDAFVQRGNRASPAATAGMSASRRTSSSATTGKLSTLSSASTFMPSTVSGGDDDDDDPVGQILESPNLKIYTFAELKSATRNFRPETVLGEGGFGKVYKGWVDEKTMNPSKASTGVMVAVKKLNPESVQGMEQWQSEVNFLGRISHPNLVRLLGYSMDDNELLLVYEFMAKGSVENHLFRRGAVYEPLPWSLRLKILIGAARGLAFLHSSERQIIYRDFKASNILLDSHFNAKLSDFGLAKHGPDGGESHVTTRVMGTYGYAAPEYVSTGHLYVKSDVYGFGVVLLEMISGXRALDPSREREKVNLVNWARPLLSDRRKLSQLMDGGLEGQYNPKAALLAAQLTLRCLNGDPKRRPSMKEVVEALEKIESSAKGRMAREPRNSSRRGLVQSPRGDSARNNSSSRGR

SEQ ID NO: 1104 - protein, 487 aa, Ralstonia sp. SJ98
MQTQLFIDGRFVAALSGETLATLNPHDNSEIAQVSMAGREDVDRAVQAAKKAFPAWSAMAAADRGRLLLKLADAIEANADELARLESMDTGHPIRDTRNLDVPRTAATFRYFGGMADKFEGSVIPVEASFLNYLTREPVGIVGQVVPWNFPLMFTSWKMAPALAAGNCVVMKPAELTPLSSLAIAQLMAEVGFPAGVVNVLPGFGHVAGQYIAEHPEIGKVAFTGSTAVGRKIVQASSGNLKKVQLELGGKGANVVFGDANLDAVVQGSAFGIFHNQGQACIAASRLIVHESIADDLLERFTSLARSIRIGDPLDPSTEMGPLTSQMHRDRVLSYVDVAREQGGRVLAGGKSPDAAGLAKGCYVEPTIVQAKPTDRVAQEEVFGPFVTVSTFKSDEEGLAIANGTEYGLGAGLWTRDLQRAHLFARQLKSGMVWINCYKRVNPGSPFGGVGASGYGREMGFEVMREYTQAKSVWVNVDANIPPYYPR

SEQ ID NO: 1105 - protein, 364 aa, Nicotiana tabacum
MAFQIARRLLRSRASSSIRYLDRSFSSESNSNLIRATLFPGDGIGPEIADSVRQIFKTAEVPIEWEEHYVGKEIDPRTNSFLTWESLESVRRNKVGLKGPMATPIGKGHRSLNLTLRKELNLYANVRPCYSLPGYKTRYDDVNLITIRENTEGEYSGVEHQVVRGVVESLKIITRQASLRVAEYAFHYAKAHGRERVSAIHKANIMQKTDGLFLKCCREVAEKYPEIKYEEVVIDNCCMMLVKNPALFDILVMPNLYGDIISDLCAGVIGGLGLTPSCNIGEGGIALAEAVHGSAPDIAGKNLANPTALLLSAVTMLRHLELHDKADRIQGAVLNTIAEGKYRTGDLGGTSSTTDFTNAICDHL

SEQ ID NO: 1106 - protein, 139 aa, Aquifex aeolicus VF5
MLSEETIRVIKSTVPLLKEHGTEITARMYELLFSKYPKTKELFAGASEEQPKKLANAIIAYATYIDRLEELDNAISTIARSHVRRNVKPEHYPLVKECLLQAIEEVLNPGEEVLKAWEEAYDFLAKTLITLEKKLYSQP

SEQ ID NO: 1107 - protein, 442 aa, Pseudomonas aeruginosa UCBPP-PA14
MNNEPQSSSLDNFWMPFTANRQFKARPRLLESAEGIHYIAQGGRRILDGTAGLWCCNAGHGRREISEAVARQIATLDYAPPFQMGHPLPFELAARLAEIAPPGLNKVFFTNSGSESADTALKIALAYQRAIGQGTRTRLIGRELGYHGVGFGGLSVGGMVNNRKAFSANLLPGVDHLPHTLDVARNAFTVGLPEHGAEKAEELERLVTLHGAENIAAVIVEPMSGSAGVVLPPKGYLQRLREITRKHGILLIFDEVITGFGRVGEAFAAQRWGVVPDLLTCAKGLTNGSIPMGAVFVDEKIHAAFMQGPQGAIEFFHGYTYSGHPVACAAALATLDIYRRDDLFQRAVELEGYWQDALFSLRDLPNVVDIRAVGLVGGVQLAPHADGPGKRGYDVFERCFWEHDLMVRVTGDIIAMSPPLIIDKPHIDQIVERLAQAIRASV

SEQ ID NO: 1108 - protein, 321 aa, Bartonella bacilliformis
YIDGDEGILLYHGYSIDQLAENGDFLETCYLLLYGELPNKQQKIDFDRCIMRHTMVHEQFARFFHGFRRDSHPMAVMVACLGAMSAFYHDSINITDPQQRMIASIRLISKVPTLAAMAYKYSIGQPFVYPRNDLNYATNFLHMCFSVPCEEHKISPVIARAMDRIFTLHADHEQNASTSTVRLAGSSGANPYACIAAGVACLWGPAHGGANEACLKMLQEIGSVKKIPEFIARAKDKNDPFRLMGFGHRVYKNYDPRAKIMQKTCHEVLQELNIQDDPLLDIAMELEHIALNDEYFINKKLYPNVDFYSGITLKALGFPTE

SEQ ID NO: 1109 - protein, 378 aa, Taxodium distichum
FSIKGNGIGNGNGHCNGYSNGHGHCINGYSNGISASVSSNGVSHLPYSNGNTVHHSNGNSHTSPSFGDGRRRCFWYEEEIEDDLRWCFALNRIIHTGVSEYQDIALIDTRPFGKALVIDGKMQSTEVDEFIYHESLVHPALVYHSHPKSAFIMGGGEGSTAREILRHKCVKKVVMCDIDKEVVDFCKKYLVVNREAFSNSRLELVINDARTELQSRQERFDVIIGDLADPVEGGPCYQLYTKSFYELVIKPKLNHQGIFVTQAGPAGVLTHTQVFSSIYNTLRQVFKHVMPYSAHVPSFADTWGWVMASDHPLTLKAEEIDDRIKQRIKGELQFLDGQTFLVAATLNKSVRKSLSKETHVYTEETARFIHGHGKASYQ

SEQ ID NO: 1110 - protein, 193 aa, Triticum aestivum
MKTFLIFVLLAMAMKIATAARELNPSNKELQSPQQSFSHQQQPFPQQPYPQQPYPSQQPYPSQQPFPTPQQQFPQQSQQPFTQPQQPTPLQPQQPFPLRPQQPFPQQPQQSQQSFPQPQPQQPQQPSILQPQQPLPQQPQQPFQQPQQQLSQQPEQTISQQPQQPFPQQPHQPQQPYPQQQPYGSSLTSIGGQ

SEQ ID NO: 1111 - protein, 318 aa, Silene latifolia
NFLFKSPKEDSPLKATDFGLSDFIKPSRKFTDIVGSAYYVAPEVLKRKSGPESDVWSIGVITYILLCGRRPFWDKTEDGIFKEVLRNKPDFRRKPWPSISNSAKDFVRKLLVKDPFVRPTAAQALSHQWVREGGSALDIPIDISVLHNMRQFVKYSRMKQFALRALASTLNDDELANLRDQFDAIDVDKSGTISLEEMRQALAKDLPWKLKDSRVMEIVEAIDSNTDGFVDFTEFVAATLHVHQLHELDNEKWQELSQRAFEKFDVDKDGYITPDELRMQTGLKGSMEPLLEEADIDKDGRISLAEFRRLLRSASMSS

SEQ ID NO: 1112 - protein, 153 aa, Bdellovibrio bacteriovorus HD100
MANLPNPWRERSLANPFREFGRHQERIDRLLNELMELRSGTLGEDMSLMPSSELVEEEKNYLLKVDLPGIKKEDVKVEVEGDRLTIRAERRSEKEEKSKKRYFSEISYGSCMRSFALPQSIDEKKVDAKFENGVLSVTIPKTTESKSKQISVH

SEQ ID NO: 1113 - protein, 318 aa, Silene latifolia
NFLFKSPKEDSPLKATDFGLSDFINRSRKFTDIVGSAYYVAPEVLKRKSGPESDVWSIGVIMYILLCGRRPFWDKTEDGIFKEVLRNKPDFRRKPWPSISNSAKDFVRKLLVKDPLVRLTAAQALSHQWVREGGNALDIPIDISVLHNMRQFVKYSRMKQFALRALASTLNDDELANLRDQFDAIDVDKSGTISLEEMRQALAKDLPWKLKDSRVMEIVEAIDSNTDGFVDFTEFVAATLHVHQLHELDNEKWQELSQRAFEKFDVDKDGYITPDELRMHTGLKGSMEPLLEEADIDKDGRISLAEFRRLLRSASMSS

SEQ ID NO: 1114 - protein, 381 aa, Staphylococcus aureus subsp. aureus Mu50
MLTEQEKDIIKQTVPLLKEKGTEITSIFYPKMFKAHPELLNMFNQTNQKRGMQSSALAQAVMAAAVNIDNLSVIKPVIMPVAYKHCALQVYAEHYPIVGENLLKAIQDVTGLEEHDPVIQAWAKAYGVIADVFIQIEKEIYDQMMWIGFKPFKITNIKQESEDIKSFTVETEEYDFSEFTPGQYITVDVSSDKLPYRAKRHYSIVSGEKNHLTFGVKRDVTTEHEGEVSTILHDEIKEGDMINLAAPVGGFVLENTTEPQLFLGSGIGVTPLVAMYEAASAKGLDTQMVQVAENEQHLPFKDNFNSIASHYDNAKLYTHLKDKQGYIGTEELQAFLANKPEIYICGGTKFLQSMIEALKSLNYDMDRVHYETFIPRLSVAV

SEQ ID NO: 1115 - protein, 221 aa, Arabidopsis thaliana
MDSLATDPAFIDSDVYLRLGLIIEGKRLKKPPTVLSRLSSSLERSLLLNHDDKILLGSPDSVTVFDGRSPPEISIAHYLDRIFKYSCCSPSCFVIAHIYIDHFLHKTRALLKPLNVHRLIITTVMLAAKVFDDRYFNNAYYARVGGVTTRELNRLEMELLFTLDFKLQVDPQTFHTHCCQLEKQNRDGFQIEWPIKEACRANKETWQKRTPDSLCSQTTAR

SEQ ID NO: 1116 - protein, 468 aa, Brucella suis 1330
MKQYTLLIGGEHVATPNHAEVRNPSTGEVVGLMPLASEADLDRAVAAAANAFQTWSRTGDAERAAACRAIANKLSEDAEELARLLTLEQGKTFNGLGSRFELGGAMAWTRHTAELGLPVEVVQDDNEGRVEIHRKPIGVTGSITPWNWPVMIACWHIIPAVRTGNTVVIKPSPLTPLSTIRLVEIINEVLPAGVVNVVTGENSIGAALSAHPGIAKMTFTGSTETGRKIMASAAATLKRLTLELGGNDAGIVLPDADPARIAEGLFWGAFINSGQTCAALKRLYVHDHIYDDVCRHLTEYAANIIIGDGLDEKSVLGPVQNAMQFNKVRELVDDARAKGARIPIGGEAAEGPGYFYPITLVADIDNGTRLVDEEQFGPVLPIIRYSDIDEVIRRANDNPSGLGGSVWSSDVEKARAVALQLECGSVWINKHGAIQPNAPFGGVKQSGIGVEFGTDGLKEFTTIQTVLS

SEQ ID NO: 1117 - protein, 484 aa, GIBBERELLA ZEAE PH-1
MSTNSTKTLNLKDNYVQIINGKSAPTQKTHQGINPATLEKKPEVPVASQDDLNNAVDAARKAFKSWSKVPWEERRQKLFAWADAVEAQKKEFAQLLTSEQGKPVAQANGEADAAVAWIKGQASLDLTEEVVEDSDTRKVVTRYTPLGIVAAIVPWNFPLMLAASKIAPALLTGNVIIVKPSPFTPYCGLKLVELAQQFFPPGVVQSLSGDDNLGPWITSHPGIDKISFTGSTHTGKLVMQSAAKTLKRVTLELGGNDAAVVFPDVDIDSVAEKVSTLAFMNSGQICLNVKRIYVHESIYEKFRDAVVNHVKNYKLGDGSEEVTSHGPVQNQMQYNRVKTFFEDIEKQGWKVATGGKFDPEPKNGYYITPTVIDNPPEDSRIVVEEPFGPILPLLSWKNEEEVIERANDTRLGLGASVWSADLETAERVAKQLDAGTVWVNTHFDITPMAPFGGHKESGIGAEWGINGLKGMCNVQSLFLSKVAA

SEQ ID NO: 1118 - protein, 180 aa, Arabidopsis thaliana
MASSMLSSATMVASPAQATMVAPFNGLKSSAAFPATRKANNDITSITSNGGRVNCMQVWPPIGKKKFETLSYLPDLTDSELAKEVDYLIRNKWIPCVEFELEHGFVYREHGNSPGYYDGRYWTMWKLPLFGCTDSAQVLKEVEECKKEYPNAFIRIIGFDNTRQVQCISFIAYKPPSFTG

SEQ ID NO: 1119 - protein, 178 aa, Zea mays
  unsure (1)..(178): unsure at all Xaa locations
EWKMVRPDLGRIEKWVLRKAFDDEEQPFLPKHILYRQKEQFSDGVGYSWIDGLKAHATSNVTDKMLSNVKFIFPHNTPTTKEAYYYRMIFERFFPQKSAILTVPGGPSVACSTTKAIEWDAQWSGNLDPSGRAALGVHLAGYEHQHDPEHVPAAIAAGSGKKPRTIRVXASPGVAIEG

SEQ ID NO: 1120 - protein, 464 aa, Listeria monocytogenes
MLYSKENKESYLEPVFGSSAEDRDIPKYTLGKEPLEPRIAYRLVKDELLDEGSARQNLATFCQTYMEDEATKLMSETLEKNAIDKSEYPRTAELENRCVNIIADLWHAPKDQKFMGTSTIGSSEACMLGGMAMKFAWRKRAEKLGLDIYAKKPNLVISSGYQVCWEKFCVYWDIDMRVVPMDKEHMQLNTDQVLDYVDEYTIGVVGILGITYTGRYDDIYALNEKLEEYNSKTDYKVYIHVDAASGGFFTPFVEPDIIWDLRLKNVISINTSGHKYGLVYPGIGWVLWKDESYLPEELIFKVSYLGGEMPTMQINFSRSASHIIGQYYNFLRYGFEGYRTIHQKTSDVAQYLAHAVEQTGYFDIFNDGSHLPIVRYKLKDDANVNWTLYDLADRLQMRGWQVPAYPLPKSLENIIIQRYVCRADLGFNMAEEFIQDFQASIQELNNAHILFHDTQQSGVHGFTH

SEQ ID NO: 1121 - protein, 265 aa, Triticum aestivum
  unsure (1)..(265): unsure at all Xaa locations
HWSALSGVDTEIMNVEGHIAPSEKHPGSLLEGFSQTQVSTLAVKDNLLVAGGFQGELICKNLDQEGISFCCRTTYDDNAITNAVEIFNTSSGAVHFIASINDSGVREYDMXERYQLCKHFRFDWPVNHTSLSPDGKLVLVVGDDPDALLIDANSGKTIHSMKGHLDFSFASAWXPDGRTFATGNQDRTCRVWDARNLSQSLHVLRGNLGAIRSTRYTSDGQFLTMAEPADFVHIFDVKSDYNKRTYGSLLQYGRLYNYSYLDSLF

SEQ ID NO: 1122 - protein, 311 aa, Candidatus Tremblaya princeps
MVSSALQFLSQHSELSMDSARFLEALRFRPTHATTNPSLILSACQNNEYNSLVNETIRLHRNEGYRNIADHIRLRFCTELLDRIPGMVSVEIDACCAFNVDASIAHARRIVQLCRPTDARDRILVKIPATWQGVQAAAALRAEGVQCNMTLVFSMLQALVCARNGAYLISPFVGRLSDRMPAMQGSSATQDQGVALALRIYSRLRQEGHATRVMAASFRGEQQVIMASACGMVTVGEHIMRRLAAMRASAMPKPCQQFSEAMQHCPTPRDLHAFERALAQNRTAWLELKHGIEAFACNETQLELLIARRLP

SEQ ID NO: 1123 - protein, 519 aa, Brassica napus
MSGAITCSAADLATLLGPNATAAADYICGQLGTVNNKFTDAAFAIDNTYLLFSAYLVFAMQLGFAMLCAGSVRAKNTMNIMLTNVLDAAAGGFFYYLFGYAFAFGGSSEGFIGRHNFALRDFPTPTADYSFFLYQWAFAIAAAGITSGSIAERTQFVAYLIYSSFLTGFVYPVVSHWFWSPDGWASPFRSADDRLFSTGAIDFAGSGVVHMVGGIAGLWGALIEGPRRGRFEKGGRAIALRGHSASLVVLGTFLLWFGWYGFNPGSFTKILVPYNSGSNYGQWSGIGRTAVNTTLSGCTAALTTLFGKRLLSGHWNVTDVCNGLLGGFAAITAGCSVVEPWAAIVCGFMTSLVLIGCNKLAELVQYGDPLEAAQLHGGCGAWGLIFVGLFAKEKYLNEVYGATPGRPYGLFMGGGGKLLGAQLVQILVIVGWVSATMGTLFFILKRLNLLRISEQHEMQGMDMTRHGGFAYIYHDNDDESHRVDPGSPFPRSALPLAFNFQLFGNLLPFKYCLGFGFEI

SEQ ID NO: 1124 - protein, 72 aa, Zea mays
FCKSALFNFNSFLTVVLLVICTCSYIKMQFPAILNDRTGFRGFFWKAARIGERLSPWVSVGCLAMGISTIFF

SEQ ID NO: 1125 - protein, 454 aa, Oryza sativa (japonica cultivar-group)
MVKGGREALLGGYEMGRTLGEGNFGKVKYARHLATGGHFAVKILDRGRVVSLRAGDQIRREIATLKLLRHPHVVRLHEVAASKTKIYMVLEFVNGGELFERIAVKGKLSEKEGRRLFQQLIDGVSYCHDRGVYHRDLKPENVLVDQKGNIKISDFGLSALPQHLGNDGLLHTTCGSPNYIAPEVLQNKGYDGSLSDIWSCGVILYVMLIGYLPFDDRNIVVLYQKIFKGDTQIPKWLSHSAQNLLRRILEPNPMKRIDMAGIKSHEWFQKDYIPVLPYDDDDEDVQFGARLPAKEQINDEPGDKNSHQINAFQLIGMASSLDLSGFFEDEEVSQRRIRFTSTHPPKDAFDKIESSATELGFQVQRGHSKLKLMRNCKGSKNPESFMVSAEVFELGPSVNVVELRKSNGDPALYRQLCERISSDMGARNTEQIFATASLEDDLQNSNAGTPLFAL

SEQ ID NO: 1126 - protein, 439 aa, Oryza sativa (japonica cultivar-group)
MESKGKILMERYELGKLLGKGTFGKVHYAGNLESNQSVAIKMMDKQQVLKFGLSEQIRREITTMRLVAHKNIVQLHEVMATRNKIYFVMEYVKGGELFEKVAKRGKLTEVVAISTSSNSLSAVDYCHSRGVYHRDLKPENLLLDENENLKVSDFGLSALSESKRQDGLLHTTCGTPAYVAPEVISKIGYDGAKSDIWSCGVILFVLVGGYLPFQGPNLMEMYRKIQHGEFRCPGWFSRKLQNLLYKIMDPNPSTRISIQKIKESTWFRKGPEENRILKERTLNENPPKNVALVLGVRPKKNAHEDVKPMSVTNLNAFEIISFSKGFDLSGMFIVKEWRNEARFTSNKSASTIISKLEDVAKALNLRVRKKDNGVVKMQGRKEGRNGVLQFDIKIFEVTTSYHIIEMKQTSGDSLEYRQLLEEGIRPALKDIVLAWHGDE

SEQ ID NO: 1127 - protein, 497 aa, Camellia sinensis
MASLTCSADQLAQLFGSNTTNAAAATYICDHFTAVSQKFSDAASAIDSTYLLFSAYLVFSMQLGFAMLCAGSVRAKNTLNIMLTNVLDAAAGAIFYYLFGFAFAFGSPSNGFIGSHFFALKSIPTSSFDYSFFLFQWAFAIAAAGITSGSIAERTQFAAYLIYSAFLTGFVYPVVSHWFWSGDGWASASNTNHLLFGSGVIDFAGSGVVHMVGGIAGLYGAFIEGPRIGRFANPGQSVTIKGHSASLVVLGTFLLWFGWYGFNPGSFTKIANPYTSGSYYGQWSAVGRTAVTTTLAGSTAALTTLFLNRVVSGHWNVTDVCNGLLGGFAAITAGCSVVEPWAAVICGLVAALVLIGCNKVAERVKFDDPLEAAQLHGGCGAWGVIFTALFASEKYVNEVYPGKSDRPYGLLMGGGGRLLAAHVIQIVVIVGWVSVTMGPLFFVLHKLKLLRISAEDEIAGMDMTRHGGFAYVYQYHDEDESNKLGMQMRKIDPEDKS

SEQ ID NO: 1128 - protein, 139 aa, Azoarcus sp. EbN1
MSNLIRRDPFDDLLRGFFVRPVDMTAGIQGEAPQMRVDVKEDESAYQVHAELPGIKKEDIHVHIDGPVVSISAERKQEKEVKEGERVLRTERYFGKVSRSFQLGQEIDEGKSSAKFNDGVLELSLPKKAPEQAKRLTID

SEQ ID NO: 1129 - protein, 162 aa, Chlamydomonas reinhardtii
MANPEFYGLSTTTLSGQPFPFKDLEGKAVLIVNVASKCGFTPQYKGLEELYQQYKDRGLVILGFPCNQFGGQEPGDASAIGEFCQRNFGVTFPIMEKSDVNGNDANPVFKYLKSQKKQFMMEMIKWNFEKFLVDKSGQVVARFSSMATPASLAPEIEKVLNA

SEQ ID NO: 1130 - protein, 318 aa, Silene dioica
NFLFKSPKEDSPLKATDFGLSDFIKPSRKFTDIVGSAYYVAPEVLKRKSGPESDVWSIGVITYILLCGRRPFWDKTEDGIFKEVLRNKPDFRRKPWPSISNSAKDFVRKLLVKDPFVRPTAAQALSHQWVREGGSALDIPIDISVLHNMRQFVKYSRMKQFALRALASTLNDDELANLRDQFDAIDVDKSGTISLEEMRQALAKDLPWKLKDSRVMEIVEAIDSNTDGFVDFTEFVAATLHVHQLHELDNEKWQELSQRAFEKFDVDKDGYITPDELRMHTGLKGSMEPLLEEADIDKDGRISLAEFRRLLRSASMSS

SEQ ID NO: 1131 - protein, 318 aa, Silene dioica
NFLFKSPKEESPLKATDFGLSDFINRSRKFTDIVGSAYYVAPEVLKRKSGPESDVWSIGVIMYILVCGRRPFWDKTEDGIFKEVLRNKPDFRRKPWPSISNTAKDFVRKLLVKDPLVRLTAAQALSHQWVREGGNALDIPIDISVLHNMRQFVKYSRMKQFALRALASTLNDDELANLRDQFDAIDVDKSGTISLEEMRQALAKDLPWKLKDSRVMEIVEAIDSNTDGFVDFTEFVAATLHVHQLHELDNEKWQELSQRAFEKFDVDKDGYITPDELRMHTGLKGSMEPLLEEADIDKDGRISLAEFRRLLRSASMSS

SEQ ID NO: 1132 - protein, 318 aa, Silene diclinis
NFLFKSPKEDSPLKATDFGLSDFIKPSRKFTDIVGSAYYVAPEVLKRKSGPESDVWSIGVITYILLCGRRPFWDKTEDGIFKEVLRNKPDFRRKPWPSISNSAKDFVRKLLVKDPFVRPTAAQALSHQWVREGGSALDIPIDISVLHNMRQFVKYSRMKQFALRALASTLNDDELANLRDQFDAIDVDKSGTISLDEMRQALAKDLPWKLKDSRVMEIVEAIDSNTDGFVDFNEFVAATLHVHQLHELDNEKWQELSQRAFEKFDVDKDGYITPDELRMHTGLKGSMEPLLEEADIDKDGRISLAEFRRLLRSASMSS

SEQ ID NO: 1133 - protein, 368 aa, Glycine max
MLTCIARPKKLVGDSAASEDPSSRGVKSLTGQLKEMALKASGAYKQCGGPCATAPPSRVSRGGGTELDSESSSSSSSRRRWGKELEARLKGISSGEGTPSSSGRRVVLLLEDDEEPKEWVAQVEPGVLITFVSLPRGGNHLKRIRFSREIFNKWQAQRWWAENYDKVMELYNVQRLNRQAFPLPTPPRSEDESSKRESIEDFPVTPPLSRERPPCNLFRAGGGGMGMGYSSSDSCVHHSMLSSRHYYDPNGVNSTPIASSTCSAAAQPDISSSMDVHASIRSSSSTEADRSGGLSLSNASHLGSEWVEQDEPRVYISIRALPGGKKELRRVRFSPEKLGDMQNVNFVSTPFSLNNLPILYLRYNHIVG

SEQ ID NO: 1134 - protein, 318 aa, Silene diclinis
NFLFKSSKEDSPLKATDFGLSDFINPGRKFHDIVGSAYYVAPEVLKRRSGPESDVWSIGVITYILLCGRRPFWDKTEDGIFKEVLRGKPDFGRKPWPTISNSAKDFVRKLLVKDPLVRLTAAQALSHQWVREGGNALDIPIDISVLHNMRQFVKYSRMKQFALRALASTLNDDELANLRDQFDAIDVDKSGTISLEEMRQALAKDLPWKLKDSRVMEIVEAIDSNTDGFVDFTEFVAATLHVHQLHELDNEKWQELSQRAFEKFDVDKDGYITPDELRMHTGLKGSMEPLLEEADIDKDGKISLAEFRRLLRSASMSS

SEQ ID NO: 1135 - protein, 504 aa, Brucella suis 1330
MSKLDDNVAKAKTYLARFEKGVLNRIGGEDVAAADGATFETISPVDLKPLATVALGKAADIDRAARAAKAAFPEWAAMSGDARKKLLHKIADAIVARAEEIAFVECMDTGQSLKFMAKAALRGAENFRFFADRAPEARDGKTLRGPGQVNMTTRVPIGPVGVITPWNTPFMLSTWKIAPALAAGCTVVHKPAEFSPLTARLLVEIAEEAGLPKGVWNLVNGFGEDAGKALTEHPDIKAIGFVGESRTGSLIMKQGADTLKRVHFELGGKNPVVVFADADLERAVDAAVFMIYSLNGERCTSSSRLLVEASIYEKFTALVAEKAKRIKVGHPLDPETVVGPLIHPVHEKKVLEYIEIGRSEGATVAAGGAKFAGPGGGCYVSPTLFTAAHNGMRIAQEEIFGPVLTAIPFKDEAEALALANDVKYGLTGYLWTNDVTRAFRFTDALEAGMIWVNSENVRHLPTPFGGVKNSGIGRDGGDWSFDFYMETKNIAFANAAHAIAKLGG

SEQ ID NO: 1136 - protein, 328 aa, Triticum aestivum
RHWFYCINNKERSCLETGEVLIRVAASGICGTDLHICKGETPQATKNVVVGHEFCGYVEEIHPETMAVVKVGDLVAIDPNMPCNQCTFCRNKKYHLCLNLFCIGVTVDGGMSQYVAVPARAAITVPAHVPPEVACLSEPLSCVVHAVDKGHVKSGDSVLVIGAGPIGLMTTALVNASGGKVTVIEPNEFRRKEALEIFGAAAAYGPGELGPVNGALGEGYDVVFECVGRPNTADDAVKFAKAGGTVVWVGVAKVEDRVSISPYDVYRRELTITSTFTNPYGIDRAVKILAEGRVNWRALVSHSFKLSEFDKAWEVFTAGTGLKVVVKP

SEQ ID NO: 1137 - protein, 351 aa, Staphylococcus aureus subsp. aureus Mu50
MKALVKTREGHGNLELLDKEVATPLDDKVKIKVHYAGICGTDIHTYEGHYKVNFPVTLGHEFSGEIVEVGADVKDFKVGDRVTSETTFYVCNECEYCKSKDYNLCNHRKGIGTQVDGVFTNYVIAREESLHHIPDEVSYQSAAMTEPLACAHHGVSKIQVNSGDVAVVMGPGPIGLLVAQVLKSKGATVVVTGLDNDKVRLDKAEALHMDYVVNLQQTDLKTYINGITDGYGADVVVECSGAVPAARQGLDIIRKKGFYSQIGIFKDAEIPFDMEKVIQKEITVVGSRSQKPADWEPSLQLMADGLVNAEALVTKIYDISKWDEAYQHLKSGEGIKALLKPLDLDENEGEN

SEQ ID NO: 1138 - protein, 400 aa, Aspergillus fumigatus
MTTTTTTTALVLHGAKDLRLESRPISPPTGSEVQVAIRATGLCGSDLHYYNHGRNGDFVVREPMCLGHESSGTVTAVGPDVTTLQVGDRVALEVGLPCRTCTLCRTGRYNICPDMKFRSSAKLFPHLDGTLMELTNHPADLCHKLPESVSYAGGALVEPLAVCLHAIRRSHPPTPAEVDLATEQGDQTAALIFGAGAIGLLLAAALATSQPFTSIVIADIDPARLEIAKSLNLGLKTHLLPKGGNAANPPPAPDASAAEHAAYAMQNAQRTAAALKEANGVASGFVRVYECTGVPACVQAGIYAASPGAVLVQIGMGNPIQTLPVSAAALREVDIIGTFRYDGHAYPAAIELMASGKLDHVEKQVVTHRVRLEDGSRAFALAGKGVDETGRPVVKVVIES

SEQ ID NO: 1139 - protein, 318 aa, Silene vulgaris
NFLFKSSKEDSPLKATDFGLSDFINPSRKFTDIVGSAYYVAPEVLKRKSGPESDVWSIGVITYILLCGRRPFWDKTEDGIFKEVLRNKPDFRRKPWPSISNSAKDFVRKLLVKDPLVRLTAAQALSHQWVREGGSALDIPIDISVLHNMRQFVKYSRMKQFALRALASTLNDDELANLRDQFDAIDVDKSGTISLDEMRQALAKDLPWKLKDSRVMEIVEAIDSNTDGFVDFTEFVAATLHVHQLHELDNEKWQELSQRAFEKFDVDKDGYITPEELRMHTGLKGSMEPLLEEADIDKDGRISLAEFRRLLRSASVSS

SEQ ID NO: 1140 - protein, 245 aa, Metasequoia glyptostroboides
YTYNLRNKGPEDVIVRVIYCGICHSDLIQMRNEMGMSHYPMVPGHEVVGIVTELGSEVKKFKVGEHVGVGCIVGSCRKCGNCNESMEQYCSKRIWTYNDVNHGGTPTQGGFASSMVVDQMFVVRIPENLPLEQAAPLLCAGVTVYSPMKHFGMTEAGKRCGILGLGGVGHMGVKIAKAFGLHVTVISSSDKKKEEALEVLHADAYLVSKDAEKMQEAAESLDYILDTIPVAHPLEPYLSLLKTNG

SEQ ID NO: 1141 - protein, 170 aa, Zea mays
MAGIGRNMVAPLLVLNLIMYIIVIGFASWNLNHFINGQTNYPGVAGNGATFYFLVFAILAGVVGAASKLAGVHHVRAWRHDSLATNAASSLIAWAITALAFGLACKEIHIGGHRGWRLRVLEAFVIILAFTQLLYVLMLHTGLFGGSGGYRDHDYGVGGAAGEPKGVTRV

SEQ ID NO: 1142 - protein, 198 aa, Glycine max
  unsure (1)..(198): unsure at all Xaa locations
MTISNTSSTSKTIFRRNGKDIQGIPWERLNYSRDKYRETRLKQYKNYQNFSLSPHHLHKECFQVQKGQTFYDFFFNTRLVKSTIVHFQLLXRWNMSSLAGPYIMLRNLLWATSKHDVYLMQDYSVMHWSALLQRSKEVLNVAKPIIPTLTHPGFLAQPVSRVQISTMTVKENLMVAGGFQGELICKVGLIIISYFHSI

SEQ ID NO: 1143 - protein, 335 aa, Glycine max
MADESVVESPVKRQRDDGEENGVSVSMDAEGGKDPLSNGLSSVIPGWFSEISAMWPGEAHSLKVEKILFQGKSEYQNVMVFQSSTYGKVLVLDGVIQLTERDECAYQEMITHLPLCSIPNPKKVLVIGGGDGGVIREVARHSSVEKIDICEIDKMVVDVSKQYFPDVAVGYDDPRVTLHIGDGVAFLKEVPEGTYDAVIVDSSDPIGPAQELFEKPFFASVAKALCPGGVVCTQAESIWLHMDIIEDIVANCRQIFKGSVNYAWTTVPTYPSGMIGFMLCSTEGPPVDFKHPVNPIDENESQKSVRPLKFYNSEIHTAAFCLPSFAKRKISSKAN

SEQ ID NO: 1144 - protein, 452 aa, Brucella suis 1330
MRDSNFLIENNARHLWHPMAHPAEMQANPPRIVNGGEGVEVIDIHGKKVLDAVGGLWNVNLGYSCEPVKKAIRDQLDSLPYYSTFRGTTNSPLIELSYELAEFFKEDGLTRAFFTSGGSDSVETALRLARQFHKINGQPERTKFVSLKKGYHGTHFGGASVNGNANFRRNYEPLLPGVFHLAAPYPYRNPFNMDDPAAIAAAIARQFEDEIAFQGADTIAAFIMEPVLGAGGVIVPHESFMLLMREICDRHGILLIADEVITAFGRTGAWTGSRGWGVKPDMMTTAKAITNGYFPFGAVMISDKVASVFEANKNSLGAIGHGYTYSGHPVGAAAALATLKETARANTAANAGARGVELMAGLNQLKEKHELVGDVRGKGLMAALELVSDREKKSAAAKTVVQKVYDVAYEEGVMVRTSGANVIISPPLVITSADVNRIVSALDAGLSAAKGQ

SEQ ID NO: 1145 - protein, 298 aa, Glycine max
MVYVKAQKSKAYFKRYQVKFKRRREGKTDYRARIRLINQDKNKYNTPKYRFVVHFSNKDIVAQIISASIAGDIVLAAAYAHELPRYGLEVGLTNYAAAYCTGLLLARRVLKTLDMDEEYEGNVEATGEDYSVEPAESRRPFRALLDVGLVRTTTGNRVFGALKGALDGGLDIPHSDKRFAGFDKEKKELDAEVHRKYVFGGHVAAYMKILAEDEPEKYQSHFSEYIKRGIEADGIEALYKKVHAAIRADPTLKKSDKQPPKEHKRYNMKKLTYEERKAKLVARVAAINSAADNDEDDE

SEQ ID NO: 1146 - protein, 163 aa, Glycine max
VATQNCCCFQVVSIGLGSRPFSLHLLLNLLNFLFPFLPSKFSLDSSSMLSSAAVVTSPAQATMVAPFTGLKSSSAFPVTRKANNDITSIVSNGGKVSCMKVWPPVGKKKFETLSYLPDLTEVELGKEVDYLLRNKWIPCVEFLLPRGSACPGPAATPGCSGGR

SEQ ID NO: 1147 - protein, 170 aa, Triticum aestivum
MAGVGRNMVAPLLVLNLIMYIIVIGFASWNLNHFINGLTNRPGVGGNGATFYFLVFAILAGVVGTWRGDSLATSASSALVAWAITALAFGLACKEIHIGGYRGWRLRVLEAFVIILMFTQLLYVLALHSGLFGNQFGNHAGAGGYGAEHGAYGAGDPHNKGMGTGGVARV

SEQ ID NO: 1148 - protein, 215 aa, Saccharomyces cerevisiae
MSRSGKSLTKYKIVFLGEQGVGKTSLITRFMYDTFDDHYQATIGIDFLSKTMYLDDKTIRLQLWDTAGQERFRSLIPSYIRDSRVAIIVYDITKRKSFEYIDKWIEDVKNERGDENVILCIVGNKSDLSDERQISTEEGEKKAKLLGAKIFMETSTKAGYNVKALFKKIAKSLPEFQNSESTPLDSENANSANQNKPGVIDISTAEEQEQSACQC

SEQ ID NO: 1149 - protein, 458 aa, Mesorhizobium loti MAFF303099
MRHQILSNRSGEDLRASDLAHHLHPFTDHTVLAAEGGPRVIKDGDGIYVWETEGRRLLDGMAGLWCVNVGYGRKELGEVARQQMDRLAFYNTFFKTSHEPVINLAERLAAVTPEGIDNFFFGNSGSEANDTAIRLVRSYWAAVERPERQVVISREYAYHGSTLAGASLCGLPGMHGVAGLPIPGIAHAAAPYAWAAGKDQDDPAYGRASADALEAKILEIGPKNVAAFIGEPVMGAGGVITPPPRYWARVQEICRKYDILLVCDEVICGFGRTGEWFGAQSFGIAPDIMCMAKGLSSGYIPISAVGVGTRVAEILRTRPGVLSHGFTSSGHPVAAAVALKNIELIEAEGLVNHVRDVAGPALARRLGALAMHPLVGQVRGIGAMWALELTSDKATRAPFAPLGSVATRVRNLCFERGLATRAVREGLVFAPPLIITEAQVDEMADILTSCLDTAVAEL

SEQ ID NO: 1150 - protein, 440 aa, Mesorhizobium loti MAFF303099
MSHVFHRSALSVPPMAVAADGHYIIDINGRRYLDASGGAAVSCIGHGDPRVVAAVAEQIARLDYAHSGAFTSPSAEELAAHICAEAGQGMARVYFVGSGSEAVEAAIKMARQCQIERRQPSRHVVISRRLSYHGNTLGALGRSGSETRRAPYAPMLQKRTQIAPCFPYHYAEPGETPEAYGLRAAEALEAEILRLGSENVAAFLAETVVGATSGAVVPATGYFRHIREICDRYGVLLICDEVMCGAHRTGPFLACSDEGVSPDIVTLAKGLGGGYLPIGAVVCRADVHDSFAQGSGAFTHGHTYMAHPVACAAALEVQRVIVDDRLAERVVRQGALLDAALRDRLSQHTYVGDIRGRGLLYAVELVADRETRVSFDPEMRLAARIGAQAKGRGLLVYPGSGTIDGLRGDHVLLAPAYSIDAQRVGEIADILTEAIDAALG

SEQ ID NO: 1151 - protein, 494 aa, Bacillus cereus ATCC 14579
MSQLAVNLHEKVEKFLQGTKKLYVNGSFIESASGKTFKTPNPATGETLAVVSEAGREDIHKAVVAARMAFDEGPWSRMSTAERSRLMYKLADLMEEHKEELAQLETLDNGKPIRETMAADIPLAIEHMRYYAGWATKIVGQTIPVSGDYFNYTRHEAVGVVGQIIPWNFPLLMAMWKMGAALATGCTIVLKPAEQTPLSALYLAELIEEAGFPKGVINIVPGFGESAGQALVNHPLVDKIAFTGSTPVGKQIMRQASETLKRVTLELGGKSPNIILPDADLSRAIPGALSGVMFNQGQVCSAGSRLFVPKKMYDNVMADLVLYSKKLNQGVGLNPETTIGPLVSEEQQKRVMGYIEKGIEEGAEVLCGGSNPFDQGYFVSPTVFADVNDEMTIAKEEIFGPVISAIPFNDIDEVIERANKSQFGLAAGVWTENVKTAHYVASKVRAGTVWVNCYNVFDAASPFGGFKQSGLGREMGSYALNNYTEVKSVWLNLN

SEQ ID NO: 1152 - protein, 479 aa, Nostoc sp. PCC 7120
MSDLVLFWHRRDLRIADNIGLAAARQQSSKVVGVFCLDPNILERDDVAPARVTYMIGSLQELQQRYVQAGSQLLILHGDPVQAIPHLAEALNAKAVFWNWDVEPYSQTRDRAILDILKDKGIQFLTHKWDQILHSPDEIRSGSNTPYTVYTPFWKNWSSKPKAKPVETLQNAEGLTESEQELAQKAGVKTLPTAKDLGFFWDADLIIAPGEAAAQAKLEEFTAKAITEYQEQRNFPAVDGTSQLSAALKFGVIGIRTVWQATLEALENSRSEEASAAIRTWQQELAWREFYQHAMYNFPELADGAYRETFKNFPWETNEEHFQAWREGKTGYPIVDAAMRQMNESGWMHNRCRMIVASFLTKDLLINPQLGEKYFMQKLIDGDLSANNGGWQWSASSGMDPKPLRIFNPASQSQKFDPDAEYIRRWVPELRSMDTEYLVTGKITPLERHAVGYVKPIVDHQKQQQLFKQRYQQQKATSL

SEQ ID NO: 1153 - protein, 199 aa, Penicillium marneffei
MASGPATQSLKCVVTGDGAVGKTCLLISYTTNAFPGEYIPTVFDNYSASVMVDGRPISLGLWDTAGQEDYDRLRPLSYPQTDVFLICFSIVSPPSFDNVKAKWFPEIEHHAPGVPIILVGTKLDLREDRATAEALRAKKMEPVSYEQALAVAKEIRAHKYLECSALTQRNLKSVFDEAIRAVLNPRPQPKNKAKRCTIL

SEQ ID NO: 1154 - protein, 310 aa, Vitis vinifera
MSFIGEASAYFKVLSDGSIKRVEWESAPASNDSSSNGYKSKDVIINSTKPISARIFLPDVPGSSGRLPVLVYFHGGGFCLGSTTWFGYHTFLGDFAVASQSIVLSVDYRHAPENRLPIAYDDCYSSLEWLSCQVSSEPWLERADLSRVFLSGDSAGGNIVHNVALRTIQEQSCDQVKIKGLLLIHPFFGSEERIEKERAGGEAENLALTDWMWKLSLPEGSNRDHYWCNYEMAELSRAEWCRFPPAVVYVAGLDFLKERGVMYAAFLEKNGVEVKLVEAEGEKHVYHMLHPESEATRLLQKQMSEFIHNF

SEQ ID NO: 1155 - protein, 105 aa, Rickettsia sp. RAv1
GQPFIYPNNSLDFTENFLHMMFATPCTKYTVNPIIKNALNKIFILHADHEQNASTSTVRIAGSTGANPFACISTGIASLWGPAHGGANEAVINMLKEIGSSEYIP

SEQ ID NO: 1156 - protein, 160 aa, Zea mays
  unsure (1)..(160): unsure at all Xaa locations
MSDSEEHHFESKADAGASKTYPQQAGTVRKNGFIVIKNRPCKXVEVSTSKTGKHGHAKCHFVAIDIFNGKKLEDIVPSSHNCDIPHVNRTEYQLIDISEDGFVSLLTSDGNTKDDLRLPTDETLVAQIKEGFESGKDLVVTVQSAMGEEQICALKDVGPK

SEQ ID NO: 1157 - protein, 105 aa, Rickettsia sp. RAv3
GQPFIYPNNSLDFTENFLHMMFATPCTKYTVNPIIKNALNKIFILHADHEQNASTSTVRIAGSSGANPFACISTGIASLWGPAHGGANEAVINMLKEIGSSEYIP

SEQ ID NO: 1158 - protein, 57 aa, Triticum aestivum
MADEGTANCIDIILAIILPPLGVFFKFACGIEFWICLLLTFFGYLPGIIYAVWVITK

SEQ ID NO: 1159 - protein, 196 aa, Cichorium intybus x Cichorium endivia
GHNNLNAKFVLLGDMGAGKSSLVLRFVKGQFLEFQVSTIGAAFFSQTLAVNDATVKFEIWDTAGQERYHSLAPMYYRGAAAAIIVYDITSADSFTRAKKWVQELQKQGNPNMVMALAGNKADLEDKRKVTAEEARVYAEENGLFFMETSAKTAANVNDVFHEIAKRLPRAQPTQNPAGMVLVDRPAEGARAASCCS

SEQ ID NO: 1160 - protein, 511 aa, Cylindrotheca fusiformis
MAEFDNTFILDFCSGGNESSSDVQALCQVAGLANGTSASAAGLVEGINTFFLLFAGALVFLMQAGFAMLCAGSVRQKNVKNIMLKNMLDACGGAIGFWTIGYAFAYADNSSGDKTFIGGKNFFVNQLDESGGAWIGFFFQFAFAATAATIVAGTVAERCKMSAYLCYSVFLTGFVYPVVVHSIWSADGWLTAFRDDPWKGVGVIDFAGSGVVHMTGGATALVAAIVLGPRKGRFYDEDGNALETPASFPAHSVALQVLGTFLLWFGWYGFNPGSALVIDNAASASTSALCAVTTTLAAASGCVCAMFTDTIIEMMATGEASYDLTMAMNGALGGLVAITAGCSVVTPWASIIIGIIAGWVYIAFSKLLVKLKIDDAVDAVPVHFANGMWGVLAVGFFAEPDAMVTAGYNDVPGVFYKGDGKLLLCQFVAIIWICAWIFFLMTPFFVVLNILGMFRVDPLEEEVGLDISHHRGAAYDMTSAKKEDVEELMEHRSSKHGKVEVPKEVQKEDTA

SEQ ID NO: 1161 - protein, 411 aa, Anaplasma phagocytophilum
MVEKAVLECGDRRISLPVLRGTDGTPVVDITTLYRENNVLTYDPGFMSTAACRSEITFIDGNKGTLRYRGIDIENLIGTPNSFSSIVYLLLKGTLPSETEHEEFVRILGAEYDVPEQVMNVIRSFPRDSHPMAILIASFSALAANYHASRIDPLTGAIIAIAKVPGIVASIYRHTANLDFIQADANLEYTHHFIRMMFGDMDDAHRDIMHKALDAIFIMHADHEQNASTSTVRMTGSSGAGLFACLCAGVATLWGPAHGGANEAVIKMLAEIGSPENVSSFIDKVKNNKGKSRLMGFGHRVYKSYDPRARVLRTICKDVLDSLGRDENLLAVAEELESQALQDEYFIERKLYPNVDFYSGIVLRAMGVPVDMYTAFFALARTSGWASQWYEMIQSDEGKRISRPRQLYTGK

SEQ ID NO: 1162 - protein, 105 aa, Rickettsia sp. RAv9
GQPFIYPNNSLDFTENFLHMMFATPCTKYTVNPIIKNALNKIFILHADHEQNASTSTVRIAGSSGANPFASISTGIASLWGPAHGGANEAVINMLKEIGSSEYIP

SEQ ID NO: 1163 - protein, 482 aa, Corynebacterium glutamicum ATCC 13032
MNANARVFILNSLAMNDPQRSPTLLWFRDDLRLSDNAALKWAADHGPVIGLFIDETINRSIGAAARWWREQSLNALAQDLSFYGVPLLRRTGNPLEILPKIVSEMEVKAVTWNRRYHQPLCEVDATLKKNLRDKGIEVHSHPGFLLTEPWEVSTATGTPYKVFTPFSKAAWEVARVHAYETVKNNVPVPSHLTGPEDVELPILEMEQPFWSTTLVKECAPGEKNASEKLFDFLEHLQDYPQARDSLARSATSKLSAHLRFGEISIHRVWAETAAIDSEGTELFLKELLWRDFAWHRLYALPHMDTQNVRMQFNRFGWSWDPSEKDKLNTPSTPLIPTKADQFHEDLAAWRAGKTGIPLVDAGMRELWATGSMHNRVRMVVASFLTKNLQIHWRHGEEWFWETLVDADPASNAFNWQWAAGSGDDASPYFRIFNPVTQAKKFDPDETYIRRWVPEYGTPSYPDPIVDLKESRQIALDAYSAIK

SEQ ID NO: 1164 - protein, 511 aa, Cylindrotheca fusiformis
MAEFDNTFILEFCSGGNESSSDVQVLCQVASLANGTSASAGGLTEGINTFFLLFAGALVFIMQAGFAMLCAGSVRQKNVKNIMLKNMLDACGGAIGFWTIGYAFAYADNSSGNKTFIGGKNFFVNQLDESGGAWIGFFFQFAFAATAATIVAGTVAERCKMSAYLCYSIFLTGFVYPVVVHSIWSADGWLTAFRDDPWQGVGVIDFAGSGVVHMCGGATALVAAIVLGPRKGRFYDEDGNALETPASFPAHSVALQVLGTFLLWFGWYGFNPGSALVIDNAASASTSALCAVTTTLAAASGCVTAMFTDTLIEMMATGEASYDLTMAMNGALAGLVAITAGCSVVTPWASLIIGIIGGWVYLGLSKLLIKLKIDDAVDAVPVHFGNGMWGVLAVGFFAEPDAMVTAGYNDVPGVFYKGDGSLLLCQFVAIVWVCAWVFFLMTPFFVVLNILGMFRVDPLEEEVGLDISHHRGSAYDMTTAKKEDVEELMEHRSSKHGKVEIPKEVQKEDTA

SEQ ID NO: 1165 - protein, 411 aa, Anaplasma phagocytophilum
MVEKAVLECGDRRISLPVLRGTDGTPVVDITTLYRENNVLTYDPGFMSTAACRSEITFIDGNKGTLRYRGIDIENLIGTPNSFSSIVYLLLNGTLPSETEHEEFARILGAEYDVPEQVMNVIRSFPRDSHPMAILIASFSALAANYHASRIDPLTGAIIAIAKVPGIVASIYRHTANLDFIQADANLEYTHHFIRMMFGDMDDAHRDIMHKALDAIFIMHADHEQNASTSTVRMTGSSGAGLFACLCAGVATLWGPAHGGANEAVIKMLAEIGSPENVSSFIDKVKNNKGKSRLMGFGHRVYKSYDPRARVLRTICKDVLDSLGRDENLLAVAEELESQALQDEYFIERKLYPNVDFYSGIVLRAMGVPVDMYTAFFALARTSGWASQWYEMIQSDEGKRISRPRQLYTGK

SEQ ID NO: 1166 - protein, 435 aa, Rickettsia sibirica 246
MTNENNNDSEFAELKIRGKIFKLPILKASIGEDVIDISRVSAEADCFTYDPGFMSTASCQSTITYIDGDKGILRHRGYDIKDLAEKSDFLEVAYLLIYGELPSGEQYNNFTKQVAHHSLVNERLHYLFQTFCSSSHPMAIMLAAVGSLSAFYPDLLNFKEADYELTAIRMIAKIPTIAAMSYKYSIGQPFIYPDNSLDFTENFLHMMFATPCTKYTVNPIIKNALNKIFILHADHEQNASTSTVRIAGSSGANPFACISTGIASLWGPAHGGANEAVINMLKEIGSSEYIPKYIAKAKDKNDPFRLMGFGHRVYKNYDPRAAVLKETCKEVLKELGQLDNNPLLQIAIELEAIALKDEYFIERKLYPNVDFYSGIIYKAMGIPSQMFTVLFAIARTVGWMAQWKEMHEDPEQKISRPRQLYTGYVHREYKGIRER

SEQ ID NO: 1167 - protein, 380 aa, Ehrlichia sp. ERm58
VDITCLYKDTGILTYDPGFMSTAACESRITFIDGNKGILRYRGYNIADLVNSNKSFIEIVYLLFYGVLPDANDLQNFVLQVSQEYMPIKIVNDIIKSFPRNSHPMAILISCFSGLASYYNNQRHNEDELKYARLAVSQIAGIVAMIYRHITDQDFIQANTELSYSENFIHMMFDISSYEFTKVVSKALDVIFILHADHEQNASTATVRLTGSTGANLFACLAAGAATLWGPAHGGANEAVINMLMEIEKPSNVKQFVQKVKDKNNGIRLMGFGHRVYKNYDPRAKIICEICKEVLNDLKTSHPLLEVALELESIALQDSYFIERSLYPNVDFYSGIVLKAIGIPVSMFTTLFALARTSGWSAQWYEMIKGRDYKICRPRQ

SEQ ID NO: 1168 - protein, 445 aa, Arabidopsis thaliana
MVVRKVGKYELGRTIGEGTFAKVKFAQNTETGESVAMKIVDRSTIIKRKMVDQIKREISIMKLVRHPCVVRLYEVLASRTKIYIILEYITGGELFDKIVRNGRLSESEARKYFHQLIDGVDYCHSKGVYHRDLKPENLLLDSQGNLKISDFGLSALPEQGVTILKTTCGTPNYVAPEVLSHKGYNGAVADIWSCGVILYVLMAGYLPFDEMDLPTLYSKIDKAEFSCPSYFALGAKSLINRILDPNPETRITIAEIRKDEWFLKDYTPVQLIDYEHVNLDDVYAAFDDPEEQTYAQDGTRDTGPLTLNAFDLIILSQGLNLATLFDRGKDSMKHQTRFISHKPANVVLSSMEVVSQSMGFKTHIRNYKMRVEGLSANKTSHFSVILEVFKVAPSILMVDIQNAAGDAEEYLKFYKTFCSKLDDIIWKPPDASMRNRVTKAKSKRR

SEQ ID NO: 1169 - protein, 341 aa, Yersinia pestis KIM
MKALSKLKAEEGIWMTDVPQPELGHNDIMIKIRKTAICGTDVHIYNWDEWSQKTIPVPMVVGHEYVGEVVAIGQEVKGFNIGDRVSGEGHITCGHCRNCRGGRTHLCRNTVGVGVNRPGSFAEYLVIPAFNAFKIPDNISDELAAIFDPFGNAVHTALSFDLVGEDVLVSGAGPIGIMAAAVCKHVGARHVVIADVNEYRLDLARKMGVTRAVNVSKENLNDVMTELGMTEGFDVGLEMSGAPPAFRSLLNSMNHGGRIAMLGIPPSDMSIDWNQVIFKGLFIKGIYGREMFETWYKMAALIQSGLDLTPIITHRFPIDEFQQGFDAMRSGKSGKVVLSWD

SEQ ID NO: 1170 - protein, 411 aa, Anaplasma phagocytophilum
MVEKAVLECGDRRISLPVLRGTDGTPVVDITTLYRENNVLTYDPGFMSTAACRSEITFIDGNKGTLRYRGIDIENLIGTPNSFSSIVYLLLKGTLPSETEHEEFARILGAEYDVPEQVMNVIRSFPRDSHPMAILIASFSALAANYHASRIDPLTGAIIAIAKVPGIVASIYRHTANLDFIQADANLEYTHHFIRMMFGDMDDAHRDIMHKALDAIFIMHADHEQNASTSTVRMSGSSGAGLFACLCAGVATLWGPAHGGANEAVIKMLAEIGSPENVSSFIDKVKNNKGKNRLMGFGHRVYKSYDPRARVLRTICKDVLDSLGRDENLLAVAEELESQALRDEYFIERKLYPNVDFYSGIVLRAMGVPVDMYTAFFALARTSGWASQWYEMIQSDEGKRISRPRQLYTGK

SEQ ID NO: 1171 - protein, 396 aa, Ehrlichia sp. EHt224
KVKLPVLCDTNGNKVVDITSLYKSTGILTYDPGFMSTAACESKITFIDGSKGILCYRGYNIADLVNSNKSFIEIVYLLFYGSFPSVDDFKDFMLQISQEYMPPKMICDVIKSFSQDAHPMTILMACFSGLASYYNNQQHCENELKYARLAVSQIAGIIAMIYRHITDQDFIQANTELSYSENFIHMMFDISSYEFTKIVSKALDIIFILHADHEQNASTATVRLTGSTGANLFACLAAGAATLWGPAHGGANEAVINMLMEIEQPSNVKQFVQKVKDKNNGIRLMGFGHRVYKNYDPRAKIICEICKEVLKDLKVSHPLLEIALELENIALQDSYFIERNLYPNVDFYSGIVLKAIGIPVSMFTTLFALARTSGWSAQWYEMIKDKNYKICRPRQL

SEQ ID NO: 1172 - protein, 368 aa, Candida albicans SC5314
MTFVPRKTFPNYNIPLNNFKGHHQKALSKFGHLAPQLDMILEVRDSRAPISTTNVLFDKVLPSKKKLILYSKKDLSILKPRLLEKWHKSKNEQYMFVDCRSKRDGKKIINEIKKLYDSMETPPPLGLRTMIIGMPNVGKSSLVNTLRYVGLSDGENAVSTKIRKVARTGGQPGVTRSTSEIIRLSRDPEIMVYDTPGVFLPTTKNAETMLSLALVGCINESFIDPVILADYLLYVLNLQDPTGKLYTDYIDHPTNNVYELLESIDQKRNVLQIDKRFDECGLANHWISKWKQGKSSKYRGLFDVAAIHEINAKDFGNLTNAERERIGLSNVQQRLQERFGDDGTSTSKHRKRTAKDREFDMKNRLFKL

SEQ ID NO: 1173 - protein, 178 aa, Glycine soja
MASSMISSPAVTTVNRAGAGMVAPFTGLKSMAGFPTRKTNNDITSIASNGGRVQCMQVWPPVGKKKFETLSYLPDLDDAQLAKEVEYLLRKGWIPCLEFELEHGFVYREHNRSPGYYDGRCWTMWKLPMFGCTDASQVLKELQEAKTAYPNGFIRIIGFDNVRQVQCISFIAYKPPSF

SEQ ID NO: 1174 - protein, 492 aa, Brucella suis 1330
MQDKIDRLRQQAVPPQSLFINGRWQPAADGNVMAVISPIDGTQLTTIAAATAIDVDRAAAAARHSFEKGTWAKAAPAERRKVLLKIAELIERNALELAVLGVRDNGTEISMALKAEPGSAANSFRYYAEAIDKVYGEIAPTAENILGLVHRAPVGVVGAIVPWNFPMMIGAWKIAPALAAGNSIVLKPAEGASLSLLRLAELCAEAGLPEGVLNVVTGAGPVTGEALGLHPDIDVLAFTGSGFVGRKLLEYSARSNLKRVHLELGGKSPNIVFADAPDLAQAAKVSAYGIFRNSGQVCVAGSRLLVERSIAGEVAEKVSTIAAAIKGGDPLGLTTEAGAISSEAQLRKNLDFAEQALSEGAGLRTGGKRILEETGGFYMQPTVFNVEPGMTLAREEVFGPILSIIPFDNEEDALKIANDSDYGFASAVWTSNLSRAHRMVRGIRAGVVHVNTYGGADNTVPLGGVKQSGNGHDKSLHALDKYIDLKTAWIQL

SEQ ID NO: 1175 - protein, 154 aa, Crocosphaera watsonii WH 8501
MPLPTSLVTLEGTALPLSELENKVILFVNVASKCGLTPQYSGLVQLDKKYGERGFKVVAVPCNQFGEQEPGTPAEIKEFTSTKYDVEFTLLEKQDVNGSNRSPLYQFLVKDGEDIAWNFGKFLVGRDGEVVARFEPATAPDDAQLEAAIDKALG

SEQ ID NO: 1176 - protein, 156 aa, Saccharomyces cerevisiae
MWGKKFIRSQENVKFLCSVAVADESLTAFNDLKLGKKYKFILFGLNDAKTEIVVKETSTDPSYDAFLEKLPENDCLYAIYDFEYEINGNEGKRSKIVFFTWSPDTAPVRSKMVYASSKDALRRALNGVSTDVQGTDFSEVSYDSVLERVSRGAGSH

SEQ ID NO: 1177 - protein, 93 aa, Zea mays
  unsure (1)..(93): unsure at all Xaa locations
MKDQFQLAGLQGLGCHQDPQVLXRCIDCLPRQTLRSSXINSRMRDGSIRYEKFSKGDMLISLARRHSMPSSCLSQCLRACGDSRXCRRAIAKE

SEQ ID NO: 1178 - protein, 416 aa, Alternaria brassicicola
MGDLANRKVFKVFNQEFIVDERYNVTKELGQGAYGIVCAATNNQTGEGVAIKKVTNVFSKKILAKRALREIKLLQHFRGHRNITCLYDMDIPRPDNFNECYLYEELMECDLAAIIRSGQPLTDAHFQSFIYQILCGLKYIHSANVLHRDLKPGNLLVNADCELKICDFGLARGFSMDPEENAGYMTEYVATRWYRAPEIMLSFQSYTKAIDVWSVGCILAELLGGKPFFKGRDYVDQLNQILHYLGTPNEETLSRIGSPRAQDYVRNLPYMQKISFQSLFKNANPDALDLLDRMLAFDPSSRISVEEALEHRYLQIWHDASDEPSCPTTFDFQFEVVEEIPEMKKMILDEVSRFRQMVRVQPGAGAGANQAPQVPIPNNYDRAGYEDPRPQEAFNQGGWNGSDLERDLQGLDGRMR

SEQ ID NO: 1179 - protein, 152 aa, Glycine max
MQHRKLTSGRPSGTDGSDYSYRMVVDSRYQLVAKGKKYLSLHFITEAVLLLIGATLAYLPGIEADAPNTVAYSSVIVSVVSLIIGNIGRRRSRSGLLRFYAVVSSIVMLLLIASLATQHLLLKAIQDSKLWRKGSMMSMIYRIFKLVCCYTW

SEQ ID NO: 1180 - protein, 485 aa, Oceanobacillus iheyensis HTE831
MNTREPTQLRYPEDYLQIIDNGIEEKSNPKRMIIIGAGLAGLVAGHLLKAAGHDVVILEANKRIGGRVYTIRKPLTEGNYLDVGAMRIPNYHRLVHAYIKKFNLRIHPFINKTPEDIIFVNNVRTTREAYEANPDILNFPLPEHEKGKTAEQLLQEAIDPFVELYTNSDEQEQRLLEEKYKGYSIGEFLQKNPLGPSLSPYAIRLIGIISGLEGFPQGSFVDVITDILEPLTVENVYFDAINNGNDRLPYSISKQLEENIKIEQRVISIRQSSSHITVQTDKKQTYKGDYVINTSPFSVFQFIDVIPYESISFQKWQIIRQLLHIPSVKIGIEFKERFWEDLKMGNAISDLPSRFSYIPSYGKGTKGPAVLLASYSWGEDALLWTSTTPTLMVQMILKDLAKIYGNIVYKQFSRSIYFNWSLNPFSAGCFTLLSPLLGAAVTEDFIRQPEGRIHFAGEHTSDFNGWMEGAIQSGIRAAMEVNQRE

SEQ ID NO: 1181 - protein, 196 aa, Cichorium intybus x Cichorium endivia
GHNNLNAKFVLLGDMGAGKSSLVLRFVKGQFLEFQESTIGAAFFSQTLAVNDATVKFEIWDTAGQERYHSLAPMYYRGAAAAIIVYDITSADSFTRAKKWVQELQKQGNPNMVMALAGNKADLEDKREVTAEEARVYAEENGLFFMETSAKTAANVNDVFHEIAKRLPRAQPTQNPAGMVLVDRPAEGARAASCCS

SEQ ID NO: 1182 - protein, 200 aa, Cichorium intybus x Cichorium endivia
MATIGHNNLNAKFVLLGDMGAGKSSLVLRFVKGQFLEFQESTIGAAFFSQTLAVNDATVKFEIWDTAGQERYHSLAPMYYRGAAAAIIVYDITSADSFTRAKKWVQELQKQGNPNMVMALAGNKADLEDKRKVTAEEARVYAEENGLFFMETSAKTAANVNDVFHEIAKRLPRAQPTQNPAGMVLVDRPAEGARAASCCS

SEQ ID NO: 1183 - protein, 200 aa, Cichorium intybus x Cichorium endivia
MATIGHNNLNAKLVLLGDMGAGKSSLVLRFVKGQFLEFQESTIGAAFFSQTLAVNDATVKFEIWDTAGQERYHSLAPMYYRGAAAAIIVYDITSADSFTRAKKWVQELQKQGNPNMVMALAGNKADLEDKRKVTAEEARVYAEENGLFFMETSAKTAANVNDVFHEIAKRLPRAQPTQNPAGMVLVDRPAEGARAASCCS

SEQ ID NO: 1184 - protein, 446 aa, Mycobacterium tuberculosis CDC1551
MRALPAGRHFFRGSDGYEAARRGTVWHRRVPDRYPEVIVQAVSADDIVSAIRYATVNGHKVSVVSGGHSFAASHLRDGAVLLDVSRIDHASIDADKGRAVVGPGKGGSVLMAELEAQGLFFPGGHCRGVCLGGYLLQGGYGWNSRIYGPACESVIGLDVITADGAQIHCDADNHADLYWAARGAGPGFFGVVTSFYLKLYPRPATCGTSVYVYPFDLADEVFTWARAVSAEVDPRVELQALASRGEPSMGIDVPVISLASPAFADSPEEAEQALALFGTCPVVEQALVKVPYMPTDLPAWYDVAMTHYLSDHHYAVDNMWTSASAEDLLPGIRSILDTLPPHPAHFVWLNWGPCPPRQDMAYSIEADIYLALYGSWKDPADEAKYADWARSHMAAMSHLAVGIQLADENLGARPARFASDAAMAKLDRVRAEYDPDGLFNSWMGRI

SEQ ID NO: 1185 - protein, 197 aa, Triticum aestivum
MSAVNLTNVAVLNNPTSFVNPFQFEISYECLVALEDDLEWKLIYVGSAEDENYDQQLESVLVGPVNVGTYRFVLEADPPDPSKIREEDIIGVTVLLLTCSYMGQEFIRVGYYVNNDYDDEQLREEPPAKLLIDRVQRNILTDKPRVTKFPINFHPETSGGQQQDQPQSAVPENHTSKGSKAKRRSLTGSGNLGMPKF

SEQ ID NO: 1186 - protein, 79 aa, Zea mays
  unsure (1)..(79): unsure at all Xaa locations
LGSVTSRACRDVMTHSFGEGYSTRSYXEGFGGVYGGNYPVEHPGAQIHPSHSEYDTWQGSEVKEKEKARHLKDEKHATA

SEQ ID NO: 1187 - protein, 417 aa, Anaplasma centrale
MVEKAILECGDCKVSLPVMRGNDGTLAIDVTGLYKDAKILTYDPGFLSTAACRSEITFIDGDKGILRTRGYDIADLVTTGGGFCSVAHLLLHGALPQGRELDDFASAVGNECHVPAQVVNVIKSLPSSAHPMAILIASFVTLAACYHAENSIDPLKSAIVAISKVPGIVAAIYRHTSGMPAVEADPNLGYVQNFVKMMFGDLGSTRQSVICRALESIFIMHADHEQNASTATVRVTGSAGANLFACLSAGAATLWGPAHGGANEAVVRMLEEIGSPERVGMFIQRVKDKKDGVRLMGFGHRVYKNYDPRALIIRDICKETLHELGTSDPLLDVAFELERVALQDEYFVKRFLYPNVDFYSGIVLKAIGVPVNMFTAFFALARTTGWSAQWYEMVTEHGDSNRICRPRQLYVGNMNAK

SEQ ID NO: 1188 - protein, 599 aa, Zea mays
  unsure (1)..(599): unsure at all Xaa locations
GLDAHAGKEVIYFVGWSXFHTIHLVRDGTQAPSLGDLLKMKSQEGVRVLLLVWDDPTSRSILGYKMDGFMGTRDEETRRFFKHSPVQVLLCPRSAGKRHSWVKQQETGTIFTHHQKTVIVDADAGNYRRKIVAFVGGLDLCGGRYDTPWHPLFRTLQNEHKEDYYNPNFNTVDARGPREPWHDLHSKIDGPAAYDVLQNFQERWLKAAKRHGIKKLAKSYDDALLTIERIPEIININDAIYFSDNDPETWHVQVFRSIDSNSAKGFPKDPRAATMKNLVCGKNVLIDMSIHTAYVHAIRSAQHYIYIENQYFIGSSFNWDSNKDLGKXLVANNLIPIEIALKIANKIKANERFSAYIVVPMWPEGNPTGAATQRILYWQNKTMQMMYETIYRTLKEEGLDDMYEPQDYLNFFCLGNREVADSTSTSNASNTANNPQEQARKNRRFMVYVHSKGMIVDDEYVIIGSANINQRSMEGIRDTEIAMGAYQPQYTWANKLSAPRGQIYGYRMSLWAEHIGSIEEDFNYPESLECMRRVRHLGEENWKQFVADEVTEMRGHLMKYPVSVDRKGKVKPLPGCTTFPDMGGNICGSFVAIQENLTI

SEQ ID NO: 1189 - protein, 417 aa, Triticum aestivum
  unsure (1)..(417): unsure at all Xaa locations
NPTPTTAKKIHRSIDLGARRTATRSDHIQRRKIKPPPPPXMKLQTEAAAAGGEGRLMIRQVWANNVESEFQAIRQVAERFPYVSMDTEFPGVIHCPSKHHATLTPSERYAALKANVDALHLIQVGLAFAASPDAAPAVAFEINLREFDPRVHRHNPSSVALLAGHGLDFAKQRREGVDARVFAALLMSSGLVCSGASAPTWVTFHSAYDFGYLVKLLMGRKLPRTLPEFLGLVRVFFGDQVYDARHVMDSCAGLYGGLDALAAQLGVERAAGMSHQAGSDAALTWDVFRRIREVYFAGHSRQGRASAXAGVLYGLDLELDLAGPRARETGTEREQEHRTLGRGTGRGRGKNRRAGGLNYRPTHPPPINCLAVNLVTSETPPADSLAPCFSMSVVVHRVSGLIRDVLMGINIMFLFVG

SEQ ID NO: 1190 - protein, 433 aa, Ehrlichia chaffeensis
MLYKQDMCGVIINLGRIMVKEAVLELDGQRIKLPVLYDTHGNKAVDITSLYKNTGILTYDPGFMSTAACESRITFIDGNKGILCYRGHDIVNLVNNNKSFIEIVYLLFYGVLPGLEDLQNFISQISQEYNPPKIVHDVIKSFPRDSHPMSILMACFSALASCYHNQDNSADQLKCAKLAVAKVASIIALIYRYITNQDFVESDTKLSYSENFVHMMFDISSYKFTQVVAKALDIIFVLHADHEQNASTATVRLSGSSGADLFACLVAGTATLWGPAHGGANEAVINMLMAIEKPSNVKQFIQKVKDGNKSTRLMGFGHRVYKNYDPRAKIMYKICREVLNNLNVNDPLLEIALELENIALQDSYFIDRNLYPNVDFYSGIVLKAIGIPVRMFTTLFALARTSGWSAQWYEMVAEENYKICRPRQLYTGNIAEC

SEQ ID NO: 1191 - protein, 267 aa, Salmonella enterica subsp. enterica serovar Typhi Ty2
MTIPAFGLGTFRLKDDVVIASVKTALELGYRAVDTAQIYDNEAAVGQAIAESGVPRNELYITTKIWIENLSKDKLIPSLKESLKKLRTDYVDLTLIHWPSPGDAVSVEEFMQALLEAKKQGLTREIGISNFTIPLMEKAIAAVGADHIATNQIELSPYLQNRKVVDWAKAHGIHITSYMTLAYGKALKDEVIARIAVKHNATPVQVILAWAMGEGYSVIPSSTRRENLASNLLAQDLHLDAEDKNAIAALDCNDRLVSPEGLAPAWD

SEQ ID NO: 1192 - protein, 497 aa, Oryza sativa
MATCLDSLGPLLGGAANSTDAANYICNRFTDTSSAVDATYLLFSAYLVFAMQLGFAMLCAGSVRAKNSMNIMLTNVFDAAAGALFYYLFGFASRRTPSKGFIGKQFFGLKHMPQTGYDYDFFLFQWAFAIAAAGITSGSIAERTRFSAYLIYSAFLTGFVYPVVSHWFWSTDGWASAGRLTGPLLFKSGVIDFAGSGVVHLVGGIAGLWGAFIEGPRIGRFDAAGRTVAMKGHSASLVVLGTFLLWFGWFGFNPGSFTTISKIYGESGTIDGQWSAVGRTAVTTSLAGSVAALNHAVRQEMADGALERDRRLQRSPRRVRAITAGCSVVDPWASVICGFVSAWVLIGCNKLALMLKFDDPLEATQLHGGCGAWGIIFTALFARKEYVELIYGVPGRPYGLFMGGGGRLLAAHIVQILVIVGWVSATMGTLFYVLHRFGLLRVSTSTEMEGMDPSCHGGFGYVDEDEGQRRVRAKSAAETARVEPRKSPEQAAAGQLV

SEQ ID NO: 1193 - protein, 335 aa, Triticum aestivum
  unsure (1)..(335): unsure at all Xaa locations
MGSIAAGADEDACMYALQLVSSSILPMTLKNAIELGLLETLMSAGGKFLTPAEVAAKLPSAANPEAPDMVDRMLRLLASYNVVSCRTEEGKDGRLSRRYGAAPVCKYLTPNEDGVSMSALALMNQDKVLMESWYYLKDAVLDGGIPFNKAYGMSAFEYHGTDLRFNRVFNEGMKNHSIIITKKLLELYKGFEGLNTLVDVGGGVGATVAAITAHYPAIKGXINFDLPHVISEAPPFPGVTHVXGGDMFQKXVPSGDAILMKWILHDWSDEHCAKLLKNCYDXLPAHGKVVLVDXILPVNPKARLKRRSVPVDLSSPPTRVQGRSKGLSLARARSP

SEQ ID NO: 1194 - protein, 416 aa, Ehrlichia muris
MIKEAVLELDDQRIKLPVLYDTNGNKAVDITSLYKDTGVLTYDPGFMSTAACESKITFIDGNKGILCYRGHNIVDLVNGNKSFVEIIYLLFYGVFPSSEDLQNFTLQISQEYTPPQVVYDVIKAFSQDSHPMAILMACFSALAAYYHDREADKDELKCAKLAVAKIASIVALIYRYITNQDFITADTKLSYSENFVHMMFDISSYKFTQVVAKALDIIFVLHADHEQNASTATVRLAGSAGADLFACLVAGTATLWGPAHGGANEAVINMLMTIEKPSNVKQFIQKVKDGSKTTRLMGFGHRVYKNYDPRAKMMCEICREVLNDLGIDDPLLEVAVELENIALQDSYFIERNLYPNVDFYSGIVLKAIGIPVKMFTTLFALARTSGWSAQWYEMVANKNYKICRPRQLYTGHITKI

SEQ ID NO: 1195 - protein, 495 aa, Oryza sativa
MATCADTLGPLLGTAAANATDYLCNQFADTTSAVDSTYLLFSAYLVFAMQLGFAMLCAGSVRAKNTMNIMLTNVLDAAAGALFYYLFGFAFAFGAPSNGFIGKHFFGLKQVPQVGFDYSFFLFQWAFAIAAAGITSGSIAERTQFVAYLIYSAFLTGFVYPVVSHWIWSADGWASASRTSGSLLFGSGVIDFAGSGVVHMVAACRTLGRPHRGPPHWRFDHAGRSVALRGHSASLVVLGSFLLWFGWYGFNPGSFLTILKSYGPPGSIHGQWSAVGRTAVTTTLAGSTAALTTLFGKRLQTGHWNVIDVCNGLLGGFAAITAGCSVVDPWAAIICGFVSAWVLIGLNALAARLKFDDPLEAAQLHGGCGAWGVIFTALFARKEYVDQIFGQPGRPYGLFMGGGGRLLGAHIVVILVIAAWVSFTMAPLFLVLNKLGLLRISAEDEMAGMDQTRHGGFAYAYHDDDASGKPDRSFGGFMLKSAHGTQVAAEMGGHV

SEQ ID NO: 1196 - protein, 409 aa, Ehrlichia sp. Yamaguchi
MIKEATLELDGQKIKLPVLYDTNGDKAVDITSLYKNTGILTYDPGFMSTAACESKITFIDGNKGILCYRGHNIVDLVNKNKSFVEIIYLLFYGVFPSAEDLQNFTLQISQEYMPPQVVYDVIKSFSQDSHPMSILMACFSALASYYHDQEADKDELKYAKLAVAKIASMVALIYRYITNQDFITADTKLSYSKNFVHMMFDISSYKFTQVVAKALDIIFILHADHEQNASTATVRLAGSSGADLFACLVAGTATLWGPAHGGANEAVINMLMTIEKPSNVKQFIQKVKDGSKTTRLMGFGHRVYKNYDPRAKIMCKICREVLNDLGIDDPLLEVAQELENIALQDSYFIERNLYPNVDFYSGIILKAIGIPVRMFTTLFALARTTGWSAQWYEMVANKNYKICRPRQLY

SEQ ID NO: 1197 - protein, 347 aa, Pseudomonas fluorescens
MARSPETNSAMPQQIRQLLYSQLISQSIQTFCELRLPDVLQAAGQPTSIERLAEQTHTHISALSRLLKALKPFGLVKETDEGFSLTDLGASLTHDAFASAQPSALLINGEMGQAWRGMAQTIRTGESSFKMYYGISLFEYFEQHPERRAIFDRSQDMGLDLEIPEILENINLNDGENIVDVGGGSGHLLMHMLDKWPESTGILFDLPVAAKIAQQHLHKSGKAGCFEIVAGDFFKSLPDSGSVYLLSHVLHDWGDEDCKAILATCRRSMPDNALLVVVDLVIDQSESAQPNPTGAMMDLYMLSLFGIAGGKERNEDEFRTLIENSGFNVKQVKRLPSGNGIIFAYPK

SEQ ID NO: 1198 - protein, 137 aa, Glycine max
LALHYRNADHPSRVDTDVDGLLGRLRFIQGLKFQVDVTYMEFLLRVKRVEEHAKGNGTWDAPHPWLNLFVSKSHIVDFDREVFKKILKDGVDGPILVYPLLRNNYIVRKISSQVKLICKGFGLSPSLIMIDGRIPSK

SEQ ID NO: 1199 - protein, 501 aa, Saccharomyces cerevisiae
MTKLHFDTAEPVKITLPNGLTYEQPTGLFINNKFMKAQDGKTYPVEDPSTENTVCEVSSATTEDVEYAIECADRAFHDTEWATQDPRERGRLLSKLADELESQIDLVSSIEALDNGKTLAFKARGDVTIAINCLRDAAAYADKVNGRTINTGDGYMNFTTLEPIGVCGQIIPWNFPIMMLAWKIAPALAMGNVCILKPAAVTPLNALYFASLCKKVGIPAGVVNIVPGPGRTVGAALTNDPRIRKLAFTGSTEVGKSVAVDSSESNLKKITLELGGKSAHLVFDDANIKKTLPNLVNGIFKNAGQICSSGSRIYVQEGIYDELLAAFKAYLETEIKVGNPFDKANFQGAITNRQQFDTIMNYIDIGKKEGAKILTGGEKVGDKGYFIRPTVFYDVNEDMRIVKEEIFGPVVTVAKFKTLEEGVEMANSSEFGLGSGIETESLSTGLKVAKMLKAGTVWINTYNDFDSRVPFGGVKQSGYGREMGEEVYHAYTEVKAVRIKL

SEQ ID NO: 1200 - protein, 379 aa, Hordeum vulgare subsp. vulgare
IPWERLQITRKDYRKARLEQYKNYENFPQSGELMDKLCKQVESSSKYYEFQYNTRIVKPSILHFQLRNLLWATSKHDVYFMSNSTVGHWSSLSHKMTDVLDFSGHVAPAKKHPGCALEGFTGVQVSTLAVNEGLLVAGGFQGELVCKSLGERDVKFCTRTTLSDNAITNAMDIHRSTSGSLRITVSNNDSGVREFDMERFQLLNHFRFNWPVNHTSVSPDKKLLAVVGDDRDALLVDSRNGKVTSTLVGHLDYSFASAWHLDGVTFATGNQDKTCRVWDIRNPSTSLAVLRGNIGAIRCIRYSSDGRFLLFSEPADFVHVYSTAECYRKRQEIDFFGEISGISLSPDDESLFVGVCDRVYASLLNYRLVHANGYLDSYM

SEQ ID NO: 1201 - protein, 130 aa, Bacillus cereus ATCC 10987
MSLTSLKDYTTLHNGVKMPWFGLGVFKVEDGSEVIESVKAAIKNGYRSIDTAAIYQNEEGVGQAIRESGVSREELFITSKVWNSDQGYETTLQAFETTLEKLGLEYLDLYLVHWPVKGKYTESWKALEKL

SEQ ID NO: 1202 - protein, 381 aa, Xylella fastidiosa Dixon
MPLLAEHGTTIIEAMYHRLFEDPQIEALFNQANQKNGTQIHALAGAILAYARNIDNPGVLASAIERISQKHVGYAIHPEHYPHVATALLGAIKQVLGDVATSEVLEAWGEAYWFIANLLKDREAVIREGIMTKNGGWIHWRRFVISKRIPESETITSFMLHPEDGGPVVPHQAGQYLTFRFDAAGMPGMKRNYSISCGPNSDYYRITVKREHGTGASAFLHDQAKVGTIIECTPPVGDFFLPSVIERPIVLLSGGVGLTPMVSMMEQIAEAHPDAQVWYVHGTQNRETHAMDAHIRALVSRHKHMKATTFYTQRSEADDAEAGFITIDWLRANTPFQKADFYLCGPRPFLRTFVRDLIGAGVPAAQVHYEFFGPMDEEMAA

SEQ ID NO: 1203 - protein, 229 aa, Glycine max
SLTRGRTRGHAVKQNYGEKVLIQFEDFANHNAFDLLEKYSSSHLGFNDDIQGTASVVLAGLLASLKLVGGTLVDHTFLFLGAGEAGTGIAELIALEISKQTKAPVEETRKKIWLVDSKVKMPGWFYSYFTFYSFFFPNLHNKLVLFQGLIVSSRLESLQQFKKPWAHEHEPVKSLLDAVKAIKPTVLIGSSGAGKTFTKEVVETMASLNEKPLILALSNPTSQSECTAE

SEQ ID NO: 1204 - protein, 346 aa, Bordetella bronchiseptica RB50
MSASLTADRTPPLTTAALPYPLDPQIQRFVERMQADSAAHPRRDLVPVEQARAISEAVRRPWAEGGPQMARTREIHAPTPHGPVRLRVYTPRAARPGPALLYVHGGGWVLFSLDTHDRLMREYAERAGLTVIGVDYTRAPEARYPRAIEEIVGVIDWLDANGAELEVDRARLCIGGDSAGANLSVAACLTLRERGAAPLAGMVLNYGVYDANLFRDSTVKYGGGEYLLSTQQMVWFYWNYLRAGDDPRDPRISPVHADLRGLPPAFMAITELDLLHDANQDMAARLREAGVDVQAKVYPGTVHSFLEAVSLAQVSVAAFDDTAAWLRAVLRPAAAAAAIHTGEHQP

SEQ ID NO: 1205 - protein, 487 aa, Triticum aestivum
  unsure (1)..(487): unsure at all Xaa locations
MGDRPKLPARYEQVKLLGEGNFAKVYLARHMDTKEEVAIKVMDKEKLIKLGAVQQIKREIAVMRRLRHPNIVQLHKVMACKSRIFVVMEYVRGGXLYRHIPANSGLKEDETRRIFQQLVSALTFCHAQGVYHRDIKPDNLLVDEHGNLKVADFGLSAHADTARREALLHTVCGTPLYVPPEVFARRGYDGAKADAWSCGIVLFVLAAGRKPFRDDDFITLYRTICRGDYRCPRTFSPELVRIVRRLLQPNPAHRITLLQIKETDWFKKGFKEISFYIDNKDCLRSLDGSEEPDLCDSDSEDETAMSSSSSGSSSPVAHGDGGGMHTSVSAPSLVNLEKMHIAAARAPEPRIRRIKSMNAFDIIASSPSFDLSGLFEERGEQLRFVSSAPVNTIIKKLEEIAGQVSFTARTKDCQVSFEATRNGHKGALAISTKIFQLTPELVMVQVCKKAGDTAEYRQFCGSELKPGLRGLVDGLPEDGLPPTLNVA

SEQ ID NO: 1206 - protein, 437 aa, Rubrivivax gelatinosus PM1
MTPSDVKATLSFSDGSPSMDLPIYKGSVGPDVIDIRKLYAQTGKFTYDPGFLSTASCQSAITYIDGDKGELLYRGYPIEQLAENCDFLETCYLLLNGELPNVTEKAKFVKTVNGHTMVNEQMQFFLRGFRRDAHPMAVLTGLVGGLSAFYHDSTDVQNPEHRAIAAIRLIAKMPTLVAMAYKYSIGQPYIYPRNDLSYTSNFMRMMFGTPCEEYVPNDVLVRAMDRIFILHADHEQNASTSTVRLCGSSGTNPFAAIAAGVACLWGPAHGGANEACLNMLEDIQKMGGVAKVGKFIEQVKDKNSGVRLMGFGHRVYKNYDPRAKLMRETCHEVLAEMGLQNDPLFKLAMELEKIALEDDYFVSRKLYPNVDFYSGIVQRAIGIPVSLFTAIFALARTVGWIAQLNEMIGDPEYKIGRPRQLFVGATARDVTPIAERA

SEQ ID NO: 1207 - protein, 112 aa, Bartonella sp. CL1281co
NEACLKMLQEIGSVKRIPEFIARAKDKNDPFRLMGFGHRVYKNYDPRAKIMQQTCHEVLKELNIQDDPLLDIAIELENIALNDEYFVEKRLYPNVDFYSGITLKALGFPTEM

SEQ ID NO: 1208 - protein, 316 aa, Glycine max
MGGGGAMRSAAKIAGIGVSKAALRPSALPTEQTVRNASRPTAVSGVSSQSAKSAEVAPLHTAAAWDDWDFAEDGELVVPRMVFGSVPTLDEAKEATAELKDAIDQVYLCPETSQYSSPGGQVSALSPTLYGPVNRSCVIDAISDPTAPKHAIQAFHLLSTSREAQAVVASLACDPNVWNAVMENSAVSSFFQSQQSVAGFGAAENTEEVDKLSSCASETVESPEKLEVSAESHPGNMIFDFMDLLQNVKLTVIELVSRLSGFLQNIFPTPDAMKEKMSGDADGNTKASFMDSKISMGGTFIGLAVLVIMVIVTKRA

SEQ ID NO: 1209 - protein, 254 aa, Neurospora crassa
MMSGPETTRAVRWALGAGYRGFDSAQWYYNEREAGQAILSFLSSPENTAGLTRKDVHFTSKLRDNSTNYDAVRASISKSVKASGLGYIDLFLLHSPLGGREARLTSWKAVEDAVLAGEVKMAGVSNYGVKHLDEVMSAPFKIKPLVNQIECHPFNTQPEIRAACEKYGIVIEAYAPLARGMRMKHPVLTAVAKKYGVTPAQVLVRWSVQHGFVTLPKSTKKERLVENADVGRFELAEEDMEKLDGLDEKLVTDW

SEQ ID NO: 1210 - protein, 377 aa, Thermus thermophilus HB27
MEVARGLEGVLFTESRMCYIDGQQGKLYYYGIPIQELAEKSSFEETTFLLLHGRLPRRQELEEFSAALARRRALPAHLLESFKRYPVSAHPMSFLRTAVSELGMLDPTEGDISREALYEKGLDLIAKFATIVAANKRLKEGKEPIPPREDLSHAANFLYMANGVEPSPEQARLMDAALILHAEHGFNASTFTAIAAFSTETDLYSAITAAVASLKGPRHGGANEAVMRMIQEIGTPERAREWVREKLAKKERIMGMGHRVYKAFDPRAGVLEKLARLVAEKHGHSKEYQILKIVEEEAGKVLNPRGIYPNVDFYSGVVYSDLGFSLEFFTPIFAVARISGWVGHILEYQELDNRLLRPGAKYIGELDVPYVPLEARE

SEQ ID NO: 1211 - protein, 233 aa, Crocosphaera watsonii WH 8501
MSDPVVMMKQEVGKAAAARVKSDSIVGLGTGSTTAYAIQYIGERLQSGDLKNIIGVTTSFQAEVLARKYNIPLSTLDVVDRIDIAIDGADEVDPQKNLIKGGGAAHTQEKIVDSLAEQFIVVVDGGKLVDKLGSTFLLPVEVIPKAVVPVMRKLEQLGGKPDLRMGVKKAGPVVTDQGNLVVDVKFDSIDDPATLEKTINNIPGVLENGLFVGVTDVVLVGEIIDNKPVVREI

SEQ ID NO: 1212 - protein, 118 aa, Brassica napus
MAESQTKSPGDHVSGGDQSPRSSSHVREQDRFLPIANISRIMKRGLPANGKIAKDAKEILQECVSEFISFVTSEASDKCQREKRKTINGDDLLWAMATLGFEEYIEPLKLYLTRYREM

SEQ ID NO: 1213 - protein, 371 aa, Agrobacterium tumefaciens str. C58
MDGTPISPTARAKASSSDCNRGILLKTHRIALIPGDGIGQSVTDAAWQVLNAVAKTSGFVLEGTEFPWSCAFYKETGAMMPKDGIETLRGFDAIMLGAVGWPAEVPDSVSLHGLLLPIRKAFVQYANIRPHRLLSGVQGPLKADGFDILCIRENTEGEYSGAGGRVHQGTEDEVAVETSIFTRKGVERILRFGFEQAQKRRGKLASITKSNAQKYSMVFWDEVTHKLAAEYPDVEVSSYHIDAMAARMVMAPESLDVVVASNLFGDILTDLGAAIQGGLGFAASANINPDRSAPSMFEPVHGSAPDIAHLGIANPIAAIWSGAMMFEHLGEKDAAAKIMAALETATGRGIGTVPGKDKTDTITAAVLAALA

SEQ ID NO: 1214 - protein, 99 aa, Glycine max
  unsure (1)..(99): unsure at all Xaa locations
MAPSTISNPGAGFVDRAVPSMIATITGLRIMAGFPTRKTNKDXTFIDCNGGRVHCMHVWPPVGKKKCENLSYLTDLEDAQWAKEAEYLVREGMDINARN

SEQ ID NO: 1215 - protein, 484 aa, Agrobacterium tumefaciens str. C58
MIKLKNAALLRDACLVNGRWLKAADGKTIAVENPANSMIIGHVPSLSADEVKAAVESAGKAFSEWSRRSAKDRAAILRRWFDLMVANADDLGALMTAEQGKPFAEAKGEALYAASFVEWFAEEAKRVYGDTIPSPTTDKRITILKQPIGVCAAITPWNFPAAMITRKAAPALAAGCAMIVKPAEQTPLTALALGVLAEEAGVPAGVFQVVTGAARDIGKVFTESDTVRKISFTGSTEVGRLLMAQSAPTIKKLSLELGGNAPFIVFDDADLDAAVEGAIVSKYRNAGQTCVCSNRIYVQDGVYDAFAEKLVKRVESLSVGEGTEPGVLIGPLIDQEAVAKVEDHVADALGKGAKIVIGGKRHALGGTFYEPTVLTGATQAMKVAREETFGPVAPLFRFGTEDEAVAMANDTEFGLAAYFYTENVRRTWRVAEALEYGMVGHNTGLISNEVAPFGGVKQSGLGREGSHYGIDEYLEIKYLCSAIG

SEQ ID NO: 1216 - protein, 197 aa, Zea mays
  unsure (1)..(197): unsure at all Xaa locations
MATSFQGTTTKCTACDKTVYLVDKLTADNRVYHKACFRCHHCKGTLKLANYNSFDGVLYCRPHFDQLFKRTGSLDKSFQGTPKVVKPERNVGNENATKVSSAFAGTREKCVGCSKTVYPIERVTVNNTMYHKCCFKCCHGGCTISPSNYIAHEGKLYCKHHHVQLIKEXGTSASSRMTTRRHRRLGRWRTTKKKSIN

SEQ ID NO: 1217 - protein, 96 aa, Glycine max
VLEATMICIDNSEWMRYRDYSPSRFQAQTDAANLICGAKTHSNPYYTAGVLTMAGTGTRVTATHPSDLGRILSGLHGLEMGAKLNLSDRMQEAQLG

SEQ ID NO: 1218 - protein, 398 aa, Neorickettsia risticii
MNSEKVKVNVEEFLKSTAGPSGVSASLEPRGFFYDPGYAKTAPCKSSITFIDGENGILLHRGYPIEELAQTSDFLQVGYLLINGKLPDSIATREFEEKIKHVPQLPECVLKNIRSFPTSAHPMAVLISALASLASVYGEMDFHEKKLLLVAYTPWLVAYIYRHINSQEFIEPDIRLPYTENFLYMMFGEKKPKDAEILDKIFILHADHGQTASTSVARMVVSSGASPIVACSAATASLWGPLHGGANERVLEMLRGIIESGENVENFIERVKRKEERLMGFGHRVYKNYDPRAAILKQKAHDVLKADSPILKTAGKLETIATREEYFLSRKLYPNVDFYSGIVLDALGIPSCMFTPIFALARTVGWVAQIAEFLSDSEQKLCRPRQIYVGEPRRSVHG

SEQ ID NO: 1219 - protein, 483 aa, Hordeum vulgare subsp. vulgare
  unsure (1)..(483): unsure at all Xaa locations
MERYNIITEVGDGTFGSVWRAINKESGEVVAIKKMKKKYFSWEECINLREVKSLRRMNHPNIVKLKEVIRENDMLFFVFEYMECNLYQLMKSKGKPFSETEIRNWCFQVFQALSHMHQRGYFHRDLKPENLLVTKELIKVADFGLAREIISEPPYTEYVSTRWYRAPEVLLQSSVYSSAVDMWAMGAIIAELFSHRPLFPGSSEADEIYKICNILGTPNQHTWAGGLQLAASIHFQFPQSGSINLSEVVPTASEDALNLISWLCSWDPRKRPTAVEVLQHPFFQPCFYVPPSLRYRSTGYATPPPSVGAKGAMDQKNARRYPVGTLSNGRPAVNNSYLSTNAPARAAGVQRKLELDHQVKPEGNHKLTTKENAMNQPWSRLPPAPVRNNMNYLAAXEQIPRGGAPDIAEKLSQLSMSSTTNRAPIMPSDRFVDLKATTRAHGEPVRRPVPLGPRDTWHARNDPFRRTYEMPGERALLQRKLVS

SEQ ID NO: 1220 - protein, 398 aa, Neorickettsia sennetsu
MNSEKVKVNVEEFLKSTAGPFGVSASLEPKGFFYDPGYAKTAPCKSSITFIDGENGILLHRGYPIEELAQTSDFLQVGYLLIDGKLPDSAATREFEERIKHVPQLPECVLKNIRSFPTSAHPMAVLISALASLASVYGEMDFNQKKLLLVAYTPWLIAHIYRHINSLEFVEPDIRLPYTENFLYMMFGEKKPKDAEILDKIFILHADHGQTASTSVARMVVSSGASPIAACSAATASLWGPLHGGANERVLEMLRGIVESGEKVENFIERVKRKEERLMGFGHRVYKNYDPRAAILKQKAHDVLKADSPILKTAGELETITAREEYFLSRKLYPNVDFYSGIVLDALGISSCMFTPIFALARTVGWVAQITEFLSDSEQKLCRPRQIYVGEPRRNVHG

SEQ ID NO: 1221 - protein, 473 aa, Salmonella typhimurium LT2
MPTHLVWFRRDLRLQDNLALAAACRDASARVLALYISTPAQWQAHDMAPRQAAFISAQLNALQTALAEKGIPLLFHEVADFNASIETVKNVCRQHDVSHLFYNYQYEFNERQRDAAVEKTLPSVICEGFDDSVILAPGAVMTGNHEMYKVFTPFKNAWLKRLKEDIPPCVPAPKIRVSGALSTPLTPVSLNYPQQAFDAALFPVEENAVIAQLRQFCAQGADEYALRRDFPAVDGTSRLSASLATGGLSPRQCLHRLLAEQPQALDGGPGSVWLNELIWREFYRHLMTWYPALCKHQPFIRWTKRVAWQENPHYFQAWQKGETGYPIVDAAMRQLNATGWMHNRLRMITASFLVKDLLIDWRLGERYFMSQLIDGDLAANNGGWQWAASTGTDAAPYFRIFNPTTQGERFDRDGEFIRQWLPALRDIPGKAIHEPWRWAEKAGVVLDYPRPIVEHKQARIATLSAYEAARKGA

SEQ ID NO: 1222 - protein, 159 aa, Chromobacterium violaceum ATCC 12472
MTTLYDFSAQRADGAEQALSAYEGRVALLVNTASECGYTRQYAGLQELQDYFAGQAFVVLGFPCNQFGGQEPGGEDEIVDFCRSRFGVSFPLFAKLQVNGDGAHPLWRWLTQADSDRPHPIKWNFTKFLVDGRGRVVKRYEPAVEPHELVDDIKALLAR

SEQ ID NO: 1223 - protein, 403 aa, Neorickettsia helminthoeca
MDTDEVTIKIQATVKSSGGPNGILISSEPRSFIYDPGYVSTASCKSEITFVDGEEGVLLYRGYPVDELATQCDFLRVVYLLLYGELPDPVRAKEFRTFIQNFPQLPDCVLENICSFPRDAHPMVILISAFAALASAHHDSDFETHKEVLIANVPRLVAYIYRYITSQDFIPPDACLSYVGNFFYMMFGEKKPDYESILDKILILHADHEQNASTSTARMVVSSGASPIAAVSAATATLWGPLHGGANEKVLHMLGEIEKQGGSVEEFIERVKRKEERLMGFGHRVYKNYDPRAVILKSTAQDILKGSSSILSIASKLESIASNDEYFISRKLYPNVDFYSGIILNALGIPTYMFTPIFALARTSGWVAQIKEFLSDKEQKIARPRQIYIGKPFRKVASQSEKL

SEQ ID NO: 1224 - protein, 250 aa, Glycine max
MGKSYPTVSADYQKAVEKAKKKLRGFIAEKRCAPLMLRLAWHSAGTYDVSSKTGGPFGTIKHPSELAHGANNGLDIAVRLLEPLKAEFPILTYADFYQLAGVVAVEVTGGPEVPFHPGREDKPEPPPEGRLPDATKGSDHLRDVFGKAMGLSDRDIVALSGGHTIGAAHKERSGFEGPWTSNPLIFDNSYFKELLSGEKEGLLQLPSDKALLSDPVFRPLVEKYASDEDAFFADYAEAHQKLSELGFAEA

SEQ ID NO: 1225 - protein, 177 aa, Glycine max
PPHPPAEPEKPFPNFLERPKQTTTPYKETRKKIWLVHPKGLIVGSRKASLQHFKQPWAHEHEPVGSLLEAVKVIKPTVLIGSSGVGKTFTKEVIEAVTSINEKPLVLALSNPTSQSECTAEEAYQWSEGRAIFASGSPFDPVEYKGKVYYSGQANNAYIFPGFGLGLVISGAIRVHD

SEQ ID NO: 1226 - protein, 502 aa, Mentha x piperita
MYSIAFMLVLRKMDEIISHTLAFQALVSLILLISITKWLSNSPKNKNSSPPSPRKLPILGNLLQLGSLPHHNLRSMARKHGPIMLLHLGSVRPVSSRRRPRGNHENSRSRLRRPRGSRSAALQLQGRVGGYGEYWRQLKTICVVQLLSNKRVQSFRSVREEETELLMKKIGDSSGNVNLSHMFTQLTNDVVCRSAIGRKYGAGDENGEKFLEILREFLELLGAISIGDFVPSLWWINRINGFDRRVDRIAKEMDEFLEKVIHERLENPAAKAEENFVDILLEIYRNNSAGVSIDRDSIKAIILDVFAAGTDTTAVVLEWAMTELLRHPEIMKKLQSEVRQVVKDKHNITDDDIEKMHYLKAVMKETMRFHTPIPLLVPRVARNDVEVMGYDVPVGTMVMINAWAIGRDPTSWDEPEKFRPERFLNSSVDFKGLDFELIPFGAGRRGCPGTTFPMATLEFTLANLMQKFDWELPHECRELDMSERPGVAIRRVIPLLAIGTKM

SEQ ID NO: 1227 - protein, 244 aa, Triticum aestivum
MFGYRKAPDLDLEAGGSAPLYPGMTEDVELRWAFIRKIYVILSVQLAMTAAVAGFVVKVPAVSDFFVSSNAGLGLYIFLLVLPLIVLCPLRYYHQKHPVNLILLGVFTVSISFAVGMTCAFTSGKIILEAAILTAVVVISLTAYTFWAAKRGHDFNFLGPFLFGALMVLLVFSLIQIFFPLGKISTMIYGAVASIIFCGYIIFDTDNIIKRHTYDEYIWAAVSLYLDIINLFLNLMQILRAADS

SEQ ID NO: 1228 - protein, 485 aa, Oryza sativa (japonica cultivar-group)
MATTTGRHRHDRLSALPDGILVRVLSHLGSVDAASTAALSHRWRHIHAAVPVVDLVDPESDQISSAIVAKNSAAPIRTLRLVDLWPPHDALHQAVATATAAGLQEFDVKLRHGDCSNRKLCPFRRHPDASADFDDSMRGSFTATPPHIFRCDTLRRLRLTNFQLDVPEGGVSMPSLEILSLKRIMATTDEAVQQLVSGCPNLADLTLEQCPSVADLVVASPRLESFAMICCHNAAHVVLHTQRLRTLRYKDGLPAGENFLMIADCTNVLAMTIDICESLVGKSAPAVVPITKLITRCASLTFLHLHLRPAMAYHSGAFTRALRHHPHLRQLALKGLLKDDQTIRSVSTLLRNTPELDVLSLFPLRTQPAKPYYLGVDSDDDYDSEEEEEEDGGASDDNQGVRVPLSLWESNIECLHKLRKIKLHNYKGKPNERLLAKYLLSKATSLEQFFVTLPAKTTADRQLKLTNELKYWRANKRAIVSCTLL

SEQ ID NO: 1229 - protein, 491 aa, Pseudomonas putida
MSQRLAAYENMSLQLIAGEWRVGKAGRDLDVLDPFTQEKLLQIPLANREDLDEAYRSARQAQVAWAACGPSERAQVMLNAVRIFDERRDEIIDWIIRESGSTRIKAQIEWGAARAITQESASLPSRVHGRILASDVPGKESRVYREPLGVIGIISPWNFPLHLTARSLAPALALGNACVIKPASDTPVTGGLLLAHIFEEAGLPKGVLSVVVGSGSEIGDAFVEHEVPGFISFTGSTQVGRNIGRIAAGGEHLKHVALELGGNSPFVVLADADLDQAVNAAVVGKFLHQGQICMAINRIIVEDSVYDEFVNRYAERVKSLPYGDPSKPETVVGPVINAKQLAGLQDKIATAKSEGARVMVEGEAQGNVLPPHVFADVTADMEIAREEIFGPLVGIQRARDEAHALELANSSEYGLSSAVFTSSLERGVKFARGIRAGMTHINDIPVNDEPNAPFGGEKNSGLGRFNGDWAIEEFTTDHWITVQHAPRRYPF

SEQ ID NO: 1230 - protein, 206 aa, Triticum aestivum
  unsure (1)..(206): unsure at all Xaa locations
MATSFQGTTTKCNACDKTVYLVDKLTADNRVYHKACFRCHHCKGTLKLANYNSFEGVLYCRPHFDQLFKRTGSLDKSFEGTPKVVKPERNVGNENATKVSSAFAGTREKCFGCSKTVYPIERVTVNNTMYHKSCFKCCHGGCTISPSNYIAHEGKLFCKHHHTQLIKEKGXSASSRTTTTRHHRVPGQWMMKTRSISQSLRISRDE

SEQ ID NO: 1231 - protein, 244 aa, Triticum aestivum
MFGYRKAPDLDLEAGGSAALYPGMTEDVELRWAFIRKIYVILSVQLAMTAAVAGFVVKVPAVSEFFVSSNAGLGLYIFLLVLPLIVLCPLRYYHQKHPVNLILLGVFTVSISFAVGMTCAFTSGKIILEAAILTAVVVISLTAYTFWAAKRGHDFNFLGPFLFGALMVLLVFSLIQIFFPLGKISTMIYGAVASIIFCGYIIFDTDNIIKRHTYDEYIWAAVSLYLDIINLFLNLMQILRAADS

SEQ ID NO: 1232 - protein, 226 aa, Triticum aestivum
MATMAPSPALLPLLLLLPLLLLSVACTAGAAPAATATVPTIPSQPGKPNSNNKQKQGGAPLGPAVRALVQSTCNATTYYDLCVAALVADPASSTADLRGLCAIAVSAAAANASATASALANTTWAASGAPETGSDGRAQQVPALLMRTCAGKYGEAREALLEARESVGEEAYDYAFVHVGAAAEYPAVCRTLFRRKRVPYPVELARREQALEHLCTVVIDIITLLA

SEQ ID NO: 1233 - protein, 62 aa, Triticum aestivum
  unsure (1)..(62): unsure at all Xaa locations
AAKAWARTPRSWVAVKXKEAEEDLVFRMHRLVGNRWELIAGRIPGRTAEEVEMFWAKRHQDQ

SEQ ID NO: 1234 - protein, 50 aa, Lactobacillus crispatus
  unsure (1)..(50): unsure at all Xaa locations
GXGFITPDDGSKDVFVHFSAINGYKSLDEGQKVSFTIESGAKGPAXANVT

SEQ ID NO: 1235 - protein, 215 aa, Clostridium acetobutylicum ATCC 824
MKLFIDTANVEEIKEVNDMGVICGVTTNPSLVAKEGRDFNEVIREITSIVDGPISGEVIALDAEGMIKEGREIAKIHKNMVVKIPMTEEGLKAVKVLSSEGIKTNVTLIFSAGQALLAARAGATFVSPFLGRLDDIGADSIGLIESIVNIFDIHDIRTEIIAASIRSPKHVIDSAEAGAHIGTVPYKVLKQLIKHPLTDIGIERFMKDWKEAFNK

SEQ ID NO: 1236 - protein, 312 aa, Bradyrhizobium japonicum USDA 110
MTTSDSLRDTRIPTHESVTIPAVGFGTLIPDPLVTRQAIRAALEAGFRHLDCAERYRNEAAVGDAMQDAFKAGKLRREELFVTTKLWNTNHRPERVKPAFDASRRRLQLDEIDCYIIHTPFAFQPGDEQDPRDASGRVIYDSGVTLVETWHALERLVDEGHCKSIGLSDITLEKLREIVAVARIRPAMVQVESHPYLPEWDLLDFCREHGIVLQAFAALGHAMEPRVLEDPVITAIARRVQKTPAQVCLAWAVQRGTAFLTTSTNPARIRENFDISALPEDAMREIRDGITTNVRFNAVVETGVPGFIPRAR

SEQ ID NO: 1237 - protein, 383 aa, Corynebacterium glutamicum ATCC 13032
MSSATTTDVRKGLYGVIADYTAVSKVMPETNSLTYRGYAVEDLVENCSFEEVFYLLWHGELPTAQQLAEFNERGRSYRSLDAGLISLIHSLPKEAHPMDVMRTAVSYMGTKDSEYFTTDSEHIRKVGHTLLAQLPMVLAMDIRRRKGLDIIAPDSSKSVAENLLSMVFGTGPESPASNPADVRDFEKSLILYAEHSFNASTFTARVITSTKSDVYSAITGAIGALKGPLHGGANEFVMHTMLAIDDPNKAAAWINNALDNKNVVMGFGHRVYKRGDSRVPSMEKSFRELAARHDGEKWVAMYENMRDAMDARTGIKPNLDFPAGPAYHLLGFPVDFFTPLFVIARVAGWTAHIVEQYENNSLIRPLSEYNGEEQREVAPIEKR

SEQ ID NO: 1238 - protein, 370 aa, Desulfitobacterium hafniense DCB-2
SGDRVLTFDYLGALAVSLVFPLVLAPRLGLSRTGFLFGMLNVAVALFTLRIFRDEVSRTTLRTLRAGMVLAVLTVGFAGSNYLTHWAERGLFGDEIIHSETTPYQRLVITRWKDDLRLYINGNLQFSSRDEHRYHEALVHPVLQALPWARRVLVIGGGDGLALREILKYRNIEHVTLVDLDPAMTTLFSRSEPLRALNHGSLTDQRVTVVNADAAQWLEQNQDSFDAIIVDLPDPSNFGLGKLYSVPMYRLMSRHLAEKGYAVVQSTSPYYAPRSFWDIDATLREAGLHTWPYHTYVPSFGEWGYILVGKRNDYTPPTRYDVPMKFLDGDTTALMFRFPADMAPRQGEPNRLNEQTLVHDFERDWRNVIR

SEQ ID NO: 1239 - protein, 124 aa, Triticum aestivum
LFCSLLCVCCQMLEWFADIRLINGEAIHASPRKTGAIILGGGLPKHHICNANMFRNGADYAVYINTAQEFDGSDSGAHPDEAVSWGKIKGSAKPVKVHCDATIAFPLLVAATFARRSHGANSTN

SEQ ID NO: 1240 - protein, 365 aa, Medicago sativa
MGSTGETQITPTHISDEEANLFAMQLASASVLPMILKSALELDLLEIIAKAGPGAQISPIEIASQLPTTNPDAPVMLDRMLRLLACYIILTCSVRTQQDGKVQRLYGLATVAKYLVKNEDGVSISALNLMNQDKVLMESWYHLKDAVLDGGIPFNKAYGMTAFEYHGTDPRFNKVFNKGMSDHSTITMKKILETYTGFEGLKSLVDVGGGTGAVINTIVSKYPTIKGINFDLPHVIEDAPSYPGVEHVGGDMFVSIPKADAVFMKWICHDWSDEHCLKFLKNCYEALPDNGKVIVAECILPVAPDSSLATKGVVHIDVIMLAHNPGGKERTQKEFEDLAKGAGFQGFKVHCNAFNTYIMEFLKKV

SEQ ID NO: 1241 - protein, 505 aa, Oryza sativa (japonica cultivar-group)
MAAPSAIPRRGLFIGGGWREPSLGRRLPVVNPATEATIGDIPAATAEDVELAVSAARDAFGRDGGRHWSRAPGAVRAKYLKAIAAKIKDKKSYLALLETLDSGKPLDEAAGDMEDVAACFEYYADLAEALDGKQRAPISLPMENFESYVLKEPIGVVGLITPWNYPLLMATWKVAPALAAGCTAVLKPSELASLTCLELGGICAEIGLPPGVLNIITGLGTEAGAPLASHPHVDKIAFTGSTETGKRIMITASQMVKPVSLELGGKSPLIVFDDVDIDKAVEWAMFGCFANAGQVCSATSRLLLHEKIAKRFLDRLVAWAKSIKISDPLEEGCRLGSVVSEGQYQKIMKFISTARCEGATILYGGARPQHLKRGFFIEPTIITNVSTSMQIWREEVFGPVICVKEFRTEREAVELANDTHYGLAGAVISNDLERCERISKAIQSGIVWINCSQPCFVQAPWGGNKRSGFGRELGQWGLDNYLSVKQVTKYCSDEPYGWYRPPSKL

SEQ ID NO: 1242 - protein, 325 aa, Aspergillus oryzae
MSNGKTFTLSNGVKIPGVGFGTFASEGSKGETYQAVTKALETGYRHLDCAWFYLNEDEVGDGIHDFLKKNPSVKREDIFVCTKVWNHLHRPEDVQWSVDNSLKRLRLDYVDLFLVHWPIASEKEDQEKPKIGPDGKYVILKELTENPEPTWRAMEKIYRDGKAKAIGVSNWTIPGLEKLFKFAEIKPHVNQIEIHPFLPNNELVQFCFKNDILPEAYSPLGSQNQVPTTGERVSENKTLNEIAQKGGNTLAQVLIAWGLRRGYVVLPKSSNPARIESNFKSIELTDEDFEAVNKVAEGRHFRFVNMKDTFGYDVWPEETAKNLSA

SEQ ID NO: 1243 - protein, 469 aa, Neurospora crassa
MVLIKLNPTVGATDAVASSKHSAVLHRHLDTTFLNMTRSEGNFLILEDDRKIFDASGGAAVGCLGWGDQRVAQAVTNQVLAAPYCATIFYTTRVQEELCRDLVQSTNGAMARAYIVNSGSEAMEAAVKLARQYFLEIDQPQRTRFISRKQSYHGITLGALSVGGHEVRRAKFEPLLIKNVSRVSPCNAFRGKAPGESDEEYAERLAKELDDEFQQVGPENVCAFVAEPIVGAALGCVPAVKGYFKAVRDVCDKYGALLILDEVMCGMGRSGTLHAWEQEGIVPDIQTIGKALGGGYQPVAGLLAGHRVVNALEKGSSVFVHGHTYQGHPAACAAALEVQRIVREENLLSNVRAMGDLLSSRLREILASHPNVGDIRGRGLFWGIEFVADKENMAPFPSEDHVCMEICQLGLTDKYGINVYPGGGSVDGITGDHIIISPAFNISREDVEWIAATVGRLVSDYFAAKAGTQ

SEQ ID NO: 1244 - protein, 368 aa, Nicotiana tabacum
MGIQHNEHNQDQTQSFLLDALYCEEERWEETIEDEILEKEATLPLPLPLLEQDLFWEDEELLSLFTKEKETISNFETIKTDPLLCLSRKEAVKWILKVNAHYGFSTFTAILAINYFDRFLSSLHFQKDKPWMIQLVAVTCLSLAAKVEETQVPLLLDFQVEDAKYVFEAKTIQRMELLVLSSLKWRMNPVTPLSFVDHIIRRLGLKSHIHWEFLKQCERILLLVIADCRFLSYMPSVLATATMLHVIHQVEPCNAADYQNQLLEVLNISKEKVNDCYELITEVSYNSISHKRKYESPINSPSAVIDTFYSSENSNESWDLQTSSSIPSTYSPRDQFLPLFKKSRVQEQQMRLTSLSRVFVDYAVGSPR

SEQ ID NO: 1245 - protein, 277 aa, Yersinia pestis KIM
MTMQPLIKLYDGRLMPQLGLGVWQASIQETELAVSKALEVGYRSIDTAAIYKNEEGVGKALKAAAVARDELFITTKLWNDDQHNPQQALETSLQKLQLDYVDLYLIHWPDPKQDHYVSAWRELVTLKEQGLIRSIGVCNFHIPHLQRLIDETGIAPTVNQIELHPLLQQRQLHAWNATHHIATESWSPLAQGGKGVFDQEIIRKLAQQYNKTPAQIVIRWHLDSGLIVIPKSVTPARIRENFEVFDFKLQKEELLAITKLDCGKRLGPDPEVFGSDR

SEQ ID NO: 1246 - protein, 299 aa, Glycine max
MVLRKVGKYEIGRTVGEGTFAKVKFAQNTESGESVAMKVLDRSAIIKHKMVDQIKREISIMKLVRHPYVVRLHEVLASRTKIYIILEFITGGELFDKIIHHGRLSENDSRRYFQQLIDGVDYCHSKGVYHRDLKPENLLLDSLGNIKISDFGLSAFPEQGVSILRTTCGTPNYVAPEVLSHKGYNGAVADVWSCGVILYVLLAGYLPFDELDLTTLYSKIERAEFSCPPWFPVGAKMLIHRILDPNPETRITIEQIRNDEWFQRSYVPVSLLEYEDVNLDDVNAAFDDAEEPRADQQCD

SEQ ID NO: 1247 - protein, 207 aa, Triticum aestivum
  unsure (1)..(207): unsure at all Xaa locations
MSDTDEHHFESKADSGASKTYPQQAGAIRKGGHIVIKARPCKVVEVSTSKTGKHGHAKCHFVAIDIFNGKKLEDIVPSSHNCDVPHVDRQDYQLIDITDDGMSASXLESGNTKDDLXLPTDDVLLGQIXDGFADGKDXILSVMSAMGEDNMPVKESVGAITLSVVATCKLDQCSGVENHHRIRYRWVNSCQIGVLPARRALNSTPPP

SEQ ID NO: 1248 - protein, 54 aa, Brassica napus
  unsure (1)..(54): unsure at all Xaa locations
MGSETFVEILLAILLPPVGVFLXYGIGVEFWICLLLTILGYIPGIIYAVNVLVA

SEQ ID NO: 1249 - protein, 259 aa, Helianthus annuus
MAAASSPREENVYLAKLAEQAERYEEMVEFMEKVVAAADGGEELTIEERNLLSVAYKNVIGARRASWRIISSIEQKEESRGNEGHVSTIRDYRSKIESELSSICDGILKVLDSKLIGSASGGDSKVFYLKMKGDYYRYLAEFKTGDERKLAAENTLSAYKAAQDIANAELAPTHPIRLGLALNFSVFYYEILNSPDRACNLAKQAFDEAIAELDTLGEDSYKDSTLIMQLLRDNLTLWTSDMQDDTAEEVKEAPKPDDQ

SEQ ID NO: 1250 - protein, 197 aa, Zea mays
ISSALCTWLLPLPLTKEKAAFSPSDPAMQRHVASGRPSGTDGSDFSYRMVVESRYQRVAEGRSRLARLILVQALHLVAGGLLLLLSLSKGAAVNKFAVLSMAAGFLAIVVGELGRMRTMSVLLRLYTSLSSIAVAFSVTCIIRSELFLKVMKQNTEAITSYEMLDAVRVALGILLQMVVIATTTRLLQNMSPPKRAS

SEQ ID NO: 1251 - protein, 297 aa, Helianthus annuus
MGFVKVVKNKQYFKRYQVKFKRRREGKTDYFARKRLIAQDKNKYNTPKYRLVVRFSNRDITCQVAYSRIEGDKILCAAYAHELPQYGVKVGLTNYAAAYCTGLLLARKLLSQLGLDKLYIGSTEVTGEEFNVKPVEDGPGAFRCYLDVGLMRTTTGARVFGAMKGAVDGGLNILHSTKRFPGFDSESKEFNADVHRQHIFGQHVAEYMRQLAEEDDEAYKRQFSQYIKLGLNADAIEGLYKKAHEAIRANPARKTVAKKAHPKKRWTEKKLTREQRQGKVAAAKAEWLKKIEAGEVE

SEQ ID NO: 1252 - protein, 78 aa, Triticum aestivum
MGLWSFLEGVLLIANALAILNEDRFLSPRGWSFADARGVQGANTFKGQMIGLIYAAQYMRFPLILLNGITILVKFVSF

SEQ ID NO: 1253 - protein, 93 aa, Glycine max
PGGALGPDSLGLPTRPLVGEDDRRGFLGNLFPTPGAIREKMSIDAGGNTKASFMDSKISMGGTFIGLAALVIMVIVTKRAYTLTSKTTICRLF

SEQ ID NO: 1254 - protein, 490 aa, Crocosphaera watsonii WH 8501
MVTATRPENKVKIGPTQLLINNKWVESASGKRFETINPSTGEVICDVAEADAADVDKAVIAARNAFNQGDWPKLSATQRGQLLYKLADLIEANIEELARLETLDNGKPYQDSLNADLQLVIACYRYYAGWADKIQGKTIPINGPYFCYTRHEPVGVVGQIIPWNFPLLMQAWKLAPALAAGNTVVMKTAEQTPLSALRLGELILEAGFPPGVVNLLSGYGPTAGQAIARHHDIDKVAFTGSTEVGHLIMEAAAQTNLKRVTLELGGKSPNIVFADANLEQAIEGAHFGLFFNQGQCCCAGSRLFVEEKCYDEFVAKSVERAKQRIVGDPFDDNTAQGSQVDRTQFDKVMEYIESGQREGAKLLCGGGRVGDRGYFIEPTVFAEVKDNMKIAQEEIFGPVMSIIKFKDMDEVIQRTNDTVYGLAAAVWTQDISKGHAIANALRAGTVWVNCYDVFDAAAPFGGFKQSGMGRELGEYGLQQYTEIKTVTVKL

SEQ ID NO: 1255 - protein, 113 aa, Glycine max
  unsure (1)..(113): unsure at all Xaa locations
MASSMIWSAAVTTVNRAGAGMVAPFTGXLKSLLGFPTGRPTIAFTSMVGTVGGVHCLQVWPPIARKKFGTLSYLPDLDDAQLAKEVEYLLRKGWIPRLEFELEHGFVYREHNR

SEQ ID NO: 1256 - protein, 316 aa, Glycine max
  unsure (1)..(316): unsure at all Xaa locations
MALSHQFSYLLFLLLILLSSLPNISQATSRAPNRMLALVQKQPLVLKYHKGPLLKGNITLHLLWYGTFTPTQRSIVIDFLESLTSTSSPESPSVSTWWKTTESYRGGPCTLVVGNQILDENYSLGKSLKNDNLVALASNPKLNSAPGDRVVHVILTAADVAVEDFCMKVCGTHGRGKKRXSEKIAYAWVGNSVTQCPGPGAWPFHQPLYGPQTPPLVAPNGDVGVDGMVINLATVLAGAVTNPFEDGYYQGPASAPLEAVSACTGIFGKGAYPGYAGDVLAENATGVSYNAVGMRGRKFLLPAMWDPLTSTCKTLV

SEQ ID NO: 1257 - protein, 74 aa, Brassica napus
MAFVPVCVQCGTRSNPCRCKVVGPTLGFVAFVVAGVIEWPLGAAVYLFRHRKGRRIMAHPATVVYPRVTRAIPI

SEQ ID NO: 1258 - protein, 305 aa, Corynebacterium efficiens YS-314
MSIVGTGNFFGSPEEERDRLVQALQGGKRQTTKPAEIPTVRLNDGNKIPQLGFGVFKVDPAETERVVSEALEAGYRHIDTAAFYNNEEGVGRAIAASGIPREELFVTTKLWPTRFDDAEAGFNESLEKLGMEYVDLFLLHWPAPRNNNFVQAWKVLEQLGERARSIGVCNFLPEHLRQLIDETTIVPAVNQFELHPALQQRDIQEASKAAGIAIESWGPLGQGKYDLSKEAPIAAAARSHGKTLAQVVIRWHLQHGFIVFPKTVNPERMRENLDVLDFELTAEEMVAIDNLERGARGGSHPNDIN

SEQ ID NO: 1259 - protein, 435 aa, Photorhabdus luminescens subsp. laumondii TTO1
MTISRTQQIAQLEQEWKSDRWNGIIRPYSAEDVVKLRGSVNPEHTLAQLGAKKLWELLHGMAKKGYVNSLGALTGGQALQQAKAGIEAVYLSGWQVAADANTASSMYPDQSLYPVDSVPAVVKRINNSFRRADQIQWANGIGTDHQEYIDYFLPIVADAEAGFGGVLNAFELMKAMIEAGAAAVHFEDQLAAVKKCGHMGGKVLVPTQEAIQKLVAARLAADVSGVPTLLIARTDADAADLLTSDSDAYDSEFITGERTFEGFFRTRAGIDQAISRGLAYAPYADLIWCETSTPDIEMARRFAEAIHAKYPGKLLAYNCSPSFNWKKNLDDKTIARFQDELSAMGYKFQFITLAGIHSMWFNMFDLAHAYAQGEGMKHYVEKVQEREFESINRGYTFSSHQQEVGTGYFDKVTTIIQGGTSSVTALTGSTEEQQF

SEQ ID NO: 1260 - protein, 192 aa, Glycine max
MRFMPLSRLIFRLPRHYTHGPLQSRALQTDSVLKDPQAKPIKYKIPQFYDPYGPRPPPSEKIVQLAEQIEALSEEERGQIMPTLSERLKLPKLQPISTDGMDMGTEGGGAAGLKVEEKKAEKTAFDVKLEKFDAAAKIKVIKEVRAFTNLGLKEAKDLVEKVPVVLKQGVTKEEANEIIEKIKAAGGVAVME

SEQ ID NO: 1261 - protein, 377 aa, Ferroplasma acidarmanus
MLVSMVNLMYIEFTDSGMVVPDILTIGYIDGDGIGPEITGAMIGVVNSAIELAYQGSRSIEWHKILIGTEAYEKFGTYVPEDSIKEIQKMYIAMKSTLNFMPDKRDLNTILRKRLGLYSNIRILKYIEGMDIPVNTFNRLNLTIIRDSTPNSHIFYHSSESTDDLIRFISDNYGLNITPDSGIYMMPQSKFRTRKIAKQAVRYSRRNGKKKITILESQQNHEFANWCIEEASAQEDVGYEVLKTREFMKRLISSPEDFEVILVDNVLSQTLVDYLAGTINIEYGSSIGDECAVFEAVQSSLPSEAGYDAADPLSFILSGCEMLMHIGWVEAAQIIENAISAAFRDNKIPKDINTRPDISPIKCSEFSSEIIKRMNGV

SEQ ID NO: 1262 - protein, 135 aa, Methanocaldococcus jannaschii
MIIMPGTKQVNVGSLKVGQYVMIDGVPCEIVDISVSKPGKHGGAKARVVGIGIFEKVKKEFVAPTSSKVEVPIIDRRKGQVLAIMGDMVQIMDLQTYETLELPIPEGIEGLEPGGEVEYIEAVGQYKITRVIGGK

SEQ ID NO: 1263 - protein, 447 aa, Clostridium acetobutylicum ATCC 824
MKDIERDDLKYIWHPCTQMKDYEKMPPIVIDKGEGCYLYDVNGNSYLDCISSWWTNIFGHSNKRINKAIEKQLNEIEHVIFAHFSNKPAVEFSKSLIQIAPEGLDKIFFSDNGSSAVEIALKMSFQYYQQTGKVKKTKFAALTNAYHGETIGALSVGDLDLYSKIYKPLLIDTLRIQGPDCYRCKYNKERHSCEAECFEEMEKSLKKHNSELCAIIIEPMIQGAAGMKMYSPKYLKKLRYACDYYDISVIFDEIAVGFGRTGKMFACENADISPDIMCLSKGISAGYMPMSVVLTTSKIYNAFYDDYVNLKAFIHSHTYAGNALACAAAIESLKIFKEESIIEKNIGKSKLIEKLTKNRARNNKFIGDIRSLGMVTAIELVKDKDTKESFDWKSRVGYEIYKIALKKGLLLRPIGDVLYFMPPYSIGEKDIEFMVEKCFESIEQYLE

SEQ ID NO: 1264 - protein, 182 aa, Triticum aestivum
MAGVGRNMVAPLLVLNLIMYIVVIGFASWNLNHFINGLTNRPGVGGNGATFYFLVFAILAGVVGAASKLAGVHHVRTWRGDSLATSASSALVAWAITALAFGLACKEIHIGGYRGWRLRVLEAFVIILMFTQLLYVLALHSGLFGNQFGNHAGAGGYGAEHGAYGAGDPHNKGMGTGGVARV

SEQ ID NO: 1265 - protein, 452 aa, Triticum aestivum
  unsure (1)..(452): unsure at all Xaa locations
MGEQKGNILMGKYEMGKMLGQGTFAKVYHARNIETSQSVAIKVTDKEKVLKGGLTDQIKREISVMKLVKHPNIVQMYEVMATKTKIYFVLEHVKGGELFNKVQRGRLKEDAARKYFQQLICAVDFCHSRGVYHRDLKPENLLLDENSNLKVSDFGLSTISECRRLDGLLHTSCGTPAYVAPEVINRKGYDGAKADIWSCGVILFVLLAGYLPFQDKNLMNMYKKIGKAEFKCPSWFSSDIRRLLLRILDPNPAXRISIERIMEHPWFRKGLDAKLLRYNLQAKDAVPAADMTATSDPLSCSNSATEGKEQEAKKLSNLNAFDIISLSTGLDLSGMFEDNDKKRESKFTSTNSASTIVSKIEDIAKCMRLKLVKKDGGMMRMESFKPGRKGVMSIDAEIFEVTPDFHLVELKKTNGDTIEYQKVLNQEMRPALKDIVWAWQGEQQPQPQQQPC

SEQ ID NO: 1266 - protein, 211 aa, Carica papaya
MSYDYLFKYIIIGDTGVGKSCLLLQFTDKRFQPVHDLTIGVEFGARMVAIDGRPIKLQIRDTAGQESFRSITRSYYRGAAGALLVYDITRRETFNHLASWLEDARQHANPNMSIMLIGNKSDLSHRRAVSKEEGEQFAKEHGLLFLEASARTAQNVEEAFIRTAAKILQNIQEGVIDVSNESSGIKFGYGRPQGTAGARDGAVAQRSGCCG

SEQ ID NO: 1267 - protein, 447 aa, Arabidopsis thaliana; identical to SEQ ID NO: 370

SEQ ID NO: 1268 - protein, 427 aa, Salmonella typhimurium LT2
MADTKAKITLTGDTTIELDVLKGTLGQDVIDIRSLGSKGVFTFDPGFTSTASCESKITFIDGDEGILLHRGFPIDQLATDSNYLEVCYILLYGEKPTQEEYDEFRTTVTRHTMIHEQITRLFHAFRRDSHPMAVMCGITGALAAFYHDSLDVNNPRHREIAAFRLLSKMPTMAAMCYKYSIGQPFVYPRNDLSYAGNFLNMMFSTPCETYEVNPVLERAMDRILILHADHEQNASTSTVRTAGSSGANPFACIAAGIASLWGPAHGGANEAALKMLEEISSVKHIPEFVRRAKDKNDSFRLMGFGHRVYKNYDPRATVMRETCHEVLKELGTKDDLLEVAMELEHIALNDPYFIEKKLYPNVDFYSGIILKAMGIPSSMFTVIFAMARTVGWIAHWNEMHTDGMKIARPRQLYTGYDKRDFKSALKR

SEQ ID NO: 1269 - protein, 123 aa, Saccharum hybrid cultivar SP-80-3280
MIQPQTLLNVADNSGARKLMCIRVIGAAGNQRYARIGDVIIAVIKDAVPQMPLERSEVIRAVIVRTRKEFKGDDGIIIRYDDNAAVIIDQKGNPKGTRVFGAVAEELRELNYTKIVSLAPEVL

SEQ ID NO: 1270 - protein, 185 aa, Zea mays
LARVFSPLLEHARARGCSRGGDERGNITNVAVLDNPTAFINPFQFEISYECLVPLDDDLEWKLIYVGSAEDENYDQQLESVLVGPVNVGTYRFVLQEFMRVGYYVNNDYGDEQLREEPPAKVLIDRVQRNILADKPRVTKFPINFHPEPSTGTGRQQQQQEPQTASPEKHAGSGEGNGSKPEADQ

SEQ ID NO: 1271 - protein, 197 aa, Brassica napus
MSASRFVKCVTVGDGAVGKTCLLISYTSNTFPTDYVPTVFDNFSANVVVNGATVNLGLWDTAGQEDYNRLRPLSYRGADVFILAFSLISKASYENVSKKWIPELKHYAPGVPIILVGSKLDLRDDKQFFVDHPGAVPITTAQGEELRKLIDAPTYIECSSKSQENVKAVFDAAIRVVLQPPKQKKKKSKAQKACSIQ

SEQ ID NO: 1272 - protein, 345 aa, Desulfitobacterium hafniense DCB-2
MTNTVRKIAVLTSGGDAPGMNAAIRAVVRKGIYHGLEVFGIRKGYEGLIHGEFITMHLGAVADIIHRGGTMLMTARSQEMLTPEGQKNAAAQLRYRGIDALIVIGGDGSFRGAQTLSAQGIAIVGIPGTIDNDITGTDLTIGFDTAVNNVVQAVSKIRDTATSHDRTFLVEVMGRDCGNIALQSGVACGAESILVPEIEPDLDDIVAKLERGHQRGKHHSIIMVAEGAMSAWNLGEELRQRTGFETRVTILGHIQRGGNPSALDVVLASQMGGKAVEILCAGETDRMTACVNQEIQSCLWRWLMVSANPSTKFSMIWPINWLSEQKKSAVYRGNQEAQVEFLPLR

SEQ ID NO: 1273 - protein, 358 aa, Streptomyces coelicolor A3(2)
MSAGERVPEEFVPGCVIHGAGDLRVTDVPVRPPGPGEALVAVRYGGVCGSDLHYWRHGGVGDFHLREPMLLGHEVVGTVVAYGSPDTPGPAAGTSVAVHPATPCGVCPECVDRRRNVCRDTRYLGSAARFPHVQGGFAARIVVPAGQLRPLPAGLDPRRAALAEPLSVALHAVRRAGDPAGRHVLVTGAGPIGCLVVAAAKAAGAAHVTVTDLLPAALEYARAAGADTLVRADDPDDAGWPVEVDTAVEASGVAAGLDTCLRLVRRGGVVVQLGMLPPGQSPFAGNLLVSREIELRGAFRFDGEFDDALRLLAAEPAFDALVSAVVPVRDAASAFELAADRSRSCKVLLDFGAAPAAV

SEQ ID NO: 1274 - protein, 219 aa, Oryza sativa (indica cultivar-group)
MPDSDNDSGGPSNYAGGELSSPREQDRFLPIANVSRIMKKALPANAKISKDAKETVQECVSEFISFITGEASDKCQREKRKTINGDDLLWAMTTLGFEDYVDPLKHYLHKFREIEGERAAASTTGAGTSAASTTPPQQQHTANAAGGYAGYAAPGAGPGGMMMMMGQPMYGSPPPPPQQQQQQHHHMAMGGRGGFGHHPGGGGGGSSSSSGHGRQDRGA

SEQ ID NO: 1275 - protein, 450 aa, Pyrococcus horikoshii OT3
MARGDEGGENMIKIYTLGGYEEVGKNMTAVEYEGEVVIIDMGIRLDRVLIHEDVEFQKMSSKDLRKLGAIPDDRPIRDKKVVAIALSHGHLDHIGAVGKLAPHYPDVPIYGTPYTIRLAKSEIKGEEYFEVTNPLYETNYGEIVQVSENLAIEFVQVTHSIPHSSIVVIHTPEGAVVYACDYKFDNNHPYGEKPDYKRLKELGKEGVKVLIAESTRVAEETKTPSEAVAKMLLEDFFLYEGMEADGLIATTFASHIARLQELIEIANKMGRQAIFIGRSLAKYTGIAKQLGLIKMKGSRVLRSPNAVSKVLKEVSQARENYLLIVTGHQGEPGAILTRMANGELYDIGPRDTVVFSAGVIPNPLNIAQRYALETKLKMRGVRMIKDLHVSGHASKEDHRYLIRMLNPEYIVPAHGEFRMLTHYAELAEEEGYRIGKDVFISRNGHIVEII

SEQ ID NO: 1276 - protein, 506 aa, Brassica juncea
MTSINVKLLYHYVITNLFNLCFFPLTAIVAGKAYRLTIDDLHHLYYSYLQHNLITIAPLFAFTVFGSVLYIATRPKPVYLVEYSCYLPPTHCRSSISKVMDIFYQVRKADPSRNGTCDDSSWLDFLRKIQERSGLGDETHGPEGLLQVPPRKTFAAAREETEQVIIGALENLFKNTNVNPKDIGILVVNSSMFNPTPSLSAMVVNTFKLRSNVRSFNLGGMGCSAGVIAIDLAKDLLHVHKNTYALVVSTENITYNIYAGDNRSMMVSNCLFRVGGAAILLSNKPGDRRRSKYELVHTVRTHTGADDKSFRCVQQGDDENGKTGVSLSKDITDVAGRTVKKNIATLGPLILPLSEKLLFFVTFMGKKLFKDKIKHYYVPDFKLAIDHFCIHAGGRAVIDVLEKNLALAPIDVEASRSTLHRFGNTSSSSIWYELAYIEAKGRMKKGNKVWQIALGSGFKCNSAVWVALNNVKASTNSPWEHCIDRYPVKIDSDSGKSETRVQNGRS

SEQ ID NO: 1277 - protein, 246 aa, Zea mays
MDMGRHQLQLQHAASSSSTSASSSSEQDKPLCCSGPKKRPAGRTKFRETRHPVFRGVRRRGAAGRWVCEVRVPGRRGARLWLGTYLGAEAAARAHDAAMLALGRGAACLNFPDSAWLLAVPPPPALSGGLDGARRAALEAVAEFQRRRFGAAAADEATSGTSPPSSSSSATKPAPAIERVPVEASETVALDGAVFEPDWFGDMDLDLYYASLAEGLLVEPPPPPPPAAWDHGDCCDSGADVALWSY

SEQ ID NO: 1278 - protein, 506 aa, Brassica juncea
MTSINVKLLYHYVITNFFNLCFFPLTAIVAGKASRLTIDDLHHLYYSYLQHNLITIAPLFAFTVFGSVLYIATRPKPVYLVEYSCYLPPTHCRSSISKVMDIFYQVRKADPSRNGTCDDSSWLDFLRKIQERSGLGDETYGPEGLLQVPPRKTFAAAREETEQVIIGALKNLFENTKVNPKDIGILVVNSSMFNPTPSLSAMVVNTFKLRSNVRSFNLGGMGCSAGVIAIDLAKDLLHVHKNTYALVVSTENITYNIYAGDNRSMMVSNCLFRVGGAAILLSNKPRDRRRSKYELVHTVRTHTGADDKSFRCVQQGDDENGKTGVSLSKDITDVAGRTVKKNIATLGPLILPLSEKLLFFVTFMAKKLFKDKVKHYYVPDFKLAVDHFCIHAGGRAVIDVLEKNLGLAPIDVEASRSTLHRFGNTSSSSIWYELAYIEAKGRMKKGNKVWQIALGSGFKCNSAVWVALSNVKASTNSPWEHCIDRYPVKIDSDSAKSEVRVQNGRS

SEQ ID NO: 1279 - protein, 364 aa, Thalictrum tuberosum
MGSTENNHNLTPAEEEEEEAYLHAMQLASASVLPMVLKAAIELDVLEIIAKAGKGAYVAPSEIASQLSTSNSQAPTVLDRMLRLLASYKVLTCNLRNLEDGGVERLYGLAPVCKFLVKNEDGVSMAPLVLMNQDKVLMESWYHLKDAVLDGGIPFNKAYGMTAFEYHGTDPRFNKVFNRGMADHSTITMKKLLELYKGFEGLKSVVDVGGGTGATVNMIVTKHPTIKGINFDLPHVIDDAPAYPGVEHIGGDMFVSVPKGDAIFMKWILHDWSDEHSVKFLKNCYESIPADGKVIIVESVLPVFPETNLAAHTCFQLDNIMLAHNPGGKERTEKDFKALSVKAGFTGFKVVCGAFGSWVMEFCK

SEQ ID NO: 1280 - protein, 211 aa, Neurospora crassa
MATNITWHPSLSRHERNQLRGQRGFTIWFTGLSASGKSTVATALEQHLLHIGLAAYRLDGDNVRFGLNKDLGFSEKDRNENIRRIAEVAKLFADSATIALTSFISPYRADRQIARDLHANATQAGDDVLPFIEVFVDVPLAEAEKRDPKGLYKKARAGEIKDFTGISAPYEAPESPEITIRTDLLSVEECVKKIVDYLAEAGLISGTKETR

SEQ ID NO: 1281 - protein, 375 aa, Corynebacterium diphtheriae NCTC 13129
MARDYYAILGVERDATDNEIKKAYRKLARKYHPDVNDTEEAAEKFSKISIAQEVLLDAEKRRIVDMGGDPMAQGGGDAGYGAGGGLGDIFEAFFGGGGGSRGPRSRVQPGSDALLRTTLTLEEAYLGTKKPITIDTAILCDRCEGTGSKSKSKPNVCSTCNGSGEIQQMQRSFLGNVMTSSPCPTCRGTGEVIPDPCDKCGGDGRVRTQRDLIVNVPAGIADGMRIRMAGQGEVGPGGGPAGDLYIEVMMQQHPVFQREGNDLHMSVHVPMVDAALGATTSVESLSGDAIDFEIPAGVQPAETIVIEGKGMPQLRGEGFGNMIAHVDVSIPTQLDEKSKELLNKLRDHRSDESSVRTADDSDDSLFGRLRNRFRR

SEQ ID NO: 1282 - protein, 364 aa, Escherichia coli CFT073
MMSKNYHIAVLPGDGIGPEVMTQALKVLDAVRNRFAMRITTSHYDVGGAAIDNHGQPLPPATVEGCEQADAVLFGSVGGPKWEHLPPDQQPERGALLPLRKHFKLFSNLRPAKLYQGLEAFCPLRADIAANGFDILCVRELTGGIYFGQPKGREGSGQYEKAFDTEVYHRFEIERIARIAFESARKRRHKVTSIDKANVLQSSILWREIVNEIATEYPDVELTHMYIDNATMQLIKDPSQFDVLLCSNLFGDILSDECAMITGSMGMLPSASLNEQGFGLYEPAGGSAPDIAGKNIANPIAQILSLALLLRYSLDADDAASAIERAINRALEEGIRTGDLARGAAAVSTDEMGDIIARYVAEGV

SEQ ID NO: 1283 - protein, 446 aa, Burkholderia cepacia R18194
MSYNEAKFWHPMVHPNEMKQRKPIRIVRGDGCYVFDEEGRKLVDGVAGLWNVNVGHNRQEVKDAIVRQLDELEYFQLFDGISHPRAEELSKKVIDMLEPEGMRRVLYSSGGSDSIETALKIARQYWKVRGQADRTKFISLKQGYHGTHFGGASVNGNTVFRRNYEPNLPGCFHVETPWLYRNPFTQDPEELGRICAEMLEREIQFQSPDTVAAFIAEPIQGAGGVIVPPANYWPLVREVCDRYGVLLIADEVVTGFGRSGSMFGSRGWGVRPDIMCLAKGISSGYVPLGATVVNARIEDAFAANADFGGAIMHGYTYAGHPVACAAAIASLDIVVKEDLPANAAKQGAYLLEALKPFAERFAAVGEVRGKGLMLALDLVANKDTREPIDPLSGYANAVAEVARENGVLVRPVGTKIILSPPLVIQREQLDRIVDALAAGFEAVPFA

SEQ ID NO: 1284 - protein, 485 aa, Mesorhizobium sp. BNC1
MLKKTSHFLREANFIAGEWVNADSGATIEVINPATRQTIGTVPKCGRAETRRAIEAAQEAFQSWKKTSANDRAKLLRKLHDAIMDNQDALAELLVMEQGKPLAEAKGEVGTSAAYILWFAEEGRRIYGDIVPAPWTDRRILVTKEPVGVIGAITPWNFPSSMLARKLGPALAAGCTTVAKPASQTPYSGLAWGVLAEEAGFPKGVVNIVTGSASEIGDELTENPLVRKITFTGSTEIGKLLMEKAAGTVKKVSMELGGNAPFLVFDDADLDRAVKGAMIAKYRNAGQTCVCTNRFFVQDGIYDRFLEKFVEASRKLKVGSGLDEGVEQGPLIDGGAVEKVEELIADAVSKGGKVVTGGKRHALGGSYFEPTVIAEATPQMRFMEEEIFGPVAPVFRFKDEADGIRMANDTSFGLACYFYTSDLGRAFRVMEGLKYGLVGVNEGLITTVEAPFGGLKESGLGKEGGRQGIEDYLDTKYVCIGGLGL

SEQ ID NO: 1285 - protein, 362 aa, Thalictrum tuberosum
MGSTQKNHNLTPEEEEEACLHAMQLASASVLPMVLKAAIELSVLEIIAKAGQGAYVAPTEIASQLSTSNSQAPIILDRILRLLASYKVLTCNLRTLEDGGVERLYGLAPVCKFLVKNEDGVSIAPLVLMNQDKVLMESWYHLKDAVLDGGIPFNKAYGMTAFEYHGTDPRFNKVFNRGMADHSTITMKKLLELYKGFEGLKSVVDVGGGTGATINMIVTKHPTIKGINFDLPHVIDDAPAYPGVEHIGGDMFVSVPKGDAIFMKWILHDWSDEHSVKFLKNCYESIPADGKVIIVESILPVYPETNLASNACFQLDNIMLAHNPGGKERTEKDFEALSAKAGFTGFKIVCGAFGSWVMEFCK

SEQ ID NO: 1286 - protein, 312 aa, Glycine max
  unsure (1)..(312): unsure at all Xaa locations
MTSPSGQGSRRGGSSRTRVGKYELGRTLGEGNFAKVKFARHVETRENVAIKILDKEKLLKHKMIAQIKREISTMKLIRHPNVIRMYEVMASKTKIYIVLEFVTGGELFDKIARSGRLKEDEARKYFQQLICAVDYCHSRGVFHRDLKPENLLLDANGVLKVSDFGLSALPQQVREDGLLHTTCGTPNYVAPEVINNKCYDGAKADLWSCGVILFVLMAGYLPCEETNLSALYEKMFNADFTCPPWFSSSAKKLCTEILDPNPATRITFAEVIENDWFKKGYKPXVFEQANVSLDDLDSIFSDSTDAQNLVER

SEQ ID NO: 1287 - protein, 500 aa, Burkholderia cepacia R18194
MSTTNFVAVSDTVRTFVARDFGLFIDGEMQPAHAAARLDVYDPATGERLATVADADERDVDRAVASAKHAFDTRVWSGLRPADRERILLKLADLIERDAETLAQLETLNQGKSIHVSRAIEVGASVEYVRYMAGWATKITGQTLDVSIPFPPGARYTAYTRKEPVGVVAAIVPWNFPLMIAVWKLIPALAAGCTIVLKPSPETPLTALRLAELALEAGVPPGVFNVVTGGRVCGAALASHPSIAKISFTGSTATGKLVGAAAVQNMTRFSLELGGKNPIVMLDDIDVAQALDGVAAGAFFNQGQVCAAASRIYVHRSKFAQLADGLAGVAQSMKLGAGLDTTAQINPLVSAHHRDKVVQHIEGARRAGLTFLAGGTPADDLPGYYVKPAVIADPHPDSAIVRDEVFGPVIVVVPFDDAADAVRLANASPYGLAASIWSNDLKRVMNLVPQIEAGTVWVNCHIPLDPSMPFGGYKQSGIGREFGQYAIEGFTETKSVCIAH

SEQ ID NO: 1288 - protein, 45 aa, Zea mays
SEKLAEGIAGFTKALEVLEHLLEERLKVLDGQEHIKHGAEEIFHA

SEQ ID NO: 1289 - protein, 506 aa, Rubrivivax gelatinosus PM1
MRYAPPGSSDSKVAFKAQYDNFIGGKFVAPVKGQYFDVITPITGKTYTRAARSGPEDIELALDAAHAAADKWGRTSAAERANVLLKIADRIDANVELLAYAESVDNGKPMRETLNADIPLSADHFRYFAGCVRAQEGGVSEIDETTVAYHFHEPLGVVGQIIPWNFPILMAAWKLAPALGAGNCVVLKPAESTPVSILVLAELIADLLPPGVLNIVNGLGREAGMPLATSKRIAKIAFTGSTSTGRVIAQAAANSLIPATLELGGKSPNVFFADVMDKDDAFLDKAIEGLVLFAFNQGEVCTCPSRALIHESIYDKFMERALKRVAAIKQGSPLDTDTMIGAQASKEQLTKILSYLDLGKQEGAQVLIGGQQAQMSGDLDGGYYVQPTIFKGHNKMRIFQEEIFGPVLAVTTFKDEAEALAIANDTLYGLGAGVWSRNGNVAYRMGRAIKAGRVWTNCYHAYPAHAAFGGYKESGIGRENHKVMLDHYQQTKNLLVSYSENKLGFF

SEQ ID NO: 1290 - protein, 455 aa, Bacillus megaterium
TIKEMPQPKTFGELKNLPLLNTDKPVQALMKIADELGEIFKFEAPGRVTRYLSSQRLIKEACDESRFDKNLSQALKFVRDFAGDGLFTSWTHEKNWKKAHNILLPSFSQQAMKGYHAMMVDIAVQLVQKWERLNADEHIEVPEDMTRLTLDTIGLCGFNYRFNSFYRDQPHPFITSMVRALDEAMNKLQRANPDDPAYDENKRQFQEDIKVMNDLVDKIIADRKASGEQSDDLLTHMLNGKDPETGEPLDDENIRYQIITFLIAGHETTSGLLSFALYFLVKNPHVLQKAAEEAARVLVDPVPSYKQVKQLKYVGMVLNEALRLWPTAPAFSLYAKEDTVLGGEYPLEKGDELMVLIPQLHRDKTIWGDDVEEFRPERFENPSAIPQHAFKPFGNGQRACIGQQFALHEATLVLGMMLKHFDFEDHTNYELDIKETLTLKPEGFVVKAKSKKIPL

SEQ ID NO: 1291 - protein, 362 aa, Thalictrum tuberosum
MGSTQKNHNLTPEEEEEACLHAMQLASASVLPMVLKAAIELDVLEIIAKAGQGAYVAPTEIASQLSTSNSQAPIILDRVLRLLASYKVLTCNLRTLEDGGVERLYGLAPVCKFLVKNEDGVSIAPLVLMNQDKVLMESWYHLKDAVLDGGIPFNKAYGMTAFEYHGTDPRFNKVFNRGMADHSTITMKKLLELYKGFEGLKSVVDVGGGTGATINMIVTKHPTIKGINFYLPHVIDDAPAYPGVEHIGGDMFVSVPKGDAIFMKWILHDWSDEHSVKFLKNCYESIPADGKVIIVECILPVYPETNLASNACFQLDNIMLAHNPGGKERTEKDFEALSAKAGFTGFKIICGAFGSWVMEFCK

SEQ ID NO: 1292 - protein, 500 aa, Pseudonocardia sp. K1
MTVIAKPDHLLRDDVQKFIDRPKKLFINGQWHDSIKGETLEVYDPAVGTKICTVAAGDAEDVDRAVAAARHAFDEGPWSKLNPSERGRLVWRLADLLEEHADEFAQIDALDNGKPVTDARAVDVAFSIELLRYMAGWSNKIYGETIPLTNPADFHAYTLREPVGVVGQIVPWNFPLMMAVWKVAPALAAGCTVILKPAEQTPLSALRLAELTEEAGFPPGVFNVITGFGETAGAAIAAHDNIDKVAFTGSTEVGRLIAQAASGNLKKVSLELGGKSPVIVFGDSDIEQAVAGASSAIFYNNGQTCTAGSRLYVHRKVYDKVVEGIASEASALPIGHGLDPATRIGPLISAEQRDRVTGYIAQGREAGAEVIVGGDTVGDGGYFIQPTILTKTDPSMSVVREEIFGPVLCAMAFDEDTIDSVVREANNSVYGLAASIYTRDISVAHRVAKRLKAGTIGINTHHVVDVALPFGGFKQSGYGRDMGRDAIDQYTEVKSIGIAL

SEQ ID NO: 1293 - protein, 364 aa, Thalictrum tuberosum
MGSTENNHNLTPAEEEEEEACLHAMQLASASVLPMVLKAAIELDVLEIIAKAGKGAYVAPSEIASQLSTSNSQAPTVLDRMLRLLASYKVLTCNLRNLEDGGVERLYGLAPVCKFLVKNEDGVSMAPLVLMNQDKVLMESWYHLKDAVLDGGIPFNKAYGMTAFEYHGTDPRFNKVFNRGMADHSTITMKKLLELYKGFEGLKSVVDVGGGTGATVNMIVTKHPTIKGINFDLPHVIDDAPAYPGVEHIGGDMFVSVPKGDAIFMKWILHDWSDEHSVKFLKNCYESIPADGKVIIVESVLPVFPETNLAAHTCFQLDNIMLAHNPGGKERTEKDFKALSVKAGFTGFKVVCGAFGSWVMEFCK

SEQ ID NO: 1294 - protein, 216 aa, Triticum aestivum
MAPTMAITTATLVLLVATLLAPSALGSRSGPSSHHGHGGHAKHSPPPSPPPAPAAPVAAALVRTTCNSTAYYDLCVAALAADPSSTTADVRGLSAIAVSAAASNASASAAALGANVTAQGGAAVDGTVQALLRTCSAKYGEARDALAAARGSIAQQDYDYAAVYVGAAAEYPQVCKALFRRQRPGAYPADLAAREEALKQLCSVSLDIISLLSATS

SEQ ID NO: 1295 - protein, 174 aa, Glycine max
MVCTANDLQEWKDFPKGLRVLLLEGDSSSAAEIREQLEAVDYNVSTFYDENEALSALSSSPEGFHVAIVEVSTSCSLGGFKFLENSKDLPTIMTSKDQCLNTMMKCIALGAVEFLSKPLSEDKLKNIWQHVVHKAFNAGANVLSESLKPVGESVESMLQLQTDIGPDKGGISMD

SEQ ID NO: 1296 - protein, 490 aa, Magnaporthe grisea 70-15
MKIEKIAATFFIGSGVLFGTITAWSLSDLQVPSALGGPLPNSTKVVGPNTSDFREATERWDTYLAPNIEMVVEPGHEDDIPKIVKYCNKHDIDFLAYSGGHGSTTTLGSFDGIQISMARLRNVTIDPKGKTAWVQGGSTGGSVINHLWDHGYVTPTGAAACVGYMGLALGGGHGRLEGLYGMVSDNILQFNLVTANGTAIRVNKTDHSDLYWAMKGAGHNFGIVTSAQVKIYPRGPDKWYHKAYTWRGDKLDAVFNALNQFHGNGTTPVGMGVNTGTFLMMPNITKEEPVIFWLFEYRGTAEQAKPLLAPFDSIEAVAVDARESTYPQLADTPWICTAAQRIITTAGLQTYNLTAEHQIWDGFKRRLSKNPKLTHKTIIIHEGYATEGVESIDRASSAYPFRGDRHLMQFQGTIEESNLEADMWEWANEVRNQWNAGQPQRTPSAYVNYANGRETKEDWYGHQPWRLAKLRDLKARYDPLNRFRFYNPIV

SEQ ID NO: 1297 - protein, 925 aa, Zea mays
MSYTISGGGTAPAAWAWLHGDLELTIHEARGLPNMDLLSTLLRRLCLCPPLAGITPARRRSLSDDDDDSAHAHAHTHPHHHHLRGRLHRRPRRRHEPQPHGHLLLPTSDPYAAVVVAGPHETTVARTYVFRNSEAPRWEASFLLPLAHAATGLEFHVKDADPFGSDLIGVAWLPAAAVLASAAAPIESQWLDLARPDARGPPAPGGGSAIRVSAAFVPAAASRGRSGVGVPAYFPLRRGCDVRLYQDAHVAAGELEGVGVVPGFLPGRCWEDLCMAVLGAQRLVYVAGWSVHTTVRLTREAMSPEMAAKVAELEELGGEPVEHMSLGELLKYKSQEGVRVLLLVWDDRTSHNNFFVKMKGVMQTRDEETKKFFKHSSVICVLSPRYPSSKLGLVKQKASEIVVGTLYTHHQKCVLVDTPASESTRRITAFLGGLDLCAGRYDTPSHRLFRDLQTVFHGDVYNPTFGGDVNGPRQPWHDLHCRLDGPAAYDILKNFEQRWRKATKLREMFGGKAAHRKDDALLKLERIPWILSPTKPKQQPPSAAADTGAADHDDDERDQPALHVLPDGDPERWHAQVFRSVDAGSVKRFPRPWERAEMARRHLVGDKNLAVERSIHAAYVAAIRSAERFVYVENQYFIGGSYAWPSYRNGGACNLVPMEIALKVASKVRAGEPFAAYVVLPMWPEGNPGSGPAQEILFWQNQTMEMMYSVVAAALEGKGGHPQEHLNFYCLGNREPAEDAGDGNKWAPADPLDDATTSSAAAHARRHRRFMVYVHSKGMIVDDEYVIIGSANINQRSLAGSRDTEIAVGAYQPDHTGACPRGKVHGYRMSLWEEHLGKEAVRRPEVLRPESPRCVKLVNRIARDNWRRYAADDDKLGPLQGHLLRYPVHVRADGRVEPLPGNELFPDVGGRVVGAPNNLPDYLTM

SEQ ID NO: 1298 - protein, 446 aa, Ralstonia metallidurans CH34
MLVIGGALVTPNGVERADVACAAGRIVALGDLQCSWTADATLDAKGLHVLPGVIDSQVHFREPGLTHKETLEAGTRGAALGGVTAVFEMPNTQPLTLRAEDLRAKLDAAQGRAWCDHAFYIGGSSVNAEHLEYLESLPGCAGVKIFMGSSFGDLLADDDEVLCRILAHGRRRMAVHAEDEARLRERRIIAESSGDVRQHPVWRDARSALLATQRIVKLAGDTGRRLHILHVSTAEEIAFLADRKDRVTVEVTPHHLTLEAPECYERLGTLAQMNPPVRERCHRNALWQAIREGVGDVIGSDHAPHTPKEKSRPYPASPSGMTGVQTLVPVMLDHVHRGQLSLQRFVDLTSAGPARIFGVEGKGRIALGYDADLTLVDLAARRTIRNDWIASVSGWTPYDGIGVTGWPIHTVVRGHIVVRDEALVGTTPLGRPLRFLEAPPRVPAGV

SEQ ID NO: 1299 - protein, 358 aa, Zea mays
MVGGGGGGPLRRVGKYEVGRTIVEGTFAKVKFAQNTETGESVAMKVLDRSSILKNKMAEQIKREISIMKLVRHPNVVRLHEVLASRKKIFIILEFITGGELFDKIIRHGRLSEADARRYFQQLIDGVDFCHKKGVYHRDLKPENLLLDSQGNLKISDFGLSAWPAQGSFLLRTTCGTPNYVAPEVLSHKGYNGALADTWSCGVILYVLLAGYLPFDEVDLTTLYGKDDNEDAFEDETGPLTLNAFDLIILSQGLNLAALFDRRQDCDKLQNRFLSRNPAKVILSSMEVVAQSMGFKTHIRNYKMRVEGLNADKTSHLSVMVEVFEVAPSIFMVELQRAAGDTSEYNTIHPKGQIYIGQ

SEQ ID NO: 1300 - protein, 141 aa, Triticum aestivum
  unsure (1)..(141): unsure at all Xaa locations
MAPTVMASSATSVAPFQGLKSTAGLPVSRRSNGASLGSVSNGGRIRCMQVWPIEGIKXFETLSYLPPLSTEALLKQVDYLIRSKWVPCLEFNKVGFIFXVEHNASPGVLTMAGTGQXGTAMFRMHRRHQVXNEVEEVKKDT

SEQ ID NO: 1301 - protein, 175 aa, Glycine max
  unsure (1)..(175): unsure at all Xaa locations
ASSMISSPAVTTVNRAGARMVAPFSALKNMDGFPTTNTNNDITSIGINGGTPQCMQEWPTLGYKKYDTLSYLPDLDDALLTKEXKYLLKNGWIPCLEFQLEHGFAYRDHDRSPRYYDGRYWTMRNLPMFGCTDAYHVIKDLQEVNTVYPNGFIRIIEFNNFLQEQRISFIAYKTP

SEQ ID NO: 1302 - protein, 222 aa, Triticum aestivum
  unsure (1)..(222): unsure at all Xaa locations
MKTFLIFVLLAMAMNIATAARQLNPSNKELQSPQQSFSHQQQPFPQQPYPQQPYPSQQPYPSQQPFPTPQPQFPQQSQQPFPQPQQPIPLQPQQPFPQQPQQPQQPFPQPQQPFPWQPQQPFPQTQQSFPLQPQQPFPQQPQQPFSQPQLQFXQQPFXQXQQLIPMQPQQPFPXXXQQSQQPFAGPQQLFXELQXPIPQQPQQPFPLQPXQPFPQAXQQPFP

SEQ ID NO: 1303 - protein, 481 aa, Rubrobacter xylanophilus DSM 9941
MEAIPSASYSMTLRVEFPHRAGALGRILTTIGDAGGMVGAIDIVRMGQERSIRDITVNARDSEHGQRIVRAVGALPEVRVVNVSDRTFLLHLGGKIEVHSKIPVRTRDDLSMAYTPGVARVCRAIAQEPERAFNLTIKRNSVAVVTDGTAVLGLGDIGPYAAMPVMEGKAMLFKEFAGVDAFPVCLDTKDPEEIVRTVKYVAPAFGGINLEDISAPRCFEIEERLKQELDIPVFHDDQHGTAVVVLAALINALRIVGKRMEELKVVVCGVGAAGVACAKILLAAGVKNIVGCDRYGVVYRGRGDADTSRGWFAENTNPENIRGTLADAIRGADVFIGVSAPDVLTVEHIESMADEPIVFAMANPDPEIRPEIAYGHARIIATGRSDYPNQINNVLCFPGVFRGALDIRAREINEEMKLAAARAIAGVIPEESLSEDYIIPSVFDERVVPAVAGAVAEAGVESGVARRVRERSETDFSAASF

SEQ ID NO: 1304 - protein, 290 aa, Oryza sativa (indica cultivar-group)
MKSRKSYGLLLSPVGSPPSDNESGAAAAAAAAGGGGCGSSAGYVVYGGGGGGDSPAKEQDRFLPIANVSRIMKRSLPANAKISKEAKETVQECVSEFISFVTGEASDKCQREKRKTINGDDLLWAMTTLGFEAYVGPLKSYLNRYREAEGEKAAVLGGAGGAAAARHGEGGCCGGGGGADGVVIDGHSPLAGGLSHSHHGHQQQDGGGDVGLMMGGGAAGVGYNAGAGSTTTAFYAPAATAASGNKAYCGGDGSRVMEFEGIGGEEESGGGGGGGGGERGFAGHLHGVQW

SEQ ID NO: 1305 - protein, 181 aa, Chromobacterium violaceum ATCC 12472
MRTTLLIASLLALPLAAHADAFRLSSDSMADGKPLSLKQVYRGFGCEGGNVSPQLSWSGAPLGTKSFAITAYDPDAPTGSGWWHWTVANLPASVHSLPEGAGSQGGSLPPGAVQGRTDYGESRFGGACPPAGDKPHRYQFTVWALKIDKLPIDANASGALVGFMLNANALGKAQLTATYGR

SEQ ID NO: 1306 - protein, 405 aa, Shewanella oneidensis MR-1
MEMAIGIGMFTLVVCLLVIVILIAKKKLVTTGEITIGINDDAEKSIKVAAGDKLLGALASKNIFIPSACGGGGTCGQCRVKVKSGGGDILPTELGHITKKEAKEGCRLACQVAVKTDMELELEEEIFGVKKWQCEVISNDNKATFIKELLLKLPEGEDVHFKAGGYIQIEAPAHVVKYADFDIPAKYRDDWEKYGLFDLVSTVNEDVLRAYSMANYPDEKGRIMLNVRIATPPSANVPPGKMSSYIFNLKAGDKVTISGPFGEFFVKDTDAEMVFIGGGAGMAPMRSHIFDQLKSKKTKRKMSFWYGARSTREVFYQQDFDTLAAENDNFVWHVALSEPLPEDNWTGYTGFIHNVLYENYLKNHKAPEDCEFYMCGPPIMNSSVIKMLESLGVEPENILLDDFGD

SEQ ID NO: 1307 - protein, 363 aa, Catharanthus roseus
MGSANPDNKNSMTKEEEEACLSAMRLASASVLPMVLKSAIELDLLELIKKSGPGAYVSPSELAAQLPTQNPDAPVMLDRILRLLASYSVLNCTLKDLPDGGIERLYSLAPVCKFLTKNEDGVSMAALLLMNQDKVLMESWYHLKDAVLEGGIPFNKAYGMTAFEYHGKDPRFNKVFNQGMSNHSTIIMKKILEIYQGFQGLKTVVDVGGGTGATLNMIVSKYPSIKGINFDLPHVIEDAPSYPGVDHVGGDMFVSVPKGDAIFMKWICHDWSDAHCLKFLKNCHEALPENGKVILAECLLPEAPDSTLSTQNTVHVDVIMLAHNPGGKERTEKEFEALAKGAGFRGFIKVCCAYNSWIMELLK

SEQ ID NO: 1308 - protein, 1303 aa, Oryza sativa (japonica cultivar-group)
MAAAAWGGTTQKCDSCGRTVYPVEELAADGRVYHRPCFRCTHCKATLQFSNYSSVEGVLYCKPHYDQILKSTGSLEKSFEGTSKSAKAEKSNGNKGQPNRFSSMFVGTQDKCVVCNKTVYPLEKVNLNGSSYHKSCFRCTHGGCTLSPSNNVTHEGKLYCKTHHSQLFMVKGNFSNFEDSTPNAKVDIEKQPEHEDATKNPGGPGQGDGLTEKPLESELTPEKPSQDDIVAEKQSQSSVDVPKQSESSTTVQRSEEGERVTKGESNSHVVSKKPLESSVEKPFQSSAVNLQPSGSSAAVRKPWQRNLPTDKPLLSNTTTEKSTPSSAAIEESLPSNGVDAKQPESSTASTVVKRPWQRRVATENLPQSISPSDKPSSTSADDVKPSENSKLIRKPWQRAVAAEAQIQNSGPTEKSSLTNDTKPSESTTSIKRPWEHKVVNEKPLQNNIDTEKPLQNNTDTEKSSSSAIDVKLAETSTTPTVPQEHSGITEKPSQTSADDVKPSESTAAVVKKQWQRNIGFQKQPQSSVTDAKTPESRGMGKRLWQRNVPTEKQSQSGASVVTPSQVSVASTNPLQSSVVVKKPWQRSVSREKEPEKDISSNKPLQNRVLAEEAEKTNVTADNKSQIIQDKKNNGATTENSSQISESAKKLPLTANKSQADTSTEKLSESDILAVASSQITEPSKKPSENTAENEKPSQTDIATDELPLTQSVEAMSEPSPSDAAHQEISEREILTDKLPESTMAVEKLSQTATLTEKPSKEDAAEKLPQTNEPSEQPHESEETAEKPLQNEANAESTTKQSDLSLEKPPQVDANVGNPTEPESDATSGVNSSDAQIRPTAEQLVGPQGIVSAEKTSDQILEANTDPAADQSSESQDVAPAKVATEQPLENQKAAASEQPLEPQHEAYEENPQEHNSDATAKESSEPERDTASDQLAEQPSESRTAGEKATLRESDVVTEDPAEPQIDAAAERSAEVLSESQTGVETPVLHQSDRTNEVPSEPQTDEASDKSTEQPLEPENDASVEDEKPPEIESDDVHDKPSESTPDTETLPHNTPKSSISISEAADGNVSEEAPPQSSASIETPSESAIAVEEPKHDDEASIKPSEDSSALEEPPQDDSASVEPSENTITLEKASEEDEGSVKPSEGNDALEKTLEEDEASAKLPEDSTTFEKPSEKDDAGTKQTEDPVTLEKEPEEDKGSVEPTQDNAGLEKPLEEDEASAKPSEDSVVLDKPSVEDDDSAKPSEDSMDLEKPEAHKPSEEEDGATKSSPEDAAVEEAPLQGDTETATDKPSLEADTTETA

SEQ ID NO: 1309 - protein, 440 aa, Mesorhizobium sp. BNC1
MTYILHRQIHGQLPVAAGGRGVKLFDSAGKEYIDASGGAAVSCLGHNHPDVVAALKRQAEKLAYAHTSFFTNEPAEALAERLVKAAPEGISHAYLVSGGSEANEAALKMARQFFVEKGEAQRRHIIARRQSYHGNTLGALAAGGNEWRRAQFRPLLIETHHIDPCYAYRYRQQGESDEEYGLRAAQQLEDKILELGPDTVMAFIAEPVVGATAGAVPAVSGYFKRIRDICDRYGVLLILDEVMCGMGRTGTLFACEEDGVSPDLVSIAKGLGGGYQPVGAVLLSRQIFDAFAQGSGLFQHGHTYICHPMACAAALAVQEVIERDNLLANVREMGSYLRARLEARFGNHAHVGDIRGRGLFLGLELVADRATKEPFDPARKIHAGVKKEAMARGLMVYPAGGTIDGARGDHVLLAPPFILDKETADTIVDRLGEAIDAALG

SEQ ID NO: 1310 - protein, 431 aa, Mycobacterium bovis AF2122/97
MADTDDTATLRYPGGEIDLQIVHATEGADGIALGPLLAKTGHTTFDVGFANTAAAKSSITYIDGDAGILRYRGYPIDQLAEKSTFIEVCYLLIYGELPDTDQLAQFTGRIQRHTMLHEDLKRFFDGFPRNAHPMPVLSSVVNALSAYYQDALDPMDNGQVELSTIRLLAKLPTIAAYAYKKSVGQPFLYPDNSLTLVENFLRLTFGFPAEPYQADPEVVRALDMLFILHADHEQNCSTSTVRLVGSSRANLFTSISGGINALWGPLHGGANQAVLEMLEGIRDSGDDVSEFVRKVKNREAGVKLMGFGHRVYKNYDPRARIVKEQADKILAKLGGDDSLLGIAKELEEAALTDDYFIERKLYPNVDFYTGLIYRALGFPTRMFTVLFALGRLPGWIAHWREMHDEGDSKIGRPRQIYTGYAERDYVTIDAR

SEQ ID NO: 1311 - protein, 101 aa, Nicotiana tabacum
MASSVLSSAAVATRSNVAQANMVAPFTGLKSAASFPVSRKQNLDITSIASNGGRVQCMQVWPPINKKKYETLSYLPDLSQEQLLSEVEYLLKNGWVPCLEF

SEQ ID NO: 1312 - protein, 362 aa, Thalictrum tuberosum
MGSTQNNHNLTPEEEEEACLHAMQLASASVLPMVLKAAIELDVLEIIAKAGQGAYVAPSEIASQLSTSNSQAPIILDRILRLLASYKVLTCNLRTLEDGGVERLYGLAPVCKFLVKNEDGVSMAPLVLMNQDKVLMESWYHLKDAVLDGGIPFNKAYGMTAFEYHGTDPRFNKVFNRGMSDHSTITMKKLLELYKGFEGLKSVVDVGGGTGATVNMIVTKHPTIKGINFDLPHVIEDAPAYPGVEHIGGDMFVCVPKGDAIFMKWILHDWSDEHSVKFLKNCYESIPADGKVIDVESILPVCPETNLAANACFQLDNIMLAHNPGGKERTEKDFEALSVKAGFTGFKVVCGAFGSWVMEFCK

SEQ ID NO: 1313 - protein, 479 aa, Streptomyces coelicolor A3(2)
MTDTPTQLFLGGAWADAADGAVMPVDDPATGEILAHVADAGPKDARLAEEAAVQAQEEWARAAPRARSEILRRAYEIVLERTDALARLMTSEMGKPLAEARGEVAYAAEFFRWFSEEAVRIDGGHGVLPDGRNRMLLSRRPVGPCLLITPWNFPLAMGTRKIGPAVAAGCTMVLKPAPQTPLSSLALAAILKEAGLPDGVLNVVTTSRAGEVCEPLLRGGRIRKLSFTGSTAVGRLLLAQCADTVVRTSMELGGNAPFVVFDDADLDAAVDGAMVAKMRNMGEACTAANRFFVHRSVAGEFADRLARRMGALVVGPGTGDGVDVGPLIDAAGRAKVEELVADAVERGARVLVGGTTPEGPGCFYPPTVLTDVAPESRLMATEIFGPVAAILTFDDEDEVVRRANDTPWGLVGYVFTEGLDRALRVSERLDVGMVGLNTGLVSNPAAPFGGVKQSGLGREGGRVGIEEFLEYQYVALPTG

SEQ ID NO: 1314 - protein, 450 aa, Bacillus sp. KSM-K16
MNTGMEPTLAKKDGQYVWHAMQRPGAAPLIADSGEGSWFTDTNGNRYMDGVSGLWCLNLGHGQTEIIEAATEQMNKLAYFPLSLGHQPAIALAEKLAALLGGGFRTFFANGGSDANETAFKIARQYHKQTGSPEKQKIISRYRGYHGNSLGALAATAQANRKIKYDAALPGFLHIPPPYAYRSSFGSAAEDDQQAADFLEQTILWEGPETIAAFIMEPIISGGGVIYPQSNDYYKRVRDICDRYQVLLILDEVVSGFGRTGKLFGFMHGDDDFKPDIITLAKGLTSGYLPLGATCVAENVYQAFDGKGETSHFRHISTYGGHPASCAVALKAIDIIEREQIVNRVETLGHTVLGKLKQLEQLSIVGEVRGIGFLYGIELVQDKQTKEPADDDTMKAVVTACQKQGLIIGKNSDTIPGGGNVLIIAPPLTSSEEDLAFLVDTVSSVLRTFA

SEQ ID NO: 1315 - protein, 294 aa, Saccharomyces cerevisiae
MKTLVHVASVEKGRSYEDFQKVYNAIALKLREDDEYENYIGYGDDLVRLAWHISGTWDKHDNTGGSYGGTYRFKKEFNDPSNAGLQNGFKFLEPIHKEFPWISSGDLFSLGGVTAVQEMQGPKIPWRCGRVDTPEDTTPDNGRLPDADKDAGYVRTFFQRLNMNDREVVALMGAHALGKTHLKNSGYEGPWGAANNVFTNEFYLNLLNEDWKLEKNDANNEQWDSKSGYMMLPTDYSLIQDPKYLSIVKEYANDQDKFFKDFSKAFEKLLENGITFPKDAPSPFIFKTLEEQGL

SEQ ID NO: 1316 - protein, 488 aa, Streptomyces coelicolor A3(2)
MSRAARCSLGDMNESPRTPFPTPSHWIDGRAVTGSGPLIDVVNPADESVIAHLHEATADDVDMAVDAAVAAIPGWAATPPRHRADVMRRLAEGLQKRSEELAATITLEMGAPIAFSRQAQVGFPVASTLAAIAAAERFEWSERIENSLVVREPVGVVGAITPWNFPLQQLVTKVVPAMLAGNTVVLKPSELSPLSARMFAEIATEAGLPNGVFNVVQGTGPVVGEALSRHPKIDMISFTGSTRAGKSVSSAASVTVKRVALELGGKAAHIVLPEADLDSAVARGLAFAWANAGQACGAYVRMLVPEDLQTAVVDRLRTAAQEYVVGDPADEATRIGPLASETQRRRVDDYIRRGIADGATLVTGGPGRPEGFETGAYVRPTIFSDVAPESVIAQEEIFGPVLVVIPYTDDEHAVEIANGTVYGLNAAVTGDEDHAMAIAVRLRVGQVDVNGGRHNFQAPFGGYKQSGNGREMGRAGLEEFLETKAITS

SEQ ID NO: 1317 - protein, 448 aa, Oryza sativa (japonica cultivar-group)
MTTPLPYAAAATAATGEDPDQIGRLPDCLLTTILSLLPLDAAARTTALSRRWRSLWPSAPLRLHDSDLPSRSQYLSAAISGILASHRGDAVSFRLSSGRPSSADLDTWLRILAGKRLQELLLQPPSEPLPLPPSLLGCHSLRSADLTNCRLPAAAAATASFPHLHELTLRYCFASSRALHGLLAGCPALAALSLDRVFGCRSLRVRSRTLRSLTVSVSLRRRDEVGDELQDLAVEDGPLLERLLGHDVNWGPSIHVLHAPRLEMLGYLGVGIPSLQIGAALFHSMRAVRLAAEFRCLKTLALEMVDPQVKPVVDFLRCFPCLEALYITSHMFEPRSMETLKCDNMDYPIECLNRHLKKVVLAGYEGRRRELQLARFLVSNARVLQVMKFLCANDCKPTWLASQKRQLCWESRLSLGPQVIFEVYRKSHTRFRKHASNITLVDPFDVKT

SEQ ID NO: 1318 - protein, 212 aa, Bacillus halodurans C-125
MKFFIDTANINEIREANDLGILAGVTTNPSLVAKEGVDFHERLREITSLVKGSVSAEVVALDAEGMIKEGKELAAIAPNITVKVPMTTEGLKAVHAFHQEGITTNVTLVFSAVQALLAARAGATYVSPFLGRLDDIGHDGLDLISQIAEIFHVHDLDIQIIAASIRHPQHVTEAALRGAHIATIPFKVISQLSKHPLTDKGIEQFLKDWNNR

SEQ ID NO: 1319 - protein, 1123 aa, Bordetella bronchiseptica RB50
MEQVTGYCTLCRSRCGSVNHVENGRLVAVTPLAGHPTGGALCAKGRAAPEMMAESHRLLRPLRRTNPRGAADPGWREIEWSEALDEVAARLAVARRRDGAESVAFAVTTPSGTPMVDSFEWVERFVRVFGSPNLIYAVEVCGWHKDYAHALTFGRGIGVPDLEHTDTMLLWGHNPARTWLAQAARIAAARQRGARVVVVDPNREGSSQQADLWLRVRPGADGALALGAIRHLLHTGRFDHGFVARWSNGPYLVDGASGALLRAADLWPDADPAARVVMLDGRPAASGRGADTARAELFGSWTLRLHDGRACEAVTVMHALRVAVERYTPDEVARLAWLDEAELAQFNAIFENAPRLSYHSWTGVGQHTNATQTDRAIATLYALTGACDRKGGNLWTVAPPYRAVNGYRELLSPVQRAKALGLDELPLGPPSLGWITARDFCRAVLQQDPYPVRTLVSFGTNLLVSQAETARNLEALQALDFHVHVDMSMNPTAMNADIVLPANMPWEREALKLGFEITQAAVEHVQLRPRMVEPAGESRADYEIVLELARRLGLRDAFFGADMDACWNHQLAPLGIDVQALRRQPEGIRFPQPFAHEKYKTLRDGQPVGFPTHDGRVQIHCAALHDIGQPALPSHVEPADTPARHAGAYPLVLSTAKSGWFVHSSHRYVASLRRKSPDPQVYLSTEAARDRGIASGDWVRVRTPYGEVALRAKINADLHANVAIAEFGWWQGCEGLGRADGAIVGPASSNINAIMTDRHRDPVSGSVPLRATVCDIVRDDARNRGSWSGAREFVLARKRGIAHDVAEFRLLACDAQALPDFLPGQHVIVSMPGGAVRRAYSLTGPNRAPAHLSIAVRRVRDGDGPAGLMSNALHALDEGARVLLSAPAGVFTPPLRTARPVILMASGIGITPFHGYLEALAQDAGPAPSVLLVHACRDGSSHPYGAELKRLAQRIGSVRTLTVYAEPASHDVPGRDYQQRGRLDFAWLSPETVAARPLVYLCGSPGFLALCTDALAARGIPRFDIFSETFTSEKRVPDTLAPQPIEIEAEQGGFTWDPAAGTLLDAAERAGLSLPSGCRVGQCESCAMHIVSGQVAHLIDFDGSADTCLTCQAVPITPLTLRR

SEQ ID NO: 1320 - protein, 458 aa, Bacillus megaterium
TIKEMPQPKTFGELKNLPLLNTDKPVQALMKIADELGEIFKFEAPGRVTRYLSSQRLIKEACDESRFDKNLSQALKFVRDFAGDGLFTSWTHEKNWKKAHNILLPSFSQQAMKGYHAMMVDIAVQLVQKWERLNADEHIEVPEDMTRLTLDTIGLCGFNYRFNSFYRDQPHPFITSMVRALDEAMNKLQRANPDDPAYDENKRQFQEDIKVMNDLVDKIIADRKASGEQSDDLLTHMLNGKDPETGEPLDDENIRYQIITFLIAGHETTSGLLSFALYFLVKNPHVLQKAAEEAARVLVDPVPSYKQVKQLKYVGMVLNEALRLWPTAPAFSLYAKEDTVLGGEYPLEKGDELMVLIPQLHRDKTIWGDDVEEFRPERFENPSAIPQHAFKPFGNGQRACIGQQFALHEATLVLGMMLKHFDFEDHTNYELDIKETLTLKPEGFVVKAKSKKIPLGGI

SEQ ID NO: 1321 - protein, 487 aa, Deinococcus radiodurans R1
MTTTDLRTTYSSVTRSQAYFDGEWRNAPRNFEVRHPGNGEVIGEVADCTPTDARQAIDAAEVALREWRQVNPYERGKILRRWHDLMFEHKEELAQLMTLEMGKPISETRGEVHYAASFIEWCAEEAGRIAGERINLRFPHKRGLTISEPVGIVYAVTPWNFPAGMITRKAAPALAAGCVMILKPAELSPMTALYLTELWLKAGGPANTFQVLPTNDASALTQPFMNDSRVRKLTFTGSTEVGRLLYQQAAGTIKRVSLELGGHAPFLVFDDADLERAASEVVASKFRNSGQTCVCTNRVYVQRGVAEEFIRLLTEKTAALQLGDPFDEATQVGPVVEQAGLDKVQRQVQDALTKGAQATTGGQVSSGLFFQPTVLVDVAPDSLILREETFGPVAPVTIFDTEEEGLRLANDSEYGLAAYAYTRDLGRAFRIAEGLEYGIVGINDGLPSSAAPHVPFGGMKNSGVGREGGHWGLEEYLETKFVSLGLS

SEQ ID NO: 1322 - protein, 181 aa, Paenibacillus polymyxa
MSIYDYSAIAMNGKEIVLSDYKDKVVLIVNTASQCGFTFQYQDLQRLYDQFKDRGLVILGFPCNQFADQEPDSNESVQTFCTLNYGVAFPMFQKVNVRDEQAHPLFTYLASSLPFEGFDETHSVAKILIPLIHERHPEYLPGDSIKWNFTKFLIDRNGKVIKRFEATTDPLDMEEYIEALL

SEQ ID NO: 1323 - protein, 109 aa, Triticum aestivum
  unsure (1)..(109): unsure at all Xaa locations
VTCSLEVERAPTPADMYVLGWWSIQFFKGSXLKWPVGVIRYEYDQLQAPVGGRVYFTGQYTSEHYNGYVLGAYLSGMNSADIIMIKVLINVEFKVPFQVQRVAHTCRIN

SEQ ID NO: 1324 - protein, 487 aa, Neurospora crassa
MARLTSLLTAVAAGVGTARAILPTDWTPICKQIESKISSTSDVIYPLQAVSFTSATAHWFWSSDEQPSCVFEPGSAEDVSVALRIIGATKTPFAVQSGGHTSNPGFSSTKGVHISLKRLNQVKLSADKSVAEIGFGNIWTDVYKALDGTGRNVVGGRVPGPGVGGLTLGGGYSWKTNQYGMTCDTVKSYELVLPNGTITRVSKTENPDLYFALKGGLNRFGIVTSAEFYTHEQPGKVYGGLGIYPTTAVDQILNATSQFSYLNKDPRTQIITTLDGGPLGTTAEVLFFHDGPDKPASFELFDNIAPLVKTVSSQSFVDFVQSIPAQVPELTNIRGAFITFATSELSQTFLEAVRQETDDIGKIMSLHGGITVSYDLEPFTKYGEHATESAFPHTESPLPLFIYFAWFLPENDEFWYARMKQTVEALKKVAMDDGIYNSDAFTYYPNYSLFDATPEQLYGKENAARLARIRDQVDPDRIMELAGGFKI

SEQ ID NO: 1325 - protein, 196 aa, Triticum aestivum
MAQEGLRLVCPPVSAHEGRLPRQYTLEGQGAKKDISPPLEWYGVPDGTRSLAVVVQDIDADERVPWTHWVVANISPEEKGLPEGFSGAGGNANAGGGAGGVQEGVNDWKQPGWRGPVPDSHGHRIQFRLYALDDLLSLGNKVTVDKVMEAIEGHVLRGGRRSRPSSKELLWILALGSVCLWTFLLLLLGNRVWSVL

SEQ ID NO: 1326 - protein, 254 aa, Oryza sativa (indica cultivar-group)
MEAATRARRRNGAAADGNGGAQQAAAAPAIREQDRLMPIANVIRIMRRVLPAHAKISDDAKETIQECVSEYISFITGEANERCQREQRKTITAEDVLWAMSRLGFDDYVEPLGVYLHRYREFEGESRGVGVGVGAARGDHHHGHVGGMLKSRAQGSMVTHHDMQMHAAMYGGGAVPPPPHPPPHHHAFHQLMPPHHGQYAPPYDMYGGEHGMAAYYGGMYAPGSGGDGSGSSGSGGAGTPQTVNFEHQHPFGYK

SEQ ID NO: 1327 - protein, 420 aa, Psychrobacter sp. 273-4
MQNQIFELQYALDTFYLLMCGALVMWMTAGFTMLEAGLVRSKNTVEILTKNIALFATACTMYMICGYAIMYDGNLFLSGIAGTESLVADALATSAENGFDGDAVYSSASDFFFQVVFVATCMSIVSGAVAERMKLWSFLLFAVVMTGVIYPLEGSWTWGGKAVFGLYSLGDLGFSDFAGSGIVHMAGAAAALAGVLLLGARLGKYGSKGEIRAIPGANLPLAALGTLILWMGWFGFNGGSVLKLGDIASANSVAVVFLNTNAAAAGGAIGALLIARLIFGKADLTMLLNGALAGLVAITAEPLTPSALQATLFGMTAGIIVVLSILLLDKIKIDDPVGAISVHGVVGLFGLLIVPLTNPAASLIGQLAGAATIFAWVFVSSLIIWSIIKFVIGLRISEEEEYQGADIAECGMEAYPEFIR

SEQ ID NO: 1328 - protein, 456 aa, Glycine max
MPEIGQAAVAAAADDTALFGKYELGRILGCGAFAKVHYARNVQTGQSVAVKIINKKKLAGTGLAGNVKREITIMSKLHHPHIVRLHEVLATKTKIFFIMDFVRGGELFGKISKGRFAEDLSRKYFHQLISAVGYCHSRGVFHRDLKPENLLLDENGDLRVSDFGLSAVRDQIRPDGLLHTLCGTPAYVAPEILGKKGYDGAKVDVWSCGVVLFVLAAGYLPFNDPNLMVMYRKIYKGEFRCPRWMSPELRRFISKLLDTNPETRITVDGMTRDPWFKKGYKELKFHEEDYHASGSGSFFGPKDERVVNLNAFDLISFSSGLDLSGMFGGEWGERLVTREPPERVLEAAEEAGAAAGMAVRWKKECGVELEGFNGRFGIGVEVYRLTAELAVVEVRKRGGDAAVRGVWEERLKPLLLGGATTSYSNSSEDEQQHQEEEQQHQEEKQEQEPESKVACE

SEQ ID NO: 1329 - protein, 380 aa, Cryptomeria japonica
FSIKGNGIGNGNGHCNGYSNGHGHCINGYSNGISASVSSNGVSHLPYSNGNTVHHSNSNGHIHTSPSFGDGRRRCFWYEEEIEDDLRWCFALNRILHTGVSEYQDIALIDTRPFGKALVIDGKMQSTEVDEFIYHESLVHPALVYHSQPKSAFIMGGGEGSTAREILRHKCVKKVVMCDIDKEVVDFCKKYLVVNREAFSNSRLELVINDARTELQSRQERFDVIIGDLADPVEGGPCYQLYTKSFYELVIKPKLNHQGIFVTQAGPAGVLTHTQVFSSIYNTLRQVFKHVMPYSAHVPSFADTWGWVMASDHPLTLEAGEIDDRIKQRIKGELQFLDGQTFLVAATLNKSVRKSLSKETHVYTEETARFIHGHGKASYQ

SEQ ID NO: 1330 - protein, 138 aa, Triticum aestivum
  unsure (1)..(138): unsure at all Xaa locations
MAPTVMASSATSVAPFQGLKSTAGLPVSRRSNGASLGSVSNGGRIRCMQVWPIEGIKXFETLSYLPPLSTEALLKQVDYLIRFKWVLASSQQVGSXSVEHXRNSGYYXWXFWTMWKLPILGALTHXVLTKXEEXKKTL

SEQ ID NO: 1331 - protein, 423 aa, Oryza sativa (japonica cultivar-group)
MAGSRFGSFKSEKGDPAATAAQRRDPYEVLGVGRNATDQEIKSAFRRMALKYHPDKNGDDPVASDMFQEVTFSYNILSDPDKRRQYDTSGFEAIEADSQELELDLSSLNTVNTVFAALFSKLGVPIKTTVSATVLEEALNGSVMVSQLQLGNSVHRKVEKQSAHFYSVDITEKEAKMGLVCRVKSTDRSKFKLLYFELEENGGLSLALQEDSVKTGKVTSAGMYFLGFPVYRFEQNNLAAAAKDPDSAFFKRLDSFQPCDINELKPGTHFFAVYEVVCGESFPAEKEKLQSVEAKILTKRAELSKFETEYREVLAKFTEMTSRYTQEMQAIDNLLKERNEIHASYTNNSPLKRSSSRSKAKSPSKFSKGEEENSQRKEKKVKDQPTGGCRSADEDSNEKKTKERFPKKKWLNIPFKIDRRKPC

SEQ ID NO: 1332 - protein, 130 aa, Brassica napus
LDLVINLSHKMNVRPVIGLRAKLRTKHSGHFGSTSGEKGKFGLTTTQIVRVVRKLREACMLDCLQLLHFHIGSQIPSTSLLSDGVSEAAQFYCELIRLGANMKVIDIGGGLGIDYDGSKSGESGLSVAYT

SEQ ID NO: 1333 - protein, 87 aa, Glycine max
  unsure (1)..(87): unsure at all Xaa locations
MAALMISFPAVTTVNRAGAGMDVPFTGLKYMDGFPSMMSNIDITFIVSNGGXVQCMLDRSPYGKKKFETLFHLPDLDDAQLVKEVLF

SEQ ID NO: 1334 - protein, 484 aa, Acinetobacter calcoaceticus
MSIFTKELWDKKLFNGSWQSAQDTYSVIEVATGQVLGEIGYATAADVVSAAQQAKAAQQQWWALNYQERQAVFERAAALLTENQAEVIEWLVKESGSLQLKAGFEVSIAIQVLKHCIASPTNEQGTLLPTQNGKLSIAKRLPLGVVGVISPFNFPLYLALRAVAPALAFGNAVVLKPDERTAVCSGYVIARIFELAGLPKGLLHVLPGGVEVGEALTLDQNIASIQFTGSTQVGRIVGANAAKTLKKVSLELGGKNSLIILDDADIELAAENIAWGAFLHSGQICMTSGKILIHQKIYQQVKQRVIEKVQNFVVGNPCDKNVTIGPLINAKQAQRVEQLVSAAVNEGATLEIGGHADGVFFQPTVLTDVTANNSIFSEEIFGPVAVLIPFSSDEQAIELANDGDYGLSAGIITSNVGRGMQLGAQLKVGLLHINDQTVNDETVNPFGGFGSSGNGTRIGGPANADEFTQWQWITVQAQAPHYPF

SEQ ID NO: 1335 - protein, 489 aa, Bacillus cereus ATCC 10987
MNKELLADKLKVKDAKLFIDGKYVDSVCGETFDTFNPATNRKLASIAKANEEDTKRAIDVAERTFKSGIWSKMPVEERSNILCKMSDLIMERVDELAYIETLDVGKPIKESKGFDIPRSAHNFRFFAEMAKYIVHEHYDKHNFMSYAKYAPAGVTSLIIPWNLPFMQMTWKASAALASGNTVVVKPASYTPLSAVMLGEIANDAGLPPGVLNIITGPGSTVGTKMTTHPAVRRISFVGESNTGKTIMRNASENLIPVSLELGGKSANIVFEDADLDEAVQGSIEAIYRNQGEICLAGSRLLVQESVYEQFLEKFVAAVKRIKVGDPLSEDTDMGALVSKSHLETVDRYVELGISEGAKLAYGGKRVESLVEGNFYEPTILYDVDNSMRVAQEEIFGPVLVVIPFKTEEDAIRIANDSIYGLAGVVWTNDLRRAQRVVSQIDSGLLWINCWYVRDLRTPFGGSKASGIGREGGRHSFEFYTEAKTVTMKL

SEQ ID NO: 1336 - protein, 155 aa, Lycopersicon peruvianum
MDLRLLGIDNTPLFHTLHHMMEAAGEDSVNAPSKIYVRDAKAMAATPADVKEYPNSYVFVVDMPGLKSGDIKVQVEEDNVLLISGERKREEEKEGAKFIRMERRVGKFMRKFSLPENANTDAISAVCQDGVLTVTVQKLPPPEPKKPKTIEVKVA

SEQ ID NO: 1337 - protein, 206 aa, Triticum aestivum
  unsure (1)..(206): unsure at all Xaa locations
IRHQIXHQTFHHQPQQTYPHQPQQQFPQTQQPQQPFPQPQQTFPQQPQLPFPQQPQQQFPQPQQIPQQQQIPQQPQQFPQQQFPQQQQFPQQQEFPQQQFPQQQFHQQQLPQQQFPQQQFSQQQFPQQQQFPQQQQLTQQQFPQPQQSPEQQQFPQQQFPQQPPQQFPQQQFPIPYPPQQSQEPSPYQQYPQQQPSGSDVISICGL

SEQ ID NO: 1338 - protein, 413 aa, Triticum aestivum
MSVSSSSMCGGDAGMKCVVWFRRDLRVEDNPALAAAARTAGEVVPAYVWSPEEDGPYFPGRVSRWWLSQSLKHLEASLHRLGAAKLVTRRSPDSVAALLQLVRDTGATHLFFNHLYDPISLVRDHRLKEMMTAEGIVVQSFNADLLYDPWEVNDDKGQPFNMFMPFWNRCLSMPYDPPAPLLPPKRINSGDLSMCPSDDLIFEDESERGSNALLARAWSPGWQNADKALSAFLNGPLIDYSVNRKKADSANTSLLSPYLHFGELSVRKVFHLVRMKQLVWSNEGNHAAEESCTLFLRSVGLREYSRYLCFNHPCSHEKPLLAHLRFFPWVVDESTFKFWRQGRTGYPLVDAGMRELWATGWLHDRIRVVVSSFFVKVLQLPWRWGMKYFWDTLLDADLESDALGWQYLGRDHA

SEQ ID NO: 1339 - protein, 160 aa, Triticum aestivum
GSAVAGGVVVDMSRGGKAPSRALPVYSPELGGHYVDVWGGELWIDVLNWTLSHGGLAPRSWTDYLYLSVGGTLSNAGISGQAFHHGPQISNVYELDVVTGKGEAVTCSEAKNPELFFGALGGLGQLGIITRARIALEPAPRKVRWIRALYSNFTEFTADQ

SEQ ID NO: 1340 - protein, 236 aa, Zea mays
MTMESPTTAAGGELESYFSLGLTVSHSQKDNAEFPKVLLLLSAYLDKTVQQNEELLDSSKIKESTTIFHGQRVPELSIKLYAERIFKYAKCSPSCFVLALIYMERYLQQPNIYMTSFSVHRLLITSVVVAAKFIDDAFFNNAYYGRVGGISTREMNMLELDLLFGLDFRLKVDIETFESYCLQLEEALVLVLERPIQVQEANVTKHLICNSSADETCKHELGLERYSSQAVQGCSW

SEQ ID NO: 1341 - protein, 84 aa, Triticum aestivum
  unsure (1)..(84): unsure at all Xaa locations
MSDTDEHHFESKADSGASKTYPQQVXAIXKGGHIXIKXRXXCKVVEVXTXXXGKXWXXXXARNEKKPDFTPNYPRRKNQVAEPS

SEQ ID NO: 1342 - protein, 197 aa, Nicotiana tabacum
MSASRFIKCVTVGDGAVGKTCLLISYTSNTFPTDYVPTVFDNFSANVVVNGSTVNLGLWDTAGQEDYNRLRPLSYRGADVFILAFSLISKASYENVSKKWIPELKHYAPGVPIVLVGTKLDLRDDKQFFIDHPGAVPITTAQGEELRKTIGAPAYIECSSKTQQNVKAVFDAAIKVVLQPPKQKKKKGKAQKACSIL

SEQ ID NO: 1343 - protein, 503 aa, Burkholderia cepacia R18194
MYDTEPLAATRGPAGGQPEPRRVRNFIDGDYRAGDRWFDKRSPLDNAVIARVAEASRADVDAAVQAARAALSGPWGGLTVAQRVDILYAVADGITRRFDDFLEAEVADTGKPVSLASHIDIPRGAANFKVFADVVKNVPGETFEMATPDGAGALNYAIRRPVGVVGVICPWNLPLLLMTWKVGPALACGNTVVVKPSEETPQTAALLGEVMNAAGVPRGVYNVVHGFGPGSAGEFLTTHPGVNAITFTGETRTGAAIMKAAADGARPVSLEMGGKNAAIVFADCDFDAAVEGTLRSCFANAGQVCLGTERVYVERPLFERFVAALKAGAEQLRPGRPEADTTGIGPLISQEHRDKVLSYYRKAAELGATVVTGGGVPDMPADLRDGAWVQPTIWTGLGDDSPIARDEIFGPCTLVMPFDSEAEVIGRANANAYGLSTAIWTTHLARAHRVAASIDVGIAWVNSWFLRDLRTAFGGAKQSGIGREGGVHSLEFYTELRNVCIKL

SEQ ID NO: 1344 - protein, 326 aa, Glycine max
  unsure (1)..(326): unsure at all Xaa locations
MEQSVLDDIINRLLEVRTRPGKQVQLSESEIRQLCVVSREIFLQQPNLLELEAPIKICGDVHGQYSDLLRLFEYGGLPPEANYLFLGDYVDRGKQSLETICLLLAYKIKYPENFFLLRGNHECASINRIYGFYDECKRRFNVRLWKTFTECFNCLPVAALIDEKILCMHGGLSPDLLNLDQIRNLQRPTDVPDTGLLCDLLWSDPSKEVQGWGMNDRGVSYTFGADKVSEFLQKHDLDLICRAHQVVEDGYEFFANRQLXTIFSAPNYCGEFDNAGAMMSVDETLMCSFQILKPADKKAKLNFGSTTTAKPGNSPAGVKCFLGAKV

SEQ ID NO: 1345 - protein, 405 aa, Neisseria meningitidis Z2491
MEIILGIVMFTVIVLVLALMILFAKSKLVSEGDITIKVNGEKELTMPAGGKLLGALANEGIFIPSACGGGGSCGQCRVVVKSGGGDILPTELSHISKREAREGCRLSCQVNVKTDMDIEVPEEVFGVKKWECTVISNDNKATFIKELKLAIPEGEEVPFRAGGYIQIEAPPHTVAYKDFDIPEEYHEDWDKYNLWQYVSKVDEPILRAYSMASYPEEKGIIMLNVRIATPPPRVPDAPPGQMSSYIWSLKPGDKVTISGPFGEFFAKDTDAEMVFIGGGAGMAPMRSHIFDQLKRLNSKRKITFWYGARSKREMFYVEDFDQLAAEFPNFTWHVALSDPLPEDNWDGYTGFIHNVVYENHLKNHEAPEDCEFYMCGPPIMNQSVIKMLKDLGVEDENILLDDFGG

SEQ ID NO: 1346 - protein, 337 aa, Bacillus sp. KSM-K16
MRSIVCERPNVFKMTKEKAPSIRPGEALVRIKRIGICGTDLHAYKGNQPFFSYPRVLGHELSGVIEEVEHNPEGLQAGDRVAIIPYLSCGNCHACRNGKTNCCTKVNVLGVHIDGGMRELVAVPTKQLMKTTSLSYDEAALIEPLAIGAHAVNRAKPRRNEQVLVIGAGPIGLGVMLFAKEQGARVIAMDVNEERLEFCQQWAKVDAVVHALDNPLSELNDRLNDELPTIVFDATGNNDSMTEAFNYVAHGGKLVYVGLVNGMIQFDDPEFHKREMTLMASRNATKEDFNYVIQVLETGSIQLDSYITHRCSFREMVEQFDSWLLPESKVIKVVVEL

SEQ ID NO: 1347 - protein, 363 aa, Buchnera aphidicola str. APS (Acyrthosiphon pisum)
MKKNYRIAVLSGDGIGPEVMQEACKILNVLKKYFFLSLEIQKFNIGGIAIEREGVALPKTTLLGCENSDSILLGSVGGKKWDNLPVEQRPERAALLPLRKHFNLFSNLRPAKLYPELKCLSPLRSDIVKNGFDILCVRELTGGIYFGEPKGFVNKNNTKYAFDTEIYHEYEIIRIAHLAFKLARSRKKKVCSIDKSNVLQSSILWREVVESVSKKYPDVHLSHLYIDNAAMQIIKDPNQFDVLLCSNLFGDIISDECATITGSIGMLPSASFNEKNFGLYEPAGGSAPDIEGKNIANPIAQILSLSMLVRYGMNLNQIADKIDKAVNNVLKKGYRTSDISHDNNFLKTDEMGDLIVDSLINGE

SEQ ID NO: 1348 - protein, 454 aa, Xanthomonas axonopodis pv. citri str. 306
MSYDTVNPANGQVEHTQQTLDAAAIEARLAASAKAFPAWAALPLAERGALLRRIGEELTRRREDLQRIMTAEMGKLRREALAEIDKCAQACAYYAEHAADYLAPRDIPTEAQSSYVRYEPLGCVFAVMPWNFPLWQAFRFLAPSLMAGNVSLLKHASNVPRCADAMKEVLDAAGIPPGVFDVLHIDNDQAADVLRDDRIAAVTLTGSERAGRSLAANAGDQLKKCVMELGGSDAFVVLEDADLAHTVPSAVQSRFDNSGQTCIAAKRFIVVDAIADRFIERFVAAAAQRVVGDPQQDSTTLAPMARADLRDELHKQVQASVAKGAKVLLGGEPVAGSHAGYPATILDTVAPGMPAYDEEFFGPVASIIRVADEAEAVRVANDTTFGLGGSVWTADAKRGERVAQQLQCGAAFVNSVVKSDVRLPFGGIKRSGFGRELAEHGIHEFMNVKTIYVA

SEQ ID NO: 1349 - protein, 192 aa, Deinococcus radiodurans R1
MSASPSLPASQGPLPQGERVNKAGRVVWFTGLSGAGKSTLATALFEELSARGEAVELLDGDAVRENLSKGLGFSREDRDTNVRRIAFVAGLLAKHGVTVLVSAISPYADTRREVLASLPNALEVFVDAPLEVVTERDVKGLYLKALAGEIPHFTGVSDPYEAPENPDLHLRTDRISVEDGVQQLLGRLSDDR

SEQ ID NO: 1350 - protein, 507 aa, Ralstonia metallidurans CH34
MKAQEIAACWQAMDLPPPWTPAEGAAPGVLAVRSPIDGEVFGQLAMCDAALANARIARAHAAQTTWALTPAPARGEVVRRFGEALRANKDALGRLVSLESGKILQEGLGEVQEMIDICDFAVGLSRQLHGLTIASERPAHAMRETWHPYGLCGVISAFNFPVAVWAWNAALALVCGNGVVWKPSEKTPLCALAAQGLLDRVFERHAPQFDGLSCVLTGGRQLGEHLVQHPAVRLMSATGSTRMGREVGMACAAHFKRAILELGGNNAAIVTPSAELEMTIRAMTFAAAGTAGQRCTTLRRAFVHADLIETVTNRLRQVFARLPVGDPLEDGTLVGPLIDHAAGDTMANALASCRAQGNVVHGGERLLGDRYPHACYVRPALVLTDAQHDTMLTETFAPILYLMPYTSLDEAIALNNAASHGLSSCIFTESLREAERFLSSAGSDCGIANVNIGTSGAEIGGAFGGEKATGGGRESGSDAWKGYMRRATNTINYGDALPLAQGIRFDV

SEQ ID NO: 1351 - protein, 472 aa, Xanthomonas axonopodis pv. citri str. 306
MHRHVHEPEILADPAAAQTAEHWRQRDLAVVWHPCTQMREHPHTLPLVPIVGGEGAWLVGHDGRRYLDAVSSWWTNLFGHTEPRIGAAIARQAGELEQVMLAGFTHTPAVQLAEQLLAIAPRQAGRAPLSKVFYADNGSAGVEVALKMAFHYFHNRGDHRRTRFIALENGYHGETIGALSVGDIPLYRRVYAPLLLEAMFTPSPDAYLAEPGQSAEDHALQAADALQALFEHSPGEICALILEPRVQCAGGMRMYHPAYLRRARELCDAHGAFLIADEIATGFGRTGTLFACEQAGVMPDLLCLSKGLTGGFLPLSAVLATQQLYDAFLDDSRERAFLHSHSYTGNPLACAAALATLKIFADDDVIARNQPIAARMRALAAQIGEHPSVADVRQAGMIVAFELTQGGNKRTPFASAARVGLKAYRAALEKGVVLRPLGDVLYWMPPYCVDEAQLALLADTTRHAITEAVACA

SEQ ID NO: 1352 - protein, 181 aa, Coffea arabica
MASSMISSAAVATTTRASPAQASMVAPFNGLKAASSFPISKKSVDITSLATNGGRVQCMQVWPPRGLKKYETLSYLPDLTDEQLLKEIDYLIRSGWVPCLEFELEKGFVYREYHRSPGYYDGRYWTMWKLPMYGCTDATQVLNEVGECLKEYPNCWVRIIGFDNVRQVQCISFIAAKPKGF

SEQ ID NO: 1353 - protein, 238 aa, Triticum aestivum
  unsure (1)..(238): unsure at all Xaa locations
MPSRPAPLVHRLRLLRSAVVCSSSALLPCSRPRLAIPFAQPPLRGPAFAAASSPLLRSVGARFSLFSSMAAAASSASSIHDFTVKDASGKDVDLSTYKGKVLLIVNVASQCGLTNSNYTELAQLYEKYKDQGFEILAFPCNQFGGQEPGXTNEEIVQFACTRFKAEYPIFDKVDVNGDNVAPVYKFLKSSKGSLFGDNIKWNFSKFLVDKEGHVVXRYAPTTSPLSIEKDIKKLLASS

SEQ ID NO: 1354 - protein, 368 aa, Arxula adeninivorans
MAAQVEEQVLNLRAQADHNPSFVLKKPLELGFEERPVPVITDPRDVKIQVKKTGICGSDVHFWQHGRIGDYVVEKPMVLGHESSGVVVEVGSEVTSLKVGDRVAMEPGVPDRRSKEYKMGRYHLCPHVRFAACPPTDGTLCKYYTLPEDFCVKLPENVDFEEGALVEPLSVAVHTARLLGIYPGSKVVVFGAGPIGQLCIGVCKAFGASIIGAVDLFEQKLETAKEFGASHTYVPQKGDSHDETAHKILELLPNKQAPDVVIDASGAEQSINAGIELLERGGTFGQVAMGRTDYIQFAVSRMAMKEIRFQGVFRYTYGDYELATQLIGDGKIPVKKLVTHRRPFEKAEEAYELVKSGVAVKCIIDGPE

SEQ ID NO: 1355 - protein, 570 aa, Glycine max
MPEYIVDEGARIEAEVAEVQAWWNSERFRLTKRPYTARDVVSLRGNLRQTYASNEMAKKLWRLLKNHQANGTASRTFGALDPVQVTQMAKHLDTIYVSGWQCSATHTTSNEPGPDLADYPYDTVPNKVEHLFFAQQYHDRKQKEERMRMSREERARTPYVDYLRPIIADGDTGFGGTTATVKLCKLFVERGAAGIHIEDQSSVTKKCGHMAGKVLVAISEHINRLVAARLQFDVMGVETVLVARTDAEAANLIQSNIDTRDHQFILGVTNPNLKGKSLATLMQQGMAAGKNGAELQALEDEWLSKAQLKTLSEAVVEAIERQNNIGEEEKRRKLNEWMHHSSYERCLSNEEGREIAEKLGVRNLFWDWDLPRTREGFYRFKGSVTASVVRGCAFSPHADVIWMETASPNVVECTEFSEGVRSKHPQMMLGYNLSPSFNWDASGMSDEQMKDFIPKIAKLGYVWQFITVGGLHSNALITSTFARDFANRGMLAYVERIQREERNNGVDTLAHQKWAGANYYDRYLKTVQGGVASTAAMGKGVTEEQFKESWTRSGAVNIDRGSIVVAKARM

SEQ ID NO: 1356 - protein, 226 aa, Glycine max
  unsure (1)..(226): unsure at all Xaa locations
ITRPPTRPPTRASTRPVNGDGGRDVNLGDSNYSFGEAEALSDEMEEESRYVAEILRIRDVLLNPEDESEAVLFDSLRXLQLMELTADCLKATEIGKAVNPLRKHGSKDIRQLSRTLIDGWKEMVDEWVKATTTTAITGSEEGTPDSVNPSVVDDDEEEGLPSPPLDEGALFVTQAGSMELSQFFDGMDDDGNPRPTGPFSKNREDGRKPAFDSHVVQMRKSQPSHD

SEQ ID NO: 1357 - protein, 285 aa, Saccharomyces cerevisiae
MELSSPSKKTTTSPINIPGGNRDNLIIGPHSHSFKTDPFSSNNSSLLSKISTNPSLESPFSSKSLLDCSPVQAVKKSLESEAKTHSLDEETNEQTDVKILNIADFPTDELILMISALLNRIITANDETTDVSQQVSDETEDELLTPILAFYGKNVPEIAVVQYLERIQKYCPTTNDIFLSLLVYFDRISKNYGHSSERNGCAKQLFVMDSGNIHRLLITGVTICTKFLSDFFYSNSRYAKVGGISLQELNHLELQFLILCDFKLLVSVEEMQKYANLLYKFWNDQ

SEQ ID NO: 1358 - protein, 462 aa, Streptomyces coelicolor A3(2)
MKAHDGMYIDGAWRPADGRDTIDVVNPVDEQVIGKVPAGSALDVDTAVRAARAALSGWAATPPAERAARLAALRDVLVARKDEIAETVTAELGSPLKFSQAVHAGAPIAVAGSYAELAATHAFEEKVGNSVVHHEPVGVVGAITPWNYPLHQIVAKAAPALAAGCTMVLKPAEDAPLVAQLFAEAVHEAGIPAGVFNLVTGLGPVAGQALVEHPGVDLVSFTGSTAVGRRIGATAGAAVKRVALELGGKSANVILPSADLAKAVNVGVANVMSNSGQTCSAWTRMLVHRDQYDEAVSLAAEAAAKYGDRIGPVVNAEQRERVRGYIGKGVAEGARLVAGGPEAPREQGYFVSPTVFADVTEEMTIAQEEIFGPVLSILRYEDEDDALRIANGTVYGLAGAVWAGDEADAVAFARRMDTGQVDINGGRFNPLAPFGGYKQSGVGRELGAHGLTEYLQTKSLQF

SEQ ID NO: 1359 - protein, 159 aa, Corynebacterium glutamicum
MTSIHDISVTLNDGTETTMADWAGHLLLIVNVASKCGLTPQYEGLQKLYEEYQDRGFFVIGVPCNQFNGQEPGTDAEVCAFAQNQYDVTFPLLSKTEVNGEGTHPLYKVLKEATDGSEIEWNFEKFLVDAEGNTIKRFAPRTEPSAAEVVEAIEENLPI

SEQ ID NO: 1360 - protein, 86 aa, Glycine max
  unsure (1)..(86): unsure at all Xaa locations
GKYERVGTTQKRARAGKVAPFTGLKYMAVVPTRKTNQELTFIDRNGGGVLCLQVWPRAGKXMRVTLFYVPDIDDAHVGDEVQYLLM

SEQ ID NO: 1361 - protein, 75 aa, Zea mays
  unsure (1)..(75): unsure at all Xaa locations
GCWRRXXXTVKWFNDTKGFGFISPEDFSEDLFIHQSSIKSEGFRSLAEGEEVEFSVSDGDDVLTKAHYMTSPYKS

SEQ ID NO: 1362 - protein, 483 aa, Haloarcula marismortui ATCC 43049
MEYTGPTDLYIGGEWREATNGDSIETEDPATERTYASVQKAEASDIDAAVEAAQAAVAEGSEWATMDPGTRRAKLHAMADAIEAMKDELSMVESHDNGKTPFEAGLEIDMVIDTFRHYAGWTDKVRGDEIPVENGRLNYTTREPVGVTAHIAPWNYPFQLAGRGLAPALATGNSVILKPSAMTPLSALYYAKAAEEAGLPDGVVNVVPGKGSEAGDALTGHEGVDHVTFTGSTGVGKTVQRTAADAVADVTLELGGKGPAVVFPDADLDAAARGIQYGIFMNAGQMCWANSRIVVHEDVYEEMVSRMAEIAENIPLGGGIDDDGQMGPVVSAGQQQEILDYIETGKEEGATVAAGGGVPGDKETGHFVEPTVFADVDNEMTIAQEEIFGPVLTAIEVSDEEAAIDVANDSPFGLTACVWTNDLTRAHTVTDRLDYGMVMVNETPNTWPQTPFGGTKQSGHGRAQGEQAIESYTEVKNVHINLG

SEQ ID NO: 1363 - protein, 203 aa, Yarrowia lipolytica
MSHSQRTYDLLIKLLLIGDSGVGKSCLLLRFCEDQFTPSFITTIGIDFKIRTIDIGNQRVKLQVWDTAGQERFRTITTAYYRGAMGILLVYDVTDEKSFNNIENWYQNVQTYANEGVELILVGNKCDLDEKRVVSTEQGQALADKFGIPFLEASSKTNINVEECFYSVATRIRDTVAKTKGNESGSGGINIAEGEENSASKCC

SEQ ID NO: 1364 - protein, 341 aa, Triticum aestivum
  unsure (1)..(341): unsure at all Xaa locations
MGSIAAGADEDACMYALQLVSSSILPMTLKNAIELGLLETLMAAGGKFLTPAEVAAKLPSAANPEAPDMVDRMLRLLASYNVVSCRTEEGKDGRLSRRYGAAPVCKYLTPNEDGVSMSALALMNQDKVLMESWYYLKDAVLDGGIPFNKAYGMSAFEYHGTDPRFNRVFNEGMKNHSIIITKKLLESYKGFEGLGTLVDVGGGVGATVAAITAHYPTIKGINFDLPHVISEAPPFPGVTHVGGDMFQKVPSGDAILMKWILHDWSDEHCATLLKNCYDALPGHGKVVLVEWIXPVNPEATPRGQGGFHVDMIMXPPNPGGRERYKKXSFEARAKGAGLPPG

SEQ ID NO: 1365 - protein, 560 aa, Triticum aestivum
DRATEEQLVTPWTVSVASGYNLLRDPRYNKGLAFTEKERETHYLRGLLPPTVISQELQERKIMHNIRQYQLPLQRYMAMMDLQEGNERLFYKLLIDNVEELLPIVYTRTRPPAVRKYGSIFSRPQGLYISLKEKGKILEVLKNWPERSIQVIVVTDGERILGLGDLGCQGMGIPVGKLSLYTALGGVRPSACLPITLDVGTNNEELLNDEFYIGLRQRRVIGQEYADFLHEFMAAVKQNYGEKVLIQFEDFANHNAFDLLARYGTTHLVFNDDIQGTASVVLAGLVAALKLVGGTLAEHTYLFLGAGEAGTGIAELIALEMSRQTKTPIDECRKKIWLVDSQASAHASGTRKESLQHFKKPWAHEHEHVGNLLDAVNAIKPTVLIGTSGKGQTFTQEVVEAISSFNEMPIILALSNPTSQAECTAEQAYTWSKGRAVFATGSPFDPVEYNGKTHVPGQANNAYIFPGFGLGVVMSGAIRVHDDMLLAASEALAQQVTQENFDKGLIYPPFSNIRKISAHIAANVAARAYELGLASRRPRPKDLVKYAESCMYSPIYRNYR

SEQ ID NO: 1366 - protein, 483 aa, Bacillus sp. KSM-K16
MVQTYLNYIDGEWKPSISGNVFYGRNPANYEEILGAYQASTAEDARLAIKSAAAAFPNWKNKSAIERADVLYQLMPLLAAEKEKLAAIITKEVGKTMAAARKEVDASIQALKHFSGAANRLAGETVPAGNPETFAYTIKEPLGPVGVITPFNFPLGIGIYKIAPALIAGNTVVYKPHNDTVQIAARLVELFIEAGTPKGVLNLVTGDGDKVGQELGENRTLKAISFTGSSDVGLRLGRSVTNRGGKMQAEMGGKNATVILEDADLDKAVSGIVISGLLNNGQSCTGTSRVIVPKNIAKTVTSKLVEKATAIRVGDGFNENVENGPVANEAQLQKYLHYVDIAVKEGAKLECGGKRLFGEGKDKGYFVAPTVLSGVTPEMTIAQEEVFAPVVAIMEVDSFDEAIAVANQTDFGLSSAIYTTNLQKAHEFVRRVETGVTHINIPSNHYENQLPFGGKKNSSIGPREQGSTALDFWVDTKAVYLKP

SEQ ID NO: 1367 - protein, 436 aa, Arabidopsis thaliana
MPGHRSKSEKKDADKQLRRDPYEVLGVLRNSTDQEIKSAYRKLALKYHPDKTANDPVAADMFKEVTFSYNILSDPEKRRQFDSAGFEAVEAESQELELDLSSLGAVNTVFAALFSKLGVPIKTSVSATILEEALNGRVSVDPLVLGQAVSKKVEKQCAHFYAVTISEEEVSAGLVCRVESSSKSKFKLLYFDQEANSGLSLALQEDSKRTGKITSAGMYFLGFPVYRLDHTINSMAQAKDPETAFFKKLDGFQQCEVTELKAGTHVFAVYGDNFFKNVSYTIQVLCAAAFTQEKEDLRSVEAQILTKRAELAKFETEYREVLVQFTDMTSRYAQEMQSIDELLKQRNEIHSAYTTIPLMKRSSSKNRMRKSSFKKAAAKAPAPTEQEEEEEEEEEEEEESSRQKNKKPSTCDKSETLKKKSKWFNLHLKLDKKKPC

SEQ ID NO: 1368 - protein, 455 aa, Xanthomonas axonopodis pv. citri str. 306
MDPSVLKALQQLDAAHHLHPFNDNAALAQKGTRILTRGEGVYVWDADGNQLLDAFGGLWCVNVGYGRKELAQAAARQMEQLAYYNSFFQCTTEPTIQLAAKLAELAPGDLNHAFFANSGSEANDTILRLVRHFWAVQGQPQKRIFIGRHDGYHGTTMAGASLGGMRGMHQQGGLPIADIHHVAPPYHFGDGGEMDPEEYGLLAARRLEDKILELGPDNVAAFIGEPIMGATGVYIPPRSYWPEIERICRRYDVLLVADEVICGFGRTGEWFGAEYFGFQPDVMTLAKGITSGYIPLAAAMFNDRVAGVLKTQGGELAHGGTYAGHPVCAAVALENLRLLQDEGIVETARTQVAPYLAQRWAALGEHRLVGEARIAGLVGALELVPDKQRRGAYFPRRGRVGAMCRDFALRRGLILRATYDAMLLSPPLIITPAQVDELFDKAWAALDDTAQALGR

SEQ ID NO: 1369 - protein, 494 aa, Photorhabdus luminescens subsp. laumondii TTO1
MKRLHDIEKEMLPVESYKMLIGGQWVDSVSKATTKSYNPATGELLAEYASGNAEDVDLAVSAAKKAFHAWSQTSAIERQSALLKIADLLEAEQKRFAILESLDTGKPLNESLYMDLPASIDQFRYFAGVIRSHTDEASVLDTNTLSLVIREPIGVVGQVIPWNFPLLMAAWKLAPALAAGNTIVINPATLTSITLLELGRILDKVLPAGVVNIVTGRGSVVGQAILDHEDVEKVAFTGSTKVGYTVAEAAAKKLIPATLELGGKSANIIFPDANMKKAVKYAAKAILLNQGQACESGSRLFLHKDIHDEFLKSLKTEFESIQVGDPLEKETQMGSQVSQEQMEKILEYVEIAKKEGATIFTGGKRITEKGYDEGFFIQPTIITDVTNDMRVAREEIFGPVLAVIPFSEEEDVIRMANDSDYGLAGAVWTQDIDRALRVAKAVRTGRMWINTYHELPAHAPFGGYKKSGIGRETHKMMLDAYTQVKNIYIKTSEE

SEQ ID NO: 1370 - protein, 275 aa, Bacillus halodurans C-125
MELWYTEKQTEHFGITAKIKRTLHTEKTDFQQLDVIETEEFGNMLVLDGMVMTTEKDEFVYHEMVAHVPLFTHPNPKHVLVVGGGDGGVIREVLKHPSVEKATLVEIDGKVIEYSKKYLPSIATALNDPRVDVQVDDGFLHIAKAESAYDVIMVDSTEPVGPAVKLFEKGFYQGIAKALKEDGIFVAQTDNPWFHGELIRKVYADVQEIFPITRLYTANIPTYPSGLWTFTIGSKTYDPLHVEPSRFYDIETKYFTKDLHKAAFALPRFVDDLIK

SEQ ID NO: 1371 - protein, 170 aa, Zea mays
MAPTVMMASSATAVAPFQGLKSAASLPVARRSTRSLGNVSNGGRIRCMQVWPAYGNKKFETLSYLPPLSTDDLLKQVDYLLRNGWIPCLEFSKLGFVYRENSTSPCYYDGRYWTMWKLPMFGCTDATQVYKELQEAIAAYPDAFHRVIGFDNVRQTQCVSFIAYKPPGSE

SEQ ID NO: 1372 - protein, 474 aa, Rhodococcus ruber
MTAGHFTELYINGSWVASTSKTVIEVLNPATEEVIGTVPDGTAADVDAAVAAARAAFDGWASTPVDKRAQYLRAIAAGIADRSDELARTISAEMGAPLSFAQAMQVPLPINSFSHAAAVAESFPFERTEGSSVIVREPIGVVGAITPWNYPLHQIAAKVAYALAAGNTIVVKPSEVAPLNAWMLAEIIDAAGVPAGVFNLVSGTGPVVGEALASHHEVDMISFTGSTNAGKRVSELAAQTVKRVALELGGKSANIVLDDADIDELMPNAVQWAMINSGQTCSALTRLLVPRAILTEAETAAKTIAEAYTVGAPDDPDTTLGPLVSATQLKRVRGYIDRGVQEGATLITGGSEPVEGLAVGYYVKPTIFSEVTPDMTIHREEIFGPVLSIAPYDTEEDAVRIANDSEYGLRGGVWSRDVDRARAVAARMRTGQVMINGGEFNPNAPFGGYKQSGTGREFGTHGLEEFLEIKSLQF

SEQ ID NO: 1373 - protein, 179 aa, Glycine max
MDNKATILMQKYEVGHFLGQGNFAKVYHARNLKTGQSVAIKVFNKESVIKVGMKEQLKREISLMRLVRHPNIVQLHEVMASKTKIYFAMEMVKGGELFYKVSRGRLREDVARKYFQQLIDAVGHCHSRGVCHRDLKPENLLVDENGDLKVTDFGLSALVESRENDGLLHTICGTPAYVA

SEQ ID NO: 1374 - protein, 163 aa, Triticum aestivum
MSDTDEHHFESKADSGASKTYPQQAGAIRKGGHIVIKARPCKVVEVSTSKTGKHGHAKCHFVAIDIFNGKKLEDIVPSSHNCDVPHVDRQDYQLIDITDDGDRYVSLLTESGNTKDDLKLPTDDVLLGQIKTGFADGKDLILSVMSAMGEEQICAVKEIGGGK

SEQ ID NO: 1375 - protein, 470 aa, Novosphingobium aromaticivorans DSM 12444
MLFATLAAGEGLDVLNPATQQRIATVKAYSTEEIARLIEAADAARGAWAARTAKERSVVLRRWYDLVMSHQEDLAALVTAESGKPLAEARGEVAYGAAFIEWFAEEGKRAYGDTIPTFANGKRVLTIRQGVGTCAAITPWNFPVAMITRKVAPALAAGCAMVVKPAEATPLSALALETLAHEAGVPAEVFRVVPTDDPAGVGTLFCTHPQVRKLSFTGSTRVGQLLMEQAAANVTRLSLELGGNAPFIVFDDADLDAAVDGLMASKFRNAGQTCVCANRILVQDSVHDAFLAKVQERVAALVVGDGAQPGTTIGPLINEAAVKKVGALVADACEAGARVLAGGGKSPVGTGFFEPTILADVTPDMAVASAEIFGPVVPVIRFADEPQAIRIANDTPYGLAAYFYARDVGRIWRVMEALEYGMVGVNDGIISTEVAPFGGIKHSGLGREGSRHGLDEYLELKYCLMGGIDR

SEQ ID NO: 1376 - protein, 380 aa, Pichia angusta
MKGLLYYGTNDIRYSETVPEPEIKNPNDVKIKVSYCGICGTDLKEFTYSGGPVFFPKQGTKDKISGYELPLCPGHEFSGTVVEVGSGVTSVKPGDRVAVEATSHCSDRSRYKDTVAQDLGLCMACQSGSPNCCASLSFCGLGGASGGFAEYVVYGEDHMVKLPDSIPDDIGALVEPISVAWHAVERARFQPGQTALVLGGGPIGLATILALQGHHAGKIVCSEPALIRRQFAKELGAEVFDPSTCDDANAVLKAMVPENEGFHAAFDCSGVPQTFTTSIVATGPSGIAVNVAVWGDHPIGFMPMSLTYQEKYATGSMCYTVKDFQEVVKALEDGLISLDKARKMITGKVHLKDGVEKGFKQLIEHKENNVKILVTPNEVS

SEQ ID NO: 1377 - protein, 534 aa, Zea mays
MGNCCAAPSTEGSGKTRPKKQKENPYNVAYNRGAAAPPPPPARPGLVVLRDPTGRDLGAEYELGGELGRGEFGVTYLCTEPATGARYACKSISKRKLRTPVDVEDVRREVDIMRHMPPHPNIVSLRAAYEDRDAVHLVMELCEGGELFDRIVARGHYTERAAAAVMRTIVEVVQKCHRHGVMHRDLKPENFLYASKDSSPLKAIDFGLSVFFRPGERFTEIVGSPYYMAPEVLKRNYGPEVDVWSAGVILYILLCGVPPFWAETEQGVAQAIIRSVVDFKREPWPRVSEPAKDLVRRMLDPNPLTRFTAAQVLEHPWLHDSKNTPDVSLGDTVRARLQQFAAMNKLKKKALRVIAEHLSAEEVADIKQMFDKMDVNKNGKLTFEEFKAGLRKLGNQMHDSDLQILMDAADVDRNGTLDYEEFVTVSVHVRKIGNDEHIQKAFAYFDRNKSGYIEIEELREALADELDGSDEDIIGGIIRDVDTDKDGKIGYDEFAAMMKAGTDWRKASRQYSRQRFSNLSLKLQKDGSLGADTR

SEQ ID NO: 1378 - protein, 159 aa, Shewanella oneidensis MR-1
MRTLTKIIGGLVLLLSMVTTVMATPVDTYEFKSPENQKRALELAHSLRCPQCQNQNLIDSNSPVASDLRLEVFKMVDEGKGDDEIIEFMTSRYGEFVLYKPKMETKTYILWLGPVGLLLLGLIVGFIFIRKQRITGAAGLEISAEDQKALDALLKRDSK

SEQ ID NO: 1379 - protein, 279 aa, Klebsiella pneumoniae
MTTDSILLNDGYYMPRPGCGLWLIDNRDVDSLIRQALKAGFRHFDTAQAYFNEDGVGRALRYTEVPREQLFITSKIRGRDMGYARTLVSFNETLERLGVEYLELFLIHWPIPAKNLYVETWEASIELEASGLIRSIGVSNFTCQHIERLIEDTGVVPAVNQLELHPHFQQCDVRDYHHEAGIAIQSYSPFGSNGAAVLRNAVVMVLARRHDHSPAQIVLRWHLQQGLTPLPRTTNGARFSENVDVWDFELSEEEMKLLASLNTRTGNTQPLPDAMNMSF

SEQ ID NO: 1380 - protein, 80 aa, Brassica napus
STHASGYRDWRLRSQSCPFCRGSLKRVNSGDLWVYTSSREIVELPEIYKENVKRLLMYIDKLPLVARDHPTLVPYSPVPR

SEQ ID NO: 1381 - protein, 135 aa, Triticum aestivum
  unsure (1)..(135): unsure at all Xaa locations
MSDTDEHHFESKADSGASKTYPQQAGAIRKXVGHIVIKARPCKVVEVSTSKXLGKHGHAKCHFVAIDIFNGKXNLEDIVPSSHNXDVPHVDRQDYQLXIDITDDGYVSLLTXDGNTKDDLKLPPDDVLLGQIKTD

SEQ ID NO: 1382 - protein, 337 aa, Triticum aestivum
IIFDSVLGEGGFGMVYKGWVDEKTMQSTKSGTGMVVAVKKLNSESMQGYEEWQSEINFLGRLSHPNLVKLLGYCWEDKELLLVYEFMAKGSLENHLFRKGCAPLSWELRLKIAIGAARGLAFLHASEKQVIYRDFKASNILLDASYNAKLSDFGLAKLGPTGSNSHITTRVMGTYGYAAPEYVATGHLYVKSDVYGFGVVMLEMLSGKRARGPNRPNGQQSLVDWAKPYLADRRKLARLMDPQFEGQYNSKQSHQAAQLTLNCLAGEPRSRPSMKEVLEPLEQIEALKSRTREARGGSGTSSRDRGPRTLCCSAPTVVATWRQRCAPWFEGHQRPRH

SEQ ID NO: 1383 - protein, 152 aa, Oryza sativa (japonica cultivar-group)
MMWIQSMLYFAFYCTGKPLEMLLDRGTSKPDKYLKAKSDSDGAGLLILDPYGGKMVHVAPVVMSFPHRQALYNIQYYGFWSKSRAATEKHMGWIRGLYGEMEPYVSKNPRGGAAAIAAVTGSLAVCRSWRGGIWLQGQSCHFENFPPLLSRK

SEQ ID NO: 1384 - protein, 447 aa, Anabaena variabilis ATCC 29413
MSEQKIDAQGVNVIQDQSLVSSVITDFGNLIKGNTLGIIQPHNIEEISSAIEFAKQQNSRLKARGKGYTQSGQSVAQDAFTLDLTRLNHISKVDTVTQAIATEAGATWQDIVTTTMKFGMLPCVLPLNLEQTVGGLLSTGGIGSTSKTYGPVVANVIDLHIITGNGEHIQCSRTQAPELYHAVLGGLGGCGIIASATLALRKTKKYIRTFHLLYDSLKAWMDDHVLLSRNHQIEHLEGFCWTSAKGIRQTTNGKSFFAHWLYGLQVGIEYDEAAPSVSDVLQNLNYWQLFHTEDEETVSHVFRYQPRFEVMRASGGWNQAHPWIECFISAEALTEILPEILDMLPLSLGDGHRAIMVASDNLPSLFMMPPAKNILCFAILPMAVPVGDTKTFDVLAKVSQILLSAGGKRYLSGWLGKSDFDWQQHYGTSYETWETMKQRYDPSHILG

SEQ ID NO: 1385 - protein, 477 aa, Acinetobacter sp. ADP1
MNQLIWFRNDLRLNDHAALWHATQAGSTIAFVALSPLQWQQHDDAIIKIDFYMRQLTQLKQELNTINIPLIVQIIPLWKDIATEIISISDRYHIQDVYANIETGINEIERDHAVQEALSKIGKNLILFHDKTLFPLGSIRNKSQAPYQVFTPFKKTCYERLNIDIPKCFPYPHKQKQQPEIAKKEAAIPSLKQLGYSQIDQHIQNEWPIGETFALNLLEDFTQDKINRYHESRDYPAQDGTSHISAYLTIGILSIRQCIQAIFQKQHGQFFLNNKGQEIWLNELLWREFYQQLLFDFPKLSRHQPFQDHTKNIPWNENDEHFEAWIQGKTGIPIVDAGMRQLKATGWMHNRVRMICAMFLSKNLLIDWRKGEKWFMQHLIDGDLAANDGGWQWSASTGTDASPYFRIFNPVTQSQKFDPEGVFLKKWIPELKHLDSKHIHDPYAYQHKTELNYPKPIIDLKATRKNAIEVFKKSSSL

SEQ ID NO: 1386 - protein, 90 aa, Triticum aestivum
  unsure (1)..(90): unsure at all Xaa locations
MSDTDEHHFESKADSGASKTYPQXAGAIRKXXHIGIKARPCKVXVEVSTSKXXKHVFVLWGGGLKLGYPLSSKLSPCSPNCCPSPAVPLF

SEQ ID NO: 1387 - protein, 74 aa, Triticum aestivum
MPFVPSCVQCGTRSNPCRCKVVGPTLGFVAFVVTGVVEWPLGAAVYLFRHRKGRRIMGHPARVVYPRVTRAIPI

SEQ ID NO: 1388 - protein, 414 aa, Arabidopsis thaliana
MATHSSRSENKDAGEEDELRRRNPYEVLGIPSNSTDQEIKSAYRRMALRYHPDKNPDDPVAADMFKEVTFAYEVLSDPENRRLYDTTGSEAVGPENEDLELDLSSLGAVNTIFAALFNKLGVQIKTTVSANLLGEALNGTVTTLPLMVGQVVSRKVEKQSAHFYSVTLTEEEAQDGLICKVHSSAKNKFKLLYFDQVENGGLSLALQEDSRKTGKLSTAGLYFFGFPVYRFDHRVNSRALSRDPETGFFKRLDAFQPFEITELKAGSHVFAVYGDNFFKSVSYTLEIFSSAPFGNEKESLRSTEAQIVSKRTELLKFESEYHEVFAQFTEMASKCTGEVQEIDELLKRRNEICAAYTIFPPTKQGSSKSRSWSKKKSSLLMEPREEGEVAVREEGGVKKKKWYNIQLRQDKKKN

SEQ ID NO: 1389 - protein, 162 aa, Oryza sativa (japonica cultivar-group)
MSDSEEHHFESKADAGASKTYPQQAGTIRKNGYIVIKNRPCKVVEVSTSKTGKHGHAKCHFVGIDIFNGKKLEDIVPSSHNCDVPHVDRTDYQLIDISEDGFVSLLTESGNTKDDLRLPTDDTLTNQIKNGFGEEGKDMILTVMSAMGEEQICAVKEIGAKN

SEQ ID NO: 1390 - protein, 1320 aa, Emericella nidulans
MGKTSAKDVAELKDYQLGDCLGRGAFGSVYRALNWNTGETVAVKQIKLADLPKSELRVIMLEIDLLKNLDHPNIVKYQGFVKSAETLNIILEYCENGSLHSIAKNFGRFPETLVGVYMSQVLHGLLYLHDQGVIHRDIKGANILTTKEGLVKLADFGVASRTTGLSESSVVGTPYWMAPEVIELSGATTASDIWSLGCTVIELLEGKPPYYNLQPMPALFRIVNDDHPPLPQGASPAVKDFLMQCFQKDPNLRVSARKLLKHPWIVNARRSDSVVPKKSTEYEEAVKSVQEWNEALRSPESNALRRGTRNENQNPPSLRLDTRHTPTKVTLPSPVSRIVADKFSSPSSGEEDNWDDDFATAISPSALQLPHLRPHDNFGGMLSSEKLKAFASLDGTVLKSDESFEESDDPFKGSLLAGEHDPLKTIRPPPSQQANSGTSQSQNGPYGAHMRRGPPLNTAITPVYGGQMLQNSSSPIRQQRPPLFYKENSVEDYSDLISANEDVLDRKISAFQVGPTLRTPEGSDHAADVHQESDEHKDLADTGRSREVIRYQSSYEQEDTPRIGRQISVKRYRGTVEIQQFAENEHDEDFSDILGVDGVTLDKAESDDGSNKSTLMLNTKLSNNSWLGDLDDEDDPFALLEEGLDETDLEANIARDKHARLRSQVEGLVGSLKTSQDEEVLGDISEQLLAVFCDFPETKNIIISAHGMLPILEILDLCRRRDITLCLLKIVNAIIYDDYEIQENLCFVGGIPIINEFAAKKYPREIRLEAAAFVQQMYQTSTLTLQMFVSAGGLNVLVEFLEDDYEDERDLVLVGVNGIWSVFELQGSTPKNDFCRILSRSSVLDPLSLVLSRVLDEEGELAEVVEGRIANIFFIFSQAENHVKEMVSERTVLHRVLKELKRMTPAHQITMLKFIKNLSMLSTTLDSLQNSNAIDVLTDLLRSTIKRPHFREVSNQILNTIYNMCRLNKSRQEDAALNGIVPLLQKIVKTERPLKEFALPILCDMAHSGKVGRRELWRNKGLAFYISLLSDPYWQVTALDAIFIWLQEETAKVEEHLLENRYDQPSFTDAIVRCLTLSKANAFENILEPLQKLLRLSPPIASTLARPDLFSRLGQKLHHSKAAVRLNLLRIISSICDSSEQQGGLLASYGLLDSIRELEHDPAILVRDMAGKLIQSSERNDSYGLCKLKPNVRRGSTSATSPGLLANQSAPVTPQLSRQNQSKGYYDSRETQRRPRSAISGSALALRPGSRDGPTPGIVGGANGSAGASRNRIARGVSNRLSHIELLPNDDDRIPSSITRRSSVLPRRRRLTQFEAERGS

SEQ ID NO: 1391 - protein, 86 aa, Zea mays
  unsure (1)..(86): unsure at all Xaa locations
MTSASELFSTRRSRPGRSDPALKSDTSSYRHHSHXHHHRRHGVHHHNQXHXSDGLRSSPGPTYPHPGGGGQRNTLIVRINDPGNLP

SEQ ID NO: 1392 - protein, 277 aa, Bacillus cereus G9241
MNLTSLKDYTTLHNGVKMPWFGLGVFKVEDGSEVIESVKAAIKNGYRSIDTAAIYQNEEGVGQAIRESGISREELFITSKVWNSDQGYETTLQAFETTLEKLGLEYLDLYLVHWPVKGKYTESWKALEKLYKDGRVRAIGVSNFHIHHLQDVFEIAEIKPMVNQVEYHPRLAQEELHAFCKEHNIQLEAWSPLMQGQLLDNPTLQDIATKYNKSTAQIILRWDLQNEVVTIPKSIKEHRIIENANIFDFELSADDMKAIQALNEDRRVGPDPDNFNF

SEQ ID NO: 1393 - protein, 436 aa, Acinetobacter sp. ADP1
MSFVAYIYSPVTKGSTCTMGYQKIVVPVDGDRIKVNADLSLNVPNHPIIPFIEGDGIGVDITPAMKAVVDAAIVKAYGGKRSIEWMEVYCGEKANTIYGSYMPEETFEALREFVISIKGPLTTPVGGGIRSLNVALRQELDLYVCVRPVRWFEGVPSPVQHPELTDMVIFRENSEDIYAGIEWKADSPEAKKVIQFLQEEMGVQKIRFPEHCGIGIKPVSKEGTQRLVRKAIQFAIDNDKPSVTLVHKGNIMKYTEGAFKEWGYELAIERFGGELIDGGPWVQIKNPKTGKDIVIKDVIADAFLQQILMRPADYSVIATLNLNGDYISDALAAEVGGIGIAPGANIGGAIAVYEATHGTAPKYAGQDKVNPGSIILSAEMMLRDMGWTEAADLIIKGISGAIEAKTVTYDFERLMPGATLLTCSEFGQAIIKHMDD

SEQ ID NO: 1394 - protein, 468 aa, Mesorhizobium loti MAFF303099
MRLSNLGTEQLREKDRSFVFHPSTHLAKHSRGETPNRIMAGAEGVYIWDTEGRKSLDGFGGLYCVNMGYGCTEIAEAIARQAHELPFAHVYASQGTEPVALLAEAVVEYFGQNMRRVFFGLSGSDANETNIKLVWYYNNILGRPEKKKIISRHRGYHGSGLVTGSLTGLAFFHNFFDLPLDLVRHTTTPHHYRQAHDGESEQAFSTRCADELEGLILAEGPETVAAFIGEPVLGTGGIVPPPKGYWTAIQGVLDKYDILLIADEVVCGFGRTGEQFGSHLYGMRPDFVTIAKGLSSAYLPISGSIIGDRVWSVLEQGTEKHGALGHGWTYSGHTLCAAAALANIRLLKERNILEHVRDVGPYWHARMNAELAGHPIVGEVRGVGILAAVELMRDPKQRIPFESDLQVGVRAAAALFENGVIGRAMPHGDILGFAPPLIITRKEIDIIVDATAKSVETTYRALKAEGAI

SEQ ID NO: 1395 - protein, 281 aa, Arabidopsis thaliana
MVLTHNVLAVTFGVLGNIISFIVFLAPVPTFVRICKKKSIEGFESLPYVSALFSAMLWIYYALQKDGAGFLLITINAVGCFIETIYIILFITYANKKARISTLKVLGLLNFLGFAAIILVCELLTKGSNREKVLGGICVGFSVCVFAAPLSIMRVVIRTKSVEFMPFSLSLFLTISAITWLFYGLAIKDFYVALPNILGAFLGAVQMILYVIFKYYKTPLVVDETEKPKTVSDHSINMVKLSSTPASGDLTVQPQTNPDVSHPIKTHGGDLEDQMDKKMPN

SEQ ID NO: 1396 - protein, 423 aa, Arabidopsis thaliana
MDRISGLPDELLLRVLSLLPNVKDVVVTMVLSKRWQFLWMMVPKLVYDDSYQNLEYGKFSRFVDRSLFMRKAPGIETLHFKLGQNCGNGDIQWWIRAASKFCFRELIIEINCSTSASPSILPRSLYTECRMLVTLKLKKAVLVDVSSPTCFPSLKNLSLVSVKYPGNEFVKSLLSSCHVLEDLVVEQCINDNVTIFSVKVPSLKSLVLRTSKERAPDGESGFVVEAPSLEYLDIDQTGGFCVIENGMPNLAEAYVSVLHHHPVKFLSSITSVKRLYLCLLPHSILSCMQDMYPIRCVFHRLVHITLCTCDDEWLNLLACLLKGSPKLISLKLEKVIFQFIQCLMYRLSQHHGHLICSPSPLRDDLSSVPECVLSSLETVEWVDYEGTEAERQLVEFILRNGSCLKKFVISPESVNPDKKYEMI

SEQ ID NO: 1397 - protein, 267 aa, Escherichia coli O157:H7 EDL933
MAIPAFGLGTFRLKDDVVISSVKTALELGYRAIDTAQIYDNEAAVGLAIAESGVPRHELYITTKIWIENLSKDKLIPSLKESLQKLRTDYVDLTLIHWPSPNDEVSVEEFMQALLEAKKEGLTREIGISNFTIPLMEKAIAAVGAENIATNQIELSPYLQNRKVVAWAKQHGIHITSYMTLAYGKALKDEVIARIAAKHNATPAQVILAWAMGEGYSVIPSSTKRENLESNLKAQNLQLDAEDKKAIAALDCNDRLVSPEGLAPEWD

SEQ ID NO: 1398 - protein, 395 aa, Arabidopsis thaliana
MALFLSPKTITLLFFSLSLALYCSIDPFHHCAISDFPNFVSHEVISPRPDEVPWERDSQNSLQKSKILFFNQIQGPESVAFDSLGRGPYTGVADGRVLFWDGEKWIDFAYTSSNRSEICDPKPSALSYLRNEHICGRPLGLRFDKRTGDLYIADAYMGLLKVGPEGGLATPLVTEAEGVPLGFTNDLDIADDGTVYFTDSSISYQRRNFLQLVFSGDNTGRVLKYDPVAKKAVVLVSNLQFPNGVSISRDGSFFVFCEGDIGSLRRYWLKGEKAGTTDVFAYLPGHPDNVRTNQKGEFWVALHCRRNYYSYLMARYPKLRMFILRLPITARTHYSFQIGLRPHGLVVKYSPEGKLMHVLEDSEGKVVRSVSEVEEKDGKLWMGSVLMNFVAVYDL

SEQ ID NO: 1399 - protein, 460 aa, Saccharomyces cerevisiae
MPINAITSDHVIINGANKPATIVYSTESGTILDVLEGSVVMEKTEITKYEIHTLENVSPCTILPGLVDSHVHLNEPGRTSWEGFETGTQAAISGGVTTVVDMPLNAIPPTTNVENFRIKLEAAEGQMWCDVGFWGGLVPHNLPDLIPLVKAGVRGFKGFLLDSGVEEFPPIGKEYIEEALKVLAEEDTMMMFHAELPKAHEDQQQPEQSHREYSSFLSSRPDSFEIDAINLILECLRARNGPVPPVHIVHLASMKAIPLIRKARASGLPVTTETCFHYLCIAAEQIPDGATYFKCCPPIRSESNRQGLWDALREGVIGSVVSDHSPCTPELKNLQKGDFFDSWGGIASVGLGLPLMFTQGCSLVDIVTWCCKNTSHQVGLSHQKGTIAPGYDADLVVFDTASKHKISNSSVYFKNKLTAYNGMTVKGTVLKTILRGQVVYTNANGVSKTPLGQTLLDSRR

SEQ ID NO: 1400 - protein, 245 aa, Zea mays
LQISTMFTHHQKIVVVDHELPNEGSQQRRIVSFVGGIDLCDGRYDTQYHSLFRTLDTVHHDDFHQPNFEGGSIKKGGPREPWHDIHSRLEGPIAWDVLYNFEQRWRKQGGKDLLVRLRDLSDIIIPPSPVMFPEDRDTWNVQLFRSIDGGAAFGFPETPDEAARAGLVSGKDQIIDRSIQDAYINAIRRAKNFIYIENQYFLGSSYDWKPEGIKPEDIDCLHLIPKELSLKIVSKIEAGERFTVY

SEQ ID NO: 1401 - protein, 308 aa, Triticum aestivum
MKTLLILTILAMATTIATANMQVDPSSRVQWPQERPFPQSQQPFSQQPQQIFPQPQQTFPHQPQQAFPQPQQTFPHRPQQQFPQPQQPQQPFPQPQQPQLPFPRQPQQPFPQPQQPQQPFPQSQQPQQPFPQPQQQFPQPQQPQQSFPQQQQLMIQSFLQQQMNPCKNFLLQQCNPMSLVSSLVSIILPRSDCQVMQQQCCQQLAQIPQQLQCAAIHSVAHSIIMQQEQQQGVQILRPLFQLAQGLGIIQPQQPAQLEGIRSLVLKTLPTMCNVYVPPDCSTINVPYASIDAGHWWPMKNARVMLIGR

SEQ ID NO: 1402 - protein, 498 aa, Yersinia pestis KIM
MSEYHEKNNALFKSITALDGALFINGEFRKGAGGRLPVENPATGKVIGHLAAATPEEIEEAVAAARRAFPAWAAERPKARANALHRLGDLIAGDALNMARNMTIEQGKPVNEAQGEILKLAEICHFYGEEATRVQGDVVPNDPPGFQSLVVREPVGVVGAITPWNYPAELVGWKLCASLAAGCTLIIKPAELTPYTALAIAEKCLEAGIPAGVVNVLTGKGEQVGQALVEHPQVDKIAFTGSSAVGLHIQQSCPQVKRLSLELGGNGPMVVTACADVAAAVKGAVRRSFRNCGQVCIAINRIYVHRSCYRAFVSKMGVATNGLRLGNGLDDPAADLGAMASVEPLNKTRAHLEDALAKGARLVAGGKAPEGVEYAKGHFFRPTVLADCTHQMRVMTEETFGPLVGLAPFDDIDEVISRANDTPYGLAAYVYARDLAAIHRLSAALDYGNVAINNVDASMMNAPYGGRKQSGVGYEHGREGLLEYFNFKHIRLYHGIGD

SEQ ID NO: 1403 - protein, 447 aa, Triticum aestivum
MAASVREGAAAAAAAGHAADDYDVSDGEMDVDVEAGSELQRAGDDRRDGDGDGDDEYALLTRITDTSAAEARAGKDIQGIPWERLQITRQDYRKARLEQYKNYENFPQSGELMDKLCKQVESSSKYYEFQYNTRIVKPSILHFQLRNLLWATSKHDVYFMSNSTVGHWSSLSHKMTDVLDFSGHVAPAKKHPGCALEGFTGVQVSTLAVNEGLLVAGGLQGELVCKSLGERDVKFCTRTTLSDNAITNAMDIHRSTSGSLRITVSNNDSGVREFDMERFQLLNHFRFNWPVNHTSVSPDKKLLAVVGDDRDALLVDSRNGKVTSTLVGHLDYSFASAWHPDGVTFATGNQDKTCRVWDIRNPSTSLAVLRGNIGAIRCIRYSSDGRFLLFSEPADFVHVYSAAECYRKRQEIDFFGEISGISLSPDDESLFVGVCDRVYASLLNYRM

SEQ ID NO: 1404 - protein, 196 aa, Sulfolobus tokodaii str. 7
MAHGPNYRVKYRRRREGKTNYYKRYTYVINNTTRLVVRLTNKYIIAQIAKFNPKGDVIVVAAHSMELAKKFGWKGDLNNTPAAYLTGYLLGVRALKAGIKEAVADIGLFVPVKGSRIFTAIKGAIDAGLSIPVGDLGIKEDRIKGVHIASYAQKLEAENPELFKRLFSKYLERGLHPKDLPSHFEEILNKIKSGGA

SEQ ID NO: 1405 - protein, 294 aa, Arabidopsis thaliana
MKRRKRGRGIVNADRISQLPEALIIQILSLLPTEVAVTTSVLSKQWQFLWKMLPKLNFDSLDQRHEFKTFSKNVKRALLSHKAPVLHSLHLIVHLHLCNSMNTAKLIGIAFACNLRKLVLEVDGGRFSIPESLYNCETLDTLELKYSILMDVPSSICLKSLRTLHLHYVDFKDNESALNLLSGCPNLENLVVHRYPFSSVKTYTIAVSSLKRLTIYTSSTVDPRAGYVINSPSLTYLKIVGQIGFCLIENVPELVEASMIVSSQIINKNLLESLTSVKRLFLEFSPLMVDFLAN

SEQ ID NO: 1406 - protein, 250 aa, Capsicum annuum
MGKCYPTVSEEYLKAVDKCKRKLRGLIAEKNCAPLMLRLAWHSAGTYDVCSKTGGPFGTMRFKTEQSHGANNGIDIALRLLEPLGEQFPIVSYADFYQLAGVVAVEVTGGPDVPFHPGREDKPEPPVEGRLPDATKGSDHLRDVFVKQMGLSDQDIVALSGGHTLGRCHKERSGFEGPWTANPLIFDNSYFKELLGGEKEGLLQLPSDKALLSDPAFRPLVEKYAADEDAFFADYAEAHLKLSELGFAEA

SEQ ID NO: 1407 - protein, 373 aa, Arabidopsis thaliana
MGYLFEETLSSNPKTPIVVDDDNELGLMAVRLANAAAFPMVLKASLELGVFDTLYAEASRTDSFLSPSEIASKLPTTPRNPGAPVLLDRMLRLLASYSMVKCEKVSVGKGERVYRAEPICRFFLKNNIQDIGSLASQVIVNFDSVFLNTWAQLKDVVLEGGDAFGRAHGGMKLFDYMGTDERFSKLFNQTGFTIAVVKKALEVYQGFKGVNVLVDVGGGVGNTLGVVTSKYPNIKGINFDLTCALAQAPSYPGVEHVAGDMFVDVPTGDAMILKRILHDWTDEDCVKILKNCWKSLPENGKVVVIELVIPDEAENGDINANIAFDMDMLMFTQCSGGKERSRAEFEALAAASCFTHCKFVCQAYHCWIIEFCK

SEQ ID NO: 1408 - protein, 208 aa, Brassica napus
MTEESPEEDHKSPEGAETNLGSSSLKNNNINNKEQDRFLPIANVGRIMKKVLPGNGKISKDAKETVQECVSEFISFVTGEASDKCQREKRKTINGDDIIWAITTLGFEDYVAPLKIYLGKYRETEGEKVNSPKQRHQQQQPQHNHHFQFQEQDHNNISCTSYISQHHPSPFLPADHQPFPNLPFSPKSLQNQFPQQNDNTDSMGQWSV

SEQ ID NO: 1409 - protein, 377 aa, Yersinia pestis KIM
MPAQNPLQHQRQHDGIYHIGYFVGGKWSQAQEQFDVYNPATGELVARVAKSGKQETEAAIKAASEAFPAWRKTPAKQRAEILQRWYLLIMEHQQSLAELMVSEQGKPLKEALVEVAYAASFIQWFSEQAKRANGEIIPSAKEGARILATREPIGVVAAITPWNFPLAMLTRKLGPALAAGCTGLIKPANNTPLSAFALLALAEQAGVPAGVLNGVVGDTHAISDAIMASSDVRKISFTGSTNVGKTLMRNAAATMKRISMELGGNAPYIVFDDADLEAAVAGAMACKFRNAGQVCVCVNRFYIQDAIYDEFVNRLAAEVKKLKVGNGMDKDVNMGPLINLAGLEKVEEHVKDALEKGGRLLAGGIAMRWAVISSSQR

SEQ ID NO: 1410 - protein, 426 aa, Thermus aquaticus
MILIRNVRLVDAMGERGPLDVLIGEGRILSLEGGEAKQVVDGTGCFLAPGFLDLHAHLREPGEEVKEDLFSGLLAAVRGGYTDLVSMPNTNPPVDTPEAVRALKEKAKALGLARLHPAAALTEKQEGKTLTPAGLLQEAGAVLLTDDGRTNEDAGVLAAGLLMAAPLGLPVAVHAEDAGLRRNGVMNDGPLADLLGLPGNPPEAEAARIARDLEVLRYALRRSPATPRLHVQHLSTKRGLELVREAKRAGLPVTAEATPHHLTLTEEALRTFDPLFKVAPPLRGEEDREALLEGLLDGTLDAIATDHAPHTQAEKEMDLLRAPFGIPSLEVAFPLLYTELHLKRGFPLRRLVELFTDGPRRVLGLPPLHLEEGTEASLVLLDPKERPVDPQGFASKARFSPWTGWRLGGWPVLTLVEGRIVHEALE

SEQ ID NO: 1411 - protein, 315 aa, Mycobacterium avium subsp. paratuberculosis str. k10
MGPRDVLVRMRACGICGSDAFYISIGGVPPRQGHTPLGHEPAGEVVEVGAEVTGLAVGDHVVINPMAAPSGIIGNGGASGALADYLLIENAVRGTSLEVIPDHIPWEVAALNEPMAVARHGVNRCQPRPTDKVVVFGAGPIGLGATLAFKSLGVQHIVVIDLIPGRLDKAVRIGADAVVNSAEEDVAARLVELHGSGESMFPGKAGTDIYLDAAGAPAVVSTALAAAKKGATLGIVGVHKEPVPVDLINVMSNEITIVGSMGYPDEIFEVTGDLVRNWEKYALIVSHTIPFDRVGEALELARTPGAADKVVVTFC

SEQ ID NO: 1412 - protein, 326 aa, Bartonella henselae subsp. arupensis
DGDKGILLYRGYPIEQLAEKGDFLESCYLLLYGELPTKQEKSDFDRCIMQHTMVHEQFARFFHGFRRDSHPMAVMVACLGAMSAFYHDSIDITDPQQRMIASVRLISKVPTLAAMAYKYSIGQAFVYPRNDLSYAANFLRMCFSVPCEEYKTNPVLTRAMDRIFILHADHEQNASTSTVRLAGSSGANPFACIAAGVACLWGPAHGGANEACLKMLQEIGSVKRIPEFIARAKDKNDPFRLMGFGHRVYKNYDPRAKIMQKTCHEVLKELNIQDDPLLDIAIELEKIALNDEYFVEKKLYPNVDFYSGITLKALGFPTEMFTVLFE

SEQ ID NO: 1413 - protein, 112 aa, Zea mays
MASALSFFTCLVLTVCIVASVDAAISCGTVTSNLAPCAVYLMKGGPVPAPCCAGVSKLNSMAKTTPDRQQACKCLKTAAKNVNPSLASSLPGKCGVSIPYPISMSTNCDTVK

SEQ ID NO: 1414 - protein, 367 aa, Lentinula edodes
MDDRTTAFIVGSSYQPLDIIGEGAYGVVCSAVHIQSQRKVAIKRITPFDHSMFCLRTLREIKLLRHFQHENIIGILDILKPNLGPDGSLDGMTEVYLVQELMETDLHRVIKTQELSDDHCQYFIYQTLRALKALHSADVLHRDLKPSNLLLNANCDLKLCDFGLARSASPLPDHPVDASTFMTEYVATRWYRAPEVMLTFKQYTKAIDKWSLGCVLAEMLSGKPLFPGRDYHHQLSLILDVLGTPTLDDFYAISSSRSREYIRALPFRKKKVFGKPVHEGGVKGFEGKNPLAIDLMEKCLSFNPKRRIDVEGALAHPYLAPYHDPSDEPGAERIDSEFWSFDTFNNGKGLSKEELKVLIYEEVMRGA

SEQ ID NO: 1415 - protein, 246 aa, Triticum aestivum
KAATLRRAATYEAGTAAPKGAPYPGTTESPELRWALIRKVYVVLCLQLLLTAVVAVVFVKVRSIPHFFASSYVGLGLYIFILIFPFIVMCPLHFYRQKHPVNLLLLGVFTVAISFSVGLTCAFTSGKVILEAGILTIVVVLSLTAYTFWAARRGKDFSFLGPFLFACLMILLVFGFIQIFFPLGKLSHMIYGALAALIFIGYIVYDTGNIIKRYKYDEYVWAAVTLYLDIINLFLGLMTLFRAGDS

SEQ ID NO: 1416 - protein, 342 aa, Corynebacterium diphtheriae NCTC 13129
MRIATLTSGGDCPGLNAVIRGIVRTCSEYGSTVVGYQDGWVGLMEDKRIQLYDDENIDRILLRGGTILGTGRLHPDKFKSGLDQIKANLEDAGIDALIPIGGEGTLKGAKWLSDNGIPVVGVPKTIDNDVNGTDYTFGFDTAVSVATDAIDRLHTTAESHNRVMIVEVMGRHVGWIALHAGMAGGAHYTVIPEQPFDIAEICKAMERRFQMGEKYGIIVVAEGALPKEGTMDFVEGGVDQFGHQTFNGIGQVIGEEIKKRLGHDVRTTVLGHIQRGGTPTSYDRVLATRYGVHAARACHNGDYGKMVALHGEHIDLIPLEDAVDTLKTVPEGRYRTARALFG

SEQ ID NO: 1417 - protein, 118 aa, Glycine max
MAISMISSRADTTVNRAGAGMVATFTGLKFMAGLPTRKTNNDITSIASNGGRVQCMQVWPPIVKNKFETLSYLPDLDDSQLAKEVEYLIMKRWIPCLEFELEHGFEYREHNRSPGYYD

SEQ ID NO: 1418 - protein, 450 aa, Xanthomonas axonopodis pv. citri str. 306
MPDHLPSDAADALQAPTQLDAFWMPFTANRQFKARPRLLASAQGMYYRDVQGRQILDGTAGLWCCNAGHSRERIVAAIRDQAGTLDFAPTFQMGSPLPFVLAQRLAAIAPPGLGHVFFTNSGSEAVDSAMKIVLAYHRLRGEGQRTRFIGREKAYHGVGFGGMSIGGLPNNRKWFGPLLAGTDHLPHTLDLQHNAYARGLPVHGAELADDLERLITLHDASTIAAVFVEPVSGSAGVILPPEGYLQRLRAICDRHGIVLVFDEVITGFGRVGDAFAAQRFGVIPDIITAAKGLTSGTVPMGAVLVADAIHDAFMHGPQNAIELFHGYTYSGHPLACAAAIATLDTYAEEELFTRAITLGPQWEDALHGLRGSPHVIDIRNIGLIGAIELAPRDGAPGARGYDVFERCFHEGGLLVRVTGDVIALSPPLIVTPEQIGQMVETLGKILRQVD

SEQ ID NO: 1419 - protein, 353 aa, Burkholderia cepacia R18194
MTAVVCHGPEDYRVEQVAKPRPGANELVIRIAACGICASDCKCYTGAKMFWGGPSPWVKAPVIPGHEFFGYVEALGDGAAEHFGVAVGDRVIAEQIVPCGKCRYCKSGQYWMCEVHNIFGFQREVADGGMAEYMRIPPTAIVHRIPLGVSLEDAAIIEPLSCAIHTVNRGDVQLDDVVVIAGAGPLGLMMTQVAHLKTPKKLVVIDLIDERLELAREYGADVTINPKRDDAREIVRSLTDGYGCDVYIETTGAPVGVSQGLDLIRKLGRFVEFSVFGEDATVDWSIIGDRKELDVRGAHLGPYCYPIAIDLLARGLVTSKGIVTHDFALEDWDDAIRVAKSPESIKVLLKPAR

SEQ ID NO: 1420 - protein, 458 aa, ASPERGILLUS NIDULANS FGSC A4
MPFHADIPQFQPTNDDIERTQAEKKHKETPTMAVDEQKAESVPYRQDVFGDEEHAEVKYKVLKWWQCGLLMVAETISLGILSIPAAIAGLGLVPAIVILLVMGLIASYTGYVIGQFKWRYPHVVSMADAGEVLMGRFGREVLFGGQMLFLIFLMASHILTFTVAMNRLTNHGTCSLVFGVIGLLVSLVFSLPRTMKNMSWLSLASFISIFTAVMIAMVAIGVEHPGGPVKATAETNLVTGFTAALNIILSYASHNAFFNVIAELKEPRDFPKALTLLQCIDITLYLVSGVVIYYFAGDDVKSPALGSINPLVSKVAYGVALPTIIIAGVINGHIACKSIYTRVFAGTSHMHKQDFRAVGSWIGIAVGLWVIAWVVATAIPVFSNLLSLMTALFASWFSFSLPAAFWLFMNRGLWFSSPRKTGITIFNCLVFGMGVVMSLGTILLACICVSSGNGKSSS

SEQ ID NO: 1421 - protein, 170 aa, Fusarium oxysporum f. sp. lycopersici
MSESTSTQKVWLASNDSATIEVDRVVAERSMLIKNMLEDIGDEGINAENPIPIPNVNEAVLRKVIEWCDHHRNDPLQAQDDDSDARKKTTDIEEWDQKFMQVDQEMLFEIILASNYLDIKPLLDVGCKTVANMIKGKSPEEIRKTFNITNDFTPEEEEQIRRENEWAEDR

SEQ ID NO: 1422 - protein, 339 aa, Escherichia coli K12
MKSILIEKPNQLAIVEREIPTPSAGEVRVKVKLAGICGSDSHIYRGHNPFAKYPRVIGHEFFGVIDAVGEGVESARVGERVAVDPVVSCGHCYPCSIGKPNVCTTLAVLGVHADGGFSEYAVVPAKNAWKIPEAVADQYAVMIEPFTIAANVTGHGQPTENDTVLVYGAGPIGLTIVQVLKGVYNVKNVIVADRIDERLEKAKESGADWAINNSQTPLGEIFTEKGIKPTLIIDAACHPSILKEAVTLASPAARIVLMGFSSEPSEVIQQGITGKELSIFSSRLNANKFPIVIDWLSKGLIKPEKLITHTFDFQHVADAISLFEQDQKHCCKVLLTFSE

SEQ ID NO: 1423 - protein, 154 aa, Triticum aestivum
  unsure (1)..(154): unsure at all Xaa locations
MAPTVMASSATSVAPFQGLKSTAGLPVSRRSNGASLGSVSNGGRIRCMQVWPIEGIKKFETLSYLPPLSTEALLKQVDYLIRSKWVPCLEFSKVGFIFREHNASPGYYDGRYWTMWKLPMFGCTDAXQVINEVEESRRSXPDAYVRSSDHNVGW

SEQ ID NO: 1424 - protein, 421 aa, Bacillus halodurans C-125
MDSIALMDNVWIMLCAVLVLLMQGGFILLEAGSTRMKNAGHIAGKTIFTVGIASLVYWAVGWGFTYGEGNAFIGLSDFFFGDYSTAEEGLVGSVDFFFQLMFAAIALTIAFGGFAERAKLSVYILFAVLFSAFVYPIVAHWIWGDGWLADLGKQDFAGSTVVHLTGAMGALAATILLKPRLGKYNKDGSMNDIQGHNQVYTALGVLLLWVGWFGFNAGSTLEVADAFFGYVALNTQLAAAAGAVAAMFIAWALSGKADVPTTLNGALAGLVAITASCAFVAPWAAVVIGIVGGLIVYFSMKFFDKAKIDDPIFALSVHGVAGVWGTLSTGFFATPELAEMNGGQAGLFYGGGFAQLGVQTLSVVACGVFAFIASYVLLLVCKSVLGGLRVTEEEEIIGLDLSEHGSYGYPESMPGSEKSGA

SEQ ID NO: 1425 - protein, 459 aa, Rhodobacter sphaeroides 2.4.1
MEGLAQANDLSEVIEADRAHMWHHLSQHKQYETVDPRIIVEGKGMRVWDAAGKEHLDAVSGGVWTVNVGYGRESIANAVRDQLIKMNYFAHSAGSIPASRFSKRLIEKMPGLSRVYYSNSGSEANEKVFKMVRQISHRHHGGKKGKILFRERDYHGTTITALATSGQPQRAEQYGPLTPGFVMVPHCLEYRKQWDVENYGERAADAIEEVILREGPDTIGALCLEPVTAGGGVIVPPAGYWERVQEICRKYDILLHIDEVVCGLGRTGTWFGYQNFGVKPDFVTMAKGVASGYAAISCTVTTEAVFDMFKDDPSDPMSYFRDISTFGGCTAGPVAALENMRIIEDEGLLENTLKMGARVVENLSALQEKHAVIGDVRGKGLFCGAELVADRATKEPMDEKRVAAVVADVMAQGVIIGMTNRSLPGFNNTLCLSPALIATPDDIDQITDAIDRALTRVFG

SEQ ID NO: 1426 - protein, 163 aa, Saccharomyces cerevisiae
MSEFYKLAPVDKKGQPFPFDQLKGKVVLIVNVASKCGFTPQYKELEALYKRYKDEGFTIIGFPCNQFGHQEPGSDEEIAQFCQLNYGVTFPIMKKIDVNGGNEDPVYKFLKSQKSGMLGLRGIKWNFEKFLVDKKGKVYERYSSLTKPSSLSETIEELLKEVE

SEQ ID NO: 1427 - protein, 213 aa, Triticum aestivum
  unsure (1)..(213): unsure at all Xaa locations
MSPSAVEGNGVVDVKTTLKPNVGVYTNPNHDLWVAPAEPSAEAVKSGSDLKQGEVSVAIRSTGICGSDVHFWHAGCIGPMIVEGDHILGHESAGEVIAVHPSVSHLKVGDRVAVEPNIPCGTCEPCLTGRYNGCETVQFLSTPPVPGMLRRYINHPAVWCHKIGNMSYENGALLEPLSVALAGMQRAEVRLGDPVLICGAGPIGLITLQXCAA

SEQ ID NO: 1428 - protein, 158 aa, Salmonella typhimurium LT2
MKLISNDLRDGDKLPHRHVFNGMGYDGDNISPHLAWDNVPMGTKSFVVTCYDPDAPTGSGWWHWVVVNLPADTRVLTQGFGSGLVAVPDGVIQTRTDFGKAGYGGAAPPKGETHRYIFTVHALDVERLDVDEDASGAMVGFNVHFHSLASASITAMFS

SEQ ID NO: 1429 - protein, 389 aa, Escherichia coli
  unsure (1)..(389): unsure at all Xaa locations
TLQNGKLNVPENPIIPYIEGDGIGVDVTPAMLKVVDAAVEKAYKGERKISWMEIYTGEKSTQVYGQDVWLPAETLDLIREYRVAIKGPLTTPVGGGIRSLNVALRQELDLYICLRPVRYYQGTPSPVKHPELTDMVIFRENSEDIYAGIEWKADSADAEKVIKFLREEMGVKKIRFPEHCGIGIXXXXXXXXXXXVRAAIEYAIANDRDSVTLVHKGNIMKFTKGAFKDWGYQLAREEFGGELIDGGPWLKVKNPNTGKEIVIKDVIADAFLQQILLRPAEYDVIACMNLNGDYISDALAAQVGGIGIAPGANIGDECALFEATHGTAPKYAGQDKVNPGSIILSAEMMLRHMGWTEAADLIVKGMEGAINAKTVTYDFERLMEGAKLL

SEQ ID NO: 1430 - protein, 363 aa, Oryza sativa (japonica cultivar-group)
MMYKHVGDDARGSSAGVVCCVDVVDDDVDALLCGEDAGELEREGEPAQGSSPSSSLSCAAAAAAAADDDDEDEDEHGVHGEVVQVTPGGEEHCYDYDYDVDVPVGAELVMPACSPPRTAVHRPGWSESVSWILKVRSVHGFQPATAYLAVSYMDRFMSSRSLPDHGWASQLLCVACLSLAAKMEESSAPPLLDLQIEGTRFIFEPRTIQRMELIVLVELDWRLRSVTPFAFVDFFACKVGSSGRSSRILALRACQIILSAIHELEFLNHCASSMAAAAVLFAVNESPAAMSHRSSVSSESAASWCIGLTEERISSCYQLLQRALNATARKRKRHPMILAACSSVTSSSSRSKRRKLDGHFGED

SEQ ID NO: 1431 - protein, 345 aa, Streptomyces argillaceus
MTNTPAAAPSPADAREILQLNVAYTRARVLHTAMELGLFEYLSAGPRTEAEIREHGRLHSHLVRDWLDALVGLGLLTADGGTYANTPRAEHFLVPGHPHYIGGAVLQHGRVHYELWNRFADALRDGKATSGKDITAGAVVEEQPDLDRARRFLDHMDTFNQFVVAELSKALDWSRWKTFVDVGGARGNVAAQLVLDHPDLKGSVFDVPGVEPLFDEHMAARGTTGRVDFVGGDFFTDALPAADVVLFGHVLHDHPEESRKRLLGQAFRALPPGGTLLVYDAMLDDRSEAGAYLQSLVCSVILDGGSEYRVRDITAWAEETGFTVEQVVPLDTMTHDRLFVARKPG

SEQ ID NO: 1432 - protein, 389 aa, Escherichia coli
  unsure (1)..(389): unsure at all Xaa locations
TLQNGKLNVPENPIIPYIEGDGIGVDVTPAMLKVVDAAVEKAYKGERKISWMEIYTGEKSTQVYGQDVWLPAETLDLIREYRVAIKGPLTTPVGGGIRSLNVALRQELDLYICLRPVRYYQGTPSPVKHPELTDMVIFRENSEDIYAGIEWKADSADAEKVIKFLREEMGVKKIRFPEHXGIGIXXXXXXXXXXXXXXXXXYAIANDRDSVTLVPKGNIMKFTEGAFKDWGYQLAREEFGGELIDGGPWLKVKNPNTGKEIVIKDVIADAFLQQILLRPAEYDVIACMNLNGDYISDALAAQVGGIGIAPGANIGDECALFEATHGTAPKYAGQDKVNPGSIILSAEMMLRHMGWTEAADLIVKGMEGAINAKTVTYDFERLMEGAKLL

SEQ ID NO: 1433 - protein, 258 aa, Arabidopsis thaliana
MFLKVHEIAFLFGLLGNIVSFGVFLSPVPTFYGIYKKKSSKGFQSIPYICALASATLLLYYGIMKTHAYLIISINTFGCFIEISYLFLYILYAPREAKISTLKLIVICNIGGLGLLILLVNLLVPKQHRVSTVGWVCAAYSLAVFASPLSVMRKVIKTKSVEYMPFLLSLSLTLNAVMWFFYGLLIKDKFIAMPNILGFLFGVAQMILYMMYQGSTKTDLPTENQLANKTDVNEVPIVAVELPDVGSDNVEGSVRPMK

SEQ ID NO: 1434 - protein, 511 aa, ASPERGILLUS NIDULANS FGSC A4
MADLFVDLVAPNGTHYSQPTGLFINNAFVASSGQTITSLDPATDKPIATVHAASAEDVDRAVIAARAALVHPSWKKLPGTERGQLMARLADLMEKNKELFATIDAWDNVLSLTEKSGKPYHIALSEDLVEAIGTIRYYSGWADKTFGQTISTTPAKFAYTIRQPVGVVGQIIPWNYPLSMACWKLGPALACGNTVVLKPAEQTPLSVLVLGSLIKEAGFPPGVVNIVNGYGREAGAALAGHPLIDKIAFTGSTVTAREIMKLAAGTLKNITLETGGKSPLLVFPDADLEQAVKWSHFGIMSNQGQICTATSRIYVHQDIFQLFLSKFKAAVETTSKIGDQWDESTFQGPQITRAQYDRILSYIETAKKGGMAVVTGGSAHAPSSEKNKDGYFIQPTVFTGTDDSHAIVREEVFGPVVVILPFASEEEAIRRANDTTYGLGAAVFTCDLERAHRVAAEIEAGMVWVNSSQDCDPRVPFGGVKQSGIGRELGEAGLEAYTQVKAVHVNMGNKL

SEQ ID NO: 1435 - protein, 160 aa, Glycine max
AMSIDPKWKMIRPDLGRIEKWVLRNAFDDDKNPYLPKHILYRQKEQFSDGVGYSWIDGLKDHANKQVTDATMMAANFIYPENTPTTKEGYLYRTIFEKFFPKNSAKATVPGGPSVACSTAKAVEWDASWSKNLDPSGRAALGVHAAAYDGAVDTTKNGPL

SEQ ID NO: 1436 - protein, 366 aa, Cryptococcus neoformans var. neoformans
MTIDQSQINFNVPSTYKLEEIVGEGAYGLVVAGTHLPSGTQVAIKRITPFDHTMFCQRTLREIKLLRHFHHENIISILDLIQPESYEVFNEVYLVQELMETDLHRVIRSQELSDDHCQYFVYQTLRGLKALHSADVLHRDLKPSNLLLNANCDLKICDFGLARSSAKPPPGTSDGGQGFMTEYVATRWYRAPEVMLSFQEYTKAIDLWSVGCILAEMINGKPLFPGRDYHHQLSLILQVLGTPTMDDFNEITSQRSKDYLRALEFTRRQDFSAICPKAKPAAVDLLKQTLTFSPSKRITVEEALMHSYVEAYHDPHDEPNAEPLKPGFFDFEFHQEKLSRDQWKRMIYDEVQDPVPTILSQWTESH

SEQ ID NO: 1437 - protein, 389 aa, Escherichia coli
TLQNGKLNVPENPIIPYIEGDGIGVDVTPAMLKVVDAAVEKAYKGERKISWMEIYTGEKSTQVYGQDVWLPAETLDLIREYRVAIKGPLTTPVGGGIRSLNVALRQELDLYICLRPVRYYQGTPSPVKHPELTDMVIFRENSEDIYAGIEWKADSADAEKVIKFLREEMGVKKIRFPEHCGIGIKPCSEEGTKRLVRAAIEYPIANDRDSVTLVHKGNIMKFTEGAFKDWGYQLAREEFGGELIDGGPWLKVKNPNTGKEIVIKDVIADAFLQQILLRPAEYDVIACMNLNGDYISDALAAQVGGIGIAPGANIGDECALFEATHGTAPKYAGQDKVNPGSIILSAEMMLRHMGWTEAADLIVKGMEGAINAKTVTYDFERLMEGAKLL

SEQ ID NO: 1438 - protein, 144 aa, Brassica napus
MKKIISLVRNVHSRQCQPKLNWSAQVRFLQQDTVSKPKPNKYKYPSFYDPYGPRPQPSSKIVELAERIAALSPEERKQIGPALNEHLRLPKQQMISTQGMMSVGAKQEAGAGKVGDCCEEPCDQRSESVFDTAAKIKVIKEVRA

SEQ ID NO: 1439 - protein, 161 aa, Bacillus cereus ATCC 10987
MTVYDFSAKTITGEEKSLKDYEGKALLIVNVASKCGFTPQYKGLQEVYDKYKEQGLEILGFPCNQFGGQEPGTEADITSFCELNYGVNFPMFAKIDVKGDKAHPLYTYMTEQAPGLLGMKAVKWNFTKFLIGKDGKVVGRFAPQTKPVDLEVEIEKVLGNN

SEQ ID NO: 1440 - protein, 294 aa, Saccharomyces cerevisiae
MKTLVHVASVEKGRSYEDFQKVYNAIALKLREDDEYDNYIGYGPVLVRLAWHISGTWDKHDNTGGSYGGTYRFKKEFNDPSNAGLQNGFKFLEPIHKEFPWISSGDLFSLGGVTAVQEMQGPKIPWRCGRVDTPEDTTPDNGRLPDADKDAGYVRTFFQRLNMNDREVVALMGAHALGKTHLKNSGYEGPGGAANNVFTNEFYLNLLNEDWKLEKNDANNEQWDSKSGYMMLPTDYSLIQDPKYLSIVKEYANDQDKFFKDFSKAFEKLLEDGITFPKDAPSPFIFKTLEEQGL

SEQ ID NO: 1441 - protein, 288 aa, Escherichia coli CFT073
MAEKKQWHETLHDQFGQYFAVDNVLYHEKTDHQDLIIFENAAFGRVMALDGVVQTTERDEFIYHEMMTHVPLLAHGHAKHVLIIGGGDGAMLREVTRHKNVESITMVEIDAGVVSFCRQYLPNHNAGSYDDPRFKLVIDDGVNFVNQTSQTFDVIISDCTDPIGPGESLFTSAFYEGCKRCLNPGGIFVAQNGVCFLQQEEAIDSHRKLSHYFSDVGFYQAAIPTYYGGIMTFAWATDNDALRHLSTEIIQARFLASGLKCRYYNPAVHTAAFALPQYLQDALASQPS

SEQ ID NO: 1442 - protein, 453 aa, Zea mays
  unsure (1)..(453): unsure at all Xaa locations
MWNGYVNNDDRALLKVIKYSSPTSAGAECVDLDCSWVEQWVHRAGPRKEIYYEPEEVKAAIVTCGGLCPGLNDVIRQIVFTLETYGVKNIVGIPFGYRGFFEKGLKEMPLSRGLVENINLNGGSFLGVSRGGAKTSEIVDSIQARRIDMLFVLGGNGTHARDHYLEHPNRKSIYIPHNXCRKRKLKVSVVAVPKTIDNDILLMDKTFGFDTXVEEAQRAINSAYIEARSAYHGIGLVKLMGRSSGFIAMHASLSSGQVDVCLIPELLLCLKLPYVFLSHVSTNRSLQVTIXMKVPFTLDGEFGVLRQLEHLLKSKGFCVVCVAEAAGQDLLQESGATDASGNVILSDIGVHMQQKIKMHFKDIXVPADVKYIDPTYMVRACRANASDAILCTVLGQNAVHGAFAGFSGITSCICNTHYVYLPITEVITAPKRVNPNSRMWHRCLTSTGQPDFH

SEQ ID NO: 1443 - protein, 492 aa, Triticum aestivum
MDQPPDGFAAGGLFVQHIDGQKASPPAVIVRRGGISGIASARALSNASFKVTLLESRERLGGRVHTDYSFGCPIDMGASWLHGVCNENSLAPLIRLLGLRLYRTSGDNSVLYDHDLESYALFDKDGRQIPQEIVTKVGEIFEQILKETVKVRDEYANDMPLVQAISMVLDRNPHLKLEGLQYEVLQWCICRLEAWFATDVDNISLKNWDQEHVLTGGHGLMVNGYDPVIKALSRDLDVHLNHRVTKIIQRYNKVIVCVEDGTSFVADAAIITVPLGVLKANIIKFEPELPDWKLSAISDLGVGLENKIALRFNTIFWPNVEVLGRVAQTSNACGYFLNLHKATGHPVLVCMVAGRFAYEMEKLSDEESVNFVMSQLRRMLPGATEPVQYLVSRWGTDPNSLGSYSCDLVGKPADLYERFCARVGNLFFAGEAACIDHSGSVHGAYSSGIDAAEDCRRRLSTQLGISDLFQVGKIVMREEMTEVMVPLQISRL

SEQ ID NO: 1444 - protein, 135 aa, Methanocaldococcus jannaschii
VIIMPGTKQVNVGSLKVGQYVMIDGVPCEIVDISVSKPGKHGGAKARVVGIGIFEKVKKEFVAPTSSKVEVPIIDRRKGQVLAIMGDMVQIMDLQTYETLELPIPEGIEGLEPGGEVEYIEAVGQYKITRVIGGK

SEQ ID NO: 1445 - protein, 341 aa, Aspergillus niger
MKVDTPDSASTISMTNTITITVEQDGIYEINGARQEPVVNLNMVTGASKLRKQLRETNELLVCPGVYDGLSARIAINLGFKGMYMTGAGTTASRLGMADLGLAHIYDMKTNAEMIANLDPYGPPLIADMDTGYGGPLMVARSVQQYIQAGVAGFHIEDQIQNKRCGHLAGKRVVTMDEYLTRIRAAKLTKDRLRSDIVLIARTDALQQHGYDECIRRLKAARDLGADVGLLEGFTSKEMARRCVQDLAPWPLLLNMVENGAGPVISVDEAREMGFRIMIFSFACITPAYMGITAALERLKKDGVVGLPEGMGPKKLFEVCGLMDSVRVDTEAGGDGFANGV

SEQ ID NO: 1446 - protein, 161 aa, Lactobacillus plantarum WCFS1
MAESVYDFTETEMSGAPLDLSQYRGQVLLIVNTASNCGLAPQFKGLEELYQKYQQEGLVVLGLPSNQFHQEKADDDETHDYCQRHYGVTFPMTKRVMVNGDDADPLFTYLKQAAGHGRIKWNFTKFLIGRDGRVLERYAPTTRPATFEAAIRDALADRSED

SEQ ID NO: 1447 - protein, 276 aa, Lactobacillus plantarum WCFS1
METYTLRDGLTVPKIGFGTYKLNGAHGVQVIDSAIDRGYRLLDTAFNYENEGAVGKAVRRSSVPRSELLISSKLPGRHHTYTEAINTIQESLYRAGLDYYDLYLIHWPNPKEDHYVEAWQALINAQKLGLIRSIGVSNFLPEHLERLNKETGVLPVINQVELHPYFNQQAQRDYDQAHGILTQDWSPLGRASEMLQNETLKEIAVHYHKNVGQLILRWELQLGTLPIPKSSTPSRQAGNMDVFDFEISAADMATINGLSQVDGRLNNQDPAVYQEF

SEQ ID NO: 1448 - protein, 250 aa, Saccharomyces cerevisiae
MSQEEKVDAKATLKTEISNNKKNDKQELELDELVGKLSIEGTPQVSQKLSKEEKHAHQLEADSRSIFVGNITPDVTPEQIEDHFKDCGQIKRITLLYDRNTGTPKGYGYIEFESPAYREKALQLNGGELKGKKIAVSRKRTNIPGFNRHYNSQNQYFQQWQWNYPLMAYPNPDTFPYYPPYPPNQSPNQNFGYNKNNYYRSPYNNKNRTFQKKHFNSAKDSTKNIRSTSQKPVVMPSDNVKSSTQEKDSK

SEQ ID NO: 1449 - protein, 510 aa, Glycine max
MGSDNHQNLEFLKEIGLGSSNIGSYINGQWKATGSSVTSVNPSNNQSIAQVTEATLQDFEEGLRACSEAAKTWMTIPAPKRGEIVRQIGEALRAKLDPLGRLVSLEMGKILPEGIGEVQEIIDMCNYGVGLSRQLNGSIIPSERPDHMMFEVWNPLGIVGVISAFNFPCAVLGWNACIALVCGNCVVWKGAPTTPLITIAVTKLVAEVLERNKLPGAIFTSFCGGADIGQAIAKDTRIPLVSFTGSSKVGLMVQQTVNERFGKCLLELSGNNAIIVMDDADSNWLYVYFGCCCGSTGQPVYTWPCRRLFLHESIYTDVLDQLVEVYKQVKTGNPLEKGTLVGPLHTRTSVENFQKGISVIKSQGGKILTGGSVLESGGNFVQPTIVEISPDAPVVKEELFGPVLYVMKFQTLDEAIALNNSVPQGLSSSIFTQRPGTIFKWIGPRGSDCGIVNANIPTNGAEIGGAFGGEKATGGGREAGSDSWKQYMRRSTCTINYGSELPLAQGINFG

SEQ ID NO: 1450 - protein, 235 aa, Sandersonia aurantiaca
MSGYLPFDEPNILALYKKIWKANFSFPSWFSSGAKKLIKRILDPNPHTRITIPEILEDEWFKKGYMPPHFQQGEEVNLDDIDAVFNDSKEHLVTEKKEKPESMNAFALISRSQVFDLGNLFEKQRGLIKRETRFTSQCPPNEILSKIEETAKPLGFNVRKHNYKMNLQGDKTGRKGHLSVATEVFEVAPSLHMVELRKTGGDTLEFHKFYKNFSSGLKDIVWKAEALPEQEETRS

SEQ ID NO: 1451 - protein, 231 aa, Rubrobacter xylanophilus DSM 9941
MSPDGMERLKRAAAREAVDRYVESGMVVGLGTGTTASWAVRRIGERLLEGSLSGVRGVPTSEYTAALARECGVPLVSLSERRPELTIDGADEIAPDLSVIKGRGGALLREKIVAAASRRGVVIVADGSKQVSLLGNGPLPVEVEPFGWEATAEALAALGCEPELRRVKTQPFVTDGGHYTLDCRFPGIPDPPGLACKIKRVPGALECGLFVGLARAAVIARPEGVEVLEAA

SEQ ID NO: 1452 - protein, 207 aa, Zea mays
  unsure (1)..(207): unsure at all Xaa locations
ARADEEWPRIGRNMVAPLLVLNLIMYIIVIGFASWNLNHFINGQTNYPXAWRGNGATFYFLVFAILGPAWWGAASKLAGVXHVRAWRHDSLATXTPASSLIAWAITALAFGXLACKEIHIGGHRGWXRLRRAGGPFVIILAFTXLLYVLMLHTGPSSAGXGGYRDHDYXGVGGAAGEPKGVTQGLEDSDRCSSYMCHHIRRCWSVMT

SEQ ID NO: 1453 - protein, 378 aa, Mycobacterium leprae TN
MARDYYGLLGVSRNASDADIKRAYRKLARELHPDINPDEAAQAKFKEISMAYEVLSDPEKRRIVDLGGDPMENAAASPSGFGGFGGLGDVFEAFFGGSSASRGPIGRVRPGSDSLLPMWLDLEECATGVTKQVTVDTAVLCDRCQGKGTNGDSAPIPCDTCGGRGEVQTVQRSLLGQMVTARPCPTCRGVGVVIPDPCCQCVGDGRVRARREITVKIPSGVGDGMRVRLAAQGEVGPGGGPAGDLYVEVHEQAHDIFVRDGDDLHCTVSVPMVDAALGTTITVDAILDGMSEIDISPGTQPGSVIELRGQGMPHLRSNTRGNLHVHVEVMVPTRLDQHDTELLRELKRRRSRDVAEVRSTHAAGGGLFSRLRETFTNR

SEQ ID NO: 1454 - protein, 359 aa, Triticum aestivum
TAARGVRERKVRDMVGYFRCHAGEEVDVGQAVYGGVLNLVSSAFFSVDVVDVGSESASGLREVLEDIIAALAKPNVSDIFPFLRPLDLQGWRRWAGARYQKVFGILDGIVDRRLADARTSTTGHAHGNFLDSLLELVSAGKIGRDKVTVILFDVFAAGTDMMAITVEWAMAELLRHPHAMAKVHAEMEDILGGKDTDTLEEPDAANLPYLQAVVKEVMRLHPVAPIMLPHQAAEDGVEIGGFAVPRGATVIFNVWAIMRDSAAWERPDEFVPERFLDKSAAVEFRGKDYEFIPFGSGRRLCPGLPMAERVVPFVLASLLHAFEWRLPGGVAADELDVAERFTTVNTLAVPLRAVPVVVT

SEQ ID NO: 1455 - protein, 389 aa, Escherichia coli
TLQNGKLNVPENPIIPYIEGDGIGVDVTPAMLKVVDAAVEKAYKGERKISWMEIYTGEKSTQVYGQDVWLPAETLDLIREYRVAIKGPLTTPVGGGIRSLNVALRQELDLYICLRPVRYYQGTPSPVKHPELTDMVIFRENSEDIYAGIEWKADSADAEKVIKFLREEMGVKKIRFPEHCGIGIKPCSEEGTKRLVRAAIEYAIANDRDSVTLVHKGNIMKFTEGAFKDWGYQLAREEFGGELIDGGPWLKVKNPNTGKEIVIKDVIADAFLQQILLRPAEYDVIACMNLNGDYISDALAAQVGGIGIAPGANIGDECALFEATHGTAPKYAGQDKVNPGSIILSAEMMLRHMGWTEAADLIVKGMEGAINAKTVTYDFERLMKGAKLL

SEQ ID NO: 1456 - protein, 384 aa, Mycobacterium avium subsp. paratuberculosis str. k10
MSNTMSKTTSPITANLGDTKRPVVAGAERHPGWHALRKLAARITTPLLPDDYLHLANPLWSARELRGRVVDVRRETEDSATLVIKPGWGFNFDYQPGQYIGIGLLIDGRWRWRSYSLTSSPATSASARTVTITVKAMPEGFLSSHLVAGVEPGTVVRLAAPQGNFVLPDPAPASILFLTAGSGITPVMSMLRTLVRRNQIGDIVHLHSAPTEADVMFRGELAALANEHPGYRLQLRETRTRGRLDLSLLDREVPDWRERQTWACGPEGMLNAAERVWSAAGIGEQLHLERFAVSKAAPAGAGGMVTFARSGRSVDADAATSLMDAGEAAGVQMPFGCRMGICQSCVVGLVEGHVRDLRTGAEHEPGTRVQTCVSAASGDCVLDI

SEQ ID NO: 1457 - protein, 257 aa, Triticum aestivum
PRFRIWESFLELSAPSNLMPVTLELGGKSPFIVMDDADIDQAVELAHFALFFNQGQCCCAGSRTFVHERVYDEFVEKSKARALKRVVGDPFRKGVEQGPQIDDEQFKKILRYIKSGVDSGATLVTGGDKLGDKGYYIQPTIFSDVQDGMKIAQEEIFGPVQSIFKFNDLNEVIKRANASQYGLAAGVFTNNLDTANTLTRALRAGTVWVNCFDIFDAAIPFGGYKMSGIGREKGIDSLKNYLQVKAVVTALKNPAWL

SEQ ID NO: 1458 - protein, 389 aa, Escherichia coli
TLQNGKLNVPENPIIPYIEGDGIGVDVTPAMLKVVDAAVEKAYKGERKISWMEIYTGEKSTQVYGQDVWLPAETLDLIREYRVAIKGPLTTPVGGGIRSLNVALRQELDLYICLRPVRYYQGTPSPVKHPELTDMVIFRENSEDIYAGIEWKADSADAEKVINFLREEMGVKKIRFPEHCGIGIKPCSEEGTKRLVRAAIEYAIANDRDSVTLVHKGNIMKFTEGAFKDWGYQLAREEFGGELIDGGPWLKVKNPNTGKEIVIKDVIADAFLQQILLRPAEYDVIACMNLNGDYISDALAAQVGGIGIAPGANIGDECALFEATHGTAPKYAGQDKVNPGSIILSAEMMLRHMGWTEAADLIVKGMEGAINAKTVTYDFERLMEGAKLL

SEQ ID NO: 1459 - protein, 389 aa, Escherichia coli
TLQNGKLNVPENPIIPYIEGDGIGVDVTPAMLKVVDAAVEKAYKGERKISWMEIYTGEKSTQVYGQDVWLPAETLDLIREYRVAIKGPLTTPVGGGIRSLNVALRQELDLYICLRPVRYYQGTPSPVKHPELTDMVIFRENSEDIYAGIEWKADSADAEKVINFLREEMGVKKIRFPEHCGIGIKPCSEEGTKRLVRAAIEYPIANDRDSVTLVHKGNIMKFTEGAFKDWGYQLAREEFGGELIDGGPWLKVKNPNTGKEIVIKDVIADAFLQQILLRPAEYDVIACMNLNGDYISDALAAQVGGIGIAPGANIGDECALFEATHGTAPKYAGQDKVNPGSIILSAEMMLRHMGWTEAADLIVKGMEGAINAKTVTYDFERLMEGAKLL

SEQ ID NO: 1460 - protein, 160 aa, Neurospora crassa
MLTGEMLTLDFLLLTCLLISYTTNAFPGEYIPTVFDNYSASVMVDGKPVSLGLWDTAGQEDYDRLRPLSYPQTDVFLICFSLWHPEIQHHAPGIPIILVGTKLDLREDPDTIQSLSQKRMAPITFEMGVNCAKEIGARKYLECSALTQRNLKSVFDEAIR

SEQ ID NO: 1461 - protein, 234 aa, Hordeum vulgare subsp. vulgare
MATIYDIGLGAGFNILMATIFLLIFAFLRLQPINDRIFFPKWYLKGMRDSPSSAGAAVTKYVNLNVRSYLKFLSWMPAALKMPEEELIEHAGLDSVVYLRIYLTGLKIFVPITILAFAVLVPVNWTNDTLEGLKVVHSDIDKLSISNIPYGSKRFIAHLVMAYVFTFWTCYVLKNEYERVATMRLRFLASEKRRPDQFTVLVRNIPPDPDESVSELVEHFFLVNHPDHYLKHQV

SEQ ID NO: 1462 - protein, 343 aa, Triticum aestivum
  unsure (1)..(343): unsure at all Xaa locations
MKTLLILTILAMAITISTANMQVDPSGQVQWPQQQLVPQPQQPLSQQPQQAFPQPQQTFPHQPQQQVPQPQQPQQPFLQPQQAFPQQPQQPFPQTQQPQQPFPQQPQQPFPQQPQQPFPQTQQPQQPFPQQPQQPFPQTQQPQQPFPQFQQPHQPFHQPQQQFPQPQQPQQSFPQQQRPFIQPSLQQRLNPCKNILLQQCKPASLVSSLWSIIWPQSDCQVMQQQCCXQELAQIPQQLQCAAIHSVVHSIIVQQQQQQQQQQQQQQQQGMHILLPLSQQQQLGQGTLVQGQGIIXQPQQLAQLEAIRSLVLQTLPTMCNVYVPPECSIIRAPFASIVAGIGGQ

SEQ ID NO: 1463 - protein, 490 aa, Erwinia carotovora subsp. atroseptica SCRI1043
MQLKQSISLKQQVLFRQHCLIDGEWQDSQSGERLNVTNPATGEVLGTVPLVTVSQTEQAIAAAEQALVEWRKKTGKERAALLQAWARLIMDNQDDLAVLLTAEQGKPLAEARGEIAYATSFIDWFAEEAKRIEGSVLQSPQGQQRLMVIKQPIGVCAAITPWNFPAAMITRKVGPALAAGCTMIVKPAEQTPFTALALAELAQQAGIPRGVLQVIVGDAQSVGKVLCDSPVVRKLSFTGSTEVGRILMAQSAPTVKKLSLELGGNAPFIVFDDADVDQAVKGILASKFRNSGQTCVCANRIYVQNGIYPTLVERLIEEVRKLNVGDGTQPGVTQGPLIDDDAVSKVEQHIADALSHGATLLLGGQRHERGGTFFTPTIVGDVTREMRFAREETFGPVAPLFRFSDEAEVIAMANDTEFGLAAYVYTRDAIRQWTVPEALDYGMVGINTGLISNEVAPFGGVKQSGLGREGSRFGIEDYLEMKYLCVDLSR

SEQ ID NO: 1464 - protein, 287 aa, Glycine max
MLMDSPSRSSVIIVGAGISGIAAAKVLAENGVEDLVILEASDRVGGRICKESFGGVTVELGAGWIAGVGGQQPNPIWELAAQFELRTCFSDYSNARYNIYDRSGNIIPSEIAADSYKKAVDSAIQKLRNQEEEEEAYGDDHCNNNIKNSETKLPSTPETPIELAIDFILHDFEMAEVEPISTYVDFGEREYFVADERGYDYLLYKMAEEFLFTSKGRILDNRLKLNKVVRELQYSKSGVTVKTEDGCVYETNYVILSVSIGVLQSDLLAFNPPLPVRLLFFVQLSLA

SEQ ID NO: 1465 - protein, 210 aa, Zea mays
MFGYRKADPDLEAGGSSLLYPGMTESPVSNFFVSSNAGVALYIFLIILPFLVLCPLRYYHQKHPVNLLLLGLFTVAISFAVGMTCAFTSGKIILEAAILTAVVVISLTAYTFWAAKRGHDFNFLGPFLFAAIMVLMVFSLIQIFFPLGKISVMIYGGLASLIFCGYIIYDTDNVIKRYTYDEYIWAAVSLYLDVINLFLSLLQLLRAADS

SEQ ID NO: 1466 - protein, 278 aa, Bacillus halodurans C-125
MIQSIQDRVKLANGVEMPWFGLGVYKAAEGEEVIGAVRAALKAGYRSIDTASLYQNEVGVGQAIRESGIPRDEIFVTTKVWNTEQGYDETLAAFERSRKRLGLEVIDLYLIHWPVREKFLDTWRALETLYKERKVRAIGVSNFNIHHLETVMNISDINPMVNQVEFHPFLTQKPLLTFCKAHDIQLEAWRPLTKGEIFTHPVVQALAKKYGKTPAQIVLRWNLEHRVVTIPKSVREERIQENANIFDFHLSPEDVEALDGLNEDRRLGQDPDSFSFDF

SEQ ID NO: 1467 - protein, 280 aa, Leuconostoc mesenteroides subsp. mesenteroides ATCC 8293
MSLNELYELNDGHQLPKIGLGTFQIRGYQGVDQILNAIQIGYRLLDTSTNYDSEGAVGEAIRRSGIPRSQFYVTTKLPGKYHHFDDALKIIEESLLRLGLDYLDLYLIHWPLPKRDNYVEAWQALIEAQRRGLVRSIGVSNFEKEHLDKIISATGVTPAVNQNEIHPYWPQESLVATNQEYGIVTEAWSPLGRGSSELTEPLILKLAEKYDKNAGQIILRWHIQRGILPVAKSTTPQHQRRNLDIFDFTLTETEVSQISDLERKDGRVDDQDPKEYEEFV

SEQ ID NO: 1468 - protein, 78 aa, Zea mays
  unsure (1)..(78): unsure at all Xaa locations
MAAAARHRGTVKWLNDTKGFGFIYPXDGSEDLFVHQSLIKSEGLRSLAEGEEVQFSNFDGDYGPSKGGPTNHRSGCIQ

SEQ ID NO: 1469 - protein, 456 aa, Ralstonia eutropha JMP134
MDEFAIQGFRGRLIGPSDKDYDDARALYNGMIDKRPKLIARCTDAADIIAAVNYARENKLLLAVRGGGHNGPGLGSCDGGLVIDLSQMRSVRVDPASGTVRVEPGCTAADLDHATHAFGLAVPLGIVGSTGVAGLTLGGGTGYLTRKYGLTVDNLLEVDVVLADGSFVTANKDEHVDLFWAVRGGGGNFGVVTSFLFQAHPAKMVFAGPIFWDARDARQVMSTYRDFIPNAPEELGLFVGLKTVPPTDPFPQEHWNKRACALIGAFNGPIDAGKQLVDSLLEKLPAPLFNWMGEMPWTAINSLFDPFFPKGLQWYWKGDFVKALPDEAIDVHIANAIEAPTPFCLMHLYPIDGAVRRIGRDATPWSARDASFSMVIAGISPDPKDAEALKTWGRAYWSAIHPFNLQGAYVNFLDADEAENRVELSYGENYTRLAAIKAKYDPDNLFRVNQNIKPKA

SEQ ID NO: 1470 - protein, 495 aa, Mesorhizobium loti MAFF303099
MAVRNDVSTRSYQQFIGGRFVDGSGSGSIERRSPATGDLVARYADGTPEDVDLAVEAARIAFEDGPWPRMSGMERAEVLNRLADLIRTNRDRLVRIEVEEVGKPVRFARGDIDGAAGLTRYAASLAMQMAGLTYTNIGDGKTALISREAVGVVALVTPWNFPALILSQKVPFALAAGCTVVLKPSEFTPGSAFEIAALAAEAGVPAGAFNVVSGYGATAGDHLTGHMGIDFVSFTGSTRTGSRVVGNTSRHLVKSSVELGGKSANIVFADADLEAAADGALMGVFFNNGECCVSGSRLFVQSSIADDFIAKVIARSRKMKVGDPFDDDTDVGALIDRNHLAKVTGFVKSGIEEGAQLVLGGNVAAGAVGHFHEATIFDRVEPHMTIFREEIFGPVLSITRFDTVDDAVRLANDTAYGLSNYIWSKNIDTVLTVAKRLKSGWVQANTIIDGAPQLPLTGVKGSGFGYEMGQAGFEEFTQLKTLLIQTGPRAPVFPV

SEQ ID NO: 1471 - protein, 268 aa, Zea mays
  unsure (1)..(268): unsure at all Xaa locations
MFGYRKAGPDLEAGGSSLLYPGMTESPELRWAFVRKIYVILAVQLAMTAAVSAFVVKVPAVSNFFVSSNAGVALYIFLIILPFLGKPGSPVFWGIFSPXAEIGCNLLRAVLCPLRYYHQKHPVNLLLLGLFTVAISFAVGMTCAFTSGKIILEAAILTAVVVISLTAYTFWAAKRGHDFNFLGPFLFAAIMVLMVFSLIQIFFPLGKISVMIYGGLASLIFCGYIIYDTDNVIKRYTYDEYIWAAVSLYLDVINLFLSLLQLLRAADS

SEQ ID NO: 1472 - protein, 89 aa, Triticum aestivum
  unsure (1)..(89): unsure at all Xaa locations
APTVMAFSATSVAPFHGLKSTAGLPISRRSSSAGLSSATNGGRITCMQVWPIEGIKXFFTLSYLPPLSTEALLKQVHYLIRSKWVPCLE

SEQ ID NO: 1473 - protein, 391 aa, Mesorhizobium sp. BNC1
MTQRLVSSERAAAILGVSRQTLYAYVSRGQIRAEVDPADPRRQLYDARELEAIAARKALGRKPREAAANALDWGLPVLNSALSHISNDTLFYRGIDAIEFSRHATLESTARLLWGCGSTDPFALPFTHAMLQPPHELSLVAKCQFILALHASDLPTIWRRDQRNLWPSAASIVRMLEWAGAGCPIAELPVHEALARHWDRVEAADLFRRALVLVADHELNASTFAARVVASTGGSLAAAVTGGLAALSGPRHGGQIPMVEALFEQARQAGNLRAFIDAKLRLGERLPGFGHPLYLVADPRANELLHWLPEDRFRMELSDVVFELSGHRPNIDFALVGLRHTLGLPQDTALFLFLLGRSVGWIAHALEQHSDGRVIRPRASYVGQRSETIPR

SEQ ID NO: 1474 - protein, 448 aa, Klebsiella pneumoniae
MKPLLLTNALIISEDMRYQADILIDKGRIQKIASFIPSRPEWLVIDVRGKWVIPGMIDDQVHFREPGLTHKGTIATESAAAVMGGITSFMEMPNVTPPTTTRQALREKFQRASRSSLANHSFYFGATNDNLDELKALTASQACGVKVFMGASTGNMLVDDEQVLESIFANAPCLVATHCEHTPTIKQNEAIWRARFGDAIPPGEHAAIRSVDACLTSSRQAVSLAKKHRTRLHVLHITTADELVLFDAAPTLEALRQKTITAEACVHHLFFNYDDYETLGHKLKCNPSVKTSFHQEALWKGVNEGIIDVIATDHAPHLLEEKQSDYFAAPSGLPLVQHALPALLDMCSRGIFTPEMVVRKTSHAVAERFQLKDRGYIREGYWADLVVIDPFSHQQIIREDVAYKCGWSPFEGRILSGGAVDMTLVNGHVIWNGHTIQQKYGLPLEFCR

SEQ ID NO: 1475 - protein, 197 aa, Bacillus cereus ATCC 10987
MDTNITWHTASVSKDERRVKNGHHSFVIWFTGLSASGKSTVANAVARKLFEKNIGNYVLDGDNIRHGLNKDLGFSESDRMENIRRIGEVAKLFVDQGTVVLTAFISPFRVDRKQVRDLLAADEFIEVFVKCPIEECEKRDPKGLYKKARKGDIKDFTGIDSPYEEPEQAELIVETHKYSIEECAEQIVKYLQERSFI

SEQ ID NO: 1476 - protein, 344 aa, Glycine max
  unsure (1)..(344): unsure at all Xaa locations
MAAENVVEFTDLPVKRPREEEEEEEEQTNGVSNDAVSALPNDPQYPGISAVIPGWFSEIXSPMWPGEAHSLKMEKILFQGKSDYQNVMVFQSSTYGKVLVLDGVIQLTERDECAYQEMITHLPLCSIPNPKKVLVIGGGDGGXVLREVARHXSVEKIDICEIDKMVVDVSKQFFPDIAVGFEDPRVTLTVGDGVAFLKDVPEGTYDAVIVDSSDPIGPAQELFEKPFFASVAKALRPGGVVCTQAESIWLHMHIIEDIVANCRQIFKGSVNYAWTTVPTYPSGMIGFMLCSTEGPLVDFKHPVNPLSENDSQQSRPLKFYNSEIHTAAFCLPSFAKRKIGSKTN

SEQ ID NO: 1477 - protein, 280 aa, Propionibacterium freudenreichii subsp. shermanii
MIIPTTPTPTVELSGGTRMPMLGMGTWPLKGEECRAAVASAIEQGYRLVDTAEAYGNEEAVGKAVREAGPDRAEIFVTTKFSKQWHSRKGVHEALEHSLERLGLDYVDLFLMHWPMPGEGSYVDAYRGMVELKEQGLAKAIGVSNFKVHHLDDLITEGMTPEVNQIQLDPSRPRLEVRDFLDNHDIVTEAWSPLGRGADGVLNAPAVLDAAKKHGITPAAAVLAWELNQGIVTIPKSANPEHQRTNLEAIGVELSAQEMKAIDALADPNAKIDDSDKTGN

SEQ ID NO: 1478 - protein, 336 aa, Lycopersicon esculentum
MSHHYQEQEQLEAQKIPFLLDSLYCEENNILTEVSIETESFSSHDLLWEEEELTSLFSKETEYEISYNVLEKNQSFISSRRESVEWILKTTAYYSFSAQTGFLAVNYFDRFLLFSFNQSLNHKPWMNQLVAVTCLSLAAKVEETDVPLLLDLQVEESGFLFESKTIQRMEMLILSTLKWKMNPVTPFSFLDFITRRLGLKHCLSLEFLRRCEKVLLYTITDDRFIGYLPSAMASATMLHVLDRLKPCIGEKYQDQLLGILGIVKEKVEGCYRLIQEVACNIDFGSNKRKFGTLPGSPTGVMDMSFSSDYSNDSWSVATSVTSSPEPLSKKIRESNE

SEQ ID NO: 1479 - protein, 328 aa, Mycoplasma pneumoniae M129
MSPKTTKKIAILTSGGDAPGMNATLVYLTRYATSSEIEVFFVKNGYYGLYHDELVPAHQLDLSNSLFSAGTVIGSKRFVEFKELKVREQAAQNLKKRQIDYLVVIGGDGSYMGAKLLSELGVNCYCLPGTIDNDINSSEFTIGFLTALESIKVNVQAVYHTTKSHERVAIVEVMGRHCGDLAIFGALATNADFVVTPSNKMDLKQLESAVKKILQHQNHCVVIVSENIYGFDGYPSLTAIKQHFDANNMKCNLVSLGHTQRGFAPTSLELVQISLMAQHTINLIGQNKVNQVIGNKANVPVNYDFDQAFNMPPVDRSALIAVINKNII

SEQ ID NO: 1480 - protein, 389 aa, Escherichia coli
TLQNGKLNVPENPIIPYIEGDGIGVDVTPAMLKVVDAAVEKAYKGERKISWMEIYTGEKSTQVYGQDVWLPAETLDLIREYRVAIKGPLTTPVGGGIRSLNVALRQELDLYICLRPVRYYQGTPSPVKHPELTDMVIFRENSEDIYAGIEWKADSADAEKVIKFLREEMGVKKIRFPEHCGIGIKPCSEEGTKRLVRAAIEYAIANDRDSVTLVHKGNIMKFTEGAFKDWGYELAREEFGGELIDGGPWLKVKNPNTGKEIVIKDVIADAFLQQILLRPAEYDVIACMNLNGDYISDALAAQVGGIGIAPGANIGDECALFEATHGTAPKYAGQDKVNPGSIILSAEMMLRHMGWTEAADLIVKGMEGAINAKTVTYDFERLMEGAKLL

SEQ ID NO: 1481 - protein, 119 aa, Zea mays
LQVYGYRMSLWAEHLGTVQECFRRPESEECVQQVNQMADDNWASYVSPQMADMKGHLMKYPVRVEQDGRVGPLHGQESFPDVGGKVLGTHSSKKLEGGRLVNGELKLCSSESLDVVQQG

SEQ ID NO: 1482 - protein, 490 aa, Bordetella parapertussis 12822
MQDFPNILQRWYSMKQHFIDNASVPGSSGERIPVIDPSTGQEFDSIARGNAADIDLAVQAARRAYEGAWGRLSAAERGRLMLALSLKVLEHRDELTALESRDCGKPLKQARADVLAIARYFEYYGGAADKLHGETIPYQQGYTVLTLREPHGVTGHVVPWNYPLQIFGRSVGAALAAGNACVVKPAEDACLSLLRVAELAAETGFPAGALNIVTGYGHEAGDALTRHPGIDHISFTGSPRVGVLVTQTAAERHVPVTLELGGKSPQIVFADADLDALVPVAVNAIVQNAGQTCSAGSRLLVERGAYERVLERLGAAFAALRAGPAQSDLDCGPLIRKTQQERVRGFLDLARGDGIATVAQGRIVPEAPAEGYYQAPTLLRDVPVDHPLAQEEVFGPVLAAIPFDDEADAVRIANATEYGLAASVWTRDGGRQLRIARKVRSGQVFINNYGAGGGIELPFGGVKASGHGREKGFEALYGFTVLKTISIKHD

SEQ ID NO: 1483 - protein, 581 aa, Glycine max
  unsure (1)..(581): unsure at all Xaa locations
MCGILAVXLGCSDSSQAKRVRVLELSRRLKHRGPDWSGLHQYGDNYLAHQRLAIVDPASGDQPLFNEDKTVVVTVNGEIYNHEELRKQLPNHTFRTGSDCDVIAHLYEEHGENFMDMLDGIFSFVLLDTRDNSFIVARDAIGVTSLYIGWGLDGSVWISSELKGLNDDCEHFESFPPGHLYSSKERAFRRWYNPPWFSEAIPSAPYDPLALRHAFEKAVVKRLMTDVPFGVLLSGGLDSSLVAAVTARYLAGTKAAKQWGTKLHSFCVGLEGAPDLKAAKEVAEYIGTVHHEFHYTVQDGIDAIEDVIYHIETYDVTTIRASIPMFLMSRKIKSLGVKMVISGEGSDEIFGGYLYFHKAPNKEEFHQETCRKIKALHKYDCXRANKSTFAWGLEARVPFLDKEFIRVAMNIDPECKMIKKEEGRIEKWALRRAFDDEEHPYLPKHILYRQKEQFSDGVGYGWIDGLKAHAEKHVTDRMMLNAANIFPFNTPTTKEAYHYRMIFERFFPQNSARXLTVPGGPSVACSTAKAVEWDAAWSNNLDPSGRAALGVHASAYGNQVKAVEPEKIIPKMEVSPLGVAI

SEQ ID NO: 1484 - protein, 506 aa, Daucus carota
TSADSTQRFIQCLTKYAKNSESISQVVFTPANASYNPILQLNLQNLRFNTSGTRKPLAIVTPIEETQIQTVIYCARKNSMNVRTRGGGHDFEGVSYTAEVPFVLLDMINFNRVNIDLKTSTAWVQSGISLGEFYYRISQKSDVLAFPAGLLSSVGLTGLLGGGGYGMLKRKYALAADNTLDARIVDYNGKILDRKSMGEDLFWAIRGGDPASFCVVLELKLQLVPVPKSVTYFAVQRTLEQNGSALFQKWQATAANVFPRDLDVRVVVDTITSNSSPRQDKKTVRFVFQCLYLGKIDTLLPIMQKYFPELGLVRDDCTETSWIKTAPMFSGFPVGTDPTILLNKTAIPRNSVKIKSSFTTQPISLEGLNGIWDLWLKQPVQTTLIQYTPFGGIMNEFAESALPFPHRPGVLYMINMAVTLAQNEEATLQWINDLFKYYAPYVTKNPRTSYVNYRDADLGIGSRTFQQASIWGKKYYKNNFDRLVKIKSIVDPLNFFNHKQSIPLLM

SEQ ID NO: 1485 - protein, 373 aa, Arthrobotrys dactyloides
MASPTPPNSTASPKPQAPPSQVQACRYKTGKTLGSGSYSVVRECVHIHTGRYYAAKIINQKLMAGREHMVRNEIAVLKKVSMGHQNILTLVDYFETMNNLYLVTDLALGGELFDRICRKGSYFESDAADLIRATLSAVAYLHDHGIVHRDLKPENLLFRTPEDNADLLIADFGLSRIMDEERFHVLTTTCGTPGYMAPEIFKKTGHGKPVDIWAIGVITYFLLCGYTPFDRDSNLEEMQAILKADYKFEPAQYWSDISENAKDFIRRCLTIDPKARPTAHAALEHPFICEDQPEREADLLPTVRKNFNARRTLHAAIDTIRAINKLREGGMMDGALSSAPENQKEKQPQNQPATGLWQGTAQAATAKGLWSKS

SEQ ID NO: 1486 - protein, 458 aa, Rhizobium sp. NGR234
MYSNSLIELDRAHLIHPVASYRGHEKLGVRVLASAKGATVTDASGRQLIDGFAGLWCVNAGYGHESIVEAATRQMRELPYATGYFGLGSEPAIRLASELAERAPGNLDHVFFTLGGSDAVDSTIRFIRYYWIGRGEPQRDQFISVEQGYHGSSTVGAGLTALPAFHAGFGIPFDWQHKIPSHYAYRNPVGDDPQAIIDASLAALRQKVEEIGPERVAAFYAEPIQGSGGVLVPPKGWMKAMRQLCQELGILFVADEVITGFGRTGPLFACHEDEIVPDFMTVAKGLTSGYVPMGAVFMGDHIYQTIADSAGAGAVGHGYTYSAHPVSAAVGLEVLKLYENELLDNGRKAGARLMAGLESLKDHPLVGDVRGRGMLAAVELVVDKEKKTPLPAKAEPARRIFDRAWENGLVIRAFANGVLGYAPPLCCTEAEIDGIVERTRKVLDETLEDPAVRSGLSD

SEQ ID NO: 1487 - protein, 217 aa, Lactobacillus plantarum WCFS1
MKFFLDTANTEDIKHFAELGLVDGVTTNPTLVSREGRDFETVIKEITQIVSGPVSAEVTATKAEEMIAQARNEIKWASNIVVKIPMTEEGLKAVKVLSGEGIKTNVTLVFSVSQGLLAAKAGATYISPFLGRLDDIGGNGIQLVKDLRQVLDTYGFKTEIIAASVRGPQHVQEAALAGADIATIPATVFGKLWSHPLTDKGLASFASDWKAFQATQK

SEQ ID NO: 1488 - protein, 321 aa, Malus x domestica
ILPFKLPAIGPNDVRIRIKAVGICGSDVHYLRTMKCADFEVKEPMVIGHECAGIVDKVGSEVKHLVPGDRVAVEPGISCSRRQQCKGGQYNLCPDMKFFATPPVHGSLANQIVHPADLCFKLPENVSLEEGAMCEPLSVGVHACRRANVGPETTVLIVGAGPIGLVSVLAARAFGAPRIVIVDMDDRRLAMAKSLGADGTVKVSIKMEDLDDEVAKIKEAMGSEVDVTFDCVGFNKTMSTGLNATRPGGKVCLVGMGHGVMTVPLTPAAAREVDVVGVFRYKNTWPLCLEFLRSGKIDVKPLITHRFGFTEKEVEEASLEF

SEQ ID NO: 1489 - protein, 1526 aa, Zea mays
MAMAYKMVKPSPRSGHAPAPQPLAIEQPWLTIDALCVCVRGLQATEGMNVKEECQRWFMEMKWKKVHRFVVYKIDERSRAVLVDKVGGPGEGYEELVAALPGDDCRYAVFDFDFVTVDNCQKSKIFFIAWSPAASRIRAKILYATSKQGLRRLLDGVHYEVQATDPSEMGFDEARHLYPDTRLRQSRGDRRHSTAPLASLTEGQRRLRHSDCSATRQSKSDRQSGLDKGATANSAPPDPRARTRAKTRKTANSAPPDPRARTRAKTRKTANSAPPDPRARTRAKTRKTANSAPPDPRARTRAKTRKTANSAPPDPRARTRAKTRKTTKLRLARPQGSDSALASAERLPPRPTPWLGLGHGNRRQTQPRLRRKPHVALLRAQTATSTGGAIIIPPRIDSGQRQQGLDRSNSCPSIRLRRTSNSHDITPAGCPDLSGCHIGMGLLRADEQLPVKLQMGSLQQPLRPGTVLRFGTLEFMSFDGSYDMTLLPPPRDYDNGGRQPARRRRNRRRLPRVVEEQHSGSLRSLPRQRRRRRGRQGQTGGHASPAVERIDAPDAPTEGTPDVDLAFETEASVVPPRHADPEQEDDAGALAESLQDVALEPETTAQPVPDVTTSLLVDQKVTTNSHLASFRLGLNPPNDLVLAGALIEASATPLRFCMRSPWDRLTDVSTYGPSGSEEDDDPSIGWDFSGHGNPSAMRDFMTACDYCLSDRSDESRSLGDESCGPSRECFHIELGDPTEGNHLGMPEDGDLPRPVPRADIPRELAVVPAPAGGYDPQLEQVREAQARLNEGTGALEPIRRDAGQAWVGQPLAGEIRHLPQGLQHRVANDVRIRPPPASSGVGQNLATAAMLIRAMPEPSTTEGRRIQGELKNLLEGAAARRAESTASRRQGYPSEPHAATSRFMREASVYTGRTRNTAPAAPAHLGNEHHRRDRRAHLDERVRQGYHPRRGGRYDSGEDRSPSPEPPGPQAFSRAIRRAPFPTRFRPPTTITKYSGETRPELWLADYRLACQLGGTDDDNLVIRNLPLFLSDTARAWLEHLPPGQISNWDDLVQAFAGNFQGTYVRPGNSWDLRSYRQQPGESLRDYIRRFSKQRTELPNITDSDVIGAFLAGTTCRDLVSKLGRKTPTRASELMDIATKFASGQEAVEAIFRKDKQPQGRPSEEAPEASAPRGAKKKGKKKSQSKRDAADADLVAAAEYKNPRKPPGGANLFDKMLKEPCPYHQGPVKHTLEGAGPPAEGGRAHDDDKNEEHPAEGFPEVRDCFMIYGGHAANTSARHRKQERREVCSVKVAAPVYLDWSDKPITFDRADHPDHVPSPGKYPLVVDPVVGDVRLTKVLMDGGSCLNIIYAETLKLLRVDPSSVRAGAAPFHGIIPGKRVQPLGRLDLPVCFGTPSNFRRETLTFKVVGFRGTYHAVLGRPCYAKFMAVPNYTYLKLKMPGPNGVITVGPTYKHAFECDVECVEYAEALAESEALIADLENLSKEVPDVKRHAGNFEPAETVKAVPLDPSGDTTKQIRIGSGLDPK

SEQ ID NO: 1490 - protein, 319 aa, Malus x domestica
ILPFKLPAIGPNDVRIRIKAVGICGSDVHYLRTMKCADFEVKEPMVIGHECAGIVDKVGSEVKHLVPGDRVAVEPGISCSRCQQCKGGQYNLCPDMKFFATPPVHGSLANQIVHPADLCFKLPENVSLEEGAMCEPLSVGVHACRRANVGPETTVLIIGAGPIGLVSVLAALAFGAPRIVIVDMDDKRLAMAKSLGADGTVKVSTKMEDLDDEVAKIKEAMESEVDVTFDCVGFNKTMSTGLNATRPGGKVCLVGMGHGMMTVPLTPAAAREVDVVGVFRCKNTWPLCLEFLRSGKIDVKPLITHRFGFTEKEVEEASL

SEQ ID NO: 1491 - protein, 465 aa, Bacillus anthracis str. A2012
MTIVTFSKSTTDKPSYTYEELSVKNKAYVWHPFTQMKDYLEEDPVIIERGEGRKLYDVNGNEYWDGVSSIWLNVHGHQVPELDEAIREQLNKIAHSTMLGLANVPSILLAEKIIEVVPEGLKKVFYSDSGSSAVEIAIKMAFQYWQHKGKPKKQRFVTLKEAYHGDTIGAVSVGAIDLFYQVYSSLLFEAIKMPYPYTYRSPYGNDKAEIVKKHLEEMEELLKDKHEEIAAIIVEPLMQGAGGMITMPKGYLRGLRNLCTKYNVLFITDEVATGFGRTGKMFACEHENVTPDILTAGKGLTGGYLPVAITVTTDEIYNAFLGSYEEQKTFFHGHSYTGNPLGCAVAIANLELYEKTNLIEEVARKTEYVATQLEELFACKHVGDIRQCGLMVGIELVKNKETKEAFEWTERVGVQVCKRSRELGMILRPLGNTIVFMPPLASTIDEIDEMLRILYKAISDITEGE

SEQ ID NO: 1492 - protein, 187 aa, Glycine max
  unsure (1)..(187): unsure at all Xaa locations
MPLILAKSDSIQIREVWNDNLEEEFALIREIVDNYPYIAMDTEFPGIVLRPVGNFKNSYDYHYQTLKDNVDMLKLIQLGLTFSDEHGNLPTCGGDDPARXCIWQFNFREFNVNEDVFANDSIELLRQSGIDFKRNNENGIDAHRFGELLMSSGIVLNDNIHWVTFHSGYDFGYLYELLTCQALPDTQ

SEQ ID NO: 1493 - protein, 142 aa, Zea mays
INDHDHDHRAGHGRYRMNNAVPGAWVYVGGEQLWIDVLHATLEHDLAPRVWTDYLHITVGGTLSNGGIGGQAFRHGPQISNVHELDVVTGTGEMVSCSPGKNSDLFYAALGGLGQFGVITRARIALEPAPRRVLWVRLAYSD

SEQ ID NO: 1494 - protein, 352 aa, Lactobacillus plantarum WCFS1
MEAVVKTESGYDNMELKQIPIPEVTGDKVLLKVAYTGICGTDIHTFKGQYANAVTPLVLGHEFSGEVVEVGPDVKTLKPGDRVTSETTFATDGTCVYCQDKEYNLCPNRVGIGTKANGSMANYVLTREESAHILPDNVSYKMAAMSEPLASCVHAMYQKTPFTLHDTLLIMGPGPMGLLSLQIAKEIGAFVIVSGITKDADRLQIAKELGADIIVDTQKEDLAKVVMDATDGVGVTKVYDCSGATPAVNSALPLIRKGGTFQQVGLFAKPMNELDERSIIQHEITYRGSRSQNPYDWAIALHLESKGAINQDAMITKVFDLEHWRDAFDAMMAGKELKVMIASNPDDPDLAD

SEQ ID NO: 1495 - protein, 149 aa, Glycine max
  unsure (1)..(149): unsure at all Xaa locations
SPTNAARGCRGLNPGSFLTLAKGSESGGSYGQWXSAIGRTAATTTLAESTVVLTTLLIKRTLDGHWNVIDVRYGLVGGYAVITYRCAVAQPSGAIVCGFVAAWVLIGLNKLAANVEYDDPLDAAQLHGGCGAWRCLFTGLFAKKEYVEE

SEQ ID NO: 1496 - protein, 403 aa, Sinorhizobium meliloti 1021
MLTQKTKDIVKATAPVLAQHGYAIIQHFYKRMFQAHPELKNIFNMAHQERGEQQQALARAVYAYAANIENPESLSAVLKDIAHKHASLGVRPEQYPIVGEHLLASIKEVLGDAATDEIISAWAQAYGNLADILAGMESELYERSEERAGGWAGWRRFIVREKNPESDVITSFVLEPADGGPVADFEPGQYTSVAVQVPKLGYQQIRQYSLSDSPNGRSYRISVKREDGGLGTPGYVSSLLHDEINVGDELKLAAPYGNFYIDVSATTPIVLISGGVGLTPMVSMLKKALQTPPRKVVFVHGARNSAVHAMRDRLKEASRTYPDFKLFIFYDEPLPTDIEGRDYDFAGLVDVEKVKDSILLDDADYYICGPVPFMRMQHDKLLGLGITEARIHYEVFGPDLFAE

SEQ ID NO: 1497 - protein, 313 aa, Eucalyptus globulus
ANLFAMQLATASVLPAVLTAAIELDLLEIMARAGPGAYLTPGEVASQLPTQNPDAPVMLDRIFRLLASYSVLTCTLCDLPEGKVERLYGLAPLCKFLVKNEDGVSLAPLRLIDQDRVFLESWYYMKDAILEGGIPFHKAHGMTAFDYPGTDPRFNKIFNRAMSDHSTIMMKKILETYNGFEGLKTVVDVGGGTGAILNMIVAKYPSIKGINFDLPHVIEDAPSYPGVEHVGGDMFVNIPNGDAVFMKWICHDWSDEHCAKLLKNCYDALPVNGRVIVAEYILPAYPDQSLSTKGVIHMDCIMLTHFSGGKERT

SEQ ID NO: 1498 - protein, 400 aa, Zea mays
MVLEATMICIDNSEWMRNGDYAPSRFQAQADAVNLICGAKTQSNPENTVGVMTMAGKGVRVLVTPTSDLGKILACMHGLEVGAEANLAAAIQVAQLALKHRQNKRQQQRIIAFIGSPVKYDKKVLETIGKKLKKNNVALDIVDFGESDDEKPEKLEALIAAVNSSDSSHIVHIPPGENALSDVLLSTPIFTGEEGGSGFAASAAAAAATGASGFEFGVDPNVDPELALALRLSMEEERARQEAIAKKAAEDTSNTEHNNVPSSNSDSVMAEGEPASNAAAGDKEQPKDDDDLLQQALAMSMEGGASGSAAVTDSAMAEAGAVDPDLALALQMSVQDANMSSDTDMSKVFEDRTFVSSILNSLPGVDPNDPSVKDLLASLHSQGEQEKKEDTSDKTEDDKN

SEQ ID NO: 1499 - protein, 312 aa, Eucalyptus globulus
ANLFAMQLASASVLPMVLKAAIELDLLEIMAKAGPGAFLSPGEVAAQLPTQNPEAPVMLDRISRLLASYSVLTCTLRNLPDGKVERLYGLAPVCKFLVKNEDGVSIAALNLMNQDKILMESWYYLKDAVLEGGIPFNKAYGMTAFEYHGTDPRFNKIFNRGMSDHSTITMKKILETYKGFEGLETVVDVGGGTGAVLSMIVAKYPSMKGINFDLPHVIEDAPPLPGVKHVGGDMFVSVPKGDAIFMKWICHDWSDDHCAKFLKNCYDALPNNGKVIVAECVLPVYPDTSLATKNVIHIDCIMLAHNPGGKER

SEQ ID NO: 1500 - protein, 218 aa, Glycine max
VKCDVMVYTKIFLKFPYKFWPSGPDKEFFIYAHERRGYYTFWQHMENAYPGSNMLVVTLTNEESKRVEAQADEETLREAMAVLRDMFGPNIPNAIDILVPRWWNNRFQRGSYSNYPIISNHKLFHNIKAPVGRIFFTGEHTSERFNGYVHGGYLAGIDTSKALLEEMRKEKESQTLLLEPLLASLTMSKPETVSNIHKCDIPTQLYLSGKLGVPEAIL

SEQ ID NO: 1501 - protein, 355 aa, Methanosarcina barkeri str. fusaro
MSKNICFIDGLEGILKYREIDINQLVDLPYDAVSYLLILGDLPGDQELAEYSACLHGEREVNREVIDVIHMCNFNIDSIEALRTIVSFISQFDPDINDSSPEGNMRKATRLIAKIPTIVAAYYRIANGKEPVPPDPSLSHGANFLYMLRGNKPTQLEAEVMEKDFILSAEHELNASTFSSRVTASTLSDLYSAVVSGLCTLKGPLHGGARAEVTAMIEEIACPENAENYVLDKLSKKEKIMGFGHRVYKTYDPRGMIFKQLAKQLAEAKGDMHWYNIAEVVENTVIRELVEKKGKPIYPNVDFYSGVIYKYMDIPPQLATSIFAIGRVSGWIAHCFDQYEKKKIIRPRAFMLDEC

SEQ ID NO: 1502 - protein, 355 aa, Arabidopsis thaliana
MDRISGLPDELLVEILHCLPTKEVVSTSILSKRWEFLWLWVPKLTFVMNHYESDLPIQDFITKNLRLLKPQVIESFHLQCFSSSFKPEDIKHWVVTTISRRVRELIINYCDLSWLDKPVVLLDLPNSLYTCTSLVTLKLIGHSIIVDVPRTVSLPCLKTLELDSVAYSNEESLRLLLSYCPVLEDLTIHRDMHDNVKTLVIIVPSLLRLNLPIDGAYSCDGYVIVTPALKYLKVPGLYREDFSYLLTHMPNVEEADLSVEQDVERLFESITSVKRLSLFVLLDIEDESMYHNGIYFNQLEHLNLHIYRDNWSKLLVRLLEDSPKLRVLKIVVDVSFFIGNLKALVLLIISFLTKI

SEQ ID NO: 1503 - protein, 268 aa, Agrobacterium rhizogenes
RVTHHTMVHKQMSRFFTGFRRDAHPMAVMCGCVGALSAFYHDSTDITDPHQRMVASLRMIAKMPTLAAMAYKYHIGQPFVYPKNDLDYASNFLRMCFAVPCEEYVVNPVLARAMDRIFILHADHEQNASTSTVRLAGSSGANPFACIAAGIACLWGPAHGGANEAALNMLNEIGTVDRIPEFIARAKDKNDPFRLMGFGHRVYKNYDPRAKIMQKTAHEVLGELGIKDDPLLDIAIELERIALTDEYFIEKKLYPNVDFYSGITLKAL

SEQ ID NO: 1504 - protein, 375 aa, Glycine max
MGVCFASLARHQTPSKSIPYAGSGRESLGSKDENMGITESTSSVNGGSCSSHSSKNIVFPSVEVRNLKEFSFANLKAATKSFKSDALLGEGGFGKVYKGWLDEKTLAPTKAGSGIMVAIKKLNSESMQGFREWQSEINFLGRISHPNLVKLLGYCCDDIEFLLVYEFMPKGSLENHLFRRNTNSEPLSWDTRIKIAIGAARGLAFLHTSEKQIIYRDFKASNILLDEDYNAKISDFGLAKLGPSGEDSHVSTRIMGTYGYAAPEYIATGHLYVKSDVYGFGVVLLEMLTGLRALDKNRPIEQQNLIEWAKPSLSDKRKLKSIMDERIEGQYSTKAALKSAHLILKCLQCDRKKRPHMKDVLDTLEHIEAIKDRTK

SEQ ID NO: 1505 - protein, 338 aa, Bacteroides thetaiotaomicron VPI-5482
MKAVQIVNPSEMKVVELEKPTVGAGEVLVRIKYVGFCGSDLNTFLGRNPMVKLPVIPGHEVGAVIEEIGPDVPAGFEKGMNVTLNPYTNCGKCASCRNGRVNACEHNETLGVQRNGVMCEYAVLPWTKIIPAGNISSRDCALIEPMSVGFHAVSRAQVIDNEYVMVIGCGMIGIGAIVRAALRGATVIAVDLDDEKLVLAKRVGASYAVNSKTENVHERIQEITAGFGADVVIEAVGSPVTYVMAVDEVGFTGRVVCIGYAKKEVAFQTKYFVQKELDIRGSRNALPADFRAVINYMKEGKCPVEELISKIAKPEDALEAMKEWAADPGKVFRILVEM

SEQ ID NO: 1506 - protein, 251 aa, Arabidopsis thaliana
MENEREKQVYLAKLSEQTERYDEMVEAMKKVAQLDVELTVEERNLVSVGYKNVIGARRASWRILSSIEQKEESKGNDENVKRLKNYRKRVEDELAKVCNDILSVIDKHLIPSSNAVESTVFFYKMKGDYYRYLAEFSSGAERKEAADQSLEAYKAAVAAAENGLAPTHPVRLGLALNFSVFYYEILNSPESACQLAKQAFDDAIAELDSLNEESYKDSTLIMQLLRDNLTLWTSDLNEEGGILIFFCFPIS

SEQ ID NO: 1507 - protein, 268 aa, Agrobacterium rhizogenes
RVVHHTMVHEQMSRFFTGFRRDAHPMAVMCGCVGALSAFYHDSTDITDPHQRMVASLRMIAKMPTLAAMAYKYHIGQPFVYPKNDLDYASNFLRMCFAVPCEEYVVNPVLARAMDRIFILHADHEQNASTSTVRFAGSSGANPFACIAAGIACLWGPAHGGANEAALNMLTEIGSVDHIPEYIARAKDKNDPFRLMGFGHRVYKNYDPRAKIMQKTAHEVLGELGIKDDPLLDIAIELERIALTDEYFIEKKLYPNVDFYSGITLKAL

SEQ ID NO: 1508 - protein, 97 aa, Triticum aestivum
  unsure (1)..(97): unsure at all Xaa locations
KALHQYDCLRANKATSAWGLEVRVPFLDKEFIDVAMSMDPEWKLYDADLGRIEKWVLRKAFDDEKEPYLPRHILYRQKEXFNDGVGYNWIRRLKRFY

SEQ ID NO: 1509 - protein, 229 aa, Triticum aestivum
  unsure (1)..(229): unsure at all Xaa locations
QQSFPLQPQQPFPQQPQQPFXLQPQQPFPQQPQQPFPQPQQPIPVQPQQSFPQQSQQSQQPFAQPQQLFPELQQPIPQQPQQPFPLQPQQPFPQQPQQPFPQQPQQSFPQQPQQPFPQQPQQPFPQQPQQPFPQQPQQPFPLRPQQPFPQQPQQSQQSFPQPQPQQPQQPSILQPQQPLPQQPQQPFQQPQQQLSQQPEQTISQQPQQPFPPATTPTSTTISTTTTIWE

SEQ ID NO: 1510 - protein, 178 aa, Zea mays
MAEAPASPGGGGGSHESGSPRGGGGGGSVREQDRFLPIANISRIMKKAIPANGKIAKDAKETVQECVSEFISFITSEASDKCQREKRKTINGDDLLWAMATLGFEDYIEPLKVYLQKYREMEGDSKLTAKSSDGSIKKDALGHVGASSSAAQGMGQQGAYNQGMGYMQPQYHNGDISN

SEQ ID NO: 1511 - protein, 302 aa, Zea mays
MAGMSLQHPWAFAFGLLGNVISFMTFLAPIPTFYRIYKSKSTEGFQSVPYVVALFSAMLWIFYALIKSNETFLITINAAGCVIETIYVVMYFVYAPKKAKLFTAKIMALLNGGVFGVILLLTLLLFKGSKRVVLLGWICVGFSVSVFVAPLSIMRRVIQTKSVEYMPFSLSLSLTLSAVVWFLYGLLIKDKYVALPNVLGFIFGVVQMVLYVFYMNKTPVAATAVGKDAGKLPSAADEHVLVNIAKLNPALPERTSGMHPVTQMAAVPARSCAAEAIAPAMLPNRDVVDVFVSRHSPAVHVV

SEQ ID NO: 1512 - protein, 495 aa, Pseudomonas aeruginosa UCBPP-PA14
MSIAIDPSVSAFLRSPHGLLIEGESGPARSGADMPLYDPATGAELARVARAGAEDVDRAVAAARRAFEGNWAGQRPADRERLLLRLAERIEAHGEQLAQLETLNNGKSINLSRALEVGASVEFIRYMAGWATKIEGRSLDLSIAAVPGARYRAYTVPEPVGVVGAIVPWNFPLLMAIWKIVPALACGCTVVLKPADETPLTALRLGQLCLEAGIPPGVVNIVTGTGAEAGAALAAHPGIDKLAFTGSTPVGKLIGHAAVENMTRFSLELGGKSPVIILDDTSLDMAAAGSAGAIFFNQGQVCTAGSRLYVQRKRFDQVLERLAAIAGDLSIGPGLDPTTQINPLVSARQQERVLGMIESGVAEGASVVCGGARQGETGFYVQPTILADVTPGMQVVREEIFGPVLVATPFDDLDEAVRLANDSIYGLGASIWSNDLRQVMDLVPRIKAGTVWVNAHNLLDPSMPFGGFKQSGIGREMGHAAIEAYTENKSVCIAY

SEQ ID NO: 1513 - protein, 389 aa, Escherichia coli
TLQNGKLNVPENPIIPYIEGDGIGVDVTPAMLKVVDAAVEKAYKGERKISWMEIYTGEKSTQVYGQDVWLPAETLDLIREYRVAIKGPLTTPVGGGIRSLNVALRQELDLYICLRPVRYYQGTPSPVKHPELTDMVIFRENSEDIYAGIEWKADSADAEKVIKFLREEMGVKKIRFPEHCGIGIKPCSEEGTKRLVRAAIEYAIANDRDSVTLVHKGNIMKFTEGAFKDWGYQLAREEFGGELIDGGPWLKVKNPNTGKEIVIKDVIADAFLQQILLRPAEYDVIACMNLNGDYISDALAAQVGGIGIAPGANIGDECALFEATHGTAPKYAGQDKVNPGSIILSAEMMLRHMGWTEAADLIVKGMEGAINAKTVTYDFERLMEGAKLV

SEQ ID NO: 1514 - protein, 503 aa, Avicennia marina
MSTMAIRMPTRQLFIDGEWREPVQRKRILIINPANEQTIGDIPAATAEDVDIAVEAARKAFFRNSGKDWSSTTGAHRAKYLRAIAAKIKDRKAELVKLEAIDSGKPLVEASLDMDDVIGCFEYFAGIAERLDSEQRTPVSLPMETFKCHLLKEPIGVVGLISPWNYPLLMAIWKVAPALASGCTAILKPSELASVTCLELAEVCMEVGLPPGVLNILTGLGPEAGAPLVTHPHVAKISFTGSDTTGVKIMTAAAQLVKPVTLELGGKSPIVVFEDVDLDTAAEWTLFGCFWTNGQICSATSRLLVHESIAATFLEKLVKWCEKIKISDPLEEGCRLGPIVSRRQYEKVMKYISTAKEEGATILCGGARPEHLEKGYFVQPTIITDVKTSMQIWIEEVFGPVLCVKTFATEDEAIDLANDTHYGLAAAVISKDLDRCERMAKAFQVGAVWVNCSQPCFYQAPWGGKKRSGFGRELGERGLDIYLNVKQVTQYVSSEPWDWYKSP

SEQ ID NO: 1515 - protein, 389 aa, Escherichia coli
TLQNGKLNVPENPIIPYIEGDGIGVDVTPAMLKVVDAAVEKAYKGERKISWMEIYTGEKSTQVYGQDVWLPAETLDLIREYRVAIKGPLTTPVGGGIRSLNVALRQELDLYICLRPVRYYQGTPSPVKHPELTDMVIFRENSEDIYAGIEWKADSADAEKVIKFLREEMGVKKIRFPEHCGIGIKPCSEEGTKRLVPAAIEYAIANDRDSVTLVHKGNIMKFTEGAFKDWGYQLAREEFGGELIDGGPWLKVKNPNTGKEIVIKDVIADAFLQQILLRPAEYDVIACMNLNGDYISDALAAQVGGIGIAPGANIGDECALFEATHGTAPKYAGQDKVNPGSIILSAEMMLRHMGWTEAADLIVKGMEGAINAKTVTYDFERLMEGAKLL

SEQ ID NO: 1516 - protein, 484 aa, Rhizobium sp. NGR234
MKLKDKELFRQAGVIGGEWIGAASGDVVEVFDPASQAVLGTVPDMGTAETRAAIEAAETAFGPWKKKTHAERAALLERWHALMIEHLEDLALILTLEQGKPLDEARGEIRYGAAFVKWFAEEARRIGGHTIPSPTPDRRIVVLKEAVGVCAIVTPWNFPNAMITRKVAPALAAGCTVVIKPSEFTPFSALALGVLAERAGIPAGVVNIVTGMPTAIGNEIMANETVRKISFTGSTRVGSLLMRGAADSVKRLSLELGGNAPFIVFDDADLDLAVEGAIASKFRNGGQTCVCANRILVQSGVYDAFAEKLAARVNAMKVGPGTEPGVAIGPMINAAAIDKIDRHVEDALAKGAKIAARGRSLPVGRQYTAPLVLTGATTEMLLASEETFGPVAPLFCFETEEEAITIANGTPFGLAAYFYTENLKRSWRVAEALEFGMVGLNTGAISTEVAPFGGVKQSGLGREGAQVGIEEYLELKSFHIGGLA

SEQ ID NO: 1517 - protein, 335 aa, Xylella fastidiosa Dixon
MTQTITVIRGDGIGPEIMDATLSVLNALQANLNYEFADAGLSALEKHGDLLPEATLNSISKNKIALKSPLTTPVGEGFSSINVALRRKFDLYANVRPAKSFPNTKSRFSDNVDLITVRENTEGAYLSEGQTISPDGEVATSSARVTRKGSERIVRYAFDLARTTGRKKVTAVHKANIIKSTSGLFLKTARDVASQYPEIDFQEMIVDNTCMQLVMRPEQFDIIVTTNLFGDILSDLCAGLVGGLGLAPGANIGNEQAIFEAVHGSAPDIAGQGKANPCALLLGAVQMLDHIGQPQNAERLRNAIVATLNAKDSLTPDLGGNGNTMGFAKAIASRL

SEQ ID NO: 1518 - protein, 158 aa, Zea mays
  unsure (1)..(158): unsure at all Xaa locations
MIQKNEKAFHTRRNKDEEITMVHGSRAPAMNIQRYTERVHRXARCSPACFVAAFVYIIRYLERPGATSMTLRLTSLNVDRLLITSLLVAAXFLDRKCYNNAYYAKIGGASTEEMNRLERTFLFDLDFRLNITAEMFEKHCLMLQRQTVPWWFKRTNSP

SEQ ID NO: 1519 - protein, 487 aa, Rhizobium sp. NGR234
MTLSFDPDSLPLPVGHFIGDRLLPAEGFIDMHRPSDGKAYAGCPIADEALVDQAVETAKKALKASNWGGLRPRERTVALQRWADLIESEAETLAKLEALSSTRPVGHLVAGDIAVSAEQIRFFAEFADKEGSDLVPTDDSNLGMIMTEPYGVVAAITPWNFPVSMAAWKLGPALAAGNAVVLKPSEMTPFSTVYLAELAIRAGMPAGLINIVLGDGTVTGTAITGHPDIAKVSFTGSTGAGAAIMANIARTGVKPMTLELGGKSPQLVFADADLDKAAAAIAQSMLSNAGQACVAGSRLIVEESVAAPLAEAIVTRMKAAKPGPTWDEATEYSPIISKRQLNRIHGIVEAAVAAGGECLFGGKQMDAPGYFYQPTLMAVRDSSSPAITEEIFGPVLTMQTFADEEEALALADHPTYGLAAGLFTRDLSRALRLTRRLQAGTVWVNRYSRSRDHILPTGGYKRSGIGKDLGREAYHANRKSKSVLISL

SEQ ID NO: 1520 - protein, 388 aa, Escherichia coli
TLQNGKLNVPENPIIPYIEGDGIGVDVTPAMLKVVDAAVEKAYKGERKISWMEIYTGEKSTQVYGQDVWLPAETLDLIREYRVAIKGPLTTPVGGGIRSLNVALRQELDLYICLRPVRYYQGTPSPVKHPELTDMVIFRENSEDIYAGIEWKADSADAEKVIKFLREEMGVKKIRFPEHCGIGIKPCSEEGTKRLVRAAIEYAIANERDSVTLVHKGNIMKFTEGAFKDWGYQLAREEFGGELIDGGPWLKVKNPNTGKEIVIKDVIADAFLQQILLRPAEYDVIACMNLNGDYISDALAAQVGGIGIAPGANIGDECALFEATHGTAPKYAGQDKVNPGSIILSAEMMLRHMGWTEAADLIVKGMEGAINAKTVTYDFERLMEGAKL

SEQ ID NO: 1521 - protein, 291 aa, Oryza sativa (indica cultivar-group)
MSAAPVVDAEYMAEVERARRDLRALIASKSCAPIMLRLAWHDAGTYDKATKTGGPNGSIRFPQEYSHAANAGIKIAIDLLEPMKQRHPKITYADLYQLAGVVAVEVTGGPTIDYVPGRRDSSDSPEEGRLPDAKKGAAHLREVFYRMGLSDKDIVALSGGHTLGKARPERSGFDGAWTKDPLKFDNSYFIELLKENSEGLLKLPTDKALVEDPTFRRYVELYAKDEDAFFRDYAESHKKLSELGFTPPRSAFIYKSCQKPKSLLMQTAAGVAVAAAVVAWAYLCESNKRLG

SEQ ID NO: 1522 - protein, 483 aa, Buchnera aphidicola str. APS (Acyrthosiphon pisum)
MQKNLIWFRNDLRVYDNTALHQACQNDTDKVISLFISTPKQWHNQSVSKKKISFMYYHLISLQKELLKLNIILYYHESTDFLNSIEYLIFFCKKHKVNNLFYNYEYAINERYRDYLVKKKLSQKGFLVKGFHDNLLFSNRQIRNQKNETYKVFTFFKKKVIQNLHNNIPQCFPVPSKRKSDRDIFLTSISLKNVNLNFNKNFFPVGEKEAINRLKNFCIYKFNDYFLKRDYPFLDATSMLSPYLSAGIISSRYCLKVLLKTKNSLPLNVLLTSPWFDQILWREFYYHLLIGFPKISRSESLVTWEKEIHWINNIKHFNAWKEGNTGFPIIDAGMRQLNELGWMHNRLRMITSSFLVKNLLINWREGEEHFISNLIDGDLALNNGGWQWSASVGCDSVPYIRIFNPLHQSKTFDESGNFIKKFIPELKNVPNHHIHQPHEWSKQKNFKIDYPNPIINYSESRKTSLSLFKQARLKLHKNGLKNS

SEQ ID NO: 1523 - protein, 455 aa, Rhodospirillum rubrum
MVSNALRDADLSYTIHPYTNLVAHETKGPLIAVRGEGVRVFDDKGKDYIEGMAGLWCASLGFSEPRLAAAAARQMAELPFFHMFSHKSHEPGIRLSEELVKRAPVPMARAFFCNSGSEANDTAIKMIWYINNALGRPQKKKIIARKRAYHGVTVASASLTGLPANHRDFDLPIANILHTSSPDYYREGKPGESEEAFAKRCADELEAMILAEDPNTVAAFFAEPIMGAGGVVLPPKGYFEHIQAVLKKYDILLVADEVICGFGRTGQYWGSQTFGLKPDILTCAKALSSAYMPISAVLVTEEVYKPLRDNSGKIGTFGHGYTYSAHPVAAAVALETLAIYDERDILGNVAVSGARLQERLRSFADHPLVGNVRGIGLIGAIELVADKATHGAFPASDAVGPRVVTKAEEAGVILRAMAGDVVAFSPPLIITPEEVDQMMDRFTVALEAVTAEVLG

SEQ ID NO: 1524 - protein, 305 aa, Nicotiana tabacum
MGLDYYDVLKVSRNASEEDLKRSYKRLAMKWHPDKNSQNKKEAEAKFKQISEAYDVLSDPQKRQIYDVYGDDALKSGQFASASPTSAGSNGRGFRFNTRDAEAIFAEFFGGSDSNSAAGVGRKAAPVENKLPCSLEELYKGSRRKMKISRILLDDSGKPTTVEEVLAIHIKPGWKKGTKITFPEKGNYEPGATPGDLIFVIDEKPHAVFKRDGNDLVINQKISLLDALTGKTISLITLDGRELTIPITDVVKPGHEHIIPNEGMPISKERGKKGNLKIKFDIKFPSRLSADQKSDIRRVLCRNSD

SEQ ID NO: 1525 - protein, 490 aa, Escherichia coli O157:H7
MSRMAEQQLYIHGGYTSATSGRTFETINPANGNVLATVQAAGREDVDRAVKSAQQGQKIWAAMTAMERSRILRRAVDILRERNDELAKLETLDTGKAYSETSTVDIVTGADVLEYYAGLIPSLEGSQIPLRETSFVYTRREPLGVVAGIGAWNYPIQIALWKSAPALAAGNAMIFKPSEVTPLTALKLAEIYSEAGLPDGVFNVLPGVGAETGQYLTEHPGIAKVSFTGGVASGKKVMANSAASSLKEVTMELGGKSPLIVFDDADLDLAADIAMMANFFSSGQVCTNGTRVFVPAKCNAAFEQKILARVERIRAGDVFDPQTNFGPLVSFPHRDNVLRYIAKGKEEGARVLCGGDVLKGYGLDNGAWVAPTVFTDCSDEMTIVREEIFGPVMSILTYESEDEVIRRANDTDYGLAAGIVTADLNRAHRVIHQLEAGICWINTWGESPAEMPVGGYKHSGIGRENGVMTLQSYTQVKSIQVEMAKFQSIF

SEQ ID NO: 1526 - protein, 498 aa, Bacillus halodurans C-125
MQKISTNDSKLNPRLVAFLNGGPKKLFINGEWVDSFSGQSFETMNPATGETLALVAEAGSEDIDFAVKAARKAFDEGPWSKMSAAERSRLIYKLADLIEDHKEALAQLETLDNGKPIRETANADIPLVIEHFRYFAGWATKIVGQTIPVQGHYFNYTRHEAIGVVGQIIPWNFPLLMAAWKLGAALATGCTVVLKPAEQTPLSALYLGELINEAGFPKGVVNIVPGFGHSAGTPLVNHPAVDKVAFTGSTDVGKLIMKQASESLKRVTLELGGKSPNIILPDADLSKAVPGSLMGIMFNQGQVCCAGSRLYVQKKQYDHVVADLVSLTNEIQQGDGLLEQTTMGPLISNQQQSRVKNYIDRGVEEGAELLTGGNIPYDQGYFVAPTIFADVDHSMTIAKEEIFGPVVAAMPFDSIDDLIDKANDSDYGLAAGVWTQDIKKAHYIAHRIKAGTIWVNCYNVFDAASPFGGYKQSGIGREMGSYALENYTEVKSVWVNMD

SEQ ID NO: 1527 - protein, 378 aa, Arabidopsis thaliana
MANHLQVPLTKPDRVKEEQEVEEEARLLARRLANAAASPMVLKAALELGVIDTITTVGGGDLWLSPSEIALRLPTKPCNLEAPALLDRMLRFLVSHSVLKCRTVIEENGQTGKVERVYAAEPVCKYLLNKSDDVSGSFASLFMLDLSDVFIKTWTHLEDVILEGRDAFSSAHGMKLFEYIQADERFGKVFNRAMLESSTMVTEKVLKFYEGFKDVKTLVDVGGGLGNTLGLITSKYPHLIGINFDLAPVLANAHSYPGVNHVAGDMFIKIPKGDAIFMKWILHDWTDEQCVAILKNCWKSLEENGKLIIVEMVTPVEAKSGDICSNIVFGMDMTMLTQCSGGKERDLYEFENLAYASGFSRCAIVCAVYPFSVIEIYK

SEQ ID NO: 1528 - protein, 320 aa, Buchnera aphidicola str. APS (Acyrthosiphon pisum)
MIKKIGVLTSGGDAPGMNAAIRGVVRTALSERLEVFGIYDGYLGLYENRMVQLDRYSVSDMINRGGTFLGSARFASFYQDKIRSIAVQNIKKRKIDALVVIGGDGSYIGAQKLTEMGIPCISIPGTIDNDVSGTDYTIGYFTALQTVVEAIDRLRDTSSSHQRISIVEVMGRHCGDLTLAAAIAGGCEFIVLPEIDYKKEDLVIEIQAGIAKGKKHAIVAITEYICDVEELAQYIEKKTNRETRATILGHIQRGGAPVVYDRILASRMGAYSVELLIKGYQGKCVGIQNEKMVFNDIKNALKNMKRTFKKDWLITAKKLY

SEQ ID NO: 1529 - protein, 150 aa, Zea mays
MAMAYKMATEGMNVKEECQRWFMEMKWKKVHRFVVYKIDERSRAVLVDKVGGPGEGYEELVAALPGDDCRYAVFDFDFVTVDNCQKSEIFSIACKIFFIAWSPAASRIRAKILYATSKQGLRRLLDGVHYEVQATDPSEMGFDVIRGRAQ

SEQ ID NO: 1530 - protein, 275 aa, Arabidopsis thaliana
MSLFLKDDSIQIREVWNDNLESEMALIREVVDDFPFVAMDTEFPGIVCRPVGTFKTNTEYHYETLKTNVNILKMIQLGLTFSDEKGNLPTCGTDNKYCIWQFNFREFDLESDIYATDSIELLRQSGIDFVKNNEFGIDSKRFAELLMSSGIVLNENVHWVTFHSGYDFGYLLKLLTCQNLPETQTGFFEMISVYFPRVYDIKHLMKFCNSLHGGLNKLAELLDVERVGICHQAGSDSLLTSCTFRKLQENFFIGSMEKYSGVLYGLGVENGQIVH

SEQ ID NO: 1531 - protein, 167 aa, Zea mays
  unsure (1)..(167): unsure at all Xaa locations
MRGILTALGCSDWPQAKRARILACSRRMKHRGPDWTALYQXHEGNFLAQQRLTVISPLSGDQTLFSEDRTVVAAASGEIYNHKNVRKKVTGTPNFSTGSDCEVIIPLYYKYEENFVDTLDGEFAVVVYDTRDRTYTTDRDAIGVKPLYIGCGSDRSGCIAAEKNALN

SEQ ID NO: 1532 - protein, 180 aa, Arabidopsis thaliana
MASSMLSSATMVASPAQATMVAPFNGLKSSAAFPATRKANNDITSITSNGGRVNCMQVWPPIGKKKFETLSYLPDLTDSELAKEVDYLIRNKWIPCVEFELEHGFVYREHGNSPRYYDGRYWTMWKLPLFGCTDSAQVLKEVEECKKEYPNAFIRIIGFDNTRQVQCISFIAYKPPSFTG

SEQ ID NO: 1533 - protein, 137 aa, Triticum aestivum
SAEAALVELLLDEPERRVCELALPVLDRLCTCAEGRAELVAHAAGVAVVGKKVLRVSDAASERAVRVLRSVARHAATPAVLQEMAHAGVVGKLCLALRSELCGVKTKEKAHEVLKLHSRIWRSSPCLSPKFLALYPS

SEQ ID NO: 1534 - protein, 520 aa, Zea mays
MGEAQDYYNTSTALAGAAAAGLALLAVCSYYLLVGRRRGKAPKRYAPVVGTVFHQLYHVRRLHDYHTDLFRQRKTFQLLVPAGRRQIYTCDPAVVEHILRTNFANYGKGSFNYENMTDLLGDGIFAVDGDKWRQQRKIASYDFSTRALRDFSGAVFKRNAARLAGIVSGNAASGQPMEFQGLALRATMDSIFTIAFGLDLDTLGGSAEGSRFAAAFDDASEFTLLRYVNAFWKAQRFLGVGSEAALKKRVKVVDEFVYKRIRERAQELSDSKMATEDTVPDSRQDMLSRFIHTATNESGTVDYKYLRDIILNIVIAGKDTTAGALAWFLYMACKHPEIQEKICQEAAKATSASETAGVDEFAQSLTDEALNKMHYLHAALTETLRLYPSVPLDNKQCFGDDVLPDGSSVSKGDIVFYVPYAMGRMEYLWGKDAEVFRPERWLDQDGEFQQESPFKFTAFQAGPRICLGKEFAYRQMKIFAAVLLRFFVFRLRDGDKASVNYRTMITLHIDEGLHLTATAR

SEQ ID NO: 1535 - protein, 349 aa, Oceanobacillus iheyensis HTE831
MEALNLYGIEDLRYEDTPKPMIEKDDDVIIKVKSVGICGSDTSRYKKLGPYVEGMTFGHEFAGEVIEVGKSVTNFKSGDRVVACPTFSCGNCHYCREGHPTRCVELTVIGARNPGAYAEYTKLPEGHVKILPDSIDDDTAALVEPSAVVAHGFYRASITPGSSVAIMGVGSIGLLAVQWAKIFGASKVIAIDIDDHKLKIAQELGADIVVNPMKENAEGIVKQHTDELGVDLAVESAGSPITSEQVLALPKKGGEVVFLGIPYGDITLKRYYFEKIVRNELRILGSWNALSAPFPGKEWNATLHYMSTGQLNIKPMISHRLGLQAGPEIFHQITNKLSDAVKVIFHPGK

SEQ ID NO: 1536 - protein, 157 aa, Brassica rapa subsp. pekinensis
SNADKLLTEFIEKQLIDYAKNSKKVVGNSTSLLSPYLHFGEISVRRVFQCARMKQIIWARDKNGQGEESAVLFLRGIGLRDYSRYICFNFPFTHEQSLLSHLRFFPWDADVEKFKAWRQGRTGYPLVDAGMRELWATGWMHNRIRVIVSSFAVKFLL

SEQ ID NO: 1537 - protein, 475 aa, Staphylococcus epidermidis ATCC 12228
MRNFTKQYINGEWVDSASGETIDVINPATEEVMGKIAKGNEEDVNKAVDAADKVYLEFRHSSVEERRELLDKIVKEYQNRKNDLIEAITDELGAPLSVSENVHYQMGLNHFTAARDALDSFQFEEQRGDDLVVKEAIGVAGLVTPWNFPTNQTSLKLAAAFAAGSPVVLKPSEETPFAAIILAEIFDKVGVPKGVFNLVNGDGSGVGNPLSEHPKVRMMSFTGSGPTGSKIMEKAAKDFKKVSLELGGKSPYIVLDDVDVEEAANATTKKVVNNTGQVCTAGTRVLIPESIKEDYLTAVKEAFSKVKVGQPREEGTQVGPIISKKQFDQVQDYIDKGINEGAELFYGGPGKPEGLDKGYFARPTIFINVDNHMTIAQEEIFGPVMSVITYNNLDEAIEIANDTKYGLAGYVIGKDKDTLRHVARSIEAGTIEINEAGRKPDLPFGGYKESGLGREWGDYGIEEFLEVKSIAGYFK

SEQ ID NO: 1538 - protein, 344 aa, Oceanobacillus iheyensis HTE831
MKALVKTELGHGNLHIQNVEEPSVSSHQVKIKVAYAGICGSDIHTYEGHYKVAAPVTLGHEFSGRIVEVGEGVTDFKVGDRVTSETTFSICGECRYCQTGDYNLCNHRKGLGTQQNGGFTNYLIAREESLHHLPDEVDDRSASMTEPLACTYHAIQKINIKPGDLVVVLGPGPIGLLAAQVAKSYGATVMMSGLDNDKIRLDKAKEVGIDYVINIQEEDIKEKIAALTDGYGVDVVLECSGSIHAANQGLDLLRKKGSYAQVGIFPDSHVKFDMEKVIQKEIHVVGSRSQKSADWEPSLQLMKEKKVDAKALVTHEFTIDQWDEAYQAIKDGEAIKVLLKPLQD

SEQ ID NO: 1539 - protein, 268 aa, Mesorhizobium mediterraneum
RVTRHTMVHEQMSRFFTGFRRDAHPMAVMCGVVGALSAFYHDSTDISDPYQRMVASMRLIAKMPTIAAMAYKYHIGQPFIYPKNELNFAANFLHMCFAVPCEEYKINPVPARAMERIFILHADHEQNASTSTVRLAGSSGANPFACIAAGIACLWGPAHGGANEAALNMLGEIGHVDHIPEFIARAKDKNDPFRLMGFGHRVYKNYDPRAKIMQKTAHEVLGELGIKDDPLLDIAMELEKIALTDSYFIEKKLYPNVDFYSGITLKAL

SEQ ID NO: 1540 - protein, 57 aa, Triticum aestivum
MAVEGTDNCIDIILAIILPPLGVFFKFACGIEFWICLLLTFFGYLPGIIYAVWVITK

SEQ ID NO: 1541 - protein, 347 aa, Solanum tuberosum
MADECAAFVKGTELPVKRPREEEAETEMEAANNSNNNNGCSTNEKEEPSPYISSVLPGWFSEISPLWPGEAHSLKVEKILFQGKSDYQNVLVFQSSTYGKVLVLDGVIQLTERDECAYQEMITHLPLCSIPNPKKVLVIGGGDGGVLREVSRHSSVEQIDICEIDKMVVEVAKQFFPDVAVGYEDPRVNLRIGDGVAFLKNVPAGTYDAVIVDSSDPIGPAQELFEKPFFESIAKALRPGGVVATQAESIWLHMHIIEEIVANCRQIFKGSVNYAWTTVPTYPSGMIGFMLCSTEGPAVDFKNPINPIDDESPVKTIEPLKFYNSEIHQASFCLPSFAKRVIETKGK

SEQ ID NO: 1542 - protein, 502 aa, Avicennia marina
  unsure (1)..(502): unsure at all Xaa locations
MAIRIPSRQLFIDGKWREPVNRKRLPIVNPATEETIGDIPAATAEDVNIAVEAARKAFFHNGGKDWATASGAHRAKYLRAIAAKVTEKKEELAKLEVLDCGKPLEEAAWDMDDVAGCFEYFADLAERLDSNQIPVSLPMDTFKCHVLKEPIGVVGLVXPWNYPLLMATWKVAPALAAGCTAILKPSEIASVTCLELAQVCKEVGLPAGVLNILTGLGPEAGAPLASHPHVDKITFTGSGATGSKIMTAAAQLVKPVTLELGGKSPIVVFEDVDLDTAAEWTLFGCFWTNGQICSATSRLLVHESIATTFLEKLVKWCEKIKISDPLEEGCRLGPIISRGQYEKVMKFISTAKEEGATILCGGARPEHLEKGYFVQPTIITDVKTSMQIWIEEVFGPVLGVKTFSKEDEPFELANDPHYGWAAAVLSQDLERCERMTKAFQAGIVWVNCSQPCFCQAPWGGKKRSGFGRDLGEWGLDNYLNVKQVTRYVSSEPWDWYKSPSKL

SEQ ID NO: 1543 - protein, 268 aa, Rhizobium galegae
RVTHHTMVHEQMSRFFTGFRRDAHPMAVMCGCVGALSAFYHDSTDITDPHQRMVASLRMIAKMPTLAAMAYKYHIGQPFVYPQNNLDYASNFLRMCFAVPCEEYVVNPVLSRAMDRIFILHADHEQNASTSTVRLAGSSGANPFACIAAGIACLWGPAHGGANEAALNMLTEIGTVDKIPEYIARAKDKNDPFRLMGFGHRVYKNYDPRAKIMQKTTHEVLGELGHKDDPLLQVAMELERIALTDEYFIEKKLYPNIDFYSGITLKAM

SEQ ID NO: 1544 - protein, 268 aa, Sinorhizobium terangae
  unsure (1)..(268): unsure at all Xaa locations
RVTHHTMVHEQMSRFFTGFRRDAHPMAVMCGCVGALSAFYHDSTDITDPHQRMVASLRMIAKMPTIAXMAYKYHVGQPFVYPKNDLDYASNFLRMCFAVPCEEYVVNPVLSRAMDRIFILHADHEQNASTSTVRLAGSSGANPFACIAAGIACLWGPAHGGANEAALNMLAEIGTVDRIPEYIARAKDKNDPFRLMGFGHRVYKHYDPRAKIMQKTTHEVLAELGHKDDPLLEVAMELERIALTDEYFIEKKLYPNIDFYSGITLKAL

SEQ ID NO: 1545 - protein, 459 aa, Brassica rapa
MTSINVKLLYHYVITNLFNLCFFPLTAIVAGKAYRLTIDDLHHLYYSYLQHNLITIAPLFAFTVFGSVLYIATRPKPVYLVEYSCYLPPTHCRSSISKVMDIFYQVKKSCPSRNGTCDDSSWLDFLRKIQERSGLGDETHGPEGLLQVPPRKTFAAAREETEQVIIGALENLFKNTNVNPKDIGILVVKSSMFNPTPSLSAMVKNNFKLRSNVRSFNLGGMGCSAGVIAIDLAKDLLHVHKNTYAFVVSTENITYNIYAGDNRSMMVSNCLFRVGGAAILLSNKPGDRRRSKYELVHTVRTHTGADDKSFRCVQQGDDENGKIGVSLSKDITDVAGRTVKKNIATLGPLILPLSEKLLFFVTFMGKKLFKDKIKHYYVPDFKLAIDHFCIHAGGRAVIDVLEKNLALAPIDVEASRSTLHRFGNTSSSSIWYELAYIEAKGRMKKGNKVWQIALGSGFK

SEQ ID NO: 1546 - protein, 268 aa, Rhizobium etli
RVTHHTMVHEQMSRFFTGFRRDAHPMAVMCGCVGALSAFYHDSTDITDPHQRMVASLRMIAKMPTLAAMAYKYHIGQPFVYPKNDLDYASNFLRMCFAVPCEEYVVNPVLSRAMDRIFILHADHEQNASTSTVRLAGSSGADPFACIAAGIACLWGPAHGGANEAAPNMLTEIGTVDRIPEYIARAKDKNDPFRLMGFGHRVYKNYDPRAKIMQKTTHEVLGELGVKDDPLLEVAMELERIALTDEYFIEKKLYPNIDFYSGITLKAL

SEQ ID NO: 1547 - protein, 275 aa, Desulfovibrio desulfuricans G20
MASISVRQAGCYYYPHRHAKSHTTSDHADIRGAACYAGSNIRHNSCPFHHAVRSVSKETYMEFFLDTADLDEIRLAGKQGLIDGVTTNPTLLSRQGGDWKKRMQQICDEVDGPVSLEVISPDAEGMLREAEELVRYGDNVVIKVPMTAEGLIATRTLTGKGIKTNVTLVFSAMQALLAAKAGATYVSPFLGRLDGIGHEGMEIVSQIRTIFDNYGYETKILAASIRHAQHVLDSALVGADVVTVPYSVLRQLMHHPLTDSGLDAFLADWNKLTQS

SEQ ID NO: 1548 - protein, 345 aa, Marinomonas mediterranea
MRGFFVTATNSAVEMLIANSNTFFILLGAIMVFAMHAGFAFLEVGTVRSKNQVNALVKIMTDFAISALVYFFIGYQIAYGINFFESAATLAEQSGYALVKFFFLMTFAAAIPAIISGGVAERARFYPMLISAAVIVGVAYPFLEGLIWNGNYGFQDWLETQFGAPFHDFAGSIVVHGFGGWVALAAIILLGTRNGRFRGDKLVAFAPSNIPFLALGAWILCIGWFGFNVMSAQTLDGISGLVAVNSLMAMVGGIIAAMILGKNDPGFIHNGPLAGLVAVCAGSDIMHPIGALATGLVAGALFTWLFTLIQQKFQHIDDVLGVWPLHGICGAWGGIAAGIFGLESL

SEQ ID NO: 1549 - protein, 458 aa, Brassica rapa
MTSINVKLLYHYVITNLFNLCFFPLTAIVAGKAYRLTIDDLHHLYYAYLQHNLITIAPLFAFTVFGSVLYIATRPKPVYLVEYSCYLPPTHCRSSISKVMDIFYQVRKADPSRIGTCDDSSWLDFLRKIQERSGLGDENHGPEGLLQVPPRKTFAAAREETEQVIIGALENLFKNTNVSPKDIGILVVHSSMFNPTPSLSAMVNNFKLRSNVRSFNLGGMGCSAGVIAIDLAKDLLHVHKNTYALVVSTENITYNIYAGDNRSMMVSNCLFRVGGAAILLSNKPGDRRRSKYELVHTVRTHTGADDYSFRCVQQGDDENGKTGVSLSKDITDVAGRTVKKNIATLGPLILPLSEKLLFFVTFMGKKLFKDKIKHYYVPDFKLAIDHFCIHAGGRAVIDVLEKNLALAPIDVEASRSTLHRFGNTSSSSIWYELAYIEAKGRMKKGNKVWQIALGSGFK

SEQ ID NO: 1550 - protein, 459 aa, Brassica oleracea var. alboglabra
MTSINVKLLYHYVITNLFNLCFFPLTAIVAGKAYRLTIDDLHHLYYSYLQHNLITIAPLFAFTVFGSVLYIATRPKPVYLVEYSCYLPPTHCRSSISKVMDIFYQVRKADPSRNGTCDDSSWLDFLRKIQERSGLGDETHGPEGLLQVPPRKTFAAAREETEQVIIGALGNLFKNTNVSPKDIGILVVNSSMFNPIPSLSAMVVNTFKLRSNVRSFNLGGMGCSAGVIAIDLAKDLLHVHKNTYALVVSTENITYNIYAGDNRSMMVSNCLFRVGGAAILLSIKPGDRRRSKYELVHTVRTHTGADDFSFRCVQQGDDENGKTGVSLSKDITDVAGRTVKKNIATWGPLILPLSEKLLFFVTFMGKKLFKDKIKHYYVPDFKLAIDHFCIHAGGRAVIDVLEKNLALAPIDVEASRSTLHRFGNTSSSSIWYELAYIEAKGRMKKGNKVWQIALGSGFK

SEQ ID NO: 1551 - protein, 475 aa, Rhizobium sp. NGR234
MKHARKFYIDGEWVEPSVSKTLEVIDPSTEQPMGTIALGSAADAEKAVAAARRAFASYSQTSKQERVELLRRILTILKRRNDELGDIISREMGAPLAMARAEQAGIGAAHFEQAIKSFETFAFDYMQGTTRIVHEPVGVVAMITPWNWPINQIACKVAAALATGCTMVLKPSEIAPFNAVLFAEIMDEAGVPKGVFNLVQGDGPTVGAALASHPDVDMVSFTGSTRAGIAVAQAAAPTVKRVHQELGGKSPNIILRSADFPAAVAAGVRRCFGNSGQTCTAPTRMLVPAERMDEAGAIAARQADALVVGPPSDSRTDLGPVASAAQFDKIQALIERGIAEGAELVAGGLGRPSHLNAGYYVRPTVFARVTNQMSIAREEIFGPVLSIIGYDSEDEAIAVANDTPYGLAAYIQGDPKETRALAGKLRSGTVRLNSSGWDSAAPFGGYKQSGNGREYGKFGLHEFTEIKGIVGFLNE

SEQ ID NO: 1552 - protein, 243 aa, Zea mays
  unsure (1)..(243): unsure at all Xaa locations
HRRRPRQLQELPKPDLPPLPKPVXPPRPDLPPLPKPEEQPPLPKPELPVPPQPLPIPPQPLPKPELPVPPXLFPVPPQPLPVPPQPMPKPELPVPPQPLPKPDMPVPPESLPKPELPVPPQPLPKPELPVPPEPLPKPELPVPPQPLLKPELPVPPEPLAKPELPMPPQPLPKPELPVPPEPLPKPELPVPPEPLPKPELPVPPEPLPKPELPPPVLPGELPPKPELVPLPPKAEIMPPLPKP

SEQ ID NO: 1553 - protein, 173 aa, Lemna gibba
MMVSTAAVARVRPAQTNMVGAFNGCRSSVAFPATRKANNDLSTLPSSGGRVSCMQVWPPEGLKKFETLSYLPPLSVEDLAKEVDYLLRNDWVPCIEFSKEGFVYRENNASPGYYDGRYWTMWKLPMFGCTDASQVIAEVEEAKKAYPEYFVRIIGFDNKRQVQCISFIAYKPT

SEQ ID NO: 1554 - protein, 283 aa, Hordeum chilense
MKIFLLFALLGLATTITTATVQFDPSGHGVQRPQQSYPQWQPVPQQQPFPQQDPQQQLLPQQQPFSQQQQLPQQHPFPQQMPLLPQPPQFPQQQPFAQPQQPLTQQPYPQEQPLSQQQPSVEEQQQLNVCKEFLLQQCNPNEKVSSLQSVIPFLRPQTWQQNSCQLKRQQCCRQLANINEQSRCPAIQTIVHAIVMQQQQVQQQVGHGFIQSQPQQLGQGMPIYPQQQPGHGFFLPQQQAQSFNLVRSLVIQTLPMLCNVHVPPYCSTTTAPFGSMPTGISGQ

SEQ ID NO: 1555 - protein, 475 aa, Mesorhizobium loti MAFF303099
MDTQMLIGSKFENGAETEESILNPKTGATILNLPEASQAQIEAAVAAAEKAFVSWSRTTPAQRSGYLLKIADRIEAEAKEFAALEALNCGKPINSVLNDEIPAIVDCYRFFAGAVRSMPGVVAGEYLPGHTSMVRRDPIGIVASIAPWNYPLMMMAWKLAPAIGGGNTVVFKPSEQTPLTALRLARILAEILPEGVVNVVLGRGDSVGNALINHPKVNMISITGDVATGKKVLQAAAKSVKRTHLELGGKAPVIVFDDADLGAVVNGLRAFGYYNAGQDCTAACRIYAGKKIYDKLVADLSSAVSTIKYNQPDDTENEIGPLISRRQRDRVSSFVERASELKHIEITTGGRPGEGTGFYYQPTVVAGALQEDEIVRREVFGPVVSITRFTEVDEAVNWANDSDYGLASSVWTKDVSRAMATAARLQYGCTWINTHFMLTNEMPHGGLKQSGYGKDMSLYALEDYTAVRHVMVAHA

SEQ ID NO: 1556 - protein, 284 aa, Hordeum chilense
MKIFLLFALLGLATTITTATVQFDPSGHGVQRPQQSYPQWQPVPQQQPFPQQDPQQQLLPQQQPFSQQQQLPQQHPFPQQMPLLPQPPQFPQQQPFAQPQQPLTQQPYPQEQPLSQQQPSVEEQQQLNVCKEFLLQQCNPNEKVSSLQSVIPFLRPQTWQQNSCQLKRQQCCRQLANINEQSRCPAIQTIVHATVMQQQQVQQQVGHGFIQSQPQQLGQGMPIYPRHQPGHGFFLPQQQAQSFNLVRSLVIQTLPMLCNVHVPPYCSTTTAPFGSMPRHRWPMK

SEQ ID NO: 1557 - protein, 136 aa, Neurospora crassa
MMSRQLRYIIYKLSDDFKEIVIESTSEGATENYDEFREKLVNAQTKSASGAISKGPRYAVYDFEYKLASGEGSRNKVTFIAWSPDDAGIKSKMVYASSKEALKRSLSGIAVELQANEQDDIEYEQIIKTVSKGTAA

SEQ ID NO: 1558 - protein, 479 aa, Burkholderia cepacia R18194
MEEAKHFIAGEWTLPAQLETIAVVDPSDGQPFASIARGTAPDIERAVAAARDAFAGPWGAASAAERGRVLMRLSARVAGSIEELAAIEARDTGKPLKQARADAAALARYFEFYAGAADKLHGETLPYQAGYTVLTVREPHGVTGHIVPWNYPMQIFGRSVGAALAAGNACVVKPAEDACLSLLRVAELAVEAGLPAGALNIVTGYGHEAGAALARHPGIDHISFTGSPATGKLVTQMAAENHVPVTLELGGKSPQIVFADADLEAALPVLVSAIVQNGGQTCSAGSRVLIERAVYEPLVERLATAFNGLRVGPSRADLDCGPLINAKQQQRVWDFLSDAQHDGIPMAAHGQVVADAPESGFYQAPALLRDVPPSHRLAQEEVFGPVLAAMRFVDEDEAVALANGTPYGLVAGIWTRDGARQMRLARRLRAGQVFINNYGAGGGVELPFGGVGHSGHGREKGFEALYGFTMLKTIAIRHG

SEQ ID NO: 1559 - protein, 117 aa, Brassica napus
MATVGRNIAAPLLFLNLIMYLIVLGFASWCLNRYINGQTNHPSFGGNGATLFFLTFSILAAVIGIASKLAGANHIRFWRNDSLAAAGSSSIVAWAVTALAMGLACKQINIGGWRGWR

SEQ ID NO: 1560 - protein, 112 aa, BARTONELLA SP. RL3725TL
ANEACLKMLQEIGSIKRIPEFIARAKDKNDPFRLMGFGHRVYKNYDPRAKIMQQTCHKVLKELNIQNDPLLDIAIELEKIALSDEYFIEKKLYPNVDFYSGIILKALGFPTE

SEQ ID NO: 1561 - protein, 337 aa, Glycine max
MAKETSVVYLYPSKSQVWGENFDHKKLVITTLAANGKKEESNGAPNDTYPAFPGWYADVSWPGEAHTYKIEKILFHGKSEFQELLVFESSRQGKVAILDGHIQLTENDEFAYQEMLTHLALCSIPDPKKVLLIGGGDGGILREISRHSSVEHIDICELDQMVIDVYSEFFPDIAVGYEDPRVHVHISDGVAFINSVPEGTYDVIISDAFPAMGHSADVLADECFLESVAKALRPGGVFSAPADSLWHKNFVVADTIANCKKIFKGSVNYAWTTVPTYASGVIGFMLCSTEGPPVNFKHPINKLNPEKNGVAKGPTKFYNPEIHAAAFCLPSFVDKVD

SEQ ID NO: 1562 - protein, 381 aa, Glycine max
  unsure (1)..(381): unsure at all Xaa locations
YSNFELLCSSTCFLTGPDHMMFEVWNPLGIVGVITAFNFPCAVLGWNACIALVCGNCVVWKGAPTTPLITIAVTKLVAEVLERNKLPGAIFTSFCGGADIGQAIAKDTRIPLVSFTGSSKVGLMVQQTVNERFGKCLLELSGNNAIIVMDDADXSNWLYXYFVCCCGXTGQRCTTCRRLFLHESIYTDVLDQLVEVYKQVKIGNPLEKGTLVGPLHTRTSVENFQKGISVIKSQGGKILTGGSVLESGGNFVQPTIVEISPDAPVVKEELFGPVLYVMKFQTLEEAIALNNSVPQGLSSSIFTQRPGTIFKWIGPRGSDCGIVNANIPTNGAEIGGAFGGEKATGGGREAGSDSWKQYMRRSTCTINYGSELPLAQGINFG

SEQ ID NO: 1563 - protein, 172 aa, Schizosaccharomyces pombe
MGDPTNNNDSETKPNPATYWKSRFPVARIKKIMQADQDVGKVAQVTPVIMSKALELFMQSIIQESCKQTRLHQAKRVTVSHLKHAVQSVEQFDFLQDIVEKVPDAPPIKAERKTKRPRARRAANEGEHNESVPAKKVKKNTVKEEEIEKDDESATTETPVKEEPTGEETEAD

SEQ ID NO: 1564 - protein, 180 aa, Musa acuminata
MVSSMMVSSAATFTRASPAQSSMVAPFTGLKSASAFPVTRKPNADLSHLPSNGGRVQCMKVWPIEGVKKFETLSYLPTMKDEALVKQIEYLLRSKWIPCLEFCPKGFVWRENHRSPGYYDGRYWTMWKLPMFGCTDAVQVAKEVEECKKEYPHAFIRIIGFDNNRQVQCISFIAYKPTGY

SEQ ID NO: 1565 - protein, 346 aa, Pirellula sp. 1
MKALLLTEYKNMQVTDVDEPEVGPDDVLVQVEACGICGSDIHGYDGSTGRRIPPLVMGHEAAGVVVQVGENVRDLELGARVTFDSMVSCGNCEFCREGHGNLCDNRMVLGVSCGDYRRHGAFAERISVPRRIVYRLPDTLPFEHAALVEAVSVAVHAAEVTPIKLGDTAVVVGAGMIGLLAVQAVRAAGATQVIAVDLNDKRLETAGTLGADVLLRADQVDVPEKVRELTGGRGADVALEVVGATPTVKTAIESVRKGGAVTLVGNVSPTIELPLQSVVTREIRLQGTCGCNGEYPQCIDLMNRGVINVEPLITAKISLADGPKWFDRLHAGDAEQMKVLVCPRSE

SEQ ID NO: 1566 - protein, 425 aa, Lactobacillus johnsonii NCC 533
MTTVIKNGTVYQNGHLIKADVLIDGQKIKAIGTDLEGEEIIDASGMIVSPGLVDVHVHYRDPGQTYKEDIKTGSQAAARGGFTTVGAMPNVTPVPNTAELMDKMVRENQKKGLVHILQYGPVTNDETTDIIPDYAALKKAGAFALSNDGHGVQSAQTMYLAMQKAKENNLIIAAHAQDDSLFNKGIVNEGIAAEKLDLPPVTELAETTQIARDLLLAQKTGVHYHICHVSTKTSVELVRLAKARGIKVTCEVAPHHILLTDSDIPEDNAYFKMNPPLRSKEDQVALLVGLLDGTIDLIATDHAPHAKAEKQGGMRGAAFGITGSETAFSTLYTRFVKEEKVFTLEQLLSLLTDKPATVFGIENAGLLAPGENADIAIFDIEHQREIKEDDFKSKGVNTPFTGHKVYGETVMTFVDGKVVYQRGTK

SEQ ID NO: 1567 - protein, 389 aa, Clostridium tetani E88
MDVKEMALKLHSEKKGKLEVVGKISVKNREDLALAYTPGVAEPCVHISKDKNKVYEYTTKGNMVAVVTNGTAVLGLGNIGPEAALPVMEGKALLFKEFANVDAFPICLDTEDPEEIIRTVKLMAPGFGGINLEDIKAPECFYIEERLKKELDIPVFHDDQHGTAIVVLAGIYNALKIVDKKLEEAKILINGAGSAGIAICKLLLNAGACNIVMCDINGSLVEGDENLNPAQKEIAKVTNKEKEKGKLVDVIKDKDIFIGVSGPKILTKEMVSTMAKDSIVFAMANPEPEILPDEAKAGGARVVATGRSDFPNQINNVLVFPGIFRGALDVKAREINEEMKIAAARGVANLIKEEDLNEEYIIPDPFNKEVAESVSKEVRRIAKEMNICK

SEQ ID NO: 1568 - protein, 331 aa, Zea mays
MYPTYLCNSCGLPVSRNVSELFVSAMEKKKKKKKKKKKKKKKKKKKKKKKQAPKPSSYWGRPSAASHRIAFYNSKLSLLAAMAKNYPTVSAKYSEAVKKARRKLRALIAEKSCAPLMLRLAGHSAGTFNKSSRTGGPFGTMKCPGELAHGANAGLDIAVRLLEPIKEEFPTLSYANFYQLAGVVAVEVTGGPEIPFHPGREDKPQPPPEGRLPDVTKGSDHLRQVFGKQMGLSDQDIVALSGGHTMGRCHKERSGFEGAWTTNPLVFDNSYFKELLRGDKEGLLQLPSAKALLGDLVFRLLGGKYAANGKAFFDDYKEAHLKLSELGDADA

SEQ ID NO: 1569 - protein, 483 aa, Pneumocystis carinii
  unsure (1)..(483): unsure at all Xaa locations
MCCKAIKLGNARVFPVTTFRDAKKVRWINLLKSGKAKRNKSGKIIKQGEFQSKDVQDARIQPYRRWFSNTRVISQDVLNMFRESFAEKLNDPCKVLLKQNKLPMSLLMEPTKTRKANIIDIEPFDDTFGKKSXRKRAKLYASSIENLSNFAFESYENYIKKNSEYENVDKNIQKSFEAIFSKGTSKRIWNELYKXIDSSDVIIQLLDARNPLGTRCKHVEEYLKKEKPHKHMILLLNKCDLIPTWCTREWIKQLSKEYPTLAFHASINNPFGKGSLIQLLRQFSKLHSNRRQISVGFIGYPNTGKSSVINTLRSKKVCNTAPIPGETKVWQYVRMTSKIFMIDCPGIVPPNSNDSETEIIIKGALRIEKVSNPEQYIHAILNLCETKHLERTYQISGWENDSTKFIELLARKTGKLLKGGEVDESSIAKMVINDFIRGKIPWFIAPAQENDPSNIKLSNNTLVEKNHLTTLDDEIYNDANPNA

SEQ ID NO: 1570 - protein, 479 aa, Anabaena variabilis ATCC 29413
MSDLVLFWHRRDLRITDNIGLATARQHSSKVVGVFCLDPNILERDDVAPVRVTYMIGSLQELQQRYVQAGSQLLILRGDPVQAIPHLAEALNAKAVFWNWDVEPYSQTRDRAIIATLKDKGIQCLTHNWDQILHSPDEIRSGSNTPYTVYTPFWKNWSSKPKAKPVETLHNVEGLTEAEQELAQKAGVKALPTAKDLGFFWDADLIIAPGEAAAQAKLAEFTAKAITEYQEQRNFPGVNGTSQLSAALKFGVIGIRTVWQTTLEALENSRSEETTTSIRTWQQELAWREFYQHAMYNFPELADGAYRATFKNFPWETNEEHFQAWCEGKTGYPIVDAAMRQMNESGWMHNRCRMIVASFLTKDLLINPQWGEKYFMQKLIDGDLSANNGGWQWSASSGMDPKPLRIFNPASQSQKFDPDAEYIRQWVPELRSMDTEYLVTGKITPLERHAVGYVKPIVDHQKQQQLFKQRYQQQKAIGI

SEQ ID NO: 1571 - protein, 262 aa, Malus x domestica
MSPTDSSREENVYMAKLAEQAERYEEMVEFMEKVAKTVDVEELTVEERNLLSVAYKNVIGARRASWRIISSIEQKEESRGNEDHVAIIKEYRSKIETELSKICDGILNLLESHLIPSASSAESKVFYLKMKGDYHRYLAEFKTGGERKEAAESTLLAYKSAQDIALAELAPTHPIRLGLALNFSVFYYEILNSPDRACNLAKQAFDEAISELDTLGEESYKDSTLIMQLLRDNLTLWTSDITDDAGDEIKEASKRESSETQQ

SEQ ID NO: 1572 - protein, 358 aa, Rhizobium sp. NGR234
MMREYSIATIPADGIGPEVIAAGRTVLATLEKRLGDVKFTVENFDWGSDYYRKHGVMMPSDGLEQLKKFDAIYFGAVGAPDVPDHITLWGLRLPICQGFDQYANVRPTKILPGITSPLRNCGPGDLDWVIVRENSEGEYSGHGGRAHRGLPEEVGTEVAIFTRVGVTRIMRYAFKLAQSRPRKLLTVVTKSNAQRHGMVMWDEIAAEVAEEFPDVTWDKMLVDAMTVRMTLKPQSLDTIVATNLHADILSDLAGALAGSLGVAPTANIDPERRFPSMFEPIHGSAFDITGKGIANPVATFWTAAQMLDHLGEQDASARLMRAVERVTGARILTPDVGGTATTREVTEAVCDAIHSSNV

SEQ ID NO: 1573 - protein, 305 aa, Glycine max
  unsure (1)..(305): unsure at all Xaa locations
MEHFNNDDLEYVVDEYYDVPDFAVEDTSSDIVPELTSDVDSDFEDEFPTSNAKTDTTASEARNGKDIQGIPWERLNYSRDKYRETRLKQYKNYQNFSRSRHDLRKECLEVQKGETFYDFFFNTRLVKSTIVHFQLLRQVXVSSLAGPNIMLRNLLWATSKHDVYFMQNYSVMHWSALLRRGKEVLNVAKPIIPTLKRPGFLAQPVSRVQISTMTVKENLMVAGGXSRVSLYNLKHPGVLFCGKITTDDNAITNAVDVYSNPAGSLRVITANNDFQVRVFDAENFASLGWFKYDWSVNNTSVSPDG

SEQ ID NO: 1574 - protein, 283 aa, Hordeum chilense
MKIFLLFALLGLATTITTATVQFDPSGHGVQRPQQSYPQWQPVPQQQPFPQQDPQQQLLPQQQPFSQQQQLPQQHPFPQQMPLLPQPPQFPQQQPFAQPQQPLTQQPYPQEQPLSQQQPSVEEQQQLNVCKEFLLQQCNPNEKVSSLQSVIPFLRPQTWQQNSCQLKRQQCCRQLANINEQSRCPAIQTIVHAIVMQQQQVQQQVGHGFIQSQPQQLGQGMPIYPQQQPGHGFFLPQQQAQSFNLVRSLVIQTLPMLCNVHVPPYCSTTTAPFGSMPTGIGGQ

SEQ ID NO: 1575 - protein, 256 aa, Hordeum chilense
MKIFLLFALLGLATTITTATVQFDPSGHGVQRPQQSYPQWQPVPQQQPFPQQDPQQQLLPQQQPFSQQQQLPQQHPFPQQMPLLPQPPQFPQQQPFAQPQQPLTQQPYPQEQPLSQQQPSVEQQQQLNVCKEFLLQQCNPNEKVSSLQSVIPFLRPQTWQQNSCQLKRQQCCRQLANINEQSRCPAIQTIVHAIVMQQQQVQQQVGHGFIQSQPQQLGQGMPIYPQQQLGHGFFLPQQQAQFNLVRSLVIQTLPML

SEQ ID NO: 1576 - protein, 240 aa, Hordeum chilense
TTATVQFDPSGHGVQRPQQSYPQWQPVPQQQPFPQQDPQQQLLPQQQPFSQQQQLPQQHPFPQQMPLLPQPPQFPQQQPFAQPQQPLTQQPYPQEQPLSQQQPSVEQQQQLNVCKEFLLQQCNPNEKVSSLQSVIPFLRPQTWQQNSCQLKRQQCCRQLANINEQSRCPAIQTIVHAIVMQQQQVQQQVGHGFIQSQPQQLGQGMPIYPQQQLGHGFFLPQQQAQFNLVRSLVIQTLPML

SEQ ID NO: 1577 - protein, 256 aa, Hordeum chilense
  unsure (1)..(256): unsure at all Xaa locations
MKIFLLFALLGLATTITTATVQFDPSGHGVQRPQQSYPQWQPVPQQQPFPQQDPQQQLLPQQQPFSQQQQLPQQHPFPQQMPLLPQPPQFPQQQPFAQPQQPLTQQPYPQEQPLSQQQPSVEQQQQLNVCKEFLLQQCNPNEKVSSLQSVIPFLRPQTWQQNSCQLKRQQCCRQLANINEQSRCPAIQTIVHAIVMQQQQVQQQVGHGFIQSQPQQLGQGMPIYPQQQLGHGFFLPQQQAQFNLVRSLVIQXLPML

SEQ ID NO: 1578 - protein, 225 aa, Bacillus cereus G9241
MVIQWFPGHMAKARRQVTEKLKLIDVVIELVDARLPLSSRNPMIDEIITHKPRLVVLNKADMADDHLTKQWIAYFKEKGHMAISINAQAGQGMKEIAAACKVLVKEKFDKMVAKGIRPRAIRALIVGIPNVGKSTLINKLAKKNIAKTGDRPGVTTAQQWIKVGKEMELLDTPGILWPKFEDQLVGLRLATTGAIKDSILNLQDVAVYALRFYGETLPRAIKRAL

SEQ ID NO: 1579 - protein, 146 aa, Triticum aestivum
MSDEEHHFESSDAGASKTYPQQAGNIRKGGHIVIKGRPCKVVEVSTSKTGKHGHAKCHFVAIDIFTAKKLEDIVPSSHNCDVPHVNRVDYQLIDISEDGFVSLLTDSGGTKDDLKLPTDDNLSALMKSGFEEGKDVVVSVMSSMGE

SEQ ID NO: 1580 - protein, 110 aa, Brassica napus
  unsure (1)..(110): unsure at all Xaa locations
MSGVWXFKNGVIRLVENPNQXGSDTNSRRKVMVYLPTGEVISSXSXLEXILRSLGWERYFXXXDXDLLQFHKRSSSDLISLPKDFTKFXSXYMYDIVVXNPNYFHVRDSN

SEQ ID NO: 1581 - protein, 443 aa, Brucella melitensis 16M
MFLRSMLAFPPRRDNDMSGNQELIARRERLLGRNMSLFYQDPVHLVKGEGVWLWDADGRKYLDCYNNVPHVGHCHPRVVEAICRQASTLNTHTRYLHEGILDYVERLTATFDKSLDAAILTCTGSEANDVALRMAQAVTGKTGIIATDFTYHGNTTAVSQLSTRMPPVGGYGGHVRHVPAPDSYRPLGGKGGEAFAQAWAAEVEKAIASLQESPFGFSGLIIDPFFANEGFPDLPENFLAPAVAAVRKAGGVVIADEVQPGFGRTGGHMWGHQKAGIVPDIVTLGKPMGNGHPVGAVVAGADTLNAFRKAFRYFNTFGGNPVSCAAAMAVLDVLEEEKLQANALEVGAYARQGLEKLAQKHGMIGNVRGSGLFFGAELVLDRAEKTPAAEMATRVVNEMRERGVLMNKLGIHQNATKIRPPMPFSRENADLMLSTLDDVLGGL

SEQ ID NO: 1582 - protein, 287 aa, Archaeoglobus fulgidus DSM 4304
MGLLQDYSQRREEGEGRGSNFTRFSCWSCDFCRCLCNAEIAGESGGKVCCCGGKGGGPDQHSETRSCDNSGSWGRYGLAAFAPCSSLRLPAYLHLHEIQKIVIIFYATKIMGRHLTVFIIALAAVFAACAEEKEMAKSLTVKSAFENGGKIPAKYTCDGEDISPPLYIEGLREDVKSLVIICEDPDAPMGVFTHWIAWNVEPTSEIPENVPKTKFVDEPKMVQGRNDFGKVGYNGPCPPSGEHRYYFRIYAIDTLLQGDYSRQELLRAIEGHILQYGEIYGLYSRSR

SEQ ID NO: 1583 - protein, 371 aa, Oryza sativa (japonica cultivar-group)
MAAASLAPPTASFSPAPAPGRVKAAAPLLSRRPPGRFLLRVASESSSISGDTLLGLYEKERLSHSLYANEDYDKEMFWDNLDADLRYWTRSLRPVQWYPGHIAKTEKELKEQLKLMDVVIEVRDARIPLATSHPKMDAWLGNRKRIIVMNREDMVSNEDRNAWASYFANQGTKVVYSNGQLGMGTMKLGRMAKSLASTVNTKRREKGLLPRAVRAGIVGYPNVGKSSLINRLLKRRMCPAAPRPGVTRELKWVRFGSDLELLDSPGILPMRISDQTAAIKLAICDDIGERSYDFADVAAILVQLLVRHPAVGPEAFRRRYRLDMDSDCGKMFVTKLSVHLFNGDASQAAFRILSDYRKGKFGCVALERPPT

SEQ ID NO: 1584 - protein, 166 aa, Zea mays
  unsure (1)..(166): unsure at all Xaa locations
MDAVMFGLETPLMAALQHLLDVPDGDAGAGGDSDNKTGGGATRTYVRDARAMAATPADVKELPGAYAFVVDMPGLXGTGDIRVQVEDERVLVVSGERRREEREDDAKYLRMERRMGKFMRKFVLPDNADVDKVAAVCRDGVLTVTVEKLPPPEPKKPKXTIEVKVA

SEQ ID NO: 1585 - protein, 504 aa, Brucella melitensis 16M
MSKLDDNVAKAKTYLARFEKGVLNRIGGEDVAAADGATFETISPVDLKPLATVALGKAADIDRAARAAKAAFPEWAAMSGDARKKLLHKIADAIVARAEEIAFVEFMDTGQSLKFMAKAALRGAENFRFFADRAPEARDGKTLRGPGQVNMTTRVPIGPVGVITPWNTPFMLSTWKIAPALAAGCTVVHKPAEFSPLTARLLVEIAEEAGLPKGVWNLVNGFGEDAGKALTEHPDIKAIGFVGESRTGSLIMKQGADTLKRVHFELGGKNPVVVFADADLERAVDAAVFMIYSLNGERCTSSSRLLVEASIYEKFTALVAEKAKRIKVGHPLDPETVVGPLIHPVHEKKVLEYIEIGRSEGATVAAGGAKFAGPGGGCYVSPTLFTAAHNGMRIAQEEIFGPVLTAIPFKDEAEALALANDVKYGLTGYLWTNDVTRAFRFTDALEAGMIWVNSENVRHLPTPFGGVKNSGIGRDGGDWSFDFYMETKNIAFANAAHAIAKLGG

SEQ ID NO: 1586 - protein, 149 aa, Sulfolobus tokodaii str. 7
MNVKSSAFKNEDFIPVRYTCDGEDISPEIEWDKVQNAKSYALIVEDPDAPGGIFIHWIIYNIKGTKLPENIKKVEKTEFGIQGENDFGKIGYGGPCPPRTHPPHRYYFYVYALDTELPERSRITADELKNLMKGHIIDQGVIMGKYKRK

SEQ ID NO: 1587 - protein, 156 aa, Zea mays
MDAVMFGLETPLMAALQHLLDVPDGDNKTGGGATRTYVRDARAMAATPADVKELPGAYAFVVDMPGLGTGDIRVQVEDERVLVVSGERRREEREDDAKYLRMERRMGKFMRKFVLPDNADVDKVAAVCRDGVLTVTVEKLPPPEPKKPKTIEVKVA

SEQ ID NO: 1588 - protein, 443 aa, Oryza sativa (japonica cultivar-group)
MPPSTGSVPPAASTPAAGDEATAAGRVLLGRYELGGLLGRGASAKVYLARDLLTGRDVAIKSFPNPRHGGGLRGGEEDVLLRPAPIEREAAILPRLRHRHVMRLREILATRKKVHFVLDLAAGGELFSLLDASGRMTEDLARHYFRQLISAVRYCHSRGVYHRDIKPENLLLDDAGDLKVADFGLGAVADGALHHTLCGTPAYVAPEILSRKGYNPAKVDIWSCGVVLFVLAAGYLPFNDASLVNMYRKIYAGKFRCPAWFSPELRCLVRRILDPNPATRIDTEEIITHPWFRQDASHFAMAQLMQHGHDEEAKFKTEFKEDDMARDMTAFDILACSPGSDLSGLFGAEPGKERVFVGEPAAAVLSRVEEAGKKEGYMVTREGKKGTGPVYVKGENGGIVAKVCVFKIADAVSVVEVVKGYGAEAARFWKARLEPAMKPPAAI

SEQ ID NO: 1589 - protein, 348 aa, Mycobacterium leprae
MQDEGMRIGILTGGGDCPGLNAVIRAIVRTCDARYGSSVVGFQDGWRGLLENRRMQLCNDDRNDRLLAKGGTMLGTAHVHPDKLRAGLHQIKQTLDDNGIDVLIPIGGEGTLTAAHWLSQEDVPVVGVPKTIDNDIDCTDVTFGHDTALTVATEAIDRLHSTAESHQRVMLVEVMGRHAGWIALSSGLASGAHMTLIPEQPFDVEEVCCLVKRRFQRGDSHFICVVAEGAKPVPGSITLRQGGMDEFGHERFTGVAAQLGAEVEKRINKDVRVTVLGHVQRGGTPTAFDRVLATRFGVNAADASHAGEYGQMVSLRGQDIGRVPLEDAVRQLKLVPESRYDDAAAFFG

SEQ ID NO: 1590 - protein, 169 aa, Triticum aestivum
RREDVKQQHDNKNNNNNNNNIVGDEVCSAVTTDDSSAAVGSENSKSSASAKGHSKMTSKPASAAAATKSSHGRRKVKVDWTPELHRRFVQAVEQLGLDKAVPSRILELMGNEYRLTRHNIASHLQKYRSHRKHLMAREAEAASWTQKRQMYAAAGGPRKDAAAGGGPWV

SEQ ID NO: 1591 - protein, 310 aa, Magnetospirillum magnetotacticum MS-1
MKDPYLVLGVARTACDDEIKKAYRALARELHPDLNPGDTKAESRFKDISAAYDFLSDSTKRAQFDAGEIDATGSPKRRAWRTRPGPGPGAGPGAGPGAGGPRGGFGGFGENVDDIMAELFRRKQKGQAHARAKTRGGDVRHALTISFLDAAAGGTKRVTLMSGRTLEVRIPPGSTDGQTLRLKGQGHGAEDGAIPGDAFIELKVEDHPHFKRRDLDVLLDLPVSVQEAVLGGKVPVPTIDGKVMVTVPPGSNTGAVLRLKGKGIAGPQGTRGDQLVTLSVVLPEDAEFRQLVEKWGPRHGYDPRAKAGLG

SEQ ID NO: 1592 - protein, 321 aa, Oryza sativa (japonica cultivar-group)
MATIPEVPASELIQTMPRVGMGTAAFPFTSSEDTTAAMLRAIELGYRHFDTARIYATEGCVGEAVAEAVRRGLIASRADVFVTSKIWCSDLHAGRVVPAARETLRNLGMDYVDLLLVHWPVSLTPGNYDFPFPKEVILPSFDMEGVWRGMEECHRLGLARAIGVSNFSAKKLEQLLSLAAVRPAVNQVEVNPMWQQRTLREVCRREGVQLCGYSPLGAKGTPWGSAAVMDSGVLQEIAGAKGKTLAQICLRWLYEQGDVLLVKTYNEKRMKENLDIFNWELTDEERERISQLPQLRGLPGLEFISDHGPYKSVEDLWDGDV

SEQ ID NO: 1593 - protein, 322 aa, Oryza sativa (japonica cultivar-group)
MAMATIPEVPASALLPTMPRIGMGTAAFPFTSSEETTAALLRAIELGYRHFDTARLYATEGCVSEAVAEAVRRGLVASRADVFVTSKLWCSDLHAGRVVPAARETLRNLGMDYVDLLLVHWPATVAPGSYDFPFPKEEMAPAFDMEGVWRGMEECHRLGLARAIGVSNFSAKKLEQLLSFAVVRPAANQVEMNPMWQQRTLREVCRREGVQLCGYSPLGAKGTPWGSAAVMDSGVLHDIAQTKGKTLAQICLRWMYEQGDVLLVKTYNENRMKENLDIFDWELTEEERDKISKLPQQRGLTGMQFVCDNGPYKCVEDLWDGA

SEQ ID NO: 1594 - protein, 481 aa, Burkholderia cepacia R18194
MVPRTLAHIGGCSVPARSGRTFAAINPATEAVIAEVASCDAPDVDDAVRAARHAFESGAWSRCAPAERKRVLCRLGELIASHGAELALLDSLNMGKRVADAFSIDVPAAGGLFSWYGEAVDKLHGEVASTDPGNLAVVTREPLGVVGAVVPWNFPLDMVAWKVAPALAAGNSVVLKPAEQSPLSALRLAELALEAGLPPGVLNVVPGYGETAGRALGLHPDVDVLAFTGSTAVGKKFLEYAAQSNMKQVWLECGGKSPNLVFDDTDDLDLAARKACFGIFFNQGEVCSANSRLLVQRSIHDAFVDRLIAHAAAFMPGDPLDPSSGMGAIVDEQQHRRVREWIARGRDSATLAIGGGAPRVDGKGYFIEPTIFIDVKHDDAIAREEIFGPVLSVMAFDTEDEAVRLANDSIYGLAASLWTGSLSRAHRVSGRLRAGTVSVNTVDALSAQTPFGGFRQSGFGRDLSLHAIDKYTGLKTTWISY

SEQ ID NO: 1595 - protein, 463 aa, Burkholderia cepacia R18194
MNAPNFPHRTTQDYQRSDAAHHLHAFVDQKALNEEGARVMVRGEGVHLWDNDGNRYLDGMSGLWCTNVGYGRPELVDAAARQMKELSYYNMFFHTTHPSVIELSERLFALLGNRFSHVVYTNSGSESNEVLIRTVRRFWDVMGKPEKKVLIGRVNGYHGSTVGSASLGGMAFMHEMGDLPIPNITHVDEPYWYANGGDLSPEAFGKQAALSLERKILEIGADRVAAFVAEPFQGAGGMIFPPDGYWQEIERICRQYDVLLCADEVIGGFGRTGEWFAHRHFGFEPDLICVAKGLTSGYVPMGGLIMSRRVGDALVDKGGVYAHGLTYSGHPVAAAVALANLDVLEREGLVERTKTDTGPYLQKALRDAFGSHPLVGEVQGVGAVGAIQFAKNKATRERFANEADLTWHSRTVGFELGAIVRSTNGRLIVAPPLVIDHAQIDELVDTMRKAVDATAREVLGIDC

SEQ ID NO: 1596 - protein, 493 aa, Pseudomonas putida KT2440
MTLVRFQMCIDGQWRDAQSGKTFDSLNPATAQAWAQLPDADEADVELAVQAAQRAFDSKAWRSITATARGKLLRRLGDLIAENKEHLAQLESRDNGKLIRETRGQVGYLPEFFHYTAGLADKLEGGTLPLDKPDLFAYTVHEPIGVVAGIIPWNSPLYLTAIKLAPALAAGNTIVLKPSEHASATILELARLALEAGFPAGVVNVVTGYGPSTGAALTRHPLVRKIAFTGGAATARHVVRSSAENFAKLSLELGGKSPNIIFADADLDSAINGAVAGIYAASGQSCVAGSRLLVQDEIFDEFVERLIARAKRIRIGNPQDDASEMGPMATAQQLAVVEGLVAAAKAEGAKLHMGGKRADVEGDGWFYEPTLFECDSNAMTIMQEEVFGPVAAVIRFKTEEEALAMANDSQFGLAAGIWTRDLGRAHRLARDVRSGIIWVNTYRAVSAMAPIGGFKNSGYGRESGIDSVLAYTELKTVWINLSTAPMPDPFVMR

SEQ ID NO: 1597 - protein, 476 aa, Sphingomonas paucimobilis
MTAYPSLHMIIDGEAVTGGDRRTQTIVNPATGETLGELPLADTADLDRALETAQRGFQRWRNSTPQERAAVLSGAARLLMERQETLARIATMEQGKTLAESRIEVMMVAGLFNFYAGEVFRLYGRALVRPAGTRSTVTYEPVGPLAAFSPWNFPLGNPGRKLGAPIAAGCSVIMKSAEETPASALGVLQCLLDAGLPSDVAQAVFGVPDEVSRYLLASPVIRKLSFTGSTVVGKHLAKLAADDLKRTTMELGGHGPVLVFNDVDVDRVLEVMVGHKYRNAGQVCVSPTRFIVQEDVYETFRDGFAERAKALRVGNGLEDGIQMGPMANARRPDAMERLNRSAVDAGATLNAGGERIGNQGFFYAPSVLSDVPLDAEIMNEEPFGPVALINPYRTADEMIAEANRLPYGLAAYSWTNDVKMQRRIAREVETGMLGINSVAIGGADSPFGGVKWSGHGHEDGPEGVQACLVTKAVHEG

SEQ ID NO: 1598 - protein, 221 aa, Zea mays
MSAPPPPASSDDDGKPADEEGVEIREVWANNLEAEFAVIRDIVDDYPYIAMDTEFPGIVCRPLGSFRSNDEYNYATLKANVDMLSLIQLGLTLSDENGALPARGTGGRPCTWQFNFRGFDPRSDPANADSIDLLRNSGIDFDRFTTEGADTGHFAELLMSSGVLLNAELQWVTFHSGYDFGYLLKLLTGRNLPDTMPGFFDLIRIYFPVLYDIKHLMKYCG

SEQ ID NO: 1599 - protein, 426 aa, Listeria monocytogenes str. 4b F2365
MYVLKNGQVLNASGELENKDVLIQNGKVNLIADSIEVTSGEEFDATGKLIAPGFIDVHVHLREPGGEHKETILTGTQAAARGGYTTICSMPNTKPVPDSKEVMESLQAKIKETAKVRVLPYASITTSLGTDELVDFEALKEAGAFAFTDDGVGVQLAGTMYEAMKRAAALDMAIVAHCEDNSLIYGGVVHDGIFAEKEGLKGIPNIAESVQIARDVLLAEAAGCHYHVCHISTKESVRVVRDAKRAGIRVTAEVSPHHLILDEEAIPGNDGNWKMNPPLRSKEDRAALLEGLLDGTIDFIATDHAPHAAEEKNVPMEQAAFGIVGLETAFPLLYTHFVKTNEWTLKQLIDWMTVKPAECFKLPYGKLEEGSVADIVVLDLEKEANIDPATFYSKGKNTPFVGETCIGWPVATFSEGTLVYNEGEIK

SEQ ID NO: 1600 - protein, 484 aa, Triticum aestivum
MANNNSTYGENVSRKSHTPSAIVIGGGFAGIAAANALRNASFEVVLLESRDRIGGRVHTDYSFGFPVDLGASWLHGVCEENPLAPIIGRLGLPLYRTSGDDSVLFDHDLESYALYDTNGSQVPQEFVEKIGKVFEAILEETGKLREEMKEDISIAKAIAIVLERNPHLRQEGIAHDVLQWYLCRMEGWFATDADAISLQCWDQEVLLPGGHGLMVRGYRPVINTLAKGLDIRLGHRVVEIVRHWNRVEVTVSNGKTFVADAAVITVPLGVLKSNTVKFEPRLPEWKEEAIRELSVGVENKIVLHFSEVFWPNVEFLGVVSSTTYGCSYFLNLHKATGHAVLVYMPAGRLACDIEKMSDEAAAQFAFSQLKKILPNAAEPLNYLVSHWGSDENTLGSYTFDGVGKPRDLYEKLRIPVDNLFFAGEATSVQYTGTVHGAFSTGEMAAEECRMRVLEKFRELDMLEMCHPMAEQTATVSVPLLISRL

SEQ ID NO: 1601 - protein, 449 aa, Zea mays
MSASVGRTRVGRYELGRTLGEGTFAKVKFARNVETGENVAIKILDKEKVLKHKMIAQIKREISTMKLIRHPNVIRMYEVMASKTKIYIVMELVTGGELFDKIASRGRLKEDDARKYFQQLINAVDYCHSRGVYHRDLKPENLLLDASGTLKVSDFGLSALSQQVREDGLLHTTCGTPNYVAPEVINNKGYDGAKADLWSCGVILFVLMAGYLPFEDSNLMSLYKKIFKADFSCPSWFSTSAKKLIKKILDPNANNRITIAELINNEWFKKGYQPPRFETADVNLDDVNSIFDESGEPAQLVVERREERPSVMNAFELISTSQGLNLGTLFEKQTGSVKRETRFASRLPANEILSKIEAAAGPMGFNVQKRNYKLKLQGENPGRKGQLAIATEVFEVTPSLYMVELRKSNGDTLEFHKFYHNISNGLKDVMWKPESGIVEGDEARQRRSP

SEQ ID NO: 1602 - protein, 471 aa, Parachlamydia sp. UWE25
MTNPSIVWFRQDFRLEDNPALNAATQKGGPVIPVFNWVFNPEKEWQLGGASQWWLYYSLISLKNDLSELGLSLIIRKEDPLKSLLEIAHETGADTVYWNRRYEPMLIQDDAKIKTELQKQGIKAHSFNGNLLFEPWTIANKQGKPFQVFTPFWNQCLKLNDPEVPLPVPHSLKKFVGQLQTESIDSLNLLPKIKWDKGLKEVWSPGAKSAKALLKKGLTGVIDQYLDIRDLPDHDGTSLLSPYLHFGEISPRMIWQAVKENSTSKGAEGYLRQIGWREFAHHLLYHFPETPQKPLRSQFNSFSWKNDKQNLKAWQKGQTGYPIIDAGMRQLWKIGWMHNRVRLIVGSFLVKDLMIHWIEGAKWFWDTLVDADLANNTMGWQWIAGCGADAAPYFRIFNPITQGEKFDPEGNYVKKWVPELINLPKEWLHQPWEAPEEILRQSGIELGINYPKPIVNHAKAREEALQAYSRL

SEQ ID NO: 1603 - protein, 162 aa, Glycine max
  unsure (1)..(162): unsure at all Xaa locations
ASSMISSPAITTINHTNTNIITPFTNLKSITNFPTKKTNNNITSITSNNKRIQYIPIXPPINKKKFKTLSYLPDLDNTQLAEKIXYLLRKEXNSLLXFHLNHNFIYHNHNRSPKYYNERYXTIYKLPIFGYTNTSQVLKXLEQAKTTYPNNCIHIMIFNNTQ

SEQ ID NO: 1604 - protein, 588 aa, Zea mays
  unsure (1)..(588): unsure at all Xaa locations
MCGILAVLGCSDWSQAKRARILACSRRLKHRGPDWSGLYQHEGNFLAQQRLAVVSPLSGDQPLFNEDRTVVVVANGEIYNHKNVRKQFTGTHNFSTGSDCEVIMPLYEKYGENFVDMLDGVFAFVLYDTRDRTYVAARDAIGVNPLYIGWGSDGSVWIASEMKALNEDCVRFEIFPPGHLYSSAGGGFRRWYTPHWFQEQVPRTPYQPLVLREAFEKAVIKRLMTDVPFGVLLSGGLDSSLVASVTKRHLVETXAAEKFGTELHSFVVGLEGSPDLKAAREVADYLGTIHHEFHFTVQDGIDAIEEVIYHDETYDVTTIRASTPMFLMARKIKSLGVKMVLSGEGSDELLGGYLYFHFAPNKEEFHRETCRKVKALHQYDCLRANKATSAWGLEVRVPFLDKEFINVAMGMDPEWKMYDKNLGRIEKWVMRKAFDDDEHPYLPKHILYRQKEQFSDGVGYNWIDGLKSFTEQQVTDEMMNNAAQMFPYNTPVNKEAYYYRMIFERLFPQDSARETVPWGPSIACSTPAAIEWVEQWKASNDPSGRFISSHDSAATDHTGGKPAVANGGGHGAANGTVNGKDVAVAIAV

SEQ ID NO: 1605 - protein, 494 aa, Sphingomonas sp.
MTSVSSSPITDTILNFIDGSYREGSEGKSFSNVNPATGAEIGVVHEASQADVADAVAAAKAALTGPWGKMTTAERVKLITAVATEIERRADDFLAAEVADTGKPRHVASHIDIPRGAANFRMFADVVSTMPGESFNTPTPDGGQAFNYTVRKPKGVVAVVCPWNFPLLLMTWKVGPALACGNTVVVKPSEETPRTAALLGEVMNAVGMPKGVYNVVHGFGPGSAGEFLTSNPDVDAITFTGETGTGQAIMQKAATGVRDISFELGGKNPAIVFADADLDKAVEGLSRSVFLNTGQVCLGTERVYVERPIFDAFVARMAAAAQDFKPGVTGDRAYLGPLISAEHREKVLGYYRRAVEDGATVVTGGGVPEISGAEAGGFFVEPTLWIDVAHGDTVMREEIFGPCCGILPFDSEDEVIALANDTVYGLCASVWTENLSRGHRVAAAMEVGVCWVNSWFLRDLRTAFGGSGHSGIGREGGVHSLEFYTEITNICVKL

SEQ ID NO: 1606 - protein, 568 aa, Zea mays
GRDLTKFACDDLTIGFFFPPPPPPPPSSGYTLLRDPRHNKGLAFSEAERDAHYLRGLLPPALASQELQEKKLMQNLRQYERPLHRYIAMMDLQERNERLFYKLLIDNVEELLPVVYTPTVGEACQKYGSIYRRPQGLYISLKDKGKILEVLKNWPERSIQVIVVTDGERILGLGDLGCQGMGIPVGKLSLYTALGGVRPSACLPITIDVGTNNEALLNDDFYIGLRQRRATGEEYHELVEEFMAAVKQNYGEKVLTQFEDFANHNAFDLLEKYRESHLVFNDDIQGTASVVLAGLLAALKVVGGTLADHTYLFLGAGEAGTGIAELIALEMSKHTGSPIEECRPKIWLMDSRGLIVASRKESLQAFKKPWAHEHGAVETLLEAVRSLKPTVLIGTSGKGGTFTKDVVEAMASQNERPVVFALSNPTSHSECTAEQAYTWTEGRAVFASGSPFPAVELDGRALVPGQSNNAYIFPGFGLGVVISGAIRVRDDMLLAASEALAEQVTEAHYAKGLIFPPFTNIRAISARIAAKVAAKAYELGLASRLPRPDDLVSYAESCMYTPTYRSYR

SEQ ID NO: 1607 - protein, 317 aa, Haemophilus influenzae 86-028NP
MTTQLDSLRNMTVVVADTGDIDAIKKYQPQDATTNPSLILSASALPQYAPLIDEAVAYAKAQSNDKAQQLIDAEDKLAVNIGLEILKIVPGRISTEVDARLSYNTQATVEKARKLIALYNAAGISNDRILIKIASTWQGIRAAEILEKEGINCNLTLLFSEAQARACAEAGVYLISPFVGRILDWYKANSDKKEYAPAEDPGVISVTKIYNYYKEYGYNTVVMGASFRNVGEITELAGCDRLTIAPALLKELQENSTALIRKLEYKGEVKAKPQPLTEAEFYWQHNSDAMAVEKLAEGIRKFAIDQEKLETMLSAKL

SEQ ID NO: 1608 - protein, 293 aa, Hordeum vulgare subsp. vulgare
MSPTLSLKLKKSSHTPQSSVSSSTMLRLFKKEAACQSPSTLPVAMDMGLEVSSSSPSSSSVSSSPEHAARRASPAKRPAGRTKFRETRHPVYRGVRRRGNTERWVCEVRVPGKRGARLWLGTYATAEVAARANDAAMLALGGRSATCLNFADSAWLLAVPSALSDLADVRRAAVEAVADFQRREAADGSLAIAVPKEASSGAPSLSPSSGSDSAGSTGTSEPSANGVFEGPVVMDSEMFRLDLFPEMDLGSYYMSLAEALLMDPPPTATIIHAYEDNGDGGADVRLWSYSVDM

SEQ ID NO: 1609 - protein, 405 aa, Glycine max
MVLEATMICIDNSEWMRNGDYSPSRFQAQADAVNLICGAKTQSNPENTVGVLTMAGKGVRVLVTPTSDLGKILACMHGLDIGGEMNLAAGIQVAQLALKHRQNKKQQQRIIVFAGSPVKHEKKMLEMIGRKLKKNSVALDIVNFGEEDEGKTEKLEALLAAVNNNDTSHIVHVPSGPNALSDVLISTPIFTGDGEGGSGFAAAAAAAAAGGVSGFEFGVDPNLDPELALALRVSMEEERARQEAAAKKASEDASKQEKDGEQQASPQDTTMTEGASAAASEAETKRTDLTDDENALLQQALAMSMDDPTINHEVRDTDMSEAAAEDPELALALQLSVEDSSKDSASQSDVSKLLADQSFVSSILASLPGVDPNDPSVKDLLASMQNQSEPQQKNEDKPPNEEEKK

SEQ ID NO: 1610 - protein, 443 aa, Oryza sativa (japonica cultivar-group)
MAEQRGNMLMKKYEMGKLLGQGTFAKVYHARNTETSESVAIKMIDKEKVLKGGLMDQIKREISVMKLVRHPNIVQLYEVMATKTKIYFVLEHVKGGELFNKVQRGRLKEDAARKYFQQLICAVDFCHSRGVYHRDLKPENLLLDENSNLKVSDFGLSALADCKRQDGLLHTTCGTPAYVAPEVINRRGYDGAKADIWSCGVILFVLLAGYLPFHDKNLMDMYKKIGKAEFKCPSWFNTDVRRLLLRILDPNPSTRISMDKIMENPWFRKGLDAKLLRYNLQPKDAIPVDMSTDFDSFNSAPTLEKKPSNLNAFDIISLSTGLDLSGMFEESDKKESKFTSTSTASTIISKIEDIAKGLRLKLTKKDGGLLKMEGSKPGRKGVMGIDAEIFEVTPNFHLVELKKTNGDTLEYRKVLNQEMRPALKDIVWAWQGEQPKQQQQPTC

SEQ ID NO: 1611 - protein, 356 aa, Oryza sativa (japonica cultivar-group)
MDQIKREISVMKLVRHPNIVQLYEVMATKTKIYFVLEHVKGGELFNKVQRGRLKEDAARKYFQQLICAVDFCHSRGVYHRDLKPENLLLDENSNLKVSDFGLSALADCKRQDGLLHTTCGTPAYVAPEVINRRGYDGAKADIWSCGVILFVLLAGYLPFHDKNLMDMYKKIGKAEFKCPSWFNTDVRRLLLRILDPNPSTRISMDKIMENPWFRKGLDAKLLRYNLQPKDAIPVDMSTDFDSFNSAPTLEKKPSNLNAFDIISLSTGLDLSGMFEESDKKESKFTSTSTASTIISKIEDIAKGLRLKLTKKDGGLLKMEGSKPGRKGVMGIDAEIFEVTPNFHLVELKKHLNTVRS

SEQ ID NO: 1612 - protein, 192 aa, Pseudomonas fluorescens PfO-1
MGAAALLLSFIPSLKSEAVPYLQQPDALYLAFFGLLNLILAPVIPYWNKGPRQHLQNLVSALLVLTVVLQTLTLIAPMPVIAGQPAVLFSLVIALVAVVLHLAVSFYKSSPAAATQSYDMSNRDTGTVKWFNTSKGFGFISRDSGDDIFVHFRAIRGEGHRVLVEGQRVEFSVMNRDKGLQAEDVIAALPRR

SEQ ID NO: 1613 - protein, 379 aa, Streptococcus mutans UA159
MSNLFQNYTRADLEFIKAEGNYLFDTQGKKYLDFSTGIGVTNLGFHPQVQVALQKQAEQIWHTPNLYQNSLQEEVAAKLMAGKDYLAFFCNSGAEANEAAIKIARKATGKQEIITFQNSFHGRTFGSMSATGQDKIKVGFGDAVPHFHYAVFNDLNSVKALVTENTAAVMLELVQGESGVLPAEQDFVTALADYCQKNGLLLIIDEVQTGMGRTGKLYAFQHYGIEPDIFTLAKGLANGVPVGAMLAKKQFGSAFGPGSHGSTFGGNKLAMAASSAVLDIMTKAGFLEQAWENAHYLQEQLTSALQVADTVTQVRGLGYMIGIETTADLGQLVKATRDRGLIVLTAGTNVIRLLPPLTLTKDEIDQGIMILQEVFEQHN

SEQ ID NO: 1614 - protein, 311 aa, Triticum aestivum
MNIQVDPSSQVQWLQQQLVPQLQQPLSQQPQQTFPQPQQTFPHQPQQQVPQPQQPQQPFLQPQQPFPQQPQQPFPQTQQPQQPFPQQPQQPFPQTQQPQQPFPQQPQQPFPQTQQPQQPFPQLQQPQQPFPQPQQQLPQPQQPQQSFPQQQRPFIQPSLQQQLNPCKNILLQQCKPASLVSSLWSIIWPQSDCQVMRQQCCQQLAQIPQQLQCAAIHSVVHSIIMQQQQQQQQQQGMHIFLPLSQQQQVGQGSLVQGQGIIQPQQPAQLEAIRSLVLQTLPSMCNVYVPPECSIMRAPFASIVAGIGGQYR

SEQ ID NO: 1615 - protein, 372 aa, Streptococcus mutans UA159
MAETNGLKDMIACDTRISAIKDNKLSYAGYDIADLMDNKARFEEVIYLLWNLHLPTAIELKQFEEKLRKNYAISDAIEQCILIQSRQHLHPMSVLRSTVSLLGVYNLKAEERSVEATYDQSIQLMAKIPTIIATFARLRQGLSPIAPRKDLGFAANFLYMLNGRLPSELEILAMNRALVLHAEHELNASTFAARVCASTLSDIYSCVTTAIGTLKGPLHGGANERVFDMLREIREYGDVDSYLQEKLNSKEKIMGFGHRVYQTQDPREKYLREMARELTKGTEHDIWYQLSKKVEICMKQKKNLIPNVDFYSATVYHVLGIDSSIFTLIFAMSRVSGWIAHIQEQQKNNKLIRPRSHYTGMRKLRYIPIERR

SEQ ID NO: 1616 - protein, 286 aa, Zea mays
  unsure (1)..(286): unsure at all Xaa locations
MAALPPAAEDPDAVEIREVWASNLEEEFAVIRXSVDVYPYVAMDTEFPGFVVTPSAEYRFTCDRNYAALEGNVNVLKLIQLGLTLSNGAGALPPCGTGGRRCIWQFNFRGFDPHTDPSSSDSIDLLRRSGIDFDLFAAEGVDSTRFAELMMSSGVVLNDDVQWVTFHSGHDFGYLLKLLTGREMPNTLDEFLKLTKTFFPVMYDIKHLMKFCGGGLYGGLSKLGELLKIERVGISHQAGSDSLLTLQCFMKLKQLYLKESVKLYDGVLFGLIPGEVEIKPVAPPIE

SEQ ID NO: 1617 - protein, 456 aa, Corynebacterium glutamicum
MALKGYTNFDGEFIEFGSVQAKEEEKRAFDNDRAHVFHSWSAQDKISPKVWAAAEGSTLYDFDGNAFIDMGSQLVSANLGHNNPRLVEAIQRQAARLTNINPAFGNDVRSDVAAKIVSMARGEFSHVFFTNGGADAIEHSIRMARLHTGRNKILSAYRSYHGATGSAMMLTGEHRRLGNPTTDPDIYHFWAPFLHHSSFFATTQEEECERALKHLEDVIAFEGAGMIAAIVLEPVVGSSGIILPPAGYLNGVRELCNKHGILFIADEVMVGFGRTGKLFAYEHAGDDFQPDMITFAKGVNAGYAPLGGIVMTQSIRDTFGSEAYSGGLTYSGHPLAVAPAKAALEIYAEGEIIPRVARLGAELIEPRLRELAEENVAIADVRGIGFFWAVEFNADATAMAAGAAEFKERGVWPMISGNRFHIAPPLTTTDDELVALLDAVEAAAQAVELTFAGALF

SEQ ID NO: 1618 - protein, 124 aa, Ralstonia solanacearum
MAITKDDILEAVSAMSVMELNDLVKAFEDKFGVSAAAVAVAGPAGGAAAPAAEEKTEFDVILKGAGANKVGVIKAVREITGLGLKEAKDLVDGAPKTVKEAMPKADADAAAKKLIEAGAEVEVK

SEQ ID NO: 1619 - protein, 348 aa, Pyrococcus furiosus DSM 3638
MSEKMVAIMKTKPEYGAELVEVDVPKPGPGEVLIKILATSICGTDLHIYEWNEWAQTRIRPPQIMGHEVAGEVVEVGPGVEGIEVGDYVSVETHIVCGKCYACKRGQYHVCQNTKIFGVDTDGVFAEYAVVPAQNVWKNPKNIPPEYATLQEPLGNAVDTVLAGPIAGKSVLITGAGPLGLLGIAVAKASGAYPVIVSEPSEFRRNLAKKVGADYVINPFEEDVVKEVMDITDGNGVDVFLEFSGAPKALEQGLQAVTPAGRVSLLGLFPGKVSIDFNNLIIFKALTVYGITGRHLWETWYTVSRLLQSGKLNIDPIITHKYKGFDKYEEAFELMRAGKTGKVVFMLK

SEQ ID NO: 1620 - protein, 191 aa, Arabidopsis thaliana
MSDEEHHFESSDAGASKTYPQQAGTIRKNGYIVIKNRPCKVSFSNISPLSSSDLIRSVHYLDSSDSFFCHLHDVVEVSTSKTGKHGHAKCHFVAIDIFTSKKLEDIVPSSHNCDVPHVNRTDYQLIDISEDGYVSLLTDNGSTKDDLKLPNDDTLLQQIKSGFDDGKDLVVSVMSAMGEEQINALKDIGPK

SEQ ID NO: 1621 - protein, 310 aa, Arabidopsis thaliana
MKQISSGEVWRWNKEVEMNSIRDCLKHCSSIAIDTEFPGCLKETPMDASEEIRYRDMKFNVDNTHLIQLGFTLFDRRGFAKTWEINLSDFDEHKCFKNDKSIAFLKSNGLNLDKIREEGIGIDEFFRDFSQILTEKDGKITWVNFQGSYDNAYLVKGLTGGKPLPETKEEFHETVQQLLGKFVFDVKKIAESCSGLSSQFGLQRIADVLQMKRVGKAHHAGSDSELTARVFTKLTFDLLNSRKQSVRRVDHQQFQLEQQQHQQFMMTRCYIPIPMPIPRPRPVMFAAHHQNPYFGGGYFRMPVQGMNYVL

SEQ ID NO: 1622 - protein, 198 aa, Agrobacterium tumefaciens str. C58
MSVASLPSFLCLSQESSRRASARRESPSSPRTWAGWIPVTGTGMRECVVALCLLLTLIFAAASPALAFNPDEVLKDPVLEQRARNLTSQLRCMVCQNQSIDDSNAELARDLRVLVRERLVQGDSDKAVIDYVVSRYGEFVLLKPRLSLRTLLLWGAPIGLTLAGIFAVFVFSRRRATQERPQKLSADEEERIRNLIEK

SEQ ID NO: 1623 - protein, 397 aa, Oryza sativa (japonica cultivar-group)
MEGGGARNGSTTGAARTGGSGGDAAAGGGGGSAGNGKPLPPCCVKARAAAPESEAKCHATVVSGWFTEPRSRGGKTSKVQYYNNPMWPGEAHSLKVEKILYQGKSPYQEVLVFESSTYGKVLVLDGIVQLTDKDECAYQEMITHLPLCSIPSPKKVLVIGGGDGGVLREICRHGSVESIDICEIDQLVIDVCKDFFPDLSVGFKDPRVRLHVGDAVEFLRNAPEGTYDAIIVDSSDPIGPAQELVEKPFFDTIARALRPGGVLCNQAESMWLHTHLIQDMLSICRETFKGSVHYAWTSVPTYPSGVIGFLLCAKEGPPVNFLTPANPIEKLEGAMEAGRDIRFYNSEMHRAAFVLPTFARRELEAYCTTVEREQQEETTAEPLKMNIMPNSEILTAS

SEQ ID NO: 1624 - protein, 180 aa, Vibrio cholerae O1 biovar eltor str. N16961
MKARHLLPVLAAAITFPALSSPVMTLTSQDIQEGSRMAKHFVFNGFGCSGDNLSPQLSWNNAPKGTKSFAITAYDPDAPTGSGWWHWVALDIAADQHNVARGAAKQLKGVRELNNDYGFSGFGGACPPQGHGMHRYQFTVWALPFEKMEIPQGASNALVGFMLRANALEQATLTATYVNE

SEQ ID NO: 1625 - protein, 569 aa, Glycine max
  unsure (1)..(569): unsure at all Xaa locations
MWKLVRYAAASNLARSRRFSAAIPGPCIVHKRGADILHDPWFNKDTGFPLTERDRLGLRGLLPPRVISFEQQYDRFMNSFRSLENNTQGQPDKVVSLAKWRILNRLHDRNETLYYRVLIDNIKEFAPIIYTPTVGLVCQNYSGLFRRPRGMYFSAKDKGEMMSMIYNWPAHEVDMIVLTDGSRILGLGDLGVQGIGIPIGKLDVYVAAAGINPQRILPVMLDVGTNNQKLLEDHLGLRQPRLEGEEYLSIVDEFMEAVHARWPKAIVQFEDFQMKWAFETLKRYQKRFCMFNDDIQGTAGVALAGILGTVRAQGRPLTDFVNQKIVVVGAGXGLVTTERNSLDPAAAPFAKNPRDIEGLTEGASIIEVVKKIRPHVLLGLSGVGGIFNEEVLKAMRESVSTKPAIFAMSNPTMNAECTSIDAFKHAGENIVFASGSPFENVDLGNGKVGHVNQANNXMYLFPGIGLGTLLSGAHLITDGMLQAASECLASYMAEEDILKGILYPSVDSIRDVTAEVGAAVLRAAVEEELAEGHGDVGPKELSHMSKDEAVEYVRSNMWYPVYSPLVHEK

SEQ ID NO: 1626 - protein, 502 aa, Zea mays
MATANGSSKGPFEVPKVEVRFTKLFIDGKFVDAVSGKTFETRDPRTGEVIASIAEGGKADVDLAVKAAREAFDNGPWPRMTGYERGRILHRFADLIDEHVEELAALDTVDAGKLFAVGKARDIPGAAHLLRYYAGAADKVHGATLKMAQRMHGYTLKEPVGVVGHIVPWNYPTTMFFFKVGPALAAGCAVVVKPAEQTPLSALFYAHLAREAGVPAGVLNVVPGFGPTAGAAVAAHMDVDKVSFTGSTEVGRLVMRAAAESNLKPVSLELGGKSPVIVFDDADLDMAVNLVNFATYTNKGEICVAGTRIYVQEGIYDEFVKKAAELASKSVVGDPFNPSVSQGPQVDKDQYEKVLRYIDIGKREGATLVTGGKPCGDKGYYIEPTIFTDVKDDMTIAQDEIFGPVMALMKFKTVEEVIQKANNTRYGLAAGIVTKNIDVANTVSRSIRAGAIWINCYFAFDPDAPFGGYKMSGFGKDMGMDALDKYLQTKTVVTPLYNTPWL

SEQ ID NO: 1627 - protein, 557 aa, Zea mays
  unsure (1)..(557): unsure at all Xaa locations
MAATVRRAASSVLSRFLLTKPSPSPAASAAGXSPALLGAGAAALRHRFSTAPASAAAAAEEPIQPAVXRVKHTQLLINGNFVDAASGKTFPTLDPRTGEVIARVAEGDSEDIDRAVAAARRAFDEGPWPRMTAYERCRVLLRFADLIERHAEEVAALETWDNGKTLAQAAGAEVPMVAXRCVRYYAGWADKIHGLVAPADGAHHVQVLHEPXGVAGQIIPWNFPLLMFAWXKVGPALACGNTVVLKTAEQTPLSALYVANLLHEAGLPEGVLNVVSGFGPTAGAALSSHMGVDKLAFTGSTGTGQIVLELAEESNLKPVTLELGGKSPFIVMDDADVDQAVELAHQAVFFNQGQCCCAGSRTFVHERVYDEFVEKSKARALKRVVGDPFRDGVEQGPQIDGEQFNKILRYVQSGVDSGATLVAGGDRXGDRGFYIQPTVFADAKDEMKIAREEIFGPVQTILKFSGVEEVIRRANATPYGLAAGVFTRSLDAANTXLSRALRAGTXVWVNCYDVFDATIPFGGYKMSGVGREKGXYALRNYLQTKAVVTPIKNPAWL

SEQ ID NO: 1628 - protein, 503 aa, Zea mays
MATANGSSKGSFEVPKVEVRFTKLFIDGKFVDAVSGKTFETRDPRTGEVIASIAEGGKADVDLAVKAAREAFDNGPWPRMTGYERGRILHRFADLIDEHVEELAALDTVDAGKLFAVGKARDIPGAAHLLRYYAGAADKVHGATLKMAQRMHGYTLKEPVGVVGHIVPWNYPTTMFFFKVGPALAAGCAVVVKPAEQTPLSALFYAHLAREAGVPAGVLNVVPGFGPTAGAAVAAHMDVDKVSFTGSTEVGRLVMRAAAESNLKPVSLELGGKSPVIVFDDADLDMAVNLVNFATYTNKGEICVAGTRIYVQEGIYDEFVKKAAELASKSVVGDPFNPSVSQGPQVDKDQYEKVLRYIDIGKREGATLVTGGKPCGDNKGYYIEPTIFTDVKDDMTIAQDEIFGPVMALMKFKTVEEVIQKANNTRYGLAAGIVTKNIDVANTVSRSIRAGAIWINCYFAFDPDAPFGGYKMSGFGKDMGMDALDKYLQTKTVVTPLYNTPWL

SEQ ID NO: 1629 - protein, 309 aa, Salmonella typhimurium LT2
MPLEKGIAELVAGFIAAGRPSSREQNIDDRRAGYIASTTLAGETETRVQVEDIELDAMTFRVVSPLNATGKLPCIIYYHGGCFVSGGFATHDNQLRQLAFYSRCRVIAAQYRLAPDHTFPAAHNDAETGANTIWKYAQKLGIDRENITLAGDSAGGHLALVTALRLKAARQWQPAQLILIYPMLDATARFASYTCNGLDYIITRDTLLSGYEMYMPRTDPLHPEASPLWREDFAGLPSTHIITAEFDPLRDEGEALYQRFQEQGVECTCQRYLGVIHGFFQLGGVSQAARSAMRDVAWRVVSPSTGKMT

SEQ ID NO: 1630 - protein, 513 aa, Triticum aestivum
  unsure (1)..(513): unsure at all Xaa locations
MDSPLPFLVAMSSLLLILAGLYMTRLGLLGKRRRSYPPVAGTMLHQLLNWGRLPEYMTELSRRYRTFSMLTLTRSSVHTVDPANVEYILRTNFANYGKGTMTHDTMEDLLGDGIFNVDGAKWRHQRKVASFEFSTRMLRDYSSGVFRDMAAQLAGIVAAAAAAGERLSMEDLFMRSTLDSIFKIGFGVNLGALSGSNQKGAAFARAFDNASEQVLYRILDPLWKDKRLLNIVSKAAMKRSMRTIDDFVYTVIDNKIDHMARDXNNSAXKQDILSRFLLERXXTPGCFDHKHMRDIILNFMIAGRDTTELTLTSFLYVMCREQRIQDKIAREVREATSTGDRQDAGGVEEFTARLTEDAIGSMHYLHAALTETLRLYPAVPVDVKCCFSDDTLPDGHAVRRGDMVNYQPFAMGRMKFLWGDDAEEFRPERWLDGDGVFVPESPYKFTAFQAGPRICLGKEFAYRQMKIFAATLLYLFRFEMWDRGSTVGYRPMLTLKMDGPLYVRASPRRSIGN

SEQ ID NO: 1631 - protein, 466 aa, Zea mays
KTFDTRDPRTGDVLAHVAEADKADVDLAVKSARDAFEHGKWPRMSGYERGRIMSKLADLVEQHTEELAALDGADAGKLLLLGKIIDIPAATQMLRYYAGAADKIHGDVLRVSGRYQGYTLKEPIGVVGVIIPWNFPTMMFFLKVSPALAAGCTVVVKPAEQTPLSALYYAHLAKMAGVPDGVINVVPGFGPTAGAALASHMDVDSVAFTGSTEVGRLIMESAARSNLKTVSLELGGKSPLIIFDDADVDMAVNLSRLAVFFNKGEVCVAGSRVYVQEGIYDEFVKKAVEAARSWKVGDPFDVTSNMGPQVDKDQFERVLKYIEHGKSEGATLLTGGKPAADKGYYIEPTIFVDVTEDMKIAQEEIFGPVMSLMKFKTVDEVIEKANCTRYGLAAGIVTKSLDVANRVSRSVRAGTVWVNCYFAFDPDAPFGGYKMSGFGRDQGLAAMDKYLQVKSVITALPDSPWY

SEQ ID NO: 1632 - protein, 294 aa, Saccharomyces cerevisiae
MKTLVHVASVEKGRSYEDFQKVYNAIALKLREDDEYDNYIGYGPVLVRLAWHISGTWDKHDNTGGSYGGTYRFKKEFNDPSNAGLQNGFKFLEPIHKEFPWISSGDLFSLGGVTAVQEMQGPKIPWRCGRVDTPEDTTPDNGRLPDMDKDAGYVRTFFQRLNMNDREVVALMGAHALGKTHLKNSGYEGPWGAANNVFTNEFYLNLLNEDWKLEKNDANNEQWDSKSGYMMLPTDYSLIQDPKYLSIVKEYANDQDKFFKDFSKAFEKLLENGITFPKDAPSPFIFKTLEEQGL

SEQ ID NO: 1633 - protein, 443 aa, Glycine max
MDRRSHPTGTVSTRNILFNKYEIGKLLGQGNFAKVYHGRNLSTNESVAIKVIKKERLQKERLVKQIKREVSVMRLVRHPHIVELKEVMANKAKIFMVVEYVKGGELFAKVAKGKLTEDLARKYFQQLISAVDFCHSRGVTHRDLKPENLLLDQNEDLKVSDFGLSTLPEQRRADGMLVTPCGTPAYVAPEVLKKKGYDGSKADLWSCGVILFALLCGYLPFQGENVMRIYRKAFRAEYEFPEWISPQAKNLISNLLVADPGKRYSIPDIMRDPWFQVGFMRPIAFSIKESYVEDNIDFDDVENNQEEEVTMRKPARPFYNAFEIISSLSHGFDLRSLFETRKRSPSMFICKFSASAVLAKVEAVAKKLNFRVTGKKEFVVRMQGTEEGRKGKLAMTVEVFEVAPEVAVAEFTKSAGDTLEYVKFCEEQVRPSLKDIVWSWQGD

SEQ ID NO: 1634 - protein, 511 aa, Zea mays
MASNGCNGNGNGNGNGKAAPAGVVVPEIKFTKLFINGEFVDAASGKTFDTRDPRTGDVLAHVAEADKADVDLAVKSARDAFEHGKWPRMSGYERGRIMSKLADLVEQHTEELAALDGADAGKLLLLGKIIDIPAATQMLRYYAGAADKIHGDVLRVSGRYQGYTLKEPIGVVGVIIPWNFPTMMFFLKVSPALAAGCTVVVKPAEQTPLSALYYAHLAKMAGVPDGVINVVPGFGPTAGAALASHMDVDSVAFTGSTEVGRLIMESAARSNLKTVSLELGGKSPLIIFDDADVDMAVNLSRLAVFFNKGEVCVAGSRVYVQEGIYDEFVKKAVEAARSWKVGDPFDVTSNMGPQVDKDQFERVLKYIEHGKSEGATLLTGGKPAADKGYYIEPTIFVDVTEDMKIAQEEIFGPVMSLMKFKTVDEVIEKANCTRYGLAAGIVTKSLDVANRVSRSVRAGTVWVNCYFAFDPDAPFGGYKMSGFGRDQGLAAMDKYLQVKSVITALPDSPWY

SEQ ID NO: 1635 - protein, 393 aa, Streptococcus mutans UA159
MAEKVSFEEGKLQVPDKPVIPYIEGDGVGQDIWKNAQIVFDKAIAKVYGGHKQVIWREVLAGKKAYNETGNWLPNETLEIIKTHLLAIKGPLETPVGGGIRSLNVALRQELDLFACVRPVRYFKGVPSPLKHPEKTAITIFRENTEDIYAGIEWNAGTAEVQKVINFLQDDMQVKKIRFPKSSSIGIKPISIEGSQRLIRAAIEYALANNLTKVTLVHKGNIQKFTEGGFRKWGYELAKREYAAELASGQLVVDDIIADNFLQQILLKPERFDVVALTNLNGDYASDALAAQVGGIGISPGANINYQTGHAIFEATHGTAPDIAGQDLANPSSVLLSGCMLFDYIGWSKVSDLIMKAVEKAIANGQVTIDFAKELGVEALTTRQFSEVLLTYL

SEQ ID NO: 1636 - protein, 321 aa, Burkholderia cepacia R18194
MSTTTLTVRVARKWQEARDICGFEFVSDDGSPLPHFDAGAHIDVHLPGGFVRQYSLCNHPEHGDRYEIAVLRDADGRGGSRAIHDDVRQGDTVRIGVPRNQFALVPDAPHHLLLAGGIGVTPILSMAQRLFSSGTPFDLHYCARSTDRMAFAERINAAAFHDRARFHVDDGAPAQRFDLAAVLAAAPAGTHLYVCGPRGFMDAVLNAARERNWAEARLHYEFFGGTVASSGSDRAFQVRIASSGKVIDVPAECTVIAALAANGVDVLTSCEQGVCGTCATRVLQGEPDHRDSYLTAEEQAAGDQFMPCCSRARSDLLVLDL

SEQ ID NO: 1637 - protein, 133 aa, Brassica napus
MINLRIPILVSFMFFLVFISSSLLFATPIFAARVGHSLVQEEATKIPQYNRLEESEEPEIPEDPEEPEIPEDPEVPEEPEELPKESEEGSFEFPSWIPSFPFPGTNGGLPKTEKTKPTSVISEATSSGSNKKP

SEQ ID NO: 1638 - protein, 152 aa, Glycine max
  unsure (1)..(152): unsure at all Xaa locations
PPPSSSSDGCVIEVRDRRIPXSTSHPXKRILVLNREDMISTADRXAXADYFTRNGTKVXFSNGQLGMGTMKLGRLAKELAADVNVRRRTKGLLPRAVQAGIVGYPNXGKSSXVNRXLKRRMCPAAPRPGVTRELRWVRLGKDLELLDSPGIL

SEQ ID NO: 1639 - protein, 359 aa, Glycine max
MASQLLRRTFGSRFLANPRAFSSAASTPIRATLFPGDGIGPEIADSVKQIFQAADVPIEWEEHYVGTEIDPRTQSFLTWESLESVRKNKVGLKGPMATPIGKGHRSLNLTLRKELNLYANVRPCYSLPGYKTRYDNVNLITIRENTEGEYSGLEHQVVRGVVESLKIITRQASLRVAEYAFHYAKAHGRERVSAIHKANIMQKTDGLFLKCCREVAEKYPEITYEEVVIDNCCMMLVKNPALFDVLVMPNLYGDIISDLCAGLIGGLGLTPSCNIGEGGIALAEAVHGSAPDIAGKNLANPTALLLSGVTMLRHLNLHDKAEQIQKAILNTIAEGKYRTADLGGSSKTTEFTKAIIDHL

SEQ ID NO: 1640 - protein, 342 aa, Oryza sativa (japonica cultivar-group)
MAGGGVGASAAAAATIPEAALRSGKPMPLVGMGTASFPLDAPQLPATVRDAVLRAIDAGYRHFDTAAAYGTEAPLGEAVLEAVRAGMVASRDDLYITSKLWISDTHPGRVLPALRRTLRNLQMVYIDLYLIHWPIRLRVEQETPSPVYDNDFVMMDMEGVWKDMEECQRLGLTKAIGVSNFTCKKLNTLLSFATIPPAANQVEINPYCRQNKLREFCKEKEIQLCAYSPLGASGTIWGSNAVLDCPVLKHIAVQKGKTVAQVCLRWLHEQGDCIIVKSFNERRMRENLEIFDWELTDADRQEISALPEFRGNRDFYVHESGPYKTTDEFWDGEITGPQLKTC

SEQ ID NO: 1641 - protein, 507 aa, Mycobacterium avium subsp. paratuberculosis str. k10
MTVFARPGSAGALMSYESRYDNFIGGQWVAPARGRYFENPTPVTGQTFCEVARSDEADVDKALDAAHAAAPAWGKTAPAERAAILNKIADRIEENLESLAVAEVWDNGKPIREALAADIPLAADHFRYFAGALRAQEGSLSQIDDDTVAYHFHEPLGVVGQIIPWNFPILMGAWKLAPALAAGNAVVLKPAEQTPVSVLYLMSLIGDLLPPGVVNVVNGFGAEAGKPLASSNRIAKIAFTGETTTGRLIMQYASQNLIPVTLELGGKSPNIFFSDVMAKADDYQDKALEGFTMFALNQGEVCTCPSRSLIQADIYDEFLELAAIRTKAVRQGDPLDSETMLGSQASNDQLEKVLSYIAIGKDEGATIITGGERAELGGDLSGGFYMQPTIFAGNNKMRIFQEEIFGPVVAVTSFTDYDDAISIANDTLYGLGAGVWSRDGNTAYRAGRDIQAGRVWVNCYHAYPAHAAFGGYKQSGIGRENHKMMLDHYQQTKNMLVSYSNKAQSFF

SEQ ID NO: 1642 - protein, 146 aa, Zea mays
QDRLLPIANVGRIMKQILPPNAKISKEAKETMQECVSEFIGFVTGEASDKCHKEKRKTVNGDDLCWAFGALGFDDYVDPMRGYLHKYREVEGDRAAAAASSSRGGGDHHPASASTSTSPAAAAAPGHFMFGAAAIDRPDNNTSSAR

SEQ ID NO: 1643 - protein, 280 aa, Streptococcus mutans UA159
METVVLSNGVKMPILGFGVFQVPDLEECERVVTEAIKVGYRLLDTAQVYGNEEAVGNAVRKSGLAREEFFITTKVWISNAGYEKAKASLDESLRKLQTDYVDLVLIHQPFGDYYGTWSALEAYYKSGKIKAIGVSNFYPDRLVDLASFNEIVPMVNQVETHVFNQQIEAKKVSEEYGVQLESWGPFAEGKNNFFTNPTLTAIGEKYGKSAAQVGLRYLIQRGVVVIPKTVHQERMVQNFDVFGFNLSDDDMADILKLDQGESLFINHYDPETVKFLANYK

SEQ ID NO: 1644 - protein, 275 aa, Triticum turgidum subsp. durum
MNIQVDPSSQVQWPQQQLVPQPQQPLSQQPQQAFPQPQQTFPHQPQQQVPQPQQPQQPFLQPRQPFPQQPQQPYPQQPQQPFPQTQQPQQPFPQSKQPQQPFPQPQQPQQSFPQQQPSLIQQSLQQQLNPCKNFLLQQCKPVSLASSLWSIILPPSDCQVMRQQCCQQLAQIPQQLQCAAIHSVVHSIIMQQEQQEQLQGVQILVPLSQQQQVGQGILVQGQGIIQPQQPAQLEVIRSLVLQTLPTMCNVYVPPYCSTIRAPFASIVAGIGGQYR

SEQ ID NO: 1645 - protein, 288 aa, Streptococcus mutans UA159
MEYITLNTGVKMPMEGFGVFQVTDPEICKESVLNAIKTGYRLFDTAAVYGNEKALGEAIHEAIEQGLVTRNELFITSKLWVQDMNYEAAKKGIERSLEKLGLDYLDLYLLHQAMRDYFGAYRALEEAYQAGKLRAIGVSNFYPNILTNFCETVSVIPAVNQIELHPFFTQEEALETARYYGVVPEAWAPLGGGRYDAFNNAILQEVASAHQKTVGQIMLRWNVQRGVVVIPKSTHKERIEENFAIWDFSLTDDEMTKIASLDMGYGDTRTKHFDPNFVRSVLNVKIHD

SEQ ID NO: 1646 - protein, 154 aa, Glycine max
  unsure (1)..(154): unsure at all Xaa locations
MSGVWGFKNGVVRLVENPEGEAAXGSRGGRRTVLVHRASSEVLIYYAALEHTLDSLDWETDYDHANLLQFHKRCTYHLIYVTIDFIMFMPMLMSDILMKNKIPFEVRDIQSMSGKRLNIIHIRTNMPTTCKAYVHCTLPATTVQRQLIVTICTT

SEQ ID NO: 1647 - protein, 491 aa, Listeria monocytogenes str. 4b H7858
MVFLSIKETALPKVQTKLFINGKWTDGDNKETKDIVNPANGEVIAKIAQAGPNETKKAIKAAKEAFPDWAKMELADRVKLLHKIADLMEEKADTLAKIMTLEQGKPLKESKGEVLTGAENFRFAAEEARRLYGETIPAPNNHAFIVKKQPIGVVAAITPWNFPGGMVTRKLAPALATGNTIVLKPSGDTPLSALAIFEIFEEAGLPKGVANIVMGSSKEIGETLTDSDDVRKLTFTGSTKVGQTLFKQSAETLKKISLELGGHAPFIVFDDANLDAAVNDLVAAKFRNNGQVCVSPNRIFVAKEIKEKFTKALVAKVKQLKVGNGLDDVNVGPLIREDAIDKIDKQLKNATDKGAKVLTGGGRLTGSDYDKGNFYKPTVLDNVTREMDIFYEETFGPVIPLITFETEDEAIEMANDSEFGLASYFYTKDLARVEKVGAALEYGMVGANEIVISNPETPFGGVKHSGFGRENGHYGMEEYIQVKFINLKYRD

SEQ ID NO: 1648 - protein, 280 aa, Zea mays
  unsure (1)..(280): unsure at all Xaa locations
MDPMDIVGKSKEDVSLPKSTMFKIIKEMLPPDVRVARDAQDLLVECCVEFINLLSSESNEVCSREEKKTIAPEHVIKALSDLGFREYIEEVYAAYEQHKLETLDSPKAGKFTRIAMTEDDAAAEHQRMFAVARARMNNGAPKPKEPEQEPPQLPQAQPQLQLHTEPQQPMQSQVQLHSQTQHYLQPQLQLHSQPQLQPLSXQLPPQLQVHQQLQQPPQVQVHQQPEVQPQEAQLQSSAQQTSQPQPQAQLQSQGHSQAQLQAGLLGQLQTQAQTGPDMDS

SEQ ID NO: 1649 - protein, 438 aa, Mycobacterium avium subsp. paratuberculosis str. k10
MSTALGGKVLLPDSPQFAGAKQVFNTNYNGSTPAAVVTPTSAADVQKAMAFAAAHNLKVVPRSGGHSYTGASTANGTMVLDLRQLPGDANFDAATGQVTVTPATSLYTMHRTLAAVGRGVPTGTCPSVGAAGHALGGGMGAQSRHAGLLCDQLTSASVVLPSGQAVTASAASNPDLFWALRGGGGGNFGVTTSLTFATFPTKDVDAVNLNFPPQSFAQVLVGWQNWLRTADPNSWALADATVDAMGVHCRILATCPAGSGNSAAAAITQAVGIQPSGVETHTFNYMDLVNYLAVGNLNPQPLGYVGGSDVFPTVNAAVAQGIAAAVNAFPRNAGRMLAIMHALDGALATVAPAATAFPWRRQSALVQWYVETSGDPAAATNWLASAHQAVQQYSVGGYVNYLEANQSPARYFGPNLSRLSAVRQKYDPGRVMFSGLNY

SEQ ID NO: 1650 - protein, 479 aa, Magnaporthe grisea 70-15
MHRVTKAVVLAALTVCTALASPLSKIALLDDCLSAAEVPVDAPGSTDWLLDSMTFNLRLNYTPAAIATPTTIPQTQAAVSCAASAGLKANAKSGGHSYASFGTGGEDGHLVIQLDRMNNVSLDVDNGIATVQGGARLGRVASELYKQGKRAISHGTCPGVGVGGHALHGGYGMSSHMKGLMLDWLVGATVVLANSSVVECSSVENTDLFWAIRGAGSSMGVVAEMRFETFEAPDEVTYFIAQVPWKNTTAVDGFRALQEFAAEQMPAELNMRLFITRQFANLEGMYWGNKTVLQQTLAPLVTATGAKLQYSQTDNWLGQLTHFGNGLNLDQSRPYKMIQAFVDYWFNKGKATRRDWYVQVDLHGGKNSAVSRPEADSAAYAHRNHLLLFLFYDRVDTKGVYPSDGFAFINEFVGDLTKTIGEDDGETWGRYPNYPDSRLSPESAQRGYWGSHLQRLREIKTAVDPGDMFHYPQGVPPAV

SEQ ID NO: 1651 - protein, 343 aa, Listeria monocytogenes str. 1/2a F6854
MKAVVKTNPGYDQMELKDVEEPQVYGDKVKIKVAFTGICGSDIHTFKGEYKNPTTPVTLGHEFSGVVVEVGPDVTSIKVGDRVTSETTFETCGECIYCKEHDYNLCSNRRGIGTQANGSFAEFVLSREESCHVLDERISLEAAALTEPLACCVHSALEKTTIRPDDTVLVFGPGPIGLLLAQVVKAQGATVIMAGITKDSDRLRLAKELGMDRIVDTLKEDLAEVVLGMTGGYGAERVFDCSGAVPAVNQGLPLTKKKGDFVQVGLFAEKKNAIDEESIIQREIAYIGSRSQKPSSWILALDLLANGKINTDKMITKVYGLDDWREAFEAVMAGNEIKVLVKS

SEQ ID NO: 1652 - protein, 134 aa, Aspergillus niger
DTAGQEDYDRLRPLSYPQTDVFLVCFSVTSPASFENVREKWFPEVHHHCPGVPCLIVGTQTDLRDDPAVREKLARQKMQPIRKEDGDRMAKELGAVKYVECSALTQYKLKDVFDEAIVAALEPAPKKSKKCVLL

SEQ ID NO: 1653 - protein, 350 aa, Listeria monocytogenes str. 1/2a F6854
MRAAVLYENNVIKAEQIDEATCGKDQVRVEVKAVGICGSDIHKMQTRWKYPLPAVMGHEFAGVVTEIGSEVTNVAIGDRVAGIPLEPCMECNYCKAGDFALCDNYRMVGSHFHGGFAENVVMKADNVISIGDLDFEEGAMIEPLAVSMHGVLGIQPRLGDTVIVFGIGTIGILVVQCLLLAGVKDIIAVDISDKKLADAREFGCKYTINPKNEDLKERVFAYTNGLGADIALECAGSKITQEQCLLVTKKKGKVGFLGIAYADVLLHEEAFENIFRRELTLKGFWNSYSAPFPGEEWRTSIEFVKQGRIKLKPLISHRYKLEETKEAFDMILSREHDYNKVMILPQKGDD

SEQ ID NO: 1654 - protein, 275 aa, Triticum turgidum subsp. durum x Hordeum chilense
MNIQVDPSSQVQWPQQQPFLQPHQPFSQQPQQIFPQPQQTFPHQPQQQFPQPQQPQQQFLQPRQPFPQQPQQPYPQQPQQPFPQTQQPQQPFPQFQQPQQPFPQPQQPQQSFPQQQPSLIQQSLQQQLNPCKNFLLQQCKPVSLVSSLWSIILPPSDCQVMRQQCCQQLAQIPQQLQCAAIHSVVHSIIMQQEQQEQLQGVQILVPLSQQQQVGQGILVQGQGIIQPQQPTQLEVIRSLVLQTLPTMCNVYVPPYCSTFRAPFASIVAGIGGQYR

SEQ ID NO: 1655 - protein, 489 aa, GIBBERELLA ZEAE PH-1
MALLSVNLRDGLILTAVITILLYIWEKKTAKITRNGEPLRKPPNTLPLVGNGIIFLQPRQKLFSWFHRCERLYGYETLHITVPSLPPGVIVNDPQNLDFIFRNEGVFEKGEFFKQRSWDLFGHGIINVDGEFWRLQRKAGLRFLSAAALKTLTNEKLPKYLDQAIGVLEAKTNTKEVVDLQAVVHEVTTQLMGRMAYNMEMHADDDFTVAFEHASGGTAERFQNPLWFVTEMFTGARMRRSITTVKAYGKRIVTSAVADRKEAEGKTQSDAPGSLIQSLLDSIGDETLVADAALNYLSAGRDTVAQALTWTLYLLMKNPHVATKLRQSVESLRDEDTSTGDDPELLTPVRLPYVLAVFYESLRLRPPIPFEIKQAQQATTLPDGTFLPAGAIVVWCAWAMGRSHTTWGPNADDFRPERWLTTSLAGDVTVAQRPAAEFPVFNGGPRTLARLVPLFKFEPAFEGERVSKSSLTLPMEGGLPVYVQHQTPS

SEQ ID NO: 1656 - protein, 164 aa, Glycine max
  unsure (1)..(164): unsure at all Xaa locations
VYRASVCMVGPFTGLKSMAGLPTKKTNYDITFIALNCGILQCMRVCPPDGKKKFETLCYLPHLDDAQXAKEVQYLLRKGWIPCLQFQLDHGFVYREHNRSPRYYDGRYXTMWDLPXFGCTDAYQXVKELQEAXTXYPNCFIRIIRFDHLSPSPCINFIAFKSPS

SEQ ID NO: 1657 - protein, 279 aa, Streptococcus pyogenes M1 GAS
MVTTVKMTSGYEIPVLGFGTYQAADGEEAYQSTLAAIKAGYRHIDTAAIYKNEESVGRAIKDSGVLREDLFITTKLWNDAHSYEGAKDALAASLDRLGLDYVDLYLIHWPNPKALRNTWKEANAQAWQYMEEAVEAGLIKSIGVSNFMVHHLEALQETAKITPAINQIRLAPGCYQKEVVDYCKANEILLEAWSPLGQGEIFDNETMQQLANKYDKTVAQVALAWSLAEGFIPLPKSVHDERIKENMAIFDVSLTQEDKKTIRYLSGMSAIPNPDTTSF

SEQ ID NO: 1658 - protein, 355 aa, Pyrococcus furiosus DSM 3638
MKQKKAWAIVKEVINEADIVVEVVDARDPIGTRNRKLERMVLESGKKLLLVMNKADLVPKDWAEEYKRKSEIPVVFISARERKGTGIFRKELKKLAKEIDKEKVKVALIGYPNVGKSTIINVLKGKHAVGTAPIPGYTKGKQLIRLTKRIWLLDTPGVVPIDDFDELVIKGGFPADKIRDPVKPALKLIKRILETRKEAITEKFGIEKFENEEEILEEIGKRRGLIKAGGEVDIEETARWFLREWQTGRFTLFGKEEKREEEYLPSFHDILEYIKKEKITEPRMILWKFGKKLEEYLGSEKRLGTIQIDEFTVAIATGFKKCPNALKFIEKVTGKTVISAECFGKKWKGIVAILE

SEQ ID NO: 1659 - protein, 394 aa, Oryza sativa
MRMEGGGGGGHGHHGGGGGGHGHHGGIGGGEAQIKGTLTHGGRYVQYNVYGNLFEVSSKYVPPIRPVGRGACGIICAVVNAQTRQEVAIKKIGNAFDNQIDAKRTLREIKLLRHMDHDNVISIKDIIRPPRRENFNDVYIVYELMDTDLHHLLRSNQPLTDDHCQYFLYQVLRGLKYVHSANVLHRDLRPSNLLLNAKCDLKIGDFGLARTTNETDFMMEYVVTRWYRAPELLLNCSEYTAAIDIWSVGCILGEIVTREPLFPGKDYVHQLRLITELIGSPDDSSLGFLRSDNARRYVRSLPQYPKQQFRARFPTMSSGAMDLLERMLVFDPSKRITVDEALCHPYLASLHEIYDEPVCPAPFSFDFEQPSLTEEDIKEIIWREALKFNPEPIH

SEQ ID NO: 1660 - protein, 430 aa, Mycobacterium avium subsp. paratuberculosis str. k10
MPTSVVGTPKSAEEIQKDWDTNPRWKDVTRTYTAEDVVALQGTVVEENTLARRGAEVLWEQLHDLEYINALGALTGNMAVQQVRAGLKAIYLSGWQVAGDANLSGHTYPDQSLYPANSVPTVVRRINNALLRADQIAKVEGDTSVKNWLAPIVADGEAGFGGALNVFELQKAMIAAGVAGSHWEDQLASEKKCGHLGGKVLIPTQQHIRTLTSARLAADVCDVPTVVIARTDAEAATLITSDVDERDQPFITGERTKEGFYRVRNGLEPCVARAKAYAPYSDLIWMETGTPDLELAAKFAEGVKAEFPDQMLAYNCSPSFNWKKHLDDATIAKFQKELAAMGFKFQFITLAGFHALNYSMFDLAYGYARNQMTAYVELQEREFAAEERGYTATKHQREVGAGYFDRIATTVDPTSSTTALTGSTEEGQFH

SEQ ID NO: 1661 - protein, 164 aa, Hordeum vulgare subsp. vulgare
MAQESLRLVCPPVSAHDGRLPRQYTLEGQGAKKDISPPLEWYGVPGGARSLALVVQDIDADERVPWTHWVVANISPEEKGLPEGFSGAGGNANAGGEGGLQEGVNDWKQPGWRGPVPDSHGHRIQFRLYALDDVLSLGNKVTVDKVMEAIEGHVLGEAELTAVF

SEQ ID NO: 1662 - protein, 164 aa, Ralstonia eutropha JMP134
MSNVYQFEAKSLAGQPVPLSQFRGKVLLIVNTASECGFTPQYAGLQALHDAYAARGLEVLGFPCNQFGKQEPGDAQQIGQFCESRFSVKFPMFAKIDVKGPDAHPLYQWLTSAKRGVLGTQAIKWNFTKFLLRRDGTVYKRYGSITKPEEIRADIETLLADPAA

SEQ ID NO: 1663 - protein, 316 aa, Vibrio vulnificus CMCP6
MSNKLEQLRKLTTVVADTGEIDAIKKYQPEDATTNPSLILKAAQIAEYAPLIDASIEYAKTQSDDKAQQIQDTCDMLAVNIGKEILKTIPGRISTEVDARLSYDMEGSVAKARQLVKMYNDAGITNDRILIKLASTWEGIRAAEILEKEGINCNLTLLFSFAQARACAEAGVFLISPFVGRIMDWYKAKEGRDFEAQEDPGVLSVTKIYNYYKEYGYKTVVMGASFRNIGEILELAGCDRLTIAPALLAELEAAEGEVVEKLVDSKGAAERPAAMTHAEFLWEHNQDPMAVEKLAEGIRNFAVDQGKLEAMIAAKL

SEQ ID NO: 1664 - protein, 460 aa, Glycine max
MEQKGGVLMQRYELGRLLGQGTFAKVYHARNIITGMSVAIKIIDKEKILKVGMIDQIKREISVMRLIRHPHVVELYEVMASKTKIYFVMEHAKGGELFNKVVKGRLKVDVARKYFQQLISAVDYCHSRGVCHRDLKPENLLLDENENLKVSDFGLSALAESKCQDGLLHTTCGTPAYVAPEVINRKGYDGIKADIWSCGVILYVLLAGHLPFQDTNLMEMYRKIGRGEFKFPKWFAPDVRRFLSRILDPNPKARISMAKIMESSWFKKGLEKPAITVTENEELAPLDADGIFEACENDGPIAEPKQEQAKPCNLNAFDIISFSTGFDLSGLFEDTFLKKETRFMSKKPASIIVLKLEEICKRLCLKVKKKDGGLLKLEGSKEGRKGTLGVDAEIFEITPHFHMVELRKSNGDTMEYQKLFKQDIRPALKDIVWTWQGEKPQQEQEQHEVVQEEHQPSHTA

SEQ ID NO: 1665 - protein, 405 aa, Arabidopsis thaliana
MPLSLQSPPCATLSASIRKGRWKTLAAGFSVTPLPAVNFSLRRSIPRILASASSSSSPASSSLEAGENNELNAVSAFSEIVPDTVVFDDFERFPPTAATVSSALLLGICGLPDTIFRNAVDMALADSSCAGLETTESRLSCFFNKAIVNVGGDLVKLVPGRVSTEVDARLAYDTNGIIRKVHDLLRLYNEIDVPHDRLLFKIPATWQGIEAARLLESEGIQTHMTFVYSFAQAAAASQAGASVIQIFVGRLRDWARNHSGDTEIKSAIKSGEDPGLALVKRSYNYIHKYGYKSKLMAAAVRNKQDLFSLLGVDYVIAPLKVLQSLKDSPAIPDDEKYSFVRKLTPETATHYHFTNKELVKWDQLSLASSMGPASVELLSAGVEGYANQAKRVEELFGKIWPPPNV

SEQ ID NO: 1666 - protein, 335 aa, Lycopersicon esculentum
MVHQKQVKDVVSGWLTVFDDGSVDRTWTGPPEVKFMAEPVPPHDDFIDGVAVKDVVAGENSGSRFRIYLPERNDSSVDKLPVILHFHGGGFCISQADWFMYYAVYTRLARVANAIVVSVFLPLAPEHRLPAACDAGFAGLLWLRDVSREQGHEPWLNEYADFNRVFLIGDSSGGNVVHQVAARAGEEDLSPMKLAGAIPIHPGFMRSQRSKSELEQEQTPFLTLDMVDKFMELALPIGSTKDHPITCPMGDAAPAVEELKLPPYLYCVAEKDLIEDTEMEFYESLKTGEKDVELLINNGVGHSFYLNKIAVDMDPVTGSATEKLFEAIAEFINKH

SEQ ID NO: 1667 - protein, 352 aa, Triticum aestivum
  unsure (1)..(352): unsure at all Xaa locations
MGSTAADMAASADEEACMYALQLVSSSILPMTLKNAIELGLLETLVAAGGKLLTPAEVAAKLPSTANPAAADMVDRMLRLLASYNVVSCTMEEGRXRLSRRYGAAPVSSSSPQRRRVSMAALALMNXTVSWRLYYXDRPDADPLKAYGFXSFEYHGTDPRFNRVFNEGMKNHSIIITKKLLESYKGFEGLGTLVDVGGGVGATVAAITAHYPTIKGINFDLPHVISEAPPFPGVTHVGGDMFQKVPSGDAILMKWILHDWSDEHCATLLKNCYDALPAHGKVVLVECILPVNPEATPKAQGVFHVDMIMLAHNPGGRERYEREFEALAKGAGFAAMKTTYIYANAWAIEFTK

SEQ ID NO: 1668 - protein, 147 aa, Oryza sativa (japonica cultivar-group)
MSFAIRSSEPEFWFLIPSEEAAVAVAAHRLVVMDQRRSGSAYRPKRTHMAAAEDEHRRPGTSSRRRVAPTPTTQTQTQTAPGYFTVELVMAFVCVTASLVLLPLVLPPLPPPPSLLLVVPVCLLAVLVAMAFVPLDAQSNVVGSSCL

SEQ ID NO: 1669 - protein, 145 aa, Brassica napus
DEERPYLPKHILYRQKEQFSDGVGYSWIDGLKAHAAENVNDKMMSNAAFIFPHNTPLTKEAYYYRMIFERFFPQNSARLTVPGGATVACSTAKAVEWDASWSNNMDPSGRAAIGVHLSAYDGSKVALPLPPHKAIDDIPMMMGQE

SEQ ID NO: 1670 - protein, 199 aa, Aspergillus niger
MATGPATQSLKCVVTGDGAVGKTCLLISYTTNAFPGEYIPTVFDNYTASVMVDGRPISLGLWDTAGQEDYDRLRPLSYPQTDVFLICFSIVSPPSFDNVKAKWFPEIEHHAPNVPIILVGTKLDLRDDRGTIDALRQRKMEPVSYEQALAVAKEIRAHKYLECSALTQRNLKSVFDEAIRAVLNPRPAAKPKNKKCVIL

SEQ ID NO: 1671 - protein, 393 aa, Bordetella parapertussis
MSSALANIYARLPVSFTHGRGVWLWDTGERRYLDALAGIGVSCLGHGHPGLVAAISEQAARLIHTSNIYEVPQQAALARRLAELSGMSEVLFSNSGSEANEAAIKLARYYGYKQGNTHAHIITMDSSWHGRTLATLAATGSDKARQGFGPMPSGFIQVPYNDLPAIRAAGEAEPRVTAVLLEVLQGEGGIRPSDMAFLRGVRQLCTERGWLLMIDEVQSGIGRTGKWFAHQWADIRPDVMTLAKGLAGGVPIGAMLAAGPAAGVFAPGSHGTTFGGGPLACAAGLAVIDAIEQEGLLANAHEVGAHLHAALASELAGVPGIIEVRGHGLMLGIELDRPCGILATRAMEAGLLINVTRERVVRLLPPLILSGEEADQIVRILVPLIKQFLAQQQ

SEQ ID NO: 1672 - protein, 419 aa, Crocosphaera watsonii WH 8501
MTSPSLTLLRQIQVLDPVANSTMTNDVLLGSSLIQAIDSHLDNIPPDTNIVDGKGLILAPGLMDLYSYSGEPGHEDRETLDSLAASAIAGGFTRVAILPQTQPSIDNLATLSHLKQRTASISGVKFDFWGTFTHQGKGEQITELGELAQGGIIGFTDNQGIENLALLRRVLEYLKPLKKPLALVAEFPSLKGSGVMREGYFSTTYGLTGNPAMTEGTAVATILEMVAAMETPVHLMRISTRRAVELIAWGKARGIPITASTTWMHLLLDSENIASYNPNLRLDPPLGNPEDRLALIEGISQGIIDAIAVDHRGYTYEEKTVPFAEAPPGAIGLQLALPLLWQTLVETETLSPLQLWKALSSNPRKCLGQTVHPVKAGHPSELIVFAPQKTWTPTPSTLKSLNYNTPWLGQEIKGQVIAI

SEQ ID NO: 1673 - protein, 125 aa, Mesorhizobium loti MAFF303099
MADLAKIVDDLSKLTVLEAAELSKLLEEKWGVSAAAPVAVAAAGGAAAAAAPAEEKTEFDVVLTDAGAQKINVIKEVRAITGLGLKEAKDLVEAAPKPVKEGVSKADADKFKAQLEAAGAKVDLK

SEQ ID NO: 1674 - protein, 362 aa, Wolbachia endosymbiont of Drosophila simulans
MDKKVLLELSNGLKIELPVLSGTTGPDVLNIKDLYKMTGLFTYDPGFVSTASCSSTITFIDGDEGVLKYRGHNIADLAENNNFTAVIYLLLYGELPSSEQHKKFLLKIQESSKVSEQVTNVIKAFPKTAHPMSILVACFASLSASYHEKHGNNVNGEDLDFGISAIAQVSTIIAMICRHNNNQEFINANNELSYSENFLKMIFGDAVDNDKSALFAKALDKIFTLHADHEQNASTAAVRLVGSAGSNLFASLSAGVATLWGPAHGGANEAVINMLKEIEQSGDIDKFIEKAKDDKDPFKLMGFGHRVYKNYDPRARILKGACHEVLSKLEQNNELLKIAKKLEEIALKDEYFIVRKLYRIPP

SEQ ID NO: 1675 - protein, 427 aa, ASPERGILLUS NIDULANS FGSC A4
MEILQKKPKNIAIHTSPVHDLRVVDCEIPRLAPDGCLIHVRATGICGSDVHFWKHGRIGPMVVTGDNGLGHESAGVVLQVGDAVTRFKPGKYHACPDVVFFSTPPHHGTLRRYHAHPEAWLHRLPDHVSFEEGALLEPLTVALAGIDRSGLRLADPLVICGAGPIGLVTLLAANAAGAAPIVITDIDSNRLAKAKELVPRVQPVLVQKQESPQELAGRIVQRLGQEARLVLECTGVESSVHAGIYATRFGGTVFVIRVGKDFQNIPFMHMSAKEIDLRFQYRYHDIYPKAISLVNAGLVDLKPLVSHRYKLEDGLEAFATASNTAAKAIKLGTSSREPYSGICPKDEVVPTVLTKPGTRFLRDCTTHIALHGSSPSSNVYGKPGIECLRRSAEHTREQQWTLQFDGCSSLASSGSGERLGQARPEPV

SEQ ID NO: 1676 - protein, 500 aa, Crocosphaera watsonii WH 8501
MCGIAGIWGQTEQTNVEAMMKSIIHRGPDAKGIFTVPNGSGILGHQRLSIMDVDGGDQPIYSKANTQAIIGNGEIYNYPKLQPELAKKYKFLTKSDTEAVLHLYEEKNTTAVGELDGMFAFAIIDDNKFIAARDPIGIKPLYYSEKDGNFWFASELKAITQFCENVEEFPPGHFFSSETGFSQYYSLPDIPPELDANVDELLQEIRETVEASVVKRLMSDVPLGAFLSGGLDSSIIAAIAKKHKSELHTFSVGIAGSKDINAARLVSDYLGTIHHEYIITPEEAIAKLPEIIYYLESFDQDLVRSGIPCYFTSRLASEYVKVILTGEGADELFAGYTYYKDIPSDDTLHRELRRSVNSLHNINLQRVDRLTMAHSIEGRVPFLDLKMIELGQKVPAHLKLKGTPPVEKWILRKAFEDILPEEIVWRKKEQFDEGSGTVDLLTETLKDVMNEQQAQQYQKEHPDIKLRSAEECYYHQIFMKAFDNPDALLTNVARWAETRF

SEQ ID NO: 1677 - protein, 98 aa, Triticum aestivum
MASRLLAAASSSSSSSSSSPLARLISSRRMAGAADHHGSTKVNMWQEPLNPGNWKEEHFVLTSLAMWGAIIYGGLKAFGGKKEVKTEAGSAPAAAPAH

SEQ ID NO: 1678 - protein, 75 aa, Zea mays
MGLCSCCCRCLELLCSVLLPPLGVCLRHGCCSMEFWISVLLTILGYLPGVLYAVYVICSVDPHRHRDNDDYVYVA

SEQ ID NO: 1679 - protein, 274 aa, Pseudomonas putida KT2440
MQRLSTRTGLDLPAIGLGTWPMTGSECTQAVRQALDVGYRHIDTATAYENEAAVGQALRDSDVPREQIHLTTKVWWDRLEPKAMRQSLEDSLRALGTEQVDLFHIHWPGTDWDLARSIDTLVALRDEGKARHIGVANFPLGLLRQVVETLGAPLSAIQVEYHVLLSQQPLLDFARGHDLLLTAYTPLARGQAAAQPVIQAIARKHGVLPSQVALKWLLDQDGVAAIPKASSRENQLANLAALTVPLDDEDRTAIAGLPKDQRVVSPPFAPDWNS

SEQ ID NO: 1680 - protein, 54 aa, Brassica napus
MGTATFIDILLAILLPPLGVFLRYGCEVEFWICLVLTLFGYLPGILYALYVLTK

SEQ ID NO: 1681 - protein, 105 aa, Triticum aestivum
TSVALPEGEVFYLVALLRFCPGGSGAAVEELVAQNGAIVDACRSSGYDFKTYFPHYRTEADWARHFGAKWARFVDRKARYDPLAILAPGQKIFARTPSSSRTDRS

SEQ ID NO: 1682 - protein, 490 aa, Glycine max
MTKISPEVEIRMPMEAFPPVSADVSFISNSFPKYKLDVDNQVLEEPVEDNLGPSLKDVIEQEAFNLSDQHKRISVRDLASKFDKNLAAAAKLSNEAKLREVASLEGHVLLKKLRDALENLRGRFAGINKEDVEKAISMVEALAVKLTQNEGELIQEKFEVKKLVNFLKQASEDAKNLVNQEKSFACAEIESARAVVLRIGEALEEQEKASQASKPQDVDGLIEEVQESRRIKLLHHPSKVMAMEYELRALRDQIRSREVCRVKLQKELIMSKRNEENKCCLYMLDGSEALGSYLRVQPCSDEVPQVSKCSFQWYRLSSEGSWREVISGANKSIYAPDPSDVGRILQVDIVSNGKKLTLTTNPIQTVSGLGSHVETLLRKSNTDFNVVISQMNGKDHSSHSTHSFNVGRMRIKLCRGWITKAREIYSPSMQLCGVRSDIANAAKALFWQARKGLSFVLTFESERDRNAAIMVARKYALDCNVVLAGPDDLV

SEQ ID NO: 1683 - protein, 485 aa, Magnaporthe grisea 70-15
MATKGSEGFATHEFFNIINGQRRGAGAGGVDRVIDPRTEEPLWEVPIGSAEDLEDAVTAARAALPGWAATTAEERQQLLAKMAEALGANMEFLAGVVMKETGKSQLMATIEIANSLDQCKYFANNTLQDKVQFEDDTIKIIETHAPLGVVGAISPWNFPLILSSIKVVSALVMGNTVIMKPSPFTPYCVLKFAELCQSFLPPGVLQAINGGGELGGLMTLHDGIDKISFTGSIPTGKKVMANCAKTLKRVTLELGGNDAALVCANVDLDKVVAQTCAGSFFNAGQFCAATKRIYVHADIYDAFVDKFVAETKANYESAFAGDGVSVPTIFGPVSNKMQFDVVKRILDDAARPESGGKILTGGKPHDKGYWIQPTVVAGPKEDSMVVKDEQFGPVIPILKWSDEQDVIKRANLSNSGLGATVYSKDLTQAERIARQLESGSVWINMSEKPNAAAWFGGWKDSGFGGEMGLLGLYSYCHIKSIHFAK

SEQ ID NO: 1684 - protein, 316 aa, Glycine max
  unsure (1)..(316): unsure at all Xaa locations
MAKETSVVYLYPSKSQVWGENFDHKKLVITTLAANGKKEESNGAPNDTYPAFPGWYADVSWPGEAHTYKIEKILFHGKSEFQELLVFESSRQGKVAILDGHIQLTENDEFAYQEMLTHLALCSIPDPKKVLLIGGGDGGILREISRHSSVEHIDICELDQMVIDVYSEFFPDIAVGYEDPRVHVHISDGVAFINSVPEGTYDVIISDAFPAMGHSADVLADECFLESVAKALRPGGVFSAPADSLWHKNFVVADTIANCKKIFKGSVNXLGPVNFKHPVNRLDPEKNGVAEGPTKFYNPXINAAAFCLPSFVDKVD

SEQ ID NO: 1685 - protein, 432 aa, Bifidobacterium longum DJO10A
MPINEALFAAMKAASYIKPNAGKSYKLQRVAEELIAKQAPDNPKCRVEDAFAPMADGYAVPLRVFTPLVAYGAPLPEALEESSANGTPVASAISAILPAVLPKVLPKILIKESTSSGNADGISGNANTELPSVTPRGTILFFHGGGWTTGGINLYTQACAHMAVRLQRRVISVEYRLAPEYRFPTAVEDCYEVARQLFAGELPISGVGGSVDVDHPQSAAPTAPAGGGDISATIPAPDPDSIVLFGDSAGGNLAAAVSLMARDRGEFMPRTQMLLYPVVGNDYNPETSPFESVRTNGTDYILTAQDMADYIDMYRSSVADLTNPYFAPLTAHDLSNQPRTLVLSAEYCPLRDEDEAYARRLQLVNDNVSCYRIHDGIHGYLLNTSAVGLVATTYRIIEHFLDGTPLEPAPGTGTTANAPEGGDAWQDVLGTD

SEQ ID NO: 1686 - protein, 371 aa, Rubrobacter xylanophilus DSM 9941
MPKKSVGLSGAIAGDTAICTVGSSGDSLEYRGYPIEELAERATFEEVMHLLIRGELPDRRQLEEYTGRLSGMRKIPQELRDVLERIPASTHPMEVLRTGCSMLGTLEHEGEGRDAREIGERLISCLPSVLLYWHHFAGSGKRIETDTGEHSLAGHFLRLLHGREPGEEERRAVDVSLILYAEHEFNASTFTARIIASTGSDFYSAITGAIGALRGPLHGGANEAAMAFIERFRSAEEAERGLREALSRGERLMGFGHPVYTRVDPRSDIIKGWSRRLSEGHEEGYLYEVSERIERILHEEKNLFPNLDFYSASAYRFCGIPTEMFTPLFVFSRTSGWTAHVIEQRESGKIIRPSANYTGPERRPFVPLEER

SEQ ID NO: 1687 - protein, 161 aa, Glycine max
TTSPVGSPTSGNISDSYSSKEQDRFLPIANVSRIMKRALPANAKISKEAKETVQECVSEFISFITGEASDKCQREKRKTINGDDLLWAMTTLGFENYVGPLKLYLNNYRETEGEKSSTSMAKQDTEMGGLNGYRESSIAQSALSADQIQDASGNRMMPPIL

SEQ ID NO: 1688 - protein, 205 aa, Glycine max
MAELESPNVMPKLISFLSSLLKRVAESNDLNQQQLLHQKVSVFHGLTRPTISIQSYLERIFKYANCSPSCFIVAYVYLDRFTQRQPSLPINFFNVHRLLITSVMVAAKFMDDLYYNNAYYAKVGGITTIEMNFLEVDFLFGLGFHLNVTPGTFQAYCAHLQSEMLLMQPLNFADSSLSLGKSLKAHLCYNEDESSSHQKQQQLAV

SEQ ID NO: 1689 - protein, 438 aa, Zea mays
MAEKENILMQRYEMGKLLGKGSFAKVYHARNVKTSESVAIKVIDKDKIKKCGLMDQIIQEISVMKLVKHPNIVQLYEVMATKTKIYFVIEYVKGGELFKKVQRGRLKEDVARTYFQQLISAVDFCHTRQVYHRDLKPENLLLDGSHNLKISDFGLSALPNCKRKDGLLHTICGTPAYVAPEVISQKGYDGAKADIWACGVILYVLLAGYLPFQDKNMMDMYKKICKAELKWPSWFSSDVRKLLRRILHPNPNRRISIEEIRTHPWFRIGLDARLFDSTTRDHVPSDMDLALNSLNSNMVECNSAAEKLTILNAFDIISLSNGFDLSGIFENSNKESKFMSTNTAMTIITKLMEVAKSLDLKVITKTGGLLNMEAAKSGIKGVMSINAEIFQITPNYHLVEIKKINGDILEYHNFMNQSMRPALEDIVWAWHGEQPDEK

SEQ ID NO: 1690 - protein, 147 aa, Brassica napus
VNNRGPTCGQELGDLRGLVLEKVAGSLGLPGRFYNLGGPGIFPYSSKLNHGFFGNFRPYGGPYAGSKGGVVGDILFLVSNLRDDHKVAMHAGSTLNHRFVRFNPREGENATGMLTGFNGLGQYFCLHFGAFQLGRGPVYMAFLGLMG

SEQ ID NO: 1691 - protein, 473 aa, Nostoc punctiforme PCC 73102
MYEKITPPAAGAKIAFKNGEPIVPDNPIIPFIRGDGTGIDIWPATQKVLDAAVAKAYKGQRQISWFKVYAGDEACDLYGTYQYLPQDTLTAIEEYGVAIKGPLTTPVGGGIRSLNVALRQIFDLYACVRPCRYYAGTPSPHKNPEKLDVIVYRENTEDIYLGIEWRQGSEIGDRLIKILNEELIPATPEHGKKRIPLDSGIGIKPISKTGSQRLVRRAIKHALLLPKNKQQVTLVHKGNIMKYTEGAFRDWGYELATSEFRQETVTEQESWILSNKEKNPNISLEENARQIEPGFDNLTPDKKAQVVKEVETVLNTIWATHGDGKWKEKVLVNDRIADSIFQQIQTRPDEYSILATMNLNGDYLSDAAAAIVGGLGMGPGANIGDSSAIFEATHGTAPKHAGLDRINPGSVILSGVMMLEFLGWQEAADLIKKGLSDAIANSQVTYDLARLLEPPVEPLKCSEFADAIIQHFG

SEQ ID NO: 1692 - protein, 292 aa, Pyrobaculum aerophilum str. IM2
MREIIELYRKVGGFQALHVAEAYDVLKEAVEAADVRFLSFTGNLVATGLREFIADAIRRRLFNVVVTTAGALDHDIAKSMGAVYAPGSFDLDDVDLAAKGYHRLGNVVIKKEEYGPLVEKFILAHCEKLWGKTLATYELAYLLGAELPEDSILGAAARAGAKVFVPGIVDGAVGTALMTCNDLARTKRGGSRAFIDVLKDEEELREIVHNSKKLAALIVGGGISKHHVIWWAQFKGGLDYVVYISTAVEYDGSLSGARPREAISWGKVKPSAKSVFIFADATLVLPVLLKAL

SEQ ID NO: 1693 - protein, 171 aa, Larix laricina
APSKTGNSNVVSAFTGLKSMAQFPSSKTMSNAGAEWERKTTSNGARVRCMQVWPPYANKKWETLSYLPRLTPEQLVKEVEYLLKNKWVPCLEFEEDGEIKRVYGNSPGYYDGRYWVMWKLPMFGCTEASQVLNEVNECAKAYPNAYIRVIGFDNVRQVQCISFIVHKPEYN

SEQ ID NO: 1694 - protein, 97 aa, Triticum aestivum
MGLNYNRKTPSFPSTSALLSSTASPPSTDRVKSSPSAGTSTTMAGTANCIDIILAIILPPLGVFLKFGCGHEFWICLLLTFLGYIPGIIYAIYAITK

SEQ ID NO: 1695 - protein, 122 aa, Deinococcus radiodurans R1
MAYDKQALIDQLGQLTIMELADLIDGLKETWGVTAAVAVSGGGAGAASPAAEEKTEFDVVLIDAGASKINVIKEIRGITGLGLKEAKDMSEKGGVLKEGVAKDEAEKMKAQLEAAGARVELK

SEQ ID NO: 1696 - protein, 274 aa, Rhodopseudomonas palustris CGA009
MDSIKTQGLNVPKLGLGTFKLQGKDCHEAVLTALSLGYRHIDTAEMYANEDFVGDALEDTDVPRDQIHLTTKVWWTNLAPDAIRKAFDQSLRKLKTDYVDFYLIHWPAPDMNLGAALETLLRIKDQGGARAIGVCNFPVALMKQAVEEIGAPIACNQVEHHVLLGQTKLLPYLQSKGIPLTAYAPLAQGRLASYPELQAIADKHGATAAQVALAWLLEQEGVMAIPKARGEASQRSNLGALKIKLDFDDRAVIAKLPKNQRFVTPAFSPKWDAE

SEQ ID NO: 1697 - protein, 422 aa, Yersinia pestis CO92
MTPSDLVFDQQHIWHPYTSMTEPLPCYPVVGAEGVELQLADGRRLIDGMSSWWAAIHGYNHPVLNFAAHQQLDKMSHVMFGGITHPPAVKLCRQLVAMTPPPLECVFLADSGSVSVEVALKMALQYWQAKGERRQRILTLRHGYHGDTFGAMSVCDPQNSMHSLYQGYLAENLFANAPQCGFDDPWDPQDIANFVALITQHANEIAAVILEPVVQGAGGMRIYHPSYLREVRALCDKHQILLIADEIATGFGRTGKLFACEHAQIVPDILCLGKALTGGYLTLSATLTTRAVAETISKGDAGCFMHGPTFMANPLACAVASANLSLLAENSWQQQVSKIEDQLKRELLPLAQEDTVADVRVLGAIGVVEMKKPVNVARLQRSFVEQGVWIRPFGKLIYLMPPYIISQHALTRLTAAVVDRGS

SEQ ID NO: 1698 - protein, 124 aa, Glycine max
MASSMISSPAVTTVNRAGAGMVAPFTGLKSMAGFPTRKTNNDITSIASNGGRVQCMQVWPPIGKKKFETLSYLPDLDDAQLAKEVEYLLKKGWIPCLEYEYEHGYVYREHNRSTIYYDRRYLTM

SEQ ID NO: 1699 - protein, 495 aa, Pseudomonas putida
MSLLIRGATVVTHEESYPADVLCVDGLIRAIGPNLEPPTDCEILDGSGQYLMPGGIDPHTHMQLPFMGTVASEDFFSGTAAGLAGGTTSIIDFVIPNPQQSLLEAFHTWRGWAQKSASDYGFHVAITWWSEQVAEEMGELVAKHGVNSFKHFMAYKNAIMAADDTLVASFERCLQLGAVPTVHAENGELVYHLQKKLLAQGMTGPEAHPLSRPSQVEGEAASRAIRIAETIGTPLYVVHISSREALDEITYARAKGQPVYGEVLPGHLLLDDSVYRDPDWATAAGYVMSPPFRPREHQEALWRGLQSGNLHTTATDHCCFCAEQKAMGRDDFSRIPNGTAGIEDRMAVLWDAGVNSGRLSMHEFVALTSTNTAKIFNLFPRKGAIRVGADADLVLWDPQGTRTLSAQTHHQRVDFNIFEGRTVRGVPSHTISQGKVLWADGDLRRRGRGGAVCGTAGVSVGVRGAGATRRTAAPDARSALRPLGLLRSPSPASQI

SEQ ID NO: 1700 - protein, 296 aa, Escherichia coli
MSYYHHHHHHLESTSLYKKAGLANPTVIKLQDGNVMPQLGLGVWQASNEEVITAIQKALEVGYRSIDTAAAYKNEEGVGKALKNASVNREELFITTKLWNDDHKRPREALLDSLKKLQLDYIDLYLMHWPVPAIDHYVEAWKGMIELQKEGLIKSIGVCNFQIHHLQRLIDETGVTPVINQIELHPLMQQRQLHAWNATHKIQTESWSPLAQGGKGVFDQKVIRDLADKYGKTPAQIVIRWHLDSGLVVIPKSVTPSRIAENFDVWDFRLDKDELGEIAKLDQGKRLGPDPDQFGG

SEQ ID NO: 1701 - protein, 141 aa, Triticum aestivum
  unsure (1)..(141): unsure at all Xaa locations
MGERLKGTVKWFNVTKGFGFISPEDGSEDLFVHQSAIKADGYRSLNENDVVEFEVITGDDGRTKATDVTAPGGGALAGGSRPSEGGGDRGGRGGGGYGGGGYGGGGGGYGGGGRGGGGGGGGCXXCGESGHFSRECPNKTN

SEQ ID NO: 1702 - protein, 302 aa, Arabidopsis thaliana
MGEVWRWNKEVEMDSIRDCLKHFSSIAIDTEFPGCLKETPMDASEEIRYRDMKFNVDNTHLIQLGFTLFDRRGITKTWEINLSDFNEHKCFKNDKSIAFLKSNGLNLDKIGEEGIGIEEFFRDFSQILKEKDGKITWVNFQGSYDNAYLVKGLTGGKPLPETKEEFHETVEQLLGKFVFDVKKIAESCSGLSSRFGLQRIADVLQMKRVGKAHHAGSDSELTARVFTKLTFDLLNSRKQCVRRVDHQQYQLEQQQLMMTRCYIPIPIPIPRPRSVMFAAHHPNPYFGGGYFGMPVQGRNYVL

SEQ ID NO: 1703 - protein, 512 aa, Arabidopsis thaliana; identical to SEQ ID NO: 374

SEQ ID NO: 1704 - protein, 1832 aa, Podospora anserina
MYNPPGQRDATRPFHVPPPPPPMSPPPPTVGINNPMMTIPPPPPRHPNAPSTTGNVLLPPPPSGPPPNSGFPNSAIAPPSALGSTAPWHGAWGRAYDGRTAFNIPPPPPGGGAGGGGGGGSGGVLRAYDPKYHAQVLAAANNGATYTVPPPPPPQQQQQQQQQQQQQQQQQQQQQQQQQQQQQQQQQQQQQQQQQQQQQQQQQQQQQQQQQQQQSDQMGALTSATYIPQGDTYGEGVGIPGLGLEDSAIGWNMGAHLESATATPLDESSGRDRLYANAMAQRGSSTTSNATVSSVSVPPELAAQWPMEKVLGWLQANSFSSHWQETFKYLGLDGARFLELGSSHGGRGNFGMMHQQVYPRLLALSGPEWNQAREREEGKRMRRLVRSIVTGRPVEVKGGRLGGGQQQPQHARQNSTSAPPAVTGGQTGNRSAESPNVSVDDGFWDTGVTDADDGDKQTPNPIKIPEFGFSRRFSQSRATTMPTLSSTMPTDHRNMMKEIDTSRRHSPTLSESGEAGGTFRGGSTPLGGGGGGGGGGGRDSPSAGSPNPASGLFPSSTAGNLSASPHSSRFGHRSRNSTDSVSSSAAIYGSGVPADAAAMLKSGMNIADVVNAARNANDRRHAQDGGRPSPQESGGGDRSAGEPPGSAKGSGSFLSIFTRKKHGRKDDGFGGDEDSPTSPGLSFKPQSLGDNRPGSSAGTYGHHHAGNVRANRGGPRVFILATADCWNYRMLDVTDIETASDLRQLICINLGLPESEGAHLYPTELGKFEHDGEALDDSKLLAIKTQRADAIGTLKLFVRVGGPPQMRQTGAQIAMDEETYVKLNGRMRSSSSPPTSRQNTLTGKEGEDKMLTAEAIEYRTEQLRKQKEYLAKRKQVAENNHVADRSPSSSIVGRTVDFDQPRHSPFEDRKMDTLLPQRKPPAPPSDPSATLIKANSLKKTGHGLRLSGDSGYHPKRKTSSDLRSSGDVVFEKQKRWGPVADPSAGIGALLVGMSDGMASIARPRPGGGMMQQRQPSPHRVATEPITSQELQRGKKAMSTVNFGPAHQRERSGSGGGSPRPGGMPGSPGSYTWSSKNVPFLVPDYSPNGTPAPPTASRMPDGGGNSGDGCLDQNHNHQAQNGTIAKMRNVARAPSPGNVSPSSRRRPSDSFSSQAAVAKKRKSHGPDTDFTDNDVTFSASSTRASKKVDDSDSDDDSDDGLFAIPIAARNSGPDKGKTTAPAEGNSGDSDGASGTGTGKRPSLRLNTRSGSNSRAKKTLSVAFAVSPQSSSAGGKTPLEDDDSGRSSSQRRGTPGTPQSEGGWDSEEKDSKISRRKSFIEKDVWANRPPTDALVNNLEDFFPDLDVDQPVLEEGVDQEPPSPIAEGDENNQGSASVPPLPPLPPGLSTGKLHTFYNDNDTLGSDESTLKALESRPVSMQSLAHRSIRRSGGGGGLGRMKSIREVARGANEFGKRYTQGPGQIDAQSSAAAAGNRNTNLMRRKSTKMFNANIVQIQPDRGSLNLAMGGLTTIPQDSLPTRSTNSRESIPKRQTTFRWFKGQLIGKGTFGRVYLGMNATTGEFLAVKEVEVNPKAAQGDKKKMQELVAALDQEIDTMQHLDHVNIVQYLGCERKETSISIFLEYISGGSIGSCLRKHGKFEEPVVASLTRQTLSGLAYLHREGILHRDLKADNILLDLDGTCKISDFGISKKTDNIYGNDKTNSMQGSVFWMAPEVIRSQGEGYSAKVDIWSLGCVVLEMFAGRRPWSKEEAVGAIYKIANGETPPIPEDIREVISPVAIAFMLDCFTVVSSERPTADVLLSQHPFCELDPTYSFLDTELYAKIAGRVNDLGRGQ

SEQ ID NO: 1705 - protein, 305 aa, Zea mays
  unsure (1)..(305): unsure at all Xaa locations
MKNVAKRRYLSLTRPQGGIFAGPAAPGFLQHEGGRGVEAALPYQKADRGPRKEAGIRLCSATMSSLYDVSCFAAGLAGNVFALALFLSPVPTFKRVLKAKSTEQFDGLPYLLSLLNCCICLWYGLPWVSDGGRALVATVNCTGALFQLAYISLFIFYADSRTTRLKVAGLLVLVVFAFALIAHASIAFFDQPLRQLFVGSVSMASLVSMFASPLAVMGVVVRTECVEFMPFYLSLSTFLMSASFAVSRMGSESSWEQCSWCXKSTTAGDGKAATRQHRCLPDHVAEFVSPIARAVLSVVLCSAIL

SEQ ID NO: 1706 - protein, 312 aa, Saccharomyces cerevisiae
MSFHQQFFTLNNGNKIPAIAIIGTGTRWYKNEETDATFSNSLVEQIVYALKLPGIIHIDAAEIYRTYPEVGKALSLTEKPRNAIFLTDKYSPQIKMSDSPADGLDLALKKMGTDYVDLYLLHSPFVSKEVNGLSLEEAWKDMEQLYKSGKAKNIGVSNFAVEDLQRILKVAEVKPQVNQIEFSPFLQNQTPGIYKFCQEHDILVEAYSPLGPLQKKTAQDDSQPFFEYVKELSEKYIKSEAQIILRWVTKRGVLPVTTSSKPQRISDAQNLFSFDLTAEEVDKITELGLEHEPLRLYWNKLYGKYNYAAQKV

SEQ ID NO: 1707 - protein, 465 aa, Zea mays
MEDVRATYSMGKELGRGQFGVTHLCTHRTSGEKLACKTIAKRKLAAREDVDDVRREVQIMHHLSGQPNVVGLRGAYEDKQSVHLVMELCAGGELFDRIIARGQYTERGAAELLRAIVQIVHTCHSMGVMHRDIKPENFLLLSKDEDAPLKATDFGLSVFFKEGELLRDIVGSAYYIAPEVLKRKYGPEADIWSVGVMLYIFLAGVPPFWAENENGIFTAILRGQLDLSSEPWPHISPGAKDLVKKMLNINPKERLTAFQVLNHPWIKEDGDAPDTPLDNVVLDRLKQFRAMNQFKKAALRIIAGCLSEEEITGLKEMFKNIDKDNSGTITLDELKHGLAKHGPKLSDSEMEKLMEAADADGNGLIDYDEFVTATVHMNKLDREEHLYTAFQYFDKDNSGYITKEELEHALKEQGLYDADKIKDIISDADSDNDGRIDYSEFVAMMRKGTAGAEPMNIKKRRDIVL

SEQ ID NO: 1708 - protein, 338 aa, Oceanobacillus iheyensis HTE831
METVTYAGPKNILFQNNRKPTITKGWAIIKTSYAGICGSDLSIFAGVHPRAEAPLVMGHEFSGTIEEGHPTLKKGTRVTVNPLLRCGECYPCQNGYSHVCENLKLVGIDCDGGMGEYVKVPIHSIVPLKDNISMKLGALIEPVAVAVHAIRQGNYMPGDSVVIFGAGTIGLCVALTLRSYGAKNLIIVEPNKLRLEKAKQLGFQTLDPLSENVTEKIVEGTDNIGADYVFDCAGHPSVVEAITEVVRVRGNIVIVAMYKQPPTLDMRQGMFKELNIQFVRVYTDKDFQIAIDLVDNHKEYEDIITHVLQPEEAQKGFDLLTTHTDAVKVMYEFNRGEL

SEQ ID NO: 1709 - protein, 307 aa, Triticum aestivum
  unsure (1)..(307): unsure at all Xaa locations
HYRTSLYKKAGWYRSGIPGISSTHASACTSSRSLHSQWKKGKLLGSGTFGQVYLGLNSEGDQMCAIREVKVIADDSELKECLRKLNQEMCILNQLSHPNIVQYYGSELSSETFSLYLEFVNGGSIHKLLREYGPFEEAVLRNYTAQILSGLAYLHRRNIVHRDIKGSNIFVNRNGDIRLADFSMTNHISEATSIXSFKGSPYWMAPEVIMNTNGDSLSVDIWSLGCTIIEMXATTRPPWNQYEGVAAIFKIANSKDIPDMPDHLSSEAKSFLKLCLQRDPAARPTAAQLIVHPWVKDQASVTKSPVK

SEQ ID NO: 1710 - protein, 357 aa, Triticum aestivum
SGFRRVLAPSKWYGILVTICVAPRQRAWLPCMASAVGANEKKRALSTSPAHSLKMPSLKLSFKKKSGEANPASTLLSTKDFLERPIAGSQVQLCSLEKKVLNSWSHIDPGTFRVRGSNYLRDKKKELAQNCAAYYPFGVDVYLSPQKLHHISRFVKLPDIQTSSKLPPLLVVNVQVPLYPASLFQNETDGEGMSFVLYFRLSEGYSKELSPLFIENIRRLVDDDVEKIKGFPMETSISFRERLKILGRVANLEDLPLSAAERKLMHAYNEKPVLSRPQHQFFLGDNYFEVDIDMHRFGYISRKGFETFLDRLKICMLDVGLTIQGNKPEELPEQVLCCVRLNGIDYAKYQPLMTNGA

SEQ ID NO: 1711 - protein, 520 aa, Zea mays
  unsure (1)..(520): unsure at all Xaa locations
MAAITPPTQSEPSPQTGRPASSAAAAAKRGGGGAGAAGGPLMGKYELGRLLGHGTFAKVYHARHVDTGDNVAIKVXLDKEKAVKSGLVPHIKREIAVLRRVRHPNIVHLFEVMATKTKIYFVMELVRGGELFSRVSKGRLREDTARRYFQQLVSAVGFCHARGVFHRDLKPENLLVDEQGNLKVSDFGLSAVAEQFRPDGLLHTFCGTPAYVAPEVLGRRGYDGAKADVWSCGVILFVLMAGYLPFHDKNIMAMYKKIYKXGEFRCARWFSKDLTSLLMRILHTNPNTRITLPEIMESRWFKKGFKPVKFYIEDDQLHNVIDDEDGLLDMGPAGPVPPPLPPPPPPLPPPKVDGDESGSDSDSSISSCPASMLSDESQRPRGSLPRPASLNAFDIISFSRGFNLSGLFEEKGDEVRFISAEPMSDIITKLEDIAKLKSFKLRRKDWRICLEGTREGVKGPLTIGAEIFELTPPLVMVEVKKKAGDNEEYENFCDKELKPGMQHLVHHMVRAPSMLLTDAK

SEQ ID NO: 1712 - protein, 489 aa, Novosphingobium aromaticivorans DSM 12444
MTPEGVNVAHPDKLYIAGRWVPAHSGRMIELVSPNTELVVGRVAEADETDMDAAVAAARDAFDHGPWPTTPPAERIAAFRRMVAHLETRVPELAKAWTAQMGGLASFAGPMHGGSVMALGQIAGFAEKFEFVERRPSMAADTALIAYEPVGVVAAIAPWNGPFGIMANKVAYALLTGCTVIMKPSPETPLEAYIIAEAAEAAGIPAGVVNLVTGHREASDHLVCNEGVDKVSFTGSTVAGKRIASVCGSRMARCTLELGGKSAAIVRDDFPIDAAAKMLAGTITMMSGQVCAMLSRVIVPRRRHDELAEAIAAEMKKVRIGNSDDPETQLGPVAMKRQLERIEMYIEEGRKTADLVTGGGRPAHLNRGYFIEPTLFANVRNESRIAQEEIFGPVLSLIPVEDEEDAIRTANASAYGLNGSVLTNDAEAAYRIARRVRTGGFGQNGLRMDFGLPFGGFKQSGIGREGGPEGLFPYLEMKTILIDGMPSAL

SEQ ID NO: 1713 - protein, 269 aa, Pirellula sp. 1
MEAVNADVANEHSPSHSRSIENMSQSNSDDSASSSTQQAGDGQDDVQQNIVWHAHTVSREDRESKLGQRGVVVWFTGLSGCGKSTIANELDRLLIDRGATCTLLDGDNVRHGLCAPPSVLKEEHGEDFAGRFGLGFGPTDREENIRRIGAVTELFASAGVIVLAAFVSPYQRDRDRVRNTIESSGRAGDFLEVFVDTPLEICKQRDPKGLYQKAIAGEIKNFTGISDPYDAPPSPEIHLKWREGQTPHDQASEIIREMEKRGVLGPAKG

SEQ ID NO: 1714 - protein, 65 aa, Zea mays
LLHRLQIPTTDLLYDGVGEAAQIYCELARLGADMLVIDVGGGLGIDYNRTHLAQTDMLVAYSPEE

SEQ ID NO: 1715 - protein, 307 aa, Zea mays
NLKVSDFGLSALRECQKQDGLLHTTCGTPAYVAPEIINKKGYDGAKADIWSCGVILFVLLAGYLPFHDANLVEMYRKISRADVKYPQWFSPELRRLMPKLLEPNPNNRITIEKLVEHPWFKKGYRPAVMLAQPHGSSSLKDVQVAFSNADHKDSSSKVEQPADSSLKPASLNAFDIISHSRGFDLSSLFEVDQEQKASNSRFMTQKPASAIVSKLEQIAETERFMVKKQDGLVKLQGSKQGRKGQLAIDAEIFEVTPAFHVVEVRKSAGDTLEYEMFCSKGLRPSLSDICWSSRSEENMAPSVVQPS

SEQ ID NO: 1716 - protein, 487 aa, Mycobacterium avium subsp. paratuberculosis str. k10
MTATASSPPRTGALLIGTERITAASGGSHQHRYPGTGVPNATIPLAGHSEVDRAVHSAREAQREWISYPVDRRRDLLFGLADLLRDHFAELTELNVHDYGVPISVAGNSVLTERFVRYYAGYPDKLTGASTPVSGAFDVNIVEREPYGVVAVIAPWNGPLVVAGAAVAPALAAGNAVIFKPSELASLAPLRFGELCLEAGLPPGLVNVLPAGPEGGEALVRHPGVGKVHFTGGHATAQQVLRAASDNVTPVTAELGGKSAYLVFADADLDTAAVIAAHQGPLTQAGQSCACASRILVEASVYVSFVEKLVAQVQAATIGDPLRPDVMLGPVITEAAADRILGVIDRAVAEKAGDLVTGGRRLGGELASGYFIEPTIFSNVDNRSSLAQTETFGPVASVMPFADEAQAVSLANDSRYGLNAFVATANLERAHRVARRLQAGSVWVNRHSDIEPQGPYGGYKQSGFGRTGGVEGLHEFLQVKNIRIGMS

SEQ ID NO: 1717 - protein, 238 aa, Oryza sativa
MCGIKQEMSGESSGSPCSSASAERQHQTVWTAPPKRPAGRTKFRETRHPVFRGVRRRGNAGRWVCEVRVPGRRGCRLWLGTFDTAEGAARAHDAAMLAINAGGGGGGGACCLNFADSAWLLAVRRSYRTLADVRHAVAEAVEDFFRRRLADDALSATSSSSTTPSTPRTDDDEESAATDGDESSSPASDLAFELDVLSDMGWDLYYASLAQGMLMEPPSAALGDDGDAILADVPLWSY

SEQ ID NO: 1718 - protein, 435 aa, Saccharomyces cerevisiae
MTLSKYSKPTLNDPNLFRESGYIDGKWVKGTDEVFEVVDPASGEIIARVPEQPVSVVEEAIDVAYETFKTYKNTTPRERAKWLRNMYNLMLENLDDLATIITLENGKALGEAKGEIKYAASYFEWYAEEAPRLYGATIQPLNPHNRVFTIRQPVGVCGIICPWNFPSAMITRKAAAALAVGCTVVIKPDSQTPLSALAMAYLAEKAGFPKGSFNVILSHANTPKLGKTLCESPKVKKVTFTGSTNVGKILMKQSSSTLKKLSFELGGNAPFIVFEDADLDQALEQAMACKFRGLGQTCVCANRLYVHSSIIDKFAKLLAERVKKFVIGHGLDPKTTHGCVINSSAIEKVERHKQDAIDKGAKVVLEGGRLTELGPNFYAPVILSHVPSTAIVSKEETFGPLCPIFSFDTMEEVVGYANDTEFGLAAYVFSKNVNT

SEQ ID NO: 1719 - protein, 463 aa, Anabaena variabilis ATCC 29413
MADLTPNSSFSVTLRLQIPNRVGMLASITQAIASSGGNLGQIDLIEQTRQVSLRDLTVDAASTEHAETIVQAVKAIPDIKLVSVYDRTFNLHRGGKISITSRIPLKSVSDLAMAYTPGVGRVCTAIAQDPSQVYNLTIKQNTVAIVTDGSAVLGLGNLGPHAALPVMEGKAMLFKEFAGLDAFPICLATQNTEEIIQAVKNIAPVFGGVNLEDIAAPRCFEIEQRLKQELDIPVFHDDQHGTAIVTLAALFNSLKLVQKSLTDIRIVINGAGAAGVAIARLLRKAGAEKIWMCDSKGIISTTRTDLNEEKQEFAVKAQGTLAGAVQGADVFIGVSAPGVLTPEMVKSMAKDPIVFAMANPIPEIQPELVQNDVAVIATGRSDYPNQINNVLAFPGVFRGALDCRAQTITTTMYLEAASAIASLVNPSDLSREHIIPSVFDERVVTAVAAAVQRAAREEGIARA

SEQ ID NO: 1720 - protein, 204 aa, Streptomyces avermitilis MA-4680
MNPQLPAVLSLPKVPAGPQLRKARRVRKVPVTPEWLPTVRKAPAVPERLPKVPKVLVIPEARKAPKVRKIPAVPEFRKGRKAPAVPERLPKVRKIPAVPKRRRVPKIPTNPRIPTSPVPDVSRPLPPRRAGAFPAGHAEDRGHRSPRPVRHRDAYLHPTAVLGRVAPAAQPDHRVSDLPHGVPPKRAVKHLSAGSWRPLTPWLV

SEQ ID NO: 1721 - protein, 499 aa, Dechloromonas aromatica RCB
MRHALLFSVFVIASCGLAYELIAGALSSYLLGDSVTQFSTVIGTYLFAMGAGSWLSKYITRDLIGRFIQIELMVGLLGGFSAVGLFLVFTWLSAPFKLVLYLAVFGVGVLVGLEIPLVMRILKRELAFKDLVSQVLTFDYLGALAVSILFPLVLAPQLGMVRTGLLFGVLNVAVALWALHLFREQLPSRRWLAMQSWGVFGLLAIGFAGAGQLTTFAEAHLYADEIVHAETTPYQRIVVTRWRDDLRLFLNNNLQFSSHDEYRYHEALVHPGLASLPGAKRVLVLGGGDGLAVREILKYPNVESVTLVDLDPAMTDLFATAPALVALNQGALKSERVTVVNADALQWLEDSKEYFDFIVIDFPDPANFALGKLYTSAFYRLIEKRLSARGLLVVQSTSPLYARQSFWCVVATLESAGFKTAPYHALVPSFGEWGYIIAGRQAFSMPAFASDKTRFLTSETLAGMFNFPADMARVPAEVNQLNNQVLVRYFETEWRKVIR

SEQ ID NO: 1722 - protein, 368 aa, Arabidopsis thaliana
MEDDRVFSSVHSTVFKESESLEGKCDKIQGYDFNQGVDYPKLMRSMLTTGFQASNLGEAIDVVNQMLDWRLADETTVAEDCSEEEKNPSFRESVKCKIFLGFTSNLVSSGVRDTIRYLVQHHMVDVIVTTTGGVEEDLIKCLAPTFKGDFSLPGAYLRSKGLNRIGNLLVPNDNYCKFEDWIIPIFDEMLKEQKEENVLWTPSKLLARLGKEINNESSYLYWAYKMNIPVFCPGLTDGSLGDMLYFHSFRTSGLIIDVVQDIRAMNGEAVHANPKKTGMIILGGGLPKHHICNANMMRNGADYAVFINPGQEFDGSDSGARPDEAVSWGKIRGSAKTVKVYCDATIAFPLLVAETFATKRDQTCESKT

SEQ ID NO: 1723 - protein, 102 aa, Fragaria x ananassa
MATLDSDVPMIPVGEGSSSAGPSSTKKPKRFEIKKWNAVALWAWDVVVDNCAICRNHIMDLCIECQANQASATSEECTVAWGVCNHAFHFHCISRWLKTRQV

SEQ ID NO: 1724 - protein, 274 aa, Listeria monocytogenes str. 1/2a F6854
MNLKDTVKLANGVEMPRLGFGVWKVQDGDEAVNSVKWAIEAGYISIDTAAAYKNEEGVGQAIKESGIKREDLFVTTKLWNAEQGYESTLAAFDESLRKLELDYVDLYLIHWPVKGKFKDTWRAFEKLYKDKRVRAIGVCNFHEHHLKELMEDAEIAPMVNQIELHPQLTQEPLRKFCAENNIVVEAWSPLGNGKLLSNPEIKAIADAHGKSVAQVILRWDLQIGVVTIPKSVHQERIIQNADIFDFELSEEEVAKISGLNKDERTGPDPDNFNF

SEQ ID NO: 1725 - protein, 160 aa, Bacillus cereus G9241
MTVYDFSAKTITGEDKSLKDYEGKALLIVNVASKCGFTPQYKGLQEVYDKYKDQGLEILGFPCNQFGGQEPGTEADITSFCELNYGVNFPMFAKIDVKGDKAHPLYTYMTEQAPGLLGMKAVKWNFTKFLIGKDGKVVGRFAPQTKPVDLEVEIEKVLGE

SEQ ID NO: 1726 - protein, 219 aa, Helianthus annuus
MKSFTGTTQKCTVCEKTVYLVDKLVANQRVYHKACFRCHHCNSTLKLSNFNSFDGVVYCRHHFDQLFKRTGSLEKSFDGTPKFKPERTFSQETQSANRLSSFFEGTRDKCNACAKIVYPIERVKVDGTAYHRACFKCCHGGCTISPSNYIAHEGRLYCKHHHIQLFKKKGNYSQLEVEETVAAPAESETQNTETQNAETQNADTQNADTQNTETQNGSV

SEQ ID NO: 1727 - protein, 179 aa, Glycine max
  unsure (1)..(179): unsure at all Xaa locations
MASSMISSPAVTTVNRAGAGMVAPFTGLKSMAGFPTRKTNNDITSIASNGGRVQCMQVWPPVGKKKFETLSYLPDLDDAQLAKEVEYLLKKGWIPCLEFELKHSFIYHKHNKSPEYYDRHYXPYXKLPIFNYTNTSQVLKELQEAKTTYPNHFIHIIKFNNXVRQVQYIIFITYKPPSF

SEQ ID NO: 1728 - protein, 444 aa, Nanoarchaeum equitans Kin4-M
MKIEVRAVGGYNEIGANMTAIGIDDEWLIIDMGVHVDKMLAFQKDQEEVVEWNRELLEKINALPKIEYIEDIKDKVKAILITHGHLDHIGAVIHLAYEFNAPIIGPPYAIELIRSFEKDYKIILPNEMKKINLNSSIQISDKISVDFIYATHSIPHSAHLAIHTPKGVIFFSGDYKFDNFPVIGQRYNLEKLKEIAKEGVILAFIESTRADEDKRSYSEIIAREMLRDVLFEEHEGLIIMTTFSSHIARLKSMVELSLELDRDVYILGRSMVKNVEIAEKLGIYKFSDKAKIYQYHDQIARLLKKIDDRSKYALIVTGNQGEPGSVLWRMAFEKFPFRLDKKDTVIFSCFTIPNAINIAFRNLIEEKIKSFGTRIIKDVHVSGHAMRDDHYRLIKILKPQIIIPNHGDFIKRGALADLAMNEFGYSLGKDLFLIQNGQRINFEF

SEQ ID NO: 1729 - protein, 503 aa, Burkholderia cepacia R18194
MQFNDILAALDIDLAQWKGNALTARSPLDGATLAKLAVDTPADAERKIDAAHDAFLKWRTVPAPVRGELVRVFGNVLREHKAELGALVTLEAGKITSEGLGEVQEMIDICDFAVGLSRQLYGLTIASERPGHRMMETWHPIGVCGVISAFNFPVAVWAWNAALAFVCGDSVVWKPSEKTPLTAIACHVLLQKAIREFDKTHPGVAPAELSQLVLGMRDVGEVLTASKKVPVVSATGSVRMGQEVAKVLSQRLARGILELGGNNGMIVAPSADLDLVVRAVTFAAVGTAGQRCTTLRRLIVHRSLVEQLLPRIEKAYTSVKVGNPLEEGTLVGPLVDRASFDAMQKALGDAREQGGEVKGGERVDVGHADAYYVRPALVRMPKQSAVVERETFAPILYVMVYDNFDDAIELHNAVPQGLSSAIFTNDMREAEQFMSAAGSDCGIVNVNIGTSGAEIGGAFGGEKETGGGRESGSDAWKAYMRRATNTINYSRQLPLAQGVKFDV

SEQ ID NO: 1730 - protein, 421 aa, Zea mays
  unsure (1)..(421): unsure at all Xaa locations
MGNTCIGPSAPSDRHSFFNTVSLAVLWRPPAAADRAEPSPTAEPSSSTPCSPPSRAPNPVTISDSEHPPHSTSTALGPAAPPNPNGKPKPKPKVKRVQSAGLLAGSVLKRDSERLKDVYTLGKKLGQGQFGTTYQCVEKATGKHFACKSIAKRKLVTDEDVEDVRREIQIMHHLAGHPNVVSIVGAYEDAVAVHLVMELCAGGELFDRIIQRGHYSEKAAAQLARVIIGVVEACHSLGVMHRDLKPENFLFVNQKEDAPLKAIDFGLSIFFKPGEIFSDVVGSPYYVAPEVLKKRYGCEVDVWSAGVIIYILLSGVPPFWAESEQGIFKQVLKGGLDFSSDPWPSISESAKDLVRKMLNRDPRKRLTAHDALCHPWGLCRXGVAPDKPLDSAVLTRLKQFSAMNKLKKMALKGIAENLAED

SEQ ID NO: 1731 - protein, 357 aa, Secale cereale
MKTFLIFVLAMTMSIITTARQLNPSEQELQSPQQPVPKEQSYPQQPYPSHQPFPTPQQYSPYQPQQPFPQPQQPTPIQPQQPFPQQPQQPFSQPQQQLPLQPQQPFPQPQQPIPQQPQQSFPQQPQRPEQQFPQQPQQIIPQQTQQPFPLQPQQPFPQQPQRPFAQQPEQIISQQPFPLQPQQPFSQPQQPFPQQPEQIIPQQPQQPSPLQPQQPFSQQPQRPQQPFPQQPQQIIPQQPQQPFPLQPQQPVPQQPQRPFGQQPEQIISQRPQQPFLLQPQQPFSQPQQPFLQQPGQIIPQQPQQPFPLQPQQPFPQQPEQIISEQPQQPFLLQPQQPSPQQPQLPFPQPQQPFVVVV

SEQ ID NO: 1732 - protein, 181 aa, Zea mays
  unsure (1)..(181): unsure at all Xaa locations
RAPWLFFAAAFCGRGVALXXGEXAFSPSXPAVQRRVASGRPSGPGGSDFSYRLVVVSRSQRVAVGGWRLARLILVRALRLGAGGLLLLLSLSKGAAVNKFAVLSMAAGFLAXVVGELGRMRAMSVLLRLCPCLSSVAGASSVAGIVRAGGVFGGVGRFPGAVPCVVLLGAGRVALGSCCNG

SEQ ID NO: 1733 - protein, 429 aa, Vibrio parahaemolyticus RIMD 2210633
MADKKATLHVEGQAPIELPIMDGTLGTPVIDVRKLGANGYFTFDPGFLATASCESSITYIDGGKGILLHRGYPIDQLANNADYLEVCYILLYGEAPTREQYEQFKTTVTRHTMVHEQIASFFHGFRRDAHPMAVMCGVVGALAAFYHDSLDINNDEHREIAAYRLLSKMPTLAAMCFKYSVGQPFIYPRNDLSYAENFLHMMFANPCEEYEVNPVVARAMDKIFTLHADHEQNASTSTVRLAGSSGANPFACIAAGIASLWGPAHGGANEACLKMLEEIGSVDNIPEYVERAKDKDDPFRLMGFGHRVYKNYDPRATVMRETCHEVLKELNIKDPLLDVAMELERIALSDEYFVSKKLYPNVDFYSGIILKAIGIPVSMFTVIFAISRTIGWIAHWNEMHSDPLNRIGRPRQLYKGETQREFSPLHERE

SEQ ID NO: 1734 - protein, 435 aa, Pyrococcus furiosus DSM 3638
MARITEEQRRKLAQDALEYHRNNFPGNGKIEVIPKVPLRDFYDLSLAYTPGVAEPCKVIAKKGNYEDYTIIPNTVAVVTDGSAILGLGNIGVLAGMPVMEGKCVLFKALAGIDAFPILIDTQDVEKIVETIKLISKGFGGINLEDISAPRCFEIEMRLKRELDIPVFHDDQHGTAVVTLAGLINALKLVGKKFNEIKVAISGAGAAGIAIAKLLHHVGVKEILLVDRAGIIYEGRKENMNPYKEEVARFNIHGVQGDLAKAMEGADVFIGVSVGGIVKPWMIKKMADDPIVFAMANPIPEIMPEDAKKAGAKIVATGRSDYPNQINNVLGFPGIFRGALDVRATDITLNMNIAAAEAIASVVSDEELSEDYIIPSPLHPDVYPKEARAVAEQAIRDGVARRKLSGEWVEEHTRKLREFYAALIEPLNERRKQYIT

SEQ ID NO: 1735 - protein, 393 aa, Lycopersicon esculentum
MPQLVKLPLPFPINGKRTLPILKHFLTSSSPSPSPSHALTSVRSVTYMPRPGDGTPRAVTLIPGDGIGPLVTGAVEQVMEAMHAPVLLWRYDVHGDMKEYASGDVDGISNPGRNKVWFKREGWKTPVGGGVSSLNVQLRKELDLYASLVHCFNLKGLPTRHENVDIVVIRENTEGEYSGLEHEVVPGVVESLKVMTKFCSERIAKYAFEYAYLNNRKVVTAVHKANIMENLLMVYFWESCRRDRKQITLGSSTMRELWTTVACNLYQSLSNLMLWSPLISTEIWLTNTAAGIAGGTGCLCPGGNVGGDHAVFEQGASAGNVGNEKILEQKKANPIALFLSSAMMLRHLQFPSFADRLETSVKRVIAEGKYMTKDLGGDCTTQEITDAVIANLD

SEQ ID NO: 1736 - protein, 360 aa, Zea mays
MARILLHGSLHVTIFEAEELSNSSRPSSQAPGFLRKLVEGIEDTVGVGKGTSKIYATIGLGKTRVGRTRKLTDETASPRWYESFHVYCAHLASDVVFTIRAKNPIGASTVGVAYLPVRDIFEGHEVDRWLHLCDGGGDDKDRTPLESGGKVHVRLQYFDISKDHSWGKGVRSGKYPGVPYTFFSQRQGCRVTLYQDAHVPDGFVPRIPLDGGRCYEAHRCWEDIFDAISGAKHLMYITGWSVYTEITLLKDGARPPRPGSGVTLGELLKKKAGEGVRVLMLVWDDRTCVGALKKDGLMATHDEETMNYFEGTDVHCVLCPRNPDDFGSIVHDLQISTMFTHHQKIVVVDHDMPVQRSHRQ

SEQ ID NO: 1737 - protein, 159 aa, Exiguobacterium sp. 255-15
MLQEQTFQRIDGTEATLKDYPGQAWLIVNTASKCGLTPQFEGLEQLHQDYRKQGLVVLGFPCNQFAGQDPGTDEEIQSFCQMNYGVTFPVFSKIEVNGKGTHPLFAELKALAPNTTGEQDVEWNFTKFLVTRDGEVTRFAPKTNPTDLVAAIERIVVPV

SEQ ID NO: 1738 - protein, 366 aa, Glycine max
MGLRSKLRMSASVVQQGMKEIRRSVTYMPRPGDGAPRGVTLIPGDGIGPLVTHAVEQVMEAMHAPIYFEKYDVHGDMRRVPEEVLDSIRKNKVCLKGGLRTPVGGGVSSLNVQLRKDLDLYASLVNCFNLPGLPTRHHNVDIVVIRENTEGEYSGLEHEVVPGVVESLKVMSKFCSERIAKYAFEYAYLNNRKQVTAVHKANIMKLADGLFLESCRHVATKYPGIKYNEIIVDNCCMQLVSKPEQFDVMVTPNLYGNLVANTAAGIAGGTGVMPGGNVGADHAVFEQGASAGNVGKEKMVEQKKANPVALLLSSAMMLRHLQFPSFADRLETAVKRVISEGNCRTKDLGGDSTTQQVVDAVIANLD

SEQ ID NO: 1739 - protein, 283 aa, Streptococcus agalactiae NEM316
MATIQWFPGHMSKARRQVQENIKHVDFVTILVDARLPLSSQNPMLTKIVGDKPKLMILNKADLADPIRTKEWRDFYESQGLKTLAINSKEQSTVKKVTDIAKILMSDKIAKLRGRGIQKETLRTMIIGIPNAGKSTLMNRLAGKKIAVVGNKPGVTKGQQWLKSNKELEILDTPGILWPKFEDELVGLKLALTGAIKDQLLPMDEVTIFGLNYFKTYYPDRLKERFKSINLEDEAPEIIMALTQKLGYRDDYDRFYNLFVKEVRDGKLGRYTLDIVGEHDGNN

SEQ ID NO: 1740 - protein, 112 aa, Triticum aestivum
  unsure (1)..(112): unsure at all Xaa locations
MATPTVEKPDGVEIREVWAENLEAEFAVIREIVDDYPYVAMDTEFPGVVCRPLGTFKSNADFNYATLKANVDMLKLIQLGLTFSDERGGLPALGPDGRXASRQFNFRGEQAR

SEQ ID NO: 1741 - protein, 1342 aa, Escherichia coli O157:H7
MSQEYTEDKEVTLTKLSSGRRLLEALLILIVLFAVWLMAALLSFNPSDPSWSQTAWHEPIHNLGGMPGAWLADTLFFIFGVMAYTIPVIIVGGCWFAWRHQSSDENIDYFAVSLRIIGVLALILTSCGLAAINADDIWYFASGGVIGSLLSTTLQPLLHSSGGTIALLCVWAAGLTLFTGWSWVTIAEKLGGWILNILTFASNRTRRDDTWVDEDEYEDDEEYEDENHGKQHESRRARILRGALARRKRLAEKFINPMGRQTDAALFSGKRMDDDEEITYTARGVAADPDDVLFSGNRATQPEYDEYDPLLNGAPITEPVAVAAAATTATQSWAAPVEPVTQTPPVASVDVPPSQPTVAWQPVPGPQTGEPVIAPAPEGYPQQSQYAQPAVQYNEPLQQPVQPQQPYYAPAAEQPAQQPYYAPAPEQPVAGNAWQAEEQQSTFAPQSTYQTEQTYQQPAAQEPLYQQPQPVEQQPVVEPEPVVEETKPARPPLYYFEEVEEKRAREREQLAAWYQPIPEPVKEPEPIKSSLKAPSVAAVPPVEAAAAVSPLASGVKKATLATGAAATVAAPVFSLANSGGPRPQVKEGIGPQLPRPKRIRVPTRRELASYGIKLPSQRAAEEKAREAQRNQYDSGDQYNDDEIDAMQQDELARQFAQTQQQRYGEQYQHDVPVNAEDADAAAEAELARQFAQTQQQRYSGEQPAGANPFSLDDFEFSPMKALLDDGPHEPLFTPIVEPVQQPQQPVAPQQQYQQPQQPVAPQPQYQQPQQQVAPQPQYQQPQQPVAPQQQYQQPQQPVAPQPQYQQPQQPVAPQPQYQQPQQPVAPQPQDTLLHPLLMRNGDSRPLHKPTTPLPSLDLLTPPPSEVEPVDTFALEQMARLVEARLADFRIKADVVNYSPGPVITRFELNLAPGVKAARISNLSRDLARSLSTVAVRVVEVIPGKPYVGLELPNKKRQTVYLREVLDNAKFRDNPSPLTVVLGKDIAGEPVVADLAKMPHLLVAGTTGSGKSVGVNAMILSMLYKAQPEDVRFIMIDPKMLELSVYEGIPHLLTEVVTDMKDAANALRWCVNEMERRYKLMSALGVRNLAGYNEKIAEADRMMRPIPDPYWKPGDSMDAQHPVLKKEPYIVVLVDEFADLMMTVGKKVEELIARLAQKARAAGIHLVLATQRPSVDVITGLIKANIPTRIAFTVSSKIDSRTILDQAGAESLLGMGDMLYSGPNSTLPVRVHGAFVRDQEVHAVVQDWKARGRPQYVDGITSDSESEGGAGGFDGAEELDPLFDQAVQFVTEKRKASISGVQRQFRIGYNRAARIIEQMEAQGIVSEQGHNGNREVLSPPPFD

SEQ ID NO: 1742 - protein, 487 aa, Rubrobacter xylanophilus DSM 9941
MSETQTREELVSYPAIIGGERVSPERSFEDVDPSTGRPCALVARCGRQEVDRAVEAAREAHEKAWRRSTPAERARVLHRISQLLRRDHEEIARLESLDTGKPLSQARADATVAARYFEFYANTIESFYGETIPALPDAFVYTLREPHGVTGHIIPWNYPIQISCRSVAPALATGNCCVLKPAEEAPLTALRLGELALEAGLPPGALNVVPGYGEEAGAALAAHPGIDHLSFTGSVEVGRLVSRSAADNVVPVTLELGGKSPNIVLADADLERAVPVIVNSIIQNAGQTCSAGSRLLVESRLHGELVERVASRFQEIRIGPGPEDPDLGPIISEAQRERVKGYVETGRREAELVTGGGVPQDPRLAGGFYFEPTLFDRVEPGSTIFREEIFGPVLAVSTFEEAEEAAALANATDYGLIAAVWTRDVGKAHWLARELRVGQVYINTYGAGGGVELPFGGFKKSGHGREKGYEALYEYTQVKTVALSYAR

SEQ ID NO: 1743 - protein, 428 aa, Vibrio cholerae O1 biovar eltor str. N16961
MMMDLAFDRCHIWHPYTSTLTPLTCYPVSRADGVMITLEDGRSLVDGMSSWWAAIHGYNHPKLNQAAHQQIEQMSHIMFGGLTHQPAIELCQKLLKLAPNNLQQVFLADSGSVAVEVSLKMALQYWHSKGQPRAKFLTLRHGYHGDTFAAMSVTDPDNSMHSLYKGFLPEHIFANSPEGGFFDAWDERDIADFRHKLTEHHHQIAAVILEPIVQGAGGMRIYHPEFLRQVRALCDEFGVLLILDEIATGFGRTGKLFACEHAGIQPDILCVGKALTGGYMTLSATLTTQQVADTVCAGEAGCFMHGPTFMGNPLACAVASASLSLIEQGDWQQQVANIEAFFAEQLPKLNDSPRVKQTRWLGAIGVVETHLPVNMEVIQALFVEHGVWIRPFGRLIYLMPPYISQPEHLQKLVDAMAAALNQPDCFKQ

SEQ ID NO: 1744 - protein, 101 aa, Zea mays
MAGVSRSMVAPLLVLNLVMYIVVIGLASWNLNHFINGTTNYAGVAGNGATFYFLLFAILAGVVGAASKLAGVHHVRTWRGDSLATSASSALVAWAITALAF

SEQ ID NO: 1745 - protein, 529 aa, Glycine max
MELSYCAVFLILLIPISRADATSVEKQFKECLLTQLDGNSEHIEKITFTSSSTLYPQVWDSLAQNPRWVNISSRKPLMILTPFHESEIQAAILCSKELKLQLRVRSGGHDYEGLSYLSDVPFVMVDLINIRSIEINLADETAWVQAGASIGELYYKISKASKVHGFPAGTCPSVGIGGHISGGGQGLMLRKHGLAADNVVDAYLIDANGKIHDRKSMGEDVFWAIRGGDASSFGVILAWKIKLVRVPPIVTGFNVPRTPEEGVTDLIHRWQYIAHDLHEDLVIRVIAQISGHDKSKKFRATFNSIFLGGVDRLIPLMNESFPELGLQAKDCTEMSWIQSVMFIAGYNIEDPLELLLNRTTMFKRSFKAKSDFFKEPIPKSGLEGAWKLLLEEEIAFLIMEPYGGRMNEISESEIPFPHRKGNLYNLQYLVNWEVNSDEASRRHLQWAKMVYKYMTPYVSKSPRAAYFNYKDLDLGKNKLDSTSYSEASVWGKKYFKGNFRRLAQIKTKFDPLNFFRNEQSIPLLNSHHS

SEQ ID NO: 1746 - protein, 327 aa, Escherichia coli
  unsure (1)..(327): unsure at all Xaa locations
MNGAQWVVHALRAQGVNTVFGYPGGAIMPVYDALYDGGVEHLLCRHEQGAAMAAIGYARATGKTGVCIATSGPGATNLITGLADALLDSIPVVAITGQVSAPFIGTDAFQEVDVLGLSLACTKHSFLVQSLEELPRIMAEAFDVACSGRPGPVLVDIPKDIQLASGDLEPWFTTVENEVXFPHAEVEQARQMLAKAQKPMLYVGGGVGMAQAVPALREFLAATKMPATCTLKGLGAVEADYPYYLGMLGMHGTKAANFAVQECDLLIAVGARFDDRVTGKLNTFAPHASVIHMDIDPAEMNKLRQAHVALQGDLNALLPALQQPLNQ

SEQ ID NO: 1747 - protein, 427 aa, Schizosaccharomyces pombe
MSSVEVNRENADVANTNRQANLAEGYEIKELNESQKQYIRSSIPILESSGVNLTKAFYQKMLGNYPEVLPYFNKAHQISLSQPRILAFALLNYAKNIDDLTSLSAFMDQIVVKHVGLQIKAEHYPIVGHCLLSTMQELLPSDVATPAFLEAWTTAYGNLAKILIDSEKKVYQSQPWNGFVEFKVTELINESSDVKSVYLGPKDPAFRISHAHPGQYVSVLWEIPGLSHKTLREYSLSNRVDTCRNQFRISVRRVAGGVVSNFVHDNLKVGDIVGVSPPAGNFVYKRSEENVNRPLLCFAGGIGITPLIPIIETALLDGRKVNFCYSSRNYVSRPFKQWLEQLKLKYKENLKLKEFFSEESSVTKEQIVDEVMTRIINEEDLEKLDLSECDIYMLGPNNYMRFVKQELVKLGVEPNKVQSEFFGPYIP

SEQ ID NO: 1748 - protein, 208 aa, Glycine max
  unsure (1)..(208): unsure at all Xaa locations
MESPSRSFVIIVGAGVSGISAAKLLAENGVKDLVILEASNCIGGRIRKENFGGVSVELGAGWIVGVGGKESNPIWELVAEYGLRTCFSDYTNVPYNIYDRSGKIFSSGIAADSYKKAVDSAIRNLTNQEEADREGNSSKTTEPPSSPLELAIDFILHDFEMAEAVPISTFTAFGEREFLVADXRSMASISLSAHMSFSALTTFALERL

SEQ ID NO: 1749 - protein, 480 aa, Pseudomonas syringae pv. tomato str. DC3000
MQLKDSTLFRQQAYINGQWLDADGGQSIKVNNPATNEILGTVPKMGAAETRRAIEAADKALPAWRALTAKERGNKLRRWFELMIENQDDLGLLMTLEQGKPLAEAKGEITYAASFIEWFAEEAKRVYGDVIPGHQPDKRLIVLKQPIGVTAAITPWNFPAAMITRKAGPALAAGCTMVLKPASQTPFSALALAELAERAGIPAGVFSVVTGSAGDIGSELTGNPIVRKLSFTGSTEIGRQLMAECAKDIKKVSLELGGNAPFIVFDDADLDKAVEGAMISKYRNNGQTCVCANRIYVQDGVYDAFAEKLKVAVGKLKIGNGLEDGITTGPLIDEKAVAKVKEHIADAVSKGATVLTGGNSLEGSFFEPTILVNVSKDAAVAREETFGPLAPLFRFKDEAEAIALANDTEFGLASYFYAQNMSRVFRVAEALEYGMVGINTGLISNELAPFGGIKSSGLGREGSKYGIEDYLEIKYLCLSV

SEQ ID NO: 1750 - protein, 484 aa, Oryza sativa (japonica cultivar-group)
MANNSSYGENVRRKSHTPSAIVIGSGFAGIAAANALRNASFEVVLLESRDRIGGRIHTDYSFGFPVDLGASWLHGVCEENPLAPIIGRLGLPLYRTSGDDSVLFDHDLESYALYDTKGHQVPQELVEKIGKVFETILEETGKLREETKEDISIAKAIAIVMERNPHLRQEGIAHDVLQWYLCRMEGWFATDADAISLQGWDQEVLLPGGHGLMVRGYRPVINTLAKGLDIRLGHRVVEIVRHRNRVEVTVSSGKTFVADAAVIAVPLGVLKANTIKFEPRLPEWKEEAIRELSVGVENKIILHFSEVFWPNVEFLGVVSSTTYGCSYFLNLHKATGHPVLVYMPAGRLACDIEKLSDEAAAQFAFSQLKKILPNAAEPIHYLVSHWGSDENTLGSYTFDGVGKPRDLYEKLRIPVDNLFFAGEATSVQYTGTVHGAFSTGLMAAEECRMRVLERFRELDMLEMCHPAMGEQTATVSVPLLISRL

SEQ ID NO: 1751 - protein, 145 aa, Nicotiana plumbaginifolia
GASKTYPQQAGTIRKNGHIVIKNRPCKVVEVSTSKTGKHGHAKCHFVAIDIFTGKKLEDIVPSSHNCDVPHVNRTDYQLIDISEDGFVSLLTENGNTKDDLRLPTDDNLLALIKDGFAEGKDLVLSVMSAMGEEQICGIKDVGPK

SEQ ID NO: 1752 - protein, 174 aa, Microbulbifer degradans 2-40
MLACTFTASTHAAEESAQCPSYLDHSFKKLHSTQTVNLCELYTGKPLLIVNTASHCGYTKQFGGLEKLYQSYKDQGLQVIGFASDDFKQAAKSEMEAATICYKNYGVTFTMLAPTTVTGEKANAVFSHLNANTSAPSWNFNKYLITKNGQNIEKFNSDVTPLASDLEKKVQKAL

SEQ ID NO: 1753 - protein, 386 aa, Aspergillus parasiticus
MTGLDMEIIFAKIKEEYARTDDVGKRQIQGHIRELQVGFYSDWDVVMRLSSGPLQVALTKVGIDLGIFRSLKESDTPITLAEIVKKTGASPRLLGRILRTQAAFGLIKETGPQEYTSSAFTDVFANSDAAGAVVQLFDISGPCTQILPDFLAERNYQDITSNKDCVFQKAFGSDLTMFEWMPQHPKHMESLGHLMALERPVSWVDHYPVLEELGGFPAPDKVLMVDIGGGFGQQSKALRAKFPDLPGRLIVQDIPQTLANAQPAAGIEFMEHNFFEPQPIQNAKFYYLRHVFHDWPDEQCVLILKQIIPAMGPESQILIDEMVIPSTGVPWQAAFTDLLMMNSLGGVERTRAEWDDLMEQVGLEIIQSKVYDSKEQAILVAVPKRT

SEQ ID NO: 1754 - protein, 331 aa, Synechococcus elongatus PCC 7942
MDASLLLRQITTGYWGSQALYVAAKLGIADQLVNGPRSCEDLAIVVGAKPEVLYRLLRALASLGIFTEVSDRQFALTPAAELLRSGTAGSLRNLVMMFGEEHYVAWGELLHSIQTGENAFEHHYGAPVFAYYAQHPASADIFNGAMSDMSRPDTAAVLSSYDFQGIRCLVDVGGGHGQLLSQILAAYPDLTGILYDQPAVVAGADSVLADVSDRCEVVGGDFFASVPAGGDAYLLKHIIHDWDDADSLKILANCRQVMQPGDRLLLLEQVVRAGNEPNLAKWLDLNMLVMTQGGRERTQAEFATLLADAGFQLSQIHGTASEVCIIEGRAI

SEQ ID NO: 1755 - protein, 528 aa, Triticum aestivum
  unsure (1)..(528): unsure at all Xaa locations
MSAIKPPPPDRPPQAARLPSPSSSSSAAAAAKQGATGSRGLLMGRYELGRVLGKGTFAKVYHARHVQTGESVAIKVLDREKAVRSGLVSHIKREIAVLRRVRHPNIVHLFEVMATKTKIYFVMELLVRGGELFSRVSKGRLKEDIARRYFQHLISAVGFCHTRGVFHRDLKPENLLVDEAGNLKVSDFGLSAVAEPFQPEGLLHTFCGTPAYVAXPEVLARRGYEGAKADIWSCGVILFVLMAGYLPFHDQNLMAMYRKVYKGEFRCPRWFSKDLTSLIMRFLDTNPSTRITLPEVMESRWFKKGFRPVKFYIEDDQLYNVIDAENDMLDLGLPDPLPQPLPPPPPSPSPQQVDGDDSGSESDASVVSCPATSSFEERHRXPGPLPRPASLNAFDIISFSRGFNLSGLFEEKGDEVRFISGEPMPDIITKLEEIANGKSFAVXRKKDWRVSLEGTREGGKGPLTICAEIFEXRPSLVVXEVKKKAGDKEEYDDFCNKELKPGMQHLVHQMAPVPITPTISEXAERPSR

SEQ ID NO: 1756 - protein, 190 aa, Griffithsia japonica
ARGTGGVYATAERCAVTTTLAGATGGVVTLIVIKIRDHIFDLLACLNGILAGLVAITACCAFVDPWAAVVIGAIGAVVYIGAAMLLLKFQIDDPLEAFPIHGASGAWGCLAGTLFNKQGHQVTAGFTDQIWGLFYGGGGRLLGVNALGMVVITVWTVGLVTPLFLVMKFTGILRISPEEEIIGNDVSKHG

SEQ ID NO: 1757 - protein, 502 aa, Pseudomonas fluorescens
MTRSLTMNSSLPAIDGLRLPHQMLIGGQWVNAQSDKTLNVYNPATGDTLTDVPDGDVEDVNAAVESAAATLQSDAWRRMPPSARERILLRLADLLEAHGDELARLETLNNGKLLIYSKMMEVGASAQWLRYMAGWATKLTGSTLDLSLPLPPDVRSRASTQRVPVGVVAAIIPWNFPLLMAVWKIAPALACGNTVVLKPAEETPLTALRLAELAMEAGLPAGALNVVTGRGETAGDALVRHPKVAKVAFTGSTEVGRIIGSACGRSLKAVSLELGGKSPVIVLADCDPQEAAEGAAAAIFFNHGQVCTAGSRLYVHESIYEDVIQRLAVIGESIVVGSGLEQGVHMGPMVSKKHHENVLRHIRNGIEDGADLICGGTEAPCAQGFFVKPTIFANREKKDIRLLSQEVFGPVLVATPFSDIAEVVNEANRSVYGLGASIWTNDLSAALRINDELEAGTVWVNTHNMVDPNLPFGGFKDSGVGREHGAAAIEHYTTTRSLVIAY

SEQ ID NO: 1758 - protein, 456 aa, Triticum aestivum
FIRHHRTATEEGGMAAAGGGPRRTTRVGPYELGKTVGEGSFAKVKIAKDTRNAATCAIKVLDRNHVLRHKMVEQIKGEIATMKLIRHPNVVQLHEVMASKSKIYMVLEFVEGGELFDKIVNSGKLGEDEARRYFHQLINAVDYCHSRGVYHRDLKPENLLLDSYGALKVSDFGLSAFSPQTKEDGLLHTACGTPNYVAPEVLADKGYDGMAADVWSCGIILFVLMAGYLPFDDPNLMTLYKLITRANVSCPPWFSTGARNLIKRILDPNPHTRITIAQILEDEWFKKDYKPPHSEHNEDVSLEDVDAAFDSSEEHLVAERREKPESMNAFALISRSEGFNLGNLFEKEMMGMVKRETSFASQRTPQEIMSKIEEACGPLGFNVRKQNYKMKLKGDKTGRKGHLSVATEVFEVAPTLHMVELRKTGGDTLEFHSFYKNFSSELKDIVWKTESNTIAK

SEQ ID NO: 1759 - protein, 117 aa, Prunus avium
MACSAMTKLALVVALCMVVSVPIAQALTCGQVSSNLAPCIAYVRGGGAVPPACCNGIRNINNLAKTTADRQTACNCLKQLSASVPGVNANNAAALPGKCGVNVPYKISPSTNCATVK

SEQ ID NO: 1760 - protein, 1362 aa, Ustilago maydis 521
MNPSYTERRASAHPTMSSSAHHASSTPSAASIDPTTSHAISSGIPITSPAALSYFAAHPRRQQVHFGNYLLLQTLGEGEFGKVKLGVHKEWGEEVAVKLIKRDKVANDAAPLHLDDSAQKDPAKMSKVEREIQVLKDVRHPNIVRLYEVIESDRYIGIVLEYASGGELFDHILAHKYLKEEHACRLFAQLISGVSYLHHKKIVHRDLKLENLLLDRNRNVIITDFGFANNFEHKRNDLMATSCGSPCYAAPELVVQDGLYAGSAVDVWSCGVILYAMLAGYLPFDDDPANPDGDNINLLYKYILATPLSFPEYITAQPRDLLSKMLVPDPTRRATLEQVMQHSWLRHYRELFKFSVDDLERAAMEQQTKKRQMYRQQMMYQQQLQEQQRRQQMERSQSVRHNVSHLPVGTAYTANTAVSAVSAANVAHRQTLPISATVPDRLYEPIGSASRGADHSVTPQRAPTASSHQPPVAPTASADAAIAPLPRASTHNNVAAAADAAAAVAAAPSPVDPVTALGNARGEPRTRLDDAVPTIAAAYETEPRQLAAQKVQRHTIQLEYGGDERPRKESAPGSRQASQTQRNASASSTSSKLAEIERTKTAADKPAANANAIVPPSVLQSTSVQVPATSVVVPESEKANISKAGAPDMMRSVSASAASRVSVPPPIMEQTQPSVSAHRSTQPTSSSRVRAPSSASRNNADSGSTGHATRIPTSASQRVVSTSSAASEPVGFPSSATERTIPSADADAAAGRISASRRASNGAEITEPSHRSPSATRHATADNAPVTSASASARHRKGMSTDKFFLSRLLGSNSANQPNGAGVAGDKVSANGSDAAGDKTKRDSMNRPAPERAPSSSSTGKNGRRKAMSLVVGHASGEASSAAADRNRALKAGMPHSATRATFGTQVSGKADDSVSSAQKQRKGSASLASQTTSTSRAAQSSTRPQPLQPSLQQQQQQQDKAFNDGSTIASSSTAGPSSNAAKKVMDWFRKKSLSRGTFNEQPPLGLFERSPTSSYMHGSASQTPSVIVTSAPNGTSRHAEAPSGGSSVPSSRSTSGTHSENSEATEMTQLTNLSDASHQEGDGLKSSASTVQQQATPKASLSAVSNVSDASAAGSLVSTRSQQQQRPQPRVATATSASTTPARFNEARLRYHLGAVDQSALTSRSPIEVLKEVQRVLYEMGIDVRTEKDEDFKLECVRRKRAKTLMSATHGFGMSIRSSVFPPTQADVERSSRMSHRDSLTPSASSPGGGSLRSFLKRSSLQPGATSPKMGSSTLPSSATVTSNLGGAVHDENQPPPLYGDASVDGGQEIRFSVEVTRIKNLTGLYSLDIRRMKGNLWAYKFVYQALLDRCQLGSSTAAVG

SEQ ID NO: 1761 - protein, 402 aa, Arabidopsis thaliana
MLPVKDVVTTSVLSKPWRSLWKLVPTLKFDYENNQSEDETYSEIVCRLLLSNKAPFLESLHLGFRFGECRSVEVGMWIGIAYARHVRDLVLHVESVKGSFIFPTGLYNCETLESLTLRSWVLVDVPSPACLKSLRTLRLENVDYKYDDSVYNLLSGCPNLENLVVYRGNLLEVETFTIAVPSLQRLTIYDDNDGEYCTGYVINAPSLKYLKIDGFKALESCLIENAPELVEATIMNVSKIINEKLLETLTSVKRLSLALSPLELKFSCNNYSEWWNLLVLMLDSSPKLQVLKLIGKLSGENNHLASMNWDQPKNIPGCLLFNLETFMWKGCKRIGEDEKEVAKYILRNTNRLKRATFTREIYEENNSQDMFENLEMVEELESVVRASKSCKLAFETSLWSLS

SEQ ID NO: 1762 - protein, 191 aa, Nicotiana tabacum
MASTLSTITLRSPSPSTASSTHASIPFPKKALEFPIRTPKLHHRRATFLRPLAAVEAPEKVVQLGDEISNLTLADAQKLVEYLQDKLGVTAASFAPAAVAAAPGAAAEAPAVVEEKTEFDVVIDEVPSNARIATIKAVRALTSLALKEAKELIEGLPKKFKEGVSKDEAEDAKKQLEEAGAKVSIANLNFW

SEQ ID NO: 1763 - protein, 499 aa, Sphingomonas sp.
MATQLKSGTNEYGIKSEYGHFIGGEWISSDSGKTIDLINPATGAVLTKIQAGNAKDIQRAVAAAKAAFPKWADSSAAERQEILIEVARRLKARHQHYATLETLNNGKPIRESMHFDMPQAIGQFELFAGAAYGLHGQTMDYPDAVGIVHREPLGVCAQIIPWNVPMLMMACKIAPALASGNTVVLKPAETVCLSVIEFFVEMADLLPPGVINVVTGYGADVGEALVTHEDVRKVAFTGSVGTARRIMQYASTNIIPQTLELGGKSAHIVCADADIDAAVESATMSTVLNKGEVCLAGSRLFLHESIQDEFLAKFKVALEGIRQGDPLDFATQLGAQASQMQMDKVISYLELATEEGANVLTGGSANDKLADGNFIRPTVFTNVNNSMRIAREEIFGPVTSVISWKDEDDMMKVANDTNYGLAGGIWTRDIARAHRMARKLETGTVWINRYYNLKANMPLGGYKQSGFGREFSHEVLNHYTQTKSVVVNLQEGRTGMFDQ

SEQ ID NO: 1764 - protein, 115 aa, Pyrus communis
MASSAVIKLALVVALCMAVSVAHAITCSQVSANLAPCINYVRSGGAVPPACCNGIKTINGLAKTTPDRQAACNCLKNLAGSVSGVNPGNAESLPGKCGVNVPYKISTSTNCATVK

SEQ ID NO: 1765 - protein, 409 aa, Arabidopsis thaliana
MSVLSKRWRSLWKMLPRLKFDDWMFPDNVNRCLLSHQASFLQSLHLVIDYDFVSHMHTGILMGIAFGRHIRELVLYVNGFQESFTFPLSLCNCESLETLTLGHNVLIDVPSPVFLKSLRTLHLDGVEYTDDESVVNLLSGCISLENLVVHRVIQADVTTFTIAVPSLKRLTLTTEFDDDEDSVYVINAPSLKYLKILGDKAYLIENSPELVEVSLTDRQVTVDGYPIASYVENLLRSLTSVKRMSLKISSYLEIKFPTGSIFYQLVSLELYTNKAEWWNLLVLMLDSSPKLQVLKLNGKLSGENNHLASMNWDQPKNIPGCLLFNLETFIWKGCKRIGEDEKEVAKYILRNTNRLKRATFTREIYEENNSQDMFENLEMVEELESVVRASKSCKLVFESTLWSLSNYDV

SEQ ID NO: 1766 - protein, 402 aa, Phaseolus acutifolius
MDEALGSSCSLPPFLAKTYEMVDDLSTNSIVSWSVSSKSFIVWNPPEFARDLLPRFFKHNNFSSFIRQLNTYGFKKIDPEQWEFANDDFVRGQPHLMKNIHRRKPVHSHSLQNLQAQGPLGDSERQGFTDGIEKLKRDKERLLVELQKFQHEWQTYEIQIHCSNDRLEKLEQKQHKMVSSISHVLQKPVLAVNILPLTETMDRKRRLPRSGHYYDESSIEDAIETSQMLPRENAENTTVLTLNVERLDQLESSVAFWEAIAHDIGDNFAQIQSNMDFDESTSCADSPSISCAQLDVDVRPKSSGIDMNSEPTAAAVPDPLASKDQPAGITVAATGVNDVFWEQFLTEDPGASETQEVQSERKDCDGRKNEGKPNDHSKFWWNIRNANNLSEPMGHVGQAEKT

SEQ ID NO: 1767 - protein, 355 aa, Claviceps purpurea
MSRANPPNAGGSRKISFNVSEHYDIQDVVGEGAYGVVCSAVHKPSGQKVAIKKITPFDHSMFCLRTLREMKLLRYFNHENIISILDIQKPRGYDSFNEVYLIQELMETDMHRVIRTQDLSDDHCQYFIYQTLRALKAMHSANVLHRDLKPSNLLLNANCDLKVCDFGLARSAASQDDNSGFMTEYVATRWYRAPEIMLTFKEYTKAIDVWSVGCILAEMLSGKPLFPGKDYHHQLTLILDVLGTPTMEDYYGIKSRRAREYIRSLPFKKKVPPRVLFPKTSDLALDLLEKLLAFNPVKRITVEEALKHPYLEPYHDPDDEPTAPPIPEAFFDFDKHKDNLSKEQLKLLIYEEIMR

SEQ ID NO: 1768 - protein, 494 aa, Sorghum bicolor
MAAADVPRPSFIGGDWREPCLPVCQPSTEATIGDIPAGTAEDVEMPVARGRVSDGGALVACLWGRASQLSHTIAAKIKDRKSESLALLETLDSGKPLDEASADMDDVAACFEYYADLAEALDGKQRSPISLPMENFKSYVLKEPLGVVGLITPWNYPLLMATWKVAPALAAGCTAVLKPSELASVSCLELGAICMEIGLPPGVFNVITGLGLKLVLHYPHIPCGIRLLLLGSTETGKRIMTSAAQMVKPVSLELGGKSPLIVFDDIRDIDKAVEWTMFGILPNAGQVCSAASRLLLHEKMAKKFLDRLVHGAKNIKVSDPLEEGGRLGSVVSEGQYEKIKKFISTARSEGATILYGGARPQHLKRGFFLEPTIITDVSTSMQIWREEVFGPVICVKEFRRESEAVELANDTQYGLAGAVISSDQERCRAISKALQSAIDNCSQPCFVQAPWGGNKRMFGRELGEWGLDNYMTVKQVTKYCSDEPWGWYQPPSKL

SEQ ID NO: 1769 - protein, 1462 aa, Candida albicans SC5314
MSTVVNRRSSHQFDSPSNHLDHSSSMNVDKVVQSVTNATKRLSQISTNTNNSNKKRKTQNKIGPWKLGRTLGRGSTGRVRLAKNTTTGQLAAVKIVPKSNFKKLENPKYKRSKEDATRLPYGIEREIIIMKLISHPNIMGLYDVWENKNDLYLILEYIEGGELFDYLIKRGKLQEYEAINYFKQIINGINYLHQFNICHRDLKPENLLLDFNKNIKIADFGMAALEVKEKLLETSCGSPHYASPEIVAGKNYHGAPSDIWSCGIILFALLTGHLPFDDENIRKLLLKVQSGKFNMPPELSFEAKDLITKMLKVNPRERITIDAILTHPLLAKYPEPTVSYSSTTTLDINSINIKQIESVDKIDKEILKNLSVLFHNCDEKTIISRLLSPNRCPEKMFYYLLMKYRNEHLSNSNSFNSSNDVDSARSLPRSTSYVKTTVTDHATGEKHTTVKKIQQSSSIYSNRSLLKKSTSAKGNVLSNITNRPNTPKQFSASSSFNKKKALHSKTQIYASRSRNASSRSLKSNSSTGRNGNNASVTSVNKIPEITGATVLQPIPSMAMNRGDEQQNKTKKNLTGTFGNKSLLNFQLICEEVFENDKENSKPVSKTPVSQLPPPPPPPIETPTSRTNSVKRGKTWSLARRERELAEQVRQRNEARENKLKAEELARKELEQEKKRIAEEKKRLEQQERELDEKQKLQEKQKAALEKLQKHQSAHDFEGLFASNRRSVTDMAPSSGMSSLDPRAHMVSRANTIGSPNLSSSSVNIDENASKVLHKFGIDVAPSPKRFSRASKTSTSKNLSSFLAPTVSRNLSSQLKTSSSKNLAGYLHGTTDTNGSAIAAKKKDDSTNEALTIEEFNAKERTSMSPSISKASVNKRNSNQSSYYRSMFSDNGNDDNVTKVRTGESHLSVQEEEEMDMENAIDEDISLIPNPRFSRFSFGGLLGSNTVANEEGDWTIMNSTLNHSNTVVRGTHNKSSTMLGLGIKMRDTTTIKEDEEFEDEKPFISVPSSEDDEGNTHKNKRGGLRDSGNYDFDEEHSVASTANTEYSDVASQGQQMPGSHTIHQLETELSNFDLLSYRVADIGKVNKHKPSIVDSKETLLKNHSSDEATIEVKEDNNEHDFNDKIKQHYDDNGDSEEDDEDEDEEEEDDDDDDDARSSFEARPHSHNYSLAEITSESPVGGGYESPSIANDFKKSRHSTGIFSTTQFPRSPYVVNNNGDSNKDENSQQQTKHMLNDGHKGLITSPVQDTFGSKKPVESNSLFRRLSLNPNRAAPKAPAPPPPSAPISSAAKANISQPLSSPTKGHNRFSRISIGSKNMLQKEDKSTKSNWFKKFFHSLTTPSAKDQSGNSSSKVASKDIKIIDTSLTAAQLIRVIKYQLELKKIEGSISKVDIDEEFGLISGVIPSKFANGRKLKFKIEVIDLINSSSLHVIKMKGNDKGFQSLVNIVTFIIKKEEQDKISRR

SEQ ID NO: 1770 - protein, 105 aa, Citrus sinensis
GEGTATQDSNNSGANSNGTATNGGEEDLKSWDTDFVKVDQATLFDLILAANYLNIKGLLDLTCQTVADMIKGKTPEEIRKTFNIKKDFTPEEEEEVRRENQWAFE

SEQ ID NO: 1771 - protein, 191 aa, Suillus bovinus
MQTIKVVVVGDGAVGKTCLLISYTTNKFPSDYVPTVFDNYAVTVMIGEDPYTLGLFDTAGQEDYDRLRPLSYPQTDVFLVCFSVTSPPSFENVREKWIPEVHHHCPGVPCLIVGTQIDLRDDAQVIEKLSRQKQRPVPTEHGERLSRELGAVKYVECSALTQKGLKNVFDEAIVAALEPPVVKKTHKCVVV

SEQ ID NO: 1772 - protein, 302 aa, Gonyaulax polyedra
MEALDLDRIIVQLLEVRGCRPGKLVQLTEGEICALCIRSRDIFMDQPILLELECPLKVCGDVHGQYSDLLRLFECGGLPPEANYLFLGDYVDRGKQSLETICLLLAYKVKYPENFFLLRGNHECASINRIYGFYDECKRRYSIRLWKTFTDCFNCLPVSAVIDDKILCMHGGLSPELSNLEQIKRVVRPTDVPDTGLLCDLLWSDPEKEISGWGENDRGVSFTFGPDVVQRFLRQHGLDLVCRAHQVVEDGYEFFARRALVTIFSAPNYCGEFDNAGAIMTVDESFCCAFQILRPLTRMGVP

SEQ ID NO: 1773 - protein, 180 aa, Triticum aestivum
MAGVGRNMVAPLLVLNLIMYLIVIGFASWNLNHFINGLNNRPGVGGNGATFYFLVFAILAGVVGAASKLAGVHHVRTWHGDSLATSASSSLVAWAITALAFGLACKEIHIGGYRGWRLRVLEAFVIILVFTQLLYVLALHSGLFGNMLGNHAGGYGAEHGGYGAGDPHNKGMGTGGVARV

SEQ ID NO: 1774 - protein, 335 aa, Nicotiana tabacum
MVHEKQVIEEVSGWLTVFEDGSVDRTLTGPPEDKFMAEAVPPHDDFIDGVADKDVVADENSGSRLRIYLPERNDNSVNKLPVILHFHGGGFCISQADWFMYYTVYTRLARVANAIIVSVFLPLAPEHRLPAACDAGFAALLWLRELSRQQGHEPWLNNYADFNRVFLIGDASGGNIVHQVAVRAGEENLSPLRLAGAIPIHTGFVRSYRSKSELEQEQTPFLTLDMVDKFLGLALPVGSNKDHPITCPMGEAAPAVEELKLPPYLNCVAEKDLMKDTEMEFYEAMEKGEKDIELFINNGVGHSFYLNKTAVEIDPVTASETEKFLEAVAEFINKR

SEQ ID NO: 1775 - protein, 326 aa, Triticum aestivum
MASTTAVPEVALRSGDARPMPAIGMGTAKLPVVPETTVKAVLEAVVVGYRHFDTASMYATERPLGEALAEAVRRGLLASREEVFVTSKLWCTQCHPHLVLPSLRESLQNLQMEYVDLYLIHWPISLKPGPTVFPVKREDAVPFDFEGVWRAMEECHRLGLAKAIGVSNFTTSHLDKLLAAATVHPAVNQVELNPVWQQRKLRGYCAEKGIHVAAYSPLGGQNWNGDGNAVLDSEVLAEIAKARGKTVAQVALRWIYEQGVTPIVKSFSKERLKENLGIFDWGLTDDDLRKIGQIPQKKIVKAETVLFSAEGEFTSADLADMEIVED

SEQ ID NO: 1776 - protein, 126 aa, Zea mays
  unsure (1)..(126): unsure at all Xaa locations
YNHVLQVDYACTPEEVQQHFQACGTVNRVTILTDKFGQPKGFAYVEFLEQEGVQEALNLNESELHGRQIKVAPKRTNVPGMKQRPPRGYNPYHGYPYRSYGAPYFPPYGYGXAPRFRRPMRYRPYF

SEQ ID NO: 1777 - protein, 512 aa, Gloeobacter violaceus PCC 7421
MEVRPMVVAAPAASASESIFKPRYDNFIGGQWRAPLKGQYTDNITPVNGRVLCQVPRSTVEDIELALDAAHAARESWGALSAAERSNILLKIADRMEANLHKLAVAETWDNGKPIRETTGADVPLAVDHFRYFAGCIRAQEGSISEIDGNTIAYHFPEPLGVVGQIIPWNFPILMAAWKLAPALAAGNCVVLKPAGPTPASILVWLEVVGDLLPAGVLNVVIGPGPEVGKALAASKRVAKVAFTGETETGRQIMQYAAQNIVPVTLELGGKSPNLFFADVMNADDDFLDKAVEGFVMFAFNQGEVCTCPSRALVHESIYEKFIDRAVRRVASIKQGNPLDPETMLGAQVSQAQMEKIARYVELGKQEGAEVLIGGERNSEPGEGLAGGYYYKPTVMKGHNQMRIFQEEIFGPVLAVTTFKDAEEAVRIANDTPYGLGAGVWSRDINTAYRVGRGIQAGRVWVNCYHVYPAHAAFGGYKASGVGRETHKMMLSHYQQTKNLLVSYDTKPQGFF

SEQ ID NO: 1778 - protein, 181 aa, Raphanus sativus
MASSMLSSAAVVTSQLQATMVAPFTGLKSSAAFPVTRKTNTDITSIASNGGRVSCMKVWPPIGKKKFETLSYLPDLSDVELAKEVDYLLRNKWIPCVEFELEHGFVYREHGSTPGYYDGRYWTMWKLPLFGCTDSAQVLKEVQECKKEYPNALIRIIGFDNNRQVQCISFIAYKPPSFTDA

SEQ ID NO: 1779 - protein, 486 aa, Oceanobacillus iheyensis HTE831
MLKTDKQSYLNFINGRWKSSEGGETKEVLNPADKNDVVGVIQRSTIDDVNEAIASAKSAKESWRKLSGNERGNYLYKVANILESRLDDVAETLTREMGKTLPEAKGETARGVAILRYYAGEGLREVGDVIPSTDSSGIMYTTRTPLGVVGVITPWNFPVAIPIWKMAPALIYGNTVVIKPATEAAATAAKVMECFADAELPDGVVNMVTGSGSIVGNRIAEHPDVNGVTFTGSDQTGKHIGQTALARGAKYQLEMGGKNPVIVADDADLDLAVKATISGGLSSTGQKCTATSRVIVQRSVYDAFKEKLLTQIQALTVGNGLEDGNWMGPSVSESQLETVLHYIKKGKEEGATLLTGGHRLTDAEHKDGNFVEPTVFEDVTNDMTIAQEEIFGPVLALIKVETFEEAMKLANDTEYGLSAAVFTENIRKMLTFIDDIEVGLVRVNAETAGVELQAPFGGMKSSSSHSREQGKAAIEFFTSIKTVFIK

SEQ ID NO: 1780 - protein, 163 aa, Triticum aestivum
  unsure (1)..(163): unsure at all Xaa locations
VAPFQGLKSTAGLPVSRRSNGASLGSVSNGGRIRCMQVWPIEGIKKFETLSYLPPLSTEALLKQVDYLIRSKWVPCLEFSKVGFIFREHNASPVXXXXXXXXXXXXXXXXXXXXXXXXXEVEEVKKEYPDAYVRIIGFDNMRQVQCVSFIAFKPPGCEESGKA

SEQ ID NO: 1781 - protein, 361 aa, Ocimum basilicum
MGSATNTPQINSDEEENFLFAMQLASASVLPMVLKSAIELDLLELIKKSGAGAFVSPVDLAAQLPTTNPDAHVMLDRILRLLTSYAILECRLKTLPDGGVERLYGLAPVCKFLTKNEDGVSMAPLTLMNQDKVLMESWYHLSDAVVDGGIPFNKAYGMTAFEYHGTDPRFNKVFNQGMSNHSTITMKKILETYTGFDGLKTVVDVGGGTGATLNMIVSKYPSIKGINFDLPHVIEDAPSYPGVEHVGGDMFVSVPKGDAIFMKWICHDWSDEHCVKFLKNCYDALPQNGKVILAECVLPEAPDTGLATKNVVHIDVIMLAHNPGGKERTEKEFQGLAKAAGFKQFNKACCAYNTWIMELLK

SEQ ID NO: 1782 - protein, 361 aa, Ocimum basilicum
MSSTANNPQINSDEEENFLFAMQLASASVLPMVLKSAIELDLLELIKKAGAGAFVSPAELAAQLLTTNAEAHVMLDRILRLLTSYAILECRLKTLPDGGVQRLYGLAPVCKFLTKNEDGVSMAPLALMNQDKVLMESWYHLKDAVLDGGIPFNKAYGMTAFEYHGTDPRFNKVFNQGMSNHSTITMKKILETYTGFDGLKTVVDVGGGTGATLNMIISKYPSIKGINFDLPHVVEDAPSYPGVEHVGGDMFVSVPKGDAIFMKWICHDWSDAHCVKFLKKCYEALPENGKVILAECVLPEAPDTGLATKNVVHIDVIMLAHNPGGKERTEKEFQVLAKASGFKQFNKVCCAYNSWIMELLK

SEQ ID NO: 1783 - protein, 283 aa, Enterococcus faecalis V583
MTIQWFPGHMAKARREVSEKIKYVDIVFELVDARLPLSSRNPMMDQIVQQKPRLVLLNKGDLADNDQNKKWQHYFQKKGYQTLVINAQQNKGINKIVPAAKEALKEKLAREQAKGLKPRAIRAMCIGIPNVGKSTLMNRLVGKKIAQTGNKPGVTKGQQWLRSGSQLELLDTPGILWPKFEDEEIGKKLALTGAIKDQLLHLDDLAIYGLEFFARFYPQRLTERYGLTEEELFLPAPEQLMLISQKRGFRDDYNRASEMIILEIRSGKLGTYTLDRWEELGDE

SEQ ID NO: 1784 - protein, 402 aa, Bacillus anthracis str. Ames 0581
MHKVHQGKLETVSKVKVENAKDLSLAYSPGVAEPCKEIYDDKSKVYEYTMKGNMVAVVTDGTAVLGLGNIGPEASLPVMEGKAVLFKSFAGVDAFPIALNTNDVDKIVETVKLMEPTFGGVNLEDIAAPNCFIIEERLKKETNIPIFHDDQHGTAIVTVAGLVNALKLVGKKMSDIKVVANGAGAAGIAIIKLLYRYGVRDIIMCDRKGAIYEGRPTGMNPVKDEVAKYTNKNRIEGSLADVVQGADVFIGVSAEGALTEEMVRTMNDDAIIFAMANPVPEIMPELAKAAGAAVVGTGRSDFANQVNNVLAFPGIFRGALDVHATQINEEMKMAAVQAIAELVAEDELNADYIIPAPFDARVAPQVAAYVAKAAMETGVARRQVDPNEVAEKTKQLALIGKE

SEQ ID NO: 1785 - protein, 207 aa, Zea mays
  unsure (1)..(207): unsure at all Xaa locations
MTTGEGAEAAAVPRVVSILSALLQRVAERNDAAAAAPPPAAAAGPPVLSAFQGLTKPAISIGGYLERIFRFAGCSPSCYVVAYIYLDRFLRRRPPRVXVDSYSVHRLLITAVLAAVKFMDDICYNNAYFAKVGGISLVEMNYLEVDFLFGVGFDLNVAPETFGDYCAVLHSELLCAEAAPAPLRLQHCCLSEDDAGAGCSAQQQLAA

SEQ ID NO: 1786 - protein, 110 aa, Triticum aestivum
MDSQFGALERGGSRQRRSPVLARPNTTKRHIQQQRANAADKKVVMPNYFSIEAFFVLACLTVSLLILPLVLPPLPPPPSLLLFVPVCLLILLMVLAFMPTDMRSMATSYL

SEQ ID NO: 1787 - protein, 238 aa, Oryza sativa (indica cultivar-group)
ENTMNRQVTFFKRRNGLLKKAHEISVLCDADVALIVFSTKGKLYEFSSHSSMEGILERYQRYSFDERAVLEPNTEDQENWGDEYGILKSKLDALQKSQRQLLGEQLDTLTTKELQQLEHQLEYSLKHIRSKKNQLLFESISELQKKEKSLKNQNNVLQKLMETEKEKNNAIINTNREEQNGATPSTSSPTPVTAPDPIPTTNNSQSQPRGSGESEAQPSPAQAGNSKLPPWMLRTSHT

SEQ ID NO: 1788 - protein, 363 aa, Glycine max
  unsure (1)..(363): unsure at all Xaa locations
MGEIRDLNMIDNTACLSAMFLSTLIANLVYPDVLNAVIELNMFEIIAKATPAVSFIXISXNAPTLPPQHPDRPNRLLRLLRLLVSSSFLTTPPRTTXTLEPFKQFMDSHKFXVPFGTRGNLGXFTLFDSISPLLQVWPMNFLKEALVDADIDLFKKIHGVTMYQYMENDPKMNQIFNKSMANLCATEMSRILEIYTGFEGISTLVDVGGGNGQNLKMIISKYPLIKGINFDLPQVIENAPPLPGIEHVGGDMFARVPQGDAIILKAVCHNWSDEKCIEFLRNCHKALSPNGKVIVVEFILPEEPEPTEESQLVSTLDNLMFITVGGRERTQKQYETLCKLSGFSNFQVACRAFSSLGVMEFYK

SEQ ID NO: 1789 - protein, 458 aa, Arthrobacter oxydans
MSSKLATPLSIQGEVIYPDDSGFDAIANIWDGRHLQRPSLIARCLSAGDVAKSVRYACDNGLEISVRSGGHNPNGYATNDGGIVLDLRLMNSIHIDTAGSRARIGGGVISGDLVKEAAKFGLAAVTGMHPKVGFCGLALNGGVGFLTPKYGLASDNILGATLVTATGDVIYCSDDERPELFWAVRGAGPNFGVVTEVEVQLYELPRKMLAGFITWAPSVSELAGLLTSLLDALNEMADHIYPSVFVGVDENRAPSVTVCVGHLGGLDIAERDIARLRGLGRTVSDSIAVRSYDEVVALNAEVGSFEDGMSNLWIDREIAMPNARFAEAIAGNLDKFVSEPASGGSVKLEIEGMPFGNPKRTPARHRDAMGVLALAEWSGAAPGSEKYPELARELDAALLRAGVTTSGFGLLNNNSEVTAEMVAEVYKPEVYCRLAAVKREYDPENRFRHNYNIDPEGS

SEQ ID NO: 1790 - protein, 202 aa, Glycine max
MRYILGEHNILFLKSFAFTILFLSCIAIRLNLCLSSIPSSLKSIPLEGHLKFDQVSLSHAARDFGNRYQYNPMAVLQPESVSDIVATIRHIWLMGPGSHLTIAARGHGHSLQGQAQAHGGLVINMESLKVPEMQIHVDEGNKSPPYVDVSGGELWINILHETLRYGLAPRSWTDYLHLTVGGTLSNAGVSGQTFMHGAQISN

SEQ ID NO: 1791 - protein, 570 aa, Triticum aestivum
MAGGGVEDVYGEDRATEEQLITPWSFSVASGHQLLRDPRHNKGLAFSEAERDAHYLRGLLPPAIVSQEHQEKKIMHNLRSYTVPLHRYVAMMDLQERNERLFYKLLIDNVEELLPVVYTPVVGEACQKYGSIYRRPQGLYISLKDKGKVLEVLKNWPERSIQVIVVTDGERILGLGDLGCQGMGIPVGKLSLYTALGGVRPSACLPITIDVGTNNETLLNDEYYIGLRQRRATGEEYHELLQEFMNAVKQNYGEKVLVQFEDFANHNAFDLLAKYSKSHLVFNDDIQGTASVVLAGLLAALRMIGGGLVDQTYLFLGAGEAGTGIAELIALEMSKHTELPVDDCRKKIWLVDSKGLLVESRKESLQHFKKPFAHEHEELKTLLEAVQSIKPTVLIGTSGVGKTFTQEVIEAMASFNEKPVIFSLSNPTSHSECTAEEAYTWSKGTAVFASGSPFDPVEYEGKTFVPGQSNNAYVFPGFGLGVVISGAIRVHDDMLLAASEALAEEATQENFDKGLIFPPFTNIRKISASIAAKVAAKAYDLGLASRLPRPDDLVKYAESCMYTPLYRSYR

SEQ ID NO: 1792 - protein, 500 aa, Citrus sinensis
LLLIPLLLILKKLKAQNKQQLPPSPPKLPVIGNFHQLGELPHQSLWQLSKKYGPVMLLKLGRVPLVVISSAEAARDVLKVHDLDCCSRPPLIGSGKFTYNYSDIAFSPYSDYWRELRKISVLEVFSLRRVQSFGFIREEEVALLMNSISESSSSASPVDLSEKMFALTGSIVFRMAFGRRFRGSNFDNHSFQELVHAVESLLGGFAAAECFPYVGWIIDRLNGYHAKLERVFQELDTLFQQIIDDHLKPAETTKQEHVQQDIIDVMLKIERDQAESHESEAWLTKNHIKAVLLNIFLGGVDTSAITVIWAMAELCKNPRLMKKAQAEIRNHIGNKGRVTEADIDQLQYLKMVIKETLRLHPPAPLLIARDTLYRFKVNGYDIYPKTLIQVNAWAIGRDSKYWESPEEFIPERFIDKPVDVKGQDFEYLPFGSGRRICPGINLGLIMSELALANLLYCFDWKLPNGREEDCVNMNMEEATGVSLTLSKKTPLILVPVNYLQ

SEQ ID NO: 1793 - protein, 371 aa, Candida albicans SC5314
MLIKSNYNCINIKRFLLNQTRVSVTASNSFSFYFYFKPYKFNCYKSYSTMSTTTPTIKLNSGYEMPIVGFGCWKVTNATAADQIYNAIKTGYRLFDGAEDYGNEKEVGEGINRAIKDGLVKREELFIVSKLWNNYHSPENVEKALNKTLTDLNLEYLDLFLIHFPIAFKFVPLEEKYPPGFYCGDGDKFHYENVPLLDTWKALEKLVNLGKIKSIGISNFNGGLIYDLIRGATIKPAVLQIEHHPYLQQPRLIEFVQNQGIAITAYSSFGPQSFLELQSKRALDTPTLFEHETIKSIADKHGKSPAQVLLRWATQRNIAVIPKSNNPDRLAQNLAVVDFDLTEEDLQAISKLDIGLRFNDPWDWDKIPIFV

SEQ ID NO: 1794 - protein, 488 aa, Listeria monocytogenes str. 4b H7858
MADVRKLKNYIDGEWVESKTDKYEDVINPATGEVLCQVPISTRAELDQAAVIAEQAFEKWSQVAVPRRARVLFSFQQLLIQHKEELARLITLENGKNLSEARGEVQRGIENVEFAAGSPTLMMGDSLASIATDVEAANYRYPVGVVGGIAPFNFPMMVPCWMFPMAIALGNSFILKPSERTPLLMEKLVELFSEAGLPKGVFNVVYGAHDVVNGILENEIIKAVSFVGSKPVGEYVYKTGSANLKRVQALTGAKNHTIVLNDADLEDTVTNVISAAFGSAGERCMACAVVTVEEGIADEFLAALRTAAQNVKIGNGLDDGVFLGPVIREENQKRTIAYIEKGLEEGAKLTVDGRETGLSEGHFVGPTILEDVTTDMTIWKDEIFAPVLSVIRVKNLQEAVRVANQSEFANGACIFTNNAKAIRYFREKIDAGMLGVNLGVPAPMAFFPFSGWKSSFYGTLHANGKDSVDFYTHKKVVTARYSLKGYEE

SEQ ID NO: 1795 - protein, 483 aa, Caulobacter crescentus CB15
MQVRNDSGDSKANLDAVIVWFRKDLRIADNPALRHAAQSGRPVIPLYILDETPGIRPMGGASLWWLDKSLKSLAASLETLGTKLVLRKGVAAEVLDQLIAQSGARSVVWNRLYDKPSTDRDAAIKAALRDRGVDCQSFNAGLLNEPWTVKNGSDQPYKVFTPYWRAAREHLTDVAVTAAPGHLVAPARFPASESLASWNLHPTKPDWSKGFDLWTPGEAGAHARLDAFLKGPIKGYGDQRDIPGVEATSKLSPHLHFGEIGPRQVWLATRSAADQGDIPLAEADKFLSEIGWREFNHSILYNWPHMPSANFKPEFDGFPWVKDEGALEAWKRGQTGYPIVDAGMRELWTTGFMHNRVRMIVASFLIKHLMIDWREGEAWFWDTLLDADLANNVGNWQWTAGSGADAAPYFRIFNPIAQGEKFDPKGDYVRRWVPELRNVSDDVIHKPWTKPLHLPAGAKRLYSRPIVDHAMARARALEAYHGL

SEQ ID NO: 1796 - protein, 474 aa, Ustilago maydis 521
MLSLTVPRLALRAAAPSRQFAAAAGVGAVRFASTKSLKDAVAEIIPAKQEQLKKLKAEHGESKLGEIQLQHLLGGMRGLKVMLWEGSVLDSETGITFHGKSIPDSQKVLPTAADLGLNGNEILPESMLWLLLTGNVPSKDEVKGLSAELAAKGALPAHVEKIIDSFPKTLHPMTQFAAAVAALNHDSKFAAAYAKGIKKTEYWAPVLEDSIDLIAKLPAVAARIYYNVFGRGDGKQAIDSNLDLIGNYSNMIGYGDNQGMTDYLRLYIAIHGDHEGGNVSAHTAHLVGSALSDPYLSYSAALLGLAGPLHGLANQEVLGWALSMQEAVGENASEEQIKEYLWSTLKSGRVVPGYGHAVLRQPDPRFTALSKFCDTRPELRDSSIVKLVQKVSQVAPGVLKEHGKTKNPFPNVDAASGCVLYQYGLTEFTYYTVIFGISRAIGALPQLVADRYLGMPIERPKSMSMDSLEAFLKK

SEQ ID NO: 1797 - protein, 298 aa, Candida albicans SC5314
MPMQKEFRTSAYHSRFQTPFRRRQEGKTDYYQRKRLVTQHKAKYNSPKYRLVVRFTNKDIIAQIVSAHITGDVVFTAAYAHELPRYGIKYGLTNWSAAYAVGLLVARRALQKLGLDETYTGVEEVEGEFELTEAVEDGPRPFKVFLDIGLQRTTTGARVFGVLKGASDGGLYVPHSPNRFPGWDIEAEELDAELLRKYIFGGHVAEYMEELLDDDEEKYKSIFKNYIEEEIESEDVEEIYANAHEAIRADPSFKPTEKKFTKEQYKAESKKYRQQKLTRAERQAKVAKKIAEFKAQQE

SEQ ID NO: 1798 - protein, 1230 aa, Cryptococcus neoformans var. neoformans
MSSFTPAFRLHHTHSSSVSPTASNDVAPSSPTPNQPHQLAARSPLYANSPNCASKITKGSSLSSSTAHHGLKYVRPSTSPLLRSPKGESFSAYLGNWGSQELITFLNIHKCGQYLAIFQKNDINGKILLDLDMTALKSMGIGKISERVRLIGGIKDLRRCVADESIRAPFTQRSYPSERTLLPSLPSHSNVLLDKWDCSSSASRLGKRQITLRPPPLDLQGHMPPRLLSHASLGIATIDTHDIHTTNSKIEVYIQQNPPGQPQSMPTKRSDSLTLCAAPSRNVGRRSPSSRHFEGCKSQTDGLTTLNLTLDRQVPSSTMNNVTLREDCHLQREERLPLSHQVPHSRNAFASPHKTSLSGRCPLARGDTTSHQPSGPAIAEQDSPVNYRISNTVTNTKEISQGDLKQPFVMKSLESQSHLLAGVSDMSHDPVTDGFKPKGKASVPLTVMSSSDISAVNANPAALSLADLRRQLVKFINTEDDTIRTVNVMHVTSGVEILERALKKFGKFGTGIHGSPDVYGDEDGDGTLEIGGWEVYTESTPDESSKPLSEFNLLKTCTFHREGTAIQDKGLFLRKKQRMQKRKNIQDFFGETPPPSMSPTSPTLITGPHLSLVQGKSQPTSGSAFSSSSRLSTLTHKGRNRASMISVMSGLGVPIINTLPSPQGNGLRLTGSVHSHEKKSMYNFFGHRPPSELISNHLTDYFPSAKKSDVEKARHSLLRLSGGTVAYKKSGIYEGDSTPDHWSKPGDNQPPSLPPFEPSQDTLSDSLQAFASSTPVHLSRPKHTVALRRRRDSDSSSRSHTSMLMQTRRNRDHSDTTSLLTVDEITAEVENRRVSTIQRGDYIEETEDSSSIEGDTLPQDDESKGVLRAICSDSNKLVDSGKSYQGDSDIDQQHELEDEEEDKLDDDEEEEEEEEEEDNEQGKAFTSTGSKRIIKWIKGALIGAGSFGSVYLGMDAQSGLLMAVKQVELSAGSAKNEDRKRSMLSALEREIELLKELQHENIVQYLDSSVDANHLNIFLEYVPGGSVAALLNNYGAFEEALVRNFVRQILTGLNYLHMRGIVHRDIKGANILVDNKGGIKISDFGISKKVENSLITGLRTNRPSLQGSVFWMAPEVVKQTSYSPKADIWSVGCLVVEMLTGTHPWADLTQMQAIFRIGSLARPAPPSDISVQADEFLRKTFEIEHAKRPTAAQLLKHPFIGSPRVRTAASNFINGAIASETMEVQVVEES

SEQ ID NO: 1799 - protein, 491 aa, Nicotiana tabacum
MVLSKTSSESDVSVHSTFASRYVRTSLPRFEMAENSIPKEAAFQIINDELMLDGNPRLNLASFVTTWMEPECDKLMMDSINKNYVDMDEYPVTTELQNRCVNMIARLFNAPLEEKETAVGVGTVGSSEAIMLAGLAFKRNWQNKRKAEGKPYNKPNIVTGANVQVCWEKFANYFEVELKEVKLREGYYVMDPVQAVEMVDENTICVAAILGSTLNGEFEDVKLLNDLLIEKNKQTGWNTPIHVDAASGGFIAPFLYPELEWDFRLPLVKSINVSGHKYGLVYAGIGWVIWRTKQDLPEELIFHINYLGADQPTFTLNFSKGSSQVIAQYYQLIRLGYEGYRNVMENCRENAIVLREGLEKTGRFNIVSKDEGVPLVAFSLKDNSRHNEFEVSETLRRFGWIVPAYTMPADAQHVTVLRVVIREDFSRTLAERLVLDIVKVLHELDTLPARLSAKLEEVKLVKNGKKFELEVQREVTNYWKKFVLARKAPVC

SEQ ID NO: 1800 - protein, 212 aa, Wolbachia pipientis
ASCSSAITFIDGDEGVLKYRGHSIADLAENNNFTTVIYLLLYGELPNLEQHKKFLLKIGELSELPEQVVNVVKAFPKTAHPMSILIACFAGLSALYHERHGNNVNSEDLDFGISAIAQVPAIIAMIYRYINNQEFTNANNGLSYSENFLRMMFGDTFDNDKSALFAKALDKIFTLHADHEQNASTAAVRLVGSAGSSLFTSLSAGVATLWGP

SEQ ID NO: 1801 - protein, 198 aa, Triticum aestivum
  unsure (1)..(198): unsure at all Xaa locations
MAPTVMASSATSVAPFQGLKSTAGLPVSRRSNGASLGSVSNGGRIRCMQVWPIEGIKKFETLSYLPPLSTEALLKQVDYLIRSKWVPCPSSSAKGXXCXSFFVERPTAIAPGVTLRWAPGIGSXCWXKLPLCVXVAPDGHXQVINEVEGARRXPDAYVRXIGFDXMRQVQCGDVHRLKPPGCEESGKAYNGSLTTRHI

SEQ ID NO: 1802 - protein, 427 aa, Vibrio parahaemolyticus RIMD 2210633
MVMTLTLMHRMSALQITEINIMSVTADQVHGVVQALTQSSDTLFLLLGAIMVFLMHAGFAFLEVGTVRQKNQVNALVKIIADFGISAIAYFFIGYWVAYGGTFFSDAQTLSQDNGYELVKFFFLLTFAAAIPAIVSGGIAERARFYPILIATFFTVGVVYPLFEGMIWNGNFGVQAWFESTFGYGFHDFAGSVVVHGVGGWIALVAVTFLGMRRGRIRAGKHTNFAPSNIPFLALGAWILCVGWFGFNVMSAQTLSGISGLVAMNSLMAMVGGIVASLLAGKNDPGFIHNGPLAGLVAVCAGSDLMHPLGALVTGAVAGVLFVYLFTYLQNRTKIDDVLGVWPLHGVCGAWGGIAAGVFGQSGFGGMGGVSFAVQVLGTFFGISIAVLGALVVYGAINALTGLRLSEEDEFNGADLAIHKISSTNED

SEQ ID NO: 1803 - protein, 160 aa, Zea mays
MSDSEEHHFESKADAGASKTYPQQAGTVRKNGFIVIKNRPCKVVEVSTSKTGKHGHAKCHFVAIDIFNGKKLEDIVPSSHNCDIPHVNRTEYQLIDISEDGFVSLLTSDGNTKDDLRLPTDETLVAQIKEGFESGKDLVVTVQSAMGEEQICALKDVGPK

SEQ ID NO: 1804 - protein, 190 aa, Triticum aestivum
  unsure (1)..(190): unsure at all Xaa locations
MAPTVMASSATSVAPFQGLKSTAGLPVSRRSNGASLGSVSNGGRIRCMQVWPIEGIKKFETLSYLPPLSTEALLKQVDYLIRSKWVPCLXFNKVGFIFREHNASPXGTMMAGTGQCGNCLSSVQXRHTMINKVEEVKKXYPDPMSAIIGFXKMRKXKWVXFNXLKPPGXKDPGXAKKSPKGNKGIDFLNN

SEQ ID NO: 1805 - protein, 163 aa, Triticum aestivum
  unsure (1)..(163): unsure at all Xaa locations
MAPTVMASSATSVAPFQGLKSTAGLPVSRRSNGASLGSVSNGGRIRCMQVWPIEGIKKFETLSYLPPLKHGGLLKAXSDYLIRSKWXVPCLQFXSKVGSSSRXAQRIPLGYXDGRYWXMXXLPSXGCTDPTSDRGGSQRRYTFRITVIASCSIALTTGASPEG

SEQ ID NO: 1806 - protein, 461 aa, Burkholderia fungorum LB400
MTFLKSPPPTPEDVADEYAATISGSSLPKYRIPEASSDRRAVFDLVRDELFMDGNSRQNVATFCTTYADDEVRHLMDLSIDKNMIDKDEYPQTAEIEMRCVHMLADLWHASKAWKTTGCSTTGSSEACMLGGLALKWQWKKRREAQGKPTDKPNFVCGPVQVCWAKFARYFDVEMRQVPLRGEATGLTPEDLAEYCDENTIGVVATLGITFTCVYEPVKALAGALDALQANVGLDIPIHVDAASGGFVAPFIQPDLEWDFSVPRVKSINASGHKYGLAPLGVGWVVWRSTQDLPDELIFRVDYLGGDMPTFALNFSRPAGQIIAQYYMLLRLGREGYRRIQQECADTAQALADGLAKIDQLEMIYDGRGALPAVCYKLKHPETAGFTLFDLSDQVRMRGWQIASYELPAGREDTIVQRVLIRRGVTRDMAAMLLEDIRHAIGHLTKNPVLHSSAGPTFHHN

SEQ ID NO: 1807 - protein, 316 aa, Shigella flexneri 2a str. 301
MNELDGIKQFTTVVADSCDIESIRHYHPQDATANPSLLLKAAGLSQYEHLIDDAIAWGKKNGKTQEQQVVAACDKLAVNFGAEILKIVPGCVSTEVDARLSFDKEKSIEKARHLVDLYQQQGVEKSRILIKLASTWEGIRAAEELEKEGINCNLTLLFSFTQARACAEAGVFLISPFVGRIYDWYQARKPMDPYVVEEDPGVKSVRNIYDYYKQHHYETIVMGASFRRTEQILALTGCDRLTIAPNLLKELQEKVSPVVRKLIPPSQTFPRPAPMSEAEFRWEHNQDAMAVEKLSEGIRLFAVDQRKLEDLLAAKL

SEQ ID NO: 1808 - protein, 153 aa, Chorispora bungeana
MNSVSAFSEMFGSDYEPQGGDYCPTLATSCPKEPAGRKKFRETRHPIYRGVRQRNSGKWVSEVREPNKKTRIWLGTFRTAEMAARAHDVAALALRGRSACLNFADSAWRLRIPESTCAKDIQKAAAEAALAFQDETCDTTTTNHGLDMEGRCG

SEQ ID NO: 1809 - protein, 153 aa, Chorispora bungeana
MTSVSTFSEMLGSEYESPTLSGEYCPALAASCPKKPAGRKKFRETRHPIYRGIRLRNSSKWVCEVREPNKKSRIWLGTFLTAEIAARAHDVAAIALRGKSACLNFADSAWRLRIPETTCPKDIQKAAAEAAVAFQAEINDTTTDHGLDRGDVG

SEQ ID NO: 1810 - protein, 154 aa, Chorispora bungeana
MTSFSAFSEMLGSEYESPTLSGEYCPALAASCPKKPAGRKKFRETRHPIYRGVRLRNSGKWVCEVRGPNKKSRIWLGTFLTAEIAARAHDVAAIALRGKSACLNFADSAWRLRIPETTCPKDIQKAAAEAAVAFQAEINDTTTDHGLDMERRWW

SEQ ID NO: 1811 - protein, 231 aa, Burkholderia pseudomallei
GPVASRLGLSGVPVAAETIALHTLFELMRVTGARVHVARLSSAAGVALVRAAKAEGLPVTCDVGANHLHLIDVDIGYFDAQFRLDPPLRAERDREAIRAALADGTIDAICSDHTPVDDDEKLLPFAEATPGATGLELLLSLTVKWAREAGVPLARALAAITSAPADVLKLPAGRIGEGAPADLCVFDPNAHWRVEPRALKSQGHNTPFLGYELPARVCATLVAGQVAFERR

SEQ ID NO: 1812 - protein, 274 aa, Mycoplasma penetrans HF-2
MENEKKINWFIGHMKRTVDILESKKKNIDFVIEVVDARLPYGSSNLELLSVFENKPIIKIALKSDLVKKDHYQNGFFYASIKNPADRKKIINYIDSCLKEKKDRLIKKGLRNPTFIGIVVGLPNIGKSSLINYLSNKKSLNVENRPGVTRKTENIKISDSLFLIDTPGVFLKNVTDYQMGLSLALINCVKREVVDKKDLVLFLISKFIENNNLNSFNETLNTNINSNNPSEVLSELLKVLKIDEDNNQKISVFYDFVFKKTIDNPKISLFLEKI

SEQ ID NO: 1813 - protein, 457 aa, Staphylococcus aureus subsp. aureus MW2
MAIAVLLNRMFRMEHNPLFEYIYQQKEDIDACYFIIPEEDMSSASDLKAQFYRGTLQRFYQSLHAEKLTPYVMSYDDIISFCKENNISEVVTAGDIMSYHLEEYDILHQRSLFNEARIAVTLIRGNHYFKASKTMNQQGEPYKVFTSFYKKWRPYLRHRDVYHYDLKSFEDFVIASPDDLVFDDIAFGSSQIIEQNKWQHFLDQDIQNYESGRDYLPEVLTSQLSVALAYGLLDIIEIFNDLLARYDEDEANYEAFIRELIFREFYYVLMTQYPETSYQAFKPKYRQIKWSQNEADFNAWCEGQTGFPIIDAAIMELTQTGFMHNRMRMVVSQFLTKDLFIDWTWGEKFFRKHLIDYDAASNIHGWQWSASTGTDAVPYFRMFNPIRQSERFDAKALYIKTYLPIFNQIDAKYLHDTQRNESNLFEQGIELGSHYPRQIVDHQEKRTQVLATFKALD

SEQ ID NO: 1814 - protein, 335 aa, Shewanella oneidensis MR-1
MSKRTITVIPGDGIGPSIIDSALKILDKAGCDFEYEFADAGLAALEKQGELLPQRTLELIEKNRITLKGPLTTPVGEGFTSINVTLRKKFGLYANVRPVLSFKGTQARYENIDIITVRENTEGMYSGHGQKVSEDGSTAEATSIVTRQGAEQIATFAYELARKESRKKVTIVHKANIMKSTSGLFLKVAREVSLRYPDIKTEEMIVDATCMKLVMNPENFDVIVTTNLFGDILSDLCAGLVGGLGMAPGANIGRDAAIFEAVHGSAPDIAGKNLANPTSVILASIQMLEYLGMADKAAPIRKAVSAVIEEGDRTTRDLGGTHGTTDFTQAVLDRL

SEQ ID NO: 1815 - protein, 176 aa, Chorispora bungeana
KKFRETRHPIYRGVRQRNSGKWVCELREPNKKTRIWLGTFQTAEMAARAHDVAAIALRGRSACLNFADSAWRLRIPESTCAKEIQKAAAGAALNFQDEMCHMTTDAHGLDMEETLVEAIYTPEQSQDAFYMDEEAMLGMSSLLDNMAEGMLLPSPSVQWNYNFDVEGDDDMSLWSY

SEQ ID NO: 1816 - protein, 143 aa, Glycine max
MAMAFKMATTGMWVTDECKNSFMEMKWKKVHRYIVFKIDEKSRLVTVDKVGGPGESYGDLAASLPDDDCRYAVFDFDFVTVDNCRKSKIFFIAWSPTASRIRAKMLYATSKDGLRRALDGISYEVQATDPAEMGFDVIQDRAK

SEQ ID NO: 1817 - protein, 497 aa, Vibrio vulnificus CMCP6
MAQHASSVIVCNGYKDREYIRLALIGEKLGHKVFIVLEKMSELDLVLREAKSLGVTPRLGIRIRLASQGAGKWQASGGEKSKFGLSASQVLNVISRLKKENQLDTLQLVHFHLGSQMANIRDVRNGVNESARFYCELRTLGANITYFDVGGGLAIDYDGTRSQSSNSMNYGLVEYARNIVNTVGDVCKDYKQPMPVIISESGRSLTAHHAVLISNVIGTETYKPETVTEPEEDFPLLLNNMWRSWLNLHNGTDARALIEIYNDTQSDLAEVHSQFATGVLTLEHRAWAEQTSLRIYYELNRLMSTKNRFHRPILDELSERLADKFFVNFSLFQSLPDSWGIDQVFPVLPLSGLQNAADRRAVMLDITCDSDGAIDAYVDGQGIESTLPVPAWNEDEPYLMGFFLVGAYQEILGDMHNLFGDTHSVVVNVGDQGEINIDFINEGDTVEDMMRYVHIDVDQIRKNYHSLVSQRVDQEEQQQILAELEQGLSGYTYLEDF

SEQ ID NO: 1818 - protein, 347 aa, Streptococcus agalactiae 2603V/R
MFVKKGLFVFLLLCILSMWLMIFGVAFYYFGSLHQSLTSRIIYQFVLTVLLTTTAWFMGAYFLAFEGHFKTVFQFQEADGKQIVNCLFQLCFALYAVVMLIGSIIDRVQTKRLLLAVVSWLFLVYTPLAYLIWNSEGVFAKMGVLDFSGGMIVHLSAGLSSYILAHVIGKSEHQHNKVKNDSLFLGMILITFGWFGFNMGPVGEWNSQAIMILLNTIFAIIGGGLAWTLAAKWNGEEEKTGSLLNGIIVGLVTSTAGVGYLLTWQLLAVTFFASLFTYFVTDYVAKAFAIDDVVSSFGMNGIGGLLGSLGVGLFKLSHMPVQLLALATTILLSIIMTYIISKAIFRK

SEQ ID NO: 1819 - protein, 175 aa, Chorispora bungeana
KKFRETRHPIYRGVRLRNSGKWVCEVREPNKKSRIWLGTFLTAEIAARAHDVAAIALRGKSACLNFADSAWRLRIPETTCPKDIQKAAAEAAVAFQAEINDTTKGHGLDVEETIVEAIFTEENSDGSYMDEEESMFGVPTLLASMAEGVLLPPPSVQFEYNYDFDGDTDVSLWSY

SEQ ID NO: 1820 - protein, 286 aa, Thermotoga maritima MSB8
MQVPKVTLNNGVEMPILGYGVFQIPPEKTEECVYEAIKVGYRLIDTAASYMNEEGVGRAIKRAIDEGIVRREELFVTTKLWVSDVGYESTKKAFEKSLKKLQLEYIDLYLIHQPFGDVHCAWKAMEEMYKDGLVRAIGVSNFYPDRLMDLMVHHEIVPAVNQIEIHPFYQRQEEIEFMRNYNIQPEAWGPFAEGRKNIFQNGVLRSIAEKYGKTVAQVILRWLTQKGIVAIPKTVRRERMKENISIFDFELTQEDMEKIATLDEGQSAFFSHRDPEVVKWICSLKR

SEQ ID NO: 1821 - protein, 314 aa, Aspergillus flavus
METPFAAPWRQFVEDLGQTPCLEGKDLNSVLAGWGQLAGTLATRYGFPPPDESVTTEDVQLDGLWLRCYTPPNATGQEPVGLYFHGGGWVMGGVKEEDGFCRVISRQCQMRLVSVEYRKAPETRYPGALNDGVSAALWALSRYENQPLVLMGTSAGGNLAFGTALRLIDQDMADKVSGVVALAPITVHPDAVPDHLKEQYTAYEENAELTVNSRAAMQVFFDCYKAPVDDVYTSCILHPKLHALPKVYIAELGLDTLRDDARLMKGALDTAKVPVMYDAYPGYPHCSFMFPFKSLGEHQKAFLEGVAKAVRWMS

SEQ ID NO: 1822 - protein, 152 aa, Picea glauca
MAMDPSLITVQHLLGVPDDLEKLLNAPTHSYMRDTKAMASTPVDVKEYPNSYVFIIDMPGLKSNDIKVQVEDENVLNISGERKRNEKDEEGEVKYIRMERRVGKFMRKFTLPADCNLEAISAACQDGVLTVTVPKLPPPEPKKPKTIEVKIG

SEQ ID NO: 1823 - protein, 414 aa, Thermoplasma acidophilum
MCMDRAICGNFYYGGKFDYLEVIVSDGKIAGIKKDAGNVPKTNYDGAILPAATDIHVHFRTPGETEKEDFGSGSLSAIYGGTTYVMDMPNNRFPITDYNAFGDKLGSIDSTSFADFSLYSMETGKNAMLLDRRSIGLKVYLGGSTNSTGTEVIEEGDIRKINEMNYPVVFHGESERCLKTHQMEEKNLRDHNLARPIDCEIEAAKYVSGLDIKTKIMAHVSSPDVTGNFLREVTPHHLLLNDEMPLGSFGKVNPPLRDSRTQKRLLDDYISGKFDILSSDHAPHTEDDKREFEFAKSGIIGVETRVPLFLALAQKKIVPLDVLYRTAIENPPSIFGIKKGKIEIGYDADFMVIDFTSMKRINDNRLHSKFPVSPFNGMDAIFPSHVIMRGNVVIDRYEDISDPMGVFIPKPQKE

SEQ ID NO: 1824 - protein, 174 aa, Triticum aestivum
  unsure (1)..(174): unsure at all Xaa locations
MAPAVMASSATTVAPFQGLKSTAGLPVSXRSSASLGSVSNGGRIRCMQVWPIEGIKKFETLSYLPPLSTEALLKQVDYLIRSKWVPCLEFSKVGFVFREHNSSPGYYDGRYWTMWKLPMFGCTDATQVLNEVEEVKKEYPDAYVRVIGFDNLRQVQCVSFIAFRPPGCEESGKA

SEQ ID NO: 1825 - protein, 386 aa, Aspergillus flavus
MTGLDMETIFAKIKEEYARTDDVGKRKIQGHIRELQVGFYSDWDVVMRLSSGPLQVALAKVGIDLGIFRSLKESDTPITLAEFVKKTGASPRLLGRILRTQAAFGLIKETGPQEYTSSAFTDVFANPAAAGAVVQLFDISGPCTQILPDFLAERHYQDITSNKDCVFQKAFDSELTMFEWMPQHPKHMESLGHLMALERPVSWVDHFPVLEELGDFPAPDKVLMVDIGGGFGQQSKALRAKFPNLPGRVIVQDIPQTLTNAQPAAGVEFMEHNFFEPQPIRNAKFYYLRHVFHDWPDEQCVLILKQIIPAMGPESQILIDEMVIPSTGVPWQAAFTDLLMMNSLGGVERTRAEWDDLMEQAGLQIIQSKVYDSKEQAILVAVPKRT

SEQ ID NO: 1826 - protein, 147 aa, Zea mays
MDASAATARRKRKRPDADNTGDATAAAAAAPAAVDEASDAEVEEFYAILRRIRDASRRLCGAGARPAPRAPAWRPSFSWEDFATPAPGAPAPETPTPGAAQEPAQPRPDEPVAVVRATAPSPRAGLDLNAEPEPEAPATPRSARVQA

SEQ ID NO: 1827 - protein, 116 aa, Neurospora crassa
MTDAPASAPVVKKNTAAESKGKKADGKPRFEVKKWNAVALWAWDIVVDNCAICRNHIMDLCIECQANQSSATSEECTVAWGICNHAFHFHCISRWLKARQVCPLDNRDWEFQKYGR

SEQ ID NO: 1828 - protein, 318 aa, Zea mays
  unsure (1)..(318): unsure at all Xaa locations
MSTTKVKRRVGKYELGRTRXTGEAVAIKILDKEKVLKHKMVEQIKREISTMKLIKHPNVVRIYEVMGSKTKIYIVLEFATGGELFDTIVNHGRMREDEARRYFQQLINAVDYCHSRGVYHRDLKPXNLLLDSYGNLKVSDFGLSALSQQIKDDGLLHTTCGTPNYVAPEVLEDQGYDGAMADLWSCGVILFVLLAGYXNAEFTFPPWTSFPAKRLLTRILDPNPMTRITIPEILEDEWFKKGYKRPEFDEQYDTTLDDVDAVFNDSEEHHVTEKKEEEPVALNAFELIXSMSAGLNLGNLFDSEQEFKRETXFTSKVP

SEQ ID NO: 1829 - protein, 430 aa, Streptococcus agalactiae NEM316
MYIIKNGLIIDPQSGFNQVSDMLIDQGKIKQISKEIDIKGIPIIDASNKIVAPGLVDIHVHFREPGQTHKENIHTGALSAAVGGFTTVLMMANTNPTISSPEIVKQVKESAAKEAIKIETVATITKSLNGKDLVNFEELLEAGVAGFSDDGIPLTDTKVLQEAMNLARKHDVVLSLHEEDPSLNGVLGINEHIAQKIYHVCGASGLAEYSMIARDAMIAYQTQAKVHIQHLSSSESVEVVDFAQKLGANLTAEVTPQHFSKTENLLLTKGANAKLNPPLRLEKDRQALIDGLKSGVISIIASDHAPHHIMEKAADNISQAPSGMTGLETSLALGITYLVSTKELSMIDFLAKMTCNPAQLYGFDAGYLREGGPADIVIFDQAEERIIKAEFASKSSNSPFIGDKLKGVIHYTICNGEIVYQKDSHAATLV

SEQ ID NO: 1830 - protein, 281 aa, Lactococcus lactis subsp. lactis Il1403
MQRKLTLNDGNVIPQFGLGLYQLPEGTETQNIVKTALELGYRHLDTSHAYQNETSVGQAIQDSEISNSEIWITSKLWPSDYEQAPEAIERMLKRLKVKQIDLLLLHQQVGNYRKAWIALENAVKEGKVKSIGISNFDGERLVDLFNFADIKPSVIQVETHPYHQQVELQEFLKPYGTKIESWYPLGHGDKNLLEEKIFKKMAKKYNKTVAQIILRWHIQEGIIVFPRSTQKEHLAENINIFDFELSCSEIKEIRKLNKKQPYFTMTYEEQEKNFLSWKLED

SEQ ID NO: 1831 - protein, 112 aa, Bartonella sp. sh8200ga
ANEACLKMLQEIGSVERIPEFIARAKDKNDPFRLMGFGHRVYKNYDPRAKIMQKTCHEVLKELNIQDDPLLDIAIELEKIALNDEYFVEKKLYPNVDFYSGITLKALGFPTE

SEQ ID NO: 1832 - protein, 400 aa, Streptococcus pyogenes
HNLNKLVWRYGLTSAAAVLLAFGGGASSVKADSNVLSPKDREAKIKQFKEDLKKYPQTNQSQFWNKAWYGKSYFNEEEYLKSLKEFTEKRLSEIVELIEKGATQGPAGPEGKPGPKGDKGETGARGPRGERGETGLQGPKGEAGKDGAQGEKGEKGDRGEKGEAGIQGPKGEAGKDGAPGEKGEKGDRGETGAQGPVGPQGEKGETGAQGPAGPQGEAGKPGEQGPAGPQGEAGKPGEKAPEKSPEVTPTPETPEQPGEKAPEKSPEVTPTPEMPEQPGEKAPEKSPEVTPTPEMPEQPGEKAPEKSPEVTPTPEMPEQPGEKAPEKSPEVTPTPEMPEQPGEKTPEKSPEVTPTPEMPEQPGEKAPEKSKEVTPAPEKPADKEANQTPERRNGNMAKTP

SEQ ID NO: 1833 - protein, 124 aa, Triticum aestivum
  unsure (1)..(124): unsure at all Xaa locations
RGRGRGLSVFSLLPDVWGIKWRFPIMPVSRLNEEPTRMSTLIDLTCDSYGQIDKFIXNAETLPLHPLDPERGGCYYLAVLLSGAYQEALSNKHNLFGGPSIVWVEKSTDAATGFQLHTDWAQRD

SEQ ID NO: 1834 - protein, 109 aa, Glycine max
  unsure (1)..(109): unsure at all Xaa locations
ASSMISSPAVTTVNRAGAGMVAPFTGLKSMAGYTTIKTNNDITFIAINGGRVQCMQEWPPIGXTKYEILYYLSDLDDAQLAMEIEYLLTKGWILYXEFNWEHCFMYREH

SEQ ID NO: 1835 - protein, 57 aa, Zea mays
MPFTASDICKILLAIILPPVGVFLERGCGADFFINILLTILGYIPGIIHALYIILKY

SEQ ID NO: 1836 - protein, 146 aa, Saccharomyces cerevisiae
MAGDSDNVSLPKATVQKMISEILDQDLMFTKDAREIIINSGIEFIMILSSMASEMADNEAKKTIAPEHVIKALEELEYNEFIPFLEEILLNFKGSQKVKETRDSKFKKSGLSEEELLRQQEELFRQSRSRLHHNSVSDPVKSEDSS

SEQ ID NO: 1837 - protein, 151 aa, Picea glauca
MAMDPLLNTVQQLLVVPDDLERILHAPTRSYMRDTEATASTPVDVKEYPNSYVFIVDMPGLKSNDIKVQVEDENILNISGERKRNEKEEGEVKYIRMERRVGKFMRKFSLPADCNLEAISAACQDGVLTVTVPKLPPPEPKKPKTIAVQIG

SEQ ID NO: 1838 - protein, 1128 aa, Bordetella pertussis Tohama I
MGKGNMKQVTGYCTLCRSRCGSVNHVENGRLVAVTPLAGHPTGGALCAKGRAAPEMMAESHRLLRPLRRTNPRGAADPGWREIEWSEALDEVAARLAVARRRDGAESVAFAVTTPSGTPMVDSFEWVERFVRVFGSPNLIYAVEVCGWHKDYAHALTFGRGIGVPDLEHTDTMLLWGHNPARTWLAQAARIAAARQRGARVVVVDPNREGSSQQADLWLRVRPGADGALALGAIRHLLHTGRFDHDFVARWSNGPYLVDGASGALLRAVDLWPDADPAARVVMQDGSPAASGRGADTARAELFGSWTLRLHDGRACEAVTVMHALRVAVERYTPDEVARLAWLDEAELAQFNAIFENAPRLSYHSWTGVGQHTNATQTDRAIATLYALTGACDRKGGNLWTVAPPYRAVNGYRELLSPVQRAKALGLDELPLGPPSLGWITARDFCRAVLQQDPYPVRTLVSFGSNLLVSQAETARNLEALQALDFHVHVDMSMNPTAMNADIVLPANMPWEREALKLGFEITQAAVEHVQLRPRMVEPAGESRADYEIVLELARRLGLRDAFFGADMDACWNHQLAPLGIDVQALRRQPEGIRFPQPFVHEKYKAVRDGQPVGFPTQDGRVQIHCAALRDIGQPALPVHVEPADTPARHAGAYPLVMSTAKSGWFVHSSHRYVASLRRKSPEPQVYLSVQAARARGIASGDWVRVRTPYGEVALRAKINADLHENVAIAEFGWWQGCEGLGRVDGAIVGPASSNINAIMTDRHRDPVSGSVPLRATVCDIVRDDARNRGSWSGAREFVLAQKRGIAHDVAEFRLLPCDAQALPDFLPGQHVIVSMPGGAARRAYSLTGPNREPAHLSIAVRRVRDGDGPAGVMSNALHELAEGARVLLSAPAGVFTPPLRTARPVILMASGIGITPFHGYLEALAQDAGPAPSVLLVHACRDGSSHPYGAELKRLAQRIGSVCTLTVYAEPASDDAPGRDYQQRGRLDFAWLPPATVAARPLVYLCGSPGFLAFCTDALAARGIPRFDIFSETFTSEKRVPATLAPQPIEIEAEQGGFTWDPSAGTLLDAAERAGLSLPSGCRVGQCESCAMHIVSGQVAHLIDFDGSADTCLTCQAVPITPLTLRR

SEQ ID NO: 1839 - protein, 433 aa, Sulfolobus solfataricus P2
MLCLFIFRRDLRLDDNTGLIKALEDCEKVIPAFILDPRQVGNENEYKSEFAINFMINSLNELNDELRKRGSRLYVYFGLAEEVIKNLLKDVDAVYLNEDYTPFSKMRDERIRKYCEDTGKIMKSFEDYLLTSKNDFKNYRNFTTFYNVVKNKQIKKPVQNNYTNYYKNSLGDEHELPPRQGERGGRKEGIKLIERARQINYDRKDFVAEDNRTFLSPHLKFGTLSIREVYYSLLDSQAIIRQLYWRDFYTLLAYYNERVFHEPLKREYNCIEWENNERLFQAWLEGKTGYPIIDAGMRQLNRTGDMPNRVRMLTAFFLVKVLIIDWRIGEKYFASKLIDYDPSVNNGNWQWIASVGTDYIFRVFDPWKQQVTYDPEAKYIKRWVDELESYDAEIIHNAYKYTLKSYPKPIVDWRIRVNLAKRLYEVCRKSKIK

SEQ ID NO: 1840 - protein, 501 aa, Suaeda liaotungensis
MSIPIPSRQLFIDGEWREPIKRNRLPIINPSTEETIGEIPAATAEDVEAAVSAARRALKRNKGRDWAATSGAHRARYLRAIAAKVSEKKDHFVKLETMDSGKPLDEAVLDIDDVSTCFEYFADQAEALDNKQKYPVKLPMDRFKSHVLRQPIGVVGLISPWNYPLLMATWKIAPALAAGCTAVLKPSELASVTCLEFGEVCNEVGLPPGVLNILTGLGPDAGAPLVSHPDVDKVAFTGSSATGSKVMGSAAQLVKPVTLELGGKSPIIVFEDVVDLDVAAEWTIFGVFWTNGQICSATSRLLVHESIAAEFVEKLVKWSKKIKISDPFEEGCRLGPVISKGQYDKIMKYISTAKSEGATILCGGSRPEHLKKGYFIEPTIVTDITTSMQIWKEEVFGPVLCVKTFSTEEEALELANDTEYGLAAAVFSKDLERCERVTKALEVGAVWVNCSQPCFCHAPWGGVKRSGFGRELGEWGIENYLNIKQVTSDISDEPWGWYKSP

SEQ ID NO: 1841 - protein, 274 aa, Arabidopsis thaliana
MANQTQISDKYILGRELGRGEFGITYLCTDRETREALACKSISKRKLRTAVDVEDVRREVTIMSTLPEHPNVVKLKATYEDNETVHLVMELCEGGELFGRIVARGHYTERAAATVARTIAEVVRMCHVNGVMHRDLKPENFLFANKKENSALKAIDFGLSVLFKPGERFTEIVGSPYYMAPEVLKRNYGPEVDVWSAGVILYILLCGVPPFWAETEQGVALAILRGVLDFKRDPWSQISESAKSLVKQMLEPDSTKRLTAQQVLDHPWIQNAKK

SEQ ID NO: 1842 - protein, 467 aa, Listeria monocytogenes str. 4b F2365
MTSVMWFRRDLRVNDNKALYHACKENDLLLLFQVNPAQFITGSPSHQAFFASVAHFKQEIDKTAHLQIMFGEPIECFQQLKDSLPSWDKVYFNRDETGYGAKRDEAAQAFFDEQKIEVQAFHDSYLHSAEEVKKSPTEYYKIFTPYYKKWREEIKETPFKVTLKHENIRKESLFLKYEEQFAEMTSDLPILDIGERAANTRLANFIKHDVADYDKARDFPELDKTSHLSRYLRTGEISIRTIWQSLQETEATEGRATFEKELCWRDFYNMIYVSFPNQKNEPIQENYRFIEWENNREYFKAWQEGKTGFPLVDAAMRQLKETGWMHNRLRMITASFLTKDLLIDWRFGEKYFQQMLIDYDPASNIGGWQWAASTGTDAVPYFRIFNPTTQSQKFDSTGKFIRKYVKELANLPDKYIHQPEKMSETEQKEHGLLLGKDYPFPIVDHKERRKLAIARYEFSKEHSRGNI

SEQ ID NO: 1843 - protein, 475 aa, ASPERGILLUS NIDULANS FGSC A4
MLEDPSYAEIVRWGDDGDSFVVLECEKFTKTILPKHFKHSNFASFVRQLNKYDFHKVRQNNEENGQSPYGQNAWEFKHPEFRANSKESLDNIRRKAPAPRKQAQAHDDSVPTQQIDLLNQQIVAQQQQIQHISDRYAQMSVDHQLMLQEVLRVQKTVVNHENVIHQLVNYLVSIDARQKRDNKAGSFQAQVGASPSQVTPMDDGVSTPLQQASKLLSDMNAEVQFNLVPVESMGEPPKTGVVSTPTMETAPRRVAPQPAAAATNPALVYPKMNGEMEPVVYPVGATNGIDPMYGEHVNNVPYTVPPKQDMDDRRQFPENRKKSNHVDPGWMRSPRILLVEDDATCRQIGGKFLYSFSCEIDTALDGLEAVNKVQDGSKYDLILMDIIMPNLDGVSACHLIRQFDRTPIIAMTSNIRSDDIQLYFQHGMDDVLPKPFTRKSLLEMLEKHLVHLKTVPQGMEAPPTCDRSHVGTSLN

SEQ ID NO: 1844 - protein, 290 aa, Arabidopsis thaliana
MARCVGRCYVSPAFGESESHRLSERRFLKLSSSTNSDPAGSKSLKLRGKIHRRMSYFRPIMAKDESISSRSGETKQINGKQKNIVWHDCPVTKSDRQELIKQKGCVIWITGLSGSGKSSLACALSRALHNRGKLSYILDGDNVRHGLNSDLSFEADDRAENIRRVGEVAKLFADSGIICIASLISPYRIERAACRALLPQGDFIEVFMDVPLHVCEARDPKGLYKRARAGKIKGFTGVDDPYEAPLDCEVHIISNFSSSSSLCEMADIVVSYLDQNGYLKKHSTKSRNCM

SEQ ID NO: 1845 - protein, 340 aa, Streptomyces fradiae
MKALVFEAPERAVLTHRDIPAPAPGEALVRVAYNSVCGSDLSFYKGVWHGFTYPVVPGHEWSGSVVDVNGPRGADLVGRNVVGDLTCSCGTCAHCAAGTPTLCEDLGELGFTRDGACAEYMTVPVANLRPLPDTLPLRTACQVEPLAVALNAVDRLGVTPGEKVAVMGAGGIGLLLVQAVRLRGGTVTAVAEPVPERRAAALALGVPAAVGGDPGALVELTRSDPAAVPDVVLEASGYPTAVQEAVEAVRPGGRVGLVGYRIEEAAVMAPHHIVLKVLTVRASMGPGTRFEEAVDVLASGAVDVDALLSHEFALDDYAKALDVALRRADGNTRSYFNLRA

SEQ ID NO: 1846 - protein, 224 aa, Magnetospirillum magnetotacticum MS-1
MQGPYSMKFFIDTAEVAEIRELAATGLVDGVTTNPSLIAKSGRKILDVIAEICDIVPGPISAEVAATDFDTMLAEGRKLAALRPNVAVKVPLTLAGLKTCKVLADDGVKVNVTLCFSANQAILAAKAGAAFISPFVGRLDDIGQDGMDLIADIVSIYREYPAFRTEVLAASIRHPMHVTEAARLGAHVVTMPASVLRQMVQHPLTDKGLAAFMADWAKTGQSIL

SEQ ID NO: 1847 - protein, 504 aa, Sinorhizobium meliloti 1021
MLSNFIAPDSNDPRLRIKSRYQMLVDGKSVDAASGSTIDRVSPGHAGEVVGTWPEASADDVRKAVAAARKAFDAGPWPRMSGAERSRLMFKVADLILARQEELALIESLEVGKPIAQARGEIGFCADLWSYAAGQARALEGQTHNNIGDDRLGLVLREPVGVVGIITPWNFPFIIASERVPWAIGSGCTVVLKPSEFTSGTSIRLAELAREAGIPDGVFNVVTGYGDPAGQVLAEDPNVDMVAFTGSVRVGTKLGEIAARTVKRVGLELGGKGPQIVFADADLDAAADGIAYGVYHNAGQCCISGSRLLVQEGIRDALMERLLDISRKVAFGDPLNERTKIGAMISEAHAEKVHSYVTAGITSGAELLLGGERIGREAGLYYAPTVFAGVTPDMSIAREEIFGPVLSTLTFKTADEAVALANATEFGLSASVWSTNLETALQTIRRIRAGRCWINSVIDGTPELPIGGYKKSGLGRELGRYGFDEYSQFKGVHVTLGRPAPWFT

SEQ ID NO: 1848 - protein, 287 aa, Listeria monocytogenes str. 4b F2365
MTIQWFPGHMAKARREVTEKLKLVDVIFELVDARIPLSSSNPMLEEIIHQKRRVIILNKADTADEKTTKEWIDYFAEKGLPAVAVNAQEGKGLFKIEQAAEKLMAEKFDRLRSKGMKPRAIRAMILGIPNVGKSTLINRLAKKNIARTGNKPGVTKAQQWIKVGKTLELLDTPGILWPKFEDQEIGYKLALTGAIKDDLLQMEEIAGYGLRFLEKHYPDRLQNWLKVETVSEDPIETLAFIAEKRGLLDRYNDPDYSRAAETVVREIRQQKLGRMSFDFPNWEDEVE

SEQ ID NO: 1849 - protein, 328 aa, Glycyrrhiza echinata
MASSTSTTTSKEIDRELPPLLRVYKDGTVERFLGSSFVPPSPEDPETGVSTKDIVISENPTISARVYLPKLNNTTEKLPILVYYHGGAFCLESAFSFLHQRYLNIVASKANVLVVSIEYRLAPEHPLPAAYEDGWYALKWVTSHSTNNNKPTNADPWLIKHGDFNRFYIGGDTSGANIAHNAALRVGAEALPGGLRIAGVLSAFPLFWGSKPVLSEPVEGHEKSSPMQVWNFVYPDAPGGIDNPLINPLAPGAPNLATLGCPKMLVFVAGKDDLRDRGIWYYEAVKESGWKGDVELAQYEGEEHCFQIYHPETENSKDLIGRIASFLV

SEQ ID NO: 1850 - protein, 369 aa, Triticum aestivum
  unsure (1)..(369): unsure at all Xaa locations
MGSTAADMAASADEEACMYALQLVSSSILPMTLKNAIELGLLETLVAAGGKLLTPAEVAAKLPSTANPAAADMVVSXSARPCGRVSRLPCHRKNGVVTARGGQGGRFSRRKGPRPGXKDLTPHGGGFSKSGLGFMSRDKFLLGNWXIFQEFVGDGGIPFNKAYGWSAFEYHGRNVGFNRVFDEGMRNHSIIITKKLLELYKGFEGLNTLVDVGGGVGATVAAITAHYPAIKGINFDLPHVISEAPPFPGVTHVXGGDMFQKVPSGDAILMKWILHDWSDEHCAMLLKNCYDALPAHGKVVLVECILPVNPDATPKAQGVFHVDMIMLAHNPGGRERYEREFEALAKGAGFAAMKTTYIYANAWAIEFTK

SEQ ID NO: 1851 - protein, 365 aa, Candida glabrata
MAVTKTIVVPPGDHVGQEITEEANKVLNAIQECRPDKVNFKFDHHLIGGAPIDATGVPLPDEALEASKKADAVLLGAVGGPKWGTGAVRPEQGLLKIRKELQLYANLRPCNFASDSLLDLSPLKPEIARGTDFVVVRELVGGIYFGERKEDEGDGVAWDSEKYSVPEVQRITRMAAFMALQHNPPLPIWSLDKANVLASSRLWRKTVEETIKNEFPQLTVQHQLIDSAAMILVKNPTHLNGIIITNNMFGDIISDEASVIPGSLGLLPSASLASLPDKNTAFGLYEPCHGSAPDLPKGKVNPVATILSAAMMLKLSLDLFEEGEIIEQAVKKVLDSGIRTADLKGTNSTTEVGDAVAKAVRELLA

SEQ ID NO: 1852 - protein, 171 aa, Aquifex aeolicus VF5
MLGSLIVNFKLFSAGGAIMEVFSRSFKNGEEIPKVYTCDGKDISPHIGWEDVPEGTKSFVLIMDDPDAPIGTFTHWVVYDIPSQTRELLEDFPKVPEVSGIKQGINDFGRVGYGGPCPPRGHGYHRYFFKVFALSVESLGLPPGASRKDVELKMNGKILAQAHIIGLYKRD

SEQ ID NO: 1853 - protein, 336 aa, Pseudomonas aeruginosa
MGRRYLSGAAGAIRRRGSTCHCRQRRMRAFLRGAGKSRCQIAALPGRSRPMSDYQETLYQGYGQRFSIDNMLHEVRTEHQHLVIFENARMGRVMALDGVIQTTEADEFIYHEMLTHVPILAHGAARRVLIIGGGDGGMLREVAKHKSVERITMVEIDGTVVDMCKEFLPNHSQGAFDDPRLNLVIDDGMRFVATTEERFDVIISDSTDPIGPGEVLFSENFYQACRRCLNEGGILVTQNGTPFMQLEEVRTTAARTDGLFADWHFYQAAVPTYIGGAMTFAWGSTHEGLRRLPLETLRQRFRDSGIATRYYNADIHLGAFALPQYVLQAIGKQDND

SEQ ID NO: 1854 - protein, 94 aa, Zea mays
FSGGLNPFLWGTLSFANLAGQKASSPWATMFNSFCLALKGSLNLKAARELPDSLATLNIKFNSTVKNGFTPLKALFYKTKPSKVTTIRTSPPFF

SEQ ID NO: 1855 - protein, 217 aa, Triticum aestivum
LILEIHPTKGNKSWSSTAVAAARQRGRPPPGRSSPSPRAPPSPSSSSIPMQQRRGRPSGTDGSDFSYRMVVDSRYQRVADGRSRLARLMLVQTLHQVAGGALLLLSLSKGTEINKFAVLSLAAGLLAILLGEFGRRRTVAVFLRLYTSLSSIAIAFSVTCIIRSDLFVKITKQNTAAITSYEMFDVVRVALGVLLQLVVIATTTRLLQNMSPPKRTS

SEQ ID NO: 1856 - protein, 217 aa, Ophioglossum pedunculosum
RSGLLKKAYELSVLCDAEVALIIFSGTGKLFEFASSSMKKILERYRKYGGGLHDNSIATRDAEYWRNEVMRMKEHIACLEESQRHLLGENLVSLSVKNLQKLEHQLEIGANRIRTRKTQILLEQIQELQKKEHFLHGENNILKTKLEQLSTRQVPSLGTLIYTSTVTTTSTTSAGAGVEDNAGGHDSMNAMQKMTLHSNFQPATSAQNTLQLGYYPD

SEQ ID NO: 1857 - protein, 189 aa, Glycine max
  unsure (1)..(189): unsure at all Xaa locations
MASSMISSPAVTTVNRAGAGMVAPFTGLKSMAGFPTRKTNNDITSIASNGGRVQCMQVWPPVGKKKWETLSYLPDLGDAQLAKEVEYLLRKGWIPCLEFELEHGFVYREHNRSPGYYDGRYWTXWKLPMFGCTDALRVLXELQEAKTAYPHGFXRISGFDDGVPSAMALIVSGVQPPGLLSERRYAKLW

SEQ ID NO: 1858 - protein, 162 aa, Shewanella oneidensis MR-1
MTSTIYRHNAIDIQGNPTPLTQYQGKVILIVNTASECGFTPQYKGLEALYQEYKARGFVVLGFPCNQFGAQEKANEQGIKSFCELNFGVSFPLFSKIEVNGEHTHPLYQYLKKAAPGMLGTERIKWNFTKFLINRQGEAVARFAPTTKPEDIRDKIESLLNK

SEQ ID NO: 1859 - protein, 488 aa, Arabidopsis thaliana
MESGGKTNRQLRKAICVSTDEKMKKKRSPSVIVIGGGMAGISAARTLQDASFQVVVLESRDRIGGRVHTDYSFGFPVDLGASWLHGVCKENPLAAVIGRLGLPLYRTSGDNSVLYDHDLESYALFDKAGNQVSQELVTKVGENFEHILEEICKVRDEQDEDMSIAQAFSIVFKRNPELRLEGLAHNVLQWYLCRMEGWFAADAETISAKCWDQEELLPGGHGLMVRGYRPVINTLSKGLDIRLSHRVTKISRRYSGVKVTTEKGDTFVADAAVIALPLGVLKSGMITFEPKLPQWKQEAINDLGVGIENKIILNFDNVFWPNVEFLGVVAETSYGCSYFLNLHKATSHPVLVYMPAGQLARDIEKNSDEAAANFAFSQLQKILPDASSPINYLVSRWGSDINSMGSYSYDIVNKPHDLYERLRVPLDNLFFAGEATSSSYPGSVHGAYSTGVLAAEDCRMRVLERYGELEHEMEEEAPASVPLLISRM

SEQ ID NO: 1860 - protein, 351 aa, ASPERGILLUS NIDULANS FGSC A4
MPINNAAVRVSHLTLAIQDRPVTPPGPNEVLVQVISTGICGSDTHNWNNPNVSRELILGHESAGLRGLIVEIDSEVKDRHVGQRMAVEPGFACATRKCPDNQEDAFCLRGNPNTCANLKYCGLDPTDGTLQQYFTCKAHMAIPIPEEISWEEAGAIQPLAIAVQLARRAALSATAKVVGDGGCGPLGLLVIAIAKAYGVCKIVVFDIEQSRLDFALSYGEDIGVLSPKISENVEPLKFVFEFTSSVVREHNLGHGVDISVEASGADSSAQMALTILKPRGTCIQAGLGKRLTKPLFFLLIANELTLRGRSGSRRDVTRKRLSLYKVKSASEAVDYEDFSLDEGTGGVSGTV

SEQ ID NO: 1861 - protein, 89 aa, Zea mays
WSCLSSSSPLARLISRRGLAGAAYGHGSAKVPLWKDPVSPSKLKEEHFVLSSLSMWGVIFFCVLYFIVVIILSNFYYSIFYYFFFFLFF

SEQ ID NO: 1862 - protein, 422 aa, Thiobacillus sp.
MVTKQDVEAAYLLLLGRPAEPGAAEYWMENVYHTIDLVTGLMASDEFRINRLPRLVEAGLSLSDFAPAAAPKALADNGPPMQAALHRGIGQIEVVEINRPEALPGTVVVKVGASGICGTDLRAYRQDPNSQDLPHGHEFAGTIVEVGEGVSRDRIGKRVTADLFLNAMCGNCQFCISGHAYHCIDKALPFRSGGFAEYLRVRNAATFDLPDSIDDALGALVEPLAVSTHAIRLVGVQPGMIGVVIGAGTIGLCAIAAALHAGATNVFVVARHAFQGELARAIGATDILPDDIGSAINRIREVAPHGADFVIEAVGGGQATIDQATRFLAPRGRVGIVGETGPGIKVVEAYPALMKELTFLYSNCYGYLDGKHDFEVAIENLALDGERLRKLITHEFLIADAPLAFQTANNKKFSSVKVQLKP

SEQ ID NO: 1863 - protein, 450 aa, Salmonella typhimurium
MPTHLVWFRRDLRLQDNLAAAACRDASARVLALYISTPQWQAHDMAPRQAAFISAQLALQTALAEKGIPLLFHEVAFNASIETVKNVCRQHDVSHFYNYQYEFNERQRDRAVEKLPSVICEGFDDSVILAPGAMTGNHEMYKVFTPFKNAWLRLKEDIPPCVPAPKIRVSGLSTPLTPVSLNYPQQEFDALFPVEENAVIAQLRQFCAQADEYALRRDFPAVDGTSRLASLATGGLSPRQCLHRLLAQPQALDGGPGSVWLNELIWEFYRHLMTWYPALCKHQPFRWTKRVAWQENPHYFQAWQGETGYPIVDAAMRQLNATGMHNRLRMITASFLVKDLLIWRLGERYFMSQLIDGDLAANGGWQWAASTGTDAAPYFRFNPTTQGERFDRDGEFIRQLPALRDIPGKAIHEPWRWAKAGVVLDYPRPIVEHKQARATLSAYEAARKGA

SEQ ID NO: 1864 - protein, 1955 aa, Ustilago maydis 521
MSFHLDSFVNSPASADQAPAWQLHSSTDSYLEWDANPKSLIEQQPSSTTTSPPPSMSRLRSTSSTVATLAPGAQTPAEPPSTDSASVLSHNGHTTSPERSVSPSYFTKLYFHPPDRTTSATSPTITFTSAIEPSLVAHAQPSPLLPTDAQSASHLPSPARESHTGRRPSISAVGSSSTTSPLTTPLSPTLSSRSSAAGGGFFASLRPSSPGNLPISTSKPQDGDNLGKPRRPSSVFDHVGNVWERFGRKVHHTRTATSEHHSSSSSHTRRSASQASPPIGLTPESADPFDTARNSPSGSFISQASPSQSTTTDSECRTPATPGGEPPAQLSTPQPLPSAPAYTSVSALDSSVNAPQQEEAEELPYLAPESPRPQPQSFNTIGSPRIPSGQRSATSHRRTSSLLERVLIQVTDDNERFSVVDISGVDSADAIKERMFAKLHLFDADHSSFQLFRTEIGQSEATGPVVSDDALLVLCLQMGDDRGTLKFLVQQIAPPPNSTVRALPPPTSTIVSQRAINNIRRTSGTGSAPGQHLRTESQSSKSSLSDALVYPEMIGADAAHEGSNRNSGSSLTRSKAQTRRALPSAPPVDDLRSPTHSCISSTTQSAVQDRRSIASSGDGSANESWARHGASASDGAPSAIPTQRSSSVNANASAAQSSSSGSAGRHPSNLEDDRQRYDAEPGVNRSLHAPATGSSHWQERSDEGARESLRVQTTAQLPGLTLHNAKSMDDLHRPSQSASQPSTLTTQAEVRKQAGMDRDGRYPTPAIMRPSTAAPAGAGARESASSHRQYSSDALGSSRSPQEPTLGLDPRMLQRNRSAQAAIPSGQQLVNHGPTRMSSTPQIRSPPMQHVYLGQGQIDPRFNTQPPHSAHPMQAHPSNMVARPPYSAAPSFASQPAYQSQSFGQAALRPMGHGFVNEFGARAPAASVNFNTYHGHDPRMNASAMQGSLTPRPYSYYEQPSMHQQQPMYRPYAQPSLVTASPYRTREDPFTTRYFPASSSRQVSEFQMQAGRLEPGMTVQQTLRTQEAIWGHTSAGSPGQAYQSAHAHPPGPSYGPRDPRQPGQSNQYTGMQAYPNASAAPQMQQRPSYQGSAMPNLHHVPPPRPQSYPSAQPQPQPPRNAHDRHPAPPAGHSGPQMMPQSSGSSAGRAPMQPQQNQQLSQPSQPSQREQPGHAQAMPGSESHRRDPPVRTNASERSSGSSFSSQGSFQHGRPHNDDCNSRNSIEESFSAPTSARSSQSEAASAKPVNVEHRSSYADQERDLADDELEHVRPLPKLPHSSATTRTDAFKSSSCDASGATVGGSVRRSEDEDTLRAGEWAQLWRALDPKSDGTVSGTAISGSSGGDGDTVRAEPSTPGASRPQTKDGATLPISLEPPRIPSPSLAPEENGTVSSFGTFDDDETESGTWAQPLDSDVNAPRLPLRLDADSEALSDDHATLLPGQDTLLQASTRGTRGFSAASNSPKRPELRLTIDPAAGPTVMTWTASQASTNSPRASTSHLSSALNSGGITRSNSFARRDDDWAFRPPPEQLYENLDDFFPKHDLDKPLLDTTAGPESGLVSSPRAEASVPSVASVGAQQGLSQRSRHKKSIRLVAEDRKRILERADTRRAAQGAELSSGLVRRRSTKLWGTKVVEMTPGQELATPASATSAESPWSDTASTTGQPVFKWVKGDLIGKGTYGRVYLALNATTGEMIAVKQVELPRTASDREDSRQKGVVAALKSEIETLKDLDHPHIVSYLGFEETRQFLSIFLEYVPGGSVGSCLRKHGKFEESTIKSFLHQILEGLAYLHSKGILHRDLKADNILVDFEGTCKISDFGTVRRSDDIYGNVENMSLQGSIFWMAPEVVSLSKKGYSAKIDIWSLGCVVLEMFAGRRPWSDDEAVQAMFKIGAQRKAPPIPADVKLTKQAAHFLKNCFEIDPAKRPTAQRLLDHVFTVPVPGWQFSHSALCRSLHR

SEQ ID NO: 1865 - protein, 121 aa, Saccharomyces cerevisiae
MSNEVDRMDVDEDESQNIAQSSNQSAPVETKKKRFEIKKWTAVAFWSWDIAVDNCAICRNHIMEPCIECQPKAMTDTDNECVAAWGVCNHAFHLHCINKWIKTRDACPLDNQPWQLARCGR

SEQ ID NO: 1866 - protein, 169 aa, Rhizobium etli
LGRLVSIEVGKITSEGLGEVQEMIDICDFAVGLSRQLYGLTIATERSEHRMMESWHPLGAIGIISAFNFPVAVWSWNAALAMVCGNSTVWKPSEKTPLTALAVQALFEKALKRFVAEGGKAPANLSTLIIGGREVGEVLVDHPKIPLVSATGSTAMGRAVGPRLSQRFA

SEQ ID NO: 1867 - protein, 510 aa, Xanthomonas campestris pv. campestris str. ATCC 33913
MSADLLKALDLAPSNAGTYLGEGTWSQATGAGVLQPLNPTTNAVIADVQATTPQDYELIVARAQAAFKVWRTTPAPRRGEAVRLCGEALRAHKDALGSLVALEMGKSKPEGDGEVQEMIDIADFAVGQSRMLYGYTMHSERPGHRMYEQYQPLGLVGIISAFNFPVAVWAWNAFLAAICGDICIWKPSNKTPLTAIATMKICNAALKEAGFPDIFFLINDAGTSLSEKLVEDGRVPLISFTGSTQIGRVVAEKVARRLGRCLLELGGNNAIILDETADLKLAVPGIVFGAVGTAGQRCTTTRRLIVHESIYDNVLATLVKAYKQLDSKIGDPTDPANLMGPLNSRGAVEQFLESIAKAKAAGGTVEVGGTAIDRPGNFVLPAIVTGLKNSDAVVQHETFAPILYVMKYSTLDEAIDLQNGVPQGLSSSIFTQNLKAAEKFLSAAGSDCGIANVNIGTSGAEIGGAFGGEKETGGGRESGSDAWKVYMRRQTNTINYSDSLPLAQGIKFDL

SEQ ID NO: 1868 - protein, 497 aa, Arabidopsis thaliana
MDKKKNSFPDNLPEGTISELMQKQNNVQPSVIVIGSGISGLAAARNLSEASFKVTVLESRDRIGGRIHTDYSFGCPVDMGASWLHGVSDENPLAPIIRRLGLTLYRTSGDDSILYDHDLESYGLFDMHGNKIPPQLVTKVGDAFKRILEETEKIRDETANDMSVLQGISIVLDRNPELRQEGMAYEVLQWYLCRMEAWFAVDANLISLKCWDQDECLSGGHGLMVQGYEPVIRTIAKDLDIRLNHRVTKVVRTSNNKVIVAVEGGTNFVADAVIITVPIGVLRANLIQFEPELPQWKTSAISGLGVGNENKIALRFDRAFWPNVEFLGMVAPTSYACGYFLNLHKATGHPVLVYMAAGNLAQDLEKLSDEATANFVMLQLKKMFPDAPDPAQYLVTRWGTDPNTLGCYAYDVVGMPEDLYPRLGEPVDNIFFGGEAVNVEHQGSAHGAFLAGVSASQNCQRYIFERLGAWEKLKLVSLMGNSDILETATVPLQISRM

SEQ ID NO: 1869 - protein, 457 aa, Bordetella bronchiseptica RB50
MARPLDTLLANTLVFLEGQGLVPGSIGIADGRIAVIGSHGQDMPAARETIDCQGLWTLPGVIDPHVHFGFGSPETDFETESRNAALGGTTSVISFHRSADIRESFDAVRARAESQSCIDFGFHFGITSRLHVDTLDEISRRFGVSSYKLYMMYKGAAGLSKGFTDIDDGLLWGALNATRAIPGAVLGVHCENVEVIPWLRDPLRAAGRDDLAAWNEQSPDFLEAENVHRVCYFAGKTGTPVNIVHLSSREALREVRRHRHEGRAAPIYVETCPHYLFLDDRSPAGTYAKVNPPVRSAADIDAMWEGVCDGAITTIGSDHVPRKRATKDKDIWAASNGFPGTGMILPILLHEGYHRRQVPLETLMRVASGASARIYGMSAKGRIAVGNDADLVIVDPDLEKTVDPGELESHADYSPYEGMRLKGWPVRTLVRGRTVARDGRIADEARQTPGGRYLRRL

SEQ ID NO: 1870 - protein, 243 aa, Oryza sativa (japonica cultivar-group)
MMNALGLSVAATSTGSPFHDVCCYGAGIAGNIFALVLFISPLPTFKRIVRNGSTEQFSAMPYIYSLLNCLICLWYGLPFVSYGVVLVATVNSIGALFQLAYTATFIAFADAKNRVKVSSLLVMVFGVFALIVYVSLALFDHQTRQLFVGYLSVASLIFMFASPLSIINLVIRTKSVEYMPFYLSLSMFLMSVSFFAYGVLLHDFFIYIPNGIGTVLGVIQLVLYGYFRKGSREDSLPLLVTHT

SEQ ID NO: 1871 - protein, 431 aa, Glycine max
  unsure (1)..(431): unsure at all Xaa locations
SQRKRDKTKGRCGRKKKALIDRCSTLNTQEEPQNSSFCRVQGTTGTSQAISSGSYTTTTTTTTTSSGSGSSSINSKFSVSSGGQPYPNGQILPTSNLRIFTFAELKAATRXNFRADTVLGEGGFGKVFKGWLEEKXPQRAGSGTVIAVKKLNSESLQGLEEWQSEVNFLGRLSHPNLVKLLGYCLEESELLLVYEFMQKGSLENHLFGRGSAVQPLPWDIRLKIAIGAARGLAFLHTSEKVIYRDFKASNILLDGSYNAKISDFGLAKLGPSASQSHVTTRVMGTHGYAAPEYVATGHLYVKSDVYGFGVVLVEILTGLRALDSNRPSGQHKLTEWVKPYLHDRRKLKGIMDSRLEGKFPSKAAFRIAQLSMKCLASEPKHRPSMKDVLENLERIQAANEKPVEPKFRSTHAASRQGHQAVHHRSPRQDGQ

SEQ ID NO: 1872 - protein, 120 aa, Triticum aestivum
  unsure (1)..(120): unsure at all Xaa locations
MSDSEDHHLEYKADAGAFKTYPMQAVAIRKGGFLVIKNRPCKVGEXPTSDTGKHGHAKCHFVGLDIFNGKKLEDISASSHICDVPHVDRSEYXLIDISEAGFESPRTDNGCTMDDLKLPT

SEQ ID NO: 1873 - protein, 158 aa, Lycopersicon esculentum
MDLRLLGIDNTPLFHTLHHMMEAAGEDSDKSVNAPSRNYVRDAKAMAATPADVKEYPNSYVFVVDMPGLKSGDIKVQVEEDNVLLISGERKREEEKEGAKFIRMERRVGKFMRKFSLPENANTDAISAVCQDGVLTVTVQKLPPPEPKKPKTIEVKVA

SEQ ID NO: 1874 - protein, 317 aa, Desulfitobacterium hafniense DCB-2
FICLRHGYHGETVGALAVTDVEIFRDAYDPLTRRAHVVMSPDARQAARSESAADVATRALAELEALLRERAGQIAALIVEPLVQGAAGMAMYDPSYLEGARALCDRYRVHLIADEIAVGCGRTGTFFAWEQARGGDAVPAHAWPDFLCLSKGITGGYLPLSLVLSRPEIQRAFVADDIARSFLHSHSYTGNPLACRAALATLDLFESEDVLARNRERAQWLGTAMAGIAADPRVSHVRQRGMIWAADIDPQAAGANFAGRFHLAARERGVLARPIGHTLYVMPPYVFDAELANWLGEQLLDTLQAVLDPAEEARHAD

SEQ ID NO: 1875 - protein, 380 aa, Mycobacterium tuberculosis H37Rv
MSKKHTTLNASIIDTRRPTVAGADRHPGWHALRKIAARITTPLLPDDYLHLANPLWSARELRGRILGVRRETEDSATLFIKPGWGFSFDYQPGQYIGIGLLVDGRWRWRSYSLTSSPAASGSARMVTVTVKAMPEGFLSTHLVAGVKPGTIVRLAAPQGNFVLPDPAPPLILFLTAGSGITPVMSMLRTLVRRNQITDVVHLHSAPTAADVMFGAELAALAADHPGYRLSVRETRAQGRLDLTRIGQQVPDWRERQTWACGPEGVLNQADKVWSSAGASDRLHLERFAVSKTAPAGAGGTVTFARSGKSVAADAATSLMDAGEGAGVQLPFGCRMGICQSCVVDLVEGHVRDLRTGQRHEPGTRVQTCVSAASGDCVLDI

SEQ ID NO: 1876 - protein, 266 aa, Schizosaccharomyces pombe
MPANYQSVPQDDPSVPNLAQAPPAYSEYNESATENPAVDQFKNTTPVAECAKSIRMAFLRKVYAILTAQLFVTSLFGGIFYLHPAFSFWVQMHPWFLILNFFISLVVLFGLIMKPYSYPRNYIFLFLFTALEGLTLGTAITFFSARIILEAVFITLGVFVALTAFTFQSKWDFSRLGGFLYVSLWSLILTPLIFFFVPSTPFIDMAFAGFGTLVFCGYILFDTYNILHRYSPEEFIMSSLMLYLDFINLFIRILQILGMLQNNDNN

SEQ ID NO: 1877 - protein, 136 aa, Zea mays
MPMYSKSMNAAVRDVWASNFDEELSNLSAVLSRYPCICLDTEFPGAVHDSDMPRYMRGPRESYELVKRNVDDLKLLQVGIALSGPAGRFPIAWQFNIRGFDPALHPHAPASIAMLREQGMDFAMLNEFGIDPEDFA

SEQ ID NO: 1878 - protein, 491 aa, Pseudomonas syringae pv. tomato str. DC3000
MTTQPLNSHRVDPHTAQKFYIDGHWSAPLSPVSIAVVNPATEEVVAHVASGSAADVDRAVAAARAAFAGWSGTSPEVRAQVIGRIHELIIERKEELAQAISLEMGAAISSARAMQVPLAAEHVRVARDLLATYRFQTVEGGTAIEREPIGVCALITPWNWPLYQITAKVAPAIAAGCTVVLKPSELSPLSALLFAQLVHDAGLPPGVFNLVNGSGPEVGGAMAAHPDIDMISITGSNRAGALVAQAAAPTVKRVTQELGGKSPNILLPDADFANAVPPGVMAAFRNVGQSCSAPTRMIVPRNRLAEVEALAAQTAGTIVVGDPQLEHTVLGPIANEAQFHRVQAMINAGICEGAKLVCGGPGRVQGHEQGFYTRPTVFSEVDSSMRIAREEIFGPVLCLIAYDTIDEAVAIANDTVYGLGAHVQGQDLELARSVASRIRAGQVHLNYPSWNPMAPFGGYKRSGNGREYGVHGFEEYLETKAIVGFAPADLM

SEQ ID NO: 1879 - protein, 506 aa, Pseudomonas aeruginosa UCBPP-PA14
MIYAAPGTPGAVVTFKPRYGNYIGGEFVPPVKGQYFTNTSPVNGQPIAEFPRSTAEDIDKALDAAHAAADAWGRTSVQERSNILLKIADRIEQNLELLAVTETWDNGKAVRETLNADIPLAADHFRYFAGCIRAQEGSAAEINDSTVAYHIHEPLGVVGQIIPWNFPLLMAAWKLAPALAAGNCVVLKPAEQTPLGICVLLELIGDLLPPGVLNVVQGFGREAGEALATSKRIAKIAFTGSTPVGSHILKCAAENIIPSTVELGGKSPNIYFEDIMQAEPAFIEKAAEGLVLAFFNQGEVCTCPSRALVQESIYPAFMEEVLKKVRAIKRGDPLDTETMVGAQASQQQYEKILSYLDIAQQEGAEVLTGGSVEKLEGNLASGYYIQPTLLKGHNKMRVFQEEIFGPVVGVTTFKDEAEALAIANDTEYGLGAGLWTRDINRAYRMGRGIKAGRVWTNCYHLYPAHAAFGGYKKSGVGRETHKMMLDHYQQTKNLLVSYDIDPLGFF

SEQ ID NO: 1880 - protein, 64 aa, Triticum aestivum
TDDGYVTLLTESGNLKDALKLPPDNVLFGQIKTGFFYGKDLILFLMSPMGEKQICPFKEIGGGK

SEQ ID NO: 1881 - protein, 126 aa, Malus x domestica
EPMVIGHECAGIVDKVGSEVKHLVPGDRVAVEPGISCAHCQQCKGGRYNLCPDMKFFATPPVHGSLANQIVHPADLCFKLPENVSLEEGAMCEPLSVGVHACRRANVGPETTVLIVGAGPIGLVSV

SEQ ID NO: 1882 - protein, 140 aa, Triticum aestivum
  unsure (1)..(140): unsure at all Xaa locations
TLSLSRSSTSLKLDTTSEPSTGSQQPAAMDMSLEHSSSASSSSTTERGGTAWPWPPKRPAGRTKFRETRHPVFRGVRRRGNAGRWVCEVRVPGDRGTRLWLGTYFTAEAAARAHDAXMLMLRGRSAACLNFRDSAWLLSV

SEQ ID NO: 1883 - protein, 181 aa, Arabidopsis thaliana
MASSMLSSTAVVTSPAQATMVAPFTGLKSSASFPVTRKANNDITSITSNGGRVSCMKVWPPIGKKKFETLSYLPDLSDVELAKEVDYLLRNKWIPCVEFELEHGFVYREHGNTPGYYDGRYWTMWKLPLFGCTDSAQVLKEVEECKKEYPGAFIRIIGFDNTRQVQCISFIAYKPPSFTEA

SEQ ID NO: 1884 - protein, 105 aa, Brassica napus
MSAINITNVSVLDNPAPFVSPFQFEISYECLTSLQDDLEWKLVYVGSAEDETYDQTLESVLVGPVNVGNYRFVLQADPPDPSKIREEDIIGVTVLLLTCSYMGQE

SEQ ID NO: 1885 - protein, 159 aa, Triticum aestivum
  unsure (1)..(159): unsure at all Xaa locations
MAPTVMASSATSVAPFQGLKSTAGLPVSRRSNGASLGSVSNGGRIRCMQCWPIXEGIKNSETLSYLPPLSTEXLLKQVDYLIXRSKWVPCLQFSKXGSSSREHNASPGXYYDGRYWAMWNCLFPEHRPTQVINEVXGVQEGYLTLCRINRHNSACVNTP

SEQ ID NO: 1886 - protein, 181 aa, Arabidopsis thaliana
MASSMLSSAAVVTSPAQATMVAPFTGLKSSAAFPVTRKTNKDITSITSNGGRVSCMKVWPPIGKKKFETLSYLPDLSDVELAKEVDYLLRNKWIPCVEFELEHGFVYREHGNTPGYYDGRYWTMWKLPLFGCTDSAQVLKEVEECKKEYPGAFIRIIGFDNTRQVQCISFIAYKPPSFTEA

SEQ ID NO: 1887 - protein, 1017 aa, Geobacter sulfurreducens PCA
MPILITALIYLIFFLSGATALVYEVVWVRKLSLVFGGSHLAVTTVLAVVMGGLALGSWLFGRRVRTTRNLLRLYGALEIGIAFFALLFIALLNLYSLMPAYSFESLTEHSHQLPRVALLTLRIVLAAIALIVPTTLLGGTLPVLAAFMVRGRRAVGRGVAYLYALNTFGAVAGCFGAGFYLLGRFGVSNTMAGAITVNVLLGIACFALQGPAARYLEAGEDEAPAPLSAVTLPEEKARIGLVVWGIGVSGFCALGYEVLWTRVLGIVIGTNVYGFTLMLAAFLTGIAAGSGAYGLWARRLRPPEEGGCPVSKLIGGFGVVQIVIGLSALLVTILIRDLPTRVFFLQDLFLSQSTDLFRARQFANFALVFSYLFIPAFFMGVAFPLAGTLDACRRRKVGHAVGEVLTCNTIGAILGTVVSGFVLIQVFGIERSLYLLATVNAGFGLLILARLLRGTPRRLATAGTVLAVVGVMAVAGTMPRIWDAKYFAIYRTNQPEVFRTPDLIAEAKRHTDVLYYAEGIQSIVSSIRIRGGYQAFLRNGRIEASDHNESLQNQYALGHLPMLLHRNPRKVLVIGAGSGITLGAVSLHPSVSEMTLAEVEPKVLGVTRSFAAYNHGVLGDRRLRVAFSDGRNYLATTGERYDVITADPIHPWLSGAGYNYTREYFELAAEHLRAGGIMCQWLPLYDLSADDLRSVVRTFRQAYRHVLVWMTQGDAMLIGSNAPILLSEDELAARIAVPAVAADLARVQMGSATDLLSYFVMGTAGADRFSRTGRINTDDNLYLEFSVPRSTGKSALPEVNVNALARHRESVLAYLDDSVPPADRLARENRWMRLDRAAALALEARAIFLGGRYDSPRFGLLVSELEGNYAAFAPWRFLRSEYLEEMASSPLPLDQLALALLDESGRRVVVNVAAVMSRVSRELTVVDFVDSDERVIIGQADINGRGRDGSAKRLAAEVMEAVRLAYNEELSGAEARGKPLPDQAEFVRRMREIIATMTGRQHGNPYPAQGRPIKESA

SEQ ID NO: 1888 - protein, 159 aa, Capsicum annuum
MSDEEHHFESKADAGASKTYPQQAGTIRKNGYIVIKGRPCKVVEVSTSKTGKHGHAKCHFVAIDIFNGKKLEDIVPSSHNCDVPHVNRTDYQLIDISEDGFVSLLTENGNTKDDLRLPTDDTLLSQVKGGFEEGKDLVLSVMSAMGEEQICAVKDIGKN

SEQ ID NO: 1889 - protein, 158 aa, Picea glauca
METTFYSILGVNKDSSSAEIRSAYRKLAMKWHPDKWSTDPSSSETAKLRFQQIQEAYSVLSDDTKRALYDAGMYEPSEDMDAFCDFLDELSSLIATVKVQSNKDDELLQLQEMFTKMLEEDWFSTDNFEAFKEISSQHSDDKPENGQDHEPYGSVDDL

SEQ ID NO: 1890 - protein, 477 aa, Bordetella pertussis Tohama I
MKQHFIDNASVPGSSGERIPVIDPSTGQEFDSIARGNAADIDLAVQAARRAYEGAWGRLSAAERGRLMLALSLKVLEHRDELTALESRDCGKPLKQARADVIAIARYFEYYGGAADKLHGETIPYQQGYTVLTLREPHGVTGHVVPWNYPLQIFGRSVGAALAAGNACVVKPAEDACLSLLRVAELAAETGFPAGALNIVTGYGHEAGDALTRHPGIDHISFTGSPRVGVLVTQTAAERHVPVTLELGGKSPQIVFADADLDALVPVAVNAIVQNAGQTCSAGSRLLVERGAYERVLERLGAAFAALRAGPAQSDLDCGPLIRKTQQERVRGFLDLARGDGIATVAQGRIVPEAPAEGYYQAPTLLRDVPVDHPLAQEEVFGPVLAAIPFDDEADAVRIANATEYGLAASVWTRDGGRQLRIARKVRSGQVFINNYGAGGGIELPFGGVKASGHGREKGFEALYGFTVLKTISIKHD

SEQ ID NO: 1891 - protein, 487 aa, Sinorhizobium meliloti 1021
MTFHAKFSGYADPALHAAGLYIGGKWQSGSGITVLDPSTGNLLAEVADASIEDAQRAVDAADAAAAGWRATPARQRSEILRRWYQLMTQHAEELATLIALENGKALADARGEVAYAAEFFRWYAEEATRIPGEFRHTPSGSHNILVDHEPIGIAVLITPWNFPAAMATRKIGPALAAGCTVILKPASETPLTAYAMARLGEEAGVPPGVVNVLTTSNPGGITNAMLADPRVRKLSFTGSTGVGRVLLAEAAKSVVSCSMELGGNAPFIVFDDADLEVALDGAMIAKMRNAGEACTAANRFYVQAGIHDAFVAGLTARMKSLKLGPGYDPETQCGPMITQNAVRKIDRLVSEALAAGARATTGGKPLTENGYFYPPTVLENVPVNASIAREEIFGPVAPVYKFESDDEAIRLANNTEYGLAAYIYSRDLKRAMKVGKRIETGMLGINRGLMSDPAAPFGGVKQSGLGREGGVTGILEFMEPKYFAVDY

SEQ ID NO: 1892 - protein, 294 aa, Glycine max
MAHANPMIFVVGILGNLVSFCCFLAPVPTFYRVCKKKTTEGFQSLPYVAALFTSMLWIFYAYIKTGEILLITINAFGCFIETVYLVIYITYCPKKARFFTFKMIFLFNVGVIFLVVLLTHVLAKERTARIELLGWICVVLSTSVFAAPLSIIKVVIRTKSVEFMPITLSLLLTVSAMMWMAYGILLRDIYVTLPNFVGITFGTIQIVLYLIYRKNKPVKDQKLPEHTDDVANDENVNTAVSGENRRANATGFVDIEIGEKTQVQEQADKTQDQQAANARDQTEHNNNSIITREG

SEQ ID NO: 1893 - protein, 507 aa, Petunia x hybrida
MVLSESNFLLCLISISIASVFFFLLKKTSRSYKLPPGPSGLPIVGNMFDLGDLPHIKMEGMRNQYGPVMWLKIGAINTLVIQSAQAATAFFKNHDANFLERVVVEVNRVCNYLQGSLALAPYGNYWRMLRRICSMELFVHSRINNSESIRRKSVDKMIQWIETHGKKEQGQGIEITRFVFLASFNMLGNLIMSKELAADPDSTTASEFFDAMMGQVEWSGTPNISDVFPLLRWLDIQGLRRKMKRDMGKGKEILSTFIKERIKEQENGRAKGTDFLDVLLAFEGKGKDEPAKLSEHEINIFILEMFLAGTETSSSTTEWALTELLRNPETMARVKAEIAEVVGPNKKFEESDIDKVPYMQAVVKETFRLHPPLPFLLPRKATQDTKFMGYDVPKGTQIFINAWAIGRDPECWHDPLDFIPERFIGSKIDFKGLNYELIPFGAGRRMCVGVPLGHRMVHFVLGTLLHEFNWELPHNMSSKSIDMTERLGTTVRKLEPLKVIPNKCKLS

SEQ ID NO: 1894 - protein, 499 aa, Escherichia coli
MTEPHVAVLSQVQQFLDRQHGLYIDGRPGPAQSEKRLAIFDPATGQEIASTADANEADVDNAVMSAWRAFVSRRWAGRLPAERERILLRFADLVEQHSEELAQLETLEQGKSIAISRAFEVGCTLNWMRYTAGLTTKIAGKTLDLSIPLPQGARYQAWTRKEPVGVVAGIVPWNFPLMIGMWKVMPALAAGCSIVIKPSETTPLTMLRVAELASEAGIPDGVFNVVTGSGAVCGAALTSHPHVAKISFTGSTATGKGIARTAADHLTRVTLELGGKNPAIVLKDADPQWVIEGLMTGSFLNQGQVCAASSRIYIEAPLFDTLVSGFEQAVKSLQVGPGMSPVAQINPLVSRAHCDKVCSFLDDAQAQQAELIRGSNGPAGEGYYVAPTLVVNPDAKLRLTREEVFGPVVNLVRVADGEEALQLANDTEYGLTASVWTQNLSQALEYSDRLQAGTVWVNSHTLIDANLPFGGMKQSGTGRDFGPDWLDGWCETKSVCVRY

SEQ ID NO: 1895 - protein, 510 aa, Petunia x hybrida
MVLDWCYFAWFSIFLVPFFFLVLSRKKSCSHRLPPGPPGWPIFGNLFDLGTLPHQTIAGMKLRYGPVVLLRIGSVKTIAILSAKVATEFFKNHDACFADRKIIDTMLVHNYNKSSLVLAPYGTYWRVLRRICTVEMFTNKRINETAHLRQKCIDSMLQWIDKEAKSMKKGSGIEVARFIFLASFNMMGNLMLSRDLVDPESKKASEFFTAMEGLMEWSGQPNISDIFPCLRWLDIQGLRQKAGRDMGKAIEVASTFVKERLKEHKEGEYKKDFLEVLLEFEGSGKDEPAKLSEHQINIFILEMFIAGSETSSSSVEWALAELLCNPEAMTRVKAEINEVVGSNRKFEESDIDNLHYMQAVVKETLRLHPPAPLLVPRRAIQDTSFMGYDISEDTQVFVNAWAIGRDPECWEDPWAFKPERFLNLSSKTTDFKGQNFEFIPFGAGRRMCAGLPLGNRMSHLLLGSLLHAFDWELPSNVTPKSMDMKERMGMTVRKLQPLQVVPIKNEHILY

SEQ ID NO: 1896 - protein, 205 aa, Arabidopsis thaliana
IQKIDDSTSRQVTFSKRRKGLIKKAKELAILCDAEVCLIIFSNTDKLYDFASSSVKSTIERFNTAKMEEQELMNPASEVKFWQREAETLRQELHSLQENYRQLTGVELNGLSVKELQNIESQLEMSLRGIRMKREQILTNEIKELTRKRNLVHHENLELSRKVQRIHQENVELYKKAYGTSNTNGLGHHELVDQFMNPMHRLGCS

SEQ ID NO: 1897 - protein, 203 aa, Methanosarcina acetivorans C2A
MQGLVLYMNRKDGAVFLVFLLAGVLLISGCVKNERAETPADEQSETSNTGKGDENMDIQIIKVFSSAFESNGTIPRKYTCNGENINPPLEFTDIPEGTESLVLIMDDPDAPMNPFTHWIVWNIEPVAKIEEDSIPGIEGINNFREIGYGGPCPPSGTHRFFFRVYALDRQLELKAGAGRKELESEMIGHIIAEGELMGKYGET

SEQ ID NO: 1898 - protein, 299 aa, Zea mays
CCFSFPTVLSSVTSDGFLQCLSDNIPVGLIYTQGSSNFTDVLVSSVRNPRLFTSATVRPLCIITPVDASHVQAAVRCGRASGVRLRVRSGGHDYEGLSYRSERPEVFGVVDLSNLRAITVSADDDERPVPPTAPSAWVDSGATLGELYYTVAKNNPELAFPAGICPTIGVGGHLSGGGIGMMMRRFGLSVDNVLDAKLVNASGDLVDRAAMGEDHFWAIRGGGGESFGVVVSWKVGLVKVPSTVTAFNIVKTVADQGAVDALTKWQDVAPGLPTDITIRVIIQGQRATFQSLYLGRGTE

SEQ ID NO: 1899 - protein, 334 aa, Thermus thermophilus HB27
MAYRICLIEGDGIGHEVIPAARRVLEATGLPLEFVEAEAGWETFERRGTSVPEETVEKILSCHATLFGAATSPTRKVPGFFGAIRYLRRRLDLYANVRPAKSRPVPGSRPGVDLVIVRENTEGLYVEQERRYLDVAIADAVISKKASERIGRAALRIAEGRPRKTLHIAHKANVLPLTQGLFLDTVKEVAKDFPLVNVQDIIVDNCAMQLVMRPERFDVIVTTNLLGDILSDLAAGLVGGLGLAPSGNIGDTTAVFEPVHGSAPDIAGKGIANPTAAILSAAMMLDYLGEKEAAKRVEKAVDLVLERGPRTPDLGGDATTEAFTEAVVEALKSL

SEQ ID NO: 1900 - protein, 104 aa, Zea mays
  unsure (1)..(104): unsure at all Xaa locations
AXDGCEKTTEGHTXKELEDMKKRLKEIEEEASALREMQAKVEKEMGAVQDSSGTSATQAEKEEVDARSIYVGNVDYACTPEEVQQHFQSCGTVNRVTXTDRQIG

SEQ ID NO: 1901 - protein, 109 aa, Oryza sativa (japonica cultivar-group); identical to SEQ ID NO: 366

SEQ ID NO: 1902 - protein, 230 aa, Triticum aestivum
  unsure (1)..(230): unsure at all Xaa locations
MGERVKGTVKWFNVTKGFGFISPDDGGEDLFVHQSAIKSDGYRSLNENDAVEFEIITGDDGRTKASDVTAPGGGALSGGSRPGEGGGDRGGRGGYGGGGGGYGGGGGGYGGGGGGYGGGGGGYGGGGYGGGGGGGRGCYKCGEDGHISRDCPQGGGGGGGYGGGGYXGGGGGGRECYKCGEXGHISRDCPQGGGGGGYSVRVRARVRVSGIAFRAADRLSSEHNTLSMLQ

SEQ ID NO: 1903 - protein, 230 aa, Thermotoga maritima
MGSDKIHHHHHHMKIFLDTANLEEIKKGVEWGIVDGVTTNPTLISKEGAEFKQRVKEICDLVKGPVSAEVVSLDYEGMVREARELAQISEYVVIKIPMTPDGIKAVKTLSAEGIKTNVTLVFSPAQAILAAKAGATYVSPFVGRMDDLSNDGMRMLGEIVEIYNNYGFETEIIAASIRHPMHVVEAALMGVDIVTMPFAVLEKLFKHPMTDLGIERFMEDWKKYLENLKK

SEQ ID NO: 1904 - protein, 446 aa, Bacillus subtilis subsp. subtilis str. 168
MAYDMVIKGAKAVTPDGVIEADIVVQNGVIAEIGSDIEASGTEIIQADGKYVFPGVIDCHVHFNEPGREDWEGFETGSQMMAAGGCTTYFDMPLNCIPSTVTAEHLLAKAELGRQKSAVDFALWGGLVPGHIEDIRPMAEAGAIGFKAFLSKSGTDEFRSVDERTLLKGMAEIAAAGKILALHAESDAITSYLQMVLANKGKVDADAYAASRPEEAEVEAVYRTIQYAKVTGCPVHFVHISTAKAVRLIREAKQEGLDVSVETCPHYVLFSHDDLRQRGSVAKCAPPLRSRQSKETLIETLIAGDIDMVSSDHSPCRPSLKREDNMFLSWGGISGGQFTLLGMLELALEHQIPFETIAEWTAAAPAKRFGLQKKGRLEAGCDADFVLVSMEPYTVTRESMFAKHKKSIYEGHTFPCSISATYSKGRCVYNDGEKVTEIDGALVVPS

SEQ ID NO: 1905 - protein, 361 aa, Glycine max
MASQLLRRTFGSRILANPRAFSFSSAASTPIRATLFPGDGIGPEIAESVKQIFQAADVPIEWEEHYVGTEIDPRTQSFLTWESLESVRKNRVGLKGPMATPIGKGHRSLNLTLRKELNLYANVRPCYSLPGYKTRYDNVNLITIRENTEGEYSGLEHQVVRGVVESLKIITRQASLRVAEYAFHYAKAHGRERVSAIHKANIMQKTDGLFLKCCREVAEKYPEITYEEVVIDNCCMMLVKNPALFDVLVMPNLYGDIISDLCAGLIGGLGLTPSCNIGEGGIALAEAVHGSAPDIAGKNLANPTALLLSGVTMLRHLNLHDKAEQIQKAILNTIAEGKYRTADLGGSSKTTEFTKAIIDHL

SEQ ID NO: 1906 - protein, 381 aa, Haloarcula marismortui ATCC 43049
MSDDLKKGLEGVIVAESELSVIDGDAGKLVYRGYTIEDLAKGASYEEVLYLLWHGHLPNRDELSEFKQAMVDARGVDDDVISTVRQLAEADENPMAALRTAVSMLSAFDPAPEDAEPTDEMVNLETGRRITAKIPTIIAAFTRIRDGKEPVEPHDDLDHAANFLYMLNGEEPDDVLADVFDQALVLHADHGLNASTFSAITTASTLSDVHSAVTSAIGTLKGPLHGGANQDVMEMLKEVDDAESDPLDWVKNALDEGRRVSGFGHRVYNVKDPRAKILGERSKELGEAAGTLKWYEMSTTIEDYLMEEKGLAPNVDFYSASTYYQMGIPIDIYTPIFAMSRVGGWVAHVFEYIEDNRLIRPRARYVGKNTDETEFVPLDER

SEQ ID NO: 1907 - protein, 330 aa, Methanocaldococcus jannaschii
MLKESEDIEGIAIEGPWLEDDISLEEIIKKYYLKIGFQASHIGKAIKIWKHIEEKRKKGDEITVFFGYTSNIVSSGLREIIAYLVKHKKIDIIVTTAGGVEEDFIKCLKPFILGDWEVDGKMLREKGINRIGNIFVPNDRYIAFEEYMMEFFEEILNLQRETGKIITASEFCYKLGEFMDKKLKSKEKEKSILYWAYKNNIPIFCPAITDGSIGDMLYFFKKYNKDEELKIDVANDIVKLNDIAINSKETACIVLGGSLPKHSIINANLFREGTDYAIYVTTALPWDGSLSGAPPEEGVSWGKIGAKADYVEIWGDATIIFPLLVYCVMK

SEQ ID NO: 1908 - protein, 405 aa, Triticum aestivum
KTGCLLIKAVAVHLPPPGCGVDGVERPRAPPQPPAHHLFDETPLSSDPMAEASGDGSMEDRISALPDDLLIHVLSHLRSREAVQTCVLARRWRYLWRSVTCIDVSFEEFEDRAAANDLEREEMFKMFVNHLLILRERVDLKEFHLEYSLVVGVSRLSAKSDEANLWIRHALQYKAQTVKIGNHSEPLQLLPSVFTSTYLKRLHITNAQLILGFFDRLRKGCPALEYLFLSTCDIEDLDIFSDTLKVLILSDAIGFSFSFEHDAQVSISAPSLISLSVKECPSGARLPILKNMSSLETASVLLSEGDITTCDADGIRQFLGGLSGVRSLDFYYGDRQLEVKNNHGWCPTFNNLTNLTLDRWCMHADLYAMIVFLQNSPNLKKLTLKLNEPRYHNEVVSAVIGELEG

SEQ ID NO: 1909 - protein, 323 aa, Pyrococcus horikoshii OT3
MVKSVTDKIKFYEFEGGLSVFKKYGVPIREEDLEEIRKMDAILFGATTTPFDVPRYKSLIITLRKELDLYANLRIIPNFKLRKEIIIVRENSEGLYSGEGAYDSNKVVDFRIITRKGAERIAKFAVKLAKDRSTFLTFVHKANILESDRFFRKIVLDIARKEDVKVREEIVDSFTIKLVKDPWNLGIILSENMFGDILSDLATIHAGSIGIVPSGNYGEDIALFEPIHGSAPDIAGKGIANPIGAILSAAMMLDYLGLDGSIIWKAVGRYVRRGNLTPDMEGRATTLEVTNGIISEIYRLDEYEIDEVWRDEVRLGRILLEIS

SEQ ID NO: 1910 - protein, 107 aa, Hyacinthus orientalis
GDIISDLCAGLIGGLGLTPSCNIGEGGICLAEAVHGSAPDIAGKNLANPTALLLSSVMMLRHLQLNDKADRIQNAILKTIAEGKYRTGDLGGTSTTSEFTEALCDNL

SEQ ID NO: 1911 - protein, 361 aa, ASPERGILLUS NIDULANS FGSC A4
MVQQMPPQGGSRKISFNVSDQYEIQDVIGEGAYGVVCSAIHKPSGQKVAIKKITPFDHSMFCLRTLREMKLLRYFNHENIISILDIQRPRNYESFNEVYLIQELMETDMHRVIRTQDLSDDHCQYFIYQTLRALKAMHSANVLHRDLKPSNLLLNANCDLKVCDFGLARSAASTDDNSGFMTEYVATRWYRAPEIMLTFKEYTKAIDVWSVGCILAEMLSGKPLFPGKDYHHQLTLILDVLGTPTMEDYYGIKSRRAREYIRSLPFKKKIPFKALFPKSNDLALDLLEKLLAFNPTKRITVEEALRHPYLEPYHDPDDEPTAPPIPEGFFDFDKNKDALSKEQLKSKYLAPIDSISYATIN

SEQ ID NO: 1912 - protein, 437 aa, Beta vulgaris subsp. vulgaris
SSNLDLRSELQELIPEQQERLKKIKKEFGSFQLGNINVDMVLGGMRGMTGLLWETSLLDPEEGIRFRGFSIPECQKLLPAASAGAEPLPEGLLWLLLTGKVPSKEQVDALSADLRKRASIPDHVYKTIDALPITAHPMTQFCTGVMALQTRSEFQKAYEKGIHKSKFWEPTYEDCLSLIAQVPVVAAYVYRRMYKNGQVIPLDDSLDYGGNFAHMLGFDSPQMLELMRLYVTIHSDHEGGNVSAHTGHLVGSPLSDPYLSFAAALNGLAGPLHGLANQEVLLWIKSVVDECGENISTEQLKDYVWKTLNSGKVVPGFGLGVLRKTDPRYTCQREFALKHLPDDPFFQLVSKLYEVVPPILLELGKVKNPWPNVDAHSGVLLNHYGLTEARYYTVLFGVSRSLGICSQLIWDRALGLPLERPKSVTMEWLEKFCKRRA

SEQ ID NO: 1913 - protein, 167 aa, ASPERGILLUS NIDULANS FGSC A4
MPDASSELIDEIGIVKIFRCFSPDIETARICIKVPSTREGLIACRTLEMAGVRTLATTLFTFVQAALAAEVGCTYIAPYVNQLKVHFESGFVDPQKLLPLCVSAQNYYEAIGVRTQVLPASLTSTDEIFALAGAHHITIALSLLQQLSLPLYPRLCSTLNRRVQVPK

SEQ ID NO: 1914 - protein, 398 aa, Ustilago maydis 521
MIEDIVDTLSVPLLGACASHVSRPTLMPSLASRSGPPAASSSDPKTSSSSTEKVAKSVGSASPLRSSPNRPYALSDFEVVETLGTGTFGRVLLVRLKDRDVADRSAYFALKVLAKTDVIKLKQVSHINSERCILTKVDHPFLVNMIASFQDSKNCYMLMEYVVGGEIFSYLRRAGHFSADVARFYISTIVLAIEYLHSNKVVYRDLKPENLLIDSNGYTKITDFGFAKEVEDRTWTLCGTPEYLAPEIIQCSGHGSAVDWWSLGILLFEMLAGYPPFYDPNPILIYEKILAGNLVFPEEIDPLSRDLISSLLTADRSRRLGNLRGGANDVKNHPWFHGVDWKALQEGRILPPIVPYLGRPGDTSNFSKYEPARPSAMPGLYGADSGHHDLYADLFPDF

SEQ ID NO: 1915 - protein, 293 aa, Enterococcus faecium
MKGMERTMTIQWFPGHMAKARREVSEKMKYVDIVFELVDARLPLSSRNPMLDQIIQQKPRLVLLNKADLADPQQTKLWQEYFRKQGHLALAITAQESKGIKGLVPAAKEALKEKRARDAARGIKPRAIRAMVLGIPNVGKSTLMNRLVGKKIAQTGNKPGVTKGQQWLRLGNELELLDTPGILWPKFEDEEIGKKLALTGAIKDQLVHLDDLAIYGLDFFARYYSGRISDRYGLSIEQEEKLAPELLMDITAKRGYKEDYDRGSELVVHDIRQGKLGRYTLDRCEEMEQKSDD

SEQ ID NO: 1916 - protein, 208 aa, Helicosporidium sp. ex Simulium jonesii
MQCASLFRYKTPVIQANSVSCNAPPSLVHMPRPRPASSRVRLAPLSANAKPLETRTVGNSTNIRWHKASVAREDKERLLGQRGCVLWFTGLSASGKSTVATETERQLHERGHLTLLLDGDNVRHGLNCNLGFSAEDRTENIRRVGEVAKLVAESGVMALTSFISPYREDRDAVRERVGSGSFLEVFLAVPIELCEERDPKGLYKKARC

SEQ ID NO: 1917 - protein, 362 aa, Zygosaccharomyces rouxii
MSKNIVVLPGDHAGQEIAQEAIKVLEAISEVSPEAKFNFQHHLIGGAAIDATGSPLPDDALAAAKKADAVLLGAVGGPKWGTGSVRPEQGLLKIRKELQLYANLRPCNFASESLLDLSPLKPQHAKGTDFVVVRELVGGIYFGERKEDEGDGVAWDSEKYTKPEVQRLTRMAAFLALQHNPPLPIWSLDKANVLASSRLWRKTVEETIKNEFPQLKLNHQLIDSAAMILVKSPTQLNGIVLTSNLFGDIISDEASVIPGSLGLLPSASLASLPDTNEAFGLYEPCHGSAPDLPKGKVNPIAMILSAAMMLKLSLNLSKEGEAVEKAVKQVLDSGVRTGDLGGSNSTSEVGDAIAKAVKEILA

SEQ ID NO: 1918 - protein, 161 aa, Zea mays
MDGRMFGLETPLMVALQHLLDVPDGDAGAGGDKAGGGGPTRTYVRDARAMAVTPADVKELPGAYAFVVDMPGLGTGDIKVQVEDERVLVISGERRREEREDAKYLRMERRMGKFMRKFVLPDNADMDKISAVCRDGVLTVTVEKLPPPEPKKPKTIEVKVA

SEQ ID NO: 1919 - protein, 345 aa, Triticum aestivum
  unsure (1)..(345): unsure at all Xaa locations
PLPASFPPPTAYSSKSRHHPTNATSPAHRIAHALPLPSVLRSHFTLADGPASTAAGSPDEIAKLFPCLYGQPSAAVVQSAEPVETKPLKIGVVLSGGQAPGGHNVICGIFDYLQERAKGSTMYGFKGGPAGVMKGKYVELTTDFVYPYRNQGGFDMICSGRDKIETPEQFQQAEDTVNRLDLDGLVVIGGDDSNTNACLLGEYFRGRNLKTRVIGCPKTIDGDLKCKEVPTSFGFDTACKIYSEMIGNVMTDARSTGKYYHFVRLMGRAASHITLECALQTHPNVALIGEEVAEKKETLKNVTDYITDVVCKRAELGYNYGSCXLYPEALIXFIPEIQKLIAELN

SEQ ID NO: 1920 - protein, 364 aa, Glycine max
MGKGGMSIDEHGEGKEENMAAWLVGMNTLKIQPFKLPTLGPHDVRVRMKAVGICGSDVHYLKTLRCAHFIVKEPMVIGHECAGIIEEVGSQVKSLVPGDRVAIEPGISCWHCNHCKHGRYNLCDDMKFFATPPVHGSLANQIVHPADLCFKLPDNVSLEEGAMCEPLSVGVHACRRANIGPETYVLIMGAGPIGLVTMLAARAFGAPKTVIVDVDDHRLSVAKSLGADDIVKVSTNIQDVAEEVVQIQKVMGAGIDVTFDCAGFDKTMSTALSATQPGGKVCLVGMGHSEMTVPLTPAAAREVDVVGVFRYMNTWPLCLEFLRSGKIDVKPLITHRFGFSQKEVEEAFETSARGGNAIKVMFNL

SEQ ID NO: 1921 - protein, 401 aa, Thermosynechococcus elongatus BP-1
MAVPAVEFPWEEQPMSAFATPITPAPIPDNISLTELIDKYFTAYNSARLREICQLLSQRVFKPEVTVGLSLSGAMTPTGLGISALAPLVRAGFVDYIISTGANLYHDIHYALGMDLYAAHPFVDDVQLRKESKIRIYDIIFDYDVLLETDAFLRQVLRSETFQRRMGTAEFHYHLGHYVRELEVQRGQPHSCLLATAYECGVPIYTSSPGDSSIGMNVAAIALEGSKLIIDPAIDVNETAAIAYFAREAAGGKGKSAALIIGGGSPKNFLLQTQPQIHEVLGLEERGHDYFIQITDARPDTGGLSGAVPSEAVSWGKVDPQGLRDTVVCYTDSTIALPILTAYCLNRCQPRPLKRLYDRRGEMVERLQQLYLQAQLQHKVKELPTEAPVATYPCGTPIRRP

SEQ ID NO: 1922 - protein, 496 aa, Crocosphaera watsonii WH 8501
MVSTRTKKDVPIWQPLKVIARSFSPYWIACIPLAAIITIVWNKAVVAESVELITAEGNSEAIAQLQGTLNAIWVLIAAILVIFMNAGFGMLETGFCRQKNAVNILSKNLIVFALATLAYWAIGYSLMFGGPENPFIGFGGWFLSGEPATYGLDPFPAGLPISVAFLFQAAFAGTAATIVSGAVAERIKFTDFIIFSLLLVGISYPITGHWVWTGNGWLGSIGFSDFAGSTVVHSVGGWAALMGAAILGPRMGKYVEGRPQAIPGHNMSIATLGCLILWIGWFGFNPGSQLAADEAVPYIAVTTNLAAAAGGVAATFVAWFKDGKPDLSMIINGILAGLVGITAGCDGVSYFGAVIIGAVAGVIVVYSVSMIDSLLKIDDPVGAVSVHLVNGIWGTLAVGLFNTESGLFYGGGFAQLGSQIVGIVAIGAFTAIFSGIVWTVLKSTMGIRVSPEEELEGLDVGEHGMEAYAGFLKETDTFSGSGSSTADEDVTTGAGI

SEQ ID NO: 1923 - protein, 10820 aa, Neurospora crassa
MIPRDQRRRSPERERRRRADRRQSREQLAAAALAAAAVGQTAAKTAGPSSTHRSRANSSTSSSAVTSSDEDSAPKNTGWGFRSFFSLASSKKVRKRRSFRKKNYSSSSIDSNLAYGGYQSRSSLESQRGARRRSGPQRKISQTYSQHSHHDKEYQQHNQDQYRDHPQYEQPQHEYQRPEYVPQDQYAHSDQTTPRPGQPTQHPHAQPEPYYRHQHQQYHQQQPHAYQHPAQPYHGQPEYDPELFTPDGRPNLARTTTDEEIIELGRKISDLARASNLRDLERAGKQRPSQLVGAATAISNFRRQNPRRNGRRGLAPSKSSKRDEQSDDDQGWDTASDSDSDSDSGDNAEEASASDSDLAYGSSPQYSDEKLSSSPAPAPAPPPPTISPQKPYIRNKAIDPSKFGPVNSLHGLVTPLNGFRPTEDVLPPRQSKPWLSRFENDPLPDYPTPTDELDTPTQMHYPIATPDLRRFDAVTSPTLVSGSPLITSRPVTVAIQAPKPRVPVSTRALEEHPMPRQRSADGRLMTADSALAKSMGNAAGKHEVIRDDTPPSNYRQHRSRAQSNVSAHPSHTSHHSHALSHTSRTSHTSQVPVHVQVPLPTTHDLEFDDWHDFEDRNTRLASDVPQFTDPAAAGVAATLIGTALFQDRYRRDDEEDRNLDPNHVLAEYKQRVQQEEEQRRKAEEAEKERLEKERQEREARAAAAIKREREAREAQEAAEREAREKKEAEERAAAVALELAAQRQREEREAREALEKMEREAEERAAAAAAAQQELEALEKARREAHEREVQEAIEKVRREAQEREVQEAIDKARREALERDAAAAERERQEREHLEKVRREAEDLAIAARRELETRETALEAVAKEARRLRDEADYREQYERRVREAREMQYKEERRMYDARYRADRENMIIDVEPRRRSTSRQTRDESPEEKRSNAGKETEREEHHRPKREPVTIINERDVPKDEPKPKVEEPTRSVSEKKRESMGDTLDPKPKKPSKEERRAKRAETLRLLAEMQKELELEKERARKLAELEAAEQRQEKPKDEEPRKSSQPAVLEPSKSPKDQVSHDSKAAPAPGTSLSKSPSGVIDPFQFQVPDDAFATPVLATPARPLTPQVYTVPEPDFSPPKRRQLTRALTDAELEIRERVTRRDSFEIQQRQEEIRRSRNASEQPTTKDADKATIPETDKETLIAEEPERERSRSHNRAGSRVRESEPLRDATEEPERARSWSRQYSYVREAEPTPDPQTEANKWYRDYVSSRREERLRSSSPARSVVDKYDDSVFGPPTPVIVTAEPTIITAEPSWATADPADDGKPKKGKYAEPDADVRIDHVILPRDLHRFLRPAEDHSSLHAPTGQPMFSSRDPSCERERPLLNLVLPTPAPTPTPERERRERARQAVRESEVEHEESRLAPVAVDESKKPNYILNARGEIEIIAPTPKDEDTESVKSDGWVEPVADTGLTHVVVDRSRQAAVEAIKRALQPKKERKASIAWGTLAGAVLQKVAEDRKAAAEQKAEVPAAEEKSLAPEVEEKVEVLPAPVVEEKQPEEQKPREAEPETKPADVAAPTKTEVQPDVELPRQSPHPDPEPHLEPHHEATPVPAITIDEPEGPKATEEPKYEEAKEELKEEEEQSALPEGESHEEKQNEATRQILDESASSPIKPKRKLPKSLAEPSIFSPYRPTFSDNFADVVCGEHPNPEPHADTYTWRREAMATQSSIGDEWESILRKAEIGEDETTTNPTGTFNPDNREPPDRLGKEFSFEVVERENSQTNPSDENARESEKASTEQNGVADRRPSNEFIEFLKNQTNNSTSDRKHDHHIIATTEMKGNGEDEYFLGNAGTHGAGAGSAEDSEAATASDSKDAEAQSLPRPNATQASMDSTPVAEYKKEEDEEEKLYGSNAGSDSAPEPTQLQHTDSRFIDPEVLVHRPFTPAIDPQYGDLLPLPPYPTLTGPGYRYLADLPSPLDFDLEQLPALPESRPSTPPPTSSSSGTAFKAAVAAMMGTQSLIRRQRGHTRSRSALDGTAPVRVPSQTAVPIQFRLMGKKRAGSVHSLPPSEAWGQSPASRPSSAHGDAAAASEGKFPVRSSRPRPTSWEGSMREIKPLYLVERNAATATAASVLAPVVDTEEALPPPESFELPEDDDLDLLPALPDSAPESDAGSPVVAPQMESLEKDVPSEAVLPALEDTFTPETVRLPVDEDLDLLPALPESDAGSPIVTPVNLSTDLPVDEDLKHAEIPSPASTEKALPAPETVELPVDKDLDLLPALPESPTIESAVPVSLPAVAPEVVEEVPAAEIPQVVEAPKEFEIPAPETVELPVDEDLDLLPALPESGLSSPTLREPASPVSVGEDDALSTPAEDVLPVPRSVNLPEDIKLPADEELDLLPALPDSVASSPTTDTVPVSLPISASDVAKDTEEMPKAVIGVPTTVAPEVLAPEAVRLPVDEDLDLLPALPDSLATSPTTEIMPSLPFVEEVVEETSKVVEREVSVPENIKLPVDEDLDLLPALPDSVATSPTTETTPSLPILASEEATHAPKEIEVAPETITLPADEDLDLLPALPASGNTSPERSTSPVLLEKAASPVIIPEPETVALPVDEDLDLLPALPESGPASPTKEHASLATSPVVAPATEKEVDTEVELVSEVSRGLEVPEPETISLPVDEDLDLLPALPESGPASPTKEHASLATSPVAAPTLLEEIEAEVELVPAVDDEIVKELVSMPKPKPETVSLPVDEDLDLLPALPESGPASPALEHVARSASPAVPVLEKETIPEARSEGVREIIPEPENVALPVDQDLDLLPALPESGPASPTKEHASLATSPVIEAVVEKEPVVEEVPEVIPKLLPLPVDQDLDLLPALPESSPASPTKEHASLAASPIIEAVVEKEPFVEVVPDYLPLPDNEDLDLLPALPESAPVSPIKEHASLAPSPITEVVVEKEPVVEVVPELLPLPTDQDLDLLPALPESAPVSPAKEFAFPVSSPTEIPQAVPDVVPVDISKTVPEVVPELLPLPTDQDLDLLPALPESGPSSPVQEEFAAPVAQPTDISVGTEVEHPSKDTEDVLSITIPEPESVPLPAESDDGLWALPSLPQSRAGSGYASPVTVDIPTEEVSSPVKATEETSELPVSINPETVRLPSDDGLWALPSLPVSHEGSGYASPGAAMPTLGVEPPMEDLKEYFPDHYDQEVVDEVSYKQPLKIETDLPLDSLPQLPADEDLDLLPALPDSRGSSPDLAVSLPVEEYQEVPQAEESEKQLDLSELPALPVDEDLELLPGLPESRNESPEPQVETVPAVIPEQAEEEKEKEKEQEQDLSKLPPLPADEDLDVLPVLPESRNESPEPEVSLPVNTPEQADLSKLPALPVDEDLDILPALPESRNDSPEPQPSLPKVISPEVLPLPTDEDLDLLPELPESRRSTPDQETSLPVAVPQSPIAKEAVKDITEVPVAEEDLSYLPALPVDEDLELLPALPDSPAAGNFPEEEETQTTWQPEEFTQPAWEETQPTQMSDISEEDFPVPAAVKGDEVSRDLADLPALPESRSGTPLSDLPALPESRSSSRSEDMETAPSLEDPSELPPLPESREDSPEPKSPLPDLGAQPAKESLAKQIAPSQPWNESETQDEPLPASNELIVGHVRRDSSEAAHPSDIYEKPSSHNQAKSPMLIGNNDPNEIDYKLAETIYEDMCDEDDASTVAASDAPSFLSGANAEQKEQIAKALAGDSEATSSLSPESSFRVLQYLKKRDAAMKQGQTYEEPEEVVPGPSSQYEDEEEQVPQEIEDALESIEKQSKKAKGVSFESSDTPTEKRDVPEDVPADHTTSDQSTPRQELRIGIPGPSSRVANLEAVNDEVENIPDVEAQKDELSKTSTDKDKHTESPSNQESSGEPQPANITQEDSILGGGLVAEPERQRPMRVASPENQWGTLGDLDDLDDEDDDDVSEYSPGGTNLKRHSLTRLPTFPGVTAFLGRNFRSNSAPSPSDVPVQDERNYYSSDEREMLGEEQQQQQEELSGDELEKRLERVKMEEEEEVEKVEGADESQTGPEKLAETEPEPTLEGVKGEPSTTEKKGKKKKQKKKRNKGKGKADVEPEAPLPTTQADLETTLAPETEEPKELELEAEPASKPKKSKKKKNKKNKSTAASMLKGPTISDTAKPTDGPGVDRHSTWPMVKSDAVPSEKKTAPGSESTEVPPPQGSTANENTTLPEEIPLPRSRDLSPCASEEPTETATIEREPEPEIPATKHDEATTVDERQTATNELDGNGSVTPTPQQHISDGHQGKPQGDAEQGVQTAPPESSNTTEPLTSGAEQPISPQADTPMDMQPAEDPVPVEAALEGSTQQGESQTDDKGKPEEEPKIKEQLATVSPDLVSPTSDTFTPRLLRRSYPKKEKGKAGKMSNPASPTMGAGWGIASPPAMSLDKALEAADPFADGEFERRMRTVSANREAERSAKIAEKEKLERALFLQRRSTFDVGDSPTSSHTSVVGSTHSSGAAETGSNAEERPIYALKRASTDRAEKKKKLAAEKKRSKKSDWPDAWPEEFDEEATMPQEPGHPSMWPELHGRDLHGRASPSPIRGRSGYRTPTPLGQHIEVGRASGQTGDDSANHVGVLQESDRRLSAGGNSVGPDSSRSRYNNMSDPFTIGGGPKDIPPPEPIPEVPSKPIPDVGSDTATPTSEANKELGGTVRPSGKKGRKRRNSSLAIATDKEEDVDDNNSEAEQGDLDTQPSGSAPGKKTRRNRRGRKGKDKSTPSSPSVDTEGTEDQEASDGDEEPSSSGSSQDANAGAAGDASGKKRKNRKKGSQASSGLMSPPLEPNAEVAQLHAQLAQLTDLVQQLVVEKTRNSSADQGRSRRNSSVTKGNPKIRRTSSGGGGGDGEAHYDSDGNSIHDEDEELDDDDDDDAETGAADETTKAKRFMGVPYRRGSKSKSDKGEKGDKAKDKHQQQVGEDPTSELEHAVLKTTPREEDEQTGNSPQIRDVTAADNERTQQELFAIDNVNVNVIKNESRDSEAGVEFALRQQVVIERQGDEHANEQSGAEPEEQLQQGRGGGRSGRGQTPGPVQVPAVSQQAGQEQGAPSDERLVEDEGRAQSGTDSRDGVRGLGAGGRGDFASAEAGHDQSRHDGHEEFGQAGLQEAEGVVGGWGDGSSQTRNGDGCGDGVDQSGDCVDHATEGVVGHDEEGVLGHDSYHVQATSELGSAVRDRVDFRIQQAEHDEESRVGNDPGSVEATVEHGLDGRALGRTQDEHGLGVQELQHDGQVPGPVEDTGADQPGTEHRSGLAGDGQHGNQSARESSAETRSVAGSAPAAEAGNDEASVDGHEPSRLTTTAGHGGAPRIRTGSGEGEAQDARPADVRYDVKVSLDINGHGYADSGFGVQQRRTGRAGAVETGIWVGVWIKLDSSPPFAALVGKEQDQQDDEDARAGRIHKEGQAPGVGGDAAGDEQTGFVRVVSGNGHQQAQQDGSDDLRDGHVQAQEEYKPRDPSPGHGLETGNWIVNAATTAVAVPGETGSQPGAQVENGQLQQGDDAGADQGQERQDSYAQPPRAGHSDADAHGIVGERALERVEAVELEQQPVPRPTDARGEAEQVADENGQSHVCAKHPVGQQDQCLPGETGKLTPGDNDQCQLDGADGRDGRALASQPSLESDDDYHHDDDRQEGKVKDVLQERGHPGHGEQPSILEQSETQRRALVPDAAASDTTAARDAEAGTSQLWTGRFPTGISTGNIIGSGVALPASDVIGCPSSSSAGGIGVSAGNVVRVPERGDTVVRETTKGSGDGEYDESAQTGDVSENKDGDEYRESQGLEGRVGDDGDGRGEEGEEGDEHERQGELESGAEGHEGGGGHGNVYEEGQEGEGQGGLEDALSETDGSENAVGGLGVKDGVEEVTVSPEEVELPASPEVNPEEEVELPCSSPSILLLSDAAGEQLDEAVIKPIERDFDQQLEKDNSLNPQEIGLPPSPPPAMSEIEPIEHIIISQQFQTDPSSHAVNPEDVQLPASPSPSAEVAESENEPIEQGFNQRSPRHAMNPEQEVWSTLSDAGDLTESEPAVEQAKQTTVEPLSPATTTADRDQDQNPDKVWIPPLSPHVPNRMSGISLVLIHMLQFIGQQSHIPLFTPEAAQHEEPGDLVLPTSEAATTNLPSSSSPLLPCRSSRSSMSGASEELPSETTSPNLVSTTTAATIATTTTTIAATATTSSAAAVNTASSQATEASTTTDEHAPSQRAAARSSFSSSSSSLRMTEPEEVELPPSPSSPAPPHHTAPRPEEVELPASPVTTVTVNVNLNEAHHHHQFAQDIDVDNTKPKGDQHVEDDPKSDSELSLGQHADQRGQHPISEIRPTDIRLPLSPKVTPEGVVELPASPDSESTPIIIDEQLQLQPLHSSHGDDEQQLSSQSPPPKVTTTADTHAQPSSSLESPAVLMAVPSSLDMPPPPEDIELPPSPTDGVEHREEKPIVAEIHERVKSPVSGHQDVEIPTSREHSPAHSPAVEVSKSEVPTAAAEPEVSEVEDLASQSKQKTLAEELEEFDGSGSPSPEVDNRDAELVSFTGLTKDAELSSAHSSPMDAPTDVELPASPSPKPETDDQDKDLPITTESHEAIANVTIPTWTSPTVSPKVKPENIELPPSPQRPQLLPSPNIVPGYQFSPEPISDDERLPLSPDDEFEDDDDDDGSPVDVEQYERSFSDDPQEEGFASSPDEATVDHVEVQHSPPSQGSPAFASSSPRISPAQVELPASPVESPNFAPASSSPSPKSTPEDAVLSPALEAAMEFTPSSPVERSVPSTKDTTMFEERGVSSASASAPAPAPEEENVQFAPAPSSEVQHPASPKISSEDVGLPKSLLPEAEHEEMELPITAAAAQLPEDVELPMSPAETEPKIHELPITKEIPTAHELPTSTLPKISPEEVELPMSPEVEVPTPAHEVIQSLGDQSDNIHKVSSSPKIAPADIELPTSPENNVLDSPKTLLPGDSSLPESHLTEAQVEKDMDLSTAAEQDDQIVDEQSDNDLEVSTSHKIVPEEVELPRSPSSPVPVEGLDVNEIQHLHSSQIIPPHVQRADSTWGEAELEVELPSSPLTEIAHKEDELPASPVKEAATEEVEVPASPVKEAASKDIEVQKSPSPAAELDVTEIQHLHSSQIIPPHVQRAVSPAVIHEEVQSPTLPDVVPEEVELPASPVKEAALEDIEALRSPSPAAELDVTEIQHLHSSQILPPHIERAVSSNTVPEDVKAPASPSAETAPKEDVLPRSPSPGAELDVTEIQHLHSSQILPPHIQRADSTWGEVEPEEVELPKPPVEEIVHEEVHVPASFKVVSGEVENPASSPSSPKIAAEEMDIPRSPSPVDNLDVTELQHQHSTQIIPPHTQRSVLPTAQTQAVPEEIQLPASPLEQFTPEEVELPRSSSPVEAKLDIVEMQHEHSAQILPLYVQRADSTWGEVDPEDVDLPTGPLKEIMPAEAELPGSPSPVEDELDGAKLQAAHEEVELQASEPTSPKITPEEIEVPRSPSPFDESKITELQHLHSAQIIPRNIHYATSSSGSPKIIPEEVELPASPVEEVDVDELQRFHSSQIISPHIERSASPTIEEVVPEEVELPVSPVEQVDIEQLQHLHSRQIIPPHIQHPASPSPNAELLASPKVTPEEVELPASPELVPQDIELPASPIDEAEQAELPILTKESEASVDQQIDDLEEEEDARSAALELPSSPEVKHEVQPEEMELPLSPVLKPEEVDLPASPEVVPEEVELPVSPVDDLADVQHLPQPDDVPEEAVQENVNLEIPSSPVIAPEEVELPLSPKTAPEEVDVPASPVVEVEEQPATVSEPSERSINLEADIAPQEEIEPPFSPVAKPEDIQLPASPEVIPEDVELPLSPIVELEHQLPIEPVNFELPSSPKLKPEDLELPSSPEIIPEDVELPASPVVELADEQLPVEPEQSAQAIEVSEEDTKLPSTPIVKPEDLELPASPEVLAQDVELPPSPVTLSEDVELPPSPMVDLEHEQLSVEPVDLSDVQEQQVEEQLDKHTAPESSPVLLPKEVELPTSPATKSEQEPIEPVRQSFDSDLYYDAVDSKGKQPATDAEELTQQGDAAKTDSAQKWEMVDNVDDVDDLDSIDGADSEISENGLLTEAPTSKQPNQPKPTRKREEVAAAIERSEDDAPIIPRDPSSTTTTTGDGHHADILSREAEDNVDLRRSAGGSPVPTSTSIAAATAAAGAAALAAATVNELLTTTTKNDEPELSETVEVHPAVKGAINRGFDEYDYATALSPTTVGLGLIEDAPMDLYPTDGPSPKLLSASTFPLEEAGDDDGDYFNNVELPEGAIFEELPSEAEEPAHEHASHFTHDPPSEPEEHEVKKPRESIEETQGFETLFAPRTPMPYASTRETLVKESPKPTTPSPSAEQTRQPPKQAEPVRHKRIRSTEPARLSNEALAASLSPRAKSSSVRNSWPAFTTTGKAKALAASFLESSSVNRGSSPVTPRFPPSASSMHQQQPPVSVLLKEQTQRQSRELAANYLETFADDRKVRSKSRPRQPSFFGGHTAPNAANRVVPVPVDLDSLGETIVPEKEEPARPPSVSSVDSMGSPTTTHGQAQDQSMALEMAVSYLDDEGEDVGAVPMVVTPGVEMEITPSPESSPGLQPEEEEITREREAEVKVAQEPEPEPEPESEPAAEDDEHDASPEWGRGMSLPSVEIQPATPRAVPEEEEEEVESLFDIPVQHAHAPHEVETLSTVMEESEPTDEEEEPTSALAHTHEAPVVDKSEHDERPLSPEQLPEEYHDTPSVEIDVDELQRLHSRQVIPPNLQRQVPSSPKIAPEEIELPSSPELHETSRDTPADIDTAELQHSGQILPPNLQRYIAELQRLYPSQIVPPDLQRQVPSSPEVKLEEVELPSSPELHEASQDTPGDIHITELQQLHSRQIIPPKLQHPASSPPQIKPEEVELPASPALREEFQDTPADINITELQQLHSRQILPPNLHRHIAELQRLHSRQILPPNLERHIAELQRLHSGQIVPPNLQRQASPSPPPQVKPEEVELPSSPKIPEEPQDTPADINVVELQQLHSGQILPPNLQRYIAELQQLHSRQILPPSPQRQASPLPPPQIKPEEVELPSSPTLKPEDVELPSSPVEETIPVVATGLVAAGLALVSEVSKDNRDHSVEEEEEEENDSAPAPLQPVEDHNSRHVNDEFEDFYRPATPKVYPEEIELPASPEIIKPQDIELPVSPRVLTGEVELPAWPLNEPEDVQVVSDSKSEADEQDMTTPIVESHVAKPEEIELPSSPAIVPEDIDLPSSPRMVPEEVELLSSPANELEDAELSSDSDSEADEDSTPVVEAHATKPEEVELPSSPAIEARNFQLPSSSVEPENAELASDSDSESDEDSTPIVEAHVTKPEEAELPFSPQLVPEHIELPSSPVNEPEDAGFASDSDSSSEADATKLEEIKLPSSPAMVPEEIELPASPTVQPEQIEVPSTPEPEHEHEFHSEPEQETTIDPLLDSEAEYEDEEDDDYDPLADLLPSPDMSPAQHHERYERELPHPHPLMMHPVDYSAPQQHGYEESEEVHTPVYTEPVEFWHSPELRYHCSPELRSADHQEFASFPEVNPEDVQLPASPDYGAEEEEEEEDGGLSRDAPADDDEWESESGSESENYDRDDEHQVHQAQSVAIVAGTVAVLGGAALVANSLKKEERAEEQIDSENDEEREETESEDDEEKDRSEDEDDQVKPVTITRSDDKRGDSEDEESDGEPGERDGRSGDDLEDEEAGEEDVEDVHGGDNEGLPEPSLNRQDSETVPKAIREGAPMPWAMKSNRREDSSSPPVVEQRRFSFPDDIAEEEAFTVSRSNTAIEGGGDTNHGEGPAGSHATSDQSHQHQQTPSAPMSTISDYAHSYNSLPTLQEEDWATDDDRNRHDKDGDSPVNKANITGLFRYGTPIMDPNRDSVLTVAARGSPQMSRYAVFNEQYHQQQLERQAQIQEEDLRERGVDLRDFANSPSAGSDRTETGPSSPQRTTETPKVQEPVPESSEDNVEVVKEQHSSEKARKETPQDKPEQHIPKTLPGLGVALRPTGALRSVSDISKQLQSALTGQSPSPVARPIPSNTGVARLRTPEPLSATNNNNNLSLRPDSPGSSSISISSTSRSHTSTPPLRRMDKRATGNLRSLSSGSQQDAAAKSAFLGTLAEGEGGAPADAEGPGSRSSIGPVSPTTPSRAQPPRPRSDTSGSSPTAAPAAAPHQSQAPATPSPPRPNTSRATSANSVIPGAAAPALALGTSPVAHGGDDNTNNNNLVDKDKSKDKQQQQQQHKQAVATPRALSVTSATPVANEGRTRSKGSMDVPDVYDGLGEGRLGSPRSPARPPSLRKRHSAQLIDLEARLAQLMAENAALQKAKNDAEAELSQRNADLASILADKNVEIENLQREIQETQETCNRLEETYEGLKTSTSAIAVKHNETVRALEEQVRKAAEELAAAQGNHEQEYTKAIAEKDAQIAHLRAQLNAQTAQIRELQEQIESQQIARSPEPTATDDFLDLHDVDYFDQRLSQLCAHVQQWVLRFSKFSDMRHCRLTSEINDEKLIDRLDNAVLDGSDVDVYLADRVRRRDVLMSMTMTMIYEFVFTRFLFGMDRDQRQRLKYLEKQLSETGPVHAVRQWRAVTLTLLSQRRNYKAQRDRDTEAVVQAILDALDKILPPPSDKEKVILDQLRRVVREAVKLSIEMRTQRAEYIMLPPLQPEYDESGELVETVSFNAALMNERSGDVDVPSAEELERQRATVRVVLFPLVIRKGDDWGRGDDEVVVCPAQVLVQRPRKQRSAAGGRVVSGQKAREPVAQGMKGGDEMMGGMGSQV

SEQ ID NO: 1924 - protein, 459 aa, Zea mays
MMEAEKNGNILMQKYEVGKLLGQGTFAKVYHARNIETSQSVAIKVIDKDKIFKVGLMEQIKREISVMKLVRHPNIVQLYEVMATKSKIYFVLEYVKGGELFNKIAKGKLREDASRKYFQQLVSAVDFCHSRGVYHRDLKPENLLVDENGNLKISDFGLSALAESRRQDGLLHTTCGTPAYVAPEVISRKGYDGAKVDTWSCGVILFVLMAGYLPFQDSNLMEMYRKIGKADFKCPPWFPSDVRKLVSRILDPNPRTRMPITKIVECFWFKKGIDNKLIRKNIEMKGKVSALTDVNVVFSSTGIGSNNNKLVDVEQDVAKITNLNAFDIISLSEGFNLSGLFEESEKRKEARFTSSQSASTIISKLEDAATCSKMTIKKKEGGVLKMEGANEGRKGVLSIDAEIFEVTPAFHLVEIKKNNGDTLEYENLFKQDMKPALKDIVWAWQGESKDQQAKDHNQS

SEQ ID NO: 1925 - protein, 441 aa, Brassica napus
MVGAKPIENGSDGGASTGLLHGRYELGRLLGHGTFAKVYHARNVTTGKSVAMKVVGKEKVVKVGMVDQIKREISVMRMVKHPNIVELHEVMASKTKIYFAMELVRGGELFAKVAKGRLREDVARVYFQQLISAVDFCHSRGVYHRDLKPENLLLDEEGNLKVTDFGLSAFTEHLKQDGLLHTTCGTPAYVAPEVILKKGYDGAKADLWSCGVILFVLLAGYLPFQDDNLVNMYRKIYRGDFKCPGWLSSDARRLVTKLLDPNPNTRITIDKVMDSHWFKKSSTRSRNEPVAATPEAEEDVDVSVHKSKEETETLNAFHIIALSEGFDLSPLFEEKKKEEKMEMRFATSRPASSVISSLEEAAKVGNKFDVRKSECRVRIEGKQNGRKGKLAVEAEIFAVAPSFVVVEVKKDHGDTLEYNNFCSTALRPALKDIFWTSTTPA

SEQ ID NO: 1926 - protein, 131 aa, Glycine max
  unsure (1)..(131): unsure at all Xaa locations
ARNSARAHCGHLYTPITKYAYHYQLLFARGFPQNXSRLTDTGGPXVARSTARAVARDAAGANCLAPSSIAALHVHALANGNQTIAADPDTIIPKMEVTPLTMPISSSHDPLHGLVIDLKPAHHIMLLGMMT

SEQ ID NO: 1927 - protein, 56 aa, Triticum aestivum
PTTPNKNHTFDSVDASASLIYPMQCSALRKNGFVLIKGRPCKIVDMSTSKTGKHGH

SEQ ID NO: 1928 - protein, 235 aa, Zea mays
  unsure (1)..(235): unsure at all Xaa locations
MARGREGEVRNLVLGKYELGRMLGQGSFAKVYYGRDLRDGQSVAIKVIDKAHLRQTDGMVEQLRREISIMRMVRHPNVVGIREVLASRQRVFVVMEYARGGELFAKVARGRLTEDAARKYFQQLVAAVAFCHSRGVAHRDLKPENLLLDEEGRLKVTDFGLAALPEQLRHDGLLHTQCGTPAYVXAPEVLRKRGYDGARADMWSCGVVLYVLLCGFLPFQHDNYVKMYQKIFKGE

SEQ ID NO: 1929 - protein, 335 aa, Malus x domestica
MADESVAGSADFPVKRPREEEENGSAAAASAVSMEPDGGKEPDSVSAVIPGWFSEISSMWPGEAHSLKIEKILFQGKSDYQNVMVFQSATYGKVLVLDGVIQLTERDECAYQEMITHLPLCSIPNPKKVLVIGGGDGGVLREVARYASVEKIDICEIDKMVIDVSKQFFPEVAIGYEDPRVTLHVGDGVAFLKAVPAGTYDAVIVDSSDPIGPAKELFEKPFFQTVANALRPGGVVCTQAESIWLHMHIIEDIVANCREIFKGSVNYAWTTVPTYPSGVIGFMLCSTEGTAVDFKHPVNSIDESKRPLRFYNSEIHTAAFCLPSFAKKVIDAKAK

SEQ ID NO: 1930 - protein, 106 aa, Glycine max
  unsure (1)..(106): unsure at all Xaa locations
ISSPTITRCXHSQAGMRTPFTVLKYMASFPTIKTNNDITSITTNGGRVQPMHVMTPLLMNKFKTTXYLPNLDDAQLAKEVXYLLKKVCIPCLEFELDHRFLFLEPN

SEQ ID NO: 1931 - protein, 146 aa, Brassica napus
MAIATEKEVSDVSAVAQKRWNLGDFDIGKPLGRGKFGHVYLAREKRSNHIVALKVLFKTQLQQSQVEHQLRREVEIQSHLRNPNILRLYGYFYDQKRVYLILEYAARGELYKELQKCKYFSERRAATYVASLARALIYCHGKHVIH

SEQ ID NO: 1932 - protein, 228 aa, Glycine max
MYSPGYRIAPEMIKPKPTVLIGSSGAGKTFTKEVVETMASLNEKPLILALSNPTSQSECTAEEAYTWSKGKAIFASGSPFDPVEYEGKLFVPGQANNAYIFPGFGLGLIISGAIRVRDEMLLAASEALAAQVSQENYDKGLIYPPFSNIRKISAHIAAKVATKAYDLGEFFENVFISSNTVLVILFFYILNPDFYVWWTGLASHLPRPKDLVKYAESCMYSPGYRSYR

SEQ ID NO: 1933 - protein, 335 aa, Malus x domestica
MADEIVVGSADLPLKRPREEEENGAEAAASAVSMETDGGKEPDSVSAVIPGWFSEISPMWPGEAHSLKIEKILFQGKSDYQNVMVFQSATYGKVLVLDGVIQLTERDECAYQEMITHLPLCSIPNPKKVLVIGGGDGGVLREVARYASVEKIDICEIDKMVVDVSKQFFPDVAIGYDDPRVSLHVGDGVAFLKAVPAGTYDAVIVDSSDPIGPAKELFEKPFFQTVANALRPGGVVCTQAESIWLHMDIIEDIVENCREVFKGSVNYAWTTVPTYPSGVIGFMLCSTEGPAVDFKHPVNSIDASKRPLKFYNSEIHTAAFCLPSFAKKVIDAKAK

SEQ ID NO: 1934 - protein, 237 aa, Zea mays
MAMSDLTATVIPKPDGADDESVEIREVWADNLEEEFALIRDIVDEYPFVAMDTEFPGIVCRPVGAFRSPADYNYATLKANVDMLHLIQLGLTFSGPRGVDARRFAELLMSSGVVLNDSVYWVTFHAGYDFGYLLKILTCNSLPDTQAGFFKLMKIYFPTVYDIKHLMKFCNSLHGGLNKLAELLDVERVGESHQAGSDSLVTSCAFWKLKDSFFAGSTEKYAGVLYGLNAENGVSAH

SEQ ID NO: 1935 - protein, 292 aa, Malus x domestica
MINFTPLLSYMSSSVGMQGEAHSLKIEKILFQGKSDYQNVMVFQSATYGKVLVLDGVIQLTERDECAYQEMITHLPLCSIPNPKKVLVIGGGDGGVLREVARYASVEKIDICEIDKMVVDVSKQFFPDVAIGYDDPRVSLHVGDGVAFLKAVPAGTYDAVIVDSSDPIGPAKELFEKPFFQTVANALRPGGVVCTQAESIWLHMDIIEDIVENCREVFKGSVNYAWTTVPTYPSGVIGFMLCSTEGPAVDFKHPVNSIDASKRPLKFYNSEIHTAAFCLPSFAKKVIDAKAK

SEQ ID NO: 1936 - protein, 182 aa, Triticum aestivum
  unsure (1)..(182): unsure at all Xaa locations
VPPPSKLYTYIVQPWRPTVMASSATSVAPFQGLKSTAGLPVSRRSNGASLGSVSNGGRIRCMQVWPIEGIKKFETLSYLPPLSTEALLKQVDYLIRSKWVPCLEFSKVGFIFREHNASPGYYDGRYWTMWKLPMFGCTDATQVINEVEEVKKEYPDAYVXINGFTTSSVNANSPATGSRSEG

SEQ ID NO: 1937 - protein, 291 aa, Corynebacterium glutamicum ATCC 13032
MTFTLNNGLAIPDIGFGVFQTPPDETRNSVNAALEAGYRHIDTAAAYGNEREVGEAIAASGIGRDEITIETKIWVTDYGFEETLHAFDKATGKLGVDTLDILILHQAVPSSFDRTIAAYKALEKLLFDGAVRAIGVSNFMPEHLDKLLLETSIVPALNQIECHPYFQQRDVLARNEQLGILTQAWSPIGGITFYRDGQLPSTLENEVIAGIAAEVGKTPAQVMLRWHLQRRRHAIPKSVTPSRIVENFEIFDFELSDEQLQQIDALNTDLRGGPEPENITMENYYREIPEA

SEQ ID NO: 1938 - protein, 509 aa, Zea mays
  unsure (1)..(509): unsure at all Xaa locations
MATANGSSKGPFEVPKVEVRFTKLFIDGKFVDAVSGKTFETRDPRTGEVIASIAEGGKADVDLAVKAAREAFDNGPWPRMTGYERGRILHRFADLIDEHVEELAALDTVDAGKLFAVGQGAXDFPGAAHLLRYYAGAADKVHGATLKMAQRMHGYTLKEPRGGVVGHHXVPWNYPTTMFFFKVGPAARRRLAPVVVKPAEQTPXLSALFYAHLARXEAGVPAGVLNVVPGFGPXTAGAAVAAHMDVDKVSFTGSTEVGRLVMRAAAESNLKPVSLELGGKSPVIVFDDADLDMAVNLVNFATYTNKGEICVAGTRIYVQEGIYDEFVKKAAELASKSVVGDPFNPSVSQGPQVDKDQYEKVLRYIDIGKREGATLVTGGKPCGDKGYYIEPTIFTDVKDDMTIAQDEIFGPVMALMKFKTVEEVIQKANNTRYGLAAGIVTKNIDVANTVSRSIRAGAIWINCYFAFDPDAPFGGYKMSGFGKDMGMDALDKYLQTKTVVTPLYNTPWL

SEQ ID NO: 1939 - protein, 542 aa, Zea mays
  unsure (1)..(542): unsure at all Xaa locations
MEVAMVVSARASLLILVISLCSPYKFIQSPMDLGPLNLLPTTSTAAASSDFGRILFRAPAAVLRPQSPRDISMLLSFLSGSPSLSRVTVAARGAGHSIHGQAQAPDGIVVETRSLPGEMEFHHVRGGGEGRASYADVGGGVLWIELLERSLKLGLAPRSWTDYLYLTVGGTLSNAGISGQTFKHGPQISNVLQLEVVTGRGEIVECSPSKEADLFNAVLGGLGQFGIITRARILLQEAPEKVTWVRAFYDDLGAFTRDQELLVSIPDSVDYVEGFMVLNERSLHSSSIAFPASVDFSPDFGTRSSPRIYYCVEFAVHHHHGYQQQSQAAVEAISRRMSHMASQLYSVEVSYLDFLNRVRMEEVSLRSAGMWEEVHHPWLNMFVPKAGVAGFRDLLMDNVSPDSFQGLILIYPLLRDKWDTNTSVVIPDSGPTADDPVMYVVGILRSANPGPEEDGDGCSHXCLXEXLXXXRXIADAXEAXLGAKQYLPHHPTPARWQQHLXRRWERFADRKARFDPLRIXGPGQGIFPRTAQDAAAAAAYGS

SEQ ID NO: 1940 - protein, 479 aa, Arabidopsis thaliana
MENKPSVLTDKYDVGRLLGQGTFAKVYYGRSILTNQSVAIKMIDKEKVMKVGLIEQIKREISVMRIARHPNVVELYEVMATKTRIYFVMEYCKGGELFNKVAKGKLRDDVAWKYFYQLINAVDFCHSREVYHRDIKPENLLLDDNENLKVSDFGLSALADCKRQDGLLHTTCGTPAYVAPEVINRKGYDGTKADIWSCGVVLFVLLAGYLPFHDSNLMEMYRKIGKADFKAPSWFAPEVRRLLCKMLDPNPETRITIARIRESSWFRKGLHMKQKKMEKRVKEINSVEAGTAGTNENGAGPSENGAGPSENGDRVTEENHTDEPTNLNAFDLIALSAGFDLAGLFGDDNKRESRFTSQKPASVIISKLEEVAQRLKLSIRKREAGLFKLERLKEGRKGILSMDAEIFQVTPNFHLVEVKKSNGDTLEYQKLVAEDLRPALSDIVWVWQGEKDELTSQQETEYQQQQQQEQQEQEEPLKF

SEQ ID NO: 1941 - protein, 165 aa, Crocosphaera watsonii WH 8501
MFFIQSPIATLGCLILWFGWFGFNAGSTLELNSPAVAHILVNTLVAGATGGIIGTLSAWFMFDNKPSLTFIINGILAGCVSITASCAYVHLLSAVFIGMVGGWFVVWATDFIDRFGIDDPVGAIPVHLFCGFWGTLAVGFFSAGPGVVDWVISEKAFPIGGNRLD

SEQ ID NO: 1942 - protein, 427 aa, Enterococcus faecalis V583
MKTLIKNGKIIKKENQLIEAALWLENGVIHAIGESFDEADFEQVFDANGQLITPGLVDVHVHFREPGFTYKETIKTGSKAAARGGFTTVCAMPNLNPVPDTAEKLSEVYDLIQKDAVVKVLQYAPITEELRSEVLTNQKALKEAGAFAFTNDGVGVQTAGTMYLAMKEAAALNMALVAHTEDESLLFGGVMHEGEVSKKLGLPGILSATEASQIARDITLAKETGVHYHVCHVSTEESVRVIRDAKKAGIHVTAEVSPHHLILVDEDIPGDEGFWKMNPPLRGLADRQALIDGLLDGTIDCIATDHAPHGLEEKQQSFLNAPFGIVGSETAFQLIYTNFVETGIFTLEQVIDWMAVKPAEIFGLNAGTLTIGAPADIAVFDLATAAPIDAEAFESMAVNTPFTGWTVKGKTLMTFVDGALAWSEEAQ

SEQ ID NO: 1943 - protein, 365 aa, Triticum aestivum
  unsure (1)..(365): unsure at all Xaa locations
TFSYSILSDPHKRRQYDTSGFEAIETDSQEXLELDLSSLNTVNTMFAAIFSKLGVPLKTTVSATVLEEALNGSIVVSQLQLGNSVRKKVEKQTAHFYSIDITEQEAKKGLVCRVHSTEKSKFKLLYFELEENGGLSLALQEDSVKSSKVSSAGMYFLGFPVYRFEQNNSAPAAKDPDSAFFKRLDSFQPCDINELKPGTHFFAVYGDNFFKSATYTIEIVCAESFPTEKEKLQSVEAKILTKRAELSKFETEYREVLAKFTEMTSKYTQEMQMIDELLNERNVIHASYTNNPPLKRTSSRNKSKSSPSFKYDEEKNQRKEKKVKDQHMEACGSEDDDSSDKKTKERFPRKRWLNIPFKVDRRKPC

SEQ ID NO: 1944 - protein, 381 aa, Corynebacterium glutamicum ATCC 13032
MSDSQVRKGLNGVISDYTSISKVMPESNSLTYRGYAVEDLVENCSFEEVIYLLWFGELPTTEQLRTFNTTGRSYRSLDAGLISLIHSLPNTCHPMDVLRTAVSYMGTFDPDPFTRDADHIRSIGHNLLAQLPMVVAMDIRRRSGEEIIAPDHNKGIASNFLSMVFGNDDGSVANSADDIRDFERSLILYAEHSFNASTFSARVISSTRSDTYSAITGAIGALKGPLHGGANEFVMHTMLDIDDPNNAADWMGKALDRKERIMGFGHRVYKNGDSRVPSMEKSMRSLAARHRGQKWVHMYESMQEVMEARTGIKPNLDFPAGPAYYMLGFPVDFFTPLFVLARVSGWTAHIVEQFENNALIRPLSAYNGVEEREVVPISERT

SEQ ID NO: 1945 - protein, 433 aa, Azoarcus sp. EbN1
MTLTREQQIAAIEKDWAENPRWKGIKRNYTAADVVRLRGSIQPESTLARVGAEKLWNLVNNEPYVNCLGALTGGQAMQQVKAGIKAIYLSGWQVAADNNSYAAMYPDQSLYPVNSVPTVVERINNAFQRADQIQWSKNINKGDKGYVDYFAPIVADAEAGFGGVLNAFELMKAMIRAGAAGVHWEDQLASVKKCGHMGGKVLVPTAEAVQKLLAARLAADVMGVPTLVIARTDAEAADLLTSDYDANDKPFLTGERTAEGFYKTSKGLDQAISRAIAYAEYADLVWCETGTPNLEFARKFAEAVHAKHPGKMLAYNCSPSFNWKKNLDDATIAKFQRELGAMGYKYQFITLAGIHSMWYNMFDLAQDYAKRGMSAYVEKVQEPEFAARDRGYTFVSHQQEVGTGYFDEVTTVIQGGTSSVTALTGSTEEEQFH

SEQ ID NO: 1946 - protein, 469 aa, Medicago truncatula
MASTRRVQCLMRRFYRGSRTFGVATQPNASSSSQTIIDKEFQHSAHNYHPLPIVFAHAKGSAVWDPEGNKYIDFLSGYSAVNQGHCHPKILKALKNQAGRLTVSSRAFYNDRFPVFAEYSTALFGYDMVLPINTGAEGVETALKLARKWGYDKKKIPNDEALIVSCCGCFNGRTLGVISMSCDNEATRGFGPLIPGHLKVDFGDAEALEKILKEKGDAIAAFILEPIQGEAGVKIPPDGYLKAVRDLCSKYNVLMIADEIQTGLARTGKMLACEWEEVRPDVVVLGKALGGGIIPVSAVLADKEVMLCIKPGQHGSTFGGNPLASAVAIASLEVIKEERLAERSTKLGGELLGLLEKIQKQYPDHVKEVRGRGLFIGVELNSESLSPVSFFELSEKLKDRGVLAKSTHDTIIRFTPPLCISADEIQQGSKALADVLEIDLPMLKKMKPKDAAPPAGPSACDRCGRVVYG

SEQ ID NO: 1947 - protein, 215 aa, Zea mays
  unsure (1)..(215): unsure at all Xaa locations
MAAVEVCVKAATGKPDTLGDCPFSQRVLLTLEEKKVPYEVKLVDLDNKPEWFLKISPEGKVPVFNGGDGECIADSDVITQTIEEKFPTPSLVTPVEYASVGSKIFPAFITFLKSKDASDGSEKALLDELQALDEHLKAHGXPYINGENVSAADLSLGPKLFHLQVALEHFKGWKIPENLTNVHAYTKALFSRESFVKTKPSEEHVIAGWAPKVNA

SEQ ID NO: 1948 - protein, 477 aa, Novosphingobium aromaticivorans DSM 12444
MEFNNNYHMLIGGELVAAEARLDVVNPANEQVIACVPDAGAAELDAAVAAARKAFPGWAATPIAERKAMLDALADSIFANVDGFKRLLTAEQGKPHHEAQGEIMGAGYWLKAYTALDLPETVNEDSDERLSITRHVPLGVVGAIAPWNFPMILAMFKVAPGLLAGNTMVLKPSPFTPLCTLKFAELAKEILPAGVLNVITGGDHLGPLMTAHPGFDKISFTGSTQTGRRVMASAAPTLKRVTLELGGNDAAIVMPDVDVEKIAEQLFWAAFTNNGQICIATKRMYIHKDIYEPLRDALVAYARTVKVGDGSEQGTQIGPINNEAQYNRVLDLIQDAKDNGYKFLLGGEKAEVPGYFVPITILDNPPEDSRIVQEEQFGPVLPLIRFDDFEDVLNRVNASDYGLGGSVWGSDEDKAFELAQRVQSGTVWVNETQHLSPLAAFGGMKQSGVGVEGGLEGLLEYTSAQTLVRRKKAAFVN

SEQ ID NO: 1949 - protein, 299 aa, Glycine max
KLGIRLEHRVCVRWIRVLYSNFARFCKDQEYLISLHGKAARERFDYVEGFVIVDEGLINNWRSSFFAASNPVKITSLNADGGVLYCLEITKNYDQGNADSVDEEIQALLKKLNFIPTSVFTTDLPYVDFLDRVHKAELKLKSKGLWDVPHPWLNLFVPKSRIEDFDKGVFKGILGNKTSGPILIYPMNKNKWDHRSSVVTPEEDVFYLVAFLRSALDTETLEYLTNQNRQILRFCHDSEIKVKQYLPHYTTQQEWMDHFGDKWTQFNARKMQFDPRRILGTGQQIFQFHPSLTPNKDDM

SEQ ID NO: 1950 - protein, 480 aa, Pyrococcus horikoshii OT3
MCLIAGGFKLYTDEIIRIIELGKHRGPDSFGVWSEREVIKSSDFSALEEVKGGDKVLIQCRLAMTGSKEYTQPFYNEIALVHNGEIYNHEKLRAYLVERGISFESDVDSEVILRLLEYLLFDRNLSPWNAIKKLMWMLRGDYAVAFHYNGKFYLFRDPLGIRPLYYSSQGHFGSEKKVLWGLGEEATPVMPGEAVEISKFGINRVRLYDVTAIKSFGSEYFDGLRNLLIDSVKIRSSKKIGILFSGGLDSTLIAFIASRYSNVTLYVSGTEDSKDVEWARKVSQELGLKLKEYIFSKEEVEKELKRIMFAIEEPNPMNLSIAIPLYFSTKLAREDGVKILLSGQGADELFGGYAKYLENPNLMISDVANLGERNLARDDKVSMINGVEVRYPYLDLPFAVLALNTPLQHKIKDGKRKIILREIAKSLGLPEWIAEREKKAAQYGSNAQKILEKIAKSRGIRLKELASLLFSEVFRGIHNR

SEQ ID NO: 1951 - protein, 330 aa, Methanosarcina mazei Go1
MRLAVIEGDGIGREVIPAAVEVLDAFGLEFEKVPLEIGYARWERTGTAMSEEDMEIIKSCNAVLFGAVTTVPDPGYKSVLLTIRKELDLYANVRPVKPLSGVVGVSGRSDFDFIIVRENTEGLYSGIEEIGHDLSWTKRVITRKGSERISEYACELAKKRSGKLTIVHKSNVLKSDKLFLDVCRETASSYGVEYGDMLVDSMAYSLIMHPEKYDVVVTTNLFGDILSDMCAALVGSLGLVPSANIGKKYAFFEPVHGSAPDIAGKGISNPLAAILCVKMLLEWMGKPEARLIDAAIADLLQKKIITPDLGGRASTAEVGNAVAKYIMQNL

SEQ ID NO: 1952 - protein, 494 aa, GIBBERELLA ZEAE PH-1
MTSSVTLQGAQGRQITVQTGLFIDNEFVPASNNATLDVENPNTATIIAQVSAAQASDVDRAVRSSQKAFATWGRSDPGTRRTLLLKLADLVEAHGPELASLEAIEGGLLYRDSLGLHVTQSVDNLRYFAGWADKLDGVSLPIPSGVAYTRREPIGVCAAIVPWNSLMILFWKLAPAIAAGNTIVIKTAELTPLWAQKAAELIKEAGFPPGVINIICGLGREAGQALAEHPVVRKIAFTGSSVTGRQIMQSAARSNLKKVSLELGGKGPSIVFADADWENALLWTTMGITASNGQICAAGSRIYVQDTIYEKFIQEFSRRSRDAVHGDPLLDETTKGAVASKAQLDKILSYVGKAKQTKARLLHGGQPLPGKGHFMANTAFVDVDQDDTIMREEIFGPFASIAPFSTEDEVIRKANDSDLGLNSAVFTNDVSRAFRISEAIETGTVTVNCWAMLNANTPFGGVKESGFGRDSGQEALDNWTVTKTVKFNILPPKL

SEQ ID NO: 1953 - protein, 204 aa, Fagus sylvatica
MASSSPSSNYIQEASGGHIIPTDQNVLQKHVAFFDRNQDGIVYPSETFKGFRAIGCGIFFSAISAIFINFGLSQKTRPGKFPSLLFPIEVKNIQKAKHGSDSGVYDTEGRFVPSKFEEIFSKHALSYPSALTSDELMKMLKENRVPKDYRGWLASWAEWKTLYILCKDKKWVTTERNKLKLLMMEAWLKEMEKERSSAKKKAVV

SEQ ID NO: 1954 - protein, 141 aa, Burkholderia cepacia R1808
MTRYDPFSIEPVSDLFHGLFRPLRGMTLADQPDLASMKIDVTENDGAYMVKAELPGVAKDDIDVQVTGNTVSINAKVERNNEQKDGERVIRRERYSGAISRSFSLAADIDDANATATYQDGVLSLTLPKKAPVGQKKLAIS

SEQ ID NO: 1955 - protein, 436 aa, Mycobacterium leprae
MSGATSGLTPEQIGAIDAAHLWHPYSTIGAATGVIPPVVAVAAHGAWLTLIRDGKPIEALDAMSSWWTAIHGHGHSVLDAALTTQLGAMNHVMFGGLTHEPAARLAQLLVDITPAGLETVFFSDSGSVSVQVAVKMALQYWRSRGQPAKRRLMTWRGGYHGDTLTPMSICDPDGGMHSLWTDILARQVFAPQVPRDYDPAYSKAFETQLAQHTPELAAVVVEPVVQGAGGMRFHDPRYLCDVRDICRRHDVLLIFDEIATGFGRTGELFAADHCGVSPDIMCVGKALTGGYLSLAATLCTTDIAHAISVGAAGALMHGPTFMANPLACAVSVASVEVLLGQDWRSRVAEISAGLTAGLEAAQGLPGVIDVRVCGAIGVIECDRSVDLAVATPAALDRRVWLRPFRNLVYAMPPYICPPAEIAQITSAMVEVAGLVG

SEQ ID NO: 1956 - protein, 233 aa, Zea mays
  unsure (1)..(233): unsure at all Xaa locations
MLLPTRRLPAAPSGPAVHPYISPARPSLRFRRQHGRAATARATSATPPVFGDTLLGLYEKERLGLSRYADEESREDVFWETLDADLQYWTRSLRPVQWYPGHIAKTEKELKGQLKLMDVVIEVRDARIPLATTHPKMDSWLGNRRRIIVMNREDMVSADDRNAWATYFSSQGIXVIYSNGQLXMGTMKLGRMAKSAASTVNTRRREKGLLPRPVRAGIVGYPNVGKSSLINRL

SEQ ID NO: 1957 - protein, 320 aa, Enterococcus faecalis V583
MKRIGILTSGGDAPGMNAAIRAVVRKSIFDGIEVYGINYGFAGLVAGDIRRLDVADVGDKIQRGGTFLYSARYPEFATEEGQLKGIEQLKKFGIEGLVVIGGDGSYHGAMALTKRGFPAVGIPGTIDNDIPGTDFTIGFDTAINTVLESIDRIRDTATSHVRTFVIEVMGRNAGDIALWSGVAGGADEIIIPEHDFDMKNVAKRIQEGRDRGKKHCLIILAEGVMGGNEFADKLSEYGDFHTRVSILGHVVRGGSPSARDRVLASKFGSYAVELLKEGKGGLCIGMLDNQVVAADIIDTLENNKHKPDLSLYELNHEISF

SEQ ID NO: 1958 - protein, 158 aa, Nitrosomonas europaea ATCC 19718
MNIYDCGIKTMDGQDKLLGDYKGKVLLIVNTASKCGFTPQYQGLEDLYRRYKDRGFVVLAFPCNQFGHQEPGSESEIQQFCTTRYDVSFPVFAKIEVNGANTHPLYRYLKNEKSGVLGTKAIKWNFTKFLVDRSGHVVRRYAPADKPESLTGDIEQLL

SEQ ID NO: 1959 - protein, 277 aa, Bacillus pumilus
MNLEEQIKIAASLRQPSEGSLASQSELKPVNPPEVNKMEYDIPTSAGETKVWVFKPVNTQKQLLPVFVNLHGGGFIMGSAEMDNPWCPVIADRAQCIVVNVEYQLAPEHPFPAALHECYDVLKWLYEHPEELQIDRNALAIGGHSAGGNLATAACLLNIQRGNTLPIAYQVLDYPPLDLATDPAQKPAFEEAIPVELARLFNSFYLQGQDPHNPLVSPVFADRSSLAQMPPALVITAERDSLAQEADQYAKKLKEAGVDVTYSSLKEFLTASHTPEI

SEQ ID NO: 1960 - protein, 50 aa, Schizosaccharomyces pombe
MTQVIFAIILPPLGVFLERGCGADVIINILLCCLGYVPGIIHALYIILKY

SEQ ID NO: 1961 - protein, 236 aa, Escherichia coli O157:H7 EDL933
MGYRSFDTAAAYKNEEGVGKALKNASVNREELFITTKLWNDDHNRPREALLDSLKKLQLDYIDLYLMHWPVPAIDHYVEAWKGMIELQKEGLIKSIGVCNFQIHHLQRLIDETGVTPVINQIELHPLMQQRQLHAWNATHKIQTESWSPLAQGGKGVFDQKVIRDLADKYGKTPAQIVIRWHLDSGLVVIPKSVTPSRIAENFDVWDFRLDKDELGEIAKLDQGKRLGPDPDQFGG

SEQ ID NO: 1962 - protein, 300 aa, Brassica napus
  unsure (1)..(300): unsure at all Xaa locations
MPSKSNAYFKRYXVKFGRRRDGKTAYRARIRLINQDKNKYITPKYRFVVSFTNEGXIFAQISVPLTLPGDIVKASAYAHELPQYGLTVGLTNYAAAYCTGLLLARRVLKMLEMDEEYEGNLEATGEDFSVEPTESRRPFRALLDVGLIRTTTGNRVFGALKGALDGGLDIPHSDKRFAGFNKENKQLDAEIHRNYIYGGHVSNYMKMLNEDEPEKFQTHFSQYLKKGVDAESMEELYKKVHAAIRADPNPKKTEKPAPKTHKRYNLKKLTYEERKNKLIERVKALNGAAGGDDDDEDDEE

SEQ ID NO: 1963 - protein, 296 aa, Saccharomyces cerevisiae
MITTPLVHVASVEKGRSYEDFQKVYNAIALKLREDDEYDNYIGYGPVLVRLAWHISGTWDKHDNTGGSYGGTYRFKKEFNDPSNAGLQNGFKFLEPIHKEFPWISSGDLFSLGGVTAVQEMQGPKIPWRCGRVDTPEDTTPDNGRLPDADKDAGYVRTFFQRLNMNDREVVALMGAHALGKTHLKNSGYEGPWGAANNVFTNEFYLNLLNEDWKLEKNDANNEQWDSKSGYMMLPTDYSLIQDPKYLSIVKEYANDQDKFFKDFSKAFEKLLENGITFPKDAPSPFIFKTLEEQGL

SEQ ID NO: 1964 - protein, 346 aa, Novosphingobium aromaticivorans DSM 12444
MKALRYYGARDIRHESMDDPTPQSDRDAIVKVDACSICGSDLHIYHGHGFSEDIGFCVGHEAVGEVVEVGRGVHRLKVGQKVMIPAAVGCGACRSCLAGVVNTCENNGSGCYGLSAKLQGSQAEAVRVPAADANAVAIPEGVSTEQALMMTDALATAWFGARQADIRPGSSVGIIGLGPIGLMAAESAFVMGAHVVYAIDPVPERRAIAESLGAIALHPDEASARIKEDTHGRRLDCVVEVVGSDATVDMALRLVRVRGTVSVIGVQQSRRFPFPLERAFAGGLTFRVGTCSVPEELPALFPLVASGRLRPERYISHRLPLSQGAEAYRMFEAREAGALKMVLVPD

SEQ ID NO: 1965 - protein, 485 aa, Arabidopsis thaliana
MGGCVSTPKSCVGAKLRSSKRRKSRRRRKIQRKRAAVSSRLSDGSFDNLDHHHRNFSNPSSRATGEDAWFESNVAFETDCDDDFHSVHEDALSLNGSERVSLSSTTTTSSTRDTDSNEVMSQSKSDGDLNDTNQPDLIDSSADEGLLENCRILPSNCLPCLNTTTVPSIDKRRSLSSSPPSSRKKSSLRLSYKWREGHASGALFLSKMQLKRPIAGSQVPFCPIDKKMLDCWSTIDPNSFRVRGKTYLREKKKEFAPSHAAYNPFGVDVFLSEHKIHHVAQYVKLPVTTTSTKLPSILVVNVQIPLYPTAIFQGESDGEGMNIVLYFKLSDNYSKELPLHFQESIRRLIDDEVEKVKGFPLDTTAPFRERLKILGRVANVDDLHLSGPEKKLMQAYNEKPVLSRPQHEFYLGDNYFEIDIDMHRFGYISRKGFETFIDRLKICVLDVGLTIQGNKPEELPEQILCCVRLNGIDFMNYHQLTQELL

SEQ ID NO: 1966 - protein, 175 aa, Triticum aestivum
MAPTVMAASVTSVAPFQGLKSTAGLPVSRRSSSAGLGSVSNGGRIRCMQVWPIEGIKNFETLCDLPPLSTEALLNQVEYLIRSKWVPCLEFSKVGFVFREHNSSPGYYDGRYWTMWKLPMCGCTDTTQVLKEVEEVKKEYPDAYVRVIGFDNLRQVQCVSFIAFRPPGCEESDKV

SEQ ID NO: 1967 - protein, 1224 aa, Ustilago maydis 521
MAVVDVGFSGYFWLAIKSFAARVICLLSDSGLRSAVSDRMPTKSRKSAPSKFAFFLDQQETFSLHISIFEPLGAVGVAPFQTDNRISLHRVFDRLPDTALQGGHGRATRSQRNFLSTDKSTKSFGSPIDIRFGPLRIDWAERAQDKEMSQASQYRNASSSSTSVGPATVTASASELTKASRRRNVFHAKQPQVALPVASFEKTDSFQGDVSGSKEAESRLASCTEMFQGMTIGATEVAFGIVHLFRDKQDATSNATPTRRAASTTGQTALENQIPEQDIGAVVAVLAVPAYLTASHFLSYIEPAVEAITHLRMLRDMHPNRCMVLIRFRDAKDAEDFHKMYNGQPFNAMDPQEICQVVYITSLTVSKHSSLPFSYPTLTNSDPWPLRPPANAVNQPAYELPTCPVCLERMDSSVTGLMTISCQHTFHCSCLSKWGESRCPVCRYSQTGQPSMHQRRRTPRSSMDPSTPVRQANQVGGSDADESDAESDLDEPSCCAVCETQQDLWVCLVCASVGCGRYKHGHAHRHFSETGHLYSLELETQRVWDYAGDGYVHRLIQNKADGKLVELPSASSATATPEHSSTLPASASYASAMSMSGTKHSGPPAIHSRGDNTRPPYDAQERRRQQQQQQRDQNYAIRDQDSCRSADDQLEAIGMEYSYLLTSQLESQRHFYEDKLDQFQAQLASLTGDLEMLSRKSQLIDELSARTAELERTNEQLRRDKDKSDKKADKAIELARTLERDLHSERSMNKGLMDRLEKTKESEVGLKAQVTDLQEQVSDLMFFVQARDKLDQEGSEAQGGDVEKLDSTFGNAFVISGRNARCGTGGSSTHPPITSLKLESKLIWPVLEKKTLRVMQHGGGKSTKHNPQSTKHEAIVNLCNVLYSYHLPARQTKPREYYIMSLNKTFTLNDGNKIPLIGLGTWLSKPGEVENAVEIAVKAGYRHLDLAKIYQNQDEVGAALKKVIPSVVKREELFITSKLWNTSHQPDKVEAAYNETLKELGLDYLDLYLIHWPVAFQPGSDLVPKTEDGKFTALDLETSLVDTWKALIALQKAGKVKSIGVSNFTIAHLDAIINATGVVPAVNQIEAHPLLPQDDLVAYAQQKNIHLTAYSPLGNNLTGKTKIVDYPQVSEVAKKYNADPAQVLIAWGVKRGYSVIPKSVTETRIKSNFEQLELKDDDYETVTSLYKQLGKVRFNVPFTYSPQWDINVFGEDAEKEAKNEVKTE

SEQ ID NO: 1968 - protein, 694 aa, Glycine max
  unsure (1)..(694): unsure at all Xaa locations
MPALACCVDAAAPPGYAFAGDISFPAPVALTGVPPATTDDSNNNRWSPSLSAALYNVDGWGGPYFAVNTAGNISVRPHGSDTLSHQEIDLLKIVKKASDPKSLGGLSLQLPLIARFPDVLKNRLESLQSAFDYAIQSGGYESHYQGVYPVKCNQDRFVVEDIVKFGSPFRFGLEAGSKPELLLAMSCLCKGNPDALLICNGFKDAEYISLALVANKLALNTVIVVEQEEEVDLIVELSKKLCIKPVIGLRAKLRTKHSGHFGGTSGEKGKFGLTTAQILRVVKNLDLAGMLDCLQLLHFHIGSQIPSTALLADGVGEAAQIYCELVRLGANMRVIDIGGGLGIDYDGSKSCDSDISVEYSLEDYAVAVVHAVQCVCDRRSVKHPVICSESGRAIVSHHSVLIFEAVGTSSTXPGGGASPALSAQYLAEELSEDYRNLSELAFRGEYETCLVYTEEMKERCVEQFKQGTVCMEQLAAVEGLCELARKAVGAGESVRRYHVNLSVFTSVPDAWGIEQVFPIIPIHRLDEKPSVRGILSDLTCDSDGKIDKFINGESSLPLHEMEGGRTYYLGMFLGGAYEEALGGVHNLFGGPXSVVRVSQXDGPHSFAVTAWPCRGHPCGDVLRVMQHQPELMFETLKHRAQEYVSHDNAAALLAAGLARTFDRMPYLLSLSSFVADDVAAAVPAAQDLGEQWSY

SEQ ID NO: 1969 - protein, 505 aa, Agrobacterium tumefaciens str. C58
MNIQVQQKAGEAPFKLKYGNYIGGKWVEPKSGRYMDNLSPVTGHKICEVPRSDASDIEFALDAAHKAREKWGKTSITERSNILLRIAQRIEDNLDLIARAETWDNGKPLRETTNADIPLTIDHFRYFAGCIRAQEGTIGEIDNDTVAYHFHEPLGVVGQIIPWNFPILMAAWKLAPALAAGNCVVLKPAEQTPASILIVMELIEDLLPPGVLNIVNGTGLEAGKPLAQSNRIAKIAFTGSTSVGKEIMRYAADNVTNISLELGGKSPNIFFADVMNEDDAFLDKALEGFAFFALNQGEVCTCPSRALVHESIYDRFMEKAIKRVQAISQDDPLNPSTMLGAQASQEQFDKIMSYLEIGKKEGAKVLTGGDRKTLTGDLKDGYYIQPTVFEGNNKMRIFQEEIFGPVVSVTTFKTVEEALEIANDTVYGLGAGVWSRDTNIAYRAGRGIEAGRVWTNCYHVYPAGAAFGGYKQSGIGRETHKMMLDHYQQTKNLLVSYSPNKVGFF

SEQ ID NO: 1970 - protein, 518 aa, Triticum aestivum
MGNRTSRHRRAAADQPATAPPPAAQPKPQPPPKPQTAPAPAPTPEAGQVAMGRVLGRPMEDVRATYTFGRELGRGQFGVTYLVTHKATGQRFACKSIATRKLVHRDDIEDVQREVQIMHHLTGHRNIVELRGAYEDRHSVNLIMELCEGGELFDRIIARGHYSERAAALLCREMVSVVHSCHSMGVFHRDLKPENFLFLNNKEDSPLKATDFGLSVFFKHGEQFKDLVGSAYYVAPEVLKRHYGAEADIWSAGIILYILLSGVPPFWADNEDGIFEAVLLGHIDFSSDPWPSISNGAKDLVKRMLRQDPKERLTAAEILNHPWIREDGEAPDKPLDITVISRMKQFRAMNKLKKVALKIVAESLSEEEIVGLREMFKSLDTDNSGTITLDELRAGLPKLGTKITESEIRQLMEAADVDGNGTIDYVEFISATMHMNRLEKEDHIFKAFEYFDKDHSGYITVDELEEALKKYDMGDEATIKDIIAEVDTDHDGKINYQEFVAMMKNNSPEIVPNRRRLF

SEQ ID NO: 1971 - protein, 433 aa, Wigglesworthia glossinidia endosymbiont of Glossina brevipalpis
MNINEVNFDRYYIWHPYSSITKPLKTYHVVSAKKCKLKLINGKKLIDGMSSWWTVIHGYNHPKINQAIINQIKKVSHVMFGGITHSPAIKLCKKIIKLTPKGLECVFLSDSGSVSIEVALKMALHYWFSKNERKKVKFLSLRGGYHGDTFGALSVCDPKNSMHNIYQGYLPNQEFTNTFDRKFNEKWESGDDLNLVKLIEKHHKKLAAVIIEPIVQGVGGMNFYHKQYLISIKKLCKFYKILLIVDEIATGFGRTGKLFACNYSKITPDILCIGKALTGGAITLAATITKRKVSETICNKKTPEFMHGPTFMANPLSCAASCANLSLIEEGKWIQQVKFIYQEMCKYLYPLIEHSYVKDVRILGAIGVVETKFFVNLENIQNWFVRHGAWIRPFRKLIYLIPPYIISSYELKFLIKLISLSLNDDKNFLYIKN

SEQ ID NO: 1972 - protein, 241 aa, Fagopyrum esculentum
  unsure (1)..(241): unsure at all Xaa locations
PFFPHQXRXNLVSWGGSNGGVLYCLEITKNYFDSTLPHLVDLEIDNLLKKLNFIPSSVFTTDLPYVDFLDRVHKAELKLRSKGLWEVPHPWLNLFIPKSRIADFDRGVFKGILGNKTSGPILIYPMNNKKWDKRTSVVTPDEEVFYLVGFLRSALEGGDEAQSLEYLSDQNRQVLKFCEEAKIEAKQYLPHFTSQTEWKNHFGNKWDEFYRRKMIFDPRQILASGQRIFEPDVGPKNVASL

SEQ ID NO: 1973 - protein, 130 aa, Triticum aestivum
  unsure (1)..(130): unsure at all Xaa locations
MGERVKGTVKWFNVTKGXXFISPDDGGEDLFVHQSSIKSDGYRXLNENDAVEXEIITGXDGRTXXNDXTAPXGXXLSXGLLXXXXGGERTXXGXYYRLLPRYAHPRTGRIVALHRQKGLSTFGPRGKFPR

SEQ ID NO: 1974 - protein, 206 aa, Pyrococcus horikoshii OT3
MRKMAHGPRYRVPFRRRREGKTNYRKRLKLLKSGKPRLVVRKSLNHHIAQIIVYDPKGDRTLVSAHTRELIRDFGWKGHCGNTPSAYLLGLLIGYKAKKAGIEEAILDIGLHPPVRGSSIFAVLKGAIDAGLNVPHSPEIFPEDYRIRGEHIAEYARMLKEQDEDRFRRQFGGYLEKGLDPEKLPEHFEEVKARIIEKFESEGARE

SEQ ID NO: 1975 - protein, 129 aa, Brassica napus
  unsure (1)..(129): unsure at all Xaa locations
MESYDLHKVSIMTQCIDGVKHLCTSVLGCFDLNLFKQSGGGLGDPELLSRDTXSASEIEALYELFKKTSSAVIDDGLINKEEFQLALFKTNEKESLFADRVFDLFDTKHNGIPWXLEEFARALSVFHPN

SEQ ID NO: 1976 - protein, 513 aa, Hordeum vulgare subsp. vulgare
MDGNNRGGGHSEVLKNYNLGKTLGLGTFGDVKVAEHKLTGQRVAIKILNRRKMETMEMEEKANREIKIMRLFIDFIHPHIIRVYEVIETPKDIFVVMEYCNNGELLDYIIENGRLQEDEARRIFQQILAGVEYCHRIMVVHRDLKPENLLLDSKYNVKLADFGLSNVMRDGHFLKTSCGSLNYAAPEIISSKLYAGPEVDVWSCGVVLYALLCGSVPFDDDNIPSLFRKIKGGTYILPSYLSDSARDLIPKLLNIDPMKRITIHEIRVHPWFKNHLPCYLAVPPPYKEQQAKMIDEDILREVVNLGYDKDHVCESLWNRLQNEETVAYYLLLDNRFRSTSGYLGADHQHLMDRSFNEFTLSESASPSTRNYLPGINDSQGGGLRPYYPVQRKWAIGLQSGAHPRDIMIEVLKALKELNVCWKKNGLYNMKCRWCPGFPQVSDMLLDSNHNFVDDSTIMDNGNADGRLPAVVKFEIQLYKTKDNKYLLDIQRVTGPQLLFLEFCGAFLTNLRVL

SEQ ID NO: 1977 - protein, 333 aa, Oryza sativa
MGKPGKLALPSHESTIGKFLTQSGTFKDGDLLVNKDGLRIVSQSEEGEEPLDHNQLSLDDLDAIKVIGKGSSGIVQLVRHKWTGQFFALKVIQLNIQENIRRQIAQELKISLSTQCQYVVACCQCFYVNGVISIVLEYMDSGSLSDFLKTVLKGLMYLHHEKHIIHRDLKPSNILINHMGEVKISDFGVSAIIASSSAQRDTFTGTYNYMAPERISGQKHGYMSDIWSLGLVMLELATGEFPYPPRESFYELLEAVVDHPPPSAPSDQFSEEFCSFVSACIQKNASDRSSAQILLNHPFLSMYDDLNIDLASYFTTDGSPLATFNTSNRYDDR

SEQ ID NO: 1978 - protein, 262 aa, Neurospora crassa
MGHEDAVYLAKLAEQAERYEEMVENMKIVASEDRDLTVEERNLLSVAYKNVIGARRASWRIVTSIEQKEESKGNSTQVSLIKEYRQKIESELAKICEDILSVLDQHLIPSATTGESKVFYHKMKGDYHRYLAEFAVGDKRKDSADKSLDAYKNATDVAQTELPPTHPIRLGLALNFSVFYYEILNAPDQACHLAKQAFDDAIAELDTLSEESYKDSTLIMQLLRDNLTLWTSSEAEAPAAQGEAAPEEPKADAPAAEEPKAE

SEQ ID NO: 1979 - protein, 507 aa, Thermosynechococcus elongatus BP-1
MKLRSILRRGFRLQHPLTQILYLPTRRTLLTFAVMIGVLSATAALGQDTAASAAVPEKVQVALNTLWVILAGVLVFFMNAGFGMLETGFCRAKNAVNLLSKNLIVFALASISYWAIGFALMFGDGNGVLGSSGFFLLGADNSPATGEAYRGVYSSLSWAAVPLSAKFFFQLVFAGTAATIVSGAVAERIKFYAFFIFSLLLVGISYPITGHWIWGGGWLQQLGMWDFAGSTVVHSVGGWAALMGAALLGPRLGRFLPDGSVAAIPGHNFAIATLGCLILWLGWFGFNPGSTMAADPGAIAHIAVTTNMAAAFGGVTATVVSTLYFGKPDLSMIINGILAGLVAITASCAFVTIESAALIGAIAGTIIVFSVVTIDRLKIDDPVGAISVHLVNGVWGTLAVGLFADGPGRFYEAGAGPLKGLLWSGDFTQFGYQLVGVLAVGGFTVAFSTAVWLLLNATIGIRVSPEEEIEGLDIGEHGMEAYAGFLLREEVKGFVDLLKRMSGSGRS

SEQ ID NO: 1980 - protein, 178 aa, Zea mays
  unsure (1)..(178): unsure at all Xaa locations
PSIPYDPMALRKAFDKPVVKRLMTYVPFGVLLSGGLDXSLVTAVAVRHLAGTEAARRLGTKLHSFYVGLKGSPDLKAAREVAEYLGTLHHEFHFTVXDDIDAIEDVIYHTEAYDVTTIRASTPMFLMSHKIKSLGVKMVISGEGSDELFGGYLYFHKAPNKEELHRETCRKVCVSFFH

SEQ ID NO: 1981 - protein, 397 aa, Synechocystis sp. PCC 6803
MNYMMTDNEVFKEGLAGVPAAKSRVSHVDGTDGILEYRGIRIEELAKSSSFIEVAYLLIWGKLPTQAEIEEFEYEIRTHRRIKYHIRDMMKCFPETGHPMDALQTSAAALGLFYARRALDDPKYIRAAVVRLLAKIPTMVAAFHMIREGNDPIQPNDKLDYASNFLYMLTEKEPDPFAAKVFDVCLTLHAEHTMNASTFSARVTASTLTDPYAVVASAVGTLAGPLHGGANEEVLNMLEEIGSVENVRPYVEKCLANKQRIMGFGHRVYKVKDPRAIILQDLAEQLFAKMGHDEYYEIAVELEKVVEEYVGQKGIYPNVDFYSGLVYRKLDIPADLFTPLFAIARVAGWLAHWKEQLSVNKIYRPTQIYIGDHNLSYVPMTERVVSVARNEDPNAII

SEQ ID NO: 1982 - protein, 489 aa, Mesorhizobium sp. BNC1
MALLEHPQVGPAQNHIDGIWRHGPVSERRETFDPATGKILGHYDPGTVDLMDEAIAAARRAFDETAWASAPRLRAEVLLKLAARLSADHERLATLNAYENGKSFIQAKNEVATAISEAKYYAGLARSMTGRMMEPEPGCYSLISREPMGVAGIIVPWNAPVTLLLRSLAAALAAGCTAVVKPAPQTPLINAAVIQHLVAITEIPDGVVNSINDGGPAVGERLVASSDVDVISFTGSSAVGKRIMAAAAPTLKRVSLELGGKTPSIIFDDADLDKAISELARASLVNSGQQCVAASRFLVHRNVLDDFADGMMQRLRSVPVGPGYDTDNLVGAIIDRPNRDRLLGWLDRCADDGDILLRGETLDERYPGGAFLTPSLVLVSSTEALTVQEELFGPIITLEPFADEDEALAKAHATAYGLAASVFTRELDRSLRMARRLRAGTVWLNTHGKLIAEAEMEGHRESGIGRLHGADAIGEFQQTKHIYLPFGQS

SEQ ID NO: 1983 - protein, 274 aa, Listeria monocytogenes EGD-e
MNLKDTVKLANGVEMPRLGFGVWKVQDGDEAVNSVKWAIEAGYISIDTAAAYKNEEGVGQAIKESGIKREDLFVTTKLWNAEQGYESTLAAFDESLRKLELDYVDLYLIHWPVKGKFKDTWRAFEKLYKDKRVRAIGVCNFHEHHLKELMEDAEIAPMVNQIELHPQLTQEPLRKFCAENNIVVEAWSPLGNGKLLSNPEIKAIADAHGKSVAQVILRWDLQIGVVTIPKSVHQERIIQNADIFDFELTEEEVAKISGLNKDERTGPDPDNFNF

SEQ ID NO: 1984 - protein, 338 aa, Glycine max
  unsure (1)..(338): unsure at all Xaa locations
MLFCASTKPAPGLACILSLFFLFKDLARAESYHLVALMSRALEHDYIGLAENPSMDGKNSSSLNLKETELRLGLPGCESPERKSGSALCLFGKELQNNNNNVCSLKAGAKRGFSDAIDTSSVTEGSQGASALFSPRGGNVGKPLIGLDTQTNTTIKEVGAVPQSAKPVQENNDQFAATNAHAIAPAAKAQVVGWPPIRSFRKNTMASNLTKNNDEAEGKSGFGCLYVKVSMDGAPYLRKVDLKTYNNYMELSSALEKMFSCFTIGQCNSPGLPGKDGLSESSLRDLLHGSEYVLTYEDKDGDWMLXMFTDSCRRLRIMKGSEAIGLAPRAMEKSRSQN

SEQ ID NO: 1985 - protein, 119 aa, Zea mays
  unsure (1)..(119): unsure at all Xaa locations
MDKNYGELYNILGWGEEYFAVNTEGHLSVKPFGRWTEPGQEIDVHSVIVEALATXPNDSTSKSQFPMILRFPDVLRNRIETLHXAFTGAMEATGVPVREPRRGSRTRGPKNKAVRGEKG

SEQ ID NO: 1986 - protein, 123 aa, Triticum aestivum
  unsure (1)..(123): unsure at all Xaa locations
MAPTVMASSATSVAPFQGLKSTAGLPVSRRSNGASLGSVSNGGRIRCMQVWPIEGIKKFXTLSYLPPLKHGXLLKQVRLXLXRSKWVPCLEFNKLGSXSRXAQRTPGVXNGRYXTMWXLPXXR

SEQ ID NO: 1987 - protein, 243 aa, Lycopersicon esculentum
KRLMTDVPFGVLLSGGLDSSLVASVTARYLAGTKAAKQWGAQLHSFCVGLEGSPDLKAAKEVADFLGTVHHEFHFTVQDGIDAIEDVIYHIETYDVTTIRASTPMFLMSRKIKSLGVKMVISGEGADEIFGGYLYFHKAPNKEEFHRETCRKIKALHQYDCLRANKATSAWGLEARVPFLDKEFINVAMSIDPEWKMIKHDQGRIEKWVLRKAFDDEEQPYLPKHILYRQKEQFSDGVGYSWI

SEQ ID NO: 1988 - protein, 136 aa, Glycine max
  unsure (1)..(136): unsure at all Xaa locations
KRAXSDLVAKIXLSDLVXXFGMPIVEASRNXNVGLTVLKRKCREFGIPRWPHRKIKSLDSLIHDLQEEVKSQELEDREAALAVAKRQRMLESEKENIEKKPFMDIQSETKRFRQDVFKRRHRARAVGKHNSTVSST

SEQ ID NO: 1989 - protein, 348 aa, Rhodococcus erythropolis
MKAIQYTRIGAEPELTEIPKPEPGPGEVLLEVTAAGVCHSDDFIMSLPEEQYTYGLPLTLGHEGAGKVAAVGEGVEGLDIGTNVVVYGPWGCGNCWHCSQGLENYCSRAQELGINPPGLGAPGALAEFMIVDSPRHLVPIGDLDPVKTVPLTDAGLTPYHAIKRSLPKLRGGSYAVVIGTGGLGHVAIQLLRHLSAATVIALDVSADKLELATKVGAHEVVLSDKDAAENVRKITGSQGAALVLDFVGYQPTIDTAMAVAGVGSDVTIVGIGDGQAHAKVGFFQSPYEASVTVPYWGARNELIELIDLAHAGIFDIAVETFSLDNGAEAYRRLAAGTLSGRAVVVPGL

SEQ ID NO: 1990 - protein, 105 aa, Pisum sativum
MVVVSAPMAEAAISCGAVTAAVAPCFAYLKGAPSPSLQCCGGVRRLNGIPDRKGVCNCLKGAAGSVPGLKPGNVAALPANVVLDFLSRLAPLPTVMPSVFKKKCG

SEQ ID NO: 1991 - protein, 300 aa, Zea mays
PISDYPGGGRNEGKGSPATTNTMPPHRAGGAAGGGDTSAFFAATLVLWAVSVGFEIGVRGRRELAPVAAGFAFFQAANAAVRGSVSRDPRFVNTAVSLLHSSLTSVSVIFVLVNQWRNKGLENMFEHEELFGGSWIGAYSALCFSCGYFAYDQLDMLRYRLYNGWIPGILMHHLILLICFTLALYRNVTINYLILSLVCELHSIFLHVRKVRRMVGFRDFDRTMVKLEWLLNWTTFVTARVICHILITYKLVADAHKFGKGIELPLALLGMAGMNLLNIFLGLDLLKAFTRERNQQSHQD

SEQ ID NO: 1992 - protein, 495 aa, ASPERGILLUS NIDULANS FGSC A4
MLGTAVPSEPVYQSSSRQPAQSSSNLETGSSISTSSNTTPTFPAPPSASAAGSSRFSTQDVPAYIRASSHPSSRSSESSTVTPGPTPIPTSAQMNPPSVVPSGQGGQTGTAPPGFGGRHTASHSSPASPQLRPTLRSLRSLGGSEASSPSRIKIRDLSHIQSFASEEFLAPPQRTRASGHWAQERQFEISSMPVTDIIEMVAGLLTKITTTNDSHHEQVHRQIPSVDGSSNLSQQAHSVLAFHGKNVPSISILSYLTRIHKYCPTTYEVFLSLLVYFDRMTEMVNKGQLDRLRGRYNRTDALQSDVAFRPRSSESSITQRSHTSPMVTPPPSAGITAQDSASTSPVSPAMNPLQGEDYLSHFFVVDSFNIHRLVIAGVTCASKFFSDVFYTNSRYAKVGGLPLAELNHLELQFLLLNDFRLSIPVEELEAYGTMLVEFYAREIVAQQQQQQQQQQQQQQHSQSQAGPMARESESDAMYMRRQPAHPEVRQTSTPP

SEQ ID NO: 1993 - protein, 607 aa, Triticum aestivum
  unsure (1)..(607): unsure at all Xaa locations
MDTHIGSVDGPSPAAVNGAVGCPASAPGCPIMSSHPVVSPGEASLGRHLARRLVQVGVSDVFAVPGDFNLTLLDHLVDEPGLRLIGCCNELNAGYAADGYARARGVGACAVTFTVGGLSVLNAIAGAYSENLPVICIDGGPNSNDYRTNRILHHTXGIPDFSQELRCFQTVTCHQAVVTNLDDAHEQIDTAIATALRESKTVDLSISCNLPGLPHPTFTRDPVPFFLAPRMSNKMGLEAAVEATVEFLNKAVKPVLVAGPKLRVAKAGKAFVDLVEAASGYAYAIIAIGRFVPETHPHFLGTHLLGRRQPFCARRDWRVGRRLFAGPTFNDCRSLGWSFLPKKDKDIIVRPERVIAGNGTACGCAMIREYRTGLARRIRKKNTANENXKNIFVFVGHPLQGEANATEPLRVHVLFKHIQDMLTGDSAVLAETGDSWFNCQKLKLPEGCGYEFQMQYGSIGWSVGALLGYAQGASDKRVIACIGDGSFQVTAQDVSTMLRCEQNSIIFLINNGGYTIEVEIHDGPYNVIKNWNYTALVEAIHNGEGKCWTAKVKCEEELTAAIETALGEKKDSLCFIEVIAHKDDTSKELLEWGSRVSAANSRPPNPQ

SEQ ID NO: 1994 - protein, 288 aa, Thermococcus kodakaraensis
MGYNEQERAFIEWYPRGYGVGFKVKRRLFETQTEYQRLEIYETEGFGKLLVLDGTVQLVEVGEESYHEVLVHPVMLAHPNPRKVLVIGGGDGGTLREVLRHDTVEKAIMVEIDEGVVEASYLYLDVAKDLLDRLIKKEEPRAELIIGDGVKYLRETDERFDVIIVDSTDPVGPAKLLFSEEFYRDAYEKLNEKGLYVTQAGSVYLFTNELLDAYKAMKKVFDRVYYFSFPVIGYASPWSFLVGVKGDVDFTRIDLERAKKLDLYYYDPERHETLFQMPRYVRKLLEGQ

SEQ ID NO: 1995 - protein, 475 aa, Aspergillus niger
MASTLRLGTSALRSSSIAAKPVVQSAAFNGLRCYSTGKAKSLKETFAEKLPAELEKVKKLRKEHGSKVIGEVTLDQAYGGARGVKCLVWEGSVLDSEEGIRFRGRTIPECQELLPKAPGGQEPLPEGLFWLLLTGEIPTEQQVRDLSAEWAARSDLPKFIEELIDRCPSTLHPMSQFSLAVTALEHESAFAKAYAKGINKKDYWNYTFEDSMDLIAKLPTIAAKIYRNVFKDGKVAPIQKDKDYSYNLANQLGYGDNNDFVELMRLYLTIHSDHEGGNVSAHTTHLVGSALSSPMLSLAAGLNGLAGPLHGLANQEVLNWLTKMKAAIGNDLSDEAIKNYLWSTLNAGQVVPGYGHAVLRKTDPRYVSQREFALRKLPDDPMFKLVSQVYKIAPGVLTEHGKTKNPYPNVDAHSGVLLQYYGLTEANYYTVLFGVSRALGVLPQLIIDRALGAPIERPKSYSTELSPSLLVLSCK

SEQ ID NO: 1996 - protein, 485 aa, Xylella fastidiosa Dixon
MHHNVHQSEILADPCDLQRAERWRQRDLRVLWHPCTQMREHPDTLPLVPIVRGEGAWLVGHDGRRYLDAVSSWWTNLFGHADPRISAAIAAQARTLEHVMLAGFSHEPAVRLAEALLRLAPRQDGREPLSKVFYADNGSAGVEVALKMAFHYFRNRGEEQRTRFIALHNGYHGETIGALAVGDIPLYRRVYAPLLTEVLFAPSPDAYLAEPGQSAAEYALQAAEALEALFKRYSGQICALILEPLLQCAGGMRMHHPVYLHRVRELCDAHGALLICDEIATGFGRTGTLFACEQACPAISTDTDDKELGIMPDLLCLSKGLTGGFLPLAAVLTTQQLYEEFLDDSRERAFLHSHSYTGNPLACIAALTTLDIFENDCIIERNQVTAARMTQLAASLSGHPHVADVRQTGMVVAFELTRDGNKRTPFPPQARLGLHVYRAALARGVILRPLGDVVYWMPPYCVDEEQLHLLAETTRVAIDEAIACV

SEQ ID NO: 1997 - protein, 505 aa, Hordeum vulgare
MAAPPAIPRRGLFIGGGWREPTLGRHIPVINPATEDTIGDIPAATAEDVELAVAAGGPVLARRREPWARASGATRAKYLNAIAAKITGKIAYLALLETVDSGKPKDEAVADMDDVAACFEYYAALAEALDGKQHAPISLPMEEFKTYVLKEPIGVVGLITPWNYPLLMATWKVAPALAAGCTAVLKPSELASLTCLELGAICEEIGLPSGVLNIITGLGPDAGAPIASHPHVDKIAFTGSTATGKTIMTAAAQMVKPVSLELGGKSPLVTFDDVADIDKAVEWPMLGCFFNGGQVCSATSRLLLHEKIAEPFLDRLVEWAKNIKISDPLEEGCRLGSVISKGQYEQIKKFISTARSEGATILHGGDRPKHLGKGFFIEPTINTGVSTSMQIWREEVFGPVICVKVFKTESEAVELANDTHYGLAGGVISDDLERCERIAKVIHSGIVWKNCSQPTLVQAPWGGNKRSGFGRELGEWGLENYLSVKQVTRYCKDELYGWYQRPSKL

SEQ ID NO: 1998 - protein, 121 aa, Helicosporidium sp. ex Simulium jonesii
FTPQYAELEQLQQEFGAQGFDVLGFPCNQFMNQEPGDSCSIRDAARAKHGATFPMFAKIKVNGSEADPLYKWLKEQKGGILTSAIKWNFAKFLVDRQGKVVGRYAPTTSPKDIANDIKKFL

SEQ ID NO: 1999 - protein, 359 aa, Bradyrhizobium japonicum USDA 110
MKDTYTIAVVHGDGIGPEVARAAVAVLQAGVQAGTLRFVDYPAGADHFLKTGDSFPAASFEGCRTADAILHGAAGIPGVVHPDGTEAGLDFTLTLRFKLDLFANVRPIKLYKGVPSPLGRPGPIDYVIVRENSEGLYAARGAGALLREEVAVDTLVQTRKGVERIVRFAFELARTRNGSPKDGRRRVTCCDKANVLRTYAFFRAVFDEVAKEYPDIEAEHVLVDAMTVHLVNKPTHFDVIVTENMFGDIISDLGAATVGGMGMAPSEEVGDGIGFFQASHGSAPDIAGKGLANPYGTILASILMLRRLDQRHRDSRLKLGADRIEAAVCAGLEDPALRTRDIGGVAPTNQVVDALLKRL

SEQ ID NO: 2000 - protein, 493 aa, Bradyrhizobium japonicum USDA 110
MTKAEIRFPLDGRARKMFVDGAWVEARSGKVFETRNPATGEVIGRVPRGEAADISVAVAAARRAFVGPWSRFKPFERQALLLRIADLFEKHWEEISQSDTADMGMPIARTRANKLRVIGMLRYYAGMATALHGQTVDNSLPGDIVSFTRKEPIGVVGAIIPWNAPTAASVWKIGPALATGCTIVLKPSEEAPLTPLLIADLMNEAGVPPGVVNVVTGTGVEAGAPLAEHPDVDKIVFTGSTATGQAIIRASAGNLKRVSLELGGKSPVIVCADADLDKAVPIAAMAAFANSGQICIAGSRLFVERKIHDELVERLGKFASALKIGDGADPTTEIGPLVSQRQLDKVEGFLQSGREEGAKVVAGGRRVREGNLAKGNFVEPTVFAGVSDDMQIARDEIFGPVISALPFDTLDEAVERANATPYGLAAGVFTRDVSKAHVISRSLRAGSVWVNTYHALDPAMPFGGYKMSGYGREGGTEHLDEYLHTKGVWIKLD

SEQ ID NO: 2001 - protein, 445 aa, Streptomyces coelicolor A3(2)
MSEAELVLRSTRVITPEGTRAASVAVTGEKITAVLPYDAPVPAGARLEDVGDHVVLPGLVDTHVHVNDPGRTEWEGFWTATRAAAAGGITTLVDMPLNSIPPTTTVDNLRTKREVAADKAHIDVGFWGGALPDNVKDLRPLHEAGVFGFKAFLSPSGVDEFPHLDQEQLARSLAEIAAFDGLLIVHAEDPHHLAAAPQQGGPKYTHFLASRPRDAEDTAIATLLAQAKRFNARVHVLHLSSSDALPLIAEARADGVRVTVETCPHYLTLTAEEVPDGASEFKCCPPIREAANQDLLWQALADGTIDCVVTDHSPSTADLKTDDFATAWGGIAGLQLSLPAMWTAARGRGLGLEDVVRWMSERTAALVGLDARKGAIAPGHDADFAVLAPDETFTVDPAALQHRNRVTAYAGKTLYGVVKSTWLRGERIVADGAFTDPKGQLLDRA

SEQ ID NO: 2002 - protein, 140 aa, Zea mays
STYKGKVLLIVYVASQCGLTDSNYTELSHLYEKHKGQGFEILAFPCNQFGAQEPGTNDEIVEFACTRFKAEYPIFDKVDVNGDTAAPIYKFLKSSKGSLFGDGIKWNFAKFLVDKEGHVVHRYAPTTSPLSIEKDIKKLL

SEQ ID NO: 2003 - protein, 139 aa, Parietaria judaica
QETCGTMVRALMPCLPFVQGKEKEPSKGCCSGAKRLDGETKTGPQRVHACECIQTAMKTYSDIDGKLVSEVPKHCGIVDSKLPPIDVNMDCKTVGVVPRQPQLPVSLRHGPVTGPSDPAHKARLERPQIRVPPPAPEKA

SEQ ID NO: 2004 - protein, 110 aa, Chromobacterium violaceum ATCC 12472
MPPAGCSSCVMCSCRSGNSRTSVAISLDLRAFYSTARFEEFNKMATGTVKWFNDSKGFGFITPDEGGDDVFAHFSQINAKGFRSLAENQRVSFDIVEGPKGKQASNIQPI

SEQ ID NO: 2005 - protein, 181 aa, Triticum aestivum
  unsure (1)..(181): unsure at all Xaa locations
YSPWPPTVMASSAXTSVAPFQGLKSTAGXLPSAAAPTAASLGSVSNGGRIRCMQVWPIEGIKKFETLSYLPPLSTEALLKQVDYLIRSKWVPCXLEFSKVGFIFREHNASPGYYDGRYWTMWKLPMFGCTDATQVINEVEEVKKEYPDAYVRIIGFDNMRQVQCVSFIAFKPPGCEESGKA

SEQ ID NO: 2006 - protein, 142 aa, Brassica napus
  unsure (1)..(142): unsure at all Xaa locations
MAMAFKMATTGMRVTEECTSSFLEMKWKKVHRYIVFKIDENSRKVTVDKVGGAGENYQDLTASLPVDDCRYAVFDFDFVTVDNCRKSKIFFIYWSPEASRIRAKILYATSKAGLRRVLEGIHYELQATDPTEMGFDXIQDRA

SEQ ID NO: 2007 - protein, 354 aa, Nicotiana tabacum
  unsure (1)..(354): unsure at all Xaa locations
MKTTKPLKELKLSVPAQDTPISSFLTASGTFHDGDLLLNQKGLRLISEENESPASETKEIDLQFSLEDLETIKVIGKGSGGVVQLVRHKWVGTLFALKVIQMTIQEDIRKQIVQELKINQASQCSHVVVCYHSFYHNGAISLVLEYMDRGSLADVIRQLKTILEPYLAVVCKQVLQGLVYLHNERHVIHRDIKPSNLLVNHKGEVKITDFXVSAMLASSMGQRDTFVGTYNYMAPERISGSTYDYKSDIWSLGMVILECAIGRFPYIQSEDQQAWPSFYELLEAIVSSPPPSAPAVQFSPEFCSFVSACIQKDPRDRSSALDLLSHPFIKKFEDKDIDFGILVSSLEPPVNFPR

SEQ ID NO: 2008 - protein, 182 aa, Bdellovibrio bacteriovorus HD100
MSTLNHIEFNTADGKKATLADYSGKVLLVVNVASECGLTPQYEGLEKIHQKYESQGLRVLAFPANEFGAQEPGSNEQIQEFCRTQFGVKFPVFAKMVVKGEGQHPLYQQLTTLQPAAQQVPGGKLKSVLEEHGLLSGGPSDIMWNFEKFLIGKSGNVVARFAPDMTPEDPTIVKAIEAELAR

SEQ ID NO: 2009 - protein, 386 aa, Aspergillus flavus
MTGLDMETIFAKIKDEYARTDDVGKRQIQGHIRELQVGFYSDWDVVMRLSSGPLQVALAKVAIDLGIFRSLKESDTPITLAEFVKKTGASPRLLGRILRTQAAFGLIKETGPQEYTSSAFTDVFANSDAAGAVVQLFDISGPCTQILPDFLAERNYQDITSNKDCVFQKAFGSDLTMFEWMPQHPKHMESLGHLMALERPVSWVDHFPILEELGKFPAPDKVLMVDIGGGFGQQSKALRAKFPNLPGRLIVQDIPQTLANAQPAAGIEFMEHNFFEPQPIQNAKFYYLRHVFHDWPDEQCVLILKQIIPAMGPESQILIDEMVIPSTGVPWQAAFTDLLMMNSLGGVERTRAEWDDLMEQAGLEIIQSKVYDSKEQAILVAVAKRT

SEQ ID NO: 2010 - protein, 250 aa, Glycine max
MGKSYPTVSADYQKAVEKAKKKLRGFIAEKRCAPLMLRLAWHSAGTYDVSSKTGGPFGTIKHPSELAHGANNILDIAVRLLEPLKAEFPILSYADFYQLAGVVAVEVTGGPEVPFHPGREDKPEPPPEGRLPDATKGSDHLRDVFGKAMGLSDRDIVALSGGHTIGAAHKERSGFEGPWTSNPLIFDNSYFKELLSGEKEGLLQLPSDKALLSDPVFRPLVEKYASDEDAFFADYAEAHQKLSELGFAEA

SEQ ID NO: 2011 - protein, 246 aa, Triticum aestivum
MKGGDIEAGTSGGTAAAPAGALYPGMAESPELRWALIRKIYVIVSLQLLLTAVVAAVVVKVPAIPHFFASSYAGLGLYIFLLILPFIVLCPLYIYRQKHPVNLLLLGVFTVAISFAVGMTCAFTSGKVILEAAILTTVVVFSLTAYTFWAVKRGKDFSFLGPFLFASLIMLLVFGFIQILFPLGKLSHMIYGALAALIFSGYIVYDTDNIIKRYTYDEYVWAAVSLYLDIINLFMALLTLFSAGDS

SEQ ID NO: 2012 - protein, 240 aa, Glycine max
MATCGLSTVIFSFVVLMLLSASSHTMVAGARNLLESTLPKPEVPQLPKPELPPLPKVPELPKAELPKIPTFPKPELPKVPELPKLEKPKVPELPKVSEIPKVPKLPKAPEMFKVSELPKLELPKVAEISKILELSKPELPKIPKLPKIHELSKVPELSNPELSKVSELPKVPELPKVPELSKPELPKVPELPKVRELPKPEFSKVPELPKVHELPKPEIPKILEFPKVPQFPKAFSTSNP

SEQ ID NO: 2013 - protein, 235 aa, Brassica napus
MGGFVKTHKTNAYFKRFQVKFKRRRAGKTDYRARIRLINQDKNKYNTPKYRFVVRFTNKDITAQIISASIAGDMVLASAYSHELPRYGLEVGLTNYAAAYCTGLLLARRVLKIRGLDKEYEGNVEATGEDFSVEPADERRPFRALLDVGLIRTTTGNRVFGALKGALDGGLDIPHSEKRFAGFKKDDKQLDADIHRKYIYGGHVADYMRNLAEEEPEKYQSHFSEYIKKGIEADD

SEQ ID NO: 2014 - protein, 249 aa, Triticum aestivum
MLSARTAAAASPAASLWKRGGGAGARGDGCTSCLEVRRRAAAVTVRAAQPKRVEAVAMESAAETAEAEKEVAAEKEVAAAGGGVEDKYGEDRATEELPVTPWAFSVASGYTLLRDPHHNKGLAFTERERDAHYLRGLLPPGVVSQDLQVKKIMHNLRQYKVPLQRYVAMMDLQERNERLFYKLLIDNVEELLPVVYTPTVGEACQKYGSIFRRPQGLYVSLRDRGKVIDVLKNWPERNIQVIVVTDGER

SEQ ID NO: 2015 - protein, 89 aa, Brassica napus
MDIISGLPDELLVKILLLVPTKVAVSTSILSKRWKYLWMWLPKLDYGPRDCSESECEKLRCFLDRTLPLHRAPVIESFSLDLCCSRFKP

SEQ ID NO: 2016 - protein, 131 aa, Brassica napus
LGKREPLPEDMADTNGSAESDSYRFRRFMIYVHAKGMIVDDEYVLIGSANINQRSMAGTKDTEIAMGAYQPHHTWTNKGKHPRGQVYGYRMSLWAEHLGKTGDEFVEPGDLECVRNVNEIAEGNWKTFIDS

SEQ ID NO: 2017 - protein, 399 aa, Ralstonia metallidurans CH34
MTARKHTKLNQETQMSEAQPLATPKPKKSVALSGIAAGNTALCTVGRSGNDLHYRGYDILDIADTCEFEEIAHLLVHGKLPTKSELAAYKVKLKALRGLPANVKAALEWVPASAHPMDVMRTGVSVLGTVLPEKDDHNTPGARDIADRLMASLGSMLLYWYHYSHNGRRIEVETDDDSIAAHFLHLLHGEAPSKLWERAMQTSLILYAEHEFNASTFACRVVAGTGSDMYSAICGGIGALRGPKHGGANEVAFEIQKRYDTPDEAEADIRRRVENKEVVIGFGHPVYTISDPRNVVIKEVARKLSKDAGSMKMFNIAERLETVMADAKKMFPNLDWFSAVSYHMMGVPTAMFTPLFVIARTSGWAAHVIEQRVDNKIIRPTANYTGPENLKFVPIEKRA

SEQ ID NO: 2018 - protein, 93 aa, Glycine max
RTSSQVVTTVNRAGAGLVVQLTGLKSMVGFPTRKTNIAFTSIVGTGGGVHCLQGWPPIGKKKLGTFSYLPDLDDAQLAKEVDSLLRKGWIPCL

SEQ ID NO: 2019 - protein, 231 aa, Agrobacterium tumefaciens str. C58
MDARQMKIKAAEAALSHVQDGMRLGIGTGSTAEEFVRLLAEKVAAGLKVEGVPTSERTARLCVELGVPLKSLDELPELDLTIDGADEVDHVLRLVKGGGGALLREKIVAAASGRMIVIADQSKVVETLGAFPLPIEINPFGQVATRIAIEKLAARSGLSGELTMRSSGDGAFMTDGGHLILDASFGRIPDAEALARELNTIPGVVEHGLFINLASLAIIAGPEGARMMQAV

SEQ ID NO: 2020 - protein, 421 aa, Glycine max
MDDAMGPDLISDLPQSIIESILVQLPIRDAVRTSILSSKWRYKWASITRLVFDDKCVPFSNDREVVEKSVVKFITRVLFLRQGPIHKFQITNSKLQSCPEIDQWILFLSRNDIKELVMELGEGEFFRIPSSLFNCGKLTRLDLSRCEFDPPHSFKGFVCLRSLNLHQVLISPDAIESLISRCPLLESLSLSYFDNLALTICAPNLKYLYLEGEFKDICLEDTPLLVEITIAMYMTDDIAEHFEQISNCNFVKFLGGVPNLEKLVGLIYFTKYLSIGIDFVHPPMMYNNLESIELYQVNFEDMVEILVILRLITSSPNLKELQISGSSNIPVAVDTPDLDFWEKECLSDSTLNKLKTVKLSEMGGWPHEIEFIKYLLGRSPVLETLSIIPCVFDMENNLKMLIELVKCRRASTRAEVIFTRE

SEQ ID NO: 2021 - protein, 90 aa, Glycine max
  unsure (1)..(90): unsure at all Xaa locations
RRFFXLIKMYFPMGYDIKHLMKFCSSLHGGGNKLXELLEVERGGVCHQAGSDRGGASCTFXKWRDTFFRGSTEKYAGVLYGLXGESGQTN

SEQ ID NO: 2022 - protein, 294 aa, Saccharomyces cerevisiae
TTPLVHVASVEKGRSYEDFQKVYNAIALKLREDDEYDNYIGYGPVLVRLAWHTSGTWDKHDNTGGSYGGTYRFKKEFNDPSNAGLQNGFKFLEPIHKEFPWISSGDLFSLGGVTAVQEMQGPKIPWRCGRVDTPEDTTPDNGRLPDADKDADYVRTFFQRLNMNDREVVALMGAHTLGKTHLKNSGYEGPWTANNNVFDNSFYLNLLNEDWKLEKNDANNEQWDSKSGYLQLPTDYSLIQDPKYLSIVKEYANDQDKFFKDFSKAFEKLLENGITFPKDAPSPFIFKTLEEQGL

SEQ ID NO: 2023 - protein, 107 aa, Brassica napus
  unsure (1)..(107): unsure at all Xaa locations
MDNTNRRRRSKQHKVTLEDSEEVSSIEWKFINMTEQEEDIILRMYRLVGDRWDLIAGRVPGRQPEEIERFWIMRNSDSFAEKRLQLHHSSSHKNNKLHXRPRPSIYP

SEQ ID NO: 2024 - protein, 472 aa, Escherichia coli O157:H7 EDL933
  unsure (1)..(472): unsure at all Xaa locations
MTTHLVWFRQDLRLHDNLALAAACRNSSARLLALYIATPRQWAAHNMSPRQAELINAQLNGLQIALAEKGIPLLFREVDDFAASVEIVKQVCAENSVTHLFYNYQYEVNERARDVQVERTLRNVVCEGFDDSVILPPGAVMTGNHEMYKVFTPFKNAWLKRLREGMPECVAAPKVRSSGSIKPAPSITLNYPRQSFDTAHFPVEEKAAIAQLRQFCQNGAGEYEQQRDFPAVEGTSRLSASLATGGLSPRQCLHRLLAEQPQALDGGAGSVWLNELIWREFYRHLMTYYPSLCKHCPFIAWTDRVQWQXNPAHLQAWQEGKTGYPIVDAAMRQLNSTGWMHNRLRMITASFLVKDLLIDWREGERYFMSQLIDGDLAANNGGWQWAASTGTDAAPYFRIFNPTTQGEKFDREGEFIRQWLPELRNVPGKSVHEPWKWAEKAGVKLDYPQPIVEHKEARVQTLAAYEAARKGK

SEQ ID NO: 2025 - protein, 461 aa, Burkholderia cepacia R18194
MSEFEQVVRGRLVDAREVVDDGWLAIRNGRIAARGTGAPPAARDTIDARGQWVLPGVVDGQVHAASQANQEGLGHASRAAAAGGVTVMVDMPYDDPEPVASRAQLDRKIAEAERDCHVDVALYGTLNAKHGLEAAAGLIDGGVCAFKFSTFEATPGRFPRVEEDVLYDAFRLIAPSGLACGVHNQMQDMTRKNIARMIEAGDTGWDAFLRAHPPLIENLATALIYEIGAETGARAHAVHVSTSRGFELCNLFRQAGHRASIETCVQYLMLDHETHTKRFGSKTKHYPPIRPRAEQDLLWTHIARGECTFVSSDHVSWGLERKGDPNVFRNASGGPGLETLLPAFWTGCEQHGVAPTRVAELLATNPARHFLLDDRKGSLDVGADADFVILTPERYAFDPSRSLSAVQWSAFEGMEFTVRIAATYCRGALVYDGERIVNPAGSGRFLKPHGSRSIATHREHA

SEQ ID NO: 2026 - protein, 124 aa, Brassica napus
  unsure (1)..(124): unsure at all Xaa locations
MLVAAASTLFSLSSAVFTRRRSFRVSATLSREPSPLLRAAHHTVDSYVKSGMVVGLGSGEASDLAIRYLGHQLRSGSVQDVVGVPMSARSASEAAKYGVPLKHFRDDFQIDFXFHDADAVXKXT

SEQ ID NO: 2027 - protein, 329 aa, Triticum aestivum
  unsure (1)..(329): unsure at all Xaa locations
MKTLLILTILAMATTIATANMQVDPSSRVQWPQERPFPQSQQPFSQQPQQIFPQPQQTFPHQPQQAFPQPQQTFPHRPQQQFPQPQQPQQPFPQPQQPQLPFPRQPQQPFPQTQQPQQPFPQQPQQPFPQTQQPQQPFPQLQQPQQPFPQPQQQLPQPQQPQQSFPQQQRSFIQPSLQQQLNPCKNILLQQCKPASLVSSLWSIIWPQSDCQVMRQQCCQQLAQIPQQLQCAAIHSVVHSIIMQXKQQQQQQQQGMHIFLPLSQQQQVGQGSLVQGQGXIIQPQQPXAQLEAIRSLVLQTXLPSMCNVYVPPECSIMRATMPATIPATK

SEQ ID NO: 2028 - protein, 343 aa, Haloarcula marismortui ATCC 43049
MRTAVLVEPTEFELEDRPRPSPGPDEVLVAVRDVGICGSDVHYYEHGRIGDYVVEDPLVLGHESAGKVVEVGENVTDHEPGDRVALEPGVPCRRCAHCKRGDYHLCESVRFMATPPHDGAFTEYVSWPADFAYTLPESVSTAEGALCEPLSVGIHACRRGSVGTGDTVLITGAGPIGLMVLEAARAAGATDIILTDVVKEKLEFAEKRGADLTVDVTETDLDTAVAEYTDGVGADVVVEASGAEPSIKSTIDVVRRGGTVVLVGLASEAEVPFDVLELIDNEVDVHGSFRYKNTYDAAVDLLADGEVDVEGIIDFESELEDIDDAFRRSMEPTVVKGMISLDS

SEQ ID NO: 2029 - protein, 301 aa, GIBBERELLA ZEAE PH-1
MPFKLVKNSAYYSRYQTKYKRRQQGKTDYYARKRLITQAKNKYNAPKYRLVVRFTNKDIICQIVTSEISGDKVFISAYAHELKAYGIEHGLTNWAAAYATGLLVARRALKKLGLDEDFAGVEEADGEYKLTEAAETDDGERRPFKVFLDVGLKRTSTGARVFGAMKGASDGGILVPHSEKRFPGYDMETKELDADTLRNYIFGGHVAEYMETLADDDEERFRSQFQKYVDDDVEAEGLEDLYTEAHAAIREDPFKKVESDAPKKTKEEWKEISQKYKSKKLTKEEKEKRVQERIQEIMQRD

SEQ ID NO: 2030 - protein, 270 aa, Exiguobacterium sp. 255-15
MQYAKLSNGVTIPQIGFGVWQVDEETEAPAAVAEALRVGYRHIDTAAVYKNERGVAKGIKESGVNREDLFLTSKVWNDDIRAGRTKEAFAESLERLETDYLDLYLIHWPVEGYIEAWKAMVELYEAGKIKAIGVSNFKEHHLDTLAEEGLMTPMINQVELHPQLPQHELHEYLQDHSIQVEAWSPLMQGKFLEINDFKEIAEKHGKSPSQVVLRWHLDNGIVALPKSVTPERIAENFDVFDFQLDADDLEKIDRLATDVRLGPDPDEIDF

SEQ ID NO: 2031 - protein, 438 aa, Glycine max
MGEKSNVGGDAINTTLLHGKYELGRLLGHGTFAKVYHARHLKTGKSVAMKVVGKEKVVKVGMMEQIKREISAMNMVKHPNIVQLHEVMASKSKIYIAMELVRGGELFNKIARGRLREEMARLYFQQLISAVDFCHSRGVYHRDLKPENLLLDDDGNLKVTDFGLSTFSEHLRHDGLLHTTCGTPAYVAPEVIGKRGYDGAKADIWSCGVILYVLLAGFLPFQDDNLVALYKKIYRGDFKCPPWFSSEARRLITKLLDPNPNTRITISKIMDSSWFKKPVPKNLMGKKREELDLEEKIKQHEQEVSTTMNAFHIISLSEGFDLSPLFEEKKREEKELRFATTRPASSVISRLEDLAKAVKFDVKKSETKVRLQGQEKGRKGKLAIAADLYAVTPSFLVVEVKKDNGDTLEYNQFCSKELRPALKDIVWRTSPAENPTLA

SEQ ID NO: 2032 - protein, 444 aa, Ralstonia metallidurans CH34
MGKIPEGDARDAENAIAAARAAFEAWSATPPSVRADYIRKIAEGLKARCEELAQMIAGEVGMPIKLARAIQVGGPVYNWGQAAALLDQFAFEEQVGNSLVVREPVGVVAAITPWNYPLNQITLKVAPALAAGCTVVLKPSEVAPLNAFVLAEVIEAAGLPPGVFNLVTGYGPVVGEVLASHPEVDMVSFTGSTRAGKRVSELAAQSVKRVALELGGKSASVILDDADLPTAVKGTIGACYLNSGQTCSAHTRMLVPRSRYEEVKAIAAKVVEGFTVGDPLADTTKLGPLISAVQKERVTGYIRRGLDEGAELVAGGPDTPAGLDRGFFVKPTVLGNVDPKATVAQEEIFGPVLSVICYDTEDEAIRIANDSIYGLGGGVWSGDESRAIRVARRIRTGQVDINGGPFNMNAPFGGFKQSGNGREGGKFGLEEFLEYKSLQLKKPA

SEQ ID NO: 2033 - protein, 462 aa, Thermosynechococcus elongatus BP-1
MVIASVNPTTAEVLKTFSPLGAEEVDRAIAQAATTFETYRLTSFEQRAQWLENTANLLQQQRETLARLMTLEMGKPIAEARAEIDKCAWVCRYYAEQGAAFLEPEFIPTEASYSAIHYQPLGIILAVMPWNFPFWQVFRFAAPALMAGNVALLKHASNVPQCALAIAQIFRQAGFPEGVFQTLLIPGSAVADLVADPRIKAATLTGSEAAGTSLAQAAGQHLKKTVLELGGSDPFIVMPSANISQAIATAVQARMINNGQSCIAAKRFIVHEAVYDTFAEGIKAAFESWVIGDPLEPTTQLGPLATAAIRDELHAQVELALGHGAKAFYRRSLDLPTQCRQGYFFGPTILTEVTPNNPVFTQELFGPVAMLFRVSSLTAAIELANATPFGLGASAWTQDSDEAEILVRDLEAGAVFINAMVKSDPRLPFGGIKTSGYGRELGRAGLLEFVNIKTVCRANTHS

SEQ ID NO: 2034 - protein, 417 aa, Streptomyces hygroscopicus
MTPQQRSAVLSRAAALLESRAEEFSALITSESGVCRKETLREVSRAAGNLKVAAAEAERIRGESIPLPDGTRLAVTLPEPVGVVLGITPFNRPLNQVVVKAAPALAAGCPLLLKPSEKTPLTALAFAELLIEAGCAKDMLGVVTGEPGELGPLLASHPDVAMVTFTGSVATGHSVAALAAGKRQLLELGGNDPLFVLPDADLPHAARLAAGGACATAGQSCRGIKRIFVWEEVADEFTDLLSTEVAGKQAGDPRRSDTDLGPLISEEAALVVERRIADAVRDGARLVTGGERDGALVHPAVLDRVPADTELVREETFGPVAPVIRVRGADEAVRLSNSTAYGLQAGVLTRDSARFWDLAARLRVGAVNLGEGPHFDSPHIPFGGVKACGIGREGIRYAIAEMTVTKTVTLPGPYGTG

SEQ ID NO: 2035 - protein, 227 aa, Clostridium acetobutylicum ATCC 824
MAKDNLKKISAKKALEYIKDNTVIGLGGGETIGYLCDYLKEKIKSGFNIKVVTPSIKTRNTCIENGIEVLYTSSVEHLDVAFDGCDQLDEKLNALKSCGGIHSKEKIIASMADKYILLTNESKFVKKLDSTYPIVLEILEESAGYVKRRISEIGGKATFRSSAAKDGFTITDSGNLLLDVFFDELGDAKELQKGLKGITGVVETSLFVDLVSQAIIAYEDDIKIISK

SEQ ID NO: 2036 - protein, 237 aa, Zea mays
ELLPVVYTPTVGEACHKYGSIYRRPQGLYISLKDKGKILEVLKNWPERSIQVIVVTDGERILGLGDLGCQGMGIPVGKLSLYTALGGVRPSACLPITIDVGTNNEALLNDDFYIGLRQRRATGEVTHSHPFHLIVVEYHELVEEFMAAVKQNYGEKVLTQFEDFANHNAFDLLEKYRESHLVFNDDIQGTASVVLAGLLAALKVVGGTLADHTYLFLGAGEASRFAYTRSELWTAFR

SEQ ID NO: 2037 - protein, 486 aa, Rubrobacter xylanophilus DSM 9941
MQSRVIESQIESRNYIGGEWVPADSGEVEEVRNPARPSEVLGTAPRSDRGEMERAVAAAQEALPGWRSALPAARGQILLRAADIIDSRSEELARLMALEAGKPLGESRAEVSRAAAIFRYYGSEGWRLYGVEAPSTRPGVRITSTREPLGVVGLITPWNFPLAIPSWKMAPALICGNTVVIKPAANAVLNAAELVRILEEAGLPGGVVNLVMGPGGSSGDALVRDERVRAISFTGSTAVGLSIQERAAGKKVQLEMGGKNPYVVMEDADLEDAAAKVAYGAFGYAGQKCTASSRAVVVEEVYEAFLEQVVEATRALKLGEPLDEEAVIGPVINESQYESILGAIEQAREDGRVVLDGGATGPREEGYYISPVIVADVDNGSKTAREEIFGPVLAVIKARDFDHAVEIANDTRYGLTAGIATRSLRYAEEFIERSQTGLVNVNLPTAGVEFQVPFGGSKQSGVGGREQGMAAIEFYTGWKTASVLAL

SEQ ID NO: 2038 - protein, 449 aa, Xylella fastidiosa Temecula1
MNPTLIVNARLVNEGREFDSDLRIENGRIARIDTGLSAQSKDIVIDAAGRRLLPGMIDDQVHFREPGLTHKGDIASESAAAVAGGLTSFMDMPNTNPPTLGAAALQAKYDAARGRAWGNYGFYLGASNDNLAAIQALDPKTSPGIKVFMGASTGNMLVDNETTLEGIFRYAPTPIITHCEDTPTINATLAKYHSRYGNTLSAEQHPDIRSRQACLKSSQLAVSLAKKNGTRLHVLHISTADELRLFEAGPLVDAAGKRCKQITAETCIHFLHFDRMDYARLGNLIKCNPAIKEASDREALIAALAKDVIDVLATDHAPHTWEEKQQPYAQAPSGLPLVQYALVAALELVHAGRLSVTEIVRKFAHAPAQLFDVIERGFLREGYWADLVLVEDTPFTVKRQEILSKCGWSPFEGTTFRSRIASTWVNGNHVWDGNRLVGVPNGQRLEFDR

SEQ ID NO: 2039 - protein, 230 aa, Lycopersicon esculentum var. cerasiforme
ENVYMAKLADRAESDEEMVEFMEKVSNSLGSEELTVEERNLLSVAYKNVIGARRASWRIISSIEQKEESRGNEEHVNSIREYRSKIENELSKICDGILKLLDSKLIPSATSGDSKVFYLKMKGDYHRYLAEFKTGAERKEAAESTLTAYKAAQDIASAELAPTHPIRLGLALNFSVFYYEILNSPDRACNLAKQAFDEAIAELDTLGEESYKDSTLIMQLLRDNLTLWTS

SEQ ID NO: 2040 - protein, 418 aa, Schizosaccharomyces pombe
MLKLAESGAILQDYLDDYFYTSWYTGNRNLIQLDHYGFPTASNFELNPKSTDNCGTVDFQGIPWGNKAIGKRKNFRLYRLHTYSLSCNHSDWSPEELSLDTVQVAAEDSFYEFQRFLKNPNCLRNHHHLCKSVKVVGEHSVIYVSNNSIRMENTLHDNSVQIIDLKNNILQKKAISCLDTTNAVGCLGTLYGQYCIFNFKNGSFSTRKLSDDSINHIQLFSEKKFILGCNDGAVYVEDVQRTSPILVYRCSNAVNCVQLFDETPLALVCTDSKDAMLIDIRSNSVSAKLPHSDSVLTGSWHPNGNILATGGQDTTAKVWDIRALGKSFRNLGSQMSAVTNLCFSPLGESLAVTEQADFVQLFDTKLFNTSQVIDFFGEIAGTAYSSSGDSLFIGVDDPMLGGILEFRRPLQHPLSFIF

SEQ ID NO: 2041 - protein, 263 aa, Oryza sativa (japonica cultivar-group)
MEGRVLRRSVTLADQLAAVGPAGTAAATAAAGSCNLRDLLKLRDEDDLAAGRRAAVTLASAMAAERLTVAPASSAAAAAAAARTLLDIIRDDQLPSSSGGGGEGGDPLVRRAVSLPAPVTATPPPPPPPPETPPRQLPSVSPPTVGEEEEEEQGERVSLMALLEQTERQWSAGSGATVQQHLASPSAAASASVSAAAEDEAEAEAGKGAAGGGCCCVCMARAKGAAFIPCGHTFCRTCARELLAGRGRCPLCNAAILDVLDIF

SEQ ID NO: 2042 - protein, 508 aa, Malus x domestica
MGFAKKEHEFLSAIGLAPENPGGFINGKWKASGPVISTVSPSNNQEIAKVTEVSMEEYEEGLRSCNDAAKTWKSLPAPKRGEIVRQIGDALREKLQHLGKLVSLEMGKILAEGIGEVQEVIYMCDFAVGLSRQLNGSIIPSERPDHMMFEVWNPLGIVGVITAFNFPCAVLGWNACIALVCGNCVVWKGAPTTPLVTIAVTKLIAEVLEKNNLPAAIFTAFCGGAEIGEAIAKDTRIPLVSFTGSSKVGAKVQQIVTERFGKCLLELSGNNALIVMDDADVGLAVRSIFFAAVGTAGQRCTTCRRLYLHESIYQNVLDKLVGLYNQVKIGDPLEEGTLVGPVHTKASRENFEKGISTIKSQGGKILTGGSVIESDGNFVQPTIVEIASNASVVKEELFGPVLYVMKFKTLEEAIALNNSVPQGLSSSIFTSKPNTIFKWIGPHGSDCGIVNVNIPTNGAEIGGAFGGEKATGGGREAGSDSWKQYMRRSTCTINYGTELPLAQGINFG

SEQ ID NO: 2043 - protein, 449 aa, Arabidopsis thaliana
MSGSRRKATPASRTRVGNYEMGRTLGEGSFAKVKYAKNTVTGDQAAIKILDREKVFRHKMVEQLKREISTMKLIKHPNVVEIIEVMASKTKIYIVLELVNGGELFDKIAQQGRLKEDEARRYFQQLINAVDYCHSRGVYHRDLKPENLILDANGVLKVSDFGLSAFSRQVREDGLLHTACGTPNYVAPEVLSDKGYDGAAADVWSCGVILFVLMAGYLPFDEPNLMTLYKRVRICKAEFSCPPWFSQGAKRVIKRILEPNPITRISIAELLEDEWFKKGYKPPSFDQDDEDITIDDVDAAFSNSKECLVTEKKEKPVSMNAFELISSSSEFSLENLFEKQAQLVKKETRFTSQRSASEIMSKMEETAKPLGFNVRKDNYKIKMKGDKSGRKGQLSVATEVFEVAPSLHVVELRKTGGDTLEFHKFYKNFSSGLKDVVWNTDAAAEEQKQ

SEQ ID NO: 2044 - protein, 579 aa, Glycine max
MCGILAVLGCSDSSQAKRVRVLELSRRLKHRGPDWSGLHQYGDNYLAHQRLAIVDPASGDQPLFNEDKTVVVTVNGEIYNHEELRKQLPNHTFRTGSDCDVIAHLYEEHGENFMDMLDGISSFVLLDTRDNSFIVARDAIGVTSLYIGWGLDGSVWISSELKGLNDDCEHFESFPPGHLYSSKERAFRRWYNPPWLSLAIPSAPYDPLALRHAFEKLWIKRLMTDVPFGVLLSGGLDSSLVAAVTARYLAGTKAAKQWGTKLHSFCVGLEGAPDLKATKEVAEYIGTVHHEFHYTVQDGIDAIEDVIYHIETYDVTTIRASIPMFLMSRKIKSLGVKWVISGEGSDVFFGGYLYFHKAPNKEEFHQETCRTIIVLHRYDCSRANKSTFVWGLEARVPFLDKEFIRVAMNIDPECKMIKKEEGRIEKWALRRAFDDEEHPYLPKHILYRQKEQFSDGVGYGWIDGLKAHAEKHVTDRMMLNAANIFPFNTPTTKEAYHYRMIFERFFPQNSCRLTVPGGTSVACSTAKAVEWDAAWSNNLDPSGRAALGVHASAYGNQVKAVEPEKIIPKMEVSPLGVAI

SEQ ID NO: 2045 - protein, 160 aa, Triticum aestivum
  unsure (1)..(160): unsure at all Xaa locations
LWGSRHDGTLESSRSGASXTYRSSPRHPQGGHIVIKARPCKVXXVSTPKTGKHGHAKCHFVAIDILMGKKLEDIVPSSHNCDVPHVDRQDYQLIDITDDGYVSLLTESGNTKDDLKLPTDDVLLGQIKTGFADGKDLILSVMSAMGEEQICAVKEIGGGK

SEQ ID NO: 2046 - protein, 190 aa, Xylella fastidiosa 9a5c
MHTHVSHAFASKLSLLSLDRFPMSSIYTFTFTRLDGRPQALADWRGQVLLLVNVASRCGFTPQYAGLEMLWQRYRDAGLIVIGFPCDQFAGQEPGDEAKIAEFCTLNYGVDFPMAAKIKVNGADAHPLWQWLKHRRRGLFGMAAIKWNFTKFLIGRNGQPIARYSPIKSPEQLEVHIVRALGEEGGGNTH

SEQ ID NO: 2047 - protein, 318 aa, Zea mays
MEAEAAAKRTRDSGEDAAAAGISAVIPGWFSEISPMWPGEAHSLKVDKVLFQGKSDYQNVMVFQSSTYGKVLVLDGVIQVTERDECAYQEMITHLPLCSIKDPKKVLVIGGGDGGVLREVSRHSSVEQIDICEIDKMVVDVSKQFFPHLAVGFEDPRVSLHIGDGVAFLKNAPEGTYDAVIVDSSDPIGPAQELFEKPFFQLVARALRPGGVVCTQAESIWLHMHIIEDIVVNCRQVFKGSVNYAWTTVPTYPSGVIGFMLCSTEGPAVDFQHPVFNIEEDEHPMKSKGPLKFYNSEIHTASFCLPSFAKRVIESKAN

SEQ ID NO: 2048 - protein, 461 aa, Zea mays
  unsure (1)..(461): unsure at all Xaa locations
MAEPAAAGRKTRVGPYEVGKTIGEGSFAKVKHAHDSRTGAVRAIKVLDRNHVLRHKMVEQIKREISTLKLIKHPNVVQLHEVMASRTKIYMVLEFVDGGELFDKIVNSGRLGEDEARIYFHQLINAVDYCHSRGVYHRDLKPENLLLDSHGTLKVSDFGLSAFAPQTKEDGXLHTACGTPNYVAPEVLADKGYDGMAADVWSCGIILFVLMAGYLPFDDANLMILWLDTYPLMMPXLMRLYKLICHATFSCPPWFSSGARKFIKRILDPNPDTRITIAEILEDEWFKKGYKPPRFEQGEDVSLDDIDAAFNDSEDRLVAEKREKPESMNAFALISRSQGFNLGNLFEKEMMGMVKRETSFTSQCTAQEIMTKIEDACGPLGFNVRKQNYKMKLKGDKSGRKGHLSVATEVFEVAPSLHMVELRKTGGDTLEFHSFYKNFSSELKDIVWKAESDANNKQTNK

SEQ ID NO: 2049 - protein, 491 aa, Pseudomonas mendocina
MDTTRPAYQNLELQPLAGQWRAGSSGRPLEVFDPYNDELLLRIALASREDLDAAYRKARDSQREWATTAPAERARVLLEAVKIFDERREEIIDWIIRESGSTRIKAQIEWGAARAITLESASLPNRVHGRIIASNISGKESRVYRAPLGVIGVISPWNFPLHLTARSLAPALALGNAVVVKPASDTPITGGLLLARIFEEAGLPAGVLSVVVGSGAEIGDAFVEHPVPALISFTGSTQVGRNIGRIASGGEHLKHVALELGGNSPFVVLADADVEQAVNAAVVGKFLHQGQICMAINRIIVEQPLLEDFTRRFVERVKALPYGDPSKPGTVVGPVINARQLAGLKEKIATAKAEGATLLLGGEPQGNVMPPHVFGNVTADMEIAREEIFGPLVGIQSARDAEHALELANSSEYGLSSAVFTASLERGVQFARRIHAGMTHVNDIPVNDEPNAPFGGEKNSGLGRFNGDWAIEEFTTDHWITLQHSPRPYPF

SEQ ID NO: 2050 - protein, 597 aa, Zea mays
LPPQPPPSSPPPSVLIVGAGLAGLAAARHLIALGFKVAVIEGRLRPGGRVFTKTMRSSAVEYPDTVAAADLGGSVLTGINGNPLGVIARQLGFPLHKVRDKCPLYLPDGRPVDPDMDARVEAAFNQLLDKVCQLRQVIADGVPHGVDLSLGMALEAFRAAHGVAAEHEERMLLDWHLANLEYANAAPLADLSMAFWDQDDPYEMGGDHCFIPGGNSQFVRAFSDGIPVFYGQNVKRIRYGRDGVMVHTDKQAFCGDMVLCTVPLGVLKKGDIKFVPELPAQKKEAIQRLGFGLLNKVVMLFPYDFWDGRIDTFGHLTEDSRQRGEFFLFYSYSSVSGGPLLIALVAGESAVKFEQASPMENVEKVLETLRKIFSPKGIEVPNPLQAICTRWGTDRFTYGSYSYVAIGASGDDYDILAESVHDRVFFAGEATNRRYPATMHGALLSGYREAANILRAARRRAKNVYSPEKMDINVDVKVGVNGELKDTVRDSCIDLDDLFRSPDAAFGGFSALHDPSTSEPDSVSLLRVGIGARKLGAGSLFLYGLIMRKHVAVLAAIEGDEQRLSIMYRDFGTKLVGLDSLGDAGESLISRIKAARK

SEQ ID NO: 2051 - protein, 117 aa, Hordeum vulgare subsp. vulgare
KHMIEDDCADNGIPLPNVNSKILSKVIEYCNKHVQAKPADAAGPGASDALPPADDLKNWDAEFVKVDQATLFDLILAANFLNIKGLLDLTCQTVADMIKGKTPEEIRKTFNIKNDFS

SEQ ID NO: 2052 - protein, 124 aa, Vicia faba
  unsure (1)..(124): unsure at all Xaa locations
MASTKKITLKSSDGEAFEVDEAVALESQAIKHMIEDDCADSGIPLPNVTSKILAKVIEFCKKHVXAAASDDKPTEDELKAWDADFVKVDQVTLFDLILAANYLNIKNLLDLTCQTVADMIKGKT

SEQ ID NO: 2053 - protein, 141 aa, Zea mays
MLMLPYTQKNALVLGVSIAMYCPAYTFLFQVIPGNETRVMKMMNRLTDLGPKIIMGKDSGLHTSGHAYREELEEVLRIVKPQHFLPVHGELLFLKEHESLGRSTGIRHTTVIKNGEMLGVSHLRNRRVLSNGFVSLGKEDL

SEQ ID NO: 2054 - protein, 335 aa, Glycine max
MADESVVESPVKRQRDDDEENAVSVSMVVEGGKVPLSNGLCSVIPGWFSEISSMWPGEAHSLKVEKILFQGKSEYQNVMVFQSSTYGKVLVLDGVIQLTERDECAYQEMITHLPLCSIPNPKKVLVIGGGDGGVIREVAHHSSVEKIDICEIDKMVVDVSKQYFPDVAVGYDDPRVTLHIGDGVAFLKEVPEGTYDAVIVDSSDPIGPAQELFEKPFFSSVAKALRPGGVVCTQAESIWLHMDIIEDIVANCRQIFKGSVNYAWTTVPTYPSGMIGFMLCSTEGPPVDFKHPVNPIDENESQKSVRPLKFYNSEIHTAAFCLPSFAKRKIGSKAN

SEQ ID NO: 2055 - protein, 76 aa, Triticum aestivum
MGLCSCCCRCLEILCAILLPPLGVCLRHGCCSMEFWISVLLTILGYLPGVLYAAYVICSVDPDRVRRRDDDYIYVA

SEQ ID NO: 2056 - protein, 214 aa, Triticum aestivum
  unsure (1)..(214): unsure at all Xaa locations
MAAVEVCVKAAAGKPDTLGDCPVSQRVLLTLEEKKVPYEVKLVDLGNKPEWFLEINPXGKVPVLKGDDGKCIADSDVITQVIEEKFPTPSLVTPPEYASVGSKIFPAFVKFLKSKDASDGSEKALLDELQALDEHLKAHGPYINGARAAAADLSLAPKLFHLQVALEHFKGWKIPENLTNVHAYAKALFSRESFVKTKPSEEHVIAGWAPKVNA

SEQ ID NO: 2057 - protein, 113 aa, Vicia faba
KHMIEDDCADETGIPLPNVTSRILAKVIEYCKKHVEAPKIDEYGMPVDGKDMKKWDAEFVKVDQDTLFDLILAANYLDIKSLLDLTCKTVANMMDGRTPDEIRRTFNIKNDFT

SEQ ID NO: 2058 - protein, 153 aa, Glycine max
  unsure (1)..(153): unsure at all Xaa locations
MADSDNDSGGAHNGGKGSEMSPREQDRFLPIANVSRIMKKALPANAKISKDAKETVQEVRVKVSSAFITGEXASDKCQREKRKTINGDDLLWAMTTLGFEDYVEPLKGYLQRFREMEGEKTVAARDKDAPPLTNATNSAYESANYAAAALVES

SEQ ID NO: 2059 - protein, 354 aa, Neisseria meningitidis Z2491
MKAARFYDKGDIRIEDIPEPTVAPGTVGINVAWCGICGTDLHEFMEGPIFIPPCGHPHPISGESAPVTMGHEFSGVVYAVGEGVDDIKVGQHVVVEPYIIHDDVPTGEGSNYHLSKDMNFIGLGGCGGGLSEKIAVKRRWVHPISDKIPLDQAALIEPLSVGHHAYVRSGAKAGDVALVGGAGPIGLLLAAVLKAKGIKVIITELSKARKDKARESGVADYILDPSEVDVVEEVKKLTNGEGVDVAFECTSVNKVLDTLVEACKPAANLVIVSIWSHPATVNVHSVVMKELDVRGTIAYCNDHAETIKLVEEGKINLEPFITQRIKLDELVSEGFERLIHNNESAVKIIVSPNL

SEQ ID NO: 2060 - protein, 610 aa, Zea mays
  unsure (1)..(610): unsure at all Xaa locations
MCGILAVLGCADEAKQGSSKRSRVLELSRRLKHRGPDWSGLRQVGDCYLSHQRLAIIDPASGDQPLYNEDQSVVVAVNGEIYNHLDLRSRLAGAGHSFRTGSDXEVIAHLYEEHGEEFVDMLDGVFSFVLLDTRHGDRAGSSFFMAARDAIGVTPLYIGWGVDGSVWISSEMKALHDECEHFEIFPPGHLYSSNTGGFSRWYNPPWYDDDDDEEAVVTPSVPYDPLALRKAFEKAVVKRLMTDVXPFGVLLSGGLDSSLVATVAVRHLARTEAARRWGTKLHSFCVGLEGSPDLKAAREVAEYLGTLHHEFHFTVQDGIDAIEDVIYHTETYDVTTIRASTPMFLMSRKIKSLGVKMVISGEGSDELFGGYLYFHKAPNKEELHREXTCRKVKALHQYDCLRANKATSAWGLEARVPFLDKEFINAAMSIDPEWKMVQPDLGRIEKWVLRKAFDDEEQPFLPKHILYRQKEQFSDGVGYSWIDGLKAHATSNVTDKMLSNAKFIFPHNTPTTKEAYYYRMVFERFFPQKSAILTVPGGAXSVACSTAKAIEWDAQWSGNLDPSGRAALGVHLAAYEHQHDPEHVPAAIAAGSGKKPRTIRVAPPGVAIEG

SEQ ID NO: 2061 - protein, 426 aa, Thermus thermophilus HB27
MILIRNVRLVDARGERGPADVLIGEGRILSLEGGEAKQVVDGTGCFLAPGFLDLHAHLREPGEEVKEDLFSGLLAAVRGGYTDLVSMPNTKPPVDTPEAVRALKEKAKALGLARLHPAAALTEKQEGKTLTPAGLLQEAGAVLLTDDGRTNEDAGVLAAGLLMAAPLGLPVAVHAEDAGLRRNGVMNDGPLADLLGLPGNPPEAEAARIARDLEVLRYASRRSPATPRLHVQHLSTKRGLELIREAKRAGLPVTAEATPHHLTLTEEALRAFNPLFKVAPPLRGEEDREALLEGLLDGTLDAIATDHAPHTLAEKEKDLLRAPFGIPSLEVAFPLLYTELHLKRGFPLPRLVELFTDGPRRVLGLPPLHLEEGAEASLVLLSPKERPVDPSAFASKARYSPWAGWVLGGWPVLTLVAGRIVHEALK

SEQ ID NO: 2062 - protein, 109 aa, Glycine max
  unsure (1)..(109): unsure at all Xaa locations
VTVLIKPHFGYLLKRATCRSXPYMQPGFFDLIRMKLPTVYDIKHLIVLYNSPHGGLNKLAKSLQLXQIGACHQAGSNSSLTPGTFRQLTERFIRGSAKKDNCVTDHISH

SEQ ID NO: 2063 - protein, 320 aa, Escherichia coli
MIKKIGVLTSGGDAPGMNAAIRGVVRSALTEGLEVMGIYDGYLGLYEDRMVQLDRYSVSDMINRGGTFLGSARCPEFRDENIRAVAIENLKKRGIDALVVIGDGGSYMGAMRLTEMGFPCIGLPGTIDNDIKGTDYTIGFFTALSTVVEAIDRLRDTSSSHQPISVVEVMGRYCGDLTLAAAIAGGCEFVVVPEVEFSREDLVNEIKAGIAKGKKHAIVAITEHMCDVDELAHFIEKETGRETRATVLGHIQRGGSPVPYDRILASRMGAYAIDLLLAGYGGRCVGIQNEQLVHHDIIDAIENMKRPFKGDWLDCAEKMY

SEQ ID NO: 2064 - protein, 438 aa, Oryza sativa (japonica cultivar-group)
MTAESARDPRGPYMSGCHVGRPASPSTGAVDEPCRCGNAHRLRPRLQKPHQKPSPRSRSPLDPAPRRWRRLRRWELVVGLRELYGVRDVFGVAAGYRGFYGPDADHARLDLAAVDDWHKKGGTVLKTTRGGFDLNKIVDGIVARGYTQCLTSNTFYHDYILLKVYAIGGDGTMRGAVAIFNEFKRRGLNISITGIPKTVDNDIGIIDRSFGFQTAVEIAQQAIDAAHVEAVSAVNGIGLVKLMGRSTGHIALHATLSSRDVDCCLIPEVDFYLEGKGGLFEFLYERIKQKGHAVVVVAEGAGQELIPRTDDQKREQDESGNIVFLDVGPWLKSELGKWWKREHPSELFTVKYIDPTYMIRAVPANATDNLYCTLLAHSAIHGIMAGYTGFVPGPINGNYSYIPLEDVAVAKNPVDVNDHKWAWVRSVTNQPDFMKPKY

SEQ ID NO: 2065 - protein, 337 aa, Brassica napus
  unsure (1)..(337): unsure at all Xaa locations
MGATTVTHVTTINPTNTNIHGPAIDEVDGLIRVYKDGHVERFQLVPCVGPSLPLDLAVACSDVHIDELTNVWARLYVPTVTKSLSVSSSKLPLLVYFHGGGFCVGSVSWSCYHEFLARLSASSRCIIMSVNYRLAPENPLPAAYEDGVNAILWLKKTRDDNLWSKLCDFGKIFLAGDSAGGNIANHVXXRLQXVDXXXQPLKIEGTXLIQPXFGGEARTXSXRRVENNMKSSVLTLAASDAWWRLALPRGANXEXPYCKPAKSKTRTXVCVAXMDVLMDRXMEMCYEIDNEEMIKXVVYKGVGHAFQILGKSQLAHTMTLEMLCHIDDFIHQCDPSI

SEQ ID NO: 2066 - protein, 161 aa, Triticum aestivum
  unsure (1)..(161): unsure at all Xaa locations
MAPTVMASSATSVAPFQGLKSTAGLPVSRRSSSAGLSSVSNGGRIRCMQVWPIEGIKKFETLSYLPPLSTEALLKQVDYLIRSKWVPCLEXFSKVGFVFREHNSSXPGYYDGRYWDNVGKLAMFRGGTTLQKVLKRRWGGVKERSNLNAYVPRHRVSNLQG

SEQ ID NO: 2067 - protein, 143 aa, Glycine max
MGERVKGTVKWFNVTKGFGFISPDDGGEDLFVHQSSIKSDGYRSLNENDAVEFEIITGDDGRTKANDVTAPGGGALSGGSRPVEGGGDRGGRGGGGEGYEGGEEGHISRDCPQGGGGGGGYGGGGGRGGGGGGGGCFSCGESE

SEQ ID NO: 2068 - protein, 294 aa, Saccharomyces cerevisiae
TTPLVHVASVEKGRSYEDFQKVYNAIALKLREDDEYDNYIGYGPVLVRLAWHTSGTWDKHDNTGGSYGGTYRFKKEFNDPSNAGLQNGFKFLEPIHKEFPWISSGDLFSLGGVTAVQEMQGPKIPWRCGRVDTPEDTTPDNGRLPDADKDADYVRTFFQRLNMNDREVVALSGAHTLGKTHLKNSGYEGPWTANNNVFDNSFYLNLLNEDWKLEKNDANNEQWDSKSGYLQLPTDYSLIQDPKYLSIVKEYANDQDKFFKDFSKAFEKLLENGITFPKDAPSPFIFKTLEEQGL

SEQ ID NO: 2069 - protein, 427 aa, Escherichia coli O157:H7 EDL933
  unsure (1)..(427): unsure at all Xaa locations
MADTKAKLTLNGDTAVELDVLKGTLGXDVIDIRTLGSKGVFTFDPGFTSTASCESKITFIDGDEGILLHRGFPIDQLATDSNYLEVCYILLNGEKPTQEQYDEFKTTVTRHTMIHEQITRLFHAFRRDSHPMAVMCGITGALAAFYHDSLDVNNPRHREIAAFRLLSKMPTMAAMCYKYSIGQPFVYPRNDLSYAGNFLNMMFSTPCEPYEVNPILERAMDRILILHADHEQNASTSTVRTAGSSGANPFACIAAGIASLWGPAHGGANEAALKMLEEISSVKHIPEFVRRAKDKNDSFRLMGFGHRVYKNYDPRATVMRETCHEVLKELGTKDDLLEVAMELENIALNDPYFIEKKLYPNVDFYSGIILKAMGIPSSMFTVIFAMARTVGWIAHWSEMHSDGMKIARPRQLYTGYEKRDFKSDVKH

SEQ ID NO: 2070 - protein, 395 aa, Erwinia chrysanthemi
MLDQQTIATIKSTIPLLAETGPALTAHFYQRMFHHNPELKDIFNMSNQRNGDQREALFNAICAYATHIENLPALLPAVERIAQKHASFNIQPEQYQIVGTHLLATLEEMFQPGQAVLDAWGKRYGVLANVFIQRESDIYQQSAGQNGGWHGIRPFRIVAKQPQSSLITSFTLEPVDGGPIAAFRPGQYLAVYIRDKRFEYQEIRQYSLTNEPNGRYYRIAVKRETMGSVSGYLHDVAREGDVIELAAPHGDFYLEVTPETPVALISAGVGQTPMLSMLHSLKNQQHQADIFWLHAAENTEVHAFADEIADVAATLPQLQSYVWYREASSEAARSAHAFHGLMALKDLPTPLPMTNLHCYLCGPVAFMQFAARQLLELGITESQIHYECFGPHKVI

SEQ ID NO: 2071 - protein, 166 aa, Pseudomonas aeruginosa UCBPP-PA14
MRKEYVMSAFHDLTLLGLDGQDLPLSPFKGKVLLVVNVASKCGLTPQYAGLENLYQTYRERGFAVLGVPCNQFAGQEPGSEADIQSFCSLNYGVSFPMSAKVEVNGSARHPLYRLLAGEGAEFPGDITWNFEKFLLGPDGRVLARFSPRTAPDDPALVQAIEKALG

SEQ ID NO: 2072 - protein, 327 aa, Triticum aestivum
LGCREGEEMGSTADEEACMFALQLGSSSILPMTLKNAIELGLLDTLVAADGKLLSPAELAAKLPSTANPAAPDMVDRMLRLLASYKVVSCTLEEDKDGRLSRRYGAEPVCKFLTPNEEGVSMAPLALMNQDKVLMESWYYLKDAVLDGGIPFNKAYGMSAFEYHGTDPRFNRVFNEGMKNHSIIITKKLLELYKGFNGVGTLVDVGGGIGATVGAITAHYPTIKGINFDLSHVISEAPPFPGVTHVGGDMFQKIPSGDTILMKWILHDWSDEHCATLLKNCYDALPTHGKVMLVECILPVNPEATPKAQGGFHLDMIMLAHNPGGKE

SEQ ID NO: 2073 - protein, 249 aa, Glycine max
  unsure (1)..(249): unsure at all Xaa locations
MAEERFTGVVQWFNNGKGFGFIKPDDGGEDLFVHQSSIRSDGYRTLLEGDRVEFAIATGDNDKTKAVDVTGVDGAPLQPRASAGNNXAGGSGFGARRNGGSGAACYQCGDFGHLARDCNRSSNSGGGGGGSGGGCFNCGGFGHLARDCVRGGGGSVGIGGGGGGGSCFRCGGFGHMARDCATGKGNIGGGGSGGGCFRCGEVGHLARDCGMEGGRFGGGGGSGGGGGKSTCFNCGKPGHFARECVEASG

SEQ ID NO: 2074 - protein, 159 aa, Shewanella oneidensis MR-1
MTLSSKDIGEGQLLSNQFVFNGFGCTGENISPQLAWRDAPEGTKAYAVTAYDPDAPTGSGWWHWAVYNIGGDQQQLAQGAGSKHNGLPKGAIALKNDFGTTDFGGACPPQGHGMHRYEFTVWALPNPLELPKDASPALLGFMLRAQALGSAKLTAVYHR

SEQ ID NO: 2075 - protein, 266 aa, Zea mays
  unsure (1)..(266): unsure at all Xaa locations
MVLEATMICIDNSEWMRNGDYAPSRFQAQADAVNLICGXKTQSNPENTVGVMTMAGKGVRVLVTPTSDLGKILACMHGLEVGAEANLAAAIQVAQLALKHRQNKRQQXQRIIAFIGSPVKYDKKVLETIGKKLKKNNVALDIVDFGESDDEKPEKLEALXAAVNSSDSSHIVHIPPGENALSDVLLSTPIFTGXKKGGXSGFAASAAAAAATGASGFXNLGVDPNVDPELALCPCGCLWKEERARQEAIAKKAAEDTSNTEHNNVP

SEQ ID NO: 2076 - protein, 475 aa, Vibrio vulnificus YJ016
MNSLFRQQCYLLGEWRSAPQTMTITNPFNDEVIGTVPNMGEKETQEVIAGADKAFQQFKALTAQERANLLHRWHQLILEHSDELAHIMTLEQGKPLAEAKGEVLYAASFIEWFAEEARRAYGTLVPSHKANAKILVTKEPIGVVAAITPWNFPAAMITRKCGPAFAAGCPVILKPAPDTPFTALALAVLAEKAGFPAGVFNVITGDAVAIGGELTSNKRVRKLSFTGSTPVGKLLMRQSADNIKKLSLELGGNAPFIVFEDADLDAAVEGAMIAKFRNAGQTCVCANRLYVQRSVYTEFCEKLVEKVSALNVGNGFDQGVHLGPLINDAAVAKVVQHVEDAQSKGAHIECGQLPTAGSRLVQPLVLSGVTDEMLVAQEETFGPMAPLFVFDSEEEVLARANNTDFGLAAYFYTQSLSRAWRVSEALEAGIVGVNEGLISTTVAPFGGVKESGLGREGSFLGMDDYMESKYILMGL

SEQ ID NO: 2077 - protein, 201 aa, Bacteroides thetaiotaomicron VPI-5482
MEEKNHIYPIFDRMMTREDKEELLGQHSVMIWFTGLSGSGKSTIAIALERELHKRGLLCRILDGDNIRSGINNNLGFSETDRVENIRRIAEVSKLFLDSGIITIAAFISPNNDIREMAANIIGKDDFLEVFVSTPLEECEKRDVKGLYAKARKGEIQNFTGISAPFEVPEHPALALDTSKLSLEESVNRLLEMVLPKIEKK

SEQ ID NO: 2078 - protein, 112 aa, uncultured Bartonella sp.
KMLQEIGTVQKIPEFIARAKDKNDRFRLMGFGHRVYKNYDPRAKIMQQTCHEVLKELNIQDDPLLDIAMELEKIALNDEYFIEKKLYPNVDFYSGITLKALGFPTEMFTVLF

SEQ ID NO: 2079 - protein, 455 aa, Bacillus megaterium
TIKEMPQPKTFGELKNLPLLNTDKPVQALMKIADELGEIFKFEAPGRVTRYLSSQRLIKEACDESRFDKNLSQALKFVRDFAGDGLFTSWTHEKNWKKAHNILLPSFSQQAMKGYHAMMVDIAVQLVQKWERLNADEHIEVPEDMTRLTLDTIGLCGFNYRFNSFYRDQPHPFITSMVRALDEAMNKLQRANPDDPAYDENKRQFQEDIKVMNDLVDKIIADRKASGEQSDDLLTHMLNGKDPETGEPLDDENIRYQIITFLIAGHETTSGLLSFALYFLVKNPHVLQKAAEEAARVLVDPVPSYKQVKQLKYVGMVLNEALRLWPTAPAFSLYAKEDTVLGGEYPLEKGDELMVLIPQLHRDKTIWGDDVEEFRPERFENPSAIPQHAFKPHGNGQRACIGQQFALHEATLVLGMMLKHFDFEDHTNYELDIKETLTLKPEGFVVKAKSKKIPL

SEQ ID NO: 2080 - protein, 277 aa, Glycine max
  unsure (1)..(277): unsure at all Xaa locations
IVQTSRHGKVAIPDGYIQLTENDEFAYQEMLIHLALCSIPNPKKGFCSFFLFLACTXLSYLMKKETFVXTLQVLLVGGGDGGILREISRHSSGEHIDICEIDKMVIHVYKKFFPDIAVGYEDPRMHVHIRDXXAFINSVPEGTYDVVILDAFPAMGHSADVLADKCFLESIAKALRPRGVLLWHTNSEVADTIANCKIFKGSVNYAWATVPAYVSGAIGFMLCSTEGPPVNFKHPINKLNPEKNGVAKGPPKFYNSEIHATAFFCGQGWLIQQDIHK

SEQ ID NO: 2081 - protein, 220 aa, Triticum aestivum
  unsure (1)..(220): unsure at all Xaa locations
MAGEGGSGGERGKDPLEGVRAIVLKPSESLDESRFTKIAGADFNDAGLGLDGLLGSLASTGFQASNLGDAIDVVNQMLDWRLSHEKPTEDCDEAELDPKYRESVKCKIFLGFTSNLVSSGIRDVIRFLAQHHMVDVIVTTAGGIEEDLIKCLAPTYRGEFSLPGALLRSKGLNRIGNLLVPNDXYCKFENWIMPLFDQMLQEQSAENVWTPSKVIARLGK

SEQ ID NO: 2082 - protein, 506 aa, Perilla frutescens
MALYAALFLLSAAVVRSVLDRKRGRPPYPPGPFPLPIIGHLHLLGPRLHQTFHDLSQRYGPLMQLRLGSIRCVIAASPELAKECLKTHELVFSSRKHSTAIDIVTYDSSFAFSPYGPYWKFIKKLCTYELLGARNLAHFQPIRTLEVKSFLQILMRKGESGESFNVTEELVKLTSNVISHMMLSIRCSETESEAEAARTVIREVTQIFGEFDVSDIIWLCKNFDFQGIRKRSEDIQRRYDALLEKIITDREKQRRTHGGGGGGGEAKDFLDMFLDIMESGKAEVKFTREHLKALILDFFTAGTDTTAIVCEWAIAEVINNPNVLKKAQEEIANIVGFDRILQESDAPNLPYLQALIKETFRLHPPIPMLARKSISDCVIDGYMIPANTLLFVNLWSMGRNPKIWDYPTAFQPERFLEKEKAAIDVKGQHFELLPFGTGRRGCPGMLLAIQEVVIIIGTMIQCFDWKLPDGSGHVDMAERPGLTAPRETDLFCRVVPRVDPLVVSTQ

SEQ ID NO: 2083 - protein, 511 aa, Zea mays
  unsure (1)..(511): unsure at all Xaa locations
MDSPPLQPTVFSLILALILVLYLALRRRGGGKNRSYPPVAGTVLHQLFNFGRLMEYQTALSRRYRTFRMLTPTCSYIYTVEPANVEYILKANFGNYGKGSTLHELREDLLGDGIFNVDGAKWRHQRKVASHEFSTRVLRDYSTGVFRDTAAELAGIVAAAAAAAGEKLDMQELLMRSTLDSIFXRVGFGVSLGVLSGSSEEGAAFAKAFDDASEQVLRRFLDPFWKAKRFLNLSSEAAMKRSLRTINGFVYAVVDRKIEQMERDQQEFVSPEDITSPFLVERESDPGCSDNKYLRDIILNFVIAGRDTTAGTLSWFLYVLCRNQHVQDRIAQEVRAAASGDRDDVGVQEFVACLTEDAISRMRYLHAALTETLRLYPAVPIDVKCCFSDDTLPDGYAVKKGDMVNYQPYQMGRMRFLWGADAEEFRPERWLDDAGVFVPESPFKFTAFQAGPRVCLGKEFAYRQMKIFAAVLLYLFRFEMWDANATVGYRAMLTLKIDRPLYSSYVAPAMR

SEQ ID NO: 2084 - protein, 106 aa, Brassica napus
MGEPRDSLALSNLLICHESESCLNEQQQDDDDDETKIERSDEQQKPHCFATIGDDDEDYVAELVRKENRRFDDDDDKPTKTTSSLDRLIAIDWILATRTRFGFSIR

SEQ ID NO: 2085 - protein, 164 aa, Cucurbita pepo
DRGEMMSMVYNWPADQVDVIVVTDGSRILGLGDLGVHGIGIAIGKLDLYVAAAGINPQRVLPVMIDVGTNNEKLLKDPLYLGLQQNRLDGDEYLAIIDEFMEAVFTRWPHVIVQFEDFQSKWAFKLLQRYRNTYRMFNDDVQGTAGVAIAGLLGAVRAQGRPMI

SEQ ID NO: 2086 - protein, 122 aa, Adiantum capillus-veneris
MIQIQSYLDVADNSGARKLMCIRVLGTGNRKYADIGDIIIAVVKEAVPNMFLKRSEVVRAVVVRTRRGLKRRNGMVLEFDDNAAVIINQEGNPRGTRIFGPVARELRECNFARVVSLAPEVL

SEQ ID NO: 2087 - protein, 352 aa, Lagenaria siceraria
MVPPYALDSLYCSEDHWENDDEEEERGFHEQPYSNLTTESSSPILAVAEQDLFWENDELISLFSREKPNELFKTIQIDPSLAAARRSAVGWMLKVNAHYSFSALTAVLAVDYLDRFLSCFHFQRDKPWMSQLAAVACISLAAKVEETQVPLLLDLQVEDSRYLFEAKTIKKMELLVLSTLQWRMNPVTPFSFVDYISRRLGFKEHICWEILWQCERTILSVILESDFMSFLPSVMATATMLHVFKAMEEPTLSVEYDSQLLNILGIDKGNVEECCKLISNASRRNGNQFKKRKIGSIPGSPNGVMDVSFSSDSSNDSWSVASSVSSSPEPLTKKNRANGSMSGDCETFRTLS

SEQ ID NO: 2088 - protein, 213 aa, Gossypium herbaceum
ALNSAEAEAPTAAPSQLNLTEIMSKQGCKAFADLLTASGADDKFNENMDAGLTVFCPTDSAVKGFMPKYKNLTASKKVSLLLYHGIPVFMSLQMLKTNNGVMNTLATDGANSYDFSVSNEDEVVSLDTTVVTAKVLGILKEEEPLIVFKINKVLMPKELFKPVVAKEANEPEADAPADSEPADAEDNTNGVQGLGGGRLVMLVLSLWIGILLI

SEQ ID NO: 2089 - protein, 290 aa, Triticum aestivum
  unsure (1)..(290): unsure at all Xaa locations
MGGLSMEHPWAFAFGLLGNVISFSSLLAPIPTFYRIFKSKSTEGFQSVPYVVALFSAMLWIFYALVKTGEGLLISINAAGCVIETVYIVMYLVYAPRKAKIFTAKIVVLLNITGFGLIFLLTLFAFHGETRVVSLGWICVGFSVCVFVAPLSIIGRVIKTXSVEYMPFTLSLTLTLSAIVWFLYGLLIKDKYVALPNILGFTFGVIQMVLYVFYMNKTPVASEVKEGKEAWKAPAEDHVVVINVGKTDKGSCAEVRPVTEMASAVDVPRRCAAEAAAAPGVDFARSVDVV

SEQ ID NO: 2090 - protein, 213 aa, Gossypium raimondii
ALNSAEAEAPTAAPSQLNLTEIMSKQGCKAFADLLTASGADDKFNENMDAGLTVFCPTDSAVKSFMPKYKNLTASKKVSLLLYHGIPVFMSLQMLKTNNGVMNTLATDGANSYDFSVSNEDEVVSLDTTVVTSKVLGILKEEEPLIVFKINKVLMPKELFKPVVAKEANAPEADAPADSEPADAEDNTNGVQGLGGGRLVMVVLSLWIGILLI

SEQ ID NO: 2091 - protein, 213 aa, Gossypium barbadense
ALNSAEAEAPTAAPSQLNLTEIMSKQGCKAFADLLTASGADDKFNENMDAGLTVFCPTDSAVKGFMPKYKNLTASKKVSLLLYHGIPVFMSLQMLKTNNGVMNTLATDGANSYDFSVSNEDEVVSLDTTVVTAKVLGILKEEEPLIVFKINKVLMPKELFKPVVAKEANAPEADAPADSEPADAEDNTNGVQGLGGGRLVMLVLSLWIGILLI

SEQ ID NO: 2092 - protein, 209 aa, Zea mays
MAECEELVESGGAEEDMPRVVAALAGILERVANRNDAAAAAEVSAVAPASAFRATTKPGISVRAYMARIARFAGCSPACYVVAYVYLDRLLRRGRLLALAVDSYSVHRLLITAVLAAVKFMDDICYNNAYFAKVGGISLVEMNYLEVDFLFGVGFDLNVAPETFGDYCAVLRSELLCAEAAPAPLRLQHCCLSEDDAGAGCSAQQQLAA

SEQ ID NO: 2093 - protein, 425 aa, Triticum aestivum
MWRRTTGRPAQEHPTTRRAAASPPATAPRGSSPRGAAAPSWPPRAAAAPGGGFDEAAAGFLEGQILEAPNLRTFTFLELKTATKNFRPDSVLGEGGFGRVYKGWVDEKTMNPTKSGTGMVVAVKKLNSESMQGYEEWQSEINFLGRLSHPNLVKLLGYCWEDKELLLVYEFMAKGSLENHLFRKGCAPLSWELRLKIAIGAARGLAFLHASEKQVIYRDFKASNILLDASYNAKLSDFGLAKLGPTGSNSHITTRVMGTYGYAAPEYVATGHLYVKSDVYGFGVVMLEMLSGKRARGPNRPNGQQSLVDWAKPYLADRRKLARLMDPQFEGQYNSKQSHQAAQLTLNCLAGEPRMRPSMKEVLETLEQIEALKSRTRETRGGSGTSSRDRAHGRSAAVHQRSSPRGNGDGRRGSRPTNGHATKAR

SEQ ID NO: 2094 - protein, 226 aa, Agrobacterium tumefaciens str. C58
MKIKAAEAALSHVQDGMRLGIGTGSTAEEFVRLLAEKVAAGLKVEGVPTSERTARLCVELGVPLKSLDELPELDLTIDGADEVDHVLRLVKGGGGALLREKIVAAASGRMIVIADQSKVVETLGAFPLPIEINPFGQVATRIAIEKLAARSGLSGELTMRSSGDGAFMTDGGHLILDASFGRIPDAEALARELNTIPGVVEHGLFINLASLAIIAGPEGARMMQAV

SEQ ID NO: 2095 - protein, 351 aa, Pneumocystis carinii
MTASSRNVRFNVSDDYEILDVIGEGAYGIVCSAIHKPSGQKVAIKKISPFDHSMFCLRTLREMKLLRYFNHENIISILDIQQPQDFESFSEVYLIQELMETDMHRVIRTQDLSDDHCQYFIYQILRALKAMHSADILHRDLKPSNLLLNANCDLKVCDFGLARSAVSTEDSSSFMTEYVATRWYRAPEIMLTFKEYTKAIDIWSVGCILAEMLSGRPLFPGKDYHHQLMLILDVLGTPTMEDYYGIKSRRAREYIRSLPFKKRVSFASIFPRANPLALDLLEKLLAFNPAKRVTAEEALQHNYLEPYHDPDDEPTAPPISPSFFDFDRIKDSLTKNDLKILIYKEIMSMNN

SEQ ID NO: 2096 - protein, 102 aa, Yersinia pestis KIM
MSLLLSAQVRHPLKDRPRSLHYCGKIIEGNISMSNKMTGLVKWFDAGKGFGFITPADGSKDVFVHFSAIQSNDFKTLDEGQNVEFSIENGAKGPSAVNVIAL

SEQ ID NO: 2097 - protein, 406 aa, Micrococcus sp. 28
MAAESTGQAGVSPAPTVSPAAGAAPPDSSGVSTPPDASPAGASSLPEVPAAPPAEDAPAPSPEPDSPPRPETAPAPEATALLGDAAAIAPAPAGRSAAFPSLAAAEPLAPPATAPPWPTPVWEAPSPDLSFEFRGRTPGAAALADWPPAAGATPAAARPAAVPARAPLIGDAPPAAGLTPAPESSPSLASTRSTVPSTPPAPVPAAEVPPAAPVPWSENSAEDAPLPAAPAAPLSALLPAAPAAPLSAPPLAEPPAAPGSLPAPFAPAVSPEAVAPAVPLAPPAVSAAAPPPARPPPGPAAPPPPAAALPPPPAAPPARAAPAAAPAPAPPVPARMAAPAAMPRAAPATPAPENPPRPAPTTGDRNRIRVGRTSPAIPSRRMPVIAEESRTPKSSEVLVSSMNPNA

SEQ ID NO: 2098 - protein, 177 aa, Glycine max
  unsure (1)..(177): unsure at all Xaa locations
MVLEATMICIDNSEWMRNGDYSPSRFQAQTDAVNLICGAKTQSNPENTVGVLTMAGKGVRVLVTPTSDLGKILACMHGLEIGGEMNLAAGIQVAQLALKHRQNKKQQQRIIGFAGGPVKHEKKMLEMXGRKLKKKNILDLKGISFRKFQCRPVNVNLEHLSPFSLLLIVFFFIRNPL

SEQ ID NO: 2099 - protein, 307 aa, Glycine max
  unsure (1)..(307): unsure at all Xaa locations
NICFFYIVSLFFFFFFFFFFFFFFFFFYHNKLQYRKLDDVLRISRLISRSFSSTSFFSRGGNGFLGSRHCKYSTSSAIEEEPVKPSVQVEHTQLLIDGKFVDAASGKTFPTLDPRTGEVIAHVAEGHSEDVDRAVAAARKAFDHGPWPKMTAYERQRILLRAADLLEKHNDELAALETWDNGKPYEQAAKIEVPMLVRLIRYYAGWADKIHGLTVPADGPYHVQTLHEPIGVAGQIIPWNFPLLMFAWKVGPALACGNTIVLKTAEQTPLSALYAAKLFHEAGLPAGVLNVVSGFGXTAGAALASPW

SEQ ID NO: 2100 - protein, 380 aa, Lagenaria siceraria
MKKMALHSNKHRTQRLHNSLFFFDFLHCTEQQHLQTEHPIFLNNGGTNDFPLFQQTTTHFLVYEDEELNHLLSKEKDQNLQTGAVLKTLVQTDNALSLARTEAIDWLLKVNAFYGFSSLTALLAINYLDRILSGPYFQRDKPWMLQLAAVTCISLAAKVEEIRVPLLLDLQVEDSKYIFEAKTIQRMELLVLTALQWKMHPVAPVSFLGIITKGLGMKNQYIQREFLRRCERILLSLVSDSRSVGILPSIMAVSAMVSVVEEMGNCNPLEEFQDQLLNALKINKGRVKECCKVIMEAKIKGSGKRKHVEEEAEAEAESESSEAETEGEAEAEAGSPNGVMEANFSCESSNDSWEMGTIVSEYTHFSSSSSSSSKRIRPTR

SEQ ID NO: 2101 - protein, 350 aa, Glycine max
FLPSLSQLSFVSRSEQRDQENTVCEREEREFPKPCRPTVIISVAFGVLGNIASFVCFLAPLPTFYRVCKKKSTEGFQSIPYVAALFSAMLWIFYAYVKTGEMLLITINAFGCVIETIYLAVFITYCPKKARMSTLRMIVLLNFGGFCTIVLLTHLLAEGEGRVKLLGWICVVFATSVFAAPLSIIRVVIRTKSVEFLPFPLSLLLLISAIMWLLYGISLKDIYVTLPNVVGLTFGVIQIGLYAMYRNNKPVKDQKLPEHKGDIVDNNNESVIAPTVNGEKQEQEVKPQGGIIETGEKKEENNKQDQQQPEENKKFDQVVHEQTKLNNKNTNNINDDDNNKTGERVISCEV

SEQ ID NO: 2102 - protein, 176 aa, Cucurbita pepo
RVGLSGKGIPVGKLSLYTALGGVRPSACLPITIDVGTNNEKLLNDEFYIGLKQRRATGEEYYELLHEFMTAVKQNYGEKVLIQFEDFANHNAFELLAKYRTTHLVFNDDIQGTASVVLAGAVSALKLIGGTLADHTFLFLGAGEAGTGIAELIALEISKQTNAQLRRPARRFGWWT

SEQ ID NO: 2103 - protein, 497 aa, Rubrivivax gelatinosus PM1
MDKASGKTLDAALVWCRRDLRAHDHAALYHALRAARRVWVAFVFDTEILDPLPRTDRRVEFIRDSLVDLDAQLHTLGRSHGTEGVGLIVRHGRARDEIPRLAAALHVQAVYANTDYEPAAVARDAQVRGALAQTGIAFHPAKDQVVFDTDEVLTGAGTPYGVFTPYKNAWLKKLEPFYLQAYPVGRHAGALAPRPAGEAAGVPTLAAIGFEPTNLAALKLAPGTAGGRALLEDFGDERIDRYDQTRDFPAVKGPSYLSVHLRFGTLSIRELARLAWDRARAGSRGAEVWLSELIWRDFYHQVLHHHPQVVERSFKPEYDKIKWEHGKHADALFAAWCEGRTGYPLVDAAMLQINQTGYMHNRLRMVVASFLCKDLGLDWRRGERYFAEKLNDYDLAANNGGWQWASSSGCDAQPYFRIFNPVSQSQKFDAQGKFIRRYLPQLAALPDAALHAPWDAKPLDLVAAGLVLGRDYPEPIVRHELARERTLARYAVVKGAR

SEQ ID NO: 2104 - protein, 487 aa, Brucella suis 1330
MKAQPKASHFIGGAFVEDKAGKPLPVIYPATDEEIASLYSATPGIIEAAYAAALKAQGEWAALKPVERGRILRRTAEILREKNRKLSKLETLDTGKALQETLVADAASAADALEFFGGIISGFNGEFVELGGSFAYTRREALGICVGIGAWNYPIQIAAWKSAPALAMGNAFIFKPSENTPLSALALAEAYKEAGLPDGLFNVVQGYGDVGAALVNHRLTAKVSLTGSVPTGRRIMAQAGEQLKHVTMELGGKSPLIVFDDADLESAIGGAMLGNFYSTGQVCSNGTRVFVHKNIRERFIERLVERTRKIRIGDPFDEATQMGPLISAAQRDKVLSYIKKGKAEGATLACGGGVPKLQGFDKGFFIEPTVFADVTDTMTIAREEIFGPVMSVLEFSDEDEVIARANDSEFGLAAGVFTADLSRGHHVIGQIKAGTCWINAYNLTPVEVPFGGYKQSGIGRENGIAALAHYSQIKTVYVEMGKVDSPY

SEQ ID NO: 2105 - protein, 165 aa, Triticum aestivum
MAQEGLRLVCPPVSAHEGRLPRQYTLEGQGAKKDISPPLEWYGVPDGTRSLAVVVQDIDADERVPWTHWVVANISPEEKGLPEGFSGAGGNANAGSGAGGVQEGVNDWKQPGWRGPVPDSHGHRIQFRLYALDDVLSLGNKVTVDKVMEAIEGHVLGEAEITAVF

SEQ ID NO: 2106 - protein, 213 aa, Gossypium barbadense
ALNSAEAEAPTAAPSQLNLTEIMSKQGCKAFADLLTASGADDKFNENMDAGLTVFCPTDGAVKSFMPKYKNLTSSKKVSLLLYHGIPVFMSLQMLKTNNGVMNTLATDGANSYDFSVSNEDEVVSLDTTVVTSKVLGILKEEEPLIVFKINKVLMPKELFKPVVAKEANAPEADAPADSEPADAEDNTNGVQGLGGGRLVMVVLSLWIGILLI

SEQ ID NO: 2107 - protein, 439 aa, Rubrivivax gelatinosus PM1
MKILISNGRVVDPASGRDERADIAIANGRILTIGKVPADFAPERTIDAAGLVVAPGLVDLAARLREPGHEHEGMLESELAAAAAGGVTSLVCLPDTDPTLDEPGLVEMLKFRARKLSRCRLFPLGALTRGLGGEVLTEMAELTEAGCVGFSQADAVLRDTQVLSRALQYAATFGYTVWLRPNDPWLGSGVAASGAVATRLGLSGVPVAAETIALHTLFELVRSSGARVHLCRLSSAAGVALLREAKAEGLPVTADVSINSLHLTDVDIGYFNPAMRLVPPLRQQRDRDALRAGLADGTIDALVSDHTPVDEDAKTLPFAEAEPGATGLELLLSLALKWGEDSGAGLRRALATVSCEPVRVLGDALGSLASSAGRLVEGGVADVCVFDPEARWTVAPAALRSQGKHTPFAFDTSGFALPGRVRATLVAGHVAHEATRDAA

SEQ ID NO: 2108 - protein, 213 aa, Gossypioides kirkii
ALNSADAEAPTAAPSQLNLTEIMSKQGCKAFADLLTASGADDKFNENMDAGLTVFCPTDSVVKGFMPKYKNLTASKKVSLLLYHGVPVFMSMQMLKTNTGVMNTLATDGANSYDFSVSKEGEVVSLDTTVVTAKVSGILKEEEPLIVFKINKVLMPKELFKPVVAKEANAPQADAPADSEPADAEDNTNGVQGLGGGRLVMVVLSLWIGILLI

SEQ ID NO: 2109 - protein, 229 aa, Brassica napus
RPTRPLKDVILQGTDAFISGYGMKVFEYLAVDEQFSEMFDPGMSESSTMVMKKVLGKYTGFEDVNTLVDVGGGVGTVLGIVTSMYPHIKGINLDLASVLVNATPYPGVQHVAGDMFVEIPKGDALFMKWILHAWNDENCVKILKNCWTSLPDKGKVIVLDVVMRTEPKCYDFASNMELTMDMFILSQRSGGRERTLPELEALGCAAGFGRCEFICRAYSFSLIEFHKLI

SEQ ID NO: 2110 - protein, 284 aa, Ralstonia metallidurans CH34
MSATNETIDAGQQASQDWWRTEIIDMKPGEIRYRGYPIEQLIGNVSFAQMIWLMLRGELPGKREGELLDAALMAAVDHGPQAPSIAIARMAATCGVGLNNAMASAVNVLGDVHGGAGEQAVELYQDIARRFDAGTPFDDAVAAGLAHYRDLHGKFVSGFGHRFHPLDPRAPRLLALVDQAADDGVVSGRYAAIARAVEKALGAGRDKPIPMNIDGATAVIYAELGFPAPLARGLFCLSRSVGILSHAWEQTQQGGRNKGPIPRQFIWTYDGQPQRDVPVDGGAV

SEQ ID NO: 2111 - protein, 129 aa, Triticum aestivum
  unsure (1)..(129): unsure at all Xaa locations
MSDSEEHHFESKADAGASKTYPQQAGTVRKNGFIVIKNRPCKVVEVSTSKTGXKHGHAKCHFVAIDIFNGKKLEDIVPSSHNCDIPHVNRTEYQLIDISXEDGFVXLLTQDGNTKDDLXLPTDEILWPD

SEQ ID NO: 2112 - protein, 354 aa, Nicotiana tabacum
MKTTKPLKELKLSVPAQDTPISSFLTASGTFHDGDLLLNQKGLRLISEENESPASETKEIDLQFSLEDLETIKVIGKGSGGVVQLVRHKWVGTLFALKVIQMTIQEDIRKQIVQELKINQASQCSHVVVCYHSFYHNGAISLVLEYMDRGSLADVIRQLKTILEPYLAVVCKQVLQGLVYLHNERHVIHRDIKPSNLLVNHKGEVKITDFGVSAMLASSMGQRDTFVGTYNYMAPERISGSTYDYKSDIWSLGMVILECAIGRFPYIQSEDQQAWPSFYELLEAIVSSPPPSAPADQFSPEFCSFVSACIQKDPRDRSSALDLLSHPFIKKFEDKDIDFGILVSSLEPPVNFPR

SEQ ID NO: 2113 - protein, 317 aa, Haemophilus somnus 2336
MTTQLDALRNMTVVVADTGDIDAIKKYQPQDATTNPSLILSASSLPQYAPLIDEAIAYAKAKSADKTQQLIDAEDKLAVNIGLEILKIVPGRISTEVDARLSYDTQATVEKARKLIALYNEAGISNDRILIKIASTWQGIRAAEILEKEGINCNLTLLFSKAQARACAEAGVYLISPFVGRILDWYKANSDKKEYAPAEDPGVISVTKIYNYYKQYGYNTVVMGASFRNVGEITELAGCDRLTIAPALLKELQENSTALVRKLAFKGEVKAKPQPLTESQFYWQHNSDPMAVEKLADGIRKFAIDQEKLEKMLLEKF

SEQ ID NO: 2114 - protein, 424 aa, Brucella melitensis 16M
MNPNTSPVWHPFTQHRLEPRPDRIVRTEGAYLFREDGSAVLDMISSWWVITHGHRHPAIMDAIRQASADLDQIIFADFSHQPAEELAKGLIALAPDGLSHVFYSDSGSTAVEVAIKMALGYFYNRGEPRSRIAVLQHSYHGDTIGTMSAGERGVFNAAYGALLFNVETLPFPSPGHEQPMLDRLEDVCRGGDLAALLVEPLVLGAGGMKMYPAHILATMREITERHGVLLAVDEVMTGWGRTGTLFACEQAGITPDILCTSKGLTGGSLPLAATLCTAAIFDAHYSDDRSKTFFHSSSYTANPIACAAALANLQVWLSEPVTERISALTRMQTERLHRFKDDSRFAGLRQTGTITALELDVPAGGYLSDAGPKLRTFFKQNGVLLRPLGNVIYVMPPYCVTAEELDRTYDVITQGVDMIAGQTR

SEQ ID NO: 2115 - protein, 155 aa, Glycine max
MASTKKITLKSSDGEAFEVEEAVALESQTIKHMIEDDCADSGIPLPNVTSKILAKVIEYCKKHVEANSADEKPSEDVLKAWDVDFVNVDQATLFDLILAANYLNIKSLLDLTCQTVADMIKGKTPEEIRKTFNIKNDFTPEEEEEVRRENQWAFE

SEQ ID NO: 2116 - protein, 201 aa, Triticum aestivum
  unsure (1)..(201): unsure at all Xaa locations
MVLESTMICIDNSEWMRNGDYSPSRFQAQADAVNLICGAKTQCEPGEXTVGVMTXAGKGVRVLVTPTXDLGKILACMHGLEVGAEANLAAAIQVAQLALKHRQNKRQQQRIIVFIGSPVTYDKKVLETIGKKLKKNNVAPLTLLHFMGETXDDXKPDENWQALIAAVNNSDSXHIVHVPPGXHALSDVLRSSPIFPGRDGV

SEQ ID NO: 2117 - protein, 227 aa, Arabidopsis thaliana
MGRGKIVIQKIDDSTSRQVTFSKRRKGLIKKAKELAILCDAEVCLIIFSNTDKLYDFASSSVKSTIERFNTAKMEEQELMNPASEVKFWQREAETLRQELHSLQENYRQLTGVELNGLSVKELQNIESQLEMSLRGIRMKREQILTNEIKELTRKRNLVHHENLELSRKVQRIHQENVELYKKAYGTSNTNGLGHHELVDAVYESHAQVRLQLSQPEQSHYKTSSNS

SEQ ID NO: 2118 - protein, 180 aa, Musa acuminata
  unsure (1)..(180): unsure at all Xaa locations
MAKSYPTVSEEYQKAVEKAKRKLRGLIAXKNCAPLMLRLAWHSAGTYDVVSKTGGPFGTMRFPAELAHGANNGLNIAVRLLEPIKEQFPILTYADFYQLAGVVAVEVTGGPEIPFHPGREDKPEPPVXGRLPDATKGSDHLRDVFGHMGLSDRISLHYLVDTHWEGAXRXDLVSKGLGLP

SEQ ID NO: 2119 - protein, 129 aa, Brassica napus
PSLLSPPLLLARARFYKGFGARDGRRRQREPRGGGGVREQDRFLPIANISRIMKKAVPANGKIAKDAKETLQECVSEFISFVTSEASDKCQKEKRKTINGDDLLWAMATLGFEEYVDPLKIYLQKYRDM

SEQ ID NO: 2120 - protein, 161 aa, Zea mays
  unsure (1)..(161): unsure at all Xaa locations
MTRVIHDSGDDMQKEALDLVSSDVNFPKGHFPDYRIGPNNQIIDPEETHEAVPLKEIVAKETAQLLEQHKRLSVRDLKEKFEKGLSGASKLSEEXAKRREAASLDRQVLLKKLRDVLDTLKGRVAGRNRDDAEEAISLVEALAVQLTQREGEXIYEKAEVK

SEQ ID NO: 2121 - protein, 293 aa, Anabaena variabilis ATCC 29413
MGLTDNYKLNLIQWYPGHIAKAEKNLKEQLSRVDVVFEVRDARIPLATHHPQIDEWVGNKARILVLNRLDMIPPQVRSLWIDYFQNRGEVPYCTNAQHGQGVAGVAKAAQAAGVELNQRRRDRGMLPRAVRAVVIGFPNVGKSALINRLLGKRVVESAARPGVTRQLRWVRISDQLELLDAPGVIPVKLGNQEAAVKLAICDDIGQASYDNQLVAAALIDIVNSLQEQAGELLPRSPLYARYELDPTPHTGEGYLHALAEYRHKGDVERTARQLLTDYRKGLLGTLPLELPPM

SEQ ID NO: 2122 - protein, 216 aa, Bacillus sp. KSM-K16
MKFFVDTANINEIKEANELGILDGVTTNPSLVAKEGVDFHERIAEIAKLVPGSVSAEVISLDAEGMIEEGKTLAAISENITVKVPMTVDGLKAVKAFAELGIKTNVTLIFSVPQALLAARAGATYVSPFLGRLDDIGHDGLQLISDIADIFSTHGLPTQIIAASVRHPVHVSEAAKRGAHIATIPLNVIKQLTGHPLTDKGIEKFLADWNKENVEK

SEQ ID NO: 2123 - protein, 371 aa, Malus x domestica
MGKGGMSDGDHADRCCGEAINGDVQQENMAAWLLGVKNLKIQPYKLPNLGPHDVRVRLRAVGICGSDVHHFKNMRCVDFIVKEPMVIGHECAGIIEEVGSEVEHLVPGDRVALEPGISCKRCNLCKQGRYNLCRKMKFFGSPPNNGCLANQVVHPGDLCFKLPDNVSLEEGAMCEPLSVGIHACRRANVCQETNVLVVGAGPIGLVTLLAARAFGAPRIVIADVNDERLLIAKSLGADAVVKVSTNIEDVAEEVAKIQKVLENGVDVTFDCAGFNKTITTALSATRPGGKVCLVGMGQREMTLPLATREIDVIGIFRYQNTWPLCLEFLRSGKIDVKPLITHRFGFSQKEVEEAFETSARGGNAIKVMFNL

SEQ ID NO: 2124 - protein, 352 aa, Solanum demissum
MEVETHMSFRTAEKISILVVNDDATYLPVVAGLLKKCNYQVVTVKYPIDALSKLRIKGDSFDLVVTDVHKSDINGFELQQVITQAFEIPVLLMSADDKEGTILKGLKGVSVDDQRDQGPCTALQVKRGKKPVPGKSAMKLGKQGKDNSVNFVLPTKSQIIWTDSLHNTFLEAISNIGFDKAVPKKIHEHMKVPGLSRENVASHWQKYRIYLRRVTDASSSIQVPDINLASRANQSTIASGTLGKHRQFHQENFGVQSSVPSLLIHTTGYRTGSLQHLKNKGKEVDDVLDPVRNFSVFHNVSATQGSQGIGDLSASSMNQGNDQPHQQNNEDEALVNFDGGFNQDMEKEDYLQ

SEQ ID NO: 2125 - protein, 479 aa, Zea mays
MDPTAAPGSGGTPADSDATSPTNTTVTLPPLTLRDVPRLASSSPAAAAAAAVPNPISRHPYFHPPANFYISPGDVSLRHAFFDLVSAAPTPLVAYRRGGPRRDLAVDPAAARAALVTCGGLCPGLNTVLRELVVGLQELYGVRHVFGVAAGYRGFYGADEDHVRLHPAAVDDWHKKGGTVLKTTRGGFDLGKIVDGIVARGYTQIYAIGGDGTMRGALAIFEEFKRRGLNISITGIPKTVDNDIGIIDRSFGFQTAVEVAQQAIDAAHVEAVSAVNGAGIVKLMGRSTGHIALHATLSSRDVDCCLIPEVDFYLEGKGGLFEFLYERIKKKGHAVVVVAEGAGQELIPRTDDQKREQDESGNTVFLDVGPWLKSELGRWWKREHPDELFTVKYIDPTYMIRAVPANASDNLYCTLLAHSAIHGVMAGFTGFVPGPINGTYSYIPLEDVAVAKNPVDVNDHKWAWVRSVTNQPDFLKSQA

SEQ ID NO: 2126 - protein, 334 aa, Mesorhizobium sp. BNC1
MQGITKLSNESGEMDLIEFPRPIAGHGNVVLEVAAAGICGTDIHILKGEYKVVPPVIVGHEVCGFVCDAGEGVDPALVGKRVVTETFYSVCHTCAYCRNGRPNMCANRKSIGTHANGAMTRWVEVPSHGLHAVPDFMSDAAASMAEPVAFVTNSMAGEYNYVGPDNEVLVIGPGAIGLIAAQVARAAGANVNIRGTTKDKARLDLAERLGFSVSDNDTPLVPQSFDRVVECSGSPYGIADALAALTKGGHLMQMGIVGRDSQLPFDYVCYKELKITAGFASTPKSWLRAMKLIRDRKVDLEPLVSDVCALHAWKTAFDRSMSAEGVKFVFDPRL

SEQ ID NO: 2127 - protein, 498 aa, Bordetella parapertussis 12822
MTLHDSAYWRAQAAALAPEGRAYIDGAYCDAADGATFAAHSPIDGRKLADIAACGAADVDRAVAAARRAFEAGVWSGLAPRERKHRLLRLAALITEHQEELALLETLDMGKPIRDALAFDLPETARCYAWYGEAIDKRYDEIAPTGADALATITREPLGVVAAVVPWNYPLMMAAWKVAPALAVGNSVILKPAEQASLSALRLAALAEQAGIPPGVFSVVPGLGAQAGQALGLHPDVDCIAFTGSTATGKRFMTYSGQSNLKRVWLECGGKSPHIVFADCPDLDRAAQVAALAIFSNQGEVCIAGSRLYVQHGIYDAFMEKVAAFAATLRPGNPLDPDSALGAMVDERQTQAVMARIAAGAQEGARLRLGGRQVLTDSGGYYIEPTIFDCPGQDNSLVREEIFGPVLAAQGFADEDEAVALANDSIYGLGAGLWTADLGRAHRLSRRLRAGLVWVNCYADGDITVPFGGVKQSGFGRDKSLHAMDKYSDLKTTWISLR

SEQ ID NO: 2128 - protein, 396 aa, Escherichia coli [sequence omitted]

SEQ ID NO: 2129 - protein, 504 aa, Burkholderia cepacia R18194
MLHRRALVLSILVLASCGLGYELISSALSSYLLGDSILQFSSVIGCYLFAMGIGSWLAKFVEDDDVLDRFVDIELLVGLLGGVSAALLFAVFAWLAAPFRAALYALVLALGMLIGMEIPLVMRAFQQRRQAFRHTVSEVLTFDYLGSLAVSLIFPLVLAPRLGLLRTSFLFGLLNAFVALWTTHLFRDEIRNVRGKLMRASLVIGLLVAGFALSDRITHWAEHGVYGDETIYSETTPYQRIVLTQWHDDMRLYLNGNLQFSSRDEHRYHEALIHPTIDALPWAKRVLVLGGGDGLAVRELLKHRNLEQITLVDLDPAMTKLFSTSAPLVKLNQGSLKDPRVHVINDDAVRWLESNADVYDAIVVDFPDPTNFGLGRLYSVPVFRLLARHLSENGYAVIQSTSPYFAPHAYWTIIATLHEAGLNTWPYHCYVPSFGDWGFVIAGKRRDFTVPTHYSVPTRWLDAQTAAEMFHFPADMPALPMSPNELNDQPLVRRFDDDWKHVLR

SEQ ID NO: 2130 - protein, 262 aa, Bacillus cereus G9241
MPMIGLGVYKAKEGDEVKRAVKTALEVGYRSIDTATVYENESGVGEAVRESGIPREDIFITTKVWNDDQGYEETLEAFEKSLKKLQMDYVDLYLIHWPIRGKYVDTYRALEKLYEEGKVRAIGVSNFHKHHLELLLPNCKVKPMVNQVELHPMLTQFELRNFCQGEQIQMEAWSPLMRGGEVFQHPIIQAIATKYEKTSAQVILRWDIQSGVVTIPKSVTPSRIQENFSIFDFSLTEEEMTQINTLNRNLHVGTNPDKYDTL

SEQ ID NO: 2131 - protein, 189 aa, Zea mays
STQSSVNHPTNHGFEFQELPKPEVPHPVPELTKPEVPPHPTAVPKLPKPEVPHPVPELRKPELTPHPAAVPELPKPEVPHPMPELPKPEVPPHPTAVPELPKPEVPHPVPELPKPELPPHPAVPELPKPEVPHQVAPELPKPELPPHPTVPKLPHPEVPEVPNHELPPLPKAELPPKPEGHYPEPEAKP

SEQ ID NO: 2132 - protein, 335 aa, Pyrococcus abyssi GE5
MKAKDIVLKKSEEIEGLAIEGPWLDEVESLEGVISYYEKIGFQATHLGKAVKIWRKVEEKRKGGEEVRVFLGYTSNIVSSGLREIIAWLVKERKVDVIVTTAGGIEEDFIKTLKPFILGDWEVNDAELREKGINRIGNIFVPNDRYIEFEKYMVPFFERILDIERKLKRPLTASEFIYEMGRYMDEVLGKEKEKSIIYWAYKRDVPIFCPAITDGSIGDMLYFFKEERHDSKLVIDIANDIVKLNNLAITAKETASIILGGSLPKHAIINANLFRGGTDYAIYISTAVPWDGSLSGAPPSEGVSWGKIKAKADYVEIWADATLVFPILVWMVMKA

SEQ ID NO: 2133 - protein, 546 aa, Triticum aestivum
  unsure (1)..(546): unsure at all Xaa locations
MGNCCRSPAAAAREDVSSSHFPASAAGXKKPHQPRNGAAARGPAGEAAAQKRLAVLGEEGCDFIGGIDDKYLLDRELGRGEFGVTYLCVDRDTKEQLACKSISKRKLRTPVDVEDVRREVAIMRHLPRSPSIVTLREACEDEGAVHLVMELCEGGELFDRIVARGHYTERAAAAVTRTIVEVVQLCHRHGVIHRDLKPENFLFANKKENSPLKAIDFGLSIFFKPGEKFSEIVGSPYYMAPEVLKRNYGPEIDIWSAGVILYILLCGVPPXFWAETEQGVAQAILRGNIDFKREPWPNVSENAKDLVRRMLEPDPKLRLTAKQVLEHHWLQNAKKAPNVPLGDIVKSRLKQFSRMNRFKRRALRVIADHLSAEEVEDIKEMFKVMDTDNDGIVSYEELKSGIAKFGSHLAESEVQMLIEAVDTNGRGALDYGEFLAVSLHLQRMANDEHLRRAFLFFDKDGDGFIEPEELQEALAEDGAVDITEVVKDILQEVDTDKDGKISFEEFVAMMKTGTDWRKASRHYSRGRFNSLSIRLIKDGSVKMGNE

SEQ ID NO: 2134 - protein, 151 aa, Brassica napus
  unsure (1)..(151): unsure at all Xaa locations
MASSMXSSAAVXTSPXQAXMXAPFXGLXSSAXFPVTRXANNDITSIASNGGRVSXMKXWPPVGKKKFXTLSYLPDLXEVXLGKEXYXLLRNXXIPCXEFELXHXFXYXXHGTTPXYYDGRYWTMXXLPLXFGCTXSAQVLKXXQEXXTEYP

SEQ ID NO: 2135 - protein, 328 aa, Trichosporonoides megachiliensis
MSYNKNIPLNDGNSIPALGYGTWQAEPGQVGEGVKLAVKAGYRHLDLAKVYQNQTEIGQALKELFDEGVVKREDLFITSKLWNNRHAPEHVEPALDETLKELGLSYLDLYLIHWPVAFKFTTPDELLPADPTNKDLAYVDDSVKLSDTWKAVVALKKTGKTKSVGVSNFSTRLVDLVEEASGERPAVNQIEAHPLLQQDELVAHHKSKNIVITAYSPLGNNVAGKPPLTENPGIVDAAKRLNHTPAAVLIAWGIQRGYSVLVKSVTPSRIKSNFEQITLSDEEFQRVTNLIKEYGESRNNVPFNYKPSWSIDVFGTQDEAKATHKINA

SEQ ID NO: 2136 - protein, 328 aa, Trichosporonoides megachiliensis
MSYNKNIPLNDGNSIPALGYGTWQAEPGQVGEGVKLAVKAGYRHLDLAKVYQNQTEIGQALKELFDEGVVKREDLFITSKLWNNRHAPEHVEPALDETLKELGLSYLDLYLIHWPVAFKFTTPDELLPADPTNKDLAYIDDSVKLSDTWKAVVALKKTGKTKSVGVSNFSTRLVDLVEEASGERPAVNQIEAHPLLQQDELVAHHKSKNIVITAYSPLGNNVAGKPPLTENPGIVDAAKRLNHTPAAVLIAWGIQRGYSVLVKSVTPSRIKSNFEQITLSDEEFQRVTNLIKEYGESRNNVPFNYKPSWSIDVFGTQYEAKATHKINA

SEQ ID NO: 2137 - protein, 375 aa, Shewanella oneidensis MR-1
MSDAKKLTGAGLRGQSAGETALSTVGVSGSGLTYRGYDVKDLAENATFEEVAYLILYGELPTTAQLAAYKTKLKGMRGLPQALKEVLERIPADAHPMDVMRTGCSMLGNLEAEHSFSEQSQIADRLLAAFPSIICYWYRFSHDGVRIDTETDDDQIGAHFLHLLHGKAPSALHTKVMDVSLILYAEHEFNASTFTARVCASTLSDMHSCVTGAIGSLRGPLHGGANEAAMELIQDMKDEADARDVLMGKLERKEKIMGFGHAIYRDSDPRNAIIKEWSEKLAADYGDDRLYRVSVACEALMWEQKKLFCNADFFHASAYHFMGIPTKLFTPIFVCSRVTGWTAHVMEQRSNNRIIRPSADYVGVSPRKVIPIANR

SEQ ID NO: 2138 - protein, 330 aa, Trichosporonoides megachiliensis
MSYKQYIPLNDGNKIPALGFGTWQAEPGQVGASVKNAVKAGYRHLDLAKVYQNQSEIGVALQELFDQGIVKREDLFITSKVWNNRHAPEHVEPALDETLKELGLSYLDLYLIHWPVAFKFTTPQELFPTEPDNKELAAIDDSIKLVDTWKAVVALKKTGKTKSVGVSNFTTDLVDLVEKASGERPAVNQIEAHPLLQQDELVAHHKSKNIVITAYSPLGNNVSGKPPLTQNPGIEATAKRLNHTPAAVLLAWGIQRGYSVLVKSVTPSRIESNYDQITLSPEEFQKVTDLIKEYGESRNNIPLNYKPSWPISVFGTSDEAKATHKINTNL

SEQ ID NO: 2139 - protein, 277 aa, Glycine max
  unsure (1)..(277): unsure at all Xaa locations
MPLVLAKSDSIQIREVWNDNLEEEFALIREIVDDYPYIAMDTEFPGIVLRPVGNFKNSYDYHYQTLKDNVDMLKLIQLGLTFSDEHGNLPTCGDESGTCCIWQFNFREFNVNEDVFANDSIELLRQSGIDFKRNNENGIDAHRFGELLMSSGIVLNDNVHWVTFHSGYDFGYLLKLLTCQDLPDTQVGFFNLINMYFPTVYDIKHLMKFGSSSMEAVAKLHEVFYVXTVGICHQAGSDSLLTSCTFRKLKDNFFSGSLEKYAGVLYGLGVENGQGSH

SEQ ID NO: 2140 - protein, 70 aa, Triticum aestivum
MADEGTANCIDIILAIILPPLGVFFKFACGIEFWICLLLTFFGYLPGIIYAVWVITKLGLQEGLLTSASK

SEQ ID NO: 2141 - protein, 462 aa, Triticum aestivum
MVDSSAGGKMSAHGGGGGGRTRVGRYELGRTLGEGTFAKVKFARNVETGENVAIKILDKDKVLKHKMIAQIKREISTMKLIRHPNVIRMYEVMASRTKIYIVMELVTGGELFDKIASRGRLKEDDARKYFQQLINAVDYCHSRGVYHRDLKPENLLLDANGTLKVSDFGLSALSQQVREDGLLHTTCGTPNYVAPEVINNKGYDGAKADLWSCGVILFVLMAGYLPFEDSNLMALYKKIYKADFSCPSWFSTSAKKLIKKILDPNPNTRITIAEVINNEWFKKGYQPPRFETAEVNLDDINSIFNESGDPAQLVVERREERPAVMNAFELISTSQGLNLGTLFEKQTDSVKRETRFASRLPANEILSKIEAAAGPMGFNVQKRNYKLKLQGENPGRKGQLAIATEVFEVTPSLYMVELRKSNGDTLEFHKFYHSISNGLKDVMWKPEGSIAEGDETRHRRSP

SEQ ID NO: 2142 - protein, 317 aa, Nicotiana tabacum
MAQNNEQQQQGQGLIEAGVLDDIINRLLEFRNARTVRQVQLSEAEIRSLCSASREIFLQQPNLLDLKPPIKICGDIHGQYGDLLRLFEYGGFPPEANYLFLGDYVDRGKQSLETICLLLAYKIKYPENFFLLRGNHECASINRIYGFYDECKRRFNVKLWKCFTECFNCLPVAALIDEKILCMHGGLSPVLTNLDQIRNLPRPTDVPDSGLLCDLLWSDPSREVKGWGMNDRGVSYTFGPDKVAEFLMQHDMDLVCRAHQVVEDGYEFFAERQLVTIFSAPNYCGEFDNAGAMMSVDESLMCSFQILKPTDRKPRFL

SEQ ID NO: 2143 - protein, 436 aa, Achromobacter obae
MTKALYDRDGAAIGNLQKLRFFPLAISGGRGARLIEENGRELIDLSGAWGAASLGYGHPAIVAAVSAAAANPAGATILSASNAPAVTLAERLLASFPGEGTHKIWFGHSGSDANEAAYRAIVKATGRSGVIAFAGAYHGCTVGSMAFSGHSVQADAAKADGLILLPYPDPYRPYRNDPTGDAILTLLTEKLAAVPAGSIGAAFIEPIQSDGGLIVPPDGFLRKFADICRAHGILVVCDEVKVGLARSGRLHCFEHEGFVPDILVLGKGLGGGLPLSAVIAPAEILDCASAFAMQTLHGNPISAAAGLAVLETIDRDDLPAMAERKGRLLRDGLSELAKRHPLIGDIRGRGLACGMELVCDRQSREPARAETAKLIYRAYQLGLVVYYVGMNGNVLEFTPPLTITETDIHKALDLLDRAFSELSAVSNEEIAQFAGW

SEQ ID NO: 2144 - protein, 310 aa, Nicotiana tabacum
MAQNGQGIEPAVLDDIINRLLEFRNARTVRQVQLSEAEIRSLCTASKEIFLHQPNLLELEAPIKICGDIHGQYGDLLRLFEYGGFPPEANYLFLGDYVDRGKQSLETICLLLAYKIKYPENFFLLRGNHECASINRIYGFYDECKRRFNVRLWKTNTDCFNCLPVAALIDDKILCMHGGLSPDLTDLDEIRNLPRPTDIPDSGLLCDLLWSDPSREVKGWGMNDRGVSYTFGSDKVAEFLMQHDMDLVCRAHQVVEDGYEFFAERQLVTIFSAPNYCGEFDNAGAMMSVDENLMCSFQILKPTDRKPRFL

SEQ ID NO: 2145 - protein, 63 aa, Triticum aestivum
  unsure (1)..(63): unsure at all Xaa locations
FEDGFVSLLPDNGNPKNALKLPTDETPLGQIKDGFFXRKDLVVFFLSPLGEEQINALKDLGPK

SEQ ID NO: 2146 - protein, 283 aa, Arabidopsis thaliana
MDAKETSATDLKRPREEDDNGGAATMETENGDQKKEPACFSTVIPGWFSEMSPMWPGEAHSLKVEKVLFQGKSDYQDVIVFQSATYGKVLVLDGVIQLTERDECAYQEMITHLPLCSIPNPKKVLVIGGGDGGVLREVARHASIEQIDMCEIDKMVVDVSKQFFPDVAIGYEDPRVNLVIGDGVAFLKNAAEGSYDAVIVDSSDPIGPAKELFEKPFFQSVARALRPGGVVCTQAESLWLHMDIIEDIVSNCREIFKGSVNYAWTSVPTYPRHWGHWIYALFN

SEQ ID NO: 2147 - protein, 180 aa, Zea mays
MQYLFDVWKDMEELKKEVREARRIKMLHQPSKAMDLENEIRILRNTFAEKSKDCVSLLKEWETHKRLKENGTIPSFDLEGLQCLGSMLRIVGLSGTHMDLSNISIQWFRIHPKESNKEIISGATRPVYALEPHDVGRYLQAEIDVGGEIAVAKTAGPVDPGLFDWTRSVSVIHMCCVLHD

SEQ ID NO: 2148 - protein, 304 aa, Nicotiana tabacum
MDTAAVDRIIEKLIEVRSSNPGKLVQLSESEIKQLCVASRDIFLKQPNLLESEAPIKTRGDIHGQYSDLLRLFEYGGFPPEANYLFLGDYVDRGRQSLETICLLLAYKIKYPENFFLLRGNHECASINRIYGFYDECKRRFNVKLWKSFTDCFNCLPVAALIDEKILCMHGGLSPDLSSLDQIRNLPRPTAIPDTGLLCDLQRSDPGKDVKGWGMNDRGVSYTFGPDKVSEFLSKHDLDLVCRAHQVVEDGYEFFAESELVTIFSAPNYCGEFDNAGAMMSVDENLLCSFQILKPAEKKNKFVM

SEQ ID NO: 2149 - protein, 180 aa, Zea mays
MADHHHHHHHGHPPDGPGGAGDQLEVIKEQDRLLPIANVGRIMKQILPPNAKISKEAKETMQECVSEFISFVTGEASDKCHKEKRKTVNGDDVCCAFGALGFDDYVDPMRRYLHKYRELEGDRAASSRGGGGGGPAGAGDPASASAAAGPSPSAASAGHFMFGAAMDRPDNNSSAGARPF

SEQ ID NO: 2150 - protein, 373 aa, Zea mays
  unsure (1)..(373): unsure at all Xaa locations
MGKGAQGSDAAAAGGEVEENMAAWLXVAKNTLKIMPFKLPPVGPYDVRVXMKAVGICGSDVHYLREMRIAHFVVKEPMVIGHECAGVVEEVGARRERTCPVGDRVALEPGVSCWRCRHCKGGRYNLCEDMKFFATPPVHGSLXANQVVHPAXDLCFKLPDGVSXLEEGAMCEPLSVGVHACRRAXVGPETGVLVVGGXAPIGLVSLLGGAXPFGAPRVVVVDVDDXRLAVARSLGADAAVPVVAXAEDLADEVERIRAAMGSDIDVSLDCAGFSKTMSTALEATRPGGKVCLVGMGHNEMTLPLTAAAAREVDVVGVFRYKDTWPLCIDFLRSGKVDVKPLITHRFGFSQRDVEEAFEVSARGRDAIKVMFNL

SEQ ID NO: 2151 - protein, 123 aa, Arabis holboellii
AVLIQILNVVAFCHLQGVVHRDLKPENFLYTSKEENSQLKVIDFGLSDFVRPDERLNDIVGSAYYVAPEVLHRSYTTEADVWSIGVIAYILLCGSRPFWARTESGIFRAVLEADPSFDEPPWP

SEQ ID NO: 2152 - protein, 506 aa, Glycine max
  unsure (1)..(506): unsure at all Xaa locations
MASLSCSANDLAPLFNDTAAANYLCAQFDSISRKLNVTTYAVDNTYLLFSAYLVFAMQLGFAMLCAGSVRAKNTMNIMLTNVLDAAAGGLSYYLFGFAFAFGGPSNGFIGRHFFGLRKFPKDSPPSGDYSFFLYHWAFAIAAAGITSGXSIAERTQFVAYLIYSSFLTGFVYPIVSHWFWSSDGWASATRSHGNVLFGSGVIDFAGSGVVHMVGGIAVLWGALIEGPRIGRFDRSGRSVALRGHSASLVVLGSFLLWFGWYGFNPGSFLTIAKGYGSGGYYGQWSAIGRTAVTTTLAGSTAALTTLFSKWLLAGHWNVIDVCNGLLGGFAAITSGCAVVEPWAAIVCGFVAAWVLIWLNKLAAKVEYDDPLEAAQLHGGCGAWGVFFTGLFAKKVYVEEIYGVGRPFGALMGGGGRLLAAQVIQILVVCGWVTATMAPLFYGLHKMKLLRISRDDETAGMDLTRHGGFAYAYHDDEDGSSRGVGFMLRRIEPAASTTPSPPAAPQV

SEQ ID NO: 2153 - protein, 496 aa, Triticum aestivum
MALSRAQTNSGESLISSTFASRYVRTALPRFRIPEQSIPKDAAYQIINDELMLDGNPRLNLASFVTTWMEPECDKLIQNSVNKNYVDMDEYPVTTEFQNRCVNMIAHLFNAPIGEDETAVGVGTVGSSEAIMLAGLAFKRKWQNKMKAEGKPHDKPNIVTGANVQVCWEKFARYFEVELKEVKLREGYYVMDPAKAVELVDENTICVAAILGSTLNGDGEFEDVKMLNDLLVKKNEETGWDTPIHVDAASGGFIAPFLYPELEWDFRLPLVKSINVSGHKYGLVYAGIGWCIWRSKEDLPDELIFHINYLGADQPTFTLNFSKGSSQVIAQYYQLIRLGFEGYRNIMDNCQENAMVLKEGLERTGRFNIVSKDQGVPLVAFSLKDSSRHDEFEISEFLRRFGWIVPAYTMPPDAQHVTVLRVVIREDFSRTFAERLVIDIEKVLHELDALPSRSSGPALQHPNGDTVSEKDLARQREVVSVWKRAVAARKKTQGVC

SEQ ID NO: 2154 - protein, 362 aa, Schizosaccharomyces pombe
MGEEGIKINDTHKRRIDEVEPSEKEDNVERQTKKYNFEIDEPEEQEKKDEKEDDKEESPSKSLEEISQSVSPVEEEPRDVRFKELSTPFSYPINDPPEGRPVRVYADGVFDLFHIGHMRQLEQAKKVFPNVHLIVGLPNDQLTHRLKGLTVMNDKERAEALRHCKWVDEVLENAPWVITPEFLEEHKIDFVAHDDIPYASDDSGDIYLPVKKVGKFIPTKRTEGVSTSDLITRIIRDYDQYVMRNLARGVNRKELNVSLFKKNELDLRHHIKVLRDTLRNHWVSTTRDLKADIKSFLSMATTDYQLQKNPLHGSSEPSSPGPTGFLGGINRWMQRRSSSHYDLPRVGNEIAASSSSATEENH

SEQ ID NO: 2155 - protein, 324 aa, Triticum aestivum
MEAETAAKRARENEGAAAADGAGEQAGISAVIPGWFSEISPMWPGEAHSLKVEKVLFQGKSDYQDVLVFQSSTYGKVLVLDGVIQVTERDECAYQEMITHLPLCSIKDPKKVLVIGGGDGGVLREVSRHSSVEQIDICEIDKMVVDVSKQFFPHLALGFEDPRVSLHIGDGVAFLKNAPEGTYDAVIVDSSDPVGPAQELFEKPFFESVSRALRPGGVVCTQAESIWLHMHIIEDIVTNCRQVFKGSVNYAWTTVPTYPSGVIGFMLCSTEGPSVDFQHPVFSIEEDEYSTKSKGPLKFYNSEFHTASFCLPSFARRVIEAKAN

SEQ ID NO: 2156 - protein, 123 aa, Arabis holboellii
AVLIQILNVVAFCHLQGVVHRDLKPENFLYASKEENSQLKVIDFGLSDFVRPDERLNDIVGSAYYVAPEVLHRSYTTEADVWSIGVIAYILLCGSRPFWARTESGVFRAVLKADPSFDEPPWP

SEQ ID NO: 2157 - protein, 571 aa, Triticum aestivum
MAGGGVEDVYGEDRATEEQLITPWSFSVASGHQLLRDPRHNKGLAFTEAERDAHYIRGLLPPAIVSQEHQEKKIMHNLRSYTVPLHRYIAMMDLQERNERLFYKLLIDNVEELLPVVYTPVVGEACQKYGSIYRRPQGLYISLKDKGKVLEVLKNWPERSIQVIVVTDGERILGLGDLGCQGMGIPVGKLSLYTALGGVARPSACLPITIDVGTNNETLLNDEYYIGLRQRRATGEEYHELLQEFMNAVKQNYGEKVLVQFEDFANHNAFDLLAKYSKSHLVFNDDIQGTASVVLAGLLAALKMIGGGLVDQTYLFLGAGEAGTGIAELIALEMSKHTELPVDDCRKKIWLVDSKGLLVESRKESLQHFKKPFAHEHEELKTLLEAVQSIKPTVLIGTSGVGKTFTQEVIEAMASFNEKPVIFSLSNPTSHSECTAEEAYTWSKGTAVFASGSPFDPVEYEGKTFVPGQSNNAYVFPGFGLGVVISGAIRVHDDMLLAASEALAEEATQENFDKGLIFPPFTNIRKISASIAAKVAAKAYDLGLASRLPRPDDLVKYAESCMYTPLYRSYR

SEQ ID NO: 2158 - protein, 181 aa, Cicer arietinum
MASSMISSSAVTTVKRASSVPSGAVAPFVGLKSMAGFPVRKVNNDITSIASNGGRVHCMQVWPPIGKKKFETLSYLPPLTEEQLLKEVEYLLRKGWVPCLEFELEKGFVYREHNNSPGYYDGRYWTMWKLPLFGCTEAVQVLKELQEVVKAYPNAFVRIIGFDNVRQVQCISFIAHTPKEF

SEQ ID NO: 2159 - protein, 255 aa, Brassica napus
  unsure (1)..(255): unsure at all Xaa locations
ASVSFASASKPVSASISSAGHASVEEDAVVMRKPVWEDEWEFAEVETKTIPLWVVFDKPPSLQEAKEATDDLKDALNMAYMEGSNEVGSVSRMFSSFQPSENRAVESAVPQVALKAFAFLSENTAXAQSVVASIASDPKVWDAVMENKDLMKFLETNTASTTVEADNDDKSELSSETESEEESEAKPINLMEILRDMKLKPVQMMENVSSYFGGLFRTETFTKGGQERKRMLLNDPTTLFGLAVCVIFMVVLKRA

SEQ ID NO: 2160 - protein, 123 aa, Arabis holboellii
AVLIQILNVIAFCHLQGVVHRDLKPENFLYTSKEENSQLKVIDFGLSDFVRPDERLNDIVGSAYYVAPEVLHRSYTTEADVWSIGVIAYILLCGGRPFWARTESGIFRAVLKADPSFDEPPWP

SEQ ID NO: 2161 - protein, 314 aa, Zea mays
  unsure (1)..(314): unsure at all Xaa locations
MGGGVMRTAAKVSIAGGAAAAKSGRFRNAAPVFATAPAAAGSEAAPLVSVSSGEVPPAAAQWAASWELDDWEFADWRDDAAAAAAVVEREATAAAAKPRLVFAPPSREEAEEATTELRDAVERAYFNESPVEVVKEQDKEFNKLATDAXDSFYPGHVVQAFTLLKSSTEAQSVVASLASDRNVWDAVLKNEKVMEFYKTHQTTLVQTSPNEAVTVELPGKLEDAASENTSSGELPAGSGPSFSDFVDNAKKTVMDVVHNITDFFKDLFDDSAKTQTGAGPSAAEKGPSTADMAVGGSFMALAIAVILVVMFKRA

SEQ ID NO: 2162 - protein, 211 aa, Asarum caudigerum
NRQVTYSKRRNGLLKKAYELSVLCEAEVALIVSSSRGRLYEYANNSVRTTIDRYKKASDSSNPASVSETNSQYYQQEATKLRQQIDILQNANRQLMGESISAMNVKQLKQLETRLEKGISRIRSKKNELLFAEIEYMQKREVELRNDNIYLRGKIVENERAQQNMNMLPGGGGYEVMSQHPSYDSRNYLPVNLLEHNQHFSHQEPTALQLG

SEQ ID NO: 2163 - protein, 315 aa, Vitis vinifera
MAPGGSTYKEVLESHSTVTDYDIAMTKADTNLTPAKTTAGLSGKKGISSPNGVHELLECPVCTSLMYPPIYQCPSGHTLCSNCKSRVHNCCPTCRHELGDIRCLALEKVAESLELPCRYQSLGCHDIFPYYSKLKHEQQCRFHPYNCPYAGFECSVTGDIPTLVEHLKGDHKVDMHDGCTFNHRYVKSNPQEVENATWMLTVFNCFGKQFCLHFEAFQLGTAPVYMAFLRFMGDDNEAKKFSYSLEVGGNSRKLIWQGVPRSIRDSHRKVRDSQDGLIIQRNLALYFSGGDRQELKLRVTGRIWKESELWKDNGC

SEQ ID NO: 2164 - protein, 282 aa, Magnaporthe grisea 70-15
MAANAKYTAAPTQDPDDHLDYTSAPPSYQATGSSAAQPSDAERLASGVPRSSEDDLPDDFKFGGNVAEATVEIRHQFIRKVYSILTVQLLITGGVSALGFMSTSYRDWVRAHPGVLWLSLFGAMGMMLLTYWKRKSYPTNLLFLGGFTLLEAYTISVVVTFYDSSIVLNAVLLTAGMFVFLTAFAFQTKYDFTSWMPYLFGALWGLVLFGFVAMFLPYSSTAELIYGALAALVFSGYILVDTQLVMRTHHVEEEIAAAISLYLDIINLFLAILRILNSQQQN

SEQ ID NO: 2165 - protein, 275 aa, Bacillus sp. KSM-K16
MEFWFTEKQTERFGITMKIKRTLHTEKTDFQQLDMVETEEFGNMLLLDGMVMTTEKDEFVYHEMVTHVPLFTHPNPKHVLVVGGGDGGAIREILKHPSVEKATLVDIDGKVIEYSKTYLPTIACALEDERVDVKVADGFMHIAQSANEYDVIMVDSTEPVGPAAKLFERGFYEGISKALKEDGIFVAQTDNPWFHQELVSNVYKDVKEIFPITRLYTANIPTYPSGMWTFTIGSKKHDPLAVEATRFHDVQTKYYTPDIHRAAFVLPKFVQDLLK

SEQ ID NO: 2166 - protein, 158 aa, Escherichia coli
MKLISNDLRDGDKLPHRHVFNGMGYDGDNISPHLAWDEVPAGTKSFVVTCYDPDAPTGSGWWHWVVVNLPADTRVLPQGFGSGLVAMPDGVLQTRTDFGKTGYDGAAPPKGETHRYIFTVHALDVERIDVDEGASGAMVGFNVHFHSLASASITAMFS

SEQ ID NO: 2167 - protein, 345 aa, Burkholderia cepacia R18194
MLKALVLERTRELALRDIDLPQEVGPGDVRIKVHTVGVCGSDVHYYVHGGIGPFRVDAPMVLGHEASGTVVETGAGVTHLRVGDRVCMEPGVPRFDSPATLRGLYNLDPDVRFWATPPIHGCLTPYVVHPAAFTYRLPDTVSFAEGAIVEPLSIGLQAAKKAAMKPGDLAVVIGAGTIGAMTALAALAGGAARVILADVVPDKLALFADNPAVTTVDVRTQPLADVVAEATDGWGADVVFEASGSANAYAGLVDLMCPGGCAVLIGMPVAPVPLDVVALQAKEGRIESVFRYANIFPRALALIASGAIDVKPFISRTFPFSEGVRAFEEAASGHPRDVKIQIEMD

SEQ ID NO: 2168 - protein, 451 aa, Zea mays
MVGGGGGGPLRRVGKYEVGRTIGEGTFAKVKFAQNTETGESVAMKVLDRSSILKNKMAEQIKREISIMKLVRHPNVVRLHEVLASRKKIFIILEFITGGELFDKIIRHGRLSEADARRYFQQLIDGVDFCHKKGVYHRDLKPENLLLDSQGNLKISDFGLSAWPAQGSFLLRTTCGTPNYVAPEVLSHKGYNGALADTWSCGVILYVLLAGYLPFDEVDLTTLYGKIESAEYSFPAWFSGGAKSLIRRILDPNPETRIRIEEIRSDEWFQKNYEPIKEIENEEVNLDDVNAAFDDPEDDNEDAFEDETGPLTLNAFDLIILSQGLNLAALFDRRQDCDKLQNRFLSRNPAKVILSSMEVVAQSMGFKTHIRNYKMRVEGLNADKTSHLSVMVEVFEVAPSIFMVELQRAAGDTSEYNTFVNNYCGKLDDIIWKFPTEKGKSRIPRLSKSHS

SEQ ID NO: 2169 - protein, 496 aa, Solanum tuberosum
MEPKPATEPKKSSVWVLPYKTQSLQSLYTIGKKLGQGQFGTTHLCIEKSSGNLYACKTIPKKKLICKEDYEDVWKEIQIMHHLSEHPNVVRIKGTYEDALYVHIVMELCAGGELFDRIVEKGHYSEREAAKLIKTIVGVVEACHSLGVMHRDLKPENFLFLSSDEDAALKATDFGLSVFYKPGETFSDVVGSPYYVAPEVLCKHYGHESDVWSAGVILYILLSGVPPFWAETDMGIFRQILRGKLDLESEPWPGISDSAKDLIRKILDRNPKRRLTAHEVLCHPWIVDDTVAPDKPLDSAVLSRLKQFSAMNKLKKMALRVIAERLSEEEIGGLKELFKMLDTDNSGTITFEELKEGLRRVGSELMESEIKDLMDAADIDNNGTIDYGEFIAATVHLNKLEREENLLSAFSYFDKDGSGYITIEELQQACKEFGLSELNLDEIIKDIDQDNDGQIDYKEFSAMMRKGTGGAVGRRTIRNNLNLGEALGLVQSEEIL

SEQ ID NO: 2170 - protein, 272 aa, Pisum sativum
FVRQLNTYGFRKVDPDRWEFANEGFLAGQRILLRTIKRRRNVAQSPSMQRESGGACIELGEFGLEGEIERLRRDRSVLVAEIVKLRQQQNNSRDQISAMEARLLITEKKHQQMMAFLARALSNQSFIQQLANNKELKGVEMKRKRRLPASSSLENLQNDSVTMMTVPIESVVDYSSREQQEGLTAIESEIETLLSAYDNESRSEIKDPSANESNLSDWEELLNQKLVGGNPEDEVLIGDFSQIDAPVEDLVEKNDDWTVDLQNLVDEMDFEP

SEQ ID NO: 2171 - protein, 509 aa, Glycine max
  unsure (1)..(509): unsure at all Xaa locations
MSLPACPAEQLAQXLLGPNTTDASAAASLICGQFAAVDSKFVDTAFAVDNTYLLFSAYLVFSMQLGFAMLCAGSVRAKNTMNIMLTNVLDAAAGGLFYYLFGFAFAFGSPSNGFIGKHFFGLKDIPSSSYDYSYFLYQWAFAIAAAGITSGXIAERTQFVAYLIYSSFLTGFVYPVXVSHWFWSPDGWASAISSADHVFSPGDRLFSTGVIDFAGSGVVHMVGGIAGLWGALIEGPRMGRFDHAGRAVALRGHSASLVVLGTFLLWFGWYGFNPGSFNKILLTYGNSGNYYGQWSAVGRTAVTTTLAGSTAALTTLFGKRVISGHWNVTDVCNGLLGGFAAITAGCSVVEPWAAIVCGFVASIVLIACNKLAEKVKFDDPLEAAQLHGGCGTWGVIFTALFAKKEYVKEVYGLGRAHGLLMGGGGKLLAAHVIQILVIAGWVSATMGPLFWGLNKLKLLRISSEDELAGMDMTRHGGFAYAYEDDETHKHGMQLRRVGPNASSTPTTDE

SEQ ID NO: 2172 - protein, 365 aa, Stylosanthes humilis
MGSTGETQITPTVVSDEEANLFAMQLASASVLPMVLKSAIELDVLEIIAKAGPGVHLSPADIAANVPTTNPDAAVMLDRMLRLLACYNILNHSLRTLPDGKVERLYGLAPVAKFLVKNEDGVSLSALNLMNHDKVLMESWYYLKETVLEGGIPFNKAYGMTAFEYHGTDPRFNKVFNKGMNDHTTITMKKILEIYTGFEGLKSLVDVGGGVGAVVNMIVTKYPHIKGINFDLPHVIEDAPSYPGVEHVGGDMFVSVPKADAVFMKWICHDWSDEHCIKFLKNCYDAVPDNGKVIVAECILPVAPDSSLATKGVVHIDVIMLAHNPGGKERTEKEFEALAKAAGFQGFRVVCCAFNTYIMEFLKKP

SEQ ID NO: 2173 - protein, 401 aa, Triticum aestivum
MVLESTMICIDNSEWMRNGDYSPSRFQAQADAVNLICGAKTQSNPENTVGVMTMAGKGVRVLVTPTSDLGKILACMHGLEVGAEANLAAAIQVAQLALKHRQNKRQQQRIIVFIGSPVTYDKKVLETIGKKLKKNNVALDVVDFGETDDEKPEKLEALIAAVNSSDSSHIVHVPPGDHALSDVLISTPIFTGEEGGSGFAASAAAAAATGATGYDFGVDPNVDPELALALRLSMEEERARQEAIAKKAAEDNKDQASSSTDAIMAEAELTLNAPADVDADLLKDDDDAQLLQQALAMSMDEGASGAAAVADAAMAEAAADDQDLALALQMSVQDAEAAGQSDMSKVFEDRSFVTSILNSLPGVDPNDPSVKDLLASLHGQGEQEEKKDTEDKPDKPEDGKN

SEQ ID NO: 2174 - protein, 58 aa, Zea mays
FGTANCLHILIAIILPTMGVYLKYRCRHEFWICLLFTFLGYIPSIIYSIYSITKNTYH

SEQ ID NO: 2175 - protein, 416 aa, Ralstonia solanacearum
MYQHIKVPAGEKITVNQDFSLNVPDNPIIPYIEGDGTGFDITPVMIKVVDAAVEKAYAGKRKISWMEIYAGEKSTKVYGPDVWLPEETLQVLKDYVVSIKGPLTTPVGGGIRSLNVALRQELDLYVCLRPVRYFKGVPSPVKEPEKTDMVIFRENSEDIYAGIEFEAQSDKAKKLIKILQDEFGVKKIRFPETSGIGVKPVSKEGTERLVRKAIQYAIDNDKPSVTIVHKGNIMKFTEGGFRDWAYALAQKEFGAELIDGGPWCKFKNPKTGKEIVVKDAIADAFLQQILLRPAEYSVVATLNLNGDYISDALAAQVGGIGIAPGANLSDSVAMFEATHGTAPKYAGKDYVNPGSEILSAEMMLRHMGWTEAADLIISSIEKSILSKKVTYDFARLLEGATQVSCSGFGQVMIDNM

SEQ ID NO: 2176 - protein, 86 aa, Zea mays
GSGVARAAAVTQRRTVKWFNDTKVFGFICPEDGSKHLFVHQSYIKSDGFHSLADGDDVEFSIYHGDYGRTKAVDLTIPDGSFLRGC

SEQ ID NO: 2177 - protein, 123 aa, Arabis holboellii
AVLIQILNVVAFCHLQGVVHRDLKPENFLYTSKEENSQLKVIDFGLSDFVRPDERLDDIVGSAYYVAPEVLHRSYTTEADVWSLGVIAYILLCGSRPFWARTESGIFRAVLKADPSFDEPPWP

SEQ ID NO: 2178 - protein, 365 aa, Iris hollandica
MDSTPVIQIPTPYPFSDEEACLYAMQLRSFSVLPMTLKAAIELDLLEIIAKAGPGAYLSPAEISSQLPTENPEAPAMIDRMLRLLACYSVVSCRVDAAGDDGKPRRRYGAERVVKYLTKNEDGVSMAALTLMNQDKVFMESWYHLKDAVLEGGIPFKKAFGMSPFEYQGTDPRFNKVFNEGMRNHSAFIMKKILETYQGFDSVKLLVDVGGGLGGTMKAIVTKYPHIEGINFDLSHVISEAPPIPGVKHVGGDMFESVPSGDAIFMKWILHDWSDAHCLKLLSNCWKALPEDGKVIVMEGILPTIPEPTSAAQGVVHIDLVMMAHNPGGKERTKAEFESLARDAGFSGSKALCSYANCWILEFYK

SEQ ID NO: 2179 - protein, 564 aa, Zea mays
MAAAAVTSNGGAVAANGPAPGRLASVYSEVQTNRLLHALPLPSVLRSNFSVVVGPASSAAGNPDEIAKLFPNLFGQPSASLVPSAEPAATRPLKIGVVLSGGQAPGGHNVICGIFDYLQERAKGSTLYGFKGGPAGIMKCKYVELTSDFVYPYRNQGGFDMICSGRDKIETPEQFKQAEDTANKLDLDGLVVIGGDDSNTNACLLGEYFRSRNMKTRVIGCPKTIDGDLKCKEVPTSFGFDTACKIYSEMIGNVMTDARSTGKYYHFVRLMGRAASHITLECALQTHPNAALIGEEVAAKKQTLKNVTNYITDIICKRADLGYNYGVILIPEGLIDFIPEVQKLIAELNEILAHDVVDEAGAWKSKLQAESRELFEFLPKTIQEQLMLERDPHGNVQVAKIETEKMLISMVETELEKRKAEGRYSAHFRGQAHFFGYEGRCGLPTNFDSNYCYALGYGAGALLQSGKTGLISSVGNLAAPVEEWTVGGTALTSLMDVERRHGKFKPVIKKAMVELDAAPFKKYASLRDEWAIKNRYISPGPIQFSGPGSDDSNHTLMLELGAEL

SEQ ID NO: 2180 - protein, 157 aa, Zea mays
SSSVPLSAEGITVQSFNADLLYEPWEVLDDDGFPFTMFAPFWNRCLCMPDPAAPLLPPKRINSGDLSRCPWDELIFEDESERGSNALLARAWSPGWQNADKALTAFLDGPLVDYSANHKKADSASTSLLSPYLHFGELSVRKVFHQVRMKQGDPLES

SEQ ID NO: 2181 - protein, 1994 aa, GIBBERELLA ZEAE PH-1
MSSAALQTAPHQHTALASSPLGTPSSRQYRPSQSSPNSQAYNAQQTSTASSSSRRPPSRKTNDSAPSPSYHLTPGFGSPVTASVANHQEPVASDWQGNMPPVAPPRSSSNHQSGSSRRSHYPNEKPPSSPRRNESTRTGSRGEQAAAENGYRSSKADTAARASSRDGKAAPSQLPVRSTHSTPSKPVHDATDSLTKAIAAAQDTIDRDRNHASNQHNGDDTAAPPPAVATGEHGEERRQRSRHDHSRSNKGNTKFGDFILGNTIGEGEFGKVKLGWKQDSSVQVAIKLIKRDTVGSNPSRFAKIYREVAILRGVQHPNIVRLIDKVETDRHIGIILEYASGGELFDYILNHRYLKDNAARRLFAQLVSGVGYLHKKGIVHRDLKLENLLLDRNRNIIITDFGFANTFDAHEELTKEEELNLTDKEFVKRMGLDRVKMNGSRKGDLMQTSCGSPCYAAPELVVSDSLYTGRKVDVWSCGVILYAMLAGYLPFDDDPANPEGDNINLLYKYIVTTPLTFPEYVTPHARDLLRRILVPNPRKRADLFEVARHSWLSEYANLVEFITSTTTLPSEVPDSGVSPDDYAEAPTVARSNSVREASKHKQPHPPVVGGLAKTHGSVDPDSEATHRGTPKDAKRRTVQVEYVAPTTKTQRGADVAPSKPSSHSLQQQQPANTPEPVTEKPLPREPPLTKDNPSRAQQSRRPQSSHKNAPPPHRPSRDTRATSDNAFMTGGTTTTRPRTQGSMQSSTSMGLQSQTNYGQPAPPTIADTNAHGRIQQPQNPEEEGNIAKDVGSVPPKVMKMTTFQNETKAAGRGHKRSNTLGDIGSKIMGRSGSIFGGRSKKRPEQQQQQQQQQAEKSSRKYPPVSMSNTMLPGEDAGPRPSMDSKASRRSFSIGLGKKRSGSVQGSSDKQNRRFSLAKAMGLGRNEGSVTGSEADSQQDLPIQHPRTEQLRGYSAHDEPRHSEPYFDAPYEQYPQRDTAQSSPVYNTRYGSQQQDGRRPSAIPTYIQGGSHLNTGSDSSVDMRRPNDPRSRPYQEDFSGSEGYDGRPVGSSREDRPGVLHKSHKKFADAYDGENYRGHEGSSGAAKRVMDFFRRRGKARGATSNEGRTPRALDDAHSQLGDHPGQLILTTYARDWLCFDCYNHINWRSVVCFDGNETRDDETTISSLTVPFAKQITSHELAGKLTERAKKLSSQRVATIAYLEYMYMRPGSVSLPDTYVTWAKLAFAYSGIQTHRRIDLNLPFGSDASYTRMLSPLRHVTSNVGFASYGSRSVAQPTAPTAQGLSEQPRLQEFDEKKTRLDNQNGRKTKSLHKIPSAGGVSSPAAGSGSVLEAPSKAEEPAQGETPSTTSKNAGFFAELKRSVRIVITYSWLNVFMVFVPVGIAVSQVPGVPAGLIFGMNAIAIIPLAGLLAFATESVALKMGDALGALLNVTFGNAVELIIFILALVKNEIRVVQSALLGSILANLLLILGMSMLLGGLRFREQVYNSTVTQMSACLLSLSVISLVLPTAFHASFKDNDKADRESLKISRGTSVVLLIVYVIYLTFQLKSHAYMYESTPQHIIDAELAPGPAAGFLDSSSSDDSSSSSSDSSDSDSSHGTMRKRMKKVLRNRRHRRSSAASADTADTKGTRSASFATNNTTTPQEEVSEAKASRQRVPRSASYEGSEHAVDDDDEEEAERSHRRRRYRRHRHRRSKKEARKAKKEAKNAQSQNGVPESIPENKGEGEPRRVDFAVQDDLEAGPSTNGGKRPFPLRGISVKALAPVFTEKPPTASGPAPHVRYGIRRTNSLPDRLQFRAPGAMLPAQIPPMLNAPGVKSTDSDEEDEEEHLSQFSAVILLLVSTALVAVCAEFLVDSIQEVVKTSHINQVGIGLIILPIVGNAAEHVTAIKVAYKNNMDLAIGVAVGSSIQIALLLTPFMVILGWIMNKEMTLYFTLFETVCLFVSAFIVNFLVLDGRSNYLEGALLCAVYIIIAVVAFFYPDSEDASVWGGGT

SEQ ID NO: 2182 - protein, 175 aa, Triticum aestivum
MAPTVMASSATSVAPFQGLKSTAGLPVSRRSNGASLGSVSNGGRIRCMQVWPIEGIKKFETLSYLPPLSTEALLKQVDYLIRSKWVPCLEFSKVGFIFREHNASPGYYDGRYWTMWKLPMFGCTDATQVINEVEEVKKEYPDAYVRIIGFDNMRQVQWVSFFAFKPPGCEESGKA

SEQ ID NO: 2183 - protein, 138 aa, Pyrococcus abyssi GE5
MGDKTKVQVSKLKPGRYIIIDDEPCRIVNITVSSPGKHGSAKARIEAVGIFDGKVRSIVKPTSAEVDVPIIDKKTAQVIAITPDTVQIMDMETYEMFEVPIDTGVAEEIRDQLKEGINVEYWETLGRVKIMRIKGEGE

SEQ ID NO: 2184 - protein, 430 aa, Deinococcus radiodurans R1
MSNVFYRSSKPYPVAVRGEGVFLYDDAGRRYLDGSSGALVANIGHGRAEVGERMAAQAARLPFVHGSQFSSDVLEEYAGRLARFVGLPTFRFWAVSGGSEATESAVKLARQYHVERGEPGRFKVITRVPSYHGASLGSLAASGMGARRELYTPLMRPEAWPKLPKPDPARNGAEDAEGLRALLEREGPETVAAFMAEPVVGASDAALAPAPGYYERVRDICDEAGIIFIADEVMSGMGRCGSPLALSRWSGVTPDIAVLGKGLAAGYAPLAGLLAAPQVYETVMGGSGAFMHGFTYAGHPVSVAAGLSVLDIVEREDLTGAAKERGAQLLAGLQALQARFPQMMQVRGTGLLLGVVLGDLATGQAFETPGIASRIGAAALKRGLITYPGSGAEPNGRGDHLLLGPPLSITAAEVDELLALLAGALEDVLG

SEQ ID NO: 2185 - protein, 168 aa, Oryza sativa
MAAAPSATSVHDFTVKDASGKDVNLSTYKGKVLLIVNVASQCGLTNSNYTELSQLYEKYKVQGFEILAFPCNQFGGQEPGSNEEIVQFACTRFKAEYPIFDKVDVNGNNAAPLYKYLKSNKGGLFGDSIKWNFSKFLVDKEGRVVDRYAPTTSPLSIEKDIKKLLGSS

SEQ ID NO: 2186 - protein, 314 aa, Thermus thermophilus HB27
MDYGMYFFEHVTPYETLVRRMERVIASGKTPFQDYFLFESKGFGKVLILDKDVQSTERDEYIYHETLVHPAMLTHPEPKRVLIVGGGEGATLREVLKHPTVEKAVMVDIDGELVEVAKRHMPEWHQGAFDDPRAVLVIDDARAYLERTEERYDVVIIDLTDPVGEDNPARLLYTVEFYRLVKAHLNPGGVMGMQAGMILLTHHRVHPVVHRTVREAFRYVRSYKNHIPGFFLNFGFLLASDAFDPAAFSEGVIEARIRERNLALRHLTAPYLEAMFVLPKDLLEALEKETMVSTDQNPFYVTPEGEARQAPYKG

SEQ ID NO: 2187 - protein, 495 aa, Deinococcus radiodurans R1
MTAEPQVSPAPTPPPAAPLLVRDRLFIGGEWVTPCGQGTLEVVNSATEEVMGTVPEGTPEDAERAILAARAAFDSWSQTPAEERAALLERISRGLNERQSEIAALVAQEVGMPFVLSNVIQVGLPAVTFMSMAEEIRQLPAEETLASSLLLREPVGVVAAITPWNYPLHQIAAKVAPALAAGCTVVLKPSEVAPLNAFVLAEIIEAAGAPAGVFNLVTGTGPVVGEVLAAHPEVDMVSFTGSTAAGKRVSELAARTVKRVALELGGKSPYLILDDADLSGEALVQAVMNGIQGCYLNSGQTCSALTRMLVPRSRLPEVEAVAQAVVSQVKVGSPFDAATTLGPLVSDVQRERVRGHIRQGVAEGARLIAGGAESPEGLERGYYVQPTIFSDVTPEMTIAREEIFGPVLVIQPYEDEEDAVRIANATHYGLAGGVWSSDRERAVRVARRLRTGQVSINGGAFNPVAPFGGYKQSGNGREFGRLGLEEFMEVKALQF

SEQ ID NO: 2188 - protein, 387 aa, Rubrobacter xylanophilus DSM 9941
MGQAGGPTAVMNASLLGFLEGCPPGAEIWGVLDGFRGLVEGDLARLPPGCVDRRLYLSPGAWLGAGRRPLGEGDPERCVERLAARGVRGLAMVGGNGTMWACARIEEAARRAGYGLAVVGIPKTVDNDLAGTDHAPGFPSAARYVAAVVRDIGADLEAMRGFESVRVLETMGRNAGWLALSAGYLRREPSDPPHLIYVPERPFDPDAFLGDVEAAVRAHGFVVAVVSEGLVRRPREEGLRRPVIGGVAPELARRVEEALGLPSRGELLGMGQRSFSLAASPLDREEARALGNRAARMLLEGRSGLMPALRRLPGRRYRVAVEEVPFGRVAGAERPLPPRWVVPPQEVPQGFRGWLAPLVGEDLAPHPPPLVRRLRGAAAGREGRSES

SEQ ID NO: 2189 - protein, 138 aa, Triticum aestivum
  unsure (1)..(138): unsure at all Xaa locations
MAPAVMASSATTAAPFQGLKXTAGLPVSRRSCSAGLSSVSNGGRIRCMQVWPIEGIKKFETLSYLPPLSTEALLKQVDYXIRSKWVPCLEFSKVGFRLXREXNSSPRVLXTVRYWDKCGNCPIVRGCTDAKGCGWREV

SEQ ID NO: 2190 - protein, 311 aa, Archaeoglobus fulgidus DSM 4304
MLDMPIDPVYYQLAEYFDSLPKFDQFSSAREYREAINRIYEERNRQLSQHERVERVEDRTIKGRNGDIRVRVYQQKPDSPVLVYYHGGGFVICSIESHDALCRRIARLSNSTVVSVDYRLAPEHKFPAAVYDCYDATKWVAENAEELRIDPSKIFVGGDSAGGNLAAAVSIMARDSGEDFIKHQILIYPVVNFVAPTPSLLEFGEGLWILDQKIMSWFSEQYFSREEDKFNPLASVIFADLENLPPALIITAEYDPLRDEGEVFGQMLRRAGVEASIVRYRGVLHGFINYYPVLKAARDAINQIAALLVFD

SEQ ID NO: 2191 - protein, 299 aa, Bartonella sp.
  unsure (1)..(299): unsure at all Xaa locations
DGDKGILLYRGYPIDQLAEKGDFLESXYLLLYGELPTQQEKNDFDRCIMQHTMVHEQFARFFHGFRRDSHPMAVMVSCLGAMSAFYHDSIDITDPHQRMIASVRXISKVPTLAAMAYKYSIGQPFVYPRNDLSYAANFLRMCFAVPCEEYKTNPVLSRAMDQIFILHADHEQNASTSTVRLAGSSGANPFACIAAGVACLSIKRIPEFIARAKDKNDPFHLMGFGNRVYKNYDPRAKIMQKTCHEVLKELNIQDDPLLDIAIELEKIALNDEYFIEKKLYPNVDFYSGITLKALGFPTE

SEQ ID NO: 2192 - protein, 421 aa, Zea mays
MADNNFVCKNYLLIYKTINIRLKTSFGVALLERDILLKNLKCVLESLRGRVTGKTKDEIEESISMVEILAVQLSKREAELLQQKEEVTKLAKSLKQASEDAKRIVEEERANAHTEIETAKGSVQRVQQAVQEHEKMSQNTGKQDMEELKKEVREARRIKMLHQPSKAMDLENEIRILRNTFAEKSKDCVNLLKELEMHKRLKENGTIPSFDLEGLQCLGSMLRIAGLSGTHMDLSNISIQWFRIHPEESNKEIISGATRPVYALEPHDVGRYLQAEIDVGGEIAVAKTAGPVDPDAGLVDYVETLVRKPETEFNVVVLQLNGIDLPKESVHVLNVGRLRMRLTKGKSVVAKEFYSSSMQLCGVRGGGEAASQAMFWRPRNDLSLVLAFESTRERNTAIMLARRFAVDCNIILAGPGDKTPW

SEQ ID NO: 2193 - protein, 351 aa, Zea mays
HWVPRGRPPPRRPAKRVGLLLGRYELGRLLGHGTFAKVYHARQADTGETVAIKVLDKEKALRNGLVPHIKREIAILRRVRHPNIVRLFEVMATKSKIYFVMEFVRGGELFARVAKGRLKEDTARRYFQQLISAVGFCHARGVFHRDLKPENLLVDERGDLKVSDFGLSAVADQFHPDGLLHTFCGTPSYVAPEVLARRGYDGAKADIWSCGVILFVLMAGYLPFHDQNLMAMYRKIYRGEFRCPRWFSRDLSSLLIRLLDTNDKIMISGNKILLSMGEIRRLRMQQRIKNVELGISDEERDHELPDFPSFIPFLPPLSAANLKDYYATCFTLIAGIMGVWMAFLATNPGNL

SEQ ID NO: 2194 - protein, 322 aa, Bartonella sp.
TYIDGDKGLLLYRGYPIDQLAEKGDFLESCYLLLYGELPTKQEKNDFDRCIMQHTMVHEQFARFFHGFRRDSHPMAVMVACLGAMSAFYHDSIDITDPQQRMIASVRLISKVPTLAAMAYKYSIGQAFVYPRNDLSYAANFLRMCFSVPCEEYKTNPVLTRAMDQIFILHADHEQNASTSTVRLAGSSGANPFACIAAGVACLSGPAHGGANEACLKMLQEIGSVKRIPEFIARAKDKNDPFRLMGFGHRVYKNYDPRAKIMQKTCHKVLKELNIQDDPLLDIAIELEKIALNDEYFVEKKLYPNVDFYSGITLKALGFPTE

SEQ ID NO: 2195 - protein, 154 aa, Neurospora crassa
MSQSGVQVDPECRRAFDKLMSRQLRYIIYKLSDDFKEIVIESTSEGATENYDEFREKLVNAQTKSASGAISKGPRYAVYDFEYKLASGEGSRNKVTFIAWSPDDAGIKSKMVYASSKEALKRSLSGIAVELQANEQDDIEYEQIIKTVSKGTAA

SEQ ID NO: 2196 - protein, 585 aa, Triticum aestivum
MCGILAVLGCADDTQGKRVRVLELSRRLKHRGPDWSGMHQVGDCYLSHQRLAIIDPASGDQPLYNEDKSIVVTVNGEIYNHEQLRAQLSSHTFRTGSDCEVIAHLYEEHGENFIDMLDGVFSFVLLDTRDNSFIAARDAIGVTPLYIGWGIDGSVWISSEMKGLNDDCEHFEIFPPGHLYSSKQGGFKRWYNPPWFSEVIPSVPYDPLALRKAFEKAVIKRLMTDVPFGVLLSGGLDSSLVAAVTVRHLAGTKAAKRWGTKLHSFCVGLEGSPDLKAAKEVANYLGTMHHEFTFTVQDGIDAIEDVIYHTETYDVTTIRASTPMFLMSSKIKSLGVKMVISGEGSDEIFGGYLYFHKAPNKEELHRETCQKIKALHQYDCLRANKATSAWGLEARVPFLDKEFINEAMSIDPEWKMIRPDLGRIEKWVLRKAFDDEEQPFLPKHILYRQKEQFSDGVGYSWIDGLKAHAESNVTDKMMSNAKFIYPHNTPTTKEAYCYRMIFERFFPQNSAILTVPGGPSVACSTAKAVEWDAQWSGNLDPSGRAALGVHLSAYEQEHLPATILTGTSKKPRMIEVAAPGVAIES

SEQ ID NO: 2197 - protein, 111 aa, Glycine max
  unsure (1)..(111): unsure at all Xaa locations
CLQGPEIKVYNGELPYVDVSGGELWINILHETLKHGLAPKSWTDYLHLTVXXTLSNAGISGQAFKHGPQINNIFQLEVITGNCSCTIYILNFPCVAGFCVLRLVLVLVWGS

SEQ ID NO: 2198 - protein, 155 aa, Lycopersicon esculentum
MDLRLMGIDNTPLFHTLQHMMEAAGEDSVNAPPKKYVRDAKAMAATPVDVKEYPDSYVFVVDMPGLKSGDIKVQVEEDNVLLISGERKREEEKEGVKFIRMERRVGKFMRKFSLPENANTDAISAVCQDGSLTVTVQKLPPPEPKKSKTIQVKVA

SEQ ID NO: 2199 - protein, 199 aa, Triticum aestivum
MSSNLSFVLNKPGDVSFEERPKPSLASPHDVLVAVNYTGICGSDVHYWVHGSIGKFVVEDPMVLGHESAGTVVEVGDKVKTLKAGDRVALEPGYPCRRCQNCLAGKYNLCPDMVFAATPPYHGTLTGFWSAPADFCFKLPDNVSLQEGALIEPLAVAGHIVKQARVKPGDSVVVMGAGPVGLLCAAVAKAYGASKDVSV

SEQ ID NO: 2200 - protein, 131 aa, Triticum aestivum
  unsure (1)..(131): unsure at all Xaa locations
MAPTVMASSATSVAPFQGLKSTAGLPVSRRSSSAGLGSVSNGGRIRCMQVWPIEGIKNSETLSYLPPSPXEASLKQVDYLXRSNWVPCLXFNKLVPFPXRXHSPGYMAILAWNCYFGSTKVSVRRYLSVTA

SEQ ID NO: 2201 - protein, 470 aa, Mycobacterium bovis AF2122/97
MQGQLSRTRVYAVPVPGSAQSAYACGVERLLASYRSIPATASIRLAKPTSNLFRARVKHDARGLDASGLTGVIGIDPEARTADVAGMCTYEDLIAATLHYGLSPLVVPQLRTITLGGAVTGLGIESASFRNGLPHESVLEMDILTGAGELLTVSPGQHSDLYRAFPNSYGTLGYSTRLRIQLEPVRPFVALRHIRFSSLTAMVAAMERIIDTGGLDGESVDYLDGVVFSADESYLCIGMQTSVPGPVSDYTGQDIYYRSIQHEAGIKEDRLTIHDYFWRWDTDWFWCSRSFGAQNPRLRRWWPRRYRRSSVYWRLMALDQRFGIADRFENSRGRPARERVVQDIEVPIERTCEFLEWFGENVPISPIWLCPLRLRDHAGWPLYPIRPDRSYVNIGFWSSVPVGATEGATNRKIENKVSALDGHKSLYSDSFYTREEFDELYGGETYNTVKKAYDPDSRLLDLYAKAVQRR

SEQ ID NO: 2202 - protein, 441 aa, Sulfolobus tokodaii str. 7
MDDDKKIIREHTFKTWSKQSSWEPIIVTSSRGVYFYDSNGKKYLDFSSQFVNVNLGYGNERVINAIKEQLDTLQYINPSFGAVVRAKATKALLEVMPKNLTKFFFSTSGTEANEAAVKVSRLYKKPSYKILARYRSYHGSTEASISLTGDYRRWFVEPNTMPGVVRFPEPYCFRCPLKLKYPECNLACANYVDYIIKQEKNVAAIIVEPITGTNGVIVPPKEYMPLLWKIAKENDVLFIADEVMTGWGRVGEWFAVNLWNIQPDILTTAKGASASYVPIGITAFNKEIGEFFEDHIFAHGHTFEAHPVSLAAIPAVIEEYKRLNLLSHVKVMGEYLGKRLLELKERHKSIGDIRGIGLFWAVELVKDKNNTPFGDYEDKYEGKPTVVDIISKKALEKGVYVYNGPSWLIISPPLIINKEEIDQGIETLDEVIKEADSAFKD

SEQ ID NO: 2203 - protein, 123 aa, Arabis holboellii
AVLIQILNVVAFCHLEGVVHRDLKPENFLYTSKEENSQLKVIDFGLSDFVRPDERLNDIVGSAYYVAPEVLHRSYTTEADVWSLGVIAYILLCGSRPFWARTESGIFRAVLKADPSFDEPPWP

SEQ ID NO: 2204 - protein, 509 aa, Mycobacterium avium subsp. paratuberculosis str. k10
MTLPTAAELRARAADALRSLGAHVELGAPDAHGLPASTPITGEVLFTVAPTTSDQAEHTITQATQAFSEWRRTPAPVRGALVARLGELLRAHRDELAALVTLEVGKITSEAAGEVQEMIDICQFAVGLSRQLYGRTIASERPGHRLSETWHPLGVVGVITAFNFPVAVWAWNAALALVCGDTVVWKPSELTPLTALATQALIARAAADVGAPPGVSAVVLGDRELGELLVDDERVALVSATGSVRMGRAVGPRVAARFGRVLLELGGNNAAVVTPSADLDLAVRAVVFAAAGTAGQRCTTLRRLIVHRSVADEVVARVVSALRRLPIGDPFEPGTLVGPLIHETAYRDMVGALESARADGGEVIDGDRRHPFAVEHPSSYYVAPAVVRMPAQTPIVATETFAPILYVLTYDRLDDAIALNNAVPQGLSSAIFTTDLREAERFLDESDCGIANVNIGTSGAEIGGAFGGEKQTGGGRESGSDSWKAYMRQSTNTVNYSGALPLAQGVEFG

SEQ ID NO: 2205 - protein, 272 aa, Pseudomonas aeruginosa UCBPP-PA14
MSSTIHPLPSFGLGTFRLTGQVVVDSVRSALELGYRAIDTAQIYGNEADIGRAIAESGVPRSELFLTTKVWVDNYACEKLLASLRESLEKLRTDRLDLVLIHWPAPGNGVELAEYMAALAEAKSLGLTRRIGVSNFNIELTRQAIAAVGAGEISTNQIELSPYLQNRALTAYLEEQGIAVTSYMTLAYGKVLKDPALAGIAARHRATVAQVALAWAMQLGYAVIPSSTRRENLASNLLARDLRLDAEDMARIAGLERNGREVSPQGLAPAWD

SEQ ID NO: 2206 - protein, 212 aa, Ralstonia eutropha JMP134
MNRRQTAFAASVRRAMFATALALAAASAALLPHPARAADKPAAMPAAAPAGNCPASLNFQFPRLQDEAPQNLCQYAGKVVLVVNTASYCGFTPQYEGLEALYSKYRDRGLVVLGFPSNDFSQEPGSSKEIADFCYNTYGVKFPMLGKSHVRGGDVNPMYALLAKETGTAPKWNFYKYLIDRSGNVVGSYNSMTKPDDKQFVAKIEQLLSSPR

SEQ ID NO: 2207 - protein, 123 aa, Arabis holboellii
AVLIQILNVVASCHLQGVVHRDLKPENFLYTSKEENSQLKVIDFGLSDFVRPDERLNDIVGSAYYVAPEVLHRSYTTEADVWSLGVIAYILLCGSRPFWARTESGIFRAVLKADPSFDEPPWP

SEQ ID NO: 2208 - protein, 162 aa, Triticum aestivum
MEGRMFGLETPLMTALQHLLDVPDGEAGGPGNAAGEKQGPTRAYVRDARAMAATPADVKELPGAYAFVVDMPGLGSGDIKVQVEDERVLVISGERRREEKEDAKYLRMEPRMGKMMRKFVLPENADMEKISPVCRDGVLPVPVEKLPPPEPKKPKPIQVQVA

SEQ ID NO: 2209 - protein, 123 aa, Arabis holboellii
AVLIQILNVVAFCHLQGVVHRDLKPENFLYTSKEENSQLKVIDFGLSDFVRPDERLNDIVGSAYYVAPEVLHRSYTTEADVWSLGVIAYILLCGSRPFWARTESGIFRAVLKADPSFDEPPWP

SEQ ID NO: 2210 - protein, 282 aa, Beta vulgaris
MCESFKRQYQLCDEIGRGRFGVVFRCFSPSSHTSFAVKSIDKRLLLDDETDRECLDKEPKILQILSPHPNILQIHDIFDSDSHLLIVTDLCQESTLYDRVVSAGPFSETDACSVFTQLIDALAHCHRNYICHRDVKPDNILFDSRNRVKLCDFGSAEWFGGVEGRERMNGIVGTPYYVAPEVLAGREYNEKIDVWSAGVILYIMLGGVPPFYGDTVEDTFAAVLRGNLRFPTKIFRSISPEAKDLMRKMLSKDVSRRFSAEQVLRHPWVTSGGMTSTMNDMS

SEQ ID NO: 2211 - protein, 356 aa, Schizosaccharomyces pombe
MFKSLVRKSSAFQPLKYGGKYTVTLIPGDGIGRETSNAVTEIFKTANVPIEFEEIDVTGMEKNNKSSGDALHEAIQSLKRNKVGLKGILFTPFEKGGHTSFNVALRKELDIYASLVLIKNIPGFKTRHDNVDFAIIRENTEGEYSGLEHQSVPGVVESLKIITEYKSKRIAQFAFDFALQNGRKSVTCIHKANIMKLADGLFRRTFYDVANGYDAITPKDLIVDNASMQAVSRPQQFDVLVMPNLYGSILSNIGSALVGGPGVIPGANFGRDYALFEPGCRHVGLSITGRGEANPTAAILSACLMLRHLGLKDYADLINAATYSVIEEGKTLTKDLGGSASTGDFTHAILERMESL

SEQ ID NO: 2212 - protein, 465 aa, Bacillus cereus G9241
MTIVTFSKSTTDKPSYTYEELSEKNKAYVWHPFTQMKDYLEEDPVIIERGEGRKLYDVNGNEYWDGVSSIWLNVHGHQVPELDEAIREQLNKIAHSTMLGLANVPSILLAEKIIEVVPEGLKKVFYSDSGSSAVEIAIKMAFQYWQHKGKAKKQRFVTLKEAYHGDTIGAVSVGAIDLFHQVYSSLLFEAIKMPYPYTYRSPYGNDKAEIVRKHLEEMEELLKDKHEEIAAIIVEPLMQGAGGMITMPKGYLRGLRNLCTKYNVLFITDEVATGFGRTGKMFACEHENVTPDILTAGKGLTGGYLPVAITVTTDEIYNAFLGGYEEQKTFFHGHSYTGNPLGCAVAIANLELYEKTNLIEEVACKTEYVATQLEELFACKHVGDIRQCGLMVGIELVKNKETKEAFEWTERVGVQVCKRSRELGMILRPLGNTIVFMPPLASTIEEIDDMLRILYKAISDVTEGE

SEQ ID NO: 2213 - protein, 426 aa, Neisseria meningitidis Z2491
MENSLKEAALKFHELPVPGKISVTPTKSLATDKDLALAYSPGVAAPCMEIHADPQNAYKYTAKGNLVAVISNGTAVLGLGDIGALAGKPVMEGKGVLFKKFAGVDVFDIEIDEKDPQKLVDIIAALEPTFGGINLEDIKAPECFYIERELRKRCKIPVFHDDQHGTAIITAAAVLNALRFTGRKIEEATLVCSGAGAAAIACLNQLLDLGLKRENVTVCDSKGVIYQTREDKDRMDESKQFYAIEDNGQRVLADAVKGKDIFLGLSGANLLTPEILNTMNEKPIVFAMANPNPEILPPLAKETRPDVVIGTGRSDFPNQVNNVLCFPFIFRGALDVGATTINEEMKRACVYALADLAMEEVTEEVVAAYGKKFEFGAEYLIPTPFDSRLLPRVATAAAKAAMESGVATRPIADLEAYAAKLSEWKL

SEQ ID NO: 2214 - protein, 321 aa, Bartonella sp.
YIDGNAGVLLYRGYPIDQLAEKGDFLESCYLLLYGELPTKQEKNDFDRCIMQHTMVHEQFARFFHGFRRDSHPMAVMVACLGAMSALYHDSIDITDPQQRMIASVRLISKVPTLAAMAYKYSIGQAFIYPRNDLSYAANFLRMCFSVPCEEYKTNPVLTRAMDRIFILHADHEQNASTSTVRLAGSSGANPFACIAAGVACLWGPAHGGANEACLKMLQEIGSVERIPEFIARAKDKNDPFRLMGFGHRVYKNYDPRAKIMQKTCHEVLKELNIQDDPLLDIAIELEKIALNDEYFVEKKLYPNVDFYSGITLKALGFPTE

SEQ ID NO: 2215 - protein, 481 aa, Methylobacillus flagellatus KT
MTKSLVWFRRDLRDYDHAALYHALKDSEQVVCAFVFDTDILDGLPRDDRRVEFIWESVRELKLALQERGGDLLVRHGKATEEIPALASVLGVECVYCNRDYEPAAVKRDDTVSQQLGTQGIAFKSFKDQVIFERDEIMTKSGTPFSVFTPYKNACLRKLDDFHLKAYPVDRYIHHLAQSAPQPMPSLESLAFARSNLKQLRLPTGMSGGMALFEDFSERMPRYRDARDFPALKGPSYLSVHLRFGTVSIRHLARTAWQQGGAGAETWLNELLWRDFYFQVLYHHPQVAEGHSFKPEFEHIPFPNGESLFKAWCEGRTGYPLVDAAMRQINQTGYMHNRLRMVAAGFLVKDLLIDWRWGERYFAEKLIDFDLAANNGGWQWAASTGCDAQPWFRIFNPVTQSEKFDPEGKFIRKYVPELQPCDDKEIHAPWLIPPLRQQALGLVIGKDYPAPVVDHAMRREQVLSLYRQASSRKKWPASSVL

SEQ ID NO: 2216 - protein, 97 aa, Glycine max
  unsure (1)..(97): unsure at all Xaa locations
ILKAGEKANDVWWNEPRWKGIKRPHSAHEVHSTRXTVNQEYPRTTMAKKLFGLLKERSEQGQSGHTMGAIDPVQVTQQGANQEVLYVSRWACSSVLT

SEQ ID NO: 2217 - protein, 222 aa, Bacillus thuringiensis serovar konkukian str. 97-27
MKFFIDTANLEDIKKAYKLGVLAGVTTNPSLVAKEGIKFEDRIAEICQAVPKVESVSAEVTPDAVTAEEMIAQAEELIKINGGDEKVTIKLPMTLAGLEACRYLTEKGVKTNVTLIFTVNQALLAARAGATYVSPFLGRLDDISEDGVLLVAKIAELFDVHQLDTQIIAASVRHPDHVTRVAMAGAHIATIPYKVIEQLAMHPLTDQGIEKFAADWVKAPKL

SEQ ID NO: 2218 - protein, 312 aa, Burkholderia cepacia R18194
MPIDNHIAALLARLALAEPPSSLDALRQATETTLTGWHGPLEAVDRTETFAVPTRDGRQIRVRAYWPAATSAHAERQPAIVYAHGGGWCLGTLELYDNPCRALANATQCVVLSVDYRLAPEHEFPVPLEDFCDALDWVFGEAAGLGLDPARIAVGGDSAGGNLAAAACLVARERGGPSIAHQLLLYPPLDASMSTTSYRTCGQGYYLTDEIMQYCFDLYLADPADGSSPSVSPLRAASLEGLPPATLLACEYDPVRDDAHAYAARLREAGVPVDCVVLPGMIHACIHMVGVTPAARQVFDVAGAQMRRAFQR

SEQ ID NO: 2219 - protein, 322 aa, Bartonella taylorii
TYIDGNKGILLYRGYPIDQLAERGDFLESCYLLLYGELPTKQEKHDFDRCIMQHTMVHEQFARFFHGFRRDSHPMAVMVACLGAMSAFYHDSIDITDPQQRMIASVRLISKVPTLAAMAYKYSIGQAFVYPRNDLSYAANFLRMCFSVPCEGYNINSVLTRAMDRIFTLHADHEQNASTSTVRLAGSSGANPFACIAAGVACLWGPAHGGANEACLKMLQEIGSVERIPEFIARAKDKNDPFHLMGFGHRVYKNYDPRAKIMQKTCHEVLKELNIQDDPLLDIAMELEKIALNDEYFVEKKLYPNVDFYSGITLKALGFPTE

SEQ ID NO: 2220 - protein, 198 aa, Triticum aestivum
KPAIKTVLEAYLPQIVLIVFLALLPTLLMFLSKQEGIPSQSHAVRAASGKYFYFIVFNVFLGYTLGSTLFKSLTTIIDHPAGIVTMLANSLPGSATFFLTFVALKFFVGYGLELSRLVPLIIFHLKRKYLCKTEEDVKAAWAPGDLGYNTRVPNDMLIATVVLCYSVIAPLIIPFGVAYFALGWLIAKNQILRVYVPS

SEQ ID NO: 2221 - protein, 342 aa, Agrobacterium tumefaciens str. C58
MLSHVDGQAGELVVRGHHLAELADWSFEQVLELLWSGQTATKITAEDIRSQLGKARLRAFELMQLLFPGLAALTSVEALRLLLSWLPDDETTPHHLVAVAAVPVFATAIIRNRQGFAPIAPDASLTHSADFLRMLSGTLPSTEKVRALDTYLTTVADHGLNASTFTARVIASTGAGLFSSVVGALCALKGPLHGGAPGPVLDMLDAIGAEAEIEPWLLDALGRGERLMGFGHRIYRVRDPRADVLKHAVSTLKEGSDRIAFAGKVEEAALALLKEKKPLRPLQTNVEFYTALVLEAVGFPRDSFTNVFAAGRMAGWTAHVLEQERTGRLIRPQSHYIGPHPR

SEQ ID NO: 2222 - protein, 368 aa, Bacillus halodurans C-125
MSIKQPFVPGLDRVIAAETAISFLDTEREKIIIRGHDLIDLSVSNDYLDIVHLLLDGTLPNASEKSALEDTLKKHYDIPSYVMEILSLLPETTHPMDGLRTGLSALSSVDKEIENRSTEANKARAYKLLGKLPAITVNSYRLINGLKTVQPVPTLSYSANFLYMITGKEPKPFEAKIFDRSLLLYSEHEMPNSTFTARVIASTHSDLYGALTGGVASLKGNLHGGANEAVMYMLQSVDSAAEFQQLIQKKLVNKEKVMGFGHRVYMKKMDPRALEMKESLKQLCEKKGDYSLLDRCEAGEKTMLEEKGLYPNLDYYAAPVYWMLGIPIELYTPIFFTARTAGLAAHVMEQHQNNRIFRPRVSYIGESY

SEQ ID NO: 2223 - protein, 456 aa, Archaeoglobus fulgidus DSM 4304
MYRVKTFKYYSTYKICMIEEVFELTQNGRAKKWHAFYGGKIEILPKVPIRTLDDFSIWYTPGVAEVCNEIAEDEEKAYDYTNKWNLIAIITDGSRTLGLGNIGPKAAMPVMEGKALLFKFLGAVDAFPIALAEQDADRFIEIVKAISPTFGGVNLEDISSPKCFYILERLQKELDIPVWHDDQQGTATATLAALINALKIVGKDISEVKISIIGVGAANFATIRLLKAAGADPKKMFVVDSKGILHPDRADLKEKKGYKWQVAIETNGERRTGGMEEAIRGTDVLIAASKPGPDVIKKEWIAEMNDDAIVFPLANPTPEIWPWEAKDAGARIVGTGRSDFPNQVNNSLVFPGVFRGALTVRARKITDEMCLAAANALAEFAERNGLSEDYIIPRMTEKEVFPEVATAVGVKAVELGLARLELREEEIYEIAELMISATQRKIKKLYELGFIKEPPS

SEQ ID NO: 2224 - protein, 492 aa, Rubrivivax gelatinosus PM1
MDMKNSPLATLADPTLLKTAALIDGAWVDRGEHFAVTDPATGQVLAQVANLGAADAEAALAAAARAWPAWRAKTAKERASVLMKWYQLLLQHADDLARIMTAEQGKPLAEAKGEVGYGASFIEWFAEEAKRVYGETVPTTDNNKRYLVLKQAMGVCAAITPWNFPIAMITRKVAPALAAGCPVVIKPAEQTPLSALAVAELAQRAGMPAGVLNVLTADAERSIQIGNVLCASDTVRHLSFTGSTEVGRILMKQCAPTIKKLSLELGGNAPFIVFDDADLDSAVEGAMISKYRNAGQTCVCANRLYVQAGVYDAFVEKLAAKVKAIKVGNGFEAGVTQGPLIDEAALAKVESHVADALAKGAKLLTGGQRIGERFYSPTVLAQATGEMLCAREETFGPVAPVFRFETEAEVVALANDTEFGLASYFYSRDVGRIFRVGEALEYGMVGINTGLISTAEVPFGGVKQSGLGREGSHHGIDDYVEIKYLCLGDIQK

SEQ ID NO: 2225 - protein, 355 aa, Glycine max
  unsure (1)..(355): unsure at all Xaa locations
MGEAPEVFYINGFSKFGHEIETQQNHVNDQNHDSSWYEEIIDEDLKWSFKLNSVLHKAISEYQDIALLDTKRFGKALVLDGKMQSAETDEFVYHECLIHPPLLCHPNPKTVFIMGGGEGSAAREALKHRSMVRVVMCDIDKEVVDFCRKYLIANKEAFSHKKLDLVINDAKSNKLPPRPPARPPSRPAELEKRKEKFDIIVGDLADPLEDGPCYQLYTKSFYEKILKPKLNDNGIFVTQAGPAGIFTHKEVFTSIYNTVKQVFKYVIAYTTHVPSFADTWGWVMASDQPLSICADEMDRRIEARIDGELLYLNGGXFHSSTTMNKTVYQSLQNETHVYTEENARFIPGHGMAFHL

SEQ ID NO: 2226 - protein, 181 aa, Zea mays
MASSIVSSAAAATRSNVAQASMVAPFTGLKSAASFPVTKKNNNVDITSLASNGGRVRCMQVWPPINMKKYETLSYLPDLSDEQLLSEIEYLLKNGWVPCLEFETERGFVYRENNSSPGYYDGRYWTMWKLPMFGCTDATQVLAEVQEAKKAYPQAWVRIIGFDNVRQVQCISFIAYKPEGF

SEQ ID NO: 2227 - protein, 138 aa, Parietaria judaica
MRTVSARSSVALVVIVAAVLVWTSSASVAPAPAPGSEETCGTVVGALMPCLPFVQGKEKEPSKGCCSGAKRLDGETKTGPQRVHACECIQTAMKTYSDIDGKLVSEVPKHCGIVDSKLPPIDVNMDCKTLGVLHYKGN

SEQ ID NO: 2228 - protein, 434 aa, Escherichia coli O157:H7
MKTRTQQIEELQKEWTQPRWEGITRPYSAEDVVKLRGSVNPECTLAQLGAAKMWRLLHGESKKGYINSLGALTGGQALQQAKAGIEAVYLSGWQVAADANLAASMYPDQSLYPANSVPAVVERINNTFRRADQIQWSAGIEPGDPRYVDYFLPIVADAEAGFGGVLNAFELMKAMIEAGAAAVHFEDQLASVKKCGHMGGKVLVPTQEAIQKLVAARLAADVTGVPTLLVARTDADAADLITSDCDPYDSEFITGERTSEGFFRTHAGIEQAISRGLAYAPYADLVWCETSTPDLELARRFAEAIHAKYPGKLLAYNCSPSFNWQKNLDDNTIASFQQQLSDMGYKFQFITLAGIHSMWFNMFDLANAYAQGEGMKHYVEKVQQPEFAAAKDGYTFVSHQQEVGTGYFDKVTTIIQGGTSSVTALTGSTEESQF

SEQ ID NO: 2229 - protein, 123 aa, Arabis holboellii
AVLIQILNVVAFCHLQGVVHRDLKPENFLYTSKEENSQLKVIDFGLSDFVRPDERLNDIVGSAYYVAPEVLRRSYTAEADVWSIGVIAYILLCGSRPFWARTESGIFRAVLKADPSFDEPPWP

SEQ ID NO: 2230 - protein, 316 aa, Escherichia coli CFT073
MNELDGIKQFTTVVADSGDIESIRHYHPQDATTNPSLLLKAAGLSQYEHLIDDAIAWGKKNGKTQEQQVVAACDKLAVNFGAEILKIVPGRVSTEVDARLSFDKEKSIEKARHLVDLYQQQGVEKSRILIKLASTWEGIRAAEELEKEGINCNLTLLFSFAQARACAEAGVFLISPFVGRIYDWYQARKPMDPYVVEEDPGVKSVRNIYDYYKQHHYETIVMGASFRRTEQILALTGCDRLTIAPNLLKELQEKVSPVVRKLIPPSQTFPRPAPMSEAEFRWEHNQDAMAVEKLSEGIRLFAVDQRKLEDLLAAKL

SEQ ID NO: 2231 - protein, 112 aa, Glycine max
MILLLGGSQLPNCSASAIITYSSSPSMSGFYIVMQTASSIISFSAVVAVFRAAPGMVTPFSDIKTMVGFPSKKTNNDITSIPSTGGRVQCMQVWPPVGKKKFETLSYLPDLM

SEQ ID NO: 2232 - protein, 123 aa, Arabis holboellii
AVLIQILNVVAFCHLQGVVHRDLKPENFLYASKEENSQLKVIDFGLSDFVRPDERLNDIVGSAYYVAPEVLHRSYTTEADVWSIGVIAYILLCGSRPFWARTESGIFRAVLKADPSFDEPPWP

SEQ ID NO: 2233 - protein, 454 aa, Vibrio vulnificus CMCP6
MTITNPFNDEVIGTVPNMGEKETQEVIAGADKAFQQFKALTAQERANLLHRWHQLILEHSDELAHIMTLEQGKPLAEAKGEVLYAASFIEWFAEEARRAYGTLVPSHKANAKILVTKEPIGVVAAITPWNFPAAMITRKCGPAFAAGCPVILKPAPDTPFTALALAVLAEKAGFPAGVFNVITGDAVAIGGELTSNKRVRKLSFTGSTPVGKLLMRQSADNIKKLSLELGGNAPFIVFEDADLDAAVEGAMIAKFRNAGQTCVCANRLYVQRSVYSEFCQKLVAKVSALKVGNGFDQGVHIGPLINDAAVAKVVQHVEDAQSKGAQIECGQLPTAGSRLVQPLVLSGVTDEMLVAQEETFGPMAPLFVFDSEEEVLARANNTDFGLAAYFYTQSLSRAWRMSEALEAGIVGINEGLISTTVAPFGGVKESGLGREGSFLGMDDYMESKYILMGL

SEQ ID NO: 2234 - protein, 431 aa, Corynebacterium diphtheriae NCTC 13129
MENNSFAQFDRDHIWHPYGPMPATVAPYVVAATNNTDIILDNGTRLIDGMSSWWAAAFGHGNERLKAAAHRQIDVMSHVMFGGLTHVPAIKLARQLCELTDEPLTKVFFSDSGSVAVEVALKMVYQYQLGQGHPERRRMLTWRGGYHGDTFATMSLCDPEGGMHAMWEGRVMDNVFASRPPLWGAASNEISAYIDHLDSLIDSTIAGIIVEPVVQGAGGMRFHAPEILKGIRQLCDQHGILFIADEIATGFGRTGNLFATQAAKVTPDILCVGKSLTGGFMSLAATITTDAVAESISSAAGGGALMHGPTFMGNPLACAVASEALSIIAEGDWKQQVAEIESELKKGLVPLASNPAVRDVRVLGAIGVVEMKEPVDMKRATHAAVNAGVWLRPFGRLVYTMPPFVCTHKQIQKISCAIASIVHTEQERFER

SEQ ID NO: 2235 - protein, 267 aa, Escherichia coli CFT073
MAIPAFGLGTFRLKDDVVISSVKTALELDYRAIDTAQIYDNEAAVGQAIAESGVPRHELYITTKIWIENLSKDKLIPSLKESLQKLRTDYVDLTLIHWPSPSDEVSAEEFMQALLEAKKQGLTREIGISNFTIPLMEKAIAAVGAENIATNQIELSPYLQNRKVVAWAKQHGIHITSYMTLAYGNALKDKVIARIAAKHNATPAQVILAWAMGEGYSVIPSSTKRENLESNLKAQNLQLDAEDKKAIAALDCNDRLVSPEGLAPEWD

SEQ ID NO: 2236 - protein, 127 aa, Glycine max
KKMVNVGNIFPPPPPKTKGGFFFRMVFGGFFPQNSGRVPVSGGASFAFCPPQTFGGGAAWFNTLVPFGRAALGGPLSAFENPNNKGGGIGKINPLGGAPPGGAPPGLFKNVAKNNLGAHEDNLAKGG

SEQ ID NO: 2237 - protein, 421 aa, Bacillus sp. KSM-K16
METVLMDNLWLTISAILVLLMQGGFILLEAGSTRMKNAGHIAGKTIFTVGIASLVFWAVGYGFIYGDGNPFIGMADFFFGNYADGVGSVDFFFQLTFAAIALTIAFGGFAERGKLAAYAIFAVLFSAFVYPLVAHWIWSDQGWLANLGKQDFAGSTVVHLTGAMAALAATLMLKPRLGKYDKNGKVNDLFGHNQVYTALGVLILWVGWFGFNAGSTGGVADAFFGYVALNTQLAAGAGTIAALFLVWALNGKADVPTTLNGTLAGLVAITASCAFVAPWAAVLIGVIGGLIVVVSMNMFDKLKIDDPIFALSVHGVAGVWGTLSNGLFATPELAEMNGGLPGLFYGGGFEQLGVQLLSVVVCGVFAFVASYVLLFITKGLLGGNLRVTEEEEILGLDMSEHGSYGYPETVQSEKTSTQTGS

SEQ ID NO: 2238 - protein, 405 aa, Arabidopsis thaliana
MDRISGLPDELLVEILHCLPTKEVVSTSILSKRWEFLWLWVPKLTFVMNHYESDLPIQDFITKNLRLLKPQVIESFHLQCFSSSFKPEDIKHWVVTTISRRVRELIINYCDLSWLDKPVVLLDLPNSLYTCTSLVTLKLIGHSIIVDVPRTVSLPCLKTLELDSVAYSNEESLRLLLSYCPVLEDLTIHRDMHDNVKTLVIIVPSLLRLNLPIDGAYSCDGYVIVTPALKYLKVPGLYREDFSYLLTHMPNVEEADLSVEQDVERLFESITSVKRLSLFVLLDIEDESMYHNGIYFNQLEHLNLHIYRDNWSKLLVRLLEDSPKLRVLKIVVDGEPSFDEEFEHVSWIYNDESSVPKCLLDSLEVFEFAGYTRRPEERDFVSFILKHACHLKSSSISRLSCYVLE

SEQ ID NO: 2239 - protein, 102 aa, Glycine max
MVQQLPSLFSWGPPLMTSKLEQLKQFTTVVCDTGDLEAISRLRPVDATTNPSLLLKAAAIPEYAELLRNAVSLSKGNVGLACDHFAVSVGAGILKVIPGRIS

SEQ ID NO: 2240 - protein, 85 aa, Zea mays
  unsure (1)..(85): unsure at all Xaa locations
LEEEVVXAXSMLSSXAXXVPXRSQXXMXXXFXGLKSXAXFPVTRKAXNDITSIASNGGRASCMKVCPPVXXXKXXIFLPAPPLPS

SEQ ID NO: 2241 - protein, 64 aa, Triticum aestivum
  unsure (1)..(64): unsure at all Xaa locations
KSSPSAGKNKGGKGNCIXINLAIILPPLGVFLKFXCGHEFWIWLLVNFLGXIPGXIYAIYANNK

SEQ ID NO: 2242 - protein, 123 aa, Arabis holboellii
AVLIQILNVVAFCHLQGVVHRDLKPENFLYTSKEENSQLKVIDFGLSDFVRPDERLNDIVGSAYYVAPEVLHRSYTTEADVWSIGVIAYILLCGSRPFWARTESGIFRAVLKADPSFDEPPWP

SEQ ID NO: 2243 - protein, 351 aa, Thermoplasma volcanium GSS1
MNPGCRLRGPMGYPDYLTGPLSLSCINIKTKRNIQKAYFRMFDVNPMPIDPQVRKYLDAMSKVSVPELNKTPIEDLRKIFDTPASGAPKVKISVVEDMILDTDAAKLPARLYDDSNSDSLVLYFHGGGFVFGSIETHDSLCRRIAKYSGSKVISVGYRLGPENKFPVAQIDAFNSYLYVLKRSEELGVDSDKIALMGDSAGGNLAAVASLMARDKGIKLPRLQVLVYPSTGPDMTSKSYLEYSSIYLTKELLNWFSSQYLNSIEDALNPYFSPILADLSGLPEAIVVTDEYDPLLEQGETYSATLRDSGVPVTSIRVNGMIHGFLSNFHLFRAADVSLMMISGAIHTILES

SEQ ID NO: 2244 - protein, 243 aa, Zea mays
MRAKARPCPRWPRRKHCPPSSVASRRVACSASAADADVVDLFDAAKLTVDKFVTSGMVVGLGSGPASALAIQYLGTRLRRGSLAGITAVTSASEADKAGIRANSYQEGTQIDFAFTDAEAIEEGTLAAVIGRRKTESGEPSFMAEKAMAKSAHKLAFITGNDKYVTTGVEGSIPVLIKSVWRRPSFGTAGPLGGDHPLVTKEGHHVLDVIFTTPIQDLGTPPYAVIASKGEVQVLDEKSSVIQ

SEQ ID NO: 2245 - protein, 148 aa, Glycine max
MSDAPPSPTHESGGEQSPRGSSSGAREQDRYLPIANISRIMKKALPPNGKIAKDAKDTMQECVSEFISFITSEASEKCQKEKRKTINGDDLLWAMATLGFEDYIEPLKVYLARYREAEGDTKGSARSGDGSATPDQVGLAGQNSQLVH

SEQ ID NO: 2246 - protein, 403 aa, Oryza sativa (japonica cultivar-group)
MRGGAGALPVPGGLALGVVLLLVLAVLPSRAAGVNVTAALAAFPSFADFARLLESSPVAGELAARSSLTLLAVPNNNLPRSPSAFAAASGADIADVLRYHVLLEYLSPSDLARLPASGKLVTTLFQTTGRAPSDLGAVNLTVGGNSTVVVRSPAPFPGSSATVLGAVTAVPYNLSVLAVGGLIVPSGLDVAASDSRPAGGVNITHVLADARGFNVAASMLEASGVADEFTADERGAGITVFVPTDDAFADLPATDRLQSLPADRKATVLRFHVLHSYYPLGSLESIVNPVQPTLATERFEAGQFTLNITRVNGSVAIDTGIVQASITRTVFDQNPVAVFAVSKVLLPKEMFGRGGADSDVMAPPPDAMAPDAAENVRTPPTRLSSPPALRGGADKCVLRECDG

SEQ ID NO: 2247 - protein, 201 aa, Brassica rapa subsp. pekinensis
PGTDTAAAVVVWAMTYLIKYPEAMKKAQDEVRNVVGDKGYVSEEDIPNLPYLKAVIKESLRLEPVIPILLHRETIADAKIGGYDIPAKTIIQVNAWAVSRDTAAWGDNPNEFIPERFMNEQKGVDFKGQDFELLPFGSGRRMCPAMHLGVAMVEIPFANLLYRFDWSLPKGIKPEDIKMDVMTGLAMHKKDHLVLAPRTHI

SEQ ID NO: 2248 - protein, 326 aa, Candida albicans
MTGSSSQFQQLEKLGEGTYATVYKGRNRATGALVALKEISLDSEEGTPSTAIREISLMKELDHENIVTLYDVIHTENKLTLVFEYMDKDLKKYMEVHGQQSALDLKVVKSFMFQLLKGIMFCHDNRVLHRDLKPQNLLINNKGELKLGDFGLARAFGIPFNTFSNEVVTLWYRAPDVLLGSRAYTTSIDIWSAGCIFAEMCTGKPLFPGTANEDQLIKIFRLMGTPNERTWPGISQYTNYKNNWQIFVPQDLRLIVPNLDSMGLNLLQSLLQMRPESRITARQALQHPWFHEITMPNAVPQHLSDPYQQQQQQQQHPHQPIIDQQY

SEQ ID NO: 2249 - protein, 428 aa, Myxococcus xanthus
MYDATPTTADTSPHAKLHAQRFEGIKRNYTPKDVEKLRGSITVSHTLAELGAKKLWELLHTEDYINALGSLTGNQAVQMVRAGLKAIYLSGWQVAADANSAGQMYPDQSLYPVDSVPTVVRKINNALRRADQIDHAEGRKDRYWFAPIIADAEAGFGGPLNAFELMKGMIEAGAAGVHFEDQLASEKKCGHMGGKVLVPTSHFIRTLNAARLAADVMGVPTLLVARTDADSAKLLMSDADEYDHAFIDKKSGRTPEGFYRLNGGLDCAIARGLAYAPYADLVWCETITPDLAQAKKFAESIRAKYPNKLLAYNCSPSFNWKKNLDDATIAKFQRELGAMGYKFQFVTLAGFHALNFGMYELARKYKDRGMAAYSELQQAEFAAEKDGYTATRHQREVGTGYFDQVAEAICGGNASTLALTESTEAHQF

SEQ ID NO: 2250 - protein, 316 aa, Buchnera aphidicola str. Sg (Schizaphis graminum)
MNQLNALKQFTTIVADTSDIESICKYKPQDATTNPSLILKAVSSSVNKRFIDQAIEYARKKGGSYNYKIVNASDKILVDLGVEILKHIPGYISSEVDARLSFNKEKCILKAKKIIDMYEEKGISRNRVLIKLAATWECIKAAEELKKNNIACNLTLLFSFAQARACAESNVFLISPFVGRIYDWYLSQNLILKNPADQDPGVLSVCKIYDFYKKYNYKTIIMGASFRNVQQILSLSGCDRLTISPVLLKELESSNKELNRKLCPPTSFLNPPVPLTEAEFRWEHNQDEMAVQKLSEGIRNFGKDQLSLEKIFSKLI

SEQ ID NO: 2251 - protein, 305 aa, Bordetella parapertussis 12822
MGHGVIIRENVLQECRIFHPVRFVNTREGFMAQVPVLKLNDGNAMPQLGLGVWQVPNDQAAASVKAALAAGYRSIDTAAIYGNEAGVGEGLRAAGVARKDLFVTTKLWNDRHGYDEAQRAMDESLRKLGLAYVDLFLIHWPVAGSDKFVDAWRAMVAMKEDGRARSIGVSNFTIANLRRLVDETGVVPAVNQVELHPGFAQRELRAFHAEQGIATESWSPLGQGAVMHDATLAGIAARHGKSAAQVTLRWHLQNGLIVIPKSVTPARIQANIDVFDFELSADEMADIDALPEGPRLGPDPATFTG

SEQ ID NO: 2252 - protein, 509 aa, Xanthomonas axonopodis pv. citri str. 306
MNALASAKSLNNDPHSIFKPRYDNFIGGQWVAPHSGQYFDNTTPINGKVFTSIARSTAPDIEAALDAAHAAKDAWGKTSTTERSNVLLKIADRIEQNLELLAYAETWDNGKPVRETLNADVPLCVDHFRYFAGAIRAQEGGISEIDSDTIAYHFHEPLGVVGQIIPWNFPLLMACWKLAPALAAGNCVVMKPAEQTPASILVLMELIGDLLPPGVLNVVNGFGLEAGKPLASNPRIAKIAFTGETTTGRLIMQYASQNLIPVTLELGGKSPNIFFADVMAEDDDFLDKAVEGFVLFAFNQGEVCTCPSRALIQESIYDAFMEKALSRVAAIKQGNPLDPNTMVGAQASSEQLEKILSYIDIGKQEGAEVLIGGERNTLDGDLAEGFYVKPTVFKGHNKMRVFQEEIFGPVVSVTTFKDEADALAIANDTLYGLGAGVWSRDASRLYRMGRAIQAGRVWTNCYHAYPAHAAFGGYKQSGIGRENHKMMLDHYQQTKNLLVSYSPKALGFF

SEQ ID NO: 2253 - protein, 296 aa, Magnaporthe grisea 70-15
MGYRHIDGAHAYGNEKQIGEAIKESGIPREEIFVTSKLAQTWHEPGDVERGLDLSLRNLQLDYGKPWKVGTGPLPHAYKAGENNETIRHPSGNGKPVIDYDLSRRYPETWQAMERLVDSGKAKAIGVCNFNVLKTKRILEIARIIPAVNQVELHPYLPQHELMEFSAKHGILLMAHQPLGGRPVPAVRGHPDQSPPTEDQTIVDVASSCGMSPAQVCLSWLIQKGIPVIPKSNQREHLRSNMQVRKLSVELFNLVDGLAALRLGGPVRFLDPSRHVGFEIFDEENDQPIEDAAAWD

SEQ ID NO: 2254 - protein, 425 aa, Bacillus thuringiensis serovar konkukian str. 97-27
MKNERIEKLQESWELDTRWKGITRPYSAEDVIRLRGSIDIEHTLAHRGAEKLWASLHTEDYINALGALTGNQAMQQVKAGLKAIYLSGWQVAADANLSGHMYPDQSLYPANSVPAVVKRINQTLQRADQIQHMEGSGDTDYFVPIVADAEAGFGGQLNVFELMKGMIEAGASGVHFEDQLSSEKKCGHLGGKVLLPTQTAVRNLISARLAADVMGVPTIIVARTDADAADLITSDIDPVDKAFITGERTPEGFYRTKAGLDQAIARGLAYAPYADLVWCETSEPNLDDAKRFADAIHKEHPGKLLAYNCSPSFNWKQKLDEKTIASFQKEIASYGYKFQFVTLAGFHSLNYGMFELARGYKERGMAAYSELQQAEFAAEKHGYSATRHQREVGTGYFDEVAQVITGGTSSTTALKGSTEEAQFTK

SEQ ID NO: 2255 - protein, 469 aa, Agrobacterium tumefaciens str. C58
MSAVAFMGVRSVMNEVSKPMSNLAAIDAAHHLHPFSDMGKLNAAGTRIIERAEGVFIYDSTGKKYLDAFAGLWCVNIGYGRREIADVVQRQMNELPYYNAFFGTTTPPATLLAQKIASRAGPKMNHVFFTNSGSEATDTWFRMARVYWKALGHPTKTRVIARRNGYHGSTVAGASLGGMKWMHEQGNLPIEGIAHIGQPYWYAEGGDLSPAEFGLKVARELDAKIDELGEENVAAFVAEPIQGAGGVIVPPETYWPEIARICKARNILLVSDEVICGFGRLGSWFGYQHFGVEPDLAPVAKGLSSGYLPIGGVIVSDRVAEVMLSEVGDFNHGFTYSGHPVCAAAALENLRIIEDEGLVERVRDDIGPYFSEGWKSLADHELVGEAVNVGLMGGLQLTADKATRRRFAKPDDIGTAVRNHCLANGLVMRATGDRMLASPALTVSRSEVDEIIETLRQGLNHLRDTREHF

SEQ ID NO: 2256 - protein, 468 aa, Archaeoglobus fulgidus DSM 4304
MVGRMCVAVLIVLLLVATAGADPNGAETLKENPELPVDFVWALICGFLVMFMQAGFAMLEAGFSRAKNVANVMMKNLMDFAVGSLAFFAVGFALMMGADWQGIAGTTGWFLAGESYDVSTIELWFFMLVFAATAATIVSGSIAERPKFSVYLVYSAVVSAVIYPIYGHWLWGGGWLSSSEFMVKLGGGYGALDFAGSGVVHALGGYIALAAVMLLGPRLGKYDSDGNPRAIPGHNLAFAVIGTFILWFGWFGFNAGSTLSAHELRVSIIASNTNLAAAAGAVTAMAITWLRNGKPDVGMTCNGAVAGLVAITAPCAWVQPWSSVVIGTIAGFIATYGYWWLEKRGLDDVVGAIPVHGFSGTWGLIALGIFADGSYGLYATESPLVTGLLYGNWGFFIVQLISAIVNFAWAFGTGFALFWILKKVIGIRVSPEEEMLGLDIAEHAAVAYPNFVCTETELPLAMKQGGGR

SEQ ID NO: 2257 - protein, 116 aa, Cicer arietinum
MASMKVVCVALIMCIVIAPMAESAITCGRVDTALAPCLGYLQGGPGPSAQCCGGVRNLNSAAVTTPDRQAACNCLKSAAGSISRLNANNAAALPGKCVVNIPYKISTSTNCATIRV

SEQ ID NO: 2258 - protein, 75 aa, Zea mays
CFFFSYSRDQLYPFTIIAEANSTAQHLVDFTEAEEDLVSRMHRLVGNRWEIIAGRIPGRTAEEVEMFWSKKYQER

SEQ ID NO: 2259 - protein, 176 aa, Triticum aestivum
  unsure (1)..(176): unsure at all Xaa locations
MAPTVMASSATSVAPFQGLKSTAGLPVSRRSNGASLGSVSNGGRIRCMQVWPIEGIKKFETLSYLPPLSTEALLKQVDYLIRSKWVPCLEFSKVGFIFREHNASPGYYDGRYWTMWKLPMFGCXTDATQVINEVEEVKKEYPDAYVRIIGFDNMRQVQCVSFIAFKPPGCEESGKA

SEQ ID NO: 2260 - protein, 182 aa, Zea mays
GFKNKKRFQAGPFEVEPIRVTHSIPDCCGLVLRCGDGIIFHTGDWKIDESPVDGKKFDRQALEELSKEGVTLMMSDSTNVLSPGRSISESVVAGSLLRHISEAKGRVITTQFASNIHRIGSIKAAADLTGRKMVFVGMSLRTYLEAAFKDGKAPLDPSTLESPGVNARKVPRHRSTPRWMAG

SEQ ID NO: 2261 - protein, 182 aa, Fagus crenata
MASSMISSATVATVSRATPAQATMVAPFTGLKSTAAFPATRKSNNDITSLASNGGRVQCMKVWPPLGLQKFETLSYLPPLSIESLAKQIEYLILKGWIPCLEFELEHPFVYRENNRSPGYYDGRYWVMWKLPMFGCTDATQVLAELQEASKTYPTSHIRIIGFDNKRQVQCISFIAYKPPAK

SEQ ID NO: 2262 - protein, 496 aa, Nicotiana tabacum
MVLSKTASESDVSIHSTFASRYVRTSLPRFKMPENSIPKEAAYQIINDELMLDGNPRLNLASFVTTWMEPECNKLMMDSINKNYVDMGEYPVTTELQNRCVNMIAHLFNAPLGDGETAVGVGTVGSSEAIMLAGLAFKRKWQNKMKAQGKPCDKPNIVTGANVQVCWEKFARYFEVELKEVKLSDGYYVMDPEKAVEMVDENTICVAAILGSTLNGEFEDVKRLNDLLIEKNKETGWDTPIHVDAASGGFIAPFLYPELEWDFRLPLVKSINVSGHKYGLVYAGIGWAIWRNKEDLPDELIFHINYLGADQPTFTLNFSKGSSQVIAQYYQLIRLGFEGYKNVMENCQENARVLREGLEKSGRFNIISKEIGVPLVAFSLKDNSQHNEFEISETLRRFGWIIPAYTMPPNAQHVTVLRVVIREDFSRTLAERLVIDIEKVLHELDTLPARVNAKLAVAEANGSGVHKKTDREVQLEITAAWKKFVADKKKKTNGVC

SEQ ID NO: 2263 - protein, 500 aa, Arabidopsis thaliana
MVNFLLVLCYCRLILIHCKTIQLTQWLSKSFLTDVLVTKVPNCVLWQYFVDADDSVPQKIVVHKDGPRGIHFRRAGPRQKVYFESDEVHACIVTCGGLCPGLNTVIREIVSSLSYMYGVKRILGIDVSFCDCNLLLTKTNTGGYRGFYAKNTVSLDSKVVNDIHKRGGTILGTSRGGHDTTKIVDSIQDRGINQVYIIGGDGTQRGASVIFEEIRRRGLKVAVIGIPKTIDNDIPVIDKSFGFDTAVEEAQRAINAAHVEAESIENGIGVVKLMGRYSGFIAMYATLASRDVDCCLIPESPFYLEGEGGLFEYIEKRLKESGHMVLVIAEGAGQDLMSKSMESMTLKDASGNKLLKDVGLWLSQSIKDHFNQKKMVMNLKYIDPTYMIRAVPSNASDNVYCTLLAQSAVHGAMAGYTGYISGLVNGRQTYIPFYRITEKQNHVVITDRMWARLLSSTNQPSFLGPKDVFDNKEKPMSALLDDGNCNGVVDVPPVTKEITK

SEQ ID NO: 2264 - protein, 494 aa, Brassica juncea
MVLSRAATESGENVCSTFGSRYVRTALPKHKIGESSIPKEAAYQIIKDELMLDGNPRLNLASFVTTWMEPECDKLIMESINKNYVDMDEYPVTTELQNRCVNMIARLFNAPLEETETAMGVGTVGSSEAIMLAGLAFKRNWQNKRKAEGKPYDKPNIVTGANVQVCWEKFARYFEVELKEVKLSEGYYVMDPDKAAEMVDENTICVAAILGSTLNGEFEDVKRLNDLLVKKNEETGWNTPIHVDAASGGFIAPFIYPELEWDFRLPLVKSINVSGHKYGLVYAGIGWVVWRTQQDLPDELIFHINYLGADQPTFTLNFSKGSSQIIAQYYQLIRLGFEGYKNVMENCRENMVVLREGIEKTERFNIVSKEVGVPLVAFSLKDHSFHNEFEISEMLRRFGWIVPAYTMPADAQHITVLRVVIREDFSRTLAERLVADIVKVLHELDTLPSKISKKMGAEDFGNVKGKKVDRDVLMEVIVGWRKFVKDRKKMNGVC

SEQ ID NO: 2265 - protein, 325 aa, Glycine max
  unsure (1)..(325): unsure at all Xaa locations
MGGGGAMRSAAAKIAGIGISKAALRPSALPTEQAVHNASRPTSVVGVKGAKSTEVAPLHAAAPWDDWDLADDGDLVVPRMVFGSVPTFAEAKEATAELKDAIDQVYLSPESSQYSSRGGQVSALSPTGGQVSALSPTLYEPVNRSCVVDAISDSSAPKHAIQAFHLLSTSXTAQAVVASLACDPNVWNAVMENPAVSSFFQSQQSVADLGAAGNTEELDKFSSCTSETVESPERLGVSAESHPGNGIFDFMDLLQNVKLTVIELVSRVSGFLQNIFPTPDAMKEKMSGDVDGNTKASFMDSKISMGGTFTGLAIIVIMVIVTKRA

SEQ ID NO: 2266 - protein, 368 aa, Glycine max
MGEAKGKEEEVLASVHSTVFKESESLDGKCVKIEGYDFNRGVNYPLLLSSMVTTGFQASNLGDAIQVVNQMLDWRLVDEPVAEDCSDQERDLEYRKSVTCKVFLGFTSNLISSGVRDTVRFLLQHRMVDVVVTTTGGIEEDLIKCLAPTYKGDFSLPGAYLRSKGLNRIGNLLVPNDNYCKFEDWIIPIFDQMLGEQNNENVLWLREDDRRGLGKEIKNESSYLYWAYKNNIPVFCPGLTDGSLGDMLYFHSFRNPGLIVDIVQDIRAMNGEAVHASPRKTGMIILGGGLPKHHICNANMMRNGADYAVFINTAQEYDGSDSGARPDEAVSWGKIRDSAQTVKVHCDATIAFPLLVAETFASRVKPPH

SEQ ID NO: 2267 - protein, 293 aa, Meiothermus ruber
MNMAYKDYYKILGVPKNASEDEIKKAFKKLARKYHPDVNKEPGAEEKFKEINEAYTVLSDPEKRRYYDTYGAAAGSAGWQGPPPGPGGFGGFTGNVGDFSDFFQQLFGGRGGFGGLGDLFEQTPGRGARRVAGDLEAELPLSLEEAYRGGEKTISVGAERLTVRIPPGVREGQKIRLAGKGRAGGDLYLHVKLQSRPEMRLEGDDIYTVVEVPAPIAVVGGKVRVQTLDGPVEITIPRRTQAGRKLRLAGKGWPRKDKSRGDQYAEVRVTIPTNPSPEEERLYAQLAELIKVQ

SEQ ID NO: 2268 - protein, 176 aa, Triticum aestivum
MAGVGRNMVAPLLVLNLIMYIIVIGFASWNLNHFINGLTNRPGVGGNGATFYFLLFAILAGVVGAASKLAGVHHVRTWRGDSLATSASSALVAWAITALAFGLACKEIHIGGYRGWRLRVLEAFVIILVFTQLLYVLALHSGLFGNHAGGYGAEHGGYGAGDPHNKGMGTGGVARV

SEQ ID NO: 2269 - protein, 212 aa, Zea mays; identical to SEQ ID NO: 208

SEQ ID NO: 2270 - protein, 239 aa, Treponema denticola ATCC 35405
MDTSQLKERVAYHAIDTLFSEGKIFDGMKIGLGTGSTAMPAVHRLAQLLSSGKLKKIYAVPTSFQTSIECEKLGIPIYSLSSQQIGGSLDLAIDGADEIDPDKNLIKGGGAALLKEKIIAYNSKEFVVIADERKKVKSMGKGFALPIEIIPEARLSITKALEAQGIEVFLREGVKKMGPVVTDNGNFIIDVKWPKAADVDPKALEESLNKITGVVENGFFTKNTPRVFIVHQDGNIEDL

SEQ ID NO: 2271 - protein, 402 aa, Bordetella parapertussis 12822
MLSPEVRALVKATAPVLKEHGEALTRHFYTRMLGGNPELRQLFNQGHQQSGQQQQALAAAVAAYAEHIDDPSVLLPVVERIAHKHVSLGVRAEHYAIVGKHLLASIREVLGEAATDELIDAWAAAYGQLADLLIGRERALYAAAASRDGGWTGWRAFKVVRKTPESAEITSFYLAPADGGATPDYLPGQYVSVRVYVPELGLMQPRQYSLSEAPGMPGQLRISVKREAGSPAGMVSGTLHNRINEGDVLDVSPPQGDFTLDAEDGRPVVLLSGGVGLTPMVSMLNHLTARDDGRQIRFVHACREAGVHAMKEHINALAAKRPNVRKAVFYERVGADDRRGVDYDYEGRVDLHAIRDEVILPDADYYLCGPLPFMQAQRRALADLGVAEHRIHAEVFGTGGVA

SEQ ID NO: 2272 - protein, 348 aa, Bacillus halodurans C-125
MQALRWHGVKDVRVDDIAEPATLKGKVKIKVKWCGICGSDLHEYAAGPIFIPQNSPHSLTEEKAPIVMGHEFSGQVVEVGDGVTKCEEGDRVVVEPIFACGTCTACKQGKYNLCEQLGFLGLAGGGGGFSEYVTVDEHMVHKIPDTVSFEQGALVEPAAVALYAVRQSQFNVGDQAVVFGTGPIGLLVIEALKASGASKIYAVELSTERRQRAEQLGAIALNPAEVNVVEEIQRLTDGGADVSFEVTGVPIVLTQAIESTKLNGQTMIVSIFEKEASFQPNLVVMRERNIAGIIGYRDIFPAVISLMNQGYFSAETLVTKRIGLHDIVEQGFEALMKTNCNIKCDTTK

SEQ ID NO: 2273 - protein, 374 aa, Wolbachia endosymbiont of Drosophila simulans
MIENKFGKFDIVVIRENEEDVYTGIEHRLTGDSYQCTKIITRSGSEKICRYAFEYAKKHNRKKVTCLTKDNIMKMTDGTFHAAFDRIAKEYQDIKAEHYIVDIGMARVATEPENFDVIVTENLYGDILSDIVAQTSGSVGLAGSSNIGNEYAMFEAVHGSAPDIAGKNIANPSGLLNAAVHMLIYIGQVGTAKLIYDAWLKTLEGGIHTADLYKEKRSKQKVGTKEFAEAVIDNLGKKPAELTIGSGSDSKINLDSKINKVQDNYEQDYKVKKLVGSDITLAWDKSSNVDQIVGLFESSNPQIIAIYSKGLAIWPGSSKSSSDQITCRFIANSEKKPITNSDVNDLLIKLEENTFDVVRMDKLYLYDGKEGFFS

SEQ ID NO: 2274 - protein, 413 aa, Thermobifida fusca
MGPAAVAVADGRIAAVADYFDDLPSRKEVDLGETALLPGMVDVDAAVQAPGQLLSQGYARTTRAAAAGGITTLVVAPAPAQPAITSTEALRAHLHASASNSATHVAFLGGITPRSSSAELADLRANGVVGFACSLSDELMGLPALDDIHLSKSMAEVAAMDVPIVVHAEDANELGTVVGPGNSALLAARPPRAERRGLERVLAAARSSGARVHISPFVAAECAAILAAARDIGIPVSAQTCPHYLCLPAEHVPDTDPSYRCRPPLRSDANRQALWNALLHGAESFGDVIVDSVGSGNRPGTGISAIRWTLPALWTAAQKRGCGLAELTQWTAQRPAELMGLATKGRIQVGYDADLVAFEPDTFQRVPASDGGPYRGRRLQGRVTGTWLCGIPVPSDADNDPSPRGGPLLSAYR

SEQ ID NO: 2275 - protein, 506 aa, Arabidopsis thaliana
MERTLLQWRLLPLLALIVALFSFFFASPRSLQGNNKCSLLPHDHYWISSKRIVTPNGLISGSVEVKGGIIVSVVKEVDWHKSQRSRVKVIDYGEAVLMPGLIDVHVHLDDPGRSEWEGFPSGTKAAAAGGITTLVDMPLNSFPSTVSPETLKLKIEAAKNRIHVDVGFWGGLVPDNALNSSALESLLDAGVLGLKSFMCPSGINDFPMTNITHIKEGLSVLAKYKRPLLVHAEIERDLEIEDGSENDPRSYLTYLKTRPTSWEEGAIRNLLSVTENTRIGGSAEGAHLHIVHLSDASSSLDLIKEAKGKGDSVTVETCPHYLAFSAEEIPEGDTRFKCSPPIRDAANREKLWEALMEGDIDMLSSDHSPTKPELKLMSDGNFLKAWGGISSLQFVLPITWSYGKKYGVTLEQVTSWWSDRPSKLARLHSKGAVTVGKHADLVVWEPEAEFDVDEDHPIHFKHPSISAYLGRRLSGKVVSTFVRGNLVFGEGKHASDACGSLQLATT

SEQ ID NO: 2276 - protein, 492 aa, Burkholderia cepacia R18194
MQANDRTIPLDHPDCFYIDGQWTPAPSAETFEVLDCSTERVAARVARADAAVAARAIDAARRAFDQGPWPRMTPAERAACLERIAQHLEAANDEFARGWSIESGILQRIAKPRIGQFLGAAFRQYAAMADTYPFVEPHRSVTGHQAYAVKEAVGVVLAIVPWNGPAALIAYKVAPALLAGCTVIIKPSPEAPTSAYLFAQICDEIGLPPGVVNVVTADREVSEAMVRNPSVDKITFTGSTAAGRSISEAAAGRIARVTLELGGKSAALVLDDYDLDAAAQVLGKSYFSYLTGQVCHSLTRIIVPRAKHDTMVEALSEAAREMVLGDPFSDATTVGPLATARQRDTVEHHVAKGIAEGATLAAGGARPRHLSRGFFFEPTVFANVDNRSTLAQQEIFGPVLSVIAADSEAHAIELANDSIFGLNAVVFTSDAQHALQVARQLRTGSVGHNASRTDFSIGFGGFKQSGIGREGGVEGLNAFVESKTIVLDQPLA

SEQ ID NO: 2277 - protein, 377 aa, Zea mays
  unsure (1)..(377): unsure at all Xaa locations
ACRVAASKTKIYMVLEFVNGGELFDKIAIKGKLSEHEGRRLFQQLIDGVSYCHDRGVYHRDLKPENVLVDRKGTIKISDFGLSALPQHLGSDGLLHTTCGSPNYIAPEVLQNRGYDGSLSDLWSCGVILYVMLVGCLPFDDRNLVVLYQKIFKGDCQIPKWLSPAAQDLLKRILQPNPMKRINVAGIREHEWFKKDYVPAVPHDDDEDVLPSPAPSIKPIDEPXQEKCSPINAFQLIGMASSLDLSGFFEEEDAAQRKIRFTSTHPPKDLFDKIESVVMEMGFKVHRGAGKLKVLKNSKCSRNPSSLLVCTEVFELGPSLYVVELRKSHGDSTLYRQLCERLSDELGACKTDQIARTESSSDDLSSVDGEAFPLSGF

SEQ ID NO: 2278 - protein, 493 aa, Brassica juncea
MVLSKTASESDVSIHSTFASRYVRTSLPRFEMPENSIPKEAAYQIINDELMLDGNPRLNLASFVTTWMEPECDKLMMESINKNYVDMDEYPVTTELQNRCVNMIARLFNAPLGDGEAAVGVGTVGSSEAIMLAGLAFKRQWQNKRKAQGLPYDKPNIVTGANVQVCWEKFARYFEVELKEVKLREGYYVMDPEKAVEMVDENTICVAAILGSTLTGEFEDVKLLNDLLVEKNKQTGWDTGIHVDAASGGFIAPFLYPELEWDFRLPLVKSINVSGHKYGLVYAGIGWVVWRTKSDLPDELIFHINYLGADQPTFTLNFSKGSSQVIAQYYQLIRLGFEGYRNVMDNCRENMMVLREGLEKTGRFNIVSKENGVPLVAFSLKDSSRHDEFEVAETLRRFGWIVPAYTMPADAQHVTVLRVVIREDFSRTLAERLVADFEKVLHELDTLPARVQAKMANGNANGVKKTEEETTREVTAYWKKFVEAKKSNKNRIC

SEQ ID NO: 2279 - protein, 134 aa, Helianthus annuus
GVGYSWIDGLKSHAEQHVTNKMMLNAERIFPHNTPVTKEAYYYRMIFERFFPQNSAKLTVPGGASVACSTAKAIEWEGFWSNNLDPSGRGALGVHNAAYKKKSGSISPAKLAPSIADNVPRMMDITGPEIVIRS

SEQ ID NO: 2280 - protein, 267 aa, Salmonella typhimurium LT2
MTIPAFGLGTFRLKDDVVIASVKTALELGYRAVDTAQIYDNEAAVGQAIAESGVPRNELYITTKIWIENLSKDKLIPSLKESLKKLRTDYVDLTLIHWPSPGDAVSVEEFMQALLEAKKQGLTREIGISNFTIPLMEKAIAAVGADNIATNQIELSPYLQNRKVVDWAKAHGIHITSYMTLAYGKALKDEVIARIAAKHNATPAQVILAWAMGEGYSVIPSSTRRENLASSLLAQDLHLDAEDKNAIAALDCNDRLVSPEGLAPAWD

SEQ ID NO: 2281 - protein, 493 aa, Brassica juncea
MVLSKTASGTDVSVHSTFASRYVRNSLPRFEMPENSIPKEAAYQIINDELMLDGNPRLNLASFVTTWMEPECDKLMMESINKNYVDMDEYPVTTELQNRCVNMIARLFNAPLGDGEAAVGVGTVGSSEAIMLAGLAFKRQWQNKRKAQGLPYDKPNIVTGANVQVCWEKFARYFEVELKEVKLREGYYVMDPEKAVEMVDENTICVAAILGSTLTGEFEDVKLLNDLLVEKNKQTGWDTGNHVDAASGGFIAPFLYPELEWDFRLPLVKSINVSGHKYGLVYAGIGWVVWRTKSDLPDELIFHINYLGADQPTFTLNFSKGSSQVIAQYYQLIRLGFEGYRNVMDNCRENMMVLREGLEKTGRFNIVSKENGVPLVAFSLKDSSRHNEFEVAETLRRFGWIVPAYTVPADAEHVTVLRVVIREDFSRTLAERLVADFEKVLHELDTLPARVRAKMANGKAKVVKQTEEETTREVTAYWKKFVETKKTNQNKIC

SEQ ID NO: 2282 - protein, 374 aa, Arabidopsis thaliana
MDRISQLSDDLLLQILSFIPGKDVVATSLLSKRWQSLWMLVSELEYDDSYHTGDYKSFSQFVYRSLLSNNAPVIKHLHLNLGPDCPAIDIGLWIGFALTRRLRQLKINIRTSSNDASFSLPSSLYTSDTLETLRLINFVLLDVPSSVCLPSLKVLHLKTVDYEDDASLPSLLFGCPNLEELFVERHDQDLEMDVTFVVPSLRRLSMIDKNYGQCDRYVIDVPSLKYLNITDDAVYDVRQIENMPELVEAHVDITQGVTHKFLRALTSVRQLSLCLSLSEKQHESGLCGIETPIGWKLPSSVPECLLFSLEAFEWIGYKGRRGDREVATYVLKNAACLRTAKFSPESTDVGEKYHMLKELASVPTASTSSKLLFD

SEQ ID NO: 2283 - protein, 183 aa, Triticum aestivum
  unsure (1)..(183): unsure at all Xaa locations
MAPTVMASSATSVAPFQGLKSTAGLPVSRRSNGASLGSVSNGGRIRCMQVWPIEGIKKFETLSYLPPLXSTEALLKQVDYLIRSKWVPCLEFSKVGFIFREHNASPGYYDGRYWTMWKXLPMFGCTGPTGYSTKVEGGQKRSYPGRVISQSRIPTTRPCAFKFPPSSQPSGSPGKGKLHNANI

SEQ ID NO: 2284 - protein, 262 aa, Brassica juncea
MVLSHAASDSDVSVHSTFASRYVRTSLPRFKMPENSIPKEAAYQIINDELMLDGNPRLNLASFVTTWMEPECDKLIMASINKNYVDMDEYPVTTELQNRCVNMIAHLFNAPLGRDETAVGVGTVGSSEAIMLAGLAFKRKWQNKRKAEGKPFDKPNIVTGANVQVCWEKFARYFEVELKEVKLSEGYYVMDPEKAVEMVDENTICVAAILGSTLNGEFEDVKLLNDLLVLKNKENGWDTPIHVDAASGGFIAPFLYPELEWD

SEQ ID NO: 2285 - protein, 431 aa, Arabidopsis thaliana
MDIISQCPDHLLLRILSFIPTKDVIVTSLLSKRWGSLWRWVPKLEYDFTRQNMRFVKFVYRSLLQNNAPVLESLHLKNIILYAECRTVDIGGWIDIAVSRRVRELEISINCSDEKFRLPSSLYTCGTLESFILTIKHCHLVDVPLAVCLPSLKKLHLRCIGWAYNATLLRLISGCTNLEELRLARPDDDGDYIMIHEAGSTIDYMSIFERRYMFEFMFDQMFGKGSSNGINAPLKYFSISNNYRIHNFRGIEKMPDWVEARIAVTGGSHKYLKEITYAKGLYVCLSVSEVMNPYDMIFHMLVDLTICTCTQGWWDLLTHMLQGSPKLRFLTLTNDHCRELPSLETPACWKRPSSVPACLLSSLQAFTWSGYKGRQGDKEVVKYVLRNATGLKKRIFISKSNDFGEKFCMLQELASVPTPSPSCQLLFDRIF

SEQ ID NO: 2286 - protein, 206 aa, Zea mays
MEAGGAGSGLNGAVQAKGTGADDGSAKRLPPCCVKARAAAPESEARCHATVVSGWFTEPRSRCGKASKVQYYNNPMWPGEANSLKVEKILYQGKSLYQEVLVFESSTYGKVLVLDGIVQLTDKDECAYQEMITHLPLCSIPSPKKVLVIGGGVGGVLREVSRHSSVESIDICEIDQLVIDVCKDFFPHLSVGFQDPRVQLHVGDGM

SEQ ID NO: 2287 - protein, 1342 aa, Shigella flexneri 2a str. 2457T
MSQEYTEDKEVTLTKLSSGRRLLEALLILIVLFAVWLMAALLSFNPSDPSWSQTAWHEPIHNLGGMPGAWLADTLFFIFGVMAYTIPVIIVGGCWFAWRHQSSDEYIDYFAVSLRIIGVLALILTSCGLAAINADDIWYFASGGVIGSLLSTTLQPLLHSSGGTIALLCVWAAGLTLFTGWSWVTIAEKLGGWILNILTFASNRTRRDDTWVDEDEYEDDEEYEDENHGKQHESRRARILRGALARRKRLAEKFINPMGRQTDAALFSGKRMDDDEEITYTARGVAADPDDVLFSGNRATQPEYDEYDPLLNSAPITEPVAVAAAATTATQSWAAPVEPVTQTPPVASVDVPPSQPTVAWQPVPGPQTGEPVIAPAPEGYPQQSQYAQPAVQYNEPLQQPVQPQQPYYAPAAEQPAQQPYYAPAPEQPVAGNAWQAEEQQSTFAPLSTYQTEQTYQQPAAQEPLYQQPQPVEQQPVVEPEPVVEETKPARPPLYYFEEVEEKRAREREQLAAWYQPIPEPVKEPEPIKSSLKAPSVAAVPPVEAAAAVSPLASGVKKATLATGAAATVAAPVFSLANSGGPRPQVKEGIGPQLPRPKRIRVPTRRELASYGIKLPSQRAAEEKAREAQRNQYDSGDQYNDDEIDAMQQDELARQFAQTQQQRYGEQYQHDVPVNAEDADAAAEAELARQFAQTQQQRYSGEQPAGANPFSLDDFEFSPMKALLDDGPHEPLFTPIVEPVQQPQQPVAPQQQYQQPQQPVAPQQQYQQPQQQVAPQPQYQQPQQPVAPQQQYQQPQQPVAPQPQYQQPQQPVAPQPQYQQPQQPVAPQPQDTLLHPLLMRNGDSRPLHKPTTPLPSLDLLTPPPSEVEPVDTFALEQMARLVEARLADFRIKADVVNYSPGPVITRFELNLAPGVKAARISNLSRDLARSLSTVAVRVVEVIPGKPYVGLELPNKKRQTVYLREVLDNAKFRDNPSPLTVVLGKDIAGEPVVADLAKMPHLLVAGTTGSGKSVGVNAMILSMLYKAQPEDVRFIMIDPKMLELSVYEGIPHLLTEVVTDMKDAANALRWCVNEMERRYKLMSALGVRNLAGYNEKIAEADRMMRPIPDPYWKPGDSMDAQHPVLKKEPYIVVLVDEFADLMMTVGKKVEELIARLAQKARAAGIHLVLATQRPSVDVITGLIKANIPTRIAFTVSSKIDSRTILDQAGAESLLGMGDMLYSGPNSTLPVRVHGAFVRDQEVHAVVQDWKARGRPQYVDGITSDSESEGGAGGFDGAEELDPLFDQAVQFVTEKRKASISGVQRQFRIGYNRAARIIEQMEAQGIVSEQGHNGNREVLAPPPFD

SEQ ID NO: 2288 - protein, 336 aa, Bartonella schoenbuchensis
STASCESKITYIDGDEGVLLYHGYSIDQLAENGDFLEVCYLLLYGELPTKQEKDDFDRRIMHHTMVHEQFSRFFHGFRRDSHPMAVMVACLGAMSAFYHDSIDITDAKQRMIASIRLIAKVPTLAAMAYKYSIGQPFVYPRNDLGYAANFLHMCFSVPCEEYKVNPVLARAMDRIFTLHADHEQNASTSPVRLAGSSGANPFACIAAGVACLWGPAHGGANEACLKMLQEIGSIEKIREFIARAKDKNDPFRLMGFGHRVYKNYDPRAKLMQKTCHEVLKELNIKDDPLLDIAMELEKIALSDEYFIEKKLYPNVDFYSGITLKALGFPTEMFTVL

SEQ ID NO: 2289 - protein, 564 aa, Zea mays
  unsure (1)..(564): unsure at all Xaa locations
MASSHIILPKEEEEEAAAAAVAEVGLGAAVEADHDHRPYQEQGPGKAALPFSATCVRISRDSYPNLRALRNASTMTLHDDDAAFVKLEEGDYGYVLDDVPHLTDYLPDLPTFPNPLQDHPAYSTVKQYFVNADDTVPEKVVVQKNSPRGVHFRRAGPRQRVYFESEEAKACIVTCGGLCPGLNTVIRELVCGLSHMYNVSNVFGIQNGYKGFYSSNYLPMTPKSVNDIHKRGGTVLGTSRGGHDTKKXVDNIQDRGINQVFIIGGDGTQKGAYEIYKEIRRRGLQVAVAGIPKTIDNDIAVIDKSFGFDSAVEEAQRAINAAHVEASSAENGIGLVKLMGRYSGFIAMYATLASRDVDCCLIPESPFYLEGEGGLFEYIDRRLKENNHMVIVVAEGAGQDLIAQSIPAADQQDASGNKLLLDVGLWLTHKIKDYCKSKKMEMTIKYIDPTYMIRAIPSNASDNVYCTLLAHSAIHGAMAGYSFTVGMVNGRHAYIPFHRVTSTRNKVRITDRMWARLLSSTNQPSFLSQKDIDAAREADKAANRTKSREDAKKQSTPVLANGEK

SEQ ID NO: 2290 - protein, 294 aa, Triticum aestivum
  unsure (1)..(294): unsure at all Xaa locations
MSAPPPPASSDDDGKPADEEGVEIREVWANNLEAEFAVIRDVVDDYPYIAMDTEFPGIVCRPLGSFRSNDEYNYATLKANVDMLSLIQLGLTLSDENGALPAXATGGRPCAWQFNFRGFDPRSDPANADSIDLLRNSGIDFDRFTTEGADTGHFAELLMSSGVLLNAELQWVTFHSGYDFGYLLKLLTGRNLPDTMPGFFDLIRIYFPVLYDIKHLMKYCGSLHGGLSKLGELLGVQRVGICHQAGSDSLLTLQCFQKLKEAYFRGSTENYAGVLYGLISDGGENRPPAALLIE

SEQ ID NO: 2291 - protein, 337 aa, Bartonella schoenbuchensis
STASCESKITYIDGDEGVLLYHGYSIDQLAENGDFLEVCYLLLYGELPTKQEKDDFDRRIMHHTMVHEQFSRFFHGFRRDSHPMAVMVACLGAMSAFYHDSIDITDAKQRMIASIRLIAKVPTLAAMAYKYSIGQPFVYPRNDLSYAANFLHMCFSVPCEEYKVNPVLARAMDRIFTLHADHEQNASTSTVRLAGSSGANPFACIAAGVACLWGPAHGGANEACLKMLQEIGSIEKIPEFIARAKDKNDPFRLMGFGHRVYKNYDPRAKLMQKTCHEVLKELNIKDDPLLDIAMELEKIALSDEYFIEKKLYPNVDFYSGITLKALGFPTEMFTVLF

SEQ ID NO: 2292 - protein, 493 aa, Ustilago maydis 521
MMNTKLKDLSLLEASDFLKAPDSLDTSDNESFDVMDPGSGRPICRLTASNLKDVDYAIQAASQAFPSYSAIPARERAMLLLNFDKLIRDNLDDLAWILVYETGKPLEEARAEVQYALTFSWWYVGETERVQGQVVKSATNPSLRYLTVWQPVGPVAILTPWNFPVALFVRKAVSALAAGCTIVAKPSPETPLSTLAVANLLHRAGFPSGSVNIVLASYRNTPAIGQALCTDLRIKKLSFTGSTRVGRLLMQQCAPTLKKLTLELGGLGAYLIFDDADIEAAATALVANKLRHAGQTCISAQRTFVHESIVDRVLKCIIELLDRVTLGHGAQPSTTLGPLQTERSQQKVREHIEDARAKGATVYTSKAAVPSSGYFVAPTLIVGCTAEMLVFQEESFGPLISLTSFATEQEAVALANKTDMGLTSYVFTKDSARLWRMFEQLKAGNVGLNVGGSTTAAEIPFGGVDQSGFGKEAGIGAGLKEYMVEKSATMSIA

SEQ ID NO: 2293 - protein, 474 aa, Bacillus cereus ATCC 10987
MKKHLYINGDWKSVNTYKPLYAPYSEETLAEIAQGTEEDVKEAVIAAKNAMKEMNRLSAYDRATILEKVAQKMDERREEFAEIIAKEAAKPIRAARGEVDRTVQTYKFAAEEAKRIYGETLPLDAAPGADGRIAYTIRKPIGVIGAITPFNFPLNLVAHKVGPAIAAGNTVVLKPADQTPLSSYALVELFEEAGLPKGALNIISGPGSTVGEAIVTNDDVASITFTGSPKVGLGIKAKAGLKRVTLELGSNAAVIIDEDVELTDELIERVKWGAFVNNGQVCISVQRVFVHEERMDEFLSKLQKAMETVVVGDPLLEETDVSALISKKDVERIDNWVQEAVKEGASVLYGGNKRDERIFKPTVLTNVPEHVSVQCQEVFGPLMTVNTFKEFDEAIEQVNHSRYGLQAGVFTNNLFKVMRAIDELEVGGVMINDIPTFRVDHMPYGGVKESGTGREGIKYAIEEMTEMKLVCIKK

SEQ ID NO: 2294 - protein, 324 aa, Bartonella schoenbuchensis
STASCESKITYIDGDEGVLLYHGYSIDQLAENGDFLEVCYLLLYGELPTKQEKDDFDRRIMHHTMVHEQFSRFFHGFRRDSHPMAVMVACLGAMSAFYHDSIDITDAKQRMIASIRLIAKVPTLAAMAYKYSIGQPFVYPRNDLSYAANFLHMCFSVPCEEYKVNPVLARAMDRIFTLHADHEQNASTSTVRLAGSSGANPFACIAAGVACLWGPAHGGANEACLKMLQEIGSIEKIPEFIARAKDKNDPFRLMGFGHRVYKNYDPRAKLMQKTCHEVLKELNIKDDPLLDIAMELEKIALSDEYFIEKKLYPNVDFYSGITLK

SEQ ID NO: 2295 - protein, 473 aa, Hordeum vulgare
GSFGKVKIAEHIITGHKVAIKILNRRKIKSMEMEEKVKREIKILRLFMHPHIIRLYEVIDTPADIYVVMEYVKSGELFDYIVEKGRLQEEEARRFFQQIISGVEYCHRNMVVHRDLKPENLLLDSKCNVKIADFGLSNVMRDGHFLKTSCGRPNYAAPEVISGKLYAGPEVDVWSCGVILYALLCGTLPFDDENIPNLFKKIKGGIYTLPSHLSPLARDLIPRMLVVDPMKRITIREIREHSWFKARLPRYLAVPPPDTAQQVKKLDDETLNDVIKMGFDKNQLTESLQKRLQNEATVAYYLLLDNKLRTTSGYLGAEYQESMDSSFSQISPETPSSASEARQYGSPGFGLRQHFAAERKWALGLQSRAHPREIITEVLKALQELNVCWKKIGHYNMKCRWSPGFFENMMHNNNGFGVESAIIEADGLGDKSTHIVKFEIQLYKTRGDKYLLDLQRVSGPQLLFLDLCSAFLT

SEQ ID NO: 2296 - protein, 318 aa, Bartonella schoenbuchensis
  unsure (1)..(318): unsure at all Xaa locations
KITYIDGDEGVLLYHGYSIDQLAEXGDFLEVCYLLLYGELPTKQEKDDFDRRIMHHTMVHEQFSRFFHGFRRDSHPMAVMVACLGAMSAFYHDSIDITDAKQRMIASIRLIAKVPTLAAMAYKYSIGQPFVYPRNDLSYAANFLHMCFSVPCEEYKVNPVLARAMDRIFTLHADHEQNASTSTVRLAGSSGANPFACIAAGVACLWGPAHGGANEACLKMLQEIGSIEKIPEFIARAKDKNDPFRLMGFGHRVYKNYDPRAKLMQKTCHEVLKELNIKDDPLLDIAMELEKIALSDEYFIEKKLYPNVDFYSGITLKA

SEQ ID NO: 2297 - protein, 280 aa, Listeria monocytogenes str. 1/2a F6854
MTLSFSDTYRLNNGIEMPRHGFGVYKLTDEARMRTALETAVDVGYRLFDTASFYHNEKELGDFFASSGLKRDEFFVTTKMWNTEQGYDETLWAFEKSQKKLQLDQIDLYLVHWPKQDTFFDTWRAVEKLYDEGLVRAIGVSNFEAHHLDRLRTSANVLPVVDQLETHPHFPNHLLHRYLEELHIVHQAWSPLGRGGVLQEQILIDLAEKHGKSPAQIVLRWHLQNNISIIPKSETPSRIRENAAIYDFELSEADMRQVERLNTGERVSHAPDVMYVRSEI

SEQ ID NO: 2298 - protein, 417 aa, Rubrivivax gelatinosus PM1
MYQHIKVPADGQKITVNADFSLNVPDQPIIPFIEGDGTGFDITPVMIKVVDAAVEKSYGGKRKIHWMEIYAGEKSTKVYGPDVWLPEETLQVLKEYVVSIKGPLTTPVGGGIRSLNVALRQELDLYVCLRPIQYFEGVPSPVKEPHKTNMVIFRENSEDIYAGIEFEAESEKAKKLIKILQDEFGVKKIRFPATSGIGIKPVSREGTERLVRKAIQYAIDNDKPSVTIVHKGNIMKFTEGGFRDWAYGLAQKEFGAQPIDGGPWCKFKNPKTGKEITVKDSIADAFLQQILLRPAEYSVIATLNLNGDYVSDALAAQVGGIGIAPGANLSDSIAMFEATHGTAPKYAGKDYVNPGSEILSAEMMLRHMGWTEAADLVISSMEKSILSKKVTYDFARLLDGATQVSCSGFGQVMIDNM

SEQ ID NO: 2299 - protein, 175 aa, Triticum aestivum
MAPTVMASSATSVAPFQGLKSTAGLPVSRRSSSAGLGSVSNGGRIRCMQVWPVEGIKKFETLSYLPPLSTEALLKQVDYLIRSKWVPCLEFSKVGFVFREHNSSPGYYDGRYWTMWKLPMFGCTDATQVLNEVEEVKKEYPDAYVRVIGFDNLRQVQCVSFIAFRPPGCEESGKA

SEQ ID NO: 2300 - protein, 319 aa, Clostridium acetobutylicum ATCC 824
MKTIAVLTSGGDAPGMNAAIRAVVRTAIEKGINVKGIQGGYSGLINGEIFDMNRHSVSDIIQRGGTILRTARCPEFLKEEVRQKAANVLRVFGIDGLVVIGGNGSFMGAQKLSKLGVKTVGLPGTIDNDLPYTDYTIGFDTTLNTVLDAINKLRDTSTSHERVSIIEVMGRDCGDIALFSGIAGGAESVIIPEIGYDFNELCKNILEGKLRGKMHNLIILAEGVGGAAELAKKVEEVTGIETRSTILGHIQRGGSPSAFDRMLASRMGVKAVEVLMEGKTSRVIGIKEGKIMDQDIDEALAVPRSFNKELYDIANMLSK

SEQ ID NO: 2301 - protein, 156 aa, Glycine max
  unsure (1)..(156): unsure at all Xaa locations
ASSMIYSPTVTTVNRAGAGMVATFTGLKSMAGFPTKNTNNDITSIASNGGRVQCMHVWPPVGKNKDETHCYLPDLDDAQLAKEVEYLFRKGWIPRLEFXVXHGFMYGEHTRSPGYYDGHYWTMWKLPMVCCTDASKVLNDLXDAKTAYPNGFIRII

SEQ ID NO: 2302 - protein, 399 aa, Oryza sativa (japonica cultivar-group)
MALSISTPPTSSSLLPASLQVGRWSSSAAMSARPVAFSLRRPVLAARVAAGGNAPSSSVDEVVTELDAVASFSEIVPDTVVFDDFEKFAPTAATVSSSLLLGIAGLPDTKFKSAIDTALADGECNTMEKPEDRMSCFLTKALANVGAEMAHLVPGRVSTEIDARLAYDTQGIIQRVHELLKLYSDHDVLSERLLFKIPATWQGIEASRLLESEGIQTHLTFVYSFAQAAAAAQAGASVVQIFVGRVRDWARTHSGDPEIDEALKKGEDAGLALAKKVYAYIHKNGYKTKLMAAAIRNKQDVFSLLGIDYIIAPLKILQSLEESVTDTDVKYGYVPRLTPALGKTYNFTEEELVKWDQLSLAAAMGPAAEELLASGLEGYVNQARRVEELFGKIWPPPNV

SEQ ID NO: 2303 - protein, 286 aa, Rubrivivax gelatinosus PM1
MAWADQWIPVGAGEPLKARVYGSRPRGRSAPLVLHFHGGAFVAGGLDSGATVAGLLAEAGAVVVSLDYPLAPAHPFPAAIEAGHAALTWMHRHRSRLAGQSATVWVAGEEAGGNLAAAVALMARDRRSPPLAGQILMSPMLDPCVATASLRDADAGPVGCLWADGWHQYLPGAADADHPYAAPASAMRLTGVPRTLLITAQDDPLRDEARAYARRLRDAGVEVDEAFLDQPTGWPCACKQPAGAQAAWAPVVRGQFQAFLQRAHAPAAVPVSASSSIQNRRPGSLS

SEQ ID NO: 2304 - protein, 255 aa, Neurospora crassa
MSDSPQSNSKDVEQGAPSPGEEPQMNDPQDPHSSGLNQYEFEVKEQDRWLPIANEHFQNKRCAYSLYTSMSHHSSSKSPEAPRASSSSSKADRCDAYDANIRNFAPVARIMKNALPENAKIAKEAKECMQECVSEFISFITSEASEKCQQEKRKTVNGEDILFAMTSLGFENYAEALKIYLSKYREQQQNQTNRSENQQNRPSSQGYGAPQGQNQPGQGGFSSNDLGGQQESGDASGYNLYGAQTGHNGGGAEGY

SEQ ID NO: 2305 - protein, 169 aa, Lactobacillus plantarum WCFS1
MQLSIPTINGALAATYSKQAAVAQTYKGHPIISFPVDISDVPAGTHSLAFTFVDHDAIPVGGFTWIHWIAANLPATTTHIPENASQTGAIPMVQGNNSTAGAYVHETDPKVSQHYVGPYPPDKDHRYSFKLFALDTELDLQPGYWLNEFHDAIAGHVLATAKTTVIGKV

SEQ ID NO: 2306 - protein, 480 aa, Streptomyces coelicolor A3(2)
MASAPAFDYAPAPESRAVVDIAPSYGVFIDGEFTEAADGKVFKTVSPATEEVLSEVAEAGEADVDRAVKAARKAFEKWSALPGAERAKYLFRIARIIQERSRELAVLETLDNGKPIRETRDADLPLVAAHFFYYAGWADKLDHAGYGADPRPLGVAGQVIPWNFPLLMLAWKIAPALATGNTVVLKPAETTPLSALFFADICRQAGLPKGVVNIITGDGRAGAALTAHPDVNKVAFTGSTAVGKQIARTVAGTRKKLTLELGGKGANIVFDDAPIDQAVEGIVNGIFFNQGQVCCAGSRLLVQESIHDELLDSLKRRLTTLRLGDPLDKNTDIGAINSAEQLARITALADQGEAEGAERWSPACELPSAGYWFAPTLFTNVTQAHTVARDEIFGPVLSVLTFRTPDEAVAKANNTPYGLSAGIWTEKGSRILAVANKLRAGVIWSNTFNKFDPTSPFGGYKESGFGREGGRHGLEAYLDV

SEQ ID NO: 2307 - protein, 291 aa, Ralstonia metallidurans CH34
MTKTTTARSSAVQPAAEQGEPYVVQHMVVSGDREIKVCVCYPAGYWPLSAGSATLPWLVYLHAGGFVEGDVEAAKELARDLAESVPAVVVTPGYSLAPENPFPAAPEDAVATVTWVLKQAKKLKVDKLRFALVGEEAGGNLAIATAQMLRDRGLPQPAGQWLIRPVTDPCLSAMSSTRQVPMEMLRRLACNYREYLPTPADSVHPYAAPALASRMAGLPATLVQVAEQDALRAEGEAFAAKLAKAGISARALIMPGACGDGVEQSHEKCQAWVEEGARFLRDCFAKADDAS

SEQ ID NO: 2308 - protein, 188 aa, Mougeotia scalaris
VYEDDGQPFTTFSQFWTRWQDMPFQPDNPLSTPNRLVLPPAVELQSMRVDELGLEERQEKSSNALLARAWTPGWANADRSLLVFIQGPLQRYSSSKNKADKHTTSLLSPHLHFGEILRTLKCTIKVRRMKAQWKSQGAEGASQGVDAFVRSLGLREYSRYLSFNFPFTHERSLLSNLKSFPWRLDEAG

SEQ ID NO: 2309 - protein, 350 aa, Mesembryanthemum crystallinum
EDEACSYAMTITSGSVPPMVLKAVIELDVLEIIKRAGPGAQLSPAEIANQLPTKNPDAATMLDRMLRLLASYSILSYSLRTLSDGRVERLYGLAPVCQFLTKNQDGVTLGALSLMNQDKILMESWYHLKDAVLDGGIPFNKAYGMSAFEYHGTDPRFNKVFNSGMSNHSTITMKKILDDYQGFEGLSTLVDVGGRHWGYPNMIISKHTTIKGINFDLPHVIEDAPAYPGVEHVEGDMFVSVPKGDAIFMKWICHDWSDEHCLSFLKNCYAALPNHGKVIVCEYILPVAPETSHAARTVFHVDAIMLAHNPGGKERTEQEFQALAKGSGFEGFKVACSAYDTKVMEFLKQN

SEQ ID NO: 2310 - protein, 77 aa, Glycine max
  unsure (1)..(77): unsure at all Xaa locations
TTVNRAGAGMVAPFTGLKSMAGLLTKKTNXDITCIATNRGRVQCMHVWPRVXQEELETLSYLTTMDDTQYQTEAEYL

SEQ ID NO: 2311 - protein, 567 aa, Triticum aestivum
  unsure (1)..(567): unsure at all Xaa locations
IVPASAARSSWLLPPRGGPPPRSPPAACSPRPAASPAAVPSALRRADGARGLLPGTPSGVRHCGSSRRSPFRLLSKWATITAPYQRQIPVAAASGKTLPDCGTRRTGEVIARVAEXGDAEDVDRAAXAARKAFDEGPWPRMTAYERSRILLRFADLIEKHNDDIAALETWDNGKPYEQAAHIEVPMLVRLMRYYAGWTDKIHGLIVPADGPHHVQVLHEPIGVVGQIIPCDFPHLMYRAKILPPLACGDTILLKTAEQTPLSALYVSKLLHEAGLPEGVLNIVSGFGPTAGAALASHMDVDKIAFTGSTATGXVILELSARSNLKRVRLGRXGKTPFIVMDDVHIEPAPESSHISLCFIHGHSCGAGCRTFVYMSVYXERFLRKSKARALKRXVVGDXPFRKGVEQGPQIDDEQFKKILRYIKSGVDSGATLXTGGDKLGDKGYYIQPTIFSDVQDGMKIAQEEIFGPVQSIFKFNDLNEVIKRANASQYGLAAGVFTNNLXTPANTLTRALRAGTVWVNCFDIFDAAIPFGGYKMSGIGREKGIDSLKNYLQVKAVVTALKNPAWL

SEQ ID NO: 2312 - protein, 490 aa, Burkholderia fungorum LB400
MWRARAQEIRPEGRAFIDGNYVGALSGRTFATVNPATGQVIAQVAECGEEDVNLAVASARKAFESGVWSRRAPAERKAVMLRFAQLMMEHREELALLESLDVGKPVANAYNGDIVSSATCIQWYGEAIDKLYGETAPAAPDMTTMIVREPLGVVAAVVPWNYPLSMASWKLGPALAAGNSVVLKPAEQSPLSAIRIAALAMEAGLPAGVLNVLPGYGETAGRALGLHMDVDAVGFTGSTAVGKLFMQYSGQSNIKRVGLECGGKSPHIVLDDCADLDAAARAVAAGIFGNSGQVCNAGSRLIVQAAVRDELLEKVAAIARELVPGDPLDPATKMGAIVSDVQHASIMSYIDAGRADGARVVAGGRAARPESGGYFIEPTVFDGVNNDMRIAREEIFGPVLSAITVDSPEEAVRVANDTIYGLAAAVWTSNVTRAQQVSRQLKAGVVWVNCFDRGTMSSPFGGFKQSGFGRDKSMHAFDKYMDWKAIWIAG

SEQ ID NO: 2313 - protein, 282 aa, Saccharomyces cerevisiae
MVPKFYKLSNGFKIPSIALGTYDIPRSQTAEIVYEGVKCGYRHFDTAVLYGNEKEVGDGIIKWLNEDPGNHKREEIFYTTKLWNSQNGYKRAKAAIRQCLNEVSGLQYIDLLLIHSPLEGSKLRLETWRAMQEAVDEGLVKSIGVSNYGKKHIDELLNWPELKHKPVVNQIEISPWIMRQELADYCKSKGLVVEAFAPLCHGYKMTNPDLLKVCKEVDRNPGQVLIRWSLQHGYLPLPKTKTVKRLEGNLAAYNFELSDEQMKFLDHPDAYEPTDWECTDAP

SEQ ID NO: 2314 - protein, 330 aa, Burkholderia cepacia R18194
MPVPEVPDVPDVPDVPDVPDVPEVPDVPEVPEVPEVPDVPEVPDVPEVPDVPEVPDVPEVPDVPEVPEVPEVPDVPEVPDVPEVPDVPEVPDVPEVPDVPEVPDVPEVPEVPEVPDVPEVPEVPEVPDVPEVPDVPEVPDVPEVPDVPEVPEVPEVPEVPEVPEVPEVPDVPEVPEVPEVPDVPEVPDVPEVPEVPEVPEVPEVPEVPEVPDVPEVPEVPEVPDVPEVPEVPEVPDVPEVPDVPEVPDVPEVPDVPEVPDVPEVPDVPEVPDVPEVPEVPDVPEVVPDVPEDPEVPEEPDVPEVPELPPVPDVLGLIVGGVVGPSTEPQP

SEQ ID NO: 2315 - protein, 501 aa, Ustilago maydis 521
MPHMPQGIVKGGKEDVKLNNQSLWQTKAYINGVWTDADNKSTLKVFNKATGAEIGQVPDMGANETAAAISAADEAFKSWSKTTAKHRHDLLMKLYYAHQENAEDLAKIIVAENGKALPEAKGEISYSNGFLEWFAEEATRTYGHTVPSPLPGVRNVVQMQPVGVAGLITPWNFPAAMITRKAAPALAAGCTVVVKAPAETPFSALAFAHLAEKVGFPKGTINVVTCAKGDNEIAVGKQLCENPAVRKISFTGSTRVGKILMSQSASTLKKLSMELGGNAPFIVFEDADLDKAVEGAIACKFRGSGQTCICANRIYVHASIKDEFLQKLAAKVNDFKVGYGMDKGTTHGPLVSEAGLSKVEEHVNDSVKKGAKVIVGGKRGEGLFFEPTIITDLPEDVPTDREETFGPLAAVYTFTSEQEVVRKANNVDVGLAGYFFSKDTARCWRVAEELQVGMVGINTGLISQHAVPFGGVHESGFGREGGRTGIDEYLVQKLMVFGGVN

SEQ ID NO: 2316 - protein, 272 aa, Kineococcus radiotolerans SRS30216
MEVGRAVTVHPATLVGEGDLPARIAGRTNLWPQVRYFGSAAFDPHTDGGFSQFRTVRSDQLRFLPEGVDTLRGALAEPLAVAMHAVGRAGSLAGRDVLVNGAGPIGSLVVAAAVHAGAASVTAADVSPAALRVAAAMGARSVLDLSAGAVLPADVELVFEASGAAAALGGVLRATARGGTLVQVGNLPGGAVQAVLGDLVTREITWIGSYRFVEEIDDALVALAEGLDVMPVVSHRFAMADAAEAFAVMGDRSSGSSKVVLRLDGKPVEDAS

SEQ ID NO: 2317 - protein, 131 aa, Zea mays
  unsure (1)..(131): unsure at all Xaa locations
FFQACGTVHRVPFFSAKFGHPKGFAYVEFLEQKPVQEVLNLNEWELHGRQIKVAPKRTNVPGMKQGPPPGFNPSHGSPYSSYGAPFFPPXGFGGAPKFPPPLGSSPFFLRTGGGIMFNANPPMVCGRFQEN

SEQ ID NO: 2318 - protein, 490 aa, Burkholderia cepacia R18194
MNTTPDLAFDPPLHTRHFIDGAWRASVDGATLPVVDPSTEAVLADVSAGSEADVEHAVQAASRAYPGWKRTTGAMRAALLRAIARGVDARRTRLATLQSLNNGKPLAEAEIDVADVIATFDYYAGLAERLDTDGETEIALPDADHRAWIRREPAGVAALIVPWNFPMVTTAWKLAPALAAGCTVVLKPSEITPLPELELAAIAAEAGLPPGVLNVVTGTGHDVGARLCAHPRVAKVSFTGSTAVGAQVMKTAADTIKGVGLELGGKSSIVVFDDADLDHAVELVTGGGLFNAGQMCSATSRVLVAASLADDLIARLAQRIDATVVGPPFAPGVQMGPLTNRAQYERVQRHIAQGRADGARLVTGGNALDGPGYFIRPALFADVPADSSLWCEEIFGPVLCVRAFDTEDEAIAAANDTEYGLVATVVTRDTARARRVADALEAGVVWINTPQLIYPQTSWGGYKRSSIGRELGPFGLAAFQEIKQVMMPAG

SEQ ID NO: 2319 - protein, 333 aa, Enterobacter cloacae
NGVAGSYAEYVPLLHIVGAPCSGVQQRGELLHHTLGDGDFHHFYRMSEPVTAARAILTAQNACYEIDRVLEVMLMQSRPGYLMLPADVAKKPATPPVNALTTPPFPVNEACLNAFRQHAQAMLSVGSSVALLADFLAAFGFIQMLQCWMTDQLPTHTTVILGKGIVKRKHGGFSYPYHGAGGQRGPVPAIEGADTVICIGTRFTDTVTAGFTQQFARERTIEIQPFAARVGDVWFSGIPMREAINALIPLVRARAHAAANHRPPQAARAPVHQGTLNQETLWQTVQQFIRPDDILLADQGTAAFGAASLRLPAGAELLVQPLWGSIGYTLAAA

SEQ ID NO: 2320 - protein, 388 aa, Glycine max
  unsure (1)..(388): unsure at all Xaa locations
GIPWERLNYSRDKYRETRLKQYKNYQNFSRSPHHLRKECFQVQKGQTFYDFFFNTRLVKSTIVHFQLQLGRTXIMLRNLLWATSKHDVYLMQNYSVMHWSALLRRGKEVLNVAKPIIPTLKRPGFLAQPVSRVQISTMTVKENLMVAGGFQGELICKNLKHPGVLFCGKITTDDNAITNAVDVYSNPAGSLRVITANNDFQVRVFDAENFASLGCFKYDWSVNNTSVSPDGKLLAVLGDSTECLIADANTGKITGSLKGHLDYSFSSAWHPDGQILATGNQDKTCRLWDIRNLSQSMAVLKGRMGAIRALRFTSDGRFLAMAEPADFVHIFDSHSGYEQGQEIDLFGEIAGISFSPDTEALFVGIADRTYGSLLEFNRKRHYNYLDSF

SEQ ID NO: 2321 - protein, 475 aa, Bacillus halodurans C-125
MFRGKLYIDGTWTGDLLDTFDVKNPATGEVVGVMPNGGKAEAAAAIEAAQRAFLKWRKYTAAERANFLMTWHDLLLQQKEEIAEMLTMEMGKPLAEARGEIEYSASFIRWFAEEGKRVYGRTVPASAENKRIHVQKQPVGVVAAITPWNFPAAMIVRKMAPALAAGCTFVGKPAELTPLTAVKIVELCEEAGFPKGVVNLVCGDAKEIGEEMTSHEHVRKLTFTGSTAVGKLLMKQSAGRMLNLSLELGGQAPMIICDDADLDKAVAGVVASKYRNAGQTCVCGNRIYVQETIVDEFVKRLTGKVVQLKVGNGLEEGVHIGPLIEKKGYEKVKAHVDDAVAKGARVVIGGKGQEGNDSYFYDPTILTDVHDEMLVMQEETFGPVAPIQTFATDEDVIEKANGTRYGLAAYFFTENYARGIRLSEALDFGIVGWNDGAPSIAQAPFGGMKESGLGREGGQEGIEAFLETKFVSIGL

SEQ ID NO: 2322 - protein, 202 aa, Bacillus sp. KSM-K16
MTKTNSNLVWHEASVSKQERHARHNHKGCVLWFTGLSGSGKSTLANALDRSLFDAGLSTYVLDGDNIRHGLNKDLGFSDRDRQENIRRIGEVAKLFVDAGTIVSTAFISPFQSDRDQARALLADGEFVEVYVKCPLEECERRDVKGLYKKARNGEIPQFTGISSPYEEPETPEITVDTSVQTVEESVEQIIGWLEKHHILTR

SEQ ID NO: 2323 - protein, 485 aa, Mesorhizobium loti MAFF303099
MLQKTSHFMRQANLINGEWVQADSGQTVDVNNPATGLKIGTVPKSGKAETRRAIEAADAAFKTWRKTTALERSKLLRKLHDAMMDNQDVLAELLTIEQGKSLFESKGEIGSAAAYILWFAEEGRRTYGDVVPSPWADRRILVTKEPVGVIAAITPWNFPSSMLARKLGPALAAGCTAVVKPASQTPYSGLAWGALAEEVGFPKGVVNILTGSASEIGDEICANPLVSKITFTGSTEVGKLLIQKSSVTVKKVSMELGGNAPFIVFDDADIERAVAGAITAKYRNSGQTCVCTNRFLVQAGVYDKFVEKLAAASNGLKVGSGLEEGVQQGPLIDEKAVEKVEELIADATSKGGKIVAGGKRHALGGSFFQPTVIANATPKMRFMKEEIFGPVAPVFKFETEAEAIALANDTEFGLACYFYTGDLGRAFRVMEGLKYGMVGVNEGLITTPEAPFGGVKESGLGKEGGHQGIEDYLDTKYVCIGGLGL

SEQ ID NO: 2324 - protein, 126 aa, Glycine max
  unsure (1)..(126): unsure at all Xaa locations
SSMICSPAGATVXRGGGGMVAPFAXLXSMGGLPTGETRADITCVASXGGRAPCFFFWPPXGAKKGEILSYLPEVGDAQLAKEVESLLRKGWIPCLEFELEPGFVSRAPGRAPRIYDGRSRSLGKLA

SEQ ID NO: 2325 - protein, 124 aa, Arabidopsis thaliana
MSGVWVFNKNGVMRLVENPYNQSAGDSSESSSSGGNQQQRMRRKILVHLPSSEVVSSYGSLEKILKNLGWERYYSGDNTDHLLQFHKRTSIDLISLPRDFSKFNSIHMYDIVVKNPNVFHVRDM

SEQ ID NO: 2326 - protein, 129 aa, Treponema pallidum subsp. pallidum str. Nichols
MAALSNEQIIEAIRGKTILELSELIKAVEEEFGVTAAVPVAPVAEGGGAGSVAAEEQTEFTVVLKGLAEPGKKIAVIKEVRNVISGLGLKEAKDLVEGAPKTLKENVSKEEAAKIKESMTAAGALIEIS

SEQ ID NO: 2327 - protein, 488 aa, Vibrio cholerae O1 biovar eltor str. N16961
MRSLAMLPTDFPFFHQSAFINGQWILGEPQARQTVTNPFDGSLIGSVPLLSAAQVQEAIAGAQAAQILWCQQPAENKAKILRRWYELIEQHHESLAKLLTIEQGKPLAEARGEIHYAASFVEWYAEEAKRAYGELIPSHKPDARIMVSRQPVGVVAAITPWNFPAAMITRKCAPAFAAGCAVVLKPAPDTPFTALALADLAQQAGIPDGLLQVVTGDAIEIGRVLTESKTVRKLSFTGSTGVGKLLMAQSANNVKKLSLELGGNAPFIVFEDADINAAIDGVMVAKFRNAGQTCVCANRIYVHDAVYDQFAAKLVDRVSRLNVGYGLDAGVNIGPLINDAAVAKVTSHIVDAQSKGAKVMFGALPEAGSRLFQPHVLTEVTDEMRVADEETFGPLAALFRFSSEQEVIERANATDSGLAAYCYTQSLRRAWHMSEALEAGIVGINEGLISTTLAPFGGIKESGLGREGAKHGLEEYLEVKYTLMGGLA

SEQ ID NO: 2328 - protein, 526 aa, Triticum aestivum
  unsure (1)..(526): unsure at all Xaa locations
MAMAMRRAAALGARHILAASVSASSRVASRRHMGSVDAGAAMEKIRAAGLLRTRGLIGGKWVDAYDGKTIEVQNPATGEVLANVACMGNRETADAITSANTTFYTWSKLTASERSKALRKWHDLLMSHKEELALLMTLEQGKPMKEAXGEVNYGASFIEFFAEEAKRVYGDIIPPTLADRRLLVLKQPIGVVGAITPWNFPLAMITRKVGPALGXGCTVVVKPSEFTPLTALAAADLALQAGIPAGALNVVMGNAPEIGDELMQSMQVRKITFTGSTAVGKKLMAGSANTVKKVSLELGGNAPCIVFDDADIDVAVKGSLAAKFRNSGQTCVCANRILVQEGIYEKFASAFVKAVQSLQVGNGLEESTSQGPLINEAAVQKVEKFVGDATSKGANIMLGGKRHSLGMSFYEPTVVGNVSNDMLLFSEEVFGPVAPLIPFKTEEEAIHLANDTNAGLAAYMFTKNIARSWRVSEALEYGLVGVNEGLISTEVAPFGGVKQSGLGREGSKYGMDDYLEIKYVCMGNLG

SEQ ID NO: 2329 - protein, 156 aa, Glycine max
MEPMDIVGKAKEDASLPKATMTKIIKEMLPPDVRVARDAQDLLIECCVEFINLVSSESNEVCNKEERRTIAPEHVLKALGVLGFGEYIEEVYAAYEQHKLETMQDSLKGAKWSNRAEMTEEEALAEQQRMFAEARARMNGGAITSKQPDAHQSLES

SEQ ID NO: 2330 - protein, 451 aa, Thermoplasma volcanium GSS1
MTTMIMENEERTEKYNEDALRYSEYYKGKIQTMSKVPVRSLDDFSIWYTPGVAAVSRKIATDHDLSFELTGRWNTIAILTDGTRVLGLGNIGPEAAMPVMEGKALIFNYLGGVNAIPVPIRVSSREEFVSVAKSLEPSFGGINLEDIESPKCFFLLETLQKEMNIPVWHDDQLGTASITLAGIINSIRIVGKKIEEVKVVFNGAGAANIAAAYLFKAAGFKKENIILVDSKGVLQPERQDMDSLMLNNPWKYQLAIETNGERVKGDLKEALKGADILISAAKSGPDTVDAKLVKEMNNDPIVFVLANPIPEMWPEEAKENGAKIVATGRSDFPNQINNSLVFPGVFRGVLDARAKGVNFDVMVAASYEIANFVEEPTAEKIVPTMEEWELYPRLASAVATKTVELGLARKIDSKEGFYKRARDIIENNRNIYRKMMDLGLIRMMPNGERKY

SEQ ID NO: 2331 - protein, 275 aa, Schizosaccharomyces pombe
MLGSFVKLNNGLKCPQFAYGSYMVNRTKCFDSVYAALQCGYRHIDSAQMYHNEADCGRAILKFMEETGTKREDIWFTSKLNDLSGYKSTLSSIDASVKACGLGYIDLFLLHSPYGDRIESWKALEKGVEEGKLRAIGVSNFGPHHIQELLDSHPKIIPCVNQIELHPFCSQQKVVDYCESKGIQLAAYAPLVHGEKFGNKQLLAIASKYNKSEAQIMIRYCLQRGFIVLPKSSTPRRIKENGDVFDFEISKEDMEKLYNLDEDYHSDWNPCVSPL

SEQ ID NO: 2332 - protein, 213 aa, Triticum aestivum
MEIAMVCTRVNLLILILSLCSPYKFIQSPMDFGPLNLLPTTIAASSDFGRILFHSPSAVLKPQSPRDISLLLSFLSASSLGKVTVAARGAGHSIHGQAQALDGIVVEMRSLPAEIELHKGGEGDASYADVSGGAMWIELLEQSLKAGLAPRSWTDYLYITIGGTLSNAGISGQTFKHGPQISNVLQLEVVTGRGETVTCSPTKNAELFSAVLG

SEQ ID NO: 2333 - protein, 308 aa, Neurospora crassa
MADHTEVDLDSIIDRLLEVRGSRPGKQVQLLEAEIRYLCTKAREIFISQPILLELEAPIKICGDIHGQYYDLLRLFEYGGFPPEANYLFLGDYVDRGKQSLETICLLLAYKIKYPENFFILRGNHECASINRIYGFYDECKRRYNIKLWKTFTDCFNCLPIAAIIDEKIFTMHGGLSPDLNSMEQIRRVMRPTDIPDCGLLCDLLWSDPDKDITGWSENDRGVSFTFGPDVVSRFLQKHDMDLICRAHQVVEDGYEFFSKRQLVTLFSAPNYCGEFDNAGAMMSVDESLLCSFQILKPAEKKQKFGRR

SEQ ID NO: 2334 - protein, 117 aa, Atriplex nummularia
MASSVVFKLACAVFMCMLVAAPHAEALTCGQVTSSMTPCMSYLTGGGSPTPACCGGVKSLNSMASTPADRKAACGCLKSAAGAMTNLNMGNAASLPGKCGISLPYPISTSTDCSKVN

SEQ ID NO: 2335 - protein, 108 aa, uncultured Rickettsia sp.
MLKEIGSSEYIPRYIAKAKAKDKNDPFRLMGFGHRVYKNYDPRAAVLKETCKEVLKELGQLDNNPLLQIAIELEAIALKDEYFIERKLYPNVDFYSGIIYKAMGIPSQ

SEQ ID NO: 2336 - protein, 296 aa, Bacillus thuringiensis serovar konkukian str. 97-27
MVIQWFPGHMAKARRQVTEKLKLIDVVIELVDARLPLSSRNPMIDEIITHKPRLVVLNKADMADDRLTKQWIAYFKEKGHMAISINAQAGQGMKEIAAACKVLVKEKFDKMVAKGIRPRSIRALIVGIPNVGKSTLINKLAKKNIAKTGDRPGVTTAQQWIKVGKEMELLDTPGILWPKFEDELVGLRLATTGAIKDSILNLQDVAVYALRFMEKHYPERLKERYNLNDIPEDIVELFDAIGKNRGCLMGGGMIDYDKTSELVLRELRGGKLGKMTFETPEEFAEQTEDAEKVEEV

SEQ ID NO: 2337 - protein, 520 aa, Glycine max
  unsure (1)..(520): unsure at all Xaa locations
MESRTKSNPQLTRALCYGNDGKQQGRSPSVIVIGGGMAGIAAARALHNASFQVVLLESRDRIGGRIHTDYSFGFPVDMGASWLXMGVSNENPLASVIGRLGLPLYRTSGDNSILYDHDLESYGLFDMDGKQVPQELVAKVGEIFEAILQETDKIRQESSEDMSVLRGLSIVFDRKPELRLEGIAYKVLQWYLCRLEGWFAADTDAISLKGWDQEVLLPGGHGLMVRGYLPVVNSLAKGLDIRLGHRVTKVVRRYNGVKVTVENGKTFFADAAVIAVPLGVLKAKKILFEPKLPDWKEAAIADLGIGLENKIILHFENVFWPNVEFLGVVADTPYECSYFLNLHKATGRAVLVYMPSGQLAKDVEKMPDEAAVNFAFMQLKKIFPDASSPIQYLVSRWGSDINSLGSYSYDAVGKXPHELYERLRVPVDNLFFAGEATSMSYPGSVHGAYSTGTMAAEDCRMRVLERYGEVDLFQPVMGEEGSMGSVCSASLLLCLIDLDMRNVQCINIPTLSLQHCSQHF

SEQ ID NO: 2338 - protein, 263 aa, Arabidopsis thaliana
METDSIDSVIDDDEIHQKHQFSSTKSQGGATVVISPATSVYELLECPVCTNSMYPPIHQCHNGHTLCSTCKSSKLKHESQCNFRPYSCPYAGSECAAVGDITFLVAHLRDDHKVDMHTGCTFNHRYVKSNPREVENATWMLTVFQCFGQYFCLHFEAFQLGMAPVYMAFLRFMGDEDDARNYTYSLEVGGSGRKQTWEGTPRSVRDSHRKVRDSHDGLIIQRNMALFFSGGDKKELKLRVTGRIWKEQQNPDSGVCITSMCSS

SEQ ID NO: 2339 - protein, 444 aa, Glycine max
  unsure (1)..(444): unsure at all Xaa locations
MEKRGNVLMEKYEFGKLLGQGNFAKVYHARDVRTGESVAVKVIDKEKILKIGLVDQTKREISIMRLVKHPNVLQLYEVLATKTKIYFIIEYAKGGELFNKIAKGRLTEDKARKYFQQLVSAVDFCHSRGVYHRDLKPENLLLDENGVLKVADFGLSALVESHRQKDMLHTICGTPAYVAPEVISRRGYDGTKADVWSCGVILFVLLAGHLPFYDLNLMSLYNKIGKADYKCPNWFPFEVRRLLAKILDPNPNTRISMAKLMENSWFRKGFKPKSGQVKREAVNVALVDSDQVFCLCENTSAAVVEXRASIVKPSQFNAFNIISLSAGLDLSGLFAGNVELDDTKFTFMSSASSIMSTMEDIARVLSMEIIKKDGGLLKLERSREGRKGPLSIDAEIFEVAPSFHLVELKKSCGDALEYQKILKEDLRPALKDIVGVWQGEQHLH

SEQ ID NO: 2340 - protein, 294 aa, Arabidopsis thaliana
MALTNNLWAFVFGILGNIISFVVFLAPVPTFVRICKKKSTEGFQSLPYVSALFSAMLWIYYAMQKDGTAFLLITINAFGCVIETIYIVLFVSYANKKTRISTLKVLGLLNFLGFAAIVLVCELLTKGSTREKVLGGICVGFSVSVFAAPLSIMRVVVRTRSVEFMPFSLSLFLTISAVTWLFYGLAIKDFYVALPNVLGAFLGAVQMILYIIFKYYKTPVAQKTDKSKDVSDHSIDIAKLTTVIPGAVLDSAVHQPPALHNVPETKIQLTEVKSQNMTDPKDQINKDVQKQSQV

SEQ ID NO: 2341 - protein, 355 aa, Colletotrichum lagenarium
MSRANAPNPSGSRKISFNVSEQYDIQDVVGEGAYGVVCSAIHKPSGQKVAIKKITPFDHSMFCLRTLREMKLLRYFNHENIISILDIQKPRSYETFNEVYLIQELMETDMHRVIRTQDLSDDHCQYFIYQTLRALKAMHSANVLHRDLKPSNLLLNANCDLKVCDFGLARSAASQEDNSGFMTEYVATRWYRAPEIMLTFKEYTKAIDVWSVGCILAEMLSGKPLFPGKDYHHQLTLILDVLGTPTMEDYYGIKSRRAREYIRSLPFKKKVPFRTLFPKTSDLALDLLEKLLAFNPVKRITVEDALKHPYLEPYHDPDDEPTAPPIPEEFFDFDKHKDNLSKEQLKQLIYQEIMR

SEQ ID NO: 2342 - protein, 228 aa, Triticum aestivum
  unsure (1)..(228): unsure at all Xaa locations
MGERLKGTVKWFNVTKGFGFISPEDGSEDLFVHQSAIKADGYRSLNENDVVEFEVITGDDGRTKATDVTAPGGGALAGGSRPSEGGGDRGGRGGGGYGGGGYGGGGGGYGGGGGGYGGGGGSYGGGXAGYGGGGGGGRYGGGSGGGGRYGGGSGGGRECYKCGEEGHISRDCPQGGXGGGGGGYGGGXPFAVVGGGGGCFSWGDXGHFSRHCPNRTIRRACRSNLSSR

SEQ ID NO: 2343 - protein, 417 aa, Pirellula sp. 1
MRSSTKAPPMLSEKTIRIVKEITPLVAANAETITRRFYERMFEANPEVKAFFNQAHQHSGGQQKALAGAICAYFTHIDNPAVLMPAVELIAQKHVSLGIKPEHYPIVGSNLLAAIGDVMGDAATPEIVEAVSEAYGFLADIFIGREGAIYEEQASMPGGWNGTRTFVVTKKVRESEIVTSFYLKPEDEGPLPPFKPGQYITVHMDHPHTPTSPRNYSLSDCASQPHYRISVKREERLVPDAPDGLISNHLHDGIEEGHRIELGPPCGEFTVDPATIAKPIVLIAGGIGVTPLLSMAKSIVHANPNAELHFIQAARNSKVHAFADELRRLAQAGPNVHTKVIYDSPLPGDVEEGKCDEAGFVTENQIRESTPFTDADFYFCGPKPFMKNVHSCLRELGVDEHRVRYEFFGPKEELVAV

SEQ ID NO: 2344 - protein, 277 aa, Sinorhizobium meliloti 1021
MGGPMSVYFEKSYQRGFGTYPLKGEPLKAAVREAITVGYRAFDTAQMYGNEAETGEALAESGLARDELCITTKVHPDNYSEEAFLPSVEASLKALRVDQADVLMLHWPEINGENARSLRLLQKAFDIGLARNIGVSNYTAPMMREAQSIVEAPLVTNQVEFHPLIDQSRLLDAAEETKIALSSYCSVARGEVFKHPVFAEIGARYGKTAAQTVLRWILQKGVSMNTMSTKPENIRANFEILDFALSPHDMKRIDAMNATNYRILKAGMLPWVPDWDR

SEQ ID NO: 2345 - protein, 331 aa, Bartonella koehlerae
STASCESKITYIDGNEGILLYRGYPIDQLAEKGDFLESCYLLLYGELPTKQEKIDFDRCIMQHTVVHEQFARFFHGFRRDSHPMAVMIACLGAMSAFYHDSIDITDPQQRMIASIRLISKVPTLAAMAYKYSIGQAFVYPRNDLSYAANFLHMCFSIPCEEYKINPVLTRAMDRIFTLHADHEQNASTSTVRLAGSSGANPFACIAAGVACLWGPAHGGANEACLKMLQEIGSVERIPQFIARAKDKNDSFRLMGFGHRVYKNYDPRAKIMQQTCHEVLKELNIQDDPLLDIAIALENIALNDEYFVGKKLYPNVDFYSGITLKALGFPTE

SEQ ID NO: 2346 - protein, 498 aa, Sinorhizobium meliloti 1021
MDQLNNFLSPPAAPRDFGFFVDGKWQSGHDFFVRHSPGHGVAVTRTAKCSVDDLNAAVAAARRAFEDRRWSGLPGGSRASVLLRVAEILRTRRDELAYWETLENGKPIAQARGEIDHCIACFEVGAGAARLLHGDSFNSLGDGLFGMVLREPIGVVGLITPWNFPFLILCERVPFILASGCTMVVKPSEVTSATTLILAEVLAEAGLPDGVYNVITGSGRTIGQAMSEHPDIDMLSFTGSTAVGRSCVHAAADSNFKKLGLELGGKNPIIVFADSDLEDAADGAAFGISFNTGQCCVSSSRLIVERSVAREFEALLAEKMKRIRVGDPLDETTQVGAITTEAQNTTILDYIAKGKTEGAELVTGGTAIDLGRGQYIAPTLFSGVSREMAIARDEIFGPVLCSMTFDTVEQAVELANDTVYGLAASVWTKNIDKALTVTRRVRAGRFWVNTMMAGGPEMPLGGFKQSGWGREAGMYGVEEYTQVKSVHVEIGKRTHWIS

SEQ ID NO: 2347 - protein, 341 aa, Sinorhizobium meliloti 1021
MKAAVLVEPRRFEVREVGIPEIGPADVLIRVTRAGICGTDLHIFNGHYAADRLPIVPGHEFCGTIAEIGASVTHLKTGMRVVADINIGCGNCYWCRRNEVLNCGEVEQIGIGRDGAFAQYVALPGRLVLPVPDGVPEAVLALVEPVACVVRAARKAGAAFGRSGVVLGAGPIGNLHVQMMRLVGMAPIIVADLSSERCRMAVEAGADAAVSEPATLRSKVLEMTGGRGADFVVESVGSSKLYRQAFDLVRKGGHVAFFGITPPGETIPIEILRTVLEENSLKGSVAGMGEDMHDALTLLSHGRFRTAAFTAAHYPLERIQEAFETIPARTGHLKTQILLDA

SEQ ID NO: 2348 - protein, 185 aa, Brassica napus
RVIFHINYLGADQPTFTLNFSKGSSQIIAQYYQLIRLGFEGYKNVMQNCRENMLVLKEGIEKTERFNIVSKDVGVPLVAFSLKGQSFHSEFEISEMLRRFGWIVPAYTMPADAQHITVLRVVIREDFSRTLAERLVADILKVLHELDTLPSKISRKMGAEDFGNVKGKKVERDILMEVIVGWRKV

SEQ ID NO: 2349 - protein, 473 aa, Brucella melitensis 16M
MRIGKMEMQTRYPDVKLFIDGTWRDGSRGETIEIFNPATDEVIGHIARATTADLDDALAAVDRGFEAWSKVSAFDRYKIMRRAADIFRSRGEEVARLLTMEQGKPLAEARIEAAAACDLIDWFAEEARRSYGRIVPPRQAYVMQAEVKEPVGPVAAFTPWNFPINQAVRKISAALAAGCSILLKAAEDTPAAPAELVRAFAEAGLPDGAINLVYGDPAEISAYLIPHPVIRKVSFTGSTQVGKQLAALAGLHMKRVTMELGGHAPVIIAADADVEQAIKVVSGSKFRNAGQVCISPTRFLIENSVYDQVVEGMAAYATSLKVGDGLEAGTTMGPLVNAKRVNAMERLVQDAREHKARVVTGGERIGNRGNFFEPTILADVPRDAAIMNEEPFGPVALLNRFDALDEALSEANRLNYGLAAYAFTGSSAKAARISSTVRSGMITINQLRSGPAGSALRRDQRFRLWNGRRCRRA

SEQ ID NO: 2350 - protein, 472 aa, Oceanobacillus iheyensis HTE831
MQSYKMFVGGKWFGNNLEQIDVINPATNEQIGTIPNGGKEEAKQAVDAAHNALKEWSARTAEDRSNYLVKWHELIKEERETIAKIMTEEQGKPLKEAIGEVDYANGFISWYAEEGKRIYGDIIPASHTNKRIFVQKKPVGVVAAITPWNFPAAMITRKVGPALAVGCTVVIKPATQTPLTAFKLVELAEKAGIPRGVINIVTGSSSQIGKVWNDDGRVRKLTFTGSTEVGKILMKDAANTMKKISLELGGHAPFVVMEDADLDKAVAGVIASKFRNAGQTCVCTNRVYVHESIKDIFQDKLTEAVSKLKVGNGLEEGINIGPLIDQSAVDKVDEQVKDAISKGGRVTFGGKSLRGLYVEPTIVVDATDDMLCMYEETFGPLVPVTTFRDEEEVIARANNSPYGLAAYVFTENIGRAIRISEALEYGIVGLNDGAPSTPQAPFGGFKESGLGREGGYYGIEEFLEIKYISLAF

SEQ ID NO: 2351 - protein, 169 aa, Oryza sativa (japonica cultivar-group)
MEHMFRYQNVLKHSSFLFYYTTNTATRTHPPPNVYAVTNTTTMDATTTAKRKRPAASDIADDAPTTVDEVSDAEVEEFYAILRRMRDATRRLGARPPPPRAPAWRPSFSWEDFADAPPKQAPPPPQQPADHERVAENATPPRRPAPGLDLNVEPPSDAPATPRSARAPA

SEQ ID NO: 2352 - protein, 469 aa, Glycine max
KVYYARNIKTGEGVAIKVIDKEKILKGGLVAHIKREISILRRVRHPNIVQLFEVMATKSKIYFVMEYVRGGELFNKVAKGRLKEEVARKYFQQLISAVGFCHARGVYHRDLKPENLLLDENGNLKVSDFGLSAVSDQIRQDGLFHTFCGTPAYVAPEVLARKGYDGAKVDLWSCGVVLFVLMAGYLPFHDQNVMAMYKKIYRGEFRCPRWFSPDLSRLLTRLLDTKPETRIAIPEIMENKWFKKGFKQIKFYVEDDRLCNVVDDDGLMDNDDDTASIVSVASFSDYSVSESDSEIETRRRINAPLPRPPSLNAFDIISFSPGFNLSGLFEEKEDETRFVTAAPVNRIISKLEEIAQLVRFSVRKKDCRVSLEGTREGVRGPLTIAAEIFELTPSLVVVEVKKKGGDRAEYERFCNDELKPGLQNLMVEESATSSELSTPIQPSLLRGLSEPVPDISSDIETPLCIPSDD

SEQ ID NO: 2353 - protein, 363 aa, Pichia jadinii
MPEKTIVVLPGDHVGTEITAEAIKVLKAIEEVKPEIKFNFQHHLIGGAAIDATGVPLPDDALEASKKADAVLLGAVGGPKWGTGAVRPEQGLLKIRKELNLYANLRPCNFASESLLDLSPIKAEVVKGTDFVVVRELVGGIYFGERKEDDGSGVASDTETYSVPEVQRITRMAAFMALQHNPPLPIWSLDKANVLASSRLWRKVVTETIEKEFPQLTVQHQLIDSAAMILIKYPTQLNGIVITSNMFGDIISDEASVIPGSLGLLPSASLASLPDSNKAFGLYEPCHGSAPDLPANKVNPIATILSAAMMLKLSLDLYEEGVAVETAVKQVLDAGIRTGDLKGTNSTTEVGDAVAEAVKKILA

SEQ ID NO: 2354 - protein, 423 aa, Schizosaccharomyces pombe
MKPNTTNLRNECWDTFSIPKRSQNIKINQSTKHQRSISDFVGTAGPGRQVGNWIIKKTIGAGSMGKVKLVVNILTGEKAALKMIPFTPNNTSQTVRVQREALLGRLLRHPNICRVIDCIRTPACTYILFEYVPGGQLLEYILARGKLDEDLARSFAMQLINALVYLHKNFIVHRDLKIENVLLTQDSRQVKLIDFGLSNFYSKDDLLRTYCGSLYFAAPELLDAKPYIGPEVDVWSLGVVIYVMVCGRVPFDDVSVPMLHSKIKSGKLEFPSYISEDCCSLIAAMLNVNPRKRCSLEQAAKFPWLKKNSFCLYLPIPLTSIPSTPSIRSHVFKPPFNLKVLQLLHEHGLASIPELKHELYMAYIERKTTSLVCLYLLGVESLAPALRIPTALPPVYSRHQRHHSEILGAMDLTEKITAMQCPP

SEQ ID NO: 2355 - protein, 124 aa, Cyanidioschyzon merolae strain 10D
MSTKINSLLEEIKSLTLLEAAELVKQMETTFGIDASAVATAAPAVQVETKKEEKTEFALVLSQVPADKKINVLKVVRTITGLGLKEAKELVDSVPKTLKEGLSASEAEQLKTQLTEAGAQVELK

SEQ ID NO: 2356 - protein, 509 aa, Brassica juncea
MTSVNVKLLYHYVITNLFNLCFFPLTAIVAGKAYRLTIDDLHHLYYSYLQHNLITIASLFAFTVSGFGLYIATLPKPLTLVEYSCYLPPRHLKVSVSKIMDIFYQIRKADTSSRNVACDDPSSLDFLRKIQERSGLGDETYSPEGLIHVPPRKSFAASREETEKVIIGGIENLFENTKVKPKDIGILVVNSSKFNPTPSLSAMVVNTFKLRSNIKSFNLGGMGCSAGVIAIAIDLAKDLLHVHKNTYALVVSTENITQGIYAEENRSMMFSNCLFRVGGAAILLSNKSGDRRRSKYELVHTVRTHTGADDKSFRCVQQGDDEDGKIGVCLSKDITNVAGTTLTKNIAICRPLILPLSEKFLFFATSVAMKLLKDKIKHYYVPDFKLAVDHFCIQPGGRAVIDELEKNLGLSPIDVEASRSTLHRFGNTSSSSIWYELAYIEPKERLKKGNKGWQIALGLGFKCNSAVWVALNNVKASANSPWEHCIDRYPVKNDSDLSKSKTHVQNGRS

SEQ ID NO: 2357 - protein, 178 aa, Arabidopsis thaliana
MAESQAKSPGGCGSHESGGDQSPRSLHVREQDRFLPIANISRIMKRGLPANGKIAKDAKEIVQECVSEFISFVTSEASDKCQREKRKTINGDDLLWAMATLGFEDYMEPLKVYLMRYREGDTKGSAKGGDPNAKKDGQSSQNGQFSQLAHQGPYGNSQVTFPLFSSHSSNTHHSLLIC

SEQ ID NO: 2358 - protein, 174 aa, Triticum aestivum
  unsure (1)..(174): unsure at all Xaa locations
MAPTVMASSATSVAPFQGLKSTAGLPVSRRSNGASLGSVSNGGRIRCMQVWPIEGIKKFETLSYLPPLSTEALLKQVDYLIRSKWVPCLDSTSWFIFXREHNASPGVLXDGGYWTMWNCXYFGXTGPTQVINEVEESKKDXPDAYFRIIXSTTSSRAWLNSSPTGSKIRKAKYH

SEQ ID NO: 2359 - protein, 252 aa, Arabidopsis thaliana
MEGIQHPIPRTVEEVFSDFRGRRAGLIKALSTDVQKFYHQCDPEKENLCLYGLPNETWEVNLPVEEVPPELPEPALGINFARDGMQEKDWISLVAVHSDSWLISVAFYFGARFGFGKNERKRLFQMINDLPTIFEVVTGNAKQSKDQSANHNSSRSKSSGGKPRHSESHTKASKMSPPPRKEDESGDEDEDDEQGAVCGACGDNYGGDEFWICCDACEKWFHGKCVKITPAKAEHIKHYKCPSCTTSKKMKA

SEQ ID NO: 2360 - protein, 409 aa, ASPERGILLUS NIDULANS FGSC A4
MFNKLSGQPESYEKKSLYRFGRTLGAGTYGIVREADCSSGKVAVKIILKRNVRGNERMVYDELDLLQKLNHPHIVHFVDWFESKDKFYIVTQLATGGELFDRICEYGKFTEKDASQTIRQVLDAVNYLHQRNIVHRDLKPENLLYLTRDLDSQLVLADFGIAKMLDNPAEVLTSMAGSFGYAAPEVMLKQGHGKAVDIWSLGVITYTLLCGYSPFRSENLTDLIEECRSGRVVFHERYWKDVSKDAKDFILSLLQVDPAQRPTSEEALKHPWLKGESASDRDLLPEIRAYIARSRLKRGIEIIKLANRIEALKMQEEDEEDIPSAVDVQASEASDKSGLSPFPALSTENSNTHPASTGNGESGGTKKRSLSKIARGAIFREVVLAKVREMKENEEREKVEREARERAHS

SEQ ID NO: 2361 - protein, 210 aa, Triticum aestivum
  unsure (1)..(210): unsure at all Xaa locations
MEEEDQELYGQKTPVDAEDVNRAAGGDAAARLQDLEKMSRLLKRMEXEDAAPRDKMPKELQREMRGRAPSAHISEEKKRMVFLLFLCXDVYSACTPEEEQQPAFSSLADPSTTFTTDKFGQPKGFAYVEFVEAEAIQEAVKLSESELHGRQIKVAPKRTNVPGLKQPRGGRGFNPYGGHPYMRPYPPPFYNPYGGYGRAPRFRRPRRPFY

SEQ ID NO: 2362 - protein, 244 aa, Triticum aestivum
  unsure (1)..(244): unsure at all Xaa locations
MCGILAVLGCADDTQGKRVRVLELSRRLKHRGPDWSGMHQVGDCYLSHQRLAIIDPASGDQPLYNEDKSIVVTVNGEIYNHEKLRAQLSSHTFRTGSDCEVIAHLYEEHGENFIDXLMGFSSLVIHATQFLCRDAGSTPLWIAVEAKPLYIXWGIDGXSVGISSEMKGLNDDCGHXEIFPPGHLFSQEGGKVXRFDPPPWVLESSSLRGLYNPFSPRKXFQKGLSQRGLMRDLPCGVLPSGGAC

SEQ ID NO: 2363 - protein, 113 aa, uncultured Rickettsia sp.
ANEAVINMLKEIGSSEYIPRYIAKAKDKNDPFRLMGFGHRVYKNYDPRAAVLKETCKEVLKELGQLDNNPLLQIAIELEAIALKDEYFIERKLYPNVDFYSGIIYKAMGIPSQ

SEQ ID NO: 2364 - protein, 418 aa, Pseudomonas aeruginosa PAO1
MGYQKIQVPATGDKITVNADMSLSVPKNPIIPFIEGDGIGVDISPVMIKVVDAAVEKAYKGERKIAWMEVYAGEKATQVYDQDTWLPQETLDAVRDYVVSIKGPLTTPVGGGIRSLNVALRQQLDLYVCQRPVRWFEGVPSPVKKPGDVDMVIFRENSEDIYAGVEWKAGSPEAEKVIKFLTEEMGVKKIRFTENCGIGIKPVSQEGTKRLVRKALQYAVDNDRSSVTLVHKGNIMKFTEGAFKDWGYEVARDEFGAELLDGGPWMQFKNPKTGKNVVVKDVIADAMLQQILLRPAEYDVIATLNLNGDYLSDALAAEVGGIGIAPGANLSDSVAMFEATHGTAPKYAGQDKVNPGSLILSAEMMLRHMGWTEAADLIIKGTNGAIAAKTVTYDFERLMDGATLLSCSEFGDAMIAKM

SEQ ID NO: 2365 - protein, 113 aa, uncultured Rickettsia sp.
ANEAVINMLKEIGSSEYIPKYIAKAKDKNDPFRLMGFGHRVYKNYDPRAAVLKETCKEVLKELGQLDNNPLLQIAIELEAIALKDEYFIERKLYPNVDFYSGIIYKAMGIPSQ

SEQ ID NO: 2366 - protein, 208 aa, Vibrio harveyi
LAPHREEIGKNIRTMIMGIPNVGKSTIINALAGRTIAVTGNQPAVTRRQQRINLQNGIVLSDTPGILWPKVENPHSGFRLAATGAVKDTAMEYDEVAFYTVEYLAAHYPEKLKERYQIDELPESDIEIMEEIGRRRGALRAGGRVDLHKVSEILLHELRQGTLGQITLELPEMITQELIEVEIETARKEEEKAKRKEERRKRYLRNKR

SEQ ID NO: 2367 - protein, 213 aa, Zea mays
MGCFHSTAKRQHPGYEDPVHLASQTAFSVSEVEALFELFKSISGSVIDDGLINKEEFQLALFKNQRKENLFANRIFDLFDVKKRGVIDFGDFVRALNVFHPNIPMEEKVDFSFKLYDMDSTGFIERKEVKQMLIALLGESEMRLSDEIIETILDKTFSDADANQDGKIDRTEWENFVTRNPSLMKIMTLPYLKDITTTFPSFVFNSEVDDLVT

SEQ ID NO: 2368 - protein, 128 aa, Brassica oleracea var. alboglabra
DPFEGLLTPSSARDMAAFTNARVDWKETPEAHVFKADLPGLMKEEVKVEVEDKNILQISGERSKENEEKNDKWHRLERASGKFMRRFKLPENAKMEEVKATMENGVLTVTVPKAPEKKPEVKSIDISG

SEQ ID NO: 2369 - protein, 347 aa, Anabaena variabilis ATCC 29413
MNREELLQETVQPIDIKAFDVVGLVEAMSKTAFQGRNLGRAAKIYDAMLQDKECTIILCLAGSLFSAGLKGIVHDLITHNMVDAIVSTGANIVDQDFFEALGYRHYVGDPFADDEVLRQQRIDRIYDTYIDEDQLRVCDMTIAEIAENLEKRPYSSREFIEQMAVYLERRGNYGQSVVQAAYQHQVPIFVPAFSDCSAGFGLVHHQWNSPESHVTIDSVRDFRELTQCKLASNYTGLVMIGGGVPKNFAQDTVVAAELLGFETSMHKYTIQVTVADERDGALSGSTLKEAHSWGKVDKATEQMVFSEATVALPLIAGYAYHKGNWRDRQPHRLAQLFTKPQPKVATV

SEQ ID NO: 2370 - protein, 507 aa, Oceanobacillus iheyensis HTE831
MSGNQEVDVLSGKHEELANKLDDIKLYINGEFMDAEDRGTFDNISPFSNEKINSVASGQAADIDKAVQSAKKAFKGEWGNLKQVERLEYVYKIGDLIEQHTDEIAILESLDTGLPISQTRKQVSRSANNFRFYADTVKSQMYGEVYQVDDEFINYTVRSAVGVAGLITPWNAPFMLETWKIAPALATGNTVILKPAEWSPLTANRMAEIIDQAGLPDGVFNIVHGFGETAGDALVKHPDVQLISFTGETTTGSTIMRNGADALKRFSMELGGKSPIIVFEDADLERALDAATWGIFSFNGERCTANSRLYLHESIADEFIEKLKQRVWNIRVGDPLENNTQIGPLIKTEHYNNVKKYLKIAEEEGCEIISGVIPKELNRGNYVAPTILLNASNEMRVVQEEIFGPVIAVMTFNDETEVIEKANDVRYGLAGYVWTNDMKRGHRVAHAIDSGMLWVNSQNVRDLRTPFGGSKDSGIGREGGHYAFEFYTEQKIIHVAIGDHHIPQFGK

SEQ ID NO: 2371 - protein, 221 aa, Glycine max
MGRGKIVIRRIDNSTSRQVTFSKRRNGLVKKARELSILCDAEVGLIVFSSTGKLYDYASTSMKSVIERYNKVKEDHQQLINPASEVKLWQREVASLRQQVQYMQECHRQMMGQELSGLGIEELGNLEKRLEMSLKGVRMKKDQILIDEVKELHQKGSLAHQENVELNRKINLIRKENEELQKVIEAKCRKGVAASNPPFTINYGCNMLAPISLQLSLPEST

SEQ ID NO: 2372 - protein, 169 aa, Hordeum vulgare
MAAAASSASSVHDFTVKDASGKDVDLSTYKGKVLLIVNVASQCGLTNSNYTELAQLYEKYKDQGFEILAFPCNQFGGQEPGTNEEIVQFACTRFKAEYPIFDKVDVNGDNVAPVYKFLKSSKGSLFGDNIKWNFSKFLVDKDGNVVDRYAPTTSPLSIEKDIKKLLASS

SEQ ID NO: 2373 - protein, 131 aa, Glycine max
  unsure (1)..(131): unsure at all Xaa locations
MAPLMISSPAATTGNRALAYVGAPFTDLKYMAGLRTRNTNTDITSIASNGGRVQCMQAWPPIGKKKFETLSYLPDLDDAQLTKEVAYLLRNGWIPCLAFELXTGSLYREHITSPGYYDRRYWTCXKLSMFG

SEQ ID NO: 2374 - protein, 347 aa, Listeria monocytogenes EGD-e
MKNTIKWIAIGFAGIILLPLLIVFFIYKKAVGKKDYNPEVLENLDKASQEFVKNTSPLSDVDSRYKYMRLATKALPSAKDIEIGDVENKKIDGPAGKIPIRIYTPQEDGPFEIIVYYHGGGFVLGGLQTHDAIARKLVQTTGARVVTVDYRLAPENPFPAAVEDAYAALLWVQNHRTSLRAKSSDIIVAGDSVGGNLATVVTQIAKSKGKPNITAQILLYPATDIFSRDASVLYPSMDEFAEGYVLTKESLDKFFKLYIANASDRKYDPLVAPIRSKDLVGLPKTFIATAEFDPLRDQGEAYAKKLKDAGVEVFAKRFEKVPHGFMTTNSEATDETYELISEFLEEK

SEQ ID NO: 2375 - protein, 267 aa, Shigella flexneri 2a str. 2457T
MAIPAFGLGTFRLKDDVVISSVKTALELGYRAIDTAQIYDNEAAVGQAIAESGVPRHELYITTKIWIENLSKDKLIPSLKESLQKLRTDYVDLTLIHWPSPNDEVSVEEFMQALLEAKKQGLTREIGISNFTIPLMEKVIAAVGAENIATNQIELSPYLQNRKVVAWAKQHGIHITSYMTLAYGKALKDEVIARIAAKHNAIPAQVILAWAMGEGYSVIPSSTKRKNLESNLKAQNLQLDAEDKKAIAALDCNDRLVSPEGLAPEWD

SEQ ID NO: 2376 - protein, 485 aa, uncultured bacterium 582
MREVKGYWQNYIDGAWVDGGAGRIDVINPGTGEKIAEQALADARDVDLAVQAAKRVHSTGVLTDMRPVERGRIVQAMGRYLLEHLEEIAALLSLEQGKPIWEARIEVTGAARYFEYYGNQAETLEGRSIPLGAGYFDFTTDEPYGVSAQIIPWNFPVEMTARSLSAALTTGNTVVVKPPEMTPLSNAWFAHAAEAVGLPKGAVNLVCGYGHQAGAALSAHPDINQVVFTGSVATGIAIASAAAKNVVPCVLELGGKSAAIVHSDADLVAMETDIRKGIFINAGQVCSAMSRIIVHESRHDELVQRAVSIAESLSVGPGADRQTFGANMGPMVSVKQRDRAAGLVSEAVSQGAKLVTGGRAMNIPGAFLQPTVLAEVTPEMTIAQTEVFGPVLSVLRFREDAEAIEIANGTDYGLVGGVFTRDLDRATQVARKIRAGQVFVNEWFAGGVETPFGGYGKSGYGREKGREALWNYVQTKNIAIKLKRT

SEQ ID NO: 2377 - protein, 175 aa, Oryza sativa (japonica cultivar-group)
MAPSVMASSATTVAPFQGLKSTAGMPVARRSGNSSFGNVSNGGRIRCMQVWPIEGIKKFETLSYLPPLTVEDLLKQIEYLLRSKWVPCLEFSKVGFVYRENHRSPGYYDGRYWTMWKLPMFGCTDATQVLKELEEAKKANPDAFVRIIGFDNVRQVQLISFIAYKPPGCEESGGN

SEQ ID NO: 2378 - protein, 330 aa, Triticum aestivum
  unsure (1)..(330): unsure at all Xaa locations
MAAAGDDDLQLQHAAVPIPCVTLNTGHAMPVLGFGTGSSRAPADLPDTIVHAVRLGYRHLDTAAMYGTEPAVGVAVAEAVRSGAGGISSREDLFVTSKLGIPDARPGRVVPALRESLGRLGVDYLDLFLVHWARRRRQPRGQXSTHTEFDMEGVWRGMEECHRLGLARSVGVSNFSAAKMERLLALAAVPPAVNQVELNVGWRQEKVREVCARHGVVVAAYSPLGAYGAFWGSDAVMHSGVMHDVAAAKAKTVAQVALRWVYEQGVCFVARSFNKERLKQNMDIFVDWELSDEDKAMIATIPQKRACQGDYFVSPDGPYKSLEELWDGEM

SEQ ID NO: 2379 - protein, 431 aa, Azoarcus sp. EbN1
MSTERTATLTVDGKTVEFPVMTGTHGNDVIDIRTLGAKTGFFTYDSGFLSTASCKSTITFIDGDKGELLYRGYPIEQLADKCSFLEVAYLLKNGELPNGTQKVEFENTIKNHTMLHDQMTKFFTGFRRDAHPMAVMVGVVGALSAFYHEAMDFSDSEHRNISINRLIAKLPTIVAMAYKYNMGQPFMYPRNELDYTANFMHMMFGTPCEEYKPNPVLVRALDTIFTLHADHEQNASTSTVRLAGSSGANPFACISAGIACLWGPAHGGANEACLNMLEEIGDVSRVGEYIARAKDKNDSFKLMGFGHRVYKNFDPRAKLMRQVCYDVLGELGLENDRLFKLAMELEKIALEDQYFVEKKLYPNVDFYSGIVQKALGIPTSMFTCIFALARTVGWITQWEEMITDPEYKIGRPRQLYIGAARRDVPTLAQRP

SEQ ID NO: 2380 - protein, 280 aa, Thalassiosira weissflogii
PHSFPPHSVALQVLGTFILWFGWYGFNPGSTLGISGEGVPDVAALCAVTTTIAAASGSVSAMFTDMLPSRRSTGETMYDITMCMNGALSGLVGITAGCSVVEPWAAFVIGIVAGWTYIFWSALLVKLKIDDAVDAIPVHFGNGIWGCIAVGLFAEPTRTINAFGEHGHYGRFYSWGNGSADAHLLAAQVCGVLWIIGWVTVIMLPYFLILNAIGLFRVDALEEEVGLDISHHKGAAYDMSGPSADVQEKFEISRSQRKIRFPRRTLMKQPKQATLQLLDF

SEQ ID NO: 2381 - protein, 143 aa, Brassica napus
  unsure (1)..(143): unsure at all Xaa locations
NVKRKEEEEVVVASSMLSSAAVXXSXAXXTXXAXFTGLXASAAFPVTRXAYNXITSIXXXXXXXSXMKVXXPVEKKKXETLXXLPDXTXXELXXEXDYLLRNXXXXCGXFXXXXXXVXREHGNTPXYYDGXXWXMWKLPLXGC

SEQ ID NO: 2382 - protein, 146 aa, Treponema denticola ATCC 35405
MNSLSLFSPSFTDSVFDALDRSLGPNFGVFAPIKNASCGMPSVDIRETEKAYVMEVDLPGYSEKDVEISLKDRLMTISSSKKEEKEDKGAEYIIKERSSRHFMRRFTLPEDINSDEVSAKFENGVLVVNIPRKPDTQPKQIEIKTA

SEQ ID NO: 2383 - protein, 484 aa, Dechloromonas aromatica RCB
MKQILNFINGEFVATGKQFEKRTPLDNSLIGMVHEAGKAEVDAAVKAAHDALEGPWGKMTVVERTDILNKVADEITRRFDEFLEAECADTGKPKSLASHIDIPRGAANFKIFADVIKNAPTEFFEMATPDGKGALNYAIRRPVGVVGVVCPWNLPLLLMTWKVGPALACGNTVVVKPSEETPSTATLLGEVMNACGVPKGVYNVVHGFGPNSAGEFLTTNQNVNAITFTGETRTGAAIMKAAADGARPVSLEMGGKNPAIVFADANLDVAIEATLRSCFSNCGQVCLGTERVYVERPFFETFVAALKAGAEKLKLGVPSDPSANMGPLVSQEHRNKVLSYYKKAVEEGATVVTGGGIPDMPGELANGAWVQPTIWTGLDDNAAVVREEIFGPCTTVMPFDSEDEVIKRANNTTYGLAASVFTQDVNRAHRVAGRIEAGLVWVNSWFLRDLRTPFGGAKQSGIGREGGVHSLEFYTELKNVCIKL

SEQ ID NO: 2384 - protein, 292 aa, Zea mays
  unsure (1)..(292): unsure at all Xaa locations
EDYYNPNFAVEDARGPREPWDDLHSKIDGPEAYDVLKNFEERWLKASKRSAAKKLSKLSRSHNDSLLWINKIPDIIAIDDEIYSNDDDPERWDMQIFRSIDSNSVKGFPKDPREATSKNLVCGXNVLIDMSVHTTYVNAIRGAQHFIYIENQYFLGSSFNWDSHRDVXKMTMQIMYEIIYKAMKEVGLDGTYEPQDYLNFFCLGNREAEDTTCTSSGPFSTTWISNQDQARNNRRFMVYVHSKGMIVDDEYVIIGSANINQRSMEGTRDTEIAMAAYQPQHTLANMLSAPRG

SEQ ID NO: 2385 - protein, 184 aa, ASPERGILLUS NIDULANS FGSC A4
MSNKFKITDLLPLPNSSVKIPRLGFGVYRSPATQTKQSVLKALETGYRHIDTAQFYANEKEVGDAIHESGLPRSEIFVTTKILAPAGSPEATYEKIIESVNKIGGKDGYVDLFLIHSSSSGSSGRKELWQALEKLLEEGRTKSIGVSNFGVKHIEEMKEYAKVWPPHVNQIEVGFQEFSAPEAC

SEQ ID NO: 2386 - protein, 384 aa, Zea mays
  unsure (1)..(384): unsure at all Xaa locations
PLWVDVLRATLRHGLAPRVWTDYLRLTVGGTLSNAGIGGQAFRHGPQIANVHELDVVTGTGEMVTCSMDVNSDLFMAALGGLGQFGVITRARIRLEPAPRRXRWVPLAYTDVATFTKDQEFLISNRASQVGFDYVEGQVQLSRSLVEGPKSTPFFSGADVARLAGLASRTGPAAIYYIEGAMYYTKDTAISVDKVQKMKALLDQLSFEPGFAFTKDVTFVQFLDRVREEERVLRSAGAWEVPHPWLNLFVPRSRILDFDDGVFKALLKDSNPAGIILMYPMNKDRWDDRMTAMTPATNDDDVFYAVSFLWSALSADDVPQLERWNKAVLDFCDRSGIECKQYLPHYTSQDGWRRHFGAKWSRIAELKARYDPRALLSPGQRIFP

SEQ ID NO: 2387 - protein, 316 aa, Pseudomonas putida KT2440
MIDAVVVSRNDEAQGICSFELAAADGSLLPAFSAGAHIDVHLPDGLVRQYSLCNHPEERHRYLIGVLNDPASRGGSRSLHEQVQAGARLRISAPRNLFPLAEGAQRSLLFAGGIGITPILCMAEQLSDSGQAFELHYCARSSERAAFVERIRSAPFADRLFVHFDEQPETALDIAQVLGNPQDDVHLYVCGPGGFMQHVLDSAKGLGWQEANLHREYFAAAPVDASNDGSFAVQVGSTGQVFEVPADRTVVQVLEENGIEIAMSCEQGICGTCLTRVLQGTPDHRDLFLTEEEQALNDQFTPCCSRSKTPLLVLDI

SEQ ID NO: 2388 - protein, 178 aa, Triticum aestivum
  unsure (1)..(178): unsure at all Xaa locations
MAPTVMASSATSVAPFQGLKSTAGLPVSRRSNGASLGSVSNGGWIRCMQVWPIEGIKKFETLSYLPPLSTEALLKQVDYLIRSKWVPCLEFNKVGFIFRXEHNASPGVXYNGRYWTMWKLPMFGCTDATQXINEVEXVKKGVPDAYVRXIGFQKMLKVQWRQLHPSNQPGAKESRQRP

SEQ ID NO: 2389 - protein, 503 aa, Burkholderia cepacia R18194
MLNESLATTDHAPLRRYEHLYIDGAWVKPIDGELAESIDPATGQPWAIAPMGGPQDIDRAVEAARTAFHGTWRSTPGHVRAALLRRLADLFSAAIPELAIIESRDNGNLVREHRASLTAQVQWYQWFASLADKAQGATIPIDDSVHAFTTRVPIGVVGAIIPWNAPLLATCLKVGAALAAGCTVVVKPAEQTPVSALELARLVHEAGFPPGVFNVVPGYGRTAGAHLVKHPDVNKISFTGASQTAKHMVRDGADNLKRFTFELGGKAPHILFADADLDNAINAATASAWRLTGQSCALGSRVLVERPIYDRVVEAFRTRAKAVRVGLPSIDSNHMGPQSHETQLAKTLSYVDAGKQDGAELVTGGRRITTPELAAGYFVEPTVFAGVTNQMRIAREEIFGPIASLIPFDGEDEAIAIANDTPYGLTAGLWTRDVGRAHRVSNRIDAGMVWVNTYSFLRWSTPYGGFKASGWGRENGIDALDPYLETRTTVISTTGQFPNLYED

SEQ ID NO: 2390 - protein, 194 aa, Suillus bovinus
MHNIKCVVVGDGAVGKTCLLISYTTNAFPGEYVPTVFDNYSANVMVDGKTISLGLWDTAGQEDYDRLRPLSYPQTDVFLICFSLVSPPSYENVRTKWWPEISHHAPSTSVVLVGTKLDLREDPATIEKLRDRRMQPIQYTQGVSMARDIGAVKYLECSALSQKGLKTVFDEVIRAVLNPPPKEKKRSGRGCVIV

SEQ ID NO: 2391 - protein, 250 aa, Pimpinella brachycarpa
MGKCYPTVSEEYKVAVEKCRRKLRGFIAEKNCAPLMLRLAWHSAGTYDVKTKTGGPFGTMRQKLEQSHAANNGLDVAVRLLEPFKEQFPIISYGDLYQLAGVVAVEITGGPDVPFHPGRPDKDEPPQEGRLPNATLGNDHLRNVFVKTMGLSDKDIVTLSGGHTLGRAHKERSGFEGPWTSNPLIFDNSYFKELLTGEKEGLLQLPTDKSLLEDPVFRPLVDKYACDEDAFFADYAESHMKLSELGFAEA

SEQ ID NO: 2392 - protein, 175 aa, Triticum aestivum
MAPAVMASSATTVAPFQGLKSTAGLPVSCRSGSTGLSSVSNGGRIRCMQVWPIEGIKKFETLSYLPPLSTEALLKQVDYLIRSKWVPCLEFSKVGFIFREHNASPGYYDGRYWTMWKLPMFGCTDATQVINEVEEVKKEYPDAYVRIIGFDNMRQVQCVSFIAFKPPGCEESGKA

SEQ ID NO: 2393 - protein, 123 aa, Dianthus caryophyllus
MITIHHPWVFAFGLLGNFISFMVFLAPLPTFIRVYKKKSTEGFQSFPYVVAIFSAMLWIYYALLKGNSLLLITVNVTGVIIETIYVIIFITYAPRQARISTMKLLLFMNFGGFCMIVPRPRPR

SEQ ID NO: 2394 - protein, 435 aa, Streptomyces coelicolor A3(2)
MTGRFEFMHQSSHPDRPTTPADDWSGANAAHLAAPARIAAAPASVTDEDVALVRASLTVVTPHVSELAAHFYSILFSRYPQVRDLFPAELDVQRERLVRALLRIVELVDDPDNLVAFCSRLGRGHRKFGTQSGHYPAVGECLLQALSHFAGPAWHPALATAWQRAYTAAADVMVRAAEEDARSRPAVWDAHIVGHVHRGHGIAEITVRPHQPYPFVAGQYVSIETPWAPRQWRQYSPANAPRPNSELTFHVRAVREGKVSNALVHHARPGDPVRLGPPEGDMVLRPTRQRDLLFVAGGTGLAPIRALIEEVAQGSISDAREVSLFIGARTANELYGLDDMLRMSQRYHWLRVRAAVSDERIPGLEGTLPEVLAEFGPWYRHEAYLCGPPQMLSGAVHALRRHGVPPRHIHYDPWDTPVLTAPLGPPPPDEEDDQL

SEQ ID NO: 2395 - protein, 130 aa, Pimpinella brachycarpa
GTRESKVFYLKMKGDYHRYMAEFKVGDERKNAAEDTMNSYKAAQDIALADLAPTHPIRLGLALNFSVFYYEILNSSDKACSMAKQAFEEAIAELDTLGEESYKDSTLIMQLLRDNLTLWTSDSQDQLDEP

SEQ ID NO: 2396 - protein, 106 aa, uncultured Rickettsia sp.
MLKEIGSSENIPKYIAKAKDKDDPFRLMGFGHRVYKNYDPRAAVLKETCSEVLKELGQLENNPLLQIAIELEAIALKDEYFIERKLYPNVDFYSGIIYKAMGIPSQ

SEQ ID NO: 2397 - protein, 149 aa, Rhodospirillum rubrum
MQVSEIYEVEGGSPGGFGGGGYDRGGYSGGFDRGGYNGGFDRGAADRGGYAGATDRGGYAGGAADRGGYAGGADRGGFQGETEIDGVVKFFSADKGFGFVVPDGGGKDVYVGSRTLQDCGVSVLEQGQRVRMSIRMGKKGPMAGSLELI

SEQ ID NO: 2398 - protein, 507 aa, Candida albicans SC5314
MLILLPIAVIAASIYYIAEYWKRESIKRKYDCQPVKQAPLVTWYDIFGIKALVDNSNLTKSGYFYQDIQRKLDNLDTTTMKTTALGKNQIITIEPENFRTMCSSADLNNWTIGTRPIALKPLLGNGIFSSEGESWKHSRIMLRPIFAKEHIKQITAMESYIQSLIKVIKLQQQGEGEFDLQHLFHCFTIDYATDFLFGESCDCLKSILGETSISTMSEEEKSKFAPNFDVMQYHMTKRLVFGYFSFLVNPPEFKNAVKHLHEFVFHFVDRAINFTDEELNDPSKNYVFLYQLAKQTKDRKVILDELLSVLLAGRNTTASLLSFMFFELAQNKPVWNKLKKEITEHFPDVESITFETIHNCEYLRWCIHESLRINPPVPINTRTANRDTVLPKGGGKGNNYPIFVRKGEQVIFPLFSSNRQERFFGPEPEKYIPERWANLPRNGGVAFGPFGTGPRLCLGQQLALVEASYVTIRLLQTFSQLDSNHTECRRSVGATMRLMDGCQVTLK

SEQ ID NO: 2399 - protein, 287 aa, Glycine max
MSQQVLRPLRQWPWFHHHHHRTCVTLSLHHLLTPPPKTSHRFSFATVAASSRPKVRTPKSPVPPPPTADSDLEEKKSRNQLKREARRTVKWGMDLASFSPPQIKRILRVASSDHLLLFEALMLVKRLGPDVREGRRRQFSYIGKLLREVDPELMERLIKATKDSNQKELQALTGLGPDDPEPEDDDDLVESESEEDEEESNWHDNQVARWFDGLISKDIEITNEIYSVQGVEFDRQELRKLVRRVHNTQEMKADNEEEKKKIETATNGAKKALNRFLRGLSKRIPNE

SEQ ID NO: 2400 - protein, 471 aa, Pyrococcus furiosus DSM 3638
MCLITGGINLTKEEIVKMIITGKHRGPDSFGVWSDGLVIKSEDFSEIKEIRGGNVVLAQCRLAMTGSKNYTQPFYNDIVLVHNGEIYNHESLRKWLIERGASFESDVDSEVILRLLEYFIFDKKMKVEEAVKKAMLMLRGDYAVAFALNGKIYLFRDPIGVRPLYYSPRGRFGSEKKVLWSVGEEAIPVNPGELVKLPEEEKMKLLSPWDIKGSGKGYYDGLKNLLQDAVRIRTAKKVGVLFSGGLDSSLIALLASKYSKVVLYTAGTEDSKDVEWARKVSDELRLELREYIFTREEVEREIKNVMFAIEEPNPMNLAIAIPLYFATKLARKDDVKVLLSGQGADELFGGYAKYLENPSLMRKDIEEIAERNLGRDDKVGMLNGVEVRYPYLDLPFVSLALRVPLEEKIREGVRKAILRRIALDFGLPEEVAFREKKAAQYGSNAQKILSKIAKKSLREFAQKLFSEVFST

SEQ ID NO: 2401 - protein, 525 aa, Zea mays
  unsure (1)..(525): unsure at all Xaa locations
MKPPSLVHCFKLLVLLALARLTMHVPDEDMLSPLGALRLDGHFSFHDVSAMARDFGNQCSFLPAAVLHPGSVSDIAATVRHVFSLGEGSPLTVAARGHGHSLMGQSQAAXGIVVRMESLRGARLQVHDGGVSPPSVDAPGGELWINVLRETLKHGLAPKSWTDYLHLTVGGTLSNAGVSGQAFRHGPQVSNVNQLEIVTGRGDVVTCSPDDNADLFYAALGGLGQFGIITRARIALEPAPXMVRXWIRVLNRDEESFTEDQEMLIMAENSFDYXEGFVIKNRTGVLNTWRAFFKPQDPVEASHFQSDGRVLYCREPRGRPGSGDTDTMEQEVTVLLSRLRFIQSTLFHTDVTYLEFLDRVHTSELKLRAQGLWEVPHPWLNLLIPRSSIRRFAKEVFGRILKDSNNGPILLYPVNKSKWDNKTSVVIPDEEIFYLVGFLSSAPSLSGHGSIAHAMSLNSQIVEFCEEADIGMKQYLAHYTTQEQWKTHFGARWETFERRKHRYDPLAILAPGQRIFPKASLPLSL

SEQ ID NO: 2402 - protein, 384 aa, Rickettsia sp. Chad
DSEFAELKIRGKIFKLPILKASIGEDVIDISRVSAEADCFTYDPGFMSTASCQSTITYIDGDKGILRHRGYDIKDLAEKSDFLEVAYLLIYGELPSGEQYNNFTKQVAHHSLVNERLHYLFQTFCSSSHPMAIMLAAVGSLSAFYPDLLNFKEADYELTAIRMIAKIPTIAAMSYKYSIGQPFIYPDNSLDFTENFLHMMFATPCTKYTVNPIIKNALNKIFILHADHEQNASTSTVRIAGSSGANPFACISTGIASLWGPAHGGANEAVINMLKEIGSSEYIPKYIAKAKDKNDPFRLMGFGHRVYKNYDPRAAVLKETCKEVLKALGQLDNNPLLQIAIELEAIALKDEYFVERKLYPNVDFYSGIIYKAMGIPSQMFTVLL

SEQ ID NO: 2403 - protein, 177 aa, Magnetospirillum magnetotacticum MS-1
MVPRHRCLWGPAHGGANEAALKMLMEIGHPENVSKYVAKAKDKNDPFRLMGFGHRVYKNYDPRARIMQKTTHEVLNELGLKDDLLEVAVQLEKIALEDEYFIEKKLYPNIDFYSGITLKALGFPTSMFTVLFAVARTVGWIAQWAEMIEDPSQKIGRPRQLYVGPDRRDYVAIGQRS

SEQ ID NO: 2404 - protein, 416 aa, Claviceps purpurea
MTDIPGRRAFKCFNQEFVVDERYTVTKELGQGAYGIVCAAVNNQTKESVAVKKVTNVFSKKILAKRALREIKLLQHFRGHRNITCLYDMDIPRPDVFNETYLYEELMECDLAAIIRSGQPLTDAHFQSFIYQILSGLKYIHSANVLHRDLKPGNLLVNADCELKICDFGLARGFSADPEQNAGYMTEYVATRWYRAPEIMLSFQSYTKAIDVWSVGCILAELLGSRPFFKGRDYVDQLNQILHVLGTPNEETLSRIGSPRAQEYVRNLPVMPKKNFATLFPQANPHALDLLDKMLAFDPSSRISVEQALEHPYLQVWHDPADEPNCPTIFNFDFEVLDDVGEMRKVILDEVIRFRQMVRTASSAEPTTGQAQTAAAGQVPMPQAGGQWKAEDPRPQENTPQGNGLEQDLQAGLDAA

SEQ ID NO: 2405 - protein, 112 aa, Bartonella sp. St2936co
GPAHGGANEACLKMLQEIGSVKRIPEFIARAKDKNDPFRLMGFGHRVYKNYDPRAKIMQQTCHEVLKELNIQDDPLLDIAIELENIALNDEYFVEKRLYPNVDFYSGITLKA

SEQ ID NO: 2406 - protein, 317 aa, Burkholderia fungorum LB400
MEPELKALIEQLSQAGRRPFWQCTVDDARNAPTLVKRLFPDAPSVERTQDIRISSTRGHAFPARLYVPRDRPCGLIVYLHGGGWVVGSVDDYHPLTATITARSGFAVLSVDYRLAPEHAFPIPLEDARAALEWASSGSAAVAIGADVNCLIVMGDSAGANLATVAARLHNEKNIDRRVDGQVLVYPVTGHDFKTASYDEFAEGNLLTRNDMQWFWDHYCPERAARANPLASPLEAEDLSMSPPALVMTAGRDPLRDEGEAYGARLRKAGVDVAVVRCDGLVHGFLAMIHQVPGAARAFDRIVDYITRLGEAVPEARR

SEQ ID NO: 2407 - protein, 124 aa, Glycine max
MSSEAETQQPPAAPPVAPALSAADTKPGTTGSGAGSGGPGGLTSAAPAGGDKKVIATKVLGTVKWFNVRNGYGFINRNDTKEDVFVHQTAIKKNNPRKYLRSVGDGETVEFDVVEGEKGAEAAN

SEQ ID NO: 2408 - protein, 484 aa, Agrobacterium tumefaciens
MIKLKNAALLRDACLVNGRWLKAADGKTIAVENPANSMIIGHVPSLSADEVEAAVESANKAFSEWSRRAAKDRAAILRRWFDLMVANADDLGALMTAEQGKPFAEARGEALYAASFVEWFAEEAKRVYGDTIPSPTTDKRITILKQPIGVCAAITPWNFPAAMITRKAAPALAAGCTMIVKPAEQTPLTALALGVLAEEAGVPAGVFQVVTGAARDIGKVFTESDTVRKISFTGSTEVGRLLMAQSAPTIKKLSLELGGNAPFIVFDDADLDAAVEGAIVSKYRNAGQTCVCSNRIYVQDGVYDAFAEKLVKRVESLSVGEGTEPGVLIGPLIDQDAVAKVEDHVADALGKGAKIVTGGKRHALGGTFYEPTVLTGATQAMKVAREETFGPVAPLFRFGTEDEAVAMANDTEFGLAAYFYTENVRRTWRVAEALEYGMVGHNTGLISNEVAPFGGVKQSGLGREGSHYGIDEYLEIKYLCSAIG

SEQ ID NO: 2409 - protein, 373 aa, Sulfolobus tokodaii str. 7
MEIKKGLEDVYVKETEITYIDGELGRLYYRGYSIYDLAEFSNFEEVSYLILYGKLPNREELNWFQEKLREERYLPDFIIKFLREVRKDAQPMDILRTAVSLLGIEDSKNDERTDIKGIKLISKFPTIVANYARLRKGLDIIEPDPKLSHSENFLYMLYGDRPNEIKSKAMDVTLILHIDHEMNASTFASLVVASTFSDLYSSIVAGISALKGPLHGGANYEALKMFKEIGSPEKVNDYILNRLSNKQRIMGFGHRVYKTYDPRARILKQYAKLLAEKEGGEIYTLYQIAEKVEEIGIKYLGPKGIYPNVDFFSSIVFYSLGFEPDFFPAVFASARVVGWVAHIMEYIKDNKIIRPKAYYKGEIGKKYIPIDSR

SEQ ID NO: 2410 - protein, 312 aa, Triticum aestivum
  unsure (1)..(312): unsure at all Xaa locations
ISKDRKATSRRSNPSGRRRGEGASRLACGRVGLSARHAAPMPPPRRAAGDTSAFFVATLVLWAVSVGFEIGARGRRELAXPVAAGCAFFQAANTAAVSRDPLFVNTAVSLLHSSLTSASVIFVLLCQWRTKGLENMFQHEELVGSSWIGAYSALCFSCGYFAYDQLDMLRYRLYSGWIPGILMHHLILLICFTLALYRNVTINYLILTLLCEMHSIFLHVRKLRRMAGFRDFNRKLVKLEWVLNWTTFVTARVICHILITYRLITDAHKFDKGIELPLALSGMAGMNVLNVSLGLDLFKAFARERNQQTHQD

SEQ ID NO: 2411 - protein, 322 aa, Pediococcus pentosaceus ATCC 25745
MKRIGIMTSGGDAPGMNLAIRAVARKALSSGLEAYGINYGFAGLVAGDIHEFKAADLDDMVSQGGTMLYSARYPEFAQEESQLKGIEQLKKFGIDALVVIGGDGSYHGALRLTEHGYNTIGLPGTIDNDIPFTDFTIGFDTALNTAVDAIDKIRDTAKSHQRVFAVQVMGRNAADIALWAGVASGADAVIAPGFDYDVEAIANKLKKNRANGKDYGIIVIAEGDANSDAAPEFIDQLKQYGDFDARATVIGHVQRGGVPSAKDRVLASKMGAYAVELLLEGKGGLAVGILENKVQAHNMLDLFDAKHQADDSLYQLSEDLSF

SEQ ID NO: 2412 - protein, 294 aa, Schizosaccharomyces pombe
MPFIKAVKSSPYFSRYQTKYRRRREGKTDYYARKRLIAQAKNKYNAPKYRLVVRFSNRFVTCQIVSSRVNGDYVLAHAHSSELPRYGIKWGLANWTAAYATGLLVARRALAKVGLADKYEGVTEPEGEFELTEAIEDGPRPFKVFLDVGLKRTSTGSRVFGAMKGASDGGLFIPHSPNRFPGFDIETEELDDETLRKYIYGGHVAEYMEMLIDDDEERYQKQFSGLIADGIESDQLEDIYAEAYAKIREDPSFQKSGKDAAAFKAESLKHTQRKLTAEERKERFNAKVIEAGRA

SEQ ID NO: 2413 - protein, 342 aa, Pyrobaculum aerophilum str. IM2
MRIFKTPGPIKYINCLLTAAMYFPGLEGVVVKETKICHIDLENSKIYYRGYDLEELAQYSTFEEVAYLLWFGKLPAGAELERFKAELMMYRKPPEHVDEAVKIAPKNAEPIDVLRTAVSAMALGEDLSDRSPEAELVRGLKITAAMPYIVASFDRLRRGSQPLHPGEAKSHAEYFLWALRGERPGEREVRALDVMLIIYAEHSMNNSAFTAVTVASTLSDMYAAITAAIASLKGPLHGGANVDAAKMLEEIGDAKRVESWVDQQLSRGRRIPGFGHRLYKKGPDPRLRVLRKLARDLASEKGDFKWVELAERLEEYVTAHLSQKGIYPNTDLYAAVIFKYLG

SEQ ID NO: 2414 - protein, 203 aa, Triticum aestivum
  unsure (1)..(203): unsure at all Xaa locations
MFIKRTSSTRRHTPPHLPPDSGGSSEMSDTDEHHFESKADSGASKTYPQQAGAIRKGGHIVIKARPCKVVEVSTSKTGKHGHAKCHFVAIDIFNGKKLEDIVPSSHNCDVPHVDRQDYQXLIDITDDGYVSLLTESGNTKDDLKLPTDDVLLXKIKTGFADGKDLDPVCGCPPWVKEQICAVEGNGGGKLAAVRGLLPAILGI

SEQ ID NO: 2415 - protein, 386 aa, Aspergillus flavus
MTGLDMEIIFAKIKEEYARTDDVGKRKIQGHIRELQVGFYSDWDVVMRLSSGPLQVALAKVGIDLGIFRSLKKSDTPITLAEFVKKTGASPRLLGRILRTQAAFGLIKETGPQEYTSSAFTDVFANPAAAGAVVQLFDISGPCTQILPDFLAERHYQDITSNKDCVFQKAFDSDLTMFEWMPQHPKHMESLGHLMALERPVSWVDHFPVLEELGDFPAPDKVLMVDIGGGFGQQSKALRAKFPNIPGRVIVQDIPQTLANAQPAAGVEFMEHNFFEPQPIRNAKFYYLRHVFHDWPDEQCVLILKQIIPVMGPESQILIDEMVIPSTGVPWQAAFTDLLMMNSLGGVERTRAEWDDLMKQAGLEIIQSKVYDSKEQTILVAVPRRT

SEQ ID NO: 2416 - protein, 428 aa, Bacillus thuringiensis serovar konkukian str. 97-27
MNYLFKNGRYMNEEGKIVATDLLVQDGKIAKVAENITADNAEVIDVNGKLIAPGLVDVHVHLREPGGEHKETIETGTLAAAKGGFTTICAMPNTRPVPDCREHMEDLQNRIKEKAHVNVLPYGAITVRQAGSEMTDFETLKELGAFAFTDDGVGVQDASMMLAAMKRAAKLNMAVVAHCEENTLINKGCVHEGKFSEKHGLNGIPSVCESVHIARDILLAEAADCHYHVCHVSTKGSVRVIRDAKRAGIKVTAEVTPHHLVLCEDDIPSADPNFKMNPPLRGKEDHAALIEGLLDGTIDMIATDHAPHTAEEKAQGIERAPFGITGFETAFPLLYTNLVKKGIITLEQLIQFLTEKPADTFGLEAGRLKEGRTADITIIDLEQEEEIDPTTFLSKGKNTPFVGWKCQGWPVMTIVGGKIAWQKESALV

SEQ ID NO: 2417 - protein, 506 aa, Ralstonia solanacearum
MRYAHPGTPGAVVSFQSRYGNYIGGRFVPPVKGQYFTNTTPVTGEAIAEFPRSTAEDIDRALDAAHAAADAWGRTSAQDRSLILLKIADRIEQNLERLAVTETWDNGKPIRETLNADIPLAADHFRYFAGCIRAQEGAAAEINEHTVAYHIHEPLGVVGQIIPWNFPLLMAAWKLAPALAAGNCIVLKPAEQTPLGICVLLELIGDLLPPGVLNVVHGFGKEAGEALATSKRIAKIAFTGSTPVGSHILKCAAENIIPSTVELGGKSPNIYFEDIMQAESSFIEKAAEGLVLGFFNQGEVCTCPSRALVQESIYGSFMDAVMAKVAAIKRGDPLDTETMVGAQASEQQFNKIRTYLEIAREEGAECLAGGEAEAMSGKLANGYYIKPTLLKGHNNMRVFQEEIFGPVIAVTTFQDEAQAIQIANDTEYGLGAGVWTRDINRAYRVGRAIKAGRVWTNCYHLYPAHAAFGGYKKSGVGRETHKMMLDHYQQTKNLLVSYDTRPLGFF

SEQ ID NO: 2418 - protein, 319 aa, Burkholderia cepacia R18194
MGGLTVRVAAKREEAVGICSFELVSTDGQPMPAFSAGSHIDVAVPGGPTRQYSLCNAPEEGHRYQISILRDPNSRGGSAGMHDRVQVGDALAISVPKNNFPLAHDATRSLLMAGGIGVTPILCMAERLAAIGAPFEMHYCSRSRARTAFLDRISRATYARHVQFHFDDQPDTPAFDIAARLARPESGTHLYVCGPTGFMDAVLGAARAAGWPEAQLHYEFFAAGERVAADSDRFEVEVASSGQVVTVEEDESIVQALARVGIEIETSCEQGVCRTCETRVLAGEPDHRDVCLTPAERADNDRLMPCCSRSKSARLVLDL

SEQ ID NO: 2419 - protein, 104 aa, uncultured Rickettsia sp.
MLKEIGSSEYIPRYIAKAKDKNDPFRLMGFGHRVYKNYDPRAAVLKETCKEVLKELGQLDNNPLLQIAIELEAIALKDEYFIERKLYPNVDFYSGIIYKAMGIP

SEQ ID NO: 2420 - protein, 459 aa, Mesorhizobium loti MAFF303099
MTYQNYSLKQLQQIDAAHHLHPFTDHKELREAGSRIITHANGPFIYDSEGTELLDGMAGLWCVNIGYGRDELAEAAYAQMKELPYYNSFFKCSTPTPVLLSKKLAEIAPKNVNQVFYGSSGSEANDTALRLVRHYWVIEGKPEKNRVISRKMAYHGSTIAGTSLGGMDAMHKQLNGAVPNIVHVMMPYAYELALPGESDHDFGLRAAKSVEDAILEAGVDKVAAFIGEPVMGAGGVKIPPASYWPEVQRICRKYDVLLMLDEVITGYGRTGEWFAAQTFGIEPDTITTAKALTSGYQPLSALLVGDRITSTLVEKGGEFNHGYTYSGHPVACAVALKNLEIIEQEGLVDRVRNDTGPYFAKALQECIAGHDLVGEVRSIGLMGAIEIVKDKATKERFLPSGSAAVTVRDHAIANGMMLRATGDTMILSPPLIWTRDTIDMACERIGKALDLAQADLRKR

SEQ ID NO: 2421 - protein, 418 aa, Solanum tuberosum subsp. andigena
MVRNRREELYVTVPSLFRCPISMDVMKSPVSLCTGVTYDRSSIQTWLSQGHNTCPATMQILPSTDFIPNLTLRRLINVWIQHQPSSSPGYTTPSSSSVTKSEVVEIVKNLNGEVDRLSSLAKIVEFVKCSGENRRFFVNSSDAIVSVVGVLVDCDVGEVCEAVVAVLDLVVSENGVKEQLNKEILKSDRKFLPKFLLILRKGKLSSRIQTARILEFIALDADSQRKMIEEQGLLYELHVFTSTETNRFAIEAGLSTLIAVSTTRPAKKELVRFGIVQTIGKILSGSETARAVVEKSLKLLETVATCTEGRAAIVKGEECMSAIVTRLMKSSKAATEHGVTVLWSVCCLFRDTAARDVVGKANGLTKVLLVMQSDCSAAVRQMCGELVKALRVVNNKHKNYSKSCLASYDTKTTHIMPY

SEQ ID NO: 2422 - protein, 260 aa, Oryza sativa (japonica cultivar-group)
MTAANLDSEMGLIGEMMVQYPYVTIDVEFAGVVHHPPYTGSRPTPDEIYAALKSNVDEVPAVQIGITLSDAEGNLPTRSSSSPEQEIAWEVVFSDFDAGRDPHVVDSVEFLKNQGIDFDLARQIGVTSTAFGEKLLAILPPPSRRGELTWSAFGGAYDMGYLLKMLTGGQPLPETRQQFMQLVKSRLGGGRIFDSKYLVEHDRQDLRNAGLRHTADVLGVRQQEGVKMLAGHKSVVAAAIFATIRSQGVHLLHGVIDGIL

SEQ ID NO: 2423 - protein, 139 aa, Triticum aestivum
  unsure (1)..(139): unsure at all Xaa locations
MAPTVMASSATSVAPFQGLKSTAGLPVSRRSNGASLGSVSNGGRIRCMQVWPIEGIXKFETLSYLPPLSXEXLLKQVDYLIRSKWVPCLXFXKVGXQPSVEQXASPXVXRMARYWXMLGSPNVSGWRNAQHKGSTGDGG

SEQ ID NO: 2424 - protein, 136 aa, Glycine max
  unsure (1)..(136): unsure at all Xaa locations
ASSLISSPAATTVNRAGAGLVAPFTGLKSMAGFPTRKTNNDITSIASNGGRVRCMQVWPPIGKKKFETLSYLPYLDDAQLAKEVEYRVKKRLMPYLEFEVKHDCVYREHNRSPRCYNRLYXTMIKLAMFSCTEACQ

SEQ ID NO: 2425 - protein, 112 aa, Brassica napus
SQHHSWTNKKIMDTTRDNRKDMSFRGSAQAPMMSKQEYIRTSSQSSKPRKLVTASYFSLESVVVLVGLTASLLILPLILPPLPPPPFMLLLIPIGDYGSWLMGLGFLWPSFF

SEQ ID NO: 2426 - protein, 506 aa, Bacillus halodurans C-125
MVYKRPNEEGAVVSFKKRYDNYVNGEWTPPVKGQYFENVTPVTGEVFCEVARSTAEDIDLALDAAHAAKEQWGKTSPAERANLLNKIADRMEENLEKLAVAETWENGKPVRETLNADIPLAIDHFRYFAGAIRAQEGTLSQIDNDTVAYHFHEPLGVVGQIIPWNFPILMATWKLAPALAAGNCVILKPAEQTPASIFVLLELIEDLLPKGVVNIVNGFGVEAGKPLASSSRVAKVAFTGETTTGRLIMQYASENLIPVTLELGGKSPNIFFDDVMAKDDAFLNKAIEGFVLFALNQGEVCTCPSRALIQESIYDTFMERALARVQAIKQGNPLDPNTMIGAQASQEQLEKILSYLAIGKEEGAEVLAGGERNHLPGELANGYYVSPTVFKGTNDMRVFQEEIFGPVVSVTTFKDAEEALAIANDTLYGLGAGVWTRDMNKAYRFGREIQAGRVWTNCYHAYPAHAAFGGYKKSGIGRETHLMMLSHYQQTKNLLVSYSEDALGFF

SEQ ID NO: 2427 - protein, 453 aa, Oryza sativa (japonica cultivar-group)
MGGEEGMAAGRKKRVGRYEVGRTIGQGTFAKVKFAVDADTGAAVAMKVLDKDTILNHRMLHQIKREISIMKIVRHPNIVRLNEVLAGKTKIYIILELITGGELFDKIARQGKLRENEARKYFQQLIDAINYCHSKGVYHRDLKPENLLLDSRGNLKVSDFGLSTLAQKGVGLLHTTCGTPNYVAPEVLSNNGYDGSAADVWSCGVILYVLMAGYLPFEEDDLPTLYDKITAGQFSCPYWFSPGATSLIHRILDPNPKTRITIEQIREDTWFKKTYVAIKRGEDENVDLDDVQAVFDNIEDKYVSEQVTHNDGGPLVMNAFEMITLSQGLDLSALFDRQQEFVKRQTRFVSRKPAKTIVATIEVVAETMGLKVHSQNYKLRLEGVSSNRMSPFAVVLQVFEVAPSLFMVDVRKVAGDTLEYHRFYKNLCNKMESIIWRPIEVSAKSALLRTATC

SEQ ID NO: 2428 - protein, 1166 aa, Capsella rubella
MKQKWLFVLILCFFTALGIHGKRLINSDFDETALLMAFKQFSVKSDPNNVLGNWIYESGRGSCSWRGVSCSDDGRIVGLDLRNGGVTGTLNLANLTALPNLQNLYLQGNYFSSSSGGDSSSGSYCYLQVLDLSSNLISDYSLVDYVFSKCSNLVSVNFSNNKLVGKLGFAPSSLKSLTTVDFSYNILSEKIPESFISEFPASLKYLDLTHNNFSGDFSDLSFGMCGNLSFFSLSQNNISGVKFPISLPNCRFLETLNISRNNLAGKIPGGEYWGSFQNLKQLSLAHNRFSGEIPPELSLLCKTLETLDLSGNALSGELPSQFTACVWLQNLNIGNNYLSGDFLSTVVSKITRITYLYVAFNNISGSVPISLTNCTNLRVLDLSSNGFTGNVPSGLCSQQSSPVLEKLLIANNYLSGTVPVELGKCKSLKTIDLSFNELTGPIPKDVWMLPNLSDLVMWANNLTGSIPEGVCVKGGKLETIILNNNLLTGSIPQSISRCTNMIWISLSSNRLTGKIPTGIGNLSKLAILQLGNNSLSGNVPRQLGNCKSLIWLDLNSNNLTGDLPGELASQAGLVMPGSVSGKQFAFVRNEGGTDCRGAGGLVEFEGIRAERLERFPMVHSCPATRIYSGMTMYTFSANGSMIYFDISYNAVSGLIPPGYGNMGYLQVLNLGHNRITGNIPDSLGGLKAIGVLDLSHNDLQGYLPGSLGSLSFLSDLDVSNNNLTGPIPFGGQLTTFPVSRYANNSGLCGVPLRPCGSAPRRPITSSVHAKKQTLATAVIAGIAFSFMCLVMLFMALYRVRKVQKKELKREKYIESLPTSGSCSWKLSSVPEPLSINVATFEKPLRKLTFAHLLEATNGFSAETMVGSGGFGEVYKAQLRDGSVVAIKKLIRITGQGDREFMAEMETIGKIKHRNLVPLLGYCKVGEERLLVYEYMKWGSLETVLHEKSSKKGGIFLNWTARKKIAIGAARGLAFLHHSCIPHIIHRDMKSSNVLLDEDFEARVSDFGMARLVSALDTHLSVSTLAGTPGYVPPEYYQSFRCTAKGDVYSYGVILLELLSGKKPIDPGEFGEDNNLVGWAKQLYREKSGTEILDPELVTEKSGDAELFHYLKIASQCLDDRPFKRPTMIQVMAMFKELKADTEEDESLDEFSLKETPLVEESRDKEP

SEQ ID NO: 2429 - protein, 415 aa, Arabidopsis thaliana
MSPAIKAPLLPNQEPSSSSSENHGSFAGAVFNISTSIVGAGIMAIPAAFKVLAGFLMKSSLAGESTTYAGVMKESFGKSGAVAVTVVTMVVTFGSMIIFSIIIGDVISGNEKDGIIHLGLLQEWFGSHWWNTRFFERLAFSSAISFLLALLFVVISSVLAIIALVQGKTKPPRLFPELNDGGLSFFSLFTASPVIVTAFTFHFNGKKPRTKNFMVIAVHPVAFELKDPLNVLSATRISVILCATIYSATGLFCYLLFGDSTMTDVLMNFDQSTSSSVGSLLNDIVRLSYAIHLMLVFPLLNFSLRANLDELLFPMKLSLVEDNKRFFALTFPLLISCFLGAIAIPDIWYFFQFLGSTSTVSIAFIFPAAIVLRNVNGFSTLREKIVASVMLVLAVATSIIAISTNIYTFTATEET

SEQ ID NO: 2430 - protein, 165 aa, Triticum aestivum
MAQESLRLVCPPVSAHEGRLPRQYTLEGQGAKKDISPPLEWYGVPDGTRSLAVVVQDVDADERVPWTHWVVVNISPEEKGLPEGFSGAGGNANAGGGDGGVQEGVNDWKQPGWRGPVPDSHGHRIQFRLYALDDLLSLGNKVTVDKVMEAIEGHVLGEAEITAVF

SEQ ID NO: 2431 - protein, 322 aa, Ustilago maydis 521
MSKVTASGIISGNISTQRIKLNNGQEIPQVALGVYKAPNDGSTENACKWAFDAGYRHIDSAARYMNEESVGRALAEWTKENNVPRSEIFITSKLWDADHDKAAAAIEDSLKKLNVDYMDMYLMHSPGTMGAEKRLEAWKALEEAVDAGKIKTIGVSNFDVEELDHLLANCRIKPAVNQIESHPFFAHEELREACISRGIHIQAYSPMAQGQALDRPEIKTIASKHGKTPAQILLKWGLTHGNIILPKSLTKHRIESNAQLFDFELDSDDMDVLDNLDEGMKVGKLGPAGTSQPASPGGTRPGSRRSSGSGGLSGNKLQMSSS

SEQ ID NO: 2432 - protein, 487 aa, Oryza sativa (japonica cultivar-group)
MDPNSLKTGGLLLPTIERQCASPPSVIVIGGGISGVAAARALSNASFEVTVLESRDRVGGRVHTDYSFGCPIDMGASWLHGVCNENSLAPLIGYLGLKLYRTSGDNSVLYDHDLESYALFDKAGHQVSKETVAKVEETFERILDETVKVRDEQEHDMPLLQAISLVLERHPHLKLQGIDDQVLQWCVCRLEAWFAADADEISLKNWDQEHVLTGGHGLMVNGYYPIIQALAQGLDIRLNQRVTKIARQFNGVTVTTEDGTSYSADACIITVPLGVLKANIIKFEPELPSWKSSAIADLGVGIENKIAMHFDTVFWPNVEVLGMVGPTPKACGYFLNLHKATGNPVLVYMAAGRFAQEVEKLSDKEAVDLVMSHLKKMLPDATEPTKYLVSRWGSDPNSLGSYSCDLVGKPADVSARFAAPVENLYFAGEAASADHSGSVHGAYSSGIAAADECRKRILMQKGIPDLVQVKAYEEMAGVIAPLQICRT

SEQ ID NO: 2433 - protein, 309 aa, Brassica napus
  unsure (1)..(309): unsure at all Xaa locations
MDLDSMDCASTIDVTDDEEIHQDRHSYASVSKHHSNNSNANAASGLLPTTTSVHELLECPVCTNSMYPPIHQCHNGHTLCSLVKNRVHNRCPTCRQELGDIRCLALEKVAESLELPCKYMSLGCPEIFPYYSKLKHETVCNFRPYNCPYAGSECSVMGDIPFLVAHLRDDHKVDMHSGCTFNHRYVKSNPREVENATWMLTVFHCFGQYFCLHFEAFQLGMAPVYMAFLRFMGDETEAWNYNYSLEAGGFCRXLIWEGTPXSVRDSHRKVRDSHDGLIIQRNMALFFSGGDRKELKLLFTGGIWKELFL

SEQ ID NO: 2434 - protein, 318 aa, Pachysolen tannophilus
MTLQYYTLNNGRKIPAIGMGCWKLENAADMVYAAIKEGYRLFDCACDYGNEKEVGEGINRAIKDGLVKRKDLFITSKLWNNFHAKENVKKALMKSLSDFNLDYFDLYLMHFPISFKFVPFEEKYPPGFYCGDGDKFIYEDVPIIETWRAMENLVDEGLVKSIGVSNVSGGLLEDLIKAARIKPASLQIEHHPYLQQNKLVEYAQLKGIVVTGYSNFGPLSFLELGNETAKKTQPLYENKTITTIAAKHGKTPFQVLLRWVNQRGIAIIPKSTFPNTLAVNLHVDEFDLTKEDFEEIAKLDRHLRFNDPWTWDKIPTFV

SEQ ID NO: 2435 - protein, 337 aa, Bartonella schoenbuchensis
STASCESKITYIDGDEGVLLYHGYSIDQLAENGDFLEVCYLLLYGELPTKQEKDDFDRRIMHHTMVHEQFSRFFHGFRRDSHPMAVMVACLGAMSAFYHDSIDITDAKQRMIASIRLIAKVPTLAAMAYKYSIGQPFVYPRNDLGYAANFLHMCFSVPCEEYKVNPVLARAMDRIFTLHADHEQNASTSTVRLAGSSGANPFACIAAGVACLWGPAHGGANEACLKMLQEIGSIEKIPEFIARAKDKNDPFRLMGFGHRVYKNYDPRAKLMQKTCHEVLKELNIKDDPLLDIAMELEKIALSDEYFIEKKLYPNVDFYSGITLKALGFPTEMFTVLL

SEQ ID NO: 2436 - protein, 280 aa, Streptococcus agalactiae 2603V/R
METYTLSNTLNIPKIGFGTWQLTEGEEAYKAVTHALKVGYTHIDTAQIYGNEHSVGRAIRDSGLARESIFLTTKIWNDKHDYHLAKASIDESLQKLGVDYIDLLLIHWPNPKALRENDAWKAGNAGTWKAMEEAYKEGKVKAIGVSNFMKHHLEALFETAEIKPMVNQIILAPGCAQEDLVRFCKGNDILLEAYSPFGTGAIFENESIKAIAEKYGKSVAQVALRWSLDNGFLPLPKSATPKNIEANLDIFDFQLNEDDIATLIQLDSGIKPKDPDNVSF

SEQ ID NO: 2437 - protein, 295 aa, Oryza sativa (japonica cultivar-group)
MSATQPVSEVLIRRVTADNLAVEMLTIRSHLPYFPYITIHADYPVDNAAARHGRRRRRRRGGGRGNKRESEADERCYRLAKSRVDELDVLQLGITLCDHHGRLPATAIACPGGAAVAVEMAWQVGFSDFDVSQSAVDALRAAGVDLEHLRARGVPAAVFGQALRVFDIVSAANLGRLTWVAFGGLYDFGFLLKMLDGGRPLPETAEGFASRLRGHLGVVYDAKYVAARLPMDGVELRGGLVRVARVLGAPAAAVEEPRQAGEKSLVASQVFIRMTGLFFAYHDVAVHAGKIDGLE

SEQ ID NO: 2438 - protein, 503 aa, Schizosaccharomyces pombe
MSTKLVDHVEITVPTGKTYIQPVGLFINNQHVDSVHGGRVKVYSPSTEKLICEVADADEEDVDIAVKVARAAFQTDAPWRKFSSAQRGRCLSRLADCIEQNLEYLASIETLDNGKSITLARGDVQAAADCFRYYGGWADKDYGQTIETDIKRFAYTRHEPIGVCGQIIPWNFPFLMCAWKIAPAVACGNTIILKTAELTPLSALCLTKFVPECGFPPGVINVLSGDGRRCGNAISSHMDIDKVAFTGSTGVGRMVMRAAASSNLKKVTLELGGKSPNIVFNDADLDSAAVWTNYGIFYNSGQVCCAGSRVYVQEDVYDEFIKRMVAKAKTLKVGDPFAEDTFQGAQVSKQQYERIVSYIESGIAHGAKLEIGGKRHGNLGYFVEPTILSNVTEDMAVGKEEIFGPVLAVIKFKTIEEAIRRGNNSTYGLAAGVHTNNITNAIKVSNALEAGTVWVNCYNLLHHQIPFGGYKESGIGRELGSYGLTNYTQTKAVHINLGMDSPI

SEQ ID NO: 2439 - protein, 368 aa, Malus x domestica
MGKGGQSCNGMVRQAKPVEQENMAAWLVDVNTIKILPFKLPSIGPNDVRIRIKAVGICGSDVHYLKTMKCADFEVKEPMVIGHECAGIVDKVGSEVKHLVPGDRVAVEPGISCARCQQCKGGRYNLCPDMKFFATPPVHGSLANQIVHPADLCFKLPENVSLEEGAMCEPLSVGVHACRRANVGPETTVLIIGAGPIGLVSVLTARAFGAPRIVIVDMDDKRLAMAKSLGADEAVKVSTKMEDLDDEVAEIKKAMISEVDVTFDCVGFNKTMSTGLNATRPGGKVCLVGMGHGVMTVPLTPAAAREVDVVGVFRYQNTWPLCLEFLRSGKIDVKPLITHRFGFTEKEVEEAFATSARGGNAIKVMFKL

SEQ ID NO: 2440 - protein, 305 aa, Streptomyces griseus
MATQALGTALRLGVFDRIGTGELRAEALAGSLGTHPRATLRLLRALAGLQLLSEPEPGAFRTTAAGNVLRADAPGTMVAMARMFTDPVMLRGWDLLDESVRTGETTFDTVFGTDFFGHLREHPELSAAFNEAMSQGTRLTAETVPHHYDFGRFQRLVDIGGGDGTLLASILRAHQEPRGVLFDTAEGLAQAPRRLAREGLDGRVTLETGDFFASAPAGGDLYLLNSIIHDWDDAVRGHLRHIRDVIPDHGSLLIVEPVLPATVPADRPDNVYLSDLNMLVNVGGRERTADDFAALCTAGGFACGA

SEQ ID NO: 2441 - protein, 441 aa, Streptomyces netropsis
MSHSVTLPSTKDIIELERRHRLPGGQSMTDLAGIVVDRAVNAEVWDRDGKRYIDFFTGVGVSNIGHSHPAFLEELTTQLSRCAVGTFYTDVRSRYFALLAAQLPEQLGEIHMFSTGSEAVEAAVKLARAATGKHEIVSFWGGFHGKTQGALSLHGGPRKHRSGPFPPGSHQVPYADCHHCPLQLEHPECGQRCVDLAEQSIENGSVGDLAAVIVEPVQGTNGNIIPPEGYLRTLRQLADRHGALLILDEVITGFGRTGALFAFEHDPGIAPDVVVLGKAMASGVPASAIVSRSGLVEGTSFAVPSAAASTFGGNPLASAASLATLRVLLDERLPERSHELGKSVSDRLSAWREEFPFVGNADNIGLMIGVELVDPATRLPLPKGITRRLFQELMARGVLAMAYDSRIRLYPPLSIPTHHLEEGLAAFEGAFRAMAPAISRL

SEQ ID NO: 2442 - protein, 342 aa, Bartonella schoenbuchensis
DPGFTSTASCESKITYIDGDEGVLLYHGYSIDQLAENGDFLEVCYLLLYGELPTKQEKDDFDRRIMHHTMVHEQFSRFFHGFRRDSHPMAVMVACLGAMSAFYHDSIDITDAKQRMIASIRLIAKVPTLAAMAYKYSIGQPFVYPRNDLSYAANFLHMCFSVPCEEYKVNPVLARAMDRIFTLHADHEQNASTSTVRLAGSSGANPFACIAAGVACLWGPAHGGANEACLKMLQEIGSIEKIPEFIARAKDKNDPFRLMGFGHRVYKNYDPRAKLMQKTCHEVLKELNIKDDPLLDIAMELEKIALSDEYFIEKKLYPNVDFYSGITLKALGFPTEMFTVLL

SEQ ID NO: 2443 - protein, 502 aa, Burkholderia cepacia R18194
MLVDELHSRKNEVIDPSALRARLRDGALLETRAWLASGWQEGTDGRSFPVTNPATGDILARVASLGAAEVEQAIESSALAQQGWQKRTSHERAKLLRAWFDLILANADDLALIMTSEQGKPLAEARGEITYAASFVEWFAEEAKRVYGDVMPHPQGDKRILVIRQPIGVCAAITPWNFPAAMITRKVAPALAAGCSIIVRPADLTPLTALALAVLAERAGIPAGVLQVVCGPSREIGAVLTASPVVRKLSFTGSTEVGRVLMSQSSGTIKRLSLELGGNAPFIVFDDADLDAAIEGAMASKYRNSGQTCVCANRFLVQAGIHDRFVEALTRRVQALKVGNGIEPGVQQGPLIQKSACDHLNQLIDDAVSKGARIVTGGKGHPLGGTFFEPTVIADATPAMRLAREELFGPVGPVFRFDDEAEAIAMANDTEYGLAAYLYTRDNSRIWRVGEALEYGMVGLNTGVISNEVAPFGGVKQSGLGREGSRYGIEEYLEIKYMCSQV

SEQ ID NO: 2444 - protein, 341 aa, Bartonella schoenbuchensis
DPGFTSTASCESKITYIDGDEGVLLYHGYSIDQLAENGDFLEVCYLLLYGELPTKQEKDDFDRRIMHHTMVHEQFSRFFHGFRRDSHPMAVMVACLGAMSAFYHDSIDITDAKQRMIASIRLIAKVPTLAAMAYKYSIGQPFVYPRNDLSYAANFLHMCFSVPCEEYKVNPVLARAMDRIFTLHADHEQNASTSTVRLAGSSGANPFACIAAGVACLWGPAHGGANEACLKMLQEIGSIEKIPEFIARAKDKNDPFRLMGFGHRVYKNYDPRAKLMQKTCHEVLKELNIKDDPLLDIAMELEKIALSDEYFIEKKLYPNVDFYSGITLKALGFPTEMFTVL

SEQ ID NO: 2445 - protein, 324 aa, Burkholderia cepacia R18194
MHWLPLTEVADDARDAVRAFRELGGRHYGSFSVDQSRVNFVRACELNGLTGDEAVVHEDIDVPVAGGSIRVRLYRPPAGASADGNPLVVFIHGGGWVIGSVDTHDGICRHLARHGGCAVASVEYRLSPEHRWPVPLEDCEQALDYLTANAAALSINASRVILAGDSAGGNMATLIANAASVAGPAIIGQVLFYPVTDLTASLPSYRRIQGGFPLVAESMLWFREHYVPDGTPFDLPRLSPLLHAEGRRQPPMFMATVGLDPLCDEGIAYASCAARAGSQVEHHHLPGHHHGIVTAARAIPAARYLLDRAASFVRRLAEKDGCDA

SEQ ID NO: 2446 - protein, 181 aa, Crocosphaera watsonii WH 8501
MEQRGVTVWFTGLSGAGKTTITQALEKKLREAGYPLEILDGDIVRTNLTKGLGFSKEDRDTNIRRIGFVSQLLTRHGVIVLVSAISPYREIREEVKGKIGDFVEVFVNAPLNVCEDRDVKGLYQRARAGEIKSFTGIDDPYEPPLNPEVECRTDLETLEESVNKVWQKLEEMGYLAKPVAV

SEQ ID NO: 2447 - protein, 145 aa, uncultured Rickettsia sp.
ANEAVINMLKEIGSSENIPKYIAKAKDKNDPFRLIGFGHRVYKNYDPRAAVLKETCKEVLKELGQLENNPLLQIAIELEAIALKDEYFIERKLYPNVDFYSGIIYKAMGIPSQMFTVLFAIARTIGWMAQWKEMHEDPEQKISRP

SEQ ID NO: 2448 - protein, 283 aa, Burkholderia cepacia R18194
MQHLARAVRAPEAVVDVHGVEDLTVPGATGSLRARLYRPTQERNLPTVVYLHGGGFVIGDLDTHDNICRELARGANAVVVSVDYRLAPEHPYPAAADDAIAATKWVIANAGELGGSDVVAVAGDSAGGNLAAVVTQQLHADGISLSAQFLIYPAVAQDRAGFPSFKENGEGYFLDLETIAWFERHYVLDGTDREDPRLAPIRAKDLAGLPPAVILTAEFDPLRDEGEAYGRLLHASGVKVDTIRCDGMIHGFFDMGAISPGAQAWIEKGIASFRKVLGGAQHH

SEQ ID NO: 2449 - protein, 75 aa, Zea mays
  unsure (1)..(75): unsure at all Xaa locations
DVHYLREMRISHLVVKEPMVIGHXCAGLVEEVGAGVTHLFDGDRLALEPGVSCWRCRHCQGGRYNLCEDMIFFST

SEQ ID NO: 2450 - protein, 136 aa, uncultured Rickettsia sp.
ANEAVINMLKEIGSSENIPKYIAKAKDKNDPFRLIGFGHRVYKNYDPRAAVLKETCKEVLKELGQLENNPLLQIAIELEAIALKDEYFIERKLYPNVDFYSGIIYKAMGIPSQMFTVLFAIARTIGWMAQWKEMHE

SEQ ID NO: 2451 - protein, 134 aa, uncultured Rickettsia sp.
ANEAVINMLKEIGSSENIPKYIAKAKDKDDPFRLMGFGHRVYKNYDPRAAVLKETCKEVLKELGQLENNPLLQIAIELEASALKDEYFIERKLYPNVDFYSGIIYKAMGIPSQMFTVLFAIARTVGWMAQWKEM

SEQ ID NO: 2452 - protein, 125 aa, Betula pendula
LKQEPGTSEETEQFACTRYKAEYPIFQKIRCNGPDTAPLYKFLKASKTGFLGSRIKWNFSKVAFPCNQFLKQEPGTSEETEQFACTRYKAEYPIFQKIRCNGPDTAPLYKFLKASKTGFLGSRIK

SEQ ID NO: 2453 - protein, 297 aa, Glycine max
MVSSNCYYLALVCCCVLLLLNPTVGEQDEQNLVLQYHKGALLKGRITVNLLWYGSFTPIQRSTIVDFIKSLSSSPGAPLPSVAWWWKTTEKYNGGSTTLVVGKQILQQTYSLGKYLNGTQLLYLSSRFNDLNAINVVLTSNDVGVDGFCRSRCGTHGSINGKARIPYMWVGNSEAQCPGQCAWPFHQPAYGPQTPPLVAPNADVGVDGMVINIATLLAGTVTNPFNEGFYQGPPTAPLEAVSACTGIFGSGAYPGYPGRVLLDKTTGASYNAYGGNGRKYLLPAMWDPQTSACKTQV

SEQ ID NO: 2454 - protein, 53 aa, Brassica napus
MSALFNFHSFLTVVLLVICTCTYLKMQFPAILEQMTGFRGFFWKAARIGERLS

SEQ ID NO: 2455 - protein, 202 aa, Brassica napus
  unsure (1)..(202): unsure at all Xaa locations
MDNYDGTNLAEMRPKRRAGRKVFNETRHPVFRGIRRRNGDKWVCEVREPTHQQRIWLGTYPTADMAARAHDVAALALRGRSACLNFADSAWRLPVPESNHPDVIRRVAAEAAEMFRPTEYGSEITVLPSYGSEVYMGSGSGSEERNVYGYVEEEEEVSTTMMRLATEPLMSPPRSYMEGVTPNGYXKEEMSYEDMSLWSYRY

SEQ ID NO: 2456 - protein, 162 aa, Brassica napus
GHWNVTDVCNGLLGGFAAITGGCSVVEPWAAIICGFVAALVLLGCNKLAEKLKYDDPLEAAQLHGGCGAWGLIFTALFAREKYLNQIYGEKPGRPHGLFMGGGGKLLGAQLIQILVITGWVSATMGTLFFILKKMKLLRISAEDEMAGMDTTRHGGSAYMYY

SEQ ID NO: 2457 - protein, 355 aa, Gibberella fujikuroi
MSRSNPPNAAGSRKISFNVSEQYDIQDVVGEGAYGVVCSAIHKPSGQKVAIKKITPFDHSMFCLRTLREMKLLRYFNHENIISILDIQKPRNYESFNEVYLIQELMETDMHRVIRTQDLSDDHCQYFIYQTLRALKAMHSANVLHRDLKPSNLLLNANCDLKVCDFGLARSAASQEDNSGFMTEYVATRWYRAPEIMLTFKEYTKAIDVWSVGCILAEMLSGKPLFPGKDYHHQLTLILDVLGTPTMEDYYGIKSRRAREYIRSLPFKKKVPFRTLFPQDLGSALDLLEKLLAFNPVKRITVEEALKHPYLEPYHDPEDEPTAPPIPEEFFDFDKHKDNLSKEQLKQLIYQEIMR

SEQ ID NO: 2458 - protein, 83 aa, Triticum aestivum
RRAAIPFVPACVAVRGTRSNPCRCKVVGPTLGFVAFVVTGVVEWPLGAAVYLFRRRKGRRIMGHPARVVYPRVTTAIPISSSS

SEQ ID NO: 2459 - protein, 428 aa, GIBBERELLA ZEAE PH-1
MAPVATGETAPAHLPVGSPKPLSISASVLHGPRDLRMETRIIEAPAAGELQIAVKATGICGSDVSYYKKFANGDLCACHPLSLGHESSGEVVAIGPQVNGFKLGDRVALEVGVACGNCGTCRKGRYNLCKKLRFRSSAKTYPHYQGTLQERINHPAVWCHKLPDNVSYEAAALLEPLSVAIHAVNRARPEPGSTAIVIGAGTVGLLTAAMARQSGCTSVTITDIDAGRVNYAVSQGFATHGFVTPISRLNSSNYSSGISTPATGALTPASTFSTASRFDGAKSLAADILASSNSPGSFILEEDEDGVDVTFECTGKEVCMHTSLYTTKAGGKVIMVGMGTPIQTLPLSVAHLREIDILGVFRYSNTYPTGIRLLCSQAANPSGCGLPSLDGMVTHRFKGLDKAQAAFELATRTSDDEGNLVLKIVIEA

SEQ ID NO: 2460 - protein, 240 aa, Medicago sativa
RGKIQIKRIENTTNRQVIFSKRRNGLLKKAKELAILCDAEVGVMIFSSTAKLYDFASTSLRSVIGRYNKSKEEHNQLGSTASEIKFGQREAAVLRQQLHNLQESHRQIMGEELSGLTVKELQGLENQLEISLRGVRMKKEQLFMDEIQELNRKGDIIHQENVELYRKVYGTKDKNGTNRVLSLTNGVGIGDDSNRTCESPAQPATETRTTTALMHSLEISVLTCKQGKWTQILISYMNGI

SEQ ID NO: 2461 - protein, 200 aa, Vicia faba
MATIGHNNLNAKLVLLGDMGAGKSSLVLRFVKGQFLEFQESTIGAAFFSQTLAVNDATVKFEIWDTAGQERYHSLAPMYYRGAAAAIIVYDITSSDSFTRAKKWVQELQKQGNPNMVMALTGNKSDLEDKRKVTAEEARVYAEENGLFFMETSAKSAANVNDVFYEIAKRLPRAQPAQNPAGMVLVDRPTEGSRAASCCS

SEQ ID NO: 2462 - protein, 173 aa, Methanococcoides burtonii DSM 6242
MATGPRYKVAFRRRREGRTDYHQRLRLLLSREDRVVVRKSARHMQIQLVAPDANGDVTLSSAISKELAKYGYEGSTGNTTAAYLTGLLFGYKTLAEGYESGVLDIGIQASSAGSRVYAALKGVVDSGLDVPHNSSVFPSDERIRGEHVAEYMEGSNLPEVFDAVKEKILAEFS

SEQ ID NO: 2463 - protein, 492 aa, Oryza sativa (japonica cultivar-group)
MDQPSNGFAAGGLFLRHIDGQNASPPSVIVIGGGISGIAAARALSNASFKVTLLESRDRLGGRVHTDYSFGCPIDMGASWLHGVCNENSLAPLIRLLGLRLYRTSGDNSVLYDHDLESYALFDKDGRQVPQEIVTKVGETFEKILKETVKVRAEHEDDMPLIQAISIVLDRNPHLKLDGLQYEVLQWCICRLEAWFATDVDNISLKNWDQEHVLTGGHGLMVHGYDPVIKALAQDLDIHLNHRVTKIIQRYNKTIVCVEDGTSFVADAAIITVPLGVLKANIIKFEPELPDWKLSSISDLGIGIENKIALRFNSVFWPNVEVLGRVAPTSNACGYFLNLHKATGHPVLVCMVAGRFAYEFEKLSDEESVNFVMSQLKKMLPGATEPVQYLVSRWGTDPNSLGSYSCDLVGKPADLYERFCAPVGNLFFAGEAACIDHSGSVHGAYSSGIVAAEDCRRHLSTQLGISDLFQVGKIIMREEMTEVMVPFQISRL

SEQ ID NO: 2464 - protein, 181 aa, Rumex obtusifolius
MASSIMSSATVARPSAAQATVIAPFTGLKNIATFPTTRKSSDLSFPSNGGKVRCMQVWPPEGKIKFETLSYLPPLSEADLLAQINYLLINGWVPCLEFDVGPGAVYREHHHSPGYYDGRYWTMWKLPMFGCTDATQVVAELEEAKKAYPHAFVRIIGFDNVRQVQCVSFIAYKPPRAEGTY

SEQ ID NO: 2465 - protein, 198 aa, Triticum aestivum
TGGPFGTMKNPGEQSHAANAGLDIAVRLLDPIKDQLPILSYADFYQLAGVVAVEVTGGPEVPFHPGRQDKPEPPPEGRLPDATQGSDHLRQVFSAQMGLSDKDIVALSGGHTLGRCHKERSGFEGAWTSNPLIFDNSYFTELVSGEKEGLLQLPSDKALMADPAFRPLVEKYAADEDAFFADYAEAHLKLSELGFAEA

SEQ ID NO: 2466 - protein, 144 aa, Thinopyrum elongatum
MANSVSGVAVNEECVKVFQELRAERKHRFVVYKMDDDEDAQQVVVDKVGALDATFDDLAAAMPADDCRYAVYDLDFVSEDSAGDTPRSKIFFIHWSPEAADARSKMVYASSTEGLKKELDGVQIDVQATDASELTLDILKDYTT

SEQ ID NO: 2467 - protein, 122 aa, Atropa belladonna
MIQPQTHLNVADNSGARELMCIRIIGASNRRYAHIGDVIVAVIKEAVPNMPLERSEIVRAVIVRTCKELKRDNGMIIRYDDNAAVVIDQEGNPKGTRIFGAIARELRELNFTKIVSLAPEVL

SEQ ID NO: 2468 - protein, 344 aa, Bartonella schoenbuchensis
DPGFTSTASCESKITYIDGDKGVLLYHGYSIDQLAENGDFLEVCYLLLYGELPTQQEKADFDRRIMHHTMVHEQFSRFFHGFRRDSHPMAVMVACLGAMSAFYHDSIDITDAKQRMIASIRLIAKVPTLAAMAYKYSIGQPFVYPRNDLGYAANFLHMCFSVPCEEYKVNPVLARAMDRIFTLHADHEQNASTSTVRLAGSSGANPFACIAAGVACLWGPAHGGANEACLKMLQEIGSIEKIPEFIARAKDKNDPFRLMGFGHRVYKNYDPRAKLMQKTCHEVLKELNIKDDPLLDIAMELEKIALSDEYFIEKKLYPNVDFYSGITLKALGFPTEMFTVLFHL

SEQ ID NO: 2469 - protein, 359 aa, Hortaea werneckii
MAEFVRAQIFGTTFEITSRYTDLQPVGMGAFGLVCSAKDQLTSQAVAVKKIMKPFSTPVLSKRTYRELKLLKHLRHENIICLSDIFISPLEDMYVVTELLGTDLHRLLTSRPLEKQFIQYFLYQILRGLKYVHSAGVVHRDLKPSNILINENCDLKICDFGLARIQDPQMTGYVSTRYYRAPEIMLTWQKYDVEVDIWSAGCIFAEMLEGKPLFPGKDHVNQFSIITELLGTPPDDVIATICSENTLRFVQSLPKRERQPLKNKFKNADPQAIELLERMLVFDPRKRVKAGEALADPYLAPYHDPTDEPEAQEKFDWSFNDADLPVDTWKIMMYSEILDFHNVDANAEQAAHNNDTVAG

SEQ ID NO: 2470 - protein, 128 aa, uncultured bacterium
MPQLGLGVWKASNEEVISAIHKALEVGYRSIDTAAAYKNEEGVGKALRDSGLPREALFITTKLWNDDQKRPREALLESMEKLQLDYLDLYLMHWPVPAIDHYVEAWENMIDLQKQGLIKSIGVCNFQI

SEQ ID NO: 2471 - protein, 466 aa, Escherichia coli O157:H7 EDL933
MDQKLLTDFRSELLDSRFGAKAISTIAESKRFPLHEMRDDVAFQIINDELYLDGNARQNLATFCQTWDDENVHKLMDLSINKNWIDKEEYPQSAAIDLRCVNMVADLWHAPAPKNGQAVGTNTIGSSEACMLGGMAMKWRWRKRMEAAGKPTDKPNLVCGPVQICWHKFARYWDVELREIPMRPGQLFMDPKRMIEACDENTIGVVPTFGVTYTGNYEFPQPLHDALDKFQADTGIDIDMHIDAASGGFLAPFVAPDIVWDFRLPRVKSISASGHKFGLAPLGCGWVIWRDEEALPQELVFNVDYLGGQIGTFAINFSRPAGQVIAQYYEFLRLGREGYTKVQNASYQVAAYLADEIAKLGPYEFICTGRPDEGIPAVCFKLKEGEDPGYTLYDLSERLRLRGWQVPAFTLGGEATDIVVMRIMCRRGFEMDFAELLLEDYKASLKYLSDHPKLQGIAQQNSFKHT

SEQ ID NO: 2472 - protein, 506 aa, Vibrio vulnificus YJ016
MIYAQPGSDNAVVNFKSHYDNYIGGEWVKPVSGEYFDNISPVNGQAYCKVARSSAADINLALDAAHSVRYQWAKTSVTERANILLKIADRIEAHLEELAVAETWENGKPVRETLAADLPLVVDHFRYFAGCIRAQEGSAAELDANTASYHFPEPIGVVGQIIPWNFPMLMAAWKLAPALAAGCCVVLKPAEQTPTSILVLMEKIGDLIPAGVVNVVNGFGAEAGQALATSNRIAKLAFTGSTEVGNHILKCAAESLIPSTVELGGKSPNIYFPDVFDHEDAYLDKCIEGTLLAFFNQGEVCTCPSRVLVHESIYDQFIAKVAERAKSIKQGNPLDTDTQVGAQASQEQFDKILSYLEIGRQEGAKVVFGGEIAKQEDDLATGYYIQPTLLQGHNKMRVFQEEIFGPVIAVTTFKDEAEALAIANDTEYGLGAGVWTRDQNLAYRMGRNIEAGRIWINCYHAYPAHAAFGGYKKSGIGRETHKMMLNHYQNTKNLLISYDVNPLGFF

SEQ ID NO: 2473 - protein, 75 aa, Triticum aestivum
VIRRVYQLTGIADERYVTVVAQSGYNKDVLKLSTEDVLPGQIKQGFADGKDVILSGMSSKGEEHICGKMEIAGGK

SEQ ID NO: 2474 - protein, 284 aa, Malus x domestica
ILPFKLPAIGPNDVQIRIKAVGICGSDVHYLKTMKCADFEVKEPMVIGHECAGIVDKVGSEVKHLVPGDRVAVEPGISCAHCQQCKGGRYNLCPDMKFFATPPVHGALANQIVHPADLCFKLPENVSLEEGAMCEPLSVGVHACRRANVGPETTVLIIGAGPIGLVSVLAARAFGAPRIVIVDMDDKRLAMAKSLGADDTVKVSTKMEDLDDEVAEIKKAMISEVDVTFDCVGFNKTMATGLNATRPGGKVCLVGMGHGLMTVPLTPAAAREVDVVGVFRYKNT

SEQ ID NO: 2475 - protein, 246 aa, Triticum aestivum
MARGREGEVRNLVLGKYELGRMLGQGSFAKVYYGRDLRDGQSVAIKVIDKAHLRQTDGMVEQLRREISIMRMVRHPNVVGIREVLASRQRVFVVMEYARGGELFAKVARGRLTEDAARKYFQQLVAAVAFCHSRGVAHRDLKPENLLLDEEGRLKVTDFGLAALPEQLRHDGLLHTQCGTPAYVAPEVLRKRGYDGARADMWSCGVVLYVLLCGFLPFQHDNYVKMYQKIFKGEYQMPPWVSGEAR

SEQ ID NO: 2476 - protein, 314 aa, Aspergillus nomius
METPFAAPWQQFVEDLGQTPCLPGKDLKSVLTGWGQLAGTLATRYGFPPPDESVTTEDVQLDGLWLRCYTPPNATGQGPVGLYFHGGGWVMGGVKEEDGFCRIISRQCQMRLVSVEYRKAPETRYPGALNDGVRAALWALSRYGNHPLVLMGTSAGGNLAFGTALRLIDQDMAGKVGGVVALAPITVHPDAVPDHLKEQYTAYEENAELTVNSRAAMQVFFDCYNAPVDDVYTSCLLHPRLLALPKVYIAELGLDTLRDDARLMKGALDTAKVPVMYDAYPGYPHCSFMFPFQSLGEHQKAFLEAVAKAVRWMS

SEQ ID NO: 2477 - protein, 357 aa, Triticum aestivum
  unsure (1)..(357): unsure at all Xaa locations
MKTLLILTILAMAITISTXANMQVDPSGQVQWPQQQLVPQPQQPLSQQPQQXLPQPQQTFPHQPQQQVPQPQQPQQPFLQPQQAFPQQPQQPFPQTQQPQQPFPQQPQQPFPQTQQPQQPFPQQPQQPFPQQSQQPFPQTQQQPQPFPQQPQQPFPQTQQPQQPFPQFQQPHQPFPQPQQQFPQPQQPQQSFPQQQRPFIQPSLQQRLNPCKNILLQQCKPASLVSSLWSIIWPQSDCQVMQQQCCQELAQIPQQLQCAAIHSVVHSIIVQQQQQQQQQQQQQGMHILLPLSQQQQLGQGTLVQGQGIIQPQQLAQLEAIRSLVLQTLPTMCNVYVPPECSIIRAPFASIVAGIGGQ

SEQ ID NO: 2478 - protein, 239 aa, Triticum aestivum
RAGLFINNEFVKAVDGKTFEVINPSTEEVICNVAEATEKDVDIAVAAARKAFNGPWRKETPENRGKLLVKLADLFEKNADLLASVEALDNGKAFSMARNVDIPAAAGCLRYYGGWADKIEGKVVDTAPDSFNYIRKEPIGVCGQIIPWNFPILMWSWKIGPAIATGNTVVIKTAEQTPLSAYVACKLIQEAGFPPGVINVITGFGKVAGAAISAHMDVDKVAFTGSTVVGRQIMKAAAG

SEQ ID NO: 2479 - protein, 204 aa, Xylella fastidiosa Dixon
MHLISNDFKNGQPIPVECAAGQTDGFAPNRNPHLAWDDVPENTRSFALLCIDPDVPSIPETIGRTDMEIPVTQPRIDFVHWVMTDISTNLRMIAHGSCSDGFVVGGKTMPPGPAGTHQGLNDYTKFFANTPEMAGDYYGYDGPYPPFNDLRIHRYLFRLFALDLEHLPLPKRFDGPTLLRTIQGHVLTEATLYGTYTLNPKAQE

SEQ ID NO: 2480 - protein, 106 aa, uncultured Rickettsia sp.
MLKETGSSENIPKYIAKAKDKNDPFRLIGFGHRVYKNYDPRAAVLKETCKEVLKELGQLENNPLLQIAIELEAIALKDEYFIERKLYPNVDFYSGIIYKAMGIPSQ

SEQ ID NO: 2481 - protein, 174 aa, Schizosaccharomyces pombe
MGQSQSQIFEDLISNSSFSNEEIERIRKRFIKIDANQSGSIDRNEFLSIPSVASNPLASRLFSVVDEDGGGDVDFQEFINSLSVFSVHGNKEEKLKFAFKIYDIDRDGYISNGELYLVLKMMVGTNLREDQLQQIVDKTIMEVDKDRDGKISFEEFKDIVSGSNVTSSMTLDSF

SEQ ID NO: 2482 - protein, 486 aa, Burkholderia cepacia R18194
MPIFEAEHLRKAFIGGRWVAPANGGVEHDIINPATGEVSGVLLFSDEADVNLAAEAARDAFAAFSNTPLVERLKLLERVIGAYTERLQDMADAITLEMGAPMDAISRPLQAALGLWHLHTTLEVAKQYPFERTQGTSRIVKEPVGVCGLITPWNWPMNQVMCKVAPALVAGCTIVLKPSQNAPYSAIVLAEILEKAGVPPGVFNLVQGAGQRLGRAIASSPLFDMVSLTGSTSAGVEVAQAAATTIKRVTLELGGKSANIILDSENFQQGVTHGVLQMMANSGQTCTAPSRMLVPAHRLEEAEQIAVAACGQVVVGDPRDPGTTMGPMANQRQHQKVQEMIRVGIDEGAMLLSGGLGNPSGLERGYYVKPTVFSRVNNRMKIATEEIFGPVLVIIPYRDESDAVTIANDSPYGLSGYVYGDSIEQAERVARKLRTGMVHLNGAAVDIAAPFGGYKQSGNGREWGYAGIEEFLETKSMFGATPGAVS

SEQ ID NO: 2483 - protein, 341 aa, Thermobifida fusca
MRVGVLTGGGDCPGLNAVIRAVVRKGIKEYGYEFVGFRDGWRGPLEGDTMPLDIEAVRGILPRGGTILGSSRTNLMKIEGGVERVKDNMAALGVDALVAIGGEDTLGVARQLHDHGVNVVGVPKTIDNDLNATDYTFGFDTAVNIATEAIDRLHTTAESHHRALVVEVMGRHAGWIALHAGMAAGANVILIPERPFDIDEVVAYIESRFKTNYAPIIVVAEGAHPKEGQLTLASAERDSFGHVRLGGIGQRLAEEIEARTGKEARSVVLGHVQRGGTPSAFDRVLATRLGLHAITAVHDKDFGKMVALRGTEIVRVDLSEATDQLKTVPVERYEEAEVFFG

SEQ ID NO: 2484 - protein, 106 aa, uncultured Rickettsia sp.
MLKEIGSSENIPKYIAKAKDKNDPFRLMGFGHRVYKNYDPRAAVLKETCKEVLKELEQLENNPLLQIAIELEAIALKDEYFIERKLYPNVDFYSGIIYQAMGIPSQ

SEQ ID NO: 2485 - protein, 500 aa, Arabidopsis thaliana
MVLSKTASKSDDSIHSTFASRYVRNSISRFEIPKNSIPKEAAYQIINDELKFDGNPRLNLASFVTTWMEPECDKLMMESINKNNVEMDQYPVTTDLQNRCVNMIARLFNAPLGDGEAAIGVGTVGSSEAVMLAGLAFKRQWQNKRKALGLPYDRPNIVTGANIQVCLEKFARYFEVELKEVKLREGYYVMDPDKAVEMVDENTICVVAILGSTLTGEFEDVKLLNDLLVEKNKKTGWDTPIHVDAASGGFIAPFLYPDLEWDFRLPLVKSINVSGHKYGLVYAGIGWVVWRTKTDLPDELIFHINYLGADQPTFTLNFSKGSSQVIAQYYQLIRLGFEGYRNVMDNCRENMMVLRQGLEKTGRFNIVSKENGVPLVAFSLKDSSRHNEFEVAEMLRRFGWIVPAYTMPADAQHVTVLRVVIREDFSRTLAERLVADFEKVLHELDTLPARVHAKMASGKVNGVKKTPEETQREVTAYWKKFVDTKTDKNGVPLVASITNQ

SEQ ID NO: 2486 - protein, 386 aa, Aspergillus nomius
MTGLDMESIFAKIKEEYARTDDVGKRQIQGHIRELQVGFYSDWDVVMRLSSGPLQVALAKVGIDLGIFRDLKESKTPITLAEFVKKTGASPRLLGRILRTQAAFGLIKETGPQEYTSSAFTDVFAKVDAAGAVAQLFDISGPCTQILPDFLAERDYRDITSNKDCVFQKAFNSDLTMFEWMPQHPKHMESLGHLMALERPVSWVDHFPVLEKLGDFPGPDKVLMVDIGGGFGQQSKALRAKFPNLPGRVIVQDIPQTLANAQPAAGVEFMEHSFFEPQPIQNAKFYYLRHVFHDWPDEQCVQILKQIIPAMGPDSQILIDEMVIPSTGVPWQAAFTDLLMMNSLGGVERTRAEWDNLLEQAGLEIIQSKVYDSKDQSILVAVPKRP

SEQ ID NO: 2487 - protein, 133 aa, uncultured Rickettsia sp.
ANEAVINMLKEIGSSENIPKYIAKAKDKNDPFRLMGFGHRVYKNYDPRAAVLKETCKEVLKELEQLENNPLLQIAIELEAIALKDEYFIERKLYPNVDFYSGIIYKAMGIPSQMFTVLFAIARTVGWMAQWKE

SEQ ID NO: 2488 - protein, 476 aa, Pseudomonas putida KT2440
MTTSHYIAGHWVEGQGSDCISVNDPALGQPFAELMAASVSQVDQAVAAARSALPAWKSTCASERAAFLRGFAEQLGQRREALVTVQMRNNGKPRHEAEIDLDDAIATFGYYAELAEQLPSKNRTVPLAAPGFTARTRLEPVGVVGLIVPWNFPLVTSAWKLAPALAAGCTVVLKPSEVTPLIEQAYGQIADALGLPAGVLNIVNGKAETGAALSNHNGLDKLSFTGSNSVGSQVMRSASAQCRPVTLELGGKSAIVVFDDCDVDQAVEWIVAGISWNAGQMCSATSRLLVQDGIADALLPRLQAALENLRVGNPLTEEVDMGPLTSQAQWLKVASYFATAREEGLQCLAGGHALDREGWFVSPTLYTDVPKDSRLWTEEIFGPVLCARRFATEEQAIAEANDSRFGLVATVCSADLERAERVADALEVGHVWINSVQAVFVETSWGGTKGSGIGRELGPWGLSAYQSIKHVTRCLG

SEQ ID NO: 2489 - protein, 69 aa, Zea mays
MCGILAVLGCAYEAKGSSNRSRVLDLSRWMEHRGCDCIGIRHVSNCYISHHRLPIIDATSGDILVYNED

SEQ ID NO: 2490 - protein, 282 aa, Rhodobacter sphaeroides 2.4.1
MHLGCPHHWRFGAEGESEAEFCARLLREAEETILAEGPETVAAFIGEPVMGAGGVIVPPDGYWSGIEALCRKYDILLVSDEVINGFGRTGARWGCEKFGFTPDILVTSKQLTSSYMPLAAVLMTDKVYQTIADHTETLGTLGHGFTGSGHPVATAVGLENLTVIEERDLMGNAARLERPFQDGLRAFRDNPLVGEVRGTGLIAAIEMVADRATKRSFEPLGKVGARAAAFAAEEGLLCRALGDTLALCPPLIVTEADVGRILERMGRALDRTADWARAEGLI

SEQ ID NO: 2491 - protein, 355 aa, Phaseolus vulgaris
FTVYGEHWRTMRTIMNLPFFTKKGVHNYSTMWEEEMELVVRDLKVNEHVRSEGIVIRKRLQLMLYNIMYRMMFDAKFESQEDPLFIQATRFNSERSRLAQSFEYNYGDFIPLLRPFLRGYLNKCKDLQSRRLAFFNTHYVQKRRQIMAANGEKHKISCAIDHIIDAQMKGEISEENVIYIVENINVAAIETTLWSMEWAIAELVNHPSVQSKIRDEISEVLKGEPVTESNLHELPYLQATVKETLRLHTPILLLVPHMNLEEAKLGGYTVPKESKVVVNAWWLANNPSWWKNPEEFRPERFLEEECATDAVAGGKVDFRFVPFGVGRRSCPGIILALPILGLVIAKMVSNFELSA

SEQ ID NO: 2492 - protein, 692 aa, Glycine max
MPALACCVDAAAPPGYAFAGDISFPAPVALTGVPPATTDDSNNNRWSPSLSAALYNVDGWGGPYFAVNTAGNISVRPHGSDTLSHQEIDLLKIVKKASDPKSLGGLSLQLPLIARFPDVLKNRLESLQFGCSIMQIQSGGYESHYQGVYPVKCNQDRFVVEDIVKFGSPFRFGLEAGSKPELLLAMSCLCKGNPDALLICNGFKDAEYISLALVANKLALNTVIVVEQEEEVDLIVELSKKLCIKPVIGLRAKLRTKHSGHFGGTSGEKGKFGLTTAQILRVVKNLDLAGMLDCLQLLHFHIGSQIPSTALLADGVGEAAQIYCELVRLGANMRVIDIGGGLGIDYDGSKSCDSDISVEYSLEDYAVAVVHAVQCVCDRRSVKHPVICSESGRAIVSHHSVLIFEAVGTSSTTGGGASPALSAQYLAEELSEDYRNLSELAFRGEYETCLVYTEEMKERCVEQFKQGTVCMEQLAAVEGLCELARKAVGAGESVRRYHVNLSVFTSVPDAWGIEQVFPIIPIHRLDEKPSVRGILSDLTCDSDGKIDKFINGESSLPLHEMEGGRTYYLGMFLGGAYEEALGGVHNLFGGPSVVRVSQSDGPHSFAVTRAVPGPSCGDVLRVMQHQPELMFETLKHRAQEYVSHDNAAALLAAGLARTFDRMPYLLSLSSFVADDVAAAVPAAQDLGEQWSY

SEQ ID NO: 2493 - protein, 353 aa, Photorhabdus luminescens subsp. laumondii TTO1
MKALKFNRVWDVQIQDVEPLRCAEPDDVVVDIAVCGVCGTDVGIITGSYPVAIPGTTLGHETTGVITQIGKSVTRFNVGDRVVINPTYSCGHCRMCQTGSPNHCEKKLGTEAGVSYDGAFAEQYLAKESSLIKLDDHVSMEEASLTEPLSCTLTGVDKLGITHTNIRAAVAGAGPMGMLYIWALHARGVKAFMVEKNESRIQFAKENLPPECELYTDFDEALIQKYGDKSALIDLCVDTTGQLTEYVFEHLAPGGKLLNVALKDKHANLDILKIADKSLSVIGSIDSLNNSFERAYTMIRDGVIPAGRLVSQVFDFNDYLQAFLTVGCDIANKSQKPLFTPNCKVLIRISDLK

SEQ ID NO: 2494 - protein, 142 aa, Gloeobacter violaceus PCC 7421
MLMEVTAMALQVKLLEQSFEGVKPNAHAFAASFYDNLFSDFPQTQALFAHSDMQAQQQKLLASLVLVVENLRQPQVLSTALQDLGNRHAGYGIVPEHYPMVGTSLLKTFETYLGDAWTPEVKQAWVDAYGAITGLMLTGAES

SEQ ID NO: 2495 - protein, 78 aa, Triticum aestivum
MKEGTANCVDILIAIILPPLGVFLKFGCKVESGLPLAHFLAYLPGIIYAIYAITKGLARSSWGASAGPPLFSTVKYYY

SEQ ID NO: 2496 - protein, 259 aa, Euphorbia esula
MDSSKDRETFVYLAKLAEQAERYDEMVESMKKVANLDVELTVEERNLLSVGYKNVVGSRRASWRILSSIEQKEESKGNEINAKRIKEYRNKVESELSTICSDIMTVIDEHLIPSCNAGESTVFYYKMKGDYYRYLAEFKAGNDKKEAADQSLKAYQTASTTAETDLPPTHPIRLGLALNFSVFYYEIMNSPERACHLAKQAFDEAISELDTLSEESYKDSTLIMQLLRDNLTLWTSDIPEDGDQKMETSGKASGGEDAE

SEQ ID NO: 2497 - protein, 314 aa, Triticum aestivum
  unsure (1)..(314): unsure at all Xaa locations
MGAGEKTAAGMPRIGMGTAVQGPKPDPIRRAVLRAIEIGYRHFDTAAHYETEAPIGEAAAEAVRSGAVASRDELFITSKLWCSDAHRDRVVPALRQSLRNLQMEYVDLYLVHWPVSMKPGRFKAPFTAEDFVPFDMRAVWEAMEECHRLGLAKAISVANFSCKKLXTLLSFATIPPTVNQVEVNPVWQQRKLREFCRGKGIQLCAYSPLGAKGTHWGSDAVMDAGVLQEIAASRGKSVAQVCLRWVYEQGDCLIVKSFDEARMRENLDVDGWELTEEERRRIAEIPQRKINLGKRYVSEHGPYKSLEELWDGEI

SEQ ID NO: 2498 - protein, 461 aa, Azoarcus sp. EbN1
MDRLQKAEVEDFKAHFQGEVLLPDDAAYDEVRQIWNAMMDRRPGLIARCVSPEDVVQAVRLARKHNLLVSIRGGGHNIAGNAVCDDGLMIDLSLMKKVQVDGNAHRASVEPGCTLADFDAVAQAHGLATPLGINSTTGVAGLTLGGGFGWLSRKHGMTVDNLLSADVVTADGNQVHASETENEDLFWGLRGGGGNFGIVTSFEFQLHPVGPDVLSGLIVFPFDQAKSVLTQFARFTETISDDLTVWMVTRKAPPLPFLPEDVHGKEIVVLALCYAGDPVEGEKLIEPLRGFGTMLGEHIGVQPYTAWQQAFDPLLARGARNYWKSHNFSQLSAGAIDAIIEYAGRLPSPQCEIFIGTIGGQTARVAPDAMAYSARDANYVMNVHARWESAAEDERCIAWARDFFASSQPFASGGAYINFLTQDETDRIAFAYGATYDRLVELKKKYDPTNLFRMNQNIKPV

SEQ ID NO: 2499 - protein, 108 aa, Glycine max
MHTLCVSRDFFLNSGSSDSRPRRSLFFPSLKMGFWTLLEGFLLFANALAILNEDRFLARRGWTLAEMTGPQRNSLKGQVIGLIYACQFLRLPLILFNVITIIVKLFSG

SEQ ID NO: 2500 - protein, 153 aa, Triticum aestivum
  unsure (1)..(153): unsure at all Xaa locations
PSRQHSNQNNPANSSHEHLQRQYTLEGQAAKKDISPPLEWYGVPDGTRSLAVVVQDVDADERVPWTHWVVVNISPEEKGLPEGFSGAGGNANAGGGDGGVQEGVNDWKQPGWRGPXLYALDDLLSLGNKVTVDKVMEAIEGHVLGEAEITAVF

SEQ ID NO: 2501 - protein, 491 aa, Listeria monocytogenes str. 1/2a F6854
MVFLSIKETALPKVQTKLFINGKWTDGDNKETKDIVNPANGDVIAKIAQAGPSETKKAIKAAKDAFPDWAKMELADRVKLLHKIADLMEEKADTLAKIMTLEQGKPLKESKGEVLTGVENFRFAAEEARRLYGETIPAPNNHAFIVKKQPIGVVAAITPWNFPGGMVTRKLAPALATGNTIVLKPSGDTPLSALAIFEIFEEAGLPKGVANIVMGSSKEIGETLTDSDDVRKLTFTGSTKVGQTLFKQSADTLKKISLELGGHAPFIVFDDANLDAAVNDLVAAKFRNNGQVCVSPNRIFVAKEIKEKFTKALVAKVEQLKVGNGLDNVNVGPLIREDAIDKIDKQLKNATDKGAKVLTGGGRLTGSDYDNGNFYKPTVLDNVTREMDIFYEETFGPVIPLITFETEDEAIEMANDSEFGLASYFYTKDLARVEKVGAALEYGMVGANEIAISNPETPFGGVKHSGFGRENGHYGMEEYIQVKFINLKYRD

SEQ ID NO: 2502 - protein, 249 aa, Zea mays
MFGYQKGLDVEAGTSGAAATGGARQLYPGMQESPELRWALIRKIYVILSLQLLLTAVVAAVVVKVRAIPHFFTTTSAGLGLYIFLIILPFIVLCPLYFYHEKHPVNLILLGLFTVAISFAVGMTCAFTSGKVILESAILTTVVVLSLTAYTFWAVNRGKDFSFLGPFLFAAIIVLLVFALIQILFPLGKLSQMIYGGLASLIFSGYIVYDTNNIIRRYTYDQYVWAAVSLYLDVINLFLSLMTLFRAAD

SEQ ID NO: 2503 - protein, 176 aa, Brassica napus
  unsure (1)..(176): unsure at all Xaa locations
AAVSSCSFHQFITFGFACTPLYFVWXKVIGMHDTKSXCLRALARCPVGRGGWFLAIIFPFFGPINSAVGALLVSFTVYIIPSLAHMLTYRSASARQNAAEKPPFFLPSWTAMYVLNAFVVIWVLIVGFGFGGWASVTNFVRQVDTFGLFAKCYQCKPPVPAAAAAHAPVAALHHRL

SEQ ID NO: 2504 - protein, 225 aa, Oryza sativa (japonica cultivar-group)
MDSLYDISCFAAGLAGNIFALALFLSPVTTFKRILKAKSTERFDGLPYLFSLLNCLICLWYGLPWVADGRLLVATVNGIGAVFQLAYICLFIFYADSRKTRMKIIGLLVLVVCGFALVSHASVFFFDQPLRQQFVGAVSMASLISMFASPLAVMGVVIRSESVEFMPFYLSLSTFLMSASFAFSLMGLDLSWEQCSWRSTLTTAENGEARIHLHRCCSHDQNRSE

SEQ ID NO: 2505 - protein, 74 aa, Brassica napus
MASNMEVFCEILIAILLPPLGVCLKRGCCTVEFLICLVLTILGYIPGIIYALYVIVFQNREGETPDYSTPLNSA

SEQ ID NO: 2506 - protein, 163 aa, Candida albicans SC5314
MSEEKVRVQETEEERQERLAKQEEIDGRSVYVGNVDYQSTPEQLEEFFHGVGVIERVTILFDRFSGLPKGYAYIEFEQTESVQKAIDELHGKEFRGRELRVTAKRTNLPGFRRGRGRGGFRARGRGRGGFRGRGRGRGGFNSRGTRNGDSEQADGDAENEETD

SEQ ID NO: 2507 - protein, 423 aa, Pseudomonas syringae pv. tomato str. DC3000
MKLSILGARVIDPVSGLDQTTDLHIEAGKLVAIGAAPAGFEPTQVIDATGLVAAPGLVDLNVSLREPGYSRKGSIASETRAAVAGGVTSLCCPPQTKPVLDTSAVAELILDRAREAGFSKVFPVGALSKGLEGEQLAELIALRDAGCVAFGNGLSSFSNTRTLCRALEYAATFDLTVIFNSQDRDLAEGGLAHDGPTAAFLGLAGIPETAETVALARDLLLVEQSGVRAHFSQLTSARGAALIAQAQARGLPVTADVALYQLILTDEALIDFSSLYHVQPPLRTRADRDGLREAVRSGVIQAISSHHQPHERDAKLAPFGATEPGISSVELLLPLAMTLVDDGLLDLPTLLARLSSGPADALRLPAGKLSAGAPADIVLFDPTASTVAGETWLSKGDNCPFIGHCLPGSVRYTLVDGRISYSR

SEQ ID NO: 2508 - protein, 393 aa, Pseudomonas aeruginosa PAO1
MLSNAQRALIKATVPLLETGGEALITHFYRTMLGEYPEVRPLFNQAHQASGDQPRALANGVLMYARHIDQLQELGPLVAKVVNKHVSLQVLPEHYPIVGTCLLRAIREVLGEQIATDEVLEAWGAAYQQLADLLIEAEESVYAASAQADGGWRGVRRFRVARKQAESEEITSFYLEPVDGQPLLAFQPGQYIGLRLDIDGEEVRRNYSLSAASNGREYRISVKREAGGRVSNYLHDRVAEGDELDLFPPAGDFVLRDSDKPLVLITAGVGITPALAMLQEALPQARPIRFIHCARHGGVHAFRDWIEDVSAQHEQVEHFFCYSEPRAGDSADAEGLLSREKLADWLPQERDLDAYFLGPRPFMAQVKRHLADLGVPSQQCHYEFFGPAAALDA

SEQ ID NO: 2509 - protein, 139 aa, Helianthus annuus
MANAASGMAVHDECKLKFMDLKAKRTHRFIIYKIEEKQKQVMVEKVGEPAQTYDEFAACLPENECRYAVFDYDFLTPEGVQKSRIFFIAWSPDTARVRNKMIYASSKDRFKRELDGIQVELQATDASEMGLDVIQSRAN

SEQ ID NO: 2510 - protein, 422 aa, Aspergillus nomius
MALPDKAALVGLANALSEQVKRYLAIPDETELPKGDKHCIEGVKSSSSAEHAQAWEIVRTCDRIGSLIHGPVPWLLSNALSHLDSACLAAATQLNLQDVIVDGASSTSLDTIVAATGVSKDLLRRILRGCAQRFIFEEVAPDQYAHTDASKMLRVKGIHALVGFSCDEVMRSGACFSDFLQQTKGNPPSWNVPSPFSLAFDPAKGLFDYYSTVDEVRGRRFDLGMGGTEATKPLVEEMFDFSSLSEGSTIVDVGGGRGHLSRRVSQKHPHLKFIVQDLPAVIHGVEDTEKVTMMEHDIRHPNPVRGADVYLLRSILHDYPDAACVEILSNIVSAMDPTKSRILLDEMIVPDLLAQDSQRFMNQIDMTVVLTLNGKERSVKEWDSLITTVDGKLETEKTWWRKGEEGSHWGVQQLRLHGSSAD

SEQ ID NO: 2511 - protein, 588 aa, Triticum aestivum
  unsure (1)..(588): unsure at all Xaa locations
MTFHAAQRSLQLRYATTPPASSLRAILKKAKGSGELRLRARSRSVAGRDQLLRAHGPNEGLRRWGVGLGAGHRRGLLAQAVMALDRREATPTHDLPSYPVPPHRFLAMMHLQESTARLFPNLLIEDVEEGLPVVYPPVVGEACQKHGSIYRPPAGALHXSLKDTGSVLGVPSSWPEPRLRVSGVTDGVPGVGLEDVDCQGRATEVRLLTPWSFXSQVATKFCGKLRXDVGTNNEKLLNDEYYIGLRQRRATGEEYHELLQEFMNAVKQNYGEKVLVQFEDFANHNAFDLLAKYSKSHLVFNDDIQGTASVVLAGLLAALKMIGGGLVDQTYLFLGAGEAGTGIAELIALEMSKHTELPVDDCRKKIWLVDSKGLLVESRKESLQHFKKPFAHEHEELKTLLEAVQSIKPTVLIGTSGVGKTFTQEVIEAMASFNEKPVIFSLSNPTSHSECTAEEAYTWSKGTAVFASGSPFDPVEYEGKTYVPGQSNNAYVFPGFGLGVVISGAIRVHDDMLLAASEALAEEATQENFDKGLIFPPFTNIRKISASIAAKVAAKAYDLGLASRLPRPDDLVKYAESCMYTPLYRSYR

SEQ ID NO: 2512 - protein, 291 aa, Oryza sativa (japonica cultivar-group)
MAASSSSSMASSQPRMMEQSLFYTQPPARAVHTRKVTAVNLHREMSLIRSLMPTFPFVAVDTQFPGVVHPHPRGAGVTADDRYAAVRANADELCLLQLGITLSAADGRLPVDGALVEFMWDFDFAGFDARYHRHAPESVQFLRAQGFDFEAARLAGVPALAFAAELAASGILGLRGVTWVAFGGMYDVAFLLRLATGGAPLPATRLGFLAQVGAVFGTQVFDAKHMASLLHMHGGLAAVGGMLRLPPQLPRRHMAGQNSVMAIQLFMELRRRFNDLGGSLHSCSLKIEGLT

SEQ ID NO: 2513 - protein, 346 aa, Zea mays
  unsure (1)..(346): unsure at all Xaa locations
QTGRGEIVECSPSKEADLFNAVLGGLGQFGIITRARILLQEAPEKVTWVRAFYDDLGAFTRDQELLVSIPDSVDYVEGFMVLNERSLHSSSIAFPASVDFSPDFGTRSSPRIYYCVEFAVHHHHGYQQQSQAAVEAISRRMSHMASQLYSVEVSYLDFLNRVRMEEVSLRSAGMWEEVHHPWLNMFVPKAGVAGFRDLLMDNVSPDSFQGLILIYPLLRDKWDTNTSVVIPDSGPTADDPVMYVVGILRSANPGPEEDGDGCSHXCLXEXLXXXRXIADAXEAXLGAKQYLPHHPTPARWQQHLXRRWERFADRKARFDPLRIXGPGQGIFPRTAQDAAAAAAYGS

SEQ ID NO: 2514 - protein, 133 aa, uncultured Rickettsia sp.
ANEAVINMLKEIGSSENIPKYIAKAKDKNDPFRLIGFGHRVYKNYDPRAAVLKETCKEVLKELGQLENNPLLQIAIELEAIALKDEYFIERKLYPNVDFYSGIIYKAMGIPSQMFTVLFAIARTIGWRAQWKE

SEQ ID NO: 2515 - protein, 274 aa, Thermotoga maritima MSB8
MLYKELGRTGEEIPALGLGTWGIGGFETPDYSRDEEMVELLKTAIKMGYTHIDTAEYYGGGHTEELIGKAIKDFRREDLFIVSKVWPTHLRRDDLLRSLENTLKRLDTDYVDLYLIHWPNPEIPLEETLSAMAEGVRQGLIRYIGVSNFDRRLLEEAISKSQEPIVCDQVKYNIEDRDPERDGLLEFCQKNGVTLVAYSPLRRTLLSEKTKRTLEEIAKNHGATIYQIMLAWLLAKPNVVAIPKAGRVEHLRENLKATEIKLSEEEMKLLDSLG

SEQ ID NO: 2516 - protein, 509 aa, Rhodococcus ruber
MTGTLSRDSGTTNQVDERLGAAAREFLGRPHQLFIDGQWVDAADGRTFGTYDPATGAEITQVAHGGPEDVDRAVAAARRAFDDGDWATMKPNKREQILWRIGDLLDARGEMLGQIEALDNGKSAAIATAVDVTFAADVFRYYAGWCTKIEGTTVDVSMPFAGDKQFHAYTQRVPVGVCGQIIPWNFPLLMAAWKLAPALATGNTLVLKPAEQTPLTALLLGEIMAEAGVPDGVVNIITGFGDAGAAISAHDDVDKVAFTGSTEVGKLIVDAAKGNLKKVSLELGGKSANIVFADCDFDAAVAGSVAAWMFNHGQACTAGTRLYVEDSIYEKFTQAVADAAAQATIGHGLDPATELGPLVDQDQFDKVSYYLRAGIEDGGRALTGGGRHGDTGYFIQPTVFVDVEPDHRVVTDEIFGPVVAALRFSDMDDAVRQANDSIYGLAAGVWTKDISKAHKVASRLHAGSVWVNQYNGFDTAMPFGGFKQSGWGRELGKGALDLYTQTRSVNIQL

SEQ ID NO: 2517 - protein, 371 aa, Listeria monocytogenes str. 4b H7858
MEYKKALAFIKSNSILEQEEGTEVIFKQAQETVRGNLDPFLLKDLKQHLGGTNDAIKEAPQEIQMPDFSNLEIATAAALQMRATMGSPNIDLSNGVTTEYRVVEGDYGDIPVRIYRHEEATKPVPAFIFYHGGGFVGGTPAVVENFCKGIAEKLPAVVINVDYHLAPEFPAPAAPKDCYRALEWVVEQSDELGIDASKIGVSGDSAGGTLAAAVSYMDYEAETNYVGFQALLYPALTLVDEDNDKYQWDISKFGASEETLPLVAPGIIGMNSSGELLRTAYVRDENPASPIYSPLSAVDKSIYPPTLIASAEFDALRAFADIFAKELRASGVQTKVIVYQGMCHAFIDKYGIFPQAEDVADEIVQMMKEIF

SEQ ID NO: 2518 - protein, 439 aa, Pyrococcus furiosus DSM 3638
MIKIYTLGGYEEVGKNMTAVEYEGEIVIIDMGIRLDRVLIHEDVEFQKMSSKELRKLGAIPDDRPIRDKKVVAIALSHGHLDHIGAVGKLAPHYPDVPIYGTPYTIRLAKSEIKGEEYFEVTNPLYETNYGEIVQVSENLAIEFVQITHSIPHSSIVVIHTPEGAVVYACDYKFDNNHPYGEKPDYKRLKELGKEGVKVLIAESTRVAEETKTPSEAVAKMLLEDFFLYEGMEADGLIATTFASHITRLQALIEIANKMGRQAVFIGRSLAKYTGIAKQLGLIKMKGSRVLRSPNAISKVLKEVSQARENYLLVVTGHQGEPGAILTRMANGELYDIGPRDTVVFSAGVIPNPLNIAQRYALETKLRMKGVRMIKNLHVSGHASKEDHRYLIRMLNPENIVPAHGEFRMLTHYAELAEEEGYMIGKDVFISRNGHAITI

SEQ ID NO: 2519 - protein, 131 aa, Chlorella vulgaris
MSTKTNEILDILKSITLLEAAELVSQIEETFGVDASAPVGGGFMAAPGGAGTAAAEIVEEKTTFDVIIEDVASDKRVPVLKVVRNLTSLDLKEAKEAITSLPKVIQQGVSKDDAEASKKQLEDAGAKVKIS

SEQ ID NO: 2520 - protein, 168 aa, Zea mays
MAAASSATSVHDFTVKDSSGKDVDLSVYRGKVLLIVNVASQCGLTNSNYTQQAQLYDKYKNQGFEILAFPCNQFGGQEPGTNEEIAQFACTRFKAEYPIFDKVDVNGNNAAPIYKFLKSSKGGLFGDSIKWNFSKFLVDKEGRVVDRYAPTTSPLSIEKDIKKLLGSS

SEQ ID NO: 2521 - protein, 138 aa, uncultured Rickettsia sp.
ANEAVINMLKEIGSSENIPKYIAKAKDKNDPFRLMGFGHRVYKNYDPRAAVLKETCKEVLKELEQLENNPLLQIAIELEAIALKDEYFIERKLYPNVDFYSGIIYKAMGIPSQMFTVLFAIARTVGWMAQWKEMHEDP

SEQ ID NO: 2522 - protein, 662 aa, Zea mays
MISARTAAASPASLWKQGGRSEGGGSCDGCRTYRNTLRRAAAAKVRALPSRAVEAVKMGSAAEMEQEEAEVAAAAAGVVVEDHYGEDSATEELPILPWAFSVARYVSFSWLKKYAEESYFYISGYTLLRDPHHNKGLAFMEKERDAHHLRGLLPPAVVPQELQIKKIMHNLRQYQVPLQRYMAMMDLQERNERLFYKLLIDNVEELLPVVYTPTVGEACQKYGSIFRQPQGLYVSLRDKGKVLEVLRNWPHRNIQVICVTDGEAILGLGDLGSQGMGIPVGKLALYTALGGVRPSACLPITIDVGTNNEKLLNDEFYIGLRQKRATGEEYHELMEEFMAAVKQIYGEKVLIQFEDFANHNAFNLLAKYSKSHLVFNDDIQGTASVVLAGLLAALKVVGRTLAEHTYLFLGAGEAGTGIAELIALEISKQTSAPIEECRKKIWLVDSKGLIVDSRKNSVQSFKKPWAHEHEPLTTLYDAVQSIKPTVLIGTSGVGRTFTKEVVEAMASFNERPIIFSLSNPTSHSECTAEEAYNWTQVVIFASGSPFDPVEYDGKVFVPGQSNNAYIFPGFGLGLVISGAIRVHEDMLLAASEALAAQATQENFDKGSIFPPFTNIRKISARIARAVAAKAYELGLATRLPPPRDLVKYAQSCMYTPVYRNYR

SEQ ID NO: 2523 - protein, 345 aa, Pyrococcus horikoshii
MYKVAVIKGDGIGPEVIDAAIRVVKSVTDKIKFYEFEGGLSVFKKYGVPIREEDLEEIRKMDAILFGATTTPFDVPRYKSLIITLRKELDLYANLRIIPNFKLRKEIIIVRENSEGLYSGEGAYDSNKVVDFRIITRKGAERIAKFAVKLAKDRSTFLTFVHKANILESDRFFRKIVLDIARKEDVKVREEIVDSFTIKLVKDPWNLGIILSENMFGDILSDLATIHAGSIGIVPSGNYGEDIALFEPIHGSAPDIAGKGIANPIGAILSAAMMLDYLGLDGSIIWKAVGRYVRRGNLTPDMEGRATTLEVTNGIISEIYRLDEYEIDEVWRDEVRLGRILLEIS

SEQ ID NO: 2524 - protein, 192 aa, Methanothermobacter thermautotrophicus str. Delta H
MAHGPRYKLAFRRRREGKTDYRARYKMVETGKSRLVVRITTYHVIAQIINVGMNGDETLVSAHSKQLQKMGWLGGTSNTAAAYLTGYLCGKRALKEGIEEAVLDIGLRPAIRGSKVFAALKGAVDAGLNVPHGESVLPDESRIRGEHIMEYAESLDEEELRKRFSKYLERGLSPVDLPEHFDEIKKRIDEEV

SEQ ID NO: 2525 - protein, 335 aa, Streptococcus pneumoniae R6
MKRIAVLTSGGDAPGMNAAIRAVVRQAISEGMEVFGIYDGYAGMVAGEIHPLDAASVGDIISRGGTFLHSARYPEFAQLEGQLKGIEQLKKHGIEGVVVIGGDGSYHGAMRLTEHGFPAIGLPGTIDNDIVGTDFTIGFDTAVTTAMDAIDKIRDTSSSHRRTFVIEVMGRNAGDIALWAGIATGADEIIIPEAGFKMEDIVASIKAGYECGKKHNIIVLAEGVMSAAEFGQKLKEAGDISDLRVTELGHIQRGGSPTPRDRVLASRMGAHAVKLLKEGIGGVAVGIRNEKMVENPILGTAEEGALFSLTAEGKIVVNNPHEADIELSSLNKSLS

SEQ ID NO: 2526 - protein, 156 aa, Euphorbia esula
HEDHFESKADAGASKTYPQQAGTIRKNGYIVIKNRPCKVVEVSTSKTGKHGHAKCHFVGIDIFNGKKLEDIVPSSHNCDVPHVTRTDYQLIDISEDGFVSLLTENGNTKDDLRLPTDESLLSQIKDGFGDGKDLVVTVMSSMGEEQICALKDIGPK

SEQ ID NO: 2527 - protein, 234 aa, Zea mays
  unsure (1)..(234): unsure at all Xaa locations
SDSDHCHSARYYLKDAVLDGGIPFNKAYGMTAFEYHGTDPRFNRVFNEGMKNHSVIITKKLLDFYTGFEGVSTLVDVGGGXVGATLHAITSRHPHISGVNFDLPHVISEAPPFPGVRHVGGDMFASVPAGDAILMKWILHEWSDAHCATLLKNCYDALPENGKVIVVECVLPVNTEATPKAQGVFHVDMIMLAHNPGGKERYEREFRELAKGAGFSGFKATYIYANAWAIEFIK

SEQ ID NO: 2528 - protein, 475 aa, Rickettsia rickettsii
MNLLKNITGKNYINGEFIEFGKQISVINPATLKEIATVPNLGLSEINSAINNTVTSFALWSQSSFEARIAILRRWYNLVIENIEELSHILTLEQGKVLAESKKEILYGASFIDWYTYAIHNIHSTIKPGNSNTHKIVTQYEPVGPSAAITPWNFPNAMIARKVVPAIAAGCSVILKPSSLTPLSALVLAKFASDAGLPSGVFNVITGSSDIIGKAFCEDFRLRKLSFTGATNVGKILYQNAANTLKRLSLELGGNAPFIITADNNLEKVVSDLVIAKTRNSGQSCTSPNRIFIEESIYEKFIEILKAKFTKLKAGDGFDKESDVGPLINSAAIEKIQKLLADAQSKGAKLICGGKTVDNFIEPTIIIDCLDNMDIFRIEIFGPVVACYKFKDLDEVIEHANNTEYGLQGYVYSNNISVAQMIASKLDFGMVSINDPLPANAKAPFAGRKASGFGVEGSFEGIFEYLNTKYINLQN

SEQ ID NO: 2529 - protein, 489 aa, Halomonas elongata
MTAQSAQPLYIGGRPVDATSGETFTVTNPYDGSLLATIGQASQADVDSAVQAAQRGQREWAAMTGMERSRILLRAVALLRERNDELAELETRNTGKPISETASVDIVTGADALEYYAGLAPAIEGSQIPLRDTRLVYTRREPLGVIGAIGAWNYPIQIACWKAAPALAAGNAIVFKPSEVTPLTALKLAEIFTEAGLPDGVFNVVQGDGRVGAMLTEHEGIAKVSFTGEVGTGKKVMAAAGGSTLKDVTMELGGKSPLIVFADADLDRAADAAMMANFYSSGQICTNGTRVFVERSAKEAFEAKLVERVARIKAGDPMDPSVNFGPLVSFEHQEKVLSYIALGKEQGARVLAGGDAWNSGEWAKGAWAAPTVFTDCTDEMRVVKEEIFGPVMSVLAFDDEEEVIRRANNTKYGLAAGVFSESLNRAHRVIHQLEAGICWINTWGESPSEMPVGGYKESGIGRENGVETLNHYTQTKSVQIEMGPFESVF

SEQ ID NO: 2530 - protein, 51 aa, Phaseolus vulgaris
MKQFRVLTCQTVADMIKGKTPEEIRKTFNIKNDFTPEEEEEVRRENQWAFE

SEQ ID NO: 2531 - protein, 171 aa, Zea mays
  unsure (1)..(171): unsure at all Xaa locations
MAATAMMASSDTAGAAFQGLKCTVSLPIVRRSFRSLXGNVSNGGRIRCMQVWPAYGNKKFETLSYLPPLSTDDLLKQVDYLLRNGWIPCLEFSKVGFVYRENSTSPCYYDGRYWTMWKLPMFGCNDATQVYKELQEAIKSYPDAFHRVIGFDNIKQTQCVSFIAYKPPGSD

SEQ ID NO: 2532 - protein, 182 aa, Betula pendula
MACSMISSATVAAVSRASPAQSSMVAPFTCLKSTSAFPVTQKTNNDITSIASNGGRVQCMQVWPPLGLKKFETLSYLPPLSSEQLAKEVDYLLRKNLIPCLEFELEHGFVYREHNRSPGYYDGRYWTMWKLPMFGCNDSSQVLKELEECKKAYPSAFIRIIGFDNKRQVQIISFIAYKPPGV

SEQ ID NO: 2533 - protein, 434 aa, Salmonella enterica subsp. enterica serovar Typhi Ty2
MKTRTQQIEELQKEWTQPRWEGITRPYSAEEVVKLRGSVNPECTLAQLGAAKMWRLLHGEAKKGYINSLGALTGGQALQQAKAGIEAIYLSGWQVVADANLASSMYPDQSLYPANSVPAVVDRINNTFRRADQIQWASGIEPNDPRYVDYFLPIVADAEAGFGGVLNAFELMKSMIEAGAAAVHFEDQLASVKKCGHMGGKVLVPTQEAIQKLVAARLAADVMGVPTLVIARTDADAADLITSDCDPYDSGFITGERTSEGFYRTHAGIEQAISRGLAYAPYADLVWCETSTPDLELARRFADAIHAKYPGKLLAYNCSPSFNWQKNLDDKTIASFQQQLSDMGYKYQFITLAGIHSMWFNMFDLAHAYAQGEGMKHYVEKVQQPEFAAAKDGYTFVSHQQEVGTGYFDKVTTIIQGGASSVTALTGSTEESQF

SEQ ID NO: 2534 - protein, 187 aa, Triticum aestivum
  unsure (1)..(187): unsure at all Xaa locations
MKTLLILTILAMAITIGTXANIQVDPSGQXVNWLQQQLVPQLQQPLSQQPQQTFPQPQQTFPHQPQQXQVPQPQQPQQPFLQPQQPFPQQPQQPFPQTQQPQAXPFPMQPQQPFPQTQQPQQPFPQQPQQPFPQTQQPXQPFPQLQQXQNLFPSPXQQLPAAQQPEQSFPQQQRSFIQPSLQQXVEP

SEQ ID NO: 2535 - protein, 414 aa, Escherichia coli
SKVVVPAQGKKITLQNGKLNVPENPIIPYIEGDGIGVDVTPAMLKVVDAAVEKAYKGERKISWMEIYTGEKSTQVYGQDVWLPAETLDLIREYRVAIKGPLTTPVGGGIRSLNVALRQELDLYICLRPVRYYQGTPSPVKHPELTDMVIFRENSEDIYAGIEWKADSADAEKVIKFLREEMGVKKIRFPEHCGIGIKPCSEEGTKRLVRAAIEYAIANDRDSVTLVHKGNIMKFTEGAFKDWGYQLAREEFGGELIDGGPWLKVKNPNTGKEIVIKDVIADAFLQQILLRPAEYDVIACMNLNGDYISDALAAQVGGIGIAPGANIGDECALFEATHGTAPKYAGQDKVNPGSIILSAEMMLRHMGWTEAADLIVKGMEGAINAKTVTYDFERLMDGAKLLKCSEFGDAIIENM

SEQ ID NO: 2536 - protein, 116 aa, Glycine max
  unsure (1)..(116): unsure at all Xaa locations
FELADVAPISTYVDSGERXYFVADERGYDHWLCITADEFLFTSKGRILDNRLKLITVVRDSQYSKSGVTAKTNDGCINHTNPVMLPASIAVLQSDLLALHPPSPVRPFFFVQLSLA

SEQ ID NO: 2537 - protein, 331 aa, Methylobacillus flagellatus KT
MNILDPIMHTLMPETDQYSGMEPKTRAFLEELAASDSKPVEALSPEEARKVLSDLQAGVDVELGGVTVEEREIAIEGHSIHLFIVKPADIAISPPVVMFFHGGGWVLGDFPTHQRLVHDLCVASNCAVVFVDYSRSPEVKYPTAIIECYLATKWVAQNGAEIGVDPARLAVAGNSAGGNMAAVVCMMAKEKREPFIKHQTLFWPVTDARFNTDSYQQFDEGYFLTRNMMKWFWDNYLENKDARKEIYASPLNASLEHLADLPPALIQTAEFDVLRDEGEAYAHLLMDAGVSVTCTRYLGAIHDFGLLNPLAKTPQAYASIMQAAGEIRKHI

SEQ ID NO: 2538 - protein, 192 aa, Ralstonia solanacearum
MTPAPSTLWLTGLSAAGKTTLAHALAEALTAAGAACQVLDGDVVRQALSRDLGFSRADRSQNIRRVADRCRQLNDAGSWAIAAVISPYRADREQARRTVGEPRFFEIHLATPLTVCERRDPKGLYRRARAGEIAHFTGISDAYEVPQHPDLRFDTATRSVAECVDATMALLAAVSGNVMTLSSESVSNAGSI

SEQ ID NO: 2539 - protein, 251 aa, Fucus vesiculosus
MASRDDLVYMAKLAEQAERFDEMVDHMKAVAQQPKELSVEERNLLSVAYKNVIGSRRASWRVISSIEGKDTVSDQLPLIRDYKSKIETELTDICADILKIIEAELIPNSTSEEGKVFYYKMKGDYHRYLAEFQSADERKTSASDALDAYQLASDHANQDLPPTHPIRLGLALNFSVFYYEILNSPDRACGLAKAAFDDAIAELDTLSEESYKDSTLIIMQLLRDNLTLWTSDQGEAEEAPGNADGTVVEDL

SEQ ID NO: 2540 - protein, 151 aa, Brassica napus
  unsure (1)..(151): unsure at all Xaa locations
MASSMLSSXAXVTSPAQXTMXAPFTGLKXSAAFXXTRXXXNDITSFXXXGGRXSCMXXXPPVGKKKXXTLSYLPDLTEXELXKEVDYLLRXKWIPXVEXEXEXGXXYREHGSTPGYYDXRXWXMGKXPLFGCTDXAQVLKEXQXCKTEYPN

SEQ ID NO: 2541 - protein, 314 aa, Aspergillus flavus
MGTPFAAPWHQFVEDLGQTPCLPGKDLDSILAGWGQLAGTLATRYGFPPPDESVTTEDVQLDGLWLRCYTPPNATGQEPVGLYFHGGGWVMGGVNEEDGFCRVISRQCQMRLVSVEYRKAPETRYPGALNDGVSAALWALSRYENQPLILMGTSAGGNLAFGTALRLIDQDMADKVSGVVALAPITVHPDAVPEHLKEQYTAYEENAELTVNSRAAMQVFFDCYKAPVDDVYTSCLLHPRLLALPKVYIAELGLDTLRDDARLMKGALDTAKVPVMYDAYPGYPHCSFMFPFKSLGEHQRTFFGGVAKAVRWMS

SEQ ID NO: 2542 - protein, 429 aa, Mycobacterium tuberculosis
MASVVGTPKSAEQIQQEWDTNPRWKDVTRTYSAEDVVALQGSVVEEHTLARRGAEVLWEQLHDLEWVNALGALTGNMAVQQVRAGLKAIYLSGWQVAGDANLSGHTYPDQSLYPANSVPQVVRRINNALQRADQIAKIEGDTSVENWLAPIVADGEAGFGGALNVYELQKALIAAGVAGSHWEDQLASEKKSGHLGGKVLIPTQQHIRTLTSARLAADVADVPTVVIARTDAEAATLITSDVDERDQPFITGERTREGFYRTKNGIEPCIARAKAYAPFADLIWMETGTPDLEAARQFSEAVKAEYPDQMLAYNCSPSFNWKKHLDDATIAKFQKELAAMGFKFQFITLAGFHALNYSMFDLAYGYAQNQMSAYVELQEREFAAEERGYTATKHQREVGAGYFDRIATTVDPNSSTTALTGSTEEGQFH

SEQ ID NO: 2543 - protein, 386 aa, Aspergillus flavus
MTGLDMETIFAKIKEEYARTDDVGKRKIQGHIRELQVGFYSDWDVVMRLSSGPLQVALAKVGIDLGIFRSLKESDTPIALAEFVKKTGASPRLLGRILRTQAAFGLIKETGPQEYTSSAFTDVFANPAAAGAVVQLFDISGPCTQILPDFLAERHYQDITSNKDCVFQKAFDSDLTMFEWMPQHPKHMESLGHLMALERPVSWVDHFPVLEELGDFPAPDKVLMVDIGGGFGQQSKALRAKFPNIPGRVIVQDIPQTLANAQPAAGVEFMEHNFFESQPIRNAKFYYLRHVFHDWPDEQCVLILKQIIPVMGPESEILIDEMVIPSTGVPWQAAFTDLLMMNSLGGVERTRAEWDDLMKQAGLEIIQSKVYDSKEQTILVAVPRRT

SEQ ID NO: 2544 - protein, 285 aa, Triticum aestivum
MKTLFILTILAMATTIATANMQVDPSGQVQWPQQQPFRQPQQPFYQQPQQTFPQPQQAFPHQPQQQFPQPQQPPQQFPQPQQPQQPFPQPQQAQLPFPQQPQQPFPQPQQPQQPFPQSQQPQQPFPQPQQPQQSFPQQQQPLIQPYLQQQMNPCKNYLLQQCNPVSLVSSLVSMILPRSDCQVMQQQCCQQLAQIPRQLQCAAIHSVVHSIVMQQEQQQGIQILRPLFQLVQGQGIIQPQQPAQYEVIRSLVLRTLPNMCNVYVRPDCSTINAPFASIVAGISGQ

SEQ ID NO: 2545 - protein, 301 aa, Hordeum vulgare
MATKARKVEVRDASRAEGKGDAADVHVLREAMRADGKGDHDTAGGANRADGHGDAGGRVGDSRGVDGKDSLKMVALQAPVTVERPVRGDLEEHVPKPYLARALAAPDMYHPEGTTTDDHQHHNMSVLQQHVAFFDRDNNGIIYPWETYDGCRAVGFNVFMSAFIAFLVNLVMSYPTLPGWLPNPLFPIYVHNIHKSKHGSDSGTYDKEGRFMPVNFENIFSKYARTYPDRLSYREMWRMTEGCREVFDFFGWVAMKLEWSILYALARDDEGYLSREAIRRMYDGSLFEYMERQRMEHVKMS

SEQ ID NO: 2546 - protein, 134 aa, uncultured Rickettsia sp.
ANEAVINMLKEIGSSENIPKYIAKAKDKNDPFRLIGFGHRVYKNYDPRAAVLKETCKEVLKELGQLENNPLLQIAIELEAIALKDEYFIERKLYPNVDFYSGIIYKAMGIPSQMFTVLFAIARTIGWMAQWKEM

SEQ ID NO: 2547 - protein, 145 aa, Triticum aestivum
  unsure (1)..(145): unsure at all Xaa locations
YAAAVVAAVGRVCDRKGVQHPVICSESGRALVSHHSVLIFEAFSATAPASNMMDPATAYLLDELTDDCRSDYRNLMASAVRGDFDTCGLYADQLKRRCAEQFKEGVLGLEHLAAVDGLCEIVARGMGAAEGPRXVHINLSVFTSL

SEQ ID NO: 2548 - protein, 429 aa, Mycobacterium tuberculosis
MASVVGTPKSAEQIQQEWDTNPRWKDVTRTYSAEDVVALQGSVVEEHTLARRGAEVLWEQLHDLEWVNALGALTGNMAVQQVRAGLKAIYLSGWQVAGDANLSGHTYPDQSLYPANSVPQVVRRINNALQRADQIAKIEGDTSVENWLAPIVADGEAGFGGALNVYELQKALIAAGVAGSHWEDQLASEKKCGHLGGKVLIPTQQHIRTLTSARLAADVADVPTVVIARTDAEAATLITSDVDERDQPFITGERTREGFYRTKNGIEPCIARAKAYAPFADLIWMETGTPDLEAARQFSEAVKAEYPDQMLAYNCSPSFNWKKHLDDATIAKFQKELAAMGFKFQFITLAGFHALNYSMFDLAYGYAQNQMSAYVELQEREFAAEERGYTATKHQREVGAGYFDRIATTVDPNSSTTALTGSTEEGQFH

SEQ ID NO: 2549 - protein, 398 aa, Methanosarcina mazei Go1
MNEQGLSEREIFSYLENAKSEDTDYYRVFSSMCTRPHKIAIEANRLFIEANLGDLGLFAGAHKLEQEVVRMLGNLLHASSIDVPSGGLCQSSVCGYLTTGGTESNIQAVRGMKNLVTAGKKEFKGTPNIVIPASAHFSFDKVADMMGIEVRRASLDSEFRVDMASVEKLINENTIGLVGIAGNTEFGQIDPIDKLSEVALENELFLHVDAAFGGFVIPFLEKPQPFDFKVPGVTSIAIDPHKMGLSTIPSGALLFRSPSFLDSLKVSTPYLTTKSQFTLTGTRSGASAAATCAVMKYLGYEGYRKNVQYCMELTSKIVEEARKLGFEPLIEPVMNVVALKVPNPDLVRERLLKKFGWNVSITRTPRALRLVLMPHNSPEDIELFLEDLKKVTAEIKSP

SEQ ID NO: 2550 - protein, 227 aa, Eucalyptus grandis
MAREKIQIKKITNATARQVTFSKRRRGLFKKAEELSVLCDADVALIVFSSSGKLFEYCSSSMKEILERHHSHSENLGKLDQPSLKLQLVENGDYSRLSKEVAEKGHQLRQMRGEELQGLNIDELQQLEKSLEAGLNRVIEKKGEKIMKEITDLQQKGAKLMEETKRLKQQVTEISGRKTTATDSETIINEEGLSSESITNVCSSSSGPPQEDDSSDISLKLGLPYNG

SEQ ID NO: 2551 - protein, 246 aa, Hordeum vulgare
MAGEDATRAATEEELSSVAEAAPVTAQRPVRSDLEKYIPKPYLARALVAPDVYHPQGSKERGHEHRHRSVLQQHVAFFDMDGDGVIYPWETYQGLRALGFNMIVSFVIVIIIHATLSYTTLPSWVPSLLFPFYIDNIHRAKHGSDTATYDTEGRYMPVNFENIFSKNARSSPDKLTFREIWTMTDDQRQANDPFGWVASKAEWILLYMLAKDEEGNLPREAIRRCFDGSLFEFIADERRQAHGKQY

SEQ ID NO: 2552 - protein, 285 aa, Thermosynechococcus elongatus BP-1
MSPIIQWYPGHIAKAERALKEQLKQVDVIFEVRDARIPLASCHPQIRQWASGKQRLLVLNGMDRISDRDRQQWLTWFETQGETVFFTNAQRGEGIRRLEQAAVRAGAAINQRRQQRGMQVRAVRAVVLGFPNVGKSALINRLLQQRVVESAARPGVTRQLRWVRLSPVLELLDAPGVLPMNFKNQEAAVKLAICDDIGQAAYDPCRVAPMLVEIMQQLGYAERLRDRYGLALTDTGETYLYDLAARRYHGDLERAARQLLQDYRRGYLGAIALEHPPQSRNSTIP

SEQ ID NO: 2553 - protein, 294 aa, Arabidopsis thaliana
MGEVWRWNKEVEMDSIRDCLKHFSSIAIDTEFPGCLKETPMDASEEIRYRDMKFNVDNTHLIQLGFTLFDRRGITKTWEINLSDFNEHKCFKNDKSIAFLKSNGLNLDKIGEEGIGIEEFFRDFSQILKEKDGKITWVNFQGSYDNAYLVKGLTGGKPLPETKEEFHETVEQLLGKFVFDVKKIAESCSGLSSRFGLQRIADVLQMKRVGKAHHAGSDSELTARVFTKLTFDLLNSRKQCVRRVDHQQYQLEQQQLMMTRCYIPIPIPIPRPRSVMFAAHHPNPYFGGGYFGMP

SEQ ID NO: 2554 - protein, 264 aa, Oryza sativa (japonica cultivar-group)
MDAAAAAGGEMSRQKATASAPPPPELDMVARAVQRLVARNDAVEALSGGGEAAAGLGAGMAAFEAARGAPAPRIGVAQYLERVHRYAGLEPECYVVAYAYVDMAAHRRPAAAVASRNVHRLLLACLLVASKVLDDFHHNNAFFARVGGVSNAEMNRLELELLAVLDFEVMLSHRVYELYREHLEKEARRDGGGGDMLAGASAAAAAKAGRMAAVSPSKLLERAAVNGAAQHDDWRSLGTAAAAEAANGVRRHRSSSSSRYSFDC

SEQ ID NO: 2555 - protein, 143 aa, Triticum aestivum
  unsure (1)..(143): unsure at all Xaa locations
MSDTDEHHFESKADSGASKTYPQQAGAIRKGGHIVIKXRPCKVVEVSTSKDWGSMGHAKVSLWLPFDIFKWEKKLEDIVPSSHNCDSPMFDRQDYQXLIDIXDDGMSTFSLEXGNTKGDLXXPLDDVLLGQVQDGFADGXDCL

SEQ ID NO: 2556 - protein, 389 aa, Gloeobacter violaceus PCC 7421
MTGSLLDQLRQMTIVVADTGDIQAIEQFTPRDATTNPSLITAAAQMPQYQQIVDDTLKQARAELGPEAKAAAVATLAFDRLAVAFGLKILAIVPGRVSTEVDARLSYDTEATIEKGRSLIAQYEAAGISRERVLIKIASTWEGIRAAEILEDEGIHCNLTLLFGVHQAIACAEAGVTLISPFVGRILDWYKKETGRDYEPHEDPGVVSVTTIYNYYKKFGYQTQVMGASFRNIGEIVELAGCDLLTISPKLLEQLQATDAELVRKLDPDQAAGLEIEKIDMDQATFEKRHAEDRMASEKLDEGIKGFTNALVALEKLLADRLARLEGEVALNQAFESIFRTFDLDGDGFITREEWMGTDAVFDAIDLNHDGKITAEELGAGIGAVSKLA

SEQ ID NO: 2557 - protein, 116 aa, Brassica napus
STHASVHGVYDLAYLLKVLIIQDLPEKPKGFDELIRLYFPRFCDIKHLMKFCIGLSGGLNKLAELLGVERLGISHQAGSDSLLTSRIFMILQDSFFNGSVEKYSGVLFGFSVENDH

SEQ ID NO: 2558 - protein, 363 aa, Aspergillus niger
MPAYNIVVFAGDHWGPEVTAEAIKVLRVIEKSRDDITLNLQDHLLGGASIDATANPLTDEALAAAKNADAVLLGAIGGPKWGTGAVRPEQGLLNVRKEMGTFGNLRPCNFAAPSLVEHSPLKASVCEGVDFNIIRELTGGIYFGDRKKMTAAATMDTEPYSRAEIERITPRAHLALQHNPPLPVWSLDKANVLATSRLWRKTVTEIMAKEFPQLKIEHQLIDSAAMIMVKNPRQLNGIIVTSNLFGDIISDEASVIPGSLGLLPSASLSGIPDGKGRVNGIYEPIHGSAPDIAGKGIVNPVAAILSVAMMMQYSFGRFDEARAIEAAVRNVLESGVRTGDIGGKATTSEVGDAVAAELEKLLK

SEQ ID NO: 2559 - protein, 155 aa, Brassica napus
MTSASELFSTRRSRPGRSDPDLESDPSLYRHHHHRRHGLHHHNHRHDSDGCDSPRPRLQRFCHHLGLPERRPARDVQGTPQYLESESYSLGILNGSERLPGSVLLARARLVQRLRGVSLSTNRSVQMESSFQVSYECNKKPHGLTQGAIDGLHRA

SEQ ID NO: 2560 - protein, 371 aa, Aspergillus niger
MSGTRAYNILVLPGDGIGPEVMAEAIKVLRTFNSSSMQFHLQEELIGGISIDTHGHSVTQPVKDAAVAADAVLFAAVGGSKVDHIRRGLDGPEGGLLQVRKAMDIYANLRPCSVDVPSREIARDFSPFRQEVIEGVDFVVVRENCGGAYFGKKVEEENYAMDEWGYSTTEIQRIARLAAELALRHDPPWPVISLDKANVLASSRLWRRVVENTISVEYPQVKLVHQLADSASLIMATDPRVLNGVILADNTFGDMLSDQAGSLIGTLGVLPSASLDGLPHPGKQEKVRGLYEPTHGSAPTIAGKNIANPTAMILCVSLMFRYSFNMENEARQIEDAVRAVLDRGLRTPDLGGNSSTQEFGDAVVAALQGKY

SEQ ID NO: 2561 - protein, 401 aa, Vibrio vulnificus YJ016
MKPSDDKRSAREQSQTEKEFKMPSSLTKKGELGGAGLRGQSAGSTALCTVGKTGTGLTYRGYDITDLANHAQFEEVAHLLLRGHLPTQQELDAYKTRLIGLRGLPAELKQALELIPASAHPMDVMRTGCSVLGNLEQETDFSQQLDATERMLALFPAIICYWYRFSHDGVRINTQDQSQDCIGGYFLKMLTGKEPSELHKQVMHCSLILYAEHEFNASTFAARVCASTLSDIHSCVTAAIGTLRGPLHGGANEAAMEMIENWQTPEEAESNILRMLANKEKIMGFGHAIYRESDPRNALIKRWSKALSEAVGDTHLYAVSERVEAVMKREKDLFCNADFFHASAYHFMDIPTKLFTPIFVMSRLTGWTAHVFEQRANNRIIRPSADYIGPDHQDWVPIEQR

SEQ ID NO: 2562 - protein, 233 aa, Musa acuminata
RIENKINRQVTFSKRRNGLLKKAYELSVLCDAEVALIIFSSRGKLYEFGSVRMSKTLERYQHWCYASQDPNVVNRDNAQNWCQEMSKLKAKFESLQRSQRHLLGEDLGPLSVKELQQLERQLESALSQARQRKSQLILEQMEELRKKERHLGEINKQLRDQIEVEGATLKAFQGSWCSDAMIGSNAFAAQPSHSAGMDREPMLRIGYHQFVPADAAIPRNPIGENNFMLEWVP

SEQ ID NO: 2563 - protein, 433 aa, Oryza sativa (japonica cultivar-group)
MCCVSPSPSASATSSRRGQIIAPDSPPSLRSYSDDSPPSTRAPAVHPEVEFEAKPAKRARVVPGGGGGGGGADAAAGDGRDRISDLPDAVLLSILSFLPFRDAGRTAVLSRRWRKLFDESLLDFNACQPFPPEEGRGCEWVIRSITDILAARPDVRIRSFRFVMYGQGFADHLADVDRWFRTLAHRGVRQLDVDMLYTVPAPLLPGSILEFSSLEILRVFNCNFLDLSLPVLRLPVLRTLDLSNVSMSQGFLQAMMSNCPSLECTKLKNITGLDKICVRSRNLVRLFGDFSYLKELVVEDAPNLEELVGIGLPLAAAKVKIVFAPKLRPDSRSICRPVDVEEWDTITSVQCIEHSMNKLVFEDFGGEDCQWRFLTFLLGMARALKDIDFHCSESKDWASLKLCETESSSIVQSSTKNKWRCSFVDCGLIRSVV

SEQ ID NO: 2564 - protein, 396 aa, Shigella flexneri 2a str. 301
MLDAQTIATVKATIPLLVETGPKLTAHFYDRMFTHNPELKEIFNMSNQRNGDQREALFNAIAAYASNIENLPALLPAVEKIAQKHTSFQIKPEQYNIVGEHLLATLDEMFSPGQEVLDAWGKAYGVLANVFINREAEIYNENASKAGGWEGTRDFRIVAKTPRSALITSFELEPVDGGAVAEYRPGQYLGVWLKPEGFPHQEIRQYSLTRKPDGKGYRIAVKREEGGQVSNWLHNHANVGDVVKLVAPAGDFFMAVADDTPVTLISTGVGQTPMLAMLDTLAKAGHTAQVNWFHAAENGEVHAFADEVKELGQSLPRFTAHTWYRQPSEADRAKGQFDSEGLMDLSKLEGAFSDPTMQFYLCGPVGFMQFTAKQLVDLGVKQENIHYECFGPHKVL

SEQ ID NO: 2565 - protein, 426 aa, Mycoplasma penetrans HF-2
MLLKNCSILKNNKLIKSDILIKNNRIIKIAKKIENKNNEEEIDIKSNLVIPGLIDVHVHFREPGFIHKETIKTGSMSAAKGGFTTVMTMPNLNPVPHNLENLNVQLDLIKRHSVIRCIPYGSISVDENGEQLSDVENLSKYVFGFSDDGKGIQNNNLMYQAMLLAKKHNKPICAHCEDNSLANKGVINEGVASEKLNLKGINPLAETIQIARDLVLAKATKCHYHVCHVSTKESLELIKEAKKKKINVTCEVTPHHLLSIDQDILNDNGKWKMNPPLRSIQDQKALIKAVKNKLIDIIATDHAPHSKQEKNCSFNDAAFGIIGSEFAFSLLYTKFVKTKVFSLQLLVDLFTKNVAKIFKLPYGVLEENKIADLAVFDLNKSFEIKEDEILSKSKNTPYLNQKVYGVSLLTISNGKIVYLNEKELSV

SEQ ID NO: 2566 - protein, 488 aa, Bacillus halodurans
MAHTVSEQRIHEVGSMKRDHYRMVINGERVDSDETFETFNPAKGEILATVAKASREHAEKAVQAARHAFDHGKWRKYPVGKRARVLNQIAAIMRERFQELVEIEVLNSGKAISAAQPQINQAIEDFEFYAGAIVGHRGTVNNVPNGFLNYTQKEPVGVCAQIIPWNYPLMMAAWKVAPALAAGCSVVVKPASLTPITAILLNEICHEAGVPEGVVNTVAGAGSVVGDYLVGHEDVNKVAFTGSTPIGKDIMEKASHTLKRVTLELGGKSPNLVFADADMEAAVAGSLFGIYFNTGQSCEARSRLFVHEEIYDEFIEEFITRAKKLQLGDPFDKGTHVGSIISRDQLEIIDSYVRSAEEEGATIALGGKERRVEGFENGHWYEPTVITNVTPDMKAVQEEIFGPVVVVETFQDEREVIKRANDTKFGLGSAIWTKDQGRATRVAHQLEAGIVMVNCPFSAFPGTPFGGYKESGFGRELCVETLDLYIGR

SEQ ID NO: 2567 - protein, 368 aa, Nostoc sp. GSV224
MPLAAVMTAPNQPVEVQQLPDPILEKGGIILETLYSEVCGTDVHLLHGRLEGVPYPIIPGHFSVGRVVETGGAVSDVNGKLIQPGAIATFLDVHETCYNCWYCLVAKASTRCPQRKVYGVTYSAKDGLLGGWSELIYLKPGVKVLTLPEEVSPKQFIAGGCALPTALHAIDRAQIQIGDVVVVQGCGPVGLSAAILALLSGAGKVIVIDKFESRLVVAKSFGVDETLAIKADDPRQHIERVLELTNGHGADVTIEATGIPIAVKEGLNMTRNGGRYVIVGHYTNTGEILINPHLEINLKHIDIRGTWGIDFSHFYRMIELLKRHSDSSKNIAWSSIISRSYTLKEINQALADVEQGSVLKAVIQPNLS

SEQ ID NO: 2568 - protein, 235 aa, Musa acuminata
RIENKINRQVTFAKRRNGLLKKAYELSVLCDAEVALIVFSNRGKLYEFCSSSSMLRTLERYQKCNYGAPETNIISRETQSSQQEYLKLKARVDGLQRSQRNLLGEDLGPLNIKELEQLERQLDASLRQIRSTRTQYMLDQLGDLQRLGTNAMWSLIKPWKIRLEESSEADQQQLWDPNTHAVAYGRQQPQPQGDGFFQFIDCEPTLQIGYHPDQMAIAAAAAAAPGPSYMPGWLA

SEQ ID NO: 2569 - protein, 440 aa, Triticum aestivum
  unsure (1)..(440): unsure at all Xaa locations
MSNYHDDHVEDMEDDYDMDDPAEDMVDAHHERGLRDSDSEDDEYAHSNDKIPDTSAADARKGKDIQGIPWERLAITRENYRQTRLEQYKNYENIPNSGEAAAKECKPTVKGGMYYEFRQNTRSVKSTXILHFQLRNLVWATSKHDVYLMSHYSVLHWSALSGVDTELMNVQGHVAPREKHPGSLLEGFSQTQVSTLAVKXDNLLVAGGFQGELICKHLDREGISFCCRTTYDDNAITNAVEIFNTASGAVHFMASNNDSGVRDYDMERFQLCKHFQFDWPVNHTSLSPDGKLVVIVGDDPNDLLIDANSGXKTLHSMKGHHDFSFASAWSPDGRTFATGTNDKTGRIWEARNLSKAVHVLKGNLGAISSFRFTSDGQFLSMAEPVDFVERLQEKANSNTSSERYFVGASARTYMSPSSDGRIEDMWDRTYGSLLQFGRPV

SEQ ID NO: 2570 - protein, 390 aa, Nostoc punctiforme PCC 73102
MSKQLGQKIAPTPISNDINVVDLIDQYFTAYNSARLREICQLLSRDVLTEGVTVGVSLSGAMTPAGFGVSALAPLIRNGFIDWMISTGANLYHDMHYGLGFELFAGNPFLDDVKLRQEGTIRIYDIIFGYDVLLETDAFIRKILQGEAFQKRMGTAEFHYLLGKYVREVEKQLGVQHSCLLATAYEYGVPIYTSSPGDSSIGMNVAALALEGSQLVLDPSIDVNETAAIAYNARESGGKSAAVILGGGSPKNFLLQTQPQLHEVLGLEERGHDYFVQFTDARPDTGGLSGATPSEAVSWGKIDPEELPNTIVCYTDSTIALPLVTAYVLNKCQPRPLKRIYDKREAILDKLQKDYLAAKTQPSDQVPAAVAESAQKQTATYPCGRLIPNT

SEQ ID NO: 2571 - protein, 238 aa, Oryza sativa
MCGIKQEMSGESSGSPCSSASAERQHQTVWTAPPKRPAGRTKFRETRHPVFRGVRRRGNAGRWVCEVRVPGRRGCRLWLGTFDTAEGAARAHDAAMLAINAGGGGGGGACCLNFADSAWLLAVPRSYRTLADVRHAVAEAVEDFFRRRLADDALSATSSSSTTPSTPRTDDEEESAATDGDESSSPASDLAFELDVLSDMGWDLYYASLAQGMLMEPPSAALGDDGDAILADVPLWSY

SEQ ID NO: 2572 - protein, 99 aa, Glycine max
  unsure (1)..(99): unsure at all Xaa locations
ASSMISSPAVTTVNLAGAGMVAPFTGLKSLAGLPTKKTYYDITSLAYTGGXLHCMHVWPPVGRKKFDTLFYLPDLDYAQLAYVLKYLLANGWIPCYEFE

SEQ ID NO: 2573 - protein, 378 aa, ASPERGILLUS NIDULANS FGSC A4
MPSSQPASSHITTAPPKAVKPLASKSKPLEPKAPESKPSDSNVPEPVEPEAKAPETKSFKEALVNGAGDGDKQTDSSNSTSPSSFQSDSIRDSSPNTSRSNSSSSSQPTKEETDKDTEKNIKERNKQEQEKDTTTIPIVSKHCAVTSKRLPATNVSIEKSGVARCNVVDGATSDTSIKDFHEYTPMQQHILFWDRDRDGQIYPYDTYRGFRDLGFNILFSFLAVLIINLNFSYPTRLAHSFLPDPRFRVYVDSIYKAKHGSDSGSFDAEGRFIPQHFEDMFAKYDGDQDGALTFGELFNMMHGNRCAADPFGWGAAFFEWVTTWLLIQKDGKVYKDDLLGVYDGSLFWKIAKARKSPQGWSQGFGLGGDGFLGGVKVI

SEQ ID NO: 2574 - protein, 348 aa, Tropheryma whipplei str. Twist
MEDLYGILGVDHNASVDEIRRAYRRLARELHPDINPDSADRFKAVTHAYNILSDPEQRQRYDRHVSGGFSSDFNLSDLFQSFFDTSAEFQRGSDLLVNIDIDLKTAIYGGSQVVKIDSLVVCDVCNGTRSEPGYKAEVCFDCNGSGVVRGEVRTTLGNLITQNTCSKCRGNGERIDHPCRRCYGNGSRSAPRDITINIPPGVETGMRIKIPNMGNAGGAMPGDLYVDCKVKEHPYFLRDGQDLYCRLDISLVDALLGTKVKIDSLDGELAVVIPALSQNRDVIRIANKGAVTLRGGKGDLCIVLNVLLMQKLDPEHRALLKKIMPNPPKPKLAKRTSGFFSWLKNKFT

SEQ ID NO: 2575 - protein, 114 aa, Triticum aestivum
MERRAARGTSDHRRRMQMPPAPVGQKQQQPQRRGGPKSCQRTPPPPGCFTIQLLMVFLWVAASLAFLPLVLPPLPPPPLSLLLVPVCLLAVLAALAFVPLDAHNNVVVGGSSCL

SEQ ID NO: 2576 - protein, 315 aa, Actinobacillus pleuropneumoniae serovar 1 str. 4074
MLGNEKEPAAARRYTARGNLVAVISNGTAVLGLGNIGALASKPVMEGKGVLFKKFAGVDVFDIEINEHDPDKLVDIIASLEPTFGGINLEDIKAPECFYIEKKLRERMGIPVFHDDQHGTAIIVGAAAVNGLQIVGKDIGEVRLVVNGAGASAIACTNLLRSLGFKKENITMCDSKGVIYQGRGDNMDETKQFYAIEDNGWRTLADAVAGADVFLGCSKAGALTQDMIKTMAKDPLILALANPVPETTPHEAKAVRADAIVCTGRSDYPNQVNNVLCFPYLFRGALDVGATTINEEMKMAAAHAIADLAKEPVPF

SEQ ID NO: 2577 - protein, 102 aa, Glycine max
  unsure (1)..(102): unsure at all Xaa locations
QVGGEIFDLKKLVLPPLAANGKKEESIGAPIDTYPAFPGWYADVSWPGEAHPFKLEKILFHGKSEFQELLVFESSKQGKVAILDGHIQLTENDEFAYXEMLT

SEQ ID NO: 2578 - protein, 469 aa, Nicotiana tabacum
MVFYRGVSLLSKLRSRAVQQTNLSNSVRWLQVQTSSGLDLRSELQELIPEQQDRLKKLKSEHGKVQLGNITVDMVLGGMRGMTGLLWETSLLDPDEGIRFRGLSIYECQKVLPAAKPGGEPLPEGLLWLLLTGKVPSKEQVDSLSQELRSRATVPDHVYKTIDALPVTAHPMTQFATGVMALQVQSEFQKAYEKGIHKSKLWEPTYEDSMSLIAQVPLVAAYVYRRMYKNGNTIPKDDSLDYGANFAHMLGFSSSDMHELMKLYVTIHSDHEGGNVSAHTGHLVASALSDPYLSFAAALNGLAGPLHGLANQEVLLWIKSVVEECGENISKEQLKDYAWKTLKSGKVVPGFGHGVLRKTDPRYTCQREFALKHLPEDPLFQLVAKLYEVFLQFLQNLAKLNPWPNVDAHSGVLLNYYGLTEARYYTVLFGVSRALGICSQLIWDRALGLPLERPKSVTMEWLENHCKKA

SEQ ID NO: 2579 - protein, 171 aa, Glycine max
MADGPASPGGGSHESGDHSPRSNVREQDRYLPIANISRIMKKALPANGKIAKDAKETVQECVSEFISFITSEASDKCQREKRKTINGDDLLWAMATLGFEDYMDPLKIYLTRYREMEGDTKGSAKGGDSSAKRDVQPSPNAQLAHQGSFSQNVTYPNSQGRHMMVPMQGPE

SEQ ID NO: 2580 - protein, 371 aa, Malus x domestica
MGKGGMSDGDHADRCCGEAINGDVQQENMAAWLLGVKNLKIQPYKLPNLGPHDVRVRLKAVGICGSDVHHFKNMRCVDFIVKEPMVIGHECAGIIEEVGSEVEDLVPGDRVALEPGISCKRCNLCKQGRYNLCRKMKFFGSPPNNGCLANQVVHPGDLCFKLPDNVSLEEGAMCEPLSVGIHACRRANVCQETNVLVVGAGPIGLVTLLAARAFGAPRIVIADVNDERLLIAKSLGADAVVKVSTNIEDVAEEVAKIQKVLENGVDVTFDCAGFNKTITTALSATRPGGKVCLVGMGQREMTLPLATREIDVIGIFRYQNTWPLCLEFLRSGKIDVKPLITHRFGFSQKEVEEAFETSARGGNAIKVMFNL

SEQ ID NO: 2581 - protein, 480 aa, Pseudomonas putida KT2440
MHLTWLRSDLRIDDNTALSASTERGPTIALWLVSPGQWQAHDDADCKVDFWLRNLHDLRQSLEKLNIPLLIRTIDTWDQAPQAVLDICRQHQVQSVHWNEEYGINEQRRDDATRAMLEKSAIQAHSHLDQLFFRPGTVLTRSGDYFQVFSQFKKTCLEHLHRSLPALARRVKRQAPLNIGSDPIPQHVEGFGKTTPALRDHWPAGEAEAQSRLSRFLDETIDDYHHLRDLPAKPGTSQLSPYLAAGVISPRQCLHGALAGNRGEFDSGSTGVQTWINELLWREFYKHILSGYPQVSRHRAFRAQTEALPWRDAPADLAAWEQGRTGFPIIDAAMRQLLHTGWMHNRLRMVVAMFLSKNLLIDWRKGERHFMRHLIDGDLAANNGGWQWSASTGTDAVPYFRIFNPVSQSQRFDPQGRFIRHWVPELQELDEKAIHQPIKSTDLFGNTSYLSPIVDLSSSRQRALEAFKGLPRRQNQGITS

SEQ ID NO: 2582 - protein, 356 aa, GIBBERELLA ZEAE PH-1
MSFRTLRIGLIPGDGIGKEVIPAGRRILEALPSSLGLKFDFVNLKAGFETFEQTGAALPDKTVEVLKNECDGALFGAVSSPTQAVKGYSSPIVALRKRLDLYANVRPVKTVMTAAKPIDMVIVRENTEDLYVKQEKTYDTPEGKVAEAIKRISEKASFRIAAMAGDIALRRQKIRDAGASSIHKSPLVTITHKSNVLSQTDGLFRATSKRALADPKFSSVAVEEQIVDSMVYKLFRQPEDYDVIVAPNLYGDILSDGAAALVGSLGLVPSANVGEGFAIGEPCHGSAPDIQGQNIANPIATLRSTALMLEFLNEEEAAAKIYAAVDGNLEDGKLLSPDLGGKATTEEVVADILRRL

SEQ ID NO: 2583 - protein, 368 aa, Malus x domestica
MGKGGQSCNGMVRQAKPVEQENMAAWLVDVNTIKILPFKLPSIGPNDVRIRIKAVGICGSDVHYLKTMKCADFEVKEPMVIGHECAGIVDKVGSEVKHLVPGDRVAVEPGISCARCQQCKGGRYNLCPDMKFFATPPVHGSLANQIVHPADLCFKLPENVSLEEGAMCEPLSVGVHACRRANVGPETTVLIIGAGPIGLVSVLAARAFGAPRIVIVDMDDKRLAMAKSLGADEAVKVSTKMEDLDDEVAEIKEAMISEVDVTFDCVGFNKTMSTGLNATRPGGKVCLVGMGHGVMTVPLTPAAAREVDVVGVFRYQNTWPLCLEFLRSGKIDVKPLITHRFGFTEKEVEEAFATSARGGNAIKVMFKL

SEQ ID NO: 2584 - protein, 396 aa, GIBBERELLA ZEAE PH-1
MCSLAASQPLTNSSNSTTQEHKINNFLDHAQTLQAPLPNPSLQVTADHNLKRVDAPVYAPQAGEVLLHIKATGICGSDVHFWKTGRIGSLVFEGDCIIGHEAAGVVIQVGEDVDNFKPGDRVAVEPGVPCGHCFLCKDGRYNLCEDVQFSGVYPYAGTLQRYKVHPSKWLHKLPDNVSFAEGALLEPLSVVLHGINSAPITLGTPVVICGAGPIGLLALASARASGAHPLVITDVEPKRLAFAKEMVPTVKTYQVDTTKSNEENGKNVRRLFGETEYVQPRVVFECTGIESSVCSAAFMVRRGGVLMVVGVGRSIMNNLPFMHLSLAEIQIRFINRYKDTWPAGIACLEGGLVDAKKLVTHVFPLEQALEGLTLSSDPKNGCIKVQIVDDTETTFF

SEQ ID NO: 2585 - protein, 170 aa, Triticum aestivum
  unsure (1)..(170): unsure at all Xaa locations
AARDPIGITSFYQGRSSTLPGAIFFASELKCLSSVCDEIIAFPPGHVYDSKTNETTRYFKPSWWDPHRQPAAPVDYRLLRTTLEKSVKKRLMAEVPFGVLLSGGLDSSLIASIAQRETLRLKAASLEQSSKLFDSKGTVXKQCRGKGKQLVGIDEDNNLSTLANYSAKPF

SEQ ID NO: 2586 - protein, 493 aa, Aquifex aeolicus VF5
MSVSTALKLCIFFTGFAGIVAEYSLATLATYLLGNAVLQWSVVISIFLLSMGLGSHASRYIPDDKTPLAFVLAELFLSLLVPFSVPIAYHFANNFLHLQTVIYGLSFVIGSLIGLEIPLAVRINNMYEELKVNISSVLEKDYLGSVPAGLLYAYLFLPKLGLPLTAILAGFFNLISAFLLVKVLKPKKFLKFLAIFTFFLLATYAVGHKRITLYEEQKFYGEEIIHFEQTPYQKIVLTRFGKHYSLYLDGHLQFSTLDEKRYHETLVHVPASFLKRYEKALILGGGDGLALRELRKYPFGEIHLVDLDPKMIEFSKKNLVMRKINENSFYDTRLKVFSEDAFNFVKKTKEKYDFVIVDLIDPRTPSSARVYSLEFYMSLKNKLKEDGIFITQAGDTFYKREVFCSILKTIKKAGFYAYPLVVYIPTFGEWGMVIGSKEPLNFENFELKEKTEFLNRERALAFYTLGKSLECPNVEVNTLLKPVLIYYYYKIQN

SEQ ID NO: 2587 - protein, 161 aa, Zea mays
  unsure (1)..(161): unsure at all Xaa locations
MTMMINPDVDLIDRGGSVVVREVWAYNLVSEFHLISAVVEDFPYISMDTEFPGVIFKAEPAILRRGNPGYLYXLLXIHVDVLSLIQVGITLSPTRRNPPDLGGGVDGSRFIWEFXFRDFDVDRDAHAGESIELXRRHGIDFERPAARGEIGEVXKLMMSSG

SEQ ID NO: 2588 - protein, 394 aa, Zea mays
CSLEKPLLSHLRFFPWVVDEVHFKVWRQGRTGYPLVDAGMRELWATGWVHDRIRVVVSSFFVKVLQLPWRWGMKYFWDTLLDADLESDALGWQYISGSLPDGRELDRIDNPQFEGYKFDPHGEYVRRWLPELARLPTEWIHHPWDAPESVLQAAGVELGSNYPRPIVELDAANSRLQGALSEMWELEAASCAAIENGMEEGLGDSTDEPPIDFPQELRMEVDRQPAQPAIIHTPVVAGWRREDQRVPSMTSSLIRAETELTADFGNTSEDSRPEVPSNIHLQARAEREETVDGATGNTVRVNGNQQQQNLQNNMHRVLGIAPSISEASSSWTGREGGLVPVWSPPAASVHSDPYTADEADISSRSYLDRHQQSNTMMNWSQLSQSLTTGWEVDN

SEQ ID NO: 2589 - protein, 357 aa, Phanerochaete chrysosporium
AVCPDGTRVSHAACCAFIPLAQDLQETIFQNECGEDAHEVIRLTFHDAIAISRSQGPKAGGGADGSMLLFPTVEPNFSANNGIDDSVNNLIPFMQKHNTISAADLVQFAGAVALSNCPGAPRLEFLAGRPNKTIAAVDGLIPEPQDSVTKILQRFEDAGGFTPFEVVSLLASHSVARADKVDQTIDAAPFDSTPFTFDTQVFLEVLLKGVGFPGSANNTGEVASPLPLGSGSDTGEMRLQSDFALAHDPRTACIWQGFVNEQAFMAASFRAAMSKLAVLGHNRNSLIDCSDVVPVPKPATGQPAMFPASTGPQDLELSCPSERFPTLTTQPGASQSLIAHCPDGSMSCPGVQFNGPA

SEQ ID NO: 2590 - protein, 218 aa, Glycine max
QSIPLSPPTKYSLQHFKKPWAHEHEPVRNLVDAVNKIKPTVLIGTSGQGRTFTKEVIEAMASINERPIILSLSNPTSQSECTAEEAYKWSQGRAIFASGSPFPPVEYEGKVFVPGQANNAYIFPGFGLGLIMSGTIRVHDDLLLAASEALAAQVSQENFDKGLIYPPFTNIRKISAHIAANVAAKAYELGLATRLPQPKDLVKFAESCMYTPSYRSYR

SEQ ID NO: 2591 - protein, 214 aa, Zea mays
MAATRASPVLLLLLTVQLSLLFRLPDSPSTLALALAAEPEQQNAKQHRQPALLVQSTCNSTSFYDLCIAALAADPASSTADVPGLGAIAVSAAANNASGTAAFLGNASDAAATPQADRALLRACAGKYAAARDALVQARASLAEQAYDYAFVHVSAAGEYPAVCRTLFRRRQQQQRGASRSAYPAELAKREEALRRLCTIALDIISLLQNQETY

SEQ ID NO: 2592 - protein, 266 aa, Mycoplasma penetrans HF-2
MKKRIGYGSFEVNDVPTLKKCIKQAVLSGYDFVDTAYYYQNEEAIGKAIKELREEGFDKPILVQTKIWPEHYGNVRDAVLLSCQKLQTNKLDMCLLHRRHFNLNMDLSAWEQLIECQKEGLVGEIGVSNFDRDALEIMRQRTGVYPLSNQIELSVNNLREDRVVYNHSKGIEVQAWSPLGDLENNLKNPVLIEMAKKYNTDVAGVLIAYVGSLNCSIIVKTSNPDRVVSNYKAFQIILEESDVEKLKKLNTYKIKYSESFIYDIDN

SEQ ID NO: 2593 - protein, 228 aa, Haloarcula marismortui ATCC 43049
MKQGGSDAAKQAAGESAAEAVEDATVVGLGTGSTAAYAIRAIGQAVDAGLDVVGVPTSFQSRQLARDCGIPLADLDDVSVDLAIDGADEVASGNLIKGGGAAHAREKIVDASADRFLVVADPTKEAAVLSYPVPVEVLPMARSTVVTAVEELGGDPTLRRAERKDGPVVTDNGNLVLDCDFNSIHDPAALASDLAALPGVVEHGLFVGMADEIHVGTADGVTVRTLSK

SEQ ID NO: 2594 - protein, 125 aa, Synechococcus sp. PCC 7002
MAGSEVKADYWINEYITPWDIYSHGITKILAYKQTQFQEMAIVESGAYGKALVLDGKWQSCTGDEFLYHEPLVHPAMIAHGAPKKVLILGAGEGATVREVLRWQSVEKVMMVDIDGEVVEACKEF

SEQ ID NO: 2595 - protein, 339 aa, Pisum sativum
MVQEKKLVDEVSGWLRIYDDGSVDRTWTGPPEVNFMIEPVAPHEEFIDGVATRDVTMSTTTNDNFIHRARLYLPEKTPTENEKLPILIHFHGGGFCITEPDCFMYYKVYTRFVKSTRSICVSPFLRRAPEHRLPAAIEDGFATLRWLQSVAKGDAHDPWLEKHGDFNRVFLIGDSSGGNLVHEVSARASSTDLRPVRLAGAIPIHPGYVRSERSRSENEMPQSPFLTLDMLDKFLSLSLPIGSNKDHPITCPMGEAAPPLAGFKLPPFLLCVAEKDLLRDPQMEYYEAMKKDNKEVDLFVSKNMTHSFYLNKIAVDMDPTVSAELNALMARVKDFIEKH

SEQ ID NO: 2596 - protein, 331 aa, Listeria monocytogenes str. 4b H7858
MMTISQVKQTAKESLRGNWGIAIGIFVLAWLIETVGGGLIGWIPVIGWIAIFLLTGPLYTGVAWVYLAISRREQPDVAYMFSGFKQFGRTVLAYLLISIFTFLWSLLLIVPGIIKTYSYSQTFFILRDNPNISALDAITESRHMMNGHKGRLFGLSLTFLLWYLIPLAVAIAGTVIVAGGMATTSYTADPAEVLSALAAGATFGGLVLILASWLITLGISLYVYPYLITSIAVFYDDLYAATEGTFTEETVIVEEEVNPFGTTEADPFAEDTHPEGFGPEATKEPETPVVPEAPEAPETPETPEVPETPEAPETPEAPETPEAPKDNNEPK

SEQ ID NO: 2597 - protein, 492 aa, Pseudomonas putida
MKQYKNFINGRFVESDKRFAGINPATGVRFADVHEATREMVDEAVSAGHRAVRGWGSASVSDRADMLYRIADEIDRRADDFLTAEVSDTGKPVSLASKLDIPRGAANFRIFADILKTAPLDTFRTDLPGGSHAINYAVRKPLGVVGIISPWNLPLLLFSWKVAPALACGNAVVAKPSEETPGTATLLAEVMQTVGLPAGAFNLVHGFGPNSAGEFITTHPGINAITFTGESKTGTAIMHAAAEGVKPVSFELGGKNAAIIFADCDFDKTVAGMTRAAFLNSGQVCLCSERIFVERPIYDRFVKALAERAKQIKLGDPTDEATCMGPVISAAHRDKVLSYYALAREEGAEFITGGGTPSFGNQLDGGFWVEPTLLAGLPDDARCVTEEIFGPIGHVTPFDSEAEVIQRANATPYGLAATIWTSNVNKAHRVAQSMNVGVAWVNAWFLRDLRTPFGGSGLSGIGREGGLHSLNFYSELTNVCIHVDAPDGSHDR

SEQ ID NO: 2598 - protein, 123 aa, Glycine max
  unsure (1)..(123): unsure at all Xaa locations
EARVSLLGTEFIKVATNIDPDCXMIINEKGRNAKCAMRKAFVDEXKSXLPKHILYKEHQQITDRDGXVETDSLKAHAEKPXPDRMIXNAANIFPFNTPTXRETYHYTMIIDRFFPQKSPRLTV

SEQ ID NO: 2599 - protein, 371 aa, Triticum aestivum
DAWANGSQVPQEFVEKIGKVFEAILERSGKLREEMKEDISIAKAIAIVLERNPHLRQEGIAHDVLQWYLCRMEGWFATDADAISLQCWDQEVLLPGGHGLMVRGYRPVINTLAKGLDIRLGHRVVEIVRHWNRVEVTVSNGKTFVADAAVITVPLGVLKSNTIKFEPRLPEWKEEAIRELSVGVENKIVLHFSEVFWPNVEFLGVVSSTTYGCSYFLNLHKATGHAVLVYMPAGRLACDIEKMSDEAAAQFAFSQLKKILPNAAEPLNYLVSHWGSDENTLGSYTFDGVGKPRDLYEKLRIPVDNLFFAGEATSVQYTGTVHGAFSTGEMAAEECRMRVLEKFRELDMLEMCHPMAEQTATVSVPLLISRL

SEQ ID NO: 2600 - protein, 402 aa, Bacillus thuringiensis serovar konkukian str. 97-27
MLSEKTIEIVKSTVPLLQEKGVEITTRFYEILFSEHPELLNIFNHTNQKKGRQQQALANAVYAAATYIDNLEAIIPVVKQIGHKHRSLGIKAEHYPIVGTCLLRAIKEVAGAPDEVLNAWGEAYGVIADAFISIEAEMYEEAAHKEGGWKDFRNFVVVKKVKESDVITSFYLKPEDGGKVSSFIPGQYVTVQINIEGETYTHNRQYSLSDAPGKEYYRISVKKEKGVDTPDGKVSNYLHDHVKEGDMLPVSAPAGDFVLNMDSTLPVVLISGGVGITPMMSMLNTLIEQDSKRNVCFVHAAINSNTHAMKEHVEAVDNEYEQVKAYTCYSAPTEKDLEMKNFDKEGFVEREWLQTIIPTTEAEFYFCGPVPFMKHINAVLTDLGVKQEHIHYEFFGPAASLQ

SEQ ID NO: 2601 - protein, 311 aa, uncultured bacterium
MQLDPQMKAILDQAAAAGAQPFHTMTPAQARAAIDTMFQAFRGQPKEVAQSEDRKVPGPAGDIPIRIYTPAGSGPFGALVYFHGGGWVIGNIETHDVTCRDLAHGTPCVTVSVDYRLAPEHKFPAGPEDCYAATKWVSDNARSLNVDPNRIAVGGDSAGGNLAAAIALMARDRGGPKLAYQLLIYPAIDSADETPSHREFTKDGYILSRADMEWFWGHYLADKDRANPYACPSRAKSLAGLPPAFVLTAEFDPLRDEGEAYGQELRKAGVAVTAKRYDGVCHGFVSMASLLDAGKRAVAECCKELRGAIGR

SEQ ID NO: 2602 - protein, 498 aa, Magnaporthe grisea 70-15
MSTMALHRTASTKSDTTMACPNGLVKNLPLGGNTKCSACGSHRAEKRRASSTSSVSTTPTSPSFSEADWSPLHNSSQEPQPEYTKVANSLMRAITDYVGHLQNENLPMPSLEPAADAHGVLKHPEGVAARNAVVELAQRIVAMTMDPDMNLLISSLQFHFCSSLKVAIDLKVHEHVPRRGSITSSELAAKVGADESILVRIMRALILKHVFCSPTPGTYAHTAMSWCMMKSPDAIDLLGHRLDESFRASSRQADALALVNYREPDEADVKGFSMAFGTTENFWEVLGHEGEEERAQRFNRAMRAVSLNTLDVIPRMYPFDRIRGDGLLVDVGGGLGQVARAIMGAHRGAGLRSCIVQDAHAGDDAKKQPDVMEANRKLGVELQKHNFFDPQPVKGASVYFLRHIFHDWPDRACVKILKQTVEAMGKDSTLLICDQVVDDEASPQATLYDIDMWSLFGGKERNRSEWEALFRSADERLYIKKVWTTAEAPTTMLEVCLS

SEQ ID NO: 2603 - protein, 376 aa, Candida albicans SC5314
MLAARSSIRRCFSTSSTTLKSLKIGLIPGDGIGREVIPAGKAVLENLPAKHDLQFEFVNLDAGFELFKKTGTALPDETVDVLKKECDGALFGAVSSPTTKVAGYSSPIVALRKKLGLYANVRPVKSVEGIGRPVDMVIVRENTEDLYIKEERVYKKEDGTKVAEAIKRITETASTRIAKMAYEIALQREAVRKGTSGKQLHEKPSVTVTHKSNVLSQSDGLFRETCRAVYDANANEYGGIEYKEQIVDSMVYRMFREPEIFDVVVAPNLYGDILSDGAAALVGSLGVVPSANVGDNFAIGEPCHGSAPDIEGKGISNPVATIRSTALMLEFMGYPEAAATIYQAVDANLAEDKIKTPDLGGNSTTQEVIDDIIRRF

SEQ ID NO: 2604 - protein, 309 aa, Triticum aestivum
PRVRTPLSALYVASLLHEAGLPDGVLNVVPGPRPPAGAALCSHMGVDKLAFTGSTGTGKIILELAARSNLKPVTLELGGKSPFIVMDDADVDQAVELAHRALFFNQGQCCCAGSRTFVHESVYDEFVEKSKARAQRRVVGDPFKKGVEQGPQIDGQQFKKILGYVKSGVDSGATLVTGGDRVGSSGFYIQPTVFADVEDEMKIAQEEIFGPIQSILKFREVGEVVMRANATHYGLAAGVFTRSLDTANAVARALRAGTVWVNCYDVFDAAIPFGGYKMNGVGREKGAYSLGNYLQTKAVVAPLRDPAWL

SEQ ID NO: 2605 - protein, 450 aa, Methanothermobacter thermautotrophicus str. Delta H
MSVEVIAIGGYEEVGKNMSAVKVGDDVVIFDMGIHLDRVHIHEDTDIARMHSLDLIERGVIPDDTLMKDVDGKVRAIVFTHGHLDHIGAVAKLAHRYQAPIIATPYTIALIERTIKAERKFNVLNTLQVLNAGEKCQISPGITLEFIQSTHSIPQSVIAALHTPEGIIVYALDFKFDDHQKISPPPDYHRLRELGRKGVLAMIVETTRANEKQEVKTHSEKVARIVLEDIMKNPLEEKTGMIVTTFSSHMERIQAISDIASKSDRQMLLLGRSMERYCGLAEAMGILKLPENASIYGSPKAVNRALARAEAKREDYLLITTGHQGEPDALLPRIANAKTQFRIQRGDNVVISAPVIPNPMNVANRNLMERRLASSGARIYTNAHVSGHAGREDHRDFIRMLNPMHIIPAHGDLSMLSAYAEIAEEEGYKLGNDIHILRNGQAQVFNGGIR

SEQ ID NO: 2606 - protein, 145 aa, Zea mays
  unsure (1)..(145): unsure at all Xaa locations
AGSGPYPPPPAFRLQTEDLRYHHQLSRHIAQLGRIEAMASRLLAAASSSSASSSPLARLISSRRMAGAADHHGSTKVNMWQEPXNPGNWKEEHFVLASLAMWGAIIYGGLKAFGGKKEVKTRGRASGSTGTLNCIQALFSYRNLF

SEQ ID NO: 2607 - protein, 445 aa, Arabidopsis thaliana
MEEERRVLFGKYEMGRLLGKGTFAKVYYGKEIIGGECVAIKVINKDQVMKRPGMMEQIKREISIMKLVRHPNIVELKEVMATKTKIFFVMEFVKGGELFCKISKGKLHEDAARRYFQQLISAVDYCHSRGVSHRDLKPENLLLDENGDLKISDFGLSALPEQILQDGLLHTQCGTPAYVAPEVLKKKGYDGAKADIWSCGVVLYVLLAGCLPFQDENLMNMYRKIFRADFEFPPWFSPEARRLISKLLVVDPDRRISIPAIMRTPWLRKNFTPPLAFKIDEPICSQSSKNNEEEEEDGDCENQTEPISPKFFNAFEFISSMSSGFDLSSLFESKRKVQSVFTSRSSATEVMEKIETVTKEMNMKVKRTKDFKVKMEGKTEGRKGRLSMTAEVFEVAPEISVVEFCKSAGDTLEYDRLYEEEVRPALNDIVWSWHGDNNNTSSEDC

SEQ ID NO: 2608 - protein, 222 aa, Vibrio parahaemolyticus RIMD 2210633
MNSPMFTRSTSVPNTLETNKVLKNTYFLLSMTLMTSAIAAVATMAMQISPIMAIVMQLAAIGILFFVMPKAINSSSGIVWTFVFTTLMGGALGPMLNYYASIPNGPTIIAQALGLTGMVFLGLSAYTISSKKDFSFMRNFLMAGLIIVIVAALINIFVGSTMAHLVISSVSALVFSGFILFDTSRIVRGEETNYISATISMYLNILNLFTSLLSILGIMNDD

SEQ ID NO: 2609 - protein, 471 aa, Novosphingobium aromaticivorans DSM 12444
MERAAMNALSPTLTNRSLVDIDRDHLIHSVTSFRGHEQHGAIVLESGDGMWLTDAEGNRILDAFAGLWCVNVGYGQESIVEAAAAQMRKLPYATGYFHFASEPAIRLAGELTAAAPSGLDHVFFTQGGSDAVDSAIRYIVHYWNAAGKPSKKHFIALEWGYHGSSSLGAGLTALGNFHRNFDLPRPWQHHIASPYPYRHPQGDDDAAVIASTVAALEAKVAELGADNVAAFCCEPIQGSGGVIVPPRGWLKALREACTRLGILMLVDEVITGFGRTGPLFACEEEGVSPDFMTTAKGLTAGYIPMGAMFMADHVYQTIADAAPAALPIGHGQTYSGHPVAAAVGLEVLRLYREGGLLENGRKTGERFAWHMERIRAHPLVGDVRYRGLLGAIELTPDKATKAIFDASLDIGGRLSKLTYANGVIVRCFGNAVLGFAPALCCTLEEMDMIFERVERSLDQLLDQPDIRALVV

SEQ ID NO: 2610 - protein, 426 aa, Helicobacter pylori J99
MSVTLINNENNARYEFETIECTRGPKAVDFSKLFETTGFFSYDPGYSSTAGCQSKISYINGKKGELYYRGHRIEDLVAKYKYVDVCRLLLTGELPKNQDESLEFELELRHRSFVHESLLNMFSAFPSNAHPMAKLSSGVSILSTLYSTHQNMHTEEDYQTMARRIVAKIPTLAAICYRNEVGAPIIYPDIARSYVENILFMLRGYPYSRLKHTTQGEVGITPLEVEAFDKILTLHADHGQNASSTTVRNVASTGVHPYAAISAGISALWGHLHGGANEKVLLQLEEIGDVKNVDKYIARVKDKNDNFKLMGFGHRVYKSYDPRAKILKGLKDELHQKGVKMDERLSEIAAKVEEIALKDEYFIERNLYPNVDFYSGTILRALKIPVRFFTPVFVIGRTVGWCAQLLEHVKSPQARITRPRQVYVGD

SEQ ID NO: 2611 - protein, 57 aa, Triticum aestivum
  unsure (1)..(57): unsure at all Xaa locations
MADEGTANCIDIILAIILPPLGVFFKFACGSXFWICLLLTXSXXLPGIIYAVWVITK

SEQ ID NO: 2612 - protein, 425 aa, Helicobacter pylori J99
MAYNPKILQKPKEGEEITIKDGKLHVPNYPIIPFIEGDGIGSDITPAMIKVVDSAVQKAYKGEKKIAWYEVFVGEKCYQKFKDHKELSPEEQWLLPDTIEAINHYKVSIKGPLTTPIGEGFRSLNVALRQKMDLYVCLRPVRWYGSPSPVKEPQKVDMVIFRENSEDIYAGIEWQEGSAEAKKLIHFLQNELKVEKIRFPESSGVGIKPISKEGTERLVRKAIEYAIDNDKPSVTFVHKGNIMKYTEGAFMKWGYALAQKEFNAQVIDKGPWCSLKNPKTGKEIIIKDMIADAFLQQILLRPSEYSVIATMNLNGDYISDALAAMVGGIGIAPGANLNDTVGMFEATHGTAPKYAGLDKVNPGSIILSAEMMLRHMGWVEAADLIVSAMEKAIKSKKVTYDFARLMDGAKEVKCSEFASVMIENM

SEQ ID NO: 2613 - protein, 490 aa, Novosphingobium aromaticivorans DSM 12444
MTAFDPDSIRPALAANFIGGEAVVGRGRSFEVLRPSDGQLLGELRAADEQQLCAAVENAAMAQKASGWGAMEPRGRMKLLRRWADLIEADAETLVPLEAVGSSRTLAEVRAWDLPYTAECIRFFAEFADKHGGEIAATTPDKLGFTLTEPYGVIGAIAPWNLPLVMAAWKLGPALAAGNAVVLKPSELTPFSVVRLAELAVAAGIPAGVFNVVQGGGGDIGDALVRHERIAKVSFTGSTRTGQAIMAACAMTGPKPSTLELGGKSPQIVFADADLAKASALVARAITLNSGQVCVAGSRLLVHEKARDEVVERLTTAFEAHRLGTTWDAATTMGPIISEGQLATIDGIVQRARAAGAEAVTGGARAVSPQSGSYYQPTLLAGMSDDNEAVQGEIFGPVLTVQSFADEDEAFALANGTRYGLAAGVHTTDISRALRAVRALEAGTVWVNRYGRSDDFILPTGGFKQSGVGKDLGREAYLGSCKVKTALIQI

SEQ ID NO: 2614 - protein, 257 aa, Vicia faba
MASSKETFVYTAKLAEQAERYEEMVEAMKNVAKLDVELTVEERNLLSVAYKNVVGGRRASWRILSSIEQREETKGNEVNVNRIKEYRKKVESELSDICTDIMAVIDEHLIPNSSGESNVFYYKMKGDYYRYLAEFKSGDDRKEAADQSLKAYQEASTAAETELPPTHPVRLGLALNFSVFYYEILNSPERACHLAKQAFDVAIAELDSLNEESYKDSTLIMQLLRDNLTLWTSDIPEEGVEEQKAESARAPVGDNAE

SEQ ID NO: 2615 - protein, 319 aa, Geobacillus stearothermophilus
MKRIGVLTSGGDSPGMNAAIRSVVRKAIYHGVEVYGVYHGYAGLIAGNIKKLEVGDVGDIIHRGGTILYTARCPEFKTEEGQKKGIEQLKKHGIQGLVVIGGDGSYQGAKKLTEHGFPCVGVPGTIDNDIPGTDFTIGFDTALNTVIDAIDKIRDTATSHERTYVIEVMGRHAGDIALWSGLAGGAETILIPEADYDMNDVIARLKRGHERGKKHSIIIVAEGVGSGVDFGRQIQEATGFETRVTVLGHVQRGGSPTAFDRVLASRLGARAVELLLEGKGGRCVGIQNNQLVDHDIAEALANKHTIDQRMYALSKELSI

SEQ ID NO: 2616 - protein, 504 aa, Glycine max
  unsure (1)..(504): unsure at all Xaa locations
MSALSNSSSSHGNSFLKMPAIKFTKLFINGDFVDSISGRTFETIDPRKEEVIARVSEGDKEDIDIAVKAARQAFDSGPWPRLPGSERAKIMMKWADLVDENIEELAALDTIDAGKLYYINKVAEIPSATNALRYYAGAADKIHGDVLKMNGDFHAYTLLEPIGVVGHIIPWNAPSLSFFIKVSPSLAAGCTMVLKPAEQTPLSALFYAHLAKLAGIPDGVLNIVPVFGPTAGAAISSHMDIDAVSFTGSIEVGREVLQAAAWSNLKPVSLELGGKSPLIIFNDADIDKASELALFGIMSNKGEICVAGSRVFVQEEIYDEFEKKLVEKAKSWVVGDPFDPKSXQGPQADRNQLEKILSYIEHGKREGATLLTGGNTVGNKGYYIEPTIFSNVKEDMLIARDEIFGPVLALMKFKTMEEAIKSANNTKYGLAAGIVTKNLDTANTMSRSIRAGIVWINCYFTVGSDVPFGGYKMSGFGRDLGLQALHKYLQVKSVVTPIHNSPWL

SEQ ID NO: 2617 - protein, 112 aa, Bartonella quintana
ANEACLKMLQKIGSVERIPEFIARAKDKNDPFRLMGFGHRVYKNYDPRAKIMQQTCHEVLKELNIQDDPLLDIAIALENTALNDEYFIEKKLYPNVDFYSGITLKALGFPTE

SEQ ID NO: 2618 - protein, 222 aa, Vibrio vulnificus YJ016
MNSPMFTRTSSMESTLQTNKVLKNTYFLLSMTLVTSAIAAVATMAIGISPMMALVMQVAAIGILFFALPRSINSSMGIVWTFVFTTLMGGALGPMLTYYASIPSGPTIIAQALGLTGMVFLGLSAYTITSKKDFSFMRNFLMAGLIIVIVAAIINIFVGSTLGQLVISSVSALVFSGFILFDTSRIVRGEETNYVSATISMYLNILNLFTSLLSILGIMNDD

SEQ ID NO: 2619 - protein, 364 aa, Zea mays
MGSTAGDVAAVVDEEACMYAMQLASSSILPMTLKNAIELGLLEVLQKEAGGGKAALAPEEVVARMPAAPGDPAAAAAMVDRMLRLLASYDVVRCQMEDRDGRYERRYSAAPVCKWLTPNEDGVSMAALALMNQDKVLMESWYYLKDAVLDGGIPFNKAYGMTAFEYHGTDSRFNRVFNEGMKNHSVIITKKLLDFYTGFEGVSTLVDVGGGVGATLHAITSRHPHISGVNFDLPHVISEAPPFPGVRHVGGDMFASVPAGDAILMKWILHDWSDAHCATLLKNCYDALPENGKVIVVECVLPVNTEATPKAQGVFHVDMIMLAHNPGGKERYEREFRELAKGAGFSGFKATYIYANAWAIEFIK

SEQ ID NO: 2620 - protein, 105 aa, Hordeum vulgare
QPQQSYPVQPQQPFPQPQPVPQQRPQQASPLQPQQPFPQGSEQIIPQQPFPLQPQPFPQQPQQPLPQPQQPFRQQAELIIPQQPQQPLPLQPHQPYTQQTIWSMV

SEQ ID NO: 2621 - protein, 456 aa, Zea mays
  unsure (1)..(456): unsure at all Xaa locations
MNLELHHLTRSRSHPRVLARSSCGGEMRRQIPPVSCLVLLAVAFALLAEASAASPAHSSVAVNVTGVLSAFPDLSDFTRLLASSPVLAELAGRSSLTLLAVPNGNLPQSPSAFAAXSGADLADVLRYHVLLEYLSHADLRRLPASGKLVTTLFQTTGRATADLGAVNVTTAGASRLTVIRSPAPFPGSNATVLGAITAVPYNLSVLAVSGLIAPSGFDLAASESQPPAAVNITRVLADARAFNVAASMLEASGVAAEFEDDERGAGITVFAPTDDAFAGLPAGDRLQSLPADRKAVVLRFHVLHSYYPLGSLESIVNPVQPTLATEFSNAGRFTLNITRANGSVAIDTGVVQATITRTVFDQNPVAVFAVSKVLLPKEMFTRTAAASIVATTASASSPPPAATAPEASESARTPPTKLSSPPALRGGGQDYATAPAPARGIEWWCIALVYLLPHLV

SEQ ID NO: 2622 - protein, 453 aa, Arabidopsis thaliana
MSGSRRKATPASRTRVGNYEMGRTLGEGSFAKVKYAKNTVTGDQAAIKILDREKVFRHKMVEQLKREISTMKLIKHPNVVEIIEVMASKTKIYIVLELVNGGELFDKIAQQGRLKEDEARRYFQQLINAVDYCHSRGVYHRDLKPENLILDANGVLKVSDFGLSAFSRQVREDGLLHTACGTPNYVAPEVLSDKGYDGAAADVWSCGVILFVLMAGYLPFDEPNLMTLYKRVRICKAEFSCPPWFSQGAKRVIKRILEPNPITRISIAELLEDEWFKKGYKPPSFDQDDEDITIDDVDAAFSNSKECLVTEKKEKPVSMNAFELISSSSEFSLENLFEKQAQLVKKETRFTSQRSASEIMSKMEETAKPLGFNVRKDNYKIKMKGDKSGRKGQLSVATEVFEVAPSLHVVELRKTGGDTLEFHKVCDSFYKNFSSGLKDVVWNTDAAAEEQKQ

SEQ ID NO: 2623 - protein, 257 aa, Zea mays
  unsure (1)..(257): unsure at all Xaa locations
MDRAGALAVVDGRTGKRHEVKVSEDGTVRATDFKKITTGKDDKGLKIYDPGYLNTAPVRSSICYIDGDEGILRYRGYPIEELAESSSFVEVAYLLMYGNLPTQSQLAGWEFAISQHSAVPQGLLDIIQSMPHDAHPMGVLASAMSTLSVFHPDANPALQGQDLYKSKQVRDKQIVRVLGKAPTIAAAAYLRLAGRPPVLPLNTLSYSENFLYMLDSLGDRTYKPNPRLARALDILFILHAEHEMNCSTAAXRHLASR

SEQ ID NO: 2624 - protein, 246 aa, Zea mays
  unsure (1)..(246): unsure at all Xaa locations
MCGILAVLGCADDTQGKRVRVLELSRRLKHRGPDWSGMHQVGDCYLSHQRLAIIDPASGDQPLYNEDKSIVVTVNGEIYNHEQLRAQLSSHTFRTGSDCEVIAHLYEEHGENFIDMLDGVFSFVLLDTRDNSFIAARDAIGVTPLYIGWGIDGSVWISSEMKGLNDDCEHFEIFPPGHLYSSKQGGFKRWYNPPWFSEVIPSVPYDPLALRKAFEKAVIKRLMTDVPFGGLLSGXLDSSLGAAVTV

SEQ ID NO: 2625 - protein, 156 aa, Glycine max
MEPMDIVGKAKEDASLPKATMTKIIKEMLPPDVRVARDAQDLLIECCVEFINLVSSESNEVCNKEERRTIAPEHVLKALGVLGFGEYIEEVYAAYEQHKLETMQDSLKGAKWSNRAEMTEEEALAEQQRMFAEARARMNGGAIQSKEPEADQSLES

SEQ ID NO: 2626 - protein, 337 aa, Oryza sativa (japonica cultivar-group)
MAASDVHHGGATPAAAATAVPCVTLNSGHAMPVLGFGTGSSTPPADLAATIAHAVRLGYRHLDTAAVYGTEGAVGAAVAEAVRCGAVASRGELFVTTKLSMADAHPPRVVAALRESLSRLGLDYVDLFLIHWPVAIGKKDAAGELTWDDLSRGLVPFDMEGVWRGMEECHRLGLARSIGVSNFSAAKMSRLLALAAVPPAVNQVEMNVGWRQEKVREVCGEGGVVVAAYSPLGAHGAHWGSDAVMNSGVLHDVAAARCKTIAQVALRWLYEQGVCMVARSFNEGRMKQNMDIFDWELSDQDKAMIAGVPQRRACHGNYFVSPDGPYKSLHDLWDGEI

SEQ ID NO: 2627 - protein, 339 aa, Pseudomonas putida KT2440
MNIVHKALTTSLLALSVSSAFAAGSPGVEQHTQAFLEALEKGGGKPLEQLTPNDARAVLTGAQASVKVDLSGVEVKERTIQANGQSIKLQVVRPTNVKGDLPVFMFFHGGGWVLGDFPTHQRLIRDLVVGSGAVAVYVDYTPSPEAHYPTAINQAYAATRWVAEHGKEIGVDGKRLAVAGNSVGGNMAAVVALKAKEAGTPALRFQLLLWPVTDASFETASYKQFAEGHFLTTGMMKWFWNNYTVDAKARAQIYASPLRASAEQLKGLPPALVQTAEFDVLRDEGEAYARKLNAAGVTVTSVRYNGMIHDYGLLNPLSQVPAVKAALRQAGNELKVHLQ

SEQ ID NO: 2628 - protein, 1050 aa, Neurospora crassa
MSEPEPRRSVRATKGQHKALEQLDQIDIPKKRGKKAAKKAVPEPEEPEEEIIRCVCGATEQDEDSGEPWIACDMCGAWQHNICMGMSQYSEDLPKEYFCELCKPENHQELLNGMKNGERPWEARRKAFEEEKAEKRRRGNKKKSKRVSDHKEESAQVSQKPKPSPVPEPKKDAKTAAGQKRKTTEPVPEKEPKQKVRKVTETQAPSLPSYKAPDDIAGKISELPELRQGAAKLLSKSLVHSIGVAEKKGVSIPSEGVSASAERLAIQIERAVHDSHQPTAYSGQMRTLSYNLKTNQDLTTGLLGGTLTPTMLASMTTEELATKELQKETAEMKARAEKQSIMITEDVPRIRKTHKGEEVIGDESFNLSTDVSSAPVRRPPQDTAEPPKKRVKEEGPERAAQGTASKRASRDLTVDTQKSPSTGNFDINKVFSSVRSPTQSHHRRPSAMSTSTGPGVDADVDRLLDDGTQSPPYSPKEEILDPDVVWKGNLVMNTIADFQVTAKHIGGAKLKESIGLEWDKLMPKTLTVCGRIDEQQAIVYLCSLRYSLPTDVVVVNLQPTSAASKPQFQRLVDYFVSKKRYGVIGDRGVANVRDTYLVPVLPGTGQYPEFMLNLADNHIPETRTEPMLLAVFVYRNDPDTIMRLHGTNDYNQVVANQSTKVHTSFANTPAPSSPALANLPPGHRPSLSTPAFSPTSPQGTFPNYPTPRHSSTPSQVPPQQQPQPTPPAQQHSVSQIQHPAVDQVQKQGEAIAREVLGSLITSPTVAFLLPQAHKMSRKEWEVIKKIYERDPKARDDLPYLSNVLERESTNAQAKAAQAQQQSQQHPVHQQHQNQQQQMHHQPHHQQHHPQHQVQQQQQQQQQQHLPQHPPQHQPHHQAHFQPQPQHQQQHQAHHPPHHQPQHQSQQQAHHQPHPPPPQHHQQPQQQQQHPPKHQAQHPPQHQPQHQAPAQQPQAAYPPQPASHHPQPPQHQQHQPPQPQHAQPHPQAQPQQAHPQHHQQYFTPPVRTTPIPPPPIPPVTSGSGGPIKQTPIPPPPIPHQAATAATGPPSA

SEQ ID NO: 2629 - protein, 268 aa, Vitis vinifera
MSPTCLLVLLLGMVVLTSTPSLAHYPKPPPFQKPPPEHKPPGEKPSPEHKPPTKPPKGEKPLPEHKPPTPIGKPPKGEKPPPEHKPPTPIGKPPKGKKPLPEHKPPTPIGKPPKGEKPPPEHKPPTPIGKPPKGEKPLPEHKPPTPIGKPPKGEKPPPEHKPPTPISKPPKGEKPLPEHKPPTPIGKPTKGEKPLPEHKPPTPIGKPPKGEKPPSPFGKPPTGEKPPHYGHTPGHPPAHSYKPPQKIKPPPTPPHKPPHKPPSPTYPN

SEQ ID NO: 2630 - protein, 330 aa, Listeria monocytogenes str. 4b H7858
MELRDVEEPQVYGDKVKIKVAFTGICGSDIHTFKGEYKNPTTPVTLGHEFSGVVVEVGPDVTSIKVGDRVTSETTFETCGECIYCKERDYNLCSNRRGIGTQANGSFAEFVLSREESCHVLDERISLEAAALTEPLACCVHSALEKTTIRPDDTVLVFGPGPIGLLLAQVVKAQGATVIMAGITKDSDRLRLAKELGMDRIVDTLKEDLAEVVLGMTDGYGAERVFDCSGAVPAVNQGLPLTKKKGDFVQVGLFAEKKNAIDEESIIQREIAYIGSRSQKPSSWILALDLLANGKINTDKMITKVYGLDDWREAFEAVMAGNEIKVLVKS

SEQ ID NO: 2631 - protein, 246 aa, Triticum aestivum
  unsure (1)..(246): unsure at all Xaa locations
QQLALQPLQQFAKIQQPQQSFPQQPHRPHPFPXQLKQVIXQYPQQPFLLQPHQPFPQQPEQIIFQQPQQLFPXSQQPFLQQPQQPFPLQPQQPFPQQPAQIIAQQPQQPSPLQPQQSFLRQPQQPFPQPQQVVQINPQQPQQPFSQSRQPFPQQPQQPFPLQPQQPFPQQSAQIIPQQPQQPFPLQPQQSFLRQSQQPFLQQPQQPSPQPQQVVQIIPQQPQQPFPLLANQPQQPYPQQQPSGVMV

SEQ ID NO: 2632 - protein, 168 aa, Aquifex aeolicus VF5
MNKKGKVVITYGTFDLFHIGHLNLLKRAKALGDFLIVGVSTDEFNAIKGKKSVYPYEHRAEIVRSIKYVDLVIPERNWEQKIEDIKKYNVDVFVMGDDWKGKFDYLKEYCEVVYLPRTEGISTTELKEALVKLSNILEEDILRVLDIVVRGRICIEEILKNKNLKNGE

SEQ ID NO: 2633 - protein, 337 aa, Sinorhizobium meliloti 1021
MKAVRLYDIRDLRVEEVAELAAPPPGFVNLEVRAAGICGSDLHNYRTGQWISRRPSTAGHEFCGRVTAIGEGVSHLVRGDVVSADSRMWCGTCPACASGRSNVCETLGFLGEVCDGGFAEAVQLPSRLVFRHDPKLSPHVAAMAEPLAVALHAVRRLAVPDGAPVLVMGCGTIGGLSALLLSRLHQGPLLLTDLNADKAALVAEVTGGVVVALDGAAIEEALPGTRLRHALDATGSIQAIARALDILSGGGALALVGIGHGKLDLDPNILVEREISLVGCHAFAGELPEAIELLADLAPALQRFIEVLPTLDDVPEAYERLLRGESNALKTIIEVAG

SEQ ID NO: 2634 - protein, 160 aa, Bradyrhizobium japonicum USDA 110
MRRMMAAFVALALLASPAVHAVQPDEIMSDPAKETRARDLSRELRCMVCQNQSIDDSDAPLARDLRLLVRERIAAGDSNSQVLDFLVARYGEFVLLKPRFERQTLLLWLLGPLLLTGGGLALWLQIRRRSRSGADLPAPPLTPDEEARLAALMSDEAKSS

SEQ ID NO: 2635 - protein, 191 aa, Pneumocystis carinii
MQTIKCVVVGDGAVGKTCLLISYTTNKFPSEYVPTVFDNYAVTVMIGEEPYTLGLFDTAGQEDYDRLRPLSYPQTDVFLICFSVTSPASFENVREKWHPEVRHHCPGTPCLIVGTQIDLRDDPMIVEKLSRQRQTPITKELGEKLSKELGAVKYVECSALTQKGLKNVFDEAIVCALEPPVTKKKTKCLIL

SEQ ID NO: 2636 - protein, 337 aa, Triticum aestivum
MKTLLILTIIAVALTTTTANIQVDPSGQVQWPQQQQPFPQPQQPFSQQPQQIFPQPQQTFPHQPQQAFPQPQQTFPHQPQQQFPQPQQPQQPFPQQPQQQFPQPQQPQQPFPQQPQQQFPQPQQPQQPFPQPQQPQLPFPQQPQQPFPQPQQPQQPFPQLQQPQQPLPQPQQPQQPFPQQQQPLIQPYLQQQMNPCKNYLLQQCNPVSLVSSLVSMILPRSDCKVMRQQCCQQLARIPQQLQCAAIHGIVHSIIMQQEQQQQQQQQQQQQQGIQIMRPLFQLVQGQGIIQPQQPAQLEVIRSLVLGTLPTMCNVFVPPECSTTKAPFASIVADIGGQ

SEQ ID NO: 2637 - protein, 279 aa, Streptococcus pyogenes MGAS315
MVTTVKMTSGYEIPVLGFGTYQAADGEEAYQSTLAAIKADYRHIDTAAIYKNEESVGRAIKDSGVLREDLFITTKLWNDAHSYEGAKDALAASLDRLGLDYVDLYLIHWPNPKALRNTWKEANAQAWQYMEEAVEAGLIKSIGVSNFMVHHLEALQETAKITPAINQIRLAPGCYQKEVVDYCKANEILLEAWSPLGQGEIFDNETMQQLANKYDKTVAQVALAWSLAEGFIPLPKSVHDERIKENMAIFDVSLTPEDKKTIRYLSGMSAISNPDTTSF

SEQ ID NO: 2638 - protein, 325 aa, Vitis vinifera
GGGNFGVARLVSDKRTRELFAVKFIERGQKIDEHVQREIMNHRSLMHPNIVRFKEVLLTPTHLAIVMEYAAGGELFGRICNAGRFSEDEARFFFQQLISGVSYCHSMRICHRDLKLENTLLDGSTAPRVKICDFGYSKSSVLHSQPKSTVGTPAYIAPEVLSRKEYDGKLSDVWSCGVTLYVMLVGAYPFEDPDDPRNFRKTIGRILSVHYSIPDYVRVSIECRHLLSRVFVANPDKRITIPEIKTHPWFLKNLPIEMMDGGSWQKNDVNNPSQSVEEILSIIQEARKTTGVRKAGGPFMEGSMDLDDIDADEDIETSGDFVCPL

SEQ ID NO: 2639 - protein, 103 aa, Brassica napus
  unsure (1)..(103): unsure at all Xaa locations
MASSMLSSAAVXTSXPAQVTMXAPFTGLXKTSAXFPVTXKANNDITSIXSNGGXVSCXKVXPPVGKKKXETPPXPPLTTRSLNCVEAHYLPLIFAISATPLSR

SEQ ID NO: 2640 - protein, 358 aa, Azoarcus sp. EbN1
MSKFHDMRVASVRPETRDAIVVTFDVPPSLADSFHYAPGQHLTLRTEIGGEDVRRSYSICSGADERALRIAIKRVHGGLFSNWANDFMKPGVSVEVMPPSGHFGVAPDPQHHRNYAAFAAGSGITPILSQIKTILAAEQGSRFTLVYGNRSSSSVMFREELADLKDQYGERLNLVHVLSREQQDIELFNGRIDRERCDALLTRWIDAKRIDVAFICGPMDMMEAVSASLQAHGVAKSAIKMELFATSLPKGPRPVHSHPVKGTEDCEVTVIQDGRVRQFTMPKNRDSVLDAGLGQGIEMPYSCKGGVCSTCRCKVIDGEVDHDTNFALEDYEIARGFRLSCQSYPVTDKLVLDFDQET

SEQ ID NO: 2641 - protein, 201 aa, Pisum sativum
MSNEYDYLFKLLIIGDSSVGKSCLLLRFADDSYVDSYISTIGVDFKIRTVELEGKTVKLQIWDTAGQERFRTITSSYYRGAHGIIIVYDVTDMESFNNVKQWLHEIDRYANDSVCKLLVGNKCDLTENKVVQTQTAKAFADELGIPFLETSAKDSINVEQAFLTMAAEIKKKMGSQPSGSKSAESVQMKGQPIPQNNNCCG

SEQ ID NO: 2642 - protein, 448 aa, Clostridium perfringens str. 13
MEKVDFSKLTGDLVTRENIEYEKSIESWNRAIKKYPLGIVFCNNIDDVKNALEWAKENNIPFRIRVGRHNYEGYSIENDILVIDLSKMNNIIIDEENMKVTIEGGVKNEEIYEALGVLGYPFPGGGCPTVGVVGFALGGGWGYSSRLLGLGCDNLLEVKFINSKGKIVIANEYDNSDLFWAAKGCGGGNFGVVVSMTFKIPQKIEMATLIDIDYPNAEKEELVYVIRTLQKKFKNLDRRMNLKTAIYNSKYKGIGVKITGLFYGHKEEANEILLPFKLPTRVNFNLSYMRVLEANRKIEYSHPPYEKYKSTGRFVFRDYDNSEIEKLIDIVSNRAEGAYYTAISFYGLGGAVKDVHKNSSAFYYRDARFIMGIQSVWEDDIFAEENIKWIKNNFKYIESITTGSFINFPFKDLKDYEEEYYGENKDKLREIRKKYDENRFFAFEQGIK

SEQ ID NO: 2643 - protein, 496 aa, Nicotiana tabacum
MVLSKTASESDVSIHSTFASRYVRTSLPRFKMPENSIPKEAAYQIINDELMLDGNPRLNLASFVTTWMEPECNTLMMDSINKNYVDMDEYPVTTELQNRCVNMIAHLFNAPLGDGETAVGVGTVGSSEAIMLAGLAFKRKWQNKMKAQGKPFDKPNIVTGANVQVCWEKFARYFEVELKEVKLSDGYYVMDPEKAVEMVDENTICVAAILGSTLNGEFEDVKRLNDLLIEKNKETGWDTPIHVDAASGGFIAPFLYPELEWDFRLPLVKSINVSGHKYGLVYAGIGWAIWRNKEDLPDELIFHINYLGADQPTFTLNFSKGSSQVIAQYYQLIRLGFEGYKNVMENCQENARVLREGIEKSGRFNIISKEIGVPLVAFSLKDNSQHNEFEISETLRRFGWIVPAYTMPPNAQHVTVLRVVIREDFSRTLAERLVIDIEKVLHELDTLPARVNAKLAVAEANGSGVHKKTDREVQLEITTAWKKFVADKKKKTNGVC

SEQ ID NO: 2644 - protein, 487 aa, Rhizobium sp. NGR234
MQRFQCYIDGEFADGEGRFESVDPATGAAWAEMPEAREADVDRAVEAAHKALDAGPWSKLTATLRGKLLYRLADLVAENAQRLAELETRDTGKIIRETSAQIAYVAEYYRYYAGIADKIEGSYLPIDKPDMEVWLRREPIGVVAMVVPWNSQLFLSAVKIGPALAAGCTMVVKASEDGPAPLLQFARLVHEAGFPAGVVNIITGFGPACGAALSRHPKVDHIAFTGGPETARHVVRNSAENLASTSLELGGKSPFIVFADADLESAANAQVAGIFAATGQSCVAGSRLIVEKSVKDRFLEILKRKAEAICIGSPLDMATEVGPLATERQRAHIQALLGRSLAAGARLVTGGTAPDGAGFFYQPTILDCDGNSTPALEEEFFGPVLSVVSFETEAEALALANATRYGLAAGLFTRDLTRAHRLMKGIRTGIVWVNTYRAVSPIAPFGGFGLSGHGREGGMEAALDFTRTKTVWLRTSDDPIPDPFVMR

SEQ ID NO: 2645 - protein, 377 aa, Sulfolobus solfataricus P2
MSVVSKGLENVIIKVTNLTFIDGEKGILRYRGYNIEDLVNYGSYEETIYLMLYGKLPTKKELNDLKAKLNEEYEVPQEVLDTIYLMPKEADAIGLLEVGTAALASIDKNFKWKENDKEKAISIIAKMATLVANVYRRKEGNKPRIPEPSDSFAKSFLLASFAREPTTDEINAMDKALILYTDHEVPASTTAALVAASTLSDMYSSLTAALAALKGPLHGGAAEEAFKQFIEIGDPNRVQNWFNDKVVNQKNRLMGFGHRVYKTYDPRAKIFKKLALTLIERNADARRYFEIAQKLEELGIKQFSSKGIYPNTDFYSGIVFYALGFPVYMFTALFALSRTLGWLAHIIEYVEEQHRLIRPRALYVGPEYQEYVSIDKR

SEQ ID NO: 2646 - protein, 246 aa, Zea mays
MAKNYPTVSAEYSEAVDKARRKLRALIAEKSCAPLMLRLAWHSAGTFDVSSRTGGPFGTMKHQSELAHGANAGLDIAVRLLEPIKEEFPILSYADFYQLAGVVAVEVTGGPEIPFHPGREDKPQPPPEGRLPDATKGSDHLRQVFGKQMGLSDQDIVALSGGHTLGRCHKERSGFEGAWTTNPLVFDNSYFKELLSGDKEGLLQLPSDKALLSDPVFRPLVEKYAADEKAFFDDYKEAHLKLSELG

SEQ ID NO: 2647 - protein, 469 aa, Zea mays
GTSPATSTTSLQAVDTFSGIRGSMSNYYDDYDDIDEMEDDYDMDDPIDDMVDEQQGIRDSDAEDNDYGQPNDKIPDTSSADARKGRDIQGIPWEQINITRKKYRQSRLEQYKNYENVPNSGEEAMKDCKPTEKGGIYYEFRRNTRSVKSTILHFQLRNLVWATSKHDIYLVSHYSIRHWSALSGVDTELINVQGHVAPREKHAGSLLEGFYQTQVSTLTVKDNLLVAGGFQGELICKHLDQEGISFCCRTTYDDNAITNAVEIFNTSSGAVHFMASNNDSGVRYYDMERFQLFKHFQFEWPVNHASLSPDRKVVVIVGDDPDGLLIDANSGKTVHSIKGHRDYSFASAWSPDGRTFATGNQDKTCRIWDVRNLSKSVHVLRGNLGAIRSIRFTSDGQFMSMAEPADFVHIYDVKSDYNKRQELDFFGEISGTSFSPDTDTLFVGVWDRMYGSLLQFGRLYNYSYLDSLF

SEQ ID NO: 2648 - protein, 154 aa, Magnetospirillum magnetotacticum MS-1
MKRLLVLLFVLATPALAVNPDEMLKDPAQEHRARELGKDLRCLVCQNQSIDDSDADLAKDLRVIVRERIAKGDSDDQVKSFVVDRYGDYVLLKPPFKATTLALWLGPLALFAGALWAVLAFYRRRPAEKAAPPPPPLSAEESRRLDKLLKETER

SEQ ID NO: 2649 - protein, 75 aa, Brassica napus
MPSKCEILCEILIAILLPPLGVCLRRGCCTVEFLICLVLTLLGYVPGIIYALYVIVFQNRDEYFDEARRPLYYSA

SEQ ID NO: 2650 - protein, 458 aa, Streptococcus agalactiae NEM316
MAYKTIYPYTNEVLHEFDNISDSDLEQSLDIAHALYKTWRKEDNVEERQNQLHKVADLLRKDRDKYAEVMTKDMGKLFTEAQGEVDLCADIADYYADNGQKFLKPVPLESPNGEAYYLKQAVGVLLAVEPWNFPFYQIMRVFAPNFIVGNTMLLKHASICPASAQAFEDLVREAGAPEGAFKNIFASYDQVSNLISDPRVAGVCLTGSERGGASIAAEAGKNLKKSSMELGGNDAFLILDDADFDLLSKTIFFARLYNAGQVCTSSKRFIVMADKYDEFVNMVVETFKSAKWGDPMDSETTLAPLSSAGAKDDVLKQIKLAVDHGAEVVFGNDTIDHPGNFVMPTVLTNITKANPIYNQEIFGPVASIYKVDTEEEAIALANDSSYGLGSTVFSSDPEHAKKVAAQIETGMTFINSGWTSLPELPFGGIKNSGYGRELSQLGFDAFVNEHLVFTPNSD

SEQ ID NO: 2651 - protein, 289 aa, Saccharomyces cerevisiae
GAMPPIFLPPPNYLFVRDVWKSNLYSEFAVIRQLVSQYNHVSISTEFVGTLARPIGTFRSKVDYHYQTMRANVDFLNPIQLGLSLSDANGNKPDNGPSTWQFNFEFDPKKEIMSTESLELLRKSGINFEKHENLGIDVFEFSQLLMDSGLMMDDSVTWITYHAAYDLGFLINILMNDSMPNNKEDFEWWVHQYMPNFYDLNLVYKIIQEFKNPQLQQSSQQQQQQQYSLTTLADELGLPRFSIFTTTGGQSLLMLLSFCQLSKLSMHKFPNGTDFAKYQGVIYGIDGDQ

SEQ ID NO: 2652 - protein, 175 aa, Triticum aestivum
  unsure (1)..(175): unsure at all Xaa locations
MAPAVMASSATTVAPFQGLKSTAXGLPVGRRSSGSLSSVSNGGRIRCMQVWPIEGIKKFETLSYLPPLSTEALLKQVDYLIRSKWVPCLEFSKVGFVFREHNSSPGYYDGRYWTMWKLPMFGCTDATQVLNEVEEVKKEYPDAYVRVIGFDNLRQVQCVSFIAFRPPGCEESGKA

SEQ ID NO: 2653 - protein, 219 aa, Triticum aestivum
  unsure (1)..(219): unsure at all Xaa locations
RVPREWTAQVEPGVHITFVSIPGGAGNDLKRIRFSREMFNKWEAQRWWGENYDRVVELYNVQTFRGRARWCCRRRPRRRRAGSGPSPGPRHTRRRATRPRPCXDPSDHVWAHHFNMLNSAAGAGASSMPSSAGAPAPYDPSRATTSSLDEASVSVSNASDLEAAEWVEQDEPGVHITIRELGDGTRELRRVRFSRERFGEERAKVWWEQNRDRIHTQYL

SEQ ID NO: 2654 - protein, 510 aa, Allium cepa
MPIPVLLLLTIFLALLLYLFFFVAKKHEGKRVPGPKGWPILGNLPQLGAKPHQSLCELSRTYGPLFGLRFGYVDVVVAASADVAEQFLRVHDVNFSNRPPNSGAEHIAYNYQDLVFAPYGPRWRMLRKLCALHLFSPKALEDLSPVRSLEVATLANTLYLRAQSDQPTVNLAQMLTTCTTNALSKAMMGRRVFVNETTDTETSKFKDMVLEIMSLAGVFNVGDFVPWLRPFDLQRVVRKMKDVHARFDSFLDKVIAEHRMVDNAHDLLSLLIRSKDDVDNDGVKLTNTDIKALLLNLFTAGTDTSSSTVEWALSEMIRHPDALKRAQRELDEVVGRDRLVSETDIRSLPYIQAIVKETFRLHPSTPLSLPRISSEACTVNGYLIPKNTTLLVNVWAISRDPGVWKEPLEFRPERFLGGGGYETVDLKGNDFELIPFGAGRRVCAGLSLGLRMVQFLTATLVHGFDWKLVDGQSAEKLDMEEAYGLPLQRAVPLMVRPVPRLDEKAYHVVV

SEQ ID NO: 2655 - protein, 478 aa, Klebsiella pneumoniae
MTAPVQHPMYIDGQFVSGRGDGWIDVLNPATEALLSRIPDGTAEEARLAIDAAERAQPGWEALPAIERAGWLRKIAAGIRQRADEIAGLIVAEGGKIQQLAAVEVAFTADYLDYMAEWARRYEGEIVQSDRPGENILVFKRALGVTTGILPWNFPFFLIARKLAPALITGNTIVIKPSEFTPNNAIAFAEIVHQVGLPKGVFNLVLGRGETVGQELAGNPKVAMVSMTGSVAAGEKIMAAAAKNITKVCLELGGKAPAIVMDDADLELAVKAVVDSRVINTGQVCNCVERVYVQQGIYDRFVNRLGEAMKAVQFGDPATRDDIAMGPLINAAARDQVAGKVRSGGAGGAGGAGGQPLEGKGYFYPPTLLLDVRQEMDIIHEETFGPVLPVVAFSTLDEALATANDSDYGLTSSIYTRDLNVAMKAIKGLKFGETYINRENFEAMQGFHAGWRKSGIGGADGRHGLNEYLQTQVVYLQA

SEQ ID NO: 2656 - protein, 490 aa, Pseudomonas syringae pv. tomato str. DC3000
MARFELQKLYIDGGYVDASNTETFDSINPANGEVLAKIQRASKEDVERAVVAAEKGQKIWAAMTAVERSRILRRAVDILRERNDELAALETLDTGKAISETRYVDIVTGADVLEYYAGLVPAIEGEQIPLRDSSFVYTRREPLGVVAGIGAWNYPIQIALWKSAPALAAGNAMIFKPSEVTSLTTLKLAEIYTEAGVPNGVFNVLTGSGREVGTWITEHPRIEKVSFTGGTDTGKKVMASASSSSLKEVTMELGGKSPLIVFDDADLDRAADIAMMANFYSSGQVCTNGTRVFVPNALKGEFEAKILERVKRIRPGNPEDENINFGPLVSFEHMESVLGYIAKGKEQGARLLCGGDRLTGGVFDKGAFVAATVFTDCTDEMTIVREEIFGPVMSILGYDTEDEVVRRANDTDFGLAAGIVTRDLNRAHRVIHLLEAGICWINAWGESAAQMPVGGYKQSGVGRENGISSLAQYTRIKSVQIELGDYASVF

SEQ ID NO: 2657 - protein, 451 aa, Arabidopsis thaliana
MSGSRRKATPASRTRVGNYEMGRTLGEGSFAKVKYAKNTVTGDQAAIKILDREKVFRHKMVEQLKREISTMKLIKHPNVVEIIEVMASKTKIYIVLELVNGGELFDKIAQQGRLKEDEARRYFQQLINAVDYCHSRGVYHRDLKPENLILDANGVLKVSDFGLSAFSRQVREDGLLHTACGTPNYVAPEVLSDKGYDGAAADVWSCGVILFVLMAGYLPFDEPNLMTLYKRICKAEFSCPPWFSQGAKRVIKRILEPNPITRISIAELLEDEWFKKGYKPPSFDQDDEDITIDDVDAAFSNSKECLVTEKKEKPVSMNAFELISSSSEFSLENLFEKQAQLVKKETRFTSQRSASEIMSKMEETAKPLGFNVRKDNYKIKMKGDKSGRKGQLSVATEVFEVAPSLHVVELRKTGGDTLEFHKVCDSFYKNFSSGLKDVVWNTDAAAEEQKQ

SEQ ID NO: 2658 - protein, 252 aa, Rickettsia sp. DmS1
LLCLRLSSLSAFYPDLLNFKEADYEHIAIRMIAEIPTIAAMSYKYSIGQPFIYPDNSLDFTKNFLHMMFAMPCTKYKVNPIIKNALNKIFILHADHEQNASTSTVRIAGSSGANPFACISTGIASLWGPAHGGANEAVINMLKEIGSSEYIPKYIAKAKDKNDPFRLMGFGHRVYKNYDPRTAVLKEMCKVLKELGQLDNNPLLQIAIELEAIALKDEYFIERKLYPNVDFYSGIIYKAMGIPSQMFTVLFA

SEQ ID NO: 2659 - protein, 512 aa, ASPERGILLUS NIDULANS FGSC A4
MGQSHSKGNSGAGDSLQSYPSFSKSDTKESLRSFRGSIRSKIRSSDSPRASTSALNQSDDKSDAGSMKSVGSRRSSTNLSRPASADSSAASPTDAPDPPPSPTMSSSLKRGHQDVAAMKQSGEVDHVSDAPPSAAPPPGSQAKVGESILIKREDTSNPILDFIMKTPLHSDASSSSPGMGMGALKSIDLDDMITRLLDAGYSTKVTKTVCLKNAEITAICTAARELFLSQPALLELSAPVKIVGDVHGQYTDLIRLFEMCGFPPVSNYLFLGDYVDRGKQSLETILLLLCYKLKFPENFFLLRGNHECANVTRVYGFYDECKRRCNIKIWKTFVDTFNCLPIAATVAGKIFCVHGGLSPSLSHMDDIRNIARPTDVPDYGLLNDLLWSDPADMDEDWEPNERGVSYCFNKNVIMNFLQRHDFDLVCRAHMVVEDGYEFYQDRILVTVFSAPNYCGEFDNWGAVMSVSGELLCSFELLKPLDSAALKSHIKKGRKERNSLINSPPAVVSAQSF

SEQ ID NO: 2660 - protein, 468 aa, Vibrio vulnificus YJ016
MNQFGMTIDGQTVQGEMPSSIVLNPANEQEVFTAPVASIAQLNKAVESAKAAYPLWSALSQAQRDGYINKIADVIEQNASELADIIVKEQGKPTQLAQMEVGGAVAWTRHSASIAIPVEVYEDSENKRIEGRRKSIGVVGSITPWNWPLMIAIWHIIPALRMGNTVVLKPSELTPINTLKLGQLLQDVLPVGVLNVVSGSGDVGRAMSEHRDINKLVFTGSTLTGQNIMQAAATNLKRLTLELGGNDAGIVLPGANLDAIAEGLFATAFINMGQTCAALKRLYVHESQHDELCQKLADIAEKQVVGEGSADGVTFGPVQNSQQLEKVIALVEEAKQQGATIYAGGARLDKPGYFFPPTIVGDAQSGMRVVEEEQFGPVLPVIKYSTVADAVAAANNVGVGLGGSVWGDVEQASELASKLECGSVWINGHAEVLPHAPFGGCKMSGFGVEFGLEGLLENSLLQVVNINK

SEQ ID NO: 2661 - protein, 124 aa, Triticum aestivum
  unsure (1)..(124): unsure at all Xaa locations
MAPTVMSSTSVAPFQGLKSTAGLPVXSRRSNGAXSLGSVSNGGRIRCMQVWPIEGIKKFETLSYLPTLSTEALLKQVDYLIRSKWVPCLEFSKVGFIFREXHNASPGYYDRYLDNVESCPMFRH

SEQ ID NO: 2662 - protein, 253 aa, Rickettsia slovaca
YMLAAVGSLSAFYPDLLNFKEADYELTAIRMIAKIPTIAAMSYKYSIGQPFIYPDNSLDFTENFLHMMFATPCTKYTVNPIIKNALNKIFILHADHEQNASTSTVRIAGSSGANPFACISTGIASLWGPAHGGANEAVINMLKEIGSSEYIPKYIAKAKDKNDPFRLMGFGHRVYKNYDPRAAVLKETCKEVLKELGQLDNNPLLQIAIELEAIALKDEYFIERKLYPNVDFYSGIIYKAMGIPSQMFTVLFA

SEQ ID NO: 2663 - protein, 1121 aa, Ustilago maydis 521
MSHSQSLHSLAPRAEQSNGVIPAVLTEQLNANGSTDLKKVAITIVAFVALSLFTLIAFQILRPNNKIVYAPKYKYAEEGKAPPKASEGFFGWIPPILKYKEHDLLPLIGLDGVTFLRFVRMMRWMLTTLALLMSVVLMPVDIAYNVRNGGSNLVTNRLNYLNMSNVHGTYMWAHVGMSYVGTIVALSFIWYHYREMVRLRWSYFRSEEYQTSFHARTLMITDVTKRYQADNALGAVLSELKMPYPTTEVHIGRRVGLLPDLIEKHSDLVRELEHVLAKYLKNPNNLPSKRPTKTIGGFMGIGGEKLDAIDYLTEQINRVEAAVMHQRETIQQKKPEMYGFASLAAVPYAHAAAKVLQNKKPRGMRITLAPPPTGIIWQNLVKSRASRAKSSFFGFLMLLVLFFMNIFPLIIVSLLSNMARLTSISWLRWLKDWQTASSFTFAAVSGLGAPIIMGIASFFFPIAMRKIAKYRGVQTRYRLDRLLVGQYFGFLVISQFLFFSLIGVVLSLVSQLVVEINHDSALAIIKKLGRNAAYATKQQYLNQSNYWLTWLPLRGYLAVFDLAQVIKLLLVWIQKVFLGRTPRDVREYTKPPVFDYWIYYSNFLFMSAVAMIYAPLAPLVVVFSAIVFWASSFIYKYQLMYVFVTKHETGGMLWRPTINRLLICIGFMQVILILAVVLDTLNYYQAIAALPPILMLIAFKIYCRRTFDSRFDWYIPNEAEIAASKIHAGDARHNRLQRRFGHPSLHSKLFTPMVHAKVKHLLPQVYKGRLDTGVAMVDGRKVETEQVAGGLKIAAIEEDQLEYDPSKDSDARSVMSGTTLGGMSMAGIGATTPGSITGGPRGDYFKDQYANYMAAGPMHGGEEFEMSNVGARDSRDNLLEKHQNSLYNESLDGTLAGTTYGGKSSPEAGLGAHGQYNGYSAATTPGLESGIAQQASYVDPYSQAGGVYAPRIGGNHRAQGSQTSLGSYGNLLYGSNAAAAPTGYGSPGSQAAYGSGARGNGGVAHTASPGATQQISPGTVIAPTATQYQASGYTASPPNRQPPQQYMGAPPSRQASADYPYQPSAGYTHPQAQQAPMYSQQQSRQQPYPYGQHPSGGNHYAPSHGSQPGSGYQQDAYGYQR

SEQ ID NO: 2664 - protein, 166 aa, Glycine max
MATSSAKSVHDFTVKDAKGNDINLGDYKGKVLIIVNVASQCGLTNSNYTELSQLYEKYKQKGLEILAFPCNQFGAQEPGSNEQIQEFVCTRFKAEFPVFDKVDVNGDKAAPLYKYLKSSKGGLFGDGIKWNFSKFLVDKEGNVVDRYAPTTSPLSIEKDLLKLLDA

SEQ ID NO: 2665 - protein, 457 aa, Rhodococcus sp. DK17
MSYYATTSPLTGQRVQEFPRATDHEISDALTSSDAAYRQWRTSSLEERADVLRALAKLWHERADELAPILTLEMGKPIPQARGEVALCANIFEYYAEHGPTFMEDEVLEIAGGGEAIVRTEPIGPLVGIMPWNFPYYQVVRFAAPNIMLGNTLLLKHSRNCPQSALAIETLFVEAGLPEGVYVNVFADNAQVARMVADPRVRGVSLTGSERAGSAVGEIAGRHMKKFVLELGGSDPFIVLDDTDLDTTVAAAVNNRMANAGQACTASKRLIVLDDVYDRFLDKFTEAMRNIVPGDPTDPATTFGPLSSRSCVDEIAEQVDDALAKGAKLLTGGCRGEGPGAFYEATVLAGVTPQMRVYSEELFGPVAVVYKVATEAEAIALANESPFGLAAAIFTSDRNQARRVAEDLEVGMAWINGTSKSAPDLPFGGVKRSGVGRELGRYGFNEFANKKLVRTVR

SEQ ID NO: 2666 - protein, 229 aa, Candida albicans SC5314
MVKSNVESAWETMEDTFSEIQNKFHQIYKPIDTGKPDEDDETTKKESLDITDDSTLSVSPITQLLYLARSKFYDLTPLDNQKSPFPFKNLRGKVVLIVNVASRCGFSFQYNGLEQLNKRFANDDFVLLGVPCNQFLWQEPGTNDQIVTKCKKKYDVSFQILDKINVNGEQADPVYKFLKAQKEGLWGTNRVKWNFEKFLIDKNGRVVERYSTFTRPVAIIPKIEQLLES

SEQ ID NO: 2667 - protein, 488 aa, Streptomyces avermitilis MA-4680
MPDLFIDGEWVRGATGTTREVVNPFDATVVRSVDEGDATDVDRAVTAARRAFHAADWAAAPTQRRADVLFRVAEYLLRDIEEIARDETLNTGKTLAEARIDVKDVSNAFRYFAEMAGKDAGRVVDAGPDVLSRVVHEPVGVCALIAPWNYPLLQASWKVAPALAAGNTFVLKPSEITPLTTIAMMRLIEEAGAPPGVANLVLGAGATVGSAMTVHPEVDLVSFTGGLGTGRRIMESAAREVKNIALELGGKNPNVVFDDADFEAAVDHTLDASFLHSGQVCSAGSRLLVQDSWHDRFVRELADRASRIRLGNGLDPHTESGPLSSAEHRAKVEKYIDLGRSEGARLVTGGRRPDDPDLAHGFFLLPTIFDDCDRSMRIVQEEVFGPVVTVETFRTEDEAVELANDTRYGLAAGVWTGEASRAQRVAARLRHGTVWINDFHPYLPQAEWGGYGQSGVGRELGPTGLREYQEIKHIYQNLSPGPSGWFKG

SEQ ID NO: 2668 - protein, 343 aa, Chrysosplenium americanum
MLFAMQLASASVLPMVLKSAIELDLLEIIASQDTCMSPTEIASHLPTTNPHAPTMIDRILRLLSSYSIVTCSVRSVDDQRVYSPAPVCKYLTKNQDGVSIAALCVAAQDKVLMECWYHMKDAVLDGGIPFNKAYGMPIFDYFAKDLGSNKVFNKGMSDFSSMIIKKILETYKGFQGLTSLVDVGGGTGATLTKILSKYPTIRGINFDLPHVIQDAPEYPGIEHVGGDMFVSVPKGDAIFMKWICHDWNEEQCLKLLKNCYDALPNNGKVIVAEYILPVVPDSSLASKLSVTADVMIVTQNSGGKERTEKEFEALAKAAGFQGFQVFCNAFTIYIIEFSKNISN

SEQ ID NO: 2669 - protein, 170 aa, Gossypium hirsutum
MASQSSKPQSIYDFTVKDAKGNDVDLSIYKGKVLIIVNVASQCGLTNSNYTDLTEIYKKYKDQGLEILAFPCNQFGGQEPGSIEESIQNMVCTRFKAEYPIFDKVDVNGDNAAPLYKFLKSSKGGFFGDSIKWNFSKFLVDKEGNVVDRYSPTTTPASMEKDIKKLLGVA

SEQ ID NO: 2670 - protein, 388 aa, Zea mays
  unsure (1)..(388): unsure at all Xaa locations
MEAGGAGSGLNGAVQAKGTGADGGSAKPLPPCCVKARAAAPESEARCHATVVSGWFTEPRSRCGKASKVQYYNNPMWPGEANSLKVEKILYQGKSPYQEVLVFESSTYGKVLVLDGIVQLTDKDECAYQEMITHLPLCSIPSPKKVLVIGGGDGGVLREVSRHSSVESIDICEIDQLVIDVCKDFFPHLSVGFQDPRVQLHVGDAVEFLRNAPEGTYDAIIVDSSDPIGPAQELVEKPFFDTIARALRPGGVLCNQAESMWLHTHLVQDMLSICRETFKGSVRYAWTSVPTYPXSGVIGFLLCAKEGPLVNFLTPINPIEKLEGATKAGREIRFYNSEMHRAAFVLPTFARRELEAYCVSTETEQAEETPAAPLKLTLASRSEIFATS

SEQ ID NO: 2671 - protein, 362 aa, Saccharum officinarum
MGSTAEDVAAVADEEACMYAMQLASASILPMTLKNALELGLLEVLQAEAPAGKALAPEEVVARLPVAPTNPDAADMVDRMLRLLASYDVVKCQMEDKDGKYERRYSAAPVGKWLTPNEDGVSMAALTLMNQDKVLMESWYYLKDAVLDGGIPFNKAYGMTAFEYHGTDPRFNRVFNEGMKNHSVIITKKLLEFYTGFEGVSTLVDVGGGIGATLHAITSHHPQIKGINFDLPHVISEAPPFPGVQHVGGDMFKSVPAGDAILMKWILHDWSDAHCATLLKNCYDALPENGKVIIVECVLPVNTEAVPKAQGVFHVDMIMLAHNPGGRERYEREFHDLAKGAGFSGFKATYIYANAWAIEFIK

SEQ ID NO: 2672 - protein, 180 aa, Glycine max
MQHRKLTSGRPSGTDGSDYSYRMVVDSRYQLVAKGKKYLSLHFITEAVLLLIGATLAYLPGIEADAPNTVAYSSVIVSVVSLIIGNIGRRRSRSGLLRFYAVVSSIVMLLLIASLATQHLLLKAIQDSKLWRTGKYDVNDLSHFQIGLLLYMVTLSVLKLCTVNAVVSLLFNMAPPKKTS

SEQ ID NO: 2673 - protein, 113 aa, Triticum aestivum
MLEWFADIRLINGEAIHASPRKTGAIILGGGLPKHHICNANMFRNGADYAVYINTAQEFDGSDSGAHPDEAVSWGKIKGSAKPVKVHCDATIAFPLLVAATFARRSRSANSTN

SEQ ID NO: 2674 - protein, 430 aa, Bifidobacterium longum DJO10A
MATAQLDVDSNKFNLPVVKASAGPDGIVVSKLRNDGWVTLDPGFLTTAQCESKITYIDGKHSILRYCGYPIEQLCENSDFLEVAWLLRHGELPSRAEYEQFCADINHKTMVGEDFRTFMGSFPRSAHPMSVLASAINALATFYPDTTDISDTDQLDEAAKIIMAKARTIVSYIFRRRRDEPMLYPDYARGYVDDFLRMCFAVPYEPFESDPLYVHALGRLLIIHADHEQNCSTSVVRIAGSAHANLYSAVAAGVNALSGPLHGGANEAVLRQLKAIRDSGKSVAEFVRDAKENGQKISGLGHRVYKSYDPRAAIARKYLEKIMEREDTQKLPSDERALFAVATELEDIALNDEYFVSRNLYPNVDFYTGLIYRAIGFDPAMFTTLFALGRIPGWIAQYREMLADPNTKIGRPRQVYTGPVERDFVPMDER

SEQ ID NO: 2675 - protein, 125 aa, Glycine max
  unsure (1)..(125): unsure at all Xaa locations
ASSLISSPAVISVNPAGAGMVAPLTGLKCMAGFPTRKTNNDLPFIATNGGRVECMRVWPPVGKKKFETLSYLPYLDDARLAKEIKFLLRKGWIPCLEFXMEHCFSYREHSQSPGYYDGTYWTMRN

SEQ ID NO: 2676 - protein, 192 aa, Zea mays
IGYLEAGRKNALPANAKISKDAKETVQECVSEFISFITGEASDKCQREKRKTINGDDLLWAMTTLGFEDYVEPLKHYLHKFREIEGERAAASAGASGSQQQQGELPRGAANAAGYAGYGAPGSGGMMMMMMGQPMYGGSQPQQQPPQPQPPQQQQQQHQQHHMAMGGRGGFGQQGGGGGSSSSSGLGRQDRA

SEQ ID NO: 2677 - protein, 170 aa, Mesembryanthemum crystallinum
MASQSTDQPKSIHDFIVKDARGNDVDLSIYKGKVLLIVNVASQCGLTNSNYPELTKLYEQYKDKGLEILAFPCNQFGNQEPGDNEQIMEFACTRFKAEFPIFDKVDVNGSNAAPVYKYLKSSKGGLFGDGIKWNFTKFLVDRDGKVVDRYAPTTSPASIEKDIKKLIGTS

SEQ ID NO: 2678 - protein, 398 aa, Zea mays
  unsure (1)..(398): unsure at all Xaa locations
MSAAATKVKRRVGKYELGRTIGEGTFAKVRFAKNTETGEPVAVKILDKEKVLRHKMAEQIKREISTMKLIKHPNVVRIYEVMGXSKTKVYIVLEYVTGGELFDTIANQGRMREGEARSYFQQLINAVDYCHSRGVYHRDLKPENLLLDSYGNLNVSDFGLSALSQQIKDDGLLHTTCGTPNYVAPEVLEDQGYDGAMADLWSCGVILFVLLAGYLPFEDSNLMTLYKKISNAEYTFPPWTSFPAKRLLTRILDPNPMTENSCDFRITIPEILEDEWFKKGYKRPEFDEKYDTPLDDVDAVFNDSEEHHVTEKKEEEPVALNAFELISRSAGLNLGNLFDSEQEFKRETRFTSKCPPKEIIRKIEEAAKPLGFGVQKKNYKLRLEKVKAGSHGSTGCRP

SEQ ID NO: 2679 - protein, 253 aa, Triticum aestivum
SLRFHEECRKRKLKVSVVAVPKTIDNDILFMDKTFGFDTAVEEAQRAINSAYIEARSAYHGVGLVKLMGRSTGFIAMHASLSSGQIDVCLIPEVSFTLDGEHGVLAHLEHLLETKGFCVVCVAEGAGQDLLQKSNATDASGNVILSDFGVHMQQKIKKHFKDIGVLADVKYIDPTYMVRACRANASDAILCTVLGQNAVHGAFAGFSGITSGICNTHYAFLPITEVITTPKHVNPNSRMWHRCLTSTGQPDFH

SEQ ID NO: 2680 - protein, 442 aa, Haloarcula marismortui ATCC 43049
MSYTALQVDPNVLAEGVNLLWVLTVSFLIFFMHAGFAMLEAGQVRSKNVANQLTKNLLTWSVGVVVFFLIGSGISSLVGTGSFAPAFGAEAANDYVGWLFGAVFAMTAATIVSGAVAGRAKLRAYITYTFLLAAVIYPVVTGLTWAGAHISLGGVVFKDFAGGMIVHGMGGIAGLTAAYVLGPRMGRYNEDGSANVIPGHSMTFAVLGTLILAFGWYGFNVGTAASVFVVEDGALALGAFATVGRVAMTTTVAMAMGAIGAALVAWLKTGKVDTLYVANGLLAGLVGITAIPDTTTWWGALIVGLLAGGQLPIVFSFMENRMKIDDVCAVFPVHGSAGVLGTIMYPLVATSGTVGSIGSALAVQVVGVAVIAGWTIVTTGLIWYGLKAAGQARVTPEHEQEGLDVSEHGVETYPEFGGGEGVVADGGKVNTNVRTDGGSKDD

SEQ ID NO: 2681 - protein, 150 aa, Brassica napus
VDPRVRGIDVVRFGELMMSSGIVLNDSISWITFHGGYDFGYLVKLLTCKELPLRQADFFKMLFVYFPTVYDIKYLMTFCNGLFGGLNRLAELMGVERVGICHQAGSDSLLTLGSFRKLKERYFPGSTDKYTGVLYGLGVEDSATSTAIAN

SEQ ID NO: 2682 - protein, 342 aa, Streptomyces avermitilis MA-4680
MKALVKEKAEPGLWLMDVPEPEIGPGDVLIKVLRTGICGTDLHIRSWDGWAQQAVRTPLVLGHEFVGEVVETGRDVVDIKAGDRVSGEGHLVCGKCRNCQAGRRHLCRATVGLGVGRDGAFAEYVALPAANVWVHRVPVDLDVAAIFDPFGNAVHTALSFPLVGEDVLITGAGPIGLMAAAVARHAGARNVMITDVSEERLELARKIGVSLALNVADTTIADGQRALGLREGFDIGLEMSGRPEAMRDMIANMTHGGRIAMLGLPSQEFPVDWARIVTSMITIKGIYGREMFETWYAMSVLLEGGLDLAPVITGRYGYRDYEAAFADAASGRGGKVILDWTL

SEQ ID NO: 2683 - protein, 312 aa, Chromobacterium violaceum ATCC 12472
MAIQWFPGHMNKARKDVSERLKDIDVVIEMLDARLPASSANPMLARMAKGKPRLMLLNKQDLADPAVTEQWLAWYRAKKQTEALGMDAGERAPAQRLIAACRALAPNRGGLEKPLRVLICGIPNVGKSTLINSMSSRKIAKTGNMPGVTKNEQRIILADDFELYDTPGMLWPKIEVEEGGYNLAASGAVGRNAMDEEEVALELLKYLLVHYRAELAARYKLDEEELDGAQDWQALERIGKRRGAVLSGGRINMQKAAEIVLTDFRDGQTGRITLERPEEWAKWEKRAKEIAAQRAAEREAREQEKASRKGSR

SEQ ID NO: 2684 - protein, 179 aa, Vibrio vulnificus YJ016
MKYSSIALLLLSSVAASTSYAGDFSLTSHDIMEGQRMAKTFEFKGFGCSGDNLSPQLSWQNAPKGTKSFAITAYDPDAPTGSGWWHWSAIDIPANVSELPRGVDLKKVGATEIRNDYGAKGFGGVCPPEGDGMHRYQFTVWALPEAKLDLDSNSSPALVGFMLNAMALDKATLTATYVR

SEQ ID NO: 2685 - protein, 489 aa, Glycine max
SSTQQILLFLTKLLSKNSSGDSISTMSNSEHNIITGHAGYVLEDVPHLSDYIPHLTTYPNPLQDNPSYSVVKEHSVDVDDTIAQKAIVHKNSPRETHFRRAGPRQKVYFESEDVYACIVTCGGLCPGVNTVIREIVCGLYHMYGVHKVLGIEGGYRGFYSCNTIPLTPKVVNDIHKRGGTILGTSQGEGGNDTLKIVDSIQDRGINQVYILGGDGTQRGASVIFEEIRRRGLKVSVVGIPESVDNDIPVIDKSFGFDTAVEEAQRAINAAHVEAESTENGIGVVKLMGRHSGFISMYATLASRDVDCCLIPESPFYLEGPGGLFEFIRKRLAENGHMVIVISEGAGHELISESLSATNKQEASGNKLLQDVGLWLSQKIKDHFTKSQKMDITLKYIDPTYMIRAVPSIASDNVHCTLLAQSAVHGAMAGYTGFAVGTVNGKHAYIPFYRINEIEKKVVITDRMWARLLSSTNQPSFLNPKDITTHQTGN

SEQ ID NO: 2686 - protein, 506 aa, Vibrio vulnificus YJ016
MTQQLEQNLATAQKYLARFRDNTLGHFINGEWTLGSKGETFDNLTPTDNTSLGKVVKGTAEDVDAACEAAQQAFTAWAEMSGAERKKILHKLADKIEQRAEEIALVESMDCGQPLRFMRQAAIRGAANFRFFADKSPEAKNGLSLHQDTHTNYTIRTPIGPVGVITPWNTPFMLSTWKIAPALAAGCTVVHKPAEFSPLTAAILAECAKEAGLPDGVWNMVNGFGEVAGKTLTEHKAIKAVAFVGETVTGSMIQAQGAPTLKRVHFELGGKNPVIVFDDADFERALDAVVFMIYSLNGQRCTSSSRLLIQNGIKPKFIEALKQRVESLQVGHPLDPETEVGPLVHQSHYNKVMSYMTAAEEDGATIAVGGRKLPEKGAGNYLTPTLFTDADNTMRIAREEIFGPVLTCIGFDSEEEALEIANDTDYGLSGYIWTSNTGRAMRMATKVEAGMIWVNSENNRNLPSPFGGVKMSGIGRDGGDWSFDFYMETKNVCIAHDLHRVPTLGK

SEQ ID NO: 2687 - protein, 494 aa, Bacillus thuringiensis serovar konkukian str. 97-27
MLTKNIELKPKVKAFLNEEIKMFINGEFVPSISGKTFETYNPATEDVLAVVYEAQEEDIDVAVKAARSAFESGPWVEMTTAERAHLIYKLADLIEEHGEELAQLEALDNGKPYQVALDDDIAATVENYRYYAGWATKIIGQTIPISKDYLNYTRHEPVGVVGQIIPWNFPLVMSSWKMGAALATGCTIVLKPAEQTPLSLLYTAKLFKEAGFPNGVVNFVPGFGPEAGSAIVNHHDIDKVAFTGSTVTGKYIMRQSAETIKHVTLELGGKSPNIILEDADLKEAINGAFQGIMYNHGQNCSAGSRVFVHRKHYETVVNELVKMANNVKLGAGMEKETEMGPLVSKKQQERVLHYIEQGKAEGATVAAGGERAFEKGYFVQPTVFTDVTDDMTIVKEEIFGPVVVVLPFDSTEEVIERANRSSYGLAAGVWTQNIKTGHQVANKLKAGTVWINDYNLENAAAPFGGFKQSGIGRELGSYALDNYTEVKSVWVNIK

SEQ ID NO: 2688 - protein, 343 aa, Arabidopsis thaliana
MEGDVGIGLVCQNTMDGKASNGNGLEKTVPSCCLKAMACVPEDDAKCHSTVVSGWFSEPHPRSGEAHSLKVEKVLFKDKSDFQEVLVFESATYGKVLVLDGIVQLTEKDECAYQEMIAHLPLCSISSPKNVLVVGGGDGGVLREISRHSSVEVIDICEIDKMVIDVSKKFFPELAVGFDDPRVQLHIGDAAEFLRKSPEGKYDAIIVDSSDPVGPALALVEKPFFETLARALKPGGVLCNMAESMWLHTHLIEDMISICRQTFKSVHYAWSSVPTYPSGVIGFVLCSTEGPAVDFKNPINPIEKLDGAMTHKRELKFYNSDMHRAAFALPTFLRREVASLLAS

SEQ ID NO: 2689 - protein, 120 aa, Glycine max
TDTTVNQDDTGKIAPFTDLKSMAGFPTTKTNNDITSIASNGGRAQCMYVLPPVAKKKFETLSYLPKLDDAQLANEGEYHLRNGWIPCLEFEMEHGFVYREHNRSPGYYYGRYRTMRKQPM

SEQ ID NO: 2690 - protein, 527 aa, Zea mays
  unsure (1)..(527): unsure at all Xaa locations
MATSRPLALALLLCALSACSHAAISYPPSAMSTAAPANNGFLSCLIKSVPPRLLHGKSSRAYGSIWESTVRNVKFVSDKTVKPVYIITPTEAAHIQATVACGRKHGLRVRVRSGGHDYEGLSYRSAKPETFAVVDLSMMRQVRIDGQGRXTAWVDSGAQLGELYYAVAKMTPSLGFPAGVCATIGVGGHFSGGGFGMLLRKYGTAGDNVIDAKVVDANGTLLDRKSMGEDYFWAIRGGGGESFGIMVSWQVQLVPTPPPTTVPTRPRGVKDGAIDLINKWQQVAPSLPDDLMIRIMAMEQDAMFEALYLGTCKDLLPLMASRFPELGVKQEDCNEMPWIQSVAFIPMGKSATVMDLLNRTSNIKAFGKYKSDYVKDPIPRDVWEKIYTWLAKPGAGVMIMDPYGARISSIPQDATPFPHRQGVLFNIQYVSYWFGEGDGAAPTQWSRDMYAFMEPYLSKNPRQAYANYRDLDLGVNEVVGDVSTYDSGRVWGEKYYNGNFERLARTKAKVDPCDYFRNEQSIPPLLK

SEQ ID NO: 2691 - protein, 327 aa, Bordetella bronchiseptica RB50
MSAQIRLMPSQLEALRRHTVVVADTGDFEAMRALRPTDATTNPSLILKAVQQEAYRPLLVQTARAHQGASPAEITDRLLVAFGRQILDIVPGRVSTEVDARLSFDTRATVERARGLIALYQAAGVPRERVLIKIASTWEGIQAARVLQAEGIRCNLTLLFCLPQAAACADAGVQLISPFVGRIYDWHKKNAGAEWVEDARRGANDPGVQSVSRIYRYYKRFGIETEIMGASFRNVDQILALAGCDLLTISPELLTRLSQTEGEVPAALSPQAGHDDADAVRLDGGEVAFRTQLNEDAMASEKLSEGIRLFVADARKLDALIESHGAA

SEQ ID NO: 2692 - protein, 506 aa, Magnetospirillum magnetotacticum MS-1
MLYASPNTSGAKVQYKAKYDNFIGGKWVAPVKGEYFDVITPINGKAYTKAARSGAEDIELALDAAHAAADAWGKTPPAERANILLKIADRLEANLELLAYAETVDNGKPIRETLAADIPLSVDHFRYFAGCLRAQEGGMSDIDENTVAYHFHEPLGVVGQIIPWNFPILMAAWKLAPALGAGNCVVLKPAESTPISILILAELIADLLPPGVLNIVNGYGREAGMPLASSKRIAKIAFTGSTSTGRVIAQAAANNLIPATLELGGKSPNIFFPDVAQADDGFFDKAIEGLVLFAFNQGEVCTCPSRALIHESIYDKFMDRVLGRVAAIKQGSPLDTDTMIGAQASKEQMTKIMSYLDLGKQEGAQLLIGGERAYLGGELNDGYYIQPTLFKGHNKMRIFQEEIFGPVLAVTTFKDEAHALELANDTLYGLGAGVWSRNGNVAYRMGRAIKAGRVWTNCYHAYPAHAAFGGYKESGIGRETHKVMLDHYQQTKNLLVSYSESKLGFF

SEQ ID NO: 2693 - protein, 449 aa, Bacillus thuringiensis serovar konkukian str. 97-27
MKTKQTDELLAKDEQYVWHGMRPFSPNSTMVGAKAEGCWVEDIQGKRYLDGMSGLWCVNSGYGRKELAEAAYKQLQTLSYFPMSQSHEPAIKLAEKLNEWLGGEYVIFFSNSGSEANETAFKIARQYYTQKGEPHRYKFMSRYRGYHGNTMATMAATGQAQRRYQYEPFASGFLHVTPPDCYRMPGIERENIYDVECVKEVDRVMTWELSETIAAFIMEPIITGGGILMPPQDYMKAVHETCQKHGALLISDEVICGFGRTGKAFGFMNYDVKPDIITMAKGITSAYLPLSATAVKKEIYEAFKGKGEYEFFRHINTFGGNPAACALALKNLEIMENENLIERSAQMGSLLLEQLKEEIGEHPLVGDIRGKGLLVGIELVNDKETKEPIDNDKIASVVNACKEKGLIIGRNGMTTAGYNNVLTLAPPLVISSEEIAFVIGTLKTAMERI

SEQ ID NO: 2694 - protein, 190 aa, Brassica napus
  unsure (1)..(190): unsure at all Xaa locations
WLPLCFPAAAVVTSPAQATMVAPFTGLKSSAAFPVTRQSKXNDITSIASNGXGELAGMKVWPPVGKKKFETLSYLPDPYRKLNGGKEVDYLLRNKWIPXCLNSSWEAPGFVYPWSTESTPGILTMGRYWDNVGSFPCSGCTGLCSKWLKEVQEXKRSTPNAFIRIIGFDNNRQVQCISFIAYKPPSFTGA

SEQ ID NO: 2695 - protein, 160 aa, Pseudomonas putida KT2440
MSAFHDLKLEALNGGELPLAPFKGQVVLVVNVASKCGLTPQYKALENLYQIYKDKGFNVLGLPCNQFAGQEPGSEKEIQDFCSLNYGVSFPLGSKLEVNGPQRHSLYRLLAGEGAEFPGDITWNFEKFLVGKDGRVLARFSPRTAPDDPAVVQAIEKALA

SEQ ID NO: 2696 - protein, 490 aa, Hordeum vulgare
MVVTVAATGPDTAETLHSTTFASRYVRDQLPRYRMPENSIPKEAAYQIISDELMLDGNPRLNLASFVTTWMEPECGKLIMDSVNKNYVDMDEYPVTTELQDRCVNMIAHLFNAPIGEDETAIGVSTVGSSEAIMLAGLAFKRKWANKMKEQGKPCDKPNIVTGANVQVCWEKFARYFEVELKEVKLTEGYYVMDPKKAVEMVDENTICVAAILGSTLTGEYEDVKLLNDLLVEKNKETGWNVPIHVDAASGGFIAPFLQPELEWDFRLPLVKSINVSGHKYGLVYPGVGWVIWRSKDDLPEELIFHINYLGADQPTFTLNFSKGQQIIAQYYQLIRLGFEGYKHIMENCKLNAAVLKEGIDATGRFDVLSKADGVPLVAIRLKDSTNFSVFDISENLRRFGWIVPAYTMPADAEHVAVLRIVIREDFNRSLAQRLLADINKIIGELDAHAVHAIKLSTAAAGGDGASKSAVDAATEAFKDLAGKKKAGVC

SEQ ID NO: 2697 - protein, 150 aa, Triticum aestivum
ILALSNPTSQSECTAEQAYTWSQGRAIFGSGSPFDPVKYNDKLFVPAQANNAYIFPGFGLGVVISGAVRVSDDMVLAAAEGLAEQVTPEHIEKGLIYPPFSIIRKISANIAARVAAKAYDLGMASQLPRPKDLVKYAESCMYSPVYRTYR

SEQ ID NO: 2698 - protein, 443 aa, Triticum aestivum
FVDEDDTVPQKVVVQKNSRRGVHFRRAGPRQRVNFESDEVKACIVSCGGLCPGLNTVIRELVCGLAHMYNVNNIFGIQNGYKGFYSSNYVAITPKTVNDIHKRGGTVLGTSRGGHDTKKIVDNIQDRGINQVYIIGGDGTQKGAYEIYKEIRKRGLKVAVAGVPKTIDNDIAIIDKSFGFDSAVEEAQRAINSAHVEACSAENGIGLVKLMGRYSGFIAMYATLASRDVDCCLIPESPFYMDGEGGLLQYVERRLKENKHMVIVVAEGAGQDIIAKSIPASDQLDASGNKLLLDIGLWLTHKIKDHFKSKKMEMTIKYIDPTYMIRAIPSNAADNVYCTLLAHSAIHGAMAGYSFTVGMVNGRHAYIPFYRVTSTRNKVKITDRMWARLLSSTNQPSFLRQKDIDEAREADRLTNKPPLPPVANQNVAKAFDQSASASSNGEI

SEQ ID NO: 2699 - protein, 503 aa, Glycine max
  unsure (1)..(503): unsure at all Xaa locations
MSIPIPHRQLFIDGDWKVPVLKNRIPIINPSTQHIIGDIPAATKEDVDLAVAAAKAALSRNKGADWASASGSVRARYLRAIAAKITEKKPELAKLEAIDCGKPLDEAAWDIDDVAGCXEFYADLAEKLDAQQKAHVSLPMDTFKSYVLKEPIGVVALITPWNYPLLMATWKVAPALAAGCAAILKPSELASVTCLELAEICKEVGLPPGVLNILTGLGPEAGAPLAAHPDVDKIAFTGSSATGSKIMTAAAQLIKPVSLELGGKSPIIVFEDVDLDKAAEWTIFGCFWTNGQICSATSRLIVHESIATEFLNRIVKWVKNIKISDPLEEGCRLGPIVSEGQYEKILKFISNAKSEGATILTGGSRPEHLKKGFFVEPTVITDVTTSMQIWREEVFGPVLCVKTFSTEEEAIDLANDTVYGLGSAVISNDLERCERITKAFKAGIVWINCSQPCFTQAPWGGIKRSGFGRELGEWGLDNYLSVKQVTQYISDEPWGWYQSPSRL

SEQ ID NO: 2700 - protein, 384 aa, Mycobacterium tuberculosis CDC1551
MRAVVIDGAGSVRVNTQPDPALPGPDGVVVAVTAAGICGSDLHFYEGEYPFTEPVALGHEAVGTIVEAGPQVRTVGVGDLVMVSSVAGCGVCPGCETHDPVMCFSGPMIFGAGVLGGAQADLLAVPAADFQVLKIPEGITTEQALLLTDNLATGWAAAQRADISFGSAVAVIGLGAVGLCALRSAFIHGAATVFAVDRVKGRLQRAATWGATPIPSPAAETILAATRGRGADSVIDAVGTDASMSDALNAVRPGGTVSVVGVHDLQPFPLPALTCLLRSITLRMTMAPVQRTWPELIPLLQSGRLDVDGIFTTTLPLDEAAKGYATARARSGEELRFCLRPDSRDVLGAHETVDLYVHVRRCQSVADLQLEGAADGVDGPSMLN

SEQ ID NO: 2701 - protein, 210 aa, Triticum aestivum
TLPDWSTRTLTWTEAVKKLARVPPPEQAIYLHTTAVAPTVMASSGTSVAPFQGLKSTAGLPVSRRSNGASLGSVSNGGRIRCMQVWPIEGIKKCDTLSYLPPLSTEALLKQVDYLIRSKWVPCLEFSKVGFIFREHNASPGYYDGRNWTMWKLPMFGCTDAIQVINEVDEVKKEYPDAYVRIIGFDNMRQVQCVSFIAFKPPGCDESGKA

SEQ ID NO: 2702 - protein, 493 aa, Vicia faba
MSNSNNPPPPKPTWVLPYITENIRELYTLGRKLGQGQFGTTYLCTHNPTGKTYACKSIPKKKLLCKEDYDDVWREIQIMHHLSEHPNVVRIHGTYEDSVSVHLVMELCEGGELFDRIVNKGHYSEREAAKLIRTIVEVVENCHSLGVMHRDLKPENFLFDTVEEDAVLKTTDFGLSAFYKPGEIFSDVVGSPYYVAPEVLHKHYGPEADVWSAGVILYILLSGVPPFWAETEIGIFKQILQGRLDFQSEPWPGISDSAKDLIRKMLDRNPKTRFTAHQVLCHPWIVDDSIAPDKPLDSAVLSRLKQFSAMNKLKKMALRVIAERLSEEEIGGLKELFKMLDADSSGTITLDELKEGLKRVGSELMESEIKDLMDAADIDNNGTLDYGEFIAATVHLNKLEREENLLSAFSYFDKDGSGYITIDEIHVACKEFGLDDIHIDEMVKEIDQDNDGQIDYGEFAAMMRKGNGGMGRRTMTSRLNFRNALGIIGNESN

SEQ ID NO: 2703 - protein, 131 aa, Triticum aestivum
MSYYDRRGESSVLEAFTLSPLPYPVILILMMVTLLLGASWFFSYEDFMEEASEQFSWFLLGVPIALVLLIRWISSVDTFEGYFGFYPTESRWRGYPAAPSEGSSPWGVAMVVVLLLLLASFHSTFQDMWKP

SEQ ID NO: 2704 - protein, 494 aa, Novosphingobium aromaticivorans DSM 12444
MTSTSSSPVTETILNFIDGSYRKGSEGKSFPNVNPATGTAIGVVHEASQADVADAVAAAKAALTGPWGKMTTAERVKLIAAVATEIERRADDFLAAEVADTGKPRHVASHIDIPRGAANFRMFADVVSTMPGESFNTSTPDGGQALNYTVRKPKGVVAVVCPWNFPLLLMTWKVGPALACGNTVVVKPSEETPRTAALLGEVMNAVGMPKGVYNVVHGFGPGSAGEFLTSNPDVDAITFTGETGTGQAIMQKAAIGVRDISFELGGKNPAIVFADADLDKAVEGLSRSVFLNTGQVCLGTERVYVERPIFDAFVARMAAAAQGFKPGVTGDRAYLGPLISAEHREKVLGYYRRAVEDGATVVTGGGVPEISGAEAGGFFVEPTLWIDVAHGDTVMREEIFGPCCGIVPFDSEDEVIALANDTVYGLCASIWTENMSRGHRVAAAMDVGVCWVNSWFLRDLRTAFGGSGHSGIGREGGVHSLEFYTEITNICVKL

SEQ ID NO: 2705 - protein, 315 aa, Glycine max
TRLIDCVSFCHNKGVFHRDLKLENVLVDAKGNIKITDFNLSALPQHFREDGLLHTTCGSPNYVAPEILANKGYDGATSDIWSCGVILYVILTGYLPFDDRNLAVLYQKIFKGEVQIPRWLSPGSQNIIKRMLDANPKTRITMAMIKEDGWSKEGYTPANPEDEEESVYIDDEDFSIHDVSHEADQGCPRSPTLINAFQLISMSSSLDLSGLFEQEDVSERKIRFTSIHSPKDLVERLEDIVTEMGFRVQKKNGMLKVVQEIKTQKCLGNLSVAAEVFEISPSLYVVELSKSCGDASVYRQLCKKLSNDLGVHKKE

SEQ ID NO: 2706 - protein, 305 aa, Hordeum vulgare subsp. vulgare
MKILIILTILAMATTFATSEMQVNPSVQVQPTQQQPYPESQQPFISQSQQQFPQPQQPFPQQPQQPFPQSQQQCLQQPQHQFPQPTQQFPQRPLLPFTHPFLTFPDQLLPQPPHQSFPQPPQSYPQPPLQPFPQPPQQKYPEQPQQPFPWQQPTIQLYLQQQLNPCKEFLLQQCRPVSLLSYIWSKIVQQSSCRVMQQQCCLQLAQIPEQYKCTAIDSIVHAIFMQQGQRQGVQIVQQQPQPQQVGQCVLVQGQGVVQPQQLAQMEAIRTLVLQSVPSMCNFNVPPNCSTIKAPFVGVVTGVGGQ

SEQ ID NO: 2707 - protein, 276 aa, Bacillus subtilis subsp. subtilis str. 168
MPTSLKDTVKLHNGVEMPWFGLGVFKVENGNEATESVKAAIKNGYRSIDTAAIYKNEEGVGIGIKESGVAREELFITSKVWNEDQGYETTLAAFEKSLERLQLDYLDLYLIHWPGKDKYKDTWRALEKLYKDGKIRAIGVSNFQVHHLEELLKDAEIKPMVNQVEFHPRLTQKELRDYCKGQGIQLEAWSPLMQGQLLDNEVLTQIAEKHNKSVAQVILRWDLQHGVVTIPKSIKEHRIIENADIFDFELSQEDMDKIDALNKDERVGPNPDELLF

SEQ ID NO: 2708 - protein, 196 aa, Hyacinthus orientalis
PTPGSTRCSTRGCATTPTVVTKKILDTYKGFGDLATLVDVGGGVGGTINMIVKKHPHIKGTNFDLPHVISEAELIAGVEHVGGDMFESVPGGDAIFMKWILHDWSDEHCLKLLKNCWRALPDNGKVILMESILPVYPEPTAAAQGVIHVDMIMLAHNPGGKERTEQEFESLAKDAGFAGSKVVCGYANSWVIEFHK

SEQ ID NO: 2709 - protein, 155 aa, Triticum aestivum
  unsure (1)..(155): unsure at all Xaa locations
SLDRQVLLKKLRDVLDTLKGRVAGRNRDDADEAISLVEALAVQLTQREGELIYEKAEVKKLASFLKQATEDARKVAEEERALALAEIEKSRAAIEKVEKALQEQDSASSXREXEXIEELMKXIREARRIKMLHXPCKVXXMQFELGTAVHLSKKH

SEQ ID NO: 2710 - protein, 483 aa, Vibrio vulnificus YJ016
MNLNYPELFQQRCYIDGQWVAESGQTQAVTNPSTGKVIGEIPVFGEQQAKECITAAQAAFELWKKTTADYRADVLRRWYELMMVNIDDLAAILTLEQGKPFTEAKGEITYAASFVQWYSEEARRAYGEIIPSHRENGKIVVTKEPIGVVAAITPWNFPAAMITRKAAPAFAAGCSMVLKPAQETPFTALALAKLAEDAGLPKGLFNVITGDSRSIGGVFTSDKRVRKVSFTGSTNVGKILMNKSASTIKKLALELGGNAPFIVFEDADIDAAVEGAMIAKFRNAGQTCVCANRLFVHHAVYDEFAEKLANRVKQLKVGDGFADGVAIGPLINSSSVAKVQEHVDDAVAKGAKVLCGGLLNDEQLFVAPYVLTDMSDDMLVAEEETFGPVAPLFRFKDEAEVLERANDTESGLAGYFYTRSLGRAWRVADALEVGMVGINEGLISTAAAPFGGIKESGLGREGSRHGMDEYMEMKYMLMGGLDS

SEQ ID NO: 2711 - protein, 1239 aa, Ustilago maydis 521
MSSSQRPVVQPIPPFKGAPLQATDVQNRRPTAAEAYVALANRKAGANVVSTRATGCENHRPSQHQPTSHHASQRQQPAPAADRRVQQSQPSERPKPASRLEREKKRHHNDPKNIGHWRLDKLIGQGASGRVRLAIHDQTGQKAAVKIIPRTLINASRMSLRDADVKANKMILGIEREIVIMKLIEHPNLLGLWDVYETSKDLFLIMEYVAGGELFDHLVAQGKLSPRDARGYFRQIIFGMDYCHRFNICHRDLKPENLLLDETKKIVKVADFGMAALQPTEKMLETSCGSPHYASPEIVSGKRYKGTASDIWSCGIILFALLCGRLPFDDPNIQQLLGKVRAGKFIMPEWLEPASKDLIWRMLEVDPEKRIKMADIMRHPWFTNNGTESSVNPVSTSLDSLQMEELTLDTIDIDILGNLKTLWFELSEQDIIKELLAPGPSWQKTFYTLLVAHRENHSADDEDDMNDDILDEQIVTASAVPAHALLSTTSAAKTLEKPRPRRTSDAAGATSAPASPRLESVEMDRRHSTPEKGSVYHTTSRRPDNVTPPKVASPHVRPANPSPRLRPSPLDSPASTLDSAFVSASKLKVASPTKPRALGSSHGADKSGYVLPQISLQTASPQRNERPAVDLQRRNTSPTKPNTVGVTAPLSARIALANMYDAPTLSHTATASCGSTSSTASSTVSVSAARNRANRGSGSEMMPPLALPGRASSRPVSPTKSTFGAQATLPPQTAPQPAPPRPSTSRAYTTQPTPCIQVPQVGDATMQRFFQEIADELASIRATGEKPDALQSKLDQLKNSMAWQQQQQQQQLQSQPMAVTASAPSARTRNSEMNQFEDAEDDVSEGESMRSVSQASSHQQTYTPSTPMTPLSPVELIAPLALTDKSGAGARSSVASSSASASARNSVRSARSGTEASSSGTTSRPTSVFSNISTGSTGLGRKRSLLGLRRADKHAQQQHATATEANTIRSIAYESTPTPTALASVFAAPASGRFVPNGGATTASSVRMQRLNPGLGLDIGASSAAGIISPPSTPQSPNTATLSPAPAASASAIASASAPGKKDSWFAGLFNWKPATFTLMSSENFSETLTECIRRLQSYGVRVAMDDSSDVHHTTLKCSINEYRESNGVVTAAKPLRFRVDVHILAVGSPATNSAYMGGGLGLSLHGGAVGTNVNATSIMTHGLPSPALSTYSRASTPGGVTFATSVLVVQEKGALSTFKLIHARLRREWMLDLGSAII

SEQ ID NO: 2712 - protein, 414 aa, Physcomitrella patens
MVLEATMVCMDNSEWMRNGDYSPTRFQAQADAINLICGAKTQSNPENTVGVLTMAGKGPRVLITPTNDLGKILQALHGLEVGGEMRMTSGVQVAQLALKHRQNKHQRQRIVLFAGSPVLADKAVLEGMGKKLKKNNVALDIVSFGEDDGEKVEKLEALLNAVNNGDNSHIVHIPGGERVLSDVLISSSIFTGDGEGGSGFAAAAAASAAAAAVGGGGGAYDFGVDPNLDPELALALRVSMEEERARQEAAMKRSAEDSTAKGQQAGESSSAPDVAMSDVGLVDTTDKSKDMMIDDDTALLQQAIAMSMAQAAQAAAAAGGGPATTDTSMEESGGDDQDLAYALQMSMQQAAAAASAAQGSADVNQVLGDQSFVSSVLSSLPGVDPNDPNVRDVLASLQTDEGKNDDQATKDKSK

SEQ ID NO: 2713 - protein, 463 aa, Zea mays
MARSGREADPGEEERKLVLGKYELGRLLGQGTFAKVYYARDLSAGAGTGHSCSVAIKVIDKARLRRTEGMVEQLRREISIMRMVRHPNVVGIREVLASRSRVFVVMEYARGGELFAKVARGRLPEDHARRYFQQLVAAVGFCHRRGVAHRDLKPENLLLDEAGRLKVTDFGLAALPEQLRHDGLLHTQCGTPAYVAPEVLRKRGYDGARADLWSCGVVLYVLLCGFLPFQHDNYVKLYQKIFKADYQVPPWVSGDARRLIARLLVVDPAKRASIAEIMCTPWFRKGFVPPVLSPPVTPKKQQLDEGAALFDNDDDDDNSNHSGATSPRSCNAFQLISSMSSGFDLSGLFESEQKTATVFTARAPAATVVEKLESVARALGFEVTRGKGWKVRMEAKAEGTNGRLAATAEVLEVAVDVAVVEFVHDAGDALDFNKFCAVDVRPGLTEIVWAWQGDSPAAAVGTA

SEQ ID NO: 2714 - protein, 621 aa, Zea mays
  unsure (1)..(621): unsure at all Xaa locations
MATMKLGSKPEIFVLQDLTWRCTIELESDVVVEVGEMSFYLHKFPLLSRSGVLQRMISEYQAPADGGGMCTLQLDDIPGGAKAFELAAKFCYDVKIELNALNVVCLRCAAEYLRMTDDYAEGNLITQAECFLVDVLANWKDSIKALETCEGVLPTAEDLHLVSRCITALASXADTPSCRASGPAAAGMDWWHEDGSFLSLPMFKRLIQAMEAKGMRDESIAGAIMFYAGRFLPGLKRNTSFSNALASYGADGSGGAGGGMSSRNITPRAASVSAPSEGDQRYFLEEIVALLPTKKGVASTKFLLGMLRTAMLLHASPLCRENLERRIGAQLEDASLDDLLVPNLGYHVETTLYDIDCVQRILDYFMSSTDGIGTGYTSPALAEEGGGSLGIPQGATPSSSLSPITMVAKLMDGFLAEVAPDTNLKLPKFQALAAVVPDYARPVDDGIYRAIDIYLKSHPWLSESEREQLCRLLNCQKLSLEACTHAAQNERLPLRVVVQVLFFEQLRLRTSIAGWFFVSDNAAGGDGARPHAGGAIVPKGTAAIAGCPQADADSDVEGDAPDGKETITDVKARVSDLEKECKSMKQEIRRLGKPRRSWSLLTRKCGFGAKVQQAQTAMSGK

SEQ ID NO: 2715 - protein, 120 aa, Zea mays
  unsure (1)..(120): unsure at all Xaa locations
NPLLPIYIERIHRDKHGSEXATYDTEGRFMPVNLENMFTKYALTKPDNLSLKELWQMTEGNRAAFDYLGWMASKLEWLLLYYVAKDKQGFLSKEAVRGCFDGSLFKNISKMYKDSDRKSK

SEQ ID NO: 2716 - protein, 89 aa, Zea mays
YEEHGEEFVDMLDGVFSFVLLDTRHGDRAGSSFFMAARDAIGVTPLYIGWGVDGSVWISSEMKALHDECEHFEIFPPGHLYSSNTGGFS

SEQ ID NO: 2717 - protein, 155 aa, Brassica napus
  unsure (1)..(155): unsure at all Xaa locations
MSDEEHHFESSDAGASKTYPQQAGNIRKGGYIVIKGRPCKVVEVSTSKTGKHGHAKCHFVAIDIFTSKKLEDIVPSSHNCDVPHVNRVDYQLIDISEDGFVSLLTDNGSTKDDLKLPTDEALLTQLKSGFEEGKDIVVSVMSAMGEEQMCAXKEV

SEQ ID NO: 2718 - protein, 386 aa, Vicia faba
GGELFDRIIQRGHYSEKAAAQLARVIIGIVEACHSLGVMHRDLKPENFLFVNQKEDSPLKTIDFGLSIFFKPGGIYSDVVGSPYYVAPEVLLKQYGCEVDVWSAGVIIYILLSGVPPFWDESEQGIFEQVLQGDLDFSSGPWPSISKSAKDLVRKMLNRDPGKRLTAHEALCHPWVCVDGVAPDKPLDSAVLSRLKQFSAMNKLKKMALRVIAENLSEEEISGLKELFKMIDTDNTGQITFEKLKAGLKMFGANLNEFEIFDLLNAADVDNSGTIDYREFIAATLHLNKVGREDNLVTAFSYFDKDGSGYITQDEIQKVCKEFGMEDVHLEEMIQEADQNNDGQIDYSEFVAMMLRGNADLGNSGSKCRSTSFNIGLRKIEAQSVC

SEQ ID NO: 2719 - protein, 471 aa, Methanopyrus kandleri AV19
MEYGCLIGGEWLEGDREIVVENPYDGSEVGRVLAPEVDVEALLKDAREGQRRWRERPTYEVREALAEAAHLLKKHEDELAELIALEGGKPIRDARYEVYRTREVLRLSAAEAERLYGETLPGDAQRGRTAELILTVREPVGVVLSITPYNFPLLLPTHKLGPALAARCSVVHKPATVTPLSSLRLAEILLDAGVEPLALQVVVGPGAELGEELARADFDALSFTGSRSVGEHLREISPIPRITLELGGNDPVIVDETADVEAAAEAAVRGACYHAGQVCIAVERAIVVEDVYEEFLEAAVEVAESLKVGDPLDEDTDVGPLIDDGAVEKVRRHVEDAVERGAEILTGGEPEGRLFPPTVLADVPEDALVAREETFGPVLPVIRAKDFEEAIRIANSTDYGLHAAVFTERLDRAVKATRKLEAGGVIVNESTIYRADYMPFGGVKASGVGREGVPQAVREFTEEKTVVIGRR

SEQ ID NO: 2720 - protein, 330 aa, Ustilago maydis 521
MSKLGDYAAVKKDILAVLKQPEYDDGSAGPVLVRLAWHASGTYCARTDTGGSNGAGMRYEAEGGDPANAGLQHARVFLEPIKEKHSWITYADLWTLAGVVAIEAMGGPSIQWKPGRTDFADDSRLPPRGRLPDGAQGADHLRFIFNRMGFNDQEIVALSGAHNLGRCHSDRSGFEGPWVNSPTRFSNQYYKLLLKLKWQPKKWDGPFQYVAKAPGADDDDEQLMMLPTDYALIQDEKMRPWVEKYAEDRDAFFNDFAKVFAKLIELGVYRDESGIARADKMKQFKGEYKSAPQKSPVPGAPGAGKDGEANPLARQNERAHGQAQHALAKL

SEQ ID NO: 2721 - protein, 413 aa, Wolbachia pipientis
MDKKALLELSNGSKIDLPVLSGTVGPDVLNIKDLYKKTGLFTYDPGFVSTASCSSTITFIDGDEGVLKYRGHNIADLAENNNFTAVIYLLLYGKLPSSEQHKKFLLKIQESSKVSEQVTNVIKAFPKTAHPMSILVACFANLSASYHEMHGKNVNGEDLDFGISAIAKVPAIVAMIYRHINNQEFINANNKLSYSENFLNMIFGSAVNNTLFVKALDKIFTLHADHEQNASTAAVRLVGSAGSNLFASLSAGVATLWGPAHGGANEAVINMLKEIEQSGDVDRFIEKAKDDKDPFKLMGFGHRVYKNYDPRALILKDACHEILSKLEQNNELLEIAKKLEEIALKDEYFITRKLYPNVDFYSGIIMNAIGIPSSMFTPIFALARTTGWVAQWYEMINDKETKICRPRQLYLGK

SEQ ID NO: 2722 - protein, 333 aa, Triticum aestivum
AYRQDQIVSVWLLQSTTFFSIWIKQHLQSIVHIFYSEGTDHSYSWYLQLRNLVWATSKHDVYMAQNNSVMHWSSLLQRGTEVLHVAGQVVPKQKAHGARTLSRVQISSMALKDNLMVAGGFRGELIFKYVDKPGPGVVFCTNVADNKNSVTNAVDVYESPSGATRATAANNDCTVKFLDAERCSLLSRFNFPWSVNEIATLKGHLDYSFSSAWHPGGNVLATGNQDKTCRLWDTRNLSAPFAVLGGRIGAVRGLRFSSDGRFLAAAEAADFVHVYDARAGYGAAQEIGLFGEIAGVAFSPDAGALFVGVADRAYGSLLEFGRRGRHAYLDSYL

SEQ ID NO: 2723 - protein, 498 aa, Bifidobacterium longum NCC2705
MSITLRNIKVWNTGEVIDLVVPGTAAAYFADTSVVADGADIDATGLTVAPGFEDPHVHFRDPGQTYKESMVSGCRASASGGYTNVLIMPNTLPALDGQTVSGPEATGAKEVLDAGFDNVIDFLQQYDTAHDVQLPVRYDLCVCASKDRAGHEASDVADWLKYVPGFEDDAKTPAMLTHPITAISDDGSAVTPEILDQVLENVKASDLYLIEHCEHHDTGAVNEGPVSRELGVPGIPEDTELKIVARDIEAARRTGVHVHFQHVSTAISFEAIRRAKAEGLPITCETAPHYLALSDEALLKYGTLAKMNPPLRSEADRKATIAAIADGTVDLLATDHAPHTLAEKELGFLEAPNGIIGLECAYGVCHKVLVDGGFISDERLIELMSVGPAELMGHVPTDVAALVEDYAEPAPTGDDPDGVIAGESDAQPQREGVNRLLDLSRVDDADNVDLVVLNAAEEWTVDPEQFHSKARNTPFGGWQVTGRPLATIIGSQLMFSRL

SEQ ID NO: 2724 - protein, 304 aa, Zea mays
MCSSRALWPVHCCRFKAEGSLSSLESGRGLGAFLYRPDPSFIRVVTVRPRSPRRSPKSQPRFLWSARASMASPSPAVSSLETEAPQATVTRERRLNPDLQEHLPKPYLARAMVAVDPDHPTGTEGRDPRGMSVLQQHVAFFDRNGDGVVYPWETFKGMRAIGCGFFTSLVISFLINLVMSYPTQPGWLPSLLLSVHVKNIHKAKHGSDSETYDTEGRFDPSKFDAIFSKYGRTHPDALTKDEMNSMLKANRNIYDFLGWIAAIGEWHLLYSVAKDKDGLLQRETVRGLFDASLFERLQDSKKSS

SEQ ID NO: 2725 - protein, 1209 aa, Magnetococcus sp. MC-1
MIVTCENCDARFDVDPQLLGSKGRKLKCSQCHHIFFQAPPEPKSAQPPASEQPGLEDESTAQDNDTESRDYAEFAFEESPLEEVDLDEIEKLTAQATLDMALEATRDKRQEPSFDEDTQVDEDAVIEPSLEEVDVDQMIQAATALPTEPEAASEAEEELEAEEELEAEEEPEAEEEPEAEEEPEAEEEPEAEEELEAEEEPEAEEEPEAEEESEAEEESEAEEEPEAEEESEVEEAPEVEEELELEEEAEEEPEAEEEAAPEAEEEAAPEVEEEPEVEEELELEEEAEEESEAEEESEAEEEAAPEAEEEAAPEAEEEAAPEAEEEAAPEAEEEAAPEVEEEPEVEEELELEEEAEEAPEAEEAPEIEEELEAEEELEAEEELEAEEELEAEEELEAEEELEAEEELEAEEELEAEEELEAEEELEAEEELEAEEELEAEEELEAEEELEAEEELEAEEEPEAEEAPEIEEELEAEEESEAEEVPEIEEELEAEEEPEVEEEPEVEEEPEVEEEPEVEEEPEVEEEPEVEEEPEVEEEPEVEEEPEVEEELELEEEAEEAPEVEEELELEEEAEEEAAPEVEEEPEAEEESEAEEEAAPEVEEELELEEEAEEEPEAEEELEAEEEPEAEEEPEAEEEPEAEEEPEAEEEPEAEEEPEAEEEPEAEEEPEAEEEPEAEDAFALDVDEQVPAADFADDGDFLSESALQEEQDKLLDVDDFNAATMVEPASLVEEDELDLAEVMENAERTADEAFNPSAMAEPDLLESELQLEDVEAEVVEEGGAELTLEGEEQAAFADLLTEEDDLSALADDALDLDDDDDVTVLADPPAMDLEGLVDAVESDHEVAFEDESVEAFAPLGDDLPNDLDDLTELVNEPGGELMLDDDLAALAPSPVMQERLVPADGMDELSALASDDQDEINLDLPESNDLSLGDLGEAESWSPDDELLEPEDETILAVPDSDETIEELDFPEPDIPQPKEEIIELDYGQQEEEPFDLSSSPDDEDEDLEWANTATPAKEKGGLGGLLGWGVAAMMLLAVIGAWFGKDYLSRGGATNRVDDFTLDGVEVKWRESDHGVLLIVEGSMTNQMNRRSARRPMMARVTLLDENNRNLNSVSVIPERIIPERAMNLNPNNMARIITKQGDIETRFNKMNPKQPVKFQAIFMDPPMEAVRYRIDFDATPEAEWEKQKKARSQAIKNREGTTTFMGNF

SEQ ID NO: 2726 - protein, 137 aa, Thermus thermophilus HB27
MMRFDPFKELEELQERLVRAFGAPQQGPRVYAPPVDVWEDEEGLHLLVYLPGVEPEKVEVVAEEGVLSVKAERPFERKENAAYHRLEGTYGTFVRSFNVPSTYDLSKVQARFRHGVLHLLVPRAEATKPKKIQVQVE

SEQ ID NO: 2727 - protein, 202 aa, Petunia x hybrida
MSNEYDYLFKLLLIGDSSVGKSCLLLRFADDSYVDSYISTIGVDFKIRTVELDGKTIKLQIWDTAGQERFRTITSSYYRGAHGIIIVYDVTEMESFNNVKQWLSEIDRYANESVCKLLVGNKCDLVENKVVDTQTGKALADELGIPFLETSAKDSINVEQAFLTMAGEIKKKMGNQPAGAKKTGSTVQIKGQPIEQKSNCCG

SEQ ID NO: 2728 - protein, 256 aa, Zea mays
  unsure (1)..(256): unsure at all Xaa locations
YILFIINLVFNSCSFTFISHCSSTDPCSLFFRVVEIVRHRNRVEVTVSSGQTFVADAAVVTVPLGVXGVENKIVLHFGQVFWPNVEFIGVVSSSTYGCSYFLNLHKATGHPVLVYMPAGRLARDIEKMSDEAAARFAFSQLKKILPNAAEPMNYLVSHWGSDENTLGSYTFDGVNKPRDLYEKLRIPVDNLFFAGEATSVKYTGTVHGAFSTGVMAAEECKMRVLERFRELDMLEMCHPAMGDESPVSVPLLISRL

SEQ ID NO: 2729 - protein, 293 aa, Triticum aestivum
  unsure (1)..(293): unsure at all Xaa locations
PLSPAGSRRLPAAGTPVTTLFQTTARASAELGAVNVTAAGPGLGVVRSPAPFPGSNATVLGSVTSVPYNLSVLAVDGLIAPSGVAEEFEGDERGAGITVFVPTDDAFASLPAGDRLQSLPADRKAXVLRFHVLHSYYPLGSLESIVNPLQPTLATEYASQAGRFTLNITRSNGSVAIDTGVVQATITRTVFDQNPVAVFAVSKVLLPKEMFTRADSAAVVAAALAPPPATSNSMPPEPPESARTPPTKLSSPPALRGVTRNDTAVSPPPSSSAKAAAIGWWCIALLYLLLPLV

SEQ ID NO: 2730 - protein, 486 aa, Chromobacterium violaceum ATCC 12472
MLNLQDPSLLRQQCYLGGEWLDADGGQHIAVHNPATGEKIGQVPKMGAAEAERAVAAAARAFPAWKAKSAKERAAILRRWFDLIIAHQQDLAIILTSEQGKPLAEAKGEIAYGASYIEWYAEEAKRVYGDIVPGPAGDRRVLVTKEPIGVTAAITPWNFPSAMITRKAAPALAAGCTMVVRPASQTPLSALALAELAERAGIPAGVFSVITGGSSEIGAVLTGSDTVKKFSFTGSTEVGRKLIAQCAGTVKKVSMELGGNAPFIVFDDADLDAAVEGALISKYRNAGQTCVCANRIYVQDGVYDAFAEKFAAAVATLKVGNGLEAGVSQGPLIDHNAVAKVEEHIADALAKGGRLIAGGKRHALGHTFFEPTLIADVTRDMKVAREETFGPLAPLFRFKTEEEAIRLANDTEFGLASYFYARDVGRIFRVAEGLEYGMVAVNSGLLSNEAAPFGGVKQSGLGREGSKYGIEDYLEIKYVLLGGLDR

SEQ ID NO: 2731 - protein, 124 aa, Nicotiana tabacum
IKLAHSKMAKVALLVVVCMAAVAVMLTPHADADISCGQVVASLSPCISYVRQGGAIPAPCCSGINSLNNQATSTPDRQTACNCIKSAAAGISGINFSLAGSLPSKCGVNLPYKISPSIDCSTVQ

SEQ ID NO: 2732 - protein, 122 aa, Spinacia oleracea
MIQPQTHLNVADNSGARELMCIRIIGASNRRYARIGDVIVAVIKEAIPNTPLERSEVIRAVVVRTCKELKRDNGMIIRYDDNAAVVIIDQEGNPKGTRIFGAIARELRQKFAKIVSLAPEVL

SEQ ID NO: 2733 - protein, 250 aa, Candida albicans SC5314
MPKPAGPELAPVATEFPVMLPLDPEPSPEPEPTPAPEPEPEPELVPLDEPEPPEGLVLLDEPRPPTKLPAPEVSCPAAAVSAPRAAAPAAVSAPRAAPAAPEVAVLAAPAAPEVAVFAAPTAPEVAVSAAPAAPEVAVLAAPAAPEVAVSAAPAAPEATVFAIPAAPEVAVSAAPAAPEATVLAAPTAPDVTAAAAPPAAEAASASISFFSILWKGEMLSAVAIGIIDVDKTNVETLISIYKCCCLNLIN

SEQ ID NO: 2734 - protein, 309 aa, Bacillus cereus ATCC 10987
LFFVYNIEMLYMNRGRDVMSKFTVASNGSLETTLRGVEVLSTPLLNKGVAFTQEEREELGLKGLLPPAVLTLEEQARRAYEQFCSQPDDLLKNVYLTALHDRNEVLFYRILTDHLREMLPIVYTPTVGVAIQRYSHEYRKPRGVYLSINDPSGIEEAFANIGATAENIDLVVVTDGEGILGIGDWGVGGINIAIGKLAVYTAAVGIDPSRVLPVILDVGTNREELLNNPFYIGNRHPRITGEAYDEFIDTFVRAVNKQFPKALLHWEDFSSRNARKILDKYRHDICTFNDDIQGTGAVSLAAVLSAVKA

SEQ ID NO: 2735 - protein, 327 aa, Bacteroides thetaiotaomicron VPI-5482
MDNKYIGILTSGGDASGMNAAIRAVTRAAIFNGFKVKGIYRGYEGLIAGEVKELTTEDVSSIIQRGGTILKTARSETFTTPEGRKKAYKVIQKENINALIIIGGDGSLTGARIFAEEYDVTCIGLPGTIDNDLYGTDFTIGYDTALNTIVECVDKIRDTATSHDRIFFVEVMGRDAGFLAQNSAIASGAEAAIIPEDRTDVDQLETFIGRGFRKTKNSSIVIVTESPENKNGGAIYYADRVKKEYPGYDVRVSILGHLQRGGAPSANDRILASRLGEAAIQALMEGQRNVMIGIRNNEIVYVPFVQAIKKDKPIDKSLIRVLNELSI

SEQ ID NO: 2736 - protein, 275 aa, Triticum aestivum
  unsure (1)..(275): unsure at all Xaa locations
MEAETAAKRARENEGAAAADGAGEQAGISAVIPGWFSEISPMWXYQEMITHLPLCSIKDPKKVLVIGGGDGGVLREVSRHSSVEQIDICEIDKMVVDVSKQFFPHLALGFEDPRVSLHIGDGVAFLKNAPEGTYDAVIVDSSDPVGPAQELFEKPFFESVSRALRPGGVVCTQAESIWLHMHIIEDIVTNCRQVFKGSVNYAWTTVPTYPSGVIGFMLCSTEGPSVDFQHPVFSIEEDEYSTKSKGPLKFYNSEFHTASFCLPSFARRVIEAKAN

SEQ ID NO: 2737 - protein, 174 aa, Triticum aestivum
  unsure (1)..(174): unsure at all Xaa locations
MAPAVMASSATTVAPFQGLKSTAGLPVSCRSGSTGLSSVSNGGRIRCMQVWPIEGIKKFETLSYLPPLSTEALLKQVDYLIRSKWVPCLEFSKVGFVFREHNSSPGYYDGRYWDNVGKLPMFGCTDAHSAQRGGGVKKEYXDAYXRVIGFDNIASECVXLNAFRHKAARNPGKA

SEQ ID NO: 2738 - protein, 335 aa, Xylella fastidiosa 9a5c
MTQTITVIRGDGIGPEIMDATLLVLNTLQANLNYEFADAGLNALEKHGDLLPEATLNSISKNKVALKSPLTTPVGEGFSSINVALRRKFDLYANVRPAKSFPNTKSRFSDNVDLITVRENTEGAYLSEGQTISPDGEVATSSARVTRKGSERIVRYAFDLARTTGRKKVTAVHKANIIKSTSGLFLKTARDVASQYPEIDFQEMIVDNACMQLVMRPEQFDIIVTTNLFGDILSDLCAGLVGGLGLAPGANIGNEQAIFEAVHGSAPDIAGQGKANPCALLLGAVQMLDHIGQPQNAERLRNAIVATLNAKDSLTPDLGGNGNTMEFAKAIASRL

SEQ ID NO: 2739 - protein, 172 aa, Triticum aestivum
  unsure (1)..(172): unsure at all Xaa locations
MGAAESSSKLASSVHGFSVKDARGNDVELSRYKGKVLLIVNVASQCGLTNSNYTELGSLHKKYGEKGFEILAFPCNQFVGQEPGTNEQIAEFACTRFKADFPVFGKVDVNXGGKAAPLYKFLKSERGGLFGERIKWNFTKFLVDKDGHVVSRYAPTSSPLSIENDIQKLLEA

SEQ ID NO: 2740 - protein, 150 aa, Triticum aestivum
  unsure (1)..(150): unsure at all Xaa locations
MAHAAAAAAVPLRRPLLLFLRPARLLSFVAPRSSSVRAYRAXXXAPSPPSPPNDEGPGTNGERRAQAATKKKREGRRAXVEVGHGSRQXSPPQLKRIVRAASLERQVVDXLMLGEEFGXDXAKGRRRXFNYXGNRHVRRFPRKVTGVPLD

SEQ ID NO: 2741 - protein, 415 aa, Spinacia oleracea
MASFTTTTAAAASRLLPSSSSSISRLSLSSSSSSSSSLKCLRSSPLVSHLFLRQRGGSAYVTKTRFSTKCYASDPAQLKNAREDIKELLQSKFCHPIMVRLGWHDAGTYNKDIKEWPQRGGANGSLSFDVELKHGANAGLVNALKLLQPIKDKYSGVTYADLFQLASATAIEEAGGPTIPMKYGRVDATGPEQCPEEGRLPDAGPPSPAQHLRDVFYRMGLDDKDIVALSGAHTLGRSRPERSGWGKPETKYTKDGPGAPGGQSWTAEWLKFDNSYFKDIKEKRDADLLVLPTDAALFEDPSFKVYAEKYAADQEAFFKDYAEAHAKLSNQGAKFDPAEGITLNGTPAGAAPEKFVAAKYSSNKRSELSDSMKEKIRAEYEGFGGSPNKPLPTNYFLNIMIVIGVLAVLSYLAGN

SEQ ID NO: 2742 - protein, 258 aa, Zea mays
MGEEAVDDYELHMVCYGGGGGGSEDERVMEWESGLPGADELTPLSQPLVPAGLAAAFRIPPEAGRTLLDVHRASAATVSRLRRAPPPSSSGSGGSSSFAPFHPAARGDEGADSSAAGGGAAATTNGNNNMSSSSKRPRLVWTPQLHKRFVDVVAHLGMKNAVPKTIMQLMNVEGLTRENVASHLQKYRLYVKRMQGLSDEGPSPSDHIFASTPVPQSLVHEVPMYGTMASGGQAYHNHNGMGGGGYQYQYHHYHHAHK

SEQ ID NO: 2743 - protein, 136 aa, Thermococcus kodakaraensis
MGDKTKVQVSKLKPGRYIIIDGEPCRIVNVTVSSPGKHGSAKARIEAVGIFDGKVRSIVKPTSAEVDVPIIDKRVGQIIAITPDTVQLMDMETYETFDVPIEGGVDDEVKGQLTEGITVEYWETLGRIQIKKIRGE

SEQ ID NO: 2744 - protein, 137 aa, Triticum aestivum
PHPWLNVLVPRSRIADFDSAVFKGILQGTDIAGPLVVYPLNKSKWDDGMSAVTPAEEVFYAVSLLFSSVANDLKRLEAQNQKILRFCDLAGIGYKEYLAHYTAHGDWVRHFGGKWQRFVEMKDKYDPKRLLSPGQDI

SEQ ID NO: 2745 - protein, 442 aa, Glycine max
  unsure (1)..(442): unsure at all Xaa locations
MKVAKGRILVGKYELGKTIGEGSFAKVKFARNVQNGNYVAIKILDRKHVLRLNMMEQLMKEISTMKLINHPNVVRILEDXVLASKTKIYIVLEFVDGGELFDKIAANGRLKEDEARNYFQQLINAGDYCHSRGVYHRDLQPENLLLDSNAILKVTDFGLSTYAQQEDELLRTACGTPNYVAPEVLNDRGYVGSTSDIWSCGVILFVLMAGYLPFDEPNHATLYQKIGRAQFTCPSWFSPEAKKLLKRILDPNPLTRIKIPELLEDEWFKKGYKPTTFVEEEDVNVDDVAAAFNDSKENLVTERKEKPVSMNAFELISRSQSFNLENLFEKQTQGIVKRETHFTSQRPANEIMSKIEEAAKPLGFNVHKRNYKMKLQGDKSGRKGHLSVATEVFEVAPSLHMVELRKTGGDTLEFHKFYKSFSSSSGLQDIVWHSEGKKNMKN

SEQ ID NO: 2746 - protein, 534 aa, Glycine max
MGLFSSTKLLPIVVLFSLLFTSYATNSAENNFVHCLVNHSEPSHPISAAIFTQNSSSFSSVLQAYIRNLRFNTSTTRKPFLIVTPFHVSHVQASIVCAKKHNLLMKIRSGGHDYEGVSYVASQPFFILDMFNLRSIEIDMESETAWVEAGAMLGEVYYRIAEKSKTHGFPAGVCPTVGVGGHISGGGYGNLMRKYGTSVDNVVDAQIVDARGRLLNRRTMGEDLFWAVRGGGGGSFGVVLAYKIKLVRVPEKVTVFQVGRTLEQNATDIVYNWQHVAPSIDNDLFIRLILEVVNGTQTATKTVRATFIALFLGDSKSLVSLMDEKFPQLGLKQFDCIETTWLRSVLFWDNIDIATPVEILLERQPQSFKYLKRKSDYVKKPISKEGWEGIWNKMIELEKAIMYFNPYGGRMAEIPSTASPFPHRAGNLWKIQYQANWNKPGKEVADHYINLPRKLPKFMTPFVSKNPREAFYNYKDLDLGINPNGKNSYAEGRVYGVEYFKDNFDRLVQIKTKVDPHNFFRNEQSIPTLSYRKG

SEQ ID NO: 2747 - protein, 302 aa, Pinus pinaster
MERFANDVDEHSLKETELRLGLPGVCESDTGPGQTRNGKRGFSEVMDSTKASSFNDNKWIFPSVKCQPATSAITETAEACKGSQPGLFSATPSQKIMMQGGCGAPQSWAGDNGLSRSTAPKDELHPKTPRDGPTEKTNGASQSQAATDPAMAPAPKAQVVGWPPIRSFRKNTLAANSKPNDEGSSSNALYVKVSMDGAPYLRKVDLKMYSTYHELSSALEKMFSCFNMGQCGAPGLSESKLIDLLNGSEYVPTYEDKDGDWMLVGDVPWEMFVDSCKRLRITKASEAIGLAPRAMEKSRSKN

SEQ ID NO: 2748 - protein, 334 aa, Triticum aestivum
  unsure (1)..(334): unsure at all Xaa locations
MGSTAADMAASADEEACMYALQLVSSSILPMTLKNAIELGLLETLVAAGGKLLTPAEVAAKLPSTANPAAADMVDRMLRLLASYNVVSCTMEEGKDGRLSRRYSAAPVCKFLTPNEDGVSMAALALMNQDKVLMESWDYLKDAGLDGGVVSTMAYGMSAFEYHGTDPRFNRVFNEGMKNHSIIITKKLLESYKGFKGLGTLVDVGGGIGATVGAITAHYPTVKGINFDLPHVISEAXILHDWSDEHCATLLKNCYDALPAHGKVVLVECILPVNPEATPEAQGGFHLDMIMLAHNPGGRERYEREFEALAKGAGFGAIKTTYIYANIWVIEFTK

SEQ ID NO: 2749 - protein, 323 aa, Fragaria x ananassa
MTATQIPEVVLESSNGRRTMPVLGFGTASNNLQPEVLIEAVLEAIKLGYRHFDTASIYGSEQTLGVAIAQALKLGLVASRDELFITSKLWPNDGHPNLVIPALKKSLQNLELEYLDLYLIHWPISAKPGKLSHALEEKDQMPMDFKGVWADMEEAQRLGLTKSIGISNFSTKKTQNLLSFATIPPSVNQVEMSPFWQQKKLRDFCKASGIVVTAFSPLGAIGTSWGTNHVLESKVLNEIAEAHGKTVAQVCIRWVYQVGATLAVKSYNKERLKQNVQVFDWELTEEDLEKINQIPQRKMMPREELVTATGPYKSLDDLWDGEY

SEQ ID NO: 2750 - protein, 329 aa, Acinetobacter sp. ADP1
MTQSALDQLKKLTTVVADSSDIEAIRKFLPLDATTNPSLITAAASIPENKALIEDAFNQAHQEGYENDLLIERTIDILTVKFGVEILKLIQGRVSTEVDASLSYNTEATIEKARELSKLYKEYGIDQSRILIKIASTWQGIQAAKVLEAEGIPCNLTLLFGLHQAQACADAKVTLISPFVGRILDWYKKAENVDHYPIEKDPGVVSVKKIFTYYKQQGTPTQVMGASFRSIDQVLGLAGSDLLTISPALLSELEQDHRTVEATLTIEEAKQAEIIHRAAQTEQSFKDELEHDLMAFQLLQSGIDGFIKAREQLSTLLRQSYGIDAEIQP

SEQ ID NO: 2751 - protein, 496 aa, GIBBERELLA ZEAE PH-1
MVLSQKQGRRETLTVVDNRTNQSYEIPITHNSIPATEFKKIKAEAGNDRPEDETNQGLRVYDPAYMNTAVVQSKITYINGLDGVLRYRGYPIEQLVEKSDFLESAYLLIYGELPTKSEYDLWHGEVMHHTYIHSDIENMFKSFRYDSHPMSMLTAAFATLGAFAPEANPSLAGQKLYTNAASGNLEALQMLDKQILRILGKAPTLAAASYRMRQGRPFNRPAQDLGYTGNFLYLLDHLSETDYKPHPVLARALDKLFIIHADHEVNCSTATVMQVGSSLVDPYSVVAAGCAALYGPSHGGASESAIRMLIEIGSPENVPAFMQAVEKRERVLVGFGHRVYKNVDPRSTAIRKLAEEVFEVTGRNKLLDTALTLADYARKSEFMRSRNLYPNVDFYSGLIYQAMGFPLDFYPVLFAVPRCVGWLAHWRQMMLNSAGVKIWRPRQLYIGEGEREYVEAKDRKAKADATVFDAPVKVGHGGNSQRTLLATSSKELKTIQ

SEQ ID NO: 2752 - protein, 105 aa, Zea mays
RGDNRCVNESIAMASRLVAAAASSSSLSSASPLARLISRRGLAGAADGHGSAKVPLWKDPLSPSKWKEEHFVLASLSMWGVIFYGGYKLFSGKKEAKTEAASPQA

SEQ ID NO: 2753 - protein, 287 aa, Vitis vinifera
MSPTCLLVLLLGMVVLTSTPSLAHYPKPPPFQKPPPEHKPPGEKPSPEHKPPTKPPKGEKPLPEHKPLTPIGKPPKGEKPPPEHKPPTPIDKPPKGKKPLPEHKPPTPIGKPPKGEKPPPEHKPPTPIGKPSKGEKPLPEHKPPTPIGKLPKGEKPPPEHKPPTPISKPPKGEKPLPEHKPPTPIGKPPKGEKPLPEHKPPTPIGKPPKGEKPLPEHKPPTPIGKPPKGEKPPSPFGKPPTGEKPPHYGHTPGHPPAHSYKPPQKIKPPPTPPHKPPHKPPSPTYPN

SEQ ID NO: 2754 - protein, 274 aa, Enterococcus faecalis V583
MTLDKTKKLANGNEMPRLGLGVWRVEDGSEATNSVKWALEVGYRLIDTAAVYKNEVGVGEGIRQSGIPREEIFVTTKLWNEDQGYENAIKAFDKSLEKLGLDYVDLYLIHWPVAGKYKESWKALEEIYASGRAKAIGVSNFHQHHLEDLLTEANVVPMVDQIELHPTLTQEPLRKYLAENKIAVEAWSPLGQGNLLSEPVLVKIGEKYGKSAAQVIIRWHLQNDIIVIPKSVHEKRIQENFAVFDFELTPEEITAINQLNKDHRFGADPDNFDF

SEQ ID NO: 2755 - protein, 250 aa, Zea mays
MAKNYPTVSAEYSEAVEKARRKLRALIAEKSCAPLMLRLAWHSAGTFDVSSRTGGPFGTMKHQSELAHGANAGLDIAVRLLEPIKEEFPILSYADFYQLAGVVAVEVTGGPEIPFHPGREDKPQPPPEGRLPDATKGSDHLRQVFGKQMGLSDQDIVALSGGHTLGRCHKERSGFEGAWTTNPLVFDNSYFKELLSGDKEGLLQLPSDKALLSDPVFRPLVEKYAVDEKAFFDDYKEAHLKLSELGFADA

SEQ ID NO: 2756 - protein, 180 aa, Helianthus annuus
MATQTVFDFPDDVLQQPPMPADNAFSDKDVKGQDVELSKYKGKVLLIVNVASQCGFTNSNYPELTTLYQKYKDQGFEILAFPCNQFGGQEPGSNEEIQVFACTRFKAEYPVFSKVNVNGKEADPLYKFLKSSKGGFLGDSIKWNFTKFLVDREGKVVDRYAPTTSPLSIEKDIKKLLNVA

SEQ ID NO: 2757 - protein, 410 aa, Glycine max
  unsure (1)..(410): unsure at all Xaa locations
EELLPIVYTPVVGEACQKYGSIFKRPQGLFIXLKEKGKVLEVLKNWPERSIQVIVVTDGERILGLGDLGCHGMGIPVGKLXLYTALXGGVRPSACLPITIDVGTXNEKLLNDEFYIGLRQKRATGQEYSELLHEFMTAVKQNYGEKVLVQFEDFANHNAFELLAKYGTTHLVFNDDIQGTASVVLAGVVAALKLIGGTLPEHTFLFLGAGEAGTGIAELIALEMSKQVIKPTVLIGSSGVGRTFTKEVVEAMTSNNDKPLILALSNPTSQSECTAEEAYQWSEGRAIFASGSPFDPVEYKGKVYASGQANNAYIFPGFGLGLVISGAIRVHDDMLLAASESLAKQVSEENYKNGLIYPPFSNIRRISANIAANVAAKAYELGLATRLPRPQNLVKCAESCMYTPVYRNYR

SEQ ID NO: 2758 - protein, 500 aa, Oryza sativa (japonica cultivar-group)
MDRARLAVLSAHLASPAAACGEADAAGPLERSAASAGARGGALAVVDGRTGKRYEVKVSDEGTVRATDFKKITTGKDDKGLKIYDPGYLNTAPVRSSICYIDGDEGILRYRGYPIEELAESSSFVEVAYLLMYGSLPTQSQLAGWEFAISQHSAVPQGLLDIIQAMPHDAHPMGALASAMSTLSVFHPDANPALRGQDLYKSKQVRDKQIVRVLGKAPTIAAAAYLRLAGRPPILPTNSLSYSENFLYMLDSLGDKEYKPNPRLARVLDILFILHAEHEMNCSTAAARHLASSGVDVFTALSGAVGALYGPLHGGANEAVLKMLNEIGSVENIPDFIEGVKNRKRKMSGFGHRVYKNYDPRAKVIRKLAEEVFSIVGRDPLIEVAVALEKAALSDDYFVKRKLYPNVDFYSGLIYRAMGFPTEFFPVLFAIPRMAGWLAHWKESLDDPDTKIMRPQQVYTGVWLRHYTPVRERVPASQGEQLGQIATSNATRRRRAGSAL

SEQ ID NO: 2759 - protein, 482 aa, Glycine max
MLPQKQGEETMMSNLNETTIERGEEREEENVGGGSHSSLKSILWHGGSAYDAWFSCASNQVAQVLLTLPYSFSQLGMLSGIIFQVFYGIMGSWTAYLISILYIEYRTRKEKESVSFKNHVIQWFEVLEGLLGPYWKAIGLAFNCTFLLFGSVIQLIACASNIYLINDHLDKRTWTYIFGACCATTVFVPSFHNYRIWSFLGLGMTTYTAWYMTIAAIAHGQVENVTHTGPKKLVLYFTGATNILYTFGGHAVTVEIMHAMWKPQKFKYIYLYATLYVFTLTLPSAVAVYWAFGDKLLDHSNAFSLLPRSGWRDAGVILMLIHQFITFGFACTPLYFVWEKVIGMHDTKSICLRALARLPVVIPIWFLAIIFPFFGPINSAVGALLVSFTVYVIPACAHMLTYKSASARQNAAEKLPFFIPNWTAMYVVNAFVVVWVLVVGFGFGGWASMTNFIKQVDTFGLFAKCYQCPPKVPASNNTMLHH

SEQ ID NO: 2760 - protein, 608 aa, Glycine max
  unsure (1)..(608): unsure at all Xaa locations
ILNYSIWVANRTIVWFRRDLRIEDNPALGVVNFKFLYTRSNISSPNEEGKFYPGRVSRWWLKQSLAHLDQSLKSLGSRLVLIKTHSTVRALVDFVQAIQATKVVFNHLYDPVSLVRDHNIKEKLVEQGISVQSYNGDLLYEPWEVNSESGRAFTTFNAFWKKCLHMQMDIVSVVPPWQLIPAEGKIEECSLEELGLENESEKPSNALLGRAWSPGWRNADKALREFVELHLLHYSXWTTEGNCAGEQSCKXYLHFVGLSEYSRYLCFNFRFTHEKALLGHLRFFPWIYSLXNPDPDIFKTWRQGRTGFPLVDAGMRELWATGWIHNRIRVIVSSFAVKMLLLPWKWGMKYFWDTLLDADLESDILGWQYISGGLPDGHELERLDNPEIQGAKFDPEGEYVRQWLPELARMPTEWIHHPWDAPLTVLRAAGVELGQNYPKPIIDIDLARERLTEAIFKMWESEAAAKAAGSEPRDEVVVDNSHTLENLDTQKVVVLGKAPCATISANDQKVPALQDSKNEPPTRKRPKHMIEEGQNQDHSQNHNKDTGLSSIDQDICSTADSSSCKKQCASTSSYSFSVPQQCSSSSNLKWPWQEKIDMEQSSSKDGAM

SEQ ID NO: 2761 - protein, 400 aa, Arxula adeninivorans
  unsure (1)..(400): unsure at all Xaa locations
MADFIRTQIFGTCFEITSRYVDLNPVGMGAFGLVCSARDQLTNQNVAIKKIMKPFSTPVLAKRTYRELKLLKHLRHENLITLSDIFISPLEDIYFVTELLGTDLHRLLTSRPLEHQFIQYFLYQILRGLKYVHSAGVVHRDLKPSNILINENCDLKICDFGLARIQDPQMTGYVSTRYYRAPEIMLTWQKYDVEVDIWSAGCIFAEMLRGKPLFPGKDHVHQFSIITELLGNPPDDVIETIGSENTLNFVKSLPKRERIPLSQKFPNADPDAVDLLEKMLVFDPRKRINAADALAHPYLAPYHEPSDEPVASEKFDWSFNDADLPVDTWKVMMYSEILDFHNVDSSAVEQQQQQPQPPQPQLQQQQQPPQQPQQPQQPQXAQQPVQPVQGDYVPQVAPRS

SEQ ID NO: 2762 - protein, 506 aa, Shewanella oneidensis MR-1
MIYAQPGTAGALVNFKEKYANFIGGKWVAPVNGKYFDNRSPVNGQNFCKIPRSDAQDIELALDAAHAAKDAWGKTSVTERSNILLRIADRVEQNLEYLAVAETWENGKAVRETLNADLPLFVDHFRYFAGCIRAQEGSAADIDGNTVSYHFPEPLGVVGQIIPWNFPLLMAAWKIAPALAAGNCVVLKPAEQTPVSILVLLELIEDLLPPGVLNVVNGFGAEAGQALATSKRIAKLAFTGSTEVGFHILKCAAESLIPSTVELGGKSPNLYFADVMDQEDEYLDKAVEGMLLAFFNQGEVCTCPSRVLIQESIYDRFIEKVLARAQTIKQGNPLDTATQVGAQASQEQFDKILSYLAIGKDEGAQVLLGGSLCQLEGEQSKGYYISPTIMKGHNKMRIFQEEIFGPVISVTTFKDEAEALAIANDTEYGLGAGVWTRDMNRAQRMGRGIQAGRVWINCYHAYPAHAAFGGYKKSGIGRETHKMMLNHYQNTKNLLVSYDINPLGFF

SEQ ID NO: 2763 - protein, 458 aa, Thermus sp.
  unsure (1)..(458): unsure at all Xaa locations
PLLIKNGEIITADSRYKADIYAEGETITRIGQNLEAPPGTEVIDATGKYVFPGFIDPHVHIYLPFMATFAKDTHETGSKAALMGGTTTYIEMCCPSRNDDALEGYQLWKSKAEGNSYCDYTFHMAVSKFDEKTEGQLREIVADGISSFXIFLSYKNFFGVDDGEMYQTLRLAKELGVIVTAHCENAELVGRLQQKLLSEGKTGPEWHEPSRPEAVEAEGTARFATFLETTGATGYVVHLSCKPALDAAMAAKARGVPIYIESVIPHFLLDKTYAERGGVEAMKYIMSPPLRDKRNQKVLWDALAQGFIDTVGTDHCPFDTEQKLLGKEAFTAIPNGIPAIEDRVNLLYTYGVSRGRLDIHRFVDAASTKAAKLFGLFPRKGTIAVGSDADLVVYDPQYRGTISVKTQHVNNDYNGFEGFEIDGRPSVVTVRGKVAVRDGQFVGEKGWGKLLRREPMYF

SEQ ID NO: 2764 - protein, 353 aa, Candida sp. HA167
MSTPENLSFVLQKPFDVKFEDRPIPKLSDPYSVKIQVKKTGICGSDVHYFTHGAIGDFVVKAPMVLGHESSGVVLEVGSEVKSLKVGDRVAMEPGVPSRHSDEYKSGRYNLCPHMAFAATPPYDGTLCKYYILPEDFCVKLPEHVSLEEGALVEPLSVAVHSSKLGNIKPGSHVAIYGAGPVGLLVAAVASAFGAESVTIIDLVESRLNLAKELGATATVQVDFKDTPKESAAKVVAANNGIAPDVVIDASGAEASINSAINAIRPGGTYVQVGMGKPDVSFPIATLIGKELTVKGSFRYGYGDYPLAVSLLASGKVNVKKLITHEVKFEDAAEAFQLVRDGKAIKCIINGPE

SEQ ID NO: 2765 - protein, 451 aa, Alnus glutinosa
MTSLQYFSLNRPVFPATHLHRPGIRHLQVSACANVEVQAPSSVKKQGVSKEVMEAAGRVLVGTYARVPVVLSRGKGCKLYDPEGREYLDLSAGIAVNVLGHADSDWLRAVTEQAATLTHVSNVFYSIPQVELAKRLVASSFADRVFFSNSGTEANEAAIKFARKFQRFTRPDEKQPATEFVSFSNSFHGRTMGSLALTSKENYRSPFEPVMPGVTFLEYGNIEAATQLIQRRKIAAVFVEPIQGEGGVYSATKEFLYALRKACDDSGTLLVFDEVQCGLGRTGYLWAHEIYDVFPDIMTLAKPLAGGLPIGAVLVTERVASAITYGDHGTTFAGGPLVCKAALTVLDKILRPGFLASVSKKGHYFKEMLINKLGGNSHVREVRGVGLIVGIELDVSASPLVNACLNSGLLVLTAGKGNVVRIVPPLIITEQELEKAAEILLQCLPALDRHG

SEQ ID NO: 2766 - protein, 262 aa, Brassica napus
  unsure (1)..(262): unsure at all Xaa locations
RPTRPELTRTIVGVVEACHSLGVMHRDLKPENFLFVSKHEDSLLKTIDFGLSMFFKPDDVFTDVVGSPYYVAPEVLRKQHGPEADVWSAGVIVYILLSGVPPFWAXVLHGDLDFSSDPWPSISESAKDLVRKMLVRDPKKRLTAHQVLCHPWVQVDGVAPDKPLDSAVLSRMKQFSAMNKFKKMALRVIAESLSEEEIAGLKEMFNMIDADQSGQITFEELKAGLKRVGANLKESEILDLMQAADVDNSGTIDYQEFIARTL

SEQ ID NO: 2767 - protein, 459 aa, Magnetospirillum magnetotacticum MS-1
MPTRASNRTITEKDVDSVLHPYTNLKRHPEVGPLVITRGKGVRVYDEAGKDYIEGLAGLWCTSLGWGEERLVEAAARQMRTLPFYHLFSHKTHDVGVELCARLLEMAPVPMSKVFLAGSGSEANDTAIKLIHYRSNALGLPHKKKIIAREKAYHGVTVATASLTGLVNNQRSFDLPIPGVLRAGCPHHYRFARQGESEEDFSSRLAAELEALILAEGPDTVAAFFAEPVMGAGGVIVPPAGYFPKIQAVLDRYDILLVVDEVICGFGRTGKMFGTETFGIRPDMMTLAKGLSSGYAPISALMVNERVYGPVAEESGRIGVFGHGYTYGGHPVSAAVALETLNIYAERDILAHIAKVGPVLQEGLGSFRDHPLVGEARGIGLIGALELVADKTSRAPFPPERTMGAKVVARAQDKGVILRAMGDAIAFAPPLIITEAEIGDMLRRFKAALDEAHGALGLG

SEQ ID NO: 2768 - protein, 137 aa, Hordeum vulgare
PHPWLNVLVPRSGIADFDRAVFRGILQGTDIAGPLVVYPLNKSKWDDGMSAVTPAEEVFYAVSMLFSSVANDLRRLEAQNQKILRFCDLAGIGYKEYLAHYTAHGDWVRHFGGKWKHFVEMKDKYDPKKLLSPGQDI

SEQ ID NO: 2769 - protein, 305 aa, Zea mays
  unsure (1)..(305): unsure at all Xaa locations
MAGLSLEHPWAFAFGLLGNVISFMTFLAPIPTFYRIYKSKSTEGFQSVPYVVALFSAMLWIFYALIKSNETFLITINAAGCVIETIYIVMYFVYAPKKAKLFTAKIMAPPQWRRLWGHPSCSPFSLFKGSKRVVLLGWICVGFXSVSVFVAPLSIMRRVIQTKSVEYMPFSLSLSLXXXXXXVWXLYGLLIKDKYVALPNIWGFTFGVVQMVLYVLYMNKTPVAATAEGKDAGKLSSAADEHVLVNIAKLSPALPERSSGVHPVTQMAGVPVRSCAAEATAPAMLPNRDVVDVFVSRHSPAVHVA

SEQ ID NO: 2770 - protein, 495 aa, Rhizobium etli
MAISSTLLGRLKDQTLVREQMLVGGKWSSEGVNGTRINVLNPSTMDVLASLPSAGLAEVRASIDAAKAAQKKWAKVSAKERSLIMRKFYEEVVANAEDLAVILTSEMGKPLAEARGEIAYGASYIEWFGEEAKRVYGDTIPGHQADKRLLVIKQPVGVVAAIAPWNFPSAMVCRKIAPALASGCAIVFKPAAETPLSALALAILAERAGIPDGLFSVLPTDNARMFGEEVCSNPVVKKLTFTGSTEVGRILMAQGAQKIMKLSLELGGNAPFIVFDDADLDQAVEGAMLSKFRNAGQTCVCANRIYVQSGIHDRFVEKLAMRVSALQVLDGFESGATIGPLINDEAVAKLYGHIDDAVTKGATVVVGGDRDARGGTFVQPTLLSGATKDMKVAREETFAPLAPVFKFDTVEEVIELANDTEFGLAAYFFANDLRNVWKVTEALEYGMVGVNTGLISTELAPFGGVKQSGFGREGSKYGMDDFLSMKYVCMGGIGA

SEQ ID NO: 2771 - protein, 213 aa, Glycine max
MGCFHSKSARQFPAQENTVNLAAETAFTVSEVEALFELFRSISSSVVDDGLISKEEFQLAIFKNKKKDNLFANRIFDLFDVKKKGVIDFEDFVRSLNVFHPNASLEDKIAFSFRLYDLHNTGFIERPEVKQMLIALLFESDMKLADDVIETILDKTFVEADLNQDGKIDTEEWETFVKKNPSLLKIMTLPYLRDITTSFPSFIFNSNVDEITA

SEQ ID NO: 2772 - protein, 498 aa, Schizosaccharomyces pombe
MSTSSKLSTNIKDLSLFDLEEFPARSYIGGKWVTAASGKTFDVENPGLNETLAPVTDMSVEETRKAIKVAHEAFLSYRNSDIKERYAILRRWYDLIMENADDLATMMTLENGKALGDAKGEVVYAAKFIDWFAGEALRISGDSSMSSNPQNRIITIKQPVGVVGIITPWNFPAAMITRKVGAALAAGCTVVIRPAAETPFTALALAKLAERAGVPAGVLNMVTANSPSEHGIELTTNPLIRKVSFTGSTNVGKILAKQSSSTLKKLSLELGGNAPFIVFEDADLEKAADALMACKFRGSGQTCVCANRIYVHSSVYDAFVDLVTERVSKFKLGYGLDAGVTHGPLISEKAISKVKQHVEDAVQKGGVVVTGGKVASNLGPMYFEPTVIINAKQGMLISEEETFGPVGALFKFDTEDEVVAWANDSPVGLAGYLFSKDISRVFRVGEALQVGMVGCNTGLVSDVLSPFGGVKESGFGREGSKYGISEYLDIKSLTISTL

SEQ ID NO: 2773 - protein, 117 aa, Zea mays
MTASQSSMSGGGEPGMRTVVWFRRDLRVEDNPALSAAARTGGEVVPAYVWSPEEDGPYYPGRVSRWWLSQSLKHLDASLRRLGAGRLVTRRSSDAVVALVDLVRSTGATHLFFNRLY

SEQ ID NO: 2774 - protein, 357 aa, GIBBERELLA ZEAE PH-1
MNYPHPYSKAAELDKRIQIPRPCYDSALAPMLDYASLPEEFSLDLMRGVAAGVEECPHGSHTFNAETVLKDQPHLTHAEHVVAGPDNNDVILSVFTPKEPAKVPRPALYHIHGGGMVSGDRFSALTQVIDLLSGIDCVVVSVEHRLAPETRAPGPAEDCYAGLVWVSKNAENLGIDPAAIVVFGVSGGGALAAATCLMARDRKSPAVPIKAQMLYSPLLDDRCESVADKQFEYGNPAPTTWLRAIWDHILGDERGSENVTPYQAPSRETNLSNLPPAYIDAGECEVFRDVAVAYASTMWRCGSTCELHIWPGAFHGFDMMDDPQIPLINIANKAKANWFKRVLTTDTKPLPAPISHA

SEQ ID NO: 2775 - protein, 375 aa, GIBBERELLA ZEAE PH-1
MSPSAVEGNGVVDVKTTLKPNVGVYTNPNHDLWVAPAEPSAEAVKSGSDLKQGEVSVAIRSTGICGSDVHFWHAGCIGPMIVEGDHILGHESAGEVIAVHPSVSHLKVGDRVAIEPNIPCGTCEPCLTGRYNGCETVQFLSTPPVPGMLRRYINHPAVWCHKIGNMSYENGALLEPLSVALAGMQRAEVRLGDPVLICGAGPIGLITLQCCAAAGASPIVITDISESRLAFAKELCPRVITHKVERLSAEDSAKAIVKSFGGVEPTVAMECTGVESSIAAAVWSVKFGGKVFIIGVGKNEINIPFMRASVREVDIQLQYRYCNTWPRAIRLVENNVVDLSKLVTHKFKLEDAIKAFETSADPKTGAIKVMIQSLE

SEQ ID NO: 2776 - protein, 288 aa, Magnaporthe grisea 70-15
MASSLTLQSTFKLPSGHEMPLLGFGLWQTPPDEAERCCNDALRLGYRHIDSAASYRNEGGCGKAIRTSSIPRSDIFFTSKVRIITYDGAKEQVAKTLAETGLDYIDLMLLHCPYGGSENRKGAWKALVEAVEAGKVRSIGVSNYGVHHLDELEKHMAELEAERPGAGGVLSVGQYEIHPWCARDDVVGWLQKRGVAVEAYSPLVRGERWGEPVLKKLADKYGKTEAQVLIRWSLDQGFVPLPKSVNEDRIKANTDVYDFQLTAEEVKELKTDEYKPVCWDPVTSGLDN

SEQ ID NO: 2777 - protein, 507 aa, Glycine max
  unsure (1)..(507): unsure at all Xaa locations
MVLSKTASESDVSVHSTFASRYVRTSLPRFKMAEESIPKEAAYQIINDELMLDGNPRLNLASFVTTWMEPECDKLIMAAINKNYVDMDEYPVTTELQNRCVNMIAHLFNAPLEETEAAVGVGTVGSSEAIMLAGLAFKRKWQNRRKQEGKPYDKPNIVTGANVQVCWEKFARYFEVELKXEVKLRDDYYVMDPEKAVELVDENTICVAAILGXSTLNGEFEDVKRLNDLLIEKNKITGWXTPIHVDAASGGFIAPFIYPELEWDFRLQLVKSINVSGHKYGLVYAGIGWVIWRSKQDLPEELIFHINYLGADQPTFTLNFSKGSSQVIAQYYQLIRLGFEGYRNVMENCRDNMXLVLKEGLEKTGRFSIVSKDNGVPLVAFTLKDHTHFDEFQISDFLRRFGWIVPAYTMPPDAQHVTVLRVVIREDFSRTXLAERLVSDVEKVLHELDSLPARVISSTTVTLSAEENGKVVVAKKNPMETQREITAIWKKFVLERKKNNDKMNGVC

SEQ ID NO: 2778 - protein, 213 aa, Zea mays
MGCFHSTAKRQHPGYEDPVHLASQTAFSVSEVEALFELFKSISGSVIDDGLINKEEFQLALFKNQRKENLFANRIFDLFDVKKRGVIDFGDFVRALNVFHPNIPMEEKVDFSFKLYDMDGTGFIERKEVKQMLIALLGESEMRLSDEIIETILDKTFSDADANQDGKIDRTEWENFVTRNPSLMKIMTLPYLKDITTTFPSFVFNSEVDDLVT

SEQ ID NO: 2779 - protein, 451 aa, Oryza sativa (japonica cultivar-group)
MPPAGDDESPAATGDGYSKKVLQGRYELGRVLGQGASSKVYRARDARTGAHVAVKAIRKQQQPHHHPSCRSPEAAAAARRCVEVEREVAALRRVRGHPHVVALLDVLATRSTVYLVLELASGGSVLSALDSRGGGHYDEPAARRLFAQLASAVAHAHSLGVFHRDIKPENLLLDERGDLRLTDFGLSAFADADQHLGATDGLAATHCGSPAYVAPEILLKRRYDASKADVWSCGVVLFVLTAGYLPFNDGNLMAMYRKICAAKFRCPKWCSQELRSLIGRMLDPEPDTRIKIGEIFDHPWLQQDGSSSSFGMIQAASSHSKPEVEKWEAELEQAMELNAFDIIGFASGCDLSGLIGPLPDRVRFVLPGGDSKSVLDKVEKLGREEGLVVRRKEEEWCGGVHVEATSGKFTAYVRVNLLPKKILMIEAERVIGSEIPKFWHQLQIGNLLVRK

SEQ ID NO: 2780 - protein, 488 aa, Listeria monocytogenes EGD-e
MSIKETALPKVQTKLFINGKWTDGDNKETKDIVNPANGDVIAKIAQAGPSETKKAIKAAKDAFPDWAKMELADRVKLLHKIADLMEEKADTLAKIMTLEQGKPLKESKGEVLTGVENFRFAAEEARRLYGETIPAPNNHAFIVKKQPIGVVAAITPWNFPGGMVTRKLAPALATGNTIVLKPSGDTPLSALAIFEIFEEAGLPKGVANIVMGSSKEIGETLTDSDDVRKLTFTGSTKVGQTLFKQSADTLKKISLELGGHAPFIVFDDANLDAAVNDLVAAKFRNNGQVCVSPNRIFVAKEIKEKFTKALVAKVEQLKVGNGLDDVNVGPLIREDAIDKIDKQLKNATEKGAKVLTGGGRLTGSDYDKGNFYKPTVLDNVTRKMDIFYEETFGPVIPLITFETEDEAIEMANDSEFGLASYFYTKDLARVEKVGAALEYGMVGANEIAISNPETPFGGVKHSGFGRENGHYGMEEYIQVKFINLKYRD

SEQ ID NO: 2781 - protein, 57 aa, Triticum aestivum
  unsure (1)..(57): unsure at all Xaa locations
MPFTASDICKILLAIILPPLGVFLERGCNADFLIDILLTVLGHIPGIXHALYIIFQF

SEQ ID NO: 2782 - protein, 52 aa, Glycine max
  unsure (1)..(52): unsure at all Xaa locations
MDYAAKHVTEKMMLNAGDIYPHNTSDANEAYYYXMVFEKVFRXNSAKLTVPG

SEQ ID NO: 2783 - protein, 215 aa, Triticum aestivum
  unsure (1)..(215): unsure at all Xaa locations
MAPAVMASSATTVAPFQGLKSTAGLPVSRRSCSAGLSSVSNGGRIRCMQVWPIEGIKKFETLSYLPPLSTEALLKQVXDYLIRSKWVPCLEFSKVGFVFREHNSSPGYYDGRYWTMWKLPMFGCTDATQVLNEVEEVKKEYPDAYVRVIGFDNMRQVQCVSFIAFRPPXCEESGQGLKVQVEVIDIHVMLVKFVGGSAFSVLLLLLICEYMSICM

SEQ ID NO: 2784 - protein, 160 aa, Zea mays
MDARMFGLENPLVAALHHLLDVPDGDAGAGGDKAGGGATRTYVRDARAMAATPADVKELAGAYAFVVDMPGLSTGDIRVQVEDERVLVISGERRREEREDAKYLRMERRMGKFMRKFVLPDNADVDKVAAVCRDGVLTVTVEKLPPPEPKKPKTIEIKVA

SEQ ID NO: 2785 - protein, 140 aa, Glycine max
  unsure (1)..(140): unsure at all Xaa locations
QQRDVAHTVGPAHHECICTVSXGIGAIEHVLYHSVTYEVTTIXASSPRFLMSRKTXSLGVXWVIFAEGLDQIFGGYMYLYEAPHKALFHQMTIGMVXALAKHDCLRDNRSTSAWGLEARVPMLVKQCVRVAMIFGPEYNM

SEQ ID NO: 2786 - protein, 280 aa, Triticum aestivum
MKTFLIFVLLAMAMKIATAARELNPSNKELQSPQQSFSYQQQPFPQQPYPQQPYPSQQPYPSQQPFPTPQQQFPEQSQQPFTQPQQPTPIQPQQPFPQQPQQPQQPFPQPQQPFPWQPQQPFPQTQQSFPLQPQQPFPQQPQQPFPQPQLPFPQQSEQIIPQQLQQPFPLQPQQPFPQQPQQPFPQPQQPIPVQPQQSFPQQSQQSQQPFAQPQQLFPELQQPIPQQPQQPFPLQPQQPFPQQPQQPFPQQPQQSFPQQPQQPYPQQQPYGSSLTSIGGQ

SEQ ID NO: 2787 - protein, 384 aa, Rhodococcus sp. DK17
MSNATQTDPASRTTGTATAMVLEGFGRAMAPRTFPRVDPDAGAVVVDVTHAGICGTDIHLQQGRLAIPVPVILGHEAVGRVHALGEGVTTDARGEELRVGDAVSWASNIPCGHCYYCEDQQEPSLCETRKVYGINQSSADWPHLSGGWSEQIYLQPGSTIVRIPSSVTPQQVIALGCAGPTAVHAVNRIAKPDAGNVVVVQGSGPVGLACAMYATLAGAAKVIIVGGPANRLEVARTAGIGDIHIDIFAETDRAARLDRILAETTGGRGADVVIEAAGVPTAVSEGIDIARRGGKYLVVGQYTDHGTTPINPHYITKKQLQVLGSWAFSPHNHLEYVESLPRLAARFDLASMVTEYPLGKAEEAMGDMRDGRSLKSVLVTGGQS

SEQ ID NO: 2788 - protein, 256 aa, Triticum aestivum
MLLPTRRLPAAPSRPSVHPYISPARPSLRFRRQHGRAATARATSATPPVFGDTLLGLYEKERLGLSRYADEESREDVFWETLDADLQYWTRSLRPVQWYPGHIAKTEKELKGQLKLMDVVIEVRDARIPLATTHPKMDSWLGNRRRIIVMNREDMVSADDRNAWATYFSSQGIKVIYSNGQLGMGTMKLGRMAKSAASTVNTRRREKGLLPRPVTQLICFASCLFFLYTCKLFVLKLFHKKRYTVQLGYDVIEVMF

SEQ ID NO: 2789 - protein, 147 aa, Triticum aestivum
AEINFGGETAIAKTAGLVDPDAGLVDYVETLVRKPETEFNVVVLQLNGIDQPKEAVHVLNVGRLRMRLSKGKTVVAKEFYSSSMQLCGVRGGGEAASQAMFWRPRSDLSFAVAFETARERNTAIMLARRFAIDCNIILAGPGDKTPW

SEQ ID NO: 2790 - protein, 201 aa, Nicotiana tabacum
PNYTGPTTGCPREPWHDLHSRIEGPAAYDVLTNFEERWLKASKRHGLQKMKASQDDALLQLDRIPDILKIADVPCLGEDDADTWHVQIFRSIDSNSVKGFPKDPKEATNKNLVCGKNVLIDMSIHTAYVKAIRAAQHFIYIENQYFLGSSYNWNNYQDLGANNLIPMEIALKIANKIRANERFSVYIIVPMWPEGVPTSTA

SEQ ID NO: 2791 - protein, 133 aa, Zea mays
PASSPTRLDDVQLAFCLLSEVRLGNSDGYQHGQCWRDVYDAICQARRLIYIIGWSMFHTIHLVRDGHDDMALGDLLRRKSQEGVQVLLLVWDDPTSRRLLGIKMEGYMGTRDEETRRFFKHSSVQILLCPLSA

SEQ ID NO: 2792 - protein, 560 aa, Triticum aestivum
MAAAAVASNGGAAPVPGRLASVYSEVQTSRIAHALPLPSVLRSHFTLADGPASTAAGSPDEIAKLFPCLYGQPSAAVVPSAEPVETKPLKIGVVLSGGQAPGGHNVICGIFDYLQERAKGSTMYGFKGGPAGVMKGKYVELTTDFVYPYRNQGGFDMICSGRDKIETPEQFQQAEDTVNRLDLDGLVVIGGDDSNTNACLLGEYFRGRNLKTRVIGCPKTIDGDLKCKEVPTSFGFDTACKIYSEMIGNVMTDARSTGKYYHFVRLMGRAASHITLECALQTHPNVALIGEEVAEKKETLKNVTDYITDVVCKRAELGYNYGVVLIPEGLIDFIPEIQKLIAELNEILAHDVVDEAGAWKSKLEPASRELFDFLPKTIQEQLLLERDPHGNVQVAKIETEKMLIAMVETELEKRRAAGKYSAHFRGQSHFFGYEGRCGLPTNFDSSYCYALGYGAGALLQFGKTGLISSVGNLAAPVEEWTVGGTALTALMDVERRHGKNKPVIKKAMVELDAAPFKKFASLRDEWASKNRYISPGPIQFSGPGSDASNHTLMLELGAEI

SEQ ID NO: 2793 - protein, 211 aa, Zea mays
  unsure (1)..(211): unsure at all Xaa locations
MASDRVLGTVKWFNGTKGFGFITPDDGSEDLFVHQSSIKSDGYRSLNDGDAVEYTVGSGNDGRAKALDVTAPGGGPLAGGERPDGGNGGGRGGYGGGDRGYGGGGDRGYGGGGDRGYGGGDRGYGXGGGDRGYGGGGDRGYGGGGGYGGGYGGGGGGGGRGCFKCGEEGHMARDCSQGGGYGGGGGGGRGSECYNCGQEGHISRDCPNKRR

SEQ ID NO: 2794 - protein, 446 aa, Methanosarcina mazei Go1
MKAVVYRGPNQVSVEEVEDPKIEHPADAIIRLTSSGICGSDLHMYEGRTVEKPGKVLGHEPLGVIEEVGDAVTSFKKGDRVVVTFNIACGHCLNCIRGFTSACLTVNPESAGGAFGYAKMGPYRGAQAEFLRVPFADLNCTKLPGSPGDKWEDDFIMLSDVFPTGFFATQLAMVMPGFPVAVFGAGPVGLLSAYSAILQGAAQVFVVDYIPERLKLAKSIGAIPVDFTLSDPVAMIEALRSQHSRVDTVLPGEEKLQGIMSSIENLAKSIGANLELARSDPVTMIQMLRAGNPAIVQSLIPGEEKMKGVMSGIDAVGYQARDRQDPSRENPTQVISDLVRLINPTGHLGVIGVYVADDPGAYNERAKKGEYILPFGQLWEKGISVGTGQTPVKKLQPMLRDMIIAGVAKPSFIVSHKISIEEAPDAYREFAKRSEGFTKVTIQFEK

SEQ ID NO: 2795 - protein, 334 aa, Streptomyces globisporus
MLGDEDGKAAELWSMANLGTPMAVRVAATLRIADHITAGAHTAGEIAEAAAVHEESLDRLLRYLTVRGLLDRDGLGRYTLTPLGRPLCEDHPAGVRAWFDMEGAGRGELSFVDLLHSVRTGKAAFPLRYGRPFWEDLAEDPRRAESFNRLLGQDVATRAPAVVAGFDWASTGHVIDLGGGDGSLLTALLTACPSLRGTVLDLPEAVQRAKESFAVSGLDDRANAVAGSFFDALPAGAGAYVLSLVLHDWDDEASVAILRRCAEAAGQTGSVFVIESTGSAGDAPHTGMDLRMLCIYGAKERRVEEFEELAGRAGLRVVAVHPAGPSAIIQMSAV

SEQ ID NO: 2796 - protein, 55 aa, Brassica napus
  unsure (1)..(55): unsure at all Xaa locations
MSTATFVEIXLAILLPPLGVFLKFGLKVEFWICLILTLFGYXPGILYALYIITKD

SEQ ID NO: 2797 - protein, 253 aa, Brassica napus
METEREKQVYSAKLSEQTERYDEMVEAMKKVAQMDVELTVEERNLVSVGYKNVIGARRASWRILSSIEQKEESKGNEENVKRIQNYRKRVEEELAKVCNDILSVIDKHLIPSSTAVESTVFFYKMKGDYYRYLAEFSSGAERKEAADQSLEAYKAAVAAAETGLAPTHPVRLGLALNFSVFYYEILNSPESACQLAKQAFDDAIAELDSLNEESYKDSTLIMQLLRDNLTLWTSDLPEEGEEKSKGDEPKEEN

SEQ ID NO: 2798 - protein, 178 aa, Glycine max
  unsure (1)..(178): unsure at all Xaa locations
MASSMISSPAVTTVNRAGAGMVAPFTGLKSMAGFPTKKTNNDITSIASNGGRVQCMQVWPPIGKKKFNTLSYLPDLNNTQLAKEVEYLLKKRXIPYLQFDLNHNFIYHNHNESPRYYNKLYXTIXNLPIFNYTNTSHVCKDLQXTKTTYPSNCIPIIRFYNSHQXQYINFISYXPAXF

SEQ ID NO: 2799 - protein, 480 aa, Pseudomonas putida KT2440
MQLKDAQLFRQQAYINGEWLDADNGQTIKVTNPATGEVIGTVPKMGTAETRRAIEAADKALPAWRALTAKERSAKLRRWFELMIENQDDLARLMTTEQGKPLAEAKGEIAYAASFIEWFAEEAKRIYGDTIPGHQPDKRLIVIKQPIGVTAAITPWNFPAAMITRKAGPALAAGCTMVLKPASQTPYSALALVELAHRAGIPAGVLSVVTGSAGEVGGELTGNSLVRKLSFTGSTEIGRQLMEECAKDIKKVSLELGGNAPFIVFDDADLDKAVEGAIISKYRNNGQTCVCANRIYVQDGVYDAFAEKLAAAVAKLKIGNGLEEGTTTGPLIDGKAVAKVQEHIEDAVSKGAKVLSGGKLIEGNFFEPTILVDVPKTAAVAKEETFGPLAPLFRFKDEAEVIAMSNDTEFGLASYFYARDMSRVFRVAEALEYGMVGINTGLISNEVAPFGGIKASGLGREGSKYGIEDYLEIKYLCISV

SEQ ID NO: 2800 - protein, 133 aa, Crocosphaera watsonii WH 8501
MSAATDEILEKLKSLTLLEASELVKQIEEAFGVSASAPSGGMMMMAPGGAAPGGAAAEAEEEKTEFDVVLEEVPGDKKIAILKVVRAITGLGLKEAKDMVESAPKPIKEGTGKDDAEEIKKKLEEAGAKVSVK

SEQ ID NO: 2801 - protein, 157 aa, Chloroflexus aurantiacus
MNIYQFTVRTIDGEQQSLAVYRNKVLLIVNVASHCGLTPQYGDLESLYRRYKDRGFVVLGFPSNQFNQEPDDEATIKSFCARTYAVTFPLFAKVEVNGPNTHPLFAYLKAQQPGLSPDGEIKWNFTKFLVNRNGTVVRRYAPTDTVGAIERELVELL

SEQ ID NO: 2802 - protein, 283 aa, Zea mays
MPMYSKSELIHVPPPPCSRPRYVMAPPLVFTSIGASMNAAVRDVWASNFDEELSNLSAVLPRYPCVCLDTEFPGAVHDSDMPRYMRGPRESYELVKRNVGIALSGPAGRFPIAWQFNIRGFDPALHPHAPASIAMLREQGMDFAMLNEFGIDPEDFAAGFRRSGLACGRLTWTAFSGSYDFGYLAKALTGGQPLPDTLDGFLALVRRLFGHSVFDVKHLARCCAMRGGLEQVATALGVKRAAGRAHCAGSDSLLTTDVLLLMMHRFFRNVDVLAHAGTIVDLT

SEQ ID NO: 2803 - protein, 250 aa, Ipomoea batatas
MGKCYPTVSEEYKKAIEKLRRKLRGFIADKNCAPLMLPLAWHSAGTYDVSSKTGGPFGTMRLKAEQAHGANNGLDIAVRLLEPFKEQFPIVSYADFYQLAGVVAVEITGGPDVPFHPGREDKTEPPVEGRLPDATQGNDHLRDVFVKQMGLSDKDIVALSGGHTLGRCHKERSGFEGPWTTNPLIFDNSYFTELLSGEKEGLLQLPTDKALLNDSVFRPLVEKYAADEDAFFADYPEAHLKLSELGYAEA

SEQ ID NO: 2804 - protein, 199 aa, Triticum aestivum
MEGVGARLGRSSARYGPAMTFTGPVRKWRKEWVTISAATATATSAAASSTGTGSRGNNLILFKWTPLNGANERDEEQTAPAKTATRRRLYVPVSVVQDQRQESAKSDDENKANDGEPSSTETEQSIGKTNMDDILMDESQASDEVRDSGNFVGGTDLNLNLGPKDPDGEDEGDTGEQHEVRTEHRLKRKSVTPDLEMRM

SEQ ID NO: 2805 - protein, 332 aa, Nostoc sp. PCC 7120
MTKNLLEQLREMTVVVADTGDIQAIEKFTPRDATTNPSLITAAAKMPEYQEIVDQTLLQAKKDAGAGASKGQIVSLAFDRLAVSFGLKILQIIPGRVSTEVDARLSYDTEATITKARELIAQYKAAGIGPERVLIKIASTWEGIKAAEILEKEGIHCNLTLLFGLHQAIACAEAGITLISPFVGRILDWYKKETGRDSYPSAEDPGVLSVTTIYNYYKKFGYKTEVMGASFRNIGEITELAGSDLLTISPGLLGELQATIGELPRKLDPAKAATLDIDKISIDKATFDKMHAADRMAYDKLDEGIKGFTKALEELETLLAERLARLEVVASH

SEQ ID NO: 2806 - protein, 143 aa, Zea mays
MAMAYKMATEGMNVKEECQRWFMEMKWKKVHRFVVYKIDERSRAVLVDKVGGPGEGYEELVAALPGDDCRYAVFDFDFVTVDNCQKSKIFFIAWSPAASRIRAKILYATSKQGLRRLLDGVHYEVQATDPSEIGFDVIRGRAQ

SEQ ID NO: 2807 - protein, 374 aa, Thermoproteus tenax
MQYSPGLEGIIVKESKICLIDVENSKIYYRGYDIEELADKSTFEETAYLLIYGQLPRASELDAFKERLASLRRPPEHVVKLLGLLPKSAEPIDVLRTAVSAMGMGRNLSDRSPEAELERGLEVIASMPFIAANWDRTRRGLEIADPQAEGHAEYFLRALKGDASPRQIKAMDVMLIIYAEHGMNNSAFTAVTVASTLSDMYSVISAAIASLKGPLHGGANIDAAKMIEEVGEPGRVQRWVDEALAAGKRIPGFGHRLYKRGPDPRLRVLRRLARELAEEAGDYKYYEIAERLEEYVHSRLSHKGIYANTDLYAAVIFKYLGLPTDLNLPAFAMSRAAGWVAHAVEYRRNNRLIRPTERYIGPVGLRYIPLEARG

SEQ ID NO: 2808 - protein, 326 aa, ASPERGILLUS NIDULANS FGSC A4
MALKRTFKLNTGYEIPAVGLGTWQSKPSEVEEAVTAALNIGYRHIDAAAVYGNERDVGNGIKASGVPRGEIFLTSKLWNTHHDPENVEAAVDRSLSDLQTDYLDLYLIHWPVAFRYSTTTIQPVDEKTGLIDVIDVPIKDTWAAMEALVAKGKVRSIGVSNFNRRRIEELLKTAKIPPAVNQIEAHPYLQQRELLEWSKEKGILITGYSPLGNNIYNIPRTVDDPLVIEVAKFLNRTPAQVLISWAVQRGTAVLPKSVTPERIKSNFRDFILPEDAFQAIQSLERHQRMNFPARLGVDIFDEVGEESARRSALEWAEGQRLSKSQA

SEQ ID NO: 2809 - protein, 442 aa, Cupriavidus necator
MPQRHLPESRRPAMNRRQSQPFRTGDVMYQHIKVPAGEKITVNQDFSLNVPDNPIIPYIEGDGTGLDITPVMIKVVDAAVAKAYCGKRKIAWMEIYAGEKSTKVYGLDVWLPDETLEVLKDYVVSIKGPLTTPVGGGIRSLNVALRQTGPDVCLRPVRYFKGVPSRCVSSEKTDMVIFRENSEDIYAGIEWAAESEHAKKLIKFLQDEMGVKKIRFPRTSGIGIKPVSREGTERLVRKAIQYAIDNDKPSVTLVHKGNIMKFTEGGFRDWGYELAHKEFGAELVDGGPWCKFKNPKTGKDIVIKDAIADAFLQQILLRPAEYSVIATLNLNGDYVSDALAAQVGGIGIAPGANMSDSVAMFEATHGTAPKYAGKDYVNPGSEILSAEMMLRHMGWTEAADLIISSMEQSILSKKVTYDFARLLEGATQVSCSGFGQVMIDNM

SEQ ID NO: 2810 - protein, 105 aa, Glycine max
FAELMMSSGLICNNSMSWVTFHSTYNFSYLVKILTHRNLPTRLEKFLKTIKVFCRDNVYNIKHIIRFYNTLYNKLNHIAQSLNLKHTRKNYHHTKSDSLLTVHAF

SEQ ID NO: 2811 - protein, 367 aa, Zea mays
  unsure (1)..(367): unsure at all Xaa locations
MAATVRRAASSVLSRFLLTKPSPASAAGNKSALLGSGAAALHRFSTAPASAAAAAEEPIQPAVEVKHTQLLINGNFVDAASGKTFPTLDPRTGEVIARVAEGDSEDIDRAVAAARRAFDEGPWPRMTAYERCRVLLRFADLIERHAEEVAALETWDNGKTLAQAAGAEVPXVARCVRYYAGWADXHGLVAPADGAHHVQVLHEPVGVAGQIIPWNFPLLMFAWKVGPALACGNTVVLKTAEQTPLSALYVANLLHEAGLPEGVLNVVXPVQTILKFSGVEEVIRRANATPYGLAAGVFTRSLDAANTLSRALRAGTVWVNCYDVFDATIPFGGYKMSGVGREKGIYALRNYLQTKAVVTPIKNPAWL

SEQ ID NO: 2812 - protein, 288 aa, GIBBERELLA ZEAE PH-1
MVLEAVMVVVDNSESSRNGDYQPTRFDSQVDAVNITFQSITQGNPESSVGLMSMGGKGPEVLVTLTTEQGKILEGLHRTKKKIGGSSHLKTGIQVATLALKHRQNRSQRQRIIVFVCSPVEESEKELTTLAKKMKKANISVDFVLFGDLDDDSTKNKLQLFIDTVKTNEGCHLVVIPPSSKLLSDQLVSSPILLGENAGGSGGAGGAGGGNDEFEFGFDPAMEPELALALRMSMEEEKARQEKAAREEEEAAKKASLGDVKEEDEGQGSSSKDQDKDKKGDGDKMDIS

SEQ ID NO: 2813 - protein, 266 aa, Triticum aestivum
  unsure (1)..(266): unsure at all Xaa locations
MGSNEGGGCDGKPVVVVPEIKYTKLFINGEFVDAASGKTFETRDPRTGDVLAHIAEADKADVDLAVEAAREAFEHGKWPRMSGYERSRAMNKLADLMEQHIEELAALDGADAGKLLLWGKFIDIPSAVQMLRYYAGAADKIHGESLRVSGKYQGYTLKEPIGVVGIIIPWNFPSLMFFLKISPALAAGCTVVVKPXPSQTPLSALYYAHLAKLAGIPDGVINVVPGFSPTAGAAIASHMDVDSVAFTGSGEVRRLIMEASARSNLK

SEQ ID NO: 2814 - protein, 292 aa, Arabidopsis thaliana; identical to SEQ ID NO: 375

SEQ ID NO: 2815 - protein, 238 aa, Glycine max
  unsure (1)..(238): unsure at all Xaa locations
AGIPGSTPRPETDEFIYHECLVHPALLHNPSPKNVFIMGGGEGSTARELLRHKTINKVVMCDIDEEVVNFCKSYLVVNKEAFRDQRLEVVINDARAELETRDESYDVIIGDLADPIDGGPCYKLYTKSFYELIVKPRLKQGGIFVTQAGPAGIFSHTEVFSCIYNTLRQVFKYVVPYSAHIPSYADILEWXQASDSPLDLSAEELDLRMRHRIKGENGYLDGKTFTSASTLSKTVRNS

SEQ ID NO: 2816 - protein, 132 aa, Thermosynechococcus elongatus BP-1
MSAATDEILEKLKSLTLLEAAELVKQIEETFGVSAAAPVGGMMVAAPVAGAAAAPAEEVEEKTAFDVILEEVPADKKIAVLKVVRSLTGLGLKEAKEVVESTPKPVKEGASKEDAEAAKKELEEAGAKVSIK

SEQ ID NO: 2817 - protein, 358 aa, Thermosynechococcus elongatus BP-1
MSHAVTLIRGDGIGPEVAAAARTAIDATGVKIDWVVVDAGVAMMERYGTPLPEEVIDAIKSTKTAIKGPITTPVGTGFRSVNVEIRKRLNLYANLRPAKSIVGVKSYFQNIDLVIVRENTEDLYAGIEFAYTSPEAAKARAFLSDLSGKPIREDAAIGVKPISVLGSDRILEFAFKYAKANGRKKVTAVHKANIMKFTDGLFLERAREIASRYPDIVFEDRIVDNMCMQLMQKPELYDVMVMPNLYGDILSDLCAGMIGGLGVAPGANIGDECAVFEAIHGSAPKYAGQNKANPTALILSGVLMLQHLGEMEAAQRLQAAVEKVIAEGRFVTYDLAAPGKEPVGTQEMAAAIAEYAAP

SEQ ID NO: 2818 - protein, 430 aa, Oceanobacillus iheyensis HTE831
MKTILLNANRLLPSNELEKVEVLIEDNKIIKIASQIPDKVENYIDIEGKLLLPGLIDVHIHLREPGGEHKETIKTGTMAAARGGYTTVCAMPNTNPVPDHPEALTSLLSKIADDAHIRVLPYASITKSLKGEERTDIQSLIDAGAFAFTDDGVGIQTADQMYQAMKDAARHNTTIVAHCEDNSLVYGGVLHEGEVSERLSLPGIPSLSESVQIARDVLLAEATGCHYHVCHVSTKESVRVIRDAKKAGIHVTAEVSPHHLLLNETDIPDDNADWKMNPPLRSTEDQQALFDGLMDGTIDLIATDHAPHATEEKAVGFKEAPFGIVGLETAFPLLYTHLVLKGKMTLYQLVERMTEKPAATFQLPYGKLEEDSVADITVIDLEKEETIHRETFYSKGKNTPFDNWKVKGIPVLTMVNGVVVYEEAKQHEEA

SEQ ID NO: 2819 - protein, 396 aa, Oryza sativa (japonica cultivar-group)
MASAAGGASGKDWFDCLPDDLVHHVLSFLPALDAVRTSVLSRRWRDFWVSMPRLNVDVGDFRDDGQFENFTVHALPLLDSSVPLRSLRLRSSLHYLSALWVNHAVKRKVAVLEYSGRAELCSSVDASLSLASSYLTKVVLKHFDFDYGQFWPLIDACPALENLELLDVWTFYSVTISSSSLKHLRIVSCLFYNGFRINAPNLLTMCLDDVNVNGPLGHDSLVLENLSSLMTASVSVYHCFYPKHYVKTELHFFHGLSHARNLKLIAPLYEALFEEGLPTCPVFNNLKCLVLGDWCMAFDLYPLRCILRQSPMLEELCVELGEEECENCKNRKPAFSYGEISPFWCDRLKTIKIKCTEHDERFVALLQLFCKILVCIEEVDIDRQWVSAQPPDSSEL

SEQ ID NO: 2820 - protein, 70 aa, Glycine max
MSALFNFHSFLTVILLGICACTYFKMQFPAILDQKTGFRGFFWKAARIGERLSPWVAAGCFMMGVSIIFF

SEQ ID NO: 2821 - protein, 343 aa, Chrysosplenium americanum
MLFAMQLACASVLPMVLKSAIELDLLEIIRGQDTCMSPTEIASHLPTTNPDAPAMVDRILRLLSCYSVVTCSVRSVDDQRVYGLAPVCKYLTKNQDGVSIAALCLMNQDKVLMESWYHLKDAVLDGGIPFNKAYGMSSFEYHGTDPRFNKVFNRGMSDHSTITMKKVFQTYQGFQGLTSLVDVGGGTGATLTMILSKYPTIRCINFDLPHVIEDAPEYPGIEHVGGDMFVSVPKGDAIFMKWICHDWSDEHCLKLLKNCYDALPNNGKVILAECILPEVPDSSLATKGVVHIDVITVAHNPGGKERTEKEFEALAKAAGFQGFQVFCNAFNTYIIEFSKKICN

SEQ ID NO: 2822 - protein, 140 aa, Nicotiana tabacum
KEEFHKETCRKIKALHQYDCLRANKSTSAWGLEARVPFLDKEFINVAMSIDPEWKLIKPEQRRIEKWALRRAFDDEEHPYLPKHILYRQKEQFSDGVGYSWIDGLKAHAEQHVTNRMMLNASHIFPHNTPITKEAYYYSM

SEQ ID NO: 2823 - protein, 114 aa, Triticum aestivum
FSWADAWADAWDLCITAGALVLRFQRRLKTAERVMGTVKRFNFTKGFGFIFAEDGSQDLFVHQDSIKADGYRSLNENDVLEFEVITGDDGRTKVFDVTAPGGGALAGGSRPGHR

SEQ ID NO: 2824 - protein, 359 aa, Zea mays
  unsure (1)..(359): unsure at all Xaa locations
MSHGNGMLNSVKVERWPAAVAANGQPRPMDVLHDGSSPPFLTKTYDMVDDPTTNAVVSWSAANNSFVXWDPHIFGTVLLPRYFKHNNFSSFVRQLNTYGFRKVDPDRWEFANEEFLRGQRHLLKNIRRRKPPHSSPNQQSLGSYLEVGHFGYEEEIDQLKRDKQLLMAEVVKLRQEHQNTRSDLQAMEEKLQDTEQKQQQMMAFMARVMQNPDFMRQLISQREMRKELEDAISKKRRRRIDQGHEAGSMGTGSSLEQGPQGVFEPQEPVESVANGVPSDLESSSVEAKGLEVRQGVSSGGSEHLNGRPSGELNDDFWEDLLHEGGLGADAGNAVGQDDMNMDMDPDVSLPQLKQHGPRH

SEQ ID NO: 2825 - protein, 180 aa, Spinacia oleracea
MASSVLSSARVATVSRTPAQASMVAPFTGLKSTVGFPATKKNDDITSLASNGGRVQCMKVWPTQNMKRYETLSYLPPLTTDQLARQVDYLLNNKWVPCLEFETDHGFVYREHHNSPGYYDGRYWTMWKLPMFGCTDPAQVLNELEECKKEYPNAFIRIIGFDSNRQVQCVSFIAYKPAGY

SEQ ID NO: 2826 - protein, 350 aa, Thermococcus kodakaraensis
MAEKMQAIMKTKPAYGAELVEVDVPKPGPGEVLIKVLATSICGTDLHIYEWNEWAQSRIKPPQIMGHEVAGEVVEVGPGVEDLQVGDYISVETHIVCGKCYACKHNRYHVCQNTKIFGVDMDGVFAHYAIVPAKNAWKNPKDMPPEYAALQEPLGNAVDTVLAGPIAGRSTLITGAGPLGLLGIAVAKASGAYPVIVSEPSEFRRKLAKKVGADYVVNPFEEDPVKFVMDITDGAGVEVFLEFSGAPKALEQGLKAVTPGGRVSLLGLFPREVTIDFNNLIIFKALEVHGITGRHLWETWYTVSSLIQSGKLNLDPIITHKYKGFDKFEEAFELMRAGKTGKVVFFPHKG

SEQ ID NO: 2827 - protein, 219 aa, Lactococcus lactis
GGLYAPFVEPELEWDFRLKNVISINTSGHKYGLVYPGVGWVLWRDKKYLPEELIFKVSYLGGELPTMAINFSHSASQLIGQYYNFVRYGFDGYKAIHERTHKVAMFLAKEIEKTGMFEIMNDGSQLPIVCYKLKEDSNRGWNLYDLADRLLMKGWQVPAYPLPKNLENEIIQRLVIRADFGMNMAFNYVQDMQEAIEALNKAHILYHEEPENKTYGFTH

SEQ ID NO: 2828 - protein, 113 aa, Glycine max
MTMGLKFFTCLVLTVCIAASVDAALTCGTVTSSLAPCATYLSKGGAVVPGPCCAGVKKLNDMAQTTPDRQQACKCLKAAAKSINPSLASGLPGKCSVSIPYPISMSTNCDNVK

SEQ ID NO: 2829 - protein, 503 aa, Acinetobacter sp. ADP1
MRYIDPNQPGSKVQFKAQYENFIGGQWVPPVKGEYFGNSSPVDGKVFTQIPRSSVEDIELALDAAHKAKADWNKASPTVRSNVLLKIADRLEENLELLAVAETWENGKPIRETLAADIPLAIDHFRYFAGCIRAQEGGISEIDEDTIAYHFHEPLGVVGQIIPWNFPILMAAWKLAPALAAGNCIVLKPAEQTPSSILVLAELIQDLLPPGVLNIVNGYGAEVGRPLATNPRISKIAFTGSTKVGQMIMQYATENIIPVTLELGGKSPNIFFEDILDKEDDYLEKTLEGFAMFALNQGEVCTCPSRALVQESIADKFLEMAVERVKRIKTGHPLDTETMIGAQASKQQFDKILGCIDTGRNEGAQLLTGGDARHDVDGGFYIEPTIFKGNNSMKIFQEEIFGPVLSVTTFKDFDDAMRIANDTIYGLGAGVWSRSAHTSYRAGRAIEAGRVWTNCYHLYPAHAAFGGYKQSGIGRENHRMMLDHYQQTKNLLVSYSTKPMGFF

SEQ ID NO: 2830 - protein, 163 aa, Lactococcus lactis
GGLYAPFVEPELEWDFRLKNVISINTSGHKYGLVYPGVGWVLWRDKKYLPEELIFKVSYLGGELPTMAINFSHSASQLIGQYYNFVRYGFDGYKAIHERTHKVAMYLAEEIEKTGMFEIMNDGSQLPIVCYKLKENSNLGWNLYDLADRLFNEGMASACLSTS

SEQ ID NO: 2831 - protein, 444 aa, Bradyrhizobium japonicum USDA 110
MTQRFDVILRGGTVVNQDGEGLRDIGIASGRIAEIGALSQASAAEVIDCKGLHILPGVMDTQVHFREPGLDQKEDLETGSRSAVMGGVTAVFEMPNTSPLTVTEASFTDKVKRARHRMHCDFAFFIGGTRENVQDLPVLERAPGCAGVKVFIGSSTGALLVEDDESLRRIFQVIRRRAAFHAEDEYRLNERKPLRIEGDPRSHPVWRDETAALMATQRLVKLAHETGKRIHVLHISTKEEIEFLRDHKDVASCEATPHHLTLVAPECYERLGTLAQMNPPVRGADHRAGIWRGIEQGIIDVLGSDHAPHTLEEKQKTYPASPSGMTGVQTLVPLMLDHVNAGRLSLARFVDLTSAGPARLYNMACKGRIAAGYDADFTVVDLKRSETITNKWVASKAGWTPYDGVRVTGWPVGTFIRGRRVMWQGELVTPSQGEPVRFLETLKA

SEQ ID NO: 2832 - protein, 158 aa, Brucella suis 1330
MKKNNLFRALLISATFALQATAALAVNPDEVLSDPKLEKRAREISAELRCMVCQNESIDDSNAELARDLRILVRERLTKGDTDGQVIDFVVDRYGEFVLLKPRFNAQTALLWGFPVIILLIGVGALLVAFRRRRAAGTAPQPLSESEKAELSRLLDGK

SEQ ID NO: 2833 - protein, 113 aa, Bartonella sp. Tm916nv
ANEACLKMLQEIGSVKRIPEFIARAKDKNDPFRLMGFGHRVYKNYDPRAKIMQQTCHEVLKELNIQDDPLLDIAIELENIALNDEYFVEKRLYPNVDFYSGITLKALGFPTEM

SEQ ID NO: 2834 - protein, 75 aa, Glycine max
MLEFNCMQHILYRQREQLGEGIGYGWIDGLKTHAEKHATDLMLLIAAYMFPFNTPTSREAYYYRMKLERNFRQVH

SEQ ID NO: 2835 - protein, 452 aa, Burkholderia cepacia R1808
MTDTISASQHEDTNLRTDAAWLDAHWMPFTANRQFKSDPRMIVSAKDAYYTDAEGRKIFDGLSGLWCTGLGHGRTEITEAVSRQIAQLDYAPAFQFGHPKSFELANKIKELTPAGLDYVFFTGSGSEAADTSLKMARAYWRAKGKGTKTRLIGREKGYHGVNFGGISVGGIGANRKLFGQGIDADFLPHTQLAENKFSRGMPDNGADLADRLLDLITLHDASNIAAVIVEPFSGSAGVVIPPKGYLKRLRDICTAHDILLIFDEVITGFGRSGAMTGADAFGVTPDIMNFAKQVTNGTQPLGGVIATKEIYDTFMAAGGPDYMLEFPHGYTYSAHPVACAAGVAALDLLVKEDAVARVRDLAPHFEAAVHGLKGQRHIADIRNYGLAAGLTIAALPGEPARRPYEIAMRCWAKGFYVRYGGDTIQLAPPFIAEKREIDNLVNALSDALNEVD

SEQ ID NO: 2836 - protein, 317 aa, Methanosarcina acetivorans C2A
MDFEASARDLTTPVKGAKIVPNMSVDELVREYAGCAFGAGRLAEAVDIYYEMLASEKTTKFFGLAGAMTPAGMRGIIADLIRDGHIDVLVTTGANMVHDTVEALGLHHYKGSDCANDIQLRHECIDRIYDVYLPDQHFTDLEEFLQSVYAGLPQEKLSIRQVLTEIGKNLDDDSSILKTAAEMGVPVYCPALQDSVIGLQAWLYKEGNLLHVDAFADMHEFMEICYEAESAGAMLLGGGVPKNYILQSMLVTPKSFDYAIQLTMDRPETGGLSGATLDEAQSWGKVGEDAKSVTVYADATITLPLIVSAVRTRLSKR

SEQ ID NO: 2837 - protein, 280 aa, Pleurotus djamor
MERYNTRTASNFPGLVFDCAEEAQSGYKHIDTAYNYHTEKYVGNAVRESGIPREELFITTKLPWHHYARVAESFQESLDALGLGYIDLYLIHWPQPILYDPNDPLPKNPDGTPKTTNYPFTKIWADMERLLDTGKVRAIGVSNFSIKNLEILLESAKVVPAVNQVELHPYLAQPELVDYCKQKGIAITAYTPTGYQTVRDDPVIVELASKYRVSPAQVILAWHMSRGVIVTPKSANAERQRENINVSFLHFPINSFDVLFLASTAATCPGACRSSAYISS

SEQ ID NO: 2838 - protein, 306 aa, Pleurotus djamor
MSAYPPIVLNTGARMPALALGGWAGLTEEERTQAKEWFLTALKSGYRHIDTAQIYYTEKSVGNAIRESGIPREELFITTKLPWNHHSRVAESFQKSLENLGTEYIDLYLVHFPQRVFYDETTDFPRNPDGSIKVVNSPTLNDVWADVETLLDTGKVKAIGVSNYSIKTLEELLKTAKVVPAVNQVELHPFLAQSKLLAYCKEKGIAVTAYTPTGYQTVLTDPTIVELAGKYGVSPAQIVLAWHLSRGVAAAPKSANESRQKENLNLPFLQPEDVAKISALDRGQRIANKADERGQVWGLTLEELGW

SEQ ID NO: 2839 - protein, 164 aa, Triticum aestivum
  unsure (1)..(164): unsure at all Xaa locations
APVRSSICYIDGDEGILRYRGYPIEEVAESSSFVEVAYLLMYGNLPTQSQLAGWEFAISQHSAVPQGLLGYXINQMPHDAHPMGVLANAMSTLSCPSNPRCKPCSLXGQXLFNPKQXRDNKLYXSLGKAPAITTAAYLRQQEGCLLPFKLPNPEFLMLTGVTRI

SEQ ID NO: 2840 - protein, 496 aa, Thermus thermophilus HB27
MPLITTETGKKMHVLEDGRKLITVIPGDGVGPECVEATLKVLEAAKAPLAYEVREAGASVFRRGIASGVPQETIESIRKTRVVLKGPLETPVGYGEKSANVTLRKLFETYANVRPVREFPNVPTPYAGRGIDLVVVRENVEDLYAGIEHMQTPSVAQTLKLISWKGSEKIVRFAFELARAEGRKKVHCATKSNIMKLAEGTLKRAFEQVAQEYPDIEAVHIIVDNAAHQLVKRPEQFEVIVTTNMNGDILSDLTSGLIGGLGFAPSANIGNEVAIFEAVHGSAPKYAGKNVINPTAVLLSAVMMLRYLEEFATADLIENALLYTLEEGRVLTGDVVGYDRGAKTTEYTEAIIQNLGKTPRKTQVRGYKPFRLPQVDGAIAPIVPRSRRVVGVDVFVETNLLPEALGKALEDLAAGTPFRLKMISNRGTQVYPPTGGLTDLVDHYRCRFLYTGEGEAKDPEILDLVSRVASRFRWMHLEKLQEFDGEPGFTKAQGED

SEQ ID NO: 2841 - protein, 504 aa, Cryptococcus neoformans var. grubii
MDAKKATIAIIALAAAATAYKVMSTTQEKKNTEGVCPATGQKRAGSTGCPFSSGLPLPDPGHRCDPNSIQEEYKVPEVPPLTEAQKDIIKSTAPILEQHGVTITTHFYKNMIRAHPELRDVFSESAQKLGHQPAALAAAVYAYACNIHDLTPILPVVERIAHKHTSLHITANQYGIVGKHLIQAIVDILGDAVTPEVGDAWYNGYWNLAHVFIKRERQLYDSAIEAGGWEGWRQFKVAKRVKESNEITSFYLKPVEGSGAPLPKFRPGQYTAVQIDIPGLGYKQARQYSLSDAPNGEYFRISVKREDGVPVPTLSNPEVPFHPGWMSNVLHKDYQEGSIVNVASPFGDFYYAPSDSSPTAPLVLLSAGVGQTPVMAMLNAQLAKNNEPNSPIKPITYVTVARSPKVRAFKDHVKKLSDVHENVKSRIFYSRPTDDVVEGQDYDFKGRMDLEKIKEDLYLGDKTAEYYICGPSKFMLNTRDKLQSLGVDPSRIHYELFEAGNLSA

SEQ ID NO: 2842 - protein, 461 aa, Rubrobacter xylanophilus DSM 9941
MVDPATGEEVDSVPVCGEAEVDAAVRGAAGAFPGWSGTPASRRGELLARAAEAVLGARDELAGLLTAEQGKPLREARLEIRRFVHTLEHYAGLAKNIRGGYVPDLDEGAYGLILRRPVGVVGAIVPWNFPTTLLANKLGPALVAGNVVVAKPAETTPLTTLRIAEIMHGAGLPAGVFNVVTGDGPTTGQALAGHPSVRKVAFTGSTPVGKKLAALAAGDLKRVTLELGGSDPMIVCDDADLDRAASAASVGRFFNCGQACLAVKRLYVFESVAEEFVEKLVGKAKRLRVGPGRAEGTIIGPLHTPEGRELLEGQVRDAVESGARVLAGGRRPEGEVFERGNFYEPTLLLEPSHESRVATEEVFGPALPIWRVGDLEEAIERANGSIYGLGSSVWTADLDRATEAAERIEAGYTWINSPQVIYDELPFGGWKQSGYGKEHGMEAIEYYTETKSVVVRRAYQG

SEQ ID NO: 2843 - protein, 116 aa, Schizosaccharomyces pombe
MSADGLDYTNLLPIANVARIMKSALPENAKISKEAKDCVQDCVSEFISFVTGEASEQCTQEKRKTITGEDVLLALNTLGFENYAEVLKISLTKYREQQARSASMKETKQSRSEEPQ

SEQ ID NO: 2844 - protein, 249 aa, Glycine max
MPTHHASAAIFGIIGNMISVMVYLAPVPTFYQIYKKKCTDGFHSLPYLLSLMSSMLWLYYAFLKIHDGVVPLITINSIGCVIELIYILTYIKYAHKDARNLTYTLFAAMNIAFLTLVLSSHFALHGSHRVKVIGWICDAVSLSVFASPLSIMAKVIRTKSVQFMPFYLSFFLTLNAITWFVYGLSIQDKCIYVPNVGGFGLGLVQMVLYGIYRNGGESEKEQALAEGAINIVVVNPLGPAEVFNRRGSG

SEQ ID NO: 2845 - protein, 341 aa, Oryza glaberrima
MDHRELWPYGLRVLVIDDDCSYLSVMEDLLLKCSYKVTTYKNVREAVPFILDNPQIVDLVISDAFFPTEDGLLILQEVTSKFGIPTVIMASSGDTNTVMKYVANGASDFLLKPVRIEELSNIWQHIFRKQMQDHKNNNMVGNLEKPGHPPSILAMARATPATTKSTATEALLAPLENEVRDDMVNYNGEITDIRDLRKSRLTWTTQLHRQFIAAVNHLGEDKAVPKKILGIMKVKHLTREQVASHLQKYRMQLKKSIPTTSKHGATLSSTALDKTQDHPSRSQYFNQDGCMEIMDYSLPRDDLSSGSECMLEEQNDYSSEGFQDFRWDSDKQEYGPCFWNF

SEQ ID NO: 2846 - protein, 71 aa, Triticum aestivum
MASRSCTFLEILLAIILPPLGVFLHYGCCSMEFCICLLLTILGYIPGIIYAVYVLVALGSEERDRDYDTLA

SEQ ID NO: 2847 - protein, 346 aa, Rhodococcus ruber
MKALQYTEIGSEPVVVDVPTPAPGPGEILLKVTAAGLCHSDIFVMDMPAEQYIYGLPLTLGHEGVGTVAELGAGVTGFETGDAVAVYGPWGCGACHACARGRENYCTRAAELGITPPGLGSPGSMAEYMIVDSARHLVPIGDLDPVAAVPLTDAGLTPYHAISRVLPLLGPGSTAVVIGVGGLGHVGIQILRAVSAARVIAVDLDDDRLALAREVGADAAVKSGAGAADAIRELTGGEGATAVFDFVGAQSTIDTAQQVVAIDGHISVVGIHAGAHAKVGFFMIPFGASVVTPYWGTRSELMDVVDLARAGRLDIHTETFTLDEGPTAYRRLREGSIRGRGVVVPG

SEQ ID NO: 2848 - protein, 74 aa, Triticum aestivum
MAFVPICVQCGTRSNPCRCKVVGPTLGFVALVVAGVVEWPLGAAVYLFRHRKGRRIMGHPATVVYPRVTGAIPI

SEQ ID NO: 2849 - protein, 359 aa, Glycine max
MLTCIARPKKLVGDSAASEDPSSRGVKSLTGQLKEMALKASGAYKQCGGPCATAPPSRVSRGGGTELDSESSSSSSSRRRWGKELEARLKGISSGEGTPSSSGRRVVLLLEDDEEPKEWVAQVEPGVLITFVSLPRGGNHLKRIRFSREIFNKWQAQRWWAENYDKVMELYNVQRLNRQAFPLPTPPRSEDESSKRESIEDFPVTPPLSRERPPCNLFRAGGGGMGMGYSSSDSFDHHSMQSSRHYYDPNDVNSTPKASSTISAAAKTDISSSMDVDASIRSSSSREADRSGDLSISNASDLDTEWVEQDEPGVYITIRALPGGKKELRRVRFSREKFGEMHARLWWEENRARIHEQYL

SEQ ID NO: 2850 - protein, 112 aa, Bartonella sp. Tm1794nv
NEACLKMLQEMGSVKRIPEFIARAKDKNDPFRLMGFGHRVYKNYDPRAKIMQQTCHEVLKELNIQDDPLLDIAIELENIALNDEYFVEKRLYPNVDFYSGITLKALGFPTEM

SEQ ID NO: 2851 - protein, 117 aa, Phaseolus vulgaris
MATLNSACVVAVLCLVVLTAPTAHAAISCGQVTSSLASCIPFLTKGGAVPASCCSGVRSLNAAAKTTPDRQVCNCLKSAAGAIPGFNANNAGILPGKCGVSIHYNISTSTNCATIKF

SEQ ID NO: 2852 - protein, 420 aa, Schizosaccharomyces pombe
MSGYSPLSSGPADVHIGKAGFFSSVINLANTILGAGILSLPNAFTKTGLLFGCLTIVFSAFASFLGLYFVSQCAARLPRGKASFAAVAKHTFPSLAVVFDASIAVKCFGVAVSYLVIVGDLMPQIAPSLGLSSPMFLRRQTWIVFALFVLTPLSFLKRLDSLRHTSVISLIALCYLVFIVLYHFIIGDTVKGEIRYFVPESGFGYLSVLPVFVFGFTCHQNAFSVINEVRNFSQGFVNFTMFTAIISSTLLYLLVAITGYLSFGSLASGNIIAMYDNTSIWIIGGKLAIVVLVLFSYPLQCHPCRNSVYQAIRRSYSAHDMSDGYHAVITLCILLFTHSLALLLSSLEMVLAFVGSTGSTFISFILPGSLYYFFSHKVASPGNSSPLQLRISRAFAAGLAIYGTVVMILCLNINIAKLSH

SEQ ID NO: 2853 - protein, 169 aa, Synechocystis sp. PCC 6803
MTAQANNTIYGFSANALDGSPVALRDFEGKVLLIVNTASQCGFTPQYQGLQALYNRFGDRGFTVLGFPCNQFGQQEPGGSGEIKNFCETRYGVTFPLFEKVEVNGPNAHPLFKFLTAASPGMAIPFLGGAEDIKWNFTKFLVDRQGKVVKRYGSIAKPDEIAADIEKLL

SEQ ID NO: 2854 - protein, 456 aa, Oryza sativa (japonica cultivar-group)
MTPPASTGKCTGAAAGEVEEPLLPEFSGGGHGASVSGAVFNVSTSIIGAGIMSIPAAMRVLGVLPALLLIATVAALSDASVEFMLRYTGWDSGPPSYAGIMGDAFGRAGAKALNVCIAFTTTGTLVVYLIIIGDVLSGSAGAGDEHAGVLQELFGAQWWTARELVILVTAIVVLLPLVLRRRVDSLKFTSAVSILLAVVFMFISLGIAVYALFTGTAKMPRMLPDFSRLSSPFELFTAVPIVVVAFTFHFNVHPIRTELSKTSDMKAAVRISLVLCAAIYAAVGFFGFLLFGDATMADVLANFDRSSGAGVPQALNDAARLSYALHLVLVFPLLHFSLRVNVDELLFPGRRPLATDTRRFVALTAVLMAVLYALAIAIPSIWTLFEYSGSTFAVCISLIFPGAIVLRDAHGIAKTKDKALAATMIALAVITSSIAIASNVMSSISGKVEGGHAAGR

SEQ ID NO: 2855 - protein, 423 aa, Lactococcus lactis subsp. lactis
MTLLIKNGRLVDPKSNRDEVLDILIENDKIVKIGLNLSVENAEIVDARGLVVAPGLIDVHVHFREPGQTHKETIHSGAKSAAAGGFTRVVMMANTKPILSTPKVLTETLEIADKEDIKIDAVGSITQDFDGEHLTDFDELIKAGAIGFSDDGIPLTDAGVLRKALQKAKLTDSLISIHEEDPNLIGTLGVNDGEVAHKCGFTGAPTVSEYSMMARDSMIAYETGARLHIQHLSAGESVEVVRFAKNLGAKITAEVTPQHFSITEQMIFEQGTNAKLNPPLRSTTDIGKIIEGLKDGTIDVIATDHAPHTREEKNVSLDKAPSGMIGLETSLQLGLTNLVAKGHLTLSELLTKMTVNPAKLYNFDAGYLAENGPADLVIFDAENDYQVGETFDSKATNSPFIKQKVQGQVKYTICDGKIVYQAK

SEQ ID NO: 2856 - protein, 452 aa, Glycine max
MEECHTVFGKYEMGRLLGKGTFAKVYYGKQISTGESVAIKVINKEQVRKEGMMEQIKREISVMRLVRHPNVVEIKEVMATKTKIFFVMEYVRGGELFAKISKGKLKEDLARKYFQQLISAVDYCHSRGVSHRDLKPENLLLDEDENLKISDFGLSALPEQLRYDGLLHTQCGTPAYVAPEVLRKKGYDGSKADIWSCGVVLYVLLAGFLPFQHENLMTMYNKVLRAEFEFPPWFSPDSKRLISKILVADPSKRTAISAIARVSWFRKGFSSLSAPDLCQLEKQEDAVTVTVTEEENNSKVPKFFNAFEFISSMSSGFDLSGLFESKRKTATVFTSKCSAAAIVAKIAAAARGLSFRVAEVKDFKIRLQGAAEGRKGRLAVTAEVFEVAPEVAVVEFSKSAGDTLEYAKFCEEDVRPALKDIVWTWQGDATCAANFPACHGEECQKQVVVSTI

SEQ ID NO: 2857 - protein, 201 aa, Aspergillus awamori
MNPEYDYLFKLLLIGDSGVGKSCLLLRFADDTYTESYISTIGVDFKIRTIELDGKTMKLQIWDTAGQERFRTITSSYYRGAHGICVVYDVTDMDSFNNVKQWLQEIDRYATEGVNKLLVGNKSDMEDKKVVEYTVAKEFADSLGIPFLETSAKNASNVEQAFLTMARQIKERMGTATVNNKPTVQVGQGQGVQSGSAGGCC

SEQ ID NO: 2858 - protein, 316 aa, Petunia x hybrida
MEQENHNNNNCTNDKESACISSVLPGWFSEISPLWPGEAHSLKVEKILFQGKSDYQNVMVFQSSTYGKVLVLDGVIQLTERDECAYQEMITHLPLCSIPNPKKVLVIGGGDGGVLREVSRHSSIEQIDICEIDKMVVEVSKQFFPDVAVGYEDPRVNLHIGDGVAFLKAVPAGTYDAVIVDSSDPIGPAQELFEKPFFETVARALRPGGVVSTQAESIWLHMDIIENIVTNCRQIFKGSVNYAWTTVPTYPSGMIGFMLCSTEGLEVDFKNPVNLIENDEIHSKTLPPLKFYNFEIHKASFALPSFAKRVIESKGN

SEQ ID NO: 2859 - protein, 180 aa, Mesembryanthemum crystallinum
MASMMSNAAVVGRTTPAQASMVAPFTGLKSVSAFPVTKKSNDITSIASNGGRVQCMQVWPPLGKKKFETLSYLPPLSEESLMKEVQYLLNNGWVPCLEFEPTHGFVYREHGNTPGYYDGRYWTMWKLPMFGCTDPSQVVAELEEAKKAYPEAFIRIIGFDNVRQVQCISFIAYKPASYDA

SEQ ID NO: 2860 - protein, 193 aa, Ustilago maydis 521
MQTIKCVVVGDGAVGKTCLLISYTTNAFPGEYIPTVFDNYSANVMVDGKPVSLGLWDTAGQEDYDRLRPLSYPQTDVFLVCFSLVSPPSFENVRTKWWPEVSHHAPNIPTILVGTKLDLREDPETIAKLRDRRMQPITYAQGNQMARDIHATKYLECSALTQKGLKGVFDEAIRSVLAPAPVKSKKKNNCMIL

SEQ ID NO: 2861 - protein, 553 aa, Zea mays
  unsure (1)..(553): unsure at all Xaa locations
MARRAASSLVSRCLPXRGPLAGAAAPLPPSALRRTVPADGMHRLLPGVLQRFSTXAAAVEEPITPSVHVNYTKLLINGNFVDSXASGKTFPTLDPRTGEVIAHVAEGDAEDINRAVAAARKAFDEGPWPKMTAYERSRILLRFADLIEKHNDELAALETWDNGKPYEQAAQIEVPMVARLMRYYAGWADKIHGLIVPADGPHHVQILHEPIGVAGQIIPWNFPLLMFAWKVGPALACGNTLVLKTAEQTPLSALYISKLLHEAGLPEGVVNVVSGFGPTAGAALASHMDVDKIAFTGSTDTGKIILELAAKSNLKTVTLELGGKSPFIIMDDADVDHAVELAHFALFFNQGQCCCAGSRTFVHERVYDEFVEKAKARALKRVVGDPFRKGVEQGPQIDDEQFNKILRYIRYGVDGGATLVTGGDRLGDKGFYIQPTIFSDVQDGMKIAQEEIFGPVQSILKFKDLNEVIKRANASQYGLAAGVFTNSLDTANTLTRALRAGTVWVNCFDVFDAAIPFGGYKMSGIGREKGVDSLKNYLQVKAVVTPIKNAAWL

SEQ ID NO: 2862 - protein, 183 aa, Mesembryanthemum crystallinum
MASSLMSNAATTMAAATTTAQANMVAPFNGLKSVSAFPVTRKNNDITSVASNGGRVQCMQVWPPLGKKKFETLSYLPPLSEESLIKEVQYLLNNGWVPCLEFEPTHGFVYREHGNTPGYYDGRYWTMWKLPMFGCTDPSQVVAELEEAKKAYPEAFIRIIGFDNVRQVQCISFIAYKPASYDA

SEQ ID NO: 2863 - protein, 293 aa, Glycine max
  unsure (1)..(293): unsure at all Xaa locations
MVLIRLWFVLLGFFGGFGSAAEQRRWTLNDFDIEKPLGRGKFGHVYLAREKXDNHIVALKVLFKXQLQQSXVVHQLRREVEIQSHLRHPHILRLDGYFYDQXYAPKGDLYKELQKCKYFSERRVTTYVASLARALIYCHGKHVIHRDIKPENLLIEWIYVIFTNXKKKKKNFGWSVHTFNRRRTMCGTLDYLPPEMVESVEHDASVDIWSLGVLCYEFLYGVPPFEAKEHSDTYRRIIQVDLKFPPKPIVSSAAKDLISQMLVKDSSQRLPLHKLLEHPWIVQNAEPSGVYRS

SEQ ID NO: 2864 - protein, 239 aa, Triticum aestivum
YNGVKVTTEDGTSYFADACIISVPLGVLKANVIKFEPELPSWKSSAIADLGVGVENKIAMHFDRVFWPNVEVLGMVGPTPKACGYFLNLHKATGNPVLVYMAAGRFAQEVEKLSDKEAVSLVVSHLKKMLPDASEPTQYLVSRWGSDPNSLGSYSCDLVGKPADVCARFSAPVDNLYFAGEAASAEHSGSVHGAYSSGIAAAEECRKRLLTLKGIPDLVQVAAWEEMAGAVAPLQICRT

SEQ ID NO: 2865 - protein, 273 aa, Ustilago maydis 521
MSSNDPAAPPSYTAPAPKGYQAVPQHDSPSYGAAETSTTPRNVDEEGDPDDFKFGVTVEQSSPEIRAMFLRKVYTVLFFQILGTTAIAAIMTTRGIAGWVQQNQWAFIVPLVGSLVTMGFLYFKRHSHPTNMILLGLFTVLESLSLGTVITYVDQKIVLQAMIITAFTFFGLTLFTLQSKWDFGSMGGWLFGALMVLVGVGFVGVFLPYNQTFDLIMAVAGCVVFSLYIVYDTWLIQRRLSAEEWVLANISLYLDIVNLFINILRILNNQSRD

SEQ ID NO: 2866 - protein, 237 aa, Saururus chinensis
MGRGRVQLKRIENKINRQVTFSKRRTGLLKKAHEISVLCDAEVALIVFSTKGKLYDYSTNAGMARILERYERYCYAEREVAVTSPDSEGSWWLEYGKLKARIEAQQRIQRQLMGEDLDALTPKELQQLENQLESALKHVKSRKNQVIYDSMVELRRKEKLLRDENTMMEKKIQEKKKERVQQAQWEQQIQSQNSPSFLPTLNIGYHQGTATETGEKEEAHPGHNTVMLAWLLRSSNN

SEQ ID NO: 2867 - protein, 490 aa, Arabidopsis thaliana
MESRKNSDRQMRRANCFSAGERMKTRSPSVIVIGGGFGGISAARTLQDASFQVMVLESRDRIGGRVHTDYSFGFPVDLGASWLHGVCKENPLAPVIGRLGLPLYRTSGDNSVLYDHDLESYALFDMDGNQVPQELVTQIGVTFERILEEINKVRDEQDADISISQAFSIVFSRKPELRLEGLAHNVLQWYVCRMEGWFAADAETISAKCWDQEELLPGGHGLMVRGYRPVINTLAKGLDIRVGHRVTKIVRRYNGVKVTTENGQTFVADAAVIAVPLGVLKSGTIKFEPKLPEWKQEAINDLGVGIENKIILHFEKVFWPKVEFLGVVAETSYGCSYFLNLHKATGHPVLVYMPAGQLAKDIEKMSDEAAANFAVLQLQRILPDALPPVQYLVSRWGSDVNSMGSYSYDIVGKPHDLYERLRVPVDNLFFAGEATSSSFPGSVHGAYSTGLMAAEDCRMRVLERYGELDLFQPVMGEEGPASVPLLISRL

SEQ ID NO: 2868 - protein, 196 aa, Triticum aestivum
AGRLREDVARRYFRQLISAVDFCHGRGVYHRDLKPENLLLDEAGNLKVADFGLSALAGHARPDGLLHTACGTPAYVAPEVLGGNGYDGAKADIWSCGVILYVLLVGALPFQDENLMSMYRKMQRGGFLCPSWVSKDARKLIGRLLDPNPSSRITIASLVESPWFKKTSPIPSPLLEPVPPSTPPLLPLSVTVAIRP

SEQ ID NO: 2869 - protein, 301 aa, Asarum caudigerum
AGLSSPPRERKRVRENLIFSLAFKFARFQNFRFSFSFAGGFIFFEFSSLFFFGLQEMGRGRVQLKRIENKINRQVTFSKRRTGLLKKAHEISVLCDADVALIVFSAKGKLYEYATNSSMETILERYERYSFAERELVADPESEGGWCLEYGKLKARVDALQKSHKHIMGEDLDSLSIKELQHLEQQLDVALKHIRSRKNQVMLDTISELQRKEKMLLEQNKALQKTMREKENAMVRQAQWEQDNQPQASRPSFMLSRPLPTLHIGSNYHQTRNTETEKQGDRPHSRSNSGIPAWMLSHMND

SEQ ID NO: 2870 - protein, 193 aa, Zea mays
MASPAGGESPAKPVLLHGDLDLWILEARLLPNMDMFSEHVRRCFAACRPPSSCGTKHPPPAAAGRRHHHHHRNIITSDPYVTLSVSGAVVARTAVIPNSQDPVWEERLAVPLAHRAADLEFQVKDNDTFGAQLIGTVAVPADRVVSGDEVEDWFPVIGTNGKPYKPDTALRLRFQFQPIADNPAYRHGIPGDP

SEQ ID NO: 2871 - protein, 284 aa, Arabidopsis thaliana
MALADSSCAGLETTESRLSCFFNKAIVNVGGDLVKLVPGRVSTEVDARLAYDTNGIIRKVHDLLRLYNEIDVPHDRLLFKIPATWQGIEAARLLESEGIQTHMTFVYSFAQAAAASQAGASVIQIFVGRLRDWARNHSGDTEIESAIKSGEDPGLALVKRSYNYIHKYGYKSKLMAAAVRNKQDLFSLLGVDYVIAPLKVLQSLKDSPAIPDDEKYSFVRKLTPETATHYHFTNKELVKWDQLSLASSMGPASVELLSAGVEGYANQAKRVEELFGKIWPPPNV

SEQ ID NO: 2872 - protein, 160 aa, Medicago sativa
MDFRLMGLMLQCYTALHQMMDLSDENVEKSSSHNAPTRSYVRDAKAMAATPADVKENPNSYVFVIDMPGLKSGDIKVQVEDDNVLVISGERKREEEKEGGAKYLRMERRVGKFMRKFVLPENPNTDAVSPVCQDGVLTVTVQKLPPPRPKKPRTIEVQIA

SEQ ID NO: 2873 - protein, 250 aa, Zea mays
MTSASELFSTRRSRPGRSDPALESDTSSYRHHSHHHHRRHGVHHHNQRHDSDGCDPLRRPTPRIRRFFHHPIQERSRPIRDVQGTSQYLNTDSTDTETQSSSFVNLNGSERLPGAVLLARDRLFERLRGVSLSSNSRSNRVSLDDQRESSFHSIDGDPIFQLAGLQVTYECNKKPQGLTQDAINCLHRQTFSSAEVKSEMRDCSICLESFTKGDMLISLPCTHSFHSSCLNPWLRACGDCPCCRRAIAKE

SEQ ID NO: 2874 - protein, 247 aa, Chlamydomonas reinhardtii
MAEANSRELALYSAKIAEQSERYQDMVEEMKKVAVLANEQELSVEERNLLSVSYKNLVGSRRASWRILQSIEQSEQAKGNEKRVGMIKRYRAVVEGELDKICHEILDLLDKYLVPSASTTEAAVFYLKMKADYHRYLSEYKTDEAKAAAAELTLAAYKVAQEKADELPTTNPIRLGLALNFSVFYYEVMNQPALACSLAKKAFDEAISDLDSLGEDSYKDSALIMQLLRDNLTLWTSEMQDDDKNRA

SEQ ID NO: 2875 - protein, 347 aa, Thermococcus kodakaraensis
MYRVAVIPGDGIGPEVIDGAVRVLKAVTGRVRFEYYEGGVDVFQECGSPIREEDLEEIRRSDAVLFGATTTPFDLPGYRSLILTLRKELGLYANLRIIPDLRTGREIVIVRENSEGLYFGIGAVVNGRAVDVRLITREGAERIARFAVEQAKARGSFITFVHKANVLTGDKFFRRIVREVAGEEGVEVRDAIIDSFTIKLVRNPWEHGVILSENLFGDILSDLATVHAGSIGIVPSGNYGDGIALFEPVHGSAPDIAGKGIANPIGAILSGAMLLDYLGLDGSLIRAAVRGYVVNGELTPDMGGRARTEDVVRGIIGEIEDLLSMDEVWRDEIRLSRLESDISRMAG

SEQ ID NO: 2876 - protein, 221 aa, Arabidopsis thaliana
MDSLATDPAFIDSDVYLRLGLIIEGKRLKKPPTVLSRLSSSLERSLLLNHDDKILLGSPDSVTVFDGRSPPEISIAHYLDRIFKYSCCSPSCFVIAHIYIDHFLHKTRALLKPLNVHRLIITTVMLAAKVFDDRYFNNAYYARVGGVTTRELNRLEMELLFTLDFKLQVDPQTFHTHCCQLEKQNSDGFQIEWPIKEACRANKETWQKRTPDSLCSQTTAR

SEQ ID NO: 2877 - protein, 462 aa, Glycine max
MTSRSGQGSGGGGSSRTRVGKYELGRTLGEGNFAKVKFARHVETRENVAIKILDKEKLLKHKMIAQIKREISTMKLIRHPNVIRMYEVMASKTKIYIVLEFVTGGELFDKIARSGRLKEDEARKYFQQLICAVDYCHSRGVFHRDLKPENLLLDANGVLKVSDFGLSALPQQVREDGLLHTTCGTPNYVAPEVINNKCYGGAKADLWSCGVILFVLMAGYLPFEETNLSALYKKIFKAEFTCPPWFSSSAKKLINKILDPNPATRITFAEVIENDWFKKGYKPPVFEQANVSLDDLDSIFSDSTDSQNLVVERREEGPMAPVAPVTMNAFELISKSQGLNLSSLFEKQMGLVKRETRFTSKCSADEIISKIEKAAGPLGFDVKKNNCKLKIQGEKTGRKGHLSVATEILEVAPSLYMVELRKSEGDTLEFHKFYKNLATGLKDIVWKAEPIDEEKDGANPSK

SEQ ID NO: 2878 - protein, 214 aa, Clostridium tetani
MKFFIDTANVEEIKKVAKWGVLDGVTTNPTLIAREGRDLKEVIEEICSIVDGPISAEVISLESEKMVEEAKELIKIHKNIVIKVPMCEEGLKAVSELTKLGIKTNVTLIFSAQQALLAAKAGATYVSPFLGRIDDIGSFGIQLVEDIVTIFTNFGIESEIICASIRTPIHVLECARVGGDIATVPYKVFAQMLKHPLTDRGIEQFLEDYKSMNK

SEQ ID NO: 2879 - protein, 1142 aa, Saccharomyces cerevisiae
MAINGNSIPAIKDNTIGPWKLGETLGLGSTGKVQLARNGSTGQEAAVKVISKAVFNTGNVSGTSIVGSTTPDALPYGIEREIIIMKLLNHPNVLRLYDVWETNTDLYLVLEYAEKGELFNLLVERGPLPEHEAIRFFRQIIIGVSYCHALGIVHRDLKPENLLLDHKYNIKIADFGMAALETEGKLLETSCGSPHYAAPEIVSGIPYQGFASDVWSCGVILFALLTGRLPFDEEDGNIRTLLLKVQKGEFEMPSDDEISREAQDLIRKILTVDPERRIKTRDILKHPLLQKYPSIRDSKSIRGLPREDTYLTPLSESNSSIDATILQNLVILWHGRDPEGIKEKLREPGANAEKTLYALLYRFKCDTQKELIKQQQVKKRQSISSVSVSPSKKVSTTPQRRRNRESLISVTSSRKKPISFNKFTASSASSSNLTTPGSSKRLSKNFSSKKKLSTIVNQSSPTPASRNKRASVINVEKNQKRASIFSTTKKNKRSSRSIKRMSLIPSMKRESVTTKLMSTYAKLAEDDDWEYIEKETKRTSSNFATLIDEIFEYEKYEQIRKEKEELERKVREAKAREELERRRRKQEEKERARKLLEKEDLKRKQEELKKQIEIDISDLEQELSKHKEEKLDGNIRSISAPMENEEKNINHLEVDIDNILRRRNFSLQTRPVSRLDPGIMFSSPTEEVSPVEPKRTENERLTTEKKILETIRRSKFLGSSFNIDKELKLSKMEYPSIIAPQRLSEERVVSDSNDGYESLILPKDGNGVSQLKDSTATTAPVSDGRLRKISEIRVPQFTRKSRHFSESNKRLSVLSMYSTKESFTNLVDILKNGNLDVNNQQSQRIPTPRSADDSEFLFETVNEEAEYTGNSSNDERLYDVGDSTIKDKSALKLNFADRFNGSNEAKQTDNLHLPILPPLNGDNELRKQNSQEGDQAHPKIKSMIPESGSSSHTEKEEENEEKEEKKPEQHKQEEDQEKREKVVDDMEPPLNKSVQKIREKNAGSQAKDHSKDHLKEHKQDKNTAIGNGSFFRKFSKSSDKTMELYAKISAKQLFNGLEKLLRGWTQYGLKNIKSHPNNLTLTGKLSSDNIFSLRSTLFEVNIYPRGKMSVVQFKKVSGSFKAVKKLVNEVENVLNKEGVLQK

SEQ ID NO: 2880 - protein, 160 aa, Zea mays
MSDSEEHHFESNADAGASKTYPQQAGTVRKNGFIVIKNRPCKVVEVSTSKTGKHGHAKCHFVAIDIFNGKKLEDIVPSSHNCDIPHVNRTEYQLIDISEDGFVSLLTSDGNTKDDLRLPTDETLVAQIKEGFESGKDLVVTVQSAMGEEQICALKDVGPK

SEQ ID NO: 2881 - protein, 161 aa, Bacillus sp. KSM-K16
MSVYDFSVKTSNGQDVSLSAYKGNVLLIVNTATKCGFASQFAGLEKLYNDYKEKGFYVLGFPSNQFLNQEPVADEDMEQVCKINFGVTFPLFAKTDVKGKHANPLFNYLKAAKKGMLSEEIKWNFTKFLVNRKGEVIKRYAPATKPETIEADVIEELKADA

SEQ ID NO: 2882 - protein, 491 aa, Azotobacter vinelandii
MGLFSVVVLGKEKQPTALVVGGGLAGLAAAWELQRDGWQVTLLEARSGVGGRSGLAGGEWIGSAKAQPLLNDYLARLKLKTQPAPEAVRGTGYLIDGAYFSAAELASRQPATAEGLKRYEQAIGALAASIKDPLDPASDRKLFALDQGNAARWLDELNLPITARQLVNQRIRSHYDEPSRLSLLYLAQQTRVYHGIDAGELRVARLPGGSQVLAQALAKELKTVKTGVRVSAISQDRAGVTAKVGDVGYSADYLVLAVPLRALGQIQFSPALPERHRGALQSTNYGWRDQLLLKFKSPVWESKARLSGNIYSNQGLGMLWVEPATKGGANVLINLSGDNARLLKAFGDRQVADQLLIRLHEHYPKARGAFAGYEIRRYSGDNGLGGAYLAYGPGQISRYWRLWEQPLERVAFAGEHTDPLYPGTLEGALRSGRRAAEQLRELHAGRPVPAPRITRLDQPAPPPAGAALVAGQPAENERGTGFFSRLTRLFR

SEQ ID NO: 2883 - protein, 448 aa, Zea mays
  unsure (1)..(448): unsure at all Xaa locations
MSAAATKVKRRVGKYELGRTIGEGTFAKVRFAKNTETGEPVAVKILDKEKVLRHKMAEQIKREISTMKLIKHPNVVRIYEVMGSKTKVYIVLEYVTGGELFDTIANQGRMREGEARSYFQQLINAVDYCHSRGVYHRDLKPENLLLDSYGNLNVSDFGLSALSQQIKDDGLLHTTCGTPNYVAPEVLEDQGYDGAMADLWSCGVILFVLLAGYLPFEDSNLMTLYKKISNAEYTFPPWTSFPAKRLLTRILDPNPMTENSCDFRITIPEILEDEWFKKGYKRPEFDEKYDTPLDDVDAVFNDSEEHHVTEKKEEEPVALNAFELISRSAGLNLGNLFDSEQEFKRETRFTSKCPPKEIIRKIEEAAKPLGFGVQKKNYKLRLEKVKAGRKGNLNVATEILXVAPSLHMVQVRKAKGDTLEFQKFYKNLSKTLKDVVWKSEDLQMRAAS

SEQ ID NO: 2884 - protein, 468 aa, Azotobacter vinelandii
MSLNADWMQRDLAVLWHPCTQMKDHERLPLIPIRRGEGVWLEDFDGKRYLDAVGSWWVNVFGHANPRINARIREQLESLEHVMLAGFSHQPAIELSERLVAITPAGLSRVFYADNGSSGIEVALKMSFHYWRNCGRTGKKRFVTLTNSYHGETVAAMSVGDVALFTDTYKALLLDTIKVPSPDCYLRPEGMSWEAHSRAMFAHMERTLAEHRDEIAAVIVEPLIQGAGGMRMYHPVYLELLREACDRYEVHLIHDEIAVGFGRTGTLFACEQAGIVPDFLVLSKALTGGYLPMAAVLTTDTVYRAFYDDYASLRAFLHSHTYTGNPLACAAALATLDIFEQDNVIERNKALAARMARATEHLKDHPHVAEVRQTGMALAIEMVAEKAGKVAYPWQERRGLKVYEHALSRGALLRPLGSVVYFLPPYVITPEQIDFLAEVASEGIDLATRDAVGVALPTGGPQTFHDPG

SEQ ID NO: 2885 - protein, 483 aa, Bacillus cereus ATCC 14579
MDKKATFVSIDKKAMYINGEWITLQEQIEVNNPATKEIFATVPKGGVTEAKQAVDAAHEAFKTWSKLTAADRATKLKKWFTLIDENKEEIAAIMTKEQGKPFAEALGEVNYANSFVEWYAEEGKRVYGEMIPAAHPNKRILVMKQPVGVMAAITPWNFPAAMITRKVAPALAAGCTAVVKPASQTPLTALKLAELAHEADIPKGVINIITGSAKAIADTWMEDGRVRKVSFTGSTEIGKELMASAAQTMKKVSLELGGHAPFIVMNDADLDKAVEAVIGSKFRNAGQTCICTNRVFVQEEVYEVFVEKFQKAVGQLKVGDGFGDGTTVGPLIDENAVSKVQEHIEDAIQKGGTVLYGGQKVAELEGHFIQPTVIGLANDTMLCMNEETFGPVAPVAKFKTVDEVIERANNTPYGLAAYIFTKDISQAFQISEALEYGIIGLNDGLPSVAQAPFGGFKESGIGREGGHFGIEEYLEIKYISLGL

SEQ ID NO: 2886 - protein, 250 aa, Brassica napus
MTKNYPAVSEEYQKAIEKCKRKLRGLIAEKNCAPIMVRLAWHSAGTFDCASRTGGPFGTMRFDDELAHGANNGLHIALRLLEPIREQFPTISHADFHQLAGVVAVEVTGGPEIPFHPGREDKPQPPPEGRLPDATKGCDHLRQVFLKQMGLTDQDIVALSGAHTLGRCHKDRSGFEGAWTSNPLIFDNSYFKELLSGEKEGLLQLPSDKALLDDPVFRPLVEKYAADEEAFFADYAEAHLKLSELGFADA

SEQ ID NO: 2887 - protein, 218 aa, Listeria innocua Clip11262
MKFFLDTASVSEIKRISELGLVDGVTTNPTIIAKEGRPFEEVIKEICSIVDGPVSAEVIGLEADKMVEEARILAKWAPNVVVKIPMTEEGLKAVHTLTAEGIKTNVTLIFTVSQGLMAAKAGATYISPFLGRLDDIGTDGMILIKNLKKVLDNYGLKAEIISASIRHIGHLEEAAEAGAHIATIPGSLFPKLWSHPLTDKGIEGFLKDWEAFSQKEGN

SEQ ID NO: 2888 - protein, 124 aa, Borrelia burgdorferi
MALNKEDILTWLEGAKTMEVVDLVTAIEEKFGVTAAVAAGVGGAVSAGSADSEEQTEFDVILMSFGDSKINVIKEVRAITGLGLGEAKALVEAAPKAIKEGLSKSDAEELKKKLEAVGAKVEVK

SEQ ID NO: 2889 - protein, 120 aa, Glycine max
MAPTVMMASSATAVAPFQGLKSAASLPVARRSTRSLGNVSNGGRIRCMQVWPAYGNKKFETLSYLPPLSTDDLLKQVDYLLRNGWIPCLEFSKLGFVYRENSTSPCYYDGRYWTMWKLPM

SEQ ID NO: 2890 - protein, 115 aa, Triticum aestivum
QGLKSTACLPVSRRSNGASLGSVSNGGRIRCMHVWPIEGIKKYETLSYLPPVSTEALLKAVDYLIRSKWEHSLEISRVGFILREHNASSGYYDGRYWTMWKLTMLGCTDATQVIN

SEQ ID NO: 2891 - protein, 354 aa, Agaricus bisporus
MAFKILLSLILALNAVQFIAAVPTRRAQCADGTTVSNEACCVLLPIIADIQPNLFENECGEEVHETLRASFHDAIGFSRAAGGGGADGSLVTFGDVETTFAANAGIDEIVETLRPFINSHNISAGDFIQFATVVGLTNCPGAPRIPFFLGRPDATAASPDGLVPEPFDSVTKILERFDDAGFTPTEVVALLASHTVAASDTIEPGLEGVPFDSTPGEFDRQFFIETMLKGTSFPGTGGNQGEALSPLPGELRLESDGLLARDERTACDWQLFATDQQKMASAFSDAMVKLSLVGQDKSQLIDCSDVIPRTIPLTNEPYFPADLTKDDLEQTCPDEFPDYPSNPSVTSVAPVPTS

SEQ ID NO: 2892 - protein, 503 aa, Mesorhizobium sp. BNC1
MALKQETLEILSRLGVAAELLTGGDLVVRSPVTGEEIAALRTVSAAEANAAIEKADVAFREWRMVPAPKRGELVRLLGEELRAAKADLGRLVSIEVGKIPSEGLGEVQEMIDICDFAVGLSRQLYGLTIATERPGHRMMETWHPLGVVGVISAFNFPVAVWSWNAALALVCGDAVVWKPSEKTPLTALACRAIFEKAAARAGGVPEGLLAVLVGARDVGEALVDHPKVPLVSATGSTRMGRDVGPRLAKRFARAILELGGNNAGIVCPTADLDMALRAIAFGAMGTAGQRCTTLRRLFVHESVYGQLVPRLRKAYESVSVGSPLTTNALVGPLIDKAAYDGMLKALEAARALGGKVVGGQRVENGHADAYYVRPALVEMPEQAGPVLEETFAPILYVMKYSDFNEALRLHNAVGAGLSSSIFTRDIQESERFLSVEGSDCGIANVNIGTSGAEIGGAFGGEKETGGGRESGSDAWKAYMRRATNTVNYSTALPLAQGVSFDIE

SEQ ID NO: 2893 - protein, 309 aa, Triticum aestivum
SPSSTTSSSTEAESRHKSSSKNSHGKKKAKVDWTPELHRRFVQAVEQLGIDKAVPSRILEIMGINSLTRHNIASHLQKYRSHRKHMIAREAEAASWTQRRQMYAAGGPAAAVKRQDSNMWTGPTIGFAPPHPPPPPPPPSPAAMQHYARPLHVWGHPTMDSPRMPMWPRHPMPRAPMPAWAPPPPPPSDPAFWHHPYMRGPAAYMPTHGTPCMAMPMTPKFPAAPVPVAMPCPVYAPPSTPSALASKNQQESQLQLQAQPSNESIDAAIGDVLSKPWLPLPLGLKPPSLGSVMGELERQGVANVPQACG

SEQ ID NO: 2894 - protein, 181 aa, Lycopersicon esculentum
MASSIVSSAAAATRSNVAQASMVAPFTGLKSAASFPVTKKNNNVDITSLASNGGRVRCMQVWPPINMKKYETLSYLPDFSDEQLLSEIEYLLKNGWVPCLEFETERGFVYRENNSSPGYYDGRYWTMWKLPMFGCTDATQVLAEVQEAKKAYPQAWVRIIGFDNVRQVQCISFIAYKPEGF

SEQ ID NO: 2895 - protein, 251 aa, Zea mays
MRKKLGTRFPAARIKKIMQADEDVGKIALAVPVLVSRALELFLQDLIDRTYEITLQSGAKTLNSFHLKQCVKRYSSFDFLTEVVSKVPDLGGADSCGDERVLPRRRKSNGSDPENDESRSSKMAIRNANTSPRGRGRGRGRGRGRPPTKRKEVGYVQFEDESSMFAEQGETLPGEGTVPEINSGNEITPQSTQPPPTAPAQATNSKVEEASTDHQSDWPMPDATGNIGVGPSGFGHLTVQVDEDEDYDNED

SEQ ID NO: 2896 - protein, 456 aa, Issatchenkia orientalis
MSLRNFARSATRAYSTAEPTLKERFAELLPGWQAEVKELKSKHGKTVIGEVLLEQAYGGMRGIKGLVWEGSVLDPVEGIRFRGKTIPDIQKELPKAEGSSEPLPEALFWLLLTGEVPTLAQTKAFSAELASRSALPKHVEDLLDTCPTTLHPMAQFSIAINALESESKFAKAYADGVNKKEYWKYTYEDSIDLLAKLPNVAAKIYRNVFKDGKVAPVNASLDYSHNFANMLGFGDNKEFVELMRLYLSIHSDHEGGNVSAHTTHLVGSALSSPYLSLAAGMNGLAGPLHGRANQEVLEWLVGMKKELGDDIFNKEKIEEYLWKTLNAGRVVPGYGHAVLRKTDPRYTAQREFALKHMPDYDMFKLVSNIYEVAPKVLAEQGKTKNPWPNVDSHSGILLQYYGLTQESYYTVLFGVARAFGVLPQLIIDRGLGMAIERPKSFSTQKYKELVENLNKA

SEQ ID NO: 2897 - protein, 286 aa, Glycine max
MHTLLRSTLRTKTASSLAYAAVSRSAQENLLQAPLLSRSNSTEASLAKDTSSNDVKNGQGFKGHSMLAPFTAGWQTTDLHPLVIEKSEGSYVYDINGKKYLDALAGLWATSLGGSEPRLVDAAIAQLKKLPFYHSFWNRTTLPSLDLAKELLEMFTARKMGKAFFVNSGSEANDTQVKLVWYYNNALGRPDKKKFIARAKSYHGSTLIAASLSGLPALHQKFDLPAPFVLHTDCPHYWRYHLPGETEEEFSTRLAKNLEQLILKEGPETVIHSNACKVHEHLFQWF

SEQ ID NO: 2898 - protein, 423 aa, Pseudomonas fluorescens
MKLSILGARVIDQPAGLDQVTDIHIDACKIVALGAAPAGFVAVETLDAQGLVAAPGLVDLNVALREPGYSRKGSIVSETRAAAAGGVTSLCCPPQTKPVLDTSAVAELILDRAREAGNTKVFPIGALSKGLDGEQLAELIALRDAGCVAFGNGLNSFRNTRTLCRALEYAATFGLTVIFNSQDHDLAEGGLAHEGPTASFLGLPGIPETAETVALARDLLLVEQSGVRAHFSQLTSARGAALIAQAQARGLPVTADVALYQLILTDEALIDFNSVYHVQPPLRTRADRDGLREAVKSGVISAISSHHQPHERDAKLAPFGATEPGISSVELLLPLALTLVEDGLLDLPTLLARLSAGPAQALQLPAGKLAVGAAADLVLFDPAASTVAGEAWRSKGDNCPFLGHSLPGVVRYTLMDGRITHQA

SEQ ID NO: 2899 - protein, 426 aa, Methanopyrus kandleri AV19
MLALRVLLKGKILIGGRVREREVLAEDGWIVKIGKRLNEEADLTLELGKRELAVPAPIDLHVHCRDPHPDYPFGFKTETRRFLLGGVATVVDMPNTRPAPTTPETYYEKEELARENAEIEVIVAGGVRDSQCTKELVEAGAYVLGEVFLATSTDAPAVPWSTLPEIFRELSPDGPLTIFHPELDELVAERPARNLYEHLKNRPPEAETTAVGLLAGLKVRYPSRIHLSHVTLPESVKIAKGADITVDVTPHHLFFDVLRVDPEDPVFKVNPPLRGRHHRLGLLRAVRRGDVDVLASDHAPHILEDEFEDVPSGVTGGEIILPAALTLHRRFGLSLRDAVAMITCRPAKLLGRDDLGEVAVGKRARITVVRMREFVVRAEEFGEEDRKFPYDGMRMFGEPVKLIDGTKVYDLKESRREGKPVILEGE

SEQ ID NO: 2900 - protein, 323 aa, Magnaporthe grisea 70-15
MPATLANKTFKLNNGVEIPAVGFGTFAAEGQPGQTYAATKAALEAGYRHLDCAWFYQNEDEIGNAIADFLKENPSVKREDLFICTKVWNHMHAPEDVKWSLDNSLKALRLDYVDLFLVHWPIAAERTEDRQVKLGPDGKYVINHELTENPEPTWRAMEELYEAKKARAIGVSNWTIDGLKKLFAVAKVKPAVNQIEIHPYLPNEELVRFCLDNDVLPSAYSPLGSQDQVPTTGERVRDDPGLNAVANRSNMTLAQALLGWGVKRGYVVLPKSSTPSRIKSNIEVPDLSEADYQDLWKVANGRKPTRFVDMKDTFGYDLWKESQ

SEQ ID NO: 2901 - protein, 470 aa, Mesorhizobium sp. BNC1
MLIGGEWTKGSGEPKEVINPATEEVIAMLPSATEADLDRALQSAQRGFREWQELSAEQRCDIIMRGCRILRERAAEIAPLITIEQGKPVEEARLEIIRAASIIEWDANEGRRAYGTIVPSDPGFNRYGIKLAIGPVAAFTPWNFPISSPGRKLGGALGAGCSVIIKSSEETPAATCALVQCLLDGGLPPEVINIVSGKSSMISAYLIASPVIRAITFTGSTPVGKHLAKLAAEAMKPVVMELGGHSPVIVFDDVDADKIARQAVAAKFRNAGQICTAPTRFIIQEKAHDAFVESFVKAASAIKVGNGLEADTQMGPLANSRRLRALEELVADARAKGATVATGGKRIGNRGYLFEPTVLTDVPDDADVVNVEPFGPIAPVVRFREFEEAIEIANRLPYGLCSYAFTNSQAYSHELAHRVESGIMSLNHFGTSQADTPFGGVKESGYGREGGYETLDAFMITKFVSQQITA

SEQ ID NO: 2902 - protein, 389 aa, Enterococcus faecalis V583
MSTKDVKELAIEQAKKFGGKLEVCPKVPIETKADLGIAYTPGVAAVSSAIHEKKERAYELTTKKNTVAVISDGSAVLGLGNIGPEAAMPVMEGKAALFKRFAGVDSIPLVLDTQDTEEIIQTVKFLAPTFGGINLEDISAPRCFEIEQRLIDELDIPVFHDDQHGTAIVVLAALYNSLKLINKKIEDIHVVINGGGSAGLSITRKFLAAGVKHIIIVDRAGILSETDTALPPHHAEIAKLTNREHRTGDLATALEGADVFVGVSAPGVLKPEWIQQMNEQPVIFAMANPVPEIFPDEALAAGAYIVGTGRSDFPNQINNVLAFPGIFRGALDARAKKITIEMQIAAAKGIAKLIPDNELTPTNIIPDPFQEGVAKVVAESVRNAVKETN

SEQ ID NO: 2903 - protein, 359 aa, Burkholderia cepacia R18194
MEIDTPRVGPGDVRIAVAYCGICGSDLHEYADGPHAIPVDTPHPLSRRTAPLTLGHEFCGTVVEVGEGVTALRAGDRVAVEPEYRCSQCAYCRSGSYNLCVSMGFAGLMGDGGMADFAVVPAYMLHRLPDGVSLEQAAVMEPAAVALHALRRGELRLGETCAVFGLGPIGLLLIMLAKLQGATTIVAVDVSPERLAAATRFGATHTFDARALGASALQDAIRAATGGLGVDASFEAAGLQTTFESAMHALRKGGRIVMVGLMPHAGFDAFRAVNDELTFTASVGYRHAYEDLLRIVASGALDLTSIVTRTVSLEDAVADGFDALLADRAQIKILVSPAQRPPRRAHTIGSIEHESSVGV

SEQ ID NO: 2904 - protein, 430 aa, Lactobacillus plantarum
MTTLIKNAQVWQAGQLQTTDILIAEGRIKAIGHQLHDQFGPADHVICADHHFVSPGFVDVHVHLRDPGQTAKETIATGTLAAAHGGFTTVGAMPNVDPVPDTPERVATMVARNQQEAHVHVAQYASITTGRTSEQLVDFAGIKAAGAFAVSNDGSGVQTAGTMFAAMQGAAKVGLPLAAHVEDDSLYHHGVMNAGPVADRLGLPGINNVSEAAQVARDVMLAEASGVHYHVCHVSTAESLRVIRNAKAAGINVTCEVSPHHLLLCDEDITMDNPMLKMNPPLRSAKDRAALVAGLLDGTIDMIATDHAPHTDAEKQGSMKTAAFGITGIETAFATLYTALVKTRLLTLGRLIELMSTRPTELFGLNTAGRLVVGAPADLTIIDLDHQYEIEAATMLSKGHNSPFIGWPVYGNVLMTLVDGKLAYGKETQA

SEQ ID NO: 2905 - protein, 85 aa, Glycine max
  unsure (1)..(85): unsure at all Xaa locations
MASSMISSPAVTTVNRAGAGMAAPFTGLKSMAGFPSXKTNDDSTSIATNGGXVQCIHVWPPIGNTKFETPSDLPDLDDAQVAKEI

SEQ ID NO: 2906 - protein, 755 aa, Zea mays
  unsure (1)..(755): unsure at all Xaa locations
MRWWKRSSSPSCPASSSSASTPASPARASTPRLIGGWGSGPSSRRDGSGASNDPQPRLIRARRMRYVVDDLEVGVSALGVDSPARRDAAAGFALETVSSAPISWSPSNMEVAPARSSSTPVLLPHPLPLPGEGESPCRGPGRPLPPPVPRMLDGEGKGPAADAPGVLETGSQRMTPLLARRVAVQTLPKXHEHNDFRLNGTTCCQRRKAFKEKFQDKNCDETLNFRLNIPAKSAPSSGFSSPVQSPRRLSNVDFSSAAISIQDTNVWSARSLWSSDAMGSSPPCDSPDKFAGGQERSPLSSPLRSPVLKSRNPSAPPSPMHPKLFPENHVSRPDGNGSASFHPLPLPPASVSPKQTNASHQLVPKAEMPSVAGQWQKGKLLGSGTFGCVYEATNRHTGALCAMKEVNIIPDDAKSVESLKQLEQEIKFLSQFKHENIVQYYGSETIEDRFYIYLEYVHPGSIHKYVHQHCGSLTEAVIRNFTRHILKGLAFLHSQKIMHRDIKGANLLVDINGVVKLADFGMAKHLSTAAPNLSLKGTPYWMAPEVVRATLDKSAGYDLAVDIWSLGCTIIEMFTGKPPWSGLEGPAAMFKVLRTDPPIPDNLSPEGKDFLRCCFKRNPTERPTANKLLEHPFIQTLNHYSPHSVVHSFSGIKSPDTVHSSARDKVPWKSDSYMRGKHANGETSSARSSESLAYRLMTPLPNLGTNSLSPPPLSSASSSGSAAHTPNSMHFSVPYHQPSPLPKPNGKEAINLVSH

SEQ ID NO: 2907 - protein, 124 aa, Borrelia burgdorferi
MALNKEDILTWLEGAKTMEVVDLVTAIEEKFGVTAAVAAGVGGAVSVGSADSEEQTEFDVILMSFGDSKINVIKEVRAITGLGLGEAKALVEAAPKAIKEGLSKSDAEELKKKLEAVGAKVEVK

SEQ ID NO: 2908 - protein, 458 aa, Lycopersicon esculentum
MAKTNGFMGHDMLAPFTAAWMIDMGPLVIDKAEGSYVYGVNGKKYLDSLSGLWCTVLGGSEPRLIEAASKQLNKSAFYHSFWNRTTKPSLDLAKELINMFTANKMGKVFFTSSGSEANDTQVKLVWYYNNAIGRPNKKKIISRKNAYHGSTYMTAGLSGLPSLHLKFDLPPPYILHTDCPHYWNYHLPGETEEEYSTRLANNLENLILKEGPETVAAFIAEPVMGGAGVIIPPATYFEKIQAVLKKYDILFIADEVICGFGRLGTMFGCDKYNIKPDLVSIAKALSGGYIPIGAVLVSEEISKVIMSQSNQLGVFCHGFTYSGHPVACAVALEALKIYKEKNITEVVNKLSPKLQEGLKAFIDSPIIGEIRGTGLVLSTEFVDNKSPNDPFPPEWGVGTYFGSQCQKHGMLVSFSGDHVNMAPPFTLSLEELDEMISIYGKALKDTEKRVEELKSQKK

SEQ ID NO: 2909 - protein, 639 aa, Zea mays
MDKNYGELYNILGWGEEYFAVNTEGHLSVKPFGRWTEPGQEIDVHSVIVEALATQPNDSTSKSQFPMILRFPDVLKNRIETLHNAFNSAMESTGYTSRYQGVFPIKVNQNKHVVQDMVRFGQQWNYGLEAGSKPELLIAMSCLPVTEAEPKPYLICNGYKDADYIALALSARAMGLNPIIVLEMEEELAIVLDQYKKLQQKLPDDDAVRKKFEPVIGIRAKLLTKLPGHFGSTAGKHGKFGMLADQIYEVAETLGKEGKLHWLQLLHFHIGSMIPTTGKVYDAVSEAAGIYCNLVNEHGAKWLATLDCGGGLGVDYDGTRSGDSDMSVAYGIQEYASAVVQAVRLKCDYNGVAHPVVCTESGRAMASHHSMIILETLSAIPEPQDEDTSEQLLNRIQDLSYKQPRAPVGGATAAVYSHAADLKKHGIEMYKLGKKLGKRVVADANTVYNYHMNLSVFSLLPDFWGIGQLFPMMPVSRLNEEPTLKGTLVDITCDSDGKIENFISRENTLPLHLFEPSLGGYYVAVLVSGAYQEAIAGKHNLFSGPTLVRVNSSTTKDGGFEIERVDLGPAADEIIGSMRYSVEEDIITVIEKKAKGTEEEERVWAWEMVEPLMTKALTTMPYLNEYKVPEPEPEPEPIP

SEQ ID NO: 2910 - protein, 171 aa, Zea mays
MYPYTFRAAASSSSSGTALGFALGRIGGTTRSGGVAAPGLVVPAAGVARGRSVSSTPAGSAPVPGDQGVGMDQPKQQQQPKVPPRDAAGGENKRDDMHKHTRDVMTHSFGEGYSTRSDEEGFGGVYGGNDPVEHPGAEIHPSHSEYDTSQGSEVKEKEKARHLKDEKHATA

SEQ ID NO: 2911 - protein, 483 aa, Brucella melitensis 16M
MDMQEELMYPNLTLIVGGEERNKGSAGTLCLTDPADGRELTIAPRAGRAEALQAAAAEKGFAEWSALSALERSKIMRRAADIMRERADAAARIMSMEQGKPLSEARGEWLGSADLLDWFAEEGRRVYGRIVPSRAPNIQIQVLKHPIGPVAAFTPWNFPAWNTMQKVAPALGAGCSVVIKPASDTPGTAWLIGKCLLEAGLPPKAVSVIWGTTSELSDALIKAPEIRKVSLTGSTRVGRIVAAQAGEYLKKVTMELGGHGPVIVAADADLDHLIPLAVQWKFRNCGQVCVSPTRFIVEASIHDEFIRRFSEKARELKVGKGVEEGAQMGPLTSQNQLETVLSMVEDALTKGAKIETGGNRIGDTGNFYEPTILSGMTAEMLAMNEEPFGPLALVMRVHSLDEAIAESNRLPVGLGAYLFTSSMTTAHRVQNHLQAGMLGVNHFALALPETPFGGVRDSGFGSEGGLEGIEAYLTTMTVTTMMV

SEQ ID NO: 2912 - protein, 287 aa, Triticum aestivum
  unsure (1)..(287): unsure at all Xaa locations
MSAPPPPASSDDDGKPADEEGVEIREVWANNLEAEFAVIRDVVDDYPYIAMDTEFPGIVCRPLGSFRSNDEYNYATLKANVDMLSLIQLGLTLSDENGALPARGTGGRPCAWQFNXRGFDPRSDPANADSIDLLRNSGIDFDRFTTEGADTGHFAELLMSSGVVLNDAVYWVTFHAGYDFGYLLKILTCNSLPDTQAGFFKLMKIYFPTVYDIKHLMKFCNSLHGGLNKLAELLDVERVGESHQAGSDSLVTSCAFWKLKDSFFAGSTEKYAGVLYGLNAENGVSAH

SEQ ID NO: 2913 - protein, 484 aa, Rubrivivax gelatinosus PM1
MKQFLNFIDGEFVATDKTFANRAPVDNRVLGLVHEAGRAEVDAAVAAARGALKGEWGRMPVAKRVELLYAVADEINRRFDDFLAAEIADTGKPLSLASHIDIPRGAANFKVFADIIKNVPAETFEMATPDGGQALNYAVRTPVGVVGVVCPWNLPLLLMTWKVGPALACGNTVVVKPSEETPATATLLGEVMQKVGMPKGVYNVVHGFGPDSAGAFLTQHPDVDAITFTGETRTGEAIMAAAAKGVRPVSFELGGKNAGIVFADADFDKAVAGITRSAFENCGQVCLGTERVYVQRPIFEKFVQALKAKAEALKIGPSEEPGVGLGPLISAEHRDKVLSYYRKAVEQGATVVTGGGVPKMSGALAEGHWVQPTIWTGLPESAAVIREEIFGPCCHIAPFDTEEEAIALANATDYGLATTVWTQNLGTAHRVARQVEVGICWINSWFLRDLRTAFGGAKASGIGREGGVHSLEFYTELRNVCVKL

SEQ ID NO: 2914 - protein, 456 aa, Zea mays
  unsure (1)..(456): unsure at all Xaa locations
SFNLILEGSITKSHRNLDLVTISAGAKGPRQPWHDLHCRIDGPAAYDVLTNFEQRWRKATKWRDRFRRVSHWKDDALIKLERISWILSPSPNVPNNHPSLWVSKEEDHENWHVQVFPRVRSGSLKGFPSDCKAASKLNLVCRKNLVIDKSIHTAYVRAIRSAQHFIYIENQYFLGSSYAWPSYVNSGADNLVPIELALKIASKIKAGERFAVYVVIPMWPEGVPTAASVQEILFFQAQTMEMMYKIIADELKATDNKDMHPEDYLNFFCLGNREEPPSNGSPESEKSTDKSAAALASKYRRFMIYVHAKGMIVDDEYVILGXQTSTRDPWLVLEILRSQWVHTSLIMHGLQRMDILTXQVYGYRTSLWAEHLGTVDDRFKDPSSLECVRFVNQIAVENWQRFTAEEMSTLQGHLLKYPVKVEADGKISPLSDQECFPDVGGKILGAPTSLPDSLTM

SEQ ID NO: 2915 - protein, 99 aa, Triticum aestivum
  unsure (1)..(99): unsure at all Xaa locations
HLHPCKKLEDIVPSSHNCDVPHVNRTEYQLIDISEDGFVSLLTDNGNTKDDLKLPTDETLLGQIKXMGFAEGKGPWVVVXSCPXMGEGRIIARPDIGHK

SEQ ID NO: 2916 - protein, 175 aa, Triticum aestivum
MAPTVMASSVTSVAPFQGLKSTAGLPVSRRSNGASLGSVSNGGRIRCLQVWPIDGIKKVEILSYLPPLSTEALLKQVDYLIRSKWVPCLEYSKVGFIFREHNASPGYYDGRYWTMWKLPMFGCTDATQVINEVEEVNKEYPDAYVRIIGFDNMRQVQCVSFIAFKPPGCEESGKA

SEQ ID NO: 2917 - protein, 393 aa, Burkholderia sp. TH2
MLSAEHRAIVKATVPLLESGGEALTTHFYKTMLAEYPSVRPLFNQAHQQSGDQPRALANAVLMYARHIDQLEQLGGLVSQIVNKHVALNILPEHYPIVGACLLRAIREVLGAEIATDAVIEAWGAAYQQLADLLIGLEENVYVEKETATGGWRGTRAFVVARKVKESDEITSFYLRPADGGELLEFHPGQYIGLKLIVDGEEIRRNYSLSAAANGREYRISVKREPNGKASNYLHDSVNEGATLDLLTPSGDFTLEHNDKPLVLISGGVGITPTLAMLNAALQTSRPIHFIHATRHGGVHAFRDHIDELAARHPQLKRFYVYEKPRHDDEAHHAEGYIDEARLIEWLPATRDVDVYFLGPKSFMQAVKRHLKTIGVPEKQSRYEFFGPASALD

SEQ ID NO: 2918 - protein, 330 aa, Yersinia pestis KIM
MPKVHAQTMRNDNMTDKLTSLRQITTVVADTGDIAAMKLYQPQDATTNPSIILNAAQIPEYRKLIDEAIAWAREQSSDHAQQIVDATDKLAVNIGLEILKLIPGRISTEVDARLSYDTVASVAKAKRLIKLYNEAGISNDRILIKLASTWQGIRAAEQLEKEGINCNLTLLFSFAQARACAEAGVFLISPFVGRILDWYKANGDQKEFAPSEDPGVVSVTEIYQYYKKHGYKTVVMGASFRNLGEIIELAGCDRLTIAPSLLKELAESEGPVERKLAYTGEIQAKPAPLTEAEFYWQHNQDPMAVDKLADGIRKFAIDQGKLEKMISDLL

SEQ ID NO: 2919 - protein, 174 aa, Triticum aestivum
  unsure (1)..(174): unsure at all Xaa locations
MRTAAAAPLLSAAGEIPPVAPAGSQWASWEVDDWEFADWRSESASEADVAVVGGPRLVFAPPSREEAEEATAELREAIDRVYFKETPVEVVKEHDQELSKLGADALIPAMPGHVVQAFTLXHSSLEAQSVVASLASDKNVWDPVLKNERVMEFSKSPQQTLVNIFLRAPTLLTQ

SEQ ID NO: 2920 - protein, 384 aa, Zea mays
DSVLFDHDLESYALYDTNGREVPQELVEKIGKVFETILEETGKLREGTNEDMSIAKAIAIVMDRNPQLRQEGIAHEVLQWYLCRMEGWFATDADSISLQGWDQEVLLPGGHGLMVRGYRPVINTLAKGLDIRLNHKVVEIVRHRNRVEVTVSSGQTFVADAAVVTVPLGVLKAKTIRFEPRLPEWKEEAIRELTVGVENKIVLHFGQVFWPNVEFIGVVSSSTYGCSYFLNLHKATGHPVLVYMPAGRLARDIEKMSDEAAAQFAFSQLKKILPNAAEPINYLVSRWGSDENTLGSYTFDGVNKPRDLYEKLRIPVDNLFFAGEATSVKYTGTVHGAFSTGVMAAEECKMRVLERFRELDMLEMCHPAMGEDSPVSVPLLISRL

SEQ ID NO: 2921 - protein, 198 aa, Pyrococcus horikoshii OT3
MALITRKSFILVGVPPIMKSLIPIVLATLVILGMGCIGGGEEKMSLKVSSVFGNNEFIPAKYTCEGVDINPPLKIEGLSDNVKSLVIIVDDPDAPMGTFTHWIAWNIPPVTEIPEGIPKQGEVDKPIHIIQGRNDFGRIGYNGPCPPRGHGVHHYHFKVYALDTTLNLKPGASRKELEKAMEGHVIQYGELVGLYERK

SEQ ID NO: 2922 - protein, 213 aa, Triticum aestivum
MGVEVCVKAAVGHPDTLGDCPFSQRVLLTLEEKKVPYEMKLIDVQNKPDWFLKISPEGKVPVFNGGDGKWIPDSDVITQVIEEKYPTPSLVTPPEYASVGSKIFSCFITFLKSKDPNDGSEKALLTELQALEEHLKAHGPFINGQNISAADLSLAPKLYHLQVALEHFKGWKIPEDLTNVHAYTEALFSRESFIKTKAAKEHLIAGWAPKVNA

SEQ ID NO: 2923 - protein, 193 aa, Capsicum chinense
MDGLYWIKSTQDEWVRKYSDLSNVYLFGSSCGGNIAYHAGLRVAAGAYKELEPVKIKGLILHQPYFSGKNRTESEEKLKDDQLLPLHAIDKMFDLSLPKGTLDHDHEYSNPFLNGGSKHLDDVIAQGWKILVTGVSGDPLVDNARNFANFMEEKGIKTFKLFGDGYHAIEGFEPSKAAALIGAPKDFICATTN

SEQ ID NO: 2924 - protein, 494 aa, Bordetella bronchiseptica RB50
MTIGARLQHVIDGGPWPSIHCNGRVGSLIGGDIVPGNGAMIEVLDASTGEPLFRYLDGSDGLVRRAAESAAAAQVRWAVMPADGRAAVLLAVSAAIRANLARLAELEAVTAARPIRDCRAQVDRVADMFQYYAGWCDKFYGDVIPVPNQYLNYTMREPIGVLLHIVPWNSPLFMAAWHLAPSLATGNAVLLKPSELTPLSAIALVRIAESAGLPTGLVAVLAGLGHTMGNAAIEHPLVRKIGFVGSPETGAKVAGAAARVVKPCVLELGGKSANIVFPDADLDQLCEATVKSMFIGAGQTCVAPSRLIVHRSLEQQVVERLLDAASTLEMGLPELDSTAIGPIHNRRQFDHVNRMIEQGRRDGARCRQAGNAVPQRGLYVPPTIFTGVARDGALARQEVFGPVMACLPFDTEQEAIDLANDTEFGLAGAVWTHDVKRAHRVAAAINAGTVWINTYKSTDIRSPFGGIGLSGYGRSSGHEALQEYTRLKSIWVAT

SEQ ID NO: 2925 - protein, 261 aa, Persea americana
QVHPNSYALVVSTENMTLNWYSGNNRAMLVTNCLFRMGGAAILLSNRWSDRRRSKYQLVHTVRTHIGADDRAFNCVSQEEDEAGKVGVSLSKDLMVIAGEALKSNITTLGPMVLPMSEQLLFFATLAARKVFKMKIKPYIPDFKLAFEHFCIHAGGRAVLDELQKNLELSDWQMEPSRMTLYRFGNTSSSSLWYELGYSEAKGRVMKGDRMWQIAFGSGFKCNSAVWRALRSVNPAKEKSPWMDDIDSFPVHVPKVTTIQS

SEQ ID NO: 2926 - protein, 443 aa, Ralstonia eutropha JMP134
MDAAKTVIPDLDALWMPFTANRQYKAAPRLLASASGMYYTTHDGRQILDGCAGLWCVAAGHCRKEIAEAVARQAATLDYAPPFQMGHPLSFEAATKVAAIMPQGLDRIFFTNSGSESVDTALKIALAYHRARGEGQRTRFIGRERGYHGVGFGGMAVGGIGPNRKAFSANLMPGTDHLPATLNIAEAAFSKGQPTWGAHLADELERIVALHDPSTIAAVIVEPLAGSAGVLVPPVGYLDKLREITTKHGILLIFDEVITAFGRLGTATAAERFKVTPDLITMAKAINNAAVPMGAVAVRREVHDTVVNSAAPGAIELAHGYTYSGHPLAAAAAIATLDLYQRENLFGRAAELSPVFEAAVHSVRSAPHVKDIRNLGMVAGIELEPRPGQPGARAYEAFLKCLERGVLVRYTGDILAFSPPLIISEAQIAELFDTVKQALQEVQ

SEQ ID NO: 2927 - protein, 381 aa, Zea mays
  unsure (1)..(381): unsure at all Xaa locations
AGRNKYDAEEAISLVEALAVQLTQREGELIYEKAEVKKLANFLKQAXLKNARKVAEEERALALAEIEKARAAIEKVEKAWRVLSLAEPPCGIIPPARHDLSSREKSEIEELRKEVREARRIKMLHQPSKVMDMEFELQALRTLISEKTQLCNQLKKELAMIKRLEDDSSGLFELEGSNTLGSQLCIIPRVDGASNITNCPIQWYRVISGGTRELISGATKFMYAPEPFDVGRLLQAEIVLNADKIIVQTDGPVDNAAGLERYVDSLMKRTDIEFNVVVTQMNGKDYSSNSVHVFHIGKLRIKLRKGWSTKARESYSTTMKLCGSRGGGNAAARAVFWHPRKGSSYTLAFETDRDRNAAIMIARKFASNCNIALAGPGDQGT

SEQ ID NO: 2928 - protein, 362 aa, Saccharomyces cerevisiae
MTTAVRLLPSLGRTAHKRSLYLFSAAAAAAAAAATFAYSQSHKRSSSSPGGGSNHGWNNWGKPAALASTTPLVHVASVEKGRSYEDFQKVYNAIALKLREDDEYDNYIGYGPVLVRLAWHISGTWDKHDNTGGSYGGTYRFKKEFNDPSNAGLQNGFKFLEPIHKEFPWISSGDLFSLGGVTAVQEMQGPKIPWRCGRVDTPEDTTPDNGRLPDADKDAGYVRTFFQRLNMNDREVVALMGAHALGKTHLKNSGYEGPWGAANNVFTNEFYLNLLNEDWKLEKNDANNEQWDSKSGYMMLPTDYSLIQDPKYLSIVKEYANDQDKFFKDFSKAFEKLLENGITFPKDAPSPFIFKTLEEQGL

SEQ ID NO: 2929 - protein, 156 aa, Corynebacterium diphtheriae NCTC 13129
MSILDTEVTLINGEKASMDQWAGHCLLIVNTASECGYTPQLETLEELYEDYAMRGFFVIGVPCNQFGEEEPGKDAQVARRYEEKFGVRFPLLAKSDVNGPNTIELYKKLKGDGPDIEWNFEKFIVAPSGEVVGRFAPSLDPDDMKIINVLEEYLPI

SEQ ID NO: 2930 - protein, 424 aa, Saccharomyces cerevisiae
MANPTTGKSSIRAKLSNSSLSNLFKKNKNKRQREETEEQDNEDKDESKNQDENKDTQLTPRKRRRLTKEFEEKEARYTNELPKELRKYRPGKGFRFNLPPTDRPIIYADGVFDLFHLGHMKQLEQCKKAFPNVTLIVGVPSDKITHKLKGLTVLTDKQRCETLTHCRWVDEVVPNAPWCVTPEFLLEHKIDHVAHDDIPYVSADSDDIYKPIKEMGKFLTTQRTNGVSTSDIITKIIRDYDKYLMRNFARGATRQELNVSWLKKNELEFKKHINEFRSYFKKNQTNLNNASRDLYFEVREILLKKTLGKKLYSKLIGNELKKQNQRQRKQNFLDDPFTRKLIREASPATEFANEFTGENSTAKSPDDNGNLFSQEDDEDTNSNNTNTNSDSDSNTNSTPPSEDDDDNDRLTLENLTQKKKQSAN

SEQ ID NO: 2931 - protein, 476 aa, Bacillus cereus ATCC 14579
MQNKIIVMFQKDFRLYDNPALFEAVQSGEVLPVYIQDETFSIGSASKWWLHHAVIDVKKQLEALGSTLIIRKGRTEEEILSLIEQLDITAVYWNICYDPDRLQSNQKMKMMLEDKGIICKEFNSHLLLEPWIIKKKDNTEYKVFTPFYNAFQKQVIPKPFSRVQSIKWGNSLPASLSVSELQLLPIIPWTSHMEVIWDPTEEGAYKTFKKFFSSKLVSYSEGRDFPGQNVHSMLAPYLSFGQISVKLMFHYLINKSTERQCSLFEKQVNSFIRQLIWREFSYYLLYHYPFTVYKPLNKSFENFPWDKEEELLRVWQKGKTGYPFIDAGMRELWQTGFMHNRARMAVASFLVKHLLIPWQEGAKWFMDTLLDADIANNTMGWQWVAGSGADASPYFRIFNPITQGEKFDKNGEYIRRWVPELRDIPNKYIHKPWEAPEHILQKSNIKLGDTYPFPIVDHKAARERALCAYKSMKEFV

SEQ ID NO: 2932 - protein, 158 aa, Guillardia theta
MDQEQYNIINDNGASETTPIKAGNCKKGGLLVIKGNPCKIIDISTSKTGKHGHAKAIITAVDIFTGKKYQESAPTSHNLDQPNLTKTEYQLIHIEEDGFVSLMDEDGNIREDLSLDLKNDEIHVKIKNEFDQSKEIVVTVMKCLQKEKIISFKENNKI

SEQ ID NO: 2933 - protein, 433 aa, Neisseria meningitidis Z2491
MPSEHQHISSLLDFDRTHLLHPYTSMTDPLPVYPVKRAEGVFIELADGTRLIDGMSSWWCAIHGYNHPVLNQVVETQIKQMAHVMFGGLTHESAVELGKLLVGILPQGLDRIFYADSGSVSVEVALKMAVQYRQARGLMAKQNIATVRRGYHGDTWNAMSVCDPETGMHHIFGSTLPQRYFVDNPKSRFDDEWDGADLQPVRALFEAHHADIAAFILEPVVQGAGGMYFYHPQYLRGLRDLCDEFDIVLIFDEIATGFGRTGKMFACEHAEVVPDIMCIGKGLSGGYMTLAAAITSQKVTETISRGEAGVFMHGPTFMANPLACAVACASVKLLLSQDWQANIRRIESILKGRLKAAWDIRGVKDVRVLGAIGVIELDKGVDMARFQADCVAQGIWVRPFGRLVYLMPPYIISDGLLTELADKTVQILKEHSK

SEQ ID NO: 2934 - protein, 333 aa, Saccharomyces bayanus
MSEHEDKKQKVGGSSLDQLKNAGTHVVADSGDFESISKYEPQDSTTNPSLILAASKLEKYEKLIDAAVEFGRKHGKTDHEKVENAMDKILVEFGSQILKIVPGRVSTEVDARLSFDKKATVKKALHIIKLYKDMGVPKERVLIKIASTWEGIQAAKELEAKHGIHCNMTLLFSFTQAVACAEANVTLISPFVGRIMDFYKERSGEDYTGETDPGVLSVRKIYSYYKRHGYKTEVMAASFRNLDELKALAGIDDMTLPLNLLQQLHESTDPIENKLNAETAKQEGVEKVSFINDEPHFRYVFNEDQMATEKLSDGIRKFSVDIEALYELVEKKM

SEQ ID NO: 2935 - protein, 335 aa, Saccharomyces bayanus
MSEPAQKKQKVANNSLEQLKAAGTVVVADTGDFNSIAKFQPQDSTTNPSLILAAAKQPAHAKLIDVAVAYGKKHGKTTAEQVESAVDRLLVEFGKEILKIVPGRVSTEVDARLSFDTQATIDKARHIIKLYEQEGVSRERVLIKIASTWEGIQAAKELEEKDGIHCNLTLLFSFGQAVACAEAQVTLISPFVGRILDWYKASTGKEYAGETDPGVVSVKSIYNYYKKYGYKTIVMGASFRSTDEIKNLAGVDYLTISPQLLDTLMNSTEPFPRVLDPATAKKEAGDKISYINDEPKFRFDLNEDAMATEKLSEGIRKFSADIVTLFDLIEKKVTA

SEQ ID NO: 2936 - protein, 117 aa, Zea mays
  unsure (1)..(117): unsure at all Xaa locations
SVLPAPDGPYAPVPPNGVNACPGAAHASAHASAHASSLSSAVPPRSPNLSPRPLPVPHHGHGSAKVPLWKXPLSPSKWKEEHFVLASLSMWGALFYGGFKFFGGKKEDKIEVASGQT

SEQ ID NO: 2937 - protein, 285 aa, Oceanobacillus iheyensis HTE831
MAIQWFPGHMAKAKREVEEKLKLVDFVIELVDARAPLSSQNPMLKQVLNNKPKLIVLMKKDLADQEVTKRWVDKFNEDGTQAIDVNVNHKGDIQKVIQQAKLLGQDKMEKLKRKGIQPRPARAMIVGIPNVGKSTLINRLANKKIAKTGDRPGITKQQLWIKVKKDFELLDTPGILWPKFEEEVVGYRLAAIGTIKDQLLPLPDVTAFIIRYMSEHYPNQLKDRYQLEEIEDMVEVFESIGRIRGALESGGQVNYDKVADIVIRDLRVGRLGTITLEQPEDSSNS

SEQ ID NO: 2938 - protein, 109 aa, Brassica napus
MSGVWVFKNGVIRLVENPNQSGGVTHGRRNVLVYLPTGEVVSSYSSLEQILMSLGWERYFSGDSDLIQYHKRSSIDLISLPRDFSKFNSVYMYDIVIKNPNTFHVREFH

SEQ ID NO: 2939 - protein, 483 aa, Pseudomonas stutzeri
MNTKLFINNVWVNSSDQQTFERKHPVSGEVMTECANSTVMDALKAAQAAQEAFQTWKTVGPSERRRLLLRVAEVMESKTPEFIEVMAKEVGASALWAGFNVQMSANVFREAASLATQIQGETIPTDKSDTLSMTLRQPVGPILSIVPWNGTAVLAARAIAYPLVCGNAVVFKGSEFSPATHALITQRVQEAGLPAGVLNYLNSSPDRSPEIADALISAKEIRRINFTGSTRVGSIIAQKAAQHLKRCLLELGGKSPLIVLDDADIDAAVKAAVFGSFLVQGQICMSTERLVVDEKIADEFAAKFAEKAKRLSAGDPCVTGDCIIGPMVSPNSGERINGLFKDAIDKGATVACGGMAQGAVMPATILDHVKSNMRIYDEETFGPITVVIRCSGEAEAIRIASDSAYGLSSGVFGRDINRALRVGMSIEYGSVHINGSTVQSEAQAPYGGTKNTGYGRFDGRAVIDEFTELKWLTIEPFEQQYPF

SEQ ID NO: 2940 - protein, 370 aa, Clarkia breweri
MGSTGNAETQLTPTHVSDEEANLFAMQLASASVLPMVLKAAIELDVLEIMAKSIPHGSGAYISPAEIAAQLPTTNPDAPVMLDRVLRLLASYSVVTCSLRELPDGKVERLYGLAPVCKFLTKNEDGVSLAPLCLMNQDKVLMESWYYLKDAILDGGIPFNKAYGMTAFEYHGTDPRFNKVFNRGMSDHSTITMKKIFEMYTGFEALNTIVDVGGGTGAVLSMIVAKYPSIKGINFDLPHVIEDAPIYPGVEHVGGDMFVSVPKGDAIFMKWICHDWSDEHCLKFLKNCYAALPEHGKVIVAECILPLSPDPSLATKGVIHIDAIMLAHNPGGKERTEKEFEALAIGAGFKGFKVACCAFNTYVMEFLKTA

SEQ ID NO: 2941 - protein, 437 aa, Glycine max
MKVAKGRILVGKYELGKTIGEGSFAKVKFARNVQNGNYVAIKILDRKHVLRLNMMEQLMKEISTMKLINHPNVVRILEVLASKTKIYIVLEFVDGGELFDKIAANGRLKEDEARNYFQQLINAVDYCHSRGVYHRDLKPENLLDSNGVLKVSDFGLSTYSQKEDELLHTACGTPNYVAPEVLNDRGYVGSTSDIWSCGVILFVLMAGYLPFDEPTHMALYKKIGRAEFSCPSWFSPQAKKLLKHILDPNPLTRIKIPELLEDEWFKKGYKPTSFTEEEDLNVDDVVVAFNESNENLVTERKEKPVSMNAFELICRSQSFNLDSLFEKQTGQVKQETSFTSQCPANEIMFKIEEAAKPLGFNVYKRNYKMKLQGDKSGRKGHLSVATEVFEVAPSVHMVELRKTGGDTLEFHKFYKIFSSGLQDIVWHDTEGKKNMKN

SEQ ID NO: 2942 - protein, 168 aa, Triticum aestivum
  unsure (1)..(168): unsure at all Xaa locations
MAAASSATSVHDFTVKDASGKDVDLSVYKGKVLLIVNVASQCGLTNSNYTELSQLYPKYKDQGFEILAFPCNQFGGQEPGTNDEIVQFACTRFKAEYPIFDKVDVNGSNVSPLYKFLKSSKGGLFGDSIKWNFSKFLVDKEGHVVDRYAPTTSPLSIXKDIKKLLGSS

SEQ ID NO: 2943 - protein, 499 aa, Mesorhizobium sp. BNC1
MKSLEGSRQELFIGGRFRAPSSGRFIPSFDPTTGEVWYEFAEADAADVDAAVTSATKAFHNPAWRRMTQTDRGKLIRRLAELVLEHADELALMETRDNGKLIKEMMAQMRAMPDSYIYFAGMADKLQGDTIPVNKLDSLNYSQREPLGVVGMITPWNSPLMLLTGTLAPCLAIGNTVVVKPSEHATASTLALAELVVEAGIPEGVVNVVTGTGAVTGEALTRHPGLAKIVFTGSTATGRRIAANAAENLIPCQMELGGKSPHVVFSDVDIERAVNGVVSGIFAAAGQTCVAGSRCFVEANIYDRFLEALVERTRHIRVGHPMEESTDVGPLAMKSQLEKIEGYVASGARDGAKIAVGGRRPKDGDLARGWYFEPTVMADARNDMKFMRDELFAPVVGVMPFRDEAEMITLANDTEYGLASGIWTRDIDRAMRFASQIDAGTVWINTYRSAAYMSANGGFKNSGYGRRGGFDVMREFSRSKNVLIDYSGAMQDPFVIRLK

SEQ ID NO: 2944 - protein, 439 aa, Pyrococcus horikoshii OT3
MIREKALEFHKNNFPGNGKIEVIPKVSLESREELTLAYTPGVAEPCKEIARDPGKVYEYTSKGNLVAVVSDGSRILGLGNIGPLAGLPVMEGKALLFKRFGGVDAFPIMIKEQEPNKFIDIVKAIAPTFGGINLEDIASPKCFYILERLREELDIPVFHDDQQGTAAVVLAGLLNALKVVGKKISEITLALFGAGAAGFATLRILTEAGVKPENVRVVELVNGKPRILTSDLDLEKLFPYRGWLLKKTNGENIEGGPQEALKDADVLISFTRPGPGVIKPQWIEKMNEDAIVFPLANPVPEILPEEAKKAGARIVATGRSDYPNQINNLLGFPGIFRGALDVRARTITDSMIIAAAKAIASIVEEPSEENIIPSPLNPIVYAREARAVAEEAMKEGVARTKVKGEWVEEHTIRLIEFYENVIAPINKKRREYSKAITRA

SEQ ID NO: 2945 - protein, 484 aa, Burkholderia cepacia R18194
MTAEYTLQHRIAGEACDAAQGEWFEKFEPCTGHLLARVAAGTGADVDRAVRAARAEFDGGHWSRLPGAARAKLLHRLADLLEHDAERFVELLVREQGRPALEVRMMDLPMSIDTLRYFAGWADKLEGRQIPTGGFMGRPTVNYTVREAVGVAGLIVPWNAPLMIACWKLAPALAAGCTVVIKPSEDAPLAVGALADLAAQAGFPPGVVNLVHGIGASVGAALVNHPGVDKISFTGSTEVGRTIAREAGARFKRLTLELGGKAPQIIFDDANLEQAIAGVAMGLFVNQGQTCAAGTRVLVQRRHYDDVVGALAHAARSVKVGTPFDPDTQMGALISARHADRVKTHIAAALRDGATMVAGDEPVPSQGFFVRPTVFANVDPAMRIARDEVFGPVGTIIPFDTEDEAVALANDTVYALSASLWTRDLTTAHRTAARLRVGAVAVNAWSPLDARLPWGGFKESGVGRDLSQSGLDAYLEEKVVTIAM

SEQ ID NO: 2946 - protein, 362 aa, Rickettsia sp. RDa420
WQDVIDISKVYSEADCFTYDPGFMSTASCRSTITYIDGDQGILRHRGYDIKDLAEKSDFLEVAYLLIYGELPNSKQYNDFTKKVAHHALVNERLHYLFQTFCSSSHPMAIMLAAVGSLSAFYPDLLNFFKEADYELTAIRMIAKIPTIAAMSYKYSIGQPFVYPDNSIDFTENFLHMMFATPCEKYKVNPVIKNALNKIFILHADHEQNASTSTVRIAGSSGANPFACVSTGIASLWGPAHGGANEAVINMLKEIGSVENIPKYIAKAKDKNDNFRLMGFGHRVYKNYDPRAAVLKETCKEVLKELGQLDNNPLLQIAIELEAIALKDEYFIERKLYPNVDFYSGIIYKAMGIPPQMFTVLF

SEQ ID NO: 2947 - protein, 537 aa, Glycine max
  unsure (1)..(537): unsure at all Xaa locations
TRPQKFGWVSLVSHLRLSVLLLSVSLGNSASLQENFVQCLNLNSDRTFPFNPLIYTPKSPSFTSVLDSSGKNQRLLVPSTPKPKFIFTPTRDSHVQAAVICSKKLGIHLRVRSGGHDFEGVSYVSEXESPFIVVDLIKLRDINVDIKSNTAWVQAGATTGELYYRIYEKSSLHGFPAGICTSLGIGGHITGGAYGSMMRKYGLGVDNVLDAKIVDANGRILDREAMGEDLFWAIRGGGGGSFGILLWWKIKLVPVPPTVTVFTVKKTLEQGATKILHRWQEVAPYIDENLFIRVIIQPSSDARNKTQRTIATSYNALFLGGARTLLQVMKTSFPELGLTIKDCLETSWIKSVLYIAGFPSDTPPEVLLKGKSTFKFFFKGKSDFVREPIPETGLEGLWQRLLVEDSPLMIWNPYGGRMSQFSESDTPFPYRNGTLYKIQYLSLWQEGDKNAAKHIDWIRKLYNYMGPYVSSLPREAYVNYRDLDLGINTKNSTSYIQASAWGYRYYKNNFDRLVKIKTKVDPQNVFRHEQSIPPLPK

SEQ ID NO: 2948 - protein, 235 aa, Zea mays
  unsure (1)..(235): unsure at all Xaa locations
MKTSVVVAALAAVLFAAQSYASLAGASGPRVIIVGAGMSGISAGKTLWEAGVRDLLILEATGRVGGRMHKHNFGGINVEIGANWVEGLGGDQLNPIWPLVNSTLKLRNFYSDFDSVVGNVYKENGGGLYDEEYVQKRMDRAYEVEELGANLTKKMHPSGRDDISVLAMQRLFNHQPNGPTTPVDMALDYFIYDYEFAEPXRVTSLQNTQPTPTNADFGEDNYFAADQRGYESIIH

SEQ ID NO: 2949 - protein, 369 aa, Rickettsia sp. RDla440
DSEFAELKIRGKIFKLPILKASIGEDVIDISRVSAEADCFTYDPGFMSTASCQSTITYIDGDKGILRHRGYDIKDLAEKSDFLEVAYLLIYGELPSGEQYNNFTKQVAHHSLVNERLHYLFQTFCSSSHPMAIMLAAVGSLSAFYPDLLNFKEADYELTAIRMIAKIPTIAAMSYKYSIGQPFIYPDNSLDFTENFLHMMFATPCTKYKVNPIIKNALNKIFILHADHEQNASTSTVRIAGSSGANPFACISTGIASLWGPAHGGANEAVINMLKEIGSFEYIPKYIAKAKDKNDPFRLMGFGHRVYKNYDPRAAVLKETCKEVLKELGQLDNNPLLQIAIELEAIALKDEYFIERKLYPNVDFYSGII

SEQ ID NO: 2950 - protein, 313 aa, Neisseria meningitidis Z2491
MAIQWFPGHMNKAKKAIAERAKSVDMVIEMLDARMPASSENPLLAQLSKGKPKLKILNKQDLADPERTKIWLEHYNSRPDTCAIALDSSETGAHGKITQACRAMIPHRQGIDKPLRVLICGIPNVGKSTLINGMIGKKSAKTGNEPGITKAEQRLFLADDFWLYDTPGMLWPKIIVEESGYNLAAGGSVGRNALDEEEVALELLDYLRRHYLPMLQERYQADKDPSSHWDENVWLEWIAKKRGAVLSGGRINYQKAAENILTDFREGKIGRITLETPNQWETWLKKARQKEAELKAIREARKAERKGQKPSEA

SEQ ID NO: 2951 - protein, 378 aa, Leuconostoc mesenteroides
MVNMDEVLSIHQAHTGVLDIESCFDITTPTDLSEAYTPGVAGLAKLIAKDTSKKRDYTMSGKLIPVITDGSAVLGLGNIGPAAGLPIVEGKALIYKNFANVDALPMALNQMSVDQFVDTVKAIAPSFAGIHLEDISAPKVFEIERRLSNELDIPVYHDDQTGTAIVVLAGIMNAAKVVGKNVHDLKIVVNGIGRCTAGVATTKILIAAGICNITLVDINGVINLGDANSNSYQQELVREVTQVDGKTLDDVIANQDVFIGLSDANVLSGKQVARMNENPIIFALANPVPEISPDDAKKAGAAVIATGSSQWPNQVNNVLVFPGLFKGLLESGIKHVDMALQLNVAHALANMISEPDATHIVPAVFDDDVGELGRNSSS

SEQ ID NO: 2952 - protein, 345 aa, Bacillus sp. KSM-K16
MRAIEVRKPGDIHVVEVQKPELETDKDVLVKVQAVGICGSDMHIYHGSNPFTVYPRIIGHEVGGIVEEVGSGVHGLRRGDRVALEPISSCGVCYACKKGRPNVCAKLEVFGVHRDGGMREWMVAPEANWHKVNGDLPFEAAALVEPMTIGAQAAYRGNIEPGDTVFIMGAGPTGIACLIMAKQKGATVFISDLQANRLDYAKQVGADFTIHLPHEKPEAVLFEKTDGEFANVVIDAVGTSTTFAEAVKLASVAGTVVTLGFNETPSDIPSLLLTKKELTVAGSRLQTNQFPDVIRQVNEQKVDPASIISHRFDFDEVKKAIELLEKEPAHVRKAVLIFEREDESK

SEQ ID NO: 2953 - protein, 377 aa, Zea mays
IGYLEAGQVHEVMATRSKIYLALELVRGGELFARIVRAGRVKEDVARRYFRQLIHAVDFCHARGVYHRDLKLENLLLDDAGNLKVVDFGLSALADHARSDGLLHTLCGTPGYVAPEVFRNKGYDGAKADIWSCGVILYVLLAGSLPFPDDNVAAMFRKMSRGDYRCPPWLSTEARRLIPKLLDPDPDTRITIAQLVETPWFNKPSVSRSVRAAAGATEPPAEPASSAKDGGDKDEPPETMNAFHLISLSAGFDLSPLFDVEGGPARGPREGGMRFATREPASGVVSRLEEVAARGGGRMRVTKSGARGVRLEGAERGGRKGRLAVAADIFCVAPSVLVVDVKKDGGDSLEYRSFCSEELRPALKDIVWAADPQPAVV

SEQ ID NO: 2954 - protein, 510 aa, Callistephus chinensis
MSILSLLVYFCISLLVIIALVNMFITRHTNRLPPGPAPWPVVGNLPHLGAIPHHTLAALATKYGPLVYLRLGFVHVVVASSPSVAAQFLKVHDLKFASRPPNSGAKHIAYNYQDMVFAPYGPQWTMFRKICKDHLFSSKALDDFRHVRQEEVAILARGLAGAGRSKVNLGQQLNMCTANTLARMMLDKRVFGNESGGDDPKANEFKEMATELMFLAGQFNIGDYIPVLDWLDLQGIVKKMKKLHTRFDKFLDVILDEHKVIASGHIDMLSTLISLKDDTSVDGRKPSDIEIKALLLELFVAGTDTSSNTVEWAIAELIRQPHLLKRAQEEMDSVVGQNRLVTEMDLSQLTFLQAIVKEAFRLHPSTPLSLPRIASESCEVDGYYIPKGSTLLVNIWAIGRHPEVWTDPLEFRPTRFLPGGEKPGIVVKVNDFEVLPFGAGRRICAGMSLALRTVQLLMGTLVQAFDWELANGIKPEKLNMDEAFGLSVQRAEPLVVHPRPRLPPHVYKSG

SEQ ID NO: 2955 - protein, 215 aa, Clostridium perfringens
MKIFIDTANVEEIRKASKLGVLAGVTTNPSLIAKEGRDIKEVIEEICSIVDGPISAEVMALECDEMVREGRELAKIHKNIVIKIPMCEEGLKAVKVLASEGIRTNVTLIFSPLQALLAARAGASFVSPFLGRLDDIGNPGIEIVTQIAEMFALHGIDTEIISASVRNPMHVLDSAMAGSHIATIPYNVILQMVKHPLTDAGMKKFIEDYNKAFNK

SEQ ID NO: 2956 - protein, 221 aa, Triticum aestivum
MTRASTLDFRRKTQGQNNWSGPLRPVNVIRNKFPTYKNGSNGIVIKFADEPETPSLKESVAKETADLLDRRQRLSVRELAMKFEKGLSTATLLSNEVKCKQVALLERDILLKNLKSVLESLRGQVAGKYKDEFEESVSMVDILAVQLSKRENELRQQKTEVTRIATSLKLASEDARRIVDEERTNARAEIENARAAVQRVQKVLQEKENSSQRIGKQVDID

SEQ ID NO: 2957 - protein, 117 aa, Glycine max
  unsure (1)..(117): unsure at all Xaa locations
MAAENVVEFTDLPVKRPREEEEGTNGVSNDAVSALPNDPQYPGISAVIPGEAHSLKMEKILFQGKSDYQNVMXFQSSTYGKVLVLDGVIQLTERDECAYQEMITHLPLCSIPNPKKV

SEQ ID NO: 2958 - protein, 511 aa, Lycianthes rantonnei
MVLLLISELCASAIIFIIVHIIISKLIATGWGRRQRLPPGPMGWPVIGALPLLGTMPHVALAKMAKKYGPIMYLKVGTCGMVVASTPNAAKAFLKTLDINFSNRPPNAGATHLAYDAQDMVFAHYGPRWKLLRKLSNLHMLGGKALEDWANVRANELGHMLKSMFDASRVGGRVVVADMLTFAMANMIGQVILSKRVFVEKGAEVNKFKDMVVELMTVAGYFNIGDFIPQLAWMDLQGIEKGMKCLHKKFDDLLTKMFDEHKATTNERKGKPDFLDVVMANRDNSEGERLSTNNIKALLLNLFTAGTDTSSSAIEWALAEMMKNPQILKKVQQEMDQIIGKNRRLIESDIPNLPYLRAVCKETFRKHPSTPLNLPRISNEPCMVDGYYIPKNIRLSVNIWAIGRDPDVWENPLEFNPERFLSGKNVKIDPRGNDFELIPFGAGRRICAGTRMGIVMVEYILGTLVHSFDWKFSNDVKEINMEESFGLALQKAVPLEAMVTPRLPFDVYYTN

SEQ ID NO: 2959 - protein, 80 aa, Glycine max
MLEFNFMQHILYRQKEQFSDGVGYGWIDGLKAHAEKHVTDRMMLNAANIFPFNTPTTKEAYYYRMIFERFFPQVNLINHA

SEQ ID NO: 2960 - protein, 419 aa, Pseudomonas syringae pv. phaseolicola
MRAISNTPRLYWPPYTPMKMDDCRPSIVRGEGVYLYDDTGRRYIDGISGSYNHCLGHSHFGLIEAVKEQVDTLVHACNISSNTVLPEALAERISGKLVKARLVHTFLVMSGSEGVEAALKMAWQYQINRGCPQRTKVVAIDGAYHGCTLGAMIATRREFINEGAAPLLAAHAIAMPIPSGLEDISHWRALLAEQETTIAAIVIEPVMAMAGTRQFPDGFLRELSALAKKYDIPFICDEVYCGVGRTGAFCESINQGASPDIVILSKCLGGGFPITAVVTTADMTDSFAAQSMPLFRHGHTQSGNLLGCRAALFILDYLDSHRSYEVVAAGGSRLLQGIRENLQTTNSIVSVQGKGLMLSITFETSQACTRAQLAVRRQGVIVGAADRHLKLAPSFLISEPEADELTDRLVSSIRSVSQQ

SEQ ID NO: 2961 - protein, 390 aa, Chlorobium tepidum TLS
MHIGVLTGGGDAPGINACIKTIVTISTEKGYRVTGIRRGWNGLLAFDPDDPASRTEHIVDLDSELVRRIDRTGGTLLHTSRINPGNLKKKEIPPFLRNSPHLLRTGLHHSGNFDLTDHVLRSIDALGLDVIIVIGGDDTIGYADHLAKAAVKVIGVPKTMDNDVYGSDYCIGFGTAVTRSVQYIHQLRTSSGSHERITIVELFGRSTGETCLVSAYLAGVDRALIPEVPFDPETLADYVIQDKAANPSQYAMIAISEGARMIGSKMIEYCGRRYDEDGHEPAGIGQLTRETISMLTGQDVICQQLGYLMRSGIPDALDLMVGFNFAQLAVELIAEGTFGVMVALQKGIYTCLPLAEVSSNTKQVDISELYDPRYYRPKMRSVMGKPMFLY

SEQ ID NO: 2962 - protein, 242 aa, Nicotiana tabacum
MGRGKVQLRRIENKINRQVTFSKRRGGLAKKAHEISVLCDAEVALIVFSHKGKIFEYSSDSCMEQILERYERYSYAERRLLSSNSESSVQENWSLEYAKLKAKIDLLQRNHKHYMGEDLDSLNLKDLQNLEQQLDTSLKLIRSRKNQLMHESISMLQKKEKAIQEENNMLSKKIKEKDKTVGKQAEWHQQNQVPNSASFLLQPHPCLNIGGNYQEEAEEARRNELDLNLDSLYPCHMGCFAT

SEQ ID NO: 2963 - protein, 422 aa, Pyrococcus abyssi GE5
MDPLKFHKGGKIGVISKVPLKTREHLSLAYTPGVAEPCKAIAKDPEKVYEYTSKGNSVAVVSDGSRILGLGNIGPLAGLPVMEGKALLFKRFGGIDAFPIMIGEQDPDKFIEVVKAISPTFGGINLEDIASPKCFYILDKLREELDIPVFHDDQQGTAAVVLAGLINALEVVGKRLDEISVALFGAGAAGFATLRILVKAGVKPGNVRVVELVNGKPMVLTKDLDLEKLFPYRGWLLEKTNDEGIEGGPEEALKGADVLISFTRPGPGVIKPEWIREMSDDPIVFPLANPVPEILPDEAKKAGARIVATGRSDYPNQINNLLGFPGIFRGALDVRARSITDDMIIEAAKAIASVVEEPSEENIIPSPFNPIVYAKEARAVAEEAMKEGVARVKVKGEEIEERTLKLISLWDDILGEVADKLS

SEQ ID NO: 2964 - protein, 245 aa, Nicotiana sylvestris
MGRGRVQLKRIENKINRQVTFSKRASGLLKKAHEISVLCDAEVGLIVFSTKGKLFEYSTDSCMERILERYERYSYAERQLTATDDETPGSWTLEHAKLKARLEVLQRNQRHYAGEDLDSLSMKELQNLEHQLDSALKHIRSRKNQLMHESISELQKKDKALQEQNNNLSKQVKEREKELAQQTQWEQQSHDHLNSSSFVLTQPLSSLHLGEAYPTAGDNGEVEGSSRQQQQNTVMPPWMLRHLNG

SEQ ID NO: 2965 - protein, 242 aa, Nicotiana sylvestris
MGRGKVQLRRIENKINRQVTFSKRRGGLVKKALEISVLCDAEVALIVFSHKGKIFEYSSDSCMEQILERYERYSYTERRLLASNSESSVQENWSLEYAKLKAKIDLQQRNHKHYMGEDLDSLSLKDLQNLEQQLDTSLKLIRSRKNQLMHESISMLQKKEKAIQEENNMLSKKIKEKDNTVGQQVEWHQQNQVPTSASFLLQPHPCLNIGGNYQEEREERRRNELDLNLDSLYPCHMGCFAT

SEQ ID NO: 2966 - protein, 165 aa, Glycine max
  unsure (1)..(165): unsure at all Xaa locations
MAERFEEALGTSSVITEGTHVGALNSLRPGIFGKLQQMMLKEKETDMDFWKKLQAXLGQIWLCXFTYNVKIISRYRDGKLTVCHCSFSKSTENFLLQDNSKGMGCGGRKSSQSTIIFSPRVCNNVDLEVGNLIQIHPPWKEAQVGNDNIIVCTYFSEILFQFDSL

SEQ ID NO: 2967 - protein, 119 aa, Rickettsia canadensis
GGANEAVINMLKEIGSSENIPKYIAKAKDKDDPFRLMGFGHRVYKNYDPRAAVLKETCNEVLKELGQLENNPLLQIAIELEAIALKDEYFIERKLYPNVDFYSGIIYKAMGIPSQMFTV

SEQ ID NO: 2968 - protein, 499 aa, Rubrivivax gelatinosus PM1
MTTATIDWHARSAALTLDGRAVIGGERHPARAGESFDCISPIDGRVLGRVARGQSADIDDAVASARAAFDDGRWSRRPPAARKRVLQAFAEKILSAKEELALLETLDMGKPIQYSLSVDVPSTARCIAWYAEAIDKVYDEIAPTGPGALALIRREAMGVIGAIVPWNYPMIMAAWKLGPALAAGNSVVLKPSEKSPLTALRLAELALAAGLPPGVFNVVPGYGHEAGEALALHPQVDAIGFTGSTRVGRKMLEYAGRSNLKRVYNELGGKSAFLVFPDFDDLDRCAATVAGSMFFNQGESCNAPSRLLVHESIADDFARRVAAEAPQYRPADPLDAKTVMGALVDDGQLRTVMGYIDAGRSEGATVLAGGTQARTDSGGYYVEPTVFDGVRNDMKIAREEIFGPVLSIIRFKDEAEAIRLANDSPYGLQASVWSSHIDRAHRVAASLRAGTVHVNQYDEDDITVPFGGFKQSGNGRDKSLHAFDKYTELKTTWLRINAA

SEQ ID NO: 2969 - protein, 507 aa, Streptomyces coelicolor A3(2)
MTRYAAPGTEGAIVSYQSRYDHFIGGEYVPPARGQYFENPSPVNGLPFTEIARGTADDVERALDAAHEAAPGWGRTSVTERSDILLKIADRMEANLERLAVAESWENGKPVRETLAADIPLAIDHFRYFAGAVRAQEGSLGEIDDDTVAYHFHEPLGVVAQIIPWNFPILMATWKLAPALAAGNAVVLKPAEQTPASIHYWLSLVADLLPPGVLNVVNGFGVEAGKPLASSPRVAKVAFTGETTTGRLIMQYASENIKPVTLELGGKSPNIFFEDVWARDDDFRDKALEGFTMFALNQGEVCTCPSRALVQRGVYAEFMEAAVARTELIKPGHPLDTDTMIGAQASNDQLEKILSYLDIGRQEGAKVLTGGERIEHDGELKGGYYVQPTIFEGHNRMRIFQEEIFGPVVSVTSFDDFDDAVKTANDTLYGLGAGVWTRDMNTAYRAGRAIQAGRVWTNCYHAYPAHAAFGGYKQSGIGRENHKMMLEHYQQTKNILCSYSPKKLGFF

SEQ ID NO: 2970 - protein, 117 aa, male-killing Rickettsia from Adalia bipunctata
HGGANEAVINMLKEIGSSENIPKYIAKAKDKNDPFRLMGFGHRVYKNYDLRAAVLKETCKEVLKELGQLDGNPLIQIAIELEAIALKDEYFIERKLYPNVDFYSGIIYKAMGIPSQM

SEQ ID NO: 2971 - protein, 472 aa, Daucus carota
MVFFRSVSLLNKLRSRAVQQSNLSNTVRWFQVQTSASDLDLRSQLKELIPEQQERIKKLKAEHGKVQLGNITVDMVLGGMRGMTGLLWETSLLDPEEGIRFRGLSIPECQKLLPGAKPGGEPLPEGLLWLLLTGKVPTKEQVDALSAELRSRAAVPEHVYKTIDALPVTAHPMTQFATGVMALQVQSEFQKAYEKGIHKTKYWEPTYEDSITLIAQLPVVAAYIYRRMYKNGQSISTDDSLDYGANFAHMLGYDSPSMQELMRLYVTIHTDHEGGNVSAHTGHLVASALSDPYLSFAAALNGLAGPLHGLANQEVLLWIKSVVSECGENVTKEQLKDYIWKTLNSGKVVPGYGHGVLRNTDPRYICQREFALKHLPDDPLFQLVSNLFEVVPPILTELGKVKNPWPNVDAHSGVLLNHYGLTEARYYTVLFGVSRAIGICSQLVWDRALGLPLERPKSVTMEWLENHCKKSS

SEQ ID NO: 2972 - protein, 486 aa, Pseudomonas stutzeri
MKEIKHFINGAFVDSASGRTFEDINPVNGQVIGRVHEAGRAEVDAAVRAARAALKGPWGKMTVAERAEILHRVADGVTARFDEFLEAECLDTGKPKSLASHIDIPRGAANFKVFADLIKNVPTEAFEMATPDGAGALNYGVRRPKGVIGVISPWNLPLLLMTWKVGPALACGNCVVVKPSEETPLTATLLGEVMQAAGVPAGVYNVVHGFGGDSAGAFLTEHPDVDAYTFTGETGTGETIMRAAAKGVRQVSLELGGKNAGIVFADCDLDKAIEGTLRSAFANCGQVCLGTERVYVERPIFDAFVARLKAGAEALKIGEPNDPEANFGPLISHKHREKVLSYYQQAVDDGATVVTGGGVPEMPAHLAGGAWVQPTIWTGLTDDSAVVTEEIFGPCCHIRPFDSEEEAIELANSLPYGLASAIWTENASRAHRVAGQIEAGIVWVNSWFLRDLRTAFGGSKQSGIGREGGVHSLEFYTELKNICVKL

SEQ ID NO: 2973 - protein, 277 aa, Lotus corniculatus var. japonicus
MCEALKSQYQLCEEIGRGRFGTIFRCFHPISTDTFAVKLIDKSLLADSTDRHCLENEPKYMSLLSPHPNILQIFDVFEDDDVLSMVIELCQPLTLLDRIVAANGTSIPEVEAAGLMKQLLEAVAHCHRLGVAHRDVKPDNVLFGGGGDLKLADFGSAEWFGDGRRMSGVVGTPYYVAPEVLMGREYGEKVDVWSCGVILYIMLSGTPPFYGDSAAEIFEAVIRGNLRFPSRIFRNVSPAAKDLLRKMICRDPSNRISAEQALRHPWFLSAGDTVNVT

SEQ ID NO: 2974 - protein, 119 aa, Rickettsia conorii
AHGGANEAVINMLKEIGSSEYIPKYIAKAKDKNDPFRLMGFGHRVYKNYDPRAAVLKETCKEVLKELGQLDNNPFLQIAIELEAIALKDEYFIERKLYPNVDFYSGIIYKAMGIPSQMF

SEQ ID NO: 2975 - protein, 198 aa, Zea mays
  unsure (1)..(198): unsure at all Xaa locations
MATSFQGTTTKCTACDKTVYLVDKLTADNRIYHKACFRCHHCKGTLKLANYNSFEGVLYCRPHFDQLFKRTGSLDKSFEGTPKVVKPERNVGNENATKVSSAFAGTREKCVGCSKTVYPTERVTVNNTMYHKSCFKCCHGGCTISPSNYIAHEGKLYCKHHHIQLIKEXRGTSASLRMTTRRHHRLGHWRRMNKSIDH

SEQ ID NO: 2976 - protein, 330 aa, Glycine max
MGEQLRQANPPVKTSEYDEERVMEWEAGLPTANDLTPLSQPLIPPELASAFSILPEPHRTLLDVNRASRNTLSTLRGGGGSVHQAFSSSNNNHNYDGDGDGGVEEEEEEDDDRDGSGPDSRKQRKIDCGAAEEADSAVQTETSAERTAVKRPRLVWTPQLHKRFVDVVAHLGIKNAVPKTIMQLMNVEGLTRENVASHLQKYRLYLKRMQGLSNEGPSASDQLFASTPVPQSLHDSAPPSNHSNGHGHGHGHSNGRGHGHGHGHGHLSVPMMSMPYPPPLMSMPYPPPMMSGMPHGHMGIPMPNSSATSAYHPYNMLHQRDWPHLAPNDK

SEQ ID NO: 2977 - protein, 444 aa, Arabidopsis thaliana
MVRRQEEEKKAEKGMRLGKYELGRTLGEGNFGKVKFAKDTVSGHSFAVKIIDKSRIADLNFSLQIKREIRTLKMLKHPHIVRLHEVLASKTKINMVMELVTGGELFDRIVSNGKLTETDGRKMFQQLIDGISYCHSKGVFHRDLKLENVLLDAKGHIKITDFGLSALPQHFRDDGLLHTTCGSPNYVAPEVLANRGYDGAASDIWSCGVILYVILTGCLPFDDRNLAVLYQKICKGDPPIPRWLSPGARTMIKRMLDPNPVTRITVVGIKASEWFKLEYIPSIPDDDDEEEVDTDDDAFSIQELGSEEGKGSDSPTIINAFQLIGMSSFLDLSGFFEQENVSERRIRFTSNSSAKDLLEKIETAVTEMGFSVQKKHAKLRVKQEERNQKGQVGLSVTAEVFEIKPSLNVVELRKSYGDSCLYRQLYERLLKDVGTSSPEQEIVT

SEQ ID NO: 2978 - protein, 116 aa, Glycine max
  unsure (1)..(116): unsure at all Xaa locations
ESGRAIVSHHSVLIFEAVGTSSTTXXGASPALSAQYLAEELSEDYRNLSELAFRGEYETCLVYTEEMKERCVEQFKQGTVFPIIPIHRLDEKPSVRGILSDLTCDSDGKIDKFING

SEQ ID NO: 2979 - protein, 485 aa, Bacteroides thetaiotaomicron VPI-5482
MDKTYKRHSFTKLWIATAMFIFCCFATSAFAQEAVDADTFMTTTETITEVKTTPEIAETATASAETTPDTIGELALGLNTVWMLLAAMLVFFMQPGFALVEAGFTRVKNTANILMKNFVDFMFGSLLYWFIGFGLMFGAGGLIGMPHFFDLSFLDSDLPREGFLVFQTVFCATAATIVSGAMAERTKFSMYLVYTIFISVLIYPISGHWTWGGGWLMNGEEGSFMMNLFGTTFHDFAGSTIVHSVGGWIALVGAAILGPRIGKYGKDGKSRAIPGHNLTVAALGVFILWFGWFGFNPGSQLAASTEADAMAISHVFLTTNLAACAGGFFALAMSWMKYGKPSLSLTLNGVLAGLVGITAGCDAVAPSGAVLIGAICGVVMIFAVDFIDKVLKIDDPVGASSVHGVCGFLGTVLTGLFSTSEGLFYGHGAGFLGAQLFGAVVVGVWAAGMGFIIFKVLDKIHGLRVPARVEEEGLDIYEHGESAYN

SEQ ID NO: 2980 - protein, 236 aa, Rickettsia conorii str. Malish 7
MIDYTKTLTAASKHKTFDEGLRQYMLKVYNYMALALLLTGVAAVTTISVEPIYNLMFQTGFGTIIMFAPLGIALYFFMGFGQMNLPTAQILFWVYAGLTGMSLAYLALIYTGASIARTFFICSSVFGAMSLYGYSTSRDLTSMGSFFAMGLIGLIIASLVNLFLKSSALSFATSLIGIVIFMGLIAWDTQKIKSMYYMAGNDEVGQKLSIMAAFTLYLDFINLFLYLMRFLGNRRD

SEQ ID NO: 2981 - protein, 304 aa, Guillardia theta
MNENTKFLEEVIKKLTQSKKIKNIFLTEKEIGKLCYLSRKVFNNENSMLYLNSPIKICGDIHGQFYDLLRLFEFNGYPPTEKYLFLGDYVDRGKQSIEVISLLFAFKVRYPTKIFILRGNHESSKINRIYGFYDECKKKYNIKIWKIINETFNYLPLAAIIEKKIFCIHGGLSPFLNSIKQIEDIARPVEIPEKGLLCDLLWSDPNEDKQGWNLSDRGISYTYGDNIVKEFIEKFDFDLICRAHQVVDKGYKFFSNRMLVTIFSAPNYCGEFSNAGAVMNVDKLLVCSFQILKPYFGKKINSSK

SEQ ID NO: 2982 - protein, 495 aa, Neurospora crassa
MLTPTTLLLLSPLLYLLTLLFRTALYRLRARSLGCSPVAVYPHKDPILGLDLFRESLRAMNTHALLPLWDARFKRYGNTHYTLTLGKWVLMTNEPENVKVILGTKMAEWPIDGPRLHASVAVLGKKSIFTTNGAQWREARGMIRPSFVRDQVADLHCFAKHVGNFLNAIPKDGSTFDMQELLLSMTMDSSTDFLLGCSTNSLLQPSPEAKQFLEDFEYTSREAAKKSRLGTLLNWLPNGEFQATVTRVREYVRAYIRKSQAEKTDKKERDYVFLHEILKSGADEEHAIDQVLSVIIAGRDTTAAAMTACFYYLARNPEAVKKLRKEIFDMEDEMPTWEQLKNMKYLNMIIKEGLRLFPPASTNSRAPIKDTVLPRGGGPDGKQPILVPKGQVVRWSLYSLHRRKDIWGEDAHEFRPERWDENLRVGWEYIPFSGGPRICLGQQFALTQIEYALFKFFRAFKSIEPRDDNGPLLLRTNLTVTFAKGCLVSATPDSN

SEQ ID NO: 2983 - protein, 509 aa, Bordetella bronchiseptica RB50
MTTVHSATPEETRRLLQQLGVDPARYDGGTLEVRSPIDGQAIARLPELTAEQARARVADARQAFLAWRKVPAPRRGELVRLLGEELRAAKAELGRLVSIETGKILSEGEGEVQEMIDICDFATGLSRQLYGLTIATERAEHRMMETWHPAGPVAIISAFNFPVAVWAWNAAIALVCGDSLLWKPSEKAPLTALATQALLERALARFGDAPAHLSQVLIGGREVGEALVDDPRIPIVSATGSTAMGRKVGPKVAERFGRSILELGGNNAAIICPSANLDLALRGIAFSAMGTAGQRCTSLRRIFVHEQIADDLVARLKQVYESVAIGDPRDSGTLIGPLRDQAAFDAMQRSLADARAAGGRVTGGAREPVGGHDQAYYARPALVEMPAQSEVVERETFAPILYVMRYRDLDEAIALQNDVPQGLSSSIFTNDLREAERFVSAEGSDCGIANVNIGPSGAEIGGAFGGEKETGGGREAGSDSWKAYMRRTTNTVNYGNALPLAQGVKFDVA

SEQ ID NO: 2984 - protein, 297 aa, Brassica napus
MGVMVNHHLLAIIFGILGNAISFLVFLAPVPTFYRIYKNKSTESFQSLPYQVSLFSCMLWLYYALTKQDAFLLITINSFGCVVETIYIAMFFTYATKEKKMAAIKLFLTMNVAFFSLIIMVTHFAVKRPSLQVSVIGWICVAISVSVFAAPLMIVARVIKTKSVEFMPFTLSFFLTISAVMWFAYGAFLHDICIAIPNVVGFILGLVQMVLYGVYRNSGEKLDIGKRNNSSSEQLKTIVVMSPLGLSEMHPVDVTVTEPVIPLSYTVHHEDPSKITKEEEPSTEAGQSHVETAPSRI

SEQ ID NO: 2985 - protein, 342 aa, Burkholderia cepacia R18194
MKALAKLERGPGLTLTRVKRPEVGHNDVLIKIRRTAICGTDIHIWKWDDWAQKTIPVPMHVGHEYVGEIVEMGQEVRGFAIGDRVSGEGHITCGFCRNCRAGRRHLCRNTVGVGVNREGAFAEYLAIPAFNAFKIPPEISDDLASIFDPFGNATHTALSFNLVGEDVLITGAGPIGIMAVAIAKHVGARNVVITDINDYRLELARKMGATRAVNVARESLRDVMSDLHMTEGFDVGLEMSGVPSAFTSMLEAMNHGGKVALLGIPPAQTAIDWNQVIFKGLEIKGIYGREMFETWYKMVAMLQSGLDLSPIITHRFAADDYEKGFAAMLSGESGKVILDWTA

SEQ ID NO: 2986 - protein, 444 aa, Brucella suis 1330
MAATFDTILKGATIVNHDGIGQRDIGIRNGRIAAIGSLAGNSAGEVIDCTGLHILPGVVDSQVHFREPGLEHKEDLETGSLAAVLGGVTAVFEMPNTKPLTTSAEMLEDKIRRGRHRMHCDFAFWVGGTRDNAKDVAELERLPGAAGIKVFMGSSTGDLLVEDDDGVRSILRNTRRRAAFHSEDEFRLKEREGLRVEGDPSSHPVWRDEIAALQCTQRLVRIARETGARIHVLHISTAEEIDFLKDYKDVATCEATPHHLTLSADDYKALGNLIQMNPPVRDKRHREGVWKGIDQGIVDVLGSDHAPHTLEEKQKSYPASPSGMTGVQTLVPIMLDHVNAGKLSLERFVDLSSHGPNRIFGMARKGRIAVGYDADLTIVDMKRRETITHEQAGSKAGWTPYHGKTVTGWPVGTFVRGIKVMWEAEIVNPHKGEPVEFLEALPRR

SEQ ID NO: 2987 - protein, 201 aa, Glycine max
  unsure (1)..(201): unsure at all Xaa locations
MSGRVSGKVKWFNDQKGFGFISPDDGSDDLFVHQSQIKSDGFRSLAEGESVEFAIESESDGRAKAVDVTGPDGASVQGTRRGGDGGRSYGGGRGGGGGGYGGGGGYGGGGGYGGGGGYGGGGRGGGGGACYNCGESGHLARDCSGGGGGDRYGGGGGGGRYGGXGGGGRYGGGGGGGGGGGSCYSCGESGHFARDCPSSAR

SEQ ID NO: 2988 - protein, 126 aa, Rickettsia prowazekii
GPAHGGANEAVINMLKEIGSSENIPKYVAKAKDKNDPFRLMGFGHRVYKSYDPRAAVLKETCKEVLNELGQLDNNPLLQIAIELEALALKDEYFIERKLYPNVDFYSGIIYKAMGIPSQMFTVLFA

SEQ ID NO: 2989 - protein, 296 aa, Bacillus cereus ATCC 14579
MVIQWFPGHMAKARRQVTEKLKLIDVVIELVDARLPLSSRNPMIDEIITHKPRLVVLNKADMADDRLTKQWIAYFKEKGHMAISINAQAGQGMKEIAAACKVLVKEKFDKMVAKGIRPRAIRALIVGIPNVGKSTLINKLAKKNIAKTGDRPGVTTAQQWIKVGKEMELLDTPGILWPKFEDQLVGLRLATTGAIKDSILNLQDVAVYALRFMEKHYPERLKERYNLNEIPEDIVELFDAIGKNRGCLMGGGMIDYDKTSELVLRELRGGKLGKMTFETPEEFGEQVEDVEKIEEV

SEQ ID NO: 2990 - protein, 459 aa, Rubrivivax gelatinosus PM1
MSRTTQDWQAADAAHFLHPFTDFDALAKKGSRIIERAENIYLWDSEGHKILDAMSGLWCVNVGYGRQELIDAATAQLKQLPFYNAFFQTATPPAIELAELLSEVTPPQFRHVFFSGSGSEGNDTVVRMVRRYWDVLGQPERKVIISRNNAYHGSTMAGASLGGMSGMHAQGGLPIPDITHIEQPYWYELGRPQGLSRDDFGRLAASWLEKKILEVGPERVAAFIGEPVQGAGGVIIPPATYWPAIQAICDKYGILLVSDEVICGFGRTGRWWGCETMGTRPDLMTFAKGVTSGYIPLGGVMVGERVARVLIEQGGEFNHGYTYSGHPVACAVALANIRLIQRERLVDRVRDDLGPYLAQHFEALKAHPLVGDAETCGLMGAVVLARDKASGTPFASDLEVGMVCRGHCFGNGLIMRAVGDRMIIAPPLVMTRDQIDEMMVLIKRCLDLTWADVKARGWV

SEQ ID NO: 2991 - protein, 119 aa, Rickettsia typhi
GGANEAVINMLKEIGSSENIPKYVAKAKDKNDPFRLMGFGHRVYKSYDPRAAVLKETCKEVLNELGQLENNPLLQIAIELEALALKDEYFIERKLYPNVDFYSGIIYKAMGIPSQMFTV

SEQ ID NO: 2992 - protein, 287 aa, Neurospora crassa
MSGPKYTPAPQEDPDAHLYYPQPPPSYQATAESSAANAVLGDQARLFSGAPRSSQDDDHDIPDDFKFGGSVAEATVEIRHQFIRKVYTILTVQLIATGAVSALSFLSDGYRNWIQSHPAMIWVSFAGALVFMLLTFWKRQSYPTNLLFLSGFTLLEAYTISVCVSFFDSTTVLLAVVITAGIFVFLTAFACQTKYDFTSWMPYLGGALWGLIITGFIYAFLPHTSTSELVYGGVAALVFSGYILVDTQLVMRKYHVEEEIAAAISLYLDILNLFLAILRILNSQSDN

SEQ ID NO: 2993 - protein, 531 aa, Zea mays
  unsure (1)..(531): unsure at all Xaa locations
MEAVGVTPAPVAAPEKKKLLDLKDPFPAAANGGTKASPASKWAMKKKLVGGDAGYVLEDVPHLTDYMPQLPTYPNPLQDNPAYSVVKQYFVNPDDTVTQKIVVHKTSARGTHFRRAGPRQRVYFQSDEVNAAIVTCGGLCPGLNTVIRELVCGLYDMYGVSSVVGIEGGYKGFYSKNTVALTPKSVNDIHKRGGTVLGTSRGGHDTAKIVDCLQDRGINQVYIIGGDGTQKGASVIYEEVRRRGLKCSVVGVPKTIDNDIAVIDKSFGFDTAVEEAQRAINAAHVEAESAENGIGVVKLMGRNSGFIAMYATLASRDVDCCLIPESPFYLEGKGGLLEFVERRLKDNGHMVIVVAEGAGQDLIARSMNFVDTQDASGNKLLLDVGLWLSQKIKDHFKKKPSFPITLKYIDPTYMIRAVRSNASDNVYCTLLAHSALHGAMAGYTGFTVAPVXGRHAYIPFYRITEKQNKVVITDRMWARVLCSTNQPCFLSHEDVENMKHDDDEHHHMHNTQLLEGGSSPVSKCNGSAAAV

SEQ ID NO: 2994 - protein, 177 aa, Campylobacter jejuni
MKHNLTIWLTGLAGSGKSYIAQALYRKLKEKYDNVIYLDGDELRELLGYFSYDKKGRMDVSFKRSDFARFLSNQGMIVIVSAISMWNEIYEYNRKYLKNYFEIYIKCEFEELKRRDKKNLYTQALKGEISNVVGVDIPYDEPKADLVIDNTQMTALDDKVCLILTALSQNLDNSKRE

SEQ ID NO: 2995 - protein, 116 aa, Triticum aestivum
PTVMASSATSVAPFQGLKSTAGLPVSRRSNGASLGSVSNGGRIRCMQVWPIEGIKKFETLSYLPPLSTEALLKQVDYLIRSKWVPCLEFSKVGFIFREHNASPGYYDGRYWTMWNC

SEQ ID NO: 2996 - protein, 506 aa, Rhodospirillum rubrum
MLYAAPGTADAIFAFKPRYDNFIDGTWQPPVRGEYFDNVTPITGKVFCKAARSTEEDITLALDAAHAAADRWGRTTAAERALILNRIADRLQDNLETLAYVESIDNGKPIRETLAADIPLAIDHFRYFAACIRAQEGSLSQIDETTIAYHFNEPLGVVGQIIPWNFPILMATWKLAPALAAGNCIVLKPAEQTPISILVLTELIADLLPPGVLNVVNGFGLEAGKPLASSKRIAKIAFTGETATGRLIMQYASQNLIPVTLELGGKSPNVFFDDIASADDSFFDKAVEGFVMFALNQGEICTCPSRALIHESLYDRFIERALARVAVIKQGSPLDTETMIGAQASTEQMDKILSYMDIGREEGATVLAGGARAELGGELDGGYYVQPTVFKGNNSMRIFQEEIFGPVVAVTTFKDEDEALHLANDTHYGLGSGVWTRDGNRAFRFGRGIKAGRVWTNCYHLYPAHAAFGGYKQSGIGRENHHMMLDHYQQTKNLLVSYDPKAMGFF

SEQ ID NO: 2997 - protein, 213 aa, Oryza sativa (japonica cultivar-group)
MGVEVCVKAAVGHPDTLGDCPFSQRVLLTLEEKKVPYEMKLIDVQNNPDWFLKISPEGKVPVFNGGDGKWIPDSDVITQVIEEKYPTPSLVTPPEYASVGSKIFSCFTTFLKSKDPNDGSEKALLTELQALEEHLKAHGPFINGQNISAADLSLAPKLYHLQVALEHFKGWKIPEDLTNVHAYTEALFSRESFIKTKAAKEHLIAGWAPKVNA

SEQ ID NO: 2998 - protein, 505 aa, Oryza sativa (japonica cultivar-group)
METIQEGDVVPGSPPPPVASAAASSGAAGDHRTYSNPAFQGWVGLRAWLGIGIGIGIGMVSGSIEEAWYDSFAMSESDGEDDFHSVQDDAFSLNGFENDAALSTRDANGGSFNGSSHSSEQHYRKPRSSELSRGNLENGVRSSVSHEDVASVSAEDSAHGGGGRILDDCGLLPNNCLPCIASAVGVNEKKRPLSTSPTHSMKMPSLKLSFKKKSGEAHPSSTLLSTKDFLERPLAGSQVQLCLLEKKILNSWSHIDPGTFRVRGSNYFRDKKKELAPNYAAYYPFGVDVYLSPQKLNHISRYVQLPDVQISSKLPPLLVVNVQVPLYPASLFQNEIDGEGMSFVLYFRLSDAYSKELPPSFIENIRKLVDDHVEKVKAFPMETTIPFRERLKILGRVANLEDLPLSAAERKLMHAYNEKPVLSRPQHEFYLGDNYFEVDIDMHRFSYISRKGFETFLDRLKICMLDVGLTIQGNKAEELPEQILCCVRLNGIDYTQYKPLMTHGA

SEQ ID NO: 2999 - protein, 488 aa, Listeria innocua Clip11262
MADVRKLKNYINGEWVESKADKYEDVINPATGEVLCQVPISTRAELDQAAVIAEQAFEKWSQVAVPRRARVLFSFQQLLIQHKEELARLITLENGKNLSEARGEVQRGIENVEFAAGAPTLMMGDSLASIATDVEAANYRYPVGVVGGIAPFNFPMMVPCWMFPMAIALGNSFILKPSERTPLLMEKLVELFSEAGLPKGVFNVVYGAHDVVNGILENETIKAVSFVGSKPVGEYVYKTGSANLKRVQALTGAKNHTIVLNDADLEDTVTNVISAAFGSAGERCMACAVVTVEEGIADDFLAALRTAAQNVKIGNGLDDGVFLGPVIREENQKRTIAYIEKGVEEGAKLTVDGRETGLSEGYFVGPTILEDVTTDMTIWKDEIFAPVLSVIRVKNLQEAVRVANQSEFANGACIFTNNAKAIRYFREKIDAGMLGVNLGVPAPMAFFPFSGWKSSFYGTLHANGKDSVDFYTHKKVVTARYSLKGYEE

SEQ ID NO: 3000 - protein, 350 aa, Coffea canephora
MAEEEACLFAMSLASASVLPMVLKSAIELDLLELIAKAGPGAYVSPSELAAQLPTHNPEAPIMLDRILRLLATYSVLDCKLNNLADGGVERLYGLAPVCKFLTKNADGVSMAPLLLMNQDKVLMESWYHLKDAVLDGGIPFNKAYGMTAFEYHGTDPRFNKVFNQGMSNHSTITMKKILEVYRGFEGLKTVVDVGGGTGATLNMIISKYPTIKGINFELPHVVEDAPSHPGVEHVGGDMFVSVPKGDAIFMKWICHDWSDDHCRKLLRNCYQALPDNGKVILAECVLPEAPDTSLATQNVVHVDVVMLAHNPGGKERTEKEFEALAKGAGFKEFRKVCSAVNTWIMELCK

SEQ ID NO: 3001 - protein, 80 aa, Triticum aestivum
MAPTVMGSKDTYDAPFQGLKSTDGLPVRRRSNGASLGSVSNGGRIRCMQVWPMEGIKKFETLSYLTPLSTEALLKQVEYL

SEQ ID NO: 3002 - protein, 350 aa, Coffea canephora
MAEEEACLFAMSLASASVLPMVLKSAIELDLLELIAKAGPGAYVSPSELAAQLPTHNPEAPIMLDRILRLLATYSVLDCKLNNLADGGVERLYGLAPVCKFLTKNADGVSMAPLLLMNQDKVLMESWYHLKDAVLDGGIPFNKAYGMTAFEYHGTDPRFNKVFNQGMSNHSTITMKKILEVYRGFEGLKTVVDVGGGTGATLNMIISKYPTIKGINFELPHVVEDAPSHSGVEHVGGDMFVSVPKGDAIFMKWICHDWSDDHCRKLLKNCYQALPDNGKVILAECVLPEAPDTSLATQNVVHVDVVMLAHNPGGKERTEKEFEALAKGAGFKEFRKVCSAVNTWIMELCK

SEQ ID NO: 3003 - protein, 121 aa, Brassica napus
  unsure (1)..(121): unsure at all Xaa locations
GRVGFEQRWNRQGGRDILVKIRDLDDIIIPPSPVLFSEDHDSWNVQLFRSIDGGAAAAFPDSPEAAAEAGLVSGKDNIIDRSIQDAYIHAIRRAKDFIYIENQYFLXSSFAWSADGIXPDE

SEQ ID NO: 3004 - protein, 163 aa, Brassica napus
  unsure (1)..(163): unsure at all Xaa locations
MVGAKPVKMVENGSDGTSLLNGRYEIGRLLGHGTFAKVYHARNVTTGKSVALKVVAKEKVAKAGMEEQIKREISVMKMVKHPNIVELHEVMASKTKIYFAMELVRGGELFAKVAKGRLREDAARVYXKQLISAVDFCHSRGVTTRDLKPENLLLDEQGNLKIT

SEQ ID NO: 3005 - protein, 188 aa, Saccharum hybrid cultivar
SSVVTAAAAIQADPAEKPRAPKAQVVGWPPVRSFRKNIMSVQSDKGAGGSKDADKSSPPPAAAAAVGGAAFVKVSLDGAPYLRKVDLKMYKMYKSYQELSKALEKMFSSTIGSCGSQGMNGMNESKLVDLLNGSEYVPTYEDKEGDWMLVGDVPWEMFVESCKRLRIMKGSEAIGLAPRAMEKCKNRS

SEQ ID NO: 3006 - protein, 279 aa, Pyrococcus abyssi GE5
MEFIEWYPRGYGVAFKVKEKIFEGHSKFQKIEVYETEGFGRLLALDGTVQLVTEGEESYHESLVHPVMLAHPNPRRVLVIGGGDGGTIREVLRHEEVEEAIMVEIDEEVIEVAIKFIGIDGGLLDKMMKGECKRAKLIIGDGVEFIKENSGFDVVIVDSTDPVGPAKMLFSREFYERAYEALNDPGIYVTQAGSVYLFTDELVTAYENMSRVFDKVYAYSFPVIGYASPWAFLVGIKGDLDFRKIDLERAKKLNLKYYDPENHETIFQMPRYVREMLKP

SEQ ID NO: 3007 - protein, 396 aa, Escherichia coli CFT073
MLDAQTIATVKATIPLLVETGPKLTAHFYDRMFTHNPELKEIFNMSNQRNGDQREALFNAIAAYASNIENLPALLPAVEKIAQKHTSFQIKPEQYNIVGEHLLATLDEMFSPGQEVLDAWGKAYGVLANVFINREAEIYNENASKAGGWEGTRDFRIVAKTPRSALITSFELEPVDGGAVAEYRPGQYLGVWLKPEGFPHQEIRQYSLTRKPDGKGYRIAVKREEGGQVSNWLHNHANVGDVVKLVAPAGDFFMAVADDTPVTLISAGVGQTPMLAMLDTLAKAGHTAQVNWFHAAENGDVHAFADEVKELGLSLPRFTAHTWYRQPNEADRAKGQFDSEGLMDLSKLEGAFSDPTMQFYLCGPVGFMQFAAKQLVDLGVKQENIHYECFGPHKVL

SEQ ID NO: 3008 - protein, 114 aa, Triticum aestivum
  unsure (1)..(114): unsure at all Xaa locations
MSDTDEHHFESKADSGASKTYPQQAGAIRKGGHIVIKARPCKVVEVSTSKTGKHGHAKCHFVAIDIFNGKNLRXYVPSSHNCDXPHVDRQXYQLIDITDDGIHLLTEXGNTKDD

SEQ ID NO: 3009 - protein, 372 aa, Bacillus cereus ATCC 10987
MKAEEKFSPGLDGIVAAETKISFLDTVKGEIVIQGYDLIELSKTKEYLDIVHLLLEEHLPNEDEKAKLEKKLKEEYAVPEGVFNVLKALPKETHPMDGLRTGVSALAGYDNDIENRSLEVNKSRGYKLLSKVPNIVANSYHILNNEEPIEPLKELSYSANFFYMLTGKKPTELEEKIFDRSLVLYSEHEMPNSTFTARVIASTQSDLYGALTGAVASLKGSLHGGANEAVMYMLLEAGNVEKFEELLQKKLYNKEKIMGFGHRVYMKKMDPRALMMKEALKQLCDVKGDYTLYEMCEAGEKIMEKEKGIYPNLDYYAAPVYWMLGIPIQLYTPIFFSSRTVGLCAHVIEQHANNRLFRPRVNYIGERHVLSK

SEQ ID NO: 3010 - protein, 157 aa, Candida albicans
MAEEDTFETADAGAALTFPMQCSALRKNGHVVIKNRPCKIVDMSTSKTGKHGHAKVHLVAIDIFTGKKLEDLSPSTHNMEVPNVSRQEFQLLDIDDGYLSLMTADGDTKDDVKVPEGELGDKLQSEFDEGKDLIVTIISAMGEEAAISYKEAPKGSA

SEQ ID NO: 3011 - protein, 62 aa, Zea mays
ACLQNTQPTPTNADFGEDNYFVADQRGYESIIHSIGSSYLSTDGNGKLKDRRILLNKVLADM

SEQ ID NO: 3012 - protein, 507 aa, Zea mays
MASNGCNGNGNGKAAPAGVVVPEIKFTKLFINGEFVDAASGKTFDTRDPRTGDVLAHVAEADKADVDLAVKSARDAFEHGKWPRMSGYERGRIMSKLADLVEQHTEELAALDGADAGKLLLLGKIIDIPAATQMLRYYAGAADKIHGDVLRVSGRYQGYTLKEPIGVVGVIIPWNFPTMMFFLKVSPALAAGCTVVVKPAEQTPLSALYYAHLAKMAGVPDGVINVVPGFGPTAGAALASHMDVDSVAFTGSTEVGRLIMESAARSNLKTVSLELGGKSPLIIFDDADVDMAVNLSRLAVFFNKGEVCVAGSRVYVQEGIYDEFVKKAVEAARSWKVGDPFDVTSNMGPQVDKDQFERVLKYIEHGKSEGATLLTGGKPAADKGYYIEPTIFVDVTEDMKIAQEEIFGPVMSLMKFKTVDEVIEKANCTRYGLAAGIVTKSLDVANRVSRSVRAGTVWVNCYFAFDPDAPFGGYKMSGFGRDQGLAAMDKYLQVKSVITALPDSPWY

SEQ ID NO: 3013 - protein, 275 aa, Escherichia coli CFT073
MANPTVIKLQDGNVMPQLGLGVWQASNEEVITAIQKALEVGYRSIDTAAAYKNEEGVGKALKNASVNREELFITTKLWNDDHKHPREALLDSLKKLQLDYIDLYLMHWPVPAIDHYVEAWKGMIELQKEGLIKSIGVCNFQIHHLQRLIDETGVTPVINQIELHPLMQQRQLHAWNATHKIQTESWSPLAQGGKGVFDQKVIRDLADKYGKTPAQIVIRWHLDSGLVVIPKSVTPSRIVENFDVWDFRLDKDELGEIAKLDQGKRLGPDPDQFGG

SEQ ID NO: 3014 - protein, 435 aa, Rubrivivax gelatinosus PM1
MTTDLDAYWMPFTANRQFKKAPRLLSKASGMHFWTPEGREVLDGIAGLWCVNAGHARPKIVEAIRAQALELDFAPPFNMAHPKAFELAERLVQLTPAGLNKVFYTNSGSESVETALKMAIAYHRARGEGSRTRLIGRERGYHGVNFGGISVGGMVANRKMFGSMLTGVDHIRHTHDPARNAFSIGQPQHGAELADDLERLVALHDASTIAAVIVEPVAGSTGVLLPPQGYLERLRAICDKHGILLIFDEVITGFGRTGAPFAAQRFGVTPDLMTVAKGLTNGCVPMGAVFAKQHIHDVFMNGPEHLIEFFHGYTYSGHPLACAAALGTLDTYAEEGLLTRASEMEAYFADALHSLKGLPHVIDIRNIGLVGGIELAPIDGSPGKRAFDIFLECWERGVLIRTTGDTVALSPPLIISKTHVDQIVGTLADALKRAG

SEQ ID NO: 3015 - protein, 327 aa, Synechocystis sp. PCC 6803
MQSFNRINSMKYFPLSNGEQIPALGLGTWKSSPQVVGQAVEQALDLGYRHLDCAAIYGNEAEIGATLANAFTKGVVKREELWITSKLWSNAHHPDAVLPALEKTLQDLGLDYLDLYLIHWPVVIQPDVGFPESGDQLLPFTPASLEGTWQALEKAVDLGLCHHIGVSNFSLKKLEMVLSMARIPPAVNQVELHPYLQQSDLLTFANSQNILLTAYSPLGSGDRPAAFQQAAEPKLLTDPVINGIAAEQGCSAAQVLLAWAIQRGTVTIPKSVNPERLEQNLRAADITLTDSEMAKIALLDRHYRYVSGDFWTMPGSPYTLQNLWDEI

SEQ ID NO: 3016 - protein, 292 aa, Photorhabdus luminescens subsp. laumondii TTO1
MDNQPIIRLADGNHMPQLGLGSWASDDQQIAETIHAALDIGYRAIDTAAIYNNEKGVGNALQETDIPREDIFVTTKLWNDRHLDARAALTESLEKLQLDYVDLYLIHWPAPPQDQYVGAWQQLIELQKEGLIRSIGVSNFQPEHIQRLINETGVHPVINQIELHPLLQQRQLHAWNATHNIVTESWSPLAQGGENVFDNQLVQHLTQKYGKTPAQVVIRWHIDNGMIVIPKSTTLSRIKENFDVFDFKLEKEDLTAMTTLDIGKRLGPTPEIFVDFSEFIQLLEQNSANNQC

SEQ ID NO: 3017 - protein, 396 aa, Triticum aestivum
MALSISAPTSSPFLPAPRQVGRWSSSPSSAKPAVFSLRRPVVVARAAAGNAPSSPAGAVVTELDVVSSFSEIVPDTVVFDDFEKFAPTAATVSSSLLLGIAGLPDTKFKSAIDTALVDGECNTMEKPGDRMSCYLTKALGNVGAELAHQVPGRVSTEIDARLAYDTQGIVQRVHELLQIYNEHDIPSERLLFKIPATWQGIEASRLLESEGTQTHLTFVYSFAQAAAAAQAGASVVQIFVGRIRDWAKNHSGDPEIDEALKKGEDAGLALVKKAYVYIHKNGYKTKLMAAAVRNKQDVFSLLGIDYIIAPLKILQSLDESVTDSDEKYGYVQRLTPSLDKMYNFSQEELVKWDQLSLAAAMGPAAEELLASGLEGYANQARRVEELFAKIWPPPNV

SEQ ID NO: 3018 - protein, 192 aa, Glycine max
  unsure (1)..(192): unsure at all Xaa locations
MADSDNDSGGAHNGGKGSEMSPREQDRFLPIANVSRIMKKALPANAKISKDAKETVQEVRVKVSSAFITGEXADKCQREKRKTINGDDLLWAMTTLGFEDYVEPLKGYLQRFREMEGEKTVAARDKDAPPLTNATNSAYESANYAAAAAVPGGIMMHQGHVYGSAGFHQVAGGAIKGGPVYPGPGSNAGRPR

SEQ ID NO: 3019 - protein, 310 aa, Anabaena variabilis ATCC 29413
MDELGHPPISELKPEASRFFYQEAIKLYHLTNEEGVTIEDRWIKRLEDISIPIRVYTPRDEVDNINSIQEKSTLYPILVYFQGGGWIFGNLDSADAPCSFLCKHINCIVVSVQYRQAPEYKCPIPVIDALEAIKWVHKNSQSLGGDAQKIAVGGESAGANLAAVAAIKLRDEGNISLEAQLLITPVTQYGFNTQSYQAGYTKGLSLETMKWFWNHYLENDLQGEEYYASPLKVQDARNLPPCLIVTAEHDPLRDDGLLYAQYLQSFQVKVKILHYESFIHSFIRMIRVIEDTRQALYEIAINFREMLYFY

SEQ ID NO: 3020 - protein, 502 aa, Novosphingobium aromaticivorans DSM 12444
MASSEGQLSKLGEAARTFLATRPGLLIAGRNTPAASGARRDVLDPSTGLVVTDVAEGGAADVDAAVAAARATFQSAEWRDMRPLARERLLHRLADLIERDADILAELEVIDTGKILPMARHGDLVIALDSLRYMAGWTTKIEGTTIDPSFSYIPPIRFSARTVRQPVGVVGQIIPWNFPLVMAIWKIAPALAAGCTVVLKPAEDTPLTALYLGRLIAEAGFPAGAVNIVTGGREVGMAIVEHPGIDKIAFTGSTAAGQDIQRRAAATMKRLSLELGGKSPVVILEDCPVPMAVEGAAGAIFFNHGQVCTAGSRLLVHRSIYEDVVQGLAHAANGMVLGEGMDPAGQMGPLISARQRDRVAGYVQGALDQGARLLAGGEAPDRDGFFYRPTVLADGTPSMTIFQEEVFGPVVIAMPFDTEEEALALANDSCFALGASVWTQNLAAANRFAGALRSGNVWINAHNILDPAVPFGGWKMSGYGRELGHSAVELYTEAKSITMPLL

SEQ ID NO: 3021 - protein, 477 aa, Rubrivivax gelatinosus PM1
MRDYLKFYIDGHWVDPVKAKSLDVVNPATEASAGRISMGTAADVDRAVKAARKAFASYSQTSVAERASLLERIIVEYKKRYADMAAAITEEMGAPVALSKDAQAAMGIAHLQIALDVLKNYKFQELRDTTLMVKEPIGVCGFITPWNWPVNQIACKVAPALAVGCTMVLKPSEIAPFSAYLWTEILHAAGVPAGVFNLVNGDGPTVGAALSSHPDVDMVSFTGSTRAGVEVARNAAPTVKRVHQELGGKSPNIILPDADFKHAITAGVQGVMLNSGQSCNAPTRMLVPNARLDEALAIAKEAAEATTVGDPASGAALGPVISATQWDKIQTLIHKGIEEGATVVAGGPGKPKGLETGYYVKPTVLGHVNNQMTVAREEIFGPVLTILGYDTVDQAVEIGNDTPYGLAAYVSGTDPEATRKVASRLRAGQVNINSVPLDFKAPFGGFKQSGNGREWGDHAFGEFLEVKAVLGYAPKAA

SEQ ID NO: 3022 - protein, 280 aa, Glycine max
MGVFSENPNPDPVVIRQVWASNLESEFQLIRELIDHYPFISMDTEFPGVVFRPHLDPTKPYNHRNNNRNRHSDHYRLLKSNVDALNLIQVGLTLTDAAGNLPDLAGNRSIWEFNFRDFDVARDAYALDSIDLLRRQGIDFARNATDGVDSTRFAELMMSSGLVCNDSVSWVTFHSAYDFGYLVKILTRRNLPTRLEEFLKTVKVFFGDNVYDVKHMMRFCDTLYGGLDRVARTLNVERAVGKCHQAGSDSLLTWHAFQKIVDIYFVKDEHRKHAGVLFGL

SEQ ID NO: 3023 - protein, 438 aa, Rubrivivax gelatinosus PM1
MSQPTREQQIAALEKDWAENPRWKGLKRGYSAADVVRLRGSLQPEYTIAKRGAEKLWAQCNGASKKGYVNAFGAITAGQAMQQAKAGVEAVYLSGWQVAADGNTSETMYPDQSLYAYDSVPTMVRRINNTFKRADEIQWSRGTGPGDKDFIDYFLPIVADAEAGFGGVLNAFELMKNMIAAGAAGVHFEDQLAAVKKCGHMGGKVLVPTQEACEKLIAARFAADVMGVSTIVLARTDAEAANLITSDHDANDKPFLTGERTQEGFYRVKNGLEQAISRGVAYAAYADLVWCETGTPDLGFAREFAQAVHAKHPGKLLSYNCSPSFNWKKNLDDKTIAVFQEKLSELGYKYQFITLAGIHINWYNTFQFAQAYAKGEGMKHYVEMVQEPEFKAREQGYTFVSHQQEVGAGYFDDVTTVIQGGSSSVKALTGSTEEEQFH

SEQ ID NO: 3024 - protein, 334 aa, Clostridium acetobutylicum ATCC 824
MKKNHTITLIPGDGIGPEVTGAAKKVIEAAGVSITWDIVEAGAKVMDEYGTPLPEYVLESIKKNKIALKGPITTPVGSGFRSVNVALRQTFNLYANVRPIKTYEGIPTRYKDVDLIIVRENTEDLYAGIEHKIGDYAAESIKIITREASERIADFAFDMAVKQNRKKVTAVHKANIMKFSDGLFLDCARKVAEGYKEKEFEDMIVDAMSMKLVQNPEKYDVLVMPNLYGDILSDMAAGLVGGLGVAPGANIGKEISIFESIHGSAPDIAGKNIANPTAAILSGVMMLRYIGELEAADKIDNAIKVVLKEGTKVTSDLGGNATTDEFANEVIKNI

SEQ ID NO: 3025 - protein, 1351 aa, Salmonella typhimurium LT2
MSQEYTEDKDVTLTKLSSGRRLLEALLILIALFAVWLMAALLSFNPSDPSWSQTAWHEPIHNLGGAPGAWLADTLFFIFGVMAYTIPVIIVGGCWFAWRHQSTDDYIDYFAVSLRLIGVLALILTSCGLAAINADDIWYFASGGVIGSLLSTTLQPLLHSSGGTIMLLCIWAAGLTLFTGWSWVSIAEKLGGWLLNILTFASNRTRRDDTWVDDEEYDDEYDEETDGVQRESRRARILRGALARRKRLAEKFSNPRGRQTDAALFSGKRMDDDEDIQYSARGVAADPDDVLFSGNRATQPEYDEYDPLLNGHSVTEPVAAAAAATAVTQTWAASADPIMQTPPMPGAEPVVAQPTVEWQPVPGPQTGEPVIAPAPEGYQPHPQYAQPQEAQSAPWQQPVPVASAPQYAATPATAAEYDSLAPQETQPQWQPEPTHQPTPVYQPEPIAAEPSHMPPPVIEQPVATEPEPDTEETRPARPPLYYFEEVEEKRAREREQLAAWYQPIPEPVKENVPVKPTVSVAPSIPPVEAVAAAASLDAGIKSGALAAGAAAAAPAFSLATGGAPRPQVKEGIGPQLPRPNRVRVPTRRELASYGIKLPSQRIAEEKAREAERNQYETGAQLTDEEIDAMHQDELARQFAQSQQHRYGETYQHDTQQAEDDDTAAEAELARQFAASQQQRYSGEQPAGAQPFSLDDLDFSPMKVLVDEGPHEPLFTPGVMPESTPVQQPVAPQPQPQYQQPQQPVAPQPQYQQPQQPVAPQPQYQQPQQPVAPQPQYQQPQQPVAPQPQYQQPQQPVAPQPQYQQPQQPVAPQPQYQQPQQPVAPQPQYQQPQQPTAPQDSLIHPLLMRNGDSRPLQRPTTPLPSLDLLTPPPSEVEPVDTFALEQMARLVEARLADFRIKADVVNYSPGPVITRFELNLAPGVKAARISNLSRDLARSLSTVAVRVVEVIPGKPYVGLELPNKKRQTVYLREVLDNAKFRENPSPLTVVLGKDIAGDPVVADLAKMPHLLVAGTTGSGKSVGVNAMILSMLYKAQPEDVRFIMIDPKMLELSVYEGIPHLLTEVVTDMKDAANALRWSVNEMERRYKLMSALGVRNLAGYNEKIAEAARMGRPIPDPYWKPGDSMDVQHPVLEKLPYIVVLVDEFADLMMTVGKKVEELIARLAQKARAAGIHLVLATQRPSVDVITGLIKANIPTRIAFTVSSKIDSRTILDQGGAESLLGMGDMLYSGPNSTMPVRVHGAFVRDQEVHAVVQDWKARGRPQYVDGITSDSESEGGGGGFDGGEELDALFDQAVNFVTQKRKASISGVQRQFRIGYNRAARIIEQMEAQGIVSAQGHNGNREVLAPPPFE

SEQ ID NO: 3026 - protein, 304 aa, Brucella melitensis 16M
MCWHKFARYWDVEIREIPMEPGRLFMGPEQMLEAVDENTIGVVPTFGVTYTGNYEFPEPLQDALDKLQKTKGLDIDIHVDAASGGFLAPFCAPDIPWDFRLPRVKSISASGHKYGLAPLGCGWVVWRDKEALPEELIFNVDYLGGQVGTFAINFSRPAGQVISQYYEFMRLGREGYTKVQQAAYRVAQYIAREIEPLGPYEFICAGEEKGGIPAVCFRIREGEDPGYSLYDLSERLRLTGWQVPAFALSGKASDITVMRVMCRRGFEMDLAALFIRDFKAGIEFFKSHPSPKITPSMGTGFHHT

SEQ ID NO: 3027 - protein, 80 aa, Glycine max
  unsure (1)..(80): unsure at all Xaa locations
NTTSSNRNASFTSLKSIAGYPTIKTNKHITFIASNGGRMQCMHVWPQFGKKKXENIYYLPDLEDAHXANEVXYLLTKGWI

SEQ ID NO: 3028 - protein, 167 aa, Brucella melitensis 16M
MKITLEVIMTGSNYPARDLIASVFGTEALQEIAASRGFREKEMQANAVYQIIHDELFLDGNARQNLATFCQTWDDDYVHKLMDLSINKNWIDKEEYPQSAAIDLRCVNMVADLWNAPKFADNATGTNTIGSSEACMLGGMAMKWRWRKKMQEMGKPTDKPNFVCGPV

SEQ ID NO: 3029 - protein, 178 aa, Zantedeschia aethiopica
MASSMMVSTAAVSRTSPAQSNMVVPFAGLHSSAAFPVTRKFADSSKLPSNGLRVRCMQVWPPEGKKKFETLSYLPPLTREQLGQEVDYLIRNGWIPCIEFCKVGFVYREYHNSPGYYDGRYWTMWKLPMFGCTDSSQVLKEVDECSKAYPDYFNRIIGFDNTRQVQCISFLTYKPEGN

SEQ ID NO: 3030 - protein, 478 aa, Mycobacterium avium subsp. paratuberculosis str. k10
MREYLKFYIDGQWVDPVRPNTFDVENPATEQVCGKISLGSAADVDVAVGAARRAFGRWSQSSREDRLDLLQAILAEYQKRADDLAAAVTEEIGAPPSLAAGPQVFLGIGHLTTAIEVLKNFPFTEQRGATLIAREPIGVCGLITPWNWPINQVAVKVYPALATGCTVVLKPSEVAPFSSYIFAEILAAAGVPAGVFNLVNGDGPGVGAALASHPDIDLVSFTGSTRAGVEVARNAAPTVKRVTQELGGKSPNIVLDDGGFADAVRAGVANMMPNSGQSCNAPSRMLVPASRMAEAISIAREVAEQVQVGDPDDATAIGPVASRAQFEKVQRLIQQGIDEGATVVAGGPGRPAGLDQGYYVKPTVFADVTNDMTIAREEIFGPVLCILGYDDLDHAVRLANDTDYGLAGYVSGADLDTAREVAGKIRAGWVTINHAFDLNAPFGGYKRSGNGREWSDFGFHEYLEVKSILGYAPAQGDQ

SEQ ID NO: 3031 - protein, 119 aa, Bacteroides thetaiotaomicron VPI-5482
MVKANATAPAINVFETEKEYKVELAAPGMTKEDFNVRIDEDNNLVISMEKKTENKEEKKEGRYLRREFSYSKFQQTMILPDNVDKEKISAAVENGVLSVQLPKISEEEVKKAEKQIEVK

SEQ ID NO: 3032 - protein, 447 aa, Glycine max
  unsure (1)..(447): unsure at all Xaa locations
VLASLHHLSNYMTNLTTXLNRLQDFPCYSVLEEHSVDVHDTIAVVVHKNSPRETHFRRAGPRQKVYFESEDVYACIVTCGGLCPGVNTVIREIVCGLYHMYGVHKVLGIEGGYRGFYSCNTIPLTPKVVNDIHKRGGTILGTSQGEGGNDTLKIVDSIQDRGINQVYILGGDGTQRGASVIFEEIRRRGLKVSVVGIPESVDNDIPVIDKSFGFDTAVEEAQRAINAAHVEAESTENGIGVVKLMGRHSGFISMYATLASRDVDCCLIPESPFYLEGPGGLFEFIRKRLAENGHMVIVISEGAGHELISESLSATNKQEASGNKLLQDVGLWLSQKIKDHFTKSQKMDITLKYIDPTYMIRAVPSIASDNVHCTLLAQSAVHGAMAGYTGFAVGTVNGKHAYIPFYRINEIEKKVVITDRMWARLLSSTNQPSFLNPKDITTHQTGN

SEQ ID NO: 3033 - protein, 298 aa, Triticum aestivum
NPFPPPVPTLLCLNINIVSEAAMKRSVRTIDDFVYTVIDKKIEQMGRDGQEFAKKQDILSRFLLEREKDPGCFDNKYLRDIILNFMIAGRDTTAGTLSWFLYVMCRDQRIQDKIAREVREATTGDRQNVGGLQEFTACLTEDAISSMHYLHAALTETLRLYPAVPTDVKCCFSDDTLPDGHAVRRGDMVNYQPYAMGRMKFLWGDDAEEFRPDRWLDDDGVFVPESPYKFTAFQAGPRICLGKEFAYRQMKIFAAVLVYLFRFETWEHDSRVGHRPMLTLKMDGPLYVRASPRRSTGN

SEQ ID NO: 3034 - protein, 250 aa, Zea mays
MYFRPPPKGPEWYASDAETGQAARPLYPMMLEDPRLRWAFIRKVYSILSIQMLLTVAVAAVVVFVRPVALFFVSTPGGFGLYIFLLILPFIVLCPLYYYYQHHPVNLLLLGLFTVAISFAVGLTCAFTKGEVILESAVLTAAVVLSLTAYTFWAAKRGHDFSFLGPFLFAAVMILMLFALIQLFFPLGRISLMIYGGLAALVFCGYIIYDTDNLIKRYSYDEYVWAAVALYLDVINLFLSLLTLFRAADS

SEQ ID NO: 3035 - protein, 441 aa, Mycobacterium smegmatis
MCMLKQSQPTRRPTRPQRTFTYPGGKLELPILKATEGTDSVALGKFLAETNLTTFDSGFMNTASTKSAITYIDGEQGILRYRGIPIEQLAEKSTFIEVSYLLIYGELPTPTQLEEFTTKIQRHTLLHEDLKRFFDGFPRNAHPMPVLSSAVNALSAYYQDSLDPKDDEQVELSTIRLLAKLPTIAAYAYKKSAGQPFLYPDNSLSLVENFLRMTFGFPAEPYEVNPDVAKALDMLFILHADHEQNCSTSTVRLVGSSQANLFTSISGGINALWGPLHGGANQAVLEMLDAIKADGGDTKKFMERVKNKEAGVKLMGFGHRVYKNYDPRAAIVKKTADQILETLGVQDDLLEIAKGLEEVALNDDYFIERKLYPNVDFYTGVIYRAMGFPTRMFTVLFALGRLPGWIAHWREMHEDPTTKIGRPRQLYTGYTERDYVPMSDR

SEQ ID NO: 3036 - protein, 431 aa, Mycobacterium smegmatis
MWLRRDLRLGDLPALQAARGTDDSSVLLCFVVDPRLARSSGERRLAFLFDSLRELDDKLDGRLLVVRGRPDEEIPRLARAVDAEAVHISADFTPFGRRRDEAVAEALGEVPLEATGSPYLVSPGRITKDDGEPYKVFTPFFRRWRDHGWRRPAESSVPSSAVVDPADIANSGRIAVPTAPVKLSFPAGEDAARQRWAEFVDADLADYDEIRDDPAADATSRMSAYLKYGNIHPRTLAVDLGKGKGAQAYLRELAFRDFYADVLWHWPHSLWHNWNRRFDAIELDTDDAAYERFEVWKAGRTGFPLVDAGMRQLNETGWMHNRVRMITASFLVKDLHLPWWWGAEYFLEQLVDGDMASNNHGWQWAAGTGTDAAPYFRVFNPQTQAKKFDPKGEYVRRWVGDVEADDYPGPIVDHSAERAEALRRYGEIGEA

SEQ ID NO: 3037 - protein, 148 aa, Pseudomonas syringae pv. syringae
DVIDVRGLTATGRFTFDPGFMSTASCDSKITYIDGDNGILLHRGYPIEQLAEQSDYLETCYLLLNGELPTVEQKAQFVAVVKNHTMVHEQLKTFFNGFRRDAHPMAVMCGVVGALSAFYHDSLDINNPQHREISAVRLVAKMPTLAAM

SEQ ID NO: 3038 - protein, 56 aa, Zea mays
MSDGTATCIDIILAIILPPLGVFFKFGCGVEFWICLILTFFGYLPGIIYAVWAITK

SEQ ID NO: 3039 - protein, 181 aa, Pringlea antiscorbutica
PGTRGILSDLTCDSDGKIDKFIGGESSLPLHELDSNGGGGRYFLGMFLGGAYEEALGGVHNLFGGPSVVRVSQSDGPHSFAVTRAVPGQSSADVLRAMQHEPEIMFQTLKHRAAELMHTKGGEEEEDDDEFNNAAACLDRSFHNMPYLANEPASLSNSLSAAINNLGFYYCDEDGFDYLSA

SEQ ID NO: 3040 - protein, 479 aa, Burkholderia cepacia R1808
MEQAKHFIAGEWTLPAQLEPIAVVDPSDGRPFATIARGTAPDIERAVAAARDAFAGPWGAASAAERGRVLMRLSARVTDCIEELATIEARDTGKPLKQARADAAALARYFEFYAGAADKLHGETLPYQAGYTVLTVREPHGVTGHIVPWNYPMQIFGRSVGAALAAGNACVVKPAEDACLSVLRVAELAIEAGLPAGALNVVTGYGHEAGAALARHPGIDHISFTGSPATGKLVAQMAAENHVPVTLELGGKSPQIVFADADLDAALPVLVSAIVQNGGQTCSAGSRVLIEHAAYEPLVERLATAFNALRVGPSRADLDCGPLINAKQQQRVWDFLSDAQHDGIPMAAQGQVVADAPESGFYQAPALLRDVPPSHRLAQEEVFGPVLAAMRFVDEEEAVALANGTPYGLVAGIWTRDGARQLRLARRVRAGQVFINNYGAGGGVELPFGGVGHSGHGREKGFEALYGFTALKTIAIRHG

SEQ ID NO: 3041 - protein, 268 aa, Archaeoglobus fulgidus DSM 4304
MDLLELIDDAAAMMPKERMVVVEEDVITVVGDVHADIEALRKIEREIEGLAIFLGDYADRGDYPVECYEKVLRLFLEGKALLLRGNHESTGVYPHQLPYQLREKFGERGEEVYESLIRMWNKMPLSAIVEGEIWMAHGGVPTKQCRIHAEGISRKEIERPDDITALEIMWNDPWEREECGENYNRGVMYFFGKKNSEMLLKELGVKVIIRAHEPQKVLKAEQDGRVVTIGSCALPYSISEFALLKIDFSRGFKNGVDLIRKFGSIYNV

SEQ ID NO: 3042 - protein, 557 aa, Glycine max
EAEVAEVQAWWNSERFRLTKRPYTARDVVSLRGNLRQTYASNEMAKKLWCLLKNHQANGTASRTFGALDPVQVTQMAKHLDTIYVSGWQCSATHTTSNEPGPDLADYPYDTVPNKVEHLFFAQQYHDRKQREERMRMSREERARTPYVDYLRPIIADGDTGFGGTTATVKLCKLFVERGAAGIHIEDQSSVTKKCGHMAGKVLVAISEHINRLVAARLQFDVMGVETVLVARTDAEAANLIQSNIDTRDHQFILGVTNPNLKGKSLATLMQQGMAAGKSGAELQALEDEWLSKAQLKTLSEAVVEAIERQNIGEEEKRRKLNEWMHHSSYERCLSNEEGREIAEKLGVRNLFWDWDLPRTREGFYRFKGSVIASVVRGWAFSPHADVIWMETASPNVIECTQFSEGVRSKHPQMMLGYNLSPSFNWDASGMSDEQMRDFIPKIAKLGYVWQFITVGGLHSNALITSTFARDFANRGMLAYVERIQREERNNGVDTLAHQKWAGANYYDRYLKTVQGGVASTAAMGKGVTEEQFKESWTRPGAVEIDRGSIVVAKARM

SEQ ID NO: 3043 - protein, 110 aa, Quercus suber
SLDIWDPFEGFSAVASVPPSARETTAFATARIDWKETPEAHIFKADLPGLKKEEVKVEVEDGNVLQISGERSKEHEEKNDKWHRVERSCGKFMRRFRLPENAKVDQVKAN

SEQ ID NO: 3044 - protein, 347 aa, Escherichia coli K12
MKNSKAILQVPGTMKIISAEIPVPKEDEVLIKVEYVGICGSDVHGFESGPFIPPKDPNQEIGLGHECAGTVVAVGSRVRKFKPGDRVNIEPGVPCGHCRYCLEGKYNICPDVDFMATQPNYRGALTHYLCHPESFTYKLPDNMDTMEGALVEPAAVGMHAAMLADVKPGKKIIILGAGCIGLMTLQACKCLGATEIAVVDVLEKRLAMAEQLGATVVINGAKEDTIARCQQFTEDMGADIVFETAGSAVTVKQAPYLVMRGGKIMIVGTVPGDSAINFLKINREVTIQTVFRYANRYPVTIEAISSGRFDVKSMVTHIYDYRDVQQAFEESVNNKRDIIKGVIKISD

SEQ ID NO: 3045 - protein, 262 aa, Schizosaccharomyces pombe
MSIVNILSVNVLNNPAKFSDPYKFEITFECLEPLKSDLEWKLTYVGSATSQSYDQILDTLLVGPIPIGINKFVFEADPPNIDLLPQLSDVLGVTVILLSCAYEDNEFVRVGYYVNNEMEGLNLQEMDDAEIKKVKVDISKVWRSILAEKPRVTRFNIQWDNPDFDDAPPVQPDADEEEEEEEADEMEEEFDEEGEGDEEEEEEDDGDGDGEGDGDGEGENDGKGSEEEEEEEIDIEEEEEESALANASAAEEKPEEKPETSQ

SEQ ID NO: 3046 - protein, 489 aa, Bordetella pertussis Tohama I
MTQLTQPLSRAELLRDACYIDGKWVGAGNGPSIPVDNPSTGKTIISVPKLGRKEAEQAIDAAEAALPAWSARTGKERAAILLKWAQLMMENQQDLAVIMTSEQGKPVPEAAGEIAYAASFLEWFAEEAKRIDGDILQSPKGGQRLMVLKQPIGVTAAITPWNFPAAMITRKVGPALAAGCTMVVKPAQQTPLTALALAVLAVLAGVPAGVFQVVTGSSREIGAALCESEVVRKLSFTGSTEVGRTLMEQCAPTIKKLSLELGGNAPFIVFDDADLDRAIDGILASKYRNAGQTCVCANRIYVQAGVYEEVAKRLVEKVNAMKVGDGFEQGVTQGPLIDTAAVAKVQEHIADATAHGAKVIAGGEPHALGGSFFQPTVVRDVTQSMRFAVEETFGPVAPLFKFDSEDEVIGMANNTIFGLAAYFYTRDYARIWRVSEALEYGIVGINTGIISNEVGPFGGVKQSGLGREGSKYGIEDYLELKYLCVDLGA

SEQ ID NO: 3047 - protein, 444 aa, Bacillus cereus ATCC 14579
MKQTKLTGRIVVPTDPDYDVARMNLNLSIPKLPCIIVFCQNNKDVCNALKWARERHIPFRLRSGRHSYENFSLLNRGLIIDVSEMHRITVNTEKLTATIEAGANLGTVYKELWNYGVTIPAGTSASVGVVGLALGGGIGMLSRLFGLTCDQLMEVEMVQACGKFGAKLIRANEQENSNLFWACRGGGGGSFGIVTSLTFRVHPIKNVSIFSITWEWEDFIAAFQAWQNWAPYIDERLTSSIELFAKQRNKIEAQGEFVGSPSELHSLLSPLLETGSPSLFIEEVPYIKAVEFFNGGNIPENFKRSGSYVYKPIPLKGIQIMQSFLSHAPNKDASIWHQSLIGAVENISPNETAYFHRKAIIAQEYITSWKCDDEENRNIRWVKGLRESLDPYTLGDYVNWPDIDIKNWQTSYYGSNFHRLRKVKTMYDPCDVFHFQQSIPPFHT

SEQ ID NO: 3048 - protein, 454 aa, Arabidopsis thaliana
MVIKGMRVGKYELGRTLGEGNSAKVKFAIDTLTGESFAIKIIEKSCITRLNVSFQIKREIRTLKVLKHPNIVRLHEVIILLVLASKTKIYMVLECVTGGDLFDRIVRFLLAPVTVLLVSKRLVSKGKLSETQGRKMFQQLIDGVSYCHNKGVFHRDLKLENVLLDAKGHIKITDFGLSALSQHYREDGLLHTTCGSPNYVAPEVLANEGYDGAASDIWSCGVILYVILTGCLPFDDANLAVICRKIFKGDPPIPRWISLGAKTMIKRMLDPNPVTRVTIAGIKAHDWFKHDYTPSNYDDDDDVYLIQEDVFMMKEYEEEKSPDSPTIINAFQLIGMSSFLDLSGFFETEKLSERQIRFTSNSLAKDLLENIETIFTEMGFCLQKKHAKLKAIKEESTQKRQCGLSVTAEVFEISPSLNVVELRKSHGDSSLYKQLYERLLNELGSSSQVQELLA

SEQ ID NO: 3049 - protein, 440 aa, Sorghum bicolor
MSTTKVKRRVGKYELGRTIGEGTFAKVRFARDTVTGEAVAIKILDKDKVLKHKMVEQIKREISTMKLIKHPNVVRIYEVMGSKTKIYIVLEFATGGELFQRIVNHGRMREDEARRYFQQLINAVDYCHSRGVYHRDLKPENLLLDSYGNLKVSDFGLSALSQQMKDDGLLHTTCGTPNYVAPEVLEDQGYDGAMADLWSCGVILFVLLAGYLPFEDSNLMTLYKKISNAEFTFPPWTSFPAKRLLTRILDPNPMTRITIPEILEDEWFKKGYKRPEFDEKYDTTLDDVDAVFNDSEEHHVTEKKEEEPVALNAFELISMSAGLNLGNLFDSEQEFKRETRFTSKCPPKEIVRKIEEAAKPLGFDVQKKNYKLRLEKVKAGRKGNLNVATEILQVAPSLHMVEVRKAKGDTLEFHKFYKNLSKTLKDVVWKSDDTQMLHAA

SEQ ID NO: 3050 - protein, 342 aa, Zea mays
  unsure (1)..(342): unsure at all Xaa locations
MDPNGLKTGGLLLPTIERRCTSPPSVIVIGGGISGVAAARALSNSSFKVTVLESRDRIGGRIHTDNSFGCPIDMGASWLHGVCNENPLAPLISYLGLRLYRTSDDNSVLYDHDLESYALFDKDGNQVPKETVDKVGETFERILEETVKVRDEQEHDMPLLQAISIVFERHPHLKLEGLDDQVLQWXCVCRLDPRVRADADEISLKNWDQERVLTGGHGLMVNGYYPVIEALAQGLDIRLNQRVTEITRQHNGVKGTTEDGTSYLADACIISVPLGVLKANVIKFEPELPQWKSSAIADLGVGTENKIAMHFDRVFWPNVEVLGMVGPTPKACGYFLILHKAT

SEQ ID NO: 3051 - protein, 440 aa, Sorghum bicolor
MSATKVKRRVGKYELGRTIGEGTFAKVRFAKNTETGEPVAIKILDKEKVLRHKMVEQIKREISTMKLIKHPNVVRIYEVMGSKTKIYIVLEYVTGGELFDTIANHGRMREDEARRYFQQLINAVDYCHSRGVYHRDLKPENLLLDSYGNLKVSDFGLSALSQQIKDDGLLHTTCGTPNYVAPEVLEDQGYDGAMADLWSCGVILFVLLAGYLPFEDSNLMTLYKKISNAEYTFPPWTSFPAKRLLTRFLDPNPMTRITIPEILEDEWFKKGYKRPEFDEKYDTPLDDVDAVFNDSEEHHVTEKKEEEPVVLNAFELISRSAGLNLGNLFDSEQEFKRETRFTSKCPPKEIVRKIEEAAKPLGFGVQKKNYKLRLEKVKAGRKGNLNVATEILQVAPSLHMVEVRKAKGDTLEFQKFYKNLSKTLKDVVWKSEDLQMQPAS

SEQ ID NO: 3052 - protein, 315 aa, Triticum aestivum
  unsure (1)..(315): unsure at all Xaa locations
LQYEVLQWCICRLEAWFATDVDNISLKNWDQEHVLTGGHGLMVNGYDPVIKALSRDLDVHLNHRVTKIIQRYNKVIVCVEDGTSFVADAAIITVPLGVLKANIIKFEPELPYWKLSAISDLGVGLENKIALRFNTVFWPNVEVLGRVAQTSNACGYFLNLHKATGHPVLVCXXXAGRFAYEMEKLSDEESVNFVMSQLRRMLPGATEPVQYLVSRWGTDPNSLGSYSCDLVGKPADLYERFCAPGGQXLSFAGEAACIDHSGSVHGAYSSGIDAAEDCRRRLSTQLGISDLFQVGKIVMREEMTEVMVPLQISRL

SEQ ID NO: 3053 - protein, 442 aa, Ralstonia eutropha JMP134
MTAADVQAAIAAADRALPAWRATSSRERSRLLRRWFDLCMAHQEDLATILTLEQGKPLKESRGEIAYGSGFIEWFSEEARRIYGDVIPAPSSDRRIIVIKQPVGVVAAITPWNFPNAMITRKAGAALAAGCTIVIKPASATPFSALALAALAKEAGIPDGVLNVVTGSASVVGGELTSSPVVRKLSFTGSTDVGKTLLEQCAGTVKKVSMELGGNAPFLIFDDADLDAAVAGVMASKFRNAGQTCVCANRIFVQDGVYDAFAEKLRIAVEAQVVGDGMAPGVDLGPLIDDAAIEKVREHIYDAVSLGAQVFTGGRAHALGGRFFKPTILTDVSPKAKLMNEETFGPLAPLIRFKTEEEAVAMANDTPFGLAAYFYTTNYARSWRVAEALECGIVGLNEGLISTEVAPFGGVKESGVGREGSKYGIEDYVEVKYICAGGLALR

SEQ ID NO: 3054 - protein, 148 aa, Triticum aestivum
HLMFLSARNESSESEDIQELINSSLKCNASTPADDMESGRGGAGAAGSTSSSPSPPVVLPSEQKARYSREEDPGRCSCSDSFFGKYFSFLLLMFVTASLVILPLVLPPLPPPPSMLMLVPVAMLLMLLVLAFMPTSGGRGATGPTAYL

SEQ ID NO: 3055 - protein, 267 aa, Yersinia pestis KIM
MSIPVFGLGTFRLQDQIVIDSVSQALTLGYRAIDTAQIYENEAPVGQAIQESGINRDELFITTKIWIANLSKDKLIPSLRESIQKLKTDYVDLTLIHWPSPNDEVSVAEFMSELLKAKGLGLTRQIGISNFTIDLMKQAIAAVGAEEIATNQIELSPLLQNRNVVDFAKQNGIAVTSYMTLAYGKALAEPVIKTIAEQHGATPAQVILSWAMQLGYGVIPSSTKAANLASNLLAQKLCLNAADMALIATLDRNERLVSPDGLAPKWD

SEQ ID NO: 3056 - protein, 591 aa, Zea mays
MCGILAVLGVAEVSLAKRSRIIELSRRLRHRGPDWSGLHCHEDCYLAHQRLAIIDPTSGDQPLYNEDKTVVVTVNGEIYNHEELKAKLKTHEFQTGSDCEVIAHLYEEYGEEFVDMLDGMFSFVLLDTRDKSFIAARDAIGICPLYMGWGLDGSVWFSSEMKALSDDCERFITFPPGHLYSSKTGGLRRWYNPPWFSETVPSTPYNALFLREMFEKAVIKRLMTDVPFGVLLSGGLDSSLVASVASRHLNETKVDRQWGNKLHTFCIGLKGSPDLKAAREVADYLSTVHHEFHFTVQEGIDALEEVIYHIETYDVTTIRASTPMFLMSRKIKSLGVKMVISGEGSDEIFGGYLYFHKAPNKKEFHEETCRKIKALHLYDCLRANKATSAWGVEARVPFLDKSFISVAMDIDPEWKMIKRDLGRIEKWVIRNAFDDDERPYLPKHILYRQKEQFSDGVGYSWIDGLKDHASQHVSDSMMMNAGFVYPENTPTTKEGYYYRMIFEKFFPKPAARSTVPGGPSVACSTAKAVEWDASWSKNLDPSGRAALGVHDAAYEDTAGKTPASADPVSDKGLRPAIGESLGTPVASATAV

SEQ ID NO: 3057 - protein, 122 aa, Citrullus lanatus var. lanatus
LSRLPGGPEVPFHPGREDKPEPPPEGRLPDATKGSDHLRDVFYTMGLSDQDIVALSGGHTLGRAHKERSGFEGPWTSNPLIFDNSYFTELLSGEKEGLLQLASDKALLSDPVFRPLVEKYAR

SEQ ID NO: 3058 - protein, 403 aa, Streptomyces coelicolor A3(2)
MLSSQSAQIVRDTLPTVGASLGTITDLFYRRMFEERPELLRDLFNRANQASGVQREALAGAVAAFATALVKHPDERPDAVLGRIANKHASLGITSDQYTLVGRHLLAAVAEVLGDAVTPAVAAAWDEVYWLMANALIAMEARLYARSDVEDGSVWQSMEIVERHEETPDTASFVLRPADGSPTRPFVPGQYVSVRAELPDGAHQIRQYSLSSAPGGGTWRFTVKRERSLDGQVPDGEVSTWLHTHARPGDVLRVSLPFGDLLLPEGDGPLLLASAGIGVTPMLAMLEHLATAAPDRPVTVVHADRSPALHAHRLELTALVERLPHASLHLWYEDTADHPDASADHVNEGWADLTGLSPVPGTTAFLCGPLSFMKAVRTDLLAHGLSPRAIHYEVFGPDLWLSK

SEQ ID NO: 3059 - protein, 121 aa, Zea mays
  unsure (1)..(121): unsure at all Xaa locations
MSASQSSMSGAGEPGARAVVWFRWDLRVEDNPALAAAARAAXGEVVPAYVWAPEEDGAYYPRRLXPRWWLSQSLKHLDASLRRXGAARLVTRRSNDAGAALLDLVRCTGATHLFFNTSTVR

SEQ ID NO: 3060 - protein, 258 aa, Oryza sativa
MRKKLGTRFPAARIKKIMQADEDVGKIALAVPVLVSRALELFLQDLIDRTYEITLQSGAKTLNSFHLKQCVRRYSSFDFLTEVVNKVPDLGGADSCGDDRALPRRRKALPNGSDPENEESRSSKMAVRSANISPRGRGRGRGRGRGRPPTKRKEVGYVQFEDESSMFADQGEALPGEETVPETIHGTESVPPSTHPPAEAPSAAEIPAPNPKVEEAKNDDHQPDWPMPDAIGNIGVGPSGFGHLTVQVDEDEDYDNED

SEQ ID NO: 3061 - protein, 339 aa, Salmonella typhimurium LT2
MKSIVIEKPNTLTIETRALPQPAPGEVRIKVKLAGICGSDSHIYRGHNPFAKYPRVIGHEFFGVIDAVGDNVNHDRIGERVSVDPVISCGHCYPCSVGKPNVCTSLVVLGVHRDGGFSEYAVAPARNAHRIPDNIADHHAVMVEPFTIAANVTGQVNPTEQDVALIYGAGPMGLTTVQALKGVYQVKTVIVVDRIEERLAMAKQSGADWTLNNGQHSLAEFLQQKALKPTLIVDAACHPAILQEAITLASPAARIVLMGFSSDPCEIVQQGITGKELAIYSSRLNANKFPVVIDWLNKGLIDPDKLITHTFDYQHVTDAIELFEKDQRQCCKVLLTFAK

SEQ ID NO: 3062 - protein, 373 aa, Candida maltosa
MSVKTKTITILPGDHVGTEIVNEAIKVLEAIEAATPYQKIHFDFKHHLIGGAAIDATGVPLPDDALESAKKSDAVLLGAVGGPKWWTGALRPEQGLLKIRKELNLYANIRPCNFASDSLLELSPLRPEVVKGTNLIIVRELVGGIYFGDREEQEESEDKQTAWDTEKYTVDEVTRITRMAAFMPLQDNPPLPIWSLDKANVLASSRLWRRTVDKVISEEFPTLSVQHQLIDSAAMILIQNPTKLNGIIITSNMFGDIISDEASVIPGSLGLLPSASLASLPDTNTAFGLYEPCHGSAPDLPANKVNPIATILSAASMLRLSLDCVKEAEALEEAVKQVLDKGIRTADLRGTRSTTEVGDAIVEAVTKILKEKA

SEQ ID NO: 3063 - protein, 608 aa, Glycine max
MDTKIGSLDAPKPNSNDVVSCNLTSSAAIQPCLPATVINGAGCSDSTLGGHLARRLVEIGVTDVFSVPGDFNLTLLDHLIAEPALHLVGCCNELNAGYAADGYARARGVGACVVTFTVGGLSVLNAIAGAYSENLPLICIVGGPNSNDYGTSRILHHTIGLPDFSQELRCFQTITCFQAVVNNLEDAHELIDTAISTALKESKPVYISISCNLPGIPHPTFSRDPVRFSLSPRLSNKMGLEAAVEAAAEFLNKAVKPVLVGGPKLRVATASDAFVELADACGYALAVMPSAKGQVPEHHPHFIGTYWGAVSTAFCAEIVESADAYLFAGPIFNDYSSVGYSLLLKKEKAIIVQPDRVVIANGPAFGCVLMKDFLKALAKRLKHNNTAYENYHRIFVPDGHPLKAAPREPLRVNVLFQHIQNMLSGETAVIAETGDSWFNCQKLKLPKACGYEFQMQYGSIGWSVGATLGYAQAVPEKRVIACIGDGSFQVTAQDVSTMLRCGQKTIIFLINNGGYTIEVEIHDGPYNVIKNWNYTGLIDAIHNGEGKCWTAKVFCEEELVEAIATATGPKKDSLCFIEVIVHKDDTSKELLEWGSRVSAANSRPPNPQ

SEQ ID NO: 3064 - protein, 358 aa, Escherichia coli K12
MKALARFGKAFGGYKMIDVPQPMCGPEDVVIEIKAAAICGADMKHYNVDSGSDEFNSIRGHEFAGCIAQVGEKVKDWKVGQRVVSDNSGHVCGVCPACEQGDFLCCTEKVNLGLDNNTWGGGFSKYCLVPGEILKIHRHALWEIPDGVDYEDAAVLDPICNAYKSIAQQSKFLPGQDVVVIGTGPLGLFSVQMARIMGAVNIVVVGLQEDVAVRFPVAKELGATAVVNGSTEDVVARCQQICGKDNLGLVIECSGANIALKQAIEMLRPNGEVVRVGMGFKPLDFSINDITAWNKSIIGHMAYDSTSWRNAIRLLASGAIKVKPMITHRIGLSQWREGFDAMVDKTAIKVIMTYDFDE

SEQ ID NO: 3065 - protein, 497 aa, ASPERGILLUS NIDULANS FGSC A4
MTPSLQRQLFYDGKPQHASSGRTFQSINPADATLLAEIPVASQSDIDAAITAAERAFPSWAQTPPIARARILQKAAALLRERNDEIARVETLDSGKAYSETSTVDVVTGADVLEYYANLVGGGGLNGETTQLREEAWVYSKKAPLGVCVGIGAWNYPIQIALWKSAPCLAAGNTMVYKPSEFTSLHGQTLAEIYKEAGLPDGVFNVVYGAGDVGSYLTSHPTVAKVSFTGQVSTGMKVSGAAAGNMKYVTMELGGKSPLLILPDADLENAVDGAMMANFYSTGQVCTNGTRVFIPKSMKKDFESRLVEKMQYIRPGPLFDENTNFGPLSSAVHQEKVTAYIRHGIEQDKATLLYGGLGKPSLPKDLEAGFWVRPTIFTDCTDDMRIVKEEIFGPVMSILTYDSVEEAVKRANTTELGLAAGVFTKDLNLAHRIIDQLEAGITWVNTWGESPAEMAVGGWKKSGLGVENGRRGIEAWVRNKSTLVDMGNAVATVFAKL

SEQ ID NO: 3066 - protein, 292 aa, Helicobacter hepaticus ATCC 51449
MAKNNKTQVILNEFFTLNNGNKIPKLGLGTWRIDDNVVEAAVREAFKVGYRHIDTAQAYGNERGVGEAVRKSKIKREELFITSKIRAEYKDYKSASASIDTSLKTMKLDFIDLMLIHSPQPWNSFRKGDYFKENVEVYNALEDAQKAGKVRSIGVSNFLQKDLENILKNCKTKPAANQILCHIGNTPFTLLDYCKKQNILAEAYSPIAHGELLKDPRVIELAKKYNVSPAQICIRYTLELGLVSLPKSKTPKYIAENAQVDFTFSKADLQTLKKLTFKDYGEHSYFPVFGGK

SEQ ID NO: 3067 - protein, 250 aa, Lycopersicon esculentum
MGKSYPTVSAEYLKAVDKCKRKLRALIAEKNCAPIMLRLAWHSAGTYDVCSKTGGPFGTMRFKAEQAHGANNGLDIALRLLEPIREQFPTLSHADFHQLAGVVAVEVTGGPDVPFHPGREDKPEPPVEGRLPDATKGCDHLRDVFVKQMGLSDKDIVALSGAHTLGRCHKERSGFEGPWTANPLIFDNSYFTELLSGEKEGLLQLPSDKALLSDPAFRPLVEKYAADEDAFFADYAKAHLTLSELGFAEA

SEQ ID NO: 3068 - protein, 368 aa, Oryza sativa (japonica cultivar-group)
MGSTAADMAAAADEEACMYALQLASSSILPMTLKNAIELGLLETLQSAAVAGGGGKAALLTPAEVADKLPSKANPAAADMVDRMLRLLASYNVVRCEMEEGADGKLSRRYAAAPVCKWLTPNEDGVSMAALALMNQDKVLMESWYYLKDAVLDGGIPFNKAYGMTAFEYHGTDARFNRVFNEGMKNHSVIITKKLLDLYTGFDAASTVVDVGGGVGATVAAVVSRHPHIRGINYDLPHVISEAPPFPGVEHVGGDMFASVPRGGDAILMKWILHDWSDEHCARLLKNCYDALPEHGKVVVVECVLPESSDATAREQGVFHVDMIMLAHNPGGKERYEREFRELARAAGFTGFKATYIYANAWAIEFTK

SEQ ID NO: 3069 - protein, 126 aa, Zea mays
MTRVIHDSGDDMQKEALDLVSSDVNFPKGHFPDYRIGPNNQIIDPEETHEAVPLKEIVAKETAQLLEQHKRLSVRDLKEKFEKGLSGASKLSEEVDFFPETALQQPIVEKKMYKHMGSEMQSLWAA

SEQ ID NO: 3070 - protein, 401 aa, Chloroflexus aurantiacus
MQAVIAVLPGDGIGPEVVAEGVKVLQAIARRFGHQFTFHEALIGGCAIDATGEPLPAATITLCQSADAVLLGAVGGPKWDDPQARVRPEQGLLGIRKALGLFANLRPVRIYPQLINASPIRPERLQGVDLIVVRELTGGIYFGEKRRERTADGEWASDLCIYTEEEIVRVVRVAARLARQRRGKVTLVDKANVLETSRLWRSITTRLMQTEFPDLQFETMLVDACAMHLIRRPADFDVIVTENMFGDILTDEASMLAGSMGMLPSASLADGRLGLYEPIHGSAPDIAGQGKANPLATILSVAMLLRYSLDLTAKRLCRSGSGSGSTANVTAFAFRTAGSAEPRIRILDALMADATRPSHHLTEGPRNCCGPPENWQSATFSKNSAPQFGKRPICDHKNGGD

SEQ ID NO: 3071 - protein, 95 aa, Brassica napus
MTMDDATPSQRRSSGSSSNDAAAPLLPKSQGEEVAAYDEFNGASFSGAVFNLSTTIIGAGIMALPATMKILGLVLGIAMIVVMAFLTDASIEFLL

SEQ ID NO: 3072 - protein, 132 aa, Chloroflexus aurantiacus
MSKIDSIIEMIEGLNVLELVELKKKMEEKWGVTAAAPVMAMGAAMPVAAAGDGAAAAAPVEEKTEFDVILKEAGPNKIQVIKVVRELTSLGLKEAKDLVEGAPKPVREGVSKEEAEAAKAKLTEAGAVVEIK

SEQ ID NO: 3073 - protein, 339 aa, Ralstonia metallidurans CH34
MPEGIRVMDATARRFGIDFQWDHFDFSSYAYYERHGKMLPDDWFDTLVKYDAIYFGAVGWPAKIADHVSLWGSLLQFRRSFDQYVNLRPVRLMPGIKSPLADRKPGDIDFYVVRENTEGEYSSIGGRMFPGTEREIVMQETVMSRHGVDRILKFAFELAQKRPKKHLTSATKSNGISITMPYWDERVEAMAANYPGMKVDKYHIDILTAHFVQHPDWFDVVVASNLFGDILSDLGPACTGTIGVAPSGNINPDKVYPSLFEPVHGSAPDIAGQGIANPIGQIWCGAMMLEHLGHAEAGAAVLAAIEQVLAAGPGHAPLTRDIGGTASTADLGQAIAEAL

SEQ ID NO: 3074 - protein, 322 aa, Parachlamydia sp. UWE25
MEKNKLDQLKSMTTIVIDTGDIEAIKEYSPTDATTNPSLILSAVEKPAYKPLMEEAYHYSQKAKSSGEQISLFLDKLFVNVGCEILKLIPGRVSTEVDARLSFDVEGSIQKAQSLIALYKEMGIEKERILIKLASTWEGGLAAKQLEKMGIHCNMTLLFSMPQAIHCAEAQATLISPFVGRILDWYKKHDNVPGYAPAEDPGVKSVTTIYHYFKKFSYKTQIMGASFRNKEEILELAGCDLLTISPHFLQELHDASGNVEQKLDAAKSKQLNIEPIKMNEKAFRLALNDDAMATEKLSEGIRNFAKDAQKLEKMLRTTYKIG

SEQ ID NO: 3075 - protein, 197 aa, Nicotiana tabacum
MSASRFIKCVTVGDGAVGKTCLLISYTSNTFPTDYVPTVFDNFSANVVVNGSTVNLGLWDTAGQEDYNRLRPLSYRGADVFILAFSLISKASYENVSKKWIPELKHYAPGVPIVLVGTKLDLRDDKQFFIDHPGAVPITTAQGEELRKTIGAPAYIECSSKTQQNVKAVFDAAIKVVLQPPKTKKKKGKSQKSCSIL

SEQ ID NO: 3076 - protein, 158 aa, Glycine max
MDMRLMDLDSPFFNTLHRIMDLTEDAEKNLNAPTRTYVRDAKAMAATPADVKEYPNSYVFVIDMPGLKSGDIKVQVEDDNVLLISGERKREEEKEKEGGKYLRMERRLGKLMRKFTLPENANTDAISAVCQDGVLTVTVNKLPPPQPKKPKTIEVNIA

SEQ ID NO: 3077 - protein, 373 aa, Candida maltosa
MSVKTKTITILPGDHVGTEIVNEAIKVLEAIEAATPYQKIHFDFKHHLIGGSAIDATGVPLPDDALESAKNSDAVLLGAVGGPKWGTGALRPEQGLLKIRKELNLYANIRPCNFASDSLLELSPLRPEVVKGTNLIIVRELVGGIYFGDREEQEESEDKQTAWDTEKYTVDEVTRITRIAAFMALQHNPPLPIWSLDKANVLASSRLWRRTVDKVISEEFPTLSVQHQLIDSAAMILIQNPTKLNGIIITSNMFGDIISDEASVIPGSLGLLPSASLASLPDTNTVFGLYEPCHGSAPDLPANKVNPIATILSAASMLRLSLDCVKEAEALEEAVKQVLDKGIRTADLRGTSSTTEVGDAIVEAVTKILKEKA

SEQ ID NO: 3078 - protein, 449 aa, Bacillus cereus ATCC 10987
MKTKQTDELLAKDEQYVWHGMRPFSPNSTMVGAKAEGCWVEDIQGKRYLDGMSGLWCVNSGYGRKELAEAAYKQLQTLSYFPMSQSHEPAIKLAEKLNEWLGGEYVIFFSNSGSEANETAFKIARQYYAQKGEPHRYKFMSRYRGYHGNTMATMAATGQAQRRYQYEPFASGFLHVTPPDCYRMPGIERENIYDVECVKEVDRVMTWELSETIAAFIMEPIITGGGILMPPQDYMKAVHETCQKHGALLISDEVICGFGRTGKAFGFMNYDVKPDIITMAKGITSAYLPLSATAVKKEIYEAFKGKGEYEFFRHINTFGGNPAACALALKNLEIMENENLIERSAQMGSLLLEQLKEEIGEHPLVGDIRGKGLLVGIELVNDKETKEPIDNDKIASVVNACKEKGLIIGRNGMTTAGYNNVLTLAPPLVISSEEIAFVVGTLKTAMERI

SEQ ID NO: 3079 - protein, 142 aa, Triticum aestivum
  unsure (1)..(142): unsure at all Xaa locations
RGFAFVQDVSYAGFLDRVRDGELKLPRXSGLWDVPHPWLNLFLXXRSRVLDFAAGVFHGILRRDSTTGAMGPVLVYPMNRNRWDADTSAVLPGEEDGVLHRGDLRSSVXASTDGGRQLLRRLEEQNEEILRFCEEAGIPCVQ

SEQ ID NO: 3080 - protein, 564 aa, Zea mays
MAAAAVTSNGGAVAANGPAPGRLASVYSEVQTSRLLHTLPLPSVLRSNFSVVDGPASSAAGNPDEIAKLFPNLFGQPSASLVPSAEPAATRPLKVGVVLSGGQAPGGHNVICGIFDYLQERAKGSTLLGFKGGPAGIMKCKYVELTSDFVYPYRNQGGFDMICSGRDKIETPEQFKQAEDTANKLDLDGLVVIGGDDSNTNACLLGEYFRSRNLKTRVIGCPKTIDGDLKCKEVPTSFGFDTACKIYSEMIGNVMTDARSTGKYYHFVRLMGRAASHITLECALQTHPNAALIGEEVAAKKETLKNVTNYITDIICKRADLGYNYGVILIPEGLIDFIPEVQKLIAELNEILAHDVVDEAGAWKSKLQAESRELFEFLPKTIQEQLMLERDPHGNVQVAKIETEKMLISMVETELEKRKAEGRYSAHFRGQAHFFGYEGRCGLPTNFDSNYCYALGYGAGALLQSGKTGLISSVGNLAAPVEEWTVGGTALTSLMDVERRHGKFKPVIKKAMVELDAAPFKKYASMRDEWALKNRYISPGPIQFSGPGSNDSNHTLMLELGAAL

SEQ ID NO: 3081 - protein, 112 aa, Glycine max
  unsure (1)..(112): unsure at all Xaa locations
TTVNRAGAGMADPLTALXSMAVCPTXNTIIDFTSFASNAGRAQYMQMWPPVGYKKFETLSYLPDLDDAHLGKDGEYLLRTGWSPRXEFELEHGFLCREHNRAPEYYDGRYWT

SEQ ID NO: 3082 - protein, 148 aa, Pseudomonas syringae pv. syringae
DVIDVRGLTATGRFTFDPGFMSTASCDSKITYIDGDNGILLHRGYPIEQLAEQSDYLETCYLLLNGELPTAQQKAQFVAVVKNHTMVHEQLKTFFNGFRRDAHPMAVMCGVVGALSAFYHDSLDINNPQHREISAVRLVAKMPTLAAM

SEQ ID NO: 3083 - protein, 167 aa, Citrus sinensis
MASQSKTSVHDFTVKDAKGQDVDLSIYKGKLLLIVNVASQCGLTNSNYTELSQLYDKYKNQGLEILAFPCNQFGAQEPGDNEQIQEFACTRFKAEFPIFDKVDVNGDNAAPLYKHLKSSKGGLFGDSIKWNFSKFLVDKEGNVVERYAPTTSPLSIEKDIKKLLETA

SEQ ID NO: 3084 - protein, 155 aa, Treponema denticola ATCC 35405
  unsure (1)..(155): unsure at all Xaa locations
MGIYNYTVKDSLGNDFSFNDYKDYVILIVNTACEXGLTPHFQGLEALYKEYRDKKFLVAAFPCNQFGGQDPGTNEEIRNFAQSKYGVSFPIMAKIEVNGENTEPIFSFLKKASNGEDIKWNFAKFLVDKTGERVTAYAPTVAPEDLKKDIEKLLN

SEQ ID NO: 3085 - protein, 110 aa, Zea mays
DLLQQALAMSMEGGASGSAAVTDSAMAEAGAVDPDLALALQMSVQDANMSSDTDMSKVFEDRTFVSSILNSLPGVDPNDPSVKDLLASLHSQGEQEKKEDTSDKTEDEKN

SEQ ID NO: 3086 - protein, 427 aa, Zea mays
EFPGRPTRPGDLSRCPWDELIFEDESERGSNALLARAWSPGWQNADKALTAFLDGPLVDYSANHKKADSASTSLLSPYLHFGELSVRKVFHLVRMKQLMWSNDGDRAGEESCTLFLRAIGLREYSRYLTFNHPCSLEKPLLSHLRFFPWVVDEVHFKVWRQGRTGYPLVDAGMRELWATGWVHDRIRVVVSSFFVKVLQLPWRWGMKYFWDTLLDADLESDALGWQYISGSLPDGRELDRIDNPQFEGYKFDPHGEYVRRWLPELARLPTEWIHHPWDAPESVLQAAGVELGSNYPRPIVELDAANSRLQGALSEMWELEAASRAAIENGMEEGLGDSTDEPPIDFPQELRMEVDRQPAQPAIIHTSVVAGWRREDQRVPSMTSSLIRAETELTADFGNTSEDSRPEVPSNIHLQAFRGWCSRSRAA

SEQ ID NO: 3087 - protein, 220 aa, Bacillus thuringiensis serovar konkukian str. 97-27
MDLKQIAGEYAATFVKDGMKVGLGTGSTAYWTIQKLGQRVKEGLSIQAVPTSKETEALAQQLNIPLISLNDVQSLDLTIDGADEIDSNLQLIKGGGGALLREKIVASSSKELIIIVDESKVVTRLGTFPLPIEIIPFAWKQTESKIQSLGCQTTLRLKNNETFITDNNNMIVDCIFPNHIPTPSDLHKRLKMITGVVETGLFVNMTSKAIIGTKNGIQEL

SEQ ID NO: 3088 - protein, 476 aa, Bacillus cereus G9241
MQNKIIMMFQKDFRLYDNPALFEAAQSGEVVPVYVQDETFSIGSAAKWWLHHAIIDVQKQLKALGATFIIRKGKTQEEILSLIEQLDITAVYWNICYEPDRLQSNQKMKMMLEDKGIICKEFNSHLLLEPWIIKKKDNTEYKVFTPFYNAFQKQAIPKPTSKVQSIKWGSSLPASLSVSELHLLPTIPWTSHMESIWNPTEEGAYKTFKKFFSSKLTFYSEGRDFPNQNVHSMLAPYLSFGQISVKLMFHYLINKSTERQSSLFEKQVNSFIRQLIWREFSYYLLYHYPFTVYKPLNKNFEHFPWDKEEELLRVWQKGETGYPFIDAGMRELWQTGFMHNRARMAVASFLVKHLLIPWQEGAKWFMDTLLDADIANNTMGWQWVAGSGADASPYFRIFNPITQGEKFDKDGEYIRKWVPELRDIPNKYIHKPWEAPEPILQKANIQLGDTYPLPVVDHKAARERALCAYKSMKEFI

SEQ ID NO: 3089 - protein, 444 aa, Acinetobacter sp. ADP1
MPDIMIRNANMINEGQSKFCDVLIKNGRIAKIQSSISSINNAKEIEANGRWLLPGMIDDQVHFRDPGSPHKGCIASESAAATIGGITSYMDMPNTQPPTLDLDALQAKKTIASQTSIANYAFHFGVSADNLEIIKQLDPTLVSGVKVFMGASTGNMLVDDPKTLGLLFANVPTILLSHCESSPIISQNEKLFREKFGEDIDASCHPIIRNEECCYQSSKMAVELAKKFNTQLHVLHLTTARELALFEDKPLHEKRITAEVCIHHLHFDDRDYKQLNHLIKCNPSIKAVSDKEALIQAIANTNLLDIIGTDHAPHTLDEKQRSYFQAPAGLPLVQHALPALLELVADQKMTIENVVKKTSHQVADLFRIKERGYIREGYWADLVLIDKNPLIVAQQPNFMRCGWTPFIHQTFRHQVATTIVSGQIAWHNQQLFLNCKGHALEIDR

SEQ ID NO: 3090 - protein, 144 aa, Triticum aestivum
AGAAHEAIELELSSWPSSPSAGKSRRVTELVMALLARLCSCAEGRAAVVAHPAGIALVAKRALRVSAATDTSAVRVLAAVCGRAASPEVVREMARVGAVGKLCCVLQADCDRDVKETAKAVLRMHSGVWCGSPCVSAYLLSRYL

SEQ ID NO: 3091 - protein, 494 aa, Bacillus cereus G9241
MLTKNIELKPKVKAFLNEEIKMFINGEFVPSISGKTFETYNPATEDVLAVVCEAQEEDIDVAVKAARSAFESGPWAEMTTAERAHLIYKLADLIEEHGEELAQLEALDNGKPYQVALDDDIAATVENYRYYAGWATKIIGQTIPISKDYLNYTRHEPVGVVGQIIPWNFPLVMSSWKMGAALATGCTIVLKPAEQTPLSLLYTAKLFKEAGFPDGVVNFVPGFGPEAGAAIVNHHDIDKVAFTGSTVTGKYIMRQSAETIKHVTLELGGKSPNIILEDADLEEAINGAFQGIMYNHGQNCSAGSRVFVHRKHYETVVNELVKMANNVKLGAGMEKETEMGPLVSKKQQERVLHYIEQGKAEGATIAAGGERAFEKGYFVQPTVFIDVTDDMTIVKEEIFGPVVVVLPFDSTEEVIERANRSSYGLAAGVWTQNIKTGHQVANKLKAGTVWINDYNLENAAAPFGGFKQSGIGRELGSYALDNYTEVKSVWVNIK

SEQ ID NO: 3092 - protein, 482 aa, Bradyrhizobium japonicum USDA 110
MTAILKNFIGGEWVDGSGVTRNINPSNTNDLVGEYAKADKAQTEKAIAAAKAAFPGWAQSTPQVRYDALNKISLEILARKEELGRLLAREEGKTLPEGIGEVARAGQIFAFFAGEALRLIGEKGASVRPGLDVELTREPMGVVGMITPWNFPIAIPAWKIAPALCYGNTVVFKPAELVPGSAHALSEIITRSGIPAGVFNLVVGSGSVVGQTLLDHPDVAAISFTGSVQTGRKIAQACVLSNPMKKFQLEMGGKNPLVVLDDADLKTAVEVAVNGSYFSTGQRCTASSRLIVTEGIHDRFVAAMAERLKGLSVDDALKAGVHIGPVVDQSQLDQDLRYIKIGQDEGAKLAFGGELLQRETPGHYLQPALFTEANNNMRIAREEIFGPVAAVIRAKNYEEALAISNDTEFGLASGICTTSLKYASHYKRNSESGMVMVNLPTAGVDYHVPFGGRKGSSYGAREQGSYAREFYTTVKTAYTYPG

SEQ ID NO: 3093 - protein, 335 aa, Glycine max
EYYDLMHEFMTAVKQNYGEKVLVQFEDFANHNAFELLAKYGTTHLVFNDDIQGTASVVLAGVVAALKLIGGTLPEHTFLFLGAGEAGTGIAELIALEMSKQTKAPIEESRKKIWLVDSKGLIVSSRKNSLQHFKKPWAHEHEPVNSLLEAVKVIKPTVLIGSSGVGRTFTKEVVEAMTSNNDKPLILALSNPTSQSECTAEEAYQWSEGRAIFASGSPFDPVEYKGKVYASGQANNAYIFPGFGLGLVISGAIRVHDDMLLAASESLAKQVSEENYKNGLIYPPFSNIRRISANIAANVAAKAYELGLATRLPRPQNLVKCAESCMYTPVYRNYR

SEQ ID NO: 3094 - protein, 533 aa, Glycine max
MGNCCRSPAAVAREDVKSSFSNADHGKRGGGGSASAAAKQKAPITVLAGVPKENIEDRYLVDRELGRGEFGVTYLCIDRDTRELLACKSISKRKLRTAVDVEDVRREVAIMRHLPESPSIVSLREACEDDNAVHLVMELCEGGELFDRIVARGHYTERAAAAVTRTIVEVVQLCHKHGVIHRDLKPENFLFANKKENSPLKAIDFGLSIFFKPGERFSEIVGSPYYMAPEVLKRNYGPEIDIWSAGVILYILLCGVPPFWAESEQGVAQAILRGLIDFKREPWPSISESAKSLVRQMLEPDPKLRLTAKQVLEHPWIQNAKKAPNVPLGDVVKSRLKQFSMMNRFKRKALRVIADFLSNEEVEDIKDMFKKMDNDNDGIVSIEELKAGFRNFGSQLAESEVQLLIEAVDTNGKGTLDYGEFVAVSLHLKRMANDDHLHKAFSYFDKDGNGYIEPDELRNALMEDGAEDCTDVANDIFLEVDTDKDGRISYDEFVAMMKTGTDWRKASRHYSRGRFNSLSLKLMKDGSLNLGNE

SEQ ID NO: 3095 - protein, 380 aa, Populus alba x Populus tremula
MCGGAIISGFIAPTTTARSSRRLTSGFEWLEPKKPFNNKHLKPVVADPEDDFEADLQEFKDESDVDEDYDVFADAKPFAFSASASEPAKKRGLPRGSTAVKSAGFSGLAKNSAKRKRKNQFRGIRQRPWGKWAAEIRDPRKGVRVWLGTFNTAEEAARAYDSEARRIRGKKAKVNFPDEAPCASARHPIKENSQKRLTKANLSQDFSYLSNPETDYNNMGFVEEKPQVSQFGIMNSIPVNGDSGVTPLTPSDNASMYFNSDKGSNSFDCDFGWGEQGAEILSVLAATPEVDESVFVEANPKKLKSYTEYAVPVEERNGKSLSEELLAFDNQLMNLQMPDLVGNWEASLDSFLNGDTTQDGTNAVDLWSFEDFPSMVGGVY

SEQ ID NO: 3096 - protein, 588 aa, Zea mays
  unsure (1)..(588): unsure at all Xaa locations
MCGILAVLGVVEVSLAKRSRIIELSRRLRHRGPDWSGLHCHEDCYLAHQRLAIIDPTSGDQPLYNEDKTVVVTVNGEIYNHEELKAKLKTHEFQTGSDCEVIAHLYEEYGEEFVDMLDGMFSFVLLDTRDKSFIAARDAIGICPLYMGWGLDGSVWFSSEMKALSDDCERFITFPPGHLYSSKTGGLRRWYNPPWFSETVPSTPYNALFLREMFEKAVIKRLMTDVPFGVLLSGGLDSSLVASVASRHLNETKVDRQWGNKLHTFCIGLKGSPDLKAAREVADYLSTVHHEFHFTVQEGIDALEEVIYHIETYDVTTIRASTPMFLMSRKIKSLGVKMVISGEGSDEIFGGYLYFHKAPNKKEFLEETCRKIKALHLYDCLRANKATSAWGVEARVPFLDKSFISVAMDIDPEWNMIKRDLGRIEKWVMRKAFDDDEHPYLPKHILYRQKEQFSDGVGYNWIDGLKSFTEQQVTDEMMNNAAQMFPYNTPVNKEAYYYRMIFERLFPQDSARETVPWGPSIACSTPAAIEWVEQWKASNDPSGRFISSHDSAATDHTXAVSRRWPTAAATXAANGTVNGKDVAVAIAV

SEQ ID NO: 3097 - protein, 531 aa, Zea mays
MEAVGVTPAPVAAPEKKKLLDLKDPFPAAANGGTKASPASKWAMKKKLVGGDAGYVLEDVPHLTDYMPQLPTYPNPLQDNPAYSVVKQYFVNPDDTVTQKIVVHKTSARGTHFRRAGPRQRVYFQSDEVNAAIVTCGGLCPGLNTVIRELVCGLYDMYGVSSVVGIEGGYKGFYSKNTVALTPKSVNDIHKRGGTVLGTSRGGHDTAKIVDCLQHDGINQVYIIGGDGTQKGASVIYEEVRRRGLKCSVVGVPKTIDNDIAVIDKSFGFDTAVEEAQRAINAAHVEAESAENGIGVVKLMGRNSGFIAMYATLASRDVDCCLIPESPFYLEGKGGLLEFVERRLKDNGHMVIVVAEGAGQDLIARSMNFVDTQDASGNKLLLDVGLWLSQKIKDHFKKKPSFPITLKYIDPTYMIRAVRSNASDNVYCTLLAHSALHGAMAGYTGFTVAPVNGRHAYIPFYRITEKQNKVVITDRMWARVLCSTNQPCFLSHEDVENMKHDDDEHHHMHNTQLLEGGSSPVSKCNGSAAAV

SEQ ID NO: 3098 - protein, 168 aa, Avena vaviloviana
VMASSATTVAPFQGLKSTAGLPVSRRSNAGLGSVSNGGRIRCMQVWPIEGIKKFETLSYLPPLSEEALLKQIDFLIRSKWVPCLEFSKVGFIFREHGSTPGYYDGRYWTMWKLPMFGCTDASQVIKEVEEVKKEYPDAYVRIIGFDNIRQVQCVSFIAFKPPGCEESG

SEQ ID NO: 3099 - protein, 430 aa, Methylobacillus flagellatus KT
MKPSKVTLTFDDGSAPIELPILPGKLGPSVIDIRSLSKHGYFTYDPGFLSTASCDSNITFIDGEEGLLFYRGYPIEQLAEHSDFMEVSYLLIYGELPNAEQKEKFTNTITRHSMVHDQLTHIFRGFRRDAHPMAVMVGVVGSMSAFYHEAIDVSDPRNREFAAHRLLAKVPTIAAWSYKYNVGQPFMYPKNRFNYAENFMHMMFATPCEDYEPNPVLAKAFERILILHADHEQNASTSTVRLAGSSGANPFACVAAGIASLWGPAHGGANEATLKMLEEIGDISRIGEYIKRAKDKTDSFRLMGFGHRVYRNMDPRAAIMRQTCHQVLDELGLNDDPMFKLALELEKIALEDEYFVSRRLYPNVDFYSGIVMRAMGIPNSMFTAIFALARTVGWVAQWNEMMSDPGSKIGRPRQLYTGPERRDFLPLDQR

SEQ ID NO: 3100 - protein, 198 aa, Zea mays
LQLGGDVSGGRLSVDASDIAEASRDFGGLSRAEPMAVFQPRAAGDVAGLVRAAFGSARGFRVSARGHGHSISGQAQAPGGVVVDMGHGAVARAPPVYSPALGRHYVDVWGGELWVDVLNWTLSHGGLAPRSWTDYLYLSVGGTLSNAGISGQAFHHGPQISNVYELDVVTGQFGIITRARIALERAPQRVRPERMAAA

SEQ ID NO: 3101 - protein, 410 aa, Rickettsia sp. IRS 4
DSEFAELKIRGKIFKLPILKASIGEDVIDISRVSAEADCFTYDPGFMSTASCQSTITYIDGDKGILRHRGYDIKDLAEKSDFLEVAYLLIYGELPSSEQYNNFTKQVAHHSLVNERLHYLFQTFCSSSHPMAIMLAAVGSLSAFYPDLLNFKEADYELTAIRMIAKIPTIAAMSYKYSIGQPFIYPDNSLDFTENFLHMMFTTHCTKYKVNPIIKNALNKIFILHADHEQNASTSTVRIAGSSGANPFACISTGIASLWGPAHGGANEAVINMLKEIGSSENIPKYIAKAKDKNDPFRLMGFGHRVYKNYDPRAAVLKETCKEVLKELEQLENNPLLQIAIELEAIALKDEYFIERKLYPNVDFYSGIIYKAMGIPSQMFTVLFAIARTVGWMAQWKEMHEDPEQKISRP

SEQ ID NO: 3102 - protein, 480 aa, Oryza sativa (japonica cultivar-group)
MVLSVRAVSGKSDLDFSDPSWKEKYQEDWNRRFSLPHITDIYDLKPRLTTFSLKKNRTDGGSLSADKWNGYVNKDDRALLKVIKYASPTSAGAECVDPDCSWVEHWIHRAGPRKEIYYEPAEVKAAIVTCGGLCPGLNDVIRQIVFTLEIYGVKNIVGIQFGYRGFFEKGLKEMPLSRKVVENINLSGGSFLGVSRGGAKTSEIVDSIQARRIDMLFVIGGNGSHAGANAIHEECRKRKLKVSVVAVPKTIDNDILFMDKTFGFDTAVEEAQRAINSAYIEARSAYHGIGLVKLMGRSSGFIAMQASLSSGQIDVCLIPEVSFTLDGEHGVMRHLEHLLEKKGFCVVCVAEGAGQDLLQKSNATDASGNVILSDFGVHMQQKIKSHFKDIGVPADVKYIDPTYMVRACRANASDAILCTVLGQNAVHGAFAGFSGITSGICNTHYAFLPITEVITKPKRVNPNSRMWHRCLTSTGQPDFH

SEQ ID NO: 3103 - protein, 501 aa, Asparagus officinalis
MTVSITAAVQLFLLLLLLLPLLFVHHKTKPKTKCRSPPGPPPLPVIGNLHQLSLLLHQSLYRLSKIHGPIFKLSLGRVPVLVISSPSLAKQVLKTHDLACCSRASTVSFKEYTYDGCDVAGAPYGDSWRNLRKIFVLKLLSSKKLTSFRLVQEEEIEGMISSIRTRSDTNATVNITEFVVRLANNITFRVAFGYRSEGEYGEKSRFQRLLESGNDTVASFYVGDYFPGLGWLDKMTGKLGKMKRNARDLDEFYQEVIDAHMKDGRKEDGKEDIVDVLLRLREEGQLTMDHIKGALMNIFVGGTDTSAASIAWAMAELARKPKVMKKAQEEVRKAASKKGKVEENDLAQLQYIKCVVNETLRLHLPLPLLVPRETIQHCEINGYDVSAKTRVLVNAWAIGRDEDAWENPEEFNPDRFVGSSLDYKGQDFQFIPFGAGRRICPGIQFGVETVELALANLLYAFNWELPPGVERENIDMHEAPGLVTRRATDLRLVATNYEEAN

SEQ ID NO: 3104 - protein, 250 aa, Brassica oleracea
MTKNYPAVSEEYQKAIEKCKRKLRGLIAEKNCAPIMVRLAWHSAGTFDCASRTGGPFGTMRFDDELAHGANNGLHIALRLLEPIREQFPTISHADFHQLAGVVAVEVTGGPEIPFHPGREDKPQPPPEGRLPDATKGCDHLRQVFLKQMGLTDQDIVALSGAHTLGRCHKDRSGFEGAWTSNPLIFDNSYFKELLSGEKEGLFQLPSDKALLDDPVFRPLVEKYAADEEAFFTDYAEAHLKLSELGFADA

SEQ ID NO: 3105 - protein, 462 aa, Salmonella typhimurium LT2
MTMMTATQALSVNPATGQTLAAMPWANAQEIEHALSLAASGFKKWKMTSVAQRAQTLRDIGQALRAHAEEMAQCITREMGKPIKQARAEVTKSAALCDWYAEHGPAMLNPEPTLVENQQAVIEYRPLGVILAIMPWNFPLWQVLRGAVPILLAGNSYLLKHAPNVTGCAQMIARILAEAGTPAGVYGWVNANNEGVSQMINDPRIAAVTVTGSVRAGAAIGAQAGAALKKCVLELGGSDPFIVLNDADLELAVKAAVAGRYQNTGQVCAAAKRFIVEEGIAQAFTDRFVAAAAALKMGDPLVEENDLGPMARFDLRDELHQQVQASVAEGARLLLGGEKIAGEGNYYAATVLADVTPDMTAFRQELFGPVAAITVAKDAAHALALANDSEFGLSATIFTADDTLAAEMAARLECGGVFINGYSASDARVAFGGVKKSGFGRELSHFGLHEFCNVQTVWKNRV

SEQ ID NO: 3106 - protein, 148 aa, Pseudomonas syringae pv. tomato
DVIDVRGLTATGRFTFDPGFMSTASCDSKITYIDGDNGILLHRGYPIEQLAEQSDYLETCYLLLNGELPTAEQKAQFVAVVKNHTMVHEQLKTFFNGFRRDAHPMAVMCGVVGALSAFYHDSLDINNPQHREISAVRLVAKMPTLAAM

SEQ ID NO: 3107 - protein, 157 aa, Schizosaccharomyces pombe
MAEEEHVDFEGGEAGASLTFPMQCSALRKNGHVVIKGRPCKIVDMSTSKTGKHGHAKVHIVALDIFNGRKYEDMSPSTHNMDVPVVKRDEYQLVNIDDGYLNLMTTDGTTKDDVRLPEGELGNEIEEGFDEGRDLIITVVSAMGEETALACRDAPSS

SEQ ID NO: 3108 - protein, 173 aa, Glycine max
MSDAPPSPTHESGGEQSPRGSSSGAREQDRYLPIANISRIMKKALPPNGKIAKDAKDTMQECVSEFISFITSEASEKCQKEKRKTINGDDLLWAMATLGFEDYIEPLKVYLARYREAEGDTKGSARSGDGSATPDQVGLAGQNSQLVHQGSLNYIGLQVQPQHLVMPSMQSHE

SEQ ID NO: 3109 - protein, 112 aa, Triticum aestivum
  unsure (1)..(112): unsure at all Xaa locations
MAPTVMASSATSVAPFQGLKXXVGLPVSRRSNGASLGSVSNGGRIRCMQVWPXEGIMKFETLSYXPPXRXETLLKQXXYLXRSKXVPXLXFXSXXXFILRXLXEXXXYXESS

SEQ ID NO: 3110 - protein, 148 aa, Pseudomonas syringae pv. tomato
DVIDVRGLTATGRFTFDPGFMSTASCESKITYIDGDNGILLHRGYPIEQLAEQSDYLETCYLLLNGELPTAEQKAQFVAVVKNHTMVHEQLKTFFNGFRRDAHPMAVMCGVVGALSAFYHDSLDINNPQHREISAVRLVAKMPTLAAM

SEQ ID NO: 3111 - protein, 427 aa, Helicobacter hepaticus ATCC 51449
MASITLTNNETKESFEFELIECTRGPKAVDFSKLFERTNIFSYDPGYGSTAGCKSTISYINGKNGELLYKGLPIEKIVEKYQFTDVCKLLITGEVPKNETETKEFEIELVHRSFLNEGLINIFNAFPDSAHPMANLSASLSALSTFHFRHLDMGNEEERQVMARRAIAKIPTLAAFSYRHSLGIPYIYPDVARGYVENFLYMLRAYPGGKMKHTIKGEVEITPLEIEALDKIFTLHADHGQNASTTTVRNVASTGAHPYAALSAGVNALWGAAHGGANEKVLDMLNEIGDAKNVDKFINKAKDKNDPFRLMGFGHRVYKNYDPRAKILKKLKDDLDAKGIKMNTRLSDLAHKVEEVALSDSYFVERNLYPNVDFYSGIILSALKIPVSLFTPIFVIGRMPGWCAQLLEHVKDPTTRITRPRQVYIGE

SEQ ID NO: 3112 - protein, 505 aa, Pseudomonas syringae pv. syringae B728a
MSTARILELMRPYWGDRSVIASYVGGQFIEGHGAPVEVRNAHDDSLLLSFPDADESLVEVADKAARAAQQQWWALTAQARGRAMYQVGNLIRDELENLAQIESLTANKPIRDARVEVLKVAEMFEYYAGWADKLHGEIIPVPTTHLNYVTYEPLGTVLQITPWNAPIFTCGWQIAPAIAAGNAVILKPSELTPLSSLMVGVLIERAGVPKGLVNVIAGFGHSIGQAFIAKADIRKVVFVGSPATGRHIAVAAAQRCIPAVLELGGKSANIVFDDADLEVALRGAQAAIFSGAGQSCVSGSRLLVQESIFEKFTNALAVAATQFKVGDPSDPETQIGPINNAKQYNHVKNMVEQALKDGAKLVGEHADPIPEKPGYYINPTVLAGTNALYCAQEEIFGPVVVAIPFKDEEDAIRIANDSRFGLAGGVWTRDVGRAHRVARQVRAGTFWVNGYKTIHVSSPFGGYGESGYGRSSGLDALREYSEVKSVWVETAAKPAASFGYGASLE

SEQ ID NO: 3113 - protein, 321 aa, Candida boidinii
MSSPLLTLNNGLKMPQIGFGCWKVDNATCAETIYEAIKVGYRLFDGAMDYGNEKEVGEGVNKAIKDGLVKREELFIVSKLWNNFHHPDSVKLAIKKVLSDLNLEYIDLFYMHFPIAQKFVPIEKKYPPNFYCGDGNKWSFEDVPLLTTWRAMEELVEEGLVKSIGISNFVGALIQDLLRGCKIRPAVLEIEHHPYLVQPRLIEYAKTEGIHVTAYSSFGPQSFVELDHPKVKDCTTLFKHETITSIASAHDVPPAKVLLTWATQRGLAVIPKSNKKERLLGNLKINDFDLTEAELEKIEALDIGLRFNDPWTWGYNIPTFI

SEQ ID NO: 3114 - protein, 286 aa, Buchnera aphidicola str. Sg (Schizaphis graminum)
MINEKIWHEKLHRHVGQYFSIDKILYQKKNKYHDIIIFQNSIMGRIMAIDGVVQTTEKDEFIYHEMLTHVPIFYHGLIKNVLIVGGGDGGILREICRHKSIENITMVEIDLNIIDLCKQFFPKHNNNAYKDPRLKIVIDNGLNFVQKTKEKFDLIISDSTDPIGCGKDLFLSDFYFHCKNCLVKNGIFVGQNGVFFLQKNDINQSYKNLKKNFHDVSFYQATIPSYYGGTMMFSWGTDNIDFRQINIKNLEKRIKDKKLTFNYYNSNIHISSFYLPQYIINTLDKS

SEQ ID NO: 3115 - protein, 113 aa, Arabidopsis thaliana
MAFALRFFTCLVLTVCIVASVDAAISCGTVAGSLAPCATYLSKGGLVPPSCCAGVKTLNSMAKTTPDRQQACRCIQSTAKSISGLNPSLASGLPGKCGVSIPYPISMSTNCNK

SEQ ID NO: 3116 - protein, 541 aa, Glycine max
  unsure (1)..(541): unsure at all Xaa locations
MAALNLCRMALRSSKLLSRPYHLLSVQLQMQMQPSSPPLTRKMSMDAQSVSFQLNSSGLLRTQGLIAGKWSDAYDGKTIKVYNPATGESIVDVACMGGRETNDAISAAYDAYGSWSKTTAAERSKFLRKWYDLRMVHYXELAQLITLEQGKPLKESVGEIVYGAGVIEFAAEGAKRIYRDIVPAPFSDLRLFVLKQHVWVVCASRPWNFPVSLISRNVHTVLACGCKVVISPSEHXSLSVFASVDMYIPAGMSHSVMNVVMENALNIRDAFLSSPFQRKITFTGSTAVGKKLMAGSAETVKKVSLELGGNAPCIXVFDDADLDVAVKGTLAAKFRNSGQTCVCANRIIVQEGIYEKFANALRDAVQNMKVGDGFSEALSLRPLINEAAVNXLRSLYIHDSLFITGGKVNSWGVKRHSLGLTFYEPTVISDVNSDMHISREEAFGPVAPLLRFKTEEEAIRIANDTNAGLGSYVFTNSIQRSWRVAEALEYGLVGVNEGVISTEVAPFGGFKQSGLGREGSKYGMDEYLEIKYVCFGNMNKE

SEQ ID NO: 3117 - protein, 298 aa, Schizosaccharomyces pombe
MSVQELSHPLIKDGWFREINNMWPGQAMTLKVKKVLYAGKSKYQDVLVFESETYGHVLVLDGAIQATERDEFSYQEMIAHLALNSHPNPKKVLVIGGGDGGVLREVVKHECVEEAILCDIDEDVIKVSKQYLPEMSAGFNHPKVKVHIGDGFKFLQDYQNTFDVIITDSSDPDGPAEALFQKPYFQLLSDALRGGGVITTQAECMWIHLGVISNVLTAVKTVFPNVRYAYTTIPTYPSGSIGFVVASKDASIDLSKPLRKWSPEEENKLCKYYNSEIHAASFVLPTFARDVVDKATSS

SEQ ID NO: 3118 - protein, 487 aa, Escherichia coli CFT073
MLPLRINPTFLLPSNKFKEFEMDQKLLTDFRSELLDSRFGAKAISTIAESKRFPLHEMRDDVAFQIINDELYLDGNARQNLATFCQTWDDENVHKLMDLSINKNWIDKEEYPQSAAIDLRCVNMVADLWHAPAPKNGQAVGTNTIGSSEACMLGGMAMKWRWRKRMEAAGKPTDKPNLVCGPVQICWHKFARYWDVELREIPMRPGQLFMDPKRMIEACDENTIGVVPTFGVTYTGNYEFPQPLHDALDKFQADTGIDIDMHIDAASGGFLAPFVAPDIVWDFRLPRVKSISASGHKFGLAPLGCGWVIWRDEEALPQELVFNVDYLGGQIGTFAINFSRPAGQVIAQYYEFLRLGREGYTKVQNASYQVAAYLADEIAKLGPYEFICTGRPDEGIPAVCFKLKDGEDPGYTLYDLSERLRLRGWQVPAFTLGGEATDIVVMRIMCRRGFEMDFAELLLEDYKASLKYLSDHPKLQGIAQQNSFKHT

SEQ ID NO: 3119 - protein, 228 aa, Brassica napus
  unsure (1)..(228): unsure at all Xaa locations
MALQDEQEHEVXGGDIPEEDEGEMETDEYQEHAGEEGAAAAEDEEELEPGSASRDLEDMKKRLKEIEEEASALREMQAKAENDMAAAQDPSSAISAAEKEEVDLRSIYVGNVDYACTPEEVQQHFQSFGTVNRVTILTVLSGQPGRPAGVAFVEVVAVQNSLVLNESELHGRQIKVSAKETNVPGMRQFRGRRPFRPMRGFMPGPPFYPPYAYGRVPRFRRPMRYRPY

SEQ ID NO: 3120 - protein, 154 aa, Zea mays
MDARMFGLETPRVAALHHLLDVPDGDKAGGGATRTYVRDARAMAATPADVKELAGAYAFVVDMPGLSTGDIRVQVEDERVLVISGERRREEREDAKYLRMERRMGKFMRKFVLPDNADVDKVAAVCRDGVLTVTVEKLPPPEPKKPKTIEIKVA

SEQ ID NO: 3121 - protein, 483 aa, Pseudomonas aeruginosa
MNTKLFINNVWINSSDQQTFERKHPVSGEVMTECANSTVMDALKAAQAAQEAFQTWKTVGPSERRRLLLRVAEVMESKTPEFIEVMAKEVGASALWAGFNVQMSANVFREAASLATQIQGETIPTDKSDTLSMTLRQPVGPILSIVPWNGTAVLAARAIAYPLVCGNAVVFKGSEFSPATHALITQCVQEAGLPAGVLNYLNSSPDRSPEIADALISAKEIRRINFTGSTRVGSIIAQKAAQHLKRCLLELGGKSPLIVLDDADIDAAVKAAVFGSFLFQGQICMSTERLIVDEKIADEFVAKFVEKTKRLSAGDPCVTGDCIIGPMVSPNSGERINGLFKDAIDKGAKVVCGGLAQGALMPATILDHVKSDMRIYDEETFGPITVVIRCKGEAEAVRIANDSVYGLSSGVFGRDINRALRVGMSIEYGSVHINGSTVQNEAQAPYGGTKNTGYGRFDGRAVIDEFTEIKWLTIEPFEQQYPF

SEQ ID NO: 3122 - protein, 360 aa, Hypocrea virens
MSRSNPPNNASASRKISFNVSEQYDIQDVVGEGAYGVVCSAIHKPSGQKVAIKKITPFDHSMFCLRTLREMKLLRYFNHENIISILDIQKPRSYDSFNEVYLIQELMETDMHRVIRTQDLSDDHCQYFIYQTLRALKAMHSANVLHRDLKPSNLLLNANCDLKVCDFGLARSAASQEDNSGFMTEYVAARWYRAPEIMLTFKEYTKAIDVWSVGCILAEMLSGKPLFPGKDLTFPDHHQLTLILDVLGTPTMEDYYGIKSRRAREYIRSLPFKKKVPFRTLFPKTSDLALDLLEKLLAFNPVKRITVEDALKHPYLEPYHDPDDEPTAPPIPEEFFDFDKHKDTLSKEQLKQLIYQEIMR

SEQ ID NO: 3123 - protein, 198 aa, Azotobacter vinelandii
MTKNLSWHASSVGKLQRAGGKRQKPCILWLTGLSAAGKSTIANLLEQELFLCGAHTYLLDGDNLRHGLNRDLGFADADRQENIRRAAEVAHLFVDAGIIVIAAFISPFRRDRELARRLVAPGEFLEIFVDTPLEECERRDPKGLYRRARCGLISHFTGIDSAYEVPLDPEMRLTTLGWTPAQNACAIVDYLREGGYLR

SEQ ID NO: 3124 - protein, 501 aa, Asparagus officinalis
MTVSITAAVQLFLLLLLLLQLLFVHHKTKPKTKCRSPPGPPPLPVIGNLHQLSLLLHQSLYRLSKIHGPIFKLSLGRVPVLVISSPSLAKQVLKTHDLAFCSRASTVSFKEYTYDGCDVAGAPYGDSWRNLRKIFVLNLLSSKKLTSFRLVQEEEIEGMISSIRTRSDTNATVNITEFVVRLANNITFRVAFGYRSEGEYGEKSRFQRLLESGNDTVASFYVGDYFPGLGWLDKITGKLGKMKRNARDLDEFYQEVIDAHMKDGRKEDGKEDIVDVLLRLREEGQLTMDHIKGALMNIFVGGTDTSAASIAWAMAELARKPKVMKKAQEEVRKAASKKGKVEENDLAQLQYIKCVVNETLRLHLPLPLLVPRETIQHCEINGYDVSAKTRVLVNAWAIGRDEDAWENPEEFNPDRFVGSSLDYKGQDFQFIPFGAGRRICPGIQFGVETVELALANLLYAFNWELPPGVERENIDMHEAPGLVTRRATDLRLVATNYEEAN

SEQ ID NO: 3125 - protein, 250 aa, Brassica oleracea
MTKSYPTVTEDYQNAIEKCKRKLRGLIAEKNCAPIMVRLAWHSAGTFDCASRTGGPFGTMRFDAEQGHGANSGIHIALRLLEPIREQFPTISFADFHQLAGVVAVEVTGGPEIPFHPGREDKPQPPPEGRLPDATKGCDHLRQVFTKQMGLSDKDIVALSGAHTLGRCHKDRSGFEGAWTSNPLIFDNSYFKELLSGEKEGLLQLVSDKALLDDPVFRPLVEKYADDEEAFFADYAEAHLKLSELGFADA

SEQ ID NO: 3126 - protein, 405 aa, Zea mays
  unsure (1)..(405): unsure at all Xaa locations
MLTCIACSKQLPGDAPPLREPSDDDDRANAGGGGESAATPGTRQAIRVLTAQIKDMALKASGAYRHCKPCAGSSSPAASXRQQPYYHGAYAESGSDRFHCAYQRAGSSAASTPGLRTGGAMSSGDITPSVSARTDFLADDEEGDDEEGTATGSSEEDEEKEWVAQVEPGVLITFLSLPRGGNGLKRIRFSREMFNKWQAQRWWTENYEKVMELYNVQKSNSQVDPLPSIPRSDSEISKDDTPATAPLNKGQLLRTSPRPLKGSEAIGYSSSDCPQHQSSHLRNVYRKDRYLGHQFCDPVELASTPELSSISGAKTETSIGASVRTSSSPEEVDGSGELSASVSNASDEEREWVEEDEPGVYITIRALPGSIRELRRVRFSRERFSEMHARLWWEENQARIYEQYL

SEQ ID NO: 3127 - protein, 151 aa, Brassica napus
  unsure (1)..(151): unsure at all Xaa locations
MFTCIACTKADGGEELGARGGTTPNTKESVKSLTTQIKDMAMKFSGAYKQCKPCTGSPRSPMKKGHRPFSDFDNASEGVPYPYMGGSAGSTPAWDFINSSHHPAGAKFTSIYGNDRESXSAQSCDVVLDDEGPKEWMAQVEXGVHXTFASL

SEQ ID NO: 3128 - protein, 408 aa, Photorhabdus luminescens subsp. laumondii TTO1
MDIIILGVVMFTLIVLVLTALILFAKSKLVNTGNIRVEVNGDPEKSFTAPAGDKLLNMLSSQGIFVSSACGGGGSCGQCRVKIKDGGGDILPTELSHISKREAKEGCRLACQVNVKQNLKIKLPEEIFGVKKWECEVISNDNKATFIKELKLKIPDGDVVPFRAGGYIQIEAQPHIARYEDYDVPKEYREDWDKFNLFRFVSEVKEPTVRAYSMANYPEEHGIIMLNVRIATPPPKNSEAPPGIMSSYIWSLKPGDKVTISGPFGEFFAKDTDAEMIFIGGGAGMAPMRSHIFDQLNRLNSKRKISFWYGARSKREMFYTEDFDQLAAENENFTWNVALSDALPEDNWDGYTGFIHNVLYENYLRDHPAPEDCEFYMCGPPVMNAAVIKMLKDLGVEDENIMLDDFGG

SEQ ID NO: 3129 - protein, 506 aa, Vibrio cholerae O1 biovar eltor str. N16961
MIYAQPGSDNAVITFKSHYDNFIGGQWVKPVSGEYFGNISPVNGQVYCQVARSTQADIDLALDAAHQVREAWAKTSVTERSNLLLKIADRIEANIEQLAVAECWENGKPVRETLAADLPLVVDHFRYFAGCIRAQEGSAAELDSHTASYHFPEPIGVVGQIIPWNFPMLMAAWKLAPALAAGCCVVLKPAEQTPTSILVLIEKIADLIPAGVLNVVNGFGSEAGQALATSQRIAKLAFTGSTQVGQHILKCAAQSLIPSTVELGGKSPNIYFPDIFDHEDTYLEKCIEGTLLGFFNQGEVCTCPSRVLVHESIYDRFVAKVAERAKGIKQGNPLDTATQVGAQASQEQFDKILSYLDIGRQEGAKVLFGGGVAKQEGELGQGYYIQPTLLQGHNKMRVFQEEIFGPVIAITSFKDEAEALALANDTEYGLGAGIWTRDQNLAYRMGRNIQAGRIWINCYHAYPAHAAFGGYKKSGIGRETHKMMLNHYQNTKNLLISYDVNPLGFF

SEQ ID NO: 3130 - protein, 486 aa, Pseudomonas sp. S-47
MKEIKHFISGAFVGSASGKLFDNVSPANGQVIGRVHEAGRAEVDAAVRAARAALKGPWGKMTVAERAEILHRVADGITARFGEFLEARMPGHRQAEVAGQPHRHSARRANFKVFADLLKNVANEAFEMATPDGAGALNYGVRRPKGVIGVISPWNLPLLLMTWKVGPALACGNCVVVKPSEETPLTATLLGEVMQAAGVPAGVYNVVHGFGGDSAGAFLTEHPDVDAYTFTGETGTGETIMRAAAKGVRQVSLELGGKNAGIVFADCDMDKAIEGTLRSAFANCGQVCLGTERVYVERPIFDAFVARLKAGAEALKIGEPNDPEANFGPLISHKPREKVPSYYQQAVDDGATVVTGGGVPEMPAHLAGGAWVQPTIWTGLADDSAVVTEEIFGPCCHIRPFDSEEEAIELANSLPYGLASAIWTENASRAHRVAGQIEAGIVWVNSWFLRDLRTAFGGSKQSGIGREGGVHSLEFYTELKNICVKL

SEQ ID NO: 3131 - protein, 304 aa, Oryza sativa (japonica cultivar-group)
MSLQGGFVKTQKTHAYFKRFQVKFKRRRQGKTDYRARIRLTNQDKNKYNTPKYRFVTNKDITAQIVYATIAGDIVMAAAYSHELPRYGLEVGLTNYAAAYCTGLLLARRVLTLRGLDQEYEGNVEATGEDYYVEPADERRPFRALLDVGLIRTTTGNRVFGALKGALDGGLDIPHSDKRFAGFKKDEKQLDSDIHRKYIYGGHVADYMRSMAEEEPEKFQAHFSEYLKKGIDADGMESLYKKVHAAIRADPTMAKSTKKEPATHKRYNLKKLTYEQRKASLVERLNALNSSAGADDDDEEEDDE

SEQ ID NO: 3132 - protein, 290 aa, Haemophilus influenzae 86-028NP
MIKKIAVLTSGGDAPGMNAAIRGVVRSALAEGLEVFGIYDGYQGLYNNKIKQLNRYSVSDVINRGGTFLGSARFPEFKDPNVRAKCAEILRSHGIDALVVIGGDGSYMGAKLLTEEHGFPCVGLPGTIDNDVAGTDYTIGYQTALQTAVDAIDRLRDTSSSHQRISIVEIMGRHCSDLTISAGIAGGCEYIVASEIEFNREQLIQQIERSIIRGKRHAIIAITELLTDVHSLAKKIEARVGHETSRNRFRAYSTWWFSLGFCRYSCLTYGRIRSRFIATRQRRLLRRYPK

SEQ ID NO: 3133 - protein, 456 aa, Pirellula sp. 1
MVVGQRERKRRCIRGEPLMNDTTWVLDGGRLIDPANGIDRIARLVLHEGKVHSIDTPDGDVPPDAGRLDVTGKIVAPGLVDLATELREPGSEEDETIQTGSNAALAGGYTTVLCCSSTKPLMDSAASVQLVRQIAQRVDGVRVLPIACLSKGRQAEQMAELGILAAAGAAGFSDTPRPMPNDALLKRALDYCRMFDLPIFDRPEVPELADGGVMHDGQIGLILGLKGLPTEAEDLAVARDVRLAEATKGRLHVGPVSTMGSIDMIGRVKSRGIHISASVCPHNLFGSDELLRSYDSRYKVHPPMRSPSHVEALRNAVAEGVIDAIESGHMPRAQEKKANDLDLAPFGASALETTLAAIATDLVETKILPWSRAIECLSTAPARIAGVKGGTLSVGANADVTVIDPLNAWSVEAKEFRSRCHSSPMTGRTLTARVTHTLVGGRLKFELHPTVASAAS

SEQ ID NO: 3134 - protein, 493 aa, Glycine max
MDPNHLFFTHFRDGAIASRIEGQHRGALPSVIVIGAGISGLAAARSLYDASFKVTVLESRDRLGGRIHTDFSFGCPVDMGASWLHGVCNENPLAPLIRGLGLSLYRTSGDNSVLYDHDLESYMLFNIDGKQVPQQMVIEVGDTFKKILEETGKVRDEHTEDISVSQAISIVLDKHPDLRQQGLAHEVLQWFICRMEAWFAADADMISLKTWDQEHVLSGGHGLMVQGYDPVIKVLAKDIDIRLNHRVKKISSGYNKVMVTVEDGRNFVADAAIITVPIGILKANLIEFEPKLPDWKVSAISDLGVGNENKIALRFDKVFWPNVELLGTVAPTSYTCGYFLNLHKATGHPVLVYMVAGRFAYDIEKLSDEAAANFVMQQLKKMFPNASKPVQYLVSRWGTDPNSLGCYSYDLVGKPTDVYDKLRAPLGNLFFGGEAVSLDNQGSVHGAYSAGVMAAENCESYMLEKLGHAEKLSLASVRHEMLETLIPLQISRM

SEQ ID NO: 3135 - protein, 280 aa, Oryza sativa (japonica cultivar-group)
MATPAAEKPDGVEIREVWEDNLEAEFAVIREIVDDFPYVAMDTEFPGVVCRPLGTFKSNADFNYATLKANVDMLKLIQLGLTFSNEHGGLPSLGPEGRPCVWQFNFRGFDPRTDVAAADSIDLLRRSGIDFTRHSADGADARRFAELLMSSGVVMNSEVRWVTFHSGYDFGYLLKLLTGTYLPDTITGFFDLIRIYFPVVYDIKHLMRFCNSLHGGLNKLAELLDVERVGICHQAGSDSLLTALSFKKLKEAYFNGLTEKYAGVLYGLGTEGGETSSAAH

SEQ ID NO: 3136 - protein, 301 aa, Oryza sativa (japonica cultivar-group)
MGGFVKTQKTNAYHKRFQVKFKRRRQGKTDYRARIRLTNQDKNKYNTPKYRFVTNKDITAQIVYATIAGDIVMAAAYSHELPRYGLEVGLTNYAAAYCTGLLLARRVLKLRGLDQEYEGNIEATGEDYYVEPADERRPFRALLDVGLIRTTTGNRVFGALKGALDGGLDIPHSDKRFAGFKKDEKQLDSDIHRKYIYGGHVADYMRSMAEEEPEKFQAHFSEYLKKGIDADGMEALYKKVHAAIRADPTMAKSTKKEPATHKRYNLKKLTYEQRKASLVERLNALNSSAGADDDDEEEDDE

SEQ ID NO: 3137 - protein, 434 aa, Salmonella typhimurium LT2
MKTRTQQIEELQKEWTQPRWEGITRPYSAEEVVKLRGSVNPECTLAQLGAAKMWRLLHGEAKKGYINSLGALTGGQALQQAKAGIEAIYLSGWQVAADANLASSMYPDQSLYPANSVPAVVDRINNTFRRADQIQWASGIEPNDPRYVDYFLPIVADAEAGFGGVLNAFELMKSMIEAGAAAVHFEDQLASVKKCGHMGGKVLVPTQEAIQKLVAARLAADVMGVPTLVIARTDADAADLITSDCDPYDSGFITGERTSEGFYRTHAGIEQAISRGLAYAPYADLVWCETSTPDLELARRFADAIHAKYPGKLLAYNCSPSFNWQKNLDDKTIASFQQQLSDMGYKYQFITLAGIHSMWFNMFDLAHAYAQGEGMKHYVEKVQQPEFAAAKDGYTFVSHQQEVGTGYFDKVTTIIQGGASSVTALTGSTEEAQF

SEQ ID NO: 3138 - protein, 326 aa, Triticum aestivum
  unsure (1)..(326): unsure at all Xaa locations
MASTTAVPEVALRSGGARPMPAIGMGTATFPVVPETTVKAVLEAVEVGYRHFDTAAMYATERPLGEALAEAVRRGLLASREEVFVTSKLWCTQCHPHLVLPSLRESLQNLQMEYVDLYLIHWPISLKPGPTVFPVKREDAVPFDFAGVWRAMEECHRLGLAKAIGVSNFTTSHLHKLLAAATVPPAVNQVEMNPXWQQRKLREYCAEKGIHVAAYSPLGGQNWSGDGNAVLDSEVLAEIAKARGKTVAQVALRWIYEQGVTPIVKSFSKERLKENLGIFDWGLTDDDLRKIGQIPQKKIVRAETVLFSAEGEFTSADLADMEIVEE

SEQ ID NO: 3139 - protein, 251 aa, unidentified bacterium
MNTGDLAWVLISAALVWLMTPGLALFYGGLGERRNLLHTMFVPILIIGIATMVWFTVGYSLAFGGAGDIIGNFKHLFLSGVSFTHSTKSLTIPDGAFALFQGMFPIITAAIITGSVIGRVRIKAMIVFITLWLIFIYTPLAHMVWGGGLLAKLGAIDFAGGTVVHISSGVTGLVLALMIGHRHNDKHVPVRPSYVLIGGALLWVGWFGFNSGSALAANGIAVLALVNTWLASAAGVLTWGLAEYKMHGPGI

SEQ ID NO: 3140 - protein, 332 aa, Brassica napus
MSPEEELQSNGSVASSTRNIVGVLKEHNYLGLSDCSSVGSSNLSGLADDDKATISLKATELTLGLPGSQSPARDTELNLLGPAKLDEKPFFPLLPSKDEMCSSSSHKNIASGNKRGFSDTMDKVPLYTEKNWMFPEAVVATQSVIKKEVAQNLPKGKLSTTNNSSSPPAAKAQIVGWPPVRSYRKNTLATTCKNSDEVDGKPGSGPLFVKVSMDGAPYLRKVDLRSYTNYGELSAALEKMFTTFTLGQCGTSGATGKDVRNETKLKDLLNGKDYVLTYEDKDGDWMLVGDFSWEIFIGVCKKLKIMKGCDAIGLAAAPAPAPRAMEKSKMRA

SEQ ID NO: 3141 - protein, 436 aa, Streptomyces clavuligerus
MTETGTETETAGAPAETAETLAERWATEPRWRDIERTYGAEEVIRLSGSVREEHTLARRGADRLWRQLHELDYVHALGALTGGQAVQQVRAGLQAIYLFGWQVAADANQAGHTYPDQSLYPANSVPQVVRRINNALLRADQIATAENAGDGTDWLAPIVADAEAGFGGPLNAFELTKAMIEAGAAGIHYEDQLASEKKCGHLGGKVLVPTAQHIRTLNAARLAADIADVPTVIIARTDALAASLITSDVDERDAEFLTGERTAEGFHRVRNGMAPVIARGLAYAPYADLLWMETGTPDLAQAREFAEAIHAQYPEQLLAYNCSPSFNWRAALDDDRIAKFQRELGAMGYRFQFITLAGFHSLNHAMFDLARGYAEHGMTAYVDLQEREFAAQADGFTAVRHQREVGTGYFDLVSTAVNPASSTTALSGSTEEEQFH

SEQ ID NO: 3142 - protein, 499 aa, Zea mays
YNLGVQMSADASAAMEKIRAAGLLKTQGLIAGQWVDAYDGKTIEVQNPATGEVLANVSFMGSRETSDAIASAHSTFYSWSKLTASERGKALRKWYDLIISHKEELALLMTLEQGKPMKEALGEVNYGASFIEYFAEEAKRIYGDIIPPTLSDRRLLVLKQPVGVVGAITPWNFPLAMITRKVGPALACGCTVVVKPSELTPLTSLAAADLALQAGIPAGALNVVMGNAPEIGDALLQSTQVRKITFTGSTAVGKKLMAESANTVKKVSLELGGNAPCIVFDDADIDVAVKGSLAAKFRNSGQTCVCANRILVQEGIYEKFASAFIKAVQSLKVGNGLEESTSQGPLINEAAVQKVEKFINDATSKGANVMLGGRRHSLGMSFYEPTVVGNVSNDMLLFREEVFGPVAPLIPFKTEEEAVHMANDTNAGLAAYIFTKSIPRSWRVSESLEYGLVGVNEGIISTEVAPFGGVKQSGLGREGSKYGVDEYLELKYICMGNLG

SEQ ID NO: 3143 - protein, 131 aa, Brassica napus
MVYIKNQKTRAYSKRFQVKFKRRRQGKTDYRARLRLTNQDKNKYNTPKYRFVVRFTNKDVTAQIVYATIAGDIVMAAAYSHELPRYGLEVGLTNYAAAYCTGLLLARRVLKNRDLDEEYEGYVEATGEDFS

SEQ ID NO: 3144 - protein, 292 aa, Glycine max
  unsure (1)..(292): unsure at all Xaa locations
MESTLKALRDGESVLDLSPRSTVSGGVEDIYGEDRATEDQLVTPWIFSVASGYSLLRDPQYNKGLSFTEKERDAHYLRGLLPPTVSTQQLQEKKLMNSIRQYQVPLQKYVAMMDLQERNERLFYKLLIDNVEELLPVVYTPTVGEACQKYGSIFRRPQGLYISLKEKGKILEVLKNWPERSIQVIXVEPDGERIFGDLGILGCQGXGIPGGKLALYTALGGVRPSACLPITIDVGTNNEKLLNDEFYIGLRQRRATGQEYYDLMHEFMTAVKQNYXEKVLVQFEDFAXHNAF

SEQ ID NO: 3145 - protein, 240 aa, Populus alba x Populus tremula
MVPKFLFSASFVLFFLLHCPPALAQSPAAAPAPPGPINVTKVLEKGGQFSAFIRLLKATQEDVTLNGQLNNTNNAITIFAPSDNAFSSLKSGTLNSLSDQEKAELVQFHIIPQFLSSSQFQTVSNPLTTQAGSGGRLELNVTTTGNSVNITTGLTNTSVSGTIYTDNQLAVHQVDKVLLPLDIFTPKPPTPAPAPEKPKKRSKAAASPESPADTSGAVSFTVLNNVVFFGLCMVAAIYSL

SEQ ID NO: 3146 - protein, 279 aa, Borrelia burgdorferi B31
MANKINWFPGHMKRALDLIKNNLQKANIVLEILDARAPFSSKNPLTEKITKNQAKIILLHKSDVAQINEIIKWKKYFENLGNTVIISNIYKKGMRKQIIDIIKKLAIVKKIKNYKEKIKVLIIGVPNVGKSSIINLLSGKKSAKVANKPGYTKNIQIVKINEEINLFDMPGILWHNLVDQSIAKKLAILDMIKNEIVDNTDLALYLLEIMDQNNKNILLKKYEIYHKNSLDILQNFAKARKLIGKKNELNLEKASKILIKEFREGKFGKIILDKNYNAF

SEQ ID NO: 3147 - protein, 192 aa, Glycine max
  unsure (1)..(192): unsure at all Xaa locations
MEDGAGRGLECPKTMDGKASNGNGLEKEIPSCCLKAKASIPESEAKCHSTVVSGWFSASQTCSGKSGKAVYFNNPMWPGEAHSIKVEKILYKEKSEYQEVLVFEVWPLHLIMYYNFNVKGIDANPFILQSSTYGKVLVXLDGIVQLTEKDECAYQEMIAHLPLCSIQSPKTVKPFDLMIFVLSLYYDCRIKK

SEQ ID NO: 3148 - protein, 106 aa, uncultured Rickettsia sp.
MLKEIGSSENIPKYIAKAKDKNDPFRLMGFGHRVYKNYDPRAAVLKETCKEVLKELGQLENNPLLQIAIELEAIALKDEYFIERKLYPNVDFYSGIIYKAMGIPSQ

SEQ ID NO: 3149 - protein, 176 aa, Glycine max
  unsure (1)..(176): unsure at all Xaa locations
MAHSMISFRAVTTVNRARADMVAPFTGLKSMAGFSTRKTNNVITSIASNRGRVQCMHVWPPVGKKKTETLFYLPDLDDAQLAKEVECPVRKGWIPCYELEFEHAFVYREHNKSPXYYNGHYWTMXKLPIFDCTNTAQVWKELQETKTAYPNDFIHIIGFDDVLQMQVINYITYKPA

SEQ ID NO: 3150 - protein, 479 aa, Mycobacterium tuberculosis H37Rv
MAREISRQTFLRGAAGALAAGAVFGSVRATADPAASGWEALSSALGGKVLQPDDGPQFATAKQVFNTNYNGYTPAVIVTPTSQLDVQKAMAFAAANNLKVAPRGGGHSYVGASTANGAMVLDLRQLPGDINYDATTGRVTVTPATGLYAMHQVLAAAGRGIPTGTCPTVGVAGHALGGGLGANSRHAGLLCDQLTSASVVLPSGQAVTASATDHPDLFWALRGGGGGNFGVTTSLTFATFPSGDLDVVNLNFPPQSFAQVLVGWQNWLRTADRGSWALADATVDPLGTHCRILATCPAGSGGSVAAAIVSAVGTQPTGTENHTFNYLDLVRYLAVGNLNPSPLGYVGGSDVFTTITPATAQGIASAVDAFPRGAGRMLAIMHALDGALATVSPGATAFPWRRQSALVQWYVETSGSPSEATSWLNTAHQAVRAYSVGGYVNYLEVNQPPARYFGPNLSRLSAVRQKYDPSRVMFSGLNF

SEQ ID NO: 3151 - protein, 192 aa, Agrobacterium tumefaciens str. C58
MADRMSSKTIVDVEDLSGDAVDLTEITGVVKWFDVAKGFGFIVPDNGTQDVLLHVSCLRRDGYQTILEGTRIVALIQRRDRGFQVFRILSMDQSTAVHPSQLPPVRTHVQVTPHSGLERAIVKWFNRTKGFGFLTRGEGTEDIFVHMETLRRFGLTELRPGQVVLVRYGDGDKGLMAAEIHPDNPVSIGMSH

SEQ ID NO: 3152 - protein, 335 aa, Capsicum chinense
MVHEKQVIDEVSGWLRVFDDGSVDRTWTGPPEVKFMSEPVKPHDDFIDGIAVKDVVADDKSGSRLRIYLPEQNGGSVDKLPVVVHFHGGGFCISQADWFMYYTVYTRLARVANAIIVSVFLPLAPEHSLPAACDSGFAALLYLRDLSRQKINEPWLSNFADFNRVFLIGDSSGGNIVHHVAARAGEEDLSPMKLAGAIPIHPGFVRSKRSKSELEQEQTPFLTLDMVDKFLGFALPMGSNKDHPITCPMGDAAPAVEELKLPPYLYCVADKDLIKDTEMEFYEALKKAKKDVELCISYGVGHSFYLNKIAVEMDPVTGSATEKLFEAIAEFINKH

SEQ ID NO: 3153 - protein, 498 aa, Oryza sativa (japonica cultivar-group)
MATCLDSLGPLLGGAANSTDAANYICNRFTDTSSAVDATYLLFSAYLVFAMQLGFAMLCAGSVRAKNSMNIMLTNVLDAAAGALFYYLFGFAFAFGTPSKGFIGKQFFGLKHMPQTGYDYDFFLFQWAFAIAAAGITSGSIAERTRFSAYLIYSAFLTGFVYPVVSHWFWSTDGWASAGRLTGPLLFKSGVIDFAGSGVVHLVGGIAGLWGAFIEGPRIGRFDAAGRTVAMKGHSASLVVLGTFLLWFGWFGFNPGSFTTISKIYGESGTIDGQWSAVGRTAVTTSLAGSVAALTTLYGKRWLTGHWNVTDVCNGLLGGFAAITAGCSVVDPWASVICGFVSAWVLIGCNKLSLILKFDDPLEATQLHAGCGAWGIIFTALFARREYVELIYGVPGRPYGLFMGGGGRLLAAHIVQILVIVGWVSATMGTLFYVLHRFGLLRVSPATEMEGMDPTCHGGFGYVDEDEGERRVRAKSAAETARVEPRKSPEQAAAGQFV

SEQ ID NO: 3154 - protein, 506 aa, Rhodospirillum rubrum
MLYAAPGTADAIFAFKPRYDNFIDGTWQPPVRGEYFDNVTPITGKVFCKAARSTEEDITLALDAAHAAADRWGRTTAAERALILNRIADRLQDNLETLAYVESIDNGKPIRETLAADIPLAIDHFRYFAACIRAQEGSLSQIDETTIAYHFNEPLGVVGQIIPWKFPILMATWKLAPALAAGNCIVLKPAEQTPISILVLTELIADLLPPGVLNVVNGFGLEAGKPLASSKRIAKIAFTGETATARLIMQYASQNLIPVTLELGGKSPNVFFDDIASADDSFFDKAVEGFVMFALNQGEICTCPSRALIHESLYDRFIERALARVAVIKQGSPLDTETMIGAQASTEQMDKILSYMDIGREEGATVLAGGARAELGGELDGGYYVQPTVFKGNNSMRIFQEEIFGPVVAVTTFKDEDEALHLANDTHYGLGSGVWTRDGNRAFRFGRGIKAGRVWTNCYHLYPAHAAFGGYKQSGIGRENHHMMLDHYQQTKNLLVSYDPKAMGFF

SEQ ID NO: 3155 - protein, 243 aa, Triticum aestivum
MGGGVMRTAAKVGLAGGAAAAAGRFRNVAPSFATAPAAEAAAAAPLLSAAGEIPAVAPAGSQWASWEVDDWEFADWRSESASEADVAVVGGPRLVFAPPSREEAEEATAELREAIDRVYFKETPVEVVKEHDQELSKLGADALIPAMPGHVVQAFTLLKSSPEAQSVVASLASDKNVWDAVLKNERVMEFYKSHQQTLVNTFPEGTDSTDSVESPEKFEEASPEYALPTGSPLSDFGANANKR

SEQ ID NO: 3156 - protein, 175 aa, Triticum aestivum
  unsure (1)..(175): unsure at all Xaa locations
MAPTVMASSATSVAPFQGLKSTAGLPVSRRSNGASLGSVSNGGRIRCMQVWPIEGIKKFETLSYLPPLSTEALLKQVDYLIRSKWVPCLEFSKVGFIFREHNASPGYYDGRYWTMWKLPMFGCTDATQVINEVEEVKKEYPDAYVRIIGFDNMRQVQCVSFIAFXPPGCEESGKG

SEQ ID NO: 3157 - protein, 75 aa, Glycine max
  unsure (1)..(75): unsure at all Xaa locations
IYRIESYDVTSIPACIPMYLMSRLIKSLAFNWLISIXGSDKIFGRCVCFLNAPLKEXFHQETCRMIKALHKYDCL

SEQ ID NO: 3158 - protein, 162 aa, Triticum aestivum
MEGRMFGLETPLMTALQHLLDVPDGESGGAGNAGGEKQGPTRAYVRDARAMAATPADVKELPGAYAFVVDMPGLGSGDIKVQVEDERVLVISGERRREEKEDAKYLRMERRMGKLMRKFVLPENADMEKISAVCRDGVLTVTVEKLPPPEPKKPKTIQVQVA

SEQ ID NO: 3159 - protein, 358 aa, Saccharomyces cerevisiae [sequence omitted]

SEQ ID NO: 3160 - protein, 341 aa, Salmonella typhimurium LT2
MKVKAVFINKPGEVETRWVDYPHKKENEVLIKVDAAGICGSDIGAFRGTNPLVTYPRIIGHEVTGIVLQEGAGMPDNIKEGDRVIVDPYIYCGHCYPCSVGRTNCCENLNVIGVHVDGAMQEVVTHPAHLIHKIPDNVPSEMAPLAEPLTIALHALHRANVKAGEYVAIIGAGAIGLMAALSARHYKATPILIDIVEERLRYAQKLGVPYVLNAADDQVIDAIKNITHGTMAQVVIEASGANSAIRNTLDLASFAGRISFTGWPKQETSLPTNLITYKELDLRGSRTSAGEFDEALRMLSTLEINPQDVVSKVVNLDEIPDAVKELDRYPERYLKINAVFH

SEQ ID NO: 3161 - protein, 162 aa, Zea mays
MDAVMFGLETPLMAALQHLLDVPDGDAGAGGDNKTGGGATRTYVRDARAMAATPADVKELPGAYAFVVDMPGLGTGDIRVQVEDERVLVVSGERRREEREDDAKYLRMERRMGKFMRKFVLPDNADVDKVAAVCRDGVLTVTVEKLPPPEPKKPKTIEVKVA

SEQ ID NO: 3162 - protein, 332 aa, Arabidopsis thaliana
MSNVIGDRTEDGLSTAAAASGSTAVQSSPPTDRPVRVYADGIYDLFHFGHARSLEQAKLAFPNNTYLLVGCCNDETTHKYKGRTVMTAEERYESLRHCKWVDEVIPDAPWVVNQEFLDKHQIDYVAHDSLPYADSSGAGKDVYEFVKKVGRFKETQRTEGISTSDIIMRIVKDYNQYVMRNLDRGYSREDLGVSFVKEKRLRVNMRLKKLQERVKEQQERVGEKIQTVKMLRNEWVENADRWVAGFLEIFEEGCHKMGTAIVDSIQERLMRQKSAERLENGQDDDTDDQFYEEYFDHDMGSDDDEDEKFYDEEEVKEEETEKTVMTDAKDNK

SEQ ID NO: 3163 - protein, 197 aa, Zinnia elegans
MSASRFIKCVTVGDGAVGKTCLLISYTSNTFPTDYVPTVFDNFSANVVVNGSTVNLGLWDTAGQEDYNRLRPLSYRGADVFILAFSLISKASYENVSKKWIPELKHYAPGVPIVLVGTKLDLRDDKQFFVDHPGATPITTAQGEELKKTIGAPEYIECSSKTQLNVKQVFDAAIKVVLAPPKAKKKKGKAQKACSIL

SEQ ID NO: 3164 - protein, 105 aa, uncultured Rickettsia sp.
MLKEIGSSEYIPKYIAKAKDKNDPFRLMGFGHRVYKNYDPRAAVLKETCKEVLKELGQLDNNPLLQIAIELEAIALKDEYFIERKLYPNVDFYSGLSIKLWVYRQ

SEQ ID NO: 3165 - protein, 158 aa, Arabidopsis thaliana
MSDDEHHFESSDAGASKTYPQQAGNIRKGGHIVIKGRPCKVVEVSTSKTGKHGHAKCHFVAIDIFTSKKLEDIVPSSHNCDVPHVNRVDYQLIDISEDGFVSLLTDNGSTKDDLKLPTDEALLTQLKNGFEEGKDIVVSVMSAIGEEQMCALKEVGPK

SEQ ID NO: 3166 - protein, 498 aa, Bacillus sp. KSM-K16
MSQVPTGENSLKTRLVSFLNGGSKKLLINGEWVDAVSGQTFETMNPATGDTLAIVAEAGQEDIDSAVKAARKAFDEGPWSKMSAAERSRLIYKLADLIEEHKEELAQLETLDNGKPIRETANADVPLAIEHFRYFAGWATKIVGQTIPVQGNYFNYTRHEAIGVVGQIIPWNFPLLMAAWKLGAALATGCTVVLKPAEQTPLSALYLGELINEAGFPKGVVNIVPGFGHSAGTAIVNHPAVDKVAFTGSTNVGKLIMKQASESLKRVTLELGGKSPNIILPDADLSKAVPGSLMGIMFNQGQVCCAGSRLYVQKKQYDHVVADLVSLTKKINQGDGLLEHTTMGPLISTQQQKRVKNYIDRGVEEGAELLAGGTIPYDQGYFVSPTIFADVDHSMTIAKEEIFGPVVAAMPFESVDDLIGKANDSDYGLAAGVWTQDIKKAHYIAHRIKAGTIWVNCYNVFDAASPFGGYKQSGIGREMGSYALDNYTEVKSVWVNMD

SEQ ID NO: 3167 - protein, 506 aa, Halomonas salina
MIYANPGSPESVVSFDARYGNYIGGEFVPPVKGQYFDNVSPVNGKPFCEIPRSTAEDIDKALDAAHAAAPAWGKTSAAERGNILLRIADRIEQNLELLAVAETWDNGKAVRETLNADLPLAVDHFRYFAGCIRAQEGTAADIDANTVAYHFHEPLGVVGQIIPWNFPILMAVWKLAPALAAGNCVVLKPAEQTPASILKLMELVGDLLPPGVVNVVNGYGAEAGQALATSTRIAKIAFTGSTPVGSHILKCAAENIIPSTVELGGKSPNIYFADIMDAEPEFIDKAAEGLVLAFFNQGEVCTCPSRALIQEDIYDAFMAKVMEKVATITRGNPLDTDVKVGAQASQEQFDKIMSYMEVAREEGAEFLTGGDKEHFDPAYDSGYYIQPTLLKGHNKMRVFQEEIFGPVVAVTTFKDEEEALAIANDTEFGLGAGVWSRDINVAFRMGRGIQAGRVWTNCYHQYPAHAAFGGYKKSGVGRETHKVALEHYQQTKNLLVSYDTNPLGFF

SEQ ID NO: 3168 - protein, 477 aa, Methylocystis sp. SC2
MSVQATHSGSARIDPRYDHAALAAARESDRFSLHTKHLNEMWVRVLKTIGYDVGFTRGLGPYLWDRKGDRYLDLLSGWGVFALGRNHPAVRDALVSVLDGELANLVQLDVSVLAGVLAEKLLGYAPWLEKVFFANSGAEAVEAAIKFARAATGRPGILHCAHSFHGLTYGSLSMNGDDIFKKGFGPLLPNAREVAFDDLDALERALAGRDVAAYFVEPIQGKGVNIPQEGYLLGAQALCRKYGTLFVADEIQTGIGRTGRFFAIDHYPGVEPDMIVVAKALSGGHVPVGAVLTRKWIFDKVFDRMDRAVVHGSTFSKNDLAMAAGVATLDVLKNERVIENAAKTGDRLLASFQRMAGGYELVADVRGKGLMIGVEFGPPKSFKLKAAWNLLETVNSGLFCQLISIPLFRDHKVLTQVAGHGNHTIKLLPPLTISDEDCDWIEQSFDAVIADAHKAPSAVWSLGKTLAEHAIKARMSG

SEQ ID NO: 3169 - protein, 487 aa, Burkholderia cepacia R1808
MTIKHWIDGREVASRDTFTTLNPATGDVIADVASGGDAEVDAAVRAAKAAFPKWANTPARERAKLMCRLAELIEKHVPMLAALETQDTGLPIAQTSKQLIPRAAENFNFFAQVCVQMNGRTYPVDDQMLNYTLYQPVGVCALVSPWNVPFMTATWKTAPCLALGNTAVLKMSELSPLTADQLGRLALEAGIPPGVLNVVHGYGATAGDALVRHSDVRAVSFTGGTVTGKRIMERAGLKKYSMELGGKSPVLIFDDADFDRALDASLFTIFSINGERCTAGSRIFVQRTIYDRFVQAFAQRANRLVVGDPADPATQLGAMITRQHWEKVTGYIRLGEQEGARVVAGGAQAPAGLAAHLRNGNFVRPTVFADVDNRMRIAQEEIFGPVACLIPFDDEDDGLRLANETSYGLASYLWTQDVGKVHRLARGIEAGMVFVNSQNVRDLRQPFGGVKESGTGREGGEYSFEVFAEIKNVCISMGSHHIPRWGV

SEQ ID NO: 3170 - protein, 183 aa, Methylocystis sp. SC2
MTASATESDETGLELVEVAGRIKWFDVAKGYGFVVPDDGSDDILLHVTILRRSGMQTAFEGARVVCEAQKRVKGMQVFRVIAMDESTAVHPSQSCAGRTHVQIVPTSGYEIAIVKWFNRMKGFGFLTRGEGTEDIFLHMETVRRYGMTELKPGDSVLVRYGGGPKGLMAAEVRPLDAKSVPSH

SEQ ID NO: 3171 - protein, 588 aa, Zea mays
  unsure (1)..(588): unsure at all Xaa locations
MCGILAVLGCSDWSQAKRARILACSRRQEHPGPDWSGLYQHEGNFLAQQRLAVVSPLSGDQPLFNEDRTVVVVANGEIYNHKNVRKQFTGTHNFSTGSDCEVIIPLYEKYGENFVDMLDGVFAFVLYDTRDRTYVAARDAIGVNPLYIGWGSDGSVWIASEMKALNEDCVRFEIFPPGHLYSSAGGGXRRWYTPHWFQEQVPRTPYQPLVLREAFEKAVIKRLMTDVPFGVLLSGGLDSSLVASVTKRHLVETEAAEKFGTELHSFVVGLEGSPDLKAAREVADYLGTIHHEFHFTVQXGIDAIEEVIYHDETYDVTTIRASTPMFLMARKIKSLGVKMVLSREGSHELLGGYLYFHFAPNKEEFHRETCRKVKALHQYDCLRANKATSAWGLEVRVPFLDKEFINVAMGMDPEWKMYDKNLGRIEKWVMRKAFDDDEHPYLPKHILYRQKEQFSDGVGYNWIDGLKSFTEQQVTDEMMNSAAQMFPYNTPVNKEAYYYRIIFERLFPQDSARETVPWGPSIACSTPAAIEWVEQWKASNDPSGRFISSHDSTAIDHTXAVSRRWPTAAATXANGTVNGKDVAVAIAV

SEQ ID NO: 3172 - protein, 440 aa, Bordetella parapertussis 12822
MSNRETEIRNLQKDWAENTRWQGIKRAYSAEDVIRLRGSVAVEHSLARRGATRLWDSLHSEPFVNSLGALTGNQAMQQVKAGLKAIYLSGWQVAGDANLAGEMYPDQSLYPANSVPQVVRRINNALARCDQIQWMEGKNPGDQDYIDYYAPIVADAEAGFGGVLNAFELMKAMIEAGAAGVHFEDQLASVKKCGHMGGKVLVPTREAVSKLVSARLAADVMGTPTILLARTDADAADLVTSDVDENDRPFITGERTVEGFFRTRAGLDQAISRGLAYAPYADLIWCETSTPNLEYARKFAEAVHRQFPGKLLAYNCSPSFNWKKNLDDGTIAKFQRELGAMGYKFQFITLAGFHALNYGMFELAHGYARRQMSAFVELQQKEFAAAELGFTAVKHQREVGTGYFDAVTQTIEGGQSSTTALTGSTEEAQFEHGGQAVKAA

SEQ ID NO: 3173 - protein, 106 aa, uncultured Rickettsia sp.
MLKEIGSSEYIPKYIAKAKDKNDPFRLMGFGHRVYKNYDPRAAVLKETCKEVLKELGQLDNNPLLQIAIELEAIALKDEYFIERKLYPNVDFYSGIIYNAMGIPTQ

SEQ ID NO: 3174 - protein, 463 aa, Pseudomonas putida KT2440
MDKQKQDLISQQDRGAVLHPFTQLKDFASGKAGDPTIIETAKGITITDATGREYIDGFAGLYCMNVGYGRTEVAEAISKQAHKLAYYHTYAAHTTEELARLSDRLVKMAPGKMSKVFYGMSGSDANETQAKLVWYYNNLRGKPNKKKIIARERGYHGCSVVSGSMTGMSFYHDHMDLPIAGILRTGAPHYYWGAEPGETELEFSARRARELEELILREGPDTIGAFIAEPVLGTGGITPPPEGYWAAVQPVLKKYDILLIADEVITGFGRTGAMFGCDKYGIEPDLITVAKGLTSAYAPLSASIVGEKVYKVMEEGADRVGAFSHGYTYSGHPIGVAAANAVLDIVEGENIPAHVDKVGQYFQKSMQETFSSLPIVGEVRGVGMMAAIEFVADPATKKRFDPALKVGARISKAARDRNLIARAMPHGEILGFAPPLVTTEQEVDRIISIAHEAVLSVLDELKV

SEQ ID NO: 3175 - protein, 106 aa, uncultured Rickettsia sp.
MLKEIGSSEYIPKYIAKAKDKNDPFRLMGFGHRVYKNYDPRAAVLKETCKEVLKELGQLDNNPLLQIAIELEAIALKDEYFIERKLYPNVDFYSGIIYKAMGIPSQ

SEQ ID NO: 3176 - protein, 490 aa, Pseudomonas putida KT2440
MKDLAPSALNKLRRNDLLETRAYIDGRWVTGEGSLDVTDPANDQVIAQVAHCDESWVDLAVEAASRAFDGWRNTLPTQRGAVLRKWAALMRENQEDLAVIMTCEQGKPLSESRGEINYGANFVEWFAAEGERCYGETIPSHLPNSQLVTKLQPIGVTVAITPWNFPSAMITRKAAAALAAGCPMIVKPAPETPLSALALARLAEEAGIPGGVFQVLTGDAPKMSARLLAASAVRAFSFTGSTEVGRILLRQSADTVKKVSLELGGHAPFIVFDDASIAEAVEGCIGAKFATSGQDCLGANRIYVHRNIYGQFVEEFTKATEKLRVGHGLEEGVDIGPMTRVTVANKCREQISNALSLGAKLTCGGIDNHLGSSFVLPTVLADVTDKMDIAFEETFGPVAAILPFDSEDEVVTRANNTEFGLAAYVYTNDLRRACRVSDRLEYGMVALNTPKFTGAPIPFGGWKQSGLGREGSKHGLAEYMELKYVCIGGL

SEQ ID NO: 3177 - protein, 192 aa, Zea mays
MSLCTIARRLCLSKPSSGSRLSAIWAHLYSTEAAKDMGAKKYKYPDVYDPYGPMPPPSEKVVELADRIAALPPEEIKQIAPALLLRLNQEPPQAVSGQGFGFGAQVGSGAGSGKAEEKKAEKTVFDVRLEKFDAAAKIKIIKEIRTFTDLGLKEAKELVEKAPVVLKQSLTKDEAEAIIGKIKAAGGVAVME

SEQ ID NO: 3178 - protein, 389 aa, Salmonella typhimurium LT2
MTDTTILQNNTHVIKPKKSVALSGVPAGNTALCTVGKSGNDLHYRGYDILDLAEHCEFEEVAHLLIHGKLPTRDELNAYKSKLKALRGLPANVRTVLEALPAASHPMDVMRTGVSALGCTLPEKEGHTVSGARDIADKLLASLSSILLYWYHYSHNGERIQPETDDDSIGGHFLHLLHGEKPTQSWEKAMHISLVLYAEHEFNASTFTSRVIAGTGSDVYSAIIGAIGALRGPKHGGANEVSLEIQQRYETPDEAEADIRKRVENKEVVIGFGHPVYTIADPRHQVIKRVAKQLSEEGGSLKMYHIADRLETVMWETKKMFPNLDWFSAVSYNMMGVPTEMFTPLFVIARVTGWAAHIIEQRQDNKIIRPSANYTGPEDRPFVSIDDRC

SEQ ID NO: 3179 - protein, 489 aa, Glycine max
  unsure (1)..(489): unsure at all Xaa locations
FEQQYDRFMNSFRSLENNTQGQPDKVVSLAKWRILNRLHDRNETLYYRVLIDNIKEFAPIIYTPTVGLVCQNYSGLFRRPRGMYFSAKDKGEMMSMIYNWPAHEVDMIVLTDGSRILGLGDLGVQGIGIPIGKLDVYVAAAGINPQRILPVMLDVGTNNQKLLEDRLYLGLRQPRLEGEEYLSIVDEFMEAVHARWPKAIVQFEDFQMKWAFETLKRYQKRFCMFNDDIQGTAGVALAGILGTVRAQGRPLTDFVNQKXIVVVGAGSAGLGVLKMAIQTVAKISGCSELAAKSQFYLIDKDGLVTTERNSLDPAAAPFAKNPRDIEGLTEEGLTEGASIIEVVKKIRPHVLLGLSGVGGIFNEEVLKAMRESVSTKPAIFAFYMYMGTAECTAIDAFKHAGENMVFASGSPFENVDLGNGIVGHVNQANNMYLFPGIGLGTLLSGAHLITDGMLQAAAEWYDVNLENCFFFINQKPLELALMEVWQDVF

SEQ ID NO: 3180 - protein, 505 aa, Vinca major
MAIVDFLAAFLIFILTQKLIQTLFRRTYRRKLPPGPKGWPVIGALPYLGTMPHTSLAYMAKKYGPVMYLKVGTNDMVVVSTPDAARAFLKTLDINFSNRPPNAGATHLAYGAQDMVFAHYGPKWKLLRKLSNLHMRGGKALEDWSNVRISELGHMLETMYESSKKGEAVVVAEMLTYAMANMIGQVILSRRVFVTKGSDSNEFKDMVVELMTSAGLFNIGDFIPSIAWMDLQGIEGGMKRLHKKFDVLLTKLLEEHKESSSKRKGKPDLLDYVLANRDNSEGERLTTTNIKALLLNLFSAGTDTSSSIIEWALSEMLRNPSILKRAQHEMVQVIGRNRRLVESDISRLPYLQAICKETFRKHPSTPLNLPRIATEACEVNGYYIPKGTRLSVNIWAIGRDPDVWENPLEFNPDRFLSGKNAKIDPRGNDFELIPFGAGRRICAGTRMGILLVEYILGTLVHSFDWNLPSSVTKLNMDESFGLALQKVVPLAALVTPRLPINAYSP

SEQ ID NO: 3181 - protein, 496 aa, Oryza sativa (japonica cultivar-group)
MATCADTLGPLLGTAAANATDYLCNQFADTTSAVDSTYLLFSAYLVFAMQLGFAMLCAGSVRAKNTMNIMLTNVLDAAAGALFYYLFGFAFAFGAPSNGFIGKHFFGLKQVPQVGFDYSFFLFQWAFAIAAAGITSGSIAERTQFVAYLIYSAFLTGFVYPVVSHWIWSADGWASASRTSGSLLFGSGVIDFAGSGVVHMVGGVAGLWGALIEGPRIGRFDHAGRSVALRGHSASLVVLGSFLLWFGWYGFNPGSFLTILKSYGPPGSIHGQWSAVGRTAVTTTLAGSTAALTTLFGKRLQTGHWNVIDVCNGLLGGFAAITAGCSVVDPWAAIICGFVSAWVLIGLNALAARLKFDDPLEAAQLHGGCGAWGVIFTALFARKEYVDQIFGQPGRPYGLFMGGGGRLLGAHIVVILVIAAWVSFTMAPLFLVLNKLGLLRISAEDEMAGMDQTRHGGFAYAYHDDDASGKPDRSVGGFMLKSAHGTQVAAEMGGHV

SEQ ID NO: 3182 - protein, 352 aa, Cochliobolus heterostrophus
MPPAGSGSSRKISFNVSEQYDIQDVVGEGAYGVVCSALHKPSGQKVAIKKITPFDHSMFCLRTLREMKLLRYFNHENIISILDIQKPRNYETFTEVYLIQELMETDMHRVIRTQELSDDHCQYFIYQTLRALKAMHSANVLHRDLKPSNLLLNANCDLKVCDFGLARSAASTEDNSGFMTEYVATRWYRAPEIMLTFKEYTKAIDVWSVGCILAEMLSGKPLFPGKDYHHQLTLILDVLGTPTMEDYYGIKSRRAREYIRSLPFKKKIPWKAIFPKTNDLALDLLERLLAFNPVKRISVEDALKHPYLEPYHDPDDEPGADPIPEEFFDFDKNKDNLTKEQLKLLIYQEIMR

SEQ ID NO: 3183 - protein, 357 aa, Leuconostoc mesenteroides subsp. mesenteroides ATCC 8293
MTSVKKIVVLKGDYIGPEIMTAGLAVLDAATKDTTFAYELIDAPFGGDGIDRAGDPLPQSTIDVSKQADAVLLSAIGGPKWDNAPRRPEQGLLEIRSKLNLFANIRPTKVTAAQIDRSPLKPEYVENTDFVIVRELTSGAYFGKPRKLEAHQAIDTMYYSEEEVTRIMHQGFKMAQKRNKHVTIVDKSNVLATSKFWRKIANEVGKSYQDVTIDYYYVDAMTMAIMAKPTTFDVVIIPNLFGDILSDEAAQITGSIGQIPSMSVGESGPNLYEPIHGSAPDIAGQGIANPISMVNTVAMMLTESFDEKRIADKITAAVDYIIENHCVTPDMGGTMTTDEVTQKMVDYIKNYESADIK

SEQ ID NO: 3184 - protein, 136 aa, Triticum aestivum
MSEAVGTPESSGAKEQERFLPIANIGRIMRRGVPENGKIAKDAKESIQECVSEFISFITSEASDKCMKEKRKTINGDDLIWSMGTLGFEDYVEPLKLYLKLYREMEGDTSKGSISEQAGKKEVALNGQPGSSFNGM

SEQ ID NO: 3185 - protein, 283 aa, Magnetospirillum magnetotacticum MS-1
MTVASQCWTSIHGVVMPRIIYGTAWKKEKTADLVELALGQGFRGIDTACQPKHYHEPGVGEGLAAALAKGLRRDEIYLQTKFTPLAGQDPQRIPYDPSACLSQQVAQSFERSCANLRTEFLDGLVLHSPLGNPADFREVWSAMEGIFESGGTRQLGISNCYDPEVLRHLCETSRVKPAIVQNRFYAATGFDRILRAYCRKNGILYQSFWTLTANPEILVDDRVKALMAKHGRTAPQIFFRYLSQQEIIPLTGTTSAVHMGQDLEIGDFELSDAECQTLAPLLN

SEQ ID NO: 3186 - protein, 257 aa, Glycine max
MGKSYPTVSADYQKAVEKAKKKLRGIIAEKRCAPLMLRLAWHSAGTFDKGTKTGGPFGTIKHPAELAHSANNGLDIAVRLLEPLKAEFPILSYADFYQLAGVVAVEVTGGPEVPFHPGREDKPEPPPEGRLPDATKGSDHLRDVFGKAMGLTDQDIVALSGGHTIGAAHKERSGFEGPWTSNPLIFDNSYFTELLSGEKEGLLQLPSDKALLSDPVFRPLVDKYAADEDAFFADYAEAHQKLSELGLLMPKQRLGDC

SEQ ID NO: 3187 - protein, 321 aa, Glycine max
  unsure (1)..(321): unsure at all Xaa locations
MEAKKIPEVILNSGQKMPVIGLGTASIPLPPHEALTSIPIVAFEVGYRHFDTASLYGSEESLGKAVAXALDLGLIKSRDKVFITSKLWTTDAHPDLVVPTLKTHCRKKLGLEYVDLYLIHWPLRMKPEAKGYHNILKENVLPSFDMKGIWEAMEECYRLGLAKSIGVSNFGIKKLSQLLENATIPPAVNQVEMSPAWQQGKLKEFCKQKGIHVSAWSPLGAYKSAQGTNAVMESPILKEIACERQKSMAQIALRWIYEQGAIAIVKSFNKERMKQNLDIFDWELSQEESQKFSQIPQRRMYRGITFVSENGPYKTLEELWD

SEQ ID NO: 3188 - protein, 150 aa, Hordeum vulgare subsp. vulgare
MSIVRRSNAFDPFADLWADPFDTFRSIVPAFSGNSETAAFANARVDWKETPEAHVFKADLPGVKKEEVKVEVEDGNVLVVSGERTKEKEDKNDKWHRVERSSGKFVRRFRLPEDAKVEEVKAGLENGVLTVTVPKTEVKKPEVKAIEISG

SEQ ID NO: 3189 - protein, 122 aa, Glycine max
LINCVSTFCFIVNQVDSRHSVVVPDSNIFYIIALLRFIPPPPKGPPTELLVEQNHEIIQLCYNRGFDFKLYLPHYQSQENWMRHYGDKWTRFVERKANFDPLAILAPGQKIFSRIPQTLSIT

SEQ ID NO: 3190 - protein, 250 aa, Glycine max
MGKSYPTVSADYQKAVEKAKKKLRGFIAEKRCAPLMLRLAWHSAGTYDVSSKTGGPFGTIKHPSELAHGANNGLDIAVRLLEPLKAEFPILSYADFYQLAGVVAVEVTGGPEVPFHPGREDKPEPPPEGRLPDATKGSDHLRDVFGKAMGLSDRDIVALSGGHTIGAAHKERSGFEGPWTSNPLIFDNSYFKELLSGEKEGLLQLPSDKALLSDPVFRPLVEKYASDEDAFFADYAEAHQKLSELGFAEA

SEQ ID NO: 3191 - protein, 267 aa, Brassica napus
  unsure (1)..(267): unsure at all Xaa locations
RFGSTAGAAIASHMDIDKVSFTGSTDVGRKIMQAAATSNLKKVSLELGGKSPLLIFDDADVNKAAELALXLGCFYNKGEICVASSRVFVQEAIYDKVVAKMVEKVKDWTVGDPFDSTSRQGPQVDKNEGATLLTGGNAIGDKGYYIEPTIFADITEDMKIYKEEIFGPVMSLMKFKTMEEGIKCANNTKYGLAAGIVSQNVDVINTVSRSIKAGVIWVNCYFAFDLDSPYGGYKMSGNCRQQGXMDALDSYLQVKSIAMPLHNSPWM

SEQ ID NO: 3192 - protein, 318 aa, Zea mays
IPGMKYFWDTLLDADLESDALGWQYITGSLPDGRELDRIDNPQFEGYKFDPHGEYVRRWIPELARLPTEWIHHPWDAPVSVLQAAGIELGSNYPLPIVELDAAKGRLQAALSEMWQLEAASRATMNNGTEEGLGDSSEVLFPQELQMEVDRQPAPAEAAANVHVPVPMPARRRGDQMVPTMTTSSLNRAGTEVSADLVVANSEEEDTRAQVPFHAHLHPRAEAPPAARRTNNGARQHDVFQQPRNHRREALLAPSASEASSSWTGREGAVVPVWSPPAASGHSDAFAADEADVSSRSYLGRHPQSHRLMNWSQLSQSS

SEQ ID NO: 3193 - protein, 364 aa, Zea mays
MGSTAGDVAAVVDEEACMYAMQLASSSILPMTLKNAIELGLLEVLQKEAGGGKAALAPEEVVARMPAAPSDPAAAAAMVDRMLRLLASYDVVRCQMEDRDGRYERRYSAAPVCKWLTPNEDGVSMAALALMNQDKVLMESWYYLKDAVLDGGIPFNKAYGMTAFEYHGTDPRFNRVFNEGMKDHSVIITKKLLDFYTGFEGVSTLVDVGGGVGATLHAITSRHPHISGVNFDLPHVISEAPPFPGVRHVGGDMFASVPAGDAILMKWILHDWSDAHCATLLKNCYDALPENGKAIVVECVLPVNTEATPKAQGVFHVDMIMLAHNPGGKERYEREFRELAKGAGFSGFKATYIYANAWAIEFIK

SEQ ID NO: 3194 - protein, 280 aa, Streptococcus mutans UA159
MEAYTLINGVHIPKIGFGTWKLADGDEAYKSVSYALEVGYRHVDTAQYYGNEVSVGRAIADSPIKREELFITTKIWNDKHSYDEAKQSVEESLAKLKLNYLDLLLIHWPNPKALRENDAWKTRNADVWRAMEDLYQAGKVRAIGVSNFMIHHLEPLLEVATVKPMVNQVLLAPGCSQEELVAFCRQNEMILEAYSPLGTGSIFDNQTAQDLANKYNKTVAQIALRWSLQKGFLPLPKSATPKNILSNLAIFDFDLTEDDILKLDKIENVKSQGNPDETAF

SEQ ID NO: 3195 - protein, 168 aa, Xylella fastidiosa Dixon
MTSIYTFTFTRLDGRPQALADWRGQVLLLVNVASHCGFTPQYAGLEMLWQRYRDAGLIVIGFPCDQFAGQEPGDEAKIAEFCTLTYGVDFPMAAKIKVNGADAHPLWQWLKHRRRGLFGVAAIKWNFTKFLIGRNGQPIARYSPIKSPEQLEVHIVRALGEEGGGNTH

SEQ ID NO: 3196 - protein, 177 aa, Zea mays
  unsure (1)..(177): unsure at all Xaa locations
MVLEATMICIDNSEWMRNGDYAPSRFQAQADAVNLICGAKTQSNPENTVGVMTMAGKGVRVLVTPTSDLGKILACMHGLEXVGAEANLGCGNPGAQLALKHRQNKRQQQRIIAFMGGLGEQQESFETLGKKLKKNXVALEILNFGGTPGEKPEKRKLGFGLLTPGKPPLCLSPPGEK

SEQ ID NO: 3197 - protein, 181 aa, Zea mays
MAYSMLSSAAVVTSPAQATMVAPFTGLKSSSAFPVTRKANNDITSIVSNGGRVSCMQVWPPIGKKKFETLSYLPDLTEVELGKEVDYLLRNKWIPCVEFELEHGFVYREHGSTPGYYDGRYWTMWKLPLFGCTDSAQVLKEVQECKTEYPNAFIRIIGFDNNRQVQCISFIAYKPPSFTGA

SEQ ID NO: 3198 - protein, 438 aa, Neurospora crassa
MSNNSAFTFSPPGPQHPIFSSASTPNIGTSASIDPRIPTVGSRARDLHYSIRDFLSTHPLLELGGQEHFSVERRRHQDVFGLHALPKDKIHPIDDVEFTAIRGPHGTIPVRILYPTSGKDNRNKGKAGALIYFHGGGYTVGSVDEFENGLRLIAEESGCQVYAVEYRLAPEFKYPVQLDEYSAVIDWVQGEGGKTRGVHPEKVVGGGDSAGGNMTAAICLRRMDEGRKPLAGQILLYPEARLPFDTPAATENNSDISPQDRYVSPGMQSVEDLRHQPPAAVFTSGYDPLRDVGCEYASKLSQAGVPTRWRHYDNLTHGWLQLTAWSEVAEQAVKDVAHQVKRLVFAATDTHTLKSPQGQLPVDRLNIQTWNCGHTKFAGSKPGWQHVYCLYLGHLVPPLHLGLDLYPKVILSVALEVSRIPPKLRQIKTSQQPIVLVV

SEQ ID NO: 3199 - protein, 92 aa, Glycine max
  unsure (1)..(92): unsure at all Xaa locations
VGFPTSKTYNDITSIVSNGGRLQCMHVWPPLGKKKSETLFYLPYLYDAQSAXKYXYLLKKGWIPXWEFQLDHSLVYHDHYRLPRYYDGRYWT

SEQ ID NO: 3200 - protein, 623 aa, Triticum aestivum
MANASSISRSLRRSLAPDDLHRLLLQRSRAFVTAECHRPVVLHKRGPDILHDPWFNRGTAFSMTERDRLGLRGLLPPSVVSSQQQIDRFMGDLKRLEQNARDGPSDTYQLAKWRILNRLHDRNETMYYKVLIDNIEEYAPIVYTPTVGAVCQNYSGLFRRPRGMYFSAEDRGEMMSMVYNWPADQVDMIVVTDGSRILGLGDLGVQGIGIAIGKLDLYVAAAGINPQRVLPVMIDVGTNNEKLLKDPLYLGLQEHRLEGEDYVEIIDEFMEAVFSRWPNVIVQFEDFQSKWAFRLLQRYRKTYRMFNDDVQGTAGVAIAGLLGAVRAQGRPMIDFPKQKIVVAGAGSAGIGVVNAASRTMARMLGNNEVAFESARSQFWIVDAHGLITEERVDIDPDARPFARRKSELTHQGLNEGASLIEVVKKVKPDVILGLSAVGGLFSKEVLEALKDSSSSRPAIFAMSNPTKNAECTPEEAFSIIGEKVVFSSGSPFDDVDLGDGKIGHSNQGNNMYLFPGIGLGTLLSGARIVSDGMLQAAAERLASYMKEEEVLQGIIYPPTSRIRDITKEVAAAVVREAVADDLAEGYRDMDARELARLSEEETVDYVKNNMWNPVYPTVVYKKD

SEQ ID NO: 3201 - protein, 58 aa, Zea mays
  unsure (1)..(58): unsure at all Xaa locations
MPQGTANCAHILIAXILPPLGALLIHGRGHQLWICLLLTFLDYIPGIIYAIYAITRNT

SEQ ID NO: 3202 - protein, 134 aa, uncultured Rickettsia sp.
ANEAVINMLKEIGSSENIPKYIAKAKDKNDPFRLMGFGHRVYKNYDPRAAVLKETCKEVLKELEQLENNPLLQIAIELEAIALKDEYFIERKLYPNVDFYSGIIYKAMGIPSQMFTVLFAIARTVGWMAQWKEM

SEQ ID NO: 3203 - protein, 106 aa, uncultured Rickettsia sp.
MLKEIGSSENIPKYIAKAKDKNDPFRLIGFGHRVYKNYDPRAAVLKETCKEVLKELGQLENNPLLQIAIELGAIALKDEYFIERKLYPNVDFYSGIIYKAMGIPSQ

SEQ ID NO: 3204 - protein, 145 aa, uncultured Rickettsia sp.
ANEAVINMLKEIGSSENIPKYIAKAKDKNDPFRLMGFGHRVYKNYDPRAAVLKETCKEVLKELEQLENNPLLQIAIELEAIALKDEYFIERKLYPNVDFYSGIIYKAMGIPSQMFTVLFAIARTVGWMAQWKEMHEDPEQKISRP

SEQ ID NO: 3205 - protein, 138 aa, uncultured Rickettsia sp.
ANEAVINMLKEIGSSENIPKYIAKAKDKNDPFRLIGFGHRVYKNYDPRAAVLKETCKEVLKELGQLENNPLLQIAIELEAIALKDEYFIERKLYPNVDFYSGIIYKAMGDTVANVHGTFCNSTNHRLDGTMERNARRP

SEQ ID NO: 3206 - protein, 158 aa, Arabidopsis thaliana
MSSNKILLTSSDGESFEIDEAVARKFLIIVHMMEDNCAGEAIPLENVTGDILSKIIEYAKMHVNEPSEEDEDEEAKKNLDSWDAKFMEKLDLETIFKIILAANYLNFEGLLGFASQTVADYIKDKTPEEVREIFNIENDFTPEEEEEIRKESAWTFNE

SEQ ID NO: 3207 - protein, 482 aa, Ralstonia eutropha JMP134
MHNLNTFYIGGEWVKPADGATLADLVNPATEAVIGTVAMGGAADVDRAVAAARDAFASWSRSSREERLALLRRISDGYKARIGEIAEAISTEIGAPIWLCREYQAPMGLVQIQAAIAALEAFEFVTVKGTTQVVREAVGVAALITPWNWPVNQIAAKVAPALAAGCTVVLKPSEIAPLDARIFAEIVQEACQATSTPAGVFNMLFGTGPTVGAALSRHPDVDMVSITGSTRAGVDVAMQAAPTVKRVAQELGGKSPNVILDDADLKAAVSQGVVSCMLNSGQTCTAPTRMLVPRAQYQMAIAIAQATVQALTVGDPSSPDSKLGPSSNRAQYERVQRMIEAGIQEGARVVAGGPGRPEGLAQGFYNRPTVFADVSNDMTIAREEIFGPVLSMIPYDNEAEAIRIANDTPYGLAAYVWSGNPARARRVAGELRAGSVQINGAKMDFAAPFGGYKTSGNGREFGAYGLAEFLEYKSVAGCTVDE

SEQ ID NO: 3208 - protein, 186 aa, Triticum aestivum
  unsure (1)..(186): unsure at all Xaa locations
MAGVGRNMVAPLLVLNLIMYIVVIGFASWNLNHFINGLTNRPGVGGNGXATFYFLVFAILAGVVGAASKAXAACNHVRTWXRGDSLATSASSALVAWAITXALAFGLACKEIHIGGYRGWRLRVLEAFVIILMFTQLLYVLALHSGLFGNQFGNHAGAGGYGAEHGAYGAGDPHNKGMGTGGVARV

SEQ ID NO: 3209 - protein, 413 aa, Methylobacillus flagellatus KT
MSTKIKVPTTGEKISVNADNSLNVPDHPIIPFIEGDGIGVDITPPMRHVVDSAVAKAYGGKRAIAWMEVYAGEKAVKTYGDNTWLPDETLKAVKDYVISIKGPLTTPVGGGIRSLNVTLRQELDLYVCLRPIQYFQGVPSPVKHPEKTNMVIFRENTEDIYAGIEWAAGTDEVKKVVDFLSDMGVRKKIRFPEASAIGIKPVSIDGSKRLVRKAIQYAIDNNRKSVTIAHKGNIMKFTEGGFKTWGYEVAKEEFGAVEIDGGPWCKLPNGIIIKDCIADAFLQEILLHPADYDVVATLNLNGDYISDALAAQVGGIGIAPGANISDTVAMFEATHGTAPKIAGKDIANPSSLILSAEMMLRHLGWTEAADLVINGVAKAIQAKRVTHDFSSQMEGATQVGSAEFGAEIVKHMS

SEQ ID NO: 3210 - protein, 175 aa, Brassica napus
MGDSDKDSGGGQNGQSPLSPREQDRFLPIANVSRIMKKALPANAKISKDAKETMQECVSEFISFVTGEASDKCQKEKRKTINGDDLLWAMTTLGFEDYVEPLKVYLQRFREIEGERAGLGRPQTGGEGGEHQRDAGLGDGGGFYGGGGMQYHQHHQFLEQQDRVYGSTGGGGGDG

SEQ ID NO: 3211 - protein, 359 aa, Zea mays
MGSTAGDVAAVVDEEACMYAMQLASSSILPMTLKNAIELGLLEVLQKEAGGGKAALAPEEVVARMPAAPGDPAAAAAMVDRMLRLLASYDVVRCQMEDRDGRYERRYSAAPVCKWLTPNEDGVSMAALALMNQDKVLMESWYYLKDAVLDGGIPFNKAYGMTAFEYHGTDARFNRVFNEGMKNHSVIITKKLLDFYTGFEGVSTLVDVGGGVGATLHAITSRHPHISGVNFDLPHVISEAPPFPGVRHVGGDMFASVPAGDAILMKWILHDWSDAHCATLLKNCYDALPENGKVIVVECVLPVNTEATPKAQGVFHVDMIMLAHNPGGKERYEREFRELAKGAGFSGFKATYIYANAWA

SEQ ID NO: 3212 - protein, 192 aa, Xylella fastidiosa Ann-1
MNMLNVLRFPVLALALAFVSSGVLADVGSLLDLDYRPLAGKETVNLQRLYGGKVLLVVNTASKCGFTPQYEGLEALHQKLSPLGFAVLGFPSNDFKGQEPGDEQQIQEFCTLTYGVKFPMFQKVHVKGDEVTPLYQRLTQTTGVAPGWNFHKYLIARDGHVVAQFDSRTRPDDPILLEAIKRELAKSVQVVH

SEQ ID NO: 3213 - protein, 165 aa, Ralstonia solanacearum
MSDIYAFEADSLAGQRVPLSQYRGKVLLIVNTASQCGFTPQYAGLEAVYKRLNEKGLEVLGFPCNQFGKQEPGGAEEIGAFCEKNYGVSFPMFGKIEVNGSNAHPLYKWLTSEKPGVLGTEAIKWNFTKFLLRRDGTVYKRYAPLTKPEEMLGDIETLLAEPDPL

SEQ ID NO: 3214 - protein, 281 aa, Oryza sativa (japonica cultivar-group)
MYTGIQTRRIPVHVLPLPMSPPLELDYIGLSPPPPPPSSSSAAAARADDVDLKGTELRLGLPGSESPDRRPAAIAAAAATATTLELLPAKGAKRVFPDEAALTPPTAAAGKGKAAREGEEVGAEEEDKKVAAPPQPAAKAQVVGWPPIRSYRKNTMATNQIKSNKEDVDAKQGQGFLYVKVSMDGAPYLRKVDLKTYKNYKDMSLGLEKMFIGFSTGKEGAENQKDGEYVLTYEDKDGDWMLVGDVPWEMFTDSCRRLRIMKGSDAIGLAPRAGEKSKNRN

SEQ ID NO: 3215 - protein, 165 aa, Triticum aestivum
  unsure (1)..(165): unsure at all Xaa locations
VMASSATSVAPFQGLKSTAXLPVSRRSNXASLGSVSNGGRIRCMQVWPIEGIKKFEXTLSYLPPLXAREALLKQVDYLIRSKWVPCLXFTKVXGFIFREHXRISLGTTNGRYWAMWESCPMFGATDPNKRWIKQGEGGSRKGVTPGAVLSGNPSGSNQCGQGGVA

SEQ ID NO: 3216 - protein, 209 aa, Zea mays
  unsure (1)..(209): unsure at all Xaa locations
MSYYGDRRAESSIVEAFTLSPLPYPVILVLLMVTLLLGASWFFTYDDFIEEASQQLSWALLGVPIALVLLIRWISSVDSFEGYLGFYPEGEPLEGPLRAGXAEGSSPWGVALLVLLLLVLASFHSTIHDMWGAVNGCAPAPGSCLSARLVCLCSVDRSIDEVLMSFFFSSFCPLRAALAWYVVLHARTYGSMIPCTYLLGGCCGAGYRV

SEQ ID NO: 3217 - protein, 405 aa, Pseudomonas syringae pv. syringae B728a
MSVEHAAVQRADFDQVMVPNYAPAGFIPVRGAGSRVWDQAGRELVDFSGGIAVNVLGHCHPALVGALTEQANNLWHVSNVFTNEPTLRLAKKLVDATFAERVFFCNSGAEANEAAFKLARRVAHDQYGPEKYEIIAALNSFHGRTLFTVSVGGQPKYSDGFGPKITGISHVPYNDLDALKAAVTDKTCAVVLEPIQGEGGVLPGQLEYLQGARKLCDEHNALLVFDEVQSGMGRSGHLFAYMHYGVTPDILSSAKSIGGGFPLAAMLTTEKLARHFAVGVHGTTYGGNPLACAVGEAVIDVINTPEVLAGVQRKHQQFKTRLQSIGQQYGVFSEVRGLGLLIGCVLSDAWKGKAKDIFNAAEAQDLMILQAGPDVIRFAPSLVIEDADIEEGLNRFERAIAQLTS

SEQ ID NO: 3218 - protein, 277 aa, Bacillus thuringiensis serovar konkukian str. 97-27
MSLTSLKDYTTLHNGVKMPWFGLGVFKVEDGSQVIDSVKAAIKNGYRSIDTAAIYQNEEGVGQAIRESGVSREELFITSKVWNSDQGYETTLQAFETTLEKLGLEYLDLYLVHWPVKGKYTESWKALEKLYKDGRVRAIGVSNFHIHHLQDVFEIAEIKPMVNQVEYHPRLAQEELHAFCKEHNIQLEAWSPLMQGQLLDNPTLQDIAKKYNKSTAQIILRWDLHNEVVTIPKSIKEHRIIENANIFDFELSSDDMKAIQALNEDHRVGPDPDNFNF

SEQ ID NO: 3219 - protein, 157 aa, Triticum aestivum
  unsure (1)..(157): unsure at all Xaa locations
CWGRSVGFEIGVRGRRXAGFAFFQAANTAVRXPLFVNTAFPLLHSPLTSASVIFRRTRAXEMFQHEELVGSSWIGAYSALCFSCGHVAYGQLDMLRYRLYSGXIPGILLHHLILLICFTLALYRNVTINYLILTLLCETTHENLCQVVGLTSMIKDV

SEQ ID NO: 3220 - protein, 537 aa, Zea mays
  unsure (1)..(537): unsure at all Xaa locations
MGNCCRSPAAVAREDVSSSHFPASNAKKKPHQARNGGGAGQKRLSVLGDEGCEVVGIDDKYVLDRELGRGEFGVTYLCMDRGTKELLACKSISKRKLRTAVDVEDVRREVAIMRHLPKSPSVVSLREACEDDGAVHLVMELCEGGELFDRIXVARGHYTERAAASVTRTILEVVQLCHRHGVIHRDLKPENFLFANKKENSPLKAIDFGLSIFFKPGEKFSEIVGSPYYMAPEVLKRNYGPEIDIWSAGVILYILLCGVPPFWAETEQGVAQAILRGNIDFKREPWPNVSDNAKDLVRHMLEPDPKLRLTAKQVLEHHWLQNAKKAPNVPLGDIVKSRLKQFSRMNRFKRRALRVIADHLSAEEVEDIKDMFKTMDTDNDGIVSYEELKTGIAKLGSHLAESEVQMLIEAVDTNGRGALDYGEFLAVSLHLQRMANDEHLRRAFLFFDKDGNGFIEPEELREALVDDGAADSMEEVVNDILQEVDTDKDGKISYEEFVAMMKTGTDWRKASRHYSRGRFNSLSMKLIKDGSVKLGVE

SEQ ID NO: 3221 - protein, 209 aa, Triticum aestivum
MEDEEHEVYGQEIPVDGEDVDMGAGGDDAAKLHELDEMKRRLKEMEEEAAALREMQAKVAKEMQGGDPNATTSEAKEEMDSRSVFVGNVDYACTPEEVQQHFNSCGTVNRVTILTDKFGQPKGFAYVEFVEAEAIQEAVKLSESELHGRQIKVAPKRTNVPGLKQPRGGRGFNPYGGHPYMRPYPPPFYNPYGGYGRAPRFRRPRRPLH

SEQ ID NO: 3222 - protein, 163 aa, Ralstonia eutropha JMP134
MRRPTLACCVLALSLRAIAAPLTDAELDARVHALSEQLRCLVCQNQTLADSNAELAVDLRRQIREQLRQGASDEAVKQYLVQRYGDFVLYKPPLKPLTWLLWFGPLLLLLVVLAALWRPRARRVAPAGPLDDAERRRLAELLDEPPPQRSPRSIDTLPPLSPP

SEQ ID NO: 3223 - protein, 496 aa, Streptomyces clavuligerus
MVTAAISGTDEIRARADEALTRCGVDLTAVKATPHGPHPLTGADLFGLRAHTPEDVDRAVEAAHTAFLTWRTTPAPVRGALVKRFGELLTEHKQDLADLVTIEAGKIRSEALGEVQEMIDICDFAVGLSRQLYGRTMPSERPGHRLMETWHPLGVVGVISAFNFPVAVWAWNAAVALVCGDTVVWKPSELTPLNRAACAALLDLAIADAGAPKGLNQVVVGAADVGERLVDSPRVPLVSATGSTRMGRAVGPRVAARFGRTILELGGNNAAVVTPSADLDLTVNAAVFAAAGTAGQRCTTLRRLIVHEDIADTVVERLTAAFERLPIGDPFQDTTLVGPLVNEAAFGRMREAVERATAEGGTLCAGGERQFPDAAPGAYYVRPALVRMPAQTAVVREETFAPILYVLTYRDLDEAIRLNNEVPQACRQGSRTDGAPADDPRCRARRRAGGANCPAVPGRSGTGAGAGGTADRVRTGGTSHRLVRHRRVPDPAVRTS

SEQ ID NO: 3224 - protein, 204 aa, Triticum aestivum
  unsure (1)..(204): unsure at all Xaa locations
MAPTVMASSATSVAPFQGLKSTAGLPVSRRSNGASLGSVSNGGRIRCMQVWPIEGIKKFETLSYXPPLSTEALLKQVXYLDSAPKWVPCLRVQQGGFIFPLSTTHPLGYYDGRYWXTMXETAYFRCTDPPSVQRSGGVKKEYLDPYSASSVRQLRKSMRQIALSHGLQESARLNTHHTGNIKCNAVAPTFCGGSFTSLPKLSRK

SEQ ID NO: 3225 - protein, 134 aa, Glycine max
AGTGEVVNCSEEQNGELFHSVLGGLGQFGIITRARIFLEPAPAMVKWIRVLYADFTAFIRDQEKLIFAEKAFDYVEGFVIINRTGLLNNWSSSFNPQDPVQASEFKSDGRTLFCLELAKYYNLEETLLVNQVRD

SEQ ID NO: 3226 - protein, 429 aa, Xylella fastidiosa Ann-1
MSDLDKVTLNAGETSLVLPVLKPTLGNGCVDIAKLTKETGLFTYDSGFTATASCKSAITYIDGEKGVLLYRGYPIEQLAEHSSFLEVAYLLMNGELPRKDEFAKFDDEITHHTMMHESLKNFLGGFHYDAHPMAMLAASVASLSAFYHDTLDLNDLEQRRLAAIRLIAKVPTLAAAAHRYSIGWPIRYPRNNLGYVERFLHMMFEVPSEPLQLNPVVTKALDLLFILHADHEQNASTSTVRLVGSTGANPYASVAAGITALWGPAHGGANEAVLKMLEEIGDAKNVDLVIAKAKTKDKNSPFRLMGFGHRVYKHFDPRAKIIREMAHTVLGELGVNDPLLEVALKLEEAALKDDYFVQRKLYPNVDFYSGIIYKAINIPLEMFTVMFAIARTAGWVSHWLEQQVDPEMKISRPRQIYTGHRERDYKDAR

SEQ ID NO: 3227 - protein, 305 aa, Mycobacterium avium subsp. paratuberculosis str. k10
MTALDGAERLDPALRAVATTRTDFSPAAIELTRAPFNERRRLAAAQTDTAGVRIVDDDANGVGVRIYRGGPEPAPAVIYCHAGGFALGNLDTDHRQCVELARRGRCTVVSVDYRLAPEHPYPAALQDAGTVLRWVHAEAAALGVDPARLAVAGSSAGAALAACLAHPDGSLPAVVFQLLHQPVLDDRATGSKARFRTSPAFDGEAAELMWRYYLGPTVGSAAAVPARRPELAGLPPALITCAEIDPFRDEAIDYARRLLDAGVCTELHVFARACHGFDSLLPDWPGSQRLFALQGEVLSAALHRD

SEQ ID NO: 3228 - protein, 281 aa, Glycine max
MPLILAKSDSIQIREVWNDNLEEEFALIREIVDNYPYIAMDTEFPGIVLRPVGNFKNSYDYHYQTLKDNVDMLKLIQLGLTFSDEHGNLPMCGGDDEESDTCCCIWQFNFREFNVNEDVFANDSIELLRQSGIDFKRNNENGIDAHRFGELLMSSGIVLNDNIHWVTFHSGYDFGYLLKLLTCQDLPDTQVGFFNLINMYFPTVYDIKHLMKFCNSLHGGLNKLAELLEVERVGISHQAGSDSLLTSCTFRKLKDNFFSGSLEKYAGVLYGLGVENGQGSH

SEQ ID NO: 3229 - protein, 482 aa, Pseudomonas syringae pv. tomato str. DC3000
MQLIWLRSDLRVHDNTALTAAMQRGPTLAVYLLSPTQWRNHDDADCKVDFWLRNLVELEKALGKLNVPLLIREADTWDQAPEVLATLCKQFKVEGLHLNEEYGINETRRDQAVQQSMQADGVHFTSHLDQLLFKPGSILTKTGNYFQVFTQFKKVCYTRLHQAMPRTVHTPEAQQPLSIKSDAIPDQVKGFSTPSKTLRDLWPAGEVEASRRIEAFAGEQISYYKDERDFPARPGTSQLSAYLAAGVISPRQCLHAALASNQGEFETGDVGTVTWINELLWREFYKHTLVGYPRVSRHRAFRPETEALKWRDAPEELLAWQEARTGLPIIDAAMRQLLETGWMHNRLRMVVAMFLTKNLLIDWREGERFFMRHLIDGDLAANNGGWQWSSSTGTDSAPYFRIFNPLSQSERFDPEGVFIKRWLPELADLNKKQIHDPASVGGLFGVADYPKPIVDLSKSRARALAAFKALPTRQPAAGADNG

SEQ ID NO: 3230 - protein, 70 aa, Triticum aestivum
  unsure (1)..(70): unsure at all Xaa locations
GHATCHFLAIDIFNGKKXEDIXPSSXHNCDXPHVDRQDYQLXIDITDDGYVSLLTESGNTKDDLKLPTDD

SEQ ID NO: 3231 - protein, 190 aa, Glycine max
LTLIILIFIILPLSIPNSLSEIRMASQSNTKSVHDFTVKDARGNDVNLADYKGKVLLLVNVASQCGLTNSNYTELNQLYEKYKGKGLEILAFPCNQFGAQEPGTNEEIVEFACTRFKAEFPIFDKVDVNGDNAAPLYKFLKSSKGGLFGDSIKWNFSKFLVDKDGNVVDRYAPTTSPLSIEKDIKKLLDA

SEQ ID NO: 3232 - protein, 117 aa, Glycine max
  unsure (1)..(117): unsure at all Xaa locations
MASSMIFSPADTTVNRAGAGMAGPFTGLKYMAGFPTXRKTNNDLTWIARHGGKRPCMHVWPTIGKKKFETLSYLPDLDDXPLAKEGQYPLKKGWDPLLGITLEHRFAYPEHKKAPGY

SEQ ID NO: 3233 - protein, 321 aa, Glycine max
  unsure (1)..(321): unsure at all Xaa locations
MSATNVPKVLLQLQPPSKSNPLCVPVIGLGTAAVHNDGDTVKAAVIEAIKLGYRHFDTAAQYGSEQALGEAIAEALRVGLIASRDELFITSKLWCCDNHPHLVLPALQNSLRSLKLDYLDLYLIHWPITAKPGMWEMPYSEESLVPFDLKSVWAAMEECHKLGLTKSIGVSNFSCKKLENLLSFATIPPSVNQVEMNIAWQQKNLRAYCKAKGIIVTAYSPLGAKGSKWDINQILDNELTKQIAQAHGKTAAQVXLEWLFEQGVTFIPKSYNKERLKENLEIFDWSLTKDDHEKINQVKQERMFKYGTAAFPLPDLFDGET

SEQ ID NO: 3234 - protein, 120 aa, Glycine max
MEPMDIVGKAKEDASLPKATMTKIIKEMLPPDVRVARDAQDLLIECCVEFINLVSSESNEVCNKEERRTIAPEHVLKALGVLGFGEYIEEVYAAYEQHKLETMVIMLMTNVHDIYYNLTA

SEQ ID NO: 3235 - protein, 82 aa, Brassica napus
  unsure (1)..(82): unsure at all Xaa locations
AIRLAQVPCARMPAYVCQRRGLAXAVNHLGSTKVDFWKEPTNSTNGKGEHFVLISHSGWGWLFYSGYKLFTGVKGVEEKPAQ

SEQ ID NO: 3236 - protein, 166 aa, Bordetella pertussis Tohama I
MNTMYDFSAPTITGAERALADFRGQVALVVNVASRCGFTPQYSGLEELYRSYRNEGFVVLGFPCNQFGRQEPGDEAAIAQFCETQYAISFPLFAKIDVNGAHAHPLYRWLKARKPGLLGTRAIKWNFTKFLVGRDGLPLRRYAPAHTPESLRHDIARACAAPGPTP

SEQ ID NO: 3237 - protein, 498 aa, Zea mays
MSTCAADLAPLLGPAAANATDYLCGQFADTASAVDATYLLFSAYLVFAMQLGFAMLCAGSVRAKNTMNIMLTNVLDAAAGALFYYLFGFAFAFGTPSNGFIGKQFFGLKHLPRTGFDYDFFLYQWAFAIAAAGITSGSIAERTQFVAYLIYSAFLTGFVYPVVSHWFWSADGWAGASRTSGPLLFGSGVIDFAGSGVVHMVGGIAGLWGALIEGPRIGRFDHAGRSVALKGHSASLVVLGTFLLWFGWYGFNPGSFTTILKSYGPAGTVHGQWSAVGRTAVTTTLAGSVAALTTLFGKRLQTGHWNVVDVCNGLLGGFAAITAGCSVVEPWAAVICGFVSAWVLIGANALAARFRFDDPLEAAQLHGGCGAWGVLFTGLFARRKYVEEIYGAGRPYGLFMGGGGKLLAAQIIQILVIAGWVSCTMGPLFYALKKLGLLRISADDEMSGMDLTRHGGFAYVYHDEDPGDKAGVGGFMLKSAQNRVEPAAAVAAATSSQV

SEQ ID NO: 3238 - protein, 473 aa, Arabidopsis thaliana
MSSSVPNSDRKIVTGPAGYILEDVPHFSDDFPDHPTYPNPLQDNAAYSVVKQYFVDEDDTVPQKIVVHPDSPRGTHFRRAGPRQRVYFESDDVLACIVTCGGLCPGLNTVIREIVCGLSYMYGVKRILGIDGGYRGFYARNTIHLDLKTVNDIHRSGGTILGTSRGGHNTTKIVDSIQDRGINQVYIIGGDGSQKGAAAIFEEIRKRKLKVAVAGIPKTIDNDIPIIDRSFGFDTAVEEAQRAINAAHVEATSFENGIGLVKLMGRYSGFIAMHATLASRDVDCCLIPESPFFLEGSGGLFEFIDKRLKESGHMVIVIAEGAGQDLLSESMKESTTLKDASGNKLLQDIGLWISQRIKDHFAKKMTLTLKYIDPTYMIRAVPSNASDNVCCTLLAQSAVHGVVAGYNGFTVGLVNGRHTYIPFNRITEKQNKVVITDRMWARLLSSTNQPSFMKQADKIHSNQLVGEPGTMKW

SEQ ID NO: 3239 - protein, 380 aa, Vibrio parahaemolyticus RIMD 2210633
MPQTVAKKAELGGAGLRGQSAGSTALCTVGKTGTGLTYRGYDITDLANNAQFEEVAHLLLRGHLPSQQELDAYKTHLLSLRGLPTELKQALELIPASAHPMDVMRTGCSVLGNLEQEMSFDEQLQATERMLALFPAIICYWYRFSHDGVRIDTEDQTEDCIGGYFLRLLTDKEPSVLHKQVMHCSLILYAEHEFNASTFAARVCASTLSDIHSCITAAIGTLRGPLHGGANEAAMEMIEDWQTPDEAEANIMQMLANKDKIMGFGHAIYRESDPRNALIKRWSEELSKHVGDTHLYAVSERVESVMKREKGLFCNADFFHASAYHFMDIPTKLFTPIFVMSRLTGWAAHVYEQRANNRIIRPSADYTGPDHQEWVPIENR

SEQ ID NO: 3240 - protein, 189 aa, Archaeoglobus fulgidus DSM 4304
MKLARGPRYKVPLRRRREGKTNYRKRLKLLLSRKPRLVVRITNRRVIAQIVEYAPEGDRVVVGVDSAMLREFGWKGDLNNTPAAYLTGILIAKKALQKGIGEAVLDIGLHTPTRGSRVFAVLRGAVEGGLEVPHSDEVLPDDSRIRGEHIAAYYEMNPERFGEYEKRGLKPSDLPAHVDEIKEKLMVIS

SEQ ID NO: 3241 - protein, 477 aa, Populus tremula x Populus tremuloides
MLSQKQAEEAIVPSYSETDLHEGKEEETEENHSLFSIKSALWHGGSVWDAWFSCASNQVAQVLLTLPYSFSQLGMLSGILFQIFYGIVGSWTAYLISVLYIEYRSRKEKENVNFKNHVIQWFEVLDGLLGPYWKAVGLAFNCTFLLFGSVIQLIACASNIYYINDHMDKRTWTYIFGACCATTVFIPSFHNYRIWSFLGLGMTTYTAWYMAIAALIHGQVGGVTHSAPTKLVLYFTGATNILYTFGGHAVTVEIMHAMWKPQKFKYIYLMATLYVFTLTIPSATAVYWAFGDLLLNHSNAFALLPRNGFRDAAVILMLIHQFITFGFACTPLYFVWEKVIGMHDTKSICLRALARLPVVIPIWFLAIIFPFFGPINSAVGALLVSFTVYIIPSLAHMLTYRKSSARQNAAEKPPFFLPSWTAMYVINTFVVVWVLVVGFGFGGWASVTNFVRQVDTFGLFAKCYQCKPAVAAPPRPH

SEQ ID NO: 3242 - protein, 817 aa, Zea mays
  unsure (1)..(817): unsure at all Xaa locations
MAQILLHGTLHATIFEAESLSNPHRATGGAPKFIRKLVEGIEDXTVGVGKGATKIYATVDLEKGPXVGGPRMISNEPVNPRWYESFHIYCAHMAADVIFTVKIDNSIGASLIGRAYLPVQDLLGGEEIDKWLEICDENREXVGDSKIHVKLQYFDVGKDXRNWARGVRSTKYPGVPYTFFSQRQGCKVTLYQDAHVPDNFVPRIQLADGKNYEPHRCWEDIFDAISKAQHLIYITGWSVYTEITLVRDTNRPKPGGDVTLGELLKRKASEGVRVLMLVWDDRTSVGLLKKDGLMATHDEETANYFHGTDVNCVLCPRNPDDSGSFVQDLQISTMFTHHQKIVVVDHEMPNQGSQQRRIVSFIGGIDLCDGRYDTQYHSLFRTLDTVHHDDFHQPNFEGGSIKKGGPREPWHDIHSRLEGPIAWDVLYNFEQRWRKQGGKDLLVRLRDLPDIIIPPSPVMFPEDRETWNVQLFRSIDGGAAFGFPETPEEAARAGLVSGKDQIIDRSIQDAYVNAIRRAKNFIYIENQYFLGSSYGWKPEGIKPEEIGALHLIPKELSLKIVSKIEAGERFTVYVVVPMWPEGVPESASVQAILDWQRRTMEMMYTDIAQALEANGIEANPKDYLTFFCLGNREVKQEGEYEPEEHPEPDTDYIRAQEARRFMIYVHTKMMIVDDEYIIIGSANINQRSMDGARDSEIAMGAYQXPYHLATRQPARGQIHGFRMSLWYEHLGMLEDVFQRPESVECVQKVNEVAEKYWDLYSSDDLEQDLPGXHSLSYPIGVTADGSVTELPGMENFPDTRARVLGNKSDYLPPILTT

SEQ ID NO: 3243 - protein, 106 aa, uncultured Rickettsia sp.
MLKEIGSSEYIPRYIAKAKDKNDPFRLMGFGHRVYKNYDPRAAVLKETCKEVLKELGQLDNNPLLQIAIELEAIALKDEYFIERKLYPNVDFYSGIIYKAMGIPSQ

SEQ ID NO: 3244 - protein, 425 aa, Bacillus anthracis str. Ames 0581
MKNERIEKLQESWELDTRWKGITRPYSAEDVIRLRGSIDIEHTLARRGAEKLWASLHTEDYINALGALTGNQAMQQVKAGLKAIYLSGWQVAADANLSGHMYPDQSLYPANSVPAVVKRINQTLQRADQIQHMEGSGDTDYFVPIVADAEAGFGGQLNVFELMKGMIEAGASGVHFEDQLSSEKKCGHLGGKVLLPTQTAVRNLISARLAADVMGVPTIIVARTDADAADLITSDIDPVDKAFITGERTPEGFYRTKAGLDQAIARGLAYAPYADLVWCETSEPNLEDAKRFADAIHKEHPGKLLAYNCSPSFNWKQKLDEKTIASFQKEIASYGYKFQFVTLAGFHSLNYGMFELARGYKERGMAAYSELQQAEFAAEKHGYSATRHQREVGTGYFDEVAQVITGGTSSTTALKGSTEEAQFTK

SEQ ID NO: 3245 - protein, 428 aa, Pichia anomala
PGDFNLSLLDKIYEVEGLRWAGNANELNAAYAADGYSRVKGLSAIITTFGVGELSALNGIAGSYAEHVGVLHIVGVPSISSQAKQLLLHHTLGNGDFTVFHRMSSNISQTTAFIKDINSAPAEIDRCIREAYVFQRPVYLALPANLVDDLVSSDLLSTPIDLSLKPNDPESENEVVSTVLELIKKADNPVILVDACASRHSALAETKDLMDLTQFPTFVTPMGKGAVDEQHPRFGGVYVGTLSKPDVKAQVENADLILSVGALLSDFNTGSFSYSYKTKNIVEFHSDHIKIRNATFPGVQFQSVLQNLNSKIAPVVKGYKPYPVPSLKLTTSPASPETPLTQEWLWTKLSSWLREGDVVITETGTSAFGIVQTRFPSNTTGISQVLWGSIGYSVGAALGAVAGAEEVDKEKRVILFVGDGSLQLTVQE

SEQ ID NO: 3246 - protein, 237 aa, Prochlorococcus marinus subsp. marinus str. CCMP1375
MTDLQTQMKIAVAQEAIGEIKDGMILGLGSGSTAALMIKSLGEKLKEGSLKEIIGVPTSFQGEVLASQLGIPLRAFSAVSKIDLAIDGADEVDPNFQLIKGGGACHVQEKLVASIADRFVVVVDSTKIVEKLNLEFKLPVEVLPAAWKLVQKELNDLGAKSDLRMAEKKAGPIVTDQGNLVLDVQFADGISDPQNLEKQINNFPGVLENGLFVNLTDEVLVGEIKNGVSSVNRLKKA

SEQ ID NO: 3247 - protein, 364 aa, Picea abies
MGSASENSEMNTKIVNEDEWLLGMELGNFSCLPMGMKAAIELDVLQIIANAGNGVQLSPRQIVAHIPTTNPDAAITLDRILRVLASHSVLSCSVTTDENGKAERLYGLTPLCKYLVKNQDGVSLAPLVLMNQDKVLMDSWYYLKDAVLEGSQPFTKAHGMNAFEYPAKDQRFNRVFNRGMSEHSTMLMNKILDTYQGFKEVQELVDVGGGVGSTLNLIVSRYPHISGINFDMPHVVTDAPHYPAVKHVGGDMFDSVPTGQAIFMKWILHDWSDDHCRKLLKNCHKALPEKGKVIVVDTILPVAAETSPYARQGFHIDLLMLAYNPGGKERTEQEFQDLAKEAGFAGGVKPVCCANGMWVMEFHK

SEQ ID NO: 3248 - protein, 139 aa, Brassica napus
  unsure (1)..(139): unsure at all Xaa locations
MEISERVKARLAVLTAHIAVSDPVGSSQVLPAGEIERWWGSSXVEAHGSLKGSLTIVDERTGKKYQVPVSEDGTVKSVDLKKITTGKDDKGLKLYEPGYLNTAPVRSSISYIDGDEGILRYRGYPIEELAESSTXIXVS

SEQ ID NO: 3249 - protein, 332 aa, Triticum aestivum
  unsure (1)..(332): unsure at all Xaa locations
AYLGDIIEQVCTKKQAGTGPEFPGYLLDADLESDALGWQYISGSLPDSRELDHIDNPQLEGYKFDPHGEYVRRWLPELARLPTEWIHHPWDAPASVLQAAGVELGSNYPLPIVELDTAQVRLQEALSEMWQLEAASRAAMDTGMEEGLGDSSEVPPIEFPQDLQMEVHWEPARVAPNVLTTAQRRQDQMVPTVTMTTSLNRVETEISXADLGNSVDSRAEVPFRMHFEPRTEREEMIRSTGNAAGTNGIHHHNNFQQPQRRMRNIFAPSVSEASSSWTGRDGGVVPVWSPPAASGHSETYGADEADVSSRSYLDRHPQSHRIMNWHQLSQSL

SEQ ID NO: 3250 - protein, 100 aa, Triticum aestivum
MDPSKQQQQHKPHAPAGGQQGDDVHKTTTAHGDVMTHSFGEGYSTRSDEEGFGGVYGQNDPVLNPGTEVHPNHPEYDKSQGSEVKEKEKARHLKDDKHAT

SEQ ID NO: 3251 - protein, 358 aa, Zea mays
MGSTAGDVAAVVDEEACMYAMQLASSSILPMTLKNAIELGLLEVLQKEAGGGKAALAPEEVVARMPAAPSDPAAAAAMVDRMLRLLASYDVVRCQMEDRDGRYERRYSAAPVCKWLTPNEDGVSMAALALMNQDKVLMESWYYLKDAVLDGGIPFNKAYGMTAFEYHGTDPRFNRVFNEGMKNHSVIITKKLLDFYTGFEGVSTLVDVGGGVGATLHAITSRHPHISGVNFDLPHVISEAPPFPGVRHVGGDMFASVPAGDAILMKWILHDWSDAHCATLLKNCYDALPENGKVIVVECVLPVNTEATPKAQGVFHVDMIMLAHNPGGKERYEREFRELAKGAGFSGFKATYIYANAW

SEQ ID NO: 3252 - protein, 357 aa, Tropheryma whipplei str. Twist
MVRMKALVYHGPGKRSLDTVDDPTIKLGTDVILEMETTTICGSDLHILKGDVAAVKPGTVLGHEGIGKIVEVGKDVKSHSVGDRVIVSPMSSCGVCRFCRANNNGHCLGDSEGPGGWRLGGLINGVQAQFARIPLADNSLHKLPSGLDPKVGILVSDVLPTGHEVGAQAGQVTLGSVVAVIGCGPVGLGAIVTSLLYSPSKVIAVDADSNRLELARKLGATDTVRVNRERPLDAIEDVKKLTEGGFGVDVAIEAVGVPVTFSMALGIAAPGGRVANIGVHGAPVDFPLQDLWDKNIAVTLGIVSTHTIPLLLAALSEGKIDASQFVTHEFDLSDLERAYDVFSAAAQHNVVKVAIRA

SEQ ID NO: 3253 - protein, 102 aa, Glycine max
  unsure (1)..(102): unsure at all Xaa locations
SNISSTVHLQPAVLYDAGCTNLKSMAVFPTRKTNNYITSIASNCGRVQCMQVWPPIVKKNFETLSYLPDLYDAQFAYEVXYLLMKVCIPFLEFVLEHIFLFP

SEQ ID NO: 3254 - protein, 337 aa, Neurospora crassa
MSSSSKFRSSHHYHSQSVSSILGRHDSTSPGAELQRRPTTTSSYTSSGSASRRVPRDNGTRSSDGTVSTMMSTTSSTGRESAATTAMTEGPAYSKKVVVVGDGGCGKTCLLISYSQGYFPEKYVPTVFENYITYPTHPPTGKTVELALWDTAGQEEYDRLRPLSYPETDLIFVCFAIDCPNSLENVMDKWYPEVLHFCPYTPLILVGLKSDLRNKKTCIDMLKTQGLTPVTTEQGLAVAKKMGAQYMECSSKEMKGVEEIFEQAILTVVANDRKTLEQEAANGMLGVGAGSGSGKGSGISFSSGDKAGSGIGPVKAAGVGGTIVPKTRKKKRKCGMM

SEQ ID NO: 3255 - protein, 495 aa, Staphylococcus aureus subsp. aureus MRSA252
MAVNVRDYIAENYGLFINGEFVKGSSDETIEVTNPATGETLSHITRAKDKDVDHAVKVAQEAFESWSLTSKSERAQMLRDIGDKLMAQKDKIAMIETLNNGKPIRETTAIDIPFAARHFHYFASVIETEEGTVNDIDKDTMSIVRHEPIGVVGAVVAWNFPMLLAAWKIAPAIAAGNTIVIQPSSSTPLSLLEVAKIFQEVLPNGVVNILTGKGSESGNAIFNHDGVDKLSFTGSTDVGYQVAEAAAKHLVPATLELGGKSANIILDDANLDLAVEGIQLGILFNQGEVCSAGSRLLVHEKIYDQLVPRLQEAFSNIKVGDPQDEATQMGSQTGKDQLDKIQSYIDAAKESDAQILAGGHRLTENGLDKGFFFEPTLIAVPDNHHKLAQEEIFGPVLTVIKVKDDQEAIDIANDSEYGLAGGVFSQNITRALNIAKAVRTGRIWINTYNQVPEGAPFGGYKKSGIGRETYKGALSNYQQVKNIYIDTSNALKGLY

SEQ ID NO: 3256 - protein, 264 aa, Candida albicans SC5314
MPASREDSVYLAKLAEQAERYEEMVENMKAVASSGQELSVEERNLLSVAYKNVIGARRASWRIVSSIEQKEEAKGNESQVALIRDYRAKIEAELSKICEDILSVLSDHLITSAQTGESKVFYYKMKGDYHRYLAEFAIAEKRKEAADLSLEAYKAASDVAVTELPPTHPIRLGLALNFSVFYYEILNSPDRACHLAKQAFDDAVADLETLSEDSYKDSTLIMQLLRDNLTLWTDLSEAPAATEEQQQSSQAPAAQPTEGKADQE

SEQ ID NO: 3257 - protein, 181 aa, Brassica napus
MAYSMLSSAAVVTSPAQATMVAPFTGLKSSSAFPVTRKANNDITSIVSNGGRVSCMQVWPPVGKKKFETLSYLPDLTEVELGKEVDYLLRNKWIPCVEFELEHGFVYREHGSTPGYYDGRYWTMWKLPLFGCTDSAQVLKEVQECKTEYPNAFIRIIGFDNNRQVQCISFIAYKPPSFTGA

SEQ ID NO: 3258 - protein, 447 aa, Leptospira interrogans serovar lai str. 56601
MKLSRSEFIKLGILTAAGISGLPGIKLSAQGTSSRKTVIVMGGGISGLYASYLLSKTGIKVQLIEATDRLGGRIRTVTDVSGNFLDLGAEWIQAEHRTAKSLIRELGLKTTDFEVQSDLFFGSYRKFGTWDISPKSQEILNKLVQMNSKINSTQQQELDRISFYNFLNYQGMSLEDLNILNFKYSLYYGDSLRSLSAQKVLSDLVNFPKYNTRVEGGMETLTRALVSSLENTEIIFSDPVVSVSQVEGKVIVTTVSGKKIEGNACISTLPANQLTTIQWDPELDKEKKLSALRIRYSRIYKTFLMLREAPWTRGSFSAYSDSVAGFIYDAGTKINSEDKILGMISTGDRYDVLASSTDAMKVEYIRLALESLGQGRELQVLRIQSSETSQSKFIPTGIATFPPGSYGSIISLLKPMDRIFFAGEHTAELNGTVEGALASAIRAVNQV

SEQ ID NO: 3259 - protein, 357 aa, Magnaporthe grisea
MAEFVRAQIFGTTFEITSRYSDLQPVGMGAFGLVCSARDQLTNQNVAIKKIMKPFSTPVLAKRTYRELKLLKHLKHENVISLSDIFISPLEDIYFVTELLGTDLHRLLTSRPLEKQFIQYFLYQIMRGLKYVHSAGVVHRDLKPSNILVNENCDLKICDFGLARIQDPQMTGYVSTRYYRAPEIMLTWQKYDVEVDIWSAGCIFAEMLEGKPLFPGKDHVNQFSIITELLGTPPDDVINTIASENTLRFVKSLPKRERQPLKNKFKNADPSAIDLLERMLVFDPKKRITATEALAHEYLTPYHDPTDEPIAEEKFDWSFNDADLPVDTWKIMMYSEILDYHNAEAGMQQMDDQFTGQ

SEQ ID NO: 3260 - protein, 502 aa, Pseudomonas sp. Y2
MTRSLTMNSSLSAIDGLRLPHQMLIGGQWVSAQSGKTLNVYNPATGDILTEVPDGDVEDVNAAVESAAGTLRSDTWRRMPPSARERILLRLADLLEVHGDELARLETLNNGKLLIYSKLMEVGASAQWLRYMAGWATKLTGSTLDLSLPLPPEVRSRASTQRVPVGVVAAIIPWNFPLLMAVWKIAPALACGNTVVLKPAEETPLTALRLAELAMEAGLPAGALNVVTGRGETAGDALVRHPKVAKVAFTGSTEVGRIIGSACGRSLKAVSLELGGKSPVIVLADCDPQEAAEGAAAAIFFNHGQVCTAGSRLYVHESIYEDVIQRLAVIGESIVVGSGLEQGVHMGPMVSKKHHENVLRHIRNGIEDGADLICGGTEAPCAQGFFVKPTIFANREKKDIRLLSQEVFGPVLVATPFSDIAEVVNEANRSVYGLGASIWTNDLSAALRINDELEAGTVWVNTHNMVDPNLPFGGFKDSGVGREHGAAAIEHYTTTRSLVIAY

SEQ ID NO: 3261 - protein, 121 aa, Bacillus halodurans C-125
MSKDQIIEAIKEMTVLELNDLVKAIEEEFGVTAAAPVAVAGGAAAEGGAAEKTEFDVVLESAGGSKINVIKVVREITGLGLKEAKALVDGAPAPIKEGVAKEEAEEMKAKLEEAGASVELK

SEQ ID NO: 3262 - protein, 102 aa, uncultured Rickettsia sp.
MLKEIGSSENIPKYIAKAKDKNDPFRLIGFGHRVYKNYDPRAAVLKETCKEVLKELGQLENNPLLQIAIELEAIALKDEYFIERKLYPNVDFYSGIIYKAMG

SEQ ID NO: 3263 - protein, 286 aa, Mycobacterium avium subsp. paratuberculosis str. k10
MTVIDEIYSSSSAIPTVALNDEAKKPVLGLGVAKLSDEETESSVLAALEAGCRLIDTAASYGNEAAVGRAIAASGIPREELFVTTKLGTSRQGFHSAQESCKESLDRLGLDYLDLYLIHWPAPTLGKYVESFEGMIEARERGHVRSIGVSNFTEDLLATVIEETNEVPAVNQVELHPRLNQAELRQVHAQHDVTTQSYSPLGVGRLIEEPTVTTIAAEYGRTPAQVLVRWNLQLDNVVVSRSSKPERVAENLDVFDFTLEPEHMEAIEGLHDGTRVLHDPMTFMGT

SEQ ID NO: 3264 - protein, 456 aa, Leuconostoc mesenteroides subsp. mesenteroides ATCC 8293
MTDSDNQQKWPALPATLSNIAVTKNSGKYESVSSNYFKVGHPRLVFMAENDEQVSHVVEYAGNVQRFVGHQIPFSVRSGGHGITNYSVNDGGIIIDLSQMNQVNILDEAKGLVKVQAGAVWGDVADKISKADLVLSSGDFGDTGVGGLATSGGLGLLVRKQGLTTDQILGATIITADGKKRNVNKEENSDLFWAIRGGGSQVGIVTEFIFQADKVEPAKSGQRVPIGLQKLSYNVFDLSHFLFAWHSWITTATEDMSSLLMLTKNDSNSSIISVQATNIWCGEKTDLCEKYFTDALNIAKVEKQDESNLSYHTLVQAPHLPHEGANNVYVKNVLLTKIDDHLLNALHTMLKSSAVMGIEVRAIDGPINQLSPDFDAWSFREATLFVAMWGDITQSGLLNQLFKPLQEHGCGVYGAYSSDTSKSETTKAWSRDTRERLQKVVKKYDSKHIINQSRYA

SEQ ID NO: 3265 - protein, 421 aa, Streptomyces coelicolor A3(2)
MRDHEPDHPADSERRLTTREAAELLGVKPETVYAYVSRGQLGSRRAPGSRGSTFDADEVRALARRNRRDGGINPAPAAGQELTVRTRLTLIENDRFSYRGVDAVELAARHTYEEVAEWLWTGELRPGAAFSAPESSVAVARRAVDALPEHAGPADRLRVAAIAAAVTDPLRFDLSEEAVLGTARVLIPTLVAALPPVLRDGHDRDPIARRLWTRLSGQEPDEPTLQALDTALGLLVDHDLAASTLAVRVAASARAHAYAAVSAGLGVIEGPLHGAAGGLAHRMLLEVLELGSAAPVVAEELRAGRRIPGLGHRLYPGEDPRARALFALLEDVPRAAPAIAAARDVQATAARHTPLHANVDLALAVLTVSSGMASTAAETIFAVARTAGWIAHALEEYGERPLRMRPSGLYSGPRPPRPLPE

SEQ ID NO: 3266 - protein, 451 aa, Bacillus halodurans C-125
MTSNDLLAKSKKHLWLPFTQMSDYEKDPLIIESGNGVYLKDIEGNTYLDGYSSLWLNVHGHRKKEIDEAIEKQLQLIAHSTLLGAANIPSIQLAEKLVELAPEAITRVFYSDSGAEAVEIAVKMAYQYWQNRGYENKKSFVTLSNGYHGDTVGTMSVGSIELYHKVYTSLLFDAIVIPFPASKEEQTESDLCRESLKQLRELFEAKHEEIAGITVEALIQGAGGMNLMPKGYLKGVEQLCKEFHILLIVDEVATGFGRTGKMFAVEHENVQPDIMTVAKGITGGYLPIAATLTQEHIYEAFYGEYTDLKTFFHGHSYTGNQLGCAAALANLEIFEKENIIQQVEEKALFLEEQLKHVAELEFVGAVRQLGLMCGIQLVQHKRTSEPFPWEQRVAYRSTLKMRALGMLTRPLGDVIVLMPPLAATNDQLKQMVDIMKEGIMEAATECLEQQV

SEQ ID NO: 3267 - protein, 423 aa, Brucella melitensis 16M
MRKEMLLPNLSISYSDPIKFVRGDGVWLIDNRGRAYLDCFNNVCHLGHAHPEVVEAIARQAAILNTNTRYLHDTIVSYAERLTATLPEGLTVASFACSGSEANSLALRMARTHSGQRDALVLDWAYHGTTQELIDLSPYKYKRKGGKGRPDHVFEATIPDSYRAPESWPLAEHGRRFAESIAEQIEKMKAQGRAPAFFIAESIPSVAGQVFLPEGYLREVYAMVRAAGGVCIADEVQVGFGRVGSHWWAFEMQGVVPDIVTMGKPIGNGHPMSAVVTTREVADSFNNGMEYFNTFGGNPVSCAAGLAVLDVIEHNDLRRNALEIGNYLIAGFRSMQDRFDIIGDVRGQGLFLGIELVMDRKTKEPATAIARKINDGARERGILMGTEGPFDNVLKMRPPMIFTRANADHLLSVLEDSFAAALK

SEQ ID NO: 3268 - protein, 520 aa, Glycine max
MPSFMAFLSHPYFFAALSASLTLLVVQLLFRKLNKRHSRKKYHPVAGTIFNQMLNFNRLHHYMTDLAAKHRTYRLLNPFRYEVYTTEPTNVEYILKTNFENYGKGLYNYHNLKDLLGDGIFTVDGEKWREQRKISSHEFSTKMLRDFSISIFRKNVVKLVNIVSEAATSNSTLEIQDLLMKSTLDSIFQVAFGTELDSMCGSSQEGKIFADAFDTSSALTLYRYVDVFWKIKKFLNIGSEAKLRKTTEILNEFVFKLINTRILQMQISKGDSGSKRGDILSRFLQVKEYDPTYLRDIILNFVIAGKDTTAATLSWFMYMLCKYPEVQEKAAEEVKEATNTKRISSYNEFVYSVTDEALERMNYLHAAITETLRLYPAVPVDAKICFSDDTLPDGYSVNKGDMVSYQPYAMGRMKFIWGDDAEDFRPERWLDENGIFKPESPFKFTAFQVNNNMKCTTCTGPRVCLRVRFAYRQMKIFAAVLLGCFRFKLKDEKKNVTYKTMINLHIDEGLEIKAFNRYRD

SEQ ID NO: 3269 - protein, 441 aa, Arabidopsis thaliana
MNRRQQVKRRVGKYEVGRTIGEGTFAKVKFARNSETGEPVALKILDKEKVLKHKMAEQIRREIATMKLIKHPNVVQLYEVMASKTKIFIILEYVTGGELFDKIVNDGRMKEDEARRYFQQLIHAVDYCHSRGVYHRDLKPENLLLDSYGNLKISDFGLSALSQQVRDDGLLHTSCGTPNYVAPEVLNDRGYDGATADMWSCGVVLYVLLAGYLPFDDSNLMNLYKKISSGEFNCPPWLSLGAMKLITRILDPNPMTRVTPQEVFEDEWFKKDYKPPVFEERDDSNMDDIDAVFKDSEEHLVTEKREEQPAAINAFEIISMSRGLNLENLFDPEQEFKRETRITLRGGANEIIEKIEEAAKPLGFDVQKKNYKMRLENVKAGRKGNLNVATEIFQVAPSLHMVQVSKSKGDTLEFHKFYKKLSNSLEQVVWTNNEVKKETAK

SEQ ID NO: 3270 - protein, 390 aa, Streptomyces coelicolor A3(2)
MSVNRTAAAATPVEVPRGLAGVVVADTEVGDVRGLEGFYHYRQYSAVELARSRGFEDVWHLLVHGELPDARTGAAFAAETAALRRLPDAVRAALPAIAEAGAGSGPLAGMRTGLSLLGAALGFRPVYDLSVDQRRQDTLVAAAAVPTLLTALHRLGRGLEPVEPREDLSYAANYLYMLTGQEPDEACTRAIEQYLISTIDHGFNASTFTARVIASTGADVAACLAGAVSALSGPLHGGAPSRALDTLDAIGTPDRIDAWIRERVLAGDRIMGFGHAVYRTEDPRSRMLREVAQSFGGPRVEFAVEVERQVEAILAELKPGRELHTNVEFYAGVVMELCGLPREMFTPTFAAARVVGWSANILEQASDSKIIRPAARYVGPGAPVGVPAVA

SEQ ID NO: 3271 - protein, 320 aa, Zea mays
  unsure (1)..(320): unsure at all Xaa locations
MVLKFSGSSKQCKGTAGTQSSRLHRRHRLHAREQGSRRGLLPKDRIGGXAGAAGGARTASSDTLDMGRSNRKSPGSSGWIPGTDEAAAGGDDVLALEDAAAPREWTAQVEPGVQITFGTIPTGGNDLKRIRFSREMFNKWEAQRWWGENYDRIVELYNVVMFSGRQQGCSTPVSSVDAGSSSAPYAAAHSTRAAAAYFPSAAVPDPSDHVWAHHFNMLNSAAAAAGTSAAMGGGAPSSYDPSRATTSSRDEASVSLSNVSDLEATEWIEEDEPGVCLTIRELGDGTRELRRIRFSREIFGEDRAKVWWEQNRERIQAEYL

SEQ ID NO: 3272 - protein, 485 aa, Burkholderia fungorum LB400
MSESATVFKNLIAGEWTESVSGKTFANINPADTRDVVGQFQASVVADAQAAIQAASSAFAQWRRTPVTARARIVNKAADWLESHADTFAQELTREEGKPLAQSRDEILRSAQVLRFYAVEAQSFTGETFPSDDPEQHVYTQREPLGVVTVITPWNFPISIPARKIAPALMAGNTVIFKPSSDAPLIGYRLAEAFAQAGIPAGVLNFITGRASDIGAAITESPVVRAISFTGSTAAGEHIHRSVPITTRTQMELGGKNPLIVMDDADLDRAVDLAVKGGLSLSGQACTGTSRILVMESVRETFTAKLVERVKSLKIGSGVTPGMDLGPLANRKQLESVLGYVASGKEQSTHLIGGEQLTGEGFEHGYYVTPAVFSDVPESARIYREEIFGPVLAITSVTGYDDAIAKANDTEYGLSAAIATSNPRYMHRFADEIEAGTVKINRTTTGNVINAPFGGLKRSSTSTFRESGRAGLEFYTQIKTVYRGL

SEQ ID NO: 3273 - protein, 123 aa, Bacillus subtilis subsp. subtilis str. 168
MALNIEEIIASVKEATVLELNDLVKAIEEEFGVTAAAPVAVAGGAAAGGAAEEQSEFDLILAGAGSQKIKVIKVVREITGLGLKEAKELVDNTPKPLKEGIAKEEAEELKAKLEEVGASVEVK

SEQ ID NO: 3274 - protein, 225 aa, Listeria monocytogenes EGD-e
MNEINHTSERVNTEKRTEKQIIMQKILNWFVFSLLLASIGAAIGSKLSPELYLPLVVLEVALLITAMVVRRSKTINKVVGYPVVLAFAFVTGLTLGPTLTYYFGAGQGAAVLMAFVTATVTFTTLAFIGAKMKKDLSFLSSALFAAIIILVIFSFVGVFLPLGSMLSTIISAGGTIIFSLYILYDFNQIMKRDVELADVPMLALNLYLDFLNLFMFLLRLFTGRD

SEQ ID NO: 3275 - protein, 433 aa, Triticum aestivum
MDHGSSPTKICKSVVDEDIISNLPEALRDKILCCLPIKEAVGTCLLSRTWRYTWASMTELMFRTADFASGNDSADDDRRFLKFTDMFLFLHNGPILKFCLNTIANEMVSTGGHLYRWMLMLSRNKIKEIQLQTSIRDSYKVPSSFFSCDELEYVYLRACVFTSLHLPPPSKGFKQLHTLRLEYVTVEGNSLGDLVASCPNLEKLNIRGLYSKSNINIRSTKLKVLKIEGWFTHLNLHAPYLTSVWIGLELNSDTDGASTTRCNFNLSPFIASLSDVETIRFHGHILECVEREFLILKQPKLFNRLTEISLEINLGDLKEANFALCLFQHAPNLRFFKLKLISRNSMVPRVHFWESIDRDVCLFQNVELVGLFDFTGSFAELGFLKFLLEGAPVLRKLGIIDKGLDRNVLKNLLKLRRASKDAEILILEACFPH

SEQ ID NO: 3276 - protein, 326 aa, Glycine max
MDQALVDDIINRLLEVRGRPGKQVQLSESEIRQLCAASREIFLQQPNLLELEAPIKICGDVHGQYSDLLRLFEYGGLPPEANYLFLGDYVDRGKQSLETICLLLAYKIKYPENFFLLRGNHECASINRIYGFYDECKRRFNVRLWKTFTECFNCLPVAALIDEKILCMHGGLSPDLLNLDQIRNLQRPTDVPDTGLLCDLLWSDPSKEVQGWGMNDRGVSYTFGADKVSEFLQKHDLDLICRAHQVVEDGYEFFANRQLVTIFSAPNYCGEFDNAGAMMSVDETLMCSFQILKPADKKVKLNFGSTTTTKPGNSPAGVKSFLGTKV

SEQ ID NO: 3277 - protein, 358 aa, Zea mays
MGSTAGDVAAVVDEEACMYAMQLASSSILPMTLKNAIELGLLEVLQKEAGGGKAALAPEEVVARMPAAPGDPAAAAAMVDRMLRLLASYDVVRCQMEDRDGRYERRYSAAPVCKWLTPNEDGVSMAALALMNQDKVLMESWYYLKDAVLDGGIPFNKAYGMTAFEYHGTDPRFNRVFNEGMKDHSVIITKKLLDFYTGFEGVSTLVDVGGGVGATLHAITSRHPHISGVNFDLPHVISEAPPFPGVRHVGGDMFASVPAGDAILMKWILHDWSDAHCATLLKNCYDALPENGKAIVVECVLPVNTEATPKAQGVFHVDMIMLAHNPGGKERYEREFRELAKGAGFSGFKATYIYANAW

SEQ ID NO: 3278 - protein, 501 aa, Glycine max
  unsure (1)..(501): unsure at all Xaa locations
MDQFLWRVLPLLTILVSFGVFFYLQDSYTAQLFPLIKLPRDKCSLLPHRHFWISSKRIVTPQGIISGSVEINDGKIISVVEGHAIQGKPKQEEVIDYGDAVIMPGLIDVHVHLNEPGRTEWEGFDTGTRAAAAGGVTTVVDMPLNCYPTTVSKEKLKLKLDAAEDKIYVDVGMTNNLCLSIQLTELLRYFLXSYTGFWGGLIPENALNTSILDGLLSAGVLGVKSFMCPSGIDDFPMATIDHIKAGLSVLAKYRRPIVVHAEIQQDFENHLELNEDNLDPRAYLTYLNTRPPSWEEAAIKQLVSVTKDTRKGGPLEGAHVHIVHLSDSSASLDLIKEAKSHGDSISVETCPHYLAFTSEEIPNGDTRFKCSPPIRDAYNKDKLWEAVLEGHIDLLSTDHSPTVPELKLMEEGDFLKAWGGISSLQFNLPVTWSYGKKYGLTLEQLSLLWSKKPATLAGLESKGTIAVGNHADIVVWQPELEFDLDDDYPVFIKHSVCLPCY

SEQ ID NO: 3279 - protein, 1023 aa, Neurospora crassa
MTRRDAEVKDRCDTGRESPSTDGTGKSIFHVKPPALAALRFLHLLHLALTCFASAATVTTPSLYRPIRGYRFQHLLSISHVPVQHFPEGIQSRIFVAATSGHTEQTQPGVFGCLQRLDHACLQGHAQPTRPDPTRTHHPDPPPTVHGSVKAPAVCNGIHSRRQNSEKTPLARGKDTDTHSDTLLHHGQAALETAIPRLPKPARQALPVSPWTVLMSGATAPRLQNVLSRPVLSSKRDAGRTSSHHLLKSLLLASRFAASTLVATTSSAGASRSTGTSSPDPGPTINKSQTNRNPSTYTSPPNSLSRTFSASNLLAWYRTLPSPYFNLSGHLDDLSSLIRPFLAFLDPSSLSSPYSMASTSYAFSTSSGSDFSTPRSSSPHSSASVASARSSHSSTFSAGKRLSMSSVRRTSASNPMSSVDLSTIEEALKMANLDTLKGYCQKTYGEVHQETTTEYISQEEARGYQVLNQPHWNKVADFRISPKGTSFTPEERVAKNLTGLIPHVMEDSEKQVERALKMIRTRQTDIDRYLYLSTIKSQNVDLFYRLLMDHAKEMMPLVYTPTIGDVCLQYSTLYTRPEALYISIKQRKSIRTILRNWPYPQPEICVVTDGSRILGLGDLGVNGVGIPIGKLALYTAAAGIHPDKTLPIVLDCGTANETNLKDPLYLGLRQKRIPVAEQQEFMDEFMEAAAEVFPDMVVQFEDFESEKAFNYLDRYRDQYKCFNDDIQGTGAVVLAGYIGAVNLSNVPIEEQRLVFMGAGSAGVGVAKQLVEYYTKRGLSEQQAKDKFWLVDTKGLVTKDRGDKLAEHKKYFARTDNNGHQFRTLEEVIEYVKPSALVGLTATHGVFTESVVRALKASVDAGGLGRRPILFPLSNPLTKAECTFKEAIDWTDGTVLFASGSPFSSYTTNGVTYHPNQGNNVYVFPGIGLGAILAKATRVTDDMIYTSAAALANSLNADEVKQGLIYPRIDRVREASVIVAREVMKSARREGVSTLPEEQWLEWEEWGDVDLERYIKQHIYDPKF

SEQ ID NO: 3280 - protein, 90 aa, Glycine max
MASFARRAMSLAQIPSARAPASVCQRRGLAGAADHHGSTKVDFWKQPTNPGNWKEEHFVLISLSGWGMLFYGGYKLFTGGKGEKPVEAAQ

SEQ ID NO: 3281 - protein, 617 aa, Triticum aestivum
  unsure (1)..(617): unsure at all Xaa locations
MWRHAAARRSAQIRRLLSTSAPSAGAGSVLRGPSIVHKRGTDILHAPWYNKDTAFPLTERDRLSLRGFPPTQRVRLGLQGVLLMRFNKSEEHYQRLVTGSPLLVPKPQSPPLLVVSIATWEAPTWMHDSKEAWHSRIRSTTCLGCGGTMFTANSSTANNVRRSTPGTDVSVTYNXSDQWNTWLFRFSCSTWEYFSRLXLPGILALLLTHFVYVAAAGINPQIVVPIMLDVGTNHEELLEDKLYLGLRQPRLEGEEYLAVVDEFMEAVHARWPKAIVQFEDFQMKWAFETLQRYRSRFCMFNDDVQGTAGVALAGLLGAVRAQGRPLADFTKQKIVVVGAGSAGIGVLNMAKHAMLRMPGTHKIGELGEGHNQFWVLDKDGLITKSRKDLDPAVARFARGYGPEEVEDLHEGASLVEVVKKVKPHVLLGLSGVGGIFNEEVLKAMKESDSPCPAIFAMSNPTTKAECTPEDVFKHVGENAVFASGSPFSNVTLSNGRKGYANQANNMYLFPGIGLGALLSGARHISDGMLHAAAECLASYITDDAIRKGILFPSISSIRHITARVGAAVARAAVDEDLAEGCSDLDPRDLRSMSESDTVDYVARKMWYPVYSPLVNDK

SEQ ID NO: 3282 - protein, 315 aa, Zea mays
  unsure (1)..(315): unsure at all Xaa locations
APRGVEPRLFVARAAGPAQQAADAKACSALCSPAARAVPAMESFGVPPAPVAAPEKRKKPLDLKDPVPAAAAAAANGGGATKASPAAKWAEKKKLVGGDAGYVLEDVPHLTDYLPQLPTYPNPLQDNPAYSVVKQYFVNPDDTVTQKIVVHKTSARGTHFRRAGPRQRVYFQPDEVNAAIVTCGGLCPGLNTVIRELVCGLYDMYGVTSVVGIEGGYKXGFYFKNTVALTPRSVNGIHKRGGTVLGTSRGGHDTAKIVDCLQDRGINQVYIIGGDGTQKGASVIYEEVRRRGLKCAVVGVPKTIDNDIAVSSAPP

SEQ ID NO: 3283 - protein, 358 aa, Zea mays
MGSTAGDVAAVVDEEACMYAMQLASSSILPMTLKNAIELGLLEVLQKEAGGGKAALAPEEVVARMPAAPGDPAAAAAMVDRMLRLLASYDVVRCQMEDRDGRYERRYSAAPVCKWLTPNEDGVSMAALALMNQDKVLMESWYYLKDAVLDGGIPFNKAYGMTAFEYHGTDSRFNRVFNEGMKNHSVIITKKLLDFYTGFEGVSTLVDVGGGVGATLHAITSRHPHISGVNFDLPHVISEAPPFPGVRHVGGDMFASVPAGDAILMKWILHDWSDAHCATLLKNCYDALPENGKVIVVECVLPVNTEATPKAQGVFHVDMIMLAHNPGGKERYEREFRELAKGAGFSGFKATYIYANAW

SEQ ID NO: 3284 - protein, 353 aa, Zea mays
MGDAAAAAASTSAPTTPTSILICLEDGSDLLADADDGAGTDLVVAHDERLLVVDQDEEYVALLLSKESASGGCGPVEEMEDWMKAARSGCVRWIIKTTAMFRFGGKTAYVAVNYLDRFLAQRRVNREHAWGLQLLMVACMSLATKLEEHHAPRLSELPLDACEFAFDRASVLRMELLVLGTLEWRMVAVTPFPYISCFAARFRQDERRAVLVRAVECVFAAIRAMSSVEYQPSTIAVASILVARGRETPAGNLDALKAILGSSFPQLDTGHVYSCYSAMIREDDKSPTQSTSTSTSTGVASSGVSVAAHAGGSGSPSPGASVSVGANNAAGTAPPATTDKRNKRRRLRSPQRQ

SEQ ID NO: 3285 - protein, 154 aa, Castanea sativa
MALSLFGGRRSNVFDPFSLDIWDPFEGFSAVANVPPSARETTAFATARIDWKETPEAHIFKADLPGLKKEEVKVEVEDGNVLQISGERSKEHEEKNDKWHRVERSCGKFLRRFRLPENAKVEQVKANMENGVLTVIVPKEEQKKTEVKSIEISG

SEQ ID NO: 3286 - protein, 154 aa, Glycine max
KDAREGDDNLSTVHHELHFTVQECIDALGEVIYHIETYDVTTIRASTPMFLMSRKIKSLGVKMVISGEGSDEIFGGYLYFHKAPNKKEFHEETCRKIKALHLYDCLRANKATSAWGVEARVPFLDKSFISVAMDIDPQWKMIKRDSVQIEKWVT

SEQ ID NO: 3287 - protein, 493 aa, Mentha x piperita
MAALLVFFSVSLILLAVLFHKRKSSLSSRKRPPPSPLRLPVIGHFHLIGALSHRSFTSLSKRYGEVMLLHFGSAPVLVASSAAAAREIMKNQDVIFASRPRLSIFDRLMYSGKGVAFAPYGEHWRNARSMCMLQLLSAKRVQSFGGIREEETSAMIEKIRRSKPTTVVNLSEMFMALTNGVIHRAVLGRKGDGGDDFNRILIKVIKLLGSFNVGDYVPWLSWINRINGVDAEVEKVGTKLDGSMEGILRKYRRKKVGDDETNFVDTLLQFQRESKDTDPVEDDVIKALIFDMVSAGTDTTFAALEWTMAELIKNPRTLKTLQNEVREVSRNKGGITEDDVDKMPYLKAVSKEILRLHPPFAILLPRELTQDANMLGYDIPRGTVVLVNNWAISRDPSLWENPEEFRPERFLETSIDYKGLHFEMLPFGSGRRGCPGSTFAMALYELALSKLVNEFDFRLGNGDRAEDLDMTEAPGFVVHKKSPLLVLATPRQS

SEQ ID NO: 3288 - protein, 280 aa, Listeria monocytogenes str. 4b H7858
MTLSFSDTYRLNNGIEMPRHGFGVYKLTDEARMRTALETAVDVGYRLFDTASFYHNEKELGDFFASSGLKRDEFFVTTKMWNTEQGYDETLRAFEKSQKKLQLDKIDLYLVHWPKQDTFFDTWRAVEKLYDEGLVRAIGVSNFEAHHLDRLRTSANVLPVVDQLETHPHFPNHLLHRYLEELHIVHQAWSPLGRGGVLQEQILIDLAEKHGKSPAQIVLRWHLQNNISIIPKSETPSRIRENAAIYDFELSEADMRQVERLNTGERVSHAPDVMYVRSEI

SEQ ID NO: 3289 - protein, 218 aa, Bartonella doshiae
IASIRLISKVPTLAAMAYKYSIGQAFVYPNNNLSYAANFLRMCFAVPCEEYQVNPVLTRAMDRIFILHADHDQNASTSTVRLAGSSGANPFACIAAGVACLWGPAHGGANEACLKMLQEIGSVKKIPEFIARAKDKNDPFRLMGFGHRVYKNYDPRAKIMQKTCHEVLKELNRQDDPLLDIAIELEHIALNDEYFIEKKLYPNVDFYSGITLKALGFP

SEQ ID NO: 3290 - protein, 154 aa, Glycine max
VGRSLFGGLSNSSPGLFTSSHEMTCKNMFSQQQRTFIQMRTVLKVVDNSGAKKVMCIQALKGKKGARLGDTIIASVKEAHPNGKVKKGKVVYGVVVRAAMQKGRCDGSEVKFDDNAVVLVDKQGQPIGTRVFGPVPHELRQKKHVKILTLAGHN

SEQ ID NO: 3291 - protein, 481 aa, Streptococcus mutans UA159
MPIINKTMLITYADSLGKNLKELNENIENYFGDAVGGVHLLPFFPSTGDRGFAPIDYHEVDSAFGDWDDVKCLGEKYYLMFDFMINHISRQSKYYKDYQEKHEASAYKDLFLNWDKFWPKNRPTQEDVDLIYKRKDRAPKQEIQFADGSVEHLWNTFGEEQIDLDVTKEVTMDFIRSTIENLAANGCDLIRLDAFAYAVKKLDTNDFFVEPEIWTLLDKVRDIAAVSGAEILPEIHEHYTIQFKIADHDYYVYDFALPMVTLYSLYSSKVDRLAKWLKMSPMKQFTTLDTHDGIGVVDVKDILTDEEITYTSNELYKVGANVNRKYSTAEYNNLDIYQINSTYYSALGDDDQKYFLARLIQAFAPGIPQVYYVGFLAGKNDLELLESTKEGRNINRHYYSSEEIAKEVKRPVVKALLNLFTYRNQSAAFDLDGRIEVETPNEATIVIERQNKDGSHIAKAEINLQDMTYRVTENDQTISFE

SEQ ID NO: 3292 - protein, 289 aa, Brassica napus
MSLFDTHNTWAFVFGLMGNVISFSVFLSPVPTFYRVWKKKTTEGFQSLPYVVALFSATLWLYYATQKKDVFLLVTINSFGCFIETIYISIFLAYAPKKARMLTVKLLLLMNFGGFCLILLLCQFLAKGTTRAKIIGGICVGFSVCVFAAPLSIIRTVIKTRSVEYMPFSLSLTLTISAVVWLLYGLALKDIYVAFPNVIGFALGALQMILYVVYKYCKTPPHLGEKEVEAAKLPEVTLDMLKLGTVSSPETITAVRQANKCTCGNDRRAEIEDGQNAKNGKQSSSATAT

SEQ ID NO: 3293 - protein, 428 aa, Mycobacterium tuberculosis H37Rv
MSVVGTPKSAEQIQQEWDTNPRWKDVTRTYSAEDVVALQGSVVEEHTLARRGAEVLWEQLHDLEWVNALGALTGNMAVQQVRAGLKAIYLSGWQVAGDANLSGHTYPDQSLYPANSVPQVVRRINNALQRADQIAKIEGDTSVENWLAPIVADGEAGFGGALNVYELQKALIAAGVAGSHWEDQLASEKKCGHLGGKVLIPTQQHIRTLTSARLAADVADVPTVVIARTDAEAATLITSDVDERDQPFITGERTREGFYRTKNGIEPCIARAKAYAPFADLIWMETGTPDLEAARQFSEAVKAEYPDQMLAYNCSPSFNWKKHLDDATIAKFQKELAAMGFKFQFITLAGFHALNYSMFDLAYGYAQNQMSAYVELQEREFAAEERGYTATKHQREVGAGYFDRIATTVDPNSSTTALTGSTEEGQFH

SEQ ID NO: 3294 - protein, 243 aa, Mesorhizobium loti MAFF303099
MDARQLKVEAARAALAHVSDGMRLGIGTGTTAEEFVRLLADKVATGMTVIGVPTSERTAALCRELGVPLSTLEETPELDLTVDGADEVDPELTLIKGGGGALLREKIVAAASQRMIVIADRSKMVETLGRFPLPIEVNQFGLRATEIAIAKTAADLGLSGPITLRMTGGQAFVTDGGHFILDASFGRIPDTRALSNALHAIPGVVEHGLFIGLASTAIIAGGDGIQTVHAARKPGSSTNHDVA

SEQ ID NO: 3295 - protein, 317 aa, Photorhabdus luminescens subsp. laumondii TTO1
MTDKLTSLRKLTTVVADTGDIAAMKLYQPQDATTNPSLILNAAQIPEYRKLIDEAIAWAREQSDSREQQIVDASDKLAVNIGLEILKLIPGRISTEVDARLSYDSERSVAKAKRLIKLYNEAGISNDRILIKLASTWQGIRAAEQLEKEGINCNLTLLFSFAQARACAEAGVYLISPFVGRILDWYKANSDQKEFAPHEDPGVISVTEIYQYYKQHGYDTVVMGASFRNSGEILELAGCDRLTIAPALLKELSEAQGEVERKLGYAGEIKARPEPLNEAQFYWEHHQDAMATEKLADGIRKFAIDQGKLEKMISDLL

SEQ ID NO: 3296 - protein, 372 aa, Oryza sativa (japonica cultivar-group)
MDDPMLNAVKEEESHGDGGGLEVVAGEDGAAAVAAGLAPGPMEGLHDAGPPPFLTKTYDMVDDAGTDAAVSWSATSNSFVVWDPHAFATVLLPRFFKHNNFSSFVRQLNTYGFRKVDPDRWEFANENFLRGQRHLFKNIKRRKPPSHTASNQQSFGPYLEVGHFGYDAEIDRLKRDKQLLMAEVVKLRQEQQNTKANLKAMEDRLQGTEQRQKQMIAFLARVMKNPEFLKQLMSQNEMRKELQDAISKKRRRRIDQGPEVDDVGTSSSIEQESPALFDPQESVEFLIDGIPSDLENSAMDAGGLVEPQDFDVGASQQQQIGPQGELNDNFWEELLNEGLVGEENDNPVVEDDMNVLSEKMGYLNSNGPTAGE

SEQ ID NO: 3297 - protein, 240 aa, Oryza sativa (japonica cultivar-group)
MGRGKIVIRRIDNSTSRQVTFSKRRNGIFKKAKELAILCDAEVGLMIFSSTGRLYEYSSTSMKSVIDRYGKSKDEQQAVANPNSELKFWQREAASLRQQLHNLQENHRQLMGEDLSGLNVKELQSLENQLEISLRSVRTKKDHVLIDEIHELNRKGSLVHQENMELYKKISLIRQENAELYKKIYETEGPSEVNRDSPTPYNFAVIEKTNVPVQLGLSTLPQHSDAEQSTAPKLGLQLNP

SEQ ID NO: 3298 - protein, 364 aa, Zea mays
MGSTAGDVAAVVDEEACMYAMQLASSSILPMTLKNAIELGLLEVLQKEAGGGKAALAPEEVVARMPAAPGDPAAAAAMVDRMLRLLASYDVVRCQMEDRDGRYERRYSAAPVCKWLTPNEDGVSMAALALMNQDKVLMESWYYLKDAVLDGGIPFNKAYGMTAFEYHGTDPRFNRVFDEGMKNHSVIIAKKLLDFYTGFEGVSTLVDVGGGVGATLHAITSRHPHISGVNFDLPHVISEAPPFPGVRHVGGDMFASVPAGDAILMKWILHDWSDAHCATLLKNCYDALPENGKVIVVECVLPVNTEATPKAQGVFHVDMIMLAHNPGGKERYEREFRELAKGAGFSGFKATYIYANAWAIEFIK

SEQ ID NO: 3299 - protein, 213 aa, Oceanobacillus iheyensis HTE831
MKFFIDTANIDDIRAANSLGILAGVTTNPSLVAKEGVSFHDRLREITKEVSGSVSAEVISEDAEGMIEEGKELAAIAPNITVKVPMTLEGLKAVKVFSELNIKTNVTLIFNANQALLAARAGATYVSPFLGRLDDIGQDGMTLISAIAEIFDRHSVSTEIIAASIRHPLHVTDAALNGAHIATIPYKVLEQLVKHPLTDQGIQKFLDDWNSQK

SEQ ID NO: 3300 - protein, 359 aa, Zea mays
MGSTAGDVAAVVDEEACMYAMQLASSSILPMTLKNAIELGLLEVLQKEAGGGKAALAPEEVVARMPAAPSDPAAAAAMVDRMLRLLASYDVVRCQMEDRDGRYERRYSAAPVCKWLTPNEDGVSMAALALMNQDKVLMESWYYLKDAVLDGGIPFNKAYGMTAFEYHGTDARFNRVFNEGMKNHSVIITKKLLDFYTGFEGVSTLVDVGGGVGATLHAITSRHPHISGVNFDLPHVISEAPPFPGVRHVGGDMFASVPAGDAILMKWILHDWSDAHCATLLKNCYDALPENGKVIVVECVLPVNTEATPKAQGVFHVDMIMLAHNPGGKERYEREFRELAKGAGFSGFKATYIYANAWG

SEQ ID NO: 3301 - protein, 359 aa, Zea mays
MGSTAGDVAAVVDEEACMYAMQLASSSILPMTLKNAIELGLLEVLQKEAGGGKAALAPEEVVARMPAAPSDPAAAAAMVDRMLRLLASYDVVRCQMEDRDGRYERRYSAAPVCKWLTPNEDGVSMAALALMNQDKVLMESWYYLKDAVLDGGIPFNKAYGMTAFEYHGTDARFNRVFNEGMKNHSVIITKKLLDFYTGFEGVSTLVDVGGGVGATLHAITSRHPHISGVNFDLPHVISEAPPFPGVRHVGGDMFASVPAGDAILMKWILHDWSDAHCATLLKNCYDALPENGKVIVVECVLPVNTEATPKAQGVFHVDMIMLAHNPGGKERYEREFRELAKGAGFSGFKATYIYANAWA

SEQ ID NO: 3302 - protein, 469 aa, Fragaria x ananassa
MAFFRTVTKLRSRLGQPPSLRDSVRCLQTQASSDLDLHSQLKELIPEQQERLKKLKKEHGKVQLGTITVDMVIGGMRGMTGLLWETSLLDPDEGIRFRGLSIPECQKVLPGATPGGEPLPEGLLWLLLTGKVPSRSKNMHYPVNNGVVPKFQIMCSRPLMLCLLEHIPMTQFTTGVMALQVQSEFQKAYDKGIPKSRYWEPTYEDSLSLIAQLPVVASYVYRRIYKGGRMIPVDDSLDYGGNFSHLLGFDDHKMQELMRLYVTIHSDHEGGNVSAHTGHLVASALSDPFLSFAAALNGLAGPLHGLANQEVLLWIKSVVDECGENITKDQLKDYVWKTLNSGKVVPGFGHGVLRKTDPRYTCQREFALKHLPDDPLFRLVSKLYDVVPPILTELGKVKNPWPNVDAHSGVLLNHFGLTEARYFTVLFGVSRSIGIGSQLIWDRALGLPLERPKSVTMESLESFCKKAAS

SEQ ID NO: 3303 - protein, 359 aa, Zea mays
MGSTAGDVAAVVDEEACMYAMQLASSSILPMTLKNAIELGLLEVLQKEAGGGKAALAPEEVVARMPAAPGDPAAAAAMVDRMLRLLASYDVVRCQMEDRDGRYERRYSAAPVCKWLTPNEDGVSMAALALMNQDKVLMESWYYLKDAVLDGGIPFNKAYGMTAFEYHGTDSRFNRVFNEGMKNHSVIITKKLLDFYTGFEGVSTLVDVGGGVGATLHAITSRHPHISGVNFDLPHVISEAPPFPGVRHVGGDMFASVPAGDAILMKWILHDWSDAHCATLLKNCYDALPENGKVIVVECVLPVNTEATPKAQGVFHVDMIMLAHNPGGKERYEREFRELAKGAGFSGFKATYIYANAWA

SEQ ID NO: 3304 - protein, 151 aa, Daucus carota
MKRLSSSDSLGALMSICPTTEEGSPGNNHVYSREFQSMLEGLDEEGCVEEMGQISEKKRRLSINQVKALEKNFEVENKLEPERKVKLAQELGLQPRQVAVWFQNRRARWKTKQLERDYGVLKANYDSLKLKNDTLQQENQSLLKEIRELNS

SEQ ID NO: 3305 - protein, 230 aa, Helicobacter hepaticus ATCC 51449
MGLYDRNYTNNAQFANEAVAERDSALVNFVKTTYKFFGASLFFAFIGAMIGFMYLEFVVEYRFFIFIAEIAALFGVMFSRSKPGLNIAMLFIFTTLTGVTITPLVAMVAFKAGAGAVAMAFAMTTIIFGVMSIFGIKTTKDLANMGKMLFIALIVVVVCSIINLFLGSSMFQVLISSAAAILFSLYVAYDTQNIVRGLYTSPVDAAINLYLDFYNIFVSLLSLIGLANRD

SEQ ID NO: 3306 - protein, 264 aa, ASPERGILLUS NIDULANS FGSC A4
MAALQSLRSTYRMNSGHEIPVLGYGVDSAIMYGNEKACGRAIAASGIDRSQIFFTTKIPPDSMGYNATKRAIDSSLRTAEQEYFDLILLHAPYGGKEARRGSWKALVEAQRAGKTKSIGVSNYGIHHLDELEAYIQSSGDDGVRESKIDVGQYELHPWLDRSEIVEWLQKRNIIVQAYSPLAHGTRMREPLLKKLGYKYGKSPAQIMIRWGLQKGFVPLPKSVTPSRIQENTEVFDFELDEEDMKSLHTGEYSPTDWDPTLDYD

SEQ ID NO: 3307 - protein, 392 aa, Glycine max
MGLRFSSGSAPHSSSLNGSHCSGSARTGSKNVGFSATGKSQFSEIASGSDDREESLGRILKWPNLKVFSFEELISASRRFRYDIQGLVIGKGCFGPVYKGWLDENTLTPAKVGYGMAVAIKMLNQDNFRGFEEWQSEVNFLGRLSHPNLVKLLGYCWDEDELLLVYEFLPKGSLENHLFRRNIEPLSWNTRLKIAIGAARGLAFLHASEKQVIYRDFKASNILLDLNFNAKISDFGLAKLGPSGGQSHVTTRVMGTYGYAAPEYIATGHLYVKSDVYGFGVVLLEILTGMRALDTKRPTGQQNLVEWTKPLLSSKKKLKTIMDAKIVGQYSPKAAFQAAQLTLKCLEHDPKQRPSMKEVLEGLEAIEAIHEKSKESKTRNSYQSPRQRVVRV

SEQ ID NO: 3308 - protein, 158 aa, Streptococcus pneumoniae TIGR4
MTSLYDFSVLNQNNQATPLDSYRGKVLLIVNTATGCGLTPQYQGLQELYERYQDQGFEILDFPCNQFMGQAPGSAEEINAFCSLHFQTTFPRFAKIKVNGKEADPLYVWLQDQKSGPLGKRVEWNFAKFLIGRDGQVFERFSSKTDPKQIEEAIQTLL

SEQ ID NO: 3309 - protein, 399 aa, Zea mays
MLLSSHASAHASEKKIHARRSVFLAGCPGPVRNSSFLHTYSRKLLVRACSTCTYALVNRRPRAPLRPDTSPLPRTGPWRESAGACQSGKPRPPLVGPSSLRLLCWSAPPNSTMPAAASHPSPTGPLVARPPASSSPPAGRPASQTLARRAREKLDAMFGYRKADPDLEAGGSSLLYPGMTESPELRWAFVRKIYVILTVQLAMTAAVSAFVVKVPAVSNFFVSSNAGIALYIFLIVLPFIVLCPLHYYHQKHPVNLLLLGLFTVAISFAVGMTCAFTSGKIILEAAILTAVVVNSLTAYTFWAAKRGHDFNFLGPFLIAAIMVLMVFSLIQIFFPLGKISVMIYGGLASLIFCGYIIYDTDNIIKRHTYDQYIWAAVSLYLDVINLFLSLLQLLRAADS

SEQ ID NO: 3310 - protein, 271 aa, Mycoplasma pneumoniae M129
MDTFTSAVKINWFPGHMKKTHDQLKKLASSLDGVIEVVDARAPTLTQNPEITAYFTNKPKLTLALKADLAQTVANSNILWGTLKQGLQLKRLVIKKLQTLFQAKKNQLKAKGLLVHQFRLAVIGMPNVGKSSLINLLLNKNHLQVANRAGVTKSMSWNQISSEFYLSDTPGVFFKRIDEMAVGYKLVLTNVIKREVVPLEDVGAFAFCYLSKHYPQLLPYEGTDFTEFLHKFAISRKLLQKSNQLNINLACELFVSELINGKYGKLSFELD

SEQ ID NO: 3311 - protein, 422 aa, Pseudomonas syringae pv. tomato str. DC3000
MSDLKTAALEYHANPRPGKLSVELTKPTATARDLALAYSPGVAEPVREIARDPELAYKYTGKGNLVAVISDGTAILGLGDLGPLASKPVMEGKGVLFKRFAGIDVFDIEVDSESPQAFIDTVKRISITFGGINLEDIKAPECFEIEKALIEQCDIPVFHDDQHGTAIVTAAGMINALEIVGKSLESAKIVCLGAGAAAISCMKLLVSMGAKIENIFMVDRTGVIHSGRTDLNQYKAVFAHATEKRSLTDALDGADVFVGLSGPNLLSAENLKLMAKDPIVFACSNPDPEISPELAHATRSDVIMATGRSDYPNQVNNVLGFPFIFRGALDVRAKRINEEMKIAAANALRELAKLPVPQEVCDAYGGIKLEFGREYIIPKPMDTRLLGLIADAVAKAAIESGVATLPYPKHYPLTSVDDVFNG

SEQ ID NO: 3312 - protein, 494 aa, Burkholderia cepacia R18194
MKSESEHPGLAAALAWCRSGAKQHFIDGKWVPAASGRTMETLNPATADVLAHIAEGDKADVDLAVAAARRAFESSGWRGMSPHARTAVLLRLADAIEQHADELAALETLDNGMPAWFSAAVVKMTVDTFRYYAGWPTKILGTTVPTDPSAFIYTLREPIGVCGQINPWNVPLLLAGVKFGPALACGNTIVAKPSELASLTCLRLVEIFHEAGLPPGVMNVVTGYGQTVGAAISEHPGIDKVAFTGSTAIGKQILLASAGNLKRVTLELGGKSPHIVFPDADLDKALAAAVNGFTRNSGQICSSGTRLFVHRSIHDEFANEVAKLAARLKVGNPFDADTKLGPLISSKQRDRVMSYVAAGNDEGATLLTGGRQACDAGYYVEPTVFSGVSNAMRIAQEEIFGPVVCVIPFDTEEDVIAQGNDSTYGLAGGIWTRDIGRAHRIAAALKGGRIWINTFGETDPVMPFGGYKQSGLGREFGAESIQTYTEAKSVMLRY

SEQ ID NO: 3313 - protein, 484 aa, Sinorhizobium meliloti
MNLKDPSLFRQAALVGETWIEADPKNAIEVNNPATGEIIGRVPKLGAADTRTAIEAAARVQKEWAARTAKERSAVLRRWFELMIENKDDLGRILTMEQGKPLAEATGEIVYGASFIEWFAEEARRVYGDLVPGHQKDKRILVMKQPIGVVAAITPWNFPNAMITRKAGPALAAGCAMVLKPAAQTPFSAIAIAVLAERAGMPKGLFSVITGSAREIGAEMTSNPTVRKLTFTGSTEVGAELYRQSAATIKKLGLELGGNAPFIVFDDADLDAAVEGALIAKFRNNGQTCVCANRIYVQDGVYEAFSDKLAQAVAKLKTGNGMEDGVILGPLIDQPALKKVEEHVADALAKGARVVQGGRRHSLGGTFYEATVLADVTQAMAVAREETFGPVAPLFRFKDESDVIAQANDTEFGLASYFYAKDLARVFRVAEALEYGMVGVNTGLISTAEAPFGGVKLSGLGREGSKYGIEEFMEIKYVCLGGIA

SEQ ID NO: 3314 - protein, 340 aa, Actinoplanes sp. A40644
MEAVTIVGPGRLKTASVPVPEPLPGTVLVAPRYAGICGTDLELFHGTSSYLADGRAATPLIFGHEWCGRVVSADPGTGWRPGDRVAGQTMVPCGGCARCRAGRRGLCRRMREVGLYGLDGAAAQYIRVPGHALARLPDTVPDRTAALVEPAVTVVESFARTGCGFDDRVAVLGTGTIGLLAVQFARRVAGRVDAVGVDPAGLALAVRCGADRAIPVGETTAGSYSLVVEASGAPEAFAHALDLVEPGGRVGVIGVANEPTAGVVAGSVALRGVSVLGIQHGLDHYDRTIELFATGALTADPLIGATFPAGAAAEAFAFMESARSGPPKVLLDLTEWKGDR

SEQ ID NO: 3315 - protein, 74 aa, Triticum aestivum
MAFVPGCVQCGTRSNPCRCKVVGPTLGFVAFVVTGVVEWPLGAAVYLFRRRKGRRIMGHPARVVYPRVTTAIPI

SEQ ID NO: 3316 - protein, 106 aa, uncultured Rickettsia sp.
MLKEIGSSEYIPKYIAKAKDKNDPFRLMGFGHRVYKNYDPRAAVLKETCKEVLKELRQLDNNPLLQIAIELEAIALKDEYFIERKLYPNVDFYSGIIYKAMGIPSQ

SEQ ID NO: 3317 - protein, 146 aa, uncultured Rickettsia sp.
ANEAVINMLKEIGSSEYIPKYIAKAKDKNDPFRLMGFGHRVYKNYDPRAAVLKETCKEVLKELRQLDNNPLLQIAIELEAIALKDEYFIERKLYPNVDFYSGIIYKAMGIPSQMFTVLFAIARTVGWMAQWKEMHEDPEQKISRPR

SEQ ID NO: 3318 - protein, 499 aa, Pseudomonas syringae pv. syringae B728a
MQMTTLTRADWEQRARNLKIEGRAFIQGEYTAASSGETFDCISPVDGRMLAKVASCDAADAQRAVDSARSAFNSGVWSRLAPAKRKATMIRFAGLLEQNAEELALLETLDMGKPISDSLGVDIPGGARALSWSGEAIDKLYDEVAATPHDQLGLVTREPVGVVAAIVPWNFPLMMACWKLGPALSTGNSVILKPSEKSPLTAIRIAQLAIEAGIPAGVLNVLPGYGHTVGKALALHMDVDTVVFTGSTKIAKQLMIYAGESNMKRVWLEAGGKSPNIVFADAPDLQAAASAAASAIAFNQGEVCTAGSRLLVERSIKDRFLPMVIEALSAWKPGNPLDPATTVGALVDTQQMNTVLSYIEAGHSDGAKLVAGGKRILQETGGTYVEPTIFDGVNNAMKIAQEEIFGPVLSVLTFDTAEEAIQIANDTQYGLAAAVWTANISKAHLTAKALRAGSVWVNQYDGGDMTAPFGGFKQSGNGRDKSLHAFDKYTELKSTWIKL

SEQ ID NO: 3319 - protein, 174 aa, Enterococcus faecium
LYLGNRHARVEGETYYEFIDQFVQSATELFPELLLHWEDFGRGNAAAILEKYEDQITTFNDDIQGTGIVVLAGVLGGLNISGEQLKDQIILTFGAGTAGVGIANILLDEMIRQGVPEEEARQHFYQVDKQGLLFEDTEGLTPGQIPFARKRSEFINADELTNLEAVVKAIHPTI

SEQ ID NO: 3320 - protein, 49 aa, Oryza sativa (japonica cultivar-group)
MAGTANCIDILIAIILPPLGVFLKFGCGVIMEYLIKLLSVTLVSSMPFA

SEQ ID NO: 3321 - protein, 1150 aa, GIBBERELLA ZEAE PH-1
MGTRTASSAVADASLRGPGRTHSTRSSRSSRVPSFPPPSPSASAAPAAPAPATSTGTGANYNQSHTRQLSHSHSQSQSRSQSQSLSQAQSQAYASRSHSHSHSHSHSRSASNAANSHPPPHHSQHQRTSSSARTTSQNDHESSRLAANPKHHRTSSKDDRHPPPTRGPDPSRAHRRSSSSRSKNNNHNPPPEMAPSASAPSNGTSHASAAPPTNHADAPPRASTSKHARSRTVIPTQSGKWMLGKTIGAGSMGKVKLARKEDGSEQVACKIIPRGSTDDGHQSRADKERADQSKEIRTAREAAISTLLNHPHICALHDVVRTNHHWYMLFEYVNGGQMLDYIISHGKLKEKQARKFSRQIASALDYLHRNSIVHRDLKIENILISKTGDIKIIDFGLSNLFAPRGHLKTFCGSLYFAAPELLQARAYTGPEVDVWSFGIVLYVLVCGKVPFDDQSMPALHAKIKRGLVDYPAWLSSECKHLLSRMLVTDPKQRATMQEVLTHPWMAKGFNGPPDNYLPNREPLTTPLEPEVILAMQGFNFGTPESINAQLTKIIESDEYQRAIKLYQREKELPQPTKDAEKKRAFGFDFYKRRNSGNSRDTLSAPSSEALQMGNDPMNAFSPLLSVYYLVKEKQDRDHADMVPPAASQSREKEKEKEREREREREEKREREREREKEREREREREREAREKEKAREPELPEIAAPQAAHTNSSAYEMPGEKPTGGRSRPRARTHGEDDMPELPKQTPAPPPEPRVEQIQKKEGTAAGILRRFSTRKRREPERLDRDRSHPPVVQVHSPAEPSPLAPRKSFSIRRGRRDREDASDTQIRSSSNQGQHGELLSPPMSSGGNREGRRGSALGRSTSVNSAEMRRRKDHPATNESDQSVGNEESSSSRRAHGHSRSVSLRAKSIGHARRESIQQRRQRRDAAQEANVPEETDQELEQSGVSTERLDDTELSKPVFLKGLFSVSTTSGKSVPAIRTDIKRVLKQLNVDYTEIKGGFRCRHSPSIDLNKVQDPPMSPGNTPGHKRRFSFGGLIRGDDRDRDDFRDSDRPPTTPRTPGRSDRDRSFSNSETSFDSNSGRNAGPSRQVPGETSTQVQSDLGGSMVLEFEIFIVKVPLLSLHGIQFKRMAGNTWQYKSMADHILRELRL

SEQ ID NO: 3322 - protein, 420 aa, Listeria monocytogenes EGD-e
MSQKIQVENGVLKTPNNPVIPFIEGDGTGPDIWAAAKRVLDAAVKKAYNGEKEIAWKEVLAGEKAFKQTGEWLPQATLDTIDEYLIAIKGPLTTPIGGGIRSLNVALRQELDLYVCLRPVRYFKGVPSPVKRPEDTDMVIFRENTEDIYAGIEFKEGSIESKKLIDFLKSEFGVDKIRFPETSGIGIKPISKEGTERLVRSAIEYAIKEGRKSLTLVHKGNIMKFTEGAFKNWGYDLCEREYGDKVFTWNEYDRIKEAEGTEVADAKQNEALAAGKILVKDSIADIFLQQILTRPAEFDVVATMNLNGDYISDALAAQVGGIGIAPGANINYLTGHAIFEATHGTAPKYAGLDKVNPSSVILSGTLLLEHIGWGEAAALINQSMEKTIAAKTVTYDFARLMDGATEVKCSEFADELIKNF

SEQ ID NO: 3323 - protein, 373 aa, Listeria monocytogenes EGD-e
MTLSKGLENVYVAETSISSIIDDMLTYVGYGIDDLMENNASFEEVIYLLWHLRLPNKDEFKKFKREIQENMAVSETIITSLRMQNHQKLHPMSVLRTTVSMLGVFDTEAELDDGEAVYRKGLRLQAKMPTIVAAFSRIRRGLDPIPPREDLNMAANFLYMITGEEADELSVEAMNKALVLHADHEFNASTFTARVCVATLSDVYSGVTAAIGALKGPLHGGANERVFDMLEEIDQAGDVRNYIQEKIDTKQKIMGFGHRVYRGGDPRAQHLREMSRKLTAEKGEEKWFDISLQVEESVWELKHLKPNVDFYSASVYHALGIDRDLFTLVFSVSRVSGWLAHIFEQYRDNRLIRPRAIYVGPENRSYLPVEERI

SEQ ID NO: 3324 - protein, 470 aa, Lactobacillus delbrueckii
MVLGGVREQGKNMFAVQVNDEIFVLDAGLKYPDSSLFGIDVVIPDMEFFKQYGDQVVGIFLTHGHADSIGALPYILRDWDIPVFGSKLTIELAKIDVQRENKRRNNQLFNVIDADTEIDFKNASVSFFHTTHSVPDSLGIVIHAPQGQIVYTGDFKFDPSARPAYRTDMARLAEIAGNGVLALLPDSSNAEAVLPNASENEVGTYITNVFRNAKGRIIVAGKASNLNRVQQVFNAAAATGRRVLLTGRDVAKIVHTAMKLGYLEVPDGLLMKAKELKDVPDEKTVILETGRMGEPLQSLQKMANNRHRMITIHEGDLVFIATTPSHAVETTVAITSDMVYRAGGTVIELGRNMHTSGHATGRDLQTLIDLLKPRILVPVIGDYRLLEAVKDLAVETGMDPDDVYITQNGDCLEYDTKRGQFFRGDAVPGEDTMIDGSGVGDVGNIVLRDREVLSDDGIFIAVVTIDRKKK

SEQ ID NO: 3325 - protein, 485 aa, Burkholderia fungorum LB400
MRIDHLINGKSGAAKDYFETVNPATQEVLAEVARGGAEEVDAAVRAAKDAFPAWAARPAAERAKLVRKLGELIAKNVPEISETETKDTGQTISQTRKQLVPRAADNFSYFAEMCTRVDGHTYPTDTHLNYTLFHPVGVCALISPWNVPFMTATWKVAPCLAFGNTAVLKMSELSPLTAAMLGNLALEAGIPAGVLNVVHGFGKETGEPLVAHPDVHAVSFTGSTATGNRIVQTAGLKKFSMELGGKSPFVIFDDADFERALDAAVFMIFSNNGERCTAGSRILVQRGIYARFAERFIERAKRLSVGDPLSDSTIVGPMISQGHLAKVRSYIELGPKEGATLACGGLDLPELPDALRKGNFVQPTVFVDVDNRMRIAQEEIFGPVACLIPFDDEADAIELANDISYGLSSYIWTENTGRALRVAAAVAAGMCFVNSQNVRDLRQPFGGTKASGVGREGGTWSYEVFLEPKNVCVSLGSHHIPRWGV

SEQ ID NO: 3326 - protein, 322 aa, Candida tenuis
MSASIPDIKLSSGHLMPSIGFGCWKLANATAGEQVYQAIKAGYRLFDGAEDYGNEKEVGDGVKRAIDEGLVKREEIFLTSKLWNNYHDPKNVETALNKTLADLKVDYVDLFLIHFPIAFKFVPIEEKYPPGFYCGDGNNFVYEDVPILETWKALEKLVAAGKIKSIGVSNFPGALLLDLLRGATIKPAVLQVEHHPYLQQPKLIEFAQKAGVTITAYSSFGPQSFVEMNQGRALNTPTLFAHDTIKAIAAKYNKTPAEVLLRWAAQRGIAVIPKSNLPERLVQNRSFNTFDLTKEDFEEIAKLDIGLRFNDPWDWDNIPIFV

SEQ ID NO: 3327 - protein, 182 aa, Arabidopsis thaliana
MASSMLSSATMVASPAQATMVAPFNGLKSSAAFPATRKANNDITSITSNGGRVNCMQMQVWPPIGKKKFETLSYLPDLTDSELAKEVDYLIRNKWIPCVEFELEHGFVYREHGNSPGYYDGRYWTMWKLPLFGCTDSAQVLKEVEECKKEYPNAFIRIIGFDNTRQVQCISFVAYKPPSFTG

SEQ ID NO: 3328 - protein, 201 aa, Chlamydomonas reinhardtii
  unsure (1)..(201): unsure at all Xaa locations
MLLTRKNVAVRPARAARRDVRAMSLLGNLFGGGSKPTSSTSNFHQLSALDIDKKNVDFKSLNNRVVLVVNVASKXGLTAANYKEFATLLGKYPATDLTIVAFPCNQFGGQEPGTNAEIKAFASARGFSGAGALLMDKVDVNGANASPVYNFLKVAAGDTSDIGWNFGKFLVRPDGTVFGRYAPTTGPLSLEKYIVELINSR

SEQ ID NO: 3329 - protein, 318 aa, Pseudomonas aeruginosa UCBPP-PA14
MTWPAEAPLMSPPQRLRAGLLRGCLRLLFRGLVRPPMPVALQRGVLRGLSLATLGAGGVVRERRSLAGVPCEWLRPRGVEARRRVLYLHGGAYLIGSPATHRAITTHLARRCAAEVCAVDYRRAPEHPFPAARDDALAVYLALLEAGHSPRQLLLAGDSAGGHLALSLALELKARGLPLPAGLLLFSPWTDLSCQRLHTPEAGDPLLSRAWLESAVRLLLPADAEPGSAALSPLHADLAGLPPLLVQVGEDELLRDDSLRLAQRAGEQGVAVRLQRYAGCWHVFQAHAGVLASADRALDEAAAFVVECSAEGGQCRTS

SEQ ID NO: 3330 - protein, 367 aa, Triticum aestivum
  unsure (1)..(367): unsure at all Xaa locations
MGKGGKGEAAAAVAGEGENMAAWLVAKNTLKIMPFKLPPLGPYDVRVRMKAVGICGSDVHYLKEMRIAHFVVKEPMVIGHECAGIIEEVGDGVKHLAVGDRVALEPGISCWRCRHCKGGRYNLCDDMKFFATPPYHGSLADQIVHPGDLCFKLPDNVSLEEGAMCEPLSVGVHACRRADVGAEKSVLIMGAXGPIGLVTMLXARAFGAPRIVIADVDDHRLSVAKSLXGADAVVKVSGNTEDLAGEIERIQAAMGGDIDVSLDCAGFSKTMSTALEATRPGGRVCLVGMGHNEMTVPLTSAAIREVDVVGIFRYKDTWPLCLEFLRSGKIDVKPLITHRFGFSQGEVEEAFEVSARGRDAIKVMFNL

SEQ ID NO: 3331 - protein, 392 aa, Corynebacterium melassecola
MTIDLQRSTQNLTHEEIFEAHEGGKLSISSTRPLRDMRDLSLAYTPGVAQVCEAIKEDPEVARTHTGIGNTVAVISDGTAVLGLGDIGPQASLPVMEGKAQLFSSFAGLKAIPIVLDVHDVDALVETIAAIAPSFGAINLEDISAPRCFEVERRLIERLDIPVMHDDQHGTAVVILAALRNSLKLLDRKIEDLKIVISGAGAAGVAAVDMLTNAGATDIVVLDSRGIIHDSREDLSPVKDALAEKTNPRGISGGINEAFTGADLFIGVSGGNIGEDALKLMAPQPILFTLANPTPEIDPELSQKYGAIVATGRSDLPNQINNVLAFPGIFAGALAAKAKKITPEMKLAAAEAIADIAAEDLEVGRIVPTALDPRVAPAVKAAVQAVAEAQNA

SEQ ID NO: 3332 - protein, 208 aa, Cynodon dactylon
MAAKSSEKGSNNGKESSMADVYRGELTPLQRHVAFFDRNKDGVIYPAETYEGFRAIGAGVPLSAVGAAFVNGFLGPKTIPENEKVGPFKFPIYVKNILKGKHGSDSGVYDAHGRFVPEKFEEIFKKHAHTRPDALTAKELQELLQANREPKDFRGWLGGFTEWKVLYALCKDKDGFLHKDTVKAVYDGSLFDKMEQERKAKKESAKKK

SEQ ID NO: 3333 - protein, 441 aa, Arabidopsis thaliana
MDKTSQLPDELLVKVLSFLPTKDAVRTSLLSMRWKSLWMWLPKLEYDFRHYSVSEGQGLARFITLSLLGHKAPAIESLSLKLRYGAIGSIKPEDIYLWVSLAVHDSNVRELSLKLCTFAERPTKLPKSLYKCKSIVILKLKDEILVDVPRKVCLPSLKTLFLGRVTYSDEDSLHRLLSNCPVLEDLVVERDRIDNLGKLSVVVKSLQRLTLKMSCPCHLDGIMMNTPSLKYLKVTDERQESDSDNESDSDSPRYFYDFEDMPKLEEADFVLTFQNIKKFFKFVTSIKRLSLCLGVYTEESLYHEGLVFNQLEQLKICSCDSDWSILLSRLLESSPNLRELEAYVIEDHPDRRVDLPNQWGNQLNCVPKCLLSSLETFKWSEMYGLLQNQMDVAKYILRNARCLKSATIFFPTTYAKETRDEMIEELSLSFQGPETCQVFFH

SEQ ID NO: 3334 - protein, 125 aa, Zea mays
  unsure (1)..(125): unsure at all Xaa locations
MSFAAGSSEDQLNSSPLAMDRRPARTRSDPPHSSRGAVHDAVAVEQKQHRRPQGTGAPPVYFTAELXLACLFVAVSLALLPLVLPPLSPPPSLLLLVPVGLLAVLLALAFVPLDAHSHLAVGSSR

SEQ ID NO: 3335 - protein, 109 aa, Castanea sativa
GTGASCADVLRVMQHEPELMFETLNHRAEECCNGNGNGISALANSLAKSFRNMPYLVANSAASSSCSLTAAAMNNNGFYYCNEDNEYNAAADSATTAGEDEWSYCYACN

SEQ ID NO: 3336 - protein, 375 aa, Mycobacterium avium subsp. paratuberculosis str. k10
MSTLEDNQPRIHKGLAGVVVDTTAISKVVPETNSLTYRGYAVQDLAAHCSLEQVAYLLWYGELPDDQQLALFSQRERAARRLNRSQLSLLHKLPDTCHPMDVVRTFISSMGAEDPDEDDNSASANHAKALRMFAVLPTIVAADMRRRRGLEPIAPHSHMSYAQNFLHMCFGDVPEQVIVDAFEQSMILYAEHSFNASTFAARVVTSTQSDIYSAVTAAIGALKGSLHGGANEAVMHDMLEIGTPDRAAEWLQGKLSRKEKVMGFGHRVYKNGDSRVPTMKQALQRVAAVRDGQKWLDIYQILERGMARANGIKPNLDFPTGPAYYLMGFDIGAFTPIFVMSRITGWTAHIIEQTASNALIRPLSEYVGPPQRALS

SEQ ID NO: 3337 - protein, 194 aa, Ustilago maydis 521
MSELRRKLVIVGDGACGKTCLLIVFSKGTFPEVYVPTVFENYVADVEVDGRHVELALWDTAGQEDYDRLRPLSYPDSHVILICFAVDSPDSLDNVQEKWISEVLHFCHSLPIILVGCKKDLRHDPKIVDELRKTSQRPVSAEEGMAVAQKIGAVRYLECSAKTGEGVREVFEHATRAALVQRSRGSRKKGCTVL

SEQ ID NO: 3338 - protein, 270 aa, Methylobacillus flagellatus KT
MNELHVSRENFIIPGPEGTIPVRLYRRAQAGGDVPLVLYFHGGGFNAGCLDDADFPAGFIAYHCPAVVLSVGYALAPQHPFPAAPEDAYAATRWAARNTCRLNVTAKLLVVAGDDAGGSIAAGLSMMARDRGEFSIAAQVLIAPMLDPSMTLLGDAAGLKSELTAAQCAQRYRQYLPKCTQRMHPYAAPLESLRLAGLPAAMIATAECDVLHIEAEKYANVLIQAGVPTQVSRFSGVQHAELLAHQPMLREVVEFLRRQAMHAGLPIDSG

SEQ ID NO: 3339 - protein, 247 aa, Glycine max
MASSLRISRLLSRSFLSASTTTPLFSRGGSGALGAGLSKFSTAAAIEEPIKPPLKVEHTQLLIDGKFVDAATGKTFPTLDPRTGDVISHVAEGDHEDVDRAVAAARKAFDRGPWPKMTAYERQRILLRAADLFEKHNDELAALETWDNGKPYEQSAQIEIPMLVRLFRYYAGWADKIHGLTVPADGPYHVQTLHEPIGVAGQIIPWNFPLVMFAWKVGPALACGNTIVLKTAEQTPLSALYASKLLH

SEQ ID NO: 3340 - protein, 189 aa, Triticum aestivum
MASFYAAIGFILPFLLAIALPQSTGSPAVAPSTTGSLSIEDACKQTAKLYDLCMATLSPDRSSLTADAVGLTRAAILAVQKNASETATYLTNIDEDENVNKTAELQQCLEDCGERYEAAVEQLADPTIALDMGAYDESQVLVSAGQAEGKLGHEGGQDTPEHQSILMARNTEVDQLCNITLAIAKLIPR

SEQ ID NO: 3341 - protein, 314 aa, Aspergillus flavus
METPFAAPWHQFVEDLGQTPCLPGKDLDSILAGWGQLAGTLATRYGFPPPDESVTTEDVQLDGLWLRCYTPPNATGQEPVGLYFHGGGWVMGGVNEEDGFCRVISRQCQMRLVSVEYRKAPETRYPGALNDGVSAALWALSRYENQPLILMGTSAGGNLAFGTALRLIDQDMADKVSGVVALAPITVHPDAVPEHLKEQYTAYEENAELTVNSRAAMQVFFDCYKAPVDDVYTSCLLHPRLLALPKVYIAELGLDTLRDDARLMKGALDTAKVPVMYDAYPGYPHCSFMFPFKSLGEHQRTFFGGVAKAVRWMS

SEQ ID NO: 3342 - protein, 294 aa, Saccharomyces cerevisiae
MKTLVHVASVEKGRSYEDFQKVYNAIALKLREDDEYDNYIGYGPVLVRLAWHISGTWDKHDNTGGSYGGTYRFKKEFNDPSNAGLQNGFKFLEPIHKEFPWISSGDLFSLGGVTAVQEMQGPKIPWRCGRVDTPEDTTPDNGRLPDADKDAGYVRTFFQRLNMNDREVVALMGAHALGKTHLKNSGYEGPWGAANNVFTNEGYLNLLNEDWKLEKNDANNEQWDSKSGYMMLPTDYSLIQDPKYLSIVKEYANDQDKFFKDFSKAFEKLLENGITFPKDAPSPFIFKTLEEQGL

SEQ ID NO: 3343 - protein, 163 aa, Candida albicans SC5314
MSEEKVRVPETEEERQERLAKQEEIDGRSVYVGNVDYQSTPEQLEEFFHGVGVIERVTILFDRFSGLPKGYAYIEFEQTESVQKAIDELHGKEFRGRELRVTAKRTNLPGFRRGRGRGGFRARGRGRGGFRGRGRGRGGFNSRGTRNGDSEQADGDAENEETD

SEQ ID NO: 3344 - protein, 83 aa, Brassica napus
MDIISHLSDDLLLRILSFVPTKDVVATSLLSKRWECLWTSVSKLGYDDSYHHTGDYKNFSQFVYRSLLSNKAPVLDKLHLKLG

SEQ ID NO: 3345 - protein, 164 aa, Triticum aestivum
  unsure (1)..(164): unsure at all Xaa locations
MEGRMFGLETPLMTALQHLLDVPDGEAGGPGXNAAGEKQGPTRAYVRDARAMAATPADVKELPGAYAFVVDMPGLGSGDIKVQVEDERVLVISGERRREEKEDAKYLRMERRMGKMMXRKFVLPENADMEKISAVCRDGVLTVSLEKLPPPETKKPKTIQVQVA

SEQ ID NO: 3346 - protein, 238 aa, Triticum aestivum
  unsure (1)..(238): unsure at all Xaa locations
HTQAHSIQGSRRSRFEKPAWASAEEEDLPATDMPRVVGVLSALLERVTXRNDAATGPGALEPASGSAFRAMTKPGISVRAYMARIARFAGCSPACFVVGYIYLDRLLRRRRALAVDSYSVHRLLITTVLSAVKFMDDICYNNAYFAKVGGISLPEMNYLEVDFLFGVGFELNVSPETFGHYCAILQSEMLCLELEPEPLLPPNAAAPGSAMLCCLSEDDGTSATTSSSSSTQQQQLAA

SEQ ID NO: 3347 - protein, 338 aa, Sinorhizobium meliloti
MKAVVCSEPGRLALVARSGPEAPPPGSVRLAVSRVGICGTDYHIFEGKHPFLEYPRVMGHEISARVIEGGPGTRLAPGTLVVVNPYLSCGECIACRKGKPNCCTAIRVLGVHTDGAFCEEIVMPEQNLYPAEGLSPEAAAAVEFLAIGAHAVRRSAAGRGVRSLVIGAGPIGLGTAVFSRIAGHDVRLLDTSEERLAFATEKLGFSPGILAGDDAALAQATGGDGFDVVFDATGNAQSMERAFGHVAHGGTLVFVSVVKEEIRFSDPEFHKREMTLVASRNATREDFDHVIQSLAAGLVPIEALVTHRTTLEDLVRDLPRWVHDKSGLVKAVVAVSAG

SEQ ID NO: 3348 - protein, 386 aa, Aspergillus flavus
MTGLDMETIFAKIKEEYSRTDDVGKRKIQGHIRELQVGFYSDWDVVMRLSSGPLQVALAKVGIDLGIFRSLKESDTPITLAEFVKKTGASPRLLGRILRTQAAFGLIKETGPQEYTSSAFTDVFANPAAAGAVVQLLDISGPCTQILPDFLAERHYQDITSNKDCVFQKAFDSDLTMFEWMPQHPKHMESLGHLMALERPVSWVDHFPVLEELGDFPAPDKVLMVDIGGGFGQQSKALRAKFPNIPGRVIVQDIPQTLANAQPAAGVEFMEHNFFEPQPIRNAKFYYLRHVFHDWPDEQCVLILKQIIPVMGPESEILIDEMVIPSTGVPWQAAFTDLLMMNSLGGVERTRAEWDDLMKQAGLEIIQSKVYDSKEQTILVAVPRRT

SEQ ID NO: 3349 - protein, 492 aa, ASPERGILLUS NIDULANS FGSC A4
MSLASLKRKDLFQQHGLIGDKWVSSSGGGTFTVTNPATLETLATLPEMNGADTESAITAAHTAFQSFRKTTARQRATWLRKWHALCVENIDDLALILTVENGKTLAEAKGEVLYAASFLEWFAGEAERVHGEVVPASNANQRILTVKQPLGVAACLAPWNFPIAMITRKVGAALAAGCTTVWKPAGETPLSALAQAVLAREAGFPSGTINVITTLNSVAEVGAALCNSKLVRKLSFTGSTRIGKLLASQCSQNLTKLSLELGGNSPFIVFDDAKVETAVEACILAKFRNSGQTCVTANRIFVQEGIYDRFSAALVEKVKALKVGNGVEEGVIIGPLTHERAVEKAVAHIKDAQEKGASLLLGGSPCQPNNLPGYFLEPTVLGKMSTEALTTREEVFAPVVALYPFKTEEEVLAKANDCDVGLGSYVITESMPRMWRVAESLEVGMVGINMGTLSAAESPFGGVKESGYGREGGRQGIEEYMTVKSILMNVAA

SEQ ID NO: 3350 - protein, 343 aa, Sinorhizobium meliloti 1021
MKAIVIHTAKDLRVEECAVEKPGPGEVEIRLAAGGICGSDLHYYNHGGFGTVRLKEPMILGHEVSGHVAALGEGVSDLAIGDLVAVSPSRPCGACDYCLKGLPNHCFHMRFYGSAMPFPHIQGAFRERLVAKASQCVKAEGLSAGEAAMAEPLSVTLHATRRAGEMLGKRVLVTGCGPIGTLSILAARRAGAAEIVAADLSERALGFARAVGADRTVNLSEDRDGLVPFSENKGTFDVLYECSGAQPALVAGIQALRPRGVIVQLGLGGDMALPMMAITAKELDLRGSFRFHEEFATAVKLMQGGLIDVKPLITHTLPLGEALKAFEIASDKGQSMKTQIAFA

SEQ ID NO: 3351 - protein, 234 aa, Arabidopsis thaliana
MGRGKIVIRRIDNSTSRQVTFSKRRSGLLKKAKELSILCDAEVGVIIFSSTGKLYDYASNSSMKTIIERYNRVKEEQHQLLNHASEIKFWQREVASLQQQLQHLQECHRKLVGEELSGMNANDLQNLEDQLVTSLKGVRLKKDQLMTNEIRELNRKGQIIQKENHELQNIVDIMRKENIKLQKKVHGRTNVIEGNSSVDPISNGTTTYAPPQLQLIQLQPAPREKSIRLGLQLS

SEQ ID NO: 3352 - protein, 106 aa, uncultured Rickettsia sp.
MLKEIGSSENIPKYIAKAKDKNDPFRLMGFGHRVYKNYDPRATVLKETCKEVLKELEQLENNPLLQIAIELEAIALKDEYFIERKLYPNVDFYSGIIYKAMGIPSQ

SEQ ID NO: 3353 - protein, 392 aa, Pseudomonas putida KT2440
MLNAEQRAIIKATVPLLESGGEALTTHFYKMMLSEYPEVRPLFNQAHQASGDQPRALANGVLMYARHIDQLEQLGGLVGQIINKHVALQILPEHYPIVGSCLLRAIEEVLGKDIATPAVIDAWGAAYGQLADILIGAEENLYKEKEEAEGGWRGTREFRLVRREQESSEIVSFYFAPVDGMPVLKAEPGQYIGLKLDIDGAEQRRNYSLSALCDGKEYRISVKREAGGKVSNYLHDELKVGDTLQLFPPAGDFTLAASDKPLVLISGGVGITPTLAMLQAALQTRREVHFIHCARNGAVHAFRDWIDGLAARHPQLKRFYCYAEPEGGAAADAVGLLSEDLLAEWLPQERDVDAYFLGPKGFMAAVKRQLKGLGVPEQQSRYEFFGPAAALE

SEQ ID NO: 3354 - protein, 106 aa, uncultured Rickettsia sp.
MLKEIGSSENIPKYIAKAKDKNDPFRLIGFGHRVYKNYDPRAAVLKETCKEVLKELGQLENNPLLQIAIELEAIALKDEYFIERKLYPNVDFYSGIIYKAMGIPSQ

SEQ ID NO: 3355 - protein, 319 aa, Listeria monocytogenes EGD-e
MKRIAILTSGGDAPGMNAATRAVVRKAIYEGLEVYGINYGFLGLVNGDIRKLELGSVGDLLHRGGTFLYSARYPEFATEEGQLKGIEQLKKHQIDGLVVIGGDGSYHGAEALTKRGFPTIGIPGTIDNDISGTDFTIGFDTALNTVLDALDKIRDTATSHERTFIIEVMGRDAGDIALWSGLAGGAEAIIVPEESFNMDDVVDRLNKGRERGKKHSIIVVAEGVMSGNEFAKQLAEYGDYHARVTVLGHVQRGGSPTAFDRVLASRLGARSVELLLENRGGLAVGIRENRIVENDISEILKEKHTLDQKLFDLASILSI

SEQ ID NO: 3356 - protein, 298 aa, Oryza sativa (japonica cultivar-group)
MAGSERTVVWFRRDLRIDDNPALASAARDGAVLPVFIWCPADEGQFYPGRCSRWWLKQSLPHLSQSLESLGCPLVLIRAESTLEALLRCIDSVGATRLVYNHLYDPVSLVRDDKIKKELSALGISIQSFNGDLLYEPWEIYDDSGLAFTTFNMYWEKCMELPIDASPSLAPWKLVPVPGLESVRSCSVDDLGLESSKDEESSNALLMRAWSPGWRNAEKMLEEFVSHGLLEYSKHGMKVEGATTSLLSPYLHFGEVSVRKVYQLVRMQQIKWENEGTSEAEESIHFFMRSIGLREYSR

SEQ ID NO: 3357 - protein, 191 aa, Glycine max
MADSDNDSGGAHNGGKGSEMSPREQDRFLPIANVSRIMKKALPANAKISKDAKETVQECVSEFISFITGEASDKCQREKRKTINGDDLLWAMTTLGFEDYVEPLKGYLQRFREMEGEKTVAARDKDAPPLTNATNSAYESANYAAAAAVPGGIMMHQGHVYGSAGFHQVAGGAIKGGPAYPGPGSNAGRPR

SEQ ID NO: 3358 - protein, 152 aa, Magnetospirillum magnetotacticum MS-1
MPRLRSALVALALGLVAVPALAVQPDEVLKDPAMEARARHISEGLRCLVCQNQSIDDSDAPLAKDLRVLVRERLKEGDSNEQVVDYVVARYGEFVLLRPVFGWHTLLLWLSPLLAVGLGAFGIWRLSRRRAPKAEGLSEAEAAEVEALLKRP

SEQ ID NO: 3359 - protein, 341 aa, Escherichia coli O157:H7
MKALSKLKAEEGIWMTDVPVPELGHNDLLIKIRKTAICGTDVHIYNWDEWSQKNIPVPMVVGHEYVGEVVGIGQEVKGFKIGDRVSGEGHITCGHCRNCRGGRTHLCRNTIGVGVNRPGCFAEYLVIPAFNAFKIPDNISDDLASIFDPFGNAVHTALSFDLVGEDVLVSGAGPIGIMAAAVAKHVGARNVVITDVNEYRLELARKMGITRAVNVAKENLNDVMAELGMTEGFDVGLEMSGAPPAFRTMLDTMNHGGRIAMLGIPPSDMSIDWTKVIFKGLFIKGIYGREMFETWYKMAALIQSGLDLSPIITHRFSIDDFQKGFDAMCSGQSGKVILSWD

SEQ ID NO: 3360 - protein, 112 aa, Bartonella bacilliformis
ANEACLKMLQEIGSVKKIPQFIARAKDKNDPFRLMGFGHRVYKNYDPRAKIMQKTCHEVLKELNIQDNPLFDIAMELEHIALNDEYFINKKLYPNVDFYSGITLKALGFPTE

SEQ ID NO: 3361 - protein, 388 aa, Thermotoga maritima MSB8
  unsure (1)..(388): unsure at all Xaa locations
XGSDKIHHHHHHVDALEVHRFLKGKIRTALPVEKVDRETLSLLYTPGVADVARACAEDPEKTYVYTSRWNTVAVVSDGSAVLGLGNIGPYGALPVXEGKAFLFKAFADIDAFPICLSESEEEKIISIVKSLEPSFGGINLEDIGAPKCFRILQRLSEEXNIPVFHDDQQGTAVVVSAAFLNALKLTEKKIEEVKVVVNGIGAAGYNIVKFLLDLGVKNVVAVDRKGILNENDPETCLNEYHLEIARITNPERLSGDLETALEGADFFIGVSRGNILKPEWIKKXSRKPVIFALANPVPEIDPELAREAGAFIVATGRSDHPNQVNNLLAFPGIXKGAVEKRSKITKNXLLSAVEAIARSCEPEPERIIPEAFDXKVHLNVYTAVKGSA

SEQ ID NO: 3362 - protein, 358 aa, Zea mays
MGSTAGDVAAVVDEEACMYAMQLASSSILPMTLKNAIELGLLEVLQKEAGGGKAALAPEEVVARMPAAPSDPAAAAAMVDRMLRLLASYDVVRCQMEDRDGRYERRYSAAPVCKWLTPNEDGVSMAALALMNQDKVLMESWYYLKDAVLDGGIPFNKAYGMTAFEYHGTDARFNRVFNEGMKNHSVIITKKLLDFYTGFEGVSTLVDVGGGVGATLHAITSRHPHISGVNFDLPHVISEAPPFPGVRHVGGDMFASVPAGDAILMKWILHDWSDAHCATLLKNCYDALPENGKVIVVECVLPVNTEATPKAQGVFHVDMIMLAHNPGGKERYEREFRELAKGAGFSGFKATYIYANAW

SEQ ID NO: 3363 - protein, 112 aa, Bartonella bacilliformis
ANEACLKMLQEIGSVKKIPQFIARAKDKNDPFRLMGFGHRVYKNYDPRAKIMQKTCHEVLKELYIQDNPLFDIAMELEHIALNDEYFINKKLYPNVDFYSGITLKALGFPTE

SEQ ID NO: 3364 - protein, 420 aa, Haloarcula marismortui ATCC 43049
MGYDYDKVEVPDEGQQIQVTEDDELDVPENPIIPIIHGDGIGTDVGPAAQKVLEAAANATGRDISWMRIYAGQSARDKYDENLPDDTVEAIKEFNVAIKGPLTTPVGAGFRSLNVALRKTLDLYANVRPTYHIEGVPSPVKDPEEMDMVTFRENTEDVYAGIEWEAGTDEVEEVKEFVEDEMNFDETIHDGPVGIGVKPITEFGTKRLVREAIDYALEEDRDSVTLVHKGNIMKFTEGAFRDWGYEVAEEEYGEHVITEDELWDEYDGEAPEDSLVVNDRIADNMLQQLLTRTDEYDVIATMNLNGDYMSDAAGAQIGGLGIAPGANFGSARCLAEPVHGSAPKYAGEDKVNPTAMILSGRLMLEYMGWKDAGQLVRDAVEETISSGNVTYDLERQIEGGTKLATSEFAEKVVENIEKLA

SEQ ID NO: 3365 - protein, 443 aa, Rhizobium sp. NGR234
MYRTNTPNLENYWMPFTANRQFKAAPRLLASAEGVYYRDIDGNQVLDGTAGLWCVNAGHARKEISQAVERQLNTLDFAPSFQMGHPIAFQFAEKLAEIAPGEPGKKLDRIFYTGSGSESVDTALKIAIAYQRAIGQGTRTRLIGRERGYHGVGFGGISVGGLVNNRRVFPQVPGADHLRHTHDLARNPFTKGGLPEHGAELADDLERLVALHGAETIAAVIVEPVAGSTGVLLPPKGYLERLRATADKHGILLIFDEVISGFGRLGAPFAVDYFGVTPDIITTAKGLTNGVVPMGAVFTSSKVHDALMHGPEAQIELFHGYTYSGHPVACAAGLAAMEIYEKEALLTRASELATYWEDAVHGLRSRKNVIDIRTIGLVAGIELASRSEAAGARAYDVFVDCFKRGLLIRVTGDIIALSPPLTIEREQVDELMSILADALDRAD

SEQ ID NO: 3366 - protein, 196 aa, Glycine max
  unsure (1)..(196): unsure at all Xaa locations
LKLKLDAAEDKIYVDVGMTNNLCLSIQLTELLXSFMCPSGIDDFPMATIDHIKAGLSVLAKYRRPIVVHAEIQQDFENHLELNEDNLDPRAYLTYLNTRPPSWEEAAIKQLVSVTKDTRKGGPLEGAHVHIVHLSDSSASLDLIKEAKSHGDSISVETCPHYLAFTSEEIPNGDTRXKCSPPIRDAYNKDKLWEAV

SEQ ID NO: 3367 - protein, 162 aa, Pseudomonas syringae pv. tomato str. DC3000
MSAFHDIRLKALGGQELPLADFKNKVVLVVNVASKCGLTPQYAALENLYQQYRDKGLVILGLPCNQFAGQEPGTEQEIAEFCQLNYGVTFPLGEKLDVNGPNRHSLYRLLAGEGAEFPGDITWNFEKFLVGKNGGVSARFSPRTAPDDPAVIQAIEKALAHN

SEQ ID NO: 3368 - protein, 386 aa, Aspergillus oryzae
MTGLGMETIFAKIKEEYARTDDVGKRKIQGHIRELQVGFYSDWDVVMRLSSGPLQVALAKVGIDLGIFRSLKESDTPITLAEFVKKTGASPRLLGRILRTQAAFGLIKETGPQEYTSSAFTDVFANPAAAGAVVQLFDISGPCTQILPDFLAERHYQDITSNKDCVFQKAFDSDLTMFEWMPQHPKHMESLGHLMALERPVSWVDHFPVLEELGDFPAPDKVLMVDIGGGFGQQSKALRAKFPNIPGRVIVQDIPQTLANAQPAAGVEFMEHNFFEPQPIRNAKFYYLRHVFHDWPDEQCVLILKQIIPVMGPESEILIDEMVIPSTGVPWQAAFTDLLMMNSLGGVERTRAEWDYLMKQAGLEIIQSKVYDSKEQTILVAVPRRT

SEQ ID NO: 3369 - protein, 366 aa, Zea mays
  unsure (1)..(366): unsure at all Xaa locations
AGRNKDDAEEAISLVEALAVQLTQREGELIYEKAEVKKLANFLKQATVDARKVAEEERALALAEIEKARAAIEKVEKALDVHDSTXAAEEEEIEELRKEVREARRIKMLHQPSKVMDMEFELQALRTLISEKTQLCNQLKKELAMIKRLEDDSSGLFELEGSNTLGSQLCIIPRVDGASNITNCPIQWYRVISGGTRELISGATKFMYAPEPFDVGRLLQAEIVLNADKIIVQTDGPVDNAAGLERYVDSLMKRTDIEFNVVVTQMNGKDYSSNSVHVFHIGKLRIKLRKGWSTKARESYSTTMKLCGSRGGGNAAARAVFWHPRKGSSYTLAFETDRDRNAAIMIARKFASNCNIALAGPGDQGT

SEQ ID NO: 3370 - protein, 420 aa, Zea mays
  unsure (1)..(420): unsure at all Xaa locations
STIEEASLEHHKELELPYTKSQRSERRSKIKREISIMKIGRHPNIVRLNEVLAGXTKIYIVLELVTGGELFDRIARHGKLRENEARKYFQQLIDAIDYCHSKGVYHRDLKPQNLLLDSRGNLKVSDFGLSTLSQNGAGLLHTTCGTPNYVAPEVLGSNGYDGSAADIWSCGVILYVLMAGYLPFEENDLPSLYEKITAAKYSCPYWFSPGAKSLIQRLLDPNPRTRITIGEIRADPWFEKNYVAIRRGEDENVSLDDVQAVFDNIEDKYVSEEVTHKDGGPLMMNAFEMITLSQGLDLSALFDRQQEYVKRQTRFVSRKPAKTIVATIEVVAESMSLKVHSQNYKLRLEGAASNRASQFAVVLEVFEVAPSLFMVDVRKVAGDTPEYHRFYENLCSKLCSIIWRPTEVSAKSTPLRTTTC

SEQ ID NO: 3371 - protein, 160 aa, Ustilago maydis 521
MAAENAPMELDSPSTKQPRFQVKKWNAVCLWSWDIQVEDRLLLVVQCQTDAIGCWDVAVDLALDRLPHQCAICRNHIMDLCIECQANQGSATTEECTVAWGQCNHAFHFHCISRWLKTRQVCPLDNRDWELQNFNSLAPFILTRLALILLAPAHSNRYGR

SEQ ID NO: 3372 - protein, 428 aa, Tropheryma whipplei str. Twist
MTRQSFFIKNVTLPGLGARTLFLSGGLIQEIICKDIEEHQFLSTKNTDKASCRVIDAEGFIALPGLVDLHTHLRNSRDGSIRDVTSAAIAGGYTTVSSMPNMHPVQDSPEAVNILKAIAKEDAVCDIRPVGAVTKGLRGNEITDMHSLLDAGVNIFSDDGNCVHDPGIMHQALSFAGRNNCVIAQHAQDPTLTKSAQGDTQGPIVAPKSLWPSIAESTIVARDILLARAANARLHVCHVSSQESVYAIAWGKSLGVQVTAEVTPHHLLFYDSLVMTGDTRFKVNPPLRSKESVECLRDALIRGVIDVVATDHAPHRNKSPFWHSAPNGMTGLEFSVSVIQKIFVNSGHLTWPEVVRIMSNKPAEILGMTPNTVKEGSAANFFLYNPDVTRFVTFDDSLGPSVNSPYAGMNLPGKVMYTFYEGRLVFEN

SEQ ID NO: 3373 - protein, 255 aa, Zea mays
MGHASAHAFIIASVFLPVDPRPSVHCRRYRHADQPIAIGFVSSLSLSLSLVMVRACLQAAVTVSRMMAPLKHVRGLEFAADVGYVDFLSRVNRVEEEARRNGSWDAPHPWLNLFVSARDIADFDRAVIKGMLADGIDGPMLVYPMLKSKWDPNTSVALPEGEVFYLVALLRFCRSGGPAVDELVAQNGAILRACRANGYDYKAYFPSYRGEADWARHFGAARWRRFVDRKARYDPLAILAPGQKIFPRVPASVAV

SEQ ID NO: 3374 - protein, 168 aa, Zea mays
MAAASSATSVHDFTVKDASGKDVDLSTYKGKVLLIVNVASQCGLTNSNYTELSQLYEKYKDQGFEILAFPCNQFGGQEPGTNEEIVQFACTRFKAEYPIFDKVDVNGDNTAPIYKFLKSSKGSLFGDNIKWNFSKFLVDKEGHVVERYAPTTSPLSIEKDIKKLLGSY

SEQ ID NO: 3375 - protein, 208 aa, Zea mays
MASDRVLGTVKWFNGTKGFGFITPDDGSEDLFVHQSSIKSDGYRSLNDGDAVEYTVGSGNDGRAKALDVTAPGGGPLAGGERPDGGNGGGRGGYGGGDRGYGGGGDRGYGGGGDRGYGGGDRGYGGGGDRGYGGDRGYGGGGGYGGGYGGGGGGGGRGCFKCGEEGHMARDCSQGGGYGGGGGGGRGSECYNCGQEGHISRDCPNKRR

SEQ ID NO: 3376 - protein, 151 aa, Brassica napus
  unsure (1)..(151): unsure at all Xaa locations
MAFPIDHSLADLTKLNLLPKPHGHASDMFPFRLSVFPRVHLSLRTSTSRVLSSLGSKVDPNGSVLIETTTPPEPSPDVTGGVQDVYGEDAATEDMPITPWSLSVASGYTLLRDPHHNKGLAFSQRERDAHYLRGLLXPTVISQDLQVKKMM

SEQ ID NO: 3377 - protein, 149 aa, Oryza sativa
MSLVRRSNVFDPFADFWDPFDGVLRSLVPATSDRDTAAFANARVDWKETPESHVFKADLPGVKKEEVKVEVEEGNVLVISGQRSKEKEDKNDKWHRVERSSGQFMRRFRLPENAKVDQVKASMENGVLTVTVPKAEVNKPEVKAIEISG

SEQ ID NO: 3378 - protein, 181 aa, Brassica napus
MASSMLSSAAVVTSPAQATMVAPFTGLKSSSAFPVTRKANNDITSIASNGGRVSCMKVWPPVGKKKFETLSYLPDLTEVELGKEVDYLLRNKWIPCVEFELEHGFVYREHGSTPGYYDGRYWTMWKLPLFGCTDSAQVLKEVQECKTEYPNAFIRIIGFDNNRQVQCISFIAYKPPSFTGA

SEQ ID NO: 3379 - protein, 304 aa, Glycine max
MANLPNSKLYGKEKMKGEQELEDEESFSRAMLLCSSVVVSMALQSATELGVFDVLQEAGAKLSAKEIASKLSCDNNPEADSMLDRLLALLASHSILNCSLILDHQNLGTFQRLYTITPVARFFARNSDGVSLGPLMALLQDKIFLHSWSELKDSIREGGIPFNRVYGTHAFEYPRLDARFNQVFNTAMINHTTIVMKKVLECYKGFENIKMLVDVGGGLGININLITSKYPHIQGINFDLPHVLEHAPSYPGVEHVGGDMFENVPKGDAIFMKWILHDWSDEYCLKLLKNCYDAIPDDGKVIVV

SEQ ID NO: 3380 - protein, 103 aa, uncultured Rickettsia sp.
IPQYIAKAKDKNDPFRLMGFGHRVYKNYDPRAAVLKETCKEVLKELEQLENNPLLQIAIELEAIALKDEYFIERKLYPNVDFYSGIIYKAMGIPSQMFTVLFA

SEQ ID NO: 3381 - protein, 267 aa, Saccharomyces cerevisiae
MSTSREDSVYLAKLAEQAERYEEMVENMKTVASSGQELSVEERNLLSVAYKNVIGARRASWRIVSSIEQKEESKEKSEHQVELICSYRSKIETELTKISDDILSVLDSHLIPSATTGESKVFYYKMKGDYHRYLAEFSSGDAREKATNASLEAYKTASEIATTELPPTHPIRLGLALNFSVFYYEIQNSPDKACHLAKQAFDDAIAELDTLSEESYKDSTLIMQLLRDNLTLWTSDMSESGQAEDQQQQQQHQQQQPPAAAEGEAPK

SEQ ID NO: 3382 - protein, 117 aa, Zea mays
NASGGAATAAALAANGTAPAGTAASAADSAVQALLQTCAAKYASARDALAGAGDSIALDDYDSASVHVSAAAEYPQVCRTLFRRQRPGQYPAELAAREETLGQLCSVSLDIIALLSS

SEQ ID NO: 3383 - protein, 496 aa, Schizosaccharomyces pombe
MSEDLFVSINFPNGKSVKQPIGLYINGEWHKSAETWETVDPSIEEVIAKVYLAGEKEIDYAVKSAKEAFKTWKKVPGSEKGELLMKLAELTEKHADTLAAIEAMDSGKPLVSNARGDVDGTIALLRYCAGWADKIYGQVIPTGPEKLAYAKRTPIGVCGQIVPWNYPLNMAGWKIAPALAAGNCIIIKSAETTPLSLLYFATLVEEAGFPKGVVNIISGLGTVAGSYMAKHPGIDKIAFTGSTKVGVIVQQLAASNLKAVTLECGGKSPFLVFEDADLDQAVKWAALGIMYNSGQICTSNSRIYVQDSVYDKFIELFKKHVIQDYIVGMPFDDNTVVGPVVNKTQYNRIKNYIEQGKKEGAKLVLGDEPLPLKQGYFISPTIFADCSENMTIVKEEIFGPVVAISKFKTEDEAIEKANNTTYGLAAMCFTKDLERAHRVSDELEAGMVFINSTENSDIQAPFGGIKMSGIGNELGSNGIEMYTQIKAVHINFNNKL

SEQ ID NO: 3384 - protein, 506 aa, Vibrio parahaemolyticus RIMD 2210633
MIYAQPGSENAIVNFKSHYDNFIGGEWVKPTGGEYFDNISPINGQAYCKVARSGEADINLALDAAHNIKAKWAKTSVTERSNILLKIADRIEQHLEELAVAETWENGKPVRETLAADLPLVVDHFRYFAGCIRAQEGSAAELDEHTASYHFPEPIGVVGQIIPWNFPMLMAAWKLAPALAAGCCVVLKPAEQTPTSILVLMEKIGDLLPPGVINVVNGFGSEAGQALATSNRIAKLAFTGSTQVGNHILKCAADNLIPSTVELGGKSPNIYFSDIFDYEDEYLDKCIEGTLLGFFNQGEVCTCPSRVLVHEAIYDKFVEKLTERAQLIKQGNPLDTDTQVGAQASQEQFDKILSYLEIGREEGAKVVFGGGVSEQPESISQGYYIQPTMLEGHNKMRIFQEEIFGPVIAITKFKDEAEALEIANDTEYGLGAGVWTRDANVAYRMGRNIEAGRIWINCYHAYPAHAAFGGYKKSGIGRETHKMMLDHYQNTKNLLISYSIDPLGFF

SEQ ID NO: 3385 - protein, 307 aa, Methanothermobacter thermautotrophicus str. Delta H
MLILNVNHMNITQGMGVAELIEEMGRSGVLGAGRVHRATKLLRGMIDDLEMAIFMSVAGPLVPGGMRRIIRDLIDDGTISALITSGANLTHDLLEAFGGAHYRDYGFDDEKLHQEGIGRIGDVYTRSEDFEVFESENQEIFSSIFSAKPHISIQELIHEIGGHLDDDMSIIRTAHLRGVPIYAPGLIDSMLGLQLWMYTQDNRICLDAVKDMHSLSDLVFSHERIGAIILGGGLPKHYTLASTLLRGGVDAAVQITMDRSETGSLSGAPLEEAKSWAKAQAGSNLVTVVGDATALFPVILAGALSEL

SEQ ID NO: 3386 - protein, 314 aa, Glycine max
MGAGDKTAAGMPRIGMGTAVQGPKPDPIRRAVLRAIEVGYRHFDTAAHYETEAPIGEAAAEAVRSGAVASRDDLFITSKLWCSDAHRDRVVPALRQTLRNLQMEYVDLYLVHWPVSMKPGRFKAPFTAEDFVPFDMRAVWEAMEECHRLGLAKAIGVANFSCKKLETLLSFATIPPTVNQVEVNPVWQQRKLREFCRGKGIQLCAYSPLGAKGTHWGSDAVMDAGVLQEIAASRGKSVAQVCLRWVYEQGDCLIVKSFDEARMRENLDVDGWELTEEEHRRIAEIPQRKINLGKRYVSEHGPYKSLEELWDGEI

SEQ ID NO: 3387 - protein, 178 aa, Triticum aestivum
  unsure (1)..(178): unsure at all Xaa locations
MSSSPSFGLLALAAVLLALNLAQHGSLAATVGPRVIVVGAGMSGISAAKRLSEAGITDLLILXEATDHIGGRMHKTXFAGINVXFRPNWGXRAXNGGKMNPSGPSSIHLKXRNFRSRLRLLAQNFYKEDXGXYDEDYXKKRMNWADXVEEWGKTLALSRSARQFIHRLTTQPTAARAC

SEQ ID NO: 3388 - protein, 386 aa, Listeria monocytogenes EGD-e
MKHVFPTYKRFPIDLVNGTGTVVTDKNGKTYLDFTSGIAVCNLGHCPTNVAEAVQQQLGNIWHTSNLYECALQDSVAELIADGKERLVFFCNSGTESNEAALKLARKYTGKEKIITFEKSFHGRTFGSMSATGQAKIHQGFGELVPGFTYVPYNDIEAFRAEIDENTAAVMLEVIQAEGGVIPANAAFLLEVQLLCKKMGALLIIDEVQTGLGRTGTLYGFEQIGLDPDIFTLAKGLGNGLPIGAMVGKSDLISAFGPGSHGSTFGGNKLALAAAKEILLTMKQTGFLEEVNAKADYFRNLLEANLEVLDNVSDIRGGGFLIGIELENAAEPVITELRDKGLLILTAGTNVLRILPPLTVSYAEIDQAIYLLKSVLENQLIGSEEG

SEQ ID NO: 3389 - protein, 504 aa, Bixa orellana
MESTGRAPLGNGRIGNPGGLVVPEIKFTKLFINGRFVDNVSGQTFDTRDPRTGDVLATIAEADKDDLDLAVKNAREAFDHGPWPRMSGYERARIMTKFADLVEAFIEELAALDTADAGKTLSMGKAVDIPAAVQIMRYYAGAADKLHGQPLKMNQDTQGYTLKDPIGVVGHIIPWNYPTMMFFLKNAPALAAGCTMVVKPAEQTPLSALFYAHLARMAGVPDGVVNVVPGFGPTAGAAVSSHMDVDSVSFTGSQEVGRAIMRAAAQSNLKNVSLELGGKSPVIIFDDADVDMAVSLSQLACFTNKGEICVATSRVYVQEGIYDALVKKIVEAAREWRFDTKANMGPQVDKKQFERVLKYIDLGKREGATLLTGGKTNGDKGYYIQPTIFLDVREDMNIAQDELFGPVMALMKFKTVDEAIQKANCTKYGLAAGIVTKELNLANTVSRSIRAGAVWVNCYFGFDPDAPFGGYKMSGFGKDRGVLAIDQYLKAKTVNTAIPNSPWY

SEQ ID NO: 3390 - protein, 310 aa, Zygosaccharomyces rouxii
MVTLQNSTSTLKLNTGQTIPQVGLGTWRSKENEGYKAVIEALKAGYRHIDGAAVYGNEGEVGKAIQDSGVPRNEIFLTTKLWCTHQRNPQEALDQSLQRLGLDYVGLYLVHWPVPLRTENIKDGNLFQFAEKPDGSKDVDLEWNFIKTWELMQKLLESGKTKAIGVSNFSVNNLKDLLAAPTTKVTPAVNQVEFHPLLPQEELIQYCSEKGIVIEAYSPLGGENAPILSDPTVQEIAKANGVEAGHVVISWAVQKGLVTLPKSVTPSRIVGNLKVLTLSDSDVAKVDGLLKAKGERRTCYQDFSPFPIFQ

SEQ ID NO: 3391 - protein, 294 aa, Listeria monocytogenes EGD-e
MTKTLQDRMILPGNGTIPYIGLGVFQVTEQEFIAGAVEKAIEVGYRLFDTAAVYNNEAIVGQAIASSAVSREELFISSKVWNGDLGYDETLFAFERTLRNLKLDYLDLYLIHWPVAGKYRDSWRAMERLHDEKLIKSIGVANFKQHHLSDLLVAANEKPVLNQVETHPLLPQNDLRKYLVEQNIAHAAWSPLAKGILMQNPVITEIAKKHQASVDQVILQWHLNRNTIIFPKSITSSRIEENSRLSYFQLDASDMEKIDRLETGKRVGPDPDDLEYFLSSIERERAYLASENEE

SEQ ID NO: 3392 - protein, 289 aa, Zea mays
MEIFVLLRFRLQDNIGGGKVLFQGKSDYQNVMVFQSSTYGKVLVLEGVIQVTERDECAYQEMITHLPLCSIKDPKKVLVIGGGDGGVLREVSRHTSVEQIDICEIDKMVVDVSKQFFPHLAVGFEDPRVSLHIGDGVAFLKNAPEGTYDAVIVDSSDPIGPAQELFEKPFFQSVARALRPGGVVCTQAESIWLHMHIIEDIFVNCRQVFKGSVNYAWTTVPTYPSGVIGFMLCSTEGPAVDFQHPVFNIEEDEHSTKSKGPLKFYNSEIHTASFCLPSFAKRVIESKAS

SEQ ID NO: 3393 - protein, 164 aa, Candida albicans SC5314
MSSPKVIIVSSDNEKFPVEPKIAEKSILIKNMINDLHPDGLEEDFEIPTPNVRANVLCKVLEWCEHHKNTVFQDDEDEDAKKSVPVEEWDRNFLKVDQEMLYEIILAANYLNIKPLLESGCKMVAEMIKSKSPEELRRTFNIINDFSPEEEAAIRKENEWAEDR

SEQ ID NO: 3394 - protein, 194 aa, Brassica napus
  unsure (1)..(194): unsure at all Xaa locations
STHASEKLEGAPSMLSSAXVATSPAQAPWMLPFTGCEVHHVAIPQRTPRIATLMLLLSQAAGGRVSCMKAXHPLGKRKLETLSYLPDLTGAEXGIEADYLVRNKRMTCVEXQLEHGFVYREHGSTPAILRWPVIDTMRKLPXCGCTDYAQVLNEVQESMTEDPSPSIKIIGYDNNRQEQRISLIDYKPPSLTAA

SEQ ID NO: 3395 - protein, 302 aa, Triticum aestivum
MKTLLIVTILAMATTIATANMQVDPGYQVHWPQQQPFPQPQQPFCQQPQQTIPQPHQTFHHQPQQTFPQPQQTYPHQPQQQFPQTQQPQQPFPQPQQTFPQQPQLPFPQQPQQPFPQPQQPQQQFPQSQQPQQPFPQPQQQFLQPQQPQQSFPQQQQPLIQLSLQQQMNPCKNFLLQQCNPVSLVSSLISMILPRSDCQVMQQQCCQQLAQIPQQLQCAAIHSVVHSIIMQQEQRQGVQIRRPLFQLVQGQGIIQPQQPAQLEVIRSLVLRTLPTMCNVYVSPDCSTINAPFASIVVGIGGQ

SEQ ID NO: 3396 - protein, 178 aa, Glycine max
MASSMISSPAVTTVNRAGAGMVAPFTGLKSMAGFPTRKTNNDITSIASNGGRVQCMHVWPPIGKKKFETLFYLADPDDAQLAKEGEYPLKKGWIPCLEIQVEHRFVYREHNRAPRYYHGRLWTMWKLAMFGCTDASQGVKELQEAKTAYPNGFIRIIGFDNVRQVQWINFIGYKPPGF

SEQ ID NO: 3397 - protein, 197 aa, Oryza sativa (japonica cultivar-group)
MASERVKGTVKWFDATKGFGFITPDDGGEDLFVHQSSLKSDGYRSLNDGDVVEFSVGSGNDGRTKAVDVTAPGGGALTGGSRPSGGGDRGYGGGGGGGRYGGDRGYGGGGGGYGGGDRGYGGGGGYGGGGGGGSRACYKCGEEGHMARDCSQGGGGGGGYGGGGGGYRGGGGGGGGGGCYNCGETGHIARECPSKTY

SEQ ID NO: 3398 - protein, 378 aa, Oryza sativa (japonica cultivar-group)
MDPYTSRAPASGGVAAGDDDEEAACLQAFELMCIFTVPMTLKAAIELGLLDALAAAGDGRALTADELAAARLPDAAPDKAEAASSVDRMLRLLASFDVVKCSTEAGPGGEPPRRRYSPAPVCRLFTAGGNSHRGSLAPSVLFGVDEDYLCTWRQLAAAVGGGGPSAFERAHGMRMFEYMGTNRRLNTLFNQAMAQQSMIVIDKLLDRFHGFDGVGVLVDVGGGTGATLEMITSRYKHITGVNFDLPHVISQAPSIPGVKHIAGNMFESISNIGDAIFLKMILHMQNDEDCIKILKNCHQALPDNGKVIAVEIVLPTIPDLAQTARYPFQMDMIMLSNSRGGKERTELEFAKLATDSGFSGALRTTYILANYWVLEFSK

SEQ ID NO: 3399 - protein, 162 aa, Triticum aestivum
  unsure (1)..(162): unsure at all Xaa locations
MAPSVMASSATTVAPFQGLKSTAGMPVARRSGNSSFGNVSNGGRIRCMQVWPIEGIKXFETLSYLPPLTVEDXLKAVXVPAPSNWVPCPDSSKGPVCPTVENHRXPGYYQRKYWTIWNCQGSVDRXTQXLKDPRRQKGSPILTVKLKLFNPKTPGSGEKPQK

SEQ ID NO: 3400 - protein, 214 aa, Listeria monocytogenes str. 4b H7858
MRFFIDTANVEEIKKANRMGFIAGVTTNPSLVAKEGRDFNEVIQEITSIVDGPISGEVVSLEADEMIAEGRVIAKIHPNMVVKIPMTGEGLAAVKVLTEEGIKTNVTLVFSATQALLAARAGATYVSPFLGRLDDIGDDGLVLIRDIADIFEIHGIPTEIISASVRHPIHVIECAKAGADIATVPFKVFEQMLKHPLTDSGIDKFLADWEAAKK

SEQ ID NO: 3401 - protein, 412 aa, Rickettsia hulinii
ELKIRGKIFKLPILKASIGEDVIDISRVSAEADCFTYDPGFMSTASCQSTITYIDGDKGILRHRGYDIKDLAEKSDFLEVAYLLIYGELPSGEQYNNFTKQVAHHSLVNERLHYLFQTFCSSSHPMAIMLAAVGSLSAFYPDLLNFKEADYELTAIRMIAKIPTIAAMSYKYSIGQPFIYPDNSLDFTENFLHMMFATPYTKYTVNPIIKNALNKIFILHADHEQNASTSTVRIAGSSGANPFACISTGIASLWGPAHGGANEAVINMLKEIGSSEYIPKYIAKAKDKNDPFRLMGFGHRVYKNYDPRAAVLKETCKEVLKELGQLDNNPLLQIAIELEAIALKDEYFIERKLYPNVDFYSGIIYKAMGIPSQMFTVLFAIARTVGWMAQWKEMHEDPEQKISRPRQLYTGG

SEQ ID NO: 3402 - protein, 371 aa, Oryza sativa (japonica cultivar-group)
MASGISRTPATGVTAGGGDDEEAAWLHALELISGFTVSMTLKAAIQLGLIDALTAAADGRALTAGELVAQLPAVDDAEAATSVDRMLRLLASFNVVRCSTEAGPGGDPLRRYSPAPVCRWFTAGDNHQGSLAPRLMLDVDEDNLSTWHQMAAAVVSGGPSAFERAHGMPLFEYMGTNHRFNMLFNQAMSQQSMMVMNKLLDRFHGFDGISVLVDVGGGTGVTLKMIISRYKHITGVNFDLPHVISQAPSLPGVNHVAGNMFESVPKGDAIFLKSMLLRNDEECIKILKNCHYALSDNGKVIVVDIVLPETPKPVPEAQNPLRMDVMMLNNLRGGKIRTEQEYAKLAMDSGFSGSFRTTYIFANFMAIELCK

SEQ ID NO: 3403 - protein, 105 aa, Lactococcus lactis
MLYGKENRDEAEFLEPIFGSESEQVDLPKYKLAQQSIEPRVAYQLVQDEMLDEGNARLNLATFCQTYMEPEAVKLMSQTLEKNAIDKSEYPRTTEIENRCVNMIA

SEQ ID NO: 3404 - protein, 120 aa, Davidia involucrata
MGRSGVVIKVGIVAVLMCMVVSAPHAEAAITCGTVTVSLAPCLNYLKKGGPVPPACCNGIKSLNAAAKTTADRQAACNCLKTASTSIAGINLSYASSLPGKCGVNVPYKISPSTDCSKVQ

SEQ ID NO: 3405 - protein, 267 aa, Oryza sativa (indica cultivar-group)
EPHDYIGLSAAAASPTPSSSSCSSSPNPGGEARGPRLTLRLGLPGSESPEREVAAAGLTLGPLPPTTTKAASKRAFPDSSPRHGASSGSVAAAAAACQDKAAPAAAPPAAKAQVVGWPPVRNYRKNTLAASASKGKGEDKGTAEGGPLYVKVSMDGAPYLRKVDLKMYSSYEDLSMALEKMFSCFITGQSGLRKSSNRDRLTNGSKADALQDQEYVLTYEDKDADWMLVGDLPWDLFTTICRKLKIMRGSDAAGIAPRSIEQSGQSR

SEQ ID NO: 3406 - protein, 289 aa, Oryza sativa (japonica cultivar-group)
MLRLLASCNVVKCSTEAGPAGEPLRRRYSPAPVCRWFTAGGNSHHGSLAPSVLFGIDEDYLSTWHQLAAAVGGGGAVAFERAHGAPMFEYMGTNRRLNTLFNQAMAQQSMIVINKLLDRFHGFDGVGVLVDVGGGTGGTLEMIMSRHKHITGVNFDLPHVISQAPSLPGVKHVAGNMFESIPNGDAIFLKSILHLQNDEDCIKILKNCHQALSDNGKLIAVEIVLPAIPEPVPTAQYPFQMDMIMLNNFRGGKERTELEFTKLAMDSSFSGTLRTTYIFANYWALEFNK

SEQ ID NO: 3407 - protein, 176 aa, Gossypium barbadense
LFSFILILTHFLLKSSIRIQVLGWICVAISVSVFAAPLNIMARVIRTESVEFMPFTLSFFLTLSAVMWFAYGLFIKDLCVALPNVLGFILGMLQMLLYAIYRHSEKVNIEEKKLPAEQMKSINVVLTTLGASEVHPVVLDIHTDDTKEEDNKNNEPTGEPDKQTDVKMEDANESPV

SEQ ID NO: 3408 - protein, 157 aa, Lactococcus lactis
FVDPELEWDFRLKNVISINTSGHKYGLVYTGVGWVLWRDKKYLPEELIFKVSYLGGELPTMAINFSHSASQLIGQYYNFVRYGFDGYKAIHERTHKVAMYLAEEIEKTGMFEIMNDGSQLPIVCYKLKENSNLGWNLYDLADRLFNEGMASACLSTS

SEQ ID NO: 3409 - protein, 195 aa, Sinorhizobium meliloti 1021
MSSSNFQRKRPVARDRKGNPSIDAMTTFQGTAMCDLFVRNATVVTEERTFDGGISVSNGRIDELVVGQRDIAAARQIIDASGLLLLPGLVDAHVHFSEPGRGHWEGFETGSRAAAAGGITTFVEMPLNAQPATIDAAALVMKKAAAKQSHIDYALWGGLVDDNLDDLADLRRGGVVGFYRERHCRGGGRGLAGAT

SEQ ID NO: 3410 - protein, 387 aa, GIBBERELLA ZEAE PH-1
MPRLPFPAFKSLVIQPLRITPTAINRSYYSTMMRAARYYGREDIRVEQVPQPSVKAGQVKVAPAFVGICGTDLHEYLGGPNFCPTTPHPITKESIPVTLGHEFSGIITEVGPDVEGFEVGQPCAIQPTLFCGHCAACHNHAENVCHSGGFIGLSGSGGGLSESVCVNATHVHPLPQDLPLEIGALVEPLSVSWHAMTAAPDINPDSRVVILGGGPIGLAMILCLKAKGVDEIIVSEVATSRQKFARELGATWVVNPIEENLNEIVLALTEGKGADVVFDCAGVPMSIKSACEVVRPKGTVVNLAIWEKEIPFNPNWITMKESSYKSVLGYTHKDFQAVIANLASGAIKPSQMITRKIKLENIVEDGIKALIHDKNNQVKVLVDMSDR

SEQ ID NO: 3411 - protein, 317 aa, Methanosarcina mazei Go1
MDFGASAKNLSTPVKGAKIVPNMTVDELVKEYAGCAFGAGRLAEAVDIYYEMLASGKTTKFFGLAGAMTPAGMRNIIADLIRDGYIDVLVTTGANMVHDTVEALGLHHYKGSDCANDIQLRHECIDRIYDVYLPDQHFTDLEEFLQGVYSGLPQENLSIRQVLTEIGKNLDDDSSILKTAAEMGVPVYCPALQDSVIGLQAWLYKEGNPLHVDAFADMHEFMDICYGAESAGTMLLGGGVPKNYILQSMLVTPRSFDYAIQLTMDRPETGGLSGATLDEAQSWGKVGEDAKSVTVYADSTITLPLIVSAVRTRLSKR

SEQ ID NO: 3412 - protein, 125 aa, Triticum aestivum
MAETAVIAPPPQPMAPPQPVEENATAAPSQPMAPLQPMAESATAAPPPPNATQQPMVENATVVVVVPPPPPDGTTTFLCLILAFFIPPLGVFLKYKCEIEFWICLILTFLAYAPGIIYAVWVIVK

SEQ ID NO: 3413 - protein, 386 aa, Gloeobacter violaceus PCC 7421
MAKHRFLAGKKIDPQPIGAGISVSALIDNTFLAYNAGRLREAARLLVERMLRPGVTVGVTLSGALTPTGLGMAAIIPLMEAGFIDWIISTGANLYHDTHHGIGLDLRRGRADISDVVLREEGVVRIYDIFFDYDVLLSTDRFFREIFKAPEFQAAMGTAEFHYLAGKYIAERERQLGLENKSLLAAAYRLGVPIYTSSPGDSSIGMNIAAMALDGKGPRLDVSLDVNETAAIVLDAKRSGGESGVWILGGGSPKNFMLQTEPQIQEVLGIQEKGHDYFLQVTDARPDTGGLSGATPSEAVSWGKVDPDRLPDTVVCYVDSTIALPLLTAYALDNAESRPLKRLYDRRGEVMAKLKAEYEAAQAAGGRDHNVGEPAPEHISSQAAGR

SEQ ID NO: 3414 - protein, 336 aa, Triticum aestivum
  unsure (1)..(336): unsure at all Xaa locations
MKTLLILTIIAVALTTTTANIQVDPSGQVQWPQQQQPFPQPQQPQQIFPQPQQTFPHQPXQQAFPQPQQTFLHQPQQQFPQXPQQPQQPFPQQPQQQFPQPQQPQQPFPQQPQQQFPQPQQPQQPFPQPQQPQLPFPQQPQQPFPQPQQPQQPFPQLQQPQQPLPQPQQPQQPFPQQQQPLIQPYLQQQMNPCKNYLLQQCNPVSLVSSLVSMILPRSDCKVMRQQCCQQLAQIPQQLQCAAIHGIVHSIIMQQEQQQQQQQQQQQQQQQGIQIMRPLFQLVQGQGIIQPQQPAQLEVIRSLVLGTLPTMCNVFVPPECSTTKAPFASIVADIGGQ

SEQ ID NO: 3415 - protein, 255 aa, Phytophthora infestans
MSVNVPTKILPSGARIPMIGLGVYQSEPGPETYNAILTSLKLGYRHIDTAEIYGNEEDVGRAVRDSGIPREEIFVTTKLFTTNWGYSKALAAGKASNDRLGIVYIYLYLLHAPGPPKERADTWRAVEDLREQETLRDIGVSNFNETLLATLRKTAHIKPAVNQVELHPWMMRQSLVNYQDGRPCLGLYCRRDRSYTRPSAGGVRRRQRIRDAAHRDRLKSNLESVKLKVTPEQVVKLASPDSYLRTAGCDQDRVM

SEQ ID NO: 3416 - protein, 513 aa, Glycine max
MIAYLEHFVHGNDTESMPNDDVSALDGAFHFGATAAAGKDFGGMKSVKPRAVIRPALAGDVERAVKEAARTTYLTVAARGNGHSINGQAMAEKGLVLDMRAMEDHFTLLSLDDGSLYVDVSGGALWEDVLKRCVSEFRLAPRSWTDYLGLTVGGTLSNAGVSGQAFRYGPQTANVTELEVVSGKGETLVCSESQNSELFFATLGGLGQFGIITRARVPVQQAPDMVRWIRVVYTEFGDFTRDAEWLVTLREGDGFDYVEGFVFVNSDDPCNGWTTVPVGPNQYFDPVRIPSTAGPVLYCLELALHYRNQDHPSAVDMEVDRLLGRLRFVEGLKFSVDVTYMEFLLRVKRVEEDAKANGIWDAPHPWLNMFVSKSNIAEFDREVFKKILKHGVGGPILVYPLLRSKWDSRHSVVVPDSNIFYIIALLRFIPPPPKGPPTELLVEQNHEIIQLCYNRGFDFKLYLPHYQSKENWMRHYGDKWSRFVERKANFDPLAILAPGQKIFSRIPQPLSIT

SEQ ID NO: 3417 - protein, 348 aa, Oryza sativa (japonica cultivar-group)
MVEQLRREISIMRMVRHPNVVGIREVLASRARVFVVMEYARGGELFAKVARGRLTEEHARRYFQQLVAAVGFCHGRGVAHRDLKPENLLLDEEGRLKVTDFGLAALPEQLRQDGLLHTQCGTPAYVAPEVLRKRGYDGARADLWSCGVVLYVLLCGFLPFQHENYAKMYQKIFKAEYQVPPWVSGDARRLIVRLLVVDPAKRISIPEIMRTPWFKKGFVPPVPTSPVSPKKWEEDDVLLDGGDSGAMSPRTCNAFQLISSMSSGFDLSGMFESEQKAATVFTSRAPAATVIQKLEAVGRSLGYSATRGKGWKLRLEATASVQRDVKSVGCISFSFFARGYVQAKSRDV

SEQ ID NO: 3418 - protein, 456 aa, Oryza sativa (japonica cultivar-group)
MARRAREEEADQVERKLVLGRYELGRLLGQGTFAKVYYGRDLRSGESVAIKVIDKARLRRTEGMVEQLRREISIMRMVRHPNVVGIREVLASRARVFVVMEYARGGELFAKVARGRLTEEHARRYFQQLVAAVGFCHGRGVAHRDLKPENLLLDEEGRLKVTDFGLAALPEQLRQDGLLHTQCGTPAYVAPEVLRKRGYDGARADLWSCGVVLYVLLCGFLPFQHENYAKMYQKIFKAEYQVPPWVSGDARRLIVRLLVVDPAKRISIPEIMRTPWFKKGFVPPVPTSPVSPKKWEEDDVLLDGGDSGAMSPRTCNAFQLISSMSSGFDLSGMFESEQKAATVFTSRAPAATVIQKLEAVGRSLGYSATRGKGWKLRLEATADGANGRLAVTVEALEVAADVAVVEFAHDAGDELEFNKFCAVDVRPGLADIVWAWQGDRPAAPDVAAATVECSPA

SEQ ID NO: 3419 - protein, 341 aa, Escherichia coli O157:H7 EDL933
MKALSKLKAEEGIWMTDVPVPELGHNDLLIKIRKTAICGTDVHIYNWDEWSQKTIPVPMVVGHEYVGEVVGIGQEVKGFKIGDRVSGEGHITCGHCRNCRGGRTHLCRNTIGVGVNRPGCFAEYLVIPAFNAFKIPDNISDDLASIFDPFGNAVHTALSFDLVGEDVLVSGAGPIGIMAAAVAKHVGARNVVITDVNEYRLELARKMGITRAVNVAKENLNDVMAELGMTEGFDVGLEMSGAPPAFRTMLDTMNHGGRIAMLGIPPSDMSIDWTKVIFKGLFIKGIYGREMFETWYKMAALIQSGLDLSPIITHRFSIDDFQKGFDAMCSGQSGKVILSWD

SEQ ID NO: 3420 - protein, 171 aa, Candida albicans SC5314
MGNELLSTARIYTFKIPDAYNNVIDFDQFKNKVILIVNVASLCGFTPQYKELQLLYEKYHERGLEILGFPCNQFGNQEPLQEEEIVESCRRNFGVSFPIMKKTKVNIDCDGHESELYKYLKSEKPGEVGFKGVRWNFEKFIVNRKGEVVARFNSLITPLQLEGFIEQLLSE

SEQ ID NO: 3421 - protein, 92 aa, Zea mays
MTMTSRFVAAASSSSSSCPLARLISRRGLAGAADGHGPAKVPLWKDPLSPSKWKEEHFVLASLSMWGALFYGGFKFFGGKKEDKIEVASGQT

SEQ ID NO: 3422 - protein, 405 aa, Thermoplasma acidophilum
MAYIQVKDDGTLQVPDRVTIGYIEGDGIGPDISKTTINVLNAALEIAYGGKRSIEWKKILAGDEAYDKTGDRLPQSSLDELKKCVVALKGPLTTPIGEGFRSLNVTLRQYLDLYANIRPVRYFPGVPSPVVHPEYMNMVVFRENTEDLYAGIEWRYDSDGPKKVREFLASTFNINLTADTGIGIKPISKFKSTRLVRKAIQYAIANKRKSVTLVHKGNIMKYTEGAFKEWGYEVAKTEFGNYTVTETEYLQDPEKYSNKIVIKDRITDNMFQQVLTRTQEYDVIATPNLNGDYLSDALAAQVGGIGLAPGANIGDHYAVFEAVHGTAPKYAGMDVANPTSLILSGEMMLQHIGWNEAANILDEAIMQTYKDQKLTQDIARLLNVKALKCSEFGEEIINRMKKPVH

SEQ ID NO: 3423 - protein, 307 aa, Pseudomonas aeruginosa PAO1
MTSKLEQLKQYTTVVADTGDFDAIARLKPVDATTNPSLLLKAAALPRYAEHLRQATAGSGGDAGLACDRFAVAVGKDILGVIPGRISTEVDARLSFDSEATLARAHRLIELYDEQGIDRERVLIKIASTWEGIRAAEILEREGIQTNLTLLFSFAQAVACADAGVFLISPFVGRIYDWYKKSENRDYAGAEDPGVQSVSRIYRYYKANGYKTVVMGASFRNLGQIEQLAGCDRLTISPDLLQQLADAQGELPRLLLPGEGEPRQVLDESAFRWQMNEDAMATEKLAEGIRLFARDQEKLEYQLATRH

SEQ ID NO: 3424 - protein, 339 aa, Ustilago maydis 521
MAANIPSFTLNTGAKLPSVGMGCWQGQPGPGRDNELVDALVRAIKVGYRHLDTATGYRNEAEVGQAVRQSGVARSEIFVTTKLRPGGVHDVVQELENSLNELGIDYIDLWLLHWPQGFTKDDGGFGTGESFGLEHQKHLGPTFNETWAKMEDVFLNSHKGKVKAIGVSNFSIKNLEILAKTSKVTPAVNQIEAHPYLPEHELVKYCKHKSIHVTAYSPLGQYNASIHEDKDLNEIAKKHDVTAATVALSWAVQRGTSVAPKSTNEKRMKQNITLIKLTDEEMKQVDVISQDPTRSTRLNYFVVNKETGTVLGWTMDEMGWEVGFLEEPGKSTKRIAERK

SEQ ID NO: 3425 - protein, 381 aa, Staphylococcus aureus subsp. aureus MRSA252
MLTEQEKDIIKQTVPLLKEKGTEITSIFYPKMFKAHPELLNMFNQTNQKRGMQSSALAQAVMAAAVNIDNLSVIKPVIMPVAYKHCALQVYAEHYPIVGENLLKAIQDVTGLEENDPVIQAWAKAYGVIADVFIQIEKEIYDQMMWIGFKPFKITNIKQESEDIKSFTVETDAYDFSQYVPGQYITVDVSSDKLPYRAKRHYSIVSGDKNHLTFGVKRDVTTEHEGEVSTILHDEIKEGDMINLAAPVGGFVLENTTEPQLFLGSGIGVTPLVAMYEAASAKGLDTQMVQVAENEQHLPFKDNFNSIANHYDNAKLYTHLKGEQGYIGAEELKAFLANKPEIYICGGTKFLQSMIEALKSLNYDMDRVHYETFIPRLSVVV

SEQ ID NO: 3426 - protein, 455 aa, Mycobacterium tuberculosis H37Rv
MSTTQLINPATEEVLASVDHTDANAVDDAVQRARAAQRRWARLAPAQRAAGLRAFAAAVQAHLDELAALEVANSGHPIVSAEWEAGHVRDVLAFYAASPERLSGRQIPVAGGVDVTFNEPMGVVGVITPWNFPMVIASWAIAPALAAGNAVLVKPAELTPLTTMRLGELAVEAGLDEDLLQVLPGKGTVVGERFVTHPDIRKIVFTGSTEVGKRVMAGAAAQVKRVTLELGGKSANIVFHDCDLERAATTAPAGVFDNAGQDCCARSRILVQRSVYDRFMELLEPAVHSIVVGDPGSRATEMGPLVSRAHRDKVAGYVPDDAPVAFRGTAPAGRGFWFPPTVLTPKRGDRTVTDEIFGPVVVVLTFDDEADAISLANDTAYGLSGSIWTDDLSRALRVARAVESGNLSVNSHSSVRFNTPFGGFKQSGVGRELGPDAPLQFTETKNVFIAVGEEM

SEQ ID NO: 3427 - protein, 279 aa, Crocosphaera watsonii WH 8501
MPFIQWYPGHIAKAERQLKEQLNRVDVIFEVLDARIPLASHHPDVPGWIGDKPRLVVLNRTDMIPESVRQGWLNWFAAQGETLYCTNAKQGKGIKALKKAAQAAGVQMNERRQQRGMRPRAVRAVVIGFPNVGKSALINRLLGRKVAASARRAGVTRQLQWIRISDALELLDAPGIIPAKLENQEDAVKLAICEDIGEAAYDNQQIGAALIDLLVELNFDNILSSRYQLDPQNITGEEYIESLGNSKFKGDTERATMQLLNDFRKGVMGKIPLELPQLI

SEQ ID NO: 3428 - protein, 323 aa, GIBBERELLA ZEAE PH-1
MSSALDQLKATGTTVVSDSGDFASIGKYKPQDATTNPSLILAASKKEEYAKLIDVAIDYAKQKGGSVDQQVDDALDRLLVEFGKEILKIIPGKVSTEVDARYSFDTEASVNKALHLIELYGEQGISKDRILIKIAATWEGIKAAEILQRDHGINTNLTLMFSLVQAIGAAEAGAYLISPFVGRILDWFKASTKKEYTKEEDPGVLSVKQIFNYYKKFGYNTIVMGASFRNTGEITELAGCDYLTISPNLLEDLLNSSDSVPKKLDASQASSLDIEKKSYIKDEALFRFDFNEDQMAVEKLREGISKFAADAVTLKGILKEKLS

SEQ ID NO: 3429 - protein, 497 aa, GIBBERELLA ZEAE PH-1
MGSRMTPEAIKPVMLIDGQANACLIQLVGASDGNSFPLFNPATGEKVADVPEATEDDTNRAVAAAQRAFPEWSAMDPAKRGSYLKKLASLIKEHNEELALLEAKSMGRPLAEFFEGHIAASSYEHYAEAWPHIQGQASLNTPGYVTMTLRQPFGVVAAIIPWNASLLFFASKSAPALIAGNTVVVKSSEKAPLGAAKFAELIHKAGFPPGVFNVLSGHGNPSGATLASHMDVRAISFTGSSPTGRAIQEAAAKSNLKKVILELGGKSPVIIFDDADLEQAAKDTMYSIQWNSGQVCMANSRVYVQDSIADNFIQACKKALSAAKSGNPTEKGINHGPQADKVQYEKVMSYINEGKKSGTLELGGNGNLDKTGGFFVEPTIFLNTPEDAKVMKEEIFGPVVNINVIKTEEEAIEKANDTEYGLYAAVYTKNVDRAMRVTQKLNSGYVGINCTSPTTARDLPFGGYKSSGQGREGWLYSLDNFLEVKSVMMKVDSGSKL

SEQ ID NO: 3430 - protein, 466 aa, Sinorhizobium meliloti
MDTRPEPFEPPAPVPRTGIPSRLEIIRTVLRNPLELWGEPSYTLPWIETKFINQRTLIVNDPGLIRYILVENAANYEMSNVRRLILRPILRDGLLTAEGEVWKRSRKAMAPVFTPRHAQGFAGQMLRVCEAFVDRYAGASSEPFVTNVAVDMTELTFEILAETLFSGEIAVEKQGFAANVEELLHRMGRVDPMDLLVAPSWVPRLTRIGGRKVLDRFRGVVSETMSLRRRRTTEAPGDVPNDFLTLLLQLEGPDGLSTSEIEDNILTFIGAGHETTARALAWCFYCVANTPAYRETMEQEIDSVLASGADPVDWLGRMPHVLAAFEEALRLYPPAPSINRAAIEEDAWTSPEGERVPIRKGISVLVMPWTLHRHALYWQKPRAFMPERFLPENRDKINRFQYLPFGAGPRVCIGATFALQEAVIALAVLMHRFRFDLTDETHPWPVQRLTTQPRGGLPMKVSARVK

SEQ ID NO: 3431 - protein, 205 aa, Populus euramericana
TFDVNTKTGGPFGTIRHPDELAHGANNGLDIAVRLLEPLKEQFPNLSYADFYQLAGVVAVEITGGPEVPFHPGRPDKSDPPPEGRLPDATKGSDHLRDVFGHMGLSDKDIVALSGGHTLGRCHKERSGFEGPWTPNPLVFDNSYFKELLSGEKEGLIQLPTDKTLLEDPVFRPLVEKYAADEDAFFADYAEAHMKLSELGFAEAY

SEQ ID NO: 3432 - protein, 226 aa, Triticum aestivum
  unsure (1)..(226): unsure at all Xaa locations
WYYLKDAVLDGGIPFNKAHGMSAFEYHGTDPRFNRVFNEGMKNHSIIITKKLLELYKXGFNGLDTLVDVXXXGIGATVGAITAHYPTVKGINFDLPHVISEAPPFSGVTHVGGDMFQKIPSGDTILMKWILHDWSDEHCATLLKNCYDALPAHGKVVLVECILPVNPEATPEAQGGFHLDMIMLAHNPGGRERYEREFEALAKGAGFGAIKTTYIYANIWVIEFTK

SEQ ID NO: 3433 - protein, 434 aa, Exiguobacterium sp. 255-15
MLARAVEYLEKDEQANVEFVFWVNPDYIGEYDARQQYFFQALEHFAKNCKTHDMPIRFIEGQEKDFLEATEMADVLLFNAEYVEPFKSRDDGIMKKRGDKKTERLLDRHLLHPHAVKKNDGSYYKVFTPYKNAFLKKDVDKPYPVKLNLLKERYHKRRQNNAFMLDYFKRAASDTDFAVGEETARKRLRSFLKNNLSAYEEQRDLPAVDGTSLMSRYLRTGEIGIRTIFDAVQQEQDSKGKQTYLTELIWREFYYTILMHYPESKRLPVNEQYTKIEWETDEKGFKAWAEGKTGYPIVDAAMRQLNTTGWMHNRLRMIVASFLTKDLLVDWQKGERYFQQKLVDYEAASNIGGWQWAASVGTDAVPYFRVFNPTTQSKKFDKDGTFIRTYLPELKDLPKTSIHEPTEQQRKDYDYPMPIVEHDMARKRAIARFK

SEQ ID NO: 3434 - protein, 268 aa, Triticum aestivum
  unsure (1)..(268): unsure at all Xaa locations
RRFLIFVLAMTMSIITTARQLNPSEQELQSPQQPVPKEQSYPQQPYPSHQPFPTPQQYSPYQPQQPFPQPQQPTPIQPQQPFPQRPQQPFPQPQQQLPLQPQQSFPQPQHPIPQQPQQSFPQQPQRPEQQFPQQPQQIIPQQTQQPFPLQPQQPFPQQPQRPFAQQPEQIISQQPFPLQPQQPFSQPQQPFPQQPGQIIPQQPQQPSPLQPQQPFSQXQPQRPQQPFPQQPTTINSSGTHNKPFPLQPXQPGPQTNKKDHFGQQPKTN

SEQ ID NO: 3435 - protein, 341 aa, Schizosaccharomyces pombe
MSQTTTETIIPLDSSVKDKLDPEYVNFYNKYVCSNLPIVKTHTYPVDFLRNNGNVMPGQSELLPVESTEDITIPRKHTKAPSGVPSRIFRPHGTAPEGGWPCFLWFHGGGWVLGNINTENSFATHMCEQAKCVVVNVDYRLAPEDPFPACIDDGWEALLYCYENADTLGINPNKIAVGGSSAGGNIAAVLSHKVAASPANFPPLVLQLLVVPVCDNTANAKTHKSWELFENTPQLPAAKMMWYRRHYLPNEKDWSNPEASPFFYPDSSFKNVCPALICAAGCDVLSSEAIAYNEKLTKAGVESTIKIYEGCPHPVMAMDAVLEKGRILNKDATNALLAAFA

SEQ ID NO: 3436 - protein, 112 aa, Populus deltoides x Populus maximowiczii
TFVGKKWFVTYHAYAMGRMESIWGKNCRDFVPERWLENGIYRQESPFKFPVFHAGPRMCLGKDMAYIQMKSIAASVIERFEIDVQNKEKCPDHLLSLTLRMKGGLQVKVKER

SEQ ID NO: 3437 - protein, 490 aa, Zea mays
MAREQLEESIVADGNGKEEEVGVMGIGAADGADDQHGGGKLSMKSLLWHGGSVWDAWFSCASNQVAQVLLTLPYSFSQLGMLSGVLLQIFYGFLGSWTAYLISVLYVEYRSRKEKEGVSFKNHVIQWFEVLDGLLGPYWKAAGLAFNCTFLLFGSVIQLIACASNIYYINDRLDKRTWTYIFGACCATTVFIPSFHNYRIWSFLGLGMTTYTAWYLAIAALLNGQAEGVAHSGPTKLVLYFTGATNILYTFGGHAVTVEIMHAMWKPAKFKYIYLLATLYVFTLTLPSSAAMYWAFGDELLTHSNAFSLLPKTRWRDAAVILMLIHQFITFGFACTPLYFVWEKVIGMHDAKSIFKRALARLPIVVPIWFLAIIFPFFGPINSAVGALLVSFTVYIIPALAHVLTYRTASARMNAAEKPPFFLPSWTGMFVLNMFIVVWVLVVGFGLGGWASMVNFVRQIDTFGLFAKCYQCPKPPVPAAAQSPAPLPHH

SEQ ID NO: 3438 - protein, 373 aa, Thermosynechococcus elongatus BP-1
MGSWPSWDCSASSCNGWPNPWGSAMKAAVLYGKEDVRIETVPDPTPGPGEVVIRVRAATTCGTDLKVWRRGGHARMLTPPILFGHEAAGEIVALGAGVTGWQVGDRVVANNSAPCGQCFYCQRQAFSLCPHLEFNNGTFAEYLKLPASIVRQNLLPIPESLPFALAALTEPLACVLHGVARSGFDPAMVATWPSPPQIVVLGDGAIGLMFVGVLAQQGARVLAFGGSNQRLAIATTFGAEQTINHHQCGDIPAVVKDWTEGRGADIVIEATGVPEVWETAIACGRPGATINLFGGCPRETTIRVDTERLHYEELTLKGVFHNTPSFVRQALQLIASGTLPFEKLISGQAPLMEIETVLQAMKARQVIKVALQP

SEQ ID NO: 3439 - protein, 251 aa, Zea mays
MAAKCYPTVSDEYLAAVAKAKRKLRGFIAEKNCAPLMLRLAWHSAGTFDVATKTGGPFGTMKCPAELAHGANAGLDIAVRLLEPIKEQFPILSYADFYQLAGVVAVEVTGGPEVPFHPGRQDKPEPPPEGRLPDATQGSDHLRQVFSTQMGLSDQDIVALSGGHTLGRCHKERSGFEGAWTANPLIFDNSYFTELLSGEKEGLLQLPSDKALLSDPSFRPLMQRYAENEDVIFAEYAEARLKLSLWGFGQV

SEQ ID NO: 3440 - protein, 177 aa, Plantago major
MASSMLSTSSTAVAGRAQATMVAPYAGLKSTSVFPATRKTGNAKLARNAGKVRCMQVWPPLGKKKYETLSYLPDLTVEQLAKEIDYLLRSKWIPCLEFELEHGFVYRENNRSPGYYDGRYWTMWKLPMFGCTDASQVIAELEECKKEYPNAWVRIIGFDNVRQVQCISFIAAKPPGL

SEQ ID NO: 3441 - protein, 285 aa, Zea mays
  unsure (1)..(285): unsure at all Xaa locations
MLWKEADSKPDWVKDLDVVGENFEERWLKASKRSAAKKLSKLSRSHNESLLWIKKIPDIIAIDDEIYSNDDDPERWDMQIFRSIDSNSVKGFPKDPREATSKNLVFGKNVLIDMSVHTAYVNVIRGAQHFIYIENQYFLGSSFNWDSHRDVEXTMQMMYEIIYKALKEVGLDGTYEPQDYLNFFCLGNREAEDTTCTSSGPFSASNPQDQARKNRRFMVYVHSKGMIVDDEYVIIGSANINQRSMEGTRDTEIAMAAYQPQHTWANMLSAPRGQIFGYRKIQCTC

SEQ ID NO: 3442 - protein, 404 aa, Oryza sativa (japonica cultivar-group)
MEGKGVLEGRYEMGRVLGHGNFGRVHAARDVRTGRAVAMKVVSKDKVERAGMAEQIKREIAVMKMVSHPSVVELHEVMATRTKVYLALELVRGGELFDRIARHGRVGEGVARRYFRQLVSAVDFCHGRGVYHRDLKPENLLLDEAGNLKVADFGLSALACHARPDGLLHTACGTPAYVAPEVLAGNGYDGAKADLWSCGVILYVLLAGALPFQDDNLVCMYRKMRRGDFCCPPWVTTDARKLIKSLLDPNPGTRITVAGLLETPWFRKTAPVPRPIIADPAAAPVDTRGNAGDDKDEPPEVLNAFHLISLSEGFDLSPLFEHDPAASPGRATARAGGTRFATREAASGVVARLEALAMGGARVAPSLLMVDVKKDGGDAMEYRPFFSEELRPALKDIVWSPAAT

SEQ ID NO: 3443 - protein, 242 aa, Zea mays
FGSRWPEGVPTAASVQEILFFQAQTMEMMYKIIADELKATDNKDMHPEDYLNFFCLGNREEPPSNGSPESEKSTDKSAAALASKYRRFMIYVHAKGMIVDDEYVILGSANINQRSLAGSRDTEIAMGAYQPHYAWSTKNGHPHGQVYGYRTSLWAEHLGTVDDRFKDPSSLECVRFVNQIAVENWQRFTAEEMSTLQGHLLKYPVKVEADGKISPLSDQECFPDVGGKILGAPTSLPDSLTM

SEQ ID NO: 3444 - protein, 84 aa, Glycine max
MEYQRQRSHQSQGRSRWVPASYFSFESLLLLSCLTASLLILPLLLPPLPPAPFLLLLLPIAILLVLIISAFMPSNVRDITQKKK

SEQ ID NO: 3445 - protein, 486 aa, Bacillus firmus
MNSGVHVGNSDSLKAVWFRRDFRLHDHTALKHAIEAIEKHGGKWLAFFYLDPKTASVEPVHHDYFFQTVMQFKQMLKTNGGDLYIITGTIEGGQLSKLLQAFPEIDAVYANDDRVGDGRLRDEAAEHFLAKQSIPFYTFEDAYLTEPDQVLKKDGTPYKVFTPYYKAWAKERKRTPAVIKRDVLLGSVHKGTAPDREAETLFNNLIKKCSYDWSAIGEEHAIKRLQMFTKKRLSGYKANRDFPSITGTSRLSPYIKTGAVSSRSIYYHILNAEADSYSAETFLKELAWRDFYRMVHFYEPDCKDREIMEGYRELNWSHDQDDLTSWKRGETGFPIVDAGMRQLLNEGWMHNRLRMITASFLTKDLLIDWRLGERYFERMLIDYDPSSNIGGWQWAASVGTDAVPYFRIFNPVTQSKRFDENGTYIRTYIPELNHVPDHYIHEPWKMSEEEQVKYKCRLDEDYPLPIVDHSKQRKKALSFFKGDDEE

SEQ ID NO: 3446 - protein, 240 aa, Zea mays
GVAMEGDDDGPEWMMEVGGAGATGKGKGGALDKNKKRFSEEQIKSLESMFATQTKLEPRQKLQLARELGLQPRQVAIWFQNKRARWKSKQLERDYSALRDDYDALLCSYESLKKEKHTLLKQLEKLAEMLHEPRGKYSGNADAAGAGDDVRSGVGGMKDEFADAGAAPYSSEGGGKFAHFTDDDVGALFRPSSPQPSAAGFTSSGPPEHQPFQFHSGCWPSSTEQTCSSSQWWEFESLSE

SEQ ID NO: 3447 - protein, 498 aa, Oryza sativa (japonica cultivar-group)
MATCAADLAPLLGPVAANATDYLCNRFADTTSAVDATYLLFSAYLVFAMQLGFAMLCAGSVRAKNTMNIMLTNVLDAAAGALFYYLFGFAFAFGTPSNGFIGKQFFGLKHMPQTGFDYDFFLFQWAFAIAAAGITSGSIAERTQFVAYLIYSAFLTGFVYPVVSHWIWSADGWASASRTSGPLLFGSGVIDFAGSGVVHMVGGVAGLWGALIEGPRIGRFDHAGRSVALKGHSASLVVLGTFLLWFGWYGFNPGSFTTILKTYGPAGGINGQWSGVGRTAVTTTLAGSVAALTTLFGKRLQTGHWNVVDVCNGLLGGFAAITAGCSVVDPWAAIICGFVSAWVLIGLNALAARLKFDDPLEAAQLHGGCGAWGILFTALFARQKYVEEIYGAGRPYGLFMGGGGKLLAAHVIQILVIFGWVSCTMGPLFYGLKKLGLLRISAEDETSGMDLTRHGGFAYVYHDEDEHDKSGVGGFMLRSAQTRVEPAAAAASNSNNQV

SEQ ID NO: 3448 - protein, 189 aa, Glycine max
  unsure (1)..(189): unsure at all Xaa locations
MAINHETWAFVFGLLGNVISFMVFLAPLPTFYQIYKKKSTEEFQSLPYVVALFSSMLWIYYALVKKDASLLLITINSFGCVIETIYLAIFLIYAPSKTRLWTIKLLLMLNVFGFGAMLLSTLYLTTGSKRLTVIGWICLVFXISVFAAPLCIIKRVIKTKSVEFMPFSLSFFMTINAGMWYFYGLLLKD

SEQ ID NO: 3449 - protein, 143 aa, Triticum aestivum
  unsure (1)..(143): unsure at all Xaa locations
MAPTVMASSATSVAPFQGLKSTAGLPVSRRSSSAGLSSVSNGGRIRCMQVWPIEGIKXFETLSYLPPLSTEXLLKQVDYLIXRSKWVPCLQFNKVGSFSRGAKQFPPGNTMGQYWAMWELPMFXGCTDATQVLNEWRRSKKXT

SEQ ID NO: 3450 - protein, 351 aa, Streptococcus agalactiae 2603V/R
MRAATYLSANELSLTDKAKPQVIKPTDAVVRLVKTTICGTDLHILGGDVPACKPGTTLGHEGIGIVEEVGSAVNHFKVGDKVIISCVTACNTCYYCKHQLPSHCEDGGWILGHLIEGTQAEYVHIPHADGSLYHAPEGVCDDALVMLSDILPTSYEIGVLPSHIKPGDTVCIVGAGPIGLSALLTAQFYSPAKIIMVDLSQKRLEASKKFGATHTILSTSTQEVKEEIDKITKGRGVDVVLECVGYPATFDICQNVVSIGGHIANVGVHGKPVEFNLQDLWIKNITLNTGLVNANTTEMLLEVLETGKIDATQLVTHHFKLSEIEEAYKVFKAAEENNTLKVIIENDITPA

SEQ ID NO: 3451 - protein, 379 aa, Leptospira interrogans serovar lai str. 56601
MNLNGAELMIRFLEFAGVEIVSGIPGGASLPIYDALYESKIRHILARHEQGAGFIAGGMARANGKPGVCFASSGPGVTNLITAVADAKMDSIPLIVITGQVPVSMIGTDAFQEIDTFSLSVPITKRSYLVKKIEDLIQILPQAWKTAIEGRPGPVWIDVPKDVASAKIDWDISREKEIWNIQKIEFKDTIDLEWKKTFKELLSKAKKPVFYIGGGLNRPLAAELFCILLEKLNFPTVSTLMGLGICPYEHPRFLGMLGMHGSRAANLVLEEADLLVALGVRFDDRATGKLNEFCPNAKIVHVDIDATEIGKLKNPNLFLKHGVENFITQILEEDLSSEHLSSEEWLNQVQTLKTLYGFSIPKRIKFYIRFRFYKVSRTF

SEQ ID NO: 3452 - protein, 452 aa, Mesorhizobium sp. BNC1
MSDFDLVLSGRVVLPDVVVENGYVAVRDGRVEHVGKGDAPSARERHVLGNALILPGAIDAQVHSLSQKHQEDFIWSTRSAAAGGVTTIVDMPYDEGNLVCSAAAVRKKVDHASSQARVDFALYGTIDPMEGPARIAEQAEAGVAAFKFSTFGTDPVRFPRISPALLEECFVAVAKTGLTAGVHNEDDEMVHHAMARVKAAGISDYRAHAMSRPPLTELLATLQIYEIGAQTGCPAHVVHCSLSRGYEIARSYRDQGYAATIEACIHYLTLDEDNDVKRLGGKAKINPPLRPRAEVEKLWEHVRRGNVTLVSTDHVSWSENRKNNSDMLANSSGVPGLEVMVPLFVKGALARDIPLTWAAKLMAESPARHFRIDHAKGALTAGRDADITVLFPRPKIYDAAESGHNVVGWSPYNGIELPWTVGLTYLRGRQVFDGTETAAPGTGRFVRPEARH

SEQ ID NO: 3453 - protein, 351 aa, Staphylococcus aureus subsp. aureus MRSA252
MKALVKTREGHGNLELLDKEVATPLDDKVKIKVHYAGICGTDIHTYEGHYKVNFPVTLGHEFSGEIVEVGADVKDFKVGDRVTSETTFYVCNECEYCESKDYNLCNHRKGIGTQVDGAFTNYVIAREESLHHIPDEVSYQSAAMTEPLACAHHGVSKIQVNSGDVAVVMGPGPIGLLVAQVLKSKGATVVVTGLDNDKVRLDKAEALHMDYVVNLQQTDLKTYINGITDGYGADVVVECSGAVPAARQGLDILRKKGFYSQIGIFKDAEITFDMEKVIQKEITVVGSRSQKPADWEPSLQLMADGLVNAEALVTKIYDISKWDEAYQHLKSGEGIKALLKPLDLDENEGEN

SEQ ID NO: 3454 - protein, 415 aa, Spinacia oleracea
MASFTTTTAAAASRLLPSSSSSISRLSLSSSSSSSSSLKCLRSSPLVSHLFLRQRGGSAYVTKTRFSTKCYASDPAQLKNAREDIKELLQSKFCHPIMVRLGWHDAGTYNKDIKEWPQRGGANGSLSFDVELRHGANAGLVNALKLLQPIKDKYSGVTYADLFQLASATAIEEAGGPTIPMKYGRVDATGPEQCPEEGRLPDAGPPSPAQHLRDVFYRMGLDDKDIVALSGAHTLGRSRPERSGWGKPETKYTKDGPGAPGGQSWTAEWLKFDNSYFKDIKEKRDADLLVLPTDAALFEDPSFKVYAEKYAADQEAFFKDYAEAHAKLSNQGAKFDPAEGITLNGTPAGAAPEKFVAAKYSSNKRSELSDSMKEKIRAEYEGFGGSPNKPLPTNYFLNIMIVIGVLAVLSYLAGN

SEQ ID NO: 3455 - protein, 220 aa, Glycine max
SDGKTFYCLEMAKYFNPGEAEAMNQSVAYLLSKLSYIPSTLFLSEVSYVEFLDRVHVSEKKLRAQGLWEVPHPWLNLLIPRSEIHNFAEEVFGNILKDTNNGPILIYPVNQTRWNSKTSLITPEEDIFYLVAFLSLALPNSTGADSLEHILAQNKRVIDFYTGAKMRVKQYLPHYSTQEEWQVHFGSRWETFVERKRAYDPLALLAPGHKIFQKAVSSSC

SEQ ID NO: 3456 - protein, 119 aa, Populus deltoides x Populus maximowiczii
AGDMFQAVPPAEAILLKCILHDWSDEDCVKILKRCKQAIMSEGQQKAGKVIIIDMVRENQNGDEGSIETQLIFDLAMMVVVSGVERNEKEWAKLFFDSGFLNYKIHPVPGTRAVIELYP

SEQ ID NO: 3457 - protein, 347 aa, Staphylococcus aureus subsp. aureus MRSA252
MKALKLYGVEDLRYEDNEKPVIESANDVIVKVRATGICGSDTSRYKKMGPYIQGMPFGHEFSGVVDAIGSDVTHVNVGDKVTGCPAIPCYQCEYCLKGEYARCEKLFVIGSYEPGSFAEYVKLPAQNVLKVPDNVDYIEAAMVEPSAVVAHGFYKSNIQPGMTVAVMGCGSIGLLAIQWARIFGAAHIIAIDIDAHKLDIATSLGAHQTINSKEENLEKFIENHYANQIDIAIESSGAKVTIGQILTLPKKGGEVVLLGIPYDDIEIDRVHFEKILRNELTVCGSWNCLSSNFPGKEWTATLHYMKTKDINVKPIISHFLPLEKGPETFDKLVNKKERFDKVMFTIY

SEQ ID NO: 3458 - protein, 121 aa, Exiguobacterium sp. 255-15
MAFNKEQFIEDLKGMTVLELNELVKTIEEEFGVSAAAPVAAAGAGAAAAEEQTEFDVILTSAGSGKINVIKAVRELTGLGLKEAKALVDGTPAPVKEGVSKEDADAIKAKLEEAGASVEVK

SEQ ID NO: 3459 - protein, 426 aa, Aquifex aeolicus VF5
MNKTTFENVYYWEGKAQIPQEGQFIKLKEDKTLEVPDNPIIPFIEGDGIGPEITQAMLLIINTAVEKTYNGSKKIYWVELLAGDKAEEKTGERLPQETLDVLKESIVGIKGPLGTPVGKGVRSINSALRRAFDYYSAVRPVYWMGQATPIPNPERVDLVVFRENTDDVYAGVEFFAGTPEAKKVREFLIKEMGAKEEGFPEDVGITVKPMSEFKTKRHVRKALRYALENNKKNVAVIGKGNIMKATEGAFINWAFEVAEEPEFKGKVVTDPEAEPGEGQVKLTKVITDQMLMQLVLKPEAWDVIIAQNLNGDYVSDLAASLIGGPGFVPSGNIGDGYALFESTHGTAWDIAGKGIANPLSLTLSGAMMLEYIGWKEAAQKVYDAVRRTLAEHIGTPDIASGFQKQGIEAKAVGTMEFAEEISKRIE

SEQ ID NO: 3460 - protein, 100 aa, Triticum aestivum
MAPTVMASSATSVAPFQGLKSTAGLPVSRRSNGASLGSVSNGGRIRCMQVWPIEGIKKFETLSYLPPLSTEALLKQVDYLIRSKWVPCLEVQQRSGFIFR

SEQ ID NO: 3461 - protein, 499 aa, Vitis vinifera
MELLSCLLCFLAAWTSIYIMFSARRGRKHAAHKLPPGPVPLPIIGSLLNLGNRPHESLANLAKTYGPIMTLKLGYVTTIVISSAPMAKEVLQKQDLSFCNRSIPDAIRAAKHNQLSMAWIPVSTTWRALRRTCNSHLFTSQKLDSNTHLRHQKVQELLANVEQSCQAGGPVDIGQEAFRTSLNLLSNTIFSVDLVDPISETAQEFKELVRGVMEEAGKPNLVYYFPVLRQIDPQGIRRRLTIYFGRMIEIFDRMIKQRLQLRKIQGSIASSDVLDVLLNISEDNSNEIERSHMEHLLLDLFAAGTDTTSSTLEWAMAELLHNPETLLKARMELLQTIGQDKQVKESDISRLPYLQAVVKETFRLHPAVPFLLPRRVEGDADIDGFAVPKNAQVLVNAWAIGRDPNTWENPNSFVPERFLGLDMDVKGQNFELIPFGAGRRICPGLPLAIRMVHLMLASLIHSYDWKLEDGVTPENMNMEERYGISLQKAQPLQALPVRV

SEQ ID NO: 3462 - protein, 422 aa, Oceanobacillus iheyensis HTE831
MTQAEKIVVENGKMNVPDTPIIPFIEGDGTGPDIWASAQKVIEAAVDKAYDGKKSIEWMEVYAGQKAYDKTGEWLPKDTLDKINEYKIAIKGPLTTPIGGGIRSLNVALRQELDLFTCLRPVRYFEGVPSPVKRPEEVDMVIFRENTEDIYAGIEWQKGSDEVKKVINFLKEEMGVKNIRFPETSGIGVKPVSEEGTKRLVRSAIDYALNEGRKNVTLVHKGNIMKFTEGAFKNWGYEVAEQEYGDKVFTWAEYDRIVEAEGKDAANKAQDEALASGKILVKDAIADIFLQQVLTRPKEFDVVATMNLNGDYISDALAAQVGGIGIAPGANINYDTGHAIFEATHGTAPKYAGLDKVNPSSVILSAVLMLEHLGWREAADLITKSMDKTIGSKVVTYDFARLMDGAKEVKCSEFGQELIKNM

SEQ ID NO: 3463 - protein, 174 aa, Plantago major
MASAMMSSAATVTAQTSMVGQFSGLKFGSTFPIAKKTGRVSSPSSGLKVRCMQVWPPTGKKKYETLSYLPDLTVEQLAKEIDYLLRSKWIPCLEFELEHGFVYRENARSPGYYDGRYWTMWKLPMFGCTDASQVIAELEECKKEYPNAWVRIIGFDNVRQVQCISFIASKPPGL

SEQ ID NO: 3464 - protein, 373 aa, Oceanobacillus iheyensis HTE831
MTASTKGLEGIVATQSSISSIIDDQLSYVGYRIDDLAENSSFEEIIYLLWNQKLPNKSELDELKSQLAENMDIPDAIINHLRSYDLNTVHPMAALRTAISLLGLYDNEADVMDEQANKRKAVRIQAQIATIVTTFSRIRKGQEPVKPKKDLSYAENFIYMLNGKEPEDIEVEAINKALVLHADHELNASTFTARVCVATLSDIYSGITAAIGALKGPLHGGANENVMKMLTEIGEEENAIPYIKEKLANKDKIMGMGHRVYRTGDPRAKFLREMSKELTKLTGQEKWYNMSVKIEDYIKENKGLPANVDFYSASVYHSLGLDHDIFTPLFAVSRTSGWIAHILEQYENNRLIRPRAEYTGPELRDYVSIEQRG

SEQ ID NO: 3465 - protein, 140 aa, Brassica napus
TAYIQTIRSAQHFIYIENQYFLGSSYAWPNYKDAGADNLIPMELALKIVSKIRAKERFAVYVVIPLWPEGDPKSGPVQEILYWQSQTMQMMYDVIVRELKAVQSDAHPLDYLNFYCLGKREQLPENMPATNGSAGSDSYK

SEQ ID NO: 3466 - protein, 159 aa, Plantago major
MSDEEHQFEAQADAGASKTFPQQAGTIRKNGYINIKNRPCKVVEVSTSKTGKHGHAKCHFVAIDIFNGKKLEDIVPSSHNCDVPHVNRVDYQLIDISEDGFVSLLTDNGSTKDDLRLPTDDALATQIKEGFAEGKDLVVSVMSAMGEEQINAIKDVGPK

SEQ ID NO: 3467 - protein, 476 aa, Burkholderia fungorum LB400
MLHAAQFYIDGGWVEPTSPVWFDIVDPSTETPFEKLALGNAQDVDRAVAAARRAFASWSATSVADRVALLKRIVTIYERRYDEFAELMRREMGAPITFARNGQAARGPAHLNALIDVLERFEFEEQRGSTRIVLEPIGVCGLITPWNWPVNQIVVKIAPALAAGCTMVLKPSEYSPLSALLFADVLDEAGVPAGVFNLVNGDGPGVGSAIASHPDIDMVSFTGSTRAGVLVAQSAAETVKRVAQELGGKSANILLDDVDLDQAVTRGVAACFTNSGQSCSIPTRMLVPRHLMNDAAQIAKRAAQAYRLGPTDDPATQLGPLVNANQFKRVQALIQIGIDEGARLVTGGTGRPDGIDTGYYARPTVFADVTPQMTIAREEIFGPVLSMIPYDSEEQAIDIANGTDYGLAAYVQSADLARARKVGRALRAGGVHLNYPPADFGAPFGGYKRSGNGREWGEAGLREYLETKALAGYGVD

SEQ ID NO: 3468 - protein, 319 aa, Oceanobacillus iheyensis HTE831
MKRIGVLTSGGDSPGMNAAIRAVVRKAIYHDLEVYGIKNGYQGLMDGNIEKMTLGSVGDIIHRGGTILFSARSEEFKTDEGQFRAIEQLNKHNIDGLVVIGGDGSFQGAKKLTEKGFPCIGVPGTIDNDIAGTDYTIGFDTSLNTIIDAVDKVRDTATSHERTYIIEVMGRDAGDLALWAGLAVGAESILIPEEKEDFSSIVQRLKNGHDRGKKHSIILLAEGVGSGFEFGKRIEEVAELETRVTVLGHIQRGGSPTGQDRVLASRLGARAIELLIDNQGGRMVGIQKNVLVDYTFDEVFNVEHTIDKGMYKLSKELSI

SEQ ID NO: 3469 - protein, 486 aa, Saccharomyces cerevisiae
MVQRLLPGAHICRRSFNSSAIIKSSALTLKEALENVIPKKRDAVKKLKACYGSTFVGPITISSVLGGMRGNQSMFWQGTSLDPEHGIKFQGLTIEECQNRLPNTGIDGDNFLPESMLWLLMTGGVPTFQQAASFRKELAIRGRKLPHYTEKVLSSLPKDMHPMTQLAIGLASMNKGSLFATNYQKGLIGKMEFWKDTLEDSLNLIASLPLLTGRIYSNITNEGHPLGQYSEEVDWCTNICSLLGMTNGTNSSNTCNLTSQQSLDFINLMRLYTGIHVDHEGGNVSAHTTHLVGSALSDPYLSYSSGIMGLAGPLHGLAAQEVVRFLIEMNSNISSIAREQEIKDYLWKILNSNRVIPGYGHAVLRKPDPRFTAMLEFAQKRPIEFENDKNVLLMQKLAEIAPKVLLEHGKSKNPFPNVDSASGILFYHYGIRELLFFTVIFGCSRAMGPLTQLVWDRILGLPIERPKSLNLEGLEALTKASNVNKL

SEQ ID NO: 3470 - protein, 112 aa, Glycine max
  unsure (1)..(112): unsure at all Xaa locations
ARVPFVDKEFIRVAGNIDPEGKMINKDEGRIEIWTLQMTFDDEDHPYMAKHILYNHNEQSSDGVGYGXIDGLKAYDEQHATDRFMLNTGHTITCNTYTANELYHYRMISERV

SEQ ID NO: 3471 - protein, 354 aa, ASPERGILLUS NIDULANS FGSC A4
MAASFVPRQAFPNYASIPRSYFLGHHRAGLNKMRNMLSSIDYVIECRDTRVPFTSVNPMFEEALGKTRRLIVYTKRDLGSEAGSREQKSLEKQIRSFNRGTPVFFVSPHHLDPRSKSRTNNRPDVNTILTHLREDAQGPDRLVGCRVMVVGMPNVGKSTLINNLRNRGVGKAKAVHTGDQPGITRKIGTPVKIIERDNGAHVYVLDTPGVFMPYVPDAENMLKLALCGCVKDSVISPVTLADYLLYHINLHDPTVYQRWSLPTNEVHPLLDSFARSTGLLAKGGIPNMDLAALHFIQKWRGGGLGRFILDDLQEERRRRESSDEDKASISITQALKAEKSARRQQATDPSVRQK

SEQ ID NO: 3472 - protein, 276 aa, Triticum aestivum
  unsure (1)..(276): unsure at all Xaa locations
MGMDRTLYLWRSSEERAADMSTRRTEDGAVKCALRHFRRELVTRGLRFMAAAWGGLSPLPGAAAARVLRRPRVRPRVRGRVGKLYTYIVQPWAPTVMASSATSVAPFQGLKSTAGLPVSRRSNGASLGSVSNGGRIRCMQVWPIEGIKKFETLSYLPPLSTEALLKQVDYLIRSKWVPCLEFSKVGFIFREHNASPGYYDGRYWTMWKLPMFGCTDATQVINEVEEVKKEYPDAYVRIIGFDNMRQVQCVSFIAFXPPGCEESGKGLNSSLTTGHI

SEQ ID NO: 3473 - protein, 178 aa, Glycine max
  unsure (1)..(178): unsure at all Xaa locations
MASSMISSPAVTTVNRAGPGMVAPFTGLKSMAGFPTRKTNNDITSIASDGGRVQCMQVWPPVGKKKFETLSYLPDLDDAQLAKEVEYLLKXGWIPYLEFXLKHNFVYHKHNKSPIYYNKRYXTICKRAIFICTNTSHILNKRARTNTTXGNNCIRMITCGRHRQLQYISCISYERPSY

SEQ ID NO: 3474 - protein, 248 aa, Anthurium andraeanum
MTAKAKRGAAVAAEARVAKKRVVKLNKGPWTAEEDQKLVEYVDAHGDRKWTSLPTKAGLNRCGKSCRLRWLNYLRPGIKRGNISEAEEDMIIRLHNLIGNRWSLIAGRLPGRTDNEIKNYWNTHLSKKPLTISDLNDKLNDDGGSRSDVDEPPSSGQSQGPLDSRRPAEPRISEASNEVAFNVDELVNLPAILDFDDLLDSGSCSDGIITSSQIFWTPNFSAHDQQDISDFDDLGMLMDIMDYVICPP

SEQ ID NO: 3475 - protein, 113 aa, Rickettsia helvetica
ANEAVINMLKEIGSSENIPKYIAKAKDKNDPFRLIGFGHRVYKNYDPRAAVLKETCKEVLKELGQLENNPLLQIAIELEAIALKDEYFIERKLYPNVDFYSGIIYKAMGIPSQ

SEQ ID NO: 3476 - protein, 335 aa, Nepenthes alata
YQWAFAIAAAGITSGSIAERTQFVAYLIYSSFLTGFVYPIVSHWFWSVDGWASASRASNLLLGSGVTDFAGSGVVHMVGGVSGLWGALIEGPRIGRFDRSGRSVILRGHSGSLVVLGTFLLWFGWYGFNPGSFLTILKAYGNNGGYFGQWSAVGRTAVTTTLAGSTAALTTLFGKRLLVGHWNVTDVCNGLLGGFAAITSGCSVVDPWAAIICGFVSSWVLIGFNKLAEKVKYDDPLEAAQLHGGCGMWGLIFTGLFATKKYVSEVYGGSPDRPHGLFMGGGGKLLAAQLIQIVVIFGWVTATMGPLFYGLKWLKLLRVKSEHEMAGMDMTSHGG

SEQ ID NO: 3477 - protein, 504 aa, Mesorhizobium sp. BNC1
MEETMQTAHTWKADRQQSLRGHTVPTALLIAGEWIERDKSFTVTNPATNEEIARVSDGTAEDALRALEAATASQEAWAAWAPRQRANLFHRAHRLMLERATAFAEVMTLESGKPLAEAKAEFALSADFFLWYAEQIAHLHGTFASGSPGGYRIIATHRPVGPCFLVTPWNFPLLMIARKGGAALAAGCTTIVKSARETPLTAALFAQTLLEAGFPAGTVNLIHTTSSASISEALLADPRLRKVSFTGSTEVGSRLLSGAAQNIVNASMELGGDGPFVVLEDADIDLAVRQAIICKFRNAGQACVAANRIICHAAVVDEFTQKFVDETRKLRVGDGFEPGTDVGPIISSPQLERVDRMVAMLKDAGAELLTGGKRKGVTGNFYEPTVMRIKGSAPACRNEELFAPIAVIYSVDSVAEAIRFANDTIYGLAAYVFTRNVDRAIAVSEKLDFGMVGINRGIMADPAAPFGGIKSSGLGREAGHDGIYEFLEPQYLALTVNEAAGISQ

SEQ ID NO: 3478 - protein, 495 aa, GIBBERELLA ZEAE PH-1
MTSTTQISLPNGKKYDQPTGLFINNEFIAATGDEFVVTNPHTEEEVIKLKGASKEDVDKAVQAARKAFEGEWSELAAVDRGAFLYKIADLIDRDRELIAAIDAFDNGKPFSACLAGDLDESYNVFRYYAGAADKISGKTIETSPAKLAYVLQEPLGVCGQIIPWNFPFMMLAWKVAPALACGNTVILKPAEQTPLSALYFGNLVKEAGLPAGVVNVLPGLGPSTGKAIAGHMDIDKVAFTGSTNTGRAIMKDAANNLKNITLECGGKSPSIVFADAELEQAVKWCHFGIMDNKGEVCTSTSRIYVHEDIYDKFLEKFVEVTKENDKLGAPFDESTVQGPQVSKTQYDRVLSYIEEGRKSGAKLLYGGSKHGGKGYFLQPTVFADTTEDMKIMKEEIFGPVVSIAKFSTDEEAIKKANDTSYGLAAALFTEKIARAHKVARKLQAGMVWINSSGDSHFGIPFGGYKSSGIGRELGQYALDAYTQPKAVHVNLGFEL

SEQ ID NO: 3479 - protein, 460 aa, Magnaporthe grisea 70-15
MATTKSAFLHRSLKEFPAQVVEAKDKTLVFSDGTKVLDSTCGAAVACIGYNNDLSERVKQAMIRQMDKFPYCNSFFGHEVGEQLAQELMDGTGGAMSKAYIVNSGSEAMEGTMKMARQYFLELQPPQPSRINFIAREGSYHGTTLGALSMSGHVGRRSKFLDLLLPNVARVSRCDAYRGMKEGQSVAEYVEQLADELDKKFQELGPETVCAFVAEPVVGATLGCVPAVPGYFEAMRKVCDKYGALLILDEVMSGMGRSGTLHAWQQEGVVPDIQTIGKGLGGGYAPVAAFMINHRVADTLESGTGEFMHGHTYQGHALGCAAALEVQRIVREENLIDNVKQRGVQLEKLLQQHLGNHPNVGNIRGKGLFWGIEFVADKASKEPFPRSVDLANKVNRAGVKEFGVSLYPGTGTKDGVLGDHVILAPAYNCTADEIEEIVIKTKETVARVLRVKNAETATSA

SEQ ID NO: 3480 - protein, 130 aa, Leptospira interrogans serovar Copenhageni str. Fiocruz L1-130
MTNAVLNEKNHSVTSEETKKERVRILAPRVDIYSDEENIYLLADLPGVEEKDVQVQLEKDQLIISGKTSNKDIQGELRYSEFRTGEYKRTFTLTESVEEDRISAVYKNGVLNLTLPKRKPLTKKIEVRSE

SEQ ID NO: 3481 - protein, 279 aa, Exiguobacterium sp. 255-15
MEQKLKLWFTEHQTEDYGITFRVNHVYESEQTEFQRLEMVETDEFGTMLLLDGMVMTTDRDEFVYHEMVAHVPLFTHPNPKSVLVVGGGDGGVIREVLKHPSVEKAVLVEIDGKVIEYSKKYLPNIAGGLDDARVEVIVGDGFMHIAEAVNEYDVIMVDSTEPVGPAVNLFTKGFYSGISKALKEDGIFVAQSDNPWFTPELIRDVQRDVKEIFPITKLYIANVPTYPSGLWTFTIGSKKHDPLAVAPERFHEIETKYYTPELHTAAFALPKFVKDLTI

SEQ ID NO: 3482 - protein, 411 aa, Oceanobacillus iheyensis HTE831
MANLRDEALHLHKVKQGKLEINTKVPVKDAKDLSLAYSPGVAEPCKEIYDRKETVYDYTMKGNMVAVVSDGSAVLGLGNIGPEAALPVMEGKAVLFKGFAGVDAFPICVDTHDVEQIVQTVKLLEPNFGGVNLEDIAAPNCFIIEDRLKSETNIPIFHDDQHGTAIVTVAGLINALKLVGKKFSDIKVVANGAGAAGIAIIRLLQSFGVRDMIMCDSKGAIYEGRPYGMNTVKDSVAKYTNANKVEGSLSDVLEGADVFIGVSVGGALTKDMVRSMNDDAIIFAMANPDPEILPEDAKEAGARVIGTGRSDFANQVNNVLAFPGIFRGALDVRATRINEEMKVAAAEGIATLISDDELHDDYVIPSPFDERVAPLVASHVAKAAMSTGVARMNVDPEEVAEKTRKLTQQEK

SEQ ID NO: 3483 - protein, 425 aa, Bacillus israeli
MIVAEGQKITMTNGTLNVPNDPIIPFIEGDGTGPDIWRAASKVLEAAVEKAYNGEKKIVWKEVLAGEKAFKETGEWLPQETLDVIREYMIAIKGPLTTPVGGGIRSLNVALRQELDLFVCLRPVRYFNGVPSPVKRPQDTDMVIFRENTEDIYAGIEYAKGTEEVKKVIEFLQKELGVNKIRFPETSGIGIKPISEEGTKRLVRAAINYAIEHGRKSVTLVHKGNIMKFTEGAFKNWGYELAEQEFGDKVFTWAEYDRIVEKEGKEAANKAQEEAEKAGKIIIKDAIADIFLQQILTRPREFDVVATMNLNGDYISDALAAQVGGIGIAPGANINYETGHAIFEATHGTAPKYAGLDKVNPSSVILSGVLMLEHLGWKEAADLIIQAMEKTIASKVVTYDFARLMDGATEVKCSEFGNELIKNMG

SEQ ID NO: 3484 - protein, 441 aa, GIBBERELLA ZEAE PH-1
MKSVVFKGVKQVALEDRPKPMIQDPTDIIVKVKYTAFELHVFRGHQPSGTGFIMGHEFTGVIDQVGSAVKSLEVGDAIVSPFTVSCGECFFCKRGYSSRCDKSLLFGTVLLDGAQAEYVRIPYAQSTVMKAPKEVEDLKLCLMADIFPTGCYAASNGLDSLDKERVQESIVVLIGCGPVGICALIAALEYKPKAILAVDGIESRLSLAKDLGAEPWNYLTQKQDLEKRVKDLSDGRGADVIIEVVGHSSALDMGFKLLRPWGIISSVGVHNGEIPWTGNEAYGKNLTIKMGRCPVRSIFENSLKLLAKKQHLLEFMTATVMPLSNAPEGYELFDSMKVQKVIFDAEKIRSAFLMIKPDVASSDATDIRFEMKRNGDSYILNGILSSGSDDLRCDVYIVVGKIDASNPNTHRRQFVFLVPVRFPGVAVHHILNVFSAGRTLS

SEQ ID NO: 3485 - protein, 258 aa, Plantago major
VIFHTFCEDIASQLPAVVVSVEYRLAPENRLPIAYDDALNAILWAKDQALGKGGRDPWMEYADFTKVFILGSSAGANIAYHVALRALDFDISPLQIKGVMMNQGYFGGVARTASEIRLKDDAYVPLYVNDVLWTLALPTNLNRDHEFCNPISGGTYLGRIYRLPKIYIKGDYGDPLVDRSVQLAQYLINNGRTVFYRFNAGGFHGIELQNTTAAQELYDDFKYFVNNPFIMNENGISKEPLSYDMKEIMSGGVSRASA

SEQ ID NO: 3486 - protein, 294 aa, Triticum aestivum
  unsure (1)..(294): unsure at all Xaa locations
RGAAVDGLLLLDRDDEYAALMLSKEGAGAGGGGGACGEDXGTEGTNAARAACVHWIVKTNARFLFGGKTAYVSVTYLDRFLAQRRVDRGKEWALQLLSVACLSLAAKVEEHRVPRLPEFRPDEYDFDSASILGTGSLSNPSPXLQMIAGTPFPYLSCFVARFRHDERKAIVLRAVKCIFASIKAMSSVEYQPSTMALASILVARGGREGTGTAPNLEEELKAILGSSWQQLHTGHVYSCYSVMIQEEDRSTQSGREVASSGVSAAAPAGSPGTSVAMAMVRGGVVEQDPVERAG

SEQ ID NO: 3487 - protein, 409 aa, Novosphingobium aromaticivorans DSM 12444
MIAQPLTIIGGRLVPGSGEPVAGNLRCEGGRIVALGDVAPQDGDTVFDAGGALVAPGLVDLGVFAVDKPAFHFGGITRAALMPDQAPPLDHPARVRFAAQSGKPDMWVHPLAAATRGLEGTELAELALMRDAGAKAVSTGRAWIGDSGVMLRLLRYCAMLRLVVVTHAEDAAITGSAVATAGEVATRLGLPSAPAEAEALAVARDIALAEMSGCHVHFRQVTTAQALDLVRTAKARGVRVTAGVTPAHFVLSDLELVGFRTFCRLSPPLRSDADRKAVIAAIADGTIDVIASGHDPRGPEDKRLPFADAEPGMAGAETLLPLTLTLVRDGVIDLARAFELLAGNPARLLGVDAGRLETGAEADIAIVDPARPWIVNSGKMAASAGNTPFDRRPVEGRVTALFKGGKQVH

SEQ ID NO: 3488 - protein, 321 aa, Haemophilus influenzae R2846
MIKKIAVLTSGGDAPGMNAAIRGVVRSALAEGLEVFGIYDGYQGLYNNKIKQLNRYSVSDVINRGGTFLGSARFPEFKDPNIRAKCAEILRSHGIDALVVIGGDGSYMGAKLLTEEHSFPCVGLPGTIDNDVAGTDYTIGYQTALQTAVDAIDRLRDTSSSHQRISIVEIMGRHCSDLTISAGIAGGCEYIVASEIEFNREELIQQIERSIIRSKRHAIIAITELLTDVHSLAKEIEARVGHETRATVLGHIQRGGSPCAFDRILASRMGAYAVDLLLQGKGGYCVGIQNEQLVHHDIIDAINNMQRVFKADWLKVAKRLE

SEQ ID NO: 3489 - protein, 177 aa, Corynebacterium glutamicum ATCC 13032
MSTYQDDRFPGPDPYAPLGEKPSFTLTSTDLENGAKLAEAQLGGTDISPQLSWSDLPEGTKSLAITCLDPDAPTGAGFWHWAVFNIPTTVTEIPTGAGDETLGGIEGVVSLKGDSGKRGFYGAQPPAGHAPHRYLFAVHALDVEKLDIAPDATPTVLGFNLYFHTLGRSIVWGWYEN

SEQ ID NO: 3490 - protein, 384 aa, Rhodopseudomonas palustris CGA009
MSSQPLMFFLAFLAVLALIGAAAWLVRRFAGNRLGTNASRGRMPRLAVIDAAAVDGRRRLVLVRRDNVEHLLMIGGPSDIVIEPNIVRATPARDPLPTRAGVEPRLTTPEPGQWEADTAAELPEPELPPLPTRPLRPALAEEPRRAPPPMPERRPADPFASLVPEPIARPEPPLQPLPRTEPPMPRVEAPIMRAEPPIMRADPPILRPEPPITRPEPPVLRPEPPVLRPEPPVLRPEPPRPEPRMEPAPRPRAEPAMPRPPRPEPKPAPGPLRTERPAPPPAPPAPPPAPAAPVAAALATADQNLAEMANRLEAALRRPPNAPAEPAPPVAPEPPARPNPPAPRAAEPATEEPTADTSPAAGKTGFESLEDEMAALLGRPKSPT

SEQ ID NO: 3491 - protein, 1158 aa, Streptococcus agalactiae
MFKSNYERKMRYSIRKFSVGVASVAVASLFMGSVAHASELVKDDSVKTTEVAAKPYPSMAQTDQGNNSSSSELETTKMEIPTTDIKKAVEPVEKTAGETSATDTGKREKQLQQWKNNLKNDVDNTILSHEQKNEFKTKIDETNDSDALLELENQFNETNRLLHIKQHEEVEKDKKAKQQKTLKQSDTKVDLSNIDKELNHQKSQVEKMAEQKGITNEDKDSMLKKIEDIRKQAQQADKKEDAEVKVREELGKLFSSTKAGLDQEIQEHVKKETSSEENTQKVDEHYVNSLQNLAQKSLEELDKATTNEQATQVKNQFLENAQKLKEIQPLIKETNVKLYKAMSESLEQVEKELKHNSEANLEDLVAKSKEIVREYEGKLNQSKNLPELKQLEEEAHSKLKQVVEDFRKKFKTSEQVTPKKRVKRDLAANENNQQKIELTVSPENITVYEGEDVKFTVTAKSDSKTALDFSDLLTKYNPSVSDRISTNYKTNTDNHKIAEITIKNLKLNESQTVTLKAKDDSGNVVEKTFTITVQKKEEKQVPKTPEQKDSKTEEKVPQEPKSNDKNQLQELIKSAQQELEKLEKAIKELMEQPEIPSNPEYGIQKSIWESQKEPIQEAITSFKKIIGDSSSKYYTEHYFNKYKSDFMNYPLHAQMEMLTRKVVQYMNKYPDNAEIKKIFESDMKRTKEDNYGSLENDALKGYFEKYFLTPFNKIKQIVDDLDKKVEQDQPAPIPENSEMDQAKEKAKIAVSKYMSKVLDGVHQHLQKKNHSKIVDLFKELEAIKQQTIFDIDNAKTEVEIDNLVHDAFSKMNATVAKFQKGLETNTPETPDTPKIPELPQAPDTPQAPDTPHVPESPKAPEAPRVPESPKTPEAPHVPESPKAPEAPRVPESPKTPEAPHVPESPKTPEAPKIPEPPKTPDVPKLPDVPKLPDAPKLPDGLNKVGQAVFTSTDGNTKVTVVFDKPTDADKLHLKEVTTKELADKIAHKTGGGTVRVFDLSLSKGGKETHVNGERTVRLALGQTGSDVHVYHVKENGDLERIPSKVENGQVVFKTNHFSLFAIKTLSKDQNVTPPKQTKPSTQGSQVEIAESQTGKFQSKAANHKALATGNETVAKGNPTSTTEKKLPYTGVASNLVLEIMGLLGLIGTSFIAMKRRKS

SEQ ID NO: 3492 - protein, 182 aa, Triticum aestivum
MYLHSTAMAPTVMASSATSVAPFQGLKSTAGLPVSRRSNGASLGSVSNGGRIRCMQVWPIEGIKKFETLSYLPPLSTEALLKQVDYLIRSKWVPCLEFSKVGFIFREHNASPGYYDGRNWTMWKLPMFGCTDATQVINEVEEVKKEYPDAYVRIIGFDNMRQVQCVSFIAFKPPGCEEFGKA

SEQ ID NO: 3493 - protein, 331 aa, Arabidopsis thaliana
MFTCINCTKMADRGEEDEEDEARGSTTPNTKEAVKSLTTQIKDMASKFSGSHKQSKPTPGSSSSNLRKFPDFDTASESVPYPYPGGSTSSTPAWDLPRSSYHQSGRPDSRFTSMYGGERESISAQSCDVVLEDDEPKEWMAQVEPGVHITFVSLPSGGNDLKRIRFSREVFDKWQAQRWWGENYDRIVELYNVQRFNRQALQTPGRSEDQSQRDSTYTRIDSARESRDWTQRDNNFRPPGGSVPHHFYGPPMDAARITTSSRDEPPSMSNASEMQGEWVEEDEPGVYITIRQLPDGTRELRRVRFSRERFGEVHAKTWWEQNRDRIQTQYL

SEQ ID NO: 3494 - protein, 314 aa, Azoarcus sp. EbN1
MPLSSQAKALLDMVYRVGAPRFHELSVDQARHSFRKLQWAFGLPSPAVAATVEVAMTRVDGSTLNARLYRPLESSRDDELPLLIYFHGGGWCVGDLESYDVLCRQLANGSGCAVLSIDYRLAPENPFPAAVEDAIFSIEWAAEQAQRLGIDRGCIALGGDSAGGNLSIVGALLAHERASVAIRFMFLVYPSTEIASDRPSRQLFGQGYLLDGESLEWFYGHYLPAGNDEDWRASPMRAPSLAGLPPILLVTAECDPLADDCMAFAERVRAEGGEIEHVAVDGVVHGFITLGQFFPEATHAVDRITAGLRRAVRP

SEQ ID NO: 3495 - protein, 260 aa, Oryza sativa
MSPAEASREENVYMAKLAEQAERYEEMVEFMEKVAKTTDVGELTVEERNLLSVAYKNVIGARRASWRIISSIEQKEESRGNEAYVASIKEYRSRIETELSKICDGILKLLDSHLVPSATAAESNVFYLKMKGDYHRYLAEFKSGAERKEAAENTLVAYKSAQDIALADLPTTHPIRLGLALNLSVFYYEILNSPDRACNLAKQAFDDAIAELDTLGEESYKDSTLIMQLLRDNLTLWTSDNAEDGGDEIKEAAKPEGEGH

SEQ ID NO: 3496 - protein, 159 aa, Ralstonia solanacearum GMI1000
MTLTLTSPAFAAGAEMPGRLTCEGTDTSPPLAWTGLPAGTRSLALIVDDPDAPDPAAPRMTWVHWVLYNIPPATAALAEDAARSHLPSGTREGTNGWQRTGYGGPCPPIGRHRYFHKLYALDTELPDLGTPDKAALERAMHGHVLAQAELVGTYQKHKR

SEQ ID NO: 3497 - protein, 243 aa, Oryza sativa (japonica cultivar-group)
MRGVSGVEAKDSLTIVALQSPVTVERPVRGDLEEHVPKPYLARALAAPDIYHPDGTTTDDHEHHHLSVLQQHVAFFDRDDNGIIYPWETYEGCRALGFNMIMSFLIALVVNVSMSYPTLPGWLPSPFFPIYIHNIHRSKHGSDSGTYDNEGRFMPVNFENIFSKYARTSPDRLTYREVWQMTEGNREVLDLFGWFAAKLEWTILYVLARDEEGYLAREAIRRMYDGSLFEYVAMQREQHAKMS

SEQ ID NO: 3498 - protein, 496 aa, Ferroplasma acidarmanus
MEKIFGNIINGIEETGGERIELKSPVDGSLIGYIIDTDKDTVERAIQSSREAFNKFYLESTIKSRQELIGKLTDIVQEKATIYADLESKNTGKTIRQSTFMDIPLAISHIRYFAETDEFKFQRKITHPEYPGTEGIVQNAPMGVVASIAPWNVPFLMAVWKIIPPVLAGNAVVIKPSHYTPLTAIELVKDMKAAGFPDGLVNLVNGTGRTTGNLLVNSDHVDMVSFTGSTPTGSRIMEQAAKNIKKVSLELGGKSPNIVFADADLDHAVKGVIFGIFLNAGQLCESASRLIIEESIMDKFLQKVKTYLDSMKSGNPMDFETDISAITTKEQKEKIESLISQTVKSGGNIFYSKNMQGTPDKGTYFPPTLLTGLTPGQQISDEEIFGPVLTVYPFKSEKEAIDLANSTKYGLAAGIWTKDIEKAGRVASMIEAGTVWVNEYHLLSAAAPRGGFKKSGIGRELGLEGILEYTQTRHIFYGNNESGMSDVAYGILIKTE

SEQ ID NO: 3499 - protein, 213 aa, Oryza sativa (japonica cultivar-group)
MGVEVCVKAAVGHPDTLGDCPFSQRVLLTLEEKKVPYEMKLIDVQNKPDWFLKISPEGKVPVFNGGDGKWIPDSDVITQVIEEKYPTPSLVTPPEYASVGSKIFSCFTTFLKSKDPNDGSEKALLTELQALEEHLKAHGPFINGQNISAADLSLAPKLYHLQVALEHFKGWKIPEDLTNVHAYTEALFSRESFIKTKAAKEHLIAGWAPKVNA

SEQ ID NO: 3500 - protein, 168 aa, Triticum aestivum
GRIEKWVLRNAFDDEEKPYLPKHILYRQKEQFSDGVGYSWIDGLKDHAKAHVSDSMMTNASFVYPDNTPTTKEAYYYRTVFEKFYPKNAARLTVPGGPSIACSTAKAVEWDAAWSELLDPSGRAALGVHDAAYEEKAPASVDPVVDNVSRSPAHDVKRLKTAISAAAV

SEQ ID NO: 3501 - protein, 405 aa, Mesembryanthemum crystallinum
MVLEATMICIDNSEWMRNGDYTANRFQAQADAVNLICGAKTQSNPENTVGILTMAGKGVRVLVTPTSDLGKILACMHGLDMGGEMNLAAGIQIAQLALKHRQNKKQQQRIIVFAGSPVKYDKKVLETIGRKLKKNSVALDVVDFGEDEDGKSEKLEALVAAVNNNDTSHIVHVPAGPNALSDVLISTPIFTGDGEGGSGFAAAAAAAAAGGVSGFDFGVDPNLDPELALALRVSMEEERARQEAAAKRAAEEAGRQEKGGEQQSSSQDATMGESSSAANPEAEKKNDLTDDENALLQQALAMSMDEPASTTTVRDTDMADATGDDQDLQLALQLSVQDSAKESTSQSNPEEVGKLLADQSFVSSILASLPGVDPNDPSVKDLLASMQNQSEKKDEDKPPSEEEKK

SEQ ID NO: 3502 - protein, 475 aa, GIBBERELLA ZEAE PH-1
MRLLTRPSSCAIARGLCRNSTFPCSISRASVSTLHAKINSPPPRIVRSEGCWLETHQGHRILDASSGASVVSIGHNDSRVKEAIIAQLDQVAYCYNPFFTTEAAEKISRFLTDSTDGHMSKVFVVSSGTEAVEAALKIARQYFTELPTPQPNRTKFIARKQSYHGNTLGSLSVGGHKARRGVYEPVLATNVSHVSPCYPYREMKEGETEEQYVERLAKELDDEFKRVGPDTVCAFIAETVSGTSLGCAPAVPGYFKAMREVCDRHGALLIMDEVMSGMGRTGTLHAWEQEGVVPDLQTVAKGLGAGYMPVGALLVGNKVANTLEQGSGAFSHSQTYQGHPVACAAAFSVQMAMKEDKMLQNTQEVGKVLGKKLKERLAGHKNVGDVRGRGLFWGLEFVRDKDTKEPFPLDDQIAGKLHKAGLTSDHGISLIPATGNVDGMQGDMVIVSPPLTVTKEEVDMVVDRIEKVVTSVLGS

SEQ ID NO: 3503 - protein, 161 aa, Ustilago maydis 521
MVSFYDLKAKKPSQEDYTFDQLKGKVVLVVNTASKCGYTPQFAELEELNKKYADQGLQIIGFPCNQFAGQDPGSDESIGEFCQRNYGVTFPMMAKSDVNGSNTNEVFQFLKKEKAGILGTEMIKWNFTKFLIDKEGNVIERYGSNTKPSAIAPAIEKLLSQ

SEQ ID NO: 3504 - protein, 483 aa, Thermococcus kodakaraensis
MCLIAGGMGGNLREKLIKMAIAGKHRGPESFGVWTDGGVLKSDDFSKLTEIPDGRIGLLQCRLAITGSKSFTQPFINDLALVHNGEIYNHAALREYLERRGVSFESDVDSEVVLRLIEFLREEHLSYPEIVKKLFWMLEGDYAVAFSDGERIYLFRDPLGIRPLYFSRNGLFASEKKVLWAVGEREVEPVQPGELVVLEKNGVRRARLFSLENLKSKAKCERKDPVGGVGKLLRYAVKNRVSKKTGVLFSGGLDSTLVAYLASQYSDVILYTAGTEDSPDIEWARKVADHFGWALRERTFEVEDVRDAVKRVMYAIEEPNPMNLAIGLPLYFASGLASSDGTRVLLSGQGADELFGGYAKYLERPELMEEDIALISERNLARDDKITMLNGVEGRYPFLALPVVSFALKLPLEAKIVDGTRKVILRKLALRLGIPEWIAEREKRAAQYGSRAQKLLEKIAREEGLTLREFAEKLFRETFPNAF

SEQ ID NO: 3505 - protein, 466 aa, Vitis vinifera
MALATRRFFNTICRGTRSFGALPEGIPSSSQHLINLEYEYSAHNYHPIPIVFSQAKGSTIWDPEGKKYLDFLSAYSAVNQGHCHPKVLKALVEQAERLTLSSRAFYNDRFPIFAERLMNMFGYDMVLPMNTGAEGVETALKLARKWGYEKKKIPKDQAIIVSCCGLLHGRTLAVISMSCDNEATRGFGPLLPGHLKVDFGDEVALEKIFEENGDRIAGFLFEPIQGEAGVIIPPDGYLKAVRELCSKFNILMIADEIQSGLGRSGRMLACDWAEVRPDVVILGKALGGGVIAVSAVLADKDVMLSIQPGEHGSTFGVNPLASAVAVASLDVITEEGLSERSDQMGQELRNQLMKIHQLFPNLIKEVRGKGLFNAVELNSKALFPVSAYDICLKLKERGVLAKPTHDTIIRLTPPLSISLDELQEGSNALRDVMEFDVPKMQKAKHKRVPQTTTNICDRCGRNMDDS

SEQ ID NO: 3506 - protein, 113 aa, Triticum aestivum
  unsure (1)..(113): unsure at all Xaa locations
AARILQRDHGINVNLTLMFSQVQAIAAAEAGTFLISPFVGRILDWYKAKTGKTYSKEEDPGVELLRKYSDYYKKLGYKTIRHGCLIQEILGEITELAXGCDYLTSLPNLLEEF

SEQ ID NO: 3507 - protein, 235 aa, Synechocystis sp. PCC 6803
MAELDAANLMKQAVGKAAADRVKSNTIVGLGTGSTTAYALEFIGDRLKKGELENVVGIPTSFQAEVLARKYGIPLTTLDVADRIDIAIDGADEVDPQKNLIKGGGAAHTREKIVDALAETFLVVVDSGKLVDKLGSTFLLPVEVIPMALTPVMRALAKLGGKPELRMGVKKAGPVVTDQGNLVIDVKFDAITNPAELEKTINNLPGVLENGLFVGVADVILVGEIIDGQPTVREF

SEQ ID NO: 3508 - protein, 485 aa, Burkholderia cepacia
MLKKSTTSSTANMCRVSVGSRSSSPLNNAVIAKVHEAGRAEVDAAVAAAQAALKGAWGRMSLAQRVEVLYAVADGINRRFDDFLAAEVEDTGKPMSLARHVDIPRGAANFKIFADVVKNVPTEFFEMPTPDGVGAINYAVRRPVGVVGVICPWNLPLLLMTWKVGPALACGNTVVVKPSEETPQTAALLGEVMNTAGVPPGVYNVVHGFGPNSTGEFLTSHPDVNAITFTGETGTGEAIMKAAADGARPVSLELGGKNAAIVFADCDLDKAIEGTLRSCFANCGQVCLGTERVYVERPIFDRFVSRLKKGAEGMQLGRPEDLATGMGPLISQEHREKVLSYYKKAVEAGATVVTGGGVPEMPEALKGGAWVQPTIWTGLGDDSVVAREEIFGPCALVMPFDSEEEVIRRANDNDYGLARRIWTTNLSRAHRVAGAIEVGIAWVNSWFLRDLRTAFGGSKQSGIGREGGVHSLEFYTELKNVCIKL

SEQ ID NO: 3509 - protein, 176 aa, Triticum aestivum
  unsure (1)..(176): unsure at all Xaa locations
MAPTVMASSATSVAPFQGLKSTAGLPVSRRSNGASLGSVSNGGRIRCMQVWPIEGIKKFETLSYLPPLSTEALLKQVDYLIRSKWVPCLXFKQGWVYLPXEHNASPGYYDGRYWXTMWKLPMFGXCTDATQVINKWRSQEGVPDAYFAYRIDNIASEWLIASNGSRSARLNTHTAH

SEQ ID NO: 3510 - protein, 130 aa, Methanosarcina acetivorans C2A
MTCDPAGGRAINAAGVQFPPVHYNGDIFLPGQANNFYTYPAVGLAVYVTRAKRATDEMFIKAARATANQRTDEQLKKGLLFPPQSSILETEVRTAVQIATLIFNRDLARVDQPEDINVWLRATLYKPQYS

SEQ ID NO: 3511 - protein, 345 aa, Thermus thermophilus HB27
MERRSVQKKDLLSTPVVPIDIKAFDAGPILEAMGKTAFQARNLHRAAEIYLEMLEDDCAVILTLAGSLVSAGQGLIVHDLIRKGLVDVIVATGANIVDQDFFEALGHRHYQGDPRADDEALRRLWIDRIYDTYIDEEELRHTDYTVAEIADGLEPRPYSSREFIWHMGRYLAERGLGEKSIVRAAYEEGVPIFVPAFSDSSAGFGLVYHQVKHPEAHVTIDSVADFRELTEIKLKAGTTGLVMLGGGVPKNFAQDVVVAAEVLGHRVEMHKYAIQITVADERDGGLSGSTLSEAQSWGKVDARLSQMVFAEATLAFPLLASYVWHRAPARAKRRYAELFREKAPA

SEQ ID NO: 3512 - protein, 460 aa, Mycobacterium tuberculosis H37Rv
MSRSHPSVPAHSIAPAYTGRMFTAPVPALRMPDESMDPEAAYRFIHDELMLDGSSRLNLATFVTTWMDPEAEKLMAETFDKNMIDKDEYPATAAIEARCVSMVADLFHAEGLRDHDPTSATGVSTIGSSEAVMLGGLALKWRWRQRVGSWKGRMPNLVMGSNVQVVWEKFCRYFDVEPRYLPMERGRYVITPEQVLAAVDENTIGVVAILGTTYTGELEPIAEICAALDKLAAGGGVDVPVHVDAASGGFVVPFLHPDLVWDFRLPRVVSINVSGHKYGLTYPGVGFVVWRGPEHLPEDLVFRVNYLGGDMPTFTLNFSRPGNQVVGQYYNFLRLGRDGYTKVMQALSHTARWLGDQLREVDHCEVISDGSAIPVVSFRLAGDRGYTEFDVSHELRTFGWQVPAYTMPDNATDVAVLRIVVREGLSADLARALHDDAVTALAALDKVKPGGHFDAQHFAH

SEQ ID NO: 3513 - protein, 420 aa, Thermus thermophilus HB27
MGPLLVWHRGDLRLHDHPALLEALARGPVVGLVVLDPNNLKTTPRRRAWFLENVRALREAYRARGGALWVLEGLPWEKVPEAARRLKAKAVYALTSYTPYGRYRDAKVQEALPVPLHLLPAPHLLPPDLPRAYRVYTPFARRFLGVEAPLPAPEALPKGPEEGEIPREDPGLPLPEPGEEAALAGLRAFLEAKLPAYAEERDRLDGEGGSRLSPYFALGVLSPRLAAWEAERRGGEGARKWVAELLWRDFSYHLLYHFPWMAERPLDPRFQALPWQEDEALFRAWYEGRTGVPLVDAAMRELHATGFLSNRARMNAAQFAVKHLLLPWKRCEEAFRHLLLDGDRAVNLQGWQWAGGLGVDAAPYFRVFNPVLQGERHDPEGRWLKRWAPEYPSYAPKDPVVDLEEARRRYLRLARDLARG

SEQ ID NO: 3514 - protein, 200 aa, Chromobacterium violaceum ATCC 12472
MMTLYSGITCPFSQRCRIVLFEKGMDFEIIDVDIHNKPEDLAVMNPYNEVPVLVERDLILHESNIINEYIDERFPHPQLMPADPVMRARARLFLYRFENELFIHVKTLEAGATGKEATKAREAIRDGLTTIAPIFSKQKFMLGDDFSMIDVAIAPLMWRLEHYNIDLGKSAAPILKYAERIFQRQSFIDSLTPSEKAMRK

SEQ ID NO: 3515 - protein, 364 aa, Buchnera aphidicola
MKKKYRIAVLPGDGIGPEVMREAYKILNILKYHFSLPLEIEEFDVGGSAIDKEGVALPKKTLLGCENADAILFGSVGGRKWDSLPIDQRPERASLLPLRKHFNLFANLRPAQLYSELKYLSPLAFLIVIKNGFNILCVRELTGGIYFGQPSGRSKTNNFEYAFDTEVYYDYEINRIAHLAFQLAQTRNYKVCSIDKSNVLNSSILWREIVKKVSLSYPNVHLSHLYIDNATMQIIKDPNQFDVLLCSNLFGDIISDECAIITGSIGMLPSASLNEKKFGLYEPAGGSAPDIEGKNIANPIAQILSVSMLVRYSMNLKNIADKIDYSVISILKKGYKTADIAHDNNYLKTNEMGDVIADALISGE

SEQ ID NO: 3516 - protein, 363 aa, Buchnera aphidicola
  unsure (1)..(363): unsure at all Xaa locations
MKTKYRIAVLPGDGIGPEVMREAYKILNILKNYFSLPIETREFNVGGAAIDQDGVALPKTTLLGCENSDAILFGSXXXXXXXXXXXXXXXXXXXLLPLRKHFNLFGNLRPAQLYSELIHLSPLRSDIINNGFNILCIRELTGGIYFGKPAGRLKKNNIEYAFDTEIYYNYEINRIAHLAFQLAKTRNYKVCSIDKSNVLNSSILWREIVQKVSKNYPDVHLSHLYIDNATMQIIKNPNQFDILLCSNLFGDIISDECAMITGSIGMLPSASLNEKKFGLYEPAGGSAPDIEGKNIANPIAQILSVSMLVRYSMNLKTIADKIDQSVISVLKKGYRTADISNNSHYLKTNEMGDVIASALISGE

SEQ ID NO: 3517 - protein, 477 aa, Oryza sativa (japonica cultivar-group)
MGISKGGSGKEAKKPPLLLGRFEVGKLLGQGNFAKVYHARNVATGEEVAIKVMEKEKIFKSGLTAHIKREIAVLRRVRHPHIVQLYEVMATKLRIYFVMEYVRGGELFARVARGRLPEADARRYFQQLVSAVAFCHARGVFHRDIKPENLLVDDAGDLKVSDFGLSAVADGMRRDGLFHTFCGTPAYVAPEVLSRRGYDAAGADLWSCGVVLFVLMAGYLPFQDRNLAGMYRKIHKGDFRCPKWFSPELIRLLRGVLVTNPQRRATAEGIMENEWFKIGFRRFSFRVEDDRTFTCFELDDDAAVDAPTSPPDTPRTVDSGDVGAAPTRPRKAGSLTSCDSAPLNAFDIISFSPGFDLSGLIPEQQKHTARFVSAAPVEVIVATLEAAAAAAGMAVREREDGSISMEGTREGEHGALAVAAEIYELTPELVVVEVRRKAGGAAEYEEFFRARLKPSLRELVCDDRPCPEDSGELSRSL

SEQ ID NO: 3518 - protein, 158 aa, uncultured bacterium pCosAS1
MKLISQDLRDGDKLPLRHVFNGMGYEGDNISPHLAWDEVPSGTKSFVVTCYDPDAPTDSGWWHWIVANIPADTRVLPQGSGSSLVALPEGAVETRTDFGKAGYGGAAPPKGETHRYIFTVHALNVERIEVDEEASGAMVGFNVHFHTLGSASITAMYS

SEQ ID NO: 3519 - protein, 317 aa, Sulfolobus solfataricus P2
MWKVFFINGNFVKENVRDELPKPNEVKVFPKYIGICGTDKNIYLGKKPVKEPLVLGHEISGITEKGEKVAIFPNYWCGYCNNCRRGFYNSCKNKISIGVNADGGMAEYINVPKDFVFRIPYTLDLKLGALVEPTAVAVAALNKIDKEIEKVIIIGGGSTGTLVSIVAEINGLETFVIEKDSRKEEILKEKGFRTTKELKFDDRVAVIDTINNQESMVLAQSILKNSIARSELIITGLDNEQISLNRDIIVRNEVIIRGSIIYSKDDFLNSIKIVSENQEKFNKIVDKVGYIDNINEWFRKYVIELPNIKVLIKMDSI

SEQ ID NO: 3520 - protein, 429 aa, uncultured bacterium pCosAS1
MTTDDLAFDRQHIWHPYTSMTQPLPVYPVVEAHGCELTLASGEQLVDGMSSWWAAIHGYNHPRLNAAMKAQIDRMSHVMFGGITHQPAVDLCRRLVAMTPETLECVFPADSGSVAVEVAMKMALQYWHAKGESRQRFITFRNGYHGDTFGAMSVCDPDNSMHSLWKGYLPENLFAPAPQSRFDGAWDEMDMVGLAPLMAAHRHEIAAVILEPIVQGAGGMRMYHPEWLKRIRRMCDREGILLIADEIATGFGRTGKLFACEHAGITPDILCLGKALTGGTMTMSATLTTRQVAETISNGEAGCFMHGPTFMGNPLACAVASESLALLESGEWQDQVAAIESQLQEELAVARDSEFVADVRVLGAIGVVETTHPVNMAALQRFFVARGVWVRPFGKLIYLMPPYVIRPDQLSKLTRAVVDAVQAPAHFTR

SEQ ID NO: 3521 - protein, 607 aa, Glycine max
MDTNIGSLSLDACKPANNDVGCPPNGAVSAIKPSVPATTMTSSDATLGRHLARRLVQVGVTDVFSVPGDFNLTLLDHLIAEPQLKNIGCCNELNAGYAADGYARCRGVGACVVTFTVGGLSVINAIAGAYSENLPLICIVGGPNTNDFGTNRILHHTIGLSDFSQELRCFQTVTCYQAVVNNIEDAHELIDTAISTCLKESKPVYISISCNLPGIPHPTFSREPVPFSLSPRLSNKMGLEAAVEAAAEFLNKAVKPVMVGGPKLRVANACDAFVELADACGYPFAVMPSAKGLVPEHKPHFIGTFWGAVSTAFCAEIVESADAYLFAGPIFNDYSSVGYSLLLKKEKAIIVQPERVVISNGPAFGCVLMKDFLRELAKRLKHNNTAYENYSRIFVPEGKPVKAEPREPLRVNVLFKHIQDMLSGETAVIAETGDSWFNCQKLKLPKGCGYEFQMQYGSIGWSVGATLGYAQAVPEKRVISCIGDGSFQVTAQDVSTMLRNEQKTIIFLINNGGYTIEVEIHDGPYNVIKNWNYTGLVDAIHNGEGKCWTTKVTCEEELVEAIQTATGDKKDCLCFIEVIVHKDDTSKELLEWGSRVCAANGRPPNPQ

SEQ ID NO: 3522 - protein, 364 aa, Buchnera aphidicola
MKTQYRIAVLPGDGIGPEVMREAYKILKILKNNFLLSFEIEEFNVGGIAIDQEGLALPKKTLLGCEKSDAILFGSVGGKKWDNFPIEERPERAALLPLRKHFNLFANLRPAKIYSELKHLSPLRSNIVRDGFDILCIRELTGGIYFGQPSGRRLEKNNIEYAFDTEIYYDYEINRIAHLAFQLAQSRSHKVCSIDKSNVLNSSILWKEIVQKVSKNYPDVDLSHLYIDNAIMQIIKNPNQFDVLLCPNLFGDIISDECAIITGSIGMLPSASLNEKKFGLYEPAGGSAPDIAGKNIANPIAQILSLSMLVRYGMNLKDIADKIDKSVLSVLKKGYRTADISNNNNYLKTNEMGDVIANALISGE

SEQ ID NO: 3523 - protein, 506 aa, Rhodopseudomonas palustris CGA009
MNLITTMHPDASTVFKARYGNFIGGRWVAPVDGRYFDNTTPITGAKLTEIPRSQKEDVELALDAAHTASVTWSKTTTTERSLILNRIADRMEANLDLLAIAETLDNGKPIRETRAADLPLAIDHFRYFAGALRAQEGSISEIDHDTIAYHFHEPLGVVGQIIPWNFPLLMAAWKLAPALAAGNCVVLKPAEQTPASILVWAELVGDLLPPGVVNVVNGFGVEAGKPLASSPRIAKIAFTGETSTGRLIMQYASENLVPVSLELGGKSPNIFFGDVTAEDDPFFDKAIEGFVMFALNQGEVCTCPSRALVQESIYDRFMERALARVAAIRQGDPRDPATMIGAQASQEQLDKILSYIDIGRHEGAELLAGGGRAQLPGGLAGGYYVHPTVFRGHNQMRIFQEEIFGPVVSVTTFKDEAEAIAIANDTQYGLGAGVWTRDGTRAYRFGRAIAAGRVWTNCYHAYPAHAAFGGYKQSGIGRETHKMMLDHYQHTKNLLVSYGTGPLGFF

SEQ ID NO: 3524 - protein, 181 aa, Triticum aestivum
  unsure (1)..(181): unsure at all Xaa locations
LWLLVVAAQCASLATAAGPRVIIVGAGMSGISAGKRLSEAGITDLVILEATDRIGGRIHKTKFAGVNVEMGANWVEGVNGDEMNPIWTMANGTGGLNLRTFRXDFDHLASNTYKQDGGLYDEKVVEKIIERMDEVEESGSKLSAPFTTTATGLVVWPSTLTAFGLEGRLGYTVTPAKLLEF

SEQ ID NO: 3525 - protein, 285 aa, Mycoplasma penetrans HF-2
MKYIKLANGLHMPIIGLGVYKAEGENCENTIIKAIDDYGYRMIDTAQVYFNEEFVGNAIKQTKIKREDIFITTKVWISNYGYNNTMYSISKSLKKLQTNYIDLVLLHQPFGDYYSAWKALEVLYKKGIVKAIGVSNFEADRLVDFCLHVDVKPVINQIELHPLRQRIEDLHWNNKYGVAVESWASFGRATSEIMENPILVSLAEKYNKTVPQIILRWLIQQNIVVIPKTVTESRLKENMDIFDFEISDDDMDLIKTINQNKTVSKHHHDPSTAEEIFSKFPEIRR

SEQ ID NO: 3526 - protein, 347 aa, Listeria monocytogenes str. 4b H7858
MKNTIKWIAIGFAGIILLPLLIVFFIYKKAVGKKEYNPEVLENLDEASQKFVKNTSPLSDVDSRYKYMRLATKALPSAKDIEIGDVENKKIDGPAGKIPIRIYTPQEDGPFEIIVYYHGGGFVLGGLQTHDAIARKLVQTTGARVVTVDYRLAPENPFPAAVEDAYAALLWVQNHRTSLRAKSSDIIVAGDSVGGNLATVVTQIAKSKGKPNITAQILLYPATDIFSRDASVLYPSMDEFAEGYVLTKESLDKFFKLYIANASDRKYDPLVAPIRSKDLVGLPKTFIATAEFDPLRDQGEAYAKKLKDAGVEVFAKRFEKVPHGFMTTNSEATDETYELISEFLEEK

SEQ ID NO: 3527 - protein, 389 aa, Chlamydomonas reinhardtii
MADPGAQPVPAPQSAEEPVTGGLQESVEVTASGKLDSYNREYNQFLVCGSLFECPAKYLPIKPIGKGAYGVVCSAKNLDNQEKVAIKKIANAFDNVIDAKRTLREIKLLRHLQHENIVQIKDIIPPTNRDAFKDLYVVYELMDTDLHQIIRSPQALSNDHSQYFLYQLLRGLKYIHSANILHRDLKPSNLLVNANCDLKICDFGLARTSTSNEREFMTEYVVTRWYRAPELLLSCSGYTTAIDVWSVGCIFAELLGRKPLFPGKDYVHQLSLITKVIGSPSEEELGFITSEKAKRYIRSLPRSERVDFGQLWPHVTKTALDLIDKMLVFDPTKRITVEQALEHPYLASLHDVSDEPVCPTPFTFDFDSEHLTPDVVREVILQDMAELHT

SEQ ID NO: 3528 - protein, 314 aa, Glycine max
  unsure (1)..(314): unsure at all Xaa locations
MAMASLASSSVLLNLLFIVSALHLGAAAARILSEKEDQQQLQFQYHKGPLLSGNISVNLIWYGSFKPSQRAIISDFITSLSSSPKSTAQPSVATWWKGTEKYYQLIKSAPKPSLTLALGAQILDENYSLGKSLTTDNIVSLASKGAPNDAINVVLTXSDVTVEGFCSSRCGTHGSSVGHGKLAYVWVGNSETQCPGQCAWPFHQPIYGPQSPPLVAPNNDVGLDGMVINVATLLAGTVTNPWGNGYFQGPKEAPLEAASACTGLYGKGAYPGYAGELLLDPTTAASYNANAVNHRKYLLPALFDPTTSACSTLP

SEQ ID NO: 3529 - protein, 683 aa, Glycine max
  unsure (1)..(683): unsure at all Xaa locations
MSGGGCSSIVVXSRGDLRIEDNPALTAGVRAGAVVAVFIWAPEEEGQYYPGRVSRWWLKNSLAHLDSSLRNLGTPLITKRSTDTLSSLFEVVKSTGATQLFFNHLYDPLSLVRDHRAKEVLTAQGITVRSFNADLLYEPWDVNDAHGRPFTTFAAFWERCLSMPYDPESPLLPPKRIIPGDASRCPSDTLLFEDELEKASNALLARAWSPGWSNADKALTAFVNGALIEYSKNRRKADSATTSFLSPHLHFGEVSVKKVFHLVRIKQVFWANEGNKAGEESVNLFLKSIGLREYSRYISFNHPYSHERPLLGHLKFFPWVVNEGYFKAWRQGRTGYPLVDAGMRELWATGWLHDRIRVVVSSFFVKVLQLPWRWGMKYFWDTLLDADLESDALGWQYISGSLPDGREIDRIDNPQFEGYKFDPNGEYVRRWLPELARLPTEWIHHPWNAPESVLQAAGIELGSNYPLPIVGIDAAKVRLLEALSQMWQQEAASRAAMENGTEEGLGDSSESAPIAFPQDIQMEERPEPVRNNPPHGTRRYQDQMVPSITSSHVRVEEEETSSDLRNSAADSRAEVPINVTTQQNARETVNQGVLLNTNRNTRVQNNPTTWLRNAAEDSTAESSSSTRRERDGGVVPVWSPPASNFSEQFVDDENGIGTGSSYLQRQHPQSHQLMNWTRLPQTG

SEQ ID NO: 3530 - protein, 110 aa, Glycine max
LISCPAATTVNRAEAGMVAPFTVLKTMAGFPTRKTNNDITSIASNGGREQCMQVWPPGGKTKSETLCYLPDLDDAQLATVVEHLLRQGRIPCLEFESEHGFAHREHSRSP

SEQ ID NO: 3531 - protein, 398 aa, Candida albicans SC5314
MTVEYETKQLTPAQIKIILDTVPILEEAGETLTQKFYQRMIGNYDEVKPFFNTTDQKLLRQPKILAFALLNYAKNIEDLTPLTDFVKQIVVKHIGLQVLPEHYPIVGTCLIQTMVELLPPEIANKDFLEAWTIAYGNLAKLLIDLEAAEYAKQPWRWFKDFKVTRIVQECKDVKSVYFTPVDKDLLPLPKPERGQYLCFRWKLPGEEFEISREYSVSEFPKENEYRISVRHVPGGKISGYIHNNLKVGDILKVAPPAGNFVYDPATDKELIFVAGGIGITPLLSMIERALEEGKNVKLLYSNRSAETRAFGNLFKEYKSKFGDKFQAIEYFSEDNNTDDKIVIDKAFNRKLTTDDLDFIAPEHDVYLVGPREFMKDIKEHLGKKNVPVKLEYFGPYDP

SEQ ID NO: 3532 - protein, 370 aa, Arabidopsis thaliana
MALMKKSLSAALLSSPLLIICLIALLADPFSVGARRLLEDPKPEIPKLPELPKFEVPKLPEFPKPELPKLPEFPKPELPKIPEIPKPELPKVPEIPKPEETKLPDIPKLELPKFPEIPKPELPKMPEIPKPELPKVPEIQKPELPKMPEIPKPELPKFPEIPKPDLPKFPENSKSEVPKLMETEKPEAPKVPEIPKPELPKLPEVPKLEAPKVPEIQKPELPKMPELPKMPEIQKPELPKLPEVPKLEAPKVPEIQKPELPKMPELPKMPEIQKPELPKMPEIQKPELPKVPEVPKPELPTVPEVPKSEAPKFPEIPKPELPKIPEVPKPELPKVPEITKPAVPEIPKPELPTMPQLPKLPEFPKVPGTP

SEQ ID NO: 3533 - protein, 232 aa, Zea mays
MEYAAVGYGYGYGYDERQEPAESADGGGGGDDEYATVLSAPPKRPAGRTKFRETRHPVYRGVRRRGPAGRWVCEVREPNKKSRIWLGTFATPEAAARAHDVAALALRGRAACLNFADSARLLQVDPATLATPDDIRRAAIQLADAASQQDETAAVAADVVAPSQADDVTAAAAAAAAMYGGGMEFDHSYCYDDGMVSGSSDCWQSGAGAGGWHSIVDGDDDDGASDMTLWSY

SEQ ID NO: 3534 - protein, 181 aa, Clostridium acetobutylicum ATCC 824
MSVYDFKAKTIEGKEVSLDTYKGKVLIIANTASKCGFTPQYEGLEKLYKEYKDKGLEILGFPSNQFAEQEPGDNNEVKNFCKLNYGVTFQLFEKTDVRDENAHPLFNYLTENAPFKGFDLNHPTGKMLSEVLEKNFPKFLEGNSVKWNFTKFLIDRDGNVVKRFEPTSEPSDMVKDIEKLL

SEQ ID NO: 3535 - protein, 239 aa, Arabidopsis thaliana
MGRGKIAIKRINNSTSRQVTFSKRRNGLLKKAKELAILCDAEVGVIIFSSTGRLYDFSSSSMKSVIERYSDAKGETSSENDPASEIQEMYIVTLEKYAYSEELVLDRQMMGEELSGLSVEALQNLENQLELSLRGVRMKKDQMLIEEIQVLNREGNLVHQENLDLHKKVNLMHQQNMELHEKVSEVEGVKIANKNSLLTNGLDMRDTSNEHVHLQLSQPQHDHETHSKAIQLNYFSFIA

SEQ ID NO: 3536 - protein, 289 aa, Plantago major
  unsure (1)..(289): unsure at all Xaa locations
MAKTIVDSDYLRDVEKARRELRALISNKNCAPIMLRLAWHDAGTYDVSTKTGGPNGSIRNEEELTHGANNGLKIALEFCEQVKSKCAKISYADLYQLAGVVAVXVTGGPTITFVPGRKDSKISPREGRLPDAKKGAPHLKDVFYRMGLSDKDIVALSGGHTLGRAHPERSGFEGPWTAEPLKFDNSYFIELLQGESEGLLKLPSDLALLDDPEFRRYVELYAKDEEAFFKDYAESHKKLSELGFTPSPAAGVKAIVKDSTVLAQSAVGVAVAATVVILSYLYEVRRKMK

SEQ ID NO: 3537 - protein, 124 aa, Borrelia afzelii
MALNKEDILTWLEGAKTMEVVELVTAIEEKFGVTAAVATSVGGAASTGSIDSEEQTEFDVILMSFGDSKINVIKEVRSITGLGLGEAKALVESAPKAIKEGLSKSDAEELKKKLEAVGAKVEVK

SEQ ID NO: 3538 - protein, 294 aa, Saccharomyces cerevisiae
MKTLVHVASVEKGRSYEDFQKVYNAIALKLREDDEYDNYIGYGPVLVRLAWHISGTWDKHDNTGGSYGGTYRFKKEFNDPSNAGLQNGFKFLEPIHKEFPWISSGDLFSLGGVTAVQEMQGPKIPWRCGRVDTPEDTTPDNGRLPDADKDAGYVRTFFQRLNMNDREVVALMGAHALGKTHLKNSGYEGPGGAANNVFTNEFYLNLLNEDWKLEKNDANNEQWDSKSGYMMLPTNYSLIQDPKYLSIVKEYANDQDKFFKDFSKAFEKLLENGITFPKDAPSPFIFKTLEEQGL

SEQ ID NO: 3539 - protein, 461 aa, Oryza sativa (japonica cultivar-group); identical to SEQ ID NO: 200

SEQ ID NO: 3540 - protein, 468 aa, Triticum aestivum
MHPAHPPRGVLAVVDSRTGKRYEVKVSEDGTVRATDFKKITAGKDDKGLKTYDPGYLNTAPVRSSICYIDGDEGILRYRGYPIEEVAESSSFVEVAYLLMYGNLPTQSQLAGWEFAISQHSAVPQGLLDIIQSMPHDAHPMGVLASAMSTLSVFHPDANPALRGQDLYKSKQVRDKQIVRVLGKAPAIAAAAYLRLAGRPAVLPSNNLSDSENFLYMLDSLGNKEYKPNPRLARVLDILFILHAEHEMNCSTAAVRHLASSGVDVFTALSGAVGALYGPLHGGANEAVLKMLNEIGAVENIPDFIEGVKNRKRKMSGFGHRVYKNYDPRAKVIRKLAEEVFSIVGRGPLIEVAVALEKAALSDDYFIKRKLYPNVDFYSGLVNRVLGFPSDFFPVLFAIPRMAGWLGHWKESRDDPGNKIMRPRQVYTGVWLRHYTPVRERVASNQGEELGQIATSNATRRRRAGSSL

SEQ ID NO: 3541 - protein, 363 aa, Buchnera aphidicola
MKQKYRIAILPGDGIGPEVMREAYKILSILKDHFSLSLEIQEFNIGGSAIDQEGIALPKKTLLGCQNSDAILFGSVGGKRWDHLPINERPERASLLPLRKHFNLFANLRPAKLYSELQHLSPIRSNIIKNGFDILCVRELTGGIYFGKPSDRVKKNNVEYAFDTEVYYDYEINRIAHLAFQLARTRKFKVCSIDKSNVLNSSILWREVVEKVSKMYPDVHLSHLYIDNATMQIIKNPNQFDVLLCSNLFGDIISDECAVITGSIGMLPSASFNEKNFGLYEPAGGSAPDIAGKNTANPIAQILSLSMLVRYGMKLNKIADKIDDAVALSLKAGYRTADISNDNNFLKTNEMGDVIANFLINGK

SEQ ID NO: 3542 - protein, 278 aa, Desulfitobacterium hafniense DCB-2
VHIEAVHALAHGHSSMRFTPRARSRRKAAAVRRGEHERKWEQRTQCARRGAALLRCRARLRRALHVRSIEDAHLRHWRPARQGEPRMHRPDPTPSARRSRGRRAAATLLAVAALALSAFAHADEFVLQSADLREGEQVPALHLFPACAGGNVSPTLEWKNPPEGTRSFAITVFDPDAPTGNGWWHWALVNLPADTAALPRGAKPPAGAMALRNDFGVAGYSGPCPPPGKTHRYEFTVWALKSDKLKLDAKAQAMLGGAMARADALGHATITVKYSRPK

SEQ ID NO: 3543 - protein, 406 aa, Vibrio vulnificus YJ016
MSVTASQVHGAVQTLTQSSDTLFLLLGAIMVFLMHAGFAFLEVGTVRHKNQVNALVKILADFGISTLAYFFIGYWVAYGAHFFADAETLAQGNGYELVKFFFLLTFAAAIPAIVSGGIAERARFYPVLIATFFTVGIVYPLFEGIIWNGNFGVQAWFEATFGVGFHDFAGSVVVHGVGGWIALVAVIFLGMRRGRVRAGKHTNFAPSNIPFLALGAWILCVGWFGFNVMSAQTLNGISGLVAMNSLMAMAGGIVAALIAGKNDPGFIHNGPLAGLVAVCAGSDLMHPLGALVTGSVAGVLFVYLFTYLQNKTKIDDVLGVWPLHGVCGAWGGIAAGIFGQSSLGGLGGVSFTVQLLGTLLGISVALIGAGIVYGAINRFSGLRLSQEDEFNGADLAIHKISSVNAE

SEQ ID NO: 3544 - protein, 206 aa, Zea mays
  unsure (1)..(206): unsure at all Xaa locations
MATSFQGTTTKCNACDKTVYLVDKLTADNRVYHKACFRCHHCKGTLKLANYNSFEGVLYCRPHFDQLFKRTGSLDKSFEGTPKVVKPERNVGNENAIKVSSAFAGTREKCFGCTKTVYPIERVTVNNTMYHKSCFKCCHGGCTISPSNYIAHEGKLFCKHHHTQLIKEKGXSASSRTITTRRHRVPGQWMMKTRSISQSLRISRDE

SEQ ID NO: 3545 - protein, 364 aa, Buchnera aphidicola
MKKKYRIAVLPGDGIGPEVMQEAYKILNILKDHFLLPLEMKEFNIGGIAIDQEGIALPKNTLLGCENSDAILFGSVGGKKWDYLSIDKRPERAALLPLRKHFNLFSNLRPAKLYADLKYLSPLRSNIIKDGFDILCVRELTGGIYFGKPNGHSKKNDIEYAFDTEVYYDYEISRIAHLAFQLARNRKKKVCSLDKSNVLKSSILWKEIVEKISKNYPDVHLSHLYIDNAIMQIIKDPSQFDVILCSNLFGDIVSDECAAITGSIGMLPSASLNEKNFGLYEPAGGSAPDIAGKNIANPIAQILSVSMLVRHGMNLKKIADKIDESVVSVLKQGYRTADISNNSHNYLKTSEMGDIIANFLINGK

SEQ ID NO: 3546 - protein, 195 aa, Triticum aestivum
  unsure (1)..(195): unsure at all Xaa locations
MAPTVMASSATSVAPFQGLKSTAGLPVSRRSNGASLGSVSNGGRIRCMQVWPIEGIKKFETLSYLPPLSTEALLKQVDYLIRSKWVPCLEFSKVGFIFREHNASPGYYDXRYWTMWKLPMFGCTDATQVXNXVEESRKDYPDXYXRIIGFKTCSSXCVNFXANLQDPERLKIITQHNAIFKAWFLHYFNFQKKSS

SEQ ID NO: 3547 - protein, 199 aa, ASPERGILLUS NIDULANS FGSC A4
MATGPATQSLKCVVTGDGAVGKTCLLISYTTNAFPGEYIPTVFDNYTASVMVDGRPISLGLWDTAGQEDYDRLRPLSYPQTDVFLICFSIVSPPSFDNVKSKWFPEIEHHAPNVPIILVGTKLDLRDDPAQLESLRMRKQEPVTYEQALAVAKEIRAHKYLECSALTQRNLKSVFDEAIRAVLNPRPATKQRNKKCTIL

SEQ ID NO: 3548 - protein, 170 aa, Zea mays
  unsure (1)..(170): unsure at all Xaa locations
MAASSTATSVHDFIVKDASGKDVDLSTYKGKVLLIVNVASQCGLTNSNYTELAQLYEKYKDQGFEILAFPCNQFGGXQEPGTNEEIVQFACTRFKAEYPIFDKVDVNGNNAAPIYKFLKSSKGGLFGDSIKWXNFSKFLVDKEGRVVDRYAPTTSPLSIEKDIKKLLGSS

SEQ ID NO: 3549 - protein, 497 aa, Vitis labrusca x Vitis vinifera
MKKSSAGAPSKPTKPAWVLPYKTQDLRTLYTIGQKLGQGQFGTTFLCTDKATGHNYACKSIPKRKLFCKEDYDDVWREIQIMHHLSEHPNVVRIRGTYEDPVFVHLVMELCEGGELFDRIVQRGHYSEREAAKLIKTIVGVVEGCHSLGVMHRDLKPENFLFDTTAEDAALKATDFGLSVFYKPGETFSDVVGSPYYVAPEVLCKHYGPEADVWSAGVILYILLSGVPPFWAETETGIFRQILQGKLDFESEPWPCISETAKELLRKMLDRNPKKRLTAHEVLSHPWVVDDRMAPDKPLDSAVLSRLKQFSAMNKLKKMALRVIAEGLSEEEIGGLRELFKMIDTDNSGTITFDELKDGLKRVGSELMESEIRDLMNAADIDNSGTIDYGEFLAATVHLNKLEREENLVSAFSFFDKDKSGYITIDELQQACKEFGLSEAHLDDMIKEIDQDNDGQIDYGEFAAMMRKGNGGIGRRTMRNNLNLGDVLGIPDMRLTN

SEQ ID NO: 3550 - protein, 174 aa, Triticum aestivum
MAPAVMASSATTVAPFQGLKSTAGLPVGRRSSGSLGSVSNGGRIRCMQVWPIEGIKKFETLSYLPPLSTEALLKQVDYLIRSKWVPCLEFSKVGFVFREHNSSPGYYDGRYWTMWKLPMFGCTDATQVLNEVEEVKKEYPDAYVRVIGFDNLRQVQCVSFIAFRPPGCEESGKA

SEQ ID NO: 3551 - protein, 426 aa, Vibrio parahaemolyticus RIMD 2210633
MDLAFDRHHIWHPYTSTLTPLTCYPVSSANGVHIKLEDGTELVDGMSSWWSTIHGYNHPHLNQAAHQQIDQVSHVMFGGITHQPAISLCKKLLSLAPNNLEHVFLADSGSVAVEVSLKMALQYWHAKGERRPKFLTLRHGYHGDTFAAMSVTDPDNSMHSLYKGFLPEHIFAQSPTCGYWDEWKPEDLADFEHKIDSHHQELAAVILEPIVQGAGGMRIYHPEFLKGVRRLCDKYDLLLIADEIATGFGRTGKLFACEHADIQPDILCVGKALTGGYMTLSATLASKHVADTVCGGDAGCFMHGPTFMGNPLACAVATASLELIEQGDWQQQTQQIEMLFSELLPKLEEYDLVKNTRWLGAIGVVETHRPVNMETIQALFVEHGVWIRPFGNLIYMMPPFISKPEDIEKLINAIDAALQRKDCFAS

SEQ ID NO: 3552 - protein, 160 aa, Acinetobacter sp. ADP1
MTNLYQFEAELLEGDTKSLADYQGKVLLIVNTASKCGFTPQFAGLEKIYEKYKDRGFEVLGFPCNQFGGQDPGSNNEIGAFCQRNYGVSFPMFAKVDVKGPEAHAIFRYLTREAKGILGSENIKWNFTKFLVGRDGKVLNRYAPTTKPESLEEDIEKALA

SEQ ID NO: 3553 - protein, 138 aa, Zea mays
MAAAARQRGTVKWFNDTKGFGFISPEDGSEDLFVHQSSIKSEGFRSLAEGEEVEFSVSEGDDPGHMARDCSSGGGGYGGGGGGGGGGCYNCGQAGHMARDCPSGGGGGGGRFGGGGGGGDRSCYNCGEAGHIARDCPT

SEQ ID NO: 3554 - protein, 489 aa, Glycine max
MESRTKSNPQLTRALCYGNDGKQQGRSPSVIVIGGGMAGIAAARALHNASFQVVLLESRDRIGGRIHTDYSFGFPVDLGASWLHGVSNENPLASVIGRLGLPLYRTSGDNSVLYDHDLESYALFDMDGKQVPPELVTKVGEIFETILQETDKIRQESSEDMSVLRGLSIVFDRKPELRLEGLAHKVLQWYLCRMEGWFAADSDTISLKGWDQVLLPGGHGLMVRGYLPVINTLAKGLDILLGHRVTKVVRRYNGVKVTVESGKTFFADAAVIAVPLGVLKAKKILFKPKLPDWKEAAIADLGIGLENKIILHFENVFWPNVEFLGVVADTSYGCSYFLNLHKAAGHAVLVYMPSGQLAKDVEKMSDEAAVNFAFMQLKKILPDASSPIQYLVSRWGSDINSLGSYSYDAVGKPHELYERLRVPVDNLFFAGEATSMSYPGSVHGAFSTGMMAAEDCRMRVLQRYGEVDLFQPVMGEEASLSIPLQISRL

SEQ ID NO: 3555 - protein, 291 aa, Exiguobacterium sp. 255-15
MISVAKDYYRTLGVEKTASNQEIKRAYRKLAKQYHPDVNQEASADQRFKDIQEAFDVLGDEEKRAQYDQYGSNYERMAGAGYGQSADYDDLFRQFNGRQSRTAGSAGQSFGFEDMFGSFFSQEPEETDEELELTVPLSHLSQNDKVTIRLATGAIQMSLPKDLYDGKKVRLRGKSSKRNRKGIAGDVYVTIHLKDDDQFRRQETDVISTVRVYPTVFVLGGEVVADTLEGKRVKLKIKPGTKPGARLRIPNRGLSNREGHRGALLVQLEVKLPEMEPSFYEEWENRLSVKE

SEQ ID NO: 3556 - protein, 146 aa, Triticum aestivum
  unsure (1)..(146): unsure at all Xaa locations
MFRTNERLPGAVLQAQARVLERLRGVSIGSSTSRPSITLDEFSATDVGSDEESLENTSISSTTSNRSPGLSKSAFLRLQIEIFEAKKDDNREASPECSICLRXFYDGDELIRLRCRHRFHSTCLEPWVRKCADCPYCRTNIRSRPR

SEQ ID NO: 3557 - protein, 124 aa, Borrelia garinii
MALSKEDILTWLEGAKTIEVVDLVTAIEEKFGVTAAIAAVGGGAASTGSTDSEEQTEFDVILMSFGDSKINVIKEVRSITGLGLGEAKALVESAPKAIKEGLSKSDAEELKKKLEAVGAKVEVK

SEQ ID NO: 3558 - protein, 321 aa, Brassica napus
  unsure (1)..(321): unsure at all Xaa locations
MSSLVFKLFLFVSLFQISISARKLAQDEPNQFQSLKYHKGALLSGKISINLIWYGEFKPAQRAIISDFITSLSHSSSKTPNQPSVATWWKTTEKYYKLAAGDKTPSPSLSLTLKSQILDETYSLGKSLTDRDIRKLASKGDQYDAVNVVLTSADVAVTGFGMSRCGTHGHARGNTGKRGSKFAYIWVGNSETHWHCVTQFPGQCAWPFHAPVYGXPQNPPLVAPNNDVGLDGMVINLASLLAGTATNPFGNGYYQGPQNAPLEAASACPGVYGKGAYPGYAGNLLVDTTTGGSFNAYGANGRKFLLPALYDPTTSDCSTMV

SEQ ID NO: 3559 - protein, 408 aa, Zea mays
MASAPGEVPSHFLCPISLQLMREPVTLPTGISYDRAAISRWLATPAPAGGRTCPVTRVPLPPQPQLTPNHTLRRLIHAWLASLSPEAEVNEDVAALRGPVPGAEAVVALLSDAAGAQVEALKRLRELVAECEDSRTVLESQDGVFDALSRVVSSADACSTAREEAVGLLASLRIPEPELAGVVARHSNLGDALTAVLRSSNLKSRANAALLVRSLSEVAWPAWVIGLSQELLAEVVRVVRDRVSTQATKAALHALAALCPYGRTRVKIVGVGAVPAIVDLLLDDPERRVNELALVALDRLCTCAEGRAELVAHAAGLAVVGKKVLRVSETASERAVRVLRSVARHAATPAVLQEMVESGVVAKLCAALWSQQCGLRTKQKAHEVLKLHSRTWRSSPCLSPKFLGLYPS

SEQ ID NO: 3560 - protein, 571 aa, Glycine max
  unsure (1)..(571): unsure at all Xaa locations
MCGILAVLGCVDNSQTKRARIIELSRRLRHRGPDWSGIHCYEDCYLAHQRLAIVDPTSGDQPLYNEDKTVIVTVNGEIYNHKQLRQKLSSHQFRTGSDCEVIAHLYEEHGEEFVNMLDGMFAFILLDTRDKSFIAARDAIGITPLYLGWGHDGSTWFASEMKALSDDCERFISFPPGHIYSSKQGGLRRWYNPPWXFSEDIPSTPYDQXPFCLEVLVWHAVLQKLWNGMHHGLLSGGLDSSLVAAVVNRDLAESESARQWGSQLHTFCIGLKGSPDLKAAKEVADYLGTRHHELYFTVQEGIDALEEVIYHIETYDVTTIRASTAMFLMSRKIKALGVKMVLSGEGSDEIFGGYLYFHKAPNKKEFHEETCRKIKALHLYDCLRANKSTAAWGVEARVPFLDKEFINVAMSIDPEWKMIRPDLGRIEKWVLRNAFDDDKNPYLPKHILYRQKEQFSDGVGYSWIDGLKDHANKQVTDATMMAANFIYPENTPTTKEGYLYRTIFEKFFPKNAAKATVPGGPSVACSTAKAVEWDAAWSKNLDPSGRAALGIHDAAYDAVDTKIDEPKNGTL

SEQ ID NO: 3561 - protein, 323 aa, Candidatus Blochmannia floridanus
MNQLDNLKKFSKISADTGDVDLIRTYQIQHATTNPSLILKSPLFTTYLKLFNDAIDYAQKIGGNQNTKITNASDRLIVNIGSEILANISGYISTEIDAQLSFNTDLTIKKAHKLITMYQKKNIDTSRVLIKIAATWEGIQAAEELEKSGIKCNLTLVFSFAQARACAERNIYLISPFIGRIYDWYNQRNLIKTSYINDDPGIQSIKKIYHYYKTYGYNTIIMGASFRRLEQILALSGCDYLTISPHFLKQLYQNTNSVTRQLFPPKTIISHHIPVLDQSEFFQEHNKNQMAVEKLNEGIQQFSIDQQKLHKLLLNNLNVQLQK

SEQ ID NO: 3562 - protein, 363 aa, Buchnera aphidicola
MKQKYRIAILPGDGIGPEVMREAYKILNILKNDFLLPLEFQEFNIGGIAIDNEGLALPKKTLLGCENADAILFGSVGGKKWDTLPIDQRPERAALLPLRKHFNLFANLRPAKLYSELEYLSPLCSKITKNGFDILCVRELTGGVYFGHPHGRVKKDDIEYAFDTEVYYDYEINRIAHLAFQLARNRKNKVCSIDKSNVLNSSLLWKEIVEKVSNSYSDVRLSHLYIDNATMQIIKNPNQFDVLLCSNLFGDIISDECAAISGSIGMLPSASLNENNFGLYEPAGGSAPDIEGKNIANPIAQILSVSMLVRYGMHLTKIADQIDKSVISVLKRGYRTADISNNNNYLKTHEMGDVIADALINGK

SEQ ID NO: 3563 - protein, 309 aa, Salmonella enterica subsp. enterica serovar Typhi Ty2
MALESGIAQLVEEFIAAGRPSSREQNIDDRRAGYIASTTLAGETETRVQVEDIELDAMTFRVVSPLNATGKLPCIIYYHGGCFVSGGFATHDNQLRQLAFYSRCRVIAAQYRLAPEHTFPAAHNDAETGANTIWKYAQKLGIDRENITLAGDSAGGHLALVTALRLKAARQWQPAQLILIYPMLDATARFASYTCNGLDYIITRDTLLSGYEMYMPRTDPLHPEASPLWREDFAGLPSTHIITAEFDPLRDEGEALYQRFQEQGVECTCQRYLGVIHGFFQLGGVSKTARDAIRDVAWRVVSPSTSKMT

SEQ ID NO: 3564 - protein, 252 aa, Glycine max
  unsure (1)..(252): unsure at all Xaa locations
MAEERFTGVVQWFNNGKGFGFIKPDDGGEDLFVHQSSIRSDGYRTLLEGDRVEFAIATGDNDKTKAVDVTGVDGAPLQPRAAAGNNNRAAGSGFGFGARRNGGGGAAXYQCGEFGHLARDCNRSSNSGGGGGGSGGGCFNCGGFGHLARDCVRGGGGSVGIGGGGGGGSCFRCGGFGHMARDCATGKGNIGGGGSGGGCFRCGEVGHLARDCGMEGGRFGGGGGSGGGGGKSTCFNCGKPGHFARECVEASG

SEQ ID NO: 3565 - protein, 116 aa, ASPERGILLUS NIDULANS FGSC A4
MADVEMKEASSSKTKAVSKAEGSGDGKKKFEVKKWNAVALWAWDIVVDNCAICRNHIMDLCIECQANQGSSTTEECTVAWGICNHAFHFHCISRWLKTRQVCPLDNKDWEFQKYGR

SEQ ID NO: 3566 - protein, 365 aa, Buchnera aphidicola
  unsure (1)..(365): unsure at all Xaa locations
MKTKYRISVLPGDGIGPEVMREAYKILNILKNHFSLPLEIKEFNIGGAAIDQEGVALPKKTLLGCENSDAILFGSVGGKKWDHLPIDKRPERASLLPLRKHFNLFANLRPAQLYSELKYLSPLRSDIXIKNGFNILCIRELTGGIYFGKPTGRXLKKNNIEYAFDTEIYYDYEINRIAHLAFQLAQTRNYKVCSIDKSNVLNSSVLWRETVQKVSKNYPDVHLSHLYIDNATMQIIKDPNQFDILLCSNLFGDIVSDECAIITGSIGMLPSASLNEKKFGLYEPAGGSAPDIEGKNIANPIAQILSVSMLVRYGMNLKKIADKIDQSVISVLKKGYRTADISNNNNYLKTNEMGDVIANTLISGE

SEQ ID NO: 3567 - protein, 195 aa, Nanoarchaeum equitans Kin4-M
MAHGPRYRVPFRRRREGKTVYRKRLKLLLSGKPRLVVRRFNSNILAQLVEYDPKGDRVIFTIHSNVLKKYGWKGHRGNLPSAYLVGLIAGYEALKRGYKEAVLDIGRYKSTKGNALYAVLKGALDAGLNIPHSETILPSEDRIRGEHIANYAKMLKENEELYKKQFSRYLKEGLDPEQLPNHFEEVKQKIISQYQ

SEQ ID NO: 3568 - protein, 363 aa, Buchnera aphidicola
MTRKYRIAVLPGDGIGPEVMREAYKILNILKDDFSLPLEIKEFNIGGAAIDQEGVALPKKTLLGCENSDAILFGSVGGKKWDNLPINQRPERASLLPLRKHFNLFANLRPAQLYSELKNLSPLRSNIIKNGFNILCIRELTGGIYFGKPTGRLKKNNIEYAFDTEIYYNYEINRIAHLAFQLSQTRNYKVCSIDKSNVLNSSILWREIVKKVSKHYPDVHLSHLYIDNATMQIIKDPNQFDVLLCSNLFGDIISDECAMITGSIGMLPSASLNEKKFGLYEPAGGSAPDIEGKNIANPIAQILSLSMLVRYSMNLKKIADKIDQSVISVLKKGYRTADISNNNDYLKTNEMGDVIASALISGE

SEQ ID NO: 3569 - protein, 162 aa, Triticum aestivum
MEGRMFGLETPLMTALQHLLDVPDGEAGGPGNAAGEKQGPTRAYVRDARAMAATPADVKELPGAYAFVVDMPGLGSGDIKVQVEDERVLVISGERRREEKEDAKYLRMERRMGKMMRKFVLPENADMEKISAVCRDGVLTVSLEKLPPPETKKPKTIQVQVA

SEQ ID NO: 3570 - protein, 335 aa, Methanopyrus kandleri AV19
MNASPTVVVIPGDGIGPEVIDAALKVVRAVLGDELEIVEEQAGYSLWKKRGVTIEDETIERCREADAMLFGACTTPEDPEAKSPIVTLRKELGLYANVRPARSWPVPRPVDTEFDLVIVRENTEGLYTGCECEIHDGVTVALRKISEEGTRRVAEVACDLAEERSGRVTIVHKANVLKLTCGTFKRVAAETVERRGLEWDDEYVDAAAYKLVREPDSFDVILTSNLFGDILSDLAAGLMGSLGLAPSANLGDDAALFEPVHGSAPDIAGKGIANPVAAILSAAMMLDHLGYGEEARIIERAVEEVLREGVRTPDLGGSATTEEVAEAIAERVATG

SEQ ID NO: 3571 - protein, 272 aa, Bradyrhizobium japonicum USDA 110
MDNLKTQGISMPKLGLGTFRMQGDACRAAVESALSIGYRHIDTAEMYANEEPIGAALAAARLPRGELHVTTKVWHENLAPDAIRRAFDASLKKLRLDHVDLYLVHWPSRSANWGAVFETLMKLKEEGRTRAIGVANFTTALLKIAVEDIKAPIACNQIEYHAMLDQSKVLAYLNARSIPLVAYCPLAQGRVASDPVLAEIGARHNATAAQVALKWLLDQGGVAAIPKASRRESQQANLDALKIMLDDADRNKIAALPKDRRCVNPGFAPAWD

SEQ ID NO: 3572 - protein, 398 aa, Candida albicans SC5314
MTVEYETKQLTPAQVKIILDTVPILEEAGETLTQKFYQRMIGNYDEVKPFFNTTDQKLLRQPKILAFALLNYAKNIEDLTPLTDFVKQIVVKHIGLQVLPEHYPIVGTCLIQTMVELLPPEIANKDFLEAWTIAYGNLAKLLIDLEAAEYAKQPWRWFKDFKVTRIVQECKDVKSVYFTPVDKDLLPLPKPERGQYLCFRWKLPGEEFEISREYSVSEFPKENEYRISVRHVPGGKISGYIHNNLKVGDILKVAPPAGNFVYDPATDKELIFVAGGIGITPLLSMIERALEEGKNVKLLYSNRSAETRAFGNLFKEYKSKFGDKFQAIEYFSEDNNTDDKIVIDKAFNRKLTTDDLDFIAPEHDVYLVGPREFMKDIKEHLGKKNVPVKLEYFGPYDP

SEQ ID NO: 3573 - protein, 2072 aa, Streptococcus mitis
MEKYFGEKQQRFSFRKLSVGLVSATISSLFFMSVLASSSVEAQETKGVHYKYVTESELSSEEKKQLVYDIPTYMENDDETYYLVYKLNSQNQLGDLPNTGSKNEMQALVAGTSLAALGILIFAVSKKKVKNKTVLHLVLVAGIGNGVLISAHALENNLLLNYNTDYELTSGEKLPLPKDISGYTYIGYIKEENITSESKVNNQEKSAATPTKQQKVDYNVTPNFVENPSTVQAMQEEKPVSSTKPTEVQVVEKPLSTELTNPTKEEKQSLDSQVQLSEHKNLEAKKDEKVSPKEKTGVNTLNPQDEVLSGQLNKPELLYREETIETKIDFQEEIQENPDLAEGTVRVKQEGKLGKKVEVIRIFSVNNEEVSREIVSTSTTAPVTRIVEKGTKKAQVIKEQPETGAEHKEVQSGAIVEPAIQPELPAAVVTDKGEPAVQPELPEAVVTDKGVPEVQPALPEAVVTEKGEPAVQPELPEAVVTDKGETEVQPESPDTVVSDKGEPEQVAPLPEYKGPQAGAIVEPEQVAPLPEYTGPQAGAVVEPAIQPELPEAVVTDKGEPEVQPALPEAVVTEKGEPAVQPELPEAVVTDKGETEVQPESPDTVVSDKGEPEQIAPLPEYTGVQAGAIVEPEQVEAPKEYTGVQAGAIVEPEQVAPLPEYTGVQAGAIVEPEKVEAPKEYTGVQAGAIVEPEQIAPLPEYTGPQAGAIVEPEQVAPLPEYTGVQAGAIVEPEQIAPLPEYTGPQAGAIVEPEQVDPLPEYKGNIEQLKPETPVEKPKETDPEKTLELRNVSDIELYSHQTNGTYKQHVSLDSVPSNPDTYFVKVKSSAFKDVYLPVASISEELKDGRTFYKITARVDKLQQEIDHKYVENFSFYLAKKTTEETTNFTSFSNLVHAINQNLGGTYYLSASLNANEMELESDAKSYIKGNFTGRLIGEKDGKHYAIYNLKKPLFNNLSNATVEKLSLKNVSISGKNDIGSLANEAKNGTKINQVHVDGVLAGERGIGGLLAKSEQSSITESSFKGRIVNTYETTATYNIGGLVGHLTGENASIAKSKATIAISSNANSSDQTVGGLVGLVDNDAHVRDSYAEGDINNVKQFGEVAGVAGYLWDRTSGKEQHAGSLTNVLSDVNVTNGNAITAYHYNNMKVTATFSNKANRVIKVALENDEVVSKESFEERGKMLDDSQIASKKAEINPLTPPTVEPLSTSGNKESDFSKVANYQAKRALAYKNIEKLLPFYNKATIVKYGNLVNENSLLYQKELLSSVMMKDNQVITDIVSNKQTANKLLLHYKDHSSEKLDLKYQTDFAKLAEYSLGDTGLLYTPNQFLYDQNSIIKQVLPELQQVSYNSEAIRNTLGISPEVKLTELYLEDQFAKTKDHLEESLKKLLSADAALVENNQVMTGYIVDKIKRNKEALLLGMSYLERWYNFSYDKVSAKDLVMYHLDFFGKGNASPLDTLIELGKSGFNNLLAKNNVDTYAISLASHHGTKDLFNTLENYRKVFLPNTSNNEWFKSQTKAYIVEEKSNIPEVKAKQEKAGSKYSIGVYDRITNDSWKYRNMVLPLLTLPERSVFVISTISSLGFGAYDRYRNKDHQASGDLNSFVEKSAHETAERQRDHYDYWYRILDEKGREKLYRNILLYDAYKFGTDNTEGKATEVADFDNPNPAMKHFFGPVGNKVGHNGHGAYATGDAVYYMGYRMLDKDGAITYTHEMTHDSDQDIYLGGYGRRSGLGPEFFAKGLLQAPDHPEDATITINSILRHLKSDSKEGERLQVLDPTTRFKDATDLQKYVHNMFDVVYMLEYLEGQSIVNKLSVYQKMEALRKIENKYVKDPSDGNKVYATNVVRDLTIEEAEKLHSFNDMIDNNILSSREYASKTYERNGYFTIKLFAPIYAALSNDDGTPGDLMGRRMAYELLAAKGFKDGMVPYISNQYEDLAKQNGKKITIYGKERGLVTDKLVLEKLFDGKYSSWAAFKKDMYQERIAQFNHLTKVTFKDPTQSWMSNATKTIQRVNDLQQLMDEAVLKDAEERNYYYWNNYNPETDSAVHKLKRAIFKAYLDQTDDFRSSIFENKK

SEQ ID NO: 3574 - protein, 400 aa, Candida albicans SC5314
MTVASASIINNYFESKPLTPEHIQIIIDSVPILEHLDVQLTEKFYKRLLKQNPEFKPFFNETHQKLLRQPRIMIHFLIQYAKNIQDLTPMIDFIKKIASKHVGLQVKPEHYPKLGQVLINVIINLFPKQLVHDEFIEAWTLAYQNLANLLIKLESEQYVEKPWYGFKQFKVTRLQRECSDVKSLYITPVDGSPIPKPKRGQYLCMRWLLPGEKHEITREYSISEYPKNNEYRITVRYIPGGKVSNYIHNNINVGDIVYSGPPCGDCVYESSSKNLVFLAGGNGVTALLPMIEAGLTEGRQVKLLYSNRSTDSRSFGKLFQSYKLQYGDRFQVVEFLSRGRTIDPIDKFYRRSLTLEDLDFIVPEDDVYLIGPRTYMKMIEDYLKDRNITVKLDYFGPREI

SEQ ID NO: 3575 - protein, 181 aa, Zea mays
  unsure (1)..(181): unsure at all Xaa locations
MSYYGDRRAESSIVEAFTLSPLPYPVILVLLMVTLLLGASWFFTYDDFIEEASQQLSWALLGVPIALVLLIRWISSVDSFEGYLGFYPTESRWKGRYERGPAEGSSPWGXVALLVLLLLVLASFHSTIHDMWGPVNGCSDCSPDSCSVPRAHVCACATGCCLIDRWIDDSMYIFVRGDAAG

SEQ ID NO: 3576 - protein, 400 aa, Zea mays
MVLEATMICIDNSEWMRNGDYAPSRFQAQADAVNLICGAKTQSNPENTVGVMTMAGKGVRVLVTPTSDLGKILACMHGLEVGAEANLAAAIQVAQLALKHRQNKRQQQRIIAFIGSPVKYDKKVLETIGKKLKKNNVALDIVDFGESDDEKPEKLEALIAAVNSSDSSHIVHIPPGENALSDVLLSTPIFTGEEGGSGFAASAAAAAATGASGFEFGVDPNVDPELALALRLSMEEERARQEAIAKKAAEDTSNTEHNNVPSSNSDSVMAEGEPASNAAAGDKEQPKDDDDLLQQALAMSMEGGASGSAAVTDSAMAEAGAVDPDLALALQMSVQDANMSSDTDMSKVFEDRTFVSSILNSLPGVDPNDPSVKDLLASLHSQGEQEKKEDTSDKTEDEKN

SEQ ID NO: 3577 - protein, 374 aa, Streptomyces purpurascens
  unsure (1)..(374): unsure at all Xaa locations
XSSSSPGEPLEPTDQDLDVLLKNLGNLVTPXALRVAATLRLVDHLLAGADTLAGLADRTDTHPQALSRLVRHLTVVGVLEGGEKQGRPLRPTRLGXLLADGHPAQQRAWLDLNGAVSHADLAFTGLLDVVRTGRPAYAGRYGRPFWEDLSADVALADSFDALXSCDEDLAYEAPADAYDWSAVRHVLDVGGGNGGXLAAIALRAPHLRGTLVELAGPAERARRRFADAGLADRVTVAEGDFFKPLPVTADVVLLSFVLLNWSDEDALTILRGCVRALEPGGRLLVLDRADVEGDGADRFFSTLLDLRXLTFXGGRVRTRDEVVDLAGSAGLALASERTSGSTTLPFDFSILEFTAVSEEAAPAAQASEALPAQE

SEQ ID NO: 3578 - protein, 112 aa, Bartonella sp. Sb1859nv
NEACLKMLQEIGSVKRIPEFIARAKDKNDPFRLMGFGHRVYKNYDPRAKIMQKTCHEVLKELNIQDDPLLDIAIELENIALNDEYFVEKRLYPNVDFYSGITLKALGFPTEM

SEQ ID NO: 3579 - protein, 89 aa, Zea mays
SRITRAERARAPYVDFLKPIIADGDTGFGGTTATVKLCKLFVERGGAGVHLEDESSVSRNCGHMSVNVRVAVSKHVNRLVAARLQFDVM

SEQ ID NO: 3580 - protein, 424 aa, Glycine max
  unsure (1)..(424): unsure at all Xaa locations
HASADAWAVGATRISVLPIIPCSGQLFSFLPSPPFVHSPTPHSDQIHHSFFFPFLQQAQWRRRSLPLLKHLLLSRRIPARSVTYMHRPGDGSPRPVTLIPGDGIGPMVTGAVEQVMEAMHAPVYFEKFEVHGHMKAVPPEVLDSIRKNKVCLKGGLVTPMGGGVSSLNVQLRKELDLYASLVNCFNLPGLPTRHDNVDIVVIRENTXEGEYSGLEHEVVPGVVESLKVITKFCSERIAKYAFEYAYLNNRKKVTAVHKANIMKLADGLFLESCREVATKYPGIKYNEIIVDNCCMQLVSKPEQFDVMVTPNLYGNLVANTAAGIAGGTGVMPGGNVGAEHAVFEQGASAGNVGSDKIREQKKANPVALLLSSAMMLRHLQFPAFADRLETAVEKVILEGKCRTKDLGGTSTTQEVVDAVIDALD

SEQ ID NO: 3581 - protein, 401 aa, Zea mays
MEAVGVTPAPVAAPEKKKLLDLKDPFPAAAAANGGAKASPAAKWAMKKKLVGGDAGYVLEDVPHLTDYMPQLPTYPNPLQDNPAYSVVKQYFVNPDDTVTQKIVVHKTSARGTHFRRAGPRQRVYFQSDEVNAAIVTCGGLCPGLNTVIRELVCGLYDMYGVSSVVGIEGGYKGFYSKNTVALTPKSVNDIHKRGGTVLGTSRGGHDTAKIVDCLQDRGINQVYIIGGDGTQKGASVIYEEVRRRGLKCSVVGVPKTIDNDIAVIDKSFGFDTAVEEAQRAINAAHVEAESAENGIGVVKLMGRNSGFIAMYATLASRDVDCCLIPESPFYLEGKGGLLEFVERRLKDNGHMVIVVAEGAGQDLIARSMNFVDTQEGARTRHGQDHRGHHAPRTSLCFYSV

SEQ ID NO: 3582 - protein, 124 aa, Borrelia afzelii
MALNKEDILTWLEGAKTMEVVELVTAIEEKFGVTAAVATSVGGAASTGSTDSEEQTEFDVILMSFGDSKINVIKEVRSITGLGLGEAKALVESAPKAIKEGLSKSDAEELKKKLEAVGAKVEVK

SEQ ID NO: 3583 - protein, 159 aa, Clostridium acetobutylicum ATCC 824
MSVYDFKAKDISGEEISLSKYEGKVLLIVNTASKCGFTPQYKELEDIYKKLGNEKFEILGFPCNQFANQEPGGSGDIKNFCEINYGVTFPLFEKIDVKGENAHPLFKYLASQAGGILGKEIKWNFTKFLIDKKGDVVDRFAPVTKPSKIKDKIVKLMEE

SEQ ID NO: 3584 - protein, 181 aa, Clostridium acetobutylicum ATCC 824
MSIYDFKVKDINGEDISMEEYRGKALLIVNTASKCGFTPQYEDLEALYKKFKGENFEVLGFPCNQFENQEPGTNNDIKKFCQINYGVTFKIFDKVDVNGENEAPLYRYLKEQAPFKELDESTPTAKIIAAFLREKLPETLIGDSIKWNFTKFLIDKNGRVVNRFESGVEPMEIESYIKALI

SEQ ID NO: 3585 - protein, 1395 aa, Neurospora crassa
MPMGDATPKVRRASGGRCIAFSGLIIVVGPEPGGCISPVWCSGQTTSMPQVEAQEMRPRHEYLIVAPIHLLPQRRDSPLDLRRGGVWGMTTTSRDAYTPLESLFLLRGIAKHGLDQQAFHRIADLLQQNHLIKLAPSYDAARLRPEPLQELFLHLLWDELKQEHDTPGPKPDGDLSPNSKRRRLQPPPLPTLREAHQYVPKIESLYRKLEQTYVNQTLQEIDQYERHYDRLQTEVRVLEQAVARDEEQERRQKIPDGLPAQDGPVAHKQSPALGSVPSPVAVQGPGARLPNGASHGPSPVASPRIASPRLPPPQSQSPRTPSTPQLPIPTPPPPPPPPPPPPPPPPPPIPPQLPPQVSAHIPPRPEVARHASVPSPTTQLPPVRSSPAPLPPTTLPPTLPPTTTAALQPQLVSSPRLGHHNIPRGPITSGPGSPRPMTAGGGIPHVLQPPASFSQAPPQPPQPPKPSTPTGGLPRLDSIAGPSRQSPVLQTAHHPATTLPQPQPLIPGQAQGGQLKWEPPYQPQAGHRPILGPGQQHPHYSPVSQPVQPLHSPRLPSHPPPQQVQQHAVVTRPPQPPPMKPQVLIPPQTGQHYAPPLQPAPNRAMSDSPGPSPVRQPVASNAATGIPRANYQQHPSPYPPYHLPQHLQQGAAVSSPPQSPSAIPPRLTHGLAAPQQQRSPPPLQPQQQQSPQHQPQALQAPPPFSQPVTTSMAPSPSLAPIQSEVQRAYPSPYPPQLPQPSHPPQAHPPQAPHPPQVPHQHPPQAHQVPQVPQASQAPQPHVSRAPQVHPTPHLPHPPQAPLPQVTQAQSPRIPPITHAPQPPVTHAPHVAHPPQQQQQPQQQQQPQQPQQPQQPQPPISQHRPRSQSAATTYSGPRFSPITSVTTTLVPPARLGLGTGTKWVSAASASTPKLPDVRSGGDDIRPPAFEPLSPVQQPAVLPTARQDAARPSPARQPTNETSRARGSIPLVGPQPTPASQARQQAAQKVSKPLDKPTASEQPSTVKEIAKESAKEPEPATSVKNEVDTPRATMDTGDTTADESVAGKRQAARQAKRKRDELSPTPAATPAEATPNGNATPANEKSQQETLATASAAPPDAHRVLWSRGFHKVSASAMEQIVRHRSANMFAAPIREKDAPGYHKVILQPQDLKSIRAAIAHGNRSATQAAAALPGGDPGHMLVWLPQMEELVPPRGIINTAQLDRELAHMFSNAIMYNPDRWHGPGSSFLAEREERTDDNNQPGGHGHGHPGDVLGYKVDEFGVVKDARAMFSEADSLLADLRVAEDGRVKSMMEDGTLQKMPSVNGSQNHSRQASKGGEKAEEEQKDKDKPSGDGDKEKDKDGDVSMIGDKEEEAQADGKVDEEGDGEGTATETETAGGSNGNPSKRRRVTRGEKG

SEQ ID NO: 3586 - protein, 427 aa, Escherichia coli
MADTKAKLTLNGDTAVELDVLKGTLGQDVIDIRTLGSKGVFTFDPGFTSTASCESKITFIDGDEGILLHRGFPIDQLATDSNYLEVCYILLNGEKPTQEQYDEFKTTVTLHTMIHEQITRLFHAFRRDSHPMAVMCGITGALAAFYHDSLDVNNPRHREIAAFRLLSKMPTMAAMCYKYSIGQPFVYPRNDLSYAGNFLNMMFSTPCEPYEVNPILERAMDRILILHADHEQNASTSTVRTAGSSGANPFACIAAGIASLWGPAHGGANEAALKMLEEISSVKHIPEFFRRAKDKNDSFRLMGFGHRVYKNYDPRATVMRETCHEVLKELGTKDDLLEVAMELENIALNDPYFIEKKLYPNVDFYSGIILKAMGIPSSMFTVIFAMARTVGWIAHWSEMHSDGMKIARPRQLYTGYEKRDFKSDIKR

SEQ ID NO: 3587 - protein, 365 aa, Buchnera aphidicola
  unsure (1)..(365): unsure at all Xaa locations
MKKQYRIAVLPGDGIGPEVMKEAYKILKILQNYFSLHIEIKEFNIGGIALDKEGVALPKDTLLGCENSDAILFGSVGGKKWNNLPIEKRPERASLLPLRKHFNLFYNLRPAKLYSELRFLSPLRSKTXIKNGFDILCIRELTGGIYFGEPRGRLKKNNIEYAFDTEVYYDYEINRIAHVAFQLARTRKNKVCSIDKANVLNSSLLWREIVTKVSKNYPDVHLSHLYIDNATMQIIQNPNQFDILLCSNLFGDILSDECAIITGSIGMLPSASLNEKNFGLYEPAGGSAPDIAGKNIANPIAQILSLSMLVRYGMNLKKIANKIDQSVISVLKKGYRTFDISDDNNXFLKTNEMGDVIADALINGE

SEQ ID NO: 3588 - protein, 382 aa, Ralstonia solanacearum GMI1000
MMRDAGQLDLMDSRVTQLAFWSALPERWTSDAEETLVCCHVRQETHDVKSFFFRSPAGRTFLFEPGQFITLELDIEGETINRCYTLSSSPARPHTISITVKRVPGGKVSNWLHDNLQPGAAIRVLGPAGEFTCARHPARKYLFLSAGSGVTPLMSMSRAHHDLAEDRDIVFVHSARTPDDIIFARELELIASNHTNFRTSFVVERLGARTNWPGITGFLSLPLLKLIAPDFMEREIFTCGPAPYMKAVRGLLEEAGFDPARYHEESFSFESLTTGAAAEAIAPDAAPTANPDAAAPQFSISFAKTGREIACGAAQHVLDAARQAGVRLPASCTQGMCGTCKVKLVSGQVDMKHNGGIRQREIDQGMVLLCCSKPLSDLVIDK

SEQ ID NO: 3589 - protein, 93 aa, Glycine max
  unsure (1)..(93): unsure at all Xaa locations
LVALLSSALPNSTGADSLEHILAQNNRIIDFYTGAQLRVKQYLPHYSTQEEWQVHFGSRWEAFVEXXXAYDPLALLAPGHRIFQKAVSSLLIN

SEQ ID NO: 3590 - protein, 363 aa, Buchnera aphidicola
MKKNYRIAVLSGDGIGPEVMQEACKILNVLKKYFFLSLEIQKFNIGGIAIEREGVALPKTTLLGCENSDSILLGSVGGKKWDNLPVEQRPERAALLPLRKHFNLFSNLRPAKLYPELKCLSPLRSDIVKNGFDILCVRELTGGIYFGEPKGFVNKNNTKYAFDTEIYHEYEIIRIAHLAFKLARSRKKKVCSIDKSNVLQSSILWREVVESVSKKYPDVHLSHLYIDNAAMQIIKDPNQFDVLLCSNLFGDIISDECATITGSIGMLPSASFNEKNFGLYEPAGGSAPDIEGKNIANPIAQILSLSMLVRYGMNLNQIADKIDKAVNNVLKKGYRTSDISHDNNFLKTDEMGDLIVDSLINGK

SEQ ID NO: 3591 - protein, 479 aa, Methanosarcina mazei Go1
MVAMKMQINGKAAGSCGGECFDVRNPATCELLEQVPRGTEEDVALAVEAALSAFEGWASISPQQRGMVFYRAAGLVRQRKEELAALLTQEQGKPLAEARNELEGFSHVLEYYCGLAGSLRGDFIPVTGNGYSFTVKKPLGVCAAIIPWNMPALIMGWKIAPALISGNTFVLKPASSTPLTNLTLASILNEAGLPAGVLNVVTGSGEIAGESLVRSPDVRKISFTGESGTGKRISELAASGMKRVTLELGGSDPMIVCDDANLESAVAGAIRGRFYNCGQTCTAVKRLYVFESVAREFIRKLEEGVKRLKVGNGLDKDTDMGPLNNHSQFEYIKELVAGIEEKGEGRIIAGGKAPSFKGMGKGYFFEPTLVSDVPGDSRLLKEEVFGPLLPIVTVRNLDEAIEEANRSIYGLGASIWTKDLDRIRMGCEQLNAGIIWVNQHLKVAPEVPFGGVKESGFGRENGPDILSEYLETRTIMLKT

SEQ ID NO: 3592 - protein, 121 aa, Zea mays
  unsure (1)..(121): unsure at all Xaa locations
MNAPDRYERFVXVPEGTKKVSYERDTKIVNAASFTVEREDHTVGNILRMQLHRDPNVLFAGYKLPHPLQYKIIVRIHTTSQSSPTQAYTQAINDLDKELEYLKQAFEDEKNRYEDRMKQGF

SEQ ID NO: 3593 - protein, 181 aa, Zea mays
MASSMLSSAAVVTSPAQATMVAPFTGLKSSAAFPVTRKTNKDITSIASNGGRVSCMKVWPPIGKKKFETLSYLPDLSDVELAKEVDYLLRNKWIPCVEFELEHGFVYREHGNTPGYYDGRYWTMWKLPLFGCTDSAQVLKEVEECKKEYPGAFIRIIGFDNTRQVQCISFIAYKPPSFTEA

SEQ ID NO: 3594 - protein, 157 aa, Brassica napus
FTASSSSSSSISLLNSDLIMIGAKSFLGLPIASPKGIISDSNSLSTNSRSVGVLRACVSMEGSQTMSHSKNGSIPELKSVNGHTGQKQGPLSTVGNSTNIKWHECPVEKVDRQRLLDQKGCVIWVTGLSGSGKSTLACALNQKLYQKGKLCYILDGD

SEQ ID NO: 3595 - protein, 247 aa, Candida albicans SC5314
MSIVSLTGIEVLNNPAKFTDPYEFQITFECLEPLKEDLEWKLTYVGSSDSLDHDQELDSILVGPVPVGINSFLFKADAPSPELIPASELVSVTVIILSCSYNDKEFVRVGYYVNNEYDTEELRENPPAKVAIDHVVRNILAEKPRVTRFNIVWDNEEGADEYPPEQPEDEEEEEEEEEEGEEEEEDEDEEDDDDDEDLNGDAVVDLEKEEISTPRDNDEDIEIDIASESEVEEGGVEEEAKVNTPKD

SEQ ID NO: 3596 - protein, 359 aa, Arabidopsis thaliana
MEGDVGIGLVCQNTMDGKASNGNGLEKTVPSCCLKAMACVPEDDAKCHSTVVSGWFSEPHPRSGKKGGKAVYFNNPMWPGEAHSLKVEKVLFKDKSDFQEVLVFESATYGKVLVLDGIVQLTEKDECAYQEMIAHLPLCSISSPKNVLVVGGGDGGVLREISRHSSVEVIDICEIDKMVIDVSKKFFPELAVGFDDPRVQLHIGDAAEFLRKSPEGKYDAIIVNSSDPVGPALALVEKPFFETLARALKPGGVLCNMAESMWLHTHLIEDMISICRQTFKSVHYAWSSVPTYPSGVIGFVLCSTEGPAVDFKNPINPIEKLDGAMTHKRELKFYNSDMHRAAFALPTFLRREVASLLAS

SEQ ID NO: 3597 - protein, 211 aa, Zea mays
  unsure (1)..(211): unsure at all Xaa locations
GSERSWSERRACVAMDGAEDDGTEWMMHGAGGKGKGGGALDKNKKRFSDEQTKSLESMFATQAKLEPRQKLQLARELGLQPRQVAIWFQNKRARWKSKQLEREYSALRDDYHALLCSYESLKDEKRALLKQLEKLAEMLHEPPQGKYYGGNADDVRSGGVGGTKEEEESTDACAGAALYSSDSTPAAAGXSSSAEQTCSGSQWWELESLSE

SEQ ID NO: 3598 - protein, 481 aa, Chlamydomonas reinhardtii
MSSTPSATAIDHGATYSDLLIIQGAIVFFLQVGFVSLEVGYGRSKNVKNILLKNTVNILLCAICWWAVGYAFSYGSSTDGFIGTSGFFHDGGLGAAKLWFYSWTFCLSTVTIVSGCLAERTSLVAYPVFTVLMASWVHPVVVHWAWSRDSWLLGISSECRFLDFAGGTVVHICGGMMGLVGAALVGPRIGRFEEGRAKELPGHDVSSVAIGTLFLWFGWFGFNCGSAYVYMGNMAAAAAEAAASAVASGDTSADVYASAAAAVSAAVTSGANATLHPGSTPADRVALNMTLCASVSGLTALLLSSLRSGTVDLCVCCNSLLAGLVMSTPACGFITSWAAVIYGLVAAALYMGGTRMLVRFHVDDPLESSAIHFGCGGVGTLLLALLARPTYVQELTGYDCGGLVYGGRKGAILLGLQLLGIAAITAWTAFFSVLVFYLLRRLGRLRVDQVTELAGLDNMEHGGPAYPEFNLVPYNTGSAER

SEQ ID NO: 3599 - protein, 473 aa, Gloeobacter violaceus PCC 7421
MPSIAIIGGGLAGLQAAYQLKKLGLYADVYEAKSFVGGRIQSRKNVVGPGLVVELGGTFINSNHRDILTLAQEFNLPLFNRAKDAQQFPFPETGYYFDGQNRLESEVAEKLRPLADQIAKDAALLDENFDKFAPQFDRLSVAEYLNIHADKIPEPFIRTLIENSIRTEYGVEPVDSSALQLLFNLPVVDGEAVEVLGSSDEIFVVEGGSERLIASLAAVLPGRIHTRMALTRLEKMGQKYRLTFAGAQTREVDFVIVAVPVNGLKKIDFQVPLPPAFRRFIKEVSLGFNEKLFAGFSERVWRQEEGFVSEGWTDLGFSQVWEDTQRQPASSDAALTFFMGAQEVFATQSLGAQTLGEAFLQRFEAVVDGAQAAATGRFSRTRWNQDPWIGGGYTTFKPGQLTEFGGFLYIESVIPAFRQDVNFGNLIFAGEHLSDEFYGFMNGAAQTGRLAAQVVLRQIQEGQLASGKPTSAA

SEQ ID NO: 3600 - protein, 494 aa, Triticum aestivum
MSATCAADLGPLLGAAAANATDYLCNRFADTTSAVDSTYLLFSAYLVFAMQLGFAMLCAGSVRAKNTMNIMLTNVLDAAAGALFYYLFGFAFAFGTPSNGFIGKHFFGLKDMPQTGFDYSFFLFQWAFAVAAAGITSGSIAERTQFVAYLIYSAFLTGFVYPVVSHWIWSVDGWASAARTSGPLLFKSGVIDFAGSGVVHMVGGIAGFWGALIEGPRIGRFDHAGRSVALKGHSASLVVLGTFLLWFGWYGFNPGSFVTILKSYGPPGSINGQWSGVGRTAVTTTLAGSVAALTTLFGKRLQTGHWNVVDVCNGLLGGFAAITAGCSVVDPWAAVICGFVSAWVLIGLNALAGRLKYDDPLEAAQLHGGCGAWGIIFTALFAKKQYVEEIYGAGRPYGLFLGGGGRLLAAHIVQILAIAGFVSCTMGPLFLALKKLGLLRISAEDEMAGMDLTRHGGFAYVYHDDDEHDKSVGGFMLRSAQTRVEPAAAANSQV

SEQ ID NO: 3601 - protein, 344 aa, Saccharomyces cerevisiae
MSSSVASTENIVENMLHPKTTEIYFSLNNGVRIPALGLGTANPHEKLAETKQAVKAAIKAGYRHIDTAWAYETEPFVGEAIKELLEDGSIKREDLFITTKVWPVLWDEVDRSLNESLKALGLEYVDLLLQHWPLCFEKIKDPKGISGLVKTPVDDSGKTMYAADGDYLETYKQLEKIYLDPNDHRVRAIGVSNFSIEYLERLIKECRVKPTVNQVETHPHLPQMELRKFCFMHDILLTAYSPLGSHGAPNLKIPLVKKLAEKYNVTGNDLLISYHIRQGTIVIPRSLNPVRISSSIEFASLTKDELQELNDFGEKYPVRFIDEPFAAILPEFTGNGPNLDNLKY

SEQ ID NO: 3602 - protein, 161 aa, Triticum aestivum
  unsure (1)..(161): unsure at all Xaa locations
MWHCKDHHLKFKADAPASIDTTPMQAAVIHKGVLLVIKNRPCKGKEATTXILATHEHPKSDYIALDIFNALELEDIVPSSHNCDVPHVDRTEYQLIDISEDGFVSLLTDNGSTKDDLKLPTDDAILTQLKDGFAEGKDLALTVMSAMGEEQICAVKDLGPR

SEQ ID NO: 3603 - protein, 146 aa, Triticum aestivum
  unsure (1)..(146): unsure at all Xaa locations
MAAFLRPKCSSVGRALIGILGDNLYGGASSSVETVXRRSLSDAVSQQIRTFQSRMRTNLKVAARQLGAKXGDAAYSPVRGKXDGVVVRAAMKKGRSDGSEVQFDDNAIVIVNNKGELIGTRVFGPVPHELRKKKHLKILALAEHIV

SEQ ID NO: 3604 - protein, 372 aa, Chenopodium rubrum
MAPSFDLLCAEDNSSIFDEVDDNYYGVVDDDVLQICNLQQQHGNLRNFDDFTLILLIIIKEHNFEALISGFFVANHECLASLFDNERQHFLGLDYLKRFRNGDLDLGARNLVIDWIHKVQSHYNFGPLCVYLSVNYLDRFLSAYELPGKAWMMQLLGVACLSLAAKVDETDVPLILDLQVSESKFVFEAKTIQRMELLVLSTLKWRMQSVTPFSFIDYFLYKLSGDKMPSKSLIFQAIQLILSTIKGIDLMEFRPSEIAAAVAISVTQQTQIVEFTDKAFSFLTDHVEKERLMKCVEIMHDLRMSSRSNGALASTSVPQSPIGVLDASACLSYKSDDTSTTPSGSCGNSAHSSPASAPPPKRRKLDRTSQIS

SEQ ID NO: 3605 - protein, 132 aa, Brassica napus
MCGILAVLGCVDNSQATRSRIIKLSRRLRHRGPDWSGLHCYEDCYLAHERLAIIDPISGDQPLYSEDKTVVVTVNGEIYNHKALRESESLKSHKYHTGSDCEVLAHLYEEHGEEFINMLDGMFAFVLLDTKD

SEQ ID NO: 3606 - protein, 181 aa, Glycine max
FGSSRELGLQPRQVAIWFQNKRARWKSKQLERDYGILQSNYNSLASRFEALKKENQTLLIQLQKLNHLMQKPMEPGQRCTQVEAANSMDSESENGGTMKCEAEGKPSPSMEISEHLLGVLSDDDTSIKVEDFGLEDEHGLLNFAKHVDGSLTSPEDWNAFESNDLLGQSTTDDYQWWDFWS

SEQ ID NO: 3607 - protein, 166 aa, Brassica napus
  unsure (1)..(166): unsure at all Xaa locations
GKIDKFIAGESTLPLHELESGGXRYFLGMFLGGAYEXALGGVHNLFGGPSVVRVLQSDGPHSFAVTRAVPGQSSADVLRGMQHEPEMMFETLKHRAEEVLHRKGGEGEDDDEGEFCNVAACLDRSFHNMPYLATEEVLSMSNSLSDAVSNLGFYYCDEDGFDYLSA

SEQ ID NO: 3608 - protein, 287 aa, Listeria innocua Clip11262
MTIQWFPGHMAKARREVTEKLKLVDVIFELVDARIPLSSSNPMLEEIIHQKRRVIILNKADTADEKTTKEWIDYFAEKGLPAVAVNAQEGKGLFKIEQAAEKLMAEKFERLRSKGMKPRAIRAMILGIPNVGKSTLINRLAKKNIARTGNKPGVTKAQQWIKVGKTLELLDTPGILWPKFEDQEIGYKLALTGAIKDDLLQMEEIAGYGLRFLEKHYPDRLQNWLKVEKVSEDPIETLAFIAEKRGLLDRYNDPDYSRAAETVVREIRQQKLGRMSFDFPNWEDDAE

SEQ ID NO: 3609 - protein, 267 aa, Chromobacterium violaceum ATCC 12472
MKMPKLGVGTFRLKDQQAEESVSMGLELGYRHIDTAQIYRNEADVGRAIAKSGVPRDELYVTTKIWIDQFAQGKLIPSLRESLDKLGLDSVDMTLIHWPSPNDEVPVAVYMNQLAEAKHLGLTREIGVSNFTIAHLRQAMDVVGADAIGTHQLEVHPYLQNLKVRAFCREHGIALTGYMPLAYGRAVGDPTLQAIGQKHGATAAQVALAWQLQQDIAVIPSSTKRANLAANLDALKLRLDADDMARIAALEDGGRIADPDFAPAWDA

SEQ ID NO: 3610 - protein, 82 aa, Zea mays
VDSIDPSAGLERYVDSLMKRTDIEFNVVVTQMNGKDYSSNSVHVFHIGKLRIKLRKGWSTKARESYSTTMKLCGSRGGGNAA

SEQ ID NO: 3611 - protein, 368 aa, Glycine max
MGEAKGKEEEVLAPVHSTVFKESESLDGKCVKIEGYDFNRGVNYPLLLSSMVTTGFQASNLGDAIQVVNQMLDWRLVDEPVAEDCSDQERDLEYRKSVTCKVFLGFTSNLISSGVRDTVRFLLQHRMVDVVVTTTGGIEEDLIKCLAPTYKGDFSLPGAYLRSKGLNRIGNLLVPNDNYCKFEDWIIPIFDQMLGEQNNENALWTPSKLIARLGKEIKNESSYLYWAYKNNIPVFCPGLTDGSLGDMLYFHSFRNPGLIVDIVQDIRAMNGEAVHASPRKTGMIILGGGLPKHHICNANMMRNGADYAVFINTAQEYDGSDSGARPDEAVSWGKIRDSAQTVKVHCDATIAFPLLVAETFASRVKPPH

SEQ ID NO: 3612 - protein, 215 aa, Hordeum vulgare subsp. vulgare
MSYAYLFKYIIIGDTGVGKSCLLLQFTDKRFQPVHDLTIGVEFGARMITIDNKPIKLQIWDTAGQESFRSITRSYYRGAAGALLVYDITRRETFNHLASWLEDARQHANANMTVMLIGNKCDLSHRRAVSYEEVEQFAKEHGLVFMEASAKTAQNVEEAFIKTAGTIYKKIQDGVFDVSNESYGIKVGYAVPNASGGGAGLVLSNQGRLLAIKQV

SEQ ID NO: 3613 - protein, 138 aa, Arabidopsis thaliana
MADTPSSPAGDGGESGGSVREQDRYLPIANISRIMKKALPPNGKIGKDAKDTVQECVSEFISFITSEASDKCQKEKRKTVNGDDLLWAMATLGFEDYLEPLKIYLARYREGDNKGSGKSGDGSNRDAGGGVSGEEMPV

SEQ ID NO: 3614 - protein, 120 aa, Glycine max
  unsure (1)..(120): unsure at all Xaa locations
AASMISSPAVTTVNRAGAGMVAPFTGLKSMAGFPTKKTNNNITSITSNSGRVQFIQVXPPIGKNKFKTLSYLPDRNNTQLSKKVQYLXKKDXIPYYKFELKHDFLYPEHNRSPRYYNKRY

SEQ ID NO: 3615 - protein, 333 aa, Bdellovibrio bacteriovorus HD100
MMKLTVIPGDGIGPEIMAQVVRVLKHVHAPFEYEEHQAGEVALNSLGELLPQTTIDSINKTKLAIKGPTTTPVGGGHKSINVTMRQKFDLYANVRPVRSLPGVQCVCSDVDLTIVRENTEDLYAGIERMVDEDTAESIKRITRKGSERIARYAYDLAQKTGKPRMAIVHKANIMKLSDGLFLKVAQEVGWQYPEITTKDVIVDNACMQLVTKPQQFDVIVTENLYGDILSDLCAGLVGGLGVVPGANIGANHAIFEAVHGSAPDIAGQNKANPTALLQSAVMMLQHVGENAKADAIMKALIAALSDVNARTGDLGGKGTTVSFTDAIIQRLGH

SEQ ID NO: 3616 - protein, 240 aa, Zea mays
MGRGKIVIRRIDNSTSRQVTFSKRRNGIFKKAKELAILCDAEVGLVIFSSTGRLYEYSSTSMKSVIDRYGKAKEEQQDVANPNSELKFWQREAASLRQQLHNLQENYRQLTGDDLSGLNVKELQSLENQLETSLRGVRAKKDHLLIDEIHDLNRKASLFHQENTDLYNKINLIRQENDELHKKIYETEGPSGVNRESPTPFNFAVVETRDVPVQLELSTLPQQNNIEPSTAPKLGLQLIP

SEQ ID NO: 3617 - protein, 234 aa, Triticum aestivum
MESSTTDAGDKHLESYLTLGLTVSQSKKGNTKFPKVLSLLATYLGRSVQKNEELLGSNGIKEAATIFHGQKVPDLSIQLYAERIFKYAECSPSCFVLALVYMERYLQQPNVYMTPFSVHRLLITSVVVAAKFTDDAFFNNAFYARVGGIRTIEMNRLELDLLFNLDFRLKVNLETFGSYCLQLEKHAPVSPERLPVQVHRVNGSKDLSYSNSSADEFCQSKLVSYSSQALQGCS

SEQ ID NO: 3618 - protein, 256 aa, Glycine max
  unsure (1)..(256): unsure at all Xaa locations
MTMHRESWAFVFGVMGNIISFGVFLAPLPTFYQIYKKKSTEGFQSLPYVVALFSAMLWIYYAFVKRETALLLITINTFGIVVESIYLSIFLIYAPRKPRLTTIKLLLLLNVFGFGAMLLSTLYLSKGAKRLAIIGWICLVFNISVFAAPLFIIRRVIKTRSVEYMPFTLSMFLTINAVMWFFYGLLLRDYYVALPKHAWRLSFGIIQMVMYLMYRNAXTPVALEEPVKAQELNGHIIDVVKIGTMEPNHGGAVGKV

SEQ ID NO: 3619 - protein, 228 aa, Glycine max
  unsure (1)..(228): unsure at all Xaa locations
MTSASELFHSRRHRLGRSALDLGLDTELNAADSLRRHYHLRRLRHHPERASDRIDGRYRRSFASESVDSEENVRSSLRGSDSERLPXARGFLRQYDRDSFGEDPESESSNEDPSGASLVTELTSQMARSQFLQELSTKPPGLTQEALDCLHQEVFSSNASEIGLDSRVLQDCSICLESFTDGDELIRLPCGHKFHSVCLDPWIRCCGDCPYCRRCIVVNTHSSLNEDE

SEQ ID NO: 3620 - protein, 214 aa, Ageratina adenophora
  unsure (1)..(214): unsure at all Xaa locations
TLISLKDDADADGEGVKLTDIEIKALLLXLFTAGTDTSSSTVEWAIAELIRHPRLLKQAQEEIDTVVGRDRLVTELDLNQLTFIQAIVKETFRLHPSTPLSLPRISSEACEVDGYYIPKGSTLLVNVWAIARDPEMWTDPLEFRPSRFLPGGEKPNVDVRGNDFEVIPFGAGRRICVGMTLGLRMVQLLVATLVQTFDWELAKGLEPEKLNMER

SEQ ID NO: 3621 - protein, 118 aa, Zea mays
  unsure (1)..(118): unsure at all Xaa locations
MASRLXAAEXSSSSLSSAXPLARLISRRGLAGAADGHGSAKGPLGKXPXSPSKGKEEHXGLXRLXKGGXXFXGGYKLFXGKKEAKXEATQGAKEAPEGQKKKGKLTGGQKGTGRILAS

SEQ ID NO: 3622 - protein, 511 aa, Pelargonium x hortorum
MYNMSLYLLLGSSALAFAAYLVLFSFSKSRRRLPPGPKAWPIVGNLPHMGSMPHQNLAAMARTYGPLVYLRLGFVDVVVALSASMASQFLKTHDSNFSSRPPNAGAKHIAYNYHDLVFAPYGPRWRLFRKITSIHLFSGKALDDYRHVRQEEVGVLASNLARAVSTIVNLGQLLNICATNALGRAVIGKKVFKDGTDDVDPKADEFKSMVVELMVLAGVFNIGDFIPPLDCLDLQGVASKMKNLHKRFDAFLSAILQEHNINSAASATPSMLTTLISLKDSVEDSEGGKLTDTEIKALLLNMFTAGTDTTSSTVEWAIAELIRQPEILIRAQKEIDSVVGRDRLVTELDLSKLPYLQAIVKETFRLHSSTPLSLPRIATQSCEINGYHIPKGATLLVNVWAIARDPDVWADPLSFRPERFLPGSEKENVDVKGNDFELIPFGAGRRICAGMSLGLRMVQLLTATLLHAFNWDLPQGQIPQELNMDEAYGLTLQRASPLHVRPRPRLPSHLY

SEQ ID NO: 3623 - protein, 166 aa, Triticum aestivum
  unsure (1)..(166): unsure at all Xaa locations
MATSSAKSVHDFTVKDAKGNDINLGDYKGKVLIIVNVASQCGLTNSNYTELSQLYEKYKQKGLEILAFPCNQFGAQEPGSNEQIQEFVCTRFKAEFPVFDKVDVNGDKAAXLYKYLKSSKGGLFGDGIKWNFSKFLVDKEGNVVDRYAPTTXPXSIEKDLLKLLDA

SEQ ID NO: 3624 - protein, 403 aa, Deinococcus radiodurans R1
MLTPEQKAIVKATVPALEAHGETITRTFYASMFAAHPELLNIFNPANQQTGKQARSLAASVLAYAAHIDHPEALGGMVGRIAHKHVSLEVLPEHYPIVGQYLLGAIAGVLGDAAKPEILDAWAAAYGELADLMIGIEKGMYDAGAGQPGGWRDFRPFRVARKVAESRVITSFVLEPVGGGALPAYQPGQYLSLKVKVPGQERWQIRQYSLSDAPSPDHYRISVKREGGGLVSEYLHGAVQEGDELLVHVPAGDFVLQQSERPVVLISAGVGITPMLAMVQTLAQAGSQRPVTFIHAAQNGSVHAFRDDVARLTHEYPHFRKVVFYDEAGPDDQLGTHHDVAGRLSLDAVRGALPAGEAEFYYCGPAGFAGAVEAILDDLQVPAERRFTETFGPSQSFAPVILG

SEQ ID NO: 3625 - protein, 245 aa, Nicotiana tabacum
MGRGRVQLKRIENKINRQVTFSKRRSGLLKKAHEISVLCDAEVGLIVFSTKGKLFEYSTDSCMERILERYERYSYAERQLTATDHETPGSWTLEHAKLKGRLEVLQRNQGHYAGEDLDSLCMKELQNLEHQLDSALKHIRSRKNQLMHESISELQKKDEALQEQNNNLSKQVKEGEKELAQQTQWEQQSHDHLNSSSFVLTQPLSSLHLGEAYPTAGDNGELEGSSRQQQQNTVMPPWMLRHLNG

SEQ ID NO: 3626 - protein, 411 aa, Glycine max
  unsure (1)..(411): unsure at all Xaa locations
MSPVPGAHAPLLPGSKSKDVPPATVSGAVFNVATSIIGAGIMSLPATLKVLGVIPALVLILVIAFLAELSVEFLMRFTRAGETTTYAGVMREAFGPLGAVAAQVAVVITNLGCFIXQQWFGIHWWSSREFALLVVLFLILLPLVLYRRVESLKFSSAISTLLAVAFVTICTVLAIVAIVEGRTQSPRLIPCLDQHTSFFDLFTAVPVVVTAYTFHFNVHPIGFELAKPSEMATAVRIALLLCCVIYFSIGLSGYLLFGDSTQSDILVNFDQNAGSALGSLLNVLVRLSYAFHVMLTFPLLNFSLRTNVDEFFFPKKSPLATDSKRFVSLTLVLLALSYIAAILVPDIWYIFQFMGSTSAVCLAFVFPGAIVLRDSYGISTRRDKIIALVMVILAAITSVIAISTNIYKAFQ

SEQ ID NO: 3627 - protein, 128 aa, Corynebacterium efficiens YS-314
MAKLTKDELIEAFKEMTLIELSEFVKEFEEVFEVTAAAPVAVAAAGAAGGEAAAAEEKDEFDVVLEDAGAKKIGVIKVVRELVSGLGLKEAKELVEGAPKAILEGANKDDAEAAKAKLEEAGAKVTLK

SEQ ID NO: 3628 - protein, 512 aa, Oryza sativa (japonica cultivar-group)
MVAKKPRVVVVGAGISGLAAAHRLCGAGGDRFEVAVVEAGDRVGGRILTSEFAGHRVEMGATWVQGVVGSPVYALARDAGALGEEEGRGLPYERMDGFPDRVLTVAEGGEVVDADTVAGPIEELYRGMMEAARAGEAGGGGGVEEYLRRGLRAYQAARSAGGGGGGGKELEEVDEALLAMHINRERTDTSADDLGDLDLTAEGEYRDFPGEHVTIPGGYSRVVERLAAALPPGTVRLGLRLRRLKWGGTPVRLHFADGAPPLTADHVILTVSLGVLKASLGNKDTAGVGAAAIAFDPPLPPFKREAVARLGFGVVNKLFMEVEAVAPSEPEDVAGVQPAAAGFPFLHMAFRGHVSKIPWWMRGTESICPVHAGSTVALAWFAGREAAHLESLPDDDVIRGAHATLDSFLPAAPRWRVRRIKRSGWATDPLFLGSYSYVAVGSSGDDLDRMAEPLPRGPDAAADERPPSPRLLFAGEATHRTHYSTTHAAYLSGVREANRLLQHYRGGANHTT

SEQ ID NO: 3629 - protein, 277 aa, Azotobacter vinelandii
MQTIVTHDKLVLPKLGLGTWPMLGEECTQAVLSALELGYRHIDTAAAYENEAAVGLALERSPVPRESVHLTTKVWWDRLQPAAMRASLQRSLEALRTDRVDLFMIHWPGKDWDLPRSIETLVALREEGKARHIGVANFPLPLLRRTVEELGAPLSAIQVEYHVLLGQRRLLDYVRQHGMALIAYSPLARNRIAEVAEIRDIAARHQARPAQIALKWLLDQPAVAAIPKAASVANQRINLDAFKVTLNDRERALIDALPKNQRLVSPDFAPRWDPFDE

SEQ ID NO: 3630 - protein, 242 aa, Nicotiana tabacum
MGRGKVQLRRIENKINRQVTFSKRRGGLVKKAHEISVLCDAEVALIVFSHKGKIFEYSSDSCMEQILERYERYSYTERRLLASNSESSVQENWSLEYAKLKAKIDLLQRNHKHYMGEDLDSLNLKDLQNLEQQLDTSLKLIRSRKNQLMHESISMLQKKEKAIQEENNMLSKKIKEKDNTVGQQVEWHQQNQVPTSTSFLLQPHPCLNIGGNYQEEAEEARRNELDLNLDSLYPCHMGCFAT

SEQ ID NO: 3631 - protein, 444 aa, Bacillus subtilis
MSSYLIKPELSSAYPVVSYAKGSYVYDQTGKKYLDGSSGAVTCNIGHGVRDVTEKLKEQLDQVSFAYRSQFTSEPAEQLAALLAQELPGDVNWSFFVNSGSEAIETAMKIAIQYWQEKKQTQKSIFLSRWSSYHGITLGALSLSGFYERRYRFTHLIERYPAISAPHIYRLNHETEEDFVQTAADELDTMIKRIGSQFIAGFVAEPIIGAAGAAITPPPGYYERLSEVCRTHDVLFIADEVMTGLGRTGRMLATEHWDTVPDIAVLGKGLGAGYAPIAAAVVSDSIIETIKQGSGVIMSGHTYSAHPYSAKAALEVLRYVLKHGLIKQSEKKGAVLKKKLDEAASQSGIIGEVRGKGLLLGIEFVQTKKRRKCFRQQQAITQLIVSEAKKRGLIVYPSKAGIDSGEGDAVIIAPPFTISDGEMEELISIFSETVAAVEKNLKKD

SEQ ID NO: 3632 - protein, 484 aa, Brachymonas petroleovorans
MDAQRTLPDCSKLFLGGRWVEPAQGMYYDNENPAKRETICRVAQASAADVDAAVRGAQQALEPGSPWAQMTPAARARLLWRVAERIREQVEELAWLESLDTGKPYGEALHGDIPHAAGAFEYYAGWCSKLAGSVLPVSPRYLDYTRLEPVGVVGAIIPWNFPLQMAAMKVAPALAAGNAVLLKPAEQTPLTAFALARIFEELEFPPGVLSVLPGFGATGAALVAHPGIDKITFTGSTAVGKTIMRGAADTLKRVSLELGGKSPNIVFADADLKRAVRGATTGIYYNQGQMCTAGSRILVQDSLYDKFLEAFTAAIADLRPGDPLDPKTRMGALVSQEQFERVSHYVALGQEDGATLLAGGQGSAERGYFFPPTIFTDVKPEHRIAQEEIFGPVVSVMRFGSEEEALRLANGVSYGLAAGVWTADVGRAHRVAHGLRAGTVWVNTYNALWNEAPFGGYKQSGIGREGGREGIEPYTEVKNICLSL

SEQ ID NO: 3633 - protein, 442 aa, Triticum aestivum
MSNYHDDHVEDMEDDYDMDDPAEDMVDAHHERGLRDSDSEDDEYAHSNDKIPDTSAADARKGKDIQGIPWERLAITRENYRQTRLEQYKNYENIPNSGEAAAKECKPTVKGGMYYEFRQNTRSVKSTILHFQLRNLVWATSKHDVYLMSHYSVLHWSALSGVDTELMNVQGHVAPREKHPGSLLEGFSQTQVSTLAVKDNLLVAGGFQGELICKHLDREGISFCCRTTYDDNAITNAVEIFNTASGAVHFMASNNDSGVRDYDMERFQLCKHFQFDWPVNHTSLSPDGKLVVIVGDDPNGLLIDANSGKTLHSMKGHHDFSFASAWSPDGRTFATGNQDKTCRIWDARNLSKAVHVLKGNLGAIRSIRFTSDGQFLSMAEPADFVHIFDVKSDYNRRQELDFFGEISGMSFSPDTDALFVGVWDRTYGSLLQFGRLYNKLVP

SEQ ID NO: 3634 - protein, 371 aa, Senecio vernalis
MEESMKQASVMENLRSVVFKESESLEGTCAKIRGYDFNNGIDYSQILKSMVSTGFQASNLGDAIETVNQMLDWRLSHEQVTEDCSQEEKNPTYRESIKCKIFLGFTSNLISSGVRDIIRYLVQHHMVDVIVTTTGGIEEDLIKCLADTFKGEFSLPGAELRSKGLNRIGNLLVPNDNYCKFEDWIIPIFDQMLEEQKAKNVLWTPSKLIMRLGKEINNESSYLYWAYKNDIPVFCPGLTDGSLGDMLYFHTFRNPGLIVDVVQDIRAINSEAVHANPRKTGMIILGGGLPKHHICNANMMRNGADYAVFINTAQEFDGSDSGARPDEAVSWGKIRGSAKSVKVHCDATIAFPLLVAETFAAKREQSAEPSS

SEQ ID NO: 3635 - protein, 420 aa, Triticum aestivum
  unsure (1)..(420): unsure at all Xaa locations
MEGPSVEVPPYFLCPISLEIMRDPVTLATGITYDRCSIERWLSDGHATCPITQQKLAEADREATPNHTLRRLTQAWCALHAVERFPTPRPPLDACRVAEIVEEGRGAGRQKELAALREIKAIVAESDRNRRCVEATPGAVEFLVSVVRNHATASKSAEDLLELSLDSPTSTSSPEEDALSVICSLKPSKKSLVRILEENGDFLDTLVYMLRRPSYRSRCYGILLLKAMVSVMEPARLMAVRTEVVQELVRVVSDRVSAKAVKAALHVLCRLCPWGRNRVKAVEAGAMTVLVELLLDEGGRHPTELAVVAIDHLCXLCGGAVGPGGAPGGAGRRGXKAMRVSLTTTESAVRALHAVARHSPTPAVLQEMLAVGVVAKLLLVLQVDAGERARAKAKELLKMHARVWKDSPCLQAHLKAHYPC

SEQ ID NO: 3636 - protein, 484 aa, Physcomitrella patens
MNVSEGCSTLTGAQLKYSTDKSNMSYETVYRDAAVESPQREVSNESGSTLKEHDYFGLSEVLSSNSSSGKQPEKCCREELNLNESATTLQLGPPAAVKPSGQADGDDAHDEGAGPENPAKRSAYHMQQESLADGRKAAAEMGSFKIQRKNILEEFRAMKAHAHMTKSPKTVQTMQHNMHVSYSGAQMAFGGAKNNGVKRVFSEAVVANHNAASGVGVGVREGNDDVSRCEEMNGTEQLDLKVHLPKGMGMARMAPASGSPSFDNMQGPLNPFFRKSLVSKMPVPDGGDSSANASNDCANRKGMVASPSVQPPPAQNQTVGWPPVKNFNKMNTPAPPASTPARACPSVQRKGASTSSSGNLVKIYMDGVPFGRKVDLKTNDSYDKLYSMLEDMFQQYISGQYCGGRSSSSGESHWVASSRKLNFLEGSEYVLIYEDHEGDSMLVGDVPWELFVNAVKRLRIMKGSEQVNLAPKNADPTKVQVAVG

SEQ ID NO: 3637 - protein, 370 aa, Senecio vernalis
MAESNKEAIDSARSNVFKESESLEGTCAKIGGYDFNNGIDHSKLLKSMVSTGFQASNLGDAMIITNQMLDWRLSHDEVPENCSEEEKKNRESVKCKIFLGFTSNLISSGVRETICYLTQHRMVDVLVTTTGGIEEDFIKCLASTYKGKFSLPGADLRSKGLNRIGNLIVPNDNYIKFEDWIIPIFDQMLIEQKTQNVLWTPSRMIARLGKEINNETSYLYWAYKNNIPVFCPSITDGSIGDMLYFHSVSNPGPGLVVDIVQDVIAMDNEAVHASPQKTGIIILGGGLPKHHICNANMMRNGADFAVFINTAQEYDGSDSGARPDEAVSWGKISSTGKAVKVHCDATIAFPLLVAETFAVKKEKASKVNGF

SEQ ID NO: 3638 - protein, 503 aa, Physcomitrella patens
MKFSNEVVHKSMNITEDCSALTGALLKYSTDKSNMNFETLYRDAAVESPQHEVSNESGSTLKEHDYFGLSEVSSSNSSSGKQPEKCCREELNLNESATTLQLGPPAAVKPSGHADGADAHDEGAGPENPAKRPAHHMQQESLADGRKAAAEMGSFKIQRKNILEEFRAMKAQAHMTKSPKPVHTMQHNMHASFSGAQMAFGGAKNNGVKRVFSEAVGGNHIAASGVGVGVREGNDDVSRCEEMNGTEQLDLKVHLPKGMGMARMAPVSGGQNGSAWRNLSFDNMQGPLNPFFRKSLVSKMPVPDGGDSSANASNDCANRKGMVASPSVQPPPAQNQTVGWPPVKNFNKMNTPAPPASTPARACPSVQRKGASTSSSGNLVKIYMDGVPFGRKVDLKTNDSYDKLYSMLEDMFQQYISGQYCGGRSSSSGESHWVASSRKLNFLEGSEYVLIYEDHEGDSMLVGDVPWELFVNAVKRLRIMKGSEQVNLAPKNADPTKVQVAVG

SEQ ID NO: 3639 - protein, 159 aa, Senecio vernalis
MSDEEHQFESKADAGASKTYPQQAGTIRKGGHIVIKNRACKVVEVSTSKTGKHGHAKCHFVAIDIFNGKKLEDIVPSSHNCDVPHVNRTDYQLIDISEDGFVSLLTENGNTKDDLKLPTDDALLTQIKDGFGEGKDLVVSVMSAMGEEQICALKDIGPK

SEQ ID NO: 3640 - protein, 150 aa, Agrostis stolonifera var. palustris
MSIVRWSNVFDPFSLDLWADPFDAFRSILPAASGNHDTAAFVNARMDWKETPEAHVFKADLPGVKKEEVKVEVEGGNVLVVSGERKGEGGQERQVATLERSSGKFVRRFRLPENAKVEEVKAGLENGVLTVTVPKAEVKKPEVKAIEISG

SEQ ID NO: 3641 - protein, 219 aa, Zea mays
MAPTTMAATRVSPVLLLLLTIQLSLLFRLPDSPSTPALALAAEPEQQNAKQHRQPALLVQSTCNSTSFYDLCIAALAADPASSTADVPGLGAIAVSAAANNASGTAAFLGNASDAAATPQADRALLRTCAGKYAAARDALVQARASLAEQAYDYAFVHVSAAGEYPAVCRTLFRRRQQQQRGASRSAYPAELAKREEALRRLCTIALDIISLLQNQETY

SEQ ID NO: 3642 - protein, 346 aa, Triticum aestivum subsp. tibeticum
MKTFLVFALLAIAATSAIAQMETSRVPGLEKPWQQQPLPPQQQPPCSQQQQPFPQQQQPIIILQQSPFSQQQQPVLPQQQPVIILQQPPFSQQQQPVLPQQPPFSQQQQQQQQQQPPFSQQQQPVLPQQPPFSQQQQPPFSQQQQPSSQQPPFPQQHQQFPQQQIPVVQPSVLQQLNPCKVFLQQQCSPVAMPQHLARSQMWQQSSCNVMQQQCCQQLPRIPEQSRYEAIRAIIFSIILQEQQQGFVQPQQQQPQQSVQGVYQPQQQSQQQLGQCSFQQPQQQLGQQPQQQQVQKGTFLQPHQIARLEVMTSIALRTLPTMCSVNVPLYSSITSAPLGVGTGVGAY

SEQ ID NO: 3643 - protein, 431 aa, Triticum aestivum
  unsure (1)..(431): unsure at all Xaa locations
MDATTAKQLRRLRTLGRGASGAVVWLASDDASGQLLAVKSAGAGAADTLRREGSVMAGLCSPHIVPCLGSRAAPGGEYQLFLEFAPRGSLADEAARSGGSLAERAIQGYAADVARGLAYLHGNSLVHGDVKARNVMVGADGRAKLADFGCARAADSDRTIGGTPAFMAPEVARGEEQGLAADVWALGCTVIEMATGHAPWSDMDDVFAAVHRIGYTDAVPEXPASLSPQAKDFLRKCLARNPRHRSTAAQLLEHPFLASAFHDVDAEPAKQDWIMSPKSTLNADFWEXSDEESETEDMLTSAAERIXSLASPCSALPDWESDDGWIVVHGGRPEASETTTPTAIAGTDFGPWSEEGLEAEVDVHFAGADAGRWYDLVRNVDGAHYFGWYERDLGVSVVTDRPLCLIVSHGRKIVKFGCHCDRERTMHFDFA

SEQ ID NO: 3644 - protein, 316 aa, Zea mays
MVLEATMICIDNSEWMRNGDYAPSRFQAQADAVNLICGAKTQSNPENTVGVMTMAGKGVRVLVTPTSDLGKILACMHGLEVGAEANLAAAIQVAQLALKHRQNKRQQQRIIAFIGSPVKYDKKVLETIGKKLKKNNVALDIVDFGESDDEKPEKLEALIAAVNSSDSSHIVHVPPGENALSDVLLSTPIFTGEEGGSGFAASAAAAVATGASGFEFGVDPNVDPELALALRLSMEEERARQEAIAKKAAEDTSNTENINASSSNSDSVMAEAELASNAAAGDKQEQPKPQDDDDLLQQALAMSMEGGASGSAGGSL

SEQ ID NO: 3645 - protein, 491 aa, Synechococcus elongatus PCC 7942
MPRGVAPAFAGRKPKGWAWASTAVPDFQGGFKRLINRFQGSKLWLACVPLAATIAVFWGVAANAQGSADPVPSAQFLVNNLWLMVATVLVIFMNAGFAMVETGLCRQKNAVNVLAKNLIVFTLAATAYWFIGYSLMYGSPVVDGFLYFGKGGPLGFFFDPTVSAETIKNDGLISSLDFLFQAAFAGTAATIVSGSVAERIKFVDFIIFSLILTAVIYPIAGSWQWNVGSGWLNKAGFIDFAGSTVVHSVGGWAALIGAITLGPRMGKFQDGRPGALPGHNLAIATLGALILWIGWYGFNGGSVLAFNTAVPYVAVTTTLGGAAGGISATITSWSTSGKPDLSMVINGILAGLVGVTAGCDGFGMGGSFIVGLIAGVLVVFSVYTFENLKIDDPVGACSVHLVCGIWGTLAVGLFNLEKGLFYGGGFGQLGSQILGIISYGVWTVVASVIIWNILKALLGLRVSLKKSYKAWILANTGWKPTLALPRMHLTP

SEQ ID NO: 3646 - protein, 456 aa, Bordetella parapertussis 12822
MTTLSSAQQQDIQYQLHSYTNAVKHRDVGPRIITHGEGVYVFDDQGNRYLEGMAGLWSVAVGFGEQRLVEAAARQFQELPYYHTFTHKSHPSVIALAERLIGYTDGRMAQAFFTNSGSEANDTVVKLVWYYNNALGRRDKKKIIARQRGYHGVTVASTSLTGLPGNHKDFDLPLPQIRHTACPHYYRYGLPGETEEDFATRMAGELEAMILREGPDTVAAFIGEPVMGAGGVIVPPRTYWQKIQAVCRKYDILVIADEVITGFGRLGQRFGSQVFDIEPDIMVLSKQITSSYQPLGAVLLNARVADVVAEHSGRLGTFGHGYTASGHPVATAVALENLRLIDERGLIEHAAEMGALLHLELQALSSHPLVGEVRGVGLIAGVELVADKATRQPFDPLGKAGGYAYERAHDHGLIVRGIQDTVAFCPPLIITAEQVRDMVARFARTLDDVAAHVAQG

SEQ ID NO: 3647 - protein, 506 aa, Zea mays
  unsure (1)..(506): unsure at all Xaa locations
MASPAMVPLRQLFVDGEWRPPAQGRRLPVVNPTTEAHIGEIPAGTAEDVDAAVAAARAALKRNRGRDWARAPGAVRAKYLRAIAAKVIERKPGLAKLEALDCGKPYDEAPWDSDDVAGCFECFAHPLSSNIVTGLGPDACAPLSSHANSDKVYFXLVGLIPVRNYPXLMATWXKPAPALAAGKRAMLVFDDXAIDKAVEWTSVWVLLGLSSGVLDNDPVLGPDAGAPLSAHPDVDKVAFTGSFETGKKIMASAAPMVKPVTLELGGKSPIVVFDDVDIDKAVEWTLFGCFWTNGQICSATSRLLIHTKIAKKFNERMVAWAKNIKVSDPLEEGCRLGPVVSEGQYEKIKKFISNAKSQGATILTGGVRPAHLEKGFFIEPTIITDITTSMEIWREEVFGPVLCVKEFSTEDEAIELANDTQYGLAGAVISGDRERCQRLSEEIDAGCIWVNCSQPCFCQAPWGGNKRSGFGRELGEGGIDNYLSVKQVTEYISDEPWGWYQSPSKL

SEQ ID NO: 3648 - protein, 497 aa, Bordetella parapertussis 12822
MSTLPPLSHWESLAAGLTLRNQAFIDGRWHDGRAGPLAAINPATGQLLAEVTACSQADIDQAVAAARRAFESGVWSRMPRRERKQCMLRLAALIREHAEELALIETLDMGKPIGDTMAFDIPETAHTYAWYAETIDKQYDEIAPTDADALATITREPLGVVAAVVPWNYPLLMASWKVAPALAAGNSVILKPAEQSSLSALRLAELALQAGIPAGVLNVVPGAGPVAGRALGLHMDVDCLAFTGSTATGKRFMEYSGQSNLKQIWLECGGKSPHIIFDDCPDLDRAALAAAIGIFNNQGEVCIAGSRLYVQAGIYDTFVSKVEACARAMQPGNPLDPASPMGAMVDERQMARVLEYVESGRREGARLRMGGERVRADSGGYYIEPTIFECARPDLTIVREEIFGPVLAVTRFDGEDEVVAQANASAYGLGSGLWTADLSRAHRVSRRLRAGLVWVNCYFDGDVTVPFGGVKQSGFGRDKSLHALDKYTSLKTTWIRL

SEQ ID NO: 3649 - protein, 161 aa, Zea mays
MDGRMFGLETPLMVALQHFLDVPDGDAGAGGDKAGGGGPTRTYVRDARAMAATPADVKELPGAYAFVVDMPGLGTGDIKVQVEDERVLVISGERRREEREDAKYLRMERRMGKFMRKFVLPDNADMDKISAVCRDGVLTVTVEKLPPPEPKKPKTIEVKVA

SEQ ID NO: 3650 - protein, 369 aa, Brachymonas petroleovorans
MAKTGRIALFESPHQPFTFREMPVPDPKPGAAVVRVTMANICGSDLHAWHGDFKLAGLGGKLPTVLGHEMTGQIVALGEGKHTDGNGQPLHEGDHVVYTYFTGCGHCPMCLRGHRVSCDELTMAMTEPALEWPYFVGGYADYYYVKPGATIYKVPQGLPDEVVAGANCALSQVISGWERAQLTFDETVLIQGAGGLGLYACAVAKAFGARLVIAIDAVQQRLDMARRFGADATINLTELPDEKARVNLVKKLTDGRGVDVVMELVGRADVVPEGLRMLGQFGRYVTIGNINAGQTYAADPSRLVMSNKSMLGVSLYEPPTLGKALRFLERHRDTLPFAEMLSTRFPLEQINEAFAKADAREVVRASIVP

SEQ ID NO: 3651 - protein, 293 aa, Nostoc sp. PCC 7120
MGLTDNYKLNLIQWYPGHIAKAEKNLKEQLSRVDVVFEVRDARIPLATHHPQIDEWVGNKARILVLNRLDMIPPQVRSLWIDYFQNRGEVPYCTNAQHGQGVVGVAKAAQAAGVELNQRRRDRGMLPRAVRAVVIGFPNVGKSALINRLLGKRVVESAARPGVTRQLRWVRISDQLELLDAPGVIPVKLGNQEAAVKLAICDDIGQASYDNQLVAAALIDLVNSLQEQAGELLPKSPLYTRYELDPTPHTGEGYLHALAEYRHKGDVERTARQLLTDYRKGLLGTLPLELPPM

SEQ ID NO: 3652 - protein, 208 aa, Zea mays
MAGDEEDHLADAPRVVGVLSALLERVVERNDAVADELAAGTESAAPPSAFRATARPDISVRSYMARIARFAGCSPACYVVAYVYLDRLLRRARSAPAVDSYTVHRLLITAVLAAVKFMDDVCYNNAYFARVGGISLSEMNYLEVDFLFAVGFDLNVSPGTFGHYCTVLRGRDAVPGAGRVLPPPAASTSLHRCCLSEDDDGSSSTSSS

SEQ ID NO: 3653 - protein, 305 aa, Ferroplasma acidarmanus
MNMVDPDFNSLIELSKSAGDMTKIEPAMLRNFLDESSLSSRGKPVEIKETKDYKIKLDGRTLNARMYDNNNAKSAILYYHGGGFLFGNIETYDNYCRFLAKESWVKIISIEYRLAPEHKFPDAFNDAYDSFHYIAKKKKDFGIEGRIGVAGDSAGANLAAALCLKCRDGKTEMPAVQVLFYPSLAPDNFSRSFIEYSDNYVLTGKMIRYFGNMYSKNMQDLINPYFSPLVADDFSNLPPAIMVTNEYDPLRDPEETYVKKLREAGVRAVGIRGIGMIHGSATDFEVSDGARNIVKMVARIIPDYL

SEQ ID NO: 3654 - protein, 155 aa, Triticum aestivum
  unsure (1)..(155): unsure at all Xaa locations
MTRASTLDFRRKTQGQNNWSGPLRLVNVVRNKFPTYKNGTNGIVIKFADEPETPXLKESVAKGTADLLDRRQRLSVRELAMKFEKGLSTATLLSNETLSYCIGFNSQVKCKQVALLERDILLKDLKSVLESLRGQVAGKYKDEFEGSVSMGDILA

SEQ ID NO: 3655 - protein, 322 aa, Ustilago maydis 521
MSSALDSLKQYTAVVSDSGDFESIDAYKPQDATTNPSLILAAVKQEKYARLIDVAVKYAKEQTSDKSKQLDLATDRLLVAFGVEILKIIPGRVSTEVDARLSYNKEATIEKAKHLIALYESLGVKRERVLIKIASTWEGIQAARELESQHNIHCNLTLLFGFNQAVACAEANVTLISPFVGRILDYYKKAEGKEYASHEDPGVLSVQRIYTYYRQHGYKTIVMGASFRNIGEILELAGCDFLTISPKLLEELKNKEGPVEQKLSVEKAKSAEPIAKVSYINDQAAFLLDLAKDPMANTKLAEGIAGFAKDGATMEQMIADKL

SEQ ID NO: 3656 - protein, 510 aa, 'Flavobacterium' lutescens
MSFELLKALGLDATNSGTYLGDGEWSSATGAGTISPRNPTTGEVIAQVQATTEADYETILARAQQAFKVWRTTPAPRRGEAIRLCGEALRRHKDALGSLVALEMGKSKPEGDGEVQEMIDIADFAVGQSRMLYGYTMHSERPGHRMYEQYQPLGIVGIISAFNFPVAVWAWNSFLAAICGDVCIWKPSNKTPLTAIASMRICNEALREGGFPDIFFLINDAGTALSEKLVEDKRVPLISFTGSTQVGRIVNQKVAARLGRCLLELGGNNAIILDETADLKLAVPGIVFGAVGTAGQRCTTTRRLIVHESIYDNVLATLIKAYKQVEGKIGDPLDAANLMGPLNSPEAVQQFLASIEKAKAAGGTVQTGGTAIDRPGNFVLPAIVTGLKNSDEVVQHETFAPILYVMKYSTLDEAIEMQNGVPQGLSSSIFTTNLKAAEKFLSAAGSDCGIANVNIGTSGAEIGGAFGGEKETGGGRESGSDAWKVYMRRQTNTINYSDSLPLAQGIKFDL

SEQ ID NO: 3657 - protein, 191 aa, Zea mays
  unsure (1)..(191): unsure at all Xaa locations
MSLCTIARRLCLSKPSSGSRLSAIWAHLYSTEAAKDMGAKKYKYPDVYDPYGPMPPPSEKVVELADRIAALPPEEIKQIAPALLLRLNQEPPQAVSGPGFRXGAQVGSGAGSGKAEKKAEKTVFDVRLEKFDAAAKIKIIKEIRTFTDLGLKEAKELVEKAPVVLKQSLTKEEAEAIIAKIKAAGGVAVME

SEQ ID NO: 3658 - protein, 193 aa, Emericella nidulans
MAEIRRKLVIVGDGACGKTCLLIVFSKGTFPEVYVPTVFENYVADVEVDGKHVELALWDTAGQEDYDRLRPLSYPDSHVILICFAVDSPDSLDNVQEKWISEVLHFCQGLPIILVGCKKDLRHDPKTIEELNKTSQKPVTPEQGEEVRKKIGAYKYLECSARTNEGVREVFEAATRAALLTKTHKSKKKCSIL

SEQ ID NO: 3659 - protein, 388 aa, Streptococcus pyogenes MGAS8232
MKNQLGQLALEQAKTFGGKLEVQPKVDIKNKHDLSIAYTPGVASVSSAIAKDKTLAYDLTTKKNTVAVISDGTAVLGLGDIGPEAAMPVMEGKAALFKAFAGVDAIPIVLDTKDTEEIISIVKALAPTFGGINLEDISAPRCFEIEQRLIKECHIPVFHDDQHGTAIVVLAAIFNSLKLLQKSLDEVSIVVNGGGSAGLSITRKLLAAGATKVTVVDKFGIINEQEAAQLAPHHLDIAKVTNREFKSGTLEDALEGADIFIGVSAPGVLKAEWISKMAARPVIFAMANPIPEIYPDEALEAGAYIVGTGRSDFPNQINNVLAFPGIFRGALDARAKTITVEMQIAAAKGIASLVPDDALSTTNIIPDAFKEGVAEIVAKSVRSVVLKS

SEQ ID NO: 3660 - protein, 368 aa, Pseudomonas putida KT2440
MNMSDTFLNPVTTQTWANGRHIVRCVKVIQETWDVRTFCFMADQPIMFFFKPGQFVTLELEIEGKPVMRSYTISSSPSVPYSFSITVKRVPGGLVSNFLHDTMHEGAELPVHGPVGLFNAIDFPAGKVLYLSGGVGITPVMSMARWFYDTNANVDMVFVHSARSPKDIIYHRELEQMASRIPNFSLHIICEKHGLGEPWAGYRGYLNQRLMELIAPDYMERVVFCCGPTPYMTAVKRMLEAVGFDMKNYHEESFGATPPEAKADAVEHAEQAADAPELDVSDLNLVEFIGSEKSIRIAPGETVHAAAAKVGLMIPKACGMGICGTCKVLKLGGEVEMEHNGGITEEDEAEGYILSCCSVPKGDVRIDY

SEQ ID NO: 3661 - protein, 349 aa, Streptococcus pyogenes MGAS8232
MKAATYLSTGNLQLIDKPKPVIIKPTDAIVQLVKTTICGTDLHILGGDVPACKEGTILGHEGIGIVKEIGDAVTNFKIGDKVIISCVTSCHTCYYCKRGLSSHCEDGGWILGHLINGTQAEYVHIPHADGSLYHAPDTIDDEALVMLSDILPTSYEIGVLPSHVKPGDNVCIVGAGPVGLAALLTAQFFSPANIIMVDLSQNRLEAAKTFGATHTICSGSSEEVKTIIDDITNGRGVDISMECVGYPATFDICQKIISVGGHIANVGVHGKPVDFNLDELWIKNITLNTGLVNANTTEMLLNVLKTGKIDATRLITHHFKLSEVEKAYETFKHAGANNALKVIIDNDIS

SEQ ID NO: 3662 - protein, 383 aa, Rickettsia sp. R300
DISRVSAEADCFTYDPGFMSTASCQSTITYIDGDKGILRHRGYDIKDLAEKSDFLEVAYLLIYGELPSGEQYNNFTKQVAHHSLVNERLHYLFQTFCSSSHPMAIMLAAVGSLSAFYPDLLNFKEADYELTAIRMIAKIPTIAAMSYKYSIGQPFIYPDNSLDFTENFLHMMFATPCTKYKVNPIIKNALNKIFILHADHEQNASTSTVRIAGSSGANPFACISTGIASLWGPAHGGANEVVINMLKEIGSSEYIPKYIAKAKDKNDPFRLMGFGHRIYKNYDPRAAVLKETCKEVLKELGQLDNNPLLRIAIELEAIALKDEYFIERKLYPNVDFYSGIIYKAMGIPSQMFTVLFAIARTVGWMAQWKEMHEDPEQKISRPR

SEQ ID NO: 3663 - protein, 289 aa, Bifidobacterium longum NCC2705
MTNGHINPANVPDIALKDGHSIPQVGLGVLRIDDEGVVPVVESALEAGYRHIDGAAGYNNEAGVGRALAASGYNKGAKRETLWVTTKLRDSQQGYDSALKAFDNSLKLLQLDYVDMYMIHWPTPFDWRSTDTWKAFVKLRDEGMARTLGVCNFMPADLKRLHEETGAWPAVNQIELHPTWQQREVVAFCKEHGIAVEAYSPMARGADLNAGDGTIEKIAAAHEVSPAQVILRWHIENGTIIIPKSVHADRQKENLNLFGFALTADEHAAIDALDGPTRAGHDPLTFTYA

SEQ ID NO: 3664 - protein, 466 aa, Thermosynechococcus elongatus BP-1
MSLWRPTAILLASDLPLIPPTRLRAMTLPTFVDLNLDPFWMPFTANRQFKQSPRLLVSAAGMYYRSIDGREILDGTAGLWCVNAGHCRPEIISAIAQQAATLDFAPTFQMGHPGPFQVADRLRRITPDPLNHVFFANSGSEAVDTALKIALAYHRLRGEGTRQRLIGRERGYHGVGFGGISVGGIAPNRKFFGSLLAGVDHLPHTHNLEHNAFSKGQPTWGAHLADELERLVALHDASTIAAVIVEPLAGSTGVLIPPQGYLERLRAICDRYGILLIFDEVITGFGRLGAPFASQYFGVTPDLITVAKGLTNAAVPMGAVIVRDEIYETFMQGPAGQIEFFHGYTYSGHPLACAAALATLEIYEKEALFERAASLAPYWQEAIHSLRGLPHVIDIRNLGLVAGIELAPREGQGGPRGYDALCRAFEAGLLIRVTGDIIALSPPLIVERSHIDQMVDILSRVLQELP

SEQ ID NO: 3665 - protein, 477 aa, Helianthus tuberosus
HEWVLGVGKPKNLPPGPTRLPIIGNLHLLGALPHQSLAKLAKIHGPIMSLQLGQITTLVISSATAAEEVLKKQDLAFSTRNVPDAVRAYNHERHSISFLHVCTEWRTLRRIVSSNIFSNSSLEAKQHLRSKKVEELIAYCRKAALSNENVHIGRAAFRTSLNLLSNTIFSKDLTDPYEDSASGKEFREVITNIMVDSAKTNLVDVFPVLKRIDPQGIKRGMARHFSKVLGIFDQLIEERMRTGRFEQGDVLDVCLKMMQDNPNEFNHTNIKALFLDLFVAGTDTTSITIEWAMTELLRKPHIMSKAKEELEKVIGKGSIVKEDDVLRLPYLSCIVKEVLRLHPPSPLLLPRKVVTQVELSGYTIPAGTLVFVNAWAIGRDPTVWDDSLEFKPQRFLESRLDVRGHDFDLIPFGAGRRICPGIPLATRMVPIMLGSLLNNFDWKIDTKVPYDVLDMTEKNGTTISKAKPLCVVPIPLN

SEQ ID NO: 3666 - protein, 487 aa, Burkholderia cepacia R18194
MTIKHWIGGREVESRETFTTLNPATGDVITDVASGGEAEVDAAVRAAKEAFPKWASTPAKERAKLMRKLGELIEKNVPNLAALETQDTGLPIAQTSKQLIPRASENFNFFAEVCVQMNGRTYPVDDQMLNYTLYQPVGVCALVSPWNVPFMTATWKTAPCLALGNTAVLKMSELSPLTADQLGRLALEAGIPPGVLNVVQGYGATAGDALVRHPDVRAVSFTGGTVTGKRIMERAGLKKYSMELGGKSPVLIFDDADFDRALDASLFTIFSINGERCTAGSRIFVQRTIYDRFVQEFARRANNLIVGDPSDPATNLGAMITRQHWEKVTGYIRIGEQEGARVVAGGADKPAGLPDHLRNGNFVRPTVLADVDNRMRVAQEEIFGPVACIIPFEDEDDGLRLANDTAYGLASYIWTQDVGKVHRLARGIEAGMVFVNSQNVRDLRQPFGGVKESGTGREGGEYSFEVFAEIKNVCISMGSHHIPRWGV

SEQ ID NO: 3667 - protein, 118 aa, Triticum aestivum
  unsure (1)..(118): unsure at all Xaa locations
MAPAVTXSSXTTVAPXQGLKSTAGLPVSRRTSASLGSXXNGGRXRCMQVWPXEGIKKYETLXYLPPLATEALLKQVDYXXRSXWVPCLEXARWLRFRXHNSPPGXXXGRXWTMXKHGA

SEQ ID NO: 3668 - protein, 178 aa, Zea mays
MAEAPASPGGGGGSHESGSPRGGGGGGSVREQDRFLPIANISRIMKKAIPANGKIAKDAKETVQECVSEFISFITSEASDKCQREKRKTINGDDLLWAMATLGFEDYIEPLKVYLQKYREMEGDSKLTAKSSDGSIKKDALGHVGASSSAAEGMGQQGAYNQGMGYMQPQYHNGDISN

SEQ ID NO: 3669 - protein, 380 aa, Yarrowia lipolytica
MLPPPRARCRHKSFRHPHPSHRHRHTPTHSRITRPTRTATMEDSDVLMRDINDDGLKPMDAMGAGGEGTFTELTPTTRGQLDAWIARLTECQPLSEDDVNELCNMAKGVLQKEENVQPVHAPVTICGDVHGQFHDLMELFKIGGPCPDTNYLFMGDYVDRGYYSVETVSYLVAMKVRYPNRLTILRGNHESRQITQVYGFYDECLRKYGNANVWRAFTSLFDYFPVTALVENQIFCLHGGLSPMIESIDNIRELNRFQEVPHDGPMCDLLWSDPDDRGGWGMSPRGAGFTFGADISEQFNHTNNLSLISRAHQLVMEGFSWAHEQQVVTIFSAPNYCYRCGNQAAIMEVDENLSNSFLQYDPCPRPGEPSVSRRTPDYFL

SEQ ID NO: 3670 - protein, 455 aa, Aspergillus niger
  unsure (1)..(455): unsure at all Xaa locations
MDRRVTIASQVAIAAVAGYCIYKAFNARQQQKSLKDAVPKSSAAPLTPEQIKIIKATVPVLQEYGTKITTAXYMNMSTVHPELNAVFNTANQVKGHQARALAGALFAYASHIDDLGALGPAVELICNKHASLYIQADEYKIVGKYLLEAMKEVLGDACTDDILDAWGAAYWALADIMINREAALYKQSQGWTNWRQFRISKKVPESDEITSFYLEPVDGKPLPAFRPGQYISVSVQVPEEDPQARQYSLSDTSRSDYYRISVKKETGLDPRAPGAKRHPGYVSNVLHDMIKEGDLIDVSHPYGDFFLSTAEATHPIVLLSAGVGMTPMMSILNTITKKSNRKIHFIHGSRTTEARAFKSHVQKLEKEIPNMQVTYFLSRPGDSDQLGVDYHHAGRIDLQKLDGPSHLYLDNPSTEYYICGPDTFMTQMEEALKAYGVGDDRIKMELFGTGGVPHN

SEQ ID NO: 3671 - protein, 220 aa, Arabidopsis thaliana
MEPRINDLQVESRVHELLDFPVHTNQISSAIYEILLQCPNDHIENPKKKPYNCPHSGAKCDVTGDIQRLLLHLRNDHNVEMSDGRSFSHRYVHHDPKHLHHATWMLTLLDCCGRKFCLYFEAFHLRKTPMYMAFMQFMGDEEEAMSFSYSLQVGGNGRKLTWQGVPRSIRDSHKTVRDSQDGLIITRKLALFFSTDNNTTDKELKLKVSGRVWREQPVSI

SEQ ID NO: 3672 - protein, 669 aa, Zea mays
MSASQSSMSGAGEPGARAVVWFRRDLRVEDNPALAAAARAAGEVVPAYVWAPEEDGAYYPGRVSRWWLSQSLKHLDASLRRLGAARLVTRRSNDAVAALLDLVRCTGATHLLFDHLYDPLSLVRDYRVKEQLAAEGIDVQSFNADLLYEPWEVLDEDRRPFTMFAPFWNRCLCMPDPAAPLLPPKRINSGDLSRCPWDELVFEDESERGSNALLARAWSPGWQNADKALTAFLNGPLMDYSVNRKKADSASTSLLSPYLHFGELSVRKVFHQVRMKQLMWSNDGNHAGEESCTLFLRSIGLREYSRYLTFNHPCSHEKPLLSHLRFFPWVVNEVYFKVWRQGRTGYPLVDAGMRELWATGWVHDRIRVVVSSFFVKVLQLPWRWGMKYFWDTLLDADLESDALGWQYISGSLPDGRELDRIDNPQFEGYKFDPHGEYVRRWLPELARLPTEWIHHPWDAPESVLQAAGVELGSNYPRPIVELDAANSRLQDALSEMWELEAASRAAMENGMEEGLGDSTDEPPIDFPQELRMEVDRQPVQPAIHAPGVTGRRREDQMVPSMTSSFIRAETELTADFGHTSEDSRPEVPSNIHHLQARPEREETVDGGTGNAVRVHGNHHQQSLQNNMHRVLGIAPSISEASSSWTGRDGGVEPVWSPPAASGHSDSYAA

SEQ ID NO: 3673 - protein, 160 aa, Brassica napus
KHPNRKKESFISDSDYFKKSRESPNTFFRSQSFIFWESLNFPGKFITLSLDSPESNSSGSIKMKPPASLDHWRDYFRRADSDIFQIIDHAIMVAAADSPIKFKSRRDKIAELLFSCRVARCNGCDHLELSIPGEDTAAGGGGSKESNNPVWRGKEGGRPE

SEQ ID NO: 3674 - protein, 352 aa, Streptomyces tubercidicus
MTDTASELDPSTGWAEPTAEAPPEAALMQLLMGGFVTQSIGVAARFGVADALAQGPRHVDDIAAEVGAHAPSLYRLLRALGDFGVFAELAGRRFALTPAGELLRSDSTPSLRGLAEHFGSGFHRAAWSGLYDSVRTGEAAFERVHGAPQFDYYRSHPEEAATFDAAMTSVASAIYATLESYDFGRFSTVVDVGGGNGAYLSGILASYPALRGVLFDLPDVVERSAPVLAKAGVADRCEVAGGSFFDAVPPGADAYVLTAVIHDWDDEASVRILRNCRAAMPAHATLLLGEPVLPDGPEPSVGKLLDLETLIGTTGRQRTEAEFRELLDRAGLRLTRVLHSSGPDSLVEAVPR

SEQ ID NO: 3675 - protein, 355 aa, male-killing Rickettsia from Adalia bipunctata
GFMSTASCRSTITYIGGDKGILRYRGYDIKDLAEKSDFLEVAYLLIYGELPSSEQYNNFTKKVAVHSLVNERLHYLFQTFCSSSHPMAIMLAAVGSLSAFYPDLLNFKEADYELTAIRMIAKIPTIAAMSYKYSIGQPFIYPDNSLDFTENFLHMMFAAPCEKYKVNPIIKNALNKIFILHADHEQNASTSTVRIAGSSGANPFACVSTGIASLWGPAHGGANEAVINMLKEIGSSENIPKYIAKAKDKNDPFRLMGFGHRVYKNYDLRAAVLKETCKEVLKELGQLDGNPLLQIAIELEAIALKDEYFIERKLYPNVDFYSGIIYKAMGIPSQMFTVLFAIARTVGWMAQWKEM

SEQ ID NO: 3676 - protein, 340 aa, Streptomyces tubercidicus
MGSDIAQDGSLQLLEISESFIYARALHLAAELKLADLLADGPRPTAELAEASATRPAALYRLLRALAGRGVFTEVETGRFGLTPVGECLRSDHPRSVRATVAQAGRLTAKTFNHAEEVLRTGEGAFTTAFGQPVWDYLQEHPDEGADFDTAMHEHSRIERDAIVAAYDFSGTARLVDIGGGDGTLLATVLTAHPETAGVLFDLPHVVERHRIGDAGLTDRCEIVGGDVFGELPAGGDLYMMKSVLHGWTDREVVSILTGCRRAMKPDGTLLLIERVIPVGDTPHSSKAFDLAMLVMAGGQERTQDEYTELLTEAGFRVERVIGTDSSLSIVEAVPTGAAL

SEQ ID NO: 3677 - protein, 414 aa, Oryza sativa (japonica cultivar-group)
MGNCASAIDSFFFTKRANNENDDDDAAPGMSASKRTTSSTTTGKLSTLSNSTFIPSTISGVSTDDAYPDGQILESRNLRIFTFAELKNATKNFRTDTVLGEGGFGKVYKGWVDERTMNPSKSSTGVVVAVKKLNPESVQGTEQWESEVNFLGRISHPNLVKLLGYCKDNDELLLVYEFMAKGSLENHLFRRGAVYEPLPWSLRLKILIGAARGLAFLHSSERQIIYRDFKASNILLDSNFNAKLSDFGLAKHGPDGGLSHVTTRVMGTYGYAAPEYVATGHLYVKSDVYGFGVVLLEMLSGLRALDPSRPSGKLNLVDWAKPLLADRRKLSQLMDSRLEGQYHSRGALQAAQLTLKCLSGDPKSRPSMKEVVEALEKIKLIKSKSREPRNSSSLVRGQGNSPRSDSARTSSKGR

SEQ ID NO: 3678 - protein, 355 aa, Gibberella zeae
MSRANPPNAAGSRKISFNVSEQYDIQDVVGEGAYGVVCSAIHKPSGQKVAIKKITPFDHSMFCLRTLREMKLLRYFNHENIISILDIQKPRSYESFQEVYLIQELMETDMHRVIRTQDLSDDHCQYFIYQTLRALKAMHSANVLHRDLKPSNLLLNANCDLKVCDFGLARSAASQEDNSGFMTEYVATRWYRAPEIMLTFKEYTKAIDVWSVGCILAEMLSGKPLFPGKDYHHQLTLILDVLGTPTMEDYYGIKSRRAREYIRSLPFKKKVPFRTLFPKTSDLALDLLEKLLAFNPVKRITVEEALKHPYLEPYHDPEDEPTAPPIPEEFFDFDKHKDNLSKEQLKQLIYQVIMW

SEQ ID NO: 3679 - protein, 123 aa, Phytophthora infestans
MIQIQTKLKVNDNSGIKIGQCLKIYKKKVGKIGDTILISAKKLRLNQKKKIKIIKGDLFKALIIHTTYQKKSTIGNLIKFDKNCIIILNNQNKPLGTRIFGPITSEFRKQKNFKILSLASNIL

SEQ ID NO: 3680 - protein, 192 aa, Xylella fastidiosa Temecula1
MNMLNVLRFPVLALALAFVSSGVLADVGSLLDLDYRPLAGKETVNLQRLYGGKVLLVVNTASKCGFTPQYEGLEALHQKLSPLGFAVLGFPSNDFKGQEPGDEQQIQEFCTLTYGVKFPMFQKVHVKGNEVTPLYQRLTQTTGVAPGWNFHKYLIARDGHVVAQFDSRTRPDDPILLEAIKRELAKSVQVVH

SEQ ID NO: 3681 - protein, 363 aa, Bacillus sp. KSM-K16
MLYAKGLENVVVAETTISAIDGEQGTLLYRGYQAEELAKSADFEDVAYLLLNGQRPTEAEKDDFSTALKTMRPLPDDLKKLLAALPKDLSMMDALRTLISSYTGKEGWPPQQQEAMRLVAIVPTIVAAWANRSCGKDAIEPDPSLNHVANYLYMLTGEKPHAAHIRALSAYLILTAEHGMNASTFAARVIASTEADLRSAICGALGALKGRLHGGAPTGVLELFSDIQTADTSSETLLREKLERGERLMGFGHRVYKTTDPRANALREVLKSLNNQETFLSEAVAIEQLATQLLAEYKPGRQLHANVEYYAAAIMEALRLKPDWFTPTFCVSRVVGWCSHVIEQSQDNRIMRPQQQYCGPKPD

SEQ ID NO: 3682 - protein, 132 aa, Candida albicans SC5314
MIYLKSLLNVIDNSGAQVVECIKVLRHKPKSCAQIGDRITCVVKQARPLQQELTGQSSTNRVKRRDICQAVVVRTRAPLKRKDGSVVRFDDNACVLINKNGEPLGTRISSVVAKELKDLNYNKIVALAPKTF

SEQ ID NO: 3683 - protein, 281 aa, Leptospira interrogans serovar lai str. 56601
MMELWLDEALELKNGRALKIKVKEFLHSRTTPFQKIDVFESVGFGRMFTLDGVVMMTEADEFAYHEMIVHVPMMSHPNPEKVLVIGGGDGGTVREVLKHPSVKEVHLCEIDKGVIDVCYEYFPEIANAMKDPRVKHAYEDGAKYVKDYQNYFDCIMVDSSDPVGPAEVLFKRPFYETMANCLKEGGICTTQGESFYYHGSIIRELFNFIPEIFKHCGYYYTVVPTYPSGIIGFTYCSKGPDPYTVVPDPQRVPQGLKYYSAEMHKAAFVLPQFAQKHIVRK

SEQ ID NO: 3684 - protein, 301 aa, Triticum aestivum
  unsure (1)..(301): unsure at all Xaa locations
MKTLFILTILAMATTIATANMQVDPSGQVQWPQQQPFRQPQQPFYQQPQHTFPQPQQTFPHQPQQQFPQPQQPQQQFPQPQQPQQPFPQPQQAQLPFPQQPQQPFPQPQQPQQPFPQSQQPQQPFPQPQQPQQSFPQQQQPLIQPYLQQQMNPCKNYLLQXQCNPVSLVSSLVSMILPRSDCQVMQQQCCQQLAQIPRQLQCAAIHSVVXHSIVMQQEQQQGIQILRALFQLVQGQGIIQPQQPXAQYEVIRSLXYLXTLSNIVHVYVRPDXSTIKRTHFASISRRALSGTMEKMKELWLI

SEQ ID NO: 3685 - protein, 326 aa, Acinetobacter sp. ADP1
MLQSLDPQLASFFAMLENQGAPAFDIGTLNDPNINEMRNWYLNFGPHVAGQFIELQDVEDLWIQVDDGSLRLRLYKTQRQHSESCETLIYFHGGGWCIGSIETHDLLCRHLVNDLDVNVISVDYRLAPEYPYPQAAHDAIHATQWIFEHASALGIHPDHLYVAGDSAGGNLAAITALTFKEQTYRTSLAGQILIYPCIDLTVIHDNKYPSFEKQKLTPPLSAEQMSKMIQIYLKNEDFAYQWLASPLLAQSHQHLPSTLIITAEFDPLHDQGCVYFEKLKSSLVNTEYHEIKGVVHGFFEMYGVLNKTKETINIIRAWLKNNTKSK

SEQ ID NO: 3686 - protein, 501 aa, Candida albicans SC5314
MTIPLSVDVTLPDGKKFTQPTGLFINNEFIKSKSGKTLESINPGTSEINGEVYAAESEDIDYAVECASKAFKSWKKITGVERGKYLYKLADLVEQQRDLLGAMEAWDSGKTKSTNAVFDVDECIAVIRYAASWADKITGKVIQNDPKKFAYTIHEPWGVCAQIVPWNYPLLMSMWKIPIAVAAGNTVVLKTSEITPLSMLYFASLVKQVGFPPGVINIVSGFGATAGAALASHKKVAKIAFTGSTATGKIIQKLAAENLKAVTLECGGKSPLIIRSDADIDQAVKWGAIGIMSNQGQICTSTSRIYVHESIYDKFIEEFAAHVKSDYKQGDVFDDEAVVGPQVSKMQHDKILNYIDIGKKEGARCVLGGEKNIEGELSKGYFVKPTIFADVKPEMRIVNEEIFGPVVVVGKFSTDEEAITYANQTDYGLGAAIFTKDITAAHNMASDIEAGMVWINSSNDSDYHVPFGGVKMSGVGRELGEYGLNMYTQAKAVHVNLGTRL

SEQ ID NO: 3687 - protein, 158 aa, Zea mays
PEPHDVGRYIQAEVKSGGQISIPKTAGSIDPAAGLVEYVETLVRNPETDYNVVIIQVNGVAQAADSVHVLCIGRLRMRLAKEKTVVAKEFYSSSMQLCGVRGGGDAAPQSIFWQPRKGLSFVLAFETTRERNSALMLARRFAIDCNIILGGPGDKTSW

SEQ ID NO: 3688 - protein, 52 aa, Glycine max
  unsure (1)..(52): unsure at all Xaa locations
KFGLTTAQILRVVKNLDLAGMLDWLRLTHFHTGSQIPSTALLXDGVGTRCAD

SEQ ID NO: 3689 - protein, 206 aa, Triticum aestivum
  unsure (1)..(206): unsure at all Xaa locations
MATSFQGTTTKCNACDKTVYLVDKLTADNRVYHKACFRCHHCKGTLKLANYNSFEGVLYCRPHFDQLFKRTGSLDKSFEGTPKVVKPERNVGNENATKVSSAFAGTREKCFGCTKTVYPIERVTVNNTMYHKSCFKCCHGGCTISPSNYIAHEGKLFCKHHHTQLIKEKGXSASSRTTTTRRHRVPGQWMMKTRSISQSLRISIDE

SEQ ID NO: 3690 - protein, 278 aa, Leptospira interrogans serovar Copenhageni str. Fiocruz L1-130
MNNKENPLKQTIMLNNGISMPILGLGVWKTKSGKECKEAVLNALEAGYRHIDTARIYDNEVDVGQAIRESGIPRKEIFITTKLWNADQGSDKTRKALENSLDRLGIDFVDLYLIHFPVTSKRMDSWKELEKLYHDKLCKAIGVSNYTIIHLTELLKNSQITPAVNQVEFHPFLNQIHLLEYCKKHKIQLEAYSPLAHGQKIEDPTIAKIAQKYDKTPAQILIRWAIEQKIVVIPKSIKKERIIENSKVFDFAISEEDMKILNSLDEDFRTCWDPSEVV

SEQ ID NO: 3691 - protein, 161 aa, Xanthomonas campestris pv. campestris str. ATCC 33913
MTTLSTYQFTDLDGQPQSLAEYAGKVVLVVNVASKCGFTPQYAGLQALWQRYRDRGLVVIGFPCDQFGHQEPGDAADIRQFCSLDYAVDFPLAAKVEVNGSGAHPLWQWLKHEKRGVLGSEAIKWNFTKFLIGRDGSVLERYAPTTKPEALAADIERALGA

SEQ ID NO: 3692 - protein, 428 aa, Bacillus cereus ATCC 14579
MNYLFKNGRYMNEEGKIVATDLLVQDGKIAKVAENITADNAEVIDVNGKLIAPGLVDVHVHLREPGGEHKETIETGTLAAAKGGFTTICAMPNTRPVPDCREHMEDLQKRIEEKAHVNVLPYGAITVRQAGSEMTDFETLKELGAFAFTDDGVGVQDASMMLAAMKRAAKLDMAVVAHCEENTLINKGCVHEGKFSEKHGLNGIPSVCESVHIARDILLAEAADCHYHVCHVSTKGSVRVIRDAKRAGIKVTAEVTPHHLVLCEDDIPSADPNFKMNPPLRGKEDHAALIEGLLDGTIDMIATDHAPHTAEEKAQGIERAPFGITGFETAFPLLYTNLVKKGVITLEQLIQFLTEKPADTFGLEAGRLKEGRAADITIIDLEQEEEIDPTTFLSKGKNTPFAGWKCQGWPVMTIVGGKIAWQKESALV

SEQ ID NO: 3693 - protein, 476 aa, Naumovia castellii
MSAVLSTQTTRSILSNSGRRAATIALIHRLYTTASAEPTLKETFSQLIPSKIDEIKQFKKDHGKTVIGNVLLEQAYGGMRGIKGIVWEGSVLDPEEGIKFRGLTIPEIRDQLPKLGDEPLPEGIFWLLLTGEIPSRAQVEQLSADLASRAELPEHVVNLLNGLPKHLHPMAQFSIAVNALESESKFAKAYAQGVNKKEYWKYTFEDSLDLLGKLPTIAATIYRNVFKDGKLGAWDPQADYGKNLATLMGFKNKDFMELMRLYLTIHSDHEGGNVSAHTTHLVGSALSSPYLSLAAGLNGLAGPLHGRANQEVLEWLFKLREEVKGDYSKETIEKYLWDTLNSGRVVPGYGHAVLRKTDPRYTAQREFALKHFPDYELFKLVSSIYEVAPKVLTKQGKTKNPWPNVDSHSGVLLQYYGLTEASFYTVLFGVARAFGVLPQLIIDRAVGAPIERPKSFSTEKYKELVAKIESGETKVV

SEQ ID NO: 3694 - protein, 506 aa, Arabidopsis thaliana
MERTLLQWRLLPLLALIVALFSFFFASPRSLQGNNKCSLLPHDHYWISSKRIVTPNGLISGSVEVKGGIIVSVVKEVDWHKSQRSRVKVIDYGEAVLMPGLIDVHVHLDDPGRSEWEGFPSGTKAAAAGGITTLVDMPLNSFPSTVSPETLKLKIEAAKNRIHVDVGFWGGLVPDNALNSSALESLLDAGVLGLKSFMCPSGINDFPMTNITHIKEGLSVLAKYKRPLLVHAEIERDLEIEDGSENDPRSYLTYLKTRPTSWEEGAIRNLLSVTENTRIGGSAEGAHLHIVHLSDASSSLDLIKEAKGKGDSVTVETCPHYLAFSAEEIPEGDTRFKCSPPIRDAANREKLWEALMEGDIDMLSSDHSPTKPELKLMSDGNFLKAWGGISSLQFVLPITWSYGKKYGVTLEQVTSWWSDRPSKLAGLHSKGAVTVGKHADLVVWEPEAEFDVDEDHPIHFKHPSISAYLGRRLSGKVVSTFVRGNLVFGEGKHASDACGSLQLATT

SEQ ID NO: 3695 - protein, 480 aa, Thermosynechococcus elongatus BP-1
MSLRLFWHRRDLRLNDNLGLAAAYTRTPKVVGLFCFDPAILSASDIAAVRVAYLVGCLQALQEAYRRLGGSFLIFRGDPRQILPQVAKGLGAVAVHWHEDVEPYGRERDRAVAAALKEKGIAVETAWDQLLHPPEAIQTKQGQPYTVYSPFWRNWSSLAKPEPVSAPRHLEPLTEIEQATAGTLGAICLPTAKDLGFHWSGDLILAPGEAAAQAQLETFIDQHIQDYGEQRNYPAQPGTSLLSPALKFGVIGIRRVWTATQAAMAAARSEEAQRSIRTWQQELAWREFYQHALYWFPHLAERPHREGFATFPWLNNEAHFAAWCEGRTGYPIVDAAMRQLNETGWMHNRCRMIVASFLTKDLIINPQWGERYFMQKLIDGDLAANNGGWQWSASSGMDPKPLRIFNPASQAQKFDPEAEYIRRWLPEVRSLDTIDLVTGNISPLERHRCGYPLPIVDHRQQQQRFKQLYQEHFRSPIPQE

SEQ ID NO: 3696 - protein, 473 aa, Naumovia castellii
MLRFSRQLHNSTRLCSQATGLKESLKAIIPKRKEEFLKLKKECMGTKVDDITIGSILSGMRGNRSMFWEGSMVDAQRGITFHGKTIEQCQRELPGDESGNFYPESMLWLLMTGEVPTKQQTKQLMEELAVRGSEANFPIATSRVIDSLPNDMHPMTQLAIGLASMNKVSRFASNYEKGLLNKNNYWEDTFEDTLNLISFLPILTGKIYSKITNDGKPLGKFSPTEDWSSNICSLMGMSNSTYSVNKNNFNASESKDFLSLMRLYTGIHADHEGGNVSAHTTHLVGSALSDPYLSYSSGIMGLAGPLHGLAAQEVVRFLVEMNGQISSPNQPDEIERYLWDLLNSKRVIPGYGHATLRKPDPRFTAMLKFTKDRKSEFENDKNVVLMQNLSSIAPKVLKAHGKCQNPYPNVDSASGILFHHYGLKESLFFTVIFGCSRSMGPLTQLVWDRIYGLPIERPKSVNMETLKLLSNSQ

SEQ ID NO: 3697 - protein, 177 aa, Triticum aestivum
MAGVSRSMVAPLLVLNLVMYIVVIGLASWNLNHFINGTTNYAGVAGNGATFYFLLFAILAGVVGAASKLAGVHHVRTWRGDSLATSASSALVAWAITALAFGLACKEIHVGGHRGWRLRVLEAFIIILAFTQLLYVMALHAGLFGNQFGDGYGGAEHQYGDHHHHKGMGTAAATARV

SEQ ID NO: 3698 - protein, 271 aa, Triticum aestivum
EIREARRIKMLHQPSKVMDMQFELQGLRTLISEKTQLCNQLKKELAMIKRLEQDSSKLFELEGSDTLGSQFRIVPRVDGAPDISSGPPRWYRVISGGHRELVSGATRLTYAPEPFDVGQLLQAEIILKADKVTVQTDGPINHASGLEHYVESLMKRADIEFNVVVTQMNGNDYASKSVHVFHIGKLRVKLRKGRSTKARESYSTTMKLCGSRGGGNAAACAVFWQTRKGLSYTLAFETDRDRNAAIMLARKFASSCNVVLAGPGDQVHGGG

SEQ ID NO: 3699 - protein, 426 aa, Helicobacter pylori 26695
MSVTLVNNENNERYEFETIESTRGPKAVDFSKLFETTGFFSYDPGYSSTAGCQSKISYVNGKKGELYYRGHRIEDLVAKYKYVDVCKLLLTGELPKNQDESLEFELELRHRSFVHESLLNMFSAFPSNAHPMAKLSSGVSILSTLYSTHQNMHTEEDYQTMARRIVAKIPTLAAICYRNEVGAPIIYPDIARSYVENILFMLRGYPYSRLKHTTQGEVEITPLEVEAFDKILTLHADHSQNASSTTVRNVASTGVHPYAAISAGISALWGHLHGGANEKVLLQLEEIGDVKNVDKYIARVKDKNDNFKLMGFGHRVYKSYDPRAKILKGLKDELHQKGVKMDERLSEIAAKVEEIALKDEYFIERNLYPNVDFYSGTILRALKIPVRFFTPVFVIGRTVGWCAQLLEHVKSPQARITRPRQVYVGD

SEQ ID NO: 3700 - protein, 127 aa, Brassica napus
MESVKNSDLKSSVNGGVVDVYGEDSATIEHSITPWSLSVSSGYSLLRDPRYNKGLAFSEKERDTHYLRGLLPPAVVDQNLQEKRLINNIRQYQYPLQKYMALTELQERNERLFYKLLIDHVEELLPI

SEQ ID NO: 3701 - protein, 425 aa, Helicobacter pylori 26695
MAYNPKILQKPKEGEEITIKDNKLHVPNHPIIPFIEGDGIGSDITPAMIKVVDSAVQKAYKGEKKIAWYEVFVGEKCYQKFKDYKELSPEEQWLLPDTIEAINHYKVSIKGPLTTPIGEGFRSLNVALRQKMDLYVCLRPVRWYGSPSPVKEPQKVDMVIFRENSEDIYAGIEWQEGSAEAKKLIHFLQNELKVKKIRFPESSGIGVKPISKEGTERLVRKAIEYAIDNDKPSVTFVHKGNIMKYTEGAFMKWGYALAQKEFNAQVIDKGPWCSLKNPKNGKEIIIKDMIADAFLQQILLRPSEYSVIATMNLNGDYISDALAAMVGGIGIAPGANLNDTVGMFEATHGTAPKYAGLDKVNPGSIILSAEMMLRHMGWVEAADLIVSAMEKAIKSKKVTYDFARLMDGAKEVKCSEFASVMIENM

SEQ ID NO: 3702 - protein, 135 aa, Brassica napus
MDARMFGLETPRVAALHHLLDVPDGDKAGGGATRTYVRDARAMAATPADVKELAGAYAFVVDMPGLSTGDIRVQVEDERVLVISGERRREEREDAKYLRMERRMGKFMRKFVLPDDADVAKAPPLGGDRVLTVTV

SEQ ID NO: 3703 - protein, 136 aa, Oryza sativa (japonica cultivar-group)
MRKMRDKGEGSSAARTEGRKLVVRAREGEAELDEVEHIDVGLERVEWGIGSGGEEPVEIREVWTDNLEVELALIRDVVDEFPFVAMDTEFPGIVCYPRRRSALCAAVDRKHEAWEICLTPVQVQSLPSGVLACQLI

SEQ ID NO: 3704 - protein, 116 aa, Gibberella fujikuroi
MAAPNDAEHEMTFDSADAGASLTYPMQCSALRKSGFVVIKNRPCKIVDMSTSKTVKHGHAKVHLVATDIFTGKKYEDLSPSTHNMDVPNVSRREYQLLDISGGGFLSLMTDDGDTK

SEQ ID NO: 3705 - protein, 414 aa, Pyrococcus furiosus
MEVVLEGKFLLDKRTIEGYIGIEDGKISKISLREIKGDHKIKVDKGKVILPGLIDVHVHLRDFEESYKESIESGTKAAVHGGITVVFDMPNTKPPIMDEKTLKLREHLFKRKSYADYALGFLLAGNKPVEADFYKIFMGASTGGIYSKNFEEDYIRALDIVSIHAEDYEIIQKYPERPPIAEIRAIERVIEAVKTHKKPAHICHISTAKGLKLLLDSRLEMLSFEVTPHHLFLTRSDYDKNPLLKVYPPLRSEEDRIALWKNIDKVPVIASDHAPHTLEDKEAGAAGLPGLETEVPLLLDAVNKGLITLQDIVEKMHINPIKIFGIENKGFEKGKDADFTIVDMKREWTIRADNLYTKAGWTPYEGWRVKGKVIMTIIRGEVVMEEDEIIGKPRGERIVKKGKHRRNLGSSEEH

SEQ ID NO: 3706 - protein, 389 aa, Sulfolobus tokodaii
MWIKGKAWFNNSIDTICIQIDRFIKNIKKDCKPDIEFKENQLILPASIDMHVHVRGAQLSYKETVATATSEAAYGGIGLIIDMPNTLPPVNTYERVIERIREFENYSRTDFGIYSGVTKEIEKIDTLPIAGYKIYPEDLDRTETKVLLEKSKKLKVLHPEIPLALKVPRKLRNIWMEIAALHYVQGNVHVTHITNYETVKIAKELGFSTDITPHHLLVNGERDCITKVNPPIRDYLTRLGLWKALFEVDTVVSDHAPHSKEEKNLNYDLCPPGIAAVSFTTPFIYSLVFKDLLNIERAVNLLSKNPAKILNIPYGEIRIGYVANFTIISKNDWKYRTKFSKVTETPLDNFPLEAKVEFTIVQGKIAFDGKNVLPIRGVNAFDKSSRYPV

SEQ ID NO: 3707 - protein, 468 aa, Mesorhizobium loti
MRLSNLGTEQLREKDRSFVFHPSTHLAKHSRGETPNRIMAGAEGVYIWDTEGRKSLDGFGGLYCVNMGYGCTEIAEAIARQAHEMPFAHIYASQGTEPVALLAEAVVEYFGQNMRRVFFGLSGSDANETNIKLVWYYNNILGRPEKKKIISRHRGYHGSGLVTGSLTGLAFFHNFFDLPLDLVRHTTTPHHYRQAHDGESEQAFSKRCADELEALIVAEGPETVAAFIGEPVLGTGGIVPPPKGYWTAIQSVLDKYDILLIADEVVCGFGRTGEKFGSHLYGMRPDFVTIAKGLSSAYLPISGSIIGDRVWSILEQGTEKHGALGHGWTYSGHTLCAAAALANIRLLKERNILEHVRDVGPYWHARMNAELAGHPIVGEVRGVGILSAVELMRDPKQRIPFESDLQVGVRAAAALFENGVIGRAMPHGDILGFAPPLIITRKEIDIIVNATAKSVETTYRALKAEGAI

SEQ ID NO: 3708 - protein, 447 aa, Haloarcula marismortui ATCC 43049
MTDIHIKDAQVVTASGVQHGEITMSDGTIDAAGPASAVPTPSNPDTVIDADGMVALPGATDVHTHMHDDELFPDGIDFASQTASAVAGGVTTVIELPTQTPVTTPEAIQRKAETCSTLAHIDFGLVAGNIQDPDIDVSGIMSAGVADFKTFTADPYLASDASIAALMRHVGDAGGTVRVHCETQGLLDDARSTIVSDDPEVYMGSRPLEAELDAISRAGYFAEYADCPLHVVHISSGSGAREAGRFKSRANVPVTLETCPQYLAFSKEDVADKGPFLKVNPSLKSDAERERLWDAVQDGTIDLIGTDHFPTYRETRDVGWDDIWEPYAGLPGVETMVEFLVSEGVHKGRLSWPRLCELVCAAPARSAGIYPRKGSLQQGTDADVVLIRDEEYEVTADDHTFVGGWTPYEGQHWSARVDTVIAGGEIVAKDHRVRSTAGRGQFLNRPL

SEQ ID NO: 3709 - protein, 477 aa, Mesorhizobium loti
MSEARSYELFINGKWRAGGSRVTLPVINPATEKVVASVASATVSDLDEALASAERSRKAWCSRPAKERGEILVAAARVLATQIEPAARDLSAEQGKTIAEATGEYARAVETLEWNGTHAEELSATIPLGPNRMIVPEPLGVVAAFTPWNYPAVLITRKLAPALAAGCPVILKGAEETPSVAVHIVESLRQAGVPDGVVNLVFGVPVHISRHLLSSPIVKVLTFTGSTAVGKQLAMLAANNLQRCILELGGHSPVIVCEDADLAKAIPAISEYKFECAGQSCNAPSRILVARTLYEEFLSRMTEAARKIRIGLPDDPATEMGPMANARRIEAMQRLTKDAVDRGAHIETGGTRLDGAGFYWPPTILTGVPKDARVLHEEPFGPILTVAPFDTLDEAIGEANDTEYGLAAYFFTDAADTQRKLTNSLSAGAVSVNYLKGVSADAPYGGVKQSGYGYEGGEQGVRSFQILKMVNGLGSFG

SEQ ID NO: 3710 - protein, 451 aa, Pyrococcus abyssi GE5
MWEEINMIKIYTLGGYEEVGKNMTAVEYNGEVVIVDMGIRLDRVLIHEDVEFQKMSSKDLRKLGAIPDDRPIRNKKVVAIALSHGHLDHIGAVGKLAPHYPDVPIYGTPYTIRLAKSEIKGEEYFEVTNPLYETNYGEIVQVSENLAIEFVQITHSIPQSSIVVIHTPEGAVVYACDYKFDNNHPYGERPDYKRLKELGKEGVKVLIAESTRVAEETKTPSEAVAKMLLEDFFLYEGMEADGLIATTFASHIARLQELIEIANKMGRQAIFIGRSLAKYTGIAKQLGLIKMKGSRVLRSPNAVSKVLKEVSQARENYLLIVTGHQGEPGAILTRMANGELYDIGPRDTVVFSAGVIPNPLNVAQRYALETKLRMKGVRMIKNLHVSGHASKEDHRYLIRMLNPEYIVPAHGEFRMLTHYAELAEEEGYMIGKEVFISRNGHVVEIPGSLEG

SEQ ID NO: 3711 - protein, 780 aa, Zea mays
MAASLSLHVTAGCGSKKKKRSMAAKGLREVGRRRAAEVGRRCLSGGSAGPPAPAAKRKEGGKAVNLFTAVNQALHIALDTDPRAYVFGEDVGFGGVFRCTTGLADRFGKSRVFNTPLCEQGIAGFAIGLAAMWLYRLAVEEVPEEDYMLPLSEAEVSHEAPVTGGFGAEIAASIAERCFQRLEAPVARVCGLDTPFPLVYEPFYMPTKNKGVSLVLGYADALAAPLPHAVTVRADASDEGSARSPFYAAARTSWVLDVTYPAVGCGRHATATEAFDRVRGAFLCPTSLWETGAPSLDTLAESAATYAVMMSSQQQQQQQTAGPSRQAVYGAPVLPEIPTRFVYRPQVATDVMSGSSSLWKTGAPPHDTLAESAAMYAATLSSHQQQQQMARPDRQAMYGAPVLPEIPTRFVYRPQTATDVMSSFSSLWETGAPPPAAYAAMLSSQQQQMPTTRPGWQAAPRGAPVPPPMNMRFVPNTMPAADAMDVGSSAPMAPSDSSSERTPSPLQRVEVRQVWAHNFDSEAKLIESLLPKFRYVAVDTEFPGTVYRPAGPAYKLEPAERYRLLRCNVDALHPVQLGLTLFDAGCVLPGGHGGATRYVWQFNFSDFDVRRHRHVVESVAALRSRGVDLDRTRQYGVAAAAVFGPRLRKWTRAGLGRAGVVTSHGGYDLAYLVKMMFGTGFRMSGSAAEFNAVVKSVLHRRRVFDIGEMARLCPHEHLHRGLDSIAGQLNAARFAADAARQAGYDSLRTCYTFMKLREIYFDDDGKLAGVDGILAEVTAF

SEQ ID NO: 3712 - protein, 347 aa, Pisum sativum
MDGREAMAFSGGPGSYYLHRGGVEAAGSGSGGFQVPPGFRALPNNGIIAQPNVRAQGGNGDTSSMFSLEPQSHADFNHDISVGASSGAPSSEPVKKKRGRPRKYGPDGSVSLKLTPMSAPANSTQDSGTPSEKRGRGRPRGSGRKQQLAALGDWMTSSAGLAFSPHVITIAAGEDIAAKLLLLSQQRPRALCILSGTGIASKVTLRQPASTNAGVTYEGKFQILSLSGSYLVSEDGGPTNRTGGISVSLSSRDGHVIGGSVAMLIAGSPIQLVVCSFVYGGGSKVKTKQGMITNGESSEPHNDNLGSPASAPPDQNYISSPTGMWPGSQPSDMKSAPAHTGIDLTRG

SEQ ID NO: 3713 - protein, 202 aa, Arabidopsis thaliana
MAELENPSVMSKLIAFLSSLLERVAESNDLTRRVATQSQRVSVFHGLSRPTITIQSYLERIFKYANCSPSCFVVAYVYLDRFTHRQPSLPINSFNVHRLLITSVMVAAKFLDDLYYNNAYYAKVGGISTKEMNFLELDFLFGLGFELNVTPNTFNAYFSYLQKEMTLLQPLSLVVVPSSRSLITFNDDEASHQKQQQQQLAV

SEQ ID NO: 3714 - protein, 294 aa, Arabidopsis thaliana
MALTNNLWAFVFGILGNIISFVVFLAPVPTFVRICKKKSTEGFQSLPYVSALFSAMLWIYYAMQKDGTAFLLITINAFGCVIETIYIVLFVSYANKKTRISTLKVLGLLNFLGFAAIVLVCZLLTKGSTREKVLGGICVGFSVSVFAAPLSIMRVVVRTRSVEFMPFSLSLFLTISAVTWLFYGLAIKDFYVALPNVLGAFLGAVQMILYIIFKYYKTPVAQKTDKSKDVSDHSIDIAKLTTVIPGAVLDSAVHQPPALHNVPETKIQLTEVKSQNMTDPKDQINKDVQKQSQV

SEQ ID NO: 3715 - protein, 489 aa, Bordetella bronchiseptica RB50
MRIEHLIDGKAVAGKQYFETINPATQETLAEVAAGGEAEVHAAVAAAKAAFPKWAGLPAAERARLVRKLGDLIAAHVPEISRTETNDCGQTIAQTGKQLVPRAADNFYYFAEMCTRVDGHTYPTPTHLNYTLYHPVGVCALISPWNVPFMTATWKVAPCLAFGNTAVLKMSELSPLTAARLGELALEAGIPPGVLNLVHGYGRDAGEPLVAHPDVRAVSFTGSTATGNRIVQAAGLKKFSMELGGKSPFVIFDDADLDRALDAAIFMIFSNNGQRCTAGSRILVQQSIYADFTQKFVERARRIRVGDPLDEGTIVGPLISPAHLAKVRGYIELGSKEGATMLCGGLDRPSYAPELDARVRDGNFVWPTVFADVDNRMKIAQDEIFGPVACLIPFRDEAHAIELANDIEYGLSSYVWTESVGRAHRVAAAIEAGMCFVNSQNVRDLRQPFGGTKASGTGREGGTWSYEVFCEPKNVAVSLGNHHIPHWGA

SEQ ID NO: 3716 - protein, 448 aa, Corynebacterium diphtheriae NCTC 13129
MSTQNYPATGRLAEPEYGTLLVKNVKIYGEGEPVNVLITDGVITDTHAGDVKADREVDGQGGVLLPGLVDIHVHLREPGREDTETIATGSAAAAKGGFTAVFTMANTMPVMDQPIIAESVWHKGQDIGLCDVHPVGSITKGLEGKEITEFGMMAHSQAKVRMFSDDGKCVDNPLIMRRAVEYARGTDVLLAQHCEDPRLTDGAVAHEGAMAAKLGLGGWPRVAEESIVARDAILARDYGGRMHICHASTQGTVELVKWAKEHEIPLTAEVTPHHLLLTDERLATYDGVNRVNPPLRENSDILALRDALLNGTIDCVATDHAPHGSEDKCCEFEHAKPGMLGLETSLAVVAAVFVETGLADWRFVAKVMSERPAEIVKLPGHGRPIAVGEPANLTIVDPGAKWTASGEKMASKATNTPYEGMEFNARVTTTILRGRLTCVDGEPTQARA

SEQ ID NO: 3717 - protein, 212 aa, Oryza sativa (japonica cultivar-group)
MHQGAARQAGQSGGGGGGGGGADRLSALPDAALFRIVSHLTARQAVRTSVLSKRWRHVWASVPRVDIRHPCACDERADQERFGDFVTTMLLNRRPFAPIKALRLWWSHDGDAETWIAHAVRRGAEEIDFSARHHQDDPKPELEYTSFISPKIKILKLTTFGMDIKAITHICSSPHNGKEGRGSNSSAKRKAQGEVARLAVKQRRARNSRSPE

SEQ ID NO: 3718 - protein, 165 aa, Glycine max
  unsure (1)..(165): unsure at all Xaa locations
ASSMISSPAVTTVNRAGAGMAAPFTGLKSMAGFPTWKTNNDLASVASNGXRLQCMLVWPPVGKMIFETLCYLPDLDDAQLAKEVESLLKKGWIPCMEFELEHSFEYREHSCVPGYYNGRYCTMCKLPMVGCTMLPTCMNDILEAKTVVPRGYIRLSGLGNVRQVQ

SEQ ID NO: 3719 - protein, 113 aa, Rickettsia moreli
ANEAVINMLKEIGSSEYIPKYIAKAKDKNDPFRLMGFGHRVYKNYDPRAVVLKETCKEVLKELGQLDNNPLLQIAIELEAIALKDEYFIERKLYPNVDFYSGIIYKAMGIPSQ

SEQ ID NO: 3720 - protein, 175 aa, Triticum aestivum
MAPTVMASSATSVAPFQGLKSTAGLPVSRRSNGASLGSVSNGGRIRCMQVWPIEGIKKFESLSYLPPLSTEALLKQVDYLIRSKWVPCLEFSKVGFIFREHNASPGYYDGRYWTMWKLPMFGCTDATQVINEVEEVKKEYPDAYVRIIGFDNMRQVQCVSFIAFKPPGCEESGKA

SEQ ID NO: 3721 - protein, 317 aa, Pseudomonas aeruginosa PAO1
MIEVIVGAIRLEAQDIHSFELFRADGAALPSFEPGAHIDLHLPNGLVRQYSLCGPAERPRHYRIAVLRCRDSRGGSATLHAELRVGQRLHIGEPRNLFPLSPEPGPHLLFAGGIGITPLLAMAERLARDGADFQLHYCAHSGERAAFVDYLGRCAFADRVHCHFDHGESSRRADLRALLATSPRDAQLYLCGPAGFMQWIEESARELGWEASRLHREHFAAAPRDASADGTFEVQLASNGALIRVAAGQTVLAALREAGVDLPASCEQGICGTCLTRVLDGEPEHRDLYLSEEEQAANDCFTPCCSRSRSPRLVLDL

SEQ ID NO: 3722 - protein, 276 aa, Streptomyces coelicolor A3(2)
MISIPAYTLNDGTSLPALGLGTWPMKDEEAERAVRAALETGYRLIDTATNYRNETGVGRGVASAGLPREEIVVTTKLPGRHHGYEETLASFEESRARLGLEYVDLYLIHWPLPRVDKYVDSWKAMVKLREDGLVRSVGVSNFTAEHIERLERETGVLPSVNQIELHPLLPQDELRAYHERKGIRTESWSPLGRGSDLLDDPAVAAVAAAHGVTPAQAVLRWHTQLGAVPIPKSADPARQRANLDVFGFELDAEQLRAVADRVHRRIGGDPEVHEEF

SEQ ID NO: 3723 - protein, 483 aa, Oryza sativa
MTTPHGLLQYSSGAFSDQVPADDSAEEHGVKDHAMLAPFTAAWQTAISPPLVIERSEGCYVYDVNGTKYLDALAGLLSTALGGSEPRLVKAATEQLNKLPFYHSFWNHTTRPSLDLAKELISMFTAREMGKVFFTNSGSEANDSQVKIVWYYNNALGRPKKKNIISRTQSYHGTTFISASLSGLPTLHQDFDLPGRFVLHTDCPHYWRFHLPGETEEEFATRLADNLENLILKQGPETIAAFIAEPVIGAGGVILPPKTYFEKIQAVVKKYDNLFIVDEVITGFERLGTMFGSDLYNIKPDLVSLAKALSSAYAPIGAILVSPEISDVIHSHSNKLGTFAHGFTYSGHPVSCAVALEALKIYRERDIPGHVTHVAQRFQEGIKAFAAGSPIVGETRGVGLLIATEFTDNKSPYELFPFEWGVGEIFGQECKKRGMMVKVLGNLIAMSPPLIITREEIDKLVSIYGEALKATEERVAELKSKKN

SEQ ID NO: 3724 - protein, 281 aa, Brassica napus
RPTRPDFDAPATGTPSVVVREVWADNLESEFELISGIVEDYPFISMDTEFPGVIYKADLRRLNPGYLYKLLKSNVDALSLIQVGLTLSDADGNLPDLGGGGGGSRFIWELNFRDFDVDRDPRARESLELLRRHGIDFERNRREGVESGRFAELMVSSGLICNESVSWVTFHSAYDFGYLVKILTRRELPGSLGEFLRLLRAFFGERVYDVKHMMRFCERRLFGGLDRVARSLEVNREVGKCHQAGSDSLLTWQAFRRMRDLYFVEDGPEKHAGVLYGLEVF

SEQ ID NO: 3725 - protein, 198 aa, Zea mays
  unsure (1)..(198): unsure at all Xaa locations
MATSFQGTTTKCTACDKTVYLVDKLTADNRVYHKACFRCHHCKGTLKLANYNSFEGVLYCRPHFDQLFKRTGSLDKSFQGTPKVVKPERNVGNENATKVSSAFAGTREKCVGCSKTVYPIERVTVNNTMYHKSCFKCCHGGCTISPSNYIAHEGKLYCKHHHVQLIKEKGXTSASSRMTTRRHRRLGRWRTTKKKSIN

SEQ ID NO: 3726 - protein, 246 aa, Corynebacterium efficiens YS-314
MVSAIRTGYRLIDTAYNYENEGAVGVAIRESGVPREELIVTSKLPGRFHEFELARPRIEESLYRLGLDHIDLLLIHWPNPNRDLYVQAWQALIDARDRGLVRHIGVSNFLPEHIDRLEAETGELPVVNQIELHPYFPQVEQVEWHNARGIVTEAWSPLSNGRGLVDEPLLTDIGRRYGVGGGEVALAWHHARGIVPIPRSTNPERQKSNLEAVHLTLSDEEVSAITALGRPDGRIKDQDPAVYEEF

SEQ ID NO: 3727 - protein, 285 aa, Triticum aestivum
  unsure (1)..(285): unsure at all Xaa locations
WIPRAAGIRHEVDPSGQVQWPQQLPCRHLXQQQPLPPPQTFPQHTTIPQQPQQTXFPQQPSFSQQQPPFPQPQQPPQHFPQQQPVLPQQPPFPQPQQPQLPFPQQPQQPFPQPQQPQQPFPQPQQQFPQPQQPQQSFPQQQQPLIQPSLQQQMNPCKNFXLQQCNPVSLVSSLVSLILPRSDCQVMQQQCCQQLAQIPQHLQCAAIHSVAHSIIMQQQHQGIQILRPLFQIVQGQSIIQQQPAQLEVIRSLVLKTLPTMCNVYVRPDCSNIRTPFASTVAGIGGQ

SEQ ID NO: 3728 - protein, 352 aa, Streptomyces tubercidicus
MTDTASELDPSTGWAGPTAEAPPEAALMQLLMGGFVTQSIGVAARFGVADALAGGPRHVDDIAAEVGAHAPSLYRLLRALGDFGVFAELADRHFALTPAGELLRTDSTPSLRGLAAHFGSGFHRAAWSGLYDSVRTGAAAFERVHGAPQFDYYRSHPEEAAVFDAAMTSVASAIYATLESYDFGRFSTVVDVGGGNGAYLSGILASNPALRGVLFDLPDVVERSAPVLAKAGVADRCEVAGGSFFDEVPRGADAYVLTAVIHDWDDEASVRILRNCRAAMPAHATLLLGEPVLPDGPEPSVGKLLDLETLIGTTGRQRTEAEFRELLDRAGLRLTRVIHSAGPDSLVEAVPR

SEQ ID NO: 3729 - protein, 492 aa, Arabidopsis thaliana
MPEFSSSVKLKYVKLGYQYLVNHFLSFLLIPIMAIVAVELLRMGPEEILNVWNSLQFDLVQVLCSSFFVIFISTVYFMSKPRTIYLVDYSCYKPPVTCRVPFATFMEHSRLILKDKPKSVEFQMRILERSGLGEETCLPPAIHYIPPTPTMDAARSEAQMVIFEAMDDLFKKTGLKPKDVDILIVNCSLFSPTPSLSAMVINKYKLRSNIKSFNLSGMGCSAGLISVDLARDLLQVHPNSNAIIVSTEIITPNYYQGNERAMLLPNCLFRMGAAAIHMSNRRSDRWRAKYKLSHLVRTHRGADDKSFYCVYEQEDKEGHVGINLSKDLMAIAGEALKANITTIGPLVLPASEQLLFLTSLIGRKIFNPKWKPYIPDFKLAFEHFCIHAGGRAVIDELQKNLQLSGEHVEASRMTLHRFGNTSSSSLWYELSYIESKGRMRRGDRVWQIAFGSGFKCNSAVWKCNRTIKTPKDGPWSDCIDRYPVFIPEVVKL

SEQ ID NO: 3730 - protein, 440 aa, Zea mays
MSTTKVKRRVGKYELGRTIGEGTFAKVRFARDTVTGEAVAIKILDKEKVLKHKMVEQIKREISTMKLIKHPNVVRIYEVMGSKTKIYIVLEFATGGELFDTIVNHGRMREDEARRYFQQLINAVDYCHSRGVYHRDLKPENLLLDSYGNLKVSDFGLSALSQQIKDDGLLHTTCGTPNYVAPEVLEDQGYDGAMADLWSCGVILFVLLAGYLPFEDSNLMTLYKKISNAEFTFPPWTSFPAKRLLTRILDPNPMTRITIPEILEDEWFKKGYKRPEFDEQYDTTLDDVDAVFNDSEEHHVTEKKEEEPVALNAFELISMSAGLNLGNLFDSEQEFKRETRFTSKCPPKEIVRKIEEAAKPLGFDVQKKNYKLRLEKVKAGRKGNLNVATEILQVAPSLHMVEVRKAKGDTLEFHKFYKNLSKTLKDVVWKSDDLQTQHAS

SEQ ID NO: 3731 - protein, 87 aa, Zea mays
AGSVWMSSEMKALNEDCVRFEIFPPGHLYSSAAGGFRRWYTPHWFQEQVPRTPYQPLVLREAFEKVTIKMAVTDTDLWPWAMGPCAA

SEQ ID NO: 3732 - protein, 185 aa, Guillardia theta
MSEKSNLAPFIKKLYQLVNDPMTNDYICWEKNETCFIVNKPTELSVYILPRYFKHNNFSSFVRQLNQYGFHKLEPNEWVFGHPYFKGGDKLKLSSIKRKKQWSSQKNVSVDFYNNEIFKKLIYELDTLKKYKQVLTKDILDVCRRQERFLIKQQSIETKIKKIEEELNNLKYLVFGYFGKILKSN

SEQ ID NO: 3733 - protein, 250 aa, Brassica napus
MNSVSTFSELLGSENESPVGGDYCPMLAASCPKKPAGRKKFRETRHPIYRGVRLRKSGKWVCEVREPNKKSRIWLGTFKTAEIAARAHDVAALALRGRGACLNFADSAWRLRIPETTCAKDIQKAAAEAALAFEAEKSDTTTNDHGMNMASQAEVNDTTDHGLDMEETMVEAVFTEEQRDGFYMAEETTVEGVVPEEQMSKGFYMDEEWMFGMPTLLADMAAGMLLPPPSVQWGHNDDFEGDVDMNLWNY

SEQ ID NO: 3734 - protein, 1367 aa, Magnaporthe grisea 70-15
MSTETSPRAVRFSQGEDERLMRPFVLGADSGNSHSSGELSSPDLHHMVETPDEMGSLTRYVDVTSHGGSHVSLATNGSARSHRNSGGESTAAGYTNGGATPRPAQRPMGPARTPSNTYQPPRKPTAQQTPSYLHTSTSDLRNGSRMRNGYGQQEKEYVRSLRAQHYGGDYFVSYSNGSQLGASSGDGYPDSDSEGETPSSEAPYDDAYDQNVIMIDSNEDTAPSEEELKDPASRERLEWHGMLEAVLTGDVVRQEKKRLIAGTGEDLGKLQRGAELWMGIRARVCGRHLSVQRRMVEETRATLARMIDEVIDFSVKGESTAGKSAAEQIAEVLEKIDKIEGQYPTRNALLAVHTSANTERFQEACDAVYTWTNINYLINTELTILRNWVGNHELDFTRAREKSPNGHHGLSDESSFMDRLMKEEGLKSLHDHEEDEGDRKSRRNGMLHRVGKTIEKAKEALVEQHQVFKKRQMSLDMDELLMLLGFPARLIEEIIKVRLAYTKRMKESAQQNPMMQDNMIAQFQTLLKLAIRIKQEAAKLSEPQPGWELPPCIDESFDQVVLDALKYYFKMLNWKLGGNKNTFKEAELLFQEWGFANEIASHLYRGDIEVAEQFSSLTYKTLNRLAITFEKELQRRPKETPSEMSKRYKQVLESVRVRQRMLQRFSRMLNDNYENASDFSINFRPDKMQEFFLRLQETGHFQVYTGSLEHEGLLVIASPSLANRESEIQSLIGTTAYDEIVQDATNPYILIMRPEGQLGWWGPKIQLSVREEPVELKMGHLRLIAGGSQTRLSNAKQNFLATIEMHLDLLIEQRSNLPKVNARLMEIRKVQYKLSNTFMDSVEIIRNNTKGLGLQDLIQTCFIFATEFGQRSLLYLDSNRRQMNNIKLTKLALDWVGFVCDDCQSSDRKAFKWAVLALEFAMVMTRGRHILALGEAEFVKLRLKVAGCMSLLISHFDIMGARSTVAAQAEKLKLEAMVGQMRRMDHNMMDDQEAIRYVRNHRLSGLNLIDEARKEIALERSALGRVLEVSNEVDRSLAYLSSTATNFTMRWQQGHFVGGGTFGNVYAAMNLDTGHLMAVKEIRLQDPKLIPSITGAIKDEMRVLESVDHPNVVSYYGIEVHRDRVYIFMEFCSGGSLASLLEHGRIEDESVIMVYALQLLEGLAYLHEIKIAHRDIKPENILLDHNGIIKYVDFGAAKVIARQGRTLANQDLMSAATKPNKSMTGTPMYMSPEVIKGENPGHFGAVDVWSLGCVILEMATGRRPWANLDNEWAIMYNIAQGNPPQLPTPDQLSPEGIDFLKCCFARDSTKRATALELLHHKWIMTIRDRIVPQQPPTPSDTSSSSAQNTPNPASSSKGGGASSDGYY

SEQ ID NO: 3735 - protein, 1029 aa, ASPERGILLUS NIDULANS FGSC A4
MTGSECQPRHSASSGTGRDIHTLSWDGDHDPANPFNWSISRKWAVTYLAALISFLTMMNGTIITVAHFEIAELFNIDETAFPHTYWPVTTWAVGGAFSALFLLPLAEDFGTRPVFLVTYFAFVCFLIPQAVAQNFATLVATRFFAGACVAILANTAAGVIGNVWDTEWSRSIPVSLYIFGYMAGSSMGPVIGAAVLQSLSWRWIGYMQLIWFGALFPIYYFFFYESRGDIILAQRDRKMGKNGKDILPGHPAHSKLNLQNLAVSSTRPVILFCTEPVLFVSTLWSAFTVGTIFLFTQSVEQVFIGTYDWTISKTGYVQAAVVIGEGIGFFFSFLSRELYFASASRNTEVPNSLIPEARLYMAVLGGLFGISGGMFTYAWTSYPFIPWIAPAISLAMVGAGSVLVVTGVSDYVVDAYSQYAGSAIGAVATGENIFSAFLPLATMSMYNNLGFQWASTLLAFVSLVLALVPTLMFVWGRELDNYALPTIATYAYSPANHYCTTQQAFQCHCSNFPSLHSCPTTTRHRPTNHLLKMPSLANTLKDPTLFIESSYIDGKWVTSSSSRTFNVYDPATEEFIGTCPESNIDDINSAIRAAATAFPKWRALSGRQRGRILRRWFDLIVENKEDIGKIITAENGKAKGDAEGEALFSAGFFEWFSEEAARIYGDVVPHSNPSSRVQVLKEPVGVCGLITPWNFPMAMGARKVAAALAAGCTVVLKSDGLTPYSSNVLALLAERAGVPGGVFNVVTALENTPALGLALCESDNVKKISFTGSTRVGKLLMKQSSHTLKKLSLELGGNAPFIVFDDADLETAVTSAVACKFKVTGQTCVCANRFYVQEGIYEAFSKRFVEEVKKCQVGHGLDPGVTHGPLTNGIAKTQEHIQDALNKGATVLLGGSRLPSLGKNFHELTILGDVDDSMKVASEETFGPLAALSKFKAEDEVVRRANGVEVGLASYLITSDLGKAHRVSEKLEFGMVAINTGVISDSAAPFGGVKHSGMGREGSKYGIDDYLNIKTIVTGGIHTAYSAHL

SEQ ID NO: 3736 - protein, 331 aa, Arabidopsis thaliana
MFTCINCTKMADRGEEDEEDEARGSTTPNTKEAVKSLTTQIKDMASKFSGSHKQSKPTPGSSSSNLRKFPDFDTASESVPYPYPGGSTSSTPAWDLPRSSYHQSGRPDSRFTSMYGGERESISAQSCDVVLEDDEPKEWMAQVEPGVHITFVSLPSGGNDLKRIRFSREVFDKWQAQRWWGENYDRIVELYNVQRFNRQALQTPGRSEDQSQRDSTYTRIDSARESRDWTQRDNNFRSPGGSVPHHFYGPPMDAARITTSSRDEPPSMSNASEMQGEWVEEDEPGVYITIRQLPDGTRELRRVRFSRERFGEVHAKTWWDQNRDRIQTQYL

SEQ ID NO: 3737 - protein, 320 aa, Bordetella bronchiseptica RB50
MAYDPGIQAYVERARRALGDMAGLKALSLAQRRVRADRYAALVREPYPESLEVSDTYIVQPGHEIPVRVYRPRAEGPLPTIVYLHGGSFVAGSPQGHDFITTSLACNTGAQVLSVHYRRAPENPYPAPTDDAYAALCWAQREAELLGVDPERIAVAGDSAGGNLAAACALMARDRGGPALRMQALIYPTLDADLDTPSYLNNTADAFLTREAMAFAVNAFLPQGLDTRDGYALPLRAADHAGLPPAYLLLADHDPLLDDGTRYAARLREAGNAVQLRIGAGMIHGFLRARRLSATADAEFHLLCAALRQALGLPEPAARW

SEQ ID NO: 3738 - protein, 549 aa, Triticum aestivum
QKGKINSNVLREAKAVPNQTSKQPLPSLLLLCSSSLQSTYFAPTDPMDRADPARGRLAVLSSHLLAAGAEPAAALERSPASAAAPGTRAGVLAVVDSRTGKRYEVKVSEDGTVRATDFKKITAGKDDKGLKTYDPGYLNTAPVRSSICYIDGDEGILRYRGYPIEEVAESSSFVEVAYLLMYGNLPSQSQLAAWEFAISQHSAVPQGLLDIIQSMPHDAHPMGVLASAMSTLSVFHPDANPALRGQDLYKSKQVRDKQIVRVLGKAPAIAAAAYLRLAGRPAVLPSNNLSYSENFLYMLDSLGDKEYKPNPRLARVLDILFILHAEHEMNCSTAAVRHLASSGVDVFTALSGAVGALYGPLHGGANEAVLKMLNEIGAVENIPDFIEGVKNRKRKMSGFGHRVYKNYDPRAKVIRKLAEEVFSIVGRDPLIEVAVALEKAALSDEYFIKRKLYPNVDFYSGLIYRAMGFPTEFFPVLFAIPRMAGWLAHWKESLDDPDNKIMRPQQVYTGVWLRHYTPVRERVASNQGEELGQIATSNATRRRRAGSSL

SEQ ID NO: 3739 - protein, 432 aa, Burkholderia cepacia R1808
MPVAVAGDGIEIIDSTGKRYIDACGGAAVSCLGHSNQRVIDAIKRQVQQLPYAHTSFFTTDVAEELADRLVEAAPAGLEHVYFVSGGSEAIEAALKLARQYFVEKGEPQRRHFIARRQSYHGNTLGALAIGGNAWRREPFLPLLIEAHHVSPCYAYRDQAAGETDEAYAQRLADELEQKIVALGAENVAAFVAETVVGATAGAVPPVRTYLKKIRAVCDKYGVLLILDEIMSGMGRTGYLFACDEDDVAPDLLTIAKGLGAGYQPIGATLVSDRIYRTIVDGSGFFQHGHTYLGHATACAAALEVQRVIADEKLLDSVKARGEQLRASLREHYAAHPHVGDVRGRGLFVGVELVRDRDSKAPFDPKLKLHAAVKREAMQRGLMVYPMGGTIDGVHGDHILVAPPFICTAQQIDTIVERLSGAIGAALASAGA

SEQ ID NO: 3740 - protein, 261 aa, Maackia amurensis
MASSKERETFVYVAKLAEQAERYEEMVDSMKNVATLDVELTVEERNLLSVGYKNVIGARRASWRILSSIEQKEEAKGNEVNAKRIKEYRQKVESELTNICNDVMRVIDEHLIPSASAGESTVFYYKMKGDYYRYLAEFKTGNEKKEAGDQSMKAYESATAAAEAELPPTHPIRLGLALNFSVFYYEILNSPERACHLAKQAFDEAISELDTLNEESYKDSTLIMQLLRDNLTLWTSDIPEDGEDAQKANGTAKLGGGEDAE

SEQ ID NO: 3741 - protein, 475 aa, Thermus thermophilus HB27
MEVKEAPTEALIGGAWRRLERRFPVVSPATGERVAEVADCGEEEAREALEEAVLAFPAWSRATAYERAQVLRRWYERILEHQEPLARLMALEMGKPLKEGRAEVAYAAGFVEWYAEEAKRVYGETVPSQFPHKRILVRYEPVGPVYGITPWNFPAAMVTRKVAPALAAGCTFVLKPAEESPLTALYLAKLFLEAGGPPGVFQVLPTSRPAEVSRPFLEDERVRKLTFTGSTEVGVRLYGEAAKTLKRVSLELGGGAPVLVFADADLDRAVEETLRAKFRNAGESCVAANRIFVQAEVAEAFAEAYARRVQALKVGDPLSEETDVGPLVNEAALRKVRTHVEDALAKGARLVAGGEAKGLFFAPTVLLDVKPESLLFREETFGPVAPLTVFREEEEAVRWANGFPVGLAAYVFTRDLSRAFRVAEALEYGIVGVNDGVPSTPQAPFGGVKRSGLGREGGKWGLLEYLEVKYVSLGL

SEQ ID NO: 3742 - protein, 250 aa, Zea mays
MAKNYPTVSAEYSEAVEKARRKLRALIAEKSCAPLMLRLAWHSAGTFDVSSRTGGPFGTMKCPAELAHGANAGLDIAVRLLEPIKEEFPTLSYADFYQLAGVVAVEVTGGPEIPFHPGREDKPQPPPEGRLPDATKGSDHLRQVFGKQMGLSDQDIVALSGGHTLGRCHKERSGFEGAWTTNPLVFDNSYFKELLSGDKEGLLQLPSDKALLSDPVFRPLVEKYAADEKAFFDDYKEAHLKLSELGYADA

SEQ ID NO: 3743 - protein, 155 aa, Arabidopsis thaliana
MSCSATDLAVLLGPNATAAANYICGQLGDVNNKFIDTAFAIDNTYLLFSAYLVFSMQLGFAMLCAGSVRAKNTMNIMLTNVLDAAAGGLFYYLFGYAFAFGSPSNGFIGKHYFGLKDIPTASADTPTFSTNGPLQSLRLESQVARSLNGHSSWLT

SEQ ID NO: 3744 - protein, 439 aa, Arabidopsis thaliana
MDRISHLADEILSKILSFLGTKDVMQTMLLSKRFKSQWLLVPKLEFDDSTHLPETWGYQEPDYGNFRRFVDRSLLSREGRVLQTLFLKLGRQCSYDDIAIWVGIAVKRGLMELKLKYTDSYYPKRSSLPRSLYTCETLVVLKLKKGYLDVPDLVCLRSLKTLSLRDMNYSNASCLLRLLASCPVLEELFIQQGYYDSCALSFKIILPCLKKLSYLPKRKKKYSGIDRSEVSGGISGLVLDAPSLKYLHIVDRSGLFSVSEIININAVVKATLEVNASRPEKLLYSLVSVEHIRLCLSATEVVYPVGLGSSFHKLKRLEVCTCKSEWLDLFIHLLEDSPSLQDIKINQCHPVTNPRPQWNQPGSVPRCLSSSLETLEWVEYGGTHEEKELSTYLFKTAVCFKKASFTAKWSGGDANKKLQMLQELALSPRVSPTCELVFN

SEQ ID NO: 3745 - protein, 506 aa, Pseudomonas aeruginosa PAO1
MRYAHPGSEGAIVSFKARYGNYIGGEFVPPVKGQYFTNTSPVNGQPIAEFPRSTAEDIDKALDAAHAAADAWGRTSVQERSNILLKIADRIEQNLELLAVTETWDNGKAVRETLNADIPLAADHFRYFAGCIRAQEGSAAEINDSTVAYHIHEPLGVVGQIIPWNFPLLMAAWKLAPALAAGNCVVLKPAEQTPLGICVLLELIGDLLPPGVLNVVQGFGREAGEALATSKRIAKIAFTGSTPVGSHILKCAAENIIPSTVELGGKSPNIYFEDIMQAEPAFIEKAAEGLVLAFFNQGEVCTCPSRALVQESIYPAFMEEVLKKVRAIKRGDPLDTETMVGAQASQQQYEKILSYLDIAQQEGAELLAGGSVEKLEGNLASGYYIQPTLLKGHNGMRVFQEEIFGPVVGVTTFKDEAEALAIANDTEYGLGAGLWTRDINRAYRMGRGIKAGRVWTNCYHLYPAHAAFGGYKKSGVGRETHKMMLDHYQQTKNLLVSYDINPLGFF

SEQ ID NO: 3746 - protein, 253 aa, Anabaena variabilis ATCC 29413
MTSEPILSPETAIAALSDEDNQIRYYAAWWLGKHNVQAGCTALCAALFDERYRIPLGGYPLRRQAARALGMLKNPQAVPALIAALKCDEDLRLREAVICSLAAIGDKRAVIPLLNLLQSTQAQPYEALIEALATLQVWSARPQIEPFLKHYSERVQCAAARYLYLLTQESEYIERIVKNLNHDNMYLRWAAVFDLGAVAHQQAVQAILAAQVPNSLKLLNLKRILEAMLNNNSVNQEKASVLFGAIDDLLIQL

SEQ ID NO: 3747 - protein, 422 aa, Arabidopsis thaliana
MDKLSQLPEALLVRILSLLSAKDVVSTMVLSKRWQFLWMLVPKLIYDDSYQAIEYGSFSRFVDRSFTLHDAQVLDTLHFKLGKTSCGTGDIRVWIKTAEKSCLRELIIEIDKSNSDNSSVVLPRSLYTCCRMLVTLKLNNAVLVDATSSFSFPSLKTLSLVSMKFPGDELIKMLLSNCPVLEDLVVKRCPYDNVTTFTVRVSSLKCLVLHETELASINADCGFVIDTPSLECLDIEDGRGGFCVIENNMTKVVKANVCNSYVHTQQLMGSISSVKRLYVCIPSSKDAYPVGSVFHCLVRLTICTCETEWLNLLMCVLRDSPKLRELKLVKNHVYRSHQPRPCWNEPSAVPECLLTSLETLEWVKYEGTEEEKEVAAFILRSGSCLKKVTISSKSTDINKKFEMLKELSLLFRRSPTCQIAFD

SEQ ID NO: 3748 - protein, 482 aa, Geobacillus stearothermophilus
MIYVNGKWSKGEGKKRPVINPANEEIIIEINEASQQQAVEAIQAARHAFQYTDWPFNPAKRIAALRQLADLLEQNAETFASIETLNTGKPIRESRLDVSDSIQCLRYYADFVEQRAIEEIKRTDGTTSKIIEEPIGVCALIVPWNFPLLLGIWKLAPALAAGNTVVFKPSELTPLSFIELTKLIDSIGLPPGVFNLVPGGGSPVGETLVTHPDVEKISFTGGTKTGRWIYEQGARRLKRVSLELGGKSPLLIFDDADLASTIEWALFASFFNQGEVCVAASRILVQRRVYDSFLDQLTQRLASLRIGDPFAEHTEMGPLISSSHLEKVETYIQIGLQEGGVLLQGGKRMKELGYYLTPAVFAHVRQDMRIVQEEIFGPVITVQPFEHDEEAIKLANDTIYGLAAGLFSRDLERAEQIAGKLRAGTIWINSYHTPYVDAPWGGLKQSGIGRELGPQGFAAFTETKHVNISQHGKPLGWYSSHS

SEQ ID NO: 3749 - protein, 343 aa, Vibrio vulnificus YJ016
MKIKALSKLKPEEGIWMTEVDKPVLGHNDLLIKIKKTAICGTDVHIYNWDEWSQKTIPVPMVVGHEYVGEVVGIGQEVRGFEIGDRVSGEGHITCGHCRNCRGGRTHLCRNTIGVGVNRTGCFSEYLVIPAFNAFKIPANISDDLASIFDPFGNAVHTALSFDLVGEDVLITGAGPIGIMAAAVAKHVGARHVVITDVNEYRLDLARKMGVTRAVNVAEQKLDDVMVELGMTEGFDVGLEMSGNPSAFNSMLKTMNHGGRIALLGIPPSDMGIDWNQVIFKGLVIKGIYGREMFETWYKMASLIQSGLDLTPIITHHFKVDDFQQGFDIMRSGMSGKVILDWE

SEQ ID NO: 3750 - protein, 431 aa, Mycobacterium leprae TN
MADTDDTVTLKYPGGEIDLQIVRATEGNDGIAIVPVLAKTGYTTFDVGYGNTASTKSSITYIDGDAGILRYRGYPIEQLAEKSTFIEVCYLLIYGELPATDQLAEFTHRIQRHTMLHEDLKRFYDGFPRNAHPMPVLSSVVNALSAYYQDALDPMDNGQVELSTIRLLAKLPTIAAYAYKKSVGQPFLYPDNAFSLVENFLRMTFGLPAEPYEPDPEVVRALDMLFILHADHEQNCSTSTVRLVGSSRANLFTSISGGINALWGPLHGGANQAVLEMLEGIRESGDDVGGFVQKVKNCQAGVKLMGFGHRVYKNYDPRARIVKEQADKILVKLGGDDDLLNIAKGLEEAALTDDYFIERKLYPNVDFYTGLIYRALGFPTRMFTVLFALGRLPGWIAHWREMHDEGDSKIGRPRQIYTGYTERDYTAIETR

SEQ ID NO: 3751 - protein, 264 aa, Triticum aestivum
  unsure (1)..(264): unsure at all Xaa locations
MSASPSMSGGAGERTRTVVWFRRDLRVEDNPALAAAARTAGEVVPAYVWAPEEDGPYYPGRVSRWWLSQSLKHLDASLRRLGATRLVTRRSTDTVAALLELVRSTGATHLFFNHLYDPLSLVRDHRVKQVLGAEGITVQSFNSDLLYEPWEVPRRHGWPFTMFTPFWNTXLCMVDPPAPHAAPKRIXSXXMSRCCSSDELIFEDESERGSNALLAPALSRGGXNATKVLRALFKGPFIDXPGPGRRAEGKKPKGLPPYLHLGEA

SEQ ID NO: 3752 - protein, 510 aa, Nicotiana tabacum
MALLDLQPSTSLLFCLVPLLFLFFIKFNKTITNTLLSSNSSKIPRSYPLIGSYFSILANHDQRIKWISDIILSTPNLTFTLIRPLNFHTIFTANPSNVQHMLKTNFQVYQKGHNSNTTLKDFLSNGIFNVDGDIWKYQRQVASHEFNTRSLRKFVETVVDTELSERLIPILATAAANKTVLDFQDILQRFAFDNICKIAFGYDPGYLLPSLPEAEFAVAFEDAVRLSTERFILPFPLIWKMKRALNIGSEKKLRFAVEQVREFAKEIVREKQRELKDKSSLDSADLLSRFLSTGHSDENFVTDIVISFILAGRDTTSAALTWFFWLISKHPEVESQILKEIGEKSESLLLYDEVKNMIYTHASLCESMRFYPPVPMDTKEATKDDILPDGTFVKKGNRVTYHPYAMGRVEKVWGKDWAEFRPERWLDKDEVTGNWTFVSKDAYTYPVFQAGPRVCLGKEMAFLQMKRVVAGVLRRFKVVPVVEQGAEPVFISYLTAKMKEVFPVTIEERI

SEQ ID NO: 3753 - protein, 512 aa, Vicia sativa
MELETLVAWLLFSATLLWLLLLATKTQSKSLKSPSSTTNSTIPKSYPIFGSIFSIAANFHRRVQWISDILQTTPSSTFILHRAFGSRQVFTANPLVVQHILKTNFPCYPKGLTLNRSLGDFLGNGIFNADGETWKLQRQISSHEFNAKSLRKFVETVVDVELSGRLLPILSEASKTEKILPDFQDILQRFTFDNICIIAFGFDPEYLLPSLPETAFAKAFDYGTRISSLRFNAAVPLIWKVKKILNIGTEQRLKEAVAEVRGLASRIVREKKQELLEKSALESLDILSRFLSSGHSDESFVIDIVISFILAGRDTTSAALTWFFWLLSKHSHVETEILKEVTAKSESVSYDEVKDMVYTHAALCESMRLYPPVPVDTKEVAYDDVLPDGTFVKKGWRVAYHIYAMGRSEKIWGSDWAEFRPERWLRRDEDGMWSFVGMDPYAYPVFQAGPRVCLGKEMAFLQMKRVAAGVLREFRVVPAMENGIEPEYTAHLTALMKGGFPVRIEKRSHTDE

SEQ ID NO: 3754 - protein, 78 aa, Zea mays
MVTELAWTHRHQSSRGEGEREMKEGTANCIDILIAIILPPLGVFLKFGCKVEFWLCLLLTFLAYLPGIIYAIYVITKD

SEQ ID NO: 3755 - protein, 91 aa, Brassica napus
MGSTPAEVPCDVVSDNRSGLGGGISDVYGEDLATLDQLVTPWVSSVASGYSLMRDPRYNKGLAFTDKERDAHYLTGLLPPVVLSQEVQERK

SEQ ID NO: 3756 - protein, 141 aa, Zea mays
  unsure (1)..(141): unsure at all Xaa locations
MASSMLSSAAVVTSPAQATMVAPFTGLKSSSAFPVTRKANNDITSIVSNGGRVSCMKVWPPVGKKKFETLSYLPDLTEVELGKEVDYLLRNKWIPCVEFELEHGFVYREHGTTPGYYDGXRYGTMWKLPLXFGGTDSASRV

SEQ ID NO: 3757 - protein, 159 aa, Zea mays
PVACAETGVTLISPFVGRILDWYKKSTGKEYTAETDPGVKSVQRIFNYYKQHGYNTIVMGASFRNTGEITELAGCDYLTIAPKLLEELKNSDAKVPKKLDAAPADQAKEEKVSFVDNEAAFRWELFNDPMAFDKLHEGIRGFAKDGDACKEMLREKLRA

SEQ ID NO: 3758 - protein, 122 aa, Calycanthus floridus var. glaucus
MIQPQTHLNVADNSGARELMCIRIIGASNRRYAHIGDVIVAVIKEAVPNMPLERSEVIRAVIVRTCKELKRDNGMIIRYDDNAAVVIDQEGNPKGTRVFGAIARELRKLNFTKIVSLAPEVL

SEQ ID NO: 3759 - protein, 484 aa, Xanthomonas campestris pv. campestris str. ATCC 33913
MLRGLTCRCRVCMSYAIVWFRRDLRLEDNPALRAALDAGHDPIPLYIDAPHEEGQWAPGAASRAWRHRSLAALDASLRARGSALLIRQGDSAQVLDAVIAQTEAVAVYWNRKYEPATQPRDAQIKRSLRERGLEVQSCNAALLFEPWTLATQQGRPYKVFTPFWRNALTQLRLPDAMPAPRSLPPLPASLDGVHVDALNLLPTPAWDQGFWEHWQPGEAGAHEMLEIFVDGALSGYRENRDRPDRVGTSQLSPHLHFGEIAPWRIASTLEAQRSARNGADIDGYIRQLGWRDFAYHLLHHFPDTTTQNLNPRFAGFDWATVDPVTLDAWQRGRTGIPIVDAGLRQLWHTGWMHNRVRMIVASLLCKHLRVHWLEGARWFWDTLVDADLANNTMGWQWVAGTGADAAPYFRVFNPVTQAEKFDPQATYITRWIPELAALPVKERFAPWLHPLSLARLAPTYPRAPIIGLAEGRDAALAAYAGTRG

SEQ ID NO: 3760 - protein, 498 aa, Burkholderia cepacia R18194
MLSLVSHLDHLNVRPGRLFIDGQWLDWPDARFDQLNPCTNEVMTSFADAGAQGVELAVAAARKAFDEGPWPRMRAQDRKRLLQPIVERLYAAEEEIARLQTLDNGIPYAFSRHSRVSAKSAADVFDHFLGWIDKINGDTLPIFSGASNMQYMTFRDPVGVVAAVLPYNGPVLTFAMKVAPALACGCTVIVKSSELTNLAVARLAQIIADSDLPPGVFNFVTGGVETGSALTSHAGVDKVTFTGSPAVGEKIMIASAPTMKRLSLELGGKSAALVFPDTRSVQTTAHALMGLCSTFLSGQVCSTPSRAVVHRSIMDEFLHHAQEQLQKVRFGDPFDAATTSAPMISRRHQARVLDYVESGRQQGATLLAGGRAPGGEFRNGNWVEPALFANVSNDMTIAQEEIFGPVLSVIPFDTEEEAIRIANDSAYGLAGCVYTTDVSRAFRVARAVKSGAIGVNGFASIPNAPFGGIKRSGTGREGGWSTIEAFTELKTVNFNLDA

SEQ ID NO: 3761 - protein, 316 aa, Methylobacillus flagellatus KT
MANLFDQLKEFTTIVADTGDVEAIKSVKPYDATTNPSLLLKASTIPQYAPLIDEAIAYAKSQSGDKAQQIEDAADKLAVLIGLEILKHIPGKISTEVDARLSFDTEAMVQKGRKLIKLYEDAGIAKDRVLIKLASTWEGIKAGEILEKEGINCNLTLLFSFAQARACAEAGVFLISPFVGRILDWYKAKTGETYTAETDPGVQSVRKIYAYYKEHGYKTVVMGASFRNTGEIIALAGCDRLTVSPNLLEELKATEGKLERVLVDNGVTKQRPPLLTEKEFRFDLNEDAMATEKLAEGIRGFVVDQNKLEKALAEKL

SEQ ID NO: 3762 - protein, 383 aa, Pyrobaculum aerophilum str. IM2
MLKECIKIEGRAFLGGKVTRVKLGSGECKTLQLSNKYLILPGMVDIHVHFRDWGLSHKETLRGGAAAALAGGVVAVGDMPNTKPHIRTADLYKKRLEEGSALPIIYKVHMGIPQDLEELRAARPPTIKIYPEDVEAFGWGHIEKAAEACASLGCRLVLHCEDPAYFKEGERPPIAELACVERTRQMAFKTGVKIHLTHITLSQTAEAARGWATVDATPHHLLLDVENCKDSGLCHVNPRLRTPEMRKRLLAAFASGLVDIYATDHAPHTLEEKRSGAPPPGICSLDVALSLLLTLWKRGVVTLSDVVRLYSHRPARFFDLQIDVKKGYFTVVRLEEFTVRGEEFAGTCKHTPFEGFKAFGRVFATSVGGRIYFKDGDVYMINI

SEQ ID NO: 3763 - protein, 344 aa, Bacillus sp. KSM-K16
MKAVFVDDAEKINIKEIDIPVVKDNDVLIKVAVAGICGSDIHTYKGLHPFRKPPVVIGHEVAGEVVSVGQAVKRVQVGDRVTVEPQIGTGESEGVMTGQANLSDKRLAPGMGDWLGTMAEYFVSPEAQVIKLPDAVSYEKGVLVEPLAVGVHAARKGGIQPGDRVAILGAGPIGLLTLMAVKAKGASHVVVTDVLDYSLDVAKQMGATAAINIKGKPDWIEEAKSKVGRSFDKVLITAGVPGIINDSLNLLKKGGRAVTVAMFHGQQDFDVEQLQQNEKEIVGCMTYNRPDTEEALDIIAKGALPVEKVISHQLSYEQADKGFEMVDKKQDNSVKVIVSFEQEG

SEQ ID NO: 3764 - protein, 296 aa, Pseudomonas putida
MAGKSPLINLNNGVKMPALGLGVFAASAEETASAIASAISSGYRLIDTARSYNNEAQVGEGIRNSGVDRAEMFVTTKLFNCDYGYERALRAFDESLGRLGLDYVDLYLLHWPTKDWNATIQSWKAAEKILGDGRARAIGVCNFLEDQLDELIAASDVVPAVNQIELHPYFAQKPLLAKNRALGIVTEAWSPIGGAINDGDGDNHGGRKHPLTDPVITTIAEAHGRSAAQVILRWHFQNDVVAIPKSVNPERIAKNIDVFDFALSDAEMAQLDELDTGVRIGPDPRDVDTSSFAEFV

SEQ ID NO: 3765 - protein, 447 aa, Magnaporthe grisea 70-15
MSAVRDKQQPDAAPAAAAAGNKPAPSITPEQVAVVKSTAPVLKEHGVTITTVFYKNMIDAHPELHNVFSTTSQATGAQPRALASAVLAYATHIDDLARLSHAVSRIAHKHVSLHITPDQYDIVGKYLIEAIGQVLGDAATPEIVAAWIAAYGVLADVFIGVEGKMYQEHSDWLGFRKFRVLRKEAEAESITSFYLAPSDGKTPLPRFLPGQYVSVQLFVPELGYLQSRQYSLSEGYRKGGEHYRISVKREEGVEVGAPGIISNMLHDKISVGDEVEVSHPQGEFFVDPADATKAGAPLVLLSAGVGATPLLSILESVTVADGGVPAPAATRPVSWIHASRSRAQRPFETRVAEIQKTVGEERLRSRLFLGKIDAEKDVANQHFHFGGGRMDLDKLDADRDLHTSDARAEYYLCGPEAWMLDTREKLEQMGVAHERIHLELFATGDVQ

SEQ ID NO: 3766 - protein, 431 aa, Xanthomonas axonopodis pv. citri str. 306
MSTTLQSAEQLQQDWSNNPRWAGIARNYSAADVARLRGTVHVEHSLARLGAEKLWNSLHATPFVNALGALTGNQAMQQIKAGLKAIYLSGWQVAADANLAGQMYPDQSLYPADSVPAVVKRINNTLLRADQLHHAEGNDAIDFLQPIVADAEAGFGGVLNAFELMKAMIEAGAAGVHFEDQLASVKKCGHMGGKVLVPTREAIEKLNAARLAADVLGVPTVLIARTDAEAADLITSDVDANDQPFTTGERTVEGFFKTRNGLDQAISRGLAYAPYADLIWCETGKPDLEFARAFAQAIHARFPGKLLAYNCSPSFNWKKNLDDATIAKFQTELASYGYKFQFITLAGFHALNHSMFHLAHGYARRQMSAFVELQQAEFEAAEMGFTAVKHQREVGTGYFDAVTQAIQQGQSSTTALRGSTEEEQFQSDKAA

SEQ ID NO: 3767 - protein, 127 aa, Oryza sativa (japonica cultivar-group)
MDATTTAKRKRPAASDIADDAPTTVDEVSDAEVEEFYAILRRMRDATRRLGARPPPPRAPAWRPSFSWEDFADAPPKQAPPPPQQPADHERVAENATPPRRPAPGLDLNVEPPSDAPATPRSARAPA

SEQ ID NO: 3768 - protein, 235 aa, Glycine max
MSLFAAFSICKVAKDAAGVAGNVFAFGLFVSPIPTFRRIIRNGSTEMFSGLPYIYSLLNCLICMWYGTPLISADNLLVTTVNSIGAVFQFVYTIIFLMYAEKAKKVRMVGLLLAVLGMFAIVLVGSLQIDDVIMRRFFVGFLSCASLISMFASPLFIIKLVIQTKSVEFMPFYLSLSTFLMSTSFLLYGLFNDDAFIYVPNGIGTILGMIQLILYFYFESKSRVSSREPLIVSYA

SEQ ID NO: 3769 - protein, 371 aa, Bacillus cereus G9241
MTVIRGLEGVVATTSSVSSIIDDTLTYVGYNIDDLAENATFEEVVYLLWHRKLPNEQELAEFNEIVSEYYKVPGEILAYLKQVDLKIAHPMSVLRTAISMLSLYDESAEIMDEKSNYLKAVKLQAQVGTLVAAYARIRKGLDVVEPRNDLSLAANFLYMLNDREPNEVEIEAFDKALVLHADHELNASTFTARVCVATLSDVYSGITAAIGALKGPLHGGANENVMKMLTEIGEEENVESYIHNALQNKVKIMGFGHRVYEQGDPRAKHLREMSKRLCVLLGEEKWYNMSIKIEDIVTKEKGLPPNVDFYSASVYHCLGIDHDLFTPIFAISRMSGWLAHILEQYENNRLIRPRADYNGPTHQVYVPIAQR

SEQ ID NO: 3770 - protein, 267 aa, Glycine max
GSSSSRIGLSGSSGSSGSRAFRGDYETCLVYTEEMKERCVEQFKQGTVCMEQLAAVEGLCELVRKAVGAAESVRRYHVNLSIFTSVPDAWGIDQVFPIIPIHRLEEKPSVRGILSDLTCDSDGKIDKFINGESSLALHEMEGGSYYLGMFLGGAYEEALGGVHNLFGGPRVIRVSQSDGPHSFAVTRAVPGPSCGDVLRVMQHQPELMFETLKHRAQEYVSHDNAAAVLAAGLARTFDRMPYLLPLSSFVADDVACAAAVPAGEDDE

SEQ ID NO: 3771 - protein, 213 aa, Oryza sativa
MAEGAELVGESAHQDMPRVVAALAGILERVAGRNDAAATPAELAAAPASPFRATAKPGISVRAYAARIARFAGCSPACYVVAYIYLDRLLRRGRRCLALALAVDSYSVHRLLITAVLSAVKFMDDICYNNAYFAKVGGISLAEMNYLEVDFLFGVGFDLNVTPETFADYCAVLQSEMLCAAAPPTRLHYCCLSEDDAGSSSSSSLREAAMEAS

SEQ ID NO: 3772 - protein, 116 aa, Glycine max
  unsure (1)..(116): unsure at all Xaa locations
MAGEDYTFKXAMIVDARARNISHNVTCTESGSQSIEDSQAYIAILLRKLILDEIQSGKTDKDIYNKLADXFTETVLYTPNFDMQTTPIWLLPLLIASSAARVWAYNMHKQKTNVHI

SEQ ID NO: 3773 - protein, 511 aa, Nicotiana tabacum
MMIDLELSTSLLFCLIPFLFLLFIKTTLANLFSSNKSTSKIPKSYPIIGSCFSILANKERRIQWTSDIMQNTSNLTFTLNRPFGFRQIFTANPANVQHMLKTQFHIYQKGDVFKTTMADFLGDGIFNVDGDIWKYQRQVSSHEFNTKSLRKFVETVVDTELNERLIPILATAAVEKTVLDFQDILQRFAFDNICKIAFGYDPAYLLPSLPQAKFAVAFEEAVKLSSERFNAIFPFVWKIKRNFNIGSEKKIRVAVNEVRQFAKELVKEKQKELKEKSSLDSVDLLSRFLSSGHSDEDFVTDIVISFILAGRDTTSAALTWFFWLIFEHPETENQILKEAKAKSESPVYDEVKDMIYTHASLCESMRFYPPIPIDTKAATEDNILPDGTFVKKGTRVSYHIYAMGRVENLWGKDWAEFRPERWLDKDEASGNWTFVARDTYTYPVFQAGPRICLGKEMAFLQMKRVVAGVLRRFKVVPLAEKGVEPVFLSYLTAKMKGGFPVTIEERNGTDI

SEQ ID NO: 3774 - protein, 121 aa, Leuconostoc mesenteroides subsp. mesenteroides ATCC 8293
MAFDKDAIIASLKDATILDLADLVSAIEEEFNVSAAAPVAAAGAADGAAAAKSEFDVELTSAGTAKVKVIKAVREATGLGLKEAKDLVDNAPSVVKEGLSEDDANALKESLEATGASVTVK

SEQ ID NO: 3775 - protein, 180 aa, Zea mays
MADAPASPGGGGGSHESGSPRGGGGGGGGSVREQDRFLPIANISRIMKKAIPANGKIAKDAKETVQECVSEFISFITSEASDKCQREKRKTINGDDLLWAMATLGFEDYIEPLKVYLQKYREMEGDSKLTAKSSDGSIKKDALGHVGASSSAAQGMGQQGAYNQGMGYMQPQYHNGDIKK

SEQ ID NO: 3776 - protein, 511 aa, Nicotiana tabacum
MALLDLQLSTSLLFCLVPLLFLFFVKFKKTITNTLLSSNNSSKIPRSYPLIGSYFSILANHDRRIKWISDIILTTPNLTFTLIRPLNFRTIFTANPSNVQHVLKTNFQVYQKGHGSYSTLKDFLSNGIFNVDGDIWKYQRQVASHEFNTRSLRKFVETVVDTELSERLIPILATAAANKTVLDFQDILQRFAFDNICKIAFGYDPGYLLPSLPEAEFAVAFEDAVRLSTERFIVPFSLIWKIKRALNIGSEKKLRVAVEQVREFAKEIVREKQKELNDKSSLDSADLLSRFLSTGHSDEDFVTDIVISFILAGRDTTSAALTWFFWLISKHPEVESQIMKEVGEKSESLLLYDEVKNMMYTHASLCESMRFYPPVPMDSKEATKDDILPDGTFVKKGTRVTYHPYAMGRVEKVWGEDWAEFKPERWLDKDEVTGNWTFVPKDAYTYPVFQAGPRICLGKEMAFLQMKRVVAGVLRRFKVVPVVEQGVEPVFISYLTAKMKGGFPVTIEERI

SEQ ID NO: 3777 - protein, 498 aa, Anabaena variabilis ATCC 29413
MAINTGKNKLMNRHIQPWQRLLVLAIGSMVFAVFAPTIVQAANTPTLESLSETTIKLQISIDTTWVLLSGFLVFFMQTGFAMLEAGLVRQRSVVNTLLENFIDAAVTVLAWWAVGFGIAFGTSAGGLFGIDTFFLNQLPGADGSYPLGAPGSTAAINTYTLFFFQFAFAATASTITTGSMAGRTDFIGDLIYSAIMGAISYPIIVHWAWNSNGWLGKLSYHDFAGGSIVHTVGGWTALVGAYLLGPRPDRPPWGKLPPAHNLALATLGTMILWFGWYGFNPGSTLGTANPGLIGLVTINTTLAAGAGALTALIFLYVRTGKWDLVYCLNGSLAGLVAITAPCAYVAPWASVLIGFTGGISVVLGVSLIESLHIDDPVGAFSVHGISGMMGTLSIGFLGQAELTLNQKAGLFLGGGFDLLGIQMLGIVAITVFTVAFAFLMYGGLKAVGYLRVNAEADSIGIDAYEHGASVWPDIYPVEEVSKLQDQTKISENKTLEEQ

SEQ ID NO: 3778 - protein, 180 aa, Glycine max
MQHRNLTSGRPSGTDGSDYSYRMVVDSRYQLVAKGKKRLSLYFITEAVLLLIGVTLTYLPGIEADAPNTVAYSSVIVSVVSLIIGNIGRRRSRSGLLRFYAAVSSIAMLLLIASLAQQHLLLKAIQDSKLWKTGKYDVNELSHFQIGLLLYMVTLSVLKLCTVNAVVSLLFNMAPPKKTS

SEQ ID NO: 3779 - protein, 320 aa, Glycine max
  unsure (1)..(320): unsure at all Xaa locations
YVSSEFGSCLLPDLQPENLLLDSNAVLKVTDFGLSTYXQQEDELLRTACGTPNYVAPEVLNDRGYVGSTSDIWSCGVILFVLMAGYLPFDEPNHAALYQKIGRAQFTCPSWFSPEAKKLLKRILDPNPLTRIKVPELLEDEWFKKGYKPTTFVEEEDVNVDDVAAAFNDSKENLVTERKEKPVSMNAFELISRSQSFNLENLFEKQQGSVKRETHFTSQRPANEIMSKIEEAAKPLGFNVHKRNYKMKLQGDKSGRKGHLSVAKEVFXMAPPLQMVEIQKTGGDTLEFHKFYKNFSSSSGFPKVVWHSKKKENKIIKSAK

SEQ ID NO: 3780 - protein, 364 aa, Arabidopsis thaliana
MVIMQVLASKTKINMVMELVTGGELFDRIVSNGKLTETDGRKMFQQLIDGISYCHSKGVFHRDLKLENVLLDAKGHIKITDFGLSALPQHFRDDGLLHTTCGSPNYVAPEVLANRGYDGAASDIWSCGVILYVILTGCLPFDDRNLAVLYQKICKGDPPIPRWLSPGARTMIKRMLDPNPVTRITVVGIKASEWFKLEYIPSIPDDDDEEEVDTDDDAFSIQELGSEEGKGSDSPTIINAFQLIGMSSFLDLSGFFEQENVSERRIRFTSNSSAKDLLEKIETAVTEMGFSVQKKHAKLRVKQEERNQKGQVGLSVTAEVFEIKPSLNVVELRKSYGDSCLYRQLYERLLKDVGTSSPEQEIVT

SEQ ID NO: 3781 - protein, 247 aa, Chlamydomonas reinhardtii
MGEQLRQQGTVKWFNATKGFGFITPGGGGEDLFVHQTNINSEGFRSLREGEVVEFEVEAGPDGRSKAVNVTGPGGAAPEGAPRNFRGGGRGRGRARGARGGYAAAYGYPQMAPVYPGYYFFPADPTGRGRGRGGRGGAMPAMQGVMPGVAYPGMPMGGVGMEPTGEPSGLQVVVHNLPWSCQWQQLKDHFKEWRVERADVVYDAWGRSRGFGTVRFTTKEDAATACDKLNNSQIDGRTISVRLDRFA

SEQ ID NO: 3782 - protein, 132 aa, Triticum aestivum
MDLIDHKDFGESPPWASQVLELVELILRPPEGGPPCLRDHSEEVLSVLNLLRLILIIDSRGSRSAKMLRDEKIRAVYSEWLLPLRSVVTGNQSELEKDGGDDDENQMACLLNPVQLVLHRCIELVEEKMKGL

SEQ ID NO: 3783 - protein, 136 aa, Mycobacterium leprae TN
MPTGKVKWYDADKGFGFLSQEDGEDVYVRSSALPAGVEGLKAGQRVEFGVASGRRGPQALSLKLIDPPPSFARQVRREALAEHRHSPDELHGMVEDMITLLESTVQPELRKGRYPDRKTARRVSEVVKAVAREFDA

SEQ ID NO: 3784 - protein, 336 aa, Staphylococcus aureus subsp. aureus Mu50
MRAAVVTKDHKVSIEDKKLRALKPGEALVQTEYCGVCHTDLHVKNADFGDVTGVTLGHEGIGKVIEVAEDVESLKIGDRVSIAWMFESCGRCEYCTTGRETLCRSVKNAGYTVDGAMAEQVIVTADYAVKVPEKLDPAAASSITCAGVTTYKAVKVSNVKPGQWLGVFGIGGLGNLALQYAKNVMGAKIVAFDINDDKLAFAKELGADAIINSKDVDPVAEVMKLTDNKGLDATVVTSVAKTPFNQAVDVVKAGARVVAVGLPVDKMNLDIPRLVLDGIEVVGSLVGTRQDLREAFEFAAENKVTPKVQLRKLEEINDIFEEMEKGTITGRMVIKF

SEQ ID NO: 3785 - protein, 229 aa, Pyrococcus horikoshii OT3
MNVEEMKKIAAKEALKFIEDDMVIGLGTGSTTAYFIKLLGEKLKRGEISDIVGVPTSYQAKLLAIEHDIPIASLDQVDAIDVAVDGADEVDPNLNLIKGRGAALTMEKIIEYRAGTFIVLVDERKLVDYLCQKMPVPIEVIPQAWKAIIEELSIFNAKAELRMGVNKDGPVITDNGNFIIDAKFPRIDDPLDMEIELNTIPGVIENGIFADIADIVIVGTREGVKKLER

SEQ ID NO: 3786 - protein, 227 aa, Cicer arietinum
PVYKPPVEKPPVYKPPIEKPPVYKPPVEKPPVYKPPVEKPPVYKPPIEKPPVYKPPVEKPPIYKPPVEKPPVYKPPVEKPPVYKPPVEKPPVYKPPVEKPPVYKPPVEKPPVYKPPVEKPPVYKPPVEKPPVYKPPVEKPPIYKPPVEKPPVYKPPIEKPPVYTPPVEKPPVYKPPIEEPPVYKPPVEKPPVYGPPYEKPPHYPGYPPYEKPPHHPGYPPADDDNRF

SEQ ID NO: 3787 - protein, 279 aa, Haloarcula marismortui ATCC 43049
MTQQQSPTDGGPRASGMPMLGLGTWQNEDAEQCAESVRTALEAGYRHIDTAQAYDNESAVGDGIAAADVDRDDIFLATKVWISNLSHDDVIETTEESLDKLGVDSVDLLYVHWAAGEYEPEETLPAFDELVDRGLIDNVGVSNFEPHHVETAMDVLDAPVFANQVETHPFLQQSELREHAAEQDYELVAYSPLARGEVFGHDVIEAIADDHDASEAQVSLAWLREKGVTAIPKATSEAHITDNLASLDLSLTDADIDRIDNIDTVDRRVDPDFGPAAWD

SEQ ID NO: 3788 - protein, 282 aa, Streptococcus pyogenes MGAS8232
MAMIQWFPGHMSKARRQVQENLKHVDFVTILVDARLPLSSQNPMLTKIVGDKPKLMILNKADLADATRTKEWKAYYESQGIKTLAINSKEQSTVKKVTEAAKELMADKIKRLRDRGIQKETLRTMIIGIPNAGKSTLMNRLAGKKIAVVGNKPGVTKGQQWLKSNKELEILDTPGILWPKFEDELVGLKLALTGAIKDQLLPMDEVTIFGLNYFKTHYPSRLTKRFKNIPLEEEAPEIIMTLTRQLGFKDDYDRFYSLFVKEVRDGKLGQYTLDQVGDMDAD

SEQ ID NO: 3789 - protein, 306 aa, Sporothrix schenckii
MDGKRQLNSFQQLEKLGEGTYATVFKGRNRHTGEFVALKEIHLDSEEGTPSTAIREISLMKELKHENIVALHDVIHTESKLMLVFEYMDGDLKKYMDTNGERGALKPMLIKSFMYQLLKGIDFCHQNRVLHRDLKPQNLLINGKGQLKLGDFGLARAFGIPVNTFSNEVVTLWYRAPDVLLGSRTYNTSIDIWSVGCIMAEMYTGRPLFPGTTNEDQMLRIFRIMGTPAEHNWPGISQFPEYKATAPRYATQDLRQILPQIDATGIDLLQRLLQLRPELRISAHDALQHPWFHDILQYQHCQQAAG

SEQ ID NO: 3790 - protein, 213 aa, Brassica napus
LAHFALFFNQGQCCCAGSRTYVHEKVYDEFVEKAKARALKRVVGDPFKKGIEQGPHIDSKQFEKVMKYIRSGVESNATLECGGGQVGDKGYFIQPTVFSNVKDDMLIAQDEIFGPVQSILKFSDVDEVIKRANDTRYGLAAGVFTKSLDTANRVSRALKAGTVWVNCFDVFDAAIPFGGYKMSGNGKKKGIYSLNNYLQVKAVVTPLNNPAWI

SEQ ID NO: 3791 - protein, 283 aa, Escherichia coli CFT073
MQKVKLNNGIEMPLLGFGVFQMTDAAECERAVIDAINSGYRLIDTAASYQNEIQVGNALKQSGIARNELFVTTKLWLQDTSYEGAKAQFERSLNRLQLDYVDLYLIHQPYGDVHGAWRAMEELQQAGKIRAIGVSNFHPDRLADLIAFNNVVPAVNQVEVNPFNQQLQAVPWMQSRGIQPEAWAPFAEGKNGLFQHPVLTAIGEKYGKSVGQVVLRWIYQRGIVSLAKSVRKERMEENINILDFELSPEDMLQITALDTATSAFFSHRDPAMVEWLTGRKLDV

SEQ ID NO: 3792 - protein, 155 aa, Saccharomyces cerevisiae
GASIVSLLGIKVLNNPAKFTDPYEFEITFECLESLKHDLEWKLTYVGSSRSLDHDQELDSILVGPVPVGVNKFVFSADPPSAELIPASELVSVTVILLSCSYDGREFVRVGYYVNNEYDEEELRENPPAKVQVDHIVRNILAEKPRVTRFNIVWD

SEQ ID NO: 3793 - protein, 282 aa, Mycobacterium avium subsp. paratuberculosis str. k10
MSKVPTIELNDGARIPQLGFGVYQIKPDETAAAVRAALDIGYRHIDTAEMYGNEREVAQGIRDAGLDRSEVFVTSKLNNGFHEPDAARRAFDATLNALGSDYVDLFLIHWPLPTLYGGDFVSTWRVLEEFARDGRARSIGVSNFQVAHLERLAAETDTVPAVNQVEVHPYFTNEKVRGYAREHGLAIEAWSPIAQGGVLGDAVINRIADGLGRTAAQVVLRWHIQRGDIVFPKTVNPDRMKSNFELFDFELDERAMEAISALDRGESGRRGPNPDTFDYIPR

SEQ ID NO: 3794 - protein, 294 aa, Escherichia coli CFT073
MEGLTVEFSVLSNNLKMPMMGFGVFQVTDKDVCKQSVLNAIRTGYRLIDTAAVYGNEDAVGEAVREAISEGLCTREELFITSKLWVQDMLNQDIAAAGIEASLKKSGLECFDLYLLHQAMRDYFSAWRALEDAYEEGKLKAIGVSNFYPHVLANFCETVRVKPMVNQVELHPYFAQPEALATMKYYNVQPEAWAPLGGGRHKPFENNLLQSIADAHQKSISQVILRWNIQRGVVVIPKSTHQQRIEENFAIWDFSLTEKEMAQISSLDLGYVGESVKHFNPEFVRGCLAVKIHD

SEQ ID NO: 3795 - protein, 390 aa, Zea mays
  unsure (1)..(390): unsure at all Xaa locations
SSLQCSLHVPDEDMLSPLGALRLDGHFSFHDVSAMARDFGNQCSFLPAAVLHPGSVSDIAATVRHVFSLGEGSPLTVAARGHGHSLMGQSQAAQGIVVRMESLRGARLQVHDGFVDAPGGELWINVLRETLKHAWHPSRXTDYLHLTVGGTLSNAGVSGQAFRHGPQVSNVNQXEIVTGLKRTLKXQPEVTELLSRLRIINRTGVLNNWRASFKPQDPVEASHFQSDGRVLYCLELTKNFNSDDTDTMEQVNLEFLDRVHTSELKLRAQGLWEVPHPWLNLLIPRSSIRRFAKEVFGKILVGFLSSAPSLSGYGSIAHSMNLNKQIVEFCEEAGIGMKQYLAPYTTQQQWKAHFGARWETFERRKHRYDPLAILAPGQRIFPKASLPLPL

SEQ ID NO: 3796 - protein, 247 aa, Zea mays
ACLQISTMFTHHQKIVVVDHEMPNQGSQQRRIVSFIGGIDLCDGRYDTQYHSLFRTLDTVHHDDFHQPNFEGGSIKKGGPREPWHDIHSRLEGPIAWDVLYNFEQRWRKQGGKDLLVRLRDLPDIIIPPSPVMFPEDRETWNVQLFRSIDGGAAFGFPETPEEAARAGLVSGKDQIIDRSIQDAYVNAIRRAKNFIYIENQYFLGSSYGWKPEGIKPEEIGALHLIPKELSLKNVSKIESWERFTVY

SEQ ID NO: 3797 - protein, 246 aa, Ralstonia metallidurans CH34
MSTEADAWIQHELMVAPMAATHGAPRSALVVGGGDGGSAFELLRIPTMREVVVAELDGEVVRLAREWLRGIHQGALDEPGDPRLSLAIGEGLGLMEAFARAGRQFDLIVYDLTEADDGSPAAALFSPHGLHTARRCLAPGGAMSLHLGPPLHRPETARRLLARLRHVFRHVAPLTTFVPAYGALWGIALASDALDIAAQPADKIATRLQQWQLEHKLRAYHAYLHPALFVHPRHVQAIFDSGSRPA

SEQ ID NO: 3798 - protein, 411 aa, Anaplasma platys
MKENAVLMCGDKKVSLPMLSGTDGIQLIDITTLYRDHKVLTYDPGFMSTAACSSEITFIDGEKGILRHRGLDIADLIGIKGGFCSVAHLLLYGVLPSDTVFEQFLAAIGAQHALSSDVLGVISSFRRDAHPMAILMACFSTLAAKYHGDNRGNEELAVLAIAQVPSLVAAIYRHRMGLELVSPDPSLSYTGNFVKMMFGALEKTRADAIEEALDAIFIMHADHEQNASTATVRMAGSAGTELFACLAAGTATLWGPAHGGANEAVIRMLESIGSPDKVEEFIGFVKDNNSKVRLMGFGHRVYKSYDPRAKILGQISRSVLDNLGCSDELLGVAEELERCALQDEYFVERKLYPNVDFYSGIVLRAMGVPVEMYTTFFALARTAGWVSQWCELLRGSESLKICRPRQLYAGK

SEQ ID NO: 3799 - protein, 1166 aa, Ustilago maydis
MPPLPYRRSSSLLPVTHSGTSTVARATTSLATRTPIHLTLEDLKRRTIKFISEEDNTTRIVNVSDCRDAYDVMARVLKKFGKPPSGNSYTPTADQGPTGDELGATETWGIFATSADGQNTKALSDNELLAICHAPQPHDPLRERGLTLRRIPNHLPGEDARKVPVRSGRNKLEAFFGERMPVAQMQPAGPGSGVNADEEDAGSVTISGKKMKRASTVSIMSGLGVGPFSSSSHNTGAGHTHGSTRAEGKLLSKKESKHMSPPPVTSKPSKIRNFFGQRPPSELINTNLADFFPSTDSKALQRTARRSIYGRASASTRSKRNSTWSFVADPDAPPLPNKGSMDGHPTPLERSSISIRERGTTPVIQIGYDSRSEDDHQSNARRTSSGTHSHLHSSLTGPPTLPPVVSRDSLDEWSRDLKAVGSPVTEENAMFQSSRHGHASGSQQHHAAMKHYPSHASGYADRPSISRRASGESARSRRSLASQVRHGLSAARERNADTASLLTVDEITQEVENRRESISLAGAGGGWVVDEDGVPIPIPGSSSPFSSSAAASTRPSSGISSSYVHNGHLEHDDSEGHSDEEANQSSDLEEATRTRKARGVPSKAASIRTVASKRASSVLQAPGDESDRHLGDPMAVARSTTSRASSVSELRRSVHDHGDPSDGESGSDFTDSDLDSDGSETDEDEQANDVYLPSAKPAPIKWHKGALIGAGSFGNVFLGMNAKTGLLMAVKQVELPSGDSHLDQRKKGMLEALEREIKLLKSLEHENIVQYLDSFADDSHLNIFLEYVPGGSIVALLRNYGAFEEPLVRNFVRQILNGLSFLHNRGIMHRDIKGANILVDNKGGIKISDFGISKKVESDLVLATNKSGAGGGGAGGAAHRPSLQGSVFWMAPEVVKQTSYTIKADIWSLGCLVVEMISGTHPWAELNQMQALFQIGMGRKPSLPDEISNECRDFLEKTFELDYNNRPSADELLNHAFMGTEMTFPPSSGADGSGGGDDDAGGSGDAGDGDASTMGMTNDAETGTTRETRETKDGKRPTRSKSTRRLEREKRHKEAAAAAAAATALDTGTPNTPTSHTAAAAAAAAAAAASASASASASPAVASTSPAPGDAETGSPTNGKSAVPPAGSTGGTPESILTVSIATARGNSTSTALSAADAAFSEEADS

SEQ ID NO: 3800 - protein, 402 aa, Bacillus cereus G9241
MHKVHQGKLETVSKVKVENAKDLSLAYSPGVAEPCKEIYDDKSKVYEYTMKGNMVAVVTDGTAVLGLGNIGPEASLPVMEGKAVLFKSFAGVDAFPIALNTNDVDKIVETVKLMEPTFGGVNLEDIAAPNCFIIEERLKKETNIPIFHDDQHGTAIVTVAGLVNALKLVGKKMSDIKVVANGAGAAGIAIIKLLYRYGVRDIIMCDRKGAIYDGRPTGMNPVKDEVAKYTNKNRIEGSLADVVQGADVFIGVSAEGALTEEMVRTMNDDAIIFAMANPVPEIMPELAKAAGAAVVGTGRSDFANQVNNVLAFPGIFRGALDVHATQINEEMKMAAVQAIAELVAEDELNADYIIPAPFDARVAPQVAAYVAKAAMETGVARRQVDPNEVAEKTKQLALIGKE

SEQ ID NO: 3801 - protein, 250 aa, Zea mays
MYFRPPPKGPEWYAGDAETGQAARPLYPMMLEDPRLRWAFIRKVYSILSIQMLLTVAVAAVVVYVRPVALFFVSTAAGFGLYIFLIILPFIVLCPLYYYYQRHPVNLLLLGLFTVAISFAVGLTCAFTKGEVIPDSAVLTAVVVLSLTAYTFWAAKRGHDFNFLGPFLFAAVMILMLFALIQLFFPLGRISLMIYGGLAALVFCGYIIYDTDNLIKRYSYDEYVWAAGALYLDRINLFLSLVTLFRAADS

SEQ ID NO: 3802 - protein, 460 aa, Ralstonia metallidurans CH34
MSDMQEHKVTPYDQFNYEVPENVFPREGISANAAAAIVISDEWTDTNPMLNMSSFVTTFAEPEAREVAARNIFKNYIDHDMYPRLFAMEGRMVRWLHELWNGPKGVEPYGTCTVGSSEACMLGGLAHKWNWRQRRQAEGKDATRPNMVTGGNVQIVWKKFLRYFDVEPRIVPLKPGNYCLTAEDLDKYVDENTICVVAIAGQTFTGEDDDIQGIHDWLDAYEKRTGISIPMHIDGASGGFVNPFLYPDYKWDFRLPRVQSINASGHKYGLTPPGLGWVVFRERKIFNEELVFYVNYLGGEMPTATLNFSRNAFQVAVQYYQFLRLGFDGYKRVMQHTLDNAIFLRQQLVDSGYFDIMNTTQRIPVVAVTLNKKYKNFNEFDVSNKVREKGWVLSAYTMPPNAESVTSLRVVVRPHVNHNVAQLLANDIINACKFLEANGGNAKPPALHKHAEAQSTSLKC

SEQ ID NO: 3803 - protein, 303 aa, Brassica napus
STDAPGGRFRLVSNLGGGRVMATAAKVAGIGVAKSGFRGGFGVPAAANDQFIVRNASASKPVSASISSAVHPSVEEDAVVMRKPVWEDEWEFAEVETKTIPRVVFDKPPSLQEAKEATDDLKDALNMAYMEGSNEVGSVSRMFSSFQPSENRAVESAVPQVALKAFAFLSENTAAQSVVASIASDPKVWDAVMENKDLMKFLETNTASTTVEADNDDKSELSSETESEEESEAKPINLMEILRDMKLKAVQMMENVSSYFGGGFRTKTFTKGGQERKRMLLNDPTTLFGLAVCVIFMVVLKRA

SEQ ID NO: 3804 - protein, 320 aa, Zea mays
  unsure (1)..(320): unsure at all Xaa locations
MEAEAAAKRTRESGEDAAAXGISAVIPGXWFSEISPMWPGEAHSLKVEXKVLFQGKSDYQNVMVFQSSTYGKVLVLDGVIQVTERDECAYQEMITHLPLCSIKDPKKVLVIGGGDGGVLREVSRHSSVEQIDICEIDKMVVDVSKQFFPHLAVGFEDPRVSLHIGDGVAFLKNAPEGTYDAVIVDSSDPIGPAQELFEKPFFQLVARALRPGGVVCTQAESIWLHMHIIEDIVVNCRQVFKGSVNYAWTTVPTYPSGVIGFMLCSTEGPAVDFQHPVFNIEEDEHPMKSKGPLKFYNSEIHTASFCLPSFAKRVIESKAN

SEQ ID NO: 3805 - protein, 224 aa, Burkholderia cepacia R1808
MVAVPEVPEVPEVPEVPEVPEVPEVPEVPEVPEVPEVPEVPEVPEVPEVPEVPEVPEVPEVPEVPEVPEVPEVPEVPEVPEVPEVPEVPEVPEVPEVPEVPEVPEVPEVPEVPEVPEVPEVPEVPEVPEVPEVPEVPEVPEVPEVPEVPEVPEVPEVPEVPEVPEVPELPPPDVPDEPPPDVPDVPDVPDVLGLIDGVTGPSTDPQPYSVTTDKAASATVVFLK

SEQ ID NO: 3806 - protein, 347 aa, Azotobacter vinelandii
MKALVLEKQHDLKIRDIDLPTPPVGPDDVRIRIHTVGVCGSDVHYYTHGRIGHFIVDRPLVLGHEAAGTVVEVGSGVTRLAVGDRVCMEPGIPDPKSKASRLGLYNVDPSVVFWATPPVHGCLTPEVVHPAAFVYKLPDNVGFAEGALVEPFAIGMQAAVKARIKPGDVAVVIGAGTIGMMTALAALAGGASRVLVSDLMVEKLAIAQRYEGITAVNVRERSLRDAVAEVTDGWGADVVFEASGSARAYGDALAAVCPGGALVLVGMPVEPVPFDVVAAQAKEIRIETVFRYANVYERAVNLIASGKVDLKPLVSATYPFERGVEAFERAASARPGDVKVQITFGDG

SEQ ID NO: 3807 - protein, 180 aa, Triticum aestivum
  unsure (1)..(180): unsure at all Xaa locations
PEPNLMRRGLGRLEQRGPMHKECDEANGARQDPVPYAATRKLTNGTPFRRIEGIKALAEALVSAAVSTNESFVCPENIPTTTKDNYFRTESYDFXPKNAARLTVPGGPSVACSTAKAVEWDAAWSKLLDPSGRAALGVHDAAYEEEKAPASVDPVLENAFHPPAHGESTLVKSAVPAAAV

SEQ ID NO: 3808 - protein, 284 aa, Glycine max
  unsure (1)..(284): unsure at all Xaa locations
MVLIRLWFVLLGFFGGFGSAAEQRRWTLNDFDIEKPLGRGKFGHVYLAREKXDNHIVALKVLFKXQLQQSXVVHQLRREVEIQSHLRHPHILRLDGYFYDQSXGPKGDLYKELQKCKYFSERRVTTYVASLARAFIYCHGKHVIHRDIKPENLLIGSQIQEIYRAYVHTFNRRRTMCGTLDYLPPEMVESVEHDASVDIWSLGVLCYEFLYGVPPFEAKEHSDTYRRIIQVDLKFPPKPIVSSAAKDLISQMLVKDSSQRLPLHKLLEHPWIVQNAEPSGVYRS

SEQ ID NO: 3809 - protein, 354 aa, Ralstonia eutropha JMP134
MVQAQFHRLQIAEVVAETDQAHSLVFALPESLRDTFAYRPGQFLTLRVPVDGVPQQRCYSLSSAPDVDSALRVTIKRVQGGRVSNWVCDHLGAGDTVEVMPPAGVFTPPTLHGDFLLLAGGSGITPVLSIAKAALRHGRGTVTLVYANRDEQSVIFREALGELARRHPGRLRVIHWLDSVQGPPSQRQVEELVRPWSLAECFICGPGPFMDSAQAALQELGVPRGKLHVERFVSLPDRTSAPVQAVMPAASTVVTPVPVATMHGAALTVQLDGETHQVSVAPDETVLDAMQRAGVAAPNSCRAGLCGACMCQVTQGDVTLGENHVLDQADLESGWTLACQARPASGDIHLKFPD

SEQ ID NO: 3810 - protein, 76 aa, Zea mays
MSSGGCSTCLEVIFAAILPPLGVFFRYGCCSSEFFVSLLLTLLCYVPGVAYSLYVILRTPPEPPGIDGERPYDMLA

SEQ ID NO: 3811 - protein, 507 aa, Pseudomonas sp. KIE171
MSGDYMVQATTNLVGAAYWRGRADEIQFEGRCLIDGKMVEAQSGYTFDCVSPVDGRVLTKVSAGGEADVNRAVAAARSAFRDRRWSGQSPVSRKRTLQAFAALIRLHRDELALLETLDMGKPISASRSVDVEAVASCFEWYAEAIDKLYEQIAPTAETDLALITREPLGVVGAIVPWNFPMLTAAWKTAPALACGNSVVLKPAEQSPLTAIRLAQLALEAGVPEGVFNVVPGLGGSAGRALACHMDVDGIFFTGSTATGRLLTEYAAKSNLKRVCLELGGKSPNIILASYGDIEKAAVASAESMFNNQGEVCIAPSRLIVERSIHKRVVEIVAEVAKRRQPGDPLDPTTRMGALVDANHADRVMGFIGRAKADGATLVAGGTRALTETGGSYVVPTVFDNVSNCMEIARDEVFGPVLSVIPVANVGEAVAVANDSPYGLGAGVWTDRLSDAHKISRELRAGVVYVNCYNDCDITTPFGGVKQSGNGRDKSLYALDEYTELKTTWIKL

SEQ ID NO: 3812 - protein, 217 aa, Glycine max
MGSLALETEDVISDIYLSLGLKESDKGVGGPRVLSLLSSLLERSVQRNETSLEAKHIKDVVTVFHGLRAPTLSVRKYIDRIFKYSGCSPSCFVVAHIYVDRFIQHTEIKLTSLNVHRLLITSIMLAAKFIDDAFYNNAYYAKVGGVSTSELNRLEMSFLFGIDFRLQFSVDTFGRYCRQLEKEAAEVVQIERPMQACRIKESWSNKDDPTCASTIAR

SEQ ID NO: 3813 - protein, 256 aa, Glycine max
  unsure (1)..(256): unsure at all Xaa locations
MGRGKIVIRRIDNSTSRQVTFSKRRNGLLKKAKELAILCDAEVGVMIFSSTGKLYDFASSSMKSVMDRYSKSKEEPCQLGSSASEIKFWQREAAMLRQQLHNLQESHRRKMMGEELSGLTVKELQNLENQLEISLHGVRMKKDQLLMGEIQELNRKGNLIHQENVELYKKVYGTQDDNETNRDSVLTNGLGIGEDLQXACESPAKPATATATTLQGTFRNYKNGQIAIALIHIQDACVSQLLSRKMDSDLNLDVFV

SEQ ID NO: 3814 - protein, 351 aa, Glycine max
MRMMTFTSQLFRYVLRRTFPAMMNAAVDLNLFDIIDKAESSTLSASEIASLLPNSHPQLANRLERILPVLASYSLLNCSIRTTEDGVRERLYALSPIGQYFASDDDGGSLGPLSSLFHRGYFHVLKDVKDAIMDPNNNDHFQNVHGMPPYQYMKTDEELNKLFNKALAQTGPPAMKMLLKLYKGFEQVSTLVDVGGGVGETLKQIIFEYPSIKGINFDLPQVVQDAPPYPGIEHVEGDMFESVPKGDAILLKLVCHNWLDEDCVKFLRNCHKALPQHGKVIVIDYIIPEVPDSSKISMQTCVADSLMFLVTSGKERTEKEFESLCRNSGFSRFHVACRDSPSVLSVIEFYK

SEQ ID NO: 3815 - protein, 161 aa, Pasteurella multocida subsp. multocida str. Pm70
MPKCGKFLLSFVFVISVFARADMVDTYSFNSPEERVRAVALAKALRCPQCQNQNLVESNSPIAYDLRIEVYNMVNEGKSNQQIIDAMTARFGNFVLYKPPFQWTTLLLWLSPIFLTVLAFGLMWRYAKKREKPQHTTALDPAQQAKLTQLLKQTEHTGNKK

SEQ ID NO: 3816 - protein, 255 aa, Brassica napus
  unsure (1)..(255): unsure at all Xaa locations
MTEGGEYYLARMSVDPFMAMKKSNHNKNSPRASGDEQIKSLEMMFESETKLEPRKKVQLARELGLQPRQVAIWFQNKRARWKSKQLETEFNILXRQNYNDLASQFESLKKEKQALVSELHRLNEEVQKTHEEKRLCCGDQAAVVALSSTDHESENEENXRREQEEEVRPEMEVCEKGDDGVLCGHHNDDYDDGGYNNNIKREYFGGFEEEADHLMNIVEPADSCLTSSDDWGGFKSNANLLDQSSSNFPWWDFWS

SEQ ID NO: 3817 - protein, 355 aa, Arabidopsis thaliana
MDRISGLPDELLVEILHCLPTKEVVSTSILSKRWEFLWLWVPKLTFVMNHYESDLPIQDFITKNLRLLKPQVIESFHLQCFSSSFKPEDIKHWVVTTISRRVRELIINYCDLSWLDKPVVLLDLPNSLYTCTSLVTLKLIGHSIIVDVPRTVSLPCLKTLELDSVAYSNEESLRLLLSYCPVLEDLTIHRDMHDNVKTLVIIVPSLLRLNLPIDGAYSCDGYVIVTPALKYLKVPGLYREDFSYLLTHMPNVEEADLSVEQDVERLFESITSVKRLSLFVLLDIEDESMYHNGIYFNQLEHLDLHIYRDNWSKLLVRLLEDSPKLRVLKIVVDVSFFIGNLKALVLLIISFLTKI

SEQ ID NO: 3818 - protein, 106 aa, Brassica napus
KARDNRCVNESIAMASRLVAAAASSSSLSSASPLARLISRRGLAGAADGHGSAKVPLWKDPLSPSKWKEEHFVLASLSMWGVIFYGGYKLFSGKKEAKTEAASPQA

SEQ ID NO: 3819 - protein, 266 aa, Oryza sativa (japonica cultivar-group)
MAPPQERDYIGLSPAAAAALATELRLGLPGTAEEAESEGGGGGGTDAAPLTLELLPKGGAKRGFADAIVGGPAGQRREAAGGKAAAAAAEAEEEEEKKKAQAPAAKAQVVGWPPIRSYRKNTMAMSQPALKGKDDGEAKQAPASGCLYVKVSMDGAPYLRKVDLKMYKNYKELSLALEKMFSCFTVGHGESNGKSGRDGLSDCRLMDLKNGTELVLTYEDKDEDWMLVGDVPWRMFTDSCRRLRIMKGSDAVGLAPRATDKSKNRN

SEQ ID NO: 3820 - protein, 131 aa, Triticum aestivum
  unsure (1)..(131): unsure at all Xaa locations
RERAVHAQPTRGPRCWTSGWDGGHVLQLWRRLKXHQGTRNWSALHQKPXNYLCHQTPKHHQLLTPXDQPVYNKDKSINGGGYVEVYLHQELRTRLSXHRFRTVWDCYGITHLYEEYRKGCIDLCLGGPFLT

SEQ ID NO: 3821 - protein, 405 aa, Arabidopsis thaliana
  unsure (1)..(405): unsure at all Xaa locations
MDRISGLPDELLVEILHCLPTKEVVSTSILSKRWEFLWLWVPKLTFVMNHYESDLPIQDFITKNLRLLKPQVIESFHLQCFSSSFKPEDIKHWVVTTISRRVRELIINYCDLSWLDKPVVLLDLPNSLYTCTSLVTLKLIGHSIIVDVPXTVSLPCLKTLELDSVAYSNEESLRLLLSYCPVLEDLTIHRDMHDNVKTLVIIVPSLLRLNLPIDGAYSCDGYVIVTPALKYLKVPGLYREDFSYLLTHMPNVEEADLSVEQDVERLFESITSVKRLSLFVLLDIEDESMYHNGIYFNQLEHLNLHIYRDNWSKLLVRLLEDSPKLRVLKIVVDGEPSFDEEFEHVSWIYNDESSVPKCLLDSLEVFEFAGYTRXPEERDFVSFILKHACHLKSSSISRLSCYVLE

SEQ ID NO: 3822 - protein, 227 aa, Brassica napus
CLLNKLIRFIFSLFINFFFKKACNEAMFPCRSPPNWWTEELCILNIDFFSDVLASMKQRGLKPSSLASAIITYTERSLRDLVRDHSGRGVKFSDPENNDSEERSQQRDLVESIVSLLPSDKGLFPINFLCSLLRCAVFLEASLASKNELEKRISVVLEHVTVDDLLIPSFTYDGERLLDLDSVRRIISTFVEKEKNVGVFNGGDFNKGLFSASLQRVARTVDSYLAE

SEQ ID NO: 3823 - protein, 371 aa, Malus x domestica
MGKGGMSDGDHADRCCGEAINGDVQQENMAAWLLGVKNLKIQPYKLPNLGPHDVRVRLKAVGICGSDVHHFKNMRCVDFIVKEPMVIGHECAGIIEEVGSEVEDLVPGDRVALEPGISCKRCNLCKQGRYNLCRKMKFFGSPPNNGCLANQVVHPGDLCFKLPDNVSLEEGAMCEPLSVGIHACRRANVCQETNVLVVGAGPIGLVTLLAARAFGAPRIVIADVNHERLLIAKSLGADAVVKVSTNIEDVAEEVAKIQKVLENGVDVTFDCAGFNKTITTALSATRPGGKVCLVGMGQREMTLPLATREIDVIGIFRYQNTWPLCLEFLRSGKIDVKPLITHRFGFSQKEVEEAFETSARGGNAIKVMFNL

SEQ ID NO: 3824 - protein, 254 aa, Brassica napus
MTHTLQSPPSAAALSASIQKGRWKTAAAGFSVAPPPPAVNFTLRRSIPRIHASASSSSSSSSPSSPSLGAGENSELDAVSAFSEIVPDTVVFDDFERFPPTAATVSSALLLGICGLPDTIFRNAVDMALADSTCAGLDTTDSKLSCFFDKAIVNVGGDLVKLVPGRVSTEVDARLAYDTNAIIRKVHDLLRLYNEIDVPHDRLLFKIPATWQGIEAAKLLESEGIQTHLTFVYSFAQAAAAAQAGASVIQIFVG

SEQ ID NO: 3825 - protein, 368 aa, Malus x domestica
MGKGGQSCNGVVRDAKPVEQENMAVWLVDVNTIKILPFKLPAIGPNDVRIRIKAVGICGSDIHYLKTMKCGDFQVKDPMVIGHECAGIVDKVGSKVKHLVPGDRVAVEPGISCAHCQQCKGGRYNLCFDMKFFATPPVHGSLANQIVHPADLCFKLPENVSLEEGAMCEPLSVGVHPFRRANVGPETTVLIVGAGPIGLVSVLAARAFGAPRIVIVDMDDRRLAMAKSLGPDGTVKVSTKMEDLDDELAKIKEAMGSEVDVTFDCVGFNKTMSTGLNATRPGGKVCLVGMGHGVTTVPLTPAAAREVDVVGVFAYKNTWPLCLEFLRSGKIDVKPLITHRFGFTEKEVEEAFATSARGGNAIKVMFTL

SEQ ID NO: 3826 - protein, 368 aa, Malus x domestica
MGKGGQSCNGMVRDVKPVEKENMAAWLVDVNTIKILPFKLPTIGPNDVQIRIKAVGICGSDVHYLKTMKCADFEVKEPMVIGHQCAGIVDKVGSEVKHLVPGDRVAVEPGISCAHCQQCKGGRYNLCPDMKFFATPPVHGALANQIVDPADLCFKLPENVSLEEGAMCEPLSVGVHACRRANVGPETTVLIVGAGPIGLVSVLAARAFGAPRIVIVDMDSKRLAVAKSLGADGTVKVSRKMEDLDDEVAKIKETMGAEVDVTFDCVGFNKTMSTGLNATRPGGKVCLVGMGHSMMTVPLTAAAAREVDVVGVFRCKNTWPLCLEFLRSGKIDVKPLITHRFGFTEKEVEEAFATSARGGDAIKVMFNL

SEQ ID NO: 3827 - protein, 85 aa, Brassica napus
MSLFLKDDSIQIREVWHDNLESEMALIRDIVDDFPFVAMDTEFPGIVCRPVGTFKTNTEYHYETLRTNVNLLKMIQLGLTFSDER

SEQ ID NO: 3828 - protein, 472 aa, Guillardia theta
MNKLFSIKIGPYYLGKTLGVGSFGKVKLGEHELCGQKVAVKILNRKKIKNLKMEEKVKREICILKLFMHPHIIRLYEVIETPTDIFVVTEYITGGELFDYIVERGRLNEDESRKFFQQMISGIEYCHNHMVVHRDLKPENILLDAHLNVKIADFGLSNIMKDGNFLKTSCGSPNYAAPEVINGKSYLGPEVDVWSCGVIMYALLCGSLPFDDENIPNLFKKIKSGIYILPGYLSDLSRDMIAKMLITNPLLRITINEIRDHPWFNSRLPKYLSFPTFKKNFVIQKKLNIDDNILELVSNKTFLSKKYIKLGIMKHERNSTAIIYHLIRESITPFDMITVDNSYIRDIIKKENVIKKSNEKEHNTSLHQAFLGIESPRENLKDILNEIQRAIKTFRSKTHNLNHFSVIIVINTNSLFETKYKKKKEIILRTTTILIQIFKRSMKYLIDLQKINGDSFFFLSTCNFIKQELNLK

SEQ ID NO: 3829 - protein, 203 aa, Schizosaccharomyces pombe
MSAFKKSGSKSETSKKLVVVGDGGCGKTCLLIVFSSGTFPERYVPTVFENYITDITYGPNSKVIELALWDTAGQEEYDRLRPLSYPNSNVILLCFSIDCPASLNNVTEKWYPEVQHFCPRTPIVLVGLKADLRKDRNATEVLRTQGLTPVTYQQAQSVALSMNAPYVECSAKENTGVNEVFQLAVGLTIKKSFSFSKKSCVIL

SEQ ID NO: 3830 - protein, 494 aa, Klebsiella aerogenes
MSEITLLAEVTAFLRQPHGQFIAGQREAGRGAPFAVINPATGRAIAEVTAADSDQADRAMESARQALSQWREMPTLARGALLLKLADTLAEHREALAQLESLCSGKTITLVRMLELDQSVALLRYFAGWAGKVTGETLDVSLPSMAGEKYTAFTRRQPLGVVVGIVPWNFSIMIAIWKLAAALVCGCTIVLKPSEYTPLTLLRVAELAKAVGIPDGVINVVNGAGGEIAQRLITHPACAKVSFTGSVATGEKVQQSASASGKRVTLELGGKYAALFLDDLTPEAMVNGIIEAGYLNQGQICAAAERFYLPQGKLDAVLALLKDKLSAFAPGSPLDERTLMGPLANRQQYDKVLRLIQTARDEGDTIVCGGEALPGEGYFLQPTAVKVRSEESTLMREETFGPVCSFIGYRSEEEALARINASPYGLAASVWSDNIRQALRYSEAIEAGIVWVNMHTFLDPAVPFGGMKGSGIGREFGSAFIDDYTELKSVMVRY

SEQ ID NO: 3831 - protein, 146 aa, Zea mays
VMASKSKIYFVLEYAKGGELFNKIAKGGKLSEDAARKYFQQLVSAVDFCHSRGVYHRDLKPENLLLDENENLKVSDFGLSALAESKRQDGLLHTTCGTPAYVAPEVLSRKGYDGAKSDVWSCGVILFVLVAGYLPFHDTNLIEMYR

SEQ ID NO: 3832 - protein, 200 aa, Neurospora crassa
MASGSPQNVIRRKLVIIGDGACGKTSLLSVFTLGFFPATYIPTVFENYVTDCRVDGKSVQLALWDTAGQEDYERLRPLAYSKAHVILIGFSVDTPDSLDNVKHKWVTEANERCPNVPIILVGLKKDLRGDPVAIEEMRKRSQRFVMEDEGQRIAKEIGARKYLECSSLTGEGVDDVFEAATRAALLTFEKKEGSGCCVIL

SEQ ID NO: 3833 - protein, 168 aa, Triticum monococcum
MAAASSATSVHDFTVKDSSGKDVDLSVYKGKVLLIVNVASQCGLTNSNYTELSQLYPKYKDQGFEILAFPCNQFGGQEPGTNDEIVQFACTRFKAEYPIFDKVDVNGNNVSPLYKFLKSSKGGLFGDSIKWNFSKFLVDKEGHVVDRYAPTTSPLSIEKDIKKLLGSS

SEQ ID NO: 3834 - protein, 470 aa, Ralstonia metallidurans CH34
MTNLGGVMRSDRQEASGDGGNPGFEAFRQALGGQLVQRGDPDYDMARKVWNGAIDKHPALVVYCADATDVAGAVRFARATGLTIAVRSGGHNLAGLSTCDNGIVIDLSRMKRIDVDVARRRARAEAGLNLGEFDQATLRHGLATTMGVNSDTGIAGLTLGGGFGKLGRKYGLSCDNLEAVEIVTADGERLHASTTEHPDLFWAIRGGGGNFGIVTAFHFRLHPIPARLPVCAVVYPWDQAREAMLHYDAFARAAPDDVAADAALVTQPSGERCLSISACHVGPDGTEETRQAALRPLVEFGNPVDAQLDFVPYLQMQSASDALFARGRRYYWKAQFLRQIRAEAVDALLAAYALAPSPGCLVVFQQVGGAIARVPDEATAYGNRSADFDCFPLAIWDDPADDDKHREWARGLWEAVQPYSTGGVYANNLGDEGAQRTRAAYGVNHSRLVAVKRQYDPDNAFRLNQNIDPA

SEQ ID NO: 3835 - protein, 72 aa, Brassica napus
MIPICVQCGTGGNPCRCKVVGPTLGLVAFLAAGVVEWPVGALVYIFKHAKGRRIMGHPATHVYPKVSRSIPI

SEQ ID NO: 3836 - protein, 816 aa, Zea mays
  unsure (1)..(816): unsure at all Xaa locations
MAQILLHGTLHATIFEAESLSNPHRATGGAPKFIRKLVEGIEDTVGVGKGATKIYATVDLEKARVGRTRMISNEPVNPRWYESFHIYCAHMXAADVIFTVKIDNPIGASLIGRAYLPVQDLLXGEEIDKWLEICDEKREPVGDSKIHVKLQYFDVCKDXRNWARGVRSTKYPGVPYTFFSQRXQGCKVTLYQDAHVXPDNFVPRIQLADGKNYEPHRCWEDIFDAISKAQHLIYITGWSVYTEITLVRDTNRPKPGGDVTLGELLKRKASEGVRVLMLVWDDRTSVGLLKKDGLMATHDEETANYFHGTDVNCVLCPRNPDDSGSFVQDLQISTMFTHHQKIVVVDHEMPNQGSQQRRIVSFIGGIDLCDGRYDTQYHSLFRTLDTVHHDDFHQPNFEGGSIKKGGPREPWHDIHSRLEGPIAWDVLYNFEQRWRKQGGKDLLVRLRDLSDIIIPPSPVMFPEDRETWNVQLFRSIDGGAAFGFPETPEEAARAGLVSGKDQIIDRSIQDAYVNAIRRAKNFIYIENQYFLGSSYGWKPEGIKPEEIGALHLIPKELSLKIVSKIEAGERFTVYVVVPMWPEGVPESASVQAILDWQRRTMEMMYTDIAQALEANGIEANPKDYLTFFCLGNREVKQEGEYEPEEHPEPDTDYIRAQEARRFMIYVHTKMMIVDDEYIIIGSANINQRSMDGARDSEIAMGAYQPYHLATRQPARGQIHGFRMSLWYEHLGMLEDVFQRPESVECVQKVNEVAEKYWDLYSSDDLEQDLPGHLLSYPIGVTADGSVTELPGMENFPDTRARVLGNKSDYLPPILTT

SEQ ID NO: 3837 - protein, 181 aa, Brassica napus
MASSMLSSATVVSSPAQAAMVAPFTGLKSSAAFPVTRKTNTDITSIASNGGRVNCMKVWPPVGKKKFETLSYLPDLTDVELAKEVDYLLRNKWIPCVEFELEHGFVYREHGNTPGYNDGRYWTMWKLPLFGCTDSAQVLKEVQECKTEYPNAFIRIIGFDNNRQVQCISFIAYKPPSFTGA

SEQ ID NO: 3838 - protein, 471 aa, Chromobacterium violaceum ATCC 12472
MSKRYRTALVWLRRDLRLDDHAAFYHALKHSEAVLPVFVFDASILAALPRDDRRVDFIWQSAAALKAELNQLGGDLLIRHGLPQHEIPRLAAELGAEAVFCNRDYEPAARARDAEVAQRLAEQGVAFRDSKDQVIFETDEVLTGAGKPFSVFTPYKNAWLKKLTPFHLQAYPVRRYLDALMPREPQSMPSLADIGFLPSDLASLPVKAGAAGAEALFADFAGRIERYKAQRDFPGVKGVSYLSVHLRFGTLSIRRLAAYAWHDGGEGAMTWLSELIWRDFYQQVLWHRPDAAKHAFKPEYDALPFPNDPEWFDAWREGRTGYPLVDAAMRQLNRSGYMHNRLRMVAASFLVKDLLIDWRWGEQYFAEKLLDFDLAANNGGWQWAASTGCDAQPYFRIFNPVSQSEKFDPDGRFIRRYVPELAALPDKLIHAPWQAKPEQLMSAGVRLGRDYPHPIVDHAVQRELALALFKR

SEQ ID NO: 3839 - protein, 262 aa, Burkholderia fungorum LB400
MKARLDISDITIAGHAQDITLRSFHPFAHSAMPIVLYFHGGGFVKGSLDETSKPATLIAAQTPAWVIAVGYSLAPEFPFPAATEDAHLALEWAVGNARGYRADPNRIAAVGHDAGGNIAAGLAAIARDRGVRRLSAQALLAPLLDPSMTRLMEGQCPGRSDLAPEDCARSYRAYLPSANHRIHPYAAPLESRRLATLPPTLIATAEQDLVRGDGETYARELITAGVPVEMTRHGGVCHGELISHSPALDGVVEFLRKRLARD

SEQ ID NO: 3840 - protein, 363 aa, Triticum aestivum
  unsure (1)..(363): unsure at all Xaa locations
MGSTAADMAASADEEACMYALQLVSSSILPMTLKNAIELGLLETLVAAGGKLLTPAEVAAKLPSTANPAAADMVDRMLRLLASYNVVSCTMEEGKDGRLSRRYRAAPVCKFLTPNEDGVSMAALALMNQDKVLMESWYYLKDAVLDGGIPFNKAYGMSAFEYHGTDPRFNRVFNEGMKNHSIIITKKLLEVYKGFEGLGTIVDVGGXGVGXTVXAITPPHSAIKGINFDLPHVISEAQPFPGVTHVGGDMHVXQKVPSGDPILMKWILHDWSDEHCATLLKNCYDALPAHGKVVLVECILPVNPEATPKAQGVFHVDMIMLAHNPGGRERYEREFEALAKGAGFKAIKTTYIYANAFAIEFTK

SEQ ID NO: 3841 - protein, 180 aa, Triticum aestivum
  unsure (1)..(180): unsure at all Xaa locations
NDRWCVQATEGMNIKEECKRWFTEMKWKKVHRFVVYKIDERTRAVLVDKVGGPGEGYDELVAALPGDDCRYAVFDFDFVSVDNCQKSKIFFIAWSPAASRIRAKILYATSKXGLRRVLEGVHYEVQATERSEMGSTHHQERAQFSDPPAKSFYMFGLPVPTIPVYYNPTDLIWAGGCLVV

SEQ ID NO: 3842 - protein, 240 aa, Triticum aestivum
  unsure (1)..(240): unsure at all Xaa locations
MGERVKGTVKWFNVTKGFGFISPDDGGEDLFVHQSSIKSDGYRSLNENDAVEFEIITGDDGRTKANDVTAPGGGALSGGSRPVEGGGDRGGXRGGYGGGGGGYGGGGGGYGGGGGGYGGGGGGYGGGGGGYGGGGYGGGGGGGRGCYKCGEEGHISRDCPQGGGGGYGGGGYGGGGGGGGGRECYKCGEEGHISRDCPQGGGGGGGYGGGGGRGGGGGGGGCFSCGESGHFSRECPNKAH

SEQ ID NO: 3843 - protein, 381 aa, Arabidopsis thaliana
MTNHLQDPLPTYPKPVLTKEEQEVDEKMVSLQAESIVNTVAFPMVLKAAFELGVIDTIAAAGNDTWLSPCEIACSLPTKPTNPEAPVLLDRMLSLLVSHSILKCRMIETGENGRTGKIERVYAAEPVCKYFLSDSDGTGSLVPLFMLLHTQVFFKTWTNLKDVILEGRDAFNSAHGMKIFEYINSDQPFAELFNRAMSEPSTMIMKKVLDVYRGFEDVNTLVDVGGGNGTVLGLVTSKYPHIKGVNFDLAQVLTQAPFYPGVEHVSGDMFVEVPKGDAVFMKWILHDWGDEDCIKILKNCWKSLPEKGKIIIVEFVTPKEPKGGDLSSNTVFAMDLLMLTQCSGGKERSLSQFENLAFASGFLRCEIICLAYSYSVIEFHK

SEQ ID NO: 3844 - protein, 311 aa, Sulfolobus tokodaii str. 7
MKREELLVEEIKDLTLEELKGYADFYKILDKVYGFTAESVVRGVKILKDMIKEADLRFLSFTANLVSTGLRGLFADLIKQGYFNVIITTGGTIDHDIARSFGGKYYKGLFEYDDSMLRELEIHRLGNILVPMESYGKVIEDVVRKYMNEIVSIKKEWPVYELLWEFGKRISDENSILKAAYEKKVPIIVPGIIDGSFGTNLFIYSQFTQLKLNLFEDMKLIKDLIFSCKKSGALIIGGGISKHHTIWWNQFKDGLDYAIYITTAQEYDGSLSGAKPREAISWNKIKPTSENVVIYGDATIILPILSASLLG

SEQ ID NO: 3845 - protein, 350 aa, Bacteroides thetaiotaomicron VPI-5482
MLAYTYIEHGKFELREKPEPKITDARDAIVRVTLGSICTSDLHIKHGSVPRAVPGITVGHEMVGVVEEVGAEVTSVRPGDRVTVNVETFCGECFFCHHGYVNNCTDPNGGWALGCRIDGGQAEYVRVPYADQGLNRIPDTVSDEQALFVGDVLATGFWATRISEITEKDTILLIGAGPTGICTLLCSMLKNPKRIIVCEKSPERIQFVREHYPDVLITTPENCKEFVLQNSDHSGADVVLEVAGTEDSFRMAWDCARPNAIVTIVALYDKPLLFPLPEMYGKNLTFKTGGVDGCDCAEILSLIEEGKIDTTPLITHRCSLNEIEEAYRIFENKLDGVIKVAIVCQTESNK

SEQ ID NO: 3846 - protein, 131 aa, Sulfolobus tokodaii str. 7
MSIQYTTVGDLKVGNYVVIDGEPCRVVEISKAKTGKHGSAKANIVAIGLFTGQKRTLMAPVDQQVEVPIIEKHIGQILADKGDTITIMDMENYETFDIEKPTDADIVDKIRPGAEVEYWEIMGRKKIVRVK

SEQ ID NO: 3847 - protein, 321 aa, Kineococcus radiotolerans SRS30216
MLVRIVYGGICGSDLHYAADGRNGAYVVTEPLVLGHEVVGVVERAGPDTPAAPPAGTRVAVHPATPCAPAGAAAPTGLHLRPGGTYLGSASTHPHTQGGFTGLLAVGVERLRELPAALPLRRAVLAEPLAVALHAVGRLEGRVAGARVLVSGAGPIGVLAVAALKRAGAAHVTAADLQELPLRVATAVGADEVVDLSRGGSLPEAGFDVVVEAAGVVPSLLAAIRAVRPGGSILQLGILPAGPQPVPVGELLSKEVALFGTQRFDTELDAAVELLAADDSLDAVVTDVFGIEDAAAAFARARDSANSSKTVLRITPDPDDA

SEQ ID NO: 3848 - protein, 373 aa, Haemophilus influenzae 86-028NP
MHGYNHPRLNAAAQNQLAKMSHIMFGGFTHDPAVELAQLLVQILPNGLDKIFFADSGSVAVEVAMKMAIQYQHAKGEVQRQKFATIRSGYHGDTWNAMSVCDPTTGMHHLFHHSLPVQYFLPQPNIPFNESWNDCVIEPLADLLKKKGSEIAALILEPVVQGAGGMYFYSPTYLVKAQALCKQYGVLLIFDEIATGFGRTGKLFAAEHAGISPDIMCIGKALTGGYLTLSASITTTEIAQIICSGEAKCFMHGPTFMANPLACAIAAESIRLLLESPWQQNIQRIEHSLKQQLSPLAEKDYVKEVRALGAIGVVEMKSAVNMKTLVPRFVEQGVWIRPFGKLVYVMPPFVIKDDELQKLTEGMILALIQEYEH

SEQ ID NO: 3849 - protein, 348 aa, Pseudomonas putida
MLAIRKTKAGPGGLSVDDVAAPKEAHSTDVLVKVEAAGICGTDLLIYKWGEFAKRMKLPTILGHEVSGVIEQVGSDVKGLRPGMRVSLESHLPCGTCYTCRRGWAHVCPKTRYPGVDFDGGFASFVVVPESVCWPVPCGIPPLQATMMEPFGLAVHASLEGSGVSGLNVLVSGCGPIGLMNIAAAKALGASKVIATDIHPLRLTAAAKMGADECINATEESVYKTVRSLLGERGVDVAIDYSGQAAALKELIQSITHGGELRLMGVPSHDILLNLEEWLFKGLIVRGLHGRRLYETWERSTSLLVTGRVDLSSLVSHRLPLSAAEDAFEMALNGQSLKILFEPNGSCI

SEQ ID NO: 3850 - protein, 183 aa, Streptococcus agalactiae
AIKQQTIFDIDNAKTEVEIDNLVHDAFSKMNATVAKFQKGLETNTPETPDTPKIPELPQAPDTPQAPDTPHVPESPKAPEAPRVPESPKTPEAPHVPESPKTPEAPKIPEPPKTPDVPKLPDVPKLPDVPKLPDAPKLPDGLNKVGQAVFTSTDGNTKVTVVFDKPTDADKLHLKEVTTKELA

SEQ ID NO: 3851 - protein, 371 aa, Senecio vernalis
MEESIKQASVMENLRSVVFKESESLEGTCAKIRGYDFNNGIDYSQILKSMVSTGFQASNLGDAIETVNQMLDWRLSHEQVTEDCSEEEKNPTYRESIKCKIFLGFTSNLISSGVRDIIRYLVQHHMVDVIVTTTGGIEEDLIKCLADTFKGEFSLPGAELRSKGLNRIGNLLVPNDNYCKFEDWIIPIFDQMLEEQKAKNVVWTPSKLIMRLGKEINNESSYLYWAYKNDIPVFCPGLTDGSLGDMLYFHTFRNPGLIVDVVQDIRAINSEAVHANPRKTGMIILGGGLPKHHICNANMMRNGADYAVFINTAQEFDGSDSGARPDEAVSWGKIRGSAKSVKVHCDATIAFPLLVAETFAAKREKSVEPSS

SEQ ID NO: 3852 - protein, 281 aa, Arabidopsis thaliana
MDIFDNSDLEYLVDEFHADFDDDEPFGEVDVTSESDSDFMDSDFDFELSESKTNNETSALEARNGKDIQGIPWESLNYTRDRYRENRLLHYKNFESLFRSREELDKECLQVEKGKNFYDFQFNTRLVKSTIAHFQLRNLVWATSKHDVYFMNNYSLMHWSSLLQRGKEVLNVAKPIVPSMKQHGSLSQSVSRVQISTMAVKDDLIVAGGFQGELICKKINEPEVAFCTKLTSADNDITNSVDIYNAPSGSLRVMTANNDCTVRLFDATNFALLNRLPFTGL

SEQ ID NO: 3853 - protein, 491 aa, Escherichia coli CFT073
MMSRMAEQQLYIHGGYTSATSGRTFETINPANGNVLATVQAAGREDVDRAVKSAQQGQKIWAAMTAMERSRILRRAVDILRERNDELAKLETLDTGKAYSETSTVDIVTGADVLEYYAGLIPALEGSQIPLRETSFVYTRREPLGVVAGIGAWNYPIQIALWKSAPALAAGNAMIFKPSEVTPLTALKLAEIYSEAGLPDGVFNVLPGVGAETGQYLTDHPGIAKVSFTGGVASGKKVMANSAASSLKEVTMELGGKSPLIVFDDADLDLAADIAMMANFFSSGQVCTNGTRVFVPTKCKAAFEQKVLARVERIRAGDVFDPQTNFGPLVSFPHRDNVLRYIAKGKEEGARVLCGGNVLKGDSFDNGAWVAPTVFTDCSDDMTIVREEIFGPVMSILTYESEDEVIRRANDTDYGLAAGIVTADLNRAHRVIHQLEAGICWINTWGESPAEIPVGGYKHSGIGRENGVMTLQSYTQVKSIQVEMAKFQSIF

SEQ ID NO: 3854 - protein, 81 aa, Zea mays
MKTSVVVVAALAAVLFLAQSYASLAGASGPRVIIVGAGMSGISAGKTLWEAGVRDLLILEATGRVGGRMHKHNFGGINVEI

SEQ ID NO: 3855 - protein, 497 aa, Ralstonia solanacearum
MTRTDLPPAPITLNDPALWRTQAFLAGAWTDADDGSTRDVTDPATGRVIGTVPAMGAAETRRAIEAAQAAQRAWRKVTARERARILRKLADLMLEHQQDLARILTAEQGKPLPEATGEIAYAASFIEWFAEEARRVYGDTIPAPQGDRRIVVNKEPIGVTAAITPWNFPIAMMTRKVGPALAAGCAMVVKPALETPYSALAFAELAARAGVPAGLLSIVTGDAQGIGGELTANPVVRKLSFTGSTAVGRLLMRQCADDVKKLSLELGGNAPFIVFDDADLDAAVEGAMVAKYRNAGQTCVCANRFYVQRGIYDAFAARLSEAVRALRVGNGAEPGVQQGPLIHQRAMDKVRAHVDNAVAQGARVLVGGKPHALSAQGGAFFEPTVIVDARPGMLVAHEETFGPLAALIPFDTEDEAVAAANDTEFGLAAYFYTRDLGRAWRVSEALESGMVGVNTGLISTAEAPFGGVKQSGLGREGSKYGIDEYLEIKYVCMAGLG

SEQ ID NO: 3856 - protein, 496 aa, Burkholderia cepacia R18194
MTIVTEAAQAARTQALAWINRGPKRLLIGGRWVDAASGNTFETINPATEQVLCRVAEADSADVDAAVIAARRAFDAPSWGGLSPHARTRALLKIADAIEQHVDELAAIESLDNGMPLWFALAAVTATIDIVRYYAGWCSKVLGTTIPSDGSTLIYTLREPLGVCGQIIPWNVPILMAAIKFANALCCGNTVILKPAELACLTSIRLAELIQETDLPPGVINVLPGYGPTAGAALAQHPGVDKIAFTGSTPVGKQITRDATLNLKKVTLELGGKAPNVIFADADIEKAVQAAVKTFCGNSGQVCSAGTRLFVQEGIHEQVAERVAQIAATWKAGDPFASDTKLGPLISAKQRDRVWSYIGVGQEGGATLRLGGDPWRGAGYFVEPTVFDNVRNGMRIAQEEIFGPVLSIIPFKDEGDAVLQANDTTYGLSAAVWTRDVARAHKVVRALKAGRLWINTFGESDPAMAFGGYKQSGWGREFGQESIDAYTQTKSIMLRM

SEQ ID NO: 3857 - protein, 543 aa, Glycine max
  unsure (1)..(543): unsure at all Xaa locations
TRPQKFGWVSLVSHLRLSVLLLSVSLGNSASLQENFVQCLNLNSDRTFPFNPLIYTPKSPSFTSVLDSSGKNQRLLVPSTPKPKFIFTPTRDSHVQAAVICSKKLGIHLRVRSGGHDFEGVSYVSEXESPFIVVDLIKLRDINVDIKSNTAWVQAGATTGELYYRIYEKSSLHGFPAGLCTSLGIGGHITGGAYGSMMRKYGLGVDNVLDAKIVDANGRILDRKAMGEDLFWAIRGGGGGSFGILLWWKVKLVPVPPTVTVFTVKKTLEQGATKILDKWQEVAPYIDENLFIRVIIQPSSDARNKTQRTIATSYNALFLGGARTLLQVMKTSFPELGLTIKDCLETSWIKSVLYIAGFPSDTPPEVLLKGKSTFKNFFKAKSDFVREPIPETGLEGLWQRLLVEDSPLMIWNPYGGRMSQFSESETPFPYRNGTLYKIQYFSLWQEGDKNAAKHIDWIRKLYNYMGPYVSSLPREAYVNYRDLDLGINTKNSTSYIQASAWGYRYYKNNFDRLVKIKTKVDPENVFRHEQSIPPLPKKVDLLV

SEQ ID NO: 3858 - protein, 489 aa, Burkholderia cepacia R18194
MSVNIPGFIEGNKKLLIGGQWVEPAGGEHIEAINPATGEVLCHIAKGGTQDVERAVAAARRAFEGPWSRFTPHERRKLLLRVHDVILDHFDELALIETLDMGAPLARTRGYKEWLSQLLQFYASQTGAGTVQAAPMSIAPGFTALKHLMPVGVVGGIIPWNGPLMGLWWIYGPALATGCTAVLKPAEDASLSSLRVSELMMEAGVPDGVINVVTGYGKDVGQALAEHPDVDRVAFTGSVGTAQAIVRASAGNLKRLQLELGGKSPDIVFADADLDKAVPGAAMGVFTNTGQVCVAGTRIFVQRAIHDEFVQRIAAFAKTIRIGDGLSPDTQIGPLISQRQLERVMHYVDIGGKEATLVHGGQRPGGELARGYFVEPTVFANVRNDMTIAREEIFGPVASVIPFDTMEEALQLANDTPYGLAGGVWTSSLSTAHKVSQGIRSGTVWVNCYGVIDPAVGFGGTKMSGYGWKGGKEHVESFLYPKATYINLG

SEQ ID NO: 3859 - protein, 159 aa, Listeria monocytogenes str. 1/2a F6854
MNVHDFSEKAMNGKEIALSDYKGKVLLIVNTASKCGLTPQLEGLEAMYKKLGGDNFEILGFPCNQFLRQDPGSDEEILEFCQMNYGVTFQMFSKIKVKGKDASPLYKYLTEQTGGKKVEWNFAKFLIDENGEVVERFPSKMKPEDFEDKVEALVAKVNN

SEQ ID NO: 3860 - protein, 100 aa, Glycine max
  unsure (1)..(100): unsure at all Xaa locations
MSGVWVFKNGVVRLVENHGSDRWVLAHTASNEIITPYAVLEHKPSSLGWERYYDDPDLLQFHKRSTVHLISLPRDXNKFRSMHMYDIVVKNKNYFEVRDM

SEQ ID NO: 3861 - protein, 462 aa, Zea mays
FIRHHRTATEEGGMAAAGGGPRRTTRVGPYELGKTVGEGSFAKVKIAKDTRNAATCAIKVLDRNHVLRHKMVEQIKREIATMKLIRHPNVVQLHEVMASKSKIYMVLEFVEGGELFDKIVNSGRLGEDEARIYFHQLINAVDYCHSRGVYHRDLKPENLLLDSNGALKVSDFGLSAFAPQTNEDGLLHTTCGTPNYVAPEVLADKGYDGMAADVWSCGIILFVLMAGYLPFDDANLMRLYKLVKICQAYFSCPPWFSSGAKKFIKRILDPNPDTRITIAEILEDEWFKKDYKPPRFEQGEDVSLDDIDAAFNDSEDRLVAEKREKPESMNAFALISRSQGFNLGNLFEKEMMGMVKRETSFTSQCTAQEIMTKIEDACGPLGFNVRKQNYKMKLKGDKSGRKGHLSVATEVFEVAPSLHMVELRKTGGDTLEFHSFYKNFSSELKDIVWKAESDANNKQTNK

SEQ ID NO: 3862 - protein, 81 aa, Triticum aestivum
MALGHELVHHGYSQSSKWSTDISPNLEWKLIYVGSAEDENYYQQFESVLVGPVNVGTYHFVLEVVERCRLGSGVVRSTTVQ

SEQ ID NO: 3863 - protein, 186 aa, Carica papaya
FGSVYKGFIDDKLRPGLKAQPVAIKLLDLDGSQGHKEWLTEVIFLAQLRHPHLVKLIGYCCEEEHRLLVYEYMPRRSLENQLFRRYSVSLPWSTRMKIAHGAAKGLEFLHEAENLVIYRDFKASNILLDADYNPKLSDFGLAKDGPEGDDTHVSTRVMGTQGYAAPEYIMTGSHLTAKSDIYSFGI

SEQ ID NO: 3864 - protein, 320 aa, Rubrivivax gelatinosus PM1
MPSAAFQPPQHGLTPTMRDVLDRMRRAGRPPLHTMSVDAAREAYRLGAEILDLPRVALARVEDLLVPARDGHLLPARLYAPSSARLPVLLYLHGGGFTIGSLDTHDSLCRQLALQGGAAVLSLDYRLAPEHRFPAAVDDAWDALQWVAREGGARLGLDDTRLAVGGDSAGGTLSAVCALMARDAALPLALQLLFYPGTAARQDSDSHRRFAEGVLLARPLIDWFFGHYIATEHREDWRFAPLLAPDHGGVAPAWIGLAECDPLVDEGVAYGDVLRAAGVPVQLELWRGVVHDFIKMGRAVPEARQAHAAAARALREAFSP

SEQ ID NO: 3865 - protein, 303 aa, Neurospora crassa
MPLEAVMIVVDNSESSRNGDYIPTRYDAQADAVNIIFQNVVQGNPESSVGLMSMAGRGPEVLVTLTTDQGKILEGLHRTKKNIRGSAQLSRAIQVAWLALKHRQNKSQRGRIVIFVCSPIEEEESDLVKLAKKMKKNNTSVDFVLFGDIDDENQKKLEAFNREVKSGEGSNMVVIPPSSKLLSDQLISTPILLGEAAAGGSGGAGGDAGGAANEDFPFGIDPSVDPELALALRMSMEEEKARQEKRAKEEAEAAKKASLEDVKEEAGESEPLLGKDGEPSGSGSKKDGDKPGKSDDGDKMDTS

SEQ ID NO: 3866 - protein, 694 aa, Zea mays
MPALAVDAATPVAHAFASCDAARFPAPPVVGPAAAAEAAPWSADLSAALYNVDGWGAPYFFVNDDGDVAVRPHGAATLPGQEIDLAKVVAKAAGPRAGGGLGLPLPLLVRFPDVLRHRVETLNAAFGYAVRSTGYGSRYQGVYPVKCNQDRYVVEDIVEFGAPFGFGLEAGSKPELLLAMSCLAARGGLDALLICNGYKDDGYVSLALMARSMGLNTVIVLEQEEELDIVVEASRRLGVRPVVGMRAKLRTKHAGHFGSTSGEKGKFGLSAAQILSVVTKLKAIGMLDCLQLLHFHIGSQIPTTALLSDGVGEAAQIYCELARLGADMRVIDVGGGLGIDYDGTHSAQTDMSVAYSLEEYAGAVVAAVGRVCDRKGVQHPIICSESGRALVSHHSVLVFEAFSATAPGRLDAATAYLLDELTDDCRADYRNVMAAAVRGDYDTCGLYADQLKRRSAEQFKEGVLGLEHLAAVDAFCELVARGMGAPEPPRTYHINLSVFTSLPDMWAIGQQFPIIPIQRLQERPAVDGVLSDLTCDSDGKVSEFIGGRHSLPLHELPTHATRGYYLGMFLGGAYQEALGGLHNLFGGPSVVRVSQCDGPHCFAVTRAAAGPSCADVLRAMQHEPEVMYEVLKQRTDGATAAALARAFGAMPYLVFDPEAAVMSGGESSDSERSAAGAAEEEDDEEWEFMRGLTV

SEQ ID NO: 3867 - protein, 512 aa, Arabidopsis thaliana
MTSSFLLLTFAICKLIIAVGLNVGPSELLRIGAIDVDGHFTVHPSDLASVSSDFGMLKSPEEPLAVLHPSSAEDVARLVRTAYGSATAFPVSARGHGHSINGQAAAGRNGVVVEMNHGVTGTPKPLVRPDEMYVDVWGGELWVDVLKKTLEHGLAPKSWTDYLYLTVGGTLSNAGISGQAFHHGPQISNVLELDVVTGQFGIITRARISLEPAPQRVRWIRVLYSSFKVFTEDQEYLISMHGQLKFDYVEGFVIVDEGLVNNWRSSFFSPRNPVKISSVSSNGSVLYCLEITKNYHDSDSEIVDQEVEILMKKLNFIPTSVFTTDLQYVDFLDRVHKAELKLRSKNLWEVPHPWLNLFVPKSRISDFDKGVFKGILGNKTSGPILIYPMNKDKWDERSSAVTPDEEVFYLVALLRSALTDGEETQKLEYLKDQNRRILEFCEQAKINVKQYLPHHATQEEWVAHFGDKWDRFRSLKAEFDPRHILATGQRIFQNPSLSLFPPSSSSSSAASW

SEQ ID NO: 3868 - protein, 383 aa, Actinobacillus pleuropneumoniae serovar 1 str. 4074
MKNITKFAVTLLAGLVITACGSKNHSIDIKPKSDKPKQEQPKQPQPKQDQPKQEQPKQEQPKQEQPKQEQPKQEQPKQEQPKQEQPKQDQPKQEQPKQEQPKQDQPKQEQPKQDQPKQEQPKQDQPKQEQPKQDQPKQDQPKQDQPKQDQPKQDQPKQEQPKQDQPKDKTSGGVFIVEGVSKNLPQLTKEKLTDANLNSIKVDGIEIKFADATKAKGNWKVSPDNSLVVCCDKYSSVRFGVYESKGKSYSFYNGNATAEMPTSGKFTYTGDAYLLASVVGNGAESIGTSKFEADFGTKKLTGTLTFDKLKDSKNVDIDSKISGNSFTGKATFDSFKGTDAIVEGKFYGENAKELAGAFDSAKEKGAKLGDKSWGGVFGAKQQK

SEQ ID NO: 3869 - protein, 477 aa, Mesorhizobium loti MAFF303099
MSHNLQFYVDGAWVDPVVPNTLDVIDPSNEDAFAQISLGSKADVDKAVAAAKRAFNSFGFTSVEERLDILNRVIEVYKKRSKDLALAVSREMGAPRQMALDSQVGVGLAHLEKMAEVLRTFQFRHVKGSALIVKEPIGVVGLITPWNWPLNQITCKVGPALAAGCTMVLKPSEIAPLDAIIFAEIIDEAGVPKGVFNLVNGDGPGVGQALSSHPDVDMMSFTGSTRAGILVAKAAADTVKRVHQELGGKSANILFPDVDLARAVTKGVAGCFGNSGQSCNAPTRMFVPRDRHDEAAGYAKAAAEKFVVGPADGANTKLGPVVSQMQFDKIQDLIQAGIDEGATLVAGGPGRPAELNRGYYVRPTVFADVTHDMRIAREEIFGPVLAILPYDTVEKAVEQANDTVYGLASYIQAKDIQKARDVAARMRSGNVYINYPAWDAGLPFGGYKQSGNGREYAEYGLEDFLEIKGIAGYEAAE

SEQ ID NO: 3870 - protein, 218 aa, Ipomoea batatas
MGRGKVEIRRIEKSTNRRVTFWKRRNGLLKKAMEMGILCDAEVGLMIFSSTGKLHEFATTSIRSVIERYNKTQGDSLQSPLDPTLELKFWQIEVAILRQQLHNMQEDHRKVMGEVYGLSVKDLQNLENQLEMSLSGIRMKKEQILIEQIQELTHKQGSFVHQENFELFNKFQAYGTSDPNAVNGDTISPYDFTISEESQGHIHFQLPQNFSDLARALY

SEQ ID NO: 3871 - protein, 404 aa, Chromobacterium violaceum ATCC 12472
MLSEQTRSLVKATVPVLQQHGVALTSHFYRRMFEHNPELKNVFNQGHQHSGQQQQALAMAVLAYARHIDDPSPLLPVLTRVAHKHVSLGIRAEHYPIVGKHLLASIRELLGEAAGDDLIQAWAEAYGLLADTLIGIENGMYGDATSADGGWSGWRPFRVAKKEIESEEIASFYLEPSDGGALPAFKPGQYVSVKRFVAEWGLSQPRQYSLSDAPNGEYLRISVKREDAAQGKPAGRVSNLLHREVQVGDVLELSAPQGDFFLHEERDGPAVLISAGVGQTPMQAMLGQLLKRGGREVRFLHAARHGGAHAMGAKVRQLADRHPQLKVHVCYETPRAQDAIGVDYQAAGRLNLADVKGIALLPDADYYLCGPLGFMRAQRDSLRGLGVAADRIHYEVFGSHPGDD

SEQ ID NO: 3872 - protein, 571 aa, Glycine max
KALNKGTAFSMTERDRLDLRGLLPPNVMSPDLQIERFMVDLKRLEVQARDGPSDPNALAKWRILNRLHDRNETMYYKVLIAKIEEYAPIVYTPTVGLVCQNYSGLFRRPRGMYFSAEDRGEMMSMVYNWPAEQVDMIVVTDGSRILGLGDLGVQGIGIAIGKLDLYVAAAGINPQRVLPVMIDVGTNNEKLLEDPLYLGLQQHRLDGDDYLAVVDEFMEAVFTRWPNVIVQFEDFQSKWAFKLLQRYRNTYRMFNDDVQGTAGVAIAGLLGAVRAQGRPMIDFPKQKIVVAGAGSAGIGVLNAARKTMARMLGNNEVAFESAKSQFWVVDAQGLITEGRENIDPDALPFARNLKEMDRQGLREGASLVEVVKQVKPDVLLGLSAVGGLFSKEVLEALKGSTSTRPAIFAMSNPTKNAECTAEEAFSILGDNIIFASGSPFSNVDLGNGHIGHCNQGNNMYLFPGIGLGTLLSGARIVSDGMLQAAAERLATYMSEEEVLKGIIFPSTSRIRDITKQVATAVIKEAVEEDLAEGYHGMDARELQKLSEDEIAEYVQNNMWSPEYPTLVYKKE

SEQ ID NO: 3873 - protein, 195 aa, Streptococcus agalactiae
AIKQQTIFDIDNAKTEVEIDNLVHDAFSKMNATVAKFQKGLETNTPETPDTPKIPELPQAPDTPQAPDTPHVPESPKTPEAPHVPESPKTPEAPHVPESPKTPEAPHVPESPKTPEAPKIPEPPKTPDVPKLPDVPKLPDVPKLPDAPKLPDGLNKVGQAVFTSTDGNTKVTVVFDKPTDADKLHLKEVTTKELA

SEQ ID NO: 3874 - protein, 245 aa, Hordeum vulgare subsp. vulgare
MAGEDATRAATEEELSSVAEAAPVTAQRPVRSDLEKYIPKPYLARALVAPDVYHPQGSKERGHEHRHRSVLQQHVAFFDMDGDGVIYPWETYQGLRALGFNMIVSFVIVIIIHATLSYTTLPTGYRLSLPFYIDNIHRAKHGSDTATYDTEGRYMPVNFENIFSKNARWSPDKLTFREIWTMTDDQRQANDPFGWVASKAEWILLYMLAKDEEGNLPREAIRRCFDGSLFEFIADERRQAHGKQY

SEQ ID NO: 3875 - protein, 195 aa, Streptococcus agalactiae
AIKQQTIFDIDNAKTEVEIDNLVHDAFSKMNATVAKFQKGLETNTPETPDTPKIPELPQAPDTPQAPDTPRVPESPKTPEAPHVPESPKAPEAPRVPESPKTPEAPHVPESPKTPEAPKIPEPPKTPDVPKLPDVPKLPDVPKLPDAPKLPDGLNKVGQAVFTSTDGNTKVTVVFDKPTDADKLHLKEVTTKELA

SEQ ID NO: 3876 - protein, 118 aa, Oryza sativa (indica cultivar-group)
MARAQLVLVALVAAALLLAGPHTTMAAISCGQVNSAVSPCLSYARGGSGPSAACCSGVRSLNSAASTTADRRTACNCLKNVAGSISGLNAGNAASIPSKCGVTIPYTISPSIDCSSVN

SEQ ID NO: 3877 - protein, 395 aa, Burkholderia fungorum LB400
MESLKTGTDTLFLLLGAGMVLAMHAGFAFLELGTVRKKNQVNALVKILVDFSVSTIAYFFIGYAIAYGVQFFGSAESLAAHNGYALVRFFFLLTFAAAIPAIVSGGIAERSKFNPQLFATFVLVGFIYPFFEGIAWNGRFGIQNWLAEMFGAQFHDFAGSVVVHAFGGWVALPAVLLLGARHGRYHRDGGIAAHPPSNIPFLALGAWVLAVGWFGFNVMSAQTVDKISGLVAVNSLMAMVGGTLTAWLAGRNDPGFSYNGPLAGLVAVCAGSDIMHPLGALVTGGIAGVLFVYMFTCVQNRWRIDDVLGVWPLHGLCGAWGGLAAGIFGLRALGGMGGVSFGAQLVGTLGGIVVATLGGTLVYGAIRLTVGLRLDQEDEYNGADLSIHKISATPE

SEQ ID NO: 3878 - protein, 97 aa, Glycine max
  unsure (1)..(97): unsure at all Xaa locations
MASSMISSPAVTTVIRAGAGMVARFTGLKSMAGFRSSKTINDITSIATNGGRVHCMQVWSPVGNKLFETLSXLPFLDDVQLAHELXYLLMNGWIPCL

SEQ ID NO: 3879 - protein, 195 aa, Streptococcus agalactiae
AIKQQTIFDIDNAKTEVEIDNLVHDAFSKMNATVAKFQKGLETNTPETPDTPKIPELPQAPDTPQAPDTPHVPESPKAPEAPRVPESPKTPEAPHVPESPKTPEAPKIPEPPKTPDVPKLPDVPKLPDVPKLPDVPKLPDVPKLPDAPKLPDGLNKVGQAVFTSTDGNTKVTVVFDKPTDADKLHLKEVTTKELA

SEQ ID NO: 3880 - protein, 106 aa, Rickettsia felis
NMLKEIGSSENIPKYIAKAKDKNDPFRLMGFGHRVYKNYDPRAAVLKETCKEVLKELGQLENNPLLQIAIELEAIALKDEYFIERKLYPNVDFYSGIIYKAMGIPS

SEQ ID NO: 3881 - protein, 195 aa, Streptococcus agalactiae
AIKQQTIFDIDNAKTEVEIDNLVHDAFSKMNATVAKFQKGLETNTPETPDTPKIPELPQAPDTPQAPDTPHVPESPKAPEAPRVPESPKTPEAPHVPESPKAPEAPRVPESPKTPEAPHVPESPKTPEAPKIPEPPKTPDVPKLPDAPKLPDGLNKVGQAVFTSTDGNTKVTVVFDKPTDADKLHLKEVTTKELA

SEQ ID NO: 3882 - protein, 510 aa, Candida albicans SC5314
MGRATIKSGSINLLNTIIGAGILAMPYGLKNNGLLFGCILIIWSSLTSSMGLYLQNKVAKYTGQRGSVSYFSLSQLTYPNLSILFDSAISIKCFGVGVSYLVVIGDLMPKIVESLVGGGNINSDSLLMARNFWITIFMIVIVTPLSYLKKLDSLKYTSILALFSVGYLICLVVAHYFTTPTTSPSGGGGGDDDDIVYHYIGPISLKSTLSSFPIFVFAYTCHQNMFAIINELKPSDTDGSQTRQSNLIIRNAISIACLSYLIVGIFGYLTFGNSVNANIITMYPHNSISSLIGRLCIVVMVSLSFPLQCHPCRGSINHVIHFCTHGVQQSKFRSTTTNNNYNNGDQHGYTSLSSDIESLQSIGGNDTTAGSIGSIGGGDSVVGDADESFISTTPVEGAQDTDGHDPIIVPMTTKKFYIITTVIVVLSYLVAISVTSLAHVLAFVGSTGSTSISFILPGLFGYLLIKPIEGNTSLNNLEKFCKYGGLFLAIWGILVMIVCLSATIFLGATH

SEQ ID NO: 3883 - protein, 513 aa, Zea mays
MGNCCPGSSSSAEPAPPQPPDPSGSSRPVASPASVSPTAAPAPARPPAPIGPVLGRPMEDVSTIYTVGKELGRGQFGVTTLCTHKATGHRFACKTIAKRKLSTKEDVEDVRREVQIMYHLSGQPGVVELKGAYEDKGSVHLVMELCAGGELFDRIIARGHYTERAAASLLRTIVEIVHTCHSMGVIHRDLKPENFLLLSKDEDAPLKATDFGLSVFRDIVGSAYYIAPEVLKRSYGPEADIWSIGVIVYILLSGVPPFWAESEHGIFNSILRGQVDFTSDPWPRISPSAKDLVRKMLTPDPKKRISAYDVLNHPWIKEDGEAPDTPLDNAVLGRLKQFRAMNQFKKAALRVIAGCLSEEEIRGLKEMFKSMDSDSSGTITVDELRRGLANKGTKLSEAEVQQLMEAADADGNGTIDYEEFITATMHMNRMDRDEHLYTAFQYFDKDNSGYITMEELEQALREKGLLDGRDIKEIVAEVDADNDGRINYTEFAAMMRKGDPEPSNPKKRRDIVL

SEQ ID NO: 3884 - protein, 201 aa, Streptococcus agalactiae
AIKQQTIFDIDNAKTEVEIDNLVHDAFSKMNATVAKFQKGLETNTPETPDTPKIPELPQAPDTPQAPDTPHVPESPKAPEAPRVPESPKTPEAPHVPESPKAPEAPRVPESPKTPEAPHVPESPKTPEAPKIPEPPKTPDVPKLPDVPKLPDAPKLPDGLNKVGQAVFTSTDGNTKVTVVFDKPTDADKLHLKEVTTKELA

SEQ ID NO: 3885 - protein, 482 aa, Oryza sativa (japonica cultivar-group)
MQKEALAMVSSDVNFPKGHFPDYKIGPNNQIIDPEEIHEAVPLKEIVAKETAQLLEQRRRLSVRDLKEKFEKGLSGASKLSEEAKRREAASLDRQVLLKKLRDVLDTLKGRVAGRNRDDADEAISLVEALAVQLTQREGELIYEKAEVKKLASFLKQATEDARKVAEEERALALAEIEKARTAIAIVEKGLQEHDAASSSREKEEIEGLRKEVREARRIKMLHQPSKVMDMEFELKALRTLIAEKNQLCNQLMKELAMIKRLEEDSSDLYDLEGSDILGSQFCIIPRFDDAPDISSCPTQWYRVISGGNRNLILGATKPTYAPEPFDVGRLLQAEIVLNAEKVTIQTMGPINPAAGLEHYVESLMKRADVEFNVVVTQMNGNDYSSNSVHAFHIGKMRIKLRKGWSTKARESYSTTMKLCGSRGGGNAAATAVFWQARKGLSYTLAFETDRDRNAAIMLARKFASNCNITLTGPGDEVHAGS

SEQ ID NO: 3886 - protein, 230 aa, Saccharum hybrid cultivar CP65-357
MAAPRRLSSCCLLFAVLLGAVLATATAFFDEAAAAGVGLGHGARFARKHGRAAAELPQPEPQPKPEPKPEPQPQPEPLPKPEPQPKPTPKPEPKPKPEPVPKPKPEPKPEPEPKPHPKPEPKPEPEPKPEPKPEPKPEPKPEPKPEPLPKPEPQPEPKPEPKPEPVPKPEPKPEPKPEPKPEPKPEPKPEPLPKPEPEPKPEPKPEPLPKPEPKPEPKPEPKPEPLPKPE

SEQ ID NO: 3887 - protein, 198 aa, Picea mariana
MSTCKFIKCVTVGDGAVGKTCMLISYTSNTFPTDYVPTVFDNFSANVVVDGNTVNLGLWDTAGQEDYNRLRPLSYRGADVFILAFSLISKASYENIMKKWLLELRHFAPGVPIVLVGTKLDLRDDKQFFTDHPSAVPITTAQGEELKKQIGAAAYIECSSKTQQNIKAVFDSAIRVVLQPPKVKRKKKRKSHKTCSIL

SEQ ID NO: 3888 - protein, 250 aa, Manihot esculenta
MPKNYPKVSEEYQKAIDKARRKLRGFIAEKGCAPLMLRIAWHSAGTYDVKTNTGGPFGTMRHAAEQGHAANNGLDIAVRLLEPIKEQFPILSYADFYQLAGVVAVEITGGPDIPFHPGREDKPEPPPEGRLPNATKGADHLREVFGKTMGLTDKDIVVLSGGHTLGRCHKERSGFEGPWTPNPLIFDNSFFQVLLDEPTEDLLQLPTDSVLVTDPVFRPYVEKYAADEEAFFADYAESHMKLSELGFAEA

SEQ ID NO: 3889 - protein, 112 aa, Bartonella washoensis
ANEACLKMLQEIGSVKRIPEFIARAKDKNDPFRLMGFGHRVYKNYDPRAKIMQQTCHEVLKELNIQDDPLLDIAIELENIALNDEYFVEKRLYPNVDFYSGITLKALGFPTE

SEQ ID NO: 3890 - protein, 440 aa, Bordetella pertussis Tohama I
MSNRETEIRNLQKDWAENTRWQGIKRAYSAEDVIRLRGSVAVEHSLARRGATRLWDSLHSEPFVNSLGALTGNQAMQQVKAGLKAIYLSGWQVAGDANLAGEMYPDQSLYPANSVPQVVRRINNALARCDQIQWMEGKNPGDQDYIDYYAPIVADAEAGFGGVLNAFELMKAMIEAGAAGVHFEDQLASVKKCGHMGGKVLVPTREAVSKLVSARLVADVMGTPTILLARTDADAADLVTSDVDENDRPFITGERTVEGFFRTRAGLDQAISRGLAYAPYADLIWCETSTPNLEYARKFAEAVHRQFPGKLLAYNCSPSFNWKKNLDDGTIAKFQRELGAMGYKFQFITLAGFHALNYGMFELAHGYARRQMSAFVELQQKEFAAAELGFTAVKHQREVGTGYFDAVTQTIEGGQSSTTALTGSTEEVQFEQGGQAVKAA

SEQ ID NO: 3891 - protein, 389 aa, Escherichia coli CFT073
MSDTTILQNSTHVIKPKKSVALSGVPAGNTALCTVGKSGNDLHYRGYDILDLAEHCEFEEVAHLLIHGKLPTRDELAAYKTKLKALRGLPANVRTVLEALPAASHPMDVMRTGVSALGCTLPEKEGHTVSGARDIADKLLASLSSILLYWYHYSHNGERIQPETDDDSIGGHFLHLLHGEKPSQSWEKAMHISLVLYAEHEFNASTFTSRVIAGTGSDMYSAIIGAIGALRGPKHGGANEVSLEIQQRYETPGEAEADIRKRVENKEVVIGFGHPVYTIADPRHQVIKRVAKQLSQEGGSLKMYNIADRLETVMWESKKMFPNLDWFSAVSYNMMGVPTEMFTPLFVIARVTGWAAHIIEQRQDNKIIRPSANYVGPEDRQFVALDKRQ

SEQ ID NO: 3892 - protein, 67 aa, Triticum aestivum
MDNRSGMPQNSIQHQPAEEVIDEVVKEAINKPWLPLPLGLKPPSTDSVLAELSRQGISTIPPRNQRL

SEQ ID NO: 3893 - protein, 329 aa, Chlamydophila pneumoniae AR39
MPMSNQFDQLKKLSTIVCDSGDPELVKASGSQDATTNPSLILKVAQEPKFQELLNEAVVWGIRQNGDDLQTLSFILDKIQVNFALEIIKNIPGRISLEIDARLSFNVEAMVQRAVFLSQLFEAMGGDKKRLLVKIPGTWEGIRAVEFLEAKGIACNVTLIFNLVQAIAAAKAKATLISPFVGRIYDWWIAAYGDEGYSIDADPGVASVSNIYAYYKKFGIPTQIMAASFRTKEQVLALAGCDLLTISPKLLDELKKSQHPVKKELDPAEAKKLDVQPIELTESFFRFLMNEDAMATEKLAEGIRIFAGDTQILETAITEFIKQIAAEGA

SEQ ID NO: 3894 - protein, 420 aa, Oryza sativa
MYGRMPKKSNNTKYYEVLGVSKTATQDELKKAYRKAAIKNHPDKGGDPEKFKELAQAYEVLNDPEKREIYDQYGEDALKEGMGGGSSSDFHSPFDLFEQIFQNRGGFGGRGHRQKRGEDVVHTMKVSLEDLYNGTTKKLSLSRNALCTKCKGKGSKSGAAATCHGCHGAGMRTITRQIGLGMIQQMNTVCPECRGSGEMISDKDKCPSCKGNKVVQQKKVLEVHVEKGMQHGQKIVFQGEADEAPDTVTGDIVFVLQLKDHPKFKRKFDDLFTEHTISLTEALCGFQFVLTHLDGRQLLIKSNPGEVIKPGQHKAINDEGMPQHGRPFMKGRLFVEFNVEFPEPGALTPGQCRSLEKILPPRPRNQLSDMELDQCEETTMHDVNIEEEMRRRQQHRRQEAYDEDDDEDAGAGPRVQCAQQ

SEQ ID NO: 3895 - protein, 495 aa, Pseudomonas aeruginosa PAO1
MSIAIDPSVSAFLRSPHGLLIDGESGPARSGADMPLYDPATGAELARVARAGAEDVDRAVAAARRAFEGNWAGQRPADRERLLLRLAERIEAHGEQLAQLETLNNGKSINLSRALEVGASVEFIRYMAGWATKIEGRSLDLSIAAVPGARYRAYTVPEPVGVVGAIVPWNFPLLMAIWKIVPALACGCTVVLKPADETPLTALRLGQLCLEAGIPPGVVNIVTGTGAEAGAALAAHPGIDKLAFTGSTPVGKLIGHAAVENMTRFSLELGGKSPVIILDDTSLDMAAAGSAGAIFFNQGQVCTAGSRLYVQRKRFDQVLERLAAIAGDLSIGPGLDPTTQINPLVSARQQERVLGMIESGVAEGASVVCGGARQGETGFYVQPTILADVTPGMQVVREEIFGPVLVATPFDDLDEAVRLANDSIYGLGASIWSNDLRQVMDLVPRIKAGTVWVNAHNLLDPSMPFGGFKQSGIGREMGHAAIEAYTENKSVCIAY

SEQ ID NO: 3896 - protein, 511 aa, Zea mays
  unsure (1)..(511): unsure at all Xaa locations
MMASQAMVPLRQLFVDGEWRPLALGRRLPVVNPTTEAHIGEIPAGTTEDVDPAVXASSRAALKRNXRGRDWARAPGAVRARDLRAIVAKGIERKQELAKLEALDCGKXYDEAAWDMDDVAGCFEYFADQAEALDKRQNSPVSLPMETFKCHLRREPIGVVGLITPWNYPLLMATWKXVAPALAAGCTAVLKPSELASVTCLELADICKEVGLPSGVLNIVTGLGPDAGAPLSAHPDVDKVAFTGSIETGKKIMASAAPMVKPVTLELGGKSPIVVFDDVDIDKAVEWTLFGCFWTNGQICSATSRLLIHTKIAKKFNERMVAWAKNIKVSDPLEEGCRLGPVVSEGQYEKIKKFISNAKSQGATILTGGVRPAHLEKGFFIEPTIITDITTSMEIWREEVFGPVLCVKEFSTEDEAIELANDTQYGLAGAXVISGDRERCQRLSEEIDAGCIWVNCSQPCFCQAPWGGNKRSGFGRELGEGGIDNYLSVKQVTEYISDEXPWGWYQSPSKL

SEQ ID NO: 3897 - protein, 122 aa, Rickettsia australis
AHGGANEAVINMLKEIGSSENIPKFIAKVKDKNDPFRLMGFGHRVYKNYDPRAAALKETCKAVLKELGQLENNPLLQIAIELEAIALKDEYFIERKLYPNVDSHSGIIYKAMGIPSQMSTVL

SEQ ID NO: 3898 - protein, 172 aa, Escherichia coli
DAAVEKAYKGERKISWMEIYTGEKSTQVYGQDVWLPAETLDLIREYRVAIKGPLTTPVGGGIRSLNVALRQELDLYICLRPVRYYQGTPSPVKHPELTDMVIFRENSEDIYAGIEWKADSADAEKVIKFLREEMGVKKIRFPEHCGIGIKPCSEEGTKRLVRAAIEYAIAND

SEQ ID NO: 3899 - protein, 183 aa, Triticum aestivum
  unsure (1)..(183): unsure at all Xaa locations
MAPTVMASSATSVAPFQGLKSTAGLPVSRRSNGASLGSVSNGGRIRCMQVWPIEGIKKFETLSYLPPLSTEALLKQVDYLIRSKWVPCLEFSKVGFIFREHNASPGYYDGRYWTMWKLPMFGCTDATQVXKQVEEVKERITLTPNVRINRIHNIVSACVSSSPARAQDRKAKQYSHRHLMVCL

SEQ ID NO: 3900 - protein, 409 aa, Triticum aestivum
  unsure (1)..(409): unsure at all Xaa locations
MVLESTMICIDNSEWMRNGDYSPSRFQAQADAVNLICGAKTQSNPENTVGVMTMAGKGVRVLVTPTSDLGKILACMHGLEVGPDANLPAAIQVAQKLALQHRQNERPQLXNYVFIGSPGTYDRKSGTXEAAEDRMKLGALDVPLGDLIXGESDDQAPEKLEALIAAVNSSDSSHIVHVPPGDHALSDVLISHSYLYWRRXGGSGFAASAAAAAATGATGYDFGVDPNVDPELXLALRLSMEEERARQEAIAKKAAEDNQGSGXSSSTDAIMAEAELTLNAPADXNADLLKDDDDAQLLQQALAMSMDEGASGAAAVADAAMAEAAXDDQDWALALQMSVQDAEAGWSIXYEAKVFEDSAFVTSILNSLPGVDPNDPSVKDLLASLHGQGEQEEKKDTEDKPDKPEDGKN

SEQ ID NO: 3901 - protein, 481 aa, Salmonella typhimurium LT2
MTIWENAMQYQLLINGVLVDGEGERQSVYNPATGEVILEIAEASPAQVDAAVQAADNAFAEWGQTTPKARAECLLKLADSIEQNALEFARLESQNCGKPLHCVINDEIPAIVDVFRFFAGAARCLSGLAAGEYLEGHTSMIRRDPIGVVASIAPWNYPLMMAAWKLAPALAAGNCVVIKPSEITPLTALKLAVLAKDIFPPGVLNVLFGRGQTVGDVLTGHEKVRMVSLTGSIATGEHILRHTAPAIKRTHMELGGKAPVIVFDDADLDAVAQGVRTFGFYNAGQDCTAACRIYAQRGIYDALVEKLGNAVSSLKMGAPEDESTELGPLSSLAHLKRVTAAVEEAKALSHIRVITGGSQTEGKGYYFAPTLLADAKQEDAIVQREVFGPVVSITVFDDEDQVLRWANDSRYGLASSVWTQDVGRAHRLSARLQYGCTWINTHFMLVSEMPHGGQKQSGYGKDMSLYGLEDYTLVRHIMVKH

SEQ ID NO: 3902 - protein, 203 aa, Pyrococcus horikoshii
MAHGPRYRVPFRRRREGKTNYRKRLKLLKSGKPRLVVRKSLNHHIAQIIVYDPKGDRTLVSAHTRELIRDFGWKGHCGNTPSAYLLGLLIGYKAKKAGIEEAILDIGLHPPVRGSSIFAVLKGAIDAGLNVPHSPEIFPEDYRIRGEHIAEYARMLKEQDEDRFRRQFGGYLEKGLDPEKLPEHFEEVKARIIEKFESEGARE

SEQ ID NO: 3903 - protein, 343 aa, Vibrio vulnificus CMCP6
MKIKALSKLKPEEGIWMTEVDKPVLGHNDLLIKIKKTAICGTDVHIYNWDEWSQKTIPVPMVVGHEYVGEVVGIGQEVRGFEIGDRVSGEGHITCGHCRNCRGGRTHLCRNTIGVGVNRTGCFSEYLVIPAFNAFKIPANISDDLASIFDPFGNAVHTALSFDLVGEDVLITGAGPIGIMAAAVAKHVGARHVVITDVNEYRLDLARKMGVTRAVNVAEQKLDDVMAELGMTEGFDVGLEMSGNPSAFNSMLKTMNHGGRIALLGIPPSDMGIDWNQVIFKGLVIKGIYGREMFETWYKMASLIQSGLDLTPIITHHFKVDDFQQGFDIMRSGMSGKVILDWE

SEQ ID NO: 3904 - protein, 284 aa, Picea mariana
KKAAGSSYQSESFGGRAIKSLARSINGNVCVKTGGLMQSDICRLRAVAEDGGLGVGEEEEGNDFPPDSQQPRILSVLSYALRRLVTRNDQFTPKNFVTVFHGVRTPGISIAKYLERVYKYTSCSPSCFVVAYIYIDRLVHRQPNFPVISLNIHRLLLTSLMIAAKMLDDAHYNNAFYARVGGVSIAELNRLEVDFLFRLDFRLKVTASVFESYCLHLEKEMLCGASGQRIDRTLPGFHRSTDVVSSDLDIVIREESKVQVSVRCPRCSPATTMVVGDHPDPPGR

SEQ ID NO: 3905 - protein, 534 aa, Glycine max
  unsure (1)..(534): unsure at all Xaa locations
MVSPISHLPLIIVLLLSFSLANSASLQESFVQCLNLNSDRTFPFYSSIYTPSNPSFTSILDSSAQNLRLLVPSAPKPEFIFTPSRDSHVQAAVICSKKLGIHIRVRSGGHDYEGISYVSEIETPFIVVDLVKLRGINVDVKSNTAXXVQAGATTGEXVYYRIYEKSSVHGFPAGLCTSLGIGGHITGGAYGTMMRKYGLXGVDNVLDAQIVDANGRVLDREAMGEDLFWAIRGGGGGSFGILLWWKITKTMVPPTVTVFTVTKTLEQGATKILHKWQEVAPYIDENLFIRVIIQPSSDARNKTQRTIATSYNALFLGGARTLLQVMKTSFPELGLTIKDCLETSWIKSVLYIAGFPSDTPPEVLLKGKSTFKNFFKAKSDFVREPIPETGLEGLWQRLLVEDSPLMIWNPYGGRMSQFSESETPFPHRNGTLYKIQYLSLWQEGDKNAAKHIDWIRKLYNYMGPYVSSLPREAYVNYRDLDLGINTKNSTSYIQASAWGYRYYKNNFDRLVKIKTKVDPENVFRHEQSIPPLPL

SEQ ID NO: 3906 - protein, 254 aa, Arabidopsis thaliana
MENEREKQVYLAKLSEQTERYDEMVEAMKKVAQLDVELTVEERNLVSVGYKNVIGARRASWRILSSIEQKEESKGNDENVKRLKNYRKRVEDELAKVCNDILSVIDKHLIPSSNAVESTVFFYKMKGDYYRYLAEFSSGAERKEAADQSLEAYKAAVAAAENGLAPTHPVRLGLALNFSVFYYEILNSPESACQLAKQAFDDAIAELDSLNEESYKDSTLIMQLLRDNLTLWTSDLNEEGDERTKGADEPQDEN

SEQ ID NO: 3907 - protein, 348 aa, Schizosaccharomyces pombe
MTDLDLDWQLEELENGRLIPESNVVELCQRVRDILIEESNIQWISSPVTICGDIHGQLHDLLELFRIGGSCPGTKYLFLGDFVDRGFYSVETFLLLLTLKCKYPKEMTLIRGNHESRQITQVYGFYDECVRKYGSANVWRYCCEIFDYLSLGALVDGKVFCVHGGLSPSISSIDQIRLLDRKQEVPHEGAMCDLLWSDPEDISGWGLSPRGAGFLFGADVSEVFNRANDLSFIARAHQLVMEGYKIHFSDKDKQYPKFTNEEDSELDSDSASPVDDSPAPGDIITIPEKDKGSVVTVWSAPNYCYRCGNVASILQLDENQTQSFKIFGTASQERSGIPTKRPIADYFL

SEQ ID NO: 3908 - protein, 203 aa, Pyrococcus abyssi GE5
MAHGPRYRVPFRRRREGKTNYRKRLKLLKSGKPRLVVRKSLNHHIAQIIVYDPKGDRTLVSAHTRELIRDFGWKGHCGNTPSAYLLGLLIGYKAKKAGIEEAILDIGLHPPVRGSSVFAVLKGAVDAGLNVPHSPEIFPEDYRIRGEHIAEYARMLKEQDEEKFRRQFGGYLEKGLDPEKLPEHFDEVKARIIEKFESEGARE

SEQ ID NO: 3909 - protein, 359 aa, Arabidopsis thaliana
MEGDVGIGLVCQNTMDGKASNGNGLEKTVPSCCLKAMACVPEDDAKCHSTVVSGWFSEPHPRSGKKGGKAVYFNNPMWPGEAHSLKVEKVLFKDKSDFQEVLVFESATYGKVLVLDGIVQLTEKDECAYQEMIAHLPLCSISSPKNVLVVGGGDGGVLREISRHSSVEVIDICEIDKMVIDVSKKFFPELAVGFDDPRVQLHIGDAAEFLRKSPEGKYDAIIVDSSDPVGPALALVEKPFFETLARALKPGGVLCNMAESMWLHTHLIEDMISICRQTFKSVHYAWSSVPTYPSGVIGFVLCSTEGPAVDFKNPINPIEKLDGAMTHKRELKFYNSDMHRAAFALPTFLRREVASLLAS

SEQ ID NO: 3910 - protein, 122 aa, Zea mays
  unsure (1)..(122): unsure at all Xaa locations
MAGCCVFLRWPSASPSRIGYRSLVDAAADDDAAAPPSTVTVXGKERRAFAVDRLVLDSYPLRLLLETAARREERRAGGXAIFVDVDAILFEHILWLACDARSVSQILHLDLKEIIDFYAQDA

SEQ ID NO: 3911 - protein, 315 aa, Pinus pinaster
LYEMIFSAVKPLALKAAVLLNLPDIIATRGNGGPLSAEQIAFHIAAANSSSTGNSHVDVGYLYRILRFLASYGVFAEQEEADQPDDAETKKIKFGLTGISKLLVHGGNGQSRGPVLLLIANNVLLEAFQHLHESVLEGCYTFNKAHGMDLWEYLANNLEFNKIFNEAMATNTRSVMASVAKMYEDGFKSMATLVDVGGGMGSALSIIVKEHSHIRGINLDLPHVIATASITGVEHMEGNMFEHIPSADAVMMKWILHDWADEECVNCREEATTQRSEGKVLVVSSCCGDKSEACRAIGLLYDISMMVTHWWKNER

SEQ ID NO: 3912 - protein, 380 aa, Azotobacter vinelandii
MSTASCESKITYIDGDKGILLHRGYPIEQLAEKSDYLETCYLLLNGELPNADQKAKFVNNIKNHTMVHEQLKNFLNGFRRDAHPMAVMCGVVGALSAFYHDSLDINDPQHREISAIRLVAKMPTLAAMVYKYSLGQPLMYPRNDLDYAENFLHMMFNTPCEVKPISPVLAKAMDRIFVLHADHEQNASTSTVRLAGSSGANPFACIAAGIAALWGPAHGGANEAVLTMLDEIGDVSNIEKFVAKAKDKNDPFKLMGFGHRVYKNFDPRAKVMKQTCDEVLSELGINDPQLELAMKLEEIARNDPYFKERNLYPNVDFYSGIILKAIGIPTSMFTVIFALARTVGWISHWKEMLSGPYKIGRPRQLYTGYEKRDYISVEKR

SEQ ID NO: 3913 - protein, 508 aa, Ralstonia solanacearum
MTLDVTRQDPRYDTLRHGFNLRWPSSDAQAAGRIALCEKTDEVAPALQRIIDTGMRPTVRSGGHCYEDFVSNNPGGVIVDLSLLNAPEVRADGAVRVPAGMQNWNGALELYKRHGVTLPGGSCYSVGAGGHISGGGYGLLSRLQGLTVDWLSAVDIVTVDKQGRAAPRTVDAARDPDLFRACRGAGGGNFGIITSYTFARLPEAPREVALATVAFDWAAMTPERFAELLRLYGDYWATRGKDPDTWGLFSLLKLTHKSAGQIVMLTQFCNPDGTCRDLSVLNDFLARFQVCAPVPARARPPGYGPAHRQGVGQLLCSKPHTVVQYDWLTATQSLNGSGPNQRGKYKSAYMKRGFTAREAQRIYTHLTRTVQGIDLSQSLLQVDSYGGAVNKAERIADTAVPQRASVMKLQYQTYWTSAADDAGHLRWIGDFYRDVYGTPDVSAPHAGTPYPGDRYEGCYINYPDVDMLAYPFWPQLYYGDGDLYAFLQRVKRRYDPNNIFHHAMSVRP

SEQ ID NO: 3914 - protein, 291 aa, Bordetella pertussis Tohama I
MTARDPLAAIRARLAEVTACWQAAESLAQIRASFADYLAEVGPRGAAMARPRPQPLAPALAGAWIGQGARRALYCHGGGFQIGGIASHASLIARLAEAGQARILAVEYRLAPEHRYPAAIDDAFAAYQWLLANGGAPAAIIGDSAGGALALQTAQRARDAGLPLPRSLVLLSPWLDLSMQGRSYVELAEQDIFSKPAQLRAMARSYLGHLGPPPASPLWDDLSGLPPIVVHAGAHDITLDDSHTLAARVRAAGGQVQLQVFPGMCHHFQIYEALAEAQESIDALGRHLRQD

SEQ ID NO: 3915 - protein, 191 aa, Nicotiana tabacum
MTFAGTTQKCSACEKTVYLVDRLAADNRIYHKACFRCYHCKSTLKLSNFNSFEGVIYCRPHFDQLFKRTGSLDKSFEGTPKVTKPEKPVDNENGSGTKVSSLFAGTREKCVGCTKTVYPIEKVSVNGTAYHKACFKCSHGGCTISPSNYIAHEGRLYCKHHHIQLFKEKGNYSQLESDHETDPALSTQSLT

SEQ ID NO: 3916 - protein, 486 aa, Burkholderia cepacia R18194
MTNRTIELKHPRAFYIGGQWVAPSTPDTFDVLDCATEEVVATVAKAASADMQRAIDAARDAFDNGPWPRMTPQERAGYLEKFAERLEALNDEFARIWTIETGIVYKVAQPRIGLFISGAFRQYAAMAATFPFVEEQRSVTGNLGYRVYEPVGVVGEIIPWNGPAGLMAYKTAPALLAGCTLVIKSSPEAPCSAYLFAEICDEIGLPPGVVNVVTADRDVSEELVRHPGVDKITFTGSTGAGRRIASIAGDRIARVTLELGGKSPAVILDDYDIETAANVLGPSYFGYNTGQICHSLTRVIVPRAKHDAMVEALSAIAKQIVVGDPFAPETTSGPLASARQRETVERFVATGIAEGATLATGGKRPAGLARGFFFEPTVFGNVDNRSTIAQDEIFGPVLSVIPADDEASAIRMANDTPFGLNAAVFTNDRARALHVARQIRSGTVGHNGPRTDFSIGFGGFKQSGIGREGGVEGLTAFMESKTIVMA

SEQ ID NO: 3917 - protein, 188 aa, Helianthus annuus
MAFAGTTQKCMACDKTVYLVDKLTADNRVFHKACFRCHHCNGTLKLSNYNSFEGVLYCRPHFDQLFKKTGSLDKSFEGTPKIVKQPKTIDGEKPMANKVSSMFVGTKDKCLGCKNTVYPTEKVSVNGTAYHKSCFKCSHGGCTISPSNYIAHEGHLYCRHHHTQLIKEKGNLSQLEGERSARVGETAP

SEQ ID NO: 3918 - protein, 358 aa, Glycine max
  unsure (1)..(358): unsure at all Xaa locations
MSSNSDAAAATVHAHGRLAMLAAHLLPSQLTDHGALHPLHLSSQLPPTPNLAGSLTVVDERTGKKYQLQVSKEGTVKASEFKKILTGKNDKGLKLYDPGYLNTAPVRSTISYIDGDEGILRYRGYPIEELADKSTFTEVSYLIMYGSLPSESQLAEWEFAISQHSAVPQGVLDMIQSMPHDAHPMGVLVNAMSALSVFHPDANPALRGLDIYDSKQIRDKQITRVIGKITTIAAAVYLRMAGRPPVLPSNHLSYTENFLYMLDSFGNRSYKPNPRLTRVLDIIFILHAEHEMNCSTSAVRHLASSGVDVYTAIXXAVGALYGPLHGGANEAVLXXLSEIGTVXDIXRXIESVKARKRK

SEQ ID NO: 3919 - protein, 181 aa, Nicotiana tabacum
MTFAGTTQKCSACEKTVYLVDRLAADNRIYHKACFRCYHCKSTLKLSNFNSFEGVIYCRPHFDQLFKRTGSLDKSFDGTPKVTKPEKSVENENGSGSKVSSLFAGTREKCVGCTKTVYPIEKVSVNGTAYHKGCFKCSHGGCTISPSNYIAHEGRLYCKHHHIQLFKEKGNYSQLESDHET

SEQ ID NO: 3920 - protein, 448 aa, Borrelia burgdorferi B31
MVYRIKNENLDFKIDSLGECKQNNPLIDFYASEGSSHFVNEKNKIKFSVYRNEDKGDRYEDVLLEKAGPREKIYFVPRHVKAAITTCGGLCPGFNDVIRSIVRTLWKIYGVRNIYGVKFGYQGLLPESNSPFINLNPDVVDDINKFGGTILGSSRGGIKPVEIVDTLERMNINMIFNIGGDGTQKGSLLIAEEIEKRNLKIAVVGIPKTVDNDFMFVQKSFGFETAVEQAVAAVAGAHFEANSAYNGIGLVKVMGRDSGFIAAHTALSSNDVNFCLIPELDFDIEGPNGFLVHLERRLLEKESLEEIPHAVILIAEGAGQKYFDHFPKKKDDSGNLLYEDIGLYIKDKITEYFKAKNIQFTLKYIDPSYIIRSSPANASDSLYCARLGSNAVHAAMAGKTKMLISLWSTKFVHIPIKMAVIDRNKVNPNGSFWRDVLSSTGQPISMKN

SEQ ID NO: 3921 - protein, 302 aa, Glycine max; identical to SEQ ID NO: 264

SEQ ID NO: 3922 - protein, 417 aa, Pseudomonas stutzeri
MDSTALIPVQYGLDTFYFVICGALVMWMAAGFAMLEAGLVRAKNTAEILTKNIVLYALASIMYLLVGYYIMYSSPEGGIFPSLGFLIGDEHAVDLVAAGGEDAPYYSARADFFFQIVFAATCMSVVSGAVAERMKLWAFIAFAVVMTGFIYPIQGFWKWGGGFLDAAGFLDFAGSGVVHMAGAAAALAGVLLLGARKGKYGPNGQINAIPGANMPLATLGAFILWMGWFGFNGGSQLKMSTIEDANAVAQVFVNTNMGAAGGLIAALITARLLFGKSDLTMVLNGALAGLVAITAEPLTPSALQATLIGGVGGVLVVFSILGLDKLKLDDPVGAISVHGVAGMWGLLAVTADQCRRFFRQSSCLGLVSIFLWVFFASLIVWGIIKAVMGLRVSEEEEYEGVDVVECGLEAYPEFTRQ

SEQ ID NO: 3923 - protein, 185 aa, Zea mays
WGASIPRRSGNTLATRTPCTSPPRPPEEFQLALFKNQRKEYLFANRIFDLFDVKKRGAIDFGDFVRALNVFHPNIPMDEKIDFSFKLYDMDSTGFIERKEVKQMLIALLGESEMRLSDDIIETILDKTFSDADANQDGKIDRTEWENFVTRNPSLMKIMTLPYLKDITTTFPSFVFNSEVDDLVT

SEQ ID NO: 3924 - protein, 477 aa, Neisseria meningitidis Z2491
MNEYSQLIKHPDISLSPISDGIGVGNPATGEILAYVRNTGSDKLKNLIQKAAAAQKLWAAKTALERADILWRWYFLVKENKEALARLMTMEQGKSLTESRGEIDYAASFVRWFAEEARRIDGDVLTSVKASQKLIVLKQPVGVTAAITPWNFPSAMIARKAAPALAVGCAMIVKPASLTPLSAYALVVLAYEAGVPQDLLPVVSGRASEIGREFATNPIIRKISFTGSTEVGAKIFADSAADIKKLSLELGGNAPFIVFDDADLDKAVEGALASKFRNSGQTCVCTNRVYAQSGIYDAFCRKLSEKAAALKLGNGLEDGVNQGPLIEEKAVEKVEQHIADALSKGAVCLTGGKRSALGGTFFEPTVLSGVTAQMAVAREETFGPLCPVFRFETEAEVIEAANNTEYGLAAYLFTADTARQWRVGEALEYGMVGINTGLISNEAAPFGGVKRSGLGREGSKYGADEYLELKYLCMDVG

SEQ ID NO: 3925 - protein, 162 aa, Triticum aestivum
MEGRMFGLETPLMTALQHLLDVPDGESGGAGNAGGEKQGPTRAYVRDARAMAATPADVKELPGAYAFVVDMPGLGSGDIKVQVEDERVLVISGERRREEKEDAKYLRMERRMGKLMRKFVLPENADMEKISAVCRDGVLTVSVEKLPPPEPKKPKTIQVQVA

SEQ ID NO: 3926 - protein, 315 aa, Glycine max
  unsure (1)..(315): unsure at all Xaa locations
NHYPKFLSLSIHLSIAHFHANGPHTKPSHSKDSSEVSGSAAEQRRWTLNDFDIGKPLGRGKFXHVYLAREKTSNHIVALKVLFKSQLQQSQVVHQLRREVEIQSHLRHPHILRLYGYFYDQKRVYLILEYAPKGELYKELQKCKYFSERRAATYVASLARALIYCHGKHVIHRDIKPENLLIGAQSQLKIADXFGWSVHTFNRRRTMCGTLDYLPPEMVESVEHDASVDIWSLGVLCYEFLYGVPPFEAKEHSDTYRRIIQVDLKFPPKPIVSSAAKDLISQMLVKDSSQRLPLHKLLEHPWIVQNAEPSGVYRS

SEQ ID NO: 3927 - protein, 435 aa, Ralstonia eutropha JMP134
MDAAKAAFPAWSRATSQERFDILRKASDEIIARKEELGRLLSREEGKTLAEGIGEVARAGQIFAFAAGECLRAGGEAIPSVRAGVGVEITREPVGIVGMITPWNFPIAIPAWKIAPALAWGNCVVIKPADLVPGSAWALVDIIQRAGLPKGVLNLVMGRGSVVGQALLEHKDVHAISFTGSVATGRKVAATCIASNPMKKVQIEMGGKNPLVVLDDADLNTAVEVAVNGAFFSTGQRCTASSRLVVQAGIHDRFVEACIERLKSIVVDDALKQGTQIGPVVDQSQIDQDLRYIQIAKDEGGKLVFGGELLKRATPGFYLQPALFTETTNAMRISREEVFGPVANIVRVRDYDEALALANDTEFGLSAGICTTSLKYATHFKRSSEAGMVMVNLPTAGVDYHVPFGGRKGSSYGSREQGTYAKEHYTTIKTAYTMA

SEQ ID NO: 3928 - protein, 323 aa, Photorhabdus luminescens subsp. laumondii TTO1
MSNEIKRIGVLTSGGDAPGMNAAIRGVVRAGLTEGLEVFGIYDGYLGLYENRMKKLDRFSVSDMINRGGTFLGSARFPEFRDEKVRTVAIENMRKNGLDALVVIGGDGSYLGAKKLTEAGFPCIGLPGTIDNDVAGTDYTIGYFTALETVVEAIDRLRDTSTSHKRISIVEVMGRYCGDLTLSAAIAGGCEFIVLPEVSFSCDELVAEIKAGIDKGKRHAIVAITEHVCDVYELAKHIEKETHHETRATVLGHVQRGGSPVAYDRILASRMGAYSIQLLLEGYGGRCVGIQNEKLVHHDIIDAVQNMKRVFKQDWLETAKKLY

SEQ ID NO: 3929 - protein, 189 aa, Zea mays
FLDKEFINVAMGMDPEWKMYDKNLGRIEKWVMRKAFDDYEHPYLPKHILYRQKEQFSDGVGYNWIDGLKSFTEQQVTDEMMNNVAQMFPYNTPSTKEAYYYRMIFERLFPQDSARETVPWGPSIACSTPAAIEWVEQWKASNDPSGRFISSHDSAATDHTAVSRRWPTAAARPANGTVNGKDVPVPIAV

SEQ ID NO: 3930 - protein, 182 aa, Salmonella typhimurium LT2
MKTVFSLTAAAMMALSGGVSAASAFSLSSADIPADFRLTQQHVFKGFGCSGENISPQLSWRNPPAGTKSYAITVFDPDAPTGSGWWHWTMVNIPAQIHDLPTGADKKTLPAGVVQGRNDFGYAGFGGACPPPSDKPHRYQFTVWALNTATLPLDSESSGALVGFMLNAHVIAKAKFTATYGR

SEQ ID NO: 3931 - protein, 155 aa, Lycopersicon peruvianum
MDLRLMGIDNTPLFHTLHHMMEAVGEDSVNAPSKKYVRDAKAMAATPVDVKEYPDSYVFVVDMPGLKSGDIKVQVEEDNVLLISGERKREEEKEGVKFIRMERRVGNFMRKFSLPENANTDAISAVCQDGVLTVTVQKLPPPEPKKPKTIQVKVA

SEQ ID NO: 3932 - protein, 106 aa, Glycine max
SMIFFPAGTTVNRAGARMGGSFTGLKFMGGFPTKKNNHDLTFIGCNRGRIPCMPVWAPIGKKKFETLFYLPDLDDAPLGKEVEYLLRKGWISCVEFELEHRFVYRE

SEQ ID NO: 3933 - protein, 276 aa, Oryza sativa (japonica cultivar-group)
MASAAVAAAAAPLRRSLLPSLNPSCLFSSLASSSHRLSLPRALRPAGPLPSDVEDSDDSNAGDGAGEALRKSRNDLKREARRAVQWGMDLAKFSPLQIKRILRAASLDREVFDALMLVKRFGSDVREGKRRQFNYIGRLLRGAQPELMDTLIQYSKDGDDNRLLALMSENTFLMEDEEIEDLPCNEEEGDKEHIEIADRWFEGLLSKDISVTNEIYAIHNVEFDRQELRKLVRTVHMVQDNIENEHEEESTMKLLGAKKQLLCFLRSIAKEAYVKS

SEQ ID NO: 3934 - protein, 196 aa, Glycine max
MGERVKGTVKWFNVTKGFGFISPDDGGEDLFVHQSSIKSDGYRSLNENDAVEFEIITGDDGRTKANDVTAPGGGALSGGSRPVEGGGDRGGRGGYGGGGGGYGGGGGGYGGGGGGYGGGGGGYGGGGYGGGGGGGPCLLQVGREEGPSSPMASRGRRPPARPPPVNGYKWRLRKGHLLSGTAPQRGLGWSSGFTEI

SEQ ID NO: 3935 - protein, 117 aa, Fragaria x ananassa
MASSTAMKLSLVALLCIVVALPIAQAITCGQVASNISPCLTYVKSGGAVPAACCSGIRNLNGMAKTTADRQAACNCLKQAAGGIKGLNPNLAAGLPGKCGVSVPYKISTTTNCAAVK

SEQ ID NO: 3936 - protein, 66 aa, Glycine max
MVQFFSAVSILILVAVAASMVVLPLMLPPLPPPPLILLFFPVGIMAALMLLAFVPSEVPMATNLIL

SEQ ID NO: 3937 - protein, 470 aa, Schizosaccharomyces pombe
MVSLKKKSKRRTTRLRSRIEKKAAESKRKQKRADKKNPQWKSRIPKDPGIPNSFPYKDKILAEIEEQKRIREEEKLARRASGQVDAAMEEEDAVDENGSLMISKIAEAAQASNPDDEEEFVMEEDNLGEAPLLVDSESYEASVKADTSRKAYDKEFKKVVEASDVILYVLDARDPEGTRSKDVERQVLASSAEEKRLIFVINKIDLVPSEVLNKWVTYLRNFFPTIPMRSASGSGNSNLKHQSASASSTISNLLKSLKSYSAKKKLKSSLTVGVIGYPNVGKSSVINALVNRSANGRSAPCPAGNVAGMTTSLREVKLDNKLRLVDSPGIVFPSSDSKDDLYRLVMLNAVSSTKVDDPVAVASYILQFLSRVPGQLERMFQRYELPPLLNTSDIDTATDFLVNIARKRGRLGRGGIPNLNAAANIVINDWHAGRIEWWAEPEVINEKNSSEVQDTQIVTEWAKEFDLNDF

SEQ ID NO: 3938 - protein, 470 aa, Pirellula sp. 1
MPQITSRIGRRLGETRWMLRIWALNRNAIVFGNSSSPGSVIVAELAHHNLDIKRVAILFAGGPAPAANAVISTAAFSFLEEGAQVFGIKHGYSRLAEYTAAGPLQEGTDYIRFTHDSLTHARSSRGIMIGTARTNPGKHVSSPEHLKDPELVAPLRRVYEGLCSLEVDALISIGGDDTLKTANKLKMFQDNLPGDARRFPVVHLPKTIDNDYSGIDFTFGFFTAVETLAEEIRNLNYDAAAGRAYFLCEAMGRSAGWLAYGAAIAGEASMVLSVEDITGALADEEVVNQETGETRKIMAMDRVIDRMVDMMLAREREGRQYGTIVIAEGMAEYLPAKYLEGVTRDDHGHINISLVNLSAVMSRLLAARYNERTGRTRKVNGLQMGYESRCAPPHAYDVMLGSQLGVGAYRALVEEKLNGVMVSVSGQFDLHFVPFEELVDPQTLVTKVRFIEQNSDFHRLARFLETCVDN

SEQ ID NO: 3939 - protein, 209 aa, Zea mays
MGRGLGAAPVSPRLASLGAAALALLVAAALPSPAAGAGLNATAVLSAFPNFADFARLLASTPVASELAGRSSLTLLAVPNANLPQSPSAFVAGADIADVLRYHVLLEYLSPSDLARLPPSGKLVTTLFQTTGRAPSDFGAVNLTVGPNSTVVVRSPAPSPGSSATVLGAVTAVPYNLSVLAVGGLIVPSRIDLAASMLQASGVASEFEA

SEQ ID NO: 3940 - protein, 211 aa, Schizosaccharomyces pombe
MASNTAPKNVVTINQKLVLLGDSAVGKSSLVLRFVKDQFDDYRESTIGAAFLTQTLPIDENTSVKLEIWDTAGQERYKSLAPMYYRNANCAIVVYDITQAASLEKAKSWIKELQRQAPEGIVIALAGNKLDLAQERRAVEKADAEAYAAEANLLFFETSAKTAENVNELFTAIAKKLPLEDKLNQARGAVNRGVNLSEARPAAQPSGSCSC

SEQ ID NO: 3941 - protein, 321 aa, Pasteurella multocida subsp. multocida str. Pm70
MIKKIAVLTSGGDAPGMNAAIRGVVRSALAAGLEVYGIYEGYYGLYHNKVKQMTRYSVSDIINRGGTFLGSARFPEFKDPAVRAKCAEILRSHGIDALVVIGGDGSYMGAKLLTEEHGFPCVGIPGTIDNDVAGTDYTIGYQTALQTAVEAIDRLRDTSSSHQRISIVEIMGRHCSDLAISAGIAGGCEYIVASEVEFNREELIQQIERSIIKGKRHAIIAITELICDVNELAREIESRVKHETRATILGHIQRGGTPCAFDRILGSRMGVYAVDLLMQGKGGYCVGIQNEQLVHHDIIDAINNMRREFKADWLALSKRLD

SEQ ID NO: 3942 - protein, 320 aa, Buchnera aphidicola str. Sg (Schizaphis graminum)
MIKKIGVLTSGGDAPGMNAAIRGVVRTALSEKLEVFGIYDGYLGLYENRMTLLDRYSVSDMINRGGTFLGSARFPGFYKNEIRTIAVNNLNKRNIDALVVIGGDGSYIGAQKLTKMGIPCISIPGTIDNDVAGTDYTIGYFTALETVVEAIDRLRDTSSSHQRISIVEVMGRYCGDLTLAAAIAGGCEFIVLPEIHYKKEELVSEIQAGIEKGKKHAIVAITEYICDVEKLAKYIEKKTNRETRATILGHIQRGGAPVVYDRILASRMGAYAVELLIEGYKGKCVGIQNEKMVFNDITDALKNMKRVFKKDWLITAKKLY

SEQ ID NO: 3943 - protein, 457 aa, Bordetella parapertussis 12822
MARPLDTLLANTLVFLEGQGLVPGSIGIADGRIAVIGSHGQDMPAARETIDCQGLWTLPGVIDPHVHFGFGSPETDFETESRNAALGGTTSVISFHRSADIRESFDAVRARAESQSCIDFGFHFGITSRLHVDTLDEISRRFGVSSYKLYMMYKGAAGLSKGFTDIDDGLLWGALNATRAIPGAVLGVHCENVEVIPWLRDPLRAAGRDDLAAWNEQSPDFLEAENVHRVCYFAGKTGTPVNIVHLSSREALREVRRHRHEGRAAPIYVETCPHYLFLDDRSPAGTYAKVNPPVRSAADIDAMWEGVCDGAITTIGSDHVPRKRATKDKDIWAASNGFPGTGMILPILLHEGYHRRQVPLETLMRVASGASARIYGMPAKGRIAVGNDADLVIVDPDLEKTVDPGELESHADYSPYEGMRLKGWPVRTLVRGRTVARDGRIADEARQTPGGRYLRRL

SEQ ID NO: 3944 - protein, 173 aa, Flaveria bidentis
MASIPATFATVAQANMVAPFTGLKANAAFPVTKKVNGFSTLPSNGGRVQCMKVWPPVGKKKYETLSYLPELTEAQLAKEIDYLIRNKWVPCLEFELEHGFVYRENARSPGYYDGRYWTMWKLPMFGCTDSAQVMKELQECKKEYPQAWIRIIGFDNVRQVQCVSFIASKPTGF

SEQ ID NO: 3945 - protein, 439 aa, Arabidopsis thaliana
MRKLFFFLCTHVPKQRAKFTRIMESCQKKQKLETPTELSDMPDDLIFKIFSFLPFFKEDLATRFISEYGKGLWNPDPNAIFDDESLDMTCMSFVYGSLMSKDAQILDSLHLKLRKYYIASDINFLVQLGVNRSMRELRIDFFGKTLELPCCLSTCTTLKVLVLDHLNIMSVPGWFRLPSVETLQLSSVTGGSNYVPSLIRLCSVHERLVVDQNRNKDLVNINVPTLRSLSIDNKRRGHVPLGSFWINVPSLMFLNIKDTFQTIFESMPAMIKANIEVAHDQSQSVKFIESLTSTRHLCLCSPTSENPYPNGTKFSNLVHLKLCTCSAGWQNLLACMLNDAPNLRSLTLKLRQKSDVNPKKVWEKPTVVPECLSTRLEILKWRDYEGTEHEKDMVGYILANATFLQRATFSTKDRNQCDSRFSELQSMERVSEICEFVFD

SEQ ID NO: 3946 - protein, 480 aa, Triticum aestivum
MAIAVSPTHTKQKQQQQDHRRIPSQSNHTRRQARMAIAVSGQWTRLRTLGCGASGAVVTLAADAASGELFAVKSVRAADAAQLSREQGILSGLSSPHVVGCIGGGGDRDGSYHLFLEFAPGGSLADEAARNGGRLEERAIRAYAADVLRGLAYIHGKSLVHGDVKSRNVVIGADGRAMIADFGCARALGSAGPIGGTPAFMAPEVARGEEQGPAADVWALGCTVVEMATGRAPWGEMDNVLAAVHRIGYTDAVPEVPTWLSAEAKSFLAMCFARNARDRCTAAQLLEHPFVALQAGEAKARWVSPKSTLDAAFWESETDEEEEEEEEVSESPSERIKSLSCSVLPDWDSDEGWIDVLGEQCEACDSPAATKGPADVSSRAPSKVLGSPAVPAEDVAVVGTLSSDEHEVDAEDEPFGDDTILAADPSVDRQNQVCSSSDRDVLSSSHVPCNNRVLAIEKFRFPQKKKKKKKKKKKKKKKKK

SEQ ID NO: 3947 - protein, 173 aa, Flaveria bidentis
MASIPATVAAVPQTNMVAPFTGLKANAAFPVTKKVNGFSTLPSNGGRVQCMKVWPPVGKKKYETLSYLPELTEAQLAKEVDYLIRNKWVPCLEFELEHGFVYRENASSPGYYDGRYWTMWKLPMFGCTDSAQVMKELQECKKEYPQAWIRIIGFDNVRQVQCVSFIASKPTGF

SEQ ID NO: 3948 - protein, 502 aa, Oryza sativa (japonica cultivar-group)
MAAANGGDSKGFEVPKLEIKFTKLFINGRFVDAVSGKTFETRDPRTGEVIAKIAEGDKADIDLAVKAAREAFDHGPWPRMSGFARGRILHKFADLVEQHVEELAALDTVDAGKLFAMGKLVDIPGGANLLRYYAGAADKVHGETLKMARPCHGYTLKEPVGVVGHIVPWNYPTTMFFFKASPALAAGCTMVVKPAEQTPLSALFYAHLAKLAGVPDGVLNVVPGFGPTAGAAISSHMDIDKVSFTGSTEVGRLVMEAAAKSNLKPVSLELGGKSPVIVFDDADLDTAVNLVHMASYTNKGEICVAGSRIYVQEGIYDAFVKKATEMAKKSVVGDPFNPRVHQGPQIDKEQYEKILKYIDIGKREGATLVTGGKPCGENGYYIEPTIFTDVKEEMSIAQEEIFGPVMALMKFKTVEEAIQKANSTRYGLAAGIVTKNIDVANTVSRSIRAGAIWINCYLGFDPDVPFGGYKMSGFGKDMGMDALEKYLHTKAVVTPLYNTPWL

SEQ ID NO: 3949 - protein, 256 aa, Glycine max
MEAKKIPEVILNSGKKMPVIGLGTASIPLPSHEALTSILIDAFEVGYRHFDTASLYESEESLGKAVAKALELGLINSREELFITSKLWSTDAHPDLVVPALKTSLQKLGLEYVDLYLIHWPVRLKPEAKGYHNILKENVLPSFDMKGIWEAMEECYRLGLAKSIGVSNFGIKKLSQLLENATIPPAVNQVEMSPAWQQGKLKEFCKQKGIHVSAWSPLGAYKSAQGTNAVMESPILKEIACERQKSMAQVLLVSQS

SEQ ID NO: 3950 - protein, 207 aa, Zea mays
  unsure (1)..(207): unsure at all Xaa locations
MGERVKGTVKWFNVTKGFGFISPEDGSEDLFVHQSAIKADGYRSLNENDVVEFEVITGDDGRTKAADVTAPGGGALAGGSRPGDGGGDRGGRGGGGYGGGGYGGGGGGGYGGGGGGYGSGGGSYDGGGGYGGGGGGGRYGGGXGGGGRECYKCGEEGHISRDCPQGGGGGGGGYGGGGGRGGGGGGGGCFSCGESGHFSRECPNKTN

SEQ ID NO: 3951 - protein, 495 aa, Mesorhizobium loti MAFF303099
MNLPPNALWIDQDDYDVRGFSHGLYIDGRWRPSSDGRVIDVVDPSSGSVIAAVPDATLEDALAAVDAAAKAATAWRETAPRKRSEILRRCFELMVERSETLAMLISLENGKALRDARGEVAYAAEFFRWNAEEAVRITGEFGTAPSGANRIVVDYEPIGICVLITPWNFPAAMATRKIAPALAAGCTVILKPASETPLTAYALAALYSEAGVPAGVVNVLTTTSPGPLTSAMLADPRVRKLSFTGSTGVGRTLLGEAAKHVVSCSMELGGNAPFVVFDDADLDAALDGAMIAKMRNAGEACTAANRIYVQSGIHDAFADGLRKRMAALKVGPGMSADTECGPMITRKAVDKIDRLVKDAVGRGAKVLCGGSIPEEEGFFYPPTVLSQVPPDADMAHEEIFGPVAPVTRFETEAEVIMHANNTEYGLAAYIYTRDVGRGLRVASRIEAGMIGLNRGLMSDPAAPFGGVKQSGLGREGGQHHGIAEFMEAKYIAVTF

SEQ ID NO: 3952 - protein, 407 aa, Vibrio parahaemolyticus RIMD 2210633
MDIILGVVMFTLIVLALVLVILFAKSKLVPTGDITISVNGDADKAIVTQPGGKLLSALAGAGVFVSSACGGGGSCGQCRVKVKSGGGDILPTELDHITKGEAREGERLACQVAVKTDMDIELPEEIFGVKKWECTVISNDNKATFIKELKLQIPDGESVPFRAGGYIQIEAPAHHVKYADYDIPQEYREDWEKFNLFRYESKVNEETIRAYSMANYPEEHGIIMLNVRIATPPPNNPDVPPGIMSSYIWSLKEGDKCTISGPFGEFFAKDTDAEMVFIGGGAGMAPMRSHIFDQLKRLHSKRKMSFWYGARSKREMFYVEDFDGLAAENDNFVWHCALSDPLPEDNWDGYTGFIHNVLYENYLRDHEAPEDCEYYMCGPPMMNAAVIGMLKDLGVEDENILLDDFGG

SEQ ID NO: 3953 - protein, 488 aa, Arabidopsis thaliana
MSSPRSNKPKIVNGPGGYILQDVPHLIDYLPDLPTYPNPLQDNPAYSVVKQYFVHADDSVPEKVVVHKDGPRGVHFRRAGPRQKVYFESDEVHACIVTCGGLCPGLNTVIREVVSSLSYMYGVKRILGIDVSLGGYRGFYAKNTIPLNSKVVNDIHKRGGTIIGTSRGGHDTNKIVDSIQDRGINQVYIIGGDGTQRGASVIFEEIRRRRLKVAVVGIPKTIDNDIPVIDKSFGFDTAVEEAQRAINAAHVEAESNENGIGFVKLMGRYSGYIAMYATLASRDVDCCLIPESPFYLEGEGGLFEFIERRLKDHGHMVIVLAEGAGQDLMCKSMESTPMDASGNKLLKDVGLWLSQSIKDHFKKNKMVMNLKYIDPTYMIRAVPSNASDNVYCTLLAQSAVHGAMAGYTGYTSGLVNGRQTYIPFYRITETQNNVVITDRMWARLLSSTNQPSFLGPKDTSEEKKELPETPLLDDGAVDIPPVTKEVTK

SEQ ID NO: 3954 - protein, 190 aa, Triticum aestivum
MTVQTSNRGVSLRCSLGDALISNPSYPSIQRHRDSSCYLAKLPPSHSPLAAAAAASNPRLWPPAPPRARNSFSVPVDSREAAMEHGSVADSSASTFSIMEEDHTLANSVRFVLNQDPRVAFCGYSIPHPADNKVNIRVQTTGDPAKDVMKDALQDLMVMGQHVRGTFDKAVADFKSKMPAEQMDVDLNQQ

SEQ ID NO: 3955 - protein, 428 aa, Rhodobacter sphaeroides 2.4.1
MTKSAKLTIGEKVIDLPIHSPTLGPDVVDIRKLYAEADVFTYDPGFTSTAACESTITYIDGDKGELFYRGYPIEQLADRSHYLEVCYLLLYGELPNAAQQADFEYRITRHTMLHEQIHYFFRGFRRDSHPMATMVGVVGAMSAFYHDSLDINDPWQREVAAIRMIAKLPTIAAMAYKYSIGQPFNYPQNHLDYAGNFLHMCFAVPAEPYTVNPVLAKAMDRIMMLHADHEQNASTSTVRLAGSSGANPFACIAAGIACLWGPAHGGANRACLEMLREIGTVDRIPEYIRRAKDKDDPFRLMGFGHRVYKNFDPRAKVMKESADEVLGLLGIENNPTLQVAKELERIALEDDYFVAKKLYPNVDFYSGIILDAMGFPTSMFTPIFAISRTVGWISQWKEMIGDPTQKIGRPRQLYKGETRRDYVDLRHR

SEQ ID NO: 3956 - protein, 472 aa, Ralstonia eutropha JMP134
MQTHAGLLIDGKLVQGNATLDVVNPATGEVFTTVARATEREAAAAIAAAKAAQPAWGSLALEQRRALLLRFADELEANAEDLAASLVLEQGKPLAEARQELQFAQAFVRHIAGLSLPVSVVQDDATHRIELHHKPLGVVAAIAAWNFPVLIAAYKLAPALLMGNTVVLKPAPTTPLATLQMGAILKDIFPAGVVNIITDANDLGSFLTSHPDIAKVSFTGSTATGKKVMASAGPGLKRITLELGGNDAAIVLDDANVDDIAPKIFGSAFYNCGQVCLALKRLYVHASIHNQLCEALAELARQAVVGNGADEGVTIGPLQNAMQYDKAGRFLAAARHDGKILAGGALLNGDGYFVAPTIVRDLHDQSELVAQEQFAPILPVLRYDAIDEAVVRANASPYGLGGSVWSADEDRARAVAQRLQVGTAWVNHHLHFGPHIPLVGAKESGVGVEFGTEGLAEYAQLSVINIARQQAA

SEQ ID NO: 3957 - protein, 465 aa, Aspergillus fumigatus
MAMTMRSTRHASKLAQTARLALTNSRRYSTAEPDLKTALKAVIPAKRELFKQVKERSDEVIGEVKVANVIGGMRGLKSMLWEGSVLDPEEGIRFHGKTIKDCQKELPKGTSGTEMLPEAMFWLLLTGQVPSTNQVRAFSRELAEQSHLPQHILDLIKSFPRSMHPMTQLSIAVAALNTESKFAKAYEKGLSKADYWEPTFDDSISLLAKIPRVAALVFRPDEVDQVGTQALDASQDWSYNFAELLGKGGKENQDFHDLLRLYLALHGDHEGGNVSAHATHLVGSALSDPFLSYSAGLLGLAGPLHGLAAQEVLRWILAMQDKIGTKFTDDDVRNYLWDTLKSGRVVPGYGHGVLRKPDPRFQALMDFAATRPDVLANPVFQLVKKNSEIAPAVLTEHGKTKNPHPNVDAASGVLFYHYGFQQPLYYTVTFGVSRALGPLVQLIWDRALGLPIERPKSINLLGLKK

SEQ ID NO: 3958 - protein, 497 aa, Spinacia oleracea
MAFPIPARQLFIDGEWREPIKKNRIPVINPSTEEVIGDIPAATAEDVEVAVVAARRAFRRNNWSATSGAHRATYLRAIAAKITEKKDHFVKLETIDSGKPFDEAVLDIDDVASRFEYFAGQAEALDGKQKAPVTLPMERFKSHVLRQPLGVVGLISPWNYPLLMATWKIAPALAAGCTAVLKPSELASVTCLEFGEVCNEVGLPPGVLNILTGLGPDAGAPLVSHPDVDKIAFTGSSATGSKVMASAAQLVKPVTLELGGKSPIVVFEDVDIDKVVEWTIFGCFWTNGQICSATSRLLVHESIAAEFVDKLVKWTKNIKISDPFEEGCRLGPVISKGQYDKIMKFISTAKSEGATILYGGSRPEHLKKGYYIEPTIVTDISTSMQIWKEEVFGPVLCVKTFSSEDEAIALANDTEYGLAAAVFSNDLERCERITKALEVGAVWVNCSQPCFVQAPWGGIKRSGFGRELGEWGIQNYLNIKQVTQDISDEPWGWYKSP

SEQ ID NO: 3959 - protein, 486 aa, Pseudomonas sp. KL28
MRQIENFIAGEFVASASGKRFDKHSPLDNRIICSVSEAGRGEVDAAVRAARSALQGEWGGLTTEQRIELLYGVANEITRRFDDFVEAEMSDTGQPEHVMKHVFIPRGAANFKVFADVIKNVASESFQMDTPDGRGALNYSIRRPKGVIGVVCPWNAPFMLMTWKVGPALACGNTVVVKPSEESPQTAALLGEVMNAVGIPKGVYNVVHGFGPDSAGEFVTRHPQVDAITFTGETRTGTAIMKAASEGMRDVSFELGGKNAGIVFADADFEAAVESFSRSVFLNTGQVCLGTERVYVERPIFERFVQALKVKAEAVKYGRPDDHQANYGPLISQEHKQKVLSYYRKAVEEGATLVTGGGVPQMPGELAEGAWVQPTIWTGLPETAAVVQEEIFGPCCHISPFDSEDEVVEKANATDYGLSTTIWTSNLARAHRMAGRIDVGITWINSWFLRDLRTPFGGSKQSGIGREGGVHSLEFYTETRNVCVKL

SEQ ID NO: 3960 - protein, 146 aa, Brassica napus
  unsure (1)..(146): unsure at all Xaa locations
SPDYVAPSSNSLNRPNSRGSDPDGPNTIPMFANGASTPVFDGASFRQQANHAAESINRNSTRAKESEARNENEWVEQDEPGVYITLTALPGGARDLKRVRFSRKRFSEKQAEEWWAENRGRVYEQYNVRLVVDKSSVGVXSEDLAH

SEQ ID NO: 3961 - protein, 212 aa, Oryza sativa (japonica cultivar-group)
MAEGAELVGESAHQDMPRVVAALAGILERVAGRNDAAATPAELAAAPASPFRATAKPGISVRAYAARIARFAGCSPACYVVAYIYLDRLLRRGRRCLALALAVDSYSVHRLLITAVLSAVKFMDDICYNNAYFAKVGGISLAEMNYLEVDFLFGVGFDLNVTPETFADYCAVLQSEMLCAAPPTRLHYCCLSEDDAGSSSSSSLREAAMEAS

SEQ ID NO: 3962 - protein, 226 aa, Glycine max
MASNAKRSRQVSHYEVKRTLYNDIYLRRSQFQAPSPCSSRILFLRSTTIITSFSLRTDHTMATSSAKSVHDFTVKDAKGNDINLGDYKGKVLIIVNVASQCGLTNSNYTELSQLYEKYKQKGLEILAFPCNQFGAQEPGSNEQIQEFVCTRFKAEFPVFDKVDVNGDKAAPLYKYLKSSKGGLFGDGIKWNFSKFLVDKEGNVVDRYAPTTSPLSIEKDLLKLLDA

SEQ ID NO: 3963 - protein, 239 aa, Glycine max
MEAKKIPEVILNSGKKMPVIGLGTASIPLPSHEALTSILIDAFEVGYRHFDTASLYESEESLGKAVAKALELGLINSREELFITSKLWSTDAHPDLVVPALKTSLQKLGLEYVDLYLIHWPVRLKPEAKGYHEAMEECYRLGLAKSIGVSNFGIKKLSQLLENATIPPAVNQVEMSPTWQQGKLKEFCKQKGIHVSAWSPLGAYKSAQGTNAVMESPILKEIACERQKSMAQVLLVSQS

SEQ ID NO: 3964 - protein, 472 aa, Podospora anserina
MAPAMRLTSSALRASLKASSFATKQTAFTAARCYSSKTQTLKERFAELLPEKIEEIKALRKEHGSKVVDKVTLDQVYGGARGIKCLVWEGSVLDAEEGIRFRGKTIPECQQVLPKAPGGSEPLPEGLFWLLLTGEVPTEQQVRDLSADWAARAEIPKFVEELIDRCPSDLHPMAQFSMAVTALEQTSSFARAYAKGINKKEYWGYTFEDSMDLIAKLPTIAARIYQNVFKGGKVAPVQKDKDYSFNFANQLGFGNNADFIELMRLYLTIHTDHEGGNVSAHTTHLVGSALSSPFLSLAAGLNGLAGPLHGLANQEVLNWLTEMKKVIGDDISDESITKYLWDTLNSGRVVPGYGHAVLRKTDPRYSAQREFAQKHMSEDPMFKLVSQVYKIAPKVLTEHGKTKNPYPNVDAHSGVLLQYYGLTEANYYTVLFGVSRAIGVLPQLIIDRAVGAPIERPKSFSTEKWIEICKKL

SEQ ID NO: 3965 - protein, 244 aa, Zea mays
MVGGGGGGPLRRVGKYEVGRTIGEGTFAKVKFAQNTETGESVAMKVLDRSSILKNKLAVLIKREISIMKLVRHPNVVRLHEVLASRKKIFIILEFITGGELFDKIIRHGRLSEADARRYFQQLIDGVDFCHKKGVYHRDLKPENLLLDSQGNLKISDFGLSAWPAQGSFLLRTTCGTPNYVAPEVLSHKGYNGALADTWSCGVILYVLLAGYLPFDEVDLTTLYGKIESAEYSFPALFQVVQNH

SEQ ID NO: 3966 - protein, 206 aa, Emericella nidulans
MATNITHHAGLTRNERNQLRKQKGLTIWLTGLSASGKSTIAVELEHQLLQRGLHAYRLDGDNVRFGLNKDLGFSDADRNENIRRIAEVAKLFADSSSIAITSFISPFRADRDTARKLHEVPTPNDSTGLPFVEVFVDVPIEVAEKRDPKGLYKKAREGIIKEFTGISSPYEAPENPEVHVKNVDLPIQEAVKQIIDYLDSKKLLDA

SEQ ID NO: 3967 - protein, 386 aa, Corynebacterium glutamicum ATCC 13032
MIVSTQPITDRSALSAEHAEVIKATLPLVGGKINEITPVFYNKMFAAHPELIANTFNRGNQKQGDQQKALAASIATFATMLVTPDAPDPVQLLSRIGHKHVSLGITADQYDIVHEHLFAAIVEVLGAETVTAPVAEAWDAVYWIMANVLIGFENNLYASNDLEPGDVFREVTVTAKKQLSATVWEYTLAGELVAPEPGQYTSIGVVLDDGARQLRQYSLLGGSDTEYRIAVEDNGEVSGFLRDRVSVGDKIEATIAAGDLVLNKDTNPVVLISQGIGSTPMVGMLAGMNPERDVVVLHADQAESTYAQVEEVQGLVEKLPKAAFEIFYRDNDQWLEVAGRIPSGASVYLCGGVEFLKNVREQIEALDEQPRDVNFELFAPNDWLIS

SEQ ID NO: 3968 - protein, 562 aa, Glycine max
MAPTTTVPIGTLPSGSVTGRLASVYSEVQKTRVDHALPLPSVLKHPFTILDGPPSSAAGNPDEIAKLFPHLFGQPSAALAPSGAVQTQKKLKIGVVLSGGQAPGGHNVISGIFDYLQERAPGSTLYGFKGGPAGIMKCKYVELTSEYIYPYRNQGGFDMICSGRDKIETPEQFKQAEETAKKLDLDGLVVIGGDDSNTNACLLAENFRSKNLKTSVIGCPKTIDGDLKCKEVPTSFGFDTACKIYSEMIGNVMIDARSTGKYYHFVRLMGRAASHITLECALQTHPNITIIGEEVAAKKLTLKNVTDYIVDVVCKRAEINYNYGVILIPEGLIDFIPEVQHLIAELNEILAHDTVDEGGLWKKKLTDQSLKLFDFLPQAIQEQLMLERDPHGNVQVAKIETEKMLIQMVETELEKRKQEGKYNGEFKGQSHFFGYEGRCGLPTNFDATYCYALGYGAGALLHSGKTGLISSVANLCAPVEEWTVGGTALTSLMDVERRHGKFKPVIKKAMVELEGAPFKKFASLRDEWALKNCYISPGPIQFSGPGSEVINHTLLLELEALA

SEQ ID NO: 3969 - protein, 423 aa, Exiguobacterium sp. 255-15
MAIRIDHATWYKNGQLQKSSIRMEDGIFTDLDATPLETDQVIDATGYTVAPGFVDVHVHLREPGGEHKETIATGTAAAAAGGFTTICPMPNTRPVPDDRETLDALFKKIEETASVRVFPYAAISKNQLGQELVAFEQLTDAFAFTDDGVGVQSAAVMREAMTRAAAVHKSIIAHCEDDSLKAGCVHEGAYSAREGLQGIPSLAESIHIARDVLIAEATGCHYHVCHVSTKESVRVIRDAKRAGIRVTAEVTPHHLVLTEDDIIGRDPNFKMNPPLRSEADRQALLAGLQDGTIDCIATDHAPHAAEEKAIGIERAPFGITGFETAFPLLYTKLVEPGIFTLNQLFDWMSRNPADLFDLPFGRIEVGAPADLVLLDLETVRAVQPDQFLSKGKNTPFAGASLTGYPVLTLVGGEIVFKGEKAHV

SEQ ID NO: 3970 - protein, 507 aa, Oryza sativa (japonica cultivar-group)
MGSTGDCGNGKAAAGGGGLVVPEIKFTKLFINGEFVDAASGKTFKTRDPRTGDVLAHIAEADKADVDLAVKAAREAFEHGKWPRMSGYERSRVMNKLADLVEQHADELAALDGADAGKLLTLGKIIDMPAAAQMMRYYAGAADKIHGESLRVAGKYQGYTLREPIGVVGVIIPWNFPTMMFFLKVSPALAAGCTIVVKPAEQTPLSALYYAHLAKLAGVPDGVINVVPGFGPTAGAALSSHMDVDSVAFTGSAEIGRAIMESAARSNLKNVSLELGGKSPMIVFDDADVDMAVSLSSLAVFFNKGEICVAGSRVYVQEGIYDEFVKKAVEAAKNWKVGDPFDAATNMGPQVDKVQFERVLKYIEIGKNEGATLLTGGKPTGDKGYYIEPTIFVDVKEEMTIAQEEIFGPVMSLMKFKTVEEAIEKANCTKYGLAAGIVTKNLNIANMVSRSVRAGTVWVNCYFAFDPDAPFGGYKMSGFGRDQGMVAMDKYLQVKTVITAVPDSPWY

SEQ ID NO: 3971 - protein, 326 aa, Erwinia carotovora subsp. atroseptica SCRI1043
MKIGLVISGGDVSGINNFIFQVNRMTASDIVIFDGGINGLIDNCCKVLTRRDLVDYSLSSMPLVTSGRKTGKCRKTDYEKIVKNIQKQKLDALIMAGGDGSFQFLKKLSCYGIHCYGIGMTIDNDISGNSYTIGFSTACEQVMSEVEKLRNTGRGLQGRVFMIELLGGYCGELTLQAALKSNADIALIPESPWDIDALSQCILDKIAEQNSVIILCSEGYTHEYTPGFQGAIDTIIKKLEHKIGIRIRKTILGYGLRNGAPTGEEIIQGTLLAEEVVRCINAGLTNKIIIINNNNKAIPIDLEDSERRLVDIESHFYKLAKSHHLI

SEQ ID NO: 3972 - protein, 402 aa, Arabidopsis thaliana
MAEISGLPDDLLVKILAFLPTKVAISTSVLSKQWRFLWMWLPKLKYDDYDDITDGFNSVSAFQTYRDFIAKNLPLHRAPIIESLSLGFRCGTLQPEDLKSWVEVAVSRSVRELSILAYYRNNYALSSSSLYTCKSLVTLKGFNIRVDVPPTVCLLPSLRTLELKRVRYLNEDSLRMLLSFCPVLEYLSIERHDNDNLRGLVVDVPSLRRLSLTSYTGCSSDDYVIVTPSLKYFKAFDYRSEISSYKIEKIPELEEADISIERNPEKLFVYFKSIKCLSLQVDFNSKEEPGYDSGIVFNHLEELTPYINDANWSKLLFRLLNDSPKLRVLEISNSKSFYKEKIGEYLPVSWSKNQGSVPKCFLNSLETFRVKWYYSEEQEDRDFLSLIFKHARCLKSTSILHR

SEQ ID NO: 3973 - protein, 372 aa, Arabidopsis thaliana
MAKISDLSDELLMWLSKLEFYFSDGSESACLRDFIAKNLPLHKAPIIESLRFCSFFGSLQPKDLKSWVRIAVSRCVRELSISLHDTTAAVSLPSSLYTCKSLVTLKLYGKKVLLDVPRTVFLPSLKTLQLERLRYSDEDSLRLLLSYCPVLEDLSIVREDYDNLRALVVIVPSLQRLSLEIPGNCSSDGYVIVTPSLKYFKVVDYRESMSYLIEQMPELEEADIVVLQYPEKLLESVTFFKRLSIRVIFNTYTETVYRDGIVFNRLENLKLCICNGDWSKLLIQFLKDSPNLRVLNLLVDDYPSSLGDYEPVRWKNNKSSVPKCLLESLETFEFAGYIGTPEERDFLSYIFKHARCLKSSSILSRPERYHGI

SEQ ID NO: 3974 - protein, 182 aa, Burkholderia cepacia R18194
MSTIYDIPVNAIDGAQTTLRPYEGKVLLVVNVASKCGLTPQYEGLEALYEGKRAEGLEVLAFPANNFKGQEPGTDAEIQSFCTGTFGVKFPLFSKISVIGDDKHPLYRSLTQAQPQATGDGPFRTRLEGYGIQPNPAPEVLWNFEKFLVSRTGEVVARFSPDTTADDPKLVAAIDAELAKAA

SEQ ID NO: 3975 - protein, 472 aa, Arabidopsis thaliana
MSTASVIIIGAGISGISAAKILVENGVEDVLILEATDRIGGRIHKQNFGDVPVELGAGWIAGVGGKESNPVWELASRFNLRTCFSDYTNARFNIYDRSGKIFPTGIASDSYKKAVDSAILKLKSLEAQCSGQVAEEAPSSPKTPIELAIDFILHDFEMAEVEPISTYVDFGEREFLVADERGYECLLYKMAEEFLVTSHGNILDYRLKLNQVVREVQQSRNGVVVKTEDGSVYEANYVIVSASIGVLQSDLLSFQPLLPRWKTEAIQKCDVMVYTKIFLKFPQCFWPCGPGQEFFIYAHEQRGYFTFWQHMENAYPGSNILVVTLTNEQSKRVEAQSDQETMKEAMSVLRDMFGATIPYATDILVPRWWNNRFQRGSYSNYPMISDNQLLQNIKAPVGRIFFTGEHTSEKFSGYVHGGYLAGIDTSKSLLEEMKQSLLLQPLLAFTESLTLTHQKPNNSQIYTNVKFISGTS

SEQ ID NO: 3976 - protein, 100 aa, Glycine max
MSGVWVFKNGVVRLVENHGSDRKVLVHTASNEIITSYAVLEHKLSSLGWERYYDDPDLLQFHKRSTVHLISLPTRPNKFRSMHMYDIVVKNKNYFEVRDI

SEQ ID NO: 3977 - protein, 360 aa, Azotobacter vinelandii
MSKQILVLPGDGIGPEIMAEAVKVLQLANEKYQLGFVLGYDELGGAAVDKYGVPLADETLERARAADAILLGAVGGPKWDAIDPAIRPERGLLKIRSQLGLFGNLRPALLYPQLAEASTLRPEVVAGLDILIVRELTGGIYFGAPRESRLLANGERMAYDTLPYSESEIRRIAKVGFDMARVRGKKLCSVDKANVLASSQLWRAVVEEVAKDYPDVVLSHMYVDNAAMQLVRAPKQFDVIVTDNMFGDILSDEASMLTGSIGMLPSASLDADNKGMYEPCHGSAPDIAGKGIANPLATILSVSMMLRYSFGQVEAANAIEQAVSKVLDQGLRTGDIWSEGCRKVGTAEMGDAVVAALATL

SEQ ID NO: 3978 - protein, 277 aa, Triticum aestivum
  unsure (1)..(277): unsure at all Xaa locations
AGRVWHGGLTAVMKLTKLFIEKGAAGIHIEDQAPGTKKCGHMAGKVLVPIQEHINRLVAIRAQADIMGSDLLAIARTDAEAATLLSTNIDPRDHAFILGSTNSTLKPLNDLMIAAEATGKSGAELQRIEDEWLAKANLSSFDDAVAAAIDAGSFSDKAGIKQEYTSRAKGKSNFEARAVARQLLGRNIFFDWDAPRTREGYFRLKGGCDCAVNRAIAYAPYCXAIWMESKLPDFAQAEXXAQGVHAVWPEKKLAYXLSXSXNWETAMPRDEQETTSD

SEQ ID NO: 3979 - protein, 126 aa, Sinorhizobium meliloti
MADLAKIVEDLSSLTVLEAAELSKLLEEKWGVSAAAPVAVAAAGGAAGAAAPVEEEKTEFDVILTDAGANKINVIKEVRAITGLGLKEAKDLVEGAPKAVKEAVSKAEAADLKKKLEDAGAKVDVK

SEQ ID NO: 3980 - protein, 352 aa, Pseudomonas aeruginosa PAO1
MKALRWHAARDLRLSELERQAPRPGEVELEVAYCGICGSDLHEYQSGPHSIPQAEAHPLSGCRAPLTLGHEFCGVVAALGPGVEGPRIGDRVAVEPEYRCGECRYCREGRYNLCESMGFIGLMGDGGFAERARVPAYMLHRLPDAVGFRQAAVLEPAAVALHALRRSSLAPGQRCAVFGLGPIGLLLVMLARLRGIEDIAAVDVSPERLALAGEFGASRALDARDGDTAARLREGGALDCAFEAAGSQASLDAALASLRKGGELVLVSLMGEVRLDAFDLVNRELRLLGSVGYRDAYPELIALLADGRLDLARAVTRSVPLEQAVEHGFEALLRDKSQLKVLVNPNPALADA

SEQ ID NO: 3981 - protein, 510 aa, Brucella melitensis 16M
MNTAVRKIDVKKEAADLLSKLGVDASAYTGGDLTGFSPVSGEEIASIKTHSKEDAEKIIAKADEAFRAWRTVPAPKRGELIRLLGEELRASKEDLGRLVSLEAGKIPSEGLGEVQEMIDICDFAVGLSRQLYGLTIATERAGHRMMETWHPLGVVGVISAFNFPVAVWSWNAALAIVCGNAVVWKPSEKTLLTALACDAIFKRALKRFGDAPEGISQLLLGDREIGEVLVDSPKVPVVSATGSTRMGREVGPRLAKRFARAILELGGNNAGIVCPSADLDMALRAIAFGAMGTAGQRCTTLRRLFVHESVYDALVPRLQKAYASVSVGSPLETSALVGPLIDKQAFDNMQKALKEAAAHGGKVQGGERVDTGYENAYYVRPAIVEMPRQEGPVLEETFAPILYVMKYSDFDDVLASHNAVGAGLSSSIFTLNLQEAERFLSAEGSDCGIANVNIGTSGAEIGGAFGGEKETGGGRESGSDAWKAYMRRATNTINYSKALPLAQGVSFDID

SEQ ID NO: 3982 - protein, 379 aa, Zea mays
  unsure (1)..(379): unsure at all Xaa locations
MEAGGAGSGLNGAVQAKGTGADDGSAKRLPPCCVKARAAAPESEARCHATVVSGWFTEPRSRCGKASKVQYYNNPMWPGEANSLKVEKILYQGKSLYQEVLVFESSTYGKVLVLDGIVQLTDKDECAYQEMITHLPLCSIPSPKKVLVIGGGDGGVLREVSRHSSVESIDICXCKDFFPHLSVGFQDPRVQLHVGDAVEFLRNAPEGTYDAIIVDSSDPIGPAQELVEKPFFDTIARALRPGGVLCNQAESMWLHTHLIQDMLSICRETFKGSVRYAWTSVPTYPSGVIGFLLCAKEGPLVNFLTPINPIEKLEGATKAGREIRFYNSEMHRAAFVLPTFARRELEAYCVSTETEQAEETPAAPLKLTLASRSEIFATS

SEQ ID NO: 3983 - protein, 128 aa, Triticum aestivum
  unsure (1)..(128): unsure at all Xaa locations
MVLEATMICIDNSEWMRNGDYAPSRFQAQADAVNLICGAKTQSNPENTVXVMTMAGKGVRVLVTPXSDLGKILACMHGLEXGAEANLAAAIQVAQLALKHRQNXRHIGYTSSESCEHKKFGDIGEKCA

SEQ ID NO: 3984 - protein, 132 aa, Arabidopsis thaliana
MRVTDECTSSFMDMKWKKVHRYIVFKIEEKSRKVTVDKVGGAGESYHDLEDSLPVDDCRYAVFDFDFVTVDNCRKSKIFFIAWSPEASKIRAKILYATSKDGLRRVLEGIHYELQATDPTEMGFDIIQDRAK

SEQ ID NO: 3985 - protein, 241 aa, Eschscholzia californica
MGRGRVELKRIENKINRQVTFAKRRNGLLKKAYELSVLCDAEVALIIFSNRGKLYEFCSSSSMFKTLERYQKSNYGAPETNVSVRESQEHSSHQEYLKLKARVEALQRSQRNLLGEDLGPLSGKELESLERQLDMSLKQIRSTRTQYMLDQLTDLQRREQMLSDANKTLRRRLEEGTVTCHQWEQNMQYGQQQAHAQGEGFFHPIECEPTLQMGYQQDQITVAAAAGPSMTMNSYMPGPGW

SEQ ID NO: 3986 - protein, 125 aa, Triticum aestivum
MAMEARMKGTVKWFNDTKGFGFITPADGSEDLFVHQSSIKADGFRSLAEGEVVEFAVSEGDDGRTKAVDVTGPDGSFVQGGAGGGGGGGGFGSRGGGGSRGGGGFGARGGDGSGGYGGGYGGGCG

SEQ ID NO: 3987 - protein, 268 aa, Arabidopsis thaliana
MSLNVDILKSTEIGKAVNGLRKHSSDKIRQLAKTLIAEWKELVDQWVNTTKEITGAEGTPESANPSVLDEEEAFPSLPYDVDIFTPEPNGFEISHFFDSLDFDGNPRNSEEHNTSREHERRPQNIAKRKPEGTQMRIQDAPFRSIKPSSATDFDGTRRPVKQSTEQRMKNETVSVHKSEKPMIQRKPVVTEQKRKAPGPQQEKLKGLDADAKFEFAKRKLQESYQHHENAKKQRTIQVLEMIPKQGSAQKPQLKRPGMSNRNWANGRK

SEQ ID NO: 3988 - protein, 453 aa, Zea mays
MAASARDSTDAAERVVDDHDGWASDAEMDVEMDVVEGDADRRDGGADGDDEYLLLTRIRDTSAAEARAGKDIQGIPWERIHIARQDYRKARLEQYKNYENFPQSGELMDKLCKQVEKSSKYYEFQHNTRSVKPSILHFQLRNLLWATSKHDVYFMSNSTVSHWSSLSHKLSEVLDFSGHVAPAEKYPGSLLEGFSGVQVSTLAVNEGLVVAGGFQGELIGKDVEGCSVKFCMRTTLSDNAITNAIDIHRSISGSLHITVSNNDCGVREYDMERYQLVNHYRYNWPVNHTSVSPDKKLLAVVGDDRDALLVDSRNGKVTSTLVGHLDYSFATAWHPDSRTFATGNQDKTCRIWDTRNLSTSLAVLRGNIGAIRCIRYSSDGRFLVFSEPADFVHVYSVAADYKKRQEIDFFGEVSGITLSPDDESLFIGVCDRVYASLLQYRMIRGFDYLDSYV

SEQ ID NO: 3989 - protein, 248 aa, Eschscholzia californica
MGRGRVELKRIENKINRQVTFAKRRNGILKKAFELSVLCDAEVALIIFSSRGKLYEFCSSSSILKTLERYQRCSSNASQASRSIKDNDETYQNYLKLKSRVEVLQQNQRNLLGLDLEPLSLKELDQLESQLEVSLKQVTSTKTQFMLDNLSDLQTKEEVLQEANRSLNRKMEENMAEIPQQLRWEAGDGHNIPYNRHIPITDGFYQPLECNPTFQIGSSSMKSFDHLTDPPPTVQNLLGYFPSWSFET

SEQ ID NO: 3990 - protein, 177 aa, Lemna gibba
MASSMMASTAAVARAGPAQSNMVAPFNGLRSSVAFPATRKANKNLSTLPSNGGKVSCMQVWPPEGLKKFETLSYLPPLSVEDLAKEVDYLLRNDWVPCIEFSKEGFVYRENHASPGYYDGRYWTMWKLPMFGCTDASQVIAEVEEAKKAYPEYFVRIIGFDNKRQVQCISFIAYKPT

SEQ ID NO: 3991 - protein, 346 aa, Triticum aestivum
  unsure (1)..(346): unsure at all Xaa locations
MPRVCTHLHSFDPPILQVPELKAMASPFSAPSLIMEEEGRFEAEVAEVGAWWNTERFRLTKRPYTARDVVLLRGTLRQSYASGEMAKKLWRTLKAHQAGGTASRTFGALDPVQVTMMAKHLDTIYVSGWQCSSTHTSTNEPGPDLADYPYDTVPNKVEHLFFAQQYHDRKQQEARMSLPRAERAHAPFVDFLKPIIADGDTGFGGATATVKLCKLFVERGAAGVHLEDQSSVTKKCGHMAGKVLVAVSEHVNRLVAARLQFDIMGVENVLVARTDAVAATLIQXNIDARDHXFILGAXDPRLKNGSSRHALRRMSXGRTGGAAASRQWTHGHSNSRVVRSMELTHD

SEQ ID NO: 3992 - protein, 434 aa, Shigella flexneri 2a str. 301
MKTRTQQIEELQKEWTQPRWEGITRPYSAEDVVKLRGSVNPECTLAQLGAAKMWRLLHGESKKGYINNLGALTGGQALQQAKAGIEAVYLSGWQVAADANLAASMYPDQSLYPANSVPAVVERINNTFRRADQIQWSVGIEPGDPRYVDYFLPIVADAEAGFGGVLNAFELMKAMIEAGAAAVHFEDQLASVKKCGHMGGKVLVPTQEAIQKLVAARLAADVTGVPTLLVARTDADAADLITSDCDPYDSEFITGERTSEGFFRTHAGIEQAISRGLAYAPYADLVWCETSTPDLELARRFAQAIHAKYPGKLLAYNCSPSFNWQKNLDDKTIASFQQQLSDMGYKFQFITLAGIHSMWFNMFDLANAYAQGEGMKHYVEKVQQPEFAAAKDGYTFVSHQQEVGTGYFDKVTTIIQGGTSSVTALTGSTEESQF

SEQ ID NO: 3993 - protein, 177 aa, Lemna gibba
MASSMMASTAAAVARAGPAQSSMVPFNACRSSVPFPATRKANNNLSTLPGNGGRVSCMQVWPPEGLKKFETLSYLPPLSVEDLAKEVDYLLRNDWVPCIEFSKEGFVYRENHASPGYYDGRYWTMWKLPMFGCTDASQVIAEVEEAKKAYPEYFVRIIGFDNKRQVQCISFIAYKPT

SEQ ID NO: 3994 - protein, 242 aa, Liriodendron tulipifera
MGRGRVELKRIENKINRQVTFAKRRNGLLKKAYELSVLCDAEVALIIFSNRGKLYEFCSTSSMFKTLERYQKCNYGAPEAAVTTREIQSSHQEYLKLKARVEALQRSQRNLLGEDLGPLNGKELDTLERQLDVSLKQIRSTRTQYMLDQLTDLQRREQMLSEANKALKRRLDEGMQANPHQGWNHNPHAMEYVRQQGPPQGDGFFHPLDCEPTLQIGYQTDQITMSTAPGPSLNNYMPGWLA

SEQ ID NO: 3995 - protein, 177 aa, Lemna gibba
MASSMMASTAAAVARAGPAQTNMVPFNACRSSVPFPATRKANNDLSTLPSNGGRVSCMQVWPPEGLKKFETLSYLPPLSVEDLAKEVDYLLRNDWVPCIEFSKEGFVYRENHASPGYYDGRYWTMWKLPMFGCTDASQVIAEVEEAKKAYPEYFVRIIGFDNKRQVQCISFIAYKPT

SEQ ID NO: 3996 - protein, 483 aa, Rickettsia conorii str. Malish 7
MAEFTPITIAYGDGIGPEIMEAVLYILRKAEARIRLETIEVGEKLYKKHYTSGISEESWESIQRTGIILKAPITTPQGGGYKSLNVTIRKTLQLFANIRPAVSLHPFTRTLHPNLNLTIIRENEEDLYAGIEYRQTHNMYESMKLISHTGCEKIIRYAFEYAVKNNRKKVMCLSKDNIMKFSDGVLHKVFNEIAKEYPQINNAHYIIDIGTARLATKPEIFDVIVTSNLYGDIISDVAAEISGSVGLAGSANIGQHYAMFEAVHGSAPDIAGKDIANPSGLLNAAIMMLVHIGQGDIATLIENAWKKTIEDGVHTADIYNEQSSSKKVGTKEFAEEVTKRLGQLPTKLPKADYPLIAEKQESNIDYKIDTKEVKKLVGTDIFVNMNVSSAHDIADKINKLDLGNFELKTISSKGLKLWPRDTRFETVSDHWCCRFMNKDGTEIKHLDITRLLEALSTANIDFIKVENLFEFDGVAGYSLAQGE

SEQ ID NO: 3997 - protein, 411 aa, Microbulbifer degradans 2-40
MENSIFELQYALDTFYFLVCGALVMWMAAGFAMLEAGLVRSKNTTEILTKNVALFAIACIMYFVCGYAIMYGGDYFLTTITGDGVTGAEEPASYAPSADFFFQVVFVATAMSIVSGAVAERMKLWAFLAFAVVMCGVIYPVEGGWTWGGNSVFGMYTLGDLGWSDFAGSGIVHMAGAAAALAGVLVLGARKGKYGPNGQINAIPGANLPLATLGTFILWMGWFGFNGGSVLATASVESANSVAIVFMNTNAAAAGGLVSALILARILFGKADLTMALNGALAGLVAITAEPSTPSALQATLFGGLGGLLVVFSILTLDKLKIDDPVGAISVHGVVGLLGLLLVPVTNDASSFSGQIIGALTIFTWVFGTSLAVWFLIKLVIGVRVSEEEEFEGVDLSECGMEAYPEFTNGK

SEQ ID NO: 3998 - protein, 453 aa, Zea mays
MAASARDSTDAAERVVDDHDGWASDAEMDVEMDVVEGDADRRDGGADGDDEYLLLTRIRDTSAAEARAGKDIQGIPWERIHIARQDYRKARLEQYKNYENFPQSGELMDKLCKQVEKSSKYYEFQHNTRSVKPSILHFQLRNLLWATSKHDVYFMSNSTVSHWSSLSHKLSEVLDFSGHVAPAEKYPGSLLEGFSGVQVSTLAVNEGLVVAGGFQGELIGKDVEGCSVKFCMRTTLSDNAITNAIDMHRSISGSLHITVSNNDCGVREYDMERYQLVNHYRYNWPVNHTSVSPDKKLLAVVGDDRDALLVDSRNGKVTSTLVGHLDYSFATAWHPDSRTFATGNQDKTCRIWDTRNLSTSLAVLRGNIGAIRCIRYSSDGRFLVFSEPADFVHVYSVAADYKKRQEIDFFGEVSGITLSPDDESLFIGVCDRVYASLLQYRMIRGFDYLDSYV

SEQ ID NO: 3999 - protein, 327 aa, Zea mays
MDATPPSSRDLSLEPSRPASSAGPAKRVGLLLGRYELGRLLGHGTFAKVYHARQADTGETVAIKVLDKEKALRNGLVPHIKREIAILRRVRHPNIVRLFEVMATKSKIYFVMEFVRGGELFARVAKGRLKEDTARRYFQQLISAVGFCHARGVFHRDLKPENLLVDERGDLKVSDFGLSAVADQFHPDGLLHTFCGTPSYVAPEVLARRGYDGAKADIWSCGVILFVLMAGYLPFHDQNLMAMYRKIYRGEFRCPRWFSKDLSCLMNQLLDTNPETRITVAPGAAQARSSSPLCSSAPSIRNSEFRTHKHACSLFDKSNLLSKPSPV

SEQ ID NO: 4000 - protein, 474 aa, Mycobacterium avium subsp. paratuberculosis str. k10
MHGLLSKTRVYLVPVLGSALSAHQAGVDRLLESYRSIPATSAVRLAKPTSNLFRARTKRDAPGLDTSGLTGVLGVDPETRTADVAGMCTYADLVAATLPYGLSPLVVPQLKTITLGGAVSGLGIESASFRNGLPHESVLEMDILTGAGELLTASRTQHADLFRAFPNSYGTLGYSTRLRIELEPVAPFVALRHIRFHALADLIAAAERIIDTGGHAGTPVDYLDGVVFSADESYLCVGRRTTTPGPVSDYTGQHIYYQSIRHDSPGDEPTKDDRLTMHDYFWRWDTDWFWCSRAFGVQNPRVRRWWPRRYRRSSVYSKLVSLDRRLRISDRIEARNGRPPRERVVQDVELPVERTFEFLEWFLETVPITPIWLCPLRLRDHDGWPLYPMRPDHTYVNVGFWSSVPAGATEGATNRLIEAKVSELDGHKSLYSDSFYTREEFDELYGGEAYNTVKKTYDPDSRLLDLYAKAVQRR

SEQ ID NO: 4001 - protein, 506 aa, Zea mays
  unsure (1)..(506): unsure at all Xaa locations
MASPAMVPLRQLFVDGEWRPPAQGRRLPVVNPTTEAHIGEIPAGTAEDVDXAAVAAARAALKRNRGRDWARAPGAVRAKYLRAIAAKVIERKPELAKLEALDCGKPYDEAAWDMDDVAGCFEYFADQAEALDKRQNSPVSLPMETFKCHLRREPIGVVGLITPWNYPLLMATWKVAPALAAGCAAVLKPSELASVTCLELADICKEVGLPPGVLNIVTGLGPDAGAPLSAHPDVDKVAFTGSFETGKKIMAAAAPMVKPVTLELGGKSPIVVFDDVDIDKAVEWTLFGCFWTNGQICSATSRLLIHTKIAKKFNERMVAWAKNIKVSDPLEEGCRLGPVVSEGQYEKIKKFISNAKSQGATILTGGVRPAHLEKGFFIEPTIITDITTSMEIWREEVFGPVLCVKEFSTEDEAIELANDTQYGLAGAVISGDRERCQRLSEEIDAGCIWVNCSQPCFCQAPWGGNKRSGFGRELGEGGIDNYLSVKQVTEYISDEPWGWYQSPSKL

SEQ ID NO: 4002 - protein, 347 aa, Listeria monocytogenes str. 4b F2365
MKNTIKWIAIGFAGIILLPLLIVFFIYKKAVGKKEYNPEVLENLDEASQEFVKNTSPLSDVDSRYKYMRLATKALPSAKDIEIGDVENKKIDGPAGKIPIRIYTPQEDGPFEIIVYYHGGGFVLGGLQTHDAIARKLVQTTGARVVTVDYRLAPENPFPAAVEDAYAALLWVQNHRTSLRAKSSDIIVAGDSVGGNLATVVTQIAKSKGKPNITAQILLYPATDIFSRDASVLYPSMDEFAEGYVLTKESLDKFFKLYIANASDRKYDPLVAPIRSKDLVGLPKTFIATAEFDPLRDQGEAYAKKLKDAGVEVFAKRFEKVPHGFMTTNSEATDETYELISEFLEEK

SEQ ID NO: 4003 - protein, 344 aa, Arabidopsis thaliana
MLTQKKSFGRLSAVINPLDYIINPLDNPWFDLSEVSIESCYGSQTLPRSLRSRHWNLKTLKLKKLSFVDTDAYMWFESLKTLHLLSVRFSDDKSVQRLLSVCPKLEDLVVKRTTYVNVRIFSINVPSLRSLSIDYSWAVSRPADVHGFVIDAPSLRFMNIKDHFSNLLQFENMPKLVKANVEVDCDLSEKFIGSITSIQHISLCSKNSKIPYPSGTSFFYLEHLELCTCSQDWWNLLNRILEDAPRLQVLKLKLGNCVQCSTELMDYWNEPCSVPKCLSSHLEIFEWRHYKGTKQERKVAKYILAKASCLKVAIFSSVCIEKNLIFKKLENVDRGSKACELVFQ

SEQ ID NO: 4004 - protein, 435 aa, Arabidopsis thaliana
MEAARSGIEDVTSPDRISQLPNDLLFRILSLIPVSDAMSTSLLSKRWKSVWKMLPTLVYNENSCSNIGSLGFDQFCGRSLQLHEAPLLKTLTLELRKQTDSLDSSIFPNIHSTLLEFSIKSTGYPVYYSTISFPNNLDVFQTLVVLKLQGNICLDVVDSPVCFQSLKSLYLTCVNFENEESFSKLLSACPVLEDLFLQRLCSVGRFLFSISVPSLQRLTYTKEQAYYSNDEAILEITAPSLKHLNIFDRVGVFSFIEDMPKLVEASVRVKLSKNEKLPKVLTSVEHLSLDLYPSMVFHLDDRFISKQLLHLKLDIYDNFQSNLLLSLLKDLPNLQSLKLNHSHPSYNVEDQPCSVSEPSSVPECLSFHLETFQWIGYAGTFEEIAAAVYVLKNARCLKNATISLYSRGTENGLMMIKELESMSKGSIMCQLLVKF

SEQ ID NO: 4005 - protein, 441 aa, Arabidopsis thaliana
MKAPRLGSEEVSYSDRISYLPDDLLLRILSFIHTSDAISTSLLSKRWKFVWKMMPTLDLDEDSCRNIGTLRFDEGCCMFLKSHEAPVLTSLNLKLMTPSHDIDRLLSNIKPILHEITITSYRYSTIRFPRNLNVCQTLVVMKLQDKVLVDVSFPVCFRSLKSLHLTRVKYSCRESFTTLLSACPVLEDLDLFIGRVHYDCLNSFTIWVPSLQRLSICDESYRFRSTTFEISVPSLKYLKIACQDSCFKFVEDMPNLVEAHVEANQHETKNLLRFLTSVERLKDPDLTDRIFHQLLYLELHLHKRLNGDRILSLLKHSPNLQTLKLNEVNQNVAKPLRSIKDQPNISVRKPNSVPECLTFHLETLEWQGYAGRPEDKEIAVYILGNALRLNTATISRYFSSSRFRHHQKKDLKIVEELKSITKASTSCQLVLQQFIEIKYSM

SEQ ID NO: 4006 - protein, 488 aa, Arabidopsis thaliana
MGSKLKLYPLLNHSSVFHPDSRYQSAPTMEEEQQQLRVLFAKYEMGRLLGKGTFGKVYYGKEITTGESVAIKIINKDQVKREGMMEQIKREISIMRLVRHPNIVELKEVMATKTKIFFIMEYVKGGELFSKIVKGKLKEDSARKYFQQLISAVDFCHSRGVSHRDLKPENLLVDENGDLKVSDFGLSALPEQILQDGLLHTQCGTPAYVAPEVLRKKGYDGAKGDIWSCGIILYVLLAGFLPFQDENLMKMYRKIFKSEFEYPPWFSPESKRLISKLLVVDPNKRISIPAIMRTPWFRKNINSPIEFKIDELEIQNVEDETPTTTATTATTTTTPVSPKFFNAFEFISSMSSGFDLSSLFESKRKLRSMFTSRWSASEIMGKLEGIGKEMNMKVKRTKDFKVKLFGKTEGRKGQIAVTAEVFEVAPEVAVVELCKSAGDTLEYNRLYEEHVRPALEEIVWSWHGDNHNNNIVKSNGNYVSDENSGSDC

SEQ ID NO: 4007 - protein, 499 aa, Hordeum vulgare
MIGTRVLAHSRVDPAIRWGVAARGRVVFAAIRWGAAARGRVVFAAVRWGAAARGTKREAGQETSTSETKKTKRKWGRGFCGMASHEVEEPLTSETKKTKRKWGRGFCGMASHEAEEPLTSETKKKRKNVAASSEPDKKRWFKNKIWKKKKAKNEQLATLVKEISLATKLNSAMHVNINLSMNICPTQTYEEHSGTYLRNLAVIAVKQLDKDGLQGNREFLVEVLMLSLLHHPNLVTLLGYCTECDQKILVYEYMPLGSLQDHLLDLTPKSQPLSWHTRMKIAVDAARGLEYLHEVANPPVVYRDLKASNILLDGNFSAKLADFGLAKLGPVGDKTHVTTRVMGTYGYCAPEYAMSGKLTKMSDIYCFGVVLLELITGRRAIDTTKPTREQILVHWAAPLFKDKKKFTKMADPLLDSKYPLKGLYQALAISSMCLQEEAISRPLISDVVTALTFLADPNYDPPDDIEPLPISVPNYDKGISLREAEISLSGFEEKQVEDS

SEQ ID NO: 4008 - protein, 372 aa, Zea mays
LPSVAGQWQKGKLLGSGTFGCVYEATNRHTGALCAMKEVNIIPDDAKSAESLKQLEQEVKFLSQFKHENIVQYYGSDIIEDRFYIYLEYVHPGSINKYVKQHYGAMTESVIRNFTRHILRGLAFLHGQKIMHRDIKGANLLVDVQGVVKLADFGMAKHLSTAAPNLSLKGTPYWMAPEMVQATLMKDVGYDLAVDIWSLGCTIIEMFDGKPPWSDLEGPAAMFTVLHKDPPIPENLSNEGKEFLQCCFKRTPAERPTASELLDHPFIRNSSHYNKHGSIHSFAGIKVNDTTYSSRDNWPASKSDSNMKGKNTNVEPSRAARSSESTFRLAPLTIQEATPNFSPRPFVNSMQFTSVNPQPSPLPRPNGKEVLF

SEQ ID NO: 4009 - protein, 552 aa, Glycine max
VALVECVKAIQATKVVFNHLYDPVSLVRDHNIKEKLVEQGISVQSYNGDLLYEPWEVNSESGRAFTTFNAFWKKCLHMQMDIVSVVPPWQLIPAEGKIEECSLEELGLENESEKPSNALLGRAWSPGWRNADKALREFVELHLLHYSKKRLKVGGESTSLLSPYLHFGELSARKVFQVTCMKQILWTNEGNSAGEESANLFLRAIGLREYSRYLCFNFPFTHERALLGHLKFFPWNPDADIFKNWRQGRTGFPLVDAGMRELWATGWIHNRIRVIVSSFAVKMLLLPWKWGMKYFWDTLLDADLESDILGWQYISGGLPDGHELERLDNPEIQGVKFDPEGEYVRQWLPELARMPTEWIHHPWDAPLTVLRAAGVELGQNYPKPIIDIDLARERLTEAIFKMWESEAAAKAAGSEPRDEVVVDNSNTLENLDTRKVVVLGKAPCATISANDQKVPALQDSKNEPPTRKRPKHMIEEGQNQDHSQNHNKDTGLSSIDQDICSTADSSSCKKQCASTSSYSFSVPQQCSSSSNLKWPWQEKIDMEQSSSKDGAM

SEQ ID NO: 4010 - protein, 341 aa, Escherichia coli CFT073
MKALSKLKAEEGIWMTDVPVPELGHNDLLIKIRKTAICGTDVHIYNWDEWSQKTIPVPMVVGHEYVGEVVGIGQEVKGFKIGDRVSGEGHITCGHCRNCRGGRTHLCRNTIGVGVNRPGCFAEYLVIPAFNAFKIPDNISDDLASIFDPFGNAVHTALSFDLVGEDVLVSGAGPIGIMAAAVAKHVGARNVVITDVNEYRLELARKMGITRAVNVAKENLNDVMTELGMTEGFDVGLEMSGAPPAFRTMLDTMNHGGRIAMLGIPPSDMSIDWTKVIFKGLFIKGIYGREMFETWYKMAALIQSGLDLSPIITHRFSIDDFQKGFDAMRSGQSGKVILSWD

SEQ ID NO: 4011 - protein, 157 aa, Brassica napus
  unsure (1)..(157): unsure at all Xaa locations
MAAVTPLAKYKLVFLGDQSVGKTSIITRFMYDKFDTTYQATIGIDFLSKTMYMEDRTLRLQLWDTAGQERFRSLIPSYIRDSSVAVIVYDVANRQSFLNTSKWIEDVRTERGSDVIIVLVGNKTDLVDKRQVSIEEXDNKARDFGVIFIETSARQDL

SEQ ID NO: 4012 - protein, 250 aa, Zea mays
MVKAYPTVNEDYLKAVDKAKRKLRGLIAEKNCAPLMLRLAWHSAGTFDVATKTGGPFGTMKNPAEQAHGANAGLEIAIRLLEPIKEQFPILSYADFYQLAGVVAVEVTGGPDVPFHPGRQDKPEAPPEGRLPDATQGSDHLRQVFSTQMGLSDQDIVALSGGHTLGRCHKDRSGFEGAWTSNPLIFDNSYFKELLSGEKEGLLQLPSDKALLSDPSFRPLVDKYAADEDAFFADYAEAHLKLSELGFAEA

SEQ ID NO: 4013 - protein, 489 aa, Sinorhizobium meliloti 1021
MQSYQIREMATPLCQPAASHFIDGTFIEDRTGPEILSVNPVDGEIIAKLHGATSCIIEKAIASAKRAQKEWARKEPAERGRVLSRAADIMRARNRELSVLETRDTGKPISETLVADAASGADCLEYFGAIAATLSGDSIQFGEDWVYTRREPLGVCLGIGAWNYPIQIAAWKAAPALACGNAMIFKPSEVTPLSALKLAEILTEAGLPPGVFNIVQGAGDVGAELATHPAIAKVSLTGSVKTGARVASAAMAGIRPVTMELGGKSALIVFDDADVEAAVSGAILGNFYSAGQICSNGTRVFLQRGIREAFLARLLARVAALKIGDPMDEETDIGPLVSAAHRNRVATYVARAEVEGAYQMAPPRKLPPGDAWHEPVVFTNVTDWMTLAREEVFGPVMAVLDFDDEQDVVARANATDFGLAAGIFTRDLVRAHRLAAELEAGTVWINAYNLTPAGMAFGGIKRSGIGRENGRVAIDHYTQLKSVFVSMQT

SEQ ID NO: 4014 - protein, 576 aa, Zea mays
  unsure (1)..(576): unsure at all Xaa locations
LAARGGSNRDSSSRAPQGQPSRRRTRKLAPCSPAARAVPAMESFGVPPAPVAAPEKRKKPLDLKDPVPAAAANGGGATKASPAAKWAEKKKLVGGDAGYVLEDVLHLTDYLPQLPTYPNPLQDNPAYSVVKQYFVNPDDTVTQKIVVHKTSARGTHFRRAGPRQRVYFQPDEVNAAIVTCGGLCPGLNTVIRELVCGLYDMYGVTSVVGIEGGYKGFYSKNTVALTPRSVNGIHKRGGTVLGTSRGGHDTAKIVDCLQDRGINQVYIIGGDGTQKGASVIYEEEVRRQGLKCSVVGVPKTIDNDIAVIDKSFGFDTAVEEAQRAINAAHVEAESAENGIGVVKLMGRNSGFIAMYATLASRDVDCCLIPESPFYLEGKGGLLEFVERRLKDNGHMVIVVAEGAGQDLIARSMNFVDTQDASGNKLLLDVGLWLSQKIKDHFKKKPSFPITLKYIDPTYMIRAVRSNASDNVYCTLLAHSALHGAMAGYTGFTVAPVXGRHAYIPFYRITEKQNKVVITDRMWARVLCSTNQPCFLSHEDVENMKHDDDEHHHMHNTQLLEGGSSPVSKCNGSAAAV

SEQ ID NO: 4015 - protein, 107 aa, Glycine max
  unsure (1)..(107): unsure at all Xaa locations
MSILXKGXXAXITEXXNDNLKEEFXLIRXIVDKYNYXAMDTEXPGXVLXXVGNMKNIDHYNYQTLTXNVDMLKLXQLGXTFYDENXNLXPAXGEPLLWQFNFRESTS

SEQ ID NO: 4016 - protein, 319 aa, Pinus radiata
MEITHTLLEDVPGFIQVYEDGFVARFDHRLTPASPQVASDGARSKDVVIDPVKGISARLFLPAELPLAQKLPLLFYFHGGGFCIGTTAWEGYHLFLSLLAATTRALVISVDYRLAPEHRLPAAYDDCFDAVEWVASGGGKAEPWLDAHADYGRCFLAGESAGGNIAHVVGSRTADQDLGPLKIRGLIVIHPYFGSEERIECEKVAAGDDAAALELNDLFWRLALPPGSDRDYPTCNPRGPRSADLRKVPLPPVLVTVAGLDLLKTRGLLYYELLQSCGKEAELMEAEGEIHAYHVFHPRSEATRLLQERMSQFIHRFDA

SEQ ID NO: 4017 - protein, 218 aa, Glycine max
  unsure (1)..(218): unsure at all Xaa locations
MVLRKVGKYEIGRTVGEGTFAKVKFAQNTESGESVAMKVLDRSAIIKHKMVDQIKREISIMKLVRHPYVVRLHEVLASRTKIYIILEFITGGELFDKIVSHGRLSEAESRRYFQQLIDGVDFCHSKGVYHRDLKPENLLLDSQGNIKISDFGLSAFPGQGVSLLRTTCGTPYYVAXGVLSTRGYYGASPDVWSCGVILYVLLAGYLPFDELDLPTFVQ

SEQ ID NO: 4018 - protein, 350 aa, Camellia sinensis
QIKVSTPLSSSIILDSFPPSQAFFNRSLNPVMVPLLSFLQSSGSSLMLNIYPYYDYMQSNGVIPLDYALFRPLPSNKEAVDANTLLHYSNVFDAMVDAAYFAMAYLNFTNIPVIVTESGWPSKGDSSEPDANLDNANTYNSNLIKHVLNKTGTPKHPGISVSTYIYELYNEDMKPGPLSEKNWGLFDANGAPIYILHLTGSGSVLANDTANQTYCTAKDGADAKMLQAALDWACGPGKVNCSALLQGQPCYEPDTVAAHATYAFDTYYQQMGKASGTCDFNGVATITTTNPTHGSCVFPGSNGKNGTFLNSTAPSLNSTSSGCPARYMRGSASASAIVAVGILSWSLVFL

SEQ ID NO: 4019 - protein, 370 aa, Brucella melitensis 16M
MASRKLLLLPGDGIGPEAMAEVRKVIAFLNSDLNLGFETEEGLVGGCAYDAHGQAISDADMEKALAADAVLFGAVGGPKWDSVPYEVRPEGGLLRLRKDMQLYANLRPAICYPALAHSSSLKPEVIEGLDILILRELTGGVYFGEPKEIIDLGNGQKRGIDTQVYDTYEIERIADVAFELARTRRNKVTSMEKRNVMKSGVLWNQGVTARHKEKHADVQLEHMLADAGGMQLVRWPKQFDVILTDNLFGDLLSDVAAMLTGSLGMLPSASLGAADSKTGKRKALYEPVHGSAPDIAGKGIANPIAMIASLAMCLRYSFGLVAEADRLEAAIAGVLDDGIRTADIWSEGNTKVGTTEMGDAILAKFKALSA

SEQ ID NO: 4020 - protein, 646 aa, Glycine max
  unsure (1)..(646): unsure at all Xaa locations
MSSAEKPSSKGQAWFCTTGLPSDIVVEVDDMTFHLHKFPLMSKSRKLHLLITQQEAASNSTVPQQQQQQQETEDEDEIVEEQCHVTFTGFPGGSEAFEMAAKFCYGVKIDLTPSNVAALRCAGEFLEMTEDYSEDNLVSKTEGFLSQHVLKNLKDSVKTLKSCDSLMPMAENLGITQRCVDSVVSRASSADPALFGWPVSDATSVSKQVLWNGLDGDGRRKVGAGAGESWFXEDLALLRLPLFKRLILAMRSAELSPEIIETCLMYYAKKYIPGVSRSNRKPLPSSSSSSSVATEAEQKEILETLVSNLPLEKSSKAATATRFLFGLLRTTNILNASEACRDALEKKIGLQLEEATLDDLLVPSYSYLNETLYDVDCVARILGHFLEEERNVAAIDGRAPRSPGLMLVGKLIDGYLSEIATDANLKPSKFYDLAISVPDRARLFHDGLYRAVDVYLKAHPWVFEAEREKICGLLDCQKLTLEACTHAAQNERLPLRAVVQVLFFEQLQLRQAIAGTLMAAEAAAEPGRQSAALEREAEDGRGEGLGLEHVQERNGTWRVAVRENQVLRLDMDSMRTRVHQLERECSSMKRVISKFDKFAASGGGWRASLGRKFGCKFKTQVCDSHESTAVDTRKGRHHQQHHPHHD

SEQ ID NO: 4021 - protein, 99 aa, Glycine max
MSAVNITNVAVLDNPTAFLNPFQFEISYECLVPLDDDLEWKLTYVGSAEDETYDQQLESVLVGPVNVGTYRFVFQADPPDPLKIREEDIIGVTVLLLTC

SEQ ID NO: 4022 - protein, 177 aa, Lemna gibba
MASSMMASTAAVARAGPAQSSMVAPFNGLRSSVAFPATRKANNDLSTLPSNGGRVSCMQVWPPEGLKKFETLSYLPPLSVEDLAKEVDYLLRNDWVPCIEFSKEGFVYRENHASPGYYDGRYWTMWKLPMFGCTDASQVIAEVEEAKKAYPEYFVRIIGFDNKRQVQCISFIAYKPT

SEQ ID NO: 4023 - protein, 462 aa, Arabidopsis thaliana
MASNGVDEQIKLVEGPAGYVLEDVPHLSDYILDLPTYPNPLQSNAAYSVVRQYFVDEDDTVQEKIVVHKDSPRGTHFRRAGPRQKVYFKPSDVRACIVTCGGLCPGLNTVIREIVCGLHFMYGVTEVIGVDCGFRGFYSKNTVALTPKTVSDIHKRGGTILGTSRGGHDTSKIVDNIQDREINQVYIIGGDGTQKGANAIYKEIRRRGLKVAVAGIPKTIDNDIPVIDKSFGFDTAVEEAQRAINAAHVEATSVENGIGIVKLMGRYSGFIAMYATLASRDVDCCLIPESPFYLEGKGGLYEFIAKRLRENGHMVIVIAEGAGQDLVAESIEQQDASGNKLLKDVGLWMSLKIKEYFAKHNVMDITLKYIDPTYMIRAIPANASDNVYSTLLAQSAVHGAMAGYTGFVSGLVNGRHTYIPFNRITERQNKVVITDRMWARMLSSTNQPSFMNPPKGTTEFTD

SEQ ID NO: 4024 - protein, 177 aa, Lemna gibba
MASSMMASTAAVARVGPAQTNMVAPFNGLRSSVAFPATRKANNDLSTLPSNGGRVSCMQVWPPEGLKKFETLSYLPPLSVEDLAKEVDYLLRNDWVPCIEFSKEGFVYRENHASPGYYDGRYWTMWKLPMFGCTDASQVIAEVEEAKKAYPEYFVRIIGFDNKRQVQCISFIAYKPT

SEQ ID NO: 4025 - protein, 323 aa, Ralstonia eutropha JMP134
MPAVPLDPQVAALLDLIARAKRPPIHVMDVEDAKIAYEKSAPILDISPLPMHAVDDLHVCARDGHGIPVRLYAPREASWADPLPMLVYFHGGGFTVGSVNSHDALCRMQAAHADCMVLSVDYRLGPQWRFPTAANDAFDVLHWVFEEAARLGADPARIALGGDSAGGTLATACAVHARDSGLAPVLQLLIYPGTCARQDTPSHGALAEGYLLTADMIQWFFSHYLDQESSRDDWRFAPLDGGGSGADVRGCCPAWIAVAGYDPLHDEGVAYADKLRAAGVTVTLADYAGMIHDFFKMGRFVPAVAQAHADAVAALRAAFGTGQ

SEQ ID NO: 4026 - protein, 151 aa, Desulfitobacterium hafniense DCB-2
MGKTLIHRGPDQNGLEYGEHFAFQHNRLAIIDIEKGRQPMTATHQGYDYTIVYNGELYNTADLRQELLEHGVKFKTYCDTEVVLYAYIIWGEQCSSKLNGIYAFVIYDSKEKKTYLSRDRFGVKPFFYTFVEGALLFASEIKALLKHPQVK

SEQ ID NO: 4027 - protein, 419 aa, Sulfolobus tokodaii str. 7
MLSRKIIEESDIYLATSTRDPELFPLVIDHGEGVWIYDVDGNKYLDFTSGIGVNNLGWPSHPEVIKIGIEQMQKLAHAAANDFYNIPQLELAKKLVTYSPGNFQKKVFFSNSGTEAIEASIKVVKNTGRKYIIAFLGGFHGRTFGSISLTASKAVQRSIVGPFMPGVIHVPYPNPYRNPWHINGYENPSELVNRVIEFIEDYIFVNLVPPEEVAGIFFEPIQGEGGYVIPPKNFFAELQKLAKKYGILLVDDEVQMGLGRTGKLFAIENFNTVPDVITLAKALGGGIMPIGATIFRKDLDFKPGMHSNTFGGNALACAIGSKVIDIVKDLLPHVNEIGKIFAEELQGLADDVRGIGLAWGLEYNEKKVRDRIIGESFKRGLLLLPAGRSAIRVIPPLVISEEEAKQGLDILKKVIKVVK

SEQ ID NO: 4028 - protein, 237 aa, Neurospora crassa
MATATESAPRNHLADKPENSMGGRNLSIITPTIQMSAPPGDPMDITSSNSNSSSNSNSSSINNNNATMAAPSNSDSLPPPKSPVEDTLNAQAAPNGRPQLSSANDQLSPDNIIMPAPAAAAPAVHQPKIVQTAFIHKLYNMLEDKSIQHLISWSPTSESFVMQPSQEFSKASSQYFKHTNISSFVRQLNMYGFHKGKESPDVAGYQQSLTWSKSERCLPPWSSRRYHLGVQAWQRQL

SEQ ID NO: 4029 - protein, 184 aa, Triticum aestivum
  unsure (1)..(184): unsure at all Xaa locations
MAGVGRNMVAPLLVLNLIMYLIVIGFASWNLNHFINGLTNXRPGVGGNGATFYFLVFAILSRGSLAPLSKLAGVHHVRTXWRGDSLATSASSSLVAWGXPPLAFGLACKEIHIGGYRXGWRLRVLEAFVIILAFTQLLYVIALHSGLFGNQFGGNHAGGYPAEHAYGAGDPHNKGMGTGGVARV

SEQ ID NO: 4030 - protein, 497 aa, Arabidopsis thaliana
MPQAPMPEFSSSVKLKYVKLGYQYLVNHFLSFLLIPIMAIVAVELLRMGPEEILNVWNSLQFDLVQVLCSSFLVIFISTVYFMSKPRTIYLVDYSCYKPPVTCRVPFATFMEHSRLILKDKPKSVEFQMRILERSGLGEETCLPPAIHYIPPTPTMDAARSEAQMVIFEAMDDLFKKTGLKPKDVDILIVNCSLFSPTPSLSAMVINKYKLRSNIKSFNLSGMGCSAGLISVDLARDLLQVHPNSNAIIVSTEIITPNYYQGNERAMLLPNCLFRMGAAAIHMSNRRSDRWRAKYKLSHLVRTHRGADDKSFYCVYEQEDKEGHVGINLSKDLMAIAGEALKANITTIGPLVLPASEQLLFLTSLIGRKIFNPKWKPYIPDFKLAFEHFCIHAGGRAVIDELQKNLQLSGEHVEASRMTLHRFGNTSSSSLWYELSYIESKGRMRRGDRVWQIAFGSGFKCNSAVWKCNRTIKTPKDGPWSDCIDRYPVFIPEVVKL

SEQ ID NO: 4031 - protein, 493 aa, Mycobacterium avium subsp. paratuberculosis str. k10
MSDIQTQAKTEYDKLFIGGKWTEPSTSEVIEVHCPATGEYVGKVPLAAAADVDAAVAAARAAFDNGPWPTTPPKERAAVIANALKVMEERKDLFTGLLAAETGQPPTSVETMHWMSSIGALNFFAGPAVDQVKWKEVRTGGYGQSIVHREPIGVVGAIVAWNVPLFLAVNKLGPALLAGCTVVLKPAAETPLSANALAEAFAEAGLPEGVLSVVPGGIETGQALTSNTDVDIFSFTGSSAVGREIGRRGADMLKPCTLELGGKSAAIVLDDVDLPSALPMLVFSGIMNSGQACVAQTRILAPRSRYDEIVDAVSTFVQSLPVGLPSDPAAQIGSLISEKQRARVEGYIAKGIEEGARLVCGGGRPEGLDSGFFVQPTVFADVDNKMTIAQEEIFGPVLSIIPYDTEEDAIKIANDSVYGLAGSVWTADVQRGIAVSEKIRTGTYAINWYAFDRCCPFGGYKNSGIGRENGPEGVEHFTQQKSVLMPMGYTLEG

SEQ ID NO: 4032 - protein, 183 aa, Fusobacterium nucleatum subsp. vincentii ATCC 49256
MKIYDFSVKNRKDEDISLKSYKGKVLLIVNTATRCGFTPQYDELENLYEKYNKEGFEVLDFPCNQFGNQAPESDEEIHTFCQLNYKVKFDQFAKVEVNGENALPLFQYLKEQKGFSGFDPKHKLTSVLTEMLSKNDPDFAKKSDIKWNFTKFLVDKSGNVVARFEPTTSVKVIEQEIKKLLEK

SEQ ID NO: 4033 - protein, 349 aa, Nostoc punctiforme PCC 73102
MELIDRFKALLAALLYGQEDLRLEQVADPTPAAGEVVIQVGAATTCGTDLKVWRRGGHAKMLKPPTLFGHEGAGRIVALGAGVTNWQVGDRIVANNSAPCMKCFFCQRQEYSLCPNLTWNNGTFAEYLKIPAPIVEHNLLQIPDELPWELAAMTEPLACVLHGVARSNIKPKDRVVVLGDGAIGLMFVAALSEKAEVLLWGGNNHRLEIGQKLGATQTFNYHQIPDIPNLVKELTQGWGADVAIEATGVPSVWETAIACARPGATVNLFGGCPRDTSITVNTEQLHYSELTIKGVFHNTPEYVREALALIASRKIPFELLISEQRPLKDLEQVFCEMKARQVIKAAMIP

SEQ ID NO: 4034 - protein, 323 aa, Pichia stipitis
  unsure (1)..(323): unsure at all Xaa locations
MSSNSLEQLKATGTVIVTDTGEFDSIAKYTPQDATTNPSLILAAAKKPEYAKVIDVAXEYAKDKGSSKKEKAEIALDRLLIEFGKNILAIVPGRVSTEVDARLSFDKEATIKKALELIALYESQGISKDRILIKIASTWEGIQAARELEAKHGIHCNLTLLFSFVQAVACAEAKVTLISPFVGRILDWYKASTGKTYEGDEDPGVISVRAIYNYYKKYGYKTIVMGASFRNTGEIKALAGCDYLTVAPKLLEELLNSTEPVPQVLDAASASATDVEKVSYVDDEATFRYLFNEDAMATEKLAQGIRAFGKDAVTLLEQLEARF

SEQ ID NO: 4035 - protein, 123 aa, Lactobacillus delbrueckii subsp. lactis
  unsure (1)..(123): unsure at all Xaa locations
MKLQTKAMLITYPDSLGHNLKDLSQVMDRYFSKAIGGIHLLPFFPSHGDRGFSPMTYEKVAPEFGTWSDVEKLGEQYYLMFDFMINHISAHSDYYLDLXKNKEKSPWRXLFLSWDKFWPAGRP

SEQ ID NO: 4036 - protein, 493 aa, Triticum aestivum
MDPNSFKTGGLLLPTIERRCASPPSVIVIGGGISGIAAARVLSNSSFEVTVLESRDRIGGRVHTDYSFGCPIDMGASWLHGVSNENSLAPLIGHLGLRLYHTSGDNSVLYDHDLESCSLFDKNGVAVPMETAAKVGVIFEKILKETVKLRDEQEHDMPLEQAISMVLERHPDLKLEGLDDRILQWCVCRLEAWFAADADEISLKNWDQEHVLTGGHGLMVDGYFPVIQALSQGLDIRLNQRVKKIARQQKGVTVTIEDGTQYSADACIITVPLGVLKANVIKFEPELPSWKSSAIADLGVGIENKVAMHFDKAFWPNVQVLGMVGPTPKTCGYFLNLHKATGHPVLVFMAAGRFAQDVEKLSDKEAVELVMCHLRKMIPDATEPTQYLVSRWGSDPNSLGSYSCDLVGKPSDVCERFSAPVESVLYFAGEAASAEHSGAVHGAYSSGMNAGKECRKKLFINKGVLNLTRLAPRLSRNWGTFSPSPNWPPQGIR

SEQ ID NO: 4037 - protein, 450 aa, Ralstonia solanacearum
MTPSTTSVFHRDPRKTLPTAVGGESMMLIDAEGKRYLDASGGAAVSCLGHGHPRVVEAICKQVRALAYAHTSFFTTAVAEELAARLAAAAPGDLGHVYFVSGGSEAIEAALKLARQYFVEIGQPQRQYFIARRQSYHGNTLGALAIGGNAWRREPFLPLLVPAHHVSPCFAYRERRDGETDAQYVQRLADELDAKIVELGADRVAAFIAETVVGATAGAVPPVADYFRKIRAVCDRHGVLLILDEVMSGMGRTGHLFACEEDGVVPDLIAIAKGLGGGYQPIGAMIASDRIYDAITRGSGFFQHGHTYIGHATACAAALEVQKVIAEENLLANVLARGEQLRAALRERFAAHPHVGDVRGRGLFVGVELVADRGTKAPLPPARKTHARVRAEAMQRGLMVYPMGGTIDGQRGDHILLAPPFIATAQDIDAIVARLGDAVEAATANALEAA

SEQ ID NO: 4038 - protein, 294 aa, Arabidopsis thaliana
  unsure (1)..(294): unsure at all Xaa locations
MAIPTETQHQEKEASDASAAAAQKRWTLSDFDIGKPLGRGKFGHVYLAREKRSNHVVALKVLFKSQLQQSQVEHQLRREVEIQSHLRHPNILRLYGYFYDQKRVYLILEYAARGELYKDLQKCKYFSERRAATYVASLARALIYCHGKHVIHRDIKPENLLIGAQGELKIADFGWSVHTFNXRRTMCGTLDYLPPEMVESVEHDASVDIWSLGILCYEFLYGVPPFEAMEHSDTYRRIVQVDLKFPPKPIISASAKDLISQMLVKESSQRLPLHKLLEHPWIVQNADPSGIYRV

SEQ ID NO: 4039 - protein, 85 aa, Glycine max
  unsure (1)..(85): unsure at all Xaa locations
MVLESTMVCVDKXEYMRNGDFLPTRLQAQQDAVNIVCHSKTRSNPENNVGLITLANDCEVLTTLTPDTGRILSKLHTVQPKXNXT

SEQ ID NO: 4040 - protein, 281 aa, Cucumis melo
TLEDGMKVAVKRGNPRSEQGLAEFRTEIEMLSKLRHRHLVSLIGYCDERSEMILVYEYMANGPLRSHLYGTDLPPLSWKQRLDICIGAARGLHYLHTGAAQSIIHRDVKTTNILLDENFVAKVADFGLSKTGPSLDQTHVSTAVKGSFGYLDPEYFRRQQLTEKSDVYSFGVVLMEVLCTRPALNPVLPREQVNIAEWAMTWQKKGMLDHIMDPNLVGKVNPASLKKFGETAEKCLAEYGVDRPSMGDVLWNLEYALQLEETSSALMEPEDNSTNQSLPSN

SEQ ID NO: 4041 - protein, 496 aa, Pseudomonas sp. VLB120
MNSSLSAIDGLRLPHQMLIGGQWVSAQSGKTLNVYNPATGDILTEVPDGDVEDVNAAVESAAATLRSDTWRPCLPVLASVFCCAWRISSEVHGDELARLETLNNGKLLIYSKLMEVGASAQWLRYMAGWATKLTGSTLDLSLPLPPEVRSRASTQRVPVGVVAAIIPWNFPLLMAVWKIAPALACGNTVVLKPAEETPLTALRLAELAMEAGLPAGALNVVTGRGETAGDALVRHPKVAKVAFTGSTEVGRIIGSACGRSLKAVSLELGGKSPVIVLADCDPQEAAEGAAAAIFFNHGQVCTAGSRLYVHESIYEDVIQRLAVIGESIVVGSGLEQGVHMGPMVSKKHHENVLRHIRNGIEDGADLICGGTEAPCAQGFFVKPTIFANREKKDIRLLSQEVFGPVLVATPFSDIAEVVNEANRSVYGLGASIWTNDLSAALRINDELEAGTVWVNTHNMVDPNLPFGGFKDSGVGREHGAAAIEHYTTTRSLVIAY

SEQ ID NO: 4042 - protein, 429 aa, Xylella fastidiosa Dixon
MSDLDKVTLNAGETSLVLPVLKPTLGNGCVDIAKLTKETGLFTYDSGFTATASCKSAITYIDGEKGVLLYRGYPIEQLAEHSSFLEVAYLLMNGELPRKDEFAKFDDEITHHTMMHESLKNFLGGFHYDAHPMAMLAASVASLSAFYHDTLDLNDLEQRRLAAIRLIAKVPTLAAAVHRYSIGWPIRYPRNNLGYVERFLHMMFEVPSEPLQLNPVVTKALDLLFILHADHEQNASTSTVRLVGSTGANPYASVAAGITALWGPAHGGANEAVLKMLEEIGDAKNVDLVIAKAKTKDKNSPFRLMGFGHRVYKHFDPRAKIIRETAHTVLGELGVNDPLLEVALKLEEVALKDDYFVQRKLYPNVDFYSGIIYKAINIPLEMFTVMFAIARTAGWVSHWLEQQVDPEMKISRPRQIYTGHSERDYKDAR

SEQ ID NO: 4043 - protein, 456 aa, Brucella suis 1330
MTAQPNSLEARDIRYHLHSYTDAVRLEAEGPLVIERGDGIYVEDIAGKRYIEAMSGLWSVGVGFSEQRLAEAAARQMKKLPFYHTFSYRSHGPVIDLAEKLVAMAPVPMNKAYFTNSGSEANDTVVKLIWYRSNALGEPERKKIISRKRGYHGVTIASASLTGLPNNHRSFDLPIDRILHTGCPHHYHDALPGESEEQFATRLANELEQLILAEGPHTIAAFIGEPVMGAGGVVVPPKTYWEKVQAVLGRYNILLVADEVICGFGRTGNLFGCQTFDIKPDILVMSKQLSSSYLPISAFLINERVYAPIAEESHKIGTLGTGFTASGHPVAAAVALENLAIIEERDLVANARERGARMQKRLRELQDHPLVGEVRGVGLIAGVELVIDKEAKTGLEQPGALGARANAALQERGVISRAMGDTLAFCPPLIINDQQVDTMVSALEAALNDVQASLGK

SEQ ID NO: 4044 - protein, 355 aa, Verticillium dahliae
MSRSNAPNPSGSRKISFNVSEQYDIQDVVGEGAYGVVCSAIHKPSGQKVAIKKITPFDHSMFCLRTLREMKLLRYFNHENIISILDIQKPRGYDTFNEVYLIQELMETDMHRVIRTQDLSDDHCQYFIYQTLRALKAMHSANVLHRDLKPSNLLLNANCDLKVCDFGLARSAASQEDNSGFMTEYVATRWYRAPEIMLTFKEYTKAIDVWSVGCILAEMLSGKPLFPGKDYHHQLTLILDVLGTPTMEDYYGIKCRRAREYIRSLPFKKKVPFRTLFPKTSDLALDLLEKLLAFNPVKRITVEEALKHPYLEPYHDPDDEPTAPPIPEEFFDFDKHKDTLSKEQLKQLIYQEIMR

SEQ ID NO: 4045 - protein, 286 aa, Oryza sativa (japonica cultivar-group)
MHTYIYTPRAAELEHSHSASATRSHSLGQAPPSLDRSRAAMDMAGHEVNSSSSSSGAESSSSSSGRQQYKKRPAGRTKFRETRHPVYRGVRRRGGAGRWVCEVRVPGKRGARLWLGTYVTAEAAARAHDAAMIALRGGAGGGGAACLNFQDSAWLLAVPPAAPSDLAGVRRAATEAVAGFLQRNKTTNGASVAEAMDEATSGVSAPPPLANNAGSSETPGPSSIDGTADTAAGAALDMFELDFFGEMDYDTYYASLAEGLLMEPPPAATALWDNGDEGADIALWSY

SEQ ID NO: 4046 - protein, 348 aa, Triticum aestivum
  unsure (1)..(348): unsure at all Xaa locations
LCPGLNDVIRQVVFTLATYGVKNIVGIPFGFRGFFEKCLKEMPLSRNLLENINLAGGSFLRVSRGXAKTSEIVHSIQATRIDMLFVLGGNGTHAGANAIHDECRKRKLKVSVVAVPKTIDNDIPLMDKTFGFDTAVEEAQRAINSAYIEARSAYHGIGLVKLMGRSSGFIAMHASLSSGQVDVCLIPEVSFALDGEYGVLQHLEQLIKNKGFCVVCVAEAAGQELLQNSGATDASGNAILSDIGVHMQQKIKTHFKGIGVHADIKYIDPTYMVRACRANASDAILCTVLGQNAVHGAFAGFSGITSCICNTHYVYLPVTQVITAPKRVNHKGRMWHRCLTSTGQPDFR

SEQ ID NO: 4047 - protein, 106 aa, uncultured Rickettsia sp.
MLKEIGSSENIPKYIAKAKDKNDPFRLMGFGHRVYKNYDPRAAVLKETCKEVLKELEQLENNPLLQIAIELEAIALKDEYFIERKLYPNVDFYSGIIYKAMGIPSQ

SEQ ID NO: 4048 - protein, 227 aa, Lactobacillus plantarum WCFS1
MNQDQLKQLVGQKAVEYIQDGMQVGLGTGSTVKFMVDALGERVKNEHLNIVGVSTSDRTAAQAKALGIPMKSVDEVDHLDLTIDGADEIADDFQGVKGGGAALLFEKIVAINSDKVMWIVDESKMVHQLGAFGLPVEVIPYGSQHVFEKMAARGYNPVFRKVNDELVRTDSNNIIIDLHIDPITDPHALAEDLIHMVGVVEHGLFLDMVNTVIVGHANGPEVIEARP

SEQ ID NO: 4049 - protein, 462 aa, Glycine max
MESKPHVLMQRYELGRLLGQGTFGKVYYARSTITNQSVAIKVIDKDKVMRTGQAEQIKREISVMRLARHPNIIQLFEVLANKSKIYFVIEYAKGGELFNKVAKGKLKEDVAHKYFKQLISAVDYCHSRGVYHRDIKPENILLDENGNLKVSDFGLSALVDSKRQDGLLHTPCGTPAYVAPEVIKRKGYDGTKADIWSCGIVLFVLLAGYLPFHDPNLIEMYRKISKAELKCPNWFPPEVCELLGMMLNPNPETRIPISTIRENSWFKKGQNIKNKRPVVENNTVSSSSTVLLDQNDCDGLAAEANGESVVPLSINAFDIISRSVGFDLSRFFDESFKKKEARFSSRLPANVIISKLEDIANQLRMKIKKKAAGLLKLESLNEGRKGVLSIDAEIFEVTPCFHMVEVKKSNGDTLEYQKILKEDIRPALQDIVWVWQSDQQLQSQQSEQQQQTDDQQQQQPQS

SEQ ID NO: 4050 - protein, 205 aa, Triticum aestivum
MGERVKGTVKWFNVTKGFGFISPEDGSEDLFVHQSAIKADGYRSLNENDVVEFEVITGDDGRTKAADVTAPGGGALAGGSRPGDGGGDRGGRGGGGYGGGGYGGGGGGYGGGGGGYGGGGGSYGGGGGYGGGGGGGRYGGGGGGGRECYKCGEEGHISRDCPQGGGGGGGGYGGGGGRGGGGGGGGCFSCGESGHFSRECPNKTN

SEQ ID NO: 4051 - protein, 106 aa, uncultured Rickettsia sp.
MPKEIGSSENIPKYIAKAKDKNDPFRLMGFGHRVYKNYDPRAAVLKETCKEVLKELEQLENNPLLQIAIELEAIALKDEYFIERKLYPNVDFYSGSIYKAMGIPSQ

SEQ ID NO: 4052 - protein, 429 aa, Sinorhizobium meliloti
MTDFYKLVPNAPEGRFDGIERPYSAEDVKRLRGSVEIRYSLAEMGANRLWKLIHEEDFVNALGALSGNQAMQMVRAGLKAIYLSGWQVAADANTASAMYPDQSLYPANAAPELAKRINRTLQRADQIETAEGKGLSVETWFAPIVADAEAGFGGPLNAFEIMKAFIEAGAAGVHYEDQLASEKKCGHLGGKVLIPTAAHIRNLNAARLAADVMGTPTLVIARTDAEAAKLLTSDIDERDRPFVDYDAGRTVEGFYQVKNGIEPCIARAIAYAPHCDLIWCETSKPDLEQARKFAEGVHKAHPGKLLAYNCSPSFNWKKNLDDATIAKFQRELGAMGYKFQFITLAGFHQLNYGMFELARGYRDRQMAAYSELQEAEFAAEANGYTATKHQREVGTGYFDAVSVAITGGQSSTTAMKESTEHDQFRPAAE

SEQ ID NO: 4053 - protein, 369 aa, Arabidopsis thaliana
MIENDDSPQHPSLFFTDFTRANSHVRVLHHKFLGKGVYGSVDLIRYTKTDGSSLQAAVKTSYAEDLEEYDALKREIQILSELKGYPNIVICYGDDLEEDFNEHGHKVYKLLLEYANEGSLSSFMENYPDRKLPDPMIRDFTRMILEGLVSMHSHGYVHCDLKSDNLLIFSRKDSASCELKIFDFGNCRQVGEVPDHWKSDYPYVGTPESFFDGVAKKTLDLWSLGCLVLKIYTGEQPWERVTSVDFVNFLSDGEAPNIPEYVPCDAREFIETCFAREHEKRGTASELLLHPFLCQKQPLLVKLKLRIKQASKITMGIREKPLTLKMFLSKPPQLKKLLSKLLRLKKMIHPKPLELDSSFVSYSSDLCLL

SEQ ID NO: 4054 - protein, 264 aa, Triticum aestivum subsp. compactum
NMQVDPSSQVQWPQQQPVPQPHQPFSQQPQQTFPQPQQTFPHQPQQQFPQPQQPQQQFLQPQQPFPQQPQQPYPQQPQQPFPQTQQPQQLFPQSQQPQQQFSQPQQQFPQPQQPQQSFPQQQPPFIQPSLQQQVNPCKNFLLQQCKPVSLVSSLWSMIWPQSDCQVMRQQCCQQLAQIPQQLQCAAIHTVIHSIIMQQEQQQGMHILLPLYQQQQVGQGTLVQGQGIIQPQQPAQLEAIRSLVLQTLPTMCNVYVPPECSIIKA

SEQ ID NO: 4055 - protein, 106 aa, Zea mays
  unsure (1)..(106): unsure at all Xaa locations
MTVSRTHRRSFEHRGGREMKEGTANCIDILIAIILPPLSAFLKFDCXVELWLCLLLMFLAYLPGIIYWIYVISLDYPDIAVYRYKAKELGDQAAKAMYMNVLLRSL

SEQ ID NO: 4056 - protein, 283 aa, Triticum aestivum subsp. compactum
MKTLLILTILAMAITIGTANMQVDPSSQVQWPQQQPVPQPHQPFSQQPQQTFPQPQQTFPHQPQQQFPQPQQPQQQFLQPQQPFPQQPQQPYPQQPQQPFPQTQQPQQLFPQSQQPQQQFSQPQQQFPQPQQPQQSFPQQQPPFIQPSLQQQVNPCKNFLLQQCKPVSLVSSLWSMIWPQSDCQVMRQQCCQQLAQIPQQLQCAAIHTIIHSIIMQQEQQEQQQGMHILLPLYQQQQVGQGTLVQGQGIIQPQQPAQLEAIRSLVLQTLPTMCNVYVPPECSI

SEQ ID NO: 4057 - protein, 464 aa, Lycopersicon esculentum
MATCGIDWKSVLPNCFKGNNVRSEAKVMENSKQMNSDHHRLAFSDISTDSRSVLISLDDLSSNAVIGSNLHVFTYEELKLITSDFSSANFLGKGGFGPVHKGFIDDKIKPGLDAQPVAVKLLDLDGNQGHQEWLTEVVFLGQLRHHHLVKLIGYCWEEEQRLLVYEYMARGNLEDQLFSRYSSCLPWLTRIKIMVGAAKGLAFLHGEEKPVIYRDFKASNILLDSDYRAKLSDFGLAKDGPEGDDTHVSTRVMGTHGYAAPEYIMTGHLTSKSDVYSFGVVLLELITGRRAMDKKRPLKERILVDWARPMLRDPHKLDRIMDPRLEGQYSTQGAKKVAALAYQCLSHHPRSRPTMSNIVKILEPVLDMKDIPMGPFVYVVPSSKPDKGTEIGELKTKVNDENKAGVRENEVDNAGENREDGNAKQRRVGHRYKHRLKTDASVYSDTHLYHKTVKHERTNKLNSY

SEQ ID NO: 4058 - protein, 161 aa, Triticum aestivum
  unsure (1)..(161): unsure at all Xaa locations
MSDTDEHHFESKADFGASKTYPQQAGAIRMGGHIVIKARPCKAVEVYTSKTGKHGHAKCHFVAIDIFNGKKLEDIVPSSHNCDVPHVDRXDYQLIDITDDGYVSLLTESANTKDDLKLPTDDALLGQSKIGFADGKDLILSGMAAMGEEQICAEKEIADGT

SEQ ID NO: 4059 - protein, 205 aa, Triticum aestivum
QQSFPQQPEQIIPQQPQQPFPLQPQQPFPQQPEQIISQQSQQPFSLQPQQPFSQPQQPLSQQPGQIIPQQSQQPCPLQPQQPFPQQPEQIIRQQPQQPFLLQSQQPFHQQPEQIISQQPQKPFSLQPQQPFSQPQQPFPQQPGQIIPQQPQQPFSLQPQQPFPQQLQQPFALQPQQSFPQQPQQPFPQPQQAFPEQAEQIIPQQP

SEQ ID NO: 4060 - protein, 367 aa, Rosa hybrid cultivar
MERLNSFRHLNQKWSNGEHSNELLHAQAHIWNHIFSFINSMSLKSAIQLGIPDIINKHGYPMTLSELTSALPIHPTKSHSVYRLMRILVHSGFFAKKKLSKTDEEGYTLTDASQLLLKDHPLSLTPYLTAMLDPVLTNPWNYLSTWFQNDDPTPFDTAHGMTFWDYGNHQPSIAHLFNDAMASDARLVTSVIINDCKGVFEGLESLVDVGGGTGTLAKAIADAFPHIECTVLDLPHVVADLQGSKNLKYTGGDMFEAVPPADTVLLKWILHDWSDEECIKILERSRVAITGKEKKGKVIIIDMMMENQKGDEESIETQLFFDMLMMALVGGKERNEKEWAKLFTDAGFSDYKITPISGLRSLIEVYP

SEQ ID NO: 4061 - protein, 350 aa, Staphylococcus epidermidis ATCC 12228
MKAAVWYGQKDVRVEDREPKAIKDNEVQVKVSWAGICGTDLHEYLEGPIFISTDQPDPLLGQTAPVTLGHEFSGVIENVGKDVSRFKKGDRVVVNPTVSKREKPENVDLYDGYSFIGLGSDGAFAEFTNAPETNVYHLPDNVSAREGALVEPTAVAVQAVKEGELLFGDTVAVFGAGPIGLLTIVAAKAAGASKIFVFDLSEERLAKAKSVGATHVYNSGNVDPVQTVYEHTDNGVDVSFEVAGVGITLQQSIEVTRPRGTAVIVSIFGHPVEFNPLLQMNKGVKLTTTIAYTPTTFQQTIDLIANGSLNVKDVVTDQIELENIVESGFNQLVNDKSQAKILVRLNGDQK

SEQ ID NO: 4062 - protein, 57 aa, Zea mays
MPFTASDICKIILAIILPPVGVFLERGCGADFFINILLTILGYIPGIIHALYIILKY

SEQ ID NO: 4063 - protein, 366 aa, Rosa hybrid cultivar
MERLNSFKHLNQKWSNGEHSNELLHAQAHIWNHIFSFINSMSLKSAIQLGIPDIINKHGPMTLSELTSALPIHPTKSHSVYRLMRILVHSGFFAKKKLSKTDEEGYTLTDASQLLLKDHPLSLTPFLTAMLDPVLTTPWNYLSTWFQNEDPTPFDTAHGMTFWDYGNHQPSIAHLFNDAMASDARLVTSVIIDDCKGVFEGLESLVDVGGGTGTVAKAIADAFPHIECTVLDLPHVVADLQGSKNLKYTGGDMFEAVPPADTVLLKWILHDWNDEECIKILKRSRVAITSKDKKGKVIIIDMMMENQKGDEESIETQLFFDMLMMALVRGQERNEKEWAKLFTDAGFSDYKITPILGLRSLIEVYP

SEQ ID NO: 4064 - protein, 131 aa, Lotus corniculatus var. japonicus
YQWAFAIAAAGITSGSIAERTQFVAYLIYSSFLTGFVYPVVSHWLWSSDGWASPTRTTGSLLFGSGAIDFAGSGVVHMVGGIAGLWGAFIEGPRIGRFDRTGRSVALRGHSASLVVSRFVSTMVRLVRLQS

SEQ ID NO: 4065 - protein, 472 aa, Mycobacterium avium subsp. paratuberculosis str. k10
MPIATINPATGETVKTFTPASDAEVDAAIARAYERFLDYRHSTTFAQRAQWANATADLLEAEADEVAAMMTLEMGKTLKSAKAEALKCAKGFRYYAQNAEQLLADEPADAGKVGAARAYIRYQPLGVVLAVMPWNFPLWQAVRFAAPALMAGNVGILKHASNVPQSALYLADVITRGGFPEGCFQTLLVPSSAVERILRDPRVAAATLTGSEPAGQSVAAIAGDEIKPTVLELGGSDPFIVMPSADLDEAVKTAVTARVQNNGQSCIAAKRFIVHTDIYDAFVDKFVEQMKALKVGDPTDPATDVGPLATESGRDEIAKQVDDAVAAGATLRCGGKPLDGPGWFYPPTVVTDITKDMALYTEEVFGPVASMYRAADIDEAIEIANATTFGLGSNAWTNDAAEQQRFIDDIEAGQVFINGMTVSYPELGFGGVKRSGYGRELAGLGIRAFCNAKTVWIGSSKSGDAGGGSKVE

SEQ ID NO: 4066 - protein, 177 aa, Streptomyces coelicolor A3(2)
MSANNPFARLPEAASFTVTSTTVADGAAWPSAQRSAGVPGGKDVSPQLSWSGAPEGTRSYAVTVYDPDAPTGSGFWHWAVADIPAAVTELPEGAGDDTGPGLPEGAFQLPNDARAARYIGAAPPAGHGPHRYFVVVHALDVESIGIPADATPAVLGFTMAGHILGRAVLTATAETPA

SEQ ID NO: 4067 - protein, 663 aa, Zea mays
MSPSNLPPPGETRVGCSLPSPVTPQAMGGGPARHVAMRALRARFLSRQREGGPAAASTWWWCASGSAKGDMESTLKGIRGSDAPCVLDLDDAATVAGGVEDTYGEDRATEEQLVTPWTVSVASGYNLLRDPRYNKGLAFTERERETHYLRGLLPPAIVSQELQERKIMNNIRQYQLPLQRYMALMDLQEGNERLFYKLLIDNVEELLPIVYTPTVGEACQKYGSIFSRPQGLYISLKEKGKILEVLKNWPERSIQVIVVTDGERILGLGDLGCQGMGIPVGKLSLYTALGGVRPSACLPITLDVGTNNEELLNDEFYIGLRQRRATGQEYTDFLQEFMSAVKQNYGEKVLIQFEDFANHNAFDLLARYGTTHLVFNDDIQGTASVVLAGLIAAQTLLGGSLADHTYLFLGAGEAGTGIAELIALEISRQTKAPIEECRKKIWLVDSKGLIVSTRKESLQHFKKPWAHEHKPLSNLLDAVNAIKPTVLIGTSGKGQTFTKDVVEAISSFNERPIILALSNPTSQSECTAEQAYTWSKGQAVFATGSPFDPVEYNGKIHVPGQANNAYIFPGFGLGVVMSGAIRVHDDMLLAASEALAQQVTEENFEKGLIYPPFSNIRKISAHIAASVAAKAYELGLASRRPRPKDLVKYAESCMYSPIYRNYR

SEQ ID NO: 4068 - protein, 471 aa, Vibrio vulnificus CMCP6
MAMKLVWLRRDLRSVDNTALNHAIATSQEVVACFVATPLQWRDHHMAPMQADLIARRLAVLAEELNALNIPLLYDEVDDYAQSATRVANWAEQLAVSEVVLNREYEVNERVRDEQLVNQLASSEIGVLDVEDKCVQAPGCVLNKQGDYFKVFTPFKKAWLKSFVPPQIIKTSAAQPVVLPEALQSSLWHEQAPFSYPRQSSEEWSVDSQQIRETLRHFCHEEVDRYHEQRDFPATAGTSVLSPYLAIGAISVRQCIARLYWQQSYLSNGREVWLSELIWREFYHHLIHFEPKLVKGQGFVEWEKHLLWPAKPDWFDRWCRGETGYPIVDAAMRQLNQTGWMHNRLRMIVASFLTKDLHVNWRLGEQYFMQKLVDGDFAANNGGWQWCASTGCDGQPYFRIFNPITQGEKFDPNGEFVKHWLPELVEVPSKFVHQPWNWPGHMQLDYPAPMVDHKQEREITLSLYTQAKDCL

SEQ ID NO: 4069 - protein, 180 aa, Nicotiana plumbaginifolia
MASSVLSSAAVATRSNVAQANMVAPFTGLKSAASFPVSRKQNLDITSIASNGGRVQCMQVWPPINKKKYETLSYLPDLSQEQLLSEIEYLLKSGWVPCLEFETERGFVYREHHHSPGYYDGRYWTMWKLPMFGCTDATQVLAEVEEAKKAYPQAWVRIIGFDNVRQVQCISFIAYKPEGY

SEQ ID NO: 4070 - protein, 505 aa, Brucella suis 1330
MNKVEFSRTVKPAFAKRYGNFIGGKWVEPRSGRYFENTSPVNGQVLCEVARSDAADVEAALDAAHAARELWGRTSVAERALILNRIADRIEENLPALAAAETWDNGKPIRETTNADLPLAVDHFRYFAGVIRAQEGGISEIDHDTVAYHFHEPLGVVGQIIPWNFPLLMATWKLAPALAAGNCVVLKPAEQTPASILVLMELIADILPPGVVNIVNGFGLEAGKPLASSPRIAKIAFTGETTTGRLIMQYASQNLIPVTLELGGKSPNIFFKDVAAEDDDFLDKAIEGFVMFALNQGEVCTCPSRALIQESIYDRFMKKALKRVEAIVQGDPLDPATMIGAQASSEQLEKILSYLDIGRQEGAEVLAGGERNMLPGDLAGGYYVKPTVFKGHNKMRIFQEEIFGPVVSVATFKDDAEALSIANDTLYGLGAGIWTRDGTRAYRFGRAIKAGRVWTNCYHAYPAHAAFGGYKQSGIGRENYLKMLDHYQNTKNMLVSYSPKKLGFF

SEQ ID NO: 4071 - protein, 322 aa, Sesbania rostrata
MAEKKIPEVLLNSGHKMPVIGMGTSVESRPSNDVLASIFVDAIQVGYRHFDSASVYGTEEAIGMAVSKAIEQGLIKSRDEVFITSKPWNTDAHHDLIVPALKTTLKKLGMEYVDLYLIHWPVRLRHDLENPVIFSKEDLLPFDIEGTWKAMEECYRLGLAKSIGICNYGTKKLTKLLEIATIPPAVNQVEMNPSWQQGNLREFCKQKGIHVSAWSPLGAYKIFWGSGAVMENQILQDIATAKGKTIAQVALRWVYQQGSSAMAKSFNKERMKQNLEIFDFELSEEELEKIKQIPQRRQYTGDMWLSENGSCKTLEELWDGDV

SEQ ID NO: 4072 - protein, 399 aa, Helicobacter hepaticus ATCC 51449
MDFTHTQALDEEFVLHTYARANVAFVRGENARIFDTQGNDYIDFGAGIGVCSVGHANAKLAQTIYKQAQTLLHTSNLYYIQPQARLAQEIITLYRYNTPYTAPMRAFFCNSGAEANECAIKIARKYGKPRNAYKIITLDSSFHGRTIASLKATAQEKMHQHFGPFPDGFVYAKNLDDVIAKIDDSTCAVLLELVQGEGGVLPMDKEKINTLSTILKQKQILLMVDEVQSGVFRSGEIFASKVYEIDPDVITTAKGLAGGVPIGAVLTKLTDIFEYGDHGSTFGGNFLSCAAGLETLAILNELYNNGTLQRTITLFHAELDALVVDFADIFSHKVGLGLMCGLYTRNPDMQQEIIAQALKHYVIVLKSGKGVVRFLPPLTITQEEIKEGFARVRNALKTL

SEQ ID NO: 4073 - protein, 450 aa, Oryza sativa (japonica cultivar-group)
MSVSGGRTRVGRYELGRTLGEGTFAKVKFARNADSGENVAIKILDKDKVLKHKMIAQIKREISTMKLIRHPNVIRMHEVMASKTKIYIVMELVTGGELFDKIASRGRLKEDDARKYFQQLINAVDYCHSRGVYHRDLKPENLLLDASGTLKVSDFGLSALSQQVREDGLLHTTCGTPNYVAPEVINNKGYDGAKADLWSCGVILFVLMAGYLPFEDSNLMSLYKKIFKADFSCPSWFSTSAKKLIKKILDPNPSTRITIAELINNEWFKKGYQPPRFETADVNLDDINSIFNESGDQTQLVVERREERPSVMNAFELISTSQGLNLGTLFEKQSQGSVKRETRFASRLPANEILSKIEAAAGPMGFNVQKRNYKLKLQGENPGRKGQLAIATEVFEVTPSLYMVELRKSNGDTLEFHKFYHNISNGLKDVMWKPESSIIAGDEIQHRRSP

SEQ ID NO: 4074 - protein, 153 aa, Lilium longiflorum
LKPLKSMDSKFEVDHSLIAKLNQLTEFLANRNQPLRAPFVPDARAMPAAATDIKDMPGAYVFIIDMPGVESEEIKIDVEEGNMLVISGERKREEEEERYLEMQRRMGKMMRKFKLLENANSGAISAVCKNGVLTVTVEKLPSQEPKAIEIKIA

SEQ ID NO: 4075 - protein, 217 aa, Arabidopsis thaliana
RRNGLLKKAKELAILCDAEVGVIIFSSTGRLYDFSSSSMKSVIERYSDAKGETSSENDPASEIQFWQKEAAILKRQLHNLQENHRQMMGEELSGLSVEALQNLENQLELSLRGVRMKKDQMLIEEIQVLNREGNLVHQENLDLHKKVNLMHQQNMELHEKVSEVEGVKIANKNSLLTNGLDMRDTSNEHVHLQLSQPQHDHETHSKAIQLNYFSFIA

SEQ ID NO: 4076 - protein, 357 aa, Saccharomyces cerevisiae
MSQNSNPAVVLEKVGDIAIEQRPIPTIKDPHYVKLAIKATGICGSDIHYYRSGGIGKYILKAPMVLGHESSGQVVEVGDAVTRVKVGDRVAIEPGVPSRYSDETKEGSYNLCPHMAFAATPPIDGTLVKYYLSPEDFLVKLPEGVSYEEGACVEPLSVGVHSNKLAGVRFGTKVVVFGAGPVGLLTGAVARAFGATDVIFVDVFDNKLQRAKDFGATNTFNSSQFSTDKAQDLADGVQKLLGGNHADVVFECSGADVCIDAAVKTTKVGGTMVQVGMGKNYTNFPIAEVSGKEMKLIGCFRYSFGDYRDAVNLVATGKVNVKPLITHKFKFEDAAKAYDYNIAHGGEVVKTIIFGPE

SEQ ID NO: 4077 - protein, 151 aa, Zea mays
MAMAYKMATEGMNVKEECQRWFMEMKWKKVHRFVVYKIDERSRAVLVDKVGGPGEGYEELVAALPGDDCRYAVFDFDFVTVDNCQKSKIFFIACWRLLLSCWSPAASRIRAKILYATSKQGLRRLLDGVHYEVQATDPSEMGFDVIRGRAQ

SEQ ID NO: 4078 - protein, 189 aa, Streptococcus agalactiae
DLFKELEAIKQQTIFDIDNAKTEVEIDNLVHDAFSKMNATVAKFQKGLETNTPETPDTPKIPELPQAPDTPQAPDTPHVPESPKAPEAPRVPESPKTPEAPHVPESPKTPEAPKIPEPPKTPDVPKLPDVPKLPDAPKLPDGLNKVGQAVFTSTDGNTKVTVVFDKPTDADKLHLKEVTTKELADKIAH

SEQ ID NO: 4079 - protein, 468 aa, Glycine max
  unsure (1)..(468): unsure at all Xaa locations
CLILCVGVLLQTYPNPLQDNPAYSVVKQYFVHVDDSVPQKVVVHKDGARGVHFRRAGPRQXDEVQAAIVTCGGLCPGLNTVIRELVCGLHHMYGVKKVLGINGGYRGFYARNTITLTPKSVNDIHKRGGTVLGTSRGGHDTKKIVDSIQDRGINQVYIIGGDGTQKGASAIFEEVRKRGLKVSVVGIPKTIDNDIPVIDKSFGFDTAVEEAQRAINAAHVEAESVENGIGVVKLMGRNSGFIAMYATLASRDVDCCLIPESPFYLEGPGGLYEYIEKRLKENGHMVIVIAEGAGQELVSESVQSMSKQDASGNKLFQDVGLWISQKIRDHFAAQKTLPITLKYIDPTYMIRAIPSNASDNVYCTLLAQSAVHGAMAGYTGYTSGLVNGRQTYIPFYRITERQNHVVITDRMWARLLSSTNQPSFLDAKGDNEEKEEEEALNQLPDGHCAKDTSLASKEINSSIYPTAC

SEQ ID NO: 4080 - protein, 405 aa, Candida albicans SC5314
MVEKKNFQFLTINSWHLYHNSTFQLIMSGSGKLPGLASDAVLKQSIPVPEDFQEVKGIDYSQDNAYNMRAKDLIKSMSTMGFQASSLSQACDIIDNMRSWRGKHKDTLEEHEQTGEFDDEGYQKTTIFMGYTSNLISSGLRDTLRYLVQHKMVSAIVASAGGVEEDLIKVLAPTYMGDFTLPGKGLRDQGMNRIGNLLVPNDNYCKFEEWIVPILDKCLEEQEEAMKKLGPKGLIAGSEAIWTPSKLIDRLGKEINDESSVLYWAHKNKIPIFCPALTDGSIGDMLFFHTFKASPQQLRLDIVADIRKINSMSMAASKAGMIILGGGLIKHHICNACLMRNGADYAVYINTGQEFDGSDAGARPDEAISWGKIKAEAKSVKVYADVSLVFPLIVAATFASEKPQN

SEQ ID NO: 4081 - protein, 477 aa, Brucella suis 1330
MTFHQNLIAGEWVGGDDIANINPSDTNDVVGTYARATAEDTKAAIAAAKAAFPAWSRSGILERHAILRKTADEILARKEELGRLLSREEGKTLVEGIGETIRASQIFDFFAGECLRLAGEVLPSARPGIGVEVTREPVGVVGIITPWNFPIAIPAWKIAPALCYGNTIVFKPAELVPGCSWAIADILHRAGLPKGVLNLVMGKGSVVGQTILDSADVNAVTFTGSTGTGKRVAAASIEHNRRFQLEMGGKNPVVVLDDADLNVAVESVVNSAFFSTGQRCTASSRIIVTEGIHDKFVAAAIEKLKTVVVDNALKPGTHIGPVVDETQLQQDMDYIELGRKEGAKLAFGGERLNRETPGFYLQPALFTEATNQMRISREEIFGPVASVIRVKDYEEALATANDTSFGLSSGICTTSLKYATHFKRNSEAGMVMVNLPTAGVDFHVPFGGRKGSSFGPREQGRYAAEFYTTVKTAYTLA

SEQ ID NO: 4082 - protein, 189 aa, Streptococcus agalactiae
DLFKELEAIKQQTIFDIDNAKTEVEIDNLVHDAFSKMNATVAKFQKGLETNTPETPDTPKIPELPQAPDTPQAPDTPHVPESPKTPEAPHVPESPKTPEAPKIPEPPKTPDVPKLPDVPKLPDVPKLPDVPKLPDAPKLPDGLNKVGQAVFTSTDGNTKVTVVFDKPTDADKLHLKEVTTKELADKIAH

SEQ ID NO: 4083 - protein, 506 aa, Bordetella pertussis Tohama I
MDLSDLKKLGLDVAYPFKEQYENYIGGQWVAPAGGEYFDNLSPITGQPFCRVPRSGAADVELALDAAHRACAAWARTSPAERANILLRIADRIEGQLPMLAVAESIDNGKPLRETTAADLPLAIDHFRYFAGCIRAQEGAISEIDANTVAYHFHEPIGVVGQIIPWNFPLLMVAWKLAPALAAGCVVVLKPAEQTPASILVLAELIGDLLPPGVLNVVNGYGKEAGQALATSKRIAKIAFTGSTPVGKHILHAAADNLIPATVELGGKSPNIFFDDVMDHDDEFLDKALEGLAMFALNQGEVCTCPSRILIQESIYERFIEKAIARVQSIKTGHPLDAGTMVGAQVSQVQMDKILSYIDIGRQEGAQCLTGGARNDMLPGGLDQGFYVQPTMLLGKNSMRIFQEEIFGPVAAVATFKDEEEAIAMANDTFYGLGAGVWSRDGARAYRVGRGIEAGRVWTNCYHLYPAHAAFGGYKQSGIGREAALSNYQQTKCLLVSYSAKALGFF

SEQ ID NO: 4084 - protein, 201 aa, Streptococcus agalactiae
DLFKELEAIKQQTIFDIDNAKTEVEIDNLVHDAFSKMNATVAKFQKGLETNTPETPDTPKIPELPQAPDTPQAPDTPHVPESPKAPEAPRVPESPKTPEAPHVPESPKAPEAPRVPESPKTPEAPKIPEPPKTPDVPKLPDVPKLPDAPKLPDGLNKVGQAVFTSTDGNTKVTVVFDKPTDADKLHLKEVTTKELADKIAH

SEQ ID NO: 4085 - protein, 193 aa, Cucumis sativus
  unsure (1)..(193): unsure at all Xaa locations
TGDEGNNEYKKGLWTVEEDKILMDYVKAHGKGHWNRIAKKTGLKRCGKSCRLRWMNYLSPNVKRGNFTEQEEDLIIRLHKLPGNRWSLIAKRVPGRTDNQVKNYWNTHLSKKLGIKDQKTKQSNGDIVYQINLPNPTETSEETKISNIVDNNNILGDEIQEDHQGSNYLSSLWVHEDEFELSTLTNMMDFINX

SEQ ID NO: 4086 - protein, 201 aa, Streptococcus agalactiae
DLFKELEAIKQQTIFDIDNAKTEVEIDNLVHDAFSKMNATVAKFQKGLETNTPETPDTPKIPELPQAPDTPQAPDTPRVPESPKTPEAPHVPESPKAPEAPRVPESPKTPEAPHVPESPKTPEAPKIPEPPKTPDVPKLPDVPKLPDAPKLPDGLNKVGQAVFTSTDGNTKVTVVFDKPTDADKLHLKEVTTKELADKIAH

SEQ ID NO: 4087 - protein, 495 aa, Rhodobacter sphaeroides 2.4.1
MLQEIDWHARAKAVALPNRPFIDGQYVDSLSGETFACIYPGDGRPLTDVASCNAADVDVAVRSARKAFEAGVWSRMAPADRRRILLRFSELILANREELALLETLNVGKPIANAYNGDVVSAAACIAWYAEAIDKVYGEVAATAYDMTTLVMREPLGIVAAVVPWNYPMSMAAWKLGPALATGNSVILKPAEQSPFTALKFGELAIEAGMPPGVLNVVPGLGHIAGKALGLHMDVDCVGFTGSTEVGKYFMQYSGQSNIKRIGLELGGKSPQVVLADCDDLDAAAAGIAAGIFANTGQVCNAGSRLIVDEKIHDQLLEKIAAQAKVFAPGDPLDTATRMGSMVSEEQMDRVLGYIDAGRADGARPVIGGGRVKTETGGFYIEPTIFEGVRNDMKIAQEEIFGPVLSAIPVKGFDEAMATANDTVYGLAGAVWTGSVKNAHRAAKSLRAGVVWVNCFDRGSLAVPFGGFKQSGFGRDKSLHAMDKYTDLKAVWFAH

SEQ ID NO: 4088 - protein, 232 aa, Triticum aestivum
MGERVKGTVKWFNVTKGFGFISPDDGGEDLFVHQSSIKSDGYRSLNENDAVEFEIITGDDGRTKANDVTAPGGGALSGGSRPVEGGGDRGGRGGYGGGGGGYGGGGGGYGGGGGGYGGGGGGYGGGGYGGGGGGGRGCYKCGEEGHISRDCPQGGGGGYGGGGYGGGGGGGGGRECYKCGEEGHISRDCPQGGGGGGGYGGGGGRGGGGGGGGCFSCGESGHFSRECPNKAH

SEQ ID NO: 4089 - protein, 360 aa, Triticum aestivum
MCTVSSAWRLRPFHHAPVLFPFPSLAPPLPEPSRLPLRMADAKAEAARQAPQSSQEEEEDWKEAEGDVEVADRSTSNGGGAGEGITDRPIRVYADGIYDLFHFGHARSLEQAKKSFPNAYLLVGCCNDELTHQYKGRTVMTEDERYESLRHCKWVDEVIPDAPWVVTEEFLNKHNIDFVAHDSLPYHDASGASNDVYEFVKKLGKFKETKRTEGISTSDIIMRIVKDYNEYVMRNLARGYSRNDLGVSYVKEKRLRVNMGLKTLRDKVKQHQEKVGEKWSTVAKLQEEWVENADRWVVGFLEKFEEGCHSMGTAIKERIQERLKEAQSRDFSLLQYDSDDFDDFEEEDDEVAKDAKYVKE

SEQ ID NO: 4090 - protein, 338 aa, Anisodus tanguticus
MEVISNHNNGSTTKIILKNGSICNGNVNGNSHSHEKIENKLVECTNSIKPGWFSEFSALWPGEAFSLKIEKLLFQGKSDYQDVMLFESATYGKVLTLDGAIQHTENGGFPYTEMIVHLPLGSIPSPKKVLIIGGGIGFTLFEVSRYPTIETIDIVEIDDVVVDVSRKFFPYLAAGFDDPRVTLIIGDGAAFVKAAQPGYYDAIIVDSSDPIGPAKDLFERPFFEALAKALRPGGVVCTQAESIWLHMHLIKQIIANCRQVFKGSVNYAWTTVPTYPTGVIGYMLCSTEGPEVNFKNPVNSIDKDTSHVKSKGPLKFYNSDIHKAAFILPSFARDLVEF

SEQ ID NO: 4091 - protein, 241 aa, Brassica napus
GDPRVRDIEDVRREVEIMKHMPKHPNIVSLKDAFEDDDAVHIVMELCEGGELFDRIVARGHYTERAAAAVMKTILEVVQVCHKNGVMHRDLKPENFLFANKKETSPLKAIDFGLSVFFRPGEGFNEIVGSPYYMAPEVLRRNYGPEVDIWSAGVILYILLCGVPPFWAETEQGVAQAIIRSVIDFKRDPWPRVSDTAKDLVRKMLEPDPKKRLSAAEVLEHPWIQNAKKAPNVSLRETVKA

SEQ ID NO: 4092 - protein, 271 aa, Triticum aestivum
  unsure (1)..(271): unsure at all Xaa locations
MAHAAAAAAVPLRRPLLLFLRPARLLSFVAPRSSSVRAYTRALRPLAPLPSDDEDPDDGDGAPSRNEKKREARRAVKWGMELAKFSPPQIKRIVRAASLEREVVDALMLVKKFGXDVREGRRRQYNYIGSLLRGAQPELMEDLIHSLKNGDESRIQALLSEVADKSMPIEDEEVGELPHEEEDEGNQEYMEIADRWFEGLVCQDIPVTNEVYAIHNVEFDRQELRKLVRIVQEVQKSMGNKDSGEGSDRKLSRAKKPLIMFLRSLAKKTLE

SEQ ID NO: 4093 - protein, 222 aa, Triticum aestivum
  unsure (1)..(222): unsure at all Xaa locations
MKTLLILTIIAVALTTTTANIQVDPSXGQVQWPQQQQPFPQPQQPFSQQPQQIFPQPQQTFPHQPQQAFPQPQQTFLHQPQQQFPQXPKQPQQPFPQQPQQQFPQPQQPQQPFSPSNHNNNFPQPQQPQQPFPQPQQPQLPFPQQQQQQQQQQQQQGIQIMRPLFQLVQGQGIIQPQQPAQLEVIRSLVLGTLPTMCNVFVPPECSTTKAPFASIVADIGGQ

SEQ ID NO: 4094 - protein, 413 aa, Glycine max
MPGHRSKSEKHDVDGGGGEKQLRRDPYEVLGVSRNSTDQEIKTAYRKMALKYHPDKNANDPKAADMFKEVTFSYNILSDPDKRRQYDSAGFEAVESDNQELELDLSSLGAVNTMFAALFSKLGVPIKTTVSATVLEEALNGLVTIRPLPLGHNIAKRVEKQCAHFYSVTITEEEAQAGFVCRVQSPDKSKFKLLYFDQEDNSGLSLALQEDSAKTGKVTSAGMYFLGFPVYRLDQTMNSIAAAKDPDTSFFRKLDAFQPCELTELKAGTHVFAVYGDNFFKSANYTIEALCAAPFSEEKENLRNIEAQILSKRAEISKFEAEYREVLAQFSDMTNRYAHEMQAIDELLKNRNEIQASYTSAPLKRTTSRSRSKNSSKEAKEDGQAKEKRSTRERPKKKKWYNLHLRVDKRKAC

SEQ ID NO: 4095 - protein, 178 aa, Trifolium repens
MALISSAAVTTINRAPVQANLATPFTGLKSSAGFPVTKKNNDITSITSNGSRVNCMQVWPPVGKKKFETLSYLPPLTDEQLLKEVEYLLRKGWVPCVEFELEKGFVHRQYNSSPGYYDGRYWTMWRLPLFGTTDAAQVLKEVAECKAEYPEAFIRIIGFDNVRQVQCISFIASTPKVY

SEQ ID NO: 4096 - protein, 505 aa, Pseudomonas syringae pv. tomato str. DC3000
MSTATILELMRPYWGDRSVIASYVGGAFIEGHGAPVEVRNAHNDSLLLSFPDADESLVEVADKAAKAAQQQWWAMTAQARGRAMYQVGNLIREEQENLAQIESLTANKPIRDARVEVLKVAEMFEYYAGWADKLHGEVIPVPTTHLNYVTYEPLGTVLQITPWNAPIFTCGWQIAPAIAAGNAVILKPSELTPLSSLVVGVLIERAGVPKGLVNVIAGFGHSIGQAFIAKADIRKVVFVGSPATGRHIAVAAAQRCIPAVLELGGKSANIVFDDADLEVALRGAQAAIFSGAGQSCVSGSRLLVQQSIFEKFTNALAVAATQFKVGDPGDPETQIGPINNAKQYNHVKSMVERALKDGAKLVGEQADPIPDRPGYYINPTVLAGTNELHCAQEEIFGPVVVAIAFKDEEDAIRIANDSRFGLAGGVWTRDVGRAHRVAKQVRAGTFWVNGYKTIHVSSPFGGYGESGYGRSSGLDALREYSEVKSVWVETAAKPAASFGYGASLE

SEQ ID NO: 4097 - protein, 160 aa, Synechococcus elongatus PCC 7942
MAPQVTDIAVTTIDGAAKSLSDYAGQVLLIVNVASYCGYTSQYSGLEALYRQYRDRGLQVLAFPCNDFGAQEPGSNEEIKTFCSTRFDVSFELFDKVHAKGADQHPLYAALTQTDPAGDVAWNFEKFLVGKDGTVLARFKSGVAPNDASLIQAIEAALAA

SEQ ID NO: 4098 - protein, 1647 aa, Ustilago maydis 521
MSQPGARRAYHHGSQRGGSTINQKAALASAYQELGKELSSSKLKIVGNYTLQRPIGEGTFGKVRLGLHRLTNTRVAIKQIPKAHSASLTREIHHHRRLHHPNVMQLYEVIATEQYIWMVSELCAGGELYDYLVENQVLAEPEARRIFGQLCLAVAYVHSKGIVHRDLKLENILLDERCNVKLGDFGFTREFERNRLMDTFCGTTGYASPEMLAGKKYTGEQVDIWSLGVILYALLCGALPFDDDDEAVMKQKILQGDFEIPDCLSEEAHDLVVSILQHDPAKRPSIQSILAHPWFTKMMVNSPMSTLEEDQIATDYFASKPSASTSQSKQHDRFPPTLHKALAELDTATELDTADATSAAPPTNPADAFDFEDHDSSNSCHRHHLSASSEQSYHSARSDSESSGRRSTNTDLTDPTTADSLSGTDEVEGLDQAIVQLNASSRPSALANATAAASHPDKNAIGLHRNERLGSNGSDASLSGVPRPSTKTNTASLPTHHELPPVPDGTGQDDHLSIYQSVPLTKRGSQSSSRGHHRTPSRTKRRSLSSGGLSDHHPPMLGRKPVDYVSQLADLQPATFSTSIEQNLLHQLSALGLDVGQMVHSVVTDACDASGATWWMLLRKSKDRHSEQPDITSPIVQVIPAPGDHPAPINASAFSKAGQTVTPSSPAQFSPPPVPVKDPARRSEDKFRTQERPTTLEASSSENAGLAEQSIRRLQTVVSHEELDVSAAPALHTSTSELMMATKPATDRQSSVPASGPMPLAGLPASTVSLPNDRSLTSTPDSVSSRPKSQHRHTTAVASPAKLQHVALTTLEGSPTSEGSKARGNSQNDRPRSNSLSVRQFAQSVLGTKDRGSATSSPVRPPPEQVVVAGEALPLERAKSPTLFGRRNTVSNVKDSMVGRLSGPSTPKKTPVDMLDKPRKSTGKKSCETDLDRVKALERSADSASSSPSRSTTGQAVGVVSNAKVDSSVPSASQDSFSTMSVTPQGSEKSGHRGKAGSFFMSTVRTWLGGNEKPTRKSKTGKQASASHRGLGIDDGPMAAKSPTNSLSTSGSVSTLTYGTPSRSASVRRRSAHYQQTSATRRGGPRSPHLGTSSRRSSNGSSYQAHLELPPNSFQQSMNRPANMRRMSAGSITPTATLHGDYLNDVGGVSGASRHSRPSSSHSLAHSGAASRPGLHGKAGSTGSTSSAYRPGQASSVYSTGSGRRHPRPSQDGGTTVRRHRTYASSSGSPSRRNSFRHDSRPSSIKSRASSPGRAMSGLGELWAADAEADGDGGGTGARRSTRSTPRHSLEMRKTGEAFDSAAPHHQHHQHVVAQSIFVAHKSRSPYRPPSANPNLHGSLVRGSSQLSGRSNVSANSEDAGYVAPNSTLGLPATGTGAWRHSWGRPPPCWAGPVDPPPTSSYSKRSGAAGVEDDGRPKLRDVFANRDDDDWTDEEEEQTYSGGLGQMGTLSSAMSSSVGRVGSGIGASSSPYATRNLAALGSSGYSTQRAVNLDTANAPEIGLREAPFSSRYAGVRNMFQTATAGTPAFGSRSHHSVSLSLGNEFAPRLLSTTIHSPTVSAASLGGGLGCIGESADAHSVTVSSKPKPESSGTQTQAQQQQSSASASASASASQQQQSGGGSSGSGSRITASFHKPVQIIEEEEEDE

SEQ ID NO: 4099 - protein, 120 aa, Oryza sativa (japonica cultivar-group)
MKGAAAVAMVVVAGCLLAAAAVSVVDGAVTCGDVDASLLPCVAYLTGKAAAPSGDCCAGVRHLRTLPVGTAERRFACDCVKKAAARFKGLNGDAIRDLPAKCAAPLPFPLSLDFDCNTIP

SEQ ID NO: 4100 - protein, 322 aa, Ralstonia solanacearum
MAVDPQILQFHQRLAERFGALPLPADALARRARFAAVAEVLARPDPEGIEASDLTLPLPGRTLDAVMFRPRSVQRPRLLVWFHGEGWMVGAARTTHRLMCALLAADTGCAVISVDYRLAPEHPFPAPTDDARDALAYLAEQRLHLSLDPDFLAVGGDSAGGHLAAQAAQAVHDRVRQGLVTAQLLVCPATMPAFGSESYSAFAQGPGLTRDEMRWYWAQFIGEAALDRPLAEQDARLFLMADPPAHLPPDTVVIVAAHDVLRDDGLAYADHLVQHGAQVVTIEASGMTHGFARLQPEAERAREWMRRAAHAFVGMIGGDAAG

SEQ ID NO: 4101 - protein, 201 aa, Streptococcus agalactiae
DLFKELEAIKQQTIFDIDNAKTEVEIDNLVHDAFSKMNATVAKFQKGLETNTPETPDTPKIPELPQAPDTPQAPDTPHVPESPKAPEAPRVPESPKTPEAPHVPESPKTPEAPKIPEPPKTPDVPKLPDVPKLPDVPKLPDVPKLPDAPKLPDGLNKVGQAVFTSTDGNTKVTVVFDKPTDADKLHLKEVTTKELADKIAH

SEQ ID NO: 4102 - protein, 377 aa, Arabidopsis thaliana
MVQRLEFESSRNIYDFAENVTRSLLSHKAPVLESLHLKVGDQFDGVYVGVWATIAFTRHVREFVLDLSSYHGPRVRFPTSLFCFDTLETLKLDYVYIYVPCPVSMKSLRTLHLLSVVYKGDESGHNLFASCPNLEHLVLRRGFFFDAVVNFIIDAPSLKTLLLSDPFSARESSRGYVIKAPSLKYLGIESVEGFEYFLIENVTELVEANIRNVSKIVNENILGSLKSAKRLSLDLSPLKLVYLEMHTHKVEWWNLLTHMLDSSPKLQVLKLIDRETRHENLEFDKKYKDQGKWNQPKYVPECLETFMWRNCNWGREEEKEVATYILRNARQLKKATFSTDPIEAKRLCKLAKRRKMREELDGVVMTSNSCHLVFEFE

SEQ ID NO: 4103 - protein, 172 aa, Triticum aestivum
  unsure (1)..(172): unsure at all Xaa locations
MAAASSATSVHDFTVKDASGKDVDLSVYKGKVLLIVNVASQCGLTNSNYTELSQLYPKYKDQGFEILAFPCNQFGGQEPGTNDEIVQFACTRFKAEYPIFDKVDVNGSNVSPLYKFLKSSKGGLFGXDSIKWNFSKFLVMTRRVTLLDRYAPNPLPPVSIXEKDIKKLLGSS

SEQ ID NO: 4104 - protein, 296 aa, Arabidopsis thaliana
MGYLLEETLSSNSKTPIVIDDDNELGLMAVRLANAAAFPMVLKAALELGVFDTLYAEASRSDSFLSPSEIASKLPTTPRNPEAPVLLDRMLRLLASYSVVKCGKVSEGKGERVYRAEPICRFFLKDNIQDIGSLASQVIVNFDSVFLNTWAQLKDVVLEGGDAFGRAHGGMKLFDYMGTDERFSKLFNQTGFTIAVVKKALEVYQGFKGVNVLVDVGGGVGNTLGVVASKYPNIKGINFDLTCALAQAPSYPGVEHVAGDMFVDVPTGDAMILKVSSIELITYMFWKFIHGTRTLY

SEQ ID NO: 4105 - protein, 207 aa, Streptococcus agalactiae
DLFKELEAIKQQTIFDIDNAKTEVEIDNLVHDAFSKMNATVAKFQKGLETNTPETPDTPKIPELPQAPDTPQAPDTPHVPESPKAPEAPRVPESPKTPEAPHVPESPNVPESPKTPEAPKIPEPPKTPDVPKLPDVPKLPDVPKLPDVPKLPDAPKLPDGLNKVGQAVFTSTDGNTKVTVVFDKPTDADKLHLKEVTTKELADKIAH

SEQ ID NO: 4106 - protein, 490 aa, Bacillus halodurans C-125
MKRDHYRMVINGERVDSDETFETFNPAKGEILATVAKASREHAEKAVQAARHAFDHGKWRKYPVGKRARVLNQIAAIMRERFQELVEIEVLNSGKAISAAQAQINQAIEDFEFYAGAIVGHRGTVNNVPNGFLNYTQKEPVGVCAQIIPWNYPLMMAAWKVAPALAAGCSVVVKPASLTPITAILLNEICHEAGVPEGVVNTVAGAGSVVGDYLVGHEDVNKVAFTGSTPIGKDIMEKASHTLKRVTLELGGKSPNLVFADADMEAAVAGSLFGIYFNTGQSCEARSRLFVHEEIYDEFIEEFITRAKKLQLGDPFDKGTHVGSIISRDQLEIIDSYVRSAEEEGATIALGGKERRVEGFENGHWYEPTVITNVTPDMKAVQEEIFGPVVVVETFQDEREVIKRANDTKFGLGSAIWTKDQGRATRVAHQLEAGIVMVNCPFSAFPGTPFGGYKESGFGRELCVETLDLYMEDKSILSYYGPKPINPFGV

SEQ ID NO: 4107 - protein, 439 aa, Desulfovibrio desulfuricans G20
MALFTKEEALKYHEAPRPGKLEVVPAKPCRNQKDLSMAYSPGVAEACKAIREDPAKAALYTGRSNLVGVVSDGSAVLGLGNIGPLAGKPVMEGKGVLFKTFADIDVFDINLDVRSADQLIEVVKTLEPTFGGINLEDIKAPECFYIEETLKREMNIPVFHDDQHGTAVISGAGLLNALDITNRRAEDMKVVIVGAGAAGIACATFYVALGVDPANIYMFDSRGLIHAGRSDLNSYKKRFAQKKDAGSLEDVMKGADMFLGLSTKDLVSKDMVRAMAKDPVLFAMANPDPEIAYPDAKEACPGCIMGTGRSDFPNQVNNVSGFPYIFRGALDVGATEINEAMKIAAARSLAALAREPVPAEICALYGVDSLEFGVDYVIPKPLDPRVLEWETPAVAQAAMDSGVATVPVADMKAYAASLRVRVDAAARRAAAVVDSYSGV

SEQ ID NO: 4108 - protein, 448 aa, Pseudomonas aeruginosa PAO1
MNQPLNVAPPVSSELNLRAHWMPFSANRNFQKDPRIIVAAEGSWLTDDKGRKVYDSLSGLWTCGAGHSRKEIQEAVARQLGTLDYSPGFQYGHPLSFQLAEKIAGLLPGELNHVFFTGSGSECADTSIKMARAYWRLKGQPQKTKLIGRARGYHGVNVAGTSLGGIGGNRKMFGQLMDVDHLPHTLQPGMAFTRGMAQTGGVELANELLKLIELHDASNIAAVIVEPMSGSAGVLVPPVGYLQRLREICDQHNILLIFDEVITAFGRLGTYSGAEYFGVTPDLMNVAKQVTNGAVPMGAVIASSEIYDTFMNQALPEHAVEFSHGYTYSAHPVACAAGLAALDILARDNLVQQSAELAPHFEKGLHGLQGAKNVIDIRNCGLAGAIQIAPRDGDPTVRPFEAGMKLWQQGFYVRFGGDTLQFGPTFNARPEELDRLFDAVGEALNGIA

SEQ ID NO: 4109 - protein, 184 aa, Pseudomonas syringae pv. syringae B728a
MMKLRFFSIPLLLLAMSGAAMAADCPPLLQGELPKLRAKENIDLCKRFAGKPLVVVNTASFCGFAPQFKGLEALSQRYKGQGLEVLGVPSNDFKQEAKDGEETAKVCYVNYGVTFTMTEPQAVRGDDATHLFKVLAEQSSAPRWNFYKYVVDRQGKVIANFSSMTKPDDPELIAAIEKAIASKP

SEQ ID NO: 4110 - protein, 291 aa, Triticum aestivum
MAISTDSRSEEKPSQHSQVEKRWVLSDFDVGKALGRGKFGHVYLAREKRSSQIVALKVLFKSQLKQSQVEHQLRREVEIQSHLRHPNILRLYGYFYDQTRVYLILEHAAKGELYKELQRCKHFSERRSATYIASLARALIYLHGKHVIHRDIKPENLLVGVQGELKIADFGWSVHTFNRRRTMCGTLDYLPPEMVEKTEHDYHVDIWSLGILCYEFLYGLPPFEAKEHSETYRRIVKVDLKFPLKPFVSPAAKVLISQMLVKNSAHRLPLHKVLEHPWIVQNADPSGVYRG

SEQ ID NO: 4111 - protein, 219 aa, Streptococcus agalactiae
DLFKELEAIKQQTIFDIDNAKTEVEIDNLVHDAFSKMNATVAKFQKGLETNTPETPDTPKIPELPQAPDTPQAPDTPHVPESPKAPEAPRVPESPKTPEAPHVPESPKAPEAPRVPESPKTPEAPHVPESPKTPEAPKIPEPPKTPDVPKTPDVPKLPDVPKLPDAPKLPDGLNKVGQAVFTSTDGNTKVTVVFDKPTDADKLHLKEVTTKELADKIAH

SEQ ID NO: 4112 - protein, 288 aa, Zea mays
  unsure (1)..(288): unsure at all Xaa locations
MATANGSSKGSFEVPKVEVRFTKLFIDGKFVDAVSGKTFETRDPRTGEVIASIAEGGKADVDLAVKAAREAFDNGPWPRMTGYERGRILHRFADLIDEHVEELAALDTVDAGKLFAVGKARGHPGAXAHLLRYYAGAADKVHGATLKMAQRMHGYTLKEPXVGAWVGHIVPWNYPTTMFLLQGRGPRLAAGXPVVVKPAEQTPLSALFYAHLARGGPASPPGVLNVVXPGFGPTAGAAVAAHMDVDKVSFTGSTEVGRLVMRAAAESNLKPVLLELGSYGGGGGGWRD

SEQ ID NO: 4113 - protein, 494 aa, Rhodobacter sphaeroides 2.4.1
MTDLFHALGIADAATGGSLSVLSPIDGAEIGRVRPTDPAAMPGLIARAQEAFRHWREVPAPRRGELVRLFGEELRAAKAELGALVTLEAGKITSEGLGEVQEMIDICDFAVGLSRQLYGLTIASERPGHRMMETWHPMGPCAVISAFNFPVAVWSWNAALALVCGNPVIWKPSEKTPLTALASMAIFGRALARFGDAPEGLAQLVMGGPEIGEALVLSPEVPIVSATGSTRMGRIVGPKVAARFGRPILELGGNNAMIVAPSADLDMAVRAIVFSAVGTAGQRCTSLRRLIVHHSVREELVGRLVKAYASLKIGDPRADGTLVGPLIDAASRDRMVAALDRARAKGGTVHGGKPVEGVPGGAYIQPALVEMPAQTGVVCEETFAPILYVMGYETLDEAIALQNAVPQGLSSCIFTLNLREAEAFVSAAGSDCGIANVNIGPSGAEIGGAFGGEKDTGGGRESGSDAWRGYMRRQTNTINWSAALPLAQGVRFDI

SEQ ID NO: 4114 - protein, 249 aa, Streptococcus agalactiae
DLFKELEAIKQQTIFDIDNAKTEVEIDNLVHDAFSKMNATVAKFQKGLETNTPETPDTPKIPELPQAPDTPQAPDTPHVPESPKAPEAPRVPESPKAPEAPRVPESPKAPEAPRVPESPKAPEAPRVPESPKTPEAPHVPESPKAPEAPRVPESPKTPEAPHVPESPKTPEAPKIPEPPKTPDVPKLPDVPKLPDAPKLPDGLNKVGQAVFTSTDGNTKVTVVFDKPTDADKLHLKEVTTKELADKIAH

SEQ ID NO: 4115 - protein, 367 aa, Archaeoglobus fulgidus DSM 4304
MDIIEELRAYREKDIPYSRVLSSMCTVPHPVAVEAHRMFIETNLGDPGIFRGTVELEAKLMRLIGDILHCETPAGYICSGGTEANIQGIRAARNVQKKENPNIVIPKTAHFSFEKIGDILGVKIKRAGVDEEYKVDVGQVEDLMDENTVAIVGIAGTTELGQIDPIVELSKLAEERQVELHVDAAFGGLVIPFMDNPYPFDFQNRGVSSITIDPHKMGMATIPAGGIIFRNESYLRALEVETPYLTSKTQFTLTGTRPGTGVASAYAVLKSLGFEGMREVVKNCLKNTRILVEEMRDLGFEPVIEPVMNVVSFRTDEAERIKEELYRMRWVISTIREPKAIRFVVMPHVTEEVIKNFISDFRKVLRR

SEQ ID NO: 4116 - protein, 255 aa, Streptococcus agalactiae
DLFKELEAIKQQTIFDIDNAKTEVEIDNLVHDAFSKMNATVAKFQKGLETNTPETPDTPKIPELPQAPDTPQAPDTPHVPESPKAPEAPRVPESPKAPEAPRVPESPKAPEAPRVPESPKAPEAPRVPESPKTPEAPHVPESPKAPEAPRVPESPKTPEAPHVPESPKTPEAPKIPEPPKTPDVPKLPDVPKLPDVPKLPDAPKLPDGLNKVGQAVFTSTDGNTKVTVVFDKPTDADKLHLKEVTTKELADKIAH

SEQ ID NO: 4117 - protein, 323 aa, Salmonella typhimurium LT2
MKPENKIPVLTRLSDEMTAVVNFQQPGLPPWPADGDIETQRQYYLLERRFWNADAPSMTTRTCAVPTPYGDVTTRLYSPQPTSQATLYYLHGGGFILGNLDTHDRIMRLLARYTGCTVIGIDYSLSPQARYPQAIEETVAVCSYFSQHADEYSLNVEKIGFAGDSAGAMLALASALWLRDKHIRCGNVIAILLWYGLYGLQDSVSRRLFGGAWDGLTREDLDMYEKAYLRNDEDRESPWYCLFNNDLTRDVPPCFIASAEFDPLIDDSRLLHQTLQAHQQPCEYKMYPGTLHAFLHYSRMMTIADDALQDGARFFMARMKTPR

SEQ ID NO: 4118 - protein, 250 aa, Brassica napus
MTKNYPAVSEEYQKAIEKCKRKLRGLIAEKNCAPIMVRLAWHSAGTFDCASRTGVPFGTMRFDGELAHGANSGLHIALRLLEPIREQFPTISHADFHQLAGVVAVEVTGGPEIPFHPGREDKPQPPPEGRLPDATKACDHLRQVFLKQMVLTDQDIVALSGAHTLGRCHKDRSGFEGAWTSNPLIFDNSYFKELLSGEKEGLLQLPSDKALLDEPVFRPLVEKYAADEEAFFADYAEAHLKLSELGFADA

SEQ ID NO: 4119 - protein, 377 aa, Vibrio cholerae O1 biovar eltor str. N16961
MSAAKELGGAGLRGQSAGSTALCTVGKTGTGLTYRGYDITDLAHHAQFEEVAHLLLVGYLPTQAELDQYKTRLIGLRGLPEKLKQALELIPAEAHPMDVMRTGCSILGNLEPEHTFAEQQAATERMLALFPAIICYWYRFSHEGVRIDTADQSEDSIGGYFLKMLTGQAPSELFKKVMHCSLTLYAEHEFNASTFAARVCASTLSDIHSCVTGAIGTLRGPLHGGANEAAMAMIEQWHSADEAEAGIMRMLASKEKIMGFGHAIYRESDPRNALIKEWSKALSEAVGDSHLYAVSERVEAVMKREKDLFCNADFFHASAYHFMGIPTKLFTPIFVMSRLTGWAAHVYEQRANNRIIRPSADYVGPEHQTWLPIEQRG

SEQ ID NO: 4120 - protein, 274 aa, Haloarcula marismortui ATCC 43049
MDDIQIQGTSVPALGLGTWQLTGQSCRETVETALGMGYRHIDTAQAYGNERQVGLGMDAAAVDREDVFLTTKLDGSNRDERSVRRSTRESLNKLGTDYLDLLLIHWPNTPWMASLSETLGAMNDVVEEGLVRHIGVSNFSPSLLDRARDISSAPIFTDQVQYHPYWDQRKLLDYCRIHDVLLTAYSPLARGGVLDDPALVQIGNKYGKSPAQVALRWLVQQDGVAAIPKASSREHLEANLAVFDFELTDAEMERIRDPSKVKTGVQFVRSQLPF

SEQ ID NO: 4121 - protein, 331 aa, Neurospora crassa
MTGFTAANTTYTLNNGVRIPAVGFGTFANEGAKGETYAAVKKALEVGYRHLDCAWFYQNEDEVGQALAEFLENHKDVKREDIFICTKVWNHLHEPEDVKWSLQNSLDKLKVDYVDLFLIHWPIAAEKDEATNMPKIGPDGKYIIKKELTENPEPTWRAMEDLVDAGKTRSIGVSNWTIPGLQKLLKFARIKPTVNQIEIHPFLPNTELVEFCFKNQIIPTAYSPLGSQNQVPSTGERVRDDPTLKAVAERSGHNLAQVLLAWGLRRGYVVLPKSSTPSRIESNFQIPVLRDEDFKAIQEVAKGRHCRFVNMKDTFGYDVWPEESDGQLKQE

SEQ ID NO: 4122 - protein, 122 aa, Streptococcus mutans UA159
MALNIENIIAEIKEASILELNDLVKAIEEEFGVTAAAPVAAAGAAGGEEAAAKDSFDIELTAGGDKKVAVIKVVREITGEGLKEAKGLVDNAPSVLKEGVAAAEAEELKAKLEEAGATVTLK

SEQ ID NO: 4123 - protein, 496 aa, Pseudomonas syringae pv. tomato str. DC3000
MVAELLARLGVANSAHTQGDYPVYTPIDGSQIASVTLENEAQVVARIDSAHSAFLKWRTVPAPRRGELVRIFGEVLREHKADLGELVSVEAGKITQEGLGEVQEMIDICDFAVGLSRQLYGLTIASERPGHHMRETWHPLGVVGVISAFNFPVAVWAWNTTLALVCGNPVIWKPSEKTPLTALACQALFDKALTIFGDAPAALAQLVIGDRDAGEALVDDPRVPLISATGSTRMGREVGPRVAARFGRTILELGGNNAMILAPSADLDLAVRGILFSAVGTAGQRCTTLRRLIVHRSIKDEVVACVKAAYAKVRVGDPREGNLIGPLIDQQAFSAMQNALTKARDEGGQVFGGERQLQDKYPNGYYVTPAIAEMPGQTEVVRHETFAPILYVLAYDDFEEALRLNNEVPQGLSSCIFTTDLREAEAFQSAAGSDCGIANVNIGTSGAEIGGAFGGEKETGGGRESGSDSWRAYMRRQTNTVNYSRELPLAQGIVFD

SEQ ID NO: 4124 - protein, 410 aa, ASPERGILLUS NIDULANS FGSC A4
MSLSPEQIQLIKATVPVLQEHGTTITKVFYDNMLTAHPELKTVFNVSNKVHGHQPQALAGALFAYASYIDNLGVLSPAVERICHKHASLAIQPDGYQIVGKFLLEAMGQVLGDALTPPLLEAWAAAYWQLANIMIGKEAELYKSADGWTDFRDFRVARKEPESDVITSFYLEPVDGKPLPSFLPGQYVSIQVQVPQLNHAQCRQYSLSDQPKPTYYRISVRKDLGLDASDPSAPAHPGYVSNILHDNINVGDIVKLTHPYGDFHLTDAAASSPLVLISAGVGLTPMTSMVNTLRTAESNTRPVHFIHGAHTSASRAFQAHLQSLPNLKTTYFLTAPTESDKQGENYTYKGRVDLSKIADEDLFLGDKQTEYYICGPTAFMLDTQKALVARGVDQSRVHMELFGTGGVPAA

SEQ ID NO: 4125 - protein, 122 aa, Anabaena variabilis ATCC 29413
MIQPQTYLNVADNSGARKLMCIRVLGAGNSRYGFIGDKIIAVVKDATPNMAVKKSDVVEAVIVRTRHHIRRDSGMTIRFDDNAAVIINKDGNPRGTRVFGPVARELRDKNFTKIVSLAPEVL

SEQ ID NO: 4126 - protein, 177 aa, Glycine max
  unsure (1)..(177): unsure at all Xaa locations
ALSMISSSAVTTVYRACAGMVAPFTVLKSMAGFPTRKTNNDITSIANNGGRVHCMHVWPPSVKKKFDTLFFLPHLADAQLANGSEYLPMMGWISCLQFKLEHGSVYREHNRSPGYYYGLYCTMSKLPIFACTDASHASKDLLEAXTVFPDGFLRIIRFHNVRQEHCIIFISYNRSCF

SEQ ID NO: 4127 - protein, 486 aa, Chloroflexus aurantiacus
MTATAEDVLSTLPLRLLINGEWRDANNGATFAVINPANGTVLGYVPNAGVEETRTAIAAAVAAQPGWAATPAGERAALLRRVAQMMLDRQQELATIMTLEQGKPLAEARGEIAYAASFLSWFAGEAERIYGMTIPASTNAKRILVLRQPVGVVAMITPWNFPSAMITRKLGPALAAGCTVICKPAEQTPLSALALGQLFSEAGAPPGVINILTCQDPRPFADTIFADTRVRKISFTGSTEVGKELMRRSADTLKRVSLELGGNAPFIVFADADLDAAVRGAVASKFRNAGQTCVCANRIFVQRPIYAAFAERFAAEVNRLTVGDGLQPGVNIGPLIDDQARQKVERHVHDAIAAGARVLVGGGPAPLGGNFWLPTVLLDARSDMLVAREETFGPVAPLIPFDDEAEVIRMANDTPYGLAAYAFTRDVGRVWRLAEGLEYGIIGINDPIPSTAQAPFGGVKQSGIGREGGPTGIDEYLDIKYVSIGI

SEQ ID NO: 4128 - protein, 289 aa, Mycoplasma gallisepticum R
MYLTTKKIKVMKYNLLANNYKMPSIGFGTYKLEDGKQTVEAVKTALEVGYRHLDCAEIYENQLSVSQGIKLSGVNRKEIFITSKIWNDDKGYESTKKAFHKILKDLDLEYLDLLLIHWPIGKGFKDNWQEVNAQTWKAMEEFYLEGKIKAIGLSNFLVHHIEALKKSAKILPMVNQLEFHPGYLQPEIVEYCQKNNIVVQAWSPFSQSKVLENKTLVQLAKKYEVTVAQLILNWIIQKDIVPLPKSKTPERIRSNFDVFNFGINQADLKVIDQLNDCGGLGLHPDQVDF

SEQ ID NO: 4129 - protein, 255 aa, Streptococcus agalactiae
DLFKELEAIKQQTIFDIDNAKTEVEIDNLVHDAFSKMNATVAKFQKGLETNTPETPDTPKIPELPQAPDTPQAPDTPHVPESPKAPEAPRVPESPKTPEAPHVPESPKAPEAPRVPESPKAPEAPRVPESPKTPEAPHVPESPKAPEAPRVPESPKTPEAPHVPESPKTPEAPKIPEPPKTPDVPKLPDVPKLPDVPKLPDAPKLPDGLNKVGQAVFTSTDGNTKVTVVFDKPTDADKLHLKEVTTKELADKIAH

SEQ ID NO: 4130 - protein, 219 aa, Streptococcus agalactiae
DLFKELEAIKQQTIFDIDNAKTEVEIDNLVHDAFSKMNATVAKFQKGLETNTPETPDTPKIPELPQAPDTPQAPDTPHVPESPKAPEAPRVPESPKTPEAPQAPDTPHVPESPKAPEAPRVPESPKTPEAPHVPESPKTPEAPKIPEPPKTPDVPKLPDVPKLPDAPKLPDGLNKVGQAVFTSTDGNTKVTVVFDKPTDADKLHLKEVTTKELADKIAH

SEQ ID NO: 4131 - protein, 372 aa, Archaeoglobus fulgidus DSM 4304
MKDGLEDVIACKTTISRIALENGRAILEYRGYDIRDLARKASYEEVAYLLLYGELPKKYELQDFKIELAERRELPPQIIGLLTHLPPYTHPMVVLRTATSYLGSLDKKIAVRTREETFNKAKDLIAKFPTIVAYYHRIRTGRNIIPPALEFSHAANFLYMLHGEEPTKTAERALDMDLILHAEHELNASTFAARIAASTLADIYACVVAATGTLMGPLHGGAAQEVMRMLREVASPRRAEEYVKRKIEAGERIMGFGHRVYRGVMDPRAELLRYLAKRLAAEGSTKWFEISEAIAKAAYKYKKLLPNVDFYSASVYANLGIPDDLFVNIFAMGRISGWTAHIIEQYENNRLIRPRAEYVGEKEKKFIPLSKR

SEQ ID NO: 4132 - protein, 358 aa, Ammi majus
MASHDQEAFLAAMQIVNSSTVDGVLNALIELNVFDIIMKKVGLDGYLHPDEIALNLPAKNLEASDMLDRMLRLLATHSIIKCKLVKRSGGTHRLTRSYGLTSISQYFVQAKDGPCLAPYIRLIHHKEMQRSWSKVKDATIEGGVPFNKAHGGKNIFEYLEKDKDLAELLSQAMDKSIATSMNILLQMYKGLEGVQEVVDVGGAHGATLSCIVSMNPHLKGINFDLPHVVKNAPSLPGIVHVGGDMFESVPRGDVILLQRLLHDWTDEESVKILKTCHEALPDHGKVVIIEMMPAELPENDVQAKNISQVDIRMLIYTHGGRERTAEEFQMLGKEAGFASSKFICGADLYGVVELYKKM

SEQ ID NO: 4133 - protein, 166 aa, Triticum aestivum
  unsure (1)..(166): unsure at all Xaa locations
MSDSEEHHFESKADAGASKTYPQQAGTVRKNGFIVIKNRPCKVVEVSTSKTGXSMGHAKCHFVAIDIFXMGKKLEDIVPSSHNCDIPHVNRTEYQLIDISXEDGFVXSLLTSDGNTKDDLRLPTXDETLVAQIKEXFESGKDLVVTVQSAMGXEEQICALNGFGPK

SEQ ID NO: 4134 - protein, 146 aa, GIBBERELLA ZEAE PH-1
MPARSKEEQPQAEDTNMEDAPASAQPETNDEEVEDEEEEEEIEAQRVRILPGSTDTAASFEFTDEGHTLGNALRYIIMKNPDVEFCAYSIPHPSEPKMNIRIQTYSGTAVDALKKGLVDIQEVCDVVADEFWTKREAYNAEQGIDR

SEQ ID NO: 4135 - protein, 484 aa, Brucella melitensis 16M
MKSTIHSEGAAVSASVANHTPKPPLLSVDDAKALDLPRMTELFTAHLNPGQLHFMKLLGFHKVKVERAEGMYYYDQNGRRILDFFGGFGSLAFGHNHPRIIAARRKFQEELRHEIAIAFMSQYAAALAYDLAACSPGDLDMVFLGSSGSEAMEAAIKVAERAAGPKKPKIVYAENSFHGKTKGVLSITDGGLYRGEFKLVDNTVRVPFGDITAIENAFRSDPEIGTIVLETVQGGCGIIQADAEFWQKLRQLCDRYGVIWVADEVQCGFGRTGKFYAFEHYGVIPDVTALAKSLGGGKAAMAAMIARRDIYMKAYGTPKTAMIHAMATFGGIGEACITAIEAVNILYDEQLIDNSAEVGDYLLERLKELQVRYPGLLKDVRGKGMMVGLEFHDFSQAMPMVLRPMLAMLDDKLKGSLPGFIGSHLLRDHGVLVAFTEYNRNVIRLEPPLICQRAHVDEFIKALDEVLSRGIVKIVKDFIKAQIK

SEQ ID NO: 4136 - protein, 177 aa, Nostoc punctiforme PCC 73102
MRQQEPGVTVWFTGLSGAGKTTICQFVEKELRIQGYRVEVLDGDAVRQNLCKGLSFSKEDREENIRRIGFVAHLLARNNVIVLVSTISPYRKVREEVRQNIPSFIEVYVNASLEVCEQRDVKGLYKKARMGEIKNFTGIDDPYEIPLRPEVECKTNQETLYQSATKVLEKLEELGYI

SEQ ID NO: 4137 - protein, 490 aa, Gloeobacter violaceus PCC 7421
MIRSLVWFRKGLRLHDNPALLDAARDAARLYPLFIVDPWFVNPERVGVNRMRFLLESLGEIDGNLRRLGSRLIVLQGRPQEVLERVLSRWQIGRLCFERDTEPYARRRDEAIRSMAERVGVRVISPTAHTLYDPDELIELGRGKVPTTYGAFGRLAAKLGEPDAPVASPSHLPPPGELDADYGIPTLAELGYPDPECPSRGIIPPGGEGEGLRRLHVYLSDRQRSAGFAKPDTDPTAFDPPSTTALGAHLKFGCLSARTFYAEVQKVYREVGEHTEPPMSLIGQILWREFFYTVGYATPNYDRIEGNPVCRQIPWDDNPEYLAAWSEARTGFPWIDAAMTQLRTEGWLHHLSRHAVACFLTRGDLWVSWEKGQAVFERLLLDQDWSLNASNWMWLSASAFFNAYYRVYSPISFAKKYDPEGRYVRRYLPKLARVPAEFIYEPWRAPLLVQKQAGCVVGRDYPDPIVDHEQAKACNLERMRLAYEQNAKGG

SEQ ID NO: 4138 - protein, 170 aa, Zea mays
MAPTVMMASSATAVAPFQGLKSTASLPIARRSSRSLGNVSNGGRIRCMQVWPAYGNKKFETLSYLPPLSTDDLLKQVDYLLRNGWIPCLEFSKVGFVYRENSTSPCYYDGRYWTMWKLPMFGCNDATQVYKELQEAIKSYPDAFHRVIGFDNIKQTQCVSFIAYKPPGSD

SEQ ID NO: 4139 - protein, 312 aa, Triticum aestivum
MDPMDIVGKSKEDVSLPKSTMTKIIKEMLPPDVRVARDTQDLLVECCVEFINLLSSESNDVCSRDDKKTIAPEHVIRALQDLGFKEYVEEVYAAYEQHKLETLDSPKATKFTGIEMTEEEAVAEQQRMFAEARARMNNGAAKPKEPALEPQNQPQQPPQPHLQLHPQAQQPPQPQPQLHYPQSQQPLQPFTQAPPQQPLHPQLQQYTQAPPQQPLQPPLQLYPQAQPEQPLQPQSSGSTTGTCVISAAAPSATGTLLLQPPPQQSPQSQLQLHQQPQPTLVPPPQPQPQPLELQQPQPLTQLQAEHGLDWDS

SEQ ID NO: 4140 - protein, 110 aa, Lactobacillus delbrueckii subsp. lactis
  unsure (1)..(110): unsure at all Xaa locations
LQPDTKIRTFAIGMDQNPIDLKYAREVADYLGTDHTEFIMTREDVLGVLREVIYTLETWDITTIRASIGMYILCKKIHETTDLKVILTGECSDELFGYKYXDFAPSPEEF

SEQ ID NO: 4141 - protein, 497 aa, Ammi majus
MDVIIIVLSVMLAYVLVKHLLLSRDRGKNLPPGPFQLPIIGNLTNLGKLPHRSLAKLSQNYGPIMHLQLGRVTTIVISSSAIAQQVFQKKGRAFSRRFIPDSLCACDHSLYSFVWLPIGPQWRNLRKISNSNLFSANKLDANQHLRGRKVNELIAYVQKCSQTGDAVDIGRAAFRTSFNLLSNTVFSKDMVDPYQDSAQEFKDLAWNIMVEAGSPNLVDYFPVLKKMDPQGVKRRMTGYFQKVIKMLDGLINERLALKGSGTTVDKTDMLDELINISQVNPNEMDKILMEHLFVDIFVAGTDTTSNTVEWGMAEILRSTETMMKVKAELRHLVGKGVILEEGDIYRLPFLQCIVRETLRLHPPFPLLLPRQTEEETELNGYTIPKNSQVLVNAWAIGRDPVSWKNPSSFRPERFLDSEVDVKGQDFELIPFGAGIRICPGLPLVMRMVPVMLGSLINCFDWELEGGIPLNELDMEEKCGLSVAKLHPLRVLATSQVV

SEQ ID NO: 4142 - protein, 197 aa, Zea mays
  unsure (1)..(197): unsure at all Xaa locations
MATSFQGTATKCTACDKTVYLVDKLTADNRVYHKACFRCHHCKGTLKLANYNSFDGVLYCRPHFDQLFKRTGSLDKSFQGTPKVVKPERNVGNENATKVSSAFAGTREKCVGCSKTVYPIERVTVNNTMYHKCCFKCCHGGCTISPSNYIAHEGKLYCKHHHVQLIKEXGTSASSRMTTRRHRRLGRWRTTKKKSIN

SEQ ID NO: 4143 - protein, 601 aa, Glycine max
  unsure (1)..(601): unsure at all Xaa locations
MWKVVRYAAARSRRFSTAIPGPCKVHKRGTDILHDPWFNKDTGFPLTEREXLGLRCLIPPRVISFEQQYDRFMNSYRSLENNTQGQSDRVVSLSKWRXILNRLHDRNETLYYRVLIDNIKEFAPIIYTPTVGLVCQNYSGLFRRPRGMYFSAKDKGEMMSMIYNWPAHEVDMIVLTDGSRILGLGDLGVQGIGIPIGKLDVYVAAAGINPQRILPVMLDVGTNNQKLLEDRLYLGLRQPRLEGEEYLSIVDEFMEAVHARWPKAIVQFEDFQMKWAFETLKRYRKRFCMFNDDIQGTAGVALAGLLGTVRSQGQPLTDFVKQKIVVVGAGSAGLGVLSMAVQAVSRMSGGSGTDANSQFFLIDKDGLVTTERSNLDPAAVPFAKNPRDLEGLSEGASIIEVVKKVKPHVLLGLSGVGGVFNTEVLKXLYPSVDSIRAVTAKVGAAMLRAAVAIEAFSHAGENIVFASGSPFENVDLGNGEVGHVNQANNMYLFPGIGLGTLLSVFCHTSDRIVSAAADCLASYMTDADVRRGILYPSIDCIRDVTAEVGAAVVCAAVAEKQAEGHGDVGFKELENMSKEETVEYVRGNMWYPEYCPLVHEK

SEQ ID NO: 4144 - protein, 299 aa, Neurospora crassa
MPVRVVPREDEQVDDERQGVDFATAVSNCPPTAERPQAIDIDVDIYKPSIARANVAPSTEQPEGSAEYVDALDLKDYTVLQQHCMFWDRDRDGVIWPQDTFIGFYELGFNLFFCFLATLVINLNFSYPTRLGVSYIPDPYFRLYLPSMHKAKHGSDSGTYDKEGRFVPQAFEDMFSKWDRGDKGALSAGELWNMIAANRLAADPFGWAAGIFEFGVTWLLVQQDGMVDKEDLRRIYDGSMFFKIREAYRTEKGWNKGFGLCEFFNLGREQWAKNKGRIPPLNGIVSKVERSVTQKLHRA

SEQ ID NO: 4145 - protein, 365 aa, Ammi majus
MNTTTELIPPTFQVNDDEEEACMFAMQLASASVLPMVLKSAIELNLLESIAKAGPGAYVSPSQLAAALPSSQPDTPVMLDRILRLLASYSVLNCKLRDLPDARVERLYGLAPVCKFLTKNSDGVSMAPLLLMNQDKILMESWYHLKDAVLDGGIPFNKAYGMTAFEYHGKDPRFNKVFNQGMSNHSTITMKKILQTYDGFGGLKTVVDVGGGTGATLNMIISKYPNLKGINFDLPHVVEDAPSYAGVEHVGGDMFVSVPKGDAIFMKWICHDWSDAHCLAFLKNCYKALPKDGKVILAECILPEAPDSKLTTKNVILIDVIMLAHNPGGKERTEKEFEAFGKQAGFKSFNKACCAYNTWVIEYYK

SEQ ID NO: 4146 - protein, 437 aa, Vibrio vulnificus CMCP6
MTNLTRRQQIEALEKDWATNPRWKNVKRTYTAEEVVALRGSMVPANTIAQRGADKLWSLVNGSSKKGYVNCLGALTGGQAVQQAKAGIEAIYLSGWQVAADNNTASTMYPDQSLYPVDSVPSVVKRINNSFRRADQIQWSNGKSPEEGGIDYFLPIVADAEAGFGGVLNAYELMKSMIEAGAAGVHFEDQLASVKKCGHMGGKVLVPTQEAVQKLVAARLAADVAGTTTLVIARTDANAADLLTSDCDPYDADFIVGERTQEGFYRVRAGIDQAISRGLAYAPYADLIWCETATPCLEEARKFAEAIHAEYPDQLLAYNCSPSFNWEKNLDAETIAKFQQELADMGYKYQFITLAGIHNMWFNMFELAHAYAQGEGMRHYVEKVQRPEFEAAEKGYTFVAHQQEVGTGYFDKMTNTIQGGNSSVTALTGSTEEDQFH

SEQ ID NO: 4147 - protein, 433 aa, Mesorhizobium loti MAFF303099
MGGANQEATATLQFAGKTHEFKVRSGSVGPDVIDIASLYSTTGAFTYDPGFTSTASCESEITFIDGDAGILLHRGYPIDQLAEHGDFLEVCYLLLYGELPTKAQKDDFDYRVTRHTMVHEQMSRFFTGFRRDAHPMAVMCGVVGALSAFYHDSTDISDPYQRMVASMRLIAKMPTIAAMAYKYHIGQPFIYPKNDLGFAANFLHMCFAVPCEEYKINPVLARAMERIFILHADHEQNASTSTVRLAGSSGANPFACIAAGIACLWGPAHGGANEAALNMLGEIGHVDHIPEFIARAKDKNDPFRLMGFGHRVYKNYDPRAKIMQKTAHEVLGELGIKDDPLLDIAMELEKIALTDPYFIEKKLYPNVDFYSGITLKALGFPTTMFTVLFAVARTVGWIAQWKEMIEDPRQKIGRPRQLYTGAPERDYVPIAKR

SEQ ID NO: 4148 - protein, 361 aa, Streptomyces ambofaciens
MPELPPPHVVREAEKARAELQRQSRELAPPPFALLEMIMGVMVSRAVHVVAELKVAEALAEGPLSAEELAGRVGADADALGRVLRLLASNGVFATRADGTFELTPMADALRADHPMSMRPIALLMGHPIHWEDWSGFPETVVTGEPALPKLRGMHAFEFLTKNAEYGQVFFEGMGSMSASETGPIVAAYDFTRFGTVVDFCGGQGGLLAGILASSPATRGVLYDPRVEENGAAEFLAAQGVADRTERVAGDLFEVPPGGADAYVLKHIVHDWPEEQALQILRNVRAAIKPGGRLLIAEMVIPEQGDEPHSGKLVDLWLMLLVGGRERTPGQYADLLARAGFRLERVVETAAAISLVEAVPV

SEQ ID NO: 4149 - protein, 495 aa, Alternaria alternata
MTSVKLSTPQTGEFEQPTGLFINNEFVKAVDGKTFDVINPSTEEVICSVQEATEKDVDIAVAAARKAFNGPWAKETPENRGKLLNKLADLFEKNADLIAAVEALDNGKAFSMAKNVDVPAAAGCLRYYGGWADKIEGKVVDTAPDSFNYIRKSLLVFAVRSSMELPILMWSWKIGPAIATGNTVVLKTAEQTPLSAYIACKLIQEAGFPPGVINVITGFGKIAGAAMSAHMDIDKIAFTGSTVVGRQIMKSAAGSNLKKVTLELGGKSPNIVFADADLDEAIHWVNFGIYFNHGQACCAGSRIYVQEEIYDKFIQRFKERAAQNAVGDPFAATLQGPQVSQLQFDRIMGYIEEGKKSGATIETGGNRKGDKGYFIEPTIFSNVTEDMKIQQEEIFGPVCTISKFKTKADVIKIGNNTTYGLSAAVHTSNLTTAIEVANALRAGTVWVNSYNTLHWQLPFGGYKESGIGRELGEAALDNYIQTKTVSIRLGDVLFG

SEQ ID NO: 4150 - protein, 487 aa, Adiantum capillus-veneris
MTTSTTIVWLRRDLRLDDNPALKEASKIGNAVVPVFVWVPEEEGQFQQGRMSRWWLKQSLKQLAQSLDSLGSPLIIRRSSSSLQALMDLVIHTQASQVFFNHLYDPISLVRDQRVKEGLLQTGIHVRTFNADLLYEPWQVNDPSGKAFTTFNEFWDKCLNMPEEPHAPLLPPTRSLLAFAGHLPGCTVEDLELENNSEKDSNALLARSWTPGWINAEKALEAFVERHLLQYAANQHMVDGSTTSFLSPHLHFGELSVRKVFYNVRIKAVQWTKEGKPDGEQSVNLFLRSIGLRDYSRYICFNFPFTHERLILQNRRPFPWRVDEGLFKAWRQGRTGYPLVDAGMRQIWATGWLHNRIRVIVSSFFVKVLQLPWTWGMKYFWDALLDADLENDILGWQYISGGLPDGHELERMDDLQIEGYKYDPRGEYVRKWLPELSRLPTEWIHHPWDAPPRALRAAGVELGSNYPRPLVEFAAAWSRLQTALREA

SEQ ID NO: 4151 - protein, 331 aa, Methanothermobacter thermautotrophicus str. Delta H
MYRITVIPGDGIGVEVMEAALHVLQALEIEFEFTHAEAGNECFRRCGDTLPEETLKLVRKADATLFGAVTTVPGQKSAIITLRRELDLFANLRPVKSLPGVPCLYPDLDFVIVRENTEDLYVGDEEYTPEGAVAKRIITRTASRRISQFAFQYAQKEGMQKVTAVHKANVLKKTDGIFRDEFYKVASEYPQMEANDYYVDATAMYLITQPQEFQTIVTTNLFGDILSDEAAGLIGGLGLAPSANIGEKNALFEPVHGSAPQIAGKNIANPTAMILTTTLMLKHLNKKQEAQKIEKALQKTLMRGIMTPDLGGTASTMEMAEAIKEEIVKGE

SEQ ID NO: 4152 - protein, 474 aa, Prochlorococcus marinus subsp. marinus str. CCMP1375
MVHYEKLSPPTTGEKIKFNNGLPIVPANPIIPYIRGDGTGVDIWPATQKVIDQAIEKAYGIDRKIEWFKIYAGDEACDLYGTYQYLPKDTIEAIREYGVAIKGPLTTPIGGGIRSLNVALRQKFDLYSCVRPCRYYQGTPSPHKHPENLDVIVYRENTEDIYIGIEWESNDPIGIKLIEHLNNDVIPASPSLKNRIIPQGSGIGIKPVSKDGSQRHIRRAIQHALKLNGNKRHVTLVHKGNIMKFTEGSFRDWGYELATNEFRNECITERESWILSNLEQNPRLSIENNAKLIDPGYESLTKEKKDIICNEVQLVINNIHKTHGNNKWKKMVLVDDRIADSIFQQIQTRPQEYSILATLNLNGDYISDAAAAIVGGLGMAPGANIGDRAAIFEATHGTAPKHAGLDRINPGSVILSGVMMLEYIGWQEAADLITKGLSQSIYDKQVTYDLARLMEPPQSPLSCSEFANAVIERF

SEQ ID NO: 4153 - protein, 280 aa, Bacillus subtilis subsp. subtilis str. 168
MTTHLQAKATLHNGVEMPWFGLGVFQVEEGSELVNAVKTAIVHGYRSIDTAAIYGNEAGVGEGIREGIEEAGISREDLFITSKVWNADLGYEETLAAFETSLSKLGLDYLDLYLIHWPVEGKYKEAWRALETLYKEGRIKAIGVSNFQIHHLEDLMTAAEIKPMINQVEFHPRLTQKELIRYCQNQGIQMEAWSPLMQGQLLDHPVLADIAQTYNKSVAQIILRWDLQHGIITIPKSTKEHRIKENASVFDFELTQDDMNRIDALNENLRVGPDPDNFDF

SEQ ID NO: 4154 - protein, 326 aa, Escherichia coli O157:H7
MWKEPGTSCIHLEKTHLIIKLLRSIIDDIAPGTVIITETNVPHKDNIAYFGEGDDEAHMVYQFSLPPLVLHAVQKQNVEALCQWAQSLSLPSGKTTWFNFLASHDGIGLNPLRGLLPESEILALVEALQQEGALVNWKNNPDGTRSPYEINVTYMDALSRRESSDEERCARFILAHAILLSFPGVPAIYIQSILGSRNDYAGVEKLGYNRAINRKKYHSEEITRELNDEATLRHAVYHELSRLITLRRSHNEFHPDNNFTIDTVNSSVMRIQRSNAEGNCLTGLFNVSKNIQHVNITGLHGRDLISEVDILGNKITLRPWQVMWIK

SEQ ID NO: 4155 - protein, 216 aa, Desulfitobacterium hafniense DCB-2
MTTALNEAAAAVVRATVPALAAHGHAVTTAMYRRLFRDERIAALFNHANQGGDNAQAHALAGAILAYAQHIDDLPALSGALERIAQKHVGYHILPEHYPFVAGALLGAIEETLGEAATPQVLAAWGEAYWFLADLLQRREAELRGELAQVVGGWSGWREFVVAAKRAENASSDAAIVSFELRPADGGAVIAHRPGQYLTLRYPVPGQARQAQYSIS

SEQ ID NO: 4156 - protein, 317 aa, Burkholderia fungorum LB400
MTTALDQLKQYTTVVADTGDFQQLAQYKPQDATTNPSLILKAVQKDDYKPLLEKTVKAHASKPVGAIIDQLLIAFGTEILKIIPGRVSTEVDARLSFDTEGSIAKGRELIALYKEHGIGRERVLIKLASTWEGIRAAEVLQKEGIHCNMTLLFSLAQAAACAEAGAQLISPFVGRIYDWYKKNAGSAWDEAKDGGANDPGVKSVRRIYAYYKKFGYKTEVMGASFRTPGQILELAGCDLLTISPDLLQKLHESTEKVERKLSPDIAKESDIERVPVDESSFRFLVNDEAMATEKLAEGIRAFAADAIKLEKLIDALR

SEQ ID NO: 4157 - protein, 278 aa, Arabidopsis thaliana
MIKSEADLSDVIVIRDVWAYNLESEFDLIRGIVEDYPFISMDTEFPGVIYKADLDVLRRGNPNYLYNLLKSNVDALSLIQVGLTLSDADGNLPDLGGQKNRRYIWEFNFRDFDVERDPHAPDSIELLRRHGIDFERNRREGVESERFAELMMSSGLICNESVSWVTFHSAYDFGYLVKILTRRQLPVALREFLGLLRAFFGDRVYDVKHIMRFCEQRLYGGLDRVARSLEVNRAVGKCHQAGSDSLLTWQAFQRMRDLYFVEDGAEKHAGVLYGLEVF

SEQ ID NO: 4158 - protein, 164 aa, Glycine max
MEHFVRRVLPLLTILISLVVFFYLQDSYRAHLHPLVKFPRNKCSLLPHRHFWITSKRIVTPQGIISGSVEINEGKIISVIEGYSKQGKSKQEKIIDYGDAVVMPGLIDVHVHLDEPGRTAWEGFDTGTRAASAGGVTTVVDMPLINHPTTVSKETLKPKLELQR

SEQ ID NO: 4159 - protein, 102 aa, Triticum aestivum
  unsure (1)..(102): unsure at all Xaa locations
MAPTVMASSATSVAPFQGLKSTAGLPVXSRRSNGASLGSVSNGGRIRCMQVWPIEGIKKFETLSXLPPAQHGGLLKQVDYLXIRSKWVPCLRXXAXLGFNFR

SEQ ID NO: 4160 - protein, 167 aa, Oryza sativa (japonica cultivar-group)
GRWSATRPGGGGGGGGGVREQDRFLPIANISRIMKKAIPANGKIAKDAKETVQECVSEFISFITSEASDKCQREKRKTINGDDLLWAMATLGFEDYIEPLKVYLQKYREMEGDSKLTAKAGDGSVKKDVLGSHGGSSSSAQGMGQQAAYNQGMGYMQPQYHNGDVSN

SEQ ID NO: 4161 - protein, 359 aa, Capsicum annuum
MDSTNQNLTQTEDEAFLFAMQLASASVLPMVLKSALELDLLEIMAKAGPGAAISPSELAAQLPTKNPEAPIMLDRMLRLLATYSVLNCTLRTLPDGRVERLYSLAPVCKLLTKNADGVSVAPLLLMNQDKVLMESWYHLTDAVLDGGVPFNKAYGMTAFEYHGTDPRFNKVFNRGMSDHSTMTMKKILEDYKGFEGLNSIVDVGGGTGATVNMIVSKYPSIKGINFDLSHVIEDAPAYPGVEHVGGDMFVSVPKADAIFMKWICHDWSDEHCLKFLKNCYEALPANGKVLVAECILPETPDTSAATKNAVHVDIVMLAHNPGGKERTEKEFEALAKGAGFTGFRRACCAYQTWVMEFHK

SEQ ID NO: 4162 - protein, 368 aa, Prunus cerasus
MGKGGMSSQGGALEPMDGEQENMAAWLVGVNTLKIQPFKLPTVGPNDVRVKIKAVGICGSDVHYLKTMKCADFIVQEPMVIGHECAGIVDEVGSMVKNLLPGDRVALEPGISCWRCEQCKGGRYNLCPDMKFFATPPVHGSLANQIVHPADLCFKLPENVSLEEGAMCEPLSVGVHACRRANIGPETNVLVIGAGPIGLVSVLSARAFGAARIVIVDVDDERLSIAKSLGADDSVKVSTNPQDLENEVSKISKAMRGGVDVSFDCVGFNKTMSTALSATRPGGKVCLVGMGHGVMTVPLTPAAAREVDVVGIFRYKNTWPLCLEFLRTGKIDVKPLITHRFGFTQKEIEEAFETSARGGNAIKVMFNL

SEQ ID NO: 4163 - protein, 143 aa, Oryza sativa (japonica cultivar-group); identical to SEQ ID NO: 278

SEQ ID NO: 4164 - protein, 506 aa, Vibrio vulnificus CMCP6
MIYAQPGSDNAVVNFKSHYDNYIGGEWVKPVSGEYFDNISPVNGQAYCKVARSSAADINLALDAAHSVRYQWAKTSVTERANILLKIADRIEAHLEELAVAETWENGKPVRETLAADLPLVVDHFRYFAGCIRAQEGSAAELDANTASYHFPEPIGVVGQIIPWNFPMLMAAWKLAPALAAGCCVVLKPAEQTPTSILVLMEKIGDLIPAGVVNVVNGFGAEAGQALATSDRIAKLAFTGSTEVGNHILKCAAESLIPSTVELGGKSPNIYFPDVFDHEDAYLDKCIEGTLLAFFNQGEVCTCPSRVLVHESIYDQFIAKVAERAKSIKQGNPLDTDTQVGAQASQEQFDKILSYLEIGRQEGAKVVFGGEIAKQEDDLASGYYIQPTLLQGHNKMRVFQEEIFGPVIAVTTFKDEAEALAIANDTEYGLGAGVWTRDQNLAYRMGRNIEAGRIWINCYHAYPAHAAFGGYKKSGIGRETHKMMLNHYQNTKNLLISYDVNPLGFF

SEQ ID NO: 4165 - protein, 502 aa, Arabidopsis thaliana
MVLSHAVSESDVSVHSTFASRYVRTSLPRFKMPENSIPKEAAYQIINDELMLDGNPRLNLASFVTTWMEPECDKLIMSSINKNYVDMDEYPVTTELQNRCVNMIAHLFNAPLEEAETAVGVGTVGSSEAIMLAGLAFKRKWQNKRKAEGKPVDKPNIVTGANVQVCWEKFARYFEVELKEVKLSEGYYVMDPQQAVDMVDENTICVAAILGSTLNGEFEDVKLLNDLLVEKNKETGWDTPIHVDAASGGFIAPFLYPELEWDFRLPLVKSINVSGHKYGLVYAGIGWVIWRNKEDLPEELIFHINYLGADQPTFTLNFSKGSSQVIAQYYQLIRLGHEGYRNVMENCRENMIVLREGLEKTERFNIVSKDEGVPLVAFSLKDSSCHTEFEISDMLRRYGWIVPAYTMPPNAQHITVLRVVIREDFSRTLAERLVIDIEKVMRELDELPSRVIHKISLGQEKSESNSDNLMVTVKKSDIDKQRDIITGWKKFVADRKKTSGIC

SEQ ID NO: 4166 - protein, 463 aa, Nostoc punctiforme PCC 73102
MADLTPNSSFSLTLRLQIPNRVGMLASVTQAIATTGGNLGQIDLIEQTRKESTRDITVDAASTEHAETIVQAVKALPDIKLLSVYDRTFNLHRGGKISITSRIPLKSVSDLAMAYTPGVGRICTAIAQDPEEVYKLTIKQNTVAIVTDGSAVLGLGNLGPAAALPVMEGKAMLFKEFAGLDAFPICLATQDTEEIIQTVKNIAPVFGGVNLEDIAAPRCFEIEKRLREELDIPVFHDDQHGTAIVTLAALFNSLKLVHKPMAEIRIVINGAGAAGVAIARLLRKAGAEKIWMCDSKGIISTSRADLTEEKLEFAVKAQGTLAGAMQGADVFIGVSAPGVLTPEMVHSMAKDPIVFAMANPIPEIQPELISKDVAVIATGRSDYPNQINNVLAFPGVFRGALDCRAKTITTTMYLEAANAIASLVKPSDLDREHIIPSVFDERVVNAVAAAVQQAARQEGIAQN

SEQ ID NO: 4167 - protein, 259 aa, Vigna angularis
MAAAPTPREENVYMAKLAEQAERYEEMVEFMEKVSAAADNEELNVEERNLLSVAYKNVIGARRASWRIISSIEQKEESRGNEDHVTVIRDYRSKIESELSNICDGILKLLDSRLIPSASSGDSKVFYLKMKGDYHRYLAEFKTGAERKEAAESTLAAYKSAQDIANAELPPTHPIRLGLALNFSVFYYEILNSPDRACNLAKQAFDEAIAELDTLGEESYKDSTLIMQLLRDNLTLWTSDMQDDGADEIKEAAPKQDDQ

SEQ ID NO: 4168 - protein, 59 aa, Glycine max
  unsure (1)..(59): unsure at all Xaa locations
MSEGTANCVDILIAIILPPLGVFLKYGCGHEFXXICLLLTFLGYIPGIIYAIYAITKNN

SEQ ID NO: 4169 - protein, 252 aa, Prunus caroliniana
AHYKSEADVGNAIAEAIRSGLVKREELFITSKASNHGHVVEACKNSLKKLQLDYLDLYLVHYPLATKHSGVGTTASLLDENKVLDIDVTVSLETTWHDMEKTVSLGLVRSIGLSNYELFLTRDCLSYAKIKPQVSQFETYPYFQRESLVKFCKKHGVTPMAHTPLGGATANVKSFGSISPLEDPVLLGLAKKYKKSVAQIALRWNIERDTPVIPKSSKVERLKENLEVLNFKLEKEDIELINTIDKKSRTTL

SEQ ID NO: 4170 - protein, 253 aa, Triticum aestivum
PVKMVLSREGSDELFGGCLYFRKAPNKKELHEETCRKIKALHLYDCLRANKATSAWGLEARVPFLDKSFINVAMDLDPESKMIRRDLGRIEKWVLRNAFDDDEKPYLPKHILYRQKEQFSDGVGYSWIDGLKDHANAHVSDSMITNASFVYPENTPTTKEAYYYRTVFEKFYPKNAARLTVPGGPSVACSTAKAVEWDAAWSKLLDPSGRAALGVHDAAYEEEKAPALADHVFRPPAHGESILVETGVPAAAV

SEQ ID NO: 4171 - protein, 418 aa, Emericella nidulans
MSDLQVQGRKVFKVFNQDFIVDDRYTVTKELGQGAYGIVCAATNVQTGEGVAIKKVTNVFSKKILAKRALREIKLLQHFRGHRNITCLYDMDIPRPDNFNETYLYEELMECDLAAIIRSGQPLTDAHYQSFIYQILCGLKYIHSANVLHRDLKPGNLLVNADCELKICDFGLARGFSIDPEENAGYMTEYVATRWYRAPEIMLSFQSYTKAIDVWSVGCILAELLGGRPFFKGRDYVDQLNQILHYLGTPNEETLSRIGSPRAQEYVRNLPFMPKVPFQRLFPNANPDALDLLDRMLAFDPSSRISVEEALEHPYLAIWHDASDEPSCPTTFDFHFEVVDDVQEMRRMIYEEVVRFRQSVRMPPQAQSLAQQQQIGNIPIPEHQQGVWRQEEPRPQEAGAVGGNHNDLESSLQRGMDA

SEQ ID NO: 4172 - protein, 489 aa, Agrobacterium tumefaciens str. C58
MRERSMIKLKNAALLRDACLVNGRWLKAADGKTIAVENPANSMIIGHVPSLSADEVKAAVESAGKAFSEWSRRSAKDRAAILRRWFDLMVANADDLGALMTAEQGKPFAEAKGEALYAASFVEWFAEEAKRVYGDTIPSPTTDKRITILKQPIGVCAAITPWNFPAAMITRKAAPALAAGCAMIVKPAEQTPLTALALGVLAEEAGVPAGVFQVVTGAARDIGKVFTESDTVRKISFTGSTEVGRLLMAQSAPTIKKLSLELGGNAPFIVFDDADLDAAVEGAIVSKYRNAGQTCVCSNRIYVQDGVYDAFAEKLVKRVESLSVGEGTEPGVLIGPLIDQEAVAKVEDHVADALGKGAKIVIGGKRHALGGTFYEPTVLTGATQAMKVAREETFGPVAPLFRFGTEDEAVAMANDTEFGLAAYFYTENVRRTWRVAEALEYGMVGHNTGLISNEVAPFGGVKQSGLGREGSHYGIDEYLEIKYLCSAIG

SEQ ID NO: 4173 - protein, 181 aa, Malus x domestica
LENFIDPDIPATWRAMETLYDSGKARAIGVCNFSTKKLSDLLDIARVPPAVDQVECHPSWQQNKLRSFCKSKGVHLSGYSPLGSPGTTWIKSEVLTNPILATVAEKLGKTPAQVALRWGLQKGHSVLPKSTNEARIKENIDVFGWSIPDDLFAKFSEIEQARLIRWLSPVHHTSGPYRSLE

SEQ ID NO: 4174 - protein, 247 aa, Glycine max
MMEGDENIQASSKGKYVESFNCSEAPRKKSKKIENKRRFSDEQIRSLECIFESESKLEPRKKMQLARDLGLQPRQVAIWFQNRRARWKSKRIEQEYRKLKDEYDNLASRFESLKKEKDSLQLELQKLSDLLEACQDDGREDKAGKENSIEDGGSGSGYSSWKPEAKKPRFSNDEGLEERIGVYSDDQNENSIIRGGEKSEDKGHQLLRMDDHAEMPLASLEKWYSGVDPSGILDQSCSSSQWLDFWT

SEQ ID NO: 4175 - protein, 334 aa, ASPERGILLUS NIDULANS FGSC A4
MSLGKKVTLNTGAQIPQLGFGTWQSAPGQVGEAVYQALKVGYRHLDLATIYQNQREVAEGIKRAYKDIPGLKREDIFITSKLWNTQHDPAVVEKALDDCLAELELDYLDLYLVHWPVAFKTGDNYFPLDESSDHPDGDVLIDDSISIVDTWKAMTKLPKEKARAIGVSNHTVEHLEAIINATGVVPAANQIERHPVLQSNDLIEYAAKKNIHITAYSAFGNNMFNIPLLVAHPEVKAVAEEASKRLGKTVTPAQVILNWSQEGGHSVIPKSVTASRIAENFQEVELTKEELAKVSKLGEERRRYNTPYVANKPRWNINIFGEEDEKPAKHKVIV

SEQ ID NO: 4176 - protein, 463 aa, Mycobacterium avium subsp. paratuberculosis str. k10
MPQHPSLPAHAIAPAYTGRLFTAPVPALRMPDESMDPDAAYRFIHDELMLDGSSRLNLATFVTTWMDPEAGRLMAETFDKNMIDKDEYPATAAIEQRCVCMVADLFHAEGLNDADPYSACGVSTIGSSEAVMLGGLAMKWRWRAKTKDWKKRTPNLVMGSNVQVVWEKFCRYFDVEPRYLPMEEGRYVITPEQVVDAVDEDTIGVVAILGTTYTGELEPVADICGALDKLALKPASAGGVDVPVHVDAASGGFVVPFLHPELKWDFRLPRVVSINVSGHKYGLTYPGVGFVVWRSKEYLPDELVFRVNYLGGDMPTFTLNFSRPGNQVVGQYYNFLRLGREGYTKVMQTLSGTARWLGEQLRVSEHCELISDGSAIPVVAFRLAKNRGYTEFDVSHELRTYGWQVPAYTMPDNATDVSVLRIVVREGLSADLARALHDDAVSALTSLDKVKPGGHYDAQHFAH

SEQ ID NO: 4177 - protein, 229 aa, Pyrococcus furiosus DSM 3638
MNVEEMKKAVARAALEFIEDDMVVGLGTGSTTAYFIRYLGEMIEKGKVEDIYGVPPPIKQKFLRMESGVPVLSLDQVDAIDIAVDGADEVDPNLNLIKGRGAALTMEKIIEYRAGTFIVLVDESKLVDYLCQKMPVPIEVIPAAWKAILEELSIFNAKAELRMGVKKDGPVVTENGNFIIDAKFPRIDDPLDMEIELNTIPGVVENGIFADIADIVLVGTKEGVKRLER

SEQ ID NO: 4178 - protein, 189 aa, Methanosarcina mazei Go1
MSPKNCYRNNLEELKMATGPRYKVPFRRRREGRTNYHLRLKLLLSGQDRVVVRKSARNVQIQLLAPTPEGDITYSSAVSSELAKYGYTGATGNTTAAYLTGLLFGLKSLQKGYEGGILDIGLQASSAGSRVYAALKGIVDSGFEIPCSSDVFPSDERIRGEHIAEYREESSDLPEQFEATKEKIFAEFS

SEQ ID NO: 4179 - protein, 320 aa, Bordetella pertussis Tohama I
MPSQLEALRRHTVVVADTGDFEAMRALRPTDATTNPSLILKAVQQEAYRPLLVQTARAHQGASPAEITDRLLVAFGRQILDIVPGRVSTEVDARLSFDTRATVERARGLIALYQAAGVPRERVLIKIASTWEGIQAARVLQAEGIRCNLTLLFCLPQAAACADAGVQLISPFVGRIYDWHKKNAGAEWVEDARRGANDPGVQSVSRIYRYYKRFGIETEIMGASFRNVDQILALAGCDLLTISPELLTRLAQTEGEVPAALSPQAGHDDADAVRLDGGEVAFRTQLNEDAMASEKLSEGIRLFVADARKLDALIESHGAA

SEQ ID NO: 4180 - protein, 496 aa, Davidiella tassiana
MTSVQLETPHSGKYEQPTGLFINNEFVKGQEGKTFDVINPSDESVITQVHEATEKDVDIAVAAARQAFEGSWRLETPENRGKLLNNLANLFEKNTDLLAAVESLDNGKATSMARVTSACASGCLRYYGGWADKITGKVIDTTPDTFNYVKKEPIGVCRSDHSLELPLLMWAWKIGPAIACGNTVVLKTAEQTPLGGLVAASLVKEAGFPPGVINVISGFGKVAGAALSSHMDVDKVAFTGSTVVGRTILKAAASSNLKKVTLELGGKSPNIVFEDADIDNAISWVNFGIFFNHGQCCCAGSRVYVQESIYDKFVQKFKERAQKNVVGDPFAADTFQGPQVSKVQFDRIMEYIQAGKDAGATVETGGSRKGDKGYFIEPTIFSNVTEDMKIVKEEIFGPVCSIAKFKTKEDAIKLGNASTYGLAAAVHTKNLNTAIEVSNALKAGTVWVNTYNTLHHQMPFGGYKESGIGRELGEDALANYTQTKTVSIRLGDALFG

SEQ ID NO: 4181 - protein, 481 aa, Vibrio parahaemolyticus RIMD 2210633
MSKGMTMQQIQNQSLVSFMVANPQQGIAVTNPATGELLGYAPVSTENDILNSIERAHVAQKEWSALPAKTRAGMLNRWFQLLLENKADLGRLMTLEQGKPLAEAQGEVLYGASFIEWFAEEAKRTYGETIPAPSADKRLVTIKQPIGVACAITPWNFPIAMITRKAAPALAAGCSFVVKPSESTPLSAFAVAELAYQAGIPRDVLQVVLGENSRQVGAIFTSHPLIRKLSFTGSTQVGRVLMQQSAADIKRTSMELGGNAPFIVFDDADIDAAVAGAMASKFRNAGQTCVCANRFYVHSKVYDEFVAKFDAAVQQLKVGNGLEEGVNIGPVISESAKQGIQALIDGAIEQGAKPVSALKELDGLFMQPVVLKGVTHDMKIVSEEIFGPVAPVIRFDSDEQLIEMANDTIYGLASYFYSQNIHRVWKIAEALEYGMVGINEGMISTEVAPFGGVKQSGIGREGAKQGIDEYMDVKYLCFGGN

SEQ ID NO: 4182 - protein, 138 aa, Pyrococcus furiosus DSM 3638
MGDKTKVQVSKLKPGRYIIIDDEPCRIVNITVSSPGKHGSAKARIEAVGIFDGKVRSIVKPTSAEVDVPIIDKRTAQVIAVTPDTVQIMDMETYEMFEVPLDTGVEEEIKDKIKEGINVEYWETLGRIKIMRIKGEEE

SEQ ID NO: 4183 - protein, 487 aa, Mycobacterium tuberculosis H37Rv
MSDSATEYDKLFIGGKWTKPSTSDVIEVRCPATGEYVGKVPMAAAADVDAAVAAARAAFDNGPWPSTPPHERAAVIAAAVKMLAERKDLFTKLLAAETGQPPTIIETMHWMGSMGAMNYFAGAADKVTWTETRTGSYGQSIVSREPVGVVGAIVAWNVPLFLAVNKIAPALLAGCTIVLKPAAETPLTANALAEVFAEVGLPEGVLSVVPGGIETGQALTSNPDIDMFTFTGSSAVGREVGRRAAEMLKPCTLELGGKSAAIILEDVDLAAAIPMMVFSGVMNAGQGCVNQTRILAPRSRYDEIVAAVTNFVTALPVGPPSDPAAQIGPLISEKQRTRVEGYIAKGIEEGARLVCGGGRPEGLDNGFFIQPTVFADVDNKMTIAQEEIFGPVLAIIPYDTEEDAIAIANDSVYGLAGSVWTTDVPKGIKISQQIRTGTYGINWYAFDPGSPFGGYKNSGIGRENGPEGVEHFTQQKSVLLPMGYTVA

SEQ ID NO: 4184 - protein, 152 aa, Oryza sativa (japonica cultivar-group)
MATEEDVKQRQIIESRARNISHNVRCTECGSQSIEDSQADIAILLRKLIRDEIKSGKSDKEIYKKLQADYGETILYTPKFDLQTAAIWLSPVIVGGVAAGVWAYQKHRQRTNVHIMALNLVRGVPLTPREKETMLDVLTPPPPANKWWWPGK

SEQ ID NO: 4185 - protein, 372 aa, Bacillus subtilis subsp. subtilis str. 168
MTATRGLEGVVATTSSVSSIIDDTLTYVGYDIDDLTENASFEEIIYLLWHLRLPNKKELEELKQQLAKEAAVPQEIIEHFKSYSLENVHPMAALRTAISLLGLLDSEADTMNPEANYRKAIRLQAKVPGLVAAFSRIRKGLEPVEPREDYGIAENFLYTLNGEEPSPIEVEAFNKALILHADHELNASTFTARVCVATLSDIYSGITAAIGALKGPLHGGANEGVMKMLTEIGEVENAEPYIRAKLEKKEKIMGFGHRVYKHGDPRAKHLKEMSKRLTNLTGESKWYEMSIRIEDIVTSEKKLPPNVDFYSASVYHSLGIDHDLFTPIFAVSRMSGWLAHILEQYDNNRLIRPRADYTGPDKQKFVPIEERA

SEQ ID NO: 4186 - protein, 444 aa, Zea mays
MDEFELEDNLEFILQSIQELMEDPGDNNAFGDANQNELFASIVNYDQENMLPDVSAADVAAGKDIQGIPWEKMLFGRDKYREMKMKNYRNYQNLSYAREDALQECKQVKKDSPYYDFHYNTRRARPSIVHFQLRNLVWATTKHDVYTMHDQSVTHWSSLEQTSTELINADDCIVPKQRGHGSQSVAMVQVTTMAVDSNLLVVGGFQGEIICKRLDDEGVVYSTRVTDDENAITNSLEMYQDPSGSRRLVAANNDCSIRIFDTEYFDLLKHYVFPWSVNSVSVSPNGKLFAVLGDHEDGCVVDPKCGKAIGSLRGHLDYSFASAWHPDGNIVATGSQDTTCRLWDIRNLSQSVAVLGGRMGSIRCVKFSSDGRFLATAEPVDFVHMYDAYADYSRSHEIDLFGEIGGLAFSPDTEAFYVGLADQTYGGMIEFSKRHQHHYLNSLW

SEQ ID NO: 4187 - protein, 223 aa, Vibrio cholerae O1 biovar eltor str. N16961
MNTPMFTRTSSLERTLETNKVLKNTYFLLSMTLVTSAIAAMATMAIGISPIVALVMQLAAIGILFFVMPKAINSSSGLVWTFVFTGLMGGALGPMLNFYAAMPNGPIVIAQALGLTGMVFLGLSAYTITSKKDFSFMRNFLFAGLIIVIVAALINIFVGSTVAHLAISSVSALVFSGFILFDTSRIVRGEETNYISATISMYLNILNLFTSLLSILGIMNNND

SEQ ID NO: 4188 - protein, 479 aa, Staphylococcus epidermidis ATCC 12228
MEVFNMTNQLFINNEFIESQSKETMDVINPATGEAFDTITLATEEEVNDAIEKSQQAQLEWERVPQPTRAEHVKLLIPLLEKNRDEIAQLYVKEQGKTLTQAYGEIDKSISFIDYMTSLSMSDKGRVLQNSIANETIQIINKPIGVTAGIVPWNAPILVLMRKVIPAIVTGCSVVIKPSEETTLLTLRLAELFRASTIPAGLIQIVPGTGETVGTQLASHKDIQLISLTGSMRAGKSVYENAAQTVKKVNLELGGNAPVIVTSNADLDKAVNYIVTARINNAGQVCTCPERIFVHEDVHDDFLNKVTSKMKSLTVGDPFDENTDYGAIINQKQLDSIHEKVQDAIKNGATLMTGGHQLKRHGFFYAPTVLDNVRKDDNVFKDEIFGPVLAITTYRDFEQVIEDANDTNAGLSSYIFSENLTEVMTATERLKFGEVYANCEAEEVVNGYHAGWRESGLGGADGIHGFEEYYNTTVSYIRY

SEQ ID NO: 4189 - protein, 374 aa, Glycine max
  unsure (1)..(374): unsure at all Xaa locations
SYCWSRFEEGEESLARQLPKGLSKEEEDSLLGQVEIWRYMTCFTDSVALKAVIELRIADILDRYGKPLSLSQIVENIEDAPSPDASLLQRVLRVMVRRKIFSAQENXRDRGETLFGLTRASKWILRDTKMTLAPMLLLENHPIHLNPAHYISEIIREGTKNGTAFFKCHGHEQFEMTGLDPEYNRLFNEGMVCTARVVSKAVITGYKDGFNQIKSLVDVGGGIGGSLSEIVRAYPHINAINFDLPHVVATAPKFDGITHVGGDMFVSIPSADAIYMKWILHDWSDEHCIKILKNCRKAIPEKTGKVIIRXDTFFDPKGNELFTDVGIAFDMMLLAHNAGGGERTXQNLKWLSKETRFARFNIININALTYVIEA

SEQ ID NO: 4190 - protein, 75 aa, Glycine max
  unsure (1)..(75): unsure at all Xaa locations
ASSMISSPAXTTVNRAGAGMVAPFTGLKSMACFPTQKTXHDITFIASNRGRMQXLQVLQPICKKNFETFSYFQTL

SEQ ID NO: 4191 - protein, 487 aa, Sinorhizobium meliloti 1021
MTLSFDPDTLPLPVGHFIDGRLVPAEGIIDMHRPSDGKPYAGCPLADEVLVDRAVETAKKALKATNWSGVRPRERTVVLQRWADLIESEAETLAKLEALSSTRPVGHLVAGDIAVSAEQIRFFAEFADKEGSDLVPTDDSNLGMIMTEPYGVVGAITPWNFPVSMAAWKLGPALAAGNAVVLKPSEMTPFSTVYLAELAIRAGLPAGLINIVLGDGPVTGTAMTGHPDIAKVSFTGSTGAGTAIMTNVACTGIKPMTLELGGKSPQLVFADADLDKAAAAIAQSMLSNAGQACVAGSRLIVEECIAAPLAEAIVTRMEAAKPGPTWDETSEYSPIISKRQLNRIHGIVEAAVEAGGECLFGGAQMDAPGYFYQPTLMAVRDSSSPAITEEIFGPVLTMQTFADEEEALALADHPTYGLAAGLFTRDLSRALGLTRRLQAGTVWVNRYSRSRDHILPTGGYKRSGIGKDLGREAYHANRKSKSVLISL

SEQ ID NO: 4192 - protein, 347 aa, Sinorhizobium meliloti 1021
MKSYSIALIPGDGIGQDVTDAAWQVLSTVARHSGFTLTGTSFPWSCAFYKETGAMMPADGIEALRPFDAILLGSVGWPAEVPDSISLHGLLLPIRKAFVQYANIRPHRLLSGVEGPLKASDFDILCVRENTEGEYSGAGGRVHQGTADEVAVETSIFTRAGVERILRFAFEQARQRRGKLASVTKSNAQKHSMVFWDEVTRQLADEYPDVEVTSYHIDAMAARVVMAPESLDVVVASNLFGDILTDLGAAIQGGLGFAASANINPDRSAPSMFEPVHGSAPDIAHLGIANPIAAIWSGAMMLEHLGEREAAGMIMAALERTTIRGIGTVPGKDRTRSITAAVLAALD

SEQ ID NO: 4193 - protein, 159 aa, Triticum aestivum
  unsure (1)..(159): unsure at all Xaa locations
MKTFXIFVLLAMAMKIATAARELNPSNKELQSPQQSFSHQQQPFPQQPYPQQPYPSQQPYPSQQPFPTPQQQFPQQSQQSFPQPQPQQPQQPSILQPQQPLPQQPQQPFQQPQQQLSQQPEQTISQQPQQPFPQQPHQPQQPYPQQQPYGSSLTSIGGQ

SEQ ID NO: 4194 - protein, 497 aa, Staphylococcus epidermidis ATCC 12228
MTNINVRNYIDESYGLFINNEFQASDSGETLTVSNPANGEDLAKVARAGKKDVDKAVQAAHDAFDSWSKISKEERADYLLEISRRIHEKTEHLATVESLQNGKPYRETSTIDVPQAANQFKYFASVLTTDEGSVNEIDQNTMSLVVNEPVGVVGAVVAWNFPILLASWKLGPALAAGNTVVIQPSSSTPLSLIELAKIFQEVLPKGVVNVLTGKGSESGDAIFHHEGVDKLSFTGSTDVGYGVAQAGAERIVPTTLELGGKSANIIFDDANLEQVIEGVQLGILFNQGEVCSAGSRLLVQSSIYDELLPKLKEAFENIKVGDPFDEDTKMSAQTGPEQLDKIESYIKIAEEDDKANILTGGHRITDNGLDKGYFFEPTIIEINDNKHQLAQEEIFGPVVVVEKFDDEQEAIEIANDSEYGLAGGIFTTDIHRALNVAKAMRTGRIWINTYNQIPAGAPFGGYKKSGIGREVYKDAIKNYQQVKNIFIDTSNQTKGLY

SEQ ID NO: 4195 - protein, 303 aa, Pisum sativum
MDLDQWISKVKDGQHLLEDELQLLCEYVKEILIEESNVQPVNSPVTVCGDIHGQFHDLMKLFQTGGHVPETNYIFMGDFVDRGYNSLEVFTILLLLKARYPANITLLRGNHESRQLTQVYGFYDECQRKYGNANAWRYCTDVFDYLTLSAIIDGTVLCVHGGLSPDIRTIDQIRVIERNCEIPHEGPFCDLMWSDPEDIETWAVSPRGAGWLFGSRVTSEFNHINNLDLVCRAHQLVQEGLKYMFQDKGLVTVWSAPNYCYRCGNVASILSFNENMEREVKFFTETEENNQMRGPRTGVPYFL

SEQ ID NO: 4196 - protein, 447 aa, Bacillus subtilis subsp. subtilis str. 168
MGSTQLTGRVIFKGDPGYTEAIKNWNPYVDVYPLVFVFAQNSYDVSNAIKWARENKVPLRVRSGRHALDKNLSVVSGGIVIDVSDMNKVFLDEENAIATVQTGIPVGPLVKGLARDGFMAPFGDSPTVGIGGITMGGGFGVLSRSIGLISDNLLALKTVDAKGRIIHADQSHNEDLLWASRGGGGGNFGYNTQYTFKVHRAPKTATVFNIIWPWEQLETVFKAWQKWAPFVDERLGCYLEIYSKINGLCHAEGIFLGSKTELIRLLKPLLHAGTPTEADIKTLYYPDAIDFLDPDEPIPGRNDQSVKFSSAWGHDFWSDEPISIMRKFLEDATGTEANFFFINWGGAISRVPKDETAFFWRHPLFYTEWTASWKNKSQEDSNLASVERVRQLMQPYVAGSYVNVPDQNIENFGKEYYGANFARLREIKAKYDPENVFRFPQSIPPSR

SEQ ID NO: 4197 - protein, 372 aa, Glycine max
  unsure (1)..(372): unsure at all Xaa locations
MGSTGETQNTPTHVADEEANLFXAMQLASASVLPMILKSALELDLLEIIAKAGPXGVHLSPCDIASXLPTHNPDAPVMLDRILRLLACYNILSFSLRTLPHGKVEXLYGLAAVXKYLVRNEDXGVSIAALNLMNQDKILMESWYYLKDAVLEGGLPFNKAYXGMTACEYHGTDPRXFNKVFNKGXMADHSTITMKKILETYTGFEGLKSLVDVGGGTGAVVNMIVSKXYPTIKGINFDLPHVIEDAPSYPGVXHVGEDMFVSVPKADAIFMKWICHDWSDEHCLKFLKNCYEALPDNGKVIVAECILPVAPDSSLATKGVVHIDVIMLAHNPGGKERTEKEFEALAKGSGFQGFQVLCCAFNTYVMEFLKKV

SEQ ID NO: 4198 - protein, 426 aa, Listeria innocua Clip11262
MYVLKNGQVLNESGELENKDVLIQNGKVNLIADSIEVTSGEEFDATGKLIAPGFIDVHVHLREPGGEHKETILTGTKAAARGGYTTICSMPNTKPVPDSKEVMNSLQAKIKETAEVRVLPYASITTSLGTDELVDFEALKEAGAFAFTDDGVGVQLAGTMYEAMKRAAALDMAIVAHCEDNSLIYGGVVHDGIFAEKEGLKGIPNIAESVQIARDVLLAEAAGCHYHVCHISTKESVRVVRDAKRAGIRVTAEVSPHHLILDEEDIPGNDGNWKMNPPLRSKEDRAALLEGLLDGTIDFIATDHAPHAAEEKNVPMEQAAFGIVGLETAFPLLYTHFVKTNEWTLKQLIDWMTVKPAECFKLPYGKLEEGAVADIVVLDLEKEATIDPATFYSKGKNTPFVGETCIGWPVATFAEGELVYNEGENK

SEQ ID NO: 4199 - protein, 103 aa, Glycine max
  unsure (1)..(103): unsure at all Xaa locations
MASSMISWPGVTTVKRADAGMVASFTGLKSMAGFPTSNTNNDITFIAINGGRRRCTQASPPIGNKKFXTLSYLTDLDNAQXAKEVLFLLTKGLIPCFKFELEH

SEQ ID NO: 4200 - protein, 154 aa, Zea mays
MASDRVLGTVKWFNGTKGFGFITPDDGSEDLFVHQSSIKSDGYRSLNDGDAVEYTVGSGNDGRAKALDVTAPGGGPLAGGERPDGGNGGGRGGYGGGDRGYGGGGDRGYGGGGDRGYGGGDRGYGGGGDRGYGGDRGYGGGGGYGGGYGGGGGG

SEQ ID NO: 4201 - protein, 332 aa, Glycine max
  unsure (1)..(332): unsure at all Xaa locations
MSPIKLGLVAREPTGEVNVRGNPNNNNLFDGCQGESDHWSELDTDLYHWTKALRPVQWFPGHIAKAEKELKEQLKLMDVVIEVRDGRIPMSTSHPQMELWLGNRKRILVLNREDMISTADRNAWADYFTRNGTKVVFSNGQLGMGTMKLGRLAKELAADVNVRRRTKGLLPRAVQAGIVGYPNVGKSSLVNRLLKRRMCPAAPRPGVTRELRWVRFGKDLELLDSPGILPMRINDQSAAIKLAICDDIGERSYDVADVAAILVQMLTKLPTVGRDALCKRYKIDVDCRDGRTFIEKLAVXVFNGDVHQAAFRVLADFRKGKFGWTALERPPK

SEQ ID NO: 4202 - protein, 700 aa, Zea mays
MSVSPSSLCGGDPAMRIVVWFRRDLRVEDNPALAAAARAGGEVVPAYVWSPEEEGPYYPGRVSRWWISQSLNHLDASLRRLGAGKLVTRRSADAAVALLQLVRDTGATHVYFNHLYDPISLVRDRRLKEMLAAEGIVVQSFNSDLLYEPWEVVDDEGQPFTMFDPFWNRCLSMPYDPPAPLLPPKRINSGDLSMCPSEDLIFEDESERGSNALLARAWTPGWQNADKALTAFLNGPLADYSVNRKKADSASTSLLSPHLHFGELSVRKVFHLVRMKQLVWSNEGNHAAEESCTLFLRSIGLREYSRYLSFNHPSSHERPLLAHLRFFPWVVDESYFKIWRQGRTGYPLVDAGMRELWATGWLHDRIRVVVASFFVKVLQLPWRWGMKYFWDTLLDADLESDALGWQYITGSLPDGRELDRIDNPQFEGYKFDPHGEYVRRWIPELARLPTEWIHHPWDAPVSVLQAAGIELGSNYPLPIVELDAAKGRLQAALSEMWQLEAASRATMNNGTEEGLGDSSEVLFPQELQMEVDRQPAPAEAAANVHVPVPMPARRRGDQMVPTMTTSSLNRAGTEVSADLVVANSEEEDTRAQVPFHAHLHPRAEAPPAARRTNNGARQHDVFQQPRNHRREALLAPSASEASSSWTGREGAVVPVWSPPAASGHSDAFAADEADVSSRSYLGRHPQSHRLMNWSQLSQSS

SEQ ID NO: 4203 - protein, 139 aa, Triticum aestivum
  unsure (1)..(139): unsure at all Xaa locations
DGGVLREITMHDLLETIHICETDHLAIDVSXDSLPPLYVGYKDPGDRLHVGDARQLLRNSPEGKYDAINCDSSDPIGPAQELVEKPFFQTIAWASKPGRVLHNIAESMMVYTHVIQDMLSICREGFMAGLPYAWASVTT

SEQ ID NO: 4204 - protein, 218 aa, Bdellovibrio bacteriovorus HD100
MIKSKVRTASKGFPRAFSCDLPPPPLEYAHQGETMRIFTLIALILCTSFAWAKDTPSSFFDLSANSLSGKKVNFSTYRGKVVLVVNTASQCGFTPQLKELEEMYKKYADRGFVVLGFPSNDFKQEKGTNDEVQTFAAKEFGVTFPLFDKAPVSGKDIQPVYQFLTTQKPGLIFKDVAWNFEKFLINRKGQVVERWSSITKPSSDSITKSVEKALNEPL

SEQ ID NO: 4205 - protein, 146 aa, Triticum aestivum
  unsure (1)..(146): unsure at all Xaa locations
MAQESLRLVCPPVSAHEGRLPRQYTLEGQGAKKDISPPLEWYGVPDGTRSLAVVVQDVDADERVPWTHWVVVNISPEEKGLPEGFSGAGGNANAGGGDGGVXQEGVNDWSQPGXGRGPVPDSHGHRXIQFRLYAXLDDVLSLGQQG

SEQ ID NO: 4206 - protein, 164 aa, Neurospora crassa
MTALFNFQSLLLVIILLVCTSTYIHQMFPAILDRNKDGLMGIFWKCARIGERLSPYVSICCIFMASIGESDSPGDIRIDSFLDAGQQGRQIQRKYFKVKQADGNQAMEDSTGDDDLACSGTPTLCDYRRPELSTPGQSLSVKRDRQGLCGTWKQRTPYRQCWTP

SEQ ID NO: 4207 - protein, 459 aa, Zea mays
  unsure (1)..(459): unsure at all Xaa locations
MAYAAGRKKRVGRYEVGRTIAPGXTCAKVKFAVDTDTGAPVPMKVLDKGTMFGHRMLHQIKREISIMKILRRRNIVRLNEVLAGKTKLYIILDTPPGQRRDRYNGPIKEXIRIVLHGKLLENEARKYFKLLIDAIDXLHHKGVYHRDLKPQNLLLDSRGNLKLSDFGLSTLSQNGVGLVHTTCGTPNYVAPEVLSSNGYDGSAADIWSCGVILYVLMAGYLPFEENDLPHLYEKITAAKYSCPYWFSPGAKSLIQRILDPNPRTRITIEEIREDPWFKKNYVTIRCGEDENVSLDDVQAIFDNIEDKYVSDEVTHKDGGPLMMNAFEMIALSQGLDLSALFDRQQEFVKRQTRFVSRKPAKTVVATIEVVAESMGLKVHSRNYKVRLEGPASNRASQFAVVLEVFEVAPSLFMVDVRKVAGDTPEYHRFYENLCSKLCSIIWRPTEVSAKSTPLRTTTC

SEQ ID NO: 4208 - protein, 398 aa, Streptomyces coelicolor A3(2)
MLSEQSVPVVRATLPAVGAAIGDIAALFYRKLFDAHPELLRDLFNRGNQANGEQQRALAGSVAAFAGLLLENPDERADVLLSRISHKHASLGITPDQYTIVHRHLMAAVVDVLGDAVTPEVARAWDEVYWLMANALIALEARLYTEKGVAEGDVWRTMEIVDRVEESADAVSLVLGSADGRPVVPFRPGQYVSVQVELADGARQIRQYSLSAAPGRSDWRITVKRVRGDGQPDGEVSSWLYANARKGDALNVSLPAGDLALAEHDGPLLLVSAGIGVTPMLSMLDHLAAAGATRPVTVVHADRTPDHHAHRQEQLDLIRTLPGARLHLWYEEPGDRAPEASTGRADLTGLDLPADLTVYLCGPVPFMRAVRGDLLRRGVPAEAIHYEVFGPDLWLGQQ

SEQ ID NO: 4209 - protein, 449 aa, Porphyromonas gingivalis W83
MKILLRNALITNEGKTFPGSVMIDGAFISRIIEGELPADDNLSADEVIECSGLRLFPGCIDDQVHFREPGLTHKATIASESRAAVAGGVTSFMDMPNTNPPTTMWERLLEKRQIGADTAWANYGFFFGGTNDNIDEIKRVDKHLVPGLKLFLGSSTGNMLVDNKETLEKIFGECDLLIATHCEKEEIIRANKEHYKAKYGNDLDIHFHPLIRSEEACYRSSAEAVELAERMNARLHILHLSTEKELSLFRNDIPTAQKRITSEVCVHHLWFSDTDYGRLGNRIKWNPAIKKESDREALRAAVRNGRIDIIATDHAPHLLREKEGSCLQAASGGPLVQHSLLALLELCNQGIFSIEEIVSKTAHIPATLFAIEKRGYIRPGYYADLVLVDPSSPHTVSADNILSLCGWSPFEGFTFSHSVAYTFVNGCLAYAKGRLAESRPTVHPLFFNR

SEQ ID NO: 4210 - protein, 283 aa, Streptococcus mutans UA159
MSKIQWFPGHMSKARRQVQENLKFVDFVTILVDARLPLSSQNPMLTKIIGDKPKLIILNKVDLADSTCTAEWCNFFEKQGIKALAVNSKEQSAVKKVTEAAKGLMTDKLVKLRERGIQKENLRTMIVGIPNVGKSTLMNRLAGKKIAIVGNKPGVTKGQQWLKSNKNLEILDTPGILWPKFEEEAVGLKLAMTGAIKDNLLPMDEITIFGLDFFKRYYPERLLERYKGIDLEEEAPEIIMSMTQKLGFRDDYDRFYQVFIKDVRDGRLGCYTLDRLAELDGND

SEQ ID NO: 4211 - protein, 371 aa, Helianthus annuus
MAGVVKEFDSSHDMFKVREEPKVVFNNKDLSEEMMKIKEEPMLVFDEHEDFVGGEEAPKPIEGLRDGGPPPFLKKTFEMVDDPTTDSIISWSSSKNSFILWDPHKFSTDLLPQRFKHNNFSSFVRQLNTYRFKKIDPDRWEFANEFFQKGKKHLLRDIKRRTNQPQNTQKQEEIRKQEQQQCCGHQTNSTMETELKNLRKERITLKQEILKMKQQQENTEKHLEMVEERMLRMEFKQQQLLVFMSKAFRNPIFVKLLQHLVQKQKTGSVEMCKKRKLEQMLNTDDLDRFQEMWNMIEPDAYTVLSSDGSVSPPEDQNTSDKSGSNGSDYNSESFILWEKLMEDELIFGGEQSGKDQTETYLQEWEELIPKA

SEQ ID NO: 4212 - protein, 369 aa, Vibrio parahaemolyticus RIMD 2210633
MKTQKQWIELKNNLNIENRAYINGEYSAALTGQTIPVVNPATDEIFTEIARCQSEDVDLAVSCARQAFQSGQWSESSPAHRKAVLKQFADLIDQHQEELALLETLDTGKPISHSFSTDIPGAANSLRWYAEAIDKVYGEVAPTEKDVHAFVSHQPIGVVAAVVPWNFPLWLACWKLGPALAAGNSVLLKPSEKSSLTAIFLGQLASQVGLPTGVFQVVTGFGHEAGDALAKHQDVDCIAFTGSTRIAGQLMVSSGESNLKRVFAEAGGKNANIVFEDCDDLDRAAAETAAGCFYNQGEVCVAATRLLVHESIKDQFIEKVIQASKAFTPKDPMNPSSSMGALIDQDHKSKVLEYISLGESEGAIRALWR

SEQ ID NO: 4213 - protein, 316 aa, Bifidobacterium longum DJO10A
AVGYGAKEAGTSCFMTPKTFKLISRLREEGVKRGLEILIEVHSYYKKQVEIASKVDRVYDFALPPLLLHSLFTGHVEPVAHWTEIRPNNAVTVLDTHDGIGVIDIGSDQLDRSLKGLVPDEDVDNLVNTIHANTHGESQAATGAAASNLDLYQVNSTYYSALGCNDQHYLAARAVQFFLPGVPQVYYVGALAGRNDMELLRRTNNGRDINRHYYSTAEIDENLERPVVKALNALAKFRNELPAFDGEFSYEVDGDTSITFRWTAADGTSTAALTFEPGRGLGTDNATPVASLAWSDAAGDHETRDLLANPPIADID

SEQ ID NO: 4214 - protein, 371 aa, Cryptococcus neoformans var. grubii
MPLESCMLILDNSEYMRNGDYPPTRFQAQAEAVQTVFTAKTDANPESAVGMMTMAGNSPSLLVTPTNDLGRLMHALSKVLISNTAQLSTAISIAQLALKHRENKNQRQRIVIFVGSPLGESAESLVKLGKRLRKNNVFVDIVTFGDEGRDNDEKLRGLVEAVGDESNLVSVPPGERFLSDVIASSPILFDGENPMAAAGGFEGDIDPNMDPELAMAIRMSLQEAQAQQSQSADAGPSSGAGVALPDSLTQPLSTTHPSSSSGDVLMAPGDKGNLPGTPNAQAHAEAADKAGAIAESGTGSTFISGNPLTGNRAPDVAQQEEEDEELKRALAMSRGEGGDIEMEEEEDEEAAIARAIAMSLEGQEEGKDKNH

SEQ ID NO: 4215 - protein, 434 aa, Beta vulgaris
MDRYKLLKELGDGTCGTVYKAVNRESYEIVAVKKMKRKFYFWEECVNLREVKSLPSIESSHIIKLKEVVRENNDLFFIFEYMQYNLYQIMKDRHRPFTEEEIRNFLTQVLQGLAHMHRNGYFHRDLKPENLLVTNDVIKIADFGLAREVSSIPPYTEYVSTRWYRAPEVLLKSSLYTPAIDMWAVGAVLAELFTSCPIFPGESETDQLYKICCVLGAPDWAVFPEAKNISQLTSISYSQMLPANLSEIIPNANWEAIDLISQLCSWDPLKRPTAEQALHHPFFHVALRVPRPIHDPFHSKPDYTKTKPNLELNLWDFDSKADDCFLGLTLAVNPGVSSLEMGPRVSGSTRQDVYFCSSFQDHPEQSVFWSLFSPCRNGATPPVDPSLSLSFSSITHPRIAVPHSGGFGLAALQPGILDGPLLVVSSPHQPSHYL

SEQ ID NO: 4216 - protein, 470 aa, Thermobifida fusca
MASLPSVSYSITVRLEIDGRASAVSSLTNAVERVGGAVTALDVNSSGRERLRIDVTCAARDTNHAQAIVEALDAVEGVTVHKVSDRTFLMHLGGKIEMRSKVPLRNRDELSMAYTPGVARVSAAIAANPEDARRLTVKRNSVAVVTDGSAVLGLGNIGPEAALPVMEGKAALFKRFADIDAWPIALDTQDTDEIVRAVQLIAPGFGGINLEDISAPRCFEVEARLRELLDIPVFHDDQHGTAIVVLAALKNALRVVGKELGSVRIAMSGAGAAGTAILKLLLHAGAKDVVVCDVHGAVHQGRGDLDANLRWIAEHTNPDGYAGDLAGAVRGADVFIGVSAPNLLSGEEIAEMNEDAIIFALANPEPEVDPEIAALHAAVVATGRSDYPNQINNVLVFPGFFRGLLDAQSHRVTPDMMLAAASALAAVVTEEELSPHYIIPSVFHPGLAQRVAEAVREVALREGGVERHEN

SEQ ID NO: 4217 - protein, 430 aa, Haemophilus influenzae R2846
MMDEQSLLAFDTQHIWHPYSSVSSDMPLYAVERADGVMITLKDGRRLIDGMSSWWAALHGYNHPRLNAAAQNQLAKMSHIMFGGFTHDPAVELAQLLVQILPNGLDKIFFADSGSVAVEVAMKMAIQYQHAKGEVQRQKFATIRSGYHGDTWNAMSVCDPTTGMHHLFHHSLPVQYFLPQPNIPFNESWNDCAIEPLADLLKKKGSEIAALILEPVVQGAGGMYFYSPTYLVKAQALCKQYGVLLIFDEIATGFGRTGKLFAAEHAGISPDIMCIGKALTGGYLTLSATITTTEIAQIICRGEAKCFMHGPTFMANPLACAIAAESIRLLLESPWQQNIQRIEHSLTQQLSPLAEKDYVKEVRALGAIGVVEMKSAVNMKTLVPRFVEQGVWIRPFGKLVYVMPPFVIKNDELQKLTEGMILALTQEYEH

SEQ ID NO: 4218 - protein, 484 aa, Sinorhizobium meliloti 1021
MRLKDRELFRQLGLIGGEWIAGASGVVVDVIDPANQAVLGTVPDMGTAETRAAIEAANAAFGPWKKKTHAERAAVLERWHALMIENLEDLAVLVTMEQGKPLEEARGEIRYGAAFVKWFAEESRRIGGHTIPSPTSDRRIVVLKEAVGVCAIVTPWNFPNAMITRKVAPALAAGCTVVIKPSEFTPFSALALGVLAERAGIPAGVVNIVTGMPTAIGNEFMTNETVRKISFTGSTRVGSLLMRGAADSVKRLSLELGGNAPFIVFDDANLDLAVEGAIASKFRNGGQTCVCANRILVQAGVYDAFAEKLGARVNAMKVGPGTEPGIAIGPMINEAAIDKIDRHVEDAIAKGAKLAARGRSVPEGRQYTAPIVLTGATTDMLLASEETFGPVAPLFRFETEDEAIAIANGTPFGLAAYFYTEGLKRSWRVAEALEFGMIGLNTGAISTEVAPFGGVKQSGLGREGAQVGIEEYLEMKSFHIGGLD

SEQ ID NO: 4219 - protein, 468 aa, Bradyrhizobium japonicum USDA 110
MEAARVFDSKPNSAEARDIAFHLHSQTNPQRHAEIGPLIMARGEGVHVYDASGKRYLEAMAGLWCTSLGFSETRLKAAAATAYDKFGFYHSFNHKTPDNTIELAEKLVEISPIPDAQAYFATSGSEATETMVKLAWVYHAVRGKPGKRKIIARDRGFHGSTIVAASMCGLPRMHREFGLPLDGFLHTHCPDAYRGTRPGESEAAFVDRLAADLEALIMAEGPDTIAAFIGEPINAGGGIVVPPKGYFAAIEAVLRRHDILVLGDEVVCGFGRTGNWFGCETVGMKPDMVALAKGITSSYFPMSAVLLGRPIRDALSEMNKGGELFGHGFTNSGHPVGAAIALETLNIYHEMDVVPHVRRMGSRLRAGLEQIARDSRIVGQVRGEGLMIGVELVAAPATRQAFDPALKVGAMFDALAIENGLIIRAMGDTIGFCPPLIIDEAGVDEALDLFGRTLFSAEAKLAEKRPSA

SEQ ID NO: 4220 - protein, 319 aa, Bacillus subtilis subsp. subtilis str. 168
MKRIGVLTSGGDSPGMNAAVRAVVRKAIYHDVEVYGIYNGYAGLISGKIEKLELGSVGDIIHRGGTKLYTARCPEFKTVEGREKGIANLKKLGIEGLVVIGGDGSYMGAKKLTEHGFPCVGVPGTIDNDIPGTDFTIGFDTALNTVIDAIDKIRDTATSHERTYVIEVMGRHAGDIALWAGLAGGAESILIPEADYDMHEIIARLKRGHERGKKHSIIIVAEGVGSGVEFGKRIEEETNLETRVSVLGHIQRGGSPSAADRVLASRLGAYAVELLLEGKGGRCVGIQNNKLVDHDIIEILETKHTVEQNMYQLSKELSI

SEQ ID NO: 4221 - protein, 410 aa, Bacillus subtilis subsp. subtilis str. 168
MSLREEALHLHKVNQGKLESKSKVEVRNAKDLSLAYSPGVAEPCKDIHEDINKVYDYTMKGNMVAVVTDGTAVLGLGNIGPEAALPVMEGKAVLFKSFAGVDAFPIALNTNDVDKIVETVKLLEPTFGGVNLEDIAAPNCFIIEERLKKETNIPVFHDDQHGTAIVTVAGLVNALKLSGKSMSSIKVVANGAGAAGIAIIKLLHHYGVRDIVMCDSKGAIYEGRPNGMNDVKNEVAKFTNQDRKDGSLKDVIVDADVFIGVSVAGALTKEMVQSMAKDPIIFAMANPNPEIMPEDAREAGASVVGTGRSDFPNQVNNVLAFPGIFRGALDVRATHINEEMKIAAVEAIASLVSEDELSADYVIPAPFDKRVAPAVAKAVAKAAMETGVARITVDPEEVAEKTRKLTIIGE

SEQ ID NO: 4222 - protein, 458 aa, Sinorhizobium meliloti 1021
MYSNSLIELDRAHLIHPVASYRGHEKLGVRVLASAKGATVTDASGRQLIDGFAGLWCVNAGYGQETIVEAAAKQMRELSYATAYFGLGSEPAIRLASELAERAPGNLNHVYFTLGGSDAVDSTIRFIRYYWTARGEPQRDQFISVEQGYHGSSTVGAGLTALPAFHTGFGIPFDWQHKIPSHYAYRNPVGDDPQAIIAASLTALRRKVEEIGPERVAAFYAEPIQGSGGVLVPPRGWMKAMRELCRDLGILFVADEVITGFGRTGPLFASTENEIVPDFITTAKGLTSGYVPMGAVFMADHIYQTIADGAGASAVGHGYTYSAHPVSAAVGLEVLRLYENGLLENGVKAGARLMEGLGSLRDHPLVGDVRGRGMLAAIELVVDKAQKTPLPAAAEPARRIFDRAWENGLVIRAFANGVLGYAPPLCCSETEIDAIIERTRQSLDETLEDPDVRRALKT

SEQ ID NO: 4223 - protein, 80 aa, Brassica napus
  unsure (1)..(80): unsure at all Xaa locations
MAYSMLSSAXXXTSPXQXTMDAPFTGXLKPSSAFPVTRKVNNDITSIAXSXXGRVSCMXVXPPXGKNKFETLSYLPDLTE

SEQ ID NO: 4224 - protein, 217 aa, Brucella melitensis 16M
MKFFVDTADVKEIRELNDLGLVDGVTTNPSLILKSGRDIIEVTKEICNIVKGPVSAEVAATEYEQMMKEAAVIARIADNICIKLPVTLDGLKACKALTSEGHKVNMTLCFSANQALLAAKAGATFISPFIGRLDDTGINGMELIAEIRTIYDNYDFRTEILAASVRTVNHVKEAALIGADVVTAPPATLKALVKHPLTYKGLETFLADWAKTGQKIA

SEQ ID NO: 4225 - protein, 181 aa, Apium graveolens var. dulce
GNSIAYKNVIGARRASWRIISSIEQKEESRGNDAHVATIREYRSKIENELSSICDGILKLLDSKLIGAASNGDSKVFYLKMKGDYYRYLAEFKIAAERKEAAENTLNAYKAAQDIANAELAPTHPIRLGLALNFSVFYYEILSSPDRACNLAKQAFDEAIAELDTLGEESYKDSTLIKSLV

SEQ ID NO: 4226 - protein, 126 aa, Helicobacter hepaticus ATCC 51449
MAISKEEVLDYIGNLSVLELSELVKAFEEKFGVSAAPTVVAGAVAGGAGGGAAAEEKTDFNVVLVDAGANKINVIKAVREITGLGLKEAKDATEQTPSTLKEGVSKEDAENFKKKLEEAGAKVEIK

SEQ ID NO: 4227 - protein, 90 aa, Zea mays
MDEEEHEVYGQEIPEDGDMDGADVDMDACGDDATKLQELDEMKRKLKEMDEEAAALRDMHAKVAKEMHGCDPSASTTEANEQVDARSLYV

SEQ ID NO: 4228 - protein, 180 aa, Mycoplasma agalactiae
MTPTRIIPLGGVQEIGKSTLIIEHGKHIVIIDAGIKFADTATTGIKGIVPDYKYLKERKDNIEGLFITHGHEDHIGGVVYLVKQVHLKRIYAPRIAIQYLKLKFEEHKITHKVEFIEIEKSAVHEFGNGQVKVDFWTAQHSIPDAFGIRVTTPNGSVMCTGDFRFDYNPIGEIYTDFTKL

SEQ ID NO: 4229 - protein, 159 aa, Glycine max
MDFRVMGLEPPLFHTLQHMMDMSEDAAGENKTYSAPTRSYVRDAKAMAATPADVKEYPNSYVFEIDMPGLKSGDIKVQVEDDNVLLISGERKRDEEKEGVKYLRMERRVGKFMRKFVLPENANTDAISAVCQDGVLSVTVQKLPPPEPKKPRTIEVKVF

SEQ ID NO: 4230 - protein, 307 aa, Petunia x hybrida
MDQYEKVEKIGEGTYGVVYKARDRVTNETIALKKIRLEQEDEGVPSTAIREISLLKEMQHANIVRLQDVVHTVKSDCILSFEYLDLDLKKHMDSSPEFSKDPRLVKMFLYQILRGIAYCHSHRVLHRVLHRDLKPQNLLIGRRTNALKLADFGLARAFGIPVRTFTHEVVTLWYRAPEILLGSRHYSTPVDVWSVGCIFAEMVTQRPLFPGDSEIDELFKIFRVMGTPNEDTWPGVTTLPDFKSALPKWPSKDLATIVPNLDGAGLDLLDKTVRLDPSKRITARNALEHEYFKDIGYVFRSKGSSRV

SEQ ID NO: 4231 - protein, 175 aa, Zea mays
  unsure (1)..(175): unsure at all Xaa locations
VGREAGREGAMEQGEEDGDWMMEPAAGKKGGAMIDRKKRFSEEQIKSLESMFATQTKLEPRQKLQLARELGLQPRQVAIWFQNKRARWKSKQLERQYAALRDDYDALLSSYDQLKKDKQALLNQLEKLAESLREPGGAKCGDNAGAARRDDVRLAVXGMNMKDEFVDAGGASKLY

SEQ ID NO: 4232 - protein, 471 aa, Bacillus megaterium
TIKEMPQPKTFGELKNLPLLNTDKPVQALMKIADELGEIFKFEAPGRVTRYLSSQRLIKEACDESRFDKNLSQALKFVRDFAGDGLFTSWTHEKNWKKAHNILLPSFSQQAMKGYHAMMVDIAVQLVQKWERLNADEHIEVPEDMTRLTLDTIGLCGFNYRFNSFYRDQPHPFITSMVRALDEAMNKLQRANPDDPAYDENKRQFQEDIKVMNDLVDKIIADRKASGEQSDDLLTHMLNGKDPETGEPLDDENIRYQIITFLIEGHETTSGLLSFALYFLVKNPHVLQKAAEEAARVLVDPVPSYKQVKQLKYVGMVLNEALRLWPTAPAFSLYAKEDTVLGGEYPLEKGDELMVLIPQLHRDKTIWGDDVEEFRPERFENPSAIPQHAFKPFGNGQRACIGQQFALHEATLVLGMMLKHFDFEDHTNYELDIKETLTLKPEGFVVKAKSKKIPLGGIPSPSTEQSAKKVR

SEQ ID NO: 4233 - protein, 498 aa, Triticum aestivum
  unsure (1)..(498): unsure at all Xaa locations
MANNNSSYGENVSRKSHTPSAIVIGGGFAGIVSAMARCSRXAFIDGGLLESRDRIGGRVHTDYSFGFPVDPSAFGFPVDLGASWLHGVCEENPLAPIIGRLGLPLYRTSGDDSVLFDHDLESYALYDTNGYQVPQEFVAIMGKMEGFEAIRKEAGKLCEEMKEDISIAKAIAIVLERNPHFRQVVIAHDVLQWYLVLMEGCFSTDADAISLQCWSHQEVLLPGGHGLMVRGYRPVINTLAKGLDIRLGHRVVEIVRHWNRVEVTVSNGKTFVADAAVITVPLGVLKSNTIKFEPRLPEWKEEAIRELSVGVENKIVLHFSEVFWPNVEFLGVVSSTTYGCSYFLNLHKATGHAVLVYMPAGRLACDIEKMSDEAAAQFAFSQLKKILPNAAEPLNYLVSHWGSDENTLGSYTFDGVGKPRDLYEKLRIPVDNLFFAGEATSVQYTGTVHGAFSTGEMAAEECRMRVLEKFRELDMLEMCHPMAEQTATVSVPLLISRL

SEQ ID NO: 4234 - protein, 417 aa, Erwinia carotovora subsp. atroseptica SCRI1043
MESKVVVPTEGQKITVDAQGKLVVPNNPVIPFIEGDGIGIDVTPAMINVVDAAVKKAYQGKRAISWMEIYTGEKSTQVYGKDVWLPDETLDLIREYRVAIKGPLTTPVGGGIRSLNVALRQQLDLYVCLRPVRYYEGTPSPVKQPELTDMVIFRENAEDIYAGIEWKAGSVEADKVIKFLREEMGVSKIRFPEQCGIGVKPCSEEGTKRLVRAAIEYAITNDRDSLTLVHKGNIMKFTEGAFKDWGYQLAREEFGGELIDGGPWVKIKNPNTGKEIVVKDVIADAFLQQILLRPAEYDVIACMNLNGDYISDALAAQVGGIGIAPGANIGDECALFEATHGTAPKYAGQDKVNPGSVILSAEMMLRHLQWFEAADLIVKGVEGAIKNKTVTYDFERLMEGAKLRKCSEFAQDIIDNM

SEQ ID NO: 4235 - protein, 270 aa, Helicobacter hepaticus ATCC 51449
MQTLTLNNGVKMPILGLGTYSLTGKAGQKAMSEAIEVGYRLFDSAQMYNNEAELGAAINAAVKGGIKREEFFIQTKLLESSSEDLAKKSIEKSLKTLGLDYIDSLLIHMPYSQSKAMYRAMESFYKQGILRVIGISNFGAKAYSEFVKSCEVIPAINQCETHLLLQQKPLREAMKSKKTLLQSWSPFIAGKGSILENPTLKSIAQKYNKTPAQVVLRFLIEQGISVIPKTSKRARMQENLNVFDFSLSAQDTQILKELDTNKSAFSWTNY

SEQ ID NO: 4236 - protein, 309 aa, Candida albicans SC5314
MTSHTHPVKLSRTFKTKSGDELSIGTGTGTKWKKDSKLDEINQELVDQILLAIKLGYRHIDTAEVYNTQAEVGEAIKQSGIPREQLWITTKYNPGWNDIKASSASPQESIDKALKQLGTDYIDLYLIHQPFFTEENTHGYSLIDTWKVLIEAKKQGKIREIGVSNFAIKHLEALKEVSEPEFYPVVNQIESHPFLQDQSKNITKYSQENNILVEAFSPLTPASRLDANPLTEYLEELSKKYNKSLGQLLLRYTLQRGILPITTSAKESRIKESLDVFDFELTKEEFDKITEIGSANPHRVFFHEAFKDL

SEQ ID NO: 4237 - protein, 572 aa, Zea mays; identical to SEQ ID NO: 297

SEQ ID NO: 4238 - protein, 364 aa, GIBBERELLA ZEAE PH-1
MGFAKTLIFLSQQQPTMSFVRAFSFLTAVSLVTYTILSIATSFGPAEMPEFNKNETVRDIPAFGLGTWLAGKGVVVPAVEYALKGGYRHIDTALIWRNEDEVGKGIKASGVSRDEIWVTGKLWNTDHRPELVRKAIETSIANLGVEYLDLYLIHYPVAWVPETRDVDNNTSLIDTWKAMEELVRAGLTRNIGFSNFAPKDINKILKIASIQPYAHEFETHPYLQQQSFVDFHKKENIKVIAASPLANTNPTYGDKYPSILHDEFWVKLAEDKNATVAQTILAWGQQRGTIVISKSTHSNHIAENLCSQGIEFTKSELEEVAKQDKKLRLLNPIHWGMDLFEGLDAGAAEKEEPKKEEDERNLDL

SEQ ID NO: 4239 - protein, 263 aa, Aeropyrum pernix K1
MQLASWRLLARTIKNVDVVVEVVDIRDPMVTRSRRAERMAEALDKRLLIVLNKSDLVPLRVAEKWARIIEGMGFDVIYVSARHRLSTRRLRGFIKHLADVKPFSAGVIGFPKTGKSSVINALRGRKGAPTSPIPGSPGYTKGLQLLKIEPGFYMVDTPGVIPVEGGWPESIIRGRSPEDLPDPVPPAAALIEKILRYNRRAFQAAYGITAQDPYEIMERLAVKRGWFYKTTKEPLIEEAARTIIRDYHKAKIPFYVPPEEFTR

SEQ ID NO: 4240 - protein, 241 aa, Oryza sativa (japonica cultivar-group)
MSEGFDGTENGGGGGGGGVGKEQDRFLPIANIGRIMRRAVPENGKIAKDSKESVQECVSEFISFITSEASDKCLKEKRKTINGDDLIWSMGTLGFEDYVEPLKLYLRLYREGDTKGSRASELPVKKDVVLNGDPGSSLVNYGAQRADANANHLDLFFLLRKNPESTTANCMREDEAKPVTVKIIETVYVEADTADDFKSVVQRLTGKDAVAGDAPELNSAQRFGSGREASRHGDHKVRIYE

SEQ ID NO: 4241 - protein, 166 aa, Triticum aestivum
ARGTSLGADATVKVSTRAEDLESEVERIQAAMGSEIDVSLDCAGFSKTMSTALEATRPGGKVCLVGMGHNEMTLPMTSAAAREVDVVGVFRYKDTWPLCIDFLRTGKVDVKPLITHRFGFSQRDVEEAFEVSARGRDAIKVMFNLLGGWLELDHRRRLDLSVQPAG

SEQ ID NO: 4242 - protein, 239 aa, Triticum aestivum
  unsure (1)..(239): unsure at all Xaa locations
MLLGDKAVLKQQGGGEEEEMGGDGMSASELVSKEMEGVRAIVLKPSESLDESRFMKIAGADFNDAGLGLDGLLGSLASTGFQASNLADAIDVVNQMLDWSLSHEKPSEDCDEAELDPKYRESVRCKIFLGFTSNLVSSGIRDVIRFLAQHHMVDVIVTTAGGIEEDLIKCLAPTYRGEFSLPGALLRSKGLNRIGNLLVPNDXYCKFENWIMPLFDQMLQEQSAENVWTPSKVIARLGK

SEQ ID NO: 4243 - protein, 461 aa, Mycobacterium tuberculosis H37Rv
MATATTQRPLKGPAKRMSTWTMTREAITIGFDAGDGFLGRLRGSDITRFRCAGRRFVSISHPDYVDHVLHEARLKYVKSDEYGPIRATAGLNLLTDEGDSWARHRGALNSTFARRHLRGLVGLMIDPIADVTAARVPGAQFDMHQSMVETTLRVVANALFSQDFGPLVQSMHDLATRGLRRAEKLERLGLWGLMPRTVYDTLIWCIYSGVHLPPPLREMQEITLTLDRAINSVIDRRLAEPTNSADLLNVLLSADGGIWPRQRVRDEALTFMLAGHETTANAMSWFWYLMALNPQARDHMLTELDDVLGMRRPTADDLGKLAWTTACLQESQRYFSSVWIIAREAVDDDIIDGHRIRRGTTVVIPIHHIHHDPRWWPDPDRFDPGRFLRCPTDRPRCAYLPFGGGRRICIGQSFALMEMVLMAAIMSQHFTFDLAPGYHVELEATLTLRPKHGVHVIGRRR

SEQ ID NO: 4244 - protein, 272 aa, GIBBERELLA ZEAE PH-1
MGHEDAVYLAKLAEQAERYEEMVENMKIVAGEDRDLTVEERNLLSVAYKNVIGARRASWRIVTSIEQKEESKGNSSQVTLIKEYRQKIEAELAKICEDILEVLDQHLIPSAKSGESKVFYHKMKGDYHRYLAEFAIGDRRKDSADKSLEAYKAATEVAQTELPPTHPIRLGLALNFSVFYYEILNAPDQACHLAKQAFDDAIAELDTLSEESYKDSTLIMQLLRDNLTLWTSSEAETSAAGQAEAPKEDAPAAATAEDAPAAPAAAEEPKAE

SEQ ID NO: 4245 - protein, 492 aa, Arabidopsis thaliana
MSDFSSSVKLKYVKLGYQYLINNFLTLLLIPVIATVAIELLRMGPEEILSVLNSLHFELLHILCSSFLIIFVSTVYFMSKPRTVYLVDYSCYKPPVTCRVPFSSFMEHSRLILKDNPKSVEFQMRILERSGLGEETCLPPAIHYIPPTPTMESARNEAQMVIFTAMEDLFKNTGLKPKDIDILIVNCSLFSPTPSLSAMIINKYKLRSNIKSYNLSGMGCSASLISVDVARDLLQVHPNSNAIIISTEIITPNYYKGNERAMLLPNCLFRMGGAAILLSNRRSDRWRAKYKLCHLVRTHRGADDKSYNCVMEQEDKNGNVGINLSKDLMTIAGEALKANITTIGPLVLPASEQLLFLSSLIGRKIFNPKWKPYIPDFKQAFEHFCIHAGGRAVIDELQKNLQLSGEHVEASRMTLHRFGNTSSSSLWYELSYIEAQGRMKRNDRVWQIAFGSGFKCNSAVWKCNRTIKTPTDGAWSDCIERYPVFIPEVVKL

SEQ ID NO: 4246 - protein, 522 aa, Triticum aestivum
LENNRSCEPSVSPRKEFQPNILDLPSDRTTYCHGRKSTEIVFPTRMPSSPPSSRGKHCPTSPVHSRAFGQCPGSPTAWQDDARNSSSPHPLPLPPGSPCTSSRSLHSQWKKGKLLGSGTFGQVYLGFNSEGGQMCAIKEVKVIADDSNSKECLRQLNQEMLLLNQLSHPNIVQYYGSELSSETLSVYLEFVSGGSIHKLLQEYGPFGETVLRNYTAQILSGLAYLHGRNTVHRDIKGANILVDPNGDIKLADFGMAKHISAYTSIKSFKGSPYWMAPEVIMNTNGYSLSVDIWSLGCTILEMATARPPWSQYEGVAAIFKIGNSKDIPDIPDHLSSEAKSFLKLCLQRDPAARPTAAQLIEHPWVKDQASVRSSRSGSGITRDMFSTSTDGSKATVKTSIELSSYRSLSPLRDTNLRLRNLVVPASSIPSISTRKASAISSSNVRMNMSLPVSPCTSPLRQYRQSNRSCLPSPPHPAYSAGAANYSPINNMLYPTRPSNYLTDPWLETPRQKTQTFDSPRRL

SEQ ID NO: 4247 - protein, 329 aa, Oryza sativa (japonica cultivar-group)
MPSEFVAARKKPPPELLFAAGRKKQQPPPPGMAFVPSEFAAAGVGRKRQPAPPVEIRRVWAHNVEEEFRIIRNAIDHFPYVSMDTEFPGVIHRPTKHPALLTAGDRYDLLRRNVDALHLIQVGITLAASPTAAPALAFEINLSDFDQRVHRHAAESVQLLAEHGVDLAAHRRHGVRASALAPLLMSSGLVCSHGAVKWVTFHSAYDFAYLVKLLMGRKLPRSMAEFLNLVRVFFGDEVYDVKHMMRHCGGELYGGLERVAAALQVKRAAGRCHQAASDSLLTWDVFRRMRELYFLKHGVEAYQGVLFGLELDMDMPSNKTPSLPLVAAR

SEQ ID NO: 4248 - protein, 167 aa, Triticum aestivum
HEVSPDGKLLAVLGDSSDCLIADSGSGKEIASLRGHADYSFASAWHPDGRVLATGNQDRTCRLWDVRNPSEAFAVLEGRIGAVRGLRFSPDGRFLAAAEPADFVRVYDVAAGYARAQEIDLFGEIAGVSFSPDDGAEALFVGVADRTYGSLLEFRRRHRHAYLDCYL

SEQ ID NO: 4249 - protein, 139 aa, Pisum sativum
NTDITSITSNGGRVKCMQVWPPIGKKKFETLSYLPPLTRDQLLKEVEYLLRKPWVPCLEFELEKGFVYREHNKSPGYYDGRYWTMWKLPMFGTTDASQVLKELDEVVAAYPQAFVRIIGFDNVRQVQCISFIAHTPESY

SEQ ID NO: 4250 - protein, 226 aa, Glycine max
VTARQDLHHRNRPSDHYRLLKSNVDALNLIQVGLTLTDAAGNLPDLAGNRSIWEFNFRDFDVARDAYAPDSIDLLRRQGIDFARNTADGVDSTCFAELMMSSGLVCNDAVSWVTFHSAYDFGYLVKILTRRNLPTRLEEFLKTVKVFFGDNVYDVKHMMRFCDTLYGGLDRVARTLNVDRAVGKCHQAGSDSLLTWHAFQKIVDIYFVKEEHRKHAGVLFGLEVFC

SEQ ID NO: 4251 - protein, 134 aa, Brassica napus
  unsure (1)..(134): unsure at all Xaa locations
MVLSHAASDSDVSVHSTFASRYVRTSLPRFKMPENSIPKEAAYQIINDELMLDGNPRLNLASFVTTWMEPECDKLIMSSINKNYVDMDEYPVTTELQNRCVNMIAHLFNAPLGETETAVGVXGTVGSSEXIMLA

SEQ ID NO: 4252 - protein, 357 aa, Helicobacter hepaticus ATCC 51449
MQEHKELLERREFLKTSAKFGAAVSLASLSGFALSACDSKEDLKTDSTQNLQSTEKAGKSQIQNHLQGDTMEFITLNNGVKMPILGYGVYQIDPKETQRCVEDAISVGYRSIDTAQAYFNEAEVGAAIKTALQGGLKREELFITTKLWIDNYPEEKALKACEESLRKLGLEYVDLMLLHQPYNDTYGAWRALSRFYKEGRFKAIGVSNFYPDRIMDFYLNNEIKPMINQIELHPFYQKQAEQKVNTELDIVTQSWASFAEGKNGLFTNEILRNIGEKYNKSAAQVVLRWLIQRQIVVIPKTTRKERMIENFNVFDFSLSGEDMQKIATIDTGKTLFLDHHDPQSAKFLFDYTKIHKA

SEQ ID NO: 4253 - protein, 165 aa, Actinobacillus pleuropneumoniae serovar 1 str. 4074
MKVTSSAIKNGAFEDKYGKRGSQFSPNGMPSYSIPFEISEVPEGTKSFAVVLEDKDAITASGFVWIHWLIADLERTKIAENESLTATDFVQGANSWASKLGNFSIEEASNYGGMAPPNCKHRYELIVYALDTKLNLISGFRFNDLHFAMQDHILATATVMGTYDV

SEQ ID NO: 4254 - protein, 388 aa, Streptomyces avermitilis MA-4680
MPINRAASTSVDVPRGLAGVVVTDTSLGDVRGLEGFYHYRQYSAVELAQTRGFEDVWHLMVHGELPDAEQRAVFTARTAALRWLPDGVRATLPAVAAAAGRSGPLAGLRTALSLLGAAKGFRPVYDIDREQRRADTVMASAAVPTLLTALYRLGQGLDPVEPREDLSYAANYLYMLTGSEPDAARTRAIEQYLISTIDHGFNASTFTARVITSTGADVAAALVGAVGALSGPLHGGAPSRALDTLDAIGTPERIDSWIRERVLAGDRIMGFGHPVYRTEDPRSRMLRGVAEQFGGPLVDFAVEVERHVEAILAELKPGRELHTNVEFYAGVVMELCGLPREMFTPTFAAARVVGWSANILEQAEDPKIIRPAARYVGPVPPVAVPLMV

SEQ ID NO: 4255 - protein, 144 aa, Zea mays
  unsure (1)..(144): unsure at all Xaa locations
MQWACACSQPNGPATPVDMVVDYYKFDYEFAEPPRVTSLQNTVPLATFXDFGDDVYFVADQRGYEAVVYYLAGQYLKTDDRSGKIVDPRLQLNKVVREIKYSPGGVTVKTEDNSVYSADYVMVSASLGVLQSDLIQFKPKLPVS

SEQ ID NO: 4256 - protein, 418 aa, Streptomyces avermitilis MA-4680
MTDHEAAPTHPDRRLSTKEAAELLGVKPETVYAYVSRGQLSSRREPGGRGSTFDAKEVAALARRNRREPSGSSAIGGELSVRTRITLIDKDRYFFRGVDATELAARHSYEEIAEWLWTGRLRPGVTFAAPDASVAVARRAVDALPEHSGPTDRLRVATIAAATADPLRFDLSEDAVLGTARTLIPTLVAALPPLRRDHRDEGPLARHLWGRLTGRAPDAASVRVLDTALGLLIDHDLAASTLAVRVAASARAHPYAAVSAGLGVLEGPLHGAASGLAHRLLLDVLDQGSAAPVVADELRAGRRIPGLGHRLYPGEDPRARALFALLEEVPDAAPALAAAHDVVATTARHAPLHANVDLALAVLTVSSGMPASAGETVFAVARTAGWIAHALEEYEERPLRMRPSGRYVGARPPQPLPR

SEQ ID NO: 4257 - protein, 190 aa, Arabidopsis thaliana
MGDSDRDSGGGQNGNNQNGQSSLSPREQDRFLPIANVSRIMKKALPANAKISKDAKETMQECVSEFISFVTGEASDKCQKEKRKTINGDDLLWAMTTLGFEDYVEPLKVYLQRFREIEGERTGLGRPQTGGEVGEHQRDAVGDGGGFYGGGGGMQYHQHHQFLHQQNHMYGATGGGSDSGGGAASGRTRT

SEQ ID NO: 4258 - protein, 472 aa, Blumeria graminis f. sp. hordei
MPTFGFLKKRKKVSLGHRDLDSPASTLSQPASPITPSTSRGLGEPIDTTSSKITSPGQKLGSNITKDHRGTRTTVEDLPSMTDVSHLQQAYRNLSQGSTASKSNLLTIHNLINPPQHDGAGQSKVMPEKHMNNKTERPVQGKAAVAQVRQTKGKYSLSDFEILRTLGTGSFGRVHLVQSKHNQRFYAVKVLKKQQVVKMKQVEHTNDERSMLQEVKHPFLITLWGTFQDSKNLYMVMDFVEGGELFSLLRKSQRFPNPVAKFYAAEVTLALEYLHKKDIIYRDLKPENLLLDRHGHLKITDFGFAKKVTDITWTLCGTPDYLAPEVVSSKGYNKSVDWRWSLGILIFEMLCGYTPFWDNGSPMKIYENILKGRVKYPPYIHPDAQDLIQRLITADLTKRLGNLHGGAEGIKSHQWFAEVTWERLAKKDIDAPYVPPVKAGSGDASQFDKYPEETERYGQTGPDEHGSLFENF

SEQ ID NO: 4259 - protein, 205 aa, Arabidopsis thaliana
MAEGSMRPPEFNQPNKTSNGGEEECTVREQDRFMPIANVIRIMRRILPAHAKISDDSKETIQECVSEYISFITGEANERCQREQRKTITAEDVLWAMSKLGFDDYIEPLTLYLHRYRELEGERGVSCSAGSVSMTNGLVVKRPNGTMTEYGAYGPVPGIHMAQYHYRHQNGFVFSGNEPNSKMSGSSSGASGARVEVFPTQQHKY

SEQ ID NO: 4260 - protein, 355 aa, Secale cereale
MPSSQAQADLWRHTLYYLTSMGLRCAVKLGIPTAIHNLGGVSSLPDLAAALSIPASKQPFLGRLMRALVTSGVFANGKERLLGGLFRLNPLSRILVEGVVAEEHHSQTSFVLAGTSRHYMEAALGMADWFKKDATGPVPTVFEDVHSASLFDESTAALDPELDALVTEGLAAHDNLGIGTIIREFHDLFKGLVSLTDFCCGDGTTSRAITKAHPHVKFTVLDLPKVIDKTPSDGIVNYFAGDLFHTVPKAQAVMLKLVLHHLSYEDCFKILTQCKDAIPSREEGGKVIVIDIVVAPSLGQVMFKEQTLMDILMLVFTRGRQRSENNWHELFTKAGFSDYKIVKKLGARGVIEVYK

SEQ ID NO: 4261 - protein, 321 aa, Mycobacterium smegmatis
MNDRAGAGHGLRPLMALLSNRVVADALARTFAATVNPAPKPGVRFSDITCRTSDAAIPTRHGTVFARIYHPPAAGATSAVYVNVHGGGFVVGHPEQDDPWCRYLATHAEVVVVNPDYVLAPRHRFPAAPQQIYDVVCWAAAPDRDWDGSRICVGGQSAGGNLSAAAARLALRHGTPRISLQVLHYAPLDLVTPTRDKPSTIGRRAVMKPWMGEVFDTAYIPDPAQRRDPLASPAWDQATDDLSGIAPAVVVTAEFDRLRNEARTYAERLRSFGALREYIEVPDVDHGYNIMTNATDVTRGVYDRVAHHVRRATDDGGQGRS

SEQ ID NO: 4262 - protein, 174 aa, Hordeum vulgare subsp. vulgare
MAPTVMASSATSVAPFQGLKSTAGLPVSRRSNASSASVSNGGRIRCMQVWPIEGIKKFETLSYLPPLSTEALLKQVDYLIRSKWVPCLEFSKVGFIFREHNASPGYYDGRYWTMWKLPMFGCTDATQVLNEVEEVKKEYPDAYVRIIGFDNMRQVQCVSFIAFKPPGCQESGKA

SEQ ID NO: 4263 - protein, 400 aa, Ralstonia eutropha JMP134
MDNWKTGTDAMFILLGAIMVLAMHAGFAFLELGTVRKKNQVNALVKILVDFAVSTIAYFFIGYTVAYGVQFMSGADTLAQKSGYELVKFFFLATFAAAIPAIISGGIAERSRFNPQLCATFVLVGFVYPFFEGIAWNQRFGIQDWITHLTGAPFHDFAGSVVVHAVGGWIALPAVLLLGARRGRYQKDGRISAHPPSNIPFLALGAWVLAVGWFGFNVMSAQTVDKISGLVAINSLMAMAGGTLAAWWAGRNDPGFAYNGPLAGLVAVCAGSDLMHPVGALVTGAVAGVLFVHLFTLAQNKWHIDDVLGVWPLHGLCGAWGGIAAGIFGSHALGGIGGVSLGAQLIGTLLGIVIAVAGGTIVYGTLKKLVGIRLDAEAEFNGADLTLHRISATPERETNW

SEQ ID NO: 4264 - protein, 1164 aa, Streptococcus agalactiae
MFKSNYERKMRYSIRKFSVGVASVAVASLFMGSVAHASELVKDDSVKTTEVAAKPYPSMAQTDQGNNSSSSELETTKMEIPTTDIKKAVEPVEKTAGETSATDTGKREKQLQQWKNNLKNDVDNTILSHEQKNEFKTKIDETNDSDALLELENQFNETNRLLHIKQHEEVEKDKKAKQQKTLKQSDTKVDLSNIDKELNHQKSQVEKMAEQKGITNEDKDSMLKKIEDIRKQAQQADKKEDAEVKVREELGKLFSSTKAGLDQEIQEHVKKETSSEENTQKVDEHYANSLQNLAQKSLEELDKATTNEQATQVKNQFLENAQKLKEIQPLIKETNVKLYKAMSESLEQVEKELKHNSEANLEDLVAKSKEIVREYEGKLNQSKNLPELKQLEEEAHSKLKQVVEDFRKKFKTSEQVTPKKRVKRDLAANENNQQKIELTVSPENITVYEGEDVKFTVTAKSDSKTTLDFSDLLTKYNPSVSDRISTNYKTNTDNHKIAEITIKNLKLNESQTVTLKAKDDSGNVVEKTFTITVQKKEEKQVPKTPEQKDSKTEEKVPQEPKSNDKNQLQELIKSAQQELEKLEKAIKELMEQPEIPSNPEYGIQKSIWESQKEPIQEAITSFKKIIGDSSSKYYTEHYFNKYKSDFMNYQLHAQMEMLTRKVVQYMNKYPDNAEIKKIFESDMKRTKEDNYGSLENDALKGYFEKYFLTPFNKIKQIVDDLDKKVEQDQPAPIPENSEMDQAKEKAKIAVSKYMSKVLDGVHQHLQKKNNSKIVDLFKELEAIKQQTIFDIDNAKTEVEIDNLVHDAFSKMNATVAKFQKGLETNTPETPDTPKIPELPQAPDTPQAPDTPHVPESPKAPEAPRVPESPKTPEAPHVPESPKAPEAPRVPESPKTPEAPHVPESPKTPEAPKIPEPPKTPDVPKLPDVPKLPDVPKLPDAPKLPDGLNKVGQAVFTSTDGNTKVTVVFDKPTDADKLHLKEVTTKELADKIAHKTGGGTVRVFDLSLSKGGKETHVNGERTVRLALGQTGSDVHVYHVKENGDLERIPSKVENGQVVFKTNHFSLFAIKTLSKDQNVTPPKQTKPSTQGSQVEIAESQTGKFQSKAANHKALATGNETVAKGNPTSTTEKKLPYTGVASNLVLEIMGLLGLIGTSFIAMKRRKS

SEQ ID NO: 4265 - protein, 95 aa, Triticum aestivum
MAALLRSRCSSVGRAMMGSLGNNLYGGATSSIETVARPSRSDAVRQQIRTFIQMRTNLKVVDNSGAKRVMCIQSLRGKKGARLGDMIIGSVKEAQ

SEQ ID NO: 4266 - protein, 81 aa, Triticum aestivum
FSTTLELLKDVKHSGAKVTIETCPHYLAFSAEEVPDGDTRFKCSPPIRDAANKDNLWEALLDGHIDMLSSDHSPSTPDLKL

SEQ ID NO: 4267 - protein, 64 aa, Glycine max
  unsure (1)..(64): unsure at all Xaa locations
MVLDETIICDDKSEWIRNGDYSPSRFQTQAXAVNLNCGAKTQSNPEDTVRVLTKAENGVRVMVI

SEQ ID NO: 4268 - protein, 251 aa, Zea mays
  unsure (1)..(251): unsure at all Xaa locations
MAKNYPTVSAEYSEAVEKARRKLRALIAEKSCAPLMLRLAWHSAGTFDVSSRTGGPFGTMKCPAELAHGANAGLDIAVRLLEPIKEEFPTLSYADFYQLAGVVAVEVTGGPEIPFHPGREDKPQPPPXEGRLPDATXGSDHLRQVFGKQMGLSDQDIVALSGGHTLGRCHKSGLGFEGAWTTNPLVFDNSYFKELLSGDKEGLLQLPSDKALLSDPVFRLFVEXYAADEKAFFDDYKEAQPQLSELGYADA

SEQ ID NO: 4269 - protein, 504 aa, Vibrio cholerae O1 biovar eltor str. N16961
MEKINLVWLKRDLRLTDHAPLQAALTSGRPTLLLYLFEPMLLGDAHYSERHWRFVWQSLQAINRDLAQSKGEVLIVTSDWQTCFARIAERYAIEAIYSHQEVGLACTFQRDLALAQWCQQHDIVWHEFPYAAVIRGAQTRKNWDEHWQQVMRSPCCDPDLTRANWLKLDAATLGLRSDIPATWQSKQAGMQTGGSDMAWATLEDFFARRGREYYRSISSPSLARHACSRMSPYLAWGNISLREMYQTLLKHWSVAGFRRSLIALSSRLHWHCHFIQKFESECEMEFRCVNRAYDSLLQQSSDAPAAQLAAWQTGHTGIPLVDACMRCLIQTGYLNFRMRAMLVSVLTHHMNVDWRAGVTYLAQLFLDFEPGIHYPQFQMQAGVTGTNTIRIYNPTKQAQEHDSEGQFIHKWVPELAQVPVPLLFEPWLMTPLEAQMYQVPLESPYLKPVMDLEASAKQARDRLWQWQKLPAVQAEAMRILARHVRQAKPRTSPRQPNKRQPEMD

SEQ ID NO: 4270 - protein, 316 aa, Zea mays
MIGLSRLGRCSSLELISSSEAGSSKQIPLLLSIVVVGVAGQFAWRRGGNIWCAFANRGAAGGWRRPGEDCSAAAKGFKMLACIACSAKDGGDQDGSRAATPHGRDAGKSLTSQLKDMVLKFSGSGRQYKAAAASPSFRGNRFPGFTSDGATEGYGYMRTTTHATGATAGTKVGRGFPQHVRSPSASWIPSIGEEDDEEDEEVVVVEEDRVPREWTAQVEPGVQITFVSLPGGAGNDLKRIRFSREMYDKWQAQKWWGDNNERIMELYNVRRFSRQVLPTPPRSDDAEVSRCLYPCLPSAFCVHVWESFIHSVGSPG

SEQ ID NO: 4271 - protein, 207 aa, Hypocrea jecorina
MPLCGGSKTVQRKLVLLGDGASGKTSLLNVFTRGYFPTVYEPTVFENYVHDIFVDNVHIELSLWDTAGQEEFDRLRSLSYDDTDLIVLCYSVDSKDSLENVESKWVGEIADNCPGVKLVLVALKCDLRQQEDDEPEDQAAADGNAQREKPPTISYDEGLEVAKRIGASRYLECSAMKNRGVNEAFTEAARVALSVKKEREDNKCTIM

SEQ ID NO: 4272 - protein, 264 aa, Hypocrea jecorina
MGHEDAVYLAKLAEQAERYEEMVENMKIVASEDRDLTVEERNLLSVAYKNVIGARRASWRIVTSIEQKEESKGNSSQVALIKEYRQKIEAELAKICDDILEVLDQHLIPSAKSGESKVFYHKMKGDYHRYLAEFAIGDRRKDSADKSLEAYKAATEVAQTELPPTHPIRLGLALNFSVFYYEILNAPDQACHLAKQAFDDAIAELDTLSEESYKDSTLIMQLLRDNLTLWTSSEAETSAGQVEAPPKEDTPAEAAAPAEEPKAE

SEQ ID NO: 4273 - protein, 500 aa, Panax ginseng
MFPLAYPLLFVLLGALSWWILPIISPLKRHHKLPPGPRGLPIIGSLHTLGALPHRTLQTLAKKYGPIMSMRLGSVPTIVVSSPQAAELFLKTHDNIFASRPKLQAAEYMSYGTKGMSFTAYGPHWRNIRKFVVLELLTPAKINSFVGMRREELGMVVKSIKEASAANEVVDLSAKVANIIENMTYRLLLGRTKDDRYDLKGIMNEALTLAGRFNIADFVPFLGPLDIQGLTRQFKDTGKRLDKILEFIIDEHEQNSSNGNASGDFIDDMLSLKNKPSNTHDELSKVIDRSVIKAIMIDIISAAIDTSDTSIEWILTELIKHPRAMKKCQEEIDAVVGVDRMVEETDLPNLEYVYMVVKEGLRLHPVAPLLGPHESMEDITINGYFIPKQSRVIVNSWALGRDPNVWSEDADEFLPERFEGSNIDVRGRDFQLLPFGSGRRGCPGMQLGLITVQLVVARLVHCFDWNLPNGITPDNLDMTEKFGLTTPRVKHLLAVPKYRL

SEQ ID NO: 4274 - protein, 156 aa, Ananas comosus
MSLVRRSNIFDPFSLDLWEPFEGFPFGGALSFPRPSASFPAETASFAGARIDWKETPEAHVFKADLPGVKKEEVKVEVEEGNVLQISGERTREKEEKNDTWHRVERSSGKFLRRFRLPDNAKVDQVKAAMENGVLTVTVPKEDVKKPQVKSVQISG

SEQ ID NO: 4275 - protein, 98 aa, Glycine max
MSTTESQRYKGTVKWFNEEKGFGFITPEDGGSDLFVHYSAIQTDGGFRTLSEGQSVEFLVTQDDSGRAAAVNVTTTTVKSSDSGNGENSGGDAANVEK

SEQ ID NO: 4276 - protein, 450 aa, Zea mays
MRGSMSNYYDDYDDIDEIEDDYDMDDPADDMVDEQRGVRDSDAEDNDYGQPNDKIPDTSSADARNGRDIQGIPWEQLNITRKKYRQSRLEQYKNYENVPNSGEEAMKDCKPTEKGGMYYEFRRNTRSIKSTILHFQLRNLVWATSKHDIYLVSHYSIRHWSALSGVDTELINVQGHVAPREKHAGSLSEGFYQTQVSTLAVKDNLLVAGGFQGELICKHLDREGISFCCRTTYDDNAITNAVEIFNTSSGAVHFIASNNDSGVRYYDMERFQLFKHLQFEWPVNHASLSPDRKTVVIVGDDPDGLLIDANSGKTLHSIKGHRDYSFASAWSPDGRTFATGNQDKTCRIWDARNLSKSVHVLRGNLGAIRSIRFTSDGQFMSMAEPADFVHVYDVKSDYNKRQELDFFGEISGTSFSPDTDALFVGVWDRMYGSLLQFGRLYNYSYLDSVF

SEQ ID NO: 4277 - protein, 503 aa, Triticum aestivum
MVATAKIPQRQLFIDGDWRAPALGRRLPVINPTTEASIGEIPAGTSEDVDAAVAAARAALKRNRGRDWSRAPGAVRAKYLRAIAAKMVERKSDLARLEALDCGKPLDEAAWDMDDVAGCFEFFAGHAEALDKRQNAAVALPENFKCHLKKEPIGVVALITPWNYPLLMAVWKVAPALAAGCTAVLKPSELASLTCLELGDVCKEIGLPSGVLNIVTGLGHEAGAPLSSHPDVDKVAFTGSYATGQKIMVAAAPTVKPVTLELGGKSPIVVFDDVDIDKAVEWTLFGCFWTNGQICSATSRLLIHKNIAKEFVDRMVAWSKNIKVSDPLEEGCRLGPVVSEGQYEKIKKFVANAKSEGATILTGGVRPKHLEKGFFIEPTIITDINTSMEIWREEVFGPVLCVKEFSTEEEAIELANDTHYGLAGAVISGDRERCQRLAEEIDAGCIWVNCSQPCFCQAPWGGNKRSGFGRELGKGGIDNYLSIKQVTEYTSDAPWGWYKAPAN

SEQ ID NO: 4278 - protein, 246 aa, Oryza sativa (indica cultivar-group)
MGRGKVQLKRIENTINRQVTFSKRRSGLLKKANEISVLCDAEVALIIFSTKGKLYKYATDSCMDKILERYERYSYAEKVLISAESDTQGNWCHEYRKLKAKVETIQKCQKHLMGEDLESLNLKELQQLEQQLENSLKHIRSRKSQLMLESINELQRKEKSLQEENKVLQKELVEKQKVQKQQVQWDQTQPQTSSSSSSFMMREALPTTNISNYPAAAGERIEDVAAGQPQHVRIGLPPWMLSHING

SEQ ID NO: 4279 - protein, 440 aa, Mycobacterium smegmatis
MDPVSQLEADARHLVRYSGRGGFTPTVIGSARGSLMFTEDGRELIDFTSGQMSAILGHSHPEIVATVQSQIAHLDHLYSGMLSRPVIELSRRLAETLPPTLDKVLLLSTGAESNEAAVRMAKLVTGKHEIVSFARSWHGMTQAAANATYSAGRRGYGPAAPGNFALPVPHRFRPDITDELGELDWRRQLDLGFDLIDAQSVGSLAACLIEPILSSGGIIELPPGYLAALAQKCREREMLLIVDEAQTGLCRTGDWYAFEHDGVVPDILTLSKTLGAGLPLAAVITSSEIEQRAQEREFLFFTTHVNDPLPAAVGLTVLDVLSRDRLDVRARELGQRLRAGLDELAGRHPIVADVRGRGLLLGMELSAEDTPGVSADQLGAVVTRRCFELGLHMNIVQLPGMGGTFRLAPPLTATDNEIDRALEIMDEALAYAREPAVHRS

SEQ ID NO: 4280 - protein, 203 aa, Ustilago maydis 521
MATNITFHPGHVSYDERAELLSQQGLTIWLTGLSASGKSTIATALEQHLLSLKKSAYRLDGDNIRFGLNKDLGFSPQDREENIRRISEVSLLFASSTTITITSFISPYKADREIARKLHEAHVPKLPFVEVFVDASIETCESRDPKGLYKKAKAGEIKEFTGISAPYEKPEQPEIHIDADKTSIEDAVRIITEYLINKGYLKL

SEQ ID NO: 4281 - protein, 175 aa, Zea mays
MTKAATLYGSKTQSDALRPGPLRPANIIRNKFPTYKNGSNGIVIKLADGPEMPPLKEIVAKETADLLDRRQRLSVRELAMKFEKGLNTATLLSNEVKWRQVALLERDILLKNLKCVLESLRGRVTGKTKDEIEESISMVEILAVQLSKREAELLQQKEEVTKLAKSLKQASEDAK

SEQ ID NO: 4282 - protein, 274 aa, Hordeum vulgare subsp. vulgare
SSEAAGPDGTLVRRYTTGPLCRWLTKDRGDGTLSPFAVFVVDPDHLFPWHHIAEAVTAGGPSAFERTQKWPYYEYMGKNQRLGTLFDNAMAQHSVILVTKMLERFKGFDGVQRLVDVGGGTGSTLGMITSKYKHMTGINYDLPHVIAQGLPLPGVEHVAGDMYESIPTGDAVLLQWITLMLNDDEFVKILSNCHNALPKDGKVIVVDGILPENPDSSLTARDAFTLDIIMFVLFKGAKQRTEKEFARLAKQAGFTGGIKKTYIFFNFYALEFTK

SEQ ID NO: 4283 - protein, 503 aa, ASPERGILLUS NIDULANS FGSC A4
MGLELRSMVLVSLARIYQTGFKVRRPLLAVATTNFQNIINGEKTSTTERRHGINPATGEPNPDVPVAIKEDVDRAVVAAQEAFKTWIDVPFDERRKALLAYADAIEEYVADFAKLLVQEQGKPLQFAANEVAQSAQVIRSAADVAEGLTDEIIEDSAEKKIVVRHIPIGVGAGIIPWNFPHLLTVVKLAPALITGNVIIIKPSPFTPYCGLKLVELAQRFFPPGVVQALSGDDRLGPWLTAHPGIGKISFTGSSATGKKVMESASRTLKRVTLELGGKDAAIVCGDVDVQSVAPRVISKGFFNSGQICLAVKRIYVHESIYNEFRDAAVAYAKTIEVGPGTQEGVFMGPLQNSMQYEKVKGFFADLTKEQLSLTHPDGKAFDNKAGYFIKPTIIDRPAEDSHIATEEQFGPIMPLFSWSDESDVIARANNTQMGLGASVWSRDLEQAARIAAKLQAGSVWVNTHFEADLRAPFGGHKESGIGTENGLQGLRQWCNLQTLYLKN

SEQ ID NO: 4284 - protein, 429 aa, Mesorhizobium sp. BNC1
MANSTVTLELGGNSSEYPVRQASIGPGVFDISSLYKQTGMFTYDPGFTSTASCESKITYIDGDEGLLLHRGYPIDQLAEQGDFLEVCYLLLYGELPTKAQKEDFDLRVTRHTMIHEQMSRFFTGFRRDAHPMAVMCGVVGALSAFYHDSTDISDPHQRMVASIRMIAKMPTIAAMAYKYHIGQPFMYPRNELSYAANFLHMCFAVPCEEYKVNPVLARAMDRIFILHADHEQNASTSTVRLAGSSGANPFACIAAGIACLWGPAHGGANEAALNMLAEIGSVDRIPEYIARAKDKNDPFRLMGFGHRVYKNYDPRAKIMQKTCHEVLSELGIKDDPQLDIAMELERIALTDEYFIEKKLYPNIDFYSGITLKALGFPTTMFTVLFAVARTVGWIAQWKEMIEDPQQKIGRPRQLYTGAPQRDYVPIAKR

SEQ ID NO: 4285 - protein, 355 aa, Methanosarcina mazei Go1
MNKNICFIDGLEGILKYRDVDINELIDLPYDAVSYLLIKGELSEEKELAEYSARLHAERGINREVMDVIRMCNLNIDSMEALLTVVSFISQFDPDLYDNSLEGNMRKAIRLIAVVPTIVAAYYRTANGKEPVPPDPSLAHGANFLYMIKGSKPDPLEAEVMEKDFILSAEHELNASTFSSRVTASTMSDLYSAVVSGLCTLKGPLHGGARSEVMTMIETIGSPENAEKFVLEKIEKREKIMGFGHRVYKTYDPRGTIFKQLSRRLAEAKGDMHWYETAEAIENAVIRELVEKRGKPIYPNIDFYSGVIYKYMEIPPQLATSIFAIGRISGWIAHCFDQYEKKKIIRPRIFMLDEC

SEQ ID NO: 4286 - protein, 462 aa, Oceanobacillus iheyensis HTE831
MVKMQEWIEVTNPATGEVIDRVERGGKVEAREAVDKASEAFNDWSKRTAYERSELLMNWNALITKHQDELAEIMTMEQGKPIKEALGEVQYANNFVSWYAEEGKRLYGETIPASKADKRILVQRQPVGVIAAITPWNFPAAMITRKVAPALAVGCTAVVKPASATPRTAIRLAELAEEAGIPKGVLQVVTGSSGDISDAWMQDSRVRKISFTGSTEVGKILMKKSAETVKKVSLELGGHAPLIVMKDADIEKAAEGATASKFRNAGQTCVCTNRIYVHESIKDEFIKAFERKVRELRVGNGLEEGIDIGPLIDHDALEKVETHIRDAAHKGASIVYGGDKVGDDSLFYKPTILSNVTDNMLCMTEETFGPVAPVTTFSTEEEAVKRANHSPYGLAAYLFTENLATAIRISEQLEYGIVGINDGVPSTAQAPFGGFKESGIGREGGHHGMEEYVEVKYISIQL

SEQ ID NO: 4287 - protein, 294 aa, Glycine max
MLVLFLFLIFLQEHVLTGGHGLMVKGYDPVVKALANDLDIRLNHRVTKISNGYNMVMVTVEDGRNFVADAVIVTVPIGILKANLIEFTPKLPDWKASAINDIGMGNENKIALRFDRVFWPNVEVLGIVAPTSYACGYFLNLHKATGHPILVYMAAGRFAYDLEKLSDESAANFVMQQLKKMFPDASKPVQYLVSRWGTDPNSLGCYACDLVGMPDDVYERLRAPLGNLFFGGEAVSMDDHQGYVHGAYSSGLMAAENCQRHLLQKQGHMENLPLVPSVRHEMFETTIPLQISRI

SEQ ID NO: 4288 - protein, 444 aa, Desulfovibrio vulgaris subsp. vulgaris str. Hildenborough
MPGTRFEKDGLVIDTTIPHLGPAKIPSPLVYCHHTNDTGVPLYLDSEFIEELAGESTALNFEAAGPRRNLYFDPSKAKCAIVTCGGLCPGINDVIRAIVMEARHAYDVPAVLGIRYGLEGFIPKYRHDVVELTPDVVSDIHQFGGTILGSSRGPQSPEEIVDALERMNISALFMIGGDGTLKAASNIVQEVMRRNLKISVIGVPKTIDNDINFISQSFGFETAVYKATEAIQCAHTEAIGAMNGIGLVKLMGRESGFIAAHATLSLKEVNFVLIPEAPFTLHGEGGLLPTLERRLRARAHAVIVVAEGAGQNLLADTGKKDASGNPILGDIAQLLRAEIKAYCDERGLPHTLKYIDPSYIIRSVPANANDRVYCGFLGQHAVHAAMAGRTGMVVAKLMDRYVHLPLELVTLRRRKLNIRSDYWRAVLESTGQAELAGMVPGLDE

SEQ ID NO: 4289 - protein, 280 aa, Streptococcus agalactiae
MTDTMILNDNHKIPTLGLGTWMIDNDRVAQVVKDAIELGYRHINTAQAYNNEKGVGVGIKESGITRESLFVTTKIAAEHKDYESATKSIDQSLEALGLDCIDLMIIHSPQPWKEWRETDKHFDQGNLEAWRALEDAQKSGKVKSIGVSNFLEKDLKNGHVKPAVNQILAHIGNTPFDLIDYCQSKGIQVEAYSPIAHGQALKSDGIQKMAEKYGVSVAQLCIQYLLQLNLIVLPKASSKEHLQSNLDFDFVISDEDMSILKSLMFDDYGEFSNFPVFSEK

SEQ ID NO: 4290 - protein, 517 aa, Triticum aestivum
  unsure (1)..(517): unsure at all Xaa locations
MAAANGAKGFEVPELDIKFTKLFINGQFVDAASGKTFETRDPRTGEVIARIAEGDKADIDLAVKAAREAFDNGPWPRMPGCARARIMHKFADLVDQHVEELAALDTVDAGKLFMMGKMMDIPGGANLLRYYAGAADKIHGETLKMARPLHGYTLKEPVGVVGHIVPWNYPTTMFFFKVSPALAAGCTMVVKPAEQTPLSALFYAHLAKEAGIPDGVLNVVPGFGPTAGAAIASHMDVDKISFTGSTEVGRLVMQAAATSNLKPVSLELGGKSPVIVFDDADVDMAVNLVNMATYMNKGEICVAGTRIYVQEGIYDAFVKKSVELAKKSVVGDPFNPNVHQGPQVDKDQYEKVLKYIDVGKSEGATLLTGGKPCSDKGYYIEPTIFTDVTDDMSIAQEEIFGPVMALMKFKTVDEVIQKANSTRYGLAAGVVTKNIDTMNTVSRSVSXGLWVNCYXAFDPTPFGGXKMTVGKDMGRCLEXYCTQDVVTPLYTHLAVIGRHRTTHSKQKWKDALHFTNA

SEQ ID NO: 4291 - protein, 195 aa, Glycine max
MGSHNALAATFGILGNIISVMVYLAPVPTFYRIYKKKCTDGFHSLPYLLSLMSSMLWLYYAFLKIHDGVVPLITINSIGCVIELIYILTYIKYAHKDARNLTYTLFAAMNIGFLALVLSSRFALNGSHRVKVIGWICDAVSLSVFASPLSIMAKVIRTKSVQFMPFYLSFFLTLNAITWFVYGLSMQDKCIYEGQ

SEQ ID NO: 4292 - protein, 256 aa, Zea mays
MRSLVLIMGLLLLSCSGMSSAARLLEEMAPKEEYPHPEVPELPKPELPPHPTVPELPKPDELPPHPVVPELPKPEVPVHPAVPELPKPEIPPHSTVPELPKPEMPELPKPEVPEHPAVPELPKPELPPHPTVPELPKPEVPELPKPEVPEHPAVPELPKHELPPHPTVPELPKPEVPELPKPEVPEHPAVPELPKPEFPPHPTVHELPKPEVPAHTAVPEPEPELPKHELPPLPEPELPLPPKAESHYPVPGMAKP

SEQ ID NO: 4293 - protein, 167 aa, Burkholderia fungorum LB400
MAEFRLWSDEFPTNGFMPKAHEYHDKAFGVDGENISPALKWEAPPPDTQSFALTVHDPDAPTGSGFWHWVVVNIPADIRSLPRNAGKPDGSLLPHGALQLRNDYGTVGFGGAAPPRGDKAHRYIFRLHALRVPHLPINADTTNAVARFMTHLNELDSTTHTGLYELK

SEQ ID NO: 4294 - protein, 505 aa, Hordeum brevisubulatum
MAAPPAIPRRGLFIGGGWREPTLGRHIPVINPATEATIGDIPAATAEDVELAVAAGGPVLARRREHWARASGAVRAKYLNAIAAKIKEKISYLALLETVDSGKPKDEAVADMDDVAACFEYYAGLAEALDGKQHAPISLPMEEFKTYVLKEPIGVVGLITPWNYPLLMATWKVAPALAAGCTAVLKPSELASLTCLELGAICEEIGLPSGVLNIITGLGPDAGAPIASHPHVDKIAFTGSTATGKMIMTAAAQMVKPVSLELGGKSPLVIFDDVADIDKAVEWAMFGCFFNGGRVCSATSRLLLHEKIAARFLDRLVEWVKNIKISDPLEEGCRLGSVISKGQYEKIKKFISTARSEGATILHGGDRPKHLGKGFFIEPTIITDVSTSMQIWREEVFGPVICVKVFKTESEAVELANDTHYGLAGGVISDNLERCERIAKVIHSGIVWINCSQPTLVQAPWGGNKRSGFGRELGEWGLENYLSVKQVTRYCKDELYGWYQRPSKL

SEQ ID NO: 4295 - protein, 237 aa, Lactobacillus johnsonii NCC 533
MNNFSQEPERRTIVDVTGLNRFLSRMYGMMTIAVLVSALSAYLTMTVFRTQVMTLFASNPAMTWILLLVPLALTFGISFRATRNPVASFVMLMIMAIVYGVEFSLIAGAYTGHSIASAFVASSTVFITMAVIGTTTKKNLNNLGSYASAALIGLIVAMLINMFLRNPMVSYIFSFIAVIIFTILTAWDAQRMKQIYENYSGQVSVDGLAVAGALALYLDFVNLFLQFLQIFGFSDRN

SEQ ID NO: 4296 - protein, 413 aa, Oryza sativa (japonica cultivar-group)
MEEQQQVEVEVEVPSYFVCPISLQIMRDPVTLPTGITYDRDGIERWLLTAGTCPLTKQPVPPDCDPTPNHTLRRLIQSWCALHADHGVDLVPTPKPPADRARVADLVSRLRAATSSAALLDALRELRDVAAESERNRKLLAAVPGAVDVLAAVVVASCRDAKAACDEALEIVCSLELSERCLARLVERNEELVDALVATLQRTNTTSRAHAALLLEAVTAVMPSNRLVSLPEEVFGEAVQLLRDRVSSPATRAALHVLVGTTSWGRNRVKAVDAGAVAVLVDMLLDGPVERRGCELALAALDRMCGCAEGRAALVSHGAGVAVVGRKVLRVSEVASEKAVRVLRSVARHAATAAVVQEMGQTGAVEKLCVVAQSEQCGERTRERARETLRLHARAWRNSPCLQPHLQALYPSC

SEQ ID NO: 4297 - protein, 126 aa, Glycine max
YPPPPAFRLQTEDLRYHHQLFRHIAQLGRIEAMASRLLAAASSSSASSSPLARLISSRRMAGAADHHGSTKVNMWQEPLNPGNWKEEHFVLASLAMWGAIIYGGLKAFGGKKEVKTEAGPAAAPAH

SEQ ID NO: 4298 - protein, 378 aa, Triticum aestivum
  unsure (1)..(378): unsure at all Xaa locations
RSDTCELVARFCYGLTIELSPANIVHLRCAAEYLEMTEETAQDNLIHQAEMFFNQVVLRSWKDSLEALKTCDVLPHAEDLHIAKRCVESLAAKASIDPDLFGWPVSEHGAMHSPGGSVLWNGISTGAKLGNFSSDWWYDDASSLSFPTYKRLISTMESRGAKEEIVAGSLTYYAKKCLPGLNRRQSMGPVPLTSAAATLSEEEQRHLLEDIDRMLPLQRGLISTNVLLWLLRTAMILKVNRACISNLEKRVGMQLDEATLEDLLLPNFSYTMDTLYNVECVRRILDHFLAMGQTMGGGSPCLNDVMGSPSLARITXVAKLIDGYLAEIGPNITLSXPKFESLACXLAEIARPXNYGLYRAISFLGRAIWLRESRGGFW

SEQ ID NO: 4299 - protein, 281 aa, Triticum aestivum
GGASSSATAPAGGPITRRRKLAESEPPAQDTISNLPDAVLGEIISLLPTKDGARTQILASRWRHLWRSAPLNLDCRGLNHGDELVGALSRIISSHQGPCRRLCIHADLLDAPSTTVDSLLRSDALGNLQELEFSCFERPPPASIFRFSPTLRVVTIECSNLPDSTVQGIHFPLLQQLGLEFVCISECSLHSLIASCPVLESLLIHRSFGFACIQINSLSLKSVGLDSYAVWENNKVALQLQELIINNAPCLERLLLLHQETGLHISVIAAPKLETIGFLSD

SEQ ID NO: 4300 - protein, 122 aa, Mycoplasma penetrans HF-2
MIQFMTKLNVADNTGAKQVGVIKVLGGTKRRYASVGDIVVVSVKKAQPDGIVRKGQVCKAVIVRVKKNITRSSGNSLSFDDNACVIIKEDKTPRGSRIFGPVARELRDKGFSKIVSLAPEVL

SEQ ID NO: 4301 - protein, 382 aa, Helicobacter hepaticus ATCC 51449
MGETIKNTKVGGLAGITAGQSAICTVGTGHGLNYRGYDIYDLARECEFEEVAYLLLKEKLPNANELAAFKKELIAARDLPKALKDTLKLLPKNAHPMDIMRTTCSMLGCLEPETYDIVKMSFPMQNQIAIRLLGIFPSALTFWHHYHHNGKEISTQSNQDSIAGHFLELLHQKPPKELWIKAMHASLILYAEHEFNASTFTARVITATMSDVYSGVTGAIGALRGPLHGGANEAAMELIAEYKTPQEAEKGILDKLARKDKIMGFGHRVYVKADPRNVVIKEWSKKLSEDVGDTKGLYPISEAIEKVMWEQKKLFPNLDFYSASAYHFMGIPTPYFTPIFIFSRTAGWLAHIFEQRANNKLIRPSSEYIGPDKKAFVPLHNR

SEQ ID NO: 4302 - protein, 417 aa, Pyrococcus horikoshii OT3
MTQVDLVVVGKFLFKEKIIDGSIGIEDDKIAKFSLRELKGDKKIKVEKGKIILPGLIDVHVHLRDFNESYKETIASGTKAAIHGGITTVFDMPNTKPPIMDEKTLKLRELIFKKKSYSDYALGFLIAGNEPAKADFYKIFMGASTGGIYSKNFEEDYKKAPDIVSVHAEEYELINRYPERPPIVEVVAIKKALQASKKMKKPLHICHVSTKDGLKEILKANIPWVSFEVTPHHLFLTRRDYERSKLLKVYPPLRDEEDRRYLWENLKSIPIIASDHAPHTLEDKEAGAAGLPGLETEVALLLDAVNKGMITIWDIVAKMSINPARIFKIKNKGWEEGKDADLIVVDMKKEWTIKAENFYTKANWTPYEGWKVKGKVIMTILRGEVVMEDDEIIGKPRGERIVKEGNAQGNLGSSQEH

SEQ ID NO: 4303 - protein, 493 aa, Bordetella pertussis Tohama I
MSLSVGNAALLPGRNLIGSEWREAALGARFAVADPATGKVIAHVPDSGARDAGAAVTAAHQAFADWRRTPAKVRAQIIKRWNALLHENAEDLARLISSEQGKPLAEARGEVSYAASYVEWFAEEATRADGDLIPSPAQGRRMFALREPVGVVAAITPWNFPAAMIARKIAPALAAGCTVVCKPAEDTPLTSLALTALAQQAGVPPGVLNIVTASRGRAAEVADAWLDDPRVRKITFTGSTPVGKHLARRSADTLKRVSLELGGNAPFIVFDDADLDAAVEGLMVSKFRNGGQTCVCPNRIFVQAGVHDAFVRKLAARVEGLVVGPASDPASQIGPMINARAVEKIEHHVADALERGARLAVGGKRIHSARCAGDHYYAPTVLTGVDETMACFREETFGPVAPITVFASEAEVVAAANATAFGLAAYFYSTDVRRIWRLADALETGIVGVNEGALAAEAAPFGGVKDSGYGREGSRHGLAEYMQIKYVCQGQLD

SEQ ID NO: 4304 - protein, 349 aa, Lycopersicon esculentum
MGSEALEFFSCANNNNNNNGFSYEPKKNIIMEETDNLSINIHDGSWFEEEIDVDLKWSFALNSVLHKGTSEYQDIALLDTKHFGKILVIDGKMQSAEVDEFIYHECLIHPALLCHPNPKNVFIMGGGEGSAAREALRHKSMEKVVMCDIDKEVVDFCKKHLTANHEAFLNKKLNLVINDAKAELEQRQEKFDIIVGDLADPVEGGPCYQLYTKSFYQNILKPKLNDTGIFVTQAGPAGVFTHKEVFSSIYNTTKQVFKYVLAYTAHVPSFADTWGWVMASDKPFCLDAGKLDKKIAERIEGELLYLNGASFFSSTILNKTVAKTLKNESHVYAEDDARFIHGHGLGFRN

SEQ ID NO: 4305 - protein, 459 aa, Wolbachia endosymbiont of Drosophila melanogaster
MCFIKKTLDLFYNRYSNIMTQTWDLLQTGQKEGYKIAYTNARIIDPETKLDIKGSLLTEGDKIVDFGESLFSTSGVDETIDCKGLVLMPGLIDIHVHFREPGQEHKETIYTGSKSAAAGGVTTVVCQPNTVPAIDSVILAKYLKYRALETSHVNVEFYAKITTSEEHLTEMALLKEAGAVGFTDDGMPVMNPMIMRQALLYSSMLNVPIAQHAEDLNLSAGGAINEGKISEELGVKGILSASESVMVNRDILLMKDMENVHYHILHVSSKDSLDAIKRAKDLGLNVTCEVTPHHFTLTEDIVKQHGAIAKMNPPLRTEEDRLAMVEGLKTGVIDCIATDHAPHDRSSKDLPLENAAFGIVGLETMLPLSLELYHSGQMGLLDVLAKLTYKPADIIHIPRGRIQKNLAADLILVDLNHEWEIKTDNFASKSKNSPFDGRKVKGHVVRTVVSGKTIYSQKS

SEQ ID NO: 4306 - protein, 160 aa, Caulobacter crescentus CB15
MAMSIYDYSAKTLDGQDVSLADYRGQVLLIVNTASKCGFTPQYEGLEALYKAHKDRGFTVLAFPCNQFGAQEPGNAEEIANFCSLTYDVSFPVMSKIDVNGADAHPLYKFLKKEQKGVLGTEAIKWNFTKFLIGKDGQVVDRFAPTVKPEDLKVAVEALL

SEQ ID NO: 4307 - protein, 208 aa, Gossypium hirsutum
MSSENGKRLLETDAGGLNFEATELTLGLPGEPRVTSDGGAKLGSKRGFSETVDLKLGDNNQEVKLGHSLQEAAKSPVSKTQVVGWPPVRGFAKRGKKSCKYVKVAVDGAPYLRKVDLEIYNSYQQLLTSLEDMFSCFTIRNYLNEKKIDQVNGIEYMPTYEDKDGDWMLVGDVPWQMFVESCKRLRLMKSSEAVGLGLKTAPKYSSTN

SEQ ID NO: 4308 - protein, 291 aa, Glycine max
GLSVLAKYRRPLLVHSEIQQHSKKHLELNDKGGPRAYLTYLHTRPPSWEEAAIKELVGVTKDTRKGGPLEGAHVHVVHLSDSSASLDLIKEAKRRGDSISVETCPHYLAFSSEEIPNGDTRFKCSPPIRDAYNREKLWEAVLEGHIDLLSSDHSPTVPQLKLLEEGDFLKAWGGVTSLQFDLPVTWSYGKKHGLTLEQLSLLWSKKPATFAGLESKGAIAVGNHADIVVWKPEVEFDLNEDYPVFLKHPSLSAYMGRRLSGKVLETFVRGNLVFKKGKHAPSACGVPILAK

SEQ ID NO: 4309 - protein, 320 aa, Enterobacter cloacae
MIKKIGVLTSGGDAPGMNAAIRGVVRAALTEGLEVFGVYDGYLGLYEDRMVQLDRYSVSDMINRGGTFLGSARFPEFRDEHVREVAIENMKKRGLDALVVIGGDGSYMGAKRLTEMGFPCIGLPGTIDNDIKGTDYTIGFFTALGTVVEAIDRLRDTSSSHQRISIVEVMGRYCGDLTLAAAIAGGCEFIVVPEVEFSREDLVAEIKAGIAKGKKHAIVAITEHICDVDELAKYIEAETKRETRATVLGHIQRGGSPGPYDRILASRMGAYAIDLLLQGHGGRCVGIQNEKLVHHDIIDAIENMKRPFKGDWLDCAKKLY

SEQ ID NO: 4310 - protein, 163 aa, Triticum aestivum
  unsure (1)..(163): unsure at all Xaa locations
MAPAVMASSATTVAPFQGLKSTAGLPVSRRSSASLGSVSNGGRIRCMQVWPIXEGIKNSETLSYLPPLSTEXXWKQVDYLDXSKWXXCSXSSKLVPLPXXQXSPXYYDGPYWDKXNLPXFGXTDXQXAQRVEESRRPDPIRTVQLRQMDASRLKQRGARIREG

SEQ ID NO: 4311 - protein, 178 aa, Streptomyces coelicolor A3(2)
MTTGATVWLTGLPSAGKTTIARELADRLREEGRPVELLDGDEIREFLSAGLGFDRADRHTNVQRIGFVAELLARNGVTALVPVIAPYADSRDAVRERHGANGTAYVEVHVATPVEVCSVRDVKGLYAKQAAGELTGLTGVDDPYEEPVAPDLRIESQDQTVQESAAAVHALLTERGLA

SEQ ID NO: 4312 - protein, 121 aa, Triticum aestivum
  unsure (1)..(121): unsure at all Xaa locations
GPMLIYPMLKSKWDPNTSVALPEGEVFYLVALLRFCPXXGGXAVEELVAQNGAIVDACRSSGYDFKTYFPHYRTEADWARHFGAKWARFVDRKARYDPLAILAPGQKIFARTPSSSRTDRS

SEQ ID NO: 4313 - protein, 447 aa, Glycine max
MEECHTVFGKYEMGRLLGKGTFAKVYYGKQISTGESVAIKVINKEQVRKEGMMEQIKREISVMRLVRHPNVVEIKEVMATKTKIFFVMEYVRGGELFAKISKGKLKEDLARKYFQQLISAVDYCHSRGVSHRDLKPENLLLDEDENLKISDFGLSALPEQLRYDGLLHTQCGTPAYVAPEVLRKKGYDGSKADIWSCGVVLYVLLAGFLPFQHENLMTMYYKVLRAEFEFPPWFSPESKRLISKILVADPAKRTTISAITRVPWFRKGFSSFSAPDLCQLEKQEAVTEEENNSKVPKFFNAFEFISSMSSGFDLSGLFETKRKTAAVFTSKCSAAAIVAKIAAAARGLSFRVAEVKDFKIRLQGAAEGRKGRLAVTAEVFEVAPEVAVVEFSKSAGDTLEYAKFCEEDVRPALKDIVWTWQGDATCAANFPACHGEECQKQVVVSTI

SEQ ID NO: 4314 - protein, 322 aa, Magnetococcus sp. MC-1
MNTIAVMTSGGDAPGMNSAIRAVVRTAIGAEMEVLGIRRGYSGLLEGDLIPMDAASVGNILQKGGTVLGTSRCAEFLKPEIRQEAANILRRKHVDGLVVIGGNGSFNGAYQLHQEHDIPVVGVPGTIDNDIQGTHYTIGFDTAVETGVYAVDKIRDTANAHDRIFLVEVMGRHSPAIAIHTGVCTGAEHVIHTPENTDYDTLVSGIRRGRKRGKNSFIIIVAEGQVPGSAYQVQKHLADNYQIASHVAILGHLQRGGSPTAHDRFIAASMGFHAVQALKTGEVATVTACRDGRIQLVPLQECLEKNDAIDAFSLNLTQQLAI

SEQ ID NO: 4315 - protein, 490 aa, GIBBERELLA ZEAE PH-1
MASPKLSDPSLIKNACYVNGQWVAAKSGKDFSVENPASLEKLGSCPEFDANDTEAAIAAADAAYKTYRKTPARQRARYLRRWYDLMMENADDIARLITLENGKVWSDAKTEAVYAANFFEWFSEEAPRIYGETIEASNPSCRLSTIKQPVGVCGLIAPWNFPAAMITRKAGPALAAGCTVVIKAPAEAPLTALALAELAHRAGIPAGVVNIITALDNTAEVGKVLTTHPKIKKVSFTGSTGVGRLLMNQSSSTVKKLSFELGGNAPFIVFEDADLEKAVKGIITSKFRNSGQTCVCANRIFVHRSIYDKFVQMVLDVVKTFVIGDGFGEKTTHGPLIHGRAVAKTAEHVEDAISKGAKLIHGGERLADLGPNFFGLTMLTDMTPDMKIFSEETFGPVAAFFAFDTEEEVIELANDSEVGLGGYFFSENVNRCYRVAEALEVGMIGVNCGVLSDPAAPFGGIKQSGFGREGSKYGIDEFTVTKMVMTNIDP

SEQ ID NO: 4316 - protein, 399 aa, Zea mays
  unsure (1)..(399): unsure at all Xaa locations
THASFSSFFPVGFRSGNHFPTTRGRSTRPRAVELGSEASEFCHYKGFYSSNYLPMTPKSVNDIHKRGGTVLGTSRGGHDTKKIVDNIQDRGAIQVYTLGGDGTHQGAHGAINXSRGRGLQVAVAGIPKTIDNDIAVIDKSFGFDTAVEEAQRAINAAHVEASSAENGIGLVKLMGRYSGFIAMYATLASRDVDCCLIPESPFYLEGEGGLFEYIDRRLKENNHMVIVVAEGAGQDLIAQSIPAADQQDASGNKLLLDVGLWLTHKIKDYCKSKKMEMTIKYIDPTYMIRAIPSNASDNVYCTLLAHSAIHGAMAGYSFTVGMVNGRHAYIPFHRVTSTRNKVRITDRMWARLLSSTNQPSFLSQKDIDAAREADKAANRTKSREDAKKQSTPVLANGEK

SEQ ID NO: 4317 - protein, 189 aa, Solanum tuberosum
SDGKVDKFIGGESSLPLHEIGSNAGGDGGRYYLGMFLGGAYEEALGGLHNLFGGPSVVRVLQSDSPHSFAVTRSVPGPSCADVLRAMQFEPELMFETLKHRAEEFLEQGEGEGEDKGLAFASLTSSLAQSFHNMPYLVSSSSSCCFTAEATATASANANANNGGYYYYSEDNAADCATEEDEIWSYCTA

SEQ ID NO: 4318 - protein, 206 aa, Glycine max
PRPAESSEPPSHRQKPTTGDDDRISHLPDVLLLQILSLLPTKQAVITGILSKRGRPLWPAVSVLDFDDESSPEFHHPGGLTGFAEFVYSVLLLHDAPAIERFRLRCANPNYSARDIATWLCHVARRRAERVELSLSLSRYVALPRCLFHCDTVSVMKLNGVFLNALASFSVSLPLLKVLHVGDRVLFGCHDYVVKLIAGCPRLEDL

SEQ ID NO: 4319 - protein, 348 aa, Pseudomonas sp. TW3
MLAIRKTKAGPGGLSVDDVAAPKEAHSTDVLVKVEAAGICGTDLLIYKWGEFAKRMKLPTILGHEVSGVIEQVGSDVKGLRPGMRVSLESHLPCGTCYTCRRGWAHVCPKTRYPGVDFDGGFASFVVVPESVCWPVPCGIPPLQAAMMEPFGLAVHASLEGSGVSGLNVLVSGCGPIGLMNIAAAKALGASKVIATDIHPLRLTAAAKMGADECINAAEESVYKTVRSLLGERGVDVAIDYSGQAAALKELIQSITHGGELRLMGVPSHDILLNLEEWLFKGLIVRGLHGRRLYETWERSTSLLVTGRVDLSSLVSHRLPLSAAEDAFEMALNGQSLKILFEPNGSCI

SEQ ID NO: 4320 - protein, 443 aa, Azoarcus sp. EbN1
MHAPSLLERSLRSVWHPCTQMKQHEALPLVPIVRGEGPWLIDAEGRRLLDGISSWWVNLFGHCNPRINAALRAQLDTLEHVMLAGFTHEPVVELSERLAALTGHRLGHAFYASDGASATEIALKMSAHYWRNLGLAEKSRFVSLAGSYHGETVGALAVTDVAIFRDAYAPLVRAGTTVPTPDARLALPGESAADVARRAAAALEAHLAEHHAQTAALIVEPLVQGASGMVMYDPEYLRLARALCDRYRVHLIADEIAVGCGRTGTFFACEQAGIWPDFLCLSKGISGGYLPLSLVLATNTVYAAFYADSATRAFLHSHSYTGNPLACRAALATLDIFEQDGVLAANRVLARQLGDAVRARFGAHPAVRQLRQRGMILAFDVATERPDFARNFFRAGLDHGVLLRPIGNTVYFMPPYILDAAHVAHLVDGAAAALAEALEPAPG

SEQ ID NO: 4321 - protein, 307 aa, Solanum virginianum
MGSKHSKETTSTSHRVPFVDLQEATNNFDDNFLIGEGGFGKVYRGVWRDGTKVALKRYNPKSGQGIAQFRTEIKMLSQLRHPYLVSLIGYCDENNEMTLIYEYMENGNLRKHLYGSDLPTLSWEQRLEICIGAAKGLHYLHTTAVIHCDVKCTNILLAENFVAKVADFGLSKKGTVLDETHTTTMMKGTFGYLDPEYYRTLRLTEKSDVYSFGVVLLDVLCARPAVASSSSKGIINLAEWAMKWKKKGQLERIIDPNLVGKIIPDSLRKFGETAEKCLAESGVDRTSMNTVLWNLEYALHLQEPVIQ

SEQ ID NO: 4322 - protein, 345 aa, Triticum aestivum
MKTLLILTILAMAITISTANMQVDPSGQVQWPQQQLVPQPQQPLSQQPQQAFAQPQQTFPHQPQQQVPQPQQPQQPFPQTQQPQQPFPQQPQQPFPQTQQPQQPFPQQPQQPFPQQSQQPFPQTQQPQQPFPQQPQQPFPQTQQPQQPFPQFQQPHQPFPQPQQQFPQPQQPQQSFPQQQRPFIQPSLQQRLNPCKNILLQQCKPASLVSSLWSIIWPQSDCQVMQQQCCQELAQIPQQLQCAAIHSVVHSIIVQQQQQQQQQQQQQQGMHILLPLSQQQQLGQGTLVQGQGIIQPQQLAQLEAIRSLVLQTLPTMCNVYVPPECSIIRAPFASIRASSGHHLPA

SEQ ID NO: 4323 - protein, 412 aa, Streptococcus mutans UA159
MKNYALLNGAYDNKTMYDFKPVRADNTYLYDSQNRKYLDLRSGLWNTSLGYIDSLYQRVSKRFDQVLNKKLPYLDIHSFQHDIYDEVAQKVLELTGHAFKRVLYTNSGSENTELALKIADYTNKKGENNRILAFKDSYHGTFFGGVSVSGIDQEINSSFYPKYGEVTFIDYPKSAEQEKNVLDYIANVASFYDVMMIEPILASAGIYFASTDFFNALLKLLRKNQVLIVFDEVATGFFKTGKPFYFQQLSEKPDILCLSKAINNGITSFGCVCVNEEVDAKLQKNPKTMEHFSTQNGNLLGLESANIVLDYYLKSRDVIKGKVKDISDSISNVLDSQNVFYRNQGIMTAIRTESNQSLQLMKSLEKLGILTYLYVNEEEEGLSIMPPININLNVLEKALKLISKKIESQNSF

SEQ ID NO: 4324 - protein, 477 aa, Streptomyces avermitilis MA-4680
MATAPSVSYSMTVRLEVPASGTAVSQLTTAVESHGGSVTGLDVTASGHEKLRIDVTIAATSTSHADEIVAQLRTIEGVTLGKVSDRTFLMHLGGKIEMQSKHPIRNRDDLSMIYTPGVARVCMAIAENPEDARRLTIKRNSVAVVTDGSAVLGLGNIGPKAALPVMEGKAALFKRFAGIDAWPLCLDTQDTDAIVEIVKAIAPGFAGINLEDISAPRCFEIEARLREALDIPVFHDDQHGTAIVVLAALTNALRVAGKAIGDIRVVMSGAGAAGTAILKLLIAAGVKNAVVADIHGVVHADREDLVNAAADSPLRWIADNTNPEGLTGTLKEAVRGADVFVGVSAPNVLDGDDVAAMAEDAIVFALANPDPEVEPAVARQTAAVVATGRSDFPNQINNVLVFPGVFRGLLDAQSRTVNTEMMLAAAAALADVVTEDELNPNYIIPSVFNEKVAGAVAGAVRTAAKAAGVTESDSKDA

SEQ ID NO: 4325 - protein, 476 aa, Methylobacillus flagellatus KT
MDGEYFDNISPVTGKVFCQVPRSNEKDINLALDAAHAAKEAWARTSGTGRANILLKIADVMEANLETIAIAETIDNGKPIRETMAADIPLAIDHFRYFASCIRTQEGGISEIDHETVAYHFHEPLGVVGQIIPWNFPILMAAWKLAPALAAGNCIVMKPAEQTPASILVVMELIGDLLPPGVLNVVNGHGVEAGKALATSPRIAKIAFTGSTSVGRLIMQYASQNLIPVTLELGGKSPNIFFEDVMDKDDAYFDKALEGFTLFALNQGEICTCPSRALIQESIYEQFIERAIKRVKAIKQGSPLDKSTMIGAQASSEQVEIIMSYIKLGLEEGAQLLTGGNATKLPGDLSEGYYIEPTVFKGHNKMRIFQEEIFGPVLSVTTFKDEKEALEIANDTMYGLGAGLWTRDGSRAYRVGRGIQAGRVWTNCYHLYPAHAAFGGYKQSGIGRENHRMMLDHYQQTKNLLVSYSPNALGFF

SEQ ID NO: 4326 - protein, 172 aa, Arabidopsis thaliana
MAAAFASRLTRGGRSLLGGLNNVGSMNSSNGMMNESILSQQQRRTFIQMGTVLKVVDNSGAKKVMCIQALKGKKGARLGDTIVASVKEAMPNGKVKKGAVVYGVVVRAAMQRGRVDGSEVRFDDNAVVLVDSKDKNTKTDRQPIGTRVFGPVPHELRKKKHLKILALAQHVA

SEQ ID NO: 4327 - protein, 261 aa, ASPERGILLUS NIDULANS FGSC A4
MGHEDAVYLAKLAEQAERYEEMVENMKVVAASDVELTVEERNLLSVAYKNVIGARRASWRIVTSIEQKEESKGNESQVALIKEYRQKIEGELAKICQDILDVLDQHLIKSAQSGESKVFYHKMKGDYHRYLAEFAVGDNRKAAADASLEAYKSATEVAQTDLAPTHPIRLGLALNFSVFYYEILNSPDQACHLAKLAFDDAIAELDTLSEESYKDSTLIMQLLRDNLTLWTSSEAEPAAENAPAEKKEEAPAAEGEEKPAE

SEQ ID NO: 4328 - protein, 117 aa, Glycine max
FCWLICIIVEFINLVSSESNEVCNKEERRTIAPEHVLKALGVLGFGEYIEEVYAAYEQHKLETMQDSLKGAKWSNRAEMTEEEALAEQQRMFAEARARMNGGAITSKQPDAHQSLES

SEQ ID NO: 4329 - protein, 154 aa, Nostoc punctiforme PCC 73102
MEIRSPAFFIGNTIPFKYTCDGDNISPPIYWEAAPQETKSFALIVDDIDAPNETFIHWVIYNIPADIRELPEGVAKQPKLPEGALQGKNNFGELGYGGPCPPKNGAHRYFFTIYALDQMLDLAAGANKQQLLAAIKNHILDKAELMGRYAREIE

SEQ ID NO: 4330 - protein, 499 aa, Ralstonia eutropha JMP134
MDTRTELLSAATRAFLQRPKRMLIDGQWCAATDGAVFTTEDPASETTLAEVPAAGPADVDAAVQAARAAFEQGPWNAMRPSDRERLLLRLADLVEANAEELAQIEALDNGKPATMARAIDVAGAAGFLRYMAGWATKLHGESLDVSVPLVREREFVAFTRQEAVGVVGAIIPWNFPLLMAAWKLGPALACGCTVVLKPAEETPLSALRLGELVMEAGYPAGVVNIVTGDGARCGAALAGHPQVDKIAFTGSTEVGKLVGGAAMERLARVTLELGGKSPVIMLDDMSPEAAATGAAQAIFFNQGQVCTAGSRLYLPRSKFDATVQALADIANSLRLGPGLEPDTGMGPLVSRRQHKRVAGYVQAGVDAGAQLICGGNADLPRGHFFKPTVLARAPETSSVVQEEIFGPVVVALPYDDIDEVVGRANGTPFGLAASVWSNDLSRVHRLVPRIKAGTVWVNCHNLLDNAMPFGGFKQSGLGREMGRAVFDHYTETKSVMIAV

SEQ ID NO: 4331 - protein, 325 aa, Emericella nidulans
MSSGKTFKLSNGVTIPAVGFGTFASEGASGETYRAVKKALEVGYRHLDCAWFYQNEDEVGDAVRDFLKENPSVKREDIFICTKVWNHLHRPEDVRWSIEDSLKKLKTDYVDLFLIHWPIAAEKESQDKPKIGPDGKYVILKDLTEDPKPTWQAMEKLYEDKLARSIGVSNWTIEGLEKLLKYAKVKPHVNQIEIHPFLPNEELIQYCWKNDILPEAYSPLGSQNQVPTTGERVSENKTLNEIAQKGGNTLAQVLIAWGLRRGYVVLPKSSNPARIESNFKTIELSDEDYEAVNAVAKGRHFRFVNMKDTFGYDVWPEETAKNISA

SEQ ID NO: 4332 - protein, 240 aa, Triticum aestivum
  unsure (1)..(240): unsure at all Xaa locations
MGERVKGTVKWFNVTKGFGFISPDDGGEDLFVHQSAIKADGYRSLNENDAVEFEVITGDDGXRTKAADVTAPGGGALAGGSRPGDGGGDRGGRGGGGGGGGGYGGGGGGYGGGGGAYGGGGGGYGGGGGGYGGGGYGGGGGGGRGCYKCGEEGHISRDCPQGGGGGYGGGGYGGGGGGGGGRECYKCGEEGHISRDCPQGGGGGGGYGGGGGRGGGGRGGGCFSCGESGHFSRECPNKAH

SEQ ID NO: 4333 - protein, 433 aa, Saccharomyces cerevisiae
MQSMNVQPRVLAVGGEQFFSQRQASEQHQQQNMGPQVYSPKVNRARMFPQGMPVNTINGSVNQEMNNAYLLKQKNEPLLTQQQQQQQQQQQPFNIGTPVSVASLPPGLNVLQQQQQQQQQQQQQQQGVGLNRPLASQLPKHLTNQSMPPIFLPPPNYLFVRDVWKSNLYSEFAVIRQLVSQYNHVSISTEFVGTLARPIGTFRSKVDYHYQTMRANVDFLNPIQLGLSLSDANGNKPDNGPSTWQFNFEFDPKKEIMSTESLELLRKSGINFEKHENLGIDVFEFSQLLMDSGLMMDDSVTWITYHAAYDLGFLINILMNDSMPNNKEDFEWWVHQYMPNFYDLNLVYKIIQEFKNPQLQQSSQQQQQQQYSLTTLADELGLPRFSIFTTTGGQSLLMLLSFCQLSKLSMHKFPNGTDFAKYQGVIYGIDGDQ

SEQ ID NO: 4334 - protein, 127 aa, Triticum aestivum
MEAPAAAAAAVSTLSALAVFVSTVDRGAVRSAHGYRVAGKGGGCGWERWVEREFAFTPTSAREVPLPADALRLLPADWRGRPAYREGQIAGPWRCILAFDFVAAVAPPPVPPPVLCPFRNPRLMCVP

SEQ ID NO: 4335 - protein, 368 aa, Oceanobacillus iheyensis HTE831
MKTDEKFVPGLDGVIASETAISFLDVEKEKIIINGHDLIELSLKQDYLDILYLLLEGDLPKKVEITKTEKLLKDHYEVPQAVLDILKLLPKETHPMDGMRTALSVLAGYDKNIEDRSASANKDRAYQLLGQLPTITVNSYRILNNQEVVQPATELSYSANFLYMITGKEPSDLQVEIFDRLLLLYSEHEMPNSTFTARVISSTNSDMYGALTGAISSLKGNLHGGANEAVMYMLNEVETADEFEQLLYKKLENKEKIMGFGHRVYMKKMDPRALITKEALKKLCEKDNDYTLLEMCEAGEEVMKKEKGLYPNLDYYAAPVYWKLGIPISLYTPIFFSARTAGLAAHIVEQHSNNRIFRPRVKYIGKDY

SEQ ID NO: 4336 - protein, 364 aa, Aminobacter sp. IMB-1
MATYHLKIVGKRDEGNDAASLWLEVPQDLRGAFSYRPGQFLTVERDGDGGRIARQYSLSSTPEAHRDLRITVKKIDGGAVSPWLVQDVGEGQALEVQPPRGRFFRGFDEPRHVLMLACGSGIAPILSIARHLLAQDAGHRVTIIYGNRTPDAVILGDEVGALAESHPTACHVEQVMSRAGESWHGARGRIDKTFIETRWKDWQAASHGLSTSIFLCGPQEFMDDAERAFVDLGLALADIHRESFDLVLNDDDGEPGLTLVGVNDPGESGPCERIVAVVGGEEYETVPEEGESILAALIRAEADVPFSCQEGTCASCISKLTEGSASVRPGVLQTLRQDDLDEGLTLACLSRPTTRSVRIDFDEI

SEQ ID NO: 4337 - protein, 355 aa, male-killing Rickettsia from Adalia bipunctata
GFMSTASCRSTITYIDGDKGILRYRGYDIKDLAEKSDFLEVAYLLIYGELPSSEQYNNFTKKVAVHSLVNERLHYLFQTFCSSSHPMAIMLAAVGSLSAFYPDLLNFKEADYELTAIRMIAKIPTIAAMSYKYSIGQPFIYPDNALDFTENFLHMMFATPCEKYKVNPIIKNALNKIFILHADHEQNASTSTVRIAGSSGANPFACVSTGIASLWGPAHGGANEAVINMLKEIGSSENIPKYIAKAKDKNDPFRLMGFGHRVYKNYDLRAAVLKETCKEVLKELGQLDGNPLLQIAIELEAIALKDEYFIERKLYPNVDFYSGIIYKAMGIPSQMFTVLFAIARTVGWMAQWKEM

SEQ ID NO: 4338 - protein, 234 aa, Methanosarcina acetivorans C2A
MTERNTSTDSPEKRAAGIAAAGLVSSGMLVGLGTGSTVAYTIKELGRRVREEGLDILGVVTSYQSEMLAIEAGIRLTTLAQHPELDLAIDGADQIDSELRAIKGGGAAHTREKIVSVSARRFVVVADESKTSKQLDKLVPVEVLPFAKEPVVKKIRELGGKPQLRSAVKKDGPVITDNGNFVLDVEFGVIKDPEALALQLSSIPGVVEHGIFCNVSELYIGNKDGAIKIITRQK

SEQ ID NO: 4339 - protein, 72 aa, Zea mays
MADGPFCPFLEILFAIILPPLGVFLRFGCCRIKFCICLLLPILGYVPGIIYAIYVLVALDSGQPEREYSPPA

SEQ ID NO: 4340 - protein, 247 aa, Prunus dulcis
  unsure (1)..(247): unsure at all Xaa locations
RIENKINRQVTFAKRRNGLLKKAYELSVLCEAEVALIIFSNRGKLYEFCSSSSMLKTLERYQKCNYGAPETNVSAREALELSSQQEYLKLKARYEALQRNQRNLLGEDLGPLSSKELESLERQLDMSLKQIRSTRTQCMLDQLTDLQRKEHMLNEANKTLKQRLFEGYHVNSLQMNPNADEYGRQQTQAHGDGFFHPLDCEPTLQIGYQNDPISVVTAGXSVSNYMAXMVAMIIXKCVLESTXSHEW

SEQ ID NO: 4341 - protein, 355 aa, male-killing Rickettsia from Adalia bipunctata
GFMSTASCRSTITYIDGDKGILRYRGYDIKDLAEKSDFLEVAYLLIYGELPSSEQYNNFTKKVAVHSLVNERLHYLFQTFCSSSHPMAIMLAAVGSLSAFYPDLLNFKEADYELTAIRMIAKIPTIAAMSYKYSIGQPFIYPDNALDFTENFLHMMFATPCEKYKVNPIIKNALNKIFILHADHEQNASTSTVRIAGSSGANPFACVSTGIASLWGPAHGGANEAVINMLKEIGSSENIPQYIAKAKDKNDPFRLMGFGHRVYKNYDLRAAVLKETCKDVLKELGQLDGNPLLQIAIELEAIALKDEYFIERKLYPNVDFYSGIIYKAMGIPSQMFTVLFAIARTVGWMAQWKEM

SEQ ID NO: 4342 - protein, 136 aa, Glycine max
  unsure (1)..(136): unsure at all Xaa locations
MSTKKIVLKSSDGESFEVDEAVALESQTIAHMVEDDCVDNGVPLPNVTSKILAKVIEYCKKHVDAAASKSEAVDGGGSSDDDLKAWDAEFMKIDQATLFELILAANYLNIKNLLDLTCQTVADMIXGKTPEEIRTT

SEQ ID NO: 4343 - protein, 194 aa, Zea mays
  unsure (1)..(194): unsure at all Xaa locations
SGRGGLWRVPPASAFRATTKPGISVRAYMARIARFAGCSPACYVGAYVYLDRLLRRARLLALAVDSYSVHRLLITAVLAAXVKFMDDICYNNAYFAKVGGISLVEMNYLEVDFLFGIAFDLNVTPAAFASYCAVLQSEMAYLDDAPAPAPVVEAPPRLHYCYGAAGTSDRHDDPAAVAAAAACHRHSSQPQLTV

SEQ ID NO: 4344 - protein, 447 aa, Corynebacterium glutamicum ATCC 13032
MVDSNTQYPETGALAPAPADSLLISNVLVYGEGEPTNVFVKDGVIAAIGGTHEADRTIDGNGGVLLPGFVDMHVHLREPGREDTETIATGSAAAAKGGFTAVFTMANTTPVMDQPVIAESVWFKGQNIGLCDVHPVGSITKGLEGKELTEFGMMARSEAKVRMFSDDGKCVDDPQVMRRALEYAKGMDVLIAQHAEDHRLTEGASAHEGENAARLGLRGWPRVAEESIVVRDAIMARDYGNRVHICHASTEGTVELLRWAKSQGIPITAEVTPHHLTLTDERLETYDAVNKVNPPLRESRDAEALKKALLDGTIDVVATDHAPHGSEDKCCEFENAKPGMLGLETSLSIIVDTFVATGLADWRFVARVMSERPAEITRLPGQGRPIAEGEPANLAIVDPGKTWTASGADFASKAENTPFEGQEFSAKVTHTVLRGKVTCADGVAQNA

SEQ ID NO: 4345 - protein, 321 aa, Schizosaccharomyces pombe
MSAEQKYFENAQNVHFTLADGSKIPGLGLGTWRSEPNQTKNAVKTALQYGYRHIDAAAIYGNEDEVGDGIKESGVPRKDIWVTSKLWCNAHAPEAVPKALEKTLKDLKLDYLDEYLIHWPVSFKTGEDKFPKDKDGNLIYEKNPIEETWKAMEKLLETGKVRHIGLSNFNDTNLERILKVAKVKPAVHQMELHPFLPQTEFVEKHKKLGIHVTAYSPFGNQNTIYESKIPKLIEHETIQKIAKSKGEGVTGATIAVSWAITRGTSVIPKSVNEQRIKSNFKYIPLTKEDMDEINSIGIRARFNQATFSNEPVFAGLEDGRT

SEQ ID NO: 4346 - protein, 250 aa, Hordeum vulgare subsp. vulgare
MAKSYPVVSAEYLEAVEKARQKLRALIAEKNCSPLMLRLAWHSAGTFDVSSKTGGPFGTMKKPAEQAHAANAGLDIAVRMLEPIKEEIPTISYADLYQLAGVVAVEVSGGPVIPFHPGREDKPQPPPEGRLPDATKGSDHLRQVFGKQMGLSDQDIVALSGGHTLGRCHKERSGFEGPWTRNPLKFDNSYFTELLSGDKEGLLQLPSDKTLLTDPVFRPLVEKYAADEKAFFEDYKEAHLRLSELGYAEA

SEQ ID NO: 4347 - protein, 355 aa, male-killing Rickettsia from Adalia decempunctata
GFMSTASCRSTITYIDGDKGILRYRGYDIKDLAEKSDFLEVAYLLIYGELPSSEQYNNFTKKVAVHSLVNERLHYLFQTFCSSSHPMAIMLAAVGSLSAFYPDLLNFKEADYELTAIRMIAKIPTIAAMSYKYSIGQPFIYPDNSLDFTENFLHMMFATPCEKYKVNPIIKNALNKIFILHADHEQNASTSTVRIAGSSGANPFACVSTGIASLWGPAHGGANEAVINMLKEIGSSENIPKYIAKAKDKNDPFRLMGFGHRVYKNYDLRAAVLKETCKEVLKELGQLDGNPLLQIAIELEAIALKDEYFIERKLYPNVDFYSGIIYKAMGIPSQMFTVLFAIARTVGWMAQWKEM

SEQ ID NO: 4348 - protein, 505 aa, Candida maltosa
MAIFTPELWLICFAVTVYIFDYIYTKYLMYKLGAKPITHVIDDGFFGFRLPFLITLANNQGRLIEFSVKRFLSSPHQTFMNRAFGIPIILTRDPVNIKAMLAVQFDEFSLGLRYNQFEPLLGNGIFTSDGEPWKHSRIMLRPQFIKSQVSHVNRLEPHFNLLQKNITAQTDNYFDIQTLFFRFTLDTATEFLFGQSVHSLNDGENSLQFLEAFTKSQAILATRANLHELYFLADGIKFRQYNKMVQDFSQRCVDKVLNMSNSEIDKLDRYFFLYEMVKITRNPQVLRDQCLNILLAGRDTTASLLSFAFFELALNEPIWIKLRTEVLHVFQTSLELITFDLLKTKCPYLQAILHETLRLYPSVPRNARFSKKNTTLPHGGGVDGMSPILIKKGQPVAYFICATHVDEKFYTKDALIFRPERWCEEPLIKKNLAWSYLPFNGGPRICLGQQFALTEASYVLTRLAQCYTKISLQPNSFEYPPKKQVHLTMSLLDGVHVKISNLSIS

SEQ ID NO: 4349 - protein, 510 aa, Candida maltosa
MIDALYILIVALVIYKTAQFVHRKSLEKKHHCQPVKQIPLVSILSGLGFDMFFKDTAEMTKNGGLHKKLQQMLESLQTTTFRSRMLTGSQIVTMEPENERTMCSSAHMKDWTIGYRPFALKPLLGDGIFSSEGESWKHSRIMLRPIFAKEHIKQITAMEPYMLLLIEIIKSSSANEGPVDLQPLFHAFTIDYASDFLFGESCDVLKENLGGKSTSGMDAQVKRDFASVFNDVQNYLTKRMMLGPLAFLVSSKDFHDGIKKQHEFVSYFVQKAISMSDEELNDESKNYVFLYQLAKQTKDAKVLQDELLSILLAGRNTTASLLSFLFFELSHHENVWTTLKEVVDQSFPDVESITFETIQNCDYLRWCLFESLRVNPSVPFNSRTANKDTILPRGGGEDCSHPILVKKGDQVLFPLYASNRQEKYFGRKPEEFIPERWRDLPKTGGPAFMPFSTGPRMCLGQQFALIEASYVTIRLVQTFSKLKSHSLEYAPKRLVAATIRLIDGCFVSFE

SEQ ID NO: 4350 - protein, 256 aa, Oryza sativa (japonica cultivar-group)
MEAKRGKIIPAAQVTNFIRRNNVGFGTSIGRKGAPHTIPHGLHGLGRSSNLTLAREGLVGGWHVALRPNLPKPVAKTMEQERREAKSRTSALPGQRRLRRRVQGEDYLPKEDDFAMASSPLRGPRKPFRPIKPRGYRAGDRQTAHQGPMSPYNIMYPCKCPFLVILTTTVLPSVTLLPRILFIHPTTVMFHMNRTNYQLIDISEDGLFVSLLTESGNTKDDLGLPTETISWGRSRLDLVKARKEEEIYALKDIGTK

SEQ ID NO: 4351 - protein, 289 aa, Bifidobacterium longum DJO10A
MTNGHINPANVPDIALKDGHSIPQVGLGVLRIDDEGVVPVVESALEAGYRHIDGAAGYNNEAGVGRALAASGYNKGTKRETLWVTTKLRDSQQGYDSALKAFDNSLKLLQLDYVDMYMIHWPTPFDWRSTDTWKAFVKLRDEGMARTLGVCNFMPADLKRLHEETGAWPAVNQIELHPTWQQREVVAFCKEHGIAVEAYSPMARGADLNAGDGTIEKIAAAHEVSPAQVILRWHIENGTIIIPKSVHADRQKENLNLFGFALTADEHAAIDALDGPTRAGHDPLTFTYA

SEQ ID NO: 4352 - protein, 327 aa, Trichoderma atroviride
MATDTSQKTLSSTTYTLNTGAKIPAVGFGTFANEGAKGETYAAVTKALDVGYRHLDCAWFYLNEDEVGDAIRDFLARRPDVTRKDLFICTKVWNHLHEPEDVKWSAKNSCENLKVDYIDLFLVHWPIAAEKNADRTVKIGPDGKYVINKALTENPEPTWRAMEELVDSGIVKAIGVSNWTIPGLKQLLEFARIKPAVNQIEIHPFLPNTELVEFCFQNDILPEAYSPLGSQNQVPTTGERVRDNPTLNAVADRRGSSLAQVLLAWGLKRGYVVLPKSSTPSRIESNFIIPELSEEDFAAIQKVAEGRHVRFVNMKDTFGYDVWPEDK

SEQ ID NO: 4353 - protein, 178 aa, Glycine max
MASSMISSPAVTTVNRAGAGMVAPFTGLKSMAGFPTRKTNNDTISIASNGGRVQCMQVWPPVGKKKFETLSYLPDLDDAQLAKEVEYLLRKGWIPCLEFELEHGFVYREHNRSPGYYDGRYWTMWKLPMFGCTDASQVLKELQEAKTAYPNGFIRIIGFDNVRQVQCISFIAYKPPGF

SEQ ID NO: 4354 - protein, 144 aa, Triticum aestivum
NKFVQKSRLVPVRNSRDIVDPRVRDWSTRTLTWTEGVENIILSVLPSPTQPPDQSKREISPDSIRSDPRSPSPMASRSCTFLEILLAIILPPLGVFLHYGCCSMEFCICLLLTILGYIPGIIYAVYVLVALGSEERDRDYDTLA

SEQ ID NO: 4355 - protein, 113 aa, Rickettsia typhi
ANEAVINMLKEIGSSENIPKYVAKAKDKNDPFRLMGFGHRVYKSYDPRAAVLKETCKEVLNELGQLENNPLLQIAIELEALALKDEYFIERKLYPNVDSYSGIIYKAMGIPSQ

SEQ ID NO: 4356 - protein, 429 aa, Arabidopsis thaliana
MESLPQPQNQSSPATTPAKILLGKYELGRRLGSGSFAKVHLARSIESDELVAVKIIEKKKTIESGMEPRIIREIDAMRRLRHHPNILKIHEVMATKSKIYLVMELASGGELFSKVLRRGRLPESTARRYFQQLASALRFSHQDGVAHRDVKPQNLLLDEQGNLKVSDFGLSALPEHLQNGLLHTACGTPAYTAPEVISRRGYDGAKADAWSCGVILFVLLVGDAPFDDSNIAAMYRKIHRRDYRFPSWISKQAKSIIYQMLDPNPVTRMSIETVMKTNWFKKSLETSEFHRNVFDSEVEMKSSVNSITAFDLISLSSGLDLSGLFEAKKKKERRFPAKVSGVEVEEKAKMIGEKLGYVVKKKMMKKEGEVKVVGLGRGRTVIVVEAVELTVDVVVVEVKVVEGEEDDSRWSDLITELEDIVLSWHNDIM

SEQ ID NO: 4357 - protein, 420 aa, Listeria monocytogenes str. 4b F2365
MSQKIQVENGVLKTPNNPVIPFIEGDGTGPDIWAAAKRVLDAAVKKAYNGEKEIAWKEVLAGEKAFKQTGEWLPQATLDTIDEYLIAIKGPLTTPIGGGIRSLNVALRQELDLYVCLRPVRYFKGVPSPVKRPEDTDMVIFRENTEDIYAGIEFKEGSEESKKLIDFLKSEFGVDKIRFPETSGIGIKPISKEGTERLVRSAIEYAIKEGRKSLTLVHKGNIMKFTEGAFKNWGYDLCEREYGDKVFTWNEYDRIKEAEGTEVADAKQKEALAAGKILVKDSIADIFLQQILTRPAEFDVVATMNLNGDYISDALAAQVGGIGIAPGANINYLTGHAIFEATHGTAPKYAGLDKVNPSSVILSGTLLLEHIGWGEAAALINQSMEKTIAAKTVTYDFARLMDGATEVKCSEFADELIKNF

SEQ ID NO: 4358 - protein, 178 aa, Glycine max
  unsure (1)..(178): unsure at all Xaa locations
MASSMISSPAVTTVNRAGAGMVAPFTGLKSMAGFPTRKTNNDITSIASNGGRVQCMQVWPPVGKKKFETLSYLPDLDDAQLAKEVEYLLRKGWIPCLEFELEHGFVYREHNRSPGYYDGRYWTMWKLPMFGCTDASQVLKELQEAKTAYPNGFIRIIGFDNVRQVQCISFIAYKPPGX

SEQ ID NO: 4359 - protein, 373 aa, Listeria monocytogenes str. 4b F2365
MTLSKGLENVYVAETSISSIIDDMLTYVGYGIDDLMENNASFEEVIYLLWHLRLPNKDEFKKFKREIQENMAVSETIITSLRMQNHQKLHPMSVLRTTVSMLGVFDTEAELDDGEAVYRKGLRLQAKMPTIVAAFSRIRRGLDPIPPREDLNMAANFLYMITGEEADALSVEAMNKALVLHADHEFNASTFTARVCVATLSDVYSGVTAAIGALKGPLHGGANERVFDMLEEIDQAGDVRNYIQEKIDTKQKIMGFGHRVYRGGDPRAQHLREMSRKLTAEKGEEKWFDISLQVEESVWELKHLKPNVDFYSASVYHALGIDRDLFTLVFSVSRVSGWLAHIFEQYRDNRLIRPRAIYVGPENRSYLPVEERI

SEQ ID NO: 4360 - protein, 312 aa, Saccharomyces cerevisiae
MPATLHDSTKILSLNTGAQIPQIGLGTWQSKENDAYKAVLTALKDGYRHIDTAAIYRNEDQVGQAIKDSGVPREEIFVTTKLWCTQHHEPEVALDQSLKRLGLDYVDLYLMHWPARLDPAYIKNEDILSVPTKKDGSRAVDITNWNFIKTWELMQELPKTGKTKAVGVSNFSINNLKDLLASQGNKLTPAANQVEIHPLLPQDELINFCKSKGIVVEAYSPLGSTDAPLLKEPVILEIAKKNNVQPGHVVISWHVQRGYVVLPKSVNPDRIKTNRKIFTLSTEDFEAINNISKEKGEKRVVHPNWSPFEVFK

SEQ ID NO: 4361 - protein, 153 aa, Methylococcus capsulatus str. Bath
MKRLILCLCGMLAISAAEAMEIRQFDDPAKEERYETLIKDLRCLVCQNQSLAESDAELAKDLRTEVYNIIQSGKSSEEAVRFLTERYGDFVLYRPPFKRITLLLWLGPFLLLAGGAVFLWKQARRRAAAAQQDATLSAEERRRLQQLKDRFQG

SEQ ID NO: 4362 - protein, 98 aa, Glycine max
  unsure (1)..(98): unsure at all Xaa locations
TRAESPLFAPFTVLKTMAGLPTIKTTNYITSIANNGGRVQCMQVCPPVGKKKFDTLSYLPNLDDAQLAKEVQYLLRKGWIPCXEIRXDHGLEYREHNR

SEQ ID NO: 4363 - protein, 813 aa, Zea mays
  unsure (1)..(813): unsure at all Xaa locations
MAQILLHGTLHATIFEAESLSNPHRATGGAPKFIRKLVEGIEDTVGVGKGATKIYATVDLEKARVGRTRMISNEPVNPRWYESFHIYCAHMAADVIFTVKIDNSIGASLIGRAYLAVQDLLGGEEIDKWLEISDENREPVGDSKIHVKLQYFDVGKDRNWARGVRSTKYPGVPYTFFSQRQGCKVTLYQDAHVPDNFVPRIQLADGKNYEPHRCWEDIFDAISKAQHLIYITGWSVYTEITLVRDTNRPKPGGDVTLGELLKRKASEGVRVLMLVWDDRTSVGLLKKDGLMATHDEETANYFHGTDVNCVLCPRNPDDSGSFVQDLQISTMFTHHQKIVVVDHEMPNQGSQQRRIVSFIGGIDLCDGRYDTQYHSLFRTLDTVHHDDFHQPNFEGGSIKKGGPREPWHDIHSRLEGPIAXWDVLYNFEQRWRKQGGKDLLVRLRDLPDIIIPPSPVMFPEDRETWNVQLFRSIDGGAAFGFPETPEEAARAGLVSGKDQIIDRSIQDAYVNAIRRAKNFIYIENQYFLGSSYGWKPEGIKPEEIGALHLIPKELSLKIVSKIEAGERFTVYVVVPMWPEGVPESASVQAILDWQRRTMEMMYTDIAQALEANGIEANPKDYLTFFCLGNREVKQEGEYEPEEHPEPDTDYIRAQEARRFMIYVHTKMMIVDDEYIIIGSANINQRSMDGARDSEIAMGAYQPYHLATRQPARGQIHGFRMSLWYEHLGMLEDVFQRPESVECVQKVNEVAEKYWDLYSSDDLEQDLPGHLLSYPIGVTADGSVTELPGMENFPDTRARVLGNKSDYLPPILTT

SEQ ID NO: 4364 - protein, 393 aa, GIBBERELLA ZEAE PH-1
MATRTIEARFERMSVNDENDPIGDGSKLYSKSKVQTISSTSSHGANRPNLFKVALQSQSSNANAAVMLPSQAAQRKVNNPPPSPTRKALPSSSRTSDEVSEDRKSVTLPEQMSVPKQFHLGMFEIGRPLGKGKFGRVYLARERTTGFICALKVLHKNELQAGRVEKQVRREIEIQSNLRHPNILQLYGHFHDSKRVFLILEFAGKGELYKHLRKENRFPEWKAAQYIAQMASALRYLHRKHVIHRDIKPENILVGIHGEIKISDFGWSVHAPNNRRKTMCGTLDYLPPEMIKPGTSDNFYNEKVDLWSLGVLTYEFLVGEAPFEDTPVMTQRRIARADMSIPTWVSPEATDLIKKLLVLDPEKRIPLEQIQQHPWIIKHCVKGERASNREKGL

SEQ ID NO: 4365 - protein, 424 aa, Exiguobacterium sp. 255-15
MATIQGENITVTDGTLNVPNSPIIPFIIGDGTGPDIWNAAVRVFDAAVEKAYNGEKKIEWKEVYAGEKAFNKTGNWLPEETLDLIREHIIAIKGPLTTPVGGGIRSLNVALRQELDLYTCLRPVRYFTGVPSPVKRPEDTDMVIFRENTEDIYAGIEYASGSEEAQKLLNFLQTEMGVNKIRFPETSGLGIKPISKEGTERLVRAAIEYALENKRASLTLVHKGNIMKFTEGAFKNWGYELAEREYAEHVFTWNQYDRIKDEEGADAANKAQSEAEAAGKLIVKDSIADIFLQQILTRPKEFDVVATMNLNGDYISDALAAQVGGIGIAPGANINYMTGHAIFEATHGTAPKYAGLDKVNPSSVILSGEMMFRHLGWNEVADLIIQSMEKSIEGKVVTYDFARLMDGATEVKCSEFADELIKNM

SEQ ID NO: 4366 - protein, 105 aa, Crocosphaera watsonii WH 8501
MIQQQTYLNVADNSGARKLMCLRVLGTGNCTYGKIGDKIIAVVKDALPNMPVKRSEIVTAVIVRTRQPVNRASGMTIRFDDNAAVIINADGNPRGTRVFGPVARD

SEQ ID NO: 4367 - protein, 114 aa, Lycopersicon pennellii
MEMVSKIACFVLLCMVVVAPHAEALTCGQVTAGLAPCLPYLQGRGPLGGCCGGVKGLLGSAKTTADRKTACTCLKSAANAIKGIDLNKAAGIPSVCKVNIPYKISPSTDCSTVQ

SEQ ID NO: 4368 - protein, 146 aa, Brassica napus
  unsure (1)..(146): unsure at all Xaa locations
MAYSMLSSAAVVTSPAQATMVAPFTGLKSSSAFPVTRKANNDITSIVSNGXGRVSXALQVWPPIGKXKKFETLSYLPDPYRKXMGVREVDYLLRNKWDFLCVEXFELEQRDFVYRXEHGSTPELLTMGRYWTNGESFPLVRMHCSG

SEQ ID NO: 4369 - protein, 114 aa, Lycopersicon pennellii
MEMVNKIACFVLLCMVVVAPHAEALTCGQVTSTLAPCLPYLMNRGPLGGCCGGVKGLLGQAQTTVDRQTACTCLKSAASSFTGLDLGKAASLPSTCSVNIPYKISPSTDCSKVQ

SEQ ID NO: 4370 - protein, 473 aa, Arabidopsis thaliana
MSSSVPNSDRKIVTGPAGYILEDVPHFSDDFPDHPTYPNPLQDNAAYSVVKQYFVDEDDTVPQKIVVHPDSPRGTHFRRAGPRQRVYFESDDVLACIVTCGGLCPGLNTVIREIVCGLSYMYGVKRILGIDGGYRGFYARNTIHLDLKTVNDIHRSGGTILGTSRGGHNTTKIVDSIQDRGINQVYIIGGDGSQKGAAAIFEEIRKRKLKVAVAGIPKTIDNDIPIIDRSFGFDTAVEEAQRAINAAHVEATSFENGIGLVKLMGRYSGFIAMHATLASRDVDCCLIPESPFFLEGSGGLFEFIDKRLKESGHMVIVIAEGAGQDLLSESMKESTTLKDASGNKLLQDIGLWISQRIKDHFAKKMTLTLKYIDPTYMIRAVPSNASDNVCCTLLAQSAVHGVMAGYNGFTVGLVNGRHTYIPFNRITEKQNKVVITDRMWARLLSSTNQPSFMKQADKIHSNQLVGEPGTMKW

SEQ ID NO: 4371 - protein, 397 aa, Clostridium acetobutylicum ATCC 824
MCGIAGFVNFKKNLIDKKSIIEDMTNTLIKRGPNEKGYYISKNALLGHRRLIVVDPKGGSQPMIKIHNGKKYIIVYNGELYNTEDIRKELLEAGYEFSSYSDTEVLLTSYIHWKEDCVNHINGIFAFAIYSETDKKIFLARDPLGVKPLFYTIKNNNLIFGSEIKTLLANPLVEPILTKEGLTEIFALGPARNLGSGVLKDIHEIPPANFIEFTEHKFKLHEYWRLSCKPHTENASETAEHIKFLLTDAIKRQLYADVPVCTFLSGGLDSSIISAVAASEFKKHGKTLNTYSIDYKDNNLYFKNDNFVITPDSVWAEKMRKFIGSNHHKIINNNLDLASALYDAVKANDIPGMADIDSSLFLFCKGVAEKNVVSLSGERAIQMITNLVKQFINIGEL

SEQ ID NO: 4372 - protein, 163 aa, Triticum aestivum
  unsure (1)..(163): unsure at all Xaa locations
MPSVEVEVQVGGAGGWRPKQQQKHRHHHHPLEIRQVWADNVDREFKLIRAAIERFPYVSMDTEFPGVIHHPPPAVHHSTLTAPQRYALLKSNVDALHLIKVGLXLAPSPGLPPALAFRLTPRLQPARERQAPDRRLLAATAHSPQRARGPLAALSAEPRPGTR

SEQ ID NO: 4373 - protein, 303 aa, Acinetobacter calcoaceticus
MKFGTVWKYYFTESLLKATIRTPSQLNLAPNALRPVLDQLCRLFPQNPTVQIRPIRLAGVRGEEIKAQASATQLIFHIHGGAFFLGSLNTHRALMTDLASRTQMQVIHVDYPLAPEHPYPEAIDAIFDVYQALLVQGIKPKDIIISGDSCGANLALALSLRLKQQPELMPSGLILMSPYLDLTLTSESLRFNQKHDALLSIEALQAGIKHYLTDDIQPGDPRVSPLFDDLDGLPPTLVQVGSKEILLDDSKRFREKAEQADVKVHFKLYTGMWNNFQMFNAWFPEAKQALADIAEFATSLDLD

SEQ ID NO: 4374 - protein, 486 aa, Pseudomonas stutzeri
MKEIKHFINGAFVDSASGRTFEDINPVNGQVIGRVHEAGRAEVDAAVRAARAALKGPWGKMTVAERAEILHRVADGVTARFDEFLEAECLDTGKPKSLASHIDIPRGAANFKVFADLIKNVPTEAFEMATPDGAGALNYGVRRPKGVIGVISPWNLPLLLMTWKVGPALACGNCVVVKPSEETPLTATLLGEVMQAAGVPAGVYNVVHGFGGDSAGAFLTEHPDVDAYTFTGETGTGETIMRAAAKGVRQVSLELGGKNAGIVFADCDLDKAIEGTLRSAFANCGQVCLGTERVYVERPIFDAFVARLKAGAEALKIGEPNDPEANFGPLISHKHREKVLSYYQQAVDDGATVVTGGGVPEMPAHLAGGAWVQPTIWTGLTDDSAVVTEEIFGPCCHIRPFDTEAEAIELANSLPYGLASAIWTENASRAHRVAGQIEAGIVWVNSWFLRDLRTAFGGSKQSGIGREGGVHSLEFYTELKNICVKL

SEQ ID NO: 4375 - protein, 450 aa, Agrobacterium tumefaciens str. C58
MTILPNSVEARDIAYQMHPNVNLRKFEKTGGLVIESGEGIYVTDSSGKRYIEAMAGLWSVALGFGEQRLVDAATKQMQKLPYYHTFSYKTHGPSVDLAELLIELSPVPMSKVHFTSSGSEANDLVAKMVWYRSNALGKKDKKKIIGRIKGYHGVTIASASITGLPRNHESFDLPLDRMLHTACPSYVHFGKDGESEAEFTARILGELEELILREGPETVAAFWGEPVMGAGGVLLPPEGYWEGVQAILKKYDILLVVDEVICGFGRTGKMFACETYDIKPDVLVVSKQISSSYMPLSAIIMNDSFYQPIADESDRIGSFGHGYTASGHPVATAVGLENLKIIQERDLVGNVARLEGKFLDHLKALADHPLIHSSRGIGLLGALEVKPWDGTKPGDTTLALAAAIESEGVITRPIGESICFCPPLIITAEQLDELFAGVKRGLDNALAARG

SEQ ID NO: 4376 - protein, 387 aa, Ralstonia solanacearum GMI1000
MSEADSSTPAGAFKPKKSVALSGVTAGNTALCTVGRTGNDLHYRGYDILDLAAACEFEEVAYLLVHGKLPNKAELTTYKARLKALRGLPANVKAALEWVPASAHPMDVMRTGVSVLGTVLPERDDHNLPGARDIADRLMASLGSMLLYWYHYSHNGRRIEVETDDDSIGGHFLHLLHGVEPSKSWVDAMHVSLNLYAEHEFNASTFTGRVIAGTGSDIYSAITGAIGALRGPKHGGANEVAFEIQKRYDTPDEAEADVRRRVEAKEVIIGFGHPVYTISDPRNKVIKEVARKLSKEAGNTRMFDIAERLETVMWDVKKMFPNLDWFSAVSYHMMGVPTAMFTPLFVISRTSGWAAHVIEQRIDNKIIRPSANYTGPEDLKFVPLGKR

SEQ ID NO: 4377 - protein, 71 aa, Triticum aestivum
  unsure (1)..(71): unsure at all Xaa locations
MAGTANCIDIILAIILPPLGVFLKFGCGHEFWICLLLTFLXGYIPGIIYAIYAITKVNQRQPAPECSRRNK

SEQ ID NO: 4378 - protein, 486 aa, Pseudomonas sp. ST41
MKEIKHFINGAFVYSADGRTFEDINPVNGQVIGRVHEAGRAEVDAAVKAARAALKGPWGKMTVAERAEILHRVADGITARFDEFLEAECLDTGKPKSLASHIDIPRGAANFKVFADLIKNVPTEAFEVATPDGAGALNYGVRRPKGVIGVISPWNLPLLLMTWKVGPALACGNCVVVKPSEETPLTATLLGEVMQAAGVPAGVYNVVHGFGGDSAGAFLTEHPDVDAYTFTGETGTGETIMRAAAKGVRQVSLELGGKNAGIVFADCDMDKAIEGTLRSAFANCGQVCLGTERVYVERPIFDAFVARLKAGAEALKIGEPNDPEANFGPLISHKHREKVLNYYQQAVDDGATVVTGGGVPDMSAHLAGGAWVQPTIWTGLADDSAVVTEEIFGPCCHIRPFDSEEEAIELANSLPYGLASAIWTENASRAHRVAGQIEAGIVWVNSWFLRDLRTAFGGSKQSGIGREGGVHSLEFYTELKNICVKL

SEQ ID NO: 4379 - protein, 139 aa, Arabidopsis lyrata subsp. petraea
STGKRSEREEDTDPQGSRGISDDEDGDNSRKKLRLSKDQSVILEETFKDHSTLNPKQKQALAKQLGLRARQVEVWFQNRRARTKLKQTEVDCEFLRRCCENLTEENRRLQKEVTELRALKLSPQFYMHMSPPTTLTMCP

SEQ ID NO: 4380 - protein, 74 aa, Triticum aestivum
  unsure (1)..(74): unsure at all Xaa locations
LXSSLXAXVXXXHLXXTXAAXRWGTKLQSFCVXLXGSPDLKAXXXXPNXLGTMXHXFTFTXXDGIDAIEDVIYH

SEQ ID NO: 4381 - protein, 294 aa, Staphylococcus aureus subsp. aureus Mu50
MVIQWYPGHMAKAKREVSEQLKKVDVVFELVDARIPYSSRNPMIDEVINQKPRVVILNKKDMSNLNEMSKWEQFFIDKGYYPVSVDAKHGKNLKKVEAAAIKATAEKFEREKAKGLKPRAIRAMIVGIPNVGKSTLINKLAKRSIAQTGNKPGVTKQQQWIKVSNALQLLDTPGILWPKFEDEEVGKKLSLTGAIKDSIVHLDEVAIYGLNFLIQNDLARLKSHYNIEVPEDAEIIAWFDAIGKKRGLIRRGNEIDYEAVIELIIYDIRNAKIGNYCFDIFKDMTEELANDANN

SEQ ID NO: 4382 - protein, 361 aa, Myxococcus xanthus
MRLGVLTGGGDCPGLNALIRGLVKRGTHEFGYEFVGIENGYMGLVEPGLAHPLTEEDTRGILPKGGTILGTSNKANPFSYATREDGHWVERDVSDQVLLRCEELGLDGLIAVGGDGTLSIAHRLVEKGLKVVGCPKTIDNDLSGTDQTFGFDTARLIVTEALDRLHSTAEAHDRVMVVEIMGRHAGFLTLESGIAGGADVILIPEIPYSVESVVEKIRRRSTRRRSFSIIAISEGAFPQGGELAVLDTAEAIPGRGVVRLGGSGKALADLLARHIEAEIRVTVLGHLQRGGSPSAADRVLATRYGCKVLDLVSAGQWDHMVALRAGEIIAVPLSESRKERRVDPAGELVRFTKSMGISFGD

SEQ ID NO: 4383 - protein, 124 aa, Zea mays
  unsure (1)..(124): unsure at all Xaa locations
MDNLSRLPDELLVRILSLVPTKVVVSTSILSKRWKFLWMSLPKLEFVDRDESLLVLKNFVNKNLPLHRAPVIQSFLLSLYESREKNIKPEDIRQWVEIAVSRHLXELDVSYSSDNKENMVPNSL

SEQ ID NO: 4384 - protein, 541 aa, Zea mays
MATANGSWVPRGRAGIHLSITTTSSFPRLPSALRVARGSMATANGSSKGSFEVPKVEVRFTKLFIDGKFVDAVSGKTFETRDPRTGEVIASIAEGGKADVDLAVKAAREAFDNGPWPRMTGYERGRILHRFADLIDEHVEELAALDTVDAGKLFAVGKARDIPGAAHLLRYYAGAADKVHGATLKMAQRMHGYTLKEPVGVVGHIVPWNYPTTMFFFKVGPALAAGCAVVVKPAEQTPLSALFYAHLAREAGVPAGVLNVVPGFGPTAGAAVAAHMDVDKVSFTGSTEVGRLVMRAAAESNLKPVSLELGGKSPVIVFDDADLDMAVNLVNFATYTNKGEICVAGTRIYVQEGIYDEFVKKAAELASKSVVGDPFNPSVSQGPQVDKDQYEKVLRYIDIGKREGATLVTGGKPCGDKGYYIEPTIFTDVKDDMTIAQDEIFGPVMALMKFKTVEEVIQKANNTRYGLAAGIVTKNIDVANTVSRSIRAGAIWINCYFAFDPDAPFGGYKMSGFGKDMGMDALDKYLQTKTVVTPLYNTPWL

SEQ ID NO: 4385 - protein, 189 aa, Zea mays
MSVSPSSLCGGDPAMRIVVWFRRDLRVEDNPALAAAARAGGEVVPAYVWSPEEEGPYYPGRVSRWWISQSLNHLDASLRRLGAGKLVTRRSADAAVALLQLVRDTGATHVYFNHLYDPISLVRDRRLKEMLAAEGIVVQSFNSDLLYEPWEVVDDEGQPFTMFDPFWNRCLSMPYDPPAPLMPPKRINS

SEQ ID NO: 4386 - protein, 351 aa, Vibrio parahaemolyticus RIMD 2210633
MFFEWQGNQPVTLRCIDKYFETHDTVSIKLAELTESLLFQFKPGQFINLGVEIDGKMEFRAYSISSINEDDHLQLTIKRVSGGKVSNYIVDSLLLGDTVQALPPAGEFNCIDHPPVLRDGETRALLISAGCGVTPVFSMAKHWLSNQDENDNDVDIAFLHIARSPEETIYYDQLETFDAVYPNFHLKLLLKNREGTSHPQGRLNADWLKELVPDFKQRTVYLCGPSQFMQDVHGYLNDLGFDMTNFYQESFTPATGAETSVSDEVVHVSVPDFAQTIDAQKGQVLADVLEGAGLPLIVACRSGICGSCKCKVRQGSVSSTSLETLTPEEIEQGYVLACSSTIEADLEVQIG

SEQ ID NO: 4387 - protein, 249 aa, Zea mays
MGKHGHGKCHDVEACYPPGAAGGGKYPYMTENPQLRWAFIRKVYVIVCLQLLLTVAVAATVNLVRAIGDFFLSRTMGAMFAIIGVIVAPILVMIPMIIYRKRHPVNLALLALFTVCISFAVGLSCLTANGPVILEAVVITMVVVLGLTFYTFWAAKRGYEFEFLGPFLVSACLILMLFSLLRIIFPLGRTGTMVYGCIAALVFSGFIIYDTDNLIRVYSYDEYVAAAIELYLDIINLFQAILAVLEGVD

SEQ ID NO: 4388 - protein, 362 aa, Arxula adeninivorans
MSKNIIILSGDHVGPEVTAEAIKVLEAITQARPNVKFNFDHKLIGGAAIDATGSPLPDETLEASKKADAVLLGAVGGPKWGTGAVRPEQGLLKIRKELNLYANLRPCNFMSEKLLDLSPLRSEIVKGTNFTVVRELVGGIYFGTRKEDEGNGEAWDTEKYTVEEVKRITRMAAFLALQSNPPLPVWSLDKANVLASSRLWRKTVTETIEKEFPQLTLNHQLIDSAAMILIQNPSKMNGVIVTSNMFGDIISDEASVIPGSLGLLPSASLSSLPDKNTAFGLYEPCHGSAPDLPPNKVNPIATILSAAMMLRLSLNLKEEADAVEKAVSKVIDNGIVTADLKGASSTTEVGDAVAAEVQKLLK

SEQ ID NO: 4389 - protein, 121 aa, Zea mays
  unsure (1)..(121): unsure at all Xaa locations
RFQAGPFEVEPIRVTHSIPDCCGLVLRCGDGIIFHTGDWKIDESPVDGKNFDRQALEELSKEGVTLMMSDSTNVLSPARSISXESVVAGSLLRHISEAKRRVIATQFASNIHRIGRIPAAA

SEQ ID NO: 4390 - protein, 175 aa, Triticum aestivum
  unsure (1)..(175): unsure at all Xaa locations
MAPAVMASSATTVAPFQGLKSTAGLPVSRRSGSAGLSSVSNGGRIRCMQVWPIEGIKKFETLSYLPPLSTEALLKQVDYLIRSKWVPCLEFSKVGFVFREHNSSPGYYDGRYWTMWKLPMFGCTDATQVLNEVEEVKKEYPDAYVRVIGFDNMRQVQCVSFIAFRPPGXEESGKA

SEQ ID NO: 4391 - protein, 170 aa, Zea mays
MAAFLRSKCSPVGRTLMGSLGNSLFGAANSSVGAITRPSHCDAISQQIRTFIQMRTNLKVVDNSGAKRVMCIQSLRGKKGARLGDMIIGSVKEAQPRGKVKKGDVVYGVVVRAAMKKGRSDGSEVQFDDNAVVLVNKKGELIGTRVFGPVPHELRKKKHLKILALAEHIV

SEQ ID NO: 4392 - protein, 487 aa, Sinorhizobium meliloti 1021
MQRFQCYINGEFADGEARFESIDPTTGRAWAEMPEAREADVNRAVEAARIALHDQPWSTLTATQRGKLLYKLADLVAENAGRLAELETRDTGKIIRETSSQIAYVADYYRYYAGIADKIEGSYLPIDKPDMDVWLRREPIGVVAMVVPWNSQLFLSAVKIGPALAAGCTMVVKASEDGPAPLLEFARLVHAAGFPAGVVNIVTGFGPSCGAALSRHPQVDHIAFTGGPETARHIVRNSAENLASTSLELGGKSPFIVFADADLESAANAQIAGIFAATGQSCVAGSRLIVEKSVKDRFLQILKAKAETIRIGSPLEMSTEVGPLATERQSNHVKTLVARSLAAGAKLVTGGTAPEGAGFYYRPTILDCDGSASPSLENEFFGPVLSVLSFETEAEALHLANDSRFGLAAGVFTQNLTRAHRLMKGIRAGIVWVNTYRAVSPVAPFGGFGLSGHGREGGLEAALDYTRSKTVWLRTSDDPIPDPFVMR

SEQ ID NO: 4393 - protein, 181 aa, Triticum aestivum
  unsure (1)..(181): unsure at all Xaa locations
MAGVGRNMVAPLLVLNLIMYLIVIGFASWNLNHFINGLTNRPGVGGNGATFYFLVFAILAGVVGAASKLAGVHHVRTWRGDSLATSASSSLVAXAVTALAFGLACKEIHIGGYRGWRLRVLEAFVIILVFTQLLYVLALHSGLFGNQFGGNHAGGYPAEHGAYGAGDPHNKGMGTGGVARV

SEQ ID NO: 4394 - protein, 174 aa, Methanosarcina acetivorans C2A
MATGPRYKVPFRRRREGRTNYHLRLKLLLSRQDRVVVRKSSRNVQIQLIAPTPDGDITYSSAVSNELAKYGYTGATGNTTAAYLTGLLFGLKSLQKGYEGGILDIGLQASSAGSRVYAALKGVVDSGFEIPCSPEVFPPDERIRGEHIAGYREESSDLPEQFEATKEKIFAEFS

SEQ ID NO: 4395 - protein, 133 aa, Glycine max
RISSHVVTTVNRAGAGLVVPLTGLKSMAGFPTGKTNIAIPSIVGTGGGVHCMQGGPPIGRKKFGTFSYWPDLVDAQLAKEVESFLRKGWIPCLEFGWEHGFGFRGPTSLPGSFDGPLWTMWKLPMLGCTDAFK

SEQ ID NO: 4396 - protein, 457 aa, Iris hollandica
MVGILVYVALFILSLLLFLTAAAKLHNSKSKIKNQAPSPPSLPVVGHLHLLKKPLHRSISLLSARHGPILLLRFGSRPALAVSSLPLAEECLSGKNDLAFANRAHFPHEAAPLQLLTLGSANYGPHWRMLRRISAVELLSSHRINSFSQLRSEEVHSMISTLFRESSDKELNRVELKSKLFELAMNNMMRMIFGKDLASSEGAGRFREMVKESHSLLGASTRLGDFFPFLGWMDWRARRMVLRLVRRRDEFLQSLIDAHARKMEEVEEKTMIRVLVELQKSNRESNNDEGFMLKPLIIGLLQAGTDTSSDTIEWAMSLLLNNRDKLKKARDEIDARVGKERLLRESDLPNLPYLQCVITETLRLYPAAPLLVPHESAEECTVGGYAVPQGTMLLVNAYAIRVVGIVLGTLIQCFEWERVGEEEVDMTEGSGLTLPRANPLEAICRPRQSMISVLAGL

SEQ ID NO: 4397 - protein, 178 aa, Glycine max
MAESDNDSGGAQNAGNSGNLSELSPREQDRFLPIANVSRIMKKALPANAKISKDAKETVQECVSEFISFITGEASDKCQREKRKTINGDDLLWAMTTLGFEEYVEPLKIYLQRFREMEGEKTVAARDSSKDSASASSYLEPLEPQGHVYGSAYHHQVPGGAIMGGSAYPGGGSNARPR

SEQ ID NO: 4398 - protein, 428 aa, Gloeobacter violaceus PCC 7421
MENRFLNIFPGLSEERAIELLYTPMAQLEDASERYIAAAHLVNFPSERAIDALLAAVENRDSALDNRIVRRKAVETLGRLKVERALPVIRASLQDEDNYLVENAAWAIGEIGCSDPEILEELTALLARPRQSYRTIIQTLAKLGYTPATGRIAAFEQSPEPPIASAAITAVGRLSGERAGLERLLPFLQHPNVNARRGVIQDLMDSEYFEAIPRIAACPVSAVFRLRGIRHLADAGVPIGAVSFQQVESGLDRVIVDHPRFLEPVHRYERTPHLEELIEELYSTDFGRCYLATQTIIDHYPDAGPALVASFEAAGHNDYGAHYHIVKLLGWLRFGEAREIVVGALHDRRPQFMKSRSAAAIALAELGDTRVPADLRSCLDSFIWELKYACLIALEHLEDPTGAQIALQDSDWVVRAKAERQCTAPLAH

SEQ ID NO: 4399 - protein, 149 aa, Triticum aestivum
  unsure (1)..(149): unsure at all Xaa locations
GDDDGPEWMMEVGGAGATGKGKGGALDKNKKRFSEEQIKSLESMFATQTKLEPRQKLQLARELGLQPRQVAIWFQNKRARWKSKQLERDYSALRDDYDALLCSYESLKKEKHTLLKQLEKLAXMLHEPRGKYSGNADAAGAGDARASAA

SEQ ID NO: 4400 - protein, 193 aa, Exophiala dermatitidis
MVVATIKCVVVGDGAVGKTCLLISYTTNKFPSEYVPTVFDNYAVTVMIGDEPYTLGLFDTAGQEDYDRLRPLSYPQTDVFLVCFSVTSPASFENVREKWFPEVHHHCPGVPCLIVGTQTDLRDDPQVREKLAKQKMQPVRKEDGERMAKELGAVKYVECSALTQYKLKDVFDEAIVAALEPPPKKSSKKCTIL

SEQ ID NO: 4401 - protein, 497 aa, Synechococcus elongatus PCC 7942
MPRGVAPAFAGRKPKGWAWASTAVPDFQGGFKRLINRFQGSKLWLACVPLAATIAVFWGVAANAQGSADPVPSAQFLVNNLWLMVATVLVIFMNAGFAMVETGLCRQKNAVNVLAKNLIVFTLAATAYWFIGYSLMYGSPVVDGFLYFGKGGPLGFFFDPTVSAETIKNDGLISSLDFLFQAAFAGTAATIVSGSVAERIKFVDFIIFSLILTAVIYPIAGSWQWNVGSGWLNKAGFIDFAGSTVVHSVGGWAALIGAITLGPRMGKFQDGRPGALPGHNLAIATLGALILWIGWYGFNGGSVLAFNTAVPYVAVTTTLGGAAGGISATITSWSTSGKPDLSMVINGILAGLVGVTAGCDGFGMGGSFIVGLIAGVLVVFSVYTFENLKIDDPVGACSVHLVCGIWGTLAVGLFNLEKGLFYGGGFGQLGSQILGIISYGVWTVVASVIIWNILKALLGLRVSPEEELQGLDIGEHGMEAYSGFAKDASNALSSISE

SEQ ID NO: 4402 - protein, 301 aa, Zea mays
FVSISQCTGLSLQHPWAFTFGLLGNVISFMTFLAPIPTFYRIYKSKSTEGFQSVPYVVALFSAMLWIFYALIKSNETFLITINAAGCVIETVYVVMYFVYATKKGRMFTAKIMLLLNVGAFGAILLLTLLLFKGDKRVVMLGWICVGFSVSVFVAPLSIMRRVIQTKSVEYMPFSLSLSLTLSAVVWFLYGLLIKDKYVALPNILGFTFGVVQMVLYVVYMNKTPLPVADGKAAGKLPSAADEHVVVNVTKLSPGRLPPVTQMAAVPTKSCATEAAAPATLPSRDVVDVLVNRHSPAVHVT

SEQ ID NO: 4403 - protein, 463 aa, Glycine max
MVLTSTATHPDEQDQSLNYTFASRYVREPIPKFKMPEKSIPKDAAYQIINDELMLDGAPRLNLASFVTTWMEPECDKLIMASLNKNYVDMDEYPVTTELQNRCVNIIANLFHAPISDDETAVGVGTVGSSEAIMLAGLAFKRKWQTKRKAEGKPYDKPNIVTGANVQVCWEKFARYFEVELKEVKLKEGYYVMDPAKAVEMVDENTICVAAILGSTMTGEFEDVKLLDELLTKKNNETGWDTPIHVDAASGGFIAPFLYPDLEWDFRLPLVKSINVSGHKYGLVYPGVGWVVWRSKDDLPDELVFHINYLGSDQPTFTLNFSKGSSQIIAQYYQLIRLGFEGYKNIMENCWENARVLKEGIERTGRFNIISKDIGVPLVAFSLKDSSQHTVFEIADHLRKFGWIVPAYTMPPDAQHIAVLRVVIREDFSRGLAERLAADIEKVAKLLDTLPSPLTTKAVHITA

SEQ ID NO: 4404 - protein, 422 aa, Mycoplasma penetrans HF-2
MLTLLKNCLLSNSRKVDILIKDSIIEKISDTSLDSKTYNNKKIDAVFDMKCNLVMPGFIDAFSRIKKQTSYTTSDYETESRACAYGGITTFVDIPSAPISEKYYDAIIDKVNEAKENSHVNFGFVVSVSNLSNIVELEKIQDYSVGTIININARTVSDRIIDSEKLSEALKASKLVLLHLSGFDIDLFFSVCDDKFTKLVFYDITNENDLEKILSYKKEGYNIRTATSVNYLLFNRDMIANEYKRKTITTEYKLGTMLNNLGLWNAVKDRKIDIITSDHTPVSLIEKFETEQKGLPNFETMFSILFDSCYYKRIPITILEDLLCKNPAKVCGFKNKGEIKEGYDADLVVVNTTKRWWIKNEDIVSSARWTPFNDYRISGRVMMTFVNGQLVYNFINQMSPIRNVKAGKFAEFDKNLASRSAS

SEQ ID NO: 4405 - protein, 243 aa, Zea mays
GILNNWRASFKPQDPVQASHFQSDGRVLYCLELTKNFNSGDTDTMEQEEVAVLLSRLRFIQSTLFHTDVTYLEFLDRVHTSELKLRAQSLWEVPHPWLNLLIPRSSIRRFATEVFGRILKDSNNGPILLYPVNKSKWDNKTSVVIPDEEIFYLVGFLSSAPSLSGHGSIAHAMSLNSQIVEFCEEADIGMKQYLAHYTTQEQWKTHFGARWETFERRKHRYDPLAILAPGQRIFPKASLPLSL

SEQ ID NO: 4406 - protein, 238 aa, Oryza sativa
MCGIKQEMSGESSGSPCSSASAERQHQTVWTAPPKRPAGRTKFRETRHPVFRGVRRRGNAGRWVCEVRVPGRRGCRLWLGTFDTAEGAARAHDAAMLAINAGGGGGGGACCLNFADSAWLLAVPRSYRTLADVRHAVAEAVEDFFRRRLADDALSATSSSSTTPSTPRTDDDEESAATDGDESSSPASDLAFELDVLSDMGWDLYYASLAQGMLMEPPSAALGDDGDAILADVPLWSY

SEQ ID NO: 4407 - protein, 483 aa, Mesorhizobium sp. BNC1
MSGRKYPNPSLFINGRSVTGRGAKEEMVIDPSNEEVLGSYRSAAPEDLQELLDSAAAGFEKWRRTSAYERCEILHKVAAALRENAQEIGSLLTLETGKILSESITEVRGAADHFDWSGEEGRRLYGYTVPARRAESRLRVELEPLGIVFALIPWNFPLGTSARKVAPALAAGCSVILRPPEEAPATVEAFVRCCQEAGLPPGVLNMVLGSPKDVVEPLMASFSVRAVTFTGSTRVGKILIQQAADTVKHLVLELGGHAPAIVLPDADPKKVGVAAARAKFRNAGQVCVSPSRFIVHEKIVEPFTQAMVEETRSIKLGSGFDAGAQMGPLTTARQRERVERLVEDARSKGARILAGGQRPSGFNRGFFFEPTVLGDVPDTALIFEEEPFGPVAPIIPVRSVQEAVEKANAVKWGLAGYLFTSSLADATKVSEAMQVGMVGLNTFAAAAPEAPFGGVKESGYGRECGLEGIREFVSSKLIHTDIG

SEQ ID NO: 4408 - protein, 288 aa, Zea mays
  unsure (1)..(288): unsure at all Xaa locations
ILLNTTCCTPAYLVXEIINKKGXEGAKADIWSYSKILFMLLCAYLPFYNANLEEMYRTIRTTDGKYPQGIYPELRRIIPKLLTPNPNNRITIDKLGKHPWFKKGYRPAVMLAQPHGSSSLKDVQVAFSNADHKDSSSKVEQPADSSLKPASLNAFDIISHSRGFDLSSLFEVDQEQKASNSRFMTQKPASAIVSKLEQIAETERFMVKKQDGLVKLQGSKQGRKGQLAIDAEIFEVTPAFHVVEVKKSAGDTLEYEMFCSKGLRPSLSDICWSSRSEENMAPSVVQPS

SEQ ID NO: 4409 - protein, 176 aa, Triticum aestivum
MAPTVMSSAATAVAPFQGLKSTAGLPVSRRSSSAAGLGSVSNGGRIRCMQVWPIEGIKKFETLSYLPPLSTEALLKQVDYLIRSKWVPCLEFSKVGFIFREHNASPRYYDGRYWTMWKLPMFGCTDATQVINEVEEVKKEYPDAYVRIIGFDNMRQVQCVSFIAFKPPGCEESGKA

SEQ ID NO: 4410 - protein, 479 aa, Medicago truncatula
MLSEKQGEETMMSSLNETIELNEEREEEKGASPGSGFKNFLWHGGSVYDAWFSCASNQVAQVLLTLPYSFSQLGMISGIIFQVFYGLMGSWTAYLISILYVEYRSRKEKENVSFKNHVIQWFEVLEGLLGPYWKAIGLAFNCTFLLFGSVIQLIACASNIYYINDHLDKRTWTYIFGACCATTVFIPSFHNYRIWSFLGLGMTTYTAWYMTIAAIVHGQVENVVHSGPKKMVWYFTGATNILYTFGGHAVTVEIMHAMWKPQKFKAIYFFATLYVFTLTLPSAIAVYWAFGDQLLDHSNAFSLLPRNAWRDAGVILMLIHQFITFGFACTPLYFVWEKVIGMHDTKSIFLRALARLPVVIPIWFLAIIFPFFGPINSAVGALLVSFTVYVIPASAHMLTYRSASARQNAAEKLPKVIPSWTLMYVINAFVVIWVTIVGFGFGGWASMTNFIKQVDTFGLFAKCYQCPPKLPASNHTMHH

SEQ ID NO: 4411 - protein, 291 aa, Candida albicans SC5314
MIRSYIRNIILAILSPLLTTPPPLILPPPYEKIIQEITTVLSINNYDDGSLAPIILRLAWHCCATYDVTTNTGGSNGATMRFVPEITDEGNYGLDIARAALEPIKQRYPAISYADLWTLAGKVAIEYMGGPTIIWKSGRVDYTNDRCTPSNGLLPFADKDANHIRKTFTRLGYNDQQTVALIGAHGVGRCHKRFSGWEGKWTRTPKTFSNQFYVVLLNETWSQGEVPETGKTQYFNADKSLIMLNTDMELIRDKSYLHWVEIYAKDEPKFFHDFSSAFAKLLELGIKRETL

SEQ ID NO: 4412 - protein, 490 aa, Sinorhizobium meliloti 1021
MTISETLLVKLKDPSLAVDKGLIGAEWLDRSDSGKTFDVSNPATGEVIAILPDMSRSETARAIDAAHAAQRAWAEKTGKERAAVLRNLYDLVVANADDLATILTMEMGKPLTEAKGEILYGASYVEWFGEEAKRVYGDTIPGHQPDKRIIVLKQPIGVVAAITPWNFPNAMLARKLAPAAAAGCAVVSKPAAETPLSALALALLAERAGLPAGVFNVILSTDSAEVGKEMCANDKVRKLTFTGSTNVGKILMRQGADQIMKLGLELGGNAPFIVFDDADLDAAVEGAMVAKYRNNGQTCVCANRIFVQAGIYDAFAARLTAKVSEMTIGDGFEPDVDAGPLISEKALAKVEEHIRDAVTKGADLVLGGNARGGLFFEPTVLTGATMDMKIAGEETFGPVAPLFKFETENEVVSMANKTEFGLASYFYSKDVSKVFRVAEALEYGMVGINTGLISTEVAPFGGVKQSGQGREGSKYGIDDYVETKYLCLSI

SEQ ID NO: 4413 - protein, 321 aa, Aquifex aeolicus VF5
MRIGILTAGGDAPGMNAVIRAVVRSAEREGHEVIGIKRGYKGLIEGDFIKLTSRDVGGILDRGGTILLSSRDPRYKKLEYREKAYKNLNEQGIEALIILGGEGTLAGAKLTAEETGIPVIGVPCTIDNDVGGTEYCIGYDTALRNAVDAIDKIRDTASSHERIFIVEVMGRNRGFIAVEAGLATGAELILIPEERFPREQIPEEIEKAKKLGKLHFIIVLAEGYCRAKELEDFLLEKIGDKYGEIRSTVLGHIQRGGIPTHFDRIMGTKFGVVAYESLIAGERSGFVAYEKGKFYIEDFEKAQEYKPIDREAYKLNTRLAI

SEQ ID NO: 4414 - protein, 149 aa, Zea mays
  unsure (1)..(149): unsure at all Xaa locations
ASFPVSRKQSLDITSIASNGGRVSCMQVWPPINMKKYETLSYLPDLSDEQLLSEIEYLLKNGWVPCLEXFETEHGFVYRENHKSPGYYDGRYWTMWKLPMFGCTDATQVLAEGQEAKKAYPQAWVRIIGFDNVRQVQRIRFIGYKPEGY

SEQ ID NO: 4415 - protein, 218 aa, Ipomoea batatas
MGRGKVEIRRIEKSTNRRVTFWKRRNGLLKKAMEMGILCDAEVGLMIFSSTGKLHEFATTSIRSVIERYNKTQGDGLQSPLDPTLELKFWQIKVAILRKQLHNMQEDHRKAMGEVYGLSVKDLLNLENQLEMSMSSIIMKKEQLLIDQILELTHQQRSIVLQENFELFNKFQAYGTSDPNAVNGDTISPYDFTISEESQGHIHFQLPQNFSDLARALY

SEQ ID NO: 4416 - protein, 411 aa, Rickettsia sp. DnS28
DSEFAELKIRGKIFKLPILKASIGEDVIDISRVSAEADCFTYDPGFMSTASCQSTITYIDGDKGILRHRGYDIKDLAEKSDFLEVAYLLIYGKLPSGEQYNNFTKQVAHHSLVNERLHYLFQTFCSSSHPMAIMLAAVGSLSAFYPDLLNFKEADYELIAIRMIAKIPTIAAMSYKYSIGQPFIYPDNSLDFTENFLHMMFATPCTKYKVNPIIKNALNKIFILHADHEQNASTSTVRIAGSSGANPFACISTGIASLWGPAHGGANEAVINMLKEIGSSKYIPKYIAKAKDKNDPFRLMGFGHRVYKNYDPRAAVLKETCKEVLKELGQLDNNPLLQIAIELEAIALKDEYFIERKLYPNVDFYSGIIYKAMGIPSQMFTVLFAIARTIGWMAQWKEMHEDPEQKISRPR

SEQ ID NO: 4417 - protein, 283 aa, Schizosaccharomyces pombe
MSESQTESTTVTLTNGMVIPRIGFGAFMLKYNECYGLVTQALDSGYRHIDTAAVYGNEDICGKAIVDWCEKNNVKRTDIFLTSKLANCSDYYSTRAAIRSSLHHLGTYIDLFLIQSPAGGKKSRIASWKAMEEFVDSGDIRSVGVSNYGVKHLQELYASNPKFYPCVNQIELHPFLSQDDIVKYCQSHDIAIEAYSPLTHGIRLNDEKLVPIAKKLNISVAQLLIRWSLQKGYIPIIKSTKKEHMLSDLDVFNFTIPDDVVQELSSFDEHWHAGTTYDPTVCD

SEQ ID NO: 4418 - protein, 321 aa, Mesorhizobium loti MAFF303099
MMEMAMTLDPDALRALVIGRVAGGEPFEKGSVAAARAAYNASFPTQQGEHEPVAASQERQTDGPNGPVKIRVHRGIGAPRAGARAVLYLHGGGWVIGNLSSHDEICRWLANLSNAVVVYPDYRLAPEHKFPAGLEDCTAALRFMAENAGELGIDPARISVAGDSAGGNLAAVLALLARDRLVPRLAAQVLIYPNTDARQTADSYRRFGDGFGLTAATMAWFRDHYVRTPNDITDWRVSPLLASSLAGAAPAFVVIAGHDILADEGTAYAERLRVAGVPLVLRPWPGQIHGFVSMGRHILAARQAVSEAAAWLQLQTRVQAD

SEQ ID NO: 4419 - protein, 411 aa, Rickettsia sp. RpA4
DSEFAELKIRGKIFKLPILKASIGEDVIDISRVSAEADCFTYDPGFMSTASCQSTITYIDGDKGILRHRGYDIKDLAEKSDFLEVAYLLIYGELPSGEQYNNFTKQVAHHSLVNERLHYLFQTFCSSSHPMAIMLAAVGSLSAFYPDLLNFKEADYELIAIRMIAKIPTIAAMSYKYSIGQPFIYPDNSLDFTENFLHMMFATPCTKYKVNPIIKNALNKIFILHADHEQNASTSTVRIAGSSGANPFACISTGIASLWGPAHGGANEAVINMLKEIGSSEYIPKYIAKAKDKNDPFRLMGFGHRVYKNYDPRAAVLKETCKEVLKELGQLDNNPLLQIAIELEAIALKDEYFIERKLYPNVDFYSGIIYKAMGIPSQMFTVLFAIARTIGWMAQWKEMHEDPEQKISRPR

SEQ ID NO: 4420 - protein, 271 aa, Glycine max
MFSKLQPQHQQQHQPFQFSRECQTSEDDDSRSSGGPNTAVAQKSVLGGGGCSDGATIEVVRRPRGRPPGSKNRPKPPLIITREPEPAMSPFILEIPGGSDVVEALARFSRRKNTGLCVLTGSGTVANVTLRQPSFSPDGATVATVTFHGRFDILSMSATFLHHASPAAIPNAFAVSLSGPQGQIVGGFVAGRLLAAGTVFVIAASFNNPSYHRLSSEEEAQNNSGGGAGDAQSPPVSGGGVESGHVPAESFMYSCHLPSDVIWAPTPRPPF

SEQ ID NO: 4421 - protein, 371 aa, Bacillus cereus ATCC 14579
MTVIRGLEGVVATTSSVSSIIDDTLTYVGYNIDDLAENATFEEVVYLLWHRKLPNEKELAEFNEIVSEYYKVPGEILTYLKQVDLKIAHPMSVLRTAISMLSLYDESAEIMDEKSNYLKAVKLQAQVGTLVAAYARIRKGLDIVEPRKDLSLAANFLYMLNDREPNEVEIEAFDKALVLHADHELNASTFTARVCVATLSDVYSGITAAIGALKGPLHGGANENVMKMLTEIGEEENVESYIHNALQNKVKIMGFGHRVYEQGDPRAKHLREMSKRLCVLLGEEKWYNMSIKIEDIVTKEKGLPPNVDFYSASVYHCLGIDHDLFTPIFAISRMSGWLAHILEQYENNRLIRPRADYNGPTHQVYVPIAQR

SEQ ID NO: 4422 - protein, 502 aa, Corynebacterium efficiens YS-314
MTAVIPAALQRREQLNLPYTHVDDFYINGAWVTATGEKRNPVVDPATGQEWGSVPEAGQVELDHAVGAAREALPGWGSLTAADRAEYLVRIAEEIEKRAEVLALTNTRENGSPISETRGAAANAAGIFRYFATLAPFLDDPDIRPFPAGGAESLVDKDPIGVCALIAPWNFPINLVVIKLAPALLAGCSVVIKPASPTPLSIRFIIEAVEAAGVPAGVINLLTGSGRFGDAMVRHPGVNKVAFTGSTPVGRKIASACGELLRPVTLELGGKSSAIVLPDADMSVLSARLIRSCMRNTGQTCYISTRIIAPASRYEEVVQVVADTIAAGRQGDPLDEDTIFGPVATASQYATVMEYIESGHAEGARAVTGGAATAGLTGGLENGVFIEPTVFADVTPDMRIAAEEIFGPVISILRYDDSAGVEEAIAIANNTEFGLGGLVFGADEDRALDVARRVDSGSVGINFFGSNHSAPFGGRHDSGMGVEYGIEGLSAYLSYKSIHRMV

SEQ ID NO: 4423 - protein, 193 aa, Triticum aestivum
  unsure (1)..(193): unsure at all Xaa locations
MAPTVMASSATSVAPFQGLKSTAGLPVSRRSNGASLGSVSNGGRIRCMQVWPIEGIKKFETLSYLPPLSTEALLKQVDYLIRSKWVPCLRFKQVGSSSREHNASLGYYDGRYWDMWXLPISGAPTHTSVNEVEESRRIPDAYSASSDRHIASACVSSCLNHGLKIRKANSYHTGIINAFSLHPKCLVPLLLMS

SEQ ID NO: 4424 - protein, 229 aa, Oryza sativa (japonica cultivar-group)
MARPLYPMMLESPQLRWAFVRKVYAILSIQMLLTIAVASVVVFVRPVALFFVSTPAGFALYIFLIILPFIVLCPLYYYYQRHPVNLLLLALFTAAISFAVGLTCAFTKGEVILESAILTAAVVVSLTAYTFWAARRGHDFSFLGPFLFAAVMILMVFALIQVFFPLGRVSLMIYGGLAALVFCGYIVYDTDNLIKRYSYDEYVWAAVALYLDVINLFLSLLTLFRASDS

SEQ ID NO: 4425 - protein, 251 aa, Arabidopsis lyrata
MGRGRVQLKRIENKINRQVTFSKRRAGLLKKAHEISVLCDAEVALVVFSHKGKLFEYSTDSCMEKILERYERYSYAERQLIAPESDVNTNWSMEYNRLKAKIELLERNQRHYLGEDLNAMSPKELQNLEQQLDTALKNIRTRKNQLMYESINELQRKEKAIQEQNSMLSKQIKEREKILRAQQEQWDQQNHGHNMPPPPPPQQHQIQHPYMLSHQPSPFLNMGGLYQEEDPMAMRRNELELTLEPVYNCNL

SEQ ID NO: 4426 - protein, 218 aa, Oryza sativa
MEVEEAAYRTVWSEPPKRPAGRTKFRETRHPVYRGVRRRGGRPGAAGRWVCEVRVPGARGSRLWLGTFATAEAAARAHDAAALALRGRAACLNFADFAWRMPPVPASAALAGARGVRDPVAVAVEAFQRQSAAPSSPAETFANDGDEEEANKDVLPVAAAEVFDAGAFELDDGFRFGGMDAGSYYASLAQGLLVEPPAAGAWWEDGELAGSDMPLWSY

SEQ ID NO: 4427 - protein, 444 aa, Agrobacterium tumefaciens str. C58
MDNPSRSNSTSLDSYWMPFTANRQFKANPRLLTSAEGMYYTSNDGRQVLDGTAGLWCVNAGHGRQQIASAVKHQLSTLDYAPSFQMGHPVAFEFAERLAEIAPGPEGGKLDRVFYTGSGSESVDTALKIAIAYQRAIGQGTRSRLIGRERGYHGVGFGGISVGGLVNNRRVFPQIPADHLRHTHDLARNSFVKGQPEHGAELADDLERLVALHGAETIAACIVEPVAGSTGVLVPPKGYLERLRAICDKHGILLIFDEVITGFGRMGSSFASNYFGVTPDIVTTAKGLTNGAIPMGAVFTSRKVHDALMHGPENQIELFHGYTYSGHPVACAAGIATLDIYRDEGLFTRAAELQDAWHDAIHSLKSAANVIDIRTIGFIAGIELQSREGAVGARAYDVFVDCFERGLLIRVTGDIIALSPPLIAEKSHFDDIVSILGDALNRAV

SEQ ID NO: 4428 - protein, 330 aa, Candida albicans SC5314
MSNNIEDDSISVDNIVDRLLEVRGSRPGKQVTLTENEIRFLCTKAREIFIQQPILLELEAPIKICGDIHGQYYDLLRLFEYGGFPPEANYLFLGDYVDRGKQSLETICLLLAYKIKYPENFFILRGNHECASINRIYGFYDECKRRFNIKLWKTFTDCFNCLPIAAIIDEKIFTMHGGLSPDLNSMEQIRRVMRPTDIPDVGLLCDLLWSDPDKDITGWSENDRGVSFTFGPDVVSRFLQKHDMDLICRAHQVVEDGYEFFSKRQLVTLFSAPNYCGEFDNAGAMMSVDESLLCSFQILKPADKKPRYAPANVANNRPGANQRKPKKAVK

SEQ ID NO: 4429 - protein, 204 aa, Arabidopsis thaliana
MSQLGDLLRESEDGTRSERTMMMSLLEEDQINGGDRTMSKWTTLKQRLRFDWVGCCGKPLTLRLRQAETPIVVDDDDDEEESQNQVVDFSDPGTGTELDCLTRGSTRNLAEALAEERLAHVTEEETAVTKVPLMRLLAESDGCDSTTTWLGNDPLCCVCMGREKGAAFIPCGHTYCRVCSREIWMNRGTCPLCNRSIFDVLDLY

SEQ ID NO: 4430 - protein, 197 aa, Bacillus subtilis
HNPNIIWHPAAISKSDRQSLNGHKSCVLWFTGLSGSGKSVLANAVDEKLYRKGIQSYVLDGDNIRHGLNKDLGFQTGDRIENIRRIGEVAKLFVDSGQMILTAFISPFREDRDMVRALFPKGEFFEIYVKCPLHVCEQRDPKGLYKKARNGEIKHFTGIDSPYEAPLSPDFIIESDQTSISDGADLIINALQNRGII

SEQ ID NO: 4431 - protein, 205 aa, Auxenochlorella protothecoides
ARPPDDGTSEEEKTTLQRHIEFWDPKGTGVIWPRDVYAGFRRLGFSRAFSTAITPIISGGLSFNTQTSKIPDPRLPVYVERIHLGIHTSDTGSYDAKGHFDSKRFDEVLAQYDIGNKGGLTQEEVKALTRGQREPKDPKGWTGSWIEWNISFHLAARESPDGKLPLYKEDLLGIMDGTLFPKISKEVAEGTWVRHGHLSPGLRRP

SEQ ID NO: 4432 - protein, 391 aa, Glycine max
MSLTLQTPPSTTLSSASPIHRTITRYTTFSFSLRPPTTLHFNPHRSLPLIRASNSSINAASTTELDAVSAFSEIVPDTVVFRCISKIFLPILLGICGLPDTIFRNAVEMALADSECYGLENPNARLSCFVNKAFANIGSDMAKLVPGRVSTEVDARLAYDTHAIIRKVHDLLKLYNDSNVPPQRLLFKIPSTWQGIEAARLLESEGIQTHLTFVYSFAQAAAAAQAGASVIQIFVGRIRDWARNHSGDTEIESAQLRGEDPGLALVTKAYNYIHKYGHKSKLMAAAVRNKQDLFSLLGVDYIIAPLKVLQSLKESVASPDEKYSFVRRLSPQSAAKYTFSDEELVRWDEDSLSKAMGPAAVQLLAAGLDGHADQAKRVEELFGKIWPPPNV

SEQ ID NO: 4433 - protein, 501 aa, Magnaporthe grisea 70-15
MASAPEKDRHTFFAGKVQPSPDSPGTFTTVNPATAQPIATIHTSSRASVDAAVDAARAAFPAWSSTPAPERAQILQRAVAILRERNDALARVETLDTGKAFSETQAVDVVTGADVLAYYANLVASDGLNGESFRLRPGAWVYSSKEPLGACAAIGAWNYPIQIALWKSAPCLAAGNTLVYKPSEYTPLHAQYLADIYAEAGVPPGVFNVVYGAGDVGAQLSSHPKIAKVSFTGQVSTGRKVAGTAAGGLKSVTMELGGKSALVVLPDADVSQAADGAMMANFYSSGQVCTNGTRVFVPRALKEEFERAVLEKIVHVRAGDLFDANTNFGPLSSKVHYEKVVSYVRHGIEQDKARLLCGGIGQPRGVPKELGKGFWIEPTVFTDCTDDMRIVKEEIFGPVMSILTYDTLEEVVQRANATELGLAAGVFGKDLNQCHQVIAQLEAGITWINTWGESPAEMAVGGWKQSGIGVENGHKGLDAWVQNKSTLVEMGGAVPTVFAKI

SEQ ID NO: 4434 - protein, 238 aa, Oryza sativa (japonica cultivar-group)
MVCSNFHQQRKKYTEGRRHQPTGGEEGGGGSLLSVLANEDEQWRSWSHTREEEEPSAPGHTTLLDAGDDGWVLGPNLSVFTSLPDMWAIGQMFPIIPIQCLGERPAIDGVLSDLTSDSDGKVDHFISGRHSLPLHELPVHGTRGYYLGGTYQEALGGLHNLFGGPSVHEHEVFKQRTDGATAAALAKAFGAMPYLSFYPEAAAMARGESSGMSSDSEVSAAGVAEDDDEWEFMRGLIV

SEQ ID NO: 4435 - protein, 370 aa, Exiguobacterium sp. 255-15
MHVEKRDYYEVLGVARDASAAEIKRAYRKLARTYHPDVNKEADADQKFKELSEAYEVLSDDNQRARYDQFGHQDPSQGGGGFGGAEGFGDIFDMFFGGGRRQDPNAPRKGQDLQYVEEIDFMEAFSGVEKVITIPVEEDCGTCHGSGAKPGTHPETCKRCGGSGHINVEQNTMFGRVVNQTTCSTCHGRGQIVKEPCETCRGAGRVRKNKDVRVKIPAGIDNGQQIRLAGKGEAGVNGGPFGDLYVVVRVREHELFERVDDHIVMDMPLTFAQATLGDEIEVPTVHGKVSLKIPAGTQTGSRFRLRGKGMPNVRSGHHGDQYVNVVIITPKNLTDRQKELLREFNEISDEKGVEEQHEGVFSRIKTFFTG

SEQ ID NO: 4436 - protein, 309 aa, Glycine max
MAPGSSVFKEVLESHLMSSDYEMGKAKSEAKSNSTSTKSSIGLSGKSGISSNNGVYELLGCPVCKNLMYPPIHQCPNGHTLCSHCKVEVHNICPSCHHDLGNIRCLALEKVAESLELPCRYQSLGCHDIFPYYTKLKHEQNCGFRPYNCPYAGSECSVMGDIPTLVAHLKDDHKVDMHDGCTFNHRYVKANPHEVENATWMLTVFNSFGRHFCLHFEAFQLGSAPVYMAFLRFMGDDNEAKKFSYSLEVGANGRKLIWQGIPRSIRDSHRKVRDSQDGLIIQRNLALYFSGGERQELKLRITGRIWREE

SEQ ID NO: 4437 - protein, 319 aa, Bacillus cereus ATCC 14579
MKRIGVLTSGGDSPGMNAAIRAVVRKAIFHDIEVYGIYHGYAGLISGHIEKLELGSVGDIIPRGGTKLYTARCLEFKDPEVRLKGIEQLKKHGIEGLVVIGGDGSYQGAKKLTEQGFPCVGVPGTIDNDIPGTDFTIGFDTALNTVIDAIDKIRDTATSHERTYVIEVMGRHAGDIALWAGLADGAETILIPEEEYDMDDVIARLKRGSERGKKHSIIVVAEGVGSAIDIGKHIEEATNFDTRVTVLGHVQRGGSPSAQDRVLASRLGARAVELLIAGKGGRCVGIQDNKLVDHDIIEALAQKHTIDKDMYQLSKELSI

SEQ ID NO: 4438 - protein, 412 aa, Bacillus cereus ATCC 14579
MSTLREEALHMHKVHQGKLETVSKVKVENAKDLSLAYSPGVAEPCKEIYDDKSKVYEYTMKGNMVAVVTDGTAVLGLGNIGPEASLPVMEGKAVLFKSFAGVDAFPIALNTNDVDKIVETVKLMEPTFGGVNLEDIAAPNCFIIEERLKKETNIPIFHDDQHGTAIVTVAGLVNALKLVGKKMSDIKVVANGAGAAGIAIIKLLYRYGVRDIIMCDRKGAIYDGRPTGMNPVKDEVAKYTNKNRIEGSLADVVQGADVFIGVSAEGALTEEMVRTMNDDAIIFAMANPVPEIMPELAKAAGAAVVGTGRSDFPNQVNNVLAFPGIFRGALDVHATQINEEMKMAAVQAIAELVAEDELNADYIIPAPFDARVAPQVAAYVAKAAMETGVARRQVDPNEIAEKTKQLALIGKE

SEQ ID NO: 4439 - protein, 286 aa, Pseudomonas aeruginosa UCBPP-PA14
MSDYQETLYQGYGQRFSIDNMLHEVRTEHQHLVIFENARMGRVMALDGVIQTTEADEFIYHEMLTHVPILAHGAARRVLIIGGGDGGMLREVAKHKSVERITMVEIDGTVVDMCKEFLPNHSQGAFDDPRLNLVIDDGMRFVATTEERFDVIISDSTDPIGPGEVLFSENFYQACRRCLNEGGILVTQNGTPFMQLEEVRTTAARTDGLFADWHFYQAAVPTYIGGAMTFAWGSTREGLRRLPLETLRQRFRDSGIATRYYNADIHLGAFALPQYVLQAIGKQDND

SEQ ID NO: 4440 - protein, 254 aa, Zea mays
MAAKCYPTVSDEYLAAVAKARRKLRGLIAEKNCAPLMLRLAWHSAGTFDVATKTGGPFGTMKCPAELAHGANAGLDIAVRLLKPIKEQFPILSYADFYQLAGVVAVEVTGGPEVPFHPGRQDKPEPPPEGRLPDATQGSDHLRQVFSTQMGLSDQDIVALSGGHTLGRCHKERSGFEGAWTANPLIFDNSYFTELLSGEKEGLLQLPTDKTLLTDPAFRPLVDKYAADEDAFFADYAEAHLKLSELGFGEAGCC

SEQ ID NO: 4441 - protein, 144 aa, Nitrosomonas europaea ATCC 19718
MAITRYEPWGLLTQLQRELERARDDMATEGASAIAEWAPAVDIKEESDKFIVHADLPGVKPEAIDVTTENGVLTIKGEKQTEARTEKEGYKRVERTHGSFYRRFSLPDTADLGAISAVTKDGVLVVTIPKREAVQPKKVSVTAQ

SEQ ID NO: 4442 - protein, 138 aa, Pyrococcus horikoshii OT3
MGDKTKVQVSKLKPGRYIIIDDEPCRIVNITVSSPGKHGSAKARIEAVGIFDGKVRSIVKPTSAEVDVPIIDKKTAQVIAITPDTVQIMDMETYETFEVPIDTGVADEIRDQLKEGINVEYWETLGRIKIMRIKGEGE

SEQ ID NO: 4443 - protein, 152 aa, Brassica napus
MGGGVRGTERWFNVTKGFGFISPEDGREGLFVHPSAIKSDRYRPLNENDTVGFEVITGDEGRTKAGDLTPPGGGALAGGRRPADGGGDRGGGGGEGGGGDGGGGAAGGEAGGAGGEAAGGAGAGAGAGGGGCYKCGEEAAAATEEAAVAAVS

SEQ ID NO: 4444 - protein, 278 aa, Streptomyces avermitilis MA-4680
MSTKVPPITLNNGVEMPQLGFGVWQVPDDEAERAVATALEAGYRSIDTAAIYGNEEGTGKAIATAGIPRADLFVTTKLWNSDQGYDSTLRAFDVSLEKLGLDYIDLYLIHWPLPTRGQFVETYKAFEKIYADGRAKAIGVSNFLPEHLRTLIDATSVIPAVNQIELHPHLQQHAAREFHAEHGIATEAWSPLGSGKGLLEVPAIVAIARKHERTPAQVVLRWHIQLGNIVIPKSVTPSRIKENIEVFDFSLDDEDIAAISALNEDRRLGPDPATFDMG

SEQ ID NO: 4445 - protein, 508 aa, Zea mays
  unsure (1)..(508): unsure at all Xaa locations
MKTSVVVAALAAVLFAAQSYASLAGASGPRVIIVGAGMSGISAGKTLWEAGVRDLLILEATGRVGGRMHKHNFGGINVEIGANWVEGLGGDQLNPIWPLVNSTLKLRNFYSDFDSVVGNVYKENGGGLYDEEYVQKRMDRAYEVEELGANLTKKMHPSGRDDISVLAMQRLFNHQPNGPXTTPVDMALDYFIYDYEFAEPPRVTSLQNTQPTPTNADFGEDNYFVADQRGYESIIHSIGSSYLSTDGNGKLKDRRILLNKVVRQITYNKQGVVVKTEDGSSYRADXYVVVSTSLGVLQTDLIQFKPQLPFWKIAAIYSFDMGVYTKIFLKFPERFWPVGEGKQFFMYASSRRGYYALWQSFEREYPGANVLLATVTDDESRRIERQSDDQTKAEVAEVLRDMFPAADVPGPDQIDVYVPRWWSDRFFKGSYSNWPVGVSRYEYDQLRAPVGRVYFTGEHTSERYNGYVHGAYLAGIDSANILINYIFKNEEYKVRGKYDVDDLIAQAR

SEQ ID NO: 4446 - protein, 297 aa, Yersinia pestis KIM
MRYAFPTQQLKDNVMQTVKLNNGIAMPLLGFGVFQMTNTAECERAVIDAIETGYRLIDTAASYQNETQVGNALKLSGIARDELFITTKLWLQDTYYEGAKAQFERSLNRLQLDYVDLYLIHQPYGDVHGAWRAMEELHQAGKIRAIGVSNFHPDRLADLMAFNKIIPAVNQIEVNPFNQQLHAVPWMQSRGIQPEAWAPFAEGRNGLFQNPVLTAIGEKYGKSVGQVVLRWIFQRGIVSLAKSVRKGRMEENINILDFELSAEDMLQIAALDTATSAFFSHRDPAMVEWLTGRKLDV

SEQ ID NO: 4447 - protein, 250 aa, Zea mays
MAKTYPVVSAEYQEAVEKARQKLRALIAEKNCSPLMLRLAWHSAGTFDVSSKTGGPFGTMKKPAEQAHAANAGLDIAVRMLEPIKEEIPTISYADLYQLAGVVAVEVSGGPVIPFHPGREDKPQPPPEGRLPDATKGSDHLRQVFGKQMGLSDQDIVALSGGHTLGRCHKERSGFEGPWTRNPLKFDNSYFTELLSGDKEGLLQLPSDKTLLTDPVFRPLVEKYAADEKAFFEDYKEAHLRLSELGYAEA

SEQ ID NO: 4448 - protein, 456 aa, Securigera parviflora
MCGILAVLGCSDDSQAKRVRVLELSRRLKHRGPDWSGLHQHGDCFLAHQRLAIVDPASGDQPLFNEDQSIIVTVNGEIYNHEELRKQMPNHKFRTGSDCDVIAHLYEEHGENFVDMLDGIFSFGLLDTRDNSFIVARDAIGVTSLYIGWGLDGSVWIASELKGLNDDCEHFETFPPGHLYSSKEREFRRWYNPPWFSESIPSAPYDPLALRQAFEKAVVKRLMTDVPFGVLLSGGLDSSLVASITARHLADTKAAKQWGAKLHSFCVGLEGSPDLKAGKEVADYLGTVHHEFQYTVQDGIDALEDVIYHIETYDVTTIRASTPMFLMSRKIKSLGVKWVISGEGSDEIFGGYLYFHKAPNKEELHKETCRKIKALHKYDCLRANKSTFAWGLEARVPFLDKEFINVAMNIDPENKMIKLDEGRIEKWILRKAFDDEENPYLPKHILYRQKEQFSDG

SEQ ID NO: 4449 - protein, 300 aa, Magnaporthe grisea 70-15
MASKPGDFDAVRKDIVSLLDQPEYDDGSAGPVLVRLAWHSAGTYDKSTDTGGSNGAGMRYEAEGGDPANAGLQNARQFLEPVKARHPWITYADLRTLAGVVAVRAMGGPEIPWRAGRTDFADDSRVPPRGRLPDATQGAAHVRDIFYRMGFDDREIVALSGAHSLGRCHPANSGFEGKWVNNPTRFSNQYFRLLLSEDWREKTVAGTGLKQFVAVDEVTGDELMMLPTDLSLTSDPVFARWVKVYRDDQDLFFADFAKVFDKLMELGIKRDAEGKVINKENVEGGYVSAPKKQGKIASKL

SEQ ID NO: 4450 - protein, 443 aa, Zea mays
MEDAVAADGKSVLQGRYELGRVLGHGNFGRVHAARDLRTGRSVAVKVVAKDKLERAGMAEQIKREIAVMKMVSHPNIVELHEVMATRSKIYLALELVRGGELFSRIARAGRVREDVARCYFRQLVAAVDFCHGRGVFHRDLKLENLLLDEVGNLKVADFGLSALAGHARSDGLLHTACGTPSYVAPEVLGGKGYDGAKADLWSCGVILYVLLVGSLPFHEDNLMVMYRKMQRGEFLCPPWVSADARKLIGELLDPDPSTRITVARLVETPWYRKPLPVLPPLNLKEPTPDARRATSDKEEPEVLNAFHLISFSEGFDLSPLFDQGRGGGVGRSSAGGIRFVTREAASSVVSRLESLVTGRGANMRVTKSGSRGVRLEAVSRGRSGARLAVAAEIFSVAPSVLLVDVKKDGGDTMEYRSFCSEELRPALKDIVWASSQDTPGAA

SEQ ID NO: 4451 - protein, 202 aa, Saccharomyces pastorianus
MATNITWHPNLTYDERKELRKQDGCTVWLTGLSASGKSTIACALEQLLLQKNLSAYRLDGDNIRFGLNKDLGFSEKDRNENIRRISEVSKLFADSCAVSITSFISPYRVDRDRARDLHKEAGLKFIEIFVDVPLEVAEQRDPKGLYKKAREGVIKEFTGISAPYEAPKAPELHLRTDQKTVEECAAIIYEYLVNEKIIRKHL

SEQ ID NO: 4452 - protein, 312 aa, Saccharomyces cerevisiae
MPATLKNSSATLKLNTGASIPVLGFGTWRSVDNNGYHSVIAALKAGYRHIDAAAIYLNEEEVGRAIKDSGVPREEIFITTKLWGTEQRDPEAALNKSLKRLGLDYVDLYLMHWPVPLKTDRVTDGNVLCIPTLEDGTVDIDTKEWNFIKTWELMQELPKTGKTKAVGVSNFSINNIKELLESPNNKVVPATNQIEIHPLLPQDELIAFCKEKGIVVEAYSPFGSANAPLLKEQAIIDMAKKHGVEPAQLIISWSIQRGYVVLAKSVNPERIVSNFKIFTLPEDDFKTISNLSKVHGTKRVVDMKWGSFPIFQ

SEQ ID NO: 4453 - protein, 421 aa, Novosphingobium aromaticivorans DSM 12444
MTADGKTVEMPVKSGTIGPDVIDIRKLYGQTGMFTYDPGFTSTASCDSALTYIDGDEGVLLHRGYPIGQLAEHSSFMEVSYLLLNGELPSQQELADFTRTITRHTMLHEQLATFYRGFRRDAHPMAIMCGVVGALSAFYHDSTDISDPTHRKISSHRLIAKMPTIAAMAYKYSVGQPFVYPDNKLSYTGNFLKMTFGVPAEEYEVIPAVEKAMDRIFILHADHEQNASTSTVRLAGSSGANPFACIAAGIACLWGPAHGGANEAALNMLKEIGTPDKIPHYIERAKDKNDPFRLMGFGHRVYKNYDPRATVMQQTVREVFDALKVNDPLFETALRLEEIALNDPYFVEKKLFPNVDFYSGIILSAIGFPTTMFTVLFALARTVGWVAQWNEMISDPGQKIGRPRQLYTGPTQRDYVPLASR

SEQ ID NO: 4454 - protein, 470 aa, Sulfolobus solfataricus P2
MMSLEVIEVRSPSNLKVIGTVKRMSKDEVRGEIEEAYKGFEIISRMPLYKRTAILRKISEILEREQERLARLLAMEAGKPISDSRVEVLRASRLFRQAAEEVGIVLEGKNYRVDAYEYPPGNENRIVLSTREPIGVVTAILPFNFPINSFAHKVAPALAVGNSVVVKPSINTPLAAVEMKKILVEAGLPDSAVRVVTGYSSEIGDEIITHPLVGLITLTGSTQTGLKIASKAISLGKRIIMELGGSDPIIILEDANIERASSIAVRARFEYAGQNCNAGKRIIVRQEVYDKFVKAFNEKAKALKVGEPLDETTDVGPVINKESVENLNSVLEDAKVKGGRVEILNRGPESGSFFPLTMVTNPSLDMLVLKSEVFGPIVPIVSVKSDEEAIRIANSTEYGLQSAIFTNDVNRALKLSRELKFGAVIINDSTRLRWDSLPFGGFKKTGIGREGVRETMLEMTENKLIAITLL

SEQ ID NO: 4455 - protein, 84 aa, Glycine max
MEYQRQRSHQSQGRSRWVPASYFSVESLLLLSCLTASLLILPLLLPPLPPPPFLLLLLPIAILLVLIISAFMPSNVRDITHTYM

SEQ ID NO: 4456 - protein, 204 aa, Xylella fastidiosa Temecula1
MHLISNDFKNGQPIPVECAAGQTDGFAPNRNPHLAWDNVPENTRSFALLCIDPDVPSIPETIGRTDMEIPVTQPRIDFVHWVMTDISTDLRMIAHGSCSDGFVVGGKTMPPGPAGTHQGLNDYTKFFANTPEMAGDYYGYDGPYPPFNDLRIHRYLFRLFALDLEHLPLHKRFDGPTLLRTIQGHVLTEATLYGTYTLNPKAQK

SEQ ID NO: 4457 - protein, 367 aa, Malus x domestica
MGKGGQSCNGVVRDAKPVEQENMAVWLVDVNTIKILPFKLPAIGPNDVRIRIKAVVICGSDVHYLKTMKCADFEVKEPMVIGHECAGIVDTVGSEVKHLVPGDRVGEPGISCARCQQCKGGRYNLCPDMKFFATPPVHGSLANQIVHPADLCFKLPENVSLEEGAMCEPLSVGVHACRRANVGPETSVLIIGAGPIGLVSVLAARAFGAPRIVIVDMDDKRLAMAKSLGADEAVKVSTKMEDLDDRVAEIKKAMISEVDVTFDCVGFNKTMSTGLNATRPGGKVCLVGMGHGVMTVPLTPAAAREVDVVGVFRYQNTWPLCLEFLRSGKIDVKPLITHRFGFTEKEVEEAFATSARGGNAIKVMFKL

SEQ ID NO: 4458 - protein, 358 aa, Medicago sativa subsp. X varia
MENGKVHVVKPQSEARLAILELAHIMSVPTSLVAVLKMKVPEAIWQGGKNTPLSASQILSIVRPNGGGDAENLQRILRLLTTYAIFAEDLSSNGKRKYSLTDIGKALVPDDDGLSYATYVLQHYQDQYLRAWPLVGDAVEDASVEPFEKLHGEGAYAYCMKRPDEMSLFYASMSGLSMPHMNEMLEKYDGFKGVETLVDVGGNSGVILNMIMNKYPNILKGINFDLPDMISSAPQLPGITHVGGDALESVPAGDAIFTKWTMLTWTDEECKKVLQNCYKALPVNGKLIVCEPVSPELTDESQRTRALLSGDIFIMTMYRTKGKHRTEEQFKQLGISTGFLRFRAFHIDPYFPVLEFQK

SEQ ID NO: 4459 - protein, 493 aa, Actinobacillus pleuropneumoniae serovar 1 str. 4074
MKDLNVFDKNYGLLINGKWTQGSGNDLLPSYNPANGEVLAHFVDATDADVDAAVKAAQEAFKSWRKTTVAERAAILNKIADVIDENSELFALQETLDNGKPIRETRAADIPLASDHFRYFASAIRAGEGSLNQINQEELSLVLREPIGVVGQIIPWNFPFLMAAWKIAPALAAGCTVVIHPSSTTSLSLLSFAQKINHLLPKGVLNVITGKGSKSGEYMLHHKGFNKLAFTGSTEIGRHIAISAAELLIPATLELAAKSANIFFDDMPFDKALEGAQKGILFNQGQVCCAGSRIFVQEGIYDKFVAALAEEFKKVKVGLPWEDDTQMGAQVNAGQLNTILKYVKIGEEEGCRIITGGRKVLSDNLACGEFVEPTLIESKDNNSRIAQEEIFGPVATVIKFKTEEDVIRMANDSEYGLGGGVWTKDINRALRVSQAIETGRVWVNCYNILPAGAPFGGYKSSGIGRETHQMMLDAYTQVKNIYISTREEREGMY

SEQ ID NO: 4460 - protein, 205 aa, Ralstonia solanacearum GMI1000
MHASIPVSPSLPDTQRFALAPSEAFTIWMTGLSGAGKSTLAQEMQSRLRQHGRACYVLDGDVLRDGLSSDLGFSREDRCEQVRRVAHVARILNEAGVVAIVALVSPYRADRQLAHEIIGAGAMHEVWICTPLQVCQARDPKGLYQRASAGLLPAMTGVAAPYEPPPESTLRIDTSRHDVSTCASRILDAVGIYPCMNGSQHDVRR

SEQ ID NO: 4461 - protein, 263 aa, Escherichia coli
DRVNIEPGVPCGHCRYCLEGKYNICPDVDFMATQPNYRGALTHYLCHPESFTYKLPDNMDTMEGALVEPAAVGMHAAMLADVKPGKKIIILGAGCIGLMTLQACKCLGATEIAVVDVLEKRLAMAEQLGATVVINGAKEDTIARCQQFTEDMGADIVFETAGSAVTVKQAPYLVMRGGKIMIVGTVPGDSAINFLKINREVTIQTVFRYANRYPVTIEAISSGRFDVKSMVTHIYDYRDVQQAFEESVNNKRDIIKGVIKISD

SEQ ID NO: 4462 - protein, 182 aa, Brassica napus
  unsure (1)..(182): unsure at all Xaa locations
MAETLKEDSIXFREVWNDNLLEEFALIREIVDKFTYVAMDTEFPGVVLKPVETFKHNNDLNYRTLKENVDLLKLIQVGLTFSDEDGNLPTCGADDKFCVWQFNFREFNIGEDIYASESIELLRQCGIDFKKNLERGIDVARFGELMMSSGIVLNDSISWGTFHGGYDFGYXLVKLLTCKELP

SEQ ID NO: 4463 - protein, 122 aa, Buchnera aphidicola str. Sg (Schizaphis graminum)
MSITKEQILEAVSEMSVMNVVELISAMEKKFGVSANMSVNTNNNSEKSTIEEKTEFDIFLKSIGPNKVSVIKSVRSATGLGLKEAKDLVESAPTVLKENMSKNDAESLKKTLEDAGAEIEIK

SEQ ID NO: 4464 - protein, 315 aa, Glycine max
MAAAIEIPTIVFPNSSAQQRMPVVGMGSAPDFTCKKDTKEAIIEAVKQGYRHFDTAAAYGSEQALGEALKEAIHLGLVSRQDLFVTSKLWVTENHPHLVLPALRKSLKTLQLEYLDLYLIHWPLSSQPGKFSFPIEVEDLLPFDVKGVWESMEECQKLGLTKAIGVSNFSVKKLQNLLSVATIRPVVDQVEMNLAWQQKKLREFCKENGIIVTAFSPLRKGASRGPNEVMENDVLKEIAEAHGKSIAQVSLRWLYEQGVTFVPKSYDKERMNQNLHIFDWALTEQDHHKISQISQSRLISGPTKPQLADLWDDQI

SEQ ID NO: 4465 - protein, 330 aa, Candida albicans SC5314
MWSKEEKKQKREKKMYVQPQQRTYYLLLMFRLFARRNYSIHWRFKDVCPSPRYDTGCTYCQPEFPTNLAIDFDKNLNKTGAIPTKHVMVLTNPINQISELPSKTEFIPNSIPSEITKYRTMIQTDDQRVTISVIHLNNNRHQQILDQYNIKPGSSQQLVFLYPSMKIIRFDLSVSDQFVKKYLYSKPTAPVYNPFVQTKPSAPNNDLFDSIIVDESNFIEDELDKDLLVICGHAKRDLRCGIIAPQLESEFNQVLVRHNLQDTIYTGQVSHVGGHAYAGNVLYYPKDCQTSKDFIWYGRVFPKDVQGIVESTIINKEIIKDLFRGDIEAY

SEQ ID NO: 4466 - protein, 425 aa, Vibrio vulnificus YJ016
MSDDNSQQMTPEEVLRQQALDYHALPTAGKIAVALTKPAETAKDLALAYSPGVAEPVREIAQNPDNVYKYTSKGNMVAVISNGTAILGLGNLGPLASKPVMEGKALLFKRFAGLDSIDIEVKHRTIDEFVDTVANIADTFGGINLEDIKAPDCFEIEKRLIERCDVPVFHDDQHGTAIVTAAGMLNAIELQGKKLNECIIVCLGAGAAAVACMELLIKCGAMREKIYMLDRKGVIHTRRDDLNEYKQLFANNTDKRTLEDVISGADLFLGVSGPNLMPAEALKLMADKPVVFACSNPDPEIKPELAHEVRSDLIMGTGRSDYPNQVNNVLCFPFIFRGALDVRASEINDEMKLAAVEAIRQLAKEPVPEAVLKAAGVESLSFGPQYIIPKPMDSRLLPRVAKAVAQAAVDTGVARIPMPENYMAG

SEQ ID NO: 4467 - protein, 194 aa, Zea mays
APAFCELSLPLTKEEAAFSPSHPAMQRHVASGRPSGTDGSDFSYRMVVESRYQRVAEGRSRLARLILVQALHLVAGGLLLLLSLSKGAAVNKFAVLSMAAGFLAIVVGELGRMRTMSVLLRLYTSLSSIAVAFSVTCIIRSELFLKVMKQNTEAITSYEMLDAVRVALGILLQMVVIATTTRLLQNMSPPKRAS

SEQ ID NO: 4468 - protein, 363 aa, Exiguobacterium sp. 255-15
MMTKLVTAVEDTTKVKTMRALVKEERGFGAVLKEVAVPSPKRGEVLIRVEATSICGTDVHIYEWDAWAASRVNPPYVFGHEFSGEVVELGEGTKRLKLGDRVSAETHIVCHQCKQCLRGQYHICKNTKIIGVDTQGCFAEYVVMPEENLWVNPEDMPAAIASIQEPMGNAVHTVLASDVSAKTVAIVGCGPIGLMAVSVAKAAGAAEVIAIDVNPYRLELAKTMGADVVIDSRHEDVLERVRMMTDGDGIDVVCEMSGHPVAIRQAFEMVTAGGDVNILSLPVKPVEIDLTNHVVFKGVRVQGITGRKMYETWSQVSAFLSSGKVDVKPLITHTLPLERFEEGFELMRQGKCGKVVLQPRGTN

SEQ ID NO: 4469 - protein, 129 aa, Brassica napus
LCVSALKSDPRSPTADTKGLAAIMASVGMTNATATASYIAKNLTATANNTVLKKVLKDCSDKYILAADSLRLTIQDLDDEAYDYAYMHVLAAQDYPNVCRNIFRRAKGLVYPAEISRCEVSLRSICVVV

SEQ ID NO: 4470 - protein, 378 aa, GIBBERELLA ZEAE PH-1
MLSRGSLRSAQLLRGVAKQQPQLARSFATVQSDIFKPAKYGGKYTVTLIPGDGIGTEVAESVKTVFKADNVPVEWEQIEVSGLEGAGRTEDAFRESVASLKRNKLGLKGILHTPISRSGHQSFNVAMRQELDIYASISLIKNIPGYETRHKDVDLCIIRENTEGEYSGLEHQSVEGVVESLKIITRAKSERIARFAFSFALANGRSKVTCIHKANIMKLADGLFRSTFHQVAKDYPTLETNDMIVDNASMQAVSRPQQFDVMVMPNLYGGILSNIGAALVGGPGIVPGCNMGREVAVFEPGCRHVGLDIKGKDQANPTAMLLSGSMLLRHLGLDEHANRISKATYAVIADGKVRTPDMGGKSTTHEFTRAILDKLETV

SEQ ID NO: 4471 - protein, 115 aa, Glycine max
  unsure (1)..(115): unsure at all Xaa locations
MKPMKKQAGAGMDAPFTGLKSMAGFPTRKTINDFSFIAXFGGRVLCMQVWPPVDKKKFVTLSYLPDLDDAQLAKEAEYLLRKGWIPCLEFQLEHGFLYREHIGSPXYYYGRYWSL

SEQ ID NO: 4472 - protein, 327 aa, Arabidopsis thaliana
MVASGHEVVTLTFPIGSVHHLMPVLALGTAASPPPEPIVLKRTVLEAIKLGYRHFDTSPRYQTEEPLGEALAEAVSLGLIQSRSELFVTSKLWCADAHGGLVVPAIQRSLETLKLDYLDLYLIHWPVSSKPGKYKFPIEEDDFLPMDYETVWSEMEECQRLGVAKCIGVSNFSCKKLQHILSIAKIPPSVNQVEMSPVWQQRKLRELCKSKGIVVTAYSVLGSRGAFWGTHKIMESDVLKEIAEAKGKTVAQVSMRWAYEEGVSMVVKSFRKDRLEENLKIFDWSLTEEEKQRISTEISQSRIVDGEVYISEKGPIKSVTEMWDGEI

SEQ ID NO: 4473 - protein, 505 aa, Brassica napus
MTSINVKLLYHYVITNLFNLCFFPLTAIVAGKAYLTIDDLHHLYYSYLQHNLITIAPLLAFTVFGSVLYIATRPKPVYLVEYSCYLPPTHCRSSISKVMDIFFQVRKADPSRNGTCDDSSWLDFLRKIQERSGLGDETHGPEGLLQVPPRKTFARAREETEQVIIGALENLFKNTNVNPKDIGILVVNSSMFNPTPSLSAMVVNTFKLRSNVRSFNLGGMGCSAGVIAIDLAKDLLHVHKNTYALVVSTENITYNIYAGDNRSMMVSNCLFRVGGAAILLSNKPRDRRRSKYELVHTVRTHTGADDKSFRCVQQGDDENGQTGVSLSKDITDVAGRTVKKNIATLGPLILPLSEKLLFFVTFMGKKLFKDEIKHYYVPDFKLAIDHFCIHAGGKAVIDVLEKNLGLAPIDVEASRSTLHRFGNTSSSSIWYELAYIEPKGRMKKGNKVWQIALGSGFKCNSAVWVALNNVKASTNSPWEHCIDRYPVKIDSDSGKSETRVPNGRS

SEQ ID NO: 4474 - protein, 489 aa, Xanthomonas axonopodis pv. citri str. 306
MEALSETLRGIAARGPLGLFIDGQWRASTGDRTVDVIAPHTEERLLRYTEPSPSDTEAAIAAARSAFDNGPWPQLSPQERSVVLKRVADHLRARMPELAEAWTGQVGATLGFSKRASQQAPDLFDYYADLIATHAFVQPRVRPSGGRVHVVQEPVGVVAAITPWNAPLVLLCYKVAAALAAGCTVVAKPSPETPIDAYILAECISAAGVPDGVFNLLPAGREVGEQLIRHPHVDKISFTGSTQAGRSIGIACAERLARVGLELGGKSAAIVLEDADLAKMLPTLVPYSMPIAGQVCFSLTRVLVPTQRREEILQAYCTALSAVKLGDPFAADTGMGPLALGRQLERVQSYIAKGKAEGARLVMGGSRPAHLSRGFFVEPTVFAEVMPDMAIAREEIFGPVVSFIDYHDEADLIAKANASDYGLHGTIYSEDAERAYRIARRVRSGSHAINGMWVDISMPFGGFKHSGIGREGGIEGLHAFLETRTLYLS

SEQ ID NO: 4475 - protein, 324 aa, Actinobacillus pleuropneumoniae serovar 1 str. 4074
MAKQIKKIAVLTSGGDAPGMNAAIRGVVRAALNEGLEVYGVQDGYYGLYTDRVIPLDRRSVSETINRGGTFLGSARFPQFKDPDVRKKSVETLKKYDIDALVVIGGDGSYMGAKLITEEFGYPCIGIPGTIDNDIVGTDYTIGYQTALETAVEAIDRLRDTSTSHQRISIVEIMGRHCGDLTISAALASGCEYIIVPEKGLDKESLMRNIEDGFNKGKRHAIIAITELMTDVQALAKEIEDRFGHETRATVLGHIQRGGAPCPFDRILASRMGVYAVDLLLQGHGGRCIGIKNENLVHHDIIDAINNMRRPFKEELFEAARKLF

SEQ ID NO: 4476 - protein, 342 aa, Pyrococcus horikoshii OT3
MKAKDIVLKKSEKIEGVEVKGPWLDDAQSLEEVVSYYYRIGFQATHLGRAIEIWRKVEEKRERGEEIRVFLGYTSNIISSGLREIIAWLVKEKKVDVIVTTAGGVEEDFIKSLKPFILGDWEVDDAELRKKGVNRIGNIFVPNDRYIEFEKYMIPFFERVLKIEEKLSRPLTASEFIYEMGRYMDEKLGKEKEKSVIYWAYKNNIPIFCPAITDGSIGDMLYFFKEERRDSRLIIDIANDIVKLNNLAITAKETASIILGGSLPKHAIINANLFRGGTDYAIYISTAVPWDGSLSGAPPREGVSWGKIKAKADYVEVWGDATLIFPILVWMVMKARGQGYAQ

SEQ ID NO: 4477 - protein, 73 aa, Triticum aestivum
MASRSCTFLEILLAVILPPLGVFLRYGCCSMEFLICLLLTILGYIPGIIYAVYVLVAHGSASEESGRDYDALA

SEQ ID NO: 4478 - protein, 457 aa, Streptomyces avermitilis MA-4680
MNVSVVLFTSDLRLHDHPPLRAALDGARQVVPLFVRDRAVDGAGFAAPNRLAFLADCLRDLDAGLRERGGRLVLRSGDVVDQVCKVAAEADADEVHLAAGVSAYAHRREQRLRSALEADGRRLHVHETVITAVAPGAVTPSSSDHFAVFTPYFRHWEREHLRDALGAPRGVRVPESVGSERLPTRTELSGLSQGLAAGGEEEGRKRLMAWLRGGITAYEDRHDDLAGDATSHLSPHLHFGTLSPVELVHRARRTGGPGAEAFVRQLAWRDFHYQVLAARPDAATADYRGRGDRWRSEAAAREEVEAWRTGRTGYPVIDAAMRQLRHEGWMHNRGRLLTASFLTKTLYVDWRVGARHFLELLVDGDVANNQLNWQWMAGTGTDTRPNRVLNPVTQAKRYDPDGAYVRRWVPELEGLRGAAVHEPWKLKGLDRAAYDYPDPIVELADGLARFRHARGRD

SEQ ID NO: 4479 - protein, 115 aa, Triticum aestivum
AEILRGHGGPSLGFVKLPPRVRPARPRVPGIATRWSNVLRTGSVAAKFVAVDFGTLMFTMERGRDMRELKEFILGQPEAYEFKVGDQFFRRPGDPPLDQVIQMLRKHKDKSEDEL

SEQ ID NO: 4480 - protein, 187 aa, Triticum aestivum
MSVAWRLLSSNTMAPTVMGSSATSVAPFQGLKSTAGLPISRRSSSAGLSSVSNGGRIRCMQVWPIEGINNFESVGDLLPLSTEALLKQVDYLIRSKWVPCLEFSKVGFVFREHNSSPGYYDGRYWTMWKLPMFGCTDATQVLNEVEEVKKEYPDAYVRVIGFDNLRQVQCVSFIAFRPPGCEESGKA

SEQ ID NO: 4481 - protein, 164 aa, Ustilago maydis 521
MSNPNLAEVMGDGPASIADKLTLLPGYEPDFSAVTFCLKEEDHTLGNSLRYIIMKDPRVEFCGYSNPHPSENKIHLRIQMYDNASALDALRDAIENLDQLFAAIGEAYDRSLSAGNYETYVEPKLDHERLAQMAEQGKKRRAEEKAREAEARKQAAQAAAGRPM

SEQ ID NO: 4482 - protein, 205 aa, Eucalyptus globulus subsp. globulus
MVRGKTQMKRIENDTSRQVTFSKRRNGLLKKAFELSVLCDAEVALIIFSPRGKLYEFSSSSLCKTIEKYQTRAKDMEAKTAEISMQPSKGNTLDMEKKIEHFEISRRRLLGEGLDSCSVEELQQTENQLERSLTKIRARKNHLIREHIERLKAEERKLLEEKRKLLQEIECGKGLTPVSSERPREEIRAESMDVETELFIGPPKR

SEQ ID NO: 4483 - protein, 93 aa, Triticum aestivum
MHPRSASTVRLCLVCLVLLLLTRDAHSRNLVGAVVVQKEKHKQSHGGHGAATLEPWGEEGSNAGAKRRQLQRDPTKWEEIHTDYIYTQDVKHP

SEQ ID NO: 4484 - protein, 294 aa, Triticum aestivum
VTILNKFVQKSRLVPVRNSRDIVDPRVRTGSTKVGQMVQPPRPARFGKCLLELSGNNAIIVMDDADIPLAVRSVLFAAVGTAGQRCTTCRRLLLHESIYQTFLDQLVEVYKQVRIGDPMEKGTLLGPLHTTASKESFLKGIQNIRSQGGKILLGGSAIESEGNFVQPTIVEISPAAPVVREELFGPVLYAMKFQTLKEAIEINNSVPQGLSSSIFTRKPDAIFKWIGPHGSDCGIVNVNIPTNGAEIGGAFGGEKATGGGREAGSDSWKQYMRRATCTINYGSELPLAQGINFG

SEQ ID NO: 4485 - protein, 126 aa, Zea mays
  unsure (1)..(126): unsure at all Xaa locations
KNSPGGGRGRRANTRRGRAAGHSSTDGPQAKRARXPASTRRKKHRGPDRTGPDQHEGGGGAQQRPAXXXPQTGDQPQRNEDRTDEEXAKGEXXNHKNXRKQGTGTHNXSTGRDREDNKPRNEKDGE

SEQ ID NO: 4486 - protein, 290 aa, Solanum berthaultii
LNSSYRVPFESFRVPFVDLQEATNNFDEKFHIGLGGFGKVYRGVLRDGTKVALKRCKRESSQGIEEFQTEIEILSFCSHPHLVSLIGYCDERNEMILVYDYIENGNLRSHLYGSDLPSMSWEQRLEICIGAARGLHYLHTSAVIHRDVKSINMLLDENFVAKITDFGLSKKGTELDQTHLSTLVQGTIGYLDPEYFIRGQLTEKSDVYSFGVVLFEVLCARPAIVQSLPREMVNLAEWAVDSHNKGQLEQIIDLNLAAKIRPESLRKFGETAVKCLALSSGDRPSMGDVL

SEQ ID NO: 4487 - protein, 244 aa, Glycine max
MEYSQYTTYSAEGVEAETYTSSCTTPSRSKKRNNNNTRRFSDEQIKSLETMFESETRLEPRKKLQLARELGLQPRQVAIWFQNKRARWKSKQLERDYGILQSNYNTLASRFEALKKEKQTLLIQLQKLNHLMQKPMEPGQRCTQVEAANSMDSESENGGTMKCEAEGKPSPSMEISEHLLGVLSDDDTSIKVEDFGLEDEHGLLNFAKHVDGSLTSPEDWNAFESNDLLGQSTTDDYQWWDFWS

SEQ ID NO: 4488 - protein, 175 aa, Mesorhizobium sp. BNC1
MAETATKLPVKSEKSVASPEGWAPFESLRREIDRLFDDFHPFGWRLPSRTAFDLEIPKFSRAAWQVAPAMDLVEKEKEYEITAELPGIDEKNVEIKLSNHTLTIKGEKKEEKEEKDKDYYLSERRYGSFQRSFRVPDGVDADKIEATFTKGVLTVRLPKTAQAQKADKKIEVKAA

SEQ ID NO: 4489 - protein, 175 aa, Zea mays
  unsure (1)..(175): unsure at all Xaa locations
MAPTVMMASSATAVAPFQGLKSAASLPVARRSTRSLGNVSNGGRIRCMQVWPAYGNKKFETLSYLPPLSTDDXLLKQVDYLLRNGWXIPCLEFSKXGFVYRENSXTSPCYYDGRYWTMWKLPMFGCTDAXTQVYKELQEXAIAAYPDAFHRVIGFDNVRQTQCVSFIAYKPPGSE

SEQ ID NO: 4490 - protein, 322 aa, Candida tenuis
MSASIPDIKLSSGHLMPSIGFGCWKLANATAGEQVYQAIKAGYRLFDGAEDYGNEKEVGDGVKRAIDEGLVKREEIFLTSKLWNNYHDPKNVETALNKTLADLKVDYVDLFLIHFPIAFKFVPIEEKYPPGFYCGDGNNFVYEDVPILETWKALEKLVAAGKIKSIGVSNFPGALLLDLLRGATIKPAVLQVEHHPYLQQPKLIEFAQKAGVTITAYSSFGPQSFVEMNQGRALNTPTLFAHDTIKAIAAKYNKTPAEVLLRWAAQRGIAVIPRSDLPERLVQNRSFNTFDLTKEDFEEIAKLDIGLRFNDPWDWDNIPIFV

SEQ ID NO: 4491 - protein, 321 aa, Capsicum chinense
MGSKYSKATNSINDALSSSYLVPFESYRVPLVDLEEATNNFDHKFLIGHGVFGKVYKGVLRDGAKVALKRRTPESSQGIEEFETEIETLSFCRHPHLVSLIGFCDERNEMILIYKYMENGNLKRHLYGSDLPTMSMSWEQRLEICIGAARGLHYLHTRAIIHRDVKSINILLDENFVPKITDFGISKKGTELDQTHLSTVVKGTLGYIDPEYFIKGRLTEKSDVYSFGVVLFEVLCARSAIVQSLPREMVNLAEWAVESHNNGQLEQIIDPNLVAKIRPESLRKFGDTAVKCLALSSEDRPSMGDVLWKLEYALRLQESVI

SEQ ID NO: 4492 - protein, 589 aa, Zea mays
  unsure (1)..(589): unsure at all Xaa locations
MCGILAVLGCSDWSQAKRARILACSRRLKHRGPDWSGLYQHEGNFLAQQRLAVVSPLSGDQPLFNEDRTVVVVANGEIYNHKNVRKQFTGTHNFSTGSDCEVIMPLYEKYGENFVDMLDGVFAFVLYDTRDRTYVAARDAIGVNPLYIGWGSDGSVWIASEMKALNEDCVRFEIFPPGHLYSSAGGGFRRWYTPHWFQEQVPRTPYQPLVLREAFEKAVIKRLMTDVPFGVLLSGGLDSSLVASVTKRHLVETEAAEKFGTELHSFVVGLEGSPDLKAAREVADYLGTIHHEFHFTVQDGIDAIEEVIYHDETYDVTTIRASTPMFLMARKIKSLGVKMVLSGEGSDELLGGYLYFHFAPNKEEFHRETCRKVKALHQYDCLRANKATSAWGLEVRVPFLDKEFINVAMGMDPEWKMYDKNLGRIEKWVMRKAFDDDEHPYLPKHILYRQKEQFSDGVGYNWIDGLKSFTEQQVTDEMMNNAAQMFPYNTPVNKEAYYYRMIFERLFPQDSARETVPWGPSIACSTPAAIEWVEQWKASNDPSGRFISSHDSAATDHTXAVSRRWPTAAATXAANGTVNGKDVAVAIAV

SEQ ID NO: 4493 - protein, 122 aa, Glycine max
  unsure (1)..(122): unsure at all Xaa locations
APSLISTAAVTTVNRAGARMDAPFTGLKSMAGYPTRKTNHDITSIASNRGRVQCMQVWPPLGKKKMETLSYLPHLDDAQLATDVEYLLRNGGIPCXEFQLQHGIEYREHNRSPAYYNGRYWT

SEQ ID NO: 4494 - protein, 321 aa, Capsicum chinense
MGSKYSKATNSINDALSSSYLVPFESYRVPLVDLEEATNNFDHKFLIGHGVFGKVYKGVLRDGAKVALKRRTPESSQGIEEFETEIETLSFCRHPHLVSLIGFCDERNEMILIYKYMENGNLKRHLYGSDLPTMSMSWEQRLEICIGAARGLHYLHTNGVMHRDVKSSNILLDENFVPKITDFGISKKGTELDQTHLTTVVKGTLGYIDPEYFIKGRLTEKSDVYSFGVVLFEVLCARSAIVQSLPREMVNLAEWAVESHNNGQLEQIVDPNLADKIRPESLRKFGDTAVKCLALSSEDRPSMGDALWKLEYALRLQESVI

SEQ ID NO: 4495 - protein, 274 aa, Brassica napus
  unsure (1)..(274): unsure at all Xaa locations
MIAAGAKSMLGLSIASPKGVSDSNSRSVGVLRACVSMEGSQTMSHNKNGSIPELKAVNGHTGQKQGPLSTVGNSTNIKWHECPVEKVDRQRLLDQKGCVIWVTGLSGSGKSTLACALNQXLYQKGKLCYILDGDNVRHGLNRDLSFKAEDRAXENIRRVGEGAKLFADAGIICIASLISPYRRDRDAWRTLLPEGDFVEVFMNVPLEVCEARDPKGLYKLARAGKIKGFTGIDDPYEPPLNCEISLGEEGTGTSPIEMAETVVAYLEHKGYLKA

SEQ ID NO: 4496 - protein, 511 aa, Oryza sativa (japonica cultivar-group)
MARMGISKGGSGKEAKKPPLLLGRFEVGKLLGQGNFAKVYHARNVATGEEVAIKVMEKEKIFKSGLTAHIKREIAVLRRVRHPHIVQLYEVMATKLRIYFVMEYVRGGELFARVARGRLPEADARRYFQQLVSAVAFCHARGVFHRDIKPENLLVDDAGDLKVSDFGLSAVADGMRRDGLFHTFCGTPAYVAPEVLSRRGYDAAGADLWSCGVVLFVLMAGYLPFQDRNLAGMYRKIHKGDFRCPKWFSPELIRLLRGVLVTNPQRRATAEGIMENEWFKIGFRRFSFRVEDDRTFTCFELDDDAAVDAPTSPPDTPRTVDSGDVGAAPTRPRKAGSLTSCDSAPSLLEGRFGLGGSSRRRSSLNAFDIISFSPGFDLSGLFDQDDGGGAGAGSIPEQQKHTARFVSAAPVEVIVATLEAAAAAAGMAVREREDGSISMEGTREGEHGALAVAAEIYELTPELVVVEVRRKAGGAAEYEEFFRARLKPSLRELVCDDRPCPEDSGELSRSL

SEQ ID NO: 4497 - protein, 570 aa, Glycine max
MVCTANDLQGWKDFPKGLRVLLLEGDSSSAAEIREQLEAMDYKVSTFYDENEALSALSSSPKGFHVAIVEVSTSCSLGGFKFLENAKDLPTIMTSKDQCLNTMMKCIALGAVEFLSKPLSEDKLKNIWQHVVHKAFNSGENVLSESLKPVKESVESMLQLQTDIGQDKSRISIDLENVSRFSDNDHEQSAVCDKYPAPSTPQLKQGTRLLDDGDCHEQTNCSTEKESGEHDRECKSVETSCGNLNAESSPQPREPDKTLIREEDDFANVSKGESAVSLNPHNKKFLSNADGNTSPNKTGVLNDSCEIKANRKKVKVDWTPELHKKFVKAVEQLGIDQAIPSRILEIMKVEGLTRHNVASHLQKYRIHKRQSAPREEDRKWHNQGDAMQRNYYMQRPIMAYPPYHSHHTLSPAPIYPMWGQPGSQTAGVQIWGHPGYPMWHPTESWHWKPYPGVHVDAWGCPLVPPPQAPCFPYNQNTPGLHNPKAVDYRFSMPRSSFEHHPAEEVVDKVVKEAISKPWLPLPLGLKPPSMDSVLAELSKQGIPSIPLGNKGSSTPKPRRDVRPTPPPGPT

SEQ ID NO: 4498 - protein, 311 aa, Capsicum chinense
MGSKYSKATNSISDASNSFESYRFPLEDLEEATNNFDDKFFIGEGAFGKVYKGVLRDGTKVALKRQNRDSRQGIEEFGTEIGILSRRSHPHLVSLIGYCDERNEMVLIYDYMENGNLKSHLTGSDLPSMSWEQRLEICIGAARGLHYLHTNGVMHRDVKSSNILLDENFVPKITDFGLSKTRPQLYQTTDVKGTFGYIDPEYFIKGRLTEKSDVYSFGVVLFEVLCARSAMVQSLPREMVNLAEWAVESHNNGQLEQIVDPNLADKIRPESLRKFGETAVKCLALSSEDRPSMGDALWKLECALRLQESVI

SEQ ID NO: 4499 - protein, 113 aa, Rickettsia monacensis
ANEAVINMLKEIGSSENIPKYIAKAKDKNDPFRLMGFGHRVYKNYDPRAAVLKETCKEVLKELEQLENNPLLQIAIELEAIALKDEYFIERKLYPNVDFYSGIIYKAMGIPSQ

SEQ ID NO: 4500 - protein, 164 aa, Saccharum hybrid cultivar CP72-2086
MAAPRRLSSCCLLFAVLLGAVLATATAFFEQAAAAGVGLGHGARFARKHGRAAAELPQPEPQPKPEPKPEPQPQPEPLPKPEPQPKPTPKPEPKPKPEPVPKPEPKPEPEPKPHPKPEPKPEPEPKPEPKPEPKPKPKPEPKPEPLPKPEPKPEPKPEPKPEPL

SEQ ID NO: 4501 - protein, 316 aa, Capsicum chinense
MGSKYSKATNSISDASNSFESYRFPLEDLEEATNNFDDKFFIGEGAFGKVYKGVLRDGAKVALKRRTPESSQGIEEFETEIETLSFCRHPHLVSLIGFCDERNEMILIYKYMENGNLKRHLYGSDLPTMSMSWEQRLEICIGAARGLHYLHTRAIIHRDIKSINILLDENFVPKITDFGISKKGTELDQTHLSTVVKGTLGYIDPEYFIKGRLTEKFDVYSFGVVLFEVLCARSAIVQSLPREMVNLAEWAVESHNNGQLEQIVDPNLADKIRPESLRKFGDTAVKCLALSSEDRPSMGDVLWKLEYALRLQESVI

SEQ ID NO: 4502 - protein, 294 aa, Sesbania rostrata
MEQYEKVEKIGEGTYGVVYKARDRVTNETIALKKIRLEQEDEGVPSTAIREISLLKEMQHRNIIRLQDVVHSEKRLYLVFEYLDLDLKKHMDSSPEFVKDPRQVKMFLYQILCGIAYCHSHRVLHRDLKPQNLLIDRRTNSLKLADFGLARAFGIPVRTFTHEVVTLWYRAPGILLGSRHYSTPVDIWSVGCIFAEMVNRRPLFPGDSEIDELFKIFRILGTPNEDTWPGVTSLPDFKSTFPKWPPKDLATVVPNLEQAGLNLLSSMLCLDPSKRITARSAVEHEYFKDIKFVP

SEQ ID NO: 4503 - protein, 206 aa, Ehrlichia sp. Belluno
AACASKITFIDGEKGILRYRGYDIEYLVNMQHSFLEIAYLLFYGVLPNKDEFENFSCNVIEEHSLPQQVYNIIQSFPRNSHPMAILSACFATLSAHYHDSEVVNDYLRCAILSVAKVPSIIAAIYRYIVNKDIILSHKSLSYSRNFANMMLLDFKNDKVNDVVAKALDVIFILHADHEQNASTASVRLAGSAGANLFACLTCWSRT

SEQ ID NO: 4504 - protein, 129 aa, Triticum aestivum
  unsure (1)..(129): unsure at all Xaa locations
PTVMASSATSVAPFQGLKSTAGLPVSRRSNGASLGSVSNGGRIRCMQVWPIEGIKKFETLSYLPPLSTEALLKQVDYLIRSKWVPCLXEFKQVGFIFRXEHNAXPGYYDGRYLDMXELPMFXGCTDPTQ

SEQ ID NO: 4505 - protein, 92 aa, Zea mays
MTMTSRFVAAASSSSSSCPLARLISRRGLAGAADGHGPAKVPLWKDPLSPSKWKEEHFVLASLSMWGALFYGGFKFFGGKKEDKIEAASGQT

SEQ ID NO: 4506 - protein, 428 aa, Shewanella oneidensis MR-1
MADLKAKLELPGNDSIELPVKQGSAGFDVIDISKLGSKGYFTFDPGFLATASCESAITYIDGDQGILLHRGYPIEQLAVDSDYLDLCYLLLYGELPTKEQYAEFVHTVKTHTMVHEQIAFFFRGFRRDAHPMAMLCGVTGALSAFYQDSLDVNDPRHREIAAYRLVSKMPTIAAMCYKYSSGQPFVYPRNDLSYAGNFLSMMFAVPCEEYKVNPIVERAMDRIFILHADHEQNASTSTVRLAGSSGANPFACIAAGIASLWGPAHGGANEACLQMLEEIGSVDRIPEFIARAKDKNDPFRLMGFGHRVYKNFDPRAKVMRETCHEVLKELKVQDPLLDVAMELERIALEDEYFISKKLYPNVDFYSGIIMKAIGIPTSMFTVLFALSRTVGWIAHWKEMLDQPGHKISRPRQLYTGETARDFVDLDKR

SEQ ID NO: 4507 - protein, 530 aa, Zea mays
MGACVSRPSACVGKPHTPRSGDASGRSGGGGGARRRRSRRVGKGRRTAPSRAASMETIQEAEVPGSSSAAAADHRTYSNPAFQVSGTGSIEEAWYDSLAMSESDAEDDFHSVQDDAFSLNGFENEAALSMRDGNGGSFNGAAQSGEQHHKKPKSSELSKGSSENGVRTSISHEDAVSFSGADNTHGGERILEVCGLLPNNCLPCIASAVGVSEKKRTLSSSPTHSMRMPSLKLSFKKKSGEAHPSSTLLSTKDFLERPLAGSQVQLCLLETNMPNSWTHIDPGTFRVRGANYFRDKKKELAPNYAAYYPFGVDVYLSPQKLNHISRFVELPDIQLSSKLPPLLVVNVQVPLYPASLFQNETDGEGMSFVLYFRLSDGYSKELPPSFIESIRRLIDDHVEKIKAFPMETTIPFRERLKILGRVANLEDLPLSAAERKLMHAYNEKPVLSRPQHEFYLGDNYFEIDIDMHRFSYISRKGFATFLDRLKACVLDVGLTIQGNKAEELPEQILCCVRLNGIDYTKYQPLLTHAA

SEQ ID NO: 4508 - protein, 365 aa, Bradyrhizobium japonicum USDA 110
MIAPALQFWGNVMQLIVLPGDGIGPEITTATSGVLRAASERFQLNLRLEEHAVGHASLKQFGTTVRPELLDIVRGADGLILGPTATFDFKDEAHGEINPSRHFRKNLDLYANVRPARTYAGRPGRLGDFDLVVVRENTEGFYADRNMEQGNGEMLVTPDVAISLRRITRACCERIAHAACRLAMKRRRHLTIVHKANVLKIGDGMFLDICRAAAKGYAGLEVDDILVDAMMAHVVRNPDRFDVIVATNMFGDILSDLTAELSGSLGLGGSLNVGDRYAMAQAAHGSAPDIAGQDVANPVSLILSTALLLAWHGERSGAVRYEEAARAIEAAVAKAIGEGRATRDVGGRLGTIAAGAAIAEILQGA

SEQ ID NO: 4509 - protein, 246 aa, Zea mays
ATNSNARGSGAEMQGGATAKLQSPVTVMRPVRGDLEEHLPKPYLARALVAPDIYHPDGTAADEHGHHHMSVLQQHVAFFDRDDNGIIYPWETYSGCRALGFNMILSLLIALVVNGTMSYATLPGWLPSPLFPIYVHNIHKSKHGSDSGTYDNEGRFMPVNFENLFSKYARTSPDRLTYRELWSMTEGFRDAFDLYGWIAAKLEWTILYVLARDDEGYLSREAMRRVYDGSLFEYVERQRAQHAKMS

SEQ ID NO: 4510 - protein, 425 aa, Lactobacillus gasseri
MATVIKNGTVYQNGRLIKADVLIEGKKIKAIGTDLDAEKIIDAQGMLVSPGLVDVHVHYRDPGQTYKEDIKTGSEAAARGGFTTVGAMPNVTPVPNTPELMKKMVEENKHKGVVHIFQYGPITNDETTDIIPDYAALKKAGAFALSNDGHGVQTAQTMYLAMQKAKENNLIIATHAQDDSLFNKGIVNEGVAAKKLDLPPVTELAETTQIARDLLLAQKTGVHYHICHVSTKTSVELVRLAKARGINVTCEVAPHHILLTDSDIPKDNGYFKMNPPLRNKEDQAALLVGLLDGTIDLIATDHAPHAKSEKQGGMKNAAFGITGSETAFSTLYTKFVKEEKVLSLEQLLALLSDKPAKVFGIENAGVLEPGKNADVAIFDIEHKNEIKEADFKSKGVNTPFTGQKVYGETVMTLVDGEVVYQRGTK

SEQ ID NO: 4511 - protein, 65 aa, Glycine max
  unsure (1)..(65): unsure at all Xaa locations
FLQQATMICIDNSEWMRNGDYSPSRFQAQADAVNLICGAKTQSNPENTVGXLTXAGKGFFGPLEV

SEQ ID NO: 4512 - protein, 450 aa, Zea mays
  unsure (1)..(450): unsure at all Xaa locations
PWGSTAGDVAAVVDEEACMYAMQLASSSILPMTLKNAIELGLLEVLQKEXAGGGKAALAXPEEVVARXMPAAPGDPAAAAAMVDRMLXRLLASYDVVRCQMEDRDGRYERRYSAAPVCKWLTPNEXACPWAALALMNQDKVLMESWYYLKDAXVLDGGIPFNKAYGMTAFEYHGTDSRFNRVFNEGMKNHSVIITKKLLDFYTGFEGVSTLVDRGXGGVGATLHAITSRHPHISXGVNFDLPHVISEAPPFPGVRHVGGDMFASVPAGDAILMKWILHDWSDAHCATLLKNCYDXALPENGKVIVVECVLPVNTEATPKAXQGVFHVDMIMLAHNPGGKERYEREFRELAKGAGFSGFKATYIYANAWAIEFIKWNHRRRDEMAWLPHALLAWSLYRTSPSSSSSRSRVCMYFCLIFFLHIMHSGWPRLPPIHGGHVFGTSCRALACRGF

SEQ ID NO: 4513 - protein, 173 aa, Oryza sativa (japonica cultivar-group)
MYSLRLASSGSTGLGFALGRLGGRSGGGGGGGGLAPASASSSSVVSARTRRTVSVTPNAAAPTPGEQGVAMEQGKQQHQPPPPSQPQPQQEKRGSRDDDMHKTTGDVMTHSFGEGYSTRSDEEGFGGVYGQNDPVFNPGTEVHPSHPEYDTSQGSEVKEKEKARHHKDDKHAT

SEQ ID NO: 4514 - protein, 355 aa, Trichoderma asperellum
MSRSNAPNASASRKISFNVSEQYDIQDVVGEGAYGVVCSAIHKPSGQKVAIKKITPFDHSMFCLRTLREMKLLRYFNHENIISILDIQKPRSYDSFNEVYLIQELMETDMHRVIRTQDLSDDHCQYFIYQTLRALKAMHSANVLHRDLKPSNLLLNANCDLKVCDFGLARSAASQEDNSGFMTEYVATRWYRAPEIMLTFKEYTKAIDVWSVGCILAEMLSGKPLFPGKDYHHQLTLILDVLGTPTMEDYYGIKSRRAREYIRSLPFKKKVPFRTLFPKTSDLALDLLEKLLAFNPVKRITVEDALKHPYLEPYHDPDDEPTAPPIPEEFFDFDKHKDTLSKEQLKQLIYQEIMR

SEQ ID NO: 4515 - protein, 314 aa, Capsicum chinense
MGSKYSKATNSISDASNSFESYRFPLEDLEEATNNFDDKFFIGEGAFGKVYKGVLRDGTKVALKRQNRDSRQGIEEFGTEIGILSRRSHPHLVSLIGYCDERNEMVLIYDYMENGNLKSHLTGSDLPSMSWEQRLEICIGAARGLHYLHTNGVMHRDVKSSNILLDENFVPKITDFGISKKGTELDQTHLGTVVKGTLGYIDPEYFIKGRLTEKSDVYSFGVVLFEVLCARSAIVQSLPREMVNLAEWAVESHNNGQLEQIVDPNLADKIRPESLRKFGDTAVKCLALSSEDRPSMGDVLWKLEYALRLQESVI

SEQ ID NO: 4516 - protein, 410 aa, Rickettsia sp. AT1
DSEFAELKIRGKIFKLPIFKASIGEDVIDISRVSAEADCFTYDPGFMSTASCQSTITYIDGDKGILRHRGYDIKDLAEKSDFLEVAYLLIYGELPNSEQYNNFTKQVAHHSLVNERLHYLFQTFCSSSHPMAIMLAAVGSLSAFYPDLLNFKEADYELTAIRMIAKIPTIAAMSYRYSIGQPFIYPDNSLDFTENFLHMMFATHCTKYKVNPIIKNALNKIFILHADHEQNASTSTVRIAGSSGANPFACISTGIASLWGPAHGGANEAVINMLKEIGSSENIPKYIAKAKDKNDPFRLMGFGHRVYKNYDPRAAVLKETCKEVLKELGQLENNPLLQIAIELEAIALKDEYFIERKLYPNVDFYSGIIYKAMGIPSQMFTVLFAIARTVGWMAQWKEMHEDPEQKISRP

SEQ ID NO: 4517 - protein, 316 aa, Capsicum chinense
MGSKYSKATNSINDALNSSYLVPFESYRFPLVDLEEATNNFDSKGGFGKVYRGVLRDGTKVALKRHNRDSGQSIELFRTEFEILSRRSHPHLVSLIGFCDERNEMILIYKYMENGNLKRHLYGSDLPTMSMSWEQRLEICIGAARGLHYLHTNGVMHRDVKSSNILLDENFVPKITDFGISKKGTELDQTHLSTVVKGTLGYIDPEYFIKGRLTEKSDVYSFGVVLFEVLCARSAIVQSLPREMVDLAEWAVESHNNGQLEQIVDPNLADKIRPESLRKFGDTAVKCLALSSEDRPSMGDALWKLEYALRLQESVI

SEQ ID NO: 4518 - protein, 411 aa, Rickettsia sp. DT1
DSEFAELKIRGKIFKLPILKASIGEDVIDISRVSAEADCFTYDPGFMSTASCQSTVTYIDGDKGILRHRGYDIKDLAEKSDFLEVAYLLIYGELPSGEQYNNFTKQVAHHSLVNDRLHYLFQTFCSSSHPMAIMLAAVGSLSAFYPDLLNFKEADYELTAIRMIAKIPTIAAMSYKYSIGQPFIYPDNSLDFTENFLHMMFATPYTKYTVNPIIKNALNKIFILHADHEQNASTSTVRIAGSSGANPFACISTGIASLWGPAHGGANEAVINMLKEIGSSEYIPKYIAKAKDKNDPFRLMGFGHRVYKNYDPRAAVLKETCKEVLKELGQLDNNPLLQIAIELEAIALKDEYFIERKLYPNVDFYSGIIYKAMGIPSLMFTVLFAIARTVGWMAQWKEMHEDPEQKISRPR

SEQ ID NO: 4519 - protein, 462 aa, Erwinia carotovora subsp. atroseptica SCRI1043
MRSIKRLPMPPTRGVLGHVDYLKRSDIHLQMLRWKAQYGCFFRLRLGLSSAVVIADTEWIRTIMKSRPDEFRRISSIESVFQEAGLNGVFSSEGERWELQRKLTEPMFQPAHLKYFYSSLRKVTSRLSERFTMLAETGEAIALVDEFKRYTVDITSLLAFGEDVNTLEQGDNPLSQSLRHLFPIINERCESPIPVWRYIRRARDKQFDASLNLIREYVDGFISRQRQRIQLNPQLLEAPENMLQVMLAEQQKDGTLKDDDIVANAITLLIAGEDTTANTLTWMSFLLCSAPSVEECVFQECKEAAEGVGAILPWPLPRMAWLTAVMYESMRLKPVAPLLYLEPTRDTVIDDFLIKKGTPLLLMLNASGFNDELFQQPYDFMPERWLERGKAAFSDLQPFGGGPRMCPGRSLALMEIKLGFHALCSGFHVEALQVASAVTESFAFTVTPSGFRVKLHKRELQQ

SEQ ID NO: 4520 - protein, 380 aa, Saccharomyces cerevisiae
MEFVAERAQPVGQTIQQQNVNTYGQGVLQPHHDLQQRQQQQQQRQHQQLLTSQLPQKSLVSKGKYTLHDFQIMRTLGTGSFGRVHLVRSVHNGRYYAIKVLKKQQVVKMKQVEHTNDERRMLKLVEHPFLIRMWGTFQDARNIFMVMDYIEGGELFSLLRKSQRFPNPVAKFYAAEVILALEYLHAHNIIYRDLKPENILLDRNGHIKITDFGFAKEVQTVTWTLCGTPDYIAPEVITTKPYNKSVDWWSLGVLIYEMLAGYTPFYDTTPMKTYEKILQGKVVYPPYFHPDVVDLLSKLITADLTRRIGNLQSGSRDIKAHPWFSEVVWERLLAKDIETPYEPPITSGIGDTSLFDQYPEEQLDYGIQGDDPYAEYFQDF

SEQ ID NO: 4521 - protein, 359 aa, Capsicum chinense
  unsure (1)..(359): unsure at all Xaa locations
NMSYRVPFAALLEATSNFDESLVIGIGGFGKVYKGVLYDGTKLAVKRGNPKSQQGLAEFRTEIEMLSQFRHRHLVSLMGYCDEKNEMILVYEYMENGTLKSHLYGSDLPSMSWKQRLEICIGSARGLHYLHTGYAKAVIHRDVKSANILLDESFMAKVADFGLSKTGPELDQTHVSTAVKGSFGYLDPEYFRRQQLTEKSDVYSFGVVLFEVLCARPVIDPSLPREMVNLAEWAMKWQKKGQLEQIIDPTLVGKIRPDSLRKFGETAEKCLADFGVDRPSMGDVLWNXEYALQLQEAVIQDDPEENSTLLIGELSPQVNDFSQVDAGASAALIGTPNLDDLSGVSMSRVFSQLVKSEGR

SEQ ID NO: 4522 - protein, 411 aa, Rickettsia sp. FLA1
DSEFAELKIRGKIFKLPILKASIGEDVIDISRVSAEADCFTYDPGFMSTASCQSTVTYIDGDKGILRHRGYDIKDLAEKSDFLEVAYLLIYGELPSGEQYNNFTKQVAHHSLVNDRLHYLFQTFCSSSHPMAIMLAAVGSLSAFYPDLLNFKEADYELTAIRMIAKIPTIAAMSYKYSIGQPFIYPDNSLDFTENFLHMMFATPYTKYTVNPIIKNALNKIFILHADHEQNASTSTVRIAGSSGANPFACISTGIASLWGPAHGGANEAVINMLKEIGSSEYIPKYIAKAKDKNDPFRLMGFGHRVYKNYDPRAAVLKETCKEVLKELGQLDNNPLLQIAIELEAIALKDEYFIERKLYPNVDFYSGIIYKAMGIPSQMFTVLFAIARTVGWMAQWKEMHEDPEQKISRPR

SEQ ID NO: 4523 - protein, 314 aa, Capsicum chinense
MGSKYSKATNSINDALNSSYLVPFESYRFPLVDLEEATNNFDGKGGFGKVYRGVLRDGTKVALKRHNRDSGQSIEPFRTEFEILSRRSHPHLVSLIGFCDERNEMILIYDYMENGNLKSHLYGSDLPTMSWEQRLEICIGAARGLHYLHTSAAIHRDVKSTNILLDENFVAKITDFGISKKGTDLDHTHVSTHVKGAFGYLDPEYFIKGRLTEKSDVYSFGVVLFEVLCARSAIVQSLPREMVNLAAWAVESHNNGQLEQIIDPNLVAKIRPESLGKFGETAVKCLAPSSEDRPSMGDVLWKLEYALRLQESVI

SEQ ID NO: 4524 - protein, 322 aa, Xanthomonas axonopodis pv. citri str. 306
MTASPSKLAQLRELSVVVADTGDYDAIKRLKPVDCTTNPTLVKKALDLPVYADLIERELAWGREHGGDDRTATVNEVADRLTIGVGVKLAELVPGRVSTEVDADLAHDTQATIAKARKFIAMYAERGVSKDKILIKIAATWEGIEAARQLQKEGIDCNLTLIFNRSQALACAEAGVFLISPFVGRILDYYVAQGQTPASIDEDPGVVFVRTVYNEFKQRGSSTVVMGASFRSTAQIEALAGCDRLTISPDLLEKLDAEHGELPRKLSPAQADNAQFTPIDSDSFASGLAADPMATEKLAGGIDTFAKDLHALRKTIADKLAG

SEQ ID NO: 4525 - protein, 287 aa, Zea mays
MAMSDLTATVIPKPDGADDESVEIREVWADNLEEEFALIRDIVDEYPFVAMDTEFPGIVCRPVGAFRSPADYNYATLKANVDMLHLIQLGLTFSGPRGELPALGAGRRRCVWQFNFREFDDARDIFASDSIELLRRSGIDFRRNAERGVDARRFAELLMSSGVVLNDSVYWVTFHAGYDFGYLLKILTCNSLPDTQAGFFKLMKIYFPTVYDIKHLMKFCNSLHGGLNKLAELLDVERVGESHQAGSDSLVTSCAFWKLKDSFFAGSTEKYAGVLYGLNAENGVSAH

SEQ ID NO: 4526 - protein, 70 aa, Glycine max
  unsure (1)..(70): unsure at all Xaa locations
EALLATGSNSDTGYIAHAPSESNGLSDVLIXSSPILTGVSARARGLAAAAAAAAAGGVSGFEFGVDPNLD

SEQ ID NO: 4527 - protein, 392 aa, Pseudomonas stutzeri
MLCAEQIALIKATVPLLESGGEALTTHFYKLWLDEHPEVQPLFNQAHQASGEQPRALANGVLMYAKHIDRLEALGPLVGQIINKHVALQVLPEHYPLVGSCLLRAIREVLGEEIATEAVIDAWGAAYQQLADILIGQEESLYRAKAAAEGGWRGARPFRIIRKVAESEEITSFHLQPEDGGPLMDFLPGQYIGLRLEVDGQEVRRNYSLSAASNGSEYRISVKREPGGVASNALHAMPEGAVLELFGPAGEFTLEPGNKPLVLISGGVGITPTLAMLEQALASTRPVHFIHCARNAGVHAFRCSVDTLAERHAQLKRFYCYEEHDGAGAAPDAVGRLTEQQLGEWLPEDRNVDAYFLGPKPFMAAVRRQLKSLGVPEQQTRYEFFGPASALD

SEQ ID NO: 4528 - protein, 232 aa, Zea mays
  unsure (1)..(232): unsure at all Xaa locations
MGYEDSVYLAKLAEQAERYEEMVENMKAVASADQELSVEERNLLSVAYKNVIGARRASWRIVTSIEQKEESKGNEAQVGLIKEYRQKIEAELAKICEDILECLDGHLIPSAESGESKVFYHKMKGDYHRYLAEFAVGDKRKTSADKSLEAYKAATEVAASSLAPTHPIRLGLALNFSVFYYEILNSPDQACQXGQQAFDDAIAELDTLSEESYKDSTLIMQLLRDNLTLWTS

SEQ ID NO: 4529 - protein, 147 aa, Brassica napus
MRSPISGLFSRSLSFLHRTSPLTSAARHLCAVTSPEARTKNLERIADDLLNLNRIELYDYSILFSHKLGLNRYGSAVSSPAGDLPDASASAETKTAEKTAFDVKLEKFDSASKIKVIKEIRAFTELGLKEAKDLVEKAPVVVKTGVT

SEQ ID NO: 4530 - protein, 381 aa, Lycopersicon esculentum
MGEALKYSIMDSVRSVVFKESENLEGSCTKIEGYDFNKGVNYAELIKSMVSTGFQASNLGDAIAIVNQMLDWRLSHELPTEDCSEEERDVAYRESVTCKIFLGFTSNLVSSGVRDTVRYLVQHRMVDVVVTTAGGIEEDLIKCLAPTYKGDFSLPGASLRSKGLNRIGNLLVPNDNYCKFENWIIPVFDQMYEEQINEKVLWTPSKVIARLGKEINDETSYLYWAYKNRIPVFCPGLTDGSLGDMLYFHSFKKGDPDNPDLNPGLVIDIVGDIRAMNGEAVHAGLRKTGMIILGGGLPKHHVCNANMMRNGADFAVFINTAQEFDGSDSGARPDEAVSWGKIRGGAKTVKVHCDATIAFPILVAETFAAKSKEFSQIRCQV

SEQ ID NO: 4531 - protein, 376 aa, Musa acuminata
MEGGAAGGQRDRETLDAVRSVVFKPSVSLEEKRFPRVQGYDFNRGCDLIGLLDSISSTGFQASNLGDAIDVINQMIDWRLSHDAPTEDCSEEERNLAYRQSVTCKIFLGFTSNLVSSGIREIIRFLVQHRMVEVLVTTAGGIEEDLIKCLAPTYKGDFSLPGSYLRSKGLNRIGNLLVPNDNYCKFEDWIMPILDQMLLEQTTENVVWTPSKVIARLGKEINDESSYLYWAYKNNVSVYCPALTDGSLGDMLYCHSVRNPGLLIDIVQDIRAMNGEAVHVGLRKTGVIILGGGLPKHHICNANMFRNGADYAVYVNTAQEFDGSDSGAEPDEAISWGKIKGSAKTIKVHCDATIAFPLLVAATFARKFQERNNKLA

SEQ ID NO: 4532 - protein, 290 aa, Solanum sucrense
LNSSYRVPFESFRVPFVDLQEATNNFDEKFHIGLGGFGKVYRGVLRDGTKVALKRYTPESNQGLQEFQTEIEILSFCSHPHLVSLIGYCDERNEMILVYDYMENGNLRSHLYGSDLPSMSWEQRLEICIGAARGLHYLHTSAVIHRDVKPINILLDENFVAKITDFGLSKKRTELDQTHLSTLVQGTLGYLDPEYFNRGQLTEKSDVYSFGVVLFEVLCARPAIVQTPSRGMISLAEWVVESQKKGQLEQIIDPNIVAEIRPESLRIFGETAVKCLALSGEDRPSMGDVL

SEQ ID NO: 4533 - protein, 118 aa, Glycine max
MATFMLKLVLPLLFLFMIPPKTAYAEFEQWCVADEQTTESELQAALDWACGKGGADCSKIQVNQPCYLPNTLKDHASYAFNSYYQKFKHSGGSCYSRGAAITTEVDPSHGSCHYDFIP

SEQ ID NO: 4534 - protein, 582 aa, Triticum aestivum
MDTHIGSVDGPSPAAVNGAVGCPASAPGCPIMSSHPVVFAVPGDFNLTLLDHLVDEPGLRLVGCCNELNAGYAADGYARARGVGACAVTFTVGGLSVLNAIAGAYSENLPVICIAGGPNSNDYGTNRILHHTIGIPDFSQELRCFQTVTCHQAVVTNLDDAHEQIDTAIATALRESKPVYLSISCNLPGLPHPTFTRDPVPFFLAPRMSNKMGLEAAVEATVEFLNKAVKPVLVAGPKLRVAKAGKAFVDLVDASGYAYAIMPSAKGFVPETHPHFLGTYWGAVSTAFCAEIVESADAYLFAGPIFNDYSSVGYSFLLKKDKAIIVQPERVIVGNGPAFGCVMMKEYLSALAKRVQKNTTAYENYKRIFVPEGHPLKGEANEPLRVNVLFKHIQDMLTGDSAVLAETGDSWFNCQKLKLPEGCGYEFQMQYGSIGWSVGALLGYAQGASDKRVIACIGDGSFQVTAQDVSTMLRCEQNSIIFLINNGGYTIEVEIHDGPYNVIKNWNYTALVEAIHNGEGKCWTAKVKCEEELTAAIETALGEKKDSLCFIEVIAHKDDTSKELLEWGSRVSAANSRPPNPQ

SEQ ID NO: 4535 - protein, 290 aa, Solanum sucrense
LNSSYRVPFESFRVPFVDLQEATNNFDEKFHIGLGGFGKVYRGVLRDGTKVALKRYTPESNQGLQEFQTEIEILSFCNHPHLVSLIGYCDERNEMILVYDYMENGNLRSHLYGSDLPSMSWEQRLEICIGAARGLHYLHTSAVIHRDVKPINILLDENFVAKITDFGLSKKRTELDQTHLSTFVQGTLGYLDPEYFNRGQLTEKSDVYSFGVVLFEVLCARPAIVQTPSRGMISLAEWVVESQKKGQLEQIIDPNIVAEIRPESLRIFGETAVECLALSGEDRPSMGDVL

SEQ ID NO: 4536 - protein, 331 aa, GIBBERELLA ZEAE PH-1
MGIVDQPQSKGQESTPGDFAAVQKSIIDLLNQPDYDDGSAGPVLVRLAWHSSGTYDKVTDTGGSNGAGMRYEAEGGDPANAGLQNARVFLEPVKRLHPWITYSDLWTLAGVTAIHAMGGPEIDWLPGRTDFVDDSKLPPRGRLPDAAQGAEHIRHIFYRMGFNDREIVALSGAHNLGRCHTANSGFEGKWVNNPTRFSNQYFRLLLSETWTEKTIPESGLLQFSSVDQDTEEELMMLPTDIALTTDSEFSKYVQLYAKDKDVFFQDFKKAFAKLLELGIARNSEGKVINTDNQKGGYRSAPKKSDSTPATSGQPGASKTGGCPVMHHKAKL

SEQ ID NO: 4537 - protein, 290 aa, Solanum sucrense
LNSSYRVPFESFRVPFVDLQEATNNFDEKFHIGLGGFGKVYRGVLRDGTKVALKRYTPESNQGLQEFQTEIEILSFCSHPHLVSLIGYCDERNEMILVYDYMENGNLRSHLYGSDLPSMSWEQRLEICIGAARGLHYLHTSAVIHRDVKPINILLDENFGQKLLDFGLSKKRTELDQTHLSTLVQGTLGYLDPEYFNRGQLTEKSDVYSFGVVLFEVLCARPAIVQTPSRGMISLAEWVVESQKKGQLEQIIDPNIVAEIRPESLRIFGETAVKCLALSGEDRPSMGDVL

SEQ ID NO: 4538 - protein, 185 aa, Xanthomonas campestris pv. campestris str. ATCC 33913
MSLNRLLVLVFAGLFSTAAVAAGTSVLDLDYRPLAGKAPINLNRSYGGKVVMVVNTASKCGFTPQYEGLEALNQRFGSRGFTVLGFPSNDFQGQEPGSEKQIQEFCTLTYGVKFPMFEKVHVLGAQATPLYQRLTRETGVAPGWNFHKYLIGRNGHVVAQFPSKVKPDDPQVLAAIERELKAPAR

SEQ ID NO: 4539 - protein, 411 aa, Rickettsia sp. IM1
DSEFAELKIRGKIFKLPILKASIGEDVINISRVSAEADCFTYDPGFMSTASCQSTITYIDGDKGILRHRGYDIKDLAEKSDFLEVAYLLIYGELPSSEQYNNFTKQVAHHSLVNERLHYLFQTFCSSSHPMAIMLAAVGSLSAFYPDLLNCKEADYKLTAIRMIAKIPTIAAMSYKYSIGQPFIYPDNSLDFTENFLHMMFATPCTKYKVNPIIKNALNKIFILHADHEQNASTSTVRIAGSSGANPFACISTGIASLWGPAHGGANEAVINMLKEIGSSENIPKYIAKAKDKNDPFRLIGFGHRVYKNYDPRAAVLKETCKEVLKELGQLENNPLLQIAIELEAIALKDEYFIERKLYPNVDFYSGIIYKAMGIPSQMFTVLFAIARTIGWMAQWKEMHGDPEQKISRPR

SEQ ID NO: 4540 - protein, 488 aa, GIBBERELLA ZEAE PH-1
MLSVGLKAVALTLLLGSRANASPNTPTASACRQIAKALGEGVFFPDDTDYSELSTINWSQTAWAQPACIVSPSNASEVSKVVKIAVAQKARFAIRSGGHSANPGYANINDGILISLDRLTKTVFDPSTSLVSIGPGNRWGEVYEHLEQFNRTMVGGRVPTVGVGGLTLGSGLSYLTDLHGLACDNVVSYEVVLSNGSIVEASATSNKDLFWGLKGGINNFGVVTEFKSRTYVLDRVWGSVSLYNASQMPEVLQAVNKYQSAPNKDLYANMHMNLAPINDSIVLTLVYLKPEPQPKAFAPFYALKPLMAQDGIMTLSQLQSLFSPGGSPRWALHVTGFKPSSAIYKKIDGIFRTAPELDDLRGITGGMMVGTVQPITANVALAGQSLGGNALGLQAVNQTWLGLSAAWWSKDDDAAAERALAAFSKRIEAAIPKNMKVPYLFMNDAGPKQEVIKSYGTDNVKRLQQVRAKYDASLVFHQLVPGGQKIPL

SEQ ID NO: 4541 - protein, 411 aa, Rickettsia sp. IO1
DSKFAELKIRGKIFKLPILKASIGEDVIDISRVSAEADCFTYDPGFMSTASCQSTITYIDGDKGILRHRGYDIKDLAEKSDFLEVAYLLIYGELPSSEQYNNFTKQVAHHSLVNERLHYLFQTFCSSSHPMAIMLAAVGSLSAFYPDLLNCKEADYKLTAIRMIAKIPTIAAMSYKYSIGQPFIYPDNSLDFTENFLHMMFAMPCTKYKVNPIIKNALNKIFILHADHEQNASTSTVRIAGSSGANPFACISTGIASLWGPAHGGANEAVINMLKEIGSSENIPKYIAKAKDKNDPFRLIGFGHRVYKNYDPRAAVLKETCKEVLKELGQLENNPLLQIAIELEAIALKDEYFIERKLYPNVDFYSGIIYKAMGIPSQMFTVLFAIARTIGWMAQWKEMHGDPEQKISRPR

SEQ ID NO: 4542 - protein, 469 aa, Bacillus sp. KSM-K16
MKLFINGEWVSEELDVFDVVNPATGEVVGSVPKGGAKEAKVAADGAYESLPAWAERSAYERSAILEAWHDLIAEQKEELARLMTMEQGKPINEARGEIAYANSFIKWYAEEGKRIYGETIPASSPDKRLFVVKQPVGVVAAITPWNFPAAMITRKVAPALAAGCTVLIKPASQTPLTALKLAELAEKAGLPKGVLHVVVGSTSDISKAWQEDERVRKLTFTGSTEIGRTLMSEAGQTVKKISLELGGHAPVLVFEDADIDNAVQETIASKFRNGGQTCVCANRIYVHESIAEAFITKMKQAVEQLKVGNGLNEETDIGPLIDEEAVDKVLTHIRDAKDKGAEVLTGGNSSDGLFIEPTVIAGVTDDMACMSEETFGPLAPISTFKTEEEVVKRANDTIYGLAAYLFTTDLSRGIRVAEKLDYGVVGLNDGGPSVAQAPFGGFKQSGIGREGGHEGLEEFLESKYVSLKM

SEQ ID NO: 4543 - protein, 236 aa, Nostoc sp. PCC 7120
MTVTADPVTLMKQEVGKAAAALVKSGSIVGLGTGSTTAYTIQYLGDRLKSGELTDIVGIPTSFQSEVLSKQYGVPLTTLDAVDHIDIAIDGADEVDPHKNLIKGGGAAHTREKVVDYLANQFIVVVDSGKLVDRLGSVFAVPVEVIPMAITPVTNAIKQLGGKPELRMGVKKAGPVITDQGNFVLDVRFDSIDDPVNLEKILNNIPGVLENGIFVNCADIVLVGEVKDGQPLVRRL

SEQ ID NO: 4544 - protein, 510 aa, Bacillus cereus G9241
MFGIDIVIPDITYLVENQERVKGLFITHGHEDHIGGIVYVLRKLSIPVYATKLTVGLIQEKLGEAGMLGRVDLKTIDSNSTVEFNTTTVSFFGTTHSIPDSVGVCFHTSKGAIVYTGDFKFDQTPIGNSGADLGKMAQIGNEGVLCLLSDSTNAERPGYTGSEKEVGVEISKVFYGAEGRIIVASFASNVHRIQQVFDAAAETGRKVAVVGRSMVKVVDIARRLGYLDVPEGMVISLKEVDNFPEKKVAILTTGSQGEPMAALSRMAKQAHKQISIRKGDTVIIAASPIPGNEISVSKIIDLLFRAGAEVVYYGERKVHVSGHGSQEELKLMLNLMKPKYFVPVHGEFRMQKAHAYLAEDVGIARENIFIVEKGDVIAFGDDEANLVGKVQAGNVLIDGLGVGDVGNIVLRDRKMLSQDGILVVVVTLGKDEKKIISGPEIISRGFVYVRESEALIDRSTEIVRMIVEQSIKEYSIEWSMLKQNIRELLGQFLYEETKRKPMILPIIMEV

SEQ ID NO: 4545 - protein, 207 aa, Lactobacillus plantarum WCFS1
MVKSDNITWHQSQVSKAERQALNHHKSVVLWFTGLSGSGKSTIANAVEKALFDQQVGSYVLDGDNMRFGLNKNLGFSAEDREENIRRIGEVAKLFVDAGVITLTAFISPYRADRDKVRANLEVDEFIEVFVDTPLEVCEQRDVKQLYAKARRGEITGFTGIDAPYEAPIDPEITIDTSKQPLTASVQQVLNYLAEHHYVSLVTANEN

SEQ ID NO: 4546 - protein, 360 aa, Halobacterium sp. NRC-1
MRGAAPDAVLDAVQSGDPLPGTGGFAGELPDGRLARDVLGRRLCYVDGDEWSHDPRDLAAPTLLPAGHVRAPGATGSGRPVWSLPEPAPTGDEPVERVRDAVAGALGGVPAGDDLAVAFSGGVDSALAAAALDAPLYVVGYADSSDIAAARESAAAMGRADDLRVHEVTLADIEAAVPTVARAIGRTNAMAVQIALPLFLVAARAAADGYSRLVVGQGADELFGGYAKVAKAPTDPRTDADTVRGARRETVQSLPAQLERDLRALRAAGVEPVTPLLHDDVVRAALALPGEWLVSGDTRKRALREAARSWLPDAVADRDKKAVQYGSLVAREVDRLARQAGFKRRMDDHVTQYVEARIEE

SEQ ID NO: 4547 - protein, 323 aa, Vicia faba
MSAQGQPQVQAQVQGIDEAVLDDIIRRLTEVRLSRPGKQVQLSEAEIKQLCLASRDIFLQQPNLLELEAPIKICGDIHGQYSDLLRLFEYGGLPPKSNYLFLGDYVDRGKQSLETICLLLAYKIKYPENFFLLRGNHECASINRIYGFYDECKRRFNVRLWKAFTDSFNCLPVAALIDDKILCMHGGLSPDLTNLDQIRILPRPVAIPDTGLLCDLLWSDPGRDVKGWGMNDRGVSYTFGPDKVAEFLSMHDLDLICRAHQVVEDGYEFFADRQLVTIFSAPNYCGEFDNAGAMMSVDENLMCSFQILKPAEKKTKFVMSNKM

SEQ ID NO: 4548 - protein, 151 aa, Brassica napus
  unsure (1)..(151): unsure at all Xaa locations
EALPESARSCDDGLYRAIDSYLKAHPTLSEHERKRLCRVMDCQKLSMDACMHAAQNERLPLRVVVQVLFSEQVKISNALANTSLKESTTLGEAMGTTYQPMIPNRKTLIEATPQSFQEGWAAAKKDINTLKFELETVKXKYVELQNEMEVM

SEQ ID NO: 4549 - protein, 582 aa, Glycine max
  unsure (1)..(582): unsure at all Xaa locations
MAASLFMPSSIVDEEARFEAEVAEVQAWWNSERFRLTKRPYTARDVVSLRGNLRQTYASNEMAKKLWCLLKNHQANGTASRTFGALDPVQVTQMAKHLDTIYVSGWQCSATHTTSNEPGPDLADYPYDTVPNKVEHLFFAQQYHDRKQREERMRMSREERARTPYVDYLRPIIADGDTGFGGTTATVKLCKLFVERGAAGIHIEDQSSVTKKCGHMAGKVLVAISEHINRLVAARLQFDVMGVETVLVARTDAEAANLIQSNIDTRDHQFILGVTNPNLKGKSLATLMQQGMAAGKNGAELQALEDEWLSKAQLKTLSEAVVEAIERQNNIGEEEKRRKLNEWMHHSSYERCLSNEEGREIAEKLGVRNLFWDWDLPRTREGFYRFKGSVTASVVRGCAFSPHADVIWMETASPNVVECTEFSEGVRSKHPQMMLGYNLSPSFNWDASGMSDEQMRDFIPKIGKHGYXAKLGYVWQFITVGGLHSNALITSTFARDFANRGMLAYVERIQREERNNGVDTLAHQKWAGANYYDRYLKTVQGGVASTAAMGKGVTEEQFKESWTRPGAVEIDRGSIVVAKARM

SEQ ID NO: 4550 - protein, 373 aa, Dianthus caryophyllus
MEDANHDSVASAHSAAFKKSENLEGKSVKIEGYDFNQGVNYSKLLQSFASNGFQASNLGDAIEVVNHMLDWSLADEAPVDDCSEEERDPKFRESVKCKVFLGFTSNLISSGVRDTIRYLVQHHMVDVIVTTTGGIEEDLIKGRSIKCLAPTFKGDFALPGAQLRSKGLNRIGNLLVPNDNYCKFEDWIIPILDKMLEEQISEKILWTPSKLIGRLGREINDESSYLYWAFKNNIPVFCPGLTDGSLGDMLYFHSFRNPGLIVDVVQDIRAVNGEAVHAAPRKTGMIILGGGLPKHHICNANMMRNGADYAVFINTAEEFDGSDSGARPDEAISWGKISGSAKTVKVHCDATIAFPLLVAETFAAKREKERKSC

SEQ ID NO: 4551 - protein, 346 aa, Chlamydomonas reinhardtii
MTRGLDYYEVMGLTRSANDIDIRRAYRRLALKYHPDINKDGAAGDEFLRICEAYEVLCDPKTKGFYDLYGEDALKDGISDGNGGLKGPMYRFNPEESPKAVFERFFGTANPYEALEALSNQFESMTSEEAPARGKNKVYPLELTLEEIFHGCLKKVAHKRKVLLFSGEYVEEERQLTVDVKPGLPTGTRFVFEGEGNKTPKKEPGPVVFVLKPKPHPRFVRRGSDLVHKVTLPLHHALIGTTLDIRTLDDRDLKVPISDIMRPGSSLTVPGEGMPLPATPSARGNLVIEIDLLFPTHLTETQKMLLRSAFFLPPPTEQNEETKKALRDYEAAFKHDLKGWAPVFKR

SEQ ID NO: 4552 - protein, 112 aa, Bartonella sp. Pm1785nv
NEACLKMLQEIGSVKRIPEFIARAKDKNDPFRLMGFGHRVYKNYDPRAKIMQKTCHEVLKELNIQDDPLLDIAIELEKIALNDEYFVEKKLYPNVDFYSGITLKALGFPTEM

SEQ ID NO: 4553 - protein, 482 aa, Shewanella oneidensis MR-1
MLLNDPSLLRQQCYINGQWCDANSKETVAITNPATGAVIACVPVMGQAETQAAIAAAEAALPAWRALTAKERGAKLRRWFELLNENSDDLALLMTSEQGKPLTEAKGEVTYAASFIEWFAEEAKRIYGDTIPGHQGDKRIMVIKQPVGVTAAITPWNFPAAMITRKAAPALAAGCTMVVKPAPQTPFTALALAVLAERAGIPAGVFSVITGDAIAIGNEMCTNPIVRKLSFTGSTNVGIKLMAQCAPTLKKLSLELGGNAPFIVFDDANIDAAVEGAMIAKYRNAGQTCVCANRIYVQAGVYDEFAEKLSMAVAKLKVGEGIIAGVTTGPLINAAAVEKVQSHLEDAIKKGATVLAGGKVHELGGNFFEPTVLTNADKSMRVAREETFGPLAPLFKFNDVDDVIKQANDTEFGLAAYFYGRDISLVWKVAESLEYGMVGVNTGLISTEVAPFGGMKSSGLGREGSKYGIEEYLEIKYICMSV

SEQ ID NO: 4554 - protein, 160 aa, Dianthus caryophyllus
MSDDDHHFESSADAGASKTYPQQAGTIRKSGHIVIKNRPCKVVEVSTSKTGKHGHAKCHFVAIDIFNGKKLEDIVPSSHNCDVPHVNRVDYQLLDITEDGFVSLLTDSGDTKDDLKLPADEALVKQMKEGFEAGKDLILSVMCAMGEEQICAVKDVSGGK

SEQ ID NO: 4555 - protein, 392 aa, Escherichia coli
KITLQNGKLNVPENPIIPYIEGDGFGVDVTPAMLKVVDAAVEKAYKGERKISWMEIYTGEKSTQVYGQDVWLPAETLDLIREYRVAIKGPLTTPVGGGIRSLNVALRQELDLYICLRPVRYYQGTPSPVKHPELTDMVIFRENSEDIYAGIEWKADSADAEKVINFLREEMGVKKIRFPEHCGIGIKPCSEEGTKRLVRAAIEYAIANDRDSVTLVHKGNIMKFTEGAFKDWGYQLAREEFGGELIDGGPWLKVKNPNTGKEIVIKDVIADAFLQQILLRPAEYDVIACMNLNGDYISDALAAQVGGIGIAPGANIGDECALFEATHGTAPKYAGQDKVNPGSIILSAEMMLRHMGWTEAADLIVKGMEGAINAKTVTYDFERLMEGAKLLK

SEQ ID NO: 4556 - protein, 113 aa, Bartonella sp. Pm1857nv
ANEACLKMLQEIGSVKRIPEFIARAKDKNDPFRLMGFGHRVYKNYDPRAKIMQKTCHEVLKELNIQDDPLLDIAIELEKIALNDEYFVEKKLYPNVDFYSGITLKALGFPTEM

SEQ ID NO: 4557 - protein, 268 aa, Oryza sativa (japonica cultivar-group)
GADGKLSRRYAAAPVCKWLTPNEDGVSMAALALMNQDKVLMESWYYLKDAVLDGGIPFNKAYGMTAFEYHGTDARFNRVFNEGMKNHSVIITKKLLDLYTGFDAASTVVDVGGGVGATVAAVVSRHPHIRGINYDLPHVISEAPPFPGVEHVGGDMFASVPRGGDAILMKWILHDWSDEHCARLLKNCYDALPEHGKVVVVECVLPESSDATAREQGVFHVDMIMLAHNPGGKERYEREFRELARAAGFTGFKATYIYANAWAIEFTK

SEQ ID NO: 4558 - protein, 503 aa, Haloarcula marismortui ATCC 43049
MPDSETRTAMRERHLQAHEDALADIVIEPWIGGTSVSGSEPIPTRDPVIDEPITAVPVCDDELVNQAVQVAWDGFETWSDRTPTDRSQRLSEWVDVLEEHLDELALLECLDTGKPLSEARGEVEGALRTLEYYAAVARTQQGSQIPAQGDLHMYTRMEPYGVVGQITPWNFPAWAAAWKFGPALAAGNCSVLKPSAYTPLTTVRMAQLSDGIFPDGVINVVTGGGSTTGATLTEHEDVRKLSFTGSGSVGQEVMQTAAARIAPVTLELGGKSPLLVFPDADMQTAVDAAAAGVYYSTGEICDALSRAIVHEDVHDEFVDRLVARAESYTLGDPLDDETTLGPLTNEDQFETVSDYVTIGRNEGATLATGGTAPDDRALADGHYVEPAVFTDVEPDMRIAREEIFGPVQTVQSFETYDEAIALANDTEFGLAGGVATESTDIAHQAAADIDAGVVYINAYGPIRPEGPYGGFKESGIGHDLGRAAVEQYQQPKTVYVNLDSPEI

SEQ ID NO: 4559 - protein, 325 aa, Glycine max
MGGRGAMRSAAKIAGIGVSKAALRPSALPTEQTVRNASRPTAVTGVSSQSAKSAEVLPTEQTVRNASRPTAVSGVSSQSAKSAEVAPLHTAAAWDDWDFAEDGELVVPRMVFGSVPTLDEATEATAELKDAIDQVYLCHESSQYSSRGGQVSALSPTGGQVSALSPTLYEPVNRSCVVDAISDSSAPKHAIQAFHLLSTSRDGVSSQNYSIRNREIFKCLLNEVLGSFIELIDSIHLFLVSTRLLWLHLLVTQMYGMQSWKILPSVVSSNHNSQWLILEQQEILRNWISSQVVLLKQLNPLKDWECQLSLTRGMGFSISWIFYRM

SEQ ID NO: 4560 - protein, 159 aa, Lycopersicon esculentum
MSDEEHHFESKADAGASKTYPQQAGTIRKGGHIVIKNRPCKVVEVSTSKTGKHGHAKCHFVAIDIFTGKKLEDIVPSSHNCDVPHVNRTDYQLIDISEDGFVSLLTENGNTKDDLRLPTDDTLLAQVKDGFAEGKDLVLSVMSAMGEEQICGIKDIGPK

SEQ ID NO: 4561 - protein, 390 aa, Burkholderia cepacia R18194
MSETKDAAAPAAAGAFKPKKSVALSGVTAGNTALCTVGKTGNDLHYRGYDILDVAESCEFEEIAHLLVHGTLPNLTELAAYKNKLRALRGLPNALKAALEQIPASAHPMDVMRTGVSVLGTVLPEKDDHNLPGARDIADRLMASLGSMLLYWYHFSHNGKRIETETDDDSIGGHFLHLLHGKTPSKSWVEAMHTSLILYAEHEFNASTFTGRVIAGTGSDIYSAITGAIGALRGPKHGGANEVAYEIQSRYSSPDDAEADIRRRVENKEVVIGFGHPVYTISDPRNKVIKGVAHKLSKEAGDLKLYNIAERLESVMWDAKKMFPNLDWFSAVSYHMMGVPTAMFTPLFVISRTSGWSAHIMEQRIDNKIIRPSANYTGPEDLQFVPIEKR

SEQ ID NO: 4562 - protein, 299 aa, Candidatus Carsonella ruddii
MNLFNFVKKKIKISIDSADLNLIKKYNFDSLTSNPSLILLSFLNNSYNKILKFFFKNNNKKILLDPDTEISFYDYLLIFVVCNLIKFIKDKISIEIPARISYNYNKIIIYSQKILFLCDQFGINKNRILIKIPATDSGIKAASKLKLSGIECNLTLIFDLNQVKKCFDNEIYIISPFVGRISDIINCNFDSGVNFVKNIYNYKKNYNYKTKIMAASFRNLNQILNLLFCDYITISPIYFEKLLNKKINFNINDFQIFKINFNLNFLNLISSKLLINGIIQFEKDHNSLIKLIYFLINNF

SEQ ID NO: 4563 - protein, 392 aa, Escherichia coli
KITLQNGKLNVPENPIIPYIEGDGFGVDVTPAMLKVVDAAVEKAYKGERKISWMEIYTGEKSTQVYGQDVWLPAETLDLIREYRVAIKGPLTTPVGGGIRSLNVALRQELDLYICLRPVRYYQGSPSPVKHPELTDMVIFRENSEDIYAGIEWKADSADAEKVINFLREEMGVKKIRFPEHCGIGIKPCSEEGTKRLVRAAIEYAIANDRDSVTLVHKGNIMKFTEGAFKDWGYQLAREEFGGELIDGGPWLKVKNPNTGKEIVIKDVIADAFLQQILLRPAEYDVIACMNLNGDYISDALAAQVGGIGIAPGANIGDECALFEATHGTAPKYAGQDKVNPGSIILSAEMMLRHMGWTEAADLIVKGMEGAINAKTVTYDFERLMEGAKLLK

SEQ ID NO: 4564 - protein, 160 aa, Lycopersicon esculentum
MSDEEHHFESKADAGASKTFPQQAGTIRKNGYIVIKGRPCKVVEVSTSKTGKHGHAKCHFVAIDIFNGKKLEDIVPSSHNCDVPHVNRTDYQLIDISEDGFVSLLTESGNTKDDLRLPTDENLLKQVKDGFQEGKDLVVSVMSAMGEEQINAVKDVGTKN

SEQ ID NO: 4565 - protein, 312 aa, Burkholderia cepacia R18194
MDTLHLVDREIRPLLVAWPTVTLSADTLAQSRERVLPLPPPDLAGSTLERRAVPGPAGAPDVPVLVYRPDAGVRPLPAIVHMHGGGYVRGAAKDLEAVHRSVVTELGCALISIDYRLAPETVFPGAIEDCYAALAWVFRQADALGIDPARIGVAGESAGGGLAAALALLARDRGEYRLAFQHLIYPMLDDRTCTRAPHPHAGEFVWHAANNRFGWSALLGHAPGLDGVSPYAAAARATQLEGLPPAFLSVGSLDLFLDENLDYAQRLLRAGVPTELHVLPGGVHGFDIVPGARVAETARRLSHDALRRFLHG

SEQ ID NO: 4566 - protein, 111 aa, Citrus limon
METSVPYENDLNLKATELRLGLPGSDENEQQTRNNKRSLPDTPDDLDTKDKSDEAASVAKAQVVGWPPIRSYRKNSLQQKKNEGECAGIYVKVSMDGAPYLRKIDLKLYNG

SEQ ID NO: 4567 - protein, 78 aa, Zea mays
MGLWTLLEGFLLLANALAILNEDRFLAPRGWSMSEVSGNGQTKSLKGQIVGLIYATQFLRMPLIALNVLIIVVKLVSG

SEQ ID NO: 4568 - protein, 476 aa, Bacillus cereus ATCC 10987
MQNKIIVMFQKDFRLYDNPALFKATQSGEVVPVYVHDETFSMGSASKWWLHHAIIDVKKQLEALGSTLIIRKGSTEEEILSLIEQLGITAVYWNICYDPDRLQFNQNMKMMLEDKGITCKEFNSHLLLEPWMIKKKDNTEYKVFTPFYNAFQKQVISKPISKVQSIKWGSSLPESLSVTELHLLPTIPWTSHIESIWDPTEEGAYKTCKKFFSSKLASYSEGRDFPNQNAHSMLAPYLSFGQISVRWMYHYLINKSTERQCSLFEKQVNSFIRQLIWREFSYYLLYHYPFTVYKPLNKNFEHFPWNNEEELLTVWQKGETGYPFIDAGMRELWQTGFMHNRARMAVASFLVKHLLIPWQEGAKWFMDTLLDADIANNTMGWQWVAGSGADASPYFRIFNPITQGEKFDKDGEYIRKWVPELKDMPNKYIHKPWEAPEHILQKANIKLGDTYPLPVVDHKAARERALCAYKSMKEFV

SEQ ID NO: 4569 - protein, 121 aa, Spinacia oleracea
MIQPQTHLNVADNSGARELMCIRIIGASNRRYARIGDVIVAVIKEAIPNTPLERSEVIRAVVVRTCKELKRDNGMIIRYDDNAAVIIDQEGNPKGTRIFGAIARELRQKFAKIVSLAPEVL

SEQ ID NO: 4570 - protein, 506 aa, Corynebacterium diphtheriae NCTC 13129
MTVYAYPGTPGAVANYKKRYDNYIGGQWVPPVGGEYLDNITPVTGEVFCQVARGTAADVEKALDAAHDAAKTWGHSSPAERALILHRIADRMEEHLEEIAVAETWDNGKAVRETLAADIPLAIDHFRYFAGAIRAQESRTSQIDHNTVAYHFHEPIGVVGQIIPWNFPLLMAAWKIAPALAAGNTIVLKPAEQTPASILFWIDIVGDLLPDGVLNIVNGLGEEAGVALSSSNRIGKIAFTGSTQVGKIINRAAADKIIPVTLELGGKSPSIFFADIMDYDDPFREKCIEGLAMFALNQGEVCTCPSRALVHESIADEFLELGVQRVKNIKLGNPLDTETMMGAQASMEQMDKISGYLDIGPKEGAEVLTGGHVNKIDGLENGYYIEPTVFKGTNDMTIFREEIFGPVLSVATFKDFDEAIRIANDTNYGLGAGVWTRHQNTAYRAGRAIQAGRVWVNQYHNYPAHAAFGGYKESGIGRENHLMMLDHYQQTKNLLVSYDENPTGLF

SEQ ID NO: 4571 - protein, 161 aa, Zea mays
MEALKYWMEQDRVLELFCRLLIAVYGILWGFSASGPGADPKVDYACTPEEVQQHFQACGTVNRVTILTDKFGQPKGFAYVEFLEQEGVQEALNLNESELHGRQIKVAPKRTNVPGMKQRPPRGYNPYHGYPYRSYGAPYFPPYGYGRAPRFRRPMRYRPYF

SEQ ID NO: 4572 - protein, 357 aa, Triticum aestivum
  unsure (1)..(357): unsure at all Xaa locations
MGSIAAGADEDACMYALQLVSSSILPMTLKNAIELGLLETLMAAGGKLLTPAEVAAKLPSAANPEAPDMVDRMLRLLASYNVVSCKTEEGKDGRLSRRYGAAPVCKYLTPNEDGVSMSALALMNQDKVLMESWYYLKDAVLDGGIPFNKAYGMSAFEYHGTDPRFNRVFNEGMKNHSIIITKKLLESYKGFEGLNTLVDVGGGXVGATVAGITAHYPTIKGINFDLPHVISRAPPFSGVTHVGGDMFQKIPSGDTILMKWILHDWSDEHCATLLKNCYDALPAHGKVVLVECILPVNPEATPEAQGGFHLDMIMLAHNPGGRERYEREFEALAKGAGFGAIKTTYIYANIWVIEFTK

SEQ ID NO: 4573 - protein, 64 aa, Glycine max
  unsure (1)..(64): unsure at all Xaa locations
MSGXWVFKNGVVRLVENPGGEAVEGSRGGRRKVLVHRASNEVITSYAVXXLKLXSLGWERYYFF

SEQ ID NO: 4574 - protein, 251 aa, Zea mays
  unsure (1)..(251): unsure at all Xaa locations
MGSSRPAGRSLPDFRWNPQSFSRLLLPHPFSLLFFLFIHLVLTSLNQTFHDTNDLILFIMSSALNQLKATGTTVVSDSGDFASIGKYKPQDATTNPSLILAASKKEEYAKLIDVAIDYAKQKGGSVDQQVDDALDRLLVEFGKEILKIIPGKVSTEVDARYSFDTEASVNKALHLIELYGEQGISKDRILIKIAATXEGIKAAEILQRDHGINTNLXTLMFSLVQAIXAAEAGAYLXSPFVGXILDWVQAL

SEQ ID NO: 4575 - protein, 105 aa, Glycine max
MDIRLMDLDSPLFNTLHRIMDLTEDDNVLLISGERKREEDKEKEGAKYLRMERRVGKFMRKFTLPENANTDAISAVCQDGVLTVTVNKLPPPQPKKPKTIKVKIA

SEQ ID NO: 4576 - protein, 452 aa, Triticum aestivum
  unsure (1)..(452): unsure at all Xaa locations
MQLEVMANRGKILMERYELGRLLGKGTFGKVHYARSLESNRSVAIKMLDKEKVLKVGLSEQIRREVTTMRLVAHKNIVQLHEVMATRNKIYFVMEYVKGGELFDKVAKSGKLTEGAAHKYFQQLISAVDYCHSQGVYHRDLKLENLLLDENENLKVSDFGLSALSESKRQDGLLHTTCGTPAYVAPEVISKAGYDGAKSDIWSCGVILFVLVAGYLPFQGQNLIEMYRKIEKGDFRCPGWVSQKLQKLLYKIMDPDPNKRISIQKIKESTWFRKGPGENLTVKERLPSENANTDAVPTLGVRRRKNSHEDAKPLAVTNLNAFEIISFSTGFDLSGLFVEKESKKEARFTSEQPASAIVSKLEAVAKTLNLRVRKKDNGVVKMQVRKEGRNGVLQFDSEIFEISPSYHLIEMKQTSGDSLEYQKLLEEGIRPALKDICLXAWHGADGQQEHQG

SEQ ID NO: 4577 - protein, 127 aa, Brassica napus
MAETLKEDSIMIREVWNDNLLEEFALIREIVDKYTFIAMDTEFPGVVLKPVETFKYNNDLNYRTLKENVDLLKLIQLGLTFSDEDGNLPTCGTDKFCVWQFNFREFNIGEDIYASESIELLRQCGID

SEQ ID NO: 4578 - protein, 120 aa, Zea mays
MAMEARMKGTVKWFNDTKGFGFISPDDGSEDLFVHQSSIKADGFRSLAEGEVVEFAVSEGDDGRTKAVDVTGPDGSFVQGGAGGGGGGGGFGSRGGGGSRGGGGFGGRGGDGSGGYGGGY

SEQ ID NO: 4579 - protein, 251 aa, Zea mays
MAAKCYPTVSDEYLAAVAKAKRKLRGFIAEKNCAPLMLRLAWHSAGTFDVATKTGGPFGTMKCPAELAHGANAGLDIAVRLLEPIKEQFPILSYADFYQLAGVVAVEVTGGPEVPFHPGRQDKPEPPPEGRLPDATQGSDHLRQVFSTQMGLSDQDIVALSGGHTLGRCHKERSGFEGAWTANPLIFDNSYFTELLSGEKEGLLQLPTDKALLTDPSFRPLVDKYAADEDAFFADYAEAHLKLSELGFAEA

SEQ ID NO: 4580 - protein, 451 aa, Zea mays
  unsure (1)..(451): unsure at all Xaa locations
MAGAGAGGWKKRVGRYEVGRTIGRGTFAKVKFAVDADTGAAFAIKVLDKETIFTHRMLHQIKREISIMKIVRHPNIVRLNEVLAGKTKIYIVLELVTGGELFDRIVRHGKLRENEARKYFQQLIDAIDYCHNKGVYHRDLKPQNLLLDSRGNLKLSDFGLSTLSQNGVGLVHTTCGTPNYVAPEVLSSNGYDGSAADIWSCGVILYVLMAGYLPFEENDLPHLYEKITAAXYSCPYWFSPGAKSLIQRILDPNPRARITIEEIREDPWFKKNYVTIRCGEDENVSLDDVQAIFDNIEDKYVSDEVTHKDGGPLMMNAFEMIALSQGLDLSALFDRQQEFVKRQTRFVSRKPAKTVVATIEVVAESMGLKVHSRNYKVRLEGPASNRASQFAVVLEVFEVAPSLFMVDVRKVAGDTPEYHRFYENLCSKLGSIIWRPTEVSAKSTPLRTTTC

SEQ ID NO: 4581 - protein, 159 aa, Lycopersicon esculentum
MSDEEHQFESKADAGASKTYPQQAGTIRKNGYIVIKGRPCKVVEVSTSKTGKHGHAKCHFVAIDIFTGKKLEDIVPSSHNCDVPHVNRTDYQLIDISEDGFVSLLTDNGNTKDDLRLPTDENLLSLIKDGFAEGKDLVVSVMSAMGEEQINALKDIGPK

SEQ ID NO: 4582 - protein, 399 aa, Desulfitobacterium hafniense DCB-2
MCEKTHTMIQRGQEVVMNTYGRLPMAIVKGKGTTVWDIEGKQYLDFVTGLAVSSLGHSHPAVVEAIQKQAEEILHTSNLYWIPNQIALAEKLVEHSFADQVFFCNSGAEANEAAIKIARKYAKEHYSEDKYEILTLVNSFHGRTLATLTATGQTKYQKGYAPLPEGFTYVPINDLAQLEEKMNPKVAAVMLEPIQGEGGVFPLEVEFLAKARKLCDDYGALLIFDEIQVGLGRTGKLFAYEWSNVVPDIMTLAKALGGGVPIGVMLAKEKVASTFKPGDHASTFGGNPLATAVGCAVMDVLTEEGFLEDVQKRAQYFKQELQKLADKYQTGTEIRGQGFILGWPLDRLGAEIVEGAREKGLLINFVGGKALRFLPPLNVSYQEIDEAITILDQIFAECW

SEQ ID NO: 4583 - protein, 160 aa, Lycopersicon esculentum
MSDEEHHFESKADAGASKTYPQQAGTIRKNGYIVIKGRPCKVVEVSTSKTGKHGHAKCHFVAIDIFNAKKLEDIVPSSHNCDVPHVNRTDYQLIDISEDGFVSLLTENGNTKDDLRLPTDDTLLNQVKGGFEEGKDLVLSVMSAMGEEQICAVKDIGTKT

SEQ ID NO: 4584 - protein, 160 aa, Xylella fastidiosa Temecula1
MNVVRYTPWPGQAALQNEIKQVFDRFFEHNGDTDESAVVTAQWVPRVDIKEEPNQFVLYADLPGIDPADIEVQMDKGILSIKGERKTESSSQTEHFSRIERRYGSFHRRFALPDSADADGITASGSHGVLRILIPKQAATTPRRIQVGNAVSSDVALQSM

SEQ ID NO: 4585 - protein, 392 aa, Escherichia coli
KITLQNGKLNVPENPIIPYIEGDGIGVNVTPAMLKVVDAAVEKAYKGERKISWMEIYTGEKSTQVYGQDVWLPAETLDLIREYRVAIKGPLTTPVGGGIRSLNVALRQELDLYICLRPVRYYQGTPSPVKHPELTDMVIFRENSEDIYAGIEWKADSADAEKVIKFLREEMGVKKIRFPEHCGIGIKPCSEEGTKRLVRAAIEYAIANDRDSVTLVHKGNIMKFTEGAFKDWGYELAREEFGGELIDGGPWLKVKNPNTGKEIVIKDVIADAFLQQILLRPAEYDVIACMNLNGDYISDALAAQVGGIGIAPGANIGDECALFEATHGTAPKYAGQDKVNPGSIILSAEMMLRHMGWTEAADLIVKGMEGAINAKTVTYDFERLMEGAKLLK

SEQ ID NO: 4586 - protein, 297 aa, Candidatus Carsonella ruddii
MNLLNYLYINKKISIDSADLNLIKKYKFNSITSNPTLILKSFLNKTYNLLLNLFFYKNNKKILLDSDIQISLYDKILILIVGNLIPFINDKISIEIPARISFNYNLIIIYSKKIIFLCNKYGINIKKILIKIPGTDSGIKAAKKLKEIGIETNITLIFDINQVKKCLDYGVYIISPFVGRISDSIFCKYDSGVNFVKNIFIYKNNNNYKTKIMAASFRNINQILNLTFCDCLTISPIYFSKLLKFNLKLLFTNNIKKSIKINFLNKHSSKLIINGINIFDKDHKKFINIISTIINNL

SEQ ID NO: 4587 - protein, 473 aa, Oryza sativa (japonica cultivar-group)
MDMAAAAAEVSTPPSLVKMTEKALDEMPQWSWQSVVDAVRQCQRLLPTADATGVFDRVVGALVSHVAVSPGDATPTSSSPESSAFRFSCDTKSSCLSARCTSRTWWFEDLAVVLGPGMVERVAGALLARGTDHGVVSRFLFYYLKCRVAGAATADDKRAMLEAAIAAMSGLDRSSVSCRGLFGILRISSPLKLPTSCHDSLVAMIGAKLDHATLDNLLVPAPPGTTSSLYDVTLVLRFLDAFLHHAAATGARGETPRLKKVGKLVDLYLAEVAPDPSLRPAMFVELATALPAAARDCHDALYRAIDVYFQVHTRLTEEEKMRICKGINYEKLSPECCKHLARNAGFPTRAAVQALASQHTVLKSLLRGGGPDEHLRPVSAAKHRAGGEDHDDLVAAGGQVVLYAGRLDLSLESQNLRSLLDGMHWRVMELEKVCSRMKTQMSKMKAARRATGGGGGAAAGRRAASRSLPRMCS

SEQ ID NO: 4588 - protein, 392 aa, Escherichia coli
KITLQNGKLNVPENPIIPYIEGDGIGVDVTPAMLKVVDAAVEKAYKGERKISWMEIYTGEKSTQVYGQDVWLPAETLDLIREYRVAIKGPLTTPVGGGIRSLNVALRQELDLYICLRPVRYYQGTPSPVKHPELTDMVIFRENSEDIYAGIEWKADSADAEKVIKFLREEMGVKKIRFPEHCGIGIKPCSEEGTKRLVRAAIEYAIANDRDSVTLVHKGNIMKFTEGAFKDWGYELAREEFGGELIDGGPWLKVKNPNTGKEIVIKDVIADAFLQQILLRPAEYDVIACMNLNGDYISDALAAQVGGIGIAPGANIGDECALFEATHGTAPKYAGQDKVNPGSIILSAEMMLRHMGWTEAADLIVKGMEGAINAKTVTYDFERLMEGAKLLK

SEQ ID NO: 4589 - protein, 187 aa, Zea mays
  unsure (1)..(187): unsure at all Xaa locations
WVPRGRPGIISKLLEVYRGFEGVDVLVDVGGGTGSTLRMVTAKYKHLRGVNYDLPHVIAQAPPVQGVEHVGGSMFEYIPSGNAILLKWILHLWRDEECIKILKNCHRALPANGKVIVVECVLPASPEPTQVAQGALLLDVVMLNRLRGAKEXRTEREFAELAAEAGFSGGCRATYVFTGAWALEFTK

SEQ ID NO: 4590 - protein, 429 aa, Xanthomonas axonopodis pv. citri str. 306
MSDLDQVTLNAGDKSVVLPVLKPTLGNDCVDISKLTKETGLFTYDSGFTATASCKSAITYIDGDNGVLLYRGYPIEQLAEKSSFLEVSYLLMNGELPTADEFKKFDHEVTHHTMMHESLKNFLGGFRHDAHPMAMLAGSVASLSAFYHDTLDLNDPEQRRQAAIRLIAKVPTLAAAAYRYSIGWPIRYPRNNLNYVDRFLHMMFEVPSEPLEINPVVAKALDLLFILHADHEQNASTSTVRLVGSTGANPYASVAAGITALWGPAHGGANEAVLKMLEEIGTADNVESAVAKAKDKNSSFRLMGFGHRVYKNFDPRAKIIREMTHKVLGELGVNDPLLEVALKLEEAALKDDYFVQRKLYPNVDFYSGIIYKALNIPVEMFTVMFAIARTAGWVSHWLEQQVDPEMKIGRPRQIYTGYDKRDYTDSAKR

SEQ ID NO: 4591 - protein, 297 aa, Saccharomyces cerevisiae
MSGPPPPYEEQSSHLYGQPASSQDGNAFIPEDFKYSTVVISCEPIIRQRFMHKVYSLLSCQLLASLSFCYWASVSTSLQNFIMSHIALFYICMVVSLVSCIWLAVSPRPEDYEASVPEPLLTGSSEEPAQEQRRLPWYVLSSYKQKLTLLSIFTLSEAYCLSLVTLAYDKDTVLSALLITTIVVVGVSLTALSERFENVLNSATSIYYWLNWGLWIMIGMGLTALLFGWNTHSSKFNLLYGWLGAILFTAYLFIDTQLIFRKVYPDEEVRCAMMLYLDIVNLFLSILRILANSNDDN

SEQ ID NO: 4592 - protein, 238 aa, Petunia x hybrida
MGRGKIVIQRIDNTTSRQVTFSKRRSGLLKKAKELSILCDAQVGLIIFSSTGKLYEFASNSMRSVIERYYKMKEEHHLMSPMSEVKYWQREVASLRQQLHYLQENHRQLLGEKLSGLGIKDLTHLENKLEMSLKGVRKQKEQILTDEIKEITRKGNLIHQENIELYKKVNLIRQENTDLQKKVYEKGCGSEPNEGVQATFAISNGYDLHAPIYLQLRPPQTQKNQTSTSVMQFGLQLH

SEQ ID NO: 4593 - protein, 194 aa, Saccharomyces cerevisiae
MVTSNVVLVSGEGERFTVDKKIAERSLLLKNYLNDMHDSNLQNNSDSDSDSDSETNHKSKDNNNGDDDDEDDDEIVMPVPNVRSSVLQKVIEWAEHHRDSNFPDEDDDDSRKSAPVDSWDREFLKVDQEMLYEIILAANYLNIKPLLDAGCKVVAEMIRGRSPEEIRRTFNIVNDFTPEEEAAIRRENEWAEDR

SEQ ID NO: 4594 - protein, 72 aa, Brassica napus
  unsure (1)..(72): unsure at all Xaa locations
MADGRCCTFLEILFAIILPPLGVFLRFGCCRIEFCICLLLTILGYVPGIIYAIYVLVALDSDXHEREYYTLA

SEQ ID NO: 4595 - protein, 292 aa, Rubrivivax gelatinosus PM1
MPVDAHAQGLLDALKAQGLKSFEQMTIAEARGAIETFVGLQAPPEEVKQVHDLTVKGPAGELQYRIFVPAGPTPMPVLVYFHGGGWVGGSLAVVDEPCRAIANRCGAVVIAASYRLSPEARFPAATDDAYAAVQWASANAATYGGDASRLGVMGDSAGANLAAVVSMMARDRKGPAIKAQILTYPVIQRDGDFASRKANEEGYLLTSAGVAWFWKQYLASDADAVNPYASPIMAKDLTGLPPALVMTAEFDPARDEGEAYGKALAKAGVPVTVRRFEGLIHGVFGSADQPAS

SEQ ID NO: 4596 - protein, 359 aa, Triticum aestivum
  unsure (1)..(359): unsure at all Xaa locations
MGSMAAEMTAVEEEACIYAMQLSSTAVLPLTLKNAIELGMLEVLMGAGGKMLSPSEVAARLPPTATNPDAPAMVDRMLHLLASYKVVSCEVEEGTHARRYGPTPVCKWFTPNQDGISMAPLLLLTNDKVPMESLYHLKDAVLDGGLPFHKAHGMTMYEYTKTDARLNRVFNEAMKGYTTIVTGKLVDLYTGFQDVATLVDVGXGGIGATIQAITSKYPHIKGXINFDLAHVIAEAPHSPGVEHVAGDMFKNVPSGDAIVLKWILHNWTDEHCTTLLRNCYDALPAHGKVVVVEGILPVKPEATSRGQQASLSDMIMLTHTAGGKERNQREFEELAKAAGFTGVKTAYIYSNTWVIEFTK

SEQ ID NO: 4597 - protein, 282 aa, Tropheryma whipplei TW08/27
MVFVLTYVPSVLLGDGVSIPQFGLGTYELPPNETSSVVQSAIELGYRHIDTASLYANEREVGRAIASSGIKREEFFVTTKLWNSDQPKPREAFERSLDLLSLDYVDLYLIHWPCPPSELYINVWEVLLELKESGRAKSVGVSNFLSEHINKIKEAGFPLPSVNQIELHPWLQQRELVLSCRNYGIQIESWGPFARFSKDLDAFPELTRPAKEYGKTPAQVILRWHIQKGYVVFPKTVHAERLRQNIDIFDFDLTPDEISGIDSLDAGFRTGPDPSSFRAGLD

SEQ ID NO: 4598 - protein, 429 aa, Acidithiobacillus thiooxidans
MTTHIQKPATGSPLTLLNGVLQVPDQPIIPFIEGDGIGCDVTPAMRSVVDAAVAKVYGGQRQIAWMELFAGQKAVQLYGEGQYLPDETMAAIREYKVAIKGPLETPVGGGIRSLNVAMRQDLDLYVCLRPVRYFEGTPSPMRHPEKVDMVIFRENSEDIYAGIEWPAGSPEAEKIIRFLREEMGVTKIRFPDSSAIGIKPVSTEGSERLIRRTIQYALEHGKPSVSLVHKGNIMKFTEGGFRDWGYALAEREFAGRVFTWRQKAAISKAEGKAAGQKAEQQAIADGKLIIKDVIADNFLQQILLRPEDYSVVATLNLNGDYVSDALAAEVGGIGMAPGANLSDTHAIFEATHGTAPDIAGQGKANPSSLILSAVMMLEHLGWGEAAQAIVAAMNATIAAGEVTGDLAALRGDVPALSTTEFTAALIRRF

SEQ ID NO: 4599 - protein, 202 aa, Bacillus halodurans C-125
MGTSNQPHIVWHEASVSKEERQKRNRLKSCVVWFTGLSGSGKSTLANALDRKLFEEGIHSYVLDGDNIRHGLNAGLGFSEEDRKENIRRIGEVAKLFVDAGVVTSTAFISPFREDRDNVRGILDDGEFIEVYVRCPLETCEKRDPKGLYKKARSGDIPEFTGISSPYEEPVNPELIIDTDQLAVEEAVEKIYAYLHAQESGK

SEQ ID NO: 4600 - protein, 399 aa, Bacillus cereus ATCC 14579
MLANQINERSLLLHKELVGKIEITSKVEVNSADDLSLTYTPGVAESCKAIAADEETVYDYTARGNMVAVVSDGTAVLGLGNIGPKAAMPVMEGKSILFKKFANVDAFPLCLGTTDVDEIVTLVKNLEPTFAGINLEDIAAPRCFEIEKRLKEETNIPVFHDDQHGTAIVVLAAVINALKVVSKQMDNVKIVINGAGSAGIAIGKLLLKAGAKHITLVSLEGIVCEGETWMNEAQIEVSKKTNREHVRGTLKEAIHQADIFIGVSAPNVLTKELVQTMNEKAIVFAMANPIPEIFPEDALEAGAAVVGTGRSDYANQVNNVLAFPGIFRGALDVRATDITEEMKLAAAYGIANIITDEERNANYVIPNPLDKRVVPSVAEAVAKAAIDSGVAQITKIPRY

SEQ ID NO: 4601 - protein, 321 aa, Ralstonia metallidurans CH34
MPAQPLDSQVAQLLDLIARAKRPAIHTMDPVDAKIAYEKSAPILDLSPAPVHGVEDFQVTARDGHAIPVRLYSPREASWADPLPLLVYFHGGGFTVGSVNSHDSLCRMFCNGAECLVLSVDYRLGPEWKFPVAANDAFDVLHWVFEEAARIGADATRIALGGDSAGGTLAAACAVEARDHGLAPVLQMLIYPGTCARQDTPSHRALAEGYLLTAEMIQWFFSQYLDVDASRDDWRFAPLDGGGEGADVRGCCPAWIAVAGYDPLHDEGVAYAAKLEAAGVVASLTDYPSMIHDFFKLGRFIGAVAGAHADATAALRRAFGI

SEQ ID NO: 4602 - protein, 294 aa, Brucella melitensis 16M
MWWPAPRKTAQKISGKGYIMTVPTVKLNDGNHIPQLGYGVWQISNDEAVSAVSEALKAGYRHIDTATIYGNEEGVGKAINGSGIARADIFLTTKLWNSDQGYESTLKAFDTSLKKLGTDYVDLYLIHWPMPSKDLFMETWRAFIKLKEEGRVKSIGVSNFRTADLERLIKESGVTPVLNQIELHPQFQQDELRLFHGKHDIATEAWSPLGQGKLLEDPTLKSIAEKHAKSVAQIILRWHIETGNIVIPKSITPARIKENFDIFDFTLNGTDHDAITKLDMADGRIGPNPSVFSA

SEQ ID NO: 4603 - protein, 471 aa, Oryza sativa (japonica cultivar-group)
MESTDEHAMESDTDLISVLPGEVLQHILSFSRIRAIVRMRRLSRRWMRVIECLQFICLDYRDFKHWKVEKFARFVDNLLLIRSKVDLHTFQLYWFHYLPLNCNDLRKWILYAVKHNVKVLDVELDMYDKTALPSRIFTCRSVEELSLQMGEAPDEDLEHVGLVLPDIIQLPSLKKLTLSDVEVDQLSLNQFIGRSPNLEDLHLINSATYLDLIASKVLKRLTLDGFMHGPKRFTISAPHLVHFECQGCALQDVSWGEKPSLESAHIDTWGKKYDGESEFIGVLLSAKTLALFGSDVKVMLEKELPACPVFERLTTLEIGKWCLTEDFYTVLRFLQLSPRLGELTLMQEELPHAARKGAETDAMPIDGMTFQCPFLETVIIQCSKGDDGINKLVNVLAANGINPKKIQVNFYEDIEEMERAENRRIIEEREKELCNFEKMAKKNPEWVDESRYADSNPETDSDEYDDDYDDF

SEQ ID NO: 4604 - protein, 413 aa, Sulfolobus solfataricus P2
MMQKIPEDGEVIKFENGKWIVPKKPIILYVEGDGIGHEITHAAMKVINKAVEKAYGSDREIKWVEVLAGDKAEKLTGNRFPKESEELIEKYRVLLKGPLETPIGKGWKSINVAIRLMLDLYANIRPVKYIPGIESPIKNADKIDLIIFRENTDDLYRGIEYPYDSEQAKKIRDFLRKELGVEVEDDTGIGIKLISRFKTQRIARMAIKYAIDHKRKKVTIMHKGNVMKYTEGAFREWSYEVATKEFRDYIVTEEEVTKNYNGVPPSGKVIINDRIADNMFQQIIIRPDEYDIILAPNVNGDYISDAAGALVGNIGMLGGANIGDTGGMFEAIHGTAPKYAGKNVANPTGIIKGGELMLRFMGWDKAAELIDSAIMESIRQKKVTQDLARFMGVRALSTTEYTDELIAIIDTLS

SEQ ID NO: 4605 - protein, 214 aa, Desulfitobacterium hafniense DCB-2
MEPIKGEQRDGQSEIRKLAILTGGGDCPGLNAVIRAAVKTACHRGIAVVGIQDGFRGAVEGDFRPLELKDVSGILPRGGTILGTTNRDNPFAYPTQVGEERQVQDRSAEVLDRFKAEGIDALIAIGGDGSLSIAWEFAKQGLKVVGVPKTIDNDLMCTDLTFGFQTAVATAQDALDRLHTTAESHHRIMILEVMGRYAGWIALYAGVAGERMSS

SEQ ID NO: 4606 - protein, 322 aa, Fusobacterium nucleatum subsp. nucleatum
MEKKLAILTSGGDAPGMNAAIRATAKIAEYYGFEVYGIRRGYLGMLNDEIFPMTGRFVSGIIDKGGTVLLTARSEEFKEARFREIAANNLKKKGINYLVVIGGDGSYRGANLLYKEHGIKVVGIPGTIDNDICGTDFTLGFDTCLNTILDAMSKIRDTATSHERTILIQVMGRRAGDLALHACIAGGGDGIMIPEMDNPIEMLALQLKERRKNGKLHDIVLVAEGVGNVLDIEEKLKGHINSEIRSVVLGHIQRGGTPSGFDRVLASRMAAKAVEVLNKGEAGVMVGIEKNEMVTHPLEEACSVDKRKSIEKDYELALLLSK

SEQ ID NO: 4607 - protein, 297 aa, Candidatus Carsonella ruddii
MNIINYLYNNKKISIDSADLNLIKNFKFNSITSNPTLILKSFLNKTYNKILNLFFIKNNKKKIIDSDKEISLYDKILIFIVGNLIPYINDKISIEIPSRISFNYNLIIIYSKKIIYLCEKYGINKSFILIKIPGTDSGIKAAKKLKEIGIEVNITLIFDINQVKKCFDYGIYLISPFVGRISDNIFCKYDSGVNFVKNIFIYKNNNNYKTKIMAASFRNINQIINLRFCDCLTISPIYFNKLSKYNLKILLNNNFNNLVKFNFYNKHSSKLIIEGLKSFDKDHKRLINLLSTIINNL

SEQ ID NO: 4608 - protein, 392 aa, Escherichia coli
KITLQNGKLNVPENPIIPYIEGDGIGVNVTPAMLKVVDAAVEKAYKGERKISWMEIYTGEKSTQVYGQDVWLPAETLDLIREYRVAIKGPLTTPVGGGIRSLNVALRQELDLYICLRPVRYYQGTPSPVKHPELTDMVIFRENSEDIYAGIEWKADSADAEKVIKFLREEMGVKKIRFPEHCGIGIKPCSEEGTKRLVRAAIEYAIANDRDSVTLVHKGNIMKFTEGAFKDWGYQLAREEFGGELIDGGPWLKVKNPNTGKEIVIKDVIADAFLQQILLRPAEYDVIACMNLNGDYISDALAAQVGGIGIAPGANIGDECALFEATHGTAPKYAGQDKVNPGSIILSAEMMLRHMGWTEAADLIVKGMEGAINAKTVTYDFERLMEGAKLLK

SEQ ID NO: 4609 - protein, 297 aa, Candidatus Carsonella ruddii
MNLLNYLYKNKKISIDSADLNLIKNYKFNSITSNPTLILKSFLNKTYNLLLNFFFYKNNKKILLDSDIQISLYDKILIFIVGNLIPFINDKISIEIPARISFNYNLIIIYSKKIIFLCNKYGININKVLIKIPGTDSGIKAAKKLKEIGIETNITLIFDINQVKKCLDFGVYIISPFIGRISDSIYCKYDSGVNFVKNIYTYKNNNNYKIKIMAASFRNINQIINLTFCDCLTISPIYFLELLKFNLKLLFKNKIKKTLKINFFNKYSSKLIIEGIKSFDKDHKKLINIISTIINNL

SEQ ID NO: 4610 - protein, 290 aa, Solanum tuberosum
LNSSYRVPFESFRVPFVDLQEATNNFDEKFHIGLGGFGKVYRGVLRDGTKVALKRCKRESSQGIEEFRTEIEILSFCSHPHLVSLIGYCDETNEMILVYDYIENGNLRSHLYGPDLPTMSWEQRLEICIGAARGLHYLHTSAVIHRDVKSINILLDENFVAKITDFGISKKGTELDQTHLSTLVQGTIGYLDPEYFIRGQLTEKSDVYSFGVVLFEVLCARPAIVQSLPREMVNLAEWAVDSHNKGHLEQIIDPDLAAKIRPESLRKFGETAVKCLALSSEDRPSMGDVL

SEQ ID NO: 4611 - protein, 446 aa, Lycopersicon esculentum
MKKVKRKLGKYEVGRTIGEGTFAKVKFARNTETGENVAIKVLAKSTILKHRMVEQIKREISIMKIVRHPCIVRLHEVLASQTKIYIVQEFVTGGELFDKIVHLGRLSEDEARRYFQELIDAIAHCHSKGVYHRDLKPENLLLDFQGNLKISDFGLSALPQQGVELLYTTCGTPNYVAPEVLGNRGYDGAAADVWSCGIILYVLMAGYLPFDETDLPTLYTKIKAAEFSCPFWFSPGATSLIQKIIDPNPQTRIKIDGIKRDPWFRKNYRAVKAKADEVVNLDDIHAVFDDIEDAFVSEKSEDSESGPLVMNAFEMITLSQGLNLSALFDRRQDYVKRQTRFISRQPAKVVIETIEAAAESLGLKVHTRDYKTRIEGVTANRAGQFAVVLEVFQVAPSLFMVDVRKAAGDTLEYHKFYKTFCTKIDDVIWKPKEGMSNAVLLRTRTR

SEQ ID NO: 4612 - protein, 493 aa, Oryza sativa (japonica cultivar-group)
MTRVIHDSGEGMQKEALAMVSSDVNFPKGHFPDYKIGPNNQIIDPEEIHEAVPLKEIVAKETAQLLEQRRRLSVRDLKEKFEKGLSGASKLSEEAKRREAASLDRQVLLKKLRDVLDTLKGRVAGRNRDDADEAISLVEALAVQLTQREGELIYEKAEVKKLASFLKQATEDARKVAEEERALALAEIEKARTAIAIVEKGLQEHDAASSSREKEEIEGLRKEVREARRIKMLHQPSKVMDMEFELKALRTLIAEKNQLCNQLMKELAMIKRLEEDSSDLYDLEGSDILGSQFCIIPRFDDAPDISSCPTQWYRVISGGNRNLILGATKPTYAPEPFDVGRLLQAEIVLNAEKVTIQTMGPINPAAGLEHYVESLMKRADVEFNVVVTQMNGNDYSSNSVHAFHIGKMRIKLRKGWSTKARESYSTTMKLCGSRGGGNAAATAVFWQARKGLSYTLAFETDRDRNAAIMLARKFASNCNITLTGPGDEVHAGS

SEQ ID NO: 4613 - protein, 161 aa, Nostoc punctiforme PCC 73102
MSNTISDIAVKTINGEDKQLKDYTGKVLLIVNVASYCGYTSQYEGLEKLNQKYREQGLRILGFPCNDFGAQEPGSNEEIVQFCTSKYSVTFELFDKIHAKGPQQHPLYERLTKAVEPTGTIAWNFEKFLVNKKGEVTARFNSSVQPNSPELIAIIEKELAK

SEQ ID NO: 4614 - protein, 344 aa, Arabidopsis thaliana
MATISFSHNHQSSDNRRGGSHHHRHGPVVEEIEGLIKVFNDGCVERPPIVPIVSPTIHPSSKATAFDIKLSNDTWTRVYIPDAAAASPSVTLPLLVYFHGGGFCVGSAAWSCYHDFLTSLAVKARCVIVSVNYRLAPEHRLPAAYDDGVNVVSWLIKQHISTGGGYPSWVSKCNLSNVFLAGDSAGANIAYQVAVRIMASGKYANTLHLKGIILIHPFFGGESRTSSEKQQHHTKSSALTLSASDAYWRLALPRGASRDHPWCNPLMSSAGAKLPTTMVFMAEFDILKERNLEMCKVMRSHGKRVEGIVHGGVGHAFHILDNSSVSRDRIHDMMCRLHNFIHLS

SEQ ID NO: 4615 - protein, 157 aa, Brassica napus
MADSDNDSGGHKDGGGASSREQDRFLPIANVSRIMKKALPANAKISKDAKETVQECVSELISFVTGEASDKCQREKRKTINGDDLLWAMTTLGFEDYVEPLKVYLQKYREVEGERMTPGGRQGDKEGGGGSGGMYGGVVTMGHHHHQRHVYGGSGMN

SEQ ID NO: 4616 - protein, 290 aa, Solanum tuberosum
LNSSYRVPFESFRVPFVDLQEATNNFDEKFHIGLGGFGKVYRGVLRDGTKVALKRCKRESSQGIEEFRTEIEILSFCSHPHLVSLIGYCDETNVMILVYDYIENGNLRSHLYGPDLPTMSWEQGLEICIGAARGLHYLHTSAVIHRDVKSINILLDENFVAKITDFGISKKGTELDQTHLSTLVQGTIGYLDPEYFLRGQLTEKSDVYSFGVVLFEVLFARPAIVQSLPREMVSLAEWAVDSHNKGQLEQIVDPDLAAKIRPESLRKFGETAVKCLALSSEDRPSMGDVL

SEQ ID NO: 4617 - protein, 486 aa, Nostoc punctiforme PCC 73102
MNKHIRPWQRLLALAIGSMVFAVFAPTIVQATDPPTVQSLSETTTKLQISIDTIWVLITGFLVFFMQTGFAMLEAGLNRQRGVVNALLENFINAAVTILVWWGIGFGIAFGTSAGGLVGIDTFFLSQLPGADGSYILAAPGSTAAINTYTLFFFQFAFAATATTIATGSMAGRTDFIGDLIYSAIMGAIAYPIVVHWVWNSDGWLSKLSYHDFAGSSVVHTVGGWTALVGAYLLGSRPGRPAWGTLPPAHNLGLATLGTMILWFGWYGFNPGSTLSTGNTGLIGLVTVNTTLSAGAGALSAIIFQYTRKGKWDLVYSLNGSLAGLVAITAPCAYVAPWASVLIGLTSGILVTVGMDLIESVHIDDPVGAFAVHGINGMMGTLSVGFLGQAELTLNQKAGLFLGGGFELLGIQLLGVVAIAVFTVAFSFLMFGGLKAVGHLRVNSEADRIGIDAYEHGASVWSDVYAIEKKEINCAETTEIEALDSE

SEQ ID NO: 4618 - protein, 363 aa, Corynebacterium diphtheriae NCTC 13129
MKAARYYDQKDIRIEEISEQPLLPGTARIKVAWCGICGTDLHEFLEGPLFVPEHHHPHPVSGEDSPVTLGHEMSGVITEVAEDVTDLAVGDHVVVEPYLIHDDVDTSEANPFYHLSRDMNFIGLAGGGGGLSENIVVKRRWIHKISPDLPLDEAALIEPLSVGYHAVERAGFASEEAAKGKVALVGGAGPIGLLTASVLKAFGATVVISELSPLRRKKALDSGAADYALNPAEVDVVEEIAKLTDGKGADVAFECTSVQVVLDTLMDAVRPGAVIVVVSIWSKRSNFDIHKLVMKEIDLRGTIAYSHAHPNTIKLVESGKINLKPFITGKIALQDIVDKGFDTLINHNETAVKILVSPSGVGL

SEQ ID NO: 4619 - protein, 290 aa, Glycine max
  unsure (1)..(290): unsure at all Xaa locations
ALTKQGADLLXTTCGTPNYVAPEVLSNRGYDGAAADVWSCGVILYVLMAGYLPFEEADLPTLYRRINAAEFVCPFWFSADTKSFIQKILDPNPKTRVKIEEIRKEPWFKKNYFPVKLGEDEQVNLDDVRAVFDDIEDQYVAERSEITEGGPLIMNAFEMIALSQGLNLSPLFDRHQDYVKRQTRFVSRKPAKVIISSIEAVAESMGLKVHSRNYKVRLEGVSANRVGQFAVVLEVFEVAPSLFMVDVRKATGDTFDYHKFYKNFCGKLGNIIWRPAGTMPNSNLRKQMTL

SEQ ID NO: 4620 - protein, 328 aa, Triticum aestivum
MKTLLILTIIAVALTTTTANIQVDPSGQVQWPQQQQPCSNPQQPFSQPQQPFSQQPQQIFPQPQQTFPHQPQQAFPQPQQTFPHQPQQQFPQPQQPQQQFPQPQQPQQPFPQQPQQQFPRPQQPQQPFPQPQQPQLPFPQQPQQPFPQPQQPQQPFSQLQQPQQPLPQPQQSQQPFSQQQQSLIQPYLQQQMNPCKNYLLQQCNPVSLVSSLVSMILPRSDCQVMRQQCCQQLAQIPQQLQCAAIHGVVHSIIMQQEQQQQQGIQIMRPLFQLIQGQGIIQPQQPAQLEVIRSLVLGTLPTMCNVFVPPECSTTKAPFASIVADIGGQ

SEQ ID NO: 4621 - protein, 222 aa, Glycine max
  unsure (1)..(222): unsure at all Xaa locations
SGYNKVMVTVEDGRNFVADAAIITVXIGIXKANLIQFEPXLPDWKVSAISDLGVGNENKIALRFDKVFWPNVELLGTVAPTSYTCGYFLNLHKATGHPVLVYMVAGRFAYDIEKLSDEAAANFVMQQLKKMFPNSSKPVSPPLMLSSXIAHHLLKVRVQYLVSRWGTDPNSLGCYSYDLVGKPLDVYXKLRAPLGNLFFGGEAVSXDNQGSVHGATQRGQAQ

SEQ ID NO: 4622 - protein, 288 aa, Glycine max
SSQLRRPPPPRDELRNNQTKRWQAIGTLKHVLYFVNLPWELKKHAIDFLLSITDEGVSRNYNEERSEWSSYVPSLFSALQAVKMVIMYAPEPELRKKSFTVLKGVLADIPNSQRFDIMKALITNTDSSSMIAIFIDLVRKEMHTAICSSRSIVKDAPQIDNKAFPDTSFWNPGILELVELVLRPPQGGPPSLPEQSDAVLSALNLYRFVLMTESAEKTNITGVLSRNNLLKAYNEWLLPLRTLVTGIMAESHSDYDEFAVDTVCTLNPLELVLYRCIELVDEKLKQST

SEQ ID NO: 4623 - protein, 99 aa, Glycine max
NFLYQWAFAIAAAGITSGSIAERTQFVAYLIYSSFLTGFVYPVVSHWFWSADGWASAISPGDRLFSTGVIDFAGSGVVHMVGGVAGFWGALIEGPRIGR

SEQ ID NO: 4624 - protein, 197 aa, Glycine max
  unsure (1)..(197): unsure at all Xaa locations
MEGVGARLGRSSTRYGPATVFTGPVRKWKKKWIHVSPSSASSNSNANNHASNASHLLLXSGPHNHASHASHLLLYKWTPLTHSQNTATTNNANAKDSPPEPPEEPPRRKFKYVPVALLEEQKNEGAEIEGTEKVDEESKPIDADSGAAEATHKNETLDEKPDINDVPMEESQVNLCMSLLFTSCFLTFSSIFPKCIV

SEQ ID NO: 4625 - protein, 123 aa, Triticum aestivum
  unsure (1)..(123): unsure at all Xaa locations
MAPTVMASSATSVAPFQGLKSTAGLPVSRRSNGASLGSVSNGGRIRCMQVLAHRGHQEFETLSYLPPLSTEALLKXVDYLIRSKWVPCLQXNKVXFIFREXNASPGXYNGRIGMWKLLMFGVH

SEQ ID NO: 4626 - protein, 486 aa, Pseudomonas aeruginosa PAO1
MIKHWINGREVESKDVFENYNPATGELIGEVASGGAAEIDAAVAAAREAFPKWANTPAKERARLMRRLGELIDRNVPHLAELETLDTGLPIHQTKNVLIPRASHNFEFFAEVCTRMNGHSYPVDDQMLNYTLYQPVGVCGLVSPWNVPFMTATWKTAPCLALGNTAVLKMSELSPLTANELGRLVHEAGIPPGVFNVVQGYGASAGDALVRHRDVRAVSFTGGTATGRRIMEAAGIKKYSMELGGKSPVLVFEDADLERALDAALFTIFSLNGERCTAGSRIFVQESVYPQFVAEFAARARRLIVGDPQDPKTQVGSMITQAHYDKVTGYIRIGLEEGATLVAGGLERPAGLPAHLSKGQFIQPTVFADVDNRMRIAQEEIFGPVVCLIPFKDEAEALRLANDVEYGLASYIWTQDIGKAHRLARGIEAGMVFINSQNVRDLRQPFGGVKASGTGREGGEYSFEVFAEIKNVCISMGSHHIPRWGV

SEQ ID NO: 4627 - protein, 503 aa, Zea mays
MDRADPARGRLAVLSSHLRGAGAEEAAGLERSPVSAPAPGPRAGALAVVDGRTGKRHEVKVSEDGTVRATDFKKITTGKDDKGLKIYDPGYLNTAPVRSSICYIDGDEGILRYRGYPIEELAESSSFVEVAYLLMYGNLPTQSQLAGWEFAISQHSAVPQGLLDIIQSMPHDAHPMGVLASAMSTLSVFHPDANPALQGQDLYKSKQVRDKQIVRVLGKAPTIAAAAYLRLAGRPPVLPLNTLSYSENFLYMLDSLGDRTYKPNPRLARALDILFILHAEHEMNCSTAAVRHLASSGVDVFTALSGGVGALYGPLHGGANEAVLKMLNEIGSMENIPDFIVGVKNRKRKMSGFGHRVYKNYDPRAKVIRKLADEVFSIVGRDPLIEVAIALEKAALSDEYFIKRKLYPNVDFYSGLIYRAMGFPTEFFPVLFAIPRMGGWLAHWKESLDDPDTKIIRPQQVYTGFWLRHYTPVRERVLSSQSEELGQVATSNATRRRRAGSAL

SEQ ID NO: 4628 - protein, 440 aa, Glycine max
  unsure (1)..(440): unsure at all Xaa locations
MEQKGGVLMQRYELGRLLGQGTFAKVYHARNIITGMSVAIKITDKDKILKVGXVMRLIRHPHVVELYEVMASKTKIYFVMEYVKGGELFNKVSKGKLKQDDARRYFQQLISAVDYCHSRGVCHRDLKPENLLLDENGNLKVTDFGLSTLAETKHQDGLLHTTCGTPAYVAPEVINRRGYDGAKADIWSCGVILYVLLAGXEFKFPNWIAPDLRRLLSKILDPNPKTRISMAKIMESSWFKRGLEKPTITRNEDQELAPLDADGVFGACENGDPIEPAKDSKRCNNLNAFDIISYSSGFDLSGLFEETNRKKEARFTSDKPASIIISKLEEICIRLGLKVKKKDGGLFKLEGSKEGRKGSLGIDAEIFEITPVFHLVELKKSSGDTLEYQKLLKQEVRPALKDIVWNWQGEQPQQLQHGVVQKEEQPSYPGISDVAPPQTA

SEQ ID NO: 4629 - protein, 481 aa, Rubrobacter xylanophilus DSM 9941
MAQLLVGGERVSARGGGEMPVVNPATEEVVDTVPKGTAEDVEAAVAAAKGALAEWSGKDPDERAAIMRAGIGAVKERGREIAELLVREQGKPLSEAMGELHHFIHGMDFYADLASKVRGAYAPLPSSLGKSYGMVIKRPVGVCAAIVPFNFPLTLMGTKVGPALAGGNTVVVKPAETTPLATLRVAELFAEAGLPAGVFNVVTGEGPEVGEALVAHPDVRRVAFTGSTEVGRRIMELAGPQFKRVSVELGGSDPVIVCPDADVDAAVKGVNIGRFFNAGQACLAAKRVYVFDEVYDEFMEGLIKRVSRYELGDGLTKAEKPKIRMGPMNSARYRDQVASQLEEALGRGARVVYQGEWGGEKGYFFPPAVIEGAPHDSRVVREETFGPLLPVFRVGDLDEALRLANDSRYGLGSSIWTRNIRWIHRAAQEIEAGMTWVNQLHYGYDELPFGGVKDSGVGREHGPEALEYYLESKSVVIGGLD

SEQ ID NO: 4630 - protein, 510 aa, Eustoma grandiflorum
MAVGNGVLLHIAASLMLFFHVQKLVQYLWMNSRRHRLPPGPIGWPVLGALRLLGTMPHVALANMAKKYGPVMYLKVGSCGLAVASTPEAAKAFLKTLDMNFSNRPPNAGATHLAYNAQDMVFADYGPRWKLLRKLSNIHILGGKALQGWEEVRKKELGYMLYAMAESGRHGQPVVVSEMLTYAMANMLGQVMLSKRVFGSQGSESNEFKDMVVELMTVAGYFNIGDFIPSIAWMDLQGIQGGMKRLHKKFDALLTRLLEEHTASAHERKGSPDFLDFVVANGDNSEGERLQTVNIKALLLNMFTAGTDTSSSVIEWALAELLKNPIILRRAQEEMDGVIGRDRRFLEADISKLPYLQAICKEAFRKHPSTPLNLPRIASQACEVNGHYIPKGTRLSVNIWAIGRDPSVWENPNEFNPDRFLERKNAKIDPRGNDFELIPFGAGRRICAGTRLGILLVEYILGTLVHSFVWELPSSVIELNMDESFGLALQKAVPLAAMVTPRLPLHIYSP

SEQ ID NO: 4631 - protein, 301 aa, Arabidopsis thaliana
MKLNEEYVKFLGEGAYSFVDLFKYTKSDGSSFHAAVKSSDDENSLLKEFHILSELKGCPRIIQCFGNDLEEGFDDKGNRVYKLLLEYASEGSLSDFMNNCVDRKLPDLMIRDFTRMILQGLVSIHSHGYVHCDLKPENVLVFPCGDSYEVKISDFGLSLQVGEVPDHWKIEYPFVGTLNYMPPESLHDGVANKTLDLWSLGCLVLEMYVCKKPWIGFIPEDFVYILSNGNPPEIPESLPCDARAFIQKCFSRNPKERGTASELLSHRFLRQEKSKLKMISPFNLLKFKKFLNKLLRLKNFL

SEQ ID NO: 4632 - protein, 156 aa, Zea mays
MLLLLCRVDVMCGILVGLGCSHWAQAKRARILVWSGRVKHRGPDWWCLYHDDGNFLAQQRLADCSPLSGDQLLFNEDRTDVVVVNGEIYNHKNVRKQFAGTHDYRRCSDCGVIMPLHDNYSENFENMMDRPFVFVLYHIRDRTNGVESDAIVDEPL

SEQ ID NO: 4633 - protein, 457 aa, Staphylococcus aureus subsp. aureus Mu50
MAIAVLLNRMFRMEHNPLFEYIYQQKEDIDACYFIIPEEDMSSASDLKAQFYRGTLQRFYQSLHAEKLTPYVMSYDDIISFCKENNISEVVIAGDIMSYHLEEYDILHQRSLFNEARIAVTLIRGNHYFKASKTMNQQGEPYKVFTSFYRKWRPYLRHRDVYHYDLKSFEDFVIASPDDLVFDDIAFGSSQVIEQNKWQHFLDQDIQNYESGRDYLPEVLTSQLSVALAYGLLDIIEIFNDLLARYDEDEANHEAFIRELIFREFYYVLMTQYPETSYQAFKPKYRQIKWSQNEANFNAWCEGQTGFPIIDAAIMELTQTGFMHNRMRMVVSQFLTKDLFIDWTWGEKFFRKHLIDYDAASNIHGWQWSASTGTDAVPYFRMFNPIRQSERFDAKALYIKTYLPIFNQIDAKYLHDTQRNESNLFEQGIELGSHYPRQMVDHQEKRTQVLATFKALD

SEQ ID NO: 4634 - protein, 457 aa, Staphylococcus aureus subsp. aureus MSSA476
MAIAVLLNRMFRMEHNPLFEYIYQQKEDIDACYFIIPEEDMSSASDLKAQFYRGTLQRFYQSLHAEKLTPYVMSYDDIISFCKENNISEVVTAGDIMSYHLEEYDILHQRSLFNEARIAVTLIRGNHYFKASKTMNQQGEPYKVFTSFYKKWRPYLRHRDVYHYDLKSFEDFVIASPDDLVFDDIAFGSSQIIEQNKWQHFLDQDIQNYESGRDYLPEVLTSQLSVALAYGLLDIIEIFNDLLARYDEDEANYEAFIRELIFREFYYVLMTQYPETSYQAFKPKYRQIKWSQNEADFNAWCEGQTGFPIIDAAIMELTQTGFMHNRMRMVVSQFLTKDLFIDWTWGEKFFRKHLIDYDAASNIHGWQWSASTGTDAVPYFRMFNPIRQSERFDAKALYIKTYLPIFNQIDAKYLHDTQRNESNLFEQGIELGSHYPRQMVDHQEKRTQVLATFKALD

SEQ ID NO: 4635 - protein, 153 aa, Nicotiana benthamiana
MKMIVLRSSDGETFEVEESVALESQTIKHMIEDDCADTSIPLPNVTSKILAKVIEYCKRHVDAASKTEDKAVEDDLKAFDADFVKVDQSTLFDLILAANYLNIKRLLDLTCQTVADMIKGKTPEEIRKTFNIKNDFTPEEEEEVRRENAWAFE

SEQ ID NO: 4636 - protein, 297 aa, Candidatus Carsonella ruddii
MKFFDFIKNKTKISIDSADINFIKNKLFNAATTNPSLILKSILSKVYNKLLYAFLLKNFKKKIIDSDYNISLYDKLLVNIIANIIPYIEEKISIEIPARISFNYNKIIFYSYKIIYLCEKIGINLKKILIKIPATNSGIKAAKQLKNNNINSNLTLIFNLTQAKKCFDSGIYIISPFVGRVSDSIYCKYDSGVNFVKNLVNLKNNNNYSTKIMAASFRNINQIINLTCCDFITISPIYYNKLKNINYKNSVLNYKSNIDFCNNENYNSIKLLNNGIKQFDIDHNRLIKLISNLINNL

SEQ ID NO: 4637 - protein, 182 aa, Glycine max
MASKIFYLLSLLLLAHLLQPHVFVKGDGSLIEKTCKNTKYYNLCFSSLKSNPSSANADPKGLAVIMVGIGMANATSTSLYLSSKMLGTANNNDSTFKRVLKECAEKYKYASDALQASAQDLVNEAYDYASMHIIAAYDYSNVCHNLFKLYSGLVYPSELAPREDGLKCLCDVALGIVENLNR

SEQ ID NO: 4638 - protein, 153 aa, Zea mays
  unsure (1)..(153): unsure at all Xaa locations
MCGILAVLGCADEAKGSSKKSPVLXLSXRLKHXXPDWSALRAVXDCXLSPQXLGIIDRXSGEQPSTGPRGAPPNGKIKTPWTSGAPSRGKAKFKNRREVEEFPNLSKRWEKNFGKFGRGVLPFGGGETPPGGTAREKKFFRGGRQPPRGGPPL

SEQ ID NO: 4639 - protein, 314 aa, Zea mays
MSATGRAPCGLPRIGLGTAVQGPRPDPVRAAVLRAIQLGYRHFDTAAHYATEAPIGEAAAEAVRTGLVASREDLFVTSKVWCADAHRDRVLPALRRTLSNLQMEYVDLYMVHWPVTMKAGRFTAPFTPEDYEPFDMRAVWEAMEECHRLGLAKAIGVCNFSCKKLETLLSFATIPPVVNQVEINPVWQQRKLREFCRAKGIQLCAYSPLGAKGTHWGSDSVMDSGVLHEIAMSKGKTVAQVCLRWVYEQGDCLIVKSFDEGRMKENLDIVDWELSEEERQRISKIPQRKINQGRRYVSEHGPYKSFEELWDGEI

SEQ ID NO: 4640 - protein, 385 aa, Triticum aestivum
IDPDCSWVEQWVHRAGPRKDIYYEPNEVKAAIVTCGGLCPGLNDVIRQVVFTLETYGVKNIVGIPFGFRGFFEKGLKEMPLSRNLVENINLAGGSFLGVSRGGAKTSEIVDSIQARRIDMLFVLGGNGTHAGANAIHDECRKRKLKVSVVAVPKTIDNDIPLMDKTFGFDTAVEEAQRAINSAYIEARSAYHGIGLVKLMGRSSGFIAMHASLSSGQVDVCLIPEVSFALDGEYGVLQHLEQLIKNKGFCVVCVAEAAGQELLQNSGATDASGNAILSDIGVHMQQKIKTHFKGIGVHADIKYIDPTYMVRACRANASDAILCTVLGQNAVHGAFAGFSGITSCICNTHYVYLPVTQVITAPKRVNHKGRMWHRCLTSTGQPDFR

SEQ ID NO: 4641 - protein, 392 aa, Escherichia coli
KITLQNGKLNVPENPIIPYIEGDGIGVDVTPAMLKVVDAAVEKAYKGERKISWMEIYTGEKSTQVYGQDVWLPAETLDLIREYRVAIKGPLTTPVGGGIRSLNVALRQELDLYICLRPVRYYQGTPSPVKHPELTDMVIFRENSEDIYAGIEWKADSADAEKVIKFLREEMGVKKIRFPEHCGIGIKPCSEEGSKRLVRAAIEYAIANDRDSVTLVHKGNIMKFTEGAFKDWGYQLAREEFGGELIDGGPWLKVKNPNTGKEIVIKDVIADAFLQQILLRPAEYDVIACMNLNGDYISDALAAQVGGIGIAPGANIGDECALFEATHGTAPKYAGQDKVNPGSIILSAEMMLRHMGWTEAADLIVKGMEGAINAKTVTYDFERLMEGAKLLK

SEQ ID NO: 4642 - protein, 384 aa, Glycine max
  unsure (1)..(384): unsure at all Xaa locations
PRVRLSPEIIETCLMWYARVDPPAVSRSNRKPLPSSSSSSSVATEAEQKEILETLVSNLPLEKSSKAATATRFLFGLLRTTNILNASEACRDALEKKIGLQLEEATLDDLLVPSYSYLNETLYDVDCVERILSQFLEGLEARTAAETTEDAAATRSPALMLVGKLIDGYLSEIASDANLKPEKFYNFAISLPDEARLFDDGLYRAVDVYLKAHPWVLEEEREKICGLLDCQKLTLEACTHAAQNERLPLRSVDQELFFXQLQLPQAIAGNFDGGGSRRETGKAINGAGAESGGQKKIKIRDRARAGTXGTWRVAMKDNQVLRLDMDSMKTHVHQLKRXCSSMKRVIFKINKFATYLGGWKATHDLKYPCKFKTQVCESQQSTDR

SEQ ID NO: 4643 - protein, 369 aa, Glycine max
MSSNSRESQVHPEIAKVEDPYLSAVLLCFSRVLPAVLNAAIDLNLFDIIAKAQSSCDSSFSASEIASLLPNQHPQLANRLERILPLLASYSLLNCSIRTNEDGKRERVYALSPVGAYFAFDKDEGSSLAPLSSLIHRGFHDMWKDVKDAIVDPNNNNHFENVHGIPPYDYMEKNAELNDIFYKAVIHAAPLELKRALKLYKGFEGVSTLVDVGGGAGETLKQILPKYPSMKGINFDLPLVIQKAPPHPGIEQIAGDMFESVPTGDAILVKFVCHNWADEDCIKFLRNFHKALPQHGKVIVFEYIIPEVPNPSYISKHTCTLDNVMFLAHGGRERTQKEFENLCKSSGFSKFHVASSDISSTLGVMEFYK

SEQ ID NO: 4644 - protein, 178 aa, Glycine max
  unsure (1)..(178): unsure at all Xaa locations
MASSMISSPAVTTVNRAGADMVAPFTDLKSMAGFPDQKTNNDITSIASNGGRVQCMQVWPPXGKKKFETLSYLPXLNNTQLAKEVEYLLRKGWIPCLKFKLKHGFIYQEHNKSPKYYNGHYXTMXKLPMFDCTDASQVLKELQEAKTAYPNNFIHIIKFHNIHQMQYISFITYEPPSF

SEQ ID NO: 4645 - protein, 487 aa, Acinetobacter sp. ADP1
MNARFQELLPELALYAGSKKLDVNQTFQDINPCDEILIAHIPKASVEDLNAIVAVAKQGLNSTAWHEVTPLQRENLIRCFADAIEKDSTRLAQLESIDAGKPISITQTVDIPAVVAWLKYYAGWASKIMGSAGELSNVAGSFHAYSRRQPVGVVAAITPWNFPSVLSMWKIAPALAAGCCIVLKPASDTPLTALRLAEIAREIGFPEGVFNVVTGNSDIGHALATHPDIAKVAFTGSTQTGRSILQASIADFKRVTLELGGKSPVILHKDADLDKAIPTIAMGCFFNTGQVCYAGTRLYVHHDIYDEVLARLAAFTKTLKIGSSDDPNTQLGPVVNARQQHSIQEFLNKAEQQGIESLDLSAMTLPEHGFYVRPAILKNVPAHAAIMKEEVFGPVLATAAYQSLDEAIQLSNDSIYGLAAHLWTQDLSIAHQVSAALDAGTVFVNCALLADPNFPFGGFKQSGIGRENGQEVLDAYLESKSVIMALS

SEQ ID NO: 4646 - protein, 228 aa, Desulfovibrio vulgaris subsp. vulgaris str. Hildenborough
MPCYPTYPTDGQDMKSCNTFFCDGRIRRPDRERLNGHPARAFWFTGLPSAGKSTLAHIAEEVLHQRGIRTYVFDGDNVRHGLCGDLGFSEHDRKENVRRIAETVRLFLDAGILCLCAFVSPLRANRQAVRDIIGPCDFFEVYVKCPVTVCESRDVKGLYGKARQGLVENYTGISAPYEEPESPDIVVDTSRNTIEESVQSLTDFILQVMTVPCAQKDAQAPGKAVRFP

SEQ ID NO: 4647 - protein, 429 aa, Mesorhizobium loti MAFF303099
MTDFYNLVPSAPEGRFDGIERPYSPEDVKRLRGSVQIRQSLAEMGANRLWKLIHEEDFVNALGAMSGNQAMQQVRAGLKAIYLSGWQVAADANTASAMYPDQSLYPANAAPELVKRINRTLQRADQIETSEGNGLSVETWFAPIVADAEAGFGGPLNAFEIMKAFIEAGAAGVHYEDQLASEKKCGHLGGKVLIPTAAHIRNLNAARLAADVMGTPTLVVARTDAEAAKLLTSDIDERDQPFVDYDAGRTVEGFYQVRNGIEPCIARAVAYAPHADLIWCETSKPDLAQAKKFAEGVRRHHPGKLLAYNCSPSFNWKKNLDDATIAKFQRELGAMGYKFQFITLAGFHQLNYGMFELARGYKERQMAAYSELQEAEFAAEANGYTATKHQREVGTGYFDAVSMAITGGKSSTTAMHESTEHAQFRPAAE

SEQ ID NO: 4648 - protein, 306 aa, Lycopersicon esculentum
MPSHADVDRQIEQLMECKPLSEAEVKTLCEQARAILVEEWNVQPVKCPVTVCGDIHGQFYDLIELFRIGGNVLITNYLFMGDYVDRGYYSVETVSLLVALKVRYRDRITILRGNHESRQITQVYGFYDECLRKYGNANVWKYFTDLFDYLPLTALIESQIFCLHGGLSPSLDTLDNIRALDRIQEVPHEGPMCDLLWSDPDDRCGWGISPRGAGYTFGQDIASQFNHTNGLSLISRAHQLVMEGFNWCQDKNVVTVFSAPNYCYRCGNMAAILEISENMEQNFLQFDPAPRQIEPDTTRKTPDYFL

SEQ ID NO: 4649 - protein, 270 aa, Triticum aestivum subsp. macha
GTANMQVDPSSQVQWPQQQPVPQPHQPFSQQPQQTFPQPQQTFPHQPQQQFPQPQQPQQQFLQPQQPFPQQPQQPYPQQPQQPFPQTQQPQQLFPQSQQPQQQFSQPQQQFPQPQQPQQSFPQQQPPFIQPSLQQQVNPCKNFLLQQCKPVSLVSSLWSMIWPQSDCQVMRQQCCQQLAQIPQQLQCAAIHTIIHSIIMQQEQQEQQQGMHILLPLYQQQQVGQGTLVQGQGIIQPQQPAQLEAIRSLVLQTLPTMCNVYVPPECSIIKA

SEQ ID NO: 4650 - protein, 306 aa, Lycopersicon esculentum
MPSHADLDRQIEQLMECKPLSEADVKTLCDQARAILVEEWNVQPVKCPVTVCGDIHGQFYDLIELFRIGGNAPDTNYLFMGDYVDRGYYSVETVTLLVALKVRYRDRITILRGNHESRQITQVYGFYDECLRKYGNANVWKYFTDLFDYLPLTALIESQIFCLHGGLSPSLDTLDNIRALDRIQEVPHEGPMCDLLWSDPDDRCGWGISPRGAGYTFGQDIASQFNHTNGLTLISRAHQLVMEGFNWCQDKNVVTVFSAPNYCYRCGNMAAILEIGENMEQNFLQFDPAPRQIEPDTTRKTPDYFL

SEQ ID NO: 4651 - protein, 344 aa, Burkholderia cepacia R1808
MKIVKPLLIAAVVAATWSGASAATAASAQAVRPDTATSAFLAVLNGQKGPGLETLSPEKARQVLVDAQSGVKVDLSGIDVSNRTIEQDGLSVPITIVRPQQVSGTPPVFMFFHGGGWILGDFPTHERLVRDLVVQSGAVAVFVNYTPSPEAHYPVAINQAYAATKWVAAHGAEIGVDGSRLAVVGNSVGGNMAAVVALMAKDKGGPAIRFQGLLWPVTDHDFNTGSYGAYAQGHFLTRPLMKWFWNAYTKNEAQRDEIYASPLRASVAQLKGLPPALIQVAQFDVLRDEGEAYGRKLDAAGVDATTTRYDGTIHDFGLLNALANDAPTKAAMKAMGNEIAARLK

SEQ ID NO: 4652 - protein, 202 aa, Rubrivivax gelatinosus PM1
MLRNTYALLSMTLLFSAAIAAASVTFQLPAPGILLTLGGYFGLLFAVYKFKNSGWALPAVFALTGFMGYSLGPVLAKSLALPGGAQVVTMALAATGATFLALSAWVLTTRRDFSFMGGFLFAGMVIALIAGLGAVFLQVPALGLAVAAMVALLSAGLILYETSRIVTGGETNYVLATVGLYVSIFNLFTSLLSLFGFGNSDE

SEQ ID NO: 4653 - protein, 109 aa, Nicotiana benthamiana
MPSHGDLDQQIAQLMECKPLSEAEVKTLCDQARAILVEEWNVQPVKCPVTVCGDIHGQFYDLIELFRIGGNAPDTNYLFMGDYVDRGYYSVETVTLLVALQVRYRDRIT

SEQ ID NO: 4654 - protein, 259 aa, Triticum aestivum subsp. spelta
QVDPSSQVQWPQQQPVPQPHQPFSQQPQQTFPQPQQTFPHQPQQQFPQPQQPQQQFLQPQQPFPQQPQQPYPQQPQQPFPQTQQPQQLFPQSQQPQQQFSQPQQQFPQPQQPQQSFPQQQPPFIQPSLQQQVNPCKNFLLQQCKPVSLVSSLWSMIWPQSDCQVMRQQCCQQLAQIPQQLQCAAIHTVIHSIIMQQEQQQGMHILLPLYQQQQVGQGTLVQGQGIIQPQQPAQLEAIRSLVLQTLPTMCNVYVPPECSI

SEQ ID NO: 4655 - protein, 132 aa, Lotus corniculatus var. japonicus
ALYQWAFAIAAAGITSGSIAERTQFVAYLIYSSFLTGLVYPIVAHWFWSSDGWGSPARTENLLFGSGVIDFAGSGVVHLVGAVAGFWGAFIEGPRMGRFDHAGKPVPLRGHSGTLVVLGTFLLWFGWYGFNP

SEQ ID NO: 4656 - protein, 119 aa, Nicotiana benthamiana
MSSSDLVAASTPGNLDEQISQLMQCKPLSKPDVRALCEKAKEILMEESNVQPVKSPVTICGDIHGQFHDLAELFRIGGQCPDTNYLFMGDYVDRGYYSVETVTLLVALKVRYPQRLTIL

SEQ ID NO: 4657 - protein, 168 aa, Setaria italica
  unsure (1)..(168): unsure at all Xaa locations
MAAASSTTSVHDFTVKDASGKDVDLSTYKGKVLLIVNVASQCGLTNSNYTELAQLYEKYKDQGFEILAFPCNQFGGQEPGTNEEIVQFACTRFKAEYPIFDKVDVNGNNAAPIYKFLKSSKGGLFGDSIKWNFSKFLVDKEGRVVDRYAPTTSPLSIEXDIKKLLGSS

SEQ ID NO: 4658 - protein, 158 aa, Chromobacterium violaceum ATCC 12472
MSIYDFSFRRLDGSEQAMADYRGSVLLLVNTASRCGFTSQYAGLEALHRRFGPQGLAIIGFPCNQFGAQEPGDAGEIGAFCQKNYGVDFAMADKVDVNGANAHPLWQYLKRQKRGLLGQAIRWNFSKFLVDRQGRVVARFAPFTRPEKLAARIEALLK

SEQ ID NO: 4659 - protein, 445 aa, Vibrio parahaemolyticus RIMD 2210633
MKKKIGLYWFTFDLRLHDNSLLVDASSFLDELVCLYCRPSVTPFLHHFAQEVTLGRARQKFIDASLCELNDALGQLGQRLWTLDLPPYQALKYAIQYLSVTHLYSDAMAGSDEQSILHKLQDEYPHLVIVQHSVRSLFDESKLPFTLPDLPETFTQFRKCVEGIDIAHPIDAPSRLPPMPKGAQLPTLSSFYFDESALFSGGEWSGLAHCRRYFFSGLASSYKETRNGLDGMAYSTKFSPWLALGCVSPRMIHAMLKQYEQTQGANDSTYWIYFELLWREYFYWYARCYQQRLFRFGGIRNQPPLTSFYAHRFQQWKNGTTPYPIVNACMHQLNHTGYMSNRGRQLVASCLVHELGLDWRYGAAYFETQLIDYDVGSNWGNWQYLAGVGADPRGSRQFNLEKQTQMYDPNHEFIERWQGRDSRAQQDVVDMVGWPITTQQENGDK

SEQ ID NO: 4660 - protein, 177 aa, Triticum aestivum
  unsure (1)..(177): unsure at all Xaa locations
MAPTVMASSATSVAPFQGLKSTAGLPVSRRSNGASLGSVSNGGRIRCMQVWPIEGIKKFETLSYLPPLSTEALLKQVDYLIRSKWVPCLEFSKVGFIFREHNASPGYYDGRYWTMWKLPMFGCTDATQVINEVEEVKKEYPDAYVXRIIGFDNMRQVQCVSFIAFKPPGXCEESGKA

SEQ ID NO: 4661 - protein, 278 aa, Bacteroides thetaiotaomicron VPI-5482
METVRLNNGVEMPILGYGVYQVTPEECERCVLDAISVGYRSIDTAQAYYNEEGVGNAVRKCGVPREELFITTKVWISNGGYEKAKASIDESLRKLQSDYVDLLLIHQPFNDYYGTYRAMEEAYKAGKARAIGVSNFYPDRFIDLAEFCEIKPAVNQVETHVFNQQVKPQEIMKKYDTKVMSWGPFAEGRNNFFSNEVLKAIGEQYGKSVAQVALRFLIQRDIIVIPKSTRKERMIENFDVFDFTLSVKDMEEIAGLDKKESLFFSHYDPEMVNFLINL

SEQ ID NO: 4662 - protein, 392 aa, Escherichia coli
KITLQNGKLNVPENPIIPYIEGDGFGVDVTPAMLKVVDAAVEKAYKGERKISWMEIYTGEKSTQVYGQDVWLPAETLDLIREYRVAIKGPLTTPVGGGIRSLNVALRQELDLYICLRPVRYYQGTPSPVKHPELTDMVIFRENSEDIYAGIEWKADSADAEKVIKFLREEMGVKKIRFPEHCGIGIKPCSEEGTKRLVRAAIEYAIANDRDSVTLVHKGNIMKFTEGAFKDWGYQLAREEFGGELIDGGPWLKVKNPNTGKEIVIKDVIADAFLQQILLRPAEYDVIACMNLNGDYISDALAAQVGGIGIAPGANIGDECALFEATHGTAPKYAGQDKVNPGSIILSAEMMLRHMGWTEAADLIVKGMEGAINAKTVTYDFERLMEGAKLLK

SEQ ID NO: 4663 - protein, 357 aa, Oryza sativa (japonica cultivar-group)
MVVPDESTIWDEVLEEADELAYVHKVPPSISFLSAGTGKRRKGEHRLKFSIRGSSSVSLNVKTENPYIGEQEVSSVMPTNRAPETMMAEQLENIKEETEDLPSEFACSTKKANVSISELLDSLQDRSASSAGTPFLLHQHTRPKEEKPKVPTSVKRTLALLGQRNLETENPLEHVIGETSSEEEDDAQNNLALINKDVKGQTMADIFQQVFNATSMDCFTLPVRSYGSGYYGRMQQILQMEKDRHAEFLRQYNREQDYLGDPKGVTVQILSRSLEGKLTICRCLFMEKSNLATTGEVSTDLDMDNSSVKRTIIFSPKICDNVDLLAGNIIHIFPPWKEVKVKEETVILCTYFSHRGV

SEQ ID NO: 4664 - protein, 279 aa, Staphylococcus aureus subsp. aureus Mu50
MLNEIQILNNGYPMPSVGLGVYKISDEDMTKVVNAAIDAGYRAFDTAYFYDNEASLGRALKDNGVDREDLFITTKLWNDYQGYEKTFEYFNKSIENLQTDYLDLFLIHWPCEADGLFLETYKAMEELYEQGKVKAIGVCNFNVHHLEKLMAQSSIKPMVNQIEVHPYFNQQELQEFCDRHDIKVTAWMPLMRNRGLLDNPVIVKIAEKYHKTPAQVVLRWHLAHNRIIIPKSQTPKRIQENIDILDFNLELTEVAEIDALDRNARQGKNPDDVKIGDLK

SEQ ID NO: 4665 - protein, 392 aa, Escherichia coli
KITLQNGKLNVPENPIIPYIEGDGIGVDVTPAMLKVVDAAVEKAYKGERKISWMEIYTGEKSTQVYGQDVWLPAETLDLIREYRVAIKGPLTTPVGGGIRSLNVALRQELDLYICLRPVRYYQGTPSPVKHPELTDMVIFRENSEDIYAGIEWKADSADAEKVIKFLREEMGVKKIRFPEHCGIGIKPCSEEGTKRLVRAAIEYAIANDRDSVTLVHKGNIMKFTEGAFKDWGYQLAREEFGGELIDGGPWLKVKNPNTGKEIVIKDVIADAFLQQILLRPAEYDVIACMNLNGDYISDALAAQVGGIGIAPGANIGDECALFEATHGTAPKYAGQDKVNPGSIILSAEMMLRHMGWTEAADLIVKGMEGAINAKTVTYDFERLMEGAKLLK

SEQ ID NO: 4666 - protein, 410 aa, Rickettsia rickettsii
DSEFAELKIRGKIFKLPILKASIGEDVIDISRVSAEADCFTYDPGFMSTASCQSTITYIDGDKGILRHRGYDIKDLAEKSDFLEVAYLLIYGELPSGEQYNNFTKQVAHHSLVNERLHYLFQTFCSSSHPMAIMLAAVGSLAAFYPDLLNFKEADYELTAIRMIAKIPTIAAMSYKYSIGQPFIYPDNSLDFTENFLHMMFATPCTKYTVNPIIKNALNKIFILHADHEQNASTSTVRIAGSSGANPFACISTGIASLWGPAHGGANEAVINMLKEIGSSEYIPKYIAKAKDKNDPFRLMGFGHRVYKNYDPRAVVLKETCKEVLKELGQLDNNLLQIAIELEAIALKDEYFIERKLYPNVDFYSGIIYKAMGIPSQMFTVLFAIARTVGWMAQWKEMHEDPEQKISRPR

SEQ ID NO: 4667 - protein, 279 aa, Staphylococcus aureus subsp. aureus MSSA476
MLNEIQILNNGYPMPSVGLGVYKISDEDMTKVVNAAIDAGYRAFDTAYFYDNEASLGRALKDNGVDREDLFITTKLWNDYQGYEKTFEYFNKSIENLQTDYLDLFLIHWPCEADGLFLETYKAMEELYEQGKVKAIGVCNFNVHHLEKLMAQSSIKPMVNQIEVHPYFNQQELQEFCDRHDIKVTAWMPLMRNRGLLDNPVIVKIAEKYHKTPAQVVLRWHLAHNRIIIPKSQTPKRIQENIDILDFNLELTEVAEIDALNRNARQGKNPDDVKIGDLK

SEQ ID NO: 4668 - protein, 191 aa, Triticum aestivum
  unsure (1)..(191): unsure at all Xaa locations
MAPTVMASSATSVAPFQGLKSTAGLPVSRRSNGASLGSVSNGGRIRCMQVWPIEGIKKFETLSYLPPLSTEALLKQVDYLIRSKWVPCLEFSKVGFIFREHNASPGXYYDGRYWTMWKLPMFGCTDATQVINEVEEVKKEYPDAYVRIIGFDNMRXVQCVSXIXFKPPGCEESGKXTGSHGPHIKPLRFQL

SEQ ID NO: 4669 - protein, 411 aa, Rickettsia sp.
DSEFAELKIRGKIFKLPILKASIGEDVIDISRVSAEADCFTYDPGFMSTASCRSTITYIDGDKGILRYRGYDIKDLAEKSDFLEVAYLLIYGELPSSEQYNNFTKKVAVHSLVNERLHYLFQTFCSSSHPMAIMLAAVGSLSAFYPDLLNFKEADYELTAIRMIAKIPTIAAMSYKYSIGQPFIYPDNALDFTENFLHMMFATPCEKYKVNPIIKNALNKIFILHADHEQNASTSTVRIAGSSGANPFACVSTGIASLWGPAHGGANEAVINMLKEIGSSENIPKYIAKAKDKNDPFRLMGFGHRVYKNYDLRAAVLKETCKEVLKELGQLDGNPLLQIAIELEAIALKDEYFIERKLYPNVDFYSGIIYKAMGIPSQMFTVLFAIARTVGWMAQWKEMHEDPEQKISRPR

SEQ ID NO: 4670 - protein, 459 aa, Mycobacterium leprae TN
MVSVQESALVVYTSGVKRLVASYRSIPATSPVRLAKPTSNLFRTRAKRDAPGLDASGLTGVIGIDTEARTADVAGMCTYEDLVAATLPYGLLPLVVPQLKTITLGGAVTGLGIESASFRNGLPHESVLEMDILTGAGELLTVSANQHGDLYRAFPNSYGTLGYSTRFRISLEPVTPFVALRHIRFHLLTEMVTAMENIIDTGGHDGVPVDYLDGVVFSANESYLCIGKRTTTPGPVSDYTGQHIYYRSIQHDNEVKEDRLTIHDYVWRWDTDWFWCSRAFGAQNQQLRRWWPRRYRRSSVYWKLMAADRRFGIVDRIEARNGRPLRERVVQDVELPIERTCEFLEWFLGSVPIAPIWLCPLRLRDHNSWPLYPIQPDHSYVNVGFWSSVPAGATEGETNRTIEAKVSALDGHKSLYSDSFYTREEFNELYGGESYNAVKKIYDPDSRLLDLYAKVVQRR

SEQ ID NO: 4671 - protein, 177 aa, Triticum aestivum
  unsure (1)..(177): unsure at all Xaa locations
MAPTVMALVGPPPSLPFQGLKSTVGLPVSXGSNGASLGSVSNGGRIRCMQVWPIEGIKKFETLSYLPPLSTEALLKQVDYLIRSKWVPCLEFSKVGFIFREHNASPGYYDGRYWTMWKLPMFGCTDATQVINEVEEVKKEYPDAYVRIIGFDNMRQVQCVSFIAFKPPGCXEESGKA

SEQ ID NO: 4672 - protein, 130 aa, Triticum aestivum
MAMEARMKGTVKWFNDTKGFGFISPADGSEDLFVHQSSIKADGFRSLAEGEEVEFAVSEGDDGRTKAVDVTGPDGSFVQGGAGGGGGGGGFGSRGGGGSRGGGGFGARGGDGSGGYGGGYGGGGGGGWGR

SEQ ID NO: 4673 - protein, 363 aa, Oryza sativa (japonica cultivar-group)
MSFCERDMNKESMYQERDDMAGIRFATPPLPQQQQQQQLVECFSDEVDSRGSGGEMKDAVGSGSGQLVVVGGGDGASIEVAKKRRGRPPGSKNKPKPPVVITREAEPAAAMRPHVIEIPGGRDVAEALARFSSRRNLGICVLAGTGAVANVSLRHPSPGVPGSAPAAIVFHGRYEILSLSATFLPPAMSSVAPQAAVAAAGLSISLAGPHGQIVGGAVAGPLYAATTVVVVAAAFTNPTFHRLPADDDASVSVSVSLSGSGDADEHRGHQHKPEPQEPRQLRRPPPHLSAAAAVSAAQPVEPCGAPMYACHPQPQEVMWPPPARTPHPPPPPPWGEQEKGGEGDERGRDGVVEGRVAAAGDVE

SEQ ID NO: 4674 - protein, 411 aa, Rickettsia sp.
DSEFAELKIRGKIFKLPILKASIGEDVIDISRVSAEADCFTYDPGFMSTASCQSTITYIDGDKGILRHRGYDIKDLAEKSDFLEVAYLLIYGELPNGEQYNNFTKQVAHHSLVNERLHYLFQTFCSSSHPMAIMLAAVGSLSAFYPDLLNFKEADYELTAIRMIAKIPTIAAMSYKYSIGQPFIYPDNSLDFTENFLHMMFATPCTKYKVNPIIKNALNKIFILHADHEQNASTSTVRIAGSSGANPFACISTGIASLWGPAHGGANEVVINMLKEIGSSEYIPKYIAKAKDKNDPFRLMGFGHRVYKNYDPRAAVLKETCKEVLKELGQLDNNPLLQIAIELEAIALKDEYFIERKLYPNVDFYSGIIYKAMGIPSQMFTVLFAIARTVGWMAQWKEMHEDPEQKISRPR

SEQ ID NO: 4675 - protein, 492 aa, Oryza sativa (japonica cultivar-group)
MVPREQAEEAIVADSNGKEEEVGVMGVSAGEHGADDHHGGGGKFSMKNLLWHGGSVWDAWFSCASNQVAQVLLTLPYSFSQLGMLSGVLLQLFYGFMGSWTAYLISVLYVEYRSRKEKEGVSFKNHVIQWFEVLDGLLGPYWKAAGLAFNCTFLLFGSVIQLIACASNIYYINDRLDKRTWTYIFGACCATTVFIPSFHNYRIWSFLGLGMTTYTAWYLAIAALLNGQAEGITHTGPTKLVLYFTGATNILYTFGGHAVTVEIMHAMWKPAKFKYIYLLATLYVFTLTLPSASAMYWAFGDELLTHSNAFSLLPKTGWRDAAVILMLIHQFITFGFACTPLYFVWEKVIGMHDTKSICLRALARLPIVVPIWFLAIIFPFFGPINSAVGALLVSFTVYIIPALAHILTYRTASARMNAAEKPPFFLPSWTGMFVLNMFIVVWVLVVGFGLGGWASMVNFIRQIDTFGLFAKCYQCPKPAPALAQSPVPLPHH

SEQ ID NO: 4676 - protein, 158 aa, Glycine max
MDIRLMDLDSPLFNTLHRIMDLTEDAEKNLNAPTRTYVRDAKAMAATPADVKEYPNYYVFVIDMPGLKSGDIKVQVEDDNVLLISGERKREEDKEKEGAKYLRMERRVGKFMRKFTLPENANTDAISAVCQDGVLTVTVNKLPPPQPKKPKTIEVKIA

SEQ ID NO: 4677 - protein, 286 aa, Arabidopsis thaliana
MSQAPNPEEEDDTIEIREVWNHNLEQEMALIEQSIDDFPYVAMDTEFPGIVCKTVTANPNPNPYSIHYEYNYDTLKANVNMLKLIQLGLTLSDEKGNLPTCGTNKQCIWQFNFREFNVISDMFALDSIELLRKSAIDLEKNNECGVDAKRFAELLMGSGVVLNDKIHWVTFHCGYDFGYLLKLLSGKELPEEISDFFDQMEKFFPVVYDIKYLMGFCTNLYGGLEKIAELLGVKRVGISHQAGSDSLLTLRTFIKMKEFFFTGSLLKYSGFLFGLDNPRLLTGSKN

SEQ ID NO: 4678 - protein, 479 aa, ASPERGILLUS NIDULANS FGSC A4
MSSQIDTTHYPGNIINNQFVPSARTRHSTNPSTGEPLYEVPWATEEDVDRAVEHARTAFKSWSRLPFQERSRLLVAYADAVEAERAPLAKLLVLEQGKPLSLAQTELDMSVQWLRTFVTMEVKDELLDDNEERSITQTFPPLGVCCGIVPWNWPVLLALGKVGPALITGNTMIIKPSPYTPYCDLKLGEIGMRIFPPGVLQVLSGGDELGPILTQHPGIDKITFTGSSATGKLVMQSCAKTLKRVTLELGGNDPAIICEDVDIDAIVPKITSLAFLNSGQICMLIKRVYIHESIYDAFRDAMVAFAKSIKTADGFEPDAFVGPIQNSMQYEKVKDMYSEIGKRNWKQALEGKVFENSKGYYISPAIIDNPPEDSRIVLEEPFGPIVPLLKWSDEEDVIARANSLKDGLGASVWSKDLDRAERIGRQLSAGSVWLNSHFDVAPNVPFGGHKWSGLGSEWGMTGLKQYCNSTSLWKWKKVM

SEQ ID NO: 4679 - protein, 313 aa, Triticum aestivum
  unsure (1)..(313): unsure at all Xaa locations
MQVDPSGQVQWPQQQLVPQPQQPLSQQPQQXLPQPQQTFPHQPQQQVPQPQQPQQPFLQPQQAFPQQPQQPFPQTQQPQQPFPQQPQQPFPQTQQPQQPFPQQPQQPFPQQSQQPFPQTQQPQQPFPQQPQQPFPQTQQPQQPFPQFQQPHQPFPQPQQQFPQPQQPQQSFPQQQRPFIQPSLQQRLNPCKNILLQQCKPASLVSSLWSIIWPQSDCQVMQQQCCQELAQIPQQLQCAAIHSVVHSIIQQQQQQQQQQQQQGMHILLPLSQQQQLGQELCLSFIPKLELALVGVTHDGARHFICHRYIDWCIC

SEQ ID NO: 4680 - protein, 120 aa, Nicotiana benthamiana
MSSSDLVAASTPGNLDERISQLMQCKPLSEPDVRALCEKAKEILMEESNVQPVKSPVTICGDIHGQFHDLAELFRIGGQCPDTNYLFMGDYVDRGYYSVETVTLLVALKVRYPQRLTILR

SEQ ID NO: 4681 - protein, 244 aa, Triticum aestivum subsp. sphaerococcum
PQQQPVPQPHQPFSQQPQQTFPQPQQTFPHQPQQQFPQPQQPQQQFLQPQQPFPQQPQQPYPQQPQQPFPQTQQPQQLFPQSQQPQQQFSQPQQQFPQPQQPQQSFPQQQPPFIQPSLQQQVNPCKNFLLQQCKPVSLVSSLWSMIWPQSDCQVMRQQCCQQLAQIPQQLQCAAIHTVIHSIIMQQEQQQGMHILLPLYQQQQVGQGTLVQGQGIIQPQQPAQLEAIRSLVLQTLPTMCNVYVP

SEQ ID NO: 4682 - protein, 498 aa, Mesorhizobium loti MAFF303099
MTLSFDPRAKATTLYHGEFRPMFIGGKWVAAQSGQEMQALNPATGEVLTTVPRGGAADVDAAVAAARAAFEGPWSKFSPYERQCVLLRIADLFETHWEELSVSDTLDMGLPITRTLANRRRVIGMLRFYGGMATALHGEAIDNSIPGEIVSFTRREPVGVVGAIIPWNAPTAASIWKIAPALATGCTIVLKPSEEASLTPLLIARLMQEAGVPDGVVNIVTGTGAEAGARLAEHPDVNKIVFTGSTLTGQAIARAGVTNLKRVSLELGGKSPIIVCRDADIDKAVPVAAMAVFVHSGQICIAGSRLFVAREIHDEFVRRVAEFAGRLRIGHGIEAETEIGPLINARQAGKVEGYIKAGSDEGAKLVAGGSRLTGALYDGGNFIAPTVFGSVSDKMTIAREEIFGPVISAMPFDTLDEVVARANATPYGLAAGIFTTHLGTAHKLARRIRAGSVWVNMYHAIDPAVPFGGMKMSGYGREGGIEHLHEYLETKSVWIQTD

SEQ ID NO: 4683 - protein, 355 aa, Spirulina platensis
MTQNYRITLLSGDGIGPEIMAVAVDVLKAVGKQLDLNFEFKEALMGGVAIDATGEPLPEESLQACRDSDAVLLAAIGGYKWDNLPRPERPETGLLALRAGLGLFANRARLLFCPHVLDASSLKREVVEGVDIMVVRELTGGIYFGQPKGIFETETGKNEGSNTMAYGESEIDRIGRVGFETAKKRQGRLCSVDKANVLDVSQLWRDRIMALAADYPEVELSHLYVDNAAMQLVRWPKQFDTIVTGNLFGDILSDAAAMLTGSIGMLPSASLGASGPGVFEPVHGSAPDIAGQDKANPLAQVLSAAMMLRYGLDEPAASDPVEKAVLKVLDWGYPTGDIMSEGMKAVGCRKWGICY

SEQ ID NO: 4684 - protein, 1085 aa, Candida albicans
MYATAHTIKQQQQQHPPPPPLNGGLHASGAPPNSHEAAAIAQQQQQQQQHHNGPGMIVAAAAASANQQAVQARAQQQQQQQQQQRLPSSAALNETTVSTWLAIGSLAESLGDIERATASYNSALRHSPNNPDILVKIANTYRSKDQFLKAAELYEQALNFHVENGETWGLLGHCYLMLDDLQRAYAAYQRALFYLENPNVPKLWHGIGILYDRYGSLEYAEEAFVRVLDLDPNFDKANEIYFRLGIIYKHQGKLQPALECFQYILNNPPHPLTQPDVWFQIGSVYEQQKDWNGAKDAYEKVLQINPHHAKVLQQLGCLYSQAESNPPTPANGAAQPHKPFQQDLTIALKYLKQSLEVDQSDAHSWYYLGRVEMIRGDFTAAYEAFQQAVNRDARNPTFWCSIGVLYYQISQYRDALDAYTRAIRLNPYISEVWYDLGTLYETCNNQISDALDALDAYRQAERLDPNNPHIKARLEQLTKYQQEGNTHPPQPPPSSQQPRLPQGMVLESTQQQQQQQQQQPPPPPPPPQQLQHQSQSQSQPQPQQPPQIQSQPSLLQHQSSLPPQQIQPLHQQAAKPLVNQQQSPPPPHLMNLGQPGQQPRQLPPHLPPHTQQPSQIQEKPPTQEQPHHQPPPPPQHQQQSQSQPQPPHQPQHTQNQSPQLAQLPPHHSNPPANPHGAPQQRTGLPDLLHNSANIIIAPSQVPQPQQQYQQPHIAPVRQEQVNHVPSIYSAPRPTETTLPQINNPNESTTTQVPQLKKEEPKPEATVSAPVPEAIKVQDQVTIQESAPAAAAVSAPASAPVGDIKTDTVSTTTPATSTTADAVPVSVSQVGEAPNVVQEKKVPDTEQIVSQVEKPVESQPEVTPAPTPAPALATAPTEPAPTDKDVVMAPSKSATPIPQSIVEQNTRVSEATKAPESNGKHDLEDKNDEEKILKRPTVETTTESVPVNQPVEKENEKVEVPPPPEQPSSEKREKEVNGSIKKPLENESKVDIPQFSSNITAQNEEAKSGEETKKDTTKTSPAKQGEVKEVIPSSTETVSKPDVEKDNKEKDKDEDEVMADEDDVKKDENPEPPMRKIEEDENYDDE

SEQ ID NO: 4685 - protein, 267 aa, Triticum aestivum subsp. sphaerococcum
GTANMQVDPSSQVQWPQQQPVPQPHQPFSQQPQQTFPQPQQTFPHQPQQQFPQPQQPQQQFLQPQQPFPQQPQQPYPQQPQQPFPQTQQPQQLFPQSQQPQQQFSQPQQQFPQPQQPQQSFPQQQPPFIQPSLQQQVNPCKNFLLQQCKPVSLVSSLWSMIWPQSDCQVMRQQCCQQLAQIPQQLQCAAIHTVIHSIIMQQEQQQGMHILLPLYQQQQVGQGTLVQGQGIIQPQQPAQLEAIRSLVLQTLPTMCNVYVPPECSIIKA

SEQ ID NO: 4686 - protein, 474 aa, Synechococcus elongatus PCC 6301
AAPILFWHRRDLRLSDNIGLAAARAQSAQLIGLFCLDPQILQSADMAPARVAYLQGCLQELQQRYQQAGSRLLLLQGDPQHLIPQLAQQLQAEAVYWNQDIEPYGRDRDGQVAAALKTAGIRAVQLWDQLLHSPDQILSGSGNPYSVYGPFWKNWQAQPKPTPVATPTELVDLSPEQLTAIAPLLLSELPTLKQLGFDWDGGFPVEPGETAAIARLQEFCDRAIADYDPQRNFPAEAGTSGLSPALKFGAIGIRQAWQAASAAHALSRSDEARNSIRVWQQELAWREFYQHALYHFPSLADGPYRSLWQQFPWENREALFTAWTQAQTGYPIVDAAMRQLTETGWMHNRCRMIVASFLTKDLIIDWRRGEQFFMQHLVDGDLAANNGGWQWSASSGMDPKPLRIFNPASQAKKFDATATYIKRWLPELRHVHPKDLISGEITPIERRGYPAPIVNHNLRQKQFKALYNQLKAAI

SEQ ID NO: 4687 - protein, 120 aa, Brassica napus
MSSEEFRLVSPTIDNEGKLPRKYTKGGQGVKKNISPPLEWYNVPQGTKSLALVVEDIDAPDPSGPLVPWTVWVVVDIPPDMKGLPEGFSGNDEQVAGIREGNNDHKIPGWRGPLMPSHGH

SEQ ID NO: 4688 - protein, 197 aa, Oryza sativa (japonica cultivar-group)
THAFARVQLHVGDAVDFLRNAPEGKYDAIIVDSSDPIGPAQELVEKPFFQTIARALKPAGVLCNQAESMWLHTHLIQDMLSICRETFKGAVHYAWTSVPTYPSGVIGFLLCAKEGPAVNFLSPVNPIEKLEGAMEAGREIRFYNSEVHRAAFVLPTFVRRELESHNTCAEKDKSETKPVAKPKKMKIMPNSAIPTAS

SEQ ID NO: 4689 - protein, 504 aa, Arabidopsis thaliana
MASALSCSASDLIPLLSGGANATAAAAAAEYICGRFDTVAGKFTDAAYAIDNTYLLFSAYLVFAMQLGFAMLCAGSVRAKNTMNIMLTNVIDAAAGGLFYYLFGFAFAFGSPSNGFIGKHFFGMYDFPQPTFDYPYFLYQWTFAIAAAGITSGSIAERTQFVAYLIYSSFLTGLVYPIVSHWFWSSDGWASPARSENLLFQSGVIDFAGSGVVHMVGGIAGLWGALIEGPRIGRFGVGGKPVTLRGHSATLVVLGTFLLWFGWYGFNPGSFATIFKAYGETPGSSFYGQWSAVGRTAVTTTLAGCTAALTTLFGKRLIDGYWNVTDVCNGLLGGFAAITSGCSVVEPWAALVCGFVAAWVLMGCNRLAEKLQFDDPLEAAQLHGGCGAWGIIFTGLFAEKRYIAEIFGGDPNRPFGLLMGGGGRLLAAHVVQILVITGWVSVTMGTLFFILHKLKLLRIPAEDEIAGVDPTSHGGLAYMYTEDEIRNGIMVRRVGGDNDPNVGV

SEQ ID NO: 4690 - protein, 167 aa, Triticum aestivum
  unsure (1)..(167): unsure at all Xaa locations
ARAKLVYAPEPHDVGRYLQAEVNLGGQTSVAKTAGPLDPAPGLVDYVETLVRNPETDYNVVVLQLNGIDQPADSIHVLCVGKLRMRLAQXETTVVAXESYSAPTLLAGAGRGGGAAPQPLPPPPRVGLGLPLGFDPARGPIAPPRLPRGFAIARSFILPPPGDPPPW

SEQ ID NO: 4691 - protein, 317 aa, Triticum aestivum
TGPEFRVDPASGDMLERRVASRLPDAAVDDLLIPSYSYLVETLYDVECVERIVRHFLEGRGGVEEVDEEGSEAETPGREASRRAMLAVSRLMDAYLGEIAADPRLRTDKFCDLAWALPDGARVYDDGLYRAVDIYIKAHPALREEEKEKVSGVVDGRKLTLEACTHAAQNERLPLRTVVQVLFFDQLQLRRAIARTIVANEGGAAGQGEEDGDSDGGRTWRVATRGNQMLRLDMDSMRNRVQELERECTTMRKAIQKIDRRGGGAAGDKGAAAPAAEGRWGSMVTKRFGCKFPAQVCQSQPRSVVARPRRARIEQSP

SEQ ID NO: 4692 - protein, 75 aa, Glycine max
MADSDRSSSEVSTHSTDSGKRGSSKVEFSEDEETLIIRMYKLVGERWSLIAGRIPGRTAEEIEKYWTSRFSGSSE

SEQ ID NO: 4693 - protein, 143 aa, Glycine max
  unsure (1)..(143): unsure at all Xaa locations
MGGGKRNTVETFLLATLILWLASLCSQIFFNKRWELLSVIAGCFFYQTSNCLILLFLSTHKDPLFVNTSVFLLHSFLTSASVIFILXHRVIQCALWTVAHSNLVDNVLPLLTXALTSSSAYFVFDQWDFVSALLSNGRISSLL

SEQ ID NO: 4694 - protein, 215 aa, Vibrio cholerae O1 biovar eltor str. N16961
MSKQADSLGFEQDAKPENVVWHRHAVDKAQRATLKQQRPAVLWFTGLSGAGKSTVAGALENRLAALGYHTYLLDGDNVRHGLCSDLGFSEQDRRENIRRIGELAKLMSDAGLIVLTAFISPHRAERQMVRDLLPNGEFLEVYVNTSLDVCEARDPKGLYKKARAGEIRQFTGIDSAYEAPLNPDIDLPAGEKSVDELVAQCLQALAERHIIQRWV

SEQ ID NO: 4695 - protein, 159 aa, Arabidopsis thaliana
MDPMDIVGRSKEDASLPKATMTKIIKEMLPPDVRVARDAQDLLIECCVEFINLVSSESNDVCNKEDKRTIAPEHVLKALQVLGFGEYIEEVYAAYEQHKYETMQDTQRSVKWNPGAQMTEEEAAAEQQRMFAEARARMNGGVSVPQPEHPETDQRSPQS

SEQ ID NO: 4696 - protein, 491 aa, SYNECHOCOCCUS SP. WH 8102
MSSLQIVWFKRDLRVDDHRPLLEAAARGPVLPLYVVEPELWQQPDASERQWLFCRESLLELRQALAELGQPLVVRSGDVVQVLERARRQFGVDGLWSHEETGNGWTYQRDKRVGAWARAHGIQWGEIRQFGVTRRMRSRNGWAKRWEEQMAEPITPAPAGVPALEEIDPGVIPERPCPELLPDDCSQRQTGGRSIGLGELRDFLQHRAPCYQRAMSSPKSAFTGCSRLSAYLAWGCLSMREVLQTSRHHSGRGVSSFESRLHWHCHFIQKLEDQPEIEFSDFHPYMRGIRETNAERLAAWTEGRTGVPFVDACMRALKAHGWINFRMRAMLMSFASYNLWLPWRDSGLHLARQFVDYEPGIHWSQCQMQSGSTSINTIRIYNPIKQGMDHDPQGVFIRQWCPELKDVSTIHIHEPWMLGGGRSAPIVDVTTSMQLAKDRIWEIRRSAGFDRHADAIQRMHGSRKAGLKPTASRRRQKRSNDNGVRQLSLEL

SEQ ID NO: 4697 - protein, 411 aa, Rickettsia sp.
DSEFAELKIRGKIFKLPILKASIGEDVIDISRVSAEADCFTYDPGFMSTASCQSTITYIDGDKGILRHRGYDIKDLAEKSDFLEVAYLLIYGELPSGEQYNNFTKQVAHHSLVNERLHYLFQTFGSSSHPMAIMLAAVGSLSAFYPDLLNFKEADYELTAIRMIAKIPTIAAMSYKYSIGQPFIYPDNSLDFTENFLHMMFATPCTKYTVNPIIKNALNKIFILHADHEQNASTSTVRIAGSSGANPFACISTGIASLWGPAHGGANEAVINMLKEIGSSEYIPKYIAKAKDKNDPFRLMGFGHRVYKNYDPRAAVLKETCKEVLKELGQLDNNPLLQIAIELEAIALKDEYFIERKLYPNVDFYSGIIYKAMGIPSQMFTVLFAIARTVGWMAQWKEMHEDPEQKISRPR

SEQ ID NO: 4698 - protein, 411 aa, Rickettsia sibirica
DSEFAELKIRGKIFKLPILKASIGEDVIDISRVSAEADCFTYDPGFMSTASCQSTITYIDGDKGILRHRGYDIKDLAEKSDFLEVAYLLIYGELPSGEQYNNFTKQVAHHSLVNERLHYLFQTFCSSSHPMAIMLAAVGSLSAFYPDLLNFKEADYELTAIRMIAKIPTIAAMSYKYSIGQPFIYPDNSLDFTENFLHMMFATPCTKYTVNPIIKNALNKIFILHADHEQNASTSTVRIAGSSGANPFACISTGIASLWGPAHGGANEAVINMLKEIGSSEYIPKYIAKAKDKNDPFRLMGFGHRVYKNYDPRAAVLKETCKEVLKELGQLDNNPLLQIAIELEAIALKDEYFIERKLYPNVDFYSGIIYKAMGIPSQMFTVLFAIARTVGWMAQWKEMHEDPEQKISRPR

SEQ ID NO: 4699 - protein, 341 aa, Mycobacterium sp. S65
MEAIVLNGTNDVGLTSVPDPAPQDGEVIIEVAATGLCGTDLHEYVAGPTFSQPPVVLGHEVSGRIVEVGAGVDQSRIGEGAAVIPMDFCGSCHYCHRSLYHLCQRPGWIGFTRNGGLANYVAVPSRLAVRVPDVVDLEEAALTEPTAVAFHAVRRAELLLGETVMVLGAGALGLTVIQCARAAGAARIFVTEPSGVRASLARDLGATLVLDPHDPGTTACILEETRGVGVDVVFHVAGSAEAFTQGLDCLRKQGRFMEMSSWAGAASLDVNRHLLKEIQLRMVFGYDMFDDFPAVLALIADGKLALAPQITARVPLDRAVKEGLGGLLEGREGLVKVLVKP

SEQ ID NO: 4700 - protein, 411 aa, Rickettsia sp.
DSEFAELKIRGKIFKLPILKASIGEDVIDISRVSAEADCFTYDPGFMSTASCQSTITYIDGDKGILRHRGYDIKDLAEKSDFLEVAYLLIYGELPSGEQYNNFTKQVAHHSLVNERLHYLFQTFCSSSHPMAIMLAAVGSLSAFYPDLLNFKEADYELTAIRMIAKIPTIAAMSYKYSIGQPFIYPDNSLDFTENFLHMMFATPCTKYTVNPIIKNALNKIFILHADHEQNASTSTVRIAGSSGANPFACISTGIASLWGPAHGGANEAVINMLKEIGSSEYIPKYIAKAKDKNDPFRLMGFGHRVYKNYDPRAAVLKETCKEVLKELGQLDNNPLLQIAIELEAIALKDEYFIERKLYPNVDFYSGIIYKAMGIPSQMFTVLFVIARTVGWMAQWKEMHEDPEQKISRPR

SEQ ID NO: 4701 - protein, 477 aa, Comamonas testosteroni
MSTVLYRCPELLIGGEWRPGRHEQRLVVRNPATGEPLDELRLASADDLQLALQTTQQAFEHWRQVPAHERCARLERGVARLRENTERIAHLLTLEQGKTLAEARMECAMAADLIKWYAEEARRVYGRVIPARLPNSRMEVFKFPVGPVAAFSPWNFPLVLSARKLGGAIAAGCSIVLKAAEETPASVAAMVDCLNQELPPGVVQLLYGVPAEVSQALIASPVVRKVTFTGSVPVGRHLAELSARHLKRITLELGGHAPVIVCGDADIARTVNLMVQHKFRNAGQACLAPTRFFVDRRIYGDFVDAFGAATQALRVGAGMAAETQMGPVASARRQAAVQDLIARSVAAGARPVASAVPEAGYFVAPTLLADVPLDAPVMSEEPFGPVACAVPFDSLDQAIAQANHNPYGLAGYLFTDSAKAILAVSERLEVGSLAVNGMGVSVPEAPFGGVKDSGYGSESGTEGMEAFLDTKFMHYVA

SEQ ID NO: 4702 - protein, 411 aa, Rickettsia typhi
NLEFAELKIRGKMFKLPILKASIGKDVIDISRVSAEADCFTYDPGFMSTASCQSTITYIDGDKGILWHRGYDIKDLAEKSDFLEVAYLMIYGELPSSEQYHNFTTKIAHHALVNERLHYLFQTFCSSSHPMAIMLAAVGSLSAFYPDLLNFNETDYELTAIRMIAKIPTIAAMSYKYSIGQPFIYPDNSLDFTENFLHMMFATPCTKYKVNPIIKNALNKIFILHADHEQNASTSTVRIAGSSGANPFACISTGIASLWGPAHGGANEAVINMLKEIGSSENIPKYVAKAKDKNDPFRLMGFGHRVYKSYDPRAAVLKETCKEVLNELGQLENNPLLQIAIELEALALKDEYFIERKLYPNVDFYSGIIYKAMGIPSQMFTVLFAIARTVGWMAQWKEMHEDPEQKISRPR

SEQ ID NO: 4703 - protein, 411 aa, Rickettsia honei
GSEFAELKIRGKIFKLPILKASVGEDVIDISMVSAEADCFTYDPGFMSTASCQSTITYIDGDKGILRHRGYDIKDLAEKSDFLEVAYLLIYGELPSGEQYNNFTKQVAHHSLVNERLHYLFQTFCSSSHPMAIMLAAVGSLSAFYPDLLNFKEADYELTAIRMIAKIPTIAAMSYKYSIGQPFIYPDNALDFTENFLHMMFATPCTKYTVNPIIKNALNKIFILHADHEQNASTSTVRIAGSSGANPFACISTGIASLWGPAHGGANEAVINMLKEIGSSEYIPKYIAKAKDKNDPFRLMGFGHRVYKNYDPRAAVLKETCKEVLKELGQLDNNPLLQIAIELEAIALKDEYFIERKLYPNVDFYSGIIYKAMGIPSQMFTVLFAIARTVGWMAQWKEMHEDPEQKISRPR

SEQ ID NO: 4704 - protein, 239 aa, Glycine max
  unsure (1)..(239): unsure at all Xaa locations
KSLGVKMVISGEGSDEIFGGYLYFHKAPNKEEFHQETCRKIKALHKYDCLRANKSTFAWGLEARVPFLDKEFIRVAMNIDPECKMIKKEEGRIEKWALRRAFDDEEHPYLPKHILYRQKEQFSDGVGYGWIDGLKAHAEKHVTDRMMLNAANIFPFNTPTTKEAYHYRMIFERFFPQNSARLTVPGGPSVACSTAKAVEWDAAWSNNLDPSGRAALXVHASAYGNQVKAVEPGEIIPKE

SEQ ID NO: 4705 - protein, 258 aa, Oryza sativa (japonica cultivar-group)
MDAVAGASVSSSSARLRPCPRPRRIGNVAPATVRRRSRRRAVTCAAAADADVVGLFDAAKLTVDRFVESGMVVGLGSGPASGLAIQYLGTRLRRGSLTGILGIPSSTISASEAVKAGIQVSSYEEGTQIDFAFTDADIIEEDTMTAVIGRRKTESGEPSFMVEKGIVKSADKLAFIIGHEKYVKGIEGSIPVLVKSVWRRPSIGTAGPLGGDFPLVTKEGHHVLDVIFTTPIPDLGKVAESLEKIAGVVDHGIVSSIP

SEQ ID NO: 4706 - protein, 57 aa, Triticum aestivum
  unsure (1)..(57): unsure at all Xaa locations
MEDGTANCIXIILAIILPPLGVFFKFACGIXFWXCLLLXFFGYLPXIIYAVWXIIXV

SEQ ID NO: 4707 - protein, 341 aa, Mycobacterium sp. S65
MDAIVLKGTNDVGLTSVPDPAPQPGEVIIEVAATGLCGTDLHEYVAGPTFSQPPVVLGHEVSGRIVEVGAGIDRCRIGEGAAVIPMDFCGSCHYCHRSLYHLCQRPGWIGLTRNGGLASHVAVPSRLAVRVPDAVDLQEAALTEPTAVAFHAVRRAELLLGETVLVLGAGALGLTVIQCARAAGAARIYVTEPSRVRGNLARDLGATLVLDPHEPGTTARILEETRGVGVDVVFHVAGSVEAFTQGLDCLRKQGRFMEMSSWAGPASLDVNRHLLKETQLRMVFGYDMFDDFPAVLALMADGKIALTPQITTRIPLDSAVEEGLNGLLEAREGLIKVLVRP

SEQ ID NO: 4708 - protein, 214 aa, Helianthus annuus
MERGGGFHGYHRLPIHPTSGMQQPDMKQKQPDTTNTTFTEDNECIVREQDRFMPIANVIRIMRKILPPHAKISDDAKETIQECVSEYISFVTGEANDRCQREQRKTITAEDVLWAMSKLGFDDYIEPLTVYLHRYREFDGGERGSIRGEPLVKRAAATADPGPFGMGPFVPGFHMGHHNGFFGPASIAGFFKDPSSAAGQSGPAGFEPYAQCKD

SEQ ID NO: 4709 - protein, 465 aa, Burkholderia cepacia R1808
MNGIDVGLEADLQALGKRHLLMHFTHADAYRDQALTVFDRGEGCWLVDRNGKRYFDGLAGLYCVQLGYSHGAEIGDAMREQMGRLPFATNWGYGHEPAIRLAHKLATLAPDGLNRVFFTSSGSESNESAIKLVRQYHQARGEPQRRKFIARRVAYHGTSFGALALNGMTNFRKHFEPLMAGVRHVSNTKRYGRPDGETEAQFTRHLLDEIESLIVQEGPDTVAAIVVEPLQNAGGSLTPPAGYAQGLRALCDRHGVLLVADEVICGFGRLGEWFGSTRYGLQPDLITFAKGIASGYVPLGGVIASDAVVDTVLAGPQQMFLHGATYGGHPVACTAALANLAIMERERVLENVGGNQAVFRRTLDGLLELPCVGDVRGDGYHYSLELVTDKAARRWAAGIGAQAFVSTLLAPAIFEAGLLCRAGVDHEGTPIVQFSPPLVMSRDEIVWFVAKIRDILADTYARAMR

SEQ ID NO: 4710 - protein, 481 aa, Burkholderia cepacia R1808
MLTQEHSMRTSEQSYIAGQWLDPADARAIDVIDPATARPYARLAIGSAADVDRAVGAAKQAFDAYSRWSVDARVALLQRVLDIYQRRYDEVARTISQEMGAPLAFARAAQAAVGTAHLEQTIRALRAFRFSTQVDSLLVSYEPIGVCALITPWNWPINQIVCKVAPALAAGCTMVLKPSEIAPFSAILFAEILDEAGVPPGVFNLVHGYGHEVGDALSRHPDVDMVSFTGSTRAGVEVAKAAADTVKRVHQELGSKSPNLILPDADIDAAVTLGARSCFSNSGQSCNAPTRMFVHVDQLAAAEAAARREAARTVVGDPRSPETEIGPVVSRTQFDRIQQLIQRGIDEGATLVAGGLGRPDGLGDGFYVKPTVFSNVTPDMTIAREEIFGPVLSILTYRTEDEAVALANDSVYGLAAYVQTKDLERARRIAARLRVGNVHINYPAWNPAAPFGGYKRSGNGREYAEFGLVEYLETKGTTGYA

SEQ ID NO: 4711 - protein, 411 aa, Arabidopsis thaliana
MDNINGLPDDLLVKILSFVPTYVAVSTCVLSKRWEFLWMWLPNLEFVSPWDSRPGIVDFINKKLPIHRAPVIERLCIHINSNPHIKPEYIKRWIEIAVSHYVRELQIDYHSKTKITLQLEAESYFIDGKYLQQLISGCPVLEDLSLRFCCNDNLREFTVIIPSLQSLSLFLFGNSNLNRYKIDTPSLKYLKLEDWNDPEHYSWTNMPKLREAYVDVESSNHLKTLIGSITSVKHLTICCLEDYLYGDGFIFNHLEHLKLCMCPFDSSNLLGQLLKGSPNLQVLDIFEMKVSFDNKKKKCFVFLVPNMVFNLILLLGLIDDERNDIVCWNQPSSVLECLLSSLKILNWSAYFGRPQDRDIAVYILKNACHLKTATFLTDKRINDVRRLKMIKELRLSPRASSTCQLVFGEDF

SEQ ID NO: 4712 - protein, 362 aa, Glycine max
MEDGAGRGLECPKTMDGKASNGNGLEKEIPSCCLKAKASIPESEAKCHSTVVSGWFSASQTCSGKSGKAVYFNNPMWPGEAHSIKVEKILYKEKSEYQEVLVFESSMYGNVLVLDGIVQLTERDECAYQEMIAHLPLCSIHSPKNVLVVGGGDGGVLREVARHSSVEHIDICEIDKMVIDVSRKFFPQLAVGFEDSRVHLHVGDAVDFLKSAPEGKYDAIIVDSSDPVGPAQELVEKPFFDTIARALRPGGVLCNMAESMWLHTHLIQDMISICRETFKGSVRYAWASVPTYPSGMIGFILCATEGPPVDFVNPINPIEKLEGANEHKRELQFYNSEMHSAAFALPAFLKREVSLLRDLSLQ

SEQ ID NO: 4713 - protein, 410 aa, Arabidopsis thaliana
MDKINGLPDDLLVKILSYVPTDIAVSTSILSKRWEFLWMWLPNLDYTSRWCRKPGDVGLRDFIHKNLPLHRAPVIESLRFHSNSPDIKPEDIRRWIEIAVSRHVHDLDIDHFSENENIFLSSFFACKSLVTLKLRSVTLRDIPSMVCLPSLKTLLLDNVSFVEGKSLQELLSICPVLEDLSVYCDDYENTKELTIVVPSLLSLSLYIPDEWLLDGYWIDTPSLEYLKLEDWNSCDHLSLIKNMPKLREAYVDAKCFLPKSVIESITSVKHLTICSKDGYGDGFVFNQLEHLTLCVCRGDSPSLLGQLLKDSPNLRILEISVMEDHVDDVGISLDGWNQPSSVPECLLSSLQIFKWPQYLGRPEDRDIAVYILKNARHLKKTTILADRCERFVTQRRMIKELLQALPARIC

SEQ ID NO: 4714 - protein, 130 aa, Arabidopsis thaliana
MIREISNLQKDIINIQDSYSNNRVMDVGRNNRKNMSFRSSPEKSKQELRRSFSAQKRMMIPANYFSLESLFLLVGLTASLLILPLVLPPLPPPPFMLLLVPIGIMVLLVVLAFMPSSHSNANTDVTCNFM

SEQ ID NO: 4715 - protein, 467 aa, Listeria innocua Clip11262
MTSVMWFRRDLRVNDNKALYHACKEEDLILLFQVNPEQFIKGSPSHQAFFASVAHFQQELNKNTHLQIMFGEPIELLKQLKEKIPTWDKVFFNRDETGYGASRDEAARAFFADKEITVHSYHDSYLHSAEEVKKSATEYYKIFTPYYKKWREEIKEMPLKVTLKPEKIRKESLFPNYEEQFRELIQDLPAFDSGEKAANTRLANFVKEDLADYDKARDVPALDKTSHLSRYLRTGEISIRTVWQALQKEEATEGRATFEKELCWRDFYNMIYVSFPKQKNEPIQENYRFIEWENNREFFKKWQDGQTGFPLVDAAMRQLKETGWMHNRLRMITASFLTKDLLIDWRFGEKYFQQMLIDYDPASNIGGWQWAASTGTDAVPYFRIFNPTTQSEKFDPDGTFIRKYVKELRDLPDKFIHQPEKMSETEQKEHGLILGKDYPLPIIDHKERRKLAIARYEFSKEHSRGNI

SEQ ID NO: 4716 - protein, 334 aa, Pisum sativum
MAAPENTLHSTDSPLKRQREDEVNGVSDTLSKEPQPNGLSSVIPGWFSEISPMWPGEAHSLKVEKILFQGKSDYQDVMVFQSATYGKVLILDGVIQLTERDECAYQEMITHLPLCSIPNPKKVLVIGGGDGGVLREVARHSSVEKIDICEIDKMVVDVSKEYFPDIAVGFADPRVTLNIGDGVAFLKAAPEGTYDAVIVDSSDPIGPAQELFEKPFFESVARALRPGGVVCTQAESIWLHMHIIEDIVVNCRQVFKGSVNYAWTTVPTYPSGMIGFMLCSTEGPSVDFKHPVNPIDENDSQQAARPLKFYNREIHSAAFCLPSFAKRAIASKEN

SEQ ID NO: 4717 - protein, 550 aa, Zea mays
MAATVRRAASSVLSRFLLTKPSPSPASAAGNNSALLGSGAAALHRFSTAPASAAAAAEEPIQPAVEVKHTQLLINGNFVDAASGKTFPTLDPRTGEVIARVAEGDSEDIDRAVAAARRAFDEGPWPRMTAYERCRVLLRFADLIERHAEEVAALETWDNGKTLAQAAGAEVPMVARCVRYYAGWADKIHGLVAPADGAHHVQVLHEPVGVAGQIIPWNFPLLMFAWKVGPALACGNTVVLKTAEQTPLSALYVANLLHEAGLPEGVLNVVSGFGPTAGAALSSHMGVDKLAFTGSTGTGQIVLELAARSNLKPVTLELGGKSPFIVMDDADVDQAVELAHQAVFFNQGQCCCAGSRTFVHERVYDEFVEKSKARALKRVVGDPFRDGVEQGPQIDGEQFNKILRYVQSGVDSGATLVAGGDRVGDRGFYIQPTVFADAKDEMKIAREEIFGPVQTILKFSGVEEVIRRANATPYGLAAGVFTRSLDAANTLSRALRAGTVWVNCYDVFDATIPFGGYKMSGVGREKGIYALRNYLQTKAVVTPIKNPAWL

SEQ ID NO: 4718 - protein, 480 aa, Halobacterium sp. NRC-1
MEQNAIQRRERPFVAGEWVSDGEPLPVSDLADGGTFASVAAADTSDAERALSAATGVHADLRETTVPERVEWLESIADGIRRREDELAEVIVREAGKPISSARGEVQSAAERFDRAVGELRHLTGEYRTGTTAGHEDWQAIVKHEPMGTVLCITPYNYPLSTMALQVAPAIAAGNAVIVKPASKTPISGAILADIAADAGLPDGAYNFVPGESSVIGDPLASDARVDAIAMTGSSGAGEHVARQSGITRLHMELGGNAPAIVFEDADLDAAADAATAGSLKYAGQRCSAVSRVLAHESVHDELVSRIDDAMAEWSIGDLFDTDTTLGPLVSADQADWVAELVDDAVDRGATVVRGGERHVEDGVHYYEPTLLADVPRDARIVDEEQFGPVCAVTTVTDEDDAVRTANGSELALDAAVFTADHDRAMRVAERVNAGAVRINGAPSHGLGDVPFGGNDASGIGREGLDSTIHEFVREKSIIL

SEQ ID NO: 4719 - protein, 342 aa, Pisum sativum
MAAESTVELESSMKEHRDDDEKSNGFSVSAVSMDVEGGDKDPSGNGVSSVIPGWFSEISPMWPGEAHSLKIEKILFQGKSEYQKVMVFQSSTYGKVLVLDGVIQLTERDECAYQEMITHLPLCSIPNPKKVLVIGGGDGGVLREVARHSSIEKIDICEIDNMVVEVSKQFFPEVAVGFNDPRVTLRIGDGVAFLKAAPEGTYDAVIVDSSDPIGPAQELFEKPFFQSVARALRPGGVMCTQAESIWLHMDIIEDIVSNCRHIFKGSVNYAWTTVPTYPSGMIGFMLCSTEGPLVDFKHPVNPIDQKDCQKSVRPLKFYNSEIHTAAFCLPSFAKRKIGSKET

SEQ ID NO: 4720 - protein, 341 aa, Photorhabdus luminescens subsp. laumondii TTO1
MKALSKLKAEEGIWMIDVPEPELGHNDVMIKIRKTAICGTDVHIYNWDDWSQKTIPVPMVVGHEYVGEVVAIGQEVKGFKIGDRVSGEGHITCGYCRNCRGGRTHLCRNTIGVGVNRAGCFAQYLVIPAFNAFKIPDNISDELAAIFDPFGNAVHTALSFDLVGEDVLVSGAGPIGIMAAAVCKHVGARHVVITDVNEYRLELARKMGVTRAVNVSQENLTDVMAELGMTEGFDVGLEMSGAPAAFRTLLNTMNHGGRVALLGIPPSDMAIDWNQVIFKGLFIKGIYGREMFETWYKMATLIQSGLDLTPIITHRFSIDDFQKGFDIMRSGQSGKVILNWD

SEQ ID NO: 4721 - protein, 401 aa, Zea mays
MVLEATMICIDNSEWMRNGDYAPSRFQAQADAVNLICGAKTQSNPENTVGVMTMAGKGVRVLVTPTSDLGKILACMHGLEVGAEANLAAAIQVAQLALKHRQNKRQQQRIIAFIGSPVKYDKKILETIGKKLKKNNVALDIVDFGESDDEKPEKLEALIAAVNSSDSSHIVHVPPGENALSDVLLSTPIFTGEEGGSGFAASAAAAVATGASGFEFGVDPNVDPELALALRLSMEEERARQEAIAKKAAEDTSNTENINASSSNSDSVMAEAELASNAAAGDKQEQPKDDDDLLQQALAMSMEGGASGSAAVTDSAMAEAGAVDPDLALALQMSVQDANMSSDTDMSKVFEDRTFVSSILNSLPGVDPNDPSVKDLLASLHSQGEQEKKEDKSDKTEDEKN

SEQ ID NO: 4722 - protein, 363 aa, Pseudomonas aeruginosa PAO1
MNSSPQANAAMRAAVWHGRHDIRVEDVPLPAEPPPGWVQIRVHWCGICGSDLHEYLAGPVFIPVEAPHPLTGLKDQCILGHEFSGEIVRLGNGVTGFAVGQAVAADACQHCGTCYYCRHGLYNICENLAFTGLMNNGAFAEYVNVPANLLYALPAGFPSEAGALIEPLAVGMHAVKKAGSLLGQNVVVVGAGTIGLSTIMCARAAGAAQVIALEMSSARKAKALEVGASQVLDPSRCDALGEIRALTGGLGADVSFECIGNKHTAKLAIDAIRKAGKCVLVGIFEEPSEFNFFELVSTEKQLLGALAYNGEFADVIAFIADGRLDIAPLVTGRIGLEEIVERGFEELVNNKEHNVKIIVSPGG

SEQ ID NO: 4723 - protein, 175 aa, Secale cereale
  unsure (1)..(175): unsure at all Xaa locations
MAPAVMASSATTVAPFQGLKSTAGLPVGRRSGSAGLSSVSNGGRIRCMQVWPIEGIKKFETLSYLPPLSTEALLKQVDYLIRSKWVPCLEFSKVGFVFREHNNSPGYYDGRYWTMWKLPMFGCTDATQVLNEVEEVKKEYPDAYVRVIGFDNMRQVQCVSFIAFRPPXCEESGKA

SEQ ID NO: 4724 - protein, 285 aa, Xanthomonas axonopodis pv. citri str. 306
MSANDNWYIEHFQPTGSAIGFRISGKLDEVQSPFQKIEIYQTTDWGKLMLIDGAVMLTSRDNFFYHEMISHPALFTHPAPKRVVIIGGGDCGTLREVLKHPGVESATQCDIDEQVTRMSEKYFPELCDSNHDARAELLFDDGVAYMANCQAGSVDIVIVDSTDPVGPAEGLFNKAFYESCFKALKDDGILVQQSESPLALLDLINEMRTEMGKAGFQSFKTLPFPQPCYPTGWWSVTMASKQAKADFAFRQDAAQAKGFDTLYYTAHLHTGVLVAPPFVAKALGE

SEQ ID NO: 4725 - protein, 175 aa, Secale cereale
MAPTVMASSATSVAPFQGLKSTAGLPVSRRSNGASLGSVSNGGRIRCMQVWPIEGIKKFETLSYLPPLTTEALLKQVDYLIRSKWVPCLEFSKVGFIFREHNASPGYYDGRYWTMWKLPMFGCTDATQVINEVEEVKKEYPDAYVRIIGFDNMRQVQCVSFIAFKPPGCEESGKA

SEQ ID NO: 4726 - protein, 225 aa, Zea mays
  unsure (1)..(225): unsure at all Xaa locations
RYYLKDAVLDGGVPFNKAYGMTAFEYHGTDARFNRVFNEGMKNHSVIITKKLLDFYTGFEGVSTLVDVGGXGVGATLHAITSRHPHISGVNFDLPHVISEAPPFPGVRHVGGDMFASVPAGDAILMKWILHDWSDAHCATLLKNCYDALPENGKVIVVECVLPVNTEATPKAQGVFHVDMIMLAHNPGGKERYEREFRELAKGAGFSGFKATYIYANAWAIEFIK

SEQ ID NO: 4727 - protein, 192 aa, Chara globularis
MGRAKIEIKRIDNATSRQVTFSKRRNGLLKKAYELSVLCDADIAVIMFSPTGKLFEYANSSMKEILDRYHSCPPEQREKRKFDNTDYLSKEAKRLRHEVELAKQENRHLSGEDLNAVQMPELDGLELKLEDALRKIRFRKREVMQMEIDRLQQKVWTSSPQFLLAWRSCHPAVVQIIIFCSHPAFVPKFILQ

SEQ ID NO: 4728 - protein, 469 aa, Glycine max
  unsure (1)..(469): unsure at all Xaa locations
MASEEAECISNLFKPIYLKEVAELRQYVPNLQSRPNPLDHNPYFDTRQLQQQQGFYLTESDVLLRQIGNDLSPYTLCFFXCHHSPRFAYHRAGPRKNIYFDPSIVRVAIVTCGGLCPGLNTVIRELVVGLWQLYGVRHIFGITAGYRGFYSSVPLPLNPKLVHHWHNVGGTLLQTSRGGFDLHNIVDAIQTHAFNQVYIIGGDGTMRGAVKIFDEIKHRKLEVAVVGIPKTVDNDVGIIDRSFGFQTAVEMAQEAISAAHVEAESAVNGIGLVKLMGRSTGHIALHATLSSRDVDCCLIPEIDFFLEGKGGLLEFLGQRLKENGHAVLVVAEGAGQDIIPRTDSQKDERDESGNPVFLDVGVWLKSELNKWWKREHPNELFTVKYIDPTYMIRAVHANATDNLYCTLLAHSAIHGVMAGYTGFVAGPINGNYAYIPLEDVARANNPVDTQDHKWSWVRSVTNQPDFVRR

SEQ ID NO: 4729 - protein, 289 aa, Salmonella typhimurium LT2
MEYSILSNNLKMPMVGFGVFKVTDKEECQQSVLSAIRSGYRLIDTAAVYGNEDAVGDAVREAIATGLCTREELFITSKLWVQDMANYDLAKAGIEASLKKSGLDYFDLYLLHQAMGDYFSAWRALEDAYEAGKLKAIGVSNFYAHVLANFCETVRITPMVNQVELHPYFAQPAALETMKHYNVQPEAWAPLGGGRHKPYENVMLQGIADAHQKTIAQVVLRWNVQRGVTVIPKSTRQERIEENFAIWDFSLTDNEMAQINALDLGYVGEAVKHFNPEFVRGCLGVKIHD

SEQ ID NO: 4730 - protein, 336 aa, Coleochaete scutata
MGRGKIEIRRIENATSRQVTFSKRRNGLLKKAYELSVLCDVDIAVIVFSPTGKLFQYASSSMKEILERYEQVPPEQKEKGSQRLDNMDYLNREVAKLRNEVEHKYHEARQLEGEDLDRLGVYELEQLEQKLSNSMRRIRGRKDELMKAELEGLRKQVADMETALVGAASFDGRPLSGSSNYLLQSIPGIRTMPPSSLGGMNPASTSLQLGSDRLFGNRGVELHDRSASDESPVMTNRMSVDFAQAPREMSGVDLSGSPVPPWKSQAAAAAQQEWKNQASSPTDWKVTNTEHLDSWPKAPAPTPEWKSTSVQPEWKNQSSPSSEWKPLDWMYHGPQD

SEQ ID NO: 4731 - protein, 187 aa, Triticum aestivum
  unsure (1)..(187): unsure at all Xaa locations
QQPFAQPQQLFPELEQPIPYQPLHPFTLQPQQPFPLQPQQPFPQQPQQPFPQQPQQSFPQQPQQPFPQQPQQPFPQQPQQPFPQQPQQPFPLRPQQPFPQQPQQSQQSFPQPQPQQRPTTIXLQPQQPLPQQPQQPFQQPQQQLSQQPEQTISQQPQQPFPXQPHQPQQPYPQQQPYGSSLTSIGGQ

SEQ ID NO: 4732 - protein, 321 aa, Mucor mucedo
MSTDYLTLNRTGDKMPIRGFGCWKIDTKDCEETVYQAIKTGYRLFDGACDYGNEVEVGRGINKAINEGLVKREDLFIVTKLWNTFHSKKHVRALFDRQLKDTGLEYFDLYLIHFPVPLQYVDPATVYPPGWYVGDAKSLQFEQSPIHECWAELEKIVDAGLARNIGVANFNCQAILDLLTYARIKPAVLQIELHPYLPQERLVKWVKEQGIQITAYSSFGPTSYVDLTESGKTYTSLLEHASVKSVADKHNVSTGQVLLRWALDREFAVIPKSVNAGRMKANLEILDIKLDAEDNKTLDSLKTNQRFNDPMTYGFGLPLFD

SEQ ID NO: 4733 - protein, 813 aa, Zea mays
  unsure (1)..(813): unsure at all Xaa locations
MAQILLHGTLHATIFEAESLSNPHRATGGAPKFIRKPDYWIEDTVGIGKGTTKIYATVDLEKARVGRTRMVSNEPVNPRWYESFHIYCAHMAADVVFTVKIDNPIGASLIGRAYLPVEDILGGDEIDKWLEICDEKREPIGDSKIHVKLQYFDVGKDRTGARGVRSTKYPGVPYTFFSQRQGCKGTLYQDAHVPDNFVPRIPLADGKNYEPHRCWEDIFDAISKAQHLIYITGWSVYTEITLVRDTSRPKPGGDVTLGELLKRKASEGVRVLMLVWDDRTSVGLLKKDGLMATHDEETANYFHGTDVNCVLCPRNPDDSGSFVQDLQISTMFTHHQKIVVVDHELPNEGSQQRRIVSFVGGIDLCDGRYDTQYHSLFRTLDTVHHDDFHQPNFEGGSIKKGGPREPWHDIHSRLEGPIAWDVLYNFEQRWRKQGGKDLLVRLRDLSDIIIPPSPVMFPEDRDTWNVQLFRSIDGGAAFGFPETPDEAARAGLVSGKDQIIDRSIQDAYINAIRRAKNFIYIENQYFLGSSYDWKPEGIKPEDIDCLHLIPKELSLKIVSKIEAGERFTVYVVVPMWPEGVPESASVQAILDWQRRTMDMMYTDITQALEANGIQTNPKDYLTFFCLGNREVKQEGEYQPEEHPEPGTDYIRAQEARRFMIYVHAKMMIVDDEYIIIGXSANINQRSMDGARDSEIAMGAYQPYHLATRQPARGQIHGFRMSLWYEHLGMLDDVFQRPESVECVQKVNKIAEKYWDLYSSDDLEQDLPGHLLSYPIGVTADGTVTELPGMENFPDTRARVLGNKSDYLPPILTT

SEQ ID NO: 4734 - protein, 304 aa, Zea mays
MAGLSLEHPWAFAFGLLGNVISFMTFLAPIPTFYRIYKSKSTEGFQSVPYVVALFSAMLWIFYALIKSNETFLITINAAGCVIETIYIVMYFVYAPKKAKLFTAKIMALVNGGVFGVILLLTLLLFKGSKRVVLLGWICVGFSVSVFVAPLSIMRRVIQTKSVEYMPFSLSLSLTLSAVVWFLYGLLIKDKYVALPNILGFTFGVVQMVLYVLYMNKTPVAVAEGKDAGGKLPSAADEHVLVNIAKLSPALPERSSGVHPVVAQMAAVPNRSCAAEAAAPPAMLPNRDVVDVFVSRHSPAVHVV

SEQ ID NO: 4735 - protein, 427 aa, Shigella flexneri 2a str. 301
MADTKAKLNLNGDTAVELDVLKGTLGQDVIDIRTLGSKGVFTFDPGFTSTASCESKITFIDGDEGILLHRGFPIDQLATDSNYLEVCYILLNGEKPTQEQYDEFKTTVTRHTMIHEQITRLFHAFRRDSHPMAVMCGITGALAAFYHDSLDVNNPRHREIAAFRLLSKMPTMAAMCYKYSIGQPFVYPRNDLSYAGNFLNMMFSTPCEPYEVNPILERAMDRILILHADHEQNASTSTVRTAGSSGANPFACIAAGIASLWGPAHGGANEAALKMLEEISSVKHIPEFVRRAKDKNDSFRLMGFGHRVYKNYDPRATVMRETCHEVLKELGTKDDLLEVAMELENIALNDPYFIEKKLYPNVDFYSGIILKAMGIPSSMFTVIFAMARTVGWIAHWSEMHSYGMKIARPRQLYTGYEKRDFKSDIKR

SEQ ID NO: 4736 - protein, 347 aa, Nostoc punctiforme PCC 73102
MFQTQLQHPTSKDEMQTTQTLKQIIAGAWITQGIYVVAQLGIADLLKDGSKSYDELATKTGVDARSLYRLLRALASVGIFAEGNSGYFELTPVAESLQSDRTDSLRGYAIKSGQAWEWQPWGHLLESIKTGKPVFKNIFGMERFDYLATDPSASKIYTQAISSISGEQDAAIAAGYDFSFIHNLVEVGGGNGTLIASILKSNLTMQGILFDLPHVVADAKPVIEDLELQDRCQLVGGNFFESVPTSGDAYLLRYIIHDWDDERAIAILKNCYQAMQPDGRLLLVEMVIPQGNEPFFGKLLDLQMLVNYGGRERTQAEYQVLLKTAGFSLTKIYPVAPPISIIEAIRL

SEQ ID NO: 4737 - protein, 276 aa, Fusobacterium nucleatum subsp. vincentii ATCC 49256
MKNVKLLNGVEMPILGFGVYQIPDLEECERVVSEAIGVGYRLIDTAQIYRNEKAVGNAIKKSGVDRKEFFITTKVWITNSGYEKAKTSIEESLKKLQTDYIDLLLIHQPFGDYYGTYRAMEEYYKAGKLRAIGVSNFYPDRFIDIAHFFEIKPMVNQVETHVFNQQIIPQGIMKEYGTQIESWGPFAEGKNNLFTNETLVEVGKKYNKTAAQVALRYLIQRDVVVIPKTVRKERMIQNFDIFNFELSETDMKEILKLDKKESLFLSHYETLKQLTI

SEQ ID NO: 4738 - protein, 216 aa, Phaseolus coccineus
MESGGFHGYRKLPNTTSPGLKLSVSDMNNVNTSRQVAGDNNHTADESNECTVREQDRFMPIANVIRIMRKILPPHAKISGDAKETIQECVSEYISFITGEANERCQREQRKTITAEDVLWAMSKLGFDDYMEPLTMYLHRYRELEGDRTSMRGESLGKRTIEYAPMGVGVATAFVPPQFHPNGYYGPAMGAYVAPPNAASSHHHGMPNTEPNARSM

SEQ ID NO: 4739 - protein, 293 aa, Arabidopsis thaliana
TRPWFSEISPMWPGEAHSLKVEKILFQGKSDYQDVIVFQSATYGKVLVLDGVIQLTERDECAYQEMITHLPLCSISNPKKVLVIGGGDGGVLREVARHSSVEQIDICEIDKMVVDVAKQYFPNVAVGYEDPRVNLIIGDGVAFLKNAAEGTYDAVIVDSSDPIGPAKELFEKPFFESVNRALRPGGVVCTQAESLWLHMDIIEDIVSNCRDIFKGSVNYAWTSVPTYPSGVIGFMLCSSEGPQVDFKKPVSLIDTDESSIKSHCPLKYYNAEIHSAAFCLPSFAKKVIDSKAN

SEQ ID NO: 4740 - protein, 197 aa, Zea mays
MATSFQGTTTKCTACDKTVYLVDKLTADNRIYHKACFRCHHCKGTLKLANYNSFEGVLYCRPHFDQLFKRTGSLDKSFEGTPKVVKPERNVGNENATKVSSAFAGTREKCVGCSKTVYPTERVTVNNTMYHKSCFKCCHGGCTISPSNYIAHEGKLYCKHHHIQLIKERGTSASLRMTTRRHHRLGHWRRMNMSIDH

SEQ ID NO: 4741 - protein, 334 aa, Triticum aestivum
  unsure (1)..(334): unsure at all Xaa locations
MASSSPPHVVEDVPPFLQLLSDGTVIRFTDAYPLPIPXSPPGQPVVDWKDVLYDASHGLKLRIYRPAAASSSGNKLPVIVYFHGGGYSIGSFDMPNFHACCVRLAGELPALVLSADYRLAPEHRFPAGLDDAANVVSWVRAQAAAVGDNADPWLSETANFGRVFVAGDSAGGGVVHHTAVRLASGRLGPLDPVRVAGCAMLCPMFGGEERTASEAEFPPGPFLSLPAVDQAWRLVLPPGSTRDHPLANPFGPDSPALDGVALPPMLVVAAARDLLRDRAADYAARLKAMGKPVELVEFEGQHHGFFAVEPYGDAGSEVVRLVKRFVYGNGGASD

SEQ ID NO: 4742 - protein, 308 aa, Neurospora crassa
MADHTEVDLDSIIDRLLEVRGSRPGKQVQLLEAEIRYLCTKAREIFISQPILLELEAPIKICGDIHGQYYDLLRLFEYGGFPPEANYLFLGDYVDRGKQSLETICLLLAYKIKYPENFFILRGNHECASINRIYGFYDECKRRYNIKLWKTFTECFNCLPIAAIIDEKIFTMHGGLSPDLNSMEQIRRVMRPTDIPDCGLLCDLLWSDPDKDITGWSENDRGVSFTFGPDVVSRFLQKHDMDLICRAHQVVEDGYEFFSKRQLVTLFSAPNYCGEFDNAGAMMSVDESLLCSFQILKPAEKKQKFGRR

SEQ ID NO: 4743 - protein, 214 aa, Zea mays
  unsure (1)..(214): unsure at all Xaa locations
MAAVEVCVKAATGXPDTLGDCPFSQRVLLTLEEKKVPYEVKLVDLDNKPEWFLKISPEGKVPVFNGGDGECIADSDVITQTIEEKFPTPSLVTPVEYASVGSKIFPAFITFLKSKDASDGSEKALLDELQALDEHLKAHGPYINGDNVSAADLSLAPKLFHLQVALEHFKGWKIPENLTNVHAYTKALFTRESFVKTKPSEEHVIAGWAPKVNA

SEQ ID NO: 4744 - protein, 322 aa, Xanthomonas axonopodis pv. citri str. 306
MSFDPDVVRLFAQLQEAAQPPMDTLPIEGARAMMRAVGAQFGFQRLEMAEVRDLQADAATGAVPLRVYRPTGLATGPAPTCLYVHGGGGLVGDLESHDDVCRQLAARAGCQVLAIHYRLAPEHPAPAGVEDVIATLHWLVAHPDTVGADVQRLAVCGDSIGGAMAAVAALAARDAGIALRCQLLVYPLTDARQDSGLYPSRSLNAGLPPLTAAAVEFFNRHLLPDMAVANDWRVSPMLAPDVAGVAPALVVVCDRDMLYDEGRAYAERLRAAGVEVTLHSFPGMIHGFINMGSVLRAAGETLDLAALTLRQRLLPAIERRAA

SEQ ID NO: 4745 - protein, 309 aa, Burkholderia cepacia R18194
MPMPLDPQIAAILKTLEAAPPMESLSVDALRNSLAYPPLERRTVVGEVVDFDMPLEGRVLAARLYRPKLAQSDGVTVFFHGGGFVIGNLDTHDHVCRDLCAESGAAVIAVDYRLAPEHPFPAAVDDCFDAVRWIAEHADTLSFDPSRIVVAGDSAGGNLAAVTALKIRDEGGPTLRAQVLVYPVTDYHTPPTRSYIENQSGYSLTRAAMIRFWNDYVANEREALHPHACPLRAKSLAGLPRALVITAGFDPLRDEGEAYANRLFDAGVPVTFRRHDDMIHGFFRMGPACAAAQEGLLRAAAWIRDVMAR

SEQ ID NO: 4746 - protein, 307 aa, Triticum aestivum
  unsure (1)..(307): unsure at all Xaa locations
MEAVARASIAAGSHARVPLCRRPRPRHAVRCLRGRPSVACAAAADADVVRLFDAAKLTVGRVGERAAWWSGVGSGAASGLAVPVPPDAPPQNLGNRLRRGTLTGIVGIQSSVIKPGEASEATRKVPKFILLALIDFAFTDADVIEEGTLAAVIGRGKTESGQPSFIQEKGIVESADKVAFIIDNDKYVNGIEGSIPVLVKSGNWIDTAEEIDDLFLGDAEVWRRPSIGTAGPSGGDFPXLVTKEGHHILDVIFTTPIQDLGKVAEDLEKIVGVVDHGIICNTMPYAVIASKGEVQVLDRKSSVIPNT

SEQ ID NO: 4747 - protein, 135 aa, Mycobacterium tuberculosis H37Rv
MPTGKVKWYDPDKGFGFLSQEGGEDVYVRSSALPTGVEALKAGQRVEFGIASGRRGPQALSLRLIEPPPSLSRPRREPAAEHKHSPDELHGMVEDMITLLESTVQPELRKGRYPDRKTARRVAEVVRAVAREFES

SEQ ID NO: 4748 - protein, 245 aa, Lycopersicon esculentum
MATNSSSHSPRTVEEIFKDFSARHAAVLRALTTDVEDFYSQCDPERDNLCLYGHPNESWEVAVPAEEVPPELPEPVLGINFARDGMERRDWLSLVAMHTDSWLLSVAFYFGARLNRNERSRVFTLINDLPTVFEAVTGRKPLKDKPSVDSGKKSKNNAKREKQMKANQRLQEESDDEDEGNEDEHEETLCGSCGTNGNEDEFWIGCDMCEKWYHGKCVKITPAKAQSIKEYRCPSCSNKRAKHMA

SEQ ID NO: 4749 - protein, 182 aa, Glycine max
  unsure (1)..(182): unsure at all Xaa locations
RAESARAVPRSPKPLHENKPQISAPAAKAHVEGWPPIRSFKKNSLASSASXMMRGQIPSLDAFIGKVSMEGAPYLRKVDLNSFTTYKDLSLALEKMFSCFTLSQCGSYGVSSRENLSESRLMDLLHGSEYVLTYEDKDGDWMLVGDVPWEMFTESCKRLRIMKSSEAIGLAPRAMEKCKSRY

SEQ ID NO: 4750 - protein, 125 aa, Agrobacterium tumefaciens str. C58
MADLAKIVEDLSTLTVLEAAELSKLLEEKWGVSAAAPVAVAAAGGAGAAAAVEEEKTEFDVVLVDAGANKINVIKEVRAITGLGLKEAKDLVEGAPKAVKEAVSKAEAADLKKKLEDAGAKVDVK

SEQ ID NO: 4751 - protein, 525 aa, Zea mays
  unsure (1)..(525): unsure at all Xaa locations
MAVAPMDCAAGSISLGHKVLGRFGVPNSSRLRWVGYDRKPRTDQLIARAVSVDRTQLDFSNPDWKKQFQEDFDKRFSLPHLTDVIDVEPRPTTFSLKSRAPLENANGTMQGSWNGYVNDDDRALLKVIKFASPTSAGADCIDPDCSWVEQWVHRAGPRKQIYFEPQYVKAGIVSCGGLCPGLNDVIRQIVLTLEKYGVKNIVGIQHGFRGFFEDHLSEVPLSRHVVQNINLAGGSFLGVSRGGANISDIVDSIQARRLDMLFVLGGNGTHAGANAIHDECRKRKLQVSIVCVPKTIDNDILLMDKTFGFDTAVEAAQRAINSAYIEAHSAFHGIGLVKLMGRSSGFITMHASLSSGQVDICLIPEVPFTVDGPNGVLRHLEHLIETKGFALVCVAEGAGQEYFQKSNATDASGNMVLSDIGVHLQQKIKSHFKDIGVHSDVKYIDPTYMLRAVRANASDAILCTVLGQNAVHGAFAGFSGITTGXCNTHNVYLPIPEVIKSTRFIDPNSRMWHRCLTSTGQPDFH

SEQ ID NO: 4752 - protein, 101 aa, Sorghum bicolor
VLAATTSEAAISCGQVSSAIAPCLSYARGQGSAPSAGCCSGVRSLNSAARTTADAAACNCLKNAARGISGLNAGNAASIPSKCGVSVPYTISTSTDCSRVN

SEQ ID NO: 4753 - protein, 261 aa, Triticum aestivum
INHSLAAGLRNSGGFFTDADVARIVAVAAARNATTVYVIEATLNYDDATAASVEQELSSVLATLRHEEGLAFVRDASYLEFLDRVHGEEVALDKIGLWRVPHPWLNVLVPRSRIADFDSAVFKGILQGTDIAGPLVVYPLNKSKWDDGMSAVTPAEEVFYAVSLLFSSVANDLKRLEAQNQKILRFCDLAGIGYKEYLAHYTAHGDWVRHFGGKWDRFVEMKDKYDPKRLLSPGQDIFALVRSVLPLSTSCYYLWINSCGQ

SEQ ID NO: 4754 - protein, 504 aa, Bifidobacterium adolescentis [sequence omitted]

SEQ ID NO: 4755 - protein, 322 aa, Staphylococcus epidermidis
MKKIAVLTSGGDSPGMNAAVRAVTRTAIYNNIEVYGVYQGYQGLLDDDIHKLELGSVGDTIQRGGTFLFSARCPQFKEEDVRKKAIENLRKRGIEGLVVIGGDGSYRGAQRISEECKEIQTIGIPGTIDNDINGTDFTIGFDTALNTIIESVDKIRDTASSHARTFIVEVMGRDCGDLALWAGLSVGAETIVLPEVNTDIKDVAEKIEQGIKRGKKHSIVMVAEGCMSGQECADELTKYINIDTRVSVLGHIQRGGSPSGADRVLASRLGGYAVELLKQGETAKGVGIRNNQLTSTPFDEIFAESDRKFNSQMYELAKELSI

SEQ ID NO: 4756 - protein, 84 aa, Glycine max
PENTPTTKEGYLYRTIFEKFFPKNAAKATVPGGPSVACSTAKAVEWDAAWSKNLDPSGRAALGIHDAAYDAVDTKIDEPKNGTL

SEQ ID NO: 4757 - protein, 261 aa, Vicia faba
MASTKDRENFVYIAKLAEQAERYEEMVDSMKNVANLDVELTIEERNLLSVGYKNVIGARRASWRILSSIEQKEESKGNDVNAKRIKEYRHKVETELSNICIDVMRVIDEHLIPSAAAGESTVFYYKMKGDYYRYLAEFKTGNEKKEAGDQSMKAYESATTAAEAELPPTHPIRLGLALNFSVFYYEILNSPERACHLAKQAFDEAISELDTLNEESYKDSTLIMQLLRDNLTLWTSDIPEDGEDSQKANGTAKFGGGDDAE

SEQ ID NO: 4758 - protein, 89 aa, Glycine max
MASFARRAMSLAQIPSARVPASVCQRRGLAGAADHHGSTKVDFWKQPTNPGNWKEEHFVLISLSGWGLLFYSGYKLFTGGKGDDEKPAQ

SEQ ID NO: 4759 - protein, 241 aa, Zea mays
HNNKYKQTGSPIEECRPKIWLMDSKGLIVASRKDSLQAFKKPWAHEHEPVATLLEAVQSLKPTVLIGTSGKGGTFTKEVVEAMASQNEKPVIFALSNPTSHSECTAEQAYTWTKGRAVFASGSPFDSVELDGKVLVPGQSNNAYIFPGFGLGVVISGAIRVRDDMLLAASEALAEQVTEEHFAKGLIFPPFTNIRAISARIAAKVAAKAYELGLASRLPRPDDLVKYAESCMYTPIYRSYR

SEQ ID NO: 4760 - protein, 472 aa, Shigella flexneri 2a str. 301
MTTHLAWFRQDLRLHDNLALAAACRNSSARVLALYIATPRKWETHNMSPRQAELINAQLNGLQIALAEKGIPLLFREVDDFVASVEIVKQVCAENSVTHLFYNYQYEVNERARDVDVERALRNVVCEGFDDSVILPPGAVMTGNHEMYKVFTPFKNAWLKRLREGMPECVAAPKVRSSGSIKPAPSITLNYPRQSFDTAHFPVEEKAAIAQLRQFCENGAGEYEQQRDFPAVEGTSRLSASLATGGLSPRQCLHRLLAEQPQALDGGAGSVWLSELIWREFYRHLMTYYPSLCKHRPFIAWTDRVQWQSNPAHLQAWQKGKTGYPIIDAAMRQLNSTGWMHNRLRMITASFLVKDLLIDWREGERYFMSQLIDGDLAANNGGWQWAASTGTDAAPYFRIFNPITQGEKFDREGEFIRRWLPELRDVPGKAVHEPWKWAQKAGVKLDYPQPIVEHKEARVQTLAAYEAARKGK

SEQ ID NO: 4761 - protein, 510 aa, Glycine max
  unsure (1)..(510): unsure at all Xaa locations
MGSDNTNLEFLKEIGLGSSNIGSYINGQWKATGSSVTSVNPSNNQSIAQVTEATLQDYEEGLQACSEAAKTWMTIPAPKRGEIVRQIGEALRAKLDPLGRLVSLEMGKILPEGIGEVQEIIDMCDYCVGLSRQLNGSIIPSERPDHMMFEVWNPLGIVGVITAFNFPCAVLGWNACIALVCGNCVVWKGAPTTPLITIAVTKLVAEVLERNKLPGAIFTSFCGGADIGQAIAKDTRIPLVSFTGSSKVGLMVQQTVNERFGKCLLELSGNNAIIVMDDADIKLAVRSILFAAVGTAGQXRCTTCRRLFLHESIYADVLDQLIGVYKQVKIGNPLEKGTLVGPLHTPTSVENFQKGISVIKSQGGKILTGGSVLESAGNFVQPTIVEISPDAPVVKEELFGPVLYVMKFQTLEEAIALNNSVPQGLSSSIFTQRPGTIFKWIGPRGSDCGIVNANIPTNGAEIGGAFGGEKATXGGGREAGSDSWKQYMRRSTCTINYGSELPLAQGINFG

SEQ ID NO: 4762 - protein, 116 aa, Triticum aestivum
PRVREKAALSDEYFIKRKLYPNVDFYSGLIYRSMGFPTEFFPVLFAIPRMAGWLAHWKESLDDPDNKIMRPQQVYTGVWLRHYTPVRERVASNQGEELGQIATSNATRRRRAGSSL

SEQ ID NO: 4763 - protein, 510 aa, Oryza sativa (japonica cultivar-group)
MICRSLLLLRSNAASKASNIVKHVAATGCLPKYSSEAPARYFSSEPSLQVDSTEENGFKGHGMLAPFTAGWQSTDLHPLVIDRSEGSYVYDINGKKYIDALAGLWSTALGGNEPRLIKAATDQLNKLPFYHSFWNRTTKPSLDLANEILSMFTAREMGKIFFTNSGSEANDSQVKLVWYYNNALGRPNKKKFIARSKSYHGSTLVSASLSGLPALHQKFDLPAPFVLHTDCPHYWRFHLPDETEEEFATRLATNLENLILKEGPETIAAFIAEPVMGAGGVIPPPKTYFEKIQAVLKKYDILLIADEVITAFGRLGTMFGCDMYDIKPDLVSIAKALSSAYMPIGAILVSPEITDVIYSQSNKLGSFAHGFTYSGHPVSCAVAIEALKIYKERNIIEHVQKIAPRFQEGIKAFSGSPIVGEIRGLGLILGTEFVDNKSPNDPFPAEWGVGSLFGAECEKRGMLIRVAGDNIMLSPPLIMTPDEVEEIICKYGDALKATEERIAELKAKRG

SEQ ID NO: 4764 - protein, 302 aa, Burkholderia cepacia R18194
MDKLAATPSKPRHLMSPDEARTAFARISTILSPGADVRSTIALDIPVDGGTLRARLFVPDGRPQALLVYFHGGGWVVGGIDAFTPLCREIAAGAGVAVALVEYRKAPEHPFPGPVHDAWQAAQWLASQRVALLGAELPVFVGGDSAGANLAIAVTLLTRREGSMSFAGQLLVYPVTDCVFDRPSYVAAENQLLTTRDAMMGYWNHYAPSDAARHSSLASPLREADLSGLPEAIVVTAEHDVLRDEGEAYAQRLEQAGVPVHHRRALGQMHGFLMMIGVLPGSRDGLEFVCERLRDLVARSSR

SEQ ID NO: 4765 - protein, 494 aa, Pseudomonas aeruginosa PAO1
MIDLNPIQPICIAGEWRAGGGDLYESLYPATGEAVARLHAASLEDVEEAMAGAHRAFRESGWAQRKPHERATVLYRIAALIRERSEELAQLQRLDNGKPIRETRNLVASAAATFQFFAAACETLEESITPSRGDFVSMSVYEPMGVVVAITPWNSPIASEAQKLAPALAAGNAVVVKPAEITPLAALALARICDEAGLPRGLVSVLPGKGALIGDALTRHPLARRVSFTGGTRTGKHIARIAADKMMPVSLELGGKSPTMVLADADLDHAVAGVLYGIFSSSGESCIAGSRLFVASERYDEFMERLATGAAALRVGDPADERTQMGPLISARHRESVERYVEMGVAEGGRLRTGGLRPHGGAFDRGYFYTPTIIEGLTNGARLCREEVFGPVLVAMPFASEEALIEEANDSCYALAAGIWTRDFQRAWRLGRAVQAGTVWINTYKQFSISTPFGGWRDSGLGREKGRLGILQYMEQKSLYWGLNEQPLAWAGSH

SEQ ID NO: 4766 - protein, 497 aa, Mesorhizobium loti MAFF303099
MKGDDGLTVTQSLTRRLKNPELFDDLAGVPGRKAEQSTRRFSVFNPSTGELLAELPDMDVRDVSKAIDKAEAAQEHWAALTARERSDILWEWHQLILDHSEDLAAILTAEMGKPLAEAKSEIAHAAAYLQWYAEEANRIYGETISPPSNDRRMLVIKQPIGVVGAITPWNFPASMVARKISPALAAGCAIVLKPAEQTPLVAGAMFTLARMAGFPDGVLNLIYASEGDAVGRELCSNPKVRKISFTGSTEVGRLLMRECSDQIKRTSFELGGNAPFIVFDDADVDAAVDGALQAKFRNAGQTCVSANRLYVQSSVYNEFCDKFTKRVSALRVGDGFEPEVAIGPLIDKCALAKIEDHIRDAVRQGGKIRCGGNRIGESGTFFEPTVITDVERTMRVAQEETFGPLAPIIRFNDPDQVVREANDTIYGLAAYFYASNLKRVWRVAEALEYGMVGINTGRMSSEAAPFGGMKQSGIGREGSRHGLEDYLEMKYLCMGGL

SEQ ID NO: 4767 - protein, 364 aa, Magnaporthe grisea 70-15
MSQESQAPTQAKDAVLVQSAEMPAGSQKVEELDFNKFRGRPITAEDLLDGMRHMGFQASSMCEAVRIINDMRAWSDPETGERTTIFLGYTSNLISSGLRGVLRYLVQHKHVSAIVTTAGGVEEDLIKCLGDTYMSSFSAPGADLRKKGLNRIGNLVVPNSNYCAFEDWVVPILDKMLEEQEAGRGKGDDGQDAVNWTPSKVIHRLGQEINDERSVYYWAWKNDIPVFCPALTDGSLGDMLYFHSFKASPRHLRVDIVEDIRKINTIAVRAKRAGIIILGGGVVKHHIANACLMRNGAESAVYINTAQEFDGSDAGARPDEAVSWGKIKAGADAVKVYLEATSCFPFIVANSFAKDDQHIKPDSS

SEQ ID NO: 4768 - protein, 268 aa, Zea mays
MTKAATIYGSKTQSDALRPGPLRPANIIRNKFPTYKNGSNGIVIKLADGPEIPPLKEIVAKETADLLDRRQRLSVRELAMKFEKGLSTATLLSNEVKWRQVALMERDILLKNLKSVLESLRGQVTGKTKDEIEESISMVEILTVQLSKREAELVQQKEEVTKLAKSLKQASEDAKRIVEEERANAHTEIETAKGAVQRVQQAVQEHEKMSQNTGKQKQDMEELKKKKKGGRPFFFFFFFFFFFYQQNVTHILVTLPNSQVTHHLFLGN

SEQ ID NO: 4769 - protein, 307 aa, Zea mays
  unsure (1)..(307): unsure at all Xaa locations
MAARSSPSSTSPPAGGPAAAAWRRRRVASEPPYSCGAGASPNIPFCDVGLPIDRRVDDLGSRMTVAKKTSQLGDQSPAIPRLGVPAYKWWSEALHGIFNQGRGIHLDGPLRAATSFPQVILTAASFNLHLWDRIGQDVDELKEEVQEAPRVKMLHCPSKAMDIENEIQVLCDQLAKKSSDSLRLLKELELHRSYGENDMPLYELKGLETLGSTLHIVVHDCASVDFWNSSIQWFRIQPEGSKKEIIXGTTKPAYAPEPHDVGRYTQAEVKSGGQTSITKIAGSVDPAAGLVHYVEALVRRRETGYNV

SEQ ID NO: 4770 - protein, 272 aa, Pseudomonas aeruginosa PAO1
MSSTIHPLPSFGLGTFRLTGQVVVDSVRSALELGYRAIDTAQIYGNEADIGRAIAESGVPRSELFLTTKVWVDNYAREKLLASLRESLEKLRTDRLDLVLIHWPAPGNGVELGEYMAALAEAKSLGLTRRIGVSNFNIELTRQAIAAVGAGEISTNQIELSPYLQNRALTAYLEEQGIAVTSYMTLAYGKVLKDPTLAGIAARHRATVAQVALAWAMQLGYAVIPSSTRRENLASNLLARDLRLDAEDMARIAGLERNGREVSPQGLAPAWD

SEQ ID NO: 4771 - protein, 277 aa, Leuconostoc mesenteroides subsp. mesenteroides ATCC 8293
MTFHELSDGQHLPEIGFGTYKLNGFAGTQSILSAVDAGYRLFDTAFNYQNEGTVGQAIQQSHVNRDELIITSKLPGKYYSSYQDSIDLIQESLYRSKLDYFDLYLLHWPNPIDDHYLEAWHTLIQAQKFGLVKSIGVCNFLPEHIERLKKETNILPVVNQVELHPYFNQQELREYNNTQNILTQAWSPLGRASAILKDPVLVELAKKYHKNIGQLVLKWEISLGVLPIPKASSYARQKGNLDLFDFEISSSDMQRINDLTKPDGRTNNQDPAVYQEF

SEQ ID NO: 4772 - protein, 235 aa, Leuconostoc mesenteroides subsp. mesenteroides ATCC 8293
MRLIMNEKNFQKKQAALAALNYIQTDMIIGLGTGSTVSYFLDALAASQYNVIGVTTSTITSQRCAELNIPIVDIDAIDHIDVTVDGADEVDSYLNGIKGGGAALLMEKIVAKNSKKNIWIVDRSKVHNTLGSFPLPVEVIPYGSGQLLRQFANKGLFPKLRRHPGNNQPVITDAGHYIIDCHMTTINNPYALAEYLESQVGVVEHGLFLNICDRIIIGDNTVEIKERQQAHVEIN

SEQ ID NO: 4773 - protein, 355 aa, Alternaria brassicicola
MAEFVRAQIFGTTFEITSRYTDLQPVGMGAFGLVCSAKDQLTSQAVAIKKIMKPFSTPVLSKRTYRELKLLKHLRHENIISLSDIFISPLEDIYFVTELLGTDLHRLLTSRPLEKQFIQYFLYQILRGLKYVHSAGVVHRDLKPSNILVNENCDLKICDFGLARIQDPQMTGYVSTRYYRAPEIMLTWQKYDVEVDIWSAGCIFAEMLEGKPLFPGKDHVNQFSIITELLGTPPDDVIQTICSENTLRFVQSLPKRERQPLSNKFKNAEPQAVDLLENMLVFDPKKRVRAEQALAHPYLAPYHDPTDEPIAEEKFDWSFNDADLPVDTWKIMMYSEILDYHNVDAAAQEQENNGS

SEQ ID NO: 4774 - protein, 159 aa, Hyacinthus orientalis
MSDEGASLRVEADAGASKTYPQQAGTIRKNGYIVIKNRPCKVVEVSTSKTGKHGHAKCHFVAIDIFTAKKLEDIVPSSHNCDVPHVTRTDYQLIDISEDGFVSLLTENGGTKDDLRLPTDDSLLTQIKDGFAEGKELVVSVMSAMGEEQINALKDVGPK

SEQ ID NO: 4775 - protein, 98 aa, Glycine max
RDGSAHGGVVINMESLKVPEMQVHVDVGNSPPYVDVSGGELWINILHETLRYGLAPRSWTDYLHLTVGGTLSNAGVSGQAFRHGPQISNVQQLEIVTG

SEQ ID NO: 4776 - protein, 373 aa, Mycobacterium tuberculosis H37Rv
MTVVPENFVPGLDGVVAFTTEIAEPDKDGGALRYRGVDIEDLVSQRVTFGDVWALLVDGNFGSGLPPAEPFPLPIHSGDVRVDVQAGLAMLAPIWGYAPLLDIDDATARQQLARASVMALSYVAQSARGIYQPAVPQRIIDECSTVTARFMTRWQGEPDPRHIEAIDAYWVSAAEHGMNASTFTARVIASTGADVAAALSGAIGAMSGPLHGGAPARVLPMLDEVERAGDARSVVKGILDRGEKLMGFGHRVYRAEDPRARVLRAAAERLGAPRYEVAVAVEQAALSELRERRPDRAIETNVEFWAAVVLDFARVPANMMPAMFTCGRTAGWCAHILEQKRLGKLVRPSAIYVGPGPRSPESVDGWERVLTTA

SEQ ID NO: 4777 - protein, 214 aa, Brassica napus
  unsure (1)..(214): unsure at all Xaa locations
METSSNSTNSSLFQWLGLIEDYDHPSTSTLPPVITLLASVLTKMIQKNEKPFHTRRNKFRDEEITMFHGSRAPSMNIQRYTERVHRYARCSPACFVAAFVYIIRYLEIPVATSTTRRLTSLNVHRLLITSLLVAAKFLXRKCYNNAYYAKIGGVSTEEMNRLERTFLFDLDFRLNITAEMFXKHCXMLXRQTXPCGSRRLRTAXEXMTCGCXAI

SEQ ID NO: 4778 - protein, 483 aa, Rhodobacter sphaeroides 2.4.1
MRAQPAASHFVDGRPLEDETGAPIPVIYPATGEEIARLHEATPAVIEAALASGARAQAAWAAMRPVERARILRRASDLIRAHNEELSLLETLDTGKPLQETLVADWASGADALEFFAGLAPVVTGETVPLGQDFVYTIREPLGLCVGIGAWNYPSQIACWKAAPALALGNAMVFKPSEVTPLGALKLAEILIEAGLPPGLFNVVQGRGAVGASLVTDSRVAKVSLTGSVPTGRRVYAAAAEGVRHVTMELGGKSPLIVFDDADLESAIGAAMLGNFYSAGQICSNGTRVFVQKGIKEAFLARLAERADAIRMGDPLDPEVQMGPLVSQAQLEKVLAYIEKARAEGGRLVCGGEASVSPGCYVQPTVFADVTDAMTLAREEVFGPVMAVLDFETEEEAIARANATDFGLAAGVFTADLTRAHRVVAQLQAGTCWINAYNLTPVEAPFGGVKLSGVGRENGRAAVQHYTQVKSVYVGMGPVDAPY

SEQ ID NO: 4779 - protein, 468 aa, Corynebacterium glutamicum ATCC 13032
MNDPQRSPTLLWFRDDLRLSDNAALKWAADHGPVIGLFIDETINRSIGAAARWWREQSLNALAQDLSFYGVPLLRRTGNPLEILPKIVSEMEVKAVTWNRRYHQPLCEVDATLKKNLRDKGIEVHSHPGFLLTEPWEVSTATGTPYKVFTPFSKAAWEVARVHAYETVKNNVPVPSHLTGPEDVELPILEMEQPFWSTTLVKECAPGEKNASEKLFDFLEHLQDYPQARDSLARSATSKLSAHLRFGEISIHRVWAETAAIDSEGTELFLKELLWRDFAWHRLYALPHMDTQNVRMQFNRFGWSWDPSEKDKLNTPSTPLIPTKADQFHEDLAAWRAGKTGIPLVDAGMRELWATGSMHNRVRMVVASFLTKNLQIHWRHGEEWFWETLVDADPASNAFNWQWAAGSGDDASPYFRIFNPVTQAKKFDPDETYIRRWVPEYGTPSYPDPIVDLKESRQIALDAYSAIK

SEQ ID NO: 4780 - protein, 189 aa, Desulfovibrio desulfuricans G20
MDIDFKKLAPWNWFKKEQEEQQSTASLPMQRNDLPVAGGPVSPILQLHREIDRLFDDAFRGFGFPALAMPRWPSDWPGLLKPALDIQETDKLYKISLEVPGVEEKDIQITLDNDVLLVRGEKRQEQETKDGGFHRVERSYGSFQRALNLPADANQDTIKAAFKNGVLTITMEKREACAPKQGRSIPING

SEQ ID NO: 4781 - protein, 320 aa, Escherichia coli O6
MIKKIGVLTSGGDAPGMNAAIRGVVRSALTEGLEVMGIYDGYLGLYEDRMVQLDRYSVSDMINRGGTFLGSARFPEFRDENIRAVAIENLKKRGIDALVVIGGDGSYMGAMRLTEMGFPCIGLPGTIDNDIKGTDYTIGFFTALSTVVEAIDRLRDTSSSHQRISVVEVMGRYCGDLTLAAAIAGGCEFVVVPEVEFSREDLVNEIKAGIAKGKKHAIVAITEHMCDVDELAHFIEKETGRETRATVLGHIQRGGSPVPYDRILASRMGAYAIELLLAGYGGRCVGIQNEQLVHHDIIDAIENMKRPFKGDWLDCAKKLY

SEQ ID NO: 4782 - protein, 546 aa, Zea mays
MARRAASSLVSRCLLARAPAGAPPAAPSAPRRTDGMHRLLPGVLQRFSTAAAVEEPITPSVHVNYTKLLINGNFVDSASGKTFPTLDPRTGEVIAHVAEGDAEDINRAVAAARKAFDEGPWPKMTAYERSRILLRFADLIEKHNDELAALETWDNGKPYEQAAQIEVPMVARLMRYYAGWADKIHGLIVPADGPHHVQILHEPIGVAGQIIPWNFPLLMYAWKVGPALACGNTLVLKTAEQTPLSALYISKLLHEAGLPEGVVNVVSGFGPTAGAALASHMDVDKIAFTGSTDTGKIILELAAKSNLKTVTLELGGKSPFIIMDDADVDHAVELAHFALFFNQGQCCCAGSRTFVHERVYDEFVEKAKARALKRVVGDPFRKGVEQGPQIDDEQFKKILRYIRYGVDGGATLVTGGDRLGDKGFYIQPTIFSDVQDGMKIAQEEIFGPVQSILKFKDLNEVIKRANASQYGLAAGVFTNSLDTANTLTRALRAGTVWVNCFDVFDAAIPFGGYKMSGMGREKGVDSLKNYLQVKAVVTPIKNAAWL

SEQ ID NO: 4783 - protein, 400 aa, ASPERGILLUS NIDULANS FGSC A4
MATCQALVLHGAKDLRLEPRPVSSPSDGEVQIAIRSTGICGSDLHYYSHGRNGDFVVREPMCLGHESSGIVTAIGPNVHNLKVGDRVALEVGLPCRKCALCLSNPSRYNLCPEMKFRSSAKIFPHLDGTLMQLTTHPENMCHKLPDTVSYAGGALVEPLAVCLHAIRRSNPPAQSSLPPNYKSTALIFGAGAIGLLLAGALAAQETFAHIVIADIDDSRLKIASTMSLPNLSTFQIPKPSTPPPPRDAPHAEQTAFALSNAQATASSLKSAISSLDPSGLGFTRVYDCTGVPACVQTGIYAASPGSVLVQIGMGNPVQTLPVGAAALREVDIIGVFRYDGHAYPAAIELMASGKMDVVEKSVVTHRLGLQDGIRAFDIAGKGVDEGGRPVVKVLIESESP

SEQ ID NO: 4784 - protein, 306 aa, Arabidopsis thaliana
MAQLIRPIRQLSPQCNHHFRNLRYLFSKKLPNPPSSIPTLLLFSSFSTERSPPRRRIRPAPPEALKPTVIVAEEDGDNDGYESDSLRSRNQRKRDARRAVKWGMELASFSGDQVKQILKAASLGEEVYDALMLAKRLGSDVREGKRRHFNYIGKLLREVEPDLMDTLINATKQGDHSTLQTLISSAKDVADDVGDSYDDDTETESEDEEEGSDEYTAMAARWFDGLISQNVELTKEVYSLQSVDFDRQELRKLVRKVQLVHEQRKGTTEEKQKEVEAALVTAEKSLNQFLCSMAKQVHSEQTDLYL

SEQ ID NO: 4785 - protein, 165 aa, Leptospira interrogans serovar lai str. 56601
MRFNMNETLYDLTATLNNGKEQKLENYKGKVLLIVNTASECAFTPQYAGLQNLYSKYKTEGLEILGFPCDQFKHQEPGSDETIKNFCQKNYGVEFPIFKKIEVNGDNAHPVFRFLRNKASGFFGNSIKWNFTKFLVDKQGNVIKRYSPITTPENIEKEIQNLLKR

SEQ ID NO: 4786 - protein, 183 aa, Glycine max
MAEERFTGVVQWFNNGKGFGFIKPDDGGEDLFVHQSSIRSDGYRTLLEGDRVEFAIATGDNDKTKAVDVTGVDGAPLQPRASAANNRAGGSGFGARRNGGSGAACYQCGDFGHLARDCNRSSNTGGGGGGSGGGCFNCGGFGHLARDCVRGGGGNVGVGGGGGSGSCFRCGGFGHMARDCATG

SEQ ID NO: 4787 - protein, 402 aa, Bordetella pertussis Tohama I
MLSPEVRALVKATAPVLKEHGEALTRHFYTRMLGGNPELRQLFNQGHQQSGQQQQALAAAVAAYAEHIDDPSVLLQVVERIAHKHVSLGVRAEHYAIVGKHLLASIREVLGEAATDELIDAWAAAYGQLADLLIGRERALYAAAASRDGGWTGWRAFKVVRKTPESAEITSFYLAPADGGATPDYLPGQYVSVRVYVPELGLMQPRQYSLSEAPGMPGQLRISVKREAGSPAGMVSGTLHNRINEGDVLDVSPPQGDFTLDAEDGRPVVLLSGGVGLTPMVSMLNHLTARDDGRQIRFVHACREAGVHAMKEHINALAAKRPNVRKAVFYERVGADDRRGVDYDYEGRVDLHAIRDEVILPDADYYLCGPLPFMQAQRRALADLGVAEHRIHAEVFGTGGVA

SEQ ID NO: 4788 - protein, 459 aa, Desulfovibrio desulfuricans G20
MNALQPDTERLRALDTAHVWHPFTQMATWHEDAPLIIEKARGNWLVDTDGNRYLDGVSSLWTNVHGHRHPHIDAAIRAQLDNVAHSTLLGLSSRPAIELAAMLARVAPQGLNRVFYSDSGSTAVEVALKIAYQYQKQRGPAGEGRSKFLCLRGAYHGDTVGAVSLGGIDLFHAVYGGLLFKTVRAEAPYCYRCPFGRQKESCRHECFTHLEETATRHAPELAAMVIEPLVQGAAGQITHPDGYLAHARALCDRLGILLIADEVAVGFGKTGTMFACEQEKVTPDLLCLAKGISGGYLPLAATMVTDAVYEAFLGDHAQCRTFFHGHTYTGNALACAAGIASLQLFRTEGTLERLQHIITIYDALLRQLETLPHVGDIRRRGIMTGIELVEDRATRRPYPFALRTAHKVVLAARRRGVIIRPLGDVLVLMPPLSITAQECGLLVEATAEAIQEVTGGPRV

SEQ ID NO: 4789 - protein, 230 aa, Zea mays
MAAAARQRGTVKWFNDTKGFGFISPEDGSEDLFVHQSSIKSEGFRSLAEGEEVEFSVSEGDDGRTKAVDVTGPDGSFVRGGGGGGGGGGGYGSRGGGGSGGGGRSYGGSWGGGRRSGGGGGPGACYKCGEPGHMARDCPSADGGGGYGGGGYGGGGYGGGGGGGGGCFKCGEPGHMARDCSSGGGGYGGGRRRRGGGGGGGRFGGGGGGGGDRSCYNCGEAGHIARDCPT

SEQ ID NO: 4790 - protein, 416 aa, RICKETTSIA HEILONGJIANGENSIS
DSEFAELKIRGKIFKLPILKASIGEDVIDISRVSAEADCFTYDPGFMSTASCQSTITYIDGDKGILRHRGYDIKDLAEKSDFLEVAYLLIYGELPSGEQYNNFTKQVAHHSLVNERLHYLFQTFCSSSHPMAIMLAAVGSLSAFYPDLLNFKEADYELTAIRMIAKIPTIAAMSYKYSIGQPFIYPDNSLDFTENFLHMMFATPYTKYTVNPIIKNALNKIFILHADHEQNASTSTVRIAGSSGANPFACISTGIASLWGPAHGGANEAVINMLKEIGSSEYIPKYIAKAKDKNDPFRLMGFGHRVYKNYDPRAAVLKETCKEVLKELGQLDNNPLLQIAIELEAIALKDEYFIERKLYPNVDFYSGIIYKAMGIPSQMFTVLFAIARTVGWMAQWKEMHEDPEQKISRPRQLYTG

SEQ ID NO: 4791 - protein, 375 aa, Arabidopsis thaliana
MFAQLAPSPSPSPANVSHFVHRRTFRQCTYAVSASLPTANSSRPPPIQANIIVGGKDLNLDVTRKDDSIGFKLEANEDEIDWMNLESDIRLWTRALRPVQWYPGHIMKTEKELREQLKLMDVVIEVRDARIPLSTTHPKMDAWLGNRKRILVLNREDMISNDDRNDWARYFAKQGIKVIFTNGKLGMGAMKLGRLAKSLAGDVNGKRREKGLLPRSVRAGIIGYPNVGKSSLINRLLKRKICAAAPRPGVTREMKWVKLGKDLDLLDSPGMLPMRIDDQAAAIKLAICDDIGEKAYDFTDVAGILVQMLARIPEVGAKALYNRYKIQLEGNCGKKFVKTLGLNLFGGDSHQAAFRILTDFRKGKFGYVSLERPPL

SEQ ID NO: 4792 - protein, 160 aa, Pseudomonas aeruginosa PAO1
MSAFHDLTLQGLDGQDLPLSPFKGKVLLVVNVASKCGLTPQYAGLENLYQTYRERGFAVLGVPCNQFAGQEPGSEADIQSFCSLNYGVSFPMSAKVEVNGSARHPLYRLLAGEGAEFPGDITWNFEKFLLGPDGRVLARFSPRTAPDDPALVQAIEKALG

SEQ ID NO: 4793 - protein, 107 aa, Glycine max
MEHGSYTDQSKSTFSLVDEDHTFANAVRFTLNQDPRVSFCGYSIPHPSDNRVNIRVQTTGDPSREVLKDACQDLMLMCQHVRSTFDKAVSDFKISKARKNNEDMDVE

SEQ ID NO: 4794 - protein, 431 aa, Mycobacterium tuberculosis H37Rv
MADTDDTATLRYPGGEIDLQIVHATEGADGIALGPLLAKTGHTTFDVGFANTAAAKSSITYIDGDAGILRYRGYPIDQLAEKSTFIEVCYLLIYGELPDTDQLAQFTGRIQRHTMLHEDLKRFFDGFPRNAHPMPVLSSVVNALSAYYQDALDPMDNGQVELSTIRLLAKLPTIAAYAYKKSVGQPFLYPDNSLTLVENFLRLTFGFPAEPYQADPEVVRALDMLFILHADHEQNCSTSTVRLVGSSRANLFTSISGGINALWGPLHGGANQAVLEMLEGIRDSGDDVSEFVRKVKNREAGVKLMGFGHRVYKNYDPRARIVKEQADKILAKLGGDDSLLGIAKELEEAALTDDYFIERKLYPNVDFYTGLIYRALGFPTRMFTVLFALGRLPGWIAHWREMHDEGDSKIGRPRQIYTGYTERDYVTIDAR

SEQ ID NO: 4795 - protein, 166 aa, Zea mays
MDAVMFGLETPLMAALQHLLDVPDGDAGAGGDSDNKTGSGGSATRTYVRDARAMAATPADVKELPGAYAFVVDMPGLGTGDIRVQVEDERVLVVSGERRREEREDDAKYLRMERRMGKFMRKFVLPDNADVDKVAAVCRDGVLTVTVEKLPPPEPKKPKTIEVKVA

SEQ ID NO: 4796 - protein, 273 aa, Ureaplasma parvum serovar 3 str. ATCC 700970
MDIINKKINWFPGHMKKATDEILKNLKNVDFFIQLVDARCPLTSSNIELLKEVSSKPVINLANKADLSDWKKNFDNNFLLISTKKRNDKNKIIQHLYQLFDQKIKIYQKKGLINPKFVGMIIGLPNIGKSSLINFLAPKKVLKVENRPGVTKTQCIRQINQHFYLIDTPGIFLKNIQNERDSFVLTLINCVKKEVLELESIVHFAYDFYLKNYRNELFIKYKMNKVLNFDDFIHHICELYNYKLTNNEFDHVRAYENLFNDFSNGLICKVNYD

SEQ ID NO: 4797 - protein, 375 aa, Arabidopsis thaliana
MPLSLQSPPCATLSASIRKGRWKTLAAGFSVTPLPAVNFSLRRSIPRILASASSSSSPASSSLEAGENNELNAVSAFSEIVPDTVVFDDFERFPPTAATVSSALLLGICGLPDTIFRNAVDMALADSSCAGLETTESRLSCFFNKAIVNVGGDLVKLVPGRVSTEVDARLAYDTNGIIRKVHDLLRLYNEIDVPHDRLLFKIPATWQGIEAARLLESEGIQTHMTFVYSFAQAAAASQAGASVIQIFVGRLRDWARNHSGDTEIESAIKSGEDPGLALVKRSYNYIHKYGYKSKLMAAAVRNKQDLFSLLGVDYVIAPLKVLQSLKDSPAIPDDEKYSFVRKLTPETATHYHFTNKELVKWDQLSLSSSMGPASV

SEQ ID NO: 4798 - protein, 211 aa, Penicillium chrysogenum
MSTNITFHASALTRSERTELRNQRGLTIWLTGLSASGKSTLAVELEHQLVRDRRVHAYRLDGDNIRFGLNKDLGFSEADRNENIRRIAEVAKLFADSNSIAITSFISPYRKDRDTARQLHEVATPGEETGLPFVEVYVDVPVEVAEQRDPKGLYKKAREGVIKEFTGISAPYEAPANPEVHVKNYELPVQDAVKQIIDYLDTKGYLPAKKE

SEQ ID NO: 4799 - protein, 210 aa, Triticum aestivum
  unsure (1)..(210): unsure at all Xaa locations
MTTLLDALRQTTQVDCDTLDANVAHQLGPFVDCTSNQAIAFSEISRPLAGEPLLHYDALVKDAIEKARGALKEFQGSATFEEFVVQILMVKLQLLIVPNVTGYVHIQTNPKLSYSTDGTMSDAHRIVNIFKALAPEFDTKRVCIKIPATWEGLQACRALEVEGIATLATTMFCMEQATLAADAQCTYIAPYVNELKVHFEAGYVDEHXAF

SEQ ID NO: 4800 - protein, 366 aa, Clostridium perfringens
MMQPIKKIAILTGGGDCPGLNAVIRAVTRTAILKYGYEVIGYKFGYRGLYNNDFVKLDLDSVSGILHRGGTILHSSNKDNLFDYQVEDENGKIVKKDVSDVGVENLKKEGVDALVVIGGDGTLTSARDFSRKGVNVIGVPKTIDNDLLATDVTFGFNTATEIATEALDRLHTTAESHHRIMLLEVMGRNAGWIALESGIAGSADVILLPEIPYDINKIVEKVKEREEAGKQFTIIVVAEGAKPKDGEVVVSKIVDDSPDPIRLGGIANKLAIDLEGLIKNHEIRSTVLGHIQRGGNTSTYDRILSTKYGVKAVELINSNLFGNMVALKGNKVSYESLENVIGHTKNVDPEGELVNTAKSIGISFAD

SEQ ID NO: 4801 - protein, 263 aa, Hordeum vulgare
MSAPGELSREENVYMAKLAEQAERYEEMVEFMEKVAKTVDSEELTVEERNLLSVAYKNVIGARRASWRIISSIEQKEESRGNEDRVTLIKEYRGKIETELSKICDGILKLLETHLVPSSTAPESKVFYLKMKGDYYRYLAEFKSGPERKDAAENTMVAYKAAQDIALAELAPTHPIRLGLALNFSVFYYEILNSPDRACNLAKQAFDEAISELDTLSEESYKDSTLIMQLLRDNLTLWTSDITEDTAEEEIREAPKHDSSEGQ

SEQ ID NO: 4802 - protein, 357 aa, Nostoc sp. PCC 7120
MRKRIGILTSGGDCPGLNCVIRAVVSHATLTYDWEVLGIPYATQGLRERQAIALNMHGWDLRGIDPLLNMGGTILGTINKGDTLAHVDEMLASYQALALDALIVIGGDGSLGILHELASRGNWNLVAIPKTIDNDVALTERAVGFDTAVNTIVDALNRLTFTAASHDRVMIVEVMGRSAGHLALHAGIAGGADVILIPEISYTISGLCQHIAELRDRWQRKFAIVVVAEGAKLCLEDVQENIASSCAPSKCGRGQYIADQIAQCSKNLIDTRVSVLGHIQRGGIPSALDRLTATVFGKTAVDLIAQGKFGQMVAWQNGEAIPVPIQDVVAQSPLHVNPQGSLVQSARCLGIYVGEKT

SEQ ID NO: 4803 - protein, 518 aa, Triticum aestivum
MGNRTSRHRRAAADQPATAPPPTAQPKPQPPPKPQTAPAPAPTPEAGQVAMGRVLGRPMEDVRATYTFGRELGRGQFGVTYLVTHKATGQRFACKSIATRKLVHRDDIEDVQREVQIMHHLTGHRNIVELRGAYEDRHSVNLIMELCEGGELFDRIIARGHYSERAAALLCREMVSVVHSCHSMGVFHRDLKPENFLFLNNKEDSPLKATDFGLSVFFKHGEQFKDLVGSAYYVAPEVLKRHYGAEADIWSAGIILYILLSGVPPFWADNEDGIFEAVLLGHIDFSSDPWPSISNGAKDLVKKMLRQDPKERLTAAEILNHPWIREDGEAPDKPLDITVISRMKQFRAMNKLKKVALKIVAENLSEEEITGLKEMFRSLDTDNSGTITLEELRSGLPKLGTKISESEITQLMEAADVDGNGTIDYSEFVSATMHMNRLEKEDHILKAFEYFDKDHSGYITVDELEEALKKYDMGDDKTIKDIIAEVDTDHDGRINYQEFVAMMRNNSPEIVPNRRRMF

SEQ ID NO: 4804 - protein, 320 aa, Bordetella parapertussis 12822
MPSQLEALRRHTVVVADTGDFEAMRALRPTDATTNPSLILKAVQQEAYRPLLVQTARAHQGASPAEITDRLLVAFGRQILDIVPGRVSTEVDARLSFDTRATVERARGLIALYQAAGVPRERVLIKIASTWEGIQAARVLQAEGIRCNLTLLFCLPQAAACADAGVQLISPFVGRIYDWHKKNAGAEWVEDARRGANDPGVQSVSRIYRYYKRFGIETEIMGASFRNVDQILALAGCDLLTISPELLTRLSQTEGEVPAALSPQAGHDDADAVRLDGGEVAFRTQLNEDAMASEKLSEGIRLFVADARKLDALIESHGAA

SEQ ID NO: 4805 - protein, 442 aa, Zea mays
MEQAEVCYLISSISPLRENVVSKGGLCFVKLYQVDNLMRVLCFPTAGGKSVKKPRFSLRGYDFVPLDVKTDNLCIGEQDVSSAVPSTKASQTMVAERLENVEEQTEDLAPEFALPPKANTSVSELLDNLQRRGGSFVRTPSLLHQHAPSISIREQEVSSGVPPTKASQALMDEPFENVNGQTEELPSELPCSIKRPKFSVAELLEDLQGRSGSYVETASLSHQHTRAKHWKPKFLSSEKKTIAILGDRSIDSEDPLEHVIDGTSSEEEDATQNHLSLVNKDENQQTMADLFQEVFNPTNMDGAMKSMTSTGAGNYGRMQQIMQMEKYWHVEFLRQYSREHSYSGDLKGTTVQIMSRSLEGKLTVCSCMFQEKGNDATISNASADGTMDESRTRRTIIFSPKICNNVDLLVGNIIHIFPPWKEVKIQEEHVIICTYFSHHHRT

SEQ ID NO: 4806 - protein, 159 aa, Exiguobacterium sp. 255-15
MNTSLYEIEVQDATGQTVSLNDYAGEVLVIVNTASKCGLVKQLGDLQQLHDKYADQGVKVLGFPCDQFNNQEFADQQETMQFCQRNYGVTFPMFQKIDVNGPAEHRLYTYLKQQQGGLLSSNIKWNFTKFLVDREGRVVKRFAPVDSIQTIEKTLARYV

SEQ ID NO: 4807 - protein, 443 aa, Arabidopsis thaliana
MGSGRDRDDPLSFTSNPCTASSPVTVSDYLDNFLGEPTSRSGSFQSESLLGGGGGESINDADFGFARPDFRSEQLAGTVQFYERHVFLCYKKPSVWPARIEAAEFDRLPRLLSAAVSARKGSMKKETRLTICEGHDGTETSNGDVLIFPDMIRYRRLTHFDVETFVEEVLVKDGEWLPGNPELLKGSYVFVCSHGSRDRRCGVCGPSLVSRFREELEFHGLQGKVSISPCSHIGGHKYAGNVIIYRSNINREVTGHWYGYVTPEDVPILLEQHINKGEIVDRLWRGEMGLSEEDQKKTQEGRFQLNGTVHSVKINGKVSQESSVHNADVSCCQSRAAEPNGCCQQNGNSSSCCQDDTTLMLSLGTSEDNQLESENNTEKLTPGRKIAEKTFFRINSDKGSSTRKVCGIPTWLESWEREDTYAALAVVCAAASVAVAYTCYKQL

SEQ ID NO: 4808 - protein, 163 aa, Arabidopsis thaliana
MDPMDIVGKSKEDASLPKATMTKIIKEMLPADVRVARDAQDLLIECCVEFINLISSESNEVCNKEDKRTIAPEHVLKALQVLGFGEYVEEVYAAYEQHKYETMQDSQRSVKMNSGAEMTEEEAAAEQQRMFAEARARMNGGVTVPQPEQLEEPQQQQQTSLQS

SEQ ID NO: 4809 - protein, 370 aa, Triticum aestivum
MEKTNIVACRNPTSRDASDDEEATWSHAWGLISGFAVSITLKTAIELGIIDALTNAVGRALTVDELAAQLPAPDKAGSAASVDRLLRLLAAFDVVRCSTETGPDCEAVRKYTPAPVCRWLTSNRSDGSLAPLAMLAVDQDYLPTWNQMGAAVVCGVPTPFERAHGVPLFEYMGKNPRLSGVFNQAMFHMSVTVISKMVERFDGFDGVEVLVDVGGGTGAALEMITARHKHIKGINFDLPYVITQAPSLPGVENIAGNMFENVPTGDAIFLKWILHLQNDDECIKILKNCHRALPANGKVIVVEIVLPTTTEATREAQNMFLLDVIMFNNQQGGKERTEQDFLKMARSSGFDGAFRSTYIFGNFWALEFTK

SEQ ID NO: 4810 - protein, 469 aa, Synechococcus elongatus PCC 6301
MASALTPNASHSVSVLVRMPSNTAAMLHVVQAIATTGANLTEMELLQRTNQWIDRRLIVEAASEEQAAAVVEAIAAVPDLELLDSEDRTFALHRGGKISVEPKLPLTSQAQLAMAYTPGVGRVCKAIAANPDRVYELTVKQNMVAIVTDGTAVLGLGNLGPAGALPVMEGKAMLFKAFGDVDAFPICLDTQDTDEIVETMKRIAPVFGGVNLEDIAAPRCFEIEARLKQELDIPVFHDDQHGTAIVTLAALENALKLVKKSLSQVRIVMNGAGAAGLSVASLLREAGATNIIICDSRGILSCDRSDLTPQKQAFAIEAGGSLADALVNADVFIGVSVPGVLTVEMVETMASDRIIFAMANPIPEIQPELIQGRAAVIATGRSDYPNQINNVLAFPGVFRGALDCRAKSLTSSMFLAAARAIAALVPPETLSAEHIVPSAFDSRVAPAVAAAVVEAAQANGLAQTLAVTH

SEQ ID NO: 4811 - protein, 422 aa, Mesorhizobium loti MAFF303099
MMPQSRVWHPFTQHALEPAIPEIARTEGAYLYKADGTRILDAISSWWVVTHGHRHPRIIKAIETTASSLVQIIFAGFTHEPAERLAKALVGLAPAGLDWVFYSDSGSTSVEVALKMALGYFRNIDAPRSRIVVMEHSYHGDTIGTMSVGARGAFNAAYEPLLFEVDTIPFPAAGREQETLDRFEAVARDRRTAALIVEPLVLGAGGMLMYPAWVLAELKKIAETSGTLLIADEVMTGWGRTGTMFACEQASISPDILCTSKGLTGGAIPLAATLATDAIFQAHYSEDRKKTFFHSSSYTANPIACAAALANVEIWRDEPVAERVAALSAKQAAGLQRFRDNPYFTDCRATGTIAALDLRTGSAGYLAEIGPKLRAFFLERGLLVRPLGNVLYLLPPYCITGGELDALYDAIEEAAERFGSRP

SEQ ID NO: 4812 - protein, 498 aa, Chlamydomonas reinhardtii
MADEMDPMTACITALTDAAMTTAQATALCGQFAFAADNSDLSDRLDQTNQGLNTLYLVSCGALVFVMHAGFAMLCAGAIRSKNTMNILLQTVMDAAVSAVAFYILGYGFAYGIGNNPNGFIGDSLFGLSRWVSHSSSSDAGANWQAWFFQWAFAATATTIPAGAVAERLNFNAYLIYSFFISAFVYPVVVHWVWAAEGWLGYARFGGYSHLFRSGMIDFAGSGVVHMTGGLAGLAGCIMVGPRMGRFDSNGQPVEMPGHSATLVVLGTVLLWFGWYGFNPGSQLIINYTASAAVVGRAAVTTTLSGAAGCLSCLLTAFLRHKAWDLVSGCNGALVGFVSITASANVVEPWAALIAGLVGGWVFDAVCLLFLKLRIDDPLSAAPMHAFCGAWGVFFAGLLAKKEYICESYGRDCEGYVADGLFYVGDGRLLAQVIGIISIFAWVFGLMLLLFGGLKAVGLLRISAEEEQAGLDVSKHGGSAYNYDHGLGKPEKAQALGL

SEQ ID NO: 4813 - protein, 211 aa, Buchnera aphidicola str. Sg (Schizaphis graminum)
MHNNSKKNIIWQKHSVTRIKREQKNGHKSIVIWFTGLSGSGKSSIANSLEEILFQNNFNTYLLDGDNIRSSLCSDLSFSILDRNENIRRIGEVSKLMIDAGIIVLVSVISPYRNQRKKIRLMLGKINFLEVFVDTPLNICEERDPKKLYQKSRLGKISDLTGIQSLYEIPEKPDLHLDETISLKNNTKKLIHILCDKNIISFPNIDETFLF

SEQ ID NO: 4814 - protein, 503 aa, Ralstonia solanacearum
MSPSPETLLQRLHLDTLTGGDGPLAARSPIDGAVLARLPVETAADADRIVAQAHAAFRNWRTVPAPRRGELVRLLGEELRAHKADLGALVTLEAGKITQEGLGEVQEMIDICDFAVGLSRQLYGLTIASERPAHRMMETWHPLGPCLVITAFNFPVAVWAWNATLALVCGDPVIWKPSEKTPLTALAVERLFLRACQRFGEAPPHLAQVAIGAHDLGEALARHPGVPLVSATGSTGMGRAVAQAAAPRFARTILELGGNNAAIVCTSADLALAERAIAFAAMGTAGQRCTSLRRLFVQRPVYDALVPRLTTLYARVQVGDPRDDGTLVGPLIDGHAYERMQAALARARAEGGTVHGGGRVTVGAGDGAYYVRPALVEMPAQDGVVCEETFAPILYVMPFDSLDEAIALNNAVPHGLSSSLFTLDMREAERFVSATGSDCGIANVNIGPSGAEIGGAFGGEKDTGGGREAGSDAWKAYMRRATNTVNYGTALPLAQGIRFEVGG

SEQ ID NO: 4815 - protein, 502 aa, Neurospora crassa
MWLPLILLTATAAPILANPLSSPLNKRAAIDDCLKSAGVPADAQGSSEWRTDVNPFNQRLPYTPVAIAVPTTIEHIQGAVSCATKLGIKVTPKSGGHSYASFGLGGENGHLVVELDRMSKVTLDKTTNIADVQSGARLGHVATELYKQGKRAFSHGTCPGVGVGGHSLHGGFGFSSHTYGLAVDWIAAATVVLANSTVVTASPTENPDLFWALRGAGSNFGIVASFKFNTFAAPSQVTAFQINLPWNSASSIASGWEKLQDWLAAGNMPKEMNMRVFGSPSQTQLQGLYHGSSSALRTAVQPLLSTLGASLSNAQQYDWMGAFTYYTYGGTVDVTHPYNTVETFYSKSLVTTALPSAALNSVANYWINTAKRVSRDWFIIIDMHGGPKSAITSSTTNSANYTSSYAYRAPEYLFLYELYDRVMFGSYPSNGFSFLDGWVKSFTDNMKQEQWGMYINYADPTMKRAEAVGNYYRSSLSRLQKVKAQYDPNEVFYYPQSVEPAK

SEQ ID NO: 4816 - protein, 111 aa, Beta vulgaris subsp. vulgaris
YKAVNRESYEIVAVKKMKRKFYFWEECVNLREVKSLPSIESSNIIKLKEVVRENNDLFFIFEYMQYNLYQIMKDRHRPFTEEEIRNFLTQVLQGLAHMHRNGYFHRDLKPQ

SEQ ID NO: 4817 - protein, 270 aa, Lactococcus lactis subsp. cremoris
MTKKIVTLAGDGIGPEIMSAGLRVLKAVSKKIAFEYELVAKDFGGIAIDKHGHPLPEETLQAVKNADAILLAAIGHPKYNDAKVRPEQGLLALRKELGLYANVRPLKIYPALKNLSPIRNVENVDFVVIRELTGGIYFGQHELSDEKARDINDYTADEIRRILHFAFKIAQNRPRKLLTSVDKQNVLATSKLWRKIADEIAVEYPDVTLEHQLVDSCAMLLITEPQKFDVIVTENLFGDILSDEASSLAGTLALCPLVLMDLTDCHYMSQ

SEQ ID NO: 4818 - protein, 501 aa, Glycine max
MTSLTNGDAGSLNKVPTIKFTKLFINGDFVDSLSGKTFETIDPRTGDVIARISEGDKEDIDIAVKAARHAFDNGPWPRLPGSERARILLKWAEIIEENAEELAALDAIDAGKLYHMCRNVEVPAAANTLRYYAGAADKIHGEVLKMSREFHAYTLLEPLGVVGHITPWNFPNTMFYIKVAPSLAAGCTMVLKPAEQTPLSALFSAHLAKLAGIPDGVINVVPGFGPTAGAALSSHMDVDKVSFTGSTQTGRVIMQAAAKSNLKQVSLELGGKSPLIIFDDADIDKATELALLGILYNKGEVCVASSRVFVQEGIYDEFEKKLVEKAKAWVVGDPFDPKVQQGPQVDKEQFEKVLSYIEHGKKEGATLLTGGKTVGNKGYFIEPTIFSNIREDMLIAQDEIFGPVMALKKFKTIEEAIKSANNTKYGLAAGIVTKNLDTANTVSRSIRAGTIWINCYFAFGDDVPFGGYKVSGFGKDHGLEALHKYLQVKSVVTPLYNSPWL

SEQ ID NO: 4819 - protein, 105 aa, Zea mays
MASRSSAMEGGAAIQRRNAVKRHLQQRQQEADFLDKKVIASTYFSIGAFLVLACLTVSLLILPLVLPPLPPPPSLLLWLPVCLLVLLVVLAFMPTDVRSMASSYL

SEQ ID NO: 4820 - protein, 496 aa, Pseudomonas aeruginosa PAO1
MTELLSREEYAAIAATLDLPQRAFIDGGFRDACGGRTFASTNPATGELLAQVAACDAEDVGHAVASARRAFEDGRWRSRTPAERKAALLRLAELLEEHLLELAVMESLDSGKPIRECQHTDLPETINTLRWHAELIDKIYDSTAPVGSAALAMVVREPIGVVGLVLPWNFPLLMLAWKIGPALAAGCSVVVKPAPETSLTALRVAELASQAGIPAGVFNVVPGGGREAGEPLGRHPDVAMVSFTGSTATGRLFLKYAAESNLKRVVLECGGKNPAVVMNDVEDLDLVAQHVVNGAFWNMGENCSASSRLIVHAEVREALLERIGAQLREWRMGDPLDPRNRLGALVSPAHFEKVRAYLDQARTERLAVRFGGATEAGIFVEPTVVDGVSPHSRLFREEIFGPLLSVTSFDDIDEAIALANDTVYGLAASAYTGSLRHALRLSREIRAGIVTVNCFGEGDASTPFGGYKESGFGGRDKSVWAHDQYTELKTIWIDAS

SEQ ID NO: 4821 - protein, 203 aa, Zea mays
  unsure (1)..(203): unsure at all Xaa locations
RGANNIKIGSTIPYHRTGIDAIEEVIYHDETYDVTTIRASTXPMFLMARKIKSLGVKMVLSGEGSDELLGGYLYFHFAPNKEEFHRETCRKVKALHQYDCLRANKATSAWGLEVRVPFLDKEFINVAMGMDPEWKMVQIRGLSDCAYSSVLCCFMMIDDDVFSSSCFDLLAHTRTVRQEPGPHREVGHEEGVRRRRAPLPAQG

SEQ ID NO: 4822 - protein, 318 aa, Photorhabdus luminescens subsp. laumondii TTO1
MLTELIASNRRSAAIHAFVDTGLSTHFKDGIYVDISELSRKSGVNYARFSRLCDFLVEMGVLVSNDNKFRLSDECHVFANPESFESFMIKLEICSHYSNAWLMYGKSLFEDDGKSAFEMAHGRPFFEYLDGNKFLKSNFDALMTRVSNLIVEKLLGIYDFNQHNRILDVGGGEGELLVRISEKVKGKHYAVLDRYSELPVSDNIDFINGNFLNSIPSGYDLYILKNVLHNWSDSDSILILENFRKAMDKNSSLLLINMVKEPEFSRSFDILMDVLFLGKERSFTEFEYLANQAGLVVQETKVIDQSYSPYSFIKLQIK

SEQ ID NO: 4823 - protein, 317 aa, Photorhabdus luminescens subsp. laumondii TTO1
MLIDLITSCRKSTVIYAFVDMGLSVHFKDGACVNISELASQYGLDHSRFSRLCEYLIKIGVLVSCNEGVALSEECSALADPESMESLMIRCEVSPEYWKAWSMYSKSLYENNSKTAFEIAHGKPFFEYLDHHELFRSNFDSFMSKNSDKIIEKLLDIYDFSQHNRILDVGGGEGNLLIRINEKIKGKHYAVLDRYNETPVLEDIEFINGDFFKLVPSGYDLYILKNVIHNWSDSNAILILENCRKAMDDNATILLIGTVKKLKLEIIDSTDILMDVLLLGKERYLNELEDLAHQAGFVVKDIKEINEKYSIIELGVK

SEQ ID NO: 4824 - protein, 317 aa, Photorhabdus luminescens subsp. laumondii TTO1
MLAELITSYRKSIAIYTFVDTGLSVHFKNGTYMDINELASQYGIDYSRLNRLCDFLIEIGVLVSSNDRVALSEECRVLADPESMESLIAKWEFNSGLWNAWLMYPKSLLENNGKSAFEIANGKPFFEYLDSNKLLKSKFDSLMSKDSDKMIEKLFNVYDFNQHDKILDVGGGEGNLLIRMSEKVKEKHYAVLDRYNELPDYGNINFIDGDFFKSIPSGYDLYILKNVIHDWPDNDAILILENCRKAMGNNATILLITLMKKPQSNIIKYFDILMDVSSLGKERDLTEFEYLANQAGLVIQDVKDIDESYSIIQLGVK

SEQ ID NO: 4825 - protein, 104 aa, Zea mays
  unsure (1)..(104): unsure at all Xaa locations
MTMGVVVAALPEHHQEPRIQVNEEIYNHDELKAKFRTHEFXTGSDCEVXAHLYEEFGEEFVDMLDGIISFVLLDTRXKSFVAAHDVVAICPLYMGWCLDVVNNA

SEQ ID NO: 4826 - protein, 117 aa, Avicennia marina
MEGMNKSMCIIVVVAVLAAWVVPHGEAAISCGTVASKLAPCIPYVTNRGPLGGCCGGVKSLYGLARTTPDRQSVCGCLKSLASSYNVNLGKAAGLPGQCGVNIPYKISPSTDCSKVH

SEQ ID NO: 4827 - protein, 124 aa, Glycine max
  unsure (1)..(124): unsure at all Xaa locations
AETKRTDXTXNEKAXXQQARARXKXXPTXNHDTRDTDTXEAAXEEPERAQAHQIFFFYSTKDSASQSDVSKLLADQSFVSSILASLPGVDPNDPSVKDLLASLQNQAEPQQKNEDKPPNEEEKK

SEQ ID NO: 4828 - protein, 213 aa, Candida tropicalis
ISLLNILVAGRDTTAGLLSFVFFELARTPRVANKLREEIEDKFGLGQDARVEEISFESLKSCEYLKAVLNECLRLYPSVPQNFRVATRNTTLPRGGGKDGLSPVLVRKGQTVMYSVYAAHRNKQIYGEDALEFRPERWFEPETKKLGWAFLPFNGGPRICLGQQFALTEASYVTVRLLQEFSHLTMDPNTEYSPKKMSHLTMSLFDGANIQMY

SEQ ID NO: 4829 - protein, 283 aa, Streptococcus pneumoniae TIGR4
MATIQWFPGHMSKARRQVQENLKFVDFVTILVDARLPLSSQNPMLTKIVGDKPKLLILNKADLADPAMTKEWRQYFESQGIQTLAINSKEQVTVKVVTDAAKKLMADKIARQKERGIQIETLRTMIIGIPNAGKSTLMNRLAGKKIAVVGNKPGVTKGQQWLKTNKDLEILDTPGILWPKFEDETVALKLALTGAIKDQLLPMDEVTIFGINYFKEHYPEKLAERFKQMKIEEEAPVIIMDMTRALGFRDDYDRFYSLFVKEVRDGKLGNYTLDTLEDLDGND

SEQ ID NO: 4830 - protein, 333 aa, Mycoplasma gallisepticum R
MMAIQTQRIAILTSGGDSPGMNPAIYGLVQQAIINNIQPYLVYEGYKGLVEDQIVLANQQEVIDHFFDSGTFIYSARLVEFKDLEVRKKAVSNLKAKKIDTLVVIGGDGSYQGAKLLSEMGINVIVMPGTIDNDVSSSDYTIGFYSALEHITRTIQEIISTSVSHNRVSISEVMGRHCGDLAVYAALATKADLVITSENIKTTQEIVDLAAKRMLQDHKRTFTVIVCEHIYGEDGRDSLKTIAQQINDQLGIKTNLNILTYGQRGQVPTPMERILAMKFAIKAFECINEQRYGVVLGLSGDEIVAYNFQEALNKRNPSRIKLINLSNRINGGF

SEQ ID NO: 4831 - protein, 503 aa, Pisum sativum
MAITVSSRQLFIDGEWRVPILNKRIPNINPSTENIIGDIPAATKEDVDLAVDAAKRAISRKNGRDWSAASGSLRARYLRAIAAKIKEKKDELGKLESIDCGKPLEEALADLDDVVACFEYYAGLAEELDSKQKAPISLPMDTFKSYILKEPIGVVALITPWNYPFLMATWKIAPALAAGCAAILKPSELASVTCLELGEICKEVGLPRGVLNIVTGLGHEAGASLASHPDVDKISFTGSSATGSKIMTTAAQLVKPVSLELGGKSPIVVFEDVDLDKVAEWTGFGCFFTNGQICSATSRLIVHESIAVEFVDKLVKWAENIKISDPLEEGCRLGPIVSEAQYKKVLNCISSAKSEGATILTGGRRPEHLKKGYFVEPTIITDVTTSMQIWREEVFGPVLAVKTFSTEEEAINLANDTHYGLGSAVMSNDLERCERLSKALQAGIVWINCAQPSFIQAPWGGIKRSGFGRELGEWGLENYLSVKQVTRYTSDEPWGWYQPPSKL

SEQ ID NO: 4832 - protein, 163 aa, Glycine max
EAAAKKAAEDAAKQEKDGEQQASPQDTTMTKGVSAAASEAETKRTDLTVNENALLQQALAMSMDDPTINHDMRDTDMSEAAAEDPELALALQLSVEDSSKDSASQSDVSKLLADQSFVSSILASLPGVDPNDPSVKDLLASLQNQSEPQQKNEDKPPNEEEKK

SEQ ID NO: 4833 - protein, 421 aa, Mesorhizobium loti
MSQSQVWHPFTQHALEPAIPEIVRTEGAYLYKADGTRILDAISSWWVVTHGHRHPRIIRAIETTASSLDQIIFAGFTHEPAERLARALVGLAPTGLDWVFYSDSGSTSVEVALKMALGYFRNIGAPRSRIVVMEHSYHGDTIGTMSVGARGVFNAAYEPLLFEVDTIPFPASGREQETLDRFEAVSRDRRAAALIVEPLVLGAGGMLMYPASVLTELKKIAETSGTLLIADEVMTGWGRTGTMFACEQASISLDILCTSKGLTGGAIPLAATLATDAIFQAHYSEDRTKTFFHSSSYTANPIACAAALANVEIWRDEPVAERIATLSAKQAAGLQRFRDNPYFTDCRATGTIAALDLRTGSAGYLAEIGPKLRAFFLERGLLVRPLGNVLYLLPPYCITGEELDGLHDAIEEAGERFGTKP

SEQ ID NO: 4834 - protein, 451 aa, Bdellovibrio bacteriovorus HD100
MSQKPYDLIIQGGICLLPHPSESGLIEHQADIAITDGRIEKIRDSINEPALRIIKAHGLHVLPGVIDSQVHFREPGLTHKEDLETGTRAAVLGGVTSIFEMPNTNPSTTTKEAFEDKLQRAKNRAHCNYAFFIGGAHDNVAHIAELELMPHCSGVKIFMGSSTGNLLVEDDETLEQILKRGHRRIIFHSEDEMRLRERKHIATDMADPHYHPVWRDVETAVNSTTRLLRLARKTGRKIHVLHVSTGEEMDLLKDAKDIATVEVLPQHLTLYAPDCYDKLGTYAQQNPPIREKRHMDRIWKALLDGTVDVIGSDHAPHTREEKDRPYPASPSGVPGVQTLVPIMLNHVHDGRLSLKKFTELVTENPCRVFGVKNKGRLRQGFDADITIVDLKKEMTIDNSWIASRCGWTPFHGMRVTGWPTHTIVGGKLVMENDQVVLPSQGQAVDFLETRS

SEQ ID NO: 4835 - protein, 327 aa, Rhodospirillum rubrum
MSETKLDALRRHTIIVADSGDIDAIRSFAPQDCTTNPSLILKAAKMPAYAGLIAQAIEAGSAEAGPSEGLIDRILDHLAVTFGSELARIVPGVVSTEVDARLSFDTQATVARAERLIGLYAARGVAAERILIKVAATWEGIRAVEILQSRGIACNVTLVFSLAQAVAAAEAGAFLISPFVGRILDWHVKASGKSFDIDEDPGVRSVTEIYTYFKHFGYKTIVMGASFRSSAEVEALCGCDRLTVSPALLDQLRSQTGDVPKRLDPAASKAATISRLAVDEASFRWQINEDALATEKLAEGIRLFNADTDALRRTIAETLAKRASTVA

SEQ ID NO: 4836 - protein, 141 aa, Brassica napus
MPRSLKPLDLGIQIPYHFRCPISLQLMRDPVTVCTGQTYDRTSIESWVSTGTDTTCPVTRAPLSDFTLIPNHTLRRLIQEWCVANRSNGVERIPTPKQPADPTSVRALLSQASAACGTHVSVRSRAAALRRLRAFARDSEK

SEQ ID NO: 4837 - protein, 109 aa, Ammopiptanthus mongolicus
ASFPRSLSSNLGRETFAVRFCTHPDTDSAHKMDKTQNPSEEATHGDVMFHPFGEGYTTRFDEEGFGGIYGGNQTRPEKSVHENHPAYDKTQGSEVKEKEKARHQTNTNA

SEQ ID NO: 4838 - protein, 166 aa, Brassica napus
MERGAPLSHYQLPKSNSGLNLDQHNNSIPTMTGSISACDDKNKTILPQQQPSMPREQDQYMPIANVIRIMRKILPPHAKISDDAKETIQECVSEYISFVTGEANERCQREQRKTITAEDILWAMSKLGFDDYVGPLNVFINRYREFETDRGCSLRGESSFTPVYGG

SEQ ID NO: 4839 - protein, 297 aa, Saccharomyces cerevisiae
MAFQKDAKSSAYSSRFQTPFRRRREGKTDYYQRKRLVTQHKAKYNTPKYRLVVRFTNKDIICQIISSTITGDVVLAAAYSHELPRYGITHGLTNWAAAYATGLLIARRTLQKLGLDETYKGVEEVEGEYELTEAVEDGPRPFKVFLDIGLQRTTTGARVFGALKGASDGGLYVPHSENRFPGWDFETEEIDPELLRSYIFGGHVSQYMEELADDDEERFSELFKGYLADDIDADSLEDIYTSAHEAIRADPAFKPTEKKFTKEQYAAESKKYRQTKLSKEERAARVAAKIAALAGQQ

SEQ ID NO: 4840 - protein, 350 aa, Bacillus cereus ATCC 14579
MKALLWHNQRDVRVEEVPEPTVKPGTVKIKVKWCGICGTDLHEYLAGPIFIPTEEHPLTHVKAPVILGHEFSGEVIEIGEGVTSHKVGDRVVVEPIYSCGKCEACKHGHYNVCEQLVFHGLGGEGGGFSEYTVVPEDMVHHIPDEMTYEQGALVEPAAVAVHAVRQSKLKEGEAVAVFGCGPIGLLVIQAAKAAGATPVIAVELSKERQELAKLAGADYVLNPATQDVLAEIRNLTNGLGVNVSFEVTGVEVVLRQAIESTSFEGQTVIVSVWEKDATITPNNLVLKEKEVIGILGYRHIFPAVIKLISSGQIQAEKLITKKITVDQVVEEGFEALVKDKTQVKILVSPK

SEQ ID NO: 4841 - protein, 381 aa, Arabidopsis thaliana
MENHLQHSLTIIPKPDLIKEEQRYHEDTVSLQAERILHAMTFPMVLKTALELGVIDMITSVDDGVWLSPSEIALGLPTKPTNPEAPVLLDRMLVLLASHSILKYRTVETGDNIGSRKTERVYAAEPVCTFFLNRGDGLGSLATLFMVLQGEVCMKPWEHLKDMILEGKDAFTSAHGMRFFELIGSNEQFAEMFNRAMSEASTLIMKKVLEVYKGFEDVNTLVDVGGGIGTIIGQVTSKYPHIKGINFDLASVLAHAPFNKGVEHVSGDMFKEIPKGDAIFMKWILHDWTDEDCVKILKNYWKSLPEKGKVIIVEVVTPEEPKINDISSNIVFGMDMLMLAVSSGGKERSLSQFETLASDSGFLRCEIICHAFSYSVIELHK

SEQ ID NO: 4842 - protein, 391 aa, Methanocaldococcus jannaschii DSM 2661
MFEVKHMDGIDVFFFMWAASLIFFMKAGFIALEIGQFRAKNVSYHCVLKLLDLAAVFIAYLFIGYGISYGFENIMPLITGTFDADLGAWWMKMVMFAAAAVTIITGGVAERIKILPYFIGALIVGGILYPIVEHLVWGGGFANLGINFHDYAGSGAVHLFGGLVGLMAAYVLGPRIDKYINGKPQAIPGHNIPIAVLGAFILAFGWYGFNIGSASGIANGVELASVAMATTMALAGGIIGGALSSRNDPLYTANGMCAGLVAVCSGVDLFTPIGAFIVGLLAGIQQPFTYKFIEEKLKIDDVCAIGPVHAMSGLIGVICAGIPFLLKADAVSKVSITGQIIGAIVIALIAIVGGLIIYKGLDLTIGLRVSEEAEKVGLDTAILQTTAYSEE

SEQ ID NO: 4843 - protein, 244 aa, Triticum aestivum
  unsure (1)..(244): unsure at all Xaa locations
MFGYRKAPDLDLEAGGSAPLYPGMTEDVELRWAFIRKIYVILSVQLAMTAAVAGFVVKVPAVSDFFVSSNAGLGLYIFFLVLPLIVLCPLRYYHQKHPVNLILLGVFTVSISFXXGMTCAFTSGKIILEAAILTAVVVISLTAYTFWAAKRGHDFNFLGPFLFGALMVLMVFSLIQIFFPLGKISTMIYGAVASIIFCGYIIFDTDNIIKRHTYDEYIWAAVSLYLDIINLFLNLMQILRAADS

SEQ ID NO: 4844 - protein, 488 aa, Bacillus subtilis subsp. subtilis str. 168
MSVITEQNTYLNFINGEWVKSQSGDMVKVENPADVNDIVGYVQNSTAEDVERAVTAANEAKTAWRKLTGAERGQYLYKTADIMEQRLEEIAACATREMGKTLPEAKGETARGIAILRYYAGEGMRKTGDVIPSTDKDALMFTTRVPLGVVGVISPWNFPVAIPIWKMAPALVYGNTVVIKPATETAVTCAKIIACFEEAGLPAGVINLVTGPGSVVGQGLAEHDGVNAVTFTGSNQVGKIIGQAALARGAKYQLEMGGKNPVIVADDADLEAAAEAVITGAFRSTGQKCTATSRVIVQSGIYERFKEKLLQRTKDITIGDSLKEDVWMGPIASKNQLDNCLSYIEKGKQEGASLLIGGEKLENGKYQNGYYVQPAIFDNVTSEMTIAQEEIFGPVIALIKVDSIEEALNIANDVKFGLSASIFTENIGRMLSFIDEIDAGLVRINAESAGVELQAPFGGMKQSSSHSREQGEAAKDFFTAIKTVFVKP

SEQ ID NO: 4845 - protein, 449 aa, Oryza sativa (japonica cultivar-group)
MYRAKRAALSPKVKRRVGKYELGRTIGEGTFAKVRFAKNTENDEPVAIKILDKEKVQKHRLVEQIRREICTMKLVKHPNVVRLFEVMGSKARIFIVLEYVTGGELFEIIATNGRLKEEEARKYFQQLINAVDYCHSRGVYHRDLKLENLLLDASGNLKVSDFGLSALTEQVKADGLLHTTCGTPNYVAPEVIEDRGYDGAAADIWSCGVILYVLLAGFLPFEDDNIIALYKKISEAQFTCPSWFSTGAKKLITRILDPNPTTRITISQILEDPWFKKGYKPPVFDEKYETSFDDVDAAFGDSEDRHVKEETEDQPTSMNAFELISLNQALNLDNLFEAKKEYKRETRFTSQCPPKEIITKIEEAAKPLGFDIQKKNYKMRMENLKAGRKGNLNVATEVFQVAPSLHVVELKKAKGDTLEFQKFYRTLSTQLKDVVWKCDGEVEGNGAAA

SEQ ID NO: 4846 - protein, 466 aa, Sinorhizobium fredii
MSKRFRSRSAARAARHRLRRGEQDMSNRLNTTPNDLSAFWMPFTANRQFKKEPRLFVGAKDMYYTTHDGRTVLDGTAGLWCVNAGHCRPKITEAIREQAGELDYAPAFQLGHPKAFELANRLVDIAPEGLNHVLYTNSGSESVDTALKVALAYHRAKGNGSRFRLIGRERGYHGVNFGGISVGGIVANRKMFGTLLTGVDHLPHTHLPAKNAFTRGEPEHGGDLASELERIVTLHDASTIAAVIVEPVAGSTGVLIPPKGYLQKLREICTKHGILLIFDEVITGYGRLGTPFAAQYFDVKPDIITTAKGLTNGVIPMGAVFVTSEIHDAFMTGPEHLIEFFHGYTYSGNPIASAAALGTLDTYKEEGLLTRAAELASYWEEALHSLKDCPHVIDIRNIGLIGAVELEPIAGEPTKRAFSAFLKAYEKGLLIRTTGDIIALSPPLIIEKKQIDELIDKLRDVLKNNI

SEQ ID NO: 4847 - protein, 498 aa, ASPERGILLUS NIDULANS FGSC A4
MANVRVKGENFYRDAKKVKRLNMLKDGKPQRDAAGNITVAASYQSREAPVARIEPNRKWFGNTRVISQEALSSFREAVAERASDPYQVLLKTNKLPMSLIRDNKTVNGLKQHEAKMTIETSPFSDTFGPKAQRKRVKLGVSSLEDLAGETMKMHDSYVEKSEQGRHEDGTPIVAGDDVATDLSVGTLPTSREAVFLKGQSKRIWNELYKVIDSSDVVIHVIDARDPEGTRCRGIEKYIREEAPHKHLIFVLNKCDLVPTGVAAAWISVGLIGYPNTGKSSIINTLRKKKVCTVAPIPGETKVWQYVTLMKRIYLIDCPGVVPPSQTDTPEDILLRGVVRVENVENPEQYIPAILKRVQPKHLERTYGIKETSDAIEFLSILARKGGRLLRGGEPDLDGVAKMVINDFLRGKIPWFTPPPFTPGEEGEKIEGREGRLGEMGRKRKIEETSQDASEGQEGQDQSASDSEEEFGGFDDEQDDSDNDSIANLEVSDEESGEE

SEQ ID NO: 4848 - protein, 405 aa, Glycine max
MVLEATMICIDNSEWMRNGDYSPSRFQAQADAVNLICGAKTQSNPENTVGVLTMAGKGVRVLVTPTSDLGKILACMHGLDIGGEMNLAAGIQVAQLALKHRQNKKQQQRIIVFAGSPVKHEKKMLEMIGRKLKKNSVALDIVNFGEEDEGKTEKLEALLAAVNNNDTSHIVHVPSGPNALSDVLISTPIFTGDGEGGSGFAAAAATAAAGGVSGFEFGVDPNLDPELALALRVSMEEERARQEAAAKKAAEDAANLEKGDEQQASSQHATMTERAGAATSEAENKTSDLMDDENALLQQALAMSMDDSAISHDVKDTDMSEASASDPDLALALQLSITDSAKDQSSQSDMSKLLADQSFVSSILASLPGVDPNDPSVKDLLASMQNQSEPQQKNDDKPSNEEEKK

SEQ ID NO: 4849 - protein, 166 aa, Brassica napus
  unsure (1)..(166): unsure at all Xaa locations
KKILRSSLLCCIVFLLISNFYGSVEAGKRRIEITDDLDDVEDSEEDESWKTWGNKAAAPEFDPPPDFSNMGFDQIQEEMAKRTFAPVVGFVKLRLGVQRTKDMVVDIAMKWTKVLRTGGLGVRFMAVDRSTVMFNMQNGKEVTELREFVLRQEEAYEVKIGKXEFD

SEQ ID NO: 4850 - protein, 487 aa, Vigna radiata
MRRGLDNQAYYVLGHKTPNIRDLYTLGRKLGQGQFGTTYLCTENSTSNEYACKSISKRKLISKEDVEDVRREIQIMHHLAGHKNIVTIKGAYEDPLYVHIVMELCSGGELFDRIIQRGHYTERKAAELTKIIVGVVEACHSLGVMHRDLKPENFLLVNKDDDFSLKAIDFGLSVFFKPGQIFTDVVGSPYYVAPEVLLKHYGPEADVWTAGVILYILLSGVPPFWAETQQGIFDAVLKGHIDFDSDPWPLISDSGKDLIRKMLCSQPSERLTAHQVLCHPWICENGVAPDRAIDPAVLSRLKQFSAMNKLKKMALRVIAESLSEEEIAGLREMFQAMDTDNSGAITFDELKAGLRRYGSTLKDVEIRDLMEAADVDKSGTIDYGEFIAATVHLNKLEREEHLIAAFQYFDKDGSGYITVDELQQACAEHNMTDAFLEDIIREVDQDNDGRIDYGEFAAMMQKGNAGIGRRTMRNSLNLSMRDASSAQ

SEQ ID NO: 4851 - protein, 184 aa, Amaranthus hypochondriacus
MASSMMSNAATAVAVAATSGGAQANMVAPFNGLKSIASFPVTRKSNDITSIASNGGRVQCMQVWPPVGKKKFETLSYLPPLSDAQLLAQVQYLLNKGWIPCIEFELEHPFVYRENHRSPGYQDGRYWTMWKLPMYGCTDPAQVLNEVEEAKKAYPTAFIRIIGFDNKRQVQCVSFIAYKPADSY

SEQ ID NO: 4852 - protein, 344 aa, Candida albicans SC5314
MSPSTQQQVHESNQSQSNDSSSIGLRLNDNNIQPIEIELSSFKHDSITFHKQDSSYWFYEKSKQSFPGQSFGLQVEKILYHTKSSFQDILIFKSTNFGNVLVLNGIIQCTEKDEFAYQELITHLPIMSHPSPKKVLVIGGGDCGVIRELIKHVNDQTIQEITMVEIDDMVIKLSTKFLPEMAKYHNHPKVNLIIGDGFEFLKNSSKEKKYDVIITDSSDPDDGPAEEFFQINYFKLLLNALNEKGIVIMQSSENIWLNLPYLKELKSKAATVFSNVKYCQCYMPSYTSGQLGLIIATMDTGKDLVNPLRKFDHDKELKLFKYYNQHIHTNSFVLPTWADDYLNN

SEQ ID NO: 4853 - protein, 180 aa, Amaranthus hypochondriacus
MASSLMSNAITAVVGASGAQANMVAPFNGLKSIASFPVTRKSNDITSIASNGGRVQCMQVWPPVGKKKFETLSYLPPLSDAQLLAQVQYLLNNGWIPCIEFELEHPFVYRENHRSPGYQDGRYWTMWKLPMYGCTDPAQVLNEVEEAKKAYPSAFIRIIGFDNKRQVQCVSFIAFKPPGY

SEQ ID NO: 4854 - protein, 160 aa, Manihot esculenta
MSDEEHHFESKADAGASKTFPQQAGTIRKNGYIVIKNRPCKVMEVSTSKTGKHGHAKCHFVGIDIFNGKKLEDIVPSSHNCDVPHVNRTDYQLIDISEDGFVSLLTETGNTKDDLRLPTDENLLSQIKDGFAEGKDLVVSVMSAMGEERICSLKDIGPKN

SEQ ID NO: 4855 - protein, 210 aa, Photorhabdus luminescens subsp. laumondii TTO1
MADIENLPLENVVWHPHQLTRAQREVENGHPALVIWFTGLSGSGKSTVAGALEQALFQRGIKTYLLDGDNLRHGLCRDLGFSEQDRQENIRRVGEVASLMVDAGLVVLTAFISPYKAERKKVRELLEPGQFIEVFVDTPLEICESRDPKGLYKKARAGEIRHFTGIDSVYEVPDSPEIYLPGQQSVETSVTQLLVELKKSGIIRSRIHHG

SEQ ID NO: 4856 - protein, 1062 aa, GIBBERELLA ZEAE PH-1
MSVDSLLSSLASSYNRVQLHLSYFARVYRASCASATVMSSNWHSLIARAIDIPLEGDDSRVGSTRDGSSGGTLSTNNASKSSSLQSLGGTFIPVVIYCVVCIIFFSIFRVKCSRVYAPRAIPSLRSPHKHIPPLPTGWFDWVKPFFKTPDTFVLNHGSLDGFFFLRYLKVLRNTFLVGMLIAWPILFPIHITGGNKLSQLDILTIGKISDRKRFVLFTITRECFYYIGIRQAYLSSPHYSKRLSSRTVLITSIPDRYLDEARLRKLYGDSVKRVWIPRTAKALIKLVEEREETAMRLEKAEIALIKKAHLARKKHFNKSPSSASSSVDPYPTESSSSYRSDPSSEQTRSDSPRVGVSQNETAQDETQEAGFKAQYPQVTQTVTQDTHDLLERSAEDPEYVHPYGLNPNLPDVRGSVAAQWIPAKARPHHRPLQNFFRRVDTIRWCRMRLKDLNLEIYKLRRQVRRGDGDTLPAAFIEFDTQEAAQAAHQIVAHHRPLQLAPRLLGVRPDEVVWKALRMCWWERIIRRFLIMGLVAVAIIFWSIPSAMIGIISNIDFLSGIVFLRWIKLLPKPILGFLQGFIPAIALSFWMSLVPAMLRFCGVQAGIPSLVLVELFTQNIYFAFQVVQVFLITTLTSAASAAVLDIIKQPMSAPDLLARNLPKASNFYLSYILVQCLAIGATGLLHLFELFRQHILGRGLQNPRTRFNIWYNLRPPRWGGIFPIYTNMACIAFCYTCIAPLILLFACAGMAFTRLIYRYNILYVFDSEMDSMGLFYPNALLQLIVGLYLAEICMIGLFALKLAFPPMVLMLIFLIFTGIVHMSLRDSISPLLQNLPQTLTLEEELQQQEKAEAEQKLQEAAESGEVNGGTAASYFDADLNFGEEEVEEPPSDDEDGQHDGPQGSRGVDGGGGVKLMVREWMKTTAKAQVKKEIQQSGIKRFLDRWILAGDPSNPDQQPTFLQRFLHPEVYEDFIALRKLIPFEEPPDVDYAGDEKMSNYWPPELWMPKPVLWIPRDEARVSRQEVAHTRKITPITDVGVTLNEKGLIIVDVEAAPFPRMRLVH

SEQ ID NO: 4857 - protein, 509 aa, Streptomyces coelicolor A3(2)
MANSTHTPAERAHRTIHAGGEWLAASSGATREILDPADAVAFAVVAEGDEKDTDLAVAAARRAFDAGDWPHTPVAERAALLRRVAGLLVRDREKLGLLESRDAGKTVEEGRVDIDCVADAFRYFADLVAGEAPGRVVDAGSPEVHSVVVHEPVGVCAMITPWNYPLLQASWKIAPALAAGNTFVIKPSEITPMTTIALIDLLVEAGLPTGVANIVTGPGHTVGARLAEHPDVDLVSFTGGLTSGVKVAQAAAVTVKKVALELGGKNPNVVFADACATEEGFDTAVDQALNAAFMHSGQVCSAGGRLIVEESVRERFVAELARRAERIRLGRGTEEGVECGPLVSAQQRAKTEDYVASALAEGAELRCGGKRPEPSPQRPESGYFYEPTVLDHCHREMRVVREEVFGPVLTVETFRTEDEAVALANDTEYGLAGAVWTADAGRARRVAGRLRHGTVWINDFHPYLPQAEWGGFGKSGVGRELGPAGLAEYRESKHVYQNLAPKPVRWFSG

SEQ ID NO: 4858 - protein, 494 aa, Geobacillus stearothermophilus
SSIAAPKLKEKVEKFLSGKKKMYINGSFVESASGKTFDTPNPATGERLATVYEGDAEDIDRAVKAAREAFDRGPWSRMSAAERSRLMYKLADLMEENKEELAQLETLDNGKPIRETINADVPLAIEHMRYYAGWSTKIVGQTIPVNGPYFNYTRHEPVGVVGQIIPWNFPLLMAMWKLGAALATGCTVVLKPAEQTPLSALYLAELIEEAGFPAGVVNIVPGFGETAGDALVKHPQVDKIAFTGSTEVGKLIMANASKSLKRVTLELGGKSPNIILPDADFSKAIPGALNGVMFNQGQVCCAGSRVFIQKKQYDNVVADMVSHAKSIKQGFGLKADTEMGPLVSSEQQNRVLGYIEKGLEEGAELLTGGQKPSEQGYFVEPTIFANVEDSMTISKEEIFGPVIAALPYEDIDELIERANDTNYGLAAGVWTRDVTKAHYIANKLRAGTVWVNCYNVFDAASPFGGYKESGIGREMGSYALDNYTEVKSVWIAQN

SEQ ID NO: 4859 - protein, 405 aa, Thermoplasma volcanium GSS1
MAYIQVREDGTLLVPDKVTIGYIEGDGIGPDITKTTINVINAALEVAYGGKRSIEWHKVLAGDEAYDKTGNRLPDSSLEELKKCVVSIKGPLTTPIGEGFRSLNVTLRQYLDLYANIRPVRYFPGVPSPVLHPEYMNMVVFRENTEDLYAGIEWRYDSEDAEKVRAFLSSTFNINLTPDTGIGIKPISKFKSTRLVRKAIQYAIANGRKSVTLVHKGNIMKYTEGAFRDWGYEVARTEFGDYTVTEAEYLKDPEKYANKIVIKDRITDNMFQQVLTRTQEYDVIATPNLNGDYLSDALAAQVGGIGLAPGANIGDHYAVFEAVHGTAPKYAGLDVANPTSLILSAEMMLDHIGWKEASKILDDAIMQTYRDQKLTQDIARLLNLKALKCSEFGEEIINRMKPIKS

SEQ ID NO: 4860 - protein, 54 aa, Zea mays
MASATFLEVLLAIFLPPVGVFLRYGCGVEFWIDLLLTVLGYIPGIIYAVYVLVA

SEQ ID NO: 4861 - protein, 120 aa, Glycine max
MAGMVFGLDAPMMAALQHLLDIPDGEAGAAAGEKQGPTRAYVRDARAMAATPADVKELPGAYAFVVDMPGLGSGDIKVQVEDERVLVISGERRREEKEDAKYLRMERRMGKLMRKFVLPE

SEQ ID NO: 4862 - protein, 122 aa, Oryza sativa (japonica cultivar-group)
MAPRCATLAVVVVLVAAVVAPPTAVRAAISCSAVYNTLMPCLPYVQAGGTVPRACCGGIQSLLAAANNTPDRRTICGCLKNVANGASGGPYITRAAALPSKCNVSLPYKISTSVNCNAYVHA

SEQ ID NO: 4863 - protein, 266 aa, Zea mays
PARREPALLHLRRSCEFNPRVSMSSYSPPPPLPPRDQSMDTEAPNAPITRERRLNPDLQEQLPKPYLARALEAVDPSHPQGTKGRDPRGMSVLQQHAAFFDRNGDGVIYPWETFQGLRAIGCGLTVSFAFSILINLFLSYPTQPGWLPSPLLSIRIDNIHKGKHGSDSETYDTEGRFDPSKFDAIFSKYGRTHPNALTKDELSSMLQGNRNTYDFLGWLAAAGEWLLLYSLAKDKDGLLQRETVRGLFDGSLFERLEDDNNKKKSS

SEQ ID NO: 4864 - protein, 427 aa, Photorhabdus luminescens subsp. laumondii TTO1
MADNKATLAPDGSVAIELDVLTPTLGSKVIDVRTLGSQGFYTYDPGFTSTASCESKITYIDGNEGVLLHRGFPIDQLATKSTYLEVCYILLYGETPTQEQFDKFKKTITRHTMIHEQIHRLFNGFRRDSHPMAVLCGVTGALAAFYHDALDVNNPRHRDITAYRLLSKMPTVAAMCYKYSIGQPFVYPRNDLSYAGNFLNMMFATPCEEYKVNPVLERAMDRIFILHADHEQNASTSTVRTAGSSGANPFACIAAGIASLWGPAHGGANEACLRMLEEIQSVEHIPEFIKRAKDKNDAFRLMGFGHRVYKNYDPRATVMRETCHEVLDELGLNDSLLEVAMELERIALHDPYFIEKKLYPNVDFYSGIILKAMGIPSTMFTVIFAIARTIGWIAHWNEMHDGGVKIARPRQLYTGYTKRDFDSQLEK

SEQ ID NO: 4865 - protein, 286 aa, Hordeum vulgare
  unsure (1)..(286): unsure at all Xaa locations
TTMXXXPSGLELERPQQLFPQWQPLPQQPPFLQQEPEQPYPQQQPLPQQQPFPQQPQLPHQHQFPQQLPQQQFPQQMPLQPQQQFPQQMPLQPQQQPQFPQQKPFGQYQQPLTQQPYPQQQPLAQQQPSIEEQHQLNLCKEFLLQQCTLDEKVPLLQSVISFLRPHISQQNSCQLKRQQCCQQLANINEQSRCPAIQTIVHAIVMQQQVQQQVGHGFVQSQLQQLGQGMPIQLQQQPGQAFVLPQQQAQFKVVGSLVIQTLPMLCNVHVPPYCSPFGSMATGSGGQ

SEQ ID NO: 4866 - protein, 470 aa, Dechloromonas aromatica RCB
MKKEKALVWFRRDLRDHDHAALSAALAEAQQVYCAFVFDSEILDPLPTRHDRRVHFIRESLVELDAALRARGGGLIIRHGQAVDEIPALARRLGVSAVFTNRDYEPSAKRRDAQVARQLRNDDIAFHGVKDQAIFDGDEVLTQAGKAFSVFTPYKNAWLKRLTTADYAAWPCDGRLAGQELAGIPTLEEIGFTPTDLAELGIQPGMSGAKGLWDDFSRDRIERYGSLRDFPAVKGVSYLSVHLRFGTISIRQLVRQALAHQADTWLSELIWRDFYFMILDHFPHVAGHAFKPEYDAIQWASRPEAFAAWCEGCTGYPLVDAAMRQLNFSGWMHNRLRMVVASFLTKDLGIDWRLGEKYFAEQLNDFDLSANNGGWQWASSSGCDAQPYFRIFNPVTQSEKFDAEGKFIRRYVPELAKVHDKYIHAPWKMGRIEQEALGVVIGRDYPSPIVDHATARDETLARYAVVKKQA

SEQ ID NO: 4867 - protein, 73 aa, Triticum aestivum
MEHGSLTDSTSSTFSIMDEDHTLANSARFVLNQDPRVAFCGYTIPHPSEKKVNIRLQTTGDAAKDVLKDALQI

SEQ ID NO: 4868 - protein, 216 aa, Escherichia coli
DLYICLRPVRYYQGTPSPVKHPELTDMVIFRENSEDIYAGIEWKADSADAEKVIKFLREEMGVKKIRFPEHCGIGIKPCSEEGTKRLVRAAIEYAIANDRDSVTLVHKGNIMKFTEGAFKDWGYQLAREEFGGELIDGGPWLKVKNPNTGKEIVIKDVIADAFLQQILLRPAEYDVIACMNLNGDYISDALAAQVGGIGIAPGANIGDECALFEAT

SEQ ID NO: 4869 - protein, 360 aa, Triticum aestivum
MGSTATDMAASADEEACMYALQLVSSSILPMTLKNAIELGLLETLVAAGGKLLTPAEVAAKLPSTANPAAADMVDRMLRLLASYNVVSCTMEEGKDGRLSRRYGAAPVCKFLTPNEDGVSMAALALMNQDKVLMESWYYLKDAVLDGGIPFNKAYGMSAFEYHGTDPRFNRVFNEGMKNHSIIITKKLLEVYKGFEGLGTIVDVGGGVGATVGAIVAAYPAIKGINFDLPHVISEAPPFPGVTHVGGDMFQKVPSGDAILMKWILHDWSDEHCATLLKNCYDALPAHGKVVLVECILPVNPEATPKAQGVFHVDMIMLAHNPGGRERYEREFEGLAKGAGFAAIKTTYIYANAFAIEFTK

SEQ ID NO: 4870 - protein, 88 aa, Zea mays
  unsure (1)..(88): unsure at all Xaa locations
MAPTVMASAGTSVAPFQGLKSTAGLPVSRRSNGASLCSVSNGGRIRCMQGWPFEGIKKCETLSYXPPVNTEALLEQEDYLVRCQGAPG

SEQ ID NO: 4871 - protein, 323 aa, ASPERGILLUS NIDULANS FGSC A4
MSLPSHFSLNTGAKIPAVGFGTWQAKPLEVENSVEVALKQGYRHIDCAAIYRNETEVGNGIRKSGVPREEIFLTGKLWNTKHAPEDVEPALDKTLKDLGVEYLDLYLMHWPCAFKASDKWFPLDDNGVFQLADIDYVTTYRAMEKLLNTGKVRAIGVSNFNVRRLEDLLSKVSVVPAANQIEAHPYLQQPDLLRYCQSKGIIIEAYSPLGNNQTGEPRTVDDPVVHTVAGQLSMDPGPLLASWAVQRGTVVLSKSVTPSRIAANLQVKRLPDDAFATLAALERHKRFNFPAFWGYDIFDEAGEEAVKKAAMDAAPINKTKFTV

SEQ ID NO: 4872 - protein, 334 aa, Arabidopsis thaliana
MDAKETSATDLKRPREEDDNGGAATMETENGDQKKEPACFSTVIPGWFSEMSPMWPGEAHSLKVEKVLFQGKSDYQDVIVFQSATYGKVLVLDGVIQLTERDECAYQEMITHLPLCSIPNPKKVLVIGGGDGGVLREVARHASIEQIDMCEIDKMVVDVSKQFFPDVAIGYEDPRVNLVIGDGVAFLKNAAEGSYDAVIVDSSDPIGPAKELFEKPFFQSVARALRPGGVVCTQAESLWLHMDIIEDIVSNCREIFKGSVNYAWTSVPTYPSGVIGFMLCSTEGPDVDFKHPLNPIDESSSKSNGPLKFYNAEIHSAAFCLPSFAKKVIESKAN

SEQ ID NO: 4873 - protein, 319 aa, Escherichia coli CFT073
MKPENKLPVLDLISAEMKTVVNTLQPDLPPWPATGTIAEQRQYYTLERRFWNVGAPEMATRAYRVPTKYGQVKTRIFYPQPDRPATLFYLHGGGFILGNLDTHDRIMRLLASYSQCTVIGIDYTLSPEARFPQAIEEIVAACCYFHQQAEDYQINMSRIGFAGDSAGAMLALASALWLRDKQIDCGKVAGVLLWYGLYGLRDSVTRRLLGGVWDGLTQQDLQMYEEAYLSNDADRESPYYCLFNNDLTREVPPCFIAGAEFDPLLDDSRLLYQTLAAHQQPCEFKLYPGTLHAFLHYSRMMKTADEALRDGAQFFTAQL

SEQ ID NO: 4874 - protein, 2761 aa, Ustilago maydis 521
MHPRQPSGPGSTDAMEIYDHLHTPKHEIDVADAFAAAMPSAIDPNQPSLRSVPEDAQLDTQQLSSLNASPLASSLQPSSQVAQQESPTSRRSDKLATSSYGLVQPGGRPDLASRRSSDVLKSLPGLPLALTNAEQTFLPATLNGGTSSAIPHPSAAIGSLVDHRAPPADTLPPQHIPRPLPGSATPSASASPSAMQTPPKKTPYDAIAAGVQTLAMPNSISVGPLSPPESDPHRSMMDSNRKSIDDIRRNHAARAAQRQSNNSSPIETRPGNGLVPDSAYTPTRAHAQYQSEFASSPDPTQRQRRAMASEPPRPASVLDTRAAQMQAVQRRQHDSRLGQGSSDTFDATDTLGSSRDTQLDRASQQHLQLRAAREQELERERLQHQQLQEQQREKEQQRQREKLKEREREKEREREREKERGERDRDRDRERRSRRLLGDYALGKTLGAGSMGKVKLGVKMGNGEKVAIKIIPRHTSMAAAQSPRAAVDENGKPQPPPPPPTASFLAKAAAKDQSKEIRTIREGSLQILLHHPYVCGMREMIIHTNHYYMVFEYVNGGQMLDYIISHGRLRERSARKFARQIGSALEYCHRNSIVHRDLKIENILISKTGNIKIIDFGLSNLFSPHSHLSTFCGSLYFAAPELLNAKVYTGPEVDVWSFGIVLYVLVCGKVPFDDQSMPALHAKIKRGQVEYPAWLSGECKHLLSRMLVTNPANRATLAEVLAHPWMVKGYEGVPDPHLPDRTPLRPHNIDQEVIKGMTGFEFGSPEAITAKLIEVLNSEAYQTSLYHWELKNLPASLTGLSTVSNSGSSIDSPGLNRPSTRGSFTATSGSDTVKSKAGSRRFSGIDFYKKKLTTNPLAAAFGSKDDSAVGSANGSSNGLGSGTGLLPFGKEPLDPTRGFHPLISIYFLVKEKMERERLYGHSFFASSNLSLNGPPVPSTGAVAGAGTGARAAAAGAMPTAADIPQEALRVPEVPHVSHRAYDPSRQQEAALASPAPPRPAAAMIPVPASPTPVFESREKSRPSGLMAGPPRARANADEMEAALREKCLPSPKDAGFAPGIGGMAPVPAASTPGMRQSFSVVPPGPEVAIGHNHRHSMMAPDISMAITNNHKRSVSLTARRPPGAAAAGRTPVGAMVEPSTPDAFSMDTRRMSTMSPARLPARASYIATPSKSEAGSAEPSSSPAATAHNTSSTLGYGATLARRFSSFMGRSPSQPLDTEARERKKQSRMSMPLGGLPQQQQQQHQQRRGSAHMPLSEVDEADTGTDVDAYDYDEVEEHLVTHDEDMPLGSGTTVRRSGTMGDMPASHANTRVSEASMGALSVGRAAGLSMSPKSTAAAKSGRRPSTGISPSTSMPLNVLDAGGAARQKEDALQQVSPSNARTGWMGPSTPGQAEVLPALVTRRRFGGGSNATGGQQNGSSASEGGSKPIFLKGLFSVQTTSTKPRTVIHASLVKVLDRIGIQYRELRGGYECVHLPSLDFSGSDSLGRGNARIPLETMAAAAAADAEASERSPTSEENNRQPKRKPSRLSFVSGRSKDKDRANRKEGSVAESIGALTGAGGTVRSRTPSLTSNAAFANADSTTLPPLPPKTPSKPSLLIRSPRQRADSMGAASMLGPSGSRDSNLMLDTTVAAGSGGDACALSPASAAGTVTARTMNAAQATELAVRFEIFVVKVPLLLGVNGLQFRRVGGNPWQYQMLAKRILQELKLPVLWNDRGSWIRMVAFHVWKHSRFTIHDSRFGVSKEAGEIHREWSRSRVGRIVCETRHAAVEPVLGTTFYHTFILTIKNAADDHKQVWQRYISPARIRNETCSISKMHKDYTTLHSVAPDKARIDNLCCDIERCCFTDTIHTQGSFHSSSSAHKTLLSDIPSISPRSLVKYLDSYVVGQTRAKKVLAVGVWNHYLRVASNQRMKHEAEARLEAQQQQQQQQQQQQQLSEEETETQLQRNCTIPDHGVSEAASRSLRLGKYKARSEEAAGPISNPTAMQEKDEAMASLQDSWRSQHQIEQERNAERARDPHGEATRSLMFGRSEREWLVNAGGPSAIIEDDSKVAIQNGSGYAGRIAPKFGDDLKPPEKPEKPEKPMKRVSAQTPAEEASWKLEQRKWSSTTAAQENALAEAASRMHNAVLSDYTRDFHQKDHVVEGTSRIGVFGADEPLYFSSNTMRGSQHAGVRGPGSQSQMSRTDETENKWESSQERAAYAAGIAQERTKRALRLARERLSTSRNSDHPSERASTVDVCHVSDCTPRTHDAGKETASTSNPGIAFLSTQPGSLPFFEKSNILLLGPSGSGKTLLLRTLAQALDVPFVHVDATPLTMAGYVGEDVESIIQRLLVEAGWDVDRAQRGIVCIDEIDKLRKTGLGGGGGGAGGAGGGGGKDVGGEGVQQALLRILEGTTIQIANKAGANAGASAAGTATAASKVPKSYPRQAATGDVNGVETAGGLGPWYNHRRAQADSADAKWNSNSLSSSQTQAASLSVDTSSILFVLSGAFVGIDHVIRNRLDRLSGDPTTLNVSSEDQNEKPHAATLSQCDLLSRLEPSDLEQYGMIPEFIGRVPVSVVLNPLSHQDLIRVMTEPRNSLVDQYTSLFKLNGIELHISRGAIEEVVHRAMGTCSAANSKALVRNSADRGGGGGGARSLRRIMEDVLLDAFYESYGSSSVKYILVDRQSVRDTSEVKLFSRGQKLDFEARVKTEAQDWCTRQQQQKQTRHQGANPAKAIRKDGGALGDMDAARTAMARHKARALIRSRLRRTNRLVDPVIYV

SEQ ID NO: 4875 - protein, 316 aa, Caulobacter crescentus CB15
MIKVRVASRARAAEGIAQLDLVCAEGRDLPAFEAGAHIDLFLGNGLTRQYSLCSDPAERSFYRIAVLRELTSRGGSAYVHEALTEGATLEISPPRNLFALDETAEEHLLFAGGVGVTPILAMAKRLSALGRAFTFHYCARDRSRAAFLNELSTAPFTSAVRLSFDAEPDTRLDLDVALARPKPGRRLYVCGPGGFMTHVIDGALARGWSGDQIRKEHFAAAPLSAGQDQPFELVIASSGQIVTVAADQTAAQALEAAGVFVPVSCEQGVCGTCLTRVIDGQPDHRDAFQTDEERAANDQFTPCCSRARSPRLVLDL

SEQ ID NO: 4876 - protein, 142 aa, Triticum aestivum
AGSGPYPPPPAFRLQAEGLRYHHQLSRHIAQLGRIEAMASRLLAAASSSSASSSPLARLISSRRMAGAADHHGSTKVNMWQEPLNPGNWKEEHFVLASLAMWGAYYIWWIEGICVRNTEPTNRRQAHPASTGHDYPCTPKPL

SEQ ID NO: 4877 - protein, 457 aa, Zea mays
MAASARDSADAAERVVDDHDGWASDGEMGMEMDVEGEFHDRDADRRDGGVDGDDEYLLLTRIRDTSAAEARAGKDIQGIPWERIHIARQDYRKARLEQYKNYENFPQSGELMDKLCKQVEKSSKYYEFQHNTRSVKPSILHFQLRNLLWATSRHDVYFMSNSTVTHWSSLSHKLSEVLDFSGHIAPVEKHPGSLLEGFSGVQVSTLAVNEGLLVAGGFQGELIGKDLEGCNIKFCARTTLSDNAITNAIDIHRSTSGSLRITVSNNDCGVREYDMERFQLLNHYRYNWPVNHTSVSPDKKLLAVVGDDRDALLVDSRNGKVTSTLVGHLDYSFATAWHPDSRTFATGNQDKTCRIWDTRNLSTSLAVLRGNIGAIRCIRYSSDGRFLVFSEPADFVHVYSVAADYKKRQEIDFFGEVSGITLSPDDESLFVGVCDRVYASLLQYRMIHAFDYLDSYV

SEQ ID NO: 4878 - protein, 496 aa, Pseudomonas aeruginosa PAO1
MFELSDWQRRAATQRFIDQALIGGRQRPAASGATFDAIDPASNRLLARVAACDAADVDAAVAAARRAFDEGPWARLAPVERKRVLLRLAELMLAHREELALLDSLNMGKPVMDAWNIDVPGAAHVFAWYAESLDKLYDQVAPTAQQTLATITRVPLGVIGAVVPWNFPLDMAAWKLAPALAAGNSVVLKPAEQSPFSALRLAELALEAGVPEGVLNVVPGLGEQAGKALGLHPEVDALVFTGSTEVGKYFMQYSAQSNLKQVWLECGGKSPNLVFADCRDLDLAAEKAAFGIFFNQGEVCSANSRLLVERSIHDEFVERLLAKARDWQPGDPLDPASRAGAIVDRRQTAGILAAIERAQGEGATLLGGGRQLTINGSDNFIEPTLFGDVRPDMQLAREEIFGPVLAISAFDSEDEAIRLANDSRYGLAASLWSDDLHRAHRVARRLNAGTVSVNTVDALDVAVPFGGGKQSGFGRDLSLHSFDKYTQLKTTWFQLR

SEQ ID NO: 4879 - protein, 352 aa, Triticum aestivum
  unsure (1)..(352): unsure at all Xaa locations
MADEEGCMHAVQLALSSVLPMTLKAAIELGLLEILVGAGGEALSPEEVAAKLPAEANPDAASMVDRMLRVLASHDIVSCMVEEGKDGNLSRRYSPAPVCKWLTPNEDGVSMAPYVVVAQDKVFMEPWCYMKKAVLEGGSPFNMAYGMSWYDYAGTDPRFNRLFNEAMRHHSVIITKKLLELYTGFXGVGTLVDVXGGIGTTIHAITSKYPRIKGINFDLSHVISEAPPYPGLQVEHVGGDMFDKVPSGDAILMKWILLHFRDETCVALLKNCYHALPVNGKVINMECILPAELDATHRVQGCVSADMSMLAYSPDGKERYLTDFERLAKEAGFASVKATYIYTNFWAIEYIK

SEQ ID NO: 4880 - protein, 464 aa, Listeria monocytogenes EGD-e
MLYSKENKESYLEPVFGSSAEDRDIPKYTLGKEPLEPRIAYRLVKDELLDEGSARQNLATFCQTYMEDEATKLMSETLEKNAIDKSEYPRTAELENRCVNIIADLWHAPKDQKFMGTSTIGSSEACMLGGMAMKFAWRKRAEKLGLDIYAKKPNLVISSGYQVCWEKFCVYWDIDMRVVPMDKEHMQLNTDQVLDYVDEYTIGVVGILGITYTGRYDDIYALNEKLEEYNSKTDYKVYIHVDAASGGFFTPFVEPDIIWDFRLKNVISINTSGHKYGLVYPGIGWVLWKDESYLPEELIFKVSYLGGEMPTMQINFSRSASHIIGQYYNFLRYGFEGYRTIHQKTSDVAQYLAHAVEQTGYFDIFNDGSHLPIVCYKLKDDANVNWTLYDLADRLQMRGWQVPAYPLPKSLENIIIQRYVCRADLGFNMAEEFIQDFQASIQELNNAHILFHDTQQSGVHGFTH

SEQ ID NO: 4881 - protein, 460 aa, Pseudomonas aeruginosa PAO1
MTAQLNPQRDTRDYQQLDAAHHIHAFLDQKALNREGPRVMVRGDGLQLWDNDGKRYLDGMSGLWCTNLGYGRQDLAAAASRQLEQLPYYNMFFHTTHPAVVELSEMLFSLLPDHYSHAIYTNSGSEANEVLIRTVRRYWQILGKPQKKIMIGRWNGYHGSTLGSTALGGMKFMHEMGGMLPDFAHIDEPYWYANGGELSPAEFGRRAALQLEEKILELGAENVAAFVAEPFQGAGGMIFPPQSYWPEIQRICRQYDVLLCADEVIGGFGRTGEWFAHEHFGFQPDTLSIAKGLTSGYIPMGGLVLGKRIAEVLVEQGGVFAHGLTYSGHPVAAAVAIANLKALRDEGVVTRVREETGPYLQRCLREVFGDHPLVGEVQGAGFVAALQFAEDKVTRKRFANENDLAWRCRTIGFEEGVIIRSTLGRMIMAPALVAGRAEIDELIDKTRIAVDRTAREIGVL

SEQ ID NO: 4882 - protein, 138 aa, GIBBERELLA ZEAE PH-1
MSDHEFGGNEDLSLPKATVQKIVSEILPPQAGVAFAKEARDLLIECCVEFITLISSEANEISEKEAKKTIACDHITKALEQLGFTDMVPAVLEAAAEHKEVQKGREKKADKFANSGMSMEELARLQEEQFAAARERHG

SEQ ID NO: 4883 - protein, 153 aa, Glycine max
  unsure (1)..(153): unsure at all Xaa locations
ISNNGARDNSEWMRNGDYSPSRFQAQADAVNLICGAKTQSNPENTVGVLTMAGKGVRVLVTPTSDLGKILACMHGLEISGEMNLAAGIQVAQLALKHRQNKKQQQRIIVFAGGPVNHEKKMLEMIGRKLKKNSVALDIVNFGXEEDEGKTEKL

SEQ ID NO: 4884 - protein, 305 aa, Saccharomyces cerevisiae
MSSSSQFKQLEKLGNGTYATVYKGLNKTTGVYVALKEVKLDSEEGTPSTAIREISLMKELKHENIVRLYDVIHTENKLTLVFEFMDNDLKKYMDSRTVANTPRGLELNLVKYFQWQLLQGLAFCHENKILHRDLKPQNLLINKRGQLKLGDFGLARAFGIPVNTFSSEVVTLWYRAPDVLMGSRTYSTSIDIWSCGCILAEMITGKPLFPGTNDEEQLKLIFDIMGTPNESLWPSVTKLPKYNPNIQQRPPRDLRQVLQPHTKEPLDGNLMDFLHGLLQLNPDMRLSAKQALHHPWFAEYYHHAS

SEQ ID NO: 4885 - protein, 125 aa, Triticum aestivum
  unsure (1)..(125): unsure at all Xaa locations
PARRTFQGSPDLKAAREVADYLGTIHHEFHFTVXDGIDAIEEVIYHDETYDVTTIRANTPMFLMARKXIKSLGXVRWCVPGKGSEQLLGRLLYFNXAPNKEGXHKEDCRKGEGLHNTPARNKATS

SEQ ID NO: 4886 - protein, 443 aa, Methylobacter alcaliphilus
MKIFEEIESEVRSYARAFPRVFDRAQGAKIYDHEGNEYLDFLAGAGSLNYGHNHPVFKEKLLEYIQNDGITQGLDLHTRAKGEFLESFNEHILKPRNLDYIVMFTGPTGTNAVEAALKIARKKTGRENIISFTNGWHGQTLGSLSVTGNSTHRGGAGIALHGSTRIPYDGYLGDDFDTTNLLDKMLSDSSSGVDKPAAVIVETVQGEGGINAASMTWLRSLSEICKRHDVLLIIDDIQAGCGRTGTFFSFEEAGIYPDIVTLSKSLSGYGLPLAIVLMKPEIDQWSPGEHNGTFRGNNHAFVTAKAAIDHFWKDDSFAKDVQRKGRYIADRVDVIVAKYGEGNFNSHGRGMFRGINCVSGDLAGQITRRCFQKGLIIETSGADDHVVKFLCPLIITDEELEKGIDILEQAIKEVCDKADTIPEGKDFFEGDYSVSKEVSKAGH

SEQ ID NO: 4887 - protein, 179 aa, Vibrio vulnificus CMCP6
MKYSSIALLLLSSVAASTSYAGDFSLTSHDIMEGQRMAKTFEFTGFGCSGDNLSPQLSWQNAPKGTKSFAITAYDPDAPTGSGWWHWSTIDIPANVSELPRGVDLKKVGATEIRNDYGAKGFGGVCPPEGDGMHRYQFTVWALPEAKLDLDSNSSPALVGFMLNAMALDKATLTATYVR

SEQ ID NO: 4888 - protein, 509 aa, Arabidopsis thaliana
MDAQSVSEKLRSSGLLRTQGLIGGKWLDSYDNKTIKVNNPATGEIIADVACMGTKETNDAIASSYEAFTSWSRLTAGERSKVLRRWYNLLSRSEPLHFTKHRYDLLIAHKEELGQLITLEQGKPLKEAIGEVAYGASFIEYYAEEAKRVYGDIIPPNLSDRRLLVLKQPVGVVGAITPWNFPLAMITRKVGPALASGCTVVVKPSELTPLTALAAAELALQAGVPPGALNVVMGNAPEIGDALLTSPQVRKITFTGSTAVGKKLMAAAAPTVKKVSLELGGNAPSIVFDDADLDVAVKGTLAAKFRNSGQTCVCANRVLVQDGIYDKFAEAFSEAVQKLEVGDGFRDGTTQGPLINDAAVQKVETFVQDAVSKGAKIIIGGKRHSLGMTFYEPTVIRDVSDNMIMSKEEIFGPVAPLIRFKTEEDAIRIANDTIAGLAAYIFTNSVQRSWRVFEALEYGLVGVNEGLISTEVAPFGGVKQSGLGREGSKYGMDEYLEIKYVCLGDMNRH

SEQ ID NO: 4889 - protein, 214 aa, Glycine max
MTGKRNQITTSPVGSPTSGNISDSSSSKEQDRFLPIANVSRIMKRALPANAKISKEAKETVQECVSEFISFITGEASDKCQREKRKTINGDDLLWAMTTLGFENYVGPLKFYLNNYRETEGEKSSMAKQEEHSPTHQTNIDGVVVEINKLHHFCGSNQQSCRLQHFQWVVASILWGLKWLLQRASLRLEGSMAIKKVPLLKVRSVVIMMQVAIE

SEQ ID NO: 4890 - protein, 495 aa, Pisum sativum
MALQVLTLPSWVTLFTTFAILLLFSRRLRRRQYNLPPGPKPWPIIGNFNLIGTLPHQSLHGLTQKYGPIMHLWFGSKRVVVGSTVEMAKAFLKTHDATLAGRPKFSAGKYTTYNYSDITWSQYGPYWRQARRMCLLELFSAKRLESYEYIRKQELHVFLHELFDSRNKTILLKDHLSSLSLNVISRMVLGRKYLEKVENSIISPDEFKNMLDELFLLNGILNIGDFIPWIHFLDFQGYVKRMKVLSKKFDGFMEHVLEEHIERRKGVKDYVAKDMVDVLLQLAEDPDLEVKLERHGVKAFTQDLIAGGTESSAVTVEWAISELIRKPEIFKKATEELDRVIGRERWVEEKDIANLPYVYAIAKETMRLHPVAPMLVPREAREDCNINGYDIPKGSLILVNTWTIARDSNVWDNPNEFMPERFLGKDIDVKGHDYELLPFGAGRRMCPGYPLGIKVIQSSLANLLHGFNWRLSDDVKKEDLNMEEIFGLSTPKKIH

SEQ ID NO: 4891 - protein, 357 aa, Zea mays
  unsure (1)..(357): unsure at all Xaa locations
MDKPVAPGIIKEELLEQQPPTQDGVGGGGDAPRPMEGLHEVGPPPFLTKTFDLVEDPATDAVLSWSRAGNSFIVWDPHVFADGLLPRLFKHSNFSSFVRQLNTYGFRXVDPDRWEFANEGFLRGQRHLLKMIKRRKPPSAVAPLRQQRAPASCLEVGEFGFEEEIDRLKRDKNILITEVVKLRQEQQSTKDHVRAMEERLRVAEQKQVQMMGFLARAMRNPEFFXQLAQQQDKRKELEDTISKKRRRPIDNTPFYSDGESEQLDSQLKMFESGVLNGLNEPELENLAVNIQELGKGSIDDGNLTQVSDQSELNDDFWAELLVEDFGDKAGQPELEGRTEDVNDLAQQLGYLSSSSPK

SEQ ID NO: 4892 - protein, 217 aa, Shigella flexneri
LDLYICLRPVRYYQGTPSPVKHPELTDMVIFRENSEDIYAGIEWKADSADAEKVIKFLREEMGVKKIRFPEHCGIGIKPCSEEGTKRLVRAAIEYAIANDRDSVTLVHKGNIMKFTEGAFKDWGYQLAREEFGGELIDGGPWLKVKNPNTGKEIVIKDVIADAFLQQILLRPAEYDVIACMNLNGDYISDALAAQVGGIGIAPGANIGDECALFEAT

SEQ ID NO: 4893 - protein, 356 aa, Anabaena variabilis ATCC 29413
METNVKAQVFRGVNQLSYEEIPLPTLEPDEVLVQVQVVGLCQSDIKKIRYPLYEPPRIFGHETAGTIAAVGSQVKGWQVGQRVAVMHHIPCMRCAYCMNDNFSMCDVYKNISTTAGFNASGGGFAEYVKVPGHIVENGGLIPIPDEISFEEASFVEPTNCCLKAVKKAQIAPGQTVLVTGAGPIGLMFVMLVKYFGAKAIATDLLPSRIEKALNVGAEAAFDARDPDLPAKIHALTNGLGVDVTLLAVPSEKAFFQALDCTRKGGKILFFAEFPDELEIPINPNILYRREIDLMGSYSSSYRLQNLSADIVFNRRIDVQALISDRYPLKDLSAAVDQAIAPTPETYKILIYPKIGD

SEQ ID NO: 4894 - protein, 76 aa, Glycine max
MVGIGVPICVQCGNTSNPCRCKVVGPTLGFLAFAAAAVVEWPVGALVYCFRHSKGRKIMGHPATVIYPSVTNAIPI

SEQ ID NO: 4895 - protein, 357 aa, Zea mays
MDKPVAPGIIKEELLEQQPPTQDGVGGGGDAPRPMEGLHEVGPPPFLTKTFDLVEDPATDAVLSWSRAGNSFIVWDPHVFADGLLPRLFKHSNFSSFVRQLNTYGFRKVDPDRWEFANEGFLRGQRHLLKMIKRRKPPSAVAPLRQQRAPASCLEVGEFGFEEEIDRLKRDKNILITEVVKLRQEQQSTKDHVRAMEERLRVAEQKQVQMMGFLARAMRNPEFFQQLAQQQDKRKELEDTISKKRRRPIDNTPFYSDGESEQLDSQLKMFESGVLNGLNEPELENLAVNIQELGKGSIDDGNLTQVSDQSELNDDFWAELLVEDFGDKAGQPELEGRTEDVNDLAQQLGYLSSSSPK

SEQ ID NO: 4896 - protein, 336 aa, Glycine max
MATRRLSLLLSRSLSSTSFQAASLLHSLGRNSGKWGNFNRFSTAAAVEDLITPQVPITYTKHLINGQFVDAASGKTFPTYDPRTGEVIAQVAEGDAEDINRAVSAARKAFDEGPWPKLTAYERCKIILRFADLVEKHGDELAALETWNNGKPYEQSATAELPTFVRLFRYYAGWADKIHGLTVPADGNYHVETLHEPIGVAGQIIPWNFPLLMFAWKVGPALACGNTVILKTAEQTPLTALYVAKLFHEAGLPPGVLNVVSGYGPTAGAALASHMDVDKLAFTGSTETGKVVLGLAAQSNLKPVTLELGGKSPFIVGEDADGGEICGRGRLELLFG

SEQ ID NO: 4897 - protein, 501 aa, ASPERGILLUS NIDULANS FGSC A4
MATAVSLTAPNGHKYEQPIGLFINNEFVASKSGEKFATVNPSDEEEITQVYAAGEEDIDIAVKAARKALKDPSWKLLTATDRGNLMLKLADLIDQNKETLAVIETWDNGKPYQVSLNDDLSEVVNTIRYCAGWADKIHGQTISTTPAKFAYTLRQPIGVVGQIIPWNFPLAMAAWKLGPALACGNTVVLKPAEQTPLSILYLAKFIKEAGFPPGVVNIVNGLGRVAGSALVTHPGVDKVAFTGSTMTGKEIMKMAAGTMKNVTLETGGKSPLLVFDDADLEQAAKWAHIGIMYNQGQVCTATSRILVHEKVHDEFIRLFREAVATTSKVGDPFSDDTFQGPQVTKAQYERVLSYIESGKQEGATLVDGGVPYKNVKDGKGFFIAPTIFTNVKDNMRIYREEVFGPFVAIARFSTEEEAIDRANDTTYGLGAAVFTKDIERAHRVASEIEAGMVWINSSNDSDFRVPFGGVKQSGIGRELGEAGLEAYTQIKAVHVNMGTKL

SEQ ID NO: 4898 - protein, 401 aa, Ralstonia solanacearum
MLSEQSKPLIDASVPVLREHGLTITQTFYRNMFASHPELTNLFNMGNQANGSQQQSLASAVFAYAANHGNNAALAPVVGRIVHKHAAVGIRPSHYPIVGRHLLGAIAEVLGDAATPELLAAWDEAYWLLAAELIAAEARLYAHTQSGPDHRQPVRIIERHAQAEDVVSFTLEAVGGAKLADFLPGQYISVQVELAPGVLQQRQYSLSDAPNGRTWRISVKRDAGGSGRPAGTVSNWLHDNARPGEVLLVSQPYGDFVPQLATDSPIVLMSAGVGITPMIATLNALARRNTARKVVFSHAGQAASHVAHADDLERAAQVLPDFAAHVFLESGEAADFAARPARPGRMTVETFLDDGVADADFYLCGPLPFMQAQRAALLAGGVPAGRIHREVFGPDLLDDIL

SEQ ID NO: 4899 - protein, 214 aa, Shigella boydii
YICLRPVRYYQGTPSPVKHPELTDMVIFRENSEDIYAGIEWKADSADAEKVIKFLREEMGVKKIRFPEHCGIGIKPCSEEGTKRLVRAAIEYAIANDRDSVTLVHKGNIMKFTEGAFKDWGYQLAREEFGGELIDGGPWLKVKNPNTGKEIVIKDVIADAFLQQILLRPAEYDVIACMNLNGDYISDALAAQVGGIGIAPGANIGDECALFEAT

SEQ ID NO: 4900 - protein, 374 aa, Dechloromonas aromatica RCB
MGPSENGTMQAARVHGAGGQFEMDSIERPRIKRPTDVIINVKASGVVPNLRNVMSNYGERAYLTVPELPAIYGLDTAGVIAEIGSGVTGLTVGDRVYLNPGRSCGTCHACRCGEPINCSAYTFQGYFGFGPASRQIYREYPYGGFCEFATGPANGLIKLPDTISFEQAARFGYLGTAYSGLRKADVRAGRTVLISGASGTLGLGAVQIARAMGATRILCVARNADLLERVRLLDPQRIRTFSYGTGDLATWARDETDGIGVDAVLDAIGPGASHQVTLDCIAALRRGGKLVEVGAMSDPMPVNLHQMMCAQVSLIGSLWFSVAEGQELAAMADAGTLDLSIFEHHRFPLERVNQALELAEKRIGGFMNVVITQE

SEQ ID NO: 4901 - protein, 389 aa, Bacillus sp. KSM-K16
MLQARKQREAAIALHKHGKMEMKSTVPLINEYDMSLAYTPGVAEPCKRIAENKDEVYDHTIKGNLVAIVTDGSAVLGLGNIGPEAAMPVMEGKAVLFKQFAGVDAIPLCLETQDVDAIVATIKAVAPTFGGINLEDIAAPRCFEIEQRLQEELNIPVFHDDQHGTAIVVLAALINALKVVDKGLNSARIVINGAGAAGLSIATLLLEAGCSDITLVSLEGIVQENEPWLNQRQKELAAQTNRRHLTGKLDQAIEGADVFIGVSGPRALTGEQVKRMNSDAVVFALANPTPEIYPEEASAAGAAVVGTGRSDFPNQINNVLAFPGIFRGALDARASTITTTMKLAAAKAIANIVGQDLHAGHILPSPFDERIAPAVAKAVADEAKEKVCS

SEQ ID NO: 4902 - protein, 475 aa, Saccharomyces kluyveri
MTSILSSTYRSPVARNLLKSSKTRGGLFLAARNYSNGEKTLKERFAEIFPSKAEEIKKLKKEHGKTVIGEVLLEQAYGGMRGIKGLVWEGSVLDPEEGIRFRGRTIPEIQKELPKAADGSEPLPEAIFWLLLTGEIPTETQVKALSADLASRSELPEHVVDLLDRLPKDLHPMAQFSIAVTALESESKLPKAYAQGVAKKDYWNYTFEDSLDLLGKLPVIASKIYRNVFKDGKLASVDPNADYGKNLANLLGFQNKDFVDLMRLYLTIHSDHEGGNVSAHTTHLVGSALSSPYLSLAAGLNGLAGPFDGRANQEVLEWLFKLREEVKGDYSKETIEKYLWDTLNSGRVVPGYGHAVLRKTDPRYTAQREFALKHFPDYELFKLVSTIYEVAPGVLTKQGKTKNPWPNVDSHSGVLLQYYGLTEASFYTVLFGVARAFGVLPQLIIDRAVGQPIERPKSFSTEKYIELVNSIKAKN

SEQ ID NO: 4903 - protein, 225 aa, Listeria monocytogenes str. 4b F2365
MNEINHTSERANTEKRTEKQIIMQKILNWFVFSLLLASIGAAIGSKLSPELYLPLVVLEVALLITAMVVRRSKTINKVVGYPVVLAFAFVTGLTLGPTLTYYFGAGQGAAVLMAFVTATVTFTTLAFIGAKMKKDLSFLSSALFAAIIILVIFSFVGVFLPLGSMLSTIISAGGTIIFSLYILYDFNQIMKRDVELADVPMLALNLYLDFLNLFMFLLRLFTGRD

SEQ ID NO: 4904 - protein, 147 aa, Bdellovibrio bacteriovorus HD100
MPMRSLSPWGGRRLPSSDLFSQFQDFINEFDRGESSALTRAGFDFSPSVDVEEKDNAYLVSADLPGMKKDEIKVELNDNILTISGERTRESKSEGGYSERSYGRFQRSFTLPVQVNSEKIEAHFEDGVLQITVPKAEGARSHSIKIM

SEQ ID NO: 4905 - protein, 330 aa, Glycine max
MGSTGETQITPTHVSDEEANLFAMQLASASVLPMILKSALELDLLEIIAKAGPGVHLSPTDISSQLPTQNPDAPVMLDRILRLLACYNILSSRFCITMTRLCSCRYYLKDAVLEGGIPFNKAYGMTAFEYHGTDPRFNKVFNKGMADHSTITMKKILETYTGFEGLKSLVDVGGGTGAVVNMIVSKYPTIKGINFDLPHVIEDAPSYPGVEHVGGDMFVSVPKADAIFMKWICHDWSDEHCLKFLKNCYEALPDNGKVIVAECILPVAPDSSLATKGVVHIDVIMLAHNPGGKERTEKEFEALAKGSGFQGFRVLCCAFNTYVMEFLKKI

SEQ ID NO: 4906 - protein, 227 aa, Brassica napus
  unsure (1)..(227): unsure at all Xaa locations
MWIGIAVSHCLRELEMLYESDPAKPIVLPSNLYACKSLVVLKLDGDILLDVPQMVSLPSLKTLKLQSVRYSSDKTLPLLLSKCPLLEDLVLDLCEDDTPRHLIVAVPSLQSLSLSILYNNHIIDGFVLTTPALKYFKLMDYNEHYCLIENMPNLIEAYLDVDCPDIKDLIESITSVKRLSICSKAMLDEGFVFNQLEXLEVCLCMEHSSNQLFRLLKASSNLKRLDI

SEQ ID NO: 4907 - protein, 244 aa, Triticum aestivum
MPSRPAPLVHRLRLLRSAVVSPSSALLPCSRPRLAIPFAQPPLRAPAFAAASSPLLRPVGARFSLFSSMAAAASSASSIHDFTVKDASGKDVDLSTYKGKDDLIVKLTKIIVAYNYCSGLTNSNYTELAQLYEKYKDQGFEILAFPCNQFGGQEPPRVREIVQFACTRFKAEYPIFDKVDVNGDNVAPVYKFLKSRKGSLFGDNIKWNFSKFLVDKEGHVVDRYAPTTSPLSIEKDIKKLLASS

SEQ ID NO: 4908 - protein, 167 aa, Limonium latifolium
GYDGFEGVKTLVDVGGSSGDCLRMIINKYKDIPKAINFDLPEVVAKAPKIPGITHVGGNTFESVPSGDAIFVKWVLTCFTDEEVITLMRNCNKALPVGGKLICSEPTLPENSDESHRTRALLVADIFIMTTYRAKGKHRTEEEYRQLGLLAGFPKFRVIHVDYFFPV

SEQ ID NO: 4909 - protein, 233 aa, Zea mays
  unsure (1)..(233): unsure at all Xaa locations
MSSLYDVSCFAAGLAGNVFALALFLSPVPTFKRVLKAKSTEQFDGLPYLLSLLNCCICLWYGLPWVSDGGRALVATVNCTGALFQLAYISLFIFYADSRTTRLKVAGLLVLVVFAFALIAHASIAFFDQPLRQLFVGSVSMASLVSMFASPLAVMGXVVVRTECVEFMPFYLSLSTFLMSASFAVYGLLLRDFFIYFPNGARSHPGSQCSWLYAYYQPEMGKQRLVSTVACLI

SEQ ID NO: 4910 - protein, 409 aa, Vibrio parahaemolyticus RIMD 2210633
MELATTVTELRYALDTFFFLISGALVMWMAAGFAMLEAGLVRSKNTTEILTKNFCLYAIACTTYLVIGYNIMYVDNGEGGWLPSFGGLIGTQGEGADHSLESDFFFQVVFVATAMSVVSGAVAERMKLWSFLLFSAVLTAFIYPMEGYWTWGGGFLSEAGFSDFAGSGIVHMAGASAALAGVLLLGARKGKYGKNGEIYPIPGSNMPLATLGTFILWFGWFGFNGGSQLMVSDFENATAVGQIFLNTNAAAAAGSIAALFVCKTTWGKADLTMILNGALAGLVAITADPLSPSPLYAVAIGAVSGALVVFSIIGLDKLKIDDPVGAISVHGVCGFFGLMVVPLSNGEATFGAQLLGAAVIFAWVFGASLVVWAILKATVGIRVTEEEEMEGMDMHDCGVGAYPEFVTVK

SEQ ID NO: 4911 - protein, 430 aa, Triticum aestivum
  unsure (1)..(430): unsure at all Xaa locations
DSXAISESDGEDDFHSVQDDAFSPNGFENEAALGMRDANGGSFNGAEHPHRKPRSSELPKGHLENGARPSASHEDGASVSGGASPSSGGILDNCGLLPNNCLPCMASAVGVNEKKRALSTSPTHSMKMPSLKLSFKKKSGEANPSSTLLSTKDFLERPIAGSQVPACLLEKKVLNSWSHIDPGTFRVRGSNYLRDKNKELAQNCAAYYPFGVDVYLSPQKLHHISRFVKLPDIQTSSKLPPLLVVNVQVPLYPASLFQNETDGEGMSFVLYFRLSEGYSKELSPLFIENIRRLVDDDVEKIKGFPMETSISFRERLKILGRVANLEDLPLSAAERKLMHAYNEKPVLSRPQHQFFLGDNYFEVDIDMHRFGYISRKGFETFLDRLKICMLDVGLTIQGNKPEELPEQVLCCVRLNGIDYAKYQPLMTNGA

SEQ ID NO: 4912 - protein, 116 aa, Zea mays
SWRRTNSPGRSSSGSRIGGRPWSSAERAPQRWPKGSSVRTLRRRRPSLRPRAGSARRRSWFLRASPCRLVVLPLVLPPLPPPPPLLLLVPVCLLLLLAALATFVPSDVRSMPSSNL

SEQ ID NO: 4913 - protein, 61 aa, Zea mays
  unsure (1)..(61): unsure at all Xaa locations
GKLATMFKIIKEMLPPDVRVARDAQDLLVECCVEFINLLSSESNEVCSRXXKKTIAPEHVI

SEQ ID NO: 4914 - protein, 87 aa, Triticum aestivum
  unsure (1)..(87): unsure at all Xaa locations
PPPLKPQPGPPPGSGPQTTGLPTRTQHGFATLPLXNGSPKDDLKLPTNXXIRTQLKDGFPEGKDLALPVMSAMGEEQICAVKDVGPR

SEQ ID NO: 4915 - protein, 193 aa, Streptococcus gordonii
INDYSYEEVERIVRKAFDIARGRRKRVTSIDKQNVLATSKLWRRVADEVAKDYPDVTLEHQLVDSAAMLMITNPAKFDVVVTENLFGDILSDESSVLSGTLGVMPSASHSADGPSLYEPIHGSAPDIAGQCIANPISMILSVAMMLRDSFAELEAAEAIEAAVEKTLAQGILTRDLGGQVGTAQMTESIINNL

SEQ ID NO: 4916 - protein, 573 aa, Glycine max
MGRSSGFIAMQASLSSGQVPFNLHGPQGVLSHLKYLLETKGSAVVCAAEGAGHNLLQKTNATDASGNVVFGDIGVYIQQETKKYFKEIGVHADVKYIDPTYMIRAIRANASDGILYTGLGQNHLTDIFPNAPPIPSTFCLKMRTPIDRDFPGHYSLDEEWHGYINNNDRVLLKTIYYSSPTSAGAECIDPDCTWVEQWVHRAGPREKIYYKPEEVKAAIVTCGGLCPGLNDVIRQQIVITLEIYGVKNIVGIPFGYRGFSDKELTEVPLSRKVVQNIHLSGGSLLGVSRGGPGVSDIVDSLEKRGINMLFVLGGNGTHAGANAIHHECRKRRLKVSVIGVPKTIDNDILLMDKTFGFDTAVEEAQRAINSAYIEAHSAYHGIGVVKLMGRSSGFIAMQASLFSGQVDICLIPEVPFNLHGPHGVLSHLKYLLETKGSAVVCVAEGAGQNLLQKTNATDASGNVVFGDIGVYIQQETKKYFKEIGVHADVKYIDPTYMIRAIRANASDGILCTVLGQNAVHGAFAGYSGITVGLCNTHYVYFPIPEVISHPRLVDPNSRMWHRCLTSTGQPDFI

SEQ ID NO: 4917 - protein, 97 aa, Zea mays
MEDEEHEVYGQEIPVDGEDVDMAAGDDATKLQELDDMKRRLKEMEEEAAALREMQAKVAKEMQGVDPNATTSENKEEMDSRSVFIGNVSFISSLYVN

SEQ ID NO: 4918 - protein, 216 aa, Shigella boydii
YICLRPVRYYQGTPSPVKHPELTDMVIFRENSEDIYAGIEWKADSADAEKVIKFLREEMGVKKIRFPEHCGIGIKPCSEEGTKRLVRAAIEYAIANDRDSVTLVHKGNIMKFTEGAFKDWGYQLAREEFGGELIDGGPWLKVKNPNTGKEIVIKDVIADAFLQQILLRPAEYDVIACMNLNGDYISDALAAQVGGIGIAPGANIGDECALFEATHG

SEQ ID NO: 4919 - protein, 490 aa, Comamonas testosteroni
MKQYRNYINGEWVESARRFDDVNPVDGTVVAQVHEADREAVDSAIRAGHAAVRGAWGRTTVAERAAILCRIADEIDRRYDDFLAAEIADTGKPVAMASTIDIPRGAANFRVFADILKTAPLDTFQTDLPDGARALNYAVRKPLGVVGVISPWNLPLLLLTWKIAPALACGNAVVAKPSEETPGTATLLAEVMHTVGVPPGVFNLVHGFGPDSAGEFITTNDDIDAITFTGESRTGSAIMRAAATHVKPVSFELGGKNAAIIFADCDFEKMIDGMMRAVFLHSGQVCLCAERVYVERPIYNRFLDAFVERVKALKLGWPQDGTTGMGPLISAEHRDKVLSYFKLAREEGAQVLVGGGVPKFGDARDAGFWVEPTIITGLPQTARCIKEEVFGPICHVSPFDTEAEAIALANDTKYGLSATTWTGNLNRGHRVSEAMRVGLSWVNSWFLRDLRTPFGGVGLSGIGREGGMHSLNFYSELTNVCVRIDQEAVS

SEQ ID NO: 4920 - protein, 221 aa, Shigella boydii
QELDLYICLRPVRYYQGTPSPVKHPELTDMVIFRENSEDIYAGIEWKADSADAEKVIKFLREEMGVKKIRFPEHCGIGIKPCSEEGTKRLVRAAIEYAIANDRDSVTLVHKGNIMKFTEGAFKDWGYQLAREEFGGELIDGGPWLKVKNPNTGKEIVIKDVIADAFLQQILLRPAEYDVIACMNLNGDYISDALAAQVGGIGIAPGANIGDECALFEATHG

SEQ ID NO: 4921 - protein, 298 aa, Arabidopsis thaliana
MGKEVMVSDYGDDDGEDAGGGDEYRIPEWEIGLPNGDDLTPLSQYLVPSILALAFSMIPERSRTIHDVNRASQITLSSLRSSTNASSVMEEVVDRVESSVPGSDPKKQKKSDGGEAAAVEDSTAEEGDSGPEDASGKTSKRPRLVWTPQLHKRFVDVVAHLGIKNAVPKTIMQLMNVEGLTRENVASHLQKYRLYLKRIQGLTTEEDPYSSSDQLFSSTPVPPQSFQDGGGSNGKLGVPVPVPSMVPIPGYGNQMGMQGYYQQYSNHGNESNQYMMQQNKFGTMVTYPSVGGGDVNDK

SEQ ID NO: 4922 - protein, 490 aa, Bordetella parapertussis 12822
MTISPLQLLNDPSLLRTDALVDGRWIAASQRFAVHDPATGRKLADVANLDAAHAREAIAAAQAAWPAWRARTVKERSAILRKWFDLLLANQDDLARLLTAEQGKPFGEARGEIAYAASFVEWFAEEAKRINGETLPAFDNNRRLLVLREPIGVCAAITPWNFPLAMITRKVAPALAAGCPVIVKPAEHTPLTALAAAQLAVRAGVPAGVLGVLPADGANSIAIGKELCANDAVRHLSFTGSTEVGRILMAQSAATVKKLSLELGGNAPFIVFDDADLDSAVEGAMQSKYRNAGQTCVCANRIYVQDGVYDAFVEKLADAVRALKVGPGFDEGVTQGPLIEPEAVDKIERHIEDAVSKGGRVVAGGRRLGGLFFEPTVLVDATSQMLCAREETFGPLAPVFRFHADEDAIAAANATEFGLASYLYSRDVGRIFRAAEALESGMVGVNVGILATEHVPFGGVKQSGLGREGGRHGIDDYVEIKYMCVGDILK

SEQ ID NO: 4923 - protein, 208 aa, Shigella boydii
DLYICLRPVRYYQGTPSPVKHPELTDMVIFRENSEDIYAGIEWKADSADAEKVIKFLREEMGVKKIRFPEHCGIGIKPCSEEGTKRLVRAAIEYAIANDRDSVTLVHKGNIMKFTEGAFKDWGYQLAREEFGGELIDGGPWLKVKNPNTGKEIVIKDVIADAFLQQILLRPAEYDVIACMNLNGDYISDALAAQVGGIGIAPGANIGD

SEQ ID NO: 4924 - protein, 310 aa, Alicyclobacillus acidocaldarius
MPLDPVIQQVLDQLNRMPAPDYKHLSAQQFRSQQSLFPPVKKEPVAEVREFDMDLPGRTLKVRMYRPEGVEPPYPALVYYHGGGWVVGDLETHDPVCRVLAKDGRAVVFSVDYRLAPEHKFPAAVEDAYDALQWIAERAADFHLDPARIAVGGDSAGGNLAAVTSILAKERGGPALAFQLLIYPSTGYDPAHPPASIEENAEGYLLTGGMSLWFLDQYLNSLEELTHPWFSPVLYPDLSGLPPAYIATAQYDPLRDVGKLYAEALNKAGVKVEIENFEDLIHGFAQFYSLSPGATKALVRIAEKLRDALA

SEQ ID NO: 4925 - protein, 402 aa, Oryza sativa (japonica cultivar-group)
MNLNRVHVDSVSGTAWVKSGATLGELYYAIGQLNRSLAFSAGSCSTVGMGGFVSGGGFGLISRKFALAADNVLDAILMDPNGNALNRGSMGDDVFWAIRGGGGGSWGVVYAWKLQLVHVPHSITVFSLNRTGPLEQTAKLMHKWQFVGPHLPDEFYLSIHILTGTSNGNVSMSFTGQVIGPKQYAMLVLHHTFPELGIVESDLSEMSWIESTAKFARLNSTADLTNRRLGIKYYSKSKSDYVHSPISMQDTIKIIEYLSNGPQGFIQLNPYGGAMARIGSSELPFPYRAGYLYSIEYNVSWKASDNDRADEFIRWLRSFYAYMAPHVSKNPLAAYVNYLDLDLGTNTWRNATDGTSNNSVIHAKSWGIRYFSKNFDRLVRAKTMIDPENVFNNAQSIPPLQY

SEQ ID NO: 4926 - protein, 236 aa, Anabaena variabilis ATCC 29413
MTVTADPVTLMKQEVGKAAAALVKSGSIVGLGTGSTTAYTIQYLGDRLKSGELTDIVGIPTSFQSEVLSKQYGVPLTTLDAVDHIDIAIDGADEVDPQKNLIKGGGAAHTREKVVDYLANQFIVVVDSGKLVDRLGSVFAVPVEVIPMAITPVTNAIKQLGGKPELRMGVKKAGPVITDQGNFVLDVRFDSIDDPVNLEKILNNIPGVLENGIFVNCADIVLVGEVKDGQPLVRQL

SEQ ID NO: 4927 - protein, 165 aa, Solanum tuberosum
KEVVEAMACMNKRPLIMALSNPTSQAECTAEEAYTWSEGRVVFASGSPFPSFEYDGKLNIPGQANNCYIFPGFGFGLVMSGTIRVHDDMLLAASEALAAQVTEEHYAKGMIYPPFADIRKISAHIAASVAAKAYELGVATRLPRPADLVKYAESCMYTPNYRSYR

SEQ ID NO: 4928 - protein, 234 aa, Limonium latifolium
ETLLKAWPFLHTAILDASTEPFARVNGEPAYQYYGKNDELNKNMQYAMSGVSVPYMKALLGSGYDGFEGVKTLVDVGGSSGDCLRMIINKYKDIPKAINFDLPEVVAKAPKIPGITHVGGNMFESVPSGDAIFVKWVLTCFTDEEVITLMRNCNKALPVGGKLICSEPTLPENSDESHRTRALLVADIFIMTTYRAKGKHRTEEEYRQLGLLAGFPKFRVIHVDYFFPVVEFQK

SEQ ID NO: 4929 - protein, 402 aa, Archaeoglobus fulgidus DSM 4304
MRALVVELRLWKAALSLLLGKVTKSVYYSPLSLLKYYKNYPEPALPDEDWVKVKTRLCGICGSDLRIITLQESFYLAPLTSFPFIPGHEVVGEVVEVGKEADAQEGERVVINTALSCRVRGFDDCDACRKGHFAACHNVDRGRISPGIFTGTCRDTGGGWAEYFVAHESQLVRVPEGIRDENAVFAEPLTIGIHSALRSFPDDGEVVAIVGCGVIGICTIIALRHLGFRGEIIGIDISERQAELARKFGADGVVTENPVERIAEMTGGRVYRPPRDKPMFIGGGVDVAFECTGIPQTVDTALRITKPLGRVVIAGTVAKMGVDWAPVFAKELSVLGTFGCGIEEVNGEKRDAFDIAFEILKKVDLSSLLTHRFTIEDYKKALRAAIEKGKSGAVKVAFDFTL

SEQ ID NO: 4930 - protein, 353 aa, Neurospora crassa
MADNQIPSSVADAVLVKSIEMPEGSQKVEELDFNKFKGRPITVDDLLQGMKHMGFQASSMCEAVRIINEMRAYRDPTTSEKTTIFLGYTSNLISSGLRGTLRYLVQHKHVSAIVTTAGGIEEDFIKCLGDTYMSSFSAVGADLRSKGLNRIGNLVVPNSNYCAFEDWVVPILDKMLEEQEASRGTENEINWTPSKVIHRLGKEINDERSVYYWAWKNDIPVFCPALTDGSLGDMLYFHTFKASPKQLRIDIVEDIRKINTIAVRAKRAGMIILGGGIVKHHIANACLMRNGAESAVYINTAQEFDGSDAGARPDEAVSWGKIKVGADAVKVYMEATAAFPFIVANTFAKEDGL

SEQ ID NO: 4931 - protein, 206 aa, Limonium latifolium
RAYQYYGKNDELNKNMQYAMSGVSVPYMKALLGSGYDGFEGVKTLVDVGGSSGDCLRMIINKYKDIPKAINFDLPEVVAKAPKIPGITHVGGNMFESVPSGDAIFVKWVLTCFTDEEVITLMRNCNKALPVGGKLICSEPTLPENSDESHRTRALLVADIFIMTTYRAKGKHRTEEEYRQLGLLAGFPKFRVIHVDYFFPVVEFQK

SEQ ID NO: 4932 - protein, 164 aa, Glycine max
  unsure (1)..(164): unsure at all Xaa locations
ASSMISSPAVTTVNRAGAGMVAPFTGLKSMAGFPTRKTNDGITSIASNGGTVHCVQVWPPFGKKKFXTLSYLPDLNDAQLANDVXYLLRKGWIPCLESDLDHGFMYREHNRSPSYYDGRYWTMWNLPMFGCADASHVSNELQDVYTAYPLGSIPFTLVDDARQI

SEQ ID NO: 4933 - protein, 188 aa, Limonium latifolium
HGTTRSRHGSSSSSSPTANGFEGVKTLVDVGGSSGDCLRMIINKYKDIPKAINFDLPEVVAKAPKIPGITHVGGNMFESVPSGDAIFVKWVLTCFTDEEVITLMRNCNKALPVGGKLICSEPTLPENSDESHRTRALLVADIFIMTTYRAKGKHRTEEEYRQLGLLAGFPKFRVIHVDYFFPVVEFQK

SEQ ID NO: 4934 - protein, 397 aa, Xylella fastidiosa Temecula1
MSASFSPHTITLIKSTVPLLAEHGTTIIEAMYHRLFEDPQIEALFNQANQKNGTQIHALAGAILAYARNIDNPGVLASAIERISQKHVGYAIHPEHYPHVATALLGAIKQVLGDVATSEVLEAWGEAYWFIANLLKDREAVIREGIMTKNGGWIHWRRFVISKRIPESETITSFMLHPEDGGPVVPHQAGQYLTFRFDAAGMPGMKRNYSISCGPNSDHYRITVKREHGTGASAFLHDQAKVGTIIECTPPVGDFFLPSVIERPIVLLSGGVGLTPMVSMMEQIAEAYPDAQVWYVHGTQNRETHAMDAHIRALVSRHKHMKATTFYTQRSEADDAEAGFITIDWLRANTPFQKADFYLCGPRPFLRTFVRDLIGAGVPAAQVHYEFFGPMDEEMAA

SEQ ID NO: 4935 - protein, 375 aa, Limonium latifolium
MANHSSAAAMVVDETSEARNNARLKIIELANLISVPMSLTAIVRLKVPEAIWSNGSNTPVSAAEILSRLPDAPATADAENLQRLLRVLTSFGVFSEHLDTTSSSSSSTSERRYCLTEVGQTLVSFDESCPSHGAYVLQHHQETLLKAWPFLHTAILDASTEPFARVNGEPAYQYYGKNDELNKNMQYAMSGVSVPYMKALLGSGYDGFEGVKTLVDVGGSSGDCLRMIINKYKDIPKAINFDLPEVVAKAPKIPGITHVGGNMFESVPSGDAIFVKWVLTCFTDEEVITLMRNCNKALPVGGKLICSEPTLPENSDESHRTRALLVADIFIMTTYRAKGKHRTEEEYRQLGLLAGFPKFRVIHVDYFFPVVEFQK

SEQ ID NO: 4936 - protein, 188 aa, Brassica rapa
LDNPAPFVSPFQFEISYECLTSLQDDLEWKLVYVGSAEDETYDQTLESVLVGPVNVGNYRFVLQADPPDPSKIREEDIIGVTVLLLTCSYMGQEFLRVGYYVNNDYEDEQLREEPPTKVLLDKVQRNILSDKPRVTKFPINFHPEDEQTPAAADPPPPTEQSDDQQQADDNCDEAQVLPEQPPIPHES

SEQ ID NO: 4937 - protein, 506 aa, GIBBERELLA ZEAE PH-1
MINSFSLFAHITPIIRSSLHSRYSVISSRKAMSSLAAAPYRHVMMPFSPAQDAQVHGNSALTKLTDAIPDLKIYTRSSPHYESLRGVYNKLITAQPLAICRPTSVAQVQAIVKTVSGLGIPLGVRGGGHDVFGRGCIADSVTIDMRELDTQELSQDKKTVKVGGGITSKNLVGFLGSHNLCTSNGFAGEAGWTSWASWGGYGPLGDYVGLGVDNIVGAKIVTASGDVVDAKGDSELLWALRGGGGNFGVIAETDVRVYPMSTIQAGFIVYPWPETADVLLRLQALLDSGVPDKLCLQAGFTKGEWGLGMAITYIWPEAETIGPESEEWLQKLKGLGTCIVDTVAETTFEAFQASISSAISNPVNVTSRHISISKFTSDTLNQLIGACESMPAEADCSITCTILHGKAAQANVLSAFGTRRPHIMLHINAVTEEAAHEHVAIAWADRLVDGVEATGDSIGSTYVSFMESDKDPKGCYGENWERLKAVKKEVDPNDVFRFVHGRIPAA

SEQ ID NO: 4938 - protein, 78 aa, Glycine max
MAFWTLIKGLLLFANAFAILNEDRFLAPRGWTLEKLHQTGRRNSPKGQIIGLIYACQYMRLPLLLINLVVIAMKIIAG

SEQ ID NO: 4939 - protein, 480 aa, Streptococcus pneumoniae R6
MPIQNKTMLITYSDSLGNNLKDLYDNLEEHFGDAIGGVHLLPFFPSTGDRGFAPVDYDEVDSAFGDWEDVKRLGERYYLMFDFMINHISRQSKYYKDYQEKHEASEFKALFLNWDKFWPENRPTQSDVDLIYKRKDRAPKQEIVFEDGSVEHLWNTFGEEQIDLDVTKEVTMEFIRKTIQHLASNGCDLIRLDAFAYAVKKLDTNDFFVEPDIWDLLDKVRDIAAEYGTELLPEIHEHYSIQFKIADHDYYVYDFALPMVTLYTLYSSRTERLAKWLKMSPMKQFTTLDTHDGIGVVDVKDILTDEEIDYASNELYKVGANVKRKYSSAEYNNLDIYQINSTYYSALGDDDVKYFLARLIQAFAPGIPQVYYVGLLAGKNDLKLLEETKEGRNINRHYYSNEEIAKEVQRPVVKALLNLFSFRNRSEAFDLEGTTEIETPTAHSIVIKRQNKDKSVTAVVEIDLQNQTYRVIENGVEVTF

SEQ ID NO: 4940 - protein, 378 aa, Medicago sativa
MAIHHHHQQHTCSLFDALYCDEEKWEDDEGEVVDEGEQSDVTTTNYDILDSTSLLPLLLLEQNLFNEDEELNTLFSKEKIQQETYYEDLKNVINFDSLSQPRREAVEWMLKVNAHYGFSALTATLAVNYLDRFLLSFHFQKEKPWMIQLVAVTCISLAAKVEETQVPLLLDLQVQDTKYVFEAKTIQRMELLILSTLKWKMHPVTTHSFLDHIIRRLGLKTNLHWEFLRRCENLLLSVLLDSRFVGCVPSVLATATMLHVIDQIEQSDDHGVDYKNQLLNVLKTSKEKVDECYNAILHLTNANNYGHKRKYEEIPGSPSGVIDAVFSSDGSNDSWTVGASSYSTSEPVFKKTKNQGQNMNLSPINRVIVGILATATSP

SEQ ID NO: 4941 - protein, 222 aa, Medicago sativa
MAIHHHHHNHQQLQQHTSSLFDALYCDEEEKWEDDEGEVVDEGEQSDVTTTNYDILDSTSLLPLLLLEQNLFNEDEELNTLFSKEITQQETYYEDLKNVINFDSLSQPRREAVEWMLKVNAHYGFSALTATLAVNYLDRFLLSFHFQKEKPWMIQLVAVTCISLAAKVEETQVPLLLDLQVQDTKYVFEAKTIQRMELLILSTLKWKMHPVTTHSFLDPGNS

SEQ ID NO: 4942 - protein, 348 aa, Pseudomonas putida
MLAIRKTKAGPGGLSVDDVAAPKEAHSTDVLVKVEAAGICGTDLLIYKWGEFAKRMKLPTILGHEVSGVIEQVGSDVKGLRPGMRVSLESHLPCGTCYTCRRGWAHVCPNTRYPGVDFDGGFASFVVVPESVCWPVPCGIPPLQAAMMEPFGLAVHASLEGSGVSGLNVLVSGCGPIGLMNIAAAKALGASKVIATDIHPLRLTAAAKMGADECINATEESVYKTVRSLLGERGVDVAIDYSGQAAALKELIQSITHGGELRLMGVPSHDILLNLEEWLFKGLIVRGLHGRRLFETWERSTSLLVTGRVDLSSLVSHRLPLSAAEDAFEMALNGESLKILFEPNGTCI

SEQ ID NO: 4943 - protein, 241 aa, Glycine max
  unsure (1)..(241): unsure at all Xaa locations
SFYPSQEIIDMCDYCVGLSRQLNGSIIPSERPDHMMFEVWNPLGIVGVITAFNFPCAVLGXGAPTTPLITIAVTKLVAEVLERNKLPGAIFTSFCGGADIGQAIAKDTRIPLVSFTGSSKVGLMVQQTVXERFGKCLLEXLSGNNAIIVMXDDADIKLAVRSILFAAVGTAGQRCTTCRRLFLHESIYADVLDQLIGVYKQVKIGNPLEKGTLVGPLHTPTSVENFQKGISVIKSQGINFG

SEQ ID NO: 4944 - protein, 229 aa, Streptococcus mutans UA159
MNNNTIYTQSDSRLSSFFAKIYGLVGMGIGLSAVVSYLMLYVFRNNMIAIMVNAPWVYYVAIFAELALVLIASNAARKNSPTALPLFLVYSALNGFTLSFIIALYTQTTVLQAFVSSAAVFFVMALIGVTIKKDLSGMGKALLAALIGIIIASLINMFIGSGTMSYVISIISVLIFSGLIAYDNQLIKRVYDYNSGNVSDGWAVSMALNLYLDFINLFLSLLRIFGRND

SEQ ID NO: 4945 - protein, 418 aa, Pseudomonas putida KT2440
MGYQKIKVPTDGTKITVNADHSLNVPDHPIIPYIEGDGIGVDVSPVMIKVVDAAVQKAYGGKRKIAWMEVYAGEKATQVYDQDTWLPQETLDAVRDYVVSIKGPLTTPVGGGIRSLNVALRQQLDLYVCLRPVLWFQGVPSPVKKPGDVDMVIFRENSEDIYAGIEWKAGSPEANKVIKFLKEEMGVTKIRFDQDCGIGVKPVSKEGTKRLVRKALQYVVDNDRESLTLVHKGNIMKFTEGAFKDWGYEVARDEFGAELLDGGPWMKFKNPKTGREVIVKDAIADAMLQQILLRPAEYDVIATLNLNGDYLSDALAAEVGGIGIAPGANLSDTVAMFEATHGTAPKYAGQDKVNPGSVILSAEMMLRHMGWTEAADLIIKGTNGAIAAKTVTYDFERLMEGAKLVSSSGFGDEMIKHM

SEQ ID NO: 4946 - protein, 279 aa, Mesembryanthemum crystallinum
MCESFKREYQLCEEIGRGRFGVVYRCYNPSSTEDSDTPLAVKSIDKRLFLDDETDRECLDKEPKILHLLSPHPNILQIHNLFDSDTHLLIVTDLCQEETLYERIISNGPFSEPDAAAIFCQLAEALAHCHRNYVAHRDIKPDNILFDSRNRLKLCDFGSAEWFGAGDREMRGVVGTPYYVAPEVLSGKDYNEKADVWSAGVILYIMLGGVPPFYGETVEETFEAVLRGNLRFPARIFRNVSTQARDLLRKMMCKDVSRRFSAEQVLRHPWVTSGGLANM

SEQ ID NO: 4947 - protein, 202 aa, Schizosaccharomyces pombe
MATNITFHPGSVTKEERIKFVGHPGMTIWMTGLSASGKSTIACALEQYLLQRGVTTYRLDGDNVRFGLNSDLGFSEQDRNENIRRIGHVAKLFADACVVAVTSFISPYRKDRDQAREFHKKDGLPFIEVYVECPVEVAEQRDPKGLYKRARAGEIKEFTGISAPYEAPISPEIVVSSHTQSIEECVEKIVNYLLEKDLITLK

SEQ ID NO: 4948 - protein, 253 aa, Zea mays
  unsure (1)..(253): unsure at all Xaa locations
MQLNKKSRLLQLPHFSSFTTTTTSSLISSSRPFSLSSIKMSNEEITHPTIVDGXFREISDMWPGHAMTLRVEKVLVHEKSKYQDVLIFKSTDFGNVLVLDNVIQCTERDEFSYQEMIAHLALNSHPNPKKVLVIGGGDGGVLREIVKHDCVEEATLCDIDEAVIRLSKEHLPSMACGFDHPKSKTHVGDGFKFLNDYXNEFDVIITDSSDPDGPXEALFQKSYFQLPHDALREGGVITTQAESPWXHLPLIAR

SEQ ID NO: 4949 - protein, 302 aa, Pinus taeda
MERFANDGDEHSLKETELRLGLPGVCESDTGLGQTRNGKRAFSEVMDSTKASSFNDNKWIFPSVKCQPPTSAITETAEACKGSQPGLFSATPGQKIMMQGGCGAPQSWAGDNGLSKSTAPKDELHPKTPRGGPTEKTNAASQSQAATDPAMAPAPKAQVVGWPPIRSFRKNTLAANSKPNDEGSSSNALYVKVSMDGAPYLRKVDLKMYSTYHELSSALEKMFSCFTMGQCGSPGLSESKLIDLLNGSEYVPTYEDKDGDWMLVGDVPWEMFVDSCKRLRITKASEAIGLAPRAMEKSRSKN

SEQ ID NO: 4950 - protein, 252 aa, Pinus taeda
MSCSVGNMAMVLEKSGGNAQHEKRDSLDFAETELKLGLPGVAAGARQRICGKRSFSEAMESRNYTIPDEDITNTSTHEDLDKFKGPIVKEKQMALSANDPPRMGPPPPSKAQVVGWPPVRDFRKVRTVAASNSLYVKVSMDGAPYLRKVDLKLYSTYHELTSALEKMFSCLIIMGKCGSLALNESNLMDLPNGSEYVPTYEDKDGDWMLIGDVPWQMFVDSCQRMRIMTASEAIGLAPRTMENCKNRNRVHP

SEQ ID NO: 4951 - protein, 498 aa, Leptospira interrogans serovar lai str. 56601
MQTALYISVLIISSCGLVYELLAGTIASYLLGETVTQFSLIIGTYLFSMGVGSWLSKYLEKDLIPKFLEIELAIGLVGGFSSAILYLSFGQIRYFQIPLFLLVILIGILVGLEIPVLLRILKKELQFKELVSRVLSLDYVGALLASILFPIFFAPKLGLMRTGFIFGILNVGVALWGTWVLPLRQSKIIILRAQSVVVLTLLILGFSYSDLITYYSEESLYTDEIILSKQTQYQRIIVTRWKNEIRLFLNGHLQFSSRDEYRYHETLVHPALLAHPAPKKVLVLGGGDGLAVREILKHKNVESVTLVDLDSAITNLFSEHGILKELNEESLKNSKVTVINTDAFLWLEESDQTFDVVLIDFPDPSNFSLGKLYTTAFFHTLKRRMNETSVLEIQSTSPLFARSSYWCIERTIASLGFYTLPLHVYVPSFGEWGFVLAGQRPIQFKKKFPKDLKFLNIQELESIQTFPQDMSRVPVEINRLDNQALVRYYDREWNRILD

SEQ ID NO: 4952 - protein, 231 aa, Pinus taeda
MSCSVGGMEKSSTGAQQENKCSLDIFAETELRLGLPGVAAGERQRICGKRSFSEAMESRNFSIPQEEAHKFHEPNLGTEKQMVRPANDPPKMGPTPPKAQIVGWPPVKDFRKVRTIAASSSLYVKVSMDGAPYLRKVDLKMYSTYHDLSSALENMFGCLITMGKCGSSGIKESNLMDVVNGSEYVATYEDKDGDWMLVGDVPWQMFVDSCQRVRIMKASEAIGLAPRAMEK

SEQ ID NO: 4953 - protein, 175 aa, Triticum aestivum
MAPTVMASSATSVAPFQGLKSTAGLPVSRRSSSAGLGSVSNGGRIRCMQVWPIEGIKKFETLSYLPPLSTEALLKQVDYLIRSKWVPCLEFSKVGFVFREHNSSPGYYDGRYWTMWKLPMFGCTDATQVLNEVEEVKKEYPDAYVRVIGFDNLRQVQCVSFIAFRPPGCEESGKA

SEQ ID NO: 4954 - protein, 1082 aa, Solanum demissum
MADFQRSSLADRDIDQAIAALKKGANLLKYGRRGKPKFCPFRLSNYAVAEDRKNALKSLFSQNLDIKDESAVVWYHDKEEKQLELCHVSRIIPGQRTVSLSIPTTFFPYKGKAIFQQYPRPEKEYQSFSLICNDRSLDLICKDKDEAEVWITGLKAIITRGRSRKGKYDARSETVFSDSPHGQRVTTSTSSIDQGDNQRTESLPQSRLGKAYADIIQYTAAGKSPTLVETGSFNLSSLSAGAVDNSNARSSTADTFRVSLSSALSSSSQGSCLEDFDNLGDVFIWGEGTGNGLLGGGKHRIGKSSGTRIDANTPKSLESSVVLDVQNISCGNRHAMLVTKQGEAFSWGEEAGGRLGHGAETDVSHPKLIKNFKGMNVELIACGEYHSCAVTSSGDLYTWGDGAKSSGLLGHRSEASHWIPKKVCGLMEGLRVSHVSCGPWHTALITSAGRLFTFGDGTFGALGHGDRSGCITPREVETFNGLKTLKVACGVWHTAAVVELMSGLDSRPSDAPSGTLFTWGDGDKGKLGHGDNKPRLAPQCITALVDKSFSEVACSYAMTVALTTTGRVYTMGSNVYGQLGCPLANGMSPICVEDYLVDSTVEEISCGSHHVAVLTSRTEVYTWGKGENGQLGHGDCENKCTPTLVDILRDKQVKRIVCGSNFSAAICVHNWALSADNSICFGCRIPFNFRRKRHNCYNCGFVFCKACSSKKSLKASLAPSTSKPYRVCDDCYDKLQKAIESEPFSRVPKVKAGNALYKASEQTDKESGFPLLVGHTSRLSSSDSFNRAQGRISRVDQYENRASSFQNENPPRESFSLSKSPISAFRVSKSLFSASLPSTRVVPQSTSPLLGKASALWSAIPAPYPPVRTAEVVVDNLKPINDSLSQEVKQLKAQLEAMLLGLFKNANGLEELASKSQLLEAELGRKTKQLMDATAKAAVEAEKRRAAKHVIKSLTAQLKEVTERLPEEQISTSNLDFNVEQTSFNRTRPSNGKCVTTTTLTECSGSSNTVVSAKKSRGQKPERMLQVEPGVYLYLISLPDGGNELKRVHFSRKCFSEDEAEKWWNENGQKICEKYNITPEHV

SEQ ID NO: 4955 - protein, 461 aa, Desulfovibrio desulfuricans G20
MHAPVSSPRHPAKRFARTAALWLVVATLLHASPALAEDAPAMLSQQHGNILWTLIAAILVMLMQAGFAMVECGFTRAKNAGNILMKNFVDFAAGSLVFFLVGYAFMFGADAGGFIGTSGFALAHVDPATEGGMWDLTFWFFQSVFAATAATIVSGGIAERTRFASYIIVSVLVTGIIYPVSGHWAWGGLAGNAGWLEGLGFADFAGSTVVHSVGGWVALAGAIVVGPRAGKYGPDGSVRAIPGHNIPLAALGVFILWFGWFGFNPGSTTTADGTIGYIAVNTSLAACAGTVTAMLTAWIRFGKPDASITMNGALAGLVGITAGCYELSPSGAIIVGIICGFVVVLSIEFLDKILKIDDPVGAVSVHGVCGAIGTLMVGLLAHPSYGGSTGLVYGGDASLLMVQALGVAVVFAWAFGMGLVVFRIVAAVAGLRVSPEEELKGLDITEHGSESYNGFQIFTVE

SEQ ID NO: 4956 - protein, 429 aa, Deinococcus radiodurans
MTGNEQNPSKWLAAEKKYDSGVYNKHDVVMVRGQGATVWDENGRSYIDCVVGYGVATLGHSHPDVVKAVQEQAGKLMVMPQTVPNDKRAEFLQELVGVLPQGLDRVFLCNSGTEAMEAAKKFAITATGRSRFVSMKRGFSGRSLGALSFTWEPKYREPFGDAVDNKSVDFVTYGNLDELRAAVTEQTAAVIMEPVQGEGGVRPASAEFIQEARRITREKGALLILDEIQTGFCRTGKMFACEHFGVIPDGMTLAKAIAGGTPTAAFAMMSEVADRMPAGGHGTTFGGNPLSMAAGVASLRAMKREGLAEQAREKGAYMMDKLRAIQSPKIREVRGLGLMIGVELKEKSAPYIHAMEHDEGVLCLAATPLVVRFLPPAVISKEQIDQVVAAFERVLNNVNPREERQAELRAQQSEMGQQQVSQGESVQTE

SEQ ID NO: 4957 - protein, 321 aa, Zea mays
  unsure (1)..(321): unsure at all Xaa locations
ADHDDDERDQPALHVLPDGDPERWHAQVFRSVDAGSVKRFPRPWERAEMARRHLVGDKNLAVERSIHAAYVAAIRSAERFVYVENQYFIGGSYAWPSYRNGGACNLVPMEIALKVASKVRAGEPFAAYVVLPMWPEGNPGSGPAQEILFWQNQTMEMMYSVVAAALEGKGGHPQEHLNFYCLGNREPAEDXATAINGPIQAHARRHRRFMVYVHSKGMIVDDEYVIIGSANINQRSLAGSRDTEIAVGAYQPDHTGACPRGKVHGYRMSLWEEHLGKEAVRRPEVLRPESPRCVKLVNRIARDNWRRYAADDDKLGPLQAC

SEQ ID NO: 4958 - protein, 487 aa, Streptococcus mutans
MPITIKTMLITYADSLGKNLKELNENIENYFADAVGGVHLLPFFPSTGDRGFAPIDYHEVDSAFGDWDDVKRLGEKYYLMFDFMINHISRQSKYYKDYQEKHEASAYKDLFLNWDKFWPKNRPTQEDVDLIYKRKDRAPKQEIQFADGSVEHLWNTFGEEQIDLDVTKEVTMDFIRSTIENLAANGCDLIRLDAFAYAVKKLDTNDFFVEPEIWTLLDKVRDIAAVSGAEILPEIHEHYTIQFKIADHDYYVYDFALPMVTLYSLYSGKVDRLAKWVKMSPMKQFTTLDTHDGIGVVDVKDILTDEEITYTSNELYKVGANVNRKYSTAEYNNLDIYQINSTYYSALGDDDQKYFLARLIQAFAPGIPQVYYVGFLAGKNDLELLESTKEGRIINRHYYSSEEIAKEVKRPVVKALLNLFTYRIQSAAFDLDGRIEVETPNEENIVIERQNKDGSHIATAEINLQDMTYRVTENDQTISLSMISCQT

SEQ ID NO: 4959 - protein, 495 aa, Pirellula sp. 1
MLGMGEPGRVRASKSKIVLSDRRMWVPLIVACMTQGYTTSVTPKTSRQLVHCIYRSPMSSSSSLEIQRADTVRVQFGDTNLELPLVEGSEGEKAIDISRLRADTGVITLDDGFVNTGSTRSAITFLDGEKGILRYRGYPIEELAKSCDFVEVAYLLIFGDLPNAEEIETFRSGIRDHTMIHEDMRSFYNGFPRDAHPMAILSSVVGALSTFYQDSMDLNDPRQVEISLYRLIAKLPTIAAYSYKKSMGQPFMYPKNELDYCENFLHMMFATPTSDYLVDPDFAEALNLLFIVHADHEQNCSTSTVRMVGSSNANLFASISAGIGALWGPLHGGANEACVNMLEQIAADGGDVKKYVDMAKDKSNDFRIMGFGHRVYKNSDPRATIIRASCDKLLAKLNLDDPLFEVAQKLEEVALKDEYFIERKLYPNVDFYSGVIYRALGIPVQMFTVLFAIGRLPGWLAHWREMHANPASRINRPRQIYTGATQRDVVPVDQR

SEQ ID NO: 4960 - protein, 267 aa, Ralstonia eutropha JMP134
MSIPSFGVGTFRLTGQAAVDSVYNALDLGYRAIDTAQIYGNEADVGQAIAESGVKRDELFLTTKIWTEHYAADKLVPSLRESLDKLRTDYVDLTLIHWPAPGNGVPLREFMEALAAAKSLGLTRQIGVSNFNIALTHQAIDVVGKGEIATNQIELSPYLQSRKLTAFLTEQGIAVTSYMTLAYGKVLTDPVLAQIAAKHGATVAQVALAWALQLGYAVIPSSTKRENLASNLLARDLKLDAGDMAQITALERNGREVNPEGLAPEWD

SEQ ID NO: 4961 - protein, 363 aa, Mycoplasma mycoides subsp. mycoides SC str. PG1
MAICKIGSKYTFTIRGILFCYIIKFMLMCFLERGLYLMIKKIGILTSGGDAPGMNNAIAGVVKTAASKGIEVYGINDGYKGLVNGWFEKLNVEKTLDILSRGGTYLGSARLPEFKELEVRQKAVANLKKAGIEALVVIGGDGSYMGAQKLTEMGINCIGLPGTIDNDISSTDYTIGFHTALNTIVEAVDRIRDTMQSHNRADVVEIMGNGCGDLVTYTAVATGAEIFSPAEDLLTIEQMGQKAKQFRLLGKKSLIILVSEKSYGISAKEIAEKIQKISGYETKATVLGHIQRGGRPTAMDRYIAFTAGMFAVEKLAEGKGGLFIGLENNKLVARDIDSTLNMKKEDKKPFIKYLREINGYFSK

SEQ ID NO: 4962 - protein, 226 aa, Clostridium tetani E88
MVIIDLLKGVVYMKFFIDTANVEEIKKVAKWGVLDGVTTNPTLIAREGRDLKEVIEEICSIVDGPISAEVISLESEKMVEEAKELIKIHKNIVIKVPMCEEGLKAVSELTKLGIKTNVTLIFSAQQALLAAKAGATYVSPFLGRIDDIGSFGIQLVEDIVTIFTNFGIESEIICASIRTPIHVLECARVGGDIATVPYKVFAQMLKHPLTDRGIEQFLEDYKSMNK

SEQ ID NO: 4963 - protein, 287 aa, Prochlorococcus marinus subsp. marinus str. CCMP1375
MFENENPNGSWLDEYQNDVRYGLKGKKIIEEISNFQKITIFESNRYGKALLLDNCWMTAEYQEKQYHECIVHPALCGSKEINKVLIIGGGDGGSARECLKYQELKNLDLIEIDKRVVELSQQYLSVIGGNCWKDQRLNLKLTNGINWVKDAKDNSYDVIIIDGSDPKGPAKGLFNKDFFKDCHRILKPDGVLGAQTESPESFEDIHINTVKMIKEVFKYADPLYGYVPIYPSGIWSWTFASIKKPRHLYPIISRANTISKTCQVWSPRWQRGGFDAIPANIERKLQQ

SEQ ID NO: 4964 - protein, 502 aa, Oryza sativa (japonica cultivar-group)
MMDGRSILMGRYEVGKQLGQGTFAKVYYARNLTTGQAVAIKMINKDKVMKVGLMEQIKREISIMRLVKHPNVLQLFEVMASKSKIYFVLEYAKGGELFNKIAKEGKLSEDSARRYFHQLINAVDYCHSRGVYHRDLKPENLLLDENENLKVSDFGLSALAESKRQDGLLHTTCGTPAYVAPEVLSRKGYDGAKADVWSCGVILFVLVAGYLPFHDPNLIEMYRKICRADFRCPRYFSAELKDLIHKILDSDPSTRISIPRIKRSTWYRKPVEINAKNSEAATTNSISSGVATTSGSAECSTSEENQGSLSLPNLNAFDIISLSTGFNLSGFFEDTHGHQEERFTTRQPVTTVLGKLKELAKRLKLKVKKKDNGVLRLAAPKEGKKGFLELDAEIFEVTPSFLLVELKKTNGDTMEYRKLVKEDIRPALKDIVWVWQGDEHLNSQSILQGEQQQSPLPPELPQDQLQPSLPQQEKQDMPEPPLLPQVPQEEVQTSIPAEQTKN

SEQ ID NO: 4965 - protein, 121 aa, Arachis hypogaea
DGITHVGGDMFVSVPKADAIYMKWILHDWSDQHCIKILKNCRKAIPENGKVIIVDHVLQPEGNDLFDDTGFAFDMMLLAHNAGGKERTEENWKWLFAETGFPRYNIIKIKALPSIIEAFPN

SEQ ID NO: 4966 - protein, 120 aa, Chara vulgaris
MITVGTYLQVSDNSGAKIVQCIKILHPFKKQRAIIGDTIIVSLKQARMGRNTQNVLKAIVVETKKATKYRKDGSYLQFDRNAVVLINNGLPIGTRILGCVTHELRKKRYLKIVSMAPYVI

SEQ ID NO: 4967 - protein, 229 aa, Oryza sativa (japonica cultivar-group)
MADEQYMDLGGGGAAAAPGRGGAGERKRRFTEEQIRSLESMFHAHHAKLEPREKAELARELGLQPRQVAIWFQNKRARWRSKQLEHDYAALRSKYDALHSRVESLKQEKLALTVQLHELRERLREREERSGNGGAATTAASSSSCNGSGSEEVDDDDDKRNAAAGCLDLEPPESCVLGGATCATPADVSVESDQCDDQLDYDEGLFPESFCATPELWEPWPLVEWNAVA

SEQ ID NO: 4968 - protein, 127 aa, Rickettsia akari
WGPAHGGANEAVINMLKEIGSSENIPKYIAKAKDKSDPFRLMGFGHRVYKNYDPRASVLKETCKEVLKELGQLENNPLLQIAIELEAIALKDEYFIERKLYPNVDFYSGIIYKAMGIPSQMFTVLFA

SEQ ID NO: 4969 - protein, 170 aa, Triticum aestivum
MWTERRARRSGSMAGGGGGRARGAEGKRAAPQGQRAPAATAYNQAAADILVALRLELRRSTPADRMWTERRARRSSSMAGGGGGRARGAEGKRAAPQGQRAPAATAGYFTAELAVLFLCLTALLVFLPLVLPPLPPPPSLLLLVPVGLMAVLVALAFVPSDSRSIASSCH

SEQ ID NO: 4970 - protein, 273 aa, Zea mays
MARTPRTTILHLVLTLCILSAQNTPSLASSAIDEFLGCLSADIPSRLIQTPATPSYSALLLSTAWNLRYILPDTSKPIGIIAATEHAHVQTTVRCGRRHGVRVRVRSGGHDYEGLSYASVHLHNRNEPFAVLDLAALRAIHVDPARAEAWVESGATVGELYYAVGAASRSLGFPAGSCPTMGVGGHLSGGGFGSLARKYGLSADNVLDAVVVDADGRLMNRSTMGEDHFWALCGGGGESFRVVLSWKVRLVAVPETRHGVQHHPGQGTNLPSN

SEQ ID NO: 4971 - protein, 104 aa, Triticum aestivum
  unsure (1)..(104): unsure at all Xaa locations
MGPTVVAWGATSVDPFQGLKSTEGLHVRRRYNGARLGSVRNGGRVRCMQVWPIEGMKKFETLFYLPPFSTGALLKQVDYLXIRSKWGPCLEVSKGGFIFREHNA

SEQ ID NO: 4972 - protein, 213 aa, Malus x domestica
PIKAPILVEQGLFWDNEELISLLSKESEQNELQKPLQISPSLAGARREAVDWMLRVASHYSFSALSAVLAADYFDGFLSSLQLQVEKPWMTQLAAVACISLAAKVEETQVPLLLDFQVEDSKYVFEARTIKRMEILVLSTLQWKMNPVTPISFIDYITRRLGLKNHLCWEVLKRCELVLLSLISDSRFMSFLPSVVATAIMLHVVNNIEPCLL

SEQ ID NO: 4973 - protein, 174 aa, Glycine max
MSSHSHLSFAFGVLGNIASFVCFLAPLPTFYRVCKKKSTEGFQSIPYVAALFSAMLWIFYAYVKTGEMLLITINAFGCVIETIYLAVFITYCPKKARMSTLRMIVLLNFGGFCTIVLLTHLLAEGEGRVKLLGWICVVFATSVFAAPLSIIVSILLDHNLQLSYLFLIFHVPCY

SEQ ID NO: 4974 - protein, 220 aa, Shigella dysenteriae
LRQELDLYICLRPVRYYQGAPSPVKHPELTDMVIFRENSEDIYAGIEWKADSADAEKVIKFLREEMGVKKIRFPEHCGIGIKPCSEEGTKRLVRAAIEYAIANDRDSVTLVHKGNIMKFTEGAFKDWGYQLAREEFGGELIDGGPWLKVKNPNTGKEIVIKDVIADAFLQQILLRPAEYDVIACMNLNGDYISDALAAQVGGIGIAPGANIGDECALFEA

SEQ ID NO: 4975 - protein, 238 aa, Lactobacillus delbrueckii subsp. lactis
  unsure (1)..(238): unsure at all Xaa locations
AGIFLTHGHADSIGALPYILRDGXPVFGSKLTIELAKIDVQRENKRRNNQLFNVIDADTEIDFKNASVSFFQTTHSVPDSLGIVIHAPQGQIVYTGDFKFDPSARPAYRTDMTRLAEIAENGVLALLPDSSNAEAVLPNASENEVGTYITNVFRNAKGRIIVAGKASNINRVQQVFNAAAATGRRVLLTGRDVAKIVHTAMKLGYLEVPDGLLMKAKELXDVPDEKTVILETGRMGNR

SEQ ID NO: 4976 - protein, 404 aa, Helicobacter hepaticus ATCC 51449
MDLQTLKKAYPKALPYHIGGKVGIQPRKRLRSIDELGLAYTPGVAVPCKQIEANPLSAYDYTSKSNLVAVISNGTAVLGLGDIGAMASKPVMEGKAILFKTFAGVDAFDIEINEKDVDKFVAVVKAISPTFGGINLEDIKAPECFEIERRLIEELDIPVMHDDQHGTAIISTAGIINALHLVNKKAKDIKVVVFGAGAAAVACAKMYKAFGVKNLVMFDSKGAISANRTDLNDLKKEFICQENYASYKDALNGADVMLGLSKGNLLSGDDIKGMNESPLIFALSNPTPEIMPDEVKKARPDAIVATGRSDFPNQINNVLGFPYIFKGALKVRASKINEEMKFAAAYAIANLAREPITEKLEKLLKKKMSFGKEYIIPSAFDERLDDVVSNAVADAAIKSGVARV

SEQ ID NO: 4977 - protein, 381 aa, Zea mays
LPCKPPSLVHCFKLLVLLALARLTMHVPDEDMLSPLGALRLDGHFSFHDVSAMARDFGNQCSFLPAAVLHPGSVSDIAATVRHVFSLGEGSPLTVAARGHGHSLMGQSQAAQGIVVRMESLRGARLQVHDGFVDAPGGELWINVLRETLKHGLAPKSWTDYLHLTVGGTLSNAGVSGQAFRHGPQVSNVNQLEIVTGRGDVVTCSPEDNSDLFYAALGGLGQFGIITRARIALEPAPEMGRWIRGLYSDFESFTEDQEMLMGAENSFGCVEGFVIINRTGVLNNWRASFKPQDPVEASHFQSDGRVLYCLELTKNFNSGDTDTMEQEVAVLLSRLRFIQSTLFHTDVTYLEFLDRVHTSELKLRAQGLWEVPHPWLNLLIP

SEQ ID NO: 4978 - protein, 220 aa, Shigella flexneri
ELDLYICLRPVRYYQGTPSPVKHPELTDMVIFRENSEDIYAGIEWKADSADAEKVIKFLREEMGVKKIRFPEHCGIGIKPCSEEGTKRLVRAAIEYAIANDRDSVTLVHKGNIMKFTEGAFKDWGYQLAREEFGGELIDGGPWLKVKNPNTGKEIVIKDVIADAFLQQILLRPAEYDVIACMNLNGDYISDALAAQVGGIGIAPGANIGDECALFEATHG

SEQ ID NO: 4979 - protein, 507 aa, Agrobacterium tumefaciens str. C58
METGMQTTAEAIKGKRLGLFIDGRFVEPRSGKFVDSYDPTTGEAWYQFAEGGADDVDLAISSAQRAFRDPSWRRMTQTARGKLVRRLADLVLEHAEDLALLETRDNGKLIKEMRAQMRAIPDSYLYFAGMADKLQGDTIPVNKLDQLNFNMREPLGVIGMVTPWNSPLMLLTGTLAPCLAIGNTVVIKPSEHATASTLALAELIVEAGFPAGVVNVVTGGGAVTGEALTRHNGIAKFVFTGSTATGRRIAANAAANLVPCQMELGGKSPHVVFSDVDIEKTVNGVVSGVFAAAGQTCVAGSRCFVEANIYDRFIEALVERTRNIKLGDPMDDATDIGPLALESQLSKLEGYVASGVREGSRIAIGGKRPQSEELSRGWYFEPTVMADATNDMSFMRHELFGPMVGVMPFSSEEEMISLANDTNYGLASGIWTQNIDRAMRFANQIDAGTVWINTYRSAAYMSANGGFKESGYGRRGGFDVMREFSRAKNVVIDYSGAMQDPFVIRLR

SEQ ID NO: 4980 - protein, 181 aa, Triticum aestivum
  unsure (1)..(181): unsure at all Xaa locations
MAPAVMASSATTVAPFQGLKSTAGLPVSRRSSGSLGRVSNGGRIRCMQVWPIEGIKKFETLSYLPPLSTEALLKQVDYLIRSKWVPCXLRFSKVGFRLPVSTTSSPRVITNGRYWTMXKLPYVRCTDAXTQVLNEVXEEVKKEYPDAYVRRNRASTTCAQVQCVSXFIAFRPPGCEESGKA

SEQ ID NO: 4981 - protein, 347 aa, Sulfolobus solfataricus
  unsure (1)..(347): unsure at all Xaa locations
XRAVRLVEIGKPLSLQEIGVPKPKGPQVLIKVEAAGVCHSDVHXRQGRFGNLRIVEDLGVKLPVTLGHEIAGKIEEVGDEVVGYSKGDLVAVNPWQGEGNCYYCRIGEEHLCDSPRWLGINFDGAYAEYVIVPHYKYXYKLRRLNAVEAAPLTCSGITTYRAVRKASLDPTKTLLVVGAGGGLGTXAVQIAKAVSGATIIGVDVREEAVEAAKRAGADYVINASMQDPLAEIRRITESKGVDAVIDLNNSEKTLSVYPKALAKQGKYVXVGLFGADLHYHAPLITLSEIQFVGSLVGNQSDFLGIXRLAEAGKVKPXITKTXKLEEANEAIDNLENFKAIGRQVLIP

SEQ ID NO: 4982 - protein, 497 aa, Cladosporium fulvum
MSLSVQLETPSAGKYEQPTGLFINNEWVKPVSGKFFDVINPTDESVICQVAEADEKDVDIAVAAARKAFEGPWRQETPENRGKLLVKLAELFEKNLDLFASVKALDNGKAFNMAKVDIGMCAGCLRYYGGWADKIEGKVVDTTPDTFNYIKKEPIGVCGQIIPWNFPLLMWAWKIGPAVATGNTVVIKTAEQTPLGAYVAANLIKEAGFPPGVVNVISGFGKVAGAAIASHMDIDKVAFTGSTVTGRTILKAAAGSNLKKVTLELGGKSPNIVFDDADIDNAISWVNFGIFFNHGQRCCAGSRIYVQEGIYDKFLQRFKERAQKNVVGDPFAADTFQGPQVSQVQFDRIMGYIQAGRDAGATVEIGGNRKGDKGYFIEPTIFANVTEDMKIMQEEIFGPVCSISKFKTKEDAIKVGNATPYGLAAAVHTRNLNTAIEVSNALRAGTVWVNTYNTLHHQLPFGGFKESGIGRELGEDALANYTQTKTVSIRLGDALFG

SEQ ID NO: 4983 - protein, 486 aa, Vibrio vulnificus CMCP6
MEVTAHYIGGKPFVGDTGESFATLNPATGEVLAHIEQADERVLGHAIESAKLGFSVWSSMSAAERSRCLLKAAQLIRDHNDELAELEVRDTGKPIQEASVVDIATGADVIEYFAGLVNGLGGEQQSLGSNQFFYTRREPLGICAGIGAWNYPIQIAMWKAAPALAAGNAMIFKPSEETPLSALKLAELFTQAGVPDGVFNVVQGDYRVGQMLTAHPEIDKVSFTGESGTGKKVMADSAATLKPVTMELGGKSPLIIFDDADLDDAVSAAMVANFYTQGEVCTHGTRVYVQRAMYDAFVEQLKERTEKLIVGDPMNMETQIGSLISKSHLEKVLGAISSAKESGATLLTGGFQVTERGLEKGCFVAPTVFVDCRDEMPHVQNEIFGPVMSVLVFDDEDEVIARANNTQYGLAAGVFTQNLSKAHRVIHQLQAGICWINTWGNSPAEMPVGGYKLSGIGRENGQETLLHYTQTKSVFVELGAFDSPYA

SEQ ID NO: 4984 - protein, 382 aa, Bacillus anthracis str. A2012
MGEFSGKGENVMTVIRGLEGVVATTSSVSSIIDDTLTYAGYNIDDLAENATFEEVVYLLWHRKLPNEQELAKFNEIVSEYYKVPGEILAYLKQVDLKIAHPMSVLRTAISMLSLYDESAEIMDEKSNYLKAVKLQAQVGTLVAAYARIRKGLDVVEPRNDLSLAANFLYMLNDREPNEVEIEAFDKALVLHADHELNASTFTARVCVATLSDVYSGITAAIGALKGPLHGGANENVMKMLTEIGEEENVESYIHNALQNKVKIMGFGHRVYEQGDPRAKHLREMSKRLCVLLGEEKWYNMSIKIEDIVTKEKGLPPNVDFYSASVYHCLGIDHDLFTPIFAISRMSGWLAHILEQYENNRLIRPRADYNGPTHQVYVPIAQR

SEQ ID NO: 4985 - protein, 114 aa, Capsicum annuum
MKMFGKIACLLILCVVLIAPHAEAVTCGQIQVGVVNCLPYLQNRGPLGRCCGVIKDLLKLCKTPHERRKSCRCVKTAANTIKGIDFGKTAGLSGVCGVKIPSEISPSVDCSKVK

SEQ ID NO: 4986 - protein, 243 aa, Citrus sinensis
MGRGRVQLKRIENKINRQVTFSKRRAGFLKKAHEISVLCDAEVAVIIFSHKGKLFEYSTGSCMEKILERYERYAYAERQLIAPDPESQRNWPLECNNLKAKIDLLQKDQRHYLGEDLESLSLKDIQQLEQQLDTALKHIRSRKNQLMQESISELQKKEKSIEEQNNLLVKQIKEREKAAAQQAQWGNQIQNQVPNTLSFLLPQPPPCLRLGGAYQEQASEMRRNELNLTLEPVCSCSLGCFAG

SEQ ID NO: 4987 - protein, 379 aa, Candida albicans SC5314
MSGLGKLPGLASDAVLKQSIPVPEDFQEVKGIDYSQDNAYNMRAKDLIKSMATMGFQASSLSQACDIIDNMRSWRGKHKDTLEEHEQTGEFDDEGYQKTTIFMGYTSNLISSGLRDTLRYLVQHKMVSAIVASAGGVEEDLIKVLAPTYMGDFTLPGKGLRDQGMNRIGNLLVPNDNYCKFEEWIVPILDKCLEEQEEAMKKLGPKGLIAGSEAIWTPSKLIDRLGKEINDESSVLYWAHKNKIPIFCPALTDGSIGDMLFFHTFKASPQQLRLDIVADIRKINSMSMAASKAGMIILGGGLIKHHICNACLMRNGADYAVYINTGQEFDGSDAGARPDEAISWGKIKAEAKSVKVYADVSLVFPLIVAATFASEKPQN

SEQ ID NO: 4988 - protein, 386 aa, Listeria monocytogenes str. 4b F2365
MKHVFPTYKRFPIDLVNGTGTVVTDKNGKTYLDFTSGIAVCNLGHCPANVAEAVQQQLTNIWHTSNLYECALQDSVAELIADGKDRLVFFCNSGTEANEAALKLARKYTGKEKIITFEKSFHGRTFGSMSATAQAKIHQGFGGLVPGFTYVPYNDIEAFRAEIDEHTAAVMLEVIQGEGGVIPANAAFLLEVQLLCKKMGVLLIIDEVQTGLGRTGTLYGFEQIGLEPDIFTLAKGLGNGLPIGAMVGKANLSSAFGPGSHGSTFGGNKLALAAAKEILRTMKQAGFLEEVNAKADYFRYLLEVHLEALDNVSVIRGGGFLIGIELENTAEPVVTELRDKGLLILTAGANVLRILPPLTVSYAEIDQAIYLLKSVLENQLIGSEEG

SEQ ID NO: 4989 - protein, 261 aa, Solanum tuberosum
VENARSYSTYLKTRPASMEEAAINQLITLSKDTRAGGSAEGAHLHIVHLSDARTSLNLIKEAKQRGDSITVETCPHYLAFAAEDIPDGDTRFKCAPPIRDAANKEKLWDALLDGDIDMLSSDHSPSVPEMKLLDEGDFLKAWGGISSLQFVLPATWTHGRKYGITFEQLASWWSENPAKLAGLTTKGAIAVGNQADIVVWEPDMEFDLDNDYPVHIKHPSISAYMGSRLSGKVLATFVRGNLVYKEGNHASQACALPILHR

SEQ ID NO: 4990 - protein, 386 aa, Thermoplasma volcanium GSS1
MPETTEEISKGLEDVNIKWTRLTTIDGNKGILRYGGYSVEDIINNGAQAEEIQYLFLYGELPNAQELKIFKENVQKGYNIPDFVINSIRQLPRESDAVAMQMAAVASMAASEIKFKWNKDTDRDVAAQMIGSMSAITANVYRHILGMPAERPKPSDSYAESFLKAAFGRNVTKEEVDAINTALILYTDHEVPASTTAGLVAVSTLSDIYSGITAALAALKGPLHGGAAEAAIAQFDEIKEPSNVEKWFNDNIINGKKRLMGFGHRVYKTYDPRAKIFKGIAENLSKNNAEVKKIYDIATKLEDLGVKQFGSKGIYPNTDYFSGIVYMSVGFPLRNNIYTALFALSRVTGWEAHFIEYVEEQQRLIRPRAVYVGPAERKFVKLPDRK

SEQ ID NO: 4991 - protein, 101 aa, Rickettsia sp. 'midichlorii'
GSSENIPKYIAKAKDKNDPFRLMGFGHRVYKNYDPRAAVLKETCKEVLKELGQLENNPLLQIAIELEAIALKDEYFIERKLYPNVDFYSGIIYKAMGIPSQ

SEQ ID NO: 4992 - protein, 329 aa, Streptomyces avermitilis MA-4680
MKAAVIESVGKAVVAEVPDPTPGPREVVVEVAACGLCGTDLHILQGEFAPKLPIVPGHEFAGEVVGLGTQVTEVSVGDRVAVDPSLYCYECRYCRTGHNNLCERWAAIGVTTAGGAARYAVAPVANCVKLPEHVRTQDAALIEPLSCAVRGYDVLRSRLGAHVLVYGSGTMGLMMLELAKRTGAASVDVVDVNPARLTTARQLGVSGSAANADELDRPQGWDVVVDATGNAAAIQDGLGRVAKAGTFLQFGVADYATRVTIDPYRIYNQEITITGSMAVLHSFERAAELFAGGVLDPDVFISDRIPLARYPQALEQFASGVGRKIVVVP

SEQ ID NO: 4993 - protein, 497 aa, Bordetella pertussis Tohama I
MSTLPPLSHWESLAAGLTLRNQAFIDGRWHDGQAGPLAAINPATGQLLAEVTACSQADIDQAVAAARRAFESGVWSRMPRRERKQCMLRLAALIREHAEELALIETLNMGKPIGDTMAFDIPETAHTYAWYAETIDKQYDEIAPTDADALATITREPLGVVAAVVPWNYPLLMASWKVAPALAAGNSVILKPAEQSSLSALRLAELALQAGIPAGVLNVVPGAGPVAGRALGLHMDVDCLAFTGSTATGKRFMEYSGQSNLKQVWLECGGKSPHIIFDDCPDLDRAALAAAIGIFNNQGEVCIAGSRLYVQAGIYDTFVSKVEACARAMQPGNPLDPASPMGAMVDERQMARVLEYVESGRREGARLRMGGERVRADSGGYYIEPTIFECARPDLTIVREEIFGPVLAVTRFDGEDEVVAQANASAYGLGSGLWTADLSRAHRVSRRLRAGLVWVNCYFDGDVTVPFGGVKQSGFGRDKSLHALDKYTSLKTTWIRL

SEQ ID NO: 4994 - protein, 151 aa, Methanothermobacter thermautotrophicus str. Delta H
MNLKTHAFNDRGRIPSRYTCDGENISPPLSWDGVPGEAKSLALICDDPDAPSKVWTHWVIFNIPPDSTGLEENVPDAGRLPDGSVQGYNDSGTLGYRGPCPPSGVHRYFFRLYALDTVLDLEPGASKEDVLEAMEGHVLGEAKLIGLYRRG

SEQ ID NO: 4995 - protein, 434 aa, Triticum aestivum
  unsure (1)..(434): unsure at all Xaa locations
GVDCLGKGEAFGKVHYAKNLESNRGVAIKILDKEKVLKVGLAEQIRREITTMRLVEHKSIVQLHEIMATRSKIYVVMEYMGGDLFYKDAXRVACSPRVLPSSSCRLISAVGFSHSRGVYHRDLKPENLLLDENENLKVSDFGLSALSESKRQDGLLHTTCGSPAYVAPEVISKGGYDGAKSDIWSCGVILFVLVAGYLPFQGQNLIEMYRKIEKGDFKCPGWVSQKLQKLLYKIMDPDPNKRISIQKIKESTWFRKGPGENLTAKERLPSENATTDAVPTLGVRRRKNSHEDGKPLAVTNLNAFEIISFSTGFDLSGLFVEKESKKEARFTSEQPASAIVSKLEAVAKTLNLRVRKKDNGVGWWQGCKGGRKGVLQFDSEIFEISPSYPRTVSLRSSGDSLEYQKLLEESIRPALKDICLXAWHGADGQQEPQG

SEQ ID NO: 4996 - protein, 110 aa, Rickettsia sp. 'midichlorii'
AVINMLKEIGSSENIPKYIAKAKDKNDPFRLMGFGHRVYKNYDPRAAVLKETCKEVLKELGQLENNPLLQIAIELEAIALKDEYFIERKLYPNVDFYSGIIYKAMGIPSQ

SEQ ID NO: 4997 - protein, 429 aa, Bordetella pertussis Tohama I
MGPRIITHGEGVYVFDDQGNRYLEGMAGLWSVAVGFGEQRLVEAAARQFQELPYYHTFTHKSHPSVIALAERLIGYTDGRMAQAFFTNSGSEANDTVVKLVWYYNNALGRRDKKKIIARQRGYHGVTVASASLTGLPGNHKDFDLPLPQIRHTACPHYYRYGLPGETEEDFATRMAGELEAMILREGPDTVAAFIGEPVMGAGGVIVPPRTYWQKIQAVCRKYDILVIADEVITGFGRLGQRFGSQVFDIEPDIMVLSKQITSSYQPLGAVLLNTRVADVVAEHSGRLGTFGHGYTASGHPVATAVALENLRLIDERGLIEHAAEMGALLHQELQALSSHPLVGEVRGVGLIAGVELVADKATRQPFDPLGKAGGYAYERAHDHGLIVRGIQDTVAFCPPLIITAEQVRDMVARFARTLDDVAAHVAQG

SEQ ID NO: 4998 - protein, 416 aa, Chlamydomonas reinhardtii
MASNGAAPDRWSNVKRVYTRQDVEKLRGSIKIEYTLARLGAERFWNLLHTEDYVPALGAMTGGQAVEMVAAGLKDIYLSGWQVAADANSASQTYPDQSLYPVDSVPRVVSRINNAFQRMDQMQHSEGRGDTYWFAPIVADAEAGFGGNLNAYELMKALIEAGASCVHFEDQLASAKKCGHLGGKVLVPTKEFVQKLTAARLAADVMDVPTLIIVRTDALGAYLLTSDADEYDKPFMTGERTAEGFYCVRGGIDAAIARGLAYAPYADLVWFETSEPSMEEAKKFAAAIHAQYPGKLLAYNCSPSFNWKKLSADEISKFQKTLGSLGYKFQFITLAGFHSLNYGMFSLARDYASRGMSAYAQLQEAEFASEKQGYRATTHQKFVGTGYFDLVSTVITQGTSSTNALKGSTEEEQFHH

SEQ ID NO: 4999 - protein, 368 aa, Exiguobacterium sp. 255-15
MGQDYQQWVDRLAQKKTGERQDGVEVVIKPVPDRTESGVLDPRVLEVMMQQQQDSSPVGPFSLEAARAGMGWINTDLTTTDITTEDIMIPSAEQPIPARIYRPRSTEPLPAVVYFHGGGFFGGTLEPVEHPCRLLAERANVVVISIDYRLAPEHPFPAGLNDCFTAVKWVYEQGEELGINREQLAVAGDSAGGNLATVCALLDREQQTEMIQYQVLLYPVVNLAALPTDDFNWRLDAYEMNENRELLEGIVTALEDSDGLLNRLYLQGTTDVQDPHVSPLFSDKLTGLPDALIITAEYDYLRLEGEAYGRKLARSGVKTKRIQYNGMDHAFIEKLGQYPQAEDCITEIANGLQNRFAVMKSDTNTIGG

SEQ ID NO: 5000 - protein, 335 aa, Schizosaccharomyces pombe
MQQTYKPNTSALKDGAPKATVDQKQLLPCKYRVGRVLGGGTYATVREAVHIETNKMYAAKIMNKKMMEKKQDFVKNEIAILKRVSYEHPNILHLVDFFETVNNLYLITELATGGALFDRICAKGSFYEADAAALMRTTTSAVKYLHDNGIVHRDLKPENLLYRSKDPNSDLLIADFGLSHFYEDSQYYMLMTACGTPEYMAPEVFRRTGYGKPVDMWAIGVITYFLLSGYTPFARPSQVEVIEAILANEYTFNDPCWSGISETAKDFIKKCLENDPSKRLTAADALKHPFLSENGPATSNLLPNVRENFNARKTFRTAYNAVRAFNTWKKLENKH

SEQ ID NO: 5001 - protein, 495 aa, Staphylococcus aureus subsp. aureus MSSA476
MAVNVRDYIAENYGLFINGEFVKGSSDETIEVTNPATGETLSHITRAKDKDVDHAVKVAQDAFESWSLTSKSERAQMLRDIGDKLMAQKDKIAMIETLNNGKPIRETTAIDIPFAARHFHYFASVIETEEGTVNDIDKDTMSIVRHEPIGVVGAVVAWNFPMLLAAWKIAPAIAAGNTIVIQPSSSTPLSLLEVAKIFQEVLPKGVVNILTGKGSESGNAIFNHDGVDKLSFTGSTDVGYQVAEAAAKHLVPATLELGGKSANIILDDANLDLAVEGIQLGILFNQGEVCSAGSRLLVHEKIYDQLVPRLQEAFSNIKVGDPQDEATQMGSQTGKDQLDKIQSYIDAAKESDAQILAGGHRLTENGLDKGFFFEPTLIAVPDNHHKLAQEEIFGPVLTVIKVKDDQEAIDIANDSEYGLAGGVFSQNITRALNIAKAVRTGRIWINTYNQVPEGAPFGGYKKSGIGRETYKGALSNYQQVKNIYIDTSNALKGLY

SEQ ID NO: 5002 - protein, 122 aa, Fusobacterium nucleatum subsp. vincentii ATCC 49256
MAFNKEQFIADLEAMTVLELKELVSALEEHFGVTAAAPVAVAAAGGATEAAEEKTEFDVVLKSAGGNKIAVIKEVRAITGLGLKEAKDLVDNGGVIKEAAPKDEANAIKEKLTAAGAEVEVK

SEQ ID NO: 5003 - protein, 224 aa, Oryza sativa (japonica cultivar-group)
MDVSAALSSDYSSGTPSPVAADADDGSSAYMTVSSAPPKRRAGRTKFKETRHPVFKGVRRRNPGRWVCEVREPHGKQRIWLGTFETAEMAARAHDVAALALRGRAACLNFADSPRRLRVPPIGASHDDIRRAAAEAAEAFRPPPDESNAATEVAAAASGATNSNAEQFASHPYYEVMDDGLDLGMQGYLDMAQGMLIDPPPMAGDPAVGSGEDDNDGEVQLWSY

SEQ ID NO: 5004 - protein, 285 aa, Lactobacillus johnsonii NCC 533
MKFNSVEDTYTLNNGVKIPIIGFGTWQTPDGDVAKHVVEAALNSGYRHIDTAAAYGNEESVGEGIKNSGINRHDLFITTKLWNADHGYKEAKAAIDKSLQNLGTDYLDLYLIHWPNPLALRDHWAEANAESWRAMEEAVKAGKIRAIGVSNFRKHHLEELLKTAEIKPAVNQIMLNPSDLQSDVVKVNEELGLLSEAYSPLGTGGLLGNEVVNEIANEVGKSPAQVLIRWSLEHGFLPLPKSVHDKYIAANIDVFDFELNDEQMSKLDSLHGVSDLATDPDTANF

SEQ ID NO: 5005 - protein, 411 aa, Streptococcus pyogenes
MNNKMFLNKEAGFLVHTKRKRRFAVTLVGVFFLLLACAGAIGFGQVAYAADEKTVPNFKSPDPDYPWYGYDSYRGIFARYHNLKVNLKGSKEYQAYCFNLTKYFPRPTYSTTNNFYKKIDGSGSAFKSYAANPRVLDENLDKLEKNILNVIYNGYKSNANGFMNGIEDLNAILVTQNAIWYYSDSAPLNDVNKMWEREVRNGEISESQVTLMREALKKLIDPNLEATAANKIPSGYRLNIFKSENEDYQNLLSAEYVPDDPPKPGDTSEHNPKTPELDGTPIPEDPKRPDESSEPALPPLMPELDGEEVPEVPSESLEPALPPLMPELDGEEVPEVPSESLEPALPPLMPELDGEEVPEVPSESLEPALPPLMPELDGEEVPEVPSESLEPALPPLMPELDGEEVPEKPSV

SEQ ID NO: 5006 - protein, 294 aa, Triticum aestivum
MSAPPPPASSDDDGKPADEEGVEIREVWANNLEAEFAVIRDVVDDYPYIAMDTEFPGIVCRPLGSFRSNDEYNYATLKANVDMLSLIQLGLTLSDENGALPARGTGGRPCAWQFNFRGFDPRSDPANADSIDLLRNSGIDFDRFTTEGADTGHFAELLMSSGVLLNAELQWVTFHSGYDFGYLLKLLTGRNLPDTMPGFFDLIRIYFPVLYDIKHLMKYCGSLHGGLSKLGELLGVQRVGICHQAGSDSLLTLQCFQKLKEAYFRGSTENYAGVLYGLISDGGENRPPAALLIE

SEQ ID NO: 5007 - protein, 207 aa, Shigella dysenteriae
QELDLYICLRPVRYYQGAPSPVKHPELTDMVIFRENSEDIYAGIEWKADSADAEKVIKFLREEMGVKKIRFPEHCGIGIKPCSEEGTKRLVRAAIEYAIANDRDSVTLVHKGNIMKFTEGAFKDWGYQLAREEFGGELIDGGPWLKVKNPNTGKEIVIKDVIADAFLQQILLRPAEYDVIACMNLNGDYISDALAAQVGGIGIAPGA

SEQ ID NO: 5008 - protein, 209 aa, Escherichia coli
YICLRPVRYYQGTPSPVKHPELTDMVIFRENSEDIYAGIEWKADSADAEKVIKFLREEMGVKKIRFPEHCGIGIKPCSEEGTKRLVRAAIEYAIANDRDSVTLVHKGNIMKFTEGAFKDWGYQLAREEFGGELIDGGPWLKVKNPNTGKEIVIKDVIADAFLQQILLRPAEYDVIACMNLNGDYISDALAAQVGGIGIAPGANIGDECA

SEQ ID NO: 5009 - protein, 219 aa, Escherichia coli
LDLYICLRPVRYYQGTPSPVKHPELTDMVIFRENSEDIYAGIEWKADSADAEKVIKFLREEMGVKKIRFPEHCGIGIKPCSEEGTKRLVRAAIEYAIANDRDSVTLVHKGNIMKFTEGAFKDWGYQLAREEFGGELIDGGPWLKVKNPNTGKEIVIKDVIADAFLQQILLRPAEYDVIACMNLNGDYISDALAAQVGGIGIAPGANIGDECALFEATHG

SEQ ID NO: 5010 - protein, 434 aa, Bacillus anthracis str. A2012
MFVVRPLGEIDISKNNLRRVDSLSTLREEALHMHKVHQGKLETVSKVKVENAKDLSLAYSPGVAEPCKEIYDDKSKVYEYTMKGNMVAVVTDGTAVLGLGNIGPEASLPVMEGKAVLFKSFAGVDAFPIALNTNDVDKIVETVKLMEPTFGGVNLEDIAAPNCFIIEERLKKETNIPIFHDDQHGTAIVTVAGLVNALKLVGKKMSDIKVVANGAGAAGIAIIKLLYRYGVRDIIMCDRKGAIYEGRPTGMNPVKDEVAKYTNKNRIEGSLADVVQGADVFIGVSAEGALTEEMVRTMNDDAIIFAMANPVPEIMPELAKAAGAAVVGTGRSDFANQVNNVLAFPGIFRGALDVHATQINEEMKMAAVQAIAELVAEDELNADYIIPAPFDARVAPQVAAYVAKAAMETGVARRQVDPNEVAEKTKQLALIGKE

SEQ ID NO: 5011 - protein, 294 aa, Listeria monocytogenes str. 4b F2365
MTKTLQDRMILPGNETIPYIGLGVFQVTEQEFIAGAVEKAIEVGYRLFDTAAVYNNEAIVGQAIASSAVSREELFISSKVWNGDLGFDETLFAFERTLRNLKLDYLDLYLIHWPVAGKYRDSWRAMERLHDEKLIKSIGVANFKQHHLSDLLVAANEKPVLNQVETHPLLPQNDLRKYLAEQNIAHAAWSPLAKGILMQNPVITEIAKKHQASVDQVILQWHLNRNTIIFPKSITSSRIEENSRLSYFQLDAIDMEKIDRLETGKRVGPDPDDLEYFLSSIERERAYLSGENAE

SEQ ID NO: 5012 - protein, 220 aa, Azoarcus sp. EbN1
MQNRMTMTRTDASVLSTNKVIRNTYMLLSLTLAFSALTAGLSMAMGAPRLGIIVTLAGYFGLLFATTKFRNSSLGIVFVFALTGFMGFTLGPIISSYLALPNGASIVMQAMAGTAAIFLGLSAYAVTSKKDFSFMGGFLMVGILVAFLAGLGAIFFEIPALSLTVSAAFVLLMSGLILYETSNIIHGGETNYIMATVSLFVSIFNLFTSLLHLLGFANSD

SEQ ID NO: 5013 - protein, 319 aa, Fragaria x ananassa
MAKVPSVTLSSCGDDIQTMPVIGMGTSSYPRADPETAKAAILEAIRAGYRHFDTAAAYGSEKDLGEAIAEALRLQLIKSRDELFITTKLWASFAEKDLVLPSIKASLSNLQVEYIDMYIIHWPFKLGKEVRTMPVERDLVQPLDIKSVWEAMEECKKLGLARGIGVSNFTSSMLEELLSFAEIPPAVNQLEMNPAWQLKKLRDFCKAKGIHVTAYSPLGAARTKWGDDRVLGSDIIEEIAQAKGKSTAQISLRWVYEQGVSIVTKSYNKERMRQNLDIFDFCLTEEELEKMSHLPQRKGVTFASILGPHDIVLEVDEEL

SEQ ID NO: 5014 - protein, 382 aa, Desulfovibrio desulfuricans G20
MRKTVYFIEGDGIGPEVWNAARPVIDKAVELAYGNGRSLEWKELLAGEKAYAETGTYLPQETLDTLAGAELAIKGPLGTPVGKGFRSLNVTMRQTLDLYACIRPIRYFEGIESPVKHPERVNMVVFRENTEDVYAGIEYKADTDEARKLIAFLRDELGANVDERCAVGIKPMSEKGSKRLVRRAMDFALAQGLPSVTLVHKGNIMKFTEGGFRQWGYELAHDEYAGRAVTEAQAAAGETGLVVKDRIADAMFQEVLIRPEQYSVVATSNLNGDYISDALAAQVGGLGLAPGVNMSDTLAFFEATHGTAPTIAGKDMANPGSLILCGGMLLEHLGWHEAATRIHTAMNTVIGNRTVTVDLASQMQGASTVGCRQFGELLGAAL

SEQ ID NO: 5015 - protein, 576 aa, Brassica napus
MAASFSVPSMIMEEEGRFEAEVAEVQTWWSSERFKLTRRPYTARDVVALRGHLKQGYASNEMAKKLWRTLKSHQANGTASRTFGALDPVQVTMMAKHLDTIYVSGWQCSSTHTSTNEPGPDLADYPYDTVPNKVEHLFFAQQYHDRKQREARMSMSREERAKTPFVDYLKPIIADGDTGFGGTTATVKLCKLFVERGAAGVHIEDQSSVTKKCGHMAGKVLVAVSEHINRLVAARLQFDVMGTETVLVARTDAVAATLIQSNIDSRDHQFILGVTNPSLRGKSLSSLLAEGMAVGNNGPALQAIEDQWLSSARLMTFSDAVVEALKRMNLSENEKSRRVNEWLNHARYENCLSNEQGRELAAKLGVTDLFWDWDLPRTREGFYRFQGSVTAAVVRGWAFAQIADLIWMETASPDLNECTQFAEGVKSKTPEVMLAYNLSPSFNWDASGMTDQQMMEFIPRIARLGYCWQFITLAGFHADALVVDTFAKDYARRGMLAYVERIQREERSNGVDTLAHQKWSGANYYDRYLKTVQGGISSTAAMGKGVTEEQFKETWTRPGAAGMGEGTSLVVAKSRM

SEQ ID NO: 5016 - protein, 113 aa, Brassica napus
  unsure (1)..(113): unsure at all Xaa locations
MTANRSKSEKKDAEKQLRRYPYEVLGVLKNSTDQEIKSTYRKLSLKYHPDKTANDPVAADMFKEVTFSYNILSDPEKRCQYDTAGFEXAVEVEGQELEQWXLDLSSLGAVLPT

SEQ ID NO: 5017 - protein, 270 aa, Schizosaccharomyces pombe
MSTTSREDAVYLAKLAEQAERYEGMVENMKSVASTDQELTVEERNLLSVAYKNVIGARRASWRIVSSIEQKEESKGNTAQVELIKEYRQKIEQELDTICQDILTVLEKHLIPNAASAESKVFYYKMKGDYYRYLAEFAVGEKRQHSADQSLEGYKAASEIATAELAPTHPIRLGLALNFSVFYYEILNSPDRACYLAKQAFDEAISELDSLSEESYKDSTLIMQLLRDNLTLWTSDAEYSAAAAGGNTEGAQENAPSNAPEGEAEPKADA

SEQ ID NO: 5018 - protein, 483 aa, Pseudomonas aeruginosa PAO1
MQLKDAKLFRQQAYVDGAWVDADNGQTIKVNNPATGEIIGSVPKMGAAETRRAIEAADKALPAWRALTAKERANKLRRWFDLMIENQDDLARLMTIEQGKPLAEAKGEIAYAASFLEWFGEEAKRIYGDTIPGHQPDKRIIVIKQPIGVTAAITPWNFPSAMITRKAGPALAAGCTMVLKPASQTPYSALALAELAERAGIPKGVFSVVTGSAGEVGGELTSNPIVRKLTFTGSTEIGRQLMAECAQDIKKVSLELGGNAPFIVFDDADLDAAVEGALISKYRNNGQTCVCANRLYVQDGVYDAFVDKLKAAVAKLNIGNGLEAGVTTGPLIDAKAVAKVEEHIADAVSKGAKVVSGGKPHALGGTFFEPTILVDVPKNALVSKDETFGPLAPVFRFKDEAEVIAMSNDTEFGLASYFYARDLARVFRVAEQLEYGMVGINTGLISNEVAPFGGIKASGLGREGSKYGIEDYLEIKYLCLGGI

SEQ ID NO: 5019 - protein, 2229 aa, GIBBERELLA ZEAE PH-1
MTTLLDALRQATQVDCDTLDANVQAIAFSEISRPLAGEPLLHHDALVKDAIEKARGALKEFQGSATFEEFVVQILTNPKLSYSTDGTMSDAHRIVNIFKALAPEFDTKRVCIKIPATWEGLQACRALEVEGIATLATTMFCMEQATLAADAQCTYIAPYVNELKVHFEAGYVDEHKAFDFCREAQTYYINHSCRTQVLAASLTSVDEVMQLAGIQHITISPNLLNGLASTKLSDWDGKLGDYFAQGPANKSWETRDYNALTKNESAWRMAFTRSGFGTSEGEFLFPVRARLMEKVTDISTSLAADVSDGWLQQTDPPEERVDLMIDPNSKRWTKVHRYFTKVLESDMAIEDVIRRSFTHHQYRMMAPTERTDVKEMQAANTKRYNALLAGRFKGIEDSLATRLTAMYFGLPAAPVDNPLEEIAMMLGLDEKEVPRYNFRPPLHFLTAHDRRNWGKETLKSEEATIDALPLPRAMEPTLSLRGGGDDDDLIGWTDDYTQEYETTALFTDGWTYLHGIYGRLPFVPRKWRSFSKVLRQLLQVKDYEYQDFSLLWYDRKLGKPKVIHDQLPLTKESPAMTFLDEHFADSTRSHKDCCALFIDNIHTDINKGPQHWEPIDGQLQSDTIKIGRSLGNAPNGPEDEVISYAYLAFPKTKVDTFKIGKYGSNQYNAHFCKTLNVLFGAPESSAHHHALFRLVDKKKNKTNWAVPIVYGAMGLPQWAWELLHPVNNPGADWMVECCWLNPGLEAVLLSNYYPKPNPYLITRNSRNGAERFNQAYRQICEMTTEAFDASVCRKIDSVFLIEGHKPKTAGELVIDGFQVRPRRDLKSWKLGIPGTPNDDTPRDLGKKLGESPNFYRTVHVNWRPGHCRLFPGWYSGGDFSVEMPRLSSTVVEFLEAMGELFKLVGPPNLNGTGPEDSCFLLTEAPSFDGLQVQDMDSPSYYIGVGATDDDWHDIRKSITSPFVSVSIVKKPKNTSWSTSISKHNLWGLRLDKEALRQNEMNGGGSRRDALQLYDLDGESVDILHGYPADPVPLEPIDPNNNVSVTTNGKPWTPTSRRRPDAFVPPRLLKIRSKSVGGAEGLHLPSTLVIGGASTPDGEPESDIGILATSRPKFRGFPPPPSEDEDDGDLAGGLAEDDHRRYSMYGDLLSDSGEEDGGGSRNKDADGDEAMEDTSLPSVPQADVIGGGEANDDDEDETPKLFGLQKIPEEKEPEDNPEDRPEQTVPPPSVTTSKPLFQASNTVGADDRAHTWATQPSIFTNEDQRAWPADAEIGLPITAAPVEKIHRLSGNVPMYSKAILTPTEQAELQHGFGDLRNILLKRTNMCPFQGCRFTWRLDQNEELNIHVFTAHAKRKCPFCDDALFGWWDKNQQIKHLGDKHPDEVKKMKVHGVQKGNISVPVTVNAPANLIGEAFAEEIRSWGPQYKLKAPPRLLTYPLLAWYDNFGTTAVKDPPKKCPIPSCSVPHLEHLSSHGVWTHFKNYHTDLEMDACPFCNLSFYVYGEKDKDGVRTVIPRSIDECIMHLDCHVYQLWDLLEPVVDQPTKVNMPSQGNKDFQTISAEKLESMRAEVVSKTVAAALARTGAATQSVADQSPPPQVSYGHVTDASQILRKCVYFEKCGAYVGSMTEKQYRRHVRVNHPKEISTLSSSSEDETDGEDQASTDDGSEDRGDDKPNDGDDGRDGAGKTAALKFGRLKPTSKPAQASTPSKPKEKAVLGKPPSPPDPDEMDISTDDNVVETESSRSEESAVMISEKTPTTKITTPQTPPPDGDSDTNEESGSSVSRGRRSVKALKSKRKAPTKRAEPDVDEDNTEDNGEKEIDDFDEDGEADGSGSKSSHTEGRGRSAKKAGKRRPRGDDDGDYEDEGDQDDDDFVMAGNNGRRYRRRAPSPDWIKVLGPEDPNFDPEDKMYCSKCLRKAPLRRAKSPNRSPIGRAGEIEAHTDKTKCCRIRNGLGSATGLPNRSGWIPANKLPGTLTSLKEDFLNRYPSYMRTMYPTSSRDHHASVWRSDPNNPENDAWFDVPWPPYEGLPPFPGDWIAPGLPWDDTPEGRQRRAMYIGNRVVDENYQYQSETDSDDDLKPDVNDIPDFQADLNPLKRPAEDEEETSDEPAPKKAKKSKTAATKTPKATGTKKTPAPKKAAAPSKTPAKTRSKAPSKAASKAPSKTPSKAASKTPSKAPSKTPSKAPSKAPSKASSKGPSKTPSRASSRKTTPSKTPSTPSTRPPSEAGDE

SEQ ID NO: 5020 - protein, 500 aa, Saccharomyces cerevisiae
MTKLHFDTAEPVKITLPNGLTYEQPTGLFINNKFMKAQDGKTYPVEDPSTENTVCEVSSATTEDVEYAIECADRAFHDTEWATQDPRERGRLLSKLADELESQIDLVSSIEALDNGKTLALARGDVTIAINCLRDAAAYADKVNGRTINTGDGYMNFTTLEPIGVCGQIIPWNFPIMMLAWKIAPALAMGNVCILKPAAVTPLNALYFASLCKKVGIPAGVVNIVPGPGRTVGAALTNDPRIRKLAFTGSTEVGKSVAVDSSESNLKKITLELGGKSAHLVFDDANIKKTLPNLVNGIFKNAGQICSSGSRIYVQEGIYDELLAAFKAYLETEIKVGNPFDKANFQGAITNRQQFDTIMNYIDIGKKEGAKILTGGEKVGDKGYFIRPTVFYDVNEDMRIVKEEIFGPVVTVAKFKTLEEGVEMANSSEFGLGSGIETESLSTGLKVAKMLKAGTVWINTYNDFDSRVPFGGVKQSGYGREMGEEVYHAYTEVKAVRIKL

SEQ ID NO: 5021 - protein, 323 aa, Triticum aestivum
MSSALDQLKATGTTVVSDSGDFASIGKYKPQDATTNPSLILAASKKEEYAKLIDVAIDYAKQKGGSVDQQVDDALDRLLVEFGKEILKIIPGKVSTEVDARYSFDTEASVNKALHLIELYGEQGISKDRILIKIAATWEGIKAAEILQRDHGINTNLTLMFSLVQAIGAAEAGAYLISPFVGRILDWFKASTKKEYTKEEDPGVLSVKQIFNYYKKFGYNTIVMGASFRNTGEITELAGCDYLTISPNLLEDLLNSSDSVPKKLDASQASSLDIEKKSYIKDEALFRFDFNEDQMAVEKLREGISKFAPVAVTLKGILKEKLS

(The sequence listing continues in the following parts.)
